United States Patent Application Publication US 2016/0078168 A1 - sequence listing, part 10

SEQ ID NO: 213285 - RNA, 79 nt, Homo sapiens
gcgggcgcgcggcaacgggccgggaacccaacaagggagcaaacagagaaagaacccaaacacacagaaaaaccccaaa

SEQ ID NO: 213286 - RNA, 65 nt, Homo sapiens
gcagacgggggaagccaggcaccccccacagaaagggcgaaacccaagagaccagcccagcagac

SEQ ID NO: 213287 - RNA, 80 nt, Homo sapiens
aaaaagcaaaagcgcccaggaggaaagcgaacgcgaaaagaaaagccgagagcagccagaccggcgaagaaagaacgaag

SEQ ID NO: 213288 - RNA, 58 nt, Homo sapiens
gaaacaggcggcggcggggggagcgggaaggacagcgaaaaacagccggagaaaagca

SEQ ID NO: 213289 - RNA, 79 nt, Homo sapiens
ccccgaggcgccgggccggccacaacccggcggagccgccgcagcaaacccggaccggcggggggaaaaaaggagccgc

SEQ ID NO: 213290 - RNA, 58 nt, Homo sapiens
cagacgcagggcgcccccgccaaaagaagacaagagcagaacaagagagagaagggag

SEQ ID NO: 213291 - RNA, 78 nt, Homo sapiens
agaagagacagagaggagcaaacaagaaagggccccacaggcaccccggcagcaggagcggcagggcagcgcaccggc

SEQ ID NO: 213292 - RNA, 70 nt, Homo sapiens
ggaggggcacgagcgccacaaccccaggaggcaacgcacgggccacaggcagccgcagaacaggccgggg

SEQ ID NO: 213293 - RNA, 78 nt, Homo sapiens
cccgagccccgagagacacgcccgcccgaggacacgggagcgggcagcggaagcgaggaaagggcacacggcccgaac

SEQ ID NO: 213294 - RNA, 65 nt, Homo sapiens
ggcgccaaaacgcccccaacccagcgcaaaggaagaggaaggaaggggccggaaccaagaaggac

SEQ ID NO: 213295 - RNA, 74 nt, Homo sapiens
aacaacccgaacaggaggaagaacccacgaaacacagacaagggcaaaggaggaagaacggggaggaagggaac

SEQ ID NO: 213296 - RNA, 41 nt, Homo sapiens
cccgggaaaacacacggccaggcgaccaagaccaggcacag

SEQ ID NO: 213297 - RNA, 75 nt, Homo sapiens
cgcagaaggccggagacaccagcagaaacgcaaaaggccaagcgagaagagaccggaacgccgcaccccccgacg

SEQ ID NO: 213298 - RNA, 76 nt, Homo sapiens
aagagaccgggcagaacccacagaagcagagacaggacagaaagaagagagcgaggggagccgccaccaaaagcag

SEQ ID NO: 213299 - RNA, 49 nt, Homo sapiens
caacagacccagccggcgaccaggaccccggggaacaagaacaaggccc

SEQ ID NO: 213300 - RNA, 87 nt, Homo sapiens
aaagcagcacgcgaggaggaaaggcaccccaccaggcccggcagggcagagacacccaagacacccccagcaaagcagcagacccca

SEQ ID NO: 213301 - RNA, 66 nt, Homo sapiens
gaacgcccgaccaaggccacccacggaaacacgggcaaccgggggagagaaaggccagcacggggg

SEQ ID NO: 213302 - RNA, 67 nt, Homo sapiens
agggaaacggcagcaagagcgcaacggcgacagagagacaggaagaccagaaagcagcagaaaaggg

SEQ ID NO: 213303 - RNA, 60 nt, Homo sapiens
cgagaaacagcgacaagcaagacaggagggcgaaaggaaccagagcagacaagacgcacg

SEQ ID NO: 213304 - RNA, 108 nt, Homo sapiens
cggggggcgggaggggcgggggaagacaaccggcgggaggaaaccagggcggccggaaggaggcggccaaccagggcacggacgcccgccacagcaaggaccgcccga

SEQ ID NO: 213305 - RNA, 70 nt, Homo sapiens
cgggaggacccccaaagagcaacaacccgcaggcaccaagaagaccaacaagcagaagagccaagacaaa

SEQ ID NO: 213306 - RNA, 79 nt, Homo sapiens
ggagcggagaaaaggaacccgccccggaagcagcgacaggagcggagcgccacgggcgccaccagccagaggggcggac

SEQ ID NO: 213307 - RNA, 79 nt, Homo sapiens
agacggacagaccccgcaggacggaaacccacaggcacacccaaggcacacggcacggacagggcgggacgcagaacca

SEQ ID NO: 213308 - RNA, 79 nt, Homo sapiens
gccaaagagcgcaccgccgagcagccagcccaaggagggagaagaccaaagaagagagagcaggaccaccaccgcccac

SEQ ID NO: 213309 - RNA, 86 nt, Homo sapiens
ggggggaaacaggcgaggcggcggcgcccggagggcagcgaggcacaaaaaggacggcggcgagaggcggaagacgcagacgcaga

SEQ ID NO: 213310 - RNA, 72 nt, Homo sapiens
gaccgagaccgcggccgggaccgagggcgaccggcccgaggaccgccgcacgaccaaacgcagaacccacac

SEQ ID NO: 213311 - RNA, 62 nt, Homo sapiens
cccaggaggcccggcagagcagggaccacaagacaaacgagggcccagcaagcaaggagaag

SEQ ID NO: 213312 - RNA, 54 nt, Homo sapiens
gaggggcccgcaccgcaggggacccccagagggaggggagcaggaaagggccaa

SEQ ID NO: 213313 - RNA, 58 nt, Homo sapiens
ggcgcgccccagcagacacgagccggacgagcgggagaggacaccacacaaaaaacag

SEQ ID NO: 213314 - RNA, 78 nt, Homo sapiens
gaaaaggccagggggaaggaaagacagaaacggccagcccccacaagggggccagggaagaacagaccagacaacagg

SEQ ID NO: 213315 - RNA, 72 nt, Homo sapiens
cacagcgaccgagagaagccaaaaccagacggagccacaacagggcacggaaacaggagaaggaccacacag

SEQ ID NO: 213316 - RNA, 72 nt, Homo sapiens
agagaacgaacagacagcagagaaaaaccagaaaagaaggcacggggcggggagcaaaagacacccgcacgc

SEQ ID NO: 213317 - RNA, 70 nt, Homo sapiens
ggggagccggaagggacaggggggacccgcagaagaccagaggacaacacaaggaccgaggcccaagcgc

SEQ ID NO: 213318 - RNA, 68 nt, Homo sapiens
gaggaccacccagaggagcaacccgagaagaaaccgcaagaaagaaagcgggcacaacaacccaaaac

SEQ ID NO: 213319 - RNA, 79 nt, Homo sapiens
acagggccaccgcgagcggggagacgagggaccccagcccgaagaacggagggagcgcacgggcgcgcgggcgcggacc

SEQ ID NO: 213320 - RNA, 78 nt, Homo sapiens
gggaagcgacaggggccgaacaccaggagaaaaaccagaggcgaagaaaccgccggcaacacaaagccgagccgacac

SEQ ID NO: 213321 - RNA, 79 nt, Homo sapiens
caccaggagccccgccaggaggcaagagccccggaccgacccacggcgaggaaccaaagccccggcgcgcaacagaaga

SEQ ID NO: 213322 - RNA, 76 nt, Homo sapiens
ggggaggacccgggacaccgcacagccgggaaagacgagacagaacaccacccggggaaccgaaccagagaacccc

SEQ ID NO: 213323 - RNA, 49 nt, Homo sapiens
gacggccaacacaacaaaaccaagaagagcggcccggccacgaagaagc

SEQ ID NO: 213324 - RNA, 76 nt, Homo sapiens
aggagacgcccagaagaaggccaggaggcgaaagcacgcaaaggcggccacgcacagcacccgagggagagcgcac

SEQ ID NO: 213325 - RNA, 71 nt, Homo sapiens
gcagggaacggacgacaagaaaggacaagccccggacagcgacagcagacaagcaacacaaggggaagacc

SEQ ID NO: 213326 - RNA, 39 nt, Homo sapiens
gacaggaggacaacgggaccgcgggcgcccgcacacacc

SEQ ID NO: 213327 - RNA, 81 nt, Homo sapiens
caagcgccgcgccaggccccagggcgagcacagcacacaaggaccaccaagcagggacagagcgaagaaccccccaagaag

SEQ ID NO: 213328 - RNA, 67 nt, Homo sapiens
aggagccaccaacaccaaaaaggcaaccacccgaagaccaagcgcacccccggaaggcaaggaaagg

SEQ ID NO: 213329 - RNA, 70 nt, Homo sapiens
gccaaagaacccaagaggaacaccaacccacaggcaaaggggccagggggcagcaaggcccaggggggac

SEQ ID NO: 213330 - RNA, 75 nt, Homo sapiens
ccgccccccgccgcgaagcacacgccgccccgacgcgagggcagccccgccagggcaaaggccaagaagggggca

SEQ ID NO: 213331 - RNA, 60 nt, Homo sapiens
ccggccccggggaacagggagcgcccggcgcacagcgccaggagcccaccccggacgaca

SEQ ID NO: 213332 - RNA, 79 nt, Homo sapiens
gggccgcgcagggcggccccggcgggggcgcgggagaaggcaaccaaaggcaggacacaaaaacaaccgaaagaggcga

SEQ ID NO: 213333 - RNA, 77 nt, Homo sapiens
ggcgaggccccggcggggcgcgggagcgccggaccagcgcgagcgccacggcacggccccacccgggcacaccgagc

SEQ ID NO: 213334 - RNA, 61 nt, Homo sapiens
gaaaggccaagaccaggaaaggaagacgagagaaaacagagcgagggagaagagaagaaaa

SEQ ID NO: 213335 - RNA, 79 nt, Homo sapiens
gagacgagagaaacccacgaagacgcgcggagaaagagaccaccgaggggaacaccgcagcaggagacgcgccgaaaaa

SEQ ID NO: 213336 - RNA, 79 nt, Homo sapiens
gcacgagcaacagacgagcgcgccaggccgacagccgcggccgggcccgagcaccaagggcccaccaacaggacccagg

SEQ ID NO: 213337 - RNA, 67 nt, Homo sapiens
agaggaccccggagagcaaggaagaaagcagcccagaccgcaagacaggaaaggaagggacccacgc

SEQ ID NO: 213338 - RNA, 76 nt, Homo sapiens
acgggagggcaagcgacggggagagggacagaccgcaagccggcacacagcggccgccacgcccgccgggaccagc

SEQ ID NO: 213339 - RNA, 85 nt, Homo sapiens
ggcagaaacagagcggcggaaggcgggcgccagaggacaaggagaccaaagagaacaaccccgaagaagggggccaaagggcgag

SEQ ID NO: 213340 - RNA, 74 nt, Homo sapiens
gaaagccaggaacgacaggggaaagaaaccaacagacaagaggccgaagacccggggcaacagaggcgacgcag

SEQ ID NO: 213341 - RNA, 77 nt, Homo sapiens
acagggcacacagcaccgggcgaaaaggaggaaaagaagccagaccgaggacaacagaaaccgggaaggaccagaag

SEQ ID NO: 213342 - RNA, 72 nt, Homo sapiens
agccacagagaggaaccccaagccaagcccaagacaaaaacccgcagaacaagaacggcaggcgaaagaccg

SEQ ID NO: 213343 - RNA, 77 nt, Homo sapiens
gcagcaagaacccagaagaccggacaaggagcgcaggcaagccacagccaggaaacaccagccccccggcacggcca

SEQ ID NO: 213344 - RNA, 76 nt, Homo sapiens
aaaggaacgcccggaaaacacaggggaaaaagaaaagggcgaagacccgaagcagcgcaggaacagaagagaagac

SEQ ID NO: 213345 - RNA, 79 nt, Homo sapiens
agcacagcgcaacagacaaagcagcaacccaggaaacaggaaaggcgaagccgacgagcccgaacagacgcaccagcgg

SEQ ID NO: 213346 - RNA, 79 nt, Homo sapiens
gggcaagcgaaaaaacaacgacaggaccacggaaaacagggccaaacggacggccgagcgcgcggcggccacaaggaac

SEQ ID NO: 213347 - RNA, 74 nt, Homo sapiens
acgcgggagcgagaccggagcgccacggccacgccccccgcaacaacccacaagagaccacagcagacacagag

SEQ ID NO: 213348 - RNA, 81 nt, Homo sapiens
gccggaagaaccgcagccgagcggggccggccacagggcacgaagaacacaaagcaaaaaggaaaagaagagaagaagagg

SEQ ID NO: 213349 - RNA, 58 nt, Homo sapiens
gacaagccccagggaagccacagcaccccagcacccagggaagcagacggaaagcaag

SEQ ID NO: 213350 - RNA, 57 nt, Homo sapiens
gacacccagacgcaaccggccccaccaggaacgggagcgccaccggggcagcggacc

SEQ ID NO: 213351 - RNA, 80 nt, Homo sapiens
cccacggacccagccagagagaacccaccgcaagagaccaaaggccaagagcaccgcagccaccagcccggaacccgcca

SEQ ID NO: 213352 - RNA, 73 nt, Homo sapiens
gacggcgggcgagggaggggaccgccgcggggcccaggcgccccaggagggccagagcgggagacacagaagg

SEQ ID NO: 213353 - RNA, 64 nt, Homo sapiens
cagcccccaccagccccgaggaaaagggcagagcggcgggaaaccaccaacaacacccccaaac

SEQ ID NO: 213354 - RNA, 82 nt, Homo sapiens
ccccgggcagagcgcgcgcgaggccaagaaaagggagcagcacgggagcgaccaggaagaaacaagccgagggagccgccgc

SEQ ID NO: 213355 - RNA, 79 nt, Homo sapiens
aaaaccagaggcgacagagacagcagaagaggaagaagacggcacgggacccccagcacaggcagcaggccgggagaga

SEQ ID NO: 213356 - RNA, 78 nt, Homo sapiens
cgaggcgcggaccgggcccggcgggaagcaggaaaggacggaaacagaacccacgcacccagcgggcagggagaacca

SEQ ID NO: 213357 - RNA, 83 nt, Homo sapiens
agggggcgcagacaaccgagggaggcagacaacgaggaaaaagccaaaggggaccagggcaacccccacccggacacgcgcaa

SEQ ID NO: 213358 - RNA, 81 nt, Homo sapiens
agccgggaggccggccgggccagcacccggccgagacggcggcagcagcggcacaggagcagcacgcggagagcacgacgg

SEQ ID NO: 213359 - RNA, 80 nt, Homo sapiens
cgacgggacgacaaagaggcggcagggaccagcagacgggaagcccaagacacagccccagcagcccccagacccacaga

SEQ ID NO: 213360 - RNA, 72 nt, Homo sapiens
gcaaaaggacaggacaagcaccacggaagacccccgcgcgcgcaccaggggacaggcaccggcacggaccac

SEQ ID NO: 213361 - RNA, 81 nt, Homo sapiens
aggcaagaccgccaccagacgcaaacagcaaagcccagaggagccgcccgcacccaggcggaggcaaggcggaccggcgca

SEQ ID NO: 213362 - RNA, 71 nt, Homo sapiens
cggaccccgaaggagcaggagcgagaccaacgggagccccaaggcgcccagacgagcccaccacggaccac

SEQ ID NO: 213363 - RNA, 75 nt, Homo sapiens
accgcagaggcaaggggccaccaggaggccagggggcgccaggagaaaaccggaagagaaaggccgggaagcagg

SEQ ID NO: 213364 - RNA, 76 nt, Homo sapiens
ccgccgacagacagcagccggggcagcccagcggccgcggggaaagcaacggcgcaagcggcggcggcgggcagag

SEQ ID NO: 213365 - RNA, 74 nt, Homo sapiens
gagcgggcaggacaaccaggggaccagagaggacggcaccagccaggaggagcacagaccaggaggaaaaagca

SEQ ID NO: 213366 - RNA, 77 nt, Homo sapiens
ggccgcgagccggcgcagacgaacagagaacgaggaagaaaaggaaacccaaaaagacaaggccaagcagcaaaacc

SEQ ID NO: 213367 - RNA, 40 nt, Homo sapiens
aaagagaggagaagcgcacgaaggcagagggggcgaggga

SEQ ID NO: 213368 - RNA, 69 nt, Homo sapiens
ccagagaaccgcgccacgccagccaacaggagagcaccagacaacaagccccgggcaaggggagcagac

SEQ ID NO: 213369 - RNA, 61 nt, Homo sapiens
caggggcaagacaagccagaacgagaagcgcaccacagccaagcacacaggaggggacccc

SEQ ID NO: 213370 - RNA, 80 nt, Homo sapiens
gccagaggagcaacccccgccaagaaaagggacaaggagcacagaacgcccaagaaccgagcccaggcccaggcgacaag

SEQ ID NO: 213371 - RNA, 85 nt, Homo sapiens
ccggccagcgcgcggcgggcgagggcgggccgaacgccgagcggggcgggcgccccacacgcccacccgcaccgccaagcccccc

SEQ ID NO: 213372 - RNA, 77 nt, Homo sapiens
ggaaaccggaaggagaaggccaccgggggagcggggggacaggaaagcaggagaaaccggaggaccacaccaacagc

SEQ ID NO: 213373 - RNA, 55 nt, Homo sapiens
gccaagggcaaggagacagaggagaggaagacaccccccccaccgaaagaacccg

SEQ ID NO: 213374 - RNA, 50 nt, Homo sapiens
gggagggccagccgccgccgcaaccaaacgggcgaacaaaaccagccacg

SEQ ID NO: 213375 - RNA, 60 nt, Homo sapiens
ggccccaacacagcgggccacaggcccggagggaaacagaacgacagcccgcaccgacgc

SEQ ID NO: 213376 - RNA, 79 nt, Homo sapiens
cggagcagcaccagacgcccgaccccagacgcagcacaacacgccagaacccagagacgaagaggagcagaaccagaag

SEQ ID NO: 213377 - RNA, 99 nt, Homo sapiens
gcgcggcccgggcagcagggcggcagcgcccgagagaggagcagaccgggccgccgccagagacggggcaagcggacgggaccgcagcacaccgaggcc

SEQ ID NO: 213378 - RNA, 73 nt, Homo sapiens
acaaccaacagaagaaaaacccggcaaacaagagaagagcacagcgccagagaacagccaggggagcaccaaa

SEQ ID NO: 213379 - RNA, 73 nt, Homo sapiens
aagcgcgggaagggaaagaagacccgcggaaggcacacaagacacagccaacaccgaaccgaaaccaggggga

SEQ ID NO: 213380 - RNA, 71 nt, Homo sapiens
cgacagaaagaaaggccaaagcagcaggaccggacagccagagccccaaagcaacccccgaaagagccggg

SEQ ID NO: 213381 - RNA, 82 nt, Homo sapiens
gaggggaggcaggcgcggcagacggcgacagggcggcggcgccaggcagggcgcagacccacggcagggcaaccccaccgcg

SEQ ID NO: 213382 - RNA, 75 nt, Homo sapiens
agacgcagcggccgggaacgcgccagaagaggcaggggcagaacaaagagggaaggcaccaggagaaggcaccgg

SEQ ID NO: 213383 - RNA, 74 nt, Homo sapiens
ggggcaggcccaagaagccaaaaggggacccccaaaagacaagggcaaaacggaccagacacaaagaggagggc

SEQ ID NO: 213384 - RNA, 65 nt, Homo sapiens
ccggcgagaagaggagaggggaaggggaacaaaaccaaagggggcgcaagcagcgaggccaggag

SEQ ID NO: 213385 - RNA, 81 nt, Homo sapiens
aacaaggagaagagccaggaaacaggaggaagaacccaagccaaagcccagacggcaccaggacaagcgagggagacacgg

SEQ ID NO: 213386 - RNA, 72 nt, Homo sapiens
aaacagaagcagagaggagggagagccgggaagagagcacaaggcgagggaagcaaaagcagcaagccacag

SEQ ID NO: 213387 - RNA, 85 nt, Homo sapiens
gccgaccacgcgaccccggccgcggggccaggaagcggaggagccccggaggcagagcggcgccagacgaaacgccaagagagaa

SEQ ID NO: 213388 - RNA, 60 nt, Homo sapiens
aagcccaccccccgcccagaccggccaaggacccagcaggggccaccgagacaaacacgg

SEQ ID NO: 213389 - RNA, 77 nt, Homo sapiens
cccgccaggcgcgcgcccacccggcgcccgcgcccgacgcgcgcccgcggcaaggccgcggggggcagacaaccacg

SEQ ID NO: 213390 - RNA, 69 nt, Homo sapiens
aaaagaagaagaagaccacaaaaaagagacccacagccagcaacaccaaggccgcaaggacgaagagca

SEQ ID NO: 213391 - RNA, 77 nt, Homo sapiens
cagaagcaccgaggacagaacaacagaaacgccgaagggaccaggcagacgggaagaacccagaaagaaaggagcgc

SEQ ID NO: 213392 - RNA, 71 nt, Homo sapiens
cagggcacggccgggacggggacaaggggggcgccggccaagcagaaaaacgcaggcccaaggggagaaaa

SEQ ID NO: 213393 - RNA, 72 nt, Homo sapiens
gagcgaccgaccccaacgcagggaggggcaaagacaaggcaggcggggaaggaaaacagcaacacagagcga

SEQ ID NO: 213394 - RNA, 77 nt, Homo sapiens
ccgggcccgaaagagaccggcggagcacgaggagggagcgcccgcacgccaccgagaggacacaagacccgaaggcc

SEQ ID NO: 213395 - RNA, 74 nt, Homo sapiens
ggaggagagccaacggggggaggaggcagcagcagcgagccccaccgccggccggacccaaacggccaagaaga

SEQ ID NO: 213396 - RNA, 77 nt, Homo sapiens
gcaaggcacgaacggcacgcaaccccgacccagggcaagagacccgcccagccccgagacccccccgcggcggcgag

SEQ ID NO: 213397 - RNA, 79 nt, Homo sapiens
gcccccgagagcggaaacagaaggaagaagaggagaaagacgcagcggaacgaggagcccggacaggccgcgcgcagag

SEQ ID NO: 213398 - RNA, 86 nt, Homo sapiens
gccgaaggcgcccaagcagcagcgccggagcccgagggacggggacggagagaacacgagcccacagcccagccacaacagcccga

SEQ ID NO: 213399 - RNA, 85 nt, Homo sapiens
cccggccgcggggccaggaagcggaggagccccggaggcagagcggcgccagagacaagacaaagcgcaggaaaaggacaggagg

SEQ ID NO: 213400 - RNA, 78 nt, Homo sapiens
gaggccaggcgcggcggcaagcggggcgggagccgcagggagaaaaccccaccccgggcaaagcaggaaagaaccaaa

SEQ ID NO: 213401 - RNA, 83 nt, Homo sapiens
aggacacggcacaccgaccgacgaaccgggcggggcggcccaaggggaagcgggcccggccccgcgggaagggccgccaaccg

SEQ ID NO: 213402 - RNA, 73 nt, Homo sapiens
gacgccggcgccgagggacaccgcagagaggcagagggacaagagaaaaaaagggcgggcgaacaaaaagagc

SEQ ID NO: 213403 - RNA, 58 nt, Homo sapiens
aggaccaacacagacaaagacacacaacaagaggccgcccgccccccaagaaaggcca

SEQ ID NO: 213404 - RNA, 70 nt, Homo sapiens
gacagcaccagcgggccggaggagccagagcgcagaaagagcgaaggcgcggcaccgagggaagaggacc

SEQ ID NO: 213405 - RNA, 73 nt, Homo sapiens
agacccggggacccccgacgccaggcagcgcccccaaacgcacaaccggaggaagagaaggccagcaagaaga

SEQ ID NO: 213406 - RNA, 77 nt, Homo sapiens
aggaccgagcgcccgcccggccacaacagggacgaacgagcgcaggagggacgggagagaacagcacacagaggcgc

SEQ ID NO: 213407 - RNA, 84 nt, Homo sapiens
aaggagcggaggagccacggaaggacgacgacaaacacgcagaggaaggagcagcgcaagggaaggaagaagcgcgaaaacgcg

SEQ ID NO: 213408 - RNA, 82 nt, Homo sapiens
ccgggaagccaacgaccacacgcagagacgagagggccccaaagggaccagggacgcgcccgcgcgggagacgggagccagc

SEQ ID NO: 213409 - RNA, 71 nt, Homo sapiens
ccagcagcggccaaccgcgacagaccgaggacacgagcaccagcagcacggcagcacgcaggcaggacagc

SEQ ID NO: 213410 - RNA, 40 nt, Homo sapiens
cgaggagaaggcccagggagacaacaggagacacggaagc

SEQ ID NO: 213411 - RNA, 80 nt, Homo sapiens
gcggggcccaaggcgccacaaggagccccaagggggggcaggcagcagagaggcccccaagggcgggaaagaaccaggaa

SEQ ID NO: 213412 - RNA, 73 nt, Homo sapiens
gcggggggccgggaggcggagaaaaggggcacccacagaggcaacgaaagcacaaaagaaagggccaccccca

SEQ ID NO: 213413 - RNA, 69 nt, Homo sapiens
accacggccagaaagaccccaaaagacccgccccaggcaaggaacagagccagagccgcagggggagga

SEQ ID NO: 213414 - RNA, 73 nt, Homo sapiens
aacccaccagccacgggcacccacccgcaggagccagaggagccccaccgcccagcggcccggaggcgggcac

SEQ ID NO: 213415 - RNA, 89 nt, Homo sapiens
ccggggcccaggcccagggaccaggcggaggcgcgcgggagccggggcaccacagagagcgggccccgagccccggccccaaagaccca

SEQ ID NO: 213416 - RNA, 84 nt, Homo sapiens
ccaaggcggaggccagcaaggccagcacagccccgcgacaaccagcaaaagaggcggcaaggcagcccaggcaaagaagaaagg

SEQ ID NO: 213417 - RNA, 102 nt, Homo sapiens
gcagaacgccccccggggacccccccaagggacccggaggaagcagcaccagaccaacgccacccccaggcgagcggggacccaaaaccacacagcgacacc

SEQ ID NO: 213418 - RNA, 84 nt, Homo sapiens
agccccggccacgccccggccaccaacagagcgccacccgcggcgggggcgagaggagcggcgcaggccgaaaacgcgcggagg

SEQ ID NO: 213419 - RNA, 83 nt, Homo sapiens
ggccggccccagccccgcaccggacacagcggaggagaagcgcaggagaaaggaggccaggccagagggaccaacgaaggcaa

SEQ ID NO: 213420 - RNA, 42 nt, Homo sapiens
gaagaggagggcccagaagaaaaaggggaaacgaccaccgga

SEQ ID NO: 213421 - RNA, 77 nt, Homo sapiens
cagaaacaaaggagccagaaaagcacaaccagagaccaaccaagaagcgaagaaaagagaaagaaacagacaagcga

SEQ ID NO: 213422 - RNA, 76 nt, Homo sapiens
acaccagcaccagacgcagcaggagacagacccaaaaaacgcccaaggaccccacaaaggcaacagacgacccaaa

SEQ ID NO: 213423 - RNA, 108 nt, Homo sapiens
aaggaacaggcggcgcgcgcggcgcgggacgcgcgcgggcacccacggagccccggggcgcggggacgacgagcccacggcacaacggaccgacagagcagcaaccgg

SEQ ID NO: 213424 - RNA, 38 nt, Homo sapiens
agccaacagagccgagagcaggacgcaaggaccaaaaa

SEQ ID NO: 213425 - RNA, 75 nt, Homo sapiens
ccagaacgaacccccccccccgagcggggcccggcgcacccaccaccgccgcccacggcagcccagggacccgag

SEQ ID NO: 213426 - RNA, 69 nt, Homo sapiens
aacagacacagaacaagcacaaacaagaggcagaaagaaagacaagggcgcacaggggcggcaaccaaa

SEQ ID NO: 213427 - RNA, 76 nt, Homo sapiens
gccggcccacgcgcggccaaggagccccaagggggggcaggcagcagagaggcccccaagggcgggaaagaaccag

SEQ ID NO: 213428 - RNA, 76 nt, Homo sapiens
gcagccgaagaaagcaggccgaaagacagacccccaagccccacagcaaccccacccaggggccagacgggagcca

SEQ ID NO: 213429 - RNA, 82 nt, Homo sapiens
ccggagagacgaaccgaagcgggcgggcccccccacccagagaaggggacgaacggagaccgaaacacagaaaagcggaaac

SEQ ID NO: 213430 - RNA, 76 nt, Homo sapiens
acaggcacccaccaccagaccgaggggggagcccggcggagccgcccagcggccccacccgacgccgaacacgaga

SEQ ID NO: 213431 - RNA, 51 nt, Homo sapiens
aagagccaccagcgacaaacaggaaaggagagaagaggacagaaggaagac

SEQ ID NO: 213432 - RNA, 77 nt, Homo sapiens
ggagaagcaaggcgacgccagaggaggaaaggaagacaagacaaagacggaagaaacccagcaacacaccaaccagc

SEQ ID NO: 213433 - RNA, 80 nt, Homo sapiens
gccaaggcagaacagcaaaaccggacaaaacagaggccaacccagcgcggagacccacacaagggccacacgaacgagcg

SEQ ID NO: 213434 - RNA, 65 nt, Homo sapiens
aagccacgcacaccaaaaaagagacagcaccaggaaacccgggacagaagaaaagcaaagccaaa

SEQ ID NO: 213435 - RNA, 76 nt, Homo sapiens
ggaagcaggggaaagcccgggccaagcgggaggcgccagggccaagacagcagggaaccaaggcccggaagaaaag

SEQ ID NO: 213436 - RNA, 71 nt, Homo sapiens
ccacggccgaaaccccaagccagggggcggagccccgacgcagccaaggcaaaacaccacagacgaaccag

SEQ ID NO: 213437 - RNA, 65 nt, Homo sapiens
gagaggggacaggcggcggccgccgcgcagcgccagggaccaccaggaagaccggacgcagcacg

SEQ ID NO: 213438 - RNA, 86 nt, Homo sapiens
aaggcggaggccgagaccagacgcggagccaggccgaggggcggacgcggccggccggcgcggaagaggccggcggcgggacggcc

SEQ ID NO: 213439 - RNA, 54 nt, Homo sapiens
gaagaggaaggagcgggcccaagaaaagggccggggacacaagcaacagccaga

SEQ ID NO: 213440 - RNA, 54 nt, Homo sapiens
ggagaagccacagccaacgaaggcgaaaaccacaaaccaggaaagcggagcaag

SEQ ID NO: 213441 - RNA, 75 nt, Homo sapiens
gagccccacgaggaggagcgcaccgcgcaagccaacacgggacggcaggggggggcggaaacacacccagcccag

SEQ ID NO: 213442 - RNA, 80 nt, Homo sapiens
aggcacacacaagcacccaagagacaagccccaaaacagagggagagagacggcagagggagaaaccaaaaacaggcggg

SEQ ID NO: 213443 - RNA, 60 nt, Homo sapiens
gggccggcacagcacgcccggcaccccgaccaggcggcagacgcagacaaacaaaacaag

SEQ ID NO: 213444 - RNA, 82 nt, Homo sapiens
cgcccccgggccgcggccgcaggagcacagcaagcgggagcaggcagaccaaaggaacagaagccagggccggaaaaccaga

SEQ ID NO: 213445 - RNA, 68 nt, Homo sapiens
acaggcagcaggaagcacggcgggcgaaacaggacccaagaggagcccagccccaaggaaaacaagca

SEQ ID NO: 213446 - RNA, 69 nt, Homo sapiens
acagacgcccccacacggggacgcggcccaagggcggaaacacaaagaagacaccagaagggccagcac

SEQ ID NO: 213447 - RNA, 77 nt, Homo sapiens
ggaccaagaaccagggcgcgggagagcagccggacccagaccagggagcccaggaggaggaaggaacccgaggagga

SEQ ID NO: 213448 - RNA, 82 nt, Homo sapiens
gacccgggcagaagaggcgggagagcccgccgacagcgcgagcgagggagaccacaaaaggccccagccaccaggagcaggg

SEQ ID NO: 213449 - RNA, 59 nt, Homo sapiens
gcagggcgcccccgacacccaggaacagcggaggaggacagaagcacccaacaggacgc

SEQ ID NO: 213450 - RNA, 68 nt, Homo sapiens
cgcgcgcaccaagcccagcaggggaggaaacgagcgagagagaagagggcacaggggcgacagaagga

SEQ ID NO: 213451 - RNA, 74 nt, Homo sapiens
agcagaggagacaaaccggagaaggagccaagaaagagaaggaagacccagaccaacgaaaaacaacgaagagg

SEQ ID NO: 213452 - RNA, 31 nt, Homo sapiens
caagcgggcccccgaagagaagcaagggccc

SEQ ID NO: 213453 - RNA, 79 nt, Homo sapiens
gcaggcgaaagggaaaaccagaagcgcagaaaaagggacccagacggccaccgagacgacagggcgaacaagccaacag

SEQ ID NO: 213454 - RNA, 80 nt, Homo sapiens
gacccggcccaggccccacaccaccgcacgcgcgcccgccgcccgaggagccccgcgcgccaccaaagccggcacgcaaa

SEQ ID NO: 213455 - RNA, 75 nt, Homo sapiens
cacagagggggaaagccaaggaaaaacggagagccacaaaaaaggaagcgaaaagcacgcgcacccaagccgagc

SEQ ID NO: 213456 - RNA, 77 nt, Homo sapiens
aagaacgagcgggcagccgcccaagcccaggcgaagggagagcggggagcccacaggggcacggggcggagcccagg

SEQ ID NO: 213457 - RNA, 85 nt, Homo sapiens
ccaccgcccaggaccgccggccgggggacgagccggagcagcagccaggaggggcaggagaagccaagagggggagggcagagag

SEQ ID NO: 213458 - RNA, 81 nt, Homo sapiens
gcagcccgagcgacccaggccccacccggcaggaacccaagccccacaggagcggaagaagagagcacagcccggaggacc

SEQ ID NO: 213459 - RNA, 70 nt, Homo sapiens
accacgaaggaacacaagggcgccccagcagaacaggaggcagccccacaaaggacggcacagccagacc

SEQ ID NO: 213460 - RNA, 75 nt, Homo sapiens
ggaacaaaaggaagaagaaacaggccgaaacaacaaagccaaacccaggcagggaccaagaaaggcccagggacc

SEQ ID NO: 213461 - RNA, 69 nt, Homo sapiens
ggggaagaaccacagggacagacaggacgagaggacagaacgaggcaaccaggggaaagaacacagaaa

SEQ ID NO: 213462 - RNA, 70 nt, Homo sapiens
acccaaacggagcccccaagcccaccgagccagaggacggagagagggagccagggaagccccaggaaac

SEQ ID NO: 213463 - RNA, 71 nt, Homo sapiens
gggagcagggaccagcgacgcaccccagggcacggaccgaagagggcggaaccccaggaggaggggccagg

SEQ ID NO: 213464 - RNA, 37 nt, Homo sapiens
gaccacacgcgcacagggccgcagaacaagaacggca

SEQ ID NO: 213465 - RNA, 80 nt, Homo sapiens
ggccgaggagccgccccggcaccagacaagcgagggcaccggggagcgaggcagaggaagcgcgccgaacgggagcccgg

SEQ ID NO: 213466 - RNA, 79 nt, Homo sapiens
aaggaaagcgcaggacagaccaagaggaacccggcgcgcagagaacagaagcgagagcacagacagcgggggcgccccc

SEQ ID NO: 213467 - RNA, 72 nt, Homo sapiens
gcgagcgagggggggcgcgccggaaaccggagcgcgcagcagcgcagaaccggccgaaaagcacaaacagca

SEQ ID NO: 213468 - RNA, 69 nt, Homo sapiens
cagagagagagcggaacgggagaaagcacgggaggagaggcacacccaacgaaaaaagcagaacaagac

SEQ ID NO: 213469 - RNA, 79 nt, Homo sapiens
accccgcacaccccaacggacaagcaggccgacaacccaaacagggccagccccgaggcccagccgcccgccggggcac

SEQ ID NO: 213470 - RNA, 81 nt, Homo sapiens
ggaggccgcccgagggggcgaaggagccccccccagcgccgaaggcccgacccagcagcccggcccggcaccgcagcgccc

SEQ ID NO: 213471 - RNA, 78 nt, Homo sapiens
ggaaacccggagggaaccaagaaagccagagcacagagcaccacgaacaaacagaaagcgcgaagaggggaagcaaag

SEQ ID NO: 213472 - RNA, 85 nt, Homo sapiens
cgagaaaggcgcagcccgccagacccaccagaagcagcagaagaccgaagaagcagccgaacacggagcagaaacgagcgcgaac

SEQ ID NO: 213473 - RNA, 71 nt, Homo sapiens
aagaacgccgagccagaaagaggaagggccaccgcagccacggaaacgagaagaacgaaagagaaacccaa

SEQ ID NO: 213474 - RNA, 101 nt, Homo sapiens
ccccagcgggcggcccgggcacgcgcccgcagcccagaagcggcagcgaaaggagcagaggcgcggcacagaggccaagaggcgcgaagaaacaaacgaag

SEQ ID NO: 213475 - RNA, 79 nt, Homo sapiens
gaccagccacgggagaagggcagcacggcagacaagcggagaaaggcacagcagaagaagaaacagaagaagaagagca

SEQ ID NO: 213476 - RNA, 69 nt, Homo sapiens
ccgcggcaaacaggcggggaccggcgaggagcgaagaacaaacacccgagcgcgagaaacacgagggcc

SEQ ID NO: 213477 - RNA, 58 nt, Homo sapiens
gagcaaaaaacaggaaaaaacacacagggggagaaggaacgcccagaggaagaagacc

SEQ ID NO: 213478 - RNA, 65 nt, Homo sapiens
ccgagcagggggggggggaagccgcagcggaaagcaggagcacagagcggaagaccccaagaacc

SEQ ID NO: 213479 - RNA, 75 nt, Homo sapiens
ggacccagagccacgggggcagcgccgaaccaggaccggacccggacccaaaggccagcaagcggcaaggaagag

SEQ ID NO: 213480 - RNA, 77 nt, Homo sapiens
caagagcggcccaccaaggaaaggggacagcaacagccggcgggcggaaggcgcaaggggacggaaaccaaggaacc

SEQ ID NO: 213481 - RNA, 55 nt, Homo sapiens
ggccgcgggcgacgggccgagggcggaccgaggagggcggacacacccaggagga

SEQ ID NO: 213482 - RNA, 62 nt, Homo sapiens
gcggaccgcgggggagaacggacgcgggacgggcccgagggaagccggcacaccaggcggac

SEQ ID NO: 213483 - RNA, 75 nt, Homo sapiens
agcggacaaaaaaaccgcgaccggccgcccgcacaagccagaggccaacccaggagaacgagaacaagaaaagag

SEQ ID NO: 213484 - RNA, 60 nt, Homo sapiens
cgcagcaaacaccaggagaaaggccggcggcagagaccacgcccagcaggagcggcgcag

SEQ ID NO: 213485 - RNA, 65 nt, Homo sapiens
ccaagacaggaagaaaagaagaagcgaccccgaaggaaacaaagagacgaggacgcgcacaggaa

SEQ ID NO: 213486 - RNA, 85 nt, Homo sapiens
acacagccacacaaacagaacaagcagcacggaccccagagagagcccaggcagcccgagaacacgaagagcgggaccgaaccca

SEQ ID NO: 213487 - RNA, 75 nt, Homo sapiens
gacgcacacaggaaacccagcacaggggaaaaggccaggccaggagcgaaaaaagcgaacgcaaggggccaagaa

SEQ ID NO: 213488 - RNA, 73 nt, Homo sapiens
cagacaagagcaaagcacccaccagaaagaggcacagccccaaaagaaaggcagaggaacccaaagaaaaacg

SEQ ID NO: 213489 - RNA, 81 nt, Homo sapiens
gggagcaccgggggaccgcgcagcggggacgcgaggacccgggcgggccccacccggaaaggagaagagagagccaacgga

SEQ ID NO: 213490 - RNA, 59 nt, Homo sapiens
cgcaaccccacccccagaaacgccccggagcagccaggcacacgggacaagaccacccc

SEQ ID NO: 213491 - RNA, 69 nt, Homo sapiens
aagaagaacaagcggccccgggacagacagggaagacaggcgaacaagaggcgccagcgggcgcgccgg

SEQ ID NO: 213492 - RNA, 70 nt, Homo sapiens
cgccccccgggcgggggagcggcgccagcgccccaaccaggacgcacaagacaaacccaagagagcaaga

SEQ ID NO: 213493 - RNA, 78 nt, Homo sapiens
ggccgggcacggacagggcgaaagccgaccacccggcgaagggaagaaaaggacccccagagagcaaaaacaaacaaa

SEQ ID NO: 213494 - RNA, 72 nt, Homo sapiens
aaaagacaaggaaacgcccgcgggacacgaaaagcccccaccccgcgcacacagcgcaacaaacagccggca

SEQ ID NO: 213495 - RNA, 53 nt, Homo sapiens
acgggggagagccacggaagccgacagacaaccagggcgggaaaccagaccgc

SEQ ID NO: 213496 - RNA, 56 nt, Homo sapiens
ccaggccgcagacgcgaaggaacggcaaaggaagaggaggacgcagcagagagggc

SEQ ID NO: 213497 - RNA, 80 nt, Homo sapiens
agacagaaagagggaaaggaggaacgcaaagaacaccggaaacgccaggccacaagggagcaaacgaaaagccacgaaga

SEQ ID NO: 213498 - RNA, 62 nt, Homo sapiens
ggcgccggccgagaaggcagaggcgaaagaaaaggcagcgaaaggacaggggcgggagccga

SEQ ID NO: 213499 - RNA, 75 nt, Homo sapiens
ggcaacacggacccggacaggacagggcacgcaggaaagcgcaggcaggagaaggacagcagagccacaagggac

SEQ ID NO: 213500 - RNA, 110 nt, Homo sapiens
cgccgcgccgcgcagaaggccggggccggccagaagcgggcggcgcgggggagaggccggcaagaagccaacggagaaccaaggccaagaccagaaccagcccgggaaag

SEQ ID NO: 213501 - RNA, 80 nt, Homo sapiens
gccaagccccaacggcccccgcgccgggcgcagcggcgacgaggcggagacacggggagaggccggggagagaggaagcc

SEQ ID NO: 213502 - RNA, 88 nt, Homo sapiens
aggggccgccacccccagagcgcgggaacgggggcggccgggacggaggacgcgcaggcgccacgggacacggaaccaggaggagcgg

SEQ ID NO: 213503 - RNA, 82 nt, Homo sapiens
agagagacacgcaggaaagccccagccacccacaaacagagagaaggaaccacccacgcaggcaggccaggccacacaagcc

SEQ ID NO: 213504 - RNA, 73 nt, Homo sapiens
ggaacagggcagcgcggacaccagaccgccagcccgcaggccccagacaaacccagacccagaagggaacggg

SEQ ID NO: 213505 - RNA, 68 nt, Homo sapiens
aaagcaacagaagcaaaaggagaaacccgcacgcagcacgaaaagaacaggggggagaaaaggccaag

SEQ ID NO: 213506 - RNA, 77 nt, Homo sapiens
gcgcggagcacaaaagagcccgcggggaggcgcggccgccccgcgggggacgacacggccaaaagaagacccagaca

SEQ ID NO: 213507 - RNA, 56 nt, Homo sapiens
gcaaaaaggcggcaaacgccaaggccggacaagacgcagagagccgacagaccccg

SEQ ID NO: 213508 - RNA, 83 nt, Homo sapiens
ccccgaacgcccacggccggcagcgcccaacaccagcccccggacaacccaagggaaaggagcgcgggcaagcgagagagaag

SEQ ID NO: 213509 - RNA, 97 nt, Homo sapiens
aaaggacaaaagccaagaggaggacagcgcacacagcaagcacgagaccaccacaacccgcaacgccacagcgagaacagaccacccaaagggagaa

SEQ ID NO: 213510 - RNA, 71 nt, Homo sapiens
cgggcgggccgggcgacgccggggggggcggcccgcagcgaaggaccgagccaggacaaaaccaggcagaa

SEQ ID NO: 213511 - RNA, 77 nt, Homo sapiens
ggagcggaaacagcggcagccagaggagaggagccaagcccaacgggacgggaaaacggccacagccaacgacgcag

SEQ ID NO: 213512 - RNA, 76 nt, Homo sapiens
cagcacgaaaccccgcaacccgcagacacagggaaggaagacgaagaagcggggaaagccaaagcaaagaagacca

SEQ ID NO: 213513 - RNA, 90 nt, Homo sapiens
gcagcggacccgcgggagaggcgcagcggaggcggaagcaggaccggggcacggggcagccagcagccggcccgggggcagccaccccac

SEQ ID NO: 213514 - RNA, 80 nt, Homo sapiens
gggaggacagcaccaccggcaaggaggacacgggcaccgacaccgccggggccaagaaggccgggacagcagaaaacagc

SEQ ID NO: 213515 - RNA, 84 nt, Homo sapiens
gccccccaggggagaagggccgccaccgccaaccaccacgcaagaaaccccagagaacacacccagggggagccgggccaagcc

SEQ ID NO: 213516 - RNA, 58 nt, Homo sapiens
gaagaggcaccggaggagcaaacacaacagaggagacaggaggaaagaagcgccggac

SEQ ID NO: 213517 - RNA, 59 nt, Homo sapiens
ggccccgcccgggacgcacccgcagaaggacgggccacgaggcaccggccgcgagcacc

SEQ ID NO: 213518 - RNA, 74 nt, Homo sapiens
agcagacgacaagccgggagcgggcggccaaccagcaaaccaggggacagggaaagcagaaccgcgggaaaaga

SEQ ID NO: 213519 - RNA, 69 nt, Homo sapiens
gaaacaaaacagcagcacagagcccaagcgacaggccgaacacgggacaacaacgcagggcaccgagca

SEQ ID NO: 213520 - RNA, 88 nt, Homo sapiens
agcagccgccggagccagccaacgagcggaccgggacacagaaagaaacgaagaggagcgcggaagaaaacaggccgagagcacagaa

SEQ ID NO: 213521 - RNA, 41 nt, Homo sapiens
gcccgggcccccaacgaggaaagccaggccagaagaaggaa

SEQ ID NO: 213522 - RNA, 73 nt, Homo sapiens
aggaccccagccgcgcccgggagagcaaggacgaagaggaggaggaaggcacagaagaaaggccggaagacga

SEQ ID NO: 213523 - RNA, 81 nt, Homo sapiens
agcacaccggcacaccggggaagcggcccacaccacaaagcccccgccacggaccggaggccccgagccccggccccaaag

SEQ ID NO: 213524 - RNA, 64 nt, Homo sapiens
cccagcggaccgaacaggccaccacggcccgagagacagagaagcgcgcggcagaagccagccg

SEQ ID NO: 213525 - RNA, 67 nt, Homo sapiens
cggacacgcacagcggaagaaaggcaggagagagaacacagaaaccggcggggcggaaacagggagg

SEQ ID NO: 213526 - RNA, 75 nt, Homo sapiens
ggacaggaaggcaaaggggaagggccgcgggcggcggaaggggccgccggcagagggagaaggggggggccccag

SEQ ID NO: 213527 - RNA, 73 nt, Homo sapiens
caaagcaaaagccggacagcaggacacaaaccaaaacgaggaaacgacggacacccacagggcaagcaggcga

SEQ ID NO: 213528 - RNA, 32 nt, Homo sapiens
caaaagagaagacgaaacaagcccacaagagg

SEQ ID NO: 213529 - RNA, 87 nt, Homo sapiens
ccgcaggaccggcgggcgcgcgcgaggacagcagcggacggccggaccaagaggcgccgccccccagcaaacgagaaaaacccagcg

SEQ ID NO: 213530 - RNA, 103 nt, Homo sapiens
cccaccaacaccgaaggaaggccggaaccgggccgagacgcggggaacccggagcaacgggaccccaccgcccacaaccacaaccagcagaccaagggcggac

SEQ ID NO: 213531 - RNA, 78 nt, Homo sapiens
gaggaggggcggcggggaggggggcccgcagaccgaccggcaggggggaggcaccacccaggaccgcggcgcagagcg

SEQ ID NO: 213532 - RNA, 58 nt, Homo sapiens
acggcacacagagccaggacagagcgggagccaccagcgccaaagggaagccaggagc

SEQ ID NO: 213533 - RNA, 72 nt, Homo sapiens
acgagaccgggccccccgaggcgggcccaccgccgcccccgaacaaagaacagagcccgcaaggcccggaca

SEQ ID NO: 213534 - RNA, 36 nt, Homo sapiens
gagcgggcggccaagacaagaggcggagccgagcca

SEQ ID NO: 213535 - RNA, 79 nt, Homo sapiens
aagagaagccaaggccgaagccgagcagaggacaaaacaagagggccagccggacagcaaggaccagcaaaaggaccgg

SEQ ID NO: 213536 - RNA, 73 nt, Homo sapiens
aaacacaagcagaaggagcgaagaagagggagggcagaacgacgaaagacggacaggacgagggagagggcga

SEQ ID NO: 213537 - RNA, 74 nt, Homo sapiens
gaacacccacagagggagcgcaggggaaggagagacagagagaggagaaagcggccaaccccagaagagagaac

SEQ ID NO: 213538 - RNA, 80 nt, Homo sapiens
agcacaaaacagagagagcacacgccaaggaggccgcaggcgcgacaggacagagaagagcaagagggcgaccaggcaac

SEQ ID NO: 213539 - RNA, 72 nt, Homo sapiens
caaaacggcgaagcccaccagacggagcgaaccaccgaaggcacggaggagcagacagacgccgagaagcag

SEQ ID NO: 213540 - RNA, 81 nt, Homo sapiens
cgggaccccgccgcgcaaaaaccgaggaaggagagggaccggaccaggcacgcagcacgggggcaggggccgacccagaac

SEQ ID NO: 213541 - RNA, 85 nt, Homo sapiens
gagccgagccgagcggagccggcggagcccggaacacccgggcgcgccgagcggcccacggccaaggagcccgaagcacaagcac

SEQ ID NO: 213542 - RNA, 95 nt, Homo sapiens
cgaaacacggggaacaaacggcaagagccagaagcccggcggaaggggaaaaagaaaagggcgaagacccgaagcagcgcaggaacagaagagaa

SEQ ID NO: 213543 - RNA, 72 nt, Homo sapiens
cggcggaaaggacagcagagacgagacgagacagaccggacgggagggacgggagggacgggaggcccacgc

SEQ ID NO: 213544 - RNA, 81 nt, Homo sapiens
agaagccaagaagggaagagaacccaacagcccaagaaacagagcaaagcagcgacaacaaagacagaggaagaaaaacag

SEQ ID NO: 213545 - RNA, 67 nt, Homo sapiens
aaaacgcccagccaagaggagcgcgaaggaaaagacagggaaagaagaaagcaccccgcaaaagaag

SEQ ID NO: 213546 - RNA, 71 nt, Homo sapiens
cccccagcgagccagcggagcgcgacacgcgcgcggcaggacacacgcgcccaagacgcggagacgaaagc

SEQ ID NO: 213547 - RNA, 76 nt, Homo sapiens
aaaccaggaccagaggccagcccacagcagaagggaacacaggccgagacaaagccagaaaacagcggcaccggag

SEQ ID NO: 213548 - RNA, 55 nt, Homo sapiens
gaagagcaccgggagcggcgaagaggcaccggaggagccgagggccggggagcag

SEQ ID NO: 213549 - RNA, 71 nt, Homo sapiens
cacgcaccgggcggcccggaacaaggcgcggcccggaacaccgcagcgagagaaaccacgacaaggacaac

SEQ ID NO: 213550 - RNA, 58 nt, Homo sapiens
gaaggcggaaacagcccgcaaaggcaacagcgaagcaaaacgcgcagagcaggagcaa

SEQ ID NO: 213551 - RNA, 75 nt, Homo sapiens
cagcaaaaaagagaggaaggagaagcagaaaacaccacaggagagagagccggaagagccggccagacacaaccc

SEQ ID NO: 213552 - RNA, 74 nt, Homo sapiens
agcccgaagaaaagggaaaacgcgcgggccaagggcaaggagagccaagcggaccaagaaggcaagagaggaag

SEQ ID NO: 213553 - RNA, 72 nt, Homo sapiens
aggaccaagaaccagcgcgggaagcccgaaagagagacagaaaggcaaagacagcaaacaagagaagccaag

SEQ ID NO: 213554 - RNA, 59 nt, Homo sapiens
gaaaggacaagcaggccacgagaaccgaaggacccagacaggaaaaacccagggcaggg

SEQ ID NO: 213555 - RNA, 38 nt, Homo sapiens
accagaccgccaagggcgggccggcaaagcaccaggca

SEQ ID NO: 213556 - RNA, 37 nt, Homo sapiens
ggacagaggcgacacgcaggaccacccgcacccaggg

SEQ ID NO: 213557 - RNA, 88 nt, Homo sapiens
gggcgagcgaggaggaggcggagcggggcccgacgaaacccgagaggagcaggagcaaccgacaggcgggccggacagcgcgcccagc

SEQ ID NO: 213558 - RNA, 73 nt, Homo sapiens
aaaccccaggagggaagaaagcaaacccggcgcccagagacccccgagggcccagaggagacaggggaaccag

SEQ ID NO: 213559 - RNA, 85 nt, Homo sapiens
gggcacagccacggccccgggggaacacaaagacgagcccacagcccgggccccccgagcggacggaccggagcccacgacaacg

SEQ ID NO: 213560 - RNA, 38 nt, Homo sapiens
aaagaagcccggcagaagacaaggccgcgaaccagggc

SEQ ID NO: 213561 - RNA, 72 nt, Homo sapiens
gcagaaacccaccagacggccagacacacggccccgaaccgaaacacaccaggagagagcgcgcagagaaca

SEQ ID NO: 213562 - RNA, 75 nt, Homo sapiens
ccccgagcccccggagccgaccgcacgcgggcgcgagaacggccgcccgccgcagcggaggaagaaagggcaggc

SEQ ID NO: 213563 - RNA, 79 nt, Homo sapiens
agcaagaggcagacagaccgagacgggcaaccaacaagaaacagacacaccgcacaggaagaaggagagacgaccacgc

SEQ ID NO: 213564 - RNA, 76 nt, Homo sapiens
aaaagagcccgcaagaagaacagagacagcagccaaacccccaggaagcggcgcgggcccccccacccccaagaac

SEQ ID NO: 213565 - RNA, 76 nt, Homo sapiens
gggcaaacgccggacagccacaaagacccccagacacacacacccaacccaaaccaagggggaagaaggaggccgg

SEQ ID NO: 213566 - RNA, 48 nt, Homo sapiens
ggaggagcccagaccgggcgacccgcccccagagcacaacccaaagga

SEQ ID NO: 213567 - RNA, 69 nt, Homo sapiens
ggcacaggccgaccgcgcggccgcagccaagccggaacaggagcggcgagcccaaacgcaagggggaag

SEQ ID NO: 213568 - RNA, 87 nt, Homo sapiens
cccagcccccagcccagcgcagacccgaccagaggaagaggagcaggacggagggagaaggggccacacggaagggccgaggaggag

SEQ ID NO: 213569 - RNA, 79 nt, Homo sapiens
gggccccaggacggggacagggccgaaggagaaagacagcaaagaaaaggagaagaaaggaaaaaaacaaccccgggca

SEQ ID NO: 213570 - RNA, 70 nt, Homo sapiens
agagagagacagagggaaccggcagggcaagcggcgacacacgacgggagcaaaggaagagacgaaaacc

SEQ ID NO: 213571 - RNA, 68 nt, Homo sapiens
aaaggagagaggagaagaaaggagaagaagaccgagaggaacaaagacagccgaaacacacaagagga

SEQ ID NO: 213572 - RNA, 72 nt, Homo sapiens
agcaacgcccccccacacacagaagaggggcccgcggcccagccccagggagaaaacacaggcagcaagaag

SEQ ID NO: 213573 - RNA, 82 nt, Homo sapiens
ggagagagacgaggaggcggggagaaacaggcagcaaggagcagaacagaacacaaaagcaaacaggaagaagggacgggca

SEQ ID NO: 213574 - RNA, 84 nt, Homo sapiens
aaaccgaagaacagcgggaaagaaggcaaaacacggcaaacagcgacaaagagcaaagaagcacgaaaaacaaagaagagccaa

SEQ ID NO: 213575 - RNA, 77 nt, Homo sapiens
aaccccagcggcagaacgcacagagggagagcagggggagaaagggagcagaaacgggagaaaggaaagaagaaggc

SEQ ID NO: 213576 - RNA, 73 nt, Homo sapiens
accccgagggaaacaagaaaacacaaagaggcagcaaaggagaaccagccaaaaaagggcagaaccgacaacg

SEQ ID NO: 213577 - RNA, 79 nt, Homo sapiens
gagaccagccaagaagcagaggagccagaaggggcagaccaacaccacccagcaaaaaccccgacgaacgcgccaggga

SEQ ID NO: 213578 - RNA, 74 nt, Homo sapiens
cgccaagagaagaagacgggcgcaaacagagcaggaccgcagggagaaagagccccaagcccgcagccccagaa

SEQ ID NO: 213579 - RNA, 87 nt, Homo sapiens
gcaaaagcgcaaccagaaccagacgaggccgccggcccaggcggagacaggggaccacagccacacagcccaacccccaggcacaag

SEQ ID NO: 213580 - RNA, 69 nt, Homo sapiens
acaaagggaggcggaaccagacagacaaggaacagaacaaaaaggaacgggagaagcaagagagagagg

SEQ ID NO: 213581 - RNA, 96 nt, Homo sapiens
cgcagacggcgcccagcaacacagaagccgacaaggcgcaagcgaaaacagaccgcgagcccagaggacgcaacacagcaaccaaccccaggcaaa

SEQ ID NO: 213582 - RNA, 62 nt, Homo sapiens
ccaagacaagcgacgaaaagcggaaggggcagcgcggagacgagaaaggagcggccgcgccc

SEQ ID NO: 213583 - RNA, 52 nt, Homo sapiens
ccccgggaagagaagacagcagagaaccacaagaagaagagagggcgaagga

SEQ ID NO: 213584 - RNA, 73 nt, Homo sapiens
agccggccaaacaacaagcagccaaccgccgaaaaaaggacaaagcgaggcgaccgagaaaggaaaaaagagc

SEQ ID NO: 213585 - RNA, 69 nt, Homo sapiens
caacgagacaagagggcacggcaaacgaagaaaacgacccagccagaggacaaaggaccgaggacaggg

SEQ ID NO: 213586 - RNA, 69 nt, Homo sapiens
cgagccgagcggccaggacgacgaggagcagggccgacgcgcagcacccgacagcacaaaggcaagaaa

SEQ ID NO: 213587 - RNA, 51 nt, Homo sapiens
gcgagcagaggcggcagccagcgaggggggccggggcaaagaccggcaaga

SEQ ID NO: 213588 - RNA, 75 nt, Homo sapiens
cggcgacgaggggcgccacacgcgcagcccgagaacacgaaacaaggaagaaagaagcaagaaaaacagaccggg

SEQ ID NO: 213589 - RNA, 75 nt, Homo sapiens
gcaagacacaccggaggcgacggccaggccacaggaaacaaagccagaccgccgaggggggacgaacccaggagg

SEQ ID NO: 213590 - RNA, 82 nt, Homo sapiens
gaccgcccgcagaaaagaggaacacagagagagacaacgccacgcgggcccaggagcacagagcgacaggcagcacgaacga

SEQ ID NO: 213591 - RNA, 57 nt, Homo sapiens
gcgaggggagcaccaggaccgggccggaacgagacgcacgaacccaaggaaagaccg

SEQ ID NO: 213592 - RNA, 77 nt, Homo sapiens
caaaccaaggacggggaccgcacacccaaggaaacccaccagagaaggcgcggccacccaggacccgggggaggcag

SEQ ID NO: 213593 - RNA, 74 nt, Homo sapiens
caaacaccccaaccaaagccaagaccccgcgagcaaaggaggaggaccacaccaaaagagcacagggcaggggg

SEQ ID NO: 213594 - RNA, 72 nt, Homo sapiens
aagacccacacgaccgaaaaccagacgagagacagaagacgaaagggcaagaaagagagcacggacaagagg

SEQ ID NO: 213595 - RNA, 70 nt, Homo sapiens
ggaaacagaaagaacgaggggccacggaccaaccgagagcaccaggcagaacaagaagggcaaccagggg

SEQ ID NO: 213596 - RNA, 74 nt, Homo sapiens
agaggagaaagccaaggaaaagagaaacagggaaaaaaacccacaaaaccgcggaccagaacgaagagaccaag

SEQ ID NO: 213597 - RNA, 84 nt, Homo sapiens
gaccgaaaccagccccggacgagaagcgcagcaacggcgggggaccacgagagccccagaaccgggacaacccagcaaacaggc

SEQ ID NO: 213598 - RNA, 79 nt, Homo sapiens
agaagacgaacaaacagcaagaaagaccacaagaccagccgcgaagaggaaacaaaagcgcaggagagaccaggccgga

SEQ ID NO: 213599 - RNA, 70 nt, Homo sapiens
aagacgcggcggcggcggcggaggagagccgcagagcgcgcagaccccgcagcacccgcggccgccccga

SEQ ID NO: 213600 - RNA, 71 nt, Homo sapiens
cgaggagcagacggcgcagcagcggaagcaccaggagcagcgagccagcaaacacccgccgccggaccgcc

SEQ ID NO: 213601 - RNA, 74 nt, Homo sapiens
acaccggaaccaggaagaaaagagcaagcaacccaaggaacaacagaaaaaacaagagaggaagcccagaggaa

SEQ ID NO: 213602 - RNA, 55 nt, Homo sapiens
cagaggagggcccagagcgcgagggggacggaggaagaccagcggagccgaccca

SEQ ID NO: 213603 - RNA, 60 nt, Homo sapiens
cgcccaccgcggagcgacgggagagaagcgccggccggaaagaagacggggaggagcagg

SEQ ID NO: 213604 - RNA, 76 nt, Homo sapiens
cgacccaaagggaaaacagaaacagaggggaaagaaaaagagcccaccaaaaggaacagacggccccaggcggaca

SEQ ID NO: 213605 - RNA, 72 nt, Homo sapiens
ggccggaagacccgccccgggacgagcccccccgcaggccccccagaccgcaccaaagcccccgaggaagac

SEQ ID NO: 213606 - RNA, 86 nt, Homo sapiens
gaggcagcccgcgggcccgagggccggcacaggagccccacagccaccgggagggacgaacagcggggacgccccagcagaccgcc

SEQ ID NO: 213607 - RNA, 80 nt, Homo sapiens
cgacggccgcggggaccggagcgagaggagcgcgccggaccagcgcggacacacggacccgaacaaagacaaagacaaac

SEQ ID NO: 213608 - RNA, 81 nt, Homo sapiens
agcggccgcccccccagcccaccagcggccacaaacgcccggggccaagagaccggcaaacccgaacacaaaccagcaacc

SEQ ID NO: 213609 - RNA, 74 nt, Homo sapiens
gccaccagcaggggcgacaacagcacagccggagaaggcaaagacaacgacaggcccggaagcaccaaagggaa

SEQ ID NO: 213610 - RNA, 67 nt, Homo sapiens
cacaacccgcgccggccgcgggaaggagaggaaacaaacagaagcgcacgagaacccaggccgcaag

SEQ ID NO: 213611 - RNA, 116 nt, Homo sapiens
aggcggaaaggacccggaaaggccaagacaaaggcggcccgccgcagagagccggcgcagcacaggaaaaaagaaaaaggaagcacggcggaaaagccccagccgaaaaccacagg

SEQ ID NO: 213612 - RNA, 81 nt, Homo sapiens
gcccccgcggaggaaacgcagcggcgaacagcgggaaggaacggcgcggagccagacacggaacacgagcagcaaaaggga

SEQ ID NO: 213613 - RNA, 72 nt, Homo sapiens
cacggaagggaggcacaacaagaagcagagggaagcggcaggagcaaaacggaccaaggagaacaggcgcca

SEQ ID NO: 213614 - RNA, 70 nt, Homo sapiens
aaaaggcacggaggccgaaaacggaaaaagccgagagaagaacagggaggaaaaggccacacagcgcaca

SEQ ID NO: 213615 - RNA, 70 nt, Homo sapiens
cggaaagaccaaagaaagcgacaaaacagaaaagaaaaaagaaacaaccgcagaacaaagaagccacaga

SEQ ID NO: 213616 - RNA, 69 nt, Homo sapiens
acggaaggaacggaggccccggacggagaaaaagaggagggacaggggagggcgaaacccaagaggaag

SEQ ID NO: 213617 - RNA, 79 nt, Homo sapiens
ccacgagcggaggaggagaaccgccagagcccacgcaggagacgggaggagcgacaacggagcacacccaccccgcgca

SEQ ID NO: 213618 - RNA, 77 nt, Homo sapiens
gagcaccgggagggaccacggaccccgcggggacgcggaagagacagcagaacaagagccaggaccggacaggaagg

SEQ ID NO: 213619 - RNA, 54 nt, Homo sapiens
cccaaccgccacaaggccgacgaacccagcaaaggagccaaaacacaccggaag

SEQ ID NO: 213620 - RNA, 128 nt, Homo sapiens
cccaccccaccgccagcggaacccggggacacgacgccccaaaccgccaggagaaaaaagaaggccgggacagcagaaaacagccagcagaaaaagccaaaaagcaagcggacaaaagaagaaacaag

SEQ ID NO: 213621 - RNA, 76 nt, Homo sapiens
acggaagccaggggcacgaaaccggcaaaccggaagggaagcgcgaacaaggaccgaacccgccgcccccccggcc

SEQ ID NO: 213622 - RNA, 70 nt, Homo sapiens
ggcaccaaaggcgacacaagcccgggcggccaccagagaccacgggaaccccggaaaaggagacagaagc

SEQ ID NO: 213623 - RNA, 66 nt, Homo sapiens
cgagcacaccccccccccagcaccaagccagaagagaaggaaccgggggaaaggcgacgccaggag

SEQ ID NO: 213624 - RNA, 53 nt, Homo sapiens
ggcaagcacaaaaggggccagaagggccccacaccaaaccgccacgcaacaga

SEQ ID NO: 213625 - RNA, 97 nt, Homo sapiens
ccaaggcccagcggagcaagaggagagccggcaacaggacccggacccaaaggccccacgggaaccggcaaacaaggccccggagcaaggggaacgg

SEQ ID NO: 213626 - RNA, 104 nt, Homo sapiens
gagagcccgggaccgccaggccaccaccggccgcccagccaggacgcgcccggagaagaggggaaagaaaaagagcccaccaaaaggaacagacggccccaggc

SEQ ID NO: 213627 - RNA, 75 nt, Homo sapiens
agcacacgacagccagccaacgaagagagagaaggagggagggaaaccaagacagcaaaaccgccggagcgaacg

SEQ ID NO: 213628 - RNA, 77 nt, Homo sapiens
gccgaggccgggaggccggcccggagacaagaggaaaagggagaaccaacaaagagggcaccacgaaacaaagcaag

SEQ ID NO: 213629 - RNA, 83 nt, Homo sapiens
ggcggaagacagcggcgaggagaacgcccgcggacgacccgagggggaacgcacacccccaggcaggaccaggaacacagcac

SEQ ID NO: 213630 - RNA, 78 nt, Homo sapiens
ggacaaggccaccagaagccaccgggaagagcgggaccggcccggaggaggggagagcgggccgaagaaacagaggga

SEQ ID NO: 213631 - RNA, 79 nt, Homo sapiens
cacaggcccacgcacccgcggcacaggccgggccgacccaggcggcgggaccagaagggcacaaagacacagaaaagac

SEQ ID NO: 213632 - RNA, 66 nt, Homo sapiens
ccaccccgccgggaaaggacagcagaccacagcccggcaggcccaaaaacccaaagggacagaagc

SEQ ID NO: 213633 - RNA, 83 nt, Homo sapiens
caaggagggcgaagagcgaggagacgaacagaaggcggagccaggccgccccagaaagcgaccaccccaccgccagcagacag

SEQ ID NO: 213634 - RNA, 71 nt, Homo sapiens
ggacgaaccgaccgagagcgcagacccgaaagaagacggcaaaaacagcaaaagaaaagaaaaaacaagaa

SEQ ID NO: 213635 - RNA, 77 nt, Homo sapiens
ggaacagaggaagacacacggcccccagccaggaacaggcgagcagcgcgcaaagagagaaggcgggaccaagaaga

SEQ ID NO: 213636 - RNA, 39 nt, Homo sapiens
caggccacgggaggaaaggagggggaccggccaagcaga

SEQ ID NO: 213637 - RNA, 77 nt, Homo sapiens
gccgcacgcggggcagcccgaggcgcaccaggggccgccgcacgccaacaggggaagcgaagaggaggcacccggac

SEQ ID NO: 213638 - RNA, 77 nt, Homo sapiens
caaccgggacacccggcgcaccgccacccgcgagcccaccgccaagacggaaaccagcaccccgcggagccccagag

SEQ ID NO: 213639 - RNA, 71 nt, Homo sapiens
acgaggcggccccagggaccgcgaggacgaaggggacagaggggagccgggcccgcagggccccggaccgg

SEQ ID NO: 213640 - RNA, 76 nt, Homo sapiens
gggccgcgaaccgcagacagcggccaagaagacacaaaggacggaggcacgacaacggcaagcggagaagagcaag

SEQ ID NO: 213641 - RNA, 56 nt, Homo sapiens
acggcgaaaaagcagggcaaaggagaacccgcaacacaaaccccaccaacaaagac

SEQ ID NO: 213642 - RNA, 71 nt, Homo sapiens
gccggacggcaccccccgcaaggcacgagaagagaagcccagagcaaaacaccccaaaccagaccaccgac

SEQ ID NO: 213643 - RNA, 81 nt, Homo sapiens
gcccggcaacagcagcaaagaagaccgacaaggaaggaaacaccaagcaggacaggaaaagccagagagcggcagagaaga

SEQ ID NO: 213644 - RNA, 39 nt, Homo sapiens
aaaacaggaggacacaagaacccagggaccagggcgccc

SEQ ID NO: 213645 - RNA, 76 nt, Homo sapiens
agcaccagcccagagggaaagcacaccaccccagccagaaaagaaccaggcaacacaaaaggccgccacagaagac

SEQ ID NO: 213646 - RNA, 78 nt, Homo sapiens
ggggaccaggggagcccgagcgcagaccgagcaacaaacaagcgcacgcacaagaccaaggggaaacggcaccacaag

SEQ ID NO: 213647 - RNA, 73 nt, Homo sapiens
cacaacaagcccagcgagacgacaccgaggccagccagccagaccagcagcacagccaccgacccagaagaca

SEQ ID NO: 213648 - RNA, 81 nt, Homo sapiens
ggcggagccacgcacccagcagcagggacccaggaagaccacccgcgcacggaaagccgccacagaagacgaaggaggaaa

SEQ ID NO: 213649 - RNA, 79 nt, Homo sapiens
cacccccggcgggcccgaggcggcgagagaggcaggcggagccgaccgggccaggggggccacgaagaaaagaagccgg

SEQ ID NO: 213650 - RNA, 76 nt, Homo sapiens
gaggaaagacagacccaccaaaccagccgaaaggagaaaggaaagggcggcaggaagacaggaaaagagaaacagg

SEQ ID NO: 213651 - RNA, 76 nt, Homo sapiens
caccaagggcacagggggccaaggaacgcaccaggcaggaaagacaaggccccagcagcaggcaaagggaaggcac

SEQ ID NO: 213652 - RNA, 74 nt, Homo sapiens
aagaagcgaaaagcaaaaaacggcaagggcggagaacggaaaagcaccaggaagcagagaggaccgcagaaggg

SEQ ID NO: 213653 - RNA, 78 nt, Homo sapiens
aacacaaacccaaacccaagccaggaggcaacggaccgccagccagcagggcgacagccaggaagccacagacccaag

SEQ ID NO: 213654 - RNA, 74 nt, Homo sapiens
cgcagaaaggcggaacggaccaaccagcccaagaaaaccacccagcacagccaggaggggcccgccgggcgaag

SEQ ID NO: 213655 - RNA, 89 nt, Homo sapiens
cagggaaccccaagccaacggaggagacaaccgagagaagaaagacgggacaagggcacacggcaccagacagccgcgaagccagagga

SEQ ID NO: 213656 - RNA, 77 nt, Homo sapiens
ccagggccggaaaagccaacgccggcgaagagcgcgccgaccacgccagcgcgcgggcccggcccaggcgcacggca

SEQ ID NO: 213657 - RNA, 83 nt, Homo sapiens
gcacggagaccagcacccaccgaaaagagccgacaaccagcgccgcgccacagaacgagcaccgagcgcagaaccggccgaaa

SEQ ID NO: 213658 - RNA, 75 nt, Homo sapiens
cggaggagcggggagggggacacacaaccgcccagccggcgagggacgccgcaggagccaaaaaccgaacacccg

SEQ ID NO: 213659 - RNA, 70 nt, Homo sapiens
acgccgggacagacgggcgcacacaagagagggccgggcgggaagaaaggaaagaggagaaagaacacgg

SEQ ID NO: 213660 - RNA, 80 nt, Homo sapiens
cccggccgcccgcgccagcaagaggacgccgccggagcccagaagagacaacagccacaagggacaaaaggaagacaagg

SEQ ID NO: 213661 - RNA, 73 nt, Homo sapiens
ggagggggcaaccagaggggccaacggacgacagagaaagagagacgagcgcacagccgaaggagcagcggca

SEQ ID NO: 213662 - RNA, 56 nt, Homo sapiens
agcacgaccagcaggaacggggagccgccaccaaaagcagacggaaaacccacggg

SEQ ID NO: 213663 - RNA, 57 nt, Homo sapiens
ccaccccacgaagaagggggaaaacaaggccagacaggaagggcccggaggggccgc

SEQ ID NO: 213664 - RNA, 78 nt, Homo sapiens
cggcagggggaggagcggccgaagacaaagagagaagcggggaagaaagcaaaagcagagccggagccagcaccaccc

SEQ ID NO: 213665 - RNA, 56 nt, Homo sapiens
ggacgggggggcggcccggccccgcagcgggaagaacaacgcaccccgaaagcgcc

SEQ ID NO: 213666 - RNA, 75 nt, Homo sapiens
aaaaaagggaagaaaggggcacacagaaagggcgagcagccccccccccccgacccaccacgggaccagggagag

SEQ ID NO: 213667 - RNA, 39 nt, Homo sapiens
gagaaaggcacagcgaacgccagaggagccacccccccc

SEQ ID NO: 213668 - RNA, 71 nt, Homo sapiens
caccgcccgcgcgagggaggaagagaacacccaccggcacaacacacaaaggaaagccaaagaagccggaa

SEQ ID NO: 213669 - RNA, 77 nt, Homo sapiens
cgaagaagggcccccggaagaaccgaaggacacacagaaagaagagacacaccaggcaacagagacgaaaggacaga

SEQ ID NO: 213670 - RNA, 75 nt, Homo sapiens
ggagccgccggaggaccgggacaccgcggaagcgggaaagcccggcaaccacagagcgcccacaaagacacagga

SEQ ID NO: 213671 - RNA, 80 nt, Homo sapiens
cagggccgcccaagccccagaggccaggcagggagcagggaccagcgacgcacccgacaaaggccacagcggagagcaaa

SEQ ID NO: 213672 - RNA, 78 nt, Homo sapiens
ggggaaagcaagcagaagcggagaaaagagaaacagcgaggccgcagcaaaggcagccacaggacagaaccggcagga

SEQ ID NO: 213673 - RNA, 81 nt, Homo sapiens
caaagagagggcggcgcggaacaggcagggcacagaaacacggggaggagagacaagcgaccagaagagaacacagagcag

SEQ ID NO: 213674 - RNA, 81 nt, Homo sapiens
gaagaggaaaacgcaaaagcaccacgaccagagcagcgccacgcccagagcagaggacggacccggaggacggaacaaccg

SEQ ID NO: 213675 - RNA, 73 nt, Homo sapiens
gaaacacaccccagaacagcaaccacaacaggcacaaagagagaaggaacacccacagggcagacagagaaag

SEQ ID NO: 213676 - RNA, 90 nt, Homo sapiens
ggagcgcggaccggggccccggaacccgagcggagcgaagcgcaggcgcggggcgcggagcgggaggaacaaggcagaggaagacccagc

SEQ ID NO: 213677 - RNA, 51 nt, Homo sapiens
aaggaccaagaaccagggcagaaacgaagcacaggaacaagaagccaaaaa

SEQ ID NO: 213678 - RNA, 81 nt, Homo sapiens
ggagcgcgaaggccgggacccggccccggcccacaggggggggcaaacccgagagaacgggaaaaccaggagaaaaggaac

SEQ ID NO: 213679 - RNA, 80 nt, Homo sapiens
aaagggggccaccagacggagacagcggacaccaggacgggcaagccgggcccagaccagcccgggaacacccgcagcgc

SEQ ID NO: 213680 - RNA, 76 nt, Homo sapiens
gaaggggaagacgcgaagccacccaagaagcgggccgcgcaaagggcgcaaagggaaaaacagcagacgaagagac

SEQ ID NO: 213681 - RNA, 69 nt, Homo sapiens
gaacaggagagaaaagagagcccaacaaggaaaacaaacaagcgagcaggcgacccaaaagagcgaagg

SEQ ID NO: 213682 - RNA, 62 nt, Homo sapiens
agcaccccgagaaccgcaggagccagagggaagccccaccacaagcagagaaagaagaccag

SEQ ID NO: 213683 - RNA, 61 nt, Homo sapiens
gagcggcgaagggcagcccgcgcagggcgagagcgacggggccagagaacaagcccagaca

SEQ ID NO: 213684 - RNA, 58 nt, Homo sapiens
ccggagccaggcccaagacgggaaaccacacagcacgaggaccgcgggcacgagcgac

SEQ ID NO: 213685 - RNA, 81 nt, Homo sapiens
agagacaacaccgcgcggaccacaaaccgcgccagaaaagcaccacagcgccgccaccagccccagaccagaaagcagcag

SEQ ID NO: 213686 - RNA, 56 nt, Homo sapiens
ggaggagaaagcaccaacagcagcggcagccaagaggaccagggacagaagagaag

SEQ ID NO: 213687 - RNA, 77 nt, Homo sapiens
aggccagccacccgcgggaacggcagggaccgcacccacaaaagcgaaaagccagacaggaacaccagacagaagaa

SEQ ID NO: 213688 - RNA, 74 nt, Homo sapiens
cccggggacagagaagcgcgaagaaggagaaaaaaggaaaaaccccccaacagaccccaagacagcgggcgcga

SEQ ID NO: 213689 - RNA, 79 nt, Homo sapiens
aggccgcgggggcaacggagaaaacccggaaccgcgacggcggcagaacaccccaccagaccacccagcaagcccacaa

SEQ ID NO: 213690 - RNA, 67 nt, Homo sapiens
cgccacaccggcgggccagcaggcaggccgaaccagggggagccaccccgcggggccagagggggcg

SEQ ID NO: 213691 - RNA, 32 nt, Homo sapiens
aaaaaccagccacacagagaggagccacacag

SEQ ID NO: 213692 - RNA, 74 nt, Homo sapiens
acgggggagagccacggaagccgacagacaaccagggaaccaagaacgagacaccaccggcccgggccacgcgg

SEQ ID NO: 213693 - RNA, 116 nt, Homo sapiens
caacacggcggcggcgccggggcgagcggggccggggcgccgggccggccccccagcccccgggcaacggacacaagccccggccaccgccggcacgcacagggagaaagggccgc

SEQ ID NO: 213694 - RNA, 58 nt, Homo sapiens
gccaggcagaccccgggcagcaggccccaggcgggggaggaggaggggacgaggcaga

SEQ ID NO: 213695 - RNA, 70 nt, Homo sapiens
gaaaaacccaagccgacaaccggaggacacagccagggcggacgggaaagcagaagccggcggcacgaca

SEQ ID NO: 213696 - RNA, 75 nt, Homo sapiens
acgcgcacgggaaccgaagagagccgggcacacccaggaggggagagaacaaaacaaaggaaggcggaaagacca

SEQ ID NO: 213697 - RNA, 60 nt, Homo sapiens
aaggaggcgacagaaaccagcagagaaggccggcaaggagaagaaggagagggggaggaa

SEQ ID NO: 213698 - RNA, 82 nt, Homo sapiens
gccgaccagccgcggagccgggggcaggaaagaccacagcaagaccacgcccccagccgggggaccaggccgaacgacccgg

SEQ ID NO: 213699 - RNA, 60 nt, Homo sapiens
agaaacaagccgggaaagggacaagaagggcaaagccgaaggccacagcggagaaggccc

SEQ ID NO: 213700 - RNA, 84 nt, Homo sapiens
cgagccgccacccggcggcaagaggagcagcagcggcggggccaagcgggagagcgagaaggcggaacaggagaggcggcgcgg

SEQ ID NO: 213701 - RNA, 74 nt, Homo sapiens
cacggggcgcggcgcaaaggccgcaggcgcgcgaccagggagaaaaacagacggaaaccgaaagaacagaacag

SEQ ID NO: 213702 - RNA, 39 nt, Homo sapiens
aggcaccgcggaacacaagagcaaaagaccgaggaggaa

SEQ ID NO: 213703 - RNA, 63 nt, Homo sapiens
gagaagcagcgccgcccggggcagaccaggcagccacgaagaccgggcgccagggccgccgcc

SEQ ID NO: 213704 - RNA, 53 nt, Homo sapiens
gcgcccagcagcgcaggaacggcgggccgcccagagacaaacacagaggccag

SEQ ID NO: 213705 - RNA, 73 nt, Homo sapiens
caccaccgaaacaaggagcgagcagcggaaagcaacagaggcacaaacgcagaaagggaggggggaaggagga

SEQ ID NO: 213706 - RNA, 75 nt, Homo sapiens
gaacagggaagcagcacgagagcgggacggggagaaggacggcagaaaacgagacgccggcggcgaaaaaagggg

SEQ ID NO: 213707 - RNA, 63 nt, Homo sapiens
caaccgcccagcagaacggcaccagggcggagggggcagggcagaaggaccaggggcgacgag

SEQ ID NO: 213708 - RNA, 102 nt, Homo sapiens
caccaccacgccagccgcaccagccgcccaagccgcacagccgcggcggcagcagcaggagagggcagcgggggcagagacggggaacagggccacccacac

SEQ ID NO: 213709 - RNA, 75 nt, Homo sapiens
gcaaaaccgggcaaaagaccacaacaggacacaaaaaggagagaagaccacaggacccaaagacaggaccacgca

SEQ ID NO: 213710 - RNA, 64 nt, Homo sapiens
gcgggaggaggcgccccgcgcagcggcggcggagcagagcgccccagaggagggagagaagccg

SEQ ID NO: 213711 - RNA, 52 nt, Homo sapiens
cgcccgccccgcagagaggggacgaaacgggaaaagccgcccgaccgcccca

SEQ ID NO: 213712 - RNA, 72 nt, Homo sapiens
aaaaacaggccggaaagcacaggaaaaaccaaaggaaccagcggaagcgcagacgccacgaagcaccaggca

SEQ ID NO: 213713 - RNA, 56 nt, Homo sapiens
aaggcgcacacacaagaaaggcaacaaaaccacgcagaccccgggcaacccccaag

SEQ ID NO: 213714 - RNA, 77 nt, Homo sapiens
gaagcagaccggagaaaggaacagagccgcaccagaaagagagagaagacccagacaagcgcagcccgccagcaacc

SEQ ID NO: 213715 - RNA, 84 nt, Homo sapiens
cagcggaggcccgccgaagcggggaggcggaagagacgcaggaagcaggaagagcgggcagcagggcggaagcggcggaggagg

SEQ ID NO: 213716 - RNA, 80 nt, Homo sapiens
cagaccgccaaaccagagaaagaaacacccgaacagcgaggaccaagaaaggcccagggaccaaagcccggacaaggccc

SEQ ID NO: 213717 - RNA, 76 nt, Homo sapiens
gaccaaggggcgagagcccccaccccagacaggggaacagggcacagcccacccaggaaaaaccacaccaagaaag

SEQ ID NO: 213718 - RNA, 37 nt, Homo sapiens
aaagaacgccagcaaagaagggcgcccaaggagacac

SEQ ID NO: 213719 - RNA, 67 nt, Homo sapiens
gacgcagggcgcccccgggccaggcagcgaagaagacaaagaagaaaacaaagccagccagaagaag

SEQ ID NO: 213720 - RNA, 62 nt, Homo sapiens
cagcagcacggaggaggagggcaggaaacaagaagagcagaccggaccaaacgcagcgcgag

SEQ ID NO: 213721 - RNA, 71 nt, Homo sapiens
ccagccggaacaagagacccggagcaaacagcaagagggaaacagaaaaaggacaaggagcaagaccacac

SEQ ID NO: 213722 - RNA, 56 nt, Homo sapiens
cgggaccacaaggcccgcaggagacaccaaccacaacaaccgcaaacgaagaaccc

SEQ ID NO: 213723 - RNA, 86 nt, Homo sapiens
ccaaaccccaggccaagcagccaccagcagcccccagagcgggaccacagggcgccaccagacagcgcagagaccacgaggagcag

SEQ ID NO: 213724 - RNA, 69 nt, Homo sapiens
ggcagacaagccacagccagacaagggggcaaggagcacgggcagccccggacggggcaacggaagcac

SEQ ID NO: 213725 - RNA, 80 nt, Homo sapiens
ccggcgcccgcgccgccgcgcgcgggggcccccgccggccgccgccgcccgagccaggcggcgaagagagcaggccgccc

SEQ ID NO: 213726 - RNA, 77 nt, Homo sapiens
cgcgcccaggggccgggcccaggacggaccccgcggcaccccgaggcccccgccaggcgcgagaacagacccagccc

SEQ ID NO: 213727 - RNA, 68 nt, Homo sapiens
aggagccccggaggcagagcggcgccagacacaagcgggacggaagaggcccggcgaccggacagaaa

SEQ ID NO: 213728 - RNA, 83 nt, Homo sapiens
acaaaaggagacgagaagaagacaagaggaaagccaggccagaagaaggaaggccggggaggggacaggaaagacacaccacc

SEQ ID NO: 213729 - RNA, 56 nt, Homo sapiens
cgccacagaggcgacggccgccaagggccaggaaacagggcacagaacgccccggc

SEQ ID NO: 213730 - RNA, 89 nt, Homo sapiens
ccgcaggccgggaggagccgcagcgccgggcgaccccgcccgggcccgggagggcaaggagccaaggcgaggcagcgcgagcagaggcc

SEQ ID NO: 213731 - RNA, 76 nt, Homo sapiens
gacggaggcgaggcaaacggggggcgcggagggaccagcgagcggaaccaagaaggagcgagggaggagcagcgag

SEQ ID NO: 213732 - RNA, 73 nt, Homo sapiens
cacggaggccaggaggaaaagaccagacagaggagccgccgcggaccaccagaggccgaaaacgggagacccc

SEQ ID NO: 213733 - RNA, 70 nt, Homo sapiens
aagccaaggaaaaacggagagccacaaaaaaggaagcgaaaacccacccgagaaccacaggaagaaaaag

SEQ ID NO: 213734 - RNA, 80 nt, Homo sapiens
aggagcgacccggcggcagcggcggcgagcgccgcgagcggcgcgggacgcgaggccggcccgacggagaagacacggaa

SEQ ID NO: 213735 - RNA, 83 nt, Homo sapiens
cagaaaccaaaagccaagccagaagggaaggagccgggagaggccaggccccccggacgcagccgcccggggcccggagccgg

SEQ ID NO: 213736 - RNA, 75 nt, Homo sapiens
gccacgagcccgaaacgggccgaaagaccgccgcccagccccaaagagcgagacacaggcgccgcgcacgggaca

SEQ ID NO: 213737 - RNA, 96 nt, Homo sapiens
aacgggacaagacacagaaggggaccccaacgaagagggagaacggcaacccaccagacaccagccgggaaagaggcaagaccggaaaggccacac

SEQ ID NO: 213738 - RNA, 69 nt, Homo sapiens
gggccacggccacagaagcgcagacccagaaccagggacgacagaggcgggcgagcggacgaaacagac

SEQ ID NO: 213739 - RNA, 91 nt, Homo sapiens
cagggcgccgagggaaacccaggcgccgcggcccgggcgaagacagcacccacagaggcaaagacgaagagagcaccagcgagagaggaga

SEQ ID NO: 213740 - RNA, 80 nt, Homo sapiens
ccgacgggaaccagcagcggaggcggacgcgcaggcgcgaggaggaaagccacaggagcccggagaaacagcacccaaaa

SEQ ID NO: 213741 - RNA, 80 nt, Homo sapiens
aagcggcgacggcgcccaggagcgggggccccgcagaaggggggaccggcggggcaacagcaagagaaaagcccacagaa

SEQ ID NO: 213742 - RNA, 73 nt, Homo sapiens
cccagggcgcacacaaaagaaggaagaagaccacccccaccaaacacgaaaaacaaagggacacgagcccgga

SEQ ID NO: 213743 - RNA, 88 nt, Homo sapiens
cggcagccggcgggcagcagccggccgacccagaggggccacggggaccaggcggggcaagagcaaccgcgcgcgccacccgcaacga

SEQ ID NO: 213744 - RNA, 80 nt, Homo sapiens
ccagggcagacaccccacccagaacaacacaagacagcagagaggaccccaccacagcagccggagaaggagcagaggcg

SEQ ID NO: 213745 - RNA, 72 nt, Homo sapiens
gcccgcgcggaccagcgcgcccacagcccccaccaacacaggaagggccaaaaccccgccaagaccaaacag

SEQ ID NO: 213746 - RNA, 82 nt, Homo sapiens
gcaagggcgaggaccaaaggccgcaaacacgggcccgggggaagaagagcgcaccgaaggcacaagggaaaccagaacaaaa

SEQ ID NO: 213747 - RNA, 76 nt, Homo sapiens
ggaaagaaggcccccgcccggacagacgcaaagagacaggagggacggaagcacagccaacagggacagaagaagc

SEQ ID NO: 213748 - RNA, 78 nt, Homo sapiens
aaagagagagcagagaccggacaacagagacaaagcaggaggacacaagaagggaggaaaggcggacccaggaaccac

SEQ ID NO: 213749 - RNA, 67 nt, Homo sapiens
gagccaacaaaaagcaccggacggcaagcacaaccccacgacgcccccgagaccccgaccgccggcc

SEQ ID NO: 213750 - RNA, 69 nt, Homo sapiens
gcagaacgccgaacaggagcaacaggagaaggggcgccacgcacccgggacggacaggcgcggaggacc

SEQ ID NO: 213751 - RNA, 85 nt, Homo sapiens
agaaacaaaagcaacaaagaggggcgcgggagagcagccggacccagaccagggagcccaggaggaggaaggaacccgaggagga

SEQ ID NO: 213752 - RNA, 63 nt, Homo sapiens
cggaccagaaaccaggagccacggacaagaccaaaagggcccacaggccacccgccagacgca

SEQ ID NO: 213753 - RNA, 71 nt, Homo sapiens
cacgcgaccacaaggaacgaggggccccaagagcacagaccagcagccgccaaaggagagggaagcggcag

SEQ ID NO: 213754 - RNA, 62 nt, Homo sapiens
gccgaccgggagaacacggggaagccgggccgagccagggcccccagaggagagaaggaggg

SEQ ID NO: 213755 - RNA, 81 nt, Homo sapiens
cgcacacaagcgccgcagccgcccgaagagccaagagcagaccggccagccacgaagcagagagggagcagagcaagaacg

SEQ ID NO: 213756 - RNA, 68 nt, Homo sapiens
cccaggaaccgaccagccaccaccagaggcccacgcggaccggcagcgccaccggaccaccagacaag

SEQ ID NO: 213757 - RNA, 79 nt, Homo sapiens
cgggcggaggagcaaagaaggaaccgggaccaaagaagagaacagcaggaaaagaaagcagaaaggagcgagaggagca

SEQ ID NO: 213758 - RNA, 73 nt, Homo sapiens
cgagcacacgggggagcccagaggagacagcaacagccaaccagaaaaccagaaacaccggcagggagcaaac

SEQ ID NO: 213759 - RNA, 76 nt, Homo sapiens
gggacgccggagaggcaggcgcggcccgcggggcgccaggcacgcgaggcccccagggaaacacaaagaagacacc

SEQ ID NO: 213760 - RNA, 74 nt, Homo sapiens
ccaacacggcgcagaccaacaacacccagaacaagcagggcacaacggcaagacaaggaaagacggcaggacac

SEQ ID NO: 213761 - RNA, 50 nt, Homo sapiens
aagggccgcgaaacaccagcagaaggagggccccggagcagccacaccac

SEQ ID NO: 213762 - RNA, 71 nt, Homo sapiens
gagacgaggcggaacagagaaaagaaaggacagcagaccacagcccggcaggcccaaaaacccaaagggac

SEQ ID NO: 213763 - RNA, 68 nt, Homo sapiens
gagcgcgaaacgcacgagaagcagggaagcgccagaaaaggccggaacccgacgaaacagaaacgaaa

SEQ ID NO: 213764 - RNA, 77 nt, Homo sapiens
ccagcgcgggagaagacacacaagagcggaaaaggaggagaaagccgcagccgaacaaagccgccgcgcaaaacaag

SEQ ID NO: 213765 - RNA, 67 nt, Homo sapiens
gccagagaaagaagacaaagagacccgaagggccacgccccaggaagaaaggcaaagcagccagcac

SEQ ID NO: 213766 - RNA, 69 nt, Homo sapiens
ccggggacccccgacgccaggcagcgcccccaaacggcagaacagaagaggcaacagcacgaaaagaaa

SEQ ID NO: 213767 - RNA, 106 nt, Homo sapiens
cgggagccccgggggacaggcccccggcgcgcggggcgcccgggggagcaacccggcgaggagacggggggccccggcggaaaaaggcacagggccaggggggagg

SEQ ID NO: 213768 - RNA, 72 nt, Homo sapiens
cagaacgaacccccccccccgcccccaaaacacaagaggacggagaagcgacgaaagaagccgggacaagga

SEQ ID NO: 213769 - RNA, 82 nt, Homo sapiens
gccagcaagccggccaaacaacaagcagaccccaaaaaagaagaggaggagagccaaccagcaaagaaaacaacacggaaac

SEQ ID NO: 213770 - RNA, 120 nt, Homo sapiens
ccgcccggagccggccagggccggcgcggcgagagaacaggccgaaagggccacaaacccaagccggaaccaaaaagaagccccagagccggggccaggagccccaagcgccccagcagc

SEQ ID NO: 213771 - RNA, 84 nt, Homo sapiens
cagcagagcaaaaacccaaaccccccaccagcgccaagaggacaaaagccacgaggcacaaagaggagacagccaagcacaggg

SEQ ID NO: 213772 - RNA, 83 nt, Homo sapiens
caggcacagcggagccggcgcggggccacaaaggcccgacggccgacagacagaaggaaaagagaaccagcagaaaggaagca

SEQ ID NO: 213773 - RNA, 76 nt, Homo sapiens
cggcccgggcgagcccggagaagaggaagggcggagaacggaaaagcaccaggaagcagagaggaccgcagaaggg

SEQ ID NO: 213774 - RNA, 88 nt, Homo sapiens
ggcggcccagcgagggcggcccggggcacccgcacgggaagcaggcccgccacagcaaagaaggccgagggacgaggaccggaggagc

SEQ ID NO: 213775 - RNA, 82 nt, Homo sapiens
gaccccacacacgccccacgagagcaagagcaccgacagaaaggcacggccgacacagccaagggggaagacacagacacag

SEQ ID NO: 213776 - RNA, 115 nt, Homo sapiens
ggaggcgacagcggcggcgggagcggcgccgagaggccggcgggacgcgggcgccaggaccggccgaacgcagaggaacacaagggcaagacagccgggaaccccaccccacccc

SEQ ID NO: 213777 - RNA, 70 nt, Homo sapiens
cccaggaccccaggcaggcggagacacgaaaacaggaaacccaaaggacaccagagcagcacgcgcacgc

SEQ ID NO: 213778 - RNA, 72 nt, Homo sapiens
aaccgcaaagccaccaccacaggccaagaagcgagagaagaaaaacagaaaaagccaagacagaaacaagaa

SEQ ID NO: 213779 - RNA, 78 nt, Homo sapiens
agagacgcagaaacggaaccccagggccgcacaggacgcggggcgcgggagcccagcgccggacccaaccacacgcga

SEQ ID NO: 213780 - RNA, 54 nt, Homo sapiens
ccggaaagaccgcgagaaaaggccagggcccacgcaaggaggaagcccgacaga

SEQ ID NO: 213781 - RNA, 68 nt, Homo sapiens
cggccgaaacagaaaacaagagaccacagaaggcaaaagggaaagcaaggggaagggcccaagaagac

SEQ ID NO: 213782 - RNA, 81 nt, Homo sapiens
ggccgcccggcgcagcggggaccggcggcggcgcccaggcacccggcccgggggacacggaaaacgacagaacgaagcaga

SEQ ID NO: 213783 - RNA, 78 nt, Homo sapiens
aggaggcaagcagcgaggagaaggggcaggccaggcgaaccagccgaaaaaggagaaaccaaaaggaaaagcgaacca

SEQ ID NO: 213784 - RNA, 76 nt, Homo sapiens
caacccagacaaagaagagcagccgcagaaaaaaagagacggaaagaacaggccaagaaaagccaaagaaagcaaa

SEQ ID NO: 213785 - RNA, 61 nt, Homo sapiens
cccagccgaaggagaagggggagggaaagggccccaagagccgggcggaaaacgaaagcga

SEQ ID NO: 213786 - RNA, 68 nt, Homo sapiens
agagcgccccaaagcccaaacagcaagagaaaacacaacaaagaacaggaaagccgcaaaccgggaac

SEQ ID NO: 213787 - RNA, 79 nt, Homo sapiens
accagacgagcaaaaccccagccacgaggagccagagaccaggagccccagagagcagagccccccacagaagagcccc

SEQ ID NO: 213788 - RNA, 45 nt, Homo sapiens
aaacaaagccacccagccaagaagaaggggcagaccaacaccacc

SEQ ID NO: 213789 - RNA, 43 nt, Homo sapiens
gccaacacggcacccacaggcccaaaagccaggacgcaaacag

SEQ ID NO: 213790 - RNA, 73 nt, Homo sapiens
ggagagaagagcagaacccagccgcagaaagccgcaacaccgagaaaaaaaccacggccaccaaaggaacaaa

SEQ ID NO: 213791 - RNA, 79 nt, Homo sapiens
gaggaacaggcgcggcgagggccgccgaaaggccagagcacccacgggaggcaggcaagaaacccgaggagggacggga

SEQ ID NO: 213792 - RNA, 71 nt, Homo sapiens
caaggacagggcagcaagggcggagaacggaaaagcaccaggaagcagagaggaccgcagaagggaaggag

SEQ ID NO: 213793 - RNA, 37 nt, Homo sapiens
aggagcccgacagcaccagcagaacccacaggagggc

SEQ ID NO: 213794 - RNA, 110 nt, Homo sapiens
gcggggcgagcccggaaaaccagaccagaaacggaggagcccgccgaagcaggacccaaggccagccagccccaggcaccagcggacaggacagggaggacgaaggcccc

SEQ ID NO: 213795 - RNA, 75 nt, Homo sapiens
accaaaacggacaacagacaacacaaaaccagccaaaggggggcaggaaccgcgggagcgacggaggccacaccg

SEQ ID NO: 213796 - RNA, 61 nt, Homo sapiens
cagcaagcccacccgggaacgcgcaagagaccagagagacaagagcggccgaggcgaaaaa

SEQ ID NO: 213797 - RNA, 80 nt, Homo sapiens
cgaccacaaaagacaccagaccaacccaggagaagaaggaaaggagcaaaagaaaaggccaaaacgaaaaaccaaacaga

SEQ ID NO: 213798 - RNA, 54 nt, Homo sapiens
gagcccgaacaaacaaacacccagaaacaagagaccgcaacccaccaaggagca

SEQ ID NO: 213799 - RNA, 73 nt, Homo sapiens
aaggcgagccaagcgaagaggagcgccagaggggaggaaacacaagaaagagcaaccacgcagaagaaaccac

SEQ ID NO: 213800 - RNA, 71 nt, Homo sapiens
gaggaccccagaagaggaaccggcggagacaaacacccaaacccaccccgagccacccgcccaccacagac

SEQ ID NO: 213801 - RNA, 57 nt, Homo sapiens
gcggacgccggccgccgcaggaggggccaagcgcagggaaggaaccgcaccaagaag

SEQ ID NO: 213802 - RNA, 92 nt, Homo sapiens
caaaagcaacaaagaggggaagagacagcaggaaaacggagaaggagcggaagagcaagaacgcagggaggaaaggagaaagagagacaagc

SEQ ID NO: 213803 - RNA, 75 nt, Homo sapiens
gaaagcagccaccaccgagacaggacaaacccccaacccccaaaaaagcaaaaggcagggaggagcaacgaaaag

SEQ ID NO: 213804 - RNA, 71 nt, Homo sapiens
caccggcaggcgcacaggcccggccaggcacaagggcaccacaaagagccgaaaaccagccccgcccacac

SEQ ID NO: 213805 - RNA, 64 nt, Homo sapiens
cggaaccgggaggcgacgcacacgagcggaggcgaaggacaccaggggggaaaaaccacacagg

SEQ ID NO: 213806 - RNA, 78 nt, Homo sapiens
cgccaggagcacagaagagcgaggagaccaaagagaggcacaacacagaaaagggcccaaggaagaaagacaagaaag

SEQ ID NO: 213807 - RNA, 58 nt, Homo sapiens
cccggccgacaaccacgaccaaaagccccaacagcggcaagaccagcacacagaggcc

SEQ ID NO: 213808 - RNA, 66 nt, Homo sapiens
aaagaccgacacaggcgggcccgccagacagggcgaagcgggagcggaaaccccagaagcgcaaag

SEQ ID NO: 213809 - RNA, 56 nt, Homo sapiens
acgccaccagccaaggcgacgcaacacacgagggagacgccacgaagggggagaca

SEQ ID NO: 213810 - RNA, 83 nt, Homo sapiens
gaaaccgcccgcacagagcaggaggccgcagccccaggcgagacagcagccaagaagagggaaagaagacaggaaacaaggga

SEQ ID NO: 213811 - RNA, 78 nt, Homo sapiens
cgaccgcgccaggccggccacacggaggcgggccagggccagcgcgggggacgaccagggggggaggagggacaacac

SEQ ID NO: 213812 - RNA, 85 nt, Homo sapiens
cgcggccgggcggcgcggccgcccgggccgggccccaccggacgagacccgcggcgcggcggaccagcacaccggaccgccaccc

SEQ ID NO: 213813 - RNA, 70 nt, Homo sapiens
aaacaaagccaccaggcgcacaccacagaagagaggaagaagacagcaacggaaccacaccgcgaaaacc

SEQ ID NO: 213814 - RNA, 74 nt, Homo sapiens
ccacggggaccagcagccgggccagggccagagcaaagggggggccgcccgcccaaggcaggaagaggggccgc

SEQ ID NO: 213815 - RNA, 85 nt, Homo sapiens
gcgaaggaccccaacggggaggccaacggaagaagccaacaaagcccaagcaggggaaggcgaagcacgacagcacggccagagg

SEQ ID NO: 213816 - RNA, 54 nt, Homo sapiens
acacacagcgaccgggagcacaccacaggcaagggaacaagggaggaaaacaac

SEQ ID NO: 213817 - RNA, 40 nt, Homo sapiens
gcggccagcgccacgcaagccagaggacaacagagcaacc

SEQ ID NO: 213818 - RNA, 39 nt, Homo sapiens
caagaaaaggagcaaccgaacggcgacgaggcacaaagc

SEQ ID NO: 213819 - RNA, 75 nt, Homo sapiens
cccgggcacagcaggcacggagcgcgccacgcgccgggagaggcccggggcccgccggcgcccggagcccgcgcg

SEQ ID NO: 213820 - RNA, 77 nt, Homo sapiens
cgagccccaccgaagagaacagggccggggcacgacgacccaacagcaagaggaaagcgaacgcgaaaagaaaagcc

SEQ ID NO: 213821 - RNA, 79 nt, Homo sapiens
acgagcgggccacgaggacccaaagccagcaaggaccacgagaaaagaccagggggcccgagagaccacaaaacaagag

SEQ ID NO: 213822 - RNA, 82 nt, Homo sapiens
gaggagcaagccagagcaagggcgcagcaaggccgcacaggaacaggagggcgagccccaggaccagaacagagaagaaagc

SEQ ID NO: 213823 - RNA, 86 nt, Homo sapiens
cagcacgccgcgcccaccagacaccacaggccaggggcagcggccccgcggccgcaggcaccaaggaaaggccagcaaggacacag

SEQ ID NO: 213824 - RNA, 76 nt, Homo sapiens
ccgccaagaacgcagcagcagccgccaagacgggggggccccagcccggccgaacgggcgcacgacacaaacacaa

SEQ ID NO: 213825 - RNA, 65 nt, Homo sapiens
gagcgcggggacggacagaggaagcaggccggaaaaagggaaagaacaaaacacacagcgaagcc

SEQ ID NO: 213826 - RNA, 78 nt, Homo sapiens
cgccgagggcgaggcggacgcgcggcgcgcagaggccaagaggaacccgcacaacagaaagcaggaagaacaacagcc

SEQ ID NO: 213827 - RNA, 93 nt, Homo sapiens
cgcgcgcgcgaggccgggccggccgcccagacgcgcccgcgggcccggccacggcggagccaagccggaaccaaaaagaagccccagagccgg

SEQ ID NO: 213828 - RNA, 82 nt, Homo sapiens
agggcaagaggcggcacagagaagagcccagagaagagcggaagcaagagaggacaaacggacaccaggccggcgaggaggg

SEQ ID NO: 213829 - RNA, 55 nt, Homo sapiens
gccaagggacaaagggaaaagaagcagaaagggccgccaaaacagggagagagac

SEQ ID NO: 213830 - RNA, 77 nt, Homo sapiens
agcggcgacggcaggcggccaggccagcagcacgagggcggcggcaggagagagaggccgcagaagggcagaagaac

SEQ ID NO: 213831 - RNA, 71 nt, Homo sapiens
gcgaggcgccgcccgccgccacaaagagcagcccaaccaaccaaagaaaggaaacggaaagacacacgcca

SEQ ID NO: 213832 - RNA, 51 nt, Homo sapiens
aaggaaaccccaacacagagccaagcgccaaaggagggagaaaacacagca

SEQ ID NO: 213833 - RNA, 86 nt, Homo sapiens
gcaggacccaggccagaccggagcagcggggacagggcaggagaaacccagcgggcccagagacgcagcgggaaaaccaaggcaag

SEQ ID NO: 213834 - RNA, 65 nt, Homo sapiens
agacggccggcaagaacagcgacaaggagagaagcgcggagccccaagacagaaagaaaccaggc

SEQ ID NO: 213835 - RNA, 76 nt, Homo sapiens
ccgcacccgagaaagccacgggaccgcgacggagggaacggcaagaagccgggcggaagcccacgcacaggcgccg

SEQ ID NO: 213836 - RNA, 74 nt, Homo sapiens
agaccccccgggaaccacccgcgcccccagacagccccacgaagcagcaacccgaaaggagcgcaaaagaagag

SEQ ID NO: 213837 - RNA, 79 nt, Homo sapiens
cggggagcacggcgagcagccaggccaggagaggaaaggggaggagaggaaagaaggagcaaagcccagggaaaaggac

SEQ ID NO: 213838 - RNA, 42 nt, Homo sapiens
cagggccgacccagggagcccgagaggggacccccggccccc

SEQ ID NO: 213839 - RNA, 79 nt, Homo sapiens
gacacagcggagcgcccagaggcgagcccggggaggaagagacagcacccaagaaaacccaggccgcgaaggagaagac

SEQ ID NO: 213840 - RNA, 80 nt, Homo sapiens
acggcaaagaaaaccgggcccgccgcgaccacggcagcccgggaccgggagcccgggaccgggagccggggggccacccc

SEQ ID NO: 213841 - RNA, 63 nt, Homo sapiens
cggaggaggaggagaagaagagaggcagaggcaccaaaaagcacgaaaggccagcaagaaacc

SEQ ID NO: 213842 - RNA, 58 nt, Homo sapiens
ggaagcagcaccagaccaaggaaagacaaggagccgggccgagaaaccgaaccagaga

SEQ ID NO: 213843 - RNA, 59 nt, Homo sapiens
gccagccccggcacagaggcaccgaccgcaccggaggagaccgcaaggagccccgggcg

SEQ ID NO: 213844 - RNA, 73 nt, Homo sapiens
agccgcgcccccccagcacaccgacagagaacccaggccaacacacagacagaggcagccaccccagacgaac

SEQ ID NO: 213845 - RNA, 72 nt, Homo sapiens
ccgaccagggcaacaccaaaaacaaaacgaaccaggacggcaaagcgcacggggcggacgcagagacgagaa

SEQ ID NO: 213846 - RNA, 55 nt, Homo sapiens
gacccaagaagacagaccccgaggagacgagacgacgcaaccaaaggggggaggg

SEQ ID NO: 213847 - RNA, 82 nt, Homo sapiens
aggaccccggaccagcaggcaaccgccgcgggccgagcccgcccgccaggaccaggacagagcggcgccgccgccagacgca

SEQ ID NO: 213848 - RNA, 78 nt, Homo sapiens
gggaaagcaggaaaggcaggaaacagaagagcagaacagaaggggcaggcacaggagacacagggcgccccgcacgcc

SEQ ID NO: 213849 - RNA, 80 nt, Homo sapiens
ccagaggcaacaaggcggacaagagaagccgccagcccaaagaaacaccgggccagcagcccacgaggacccaagcccac

SEQ ID NO: 213850 - RNA, 83 nt, Homo sapiens
ccagccacaggaaagcaggccaggggaaggagccccaccaaagccccaggccagggacccagaccaccccaggggagcagcag

SEQ ID NO: 213851 - RNA, 81 nt, Homo sapiens
gacaagcccagaccaaaacagcaagcaccagacccgcgaccgacagcccccagcccccccagccgcagggagcccgggcca

SEQ ID NO: 213852 - RNA, 66 nt, Homo sapiens
gagggggacaggggcgggcgaaagcagagaccaagggggacccaagggagggcggaaaaaccggag

SEQ ID NO: 213853 - RNA, 54 nt, Homo sapiens
aaacaccaacacaaaaaaaaccaacagccccccaggaggccagagggaagcaaa

SEQ ID NO: 213854 - RNA, 77 nt, Homo sapiens
cagaggccgccacaaccgccagacaaccggagccacgccccacgaccgccaggagcgggcaaaggaagggaggggcc

SEQ ID NO: 213855 - RNA, 76 nt, Homo sapiens
accgccagaaaggagcggaagaggccacgaggcgcacaccgccagcccaagaaaaaggggccgcaaggccaggcgc

SEQ ID NO: 213856 - RNA, 79 nt, Homo sapiens
gcgcagccgcgcagccccacgcaacgggcccgcgcgcagggaagaggcccggggaggggaggagaggagccgggaccgg

SEQ ID NO: 213857 - RNA, 76 nt, Homo sapiens
gcagcgcagcaggcgcaaacaagaccaccggagagaaaaccgcacacacaaagacagccaaaggccgagacacagg

SEQ ID NO: 213858 - RNA, 59 nt, Homo sapiens
ggcggagagagaggggagccggcccccgaaagaggggacagggaggaaaaccagagaga

SEQ ID NO: 213859 - RNA, 78 nt, Homo sapiens
gcaagagccggaagaaaggaaagaggacacacgcggagcccaaacacgcgccgcaccagagcggcgggaccagggaca

SEQ ID NO: 213860 - RNA, 81 nt, Homo sapiens
agccgcggagcaaagacaggagcccggaaggaagagacagagaccaagccaaacccccaggccaagccgcacggccagaag

SEQ ID NO: 213861 - RNA, 84 nt, Homo sapiens
gaggccacgacaccaggggaggagcagacggccagagacacaaggccccggcagcagcagacgggccaggccacgcgcgcagcc

SEQ ID NO: 213862 - RNA, 83 nt, Homo sapiens
ggaccaccgaagaagggggccgacgcaggaggagggagacgcacgagacacgggccgcccgcagccgggcgcccgcagcccag

SEQ ID NO: 213863 - RNA, 44 nt, Homo sapiens
gaaccgcgaccgggaggcaaagagaggccgggaagaaggaggga

SEQ ID NO: 213864 - RNA, 78 nt, Homo sapiens
caaaagcgcaaaccggagccagaaacaaccgcaaccacccaacaagggcaaggccagagaaggcgggagaaagacacg

SEQ ID NO: 213865 - RNA, 84 nt, Homo sapiens
gcgggaccacaagacaacgcggagcggcgaagagcaaccaggacagacaagcagacggggccgccacacgcccaaccagggcac

SEQ ID NO: 213866 - RNA, 82 nt, Homo sapiens
cgccgcggaaggacccaggaaagcgccccacacaacccccgccgacagccacagagagacggggcgccagggccaggaggcc

SEQ ID NO: 213867 - RNA, 78 nt, Homo sapiens
aacaacacaacagcaaaaccagaacaccagacagcagccggagcagcaacagcccaaaagaagcaccagggaccaaaa

SEQ ID NO: 213868 - RNA, 81 nt, Homo sapiens
ccagcacccggggagcgacccagcaggggacccagccggaacggcccaggacgagcaccaccggaaggaaggcgagggacg

SEQ ID NO: 213869 - RNA, 78 nt, Homo sapiens
cgcacggaccaaaaacccgcaacagcccccgcccaaggccagcaggcgaaagagaagcaaaggaagaagcgaagcaac

SEQ ID NO: 213870 - RNA, 57 nt, Homo sapiens
gggacgccacgcacagggccggcgccaggcagaccggaccaaaccagagacaaaagg

SEQ ID NO: 213871 - RNA, 92 nt, Homo sapiens
cggagcaccaggcggagcaggagcggcggcgacggccacaggggcggcgacggcgcaggcgaagcgaaacaggggaaaaaacacagaggcag

SEQ ID NO: 213872 - RNA, 67 nt, Homo sapiens
ggcaggagccgaaagggaagcacacggaccagcagaacagaaacaaggccaggggcaagcaccaccc

SEQ ID NO: 213873 - RNA, 68 nt, Homo sapiens
cagaacgaacaggcaaagcccaaaaggcaaggcacaaggaacgcgaagagacccccaggccaaagcac

SEQ ID NO: 213874 - RNA, 61 nt, Homo sapiens
cggaagaccccggccaaagcgaaaggcagcccagcaaggaaggggaaccacaaagaagaga

SEQ ID NO: 213875 - RNA, 85 nt, Homo sapiens
cacccgcgcgcgcccgggaggaaggaacgaggcaaggagcaaagcagcggcgcagcccgggccacaaaagaagacccaaagcacc

SEQ ID NO: 213876 - RNA, 76 nt, Homo sapiens
acccacaccccgacccccgaacccccagcccaaacccggaaacccagcggcccagccgggggaagggggaacggag

SEQ ID NO: 213877 - RNA, 55 nt, Homo sapiens
cgaaaacgaggaagaaggaccaaaacagcaggacagcagaccacagcccggcagg

SEQ ID NO: 213878 - RNA, 70 nt, Homo sapiens
agagaaaaccacaagaagagaggaacaaagaagaagacgaaagcaggcaccagcaagagaacgcaaaaac

SEQ ID NO: 213879 - RNA, 72 nt, Homo sapiens
caggcacaccaggcaagagcggccgggccggaggcgcgccagccccccggggaggaggaaggggcaggaacc

SEQ ID NO: 213880 - RNA, 75 nt, Homo sapiens
ccacaaggagagaagagagggagccacaagggcggcgggcagacaaccgcgcagcgccgggcggacgacgaggca

SEQ ID NO: 213881 - RNA, 81 nt, Homo sapiens
gaacagagccgggagcaagaagaacacccagagaccgaggaagccgacaggaccgggggcacggaggggaagcacccagaa

SEQ ID NO: 213882 - RNA, 52 nt, Homo sapiens
acaaggcgacaacacagaccgccgcggaaccaacgccagccagagcaaggcg

SEQ ID NO: 213883 - RNA, 55 nt, Homo sapiens
ggaaggacaaggggcaccagccacgccccaccagagggcgaagacaggacggccc

SEQ ID NO: 213884 - RNA, 71 nt, Homo sapiens
cgaaaaacagggcaaaggagaccacggggggaaggaagcgagacccggcgcgagaaggaacgcggagccga

SEQ ID NO: 213885 - RNA, 59 nt, Homo sapiens
ccaccaccaggagaaggcggggcagggaggggaaccaggggccgaaggcgacacacgag

SEQ ID NO: 213886 - RNA, 75 nt, Homo sapiens
agaaagagaggaaagaagaaaaccaagaaagccccacgacggaccgccaccccaggggaggcaggggccaccagc

SEQ ID NO: 213887 - RNA, 61 nt, Homo sapiens
cacgaaaaggagggagccaaaggggggagaagcagaccgcaccaggcgggaccccgaaaaa

SEQ ID NO: 213888 - RNA, 71 nt, Homo sapiens
ggaggaggacggccggcacgcgcccaaaggcacggggccaaaaaggcacgagggaacgggaaagaacagag

SEQ ID NO: 213889 - RNA, 76 nt, Homo sapiens
cgccgggaaccgggggcgcgccacggaggccaaaacggcccccgaggacccaaagacaggaccacgcaccagcaga

SEQ ID NO: 213890 - RNA, 62 nt, Homo sapiens
gccaaccaaaccgaaagccagaaggaagcagccgacacgagcggcaaaaacagcgaaaggag

SEQ ID NO: 213891 - RNA, 51 nt, Homo sapiens
ccgcgggaagcggcgccacccgcacgaggaaacgaaccaccaacacccgaa

SEQ ID NO: 213892 - RNA, 69 nt, Homo sapiens
acccaagaaagagcgcagcgggagaaggcaagcagaagaggaacagaagaagcagagcagagacggagc

SEQ ID NO: 213893 - RNA, 82 nt, Homo sapiens
ccacccgagaaggagcgcccgccggcgggacccgccccgcccggagccccggcccccacaggcccaccgagaccagagaaga

SEQ ID NO: 213894 - RNA, 63 nt, Homo sapiens
cagcagccaccaggagcccgagagagaaggagaaaaacggcagcagccaagcacgcaaccaag

SEQ ID NO: 213895 - RNA, 83 nt, Homo sapiens
gggacacgcggcggcgcgggggccggccgcgcggacgaaggagacgaagggccgaccaacccccaggaggcggaagccaccag

SEQ ID NO: 213896 - RNA, 54 nt, Homo sapiens
gaggaggccccccagccacggaaacgagacagaaccagccgacaggggggagcc

SEQ ID NO: 213897 - RNA, 41 nt, Homo sapiens
caacaggagcacgaggagggggagaaccgccagcgacggga

SEQ ID NO: 213898 - RNA, 71 nt, Homo sapiens
gggggacggacacgcccagccccgggcacggaaaggccagcacaaagcgagaaggagggagaagggcgcga

SEQ ID NO: 213899 - RNA, 106 nt, Homo sapiens
ccgagagccgcccgggccagcggccgcgcacccccggccggaggcaccagccaaccaccccaggccagaaccccaggagcgagcggagagaggacgccgagggcag

SEQ ID NO: 213900 - RNA, 68 nt, Homo sapiens
gaaggaccaagaaccaggaaagcaagaacacaaaggggaaaaagcgcccagcccgcaaagagccaaga

SEQ ID NO: 213901 - RNA, 59 nt, Homo sapiens
cccagcgcagcagagcgccaagacgaaggacagaaaacgggccccagacacaagcccca

SEQ ID NO: 213902 - RNA, 70 nt, Homo sapiens
ccaacaaaacacaagcacacagggccggagaggaaacagaccgaaagacgcccagacagcggggaagcac

SEQ ID NO: 213903 - RNA, 85 nt, Homo sapiens
aagacagggcgcaggagacccaccaacaggaacggaaacaaggagcaaagcggacaaggcaaaaccagcaagcggacccagacaa

SEQ ID NO: 213904 - RNA, 40 nt, Homo sapiens
cacacaccaggaccacgggcccgcacggggcaccgggccc

SEQ ID NO: 213905 - RNA, 79 nt, Homo sapiens
gaccaaggaccagccaccacggagaacacaccgaaacggaccagacaggagagaggagcgcgccccaagggggcgggag

SEQ ID NO: 213906 - RNA, 77 nt, Homo sapiens
cgggcagccaccccgcccccgccccccccgccgcaccagagggggcccggaggggcgcccaggccgagcacccaggc

SEQ ID NO: 213907 - RNA, 83 nt, Homo sapiens
ggcggagcagcgcggggcggccggaggaggacggccggcacgcgcccaaaggaggcaaggaggccacggggccgaagacacca

SEQ ID NO: 213908 - RNA, 79 nt, Homo sapiens
cggggcaccacagaagcccagccgaccacgagagcacagaaggccaacaagccgaggagaggcccacccgccaagcgca

SEQ ID NO: 213909 - RNA, 84 nt, Homo sapiens
gcgcagagggcgaggaggagaacccaccaagccccgcaggagccaccagacggagcagagcagagacagaggccagcgcccagg

SEQ ID NO: 213910 - RNA, 88 nt, Homo sapiens
ggcgggaggagaaggagacaggccccggcaccaggcgggggcggcaacgaggagaggccccacaaacgccaacaaccagcacaggccg

SEQ ID NO: 213911 - RNA, 73 nt, Homo sapiens
cgcaacaagggaggccagcggacgagagaccccagggaccaccgcaagaccgagaagcgcacaaagcagccac

SEQ ID NO: 213912 - RNA, 81 nt, Homo sapiens
ccgaagaaccagccgccacacgcaccccagcccgccggggcgcggacaagaaggagccaggcagaggagccgccggcccag

SEQ ID NO: 213913 - RNA, 77 nt, Homo sapiens
gaagaagggcgagcgggcaggacacggaggaccggagcggccgccgagaagacccacacgaaaaggcgccggcggca

SEQ ID NO: 213914 - RNA, 64 nt, Homo sapiens
cggaagaaagccccccacacagagaggaacgaacagagaaagaagaaaccaaaaaggaaaccgg

SEQ ID NO: 213915 - RNA, 74 nt, Homo sapiens
cggccccggcccggccgacccggcggcgcgggccagcggccgcgaggccgcagccccggacgacaggcagcgcg

SEQ ID NO: 213916 - RNA, 79 nt, Homo sapiens
gagcggcgcagagagagagagaagagaggagagcagcagcgaaccaacccaagggacccagaaagcgggaaacaggaaa

SEQ ID NO: 213917 - RNA, 66 nt, Homo sapiens
gcccccgcgcggccccagcagaaccaggaaccccggcgcagagaagacccgcccaggcacacagca

SEQ ID NO: 213918 - RNA, 68 nt, Homo sapiens
cgagggagagggacaagccaaggccgcgagggacgggagaaagaacagacaagccgcaagaaccgggg

SEQ ID NO: 213919 - RNA, 74 nt, Homo sapiens
caacaacagcaacggaggcgggaccggaacaggcacaccccacacaagcacgccaagagcacagagaccgaagg

SEQ ID NO: 213920 - RNA, 80 nt, Homo sapiens
accgcgcagaagacacgcccggaagaccagccaacagggcggcgacggcggcgcgaggaccgaccgggcccgcggacgaa

SEQ ID NO: 213921 - RNA, 89 nt, Homo sapiens
agccggggaaaaagcaggaagaaaaacggcaaacgagggcccaacccaaaagaccgaagagaaacaacgggagaggagggaagacccgg

SEQ ID NO: 213922 - RNA, 63 nt, Homo sapiens
cccggaggcaccacaggacgcagcccccagcacgaaagcgcgcgcccggcccaggagaggaca

SEQ ID NO: 213923 - RNA, 85 nt, Homo sapiens
cacaaagaacagcggcagacggaggagaggagcacaacagggagaagacagcaagaccccgaaccgagcagacgaggcaacagac

SEQ ID NO: 213924 - RNA, 77 nt, Homo sapiens
gccccccgggaacgcagcgcgcaggaccacggggaaagccaagaagaggagcccaggggaagagaggggccgagggg

SEQ ID NO: 213925 - RNA, 73 nt, Homo sapiens
gcgagagagcccgggcccccaaaagccagggcgaaaaaacgagaaagaaagcaggagaccaagaaggaaaaag

SEQ ID NO: 213926 - RNA, 73 nt, Homo sapiens
cacccagcggggagcacggcgagcagccaggccaggagaggagacgggcagacaacgaacaagcgaagaacca

SEQ ID NO: 213927 - RNA, 66 nt, Homo sapiens
aaaggagccaggacaaggaggcccacaagcggcacccaccaagacaaaccagcaaggccgagggaa

SEQ ID NO: 213928 - RNA, 78 nt, Homo sapiens
aaagaagcgaggacacagaccgaacaaaaaggaagcacggagaaaaggaggcccagaaaacccacgaagaaaaaacag

SEQ ID NO: 213929 - RNA, 112 nt, Homo sapiens
ggcgccggcgcggcagcgagcggcggaaccccgcggcgggagcgcggcggggccgcagaggccccagcaggaggacccgccggaccagccacgaaaagccagagacaagggg

SEQ ID NO: 213930 - RNA, 84 nt, Homo sapiens
gagcgaacaggaggaggccagcaccacggaggagccagaagaccaagggcgaaccagggaaagcagcagagacaagaaaagagg

SEQ ID NO: 213931 - RNA, 60 nt, Homo sapiens
gcagcaggaggcgcgggcaggcagagcaccagcgggacagcaagggaggcagcagacggg

SEQ ID NO: 213932 - RNA, 71 nt, Homo sapiens
ggaaccaagggcaacaggaaggcgcaaggggacaagaccccccccagggaagaccaaagcaagggaggaga

SEQ ID NO: 213933 - RNA, 86 nt, Homo sapiens
agcagaaccggcccgcaggaccagcgagggggcccgggccgggagcagagcgcccggagggcacggcgcagaacacccaaaccaac

SEQ ID NO: 213934 - RNA, 70 nt, Homo sapiens
cggcccggccccgaggccggcaacggagacccaagaggccaacaccacgacgagggcaagccagccaagc

SEQ ID NO: 213935 - RNA, 68 nt, Homo sapiens
cacggaaagagggagaagaaaacaaagccagccaacacccgaagcgaagggcggacagacccagagca

SEQ ID NO: 213936 - RNA, 70 nt, Homo sapiens
gccccacaggggaagagagaacagacaacaaacagcacaaccaaaagagcagaaggaccgggagcccccc

SEQ ID NO: 213937 - RNA, 64 nt, Homo sapiens
ccgagcaggcacagagacggcgacaaagacccaaagcggaaaacccgcaagggccagcaaaacc

SEQ ID NO: 213938 - RNA, 86 nt, Homo sapiens
gcgggcccgccgcgcgccgcgcggccgccagaagagcgggaccggacagcaccgaaggcaagcagaggacagcagccgcccccaca

SEQ ID NO: 213939 - RNA, 78 nt, Homo sapiens
aacgccacgcacacacggcgcccggccggggcgccacggccacggcgcggcaccggggcgccggccaagaagagagcg

SEQ ID NO: 213940 - RNA, 54 nt, Homo sapiens
ccgcacgcacggccacccgaacggagagcgacgaaggggacagcaggcagaagg

SEQ ID NO: 213941 - RNA, 73 nt, Homo sapiens
gcagcggggaggacaggaaccgcggggacagacccgagaaaccggacagcagaggaaacgagggacaacacag

SEQ ID NO: 213942 - RNA, 36 nt, Homo sapiens
aaggacgaaggacaagacacgcagcgaaaacaagaa

SEQ ID NO: 213943 - RNA, 76 nt, Homo sapiens
gggggccggcaagagcaggccagaaaggaaagcggacagacaccgcgccccgaaaaacgaagagagcagcagcggg

SEQ ID NO: 213944 - RNA, 59 nt, Homo sapiens
cgagccgagcccggagcggaggaaaggcgcccgggcgacacaccgaaggcgcaaaagac

SEQ ID NO: 213945 - RNA, 80 nt, Homo sapiens
ggaaagaggaacagaaacaaagcaggaaaggcgccagagcacagcaggccggaaaagccgaggaggggcagggggaggag

SEQ ID NO: 213946 - RNA, 81 nt, Homo sapiens
gggagcacaccggcggagacgggcggccggccgacccccgcgcgacggcgacgcgggaggccaggacccagaccagaaaaa

SEQ ID NO: 213947 - RNA, 67 nt, Homo sapiens
cccagagggagaaggagacagccacggagcacaccaggaaaagcgagaaaaacccgggaagagccca

SEQ ID NO: 213948 - RNA, 78 nt, Homo sapiens
ggaaccggccccgcgcccggcagcccgacgccacgaggaaggccccaaccacccccagcgagagagaggccaaccccg

SEQ ID NO: 213949 - RNA, 59 nt, Homo sapiens
ggccaggaccgacagcccccacaaggcgggggagcgggaggagccagagcacaccgcac

SEQ ID NO: 213950 - RNA, 59 nt, Homo sapiens
cgaggaagggcggaccaaccacggcaaaccaacaagcaaacccgcaggcccccacggcg

SEQ ID NO: 213951 - RNA, 71 nt, Homo sapiens
accagcagccaccggggagagaagagaagccagcacagcgcaggcaagacggggaagcccagagagaaggg

SEQ ID NO: 213952 - RNA, 83 nt, Homo sapiens
ggagcacccccagccggagcagccggaccagcccagaaggcagcggcggcccaggccagcacccgcaagaaagcaaaagacag

SEQ ID NO: 213953 - RNA, 70 nt, Homo sapiens
gaaaaagcaaagagagcggaccacaccgcagagagcgcggaaagagggggagacagcgcgcgggccggag

SEQ ID NO: 213954 - RNA, 80 nt, Homo sapiens
agagcacccagggaaaggagacaaggaccgaaacagaaacggaacaccaaggaccgccgggagagccgcccaccccccac

SEQ ID NO: 213955 - RNA, 76 nt, Homo sapiens
gcggccacgccaccaaggagccggcaggggggcggagccacaggcaagacacacacaaggaacagaaggcggggaa

SEQ ID NO: 213956 - RNA, 72 nt, Homo sapiens
cacagccggaagaagaagcaaagcaccccccacccaggaaaaacaggccacagacccaggggaagagaaaga

SEQ ID NO: 213957 - RNA, 64 nt, Homo sapiens
gaccacacaagcaaaagagcacggggaaggccggacgccgcgcggaaagcaacacgcagagggc

SEQ ID NO: 213958 - RNA, 74 nt, Homo sapiens
aaaggcggcccaaggagacggggcgacgccgagcacgccggacaaggagaggagcgggaagaacaacgcacccc

SEQ ID NO: 213959 - RNA, 90 nt, Homo sapiens
ccagcccccaggagcaagaccaagaccgcaggaaggacggggccacgggagcgcggaggaacgcagaacgcccccagacaaggccagcgc

SEQ ID NO: 213960 - RNA, 79 nt, Homo sapiens
gcgcggaagaagcgcgcggagcgcgggaggcacagccacagcccaccggcagcgggccggcagacagcccgcccgggcc

SEQ ID NO: 213961 - RNA, 75 nt, Homo sapiens
cacgacacggggaggaccaagcgccccacagaagaacgcccccgccagaagaagaaagcagcggcagcgacagcc

SEQ ID NO: 213962 - RNA, 82 nt, Homo sapiens
aggaaggcccggggggaagcggaccagaggccgggaggcgaggaaaccggaaaaccccaaagaaggcccccgcggcgcaccg

SEQ ID NO: 213963 - RNA, 75 nt, Homo sapiens
gcaggaaggaggagacgaagaaaggagaacacaccaccagcaaggagggcacaaccggagcaaacagagggacgg

SEQ ID NO: 213964 - RNA, 73 nt, Homo sapiens
cgaaagagacccccagaccaggaaagacagccacgacagacagaaccaagagggagaagaaaaacaagcaaac

SEQ ID NO: 213965 - RNA, 65 nt, Homo sapiens
cgagagaaaagcccccaaaagcagcacagccagagacgcgcacgaaacgacgaagaggcccgagg

SEQ ID NO: 213966 - RNA, 37 nt, Homo sapiens
aggagacacaagacagggacaggcggccgacaggaag

SEQ ID NO: 213967 - RNA, 51 nt, Homo sapiens
gaaccaggcaacaggaagcaggacaagacccggcagagccagagacccgca

SEQ ID NO: 213968 - RNA, 73 nt, Homo sapiens
cggcgagagccggggggaggaggccagccacccgcgggaacggcagggaccgacggcccaagcagccagagag

SEQ ID NO: 213969 - RNA, 71 nt, Homo sapiens
ggcgaaagcgaacggagaaggggaaacccccacaaagagaagccaagacccagagcaacggaaagcccaag

SEQ ID NO: 213970 - RNA, 40 nt, Homo sapiens
gcgcacgcggggggagcagggccaacaaggggcaggcgcc

SEQ ID NO: 213971 - RNA, 85 nt, Homo sapiens
gcaacaagggcccccgacgggcgcggccgaggcaagaaccggaagccaccgggccaagcacaacaccagagggcagcaggagcgc

SEQ ID NO: 213972 - RNA, 53 nt, Homo sapiens
ggaccacccagaggagcaacgagaaacgacaggaaaaccaaaggaccgaaaac

SEQ ID NO: 213973 - RNA, 75 nt, Homo sapiens
cgacgccgggaacccgccgcgcgccgcgaccccaagcagggaaacccagacgacaaggaaggccaagggacccac

SEQ ID NO: 213974 - RNA, 76 nt, Homo sapiens
cggcgccacggcccgccaccggaccggaagcgggcccagcccgcgccgaagcgccgaacgcccaaaggggaaagcc

SEQ ID NO: 213975 - RNA, 78 nt, Homo sapiens
agaggacacgggagagccgaaccagaagagaaagggacaagcgcaaccaagccaaaggcaaggcggcgaggcgacacc

SEQ ID NO: 213976 - RNA, 88 nt, Homo sapiens
cgccggcgcgggaaacgggcgaagcgacgagccgcgaggagagccgaggaaacccagacccaagaccaaccgaggaggaggaggaggg

SEQ ID NO: 213977 - RNA, 78 nt, Homo sapiens
ccggccgagacggcggcagcagcggcacaggggcccagcgggacacaaacccggacagcacggggcaccgcaaaaccc

SEQ ID NO: 213978 - RNA, 76 nt, Homo sapiens
agaggagagaggggcagcgggcaaaaagaaaaaaggagaaggaaccacagaggaagcaggagcggccaacagccgg

SEQ ID NO: 213979 - RNA, 75 nt, Homo sapiens
aaaacgccccaaccacgccaaagggaccagcagaaccggccacacccaggaccggaacacccccacagacccgag

SEQ ID NO: 213980 - RNA, 82 nt, Homo sapiens
cgggagaggccgcggcggccaggccccagacacagacgagcaggggaagggcaagaaggaacagacaaaaacggccggaagg

SEQ ID NO: 213981 - RNA, 77 nt, Homo sapiens
cggacagccaagcaacgaaggaggagccgccagagaggaaaacacggccagaccacacagcagacacaagcaaggac

SEQ ID NO: 213982 - RNA, 74 nt, Homo sapiens
gaagagaggagggagaacacagaaaccggccccaggccacacacccccacggcgagacccagagagccaagagg

SEQ ID NO: 213983 - RNA, 73 nt, Homo sapiens
aaacacaggaagaagcggcaagacaaagggccggcacgagacccaaggaggacacaggaccaggaggacaaac

SEQ ID NO: 213984 - RNA, 91 nt, Homo sapiens
ccggccgagggagcccgccgcccgccccggcacacgcgcagccccggccccggcccgccggagaaacaggaagggaaaaggccgaggcaca

SEQ ID NO: 213985 - RNA, 57 nt, Homo sapiens
gggggcgagcacaaacggggcggggccggggaacacacagagacaagcccacaagcc

SEQ ID NO: 213986 - RNA, 75 nt, Homo sapiens
gagcgaccagaccaggacgacaaagagggggcagaaccgaggggccggagcagccgcacccggcccaaggccacg

SEQ ID NO: 213987 - RNA, 63 nt, Homo sapiens
ggacgcgcggcggcaccgggaggccgggccgagcgaaagaacaggagcacagcggaaggggca

SEQ ID NO: 213988 - RNA, 81 nt, Homo sapiens
gccacgggcggccacacgacccacccaagcccacgaggcgaaccaagagccacgagagaggaagaccgacaccgaccgaag

SEQ ID NO: 213989 - RNA, 75 nt, Homo sapiens
ggaacggccaccccccagccgaaaaggagagccaggagcgccggccgaccccagggcccgaagaccaccccgaga

SEQ ID NO: 213990 - RNA, 38 nt, Homo sapiens
cacgggacgccggggagaagacggaaggcacccacaaa

SEQ ID NO: 213991 - RNA, 81 nt, Homo sapiens
ccgcccagcccccgagaagcgggaacagggggggcgcggaggggagacgcgagggaaggggacagggagagaccggggggc

SEQ ID NO: 213992 - RNA, 79 nt, Homo sapiens
ccgggaaagagccacgaacacaaaggagggacagcagcaagagccccaaagccaccagcgccgggccgcaagacagccc

SEQ ID NO: 213993 - RNA, 86 nt, Homo sapiens
gggagaaccagagcggcagacgagcaggacaaggagacggcagagccaaggccgggacaccagcaaaagagccaacacccaggcca

SEQ ID NO: 213994 - RNA, 75 nt, Homo sapiens
cgcgggcgccgggcgaagcccgggcagggcgggaaggaaaggagacccaacgcgggccacccaccgaggccggaa

SEQ ID NO: 213995 - RNA, 74 nt, Homo sapiens
gagaaccagggaccacaaacccaaaaccacccccacgaagaaaaaaccggggcggaggcagcaaagacaggccg

SEQ ID NO: 213996 - RNA, 80 nt, Homo sapiens
accgcgcgaagcccaccaggaggcggggacggacagccaggaccgcgaggcgggcggccgccagggggcgaccccggcgc

SEQ ID NO: 213997 - RNA, 101 nt, Homo sapiens
cggagacagcgcgaccggacgggcagggagacagaagccaaacaggaggaggaagggagggcgccgcgcccggggagacagaaacgaggcgcccccagcag

SEQ ID NO: 213998 - RNA, 78 nt, Homo sapiens
caccagcagcccccagagcggaacacagacagggaacaagccgccaaaggaagagcaacagagggaacagcagcagaa

SEQ ID NO: 213999 - RNA, 75 nt, Homo sapiens
gaagcggagcgcggggagcagggcgcacgaaaaaagcccgggcaaggggacgcgcagcgaagccaaagcagaccc

SEQ ID NO: 214000 - RNA, 68 nt, Homo sapiens
acaagaaggccagaaacagcaccaggggcgcacggcccacagaagaacagcagcccccccgcacaggc

SEQ ID NO: 214001 - RNA, 78 nt, Homo sapiens
ccaagagagccgcagccgccagggacgggggccaccggacagcgccaaggggccaagggagagcggggccccccccaa

SEQ ID NO: 214002 - RNA, 79 nt, Homo sapiens
gaagccgaaaagcgcagcgagcggagccgccggagggaaccaagaccaggacaaagaagacccggagagacaagccgga

SEQ ID NO: 214003 - RNA, 67 nt, Homo sapiens
ggaggccaacggcagaagccaccacaaaagcgaaagggcacaccacagaagccaacaaaaccgcacc

SEQ ID NO: 214004 - RNA, 75 nt, Homo sapiens
agaacggcaccgacgagacggagcacgccagagaggacgcggcgccgcccccgcccccgacacgacgaaccggcc

SEQ ID NO: 214005 - RNA, 70 nt, Homo sapiens
acacacgaggagcgcaaggaggccacccgaaaaacgccacaaccaaacgcgcaaagcgccaaacgaaaag

SEQ ID NO: 214006 - RNA, 92 nt, Homo sapiens
agccagcagaaagacagaggaagggagcacaaagggcgccaaaaaacagggcagcagagacccaaagccgagaccagacaaccagccacaca

SEQ ID NO: 214007 - RNA, 62 nt, Homo sapiens
agaaaaagaagaggcccaccagacagagaccaggacaggagagacaacggaggcaagaaaga

SEQ ID NO: 214008 - RNA, 76 nt, Homo sapiens
ggcagaacgaccccgaacggcccccaaggggcgggcgcgggggagcaggagaggcgcaaagcgcagcgcaccgcca

SEQ ID NO: 214009 - RNA, 78 nt, Homo sapiens
ggccacgcgcggacggcgcgagggagagggacaagccaaggccgcgagaaccaagagaaaaggcccgaagaaagagcg

SEQ ID NO: 214010 - RNA, 86 nt, Homo sapiens
caaaggaacggagagaaccgggaccccccgcggggacccggaacgggagaccgaaggaccaccggcagcgggaaaaaacgaccaag

SEQ ID NO: 214011 - RNA, 36 nt, Homo sapiens
aaggagagccaaccaggagcccgcccggccaacggc

SEQ ID NO: 214012 - RNA, 74 nt, Homo sapiens
gagagcccacccccaacgcgacggaaaggcacgaaagccagcgacaagcccacgagacgaacccccagccagca

SEQ ID NO: 214013 - RNA, 54 nt, Homo sapiens
cggccaacaccagcacgacggacaaggcgcccagacgagcccaccacggaccac

SEQ ID NO: 214014 - RNA, 54 nt, Homo sapiens
agggccaaagaagggagagaggaagacagacagacaccacccacaaaacgaagg

SEQ ID NO: 214015 - RNA, 63 nt, Homo sapiens
ggcccacgggagcacaccaacaaggcccggacaaagccgaaaccagacaccccaaaaacggcc

SEQ ID NO: 214016 - RNA, 71 nt, Homo sapiens
cagcaccccaacaacaccgcgagacgaggagcaaagaaagcagacaagcaacgaagagcacggaccaaaag

SEQ ID NO: 214017 - RNA, 71 nt, Homo sapiens
caaaaaagcggaggcgcgcaggagccaagggaacaacagaaaaaacaagagaggaagcccagaggaacaag

SEQ ID NO: 214018 - RNA, 78 nt, Homo sapiens
cccacgccccgagaggcccccagggggaacgccgagccgcggacccgcacagagaccacaggcacgcaccccgcgcac

SEQ ID NO: 214019 - RNA, 61 nt, Homo sapiens
cgcgacggcgcaccaaccagaagccacgggggccacaagaaacagcgagaacggaggccca

SEQ ID NO: 214020 - RNA, 70 nt, Homo sapiens
aagcaggccacgcaccggagagaggccgccagaagcccaaaacaaaaacacagaggggaaaaaggaagcc

SEQ ID NO: 214021 - RNA, 72 nt, Homo sapiens
cgacagcgggccgggaaaagggcacgaggccggaaccgcccagccccgagcaacagcagaggacaggaagaa

SEQ ID NO: 214022 - RNA, 75 nt, Homo sapiens
aaaccacccccagaggaggaaaagcccgccccacagggcacgggcggaaacccacaggcacaacggggccacaga

SEQ ID NO: 214023 - RNA, 51 nt, Homo sapiens
acaccccggaccaacaggcggaggcgacgacgagagggaggaggagaaggg

SEQ ID NO: 214024 - RNA, 69 nt, Homo sapiens
caccgccacaagacagagcgggaccagcaggccgcccagcgcaggccaaaccaacaaaggcgcccccag

SEQ ID NO: 214025 - RNA, 85 nt, Homo sapiens
caggaccagggcagccaggacacaggcgggaggacagcggagaaaaaggggaccaggaccccaggcgaaaagccaggagcaaaag

SEQ ID NO: 214026 - RNA, 64 nt, Homo sapiens
ggcggggaaagagcagccgggacgcaggaggcagagacagaggaagaggcagagccggggaagg

SEQ ID NO: 214027 - RNA, 88 nt, Homo sapiens
cagaggaccgccgcggagaaccgccccggacggaggcgcccgcggcccggggcgccgcgcgccaggaggaagagggaacggaagagcc

SEQ ID NO: 214028 - RNA, 74 nt, Homo sapiens
acccaggaacaccgcgcccaggaaccacggaacacggaacaaggccaaacccaaaggaaagaaaaccaaagaag

SEQ ID NO: 214029 - RNA, 56 nt, Homo sapiens
ccggacggaccgccacgcgcccgggagacgcccgcgccgccggggacgcccgagac

SEQ ID NO: 214030 - RNA, 74 nt, Homo sapiens
aaaagcaacaaagaggcggagaagagagcggaaagagcaacaggacaagaacccaaacaaaggacacgcaagac

SEQ ID NO: 214031 - RNA, 68 nt, Homo sapiens
ggagaagcagaaggagcggaaggagaggaaaacacagccaaagagaccccaaaaaccaacagcacaag

SEQ ID NO: 214032 - RNA, 83 nt, Homo sapiens
cgaagaagggcgagggagcaagcgcacacgaagagaagcaaggcccaagacccaggcgaaaagcgcacaaacggccacaaaaa

SEQ ID NO: 214033 - RNA, 67 nt, Homo sapiens
aggaaagacagaaccagccaacaaaaggaaaacgaaaaacgggcagggacaaggcgcgcaccacaag

SEQ ID NO: 214034 - RNA, 82 nt, Homo sapiens
acaacaagcgcccccacgacaagggcggcggagcagcagaacaagcgcggagaccaagggacgcgcgcaggagcagaagcgg

SEQ ID NO: 214035 - RNA, 83 nt, Homo sapiens
aggaggcacagggcgcggaccgcacgagcgcggccggcgcggaagaggccggcggcgggacggccccacgggacccgccccga

SEQ ID NO: 214036 - RNA, 81 nt, Homo sapiens
aacacacgaacaaggggaaagcacagacggggagggcggagagaacaccccgaaccgggaggcagagggacacggacgcac

SEQ ID NO: 214037 - RNA, 83 nt, Homo sapiens
gagacgccagggcagccgccaagaccgcgagccacccgccacccgggcacccagccccacgccagggaaccccacgccaccca

SEQ ID NO: 214038 - RNA, 83 nt, Homo sapiens
ggaaaaggccgaagggcacgaaagaggcaagagaggcgaagggagggccgccccaaccgacgcaccagccggaggaggaggga

SEQ ID NO: 214039 - RNA, 75 nt, Homo sapiens
ccgcagcccagacggcggaccgaaggaggccgggaccacccagccagcggaagaagaacggcaacgaaaagagac

SEQ ID NO: 214040 - RNA, 79 nt, Homo sapiens
aggccgagaagcgagcaaggcccccacccccccgagggcgggccaccgacccgggcgacccaagaaggaagagagcaag

SEQ ID NO: 214041 - RNA, 74 nt, Homo sapiens
cgagagcagagacagcaaagagaagaagaaaacccggacaaccagcggggcacaacaagggcacaacagagcca

SEQ ID NO: 214042 - RNA, 73 nt, Homo sapiens
cgcccaaaggaaacacaaggcagaaacggaaaagagggagaaaagggccaagcagcaagccacagaccacaga

SEQ ID NO: 214043 - RNA, 72 nt, Homo sapiens
cagggcaccaaaccaaaaccgaaacagggggcaagagccaaggccacgggaaacaggcacagaggcgggaag

SEQ ID NO: 214044 - RNA, 75 nt, Homo sapiens
agcccgcagagagaaccgacaggaaccagacacgcaaacaggcgaagagaaacaagaaagaagcaaaccgccagc

SEQ ID NO: 214045 - RNA, 44 nt, Homo sapiens
ggacgaagccaggaaggccagagacggggcgccacagcccaggc

SEQ ID NO: 214046 - RNA, 47 nt, Homo sapiens
ggcgaagacaagagagccaggcaccggcacggaccaccccaacaccg

SEQ ID NO: 214047 - RNA, 60 nt, Homo sapiens
acgacccacaagcgagcgaggcggccaagagaacaggagagggaaggcaaaacaacccgc

SEQ ID NO: 214048 - RNA, 74 nt, Homo sapiens
aaagaaggggagaccccaagcaggcccgggaagaagaagaaaggcacaagaagacgggcgaacagaccgagcgg

SEQ ID NO: 214049 - RNA, 75 nt, Homo sapiens
aggggcgcggcggcaacaggaacaagagcgaggaagaggcgggaaagcgagagcaaacgaagcacggcaggccac

SEQ ID NO: 214050 - RNA, 32 nt, Homo sapiens
gggcagcacaccggcagccggccagaacacac

SEQ ID NO: 214051 - RNA, 82 nt, Homo sapiens
agagggaaagacagggccaaggaagaagaggacaggaccacccagacacaggaaggggacacacaacgagaacaccaagagg

SEQ ID NO: 214052 - RNA, 75 nt, Homo sapiens
caaacagaacgcaaaggaccgggaccagcccccgaggacacgcaggagaccccaggccaaacacgggacaccacg

SEQ ID NO: 214053 - RNA, 73 nt, Homo sapiens
gggacgccgccagcgagcggcgaccggcaaccagcggcagaggaggagaggacggccaggcagaagaagcggg

SEQ ID NO: 214054 - RNA, 60 nt, Homo sapiens
ggagggcacccggggcgagagcaccgccaggaaccaccgagggccaggcccaagcccagc

SEQ ID NO: 214055 - RNA, 77 nt, Homo sapiens
cacagaggaggcgagaagccaaggccaggggcaaacagagggccaaacaagaaggcccgaagagaccccagcggagg

SEQ ID NO: 214056 - RNA, 68 nt, Homo sapiens
gaaaaagaagcgaggaacagcaggacggaaggaaacagcaaagggcgagagagacagccggccaccag

SEQ ID NO: 214057 - RNA, 59 nt, Homo sapiens
ccccgagagcgggacaaggagagggaccgccccaaaaccccaaagaacccaaggcagga

SEQ ID NO: 214058 - RNA, 65 nt, Homo sapiens
cagcagacggcacacgcagcagaagcccggagagagagagagagagaggaagcgaagaaaaagcg

SEQ ID NO: 214059 - RNA, 70 nt, Homo sapiens
gagcaaggagaggccgcgagggggaagcgagaccgggcggggacagagagcaccagcacccacggcaccg

SEQ ID NO: 214060 - RNA, 78 nt, Homo sapiens
gacgacagaacccgacaagaagcacgaacagcaggccaaagaccagagaagccaagaagagcagaagaaaaaagccaa

SEQ ID NO: 214061 - RNA, 57 nt, Homo sapiens
gcagaccggaccacaaaaaggacaccagcaagcgcaagaggagaagcaagcagccgg

SEQ ID NO: 214062 - RNA, 69 nt, Homo sapiens
cccgcaccagccagcaacccccagggggggggggcggagagagccacagccaggacaagcaggccacgc

SEQ ID NO: 214063 - RNA, 58 nt, Homo sapiens
cccgcagaccgcagaaggccggagacaccagcagagacgcccgggccgagcacaagcg

SEQ ID NO: 214064 - RNA, 69 nt, Homo sapiens
ccggagccgaaacaccggaggagcggggagagacacaaaagcaccagcagaaccgccccagggacccca

SEQ ID NO: 214065 - RNA, 41 nt, Homo sapiens
cgcagaacgggaccagccgcggaaaggcagcgggggcacag

SEQ ID NO: 214066 - RNA, 64 nt, Homo sapiens
gaccgccaggccaccaccggccgcccagccaggacgcgcccggagaagggaagaaaacgccaga

SEQ ID NO: 214067 - RNA, 61 nt, Homo sapiens
ccgggcccgaggaggcagccaagccgggccgcccgcggcaagccccccagggaaagcccaa

SEQ ID NO: 214068 - RNA, 79 nt, Homo sapiens
ccacgcgcaggggcccgggaaagggcagaggcccaacgcagaccgaggcgaagcgcgcagcgccggcccaaaggggcag

SEQ ID NO: 214069 - RNA, 62 nt, Homo sapiens
agggccaaacaccaccaccaggagaccaacacgagaaagcaaggcggcagaaacaacacgca

SEQ ID NO: 214070 - RNA, 60 nt, Homo sapiens
aaccaaagacgccaaggagaaggcagaccggaccgccaccggcggacgaccccagggaca

SEQ ID NO: 214071 - RNA, 70 nt, Homo sapiens
aaccagaagaaacgaaccccaacaccgcgaagggagcagagaaacagcccaaccgcccagacagcccagc

SEQ ID NO: 214072 - RNA, 61 nt, Homo sapiens
aaaagccaacgccggcgaagcccaaaaaaaggggagacagccaaggcaacggggacggaag

SEQ ID NO: 214073 - RNA, 88 nt, Homo sapiens
aagcaacccgacccggaggcggcggcggcggggggagccggagccgccgggagcaggcccgccacaaaaacggcagcagagccaaacc

SEQ ID NO: 214074 - RNA, 82 nt, Homo sapiens
gaccagcggcggcgacgcgcaagggcacgcggcgacgaggaccgacaccgcgaggccaaccccccagaaaacaagcccgacc

SEQ ID NO: 214075 - RNA, 35 nt, Homo sapiens
gaagggcaaaaaccggggcagccagaagacgaaac

SEQ ID NO: 214076 - RNA, 77 nt, Homo sapiens
gccaagaggaaacccaaagccgggaaacagccaagggacaaggagacaaaggggaacacccaaccggagaaagacac

SEQ ID NO: 214077 - RNA, 62 nt, Homo sapiens
aacggcgagaggggcgagaacgccacgcgggccggcgaaagcggggggcaagagcagacggc

SEQ ID NO: 214078 - RNA, 82 nt, Homo sapiens
cccagacccggagcccagggaagcagccgaccagccgcggagccgggggcagaagagaccgacccaaacccacccaagggca

SEQ ID NO: 214079 - RNA, 77 nt, Homo sapiens
gaacgggaacaccaagggcacaaggggggaccccacaccacaaaccgaggaaagaagggacagcagaaaacgcagag

SEQ ID NO: 214080 - RNA, 68 nt, Homo sapiens
aaaaaggaaacaaagcagaacaggcacaagcaggacaagcaccaagagaagaacaaggagaaaagaaa

SEQ ID NO: 214081 - RNA, 75 nt, Homo sapiens
agcacaccacggcggcacagaggagaagcagagcacaaagcacagagcaaagcaggccaggagaagagaaagcag

SEQ ID NO: 214082 - RNA, 94 nt, Homo sapiens
gccccggcggcacggcgccgaccagcaccaggggaagcgggacaacggggaggcccacgcggaccggcagcgccaccggaccaccagacaagga

SEQ ID NO: 214083 - RNA, 76 nt, Homo sapiens
agggcgaggcggacgcgcggcgcgcaggagacaggggagggcccacaaagggggaaaaacgagaccacccagagga

SEQ ID NO: 214084 - RNA, 120 nt, Homo sapiens
caagaaaaacggaccaccgagaggaggggagacacccaaaacacaccgaagccaggggggcagaagaaaaagcaggacaacagggcaaggagcgggaggacagaaagccaagggaccaac

SEQ ID NO: 214085 - RNA, 69 nt, Homo sapiens
acaaccaccacacaggcaccccaggaaacagaagacagccgaaccaagggcgacaaccagagacaagca

SEQ ID NO: 214086 - RNA, 78 nt, Homo sapiens
acaacagggaaccaaggggacaaaccaacagaagggcaaccagcaaaaagggagacggagcgggccgggaacaacaaa

SEQ ID NO: 214087 - RNA, 71 nt, Homo sapiens
gacaccgggccgaaaaagaccaagcgagccccccccaaggaaaacccggcgaaaaacagccaagagaaagg

SEQ ID NO: 214088 - RNA, 50 nt, Homo sapiens
aggggaaaccccgaaaggggggcagggagagaaggggagaaaaagagccg

SEQ ID NO: 214089 - RNA, 72 nt, Homo sapiens
gccacaggccggcaacgccaggccacacaggcagacaaagaggccgccccagcgcgggccacggggcaaagg

SEQ ID NO: 214090 - RNA, 83 nt, Homo sapiens
agagccacaccgagaaccgccgcggagccccacccaacgggaaaggagggaagggcaacaacccaccgggggaaacaccagac

SEQ ID NO: 214091 - RNA, 77 nt, Homo sapiens
caggaccaggcacccgggaagggaaaggaggacaaaaggaaaaaaaaaaagggaagacagagaggcggggaaaggca

SEQ ID NO: 214092 - RNA, 73 nt, Homo sapiens
gaaaagcgcagcgagcggagccgccggaggaccggcacgacccccaagcggagaagcgggaaaggcgccaagg

SEQ ID NO: 214093 - RNA, 76 nt, Homo sapiens
aaacggcgaagcccaccagacggagcgaaccaccgaagggaggagccagaacaaacgcacaagaaagcaagaagac

SEQ ID NO: 214094 - RNA, 72 nt, Homo sapiens
aaaaagacgccccaggccggaggcaaggaggccacggggccgaagacaccaaccgggcaccagccaaacgga

SEQ ID NO: 214095 - RNA, 58 nt, Homo sapiens
cggagccggccccaagcacggaacaccgcacggcaaggagcggcaaaagaaacaggaa

SEQ ID NO: 214096 - RNA, 97 nt, Homo sapiens
agccccggagccgcccaagccgcgccccagagagcgcccgagagaacagggggccgcggccagaacacacacccgccgcaggaaacacagggcaagg

SEQ ID NO: 214097 - RNA, 78 nt, Homo sapiens
agagcggcagcagcaccagcccaagagaagggcccgaaaacggccagcagccccgacgcaaaccccagcaccagcagg

SEQ ID NO: 214098 - RNA, 69 nt, Homo sapiens
agcccgggcaccccgaggacaaccgaggcgggacaagggcgcaccggggcgcagcgagggaggacaacg

SEQ ID NO: 214099 - RNA, 79 nt, Homo sapiens
cgacacaagcccacgcgcccgcagcaagacgggacggagcagcagccaagcggacagagaccgccccgccaccccgggg

SEQ ID NO: 214100 - RNA, 74 nt, Homo sapiens
aacggaagaacccagagacgccacgcaagacaaacagagaacaggacagcaagaacgagggaacgggaaaagaa

SEQ ID NO: 214101 - RNA, 69 nt, Homo sapiens
aagaggaacaccgccggggaccagagagcaaacaccggagccagggaaagaagaaagcaccccgcaaaa

SEQ ID NO: 214102 - RNA, 63 nt, Homo sapiens
accagaacagagagccacacacccgaaaggagggagggggggaacggaacccaggcgcaaagc

SEQ ID NO: 214103 - RNA, 84 nt, Homo sapiens
agacgcaagccccagcgaccccaagcaaaccggacacaaccagagggaagcacgcccgggcacagcggaagagacgacggaaca

SEQ ID NO: 214104 - RNA, 44 nt, Homo sapiens
cacaccccgacaggccgggcccagaccggcgcagccgaccgaag

SEQ ID NO: 214105 - RNA, 78 nt, Homo sapiens
agagccgacgcacgcgaggagcggcaggacgcgaggagcgggcaaggagccgcccggcaaagcgaaagcgcaggaccg

SEQ ID NO: 214106 - RNA, 83 nt, Homo sapiens
ccccaaagcgggaacaggaaacggagaggcgggcggaccaagaccccccccaggagcaggccccccccccaacaaccggccac

SEQ ID NO: 214107 - RNA, 38 nt, Homo sapiens
accccaccacacagcagaaggcaacgacagaggaagaa

SEQ ID NO: 214108 - RNA, 71 nt, Homo sapiens
aaaagcaagccaaacgcccaggcgcagggcgcagcggcagcaaggcgacagacacagcaccggccccggca

SEQ ID NO: 214109 - RNA, 123 nt, Homo sapiens
gagaagaagcagcagagggcaaagagaccggagaagaagaggcagaacgcaggacacgcaagagcgaaacacacgaccagaggaagaaggaggacagagccgaaggagaggcggaaaagaaaa

SEQ ID NO: 214110 - RNA, 87 nt, Homo sapiens
cgccgccgcgccgcgccgcgccgcaccccgagcgaccggacagcccagagcaagcacacggaggcccgggagccagaccgggagccc

SEQ ID NO: 214111 - RNA, 69 nt, Homo sapiens
cgccacagcgcagcgccgacggacccggaaaaccggcccccaacgacaaaaggcaacagcagcgcagga

SEQ ID NO: 214112 - RNA, 72 nt, Homo sapiens
gaggaacaaagacagcccaccaggaagagcgaaaagcacgcaaaaaaccacgacaagcaacacgacaaaaca

SEQ ID NO: 214113 - RNA, 68 nt, Homo sapiens
agcgggggagaggacgcgcgaaccagcagcaggcccagggaccgaaaacaaggacacgaggcacaagc

SEQ ID NO: 214114 - RNA, 70 nt, Homo sapiens
ggggagacggcggaagaggagaaggggggcaaaggacagcagaccacagcccggcaggcccaaaaaccca

SEQ ID NO: 214115 - RNA, 108 nt, Homo sapiens
aagcacacaccagagaccagaagaaagcggggaagccagcgaacgcagggcaagggaccgacaaggaccgacaggaggacgggcaggagcagaggcacggagaaagga

SEQ ID NO: 214116 - RNA, 71 nt, Homo sapiens
agacacccgaagagagaagggcggagcccacgccccaggacacgcagaggagcacacaaggggcgagagcg

SEQ ID NO: 214117 - RNA, 69 nt, Homo sapiens
caaacggggggcgcggagggaccagcgagcgggaggcaagccaacaaaggaacgagcagcaacggccag

SEQ ID NO: 214118 - RNA, 55 nt, Homo sapiens
cgcgggaagggcggggagcggagccaggccccggaacccgacagcaaagcgcaac

SEQ ID NO: 214119 - RNA, 100 nt, Homo sapiens
ggccccgcggcaggaagccaaggcaccgggacgcgcacccccgcgccgcacggggacgaggcaagaacggaagcacgggcggaggaaagcacaagcagag

SEQ ID NO: 214120 - RNA, 84 nt, Homo sapiens
gccgccccgggcgcagacagagcaccagcaccagcagagagggcccggaggagaaacgagcagaggagcgagaccgaggggacg

SEQ ID NO: 214121 - RNA, 80 nt, Homo sapiens
aacaagggggaaacagcagggcaaaaccagaaaacgccagggagaagaagagaagacaggagacaaacgggaaagcaaac

SEQ ID NO: 214122 - RNA, 70 nt, Homo sapiens
cgccgccgcgcgcgcccgccgcaccgacggcccgccacgggccccgcagccgcgcccgagcgcccgagca

SEQ ID NO: 214123 - RNA, 72 nt, Homo sapiens
accgagcccaagcgcaacaccagcaggccccaggccaggccagacgggcgccagggcggaaccaagcaggga

SEQ ID NO: 214124 - RNA, 70 nt, Homo sapiens
agccgggaaacacggcgcggaggcacccaccacgggccaggcgggccagaggcaagccgcgggagccacg

SEQ ID NO: 214125 - RNA, 72 nt, Homo sapiens
cgaagagccccagcaggagacgaacggcgcgcccaaaggaaaccccaaggccgccaaggcccagggagaaaa

SEQ ID NO: 214126 - RNA, 78 nt, Homo sapiens
ccaacggccaagaacaagaacaaaggccgcgacggagagagaaaaggaggaggacggcacaaaaaaaggcagagaaga

SEQ ID NO: 214127 - RNA, 81 nt, Homo sapiens
acccaggcgcagcaacaaagggcagcgagcgaggccgggcgcaggcgagggcggagaacggaaaagcaccaggaagcagag

SEQ ID NO: 214128 - RNA, 68 nt, Homo sapiens
gggagggccggcaggagcaccggcccaagacaaacgagagaaaaggcacggcgggagcagcggaagac

SEQ ID NO: 214129 - RNA, 67 nt, Homo sapiens
aacccggcacagagagcaaggggaaacacaccagcacacaaagaggcggcgaaggccgccaggggcg

SEQ ID NO: 214130 - RNA, 72 nt, Homo sapiens
gccgccccgcgagcacagagcccgccgccgaccgccgcccgccacacccgccgccagacaccgaaaacgaga

SEQ ID NO: 214131 - RNA, 68 nt, Homo sapiens
ccagcgcgggacacacggagaggggcccgaaaacccgcagaaacggagaaacgaacccccccgagaaa

SEQ ID NO: 214132 - RNA, 53 nt, Homo sapiens
ggaggaccaccggcaacagcaacgcacacggcgccacacgaggccacgaggcg

SEQ ID NO: 214133 - RNA, 81 nt, Homo sapiens
cgaccgcccgggagacggagcgaaggccggagaaacaagggacgaacaaaacaccgaggaaggacacacacaacacgaaac

SEQ ID NO: 214134 - RNA, 80 nt, Homo sapiens
ggagaccccacggagcgggcgacgagcgacccgggagacacgacgggaaacacaaagaagacaccagaagggccagcacc

SEQ ID NO: 214135 - RNA, 73 nt, Homo sapiens
gcgcggggccgcgcagggcggccccggcgggggcgcgggccccgcagggggagcccgcgccaggggcaggccc

SEQ ID NO: 214136 - RNA, 96 nt, Homo sapiens
acgccaccggcggcgggcacacagacacgcacggagggcccaacccacagcgccccagggacagagcagaagggcgaaagaccgggccgcagaaga

SEQ ID NO: 214137 - RNA, 56 nt, Homo sapiens
gaaccaaagaagcaaaacacgagacagaacaacggcccagccccacaggacaaaga

SEQ ID NO: 214138 - RNA, 80 nt, Homo sapiens
cagaagaaaagggacgcaagaaacccaggacgagaacagcaacaggccaacggaccacaccaaaagccaccaaaggaaca

SEQ ID NO: 214139 - RNA, 63 nt, Homo sapiens
caggaccgcgacggcagcagagcaccccaacagccacagccacacacagcccacaggaacggg

SEQ ID NO: 214140 - RNA, 80 nt, Homo sapiens
ggggacccaggagccggccagcgcgccggagccgccgaggccccggccgcagccaggagcggcaccgcccggcccccaag

SEQ ID NO: 214141 - RNA, 82 nt, Homo sapiens
gaggaaaagaggacaagggacgccccaagccacgcacccagagaccagcgaaccagaagaaaaaaagaagagaaagcagcga

SEQ ID NO: 214142 - RNA, 71 nt, Homo sapiens
gcgggagaaaagacccccaagagcacagccggaagagcagcagccgcccaaaacacaaaccaaagaagaaa

SEQ ID NO: 214143 - RNA, 95 nt, Homo sapiens
aggcaacaccggaaaacaccccagaggaaccagaccagacgccaaacgaggcagcaacacaacgcagaaacagagagcgcacagaaggagaaaga

SEQ ID NO: 214144 - RNA, 80 nt, Homo sapiens
aacaacagcgaggaagaagaggacgacgacgacgaggaagaggaggcgaggccgcaagcacacaagacagaagacgcggg

SEQ ID NO: 214145 - RNA, 70 nt, Homo sapiens
cccccccccccaccccggcgggggacacgcccccggcagcaggcaagccacagccaggaaacaccagccc

SEQ ID NO: 214146 - RNA, 56 nt, Homo sapiens
ggcagaggcagaaccacaggcgagacagagggaaagaaccaccaccaacgagacac

SEQ ID NO: 214147 - RNA, 83 nt, Homo sapiens
cagacgcagccgagacaccagcccgaaacaccaccaaggacagagcagccaggccacgagccagaaccgagacacacacagga

SEQ ID NO: 214148 - RNA, 58 nt, Homo sapiens
gaggcgaaagcaaccacagagcagaaacagcccagcgaagccgccgccacccaacccg

SEQ ID NO: 214149 - RNA, 83 nt, Homo sapiens
aaaaaggagaagcggagaaagaggccagggacccagaagaagaagggcaagaagacacagaagcacaaacagcaaaaaccgcg

SEQ ID NO: 214150 - RNA, 69 nt, Homo sapiens
cgaccagccgccaaagggcagacagagcgaccgcccaacaccggaacgacacccaacacaccacaagag

SEQ ID NO: 214151 - RNA, 84 nt, Homo sapiens
acaggaggcagagccaaacacccagggaggggggaagacagggcccagcaccacaggacgggccgggaagccgccagcagggac

SEQ ID NO: 214152 - RNA, 79 nt, Homo sapiens
ccacgagggagcgagggcccgggggcaacaggccgaagaaggccagggagaccgccacgacgagcgcaacagcgaccac

SEQ ID NO: 214153 - RNA, 75 nt, Homo sapiens
caggcccaaacgccagaacaaaccggccaccagggagacgagagagaaaggagacaacgagaagagagaagcgaa

SEQ ID NO: 214154 - RNA, 71 nt, Homo sapiens
gcagcggcgccggccgccccaccggcggaacccagcaagaccaaccaggcacaggagagaaacgggagggc

SEQ ID NO: 214155 - RNA, 71 nt, Homo sapiens
gcccgggcgggagcaagagacaggcaaacaagaggggcaagaagcacgccacagcgaggaagggagaaacc

SEQ ID NO: 214156 - RNA, 80 nt, Homo sapiens
gacgcgcccgacgcccggaagccccggaccacacagaagccgagccgggaacccacagggaggcggcggaggcggaccgg

SEQ ID NO: 214157 - RNA, 62 nt, Homo sapiens
aaacagccgaaacgacagaagaggacaccgaggaccgcgcaggcggacaggacaaaacgaag

SEQ ID NO: 214158 - RNA, 84 nt, Homo sapiens
ccgcgagcaaggagcgcggaacggggagcgccggagcagcggacccaggcagacaagggaaacaaccagacgccgcagaagaac

SEQ ID NO: 214159 - RNA, 80 nt, Homo sapiens
gcagaacgcacagagggagagcagggggagaaaggcggggagacaaccccccccaagaagcgagggacaagcacgaccca

SEQ ID NO: 214160 - RNA, 69 nt, Homo sapiens
gccgcaggaggagaaagacgaagacgagcgggagcaagacccgacagacgcaagaacagagaggaacag

SEQ ID NO: 214161 - RNA, 71 nt, Homo sapiens
gggcccccggagagaaacacaacaccgaagaacgcccggaaacagaaaacagcccagcagcccggcaagca

SEQ ID NO: 214162 - RNA, 80 nt, Homo sapiens
ccgcggacagccgggccgaacgcggaaagccggcccggccacccccgggcccgcgccccaggcgagagccccgcaacgac

SEQ ID NO: 214163 - RNA, 74 nt, Homo sapiens
ccgaaaacaccaggaaagacaggagaccaaaaagagaacagacccccaagagcgaccccaccgccagcaacccg

SEQ ID NO: 214164 - RNA, 85 nt, Homo sapiens
gcgggaccggggcgcagcggggcgcgaggcgaggggcagcagacaacgaggacaagcccggaccaacaaggagaacgcgcgcaca

SEQ ID NO: 214165 - RNA, 73 nt, Homo sapiens
gagcgcggaacaggacgccccgaaacaaggcccccagccagaaagaccagacggagcacccagaaaagaggaa

SEQ ID NO: 214166 - RNA, 77 nt, Homo sapiens
caggaaaccaagaagcacagcaaaagcacagggcacagggggaggcgaagaggaaacaccgaggaagaggaggagga

SEQ ID NO: 214167 - RNA, 101 nt, Homo sapiens
caagccggaagagcccaggagcgacgacaagccgaccaaagcagcaagggaccagcgccagccagccagggggggcagagccccacacaaggcagagccgg

SEQ ID NO: 214168 - RNA, 76 nt, Homo sapiens
cagacccaaggcccccgaggagcgcgggcgccgaggagaaggccacagcagggagcaaagaacgaacgagcccgcc

SEQ ID NO: 214169 - RNA, 80 nt, Homo sapiens
accagagcagggcccccgagaaacaccggggccagagcgaaagcacacgaagaggcagcccagaagaagaaagcaagcag

SEQ ID NO: 214170 - RNA, 72 nt, Homo sapiens
caggcgagaagccccacccgacccgaccgcccacaggaggagccaggaaagacacaacccacgccgaaaagc

SEQ ID NO: 214171 - RNA, 80 nt, Homo sapiens
ggggaggaggcggggagcgaacgcaaagagggcgcccgcggagaacaacaaggagcaggaggagccaagcgggaaaaggg

SEQ ID NO: 214172 - RNA, 87 nt, Homo sapiens
accagcccagaaaacaacgaagaaaaaagcgcgcaccaggaagaaacgaggagagaaagaacccacgcaggacgacagaagaggccg

SEQ ID NO: 214173 - RNA, 77 nt, Homo sapiens
cgccgccgggcggcccggaccgccccaccaccgcgggacacgacggaaacgggagacgagagagaaaaaaaagagga

SEQ ID NO: 214174 - RNA, 82 nt, Homo sapiens
gggacccgccgcggcgagcgccaccgcaggggacccagacaggagcgcgggaagaagccggcccggggccgcggacgaggac

SEQ ID NO: 214175 - RNA, 84 nt, Homo sapiens
acaaaacaaccaacgaagacaccgagcgaaagagaaagagcaacgagaacccagccaaaaagcacaaaagcaaacagaaggaaa

SEQ ID NO: 214176 - RNA, 78 nt, Homo sapiens
ccaggagcggaggaccgaaccgcggccgacccagagccacccaccgagagacagaaggaggaacaggagcaccacgag

SEQ ID NO: 214177 - RNA, 82 nt, Homo sapiens
aagagaagcacccagaagaacgcccagcaggaaaccaccccacccaacccccgacacagaagaggagaaaacggaacaacag

SEQ ID NO: 214178 - RNA, 77 nt, Homo sapiens
aagagggagcaccacggaccccaaggaagccacggcagacacacaacccgacccgacgagggaagcaagaagcacag

SEQ ID NO: 214179 - RNA, 74 nt, Homo sapiens
gacacacacacccaacccaaaccaagcggcggagaaaccaccacaaacacgaggccagcaacgaccaacaagac

SEQ ID NO: 214180 - RNA, 75 nt, Homo sapiens
gcaagcggccaagcacaaagagcgccccacgagagaacggcacacgcgagcggggcaccaacaagcagaaacagg

SEQ ID NO: 214181 - RNA, 74 nt, Homo sapiens
cgaagaccggaagccaccacgacagaagccacagagaacagacgccccgagagcagagaacaaagaacaaagac

SEQ ID NO: 214182 - RNA, 76 nt, Homo sapiens
ccgaggacccaacaaggcagccaacgggaggagacccaggacaaagcaggcccaaaagaagcacgccagggcggca

SEQ ID NO: 214183 - RNA, 37 nt, Homo sapiens
gaagagccccagcaggagaaacggaacaccgggcaga

SEQ ID NO: 214184 - RNA, 69 nt, Homo sapiens
caaaagggccaaagaagggagagagcgggcggcaaagaaggggcgaccacagaggccccccagcagagg

SEQ ID NO: 214185 - RNA, 77 nt, Homo sapiens
aggccggagacaccagcagggcggaagggcaagaaagaaggaaagcccaagagggagcgcccgacacgcccacgaac

SEQ ID NO: 214186 - RNA, 57 nt, Homo sapiens
agaaaccagaaccagggacggcaggggagaccacaccgccggcccggcagcggccgg

SEQ ID NO: 214187 - RNA, 78 nt, Homo sapiens
gaggggccccggcagcagcccgacgcaaaccaaggacggggaccgcacacccaagccacaacacagcagcccccagga

SEQ ID NO: 214188 - RNA, 72 nt, Homo sapiens
gcgaagacagggggcccaaacgggagacaacccccgaaggagggcccagacccccccccagcagccggagaa

SEQ ID NO: 214189 - RNA, 86 nt, Homo sapiens
gaacggggccagcgccgcgcccggggccggcgcccgggccaccggccgcaggccaaacaccagagcacccagaaggaacaaaagaa

SEQ ID NO: 214190 - RNA, 69 nt, Homo sapiens
aaaagaaacaagaaggagaacaaaagcaaagccccagacggacggcacgggaggacccagcccacggaa

SEQ ID NO: 214191 - RNA, 86 nt, Homo sapiens
agcgccgcgacacaccgcacccacacgggcgagaagcccacgaggcaacacgcaaggccgccaccagaccaccggggcgcccgcgg

SEQ ID NO: 214192 - RNA, 65 nt, Homo sapiens
cccaagccaggcccacgcaccaaggaggagccggagaccagacaagcacccccaggcagaggcgg

SEQ ID NO: 214193 - RNA, 77 nt, Homo sapiens
aacacagaccaagaacaagagggaaacccaagcagccaacccccccccagccaacccacagcgaagcaaaaaaccca

SEQ ID NO: 214194 - RNA, 83 nt, Homo sapiens
cgacaaaagcgcagcaagacggccgcgcggcccgcagggaaaagacgacggagaagaaaaaaaagaaaaaagaagaaaaaaga

SEQ ID NO: 214195 - RNA, 78 nt, Homo sapiens
gcgccccagagcccagggcaggacaccgacaggaacagggaccacggggaaagggacgcggcacagaacgaagaagaa

SEQ ID NO: 214196 - RNA, 76 nt, Homo sapiens
acaagaaagcagaaacgaaagaaagcaagagcgaccggccgaccgcccaagagaagggacgccgggggcaggaccc

SEQ ID NO: 214197 - RNA, 71 nt, Homo sapiens
aacgcggcaagagacgacagaaaaaccacagaccaggacccaagaaaacccagcggggaccggccacaagg

SEQ ID NO: 214198 - RNA, 103 nt, Homo sapiens
ccaacccaaagagacagacgagggagaaacgaacggggcgacaaacgaggggacaaagagggggcagggagagagaaaacaccgaggccagaacccaaggagg

SEQ ID NO: 214199 - RNA, 53 nt, Homo sapiens
ggacgcaagaaacccaggacgagaacagcaacagacccaccaccacccggccc

SEQ ID NO: 214200 - RNA, 84 nt, Homo sapiens
gggagagaacccaaccagggggaaacacagaacgcaggggcccccaccaccggagccagagaaggggcacacgccacccccggc

SEQ ID NO: 214201 - RNA, 71 nt, Homo sapiens
ccgggaaagggacaagaagggcaaagccgaagcgcagggagcaggagaagcggagcgaaggggcgggcagg

SEQ ID NO: 214202 - RNA, 76 nt, Homo sapiens
cagcccacaagagcacgggaaggaagggacaagacccacagcaaagccagcgacagaagccagaagccagagccgg

SEQ ID NO: 214203 - RNA, 74 nt, Homo sapiens
gggagccccggcgggccgcgccgggacggcccaccagccaccccaccgcgcagggaggccgggcagagccgaaa

SEQ ID NO: 214204 - RNA, 71 nt, Homo sapiens
cacacaagagccaaacaagagcgccaaagccacagaaaccagagacacacagaccacagacagcccgagga

SEQ ID NO: 214205 - RNA, 100 nt, Homo sapiens
gccacaaccgccagacaaccggagccacgccccacgaccgccagccccgacaagggaccgggcgggccccgcaggaaacccccaccggcccacacagacg

SEQ ID NO: 214206 - RNA, 81 nt, Homo sapiens
cgaggccaacgaccggagaggggaacagacgcagggcagggccccgcccggcggggaaggcgaagggagggccgccccaac

SEQ ID NO: 214207 - RNA, 71 nt, Homo sapiens
cgccacgcgcggaaggcagcgcccagcagcgcagaccggagaagaacaagccgacccaaagccgccgccga

SEQ ID NO: 214208 - RNA, 79 nt, Homo sapiens
gcgcgccaggaccgcggggagaccgggcacacggacgggcagcggggaagaagaaaaggaaccgaggccccccggcgac

SEQ ID NO: 214209 - RNA, 67 nt, Homo sapiens
cggagcggcgcagccggagggggccggagagccagaaacagagaggcagaccacagcgggaggacca

SEQ ID NO: 214210 - RNA, 80 nt, Homo sapiens
gcgcagaagaaacccgcggcgaccacagccaaagcgggccgcggagccagcgcccggcaaggagcgagcgggagacaccg

SEQ ID NO: 214211 - RNA, 35 nt, Homo sapiens
agacgagggcacaaggacaggccaaacggccggag

SEQ ID NO: 214212 - RNA, 63 nt, Homo sapiens
acccaaacaagacgcaagagagagaacaaggagcaggccaacggccagaagaacgagcaaaaa

SEQ ID NO: 214213 - RNA, 86 nt, Homo sapiens
gcgccgcgcgcgcagggccgccggcccgcagccgccaccacccaggaccagaaggcagaaggagaagacagccgaagaagagcagc

SEQ ID NO: 214214 - RNA, 70 nt, Homo sapiens
gccacgccccgcaggggaacccaggcgggcccgcggggaaggacgaggcagagcaggaagcggcccgaac

SEQ ID NO: 214215 - RNA, 81 nt, Homo sapiens
gcgacccgccgcgcgggcccgcggcgcggcgcgggcgccccggaagcagcggagaagccgaggcaaccaagaaaaagcacg

SEQ ID NO: 214216 - RNA, 89 nt, Homo sapiens
cggcacgccgggaggcggcgggacaacgacggcgggggacgggcaccgggccgcgggggagcgcggcgcacccgcgcgcagcagcagag

SEQ ID NO: 214217 - RNA, 55 nt, Homo sapiens
ccacaaccgccaccacccagggaggaccacgaccccgcagggaacacgcccgcgc

SEQ ID NO: 214218 - RNA, 80 nt, Homo sapiens
cgagcagcgaacgaggcaagcagcgccgagcccaggcaagagcccgcgagaagccaaggccaccgagccacaagaccaca

SEQ ID NO: 214219 - RNA, 74 nt, Homo sapiens
cccccacgggggagcacccagcccacccagccgggccgggggccccaagaagcgaccacgcccgcagcggaagc

SEQ ID NO: 214220 - RNA, 81 nt, Homo sapiens
gcccacaaagcaaaagagagaaagaccagggagcaacgggagaccggaaacagaagcacaaaggaccgcccgcaaaacggg

SEQ ID NO: 214221 - RNA, 76 nt, Homo sapiens
aggaaagacagaccgagccgggcaccgccacggaggacggagggaggagagcgacagggccggggacacaagcaac

SEQ ID NO: 214222 - RNA, 68 nt, Homo sapiens
gggcgcggcaccacgcccgccccagcggagagcggccgccaccagaggacagcgccccgccaaccagg

SEQ ID NO: 214223 - RNA, 70 nt, Homo sapiens
gccgagagagccgagaggcacaacagaacccaaggaccagaagcacccaggaacagccgcaacgccgcac

SEQ ID NO: 214224 - RNA, 67 nt, Homo sapiens
caagaagaaggagcacagccaaaagcagcgcaagccggaaaaggccgcaggcccaaacgcacacaca

SEQ ID NO: 214225 - RNA, 79 nt, Homo sapiens
aggcggacggaggagcaggcgagaagagaagggggagaccgagaaagaaaagaaagaaaacaagggaagcaaagagaag

SEQ ID NO: 214226 - RNA, 73 nt, Homo sapiens
ggggaaaggcaacggccccagccacaccaaaaaccccaacaaaggaagaacccgacaagggccgaacaccaac

SEQ ID NO: 214227 - RNA, 74 nt, Homo sapiens
ggacggggacaccaccacgacgcgcaccacaggcaaaggaacagagcacacagaccacaaggcagcaggccccg

SEQ ID NO: 214228 - RNA, 54 nt, Homo sapiens
ccccccaaacaaacgcagcaaaacagccagggggcacaccaggccccagaccag

SEQ ID NO: 214229 - RNA, 82 nt, Homo sapiens
cggcccccggccgcccgggccgcgccgccgcgccgccgcgccgcgccggcagaaaacgacagaagcacgacaacaacgggca

SEQ ID NO: 214230 - RNA, 50 nt, Homo sapiens
agacgcagggcgcccccgcaaagaaggaaccgaagaaaggccagaggccc

SEQ ID NO: 214231 - RNA, 66 nt, Homo sapiens
gagccccgagacccggcccacccgccccccaggaggcacagcccggcagagccagagcccccgcgc

SEQ ID NO: 214232 - RNA, 74 nt, Homo sapiens
gccgggcccgcgggccccagcagcggccagcgggccccacacccacgacagggccaagcaccacgacagcccgg

SEQ ID NO: 214233 - RNA, 71 nt, Homo sapiens
gccaggcaccaggacagcggcggcgggccgggcagcccggccgacaaccacgaacagagaagcacaccgac

SEQ ID NO: 214234 - RNA, 79 nt, Homo sapiens
agaaacccaggaaacgagaccagaccccagagaggaggcacagaagccccaggccccagcagccccccaaggaccccgg

SEQ ID NO: 214235 - RNA, 81 nt, Homo sapiens
agggagcagaggggacagaggcaccaaggaccccaagacagggcagacacaaggaacagccagccaggagaaaaacgaacc

SEQ ID NO: 214236 - RNA, 82 nt, Homo sapiens
gaacccacgcgcgacgaaaacacaagagacggaaaaggaagggaaggagccgacaccacaaggagaccagcagaagggcgga

SEQ ID NO: 214237 - RNA, 79 nt, Homo sapiens
cccggggccgggagcgcccgaggaacacgccgcaggcgccaagccccagagacccgagaaaaagcccaaccaggaacaa

SEQ ID NO: 214238 - RNA, 73 nt, Homo sapiens
accgagggagacccagcaaagccgcaaggacagccgcacagaacaccaagggaaagaaggacaaacagaggcc

SEQ ID NO: 214239 - RNA, 79 nt, Homo sapiens
agggaaccgaccccagaacccggacgggcggcggccccgagccccggccccaaagacccaaaacagagacaccccccag

SEQ ID NO: 214240 - RNA, 78 nt, Homo sapiens
gcgccgggcaagccggcaggagccgcgcagggaaggacgcaaaagaccacccacggaaacaggggagaggaaaagaaa

SEQ ID NO: 214241 - RNA, 77 nt, Homo sapiens
gacggccgcggcaaggcaagagcggcggcgccaaggaagaagagacacgaagagcacggagcggaagaggagacgac

SEQ ID NO: 214242 - RNA, 56 nt, Homo sapiens
agccagggaacggaggagcgagccacggcgggagccccaagagcacagccaaacca

SEQ ID NO: 214243 - RNA, 75 nt, Homo sapiens
gcgggaagggacaaaacagaggcaacaaggagcagaagaccacaagccgaaaaaaggaagcgaaccccagacagg

SEQ ID NO: 214244 - RNA, 77 nt, Homo sapiens
gccgaggggaacaccggcgagcccgggcggggccggcagcaccgcggccgcagagcacaaagcagggcacagaagcc

SEQ ID NO: 214245 - RNA, 78 nt, Homo sapiens
ggagaggaacaggcggcgggcgagccccgacacggccggcgccggggacgcaaggcccggacagcgagaacgagagcc

SEQ ID NO: 214246 - RNA, 76 nt, Homo sapiens
gccccagaggacaccagcggggccgcgggagagcgggggcgggaggcgggccccgggggcagcacccccagccagc

SEQ ID NO: 214247 - RNA, 77 nt, Homo sapiens
cggcagcacaggcacacagcaaagaggaaagaagcgaagccaggagggagaagggaagccagagacaccaagacgag

SEQ ID NO: 214248 - RNA, 75 nt, Homo sapiens
cgccccgccgcggggcgcgcggcgccggcggcgcgcggcccccgcgcagacaaagaagagcgaggacacccagag

SEQ ID NO: 214249 - RNA, 97 nt, Homo sapiens
cccaaagaagggagccgaagcgaggcggaaaacgaagacagcaaaggacagaaaacgggccccagacacaagccccaccaagaggacaccccaggaa

SEQ ID NO: 214250 - RNA, 80 nt, Homo sapiens
aacgagacgagaaaccggagacccaacaaaggcccagagacggagacagaggaagacgcgcgcggaaaaggaacagaaga

SEQ ID NO: 214251 - RNA, 87 nt, Homo sapiens
accgcggcccagccccaccacggccaaaacacaaacaagaccgcaggaagggaaaaggccgaggcacagcgggaagaccgcaaagac

SEQ ID NO: 214252 - RNA, 82 nt, Homo sapiens
agggggcaggaggccggcgcgggggaggaggaaccccagagaaagccgaacccggccgaaggaccccgccgacccccaaagc

SEQ ID NO: 214253 - RNA, 79 nt, Homo sapiens
ggcgaagcggccgagcaggcgagcgaacgacgggaggggccaaagggagagggacaacacacgagcacaaacacaagcg

SEQ ID NO: 214254 - RNA, 83 nt, Homo sapiens
gacaaggccccacccagcccgcagaaggaaaaacaaggaaaaaccgagcgaagcggaacaggaggcccggacccccagcacaa

SEQ ID NO: 214255 - RNA, 75 nt, Homo sapiens
ggacgcgccggcccgaagaaggcgggggagagaaccgaaggcaccaaaagcaagaaacacaacgaaaggaaaagg

SEQ ID NO: 214256 - RNA, 59 nt, Homo sapiens
gaggagccagagcaaggggaacgccacggacgggcaacccccgggcaacgggaggaggc

SEQ ID NO: 214257 - RNA, 65 nt, Homo sapiens
agaaccgaagccggaccggggcccagcaaagccaaaggaaggaccagagcaccggccaggcggag

SEQ ID NO: 214258 - RNA, 87 nt, Homo sapiens
ggagcgagggaggacgccgggacaccggaagccgagaaagaacaccccaccagaccacccagcaagcccacaaaaaaggcacaagca

SEQ ID NO: 214259 - RNA, 74 nt, Homo sapiens
cgccggcaccgggccgaaggcggcggcgccaggagcgcggccccgccggcccgggcggaacagggaggcagcgc

SEQ ID NO: 214260 - RNA, 77 nt, Homo sapiens
cggaaggcacgaccacagggagaaagacagggcagaccgccagcagcacagcaagccacagagagggccggcagggc

SEQ ID NO: 214261 - RNA, 86 nt, Homo sapiens
gcccccggggcccaggcccggacccgcggccggcccggcgcggcccagcgccccaggcaaaagcagaccggaaaacccaccggcaa

SEQ ID NO: 214262 - RNA, 71 nt, Homo sapiens
agcacgcagaaacagcagacggaggccgggagcaggcaaaggagcccgaggcacggagggcgccaagagaa

SEQ ID NO: 214263 - RNA, 68 nt, Homo sapiens
caccgagaagacccgcggaacagccccaccccgcaccaacagcaggcaagaacgccccggcaaggacg

SEQ ID NO: 214264 - RNA, 77 nt, Homo sapiens
accaagaagcacaacccccccagacggaccgcccaacgcccagaggacaggccggcaacagaacggaggcaaccggg

SEQ ID NO: 214265 - RNA, 118 nt, Homo sapiens
ccgggcagggacagagcagaccgggaccagaggaacccacccccccaaggagaaggacccaagggacaaccagcccaaggaccccccaaagaagaaagaggagaagagaaagcagcag

SEQ ID NO: 214266 - RNA, 60 nt, Homo sapiens
cagcacaaggaagaagccggggaggcagggggcacgagcgaagacccccccagcgcccgc

SEQ ID NO: 214267 - RNA, 86 nt, Homo sapiens
gccagcgccgcgacgggaggagcgccggaacgccgaggcccaggggccgcaccggggcgcgggccacgcgaccacccggaggaggg

SEQ ID NO: 214268 - RNA, 76 nt, Homo sapiens
accggaggggcaagccggcgaagccacggcgggacaggaagccacaggaaaagcgagacacagcagaacaccggag

SEQ ID NO: 214269 - RNA, 80 nt, Homo sapiens
caaggccccaaggacagcagaacaaagaaagcaaaagaaaaagaaaacagaaagcaacaaaggggaaccacaaaaccaag

SEQ ID NO: 214270 - RNA, 77 nt, Homo sapiens
cccaccgccggggcgccaaggccgggagcaggaggcggacacaaggagggcgggccccagggaggaacgcgacgccg

SEQ ID NO: 214271 - RNA, 75 nt, Homo sapiens
acgaccaggggcacagggaacaccaggaccaccgagagcgcgccaaagaaaaaagccaaagccagaaaaaaggaa

SEQ ID NO: 214272 - RNA, 71 nt, Homo sapiens
cgcgcgcaagcacgcgaggaggcaggaggaggaacaggaagcacagcaagaggaccagccggagaggccag

SEQ ID NO: 214273 - RNA, 75 nt, Homo sapiens
agaagagagggaccggacccaggccccggcaagggcacagcagggggcgcagacaccaaaaaaaaggaccacaaa

SEQ ID NO: 214274 - RNA, 77 nt, Homo sapiens
cagccggggacagaggaagacaggaaagagcacacgggagcgcccccgagagaaccaaacgaagcacacgggccggc

SEQ ID NO: 214275 - RNA, 69 nt, Homo sapiens
gaggacaaacagaagacggacaaggaagaaaacaacggcgaaagaacagcagccaggcccggggccaag

SEQ ID NO: 214276 - RNA, 82 nt, Homo sapiens
cagccacaagggcgggggaaagcacacaggcaaaagcagaccggaaaacccaccggcaagaccacacccgaggggagcccag

SEQ ID NO: 214277 - RNA, 69 nt, Homo sapiens
ggcaagagacgacaggacccaaccgagcaagccaggacagggaacacgaggccagcaaaaggacacagc

SEQ ID NO: 214278 - RNA, 60 nt, Homo sapiens
gccggcgccacagccacagcccggaagacgaagcacaggccaggcgggcaaacccgacca

SEQ ID NO: 214279 - RNA, 80 nt, Homo sapiens
cagaacagcaagggcgcaagccgcccaacagcacaagaagcgccaccacgccggcccgggggaaaggacccgaaggagcc

SEQ ID NO: 214280 - RNA, 74 nt, Homo sapiens
acagcaaaggcccaagagaaaaacggaaccggggaggaaaaagcagcgaaacagacaaccccccacacaaccgg

SEQ ID NO: 214281 - RNA, 69 nt, Homo sapiens
ggggcgcagacaagcaggggcagcccgaagaggcccaccagccaccaccaaccacaaagcaaaacgacc

SEQ ID NO: 214282 - RNA, 88 nt, Homo sapiens
gcgggaccggcggaaccaccacaccggccaagagagagacagaacaggcgggcacacacggaaagaagagaaccaacgaacaccgaag

SEQ ID NO: 214283 - RNA, 80 nt, Homo sapiens
ccaagggagaggcaaagcggagcagccaggcaacgagaaaacacccacgccgccgacacgagggaccacgcaaacgaagc

SEQ ID NO: 214284 - RNA, 77 nt, Homo sapiens
cacagcccagccagcaccaaaggaagagccacgaggcacaaggaaagcgagacacacgccgcagcagagcccccgcc

SEQ ID NO: 214285 - RNA, 78 nt, Homo sapiens
gaggcggcaggcgaagccccggagaaccacccggaggagacggggcagacaacggagcccgggacacggccacacaga

SEQ ID NO: 214286 - RNA, 60 nt, Homo sapiens
aggggcacacagaaaaggcaccgcccggagccggaggagccaccaacagaagcaggagcc

SEQ ID NO: 214287 - RNA, 77 nt, Homo sapiens
ccaagcagccaccagcagcccccagagcgggaccacagcaaacgaaaccggcagcagccggaggggaaggggaaaac

SEQ ID NO: 214288 - RNA, 42 nt, Homo sapiens
agcccgggagagcagccagacagggcagcggaagaagagaag

SEQ ID NO: 214289 - RNA, 66 nt, Homo sapiens
cgcagggcgcccccgcggagaaaaagaaagcggcgcgccaacagacccgggggaagcacaggcaag

SEQ ID NO: 214290 - RNA, 83 nt, Homo sapiens
acggacagcaagaagcagccgccaaagccgaggagaggagcggagggcagaccggcaggaaagaggaggggaggcacggagag

SEQ ID NO: 214291 - RNA, 68 nt, Homo sapiens
gacgcagaccaaaagcagagaggcgcggaaaccaggagagcagcggaggggagaaacaaggggaacgg

SEQ ID NO: 214292 - RNA, 88 nt, Homo sapiens
agcaaaaacagcaccaacaccacgacagcgaggcagccagcagcagccaccagagcccaagagcacagccaaagggcggcacccggag

SEQ ID NO: 214293 - RNA, 82 nt, Homo sapiens
aacgccgacacgggagggaaacagaaagaaccaagagggagacaagggaaaaggaagacaaaaaacacaaggaaagaaccca

SEQ ID NO: 214294 - RNA, 102 nt, Homo sapiens
aaaccagcaaccccggccccccaggccagccaagcacagaagccaaaagcgcacggaacggcggagaacagaggaagcgcgcgcagaaggggaagggaacaa

SEQ ID NO: 214295 - RNA, 65 nt, Homo sapiens
cgcagggagacgcacagccaggacaccggaaccgggaaaggaacgaaaacaaacggaagagaggg

SEQ ID NO: 214296 - RNA, 77 nt, Homo sapiens
gcgcggcggagccgggcgcgagggacacaggcaaggggagaccgagcgcacacagcacaacccacaaccagcaaccg

SEQ ID NO: 214297 - RNA, 39 nt, Homo sapiens
acaggggcagaaaaggaggcacggcagacacaccgacca

SEQ ID NO: 214298 - RNA, 68 nt, Homo sapiens
aaaacaaaaaacacacaaggcagaagaccaagcgcaagccccggggcagagacacaggacacccaccc

SEQ ID NO: 214299 - RNA, 60 nt, Homo sapiens
caagaaaaaggcaggaacaaccacaagagaggccaaaccaaaaggaaagcaagccggaga

SEQ ID NO: 214300 - RNA, 78 nt, Homo sapiens
ggggggcgaaggcaaggcacaaagcccgacagggcaacacccgacaaaggacccaacagaggaagccgcaagaaacgg

SEQ ID NO: 214301 - RNA, 74 nt, Homo sapiens
caggcgcccaaagcgacccaaaggagcacccacgggaacagcccagaaacgagggaaaaacgaagccgaccgga

SEQ ID NO: 214302 - RNA, 74 nt, Homo sapiens
caagccagagcagcccagggagcaggagcgaaagacggcgaccgaaacacaagaggaacgaaagagcaaaaagc

SEQ ID NO: 214303 - RNA, 74 nt, Homo sapiens
cccgagccggccgaacaccgggaaagggccgagacagggcgacgccgggagaccccggcacccagacaacaaca

SEQ ID NO: 214304 - RNA, 68 nt, Homo sapiens
ccagaaaaaagcacgagaacacgcggaacacccagaaggggaacaaagcgacgagggcgagaagaaca

SEQ ID NO: 214305 - RNA, 75 nt, Homo sapiens
gacccgcccccggacacaacacccacgcaggccagagaggcacgggcgaaacgcccacgcgggcaccggaccaca

SEQ ID NO: 214306 - RNA, 74 nt, Homo sapiens
ccaggccagagaaccgagcaccagcacccaaaagacaagagagggcggcagaaggaacaccgagaaaccgcaca

SEQ ID NO: 214307 - RNA, 76 nt, Homo sapiens
gccaaagccacaggagccagaaaagcggacgacacccccagggaccgaacacgaagcgagaggaaaaaggacaaaa

SEQ ID NO: 214308 - RNA, 57 nt, Homo sapiens
cgggaagggcggggagcggagccaggccccgaacaaaccaggggagggaaacgagaa

SEQ ID NO: 214309 - RNA, 70 nt, Homo sapiens
ggagacaccgaaggcgaaacgaagaaagaagcggcagaagaaagaccaacagacaaccagcgcagccaga

SEQ ID NO: 214310 - RNA, 83 nt, Homo sapiens
gggcgccgccgcgggcgccgggagcgagcgggagggagccgcgcgccggcgcgcgccgagaccggagggagcagaagaccgca

SEQ ID NO: 214311 - RNA, 74 nt, Homo sapiens
cggaacggcgaagaggcaccaaaaagaaccgcagacagcggagaaaaagaaagcggcgcgccaacagacccggg

SEQ ID NO: 214312 - RNA, 63 nt, Homo sapiens
gaagacagcgacgcagaccaaaagcagagaggcgcggcacacagagaaaaaaagggaacaaaa

SEQ ID NO: 214313 - RNA, 77 nt, Homo sapiens
cgaaaacggggagagccggaccccagacaccagaccacccgagaaaggcgggggagaaacgcagacacaagcagcag

SEQ ID NO: 214314 - RNA, 69 nt, Homo sapiens
caaagccagcgacagaagccagaaaaaggagggagcgacgaagagggagagcacagaaaaggaggagcg

SEQ ID NO: 214315 - RNA, 78 nt, Homo sapiens
gcccgcacgcaccacgccccacccggacccgggccgccaccgggccggcgcaagcccaagacacagccccagcagccc

SEQ ID NO: 214316 - RNA, 72 nt, Homo sapiens
aaagaacggaggagaggcaagaacgccaaagacgcaaggccccagcggcggaggaaagagagccagccagcg

SEQ ID NO: 214317 - RNA, 60 nt, Homo sapiens
aggccaccgggaaaccccagaacaaagacagccacggggaggagagcgaggacgccgccc

SEQ ID NO: 214318 - RNA, 75 nt, Homo sapiens
gcagaaaccacaggcgaaccaaaccgaaagccgacagggacacacaaaaaaacaacagggggcaggccagaggaa

SEQ ID NO: 214319 - RNA, 79 nt, Homo sapiens
agacaagggccaaaacaggacagaaagaaggaaaaagcagaaagccagaggaagaagagagaagaagcaaaccgggacc

SEQ ID NO: 214320 - RNA, 79 nt, Homo sapiens
gccgccgccgcgcgccaaagcgcgccgccccgggcaaaagacaagcagaccggaagaccgacggaagaccacaccccga

SEQ ID NO: 214321 - RNA, 78 nt, Homo sapiens
aaggagacaccagaaggcagaggaggcgcaagacgcgaccaaagccgacggggcaaggccccaacggaaccaccaggc

SEQ ID NO: 214322 - RNA, 78 nt, Homo sapiens
gcgggacccgggaggaagcagagagagcgggagacgagacaacaggagcgcaagagcgcccagaagaaaagaaaacaa

SEQ ID NO: 214323 - RNA, 88 nt, Homo sapiens
cgcgccggcccccgagcacgccggccccgcgcgcgcccgaggccgagcaaggggaagaagggaaacaggaagaggaaaacccaaaggg

SEQ ID NO: 214324 - RNA, 79 nt, Homo sapiens
ccgcggacagagacaacaccgagagagaagcagaagcccccggggagagacagacagagggacacagagaggaagaaag

SEQ ID NO: 214325 - RNA, 107 nt, Homo sapiens
agaacaaagccggggacgggaaaggacgccccaagaaagagaaagggcccaaacaaaacaagggcccaagcagagacaaagagggccgagacaagaaacggaagaaa

SEQ ID NO: 214326 - RNA, 67 nt, Homo sapiens
agaaaaaccagggccggaggagcagaaggcccagagaaggacgcagcgcgagcggagacacccgcgc

SEQ ID NO: 214327 - RNA, 61 nt, Homo sapiens
caaggccaagcaaggcggagcggaggcagacacacacggggggagagggagggggggacac

SEQ ID NO: 214328 - RNA, 84 nt, Homo sapiens
cagggaggagcgggacaccccggaagcgggaaagaggacagcagcggacggccggaccaagaggcgccgccccccagcaaacga

SEQ ID NO: 214329 - RNA, 62 nt, Homo sapiens
gaagacccagcgacgcccagacaaagagagagcccgagcccagcacaggcccgacaaccagc

SEQ ID NO: 214330 - RNA, 58 nt, Homo sapiens
aacccgaaggcgaacacagaggaaaccgcaccgcccggagagcagaggccaggagggg

SEQ ID NO: 214331 - RNA, 56 nt, Homo sapiens
ggccacggaggccagcgcacgaaaaggcaaaacgacaaggcccaaccccccccacg

SEQ ID NO: 214332 - RNA, 66 nt, Homo sapiens
ggcggcggcgccgccgggcgggcgggggacggaagacacgcaacccggcagccccggaaggaagaa

SEQ ID NO: 214333 - RNA, 71 nt, Homo sapiens
aggggcagaaacagagaaggaacaggggcggggagcggaccccgggccggggcgccccgacggccgaacgc

SEQ ID NO: 214334 - RNA, 58 nt, Homo sapiens
ccggacaaccagaggcagccagcagggggaggagaacggaagaggacaagagacgaca

SEQ ID NO: 214335 - RNA, 65 nt, Homo sapiens
ggaccgacacgggggggagaggcacgcggaagcggacgaccacaaccgaaggagcacaacaggca

SEQ ID NO: 214336 - RNA, 76 nt, Homo sapiens
cgggaccccgcccggcagccggaggaccacaggccacccagaagggccccaccccaaggggagggccaaggggagc

SEQ ID NO: 214337 - RNA, 72 nt, Homo sapiens
caccccaacacgacacggccagccccgcggcggcacaggccggggggggcacagagccccggaagacagccc

SEQ ID NO: 214338 - RNA, 75 nt, Homo sapiens
gacccgcccggagacgacggcgagaggaagagggacaggccaaacgcaggggcgggccagagggagagaaaaaac

SEQ ID NO: 214339 - RNA, 81 nt, Homo sapiens
agaggaaccccaagccaagcccaagacaaaaacagacgaagagaccgcagaagcgaaaaggagggaaagaaaggaggggag

SEQ ID NO: 214340 - RNA, 81 nt, Homo sapiens
acgcccccaaagggaaagaaggggaagaaaaaggaccccaagcccaaaaggccacccagacgacagagagagggggaaggg

SEQ ID NO: 214341 - RNA, 69 nt, Homo sapiens
gggagccggaagcgcgcaagggcaagacacccaagggcagaaagggcagcaccccagaacacgggcggc

SEQ ID NO: 214342 - RNA, 73 nt, Homo sapiens
gccgggacgaaagcaagacggaaccacagacaaaaacccaaagcagaagcagccgacacgagcggcaaaaaca

SEQ ID NO: 214343 - RNA, 72 nt, Homo sapiens
cgaggaaaccagaaaggcggacagcagcagcgaggcaaacaagcagcccaggaagaagagagggcgaaggag

SEQ ID NO: 214344 - RNA, 71 nt, Homo sapiens
cgggccacaccagccccccacggacccaaaccagaagaaaaccgaaccgaggaggcgcagcccccaagacg

SEQ ID NO: 214345 - RNA, 72 nt, Homo sapiens
ggagcgggaccaagcagaggcgcaacacaagaaagacaccgcagaaaacaggaggagacggcgagaagaaaa

SEQ ID NO: 214346 - RNA, 81 nt, Homo sapiens
caagcgcacgagacccgcggacagaaagacagaagaaaaccaaggcgaaggggacgcaaaagaggaaacagcgcgaacgaa

SEQ ID NO: 214347 - RNA, 71 nt, Homo sapiens
gggaagcagcgcacgccagagaggacagagacgaggcgggcccaagggcaccaccggcacccacaaagagg

SEQ ID NO: 214348 - RNA, 82 nt, Homo sapiens
ccacggcaccaaccccggcagagagcagccgcgaccgaaaacacagaaggagacagccccaacggacaaaacagaagaccag

SEQ ID NO: 214349 - RNA, 75 nt, Homo sapiens
gcgcgggggcggcccgccccggacccgagcagagggccccacccccggcagaagcggccacacagcaccacaccc

SEQ ID NO: 214350 - RNA, 83 nt, Homo sapiens
aagaacagagacagcagccaaacccccaggccaccccgagcaggggcacggcgacgcgggacagcaccgacgcacgcccccag

SEQ ID NO: 214351 - RNA, 76 nt, Homo sapiens
gggagagcggggcaagcacagaaaagaagcaacagaagaagagggagcccccgagcgcccgcgacgcagcacggac

SEQ ID NO: 214352 - RNA, 73 nt, Homo sapiens
gcccgggggaaagaaagagagacgagcgcacagccgaaggagcagcggcagaacgcagcaaagagaagcaagg

SEQ ID NO: 214353 - RNA, 71 nt, Homo sapiens
caaggacggcgaaacgaagcagcagccagagcaggaagcaggcggcaagcccgggagcaaggaccccacgg

SEQ ID NO: 214354 - RNA, 55 nt, Homo sapiens
caccggcgaaaccaaaagaaggggacaaagagggaacaacgaagcaaggggcagg

SEQ ID NO: 214355 - RNA, 76 nt, Homo sapiens
aacaggggaagcccaacaacagagaaaagaaagccagcggagaaggagaagcggaagcggagcggccacgcccgca

SEQ ID NO: 214356 - RNA, 56 nt, Homo sapiens
cgccaacagaaaccgcgaaggcagagggggcgagggaggaaagggggcaaaacgac

SEQ ID NO: 214357 - RNA, 54 nt, Homo sapiens
ccaagaacgaacggcgggcgcggcccggaacgaccaggagacgcgggaaggaca

SEQ ID NO: 214358 - RNA, 80 nt, Homo sapiens
caagcgccaaccgcccccagacaggccccggaaagaccacagcaagaccacgcccccagccgggggaccaggccgaacga

SEQ ID NO: 214359 - RNA, 64 nt, Homo sapiens
aagccaggccagaaaacagcgagggggaagaaaagggaggggacaaaagaccaccaccagaaag

SEQ ID NO: 214360 - RNA, 76 nt, Homo sapiens
agggcgggaccagagccagcaaacacggacaacccaccccgcacgggccaagacagaagagaggggagaagaagcc

SEQ ID NO: 214361 - RNA, 50 nt, Homo sapiens
aaggaccaagaaccagaaggagaggacagccgcagacaggagccgaaagc

SEQ ID NO: 214362 - RNA, 84 nt, Homo sapiens
agaagcagggaaggaggccgagccgggaccaggcccgggggcggcggccacgccaaggacgggaccaaaagaccagagcaaacg

SEQ ID NO: 214363 - RNA, 42 nt, Homo sapiens
caagagggcacggaccaggcacagacacaacggggcccgcag

SEQ ID NO: 214364 - RNA, 106 nt, Homo sapiens
gagaaagccgaggagcaggaaagaggagaggccaaagcagaggagccaccagcaggccccccagcacccaggcggaagcagggcgccacgacagcaaccgccccgg

SEQ ID NO: 214365 - RNA, 82 nt, Homo sapiens
caaagcccgggcgcggaagaagccaaggccaagacccagcgacagagcagcgacacaagggaacaagaccgaaaagaggaca

SEQ ID NO: 214366 - RNA, 74 nt, Homo sapiens
gaaccgacagagagggagcggagaacacaggaacgggccccggacccagcagggcgggcggagagaacgagagc

SEQ ID NO: 214367 - RNA, 62 nt, Homo sapiens
cgggcgggaaaagaccagaccagacaacaccaggacaaaggaaaggagcccgggcggcaggc

SEQ ID NO: 214368 - RNA, 74 nt, Homo sapiens
caacgaggcgcggggcagacaacaaagaaggggcgggagcacccaacagagcaaaaccaaaacagcggaaacca

SEQ ID NO: 214369 - RNA, 74 nt, Homo sapiens
aggacaccgcgggcaggaagcgcggagaaaagcaaagggacagaccccgagaagggcaaacgaagaaaacgacc

SEQ ID NO: 214370 - RNA, 59 nt, Homo sapiens
cccggccgccagcaccacgacgacgaggacccaaggccagccagccccaggcaccagcg

SEQ ID NO: 214371 - RNA, 74 nt, Homo sapiens
agcgcgcggacaggaaccggacagcacaccagggccgggacacacgaaacaggggcaaccgcgcaacggcgccg

SEQ ID NO: 214372 - RNA, 106 nt, Homo sapiens
gagagaacggcaccccagaagggggaagccgcaaaccagcaaggcccaaaaaagggacaagggagaaacagacacagcccgccaaggaggcaaagcagcaaagaag

SEQ ID NO: 214373 - RNA, 83 nt, Homo sapiens
agccgggcccgcgcgcccggccaagaggcaaaggggaggacgcagcaaaccaccagaagaaacgaagggcaaaggcaaagggc

SEQ ID NO: 214374 - RNA, 62 nt, Homo sapiens
aaggcaacaccgcacaggccagccggcaaaaaccggagaggagaaaaagaaacccaaagggg

SEQ ID NO: 214375 - RNA, 73 nt, Homo sapiens
ccaaagcagcaaagcggcaacacagccaggccgggaaaggaggaccggaagaagaggggagaggagagccagc

SEQ ID NO: 214376 - RNA, 85 nt, Homo sapiens
ggaccgggaccgcccggacccggccgggagaagcagcagagaaaggggcaaagcgccccggcccaaagcaagaggacgcgggaac

SEQ ID NO: 214377 - RNA, 80 nt, Homo sapiens
cagacacaggcgaggcggaggccgaggacccggggccgaggagcgggaagaggcggggaagagaccgagaccaggaacca

SEQ ID NO: 214378 - RNA, 68 nt, Homo sapiens
cgaaaccgcagaccagaacagagccaaacggaagccacaggagccgaagcgcagagcacgaagccaag

SEQ ID NO: 214379 - RNA, 73 nt, Homo sapiens
cccaggaacaagccaggagggcaaagaaacccgggagccaaagaacagggcaggagggggcaacggagcccag

SEQ ID NO: 214380 - RNA, 52 nt, Homo sapiens
aaggaacgaacgggaccagagggggacagcgaaacaggagaagaaaggaaga

SEQ ID NO: 214381 - RNA, 75 nt, Homo sapiens
gcgcccgcgaccccgcgaacaaccgccagggaacagcaaaaaacgagagcagcaaagagcaagcccaaacccagg

SEQ ID NO: 214382 - RNA, 36 nt, Homo sapiens
acagcacaagagcggacaaaacacgaagcaaagggg

SEQ ID NO: 214383 - RNA, 105 nt, Homo sapiens
gaagagagggagcagagggaaagggaaggagaaggagggacgcaggcgcaggccagcgggggagagcagcggcgccagcccgggccacaccgggacgcacccccc

SEQ ID NO: 214384 - RNA, 76 nt, Homo sapiens
aaaggccacaacagacgcccaacgagggcaagaccagagagccgcggggaaaggaggccagggcagcagagcacgg

SEQ ID NO: 214385 - RNA, 36 nt, Homo sapiens
cggaggaccgacgagcacgagcgcaagcagcaaaca

SEQ ID NO: 214386 - RNA, 74 nt, Homo sapiens
acaggaaggaagaaagaagcagagacccaagcaggcagccacaagaaacaaacacaaggcagaggaaagggcgc

SEQ ID NO: 214387 - RNA, 78 nt, Homo sapiens
ccccaagaggcgagccagcagaagaaaagggagagcacaacaggaaccagagaaacaaggagccaggcgcagagaagg

SEQ ID NO: 214388 - RNA, 74 nt, Homo sapiens
aaaccccagcgaaacaccaagagggaccggggaagccgccggagccccagaacacggcgaagaggcgggaggaa

SEQ ID NO: 214389 - RNA, 70 nt, Homo sapiens
gcggagcgcggaagcaaagagaagccaacgcccaccccgccgggaacccagaaaaacaccagcaaccgac

SEQ ID NO: 214390 - RNA, 73 nt, Homo sapiens
ggaaaagcgcacgaggccgggccggcgcggggcagcgaacggagaggcgccagggcggacgcgggggcgcgga

SEQ ID NO: 214391 - RNA, 72 nt, Homo sapiens
cgcggcaccgagggccaggccagaaggaagggaacacggacgacgagacacgaccaacacaggcgaccaaac

SEQ ID NO: 214392 - RNA, 76 nt, Homo sapiens
gcccgggaccgagcacccgccccgggcaccaaccacggaccgccggcaccggggagacaacgggcaggcagcgaga

SEQ ID NO: 214393 - RNA, 79 nt, Homo sapiens
ccgcagagcagaccagcagagcagcagaccaccccccacccgaaggggccaccagcgggcacggcacaccggggccacc

SEQ ID NO: 214394 - RNA, 84 nt, Homo sapiens
agcagcgcgcggagaagaacggggagccagagaggggccacacagcaggagagaggacgcgcagcgaggcccagcgcgggacac

SEQ ID NO: 214395 - RNA, 74 nt, Homo sapiens
gcgcggacacgcaaaccacacaagcgggcgccaggacccccccagagccaagacccccagaagggacccccccc

SEQ ID NO: 214396 - RNA, 74 nt, Homo sapiens
cccgaggggacagaggaccggggcacccaacagcggagcaacggcccagagccaagcgaacgaaaccagagggc

SEQ ID NO: 214397 - RNA, 69 nt, Homo sapiens
ccaaggacgccagcgcgaacacacagcccgaccgcgagccaagcaagggcgggagccccaaccccccgg

SEQ ID NO: 214398 - RNA, 49 nt, Homo sapiens
ggggaggaggccccaaagggcgaggggcccagagcaggcggacaggagc

SEQ ID NO: 214399 - RNA, 72 nt, Homo sapiens
acgcagggcgcccccgagaaggagaagcggcgaggaaggaagccgacgcccagcagcgcacgcgcagaaaaa

SEQ ID NO: 214400 - RNA, 79 nt, Homo sapiens
acgcgcgggcccgggccaggccgccgccgagccgagaacagccagcaaagacaagagcagaccagcagccgcagcgcga

SEQ ID NO: 214401 - RNA, 81 nt, Homo sapiens
aggaaagccagaaacagccccaaaacagcccagcaccggacaaggaccaaacagaacaaggaccaacaccaaggaccagcc

SEQ ID NO: 214402 - RNA, 81 nt, Homo sapiens
cccagggcgagcacagcacacaaggaccaccaagcagggagggggaaggccagggccagacgcagcgccccagagaaggac

SEQ ID NO: 214403 - RNA, 48 nt, Homo sapiens
gaaacaccggacaggggcagaacccgacaacgacaaccagagagccca

SEQ ID NO: 214404 - RNA, 100 nt, Homo sapiens
gccacagcccgccggggcccgggcacgaaccaccggggacaaggagcagacagccggccgccgccgcgaccccggcccagagccggaggcgggccagggg

SEQ ID NO: 214405 - RNA, 74 nt, Homo sapiens
gcggccaaggccacccaagaacggcccgccaccggagacaacgagaggaggcaccaagggacgaccaccaacac

SEQ ID NO: 214406 - RNA, 58 nt, Homo sapiens
gcgaacgccgcggccaaggagccgccaaagccagacggacaagccccagagagagccc

SEQ ID NO: 214407 - RNA, 74 nt, Homo sapiens
ccgccgccgcgaaaccgcggacaggaccgagccgaggccggcagagcccgcccccgggagacccaccaaagccg

SEQ ID NO: 214408 - RNA, 86 nt, Homo sapiens
ggaggagaagcaagaaggcccggacacagcaaaccgggccacagcgacaacagcgagggccagcgaagacaacagggaagaccaag

SEQ ID NO: 214409 - RNA, 60 nt, Homo sapiens
cacgggcagccgcagagcgagcggcagcggcccggaaccggcacaggagggcagaccaaa

SEQ ID NO: 214410 - RNA, 57 nt, Homo sapiens
gcaggggcggggcaacgcggaagggaaacaacacgaggaggacggcacaaaaagcac

SEQ ID NO: 214411 - RNA, 80 nt, Homo sapiens
gcgcagccacagacccaggagcggaaccaacagaggcaaaacccgacgcaaacgacccagaaggcagaaaccgcagagag

SEQ ID NO: 214412 - RNA, 87 nt, Homo sapiens
ccggaggcgaccccaagcaaggacaccaagcagaagccagcccccaggagcagacaggaccacgccaccacccaaccagccggaggc

SEQ ID NO: 214413 - RNA, 81 nt, Homo sapiens
aagaagagcaaaagagaagaggcagcagcagagaaaacccagccaaggacaagggacaagcccagacaaggcaagcaagac

SEQ ID NO: 214414 - RNA, 59 nt, Homo sapiens
ggggccggagggccgagcacggagaaccacggggaccaagaagcgagcagcccaaacgg

SEQ ID NO: 214415 - RNA, 84 nt, Homo sapiens
agaagcagagccaccgaggcggggcaccgccagcggacccacaaaccgggagaccaagaacggcacacggacggagagagaacg

SEQ ID NO: 214416 - RNA, 54 nt, Homo sapiens
aggaggccccagcggaccgaacagggcacaaacagcagaaacaccagaagggag

SEQ ID NO: 214417 - RNA, 78 nt, Homo sapiens
ggccgcagcgggccggagaggggacggaaggcaaggagcgaaaaccccagaacacacgccaggcaggaaacgcaccac

SEQ ID NO: 214418 - RNA, 84 nt, Homo sapiens
gcaaagccagaaagaggaggccagagcggccgaagcggcccgaagggagcccccccacagcgacagaaggccaaagcagggaga

SEQ ID NO: 214419 - RNA, 40 nt, Homo sapiens
acaaagcgccccaaaagcagagggcagaccggaagagaag

SEQ ID NO: 214420 - RNA, 79 nt, Homo sapiens
gaagccgaccgccagaaaccccccgaccaggccacagccgggaagaagaagcagagagccaggaaaagaaagagaaccc

SEQ ID NO: 214421 - RNA, 78 nt, Homo sapiens
agccggcgcccggacgcgaggggggaggagggcacgcagcacaagccagccgccccggaccaacccagacacccacaa

SEQ ID NO: 214422 - RNA, 81 nt, Homo sapiens
gggaaagggacccaccacggcggagagcagcgcagcaggcacagggcccgagagccagagaagcgacaggggaacagaggc

SEQ ID NO: 214423 - RNA, 74 nt, Homo sapiens
agggcaaaggcgccggggaacggagccgcgggaaagagaggaaggaacaccaggcccggcggcggagggggggc

SEQ ID NO: 214424 - RNA, 86 nt, Homo sapiens
gcgagagacgagagcacgacacggccgcacgggcccacgccagaaccaagaaggagcgagggaggagcagcgagacagcaagagac

SEQ ID NO: 214425 - RNA, 70 nt, Homo sapiens
aaaaagcgggaaaggcacgacgaacagccagaagcggcaagcaacagggcccccaaaccaaaggacccgc

SEQ ID NO: 214426 - RNA, 76 nt, Homo sapiens
ggagcgcccgcggaggagcgcccgggacagcgacagcagacaagcaacacaaggggaagaccggaaagaagccaaa

SEQ ID NO: 214427 - RNA, 84 nt, Homo sapiens
agaggcagggcgcgagggcgggggcagcggcagcagagcaccaaacaggggggaaggaagacaaacagagccaagcagacagaa

SEQ ID NO: 214428 - RNA, 67 nt, Homo sapiens
aagaccccagaggaaagggggcccccaaagggaagccaaacacaaaggaagaagcccggagacgacc

SEQ ID NO: 214429 - RNA, 56 nt, Homo sapiens
cagggccagggagcaggagccagggccgagcacgggaagggagaacagccgacacc

SEQ ID NO: 214430 - RNA, 83 nt, Homo sapiens
cgccggcaccggcccgcagggacgcacaaaacagaaacaaggacccggaaaggaagaaaacaaaaagagaagaaaacaacaca

SEQ ID NO: 214431 - RNA, 58 nt, Homo sapiens
cccagccccgagaacgggaacagcgaagccaacagagaaaaaggaccaacaaaaagaa

SEQ ID NO: 214432 - RNA, 74 nt, Homo sapiens
gccgaccccacaggaagggaagcacagcgacccagaggacagaaagcagcaacacgcccagggagcagagagga

SEQ ID NO: 214433 - RNA, 81 nt, Homo sapiens
gacgacccggcgcagggcaagagcccaagggcagagcgagcggcagaaaagggggccacggacggggccgagcacaaccac

SEQ ID NO: 214434 - RNA, 73 nt, Homo sapiens
gaggagaaggcggcccaccccagagcaccggcaaggagaggcccccccccagggacaggcgcagcccagcgag

SEQ ID NO: 214435 - RNA, 76 nt, Homo sapiens
ggaagggcggggggcgggccggaggggagacgggaggcagccgagacgggcccccaccccacaggaggaagccgaa

SEQ ID NO: 214436 - RNA, 61 nt, Homo sapiens
gagagaacccaaccagggggaaacacagaacgcagggacacgagaccccagcaggcaccac

SEQ ID NO: 214437 - RNA, 99 nt, Homo sapiens
ggaggagacacgaagcgacgcagagccagaagggaggcagggaacacgcggaacacagaagccgaccgcgaaggaggacagcagaccgcgaccagcacc

SEQ ID NO: 214438 - RNA, 80 nt, Homo sapiens
cagcccgccagacacggcaggccaagaagcaccgagcgacagcccaaggcggaaaagcgaaggaagccacaagcacagcc

SEQ ID NO: 214439 - RNA, 63 nt, Homo sapiens
agggagacgacgcgcgggccgcgagcggggcgacccgagacacacgcagacagacgccggacc

SEQ ID NO: 214440 - RNA, 71 nt, Homo sapiens
ggaccgggaccagcaacacagaggaaaagaaagaggcaccggagacgcgggcagaaaaaggaaaggaaggc

SEQ ID NO: 214441 - RNA, 56 nt, Homo sapiens
ccccgggacccccaagagcacaggcagaaggcacaagggaagaaggagaaagacaa

SEQ ID NO: 214442 - RNA, 78 nt, Homo sapiens
cacaacccacacaccaccgggccagaacagacccaaggaagaagggcacgcaggaagagagggagagaccagaggcgc

SEQ ID NO: 214443 - RNA, 56 nt, Homo sapiens
cggcaaaccccggccggggagaagccaaaacagcccgagaccccggggggaccgac

SEQ ID NO: 214444 - RNA, 67 nt, Homo sapiens
acccggggacccccgacgccaggcagcgcccccaaacgggggacgaccaccagccaggccggggaca

SEQ ID NO: 214445 - RNA, 68 nt, Homo sapiens
ccgcccgcccccacccgcggcagcggcacacagagaaaaaaagggaacaaaacacagcaagcagacaa

SEQ ID NO: 214446 - RNA, 70 nt, Homo sapiens
gaaaggaagggacggccagaggacgcgcaaacccaacccgaaaccaggaaccgaagaagcgaagaaacag

SEQ ID NO: 214447 - RNA, 92 nt, Homo sapiens
ccagcccccaccgcgcgccaggacccgaggacagcaccgcgcaggagcggcggaccagggcggcggggaggggcgaccccggggcccggcca

SEQ ID NO: 214448 - RNA, 34 nt, Homo sapiens
aaaaggaagcacaccaaggacccaaagacaggac

SEQ ID NO: 214449 - RNA, 79 nt, Homo sapiens
cagacggccaccggcgggaggaacaaaagcgggaggcgggcggcggggcggcacggcggccgccacacaggggagccgc

SEQ ID NO: 214450 - RNA, 38 nt, Homo sapiens
ccaaaccacgcacgacccagaaaacaacccggccaagg

SEQ ID NO: 214451 - RNA, 75 nt, Homo sapiens
accacgagcagccagcagacaccaggcacaaagggagccgcaaagaaggagccaagggcccacgcaggaaggagc

SEQ ID NO: 214452 - RNA, 37 nt, Homo sapiens
gacaccgcagaaccagcagaacgcgcaaaaaaaaaga

SEQ ID NO: 214453 - RNA, 84 nt, Homo sapiens
acgcccccggccccgcgcggaggggcgggggaggcgccgggaagcgacggcgccggcggcccggccgggcagaaagggaagaaa

SEQ ID NO: 214454 - RNA, 40 nt, Homo sapiens
caggggcggcaggaccgaaagcgaaacaaacaaacggcgg

SEQ ID NO: 214455 - RNA, 52 nt, Homo sapiens
acacagacccaggccgacaacgaagagaggaaagaagcggaaaggagggagc

SEQ ID NO: 214456 - RNA, 82 nt, Homo sapiens
gcgcagcgccgacggacccggaaaaccggcccccaacgacaaaagggggaaaaaccccaagaagcacaacaacccaaagcaa

SEQ ID NO: 214457 - RNA, 79 nt, Homo sapiens
ggacaagcccagaccaaaacagcaagggaacccagaggcccgaacagaggagacaccaacgccaccagagacccccgcg

SEQ ID NO: 214458 - RNA, 75 nt, Homo sapiens
ccccaagggcgggaacaggcaccgcgagccacgaggaagaccgcagcagcgggaccgaagagggcacgaggcagg

SEQ ID NO: 214459 - RNA, 78 nt, Homo sapiens
cgcaaccaaagcaccagaccccaccagcaacggaagcgagcagcgcaaagcacaaagaacgcacaccaccagaacgag

SEQ ID NO: 214460 - RNA, 69 nt, Homo sapiens
gggccccgcgcacagccccagcgcagcggggccaggacacacgagcaagaagaccccaagagcagccac

SEQ ID NO: 214461 - RNA, 102 nt, Homo sapiens
ggccacgcgcccccagaggagaagacccgacggaccccagcgccgggcagcgaacggagccaccaccaccccgagagacggaccggaccacccccaggcgcc

SEQ ID NO: 214462 - RNA, 56 nt, Homo sapiens
ccgagaggacgccagcggcgcgcaggcacggcaaaacacaagacaagcaggagaag

SEQ ID NO: 214463 - RNA, 87 nt, Homo sapiens
agaggagaccgccacacaagagaagacccaccgaggaggagggggacgcggaagagacagcagaacaagagccaggaccggacagga

SEQ ID NO: 214464 - RNA, 77 nt, Homo sapiens
gcagggaagaggaacccgaaggccgagagaaccaaggaagaggcacaaaagacgcaggggcacagcagaaagaggca

SEQ ID NO: 214465 - RNA, 82 nt, Homo sapiens
ggcgcccggagcaggcagagcagccgagccagaaaccagggcgaaggacgaggaccgaaaaagggcagaggacgaccagagc

SEQ ID NO: 214466 - RNA, 79 nt, Homo sapiens
cccccgccagcagccgccggagccagccaacgagcggaggcagcacggcaggagacgaggagaggacagcaggacaccc

SEQ ID NO: 214467 - RNA, 106 nt, Homo sapiens
gccaggcgggcgggcggcgcggcggcggcgagccggccgcggcagccggaccagcagagcccaaaaggcagagcgaggagagaagaaggagggaaagccaaacaac

SEQ ID NO: 214468 - RNA, 74 nt, Homo sapiens
gaccaaacaaggccaaacggaggaaacccgagcaacccaggccagccaggaggccaacagacccaacccagaag

SEQ ID NO: 214469 - RNA, 68 nt, Homo sapiens
gacaccaagcgggacccaaagcgggaaccaaaggcacggaggaaacccaccagagaaggcgcggccac

SEQ ID NO: 214470 - RNA, 71 nt, Homo sapiens
aggggacgccgccccgggagccggccccacgagaggaggggcaggaggaacacaacagcagaaaaagagca

SEQ ID NO: 214471 - RNA, 76 nt, Homo sapiens
gccccgggacagggcagcaagcccagacaggagaagggaagagaagaacgaaagaagcacccgaaagagaacaaag

SEQ ID NO: 214472 - RNA, 81 nt, Homo sapiens
aagacagcaaagggacaccacacagagcaggcacgaggaggaaaagccaggagaccagcacccccccagcccaggacaaca

SEQ ID NO: 214473 - RNA, 70 nt, Homo sapiens
aggaaaaccgacgaagacgaaggaagaccaaggaagaacaggcaagcgaaaaagggaaaaggagagaaaa

SEQ ID NO: 214474 - RNA, 66 nt, Homo sapiens
gaaaaaccggagccaacgaaacaaaaagcagaacccagaaagagcccaagacccgacccggaagga

SEQ ID NO: 214475 - RNA, 41 nt, Homo sapiens
accggcgggaggaacaaaaggccagcagggagcgcggagag

SEQ ID NO: 214476 - RNA, 50 nt, Homo sapiens
caccaaaagggggggcaggaaaggccgaaaccgagcaccagaacaccgag

SEQ ID NO: 214477 - RNA, 74 nt, Homo sapiens
gcggcgccgaggacaggcagccgaggcgcccccgcgcgagggacagagagaggcagaagaaaaagcacccccaa

SEQ ID NO: 214478 - RNA, 75 nt, Homo sapiens
cggaagaggaagagccagcacagacccgaggggcaagggcgcagcacgcagacccgcaagccccaagcagaggac

SEQ ID NO: 214479 - RNA, 66 nt, Homo sapiens
ggaacgcacgaaaaggaaccaggcgccccaggagaaggaccgaagccagccacagaccagccgggg

SEQ ID NO: 214480 - RNA, 59 nt, Homo sapiens
aagaagaaaacccagggacacaccgaaggccgggacagcagaaaacagccagcagaaaa

SEQ ID NO: 214481 - RNA, 74 nt, Homo sapiens
gcccgcggacgccaagcgcgcccggagacaagaacagcaagaagccccagagacccaacaccggagcaacaccg

SEQ ID NO: 214482 - RNA, 72 nt, Homo sapiens
acgagcggaacaacacaagcaccccgagcagaaggcagaccggaggaacaaaccgcccccaaagacaacacc

SEQ ID NO: 214483 - RNA, 74 nt, Homo sapiens
gacgcggccaggcgacgggaagcgaccgcaggcgggcccccgaccgacccccgcacggcacaaaacgggccacg

SEQ ID NO: 214484 - RNA, 79 nt, Homo sapiens
accaagagcgaagcgacggagggcccccggacccgggagcggacccggggcgggaagcccgaggcggcaacggcggccg

SEQ ID NO: 214485 - RNA, 70 nt, Homo sapiens
gcgagaccacccaaaggggggaaaagaacagaagaaggagcgaaaagggaaaacgagcggaagaacagca

SEQ ID NO: 214486 - RNA, 89 nt, Homo sapiens
gccgccgccgccgcgccggcccccgagcacgccggccccgcgcgcgcccgaggccgagcaaggagcggccaagaggaccccggcaagca

SEQ ID NO: 214487 - RNA, 58 nt, Homo sapiens
gcgcagcccacggcgcaggcccacggagcgcagccgccgagggcgcagagggaaagca

SEQ ID NO: 214488 - RNA, 66 nt, Homo sapiens
cccacccccgaaggggaccccgcagaaaaagcaaaagagaaacccgaaaacgaaaagaaggacgga

SEQ ID NO: 214489 - RNA, 54 nt, Homo sapiens
gggcgaaccagagaaaacggcaaggaagcccggacacaagagggcaagaaaggc

SEQ ID NO: 214490 - RNA, 77 nt, Homo sapiens
gccaacagcagcaccagggcgcccgacgggcggcagagaagagaagagcacagcgggaggaaagggagagacaagag

SEQ ID NO: 214491 - RNA, 33 nt, Homo sapiens
ccgcaggaccaggagaccaacaagagacgagaa

SEQ ID NO: 214492 - RNA, 90 nt, Homo sapiens
ccaggagcgcccggaaaggcggcgcgaacgcacgcagccccgagcagacagggaggccgcacagaggaggagcaccaaaccgagggaggg

SEQ ID NO: 214493 - RNA, 83 nt, Homo sapiens
gcgaggcggaacaggccgggcaccaaggcgcagagagaaaaggaacagccgaagccaggggcaagcgaaaccacagaagaaag

SEQ ID NO: 214494 - RNA, 82 nt, Homo sapiens
cacgcgaggacagaaaacgcaagacaacaggagaggaaagcggaaagccaagggacccaaagaacaagccacacgcccacaa

SEQ ID NO: 214495 - RNA, 67 nt, Homo sapiens
cagaccaggcgaggcgcagaaggggacagaacaggcaggcggaaacaagagagacccaagccggaga

SEQ ID NO: 214496 - RNA, 80 nt, Homo sapiens
aagcagaccggaggaaggcgagcgccgcaggccgggaagaaggagggacacagcagcgcggagagcggcccgggacgaga

SEQ ID NO: 214497 - RNA, 68 nt, Homo sapiens
aaaaagacgagggagagacccacagagcggcccgaaaggacgggacccaccaggccacacccagcgga

SEQ ID NO: 214498 - RNA, 82 nt, Homo sapiens
ggccgcgccggccccgcccaccccccccgcggggcggcagcccgaagccggaccagcagagagacgggggcaccagagccag

SEQ ID NO: 214499 - RNA, 81 nt, Homo sapiens
acacgcccccagccaaacaggagccaagccgccaggccaccacagcccggggagcccacagcgccacgccggaacaaggac

SEQ ID NO: 214500 - RNA, 76 nt, Homo sapiens
gagcggagcgaagcgaacaaaaagcagcaaaccggaccaccccgaagaaagcacagggcgaagcaggccaccgaca

SEQ ID NO: 214501 - RNA, 72 nt, Homo sapiens
gaaagccacccgcacggagaacaggacaggaggggcgggaaccgacgaggaccccagagacacgcccagaac

SEQ ID NO: 214502 - RNA, 66 nt, Homo sapiens
cgaccccgcgcgccaggggggagcgaacgaagaaaggccaagagggagagacaaggagaacccacc

SEQ ID NO: 214503 - RNA, 91 nt, Homo sapiens
accggcaggcaggaaaacgggagaacacgacaccggcgaggaacggcagggagcagaaacgggagaaaggaaagaagaaggcaacaagcaa

SEQ ID NO: 214504 - RNA, 77 nt, Homo sapiens
ggcgcgaggcgcagggagcccccgccggcccggcggccgaggagaagaggggggcggaaagcacgcagggagaagca

SEQ ID NO: 214505 - RNA, 72 nt, Homo sapiens
gaagaaccgacagacacaggcggcaccagcaggccagggcacggagaaggagacagggaccagccgagaagg

SEQ ID NO: 214506 - RNA, 84 nt, Homo sapiens
ccggcaagaccaacgcagagccaggaaaacgaagcccagaaggcaacggacaaggacaccggcaggaagaaggaaccgccccag

SEQ ID NO: 214507 - RNA, 70 nt, Homo sapiens
ggggagaaccgcgccgcaccaccaccccagcacagaaggcagcggagccagcgaaaaccaaaagaacagc

SEQ ID NO: 214508 - RNA, 97 nt, Homo sapiens
gagagcgaaccccgggacacgcaggaacggcccagcacaagaccgcgacagcaagccaagaggggacaagcaagagcgcaaagcacacggcacgagg

SEQ ID NO: 214509 - RNA, 35 nt, Homo sapiens
gagcacgggaccggcagcgaggcagaagcacggag

SEQ ID NO: 214510 - RNA, 72 nt, Homo sapiens
gaagagcgcgaagacagccaagccgcgcccgaacccagaagcccgagagacgagacagacaccaaagaacca

SEQ ID NO: 214511 - RNA, 66 nt, Homo sapiens
ccaggacaggagccacagaacaagaaggagcgcaacggggcggcacacaaggagcgaagggcaggg

SEQ ID NO: 214512 - RNA, 75 nt, Homo sapiens
aaaaacaccagaaaaaagcagaaacgcaaaagaaaccagaaacacgggagaagggagcgaagcgggacaggcgcc

SEQ ID NO: 214513 - RNA, 68 nt, Homo sapiens
gcacggagggcccccgcgccgcaagcagacggcaagagacgaaaaggggcaaagacagcagacaaaac

SEQ ID NO: 214514 - RNA, 66 nt, Homo sapiens
accacgagcaccagaaaacaccaggagaaaccgaaagcaaggaggcccccccagcgcccggaaacg

SEQ ID NO: 214515 - RNA, 81 nt, Homo sapiens
aagacaccagccaaggagccaaaacaccgaggacaggccggagggggggaggcagagaacaggaaccgaagggacggcaaa

SEQ ID NO: 214516 - RNA, 48 nt, Homo sapiens
caaggagcaggcgaacaagggagaaaacgggccggaggaaaagggcgg

SEQ ID NO: 214517 - RNA, 52 nt, Homo sapiens
gaaccacccggacaggagcaggccgggagcgagccagcagcaccggaacacc

SEQ ID NO: 214518 - RNA, 77 nt, Homo sapiens
agagagaagagaacccaacaacagcccgccagaaaaggaacacggccaaagccccagaggacaagccagaagagaca

SEQ ID NO: 214519 - RNA, 66 nt, Homo sapiens
cggggacgcggacgcacgcagaagcggccagcccgaagccaacggggggcaaggcgcgaagacgcc

SEQ ID NO: 214520 - RNA, 61 nt, Homo sapiens
aaacgcaaggagaaacccaagagcagcggcagggacccaccaggccacacccagcggaaaa

SEQ ID NO: 214521 - RNA, 74 nt, Homo sapiens
ccaacccccgcggacccagggagaaaccccccagggaaaacacacgaccagaaggccagagcccaaaacagagc

SEQ ID NO: 214522 - RNA, 81 nt, Homo sapiens
aagcccaggacgccaacacgggggcgccgacacaccagcgcccaaacgcgaggggaacgcaggaggcgaggagcccgagca

SEQ ID NO: 214523 - RNA, 79 nt, Homo sapiens
acaaggaacagaaccaccaaagggaacccaggaaccagcgcaccccgaaaccggaaagcccggcacggaagagcagaga

SEQ ID NO: 214524 - RNA, 36 nt, Homo sapiens
ggaagggaacacgcaccgggaaggcaaagaagaagc

SEQ ID NO: 214525 - RNA, 60 nt, Homo sapiens
cgggaagagagcacaaggcccgagggcccggaaaggggagcacagaggcggaacaagaaa

SEQ ID NO: 214526 - RNA, 72 nt, Homo sapiens
ccacacccgcccccggagagagcacgaaggacccagcagggcaccagcccggggagcccaggcaggcggcgc

SEQ ID NO: 214527 - RNA, 76 nt, Homo sapiens
ggaaaccaagaagaggccagaaaccgcccggagcacgaccgaggcgcaggaggcggagcgagacgggggccgcagc

SEQ ID NO: 214528 - RNA, 74 nt, Homo sapiens
agggacgcgaaaaagacaaggggacacgaagggagaaaggcaggaaagacggcagggagcgcaacaccagggga

SEQ ID NO: 214529 - RNA, 82 nt, Homo sapiens
caaagccaaggaaaccccaacacagagccaagcgccaagaaaaaagggggcggaaacacccggaacagaaaccaacaagagg

SEQ ID NO: 214530 - RNA, 74 nt, Homo sapiens
ccagagacgaaccggcagggaaaaagcaggaacaaccaccgagcgaaggcagagggggcgagggaggaaagggg

SEQ ID NO: 214531 - RNA, 85 nt, Homo sapiens
ccggaggggccccacccccgggacgggggcggcagggccggggaccgagcccagcagcccggccaacagcacgcacagaagaggc

SEQ ID NO: 214532 - RNA, 78 nt, Homo sapiens
cccagcggcagcagaaagagcagaccaccgcacagccaaggaggaagcaggaaagaccacggcccagggaagccgcca

SEQ ID NO: 214533 - RNA, 60 nt, Homo sapiens
cggaggcgcagcgccaagagaagacaggggcaaggccgaggggaacagcacacagagagg

SEQ ID NO: 214534 - RNA, 58 nt, Homo sapiens
cggccgcagcaagcgaggcaagaaagaaaacggacccgagccccaaagacagaaaagc

SEQ ID NO: 214535 - RNA, 70 nt, Homo sapiens
gcgccccccaggcccacaaccagcccagcagcagcaagcagggggaaggcccccacgcggaaacgccaga

SEQ ID NO: 214536 - RNA, 75 nt, Homo sapiens
agaggcgggccaaagagaggaagacacccgaagacaagaggaccaagaagaagcaaggcgaagaaaacggccacc

SEQ ID NO: 214537 - RNA, 59 nt, Homo sapiens
gcggagaagggcagagggcgaggaaccaaagccccggcgcgcaacagaagaggagcgga

SEQ ID NO: 214538 - RNA, 80 nt, Homo sapiens
ccccacggcccgggccggcgcgggagggcgggaggcccggagcgcccggagccggagaccgggccagaggggaggacagg

SEQ ID NO: 214539 - RNA, 77 nt, Homo sapiens
ggcggagcgacggggaggcgcggccaacggggccacaaggcaggaagagacgaagagaaaaaaagggaacggagcaa

SEQ ID NO: 214540 - RNA, 73 nt, Homo sapiens
aaggccaccgagggaacccgaccggacccagccccagaagcccgagacacgagccccaaggggaagcacccgg

SEQ ID NO: 214541 - RNA, 77 nt, Homo sapiens
accccccagggcccagagccaggagccggccgcccggacaggacaagaccaaacccaaaagaaccacaaacagacgc

SEQ ID NO: 214542 - RNA, 72 nt, Homo sapiens
ccccgggaaagaggacaccgcaccacagcaaggacgcccaaagaaaccccagaggcaaagcaaaggacaacc

SEQ ID NO: 214543 - RNA, 74 nt, Homo sapiens
accgagccacggacccagggccaagaggagagccagccgggcaccccaccgaacagggaaagagcagggaacca

SEQ ID NO: 214544 - RNA, 86 nt, Homo sapiens
acaccgacaagaagaagagaacaaagagccgggagacggagcacggcgccgcggcaagagccaggccggcgcggaagaggccggcg

SEQ ID NO: 214545 - RNA, 76 nt, Homo sapiens
caacggccccgagacagcagagaacgagccgacccacaccgccaccacggacaaacgcaggcggcggagaacagac

SEQ ID NO: 214546 - RNA, 68 nt, Homo sapiens
ccgggaccggccagagaacgcagagccccgagaggggcgcgcagaaacgggaagaaacacgacaggaa

SEQ ID NO: 214547 - RNA, 48 nt, Homo sapiens
aaaaagcccccggaggcacagggaacccgaggcacaaagacggcgaag

SEQ ID NO: 214548 - RNA, 77 nt, Homo sapiens
aacggaaccgggaggcgacgcacacgagcggaggcgaagagcaagacaaagggcgccccacgggcgcagcaaaacgg

SEQ ID NO: 214549 - RNA, 72 nt, Homo sapiens
gacagcacccacaaaacggacagaaaaccccaccaggacaccaccccacaacaccgagcaaagaaaagaaga

SEQ ID NO: 214550 - RNA, 72 nt, Homo sapiens
gcccggacacagaagaggacagggggagaggcaccagcaacagaccaaccgcagcaagcacagagacaggaa

SEQ ID NO: 214551 - RNA, 67 nt, Homo sapiens
gaccagaacacagcaaaaggaaggacccccagagaaagaaagcccaagaggagaaggagaggagaag

SEQ ID NO: 214552 - RNA, 72 nt, Homo sapiens
acccaaagagcagacacgagcggagcgaaggagggcagcggggaagaagaaaaggaaccgaggccccccggc

SEQ ID NO: 214553 - RNA, 110 nt, Homo sapiens
cgcgcggccacgggcgcacgcagcgccaggaggcacgcgcgcacgacggcacaccgcaaggcccggccaggccccaccgccacaagcaggggaacaccgccaaccccaag

SEQ ID NO: 214554 - RNA, 71 nt, Homo sapiens
aagccgccgaaccaggagaaggaggagccaggaggagagaacaagaaaagcgcggaaacgcaacaaaagac

SEQ ID NO: 214555 - RNA, 85 nt, Homo sapiens
gggcggccgcgacccccggcaacccggagaaggcacagagcggccgcgccagcgacccccaggcccaggaagcccacccagcccc

SEQ ID NO: 214556 - RNA, 75 nt, Homo sapiens
aaaggggcagacacgcccagccgggacggccccaaggaccggggagaccagccccaggggcgggaacagccagaa

SEQ ID NO: 214557 - RNA, 58 nt, Homo sapiens
gagcccgcaagaagaacagagacagcagccaaacccccagaaacaagaaaagcgccca

SEQ ID NO: 214558 - RNA, 74 nt, Homo sapiens
ggaacgcaggagacacaagaagcggaccagaacgaaaccagaacagaaagggacgggacagcaaaaggcgacca

SEQ ID NO: 214559 - RNA, 75 nt, Homo sapiens
caaccccgggggcaggcccaagcaaggaggccccaagggcgaggacgggcagaagccggaaaacaaggaagaaaa

SEQ ID NO: 214560 - RNA, 79 nt, Homo sapiens
gacgccgggggcgcagaccgggcaagaccacccgcaagcacgcgcgccccggggaccggaaaggcgcaacggagacacc

SEQ ID NO: 214561 - RNA, 55 nt, Homo sapiens
aagcccagcgggccggacggggcggggggaacggaggcgaagcagccccgacaaa

SEQ ID NO: 214562 - RNA, 80 nt, Homo sapiens
gaggccccggggaagccaccccaccccccagcccagaagagccaggcgggagcgggaagcgcaccggagcagggaggcag

SEQ ID NO: 214563 - RNA, 63 nt, Homo sapiens
aggccgcacagaagagagaaggccagcaaagaacaagcaacgaggcccagacccacacacaaa

SEQ ID NO: 214564 - RNA, 83 nt, Homo sapiens
gagccccccagaccagcccgcaagcaccccaccacaggacagagcgggagccaccagcgccaaagggaagccaggagcccggg

SEQ ID NO: 214565 - RNA, 61 nt, Homo sapiens
gaaagcaagaagacagcggaagcggaggaggacagacaggaacggccgaacacagagggag

SEQ ID NO: 214566 - RNA, 71 nt, Homo sapiens
gaccggaccaacagcggagggccgagggaggaagcgccagaggaagaaaaaagcccaccgcccagaggccc

SEQ ID NO: 214567 - RNA, 70 nt, Homo sapiens
acccagccccaagagcaacagcagacgacagagagagggggaagggccaaaagaggaagaggcgggacca

SEQ ID NO: 214568 - RNA, 73 nt, Homo sapiens
agcaccggcccgaaacgccgaaaaacccaagggaaagcgacgcagacacggagaaccggggcacaccagacga

SEQ ID NO: 214569 - RNA, 59 nt, Homo sapiens
gcacgagcagaccggcccgaccgcccacagacccaaacaaaggaagaagagagggcgaa

SEQ ID NO: 214570 - RNA, 73 nt, Homo sapiens
acccggaagcggacgggggaggaggcaacgccgcgaagagaccagagacccgccagaacccccccggggccgc

SEQ ID NO: 214571 - RNA, 84 nt, Homo sapiens
gcgacggggcccagcagacagccgaggggagcgcggggcccggcagaaagggcgaaaccaagaggagggaagcaggcagacgcg

SEQ ID NO: 214572 - RNA, 39 nt, Homo sapiens
gagaggcccaggaggacagaaacgaaggaggcccaacca

SEQ ID NO: 214573 - RNA, 61 nt, Homo sapiens
gcccggaggggggagaaaaggcagcgccccaaccccagaaccgcgcgggacggacaccgcg

SEQ ID NO: 214574 - RNA, 69 nt, Homo sapiens
cagaagggggaagcgccggaacaggagagagagagaggccagaaggacagaggcacgagaggaagccga

SEQ ID NO: 214575 - RNA, 69 nt, Homo sapiens
caaccgccgaggaccgcccgccgaggacgaaagaaagagagcggagggcgaaacacagaaaaccgcaac

SEQ ID NO: 214576 - RNA, 78 nt, Homo sapiens
cgggaggggccgggaggcagaggggcaggggaaggggggcaggggcacacgcagagcagcacggaggaggcaccaagc

SEQ ID NO: 214577 - RNA, 76 nt, Homo sapiens
gcagcaccaggacaacccagcaggccggcccccccccacccccgccacgcacagggggaccggcagacagcgaacc

SEQ ID NO: 214578 - RNA, 84 nt, Homo sapiens
caggacaccggaaccgggaaaggaccacgccccaccagcaccggcaaccccggcggccaacccaccgcaacaggagggagggac

SEQ ID NO: 214579 - RNA, 117 nt, Homo sapiens
gcagcccccacagcgacacccagcaggcaccagcccagaaacacagcgacacccaggaccaccgagagcgcgccaaagaaaaaagccaaagccagaaaaaaggaacgccaaagaaga

SEQ ID NO: 214580 - RNA, 84 nt, Homo sapiens
agcaggaaagaggaggccaggcaagaggagccaggagcacggggggaacaagaccgccgggacggaagacgggagcgggcccgg

SEQ ID NO: 214581 - RNA, 77 nt, Homo sapiens
gccgccaaccagcgaggccacggcgcaccgcagcagcccacccaggcgcgagaccgcacagcaaggaaagcacccag

SEQ ID NO: 214582 - RNA, 77 nt, Homo sapiens
gaacccgcccgcgccccgccgcggggcgcgcggcgccggcggcgcgcgacccccgcgcagagccgagcccggaagcc

SEQ ID NO: 214583 - RNA, 77 nt, Homo sapiens
cacagaggggccgaaaaacaagagggaccagaccaccacagcgccccgagagaccccggagaccaagcggccgcaag

SEQ ID NO: 214584 - RNA, 77 nt, Homo sapiens
cccgcaccgaaagggccaagcaacggagaccgggggggcaagcaaccagggggccgacgacgagccccgcgaggagc

SEQ ID NO: 214585 - RNA, 70 nt, Homo sapiens
gaagccgaccgcccccagcagcgaaaagaggggaaccccccagcagcgaggacgggacccggccgcggcc

SEQ ID NO: 214586 - RNA, 71 nt, Homo sapiens
acgagagagaagcagccggaaagcccagaacagcacgagccccgacaccacgccacccaagagagagcaaa

SEQ ID NO: 214587 - RNA, 62 nt, Homo sapiens
cacagccacggcacaccggcaaggaaagggacagagcagaaaaccaaggagcaggccccgcg

SEQ ID NO: 214588 - RNA, 76 nt, Homo sapiens
gagccccccagcgcagcccaccaggagaagcaaggggccgacacggggcaagcgggaaaagccaaaggggagaccc

SEQ ID NO: 214589 - RNA, 80 nt, Homo sapiens
agagcgcccggccgcggccagcggagcccgggcggggcaggagccgaaagaaggaggccaagaccaaaaacaagaggaag

SEQ ID NO: 214590 - RNA, 37 nt, Homo sapiens
ccagaggacagagcaaggagcaggcgccgcaccaagc

SEQ ID NO: 214591 - RNA, 72 nt, Homo sapiens
acaagcgcccaaagccaccgacgcgcagaaaggacacggggccgagcgaggaagacaaaccggccgccgccc

SEQ ID NO: 214592 - RNA, 77 nt, Homo sapiens
cagaggagcagggagaagagaaagagacgcagcaccgggccgccgaagaacggaaaaagagaagcaagggaacagag

SEQ ID NO: 214593 - RNA, 75 nt, Homo sapiens
cacagaggaaaccgcaccgcccggagacagcacccaagaaaacccaggccgcgaaggagaagaccggacaccaac

SEQ ID NO: 214594 - RNA, 71 nt, Homo sapiens
ggcgcggacgccaggcggccaccccccgacagcccgagagggaaaccagaagagaaaaagaaacaaaagcc

SEQ ID NO: 214595 - RNA, 66 nt, Homo sapiens
agaccgagggaacccacccccacccacacaccaagacgcccgacacagaagccacaagcaaccacc

SEQ ID NO: 214596 - RNA, 75 nt, Homo sapiens
acaggacacagagccccaggacacagagacacaaaaacagaacagggacaccagcggggaccggagacaagggcg

SEQ ID NO: 214597 - RNA, 76 nt, Homo sapiens
gaccaaaagaacccaaagacggcagccggcaggagagcgacaaaccaaggagggcggacgggaccggaggcacaaa

SEQ ID NO: 214598 - RNA, 77 nt, Homo sapiens
ccacgggcgggcccaccggaggggccaccgccaggacccagcggacgcccgcagcccggaacagaggacagggcggc

SEQ ID NO: 214599 - RNA, 76 nt, Homo sapiens
ggaccgagagcgcgaaacgcacgagaaggacaaaccccaagaaaacgaaacaggagggggaacgaaaaacacaaaa

SEQ ID NO: 214600 - RNA, 86 nt, Homo sapiens
gaggcgaagaggggcagcgcgagcgggaccagcgccggaggcgccgcagccagaggagcagccaagaagccccccaggggcccgca

SEQ ID NO: 214601 - RNA, 93 nt, Homo sapiens
agcaccgcagccgggcagacacacgacgagaaccgggacccaaagacaggaccacgcaccagcagagaaggaaagcaaaccgaagcaggcggg

SEQ ID NO: 214602 - RNA, 67 nt, Homo sapiens
gaaaaacagagagaaaccaaaagggccaggaagcgaaagggggcagacagaagagagacgagcaacc

SEQ ID NO: 214603 - RNA, 69 nt, Homo sapiens
aagaaaacgaagaggcaaagagaaaaacacacccagacggagaaccgcaggaaagcggccgcgagaacc

SEQ ID NO: 214604 - RNA, 87 nt, Homo sapiens
gcgggacaggagcagcggccgggagcccagggaggcaggaccaagaacgcccagcccgcgggcaccggcagaaaggaggaggaaaac

SEQ ID NO: 214605 - RNA, 70 nt, Homo sapiens
cacaaaaaaggaagcgaaaaaaacgaaggaaggaggacccgaggagagagaagacggaaaggaaacacgg

SEQ ID NO: 214606 - RNA, 78 nt, Homo sapiens
ggcaagaacgccgccagaggaaccccgaggcagcggcccgagaaaccccgcgggggcgagaggaccccgcccccaggc

SEQ ID NO: 214607 - RNA, 74 nt, Homo sapiens
agaccaagggaagccggggaacacagagaaaagcagcagggcccacacaccagccagaggaaaaacagaaccca

SEQ ID NO: 214608 - RNA, 80 nt, Homo sapiens
gcagcagcgaagcaacaaggagggaaaaccccgaccaaaagaagcaggacacaggagaagcgagaacaacacgacaaaga

SEQ ID NO: 214609 - RNA, 81 nt, Homo sapiens
ggacgccagccgcagaggaagacccggccacgagcggagaagccaagcgggcccagagcagcaggggaggagagaagacgc

SEQ ID NO: 214610 - RNA, 80 nt, Homo sapiens
aggagaagggcagccgagaagagggacaggggaagaaacgcagaggccacgaacgaaaggaacgcgagaggaaaagcaaa

SEQ ID NO: 214611 - RNA, 74 nt, Homo sapiens
cgagaaaaagagagccgaaaagcgagcagagaacagccgcaccggagagggacaagaaaggacggacaccgcaa

SEQ ID NO: 214612 - RNA, 74 nt, Homo sapiens
accagacgcaaacaacaacaacggccagaaacaacagggaaaagaacacacaaacaccgggacccaccgacacc

SEQ ID NO: 214613 - RNA, 70 nt, Homo sapiens
accggccagagaaggagaacaagaggaagcacacggaagagcgaaaaagagaaagcccgcggggaaaagc

SEQ ID NO: 214614 - RNA, 51 nt, Homo sapiens
agccgggaaggggagccaccagccccccgggcgagggacaggccgagcgga

SEQ ID NO: 214615 - RNA, 68 nt, Homo sapiens
aggacacaaaaaggagagaagaccacagggacaaaggaaaaagaggaggaaaacagcagggacgaaca

SEQ ID NO: 214616 - RNA, 88 nt, Homo sapiens
gaggacgccagacgcacggaaagcagcgcaggagccaagaccacagcagcacccagacagacgcgaagcaaagcgccacccagaagac

SEQ ID NO: 214617 - RNA, 78 nt, Homo sapiens
cgggagcagaggaagccgaggaccaccacagaaggaagaaggcggagaaaacgcgccacacagcgacagcgcaagagc

SEQ ID NO: 214618 - RNA, 58 nt, Homo sapiens
acaacacaacacgccccgaaggggcaaggccacaggccccaagaaccgacgagccccg

SEQ ID NO: 214619 - RNA, 84 nt, Homo sapiens
ggcgcagcggcccagggcgccacgagccaggagaccaaggaccagccaccacggagaacacaccgggacggggggcacgcggaa

SEQ ID NO: 214620 - RNA, 79 nt, Homo sapiens
agaaccagaaagccccagaagaaagacggaggaaaggacaagcaggccacgagaaccgaagacagggccaccgcaccca

SEQ ID NO: 214621 - RNA, 80 nt, Homo sapiens
acgcgcggaaggcagcgcccagcagcgcaggccgggcagagccgaaagggagagaagaccgccaagcgggaaaaccccag

SEQ ID NO: 214622 - RNA, 74 nt, Homo sapiens
acgggccaaacaaggcaaggcaccggagcggaaaaaccgaacaagccgacaggaacgaagagggaccgcgagaa

SEQ ID NO: 214623 - RNA, 69 nt, Homo sapiens
caccggaaaaaaagggcggcccgaaggcaagggcgaaaacacagaaacaccaaagaaaagacaaagaac

SEQ ID NO: 214624 - RNA, 62 nt, Homo sapiens
gggggcccccgggccccagcaggcgaagggacgaccaggacagcgcaaacaaaaaccccaga

SEQ ID NO: 214625 - RNA, 81 nt, Homo sapiens
gagcgccaacgagaccacggccccagcacaaagggaccccgacaacagcgcacgagcggcgccgaccaggcccgacagggc

SEQ ID NO: 214626 - RNA, 81 nt, Homo sapiens
ccacgaacagcggagcaaggcgacgaaccggagagaggagaacgaacaccggaccgccaggcccgagcccaagcgcacgac

SEQ ID NO: 214627 - RNA, 79 nt, Homo sapiens
cgccccccgggaacggagccagaacagcacagaggcccgaaagcagaacagagaaggaacgaaaagaaaaaaaaaggaa

SEQ ID NO: 214628 - RNA, 80 nt, Homo sapiens
caaccacaaaacaggcggagggcggcgaggccacgcgagaaggacgaagagacagcgcaggcagcccaggaagcacccgc

SEQ ID NO: 214629 - RNA, 84 nt, Homo sapiens
gaggcgccacgcgacccagaccggcaccacacgaaccgaggcacaccaaaggcggaaggaggaccgccggccaggagcgccagg

SEQ ID NO: 214630 - RNA, 83 nt, Homo sapiens
aaaggcaccgcaacaacgcccagcgagaaggacagaaaacgggccccagacacaagccccaccaagaggacaccccaggaacg

SEQ ID NO: 214631 - RNA, 82 nt, Homo sapiens
cgccggccacgacgggaccacggcagaagaggacgaggccgacagcacgccgagaagacacagaaaagcccacgaggaaaaa

SEQ ID NO: 214632 - RNA, 57 nt, Homo sapiens
gccggaccaaccgcgaaaagggcggaagaagccaaggagcccgacggcggacacacg

SEQ ID NO: 214633 - RNA, 77 nt, Homo sapiens
agcgacagaggccggcagccgccccagcacgcgcccaccaagaaagaaccagagaaggacggggacggaagaagcag

SEQ ID NO: 214634 - RNA, 74 nt, Homo sapiens
ccccacaacaggccccccgccccccccccgcgggcaccgaggacccgcccgcccagccgaacccgaggagcagg

SEQ ID NO: 214635 - RNA, 74 nt, Homo sapiens
cacaccccgcacccgcaccagcccagaacaccgacaacggcggggggaaacccgaccgccccaggggcacagca

SEQ ID NO: 214636 - RNA, 83 nt, Homo sapiens
acggaaagcgacaagggaggcgccgccagcggccgggaccgaacaggcgaggcacgaggggaaacagaagggagaaaacaaca

SEQ ID NO: 214637 - RNA, 86 nt, Homo sapiens
cggggagagacggccaagcagcaccagcggccggggaaaggggagacggacaagggagggccaagaacccggaggaggggaagccg

SEQ ID NO: 214638 - RNA, 57 nt, Homo sapiens
gaaaaggcagaaggagaaaaggcagccaaacccaagagcgaagcaaaccagaagcaa

SEQ ID NO: 214639 - RNA, 84 nt, Homo sapiens
gcccagcagcacccgccccccagccaggcaccagacggcagcagagcgcggcccgaaagccccagagcagcaggacggggcccg

SEQ ID NO: 214640 - RNA, 83 nt, Homo sapiens
cgaagcagagcccgcggcacaaacagaggaaacaccagaaaggaaggccagaagcggacccagaagaggggagcagcaaggag

SEQ ID NO: 214641 - RNA, 67 nt, Homo sapiens
gcgcgggcggcggcggcgggcgggagccccagagggggcacccggggcccacgcccggcggggacga

SEQ ID NO: 214642 - RNA, 77 nt, Homo sapiens
cgggcggcccagggaccacggacgccacggagccagaggaaccgagaggaccagaggccagcacaagaacaagccac

SEQ ID NO: 214643 - RNA, 57 nt, Homo sapiens
gagggcggaacggcggaagggagcccgcgcgagccccggcagggcccgggcccgccc

SEQ ID NO: 214644 - RNA, 76 nt, Homo sapiens
ggggagcacgaagcacaacgccaggagggcaagccagccaagcaaaggcacacgcagccagaagcaacaagagaag

SEQ ID NO: 214645 - RNA, 76 nt, Homo sapiens
ccaggcaggccagagccgaaccaaagagcagcaggagacaggaaagagcagccaaagccaaagaagacgaaaaaag

SEQ ID NO: 214646 - RNA, 80 nt, Homo sapiens
gaagccgacaaggcgcaagcgaaaacagaccgcgagcccagaggcaagcgagaagaaccagaccggcaaacccggcgaac

SEQ ID NO: 214647 - RNA, 74 nt, Homo sapiens
ccccaaacccggacgaaacgaccccaccagccccaaaaggcggcaacagaacggcgaaaagcagcacacccagc

SEQ ID NO: 214648 - RNA, 55 nt, Homo sapiens
cagcccgcaggagagggcacccccggcccaggagagcaccaccgacaccgagaag

SEQ ID NO: 214649 - RNA, 66 nt, Homo sapiens
caccagggaccgaaacaacgggagaccaaacaggggggggagagaaaccagcccagacacagagga

SEQ ID NO: 214650 - RNA, 74 nt, Homo sapiens
ggaacccggcgcggcggcggcacgaggcaggcgacgcgagaaggggccaacggccgccaccaaaaagaagaagg

SEQ ID NO: 214651 - RNA, 55 nt, Homo sapiens
cgcgaccggcggcggcgcggcaggaccgaggacgggcgcacccccaggaggaagg

SEQ ID NO: 214652 - RNA, 71 nt, Homo sapiens
gccaagcacggggggcaggccaccggaacaaacccacgacaacaggaaaggccagcccccggcgcggaacc

SEQ ID NO: 214653 - RNA, 72 nt, Homo sapiens
ccggaagccggccacaacgcaaggagcggaaggcgcgaggcaacaagccagaacaaaacaaccggaacagac

SEQ ID NO: 214654 - RNA, 80 nt, Homo sapiens
cagggcgacggcccgaggccgagggcggccgacagagccccggcccccccgcagacccccggcacgcagcacgggggcag

SEQ ID NO: 214655 - RNA, 38 nt, Homo sapiens
caagccaaagaacccagaagaagccacacacagaagac

SEQ ID NO: 214656 - RNA, 74 nt, Homo sapiens
ggcgggggccggcggggccggagcccccgccgcgccccccgccgccgcgcaacgccgcagacagggaggacccg

SEQ ID NO: 214657 - RNA, 78 nt, Homo sapiens
cccacgaacagcccacgccaaaccagaccccaggccgccagcccagcggcgggcaggagagcggccaaaaagagacgg

SEQ ID NO: 214658 - RNA, 59 nt, Homo sapiens
aaagcacccaccaccggcacagcaggaaaggaagaaaggccaagcagaaacaaaaagag

SEQ ID NO: 214659 - RNA, 77 nt, Homo sapiens
caggagaagaagaagcagcaaaaagagcgggaagccacccgggaggaggaggggccagcaacacccaacacaaagcg

SEQ ID NO: 214660 - RNA, 73 nt, Homo sapiens
cgcaccagccaggacgcacacggcgaacggaacccaccggggaccgccaccgggcggacccaggacagcgagg

SEQ ID NO: 214661 - RNA, 79 nt, Homo sapiens
gacgaggagcgcgcggcgccggggggcgcgccgcgaccgcccgccggacacccggaagcaggcgaacgaaggcaaacga

SEQ ID NO: 214662 - RNA, 78 nt, Homo sapiens
agccacagccagcccagcccgccccggcgccccaaccccggcagccccagggaagagcgaagaccgaccgaagaaagc

SEQ ID NO: 214663 - RNA, 83 nt, Homo sapiens
gaacaccccgcggaaaagcaaccaacaaccccacagaggacaggagaaaggcgaaggcaggagggaagcgcacacaacagaag

SEQ ID NO: 214664 - RNA, 77 nt, Homo sapiens
agaacacaggaaccggccccggggccaggaggcggggagcgcgaacaaacagaccgggagccgcgaggagaaccggc

SEQ ID NO: 214665 - RNA, 73 nt, Homo sapiens
agcgacacaaacaaaccgaaagaagaagaggagaagaaaagaccagacgaggaagaccccagagaaacacagg

SEQ ID NO: 214666 - RNA, 85 nt, Homo sapiens
caggccagagggggccgccgcggcagcaagaacagagagagaggggacagacgagagaacgaggggacagagcacaggaaaggga

SEQ ID NO: 214667 - RNA, 67 nt, Homo sapiens
cggcacaccgcaaggccaagagaggacgcccaaccacagcccaggcaaaaaacacacaccggaacgc

SEQ ID NO: 214668 - RNA, 68 nt, Homo sapiens
gagccaggacaccccgaaagccggaaaacgaccgaggaggagaaggggcggcccggaggccgagagga

SEQ ID NO: 214669 - RNA, 84 nt, Homo sapiens
gcagcaaaccggaccaccccgaagaaagcacaggaaccagccaggaaaggagaggaaacggagaaaaaggaggacagacaagag

SEQ ID NO: 214670 - RNA, 75 nt, Homo sapiens
ggacacgcgacgaggcccgccaagaggcgccgcaggagaaaagcgcccaggaagcggaaaaacaaaagagccgcc

SEQ ID NO: 214671 - RNA, 81 nt, Homo sapiens
gccgcagaagcaggagcgggagcggcagaggaaacaacggaagggaacaaaagcaacgaaacaggccccagacaagaaaaa

SEQ ID NO: 214672 - RNA, 57 nt, Homo sapiens
cgcgagcccagaggagaccagccggagagagaagaagcaacaacacacagaggacca

SEQ ID NO: 214673 - RNA, 58 nt, Homo sapiens
gggaagcaaacgggccaaaggacagagaagacagagggaaagggagcagcaccggcca

SEQ ID NO: 214674 - RNA, 77 nt, Homo sapiens
ccgaggcgagcgcgaacccgaggagagaaagcaacaccaccaagccacccccacggacgggagcaggccagcccgcc

SEQ ID NO: 214675 - RNA, 57 nt, Homo sapiens
cgcggcggcggcggacaagagcgggccgcacgggggaaagggagacaggagagcaaa

SEQ ID NO: 214676 - RNA, 73 nt, Homo sapiens
gacaaaagaaaacagcgcaaagcagaagacaacgacgaaagacccacagaagcgcgccgggcgcagaggacag

SEQ ID NO: 214677 - RNA, 60 nt, Homo sapiens
gcaagaagagccagggccgggaggacaccagcccgcacaggcagacaaccccggggacag

SEQ ID NO: 214678 - RNA, 83 nt, Homo sapiens
cgcccgggccaccaagcaagcagaagcgcccagcagcgcaagcaggacccaggagggaagcgccaggcaaccccaaggcaacc

SEQ ID NO: 214679 - RNA, 75 nt, Homo sapiens
gccgaggcacagagaaccgaccagaacgcagcaacaaagaacggaaagagcgaaggagggagaccgcagagagga

SEQ ID NO: 214680 - RNA, 65 nt, Homo sapiens
ccgggggaggaaagaagggggcgagggaacagaaaagagagggacagacacaacaacccaaagcc

SEQ ID NO: 214681 - RNA, 83 nt, Homo sapiens
aggaaaacaacgagagaacgcaggacgcgacgggacagacaagggggagaggacaagagagggaacagggccaaacggaaagc

SEQ ID NO: 214682 - RNA, 71 nt, Homo sapiens
aagaggaagcaaagccaagaaagaaggaggccaagaccaaaaacaagaggaagcaagagaggcaaaagggg

SEQ ID NO: 214683 - RNA, 79 nt, Homo sapiens
ggcaaaacgaggcagcagcacgcacgaccaaaagcaggaccaaaagcggggccccagaaggggaccagagagggaagaa

SEQ ID NO: 214684 - RNA, 69 nt, Homo sapiens
aaacacgcagggcgcagagccaaaagaacaccgcccagcgcgaagcaccgaggcaaagcagagaacaca

SEQ ID NO: 214685 - RNA, 52 nt, Homo sapiens
ccgcgccccagaaggcagaggaacacaacagcaggagagagccaaaacgaca

SEQ ID NO: 214686 - RNA, 68 nt, Homo sapiens
gcggaggcgcccaccccacgggaagacgggccgggccggccccagaacagggagaaacacacaacaaa

SEQ ID NO: 214687 - RNA, 74 nt, Homo sapiens
aaaaaaacagggccacgagaaacaaagcgaacccgaacaacgcacaacacaccaagagaagcgcagcagcgcaa

SEQ ID NO: 214688 - RNA, 34 nt, Homo sapiens
gccccgagagcggacacagagagacgggggccag

SEQ ID NO: 214689 - RNA, 85 nt, Homo sapiens
aacgaaacagcgcagccaggaacaggacgaagaccagcgccagggaaagaagaccagcacacggaagacaggagaacgagacgac

SEQ ID NO: 214690 - RNA, 74 nt, Homo sapiens
accggggcgcagggcaaggcagggagcccgacaacacagggcagggaaacacacgaaggaacccaccaacagaa

SEQ ID NO: 214691 - RNA, 117 nt, Homo sapiens
gccgaggggaggcaaccgcccaaaccagcgccggaaggaagaaagcaggagggagacacaacacggacacggccgagaccccgacgcccgacggccacacgccagcgggccccgagg

SEQ ID NO: 214692 - RNA, 68 nt, Homo sapiens
caggaggaggagcagagcgcggcgagcccagaggcacacccagaagccacaggagaagcaagaggcgg

SEQ ID NO: 214693 - RNA, 78 nt, Homo sapiens
gccaccagagcgcccgagaaggccccgagacaaggccccggcgccgacccgcagcagaacccacagagcccacagcga

SEQ ID NO: 214694 - RNA, 109 nt, Homo sapiens
aaggcggccaggaggaagaggaaaggcaaaaacgcacggacagccagcgaccaaaggcccggcaaaggaagacaacgcacggccagcacccaagaggaggcggcggaaa

SEQ ID NO: 214695 - RNA, 82 nt, Homo sapiens
gcgccgccccaggcccgggccgcgccaggagccgccccccccaggagaaagacagcaaagaaaaggagaagaaaggaaaaaa

SEQ ID NO: 214696 - RNA, 79 nt, Homo sapiens
gcgccaggaggccaccgggggcgccgcggcgggcgggacccagcggcaacgaccaagacgcgaccggaaaggagagaga

SEQ ID NO: 214697 - RNA, 68 nt, Homo sapiens
caccacaaacaacaaccgacaccgcagaaccagcagaagacaaacagaccccagaaagaagaagagga

SEQ ID NO: 214698 - RNA, 87 nt, Homo sapiens
gcacgaaggacccagcagggcaccagaagggaagaaagcggaggcggcggcgcgaaaagagaaaaaagaaaagagaagagaaggaag

SEQ ID NO: 214699 - RNA, 85 nt, Homo sapiens
ggcgggacagcggcccccggagggggcagcccgggagaaccgcggcggccggagcggccgcaagacaacagacacacacgagggc

SEQ ID NO: 214700 - RNA, 43 nt, Homo sapiens
gagccaggccagcaggcccacggcggcagagaggcgagacacg

SEQ ID NO: 214701 - RNA, 83 nt, Homo sapiens
ggcccaaggcgccacaaggagccaggcagaaaagaaaagaagaaaagaaagagaaacgggacagcaggaggaaaggaagagaa

SEQ ID NO: 214702 - RNA, 76 nt, Homo sapiens
agcgcggcgcgcgcgcccgccgccccgcccacgaggagcacagccgggccgcgcgaaggacaaaaaggccgggaag

SEQ ID NO: 214703 - RNA, 84 nt, Homo sapiens
agcacaagaagaagacgagcagcagcccaccagcgagacgagcggaacacagagaacgcagcgggaaggcgagaaccgaggcgc

SEQ ID NO: 214704 - RNA, 85 nt, Homo sapiens
ggcagggcaaggaaacggccacaagccagcccgaggaaagaaccgaaaaacacggacccaaaaaagcagaaggaagggccagcag

SEQ ID NO: 214705 - RNA, 79 nt, Homo sapiens
aaggcaccagaacccgagagaaagcaagcacacagccgcaggcaccaagaagaccaacaagcagaagagccaagacaaa

SEQ ID NO: 214706 - RNA, 56 nt, Homo sapiens
gcgcagaaccgcacgcgccggccccgggggggagagacggccaagaacggcaaaag

SEQ ID NO: 214707 - RNA, 73 nt, Homo sapiens
accccccgaaccagaggcgaagagcagaggcacagagcacaggaaggagcccggcagcgccgggaaacaccgg

SEQ ID NO: 214708 - RNA, 82 nt, Homo sapiens
agagaccggagcgccaccggcaaagaggggcagaacccggccccaaggacaagagggaaaccaaagggcagccagaccacac

SEQ ID NO: 214709 - RNA, 63 nt, Homo sapiens
gcgcggaacagacaagcagagccggcaccacaggaagccgagcaggggacacacgcccacacc

SEQ ID NO: 214710 - RNA, 69 nt, Homo sapiens
aaagccaccagacaggagcacacaaaccggaggaggacgccgccagccaccggcgcgaagccagaccag

SEQ ID NO: 214711 - RNA, 81 nt, Homo sapiens
ggaggagcagagcgaaacggaagagaaaaccgaaaaagcagaagcacaagccaaacgcaaaaaaggacacgacggagaagg

SEQ ID NO: 214712 - RNA, 80 nt, Homo sapiens
cggaacagacgggccccaagaggccagccccccgagggcaacgagaaagagacgcgcaagccccggggcagagacacagg

SEQ ID NO: 214713 - RNA, 80 nt, Homo sapiens
ggccggccggagccggcggagcaggaccgcacgcggaggcggcgcccgcgccgcggaagaccagcgggagcccacgccgc

SEQ ID NO: 214714 - RNA, 65 nt, Homo sapiens
acagagcagacagaacagacaaggggacacgcagcagcgaaaaagggaaacaaacagcaacgggg

SEQ ID NO: 214715 - RNA, 79 nt, Homo sapiens
cacgcccagaaaaagccaagccaccgagacccggaggaggcgaagcgagaggacagaaagcaccgggaggaaagagagc

SEQ ID NO: 214716 - RNA, 85 nt, Homo sapiens
cgcccgagcccagaggggaggaagagcaagcaggcccgagggacaaagaaggcagaccagcggagaacggagagcagggcgggac

SEQ ID NO: 214717 - RNA, 58 nt, Homo sapiens
agcccgagaaaccgcagcacacacacgggccaccagagaacccaggagccgcagacga

SEQ ID NO: 214718 - RNA, 71 nt, Homo sapiens
gggaagaagcacagccacgagccaacacagggaaagacaaggagccgggccgagaaaccgaaccagagacc

SEQ ID NO: 214719 - RNA, 73 nt, Homo sapiens
ggagcacggcgagcagccaggccaggagagggagaagaagggggacgggggacacgcccgaggaaaaggggcc

SEQ ID NO: 214720 - RNA, 75 nt, Homo sapiens
cggggccggcgcccgggccaccggccgcagcacgggcccagacgcagacaaacgagaagagagaagagggacaga

SEQ ID NO: 214721 - RNA, 72 nt, Homo sapiens
gccacagcaccccagcacccagaggcaccaccaaaagacagacagaacaagccaccaaaacagacccagcac

SEQ ID NO: 214722 - RNA, 70 nt, Homo sapiens
gaggaagcggcgcgcaggggggccccagacacgacgcccccggccggcccgggccgcgccagagcgcggc

SEQ ID NO: 214723 - RNA, 70 nt, Homo sapiens
ccgggacacaccccaggaaaaagacagcccgcagcacgaccagcaggaacgcaaagccagagaagaagcg

SEQ ID NO: 214724 - RNA, 76 nt, Homo sapiens
gcaaggacccgcccccaagacgggaagaccgcaggaaagcaggaaggcaagaaagccaaggacgaaacccacacgg

SEQ ID NO: 214725 - RNA, 78 nt, Homo sapiens
gacccaagaaaaccgggaccacagagggaccagcgggaggaaaaaacggcaggagaagaagggacagcgcccagggga

SEQ ID NO: 214726 - RNA, 57 nt, Homo sapiens
caagaagacacaaaggacggaggcacggggacgaagggaacccgccgggcggcccgg

SEQ ID NO: 214727 - RNA, 75 nt, Homo sapiens
ggggagcagcgcgcaagccagagacccagagcagcagcgaagagaaggcccagcccccccgccaccccccacccc

SEQ ID NO: 214728 - RNA, 48 nt, Homo sapiens
gcacgggaggagagcgagcaggcgacccaaaagagcgaaggaaaacca

SEQ ID NO: 214729 - RNA, 65 nt, Homo sapiens
acggggaccaggggaggcagccagcaccgacagccggccccagcacccgagggacccgaggagcc

SEQ ID NO: 214730 - RNA, 60 nt, Homo sapiens
gcccgcaagcgcgccgacagggaggaaaaaggaacaagagcaagaaaaaaacaaaacgca

SEQ ID NO: 214731 - RNA, 121 nt, Homo sapiens
gaccagccgggcgcgacgccgcggacccccgcgaccgcgcggaccagggcgacaaagggacccgcgcgcgggggggccgacggccgaggcgccgcacagcgggagcgcacgacccccccaa

SEQ ID NO: 214732 - RNA, 66 nt, Homo sapiens
agccaaccccaaacaagaacagaaaacgggaagagagggaacacgcaggagggagacgaagaggag

SEQ ID NO: 214733 - RNA, 64 nt, Homo sapiens
cggagaaagaggacagcggcccaggcggcgagaaagcaaggagaggccaccaaggagaagcgca

SEQ ID NO: 214734 - RNA, 67 nt, Homo sapiens
ggggggagacgggaccagcaagccgagaaagggaggcggaacagagacacgacgcaagagacgccag

SEQ ID NO: 214735 - RNA, 73 nt, Homo sapiens
aggggacacgcgcagaggcaagggagagagcccggcagggaaccaacccagccacaaccaccccagggcgacc

SEQ ID NO: 214736 - RNA, 84 nt, Homo sapiens
aagcacggaagaccaccaaaacaaagccacaagacacgcgaaaggagcgagaagaacgaacagaacagggaaagcagaaagagg

SEQ ID NO: 214737 - RNA, 61 nt, Homo sapiens
cagcacgaccccccaagcccgggaccgggagcccgggaccgggagccggggggccaccccg

SEQ ID NO: 214738 - RNA, 75 nt, Homo sapiens
cccccccgccccaggaacgccgggaaaggaccaacaggggaaccaaaggacagcacagaccgagcaggggccaaa

SEQ ID NO: 214739 - RNA, 62 nt, Homo sapiens
gccaaagaagggagagagggaggcacccccgaacaacaacggagaccgggcccccacacggc

SEQ ID NO: 214740 - RNA, 71 nt, Homo sapiens
ggagaaggaccaagaaccaggcccacgaggccccgggggcccggaacaggagcgaaggcccgcccccccga

SEQ ID NO: 214741 - RNA, 39 nt, Homo sapiens
caggagaacaacgacggaacgggcgaaaccagcgaagac

SEQ ID NO: 214742 - RNA, 78 nt, Homo sapiens
gaccccacaaggaccagcgccagagcgggcccaggcccaggcccaaggccaaggagagagcccaggccacaggacagc

SEQ ID NO: 214743 - RNA, 78 nt, Homo sapiens
gagagcacaccaggcacccgggcccagccgggaacccccacgcggccagcgaaaacgcccaggcacccgcgagcccac

SEQ ID NO: 214744 - RNA, 63 nt, Homo sapiens
cgaggaacggcggagcagggagcccaaagaccccggagacagcgaggaccagacaaaaggaga

SEQ ID NO: 214745 - RNA, 91 nt, Homo sapiens
cacaaaaggcgcccacagccacgggaccggcgcagccgccggacgggaagacagggcgggacaagcggccgggcgcagggaccccagccag

SEQ ID NO: 214746 - RNA, 69 nt, Homo sapiens
gaagaacaccggcggcggccagcccgacacaggaaaggcccgagccaaaagacccagagaaaggagcac

SEQ ID NO: 214747 - RNA, 76 nt, Homo sapiens
gacggagcaagagaacgcaagagacgccaaacggcaagacgcagcaagaacgggacaacggcagggcggcacccaa

SEQ ID NO: 214748 - RNA, 51 nt, Homo sapiens
caaaaaggaagaaagaagaaggaagcagaaaagcaaaaaccagaaggcacc

SEQ ID NO: 214749 - RNA, 79 nt, Homo sapiens
aaaaacaacccaaccacggggaaaaggcaaaaacccacaccgcaacccagcgagagaaagagcggaaccagcaaagaag

SEQ ID NO: 214750 - RNA, 75 nt, Homo sapiens
cagagagaacagggcaacaggccgggaaagcagagccaagagaacccaaccaaacagggagacaagagcaagaag

SEQ ID NO: 214751 - RNA, 76 nt, Homo sapiens
caaagggacaacgggcccggagagcccgaacggggcaaaaaggcgagcagcccgacggccaggaggcgaagagacg

SEQ ID NO: 214752 - RNA, 70 nt, Homo sapiens
gaacaggaggaccccgggcgcaccgcgcggcgcccgcccagacaggggccaggccaggggcaggggaagc

SEQ ID NO: 214753 - RNA, 74 nt, Homo sapiens
ggacacacagaggggcagccaaaagaagaaaggagaaagagcgcgcacgaaagcacacgaaaaggaaggaaaaa

SEQ ID NO: 214754 - RNA, 76 nt, Homo sapiens
aagaagcggcaacgggacgaggggcaaggagccacaagccacgacccagaaggcagcggggaccaaacaacagcgg

SEQ ID NO: 214755 - RNA, 74 nt, Homo sapiens
ccgaaagcaagaacacgggaggacgcagggcaggggcagcggaggcagagcagccccggggagccgaagcaaac

SEQ ID NO: 214756 - RNA, 78 nt, Homo sapiens
gcccgggagaggccgcggcggccaggccccagacacagacgagcaggggaagaaagaaggcgacgcacaacacaaggc

SEQ ID NO: 214757 - RNA, 63 nt, Homo sapiens
agcgggaccgggcgcgggcagagcgcggcggcgcgggaccagggccgaggagggcggaaccac

SEQ ID NO: 214758 - RNA, 81 nt, Homo sapiens
caggcccgccgcaaagacacaccacagccgggccacacccccggagaccaagagaagaaacagcgggaaccaagaaaagga

SEQ ID NO: 214759 - RNA, 76 nt, Homo sapiens
ccgaacaggagccaccaggaccagggggacacaacagaaaaagacaacagaggggggagacaaccaacaagaaggg

SEQ ID NO: 214760 - RNA, 73 nt, Homo sapiens
gggaacgcgaagcgccaaagccagacaaagaagagcacacccgaagcaggaacacggaccacgcgcaaagaac

SEQ ID NO: 214761 - RNA, 54 nt, Homo sapiens
caaccaccaacggagggcagccagaccagacaacggcaagcggagaagagcaag

SEQ ID NO: 214762 - RNA, 66 nt, Homo sapiens
cggcacggcgcgagccccaagaaccggccaccggccccacacgaccggaagggggaaggccacacc

SEQ ID NO: 214763 - RNA, 39 nt, Homo sapiens
gccggagccagcccagaggccacggaaccgcccagcccc

SEQ ID NO: 214764 - RNA, 74 nt, Homo sapiens
gaaggacgagaagaagagaagagaggagaggagaaggaccacgaaaaacacacaacacgacgcagaccccaaaa

SEQ ID NO: 214765 - RNA, 60 nt, Homo sapiens
ggaaaggaacaacgggcaagaaaggaaacagaaacggacaccagagaaaagaacacacaa

SEQ ID NO: 214766 - RNA, 83 nt, Homo sapiens
gaaagacgcaacgacacggggagagaaagaaaaggaacgggagcgagagggaggagccgggagcccacagccaccccagaccc

SEQ ID NO: 214767 - RNA, 77 nt, Homo sapiens
cacccccggccaagccagaaggggaaaaggagaacggaagccagagaaaaggaagagagagcaagagaggccacgcc

SEQ ID NO: 214768 - RNA, 76 nt, Homo sapiens
acgaaaggaagagggaaagagaacggcgggccagagcggggcgaccaggaaagcgacaccgaacagcgagcacacg

SEQ ID NO: 214769 - RNA, 79 nt, Homo sapiens
gccacacgacccacccaagcccacgaggcgaaacggcgaggaaagagaggagccccggaaagaaaaggacagacccggc

SEQ ID NO: 214770 - RNA, 85 nt, Homo sapiens
caggccacccgggaacggaggagggggcgccggccgagcccgggaaaacgacagcagcagcagggccggaagacgccaccgcaac

SEQ ID NO: 214771 - RNA, 73 nt, Homo sapiens
caacgaaacaagaaggcagggggaaaagcgacgggagaaaagagaccagaagcgaggaaaaccacccgggggg

SEQ ID NO: 214772 - RNA, 78 nt, Homo sapiens
gcacccccgggggaaaagagacaccgacaagacaccacggacgagagacaaacgccgaagggccgccagggaaggacc

SEQ ID NO: 214773 - RNA, 80 nt, Homo sapiens
gcgcagccggcggagccgcgggaccagggggaccaggaggacggaaaagggccgaccaccagagcacacaccaggcaccc

SEQ ID NO: 214774 - RNA, 71 nt, Homo sapiens
ccgggccagcggccgcgcacccccggccggaggcaccagcgaaacagagcaaagcagcgacaacaaagaca

SEQ ID NO: 214775 - RNA, 88 nt, Homo sapiens
ggccgagggagcgggagaggcggaggcggcccgggccaaagcacccgccaggcccgagggcagggacaaacaaccaccccagcggcac

SEQ ID NO: 214776 - RNA, 75 nt, Homo sapiens
cacgacacaggaagaagacaggcccagcaacggccacccaaagaacaccacgcgaggcaaaaaggagagaaacgc

SEQ ID NO: 214777 - RNA, 91 nt, Homo sapiens
cggcgcgcggacccaggcgcggaggcgaggccagcagggacgaacagcggggacgccccagcagaccgcccaggagaggaaagcaggagga

SEQ ID NO: 214778 - RNA, 104 nt, Homo sapiens
caacagcgaggaagaagaggacgacgacgacgaggaagaggaggcgaggcccgaaaagaaagcgaacacacaaaacaagaaaaggcacgcaaacccacaagaac

SEQ ID NO: 214779 - RNA, 58 nt, Homo sapiens
ggggccgggcgacaggagcagaccggggaccccaaaccccggggccggccgcccggcc

SEQ ID NO: 214780 - RNA, 65 nt, Homo sapiens
aaccccccgcacccccgcaaagagaaacaaaaccaccgccggaaaccacggacccgcacgcgaac

SEQ ID NO: 214781 - RNA, 53 nt, Homo sapiens
agacagaacagaacccaaaagccgacaaccccagaaacaggacgcagaaggac

SEQ ID NO: 214782 - RNA, 81 nt, Homo sapiens
gacaacaagacgcaggagcacagcggccaggggacgacgcggcccagaggcggcagaggagaaagggcggggagggggaag

SEQ ID NO: 214783 - RNA, 84 nt, Homo sapiens
gaggccgccggccaccgcgcacccacgaacgcccaccccccgaacccagccgcaccgccagaagaaggccagggaggggcaagc

SEQ ID NO: 214784 - RNA, 69 nt, Homo sapiens
gggagcgccggagcacgagaaacagaagcggagagacagggacaagggggagccggcaaaacaccagag

SEQ ID NO: 214785 - RNA, 55 nt, Homo sapiens
gccgcacaccgcgacggcgcgcggcgcgagacaagggagaccccacaccccagag

SEQ ID NO: 214786 - RNA, 75 nt, Homo sapiens
gaaccgaagcacacgagaagacaccggcccgggagccaaaaaaaacagacccgagacggaaaaagaagaccgaca

SEQ ID NO: 214787 - RNA, 72 nt, Homo sapiens
ccaaaagaagaccgggaaccaaccaaccgaagagcgcacaccagacccaacagcgacagcagaaaagaaagc

SEQ ID NO: 214788 - RNA, 61 nt, Homo sapiens
ggggcggcgagacagcgcccagggcccggagcaaggcgggcagggccacccccaaccagga

SEQ ID NO: 214789 - RNA, 63 nt, Homo sapiens
gacaaccaccccgccaggacgccgacgagccagccggccaggccccgagccccggccccaaag

SEQ ID NO: 214790 - RNA, 74 nt, Homo sapiens
gcgggaaaagagcacccaagagagcggcccgagggccacagaaagccaaggcgcagaccggccgagcccccccg

SEQ ID NO: 214791 - RNA, 46 nt, Homo sapiens
ggaggaacggcccggaaacaggaggacccgcggcgagagggcacac

SEQ ID NO: 214792 - RNA, 81 nt, Homo sapiens
cgcaccgcgggccgaacccgccgccccacacgccgcgcgcgggggccgcgacacccaccaaccagcaccggacgcgaggag

SEQ ID NO: 214793 - RNA, 86 nt, Homo sapiens
aggcggaggcggcaaaacgggcggcgagcagaacggagccgcgccccccagccgcccgggcagacgcccaggaccacaccgcagcg

SEQ ID NO: 214794 - RNA, 77 nt, Homo sapiens
cgacgggagcggacacgcccgggcagggcccaccccgcgcccgacagggcaggaaaggagggcgaaacacaagcacc

SEQ ID NO: 214795 - RNA, 57 nt, Homo sapiens
gccgagccagagccagggaacggaggagcgagccacggcgaaaaagcggggaaaaca

SEQ ID NO: 214796 - RNA, 73 nt, Homo sapiens
ggaggagcagaagagcccaaaaccaacgaaccaaaagcaaccgcgaagagcagaaacaagggaagacccgaac

SEQ ID NO: 214797 - RNA, 66 nt, Homo sapiens
cccccgaaggagggggggaagaggaagaagcaaacgacagggaaccacagccccaaaacgggcgag

SEQ ID NO: 214798 - RNA, 79 nt, Homo sapiens
cgggaggaaagggagagacaagagaggagacccaacagacggggagaagcagaccgcaccaggcgggaccccgaaaaag

SEQ ID NO: 214799 - RNA, 101 nt, Homo sapiens
agcgaccggaagggaaagcgccgagagacgggccgcgccgcccgcaagcagaggcccaggcccaggcccaaggccaaggagagagcccaggccacaggaca

SEQ ID NO: 214800 - RNA, 50 nt, Homo sapiens
gcgccggaaaccggagcgcgcagcagggacgggagaaagaacagacaagc

SEQ ID NO: 214801 - RNA, 74 nt, Homo sapiens
gcgccgcgccggcgagcagagccagacaaaagcccagaaggccggagaaaggggaaaccagcgcaccaaagagg

SEQ ID NO: 214802 - RNA, 74 nt, Homo sapiens
ggaaggaacgggccgaaccgggagcgaggaaccagaacgaaaagcgccagaaagagacgaggacgcgcacagga

SEQ ID NO: 214803 - RNA, 77 nt, Homo sapiens
ggaaagggggacacgcggcggcgcgggggccggccgcgcggacgaaggagacgaaggaagaccgaggagcagggagc

SEQ ID NO: 214804 - RNA, 81 nt, Homo sapiens
gcaggagcagaggaaaaaacgaccaagccagagaacagcccccacgcagcccagaagacaacaggcacaaagagagaagga

SEQ ID NO: 214805 - RNA, 79 nt, Homo sapiens
ccggcccggaccgcagaagggagaccacagcaagacgccgggaccccggaaaccagaaagaaaaaggcacggacaggac

SEQ ID NO: 214806 - RNA, 115 nt, Homo sapiens
gcaccaggcaaccgcccggcccggccccccagaggaggaaccacaagagccagaagacaccccaagagaagcacggagagcccaagaagcaggcagccccgcgggccggagcggc

SEQ ID NO: 214807 - RNA, 75 nt, Homo sapiens
gccaaagccccacagcaagacccaggaagccgcgggcaaaccagaccgaagaggcggccccaggggggaccaaca

SEQ ID NO: 214808 - RNA, 85 nt, Homo sapiens
cacaaaaagagagaagggccaggcagcgcgcaagcaggggcaaaccacgccaggcgcaaccccccacgccagccaggagcccccc

SEQ ID NO: 214809 - RNA, 78 nt, Homo sapiens
gggggggggggagcagggaagacgccgcgccaccgagccggaccggagacggggccaacagagccgccgcacccaggc

SEQ ID NO: 214810 - RNA, 90 nt, Homo sapiens
cgacaagccgcggcagccgcggaccaccgccgccaggacaagcagaccggaagaccgacggaagaccacaccccgagggagcccaggaca

SEQ ID NO: 214811 - RNA, 77 nt, Homo sapiens
cagaggagacggacaaggccggaaggaagggaaaccgggggccccggacaacccgagcaggcaccgcgcgccgcgcc

SEQ ID NO: 214812 - RNA, 80 nt, Homo sapiens
ccgccagcagaggcggagcccgcagaccgcagaaggccggagacaccagcagggaccagaggagaaggaaccacgaagcc

SEQ ID NO: 214813 - RNA, 57 nt, Homo sapiens
ggaagggcggcggaccgcacccggaggagaagaggcgcggaacaagcgggagagcaa

SEQ ID NO: 214814 - RNA, 69 nt, Homo sapiens
gcccgaccagggcggccaccgagagacacagaccagcgcgagagaacaccaaggagccccaaaccaaag

SEQ ID NO: 214815 - RNA, 68 nt, Homo sapiens
aacgaaggggggaggcccaggccaaaagagaccacaaccagaacggaaggcgacagcggggaaagagc

SEQ ID NO: 214816 - RNA, 43 nt, Homo sapiens
aggagccacagcgccgcggggagagagaccgaaggagcagacg

SEQ ID NO: 214817 - RNA, 83 nt, Homo sapiens
acgcccagcccggaggcggaggcccccagcccagacagacaccgcacccggggccggcaagcagaagaggaacagaagaagca

SEQ ID NO: 214818 - RNA, 75 nt, Homo sapiens
cggagcgggcggagaggaaaggccgccagggggaaaacaggcgagggaagggcggcgcagaccaggacacaaagg

SEQ ID NO: 214819 - RNA, 76 nt, Homo sapiens
aaaaaacacacaggaagaaaaaccggaaccaggccagagagcacgcagacacgaccgcccagcacggaacgcaaga

SEQ ID NO: 214820 - RNA, 70 nt, Homo sapiens
gcacagaagaaacaacagagagccaccagaacgagaggaccaaaacagggaaggaagaaccaggagggaa

SEQ ID NO: 214821 - RNA, 71 nt, Homo sapiens
acgaacgccgcgggaagaagggccagaaaaaagaggaacaaaagaagacaccagaagaagccacagagcac

SEQ ID NO: 214822 - RNA, 81 nt, Homo sapiens
aggaggacggcgcaaccgcgcccgccggcccccccccgcgcccgcgaccgccgcggcgaagagcccgcccaaaagcgcaac

SEQ ID NO: 214823 - RNA, 77 nt, Homo sapiens
cgccaccgggaccgacgggcacgggggagagaacgagagcccagacagagaaagcagacacgaacaagccgagcgac

SEQ ID NO: 214824 - RNA, 60 nt, Homo sapiens
cccgagcggggggacgcgccaggcacagcagcaggcagaggggcaggacaagacccgaag

SEQ ID NO: 214825 - RNA, 69 nt, Homo sapiens
gcgggccagcgacaaaaagaggggaagcagacagccagaaggccacaccgaacccagagagccagggaa

SEQ ID NO: 214826 - RNA, 78 nt, Homo sapiens
aaagcgaagaaccgcaagcccacgaaagaaagccacgaggacggaaggccacacaaaagaacacgaaagacaccagcc

SEQ ID NO: 214827 - RNA, 84 nt, Homo sapiens
cacgcggcgaaggaagaggagggcaagaagggcaagaaggacccaaagacaggaccacgcaccagcagagaaggaaagcaaacc

SEQ ID NO: 214828 - RNA, 85 nt, Homo sapiens
cggcgggggccccagcgccagagccggggccaaccacccgcccagcccgggcacgccccgccgacagggaaaaggaagagaagcc

SEQ ID NO: 214829 - RNA, 78 nt, Homo sapiens
gcaaacccaaagaccccgccggagacgagagcacccaagaccgaagaaggagaaccagcccaagcgcgcacacccgga

SEQ ID NO: 214830 - RNA, 80 nt, Homo sapiens
ccgaaaccccggacgggggcgcacgagaccccgagccggagcggaaaaacccggacccaacagaggaagccgcaagaaac

SEQ ID NO: 214831 - RNA, 88 nt, Homo sapiens
ggcggggcgcccggcgccaggggagccgccacagcggcaggagaaggcggaggggccgaggggaccaagcggagagaccaaagagagg

SEQ ID NO: 214832 - RNA, 53 nt, Homo sapiens
acaggacgaaaaaagggcaagaagccagaagggacgcaacccaccacgaagcg

SEQ ID NO: 214833 - RNA, 77 nt, Homo sapiens
gcccgccccccgagcgacggaccgggaacaccgaggacagcccagagcaagcacacggaggcccgggagccagaccg

SEQ ID NO: 214834 - RNA, 72 nt, Homo sapiens
gggaagaagcgaaaaggagcacgccaggcgaccacgagcccccaggccgagagaccggcagacagagagggc

SEQ ID NO: 214835 - RNA, 57 nt, Homo sapiens
cggccgcccaacaccgaacaccgcggcgcccagcggccacacgccccaagcgccacg

SEQ ID NO: 214836 - RNA, 53 nt, Homo sapiens
acacagaagggaggcgagcaaaggcagcagggacagagcccagaaaccagaga

SEQ ID NO: 214837 - RNA, 76 nt, Homo sapiens
cgagccgccacccggcagacgccggcccaccagccagcggggagccgcccaccccacaagggaggacccagacgag

SEQ ID NO: 214838 - RNA, 81 nt, Homo sapiens
ggacgggcggaggcggggggaccggcgggcgggaaaccccccaggcaagaggcgcaggaccgggaagaccaacaaacgcac

SEQ ID NO: 214839 - RNA, 60 nt, Homo sapiens
gaaacacagccagacacggccgaagggcaagagggcacagaagacggcgccccacacacg

SEQ ID NO: 214840 - RNA, 76 nt, Homo sapiens
gaagacagagcggaaacaagcagacccagcgcaggagacgggcacaccgacaaagccaagaccaagaccccaggag

SEQ ID NO: 214841 - RNA, 79 nt, Homo sapiens
acgagaaggggccagagggaccacccggagaacagccccccagggagaggacagcagaaacagagcccacccagaggaa

SEQ ID NO: 214842 - RNA, 74 nt, Homo sapiens
acgggccgagagccgcccgggccagcggccgcgcacccccggccggaggcaccagcagcggaccgccgcaccga

SEQ ID NO: 214843 - RNA, 80 nt, Homo sapiens
cccagccccaccagaccccggccgccgaccgcggccccgccggccgccggccgcgcggggggaggagagaccagcagcaa

SEQ ID NO: 214844 - RNA, 76 nt, Homo sapiens
acgaggagcgcggccaccccccggagggcagaaagcggaagcgaaggagaggaggcgcaaaccagagagcacgaaa

SEQ ID NO: 214845 - RNA, 73 nt, Homo sapiens
gaggacaccggcaagggacagcagggagaccacgagcaaggcaaaacccgaggggccgggcccggaagcagga

SEQ ID NO: 214846 - RNA, 57 nt, Homo sapiens
cgcaagggcaagggcccgggcgcagcgaggaggggaagccccccgcaggaccaggga

SEQ ID NO: 214847 - RNA, 83 nt, Homo sapiens
gcagacgagagcgccagaggggaaaaaagcagaggccagggcgccgagcagagagggccaccacccgaaggaagcaccaggag

SEQ ID NO: 214848 - RNA, 80 nt, Homo sapiens
aggcggcggcgccgccgcgccacccgcccggcccccgccggcggcagcacggccaaggcggaggacccacaggagaggca

SEQ ID NO: 214849 - RNA, 73 nt, Homo sapiens
ccgaggccccaccacccaggacaccagggcgagccaggagcggcagcccacccaaagagaagagaagggcgcc

SEQ ID NO: 214850 - RNA, 72 nt, Homo sapiens
cagagaaggcagaaccagcgagcacgacaccggaacaagcccgcacacgggggaccacagacagcacgccca

SEQ ID NO: 214851 - RNA, 79 nt, Homo sapiens
gaaggcggaggcccaggcccccagcgagggcagcagcgcccaagaggagcagggcacaaaggagccagaggaggcgaag

SEQ ID NO: 214852 - RNA, 64 nt, Homo sapiens
gacaacgagggagaagcacaagacagcacagagcgcagaaccggccgaaaagcacaaacagcaa

SEQ ID NO: 214853 - RNA, 82 nt, Homo sapiens
ggaagagggccgggggcgcggccgcgcgccgccggcgaaggaggaggcggccgggcagggcaagaacccgccacacaaggcg

SEQ ID NO: 214854 - RNA, 75 nt, Homo sapiens
ggagaggaccaggaggaggaggcagagagagggaagggcaggagaaaaaaaggcaaaagaagaggcggaaccagg

SEQ ID NO: 214855 - RNA, 73 nt, Homo sapiens
agcggggaacgccgcaccacgaaccagaccaagcgggggccccacacaggacgagaaggagccccgagaccgg

SEQ ID NO: 214856 - RNA, 77 nt, Homo sapiens
agaggggaccaagggagaggagaaagacagcaaagaaaaggagaagaaaggaaaaaaacaaccccgggcaccccgcc

SEQ ID NO: 214857 - RNA, 62 nt, Homo sapiens
gaggagcggagcccgcagaaccccacagcaagaggacggcgaaagggcgggggcgccgagga

SEQ ID NO: 214858 - RNA, 55 nt, Homo sapiens
cccgcgcggcgcggggaccgcggcccggcccagcaggcgcagcagcaagagggaa

SEQ ID NO: 214859 - RNA, 74 nt, Homo sapiens
cggaggcgcccggcggagcagaggaaccacacgcgacagcgcaacaggagacgaacccagaccagcaaaacgga

SEQ ID NO: 214860 - RNA, 81 nt, Homo sapiens
ggaaaagcgccgggcggaccagcagagccagccccaggccgcgagccggacaacacaccacaagaaccgcagcacagacac

SEQ ID NO: 214861 - RNA, 87 nt, Homo sapiens
agggaagggcgggacaccaccggaacacagggggggacagacagggcaccgcaggcacggggaggagagagaaagaaaaagccagag

SEQ ID NO: 214862 - RNA, 52 nt, Homo sapiens
gaggggcagccacccccgagaggaaaacccaagacaaggaagggcaaagccc

SEQ ID NO: 214863 - RNA, 70 nt, Homo sapiens
cacaccgcagcaaggggcacggaaaaaccgcgagcccgggggccagcacaggaggaaagcacggcacgcc

SEQ ID NO: 214864 - RNA, 75 nt, Homo sapiens
ccccacgggggccccaacgcccacaacaaggcggcggggacggcccgggccggccacgacgcacggcgggcaagc

SEQ ID NO: 214865 - RNA, 92 nt, Homo sapiens
cgaaggcgaggggcagcggcaggagagccggccgcgacaggacgcccgggcgcgccaggcacagccaagagcggaccggcagcggccagcgc

SEQ ID NO: 214866 - RNA, 58 nt, Homo sapiens
gacggcacacgcagcagaagcccggaacaacggcaagcggagaagagcaaggccgaac

SEQ ID NO: 214867 - RNA, 81 nt, Homo sapiens
gagagggaggccacgggaagaggaggaacccaggggccaccaaaaaggacggcccccaagacagaacaccgcagaccacac

SEQ ID NO: 214868 - RNA, 75 nt, Homo sapiens
accacagagaggagcaggaaacacaagaaccggcacaaggaaaacccccgagacaaacacagacccaaggaacga

SEQ ID NO: 214869 - RNA, 79 nt, Homo sapiens
aagcacaagcacaaacagagccgacccaggaccgccccccaggaacaagggggcgcaacagcccaggcagcacggcagc

SEQ ID NO: 214870 - RNA, 79 nt, Homo sapiens
ggccggcccccaccagagaccgaggacacgagcccagccaggcgagccagcgccaaagaaaaagaacaagaggagccac

SEQ ID NO: 214871 - RNA, 66 nt, Homo sapiens
gagacacgccggagacacgccggggaaagagcgcggaacccacaagacaaggacaagaggcggcca

SEQ ID NO: 214872 - RNA, 72 nt, Homo sapiens
aaaaggaaaacagaagggcgcaggaaacccccaaagagaaagaagaagaaaacgagacccaaaagggagaaa

SEQ ID NO: 214873 - RNA, 78 nt, Homo sapiens
gcaggagcagccaaccagcagcagccacaggaggaaacccacccaccacccgagaggaaacgcaaccaagacaagaac

SEQ ID NO: 214874 - RNA, 52 nt, Homo sapiens
gcccggcaaacacggaaccaccgagaagacagacgcgcggaccgggaagagg

SEQ ID NO: 214875 - RNA, 76 nt, Homo sapiens
gggcgcgagggcagaaccggggggccgagacaacaagaaggggaggaacaaaagcgcaaaccggagccagaaacaa

SEQ ID NO: 214876 - RNA, 75 nt, Homo sapiens
accaaagaccgacaagacccgccaggcccaaaaggaagaaggaagagagaacacaccgaaaaacgcacccgcgca

SEQ ID NO: 214877 - RNA, 79 nt, Homo sapiens
accggcggggggagccgccgccggagggcagggcccagcgcccaaccccgccggacagcacagcacacgacacccccgg

SEQ ID NO: 214878 - RNA, 84 nt, Homo sapiens
ccgcagccccacagcgaggggcgcggcagacggaggaccagagggaacaagaccccacagacgcggggaggaggaggaggaagg

SEQ ID NO: 214879 - RNA, 82 nt, Homo sapiens
ggagcagagccgccaggcagaaggccccccgaacagcaggcgccaccagcccggaggcgcgcccaagccccacgacacccaa

SEQ ID NO: 214880 - RNA, 81 nt, Homo sapiens
ccgcggcgcggggggcggaggcgccaggggcgaggcagcggcacccgagcgcccaggaacaggacacccaaccgcgagacc

SEQ ID NO: 214881 - RNA, 77 nt, Homo sapiens
ggccagcgggacaggagggcaggaagagcgcagcggggacaagcagcaagcagagcccggacaggcccgccaccggg

SEQ ID NO: 214882 - RNA, 76 nt, Homo sapiens
cccccgcaccgggcgcagcgcagcgcccccgaaagagcggaacagcgccgagaaacaagacccgccagaacccccg

SEQ ID NO: 214883 - RNA, 81 nt, Homo sapiens
ccagaagcagcgagggcccaccaagcccagacgacgcgcggccagggccaggggacgccaggggaccgcggaccggaccca

SEQ ID NO: 214884 - RNA, 83 nt, Homo sapiens
ggagacgggcgccgggcagcggagcacaagaaacagaagaacacggccagaaaggaggggcagacgcagcaagcacgcaagac

SEQ ID NO: 214885 - RNA, 99 nt, Homo sapiens
cgacacaagcccacgcgcccgcagcaagacgggacggccccgagccccggccccaaagacccaaaacagagacaccccccagcccccgcgccccgaaaa

SEQ ID NO: 214886 - RNA, 78 nt, Homo sapiens
caaaagcaagaaacacaacgaaaggaaaagggagcaacagcgagcaacaggcaacgaaaacagacaaaacaacggaaa

SEQ ID NO: 214887 - RNA, 76 nt, Homo sapiens
agacgaggcaaagcacccagcccaccccgacaaagcggccagaagaaaagagaggggcccccgggaacaaaggaag

SEQ ID NO: 214888 - RNA, 86 nt, Homo sapiens
gcccgagcgcagaccccacggcgacaccgccaagaagcccacacgagacaaagcaggaggacacaagaagggaggaaaggcggacc

SEQ ID NO: 214889 - RNA, 73 nt, Homo sapiens
cagaggcacaacggaccgccccaaagaggacgaagacgaccgaagcagaacgagggcaaccgagcagggaggg

SEQ ID NO: 214890 - RNA, 60 nt, Homo sapiens
cgggagagagcaggccggaccccagcaaaccagccggcgggcgccacaacggacgacgaa

SEQ ID NO: 214891 - RNA, 74 nt, Homo sapiens
aaggaccaagaaccaggcacaaccggagcaggaaaacccacacacaggaggacagacaaagccacagccgaaag

SEQ ID NO: 214892 - RNA, 82 nt, Homo sapiens
gaaacccagagaaaaagaaagccaccacccgggccagacccagagcccaccacaggccaaggaagcacgggaagaacagaaa

SEQ ID NO: 214893 - RNA, 71 nt, Homo sapiens
ccgaccgaaccgaaccgaggcaaaagaaaggggcaaaggagcagagaacgacaagccacacgaggacagcc

SEQ ID NO: 214894 - RNA, 57 nt, Homo sapiens
acacggagagccaaagggacacggccaccgagacgacagggcgaacaagccaacagg

SEQ ID NO: 214895 - RNA, 82 nt, Homo sapiens
aagaagggaaggcacgaaaagcacggagaggcaccgcgggcaacaggcccacaggaacgaggcccagcaaaaagcagagacg

SEQ ID NO: 214896 - RNA, 80 nt, Homo sapiens
ccgaaaacagggccggccgcagagcccaccggaaggagaaggaagaggagcgagcgggcaccccaaaagaaggggccaga

SEQ ID NO: 214897 - RNA, 84 nt, Homo sapiens
caaaaggaaagccgaaaaagaaccaaaacccaacagaccccaagaagaagcggaagaggagccgcggaaccaagacacaaggaa

SEQ ID NO: 214898 - RNA, 82 nt, Homo sapiens
gcccccaccccccacgccccaccacaacaaacgaggaaccagcacaagacaagcagagaccaacagaccagcaacaggccgg

SEQ ID NO: 214899 - RNA, 30 nt, Homo sapiens
gcagggcgcccccgggccccacggcccagg

SEQ ID NO: 214900 - RNA, 59 nt, Homo sapiens
gggaacggcgccggaggaccagacccaggaggcggaggcacccaccacgggccaggcgg

SEQ ID NO: 214901 - RNA, 75 nt, Homo sapiens
accgaaagcaagaagcaggcgcagacacccaaaacagcagcacaccggaagacgccacaggcacacggacaccca

SEQ ID NO: 214902 - RNA, 85 nt, Homo sapiens
cgcacgagcaacagacgagcgcgccaggccgacagccgcggccgggcccgaggccccgcgagcggccaccgcccaccaacagcgg

SEQ ID NO: 214903 - RNA, 75 nt, Homo sapiens
caggcacacacagaacaaaagcaggggccgggcaaagggagagacagaggagccaaaacaggaggggaaaacgca

SEQ ID NO: 214904 - RNA, 73 nt, Homo sapiens
cggaccagcggagcggccgaggggaaagaaccagacgacaggaaggcacagaacgaagccgcagaagccaaac

SEQ ID NO: 214905 - RNA, 62 nt, Homo sapiens
gagccaaaggcaagacagaagggccccagaaacagggagaaaacaacagccaagggcaaaga

SEQ ID NO: 214906 - RNA, 73 nt, Homo sapiens
cgccgccgcaggcacgaagaagcaaacacccaacgagccgagaaaaagcggaccgggcacgccaagcccaggc

SEQ ID NO: 214907 - RNA, 81 nt, Homo sapiens
gagggcacggaggaagcacacccgccagggacgcggcacgggaaggaagagaggagggagcaccggacaaaagagagacca

SEQ ID NO: 214908 - RNA, 83 nt, Homo sapiens
gcgaccaacgacgaagagcagagcagagacggcaagcaggaaacggaggacggggaaaaaggaccacaagccacgaagaagag

SEQ ID NO: 214909 - RNA, 59 nt, Homo sapiens
aggaggcccaccgccacggaaccagcagggggggggagaggccagaggaacaagggaag

SEQ ID NO: 214910 - RNA, 73 nt, Homo sapiens
caagagggcgaaacaggccgacgcaaacggggggacccgcgaaggccacagcgcaccagggcgccggcggccc

SEQ ID NO: 214911 - RNA, 76 nt, Homo sapiens
aggagcaccacaggggcgaagcaaagccaccacagacagcccgaacaaggcacagacgggacgccacaccaagcca

SEQ ID NO: 214912 - RNA, 50 nt, Homo sapiens
agcgaagaaacggaagggcgcggcggcccggacacagcaggggccagaca

SEQ ID NO: 214913 - RNA, 70 nt, Homo sapiens
aacggcggggggacgccacacagcacaacacaacacgccccgaaggacagcagaccacagcccggcaggc

SEQ ID NO: 214914 - RNA, 80 nt, Homo sapiens
aggacacagcagaagaaggcgcagaaagagagagcacaggaaaacggagagcgaagagggagcacacgagacgaacacac

SEQ ID NO: 214915 - RNA, 81 nt, Homo sapiens
cggcgggagaagaagagcgcgagaggacgggacaggcagaagaggccaaggaggaaaagggaaaggcaaaaaagcaaaagc

SEQ ID NO: 214916 - RNA, 65 nt, Homo sapiens
gaggccaggacggagagggagaagggccacaaagcccagacaagcgcagaagcaacagaacccga

SEQ ID NO: 214917 - RNA, 59 nt, Homo sapiens
ggggcagcacaccagagaagagaaaaccagccggaaaaacaagaggggaaccagcccgg

SEQ ID NO: 214918 - RNA, 81 nt, Homo sapiens
gaagcgcaggcgcgccggccgcgaacccggacccaagaagggcgcacagggacgaagaaccaccaaacggaaacacagacg

SEQ ID NO: 214919 - RNA, 68 nt, Homo sapiens
ccgacgccaggcagcgcccccaaacgaacagagagaagggcgggagaaaccaaggaaagagaaaagcg

SEQ ID NO: 214920 - RNA, 79 nt, Homo sapiens
agaaacacaggaccccccccaacgaggggggacacagcgagccacgcgccaggaagcccggccaaggagccaaccgcgc

SEQ ID NO: 214921 - RNA, 75 nt, Homo sapiens
cacaagagaaagaaggaagcggcgccgaaaaaaaggaaacggaggcgggggcagcccgcccgcaggaacggagcg

SEQ ID NO: 214922 - RNA, 76 nt, Homo sapiens
ccagaccagcgcggcagaacgccaaggcccaaggggaagaacccaagacacacacagcggagcaacaaggagggaa

SEQ ID NO: 214923 - RNA, 77 nt, Homo sapiens
aacacgacaggggcgcgccggcagggggcaagagcgcccaacaccagaaggcgaaggacccagagaacgcgcgccgg

SEQ ID NO: 214924 - RNA, 81 nt, Homo sapiens
ccacaccagcaaagggacaaaggcaagcgacacacagggagacaaacccaaggaaccacggaaggagggggcgacacacaa

SEQ ID NO: 214925 - RNA, 52 nt, Homo sapiens
gcgagaaacccacccgcacgggaacaacgcaaaggagcaccgaagacgagca

SEQ ID NO: 214926 - RNA, 73 nt, Homo sapiens
agagcaccgggagcggcgaagaggcaccggaggagcacaggcagaacaggagggaaaacgacggaacgagaag

SEQ ID NO: 214927 - RNA, 60 nt, Homo sapiens
cgccgacccgcgcccgccccccagcaccgggcggacggaaacagcagaagaaagaagcga

SEQ ID NO: 214928 - RNA, 80 nt, Homo sapiens
ggaacgcccccagcccccagcacaacggcacaaccagggcacaaggaaaggagaggaaaccacccagaaggaagggccac

SEQ ID NO: 214929 - RNA, 58 nt, Homo sapiens
ggacaggccgcgcagccacccacaggaggggggaggaagaagggaagcgaagaagccc

SEQ ID NO: 214930 - RNA, 73 nt, Homo sapiens
gacagaaagaaaggccaaagcagcaggggaagagcgagcaaaggaaaacacagaacagagacaaagaagcaga

SEQ ID NO: 214931 - RNA, 73 nt, Homo sapiens
ccccagcccccgcgcccgcagcgccaggcggcggcgcccaggaagaaggccccagacgaaggagcggacggaa

SEQ ID NO: 214932 - RNA, 87 nt, Homo sapiens
cgcaaggaggggacacagcgaccacgacggagaagcagggccaagggaacccagagaaggaaggaaaacccgccaccaccccaggaa

SEQ ID NO: 214933 - RNA, 75 nt, Homo sapiens
acaaaaggacgaaacccacggcgacaggggacaggcaaaggagaaacaagaccccagggacgacaccccccagag

SEQ ID NO: 214934 - RNA, 60 nt, Homo sapiens
cgaggcaccaagcagaagagaagaacggacgccgccagccaccggcgcgaagccagacca

SEQ ID NO: 214935 - RNA, 67 nt, Homo sapiens
ccaccacaccacgggcggccccagaagccggcccagaaagggggccaccccagcgcaccccgcaacc

SEQ ID NO: 214936 - RNA, 85 nt, Homo sapiens
caccccgggcgggcggcggcgcgcccaaagcggcgcgacccagagcacggagcaacagcccggaacgacccccgcggcggagccc

SEQ ID NO: 214937 - RNA, 63 nt, Homo sapiens
agccggcccagaccaggaccgcagcgaggaggcccccgggaggcggcgaaggcggccacccgc

SEQ ID NO: 214938 - RNA, 77 nt, Homo sapiens
aggaggcgaggagcccaagacaagaacggcagcagaaaagaccacaacaaccagagacggacaaagccgcaacacga

SEQ ID NO: 214939 - RNA, 79 nt, Homo sapiens
gaagcaccacagccaccacaccaagacaccaggggagaccaagaagcacagacgagaaacaaggcaagaaggcagccga

SEQ ID NO: 214940 - RNA, 42 nt, Homo sapiens
cccacccgcgccgcgacccggcacacggaagcaggcgaacac

SEQ ID NO: 214941 - RNA, 85 nt, Homo sapiens
cgaccgcgcgcgggggaacagcggagggcaaggcgggaacacggaggcggaaccaacccccggccagggaggggccgggggacga

SEQ ID NO: 214942 - RNA, 63 nt, Homo sapiens
cagaacgccccacgaggcggcgccgcgaaagacaccagagaagccagagacaagcaggggcac

SEQ ID NO: 214943 - RNA, 84 nt, Homo sapiens
ccggcgcgccgccaccaccggccgcgggcgggaggcccggggccccgggcgaacagaggcgcggccaagacccggccacaaggc

SEQ ID NO: 214944 - RNA, 70 nt, Homo sapiens
caggaggcccacgaagcaccacaagaagccaaaccgacaaaaagagaccgacacagaagcaggagacaaa

SEQ ID NO: 214945 - RNA, 96 nt, Homo sapiens
agacaaacaaaagagaaggcaacaaggcacacaagcggggaggaccccagaccacgcgccacgcagagccccgccaggaagacacgccggggaacg

SEQ ID NO: 214946 - RNA, 56 nt, Homo sapiens
ccaaagaagggagagagagaggcaagaagcaaagagccaaccgcaaggggagagcc

SEQ ID NO: 214947 - RNA, 67 nt, Homo sapiens
acccggaagaaaccgccacagaggccaggaagaagaaaagcaaccagacccgaggagcggggagaga

SEQ ID NO: 214948 - RNA, 58 nt, Homo sapiens
gccaggaaggcacacggcacagaccccacagaagggcagaaacgaagcacaggaacaa

SEQ ID NO: 214949 - RNA, 61 nt, Homo sapiens
accgcgcgaagacggaagacgcgcccgcgccggggaaagccggcaaaaagacccaaaaagg

SEQ ID NO: 214950 - RNA, 85 nt, Homo sapiens
gaaacagcccaaaaccgccgcgcgcgaccaaaggccacagacccccgccccggagaaggaggagcaggccgaccaggccggaagg

SEQ ID NO: 214951 - RNA, 62 nt, Homo sapiens
ccaaggaaaaacagcaagaacccaaaagggcagaaccaggcccaggccagagcccgggcagc

SEQ ID NO: 214952 - RNA, 109 nt, Homo sapiens
gagaaaaaggacaaaagccaagaggaggacagcgcacacagcaagcacgaggagcaggcccagaaagaacagacaaagaccgaaaaacacgaggaaagcagacccacgg

SEQ ID NO: 214953 - RNA, 72 nt, Homo sapiens
cgacgcgcggagcgagagggaccggccccagagacaccggcacacgacccagcacgggggggcagccagagc

SEQ ID NO: 214954 - RNA, 73 nt, Homo sapiens
gaggccaggagaagccccggagagaggccgaaccaaggccagggacaagaggagagggaaaccgaagcgcgcg

SEQ ID NO: 214955 - RNA, 65 nt, Homo sapiens
aagaagaaacaagcacccgccgggccgaaccggaagggcaagggacaacccgccacaacgacaaa

SEQ ID NO: 214956 - RNA, 77 nt, Homo sapiens
caagagcggagaacccacccacggccggggccccgaaggcggcggacagcgagcgaaacgggacggcggagggccag

SEQ ID NO: 214957 - RNA, 87 nt, Homo sapiens
gccaggacgacgaggaggagacgaccggccggaaaaccgcaagaccacagcaggccaagacaaggggcgcagagcggggggacaggc

SEQ ID NO: 214958 - RNA, 85 nt, Homo sapiens
ccgccccgcgagcacagagcccgccgccgaccgccgcccgccacacccgccgccagagaggggagaagagcgagacgagaaagaa

SEQ ID NO: 214959 - RNA, 67 nt, Homo sapiens
agccccggcccaggacccccaaaaagggcccccaaggaagacagcacgagggaacagaccggaaaac

SEQ ID NO: 214960 - RNA, 79 nt, Homo sapiens
cgagcgagggccaagaggagcagagcacaacaaggcagaaaagcaaccaagaacgacacgaacccaggcagaacgccca

SEQ ID NO: 214961 - RNA, 54 nt, Homo sapiens
cgcccgacccgccaccgccaggccaggcaagaaaaggagaagaaagaagaaaaa

SEQ ID NO: 214962 - RNA, 58 nt, Homo sapiens
gagaccgcagagacagccaacacggcacccacaggcagcagggagaccagaccaggac

SEQ ID NO: 214963 - RNA, 84 nt, Homo sapiens
caagaaaccgaagccaaggaggagaggaggagagcacagacgccaaaaaaaagagggagcacaggggacgaccaaggccagcac

SEQ ID NO: 214964 - RNA, 82 nt, Homo sapiens
aagagcaacagcagggcaacagacccaaaaccaggaggagggacacaggcccacagagacgcaaccagagcacgaggcaccc

SEQ ID NO: 214965 - RNA, 56 nt, Homo sapiens
caggacgggcggaggcggggggaccggcgggcgggaggacccccgcggaaaggcaa

SEQ ID NO: 214966 - RNA, 76 nt, Homo sapiens
ggagcaccgacaccccgcagcggccccgccccgacgggcacaacccaagcgcggagccagcgcccggcaaggagcg

SEQ ID NO: 214967 - RNA, 81 nt, Homo sapiens
ccaaggagggaaaggcaaaaccacacacacagggcgagagccggacgcccacaaaggggaacggaacaacaacgagaaaga

SEQ ID NO: 214968 - RNA, 39 nt, Homo sapiens
gacccgggccaaaaggcagggagaagagcagaggaggcc

SEQ ID NO: 214969 - RNA, 78 nt, Homo sapiens
cggccccgagcgcgcgggagcagaggcgagaggcccgggggccaagccgaccacaaagacccccggcgaaagaagcaa

SEQ ID NO: 214970 - RNA, 40 nt, Homo sapiens
acaggaacaaagagagagaaggggaaggcagagaccgcag

SEQ ID NO: 214971 - RNA, 75 nt, Homo sapiens
agaagcgggccgcagccggccgcagcgagagcgaggaggaggaaccaccacccaccgaagggggacgaagaccca

SEQ ID NO: 214972 - RNA, 60 nt, Homo sapiens
ccccgacagcccgggccgagaagggaaagggagcagcaccggccacacccacagcacgac

SEQ ID NO: 214973 - RNA, 91 nt, Homo sapiens
gcacacgaccggcgacagcagccaggagcagagcgacagcggcgagcagaacacggcgagcggcggagaagcggaggagaccaaggaggcc

SEQ ID NO: 214974 - RNA, 76 nt, Homo sapiens
gcggcacgggcggccggccgcacaaggccccgggcggcaaaagcagaacaaaaccgaacaaaccaaggaaaacgag

SEQ ID NO: 214975 - RNA, 67 nt, Homo sapiens
accgcaggggccagaggacccaacccaggccagggaacaggagaaagacagcaaagaaaaggagaag

SEQ ID NO: 214976 - RNA, 71 nt, Homo sapiens
gcaggcgccccgcaccaccagcaacggcccgggcagaggagagagagcagagcaggacccacacgacacaa

SEQ ID NO: 214977 - RNA, 57 nt, Homo sapiens
ggcagcagagcaaaacagagcggaacgaacaagggggacagcccccggacccaccga

SEQ ID NO: 214978 - RNA, 71 nt, Homo sapiens
gggagaagacgacgggcggggggggcgaacgaagcagggacccgggcaggcagcacgaagggagaaggaga

SEQ ID NO: 214979 - RNA, 75 nt, Homo sapiens
gccggaaaaacgaacagacgcacaccacgcagcagaccggaagccacaaagagggcgacaccgcaagccggacgg

SEQ ID NO: 214980 - RNA, 80 nt, Homo sapiens
aggggaaaacccgaggagacgcaagacccaaacaaaaagacacgaagaggaggaagcccaggacgacccaagaaagaagc

SEQ ID NO: 214981 - RNA, 39 nt, Homo sapiens
ggcaggcgccaccacagacgagcccgacaaggccaccac

SEQ ID NO: 214982 - RNA, 73 nt, Homo sapiens
aaccaaacacaaaagcagcgcaggggggggcagcaaagcggccaagagaagaccccccaggagagcgcagaaa

SEQ ID NO: 214983 - RNA, 56 nt, Homo sapiens
aggagagacagcacaagaaaaggaacagcgagaacagaccaccaaaccaccgcgaa

SEQ ID NO: 214984 - RNA, 77 nt, Homo sapiens
aacaaaggagagaaaggaacggcagaagcaaaagcagccaacacaacgaagaggcacagcagagaaggaaggccaag

SEQ ID NO: 214985 - RNA, 78 nt, Homo sapiens
agaggaaggagaccgaggccccaccacccaggacaccagggcgagccaggagcggcagcccagacgccccacaaccgc

SEQ ID NO: 214986 - RNA, 82 nt, Homo sapiens
cagggcagggaaaagcgccgggcggaccagcagacaagcagaccggaagaccgacggaagaccacaccccgagggagcccag

SEQ ID NO: 214987 - RNA, 80 nt, Homo sapiens
aggcggacgcgcgggagggccgccgcaacccagcagagagcagggggccaaacgaaagcagaaggccagaacgaggcagc

SEQ ID NO: 214988 - RNA, 64 nt, Homo sapiens
ggccccaccggcagcggggcacacaagaggccacagaccccaccagcacgaagggacacggggg

SEQ ID NO: 214989 - RNA, 53 nt, Homo sapiens
gaagacgcccgggccaccaagcaagaaccggcgggacaaagaagcccccggag

SEQ ID NO: 214990 - RNA, 89 nt, Homo sapiens
agaccaagcaccagagaagaggaggaagaaggcgagaagcacagaaagcaggagcccggaaaggagaaggaaaagacggcaggaggaag

SEQ ID NO: 214991 - RNA, 80 nt, Homo sapiens
caagaagaagccgcggaccccacggagggaaaagaagaccgaagggaacacacacaaaaaagacagaaaggaagccgagg

SEQ ID NO: 214992 - RNA, 72 nt, Homo sapiens
gccagggcacggccgggacgcgcagcaacgcgcgagccaggcgcacaaggagcaccagcagaaaggcccaca

SEQ ID NO: 214993 - RNA, 37 nt, Homo sapiens
ccgccccccgaaccgccggacaaaaggaagagccgac

SEQ ID NO: 214994 - RNA, 88 nt, Homo sapiens
cgaagaaggacggcgacccgccgaagcaccgcgggcgcgcgggccagggagcggagagcagagaggcagagcaagacgccggacaccc

SEQ ID NO: 214995 - RNA, 82 nt, Homo sapiens
ggggcagaagaccgagccggccggagcacgccaggccgaggggccagacccacgagaagcgccgaacaaggcaacggaaaag

SEQ ID NO: 214996 - RNA, 50 nt, Homo sapiens
ccggggcgcacgccacccgggcaaccggacacagcaggggccagacaacc

SEQ ID NO: 214997 - RNA, 41 nt, Homo sapiens
ccaaaaggagcgacaaacaagaagccagcgagaagaccgag

SEQ ID NO: 214998 - RNA, 83 nt, Homo sapiens
aaagcaaaggaagagaaagcacagaacggcacacgggggagcggccacagcgccgccgcggaccacgaaaggcagggagaaaa

SEQ ID NO: 214999 - RNA, 78 nt, Homo sapiens
agaaggaccggaaaagcaaaggagaaacgaggaggaagagaaggaccgaacacagaagaaggaacgcagagaaaccaa

SEQ ID NO: 215000 - RNA, 74 nt, Homo sapiens
aaaacagcaaccacaaaaacgacaagaagaagaacccacaaaccggagacagaacaccaaagaaaccgccaccc

SEQ ID NO: 215001 - RNA, 75 nt, Homo sapiens
aaaaaggccgacagaagagacaaccaaacccaaggcgagagcacagacaaaacaacaaccagaaaaaacaaggga

SEQ ID NO: 215002 - RNA, 79 nt, Homo sapiens
caggacaagccgcgcggggacccgacgcccgcacggaaaaaaaggaacggaaccgaacagaagaaagagaagaccccaa

SEQ ID NO: 215003 - RNA, 86 nt, Homo sapiens
gccccccgccagaagccgaggaaagcggaagcggccggcaggggaaggacgagccccgacaagggaccgggcgggccccgcaggaa

SEQ ID NO: 215004 - RNA, 61 nt, Homo sapiens
gacgcagcaaaccaccagaagccagaacaacaggcagcggcaaggagagagcggcacgggg

SEQ ID NO: 215005 - RNA, 77 nt, Homo sapiens
ggaccaggacagcgcgaggcgagggcagagccgcggggcaagaccaacccaggacgcagacgaccaagaagacggag

SEQ ID NO: 215006 - RNA, 55 nt, Homo sapiens
cgcgagagacagccgcccagcagaacagaaaagacacgcgagacagaaagagacg

SEQ ID NO: 215007 - RNA, 81 nt, Homo sapiens
gacccagcgccggcccccaggcgaagaagcgcagccgcaccggccaagggaggggcggcaggaccaagaggggccaagccg

SEQ ID NO: 215008 - RNA, 79 nt, Homo sapiens
gccgcgcccccgccgcgccggcgcccgcccgccaaggccacagcccacaccagaagcaaaagcaccaagagcgagaagc

SEQ ID NO: 215009 - RNA, 51 nt, Homo sapiens
cgaccccacggacggcagccaggcgagcgaggggccgaaccaaggccaggg

SEQ ID NO: 215010 - RNA, 77 nt, Homo sapiens
cgcccaagccgcacagccgcggcggcagcagcaggagagggaggcaccgccccaacccccccccgcccggagaaccc

SEQ ID NO: 215011 - RNA, 84 nt, Homo sapiens
ggagccgggagccgccgaagcggcgacagcggccggggcgcaggcgcccggcggaaggcagcacggcagcacaccgcacgaggc

SEQ ID NO: 215012 - RNA, 91 nt, Homo sapiens
gacaggccaggcagaacaaacggaccagcgaccgggcaggacagggaggaaaaccagagagaaggagagccccgaagaagcagggggagga

SEQ ID NO: 215013 - RNA, 75 nt, Homo sapiens
ccacacgagggagcggccccagacagcaaggaaagagcgcccaagacagcccagcgcaaggcaccgggaaaacgc

SEQ ID NO: 215014 - RNA, 88 nt, Homo sapiens
gaggagcagggccccacccggccgcccgcccagcgccgcccccggagggcccacgcagcgccggacaaccaaaacagagggagacgag

SEQ ID NO: 215015 - RNA, 78 nt, Homo sapiens
cgggagcgcagcacgaggagacgaccggagggcaagggcagccaagaacaaccggacaagcagaagaaccaggacaag

SEQ ID NO: 215016 - RNA, 90 nt, Homo sapiens
ggcggaccccagcgccagaggacaggggcgaacgccgccgggagacccagccggcgggcgagcagggaccgaaggagaagaaggagaagg

SEQ ID NO: 215017 - RNA, 39 nt, Homo sapiens
gcccccaaaggcggaacaggcaggagacgagaccaccgg

SEQ ID NO: 215018 - RNA, 77 nt, Homo sapiens
ccggggggggacgccgcggccgagacagagcacccgacccaggcggaggacaagaggaccgggcaccacaaccccgc

SEQ ID NO: 215019 - RNA, 79 nt, Homo sapiens
gcggaaggcccacaccccacccagggcccggggagagggcgaagaacgaaacgaaagcgcgacaggacacccagcacag

SEQ ID NO: 215020 - RNA, 52 nt, Homo sapiens
cgcagcgccagcagcgcaggcacagcaccaccagaacagaagacagagacac

SEQ ID NO: 215021 - RNA, 84 nt, Homo sapiens
gcccagaggaggggaacaggccggcgaacacaaaggggaggcaggaaaaagacacaagacagcaggaccgggaccagcccgaag

SEQ ID NO: 215022 - RNA, 107 nt, Homo sapiens
cagaaggcgcaaacaacccggaccaagagcaaacgcacaaaaccaagggccgggagcagaccgcacggcgccgggccccacacaacaaggggaggagaagaagacgg

SEQ ID NO: 215023 - RNA, 81 nt, Homo sapiens
ggaggacaaagggagaaggcagagacgaaggaaccaccaaacgccacagaggcgcacaagacacccacagcaaggagaggg

SEQ ID NO: 215024 - RNA, 61 nt, Homo sapiens
ccgcagcaagacgggacggacagcccagagcaagcacacggaggcccgggagccagaccgg

SEQ ID NO: 215025 - RNA, 71 nt, Homo sapiens
cggcccgaccgcccacagacccaaacaaagaaacgaggaaagaaccaaggaagacacccgccgacacacca

SEQ ID NO: 215026 - RNA, 78 nt, Homo sapiens
gacaagaaagcaggaagcagagcaggagggaagaggagaaacaggaggagaagggccaccacgaagcgcaaagggcca

SEQ ID NO: 215027 - RNA, 66 nt, Homo sapiens
gacgacgccagaagcaaacaaaagcaagcggccgggaaaaaaagggccacagccgccaaggggcaa

SEQ ID NO: 215028 - RNA, 113 nt, Homo sapiens
cggaccagccagcggacccgaccaggagggagcggaaaacggggcccgggccggaaaagaggagggcagagcccgaccacgccagacaagaaaggacacagagaaaagccaga

SEQ ID NO: 215029 - RNA, 78 nt, Homo sapiens
aaaacgggaggacgcacccggggaaccagcaaacaaggagcacaggcggaggcagcggaggccccgccgcgccgcagc

SEQ ID NO: 215030 - RNA, 78 nt, Homo sapiens
ccgcaccgggccagcaagagcaccagaaacaagacccaaacgcacacaagaggaagcagaagcccagaagggacaggg

SEQ ID NO: 215031 - RNA, 65 nt, Homo sapiens
cccggagccgggaccggacccacaggggaagaacgcaggacacagaaaaacgggaccggaagaga

SEQ ID NO: 215032 - RNA, 76 nt, Homo sapiens
cgaaaacaaaaagcaggaaggaaagcaaagccagggagggaaccgaagccacgggcgggggacgcgaccccacacc

SEQ ID NO: 215033 - RNA, 84 nt, Homo sapiens
gaagggaagccacggaagaaagggacagcgggaagggaccacagcgagccaccaggccaaggcccagagcgccccaagaagggc

SEQ ID NO: 215034 - RNA, 72 nt, Homo sapiens
ggccggagaggggaaccagcagaaggaacaagcgggaaacggagccaccaacaagcgggagaaagacagcaa

SEQ ID NO: 215035 - RNA, 78 nt, Homo sapiens
aaagagggcacggaccgaacgaagcacagacgccaaagagcagggaccaaaagaagagaaggccggaaaaagaacccc

SEQ ID NO: 215036 - RNA, 68 nt, Homo sapiens
gaccaaaagaagaggcacaccaagcaaagcgggaaaaaagaggaaagcccccaaccagaggccccaca

SEQ ID NO: 215037 - RNA, 76 nt, Homo sapiens
ggaacgccgcccacccgcagcagaggagagcgggggcgggggagacaggacagccggcaccagcgaacagacccac

SEQ ID NO: 215038 - RNA, 121 nt, Homo sapiens
cccagggcgaggccgggccaaccgccggccccgcccacccggcccgggccccgaggcccgcccagcagacaccggagagcaaggggacccgcacacgcaacccgccccagggcaagggccc

SEQ ID NO: 215039 - RNA, 63 nt, Homo sapiens
gcggcgggcgcgcgccagaaaaagcggggaaaacaaaaaaaagaaggagggaagagggggcca

SEQ ID NO: 215040 - RNA, 83 nt, Homo sapiens
gcgggagcaacgggaggccggacccagcgagcgggcggcacgcacgcagggacgcaggaaacccggaaaggaagggaggcgca

SEQ ID NO: 215041 - RNA, 86 nt, Homo sapiens
agggaaaggagcgggacccggaccccaggaggagccagagaccaggagccccagagagcagagccccccacagaagagccccaaac

SEQ ID NO: 215042 - RNA, 68 nt, Homo sapiens
cagcccgcacggcggaggagaagcagagcaccggccagaacaagccaaggagccaagacgagagggac

SEQ ID NO: 215043 - RNA, 76 nt, Homo sapiens
gcaggaacggaccgcacgacgggacacgccagcaagacaaggccagagagggacaaggaaagcaaacaaacccaga

SEQ ID NO: 215044 - RNA, 46 nt, Homo sapiens
acacggacccagcaccagagacccgaagacccagaaaccaccgccg

SEQ ID NO: 215045 - RNA, 74 nt, Homo sapiens
ggagccggggaccccccaaagacaaggagccacaagaaagacgagaagcaacggaagagcagaaaacaggccag

SEQ ID NO: 215046 - RNA, 56 nt, Homo sapiens
aaccacgacgaagcggaaggcagaaggaaacaggaacacgaaagaggaaaaacgca

SEQ ID NO: 215047 - RNA, 66 nt, Homo sapiens
gcgaagccaaaaacacagaggcaagagaccaccccggaggcaagagcgcaagagcagacaagggcc

SEQ ID NO: 215048 - RNA, 75 nt, Homo sapiens
acagcagccaccagccgggaccgggcagcgcccccagggaccacacaccaccacggagcaggccccaaccaaaac

SEQ ID NO: 215049 - RNA, 67 nt, Homo sapiens
acagacaggaccacgcaagggccggaggacgcggggaaccagaccgggccagaccccacgggacaga

SEQ ID NO: 215050 - RNA, 58 nt, Homo sapiens
ggaggcggcgggaggaggcggcggccgcgcaagccccggggcagagacacaggacacc

SEQ ID NO: 215051 - RNA, 51 nt, Homo sapiens
ccccgaccgcggcggagcccgacccacccaagggccaggacggggggcccg

SEQ ID NO: 215052 - RNA, 77 nt, Homo sapiens
gagaaagggccaccccccagagagaccaggaagccccgggggcgccgagggcacaagggcaacgacagaagggcgaa

SEQ ID NO: 215053 - RNA, 79 nt, Homo sapiens
gacaaagaaaacccaacagaaaaacaacacggaggcagaggccacagcgcacgggacacggagaagagcggcagggcgg

SEQ ID NO: 215054 - RNA, 56 nt, Homo sapiens
ggagaagggcggcaagcaaaagcaggacaccagggcggaaagagagcgcagaaagg

SEQ ID NO: 215055 - RNA, 68 nt, Homo sapiens
gaccgcaacagaacggacccgcagaaacggggggggagggggacccggaagaggagaaacagaagacg

SEQ ID NO: 215056 - RNA, 80 nt, Homo sapiens
cggaggccccagggaagcgcagaaagcaggcgaacccgcggcgcaaaacgacaacgaagagaggaaagaagcggaaagga

SEQ ID NO: 215057 - RNA, 65 nt, Homo sapiens
cagaaacggcgcccgaagcgaacaggccaagacaaccgggaaagcagcccaaggagggcgacaca

SEQ ID NO: 215058 - RNA, 71 nt, Homo sapiens
gcccacccgaaaccacaaggccgaaccgggacggccgcgagggggcggccgaccggcgaggcccccaggcg

SEQ ID NO: 215059 - RNA, 71 nt, Homo sapiens
agaaggcgccagggaggccggaagcaaaagcagggccggaaccaccaggccaccgacaggcccaccagagg

SEQ ID NO: 215060 - RNA, 78 nt, Homo sapiens
ccggaaccgacaaaagacccaaccccacaagaggaagaaacggaccccagacaggaagccccaaagaaaccaagacag

SEQ ID NO: 215061 - RNA, 77 nt, Homo sapiens
gcacacagcacgggcgggggacgggcagaaaaacagagcggaccgcgaagagagacacgcaggaaagccccagccac

SEQ ID NO: 215062 - RNA, 75 nt, Homo sapiens
gggaccacacagccagaacagggacgccagccgcagaggaagacccgggcaggggaacaaaggacccagaaagac

SEQ ID NO: 215063 - RNA, 78 nt, Homo sapiens
cagaagaagcccgaggagcacggaggaagcacacccgccagggacgggcacgggaaggaagccaaaggcagagaagcg

SEQ ID NO: 215064 - RNA, 64 nt, Homo sapiens
ccaagcggacaccaacagcgaagaccaggcgggaaaaaggcagacaggagaaggaaagcaagac

SEQ ID NO: 215065 - RNA, 70 nt, Homo sapiens
aaaccggacagaaccaggcgggcagcgaaaaacccacagaggaacacaaaaaacaggcgacggggaaaca

SEQ ID NO: 215066 - RNA, 80 nt, Homo sapiens
ccaaggacacgaccaccagcaaacgccccaaagcggaccacaaaaacaaacagaccaccccaggaaaagagaaccgccga

SEQ ID NO: 215067 - RNA, 72 nt, Homo sapiens
ggcaagcagcccgacgccagcagagacgaggacgcccaaaacagacacagggccaaaaacccccccaagaag

SEQ ID NO: 215068 - RNA, 77 nt, Homo sapiens
gaaaaagcagccggagacaggcgagaggaagacgacgaggaagagcccgccgaagggagaccagcacgagccgggcg

SEQ ID NO: 215069 - RNA, 82 nt, Homo sapiens
ccgcgccgggaccaggccacgaccagggcccggcggggacgagcaggaagcgcggcgagcgcgcaagccccggggcagagac

SEQ ID NO: 215070 - RNA, 42 nt, Homo sapiens
aacagggaacccaagccggacccgagccccaaagacagaaaa

SEQ ID NO: 215071 - RNA, 79 nt, Homo sapiens
gaacgaaaaaaccagaacacgccaaggcccaggccccccgagcgcacgcacgcggagccagcagaccggggaacccaca

SEQ ID NO: 215072 - RNA, 50 nt, Homo sapiens
cagacgaaccacaaaaggcaagaaacgcgcaaaccaagcaaagaaaggca

SEQ ID NO: 215073 - RNA, 82 nt, Homo sapiens
gcgacgagggacgggacagagaagcgcgaaaggggccagaggcgcgacaccacccggggacaagacggacagaaacgaacag

SEQ ID NO: 215074 - RNA, 64 nt, Homo sapiens
gaacgaagaagcgccccgacaccaggaaaacccagaaagcaagaagaagagcaaagagggcagc

SEQ ID NO: 215075 - RNA, 75 nt, Homo sapiens
ccagaagaaggaccggaagcacacaacaggaaaacaaaagaggagaaaggggcccggcgagccccacgcccacgg

SEQ ID NO: 215076 - RNA, 65 nt, Homo sapiens
cccagccccgaccggcggggccaggacgcggcaacacccaagggacacggccaacacgggaagga

SEQ ID NO: 215077 - RNA, 77 nt, Homo sapiens
aacaaacagacaccgcaaacacgcgcagacccggccccggccacagggggggccccagcccggccgaacgggcgcac

SEQ ID NO: 215078 - RNA, 78 nt, Homo sapiens
aacagggggggagacgggccccacacagcccaaggcaggggaaagcgcaggggggaaacggagcacccaccaacgaga

SEQ ID NO: 215079 - RNA, 74 nt, Homo sapiens
ccgaaggcgaacgccgcggccaaggagccgccaaagccagacgcgcaccccccggaggcggccgagcccacgcg

SEQ ID NO: 215080 - RNA, 83 nt, Homo sapiens
caaggacggcggcgcccagccggcccgccggggccaagggaagaagcagaagcaagcccagggcaaggaccgggaaaacggac

SEQ ID NO: 215081 - RNA, 74 nt, Homo sapiens
agaaccaggccgcacacagcacggcaagccgcggaaacaaagcgaaagcgcgagcaacggaaacaaaagagcag

SEQ ID NO: 215082 - RNA, 54 nt, Homo sapiens
cccgaccggccgcgacagcgaacagcgcggccgcaggcgggaccccgcgaaccc

SEQ ID NO: 215083 - RNA, 89 nt, Homo sapiens
caagaaagagacagaaggccgagcagcagccaacggaacagcccccagaggccccgagcggagaaggagcggagccaggaaacaacgga

SEQ ID NO: 215084 - RNA, 82 nt, Homo sapiens
gccggaaagaacccacagggcacacagcaccgggcgaaaaggaggaaaagaagccagaccgagcaagagccccgacagcagc

SEQ ID NO: 215085 - RNA, 57 nt, Homo sapiens
gcgggccggcgccggcgcggagggaagggcaacaacccaccgggggaaacaccagac

SEQ ID NO: 215086 - RNA, 68 nt, Homo sapiens
ggggacacccagccacacgcggagaagagagccgcaaggaaacccaggggaaacagaggaagaaacgc

SEQ ID NO: 215087 - RNA, 53 nt, Homo sapiens
ccaagcaggcccaaggagaaagaaccccggcacccaggaggaggagggcgcga

SEQ ID NO: 215088 - RNA, 71 nt, Homo sapiens
gacaccggcgagagcaagacgcgcagagcggggcccgaggccccgaccagcgccaacgaacccgggaacgc

SEQ ID NO: 215089 - RNA, 57 nt, Homo sapiens
caggcacacagcaggcgcccaaaagcggggccagcaacagaagaaagcaagcaccgg

SEQ ID NO: 215090 - RNA, 68 nt, Homo sapiens
cacaaaaccgaaacgcagaagcgaggcacagaagaaaaggagcaccaaaccaccgggaaagagagaga

SEQ ID NO: 215091 - RNA, 77 nt, Homo sapiens
caccggaggacgcaccaggacgccgagaggagcaagcgagcaggggccccccgcacccgcggaggcacaaccccgcc

SEQ ID NO: 215092 - RNA, 79 nt, Homo sapiens
gaccgggagccgcaccaacggggcccggccccagcgaggcgacccgaagagccccgaggaggaggagacagaacacccc

SEQ ID NO: 215093 - RNA, 77 nt, Homo sapiens
acgcccacaaagcccagaagaagggcaccagcgaagggcaaggccagagaaggcgggagaaagacacgaaccacaga

SEQ ID NO: 215094 - RNA, 77 nt, Homo sapiens
ggcacgaagccgagccaaaggcgggagagcagcagaaagcggaccacaggcggccagcgccggcgaagcagcaaccc

SEQ ID NO: 215095 - RNA, 75 nt, Homo sapiens
cggagcgcagaaagccggaaggacaggcagacgcagaccagacggagaaagaagaacaaacacaaaacacacacc

SEQ ID NO: 215096 - RNA, 67 nt, Homo sapiens
ggggaccaccgccccggccagccagaagacgaacaaggggcccacggcccaacgaagcagaacacaa

SEQ ID NO: 215097 - RNA, 80 nt, Homo sapiens
aagggacgcaggaacgcagaagaagcgccgcgaagacccccagaaaaccaaaggcagcagcccacagaacagagcaggcc

SEQ ID NO: 215098 - RNA, 74 nt, Homo sapiens
aagccaaaagggaaaggaaaagaccaacaacagcgcaggacacgagacggggagcccacccagaggcagggggc

SEQ ID NO: 215099 - RNA, 60 nt, Homo sapiens
gaaaacacaaacccaggagcaccacggcaccggcccgaccagccacgacacccacgaaag

SEQ ID NO: 215100 - RNA, 82 nt, Homo sapiens
gacagggggaagcgaggagccacacagaccagaacggcagagacacgccgaccccgacagagcggcagagggagggagaaca

SEQ ID NO: 215101 - RNA, 75 nt, Homo sapiens
cgggccacggcggaggcgcggggcgccgaacacacggccacgccacgacagcacacgggggaccgggggggccac

SEQ ID NO: 215102 - RNA, 75 nt, Homo sapiens
ggaggaaagcagcaaggacagaaagcagccaaccagaaaagaaccagcaacacacaagaaacccagccaccaagg

SEQ ID NO: 215103 - RNA, 79 nt, Homo sapiens
aacgcaggaacagaaaaccaaacaccacaggccagaaggggagcgaacgaaagagcacgaggcgagcggggagacccga

SEQ ID NO: 215104 - RNA, 74 nt, Homo sapiens
caccaacagcagcggcagccaaggaaacaggagccagaaaaaaaaaaagaaaggacaagggaggccaggaaacc

SEQ ID NO: 215105 - RNA, 78 nt, Homo sapiens
aacacccacgacaacggaagggacacaggcaagcaaagcccgagaaacagccagacaacggcaagcggagaagagcaa

SEQ ID NO: 215106 - RNA, 75 nt, Homo sapiens
cacaggccgaggaaggcggcacgggacaagcaaagaaaaggaacacaccagacacagacagaagacagccccgaa

SEQ ID NO: 215107 - RNA, 79 nt, Homo sapiens
aacaaggacagagagaagaaacagaccgagaagacacgagagacaaggcacgacagaagaggagccaccgcacccaggc

SEQ ID NO: 215108 - RNA, 73 nt, Homo sapiens
aaacagccaccccagagagaaggagacacgcgcaaaagaacaccgcgaaaaggaggcccacacagcccagagg

SEQ ID NO: 215109 - RNA, 56 nt, Homo sapiens
agaacacgcagagggaacggcaaacaggaagggggccaacggccgccaccaaaaag

SEQ ID NO: 215110 - RNA, 68 nt, Homo sapiens
aaaaaaccacaaagcggccgaaacagaaaacaagagaccacagaaggcgccaccagcaaaaccagaga

SEQ ID NO: 215111 - RNA, 77 nt, Homo sapiens
aagagagacgagagagaagaggagagagaagaacagagcggcagacacgcagcaaggcagagcccccagacagagca

SEQ ID NO: 215112 - RNA, 76 nt, Homo sapiens
cgcgcacacagcggcgcgcacagggacaccggggcgacgggagaccgaaggaagaaaccgggagggcgccccagac

SEQ ID NO: 215113 - RNA, 52 nt, Homo sapiens
acaggacgaagaccagcgccagggaaagaaggccaggaggaccagaaaacag

SEQ ID NO: 215114 - RNA, 52 nt, Homo sapiens
aaggcagaggcgaaacaacgaacgagcaaggaagggccaaggcagaccccac

SEQ ID NO: 215115 - RNA, 80 nt, Homo sapiens
gacgcacagcgagggccggacggagcaggccgacccaccccacgccgcaggaaaaaacagagaggacgcaaaggacagag

SEQ ID NO: 215116 - RNA, 73 nt, Homo sapiens
agcggcgccaccaccagcaccagggcacccacagaggcaacgaaagcacaaaagaaagggccacccccacagc

SEQ ID NO: 215117 - RNA, 82 nt, Homo sapiens
aggaagaggaggaggaagaagaagggagacgaggcacaaccggggaagagaagcgacccaccgaggagacgccgccccgaaa

SEQ ID NO: 215118 - RNA, 73 nt, Homo sapiens
cgaggaagcacgaaagcaccaacgagacccgccacacgacgggacgcccgaccgccacagccagggacgacac

SEQ ID NO: 215119 - RNA, 84 nt, Homo sapiens
accccgagccccggcacccagcaagggacgcggagccccggaggccgcggcggacggacaccggaggccaccacagaaggacgc

SEQ ID NO: 215120 - RNA, 73 nt, Homo sapiens
caagacaaggggagaggccggcacagggcagccgagagcccgcagggaaggccgaagagaacccagcgcagcg

SEQ ID NO: 215121 - RNA, 83 nt, Homo sapiens
ggcacggcagcacccaggaacacgaagccccgggcaccccgggggagcaggaaagggcaggaagggaccggaaggaaaggagc

SEQ ID NO: 215122 - RNA, 70 nt, Homo sapiens
cgacccgcgcaaacaaacagcgacaaaagaagcgaagccaggaacaagaggcggaagacacacaacacag

SEQ ID NO: 215123 - RNA, 66 nt, Homo sapiens
cggaacagcagagacacagagggcagcagagccaggacacagagaggcgaaacggagaggacccac

SEQ ID NO: 215124 - RNA, 48 nt, Homo sapiens
gccgaacacaacaggcaaacccacccacgcgggacagcagcagaaaaa

SEQ ID NO: 215125 - RNA, 86 nt, Homo sapiens
cagaaaccagccgccgccccggggaagcggcacagcaccagcaggcagagacgccccaggccagagagcgaggaggccggaacagg

SEQ ID NO: 215126 - RNA, 73 nt, Homo sapiens
cagcggcagggccgggaagaacagcaagaggggaagggccagaagaagcagcccaaaagaagaaaaaacaaag

SEQ ID NO: 215127 - RNA, 57 nt, Homo sapiens
gaaaaaccgccaaacgcaggcacaaggcgcagggggaaaggcagaggagagaagcga

SEQ ID NO: 215128 - RNA, 70 nt, Homo sapiens
cgagacaaaggcaccaggccaccacagaaacaaaagcaacaaagaggggcccgagggcaggacagcaggc

SEQ ID NO: 215129 - RNA, 121 nt, Homo sapiens
ggcggcgaggaggggaaccggccccacccgggaggggggagcggcgggaggccaccgccaggggggaggcaaagaaagaagcccggaaacgggcggaagccagccaaaagacgaaagcaaa

SEQ ID NO: 215130 - RNA, 65 nt, Homo sapiens
ggagcgagagcagaaacgaacgcagaagagagcgagccacaggggccgacagaaaaagaagagga

SEQ ID NO: 215131 - RNA, 81 nt, Homo sapiens
gagcgcggggcgacgcggcgcagggacccgggacagcggagagggaggcaaggagcacagaggggcgcaacaggaaggaga

SEQ ID NO: 215132 - RNA, 61 nt, Homo sapiens
aaagccgcccagacggccaccggcgggaggaacaaaagaacagaaggagcggcggacacac

SEQ ID NO: 215133 - RNA, 79 nt, Homo sapiens
ccggacagcgccaaaaacacaccaggaggggcaacaaaccaccccaacacccaggggacgaggaccaaggaagaaaacg

SEQ ID NO: 215134 - RNA, 59 nt, Homo sapiens
gcacccccaggcacgggcacacaggccccgagaaccaagagaacccccaccaaccaggc

SEQ ID NO: 215135 - RNA, 63 nt, Homo sapiens
gcaaaagaaggagggccccaggaaaggaggagacacacagccccagacgggaggaaaaaagga

SEQ ID NO: 215136 - RNA, 73 nt, Homo sapiens
acgcgcacgggaaccgaagagagccgggcaccagggccccccacgcgagaacccgggccggggcccgggggcc

SEQ ID NO: 215137 - RNA, 71 nt, Homo sapiens
agacggccagaaagccgccagagcggggcacggagcgggcaaagcaccacaggggaaaacaagcagaaccg

SEQ ID NO: 215138 - RNA, 83 nt, Homo sapiens
agaggaaacgggaacagaaagaaaagccgaaagagcgaaggagcccgcagggccgccaccagcacagggagggagaggagcca

SEQ ID NO: 215139 - RNA, 39 nt, Homo sapiens
caacccacgcgcaccggagaggggaaaggagaaaggacc

SEQ ID NO: 215140 - RNA, 51 nt, Homo sapiens
aggagggagcgcgcgggacaaagaaacaagcgacggaggacccaaaaacaa

SEQ ID NO: 215141 - RNA, 69 nt, Homo sapiens
ggagaaggaacgagccagcagcggacaccgacaagcaccgccaaagaagccgccagggaacgcccccgg

SEQ ID NO: 215142 - RNA, 72 nt, Homo sapiens
ccccccagcggaccggcaggcgaaggccaaaaaaaaacgagcagaaaaacgcagcccaccgaacccacccca

SEQ ID NO: 215143 - RNA, 34 nt, Homo sapiens
caccggccaccccaaggacgaggaaagccccagg

SEQ ID NO: 215144 - RNA, 51 nt, Homo sapiens
acagggagcacaaccgaaggcacacgaccgcgagagggcgaagaacgccaa

SEQ ID NO: 215145 - RNA, 110 nt, Homo sapiens
caggcggaaccaagcgcaagccgggggccacgcaaacacggccaggaaggggcgccgggccggcccacagcgggcagagcggaggaaggagcaccccacgcccaaaaggg

SEQ ID NO: 215146 - RNA, 80 nt, Homo sapiens
ggagcccagggaagcagccgaccagccgcggagccgggggcagcggagaagacaaccagacacaagcggaaccagaacag

SEQ ID NO: 215147 - RNA, 40 nt, Homo sapiens
acccgaaagaacaccgaaccagaacccaagcaaacccaca

SEQ ID NO: 215148 - RNA, 80 nt, Homo sapiens
aaacagccaagacaaagccaaagaggaggaggcacccccgccgagccggggaggccagagggaaaggagaaaacaagggg

SEQ ID NO: 215149 - RNA, 86 nt, Homo sapiens
ccgcaccgcgcaacccgccgggccaggcagccgcacgacgggccaaaaggaagcccacgacaagagaccaggcaagaggggagaag

SEQ ID NO: 215150 - RNA, 69 nt, Homo sapiens
gagggggggaccgaccgcaacagaacggacccgagccaagcaaagcgggcccgggcggcgggagcagcg

SEQ ID NO: 215151 - RNA, 76 nt, Homo sapiens
cccggagaaccccccagaaggaccaagaggcagcaggaccgcggcggcgaacacagcggaagagaagaagggagga

SEQ ID NO: 215152 - RNA, 82 nt, Homo sapiens
gaaggaagcaaagcaaaggagaaggcagcgggacggacaggcagggaagcaacgcagaggccgggaacggcagacgcagcag

SEQ ID NO: 215153 - RNA, 53 nt, Homo sapiens
caccacagaggacaaacaccacgggagaacagagaaagccaaggacacgcagg

SEQ ID NO: 215154 - RNA, 39 nt, Homo sapiens
gcagaagggaagaacaggaggaccagaacagagaagaaa

SEQ ID NO: 215155 - RNA, 76 nt, Homo sapiens
gcgcggcccggaaccagggacaacaccgggacacccgcgaggccggaaaagcagcaagcgcagaaccagacaggca

SEQ ID NO: 215156 - RNA, 71 nt, Homo sapiens
ggaggaccccaagggagcaagggacccggggcagagaggaagccaggaccacgaaaagcacgcgaccaaac

SEQ ID NO: 215157 - RNA, 69 nt, Homo sapiens
gaaggaccaagaaccaggagaggagccaagcccaacgggacgggaaaacggccacagccaacgacgcag

SEQ ID NO: 215158 - RNA, 86 nt, Homo sapiens
ccaaccgggagcggccacggcggaggacgacgcgccaaccagacgcgcgggaggacagggggggggagcacagcgaagaagaacac

SEQ ID NO: 215159 - RNA, 79 nt, Homo sapiens
aaggcccaagaaggagcgcgacaagaccgggcgaggccaccccgaggcaaggccccagaggaggaccaagagcgggagc

SEQ ID NO: 215160 - RNA, 62 nt, Homo sapiens
ggagagcaccgcaaacacagacaaaaggagagacgccagaagcaaggaaagaaaacaagcca

SEQ ID NO: 215161 - RNA, 72 nt, Homo sapiens
aggggccagccaagaagagaaagcgaacaggaaaacccggccaggggcacccggaaacaagccacgaaggag

SEQ ID NO: 215162 - RNA, 60 nt, Homo sapiens
gcgacgcaaggaaaggccaagacggcagaggcccgcacggacaacacgcccggagagacg

SEQ ID NO: 215163 - RNA, 74 nt, Homo sapiens
gaacacgggcccaaaaaacaaagggagaaaaggcccgccaaagagcacaaacagcaaaaaagaacaaggagaag

SEQ ID NO: 215164 - RNA, 56 nt, Homo sapiens
cgccggagagagaaagcgggggggccaaagggcgagggcacaaaaaaccacacccc

SEQ ID NO: 215165 - RNA, 79 nt, Homo sapiens
ggggcccgggcagcccggagaacaccagaagaaaagaacacgcagaaggccgccacacaagcaccgacccaaggcaaaa

SEQ ID NO: 215166 - RNA, 61 nt, Homo sapiens
gaaaggagaccaaccaccagaagcaaagaggggcaacggcagaaacccaacgccgaagcac

SEQ ID NO: 215167 - RNA, 78 nt, Homo sapiens
acaccaacccagcgaaggaagacacccacaccccacgaaccacccagacagaggcagcaggagaaacgagaagaaaca

SEQ ID NO: 215168 - RNA, 84 nt, Homo sapiens
gcaggagcggcggccaggccagacccgaaggccaggagacccgaccccaagggagcacgccggaggaacagcagcaaacgcgcg

SEQ ID NO: 215169 - RNA, 79 nt, Homo sapiens
aagccccagaagaaagacggaggaaaggacaagcaggccacgagaaccgaaggccagaagaaagaaggcccaaggaaag

SEQ ID NO: 215170 - RNA, 59 nt, Homo sapiens
gggaacaaaagccaggcacaagaaagcgaaaagaggaaccacgagacgcggaacgacca

SEQ ID NO: 215171 - RNA, 69 nt, Homo sapiens
ccaaggcggagcaggccaaaggaagaaggcgcggacaagaagacagcagacggacgaagagagggaagg

SEQ ID NO: 215172 - RNA, 62 nt, Homo sapiens
cgggaccaagaggcggcggagcggggaggccaaaccaccccaagcgcccaacggggcacccc

SEQ ID NO: 215173 - RNA, 66 nt, Homo sapiens
gcacacggccagcggagaacaccccccaacacggaggcaacccaccgacgcccggccccgggcccg

SEQ ID NO: 215174 - RNA, 78 nt, Homo sapiens
gaaggaccgagaaggcagcgccccagcaaaaggggggccccgaagccacgaggaagccacacaccggggcacggacca

SEQ ID NO: 215175 - RNA, 79 nt, Homo sapiens
caaaggggaaaacaagaaaggagcaggggacagccgcgagggaagaacccacccccggccccgccacagccccagcccc

SEQ ID NO: 215176 - RNA, 82 nt, Homo sapiens
cgagaagaacccacgccgacacgacgccgcgggcaggcgcgcgcacccggaggaccacccgggcacccggacaccgcccccg

SEQ ID NO: 215177 - RNA, 76 nt, Homo sapiens
gcccccccgccggccggcccgggcaccgggccggaggacggaagcacgggaaaccagcaaccccgaccaccaaggc

SEQ ID NO: 215178 - RNA, 63 nt, Homo sapiens
ggacgccaggaggcggggaccccaaaggcccgacagcaacgggagaacagacagcagagggaa

SEQ ID NO: 215179 - RNA, 72 nt, Homo sapiens
ccacccagaaacagccggcagcagcggaaggagcaccgaaagaggaaacaaaagggcgacagcccagaggac

SEQ ID NO: 215180 - RNA, 73 nt, Homo sapiens
cgcccagccgcgagcacggggggacaggaccggcccaacagggcagccgggccccccgcgccgcgggggccaa

SEQ ID NO: 215181 - RNA, 60 nt, Homo sapiens
aggaaaagccccagcgcgcgcccggacagacaaggccacaggcgccaagaagccgagaca

SEQ ID NO: 215182 - RNA, 104 nt, Homo sapiens
cggagaagcccaaaagagaccgaaaggagaaggccgcaagaacaagaagcaaccaaggaagaaccacccacgaacacagaagaaagaaggaaaacaagccgacc

SEQ ID NO: 215183 - RNA, 80 nt, Homo sapiens
ccgcgaagagaaacgggaaaggggcaggccggagggagcgaagagaaccaggggaaaaagaaaagggcgaagacccgaag

SEQ ID NO: 215184 - RNA, 100 nt, Homo sapiens
ccagcagcaacaccccaaacagcggcgcacggggcacaacaggggcaaagaaaaaggagagaaaaagaggcaaaacaacaagaagaaaagagaaaaaaga

SEQ ID NO: 215185 - RNA, 79 nt, Homo sapiens
ccggaacgccgaccgaaaccaccgagcccaagaccaacaaggcgagggaaaccaacacaagacggcagccaaagaaaga

SEQ ID NO: 215186 - RNA, 68 nt, Homo sapiens
agccccgcgcagaggaccaagcgcacaacacaaaagcccaacagggcacgacacgaggacgggcggcc

SEQ ID NO: 215187 - RNA, 80 nt, Homo sapiens
gcccggaccgcagcccccaggggcgggaagaagacgaccccgacgcaggccaggagccgcggacagaagccgagcacggc

SEQ ID NO: 215188 - RNA, 78 nt, Homo sapiens
aaagggggcgaaacccggaggaagccacaagaagggaggagacaggccgagaccgagggccccgcaccccggagaaga

SEQ ID NO: 215189 - RNA, 75 nt, Homo sapiens
aaagcacggaaaccgcaagacacaggccaggcaacccaagggggcagaccaacaaaaggcgggaagaaacagggc

SEQ ID NO: 215190 - RNA, 78 nt, Homo sapiens
ggggcggcccaccaacaggaacagggcagacgagcggaggacacccaacccggcgcgccccagaccaccggcagggaa

SEQ ID NO: 215191 - RNA, 73 nt, Homo sapiens
ggcgcggagcgggcagccgccgccaccccgcggccgcacccccgccccaggaagaagggcaaagaacggagaa

SEQ ID NO: 215192 - RNA, 81 nt, Homo sapiens
caaccaaagacgccaaggagaaggcagaccggggcagagcggcgggaaaccaccaacaacacccccaaaccaaaacagccg

SEQ ID NO: 215193 - RNA, 79 nt, Homo sapiens
cgcaccggaaccagagacccaagaggaaagcaggagcccggaaaggagaaggaaaagacggcaggaggaagagagagag

SEQ ID NO: 215194 - RNA, 69 nt, Homo sapiens
gcaccaagaaaacgccaaggaacggcgggaaaacggcacaaggcgacgagggagggcagaccgccaggc

SEQ ID NO: 215195 - RNA, 71 nt, Homo sapiens
cacccccccaccaccaccacaacaacgcaccaggcgcagacagacaagaccccacgaagagggaaacgagc

SEQ ID NO: 215196 - RNA, 80 nt, Homo sapiens
gaaggcgacccggcggcgggaggccacgccagccgccaggcggcgcagggcccaccggccacggggagagagccacacag

SEQ ID NO: 215197 - RNA, 81 nt, Homo sapiens
gcggggcaagaggaggcgcgaggccagaccggaaccgaccggcgacccccgaaggggaggcagggcgagcggcccggggcc

SEQ ID NO: 215198 - RNA, 53 nt, Homo sapiens
acaaagagcggagcccaaagccacgcgaaaaccagaaggcgagacagcacaac

SEQ ID NO: 215199 - RNA, 74 nt, Homo sapiens
cccgacagggacacagggagccccagacccacagagcccgagcgaagagaggaaggacaggacaagccaaggcg

SEQ ID NO: 215200 - RNA, 68 nt, Homo sapiens
aaccaccagcagcccccagagcggaacacagggggacacagccagggcgcaggcagcgcccaacaaca

SEQ ID NO: 215201 - RNA, 84 nt, Homo sapiens
caccggccagcccagcccccgccgcgcccccaggcccaggaagcccacccagccccgccacgcagagcccagaaggaaagaaag

SEQ ID NO: 215202 - RNA, 79 nt, Homo sapiens
gagagccccgcaccccccccagaaacaggccgggcccgggaggagcaggggcagaggggagaacccagccgggaccaag

SEQ ID NO: 215203 - RNA, 76 nt, Homo sapiens
cggaggaccggccacgacgcccccccagggacagaagaacccgaccacccgcacacggaagcgacggcacagaaga

SEQ ID NO: 215204 - RNA, 77 nt, Homo sapiens
ggacgcgggccgaggagagcggaggaggggaaagggcgcgaagaccgagcagacgcccaggagaacagcagcagcca

SEQ ID NO: 215205 - RNA, 73 nt, Homo sapiens
ccgcggggcgagcccggaaaaccagaccagaaacggaggagcccgccgaagcagcgccaccccaagcaccggc

SEQ ID NO: 215206 - RNA, 79 nt, Homo sapiens
gaaggaaaagccaagcaggagaaaccagccaaacaacagaggcaaccagggaccaggaggaaggagcggagaggcaggc

SEQ ID NO: 215207 - RNA, 76 nt, Homo sapiens
gcaacaggaacaagaggaacgcccgcagaaaaagaggcccccccccccgcgacgacccccaggcaaaccgccccgc

SEQ ID NO: 215208 - RNA, 79 nt, Homo sapiens
cggggcacgcgcccacaggcggccagcccgccagaggcccacccacagagcgcggaggagaaggaccggagaaggagag

SEQ ID NO: 215209 - RNA, 76 nt, Homo sapiens
agaagaggggagagcaccccaccacgccgggcagaaggccgaaagagcacggacccggaagagagacagaaaagcg

SEQ ID NO: 215210 - RNA, 79 nt, Homo sapiens
aaacaggcgcgcgagagccagcgggcgccgggagcagcgaaccagccggccgacgaggagcagggcccccggacgcaca

SEQ ID NO: 215211 - RNA, 82 nt, Homo sapiens
ccgggcgaggcagaccgccacgggaaggagcgggcggcgagccaacgacgcaaacagcagacggaagaccccacggcaaaac

SEQ ID NO: 215212 - RNA, 73 nt, Homo sapiens
cgaccgccggagcgaggaccagggcgaacaccggaggcaggggaagcacaaaagcgcacccgcgccagcgagg

SEQ ID NO: 215213 - RNA, 86 nt, Homo sapiens
caccacagccccgacaccaaggacagaacaagcgagggaggcggcgggcgcaggaccgggggaagggggccagcgggggcgaggag

SEQ ID NO: 215214 - RNA, 73 nt, Homo sapiens
gaacaggaaccaagaccccaaagggaaacgagacaagcccacaagcccaggcggaccgagcccgggccaagcg

SEQ ID NO: 215215 - RNA, 72 nt, Homo sapiens
gccggcgcggaaagagaaaacaaccggcaggggacgaagaagggagaagaagaagagcaagccagccccacc

SEQ ID NO: 215216 - RNA, 73 nt, Homo sapiens
aagagcacgaaccaggaacaagaagacaacagagcagacagggcaccagaaggagacacaacgcgacaacgga

SEQ ID NO: 215217 - RNA, 80 nt, Homo sapiens
aagcgcccgaggcccgggcccgcgggggcaaccgggcgcagacgaggagcccaggagaaacgccaaggccgcagcagcag

SEQ ID NO: 215218 - RNA, 53 nt, Homo sapiens
gaggaagggcagaggaccggacaacgaggggaaagaaaaagagcccaccaaaa

SEQ ID NO: 215219 - RNA, 58 nt, Homo sapiens
aaccaaaccacaaaccgagaaaaaaaccagaaaagcacgaaacacaaagcaaaacgga

SEQ ID NO: 215220 - RNA, 76 nt, Homo sapiens
gcggggccgaaaacaacgacaacgagcacagggaaacccagacgacaaggaaggccaagggacccacgaccaacca

SEQ ID NO: 215221 - RNA, 65 nt, Homo sapiens
gccacgggcaccggggagaaaaagccagccgccgacagcccgccagagaaagaagacggagaagc

SEQ ID NO: 215222 - RNA, 72 nt, Homo sapiens
caaggccccgagcaggaagacaccaggaagccaggccccaccgcacggcaagagcgccccggggccaaccac

SEQ ID NO: 215223 - RNA, 37 nt, Homo sapiens
cgccaccccaccaggcaggccaagcaccagaaggcca

SEQ ID NO: 215224 - RNA, 44 nt, Homo sapiens
cgccaccagcccaagagaaagaccaggccccgccccagcccggg

SEQ ID NO: 215225 - RNA, 76 nt, Homo sapiens
gcggaacaggacgccccgaaacaggccaagacaaccgggaaagcagcccaaggagggcgacacacgaccaaccaga

SEQ ID NO: 215226 - RNA, 78 nt, Homo sapiens
aagaaaaaagaaccagcaaaggcggagaagccagggcgacaacaaggaagacgagggagaccggaagcagaagacccc

SEQ ID NO: 215227 - RNA, 76 nt, Homo sapiens
caggaaggaggaggaaaaaaggagcaaaaggaacacagagcagaagcacaagcagaggaagggagccagcaaacga

SEQ ID NO: 215228 - RNA, 81 nt, Homo sapiens
caaggccgcccaaggaagaccaggcgccagacaaagccaggcccgacgaacagaggacgaagaggcaaaagcagaacaagc

SEQ ID NO: 215229 - RNA, 68 nt, Homo sapiens
ggagcacaacaaagaacggacacggcacgccacacccgggaaacgaggggaggacaaacccagaccag

SEQ ID NO: 215230 - RNA, 83 nt, Homo sapiens
gaagagggcgacccggacccggaaggggcggaggaaggacaaaacccaaacagagagagaaagcaggagcccgagccacgaag

SEQ ID NO: 215231 - RNA, 62 nt, Homo sapiens
gggacgcggggaccggaacaggcggagccccccccaagggcgagcagcggccggacaagaag

SEQ ID NO: 215232 - RNA, 77 nt, Homo sapiens
aggaccaccggagccacagcccacgggccccgagggccggcagcccgccggcagcgcagacggagccgccgcgccca

SEQ ID NO: 215233 - RNA, 82 nt, Homo sapiens
ggaaaccggaaccaccaccgcccaccaagccagccgccccgcaggccccggccccaacaggcccgcgcccagagccccgcag

SEQ ID NO: 215234 - RNA, 39 nt, Homo sapiens
aggaaggaagggccgaaacacaggcccgggccccggcac

SEQ ID NO: 215235 - RNA, 83 nt, Homo sapiens
ggcaccaaggagccaaggacagggaaacaagcaggaccaaaaaccagaggccaggcagcgaacaaagcacaaaagagaccggc

SEQ ID NO: 215236 - RNA, 71 nt, Homo sapiens
ggagacaacaggaggacacggaagagggaagaaagaagcagcgccagagccaaaccacagggaagggagcc

SEQ ID NO: 215237 - RNA, 77 nt, Homo sapiens
ggcccccggaccgcagacgggggacgcagggaggagcgggacaccccggaagcgggaaagagagaggagcgagagga

SEQ ID NO: 215238 - RNA, 75 nt, Homo sapiens
caagaacaaagaaccgagaaggcgcaaaagggacagacaccagacgaaaaaacgggaccgagaaaagaggaaaca

SEQ ID NO: 215239 - RNA, 59 nt, Homo sapiens
aaagccaacagacccggggcgacccaggggcagggaaggggagggcgaagggaagaagc

SEQ ID NO: 215240 - RNA, 86 nt, Homo sapiens
cacacaaggcagccgccgggagccagaagcacaggcccgggcgaaggggccacgcgaagacccacaggaagagagaagaagagaac

SEQ ID NO: 215241 - RNA, 67 nt, Homo sapiens
gccaagcacggggggcaggccaccggagcaaagaggccacgaagacgcaaagaagcaaaccgaaaaa

SEQ ID NO: 215242 - RNA, 76 nt, Homo sapiens
cagaagcccagcgcggcagagggcagagaaaggccagaggagaaacaagacccaaagaagggcgacacaacgcccc

SEQ ID NO: 215243 - RNA, 72 nt, Homo sapiens
cagcgagagaggcacacaaaagaccgcagaaaaggaagcggggaaaaagagaaaggcgacagaccacgccag

SEQ ID NO: 215244 - RNA, 74 nt, Homo sapiens
ccgcgccgccagcgccgcccccgccaacagccgcagggccgaggcagccaggcgcccagccggaaggcaggcga

SEQ ID NO: 215245 - RNA, 81 nt, Homo sapiens
cgaccgagggacgggagcgaggagggcgacccagcaacgcggccggccaggggcaagcgagcacggagggagccgggagag

SEQ ID NO: 215246 - RNA, 68 nt, Homo sapiens
cccacggcgaagccagcggacgggcagggcccaggaaaccgcacgaggaaccccaaaaaacaaccagg

SEQ ID NO: 215247 - RNA, 48 nt, Homo sapiens
cggccggagccaaaccgaagagcggaagagaaagacacaaacggcaaa

SEQ ID NO: 215248 - RNA, 63 nt, Homo sapiens
cgggcgcaggagaagaggcggcccacagagagcaaacaaaagggcggaccacaccgaggggga

SEQ ID NO: 215249 - RNA, 75 nt, Homo sapiens
gcaaacgcaaacaaacaagggaacaaggggaacaaacgaacagaggggaccaaaacccagcccgggacagccaag

SEQ ID NO: 215250 - RNA, 78 nt, Homo sapiens
accacgcaggcgacacgggggccgaaacaagaaaagagcccggaacgccagagcggaaaggaagagaacgccggaagc

SEQ ID NO: 215251 - RNA, 84 nt, Homo sapiens
cgaccaagcacaaggacaagcaggaaaacggcgagaggacggagggggcccgacaaagcccccaagagagaagccgaggcgcca

SEQ ID NO: 215252 - RNA, 54 nt, Homo sapiens
gaagggagagaccacaaggacgcgcgcacgagcggcaggacacaagcaggggag

SEQ ID NO: 215253 - RNA, 88 nt, Homo sapiens
gcaaaaccaacgccggccggagcagcagcccgagcccgccaggagcccggaaggggccgcacgagacagaaagacacaccaaacccag

SEQ ID NO: 215254 - RNA, 67 nt, Homo sapiens
agccgggggcccggggcgaccaggacagcggagcaggcaacagggcagcggccaaccgggcgggcca

SEQ ID NO: 215255 - RNA, 49 nt, Homo sapiens
cccaaagacaaggaggagaaaggaaaaaggcaccggcacggaccacccc

SEQ ID NO: 215256 - RNA, 83 nt, Homo sapiens
gccgcggcgggggagagagggccccgaaccgccaggagaaaacggcagcaccccaccacaagacacagcggacagacacccca

SEQ ID NO: 215257 - RNA, 79 nt, Homo sapiens
ggccgaaccccgacccaggccaccccagcagacaggccaaggcccgggcaagccaacacggccacaaggggcggacagg

SEQ ID NO: 215258 - RNA, 74 nt, Homo sapiens
cggcggagggaccggcccgcgaagggcacgggaggaagccggccgccaggccacgaacccggacaaggaacgag

SEQ ID NO: 215259 - RNA, 73 nt, Homo sapiens
cccccgaacagcaggcgccaccagcccggagaaccaaagaggaccccagaaggaggaagaacaggggagacca

SEQ ID NO: 215260 - RNA, 84 nt, Homo sapiens
gaagagagcaagagagagaggcagccaagggcggcccagcagggggagacaggaggccaccccaccgagggcagcccgaagcgg

SEQ ID NO: 215261 - RNA, 75 nt, Homo sapiens
aaaaacaagacggggcgccccacagaggggcgacgggccccaagcaggcggccacagccacaccagggacacgac

SEQ ID NO: 215262 - RNA, 78 nt, Homo sapiens
ggcccaaaggcccggacccaaaacaggaacaaccgccccacggaaaaccagaacacagccccaaacccaaggaccagc

SEQ ID NO: 215263 - RNA, 76 nt, Homo sapiens
gggaggcccgcgccaccagacccagcaaggacacgacgccccacgccacccggacccccgcgacccgccacagagg

SEQ ID NO: 215264 - RNA, 77 nt, Homo sapiens
cacgcgccggcgcgcacacaccacgggcgaggcaacgagccgagacgcgaagcgggcccaccgcgagggagaagcgc

SEQ ID NO: 215265 - RNA, 65 nt, Homo sapiens
gccccacccggccccgccgagcgcgccggaccggcgcccggacaacccgaccggccaagccaaag

SEQ ID NO: 215266 - RNA, 78 nt, Homo sapiens
ccggccagccaacgcgaggacggggggggccaccgggagcccccgaaacaaagagacgcacggcggaccaagagcgga

SEQ ID NO: 215267 - RNA, 106 nt, Homo sapiens
cagcccagaagagagaagcagcaaagcccgaacaaaaaggagaaaggccagcacggccaccgcgcggcgccacccaggggaacgaggccaggagccacagccacgc

SEQ ID NO: 215268 - RNA, 78 nt, Homo sapiens
cgcacccggggacaagcgcgggaacggcgcggaagggcgccggccgagcccgggaaaacgacagcagcagcagggccg

SEQ ID NO: 215269 - RNA, 68 nt, Homo sapiens
cggaaacaaagagccggcccggcgaaagggggccaaacaacgaagagccagagcccaagccaaagcca

SEQ ID NO: 215270 - RNA, 83 nt, Homo sapiens
ggcagcgagcgaagaaacagaggcaaaggaaaaagaaaaaggggcgccggccggccccacaaaaagcccgcgccaccggccaa

SEQ ID NO: 215271 - RNA, 70 nt, Homo sapiens
gcacccacccacgaagggaggaaaagggcagggacagcgcaggcagcaggacgaaaaggcccaggccggc

SEQ ID NO: 215272 - RNA, 97 nt, Homo sapiens
cagcggcccccagccgcaaccccgcgccggcgggcgcgcgagcgcccggcgggagcagcggaagacaccaaggccagggagggccaccgcacggaag

SEQ ID NO: 215273 - RNA, 70 nt, Homo sapiens
ccgaccaggaagcgggccgccagccccaaacaacggcaagcggagaagagcaaggccgaaccgagaggaa

SEQ ID NO: 215274 - RNA, 56 nt, Homo sapiens
cccgcgggacacgaaaaacaaccaccagcgagcaaaaaggcaaagaccaagaccac

SEQ ID NO: 215275 - RNA, 89 nt, Homo sapiens
aagccccccagcccccacgagaaaaccacccaaagccaaaggcagcaccgggaccggaggcccagagcgacggacggagaaccaggccc

SEQ ID NO: 215276 - RNA, 83 nt, Homo sapiens
cggccacggaggcaccagaagaagcaccaggggaaaaggagaacggaccaagaacgaaaaaccaccgcaccagggccaagcca

SEQ ID NO: 215277 - RNA, 83 nt, Homo sapiens
cagcggcgaaggagaccgcccaaaccacccccccaggaagccccggcccccaagaagggagacagcagccacccgcaccgggg

SEQ ID NO: 215278 - RNA, 74 nt, Homo sapiens
agacggaaaaaacaaaaggagagcgccaaaccaacgagagggaggaacagcacccaaccaccagaccgacagac

SEQ ID NO: 215279 - RNA, 73 nt, Homo sapiens
gcgaggacgagaagggaagagggggagccggccaaaagcggcgccgaggaagagcagaaggaggcccaagggc

SEQ ID NO: 215280 - RNA, 72 nt, Homo sapiens
cgccgggaggccaaggaggaggcagcacggcaggagacgaggagaggacagcaggacacccggaccccaccg

SEQ ID NO: 215281 - RNA, 81 nt, Homo sapiens
ccgcgccgcaggagacgagaggacgggaccaggcgaagcggccgagcaggcgagcgaacgacgacgagggacacgaccgag

SEQ ID NO: 215282 - RNA, 77 nt, Homo sapiens
aagacgccgcgaaagcagcgggagggagagccggggagacaggagagccgcccagaacccccggaagggaccagcgc

SEQ ID NO: 215283 - RNA, 80 nt, Homo sapiens
caaggagagcgaagcaaggcccggcgcaaggccagggggggagccgcacgacccgaacgccagagacaaaaccagccaga

SEQ ID NO: 215284 - RNA, 82 nt, Homo sapiens
ccccagggacagcacgagagacgcaacgaggggcgcccgagacgggacccgggagcaccacaagggaccccagcccggggca

SEQ ID NO: 215285 - RNA, 73 nt, Homo sapiens
cgaaaaaagagaaagggccaacggagaggagccaagcccaacgggacgggaaaacggccacagccaacgacgc

SEQ ID NO: 215286 - RNA, 71 nt, Homo sapiens
gaaaaaaagcaagggacccgaccagaaagagaacccgaaggaagagagaagacaaggggcccgggcgacac

SEQ ID NO: 215287 - RNA, 37 nt, Homo sapiens
gaaagaaaaccgccaagacagaaccacggcgggcaga

SEQ ID NO: 215288 - RNA, 71 nt, Homo sapiens
gaccaagaggacggccgcgagaacagagcgggagagccccccacgacccagaaccagggaagagggcccgg

SEQ ID NO: 215289 - RNA, 37 nt, Homo sapiens
caacgccgccggccgcgagagcggacacgagcccaag

SEQ ID NO: 215290 - RNA, 84 nt, Homo sapiens
ggacaagcgcgacgcccggcgcgagccaagcgcgcgccggcgaagccgacgagcccgaacagacgcaccagcgggaggaagagg

SEQ ID NO: 215291 - RNA, 70 nt, Homo sapiens
aggaccaagaaccagggcgaacgaggcgcacaacaaggcggcgccacacacgcacgacccaagaggcgaa

SEQ ID NO: 215292 - RNA, 68 nt, Homo sapiens
cacccccacgcggaacacaggcaaaagggaaagcagcaggcgcaaaaacgaacccacaaccgaacgac

SEQ ID NO: 215293 - RNA, 74 nt, Homo sapiens
agagagcaaaaaaagaaaacagaggaaaagaaacgagagacgacaacgccacacaaggaaaggcagcgaggagc

SEQ ID NO: 215294 - RNA, 81 nt, Homo sapiens
ccgaagggcgcggggaccacgacagcgggggagcaggccaagagggcgacccgcccagccagaaggagggccgccaaggag

SEQ ID NO: 215295 - RNA, 75 nt, Homo sapiens
aaggagccgcgcgggacagcaagagcagccccggaacggaggaagggagccggagagaaaaagggcggagagaag

SEQ ID NO: 215296 - RNA, 77 nt, Homo sapiens
agccaaggccaaacgacagaaagcgggcacagccaaagggaccggcagaggccacgcaggcaagcagcggaagaggc

SEQ ID NO: 215297 - RNA, 60 nt, Homo sapiens
ccccgagagcggaaccacaagcaccagcacgccggcaagggagcgggaggggccaaccgc

SEQ ID NO: 215298 - RNA, 82 nt, Homo sapiens
cgaaggccgggacccggccccggcccacaggggggggcaaacccgagagaacgggccgcgggcccccagcgccagacccgca

SEQ ID NO: 215299 - RNA, 82 nt, Homo sapiens
cgcggagcagagccgccggggagggagccagaagcaacgaggggacaccaaaaggagcacgcaaccccaccaccggagggca

SEQ ID NO: 215300 - RNA, 72 nt, Homo sapiens
ggggggacgcgcagaacaaaagaaccagcacaggcaaccccaggggaggcacccacgaagacgcgcggcaaa

SEQ ID NO: 215301 - RNA, 66 nt, Homo sapiens
cccagcaaccaagacacgcgaagagcgaagagagagaaagcccagccgcacaccaagcgaaagcgg

SEQ ID NO: 215302 - RNA, 82 nt, Homo sapiens
ggaggcggccaaggaccggccgacacgcggcccccgaccgcacgagacccggacccgcccacaaagaagccagcgaacggac

SEQ ID NO: 215303 - RNA, 78 nt, Homo sapiens
gaacggacaccgcaacgaaagcacgaaggacgacaaaagaacccaaaacgccgaacacgacagccacaagagacccag

SEQ ID NO: 215304 - RNA, 90 nt, Homo sapiens
cccggcccccgcccggccccggcgcaggcagcaggaaggagcagagaggaacaacgaagcccaaagggggcaaacaaggcacacaacaag

SEQ ID NO: 215305 - RNA, 64 nt, Homo sapiens
aacgaccggcagggagggaaggcaagagccaacccaaaaccaagccagcagaagaggaccagac

SEQ ID NO: 215306 - RNA, 54 nt, Homo sapiens
ggagcagacaaagccgagaaacgcggaaaagaagaggcagagggaaggcagcca

SEQ ID NO: 215307 - RNA, 97 nt, Homo sapiens
aagaagaaaacacaaaacaccaccacacaacgaggacagaagccaagaagacaacaggcacaaagagagaaggaacacccacagggcagacagagaa

SEQ ID NO: 215308 - RNA, 69 nt, Homo sapiens
aagcggaaaacgaacacccccgggaaccaagccagcagacggggccagcaagcacaccaagagcaagga

SEQ ID NO: 215309 - RNA, 74 nt, Homo sapiens
caggcaagagaacaaacagggagggccgaacaggggggaacgacaaacaaggccccagaagcaggggcgaccca

SEQ ID NO: 215310 - RNA, 51 nt, Homo sapiens
ggacccgccaccaccaaaaaaccaccccccagacaaaagagcaacgagacc

SEQ ID NO: 215311 - RNA, 72 nt, Homo sapiens
cgacagccgccagaaacagaacccccaccacagcgcacgaacccaaaaccacagcagaggcaagaaagcacc

SEQ ID NO: 215312 - RNA, 48 nt, Homo sapiens
aaacaaaacccgcacccaaacaaacccggccaccacacaaagaaccca

SEQ ID NO: 215313 - RNA, 103 nt, Homo sapiens
cagaaccgcgccaccgggaggggacggcccagccccagcgcggcccagacacgagaggcgagggacgacagagcaagcggcagagggcaagcgggaaaaagac

SEQ ID NO: 215314 - RNA, 74 nt, Homo sapiens
cagaccagacagaggagaaacaccaagcacggggggcacaaggccaagacggccaagggagccacagggcccag

SEQ ID NO: 215315 - RNA, 68 nt, Homo sapiens
ggccccggcagacgagggcaagcagcaggggcgcaacccaagcgcgaacagcaaaggagagccagagc

SEQ ID NO: 215316 - RNA, 119 nt, Homo sapiens
gaagaacagacccaaggagcccgcaagagaagaccaagcgacgccggcaaagagcggcagcagagaacaccaccgggaccccaagcaaagagcaggagaaagcccgcccgagccccccg

SEQ ID NO: 215317 - RNA, 81 nt, Homo sapiens
caacaaagagccgagcccgggacagagaagccaaaagccggaaaagagcaggagaggagccgggagagggagcaggaagca

SEQ ID NO: 215318 - RNA, 76 nt, Homo sapiens
gacaaccgaacaggaccaaagcggacacccgagcaccgaaggccacagcgaaaaggcgaccgggcaaaaggggccc

SEQ ID NO: 215319 - RNA, 81 nt, Homo sapiens
ggaagcggagcgcccccacccggaggcccgccggccccgggggcaggagggggcaacggagcccagggcgaaagggcacga

SEQ ID NO: 215320 - RNA, 69 nt, Homo sapiens
cccgccggccaccggcgacgccgacaagcaggagccgacccaccagcaaaccacagagagaggaagaaa

SEQ ID NO: 215321 - RNA, 80 nt, Homo sapiens
cccacaacaggccccccgccccccccccgcgggcaccgaggacccgcccgcccagaaagaaagaagcagaaaaccagaaa

SEQ ID NO: 215322 - RNA, 85 nt, Homo sapiens
gccaggcgcagagcagggcggcacacccaaggggcagagcaggccaccacggcagcaaccgcgcaccacgcgggaaggaccacgg

SEQ ID NO: 215323 - RNA, 76 nt, Homo sapiens
ggagaggcggaccggaccacggcgcggagcgccgccagaggagaaggagaagacagaggagccagaccaagagaca

SEQ ID NO: 215324 - RNA, 83 nt, Homo sapiens
agaacacaagccacgacgaaaaagaagcccaaggaccgaaggagaagaaggagaaggggaggagaaggcaagccggaaagagc

SEQ ID NO: 215325 - RNA, 73 nt, Homo sapiens
acacacacgggcgacgcagaccggaaacaggcacagaacagaaggaaaggacgaagagcccaggaacaccgca

SEQ ID NO: 215326 - RNA, 106 nt, Homo sapiens
agcaagacgaagaccagacgaggacccccggaaaacaggaacccagacacccaggaagaacgaggaaagcacagcgacaaccgaacacaaccgagggcgagaacca

SEQ ID NO: 215327 - RNA, 60 nt, Homo sapiens
cgcagccaagcccggaagacgcgaccgggcaccggcgggacaagcagaccggaagaccga

SEQ ID NO: 215328 - RNA, 84 nt, Homo sapiens
aaacgacaacacacggacagcaccaaacggagagagccgaaaacgcaaggccgaagccaaagccagggaaaaagaacgaagacg

SEQ ID NO: 215329 - RNA, 65 nt, Homo sapiens
agacccacaggaggggcgacgacgccggaccaggccagaccggaaaaggagaaagaaacaacgag

SEQ ID NO: 215330 - RNA, 82 nt, Homo sapiens
gcgccgcggggagggggcccgggcgccccgcagccccccaacaccgcccgccaggacgacccccccgccccccccgcagcgc

SEQ ID NO: 215331 - RNA, 74 nt, Homo sapiens
gcgaaacgcacgagaaggacaaacagaggaggcagagcccgcgcggggcagacccacgcggacgacagccggcg

SEQ ID NO: 215332 - RNA, 79 nt, Homo sapiens
aagaaaagggcgccaacacgaaaaggaaagcgcaggcaggagaaggacagcagagccacaagggacgcaaaaagaaggg

SEQ ID NO: 215333 - RNA, 78 nt, Homo sapiens
cgaaaggcacaggaccaggcacgccgcaccgacaagagccccaggagaagcccacaggccccaacaaaagcccaagca

SEQ ID NO: 215334 - RNA, 67 nt, Homo sapiens
ggcacccacgaaacaacagagaccaccagggggaagaggaagagcagaaggaacccgcaaccgggaa

SEQ ID NO: 215335 - RNA, 79 nt, Homo sapiens
ggacccaacgggaaaggaaggggacccacgagcagccaaaaaaagaagcaaaagacgcagaaacaaccaccaaacagag

SEQ ID NO: 215336 - RNA, 81 nt, Homo sapiens
agaagagacggcaagcagaagacagcggacaggagagccacagcgaaacaacacaaacaaaaagagaacaaagagagaaag

SEQ ID NO: 215337 - RNA, 39 nt, Homo sapiens
gcgaaaacaggggaggaacgaggaagaaacaagcgagag

SEQ ID NO: 215338 - RNA, 88 nt, Homo sapiens
ccaaagggggccaccggaggcgggacacccagcaccccacgcccggccgacaagcacgcaagcccaggcccaggcccaaggccaagga

SEQ ID NO: 215339 - RNA, 71 nt, Homo sapiens
cgccgccgaacgccgcccgcacgccgccggcacagaaaccacgagcggggagaaacagcaaggagaacaaa

SEQ ID NO: 215340 - RNA, 90 nt, Homo sapiens
ccggagcgcccgcgccagccgcgcacaacggggcaccgagccgcaaagggggagcgccaggagagaagagacccggccaaaacacagcaa

SEQ ID NO: 215341 - RNA, 57 nt, Homo sapiens
aggccagccacccgcgggaacggcagggaccggccccgccgaacgccacggcgcccg

SEQ ID NO: 215342 - RNA, 83 nt, Homo sapiens
acagggaaggcacacagcagggcacacagggaccaagaagccccggggacacgcgagaaaagacgccgaagggaagaccagcg

SEQ ID NO: 215343 - RNA, 64 nt, Homo sapiens
ccccacacaaacccaccaacaaggagacccgggaggaccaagccgagagaaagacgagagcacc

SEQ ID NO: 215344 - RNA, 77 nt, Homo sapiens
ggacggaaaacggcacgaaggagaaacgggagagaccaaagacggccccaggaagcagaggaacgacgggagaggga

SEQ ID NO: 215345 - RNA, 75 nt, Homo sapiens
cccggccaagagcgacaggaggagacaggcgagagaggaggacacgaccgaaccgcaaagaagccaaaaacaaca

SEQ ID NO: 215346 - RNA, 80 nt, Homo sapiens
cagcacggagagaggaggccgcgagaccaggggaccaggaccccaggaagacaaaggaccagggaagaaccggggagaaa

SEQ ID NO: 215347 - RNA, 56 nt, Homo sapiens
aaaaagcccaccacccgaagacgaagggggaccacgcaggaacaacacacgaacag

SEQ ID NO: 215348 - RNA, 77 nt, Homo sapiens
gcccgggcgcgggggcggcggcagggggcggagcggaaggaaacccgaccgccccaggggcacagcaggaccagcag

SEQ ID NO: 215349 - RNA, 80 nt, Homo sapiens
aaacgggcgaagcgacgagccgcgaggagaacccagcggggccgccccacccgaggcccaccccaacgagccagccaggc

SEQ ID NO: 215350 - RNA, 85 nt, Homo sapiens
accccacgcggggggggccaagagacagggcacaccaaacccacgggcagcgggggcagagacggggaacagggccacccacacg

SEQ ID NO: 215351 - RNA, 76 nt, Homo sapiens
agcaaaggcaggggaggaagccacccgagccccaggcaaaagaagaacgaagcacaaaacccgggcagacaggaag

SEQ ID NO: 215352 - RNA, 78 nt, Homo sapiens
caagcagcaccacagcacagcagcaccacagagcaaaaaagcaaaagaaggaccccagcaggaaaagcaaagcaagag

SEQ ID NO: 215353 - RNA, 77 nt, Homo sapiens
cagcgcgagccaggacccgggcccaggcaccacaaccaggggccagaggcgaggcgccccagagacccgaacacccc

SEQ ID NO: 215354 - RNA, 71 nt, Homo sapiens
cggcgccagagccggggacgaaagggaaggacaggcagagcaaacaagagccggggccggacgagaaagcc

SEQ ID NO: 215355 - RNA, 76 nt, Homo sapiens
aaggccaccgagggaacccgaccggacccagccccagaagaaggccggaaaaagaacccccccgagaaacggcaag

SEQ ID NO: 215356 - RNA, 71 nt, Homo sapiens
ccggagcccccgcccaaggagaagcgcccaagcggacgacacaaaccgacccagcagaccacgggagggga

SEQ ID NO: 215357 - RNA, 77 nt, Homo sapiens
gggaacgcaggacccaaagcgcggaggacccacaggagaggcacaggaccagaccaagacacacaaccaaacaggag

SEQ ID NO: 215358 - RNA, 78 nt, Homo sapiens
gagcggaggcggcggccgaggagcgggggcgcaccagcagagaacggacacgaagcaacagacacacagagaacccaa

SEQ ID NO: 215359 - RNA, 55 nt, Homo sapiens
gccagcgggaacagcgcggggagcacagaagaggccccaggaccggcgaggcccc

SEQ ID NO: 215360 - RNA, 74 nt, Homo sapiens
cagccgagaaccggcccacccaaggacagggggacagggccgccgcaccccagagcccgaagacaaggggaaca

SEQ ID NO: 215361 - RNA, 86 nt, Homo sapiens
cccgcccccccaacacgacccgagaccccgaaaagcgccgcagacagaagggggagaagcggagggccaaccgccccccagcagca

SEQ ID NO: 215362 - RNA, 89 nt, Homo sapiens
cgccgagccgggccgcggcgccgagcgaacggggagccgagcggagcgccgcggcgcagccagcacgagccagggagccgccgggaccg

SEQ ID NO: 215363 - RNA, 78 nt, Homo sapiens
ggaggcggcgcaccagcacccgcccacacccagagagcccaggcgcccagaacaacgacaaaggcagagagcagaaga

SEQ ID NO: 215364 - RNA, 73 nt, Homo sapiens
aggaacagagcgagggaggagagagggagagccaaagaagcggaagccgcagaaggaccggccagaagcaagc

SEQ ID NO: 215365 - RNA, 69 nt, Homo sapiens
gcaagcaacccgcccagccccaagagcgggacacaggagaagacagaggagccagaccaagagacagca

SEQ ID NO: 215366 - RNA, 68 nt, Homo sapiens
aggccgcgaggacccacaagaaccgagaggaccaacaccgcagacgaaggaagcgcacaagccaaagc

SEQ ID NO: 215367 - RNA, 75 nt, Homo sapiens
cgcccgcccgaggacacgggagcgggcagcggaagcgagggccgaccaagcagaacccgagaagagccgagaaac

SEQ ID NO: 215368 - RNA, 77 nt, Homo sapiens
ggggagcaaaacaacaaccagccaaacagaacaaaggaagaggaacccgaccgaaaagaaggaaaacacccggcagg

SEQ ID NO: 215369 - RNA, 79 nt, Homo sapiens
gggggagcccggagggcgggcccagggggggagagccccggcagaaggacgcgaaagaagacagacccagagagaacac

SEQ ID NO: 215370 - RNA, 97 nt, Homo sapiens
cggggccccgagccaacaccggggaaggggccagggcacggacaacgcggcccggcggacaggacccgcggccgagagacgcggaggagcggacgcg

SEQ ID NO: 215371 - RNA, 61 nt, Homo sapiens
cgggacgcgcggcggcaccgggaggccgggccgagcggaaaaaacgcgacggcgccacgcg

SEQ ID NO: 215372 - RNA, 80 nt, Homo sapiens
gcacaaacagaaaaggaaggggaagaagaacaaaccccgaggaccgccgcccgggggcaccgacaggacggaccacccac

SEQ ID NO: 215373 - RNA, 84 nt, Homo sapiens
gagaaaaacccgaccccccagggcagagacaagaaagcgcaaggaagccgaccaacggacccagaagagagaagaacacgaaga

SEQ ID NO: 215374 - RNA, 82 nt, Homo sapiens
cgagggccaagggcgagccgccggcaggccggcgccggagggaagcggacacacaggacgagaaacccgaccacacccaggc

SEQ ID NO: 215375 - RNA, 55 nt, Homo sapiens
gaagcagaggagagacccgaccagaaaccccagcacaccaggcccaggaaagccg

SEQ ID NO: 215376 - RNA, 53 nt, Homo sapiens
agaccccgacccagaaaacgagagacgagaagcgcaaagagaaagagccaacc

SEQ ID NO: 215377 - RNA, 73 nt, Homo sapiens
gccggccggcgccccggggcccaaggccagagaacccaaaagcaaacccaagaccgaaagaaacccgggaaag

SEQ ID NO: 215378 - RNA, 75 nt, Homo sapiens
ggacgccaccgccccacacggcggagaagcagcggggggccacgcgacaagggagaaaaggcccgccaaagagca

SEQ ID NO: 215379 - RNA, 50 nt, Homo sapiens
gcaaacggaccagaccgaccaccaaaagaagaagccaaccgcggcaggga

SEQ ID NO: 215380 - RNA, 57 nt, Homo sapiens
aggccaacccaggaggaggagcaggcagcggggcggaggccgcaccgccgagagcgc

SEQ ID NO: 215381 - RNA, 71 nt, Homo sapiens
aaggaccaagaaccaggggagaacgaccaggagcggccgaggaccgcgcggagccagaagggggcgagcgg

SEQ ID NO: 215382 - RNA, 78 nt, Homo sapiens
ggcgagcccgcaaaagcagcacaaaaagaaacccgaaaacccagggagaagagcagaagaagcggaaagaggagcagg

SEQ ID NO: 215383 - RNA, 71 nt, Homo sapiens
cggcaccgacccaccccccgccgaagcgcacagacacagagagccacaaaagaaggaacgacggaacaaca

SEQ ID NO: 215384 - RNA, 93 nt, Homo sapiens
cgcaagaggcagaggagggaacagggaagcaaaagcaagggacagcagaagaggaagaggagaccgacaacgaagaccccaggacacgggacc

SEQ ID NO: 215385 - RNA, 73 nt, Homo sapiens
agcgagccgaaagagaaaaagcggaaggccacacgaggagccagccccacaccgacaacaccagcccgcacac

SEQ ID NO: 215386 - RNA, 66 nt, Homo sapiens
accaacaacaccacaaaaccacagccaagaccaggaggcagaaggcgaggacgagaggagacaaga

SEQ ID NO: 215387 - RNA, 73 nt, Homo sapiens
cagcccccgagggcgggaacagcgcagaagagaagcacgaaaacgcaggacagagaacgagaggaaccgcgac

SEQ ID NO: 215388 - RNA, 73 nt, Homo sapiens
caagacgcagccagagaacggcggcaggccagggccgagaaaggaacccaaagcacaaaggcggaggcgggcc

SEQ ID NO: 215389 - RNA, 75 nt, Homo sapiens
gcgcgaacacccggcccaggagcgacgccagaaacagccaccagaagaccacgaaaaacacacaacacgacgcag

SEQ ID NO: 215390 - RNA, 72 nt, Homo sapiens
aaacgacccagccaaaggaacacaacagggccaccaaccagaggaagacccagaagaaggaggggggagagg

SEQ ID NO: 215391 - RNA, 52 nt, Homo sapiens
acgaacagacagcgagcgcacacagcacacggcaccgggcacacggggaacc

SEQ ID NO: 215392 - RNA, 74 nt, Homo sapiens
cagcaagccggaccacccacgagccccagacacagcaggccgaaaagaggaagaccaggcgggaggagggaaag

SEQ ID NO: 215393 - RNA, 68 nt, Homo sapiens
cccccgaagcgggaacagcagcaagcccagccaacaggggcgagcaccccagcgcaagagggcaggaa

SEQ ID NO: 215394 - RNA, 77 nt, Homo sapiens
ggccgcggccggacccagcaaggcgggccgaggagaacgggacccgcaccacgggagaaccagacgcgggccgggac

SEQ ID NO: 215395 - RNA, 72 nt, Homo sapiens
gcgcagaagcccgaagaaaacagcgggaagagacagccaagagaagcacgaacacacaaacggcacaaacag

SEQ ID NO: 215396 - RNA, 85 nt, Homo sapiens
aggagagcaggaggagagaggaccagagcaacacagcacccggcggcaaaccaaacaaaaccagagcacggggaaaagaaccggg

SEQ ID NO: 215397 - RNA, 89 nt, Homo sapiens
gggacgccgaccgccgggacgagacagcaagaaagcaccagccaagcagaagggagccagcggacgagggcgccaggccagggcagcgg

SEQ ID NO: 215398 - RNA, 82 nt, Homo sapiens
acgcgggggagaggcgcagggacggcacgggaccacccgcaaggacccggaaggccggggggccgagaacccaccaaaccaa

SEQ ID NO: 215399 - RNA, 73 nt, Homo sapiens
ccgggccagcccacgagagaaccccaggggcgccgacagcgagagcgcaccgcggcccggcaacaagggcgcg

SEQ ID NO: 215400 - RNA, 60 nt, Homo sapiens
gcccggaggcgcacggagagcgggcccgcgcagcgccagcgccccggagggcgccccacc

SEQ ID NO: 215401 - RNA, 74 nt, Homo sapiens
gccgcggacccgggcccaggcgcgcagcggaacagagggacaaaaggacgacacccacggaagccggagaaaac

SEQ ID NO: 215402 - RNA, 78 nt, Homo sapiens
gcaccaccaacaagcccaacaagcacgggagaccaggaaagaggccccaggagacgcacagaaggaaagagacaaagc

SEQ ID NO: 215403 - RNA, 49 nt, Homo sapiens
ccacgagaaggaagaggacggaagcaaacagaggcccagaccccggccc

SEQ ID NO: 215404 - RNA, 69 nt, Homo sapiens
cggggccgaagccccgccgcgcgagccagcggaacgaaagaaaagaggaggcgagcgggaacaagcaaa

SEQ ID NO: 215405 - RNA, 132 nt, Homo sapiens
ggcaggagggccgcaagacccaagaagaagaaggcgaaggaccccaacggggaggccaacggaagaaacagagcgccgccaccgccgccaccacggagcgagaagcccagaagacgccccggcggccccggg

SEQ ID NO: 215406 - RNA, 81 nt, Homo sapiens
ggaaccaccaggagacacgaaacgaacgaacacgagcggggagcgggcgcgacggccccgcgggagacaacaccaaagcgg

SEQ ID NO: 215407 - RNA, 66 nt, Homo sapiens
gggaaaccggacgagagccggccgcagagccaaggggcacgcaggcaaagaaaccccaaagccagc

SEQ ID NO: 215408 - RNA, 87 nt, Homo sapiens
caagaccaggccgcaggaaccccagagagcagacaggagaccgggcacggagcagccaggccagcgggccaagaccgaacggcgggc

SEQ ID NO: 215409 - RNA, 79 nt, Homo sapiens
ccgagcagccggccgccagccgggagaagacagagaagacagaggagccagaccaagagacagcacaggcgagcgagca

SEQ ID NO: 215410 - RNA, 118 nt, Homo sapiens
cggcggcggcggcggcggcgcgcgggggcgacgcgcgggaacaacgcgagcggcgcgcgggacgaagaaaccaaagagccaggcgacccccgcgcccgaggcccagaaggggacaagc

SEQ ID NO: 215411 - RNA, 87 nt, Homo sapiens
aaaacacgggcccgacgacccagccaaaacagagggagacgagaaaagggccgagcacaagccaagaaggcgccccaaagcagcgac

SEQ ID NO: 215412 - RNA, 84 nt, Homo sapiens
cggacagggcgaaagccgaccacccggcgaagacgcaaacagcagacggaagaccccacggcaaaaccacacccgaggcgagcc

SEQ ID NO: 215413 - RNA, 86 nt, Homo sapiens
aaggcgggagacgagaagccgaaaagcgcagcgagcggagccgccggagagaaacccagaaaacgccaaaccgaccaggagaaaaa

SEQ ID NO: 215414 - RNA, 75 nt, Homo sapiens
ccccgcaagaaagcccgcaaccggacacgcaaggaagagacagaggagaaggagaaaaaaccaggggaaaccaaa

SEQ ID NO: 215415 - RNA, 58 nt, Homo sapiens
cacagccagcaaccagagggaaagcaaacgccgaagccgggccgagccagggccccca

SEQ ID NO: 215416 - RNA, 75 nt, Homo sapiens
ccgggccacgaggacgcaccagcaagaaaagccaggcccgagccggaagagacgcagaagaacgaaaagaccacc

SEQ ID NO: 215417 - RNA, 82 nt, Homo sapiens
cggcccgcccgcgagggcacaagaccaccaagagagcgcgcggggaccacgccggaggcgccggagagacccaagaagggga

SEQ ID NO: 215418 - RNA, 48 nt, Homo sapiens
gagggcccaagagccagccagcgagacacagccagcgcgccagaaacc

SEQ ID NO: 215419 - RNA, 63 nt, Homo sapiens
cagaagaggccacccagccaccagaagccgggaaagacaagcacggaccacgccaagcgagaa

SEQ ID NO: 215420 - RNA, 86 nt, Homo sapiens
acggagggcccagccaggcaggaccccccccggcgccgcacgcacagggaaaggaggagaagaacaagaggccaacagcagacggg

SEQ ID NO: 215421 - RNA, 57 nt, Homo sapiens
ccacaaggaaccacagcaggcaaaagcagcgcggagggagagacaccacgaggagca

SEQ ID NO: 215422 - RNA, 78 nt, Homo sapiens
ccgaccccgcggagacagcgagacccgccaggagcaaagaccggcaacagaccgcagaccaaagcgaccgaggcacag

SEQ ID NO: 215423 - RNA, 70 nt, Homo sapiens
acaggaggagcagaggacacgaaaagaagcaagaaggccggaagaaacgcggaccgcggagggccggaga

SEQ ID NO: 215424 - RNA, 64 nt, Homo sapiens
gcggggggaacggagcgcagagccgcggccggcacgggaaaggggaaaagaaacaaacaacaag

SEQ ID NO: 215425 - RNA, 78 nt, Homo sapiens
aacaagagaaagacgcccgagaaccaggagcggcagaccgccgccaggaggaggcacgcagcccgagaaggagccacg

SEQ ID NO: 215426 - RNA, 81 nt, Homo sapiens
gaccaggagaccggcgcaaggcccgagaaaagaaacgaagccgggcacggacaggacagagaaagcaggcgccagcgaccc

SEQ ID NO: 215427 - RNA, 71 nt, Homo sapiens
acggaccacgggaccaagcagacaaaccaagacgaacgaagacaaagcaaaaccacaggagaaacagaaac

SEQ ID NO: 215428 - RNA, 91 nt, Homo sapiens
aagagcagaaaaagcagccaggaaccaagaaaacggcccccggcagagggcagagagaggccggcccaaggcccggggcgcgaccagcgcg

SEQ ID NO: 215429 - RNA, 71 nt, Homo sapiens
acggaggaggaggggggcgaggaaacgcagaaagcgcagaccaggccggaaaaaccccgaaggacgaccaa

SEQ ID NO: 215430 - RNA, 72 nt, Homo sapiens
cccacccggggaacaagacaacccccggccgggccgccacgcccccgcaaaggaaacgccaagagcgagcgg

SEQ ID NO: 215431 - RNA, 80 nt, Homo sapiens
ccagagaagaccaaaagaggaagcaaagaggaaacacggaagcacagcaaggcgagagacgccagagcgcggagcagcgg

SEQ ID NO: 215432 - RNA, 41 nt, Homo sapiens
ccccacacaccgcccagggagggcccgacaagagaggcgga

SEQ ID NO: 215433 - RNA, 72 nt, Homo sapiens
cgagggggaccgccggggggcgccacagcccagcggcggcaggccaaaagagccccaaaaacccacacggcg

SEQ ID NO: 215434 - RNA, 110 nt, Homo sapiens
ggcggccagggacccaaagagagaaaaaagccgcccacaaggagagcgaccacgggggacagagacagcaagaagaaagacaccgacagaagaggaaacacagcacacag

SEQ ID NO: 215435 - RNA, 80 nt, Homo sapiens
agagcgcacggcgacgccccaggggaaaacccccgggaccagggagcaggaagaagagagccaagcgaacgccgaggaac

SEQ ID NO: 215436 - RNA, 76 nt, Homo sapiens
acaggaagcagagggcagggggcaaacaagccgaccggaaaaaggcgcgacgagaaaccaaagaaaaaggaaacaa

SEQ ID NO: 215437 - RNA, 75 nt, Homo sapiens
gggcgaggcccgcggggccaggaggaaagaccacagcaagaccacgcccccagccgggggaccaggccgaacgac

SEQ ID NO: 215438 - RNA, 69 nt, Homo sapiens
gaacaccccacagggaagaggccacccgacaccaccgaggaagccgacagacggaaccaaggagaaaac

SEQ ID NO: 215439 - RNA, 74 nt, Homo sapiens
aaggaagggcgggaccaacagggagccaggaagacacaaaggaaaccgggcccaaagggaccggaccccacaac

SEQ ID NO: 215440 - RNA, 69 nt, Homo sapiens
ccaggacggggcggaacccacagacaagcagccaggggaaaggacaagggacagcagccgcagaagacg

SEQ ID NO: 215441 - RNA, 77 nt, Homo sapiens
gcaagagcaggacggaggacggcaaagagggaagcagacaagagaaagagcacgcaaaagaggcgagaaggagaggg

SEQ ID NO: 215442 - RNA, 74 nt, Homo sapiens
gagagccccagccaggaagaaaccacaaagcacaggcaaaggaagcaccgcacacagggggcgaggaagagaca

SEQ ID NO: 215443 - RNA, 90 nt, Homo sapiens
caacaagcggcggagcaagaggcggcagaagcagcggcccaggcgccagcagcccaagagcccaaaggccagacagccaccaaggacacc

SEQ ID NO: 215444 - RNA, 77 nt, Homo sapiens
gccgcccggggcagaccaggcagggcagcgggcccacggcggccagaagaaggggacgggggacaagggggcacaag

SEQ ID NO: 215445 - RNA, 63 nt, Homo sapiens
ccgacaccaggggcccagccggcagcggcccagaggcgacacaccaaagaaaaaacacaccaa

SEQ ID NO: 215446 - RNA, 82 nt, Homo sapiens
caggagcgagcgccccgccaggaaccccgaggggggacggaagcggcagcgggcagccggcccagcacagggagcagaaccc

SEQ ID NO: 215447 - RNA, 70 nt, Homo sapiens
ccgggccggccagcgccggaaaccaacaacaccacacccccaaggcaagggcgcaaagccaacaacgagc

SEQ ID NO: 215448 - RNA, 85 nt, Homo sapiens
gaaaagaaacacagggacccaggagccgcgaacgcaagaagagggcgcaaacgcgggcacagccagccccccaacgacccacgga

SEQ ID NO: 215449 - RNA, 61 nt, Homo sapiens
cagagagcgggcgggggggccgggggcacgaacgaaggagagacgagcgcaaacgacaagg

SEQ ID NO: 215450 - RNA, 55 nt, Homo sapiens
caagggggggcacaaaagcaacacgaagaaggaaccagcaaagcgccacgaagca

SEQ ID NO: 215451 - RNA, 79 nt, Homo sapiens
gcgagccgcccccaggccgcgccgagcccgccgcgcgggcccgcccgacgcggaagaggcgggcccgagaaagacacgc

SEQ ID NO: 215452 - RNA, 74 nt, Homo sapiens
cacagagggccgaccaacgaccacccgaccccagcaaacaacacagacaagaaaaaccaaaggacgcaaaaaag

SEQ ID NO: 215453 - RNA, 55 nt, Homo sapiens
aaaccgaaagaagaagaggagaagaaaagaccagacgaagaagagagggcgaagg

SEQ ID NO: 215454 - RNA, 74 nt, Homo sapiens
gggcgggagccgcgcacaccaccacacccaggcagcacggggcaggacaccagaagagccaagccaacaacgag

SEQ ID NO: 215455 - RNA, 80 nt, Homo sapiens
cgcccggcgcagcggggaccggcggcggcgcccaggcacccggcccggagccagggacacccagcacgccggaaggccgc

SEQ ID NO: 215456 - RNA, 73 nt, Homo sapiens
gacgacagcagcccacccgcagcgggaacaggcagcgagaggaagaaaggacacaaagcagaagaaaagccac

SEQ ID NO: 215457 - RNA, 56 nt, Homo sapiens
aaagagagggggggaccgaccgcaacagaacggacccggcacagagcacaggaagg

SEQ ID NO: 215458 - RNA, 55 nt, Homo sapiens
aggaccggcaggaccgacgagcccgggaggcacagcaaggcggggcgggcacaga

SEQ ID NO: 215459 - RNA, 78 nt, Homo sapiens
acacaccacccaggcaaacgaccaaagacaagaaggagggggagaaagcccgagcaccacaacaagaggaaaacagcc

SEQ ID NO: 215460 - RNA, 81 nt, Homo sapiens
gccaaacaccaccgaacaaccgcgggagcacgcccagagcccgagacaggaggaggaggagagaaagaacccacgcaggac

SEQ ID NO: 215461 - RNA, 78 nt, Homo sapiens
aaccggcaagaccagacgggaacgggagacaagcgcagcgagccggccaggggcaaaggagaggaagaggaagaggaa

SEQ ID NO: 215462 - RNA, 76 nt, Homo sapiens
cgcccgagacacacagcgccgggggccgggagcccaaggaaagggagcgggggaagagcagccaagcggcagaagc

SEQ ID NO: 215463 - RNA, 63 nt, Homo sapiens
aagaaccgagcgacagagacaagcgagcgccgcacaaaaagcagagagagcaagacagagccc

SEQ ID NO: 215464 - RNA, 80 nt, Homo sapiens
gaagcgcgccaaggacccagccggagacggcgaggaagaaaggacccggcaggagcgcggccagccggccacagagccag

SEQ ID NO: 215465 - RNA, 74 nt, Homo sapiens
cggccacggagcgggggcccggggaggaggacaagagaaagcagaagggaaccagaccgggacagagcccgcac

SEQ ID NO: 215466 - RNA, 82 nt, Homo sapiens
cccaaggagccgcggcgcggcagcaggggacagcggagaggacagagcgggagccaccagcgccaaagggaagccaggagcc

SEQ ID NO: 215467 - RNA, 59 nt, Homo sapiens
aaagagcgaaggccaaacgaagaaccccggaaagggacagggcagcggccgagagcccg

SEQ ID NO: 215468 - RNA, 85 nt, Homo sapiens
gaaccgccgggccgaacagcagacgccgcggagaacacacaaccacaggcacaaggaggacggcagcccaagagcccgacgcccg

SEQ ID NO: 215469 - RNA, 80 nt, Homo sapiens
ccgccgcagacacgggacccgccgaggccgcggcgccaaaccgaggaaaagcggccaggaccaccaggcggccacgggcc

SEQ ID NO: 215470 - RNA, 72 nt, Homo sapiens
cgccacccgggcgacgccggcccccacgcgcggacagccggaaaaagaacgaccaggacacagagcggccca

SEQ ID NO: 215471 - RNA, 44 nt, Homo sapiens
aacgaggcaggaacacaagaccagcccgccgcacccagggaaaa

SEQ ID NO: 215472 - RNA, 46 nt, Homo sapiens
gaaccgccaaagcgcgcagaaaagagacacacaaaggaagcaaagc

SEQ ID NO: 215473 - RNA, 36 nt, Homo sapiens
gccaccaccccgcagcccccaaaacaaacggagaga

SEQ ID NO: 215474 - RNA, 46 nt, Homo sapiens
cccccgaaggaggacccggacagcaagggccaagccgccccgcaga

SEQ ID NO: 215475 - RNA, 63 nt, Homo sapiens
ccgcggccgggagacggaagggaaggggacaggcggacagggcgaaacaaccaaggccgacac

SEQ ID NO: 215476 - RNA, 58 nt, Homo sapiens
ggcacaccaggcggcaggggcaaccagacgggccaaggagccgggcgcgagcagcgcg

SEQ ID NO: 215477 - RNA, 76 nt, Homo sapiens
cacacgagccccagggagaacaaggcggaccaagcacaggacacgggaaaagaaaacaacaaagcaaagagagaca

SEQ ID NO: 215478 - RNA, 70 nt, Homo sapiens
cccagcgaccgacgaccggcaagaacggaagcacgggcggaggaaagcacaagcagagcccccgcagagg

SEQ ID NO: 215479 - RNA, 82 nt, Homo sapiens
aagaagggccgggggcgagccggagcgaccccggcaggccggcaaaacggccgggacaaacaagcccaaccgccaaacccgg

SEQ ID NO: 215480 - RNA, 73 nt, Homo sapiens
caggcagaaaaggagaccaacgacaaaaagaaggcagagggggcgagggaggaaagggggcaaaacgacgaag

SEQ ID NO: 215481 - RNA, 76 nt, Homo sapiens
aaccaggccgagcaggcagcagccagaaggagaagaaggccacacgaaagggaggagaacaccaaacagaggaaca

SEQ ID NO: 215482 - RNA, 44 nt, Homo sapiens
cagcaggaaaaaaggaagaaggaagcgagaaccagaagccacag

SEQ ID NO: 215483 - RNA, 58 nt, Homo sapiens
cacaccagcaggcgcagaacgagggacaagcagcccagagcacaaccaaagcccgaaa

SEQ ID NO: 215484 - RNA, 49 nt, Homo sapiens
gccgaacgagccccagccaggcagccagggagagaagaccggcaggagg

SEQ ID NO: 215485 - RNA, 87 nt, Homo sapiens
cgccgcgcgaggaaaggccgaggagccggagccgcaggacagcccagagcaagcacacggaggcccgggagccagaccgggagcccg

SEQ ID NO: 215486 - RNA, 51 nt, Homo sapiens
ggagcagcagaacgaaaagaccggagagaacagaaaaaaagcggcccggga

SEQ ID NO: 215487 - RNA, 77 nt, Homo sapiens
aggacgccagaccaaaagggagaagacgcaggaacccgaggcgccgccaggagcaaggcagcgacccagggcacagc

SEQ ID NO: 215488 - RNA, 82 nt, Homo sapiens
gcagagcccacaccacgggagcggagccggcccaggagcagcagggaggcgggaacgcccagggagcccccgcccccaggag

SEQ ID NO: 215489 - RNA, 75 nt, Homo sapiens
caaaagaaaaacgggaccgcaacgacaagcacccccacagcccagcgagccagaccagacccaggggccaccgag

SEQ ID NO: 215490 - RNA, 79 nt, Homo sapiens
cagacagcggccaagaagacacaaaggacggaggcacgaacaaaaccagccaagcagaggagaaaaagacagcacccca

SEQ ID NO: 215491 - RNA, 72 nt, Homo sapiens
cagccagcacaccccgcgagcaagaagagcacaacacagaagaaacggcaagcaaggacgaacacacaagcc

SEQ ID NO: 215492 - RNA, 73 nt, Homo sapiens
aacgagcaagccacacgcaacacacagcgaagaggggaacgagaagccacacgcagccacaggaaccagccag

SEQ ID NO: 215493 - RNA, 69 nt, Homo sapiens
ccagaggccgcgaaaggaaccagggcgggaaggagaagacaaccaagaggagagagcccacaggacggg

SEQ ID NO: 215494 - RNA, 76 nt, Homo sapiens
cccagccccaggcacagaccccagcgaggcaccgccagggaggagagcggggcacgcgcccaacgcgcaagaagcc

SEQ ID NO: 215495 - RNA, 54 nt, Homo sapiens
acgcgcggaaggcagcgcccagcagcgcaggcggggccggggcgggcgggaagg

SEQ ID NO: 215496 - RNA, 86 nt, Homo sapiens
gaagcggaaggaagaaacgcgccggacaaggagaacaccggaagggagaagggagggacaccgccaaacaaggaccgaaaggcggc

SEQ ID NO: 215497 - RNA, 77 nt, Homo sapiens
aggaagagcagagagagacgcagaccaggagagaaggagccacagcaagcccacagagacgccggcccaccagccag

SEQ ID NO: 215498 - RNA, 73 nt, Homo sapiens
gcaggcgacggagcaaccgcagcgaagcgagagagggaccggagggccgggcaagccggggccaggcgagccg

SEQ ID NO: 215499 - RNA, 78 nt, Homo sapiens
acaggagcccgggcagccacaaacaaaccgagggaacagggggcaccgaggaggccggaaggaaccaaggaggagacc

SEQ ID NO: 215500 - RNA, 86 nt, Homo sapiens
ggagcccgaacccccccgcgccgggagccgggcccgaccagaccgggcagagccagaggccaagaagagaagacggccgcaaagaa

SEQ ID NO: 215501 - RNA, 69 nt, Homo sapiens
gaaggaccaagaaccagaaggacagggcgaaccccgcgccccgcagcggagagcgcggccgaggcagaa

SEQ ID NO: 215502 - RNA, 80 nt, Homo sapiens
gagagagacacggacaaggaggagagaccgccgggcgcaggcacaggaacaagccaccacccagggcaagcccaacagcg

SEQ ID NO: 215503 - RNA, 73 nt, Homo sapiens
gaaaaacgaaagaaagggagacagggacaaagacggaagagaaggaccggaacagacaacaccgaaacgaaga

SEQ ID NO: 215504 - RNA, 40 nt, Homo sapiens
agcagacaaaggagcgcaggcaggcgcccacgaggccccc

SEQ ID NO: 215505 - RNA, 69 nt, Homo sapiens
gcggagaagggcagggcgagcgcccccgccagggccgaccagagcagcagccgagacaagacccaccaa

SEQ ID NO: 215506 - RNA, 86 nt, Homo sapiens
cagccgcgagccccgcaccccgagagcggagaagccccagccaccagaccagcaagcaccagccgcgggccaggacccgcccagcc

SEQ ID NO: 215507 - RNA, 60 nt, Homo sapiens
aggagaaacaagaaccgaaacgggccgcccgcgcgcccccacaggaagccggagggcgcc

SEQ ID NO: 215508 - RNA, 101 nt, Homo sapiens
cgaaccacgcgaggggcgggagccgcgcacaccaccacaccaacacagaagggaacaagcggacagaaaaagagaacaagccccggccagaaagaccagaa

SEQ ID NO: 215509 - RNA, 80 nt, Homo sapiens
gggacgcgcgcgggcacccacggagccccggggcgagcggcgggaggggaaggagcagccacccgggcagaaaggccggg

SEQ ID NO: 215510 - RNA, 74 nt, Homo sapiens
caagaaccccgcacggacagcgacccgccccacccgcagcagaacaagacagaaggagcaaagagcacggaaag

SEQ ID NO: 215511 - RNA, 76 nt, Homo sapiens
acgcgcgccgcagcgccgccgcccgcggaagggagcccaagcgcagaggcacaggagggcagaccaaaagcacaaa

SEQ ID NO: 215512 - RNA, 73 nt, Homo sapiens
gccaacccgccgcgcaccgacccgacgcgccggcccacgcgcggccaagccgaacacccaacaagaaggcaac

SEQ ID NO: 215513 - RNA, 72 nt, Homo sapiens
agcgagccagcagagaagggcaaaacgaaaggagcccaaagaacagaggcaaacggagaggcaagaccagca

SEQ ID NO: 215514 - RNA, 72 nt, Homo sapiens
gagagagagcaagcgcagcgccacaaacagggaaagacaaggagccgggccgagaaaccgaaccagagacca

SEQ ID NO: 215515 - RNA, 82 nt, Homo sapiens
cccaggcgccagcggccagcagccccccggcccccaaccagcagcacagcgcacacagcgggcaaaggcaaaccaaacgcaa

SEQ ID NO: 215516 - RNA, 72 nt, Homo sapiens
cccgagccaagcaggaaggcccagcaaagagaagaagggggcgacgcaaacccggacacaagcagccaagag

SEQ ID NO: 215517 - RNA, 70 nt, Homo sapiens
gggacgaggaacgaggacccagggcaaagacaggcacagaggccaacacagaccaaggcgcagcaagcca

SEQ ID NO: 215518 - RNA, 81 nt, Homo sapiens
gcggccccgggcgcgggagccgggcaggacgccgagcgggacccccgccgccccgggggccggacgggacccccaccaacc

SEQ ID NO: 215519 - RNA, 77 nt, Homo sapiens
ggggagccaagcggagacacaggcaaacgcagaaaagagagccgggcgcggaaacgagggaggaggaaagacaaagc

SEQ ID NO: 215520 - RNA, 81 nt, Homo sapiens
aaggaacacgcacaaaaaagggcagaagagaagcaggaaggaggcagaggcacaccgaaaggcgcccagacgagcccacca

SEQ ID NO: 215521 - RNA, 75 nt, Homo sapiens
agggccgccaacgacaccagcccaagaagagagacaaacacacacgagagaggccaagggagggaagaggaagcg

SEQ ID NO: 215522 - RNA, 72 nt, Homo sapiens
ccagcgcgcggcgggcgaggaaaacaaagccacggaaaaacgcccggggaaaagcagggcggccagagcagc

SEQ ID NO: 215523 - RNA, 69 nt, Homo sapiens
caaaccccaaaacccgcagccggccggcggccggaaggacacagacaaaagaccaggagagagcagcaa

SEQ ID NO: 215524 - RNA, 80 nt, Homo sapiens
acggaaccagggccaggcgaggaccaacccaccccacagccggccggcagccaggagcgggagaaggcccccgcccaagg

SEQ ID NO: 215525 - RNA, 66 nt, Homo sapiens
gcggacgcggaggcccaaccgaagaaaacaagcgggaacagcccgggccgccgcacccaccgcgga

SEQ ID NO: 215526 - RNA, 71 nt, Homo sapiens
ggaggagcaggacgcagaaccaccaaaagccaagaaacggacgagagaagcccacaaaggaggaaacagaa

SEQ ID NO: 215527 - RNA, 79 nt, Homo sapiens
acaaagcagggaggcagcgccgacaacaccgacacagaccaacaagcagcaaccaccggagggcgcagagaagagacag

SEQ ID NO: 215528 - RNA, 116 nt, Homo sapiens
aaaaccgagaacccgaccccgcggagacagcgagacccgccaggagcaaaggaaccaagaagaagcaggggagaagaagaggagcaacaggaagggaagacggggaccaacaagca

SEQ ID NO: 215529 - RNA, 87 nt, Homo sapiens
aggagaaggaagaggagcggccggaaggccacgacacccaggagcacgggcccaggccacacggggcggagcccagggaaggcccgc

SEQ ID NO: 215530 - RNA, 61 nt, Homo sapiens
gacaagcaaaaagacgggaaacggcaaaggagcaggcaagaaaggacaaaggaacggaaaa

SEQ ID NO: 215531 - RNA, 37 nt, Homo sapiens
cccgggggaacccgccgccgggagccagggcaggaaa

SEQ ID NO: 215532 - RNA, 118 nt, Homo sapiens
cgcagacggcgcccagcaacacagaagccgacaaggcgcaagcgaaaacagaccgcgagcccagagagggacgaaaaggagcagcgaggaaggacaacaaaagaccgaaaagaagaag

SEQ ID NO: 215533 - RNA, 71 nt, Homo sapiens
cggccagggcagaagcgggaaggccccggggcagaagagcggcgccgaggagaaggaaaaagaccccccgc

SEQ ID NO: 215534 - RNA, 82 nt, Homo sapiens
aaaagagagagaaaaaggacaaaagccaagaggaggacagcgcacacagcaagcacgagcagcagcagaggaaaaaagagac

SEQ ID NO: 215535 - RNA, 85 nt, Homo sapiens
ccagaggcccgccccacccgcagccgcacccccggcggcagcacgaaagaccaggacaggaccagaggagaacaccaagaaggaa

SEQ ID NO: 215536 - RNA, 84 nt, Homo sapiens
gccccccgccaaggcgacccccaccgagacgaagcgggcggcgaagggcaggaggacgcggcggcggcgaggagaccccggccc

SEQ ID NO: 215537 - RNA, 60 nt, Homo sapiens
aggaggcagccaagccaggccgccacgcggccaaaccagaggagacgccaggccccagcc

SEQ ID NO: 215538 - RNA, 71 nt, Homo sapiens
cccaacgccgcccgccaccaccggagccgaccgcccaaccgcggcgccaagacgggaccacggaaggagcc

SEQ ID NO: 215539 - RNA, 55 nt, Homo sapiens
cagaagaccgcagaacaggaacgaagccgcccgaaaaggggaagaccggggcgag

SEQ ID NO: 215540 - RNA, 81 nt, Homo sapiens
agacagccagaggggacaaaaggagacgaaaacaccggaacaaaaggacggcaacaagcccagacgaagaggcgaaacaac

SEQ ID NO: 215541 - RNA, 84 nt, Homo sapiens
cagggaaggagggcgccgagcaacaaccgccgagcgggcagcgggggcagagacggggaacagggccacccacacggacgccaa

SEQ ID NO: 215542 - RNA, 54 nt, Homo sapiens
gccaggcaaggaccacacgcaggggccccggacgggcaggcagccaaccagccg

SEQ ID NO: 215543 - RNA, 76 nt, Homo sapiens
gacaggcgcggcacgggaggcggaggcgccccgccaggacaccaggagaaacgggcaaccaaggagacggaaggca

SEQ ID NO: 215544 - RNA, 59 nt, Homo sapiens
gcgcgcagcgaagcccagggaggccaccagggccccacgaaggacggccagcgcggcag

SEQ ID NO: 215545 - RNA, 57 nt, Homo sapiens
gcggcgaagagcccgcccgcccagaccagagagccaccaaagaagaccagacagggg

SEQ ID NO: 215546 - RNA, 67 nt, Homo sapiens
gagcccgcagagcaccaggcccaccggaaagaacaacagcgaccccaaggaagacaaggagaaccgc

SEQ ID NO: 215547 - RNA, 82 nt, Homo sapiens
acaccgccagcaccgaccaccgaggcggagggggagaacacccagggaagcagagagcaaccaagcaccaccaagcccacag

SEQ ID NO: 215548 - RNA, 60 nt, Homo sapiens
gggaagggccaccagaacacaagcccgcgcgagaagcggagaagcagccaggcaagccag

SEQ ID NO: 215549 - RNA, 76 nt, Homo sapiens
gcgaagggcgaaggaggaggacaaagagcccccacgagcccgcaagccagaggcccaaaacagccccagagcacca

SEQ ID NO: 215550 - RNA, 64 nt, Homo sapiens
cccagggaaccgggccgcaccacgggcagggcgagcagggccacggcggccgccagcgagacaa

SEQ ID NO: 215551 - RNA, 44 nt, Homo sapiens
gagaaggcggaagccaggacaagaaaggagcaggccagggcggg

SEQ ID NO: 215552 - RNA, 76 nt, Homo sapiens
ccagggaaagacccgagcagaggagcagggagaagagaaagagacgcaggaaccaagagacccccggaaggggagc

SEQ ID NO: 215553 - RNA, 74 nt, Homo sapiens
aagaaagggacaaagagaggagcagggagagcgggaaacagggagaaccagcaagcagagaaagaaggggagca

SEQ ID NO: 215554 - RNA, 71 nt, Homo sapiens
caggcgagccaccacagcacaggccgggaacgggaaacgcgcgccgagaagccacccgccgagagggagcg

SEQ ID NO: 215555 - RNA, 81 nt, Homo sapiens
cagccccaagacagagcgcacccggcaggcgcaacagagcgccggcggcagccagaacgaaaaggcacagagagccagcgg

SEQ ID NO: 215556 - RNA, 72 nt, Homo sapiens
cccacccagagcggcggggaaggccacccaggaaccaacagggcgaggaagagggcagcaggccgacggacc

SEQ ID NO: 215557 - RNA, 84 nt, Homo sapiens
ccccggaggcagcacgggcgaccccccggcgcagcagcacacaagggccggcccagggagaacgcaaaaccaccacccccacaa

SEQ ID NO: 215558 - RNA, 73 nt, Homo sapiens
acaaaaggagacgagaagaagacaagagcacacaggagaaagcagacgcaaggggcgaaggagggaaaacgga

SEQ ID NO: 215559 - RNA, 79 nt, Homo sapiens
cgcggggaccgcggcccgccggcacagccacaccgagaagaccggcccaagaaccccaccgcccgaagacagcgccaca

SEQ ID NO: 215560 - RNA, 79 nt, Homo sapiens
gaacccacgaagccaagacagagcaggggggccgcacacagcaggaaagaggccaggccacagggcaccacaacacgcc

SEQ ID NO: 215561 - RNA, 72 nt, Homo sapiens
gaaagcacccggccagccccggaaggaggcaacaccaccaccagaccggagagaacagaaaaaaagcggccc

SEQ ID NO: 215562 - RNA, 54 nt, Homo sapiens
gaggagcgccacacccacacacaagaaacaagcgaaccacccaccaacaagccc

SEQ ID NO: 215563 - RNA, 83 nt, Homo sapiens
caagccaggagagcccgaacggagccagcaccaaaaccgaggcagaaagggaaaggcaacacacggacaagcaggaaggaacc

SEQ ID NO: 215564 - RNA, 85 nt, Homo sapiens
ggacagcgcgggagggcgccgcggggcagccgccgcccccggggaaccacaagcagcaaggcgccaagacgagagcccaaacaca

SEQ ID NO: 215565 - RNA, 73 nt, Homo sapiens
ccaggccccccacagaaaaggaaagacgggggcggccagccaggaagaaaccggcggaagccagagagcgagc

SEQ ID NO: 215566 - RNA, 57 nt, Homo sapiens
gaagcaaaacggagccgccgcgcaggaaggacccgagaaacaaagaacacgcacagg

SEQ ID NO: 215567 - RNA, 69 nt, Homo sapiens
acccgccccgggcaccaacgggacgaagggaacccgccgggcggcccggcacccagccccccggcaccc

SEQ ID NO: 215568 - RNA, 88 nt, Homo sapiens
cgcaacggcacggaggaaggagacccagagaccaggacgacccagccaacggcaagcagcaagcagccaccagccccgaagggaagaa

SEQ ID NO: 215569 - RNA, 71 nt, Homo sapiens
ggccacaaaccggcccaacaaccacaagggcacagggggggccacccccagaggaggcagaacgaacaaag

SEQ ID NO: 215570 - RNA, 76 nt, Homo sapiens
caggaacccgccaccagaagagagccacccgcacgaggcccgcgcccacgccgcgcccgccacaccggcaaccgca

SEQ ID NO: 215571 - RNA, 36 nt, Homo sapiens
caccgcgccgcagcggccagcagggagaacaagacc

SEQ ID NO: 215572 - RNA, 53 nt, Homo sapiens
ccgaagacacgacagacccgacgcacagacggaaaccagaacgaaaacccgcc

SEQ ID NO: 215573 - RNA, 72 nt, Homo sapiens
cgcacgcccccgggagcgcgggcaaaagggacaaaacacggggagggccaagaccccacaggaggggaaacc

SEQ ID NO: 215574 - RNA, 87 nt, Homo sapiens
gaaaagaaaacccgagcgcagcagaggcaagaaaaaggccagacagggggcaggagaaacggcaaaacagagagccgcagagcaagg

SEQ ID NO: 215575 - RNA, 89 nt, Homo sapiens
cagcgagggcgccgagcaaccggaccagaggagcgagagcagcaagaaccacacccagcagcaagcagcggaagggaaacccagagggg

SEQ ID NO: 215576 - RNA, 89 nt, Homo sapiens
cggccgggaggaaaccaggacgcagagggagcagccaaggacccacccaagaggagaagcaggccgagggacacagggcgaaaggaaag

SEQ ID NO: 215577 - RNA, 110 nt, Homo sapiens
cccccacaagagaccggggggccggggggaaaggggcagcagaggcgagagggagaggggggaccgggcgaggcagcagccgcccacgagcaagacaaggcccgggccca

SEQ ID NO: 215578 - RNA, 72 nt, Homo sapiens
ggaccaccagggaccgggccaaaggcaaccgaacgccaagaacagaagcaaagagaagggacaagggaaagg

SEQ ID NO: 215579 - RNA, 77 nt, Homo sapiens
cacggagccccgcgccgggggagcacgcagcgggcaagggaagaccaccgcagggcggccgagaggagccgcgggcc

SEQ ID NO: 215580 - RNA, 72 nt, Homo sapiens
gaagaggcaaagacgggacagcaagcaccgacgaagcagaggagacaagaggcaaaggcggcgggcccggcc

SEQ ID NO: 215581 - RNA, 41 nt, Homo sapiens
aagccagaaaggagcagcaggcagagaccaacagaccagca

SEQ ID NO: 215582 - RNA, 76 nt, Homo sapiens
cagacaaaaccgacgaaggaacgggaaaaagacagcacagagggccaagccagaacaggggaaagccaaggcgagc

SEQ ID NO: 215583 - RNA, 63 nt, Homo sapiens
ggaggccgagcgcagagcaggcaggaggggcaaggggaacagacagcccacggcacgggccac

SEQ ID NO: 215584 - RNA, 77 nt, Homo sapiens
agaggacaacggacagcggacgaaaggagacccaacaccccggccagacgggccaccaggccggcgccccacgcccg

SEQ ID NO: 215585 - RNA, 78 nt, Homo sapiens
gaggggcgggaacgaaacgcggccccggaggcggcagcaggaggcaggacagcccggccacagccccaggagggagcc

SEQ ID NO: 215586 - RNA, 83 nt, Homo sapiens
ggccaaacgcagcaagaagaagaagcagcgccagagaaacagggaacaagccgccaaaggaagagcaacagagggaacagcag

SEQ ID NO: 215587 - RNA, 78 nt, Homo sapiens
gacgggcagcgcaggggcgggaaagacccaggagaagccgcccaaagaacgggccaggaggagaaagacacaggagaa

SEQ ID NO: 215588 - RNA, 83 nt, Homo sapiens
gcgagcgagggggcggcggcgacagccaggcccggaagcgagggcggccgcgccggcccaggaagaggagaagaggacagaga

SEQ ID NO: 215589 - RNA, 76 nt, Homo sapiens
gggaacacccggcgcacaggaaagcaaccgaagggacaaaagggaaccaaacggagagcaaaacaacccgcgcaca

SEQ ID NO: 215590 - RNA, 117 nt, Homo sapiens
ggcccgggcaggccaacgagagacgcagaggcgggccagagcccaggagcgcgacaacgacaagagcgccgccaagagacaaagagacaaggacaagaagcggcccccggcacgggg

SEQ ID NO: 215591 - RNA, 81 nt, Homo sapiens
cgaccacaaggaacgaggggccccaagagcacagaccagcagccgccaaagaagccagcgagaagaccgagaggccgcgac

SEQ ID NO: 215592 - RNA, 84 nt, Homo sapiens
ccagcagacgcagccgagacaccagcccgaaacaccaccaagaacacggcaggagcgggaccgggcaggagccagaaggggcca

SEQ ID NO: 215593 - RNA, 73 nt, Homo sapiens
gaaaacggcaagcgcaagggcgggcggcacccagagaccacccggcggggaagcgcggcgaggagaggcccac

SEQ ID NO: 215594 - RNA, 68 nt, Homo sapiens
gacgcgcccggcccggagcccccagcgcagcggccgcgggaaggagccgggagaggccaggccccccg

SEQ ID NO: 215595 - RNA, 74 nt, Homo sapiens
ccgagcccccgagcccccccacccacaaggcgagggaacaggcacgccccacccgccagccgagcccccgacgc

SEQ ID NO: 215596 - RNA, 86 nt, Homo sapiens
cgccacacggcagacgccggggacagccgagacacagccccagcgagaggccaaccaggccccggcagcgcacccagacaccgggg

SEQ ID NO: 215597 - RNA, 65 nt, Homo sapiens
ggaggagaccagagcaaaaaaaggcagaacgaggcaccggacacagggcaccgggagcaacacag

SEQ ID NO: 215598 - RNA, 73 nt, Homo sapiens
ggaccgcggcagaagaaagcaagacccaggacaccccgaagccgagaaagagacacagcggaaacgcaaaagc

SEQ ID NO: 215599 - RNA, 89 nt, Homo sapiens
agagcaggccaagccagaaaggagccacacgaccccgccagcgcagaaaacagggccagacgggaagaaacgagaagggaccaggggcg

SEQ ID NO: 215600 - RNA, 78 nt, Homo sapiens
ccgagcaccccaacgggcaggaacccaaggaccgcaaagaaaacccagagaacaccacccgaagagacaccgagaaag

SEQ ID NO: 215601 - RNA, 85 nt, Homo sapiens
caggccaggagggacaggaccggaggcgccagccaaccgaggaggagcagcgcggaggaggaagccccccggccagaacaccgga

SEQ ID NO: 215602 - RNA, 59 nt, Homo sapiens
agccgagagaaagcaagcaaaggaaagcccggaaggaaggagagaacggcgcaagcgcg

SEQ ID NO: 215603 - RNA, 77 nt, Homo sapiens
cagccacggggccaggacagaagacacaaggggaagaacacgggagaggagaacggccacggcccaaggaggacgcc

SEQ ID NO: 215604 - RNA, 82 nt, Homo sapiens
ccccaggccgagacacgccagcacgcaggcaggaggaagcgggcaaaggagacccagcaaaggagagacagaccacagccgg

SEQ ID NO: 215605 - RNA, 91 nt, Homo sapiens
aggccccaaggagccacaccggaccagaccccaggaaagagcaaggaaagagggcagaggggcccccaggaggagcggagacggcagaaac

SEQ ID NO: 215606 - RNA, 81 nt, Homo sapiens
ggacggaggagagccagggcaacacgcgggaccgcgggcaccagaccgcagcagacggcacaaggaaagccaaaaagccag

SEQ ID NO: 215607 - RNA, 78 nt, Homo sapiens
gcggcggcaggccgcagcgcccgagcgagcaccccccaacgggcaaaccccgcccagcagaaaaggaagcacggagaa

SEQ ID NO: 215608 - RNA, 77 nt, Homo sapiens
aagaaacgggccacaacacacgaccaccggagggggaggaagaagaagccagaacacaaaccaggacaggcaagacg

SEQ ID NO: 215609 - RNA, 73 nt, Homo sapiens
cgggagaccagccagagccccaccaggagaggaccggaaagacagaaagaagccacccgaccacgacaaggag

SEQ ID NO: 215610 - RNA, 103 nt, Homo sapiens
ccgcggagagaagagaagccgaagacggagaaaaaggaacagggaggggagaagagaagcccccaacccaccagccaccagagagcaaagaacaaaagaagga

SEQ ID NO: 215611 - RNA, 59 nt, Homo sapiens
cggagacgggagaagaaaagacaaccggaaacacagaagcaccccagaccggacaaggg

SEQ ID NO: 215612 - RNA, 67 nt, Homo sapiens
ccacaagcaacgcgggaagagaagaacagaaggcacaaaaacaacgagaaggcgaacggaacagagg

SEQ ID NO: 215613 - RNA, 111 nt, Homo sapiens
gggccgcaagacccaagaagaagaaggcgaaggaccccaacggggaggccaacggaagaagacccccagaggaccccaacacccacccccgccgggaccccgcggacacgg

SEQ ID NO: 215614 - RNA, 75 nt, Homo sapiens
ggaagaccgcccccagaagggcagccccacaccaggagaagcacagcaccggaacgcgagaaagcagggcacccc

SEQ ID NO: 215615 - RNA, 61 nt, Homo sapiens
gagcgagcccgaggacggcgcggggagggagccggaaacaaagaagaggagaaaaagccaa

SEQ ID NO: 215616 - RNA, 76 nt, Homo sapiens
acgggagaagggcagcacggcaggaggacgacaaaggagggcgaaaccgcagcaccggagcagaagcaaaaacgaa

SEQ ID NO: 215617 - RNA, 72 nt, Homo sapiens
aggaccgcggggacgggagacccacaccaccgagccggggccggcccgccacgacgagaccaggaaagagac

SEQ ID NO: 215618 - RNA, 40 nt, Homo sapiens
ggcggagggcacaccagagggaacaagcaggaacagcaac

SEQ ID NO: 215619 - RNA, 82 nt, Homo sapiens
caaggggcagacccaaaaaacggggacaggcggcagagggcaccagcacaagcggagccacgcggagcaagacggaccgacc

SEQ ID NO: 215620 - RNA, 85 nt, Homo sapiens
cgacagaagcagcagaagcagcagggcacacaggccccgagaaccaagagaacccccaccaaccaggcccggccaacggccccaa

SEQ ID NO: 215621 - RNA, 73 nt, Homo sapiens
cgcaccacacacagagggaaacggaaagggcacagaagagacgaaagggcgagggacgaagaaagaaagaacc

SEQ ID NO: 215622 - RNA, 77 nt, Homo sapiens
aacgagccggagaggcagaccggagcggaggagcggcacaggccgaggagcggcaccagggcggggaccggggcgcg

SEQ ID NO: 215623 - RNA, 65 nt, Homo sapiens
agccgcgaggaggcgcgggagggcgagaacgaccccgagacgggccagggagcagaagacccaaa

SEQ ID NO: 215624 - RNA, 60 nt, Homo sapiens
accagccgacagaggccaccagcagagagaccacaccgcgccagaccccccaggagagcc

SEQ ID NO: 215625 - RNA, 64 nt, Homo sapiens
ggcgaggggagaggcgcagaaacggcggcccgccgccccggggcacgccaggcaaccaagacaa

SEQ ID NO: 215626 - RNA, 76 nt, Homo sapiens
ccaaaaggacaagcagggccaaggccgcaggagggaagcgcacggaaaccgccccgggaggcacagagcaggagac

SEQ ID NO: 215627 - RNA, 73 nt, Homo sapiens
gaagggggacggcaagaggagcaaaaacgacacaaagccaaccaaacccgggagagagaacccaccccccgga

SEQ ID NO: 215628 - RNA, 54 nt, Homo sapiens
agaccaagagacagacaccgccccgagacgagaagagccagaagcagcaggacc

SEQ ID NO: 215629 - RNA, 72 nt, Homo sapiens
ggaagaagagggagacaccgaagggcagagaccaacagaccagcaacaggccggcagggcacagcagccgca

SEQ ID NO: 215630 - RNA, 71 nt, Homo sapiens
ggaaagagcggacgggagaaagacacagcccacacccagacgcagggagggaccaagcccagagacacaag

SEQ ID NO: 215631 - RNA, 60 nt, Homo sapiens
acgaaagcccaggccaaaaagagccacaaacaacccccaccacgccaagagaaggagaga

SEQ ID NO: 215632 - RNA, 79 nt, Homo sapiens
agccccaagcgaagcggaccggaggagcgccaagaccaccacaaagaggggaaaaaaaggccagaaagcgaagaaagcg

SEQ ID NO: 215633 - RNA, 83 nt, Homo sapiens
cggacggccggaccaagaggcgccgccccccagcaaacgagaaaaacccagcgaccgacgaccgaaaaagcggggaagggggg

SEQ ID NO: 215634 - RNA, 85 nt, Homo sapiens
cgcgcggccgcggacggagccgggcgcggcgcacgccgcccgcccaggaggaccgcaggaagaaggcaagaagccacaaccaccg

SEQ ID NO: 215635 - RNA, 88 nt, Homo sapiens
cgccccgcagaggcagacccagcaccagaccaggcggcacccgccccgaggaggggaccagacacacagccgaggaagaagaaggcag

SEQ ID NO: 215636 - RNA, 58 nt, Homo sapiens
agaaggaggccagaggcagggcgcgggcagcggagggcaggcagggcacaccggacac

SEQ ID NO: 215637 - RNA, 67 nt, Homo sapiens
gaaggcccacaccccacccagggggaacggcgagggaacccaggaaggagggcgacaaacaccagcc

SEQ ID NO: 215638 - RNA, 73 nt, Homo sapiens
cgaaaaagcgggaacgcaggacccaaagcgcacggagcgcaagagcagggacaacccaccaaacagcggaagg

SEQ ID NO: 215639 - RNA, 73 nt, Homo sapiens
caaagaagcaccaaacagggaccccacaccacaaaccgaggaaagaagggacagcagaaaacgcagagggagc

SEQ ID NO: 215640 - RNA, 82 nt, Homo sapiens
gcgccccgagcgccgccgccaggaagaccccgccccgagcccagacaaacaacagaccaaggggcggaaaacccgaagccag

SEQ ID NO: 215641 - RNA, 78 nt, Homo sapiens
acagaaaaacagagaagcaacgccagcagaaacagaaaaacagacgcaggagggcggcgacggcggcgcgaggaccga

SEQ ID NO: 215642 - RNA, 75 nt, Homo sapiens
cccgagggcgggacacaggcccaaccgggcacaggccggccaggaccgcagaaggggccagccaaccgggcaggc

SEQ ID NO: 215643 - RNA, 83 nt, Homo sapiens
cacaccaggagcccccacgaagggaaggagaaaaaggagaagcggcaagcaaggaagaagcaaagaagcagagaagaacaggg

SEQ ID NO: 215644 - RNA, 64 nt, Homo sapiens
aggaaaggaccgaccccaaagaagcggcaagcacgcaggcccaacgacggcaggggaaaaacga

SEQ ID NO: 215645 - RNA, 83 nt, Homo sapiens
ccgggaccgcaggccaggcagagcagcagcgcaggggaagggccgcaggggcgcggcacaggagagggggccaaaggcgcgag

SEQ ID NO: 215646 - RNA, 67 nt, Homo sapiens
caaccgggaagggaaccggaaaagacaagggggcaaaggaacccagaaccgcgggcagcaagaacca

SEQ ID NO: 215647 - RNA, 77 nt, Homo sapiens
gacgagagcccggcaccggagagagacccaaagaagagcagacaggacaagcaacccccagccacaacgcgaaccgg

SEQ ID NO: 215648 - RNA, 76 nt, Homo sapiens
gacaccggggaccggacagaggcacaggaagcggagcgagacccagagcggcaaagaaagagagaagacagacacc

SEQ ID NO: 215649 - RNA, 81 nt, Homo sapiens
gccacggcaaagccaggcaagcgcaaagacggaaaagagaagccagaaaagggcccaagaagagcgcagcgggggcacgcc

SEQ ID NO: 215650 - RNA, 75 nt, Homo sapiens
gccgccaggccgcagacgcgaaggaacggcaaaggagcacaggaacaaacgagggaaagccccaggaacagaggg

SEQ ID NO: 215651 - RNA, 84 nt, Homo sapiens
ggaacaagcccaaaagaacgaggccggaagacgccgaaggaccgaaggagaagaaggagaaggggaggagaaggcaagccggaa

SEQ ID NO: 215652 - RNA, 75 nt, Homo sapiens
ggaggcgccagcgcgacgagaggcacgccaccagggaaaaacagagaggaacaacgagcccacaaaggacagaaa

SEQ ID NO: 215653 - RNA, 52 nt, Homo sapiens
agggccagagggaaggacaggccacaggcagaaggaaccgcggagagacgac

SEQ ID NO: 215654 - RNA, 79 nt, Homo sapiens
cgaaagcggcacgacgcgccgacacgcggggcggggcgacccggggcccgcaggggagagggcacggaaagaccaagga

SEQ ID NO: 215655 - RNA, 78 nt, Homo sapiens
gaggggggcaggaggcgacggcggccacgagcagcgaagcgaaaagacccagagccggaccccggaggggcccccccg

SEQ ID NO: 215656 - RNA, 74 nt, Homo sapiens
caaaggagaacaggaggacgcaggccaaacaaaacggagcagggccgagagccaggggaaaggccagcgcagaa

SEQ ID NO: 215657 - RNA, 77 nt, Homo sapiens
ccgggaccgaccgcaaacaaggagagccacgagcagccgagggggagagcccgaccagagaaaaggcggaagaccgc

SEQ ID NO: 215658 - RNA, 69 nt, Homo sapiens
caagccagacaccccaaagaggccgcacagcggacggcgcaggggcgcgcgggcacacacggaggaggc

SEQ ID NO: 215659 - RNA, 43 nt, Homo sapiens
cacaccagccaaaggagcaaaccagccagcacgggggcccagc

SEQ ID NO: 215660 - RNA, 78 nt, Homo sapiens
agcggcaacggcacgcagaagagccgggaaagaaaggaaagcgggagccagccagagagggacgggccaaccgaggcg

SEQ ID NO: 215661 - RNA, 78 nt, Homo sapiens
aacccccgagaagggacagcccccacgcacacaacccaacagaggccaacgagaggaggaggccggcagccggagacc

SEQ ID NO: 215662 - RNA, 103 nt, Homo sapiens
agcggcggccggccgcgggggccccccgccccgccccccggagccgcgagcacccaagacaagcagaccggaagaccgacggaagaccacaccccgagggagc

SEQ ID NO: 215663 - RNA, 57 nt, Homo sapiens
aagagggcggaggccacgaacacgccggagccgccaggcgcacagaaacggaggcag

SEQ ID NO: 215664 - RNA, 64 nt, Homo sapiens
agaaaaagcgcagagagaggagaggcgacaagccaggccgcgagaagcagcccagggccagagc

SEQ ID NO: 215665 - RNA, 85 nt, Homo sapiens
ggacacgcggcgagcggccaggccagacggggcagggaacaacgggcgaaagggcacacacggagggcgcggagcggggacgcag

SEQ ID NO: 215666 - RNA, 83 nt, Homo sapiens
ccgggaagagcgagagaagcggcggaggacgagcccgggagcgacccgcgcaaacaaacagaggcccccgccgcaccacacag

SEQ ID NO: 215667 - RNA, 81 nt, Homo sapiens
agaagaccggaagcccacaaagaccccaaaggaggcaagagcaacgaaccaaagcaaaggaggccgggggaagacggaaaa

SEQ ID NO: 215668 - RNA, 50 nt, Homo sapiens
agccagagacgcaccacaaccagggaagcgaaagccacccccgaacccaa

SEQ ID NO: 215669 - RNA, 66 nt, Homo sapiens
aggcagcgcccccaaacgggaggacagggagcaggggagaagagaaaaaagagacaagccggagag

SEQ ID NO: 215670 - RNA, 72 nt, Homo sapiens
ggcccgcggggccaggagagccaggcagcgagcgggagcagacagggaaccgaaggcagcagaaaagaaggc

SEQ ID NO: 215671 - RNA, 64 nt, Homo sapiens
agaacagaagaacaccagccgccagggggcggccaggcagcccaacacaccggcacccgggaga

SEQ ID NO: 215672 - RNA, 89 nt, Homo sapiens
gaccggcccccaacggcacggcaggagcacggcccagcgccgggcgcggccacggcagccaagaaaaccaggcccgacagcaagaaaaa

SEQ ID NO: 215673 - RNA, 76 nt, Homo sapiens
gggggcgagaccacgacgggagcaccggcaggccaccaaaccacagcgggcaaagcaggacagcgaggcgcgcgag

SEQ ID NO: 215674 - RNA, 76 nt, Homo sapiens
cccaaaccccaggccaagcagccaccagcagcccccagagcgggaccacaggacagcaagagcagccccggaacgg

SEQ ID NO: 215675 - RNA, 69 nt, Homo sapiens
ccgccggccggaccagaccggggggaaaggcgaggaacagcaccaaaaacgacgcgaacccaagagaag

SEQ ID NO: 215676 - RNA, 76 nt, Homo sapiens
gagcccaaacaagaggaagaccaaacaggggcacacaaggcagcccgacaaagcaaagaagaaggagcaacacagg

SEQ ID NO: 215677 - RNA, 70 nt, Homo sapiens
acaaaagagcggaggagcggcgagggcacccccagcaggacagcacacccaaccagacacaccaccccac

SEQ ID NO: 215678 - RNA, 79 nt, Homo sapiens
cgcggcccgggcccccccgccggaaacagcccgagcgggaagaagccgcagcaagccgcagcggcgcgcaccgggcggc

SEQ ID NO: 215679 - RNA, 57 nt, Homo sapiens
ggcggaaggaaccgcccgccgccacacgcgcaaagcccgagcgcagcggaacagcaa

SEQ ID NO: 215680 - RNA, 70 nt, Homo sapiens
gaccccggaaaccgggagacccccgagacgcggcaagaccacgcaccagggcccggacgcccgcccggcg

SEQ ID NO: 215681 - RNA, 76 nt, Homo sapiens
cgagaaacaaacgaccaccaaaaggaccgggaccgaggcacccacgcaggcggcgcagggccgaagcgcggggcgc

SEQ ID NO: 215682 - RNA, 56 nt, Homo sapiens
gccagaggcaacaaggcggacaagagaagccgccaggaggccagaggaccaacgcc

SEQ ID NO: 215683 - RNA, 74 nt, Homo sapiens
acggacgccacagagggaagaccccaagggggcgacgcaaacccggacacaagcagccaagagaggaaaagaca

SEQ ID NO: 215684 - RNA, 69 nt, Homo sapiens
gaaggaccaagaaccagcagcacaaggaaaacgagagaaacgaaggcgagagaaacagcaaggcccgag

SEQ ID NO: 215685 - RNA, 56 nt, Homo sapiens
gaaggacccaagacggccacaggcccagccaacgccaacaagggccgaacaccaac

SEQ ID NO: 215686 - RNA, 99 nt, Homo sapiens
gaaacgggacggacaagggcgacgcagccccagccaagggggcaaaagaaggcccaaaagggaacagacacaagcagacaacacaccagggaaggcagc

SEQ ID NO: 215687 - RNA, 75 nt, Homo sapiens
gcgcgcgcggacgcggcgccccgggcacgcagcacgggggcaggggccgacccagaacgccagcgccgcaaggaa

SEQ ID NO: 215688 - RNA, 66 nt, Homo sapiens
cacccgaacagggaagaaagggaagggcaagggggccgaagcaaccagccgcgcaagggcacagaa

SEQ ID NO: 215689 - RNA, 76 nt, Homo sapiens
agaccacagcgacgaggacgacgccgcccgggagaacgcaccagcaaaagggaacgggggcagcgccagcccggca

SEQ ID NO: 215690 - RNA, 72 nt, Homo sapiens
aagacacgggaccacccagggcaaaccccgccagaggcacacacgggccagggaaccggacaagcagaccaa

SEQ ID NO: 215691 - RNA, 74 nt, Homo sapiens
ggagcagggcgggaggagaccgcaccaagccaggagaagggagacgggcaagaccacgccccacacgcaaggcg

SEQ ID NO: 215692 - RNA, 65 nt, Homo sapiens
cacacacgggccgcggagccagcaccagccgacgagaagcaacgcacccgcccccaaagagagaa

SEQ ID NO: 215693 - RNA, 75 nt, Homo sapiens
ccagcgggaccagaggagaccggagccaccaaaaacgaagaggaaaccgaacagaacgggggaaggacggggaaa

SEQ ID NO: 215694 - RNA, 79 nt, Homo sapiens
gcgcccgcccccaggcgcgcccagccccgcagccagggcgaacccccgcagagccaaacgagcaagagaagacagagag

SEQ ID NO: 215695 - RNA, 100 nt, Homo sapiens
gcgcccgcgaccccggccggaagcacacaacagagcggcacgcgacggcaaaaggagggagcggcaccgcccccagagcaagcaggagcaacaggacaga

SEQ ID NO: 215696 - RNA, 71 nt, Homo sapiens
aaggaccaagaaccagccccccaggcccaaaccaaagcaccacccgccaaaaaacggagaggagaggaaac

SEQ ID NO: 215697 - RNA, 80 nt, Homo sapiens
acgaaaacccccgggcccggagacgcgacagaccccccagcgccccacgcggggggccgccacccccccggcagcacacc

SEQ ID NO: 215698 - RNA, 81 nt, Homo sapiens
aaagggacagaaaaagaagacaggacggaaaggggaaggacaccacggaccagcgcgccaggccgaaccagcgggcgaagc

SEQ ID NO: 215699 - RNA, 94 nt, Homo sapiens
gcaacagccaaaggcaggccgagcagaccacaagagaaccccgcaggcacggggcagcagagcaaaacagcagcgcgggcaaccggggaccccg

SEQ ID NO: 215700 - RNA, 72 nt, Homo sapiens
accaacaggaacagggcagacgagcggaggacacccaacccggggggaaagcccacgcaggcaaagaccgac

SEQ ID NO: 215701 - RNA, 87 nt, Homo sapiens
gaggccagggaaagacccgagcagaggagcagggagaagagaaagagacgcagcccaccgagggcgcgcacagggacacaacaagga

SEQ ID NO: 215702 - RNA, 76 nt, Homo sapiens
accacaggacggaaggccggccgggacccagacgcgcgaaacaggaacacgaaagaggaaaaacgcacaagaaacc

SEQ ID NO: 215703 - RNA, 86 nt, Homo sapiens
aggccgcggcagcagagccacggagggcccccgcccgagcccacagccccacgccaggggagccacgacgggccgagacggaggca

SEQ ID NO: 215704 - RNA, 78 nt, Homo sapiens
cgacaagaaaaacaacgccaagagggaaggggacccgccgggaggacgcgggagcgcaggagcggaagaagccaagaa

SEQ ID NO: 215705 - RNA, 77 nt, Homo sapiens
aacaacgcgggaccacccaaaagacagagccaccagcagaaagaagagaacgacacgaaagaaagcccaaggacccc

SEQ ID NO: 215706 - RNA, 79 nt, Homo sapiens
agcggcagccgcgaggaggcgcgggagggcgagaacgaccccgagacgcggagcggaggcagacacacacggggggaga

SEQ ID NO: 215707 - RNA, 75 nt, Homo sapiens
cagccccaaggcagccacaaaagggggagccgccagcgaccgaggccggcggagccagccccgacgccacaaccg

SEQ ID NO: 215708 - RNA, 36 nt, Homo sapiens
acccagaggagcaacgccccccgggcagaagaaaca

SEQ ID NO: 215709 - RNA, 82 nt, Homo sapiens
gaaaagaggacgaacaaaacaggaaggacaccaaagcaaacaaaggcacaccaacggcaacggagaaggaaggaccgaaccc

SEQ ID NO: 215710 - RNA, 36 nt, Homo sapiens
caagagcaccaacgaggggggagcgacacccaacag

SEQ ID NO: 215711 - RNA, 61 nt, Homo sapiens
ccaagaaagcaccgggcgaacagaaacagacgccgaggaaaacacgcaaaagaagcagaac

SEQ ID NO: 215712 - RNA, 86 nt, Homo sapiens
gggccggggcgggggagcagcagaccgggaagcaccggaggaccgagacggcacagccccaggggcgggccacgcgcggggcggcg

SEQ ID NO: 215713 - RNA, 70 nt, Homo sapiens
acgcaagcgccgaccccgagccccagcaagcacagggcgcacagggggggcccccaaagggaagccaaac

SEQ ID NO: 215714 - RNA, 56 nt, Homo sapiens
ggagacccaggcgggacagagggagccaggcagagcggggacgacgagcccacggc

SEQ ID NO: 215715 - RNA, 79 nt, Homo sapiens
acgggacacgccagcaagacaaagcggggcccggcgcacccaccaccgccgcccacggcagcccagggacccgagcacc

SEQ ID NO: 215716 - RNA, 60 nt, Homo sapiens
aagccaagcaaacgcagaaggacgcccacgagcaaccaagagagcccccaccgccacgcc

SEQ ID NO: 215717 - RNA, 75 nt, Homo sapiens
cagcggggccacccagaacaaaaagggccaggcgaagccgacgagcccgaacagacgcaccagcgggaggaagag

SEQ ID NO: 215718 - RNA, 76 nt, Homo sapiens
ccaggagccagacaagcccagcaagaccaaacagccaaaccagacagccaaacaaccaaggaaaagaagaaaagga

SEQ ID NO: 215719 - RNA, 80 nt, Homo sapiens
ccgcggaccagaccaggccgcggcccgccggcacagccacaccgagaagaccggcccaagaaccccaccgcccgaagaca

SEQ ID NO: 215720 - RNA, 73 nt, Homo sapiens
gcaaaggagaaccccacaccagaacccagggaacaggaaacgaccccaagaaaagagagcaggcccaaccgcc

SEQ ID NO: 215721 - RNA, 41 nt, Homo sapiens
gccgcaacaccagcccggggaaaaggggaaaaaaacccaaa

SEQ ID NO: 215722 - RNA, 72 nt, Homo sapiens
agcggccgcgcacccccggccggaggcaccagcgacgagaacccccgcgaaccagaggaacccagcgagcga

SEQ ID NO: 215723 - RNA, 61 nt, Homo sapiens
gagcaagcggcaaggcccgagggcgccgggcggcaacgaggccggccaggcaggcaccccc

SEQ ID NO: 215724 - RNA, 72 nt, Homo sapiens
acgaagaggaacacacgaaccaagagcacagaggcaacgaggaacagaaggagccaccgcccaggcggaagc

SEQ ID NO: 215725 - RNA, 76 nt, Homo sapiens
gagacccagccacagccaccaggagacagagaaaaaaagaagaagcggccaaggcaggaaaggaaagagacaaaga

SEQ ID NO: 215726 - RNA, 32 nt, Homo sapiens
cccggagggccaaaggacacgccggaaaaaag

SEQ ID NO: 215727 - RNA, 100 nt, Homo sapiens
gggcccgagggcggggaccggcggcgcggaggagcgaggcagcgacaggacgggaacggggcggagaacggaaaagcaccaggaagcagagaggaccgca

SEQ ID NO: 215728 - RNA, 83 nt, Homo sapiens
gggcgcgagggcgggggcagcggcaggccaagaacccaaagcaaggcgagacaaggggccaaccagccagggccaacaaacag

SEQ ID NO: 215729 - RNA, 70 nt, Homo sapiens
gaggagaacagacagagaccggggacaggcaacagcgcgccgggggcccggaaagggacgcgcgcccagg

SEQ ID NO: 215730 - RNA, 77 nt, Homo sapiens
ggccccggacaacccgagcaggggcagcggcgccgcaagcacgcgagcggccagacgcaacccaagaacaccgcccg

SEQ ID NO: 215731 - RNA, 83 nt, Homo sapiens
agacggggaaagcggaaggaagcgcgggccccgagccccggccccaaagacccaaaacagagacaccccccagcccccgcgcc

SEQ ID NO: 215732 - RNA, 79 nt, Homo sapiens
cgagaagaggacacgcaagccacaggccaccgccggaaccgcgggcccgaagggcgagaaccacgccgacaacggcgga

SEQ ID NO: 215733 - RNA, 70 nt, Homo sapiens
cggggagaagccacagggaaaaaccaaagccccgcgcaaagaccgcagaggagccgcagcccaaagcaag

SEQ ID NO: 215734 - RNA, 66 nt, Homo sapiens
agcacagcaggcagcagagccaagcccagaaagacaccagaagacaccaaggacagagaaaagcaa

SEQ ID NO: 215735 - RNA, 86 nt, Homo sapiens
ccccgcgggcggcccgcagggaccaggaaccagagcgaacgagccaacggaggcagccggcggaaacgaagaaaaaacagaacaaa

SEQ ID NO: 215736 - RNA, 66 nt, Homo sapiens
acaacccccggaaaccgggcagcgaaagaaaagacaacggcaagcggagaagagcaaggccgaacc

SEQ ID NO: 215737 - RNA, 78 nt, Homo sapiens
ccccagaaacggagaggagcaaagaagacagggagagcaccgcagcaggcggacaccgaccgcaggaaggaggaggag

SEQ ID NO: 215738 - RNA, 64 nt, Homo sapiens
cgagcgagggggggcgcgccggaaaccggagcgcgcagcagcaacggggcggcacacaaggagc

SEQ ID NO: 215739 - RNA, 81 nt, Homo sapiens
cggcgagggcacaggaggcggagcaagcggggagaaaccggcagccccaggagcgacagcaggacccagggccgccccccc

SEQ ID NO: 215740 - RNA, 97 nt, Homo sapiens
ccaaagacaaacgacaagcccaaggagcccagggagaagacccggggcaggcgcaggaggcacccaaggggaggaaggccgcgagaaggacagaaga

SEQ ID NO: 215741 - RNA, 79 nt, Homo sapiens
ggaaaccggcggcgccagccaccggagcaaccacaacccgcagcccggccagagcagaaaaaccccagagccggcaggg

SEQ ID NO: 215742 - RNA, 72 nt, Homo sapiens
agagcacgcccaagaacgaacaagagagacggcccagggaagccagaaagaagcgcggggaccgagcgacgg

SEQ ID NO: 215743 - RNA, 86 nt, Homo sapiens
acgggaagggaaaggaggcccccaaaggccagcaccggcggcagcgggaggcaagccaggacgcacgagcgaagggcggcggcccg

SEQ ID NO: 215744 - RNA, 76 nt, Homo sapiens
gaaaaccccacgcgccagaaccacccaacagacacgagaggcgagggacgacagagcaagcggcagagggcaagcg

SEQ ID NO: 215745 - RNA, 104 nt, Homo sapiens
gagggaggcaagagcggcccaccaaggaaaggggacagcaacagccggcgggcggaaggcggagcacagggcagaccggcaacgcaacccgccgcccccaggca

SEQ ID NO: 215746 - RNA, 79 nt, Homo sapiens
aagagcaagagggcagaagaacaagaaggagaccgagaagggaaacagggacaagggagaagaagccacaccaaaccag

SEQ ID NO: 215747 - RNA, 66 nt, Homo sapiens
aaaacgagaggagagagaacgcccggaaagagcccaggacaacacaggcaaaggaagcgaggagga

SEQ ID NO: 215748 - RNA, 84 nt, Homo sapiens
gagaaacaagaaaagaccaaggaaggaaacagagagccaacacacagcacaacagagaggccgagggcacagcggagcaggaac

SEQ ID NO: 215749 - RNA, 88 nt, Homo sapiens
gagcgaggagaaggacgcggccgggacaaaacccgaaagaggcgcagcgcccagggagcagcagaccagggccgcggacacgcgggcc

SEQ ID NO: 215750 - RNA, 61 nt, Homo sapiens
cagaaacagcgagccgacagacccaccgcgcagaaggcaagaccgcaaaggaggcgaaccg

SEQ ID NO: 215751 - RNA, 59 nt, Homo sapiens
agaacccggacaagcaaaaggggcgacgacagacccaggccccagcccgacagaccagc

SEQ ID NO: 215752 - RNA, 83 nt, Homo sapiens
gaagaagaggccagggaaaaagggaacaggccagcaaaacaccagcgcaagccaaagccacaagaagaaaacaggaaggagca

SEQ ID NO: 215753 - RNA, 71 nt, Homo sapiens
cccccggggcccgccgggccaaccgaaaggcccagggcgacagccacccggacgaacagaggcgcaaaaga

SEQ ID NO: 215754 - RNA, 78 nt, Homo sapiens
cgggagcccgggagggcggccgcagggccagccccgaggcccagccgcccgccggggcacaggacagcgcccggagaa

SEQ ID NO: 215755 - RNA, 53 nt, Homo sapiens
ggaaggagagccccgaaaaagacaacagaccaaaggaacgggcgcaccacgcc

SEQ ID NO: 215756 - RNA, 78 nt, Homo sapiens
gaaggcgcaccaccacccacagcagaccaaacggaagagcgcccgacgacgagcgagagcaccaaccagagggccagg

SEQ ID NO: 215757 - RNA, 79 nt, Homo sapiens
aacccaccaacaaccagccgagagagagcacaaacaccgccacagagaaccaggaagacagcgcccagcaacccggcac

SEQ ID NO: 215758 - RNA, 81 nt, Homo sapiens
agcggaggggagcagaacaggccggccagccacgggagaagcaggaggaggccggagacgcagcagccggagaagcggaga

SEQ ID NO: 215759 - RNA, 76 nt, Homo sapiens
agcagaaggcaacagacccaacgcagccccagccagccagccagcaaggaacccaggcacccacccgcgagacccc

SEQ ID NO: 215760 - RNA, 39 nt, Homo sapiens
ggacgacagccagagagagagaaggcagaaacaaaaaag

SEQ ID NO: 215761 - RNA, 59 nt, Homo sapiens
gcacggagagcaaggaaggagggcagcccaaggggcggaaaccaggacacccaaaccca

SEQ ID NO: 215762 - RNA, 71 nt, Homo sapiens
gaacgaaaaaagagaacggacaaagaggaggcaggcaggggaaagaaagaacgaacagagaacagaaaaac

SEQ ID NO: 215763 - RNA, 76 nt, Homo sapiens
gagaaaaagagagccgaaaagcgagcagagaacagccgcaccggagagggacaagaaaacaacaggcacaaagaga

SEQ ID NO: 215764 - RNA, 92 nt, Homo sapiens
aaaacaggccgaagggcaaccaagaaacaaagaagacaccgcggaaaacggggaaacgaagacgaggagacaaggccaaccagcgaccaaag

SEQ ID NO: 215765 - RNA, 69 nt, Homo sapiens
cgaaaacagagggcagagccagcccacaaccaggccaagaagcgccacgcggaacggagcgaacaaccg

SEQ ID NO: 215766 - RNA, 76 nt, Homo sapiens
gggcaagcagccgcccgcgggcgaagcagccaggacggcaaagaggaagagaagagaaggaagaagcaaaaaaacg

SEQ ID NO: 215767 - RNA, 80 nt, Homo sapiens
gacacgagacgggcacaacgggcgaagggagagggcccaggacgccaacaaggagagccgccagaacgagcacagccagc

SEQ ID NO: 215768 - RNA, 70 nt, Homo sapiens
aggacaagcaaggaccgcaggacccaggccagaccggagcagcggggacagggcaccgccgaccgaaacc

SEQ ID NO: 215769 - RNA, 75 nt, Homo sapiens
cggcccccgccaccgggaggagagggcacagcgaaggacccccagccgcccagaaaggaggaccaaaccgaacag

SEQ ID NO: 215770 - RNA, 70 nt, Homo sapiens
gaacaggaagcagaagcaaggcccaagccaggaccacgcaccgggaggggaagcgcagggcgcacagggc

SEQ ID NO: 215771 - RNA, 86 nt, Homo sapiens
gggagcggcagggaaccgaccccagaacccggacgggcggcgccccgacaagggaccgggcgggccccgcaggaaacccccaccgg

SEQ ID NO: 215772 - RNA, 85 nt, Homo sapiens
ccgggacccgcccgcccgcgggaggaaggacgagacgagaccgggacggaagacggcaaagacgagaccgagaacggaagaggag

SEQ ID NO: 215773 - RNA, 75 nt, Homo sapiens
aaccaggagagcacgcagcaggaagagccaggcgggaagcggagaaaaccaggacccaagacagcagcaacagca

SEQ ID NO: 215774 - RNA, 125 nt, Homo sapiens
cgggggccgaggggccaaccagcgaagagcgacaagccgcggcagccgcggaccaccgccgccaggcgggagggacaggagaacaggcacgaccccaccggcaccaccacggggacagcgaccgc

SEQ ID NO: 215775 - RNA, 53 nt, Homo sapiens
aaacgaacgccagcgacgcgcacaaaacaaacagagaacacagaggaacgcca

SEQ ID NO: 215776 - RNA, 53 nt, Homo sapiens
agcgccaaccggagggaagacccagacagacaagccccgagggagaggaccac

SEQ ID NO: 215777 - RNA, 56 nt, Homo sapiens
gcaggagaaggcagagcgacccaggcacaccacccggaggagaaggaggcaccagc

SEQ ID NO: 215778 - RNA, 52 nt, Homo sapiens
accccacagaaaaaggcagagaagaacagcgggagagcggaacgaaggaggg

SEQ ID NO: 215779 - RNA, 82 nt, Homo sapiens
ggccaagaagcagcccgcacggcggaggagaagacggggcggccgcacccaggcggaggcagggcacgaaggccagcagccc

SEQ ID NO: 215780 - RNA, 77 nt, Homo sapiens
cccagagggcagcgacagggcaccacggggagaaaaccggaagagaaaggccgggaagcaggaaagaaaaaaacaac

SEQ ID NO: 215781 - RNA, 79 nt, Homo sapiens
cagagcagggcccccgagaaacaccggggccaggccagaccaagaagaacagccccagaaaggaagaagcgaaaagcaa

SEQ ID NO: 215782 - RNA, 45 nt, Homo sapiens
ggcgaagaaagccgcagaaccagacccggccacgagggcggcgcc

SEQ ID NO: 215783 - RNA, 62 nt, Homo sapiens
caacccaaagccgcacagcggaaagggaaaagaggggaaagacaagccaggagcccggaaga

SEQ ID NO: 215784 - RNA, 84 nt, Homo sapiens
cgggagcgacgcgcacaggccagggaaccccgcgaagaagacacaccgaaggcgcaaaagacgaaaagacaaggacgaagacca

SEQ ID NO: 215785 - RNA, 80 nt, Homo sapiens
gaaagccaacaaaaggaaggaggaaggacgggaagcggcaaccgggggggccgagccggagccggcgccgccggggagga

SEQ ID NO: 215786 - RNA, 62 nt, Homo sapiens
aggccacaccggacacgaggacgcacagaagggggacagccgcgccgcgcgcccgaagaggg

SEQ ID NO: 215787 - RNA, 71 nt, Homo sapiens
gaagaagaaggggccggaacggccgcggaccaacagcacagcacggcccacccccggcagcccccaggccc

SEQ ID NO: 215788 - RNA, 85 nt, Homo sapiens
ccagagaccggcaaagacacagacacgcgcgagcgagagcgagaagcggccccgggaggaggcagagcgcccgcggcagcacaag

SEQ ID NO: 215789 - RNA, 89 nt, Homo sapiens
cggaggacgagggccagcgacggagagggcagaagaggaggagaggacaagccgaggcgggagccgggcaggaggaaggagccccccag

SEQ ID NO: 215790 - RNA, 54 nt, Homo sapiens
cacaaaagagcagaggaggaacaccaggcacaagggaagaaagcacgggaaaag

SEQ ID NO: 215791 - RNA, 79 nt, Homo sapiens
acacgggaggggagcgcccagacacccccgaagcgacgggagagccccacacgcgacgacggcaaaacccaggacccac

SEQ ID NO: 215792 - RNA, 87 nt, Homo sapiens
aggacccaaggcccaacccccgaaccaccagggccgggacagccaccagggcaaggcccaggccccggcgcagcgccggcccagcca

SEQ ID NO: 215793 - RNA, 74 nt, Homo sapiens
ccgccccggccgcgccaagcagccacccaccccaagggccgccagccagcccaggaccaaagagggcgccaaaa

SEQ ID NO: 215794 - RNA, 69 nt, Homo sapiens
ggagaagagcgaccagccacaagaacagaggcccaccgcccagggcgccggacccgggcacccccggga

SEQ ID NO: 215795 - RNA, 75 nt, Homo sapiens
cagaccccccgggaccagcagagggggagagagcagccgcaccgcccacacgcgcagccaagacgcaggggggca

SEQ ID NO: 215796 - RNA, 73 nt, Homo sapiens
gggagacaaaaggaccggacccagaaaccggacccaaaggcaagacacgaagacgccaccggagagagaaaag

SEQ ID NO: 215797 - RNA, 116 nt, Homo sapiens
agccaaacgaagccggggcccccagaagacaagcagagccgcagcccgaacagcccacagaacccccagggggcagagcggaaggacagccggaaaaacacagcgcacggaggaag

SEQ ID NO: 215798 - RNA, 74 nt, Homo sapiens
gagaagaggccaaagacagggccggcccagggagaacgcaaaaccaccacccccacaaaaaacgcagggagaaa

SEQ ID NO: 215799 - RNA, 94 nt, Homo sapiens
gaaagaaagagcaaaagaccgagaccccagaagagggcaggagaaacccagcgggcccagagacgcagcgggaaaaccaaggcaagccaggcga

SEQ ID NO: 215800 - RNA, 113 nt, Homo sapiens
ggagcgcgaaggccgggacccggccccggcccacaggggggggcaaacccgagagaacggggggcagcacgccgaaggagagaccagacaacaggccagggaagggaaggcag

SEQ ID NO: 215801 - RNA, 75 nt, Homo sapiens
gcggaagacagcggcgaggagaacgcccgcggacgacccgagggacacacaggaagacgaacacggaacgggcga

SEQ ID NO: 215802 - RNA, 44 nt, Homo sapiens
gacggagacaagcagagacagagaacaccgccccaaaacaggac

SEQ ID NO: 215803 - RNA, 39 nt, Homo sapiens
ggagagcaagcgacaagagggggagcaggaaccaaggaa

SEQ ID NO: 215804 - RNA, 81 nt, Homo sapiens
cagggaaaaagcaaggagaagaaaaggagcacagagaccgaaaagggaggagaagaagcgggcagagggggaaagacgaaa

SEQ ID NO: 215805 - RNA, 56 nt, Homo sapiens
cccaacaccgcgacacgcagggggggccccagcccggccgaacgggcgcacgacac

SEQ ID NO: 215806 - RNA, 80 nt, Homo sapiens
ccggagccagcgggggccaagacaacaagacgaacaggccagccaggacccgaaaagccagcaagcgagaccaacaccaa

SEQ ID NO: 215807 - RNA, 78 nt, Homo sapiens
acgaaagcagcaaggcgagaggaggccgcggagaaccgaggcagcagcggggggccaggaccaacgaggcaggggaac

SEQ ID NO: 215808 - RNA, 69 nt, Homo sapiens
aaggcgccgcagcaccccccggacccagccccgggaccagcaacaaggcagagcgaacccaagcagaag

SEQ ID NO: 215809 - RNA, 79 nt, Homo sapiens
caggaggagaccaaacccccgacagcgccaggcccagacgccaacgcaggagcacccagcgacgagagaacagccccca

SEQ ID NO: 215810 - RNA, 76 nt, Homo sapiens
ccgccccaggacacgccggacccccccgggagaaacggacaacacccggagcagaaggcacgcaagcggcgaccgg

SEQ ID NO: 215811 - RNA, 84 nt, Homo sapiens
ggccggaggcgccccgccccgccgcacagcccgcgggccagcgccgcgcccgagccccggcgggaggaaagaccacagcaagac

SEQ ID NO: 215812 - RNA, 56 nt, Homo sapiens
cgcaaggaaacacaacgagaagccacgagcgcagacaaagccggcgaaaaccagcc

SEQ ID NO: 215813 - RNA, 61 nt, Homo sapiens
cagaagcaaaagccagagcagagaaaccacagggccgcaggccacacccacgcaaccagcc

SEQ ID NO: 215814 - RNA, 64 nt, Homo sapiens
gagggagaaggacagaggaaacaggaaacagacacgcgagccaagagcccaaaaggcagagcga

SEQ ID NO: 215815 - RNA, 35 nt, Homo sapiens
agcgcgaaacgcacgagaagggagcggcaggggag

SEQ ID NO: 215816 - RNA, 57 nt, Homo sapiens
gcgccgcgccggcggcggaccgaccagcgggcagcacgcacaaggaggagcagcggc

SEQ ID NO: 215817 - RNA, 77 nt, Homo sapiens
aacgggccgaaccgggagcgaggaaccagaacgaaaagcgccagaaaggagaagccgcgggagcggaagacaggccc

SEQ ID NO: 215818 - RNA, 77 nt, Homo sapiens
gagaccggagcgccagggccacggcccaccacccggcagaagaaaaaccagcacgcaggaacaacagacaagcggaa

SEQ ID NO: 215819 - RNA, 74 nt, Homo sapiens
acgaagccacccagggaccccaagcgacgcacccgaagagcacgcagaaacaaacaacacaggagaaaccgaag

SEQ ID NO: 215820 - RNA, 78 nt, Homo sapiens
gaacgcgacgcgagagaaggacccacggcgcgcgaagccccccccagagaaagaagccagccgcgacggcagcaaccg

SEQ ID NO: 215821 - RNA, 78 nt, Homo sapiens
cggcggcggagagaagcgccaaaggaccggacccagagaagaggaaaaccaccgggcagaaacaacgaagcaagccca

SEQ ID NO: 215822 - RNA, 80 nt, Homo sapiens
agggagcagcaggagccccgcggggaaggaacgcaggagcgcagaacacaaacagaacagacacaacagcccagcaagca

SEQ ID NO: 215823 - RNA, 69 nt, Homo sapiens
agacaacgaacgggacaccggcaggcaacggaggcacagcacaagggaaaacgacccccaggaaaaaga

SEQ ID NO: 215824 - RNA, 83 nt, Homo sapiens
caaggagcacggacggacccagcacgaggaggcgcgaggagagccgaaaagacgaggcgaggaggcgagacacccaacccacc

SEQ ID NO: 215825 - RNA, 60 nt, Homo sapiens
gacagggagggagggacggaaacaaagacagcaggagcagggaaaaggcccacgagacaa

SEQ ID NO: 215826 - RNA, 56 nt, Homo sapiens
ggggccccgaggagccaggccacaccccaggggcagggaaggccgagccagccggg

SEQ ID NO: 215827 - RNA, 83 nt, Homo sapiens
gccagagcccaaaccccaggccaagcagccaccagcagcccccagagcgggaccacaggggagacggaccgaccgaacgaagg

SEQ ID NO: 215828 - RNA, 64 nt, Homo sapiens
gcgcaccgacccgacgcgccggcccacgcgcggccaaggcgagaacgcggacaagcaaacaaag

SEQ ID NO: 215829 - RNA, 72 nt, Homo sapiens
gcaccgaaagggccaagcaacggagaccgggggggcaagcaaccagggaaacacaaagaagacaccagaagg

SEQ ID NO: 215830 - RNA, 83 nt, Homo sapiens
cccgaggaagcacagcgggcagaagcagacgagcgcagccagcaaagagaggcagagcgaaccagaacaagggaccccccagg

SEQ ID NO: 215831 - RNA, 74 nt, Homo sapiens
caagcggggagcgcccgcgacagaggagggaggaaaacaaccgagggcagagggaagcacccagacgaggcgaa

SEQ ID NO: 215832 - RNA, 76 nt, Homo sapiens
gaagcgccgcgcgcgcgccgcgagcgcaggccagagagaaaagaaaagggagagggagccccaacgggaaaccaaa

SEQ ID NO: 215833 - RNA, 70 nt, Homo sapiens
aggaacccagcaacaaccgccaggacaaagcccagaaaagagaaaacgagcacgaagacgaccggcggcc

SEQ ID NO: 215834 - RNA, 101 nt, Homo sapiens
gagggacgagccagggcaagacccagacccggacgacccccagcgagccagcggagcgcgacagaacaaggcagcccgagacaaaggcagggaggaaggga

SEQ ID NO: 215835 - RNA, 72 nt, Homo sapiens
gcggacgcaccgccgggccgcccccaccccgcccgacccccaaggagccccagggggacgcggaagagacag

SEQ ID NO: 215836 - RNA, 68 nt, Homo sapiens
aaaagggacaagcagagcacgacagccggcgaagaagaagcagagacccggaccacccgacccacgca

SEQ ID NO: 215837 - RNA, 72 nt, Homo sapiens
cgcagaagccggaagagagccaagccaggcccagcagccgccaccgggcagggcagcaggacaaacaaagcc

SEQ ID NO: 215838 - RNA, 79 nt, Homo sapiens
cacgggcggccggagcacagcagggacaggagaacacgagacccgcacaaaaccccgccccccaggccacacaggggcc

SEQ ID NO: 215839 - RNA, 67 nt, Homo sapiens
ccccgaggagcgggacacagcgccaagaagagggagggcgagcacggggcccagggccgggaaggac

SEQ ID NO: 215840 - RNA, 73 nt, Homo sapiens
cagggcagcagacagcaacaagcaaacgacgaggcaagaaagacacaaagacgagcgaggaaacccaaaaagc

SEQ ID NO: 215841 - RNA, 81 nt, Homo sapiens
ggacccagcccaggcggcgcggacggggcgggcagggaggggaacgggggcaacccgaccccacgggcggcgagaggcacg

SEQ ID NO: 215842 - RNA, 76 nt, Homo sapiens
aaggcagcgcccagcagcgcagggaaaccgacgccgcagaagaaagcagaagaacaaagagaccacgaccgccagc

SEQ ID NO: 215843 - RNA, 78 nt, Homo sapiens
ggacaccgagggcccccaaaagagaggccacaggggggacaaagcgaacaaaccgggagacacacaggagaacggcaa

SEQ ID NO: 215844 - RNA, 94 nt, Homo sapiens
ggacaaaacccaccaagaccagagaagcaccggccacaaggggaccccacaccacaaaccgaggaaagaagggacagcagaaaacgcagaggga

SEQ ID NO: 215845 - RNA, 79 nt, Homo sapiens
cgcggagggacaccacggaccagccaccgccgccgccacgccaccaggggggcacccgaggaggaagagggcagggccc

SEQ ID NO: 215846 - RNA, 70 nt, Homo sapiens
cacgacccagggcgcggggaagcagacgacccagacaccaaggcaacacggacagggagaagaaggcagc

SEQ ID NO: 215847 - RNA, 80 nt, Homo sapiens
agaaagaacgccgggaagcgggagaaagcccgggaaacccgagcagccagaacaagggccgagggaacagggagggacca

SEQ ID NO: 215848 - RNA, 59 nt, Homo sapiens
ggccgagagccggggacgcgggaaagaaacgccaccgcccagcaaccccacgcgggccc

SEQ ID NO: 215849 - RNA, 60 nt, Homo sapiens
ggccaaaaaggcacgagggaacgggaaagaacagagaagggaacccgcccgcaaaaggcc

SEQ ID NO: 215850 - RNA, 75 nt, Homo sapiens
gaagaaagaacccagaagaaagagggcagagagaagcgaggacagccaaagaccggagcggagagagaagaaaca

SEQ ID NO: 215851 - RNA, 42 nt, Homo sapiens
gagagagagacggaggagcaggagacagaacagacagaaaaa

SEQ ID NO: 215852 - RNA, 51 nt, Homo sapiens
ccaccagcaccaccgcagaccgagaaacggacagcagaccacagcccggca

SEQ ID NO: 215853 - RNA, 88 nt, Homo sapiens
cggagcggcgaagagcaaccagagaccgaaggagcagacgaggcacgagcgccagcgcgagacagacggggcgcagaagcggcggagc

SEQ ID NO: 215854 - RNA, 82 nt, Homo sapiens
agggggggcgcgccggaaaccggagcgcgcagcaggcacgacacaagacgaccaccaccgcggacgggcggcggggaagcgc

SEQ ID NO: 215855 - RNA, 82 nt, Homo sapiens
ccgccgccacaccgccgccacaccgccgcgcccagcagccgagaggacggggacgggccccaggacgaggaagacaaggcca

SEQ ID NO: 215856 - RNA, 78 nt, Homo sapiens
cggggagggacgcagccgggaacgagcgagcgccgcgcagcccaggacgcggccgcacccggacgcacacgcaggaga

SEQ ID NO: 215857 - RNA, 78 nt, Homo sapiens
ccccgggcacgccacccgcccagcccccaagagcggaacacaggcgcccacaccacgcccagaaaagcacggcgccga

SEQ ID NO: 215858 - RNA, 71 nt, Homo sapiens
cgaccgcaacagaacggacccggcgggaaaaccgccacaaagcccccaagccacaagcaacgcgcaggccg

SEQ ID NO: 215859 - RNA, 66 nt, Homo sapiens
aagagcacccgacccacaggccagagaggaaaggaggcccaagaggcgaaacgcaacacggagccg

SEQ ID NO: 215860 - RNA, 76 nt, Homo sapiens
aacacgacaccggcgaggaacggcagggcgaccaaggaaagagccaaaagagccaggaagggccgcccaaaaaaga

SEQ ID NO: 215861 - RNA, 70 nt, Homo sapiens
agcacagacaggagaaagaagacagccacagaaaggacgccagaaagagggcaacggccgacgaacaccg

SEQ ID NO: 215862 - RNA, 56 nt, Homo sapiens
ccccgcacagagagagaaccacaggcaacgaaacgagaacagagcagagaaacgga

SEQ ID NO: 215863 - RNA, 61 nt, Homo sapiens
cggcgcggcggccgggccccgagacggggacgggcggagaacggaaaagcaccaggaagca

SEQ ID NO: 215864 - RNA, 69 nt, Homo sapiens
gcagggcgcccccggaaagaagccaaaaagaggcccggaacgcaccggaaaaacagacacccaaaagag

SEQ ID NO: 215865 - RNA, 77 nt, Homo sapiens
acggacagaaggaacagcccaggacagaggaagaaggagaaagacaaagccccgagaaagaccagcaccgccgaaaa

SEQ ID NO: 215866 - RNA, 79 nt, Homo sapiens
gaccaaacaaacgcaaggacggacccagccgaaggacggaagcggacacgacgcaaaacaaaaggggccaaggacgcac

SEQ ID NO: 215867 - RNA, 87 nt, Homo sapiens
gccaggacccggcccaggagacaagacagccccaggcccccgcccacgcgcacccagcaccaccagcgcccgacccccggaccgccg

SEQ ID NO: 215868 - RNA, 81 nt, Homo sapiens
caccgccccacacggcggagaagcagcggggggccacgcgacaagcgcaccccccggaggcggccgagcccacgcgacgaa

SEQ ID NO: 215869 - RNA, 80 nt, Homo sapiens
cggaacgcagggagcggacagggccggaagaagagggagggaagcagcaggaggaagaaccccaggggacgagggaggcg

SEQ ID NO: 215870 - RNA, 80 nt, Homo sapiens
gagacgaaccaggcaaaggcccggggacacgagaccggccagcagacgaccacgaccggacacacggagagcagagcccc

SEQ ID NO: 215871 - RNA, 67 nt, Homo sapiens
accaagaaccagaccaagagaagagacgagcgggggacggcacgggccgcagaagacagggcggcgg

SEQ ID NO: 215872 - RNA, 83 nt, Homo sapiens
gccgaacggagggcgacggagggagcgccagcaaagcacggacagagaaggaggagaagcgagccaggccagcaacaggcggg

SEQ ID NO: 215873 - RNA, 86 nt, Homo sapiens
aggggcgagagacggcggcggccgaaagcggagagagcgggcgggcggccgggagacccacagaaaagaaagggggcccgagcagc

SEQ ID NO: 215874 - RNA, 72 nt, Homo sapiens
cgccccccagcccgagcgcgcccgagggcgagaaagccaccgagcgaagacccgagaacaagacgccgggca

SEQ ID NO: 215875 - RNA, 74 nt, Homo sapiens
aacgaccaaaaaccagaagggcagccagacaagaaggacacagaagagagcaaagaagcgaaaccgagcaggca

SEQ ID NO: 215876 - RNA, 60 nt, Homo sapiens
gcggaacggagagcaggaagacgcagaggaaacggcagcagaaccgacgaagacacgcaa

SEQ ID NO: 215877 - RNA, 68 nt, Homo sapiens
aaggaaccaaagcgaacagaggccacccagagagagggcccaggggagccacaaggaccaccggacga

SEQ ID NO: 215878 - RNA, 68 nt, Homo sapiens
gcagcgagaccccaggggaagaacgaagcaccaggacggccagaacccaggggcgaagacgaagagac

SEQ ID NO: 215879 - RNA, 83 nt, Homo sapiens
ggcaccaaggcccgggaagggacccggcaaagagagaggcacacgccgccgaaggccaggagcagaggccaacgccccaagcg

SEQ ID NO: 215880 - RNA, 69 nt, Homo sapiens
gccacggacacaacgacagacccaaacgggggaggacacgccagaaagacgaacgaagacaaagcaaaa

SEQ ID NO: 215881 - RNA, 76 nt, Homo sapiens
aaaagccaaaacaaacacaccaaaagagcacaagaacacaggcaaagccgggaggaaaggaaacgggcacagaaag

SEQ ID NO: 215882 - RNA, 69 nt, Homo sapiens
gaggagacccgccggagaagaacaaaccaaggggaagaacgaaaagacaacaaagaccggaaccaaaca

SEQ ID NO: 215883 - RNA, 81 nt, Homo sapiens
caccaacaagaaggaaaaaaaaaagaggaaccagaagggccaccccgaccccaagggcagccgggcagaggagccggccca

SEQ ID NO: 215884 - RNA, 79 nt, Homo sapiens
ccccagcagcaacagcagcagcaagagggaaaaaccccaagaggaagacaaacaaccagcccagaccggaccaaaccag

SEQ ID NO: 215885 - RNA, 53 nt, Homo sapiens
gcagaggaggaacaccaggcacaagaggccaagcggaacagaacagccaagcc

SEQ ID NO: 215886 - RNA, 36 nt, Homo sapiens
agcagccgccacaaggaaagcacggggccaaaaagg

SEQ ID NO: 215887 - RNA, 74 nt, Homo sapiens
acgggcacagacgaaagaaggccaaagaagcagaacgacaaaagccaagggcaaacgaaaaaggacgaaggagc

SEQ ID NO: 215888 - RNA, 85 nt, Homo sapiens
gccgcccccagacggccagccgagcggccggacacagccagacaagcagaccggaagaccgacggaagaccacaccccgagggag

SEQ ID NO: 215889 - RNA, 78 nt, Homo sapiens
gcgagaaggaagaggaagggaacggaggacggaggaagaagcaaggggacaccagaagaacgggaaccacagcgggaa

SEQ ID NO: 215890 - RNA, 75 nt, Homo sapiens
agccccgcgccgccgaccccccggcgccgcgccggcggcgcaaacggggacagcgccgaccggaacagggaccac

SEQ ID NO: 215891 - RNA, 106 nt, Homo sapiens
ggaagaagccggcccggggccgcggacgaggaccagcagaggccagcacgagaacccagaccaagaaccgagccacaaaacagaagggaacgccaagcccaaagcg

SEQ ID NO: 215892 - RNA, 79 nt, Homo sapiens
ccccccacagaaaaggaaaggcagcgagagcccagagaagggaagaaagcggaaaagaaaagaagagaaccaagaccga

SEQ ID NO: 215893 - RNA, 85 nt, Homo sapiens
gagccgacccggccgagcaagcggccgcgcacgaggaggcggcggccgacggggcggcgggagcaggcggaggcagggcgcgacc

SEQ ID NO: 215894 - RNA, 61 nt, Homo sapiens
ccgggagcagaagggaggcccaagacccacaacaaaagaaagcaccgcagacaccgggaag

SEQ ID NO: 215895 - RNA, 80 nt, Homo sapiens
cgaccacaaggggaggacaaccgcccgggaccagagccgcccacgaggacgcgggcccagggcgggcgggccccccaaca

SEQ ID NO: 215896 - RNA, 77 nt, Homo sapiens
aagacaggagaccaaaaagggaaagggagcagcaccggccacacccacagcacgaccggaacccagcgaccgacgcc

SEQ ID NO: 215897 - RNA, 58 nt, Homo sapiens
gggaccagggcaggaaggaaagccaagcgcaggggcaagacgccaagagaaaaggcga

SEQ ID NO: 215898 - RNA, 60 nt, Homo sapiens
ggaccaggcacaacaggcccaacacgcagacggcagaaagcgaggaggccgggcgcaccc

SEQ ID NO: 215899 - RNA, 83 nt, Homo sapiens
gcaggacaaaacccccaagcaaccccaagcaaaagggcaaacaaggcaggcagcggaagagaaagaccgaggcaaagaagcag

SEQ ID NO: 215900 - RNA, 49 nt, Homo sapiens
ggcccagccaacaccccggagcagaccaccgcccagcaaaaagcggcgg

SEQ ID NO: 215901 - RNA, 62 nt, Homo sapiens
agaaagaaagaagcgaggcagacagaagagaaggggacagacacaaagaggaaacagaaccg

SEQ ID NO: 215902 - RNA, 78 nt, Homo sapiens
ggcaggaagagcaaagcgccaggccaaccagagacaccagcaggacaggaaaaaaagagccaaagcgaggccaggaac

SEQ ID NO: 215903 - RNA, 73 nt, Homo sapiens
gagccccggcacccagcaaggaaaaggacgagagggacagagaaggacaagggagaaacggaacccgaaagaa

SEQ ID NO: 215904 - RNA, 68 nt, Homo sapiens
ggccgagacccacccaacaggcccaagcccaggaagaggaaaaaccccgcgcccggcacaaagaggca

SEQ ID NO: 215905 - RNA, 79 nt, Homo sapiens
acaacaagacgacaaccaagaggaaagggggccagcaacccagacgcccacaggacaaagcacagcaaggaggaaacag

SEQ ID NO: 215906 - RNA, 47 nt, Homo sapiens
caaccgaaagggccagcggccggacaggacagcagagcaaaggccaa

SEQ ID NO: 215907 - RNA, 87 nt, Homo sapiens
ccagacgaagacagcccggacaccgacagcacagacagaacccgcaccaacacaccgaaggcgcaaaagacgaaaagacaaggacga

SEQ ID NO: 215908 - RNA, 65 nt, Homo sapiens
ggacaagagagaggagacaaaagcaccaaagcgacagaggccgcgacagccaccaaagcagcgcg

SEQ ID NO: 215909 - RNA, 34 nt, Homo sapiens
gccccagcaccggagcaggaggaggagggagaca

SEQ ID NO: 215910 - RNA, 67 nt, Homo sapiens
gcagccaccggcccacagagcggccacgagggaacccggagcagcacccgagggagagcgcaccacc

SEQ ID NO: 215911 - RNA, 72 nt, Homo sapiens
acacagaccagaccagcacccagcgaaccacagagggcgacaaacgggccacaaagcacggaacgaaaacga

SEQ ID NO: 215912 - RNA, 79 nt, Homo sapiens
gacaacgggagagcggggcaagcacagaaaagaagcaacagaagaagaagcgcagggagaagaaacgaacggaacgagg

SEQ ID NO: 215913 - RNA, 55 nt, Homo sapiens
gaaagcaagacccaggacaccccgaagccgagaaagaacaaccgccagggaacag

SEQ ID NO: 215914 - RNA, 71 nt, Homo sapiens
ccgcacaccgccaaccccgcaccggcaccagagcagggcaacagaaagccacaaccggacaagaaaaaaaa

SEQ ID NO: 215915 - RNA, 64 nt, Homo sapiens
cggggcggcccggcggaggagacggccagaagaccccgggaaaggcgacgcccacgcgcccgca

SEQ ID NO: 215916 - RNA, 80 nt, Homo sapiens
gccccgagaggaacccagccgacacgacgccgccggcaggcccgcgcaccaggcaggcccagaaaccaccacaagacacc

SEQ ID NO: 215917 - RNA, 72 nt, Homo sapiens
gccgggccgcaggaaacgcaagcccggaagcagaagcgacagaccaaagccgcgcccagcaggcgcccagca

SEQ ID NO: 215918 - RNA, 69 nt, Homo sapiens
cacaacgaagacacagaaggggcaagcaaaggggacccaagaagaacagaaggaagacaaagagacggc

SEQ ID NO: 215919 - RNA, 68 nt, Homo sapiens
gacggggagccagacaggggccaaaaaggagcagcccaccccccaaaggacccaaagacaggaccacg

SEQ ID NO: 215920 - RNA, 78 nt, Homo sapiens
aacacccaccacagcagagaagaagcacagacgagaaacaaggcaagaaggcagccgagaagccaaggaggggcccga

SEQ ID NO: 215921 - RNA, 59 nt, Homo sapiens
gaaacgccaggcccggaggccaggagaggaagaccgcaggaaagcaggaaggcaagaaa

SEQ ID NO: 215922 - RNA, 75 nt, Homo sapiens
acccagccgggcaagcacgaagccaaaggaccgacccaaaagcagaggcacacgacaagaaacagacagggggca

SEQ ID NO: 215923 - RNA, 72 nt, Homo sapiens
gaagaggccgaagaacgcccgccacagaaccgcagacccagcaaagagcccgcccgaggacgccccgaccga

SEQ ID NO: 215924 - RNA, 85 nt, Homo sapiens
aaagcgagcgcgaggaaaaggcggcgggagcggcccccaggcacgaagcgaagaagaggagagaagcagcggcgcagacgacggc

SEQ ID NO: 215925 - RNA, 87 nt, Homo sapiens
ggcccaaggccagcccgcagggagagaaggaaccaggagacagcagaacagaggggacacacagcagagaaaccggggcaaccggag

SEQ ID NO: 215926 - RNA, 70 nt, Homo sapiens
aaacacccacggaaccagagacgacagacgagccagcgcagcagccgacacgggagccgagccacaagcc

SEQ ID NO: 215927 - RNA, 58 nt, Homo sapiens
cggacccccagcacgaccgcaggagagagaccgcggcgcgggagaaggggagcggacc

SEQ ID NO: 215928 - RNA, 82 nt, Homo sapiens
aggcagagacgggggaagcagcacgggacccagcccaggccgcacggacggggggggggacaggagagagggcaagagacga

SEQ ID NO: 215929 - RNA, 75 nt, Homo sapiens
caaaagggggggcaggaaagagcgcaaacgagaacagcacgcacccaagacgccgagacaaggaagcaagccaac

SEQ ID NO: 215930 - RNA, 71 nt, Homo sapiens
ccccgagagcggaacagggaacaaccagcaggagaggaaaaaggcccacgacaccccgcaggccggcaaag

SEQ ID NO: 215931 - RNA, 70 nt, Homo sapiens
ccgaaaacaccaggaaagacaggagaccaaaaagcccaaggagcggaccccgcggcccccagacgcgcgc

SEQ ID NO: 215932 - RNA, 63 nt, Homo sapiens
accgcgccagaccgcacagggacgggaccggaaggacgagaccggggcagaggagggagaaag

SEQ ID NO: 215933 - RNA, 69 nt, Homo sapiens
ggacgagcgggaccagccagggcacggagcgcaaagagcgggaaccggggaggacggcgcacccagcca

SEQ ID NO: 215934 - RNA, 75 nt, Homo sapiens
caagaaccgcacagacgccgcgccacccccagaggacaagcagcagcaaagcgggggagccccccgcccaaagcg

SEQ ID NO: 215935 - RNA, 82 nt, Homo sapiens
gcagcacagggcaagacccaacgccaaaaggcaagggggcccaccccgcaccccgcaccccaaacgcagcccgacgagcacg

SEQ ID NO: 215936 - RNA, 78 nt, Homo sapiens
gacagcaagggagcaaggagaagagccaggaagagaaggagaaccaccagagcaccaggcgcagcagaacaagcccga

SEQ ID NO: 215937 - RNA, 61 nt, Homo sapiens
gccagcaccgacgaacccagccccagaacggccaccaccaccacagacagagggaagagcg

SEQ ID NO: 215938 - RNA, 74 nt, Homo sapiens
gggaaagggaaaggagaaggggaaccaggcaaaaggggacagaggaccccggcccaacgggcaagagagcaaga

SEQ ID NO: 215939 - RNA, 71 nt, Homo sapiens
gaaccggcgaaaaccggagagggacaccggccagaccaacaagagacgagaaaacaacaaaaaaaaaagcc

SEQ ID NO: 215940 - RNA, 59 nt, Homo sapiens
cggcaccccgccccaccgccgaccaagaaggaggaggagcgcgaagaagaccacagccc

SEQ ID NO: 215941 - RNA, 70 nt, Homo sapiens
cgccgccacacgcgcaaagcccggcagaggggcgggcaaaggagaggcacaggaagcagaggcaagaaac

SEQ ID NO: 215942 - RNA, 76 nt, Homo sapiens
acacgcaagcaggcaaccgaaacaggggcaagacgccaagagaaaaggcgagagcacaaagcaccaagagccgaga

SEQ ID NO: 215943 - RNA, 80 nt, Homo sapiens
gggagcaacgggaggccggacccagcgagcgggcggcacgcacgcagcccggggcaagacggcagcccggggcagaagag

SEQ ID NO: 215944 - RNA, 82 nt, Homo sapiens
acaaagcacaccgccaaacccaggccagagcacagaaggcgggcccagacccccaccggagccaggagggagaaaccacagc

SEQ ID NO: 215945 - RNA, 86 nt, Homo sapiens
ggacggggacgaggacgaggacgaggaaaccgagcgcggaccccgagccagcgggcggcgggaggaaggagacccaacaccccggc

SEQ ID NO: 215946 - RNA, 71 nt, Homo sapiens
cccccccggcacgacaccgccccaacccacgagaggacagcccaggacccccccagaggacccgagaccaa

SEQ ID NO: 215947 - RNA, 78 nt, Homo sapiens
cgggggaacaagaccgacccacaaggccgcacaccaggacagaagaagcaacccccccgaacaagacaggagccaaaa

SEQ ID NO: 215948 - RNA, 77 nt, Homo sapiens
gggagcggaggacacgggggccacaaagccccccggagacgcaaccaagagagacggggccacaggggccacgcgac

SEQ ID NO: 215949 - RNA, 77 nt, Homo sapiens
ccccccagagagccagaaagaacagggcagaaaagaacagacccagaagaagcgaaaggggagaaagaagaaagcaa

SEQ ID NO: 215950 - RNA, 68 nt, Homo sapiens
gcaggccgcccccggcaaggcgcaccggcgccgagacccagacccaccggaggaaacaggagggccgc

SEQ ID NO: 215951 - RNA, 70 nt, Homo sapiens
agagggaccgaagaagacaggggaaagccaacagccaaaaggccaagccacagcggagaaccacggggca

SEQ ID NO: 215952 - RNA, 67 nt, Homo sapiens
cccggcacacaaaagccgagccgacccggccgacccacgggaagagagaagacagcagcgaacaaga

SEQ ID NO: 215953 - RNA, 73 nt, Homo sapiens
gcagcgagaacaagcaagagaagagagaggaaggaacagagcaacgaaaacgaaaacgaaggccagaccacgg

SEQ ID NO: 215954 - RNA, 71 nt, Homo sapiens
agcacaagagaaggaaaaggagaaaggaggacccgggaagacagagacgggcaacggaaagcgaacaccaa

SEQ ID NO: 215955 - RNA, 59 nt, Homo sapiens
gcaccccagccccccgggcaggaccggaaggaacaacaccaaacccaagagggcagcgg

SEQ ID NO: 215956 - RNA, 81 nt, Homo sapiens
caagaggaggacagcgcacacagcaagcacgaggaaaggcagcaccaacaacagaaccaaaaggcaaggcggaacggcaaa

SEQ ID NO: 215957 - RNA, 82 nt, Homo sapiens
cggcgccccgagccggccgagcggcgacggaccgcgaggggaagaaggaccgggaaaaggccccagaagaggacgcgcccaa

SEQ ID NO: 215958 - RNA, 88 nt, Homo sapiens
cgcggcagccaccccggccgccaaaccccagcggaacccggccacagccagcagcagaccgaggaagccgacaggaccgggggcacgg

SEQ ID NO: 215959 - RNA, 80 nt, Homo sapiens
gaggagccagacgacaagcacacacaggcgcgaaacggaaaaagggaaaacaaaggcagagaagccagacggcaaaagca

SEQ ID NO: 215960 - RNA, 72 nt, Homo sapiens
gaggccggcgacccacaggcacaggccacagccagggaggcaagcaggggggcaaaggaaagaaggcagaaa

SEQ ID NO: 215961 - RNA, 68 nt, Homo sapiens
ggcggacagcggggcccgcggaaaacagcaaggcgccaccggaagaaacgggaggggaggagccggga

SEQ ID NO: 215962 - RNA, 56 nt, Homo sapiens
gcgggggcggcggcagggggcggagcggggacgcgaagaagcccccaccaccacga

SEQ ID NO: 215963 - RNA, 91 nt, Homo sapiens
aggaaacagaggggcagggaccgaagaagcggacagaaggcacgggggcccgcacgagaaagacacggcagcgcaggcagaccgcaggcgc

SEQ ID NO: 215964 - RNA, 74 nt, Homo sapiens
caaaccacaacgaccaccccgaaccccggagaggaagaagacggcacgggacccccagcacaggcagcaggccg

SEQ ID NO: 215965 - RNA, 115 nt, Homo sapiens
gcgcacgcgccgggcccggacccgcgcagcgagcccgagcggcagcgccggagcgggcagaggggcaggagccgccgacccagccgacccacgggcagcgcgcgaccaacgggga

SEQ ID NO: 215966 - RNA, 94 nt, Homo sapiens
gccgcgcggggggccacggcgccgccggcgcggccggcacacgagaagacgaccccgacgcaggccaggagccgcggacagaagccgagcacgg

SEQ ID NO: 215967 - RNA, 53 nt, Homo sapiens
aaaccggacgcagaaagagagggcaggcgccgggaggggccgggggccagccc

SEQ ID NO: 215968 - RNA, 79 nt, Homo sapiens
cacaacaagaaagcagaaacgaaagaaagcaagagaccaagaggggggagaccggaggacccccaaacaacccggagag

SEQ ID NO: 215969 - RNA, 79 nt, Homo sapiens
agaaaccaagcgggaggccgaggccagccaagcgccaaaaggaacgaaggcggggaaggacaagagcggggaggaccgg

SEQ ID NO: 215970 - RNA, 56 nt, Homo sapiens
ggcgaggccccagaccacacgcgagaagaagaaaagaagagagcgaggagcggcag

SEQ ID NO: 215971 - RNA, 72 nt, Homo sapiens
gagcgccacgcgcggaaggcagcgcccagcagcgcaggccggggggggcacagagccccggaagacagcccc

SEQ ID NO: 215972 - RNA, 72 nt, Homo sapiens
agccccgagaccgggaacaggagcaagaggggagggaaaaggaaaagcgcgaaagagcaccagcccggaaaa

SEQ ID NO: 215973 - RNA, 76 nt, Homo sapiens
caccccggagcccacaggggaagagaccgagaccaggaaccaggcaggggaacggagcgaaccagggagcggcaag

SEQ ID NO: 215974 - RNA, 74 nt, Homo sapiens
cagcggaaaagaccagcacaggcgacccagaaagagccacccgaagcagcccgggaaaaaagacaaccacaaca

SEQ ID NO: 215975 - RNA, 81 nt, Homo sapiens
accaggagcgcgccgacaggagggcaagagccgaaggaccgcgaccaaagagagaagaaacagagcgaccggaggagacag

SEQ ID NO: 215976 - RNA, 86 nt, Homo sapiens
acaagcggcagcggaaccgggccagacgccgcaccagaaggccggccagggcagaagcgggaagcgcgccgggggcccggaaaggg

SEQ ID NO: 215977 - RNA, 58 nt, Homo sapiens
gaaaaggccaagaaggcaggacaaaaacgcggaggggaccagagaccaaaaaaaaaac

SEQ ID NO: 215978 - RNA, 81 nt, Homo sapiens
gaccccaccgccggcgcgggaaacgggcgaagcgacgagccgcgaggagagcagacgaagaaagagaagcagaacgaagaa

SEQ ID NO: 215979 - RNA, 40 nt, Homo sapiens
cacaagccacagcagaaggggaggagccacgcgcccaggc

SEQ ID NO: 215980 - RNA, 68 nt, Homo sapiens
aaaagaagcaacacaaggacaacggcccccggaaggcaagaagagaaccgacagcacaaggaaaggag

SEQ ID NO: 215981 - RNA, 69 nt, Homo sapiens
aggagcccgagagagaagggccgcggcgccacgagaaccccagcagccggccggaaggcggagagggca

SEQ ID NO: 215982 - RNA, 38 nt, Homo sapiens
ggcagggcacagaaacacgccgagaccaagaccacgcc

SEQ ID NO: 215983 - RNA, 73 nt, Homo sapiens
acggagcacagccgaggcccgcgagggcgaggccgggagaggggcaagaacggaagcacgggcggaggaaagc

SEQ ID NO: 215984 - RNA, 82 nt, Homo sapiens
agacggaaacaaggcaacagaaagagcaacagcagggcaacagcgaacccagcagaaaagcggccaaagcgggaaggaagag

SEQ ID NO: 215985 - RNA, 87 nt, Homo sapiens
gcccaagccgcacagccgcggcggcagcagcaggagagaccgggcccccagcagccaagggccgcgagcccgggaggccacagaaag

SEQ ID NO: 215986 - RNA, 74 nt, Homo sapiens
aacaaagaagccggcaggccaacaagccaaaccaagggccagagaagaccaaaagggaaaaaggaccagcaaaa

SEQ ID NO: 215987 - RNA, 42 nt, Homo sapiens
ccccgccgcgcccgggcggcgggacgagccggagggaaggag

SEQ ID NO: 215988 - RNA, 82 nt, Homo sapiens
gggcgcccgagaaggggacggcgggcgagggaggggaccgccgcgcccggcagggcccggcccgccccccacccccggcccc

SEQ ID NO: 215989 - RNA, 83 nt, Homo sapiens
ggagaccagcacccagaagagagaccgcaacgagaacaaagggccgggagcgagaccccgccccggacccgacagccgcagag

SEQ ID NO: 215990 - RNA, 64 nt, Homo sapiens
acgccaagggcaggggagggaccgccgcccggcaaacacggaaccaccacgccgaccaaacagc

SEQ ID NO: 215991 - RNA, 47 nt, Homo sapiens
cgcgggcaggcagagcaccagaaggaggaagcaccggagcaaaacgg

SEQ ID NO: 215992 - RNA, 67 nt, Homo sapiens
cgggcgcgcgcacggcaggacggagaccagaccccgaagaagaaaagagccagacaaagggaaagga

SEQ ID NO: 215993 - RNA, 56 nt, Homo sapiens
aaaagggcagggacagcgcaggcagcaggaaaccccccaggcaagaggcgcaggac

SEQ ID NO: 215994 - RNA, 56 nt, Homo sapiens
ggaccaaaggccgggcgcagaacccccagaccacaaaaaggggaagaaggccaacc

SEQ ID NO: 215995 - RNA, 75 nt, Homo sapiens
acgaaaaccacacccagggacccccagaaggaacggagacaaaaacggcccggagaggagagaaaccccagggac

SEQ ID NO: 215996 - RNA, 96 nt, Homo sapiens
cccggcccccaaccgcgccagcggagcgaacccgagagcgggagcgggcgggccaggcacacagagaaaaaaagggaacaaaacacagcaagcaga

SEQ ID NO: 215997 - RNA, 73 nt, Homo sapiens
cccaccacggagaaaaagacggaggcaagacagagaacagaaaaggagaaaaggagaaaaggaccgaaagagg

SEQ ID NO: 215998 - RNA, 59 nt, Homo sapiens
cgaccaccaggccaacaacacagcagaaccgccagagaagaggcaagaaggcgcgacgc

SEQ ID NO: 215999 - RNA, 67 nt, Homo sapiens
cggcagcaccagccgggagcaaaagcaccccgcaccaacgagaagaggaaggccgaaagaaggaaaa

SEQ ID NO: 216000 - RNA, 82 nt, Homo sapiens
ccccaccgccaggaccccccaggagagcgccccagggcaagccccgcccggccaacaacacgcagcaacgcagagagcaaaa

SEQ ID NO: 216001 - RNA, 74 nt, Homo sapiens
ggccgccgggacccggccaccagcaagccgggcggagaacggaaaagcaccaggaagcagagaggaccgcagaa

SEQ ID NO: 216002 - RNA, 69 nt, Homo sapiens
gaaaaggaggaagaaaacaaccggacacacccgggccaggagacggaagcggaagcacacgccagacgc

SEQ ID NO: 216003 - RNA, 58 nt, Homo sapiens
aacgaaggaaggacccaaaggaacgcgaacacgcgaccccggcaggaggacgccgagg

SEQ ID NO: 216004 - RNA, 76 nt, Homo sapiens
agggccagcaggccgggccgagagccaaccgggggccggcaaggcccggagaggagccaagcccaacgggacggga

SEQ ID NO: 216005 - RNA, 83 nt, Homo sapiens
agccacggagaaaaacggccaagaggcagaccaggaaagggaaaggcacacgggaagaaaaaaaaaacaaagaagaggccaaa

SEQ ID NO: 216006 - RNA, 79 nt, Homo sapiens
cgagccccgcgggccgacccgccgcgacgcccacccgaggggacgccggccccagagcgagcggggccccgagggcccc

SEQ ID NO: 216007 - RNA, 76 nt, Homo sapiens
cacgggaggaagacccaaaaggggaagagccaagaaaaaaaagagcaagggccggacaaaaggagacaaagggaac

SEQ ID NO: 216008 - RNA, 74 nt, Homo sapiens
gcaggaaacaccaagaaaaagccaaagcaagagcaggcgacacgcaggagcagcccagaagaccagcaccggaa

SEQ ID NO: 216009 - RNA, 57 nt, Homo sapiens
gcggccaggcggcgacacgccaaccccgcgagaaccagccaaaacacacgaacaggg

SEQ ID NO: 216010 - RNA, 68 nt, Homo sapiens
agccaaggacagaggaccaaagcggaccagagacaggaaggccacgcggcgacccaacggagacgaga

SEQ ID NO: 216011 - RNA, 58 nt, Homo sapiens
ggaaacccacaccgggccgggagcaaccacggagccccgacggcccagaccccaacag

SEQ ID NO: 216012 - RNA, 69 nt, Homo sapiens
ccagagacgccgagcaaaagcccagaaggggagaaggaagaagccgacgagaaccaaagggacaaggcg

SEQ ID NO: 216013 - RNA, 83 nt, Homo sapiens
gaacggaagaggacaagagacgacacgcaagcaggcaaccgaaacagcacaccgaggagaagaccaggggaacaccaaaaacg

SEQ ID NO: 216014 - RNA, 77 nt, Homo sapiens
ccaaaccaagccgcagggggaagggggagcgggccggagagaagagaggggcgcgaggagaaggaaacaggcccgga

SEQ ID NO: 216015 - RNA, 78 nt, Homo sapiens
gcaggagaagaggcggcccacagaagcaaaccccgggaggagaagacgccagccgaggacggcgggaagaaaaagagc

SEQ ID NO: 216016 - RNA, 80 nt, Homo sapiens
ggaccaccaacacaaggaaacaaacaacaaaaacaaaagccagaaaaccccaaagcaaacgagaaccaggaggaacacgg

SEQ ID NO: 216017 - RNA, 61 nt, Homo sapiens
gggaggggccgggaggcagaggggcaggggaggcacaccagaggcagaaccacaacccacc

SEQ ID NO: 216018 - RNA, 73 nt, Homo sapiens
gggacacgacccggagcacccgaccccgaacaggaagggaaggggcggagacgggcggaacgcaggaggccag

SEQ ID NO: 216019 - RNA, 79 nt, Homo sapiens
aacgcgagccgccaagcaacagccacggaagaaagcaggccgcaagggcgggggaaacaagcaggggggcaggaagcaa

SEQ ID NO: 216020 - RNA, 79 nt, Homo sapiens
ggaagaagacccagggaaacccccagggaaaacgacaacgccaccacgagaggacacaagaggagcagaggcgcagagc

SEQ ID NO: 216021 - RNA, 77 nt, Homo sapiens
ggcaagagccggcaccaagggaaaacagggaaggggaagacggcagcgggccggaggcccaaaagaaacaagaaacc

SEQ ID NO: 216022 - RNA, 86 nt, Homo sapiens
gcgggacgcggcgagaaagcacgggggaaacgaccacaggccaccacccaccaccacgaaggccgaccccccgcacgggccgccac

SEQ ID NO: 216023 - RNA, 80 nt, Homo sapiens
agacgggagcccgccgcgagagcgcagggcccccaaggacgagaagagaccagacagccacccaaggaaaccaggaggag

SEQ ID NO: 216024 - RNA, 78 nt, Homo sapiens
aggagcaccggccaggcccagaaacggacgaggacagcaaacgaccaggaaaagggggaccaaggccacaaaaggaag

SEQ ID NO: 216025 - RNA, 38 nt, Homo sapiens
cagacccggcacaaagagggcgaaaacacagaaacacc

SEQ ID NO: 216026 - RNA, 65 nt, Homo sapiens
cagaagcacaagcgccagcgaagcacgcccagccaaccagaaacccaggacaaaagcggcaagag

SEQ ID NO: 216027 - RNA, 78 nt, Homo sapiens
cggagaagcaggagcccaccggcaggccaggaaaaacccaagaagcccaaagggaagcccaagggaagacaaaagaca

SEQ ID NO: 216028 - RNA, 63 nt, Homo sapiens
aggccaagagccccaaaagacaacggcaagcggagaagagcaaggccgaaccgagaggaaggg

SEQ ID NO: 216029 - RNA, 83 nt, Homo sapiens
gcgaaaaagaagaagaaaaaaaaaaggcagaacccgagacaaccaccgggggccaccaccgaggaggaagcagagccccgggc

SEQ ID NO: 216030 - RNA, 57 nt, Homo sapiens
gccggaggggagacgggaggcagaaggaccccagcccaggccggggcgccggaggcc

SEQ ID NO: 216031 - RNA, 68 nt, Homo sapiens
gcagcgcaagcgcacggagaaggaggcacgcagaccaccgaaaggccggagaggggaagggcacgaga

SEQ ID NO: 216032 - RNA, 82 nt, Homo sapiens
cagcgagccccacgccggggaggaggagccacggccggggacagaaggagaagaagcaccagccgacgcgaacggaacaccc

SEQ ID NO: 216033 - RNA, 59 nt, Homo sapiens
aaccggagagaggagaacgaacaccggaccgccagggcacaaacaaagaacacaagacc

SEQ ID NO: 216034 - RNA, 87 nt, Homo sapiens
gcggcagaacccgagaccaaaggcaccgggccggcgcggggcccccggggccggaaagggacccagaggaacgcaaggaagaaaagg

SEQ ID NO: 216035 - RNA, 81 nt, Homo sapiens
gggagcggcaacgaccgcggggcgcagagaccggagacaaaaagaggccaagaccaagaggacaggggacagcgcccagac

SEQ ID NO: 216036 - RNA, 78 nt, Homo sapiens
cacccccccaggaggcgaggagagggggcgcaggccccagagggaccgaagcaggaaacaacccacagccagcggagc

SEQ ID NO: 216037 - RNA, 77 nt, Homo sapiens
gacggaaacaggaccccaacaaaacacagcaccgggccgaaccagaggggcagagaaaacgccagaaggacagagca

SEQ ID NO: 216038 - RNA, 77 nt, Homo sapiens
cagaccagaccgccggggaaggaacggaaaacagccccaaagcagcagaccgaagaaagaagacccgcaacgacaaa

SEQ ID NO: 216039 - RNA, 74 nt, Homo sapiens
ggaacgcacgaaaaggaaccaggcgccccaggagaaggaccgaagcgcagcacggcgaggcacaggccagccca

SEQ ID NO: 216040 - RNA, 76 nt, Homo sapiens
gccacagaccagcaccacggacggacagcagcccacccggacggacgcaggaccccccccaccccaggagaccagg

SEQ ID NO: 216041 - RNA, 42 nt, Homo sapiens
accgcgcggcaggccaggggaccggacagagaggcgcaggca

SEQ ID NO: 216042 - RNA, 72 nt, Homo sapiens
aacacacagaaaagaccgaaggaccaggaaaacagaggcccaaaaaagcaaaacgggagaaccagacaaacc

SEQ ID NO: 216043 - RNA, 79 nt, Homo sapiens
gggccaaaggacagagaagacggggcagagagaagagcacacagaaggccaggagcgacagagcggggaacacgagaca

SEQ ID NO: 216044 - RNA, 77 nt, Homo sapiens
aagagcaagacaccggacaccgagggcccccaaaaggaaaaacgggaaagagcgcagagggaccaaccgaaagagga

SEQ ID NO: 216045 - RNA, 69 nt, Homo sapiens
agccgacccaacaggcgggcgccaggcaccaggaacgagggaaaccccaaaacggggaagcgaaaagaa

SEQ ID NO: 216046 - RNA, 58 nt, Homo sapiens
cagaccggaagaacgggaacccccgcagcaggaagcacaaaagggccccggaaaaaag

SEQ ID NO: 216047 - RNA, 55 nt, Homo sapiens
gaacccaaaagccgacaaccccagaaacaggacaaggagacggccacagaggggg

SEQ ID NO: 216048 - RNA, 81 nt, Homo sapiens
cagacgggagccacaccccccaaccaagccggcccagaagaggcaggaccccgcagaagcggcaacacgggcgcggaccgg

SEQ ID NO: 216049 - RNA, 70 nt, Homo sapiens
caagcacaaggggaaaggcgcaacacacgaaaaggcgaaaaggagaaggcacacgcccccacagcccccc

SEQ ID NO: 216050 - RNA, 66 nt, Homo sapiens
cgcccccgccccccgcgccggcgcagaaaaggggaagaaggccaaccgggggccaagggggaaggg

SEQ ID NO: 216051 - RNA, 71 nt, Homo sapiens
aaaaaaaggaccccgaaaaagcaaggaacagaagccaccgcaaaaaaagagcaagaccaggccaggacaaa

SEQ ID NO: 216052 - RNA, 74 nt, Homo sapiens
gcaaacagccaacccagagagcgaaggagaacgggaggcgggaacacaagaggcaaaagcagaccggaaaaccc

SEQ ID NO: 216053 - RNA, 70 nt, Homo sapiens
acgcagaacccgggagaggagaccagaacgaacccccccccccggggacaaagcaaaaaaccaacaagaa

SEQ ID NO: 216054 - RNA, 72 nt, Homo sapiens
ccgccggagccaccgggcgcccagacaccgaacaagcgcgcaagacgcaacacaaacgagaaagacagcccg

SEQ ID NO: 216055 - RNA, 76 nt, Homo sapiens
caccaagggcgcccccccggaacggcaccacaaggggagaaaccagaagaagacccggcacacaacacggggaagc

SEQ ID NO: 216056 - RNA, 73 nt, Homo sapiens
caagaagcccaccggagcgcaaccacagaaggggaacagacaagaaaaagggaagggagaaaaaccaaagccg

SEQ ID NO: 216057 - RNA, 67 nt, Homo sapiens
cggcccgcgggaccgacagccgggcagagacccgaggggcgagcgcgccgacacaggaaggcgggga

SEQ ID NO: 216058 - RNA, 82 nt, Homo sapiens
ccgccgcagccaccgccccgcggaccaagcggcagcaaaaaacaggggaaaggcccacacggccgggaaccacaaccgccac

SEQ ID NO: 216059 - RNA, 85 nt, Homo sapiens
cgagccagggaggcgaggcccgcaccggaaggcaaggccacaaccggggcgaggccaagccagggagacccagagaagaccgcag

SEQ ID NO: 216060 - RNA, 70 nt, Homo sapiens
aggagggaggaaaacaaccgagggcagagggggggcgcaagccagcgcccagggagggcagccgcagacc

SEQ ID NO: 216061 - RNA, 54 nt, Homo sapiens
ggcgccccgccacacagccagccaggagagaccagggaagacacgggagcgccg

SEQ ID NO: 216062 - RNA, 74 nt, Homo sapiens
ccagggcacagggagcagccgaagagcaaaggccacaaaaagccacggcgaagaaacacgaaagagacaggaaa

SEQ ID NO: 216063 - RNA, 85 nt, Homo sapiens
gcggacgggaaggcgggagacgagaagccgaaaagcgcagcgagcggagccgccggagagaaaaagcgcgacccagcaacacccc

SEQ ID NO: 216064 - RNA, 74 nt, Homo sapiens
ggaagcagcaccaagcacggccaacgccggcacagggacccagaagcgcgccaggacaaacacggaccgcaccg

SEQ ID NO: 216065 - RNA, 73 nt, Homo sapiens
gagaacagcggccagagaggagaacaagaggaagggaggagaacaccaaacagaggaacaggcggacagccaa

SEQ ID NO: 216066 - RNA, 75 nt, Homo sapiens
acagagcaggacaggacggagaggaggagcaagagaacgccaaaaaggagagaggacgcacgcgggggaccaacc

SEQ ID NO: 216067 - RNA, 68 nt, Homo sapiens
gaggacccaggagaaacgccccaaaaaccagggggaaggccccgggcagccgagcgccagggaaacaa

SEQ ID NO: 216068 - RNA, 74 nt, Homo sapiens
gagacgacagaaaaagagaggaagggacccagaacacagaagagaacccgaacacagcaggagcaagcgggggc

SEQ ID NO: 216069 - RNA, 62 nt, Homo sapiens
ggacccggagccgcacaaaccagggccgccagaagccagaaacaacgaagcaagcccaaggg

SEQ ID NO: 216070 - RNA, 48 nt, Homo sapiens
aagccagagaaaaagcggagaaaaggcacggggccgcaaggccaggcg

SEQ ID NO: 216071 - RNA, 56 nt, Homo sapiens
gagaaggaaggaggaggagaacacaggggaggagggagacaggggcaaaaaacggc

SEQ ID NO: 216072 - RNA, 87 nt, Homo sapiens
ggcgccacaagccacacggagggcgaagcggccaggcccgggcggacgcagagccagagcgccccagaggagcagagggccggaaag

SEQ ID NO: 216073 - RNA, 83 nt, Homo sapiens
acaagagaagccgcagaaaagccagcagagacaccagggcacagcccaacagcaacgacaggcccacccccagagagacacag

SEQ ID NO: 216074 - RNA, 100 nt, Homo sapiens
agaccgccggagccaggaggacgaagggccgcgccaagaagaggacaagagggcagaagaagaacgcgagcgcagaggcaggcgggccgggggcagcgag

SEQ ID NO: 216075 - RNA, 74 nt, Homo sapiens
cacaagccaacacacgaccagggcaggcgccgggaggggccgggggccagcccggacccagccggaaaaggcgc

SEQ ID NO: 216076 - RNA, 78 nt, Homo sapiens
cccgcaccagcggggcgagagggggcaggggcagccgccagcccaaacaggcggcacagaaaccagagacgaccacaa

SEQ ID NO: 216077 - RNA, 57 nt, Homo sapiens
agcgggagcgcagcgaccacaccgaaggacaaggacacaccagcacacacccagcgc

SEQ ID NO: 216078 - RNA, 77 nt, Homo sapiens
ggaaagggacaagaagggcaaagccgaagaagaggggaggagagagcagaacggagaacaggagaagagccagccga

SEQ ID NO: 216079 - RNA, 78 nt, Homo sapiens
cggcaagcccgcagcacagcagccccggaggcgccaccgcaccaggaggagacgaacaggagaaggaacaaaggaaac

SEQ ID NO: 216080 - RNA, 72 nt, Homo sapiens
cgccgcccgcacccgaggaaccgcggggcacaaaaccagcaaacagaggcgcacgaacagaggcacgggaaa

SEQ ID NO: 216081 - RNA, 56 nt, Homo sapiens
cgggccgcgcacggcaaggggccagaccccggaacccacagccaagagccaggcac

SEQ ID NO: 216082 - RNA, 75 nt, Homo sapiens
aagaccaagacacgagagcagacagagacccaccaaggggggaaaaggacagcgacacagggaggaccaggccgg

SEQ ID NO: 216083 - RNA, 55 nt, Homo sapiens
aagaggaggacagcgcacacagcaagcacgaggcacgaagaaaccagagacagca

SEQ ID NO: 216084 - RNA, 66 nt, Homo sapiens
gccaagaaaaaaagcaccaagaaaagccaggcaggcaaccccggaagaaagcccaagcgcaggggg

SEQ ID NO: 216085 - RNA, 40 nt, Homo sapiens
agaaggacggcccgacggaaggacggccggagcagcagaa

SEQ ID NO: 216086 - RNA, 82 nt, Homo sapiens
gagaagaagacaggcaagaaggaaaggcagggagaacacaaaacaggccaaaagggcagaaaacaaaagacagaagacgcag

SEQ ID NO: 216087 - RNA, 67 nt, Homo sapiens
gacgcaggcaaaaacaagccagggacccacgacacacggagcagacgagccaccgagcccgggagcc

SEQ ID NO: 216088 - RNA, 79 nt, Homo sapiens
cccgggcgaggcagagaagggccaggagaggagcacgaggacaggccccgacgaggacagaaacgccaagagcgagcgg

SEQ ID NO: 216089 - RNA, 82 nt, Homo sapiens
cagagccgcacacaagaaaggcaggagcgagcgggaggcgcagcgcccggcacagggcgggcagccccaggcccagagacgg

SEQ ID NO: 216090 - RNA, 77 nt, Homo sapiens
ggccagcgggaagaagcacagcccgccaaggaacccgcggggcagaccacaccagcacacccagcacggcaaacaaa

SEQ ID NO: 216091 - RNA, 68 nt, Homo sapiens
aaaaaagaaacacgaaaaaagccgcaaaaagaggaaagcgcaaagccgacgaggagagaccccgcagc

SEQ ID NO: 216092 - RNA, 97 nt, Homo sapiens
cgaaagcaggaaagaaaaggcaggaaacccagagacgggcgccaaaggaccgaacgacaaagcaagggaaacacagcagcagaggccagcaaaccca

SEQ ID NO: 216093 - RNA, 71 nt, Homo sapiens
gccacaccgccagggcccacacccccccccccgacaggcaagaagcagagcgcagaggagcaccggggcaa

SEQ ID NO: 216094 - RNA, 63 nt, Homo sapiens
acgcgggcagaggagcggagcggagaagccaaggcaccggcccgaccagccacgacacccacg

SEQ ID NO: 216095 - RNA, 71 nt, Homo sapiens
caaaagaggaccggacagaaagccaaaaaggagaaagcgacgcagccccagacgcagacacaggagccgcc

SEQ ID NO: 216096 - RNA, 77 nt, Homo sapiens
cacaaccaaacggaaccacgcgcaaaagaggaagcagagaaaacccggacaacagccagacaaacagaaaagacaac

SEQ ID NO: 216097 - RNA, 73 nt, Homo sapiens
gggggacgaaacccaacaaaggaggaacacgcagagaaggccggaagaaggaacaagaacaggagcaaaagaa

SEQ ID NO: 216098 - RNA, 61 nt, Homo sapiens
cagaagaggacacagccagcagagaccccccacccaggccccagcacccagcccccacaac

SEQ ID NO: 216099 - RNA, 70 nt, Homo sapiens
cgaggaaccagggcaacagacccaggacaacgccaacaaaccgcggggcaggcaccggagagcgaagcac

SEQ ID NO: 216100 - RNA, 81 nt, Homo sapiens
gagacgagggccacaggggaaaaaagaccacgaggagcagggcaggacaccagaggaccagaacccacgagaaacagacga

SEQ ID NO: 216101 - RNA, 85 nt, Homo sapiens
ggaccaggcccgcgcagcgcagacggagacagcaaggacaacccccaagacggcaaaagaagaaggcgagaggagacacaggaag

SEQ ID NO: 216102 - RNA, 80 nt, Homo sapiens
ggccggcaaaaggaaggaacccccaaacaggagcaccgcggcgcaaaagaccaaggagccaaacaccaaggccgcaccga

SEQ ID NO: 216103 - RNA, 83 nt, Homo sapiens
gcggagcggagccggccgacgcgggcgcgagggcagaaccggccccgccccgccgagcgcagggcggcccgacgccagcgcca

SEQ ID NO: 216104 - RNA, 83 nt, Homo sapiens
ggagccgccccgcccggggacgaagagcgcagcccccggcggacgcaaacagcagacggaagaccccacggcaaaaccacacc

SEQ ID NO: 216105 - RNA, 78 nt, Homo sapiens
ggcggaagaccccaaagaagggagccgaagcgaggcggaaaacgaagacagcacaacaggcaaccagccaaggaaccc

SEQ ID NO: 216106 - RNA, 70 nt, Homo sapiens
cagcgcgagccaggacccgagcaagaacgaggccaaggaggagggacacagagacagcgaagaaagaacg

SEQ ID NO: 216107 - RNA, 76 nt, Homo sapiens
ggggaaaagggacgaagccgggagaaggccacggcaccggcccacagcaagagggcggagaaggaacagggagaga

SEQ ID NO: 216108 - RNA, 66 nt, Homo sapiens
ggggcaagaacgggcaacaaaggcaggcaagagccaccccaggaaaacagaagaaacaaacgcacc

SEQ ID NO: 216109 - RNA, 82 nt, Homo sapiens
cggacagggccaacagggccggccggccggcccccaaacgcgcccgcccccaggcaaagccacgcaagagagggggaccgcg

SEQ ID NO: 216110 - RNA, 57 nt, Homo sapiens
agaagaccggccccgcaaccacgaaaagaggggaaacgaccaccggagccaagacag

SEQ ID NO: 216111 - RNA, 80 nt, Homo sapiens
ggcccgcacacgcaccgagccccagcgacacccgaggggcacacagaaaaggcaccgcccggacgaagaagacacgaaca

SEQ ID NO: 216112 - RNA, 74 nt, Homo sapiens
caaaacacgagacgcgcagaacgcgggacaagagcaccaagagagaccaggacacaccacgggaacaaaaaagg

SEQ ID NO: 216113 - RNA, 59 nt, Homo sapiens
gcgcccgggagcgcgcgccgggaacgcgcaaagacgaaggggaaccccaggcacaggcg

SEQ ID NO: 216114 - RNA, 80 nt, Homo sapiens
gacagcgcgggagggcgccgcggggcagccgccgcccccgggacagaccaaacagcggcgcacgaaaacagagcgaagac

SEQ ID NO: 216115 - RNA, 79 nt, Homo sapiens
gaagcggagagcgaggagaggagcgccccaccaagagccgcgcgcccagccgcgaggcagcgagaagaaaaagaagaga

SEQ ID NO: 216116 - RNA, 72 nt, Homo sapiens
agaaaagggagcagcaggagccccgcgggcagccaaaggcagggaagaaaaagaagacaccagagaaacacg

SEQ ID NO: 216117 - RNA, 70 nt, Homo sapiens
gccgggcaaaagggcaggcccgacaagccgaccagccaagggcgaacgaccccggccccccaccacccaa

SEQ ID NO: 216118 - RNA, 77 nt, Homo sapiens
gcgagcccccccccaggccagaggggcaaggaacacagacaccaagcaaggccagcagagcccaagggcgccagcca

SEQ ID NO: 216119 - RNA, 92 nt, Homo sapiens
ccgggccaggccgccgccgagccgaggacaaggaagaggggagccaaagaccaagcaccagagaagaggaggaagaaggcgagaagcacagg

SEQ ID NO: 216120 - RNA, 75 nt, Homo sapiens
cgccgcggagaccccaccgccggcgcgggaaacgggcgaagcgacgagccgcgaggaggcggaagccaccagccc

SEQ ID NO: 216121 - RNA, 77 nt, Homo sapiens
aggcgccgcgccgccgcacgggaccgccgagccacaccggagaggaacagcaggacccgagaggacagaagcaggac

SEQ ID NO: 216122 - RNA, 78 nt, Homo sapiens
agaggggcaacgcggccggcgggagaccccacagcagaggaaggaccccggaggaaaagcggaagcggcagcggcgaa

SEQ ID NO: 216123 - RNA, 80 nt, Homo sapiens
cagagcagaacagccccgcggcccggggagaagagaggaacgaagggcaccacgacaaaccaagacgacaaagagaggcg

SEQ ID NO: 216124 - RNA, 76 nt, Homo sapiens
caacagaaggcaaaacgaagacgaggcaaagcacccagcccaccccgaagaagccacacacagaagacccaaagag

SEQ ID NO: 216125 - RNA, 75 nt, Homo sapiens
cacggggggggcccaccaggacagacacccgcaacccagccagccaccaggggagagagcaaagaggcgaccgcc

SEQ ID NO: 216126 - RNA, 79 nt, Homo sapiens
agaccagcaagaggaggggcccggagagggggaagggcccaaagccagaagggaccagaccaccacagcgccccgagag

SEQ ID NO: 216127 - RNA, 77 nt, Homo sapiens
gcggacaaaagcagccgagaacccgccgcggcgcccgcccagacaagggaggcgaggacggacaaaaggaaacggac

SEQ ID NO: 216128 - RNA, 74 nt, Homo sapiens
gaccgagggaaccgaagaacgggggagaggggcagcgcccagccccgggagagaacccagacccagaggaaagc

SEQ ID NO: 216129 - RNA, 72 nt, Homo sapiens
gaccaggagcacggaaagaacgaacccagaaaagaagaagagaagaagaggaaagggacgcggcacagaacg

SEQ ID NO: 216130 - RNA, 79 nt, Homo sapiens
cagaccaccgaagagaagccaaggccgaagccgagcagaggacaaaacaagagggccaggaggacgggaaagacccaaa

SEQ ID NO: 216131 - RNA, 65 nt, Homo sapiens
acccggccaccagcaagccgaacagggcaggaaagggaacaacgaccgggggaagcggaagcaca

SEQ ID NO: 216132 - RNA, 79 nt, Homo sapiens
agcgacccaggaaggagagagaggagcagcacagagaagaaagacagggcgaagaagacaggacaaggaagacaggacc

SEQ ID NO: 216133 - RNA, 83 nt, Homo sapiens
accagcccagccgggggcggcccggcgccggcccgccgcgcgccaccaggccgaccccagggcaccgccgaccgaaaccgcaa

SEQ ID NO: 216134 - RNA, 60 nt, Homo sapiens
aggagagaccgcggccggacagacgcccgagagcacaaagagccaaaacaaggcacagaa

SEQ ID NO: 216135 - RNA, 87 nt, Homo sapiens
accgccggaagacagacgcccccaaaacccccgccggccggacccacggagccggcagcccagcacccggcgccgcgggccccgccc

SEQ ID NO: 216136 - RNA, 72 nt, Homo sapiens
ggaaaagaaagcgggagagacaagaagggccgcacagaaggaagaaaagccaggcaaggggacaggcaggag

SEQ ID NO: 216137 - RNA, 74 nt, Homo sapiens
cgcgccggaccgggcgagcgcggcgcccagggacccgcgggagacagaggcacaaaaggagaaagcagaagaaa

SEQ ID NO: 216138 - RNA, 56 nt, Homo sapiens
agacagaacagaacccaaaagccgacaaccccagaaacaggaccgacccgcgggag

SEQ ID NO: 216139 - RNA, 69 nt, Homo sapiens
gggaaaggacggaacagacgggaaagggcacaagcgggcacccacgcaaaccaggaacgggaaccaggg

SEQ ID NO: 216140 - RNA, 92 nt, Homo sapiens
cggccaggcgccggcgaccgaggggagagggaacgcagcgaaagcggaacggggccaccacagagcccgcagggacacagcagaacaagcaa

SEQ ID NO: 216141 - RNA, 79 nt, Homo sapiens
caccacacccggcacagaccggcacacgccaagacgacggggcgagcacccaggccacagaggaggaaagagaggggaa

SEQ ID NO: 216142 - RNA, 75 nt, Homo sapiens
ccccacgcggccagcgaaaacgcccaggaaccaccacagccgcccaccggcgagcgcccaagacggccgagccaa

SEQ ID NO: 216143 - RNA, 78 nt, Homo sapiens
ccgccggcacgcgagccccagcaagcgggcccccccccacacgagacaagcaccacaagccaccaccgagggacgcaa

SEQ ID NO: 216144 - RNA, 87 nt, Homo sapiens
agccgcggcccggaacggggcgccgccccgggccccccagcagaagaccccggcggacacagacgccgacaccccaggccacgagcc

SEQ ID NO: 216145 - RNA, 115 nt, Homo sapiens
gaagcaagagcgccagcaaaccgcccgccaccgaggaaggccccagaagaccacgaagacaggaaaagagaaggaaggaaacaaagaggaaacgaagaaaagaagcagcaagggc

SEQ ID NO: 216146 - RNA, 86 nt, Homo sapiens
gccaggggcaggacccggccgcgcccgcagaagcagaccccacgagcgaaagggaaaaaacgaaggaggcaggaagagcggaggac

SEQ ID NO: 216147 - RNA, 72 nt, Homo sapiens
ggacgaggaaacaacgggcacaaaaacaaccagggcacaaccagggcagcaggggacccaggaagccacccg

SEQ ID NO: 216148 - RNA, 82 nt, Homo sapiens
gacccccgccaaaaggaaagcacagcagaaacacaaagcagcccaaccaaaggggcgccggccgagcccgggaaaacgacag

SEQ ID NO: 216149 - RNA, 81 nt, Homo sapiens
ccgcagagaagagcgaccaagagcaggagacgaaaggggcgaggcaaccgaaaaaagcggcagcgcaacccagaagagggc

SEQ ID NO: 216150 - RNA, 89 nt, Homo sapiens
aaggacaaaagccaagaggaggacagcgcacacagcaagcacgagggaggggggaagacagggcccagcaccacaggacgggccgggaa

SEQ ID NO: 216151 - RNA, 80 nt, Homo sapiens
ccaacggacggggaggcagcaggacacaccggccgagggcccaccaggggaagcagggaaaggccggagagaggaagcgg

SEQ ID NO: 216152 - RNA, 72 nt, Homo sapiens
acaagagcgcagaaaagcaacaggccaacagcacggagcaccagcaaaaaagaaaagcgcggagacacacga

SEQ ID NO: 216153 - RNA, 44 nt, Homo sapiens
gcggcgacagcgggaggagaaagggccagccccacgggcgcccc

SEQ ID NO: 216154 - RNA, 49 nt, Homo sapiens
gccccgaagcgacggaagaggcacaggcgcaggagggagaggcacagcg

SEQ ID NO: 216155 - RNA, 78 nt, Homo sapiens
ccaccaacgaccgaccgccggccggaccgcgaagagaaaagccccacagcgcccaccaggccaggccccgcccccgag

SEQ ID NO: 216156 - RNA, 78 nt, Homo sapiens
ccgagacccaccagagggcgccacaaacgggaggcacagcacaagggggggaaaagaacacaaggccgaaaggccggg

SEQ ID NO: 216157 - RNA, 79 nt, Homo sapiens
gaaagagaggaaagaagaaaaccaagaaagccccacgaaggggggcagaaagaagaggaggacaacaagccaacagaga

SEQ ID NO: 216158 - RNA, 30 nt, Homo sapiens
acggagacagcagaagagacccaccggcgg

SEQ ID NO: 216159 - RNA, 76 nt, Homo sapiens
acacggacaacaaacgccccgaaacagccccggagcaaccacagagcagggcggggcacggaagagccggggagca

SEQ ID NO: 216160 - RNA, 74 nt, Homo sapiens
cggcgcagacggccaaaggacgggacaaaggacggagccccacgcgagaacaacaagcggaccgcagccgcagg

SEQ ID NO: 216161 - RNA, 74 nt, Homo sapiens
gcacccaccagaaagaggcacagccccaaaagaaaggcaggccccagccaacccgaaaaccccccagcggccac

SEQ ID NO: 216162 - RNA, 59 nt, Homo sapiens
aaggcgccccaaggccagacaaaacgaggggaggacaaaaccaacaacaagccacccac

SEQ ID NO: 216163 - RNA, 99 nt, Homo sapiens
cacaagcaacaagacacagcggacaaaaggaaaaggagaaaacaaggaagccaaagggggaaacaggaagcaacacccacaggaagaaccgaggggcca

SEQ ID NO: 216164 - RNA, 71 nt, Homo sapiens
gacacagggaaccaccaggagacacgaaacgaacgaaccgccgcgcccgggaaaggaggaaagaaagagaa

SEQ ID NO: 216165 - RNA, 76 nt, Homo sapiens
cagagagccccagcaggaaggccaccgagggaacccgaccggacccagccccagaagggaacccagggcacaagcg

SEQ ID NO: 216166 - RNA, 71 nt, Homo sapiens
caccgcggagcgccgagccgcacggcggagacaacggaccgcggggagggagggccggagagggcgaagac

SEQ ID NO: 216167 - RNA, 73 nt, Homo sapiens
agcgacacaaacaaaccgaaagaagaagaggagaagaaaagaccagacgcagggaaaaagcacaaaggcgcga

SEQ ID NO: 216168 - RNA, 69 nt, Homo sapiens
gccgcagagcgcgcagaccccgccagaggcgcagaggacaggaggcgaagcacaagggacccagccacc

SEQ ID NO: 216169 - RNA, 57 nt, Homo sapiens
caagagcacagccggaagaggaacccggacgccaaaaagcaccccaacggcagcccc

SEQ ID NO: 216170 - RNA, 76 nt, Homo sapiens
agcaagcgaaggaggccagaagaccagaagcgacagcacgcaaaaaggcccaagagccgagggccaagagagaaga

SEQ ID NO: 216171 - RNA, 76 nt, Homo sapiens
acgcccgaacgcgaggccaacagccccgccaagaggcgaggaggaggagagaacaaccgcgcacggaagacagggg

SEQ ID NO: 216172 - RNA, 72 nt, Homo sapiens
gacacccaaggccgaccggccagagaaggagaacaagaggaagcacacggaagagcgaaaaagagaaagcga

SEQ ID NO: 216173 - RNA, 76 nt, Homo sapiens
ccaaaggcacaccgaaccgcgacagaaggacagagaagaacccagaaaaaagcaaggccgaaaaacgagagaggag

SEQ ID NO: 216174 - RNA, 69 nt, Homo sapiens
caggcggagggggacacccgggcggggcagagcagcccccagccagccgcgaggggcccgggcagaggg

SEQ ID NO: 216175 - RNA, 57 nt, Homo sapiens
cgccacccaggacggaggaagagagaagcacccacccccgagcacgccgcaacaccc

SEQ ID NO: 216176 - RNA, 76 nt, Homo sapiens
ccaagcaaacgcagaaggacgcccacgagcaaccaagagacaagaaaaccccaggacacagagcggggagcccgaa

SEQ ID NO: 216177 - RNA, 74 nt, Homo sapiens
cgcacaagggcagagggccagagcccagaaaagaaagagcccggaacgccagagcggaaaggaagagaacgccg

SEQ ID NO: 216178 - RNA, 78 nt, Homo sapiens
aacccgccacggcgggcgagcgccccaggggcaaggaagagcgaagagagaccgaaaaaagaaagaaaaagaccgagc

SEQ ID NO: 216179 - RNA, 55 nt, Homo sapiens
ccaccgacaggcccgacagccggaaggaggagaacacacgcaagggaagagaagg

SEQ ID NO: 216180 - RNA, 59 nt, Homo sapiens
agcaaggaagaaagcagcccaggcaccacaaaggcagcaccaagcaaaagaggaagccg

SEQ ID NO: 216181 - RNA, 73 nt, Homo sapiens
aaaaccaagcacagcgagaagggaacagaccgacgagggaaggggaagaaggaccgggaaaaggccccagaag

SEQ ID NO: 216182 - RNA, 85 nt, Homo sapiens
ggggccccgaggccacggcccgggaccaggaagaaacaggcccgccagcaccgacagcaacgaaaagcccacggagacaggagac

SEQ ID NO: 216183 - RNA, 59 nt, Homo sapiens
aaagcagagcccaggagaaaccggacgcgacgggcacgaaagcaagagaacaaagcacg

SEQ ID NO: 216184 - RNA, 65 nt, Homo sapiens
gggaacaaaccagagcggccccaaagaacagagcggccggaccaacacagggagaggcgcgccac

SEQ ID NO: 216185 - RNA, 73 nt, Homo sapiens
accgcaagccaaccagagccggcggcagggacgaagcgaccaccggaagcagcaacaaaacggacagcagacc

SEQ ID NO: 216186 - RNA, 76 nt, Homo sapiens
gaagggaggagcaccgggaaccacaccaccccgcgcagggaccagggaagacacgggagcgccgccgccggagggc

SEQ ID NO: 216187 - RNA, 74 nt, Homo sapiens
gacacacaccgccgaaaaaaggaaaggaagcccggcccacacggacaagaagaaaaagaaccaaaaaaaggcgg

SEQ ID NO: 216188 - RNA, 72 nt, Homo sapiens
agcccgaccaacgcccggcacaaaccaggagccccacgaaggccagggccgccagagagacggggcaccgga

SEQ ID NO: 216189 - RNA, 68 nt, Homo sapiens
ccggacacgaggagaaacagcagaaacgcaccaggccaaagaaagagaagaacagggaacaaaccaac

SEQ ID NO: 216190 - RNA, 100 nt, Homo sapiens
ggggcgacgcggcgcagggacccgggacagcggagaggcgcagagagggcggagagaacaccccgaaccgggaggcagagggacacggacgcacggaaac

SEQ ID NO: 216191 - RNA, 87 nt, Homo sapiens
agcggagcccgcagaaccccacagcaagaggacggaagggcccgcgaccacaccaagagaccggaagacccggcgacggaccgcggc

SEQ ID NO: 216192 - RNA, 53 nt, Homo sapiens
gaccgaacaagccgagagggaaacaacccacagggcagcaagggaccgagggc

SEQ ID NO: 216193 - RNA, 85 nt, Homo sapiens
gacgagggcggcgcgggagcagcacccacagccaaggcgggagccacggagggggcaacaagggggagaaggagcaaaagcccgc

SEQ ID NO: 216194 - RNA, 38 nt, Homo sapiens
gcaccaccggccccggaagggggggccccagcccggcc

SEQ ID NO: 216195 - RNA, 86 nt, Homo sapiens
ccccacacacacaacagcagcggcccgcgcccgccgggccaccgcgcccgcccagccccgcccggagacagggggacaaaggacag

SEQ ID NO: 216196 - RNA, 68 nt, Homo sapiens
ccgccacaccgggcgccccaggcgcaaaacccgagaaagggcaaccggggaaagcaggggagaaaaga

SEQ ID NO: 216197 - RNA, 42 nt, Homo sapiens
ccggaggccggaacaccacgaagacgggggaccccgcggacg

SEQ ID NO: 216198 - RNA, 78 nt, Homo sapiens
ccaaaccaggaagcaaggaaaagaaccccccacggaaaggacgaaagaaagaagcagccccagaaagaaggacgccgc

SEQ ID NO: 216199 - RNA, 76 nt, Homo sapiens
agaaaaaggcacacaccggaccaacggaaaagagcaaagcagcagaagggccagcagacaggacaaagcccccaga

SEQ ID NO: 216200 - RNA, 74 nt, Homo sapiens
gaaccgccacggacaagaagaagcaaaagagcggccagaggcaccagggagacagcgacgagaccgcccagccc

SEQ ID NO: 216201 - RNA, 76 nt, Homo sapiens
caaagagcaggccagcccgcagcaagggcaagccaggaccaaaggcaccgcaagggagaacagagcaaccaccaaa

SEQ ID NO: 216202 - RNA, 67 nt, Homo sapiens
cagccgcacaaacacagagaggagcaacacccaaggagaaaccaccacaggaacaagcggaggaaac

SEQ ID NO: 216203 - RNA, 76 nt, Homo sapiens
cgggcagcgccagaccgcgacaggcccgaaaaaaacccaggcggcccagggaaccgaacccaagcaaggaaaaagc

SEQ ID NO: 216204 - RNA, 81 nt, Homo sapiens
gagcgagccagcaagcggaagcgccccaccgcgggcgccaaggggagcagaaggaccggacacaggccacgcgcagagcga

SEQ ID NO: 216205 - RNA, 64 nt, Homo sapiens
aagcgcaagaggggaacaagaacggcgacagacaagaggcgaaggcgaacaagaggcgccagcg

SEQ ID NO: 216206 - RNA, 69 nt, Homo sapiens
agccccagcaaacaagaccaccggcacccagaaacacaacagagaagcaaaggccagaaacagagacca

SEQ ID NO: 216207 - RNA, 72 nt, Homo sapiens
caaacccccgcgacgccggaacaacgggaaagccgcacacccaccagacaccaaagaaaccgccacccgaga

SEQ ID NO: 216208 - RNA, 66 nt, Homo sapiens
cacccaggccccgacgccccgagccagcaccagagccggagagacggagcacaaaggacccgagac

SEQ ID NO: 216209 - RNA, 97 nt, Homo sapiens
ccccggaggggggcggcgcccacgggggagcgagccggagacaggagccccggcacaaaggaagaagaaagaagggagcaagagcaaaaaagaagag

SEQ ID NO: 216210 - RNA, 60 nt, Homo sapiens
gaccgcgccaggacagacgcacagacaccgcaggagccaggaggcgacaagacaggaccc

SEQ ID NO: 216211 - RNA, 70 nt, Homo sapiens
ggagcacgaccgaggcggaccagaacaccagaccgccggcccgagcaacccacacggggagacaccacga

SEQ ID NO: 216212 - RNA, 82 nt, Homo sapiens
ggccccgaggccggcaacggagacccaaggaaaaagaggccacagaaggccagcagacaaagagcccaggacaccacagaca

SEQ ID NO: 216213 - RNA, 71 nt, Homo sapiens
gcaaccccgagcagcagaagaagagagagagacccgccgaaaaggaaggaaaggaaacagaaggaaggcac

SEQ ID NO: 216214 - RNA, 77 nt, Homo sapiens
gagcaagcgcacacgaagagaagcaaggcccaagacccaggcggccagcacaaagcgagaaggagggagaagggcgc

SEQ ID NO: 216215 - RNA, 61 nt, Homo sapiens
ccgcaagccaaccagccacagcccaccgaggcaccacaggggcacacccgaccaggccaac

SEQ ID NO: 216216 - RNA, 67 nt, Homo sapiens
gacccaggcaggaaaaccagccaaaggacaaaagaaacggcgaccagaacacccgcagagggccgcg

SEQ ID NO: 216217 - RNA, 74 nt, Homo sapiens
aaagagcccccaaccagaaccacaccagcagccacaagcaacgaagggcaaccgccagcacccaacaaacgaag

SEQ ID NO: 216218 - RNA, 58 nt, Homo sapiens
cacccgcaagaagcaccagcaagggccccagggcaccccgcggacccggccagacccc

SEQ ID NO: 216219 - RNA, 72 nt, Homo sapiens
aaaagacgggacagcagaggcccaacagcaaaacccaggcaaaaacagcaaaagaaaagaaaaaacaagaag

SEQ ID NO: 216220 - RNA, 70 nt, Homo sapiens
caagccacggaccagagacacgccaagcagccagcccaggagagcaggccacacccaagaccaggccagg

SEQ ID NO: 216221 - RNA, 77 nt, Homo sapiens
gaccacaaggggaggacaaccgcccgggaccagccaaaagaccaagggacagggaaaaaggcgccaaagcacagagc

SEQ ID NO: 216222 - RNA, 80 nt, Homo sapiens
gaaaaagcaaagcgcacggccgggcaacggagcagcgccaagagacagccgccgccagaccgcggagggaacaaccgcac

SEQ ID NO: 216223 - RNA, 79 nt, Homo sapiens
cgggcggccgcgcgagccggcggcccggagggggcggcggggcagagcggcgggaaaccaccaacaacacccccaaacc

SEQ ID NO: 216224 - RNA, 68 nt, Homo sapiens
aagacgagcccaccacggacagcaaacagaaggagagagcacgaccaccgccgagagacccacagagg

SEQ ID NO: 216225 - RNA, 71 nt, Homo sapiens
gcacaaagcagaaacccccgggagacaggccaccacacacgagcccgacgacagaaccccgaccagccaac

SEQ ID NO: 216226 - RNA, 110 nt, Homo sapiens
accggcgaggcaaccacccccaacaccaaggaaacaaaaccacaccgacagcacaagagacgcgggcgggaggccacgaccgaggagcgaagcgagaggagaagcggggg

SEQ ID NO: 216227 - RNA, 84 nt, Homo sapiens
ggccagcacccggccgagacggcggcagcagcggcacagcaccagcccgaagaagccgggcagaccaggcagcagcggaaagga

SEQ ID NO: 216228 - RNA, 43 nt, Homo sapiens
cgcgagacaacaccggcgaccagggccggagcaaagagcggag

SEQ ID NO: 216229 - RNA, 82 nt, Homo sapiens
aaagcgaaaaacagcgaccagagggaccagcggggagaagaacgcgcagaacacacccgaggagacgcccgcccgacaaggg

SEQ ID NO: 216230 - RNA, 56 nt, Homo sapiens
caagaaaacgaaacacgcgaaaccaaggggaccccaccacgccgggacaccacccc

SEQ ID NO: 216231 - RNA, 75 nt, Homo sapiens
agaacacacggaccacagcacacacacaaagccaaaaaggcaggcaaggaagaaccgacaaagaccacaggccca

SEQ ID NO: 216232 - RNA, 69 nt, Homo sapiens
ggaggggccaggaagggacccacgagaagacgcagaggcaaaaaccacaagcgccggagacccaggccc

SEQ ID NO: 216233 - RNA, 55 nt, Homo sapiens
ggaaccagcaacaagccgggggggccacgcgaacccagcacgacaggcgagcgag

SEQ ID NO: 216234 - RNA, 56 nt, Homo sapiens
agagcgcgggggcgacggccgagcaggggagagaaagacggcgagaacacggagga

SEQ ID NO: 216235 - RNA, 75 nt, Homo sapiens
gagaggagccaacccccagacacaggaaaacgggcaacagaaggaaagagcggcaaagggcagacacagcgaaca

SEQ ID NO: 216236 - RNA, 71 nt, Homo sapiens
gccccgaagcccggacgacgagcggcccgagagagaaagggaaagaaggagcggagcagaacaaggacccc

SEQ ID NO: 216237 - RNA, 85 nt, Homo sapiens
ggcgcccggcggagcagaggaaccacacgcgacagggcaccagccggggaaaggagcgcagcgcccgggcggaggagcagaaaac

SEQ ID NO: 216238 - RNA, 77 nt, Homo sapiens
aacaccaagaaaggacaagagacggaaacccaaagagaggaaaagccgcgcggcccggaggaggcacccgagaccga

SEQ ID NO: 216239 - RNA, 69 nt, Homo sapiens
caccagagcggggcaccgagccggggacgggagaaagaacagacaagccgcaagaaccggggaagggag

SEQ ID NO: 216240 - RNA, 53 nt, Homo sapiens
agggccaaagaagggagaccaaggagaccgggagagagacgaaggacgcgcag

SEQ ID NO: 216241 - RNA, 83 nt, Homo sapiens
aggggaaccacggaagacgcccaccaacggaggccagaggagaccacaccagcaaggacgaacgccaaggacagaacgagcca

SEQ ID NO: 216242 - RNA, 72 nt, Homo sapiens
ggaggggccggcccccggagcgacagaaacaagggaaagaagggggcgaaaggaagcccagaaggccccggg

SEQ ID NO: 216243 - RNA, 72 nt, Homo sapiens
cgcagagagagacacacgagagggagagaaaggcggagcacaggcaaaggccggacggggaagacacacaga

SEQ ID NO: 216244 - RNA, 81 nt, Homo sapiens
gaaggacagccaccagcgaacaccagcaccacccaaaccacgaaaacgaagcaaggaaggaagcaaccaggaaaaaaagag

SEQ ID NO: 216245 - RNA, 77 nt, Homo sapiens
gcacagggaccccaaggggcagagaacacaaggaacgaaaggaagggaagaagcagaaccaagacaaaagaagaccc

SEQ ID NO: 216246 - RNA, 78 nt, Homo sapiens
cccggcccccgggacggcccaaggccagcccgcagaacccaggagaaacgagagggacagcaaggaagacgccagaga

SEQ ID NO: 216247 - RNA, 45 nt, Homo sapiens
gggggacaacagcaggagcaaggaggagagaaggggaaagccacc

SEQ ID NO: 216248 - RNA, 68 nt, Homo sapiens
aggcgagggggcggacgcgcgcagcccgcccgcccggcgaccagcaaggcaaacaccagcaacacccg

SEQ ID NO: 216249 - RNA, 75 nt, Homo sapiens
caaacgcgccacacagccgccaagacccagggccaacggaccacaccaaaagccaccaaaggaacacgccaggaa

SEQ ID NO: 216250 - RNA, 79 nt, Homo sapiens
aggacgggaggcgagccggagagacgagacaagacggggaccgagagaagaacccagaccccaggagacaaggaccccg

SEQ ID NO: 216251 - RNA, 74 nt, Homo sapiens
caccccgcccacgcccacgcccccgcgccggagccccgggccagcagaggaagggcagcagaacaacgcagcca

SEQ ID NO: 216252 - RNA, 75 nt, Homo sapiens
aacagcggaccaaacaagagccagaaacgcaaagaaaccagcagagcagccgcaaccgacacacaaagagaaaaa

SEQ ID NO: 216253 - RNA, 84 nt, Homo sapiens
cccccagagcggaacacagcggcagagaggcgagacacggaacggcgaagaagcgcacgggcccggcgccaccacccgccgacg

SEQ ID NO: 216254 - RNA, 70 nt, Homo sapiens
acaacgaagaccacaccagacacgggggacagaaagcaaacacaagacacccaagaagcccagcagaccc

SEQ ID NO: 216255 - RNA, 70 nt, Homo sapiens
gagcaggaggagaaaccgcggaggcaggggaagcacaaaagcgcacccgcgccagcgaggaccggaacgg

SEQ ID NO: 216256 - RNA, 75 nt, Homo sapiens
gcaacagagcgccggcggaaacaaagccagaccgccgaggggggacgaacccaggagggaaaccgaagaaaacaa

SEQ ID NO: 216257 - RNA, 53 nt, Homo sapiens
cccgacccccagacgccggaaagaaggcccccgcccgggcaccgcacccaggc

SEQ ID NO: 216258 - RNA, 74 nt, Homo sapiens
gaccaaggacacccaagagggcgagcaggacgaagcgcccgccaccaagggcggagaacggaaaagcaccagga

SEQ ID NO: 216259 - RNA, 76 nt, Homo sapiens
ccggccgagccggggccccgggccggcagcagaagaagggagccaccacccacgagaggccaaacgacagagaacc

SEQ ID NO: 216260 - RNA, 70 nt, Homo sapiens
caaacaccaagagaaggacacggacaaggaagggcgagcacgcacgccagccccaggaaggcggagacca

SEQ ID NO: 216261 - RNA, 60 nt, Homo sapiens
accgaaagaagcggaaagcagaagcgcgcagcaacggcggaccgcccggccgacacggca

SEQ ID NO: 216262 - RNA, 88 nt, Homo sapiens
cggaggagcagcgcagcgcccgaggaagccggggccgaggaccgaaggagaagaaggagaaggggaggagaaggcaagccggaaagag

SEQ ID NO: 216263 - RNA, 84 nt, Homo sapiens
aggggccggcgccagcggagagcagccgcggagcgacggagagccagaggcaagagaagcacgacccagacccccagcagggca

SEQ ID NO: 216264 - RNA, 80 nt, Homo sapiens
gcacgggcccacggccgaaaccccaagccagggggcggagccccgacgcagccaaggccccagggaaaggaccgaggcag

SEQ ID NO: 216265 - RNA, 67 nt, Homo sapiens
gcaaagggaaacaccagaaggagcgcaaacaaacggacaggacggcagacaagagaaaacaacaagg

SEQ ID NO: 216266 - RNA, 78 nt, Homo sapiens
cccccaagcagagaggcagaggaggaggggcagcagcaggacagggaacccgggagacagcaacagacggaggaacgg

SEQ ID NO: 216267 - RNA, 72 nt, Homo sapiens
cgcggacccaacaggacgccccaggcgcaggagcacggagccgccgccggaggaaacacaaaacagaaaacc

SEQ ID NO: 216268 - RNA, 43 nt, Homo sapiens
ccccccggagccgcgagcacccaaggaacacgaacaacaggac

SEQ ID NO: 216269 - RNA, 49 nt, Homo sapiens
agaaaaggaaccaaggagcaaaaggagggaggacagagaaccccagacg

SEQ ID NO: 216270 - RNA, 42 nt, Homo sapiens
cccacgcccggcgagcccgcgagaacaaaaccagaggcaaac

SEQ ID NO: 216271 - RNA, 70 nt, Homo sapiens
agaagccaaaggcaggggcagcgcggcacaacgcggcagaaaagaagagggaaggggaagaggggcccga

SEQ ID NO: 216272 - RNA, 73 nt, Homo sapiens
ggagacagggacagacgagagccaaaccgcgcaggacccccgcaggcagcggcaggaccgaaggacacagcga

SEQ ID NO: 216273 - RNA, 55 nt, Homo sapiens
cccaacaccacccgagagccccaaggaggaaaaccaagagggaaaagacaagaaa

SEQ ID NO: 216274 - RNA, 75 nt, Homo sapiens
aagacgcagagaaagagcgaccgaggagacaggaagagagagcggagaagagaagaagcagcaacgaagaagggc

SEQ ID NO: 216275 - RNA, 68 nt, Homo sapiens
gccccggaggaaggacggccggaggcaccaagccagaggggacggcagagacaaaaccccgccagaca

SEQ ID NO: 216276 - RNA, 72 nt, Homo sapiens
ccagccccaaaaggcggcaacagaagcagaaagggccgccaaaacagggagagagacgcaacagaagccgag

SEQ ID NO: 216277 - RNA, 64 nt, Homo sapiens
cgggagggacaaggccccccagacccgggacagaggcaccgaaggcaagaagaacagcagccac

SEQ ID NO: 216278 - RNA, 64 nt, Homo sapiens
ccaccccaggaacacagaccgcacagacgaaagcaccacacaacagaaacggagacgcacgacc

SEQ ID NO: 216279 - RNA, 69 nt, Homo sapiens
aagccgacgcgggcagcgagaacaagcaagagaagaagacaggccagaaacccagaaagaaagaaaagc

SEQ ID NO: 216280 - RNA, 58 nt, Homo sapiens
gggacacgccaccccaccaggcaggaggagcgagacacccccagaccaggggacaccc

SEQ ID NO: 216281 - RNA, 72 nt, Homo sapiens
cgaggaggaaagcgaaaacaacacggccgaggccaccaagcaggccagggaaggaagcagcagcaagggacc

SEQ ID NO: 216282 - RNA, 74 nt, Homo sapiens
acaacagcaagaaagcagcaaacagcgaccgccaagagacacacagggcaccagaccgccacaggccggcaccc

SEQ ID NO: 216283 - RNA, 53 nt, Homo sapiens
gcgaacaaagaaagggaagagacacaagagagggggcgggcccaggcagccca

SEQ ID NO: 216284 - RNA, 113 nt, Homo sapiens
gggaacggcggcgggacggcggccccgcgcagcccccggccgcagcgcaggcagcccagcagggggcacccgaggaggaagagggcagggcccacggaaagaagggaaacccg

SEQ ID NO: 216285 - RNA, 60 nt, Homo sapiens
agccaaaccacgaggccacagcacaggcaaccagggaaaaaagcccggcgagcgacggaa

SEQ ID NO: 216286 - RNA, 60 nt, Homo sapiens
gggagccgagccaaggcgaccaaacacccaacaccagagaacacaaagacagggacagga

SEQ ID NO: 216287 - RNA, 75 nt, Homo sapiens
cacaaagcagacgacccagaggccagagggaacagcgccaaacaccagaaaagccggacccacagccgccagaga

SEQ ID NO: 216288 - RNA, 53 nt, Homo sapiens
agagaaagcaggaagccagccagagcagggacgcgagagcccacgaagagcga

SEQ ID NO: 216289 - RNA, 40 nt, Homo sapiens
aaaacaagggaaagcaacagggccccgagaaaggcagagc

SEQ ID NO: 216290 - RNA, 63 nt, Homo sapiens
cccccacgagggagccgagggcggagcggagacgaccgaggaaacacccaaggaaccaaagca

SEQ ID NO: 216291 - RNA, 78 nt, Homo sapiens
caccacaaaaccacagccaagggccccggagcgcagcacaccagcgccgcgcggggccagccgcccggcccgggcacg

SEQ ID NO: 216292 - RNA, 87 nt, Homo sapiens
caaaaagagagaagaggacccgggaagaaaggaagggaaaaggccgaggcacagcgggaagaccgcaaagacgacccgagacaggga

SEQ ID NO: 216293 - RNA, 72 nt, Homo sapiens
cgcgcgccgccgcgcgcgccccggccgccaccgggacagggacaagcgcacagcggagaaagcagcgcggcc

SEQ ID NO: 216294 - RNA, 58 nt, Homo sapiens
agacagcaaaccccacaaccccaagggcagaggacaacagcaaccaagaagacgagca

SEQ ID NO: 216295 - RNA, 71 nt, Homo sapiens
cggcagccacaggaggcgcggaggacgccccaccgccgacgcccccagccaccagccccacgacggcaggc

SEQ ID NO: 216296 - RNA, 36 nt, Homo sapiens
agaaccgaggacaaaaaggggggaaccacaaagaac

SEQ ID NO: 216297 - RNA, 64 nt, Homo sapiens
ggcggaacccggggccgggacgcagcccggcggcagcagcagaccgcgggcccccagcgcaccc

SEQ ID NO: 216298 - RNA, 66 nt, Homo sapiens
cgaaagaggcggcggcgcgccgcggccggccacgcggccacaacgcaagaaaggaggagcagacga

SEQ ID NO: 216299 - RNA, 79 nt, Homo sapiens
ccaggccccagacacagacgagcaggggaagggcacggaccccgcggacgcacaccgggaccccaccaacaaagaccca

SEQ ID NO: 216300 - RNA, 59 nt, Homo sapiens
ccgagcacgggccgagaccaccgaggagagccggagagaccccgagaaacaagcagaag

SEQ ID NO: 216301 - RNA, 71 nt, Homo sapiens
agccaaaggcaacgaccagcccaacacgaagaccgccagaacaggcagcaagacaccaaaaaggaacgaga

SEQ ID NO: 216302 - RNA, 75 nt, Homo sapiens
ccccccgcccccccccccacgcaaccccagaccaacacacaagccacgcgcccaggcgcaggcaggggccacacg

SEQ ID NO: 216303 - RNA, 54 nt, Homo sapiens
agaagggaaagaaaccaggcgaaaggacgacacgagggcaggagcgaccgccgg

SEQ ID NO: 216304 - RNA, 50 nt, Homo sapiens
gcagaaaccccggacaaggcacgccagacgccgggccccgaggaccgaga

SEQ ID NO: 216305 - RNA, 81 nt, Homo sapiens
cgagaggcgaagcggaccaggaacccggaccaagggagccccaaacaagggggacggacagagaccccggccgcccccagc

SEQ ID NO: 216306 - RNA, 81 nt, Homo sapiens
cgaggccgcaggggagcccggcagccgcccgccccagggaacccgagaaggccaacaaaagagcgaggaaccaagaagagg

SEQ ID NO: 216307 - RNA, 64 nt, Homo sapiens
acgggcagggcccaggaacaagggacaaaccaaagaccaaccaagaggccagagagcaacaccc

SEQ ID NO: 216308 - RNA, 64 nt, Homo sapiens
ggacggagccggcaaacagggcccggcagccaacaacagccagggagcgacagcacaacaagca

SEQ ID NO: 216309 - RNA, 73 nt, Homo sapiens
agcaagacgcagagcgccaacagggggcgcgccggggaccagccagaaagcacgagcaagcaccgagaagaac

SEQ ID NO: 216310 - RNA, 72 nt, Homo sapiens
ccgggggaaacaaaaacgcacacaacgacccagcaaaccaggaaaccccggccggcggcggggacaccagga

SEQ ID NO: 216311 - RNA, 80 nt, Homo sapiens
cccagaagggccgaaggaggaacacagcacaccgggaaaaccggaggccagcccacccagagaggccgaaaaccggcgac

SEQ ID NO: 216312 - RNA, 46 nt, Homo sapiens
acaagcagaaacagacaggaccacgcaaccgaccacgacccgcggg

SEQ ID NO: 216313 - RNA, 74 nt, Homo sapiens
gacaaggagaagggaaagaaggcacaccacgaaaggaaagcgaacgcgaaaagaaaagccgagagcagccagac

SEQ ID NO: 216314 - RNA, 71 nt, Homo sapiens
gcccaaccagaaaacaaagacaaaaggagacgagaagaagacaagagcccaccacagcggagaagagaacc

SEQ ID NO: 216315 - RNA, 71 nt, Homo sapiens
cccagcaaaacccccaacggagaagaaacacccccgggagaaagcaagaaggcaccgaaccgcggcgcgcg

SEQ ID NO: 216316 - RNA, 77 nt, Homo sapiens
gagcaggagcagacgcgcagggagcaacagccaagccaaagcggccgcgcgccgggccccgaagagaggcgaggcaa

SEQ ID NO: 216317 - RNA, 69 nt, Homo sapiens
aaccggcgcaaagaagacaaagacgcacaccaaagcaggaggcagcccaacacaccggcacccgggaga

SEQ ID NO: 216318 - RNA, 43 nt, Homo sapiens
gggccggggaaacaaaacgcaggcccagcgaagagcacagacg

SEQ ID NO: 216319 - RNA, 81 nt, Homo sapiens
ccaggaccagaggccgccacaaccgccagacaaccggagccacgccccacgaccgccagggaaagggagcagcaccggcca

SEQ ID NO: 216320 - RNA, 75 nt, Homo sapiens
ccgggcgcccaagcgacagcgcagaggggcaggagccgggagccaccgcgaagcgcaggcagcaagacccacgga

SEQ ID NO: 216321 - RNA, 66 nt, Homo sapiens
accagaacagggggagaaccaggacagaacgagaaaggacccgggcggcggcaccagcaacgccac

SEQ ID NO: 216322 - RNA, 70 nt, Homo sapiens
caaacagcagcccccggaaaaacagcggagaccaaacgcgagaaaaagaaagcgcgaaaacacgaaccag

SEQ ID NO: 216323 - RNA, 62 nt, Homo sapiens
aaaacaagaagcagcccaaaacagagcaagggcaaaagaaccaaaggagcagacaagggccc

SEQ ID NO: 216324 - RNA, 77 nt, Homo sapiens
aaaaagaagaagaaaagaggaccgacaaccaaaccagccgagagacaagacgcccagacgaagaggcgaaacaacaa

SEQ ID NO: 216325 - RNA, 81 nt, Homo sapiens
gcacggggcacggaccaacgggaacaaaacacacacccgcagacaagaacggagaggggggaccaaggcaacgaacacaag

SEQ ID NO: 216326 - RNA, 84 nt, Homo sapiens
gaagcaaaaagagaggagaagcgcacggaacccacccacagagaagaaaagagcaagaaaaagaaagcagaacaaagaagcagc

SEQ ID NO: 216327 - RNA, 82 nt, Homo sapiens
aggacccaagaaggcgcgaagggcaaggaaagcagcaagagaagagaagccgccgagaaagagaagacaccaagacgcccga

SEQ ID NO: 216328 - RNA, 76 nt, Homo sapiens
agacagcaggccgaagaaaggaccgcgacccagcgcgggacccgcggcaagcaggagcccaacacaagggacccag

SEQ ID NO: 216329 - RNA, 73 nt, Homo sapiens
ccagaagaaggaccggaagcacacaacaggaaaacaaaagaggagaaaggacagggaagaagccaaaacagaa

SEQ ID NO: 216330 - RNA, 70 nt, Homo sapiens
acaccagagcacaagacccgcgacggaaaaaccagaagagaaaaaacaaaggggagaggcaccccgcggg

SEQ ID NO: 216331 - RNA, 99 nt, Homo sapiens
agacccacaggaggaggagaggggaaacagcagcgggggcgcccaccaggaggggacccaccgacaccccacacgcgcgaagggaggaaaggaaacgga

SEQ ID NO: 216332 - RNA, 77 nt, Homo sapiens
gaagacaaaacaggcagaaaacaagcaaggaggggcaggagcacacccccacaggaccccccacagaaggcccggca

SEQ ID NO: 216333 - RNA, 81 nt, Homo sapiens
gcagcaccagcaggcaaaacgaggcgcagcggggaagcccacaccgcggacagagcaaacagcaacaaggagcggggggac

SEQ ID NO: 216334 - RNA, 41 nt, Homo sapiens
cgcggagagggagacaaggcgggaaagcaacggcgcaagcg

SEQ ID NO: 216335 - RNA, 65 nt, Homo sapiens
gggaacggaggccagagcgcgccaagacaagcaaacccaggaacacccggccggcccggcgcccc

SEQ ID NO: 216336 - RNA, 90 nt, Homo sapiens
ccgcaccgccggaagcaccacgccgcagcggggaaggccacacaacgagcagaaaagcacaggaaggaccccccagccccacagagcccg

SEQ ID NO: 216337 - RNA, 37 nt, Homo sapiens
gagaagaggagagagaagagcgagccagcacaagaaa

SEQ ID NO: 216338 - RNA, 85 nt, Homo sapiens
cggagaaccgcggggacagcagccggccagccggggggcacgcccgcccgggccggaaaacaggggggcccggcaacaaaagaac

SEQ ID NO: 216339 - RNA, 91 nt, Homo sapiens
agcacagagagcaagccccaaagcagagacagagcacagaaagggaaggccagagacggccgaggcacaggagcccgcgacgcagcccgcc

SEQ ID NO: 216340 - RNA, 85 nt, Homo sapiens
cgagcggagaggagagcacacggcaccgagggagggcaacagcgcagcccggaaagagggaaaggaacaagaccgagcaaaggca

SEQ ID NO: 216341 - RNA, 61 nt, Homo sapiens
gcacgcagaggcccccacggccgccgacaggcaccagcgagaacgcgaccagcaagaagaa

SEQ ID NO: 216342 - RNA, 69 nt, Homo sapiens
cgagggccgcggaagcgcccgcccccggccaaaccgccaacgcaccacagacaggcagacgagcccaga

SEQ ID NO: 216343 - RNA, 87 nt, Homo sapiens
acagacccggcgcccagcggagcccccgcgccccgacccaggcaaggcagcggaaagcacagccaggccacagcccagcagcgggca

SEQ ID NO: 216344 - RNA, 76 nt, Homo sapiens
cgggagcccaagacaacgaccccacagaaacaagccaccaggagaagcaaaagaggccgggaacggcagacgcagc

SEQ ID NO: 216345 - RNA, 103 nt, Homo sapiens
cggaaaaccgaagggaaggccagcagcgcgcggagaagaacggggagccagagacgggaacagagaagcgagcggaggagacggaggcaggagaggagggaag

SEQ ID NO: 216346 - RNA, 75 nt, Homo sapiens
cggcgcccagcccaccagcacggcagcaaaggagaggagccaagcccaacgggacgggaaaacggccacagccaa

SEQ ID NO: 216347 - RNA, 74 nt, Homo sapiens
agaacacggacaccgacagagcacgggaagaggccggcagagagagcacaaccaaaagaaaagggggagggaca

SEQ ID NO: 216348 - RNA, 72 nt, Homo sapiens
aacagcaccaccaaccgcagacaggacgcggcgccggagccagaacacaccgaagccgccgaacgggaccgc

SEQ ID NO: 216349 - RNA, 85 nt, Homo sapiens
agcgagccagcgcccggagcaagcggagccccccaagagccggaaagccacgcgggagaacagacagcacgcggccacccccaaa

SEQ ID NO: 216350 - RNA, 69 nt, Homo sapiens
ccacaaaaaacggcaaaaagcagagaccaggaccggaggggaacagcagcgaaaggccgggcaacggcg

SEQ ID NO: 216351 - RNA, 84 nt, Homo sapiens
caacaaaagaaacagaccaaaggcagagcagacgaagaaagagaagcagaacgaagaaggaaaaagcaacacaaagacacacga

SEQ ID NO: 216352 - RNA, 76 nt, Homo sapiens
aaagccaccagggaagcaaagcaaagggggcccccccgagaggaaaagcgacgcacaaggaaaaacagagagaaag

SEQ ID NO: 216353 - RNA, 74 nt, Homo sapiens
caggacggcagccgggcccaggccgcagccgacccaacaggcgggcgccaggcaccagagagaaaagacacaga

SEQ ID NO: 216354 - RNA, 80 nt, Homo sapiens
cacacccccgacccagggccgccagcgggacagacgggcagagggggagacgcccggacgagcaggggggaggacgacag

SEQ ID NO: 216355 - RNA, 78 nt, Homo sapiens
gggcgcaagaacggcagagcgaaacaccaaaaccagcggagcgacacagccaagcagcaaaaccccagaagaggcgaa

SEQ ID NO: 216356 - RNA, 75 nt, Homo sapiens
accgcccgcgcggggcacgaggaacagggaagggcgcgagcggggacaaagcggccaacggccgccaccaaaaag

SEQ ID NO: 216357 - RNA, 72 nt, Homo sapiens
gggggagacggggaggacaggccagcgcggccaagacccgccgcaaggacagagagccgagcggggcaggga

SEQ ID NO: 216358 - RNA, 79 nt, Homo sapiens
cggcagccgcggaccaccgccgccaggagaaggagggggcagagcacggcaggcagaaggggccaacccgggggaacgc

SEQ ID NO: 216359 - RNA, 69 nt, Homo sapiens
cgaagaaagaagaggaacagaagggaaagggaaaccgccgacgcgcaccccaccgcgcgaaacccagga

SEQ ID NO: 216360 - RNA, 38 nt, Homo sapiens
caccacgcccggaccggggccccacgggacgcaccgga

SEQ ID NO: 216361 - RNA, 70 nt, Homo sapiens
cccggaggagaacacaagggcagcgagggaggagacagcaacgggggcgagccacaagggcaggagaaac

SEQ ID NO: 216362 - RNA, 76 nt, Homo sapiens
acacgaggggcagaaagagaccgcagagacagccaacacggcacccacagggcagccacacaaaagggaagcgggc

SEQ ID NO: 216363 - RNA, 60 nt, Homo sapiens
gggagacccaggcgggacagagggagccaggcagaggggaagacccagacacacaccgga

SEQ ID NO: 216364 - RNA, 75 nt, Homo sapiens
cccagcaccacaagcggggccacgacccagcggacggaaccagcagggaaggagggagacggacggaacgcggcg

SEQ ID NO: 216365 - RNA, 78 nt, Homo sapiens
gaggagaacgaagcccacaagaaggggacgcccgccacggcccgccagaacgggcgggcccgcacagcccagaagaac

SEQ ID NO: 216366 - RNA, 69 nt, Homo sapiens
cccacacaaacccgggacgggccgagaggaaacagacaggagccaaaccggagcagggacagcgcggga

SEQ ID NO: 216367 - RNA, 85 nt, Homo sapiens
aggcgacgcccaccaagacagaaggggagcacagacagacggccagcagcacagacacaaagaggaaaacagagagaaacacccc

SEQ ID NO: 216368 - RNA, 66 nt, Homo sapiens
gacccaaaaaaaagccagaggcaaaaagacgcacggagaaccagccaaaaaagggcagaaccgaca

SEQ ID NO: 216369 - RNA, 52 nt, Homo sapiens
ggaaggggcaagagggggaaagcacagggggacccccacccagagaccccag

SEQ ID NO: 216370 - RNA, 95 nt, Homo sapiens
gcagacccaaagcagcagccacgcgccggaggagagacaaagaaaggcccgggaggagcggggacacgaggaccccccaaaggccccaaccacag

SEQ ID NO: 216371 - RNA, 73 nt, Homo sapiens
cagccaaaaaggcaccaagaagacacagacaagcccaagcgagcgcaccaaacaggaagcgagagaaaagaag

SEQ ID NO: 216372 - RNA, 83 nt, Homo sapiens
cggcggcgaacagcgcgacacaggagagccaggacaaaaccaggcagaaccaacacgaacccaagcacaaacaagaaaacgag

SEQ ID NO: 216373 - RNA, 67 nt, Homo sapiens
gccgcccgcccacccagggccggaaaagccaacgccggcgaaggggcggaggcagggagggacggcc

SEQ ID NO: 216374 - RNA, 59 nt, Homo sapiens
ccaaagaaaagccacgagcacagcaaaaagcacgacacaggccgcacgcccaaagcgga

SEQ ID NO: 216375 - RNA, 82 nt, Homo sapiens
aagcagggggaaccaggggccccacggggaaaaagggccggcccagggagaacgcaaaaccaccacccccacaaaaaacgca

SEQ ID NO: 216376 - RNA, 72 nt, Homo sapiens
cggcccggcaaccaagaaaggcgaaggaaaaccccagcgaaacaccaagaggcgggagcgaagcaaagcaca

SEQ ID NO: 216377 - RNA, 38 nt, Homo sapiens
ccagcccagagcgcaaacgcagcgagaggaagaaagga

SEQ ID NO: 216378 - RNA, 68 nt, Homo sapiens
gaaaagccaacacccggcccgccaagcgagaggccaaagccacccccaaaggcagaggaagaacgagc

SEQ ID NO: 216379 - RNA, 79 nt, Homo sapiens
gccaggcaggcgacaagcaggagcacagacggcaggacagaaacggaggaacgcgagagaagagaagggaaccgcggcc

SEQ ID NO: 216380 - RNA, 69 nt, Homo sapiens
ggagccggagggaacagcagggcaaagcaacagccaaaaaacagggagcccggacgacagcgcaaacag

SEQ ID NO: 216381 - RNA, 61 nt, Homo sapiens
ggagaaacgacaggcaacaagacaagcggcggggccccggacaaaacagaggagaccagac

SEQ ID NO: 216382 - RNA, 57 nt, Homo sapiens
ccccaacacgccgcgcaggaacgggccgacgacaccagcagccacccacgcacccgc

SEQ ID NO: 216383 - RNA, 78 nt, Homo sapiens
ccgagcgcgggaaaggaccaggcgggggcccagacaccggccccgcaaccggagaagaacaagccgacccaaagccgc

SEQ ID NO: 216384 - RNA, 57 nt, Homo sapiens
ggaaagaggacgaagcagaaagcaaggaaacgagcagaaggcagacggcgagacaga

SEQ ID NO: 216385 - RNA, 78 nt, Homo sapiens
caacacagcagcgcagaagagaaggacggagaagcgaaagccagaccggcaagagcggaagaaagcaccaaagaacaa

SEQ ID NO: 216386 - RNA, 62 nt, Homo sapiens
gggaggggaaacgaagcgcacgaaacaccaaggagaagcacaaccacggacggcccagaaac

SEQ ID NO: 216387 - RNA, 84 nt, Homo sapiens
ggaggccgaggacccggggccgaggagcgggaagaggcgggaacaccccaccagaccacccagcaagcccacaaaaaaggcaca

SEQ ID NO: 216388 - RNA, 64 nt, Homo sapiens
ccccggaagccagaaagcgcacgaccaccacccagaggcccagcagcagacaccaccggaggcc

SEQ ID NO: 216389 - RNA, 76 nt, Homo sapiens
gacaagagagcaaaggggacgcccgccacggcccgccagaacgggcgggcccgcacagcccagaagaacggcacac

SEQ ID NO: 216390 - RNA, 76 nt, Homo sapiens
ccaacagaagggcaaccaggaggaaaaggcccaggcgagaaagaaaccggaagaaagagacgccaaaggagaccga

SEQ ID NO: 216391 - RNA, 79 nt, Homo sapiens
gcgcgggaacggcgcggaagacgcaaacagcagacggaagaccccacggcaaaaccacacccgaggcgagcccaggaca

SEQ ID NO: 216392 - RNA, 82 nt, Homo sapiens
agggagcgcccaccagaggagcgaaagagagaggcaaggagagagacaccacacaaaaaggaaggagagagaaaacaggacc

SEQ ID NO: 216393 - RNA, 85 nt, Homo sapiens
gagccgggccggcgcggggccggggagggcaaggaagaaaaggcggaccggcgaacgaagggggggccccagcccggccgaacgg

SEQ ID NO: 216394 - RNA, 53 nt, Homo sapiens
gaaaaaggcccgggacccaggaaccagggggcgaggaagagacaggcggggga

SEQ ID NO: 216395 - RNA, 61 nt, Homo sapiens
ggccgcaaccgccggggacccagggagcgccgcccaagagagagaagagaggcgcgagggc

SEQ ID NO: 216396 - RNA, 81 nt, Homo sapiens
aaagacgaggacagaagagaaacaaagaaggaggaggaggagaagaacgacccaaaaaggcgcgagaaacccaggccgcgc

SEQ ID NO: 216397 - RNA, 72 nt, Homo sapiens
aaaaagaaagcgcgaaggcaaagcagaggaagaacagagagacagcgccgcgcaagagcaggagggacagac

SEQ ID NO: 216398 - RNA, 84 nt, Homo sapiens
agccccagggccggacacacgggcagccacccggcggcggggccgcagcccaaggaaggacgagcagcaggcgcgagcgaaaac

SEQ ID NO: 216399 - RNA, 64 nt, Homo sapiens
ccagaaacagcgcaccacccgcagaggacggagaacaggacccccaccacccgaaggacgcagg

SEQ ID NO: 216400 - RNA, 75 nt, Homo sapiens
caaaccaggccccaaggaaaagaccaaccaggcccgacccacagggaaaaagagacaaacgccggacgccggcga

SEQ ID NO: 216401 - RNA, 73 nt, Homo sapiens
caggacccacccagaacaggaaagagggaagcgagaaccaggaacgaagaacaaaggggaaaggcaacaagac

SEQ ID NO: 216402 - RNA, 72 nt, Homo sapiens
aacacagccgaaccaccaacaaagcagacgaggcacagggaagaagaaagcacacacaccagacgaagaacc

SEQ ID NO: 216403 - RNA, 76 nt, Homo sapiens
cggacgcgggggaagggacggcgcgagcggggagccccccagacccgaaaggagacaagaggacagccgcacggaa

SEQ ID NO: 216404 - RNA, 70 nt, Homo sapiens
cggggagacccggggacccccgacgccaggcagcgcccccaaacggacagaagaagcaacccccccgaac

SEQ ID NO: 216405 - RNA, 56 nt, Homo sapiens
ccccaaaagacaggcccaccgaagaggcgcaggaagggcaacaccaaaccagaaga

SEQ ID NO: 216406 - RNA, 80 nt, Homo sapiens
ccgcccccaagaaggaagcacagggccggccggaacaggcacgcagcacgggggcaggggccgacccagaacgccagcgc

SEQ ID NO: 216407 - RNA, 76 nt, Homo sapiens
cgccgggagccagaagcacaggcccgggcgaaggggccacgcgagacagcggccagagagccaacgggccggcaag

SEQ ID NO: 216408 - RNA, 53 nt, Homo sapiens
gccgaaaagcgaccccaaccgaaccagaaacccggacccgggcccggccacca

SEQ ID NO: 216409 - RNA, 78 nt, Homo sapiens
agagacaagaagagaaaagaacagcaaagcaggaaaaaaaaccgaaagggggcagcgaccagccgccagggagaaaag

SEQ ID NO: 216410 - RNA, 76 nt, Homo sapiens
cgccaccccaccagacggccagagcagggcagcaggccagagccgcggcgggccccccaagcccgccgagcccggg

SEQ ID NO: 216411 - RNA, 53 nt, Homo sapiens
acccaccggcgcacccaaacaacggcgggagaggagagagaaggaggagccca

SEQ ID NO: 216412 - RNA, 73 nt, Homo sapiens
cagcaccgggaacaaccgagcccccccgcagcagcgacagaacggaacccgcggggcccagcccaagcggaag

SEQ ID NO: 216413 - RNA, 71 nt, Homo sapiens
cgcgccggggacgggagcccccccccccgcaggggcaagacggaagcaaggcaaaggaaagaccgagcggc

SEQ ID NO: 216414 - RNA, 47 nt, Homo sapiens
cagacggggggacagcaccacaaacccaacaagccggacacaagagg

SEQ ID NO: 216415 - RNA, 76 nt, Homo sapiens
cacagccccaggccagcggccccacgaccggacgggccagccacgagagcgaaaccacaagccgccgggaaccaaa

SEQ ID NO: 216416 - RNA, 75 nt, Homo sapiens
aaagcaagaccggaaaaccccagcgcgggcccgcgccggacccgcagacagaagcgaaggggacagggggagaac

SEQ ID NO: 216417 - RNA, 77 nt, Homo sapiens
aaaagaaccaaaggaaaggaccagcgaagccaccaaggaggcacggacaaaacgcagggccagcaaacccgggccca

SEQ ID NO: 216418 - RNA, 53 nt, Homo sapiens
ccgccgccccagcccgccccccgggccgacagcgcgggagccaggaaacgcag

SEQ ID NO: 216419 - RNA, 91 nt, Homo sapiens
ccggagccgccgggagggacgccgccgaggcccggagcgcgccgcaggaacagaggcacccaccacacgcaagaagggaaccgaaaaagaa

SEQ ID NO: 216420 - RNA, 71 nt, Homo sapiens
gaacgaccgaaacaccaggcagaagaacgagaggaaagacccagcacgacacacagaccacaaggagagga

SEQ ID NO: 216421 - RNA, 80 nt, Homo sapiens
cacggccaagagcgggcaccaggaagcgaaggcgaaacgacagaagcccaaaacacagcacggagccagggagcccaagg

SEQ ID NO: 216422 - RNA, 88 nt, Homo sapiens
aggagaaaaccggaccaggcacgggaagagcccagccaggcgggcaccacggcaggggcgagcaccccaggaagggagaggaccgacc

SEQ ID NO: 216423 - RNA, 64 nt, Homo sapiens
aggcgcccgagaacccgaggccggcgcggaagaggccggcggcgggacggccccacgggacccg

SEQ ID NO: 216424 - RNA, 68 nt, Homo sapiens
ggcgagagaaaaggcagacgaagaagaagcaagcgaggcccacaagaagggagaagaaaggccagaag

SEQ ID NO: 216425 - RNA, 83 nt, Homo sapiens
agacaggcgcgggaagggacaagggaaacacgaagggaaaggccgagcgcagacggggaagcggagccaacagccagggcccg

SEQ ID NO: 216426 - RNA, 81 nt, Homo sapiens
caagagaggcccggcagccgcacggacgaaaacaccccgaggggcccacaggaagagagaaaacacagcagccacaagaga

SEQ ID NO: 216427 - RNA, 86 nt, Homo sapiens
ggagggcaccaggaccgcccccagagaccgaaggagcagacgaggcacgagcgccagcgcgagacagacggggcgcagaagcggcg

SEQ ID NO: 216428 - RNA, 54 nt, Homo sapiens
gaaaccgcgggagaaacccaggaagaccccagaacggaccaacaccccaggcca

SEQ ID NO: 216429 - RNA, 80 nt, Homo sapiens
cgggggggcgcgcgcgccgggagagagcgaggcaaggggcgcaccgggaaaggaacaggagcgccacgggacaaccccaa

SEQ ID NO: 216430 - RNA, 81 nt, Homo sapiens
aaggggaccccaacgaagagggagaacggcaacccaccagacaccagccgagaacggaagagaggacagcgagacagaacc

SEQ ID NO: 216431 - RNA, 76 nt, Homo sapiens
caagaacagcacggaaaaggacgcgaaaacccacagcgaagaaggaagaacgccagagaagcaccggacgggaaga

SEQ ID NO: 216432 - RNA, 34 nt, Homo sapiens
aaggacagcaaaccaaagcaggcgccgcaaaaac

SEQ ID NO: 216433 - RNA, 76 nt, Homo sapiens
caaacggaggaaagggcacagaggggcccagaaaacaagccagcaggacgcccaaaacagacacagggccaaaaac

SEQ ID NO: 216434 - RNA, 133 nt, Homo sapiens
acgaacaaaccgaggaggaaaccaaaagaagaaaaacaacgagccaagcccagaaaagcgcccaaggcccggagaagaaggggacagccaccggaggagaaggagcgaaggagcggaacaagaggaccaggag

SEQ ID NO: 216435 - RNA, 57 nt, Homo sapiens
cgggacccggcaagccagcagaaggccgaagcgaccagcaagaaaagcaggcagcaa

SEQ ID NO: 216436 - RNA, 81 nt, Homo sapiens
acagcacaggcacagaaggccaaaaaggcaaccacagagagagagagggaggggggacaagggaaaacaacagggaggaaa

SEQ ID NO: 216437 - RNA, 77 nt, Homo sapiens
cgcgccgcccaagaccgcggcgcccccacgagagggcaaacgcgcgcagcggaagccgcagaaggaccggccagaag

SEQ ID NO: 216438 - RNA, 72 nt, Homo sapiens
gagacagacagaagacccaccggccagggaaaaaaccgacccagaagagcagagggaaggcaacacgagcgg

SEQ ID NO: 216439 - RNA, 76 nt, Homo sapiens
agcgaagcaacagggaggcgaacagccagggagagagaacccccggacgcaacaagcgccggggaccgcgcgggag

SEQ ID NO: 216440 - RNA, 73 nt, Homo sapiens
aacagagccaaggccggagcgcccaaacggcgaccaacaaagccacaaaagacccagcacaggcccagaacac

SEQ ID NO: 216441 - RNA, 78 nt, Homo sapiens
cccgggcacacaacaggaggagaaggagcaacaccagcaacacagccggccgaggaagcaacaggagggcagaagaga

SEQ ID NO: 216442 - RNA, 74 nt, Homo sapiens
aagaggagacgacacgcaccaagccaggaggaaaacccaccaccacgacgggggcagccaccccccggaaacac

SEQ ID NO: 216443 - RNA, 73 nt, Homo sapiens
agcacaagggcgccgccgagaggagaaacacaggaaacaccaaggaagaagagacgaccgagaccaggggaaa

SEQ ID NO: 216444 - RNA, 72 nt, Homo sapiens
gcgaggaccagagagcaacggaaacgacgcccagaaaaaggaggaccggacagagcgaagaagaacaaagaa

SEQ ID NO: 216445 - RNA, 70 nt, Homo sapiens
ggcccgcgcccccgccgcgcccgggagacgccccgccgcccacccaggagcaaaggaaagaacccgcgcc

SEQ ID NO: 216446 - RNA, 78 nt, Homo sapiens
gaggccgcgggcgcgggaggcccgccggcccgcggcccggggacccacacccagggcacacagggaccaagaagcccc

SEQ ID NO: 216447 - RNA, 76 nt, Homo sapiens
agcgacaggacgggaacgggagcacagcaagcgggagcaggcagaccaaaggaacagaagccagggccggaaaacc

SEQ ID NO: 216448 - RNA, 40 nt, Homo sapiens
aggagacccaaagaccccagggcggagaacggaaaagcac

SEQ ID NO: 216449 - RNA, 121 nt, Homo sapiens
acggcccgagcccagggccgaagcaaaagccaggaggaagagcagaccggacgagacacaccacgcacgccagcacgcaggcaggaggaagcgggcaaaggagacccagcaaaggagagac

SEQ ID NO: 216450 - RNA, 75 nt, Homo sapiens
gcgggcgacagcggcaggggccccgaaccagaagccgcaccaggcggagaagcagaacagcacaccgagaggaca

SEQ ID NO: 216451 - RNA, 74 nt, Homo sapiens
agcgacggggaggcgcggccaacggggccacaagagagaacccaccgcaagagaccaaaggccaagagcaccgc

SEQ ID NO: 216452 - RNA, 49 nt, Homo sapiens
caacccccgagcaagacggggacggaccacaaaacccaacgcggacccg

SEQ ID NO: 216453 - RNA, 75 nt, Homo sapiens
gcggcacccaccacaagccaggaaggagacacggccccccaaggaaaacagggagaaaaccggaagagaaaggcc

SEQ ID NO: 216454 - RNA, 74 nt, Homo sapiens
gggcaaacccgagagaacggaaagaaagaagcagaaaaccagaaacagcacaaggcccaggaaaaaagcacgga

SEQ ID NO: 216455 - RNA, 80 nt, Homo sapiens
gagacggcagcgcaaccaccccgcgcagcacacggcagggaagaggaagcggaggagcaagccgagagagcacgccaaga

SEQ ID NO: 216456 - RNA, 55 nt, Homo sapiens
ccaagacacagcccgaggacccaaggggggcccacgcggaggacgcagaacacgg

SEQ ID NO: 216457 - RNA, 69 nt, Homo sapiens
ccaccgcggcgccaccacacggcacgcacaggccgagccggcccaagaaggggaggacgcgagcggaag

SEQ ID NO: 216458 - RNA, 76 nt, Homo sapiens
aaggaccaagaaccagacaagggaggcgaggacggacaaaaggaaacggacgggaggccagccagcagaaggagga

SEQ ID NO: 216459 - RNA, 81 nt, Homo sapiens
ccgcgcccggccccgcgcgggcggacggcggaggcgcccccagggcggagaacggaaaagcaccaggaagcagagaggacc

SEQ ID NO: 216460 - RNA, 71 nt, Homo sapiens
caacagcggaacccgggcaggggaccggggcaggccaccccccgcggaacgcgggaccgccccccccacac

SEQ ID NO: 216461 - RNA, 65 nt, Homo sapiens
aacaggcacgggcaagccgggccgcgcgcgagacacgagacgcacgccgagaggagcgaagccca

SEQ ID NO: 216462 - RNA, 95 nt, Homo sapiens
gaggacgcggagcccaagaaacgggcagccaggcccccacagcccgcagaggccacaggggagacaaccccaggacgggcgggacaaaggagaca

SEQ ID NO: 216463 - RNA, 69 nt, Homo sapiens
aagaacaagcagagagaggaaaaagacccaagaggaacaacccagggaacgggaagcggccaggccggg

SEQ ID NO: 216464 - RNA, 35 nt, Homo sapiens
ggagcgggccggggccagaacacgcccaggacggg

SEQ ID NO: 216465 - RNA, 77 nt, Homo sapiens
aaaaaaaaacacaggcaagcagccgacaaagcaacgcacgggaacaggcacccgcaacaccagacggccacgccacc

SEQ ID NO: 216466 - RNA, 64 nt, Homo sapiens
ccgcagccagccccccgagccgcccggcccccgcccgcacacgacaaggagagcgaaggacggc

SEQ ID NO: 216467 - RNA, 54 nt, Homo sapiens
gagaagcgagaggcaaaggagccccacacagacggcaccacacggagaaaaaca

SEQ ID NO: 216468 - RNA, 73 nt, Homo sapiens
aggaaagacggaagcccagcgggccaaggaaagcggagggagccccagaggacggccacagccagaaaagagc

SEQ ID NO: 216469 - RNA, 64 nt, Homo sapiens
ggacgcgggaggaggcggcggcggcgaaacccagcgccgcaggggaagcgaaggcggcaacccg

SEQ ID NO: 216470 - RNA, 71 nt, Homo sapiens
gagcaggcgccgccccagcccgcgaacgaaacagacaggggcaagcgggagcgccaagcacagagacgagc

SEQ ID NO: 216471 - RNA, 74 nt, Homo sapiens
acggaacacgacgaagaagaaagacgaccacaaaccagaggcgcagcgagggccagaccaaaggaaccagagca

SEQ ID NO: 216472 - RNA, 79 nt, Homo sapiens
ggcccacagcaggacggaagcgagggcacgggcggcagcccgagaccgcagcagggacgccaaaaagagcaagaccgcc

SEQ ID NO: 216473 - RNA, 78 nt, Homo sapiens
cgaagcaagagccccccagcgcagcccaccagaggagacacgaaagcccacgaggaagagaggaaaaaaacaccaagg

SEQ ID NO: 216474 - RNA, 70 nt, Homo sapiens
ggccagacaaggaggaccgcacgacagcggcccgcgggggggacacaggacaacgagagaagccgaagcg

SEQ ID NO: 216475 - RNA, 74 nt, Homo sapiens
agaccaagaaagcaggaggacacaacccccaacaccaacacccagacgccaccaacaacaccagggacacaaca

SEQ ID NO: 216476 - RNA, 49 nt, Homo sapiens
agaaagaaaggcaaccagacaggagacccaacaccccagccagacggca

SEQ ID NO: 216477 - RNA, 71 nt, Homo sapiens
ccacccgacccggcaccacacgcagaacgggcggacgggcgcccagccaggggaaaagagacgcaaaccac

SEQ ID NO: 216478 - RNA, 65 nt, Homo sapiens
gagagccgaacccaccgagccagggaggaggcaggggaagcacaaaagcgcacccgcgccagcga

SEQ ID NO: 216479 - RNA, 71 nt, Homo sapiens
cgcagccccgcggcacaaccagggcgcgaccagccacagaagccagccaacacagcaggcggcagaaaacc

SEQ ID NO: 216480 - RNA, 77 nt, Homo sapiens
gggccaggcggggggaggcccgacacccggaagagcaggccgcagcggaggcaaaagcagaccggaaaacccaccgg

SEQ ID NO: 216481 - RNA, 77 nt, Homo sapiens
cagcgaggcggccccgacacccgcacaccgagaacaagacaccaagggaaggaaacacaaaccagcacgaagaaaag

SEQ ID NO: 216482 - RNA, 72 nt, Homo sapiens
ggagaccggagcccagggagcaagagccacaccgccgaccgggaaacgaccaaaagccagaaaaagacaaca

SEQ ID NO: 216483 - RNA, 78 nt, Homo sapiens
ccgaggcagcccaagccgggcccgcacggacaccaagcagaagccagcccccaggagcagacaggaccacgccaccac

SEQ ID NO: 216484 - RNA, 91 nt, Homo sapiens
gaaaagaaaggcggcgaagaagagccgagagggaggaaagggaggcaagaaggaagcagggagaaacaaaggcagcgcgccccgggggagc

SEQ ID NO: 216485 - RNA, 68 nt, Homo sapiens
aaaagacccggcaacggaggcaaggcgaaaaacaacgccgcagacggcaccaggacaagcgagggaga

SEQ ID NO: 216486 - RNA, 80 nt, Homo sapiens
aaagggacgaacgcacggacaacacggggaacaagaccgaaggcgacacgcaggcccgcggaggggggcccggagacggg

SEQ ID NO: 216487 - RNA, 67 nt, Homo sapiens
aacggaccaccagaaagcaccccacaggccacaccaccacaggaggcaagaaccgcacccaccccag

SEQ ID NO: 216488 - RNA, 56 nt, Homo sapiens
acggggccagggaacccggcaccgccccaggcaagcggcagccacacccggagaag

SEQ ID NO: 216489 - RNA, 76 nt, Homo sapiens
gcccagggcccagaaacccaggaaacgagaccagaccccagagaggaggcacagaagggaaacaaagcaaagaaca

SEQ ID NO: 216490 - RNA, 75 nt, Homo sapiens
agccacacgaccccgcggccaagccagcagagaggaggggacggccacgagcagaggagacaacgcaccaagaac

SEQ ID NO: 216491 - RNA, 76 nt, Homo sapiens
caaaacccagacaccgacgggccgcgaggggaagaggaagcaaagccaaggcacgggaagcgcccacgggagagcc

SEQ ID NO: 216492 - RNA, 76 nt, Homo sapiens
cgggagcgcggggcgggggcgcccgccgcgccgccacgggacaagagaaaaaaagggcgggcgaacaaaaagagca

SEQ ID NO: 216493 - RNA, 76 nt, Homo sapiens
ggcgagaacagcaaagcccaagagaggcaggcagcgacagccacacaacggacaggacaggacacagaaggaagaa

SEQ ID NO: 216494 - RNA, 62 nt, Homo sapiens
cgcccagacggccaccggcgggaggaacaaaaggggcgacagcaagaaggagccagcacaga

SEQ ID NO: 216495 - RNA, 81 nt, Homo sapiens
agagacacaaaaacagaacagggacaccaggcgagccagacgcgggaaggacgggccaccagcccaggagaccacgagggc

SEQ ID NO: 216496 - RNA, 59 nt, Homo sapiens
aaaaagacggaaaggacagccaagacaggaaaaccaagcagaaggaggaggcagccagc

SEQ ID NO: 216497 - RNA, 55 nt, Homo sapiens
ggaggaaaagaagcagccgagacaaagaacaaggaccccaggacagcagaccaca

SEQ ID NO: 216498 - RNA, 77 nt, Homo sapiens
caaaggagagaggaccacccagaggagcaacggcacccacaaacaggcgcagccacacaggggacaccgaggaggag

SEQ ID NO: 216499 - RNA, 85 nt, Homo sapiens
cgggggggagggggcccggcaggacgaggacgaaggccgaggagccgggaaaccgaagaaggcagagaaggcaaacaggaggcgc

SEQ ID NO: 216500 - RNA, 57 nt, Homo sapiens
gcaaaaggcggaccgcccccgccaacgaagaccgagaccagacggaagagccaacac

SEQ ID NO: 216501 - RNA, 88 nt, Homo sapiens
cgagggcaacgagaaagagacggacaaagaggccaggagacacgccaccgccggcggcccccggccaggccaccccccaggagacagc

SEQ ID NO: 216502 - RNA, 79 nt, Homo sapiens
acgggcacggaaaagccacggaaggagcccggagcggcggcccccaaagacaaaccaagggagacacagcagcgagaag

SEQ ID NO: 216503 - RNA, 73 nt, Homo sapiens
aaaggcccacgcagcccccaagcagaggaaaaagccggacgagcagaacacggaagaaccacccacgaaacga

SEQ ID NO: 216504 - RNA, 62 nt, Homo sapiens
ccgccaccggccaggacacagggcacaccaggccgcccccagcgaggggccggcggacgccc

SEQ ID NO: 216505 - RNA, 73 nt, Homo sapiens
acagaggcggaaacaagacagaggcacagaggagcccccaagagggaagcgaggaccaggaagagaaagaaga

SEQ ID NO: 216506 - RNA, 66 nt, Homo sapiens
acccaagagacccgcccaggcgaacacggaaaagaagcagccaaaaggcacaggagcaacgcggcg

SEQ ID NO: 216507 - RNA, 74 nt, Homo sapiens
gggcggaagacaggccacccagcggggagcacggcgagcagccaggccaggagaggcgaggagaaagcgcagag

SEQ ID NO: 216508 - RNA, 72 nt, Homo sapiens
gcacagccgacacagccccgggacccccaagagcacaggcagaaggcacaagggcggggccggggagcccgg

SEQ ID NO: 216509 - RNA, 105 nt, Homo sapiens
cacagacagcaggagcgaggccgggaccggagcaccggcagacccggggaccgggaagagaaggcagcaggaagaaacagcgaaccaaaaaccagcagaagcaga

SEQ ID NO: 216510 - RNA, 106 nt, Homo sapiens
gagcaaaaaaagagcccgcaagaagaacagagacagcagccaaacccccagggcaggagaaacccagcgggcccagagacgcagcgggaaaaccaaggcaagccag

SEQ ID NO: 216511 - RNA, 71 nt, Homo sapiens
aggaccaggaaaagagcgcgccaggaaaagcgggggacaggagccagcggcccaggggcgggggaggaaac

SEQ ID NO: 216512 - RNA, 46 nt, Homo sapiens
cggagccaagcaggagggaagagaccaagagaagcagcggaagcgg

SEQ ID NO: 216513 - RNA, 103 nt, Homo sapiens
gcaaagcagccgccggccgacccgacgcgaaggaagcagcacagggcaggaggaagagagaagggcacagaccaagacaacgaaccccggccaggacaggccc

SEQ ID NO: 216514 - RNA, 65 nt, Homo sapiens
ccaggaaggaagacagcgacgcagaccaaaagcagagaggcgcgaacagccaagaacaggaaaac

SEQ ID NO: 216515 - RNA, 80 nt, Homo sapiens
cgagagcccacaggcccccacagaccagagccacgcgcccaggcgcaggcaggggccacacgcgcacgcaacccgccccc

SEQ ID NO: 216516 - RNA, 76 nt, Homo sapiens
cgaccgcgcgccgcccaagggggaccgccggccgcgagccagcgcgggcccaaccccgacacaggggccgccagcc

SEQ ID NO: 216517 - RNA, 77 nt, Homo sapiens
gacagaccgcagggaaagaggcccgacacaaccaagcggacccaaaggaaagcagaaaggaacggcagcgagagagg

SEQ ID NO: 216518 - RNA, 77 nt, Homo sapiens
cccgccccgacgaggacgaccaacaggcagcagcgggccccgccaccggcacaccgaaggacaagggaggcgaggac

SEQ ID NO: 216519 - RNA, 72 nt, Homo sapiens
aaccgcggaagcgccaaccggacaggcagcagacagggggcacagggaccgccagggcccccacccggcaac

SEQ ID NO: 216520 - RNA, 63 nt, Homo sapiens
aggccgccgggcgccccgggcgggcgagcacaggcacacacacaaggggggcagaaagaagag

SEQ ID NO: 216521 - RNA, 79 nt, Homo sapiens
aaaaggagagaaacacggagacagcaccaaacccacagaggcacgagccgccgggaccgaaccgagagccccgacgcga

SEQ ID NO: 216522 - RNA, 76 nt, Homo sapiens
gaaacgaggcgggagcagcacaggcagggagggaagcggagagacaggaaccaggggggaccaaaacaaccacacc

SEQ ID NO: 216523 - RNA, 83 nt, Homo sapiens
caagacaagcacggaaccgcccgagacgcgggccggagaaggggcgacgcgggcaccccccgaaggacaaccccgcaacggca

SEQ ID NO: 216524 - RNA, 120 nt, Homo sapiens
gcaggccggcgccggaggaagagcagagggggaccagagagcccaacgccgggccaagaccccgagcggcggagaaaccaccacaaacacgaggccagcaacgaccaacaagacagaccc

SEQ ID NO: 216525 - RNA, 72 nt, Homo sapiens
aaaaagaagccacaaggacaaagggaacagggaagaaaaaacacggccagaggaaggaggggcaacccagca

SEQ ID NO: 216526 - RNA, 58 nt, Homo sapiens
gggacacacaaccgcccagccggcgagggacgccgcagaaggcaggcccacgggagcc

SEQ ID NO: 216527 - RNA, 82 nt, Homo sapiens
gaggagcagggcagagcacgcgcgcagcgaagcccagggaggccaccaggcccaggggacacccagcaggccagggaagagg

SEQ ID NO: 216528 - RNA, 74 nt, Homo sapiens
cggcacccggcaaccagaaacacaggccaagcaccaggcacacaagcacgcaggagggaaggagcaacagacag

SEQ ID NO: 216529 - RNA, 105 nt, Homo sapiens
ccgagaggaagacgagccgggaggaacggcccggaaacaggaggacacgacgacacgcggaggcgccggaagcccccacccaacaagaccccaccggcacacacg

SEQ ID NO: 216530 - RNA, 66 nt, Homo sapiens
agaaaccggcaaccaccgacaggcaacggaaaacacacgcaaaaaacaagacaacggcaagcggag

SEQ ID NO: 216531 - RNA, 60 nt, Homo sapiens
ggaaaagaagaaggaacgaccgaagaaggacacagagcagggaaaggacaagaaagagga

SEQ ID NO: 216532 - RNA, 76 nt, Homo sapiens
agcccgccccacagccggcccaaacgagccagccacagagacaggaccaggccggccacgcacaccccagacacag

SEQ ID NO: 216533 - RNA, 58 nt, Homo sapiens
ccggaccaggaaacggaggcgggcaccggcccgaccagccacgacacccacgaaagga

SEQ ID NO: 216534 - RNA, 83 nt, Homo sapiens
ggaggagcgaacaccgccgcggcccccgccggcgcgggaacccaaggaccgcaaagaaaacccagagaacaccacccgaagag

SEQ ID NO: 216535 - RNA, 82 nt, Homo sapiens
gcgaagcaacccccgccgaccagagccagacacagagcagcagccccacaagcggaggaaagcaggaagcagaggcaaagaa

SEQ ID NO: 216536 - RNA, 80 nt, Homo sapiens
cggcggcggcacgagcccgaccaggagccagcaccaaaaccgaggcagaaagggaaaggcaacacacggacaagcaggaa

SEQ ID NO: 216537 - RNA, 58 nt, Homo sapiens
gaaggaccaagaaccagggccagacggcaaggagcgggggaggcagagggccggcggc

SEQ ID NO: 216538 - RNA, 77 nt, Homo sapiens
caccaggcagaggcaacagaggagcaacaaggagacccagaagaagaagggcaagaagacacagaagcacaaacagc

SEQ ID NO: 216539 - RNA, 84 nt, Homo sapiens
ggcagggcaccgcgcgaagcggccaaagccgcccagacggccaccggcgggaggaacaaaagcgccgcgccaggacggcagcca

SEQ ID NO: 216540 - RNA, 74 nt, Homo sapiens
aggccaagcaaccaccagcagcccccagagcggaacacaggacaggggacgaccaggaaaccgacagggaaggg

SEQ ID NO: 216541 - RNA, 74 nt, Homo sapiens
gcagaaaaaggcaggacagggaagccccagcggccagagcacgacgagcccagggcgaggaagccgccgggaac

SEQ ID NO: 216542 - RNA, 68 nt, Homo sapiens
accgagcaacagacaaagcccgggggcaaggaaacgcgaagcgaaaaccagccagacagaaggacccc

SEQ ID NO: 216543 - RNA, 57 nt, Homo sapiens
gagggcgcgcggcagagccggcccccggccaggcagaaggaggaacaagaagcggac

SEQ ID NO: 216544 - RNA, 80 nt, Homo sapiens
cgcagcgcgcccagcggcccaggcgccgcggcgaggagcgagcgcgcgaggggcggccgaggccccgggggcgccgaggg

SEQ ID NO: 216545 - RNA, 78 nt, Homo sapiens
ccgcagcgacaacaggaggccggaagacccaaagcgaggagaaaagagcagacaccagagaagaacacaaacaaggcc

SEQ ID NO: 216546 - RNA, 77 nt, Homo sapiens
ggaaaaaacccaagagagcagcagccagaacaacacacaaccaccagagcaccacagcggaggcagggcggaccggc

SEQ ID NO: 216547 - RNA, 102 nt, Homo sapiens
cacggagggagcgggccaaggaggaggcagagggcagacgaggacgacaccccgacgacggagcaagcggggccgcaggccccagcgggagggcacggcgaa

SEQ ID NO: 216548 - RNA, 76 nt, Homo sapiens
ggccgccaccggccgccgagccacgcggaggcagcaccaccgcccgggcaaggccagcccgaggaaagaaccgaaa

SEQ ID NO: 216549 - RNA, 124 nt, Homo sapiens
acggggcaggaacacacagaaaagggaggccaaggcggagaacccaagacgccccaaaggaagaggaccggacggagaccccaaagaaacaaagagcaacaccaaacaggcgacgggccagaaa

SEQ ID NO: 216550 - RNA, 75 nt, Homo sapiens
ccgggccggccagcgccggaaaccaacaacgccaggagccgagccggccaccaaagcgcgcagcagcgcgcagcg

SEQ ID NO: 216551 - RNA, 89 nt, Homo sapiens
cagcggaaaagcaaagacaagccgggaagagaaagcgggcggagaacggaaaagcaccaggaagcagagaggaccgcagaagggaagga

SEQ ID NO: 216552 - RNA, 84 nt, Homo sapiens
cagcggaagacgcagagggagacaggaaaaccaacggcccggaggaccacagcccaggggccccaggcgaaacccagccggagc

SEQ ID NO: 216553 - RNA, 64 nt, Homo sapiens
ggaccggcgaggagcgaagaacaaacacccgagcgcgagggaggaccaggcgcagagccgaaga

SEQ ID NO: 216554 - RNA, 66 nt, Homo sapiens
gaaacgccgcaacgacaggaaggaggaagcaccggagcaaaacgggaagagccagaagcaaagagg

SEQ ID NO: 216555 - RNA, 71 nt, Homo sapiens
gaacgcagaccgcgcgagaccaaacaagcacagcgccagggcccccaccgggacgcggggcccggggaggg

SEQ ID NO: 216556 - RNA, 40 nt, Homo sapiens
gaacacaacccaccgacagagacgaggccacaagaccagg

SEQ ID NO: 216557 - RNA, 75 nt, Homo sapiens
gcaaccgccagcaccgggaagagaaagaaaagccgaaggcaccagacaggaaccgaacaagacagaaagcgggac

SEQ ID NO: 216558 - RNA, 70 nt, Homo sapiens
agaggagaacacgaacaccagaccgcccacaagaggaagaggggacacggacgacaccgagcccaaccga

SEQ ID NO: 216559 - RNA, 106 nt, Homo sapiens
caacacaagggacaaagaaaggagcagcggaagccaacacgcggaggaggagggaggaagaggcgcggcaagggcgcggcaagaaaaccggggccgccccacccaa

SEQ ID NO: 216560 - RNA, 73 nt, Homo sapiens
acagaacagcaaacggcccagagccacgccccagaagacacccaccccgaggaaccaagaccaacccggagaa

SEQ ID NO: 216561 - RNA, 83 nt, Homo sapiens
agggcgaggacggccgaaccccgcgcccgcaggacgccccagccagcgccgaaaagcgaaaagaaacaagccgcggcaacagc

SEQ ID NO: 216562 - RNA, 92 nt, Homo sapiens
gccaacgcgggcgcaagaggagccaggaggagagcccacagggcaaagagagcagacccgaggagcccgcagagcaaccacaaaccgaaaga

SEQ ID NO: 216563 - RNA, 58 nt, Homo sapiens
gacaaggaccacagccgagcgagagcaggaagacggaccagaggacaagacaaaggga

SEQ ID NO: 216564 - RNA, 87 nt, Homo sapiens
ccgcccgcccagcgccgcccccggagggcccacgcagcgccggacaaaaacagaccccgacagaagaaggaaggcaccagaccagaa

SEQ ID NO: 216565 - RNA, 74 nt, Homo sapiens
aaagggcgggagaggcacaagaaaaccaccaaaagaaagacacaggccaaggggcaaagaaaaaggagagaaaa

SEQ ID NO: 216566 - RNA, 72 nt, Homo sapiens
cgaccaaaaaaagccagaaaaaagacagaaaaggcgcaaggagagagaagaagcaacaacacacagaggacc

SEQ ID NO: 216567 - RNA, 101 nt, Homo sapiens
gcaggccgggcggccaccgggaggcaaggaggcgcggagagcgcaaacggagcggcccccacagcccaggaagacagaaacacagacggcccgcagaccgg

SEQ ID NO: 216568 - RNA, 39 nt, Homo sapiens
cccgagggcgggacacaggcccagggaagcagcccgaga

SEQ ID NO: 216569 - RNA, 77 nt, Homo sapiens
aaccaagggaaggaccagaaacacagcaacagccgaaaaaggaaaaacagacaccgaaagccccaaaaaacaaccag

SEQ ID NO: 216570 - RNA, 60 nt, Homo sapiens
gcaaaaggagaaccagggagaggaggagaaacccacaaacaaacagacagcaaaggagcg

SEQ ID NO: 216571 - RNA, 76 nt, Homo sapiens
gggaaacgggcgaagcgacgagccgcgaggaggaaggaaaggccgaggacacccagaggacaaggaccccaccagc

SEQ ID NO: 216572 - RNA, 69 nt, Homo sapiens
aacgcgggaagcgcccccagggcagaaggcaccaaaggcaggacgaaggaagaacacgacccaaacgag

SEQ ID NO: 216573 - RNA, 76 nt, Homo sapiens
cccggaccgccgccgggagcggaaacagcggcagccagaggaagaaggcgggcgagaccaggacagaaggaggacc

SEQ ID NO: 216574 - RNA, 76 nt, Homo sapiens
gccggaccgcggcagaagaaagcaagacccaggacaccccgaagccgagaaaggggagccgccaccaaaagcagac

SEQ ID NO: 216575 - RNA, 83 nt, Homo sapiens
aaaacgacaggagcacccaggaaggggcccagaagcagaaccaagagaacacgagaaccaagcagaaggaagaagcgaacaca

SEQ ID NO: 216576 - RNA, 65 nt, Homo sapiens
cccccagccgcgaagagacccgacagaccaacaaaggaacgagcagcaacggccaggaaccaggc

SEQ ID NO: 216577 - RNA, 64 nt, Homo sapiens
gccagaagaccgggaggaccagggaagcaggaaaagagagagagcaaggacggggacacaagac

SEQ ID NO: 216578 - RNA, 71 nt, Homo sapiens
accagagcgggaaaacacgcacagcggaaacaagagcacagaagacgagcacgaggagaggaaccaacgaa

SEQ ID NO: 216579 - RNA, 56 nt, Homo sapiens
ccgcgcggggacccgacgcccgcacgaaggccaggccagacggcaaaaaggcagaa

SEQ ID NO: 216580 - RNA, 59 nt, Homo sapiens
gaccgaagcaaccaaaagcagcccacccaaaaggaaagccgacaccagcaccagacaca

SEQ ID NO: 216581 - RNA, 78 nt, Homo sapiens
cccgaaaccggcgccaggggagcggagccaccgcgaagggcccccaacggaccccacagcccgaacgcacaggacagg

SEQ ID NO: 216582 - RNA, 71 nt, Homo sapiens
aagacagcccaaacgccccacgaccagacacgccaccagccgagcccccccgggacaccgggccccggcag

SEQ ID NO: 216583 - RNA, 58 nt, Homo sapiens
cgaggcgagggcagagccgcggggcaagacaggccgggaagaaggagggacacagcag

SEQ ID NO: 216584 - RNA, 75 nt, Homo sapiens
cgacaagcaggagcacagacggagacgacaacgagggagccgcggaagaaggccggcccccaaaaagaggcgaac

SEQ ID NO: 216585 - RNA, 80 nt, Homo sapiens
gccaccgcgcacccacgaacgcccaccccccgaacccagccgcaccgcggggccaaggaagggccagacagggacacggc

SEQ ID NO: 216586 - RNA, 59 nt, Homo sapiens
agccagaaagggcgcacaaggagcggcggccccacgccggaaagcggaaacccggcggc

SEQ ID NO: 216587 - RNA, 84 nt, Homo sapiens
ggccgccgcagagccgccacggggagcaaaaccaacgccggccggagcagcagcccgaggggcccagcggagaagagcccaggc

SEQ ID NO: 216588 - RNA, 67 nt, Homo sapiens
aaacgcaacagaaacaacagaggccacgcacgggacccagacaaacgaggaaacagaacgcaaccaa

SEQ ID NO: 216589 - RNA, 55 nt, Homo sapiens
cccagaccaaggaagaggcgaacaaggggcaagaagaaagcaacacaagacaaac

SEQ ID NO: 216590 - RNA, 78 nt, Homo sapiens
agagagaagggcgggaagggggcccggccccaggcgcccaccggcccgggaggagcggggacacgaggaccccccaaa

SEQ ID NO: 216591 - RNA, 57 nt, Homo sapiens
gccacggcggcgaccagcggcggggagccaaggaagcccggggcggcgacggagcac

SEQ ID NO: 216592 - RNA, 55 nt, Homo sapiens
accggcgcacccaaacaacgacaagccagccaacccacaccacccccacgaacaa

SEQ ID NO: 216593 - RNA, 76 nt, Homo sapiens
gcgcggggacgcgcggcgcccgggcgagaggccggcaccagggaaaaaaccaggcagccaaacgcgccagagaacc

SEQ ID NO: 216594 - RNA, 70 nt, Homo sapiens
acggcgggacccagggccaccagacagaaggaaggccacgacccccggagcgaagaacgacggggacgga

SEQ ID NO: 216595 - RNA, 88 nt, Homo sapiens
gaaggcccacgggagaaaaccgggcgcaagggaaagggagcagcaccggccacacccacagcacgaccggaacccagcgaccgacgcc

SEQ ID NO: 216596 - RNA, 56 nt, Homo sapiens
cagaaagaagcacgggacacagaagagcagcccgccgacaagggcccaggcagccc

SEQ ID NO: 216597 - RNA, 74 nt, Homo sapiens
ggcgcaagaagacagacgaaaaggaccgagaacccgcagggaacaaacaccccggaacaaacagagaggaaagg

SEQ ID NO: 216598 - RNA, 72 nt, Homo sapiens
aagaagaagaaaagaggaccgacaaccaaaccagccgagagacaagacgcccaaaaaaaggggagacagcca

SEQ ID NO: 216599 - RNA, 72 nt, Homo sapiens
acagagaggaaccaagacccagggaagagggccggaacacagaagccggacggaaacaagaggcaccaggcc

SEQ ID NO: 216600 - RNA, 96 nt, Homo sapiens
gcgcggaagaagcaggaggcaagaaaggggaaccccggagaaaaggccaagaaggcaggcacaagcagaggaaccagggaaccgccgccagcaacc

SEQ ID NO: 216601 - RNA, 80 nt, Homo sapiens
agcagaggagacaaaccggagaaggagccaagaaagagaaggcccggccaacgcaacagggagcccacgcaagaggggcc

SEQ ID NO: 216602 - RNA, 101 nt, Homo sapiens
ggagagacccgggggcgagcacaaacggggcggggccggggaacacacaggggaacaccaggaaaaggagaccccaaggccggacagaagaaagcggaggg

SEQ ID NO: 216603 - RNA, 74 nt, Homo sapiens
gaaagcaaaccagcaggcaccaaggaaagcagaagacaaaacaaacgccagaaccaccaagcacaagaaaaaag

SEQ ID NO: 216604 - RNA, 83 nt, Homo sapiens
agcggcgccgagaggccggcgggacgcgggcgccaggaccggccgaacgcagagcagaaacggaaggcagagacaggccagaa

SEQ ID NO: 216605 - RNA, 72 nt, Homo sapiens
caccaacaagacaaaagaacggaagaaaaaaccaggcccagccagcagagccacgccagagcaccggggaca

SEQ ID NO: 216606 - RNA, 75 nt, Homo sapiens
acgcccggggcgggaggagagcccggaccgacaggaaagaaggagcccacaaagaaaagaacaccgccagcagcc

SEQ ID NO: 216607 - RNA, 76 nt, Homo sapiens
gaaagggaagcagaaccaacaggacagcccccggacccaccgagaaagagaaaaggagaaccacgaaacggaccca

SEQ ID NO: 216608 - RNA, 66 nt, Homo sapiens
aaaaacgaaggcggcggggaaaagggcagaggcaggggggggacggcacacgggcacacagccggg

SEQ ID NO: 216609 - RNA, 65 nt, Homo sapiens
agccaggacaaaggaggacagcaccaaaaaccggcgagagagacagccggccaccaggggagcac

SEQ ID NO: 216610 - RNA, 104 nt, Homo sapiens
aacaaccgcaccccagccacaaccgcggaggcaaccgcgcccccagagcccaggacccgaacacggaagaaagacacgcaggaggccgcggccgagcagcgcca

SEQ ID NO: 216611 - RNA, 71 nt, Homo sapiens
gacgcaaaccgcggcagaaaccccaaggccgagaagagcacgcgcacccaagccgagccggccgcaaaagg

SEQ ID NO: 216612 - RNA, 76 nt, Homo sapiens
acagaaaagacaggcgccaggagcacagaagagcgaggagacacagcgagaagaggccaccagaaaacggccacga

SEQ ID NO: 216613 - RNA, 71 nt, Homo sapiens
ccgcgcggcgcggggaccgcggcccgggagaggagaacggccacggcccaaggaggacgccaccccaaccc

SEQ ID NO: 216614 - RNA, 80 nt, Homo sapiens
cagcccacacccccggccagccggcgccggagcgaaacacgacggaagcaggagaaggaccaaaaggaacgagacggaag

SEQ ID NO: 216615 - RNA, 76 nt, Homo sapiens
ggagcccggaggaagaaggagggcgaccgcaccagccggggagaaaggcgaagaggacagagagacaaggaacaga

SEQ ID NO: 216616 - RNA, 80 nt, Homo sapiens
cggcccagacgccaacaaggcacagaagaccgagacgagcagaagacagaccagaaccgccgggcccagaccgagccgca

SEQ ID NO: 216617 - RNA, 69 nt, Homo sapiens
gggacggcacaagcaaggaacagcacaaggaaaacgagagaaacgaaggcgagagaaacagcaaggccc

SEQ ID NO: 216618 - RNA, 75 nt, Homo sapiens
ggaaaggcacgcacgagaagcggccgaagagagcgccaaccggcagccagccacagagcccggcagcagggcccg

SEQ ID NO: 216619 - RNA, 67 nt, Homo sapiens
caaaccggagagccccggaagacccagggaagagaaggagcgaggcggccagggccccagaagcaaa

SEQ ID NO: 216620 - RNA, 62 nt, Homo sapiens
acagggggacacggcagagccgagaagggaagcgccaaagaagcgacgcgaaagaaagaaag

SEQ ID NO: 216621 - RNA, 65 nt, Homo sapiens
agcccggcaagcgagaaagccacggggaacaaccaaagaacaaagaaggggacaggcgcacaaag

SEQ ID NO: 216622 - RNA, 73 nt, Homo sapiens
gacccgcgaaaccgcaccgcaaaccaacgcgggccgggcaacacgcagccgagcggcgccccggcaaggccac

SEQ ID NO: 216623 - RNA, 52 nt, Homo sapiens
gaccaggaggcgagcaacagagccgcgcaagaccgcagagaagaacacggag

SEQ ID NO: 216624 - RNA, 52 nt, Homo sapiens
gggggggccacgcaggggaggcgccgagcgaccgggcagccagaacagcaca

SEQ ID NO: 216625 - RNA, 78 nt, Homo sapiens
ccggcccaagagcccacgagcgagaagaaaagccaagagaggacggggacgggccccaggacgaggaagacaaggcca

SEQ ID NO: 216626 - RNA, 59 nt, Homo sapiens
caggcaacaacgccccacaagaaagggaaccgccgcgccacccgagccagccccgcggg

SEQ ID NO: 216627 - RNA, 78 nt, Homo sapiens
gcgaaagcacaccaagacggaacagaaccggcaagagcaaaccgaggagccccccccagcccagagaggggcagccag

SEQ ID NO: 216628 - RNA, 79 nt, Homo sapiens
caaaacagaggcaacaaggggagggaagagagcccaagggagcagggcacccgaccccaagacccgacgagaccacagc

SEQ ID NO: 216629 - RNA, 115 nt, Homo sapiens
gccaggcggaggccaacaaaaccaccaaggcaccgagagacggcaagcacagaacaggcccacagaagccggcaaaccccgacggcagaagacgggaccaccaaaaaagaagaag

SEQ ID NO: 216630 - RNA, 77 nt, Homo sapiens
cagggagacccagccggcaggcaggccgggcgcgggaccggagccgcgcaaggaggagagcggcgacacacggggag

SEQ ID NO: 216631 - RNA, 57 nt, Homo sapiens
agcaaggacaggcacgccacacacaggagcgggccccaagaaccaaaaaagaaaagc

SEQ ID NO: 216632 - RNA, 83 nt, Homo sapiens
gaaacagaggcaagggaaaaccgagaaacggcacagaggcaaggcaacacacagcggagaggggcaagacgccaagagaaaag

SEQ ID NO: 216633 - RNA, 84 nt, Homo sapiens
cagaacaggcgcaccaacgacccccagggccaacgccaccacggaagccggagaagcgccccccacccgggaggcaggacggcg

SEQ ID NO: 216634 - RNA, 70 nt, Homo sapiens
gaacacaggagaagggacccagccaagccagcacaaacccaccacagacgccaccgacacgagaaagagc

SEQ ID NO: 216635 - RNA, 81 nt, Homo sapiens
ggggccaggagagcgcgccggcgagaagcggccgagccagcagcaggcgagcagacaccgcaggaaagggcaaaggacgcg

SEQ ID NO: 216636 - RNA, 89 nt, Homo sapiens
cgagcaacaccgagagaggaggagccagacgacaagcacacacaggcgcgaaacggaaaaagccagaaggcagaagagaccaagggaag

SEQ ID NO: 216637 - RNA, 81 nt, Homo sapiens
ggaggagcgcagcgaagcacccacggaacgccgcagaaagaagaaggggcaagaacagccacagcagagacaaaaaaccag

SEQ ID NO: 216638 - RNA, 80 nt, Homo sapiens
caaccagcgggcccggccgccacccgggaaagacaggccgacagcggaacagcagccggaagcgagggccgggcagaaga

SEQ ID NO: 216639 - RNA, 73 nt, Homo sapiens
ggagacccgggaggggcggagggcaagagcgccgaccgggcggcgaggaaggcgccccggaacaacgcaaacg

SEQ ID NO: 216640 - RNA, 38 nt, Homo sapiens
agcacaagaagaagacgagggaccaagaaaggcccagg

SEQ ID NO: 216641 - RNA, 97 nt, Homo sapiens
gcaggacgaggaagaagaacagccgagagagcaacaagccagcccgggaccgaggaaaaagaagagcacaagaccagcagacgaccacagcaacccc

SEQ ID NO: 216642 - RNA, 75 nt, Homo sapiens
gcccacagcgagccaggagaagccccaccaacaaagagccaacggcaaaggacaaggacaggaagcacagaaccg

SEQ ID NO: 216643 - RNA, 72 nt, Homo sapiens
cggaaggcgggaccaagacgcgcgggagcccggcgccggagcccaagcccacgaccccccagggcaccacaa

SEQ ID NO: 216644 - RNA, 72 nt, Homo sapiens
acaagccccgacagagcggcgcgcggaggcgcacaaaggccagaaaaagagacgagcaaacccagaacggag

SEQ ID NO: 216645 - RNA, 100 nt, Homo sapiens
caaaggagccgaaacccgaccccagggaggagaagcacggccacacagagcggaccacaccagaaaaagggagaggacaagaaagaggggggagagcccc

SEQ ID NO: 216646 - RNA, 66 nt, Homo sapiens
aaaaaaccccaggacgacgaagcggaaacacaggaacccagaggaggaccgggggaaagcaaaaaa

SEQ ID NO: 216647 - RNA, 80 nt, Homo sapiens
ggaggagagaagaggaggggagaaggcgggccgcgccgcgaagggcggaagacagccagaggagggggagagcggagcaa

SEQ ID NO: 216648 - RNA, 62 nt, Homo sapiens
gacgggagaggggccgaaccggaagggcggaggccccggcggcagggcccaaagcacaagcg

SEQ ID NO: 216649 - RNA, 82 nt, Homo sapiens
cacaggagagcagcaggagggcaggcgaggggcagagccggagagcagccccggcccccgagcagggcggaaacaccagaca

SEQ ID NO: 216650 - RNA, 71 nt, Homo sapiens
aacagaaggagcggcggacacacagacccccaccaagcaggaggggagccaacagcccagccagcccaagc

SEQ ID NO: 216651 - RNA, 82 nt, Homo sapiens
gccgcaccagcaggagccagcccaccacgccaggggagacaagaagcccccggagcggaccaggccccgccccagcccgggg

SEQ ID NO: 216652 - RNA, 86 nt, Homo sapiens
ggcccagcgagcgacggcaaaagcaggagccaggccaaggggagcaagcggggagacagagccggagcccgagcgcgccagcagac

SEQ ID NO: 216653 - RNA, 53 nt, Homo sapiens
gcccccacgcaacaaaacaaaccgaaggaacccaaagggcgccggaacccagg

SEQ ID NO: 216654 - RNA, 80 nt, Homo sapiens
cggccgggagccgccgcgggcaggacgcgcgcgcagaggaagaagccaagccaagagacagcgcccccacagcgaaacac

SEQ ID NO: 216655 - RNA, 98 nt, Homo sapiens
gcgggcagcgccagaccgcgacaggcccgaaaaaaacccaggcggcccaggacaccgccagaagcaccaggacagccacaagggcccaccaggcgcga

SEQ ID NO: 216656 - RNA, 81 nt, Homo sapiens
caaaacagcggcacagccaggcacggcccccacggaccgcgggcacagagagacccagcgacgagcaaaaggccaaggaag

SEQ ID NO: 216657 - RNA, 77 nt, Homo sapiens
gaaccggagagcacccaacaccagcggaagagaccgggggaaacagggcgagaagaagaaaaagggcagagaaagcg

SEQ ID NO: 216658 - RNA, 80 nt, Homo sapiens
cggcggccaggccagacccgaaggccaggagacccgaccccaagaccgccagagcggaacgaccccagagcgagcccgca

SEQ ID NO: 216659 - RNA, 53 nt, Homo sapiens
ccaggcggccacccgccccagcacacgcgcaaagcacccagacggaggccggc

SEQ ID NO: 216660 - RNA, 76 nt, Homo sapiens
gggaaacacacgcgcaaaggagaaccccacaccagaacccagggaaaaaacgcgggacgggaacagaagaacaaac

SEQ ID NO: 216661 - RNA, 36 nt, Homo sapiens
ccacaccgcgcacaggaacacgccagaagaaaagaa

SEQ ID NO: 216662 - RNA, 61 nt, Homo sapiens
cgcagaggaccaggggagcggacgcagaaagcggacgccggaagcggagaagaagggcagg

SEQ ID NO: 216663 - RNA, 73 nt, Homo sapiens
cagggagcaagccagaccggcccggaccgcccccagacaacaggcacaaagagagaaggaacacccacagggc

SEQ ID NO: 216664 - RNA, 71 nt, Homo sapiens
caagggaccaaggcagcagaaacagcggggcccgccacacgcgaggagacaaagggaagacaaaaaaagca

SEQ ID NO: 216665 - RNA, 60 nt, Homo sapiens
agggacccacacaaccaccagcggagcgagggcaggccacaggaacgcagaacacacacc

SEQ ID NO: 216666 - RNA, 100 nt, Homo sapiens
cccgacagcgcgcaggaaacaggccaaggcccgaacagaaccgcccggccccaccgcagcggcggacgagcaggacaggccgcaaagggacgagcccacc

SEQ ID NO: 216667 - RNA, 69 nt, Homo sapiens
cgagagccgacacccccgggcccagcgcgccgggggacaaggagaccgaacgcaggaagagacagagca

SEQ ID NO: 216668 - RNA, 63 nt, Homo sapiens
accccagaaccccacacagacagaacgggaaaggaaaccaaaccaggaaagaaggacaaggag

SEQ ID NO: 216669 - RNA, 50 nt, Homo sapiens
cgcagggcgcccccgcgaagaaggaaacagaacaaggacgaaccgaaccc

SEQ ID NO: 216670 - RNA, 74 nt, Homo sapiens
gagggcaagagaagaacagaagaaacaaaaggccaccgaagaggggagaagcagaccgcaccaggcgggacccc

SEQ ID NO: 216671 - RNA, 74 nt, Homo sapiens
cccgcggaagggagcccaagcgcagagggagacgggcgaacacagggaagaaggacggagccagccgcaggggc

SEQ ID NO: 216672 - RNA, 75 nt, Homo sapiens
agcgagccaaccaaagaccccgagcgacacagaaccaccccaacaggaaaggccgagggggacggcaagagcaca

SEQ ID NO: 216673 - RNA, 80 nt, Homo sapiens
caggaacagcgggacccagcgacaccgaacagcgagcacacggcagacacaagaggcaaagcagggaacaaggagacaga

SEQ ID NO: 216674 - RNA, 92 nt, Homo sapiens
gccacgccaagcaaaccgggaaaggagaggacccggagccgcaagcgcccgacccagccagacggcaccagcgcccggagaaccagcccacc

SEQ ID NO: 216675 - RNA, 71 nt, Homo sapiens
aaccccgaccggcaccgcggcaagcaccacaaaggaacgccacacgcgaaaaacggcgcgaacggcggagg

SEQ ID NO: 216676 - RNA, 83 nt, Homo sapiens
ccgcgccgggcgggacgggggggcggcccggccccgcagacaaccagaagggagaccagcgggccgccgcgggagacacaagg

SEQ ID NO: 216677 - RNA, 76 nt, Homo sapiens
ggaaccaagcggcacgcaggcaacacgagccccagcaacccagaaagacaaggccccagcagcaggcaaagggaag

SEQ ID NO: 216678 - RNA, 60 nt, Homo sapiens
gcccaaggaccccaacaacagcccaccccgggcacgaccaagaccaacggacagcaggcg

SEQ ID NO: 216679 - RNA, 69 nt, Homo sapiens
accggagaaagacacggacgcaggaaagcccgagcagaaaaaaaggccaccgaaggcgccacccaaaaa

SEQ ID NO: 216680 - RNA, 83 nt, Homo sapiens
ggccagcaccgagagcccggacggaggcgagcacacagagaggggaagggcagcagcagcagagaaccaaacccaaagcgaac

SEQ ID NO: 216681 - RNA, 88 nt, Homo sapiens
ggaagcgcagacccgcgcccgcgcgaggccgcgcccccccgcccgagggggggcccaccaggagagcaagcgcccagggagcgacccg

SEQ ID NO: 216682 - RNA, 73 nt, Homo sapiens
agcgagaacaccggagacccgcaggcccccggacgcagaaaacgaaggaaggaggacccgaggagagagaaga

SEQ ID NO: 216683 - RNA, 53 nt, Homo sapiens
aaacacgcagcaaaaaggcaacagagcccagaggggggaaacaggccgagcag

SEQ ID NO: 216684 - RNA, 66 nt, Homo sapiens
ggaggggagaggaggcaggcccgcggcacacagagaaaaaaagggaacaaaacacagcaagcagac

SEQ ID NO: 216685 - RNA, 77 nt, Homo sapiens
acaccaaggccagcagacaggccgaggaggcacccaaaaggaccgaaaagacgcggccccaaaggaaacacccgaag

SEQ ID NO: 216686 - RNA, 77 nt, Homo sapiens
agaccaccgggagagagggaaaaaacaaccccgccgaacccaggagggacaaccagcacagcacaaacagacccgag

SEQ ID NO: 216687 - RNA, 80 nt, Homo sapiens
ggagaccaacaagccgaccgggaacgcgccgcacccgcccccagaagagacaggacaccggacagccaggaggcccggcc

SEQ ID NO: 216688 - RNA, 77 nt, Homo sapiens
gcgacacagcaagacggagacagcagaagggaaaagcacagggccaggaagcagagggacagccaggccagaaacag

SEQ ID NO: 216689 - RNA, 71 nt, Homo sapiens
agaagagaagaaacccagcgaaggcgacagagagagagaaaaccagaagagagaaaaaagcaacaacagcg

SEQ ID NO: 216690 - RNA, 51 nt, Homo sapiens
gcagggcgcccccggggcaagaagaaacgcacagaaccaggaacaacaaga

SEQ ID NO: 216691 - RNA, 66 nt, Homo sapiens
agccggacacaacggcgagaagaaaagccacccccgcacaacaccgggaccaaaaaggcacaccaa

SEQ ID NO: 216692 - RNA, 72 nt, Homo sapiens
ccagacagccgacacccagcggcggagaaaccaccacaaacacgaggccagcaacgaccaacaagacagacc

SEQ ID NO: 216693 - RNA, 80 nt, Homo sapiens
aacagacaacccaaagggagggaccaccaggagcagcggaacaaggaaaggacggccccggacacaccgcaagcgaccgg

SEQ ID NO: 216694 - RNA, 73 nt, Homo sapiens
aggcggcccgccggcagagcgagagagcagagcgacacgaaaagacagaccgacaacagcccagaagaagcca

SEQ ID NO: 216695 - RNA, 66 nt, Homo sapiens
ggccacgcgggaccaccggcaccaccaaagaggcacccaggaggggaaggggccacaggcagcagg

SEQ ID NO: 216696 - RNA, 77 nt, Homo sapiens
cgggagacggagcgaaggccggagggcacggagcgagcagaggaggaggaaacccggaacacgcagaagaagcaaga

SEQ ID NO: 216697 - RNA, 81 nt, Homo sapiens
cggggcggcccaacgaggcacacaaggcccgcggccaacagaaagccccgagccccggccccaaagacccaaaacagagac

SEQ ID NO: 216698 - RNA, 76 nt, Homo sapiens
acgcacaaaaaggcgcagaaaagaacaagcggagaaggggaagggacagcccagacacaaacaaagccaacccaaa

SEQ ID NO: 216699 - RNA, 75 nt, Homo sapiens
caccccacaggaagcccgggagccacacacgacgggaagcggggagaagagggcaagaacaaagagaaggaaagc

SEQ ID NO: 216700 - RNA, 69 nt, Homo sapiens
cccggcgcagccgcgaggaccggcgggagagagagcgcccagaaagccagcaacggggcggcacacaag

SEQ ID NO: 216701 - RNA, 80 nt, Homo sapiens
aaccaggcaccggggggcaacacccgagaacggcgggaagagaagacacgagcacaaacgcagacaacagggagacccca

SEQ ID NO: 216702 - RNA, 75 nt, Homo sapiens
ggcggaggacggaaccaggggagagcgacccaaacaaaggaccagacagaagggaccgcggaaggaggcaggcga

SEQ ID NO: 216703 - RNA, 71 nt, Homo sapiens
ggggaggcgcacacacaccaaaggacacggagaaggcaagagaccaaggggagagcgcgggggagaccccc

SEQ ID NO: 216704 - RNA, 81 nt, Homo sapiens
agcagcgaacccaaaaccaaagaaagaaccggaggcgaagcaggccaaagaagaagccaggcgaaagaacagaccgccgca

SEQ ID NO: 216705 - RNA, 84 nt, Homo sapiens
ggaaacagcaagcgaagccgaaaaagcgcccgagacgggcccgccgaaagacagggaagaagaccgcaacacagcaacccagac

SEQ ID NO: 216706 - RNA, 81 nt, Homo sapiens
aaaaaggagcgcccgagcgaccaaagaccgggaaaagccaagaagcgagagaagaaaaacagaaaaagccaagacagaaac

SEQ ID NO: 216707 - RNA, 73 nt, Homo sapiens
ggggaacccggacaccaggcgcccgcacagaaggaccgaggcggaaggacaggccgggcaaaacccaggaccc

SEQ ID NO: 216708 - RNA, 89 nt, Homo sapiens
cacggaggagcagacagacgccgagaagcagaggccccgaggagggggaagacagagaagaccacacaaccgaaggggccgggcaggac

SEQ ID NO: 216709 - RNA, 77 nt, Homo sapiens
cagacagaacgcccgccgggccccagaaagacccgccgaaaaagcgagacaggggcagagacgcaaacacaggcaca

SEQ ID NO: 216710 - RNA, 77 nt, Homo sapiens
ccagcgaggggaccgcccaggagggcagaaggagagcaggggccaggagggccgaagcccacagcgaggcagagaag

SEQ ID NO: 216711 - RNA, 82 nt, Homo sapiens
gaaaggcccacgcagcccccaagcagcccccaaaacacaagaggacggagaagcgacgaaagaagccgggacaaggaccaga

SEQ ID NO: 216712 - RNA, 83 nt, Homo sapiens
cagcccagccgcgccagcgcccggcgccgcgcgccacccccgaagcaaagaccaggggacgaaggccgcagacgaaggggaaa

SEQ ID NO: 216713 - RNA, 81 nt, Homo sapiens
cgccccagcagccccagccaagcccaaccaaggcgagacgcggaaaagcaggccccgggcacgcggcggacagcgagagga

SEQ ID NO: 216714 - RNA, 75 nt, Homo sapiens
agaaagggaagcaccgccgcggggccccgggagacgggcgggagagagcaccaacccgagaacagcgagccaaga

SEQ ID NO: 216715 - RNA, 59 nt, Homo sapiens
aaacccagaacgcccaggacacggacaccgccgggagaaagccagcagcagagagacca

SEQ ID NO: 216716 - RNA, 85 nt, Homo sapiens
aggccgcgagaacagcaagcagggaagaggagcgcaagcgccggggaggaaagaaggaccaggaagggggggaagcaaaaggacg

SEQ ID NO: 216717 - RNA, 71 nt, Homo sapiens
agccacagccccagagggacgagcgaaaccagacccacaggaccgcgaacaaggaggccacaaaacacccg

SEQ ID NO: 216718 - RNA, 76 nt, Homo sapiens
accacagcacacgaaacggaggcaccaacccccacacgcccggggaaccagaaaccgggagaagccggccaggcag

SEQ ID NO: 216719 - RNA, 56 nt, Homo sapiens
ccgcccacgcggagaggggggcagaagccggccaggggcaaaggagaggaagagga

SEQ ID NO: 216720 - RNA, 100 nt, Homo sapiens
ggggccaggagagcgcgccggcgagaagcggccgagccagcagcagggacggcccaacacaagagaaagagaaggcccagaacagaagaaagaagaacca

SEQ ID NO: 216721 - RNA, 90 nt, Homo sapiens
caaaaaacaggaaaaacagaagaggcagggcaaaacgaggccagcagaagccagaaagaagagaagaaaagcacagcaagccgaaagagg

SEQ ID NO: 216722 - RNA, 74 nt, Homo sapiens
gagaagcaagacgaagaacagagaaggccacaggaggggaagcaaggaagaaccaccgaggacaaaagggcaaa

SEQ ID NO: 216723 - RNA, 81 nt, Homo sapiens
ggggggcggacgcgcgcggggcagcacaaggacaagagcgagggggcgccagcgcgggggaggagaaaaccgccaggaccg

SEQ ID NO: 216724 - RNA, 82 nt, Homo sapiens
gaaagcaaccgggcgcaggccacaggggcgagcaccaaagccaaggaagcccagaagaaagagcaccccccggaagcagcag

SEQ ID NO: 216725 - RNA, 54 nt, Homo sapiens
ggaagacacgggaccagcgaacggggccggcagagcagaacacaccagaaccaa

SEQ ID NO: 216726 - RNA, 87 nt, Homo sapiens
accgcccgggacggccacagacccacagaggcaccccagacacagagagccggagaggaggaaggagaagcccgggagcgcgcgggc

SEQ ID NO: 216727 - RNA, 81 nt, Homo sapiens
agcccggccacccaaagagaaaggccccgagccccggccccaaagacccaaaacagagacaccccccagcccccgcgcccc

SEQ ID NO: 216728 - RNA, 69 nt, Homo sapiens
gcagaaggccggagacaccagcagaccagccagggaggaccggggacagagaaagacaaaccgggagcg

SEQ ID NO: 216729 - RNA, 40 nt, Homo sapiens
ggccagacaacaggcaggggcacaagaaggccaaccccaa

SEQ ID NO: 216730 - RNA, 80 nt, Homo sapiens
aaacgcacagcagccgagaagacgggccaaagaaggacgggagcagcaccagccgcagaccggagcgcagaagaacccaa

SEQ ID NO: 216731 - RNA, 53 nt, Homo sapiens
aaggagcagaagacaaaacaggcagaaaacaaaggaaaggcaagggcagaaaa

SEQ ID NO: 216732 - RNA, 78 nt, Homo sapiens
cagagcgacagaggcaggagaaagacagcaaagaaaaggagaagaaaggaaaaaaacaaccccgggcaccccgccagc

SEQ ID NO: 216733 - RNA, 72 nt, Homo sapiens
caggcacccggcgcaaagaaagggcgcaagggagagagagggagcggccggaacacccagaacccagcacgc

SEQ ID NO: 216734 - RNA, 59 nt, Homo sapiens
ccggagagggggaagggcccaaagccagaagccagaaaccacgaagaggcccgaaagcg

SEQ ID NO: 216735 - RNA, 73 nt, Homo sapiens
ggccccagcggaccgaacagacggcacagccccaggggcgggccacgcgcggggcggcgccagggcacacacg

SEQ ID NO: 216736 - RNA, 68 nt, Homo sapiens
gggaacgggccgaggcaggcggcaagacacgaagggcccacccagacaggagcccagcagggggaggc

SEQ ID NO: 216737 - RNA, 72 nt, Homo sapiens
ccacgcaccgcacaacaagaggccggcggggcgacaggagccagcacgagacaacaagaccccacaccccac

SEQ ID NO: 216738 - RNA, 75 nt, Homo sapiens
ggcaagaaaggggaaccccggagaaaaggccaagaaggcagaaggggacgaacggagaccgaaacacagaaaagc

SEQ ID NO: 216739 - RNA, 71 nt, Homo sapiens
gggaaaaacagcagaagacgaagaaagaagcaagcaaagacccccgggggaaacgaggcagcggacaacac

SEQ ID NO: 216740 - RNA, 76 nt, Homo sapiens
gccacccagaaagagaagacaaccacggagccgagaaccagagaaaaggacgacggaaccaccacgaaaaaaagca

SEQ ID NO: 216741 - RNA, 69 nt, Homo sapiens
gcagacagggcaaagaaaagggacgggaccaacggggaaccccgggggcaagggaccccaagagaaaac

SEQ ID NO: 216742 - RNA, 76 nt, Homo sapiens
aagagaggaaagcaacagggacgagaaacgcgccggagggggcaggagggaggaaagcacccgagagcagaagcgg

SEQ ID NO: 216743 - RNA, 70 nt, Homo sapiens
acgaggacaccccgacacggcccgccagcgccaccaggaggcgggagcagaccacaggcccagaggaccg

SEQ ID NO: 216744 - RNA, 73 nt, Homo sapiens
gggcggcgggggcggcggggcaagcggcgccaccaccagcaccaggagggaggaagaggcgcggcaagggcgc

SEQ ID NO: 216745 - RNA, 71 nt, Homo sapiens
acaccaggacacagaaggcgaaacagaaggcggaggcagaacgaaagaggaggggcggggagaggagacgg

SEQ ID NO: 216746 - RNA, 69 nt, Homo sapiens
agggccagagcaaagagagaacgcccggaggagaaaagcaaaaaaagccggcccacagaacgagcccag

SEQ ID NO: 216747 - RNA, 88 nt, Homo sapiens
ccccccggcgggagccccgcgacgcgcccggcccggagcccccagcgcagcggccgcgacgggcccagcacaggcagcgcaggcaaac

SEQ ID NO: 216748 - RNA, 81 nt, Homo sapiens
gaaggaccaaacggagaaccagaagggagaggaagaaagaccaaacgagagacaaaagagaacaacagaacgcaaggagag

SEQ ID NO: 216749 - RNA, 86 nt, Homo sapiens
cgcaagcccggccggcccggcccgccgcgcccggaggagccgcccaaaacacggagcagggggccgagcaaaccgcccagccccgg

SEQ ID NO: 216750 - RNA, 50 nt, Homo sapiens
cgggagggaaccagcaacaagccggcccacggcccaagacagccgcagca

SEQ ID NO: 216751 - RNA, 80 nt, Homo sapiens
gcccaagccaccagagcggcccccagcaccacagcccgcagccccgccagccacccccagacaggagcgcgaaaggggaa

SEQ ID NO: 216752 - RNA, 84 nt, Homo sapiens
cgccaccaccacgccagccgcaccagccgcccaagccgcacagccgcggcggcagcagcaggagaggacccacccaggaggcag

SEQ ID NO: 216753 - RNA, 71 nt, Homo sapiens
agacagaggcgagcaggcggaacagaaacagcacaaagcaaaagaaaagacaagggaacggggagcacgag

SEQ ID NO: 216754 - RNA, 60 nt, Homo sapiens
gaagaccgaacaagccgagagggaaacaacccacgggagccgccaccaaaagcagacgga

SEQ ID NO: 216755 - RNA, 60 nt, Homo sapiens
aaccaaaagggagaacagcaacgaggcacaggcaccagccagacccccaaaccacgaccg

SEQ ID NO: 216756 - RNA, 79 nt, Homo sapiens
gaaagcaccagacgccaccacgggcacccgcgccgggcaccgaggaccagccaagacagacaacggcaagcggagaaga

SEQ ID NO: 216757 - RNA, 55 nt, Homo sapiens
cgagcaaaggaagcgcgaacagcagcgcagggaaagcaggcaggagggagagcgc

SEQ ID NO: 216758 - RNA, 74 nt, Homo sapiens
ccagcacacggcaagcaaacagaagaagccagcagccacaccaggcggaaccagacagccggcagaaccaccag

SEQ ID NO: 216759 - RNA, 34 nt, Homo sapiens
acgcccgccccagcggagagagacccggaaaaga

SEQ ID NO: 216760 - RNA, 55 nt, Homo sapiens
ggcgcgccgcagagcggcaccgaaggacaggagcaacggggcggcacacaaggag

SEQ ID NO: 216761 - RNA, 79 nt, Homo sapiens
ggggccacccccacacgcccccagccaaacagacgccgcggcccgacaggagccagacggagaaaagaaaggaaagaaa

SEQ ID NO: 216762 - RNA, 75 nt, Homo sapiens
agaacaggccccgcagcgaaaacccaacgagaccaaagaggcaaggagaaggaagccaacaccggagccagaaag

SEQ ID NO: 216763 - RNA, 90 nt, Homo sapiens
caaacgcgccgacggcgaagaaaggggagcgaggaaaggggcggccgaggccagcccacagaggccccaggacaaggggaccacgaccac

SEQ ID NO: 216764 - RNA, 86 nt, Homo sapiens
gcaccggcagcccgggccgagccccgcccgccgccagccagagacaccaggcgccgagaaggccagcagagaaacaggcaggagag

SEQ ID NO: 216765 - RNA, 77 nt, Homo sapiens
ccccacagaggggcgacgccacaaacaacccccaccacgccaagagaaggagagagaaaggacaagaaagaggacaa

SEQ ID NO: 216766 - RNA, 42 nt, Homo sapiens
gcggcaccggggaacagcacgaccgaaggacacagcccgcag

SEQ ID NO: 216767 - RNA, 61 nt, Homo sapiens
aagacgacgcaccgcaggcagacaaaagggccaaagaagggagagagaccagacaggaaag

SEQ ID NO: 216768 - RNA, 38 nt, Homo sapiens
cgccagcccagcgaccagcaggacacgagcgagggcga

SEQ ID NO: 216769 - RNA, 71 nt, Homo sapiens
gacaacacgacgaagaaggcaccaagacggaagagaaaacacaacggccaagcgaaaagcagacgaaagaa

SEQ ID NO: 216770 - RNA, 100 nt, Homo sapiens
cgccccgcgagcacagagcccgccgccgaccgccgcccgccacacccgccgccaggacagacaagcagacggggccgccacacgcccaaccagggcaccg

SEQ ID NO: 216771 - RNA, 80 nt, Homo sapiens
agaacacccaggagacggaagaagcccaaggccaaccggacgccagacgaccagcaccaccggaaccaggccagacgccg

SEQ ID NO: 216772 - RNA, 75 nt, Homo sapiens
ccgaacgaggaaaaacagccaagacggcaaagccccccagaagaccaggaaagggagaagagaggaagagaacaa

SEQ ID NO: 216773 - RNA, 79 nt, Homo sapiens
gcggcgagccggagcgcggagcccggccccgcaccaggaggaggacgacagcacggccaagagggcacgccgcgggacc

SEQ ID NO: 216774 - RNA, 73 nt, Homo sapiens
gaagcccagaaggcaacgggccacgccgcaggacacagccgacagggccagcaacaccgggcaccgaacgggg

SEQ ID NO: 216775 - RNA, 61 nt, Homo sapiens
caggccgcgccgagcccgccgcgcgggcccgcccgacgcggaagggggcgagaaagcgcgc

SEQ ID NO: 216776 - RNA, 81 nt, Homo sapiens
gcgccaccacgcacgcacacgccggcgcgcgaccgcgcaaaacgccaaaccagaaaggggacagcggcgggcagggagcac

SEQ ID NO: 216777 - RNA, 62 nt, Homo sapiens
gcggagcagacccccagccggcgagacagagaccccaccccgcggccaccaccgcgcccaac

SEQ ID NO: 216778 - RNA, 81 nt, Homo sapiens
gcgcccgccgcgcggagcgcccccgcgccccgcaccagagcggggcaccgagccggacgacaggacgccgccaccccagga

SEQ ID NO: 216779 - RNA, 52 nt, Homo sapiens
gaacgagcggaggccaacaaaccccacgacggcaggcgcacggaacagcgag

SEQ ID NO: 216780 - RNA, 77 nt, Homo sapiens
gcgagagagcgaggagacgaaggagccggaacaggggaggccacaagcgaggccggaggccggccacacgccccagc

SEQ ID NO: 216781 - RNA, 73 nt, Homo sapiens
gagcgcagagcgggcgagcgcgaaagaagagaaagcaaccacaaacacagaaaggacagaaagcacagagaaa

SEQ ID NO: 216782 - RNA, 40 nt, Homo sapiens
acaggaaggacacgaccaggccccaagaggagaggggacc

SEQ ID NO: 216783 - RNA, 73 nt, Homo sapiens
ggggcagcgccaggaacgagggagcaggagaccggaaacgagagaaacgaagacgaagaaacagccgcacaca

SEQ ID NO: 216784 - RNA, 71 nt, Homo sapiens
acgcacgccacaccccagaacgaagggccgccccacccggcaaccccgaccagcccgcaggacggcgcggg

SEQ ID NO: 216785 - RNA, 97 nt, Homo sapiens
gacgccaccgccgcagcggcgcagcccacgccagacgaccccacccgcgccgcgacccgggaccccacacgggcagcggcccgaccagccggcccgc

SEQ ID NO: 216786 - RNA, 99 nt, Homo sapiens
gcaggaggacgggaggaccaagagagggggaggagcgggcaggccggcgcggaagaggccggcggcgggacggccccacgggacccgccccgaccacag

SEQ ID NO: 216787 - RNA, 79 nt, Homo sapiens
ccgcgccgcaggagacgagaggacgggaccaggcgaagcggccgagcaggcgagcgaacgacgccccgaggcgcgccag

SEQ ID NO: 216788 - RNA, 55 nt, Homo sapiens
ggggcaggaaacgagcggcagcaacccaacccagagagcacagcccggccagcgg

SEQ ID NO: 216789 - RNA, 59 nt, Homo sapiens
gcccacgcaaacccaaagaccccgccggagacgagagaacccaggagaaacgagaggga

SEQ ID NO: 216790 - RNA, 86 nt, Homo sapiens
ccaacccagggcagcgccacggagaacaggcgccgcgggcggacacgccagaggaggaggccggggaaggccgcgggggcagcaag

SEQ ID NO: 216791 - RNA, 82 nt, Homo sapiens
agagagagaccacaaaccccacagaaagcaccgccccggagccacagcaaagccacccaaggcaggcacagcaccagaccag

SEQ ID NO: 216792 - RNA, 54 nt, Homo sapiens
cgagcgaggagccaggacccggaaagagcacagggaaacccagacgacaaggaa

SEQ ID NO: 216793 - RNA, 80 nt, Homo sapiens
cggcgaagggaccagcgcagccaacaggcgcggcaccagcggggcccggcgcacccaccaccgccgcccacggcagccca

SEQ ID NO: 216794 - RNA, 70 nt, Homo sapiens
cgcgaagcagaggagagacccgaccagaaaccccagggacgggccagcggggaacagggggaggcgcccg

SEQ ID NO: 216795 - RNA, 76 nt, Homo sapiens
cgccaaccaaaccgaaagccagaaggaggggcacagggccagagcagagggaggaagcggaggggaggcaggacgg

SEQ ID NO: 216796 - RNA, 124 nt, Homo sapiens
gagcgaggaggcaccacagcggcagcgacaagcaggcagcgggcgccagcaaaaccgaaacaggggaagccagccccaggccacggaagcccgagcagccgacccgcccaggccagagccagac

SEQ ID NO: 216797 - RNA, 70 nt, Homo sapiens
gggcgacggaccaagcaccagaggccgccaaccgagcacaaaacggcaaaaccggaagccaacggaaagc

SEQ ID NO: 216798 - RNA, 76 nt, Homo sapiens
caagggggaccagacggggaggcggcccaaaggcgaaacacagaaggagacaaccacagggccccaggaccggaga

SEQ ID NO: 216799 - RNA, 70 nt, Homo sapiens
cacaagaaaacgcaaaccaccaacaacaaaggaaacccaacggagaaaaaacccgccggagaagagaacc

SEQ ID NO: 216800 - RNA, 34 nt, Homo sapiens
acaagaaccaagccacagggccgaaaaggaagca

SEQ ID NO: 216801 - RNA, 80 nt, Homo sapiens
agacggacaagagcgcggaacaggacgccccgaccaccaggagagaacgccgcgccgcgcgacaacggcccggcaggcaa

SEQ ID NO: 216802 - RNA, 79 nt, Homo sapiens
acggcccccgaggacggaggcacagcgcagcgacgagagggcaacgcagggcaaacggcccgagccggacacacggaag

SEQ ID NO: 216803 - RNA, 69 nt, Homo sapiens
cacaacaaaagcacgcgacacaaagcggacacaaaaggcacaaaaagggcaagaaagagaagaagacag

SEQ ID NO: 216804 - RNA, 84 nt, Homo sapiens
acaggcccccagaccccaccaggcgcgcaaaaagcaccagggaccaagaaaggcccagggaccaaagcccggacaaggcccgag

SEQ ID NO: 216805 - RNA, 69 nt, Homo sapiens
cgacggaccagaggcccacgaaacaccagcagcgcgcacccagggcacaggagacagagaggaggagcc

SEQ ID NO: 216806 - RNA, 73 nt, Homo sapiens
aacagcaagcgaagccgaaaaagcgcccgagacgggcccgccgaaagacaggaagggaaggggcggagacggg

SEQ ID NO: 216807 - RNA, 74 nt, Homo sapiens
agcccgccaagaggcggaaggccaaggcaccggcccccacgggcggcgcagggggagaaaagggaaccaggaag

SEQ ID NO: 216808 - RNA, 72 nt, Homo sapiens
gagaaaaggaaccggccccgggccaagggaggaaaaacgcgccaggaaaccaggaggccaaccgagaaaaag

SEQ ID NO: 216809 - RNA, 82 nt, Homo sapiens
cagccgggcggaccggaagagcgggcaaccggaagagacgccccagaccccgcacagacaggagcaaggaaagaaaaacaag

SEQ ID NO: 216810 - RNA, 80 nt, Homo sapiens
cccacgagagaacggcacacgcgagcgagcagcccgacggccaggaggcgaagagacgaggaagcccaggagcccgaaca

SEQ ID NO: 216811 - RNA, 72 nt, Homo sapiens
cacgaagaagaaaccggcggccaaaaaaaaaaaaggaagcacaccaagggcacaggggagaagcccaggaaa

SEQ ID NO: 216812 - RNA, 84 nt, Homo sapiens
ggcggcggccagcgccacgcggaaggcgaggagcggaaggcgagcggagcggcggaggaggaaaagaggagcggaggcacagcg

SEQ ID NO: 216813 - RNA, 50 nt, Homo sapiens
ccacaagacaccgccggaaccgacaaggacaccgagaaggccagaagaca

SEQ ID NO: 216814 - RNA, 59 nt, Homo sapiens
cccccaccccccccaccagccaacgccgggaaaaacgagagaagacagaggagccagac

SEQ ID NO: 216815 - RNA, 72 nt, Homo sapiens
gaccaagaaccagggggggccacgcgaacccagcacgacaggcgagcgagggagggacgaggcagcagcgag

SEQ ID NO: 216816 - RNA, 89 nt, Homo sapiens
gccaccagagcggcccccagcaccacagcccgcagccccgccagccacccccaggacccggcgggggcaaggaagcacggaggcccggg

SEQ ID NO: 216817 - RNA, 82 nt, Homo sapiens
cgccaccaagccgcagggagaacacccaacgggagacgagccaacggaggcagccggcggaaacgaagaaaaaacagaacaa

SEQ ID NO: 216818 - RNA, 82 nt, Homo sapiens
agccacaaagacaccaaagcaaaagcgggggagaaggagacaacacgaccccaggaagaagaaccaggcaggaaagagggga

SEQ ID NO: 216819 - RNA, 37 nt, Homo sapiens
ggacggaggacgagaggcgcaggaacgggacggaagg

SEQ ID NO: 216820 - RNA, 63 nt, Homo sapiens
agaaggaccgaagaaggaagggccgcaagagaaggacaagggggcggcgggagcagaagcgca

SEQ ID NO: 216821 - RNA, 77 nt, Homo sapiens
gcgggcggcaacgagggaccggcccggaggcgacccagaccacacagacacgggaagacagaagaggacccgcgagc

SEQ ID NO: 216822 - RNA, 84 nt, Homo sapiens
gggagggggaagaggcgggggcggcccggggccggagaagggcagacaacaggcacaaagagagaaggaacacccacagggcag

SEQ ID NO: 216823 - RNA, 80 nt, Homo sapiens
caggagcagccgcagagaccgaagaccaaaaagcgccccgggccaacggccacccaagcaacaaaggaacaagcagaaga

SEQ ID NO: 216824 - RNA, 84 nt, Homo sapiens
cgcccacgccccggaaagcgccccccgccgagcgcccgggagccccgccgcgccgagcacgagaacgaagaccagcgccgggac

SEQ ID NO: 216825 - RNA, 85 nt, Homo sapiens
cgcccagagcccggaccaagcaccccaccaccaaaccacggagagaacgacaaggacccagaggcgacagccgacacacaggcgg

SEQ ID NO: 216826 - RNA, 71 nt, Homo sapiens
aagagggacgggcccgcggcgagcgagcccgagcaacggggcggcacacaaggagcgaagggcagggagaa

SEQ ID NO: 216827 - RNA, 59 nt, Homo sapiens
agaagaagaggaaacccgaaccacaccacacccaaagacgggaacaaaggagaaagggc

SEQ ID NO: 216828 - RNA, 78 nt, Homo sapiens
cagaagccagaccggcgcgagaacaacgaccagaaaaagaagagaaaccacggggaggaagagaagaccaggccaacc

SEQ ID NO: 216829 - RNA, 81 nt, Homo sapiens
agccgcccgggggcccgcgcccagcgagcgcggagcgcacgggacgacgccagggaccccagaacgaaagaaggaaaacac

SEQ ID NO: 216830 - RNA, 41 nt, Homo sapiens
gccgacaaccccagaaacaggagccaggagcaggggcgcgg

SEQ ID NO: 216831 - RNA, 81 nt, Homo sapiens
gagagggaacgacccacgcccaccagccgaagaaaacggcggacggcacacgggcgcagccaaagaggacagagcggggcg

SEQ ID NO: 216832 - RNA, 81 nt, Homo sapiens
gaaaagaagaacagagcaaacagacggaagaggagaggcagagcgaaccagaacaagggaccccccaggacacagcgggac

SEQ ID NO: 216833 - RNA, 74 nt, Homo sapiens
ccgaccgagcccaggagcgccacgcgcggaaggcagcgcccagcagcgcagggacgcggcgcggcagccagccc

SEQ ID NO: 216834 - RNA, 76 nt, Homo sapiens
ccggccgcagcggcaacagaacgaaaaacagggcagagcgcaagcagaacaaggggagagcccgacgcagaacagc

SEQ ID NO: 216835 - RNA, 64 nt, Homo sapiens
caaagagcagccccaaaccacccccggcaagaaagaagacacacagaagagacggccggcaaca

SEQ ID NO: 216836 - RNA, 74 nt, Homo sapiens
aaagagaccaggacccccgagacgcggggagccccgagccgacgaccccagcccgggggcggcgaggaggagcg

SEQ ID NO: 216837 - RNA, 77 nt, Homo sapiens
gggaaagggaaggagaaggagggacgcaggcgcaggccagacacacgcgcgaaggagaaggacggaaaagaacccag

SEQ ID NO: 216838 - RNA, 76 nt, Homo sapiens
ccccggagagagagccgcgcacgcacagacaagggacccgcgaaggggaggcagggagagacggccaagagccccc

SEQ ID NO: 216839 - RNA, 82 nt, Homo sapiens
cgggggggaggcggcagcgcaaccacgagacggccccaagccaggagaaggagagggaagggcaaggagaccaagaaccccg

SEQ ID NO: 216840 - RNA, 81 nt, Homo sapiens
ggcaggagggccggcggagcgccaggccgcaccgaagagagaaaccgaagaaggcccacacacacaggaaggcagaaagca

SEQ ID NO: 216841 - RNA, 55 nt, Homo sapiens
acacaacggcagaccgcagaacacccagccagggcgaggagggaccacgccccag

SEQ ID NO: 216842 - RNA, 85 nt, Homo sapiens
gaaggaccgcagcacggagcgcagaaccggccgcgcccgcccgacacagcggcacagcccagaagaaagaggagagacgcgaaga

SEQ ID NO: 216843 - RNA, 54 nt, Homo sapiens
cccggagaaaaggccaagaaggcagaaaacgaaggaaggaggacccgaggagag

SEQ ID NO: 216844 - RNA, 75 nt, Homo sapiens
ggcacccacgccgcaccggccacccggcccgacaccagccgcgaaaccaaagacaagccagaccggacagaagcg

SEQ ID NO: 216845 - RNA, 83 nt, Homo sapiens
cggggacccccgacgccaggcagcgcccccaaacggacacagccacaagaaccgaaaaaagaaggcccggcaggccaaaaggg

SEQ ID NO: 216846 - RNA, 87 nt, Homo sapiens
gggaacccgcggcggcgggcacgcccaggaggcgccggggaacgcagggcgccgaggccagagaccgaaggagcagacgaggcacga

SEQ ID NO: 216847 - RNA, 79 nt, Homo sapiens
agggcacgcgggcaagggcaaccgcggggaagcggggcggcaccggacaccaagacggaggacaggcgccccgcgggaa

SEQ ID NO: 216848 - RNA, 72 nt, Homo sapiens
ccccgcgccgccgaccccccggcgccgcgccggcggcgggccagaagcccccaggaggagaacgagcaacgg

SEQ ID NO: 216849 - RNA, 80 nt, Homo sapiens
acaggaacagcagaagcaagcagcaacagcaggagggccccggcccaaagggagaacggaaaacagccgggggaacgcaa

SEQ ID NO: 216850 - RNA, 71 nt, Homo sapiens
gaaaagaaaaccccggaggggaaaagaaacaaacaacaagaagaaggacaaggaacgaaggcaaggaggcg

SEQ ID NO: 216851 - RNA, 69 nt, Homo sapiens
aaagggccaaagaagggagagaggggcaacggagacccagagccaaggacgacccggaagggcgaagga

SEQ ID NO: 216852 - RNA, 73 nt, Homo sapiens
agccccagcagcggagggggaggacgcaggacgcacaggagagcaacaaggcagaggaccaacacacagggag

SEQ ID NO: 216853 - RNA, 79 nt, Homo sapiens
gcgcaccacgaaagcagggcacagcggcccagcaggagggcggggccgcggcagccacccccacagcacgccacacggg

SEQ ID NO: 216854 - RNA, 61 nt, Homo sapiens
aaagaaaagggacgggaccaacggggaaccccggcaaaagcgcacagccagaagaaaccgg

SEQ ID NO: 216855 - RNA, 72 nt, Homo sapiens
ccccagagagccacccacaagacgccacaggccggcaacgccagaaggacgagaagggcggcgcgaaaggac

SEQ ID NO: 216856 - RNA, 39 nt, Homo sapiens
agcccccaggagaaccacaagaaaagaggcacagagaga

SEQ ID NO: 216857 - RNA, 80 nt, Homo sapiens
acggacaggacccgcccagcccaacggggagcggaccaggacccccagcacgaaggaagccgagaaccgccagggccgag

SEQ ID NO: 216858 - RNA, 70 nt, Homo sapiens
cggccgcccggccaccgcgcccgacgagccgcaggcggacggaggggggaggagcaggcccccaccgcga

SEQ ID NO: 216859 - RNA, 84 nt, Homo sapiens
cggcggcgacagccaggcccggaagcgagggcggccgcgccggcccagaaacagaggaagagccggaacaagagaagaaagagc

SEQ ID NO: 216860 - RNA, 97 nt, Homo sapiens
cccccccaacccccgggccaccggggggagcaccagcggagacgaggacgcgcacaggaaaggacgcggaacaagcaggcagccaggcagcagaagg

SEQ ID NO: 216861 - RNA, 48 nt, Homo sapiens
ccgacgccaggcagcgcccccaaacgagggcggcgaaggcgcgccacg

SEQ ID NO: 216862 - RNA, 71 nt, Homo sapiens
ggacagacaaacagaacgagagccacagggccaagcagcgccccagaacccaggcaagcaagcacagaaca

SEQ ID NO: 216863 - RNA, 74 nt, Homo sapiens
agggcaggaagaccaggaacgcaaggcggggaaaaaaaggcagcacacagacgcagcaacgggcacgcaaccaa

SEQ ID NO: 216864 - RNA, 71 nt, Homo sapiens
ccagccgccaggccacccaggccccccggcaggaggaacgcaggaccaaagagaaggagcccccccggagc

SEQ ID NO: 216865 - RNA, 54 nt, Homo sapiens
gggggggcgacccaccgcacggcccaggggccgcaaggccaggcgcgcagaggc

SEQ ID NO: 216866 - RNA, 62 nt, Homo sapiens
cccagcggccccggaaaagacagagaccaccccccacccgaaggggccaccagcgggcacgg

SEQ ID NO: 216867 - RNA, 71 nt, Homo sapiens
cagccgaggaacggccaaacacgaagcaagcagaggagcggccgcaacgaggcccgacgcgcaagggacag

SEQ ID NO: 216868 - RNA, 80 nt, Homo sapiens
aaccagcaagacaacgagggcggacacccccagcagcagcccgggcaccaacaagcagaaccccgaaaagagcccaacag

SEQ ID NO: 216869 - RNA, 84 nt, Homo sapiens
ccgcccagaccaccggccaagagaggagggggagcaggaggagagggaagaggaaacgccgagaagaaggggagcgagggagaa

SEQ ID NO: 216870 - RNA, 72 nt, Homo sapiens
cacaccaggaacagaaaaaggcacaacaccacggggaaaaggaaggccggaggaggcaacagcggacagcag

SEQ ID NO: 216871 - RNA, 62 nt, Homo sapiens
accaggcgaagcggccgagcaggcgagcgaacgacgggcaaggaaaggaggaaaacaagcga

SEQ ID NO: 216872 - RNA, 82 nt, Homo sapiens
acggagacagagggagggggggcccaaagccgaaagaggaggcccaccgccacggaaccagcaggaagaagagagggcgaag

SEQ ID NO: 216873 - RNA, 90 nt, Homo sapiens
caaagcaggccgcgaggacccacaagaaccgagaggaccaacaccgcagacgaagaaggacagggcgaaccccgcgccccgcagcggaga

SEQ ID NO: 216874 - RNA, 65 nt, Homo sapiens
cgcagcaccccccggacccagccccggaaccggaaaaccaagcaacgagacacacggaaaacgca

SEQ ID NO: 216875 - RNA, 77 nt, Homo sapiens
aggcacacaaggccggcccccagcaggaaagagaggaacccagaaacggcaccaccggagaccccgggcagaaagac

SEQ ID NO: 216876 - RNA, 88 nt, Homo sapiens
gacggccggcggcggcgcccgccccggcgagcgggccccgcccgcgcccaggccagccagaccaaggacagccaaggaagccaagacc

SEQ ID NO: 216877 - RNA, 79 nt, Homo sapiens
cccagccccacccaccgccaggagcccccccagggacgacacaagaccaccaccaccgcggacggccggcgcggaagcg

SEQ ID NO: 216878 - RNA, 117 nt, Homo sapiens
cgccccccggaaggcgagaaccccaccccaccaaggaagaaccagccacagagacacagagagagaagcccgcggaaaggacaggagcgcaggacggcaagagacggaagcagcagc

SEQ ID NO: 216879 - RNA, 85 nt, Homo sapiens
aggcccagcagcaaaaagccgcacagagccccagaccacgggggaacagcggagacagcaccgcagaggaagcaagcccaccaga

SEQ ID NO: 216880 - RNA, 82 nt, Homo sapiens
aggaaccgacagaaccacaggagaaccccgcccaggaggcaaaaaggaagacggcagcaggagagcagagaaaagacgggag

SEQ ID NO: 216881 - RNA, 42 nt, Homo sapiens
agagggccaggggcccacagcaagacagagaagccaggcccc

SEQ ID NO: 216882 - RNA, 90 nt, Homo sapiens
gcaacgaaagggacgacaagccaacaacaggacggaagccccaacaggagaacacccagcagaggcgcaggaaaagcaccgaaagaacac

SEQ ID NO: 216883 - RNA, 74 nt, Homo sapiens
cccgaggacagacagggcgccagcacaccccagcacgacccgagagcacaggcgaagcggccgacagaagcaga

SEQ ID NO: 216884 - RNA, 70 nt, Homo sapiens
agaagaaccagcagcggaccggcaaaaaagcaaagaaagaagcaccgaagaacacagagccagagaaaaa

SEQ ID NO: 216885 - RNA, 96 nt, Homo sapiens
caaagccaaggaaaccccaacacagagccaagcgccaagagaaagacagcaaagaaaaggagaagaaaggaaaaaaacaaccccgggcaccccgcc

SEQ ID NO: 216886 - RNA, 75 nt, Homo sapiens
acagacacagccagccaaacacaccaacaaaaagaccgggacagagaggcgaagaagggagaggcaccagcgccc

SEQ ID NO: 216887 - RNA, 88 nt, Homo sapiens
ccgaggggccaaccagcgaagagcgacaagccgcggcagccgcggaccaccgccgccagggggcaggcagggcccagcaggacgcgga

SEQ ID NO: 216888 - RNA, 73 nt, Homo sapiens
gaggagccaaagggcgggaaaaagcaccgacccccccgaacaaaggagcccaggagaaacgccaaggccgcag

SEQ ID NO: 216889 - RNA, 77 nt, Homo sapiens
gaaaaagcgacccagcggagggcaggaaaaaggagaaggacgaaggaagggcaagacgaacaaaagaaccggcaaag

SEQ ID NO: 216890 - RNA, 70 nt, Homo sapiens
caggaaggagcaaacggaaagagcacagcccggggggaaaggacagcagaccacagcccggcaggcccaa

SEQ ID NO: 216891 - RNA, 72 nt, Homo sapiens
cacgagggcaagaaccagcggagacagaacacaggaagacgggacacggacaaagcggcgcacgcacggaga

SEQ ID NO: 216892 - RNA, 73 nt, Homo sapiens
caaggaaggaccaaacggagaaccagccgaccagaaacggccggcggcccggcagaccaggaccgcaggaaaa

SEQ ID NO: 216893 - RNA, 80 nt, Homo sapiens
agcggaccgagagcgcgaaacgcacgagaagcggacagaaggcacgggggcccgcacgagaaagacacggcagcgcaggc

SEQ ID NO: 216894 - RNA, 71 nt, Homo sapiens
cgcgggaaaccccgagaaacaggcccgccgccccggggcacgccaggcaaccaagacaacaagccaaagcc

SEQ ID NO: 216895 - RNA, 66 nt, Homo sapiens
caagagagggccagcggagagagagcacagaccagccaagaccaaagaaaaaagagaaggaaagcg

SEQ ID NO: 216896 - RNA, 62 nt, Homo sapiens
ggagccgagccagcaggccggaaaggggagcaagaagaaagagcagggaggagggagcgaca

SEQ ID NO: 216897 - RNA, 72 nt, Homo sapiens
ccccagcaagcgggacgcgggaggaaacccacacaacgagcacaccggagccagaagcgaaacgcgaagaaa

SEQ ID NO: 216898 - RNA, 68 nt, Homo sapiens
gcaagaaagccccaaagaacccgaaaggaccacaaccagacgcggaggcgaaagaaaaggcacgaaca

SEQ ID NO: 216899 - RNA, 73 nt, Homo sapiens
aaggaaaacaaggagaccagggaccggacaggaaaggaacacagacagaggaaggccagcaaaagaaaaaacg

SEQ ID NO: 216900 - RNA, 58 nt, Homo sapiens
acaacaccgagcaagaacacccgcaccaacgagaaggaccgcagagcagcggacccac

SEQ ID NO: 216901 - RNA, 76 nt, Homo sapiens
cacgcccagcagccggggaagagacccaaacgccaacagaaacgcaccaccaagaaacgcaggccaacaaaacgag

SEQ ID NO: 216902 - RNA, 83 nt, Homo sapiens
gagccgccccccagcagggccagccgagagcggcccaggaggaacaaccagcccacccggagagggcacgcgcggggagacgg

SEQ ID NO: 216903 - RNA, 79 nt, Homo sapiens
gcgcgggccgggacccagccaggcagaccccgggcagcaggaacaccagcaggaaaaaagagcggcagaaggccaaacg

SEQ ID NO: 216904 - RNA, 76 nt, Homo sapiens
aaaccacgaagaagaaaccggcggccaaaaaaaaaaaaggaagcacaccaagacagaaccaaggagagacacacgg

SEQ ID NO: 216905 - RNA, 59 nt, Homo sapiens
gaggaaggagggaccggcccccagcaagccccaggagaccggaaaccgagagaaacgaa

SEQ ID NO: 216906 - RNA, 71 nt, Homo sapiens
gccccagcacccccagcgggcagggggagagcaaggaccgcgacgacagcgaagacaagccgcaccggaga

SEQ ID NO: 216907 - RNA, 63 nt, Homo sapiens
ggcccgccgcagagaggagaaagcagcgcgagaagcacaggcacggagggccaacagcgaccg

SEQ ID NO: 216908 - RNA, 37 nt, Homo sapiens
aggggcagacccaaaaaacggcaaaagcagaccggaa

SEQ ID NO: 216909 - RNA, 51 nt, Homo sapiens
ggggcggacgcgcgcggggcaggccaggagagacagcccaaagagcccaca

SEQ ID NO: 216910 - RNA, 83 nt, Homo sapiens
gaggcagagcagggggcggcacggggccggcggccacggccggaaggcagcaagccagaaggccagaaagccacacaggaccg

SEQ ID NO: 216911 - RNA, 80 nt, Homo sapiens
gggccgcgaggggaagaggaagcaaagccaagaacccgagcaaccccgagaagagaagaaccccaaggccggaacagccc

SEQ ID NO: 216912 - RNA, 75 nt, Homo sapiens
gacgccgccggcaggcccgcgcaccagggcgccgcaccggcggaaacaaggcgaacaagccacgcggccccaccc

SEQ ID NO: 216913 - RNA, 52 nt, Homo sapiens
ccgccggacagcgcagagccaagacggagaaacaaaggagcgcggcacccag

SEQ ID NO: 216914 - RNA, 72 nt, Homo sapiens
caaaccaaggcccaggaaaagagcacagaggaagaaaggcgccaacggggagaaggaggcacaagaaggacc

SEQ ID NO: 216915 - RNA, 73 nt, Homo sapiens
cgagagccgcccgggccagcggccgcgcacccccggccggaggcaccagcagggacccgaaaacagcccgcgg

SEQ ID NO: 216916 - RNA, 71 nt, Homo sapiens
gggggagcgggcggcagcggaccgggagaaccaggccgaagggggccgggggggcagagaagaagagaggg

SEQ ID NO: 216917 - RNA, 41 nt, Homo sapiens
ggaccccaccaggaccccaggaccccggaggaaaagcggaa

SEQ ID NO: 216918 - RNA, 79 nt, Homo sapiens
cggcgggaccgggcggcacgcacgcgggcagggaacaggcggagcggaagcccgcccgggagaaaggcacccggaagag

SEQ ID NO: 216919 - RNA, 79 nt, Homo sapiens
gccgggcccggaccgcccccgagcccggaggggggagaaaaggagggaacaaaaagaccccacggccgggcgacagaag

SEQ ID NO: 216920 - RNA, 69 nt, Homo sapiens
aaagcgcgggaggcacacgggagagggcaaggcccgaaccagaaacaggcacagcggaagagagggcga

SEQ ID NO: 216921 - RNA, 90 nt, Homo sapiens
cgcagaggaaaacaggcaacgcccgcggacacccaggaacagcggaggaggacagaagcacccaacaggacgccaagccaccgcgaacac

SEQ ID NO: 216922 - RNA, 82 nt, Homo sapiens
cagaggacgccgaggagggggacccacgcccggcaggagagaggaggaagaagggggaaagggaaaagaggaagagagaaac

SEQ ID NO: 216923 - RNA, 74 nt, Homo sapiens
gccaggcgggccacaccgcaacccagcacgaaaggaacccaaagcacaaaggcggaggcgggcccaacgccagc

SEQ ID NO: 216924 - RNA, 84 nt, Homo sapiens
ccggacccggaacagcaagaacgcaccgaaccaggcagcaaacggagaggcgccggaagaagccgacaaaggcaagcagcaaaa

SEQ ID NO: 216925 - RNA, 65 nt, Homo sapiens
ccgaagacgggccccaacacccagagacgaaaggagaaggaagaccaaagaaaaacacaaagcac

SEQ ID NO: 216926 - RNA, 77 nt, Homo sapiens
gacaacacaagaccacagaaacccgacagcggagcagaggcacggcagacagaagacgacacgccgaagcgccaaag

SEQ ID NO: 216927 - RNA, 102 nt, Homo sapiens
ccggaaggcaaccaggggggggcacggaggggagacaacaggaggagcaccccagaccagaccacagacaaccgcccccagcccgaggaggacgagggccgg

SEQ ID NO: 216928 - RNA, 80 nt, Homo sapiens
ccgagcggacccggaccggggccccggcacaaagcagaccgccccacgggcgcgcccgcgacagcaccccggaggacggc

SEQ ID NO: 216929 - RNA, 67 nt, Homo sapiens
cgaaaggcgcggaacggggccccgacccaaaaccagacgcagcacgggaaccccagaacgccggaaa

SEQ ID NO: 216930 - RNA, 84 nt, Homo sapiens
caaaagaggggcgacagaacagaggacacgggcgggcgcccccagaagcccgggaacaaacgaaaacaccacccagcgaggaac

SEQ ID NO: 216931 - RNA, 56 nt, Homo sapiens
acggccagaggaacggcgaagagaaccccccaggcgcagagcccgaccaggaagga

SEQ ID NO: 216932 - RNA, 83 nt, Homo sapiens
ggagggaggagagaagaggcaacaggcggaagcacagcaaaggggggacaggcaagaaagaacacaagaaaaaggacaaaacg

SEQ ID NO: 216933 - RNA, 35 nt, Homo sapiens
caagggaagacgagcaaaaaggagagaaggcgagg

SEQ ID NO: 216934 - RNA, 83 nt, Homo sapiens
gaagaaaggagcgaggagcagaaaccagccacgggccggaggcaaaaaaccagcaacacccaacacaaagcggaagaacacag

SEQ ID NO: 216935 - RNA, 79 nt, Homo sapiens
cgagcagacaagagaggaaacaaaaagaaacaagcaagccgccaaaggagaagcaggcccgaccacgaagaagaggaca

SEQ ID NO: 216936 - RNA, 77 nt, Homo sapiens
agccacagacgaccggcacacagcagagagaaggaaaagggacaccaagcacaggagagacggagcacagaggcaga

SEQ ID NO: 216937 - RNA, 82 nt, Homo sapiens
agaaacaaagaccagaccaaggagggacccaacagggacagagcaagcccccaacaccagcaaccccgggggagacaagccg

SEQ ID NO: 216938 - RNA, 71 nt, Homo sapiens
gcgccccccacagagaaaggcgaacgcaagcagacggaagaagacgaagaaaacccgaagcgcaaaacaaa

SEQ ID NO: 216939 - RNA, 79 nt, Homo sapiens
aaaccgaggggggcacaaccggcccgaaggacccgcaacaggcacgcagcagcacacgagaagccaaggcacagcagga

SEQ ID NO: 216940 - RNA, 51 nt, Homo sapiens
cgcagggcgcccccgggcgcaggaaacaaccgagaggaggacgggcaccca

SEQ ID NO: 216941 - RNA, 83 nt, Homo sapiens
ggaacaggaggaccggagcacggaggcccaaagagggcagcgggcgcccagacccgggagggagacggaggccgcaccacaag

SEQ ID NO: 216942 - RNA, 81 nt, Homo sapiens
ggcgagaggggaagaggcgccgggacagggacccaaaggagacaaccagcagcagcagcagcagcagcagagcagcagcag

SEQ ID NO: 216943 - RNA, 72 nt, Homo sapiens
caaacacccccagacaaaggaggagcaaaaaggacagagcacagagccagcacaggaaggagacgacgaggg

SEQ ID NO: 216944 - RNA, 73 nt, Homo sapiens
accaaacggagcgggcagcaggaagggacggcgcgcggacagcccaaggcggaaaagcgaaggaagccacaag

SEQ ID NO: 216945 - RNA, 74 nt, Homo sapiens
gggaacggaaaaccacagccggggaaagcaagcagaagcggagaaaagaggccagcaccaaggggaggggaagc

SEQ ID NO: 216946 - RNA, 82 nt, Homo sapiens
acgcgggccgcagcgcggagcagaaagcagaacccgcagaaacagaggccacccaggaaggggcagccggaggaggagggcg

SEQ ID NO: 216947 - RNA, 56 nt, Homo sapiens
gaaccggccacggagagcaccaccgggggggagcacagaggcaagagcacgggcgg

SEQ ID NO: 216948 - RNA, 74 nt, Homo sapiens
gccgcggcccggacgaccgcccagaaggagaggaccggaaagacagaaagaagccacccgaccacgacaaggag

SEQ ID NO: 216949 - RNA, 72 nt, Homo sapiens
caaagccaggaacacccaacaccagcagggaaacacaaagaagacaccagaagggccagcaccacgacaaca

SEQ ID NO: 216950 - RNA, 77 nt, Homo sapiens
gcaccgcaggacgaggagcgccgcgggccgggagcgcgggaccgccagccccaggggcggaagaaggaagggacaaa

SEQ ID NO: 216951 - RNA, 70 nt, Homo sapiens
acgaacccaccggcggggaacgaccccaacgcacaaaaggagacaaaggacaggcagaaaccagaacagg

SEQ ID NO: 216952 - RNA, 70 nt, Homo sapiens
agcgccagaggcccccgagccccccgagaagacccagagggggaagagaagaccagcggaaccccacccc

SEQ ID NO: 216953 - RNA, 71 nt, Homo sapiens
aaacaagccccacacacaacccaacaaggaccagaaggaagaggccacagggaaggccgacgagacagaag

SEQ ID NO: 216954 - RNA, 36 nt, Homo sapiens
aagcagaggacgccaggacaaacacaaggcgccgca

SEQ ID NO: 216955 - RNA, 77 nt, Homo sapiens
gcagcacagaggccagcaggggaagaacgggagcggagaacccccgccgagcgccccgggaaaaagaagaaccaggg

SEQ ID NO: 216956 - RNA, 38 nt, Homo sapiens
gagcgaggagaccaaggcggcaagcccgggagaacacc

SEQ ID NO: 216957 - RNA, 73 nt, Homo sapiens
ggagggacacacccaagcacggaccaaagacggcggacaaggcccagaacaagcacaacaagacccaaagccc

SEQ ID NO: 216958 - RNA, 65 nt, Homo sapiens
gccgcccagggccccgaggagccggggagaagcgccccaaggccaaaacagaagaggcaaagccc

SEQ ID NO: 216959 - RNA, 85 nt, Homo sapiens
accacacccaagccgccacacccggagaccaggagagcgaagaccggagaaacagaacgcggccacgcaaggagacaagcagcca

SEQ ID NO: 216960 - RNA, 82 nt, Homo sapiens
ggacgccaagggggcgagagccaggcaggacaggggggagcagcagcagcagcagcagcagcacaaagcccggacagggcca

SEQ ID NO: 216961 - RNA, 85 nt, Homo sapiens
cggagcgcgaaggccgggacccggccccggcccacaggggggggcaaacccgagagaacggaaccccggaaaaggagacagaagc

SEQ ID NO: 216962 - RNA, 78 nt, Homo sapiens
ccacgcccccgcgacagaagagcgaaagcacacgaagaggcagcccagaagaagaaagcaagcaggaggggccaggcc

SEQ ID NO: 216963 - RNA, 73 nt, Homo sapiens
acagagccaagcgccaaacagaggcacaaaaggagaaagcagaagaaacaggagaaagcaaaaaagagaacag

SEQ ID NO: 216964 - RNA, 70 nt, Homo sapiens
acagaacccccagaaagcagcaaggacgaaaaaggacgacccaagaaagaagcaaggcacggaagaaaag

SEQ ID NO: 216965 - RNA, 78 nt, Homo sapiens
gacgcgaagaccggaggcggaagaaaaaaggagcgcaggccaggcgcccagccgagggcggaaaacaccccaaaagcc

SEQ ID NO: 216966 - RNA, 81 nt, Homo sapiens
ggaggagagcgacaggacaaagccacaagacgagaagaggacagacggaggagaaggaggaagaacaacacagggagacgc

SEQ ID NO: 216967 - RNA, 73 nt, Homo sapiens
ggagaagcaaaaggaaggagcccgggccccccgcacaccagaacagaagaggaacgacagcgccaccccccag

SEQ ID NO: 216968 - RNA, 76 nt, Homo sapiens
acgcgcgcgggcacccacggagccccggggcggccgccgacggcccgcacagggagggcacagcaagcccacgagc

SEQ ID NO: 216969 - RNA, 79 nt, Homo sapiens
gcaaggcaagaccgaacagaaggaacgacgcggaccagaagccagagcgaggacgccggcagcacaagagggccaggga

SEQ ID NO: 216970 - RNA, 76 nt, Homo sapiens
ggccgccggcggacagggcggcccaaggcccagcgggcggcgccgcgaaaccaagccaaaaacccaggaaaaaaca

SEQ ID NO: 216971 - RNA, 93 nt, Homo sapiens
cggggacgggaggccggcgagcccgggacccgaaagccgaggaggcgcgggggaccgaaggagaagaaggagaaggggaggagaaggcaagcc

SEQ ID NO: 216972 - RNA, 77 nt, Homo sapiens
ggccgggaaacaaagggaggaacggagccccgccagacgccccaaacaaacacccaaaggcaggcccggcaccgagg

SEQ ID NO: 216973 - RNA, 74 nt, Homo sapiens
agagcgagaccaggaaagaagggggcagaagaggggaaccaagaaagaccagcaccagcaccccagaacaaaga

SEQ ID NO: 216974 - RNA, 56 nt, Homo sapiens
ggaaccagcagcgcccacaccaccaaacaggccccgagaagcagaggaaagggaca

SEQ ID NO: 216975 - RNA, 79 nt, Homo sapiens
gggcggcggaccgcggggcgccacggccgcacgacgcgcgggcaccgcgcgggacaaacagcaggggccaagaaagaag

SEQ ID NO: 216976 - RNA, 55 nt, Homo sapiens
ggcgccgacggaagccgggagcgcgccccccagaaccgcccacagcccacgggag

SEQ ID NO: 216977 - RNA, 81 nt, Homo sapiens
agcagcagcccccacgcgcacagaggcagccggcgcaggagcagcagcgcagggaaagacaaggagccgggccgagaaacc

SEQ ID NO: 216978 - RNA, 83 nt, Homo sapiens
gcaaagcccaggaacagaggagagacgacaaagaccgaaagagcagaggagagcgaagaagaaacccgggccaccacgaggga

SEQ ID NO: 216979 - RNA, 54 nt, Homo sapiens
gcagaacagacaacaaagaaacaccacccacagccgaccagaaacggccggcgg

SEQ ID NO: 216980 - RNA, 79 nt, Homo sapiens
cggagcacgggagaggggagcacagcacgacccagacagaccaggcccggaggacacgcagaggcccgggcaggcccga

SEQ ID NO: 216981 - RNA, 60 nt, Homo sapiens
gccgggcaccggggagccggccggacacgagccaggcggcgcgcaggagcaccccgccgg

SEQ ID NO: 216982 - RNA, 71 nt, Homo sapiens
gcagcaaagcagcccgaacccagaaacccaggaaccgagcgaagacgggcaggccagagcacccaaacgac

SEQ ID NO: 216983 - RNA, 78 nt, Homo sapiens
gagcggaccaaggagcagaggaaggcccagcccaggggggccgaaagaaacgaggcacgcaaaagccacgacggaaca

SEQ ID NO: 216984 - RNA, 85 nt, Homo sapiens
gaccccgaaggcgcaaacgacaccacccgaccgacgagccaaaccaggcgaccgagcagccaagcaacgggccccgggccccgac

SEQ ID NO: 216985 - RNA, 73 nt, Homo sapiens
gaaacacagcaacagaacagaacaggagcaagaaacaacaacagcagggccagcgaagagccgcgcccacccg

SEQ ID NO: 216986 - RNA, 67 nt, Homo sapiens
gcacggacccccgggacaagcagcagggacagagcccagaaaccagagaaacagaaagagaaaagga

SEQ ID NO: 216987 - RNA, 77 nt, Homo sapiens
cgacagagaaccacagacggaggcggccacgagacaaagccgccacccacgcgcagcgaagcaggcgaacgaggccc

SEQ ID NO: 216988 - RNA, 80 nt, Homo sapiens
ggccaggcaggacccaacgacaggcgccccggcccaacgaggagaaggcagagcccccccaggcagaagcccgagcggga

SEQ ID NO: 216989 - RNA, 88 nt, Homo sapiens
cgcacgcaccacgacggcgccacaccgagcgcgaggcgcggagagcaacgccgggacagcgcaaggccaagacaaggggcgcagagcg

SEQ ID NO: 216990 - RNA, 74 nt, Homo sapiens
gaacagcggcccagggcaggcaagcaaaaaggcccaggcagcgcagagccaacagacgagcagaagccgcaagg

SEQ ID NO: 216991 - RNA, 77 nt, Homo sapiens
aggaccaagaaccaggagcagggacggggggaaaagcgcacccgggcccgggcgagaaagaagacaccaaaggcaaa

SEQ ID NO: 216992 - RNA, 75 nt, Homo sapiens
ccgaggccccccagaagcagaaccgacagccgcagaagcaacaccaagacacggccacggcaagaggcacaacga

SEQ ID NO: 216993 - RNA, 54 nt, Homo sapiens
ccgaagcaaaaccaacgcaaccaccccagagaagaccacagaaacagccaaccc

SEQ ID NO: 216994 - RNA, 61 nt, Homo sapiens
cccaggacacagagacacaaaaacagaacagggacaccagacagggggagacaaagacaac

SEQ ID NO: 216995 - RNA, 77 nt, Homo sapiens
gaacaggcgcagggagcccccaccacagcagcacgcagagagcgcagccagcgcgggagaccaaaaccccagcagcc

SEQ ID NO: 216996 - RNA, 57 nt, Homo sapiens
agaagacagacccacaccagaaggcgaaagaggaaccaggaagacacagagccgcag

SEQ ID NO: 216997 - RNA, 71 nt, Homo sapiens
ccgagcccaggagcgccacgcgcggaaggcagcgcccagcagcgcagggcacaaacgaagaacagacccca

SEQ ID NO: 216998 - RNA, 77 nt, Homo sapiens
ggccgccccgggcaccgcgggcgcggcacggccaacggggccgcccgacgaccaaaacaaacggagagaggagggag

SEQ ID NO: 216999 - RNA, 62 nt, Homo sapiens
ggaacgcgccaggcaaccaagcgaggggggccggggcaccggccagggggcccggggcgagg

SEQ ID NO: 217000 - RNA, 54 nt, Homo sapiens
caggagaaagccgagagaaggacaacaccacaggggggacacagaggggaacgg

SEQ ID NO: 217001 - RNA, 70 nt, Homo sapiens
aaaacgcggaaaaccgacacaacagaacaacgaagagcgacaaacaggcaaggaggaagaaaaagaccca

SEQ ID NO: 217002 - RNA, 82 nt, Homo sapiens
agcccgcgcggacgcaaaccgagccccgcgccgcagggagaagagccaaggagaccaaacccagcagcaccgcagcagcaga

SEQ ID NO: 217003 - RNA, 117 nt, Homo sapiens
ccggaaccaaagcacaaacaccagaaaaaggaaacagacccacaacgaagaagaacagccacgcagacccgaggccaggacccggggaccccgaacgccaaggaaggaaggcgagag

SEQ ID NO: 217004 - RNA, 77 nt, Homo sapiens
gccagcgccccaggccaagagggacccacccggcgggggggcgcaggccccggaagagggacgcagccaaaaccgag

SEQ ID NO: 217005 - RNA, 72 nt, Homo sapiens
gcagcgagcgcaggccggccccaaggaaaaccacccgcagcgaaacacaggaacaagggacaaaccaaagac

SEQ ID NO: 217006 - RNA, 75 nt, Homo sapiens
agaggaaaaaaggcaaaagacacaacagccccaccaagagcaaaaagcggaaccacaagaagaaagcaacgacaa

SEQ ID NO: 217007 - RNA, 74 nt, Homo sapiens
cagggccaccgagcagcggaaaacacagggaacccagcacacaggacggcggaagaaacccgaagaacgagaag

SEQ ID NO: 217008 - RNA, 74 nt, Homo sapiens
gagggaagacgccccgcggacgcagagggcccaacgccccgggaacgaagaacgccgacacaaagaaaacgaac

SEQ ID NO: 217009 - RNA, 68 nt, Homo sapiens
ccaaacggaaggagaccaaggacccaggggagaaaccgcggccacaggaaaaacagaacaaacgcaca

SEQ ID NO: 217010 - RNA, 66 nt, Homo sapiens
gaaagcacgcagcaaaaagcaggggccggaacaacacgggcaccacaggcgaagaggagaggaagg

SEQ ID NO: 217011 - RNA, 80 nt, Homo sapiens
ccggaaacagagagagcagccaaacacccagaggaaaacgaacccaggaaacaggccacaaccaagaacagggcaaacgg

SEQ ID NO: 217012 - RNA, 64 nt, Homo sapiens
ggaacggcccggaaacaggaggacggacccagacaggagcgcgggaagaagccggcccggggcc

SEQ ID NO: 217013 - RNA, 67 nt, Homo sapiens
accaggaggccagggggcgccagaggagaggagacgccggagcgggacgaccagagaccgagagcgg

SEQ ID NO: 217014 - RNA, 78 nt, Homo sapiens
aagaagacggaagaacaggagccagccagaacagagaagggccacgccgcccccagaaccccgacccaaccaacagaa

SEQ ID NO: 217015 - RNA, 82 nt, Homo sapiens
ggcgcccaaggcccgcccgggagggccggggccgcgccagcacgagacgacggagagggacaaacaaccaagggagggaacc

SEQ ID NO: 217016 - RNA, 64 nt, Homo sapiens
cgacgccgccggcaggcccgcgcaccaggccggagagggcaggggacagcagcgcacgcacagc

SEQ ID NO: 217017 - RNA, 65 nt, Homo sapiens
gggcacccagcggcacaaaaaggacgccggcaaccaaacaaggccgacgcgcacgaacacggggg

SEQ ID NO: 217018 - RNA, 78 nt, Homo sapiens
aaagggcgagacacaccgcacccaaccaccaccaaggaagaacgagacgccaaacaagaagaaggaaccacaacagag

SEQ ID NO: 217019 - RNA, 81 nt, Homo sapiens
gaagggcgagacgcaaccgcgcgcaaaaaccaccgggccaggagcacagcgacgcacgaaccaaaggagacgcagagccag

SEQ ID NO: 217020 - RNA, 57 nt, Homo sapiens
aggacacagcaacacccgaaaggccggggggggcacagagccccggaagacagcccc

SEQ ID NO: 217021 - RNA, 70 nt, Homo sapiens
gacgggacccccagccaaaggcaaaggaggcggaaagcaagagaagccccagcacgcagagcagacgcga

SEQ ID NO: 217022 - RNA, 75 nt, Homo sapiens
aaaagcgcaggccgggccgcaacgacgcagcacgcagcacggggaacgagacccgccgccaggaagggacgacac

SEQ ID NO: 217023 - RNA, 81 nt, Homo sapiens
cggggcggcgggccggccgccgcggggcgaaacagagacacgggccaaggcccccggaccggaaggccaaaacaagggaag

SEQ ID NO: 217024 - RNA, 61 nt, Homo sapiens
acgggggcggccgggacggaggacgcgcaggagaaagaagaaacaaagagggacccagcca

SEQ ID NO: 217025 - RNA, 80 nt, Homo sapiens
caaccacccacccccgagacagaagaaaggggcccacccggcccccaacaaggagccaccaggccaggcgcacagaacca

SEQ ID NO: 217026 - RNA, 69 nt, Homo sapiens
aggaagcgggcccacagaaaagcagcccaacgaaaaccgcaaggagaggacagccgcagacaggagccg

SEQ ID NO: 217027 - RNA, 80 nt, Homo sapiens
gcaccgcgcagcaagccagaagacggagaggacaagcaccccaacagagcccggagacacagagaggggggccacccacc

SEQ ID NO: 217028 - RNA, 84 nt, Homo sapiens
agaagcccaaaacaccaggaaggaacagacagaggacaggaggaaaaccagggagaggagcggaagacccggggggcgggcagc

SEQ ID NO: 217029 - RNA, 85 nt, Homo sapiens
agcgcgaacgagcgacggcggaacccggggccgggacgcagcccggcggcagcaggccgagacgcaccagagccggaccggggac

SEQ ID NO: 217030 - RNA, 57 nt, Homo sapiens
ggcaaggcagcgccgaagggcgagcggaggagagaaagaacccacgcaggacgacag

SEQ ID NO: 217031 - RNA, 85 nt, Homo sapiens
cagggcgcaggcacagcccgagaaaccgcagcacacacgcaccaaccagcggacacacggaaaagggacgggaaaagccgagaaa

SEQ ID NO: 217032 - RNA, 57 nt, Homo sapiens
agaacaaaaagcgggcaacaagcggaggaaaagagaggaggagacgagagcaagaca

SEQ ID NO: 217033 - RNA, 82 nt, Homo sapiens
ggcccgggagccccccggccacgccgggcaccccgagccaggccgccgcaaagcagcggagagccagagcaaccaaaagacc

SEQ ID NO: 217034 - RNA, 40 nt, Homo sapiens
ggggggcaaacccgagagaacgggagggaagacaaagagg

SEQ ID NO: 217035 - RNA, 77 nt, Homo sapiens
gggcgccagaaggaagaggcggacggaggagcaggcgagaagagaagcgagaagccagcagagacaggcagagcacc

SEQ ID NO: 217036 - RNA, 59 nt, Homo sapiens
caaccaacccggaaccgcagacccgggcccgagcgagggggaaaagcaaaagcagaggg

SEQ ID NO: 217037 - RNA, 60 nt, Homo sapiens
ccgaaggaagcagcggggccccccccgaaggaagagaacgagaaaacacggccacaggaa

SEQ ID NO: 217038 - RNA, 79 nt, Homo sapiens
aaagacagcacaagcagcaccaggcggcgcaagagacaaagaaagggagaagaggacagaaaaagaccagacgcggaaa

SEQ ID NO: 217039 - RNA, 79 nt, Homo sapiens
gagccaagaaaaagaagggcgccaacagggggcccaggcggcaccggcaaggcagaaccaccccaggcacccccggccg

SEQ ID NO: 217040 - RNA, 74 nt, Homo sapiens
gaggccaggacccgccagggccgggcccaccagcggcgccaccgcgacgaggacaaagccggcgacagacgcaa

SEQ ID NO: 217041 - RNA, 70 nt, Homo sapiens
ggcagggacagcgcaggcagcagaggggagagacggggaggaaaccagaagcccacaacagggcagcaca

SEQ ID NO: 217042 - RNA, 50 nt, Homo sapiens
aggccaggaaagagcggaagaacgggaaagggcacggagaccaccagggc

SEQ ID NO: 217043 - RNA, 73 nt, Homo sapiens
gaccacaaggggaggacaaccgcccgggaccaggacaccagaggacgcccggcagaagggagcgagcagcacg

SEQ ID NO: 217044 - RNA, 59 nt, Homo sapiens
ccagcgcaagaggcgggcagcacgcggcaagccacagccaggaaacaccagccccccgg

SEQ ID NO: 217045 - RNA, 69 nt, Homo sapiens
cgcgccgagagaggcgggacaaggagaaaaaccggaagggaaacccgcgacaccgcgagggacaaagac

SEQ ID NO: 217046 - RNA, 82 nt, Homo sapiens
gggccccgcaaagcgcgagacccgggcgggggcaccgagggcaccacgcgcggccacaacacagcagcccccaggagagcag

SEQ ID NO: 217047 - RNA, 84 nt, Homo sapiens
ggcaggaccggaccgcaacaggaccacggccaccgcgcggaagaggcgagagggagagcggcgcgagaggagagagacggcggg

SEQ ID NO: 217048 - RNA, 76 nt, Homo sapiens
gcaaggcccccgaccacacgcccgcgcgagcggaagccgcagaaggaccggccagaagcaagccggagaacagaaa

SEQ ID NO: 217049 - RNA, 51 nt, Homo sapiens
ggacgcgagacccccaagacggcagacacccagcagcaggaaaagcccagg

SEQ ID NO: 217050 - RNA, 80 nt, Homo sapiens
gcagcgggcgggccccgagagcagcagcgcaaacggggacagcgccgaccggaacagggaccacggaagcccaggaccag

SEQ ID NO: 217051 - RNA, 81 nt, Homo sapiens
gaggcgagcgcccggaggggagagagcggaggacagccgagaggagcacaggaagccggagaaccgaaggaccgcggacca

SEQ ID NO: 217052 - RNA, 74 nt, Homo sapiens
aggaacgggaagagacgcagcgagaacgcaccgcaaaaaagagggaagaaagaggggcaagacaccgggaaaga

SEQ ID NO: 217053 - RNA, 55 nt, Homo sapiens
gcacggagaaacacaccgacagagaaagaaaccaacaggagaaggcccaagaccc

SEQ ID NO: 217054 - RNA, 73 nt, Homo sapiens
cagccacaagaggacaaaggggcagggaaaaaaagggcacagaccaaaacggccgggaaagaaccacaagccc

SEQ ID NO: 217055 - RNA, 74 nt, Homo sapiens
caggacccaagcccaacagagaaacgaaaaggacgaccaggcagcaaaaccaggcccaagagagggacgccagg

SEQ ID NO: 217056 - RNA, 85 nt, Homo sapiens
gaaggcaaagaggacaaccaggagccccgggcaggagagacaacaaagcgcaaccaagccgcacaaacacgcagaggcaagaaga

SEQ ID NO: 217057 - RNA, 83 nt, Homo sapiens
gagcagagcgcaagcccggacccgcaggccacacgggcggggagcgcccacgccaaaggaaaagcccggaaaagcagccaagc

SEQ ID NO: 217058 - RNA, 62 nt, Homo sapiens
caagcgggaggaagaggcgaaacagagagacaccagccacaacaagcacagcaacaaccaac

SEQ ID NO: 217059 - RNA, 58 nt, Homo sapiens
aggcggaggacgggccgccccaagcgggaagcggcagggcaggggaagccggaaggcc

SEQ ID NO: 217060 - RNA, 55 nt, Homo sapiens
cgcagggcgcccccggaccagccacaagaagacagacacgaggaaggaaaagacc

SEQ ID NO: 217061 - RNA, 87 nt, Homo sapiens
ggacgcacgggcgggcggccgggagccaggagcgcggcccggggcccgggggcgcgggccgggggccgagagcggcccaggaggaac

SEQ ID NO: 217062 - RNA, 83 nt, Homo sapiens
caccggccccaacgcacagccagggagccaagcgccgcccggcccgggccaagaccgaacggcgggcggccaggaagaaaggc

SEQ ID NO: 217063 - RNA, 82 nt, Homo sapiens
ccaaaaagacccagcggagcaggaagcgggaaaccacaaaggaaggacaacccgaaacaccaaagaaagggccccaaaagaa

SEQ ID NO: 217064 - RNA, 81 nt, Homo sapiens
cagccagggcaggcgaggggaggaggcaaacaaggaacgaacaacccacagcaccggaggggccaggaaaagcaggggcgc

SEQ ID NO: 217065 - RNA, 36 nt, Homo sapiens
cacacagcagagaggcagcccagcaaaaccggcgga

SEQ ID NO: 217066 - RNA, 38 nt, Homo sapiens
cggcacacagagccagggaaaaggacggaggccaagca

SEQ ID NO: 217067 - RNA, 70 nt, Homo sapiens
aggaggaagcgaggccagacagcaagagcacccgacccacaggccagagaggcagagaaagcaagagacg

SEQ ID NO: 217068 - RNA, 72 nt, Homo sapiens
acgaacccacacggcaggggccgagacaaagggcggggcaacgcgccaaggcgccccaaccaacaccaacaa

SEQ ID NO: 217069 - RNA, 67 nt, Homo sapiens
cccgacgcgcaggcacaacacagcagagaccgagggaacccacccccacccaaggaaaagggaaaca

SEQ ID NO: 217070 - RNA, 80 nt, Homo sapiens
ggcgaggagacgccaaccccagcaaaaagcccgcaacaagaagcagggaacagggcgagacgaacaacgcgcgcaggaga

SEQ ID NO: 217071 - RNA, 62 nt, Homo sapiens
ggcgccggccgagaaggcagaggcgggcaaccccgggaacgaaacaaaagccgccgcgcaga

SEQ ID NO: 217072 - RNA, 75 nt, Homo sapiens
cgagagcaagccaaagaccaaggggggggcacccccacaacgcagagacccccacccgggaagacacggaccccc

SEQ ID NO: 217073 - RNA, 75 nt, Homo sapiens
ggggaccgcggcgcaggacgccgacacgggccgcgccaggacgaaaaggcccaggccggcggaaaacccaccgcc

SEQ ID NO: 217074 - RNA, 73 nt, Homo sapiens
aaaacgcgaacaacccacagaagcccaacagccggaccgggcagcggccccaaggcaaaaggacacccacacc

SEQ ID NO: 217075 - RNA, 81 nt, Homo sapiens
gggcagcgccagaccgcgacaggcccgaaaaaaacccaggcggcccagggccaacgagcgcccccaagcggagccggaggg

SEQ ID NO: 217076 - RNA, 73 nt, Homo sapiens
agcgcaagagcaacaccccaccccaagaggcgcgaacagggcccacccgccacgacacaggggaagaagacca

SEQ ID NO: 217077 - RNA, 48 nt, Homo sapiens
ccgcgacgcggggcagccgagcacagcacgggaacagagacagacccg

SEQ ID NO: 217078 - RNA, 75 nt, Homo sapiens
aaagcaaagacgaacaagaaaggagcaaccaaccacaggaggacaagaacacggaacaacaaggaaagcaccagg

SEQ ID NO: 217079 - RNA, 81 nt, Homo sapiens
aaagaacggagccagaagcgggagagagcacagggagagcgagggagcaggacggaagaggggcagccccgggaaaacagc

SEQ ID NO: 217080 - RNA, 75 nt, Homo sapiens
cgaagagggggacacgacccggagcacccgaccccgacccgagaacacccgagggggacggaagccaggggcacg

SEQ ID NO: 217081 - RNA, 55 nt, Homo sapiens
ccaaccacacccagggaaggcggaccaggaccacgccgcgaggcaaacgcaaggg

SEQ ID NO: 217082 - RNA, 61 nt, Homo sapiens
cacagggaccagggacacaacgcaacagaacgggaaaagaacggcaaacccaaccccagcg

SEQ ID NO: 217083 - RNA, 62 nt, Homo sapiens
aaacacaaaaaggcgaaaagagacgaggcgcacagccaggaggagaagaggaacaaggaaga

SEQ ID NO: 217084 - RNA, 81 nt, Homo sapiens
cgagggaaaggacaagagaagggaaggcgccaccgcggccaccgcaggcacaggccgaacagagcccagaaccgccccaga

SEQ ID NO: 217085 - RNA, 80 nt, Homo sapiens
caggggaggcgaccagagagcggcggaaaggaaagcccgacagaagcaccgagacccaagaaagagcccaaaaggcagag

SEQ ID NO: 217086 - RNA, 79 nt, Homo sapiens
ggccccacgacccccaaagagagaacacagcagagaggggcagcaggagaaggggcacagcgcacagcgagggaacccc

SEQ ID NO: 217087 - RNA, 71 nt, Homo sapiens
gaagacgacgcaccgcaggcagacaaaagggccaaagaagggagagggaaaccgagcacagccaagagcaa

SEQ ID NO: 217088 - RNA, 80 nt, Homo sapiens
gaccaagaacggagcaagcccaggcacagccgacgccgcggggagaagacagaggagccagaccaagagacagcacaggc

SEQ ID NO: 217089 - RNA, 81 nt, Homo sapiens
gagcgagggggggcgcgccggaaaccggagcgcgcagcagcacaggaagccggagaaccgaaggaccgcggaccaggcgga

SEQ ID NO: 217090 - RNA, 68 nt, Homo sapiens
gacagagacacaggccgggaaacaccaaagccaaagggagagcccgacccccaagaaccacagcaagg

SEQ ID NO: 217091 - RNA, 78 nt, Homo sapiens
gcacaaaaagggcaagaaagagaagaagacaggaaaaaaaaaacaccgagggcggagaacggaaaagcaccaggaagc

SEQ ID NO: 217092 - RNA, 70 nt, Homo sapiens
ccaaccagagcggagcgcagaccgaggaaaaggagagagcaacgcacacggcgccacacgaggccacgag

SEQ ID NO: 217093 - RNA, 70 nt, Homo sapiens
agaaacaccgaaccgccacccaggcccaagaaggccaaaacgaaggagacgacaagaccacagccgcccg

SEQ ID NO: 217094 - RNA, 78 nt, Homo sapiens
gaagaggcgggcggagggcacaccagaggggaggaaaccgacaagcccaaacggaagaagaggaagccaaagcacaga

SEQ ID NO: 217095 - RNA, 78 nt, Homo sapiens
cgcccagcccccaagagcggaacagaaaacacggaggccaggcagacagaggaaggaccaagacggaggcagggacac

SEQ ID NO: 217096 - RNA, 69 nt, Homo sapiens
gacccggggacccccgacgccaggcagcgcccccaaacggaggggccacggggccggggagccaccagg

SEQ ID NO: 217097 - RNA, 92 nt, Homo sapiens
gcggcgggcggcaaaggagcagccagagggccgggcccagcaccgacccaaaccaagccgcggcccccccaagacggacgaggcagaaaagc

SEQ ID NO: 217098 - RNA, 68 nt, Homo sapiens
cccacggccgcccagcgccaggacccgagacagaaggccaaagagacagcagccagggcaacagaggg

SEQ ID NO: 217099 - RNA, 58 nt, Homo sapiens
cgggaacgggagacaagcgcagcgagaaaaggcacacacacccgcaggagagcgccgg

SEQ ID NO: 217100 - RNA, 68 nt, Homo sapiens
gaagagaggagggagaacacagaaaccggccccagagcaaagagaaaggaccacagcggaaccgagag

SEQ ID NO: 217101 - RNA, 63 nt, Homo sapiens
agcgccggggggcaaaacccgaaaggaggcggccggagggcgcaggccacaaaagaagcaaaa

SEQ ID NO: 217102 - RNA, 77 nt, Homo sapiens
gagcgggggcgggaccccgccgcggcgggaggggccacgagcacccccggagcaaagcggagagagaaacagggggc

SEQ ID NO: 217103 - RNA, 65 nt, Homo sapiens
gccgccccggcgcccaggccgggaaggacagcgagacgaggcgaccaaaccaccagaaggcccac

SEQ ID NO: 217104 - RNA, 66 nt, Homo sapiens
cacaccagagaagagaaaaccagccggaaaaacaagagccccaggggcgccacagccgaggcagcc

SEQ ID NO: 217105 - RNA, 77 nt, Homo sapiens
cgcccccggccacgacccccgaagagccgcgccgccaggggcacgagcagccgggggaagcagcggcagaaccacag

SEQ ID NO: 217106 - RNA, 72 nt, Homo sapiens
gggcagggcgcggaggaaaccagggcaaggccagagaaggcgggagaaagacacgaaccacagaacgcaaca

SEQ ID NO: 217107 - RNA, 76 nt, Homo sapiens
aaacagaggagagaacacgccaacacccagcaccacgggagacggcggagcccggccacagggcagcagaccaaca

SEQ ID NO: 217108 - RNA, 49 nt, Homo sapiens
ggcgcaaccgcggaaaacagagaggaagaagagagggcgaaggaggcca

SEQ ID NO: 217109 - RNA, 72 nt, Homo sapiens
ccgagggagagagcgagcgagggggggcgcgccggaaaccggagcgcgcagcagagaccagggacagaaggg

SEQ ID NO: 217110 - RNA, 79 nt, Homo sapiens
ccaagagaggcaggcagcgacagccacacaacggacagaccaaacagcaagacggcggggggagaggacgggccagcac

SEQ ID NO: 217111 - RNA, 69 nt, Homo sapiens
acggaaggagggggacaggcccaccgaagacgagggcacgaacaaaggcacccaggccacggggggacc

SEQ ID NO: 217112 - RNA, 39 nt, Homo sapiens
cccaaagacggcacggcaggacacaaacccccaggaaca

SEQ ID NO: 217113 - RNA, 73 nt, Homo sapiens
gaaccaaaaaggaccacgaaggacgaggaggggcagcaagccgccagggccaccaggacggacaaagccgagc

SEQ ID NO: 217114 - RNA, 77 nt, Homo sapiens
aggaaggagcagaaacggacgagcaagagaagcagcaggagaaacgagaagaaacagacgcgcgaggggaaacgagc

SEQ ID NO: 217115 - RNA, 52 nt, Homo sapiens
aaaccaccaagaagaagacgcccaggccccccgagcgcacgcacgcggagcc

SEQ ID NO: 217116 - RNA, 76 nt, Homo sapiens
aaccaaagcaagcaggaaaagcaggcggaaggaaaagcagaaaagagaaaagaagaagaacggccacagaggccgg

SEQ ID NO: 217117 - RNA, 79 nt, Homo sapiens
gaccccgcagcggccgggcgcgcggcccccacccaggaagagaaaggcaggaacacacggacagagcgcaccgcccccg

SEQ ID NO: 217118 - RNA, 92 nt, Homo sapiens
cccagacgcggcacagagagggccgggagcgcgcagccagaggggggcgggccgagcacccgcaggccccgcagaggcgcccacagcggacg

SEQ ID NO: 217119 - RNA, 37 nt, Homo sapiens
aagaaagaagaagcgagggaaaggaacagagacagac

SEQ ID NO: 217120 - RNA, 80 nt, Homo sapiens
caagacccggagggcgagccggcaccagggcccagccaagacccggccacaaggcccgagcggccagacccgcgcccaag

SEQ ID NO: 217121 - RNA, 80 nt, Homo sapiens
acccccgcaccccaacaagaggaaagacacaccaccaagaagccagcaagcggccaggaacagccgggagcggcaccgga

SEQ ID NO: 217122 - RNA, 53 nt, Homo sapiens
gccgaaggacacaacacagccggacggcaaaagagacggggcacggagccagg

SEQ ID NO: 217123 - RNA, 72 nt, Homo sapiens
gaagcaggagcacgcaggaggcacaagggagagcccgaccagagaaaaggcggaagaccgccaaaaaggaca

SEQ ID NO: 217124 - RNA, 72 nt, Homo sapiens
cagaagaggggcccagagggcaggagaggacacggacagacacagcaacaaagcggccaggaagaaaaaaag

SEQ ID NO: 217125 - RNA, 68 nt, Homo sapiens
gagcggggaagggggaaaggcaccaggacaagcaaaggcgaacaagaggcgccagcgggcgcgccgga

SEQ ID NO: 217126 - RNA, 40 nt, Homo sapiens
agcggggcggcgcaccggaaacaggagggcgagggacaga

SEQ ID NO: 217127 - RNA, 67 nt, Homo sapiens
caggggccaacaccaacaaacgaagaagccggggacgagccggaagaagggagacgcgcacggaccg

SEQ ID NO: 217128 - RNA, 79 nt, Homo sapiens
cgggcgaggaggaggcgcgcgcagaccagcaggaaagaccacagcaagaccacgcccccagccgggggaccaggccgaa

SEQ ID NO: 217129 - RNA, 68 nt, Homo sapiens
gggacaagcaggcgcacggcaaacgagcggaacagcgaggaacaccccgaaacggccaaaccgacagc

SEQ ID NO: 217130 - RNA, 79 nt, Homo sapiens
gaacagacacggggaagcgcaaaaacaagacggggcgccccacagaggggcgacgacgacaagaagccaaagacgggag

SEQ ID NO: 217131 - RNA, 77 nt, Homo sapiens
ggacgcggagcccggagcggggcgacgaggcgagcgggggccgggcagcaaaacaaacggagagaggagggagaaac

SEQ ID NO: 217132 - RNA, 67 nt, Homo sapiens
gcagggcaacaagggcaaacaggggaagaagagaagacccaaaagccaacagcccagaaagccggga

SEQ ID NO: 217133 - RNA, 89 nt, Homo sapiens
ggggacgcgggccgcagcgcggagcagaaagcagaacccgcagaacaccagcaggaaaaaagagcggcagaaggccaaacggccgagca

SEQ ID NO: 217134 - RNA, 82 nt, Homo sapiens
accccagcccagcgccgggggaaccgacaaggcaacagcagcggccagggccagagaacaaagcccgaggagaggagggcca

SEQ ID NO: 217135 - RNA, 61 nt, Homo sapiens
gacaccaagcaccaaccagaccaggacaaaaagcacaacggaggcggagggcagggcagac

SEQ ID NO: 217136 - RNA, 70 nt, Homo sapiens
cagaaaaagaaaggccaagaagcccagccacgcagaacagccagcagacgaaaccagaagcagccccaag

SEQ ID NO: 217137 - RNA, 85 nt, Homo sapiens
gcggcggcggcggcagcggcagcgcggcggggccgggcgaagccgacgagcccgaacagacgcaccagcgggaggaagagggacg

SEQ ID NO: 217138 - RNA, 75 nt, Homo sapiens
ggggaaaaaaacacccgggacgcggaaagaggccaaaaagggaccggagaagggcgggaaacaggcggaggcaga

SEQ ID NO: 217139 - RNA, 73 nt, Homo sapiens
agcaggagacagccaaggggagaccacaccaagcgggagacacaccacgccaaggacggagcggaaccgccag

SEQ ID NO: 217140 - RNA, 37 nt, Homo sapiens
ccccgaggggcgaagccaccaaggaccaggaggagaa

SEQ ID NO: 217141 - RNA, 119 nt, Homo sapiens
agcccgggaagagccgcggggcaaaaacacaagaagagagcgagaacaccgcaagaagagacaagggcacaagcacacagcgcacagagaagagaagaggccaggaagaggaagaacag

SEQ ID NO: 217142 - RNA, 73 nt, Homo sapiens
cgagcggcgcgggagaccccggcaggaagacgggaagccaagcaggacaaccacaaaagcagcaaacagaagc

SEQ ID NO: 217143 - RNA, 73 nt, Homo sapiens
gcagggggccacacgcaaggggaacaggcgccagggggggcggcgaagcgagggcggcagcaggcccgacccg

SEQ ID NO: 217144 - RNA, 78 nt, Homo sapiens
accgcacgcgggcgcgagaacggccgcccgccgcagcggagagcaaggcccaagcacaagcagcgcccagcaccagga

SEQ ID NO: 217145 - RNA, 78 nt, Homo sapiens
ggcacagagcgcaaacaaaccgccagagcggaacgaccccagagcgagcccgcagcagcccagaaacaaagacagcca

SEQ ID NO: 217146 - RNA, 58 nt, Homo sapiens
gaagagggacaggaagggaccccaggaaacaggcaaagaccagcaaggcaccaacaga

SEQ ID NO: 217147 - RNA, 87 nt, Homo sapiens
cagagacaggccagagggggccgccgcggcagcaagaacagagagagaggggacagacgagagaacgagaaaaggacccaagggggc

SEQ ID NO: 217148 - RNA, 68 nt, Homo sapiens
gaaggcagcagcaccagcacaacaagggccccaggcaggaagagcgaagggaacagacacggacccac

SEQ ID NO: 217149 - RNA, 83 nt, Homo sapiens
cgagaccaagagaaggcagccgagcaccgagccagcccaggaaaaggagagcaacccacagagagagaggaaacgaagggagc

SEQ ID NO: 217150 - RNA, 79 nt, Homo sapiens
ggcgcggagccggccccaggcagcgggcggcgccagcggagaacagcccgaccacggcgaagccgacgagcccgaacag

SEQ ID NO: 217151 - RNA, 73 nt, Homo sapiens
cccccacaggaaaggagggaagccagaggccaaaggcaggaggagaccggaaaccgagagaaacgaagacgaa

SEQ ID NO: 217152 - RNA, 67 nt, Homo sapiens
gccaggccaaccagagacaccagcaggacaggaaaaaaagaggggagaaaacgcaggccacaaagac

SEQ ID NO: 217153 - RNA, 68 nt, Homo sapiens
ccgaagcagggcacaaaaccaaggccaagcaaggggcaacagcgcagcccggaaagagggaaaggaac

SEQ ID NO: 217154 - RNA, 85 nt, Homo sapiens
gcccccggagaacaagacgcccaccccacaagggcccggccccaccaaaccgggaccaaaagccccaacagcggcaagaccagca

SEQ ID NO: 217155 - RNA, 69 nt, Homo sapiens
cccccaaaggcaggaagagagggccccaggaggagcaacaagaaagaagaaggaccacgaccccgaaga

SEQ ID NO: 217156 - RNA, 79 nt, Homo sapiens
gaccgaagccagcgggggccccagcaccgcaaccaccgccaccagccacggagggcagaggcaccggggccgagaagcc

SEQ ID NO: 217157 - RNA, 54 nt, Homo sapiens
cggccacgccccccgcaacaacccacaaggaccagcaacacggggagggcagca

SEQ ID NO: 217158 - RNA, 73 nt, Homo sapiens
gccacgaaccgcgcgccgcgagagccaagaaagaacaggcgacgcaacgaaagaggggacgagccaaaaccgg

SEQ ID NO: 217159 - RNA, 73 nt, Homo sapiens
acacgggggggggaggagcaagaggggggggcccccccgaagaaaggaaccggggagcggcgaaaaaaaaggg

SEQ ID NO: 217160 - RNA, 75 nt, Homo sapiens
gcagcagccgccgggaaagaggccgcccaggagaggcgcgagccccccagggggcgcagccagccagcaggcaac

SEQ ID NO: 217161 - RNA, 72 nt, Homo sapiens
ccgcccaccaccaagaaaaaggaaaagcgaaggaagagaccgaaaacccgaaagagggaaaacgaagagaac

SEQ ID NO: 217162 - RNA, 76 nt, Homo sapiens
gcggcgggcagagcgagccggagaagagggggcccggggggaggaggggcaggcccggcgagaggagcaccacggc

SEQ ID NO: 217163 - RNA, 72 nt, Homo sapiens
gagcacaccaccaacacggcaacgcaggccagcaaccccagccaagcaagaccaaaccgcacaaacaaagcc

SEQ ID NO: 217164 - RNA, 65 nt, Homo sapiens
gaaggaccaagaaccagcagagccaacaaccaaacacagagacagaaaaaaagcggcagacagga

SEQ ID NO: 217165 - RNA, 79 nt, Homo sapiens
gccaacccccccacgcgcacgccgggggcgaggagacaaaaaagcccaaggagagagagcggagacaaggccacagcag

SEQ ID NO: 217166 - RNA, 82 nt, Homo sapiens
cgggcgcaccgccccccgccgcgaagcacacgccgccccgacgcgagggcagccccgccaggaagccccagcggccagagca

SEQ ID NO: 217167 - RNA, 74 nt, Homo sapiens
gcgggagaaaagaaccgacccacaccaagcagaacccaagccagacacgaaacccaaggggcaaaggaaccagc

SEQ ID NO: 217168 - RNA, 76 nt, Homo sapiens
cgacagaggcgagaaggaggggcgagaacacaggagcagggagccaaccacaccagcacacaagcccccaaacacc

SEQ ID NO: 217169 - RNA, 90 nt, Homo sapiens
accaagcaaaaccggaaaagacgcgcaaggaacgaagcaggcccaggagaaagcacaggacaggagaggaacagggcgcaccacagaaga

SEQ ID NO: 217170 - RNA, 73 nt, Homo sapiens
gccaaagcagcgaagaagaggcccaacccccaccccgcccaaggaggcccagcgagcgccgcccggcgggcgc

SEQ ID NO: 217171 - RNA, 81 nt, Homo sapiens
gaggaagacgagccgggaggaacggcccggaaacaggaggacggcacccccgggaggcccgggcccgaggccccccccccg

SEQ ID NO: 217172 - RNA, 80 nt, Homo sapiens
cagcaaccccgcagacagccccacaggagcagcccaggggaaggagaagagagcggacccacaccagggaagacagggga

SEQ ID NO: 217173 - RNA, 75 nt, Homo sapiens
caacgcgccgcaaaacagaacgcgcccacggcagacacagcaggccaacccagaaccaccgaagaagaaaagaca

SEQ ID NO: 217174 - RNA, 83 nt, Homo sapiens
gcacaggaagaggaaggggcacagaagggaggggaagccacaggcgagcggaaggaggagaaaaaggcggcgccccgcccgag

SEQ ID NO: 217175 - RNA, 80 nt, Homo sapiens
aagccggaggcccgggacgggaacaggccgaaacacaagcaaggaacacaaagaagaaagaaaggaacggaaggaagaaa

SEQ ID NO: 217176 - RNA, 77 nt, Homo sapiens
gaagccaggcaacccccccgcacggcgcagacaacccaaaggccaagacacaaggacacggcacaaacgaggaacgc

SEQ ID NO: 217177 - RNA, 115 nt, Homo sapiens
ccggcgcggccccagcggcggcggcgcgcgccgggcccgggcggcgggagaagcggagggaagcggagcaaaccccgaccaccaagggcaagcacaaccgagcaaaccaaacgga

SEQ ID NO: 217178 - RNA, 78 nt, Homo sapiens
caagccccgccccacgccacagagagcggcgggaggggaaggagcagccacccgggcagaaaggccgggcgaagggcc

SEQ ID NO: 217179 - RNA, 72 nt, Homo sapiens
aagaggagccgaggaaagccagcgaaagccgaagagcgggaccgcaaaccgcccgcagaccagcacgcgaga

SEQ ID NO: 217180 - RNA, 77 nt, Homo sapiens
aagggaacaaccggcaggcacacacaccgaccccaccaggagagagacgacagggagaggagaagagaggacgaggc

SEQ ID NO: 217181 - RNA, 61 nt, Homo sapiens
ggggcggggacggcgccgagaggcaggggaagcgaggagaacgagccggaccagggaccgg

SEQ ID NO: 217182 - RNA, 80 nt, Homo sapiens
cggaccgccacgcgcccgggagacgcccgcgccgccgggccggcggcagagaccacgcccagcaggagcggcgcaggcca

SEQ ID NO: 217183 - RNA, 86 nt, Homo sapiens
gacggccacaaaggcaaggcaagcaggaaaaagcaaaagggcccaaggcccgaccaggaacaaagagagaaagacagccaagccag

SEQ ID NO: 217184 - RNA, 78 nt, Homo sapiens
aaacagaagccagggaagaaagaaacaacaggacccaaaaagggcacaaaaccgccccagccaggaggcagcagccaa

SEQ ID NO: 217185 - RNA, 77 nt, Homo sapiens
cgccaaggagagccaggggaccccacgggcgaccggcaagagaggaaagggccagggaaaacacaccaaacaggcca

SEQ ID NO: 217186 - RNA, 91 nt, Homo sapiens
ggagagagagggacagcgacgggagacgcgcccacagaaacccggacgagaggcagcgagaggcgccccagagcacacagcaggccccagc

SEQ ID NO: 217187 - RNA, 72 nt, Homo sapiens
gggagccagccagcccccagagcggcagcagcagacagagaagccagcggagcaaaacggacacagaacacc

SEQ ID NO: 217188 - RNA, 75 nt, Homo sapiens
cccagaagagaccaacgccaccaaccaaccgggaagagaaagcaagaaaaggaaaaagaaaggaagagcaaaaag

SEQ ID NO: 217189 - RNA, 78 nt, Homo sapiens
acaaggggccacagaacgcagccccccagcgcggcggagagaagaggaagcacagcccacgacgacagcagcaccacc

SEQ ID NO: 217190 - RNA, 63 nt, Homo sapiens
gcgcggagggacgcacccccacagggcagaagcacacagcaagaaggaggccacagcaaacgg

SEQ ID NO: 217191 - RNA, 99 nt, Homo sapiens
acaaaaacgaggacaacacaacacgcagggaaagacagcgggacaacacagaagggaacaagcggacagaaaaagagaacaagccccggccagaaagac

SEQ ID NO: 217192 - RNA, 56 nt, Homo sapiens
cccccgccagccgacacaaccagaaaggggcaacaagaaaagccgcacccgcgggc

SEQ ID NO: 217193 - RNA, 84 nt, Homo sapiens
ggcaggggccgcggcccggagcggccaggccgagggcccgcccggccccaggagaagaaccagccgcagaggaggcgccggggc

SEQ ID NO: 217194 - RNA, 74 nt, Homo sapiens
ccgaaaggaaaccgaggacacagaaaagggcacagcaaagcagcacagacagcaggcaaggagacaaacaggga

SEQ ID NO: 217195 - RNA, 75 nt, Homo sapiens
cacacacaacacaagaacaccacgagacggaacggaaaaacgcgcgagaaacccaggccgcgcacaagaaccggc

SEQ ID NO: 217196 - RNA, 80 nt, Homo sapiens
ccccggaaaacacaaaccgaaaccaaaacccccagcccagaaggacacacaccaaaccgcccccagaagggaacagaaaa

SEQ ID NO: 217197 - RNA, 87 nt, Homo sapiens
aggggcacaccagccccagagacggccgccccgaaggagcaggagcaggaccaccgagaacacccagcgggaggacaagagaaacag

SEQ ID NO: 217198 - RNA, 68 nt, Homo sapiens
caaccggcgggaggaaaccagggcgggaacagggggggggaacaaagaggaaaaagggacaacagcaa

SEQ ID NO: 217199 - RNA, 47 nt, Homo sapiens
aaacagaagaggcagggcaaaacgaggggcaggcagaagggcacgga

SEQ ID NO: 217200 - RNA, 75 nt, Homo sapiens
gaaagcagaagaaaagggacgcaagaaacccaggacgagaacagcaacagccaaacgccccaaacacgcgaaggc

SEQ ID NO: 217201 - RNA, 83 nt, Homo sapiens
cccgccccgacgaggacgaccaacaggcagcagcgggccccgccaccggcacaccgaagggaaggccgaaagaaggaaaacac

SEQ ID NO: 217202 - RNA, 78 nt, Homo sapiens
gaggggaagaaagacaccgaaagaaagaagaagaaaaccaggaaacaagaagggagcaaaccccccagagcccgaccg

SEQ ID NO: 217203 - RNA, 81 nt, Homo sapiens
gggaagccaacgaccacacgcagggcccccggagggccacaagccagagcgccccggccaaggcagaccagcgggcacacc

SEQ ID NO: 217204 - RNA, 74 nt, Homo sapiens
cgaggaccaccggcaccacaccaccaaagcaaagcagacaaaggagagacagcacaaccaggggcgcaacccag

SEQ ID NO: 217205 - RNA, 64 nt, Homo sapiens
agccccagggaagccacagcaccccagcacccagggggcagagcgaaagagacgcaacagaagg

SEQ ID NO: 217206 - RNA, 48 nt, Homo sapiens
ggccccccgaaggaaacacaacagccgaagaaaaggagagaggcagac

SEQ ID NO: 217207 - RNA, 74 nt, Homo sapiens
caggaacaccaaggaagcaaaagccccagaacgacgacgcagcacagagaggaaacgaggaaacgaccaccgga

SEQ ID NO: 217208 - RNA, 74 nt, Homo sapiens
ccaagagagggccaccaggagccaaaaggaccaaagggacacagaagacaaagcaggacgagaccggcggggca

SEQ ID NO: 217209 - RNA, 72 nt, Homo sapiens
agagaaccgaaggcaccaaaagcaagaaacacaacgaaaggaaaaggcaaggcagcaccccgacgacaagac

SEQ ID NO: 217210 - RNA, 77 nt, Homo sapiens
ccagaacggccacagaacacagacgcaaaagagcccggaccaggaacggaccgggagcgggccaaggcagagaagcc

SEQ ID NO: 217211 - RNA, 72 nt, Homo sapiens
gaagaccggaccgggggcaccggaccgagggcggagaagacaagaaccaaaggggccgggaaccgcggcaca

SEQ ID NO: 217212 - RNA, 80 nt, Homo sapiens
gcccggccccggcggcacggcgccgaccagcaccaggggaagcgggacaacgggggaagagcagccccgaggcggaccca

SEQ ID NO: 217213 - RNA, 78 nt, Homo sapiens
aaacgccgagggaaaaaccccggaagggcggacaccccacacgccgccacccccaccggagccgggacaccacagcaa

SEQ ID NO: 217214 - RNA, 70 nt, Homo sapiens
gggagccaggagcgacgcaccgccaggcaggcacaaaggagcgagaacccgagcagcgccagagcaacac

SEQ ID NO: 217215 - RNA, 68 nt, Homo sapiens
gggagacggagcgaaggccggagggccaaaagaacacagccgaccccgaaacaccaagcgaaagaggc

SEQ ID NO: 217216 - RNA, 85 nt, Homo sapiens
agaccaccccaagaccgggcggaacaccccccaggcccacagccgggagaccgagagcccaggcaggaaacaacggcagaccaca

SEQ ID NO: 217217 - RNA, 70 nt, Homo sapiens
agccagcgaccaaaaacagaaacccagaggcaaagaccagcaaggcaccaacagaaaaacaacgccggaa

SEQ ID NO: 217218 - RNA, 78 nt, Homo sapiens
cacagaaaaggcaccgcccggaaacacccgccgggcagcagaggcggaggagaaacaaaaacaagcagcaggcccgca

SEQ ID NO: 217219 - RNA, 56 nt, Homo sapiens
gaacagggaagcagcacgagagcgggacggagaaacacaacggaacaagcagaaaa

SEQ ID NO: 217220 - RNA, 80 nt, Homo sapiens
ccgcgcggaccacaggcacagcagagagaagcgccgccccagacgggccaaaaggaagcccacgacaagagaccaggcaa

SEQ ID NO: 217221 - RNA, 54 nt, Homo sapiens
ccccggggccgcggcaaacaggaaaccggggaaacgcgacggcgccgaggcgcg

SEQ ID NO: 217222 - RNA, 77 nt, Homo sapiens
ggcagggagcgcgggggcccgcgcagcagcgaccacgaccagagacaaggccccgagggaggagcccgaaggcgcac

SEQ ID NO: 217223 - RNA, 72 nt, Homo sapiens
acgcagacgccagcaccaagccgcaagagggcacagggagacagcgcaagagccgaacgacagaagaccccg

SEQ ID NO: 217224 - RNA, 80 nt, Homo sapiens
gcaggagcaggagaagcgcagcccccgggcaggcaggcgccggcccggcccgggggaacccacgagaccccagcgggcag

SEQ ID NO: 217225 - RNA, 73 nt, Homo sapiens
gaacacggggacaccaacaggacccgggaaacacaaagaagacaccagaagggccagcaccacgacaacacgg

SEQ ID NO: 217226 - RNA, 80 nt, Homo sapiens
gcaggaggaaggcaggaccggagaggcgcccaccgccagcagcgcaaagccgaaaaacagcagcagaggaaagaaaagac

SEQ ID NO: 217227 - RNA, 82 nt, Homo sapiens
ggcgggcgcaccccaccagagcaggacaagaagacacggacggcaccagcgccacgcagagccccgccaggaagacacgccg

SEQ ID NO: 217228 - RNA, 74 nt, Homo sapiens
cgagccacagggacccagcaaaggagagcaggagaaaaacggcagcagacaaaggcccacgcacaaaggggaac

SEQ ID NO: 217229 - RNA, 80 nt, Homo sapiens
aaagaagaaaaagaagggaaccaacagcaaaggccgggacaaaggaaagagcccgccagggaggcggcgcccgcaggacc

SEQ ID NO: 217230 - RNA, 82 nt, Homo sapiens
aggccaaagaaagagaagccacccggagaaaggccacggccccagcccaccggaccggaccgcgggcaggggaaggccacca

SEQ ID NO: 217231 - RNA, 86 nt, Homo sapiens
ccagcgccgcccccggagggcccacgcagcgccggacaacgggcgacgcacgaggcacacaggaaggaggggagcagggacgcgcg

SEQ ID NO: 217232 - RNA, 85 nt, Homo sapiens
cgcccaagccgcacagccgcggcggcagcagcaggagagaaaaggagaacaaccccgccacgcccaagcacccggaagcccgcca

SEQ ID NO: 217233 - RNA, 73 nt, Homo sapiens
ggacgcagcccggcggcagcaggcgggcaacacaacaaggcgcggacacccagacaagcgcgccaccggcccc

SEQ ID NO: 217234 - RNA, 54 nt, Homo sapiens
ccagccccccacccaacgcgagcccagaaaccaggcgccaggaacagcgggacc

SEQ ID NO: 217235 - RNA, 80 nt, Homo sapiens
aggacgcggccagcccaccaacgcgggcacggacgcgacgccgcccggcaaaggcgcacaagagcagggaccccaggcgc

SEQ ID NO: 217236 - RNA, 74 nt, Homo sapiens
cggacgaagcacagaacgaaagcacacgaaaggcgcaagccgcagcgggccccgcggaccggaagcccaagacc

SEQ ID NO: 217237 - RNA, 57 nt, Homo sapiens
cgaccacgcagaccagggggaggagcgcacagcacagccaaaaacagaaaccacgcc

SEQ ID NO: 217238 - RNA, 78 nt, Homo sapiens
cggcccccggaaaaccaaccagaagacgaacaaacagcaagaaagaccacaagaccagaagacccgcggaaggcacac

SEQ ID NO: 217239 - RNA, 79 nt, Homo sapiens
agaggcccgcaccaccacaaaccggccaaggcacaaaagggaaggaaacgaaaaggccaaggaacgaacgacaaagcca

SEQ ID NO: 217240 - RNA, 73 nt, Homo sapiens
agacggggggaggcgggcaaggaacaggcgagaaacaggaaaagggccagggacgaagccccgggcccggacc

SEQ ID NO: 217241 - RNA, 71 nt, Homo sapiens
aaagggccagaagacgcgcacagaacaaacagaggaaggaagggaacacggacgacgagacacgaccaaca

SEQ ID NO: 217242 - RNA, 67 nt, Homo sapiens
gagaggacagcagggaggcgggacgcggagcgccaccaaacgggcgggaagcgcgacgaaaggaggc

SEQ ID NO: 217243 - RNA, 62 nt, Homo sapiens
gcggacggggcgaagggaacgcgaggcccgcgcccccgaccgaggggagccgccgcacccag

SEQ ID NO: 217244 - RNA, 69 nt, Homo sapiens
ccaaacagagcagcagcagcagagagaaacagcaggacaaaccggcgaccacacacggggacgacgggg

SEQ ID NO: 217245 - RNA, 64 nt, Homo sapiens
gaccgaaccccggcgaacagcaaggcacaagaccagagggggacaccaagagcgacaagacacc

SEQ ID NO: 217246 - RNA, 72 nt, Homo sapiens
acccaaacggagacgcaaaaggaaccagcaaagccgaacacgccgcagaccagcaaagaaagagaagggcaa

SEQ ID NO: 217247 - RNA, 60 nt, Homo sapiens
gcagagcaggggccggaagcaccaggacagagcccgaagacaaggggaacacccaaaaag

SEQ ID NO: 217248 - RNA, 59 nt, Homo sapiens
acgacggaagggggcacaaggcggcggaggaggaagccacagaccggcccacaaaaagc

SEQ ID NO: 217249 - RNA, 78 nt, Homo sapiens
gaagagcagagaaagacagaggcggcagaagaccaaaggcaaaaggaaagaggaggaagaaagcagaaggaagacagc

SEQ ID NO: 217250 - RNA, 81 nt, Homo sapiens
ccaccgggccccagagcaggaggaaggaggaaggcagccccaagcgcagcagaacacaacccagggaagaccagaaagccc

SEQ ID NO: 217251 - RNA, 77 nt, Homo sapiens
cgacaccaggggacacccagaagcggcgccgccggcagaaaacaaggacgccccggagacccagcccggaccaccaa

SEQ ID NO: 217252 - RNA, 75 nt, Homo sapiens
cgcgccccccggcgggccggacggacaggaggccagggcacgggaaggcagcacgaggcaaaacaaggagcaaac

SEQ ID NO: 217253 - RNA, 86 nt, Homo sapiens
agaagaagcaggagaacgaaacggagccagagaaggcagaagggcagacggacgagaaccacggagaagcacgagcaaacaacagg

SEQ ID NO: 217254 - RNA, 76 nt, Homo sapiens
cgagagccgccgccaacgcgcagggcagcggcccccgcccgcagaccacggacagagccggaaaaaacacaagaac

SEQ ID NO: 217255 - RNA, 74 nt, Homo sapiens
gaaacgcccaagagccaacaagcagggcaggcagagagaaagcaagaagcccccgaggaggagagcaaggcgaa

SEQ ID NO: 217256 - RNA, 75 nt, Homo sapiens
ccccaggcgacgagagcaagccaaagaccaaggggggggcacccccacaacgacagcgagcagaagaaaacagaa

SEQ ID NO: 217257 - RNA, 75 nt, Homo sapiens
gaaggggcgcgcggccccgccgccccagcccgccccccgggccggacccacgagagcaaaaagaaagcaacgaca

SEQ ID NO: 217258 - RNA, 76 nt, Homo sapiens
aggccggagcgagaacgccgccgaacgccgcccgcacgccgccggcacagaaagggagcggccccaccaaacgaca

SEQ ID NO: 217259 - RNA, 110 nt, Homo sapiens
agccagcagacacaaagagacagaagaagaggaagccgggaagcacacaaacccggcccacacgcagcccggccagcccaacagcgcgcaaccccggacacagcgcacgg

SEQ ID NO: 217260 - RNA, 75 nt, Homo sapiens
ggacaaggaaccaaagaaagaaacacagaaagagaggcacaacgggcggacagccggaaacagaacagaggccag

SEQ ID NO: 217261 - RNA, 53 nt, Homo sapiens
aaccgcgcgccacccacaaccagcacgagccagggagccgccgggaccggccc

SEQ ID NO: 217262 - RNA, 81 nt, Homo sapiens
gaggagcggggagacgcggacccccggcccagggaccagcaccgggaacaccagagcgagcacgaacgggacccagcccaa

SEQ ID NO: 217263 - RNA, 74 nt, Homo sapiens
gacccgcgcaaacaaacagcgcgcgggacacgccgggcccccaaacagacccagaacccacagacaggcaggca

SEQ ID NO: 217264 - RNA, 55 nt, Homo sapiens
ggccacacggagagccaaagggacgagacacacagaagacgaaagacgaaagaag

SEQ ID NO: 217265 - RNA, 68 nt, Homo sapiens
aaaagacgacggcccgcacggccagaggacacacgacaagacacagagggcaggagccaaaaaggaga

SEQ ID NO: 217266 - RNA, 80 nt, Homo sapiens
agcccagcccccaacgggagccacagacgagagaaaacagcaggcaacagcgaacagagcgccgccaaggacgaaagaag

SEQ ID NO: 217267 - RNA, 73 nt, Homo sapiens
gaggcgggaaggagcagcacggccaggcccaagcccagcagaccaacagcgcagcccaaccgacagacccccc

SEQ ID NO: 217268 - RNA, 53 nt, Homo sapiens
cagcccgagaaaccgcagcacacacgccaaaaagcgcaccacacagagagggg

SEQ ID NO: 217269 - RNA, 76 nt, Homo sapiens
cccccaaccaccaccagcaaaagaagaccgaagaacggcaaagagaaaagaagcagaaaaaacaggaaggagaaac

SEQ ID NO: 217270 - RNA, 76 nt, Homo sapiens
ccggaaccaaggagcccgccgaggagcgaaggcccagagccgggggagacaagggacgcaacccaccacgaagcgg

SEQ ID NO: 217271 - RNA, 79 nt, Homo sapiens
ggccccggaaaggagcccgggcgcgggggcggcggcagggggcggagcgaacagccagcaaagacaagagcagaccagc

SEQ ID NO: 217272 - RNA, 68 nt, Homo sapiens
aaaaaagcagaaaggaggagaggaagaaaccgaagaacggcgaagcgaaagggggcagacagaagaga

SEQ ID NO: 217273 - RNA, 59 nt, Homo sapiens
aagaccaggacggacaagcacagccggaaggggaaaaaagagccggacgacagagcacg

SEQ ID NO: 217274 - RNA, 108 nt, Homo sapiens
acgggagccaccagaggccgggagcggcccagcaggagcgccaaccaggcagcgcggacggaccgagggagaaacacgcgaacccagaccggcgcaaacgcccgacac

SEQ ID NO: 217275 - RNA, 84 nt, Homo sapiens
cagagcccagcccgccggccagggccacaaaaaaaaagcaacaccaagaggacccaaaaacaccaccaacaaacaaaccagcac

SEQ ID NO: 217276 - RNA, 87 nt, Homo sapiens
ccagcagacagggccccacagcaacagaggcgcagcccaaggaggaggaggccagcaggccagcgagcgccgacacccaacaagacc

SEQ ID NO: 217277 - RNA, 76 nt, Homo sapiens
aaaacaaggagaagggcaagacgccggggacccgaccacaggcaaccgcaaaggggccaggccgcgggggccacac

SEQ ID NO: 217278 - RNA, 82 nt, Homo sapiens
cagccagcagcgccgccggcggccaagcagccaaccagccaaccgggccccccagcagacgcgagaacaagcagaggaaaga

SEQ ID NO: 217279 - RNA, 67 nt, Homo sapiens
agcagcaagagcccaaacgcggaaggcgccaacaacacgaacagcgaggaaacagagcaggcagcaa

SEQ ID NO: 217280 - RNA, 85 nt, Homo sapiens
ccgcgggggcggcgaacgcggagagcacgccagaaggcccgggcacggccggaccggacaaaggccacgcgccccggccggccac

SEQ ID NO: 217281 - RNA, 76 nt, Homo sapiens
aggagacacgagccggagaggaggccggagcaggccccagagaaggagaagagagagacgcgccgggagagaaaca

SEQ ID NO: 217282 - RNA, 69 nt, Homo sapiens
ggaccaacaagagcagccccagcgcccacaccgccagccacacaaagccaggcagcccagcacgcagca

SEQ ID NO: 217283 - RNA, 79 nt, Homo sapiens
gcggagggcggagagacccgggggcgagcacaaacggggcggggccggggaacacacaggagagagagccgaagaccca

SEQ ID NO: 217284 - RNA, 76 nt, Homo sapiens
ccgccggcgggaccagcacaggcggcgccccggaacgggagcgcaggcggagcaggagcaaaggagcaagaaacca

SEQ ID NO: 217285 - RNA, 53 nt, Homo sapiens
cgcgcgcccgggacgacggaccggccggcggggaaaagaacaggaagagaaac

SEQ ID NO: 217286 - RNA, 85 nt, Homo sapiens
cgggaccgaaaccagccccggacgagaagcgcagcaacggcgggggaccacgagagcgagagccgagagccaaggcggacaaagc

SEQ ID NO: 217287 - RNA, 71 nt, Homo sapiens
ggacccgcccgccacgccagcgcgcacacccacaaggcaaaacagcaagggcaaaagggaccgaaggaaga

SEQ ID NO: 217288 - RNA, 70 nt, Homo sapiens
aggccgggcgccccgcaggacacaagaagcaagaaaggacagcaaagcgaagaagcaaagaaagacgcaa

SEQ ID NO: 217289 - RNA, 79 nt, Homo sapiens
ggcaacaagagagagggcgcggcagaccggggcacggcaggcgggaacagcccgggccgccgcacccaccgcggagaag

SEQ ID NO: 217290 - RNA, 52 nt, Homo sapiens
cccgcccgcacgggcgcgccaagggcacagagggagagcgagaaccgccggc

SEQ ID NO: 217291 - RNA, 74 nt, Homo sapiens
gcgggggcgggggacaggcggcaccgacccccggcgcggcacggcacaggcaccggaccaggaccaggaaggca

SEQ ID NO: 217292 - RNA, 91 nt, Homo sapiens
agacggaaacaaggcaacagaaagagcaacagcagggcaacaggcacaggaagagggcggcacgcggccagagagcacaacgggaggaagg

SEQ ID NO: 217293 - RNA, 79 nt, Homo sapiens
gaagaaaaaaaaaaggcagaacccgagacaaccaccgggggccaccaccgaggaacggcaggggggggcggaaacacac

SEQ ID NO: 217294 - RNA, 73 nt, Homo sapiens
gaaacccggagaccaaaccgacaacaggcacaaagagagaaggaacacccacagggcagacagagaaagaaca

SEQ ID NO: 217295 - RNA, 63 nt, Homo sapiens
gagcccggccccggggaacagggagcgcccggcgcacagcgccagagcgcccccgagggaagc

SEQ ID NO: 217296 - RNA, 74 nt, Homo sapiens
ccaccggagacgcgaaccagccccaacaaccagggggaaccaagcagcccacaagcgcccaaagccaccgacgc

SEQ ID NO: 217297 - RNA, 74 nt, Homo sapiens
gcgggagggaggggcaagaaaagacggcacgcaccgagaggccaggaacgcacaccagcaccagcccaccaaac

SEQ ID NO: 217298 - RNA, 37 nt, Homo sapiens
aacacacagaccaaagcgggcggagaacggaaaagca

SEQ ID NO: 217299 - RNA, 82 nt, Homo sapiens
acagggccaacagggccggccggccggcccccaaacgcgcccgcccccaggcaggaagaaccggacccggcgaaccggaagg

SEQ ID NO: 217300 - RNA, 80 nt, Homo sapiens
gcccgggggacggaaagaggacgacaagacgaggggggaacccagaggaggagcgccgagcgagcacccagcccgggcca

SEQ ID NO: 217301 - RNA, 78 nt, Homo sapiens
cagaagagcagggcaggggacccccgagcgggggcggcccacggggacgagaaagagcaccagaggcgcccgagagcg

SEQ ID NO: 217302 - RNA, 73 nt, Homo sapiens
ccccggcaacccaggggcggccacgaccaccaggcgccagagcccaaaaggcagagcgaggagagaagaagga

SEQ ID NO: 217303 - RNA, 76 nt, Homo sapiens
gaagaaccacgcagagcgagcggaaacccccacgggcgcaaagccgcagaacccgccccgaaccgagaagaaggaa

SEQ ID NO: 217304 - RNA, 80 nt, Homo sapiens
aaagcgcgggaacaaagcagcccaggcagaccccaggcgagcagggcacaagacacagaggagaagaaacagagaagacc

SEQ ID NO: 217305 - RNA, 80 nt, Homo sapiens
gaagccgcaagaggacacaaaaaccgccgcggcaaaggcaacgccagcaggcagcgccaacaaaaaaaaaccaagaaacc

SEQ ID NO: 217306 - RNA, 78 nt, Homo sapiens
ccggagcggccggacggaaagcgacaagggaggcgccgccagcggccgggaccgaacaggcggccaaagcccacgcaa

SEQ ID NO: 217307 - RNA, 83 nt, Homo sapiens
caccaacccggggggacaccacccgcggaaccggcaaccccccgaggaagaaggaggagaccgggccaggagcagaccgaagc

SEQ ID NO: 217308 - RNA, 75 nt, Homo sapiens
ggccacgcggacccgaaaccaaaagaggagaaaccggcaaagagaagcaacacaagaagaccaaaggagaaaaac

SEQ ID NO: 217309 - RNA, 84 nt, Homo sapiens
cgggagacaccgccaccgccagggaaagcacgaagggagcccagcgacacaccagcagcagccaaagaccaaccagccccgagg

SEQ ID NO: 217310 - RNA, 73 nt, Homo sapiens
ccggcgccgcgccaacggcgcgggcaggcaggccaccaagccggggaggcaacaggaaaaaccccccccgcca

SEQ ID NO: 217311 - RNA, 62 nt, Homo sapiens
agaagaaacccgcggcgaccacagccaaagcgggcgaagcgcggacgcccccgaaaagcagg

SEQ ID NO: 217312 - RNA, 78 nt, Homo sapiens
ggacgacagagccagcgagcgaaccagaccaaaaacgcaacaacagacgaggaagacggcaccggagcaccccagacc

SEQ ID NO: 217313 - RNA, 79 nt, Homo sapiens
cccggagaagacaagggcacgccgcccagccgccgccgccgccgcgccgcagcgccaccgcacggggcaccgggcccag

SEQ ID NO: 217314 - RNA, 64 nt, Homo sapiens
ggaacacccaacaggccccccgcgcgggcgcaagccggccggacggcccggagaggaacccgag

SEQ ID NO: 217315 - RNA, 67 nt, Homo sapiens
gaacggcccggaaacaggaggacggcaccgcgccggcgcagcgccggcccccaagaggagacgggag

SEQ ID NO: 217316 - RNA, 84 nt, Homo sapiens
ggggcagaggagaaccgacgaaccgggaaaagaacggaggggagcccgagacgcgaacagaaggccagaagaggcggggagaac

SEQ ID NO: 217317 - RNA, 78 nt, Homo sapiens
ggggacagcgagcgcgcggccaggcacaccgggcacggagcccacggggacccaggaccccagaagagggagaaaagg

SEQ ID NO: 217318 - RNA, 53 nt, Homo sapiens
accaaaaggagacgaaccaagaaacagacaacggcaagcggagaagagcaagg

SEQ ID NO: 217319 - RNA, 53 nt, Homo sapiens
gcgagccgcgccgcgccaagcccgccgacacagccaccaagaaggcacaagca

SEQ ID NO: 217320 - RNA, 61 nt, Homo sapiens
ccgcccgaaaagaccaggccaaagaagcccggagaccacggcaggcgagggcggggaccgg

SEQ ID NO: 217321 - RNA, 89 nt, Homo sapiens
cgcacccgcccggccccacgggccgagacagcgacgacaagcgggccacgcggacgaggaggaccggggaccgccccgagggcgacgca

SEQ ID NO: 217322 - RNA, 72 nt, Homo sapiens
cgcccagccagcacgccgggaagcccaaaaggaacagcaaccgccccgaagcagcacgacggcaagggcagc

SEQ ID NO: 217323 - RNA, 66 nt, Homo sapiens
ccaacaccgcagacgaagggacggagaaggccgcacggacgcccagaaggagcaaaagaaacaaag

SEQ ID NO: 217324 - RNA, 75 nt, Homo sapiens
gaacggcgcgggcgggaacggagggcgcagcgcccacccgcgccagagaccagaaaagcgggcgacaaaccccgg

SEQ ID NO: 217325 - RNA, 86 nt, Homo sapiens
cgcgagcagagccgcccagcccgccagcgcgccgggacggcggcagacgcagacaaacaaaacaagaagccgaagaagaccgggga

SEQ ID NO: 217326 - RNA, 99 nt, Homo sapiens
agcagacgcaggcagccccaaagccgaacaggcagggccagacccaggaaggagggccccggagcagccacaccaccgaggccccacccagcacgagca

SEQ ID NO: 217327 - RNA, 73 nt, Homo sapiens
gggagaccacagcaagacaccgggaccccggaagccaaaaaggaacaccggcagcacacgaacagggaaagca

SEQ ID NO: 217328 - RNA, 70 nt, Homo sapiens
ggagccacaagaaaccagggcggccccagcccagacggaaccagaaaagggccaaggccgcggcaagcca

SEQ ID NO: 217329 - RNA, 76 nt, Homo sapiens
gccaaggaaaaacggagagccacaaaaaaggaagcgaaacggagccgagaggcaaaaccggaggcccacgaaacaa

SEQ ID NO: 217330 - RNA, 79 nt, Homo sapiens
cgaaagaagagcccaccagcaaagacagagaagaggcggaaccggggaccggaccggggcgaggaagaggagaggcaag

SEQ ID NO: 217331 - RNA, 78 nt, Homo sapiens
cccccagaaagaaccgcccacgggccgcgccaggaaagccacccgcacaaaaagcaaacccggaacgcacacaggacc

SEQ ID NO: 217332 - RNA, 81 nt, Homo sapiens
gaaaaacacgggcgccaggaacgcggaacagaaccaaaggcaggacagccagcagggacagccagacaagaccccaacgaa

SEQ ID NO: 217333 - RNA, 48 nt, Homo sapiens
gccagcaccagaagaaccagaaagggcaaccccaacaacaaagaggac

SEQ ID NO: 217334 - RNA, 79 nt, Homo sapiens
gaccccggcacgcccaggccgagcacggacaccggacacaacaagacacaaggaagaaggggagcaccggggaaccagg

SEQ ID NO: 217335 - RNA, 68 nt, Homo sapiens
cgaaacgaccccaccagccccaaaaggcggcaacaggacgggccaacgcacggcccggcagagccagc

SEQ ID NO: 217336 - RNA, 115 nt, Homo sapiens
gaacaggcggcgcgcgcggcgcgggacgcgcgcgggcacccacggagccccggggcggcgaggaccggcccagccaggcccggggcagcggcgaccagagcagcccccgacccca

SEQ ID NO: 217337 - RNA, 77 nt, Homo sapiens
ccaggcccagacggggacaggaacaggggccccggaaccgcagaccaacgccggaaggccaagagaggccaacagag

SEQ ID NO: 217338 - RNA, 79 nt, Homo sapiens
caagaccgcaacccgcaccagaccccaccaccgcccccaggagggccggacaaacagaggggaggagagagggacgaaa

SEQ ID NO: 217339 - RNA, 49 nt, Homo sapiens
accaagaaccagaaggcacaggggcgcaacggaggggaaccaccaagca

SEQ ID NO: 217340 - RNA, 76 nt, Homo sapiens
ccaccgccagcgccagagcgagcgccccgcccaggaagggaaacgagacagccacaccgcaaccacaccgagagca

SEQ ID NO: 217341 - RNA, 67 nt, Homo sapiens
ggccgggacgaaagcaagacggaaccacagacaaaaacccaaagcagagggagccacaccaaagccg

SEQ ID NO: 217342 - RNA, 79 nt, Homo sapiens
gggaggccgcggcccgggccgcaccagagcgcccggcccacgacacaggaagaagacaggaacccagcaccaacgagaa

SEQ ID NO: 217343 - RNA, 74 nt, Homo sapiens
gaccccggagaagcagaggaaaaggaccaaagggaggggaaacaagaaccagacaggcacaggcgaggggcgga

SEQ ID NO: 217344 - RNA, 76 nt, Homo sapiens
ggacacagaagagcagcccgccgacaagggggacagacagaaaagcgaagagcagagggaggagaggacgaccggc

SEQ ID NO: 217345 - RNA, 53 nt, Homo sapiens
gagccccgaggcgcaccaccgaaacaaggaccccccgggagaagaaaagcggg

SEQ ID NO: 217346 - RNA, 81 nt, Homo sapiens
aggcagggagagaggggcggaaagggcgacgcgccacagagcgggcgggcgggccacgcggcgggacaggaacccaacccc

SEQ ID NO: 217347 - RNA, 31 nt, Homo sapiens
cggaagacgggacagcgagacgacgggaccg

SEQ ID NO: 217348 - RNA, 75 nt, Homo sapiens
accggacaccgcagagaagaccagccgggcaccgggggcccaccccggcagaagagcaccacccgaaggcccaaa

SEQ ID NO: 217349 - RNA, 77 nt, Homo sapiens
caccaagcggaggggacgccacgcaacgccgaaggggggcagaaagaagaggaggacaacaagccaacagagagaga

SEQ ID NO: 217350 - RNA, 89 nt, Homo sapiens
gcgaaaaagggaaaaggagagaaaagagcagaacgaagaaacccgcaggaccacgccgcgaggcaaacgcaagggaaaaaagggcaggg

SEQ ID NO: 217351 - RNA, 73 nt, Homo sapiens
gacacaggaacaaacgagcacgcaacgacagagccaacgcaaaaccagaccaacagccacaggaccagaacag

SEQ ID NO: 217352 - RNA, 82 nt, Homo sapiens
cagaagccagagcgaggacgccggcagggcgggacccgagagaacgcaagacccacccccccacacaaaaacgcagcggaga

SEQ ID NO: 217353 - RNA, 70 nt, Homo sapiens
acgcccccaggagaaacgaggagcgcggccaccccccggaacgagcacgaagcggaacaaagggaaacga

SEQ ID NO: 217354 - RNA, 85 nt, Homo sapiens
gcgggcgccgaaccccagcacaggaggcgaagcaggagaacgcgaaccccggaggggaggcacagcccaagggaagcaagaaaaa

SEQ ID NO: 217355 - RNA, 53 nt, Homo sapiens
cacacaaacgggaccccaccacacagcagaaaggaggcggcagccagaaaggc

SEQ ID NO: 217356 - RNA, 69 nt, Homo sapiens
aaaaccgggaggcacagccccagaaacgcccagagccagaaggcaaaagagaaacaacgcagacgagga

SEQ ID NO: 217357 - RNA, 73 nt, Homo sapiens
cgcgcccgaggcgaggaggagcgcggcgaggcgcgaacagggcccacccgccacgacacaggggaagaagacc

SEQ ID NO: 217358 - RNA, 55 nt, Homo sapiens
cccccggccgggccgccacgcccccgcaaagggacgccagacgggacacgcacag

SEQ ID NO: 217359 - RNA, 69 nt, Homo sapiens
cagcagccaccaggagcccgagagagaaggcaggcgcggggcgaaggagcgcagaacaagcgaggcggg

SEQ ID NO: 217360 - RNA, 48 nt, Homo sapiens
gagagaaagggggacgaaggaaaacaagaaggagccacaagaccaagc

SEQ ID NO: 217361 - RNA, 90 nt, Homo sapiens
aaagacgcaccagaagaaccgggaggagaagaaaccgcagaagcaaaagaagggagcacgccggaaagcacagcaagggaaagaacagga

SEQ ID NO: 217362 - RNA, 63 nt, Homo sapiens
acacaggacgcggggcaaagggaccacggcaccgccccagaggggagagacaggaggaggaaa

SEQ ID NO: 217363 - RNA, 64 nt, Homo sapiens
accaaacacgaagagacaaaagagggacacgcaggacgacaaggagaaaaagaagcagaagcag

SEQ ID NO: 217364 - RNA, 77 nt, Homo sapiens
accgcgccgggccccggacgccgcgcggaaaaggacacacagaaagaccaacacagagggccggaaacggaccaagc

SEQ ID NO: 217365 - RNA, 87 nt, Homo sapiens
accagagagccgcgcccgccgcgcggagcgcccccgcgccccgcaccagagcggggcaccgagccggggacggggacggaaaaacac

SEQ ID NO: 217366 - RNA, 54 nt, Homo sapiens
cccaccagcacccacacaaagaggacgcggccggaccggcgcacgacgaccgga

SEQ ID NO: 217367 - RNA, 79 nt, Homo sapiens
gaggagagcgagggagggacgcgcgcgccggggcgagccacgccggaacccggaggccagggacagagagacagcacgg

SEQ ID NO: 217368 - RNA, 75 nt, Homo sapiens
cagagacaccaggacagaaaagacaggcgccaggagcacagaagagcgaggagaaggagagaagcaagcacgccc

SEQ ID NO: 217369 - RNA, 83 nt, Homo sapiens
cggacaagacccgggaaggaggcgacaggaacgcaaggcggggaaaaaaaggcagcacacagacgcagcaacgggcacgcaac

SEQ ID NO: 217370 - RNA, 68 nt, Homo sapiens
gaccgccaggagagccaccaaacccaagcaggcagcagaccaaacaaagcgggggagccccccgccca

SEQ ID NO: 217371 - RNA, 53 nt, Homo sapiens
agaccaaccaagaggccagagagcaacaccccccagaacagcagaccagaggc

SEQ ID NO: 217372 - RNA, 72 nt, Homo sapiens
gaaaaggccccgagaagaaagggaggcaggcaggcgacccacaccccaacaagcgaaggacgagaaaacaaa

SEQ ID NO: 217373 - RNA, 81 nt, Homo sapiens
cagcccgccccgccgggggagacgacccccgccagcgcgagcgagagcgagaagcggccccgggaggaggcagagcgcccg

SEQ ID NO: 217374 - RNA, 83 nt, Homo sapiens
caacaggagaacaagaccacggggagagggcaacggccagccaacccggagccacaccccacccaccggggccaccaccagca

SEQ ID NO: 217375 - RNA, 74 nt, Homo sapiens
agaaaaacaagaaacagcagccaaccaggcccgagacaaaaaggaccacccccgccaggcaccagcgggaaaag

SEQ ID NO: 217376 - RNA, 68 nt, Homo sapiens
gaggcaaggacaggcacacaaagaaggagacgggggcacgggagcaggaaggacccaaacagcgaggc

SEQ ID NO: 217377 - RNA, 56 nt, Homo sapiens
gggacaagaagggcaaagccgaagcaaaccagacccaacacgccggaggggcccag

SEQ ID NO: 217378 - RNA, 55 nt, Homo sapiens
gacgccccaggggaaaacccccgggaccagacagcgcgggagccaggaaacgcag

SEQ ID NO: 217379 - RNA, 83 nt, Homo sapiens
cgaggaggccggcgcagccccaagacagagcgcacccggcaggcgcaacagagcgccggcgggggcggcaccacgcccccccc

SEQ ID NO: 217380 - RNA, 73 nt, Homo sapiens
gaggaagcggaaccaccggagaaccaggaccccaccaaaccgaaaaggcaccgggaaaacgcagaggaacgag

SEQ ID NO: 217381 - RNA, 84 nt, Homo sapiens
ccgcccccacaaaccgagcaagagagagcaagaggaagcagggggaaagagaggaccacacaccccgaccacagcgcaacaacc

SEQ ID NO: 217382 - RNA, 73 nt, Homo sapiens
caaacaaggcgggggacccagcaggcaggagcaggacgggagaagagaaaccacaacaacaaagagaaaaccc

SEQ ID NO: 217383 - RNA, 76 nt, Homo sapiens
cagaccgcagaaggccggagacaccagcagagaggacggggacgggccccaggacgaggaagacaaggccagccac

SEQ ID NO: 217384 - RNA, 93 nt, Homo sapiens
ccgggccccagccggcgcggggagaaggaggggcaggaaagcagcgggaccagagaggggcgaaaacgcggaagcggagacacaggcggcgcg

SEQ ID NO: 217385 - RNA, 67 nt, Homo sapiens
aagcaggcccagagcgagcacagcaggaggagcgcggcaaagccgccggcacagcccaccggaagag

SEQ ID NO: 217386 - RNA, 75 nt, Homo sapiens
cgggcccccgccagcaagagaagaggggcggagaagggacaaccgaagccaaggagaccgggagagagacgaagg

SEQ ID NO: 217387 - RNA, 81 nt, Homo sapiens
cccgccgacgggccagcggggcaacgcacagccggccaaggcgagacgggacgcgcccacaagccccagcaccccgaggca

SEQ ID NO: 217388 - RNA, 83 nt, Homo sapiens
gaaaccggagggacccggcccggaggaagaaagccaaggaggcaaaccaaccaaaggaaacaaagcgaacaagagaagacgaa

SEQ ID NO: 217389 - RNA, 73 nt, Homo sapiens
aaaccggaccgggcccggaggagcgaacaaggcgacaacacaggaagccgcgagcagaacgcgccagcaacac

SEQ ID NO: 217390 - RNA, 70 nt, Homo sapiens
caggccagagcagagccagaagaagagccgaaagacgggacgacacccagaaagcagagaaaggaaaacc

SEQ ID NO: 217391 - RNA, 80 nt, Homo sapiens
agacgaggaacagcgaaggggagcccagggaagcccgggaccgaaaaaacggaaagcgggaagagacaaagggagaagcc

SEQ ID NO: 217392 - RNA, 65 nt, Homo sapiens
gacaccacaggaagaagcgagcgaagaggcgagaacagagcgagaagacaagcagaagcccggcc

SEQ ID NO: 217393 - RNA, 70 nt, Homo sapiens
aaggcacaccgaagacacagcagacgcaccggagccaccagcccacccagccgccagaccaccagaggag

SEQ ID NO: 217394 - RNA, 73 nt, Homo sapiens
acgggaaggaggcggccacagggagaggagcgaaacggccaggacaggaagacgaagaacggaagcgccccag

SEQ ID NO: 217395 - RNA, 84 nt, Homo sapiens
cggggaggcagcgcgggacccagcccaggcggcgcggacggggcgggcccacccgaaagagccccccagcgccaggccgggacc

SEQ ID NO: 217396 - RNA, 76 nt, Homo sapiens
ggagaggaaccgccaggaagggagggcagagacacagaaaggaaggagaaaccaagagaccagaggaccgaagggg

SEQ ID NO: 217397 - RNA, 81 nt, Homo sapiens
aaacacacaaaagagaaaaacaaccagcaagggacgcgaaaaagacaaggaagaagacggcacgggacccccagcacaggc

SEQ ID NO: 217398 - RNA, 81 nt, Homo sapiens
gaacaagcagcagccagagaagggagagacaaagcaggaggacacaagaagggaggaaaggcggacccaggaaccaccacg

SEQ ID NO: 217399 - RNA, 66 nt, Homo sapiens
cccggcgaccaacccggcgggacacgcagccaagcgcgcacccgccggcagcagcaaacccagagc

SEQ ID NO: 217400 - RNA, 71 nt, Homo sapiens
ggaaggaacaagccaccaacaacaccagggacacaacagcaaggagcagaaaccgaaacaccagaaggaga

SEQ ID NO: 217401 - RNA, 83 nt, Homo sapiens
gcggcgacgagaacggcgagcgaggggcgagcgcggccggggccgaggaggcacgcgaccagggcgccgggaggaaccgaggc

SEQ ID NO: 217402 - RNA, 84 nt, Homo sapiens
cgggaagaggaggggacccagagacacacccaaaagcaagaagaacggaacaggacacccaaccgcgagaccagcaaggacggg

SEQ ID NO: 217403 - RNA, 38 nt, Homo sapiens
gccccgagaacgggaacagcgagacaccgcccggaggg

SEQ ID NO: 217404 - RNA, 76 nt, Homo sapiens
cagcccgaggaaccgggagggagccgacggaaaccaaggccaaccagggagacaggcgccgccgcggagaaggcca

SEQ ID NO: 217405 - RNA, 50 nt, Homo sapiens
aggccgggcagagggacggccggaacgaccagagcggccccggaggcggc

SEQ ID NO: 217406 - RNA, 76 nt, Homo sapiens
cacaaccacagcaagagcaccggcgaccgcaccacaagggacgagaccaaacggaagagggacagaggaaacgaga

SEQ ID NO: 217407 - RNA, 66 nt, Homo sapiens
aagaaacggaacaggcacgccaacagacccagccggcgaccagacccacaggaccgcgaacaagga

SEQ ID NO: 217408 - RNA, 68 nt, Homo sapiens
cgaagaaagcaagcccggccccgagcgaggcaccggacccgacacccccggcaccacagccacagacc

SEQ ID NO: 217409 - RNA, 85 nt, Homo sapiens
caaggaggaaccagcacccacagggagggggccaagcaccccaggagagaagcagaagaggggcgcacagccggacacgaacccc

SEQ ID NO: 217410 - RNA, 81 nt, Homo sapiens
cgacccaccgcgcccgggccgccggcaggcggccgcagcaacccgccggagaggaagacacaggcagaaaacacggaagga

SEQ ID NO: 217411 - RNA, 65 nt, Homo sapiens
gaaaacgcgaagaagagaaagacacaagggaaggacgccggggaacaccacagcgaaacgaaaac

SEQ ID NO: 217412 - RNA, 77 nt, Homo sapiens
acccgcagcgcagcagaccacaaaggcagacacaaccccagcgaaagcaggccccccggaggccagccccccgcccc

SEQ ID NO: 217413 - RNA, 79 nt, Homo sapiens
aaacaagcagccccggaagacaacgcagacgccagcaccaagccgacacaaccagagggaagcacgcccgggcacagcg

SEQ ID NO: 217414 - RNA, 38 nt, Homo sapiens
acgaaagcaggagaaaaggccaaacccagacgcaacca

SEQ ID NO: 217415 - RNA, 80 nt, Homo sapiens
cgccccgccaaccgcaaccagacgccagcgggacgaggaccgagaccgcggccgggaccgaggccagccaccagaacccc

SEQ ID NO: 217416 - RNA, 51 nt, Homo sapiens
gaaggaccaagaaccaggggaggagaagagagaggcgacaagccggcgaga

SEQ ID NO: 217417 - RNA, 74 nt, Homo sapiens
ccgaaccccccaaccaagcaaaaccggagagagccagcgggccggcaccggcacgaggagcgcacacccgccca

SEQ ID NO: 217418 - RNA, 71 nt, Homo sapiens
accaggaggggccagacacaggacacacagcaacgaagcaggggaggagggaagaccggacagcgagccaa

SEQ ID NO: 217419 - RNA, 78 nt, Homo sapiens
gaacagagaacaaggccaggaagaccagagaagagggcaacggaacagaccagaaggagcaaggggaagaggaaaaga

SEQ ID NO: 217420 - RNA, 81 nt, Homo sapiens
gggaaaagagagcggcgacagcaagaagggagacagagcaaaaggacagcacagcgcgcggaggccggcggaccagaaaga

SEQ ID NO: 217421 - RNA, 101 nt, Homo sapiens
gagcacagagcccgccgccgaccgccgcccgccacacccgccgccagggcggaaaacaccccaaaagccaaaagggaaaggaaaagaccaacaacagcgca

SEQ ID NO: 217422 - RNA, 71 nt, Homo sapiens
ggagagcggggaagggggaaaggcaccaggacaagcaaaggaccagagggaaaaggcacccagcggacggg

SEQ ID NO: 217423 - RNA, 53 nt, Homo sapiens
cgggcccaacggaaaaggagcagagaccggcagagaacacagaagagcagaac

SEQ ID NO: 217424 - RNA, 81 nt, Homo sapiens
gcaccgggacggaccgagaccggaccgagagcggaccgagagcgcgaaacgcacgagaaggaaaaaaggagcagaaggacc

SEQ ID NO: 217425 - RNA, 84 nt, Homo sapiens
caccccgccagaagaggaaaaagaacagagcgaagggaagggagagcgaaacgagaacccaggacaagaaacagcacggaaaaa

SEQ ID NO: 217426 - RNA, 72 nt, Homo sapiens
cgcggcacggggcaaccgggcggccacgcccgcgcagacaccacgccacccaagagagagcaaaaaccgaga

SEQ ID NO: 217427 - RNA, 70 nt, Homo sapiens
ggagacggagcaggcccacaagcaaagcgcgggggaaacaacgaagagaggaaagaagcggaaaggaggg

SEQ ID NO: 217428 - RNA, 77 nt, Homo sapiens
accggacgagagccagagaccacgggcagcggaaaaaagccaccgaagcgaggaaacgaaacccagagaaggaaaac

SEQ ID NO: 217429 - RNA, 73 nt, Homo sapiens
aaagaagaggcgagcagccacagaaacaccccacagaaaaggcccagaaggggaagacccccagcgaacagag

SEQ ID NO: 217430 - RNA, 69 nt, Homo sapiens
cggcggggcacggggggcgacggccaagcgcagaggggaagacacacgaagccggcaggaagaaccaga

SEQ ID NO: 217431 - RNA, 77 nt, Homo sapiens
ggaagaggcggacggaggagcaggcgagaagagaagcaaacacaacagaggagacaggaggaaagaagcgccggacc

SEQ ID NO: 217432 - RNA, 66 nt, Homo sapiens
aaaggcacaccggcgaagagacagagccgcaacaggaacacagaagagaacccgaacacagcagga

SEQ ID NO: 217433 - RNA, 79 nt, Homo sapiens
cggggacggcgcgcgggacggccgaggaaggaacggcccccccccagcccgccccaaaagagcccaaaaggcagagcga

SEQ ID NO: 217434 - RNA, 76 nt, Homo sapiens
gcgggccagacagagcagaacagccccgcggcccggggagaaggagcacccacgggagaccggggggcaagaaaag

SEQ ID NO: 217435 - RNA, 77 nt, Homo sapiens
cccgccacccacaggaccaggaacccaaggaccgcaaagaaaacccagagaacaccacccgaagagacaccgagaaa

SEQ ID NO: 217436 - RNA, 86 nt, Homo sapiens
cacgggggccgcaaacagcaagccagggagaaccgcgcgggccaaagaggaagcccgccaggaggaggagaggcgcggccgaggag

SEQ ID NO: 217437 - RNA, 81 nt, Homo sapiens
cgcaggagccacccccaagggggccgggccgagcccgggcgggaaggagaagcggacccaaacggcagaagacagaaaagg

SEQ ID NO: 217438 - RNA, 69 nt, Homo sapiens
ggaacacaacagaagagaagcgagacagggacggagagaagaacaaaagcaaacagaaccagccccggg

SEQ ID NO: 217439 - RNA, 70 nt, Homo sapiens
accaccagccccgccagggcggaaacggcgagcaacagaggccgagaccaacggacaaacaaacgggcag

SEQ ID NO: 217440 - RNA, 79 nt, Homo sapiens
ggcaaggagacaagaagagcgaccgggccaggagcgaccgagaaggggccggagcagcaccggccggcaggcggcacca

SEQ ID NO: 217441 - RNA, 66 nt, Homo sapiens
caaggggaggagcagcagcgcggcagagcaggggccagaccagacccaggggccaccgagcggaaa

SEQ ID NO: 217442 - RNA, 70 nt, Homo sapiens
agcaacagacgggacgaaaggacaagcaagaaaggcccccccacagagcgagaggcgacggagagcgcac

SEQ ID NO: 217443 - RNA, 92 nt, Homo sapiens
aaaaagaaagagaaaaggaaagcagaagacaagcagaaccacggagcaggacccaggcagaggaggccggagcccaccacagaccccacgcc

SEQ ID NO: 217444 - RNA, 55 nt, Homo sapiens
ggggcgcaccacagagaccggccaaaccacccagcagccccacgcgaagagaaga

SEQ ID NO: 217445 - RNA, 76 nt, Homo sapiens
ggaccgccgagccacaccgggccccgggggcgccgagggcacaagggcaacgacagaagggcgaagccaacgccag

SEQ ID NO: 217446 - RNA, 76 nt, Homo sapiens
agccgggcaggacggcgggccgaggagcccggggagggacccggagcccagaggcccacgcggaccggcagcgcca

SEQ ID NO: 217447 - RNA, 71 nt, Homo sapiens
aaacagagcacagaggaggcagaagaaaacaagcagacccgccaacgagaagagcccaaaaaaaggggaga

SEQ ID NO: 217448 - RNA, 79 nt, Homo sapiens
aaacaggcgaagccaaagcagcacgcgaggaggaaaggcaccccaccagaaagccccagacccccagcggccaggggag

SEQ ID NO: 217449 - RNA, 72 nt, Homo sapiens
acaaacccgaaaaacgagagagacgaggcgaaagaaacgggccccaaagccccgaaaaccggaacgacagcc

SEQ ID NO: 217450 - RNA, 116 nt, Homo sapiens
aggagaagcacaaaccggcgaagagaaaccagcccggacagcgcaccccacgcggccgcaccacgccacccgaaaaacacggagagcaccacccagaggagaaggagaggagaagc

SEQ ID NO: 217451 - RNA, 76 nt, Homo sapiens
ggacgccgggaccacccgaggggggaacaaagagaagacacaccaccacgccaagggaaagggagcagcaccggcc

SEQ ID NO: 217452 - RNA, 78 nt, Homo sapiens
caagcggcggagcaccagggcacaagacgagcacgggcagacggcacggagggcagaagccgcaggacagaagcacaa

SEQ ID NO: 217453 - RNA, 73 nt, Homo sapiens
acgggcacggcggaaaccggcaccacaaaggcacagcacgaggaacccccggccaaagaacccacccgggccc

SEQ ID NO: 217454 - RNA, 67 nt, Homo sapiens
agacggaaacgaggaaaccgggaaagccaccgaaaaggagccacgcagggacgcaagacccccgagg

SEQ ID NO: 217455 - RNA, 75 nt, Homo sapiens
ccgcaaccggggcgaacaggcggccgccaagccccggccggagagacagaaagaagaaccaggagcagaaggggg

SEQ ID NO: 217456 - RNA, 75 nt, Homo sapiens
gccagccgcggagggccgggcgggccgcggagcgcaggacacaaacccccaggaacagccaccgggaggagaacc

SEQ ID NO: 217457 - RNA, 70 nt, Homo sapiens
acagcagcccaaacaagcaccaaccgcaagcagcccaaaaaagcgcaaaagcaggaaaaggaagccaagc

SEQ ID NO: 217458 - RNA, 74 nt, Homo sapiens
ggcccgcccgcccagaggcagaaggacagggcagaccgccagcagcacagcaagccacagagagggccggcagg

SEQ ID NO: 217459 - RNA, 59 nt, Homo sapiens
agagagaacgcaaagcagaacacagaacaaaacacagcaggagggcgaaacggacccgc

SEQ ID NO: 217460 - RNA, 72 nt, Homo sapiens
gagcacggaaggaaaagggacaagcaagagcaacaacagggcggagaacggaaaagcaccaggaagcagaga

SEQ ID NO: 217461 - RNA, 42 nt, Homo sapiens
gggcggggagcggagccaggccccggaagcgaccggacaacc

SEQ ID NO: 217462 - RNA, 77 nt, Homo sapiens
gaagaagcagcacaaggcgagccaggaggacagagcgcagcccagacccgacacacggggcgccaggacaacagcgc

SEQ ID NO: 217463 - RNA, 79 nt, Homo sapiens
agacaaaagccacccaggccggccagcacccaccgagaaggccagcagggacggaaagcccgggacgcgagcccacccg

SEQ ID NO: 217464 - RNA, 89 nt, Homo sapiens
gacacggagcagcccagcaagcccagaggaaccaagaaggagcgagggaggagcagcgagacagcaagagacgaccacagagccacaga

SEQ ID NO: 217465 - RNA, 69 nt, Homo sapiens
gacagagaggagggagaacaagcaacggcgggacccaacccggaagaaaagaggaaacagaacaacaac

SEQ ID NO: 217466 - RNA, 126 nt, Homo sapiens
gagagccggaccacggagagcaggcagcgggggggcgagcccgaaacgaggcgggagcagcacagagcaagggccagagaaggaggagaaggagacaggcggcaagcagggcgaagggaggaccag

SEQ ID NO: 217467 - RNA, 84 nt, Homo sapiens
cacccgcgcgcgcccgggaggaaggaacgaggcaaggagcaaagcagcggcgcagcccgggccagggccccccacgcgagaacc

SEQ ID NO: 217468 - RNA, 70 nt, Homo sapiens
cgaaggaggccggagaagaaagaggccacggaccggcccagacacagacacacaaaaagcccagccaaaa

SEQ ID NO: 217469 - RNA, 82 nt, Homo sapiens
ggaaagaaagaagagccgccagaacaaaccgagcccaaagagacaaagagaagccaggaagggaaagacggagacaacagag

SEQ ID NO: 217470 - RNA, 79 nt, Homo sapiens
cgagcggcgcggacggcgcgcggacaccaggagcgcacgccacgaggagcagggggggcgccgcgcgaagcaccgcacg

SEQ ID NO: 217471 - RNA, 76 nt, Homo sapiens
gcccagcccaaagacagacgcggcgaaggcaaaggaaaaggacagccagacaagaccccaacgaagggccagaaaa

SEQ ID NO: 217472 - RNA, 102 nt, Homo sapiens
cccgcccggaaaggaacagcacagcgcgaaaggccgaaaagcaagcaacgcaaggacaaagcagagcaacccaacagaggaaagccagacaccagcgaccac

SEQ ID NO: 217473 - RNA, 77 nt, Homo sapiens
agacggacgaggcggcggagaacaagcggcaggacccgaccacaaagacacacagaggacaaagaaagcagaaagca

SEQ ID NO: 217474 - RNA, 60 nt, Homo sapiens
aagaagaccgcgagaacagaacggcacccccccgcgcgcgggggggcagaagcagcgagg

SEQ ID NO: 217475 - RNA, 72 nt, Homo sapiens
cacaaaagagcagaggaggaacaccaggcacaaggggccggaaaagggaggggagaaggcggaccggcgccc

SEQ ID NO: 217476 - RNA, 69 nt, Homo sapiens
gacggcaagcccaaaagggcagagaacacacagaagagaaaaaccgaacacaggacacacgacggccac

SEQ ID NO: 217477 - RNA, 73 nt, Homo sapiens
ggaaccacagcgcccacgacaggggaaggccggggggggcacagagccccggaagacagcccccagcgaccag

SEQ ID NO: 217478 - RNA, 82 nt, Homo sapiens
aaagaggcggcagggaccagcagacgggaagaaaaaagggacccaagaaagccccgaacaacaacagaggcaaccagaagga

SEQ ID NO: 217479 - RNA, 71 nt, Homo sapiens
ccaagacgcgcccagaagcaaaaggagcagcacaaaaacaaccaaaccagcacccaaagcaaaaagcaggc

SEQ ID NO: 217480 - RNA, 87 nt, Homo sapiens
gaggacagaccccaaagaacaaggaggacccacgaccccgaaggcagacaaagccacagacccaagcagcggaacaggaggcagcac

SEQ ID NO: 217481 - RNA, 58 nt, Homo sapiens
agcacacagacccggaggaaccaccccacaggaacaaccgcaccagaccaacagccac

SEQ ID NO: 217482 - RNA, 74 nt, Homo sapiens
agacagaaagcggaaggaaagcggaaacacaagcaaggaaaaacagaagaggaaaagggaagcagcacgaagag

SEQ ID NO: 217483 - RNA, 84 nt, Homo sapiens
ccggcggcgcgcgacgcccagagccgcggccggggcgcgggagggcgacgcgccacagagcgggcgggcgggccacgcggcggg

SEQ ID NO: 217484 - RNA, 81 nt, Homo sapiens
cggccaccccccagggagccgaagccaagggacggccaccccaggagcagcccgaagcagcagcagcagcaccagggcagc

SEQ ID NO: 217485 - RNA, 78 nt, Homo sapiens
cagccaagccagcggaggccgaaaacaggccggggccgaaaagccagagaaagaagccaacacaaaccacaaaaacaa

SEQ ID NO: 217486 - RNA, 66 nt, Homo sapiens
cggagcagacaaagacaggaacaaaagagaaaggcaagaagagaaaggagacaccaaaaaaacacc

SEQ ID NO: 217487 - RNA, 78 nt, Homo sapiens
cgaaaggggggcagggagagaagggagaagaaaaagcagaaaggaacagaaaacaaaagaacaaggcacaacggacag

SEQ ID NO: 217488 - RNA, 55 nt, Homo sapiens
gccaaggcaagaggaagcccccgcaccagcaccgggcagggagacggagcaccgg

SEQ ID NO: 217489 - RNA, 82 nt, Homo sapiens
cccgggcaccacagaaaagccgaaccgaacgaaaacggccaggcaaagcagaaagggccgaaagacggagcagcccccgacg

SEQ ID NO: 217490 - RNA, 57 nt, Homo sapiens
ggccggcgggcgcgcggcaacgggcgagaacgcggacaagcaaacaaagaggaaaaa

SEQ ID NO: 217491 - RNA, 67 nt, Homo sapiens
aaacaagccacccagacaagaggaaccaaacaggggcaccagggaggaagaccgcaagaggggccag

SEQ ID NO: 217492 - RNA, 78 nt, Homo sapiens
caagacccggagggcgagccggcaccagggcccagcccacagacacacccaaagcagcccacacagggcagacagacc

SEQ ID NO: 217493 - RNA, 51 nt, Homo sapiens
gccgaaccagggccaccgcgcaaggggagagaagaaccgaagagagcagaa

SEQ ID NO: 217494 - RNA, 50 nt, Homo sapiens
caagagcaggcgacacgcaggagaccacagagaagcaggcgaccaggcgc

SEQ ID NO: 217495 - RNA, 70 nt, Homo sapiens
agacggaggaggagccggacgggccaggcacccccagcaggacagcacacccaaccagacacaccacccc

SEQ ID NO: 217496 - RNA, 38 nt, Homo sapiens
aggaaggagagggaccggaccagagaccgcaagagaaa

SEQ ID NO: 217497 - RNA, 85 nt, Homo sapiens
caggcccaagaccgaggacagccccgaagacgccgacccccacccgaggaaacaagaccgagccagaggacggagagagggagcc

SEQ ID NO: 217498 - RNA, 82 nt, Homo sapiens
caaagcgggcgaccggccgccaagagaagggcacccgcacggccggcccggaacaccggcagagagagagacacaccagacg

SEQ ID NO: 217499 - RNA, 75 nt, Homo sapiens
gcgccagacggacgaggcggcggagaacaagcggcagggggaaagcagcaggggccagaagacaaaaccgaacca

SEQ ID NO: 217500 - RNA, 78 nt, Homo sapiens
ggaagccacagagacaggccagacccgcccccgaaagggcggagaacggaaaagcaccaggaagcagagaggaccgca

SEQ ID NO: 217501 - RNA, 78 nt, Homo sapiens
caagcagcaggaggacaccaaagaaagcaaaaaaccgggaagccgacgggcgcccaggggaccaaagaacaaggagaa

SEQ ID NO: 217502 - RNA, 91 nt, Homo sapiens
cccgccgcaggacccaggacccagccagggcaacacaccagcgccgagcggagaagaagaggaggaggccaggcaggcaaaaggagcaggc

SEQ ID NO: 217503 - RNA, 50 nt, Homo sapiens
gacggggccccgccagaggagccccccccagcgccgaaggcccgacccag

SEQ ID NO: 217504 - RNA, 64 nt, Homo sapiens
aaaaggcgcggcgcaacccgcgcccgccggagagagaaagcggggcagaagcccccggggagag

SEQ ID NO: 217505 - RNA, 76 nt, Homo sapiens
gacggcacccgggggccacacgcaggccccgcgccaggccggccagaaggaggacaggaaaaagccgagcgaacga

SEQ ID NO: 217506 - RNA, 98 nt, Homo sapiens
ggacccagccgggaggccccagaggggccccagacgccacacggggccgcagacccaaaggagggacaggaggagcccccgcacaggaccaagaagcg

SEQ ID NO: 217507 - RNA, 76 nt, Homo sapiens
gaaacaccaggcgcggcggcccagccccgacacaggcagacggcagaaaacagacgaagcaacagcgaacaaaaaa

SEQ ID NO: 217508 - RNA, 85 nt, Homo sapiens
ggccccggcgagcagccgccgcccgccgcacccagagaacaccgcccagccaagggggagggcagcgccaaacagcgcaaaggca

SEQ ID NO: 217509 - RNA, 81 nt, Homo sapiens
cccaccagaccaccggggcaccggcccgccgccccggggcacgccaggcaaccaagacaacaagccaaagccacaccgggg

SEQ ID NO: 217510 - RNA, 82 nt, Homo sapiens
aaagaaacacaaaggaccgaggccgcgcgggcgggcgcgccgccgggcccaggagcggaggggcagggggcgaggacagcgg

SEQ ID NO: 217511 - RNA, 67 nt, Homo sapiens
cccacgaccggacgcccacgaccccagcaggggaaggaaccacaggcccggagaaggaccacacagc

SEQ ID NO: 217512 - RNA, 80 nt, Homo sapiens
gcagagcggggagacccggggggggaggagaggacccgccacccaccggaaggggagcacgagacagcgccggccccaac

SEQ ID NO: 217513 - RNA, 69 nt, Homo sapiens
ccccaaaaagcggcaaaagcaagagaacaggcacaaaacaacgcagcagccagaggaagggagagaaga

SEQ ID NO: 217514 - RNA, 71 nt, Homo sapiens
cggccagcgacgcaccgagaaaggaaggaaaaccgacgagacgaccgaaaacccagccagacaaaagagaa

SEQ ID NO: 217515 - RNA, 83 nt, Homo sapiens
ccaagcgcaaagcgggagagacggaccagaccagggccgagcacaggacaaaggccacaaggacgccccaggggcagcggagc

SEQ ID NO: 217516 - RNA, 65 nt, Homo sapiens
gagacacaagaacgagccccagggaacggaagagccaggcagagcgaagaaggcccagcacccca

SEQ ID NO: 217517 - RNA, 65 nt, Homo sapiens
cggaggcagaggggaggcgcgaaaggccaccagcgggcccccacggagggcagcaaggggacggg

SEQ ID NO: 217518 - RNA, 79 nt, Homo sapiens
gcgaggaggcgcaggagacgaccgcaacggcagggggacgcgaagaagcccccaccaccacgagaccgacccaggacga

SEQ ID NO: 217519 - RNA, 88 nt, Homo sapiens
cgcgacgacggcccgggaggcacgaaggcaccgggcccagcacagccagcaccgcacgcccgcaagggagacccaggaccagcccgaa

SEQ ID NO: 217520 - RNA, 70 nt, Homo sapiens
aacaacacaggccgaacgcgagcagcgacaaacagggaaagcagaaaaaggcccacgcagggcgaaccga

SEQ ID NO: 217521 - RNA, 63 nt, Homo sapiens
cgcgccccgcaccagagcggggcaccgagccggcaggcaggagaagggcaccggggaggaccg

SEQ ID NO: 217522 - RNA, 78 nt, Homo sapiens
aaaaaccgccaaacgcaggcacaaggcgcagggggaaaagaggcagaaacgaagcgaaaggaaaccaaaaggaaaaaa

SEQ ID NO: 217523 - RNA, 81 nt, Homo sapiens
ccggacccgaaaaacgagacgggcggcgaacggcggaggcagccaagagaaggaaaacccagcaccgcgccgagaacggcc

SEQ ID NO: 217524 - RNA, 101 nt, Homo sapiens
ggaaaacgccagaccagaagcccaaggaacaccgggcaacagaaaggcaaggcgaccgaagcacaccccggaagcgggccaagggcgcacccccgcggcga

SEQ ID NO: 217525 - RNA, 69 nt, Homo sapiens
agaacggcgggccagagcggggcgaccaggaaagaaccggaacagaagacagggaaggacccaagagcg

SEQ ID NO: 217526 - RNA, 61 nt, Homo sapiens
gggggaacagaggagcagggagggggacccagaagaaagaaggagcaaccagcagcagggc

SEQ ID NO: 217527 - RNA, 74 nt, Homo sapiens
caagcggcgacacacgacgggcccagcccccggacacgggcggccggaaggcgaggccccgccagcccgccggc

SEQ ID NO: 217528 - RNA, 84 nt, Homo sapiens
gccgaggagcgggaagaggcggggacaagacgcagaggaagggggcggcgggaggcccagccgggacagcacggggcgacaccg

SEQ ID NO: 217529 - RNA, 68 nt, Homo sapiens
ccccccggacagacgccgacgcccagagggaaaagaggacgaggcgcgaaaaggcaaaggcaagaaag

SEQ ID NO: 217530 - RNA, 76 nt, Homo sapiens
ccagccccaggggaaccaccccaagggccaggagagagagaaagggaacgggacaagcagaacgcaggaggccaac

SEQ ID NO: 217531 - RNA, 39 nt, Homo sapiens
gccgcccagcgccgccaagaaccccgagagccccgccca

SEQ ID NO: 217532 - RNA, 71 nt, Homo sapiens
accgacaaagaggcacggacaaaccagggaacaccaggaggacacgggacccaggccacgggccggggccc

SEQ ID NO: 217533 - RNA, 76 nt, Homo sapiens
ggagcgagagaggagccacccgaaggcgaacggcacagcaagcaacccggccgaggggggcaccccgggaggaagc

SEQ ID NO: 217534 - RNA, 87 nt, Homo sapiens
cgagccgcacgagggccagcgcgccgcgccaggaccggaggcagagagaccaagcgagacggccggccgccacgggggccgagcggg

SEQ ID NO: 217535 - RNA, 116 nt, Homo sapiens
gcacagccccgcccagcccacggaacgcaccaggaaggccggagggggagagccgaggacgggggaaaggacgggagaacgaagcgagagagcagagaagacgcagacggggaccc

SEQ ID NO: 217536 - RNA, 78 nt, Homo sapiens
ccgccggcccgcggcgaggcgccaaaccccaccgccacggcgagagacgagaagaggccacaagcagcgccagagagc

SEQ ID NO: 217537 - RNA, 74 nt, Homo sapiens
aacacaaccaccagcccacacaacccaggagaggacacaggcaggaagcagaaaccaaggaccgcgcagacgcg

SEQ ID NO: 217538 - RNA, 72 nt, Homo sapiens
ggacaggggcccaacaggagaggggagaagaacaaggccaagagaaccccccgacagacccaacagaccaaa

SEQ ID NO: 217539 - RNA, 75 nt, Homo sapiens
acacacagcgaccgggagcacaccacaggcaagaagcaggcaccgcaagagagaccgcgggaagcagaagacagc

SEQ ID NO: 217540 - RNA, 80 nt, Homo sapiens
ggccgcgaagaggcgggccggaggccgaagacaagccccggcacaggaggagagaaaccagccgaggcagccgaacacca

SEQ ID NO: 217541 - RNA, 63 nt, Homo sapiens
gaaaagacccggaaagaagagacacagaggagccacacccccaggcagaagagacaacacaga

SEQ ID NO: 217542 - RNA, 80 nt, Homo sapiens
caggcacaccccacacaagcacgccaaggaagaacacagacaagaagagaaaccgcaaaaagaaagacgaacaaaaaaag

SEQ ID NO: 217543 - RNA, 55 nt, Homo sapiens
acggcgacagacaagaggcgaagccgaagcgcacagacacagagagccacaaaag

SEQ ID NO: 217544 - RNA, 73 nt, Homo sapiens
ccccgagagcgggacacagcggacgcccgggacgggaggagccaaggcccgagagacacgcggggccgggacc

SEQ ID NO: 217545 - RNA, 124 nt, Homo sapiens
ggccaaaacggaagcgacaagccaagcgaccaagaagccaaagaacggcaggcaaaaagcaagcacaaaagaagaaccgaggaccaagaccggaagggaaagcccagcagcccagagggacgag

SEQ ID NO: 217546 - RNA, 96 nt, Homo sapiens
cgcgcacacaccccgagggaggaagcaaacaccagagaggcacgaaggcaaaccgagacccaggcaaaggccgggacccaggcccagagcagagcc

SEQ ID NO: 217547 - RNA, 80 nt, Homo sapiens
cccaccgccagcggaacccggggacacgacgccccaaaccgccaggagaaaaaaggagccgaggccagagcagaaaccag

SEQ ID NO: 217548 - RNA, 80 nt, Homo sapiens
aaacggcaccacgcagggcagaaacagcgggccgagggaaagccaaagcaaacagagcagaccaaccagcagccaagcaa

SEQ ID NO: 217549 - RNA, 70 nt, Homo sapiens
gcgaacgaaggaggaacggcgcagcagagcagggagggccaaagaccagaaccagaaaccgcccccaacg

SEQ ID NO: 217550 - RNA, 86 nt, Homo sapiens
cccgcgccgccgaccccccggcgccgcgccggcggcgccgacaaccccggaacgcgggcaaaaggccccaggggaccgggggaggc

SEQ ID NO: 217551 - RNA, 77 nt, Homo sapiens
gcccaccaccgagacccaccacagcaacgagaagggaccacagaccagcacgccggcgccacgaaccgagcgacagg

SEQ ID NO: 217552 - RNA, 75 nt, Homo sapiens
cacccggccgagacggcggcagcagcggcacagggcagcgcaagaccccgcacggaagcagcaagcacaggcagc

SEQ ID NO: 217553 - RNA, 77 nt, Homo sapiens
aagcccagaggaacaagggaggcgaacagggagaagacagggcagacagaaggcggagaacggaaaagcaccaggaa

SEQ ID NO: 217554 - RNA, 76 nt, Homo sapiens
caggccaagagagccgaacccaccgagccagggagacggagccgggggagaggagagcacccgacgcagagaaggg

SEQ ID NO: 217555 - RNA, 85 nt, Homo sapiens
cggaagcaacccaagcccggcgggcgcggccagcgcaggggagccacgaagcccccacccacaggcgacagaggcaccgcaccag

SEQ ID NO: 217556 - RNA, 59 nt, Homo sapiens
ggaaacaaggcaacagaaagagcaacagcagggcaacaggggaacgcccgcggacggca

SEQ ID NO: 217557 - RNA, 76 nt, Homo sapiens
ccacacaaacagcacaggaccgcgagacagcccagggcgggacccggagacccggcccccgcgagggaggagcgca

SEQ ID NO: 217558 - RNA, 75 nt, Homo sapiens
cccgaccggcaggagacgcagcagagccccgagccgagcaagggcagggagaaggaaagacaacccacagaacag

SEQ ID NO: 217559 - RNA, 78 nt, Homo sapiens
ccccccgaccaagggaaagcaccccggggacaagcagaccggaagaccgacggaagaccacaccccgagggagcccag

SEQ ID NO: 217560 - RNA, 68 nt, Homo sapiens
gaacaaagaaagggaagagacacaaggccaaagagcacagggacagaaaaacagcgcagacgagccgc

SEQ ID NO: 217561 - RNA, 56 nt, Homo sapiens
agggaagcacccacaaaagacgaggcgccgcgacccaaccgaggaagcaccagcag

SEQ ID NO: 217562 - RNA, 86 nt, Homo sapiens
ggagccggaccccggcacgcccgggaggagcggacaggccccacgaagagcccagccccccccagccggaagagcccccgagcgag

SEQ ID NO: 217563 - RNA, 78 nt, Homo sapiens
acgccaccgggaggggaccggagccgccagcgcggccaggaaagcccggcaacgcccggaacccagagcaacggaaaa

SEQ ID NO: 217564 - RNA, 102 nt, Homo sapiens
gggaaggagcggagaccacaggggccgcggccaagcgccgaaccacaccaagagaacgccaacggcaagaaagggaaggccgcaaacagacacgcggaaaag

SEQ ID NO: 217565 - RNA, 54 nt, Homo sapiens
cggaaggacaggcagacgcagaccagcgcaagccccggggcagagacacaggac

SEQ ID NO: 217566 - RNA, 81 nt, Homo sapiens
gcagaagccgcgaaaaaggggggccgagggaccagccaacgcaggcggagcacacggcggaagccaaggcgcgcccaacaa

SEQ ID NO: 217567 - RNA, 76 nt, Homo sapiens
agcagaacacaaaaaaacaaagaggcagaagcgaccagagcgaaaaacagggaggaggaacaagacaggcagaaaa

SEQ ID NO: 217568 - RNA, 73 nt, Homo sapiens
gcggaggggcacgagcgccacaaccccagaaggacagcaaaaggagaaccagggagaggaggagaaacccaca

SEQ ID NO: 217569 - RNA, 45 nt, Homo sapiens
ggcagacagcggacagaagggggaggcaacacggaaaccgaggag

SEQ ID NO: 217570 - RNA, 81 nt, Homo sapiens
cccccacgacccaaccgaaaacccgggcgaaccgcccacccgagagcgcccggcgcagaaacgccggccaccccgcgggag

SEQ ID NO: 217571 - RNA, 52 nt, Homo sapiens
accgaccaagagcaaggcccgcccaacgggggggagaaccaagaaccccagc

SEQ ID NO: 217572 - RNA, 81 nt, Homo sapiens
gaggccacccccaaagaaaaggccaagaaaaggagacggggcggcgcggccaaagcagaaaccaagaggaggaggagcgga

SEQ ID NO: 217573 - RNA, 73 nt, Homo sapiens
agaacggcgggaagagaagacacgagcacaaacgggaagaaagcacgggaaaaggccgggcccacaggggaga

SEQ ID NO: 217574 - RNA, 75 nt, Homo sapiens
agagagaaacggacaagaacggaccgaaggccacaaaaccacgacacggcaggaaggaccagaacagagaagaaa

SEQ ID NO: 217575 - RNA, 84 nt, Homo sapiens
cgccgacgccaaaggggacagcgagcggaggaggacgaggacggaaggaggagacacacagccccagacgggaggaaaaaagga

SEQ ID NO: 217576 - RNA, 74 nt, Homo sapiens
aggaaaaaaccaaacaagcaggaaaagagaaaagcggcacagagaacagaacagaaaaagcgccaaacggaggc

SEQ ID NO: 217577 - RNA, 90 nt, Homo sapiens
acgccaggggaaaagaagccggcgaagagcagaggagagggggcccaccgacacacccccacacggccaaccggccgcccccaccggcag

SEQ ID NO: 217578 - RNA, 68 nt, Homo sapiens
acgagaacgccacggaccaaagcggagagagaggagaaaaggggccccacagacagagcccgaaagag

SEQ ID NO: 217579 - RNA, 80 nt, Homo sapiens
caacagaaaaaaaaaagaccaaaaggagcagaaaacacagaaaaagagcaggacgagggcaaggaaaaaaggagacagcg

SEQ ID NO: 217580 - RNA, 78 nt, Homo sapiens
cacaccaggaaaaaggacgagcaggcaaaccgacaccagcgacacaagcgcgagggaaccacagaggacaggcgaggg

SEQ ID NO: 217581 - RNA, 75 nt, Homo sapiens
agaagcaccacaaagaaaggagaacacaaagaacccaaacgaaaggaaaaggggacccaaacaaaagaagaaaaa

SEQ ID NO: 217582 - RNA, 34 nt, Homo sapiens
ccgacagccgcagaacgcacaacaacaaccaaaa

SEQ ID NO: 217583 - RNA, 58 nt, Homo sapiens
acagagccaaaccagaagaggagggcccagaagaaaaaggaaacgagcgagagagaag

SEQ ID NO: 217584 - RNA, 73 nt, Homo sapiens
ggcaccggcccgcaccaagagaagagaagaaggagaaagacaaagccccgagaaagaccagcaccgccgaaaa

SEQ ID NO: 217585 - RNA, 81 nt, Homo sapiens
gcgcgggccgcgagcggggcgacccgaggaaacagaacgacagcccgcaccgacgccggcggccagccagagagcacgccg

SEQ ID NO: 217586 - RNA, 57 nt, Homo sapiens
accaacccgagacacagcaggcagcagcccggacccggaaagagcggcggccggggg

SEQ ID NO: 217587 - RNA, 72 nt, Homo sapiens
agaagcagagccaccggggggaagagggaacagaaacgcccccgacggaaaccgaacccaaacggcgagcaa

SEQ ID NO: 217588 - RNA, 53 nt, Homo sapiens
acccccggccggaggcaccagcaagagccaccggcaagggagagccccagccg

SEQ ID NO: 217589 - RNA, 70 nt, Homo sapiens
aacggcaagagccagaagcccggcggaaggacgccgccagccaccggcgcgaagccagaccagaccagca

SEQ ID NO: 217590 - RNA, 78 nt, Homo sapiens
aggaccagagagcaacggaaacgacgcccagaaaaaggaggaccggacaggggaaaagggcccaaaccgggagaagga

SEQ ID NO: 217591 - RNA, 73 nt, Homo sapiens
caggggaggggaccaagccggagccgccccaacagcgcagggaaggcaacacaagaacgacaaagcggccaag

SEQ ID NO: 217592 - RNA, 67 nt, Homo sapiens
ggacagccaagcaacagcccagcaaggcagcgggaagcccgaaccgggaggcagaccacagcggcgg

SEQ ID NO: 217593 - RNA, 58 nt, Homo sapiens
acggcacaccaggcggcaggggcaaccagacgggccaaggacccgggccccacacaac

SEQ ID NO: 217594 - RNA, 79 nt, Homo sapiens
gggcggcgggcaccgcagcgccggaagaggcgcaccagccgaaagggcagcaagacacgaagccgagaaagagcagcga

SEQ ID NO: 217595 - RNA, 77 nt, Homo sapiens
gaaaccgaaaacaggcacggaccaccaagcagagggcgagaaaaccagacgagagacagaagacgaaagggcaagaa

SEQ ID NO: 217596 - RNA, 69 nt, Homo sapiens
agagaacagccgcgcggcgagcggcccgcacaaggccggcaggcagaaaaccgcgcgggagggggcaag

SEQ ID NO: 217597 - RNA, 70 nt, Homo sapiens
gcacggcgcacagcagagacaagaaagcaccccacgaacaaccacaggaagagacacacaagaaacaaaa

SEQ ID NO: 217598 - RNA, 82 nt, Homo sapiens
ccgccccaccaccgcgaggggcgggcgaggcaccggagacccgagcaccccaacgggcaggagacggaagcggaagcacacg

SEQ ID NO: 217599 - RNA, 71 nt, Homo sapiens
accagaaaggcccacaccaacaaacagaagacccacgacggaaaaagggccagaagcgagcaccaccccag

SEQ ID NO: 217600 - RNA, 51 nt, Homo sapiens
ggcaagacaacaaacaccgaagcccagagaaggagcagcggggcagggcca

SEQ ID NO: 217601 - RNA, 74 nt, Homo sapiens
ccccggaccagaacggcacggccacgggcgggcaggcaaggccgggaaacgaacaagggcggagggaggaccag

SEQ ID NO: 217602 - RNA, 72 nt, Homo sapiens
ggagcacaacaggcagacagacaagggaacaagcaccagggccaaagacccccaggggaagaggcaggcccc

SEQ ID NO: 217603 - RNA, 82 nt, Homo sapiens
agaaggagggacgcaggcgcaggccagcaagcagagggaggagcgaacaagacagagaaaagaaaggcacgaaagcagacaa

SEQ ID NO: 217604 - RNA, 68 nt, Homo sapiens
gcgcagggcacaccagaagaggcaggaacgaaccaacgcaggaccaggaaaccaagcgacagacagcg

SEQ ID NO: 217605 - RNA, 71 nt, Homo sapiens
gggggaagcggcccagggaggacagagcgccaaggccgcgggcaggcccgggaacagccagcgcagaaaac

SEQ ID NO: 217606 - RNA, 101 nt, Homo sapiens
gagaggacaggcggaggccccagggaagcgcagaaagcaggcgaacccgcggcgcaaaacggcggagcaggagcaaaggagcaagaaaccagacccggaaa

SEQ ID NO: 217607 - RNA, 52 nt, Homo sapiens
accgaaaggaccgcaaaaaggccaaggggaccaaaacaaaacgagagcaaga

SEQ ID NO: 217608 - RNA, 78 nt, Homo sapiens
cgacagaacggagccggaccaggcagacgggagcgggccgagaaaaaccacagagacacacgcaagccgacgggggca

SEQ ID NO: 217609 - RNA, 80 nt, Homo sapiens
gacgcccgggaagagggggagcggccagcgagagccagggcccaaagaaccggaagcagcgacagcagaaaccacagagg

SEQ ID NO: 217610 - RNA, 74 nt, Homo sapiens
ccagagacggcccgcggccggcgcgcagggaagcgaggacaacggaaacagaaaagagaaagcagcgccaagag

SEQ ID NO: 217611 - RNA, 75 nt, Homo sapiens
gggagaagcaggcgcggcggacggcccccgcagcccaccgcacgcagcccacgcaaagcacgcagagacggagga

SEQ ID NO: 217612 - RNA, 59 nt, Homo sapiens
cccaaggcagccggaaacgagggcaaagacaggcacagaggccaacacagaccaaggcg

SEQ ID NO: 217613 - RNA, 74 nt, Homo sapiens
cgaaaaagcaaagagagagagagaaagagacaacccagaaaagaaaaggccaggggcgccgaaaaacccgggaa

SEQ ID NO: 217614 - RNA, 82 nt, Homo sapiens
cccagcgacaaggaaaagacacaccccaacaggacagaaccaggaacaaggaaagaccccacccaacccccgagaagaaacg

SEQ ID NO: 217615 - RNA, 93 nt, Homo sapiens
ccgagaagcacacgaccggcgacagcagccaggagcagagcgacagcggcgagcagaacacggcgagcggagcgcgacaagcgcccaacgaaa

SEQ ID NO: 217616 - RNA, 79 nt, Homo sapiens
ccaaccagcgaagagcgacaagccgcggcagccgcggaccaccgccgccaggggccggcccagggagaacgcaaaacca

SEQ ID NO: 217617 - RNA, 80 nt, Homo sapiens
gaggagccccggaccagaccgggccaaggaggcagcgggaccggcggccaagacgccaccccgccccaccgaggccggcg

SEQ ID NO: 217618 - RNA, 48 nt, Homo sapiens
cgaaggcgcaagagggaggcgcacacacaggagcgggcgggcagcggc

SEQ ID NO: 217619 - RNA, 78 nt, Homo sapiens
cccccacacccggggccagcccaggcaaacgagagcgccagggacggaagcgacagcgcaggaggcggggcaagggcc

SEQ ID NO: 217620 - RNA, 81 nt, Homo sapiens
ggaccgggcacagacgcaccaaccggagacgccagggcagccgccaagaccgcgagacagcacccaagaaaacccaggccg

SEQ ID NO: 217621 - RNA, 72 nt, Homo sapiens
ccacacccgccagaagagcacagacaacgaagaaaggagcacaaaagaacaaacacacgagccaaaagcaca

SEQ ID NO: 217622 - RNA, 34 nt, Homo sapiens
cagacccagcaccaccaagccccagcaaacaacc

SEQ ID NO: 217623 - RNA, 70 nt, Homo sapiens
cgcaaagggcagagaaaaaagagcagcgaggcgaaagcaaccacagaacaaccgagaaaggaaaccaaac

SEQ ID NO: 217624 - RNA, 72 nt, Homo sapiens
cccgaggagcgggccgccgcagcaaagaagggcagagacacggagcaacaagccccgacacggggaagaaaa

SEQ ID NO: 217625 - RNA, 83 nt, Homo sapiens
cagccgccagccgagaagaggcacacaggggaggggggagacacgaaccgcgcacccgcgagcgcagacgccaaccggcaccg

SEQ ID NO: 217626 - RNA, 69 nt, Homo sapiens
ggagccaggaaaaaagaagcgaagcaaaccggagcagaagagccgaaacgagcagcaaggcgaaccggc

SEQ ID NO: 217627 - RNA, 81 nt, Homo sapiens
gaaccgacggcacaggagaaccaggagccggaaaaggggcggaggcccagcgcacccggacgaccggcgagcccggggcag

SEQ ID NO: 217628 - RNA, 68 nt, Homo sapiens
gggaccacacagccagaacagggacgccagccgcagaggaagacccggagagcgaaaggggaccagac

SEQ ID NO: 217629 - RNA, 75 nt, Homo sapiens
ggaaccggacagaagcgcggcggcgcggcggggggggacagggcaagaggcagaacgccaggccaaaaagcaaca

SEQ ID NO: 217630 - RNA, 77 nt, Homo sapiens
gacaaaggaagccccagccccaggcccggcagcacacagcacgaccaccacgaaacgccgaagggaccaggcagacg

SEQ ID NO: 217631 - RNA, 53 nt, Homo sapiens
acccaaaggccagcaagcaaaacacgcagaaccaaccagcaacgccacgggag

SEQ ID NO: 217632 - RNA, 75 nt, Homo sapiens
cgaccgcggaccggcgccccggcgcgaagaggcggaccggacggccgaggaggcaggggaagcacaaaagcgcac

SEQ ID NO: 217633 - RNA, 89 nt, Homo sapiens
agagacgcccaacagcccagcccggggcagggaaaggagaaacaccagacacggaagccacgccgaccccggggcccagcgaccgacag

SEQ ID NO: 217634 - RNA, 81 nt, Homo sapiens
cgccgcaggcgccgcacggaggcgcccggggacggggccgcagggaggggcaaaagcagcgagagcaagcagaacggaacg

SEQ ID NO: 217635 - RNA, 106 nt, Homo sapiens
cccaggcgcggcgcggcggggcgagcgcgggccgggccgcaggagccgagcaggagaccaggaagagcacgggacaggaagaagcaaggccgacgcagcccggcca

SEQ ID NO: 217636 - RNA, 83 nt, Homo sapiens
gccgagcgcacgccgccgccgccccgcagcaaaagagccaacacccaggccaggccgcccggaaggaggccgccacgccccgc

SEQ ID NO: 217637 - RNA, 67 nt, Homo sapiens
agcgccgcgggcccgcggcccgacaggaagggaaggggcggagacgggcggaacgcaggaggccaga

SEQ ID NO: 217638 - RNA, 81 nt, Homo sapiens
ggcacggcccggggccgggagcgcccgaggaacacgccgcagggaagaaaacgccagagaagcagagcagcccggagcgag

SEQ ID NO: 217639 - RNA, 73 nt, Homo sapiens
cccgagagagaaggaaaaggcacacacacccgcaggagagcgccggagaaaggaagaacccagacacagaggg

SEQ ID NO: 217640 - RNA, 71 nt, Homo sapiens
gccggaaccacagcagcaaaccagcacgggccagagaacaagcccagacagcaagacgcgagcgcagggga

SEQ ID NO: 217641 - RNA, 60 nt, Homo sapiens
gcagaaggagccaaaaccccaccagcggagaagacacccaggcaaccaaccaccacaaca

SEQ ID NO: 217642 - RNA, 55 nt, Homo sapiens
gggccccaaaaccggaaaggacgcgaggacagggcacaccacaaagaacaaacac

SEQ ID NO: 217643 - RNA, 74 nt, Homo sapiens
ggcaaggcaccggagcggaaaaaccgaacaaggacacgccaccacaccgacccacgacaagaacggagagacga

SEQ ID NO: 217644 - RNA, 74 nt, Homo sapiens
gcgccgcgccgccgcccacaagcggcgccgcgccccggccgcacggcacaaaggagcccgcgccaagccgaaca

SEQ ID NO: 217645 - RNA, 77 nt, Homo sapiens
gaacaccccgagcgaggccaacccaggaggaggaggacagagcacaaagaggcaggacaacacaggggggaccaacg

SEQ ID NO: 217646 - RNA, 48 nt, Homo sapiens
cagcagccacgacacccaagccgcacagggaacaccaagggagccggg

SEQ ID NO: 217647 - RNA, 67 nt, Homo sapiens
ggagcgagacaggagcgccacgggcacggcccccgagaaacgaagaaggggaagacagagcaagcac

SEQ ID NO: 217648 - RNA, 55 nt, Homo sapiens
cgggccccggaacagccgggcagcccgcaaggggggccaggagagaggcacacca

SEQ ID NO: 217649 - RNA, 50 nt, Homo sapiens
accaagaaccaggccgggcaaaagacaggagaagaaggagaggcaccagc

SEQ ID NO: 217650 - RNA, 55 nt, Homo sapiens
agcagccaagcgccggagccggaaccacccgccccgaccaggagaggacagacag

SEQ ID NO: 217651 - RNA, 72 nt, Homo sapiens
caggaggaagcgaggccagacagcaagagcacccgacccacaggccagagagcgaaccggacggcccaccac

SEQ ID NO: 217652 - RNA, 75 nt, Homo sapiens
agggaaagggaagacacgaaaaaagagaaagggccaacggcgagaggccagcgaacgaacacgaagaagaccaac

SEQ ID NO: 217653 - RNA, 83 nt, Homo sapiens
ggaggggacaaacgccaaaggaccaggaggcagagcgagccgccggcacagagcgcagccgggaggccggaagaccacggaca

SEQ ID NO: 217654 - RNA, 65 nt, Homo sapiens
acccaagggcgcaaaaaagcccaaagacgagcgcaaacgagcagcaaaacagccagccacagacc

SEQ ID NO: 217655 - RNA, 78 nt, Homo sapiens
acgcgaacggcgaacaagagcaacgaggagccgccgcagggcgaaggcgaggacccccagcccccagagccggccccc

SEQ ID NO: 217656 - RNA, 55 nt, Homo sapiens
agacggcgcgaggcgcgggcacagggcccagaccaagccccaccaacagaagagc

SEQ ID NO: 217657 - RNA, 76 nt, Homo sapiens
acaaaacagcagacccaagagcagcggaaaagaccagcacagaggagccaggaagagacaagcaacgaggaaaaga

SEQ ID NO: 217658 - RNA, 69 nt, Homo sapiens
aacaccaaaaacaaaacgaaccaggacggcaagacacgacaccaaaaaagaagacgggacacacagaaa

SEQ ID NO: 217659 - RNA, 77 nt, Homo sapiens
cacaaaaaaaccaaagaggagccagaccagaccaccagcccgcaacccagaaaggaagaaggccgcaaagccaaagc

SEQ ID NO: 217660 - RNA, 84 nt, Homo sapiens
ggagcaggcggagaccgcaggcgaccccgcagcggccgggcgcgcggcccccacccaggccgacagcaggaagcaccagacacc

SEQ ID NO: 217661 - RNA, 75 nt, Homo sapiens
gggcaagacaagccagaacgagaagcgcaccacagagcgccggcgaggggcgaggcaggaccgccccgccacacc

SEQ ID NO: 217662 - RNA, 59 nt, Homo sapiens
gggcgagcggcggggagcggcgaagccgcgggcgaggcgaccaggccgcgggaagcgcg

SEQ ID NO: 217663 - RNA, 85 nt, Homo sapiens
ggcggcgggcggagacggggcgcccccccgccaaggcccggcgagcacacccgccgggcaaacggacccccgcccgaccgcccgc

SEQ ID NO: 217664 - RNA, 78 nt, Homo sapiens
ccacaaggcacaacaggaagggggcccgcagggccaggagcagggaaaggacaggggcgacacccaccaacaaacggc

SEQ ID NO: 217665 - RNA, 69 nt, Homo sapiens
acggggaagcgagagaggagggaacaagacaccaagggaaggaaacacaaaccagcacgaagaaaagcc

SEQ ID NO: 217666 - RNA, 75 nt, Homo sapiens
aaagcgcagaaagggagaaacaaaacgccaaggcacccagagaggcccaagcaacggaaacccagcaagcagaaa

SEQ ID NO: 217667 - RNA, 71 nt, Homo sapiens
cagagcgagaccaggaaagaagggggcagaagagggcaaaggagagccagagcgaacccaagacggggcac

SEQ ID NO: 217668 - RNA, 85 nt, Homo sapiens
ggaagacggcagcggccccggagacacaccgcgggcgacgcacgaggcacacaggaaggaggggagcagggacgcgcggcggcgg

SEQ ID NO: 217669 - RNA, 68 nt, Homo sapiens
cgaacaaaccccggaaacacaaaaaccaggagagacgcgaccaggacagcagaccacagcccggcagg

SEQ ID NO: 217670 - RNA, 84 nt, Homo sapiens
cggcgccggccggccgggcggcgagccgagcgaggcagccgagccgcgcgaagcggcagaacaaaaagcaagaaagaaacacgg

SEQ ID NO: 217671 - RNA, 56 nt, Homo sapiens
cacacaggaggcgcagaagacgcaggggagcgacacccaacaggaagaagaccccc

SEQ ID NO: 217672 - RNA, 81 nt, Homo sapiens
cgcgaagcgccaaagccagacaagccacaaaaggggcccgaccccccgagccagggccaggcggccggccgcggcccgcag

SEQ ID NO: 217673 - RNA, 76 nt, Homo sapiens
cggacccagacccagaggcagagccgccccagcagcaggggcgccaggcaaagccgcagcgcaaaaccagcacagc

SEQ ID NO: 217674 - RNA, 49 nt, Homo sapiens
gaccaccccccccagcaaaagcgccaaagggggaacaaacgacggggaa

SEQ ID NO: 217675 - RNA, 68 nt, Homo sapiens
cagagcgagggaggagagagggagagccaaagaagaaagggcaagcagaaaccgggaagggggcgccg

SEQ ID NO: 217676 - RNA, 71 nt, Homo sapiens
ccacggcagaaccaaacccaccgcaagacagggaagccggagaaccccgccaaccagaggcaagcacaaac

SEQ ID NO: 217677 - RNA, 73 nt, Homo sapiens
aggcccccaagaccggccgggaggagggcaacgcggaaaggccaggaagccgcgaaaccacggcgcgagcccc

SEQ ID NO: 217678 - RNA, 54 nt, Homo sapiens
caggccaggggccggccagcacagagagaggccgcacagcccacagagagaaag

SEQ ID NO: 217679 - RNA, 74 nt, Homo sapiens
gcagcgcaggggcgggaaagacccaggagaagccgcccaaagaacgcgccgcagccgcaggaagcgaagccgaa

SEQ ID NO: 217680 - RNA, 52 nt, Homo sapiens
gggacaagaagggcaaagccgaaaaggggaccaacagggcggaacagccaca

SEQ ID NO: 217681 - RNA, 83 nt, Homo sapiens
aaggcgcgaggaggaaaggaggacgagaaacgaaggaggcccaaccacaaaaggagccgacggaacccagacggagaacaaaa

SEQ ID NO: 217682 - RNA, 70 nt, Homo sapiens
caagaaaaccacagcacagaaacaccacggcggcgccgaggccccaaggcacaagcagaggaaccaggga

SEQ ID NO: 217683 - RNA, 89 nt, Homo sapiens
gaccaaggcaacaaggacaacaagagacgggacaagacagggcaaaggacagaccaggccagcccggaacccggacaaacaacaccagc

SEQ ID NO: 217684 - RNA, 76 nt, Homo sapiens
agcggccaccacacggggaaaagcacagggccaggaagcagagggacagccaggccagaaacaggcccagcaaccc

SEQ ID NO: 217685 - RNA, 79 nt, Homo sapiens
gaaccaccaggagagcaagccggccacacacggcacaagggaagagaaaagacacagggacaagagcgccagccgagac

SEQ ID NO: 217686 - RNA, 75 nt, Homo sapiens
cgccggacagagaagcccccaaggagcgcagacaacaggcacaaagagagaaggaacacccacagggcagacaga

SEQ ID NO: 217687 - RNA, 77 nt, Homo sapiens
acgcccacaccgacccgcccgccggcaagggggacgcaaggcggagcccggcacgggcaaacagagcaggcagggaa

SEQ ID NO: 217688 - RNA, 73 nt, Homo sapiens
gagcaggggagaaccaagaaccgggcaggggggccggacaagggagggcaagaacccaggaggagggcaagcc

SEQ ID NO: 217689 - RNA, 79 nt, Homo sapiens
gcagcaaggcgacgggagcggacacgcccgggcagggcccaccccgcgcccgacagcagagaacaaagaaggcccccac

SEQ ID NO: 217690 - RNA, 86 nt, Homo sapiens
caagcggggagcgcccgcgacagaggagggaggaaaacaaccgagggcagaggcggaagacagccagaggagggggagagcggagc

SEQ ID NO: 217691 - RNA, 51 nt, Homo sapiens
accgcagaaagcaagaacgcgcaagaagggcgcaaaaaccagacaccccac

SEQ ID NO: 217692 - RNA, 93 nt, Homo sapiens
cgacaagaggcagcaaaaaaaggcacacaccaccagggcagggaggacgaggcgaaacccccggcggcccccgacccccgaccccccggggac

SEQ ID NO: 217693 - RNA, 85 nt, Homo sapiens
agacagacacacgcccacaaagcccagaagaagggcaccagcgaaggccgaggacgagacccgccgggggaggcacgacgcgggc

SEQ ID NO: 217694 - RNA, 71 nt, Homo sapiens
cagggacagagcgcagcaaaaaaggcaccaagaagagagaaagagaccaagcaagcagagagggcaccaga

SEQ ID NO: 217695 - RNA, 82 nt, Homo sapiens
cgagcccccgcgagcagcccagccagcagcacaaaggaggacggaggaaacagagcagaaacgaaaggagaaaaaccaagaa

SEQ ID NO: 217696 - RNA, 78 nt, Homo sapiens
gggaccaggaaggcagggccgccccgcgcgggccaggagggaagggccagaacgagaaagaggccgggggggcaaagc

SEQ ID NO: 217697 - RNA, 46 nt, Homo sapiens
gaaggggggcgaggaaccacacccagcccagagccccaaaagcacg

SEQ ID NO: 217698 - RNA, 65 nt, Homo sapiens
caccggggcccggcgcccgggcccgccccggaggggcccccaccggcccccccacagccgccggg

SEQ ID NO: 217699 - RNA, 44 nt, Homo sapiens
gacagaacgaacgaaacaccaaaacaacaagcacagcaacaacc

SEQ ID NO: 217700 - RNA, 78 nt, Homo sapiens
cggaaaggagaagaacagcacaggggaccaacgcaagaacaagccagcccgagaggaagccccccacaggacaccggg

SEQ ID NO: 217701 - RNA, 69 nt, Homo sapiens
acacgagccagggaggaaggcgcaggagcccggccaccacacccagcggacacggggacccggcaaacc

SEQ ID NO: 217702 - RNA, 76 nt, Homo sapiens
ggcaaagaaaacagaccgagggaaagaggcaaaaccgagaaaaggaccaaagagagcgagaaagcccaagaaaaga

SEQ ID NO: 217703 - RNA, 72 nt, Homo sapiens
gccagcggagcgaccagcgaccaggcacaggaccagggcccgggccacagcgggggggcacggccggccacc

SEQ ID NO: 217704 - RNA, 81 nt, Homo sapiens
cgaccaccccagcaccagcccagagggaaagcacaccaccccagccaggaccagaagcagcagccccagaagccccgaagc

SEQ ID NO: 217705 - RNA, 85 nt, Homo sapiens
cagaccggggccgcaaccggcagccccacccaccggcccacccacaagcgcacaggaccggggagaagggcagggcccgacacag

SEQ ID NO: 217706 - RNA, 40 nt, Homo sapiens
ggcggcggccccgcgggcgccagcagcggcccgcgcaagc

SEQ ID NO: 217707 - RNA, 86 nt, Homo sapiens
ggaaagggcagaggcccaacgcagaccgaggcgaagcgcgcagcgccgggggcaaagaaaaaggagagaaaaagaggcaaaacaac

SEQ ID NO: 217708 - RNA, 61 nt, Homo sapiens
gccaggggagcccagcggcgcgccggcagcaggcaggccagacggcacccgacagaagcag

SEQ ID NO: 217709 - RNA, 82 nt, Homo sapiens
gcagaggggcgcagagcaagccgacgagaagcaagaacacccaaccccccgaccgccgcagaaagacaaccccccaagccgg

SEQ ID NO: 217710 - RNA, 74 nt, Homo sapiens
agaagaggacagcaggcaacaggacccagagagggaccagggccaaagaagagccggggggcaggcggacagca

SEQ ID NO: 217711 - RNA, 78 nt, Homo sapiens
gacccggcccaggccccacaccaccgcacgcgcgcccgccgcccgaggagccccgcgcgaggagagcgggggcggggg

SEQ ID NO: 217712 - RNA, 63 nt, Homo sapiens
cccccaaaaccacaaacgccacgcagaacagccaccaaggacggcccccaagacagaacaccg

SEQ ID NO: 217713 - RNA, 53 nt, Homo sapiens
acgcgacacaaacaaaagcgccgccagcgaggaacaacgcaggaagcgaaggg

SEQ ID NO: 217714 - RNA, 83 nt, Homo sapiens
aagcaccccgaagcgccggcccgcaagcgcaaaaccaacgcaacacccagcaaagccaagccaaccccacagcgcagccaagc

SEQ ID NO: 217715 - RNA, 75 nt, Homo sapiens
gcaaacggagccaggcacaagaaaaaagcacagcccgacagaccgaagaaaagagaaacacaagaggacagacaa

SEQ ID NO: 217716 - RNA, 98 nt, Homo sapiens
ggccgaggacggggacagcgacgacgcggaggcagagaagggaacgcccggcccagccccgagaaggccagaaagcccggaagcaaggaaggaaagga

SEQ ID NO: 217717 - RNA, 79 nt, Homo sapiens
ggagaagcacagggcgcccggaagaggacgaagaagcagcgcagccaaaagcagggacgcggacaaaggggcaaaggcc

SEQ ID NO: 217718 - RNA, 70 nt, Homo sapiens
cgaaccaggaccggacccggacccaaaggccagcaagcccagcccacgccccggacaacgaaaaagaggc

SEQ ID NO: 217719 - RNA, 53 nt, Homo sapiens
aaaaagaaccgcagacagcgaaaagcagcagggacggggcagagacggcacac

SEQ ID NO: 217720 - RNA, 61 nt, Homo sapiens
cgggccagggacacggccaccggcagggaggcaccgccccaacccccccccgcccggagaa

SEQ ID NO: 217721 - RNA, 91 nt, Homo sapiens
gaaaaacggagagccacaaaaaaggaagcgaaagaaagggccgagaaagaagagaggaagaagaggaggaggaggaagaggaggaagacga

SEQ ID NO: 217722 - RNA, 78 nt, Homo sapiens
cgccaggggacacgcccaccggacccgaaaagacccaggaccagaggaaggcggggaggcggaagaccaggagaaagc

SEQ ID NO: 217723 - RNA, 80 nt, Homo sapiens
acaccgggacacccgcgaggccggaaaagggaaacacaaagaagacaccagaagggccagcaccacgacaacacggcgac

SEQ ID NO: 217724 - RNA, 62 nt, Homo sapiens
caaaaggcaggaagagcaagagaaacaggcaggagaccaacaaaacaaacccgggaaaaaca

SEQ ID NO: 217725 - RNA, 72 nt, Homo sapiens
ggagacgacgccagaagcaaacaaaagcaagcggccgggaaaaaaagagaacagacagccacgcagacggaa

SEQ ID NO: 217726 - RNA, 53 nt, Homo sapiens
ggacgcgccaggcacagcagcaggggaaccagaagaggccaaccagcacgaac

SEQ ID NO: 217727 - RNA, 79 nt, Homo sapiens
cgagcggagaggagagcacacggcaccgagggaggcgccgcgcccggggagacagaaacgaggcgcccccagcagcagg

SEQ ID NO: 217728 - RNA, 73 nt, Homo sapiens
cggagaacaaaccgcgagaagcacgcacgccaggggcagaaacggcgaccccgcccccccccggcgggccccg

SEQ ID NO: 217729 - RNA, 84 nt, Homo sapiens
caaagcaagaagccaggccaggccggccaccgcgccgcgccgcgccggcccagggagccccggcaagcaagcccgagagagacg

SEQ ID NO: 217730 - RNA, 55 nt, Homo sapiens
cgcagggcgcccccgcaaaacaccaggacagccaaacaagggagaccacccacca

SEQ ID NO: 217731 - RNA, 63 nt, Homo sapiens
agcgccagacggacacaccaaaggccacaccacgaggcgagccaagagcgaggcagccgccgg

SEQ ID NO: 217732 - RNA, 75 nt, Homo sapiens
ggggaccagcgaccgacaagccaggaaccagccggagagagaggaagagccccggaggggagcccccgaaggaca

SEQ ID NO: 217733 - RNA, 69 nt, Homo sapiens
gacaacgaaagccaggaaagagaaaaccaggcaaaagggagagccagacgcagagacggcgagcaaagc

SEQ ID NO: 217734 - RNA, 73 nt, Homo sapiens
aggcaaagaaagagcaggacacaacccacggcaaaccgcaggaacagacaggaaacccacccaccacccgaga

SEQ ID NO: 217735 - RNA, 77 nt, Homo sapiens
ggcccgcagggacaggccggggacacccagggccagcaaaacgcagcagagacgcaaaggacaccgccacggaccag

SEQ ID NO: 217736 - RNA, 70 nt, Homo sapiens
ccgccgggacccccaggacgacggaccggacacaccggacacgcgccaaaccgacgaaaggcgaggggag

SEQ ID NO: 217737 - RNA, 53 nt, Homo sapiens
gagggggggcgcgccggaaaccggagcgcgcagcagggaccccgacggagaga

SEQ ID NO: 217738 - RNA, 71 nt, Homo sapiens
agggccgccggacgggccagcagggacacaaccaggaggacaggcaacccaaggagacggcgcgggggcgg

SEQ ID NO: 217739 - RNA, 69 nt, Homo sapiens
aaagcagcccaccaaccagcaaacgaccccaagaagaagcggaagaggagccgcggaaccaagacacaa

SEQ ID NO: 217740 - RNA, 81 nt, Homo sapiens
aacccgcggccacgaccagccaccagaagaaaggacaagacgcagcagagccaaggccaaaggcccgccaagaacagaacc

SEQ ID NO: 217741 - RNA, 57 nt, Homo sapiens
aagcaaccaccagcagcccccagagcggaacacaggagcccaaaagaaacagggcgc

SEQ ID NO: 217742 - RNA, 64 nt, Homo sapiens
ccgcgcagcagaagacggagacaagagcccacagcacgccagccaaaagagaaaaaaagacaaa

SEQ ID NO: 217743 - RNA, 76 nt, Homo sapiens
ccacgccccccgggcggcaccagagcgcggacgcccaggcggacgaggccggaggaaagcgggaacacacagacca

SEQ ID NO: 217744 - RNA, 83 nt, Homo sapiens
ggaaggaggccgagccgggaccaggcccgggggcggcggccacgccaaggacggacaagggaggcgaggacggacaaaaggaa

SEQ ID NO: 217745 - RNA, 73 nt, Homo sapiens
gagagcacgggaaacccggggacgcccggaggggccccggaaacagcagaaacgaggaaaagacacagagaag

SEQ ID NO: 217746 - RNA, 82 nt, Homo sapiens
cgccgacgcgcgggacgcaacacgcagcggcccccagcccacagggcagcacgggggagggaccaccacacaacaagcgcag

SEQ ID NO: 217747 - RNA, 56 nt, Homo sapiens
agacacgaaagaaagccgacagcaaggggacaacaggagaagcggaaggagaccac

SEQ ID NO: 217748 - RNA, 74 nt, Homo sapiens
caccagcgcccgcacaaggaagagaggaagaaggcaaaaggaacagcgaaccacaaaaaacaaaaagacccggg

SEQ ID NO: 217749 - RNA, 79 nt, Homo sapiens
gggaggaagcaggcgccaccggcaaacccaccccggccggcgggacccggaggagcacccgaagcaaccacaaagccag

SEQ ID NO: 217750 - RNA, 79 nt, Homo sapiens
ccggcaagcagccgggagcggcagccagacacaaaagacaaccgcagcgcccacagcgccaggagaagacaccacaccc

SEQ ID NO: 217751 - RNA, 62 nt, Homo sapiens
aggaagccgccacagcacaaacggcggcaaccggaaacaagaccgcgcacgggagcgcaagg

SEQ ID NO: 217752 - RNA, 68 nt, Homo sapiens
agcaggagagcagcaacggcagcagcaggaacaggaacagccaggagcacaaacaaaagacggaggac

SEQ ID NO: 217753 - RNA, 80 nt, Homo sapiens
cccgcccacagcgcggcgcggccgagagccgcggcccggcggaaaggacagcaggaaaaagcaacacaggccaaggcagc

SEQ ID NO: 217754 - RNA, 66 nt, Homo sapiens
ccccgaggacggaggcacagcgcagcgacgagagggggcagaggccaagaccggcccaagaaggag

SEQ ID NO: 217755 - RNA, 81 nt, Homo sapiens
gaagggaagcggccaaggcacggaggccgcggcaagagaagccgagccaggccgcggagagccgcccgcgcccaccgccgc

SEQ ID NO: 217756 - RNA, 71 nt, Homo sapiens
cccgcgccacagccaccagagccggcagcaaagagggaacaggacccagcagccagcgaagccccaaggaa

SEQ ID NO: 217757 - RNA, 61 nt, Homo sapiens
gcccgcccaaagaaagaaggagggaagaaagaagagccacccaccaaggccaaaacaacca

SEQ ID NO: 217758 - RNA, 60 nt, Homo sapiens
ggaccaagaagaagaaccagcaaaaaccaggagagaagacgaaaaagaagaagcagcgaa

SEQ ID NO: 217759 - RNA, 78 nt, Homo sapiens
caacaacacacagcggcccgggcacggcaacgggaggcccaaggaaagaccacagcaagaccacgcccccagccgggg

SEQ ID NO: 217760 - RNA, 77 nt, Homo sapiens
cccagacaagccaagacagccggagcagaggagcgccgccggaggacggaacgcagaaacggcacggcggggacagg

SEQ ID NO: 217761 - RNA, 59 nt, Homo sapiens
ggggaaccgccaaagcccgggcgcggaagaagccaagaaaaggcaagacaacgcagaaa

SEQ ID NO: 217762 - RNA, 61 nt, Homo sapiens
caccggcccagcacgcgacgccgcccgccggagcagaccaagcaagcacaagcgaggggaa

SEQ ID NO: 217763 - RNA, 74 nt, Homo sapiens
gagcccaagaggaggaagacggcggcaaccacagcccgaaggcccaaaagggaacagacacaagcagacaacac

SEQ ID NO: 217764 - RNA, 65 nt, Homo sapiens
ccaggagcgccacgcgcggaaggcagcgcccagcagcgcaggcaccagcgagggagcaccagacc

SEQ ID NO: 217765 - RNA, 73 nt, Homo sapiens
gaagggaccacccgccaccgagagccggaagggggccaggcagggggagcaggaaagagagaagcggcccgcc

SEQ ID NO: 217766 - RNA, 62 nt, Homo sapiens
aaggcggccgagcccaaaggccgagggggagacacgcccagggagaccacgccccagcaacc

SEQ ID NO: 217767 - RNA, 73 nt, Homo sapiens
cccgggaggaaaccgacggcgcaagagaaacgcacacgacgcagccagagcagcaagaggccaaggggacgac

SEQ ID NO: 217768 - RNA, 70 nt, Homo sapiens
ggaccggaacaggcacaccccacacaagcacgccaaggaaaaggacacgaccaaaccgcccgagcaggca

SEQ ID NO: 217769 - RNA, 76 nt, Homo sapiens
cccccggggggcccccagccgcagacacccagggggcggcaagaggcggcaggccgaccgagagacaagagcgcgg

SEQ ID NO: 217770 - RNA, 57 nt, Homo sapiens
ggggccacaaagccccccggagacgcaaccaagggacaagacggacagaaacgaaca

SEQ ID NO: 217771 - RNA, 80 nt, Homo sapiens
gaggccggggaccaggacagcgcgaggcgagggcagagccgcggggcaagacaacacaacaccaagcggaaaaacggaag

SEQ ID NO: 217772 - RNA, 107 nt, Homo sapiens
gagaagggggcagcccacgggaacgaagaagcccacgcagaaacccaccagacgggggcgcccaacccccgaccggaacagggaccaagcggggggaaggccagcgg

SEQ ID NO: 217773 - RNA, 85 nt, Homo sapiens
agaaaagcagaaggacagacgccgccagggccggaggcgaggagacccacccgccaaggccccccgggagggccaggcgccgccg

SEQ ID NO: 217774 - RNA, 89 nt, Homo sapiens
gaacaaggccagagaaggggaggaaccgaacgagcggcccacccgggcaggagaggccgaccacccggggggcccgcgcgaacacaagc

SEQ ID NO: 217775 - RNA, 71 nt, Homo sapiens
ccgcaggaccgcacccgcggagacggacgcccgggacacggcacaggagggcaagaaccccagaggagggg

SEQ ID NO: 217776 - RNA, 78 nt, Homo sapiens
ggaaacggcaaagcgcagcccgcagacagaggggcgacgaccgcacaacagaaaaagggagcgccaaaaagaaaagac

SEQ ID NO: 217777 - RNA, 80 nt, Homo sapiens
accaaacaagacaacgagcgaaagcgaaaaacagcgaccagagaagccgggcggacagagaagggaaacaaccagaagca

SEQ ID NO: 217778 - RNA, 75 nt, Homo sapiens
cgccgcggcgaggagcgagcgcgcgaggggcggccgagacccgacagaagcaaggggagacaggcgcccgccgcc

SEQ ID NO: 217779 - RNA, 80 nt, Homo sapiens
gggaaaacacaccggagacggggggaaacaggcgaggcggcggcgcccggagggcagcgaggcccagccccgaggacagc

SEQ ID NO: 217780 - RNA, 76 nt, Homo sapiens
gacgccccgcccgcccagaagcagcaagaacggcagaaggggaaaagacggacaggagaaaaggaacccccgcgag

SEQ ID NO: 217781 - RNA, 93 nt, Homo sapiens
ccgagagccgcccgggccagcggccgcgcacccccggccggaggcaccagcgagaaccagccaaaaaagggcagaaccgacaacggggacccg

SEQ ID NO: 217782 - RNA, 73 nt, Homo sapiens
aaggcgacagccacaggagacacgcgcgcacgaagcccagacaagccccaccccgaggcagaaagagcaaggg

SEQ ID NO: 217783 - RNA, 68 nt, Homo sapiens
agaacccaacggaccaaaagcgcagaaagccacgcaaaaggaaaggcggcagaagcaaagagacagcg

SEQ ID NO: 217784 - RNA, 83 nt, Homo sapiens
agggaggagacggagcgcagcggcacgcacgcgaagacagcggcagcgacgaagaaaaggggggacaggcacacaggccacaa

SEQ ID NO: 217785 - RNA, 70 nt, Homo sapiens
caccaaggccgcgccgcccggagagagagaagagagaacaaaccggggcgccaacccgaaagcagcgaga

SEQ ID NO: 217786 - RNA, 85 nt, Homo sapiens
cacacgcagcaggcggacgggccggcgcagcaggaggagcggagaagaagcaggcgccccccaccagccacagacacagacgaca

SEQ ID NO: 217787 - RNA, 84 nt, Homo sapiens
gcgcgggagccggggcaccacagagagcggggcgaaccgaccaagaacaacacccagagggccaggagaaggcgaagagagcag

SEQ ID NO: 217788 - RNA, 77 nt, Homo sapiens
gcgcggcaaggacgagccggggcgcgaagagcagcaagcggcaagagccacagagaaacaaccaaggcagggaagaa

SEQ ID NO: 217789 - RNA, 85 nt, Homo sapiens
gaaggaccgaacccaggagcccgcacgcggcagcagaagcagcggccaagaacccaggcacgcaagaaaggggcccgggagaaga

SEQ ID NO: 217790 - RNA, 58 nt, Homo sapiens
gaagacccaccaaggaagaaggagaaaaaagcagagggagaccccgcccgcggcagca

SEQ ID NO: 217791 - RNA, 88 nt, Homo sapiens
cggaccaaaccgcaccccggccggggggggcgcaaccgggagcccaggaagcgcagacacagagcccccgcaaggggccggcacggga

SEQ ID NO: 217792 - RNA, 82 nt, Homo sapiens
ccgcccccgaggcccacggaccagacaagcgagaaagaccgaggcgcacggcgaaggcggggcaaaggaagcccccgaaggc

SEQ ID NO: 217793 - RNA, 83 nt, Homo sapiens
ggagacagagaggaccgagcgcgggcaggcgggaggcaacggagcaccagccgaacagaccggccccccaaacacccgagccc

SEQ ID NO: 217794 - RNA, 77 nt, Homo sapiens
gagggagcagagccgccaggcagaaggccccccgaacagcaggcgccaccagcccggagccggagagaaaaagagaa

SEQ ID NO: 217795 - RNA, 85 nt, Homo sapiens
ccgagaaggagggaggggaaacacaaagccggcacgcgcgcgagcaggccaagcagaaaaacccgaaaaaagaaaaaggaaccgg

SEQ ID NO: 217796 - RNA, 84 nt, Homo sapiens
ggccagccgcagcgcaccccgcgcacagcgccaagaagagggagggcgagcacggggcccagggccgggaaggaccggagcccg

SEQ ID NO: 217797 - RNA, 68 nt, Homo sapiens
acaagcgccccgacggagcgccaggacggggacgcaaacgcaggcacaccggccacaaaggagggacc

SEQ ID NO: 217798 - RNA, 78 nt, Homo sapiens
ggaccacgccaaaggaaaaccggcagaggacaacggagaagaagcaggcgccccccaccagccacagacacagacgac

SEQ ID NO: 217799 - RNA, 80 nt, Homo sapiens
agccccaaacaagggggacggacagaggaggcaggcacacaaagaaaccccagaggccagaggacccaacagacaggacc

SEQ ID NO: 217800 - RNA, 83 nt, Homo sapiens
ccgcgggccggaggaccggagcggagggcggagccaggggggggccggagggggaacgccgagccgcggacccgcacagagac

SEQ ID NO: 217801 - RNA, 36 nt, Homo sapiens
gagcgcgaaacgcacgagaagacgaagcgccgcacc

SEQ ID NO: 217802 - RNA, 76 nt, Homo sapiens
cccccaagggcggaaacagggcgacaccacaagccaagagagaagagcgaccagaggcggcgcccacccaagacgg

SEQ ID NO: 217803 - RNA, 84 nt, Homo sapiens
cgagaggaacccagccgacacgacgccgccggcaggcccgcgcaccagggcccaaaggaccagccaaaacccacccaagccacg

SEQ ID NO: 217804 - RNA, 77 nt, Homo sapiens
ggagaacaaaccacacacagcaacaaaggagaaaggcgaggcaaacgacaggaagcacaagaagaaaagacacagga

SEQ ID NO: 217805 - RNA, 73 nt, Homo sapiens
gggaagggaccggccgccgcaggagcgcggcgagagacggggaaaacggggcggaagaacagggcagcggccc

SEQ ID NO: 217806 - RNA, 79 nt, Homo sapiens
aagaggagggcagaggcacccaaagggagccccggggagaccggccggacagaaacggaacacaaccgcaggcggccca

SEQ ID NO: 217807 - RNA, 87 nt, Homo sapiens
aggcccagaacggagccgccggcccggggccccacaccaacgggccgcgcgcaccaaaaccggaagaaggcggcccgggcacaagaa

SEQ ID NO: 217808 - RNA, 73 nt, Homo sapiens
cgcagccgagcggggccggccacaggcaaaagcagaccggaaaacccaccggcaagaccacacccgaggggag

SEQ ID NO: 217809 - RNA, 87 nt, Homo sapiens
gacagagcggcgggacagcccaagggccagcaccgcgcccaggcagagccagaccacggcagaagccccaaagggaccagagcgccg

SEQ ID NO: 217810 - RNA, 79 nt, Homo sapiens
gcaggggcagaaacagagaaggaacaggaacagcacaccgagcaagaaacagaaggaaggacggaacaaggaacaggaa

SEQ ID NO: 217811 - RNA, 77 nt, Homo sapiens
ccgccagccccgcggcgcccgggcccgggcggcggcccaccgcccacggggaggaaaacaagcaggcagcgcggccg

SEQ ID NO: 217812 - RNA, 76 nt, Homo sapiens
cgccaacacccccacaccagaggaccaagagcagccagaggaccacgacaagagagaggcaacgcaaccaccaccg

SEQ ID NO: 217813 - RNA, 81 nt, Homo sapiens
aacacagaccggcagcgccccgagggaagcaggccagcagggaggccggggggcgcgcgcgggggcgggggcaccagccac

SEQ ID NO: 217814 - RNA, 82 nt, Homo sapiens
gggggccggaggagcagcgggccagaacggccaggagacgcaacggccccagccaacccgaaaaccccccagcggccacaga

SEQ ID NO: 217815 - RNA, 71 nt, Homo sapiens
agagaagcgagaaagagaagaagaacacaccagccccaagaagggggagcaacagacaagcccgaaaggaa

SEQ ID NO: 217816 - RNA, 70 nt, Homo sapiens
gagggaagaaacacagcacaggcagcacaccgcgcccacaggacgaaaccgggcggggaagggcagcggg

SEQ ID NO: 217817 - RNA, 89 nt, Homo sapiens
caaggcagaccggaccacaaaaaggacaccagcaagcgcaagaggaggaagcaaggcagcgaagacaaccccagggcaccgacccgccc

SEQ ID NO: 217818 - RNA, 67 nt, Homo sapiens
gaccagccaacaaaagaaaaaaaaaccaaaagagagaggacagaaacccaaagaaccaaagccgaga

SEQ ID NO: 217819 - RNA, 58 nt, Homo sapiens
gcgacgaggcccgccaagaggcgccgcaggaggcagccacagccgagcagcgggccac

SEQ ID NO: 217820 - RNA, 75 nt, Homo sapiens
gcgcaagcagggccccgaaaacgccccgcgggaccccgggcgaagaacaggagcgaccacccagcagcccggacc

SEQ ID NO: 217821 - RNA, 107 nt, Homo sapiens
gccaaacagaccgaaagacaaaacggcacgacaaacaacagaacccgaaacccacagccccagccaaccgaccccagagcaacggccacaggggaaaaggcaaacgc

SEQ ID NO: 217822 - RNA, 78 nt, Homo sapiens
aggagggggcgagaaggcgggaagccgaaggcagccacaggcacgcccacaaaagcagagcgaccgcaaagacacgcg

SEQ ID NO: 217823 - RNA, 88 nt, Homo sapiens
cccagggaagcgcagaaagcaggcgaacccgcggcgcaaaacggcgccggaccgaaggcgcgaccacgacgagaagcgggggccgcag

SEQ ID NO: 217824 - RNA, 82 nt, Homo sapiens
acccgaggcaggcaggaaagaggggaaagaggcagagaagccaagacaggcaaaggcagcaggcagaaggagcggaaggaac

SEQ ID NO: 217825 - RNA, 80 nt, Homo sapiens
cgcgcgaggggcgccgaagcgagggggagaccgaaggaccaccggcagcgggaaaaaacgaccaagacaaacaaaagcag

SEQ ID NO: 217826 - RNA, 62 nt, Homo sapiens
aaagcaccagaccccaccagcaacggcggagcggaaacaagaaaaggcacaccggacgagaa

SEQ ID NO: 217827 - RNA, 62 nt, Homo sapiens
ggagacgcgcggggcgggccgccagcggggacaggcagcagagacaagagagacaccccaac

SEQ ID NO: 217828 - RNA, 93 nt, Homo sapiens
cgaggaccggcgcgggaagagcgggcgcacgcgccaagaccaaggaaaagcggcacagaccgccacggcccccaagacccccccgagaacggc

SEQ ID NO: 217829 - RNA, 85 nt, Homo sapiens
agcgaaagggaaaacccccacacggaggggacgaagacaaaaaccagggcagagacgcgcaaagcggggaggagcacagggcagg

SEQ ID NO: 217830 - RNA, 73 nt, Homo sapiens
cgcgcacccaccgggcccgcgggccgccccaccccacagaggacagcagcggacggccggaccaagaggcgcc

SEQ ID NO: 217831 - RNA, 37 nt, Homo sapiens
acagcacccacaaagcaacggcaccggcacggaccac

SEQ ID NO: 217832 - RNA, 76 nt, Homo sapiens
gggcccaacccacagcgccccaggcaaggaaccgaaggaacaagccaaaagggaggagcagcagagcgaacagcaa

SEQ ID NO: 217833 - RNA, 102 nt, Homo sapiens
ccgggacccccccggaccgagccgacgccgcggggcagcgggccggcgccggcgcgaggccccaagagagaagagaccgggccaacccggccagcccagccc

SEQ ID NO: 217834 - RNA, 38 nt, Homo sapiens
agaacaccagagcagcagaccgccagagcggaacgacc

SEQ ID NO: 217835 - RNA, 72 nt, Homo sapiens
cgggcgacagcaggcacagggacgagggggcggaagggaaaccggcacagggaagagaaacagagaaaccgc

SEQ ID NO: 217836 - RNA, 78 nt, Homo sapiens
gccggaagaaagacagagcgggcaccgaacgcaacaggaggcaacccagacacagaggcccaaggcaagggcggaggc

SEQ ID NO: 217837 - RNA, 66 nt, Homo sapiens
aaagccaccgagggagcgaaaaccgggccaggagcgcagaggacacgagcaccacaccgccacgca

SEQ ID NO: 217838 - RNA, 69 nt, Homo sapiens
agcgcacacaaaagaggagaaaaccgggcgcagcccaacgaaacggaaaccaagccgccggggagaggc

SEQ ID NO: 217839 - RNA, 73 nt, Homo sapiens
aaggaaaaggcagccaagacagcaagggaaacaacgcgggaaagacaaggagccgggccgagaaaccgaacca

SEQ ID NO: 217840 - RNA, 85 nt, Homo sapiens
ggagcaccccgcccggccaggcccaggggcaaagggaaacaccgcaacccagaggcccaggaaggaacggccaggagaacaacca

SEQ ID NO: 217841 - RNA, 74 nt, Homo sapiens
gcaccacgacccaggccgccaccagcgcagcggcgcacaagccacgccaagaacggagagcggccgggaggaag

SEQ ID NO: 217842 - RNA, 81 nt, Homo sapiens
ggaagaaaaacaaacacacgcaaaggagaaaggaaccgacagaagaagccacacacagaagacccaaagagaacacaggag

SEQ ID NO: 217843 - RNA, 84 nt, Homo sapiens
cggcggcggcggccaggcccgcgaacacacgccgccaccgggaggcccagggaagcaccagagcagcccccgaggccaggaaca

SEQ ID NO: 217844 - RNA, 71 nt, Homo sapiens
cgccggagcggagcgcgggcgccggggagccaggaaagcaggaaaacggcgcaaacggagaggcgcaccga

SEQ ID NO: 217845 - RNA, 56 nt, Homo sapiens
ggagccgcagagcgggcaccagggagcgggaggccggacagacacggaggcagggc

SEQ ID NO: 217846 - RNA, 58 nt, Homo sapiens
ggagaaggcgcaacgcggcgcggcggagaacggaaaagcaccaggaagcagagaggac

SEQ ID NO: 217847 - RNA, 45 nt, Homo sapiens
ccccgcggcccccaacccagcccaccacaaaccaaacgagcaaga

SEQ ID NO: 217848 - RNA, 65 nt, Homo sapiens
acgcagcaggcaaacgggcaaaccagcgggggccgggaccagagaagcggacagcaagcgcccac

SEQ ID NO: 217849 - RNA, 83 nt, Homo sapiens
gccgggccccggcggcaggcgccgcaggaccccggccgaagccgacgcgcccgcgcagagccagagaggaaacgaggccagag

SEQ ID NO: 217850 - RNA, 60 nt, Homo sapiens
gccccagggcgccaccaccgcgcggggagggacccggggccccgaccggcgcaagcagga

SEQ ID NO: 217851 - RNA, 81 nt, Homo sapiens
gggaccgagccaaggccagggaggggccccggaccggaggcaaggacggagcagaagaagcgaagagagacggggcgccgg

SEQ ID NO: 217852 - RNA, 73 nt, Homo sapiens
cagccacgaagcaggaagggagagcagcacccagggccgcaaaaacacagggagagagaccaggcccacgcca

SEQ ID NO: 217853 - RNA, 73 nt, Homo sapiens
ggaagccaccgagacggcgaccgggcgccgagacaccagagccacaaggaccgaaacagcaacaaccgcaacg

SEQ ID NO: 217854 - RNA, 56 nt, Homo sapiens
ccaaagaagggagagagcggaacgcaaaaacaagcaggcccagagccagggcaccg

SEQ ID NO: 217855 - RNA, 75 nt, Homo sapiens
cgacgcccgggggaaacagagaaagaaggcggccaggccaaccgaagaggcagggcaggggaaccagccacagaa

SEQ ID NO: 217856 - RNA, 70 nt, Homo sapiens
aagaagacgccaggaaagaaggaccgccgcaaggagcgggaaacgcacaacagagaacagaaaagacccg

SEQ ID NO: 217857 - RNA, 78 nt, Homo sapiens
gaagcacaacggcaaacacccggcgaccagaacagaaacgcaacgggcgcgggaccggaaaaaccaagagagccagcc

SEQ ID NO: 217858 - RNA, 78 nt, Homo sapiens
ggggcgggccgcgcgaagcccgagaggagccacaaggagacgccgccgcgcccccgcgaggagccgaggaaggcgcca

SEQ ID NO: 217859 - RNA, 70 nt, Homo sapiens
gccggagcacgcgaccacaggaagggaggaacaagccaccgcacgagggcccaagacccaaggaagaaga

SEQ ID NO: 217860 - RNA, 76 nt, Homo sapiens
cagacaagagaacccacagcaggccaagagccccaaaagagacacagaagagcgcgaacacaaggggaaggaaaac

SEQ ID NO: 217861 - RNA, 72 nt, Homo sapiens
cgaggccacacccgaaagcaagcccagaaggaggggaaagaaaaagagcccaccaaaaggaacagacggccc

SEQ ID NO: 217862 - RNA, 70 nt, Homo sapiens
gccacgcaacccacagacacaaccgcgagcccggacgggcacgacagagagacccgaccacccgcaagac

SEQ ID NO: 217863 - RNA, 71 nt, Homo sapiens
ccgcgccgagcgcgcggagaaccagagaagccgggcaccgagaaggcagggaacagggcagcaacccgcgg

SEQ ID NO: 217864 - RNA, 62 nt, Homo sapiens
gagaacacgaacaaagagcgaccgagaaaaaccgaaagagccaagcggaacaaacccaagaa

SEQ ID NO: 217865 - RNA, 66 nt, Homo sapiens
acccaaaagaagagaccacacccagaacaagggcaccacaagaaagaaacggcagcaagcaggcac

SEQ ID NO: 217866 - RNA, 84 nt, Homo sapiens
acgcgggcccgagcgggccgcgaggcaaagccccggaacaagacaacaggagaaagaaagaagagcccacaagaccaaggagac

SEQ ID NO: 217867 - RNA, 84 nt, Homo sapiens
ggaaaccccaacacagagccaagcgccaaaggcccccgccgcaccacacagccgggcggggaggaacaagaaaaccggcccgag

SEQ ID NO: 217868 - RNA, 74 nt, Homo sapiens
cggaaggacacagagccaacccagaagagccaagccaaagcggacgccggccaccacgaaggcgacacagaaga

SEQ ID NO: 217869 - RNA, 71 nt, Homo sapiens
gcaaaggaaagaaggaccagcagaagaaagaaccagcagcggcaaaggagagggagggcaagacagccacg

SEQ ID NO: 217870 - RNA, 70 nt, Homo sapiens
ggccgaagccccgccgcgcgagccagcggaacgaaagaaaaagcggggaaggggggcaaaaaaaagaagc

SEQ ID NO: 217871 - RNA, 70 nt, Homo sapiens
ccggagcaggggaaaaaggaccaaccggcaagggacaacggccaaacaagggaggcgaggacggacaaaa

SEQ ID NO: 217872 - RNA, 75 nt, Homo sapiens
gcgcacagcagagccacccagggaagcgcagacgggcgcgcccagggagcaaggaaggccccgaaggaagcgcgg

SEQ ID NO: 217873 - RNA, 91 nt, Homo sapiens
cgaagacggaccggccgggaagagcgcccagagcccagaccaagcaggacgccgggagccaccaggagaaacccgggcacaggccgcccgc

SEQ ID NO: 217874 - RNA, 38 nt, Homo sapiens
aacaggagaagcgaacacgcaacgacggaagccggagc

SEQ ID NO: 217875 - RNA, 83 nt, Homo sapiens
cacaacaagaaagcagaaacgaaagaaagcaagagcgagccggggaaaaccccagggcaaaacgccagaaaggaccgcacgaa

SEQ ID NO: 217876 - RNA, 65 nt, Homo sapiens
ggccaaagcaagagaacaccagaagcagccgaaacgaaccaagaaccgaaggaaccaagaggaac

SEQ ID NO: 217877 - RNA, 72 nt, Homo sapiens
cggccgcgcggcccgcagggcccgccaagcgcccccgggcacgagagcggacgagccaaggccgggaggaac

SEQ ID NO: 217878 - RNA, 74 nt, Homo sapiens
gcgacccggcacacaaagccagcagcaggggagcgagcacaaacgacacacgcaaaccacaaagcccagcaacc

SEQ ID NO: 217879 - RNA, 72 nt, Homo sapiens
gccggcgccggcgcacggcccgagcgggggcagccgcagaggcgcggaaacgagaagaacgaaagagaaacc

SEQ ID NO: 217880 - RNA, 73 nt, Homo sapiens
gagaagcagccgggacagaacgaacaggcaaagcccaaaaggcaaggcacaagcgcaagcgagcacagagcca

SEQ ID NO: 217881 - RNA, 60 nt, Homo sapiens
cccggggcgcgcccaccgcgccgcaccagcgagggcggcggggggggggggggcgcagcg

SEQ ID NO: 217882 - RNA, 71 nt, Homo sapiens
gggggaagaagagaggacggagcaggaagacagaagacgacaggaacaggagaggaagaagaggaaccgaa

SEQ ID NO: 217883 - RNA, 64 nt, Homo sapiens
gcacaaccaccagaagaacgacagagaggagggagaacaagcaacggcggcaaccaccgaaacg

SEQ ID NO: 217884 - RNA, 78 nt, Homo sapiens
gccagcagaggcggagcccgcagaccgcagaaggccggagacaccagcagcaggggaggcagccaggcccggaagcag

SEQ ID NO: 217885 - RNA, 83 nt, Homo sapiens
gggcgccggagccccccagggagcggagcgcccggccggcagcgggaagggcggagaacggaaaagcaccaggaagcagagag

SEQ ID NO: 217886 - RNA, 80 nt, Homo sapiens
cacgggcgcagagcgcggaccaggcgggggaagagagcaccgacccggggcaccccagaggacagagccagaggaccccg

SEQ ID NO: 217887 - RNA, 62 nt, Homo sapiens
ggagaagaaccccccgaaaggaccccccagaaccagaggaccggcaacaacccgaggacgaa

SEQ ID NO: 217888 - RNA, 74 nt, Homo sapiens
agggccagagcccagaaaagagagagcagaaacaccagaggccgcagcaagagaaggccagcagagacagaaaa

SEQ ID NO: 217889 - RNA, 72 nt, Homo sapiens
ggaagaaggagccccaaagacagggaggaccacgccggagcaaggggcagccaccgaacacgcaagcgcaac

SEQ ID NO: 217890 - RNA, 100 nt, Homo sapiens
acgggccagccccgccgccccgcaaccggcagccgccgccgggaagccagggacagccagagagagaaagacgagggaagaggagcaaaagccgaaaggc

SEQ ID NO: 217891 - RNA, 73 nt, Homo sapiens
gcggaacccgggccaaaccacccccacccagccaacgggccgccagcgcccaggcggccagacccggaccaag

SEQ ID NO: 217892 - RNA, 75 nt, Homo sapiens
ccgaaagccaccacaccagacccaaggaacacagcaagccgggacagagcgaagaaccccccaagaagacgaaac

SEQ ID NO: 217893 - RNA, 76 nt, Homo sapiens
aagaaaaagagaaaaaagccccgcagaaggaaagggaaacgcagaggcagaaaccagaggagaaggggagccagga

SEQ ID NO: 217894 - RNA, 83 nt, Homo sapiens
ccggaccggagacggggccaacagccaccagaacaacagcaccaagaaagggaagccggggaaacccagcggcaaaacagaaa

SEQ ID NO: 217895 - RNA, 68 nt, Homo sapiens
agaaggagcgcaagcaccagaaggaacacagaccggaggagcagcaaaccagcgaccgaggacaacgc

SEQ ID NO: 217896 - RNA, 77 nt, Homo sapiens
gcggagcccgcagaccgcagaaggccggagacaccagcagaggagcacagaacccacggaggaaggaccccgaggca

SEQ ID NO: 217897 - RNA, 83 nt, Homo sapiens
acccagcacgggaggcgagagggagccaggaccccagcgaggaccccgaggacgggcgcgaacacgccggcccgggagcggac

SEQ ID NO: 217898 - RNA, 68 nt, Homo sapiens
aaacccaacaagccccagaaccgcagcacccggccacagcgcacagcagggaaaccgaggcagacgga

SEQ ID NO: 217899 - RNA, 73 nt, Homo sapiens
ggaccacaccggacagcagccaaaggcgaacccaggcacccagagacggagcggaaaccaaggaagaaaagcc

SEQ ID NO: 217900 - RNA, 80 nt, Homo sapiens
cgcgcggccccaaccacgcggcgcgagccccgcccccgccgccgcgcacaaccgcacggcagaagaaccgcgggggcgaa

SEQ ID NO: 217901 - RNA, 72 nt, Homo sapiens
ccccccaccacgaaaaccggagaggaggacaaacgagcgcaacccccgaaacggaacgagcgaaagacgagc

SEQ ID NO: 217902 - RNA, 74 nt, Homo sapiens
cacacgcagaacgggcggacgggcgcccagccagaaaccaagcgcaacacgaagagggagcacaaagaagaaag

SEQ ID NO: 217903 - RNA, 72 nt, Homo sapiens
gggcaagggcggccggcccccgacagccaggcccgcgagaaagggaaggggaacaggaccggccacagacag

SEQ ID NO: 217904 - RNA, 65 nt, Homo sapiens
ggcgaaaccccacaagggaaaggaaaggacccccccagccaagcaagaaaagagacacagaagga

SEQ ID NO: 217905 - RNA, 33 nt, Homo sapiens
caagaaccaagccacagcagacaaaaccaagaa

SEQ ID NO: 217906 - RNA, 72 nt, Homo sapiens
ggcccgggcaacagccgaggaaaggcacagagcgcaacaaggagccaaggcagggcccgggaaagagcaaag

SEQ ID NO: 217907 - RNA, 39 nt, Homo sapiens
gagaagagaaaggcccggagacacgcggcgaggagcgac

SEQ ID NO: 217908 - RNA, 76 nt, Homo sapiens
acgccggcccgagaaagcccgccagcagggccgccgaccaggcggaggcagggcacacgcagcccaacccccgggc

SEQ ID NO: 217909 - RNA, 58 nt, Homo sapiens
cggcagagaacgaggccaaggacgggcgggggacccaacacaggaagaagagcggagg

SEQ ID NO: 217910 - RNA, 74 nt, Homo sapiens
ggcgacccgcgaaggcaggaggagcaaggaagaccaaacaacaggcaaaaaccaaggcgggaaggaagggcaca

SEQ ID NO: 217911 - RNA, 76 nt, Homo sapiens
ggcggccgagcaggcggagcgcacgacgacaggccccgcagaaggcggccgcgggcccgcccggaaggcaccaaga

SEQ ID NO: 217912 - RNA, 70 nt, Homo sapiens
acagcagccaggagcagagcgacagcggcgagcagaacacggcgagcggaggcagaggaggggacacggg

SEQ ID NO: 217913 - RNA, 74 nt, Homo sapiens
gggccggcgccaggccggggccacaaaagacaagacacgagaagggccaagaacaagaagaaagccccacagcc

SEQ ID NO: 217914 - RNA, 83 nt, Homo sapiens
gacgcaaggggacacgccaaaccgagcacagaaagagaccgcccgcccaacggggcaccccaccacagagggcggggcagagg

SEQ ID NO: 217915 - RNA, 75 nt, Homo sapiens
gccacgcaacccagccccggggcaagcaacccgccccagcccgagcagcggggacaggcccagcgggagaagccg

SEQ ID NO: 217916 - RNA, 70 nt, Homo sapiens
cgcaagcaggcgcgacgaggaaacagacacaggaacagagccacccgcccaccacagacccaccagaagc

SEQ ID NO: 217917 - RNA, 73 nt, Homo sapiens
ccgagccaacccacagcccacggaagcgccagagcccgcacaggaggacccgagcagccagcaaagaaccaca

SEQ ID NO: 217918 - RNA, 83 nt, Homo sapiens
agagcgggggcccggcgccgggcgacagccgggcgccaagagcaagcaaccagagaacagaagcaagcccccccagaggccaa

SEQ ID NO: 217919 - RNA, 66 nt, Homo sapiens
cagaggagcagcccgcagaggcccaggagacgacaaagccccgccaagggaggcagaacaagagag

SEQ ID NO: 217920 - RNA, 49 nt, Homo sapiens
cgacgagacgacacccaaagcaccaaaccacacgagcgggccaagcacc

SEQ ID NO: 217921 - RNA, 76 nt, Homo sapiens
aaacaaaggagagccgaccaagcggggacccagaaagaagcacaaaacaaacgacagcagcagagaaacacgcaaa

SEQ ID NO: 217922 - RNA, 76 nt, Homo sapiens
cacggcccagaagaacgcgcccagcaccccccagggaaccgccgccgacccgcgcagcggggagaagaccgcgcca

SEQ ID NO: 217923 - RNA, 71 nt, Homo sapiens
ggcaggaaagagcggacgggagaaagacacagcccacacccagcgcggccgccggagccgccgcgcgcgac

SEQ ID NO: 217924 - RNA, 74 nt, Homo sapiens
gcgcccggggcacgcccgcggccgccggacggccgggcgcggaggaccccaacgaagcagaaagaacaacacaa

SEQ ID NO: 217925 - RNA, 80 nt, Homo sapiens
ccaggaggcagggaggaaggggggagggggaggagccgaacgagccccagccagggcagaaggagaagacagccgaagaa

SEQ ID NO: 217926 - RNA, 60 nt, Homo sapiens
ggcggacggaggagcaggcgagaagagaagaacgggaagaagagaagagaacaaccaaga

SEQ ID NO: 217927 - RNA, 76 nt, Homo sapiens
aagaagagaaaccagcgcggggaagaagacgggcacgaaagccccgcccggccggggcccagaagaagccccccag

SEQ ID NO: 217928 - RNA, 74 nt, Homo sapiens
aagccgaagagggaaaacaaagaaccaagcacacggccgagacaacagaacagcggggacaaccgaaccgccac

SEQ ID NO: 217929 - RNA, 77 nt, Homo sapiens
gaaggcacaaggacaaacccacccacaaagggcacacggacccgacaccggcgccagcgcaagaaacgagcagaaga

SEQ ID NO: 217930 - RNA, 78 nt, Homo sapiens
cggcgaccggccggggcccagagcgaccgcccccgcggaggggggccgccgccgaccgaagacacagaaaagaacccc

SEQ ID NO: 217931 - RNA, 84 nt, Homo sapiens
cgaagcgaggggccccagagaccggcaaagggacacccaccgcagagcagcgggcgaagcaccacccagcagcagaagggaaca

SEQ ID NO: 217932 - RNA, 82 nt, Homo sapiens
aaacacgggcgacggggcccagcagacagccgaggggagcgcggggcccggcagaaagggcgcaagaggcagacagacaggc

SEQ ID NO: 217933 - RNA, 44 nt, Homo sapiens
ccccagggcagaaaagcgaccaggcgagccagggacagccagag

SEQ ID NO: 217934 - RNA, 79 nt, Homo sapiens
agggagcaaacagcgggacacgaggcaccaccagcagagcacacgaagcgaaccgcccccgaaccagacccgaccgagc

SEQ ID NO: 217935 - RNA, 80 nt, Homo sapiens
gcggaggcgaccgccaggcgcccaaacccggaccaggcggcccaaaggcgaaacacagaaggagacaaccacagggcccc

SEQ ID NO: 217936 - RNA, 51 nt, Homo sapiens
gcaaaagacccggacagaccagagcacaagcggcgcgaggaaggccagaac

SEQ ID NO: 217937 - RNA, 53 nt, Homo sapiens
gccggcggcgcgcgacccccgcgcaggaagaagagagggcgaaggaggccaca

SEQ ID NO: 217938 - RNA, 90 nt, Homo sapiens
caaaagaaaagacagaaggagcaacgcagcagaaagagaagccacaggcccagaagggcagagacggcacccgagaaggcaagaccgaac

SEQ ID NO: 217939 - RNA, 67 nt, Homo sapiens
caacagcgaggagcaggcggagcacccaccacggagggaaagaccaggcagagcgcacagaaagacc

SEQ ID NO: 217940 - RNA, 79 nt, Homo sapiens
accagcgccgaagcgacaccaggcgggaaggaaaaacagaacagcgcccgcgaaagccgaccacaaagccgagcccgcc

SEQ ID NO: 217941 - RNA, 84 nt, Homo sapiens
cagcacaggcacagaaggccaaaaaggcaaccacagagagagagagggaggggcagaaaaaaccagcaggccaggaacacaacc

SEQ ID NO: 217942 - RNA, 88 nt, Homo sapiens
cagaaacaaccccagcaagccccgcacgcacaagcggccaagggaggccgccagccgaggcgaggagcgggggagcggcgccaaggag

SEQ ID NO: 217943 - RNA, 79 nt, Homo sapiens
gcgcaacaaggagaagagccaggaaacaggaggaagaacccaagccaaagcccagcaagacaaacagagaacaggacag

SEQ ID NO: 217944 - RNA, 106 nt, Homo sapiens
gccagcagacacaacaaaccccacaacacagagagccacaagccacacggaaggcccaggcaaaagagcaaagggccgcgagcaccgaagaccgaccgcccgaccg

SEQ ID NO: 217945 - RNA, 81 nt, Homo sapiens
cggaaaggacgcggaggggaaagcagagggagaacaaagaggaccaagcaacaaaagaagaagcggagccacaggggcaac

SEQ ID NO: 217946 - RNA, 75 nt, Homo sapiens
gcaggaacgggaacgcaggagcgaccaggaaacccacccccaacggaacaagaaaccccaacgagagcagaaaga

SEQ ID NO: 217947 - RNA, 73 nt, Homo sapiens
gaagaagcgaagacggaaacgaggaaaccgggaaagccaccgaaaaggagaaggaaagagcagcgaaacaaag

SEQ ID NO: 217948 - RNA, 79 nt, Homo sapiens
acagcagcaagagccccaaagccaccagggcggaagggcaagaaagaaggaaagcccaagagggagcgcccgacacgcc

SEQ ID NO: 217949 - RNA, 58 nt, Homo sapiens
ccaagacaccaggggagaccggccccgggcgcgggagccagccgaagaaaggaaaaga

SEQ ID NO: 217950 - RNA, 83 nt, Homo sapiens
gaacaaacagcaagaaagaccacaagaccaaacgcaaacggcaccagcaggggggaccgcccgcccccagaaccaaagaagca

SEQ ID NO: 217951 - RNA, 72 nt, Homo sapiens
agcccgccaccaagggccagccgccccggaggccgcccagaccgaggaagggcagaacccccggagcgcccg

SEQ ID NO: 217952 - RNA, 68 nt, Homo sapiens
ccaggacaccagagacccgcacagcaacaaagcccacaggaacagacgaccaaaaggaagggcaagcg

SEQ ID NO: 217953 - RNA, 62 nt, Homo sapiens
cagccagccacgcgggccgcccgacggcggccaccgaaacggaggccaaggcaaaagacgaa

SEQ ID NO: 217954 - RNA, 80 nt, Homo sapiens
aaccaacagccccccagagcccacagagaaaagaagaaacaagggcaacgagaaaagaaaccaaacaaagaagaaaagac

SEQ ID NO: 217955 - RNA, 75 nt, Homo sapiens
ccccgggacccccaagagcacaggcagaaggcacaaggggcggagaacggaaaagcaccaggaagcagagaggac

SEQ ID NO: 217956 - RNA, 79 nt, Homo sapiens
ccgagcaacgaagcagccgagacgaggagaaaacccagaaaaaagggcagagccccgccaccgaagcggagaaggcgga

SEQ ID NO: 217957 - RNA, 77 nt, Homo sapiens
ccccggaggcgacccaccccccagccccgccggccggcgacccaaagaacaacaagaggcaccaggcaggaccgaca

SEQ ID NO: 217958 - RNA, 82 nt, Homo sapiens
ggcggcggagagaagcgccaaaggaccggacccagagaagaggaaaaccaccgggcaggcccaaggaagccaaggcaacgcc

SEQ ID NO: 217959 - RNA, 88 nt, Homo sapiens
gcgccccgccccgcccggagcgccggcggcagaccgacacgccggggcgcccgcgcgcggggaccccacgggacaagaacgagccagc

SEQ ID NO: 217960 - RNA, 77 nt, Homo sapiens
cgacccacccgggcaagcgcccgacccagccagacggcaccagcgcccggagaaccagcccaccaccccagcgccgc

SEQ ID NO: 217961 - RNA, 64 nt, Homo sapiens
ccacaagaagccggaacagacaggagagagaccccgcggaagacaccagaaggggcagcgcccc

SEQ ID NO: 217962 - RNA, 71 nt, Homo sapiens
acaaaaggacaaaccaacgcaccagaggcacaggaagcggagcgagacccagagcggcaaagaaagagaga

SEQ ID NO: 217963 - RNA, 78 nt, Homo sapiens
ccaagggacgaaaagccaaccgagcagggaaggccggacgcaccccacgacaggcaggccccaccggaccagcgccag

SEQ ID NO: 217964 - RNA, 71 nt, Homo sapiens
aaaaacaaagcgaaacagcggggccacccagaacaaaaagggccagggccggaacgagaagaaccaagaga

SEQ ID NO: 217965 - RNA, 79 nt, Homo sapiens
cacccacaaggagcagcggagcgagagaggaagaccggccaaggagcaaggcagcagaagacggcggcagagcagcgga

SEQ ID NO: 217966 - RNA, 65 nt, Homo sapiens
ccgacccgccgggaagacgagaagccggaaaggccacaagagcagccccaaaaaggagaaaaggc

SEQ ID NO: 217967 - RNA, 59 nt, Homo sapiens
agcgcccccggcgcccaacccagagaggagcagaagagacacaggacacccacccgccg

SEQ ID NO: 217968 - RNA, 87 nt, Homo sapiens
agcgccccgcagggcgaggacggccgaaccccgcgcccgcaggacgccccagccagggaccccgacggagagacaaagaagacggag

SEQ ID NO: 217969 - RNA, 70 nt, Homo sapiens
gggaacccagccagaccaacagagcaagcaaacaaggcagcagcaaccgcccaggacaagaagacaagac

SEQ ID NO: 217970 - RNA, 73 nt, Homo sapiens
caggcacaacacacagaggaccagcaacaggaacagaggaaccagagaaggagaaacagcagggccaaaggca

SEQ ID NO: 217971 - RNA, 66 nt, Homo sapiens
ggacaaagggaaaggcccagcagcacgacccgaacccaggaggaaaggcagaacccgggccagaaa

SEQ ID NO: 217972 - RNA, 76 nt, Homo sapiens
aggcccacggccaggcaaaccggacagggagacggcccggcggcccggagcggcggaggcaggacccagaccggac

SEQ ID NO: 217973 - RNA, 68 nt, Homo sapiens
aagcgaggcagccagcacccgcgagaagagcgaggcaccagagacacacagcagcgccggaccagcag

SEQ ID NO: 217974 - RNA, 63 nt, Homo sapiens
accaggaaagaagggggcagaagagggcgaacagagcagagcacgcccagaaggccggaaagg

SEQ ID NO: 217975 - RNA, 68 nt, Homo sapiens
aaggcccggagaaaccgccaccccccgcaggagaaaggaggacccgggaagacagagacgggcaacgg

SEQ ID NO: 217976 - RNA, 83 nt, Homo sapiens
agcgcccggccccccaccggacacccgcggcgcggcgagagacccaggaggcagagccaggccccggcagcagccaacaggag

SEQ ID NO: 217977 - RNA, 74 nt, Homo sapiens
caacccggagagcggcgagggcggagaacggaaaagcaccaggaagcagagaggaccgcagaagggaaggagag

SEQ ID NO: 217978 - RNA, 75 nt, Homo sapiens
ggacccaggagaagaggggagagggaccacacagaaacggaaagaacccggaaaccacaaggccagcaccgccgg

SEQ ID NO: 217979 - RNA, 71 nt, Homo sapiens
gggcccccccaccagaaaagcacgcccccagaccaaccgggacccggaagacacggcaccagcaagcgacc

SEQ ID NO: 217980 - RNA, 67 nt, Homo sapiens
cccaaacgcggcacgggaggggaacagagaaaagacgacccaaacgcacgccaagcgcacggagaga

SEQ ID NO: 217981 - RNA, 55 nt, Homo sapiens
cggagggggaaaaaacccaaggcgcaaagcaagcccgagaagcaagaccgcccca

SEQ ID NO: 217982 - RNA, 79 nt, Homo sapiens
gcgccccgaagcgggaaaaaggcggggccgccgcccccagcgcgcaacccaggaacccgggccccagcggcggaggaaa

SEQ ID NO: 217983 - RNA, 53 nt, Homo sapiens
cagagcaaggaggccccagcggaccgaacaggagcgcacaccagagggcccgc

SEQ ID NO: 217984 - RNA, 55 nt, Homo sapiens
gagcgcagggggcaccgagcggcaccccccaaccaggcacaaggcccaacagccc

SEQ ID NO: 217985 - RNA, 43 nt, Homo sapiens
gcgccccaggagaaggaccgaagcgcagcgccggacgcacccc

SEQ ID NO: 217986 - RNA, 102 nt, Homo sapiens
ggccaaagggcgagggcacaaaaaaccacaccccccaccgaggaagagcgggagaaaggccaccagcaagacacacgacacagaccccccgccgccgggcga

SEQ ID NO: 217987 - RNA, 77 nt, Homo sapiens
ccaccaggcacggcacggggcagagcagcacaggccagcccaagaaccaggaaggcaaagaagcaggggcaggagag

SEQ ID NO: 217988 - RNA, 61 nt, Homo sapiens
cgaacgaagcaacggagcaggagacaccgccacgcagacaacgagacgcgcgcgacaccag

SEQ ID NO: 217989 - RNA, 71 nt, Homo sapiens
aaacccggaaacccagcggcccagccggggcccgacgggccaggagggggccgaggggacccgcccacggg

SEQ ID NO: 217990 - RNA, 66 nt, Homo sapiens
acccagaaaagcagaagcgaagccaaaggaggggggacaggagccaggccaagagaaagaaacaca

SEQ ID NO: 217991 - RNA, 42 nt, Homo sapiens
agccagcaccccacggacagcgcggcggaggcagggcgccac

SEQ ID NO: 217992 - RNA, 86 nt, Homo sapiens
ggagacgcaagggcaaggcaaagcgcagcccccaaacccaggaggcgcccggcccgcgccgccccccagggcccagcggaaccaca

SEQ ID NO: 217993 - RNA, 81 nt, Homo sapiens
cggagaccccaccgccggcgcgggaaacgggcgaagcgacgagccgcgaggaggagcagcaccgaggccccccccaccccc

SEQ ID NO: 217994 - RNA, 72 nt, Homo sapiens
cgacacaccgacggcaccgggccaccgccgccaggcggacaaaagagggcccagaggagacaggggaaccag

SEQ ID NO: 217995 - RNA, 117 nt, Homo sapiens
ggaagaacagcacaccaagcaaggggaaaagcaggacagaacggccacccaggaggaggaggaagaggaaagggccaaccccggaagagaaggggaaagcagccaggccaagacgag

SEQ ID NO: 217996 - RNA, 78 nt, Homo sapiens
acggcgaacccccccaacggaacagcaccccccaagacagggcagcaggagcagagagaccaagggaaaccgagaagg

SEQ ID NO: 217997 - RNA, 57 nt, Homo sapiens
cgacaaggccgaccggcccacccagcgggaaagacaacccccgaggcgaggcaacca

SEQ ID NO: 217998 - RNA, 62 nt, Homo sapiens
gcacaggaggaggacaagcagacggcccaggcgcgcaaaaagaaaaccagacgagagacaga

SEQ ID NO: 217999 - RNA, 79 nt, Homo sapiens
aaagcaaaaaccacggagggcccgaaacccgcagaggaaaacaggcaacgcccgcgggcccggggccaagcccaggcac

SEQ ID NO: 218000 - RNA, 87 nt, Homo sapiens
aaaagaaggaccgaggcaagacgagcacaccaggagagagcggccaagagaagcaggagccgggaaaccgaagaaggcagagaaggc

SEQ ID NO: 218001 - RNA, 88 nt, Homo sapiens
cgggagcaagaagaacacccagagacacaccaggcagcaaggcagcccagcccagccagccaggggacccgggggccagacggcgcaa

SEQ ID NO: 218002 - RNA, 81 nt, Homo sapiens
aaagagccgcaggcaagggacgaccaggaggagggcccaggacccccccgcggcggcgaggcccgagccagagaggaggac

SEQ ID NO: 218003 - RNA, 81 nt, Homo sapiens
aggacaggggaaggcagcagcccgacacgggagcgcgaggccaggccaacgccgggaagaccgaagggcgcacggagggac

SEQ ID NO: 218004 - RNA, 71 nt, Homo sapiens
accaaagccccaagcccaccacaaaacccgaagaggagaaaccggcaaagagaagcaacacaagaagacca

SEQ ID NO: 218005 - RNA, 79 nt, Homo sapiens
caccacgcggacagggcccccggcccaccccggccacaccagaaccagaagcggaaccggaagaagacgaacagacggg

SEQ ID NO: 218006 - RNA, 50 nt, Homo sapiens
acaacccccaagcagcaagaagaagggagaagagccagggaggaccgagg

SEQ ID NO: 218007 - RNA, 72 nt, Homo sapiens
aaaggagaagcagcaggcagcagcaagagcaccgcgacccacaaccgcaccaccaagccaagcaggacaagg

SEQ ID NO: 218008 - RNA, 70 nt, Homo sapiens
gacgcgccccgcccccccgacccaccgcggagcgggaccgccgcaggggcaaagaaaaaggagagaaaaa

SEQ ID NO: 218009 - RNA, 57 nt, Homo sapiens
cagcgcgccgcgccgaccgccggagaagcgcgcgcgccgcggggagaagaaaggcca

SEQ ID NO: 218010 - RNA, 74 nt, Homo sapiens
gacagcccaccaggccaccacgcggcgggccgggcagagcagcgaggagaaaaaaacgcaaagcagaggaacga

SEQ ID NO: 218011 - RNA, 77 nt, Homo sapiens
caagaaagcgccaaaaacaacaccaaaaagccgcagggcaacaggaccccccgacaaagggcaaccaacacgacagg

SEQ ID NO: 218012 - RNA, 74 nt, Homo sapiens
cacccagcagagacagcaaccggccacgaggagggccggagaccgggacgagcagggccaccccagccccggag

SEQ ID NO: 218013 - RNA, 67 nt, Homo sapiens
agaccgggcaaccggagcaccgggaaaccagcgaggacagaccagagaggacaaccaaaagcaccga

SEQ ID NO: 218014 - RNA, 51 nt, Homo sapiens
acagacgcagggcgcccccgaaccggcccagaggagagaagcaggcccagc

SEQ ID NO: 218015 - RNA, 76 nt, Homo sapiens
ggaccggggacgcacggaccaaaaacccgcaacagcccccgcccaagaacaccagagcacacaaaccaccgccaag

SEQ ID NO: 218016 - RNA, 74 nt, Homo sapiens
agaaccaagcaacaggccgccaaagcgaacaccaagaagcaaaacgcgcaaacgaagagaaccaaaagcgaaga

SEQ ID NO: 218017 - RNA, 86 nt, Homo sapiens
ccggaccccccacccacgcgaacgagagggacacggagcagacggcaagaagaagcgaaaaccgcccacaacaccagcacgaaacc

SEQ ID NO: 218018 - RNA, 81 nt, Homo sapiens
cggagaccaggagaccccacggagcgggcgacgagcgacccgggagacacgacgaaaacgacagaagcacgacaacaacgg

SEQ ID NO: 218019 - RNA, 76 nt, Homo sapiens
gaccagagcacagacacaaaggaggaggcaaaccagcgggaaggcggaccccggcagcaagcaacagagcgccaag

SEQ ID NO: 218020 - RNA, 71 nt, Homo sapiens
gaggcagggaggaaggggggagggggaggagccgaacgagccccagccagggcaagcagaagaggaacaga

SEQ ID NO: 218021 - RNA, 58 nt, Homo sapiens
aaaacgccagaaaggggaagaaagagcgggcagagacgagacagacagcagcaggccc

SEQ ID NO: 218022 - RNA, 82 nt, Homo sapiens
gaagaagaagcaggagaacgaaacggagccagagaaggcagaagaaggccggcccacagcccaaaaagaaacaggaccgaaa

SEQ ID NO: 218023 - RNA, 74 nt, Homo sapiens
acaaagacaaggaacaagacgccgcgcgcgacaaggccccaacaccaaacacagaagcaacagccacacagagg

SEQ ID NO: 218024 - RNA, 74 nt, Homo sapiens
ccgaaaagcgagcgcgaggaaaaggcggcgggagaggcccacgcggaccggcagcgccaccggaccaccagaca

SEQ ID NO: 218025 - RNA, 82 nt, Homo sapiens
cccgcagaggccaggaggacgaggagagacagaagaagcggaggccggcaaagccaagggcagggcaaagacgggcagagga

SEQ ID NO: 218026 - RNA, 57 nt, Homo sapiens
ggcgaccagcggcggggagccaagggcggagaacggaaaagcaccaggaagcagaga

SEQ ID NO: 218027 - RNA, 83 nt, Homo sapiens
gcgggcggcagcagcggggcggggcgaagaagcagcacaaggcgagccagacacgaccgacccaggagagcgcaccccggcgg

SEQ ID NO: 218028 - RNA, 75 nt, Homo sapiens
gagggggcgcacaaacgaggcccaggagagccagggacggcgcacaacccaccagcccgcaccccagcccgcacc

SEQ ID NO: 218029 - RNA, 79 nt, Homo sapiens
aaagcggcagcagacccagagaagcagcagcagaccagcgccagcgggccccccagaagggaccacagaccagcacgcc

SEQ ID NO: 218030 - RNA, 65 nt, Homo sapiens
acgcggggcaaaaggcacgagacaagacagggaaaccgacagagggagagaaagaacaaagaccc

SEQ ID NO: 218031 - RNA, 82 nt, Homo sapiens
agcggagcgaagcgcaggcgcggggcgcggagcgggaggggacaccggaacagcagcaggccgcaggacggcgaggcagccc

SEQ ID NO: 218032 - RNA, 85 nt, Homo sapiens
gccagaaagaaaaaggccccaaggaagagggacaaggcaggaaggccgcccgggccgccccagcgggccaccggcgccgcaggac

SEQ ID NO: 218033 - RNA, 87 nt, Homo sapiens
gcagcaagggcaagccaggaccaaaggcaccgaacagaaacgggaggaggcacgagaccaggacgaggagaaaagaagaaacgaagc

SEQ ID NO: 218034 - RNA, 90 nt, Homo sapiens
cgcggcggacgcgcccgggacgcgcggcggcaccgggaggccgggccgagcgggggaacacaccgaaacagaggaacagcagggcagagg

SEQ ID NO: 218035 - RNA, 77 nt, Homo sapiens
cacagagagcagagcaaaaacaacagggacgaaaaaagacagaacaccagaggaagacaaaagaagagagccccaaa

SEQ ID NO: 218036 - RNA, 78 nt, Homo sapiens
gaaagaaagccgcgaacccaaggcagacacaacaccacaagcaggggcgacagcaagaaggagccagcacagaggcaa

SEQ ID NO: 218037 - RNA, 82 nt, Homo sapiens
ccggccggccgcccccaggaccccagggagagcgggcagccccaggggacaggcgggggagccaagggagagggaagaaaac

SEQ ID NO: 218038 - RNA, 56 nt, Homo sapiens
gcgaaaacagaccgcgagcccagagacccccagcaccccgggcagcggagaggccg

SEQ ID NO: 218039 - RNA, 84 nt, Homo sapiens
cacagcacccgggcgcggcggccagccgcaccgggacgacaccggggaccggacaggggcaagagcagacccggaccgggacag

SEQ ID NO: 218040 - RNA, 62 nt, Homo sapiens
cacccgggcccgccgcccccacacggcaacggggcggcacacaaggagcgaagggcagggag

SEQ ID NO: 218041 - RNA, 84 nt, Homo sapiens
aggaacaaagaaggaaacagggaaaccccagaagagcaaccccagccagaagacagcgggggaagcagggaaaaagcagaaggc

SEQ ID NO: 218042 - RNA, 74 nt, Homo sapiens
gacacggaacaccgccacgacagcagagcggggcggccacaagcaaagggagcacagaccagaagaaccaagcc

SEQ ID NO: 218043 - RNA, 65 nt, Homo sapiens
agacggaacccgggacgacggcaaacgaacacaagagacagggaacaccagaccggagcaggaac

SEQ ID NO: 218044 - RNA, 78 nt, Homo sapiens
agcaggcgggaagagagacacgacgagaccagggagcacaccccccgccgggcaagcccggccccagggacagcggag

SEQ ID NO: 218045 - RNA, 80 nt, Homo sapiens
ggaggagaaggaaggcaggaaagccagccggcgagagcaggccaaaacagaagaggcaaagcccagccacagcagcagcc

SEQ ID NO: 218046 - RNA, 79 nt, Homo sapiens
ggaacaggaaagccgagccaggcgggagcacaggcggaggcagcggaggccccgccgcgccgcagccgcccggggaagc

SEQ ID NO: 218047 - RNA, 75 nt, Homo sapiens
ccgggcacaccaggacaaaccccccccccgcggaggaccgcaccagccaccggagacgagagggccccaaaggga

SEQ ID NO: 218048 - RNA, 80 nt, Homo sapiens
acgacaccgccccaacccacgagaggacagcccagggacgcagagcgcaacccagcaccccccacagaggagacacaaca

SEQ ID NO: 218049 - RNA, 77 nt, Homo sapiens
ccacaaggcgggaaccaggagggagaaaaccccaccccgggcaaagcaggaaagaaccaaagcgcggcagccccaca

SEQ ID NO: 218050 - RNA, 58 nt, Homo sapiens
acgcagggccgagggcgagcccgagaaaggaggagaaacaagcagcaccgcaggaggc

SEQ ID NO: 218051 - RNA, 67 nt, Homo sapiens
cacagggggaagacgagagagagaggaaccgcaaaggcgaacaaagagaaaagagagagcgagagag

SEQ ID NO: 218052 - RNA, 83 nt, Homo sapiens
gggagaacacgacccgacccaagacacaggccagcgcggagcgggcaggccgaggcggaccaccacccgcaccagggacccgg

SEQ ID NO: 218053 - RNA, 77 nt, Homo sapiens
cagcgaggacagaaggaagacacgagaggcgagggacgacagagcaagcggcagagggcaagcgggaaaaagaccag

SEQ ID NO: 218054 - RNA, 55 nt, Homo sapiens
gcggagggacgcacccccacagggcagaaggacgggccacgaggcaccggccgcg

SEQ ID NO: 218055 - RNA, 62 nt, Homo sapiens
gcgggcgaggcaccggagacccgagcaccccaacgggcaggcgaccaggccgcgggaagcgc

SEQ ID NO: 218056 - RNA, 78 nt, Homo sapiens
ccaacaccaccaaaagacggacggaaggcgaccacaccaccccagacacggccgaccgccaagcacaacgccaaccca

SEQ ID NO: 218057 - RNA, 131 nt, Homo sapiens
cggacacgacggcgccgcgaccgacaggcagacggaccggaggagcgaaggcggcggcagagaacgccgggccagcgaggacccagagagggaccagggccaaagaagagccggggggcaggcggacagca

SEQ ID NO: 218058 - RNA, 73 nt, Homo sapiens
aaacggagagccacaaaaaaggaagcgaaaacagccaagaacgagccaacgccccagcagcagagcagcgagc

SEQ ID NO: 218059 - RNA, 75 nt, Homo sapiens
cgaggcagacgggcccgcgcacagagacaggacaagccaacaacacgccacggcgaggccacacgcccacggagc

SEQ ID NO: 218060 - RNA, 86 nt, Homo sapiens
cggcagcggaagacaaaccacaacaacacagcagaggccgaagcaaaacgagggcagagaggcaaaacaaaggcgaagacacggaa

SEQ ID NO: 218061 - RNA, 64 nt, Homo sapiens
cgccaagagccgacacaccggaccaccagccgacacgcccaaaaacaggaacaaagagaaggac

SEQ ID NO: 218062 - RNA, 74 nt, Homo sapiens
aggggccggagagggccggaccgagcggccggagcggacggccaaggaggaggagcgcagcacccagggaaggc

SEQ ID NO: 218063 - RNA, 55 nt, Homo sapiens
aaggaccaagaaccagagaaagcaaaacagagaaacaggaacagcagaagcaagc

SEQ ID NO: 218064 - RNA, 68 nt, Homo sapiens
ggccaaaccaccaagaaaggcacccacagaggcaacgaaagcacaaaagaaagggccacccccacagc

SEQ ID NO: 218065 - RNA, 77 nt, Homo sapiens
ccgcgccccaccacgcagccagacccaacggacacgcagagaaaaggaaaccaccaaaacagaggaccaagcaccaa

SEQ ID NO: 218066 - RNA, 56 nt, Homo sapiens
ggggggagcaaaccaccacaaaacggaggacccgagccccaaagacagaaaagccc

SEQ ID NO: 218067 - RNA, 75 nt, Homo sapiens
gaaacaaagggaggcggaaccagggcccgccacaaaaacggcagcagagccaaaccaggacggaccagagaagga

SEQ ID NO: 218068 - RNA, 84 nt, Homo sapiens
gagcgcagcggcacgcacgcgaagacagcggcagagccccccaagagaacccagggggagccacgccggagcgggcaccggcgc

SEQ ID NO: 218069 - RNA, 79 nt, Homo sapiens
gagcccaccacccacccgagcggagaagcgaggacacacagggagaggaacagggcgcaccacagaagagccaaagacg

SEQ ID NO: 218070 - RNA, 75 nt, Homo sapiens
caggacacacagacccagcggaaccgggacagcaacacaaggaagagcggccagccccggagggagaccgaaacg

SEQ ID NO: 218071 - RNA, 87 nt, Homo sapiens
gaggaggaggaggaggaggaaggcagaccagggacccgggagcgggggccaacagcagggcggggcggaacgcgggcccagaggcag

SEQ ID NO: 218072 - RNA, 91 nt, Homo sapiens
cgggaccgagcagccgaggcggcggcacagagcccggcccgccagcggaggcccgagcgggaagaagccgcagcaagccgcagcggcgcgc

SEQ ID NO: 218073 - RNA, 80 nt, Homo sapiens
cagacgccccccccggccagccccgggcgcgggcaaacaccagcaacacccgggacaaaaacgggggccaccacccccac

SEQ ID NO: 218074 - RNA, 55 nt, Homo sapiens
caggacacaggcggagagccagggcgcgcaccccagaaaagacgaggacgcgcac

SEQ ID NO: 218075 - RNA, 78 nt, Homo sapiens
agcagcagcagcaagcagcagcagccccaagcgagaaggccagaccggcccgggccgggccaggaggacacgcgcagg

SEQ ID NO: 218076 - RNA, 76 nt, Homo sapiens
gagcgaccagcaccggacccgaacgcggacgccggcgcgcagaccgccggacaagggcagcccggaccggaaagac

SEQ ID NO: 218077 - RNA, 74 nt, Homo sapiens
gaagaagcacaaaacagagggaacacgacagccaaaggagacacagaaggaagggagaaggggacgggaaaaaa

SEQ ID NO: 218078 - RNA, 81 nt, Homo sapiens
gcggggcccgggcaggcggcgcggcggagcgccccgggggcgcagagccagccggcacaggcgaagcagaaagcaaacggc

SEQ ID NO: 218079 - RNA, 65 nt, Homo sapiens
gcagcagcggacggccaggggagagcgaggccgagcccgcgcagagggcgggaagagaagcaaaa

SEQ ID NO: 218080 - RNA, 39 nt, Homo sapiens
gagcagagccaaggagagagagaggagaggacgccaagc

SEQ ID NO: 218081 - RNA, 52 nt, Homo sapiens
ccagacgaccacgacgaggccggggcacggcacacgaaaagcagcagccaga

SEQ ID NO: 218082 - RNA, 70 nt, Homo sapiens
gccgagaggcgcggggagaggaacaacggacaagagacggggcaccagagccaggaggccaacccgaccc

SEQ ID NO: 218083 - RNA, 123 nt, Homo sapiens
gagcaaaaccgaaccagaagacgagagccaacgcaaccaggcgcaggacacacagagagcccgggagggaaccaacggaagccaagcggacaagccgacaggggcacacccgcccaagaagac

SEQ ID NO: 218084 - RNA, 80 nt, Homo sapiens
aacgccagcaacgcgggcagaggagcggagcggagaagccaagcgagaaccagccaaaacacacgaacagggaacaagaa

SEQ ID NO: 218085 - RNA, 74 nt, Homo sapiens
gcggagccggggacgcgaggaaacacaaaccaacggcgaggacgcgaggggcaaagggccaacagaagcagaaa

SEQ ID NO: 218086 - RNA, 67 nt, Homo sapiens
ggaaagaaccagagcgcaaaagcaagaggcaaaaaggaggccaaggacgggacaaccacgcaggcgc

SEQ ID NO: 218087 - RNA, 73 nt, Homo sapiens
agagaagagcaaagccgagagaggaaacacagcagaaacaaagaagcagcgcgaaagaagaaggaagccaggg

SEQ ID NO: 218088 - RNA, 80 nt, Homo sapiens
acaagccaaaaccccagggcacccaccgggaaaccacaggggaaggcgccagacacagaaaagaaagagagcaaccaccc

SEQ ID NO: 218089 - RNA, 41 nt, Homo sapiens
ccggggaggcaccgacgaggaggcacaggaagagggcggca

SEQ ID NO: 218090 - RNA, 78 nt, Homo sapiens
gagccggaggggcgcgggacacacccccaggaggcccggcagagcagggcaggacccgaggcgccagcagcagcaaga

SEQ ID NO: 218091 - RNA, 81 nt, Homo sapiens
ccccagcaccacagaaaaaaggccgaacaagcaaccggaaaagcaaaggcaagggcagcaccagcagcccgaccacaccac

SEQ ID NO: 218092 - RNA, 76 nt, Homo sapiens
cggacagccacaaagacccccagacacacacacccaacccaaaccaagacagccagccccaagccagcggaaagcc

SEQ ID NO: 218093 - RNA, 77 nt, Homo sapiens
gagaaaagaggaagcccagcgccagcagacaagacagaccacagagcaggacccaggcccaaaaggaaaagccagac

SEQ ID NO: 218094 - RNA, 59 nt, Homo sapiens
caaaaacgggaaaggagaccggaaacgagagaaacgaagacgaagaaacagccgcacac

SEQ ID NO: 218095 - RNA, 74 nt, Homo sapiens
cgcaagcagcggagacagccgaacggcggaaagagccgaaaggcggggcgaccggcccgaggaccgccgcacga

SEQ ID NO: 218096 - RNA, 60 nt, Homo sapiens
ggacgagagacaaacgccgaaggccaagacccgacgcaagacaagagaggaggaacacaa

SEQ ID NO: 218097 - RNA, 60 nt, Homo sapiens
cggaggggacggcccggcaccgcggacggcggccggagggggaagacagagaagaccaca

SEQ ID NO: 218098 - RNA, 56 nt, Homo sapiens
ccgagcgaacgcgcaacagggccgcacgcaagcccgccccccaaagcgaagccaaa

SEQ ID NO: 218099 - RNA, 71 nt, Homo sapiens
ggggcgccaaaaaggaaaaccgccaaggaccgaccccaaacgcaagagcggaaccgcccagaggcagacaa

SEQ ID NO: 218100 - RNA, 77 nt, Homo sapiens
gaaaaaagaaaaagaacaaaggagagaaaggaacggcagaaggcaaaagcagaccggaaaacccaccggcaagacca

SEQ ID NO: 218101 - RNA, 70 nt, Homo sapiens
acggacacacaaacggaaaagagagggcaggacagaaacggaggaacgcgagagaagagaagggaaccgc

SEQ ID NO: 218102 - RNA, 70 nt, Homo sapiens
caaagggacacccagaagagaggacagaagcaaaaagaacgaagggcacacgaacgaaaggaaacacagg

SEQ ID NO: 218103 - RNA, 49 nt, Homo sapiens
agaaaaccgaacagaaaggaggcaaaaccaggggaccagagcgaaagaa

SEQ ID NO: 218104 - RNA, 84 nt, Homo sapiens
ggccccgggcgagcggggaggaggcagaagaagcgcgcaaagcacacagaaggaaccggcaaacacccccagcacacaagagac

SEQ ID NO: 218105 - RNA, 79 nt, Homo sapiens
acaccagccgggcacagcccacccacaccccagaacaccccgcagaaaggccggcacaggagcagcaacgaaaagacac

SEQ ID NO: 218106 - RNA, 92 nt, Homo sapiens
gggcacagacaacccccaccgcaaccagaaacaaagagggcaaaaaaggagaaagccacaaggacaaaagacacggacaaccaagcaacaga

SEQ ID NO: 218107 - RNA, 81 nt, Homo sapiens
ccgcaagaacaagaccgccccgaccgcgcagggaacccgagcgcagaggggaagcagaggacccaggcgaacagcaaggag

SEQ ID NO: 218108 - RNA, 59 nt, Homo sapiens
gcagggaggccacaggggccgaaacacagagcaaggggagccgccaccaaaagcagacg

SEQ ID NO: 218109 - RNA, 77 nt, Homo sapiens
cgagagcaagaaagggaagggacgcaaaaaggaagccccacaaggaccaggcaaaacggaagagcacaagacccagc

SEQ ID NO: 218110 - RNA, 73 nt, Homo sapiens
ccacagcgaccccacccccaaagacacgccgggaaagaaagaaagcccaagcagaggagccgcgcgcccaggc

SEQ ID NO: 218111 - RNA, 72 nt, Homo sapiens
ggcaaaagcgaggcagaaccccacagccacaccagccaaaggagaacgcgaggagcagcacaagcacgagaa

SEQ ID NO: 218112 - RNA, 79 nt, Homo sapiens
ggagaaggaccaagaaccagaacccgaggaaaggaggccaacagaaagaacccagcaccgcaagcccacagagagaaga

SEQ ID NO: 218113 - RNA, 71 nt, Homo sapiens
gccccgaagggcacaccggaggacccaaagacaggaccacgcaccagcagagaaggaaagcaaaccgaagc

SEQ ID NO: 218114 - RNA, 61 nt, Homo sapiens
ggggcaggaggcaccagccggaacgaaagcggcacggagaagaaggaaaagaacggcccag

SEQ ID NO: 218115 - RNA, 76 nt, Homo sapiens
cggcaggaaggaggagacgaagaaaggagggacaggcggggaagaaagccggagaaaagcaccggccccagagccg

SEQ ID NO: 218116 - RNA, 77 nt, Homo sapiens
ccaaaacgagaagaagaagaaggagaccaggggcggagaacggaaaagcaccaggaagcagagaggaccgcagaagg

SEQ ID NO: 218117 - RNA, 81 nt, Homo sapiens
cacgcaccgggggagcgggagcgcggaaagcaggacagcaacgaggacagaccccaccggggcaacagcgcaaaacaccaa

SEQ ID NO: 218118 - RNA, 62 nt, Homo sapiens
agcacaaaggaagacgaaccggagaagagaccaagacacccaggagaaagacagcggggaaa

SEQ ID NO: 218119 - RNA, 77 nt, Homo sapiens
aacaggcggcgcgcgcggcgcgggacgcgcgcgggcacccacggagccccggggcgggccggcggcagagaccacgc

SEQ ID NO: 218120 - RNA, 69 nt, Homo sapiens
gcggggccagaggcgaaggggggagaacggaacgaggaaccccagagaggacagaagccaaccaggcag

SEQ ID NO: 218121 - RNA, 74 nt, Homo sapiens
gacaggaggagacaggcgagagaggaggacacgaccggccaggcgcgggccaccccacggggcaacaagggcca

SEQ ID NO: 218122 - RNA, 60 nt, Homo sapiens
caccccgagaaccgcaggagccagagagaccagaaacgagggcaaagcccacgggggaaa

SEQ ID NO: 218123 - RNA, 72 nt, Homo sapiens
ccagagaagacacccccacccaacacagaccaaaaacccagcaggagggacaaaacaagagaagcacagggc

SEQ ID NO: 218124 - RNA, 73 nt, Homo sapiens
gaacaagcaacggcgggcggggccgggcgggccgggaagggcaaggcagaagcccgaaaaaaaagccaggaaa

SEQ ID NO: 218125 - RNA, 74 nt, Homo sapiens
caggaccccgcagagaggaagcacccccgcacccagaggaaacaggggagcacgccaacacaacaccgaaaaaa

SEQ ID NO: 218126 - RNA, 78 nt, Homo sapiens
cagggcgggggagagccacaaggacaggagcgcagcaacaagcagagggcaggaccccaagaagcaggcagacacagg

SEQ ID NO: 218127 - RNA, 85 nt, Homo sapiens
cagccagggagccaagcgccgcccggccgcgcacgggacggcagcgcggaagaccgcaaaagaaggagaacgcccaggcagaggc

SEQ ID NO: 218128 - RNA, 70 nt, Homo sapiens
ccagaccaggacaaaaagcacaacggaggaaaaggaagggaaaacaagaggaaaaaaccagcaacccaac

SEQ ID NO: 218129 - RNA, 62 nt, Homo sapiens
agcgagcgagaaggcacggagcgccgcggagcgcaggagcagacaagggcccacaccaaagc

SEQ ID NO: 218130 - RNA, 71 nt, Homo sapiens
aggagggcccgcccgcgaccggcagccggggcaggagacaccgaggagcgccccgcgccgcggccccggcc

SEQ ID NO: 218131 - RNA, 85 nt, Homo sapiens
cagcaacaacagagagcacggaacgggccagcggggcgagcagagcgcgcgaagggcgcacacacaccgagcagcgggcaggccc

SEQ ID NO: 218132 - RNA, 78 nt, Homo sapiens
gcgaaaaggccaagaggaacagaaaccgaagagaaaggccaacgagaacaagcacagcccggaccgacaggaaagaag

SEQ ID NO: 218133 - RNA, 74 nt, Homo sapiens
caaaagaggcaacagaacaggaggacgcgcgaggaccccagggcagggcagcaggacaaacaaagccagagaac

SEQ ID NO: 218134 - RNA, 65 nt, Homo sapiens
caagggccccaagagggcacacagcacacaccgacaggaccgcagggcgacgcaccaaagcgaaa

SEQ ID NO: 218135 - RNA, 77 nt, Homo sapiens
agagaccccaagaaagaggacgcaccaccagagcaagggagaacaaccgcaacgaacaaacaggagacagagagcaa

SEQ ID NO: 218136 - RNA, 84 nt, Homo sapiens
acccccgaacccccagcccaaacccggaaacccagcggcccagccggaccgcgaccgcacaagcagccgccagcggaaccaagc

SEQ ID NO: 218137 - RNA, 86 nt, Homo sapiens
gagagagcggagccggcgggcggggaacccaggccccgccgaggcggccagagcccacgcaggagacgggaggagcgacaacggag

SEQ ID NO: 218138 - RNA, 73 nt, Homo sapiens
aaaacaggagaccgcggccgaccagagaacagggacgaaccacgaagaccaagagccaaaacacaccccccca

SEQ ID NO: 218139 - RNA, 34 nt, Homo sapiens
ccacgaaggcggcaccaaggcaaaggccaagaag

SEQ ID NO: 218140 - RNA, 78 nt, Homo sapiens
ggcgcagcgaccaaagcagggagaccggaacccccaaaacagaccagcgagaaagacgagagcgcacgcaaagaacca

SEQ ID NO: 218141 - RNA, 63 nt, Homo sapiens
agaggaccccggagagcaaggaagaaagcagcccagggaccaggcagacgaccaaggagcagg

SEQ ID NO: 218142 - RNA, 58 nt, Homo sapiens
ggaacgaaagcgccgcggcaaagcaagaagcgagaaccaaaaaggcaaagacagccgg

SEQ ID NO: 218143 - RNA, 86 nt, Homo sapiens
cgcaggagacgagaggacgggaccaggcgaagcggccgagcaggcgagcgaacgacgaaggaagaggcccagcagaagggaccgcg

SEQ ID NO: 218144 - RNA, 36 nt, Homo sapiens
caaccgcacagacgaccagaaggaagggaacacgga

SEQ ID NO: 218145 - RNA, 80 nt, Homo sapiens
gccaaaaccagaccaagaggaaaggacggggaggacgcacgacgcgcggcacgggaacgcagccggcacaaccaccacgc

SEQ ID NO: 218146 - RNA, 81 nt, Homo sapiens
gaaagaagcagggaagcacagaaagaccaaaagacaaagaagaaccaccaggagccaggcagaaaagaaaagaagaaaaga

SEQ ID NO: 218147 - RNA, 71 nt, Homo sapiens
cccagccccgaggcgggaacaggacccacgaggaagcggccgcggcgaaccccagagccagcgggcagacg

SEQ ID NO: 218148 - RNA, 79 nt, Homo sapiens
ggggagaacaaagcgaggccagagaaagagaagcggcacccccaggaagcgcgagacgaagaagccaaggaaagacaaa

SEQ ID NO: 218149 - RNA, 84 nt, Homo sapiens
caaggccgcgccgggcgggacgggggggcggcccggccccgcaggcgaagacgacccccaggcggcgcagacaagaggaggacg

SEQ ID NO: 218150 - RNA, 74 nt, Homo sapiens
cccgacgacacacacaggaacaagacaggcagaaaagagaccaaaagaccggaagcgaaagaaaaacaggagaa

SEQ ID NO: 218151 - RNA, 76 nt, Homo sapiens
caggccgccgggggccgcgcgcccgggcccgagccgccaggggggagaacaccccccccccagcagccgaagaaaa

SEQ ID NO: 218152 - RNA, 71 nt, Homo sapiens
cagagacagaaccaagcccacaaggcggggcaccaggcccagacggcgaacccgagcaagcaaccaccgcc

SEQ ID NO: 218153 - RNA, 71 nt, Homo sapiens
aaacgggccccaaggcgaccgggcaagagggcagagcgccggcacaaccaacaggcccgcacccaggcccc

SEQ ID NO: 218154 - RNA, 54 nt, Homo sapiens
cacacccaccaacaacaccacaaaaccacagccaagggcagggccagggggagc

SEQ ID NO: 218155 - RNA, 88 nt, Homo sapiens
gagagagcggcgccgggacaccggaggggaccccccgcggcaccccgcccgccccgcagccgggacgcagaccagcgccacccgcccc

SEQ ID NO: 218156 - RNA, 52 nt, Homo sapiens
acgacgccaccgaccgacagagcaggagacacaggccacacccagggagcac

SEQ ID NO: 218157 - RNA, 83 nt, Homo sapiens
ggggaaaaggcaaaaacccacaccgcaacccagcgagagaaagaggcgcggccagcgaagaagacgcagccagacccggcgac

SEQ ID NO: 218158 - RNA, 109 nt, Homo sapiens
ccgaacagaagacaacagagaaggccaggcagggaggagaaacacagaagcagggaaagggacagcccgcagggacacagcacacgcacaagggcccaaaggaccgcga

SEQ ID NO: 218159 - RNA, 57 nt, Homo sapiens
gagacaccaaccagaaaggcccggacaccccaacaggaggggcagcagcaggacagg

SEQ ID NO: 218160 - RNA, 74 nt, Homo sapiens
gagagaccagaggaggaagagcaagcgggggaccgaacaaggcaaaagggggcccagcaccagagggccggacc

SEQ ID NO: 218161 - RNA, 79 nt, Homo sapiens
gaaggaacaaaaggccaccaagggagaggacgcagacggaaccgaccgagcagggcacaagagagccacagccacggga

SEQ ID NO: 218162 - RNA, 71 nt, Homo sapiens
ccacaaagccgagacagcacaaggaccaaggaaaccaaggaggcccacccgacgcggagcgaccggcacgg

SEQ ID NO: 218163 - RNA, 81 nt, Homo sapiens
cgcccgacagaagacgagcccaggggcgggaaccgacgaggaccccagagacacgcccagaaccaaccaggagcgcaggaa

SEQ ID NO: 218164 - RNA, 74 nt, Homo sapiens
gccgcgggcgcaaagacgcaggaagaggaccacccgcacccaggggacgcacggcccaaccccgagcaaggacg

SEQ ID NO: 218165 - RNA, 64 nt, Homo sapiens
cgaccccgaccgcggggccggacaagaaccgaccgagagggagcggcggaggcggaccgggggg

SEQ ID NO: 218166 - RNA, 86 nt, Homo sapiens
ccggcccgccaagaccagagaaggaggagggaccacgcgcgagggggagagccacccagcagggaggggaaggggagccagggaac

SEQ ID NO: 218167 - RNA, 76 nt, Homo sapiens
cccccggccccaccgcggccgccggggccccggccgggagcccagaggacagaaccccagcccagagccaacaccc

SEQ ID NO: 218168 - RNA, 67 nt, Homo sapiens
gcacggcccacgcgagaagaccgcaggaaagcaggaaggcaagaaagccaaggacgaaacccacacg

SEQ ID NO: 218169 - RNA, 76 nt, Homo sapiens
gcagccagaccaagaacaaccgcggacacggagaggaagggagccgagaaagcgccgggagggaaaagggggaagg

SEQ ID NO: 218170 - RNA, 81 nt, Homo sapiens
caacccgaagaccggaccgaggagggccggcgccacacacccacgggcacaggacccaaagacaggaccacgcaccagcag

SEQ ID NO: 218171 - RNA, 77 nt, Homo sapiens
caagcgccaccaggcacacacggcagcacagccaggaccggagaacaaggccggcggaaccagcgagcacggggggg

SEQ ID NO: 218172 - RNA, 77 nt, Homo sapiens
gcgaccagcgaggagcaacacaggagccggagacggcaaacaaaggaacagaggcacgcggacacggccacagggac

SEQ ID NO: 218173 - RNA, 75 nt, Homo sapiens
agaggagcagagcgcagggagaagaaaaggaaccgcgcgacaggccaccaaggcgccaggggagggaaaggagcc

SEQ ID NO: 218174 - RNA, 80 nt, Homo sapiens
accccaccacaagggaccgcagggccggcacgagacacgagacaggagagaaaggagagacaaaggaccagacaaaggca

SEQ ID NO: 218175 - RNA, 74 nt, Homo sapiens
cgggaggccccggcgggggcgcgggcggcgggcagcccgcgggcgcccaggacaaggaacagacaccaccaggg

SEQ ID NO: 218176 - RNA, 52 nt, Homo sapiens
cgcccagaagggagaccagcagaacccaccaggggaaggacgccgagcgggc

SEQ ID NO: 218177 - RNA, 69 nt, Homo sapiens
ccgggggaaaagccagaaaggcaaccagcaagcagaaggaaaagagcagccagagcgcggaacacaaga

SEQ ID NO: 218178 - RNA, 53 nt, Homo sapiens
agagaccagggagaacagccaagggccaagggcaaaagcccacagagagagcc

SEQ ID NO: 218179 - RNA, 79 nt, Homo sapiens
acccaccggccaccggcggagcgagacaggacccagaccagccaaagagaagaagaaaggaagcaaaacaaagaaaaaa

SEQ ID NO: 218180 - RNA, 80 nt, Homo sapiens
cccgagagcaacaaagcaggcgacacagccacggaaggagaggaagacgaggaagcagaagaacaccaagcccaccaaca

SEQ ID NO: 218181 - RNA, 71 nt, Homo sapiens
ggagcgcgacgggggacgcagggagaagaggagagagcagccaggccccggccgagcccgcccggccagcg

SEQ ID NO: 218182 - RNA, 74 nt, Homo sapiens
gacggacagacgaagaggagggcagaggcacccaaagggagccccggggaggcacacagagaaaaaaagggaac

SEQ ID NO: 218183 - RNA, 78 nt, Homo sapiens
gaacaagcgaggccgggcagagggaccacggggagccccacgagacaacgaagagaggaaagaagcggaaaggaggga

SEQ ID NO: 218184 - RNA, 73 nt, Homo sapiens
aggaggaaaaagaaccaacggcgagcaggcccacagcaaggccccccaggccacccaggaccagcggcacacc

SEQ ID NO: 218185 - RNA, 69 nt, Homo sapiens
gagacacgaaggaccggcgcagcgcgaacgagaaaaaccgcgacgaagggaaaccaaaaacgagggaaa

SEQ ID NO: 218186 - RNA, 59 nt, Homo sapiens
acgcaggacaagaggcccgaggaagccaggcgcgggcaggggcaaaagcagcgagagca

SEQ ID NO: 218187 - RNA, 80 nt, Homo sapiens
ggcaacagacccgaaaaacggaccaaaagacagaggcaaaagcagaccggaaaacccaccggcaagaccacacccgaggg

SEQ ID NO: 218188 - RNA, 34 nt, Homo sapiens
accgcggaagaagaaagaaacccagggccgaaga

SEQ ID NO: 218189 - RNA, 79 nt, Homo sapiens
cgacaagcgcgcaaaggcgaacggcgggggaagaggaagaaaagcggaacaagacaaccaccaccaacaacaaaaaaac

SEQ ID NO: 218190 - RNA, 75 nt, Homo sapiens
agaagaccgcgcagagacgagggccaaggaagagcgcccggggccgccagaccgagacgccccccccgccccacc

SEQ ID NO: 218191 - RNA, 71 nt, Homo sapiens
cggaacaacacgggcaccacagaaggcccgggggaagaggaaaagggagaaggccaaaggcaccccagcag

SEQ ID NO: 218192 - RNA, 75 nt, Homo sapiens
agccggaccggcgagccccggggaggcaaccaaccagacgaaagaaagaccggagggcagcaagggaccgagggc

SEQ ID NO: 218193 - RNA, 66 nt, Homo sapiens
gggccgagcaaccagaaccggagcaggaggcgcacaacacccaggaagagcaaagaggcggaaaaa

SEQ ID NO: 218194 - RNA, 79 nt, Homo sapiens
cgggacggaccgagaccggaccgagagcggaccgagagcgcgaaacgcacgagaagaacacggagcagagaagaaagaa

SEQ ID NO: 218195 - RNA, 80 nt, Homo sapiens
ggcgaccaccccaaaagcaccggccccgcacagcaaaccagggacaggagcgcagcaggccacccaagcggaggcccggc

SEQ ID NO: 218196 - RNA, 89 nt, Homo sapiens
ggcggcgccgaagaggcgacgaggccggacggggcggacggcgacgcagcccgcggcagaagagcaacagaggggcagagccagcccaa

SEQ ID NO: 218197 - RNA, 74 nt, Homo sapiens
caccacaagacccaggccacgccgagccgccaggcagcaggacggagaaccggagaggacacagcagaagagaa

SEQ ID NO: 218198 - RNA, 66 nt, Homo sapiens
ccggacaaaacggaagcacgaaccaaccgaaaacagaaacaaacacaccaggccgccaccgcaaga

SEQ ID NO: 218199 - RNA, 77 nt, Homo sapiens
gagagacaaacaagaagcacgacagacgcacagggcaggacaggcacaaagggaagcagagaccacacagcgagcaa

SEQ ID NO: 218200 - RNA, 79 nt, Homo sapiens
cgagggacaacccggcggaccaagccgcgggagaaaccccaccacgcggcaggggccgccgaggaaaaagcaacaagaa

SEQ ID NO: 218201 - RNA, 78 nt, Homo sapiens
ccaacgggcaggcgcaccggggagaagcagcgccggcgacaaccgcagaaacacggccgggccccggaagaggaaccc

SEQ ID NO: 218202 - RNA, 58 nt, Homo sapiens
cagcccccgagggcgggacacagcggacgccacaacaagccaagacgggggccacgcc

SEQ ID NO: 218203 - RNA, 78 nt, Homo sapiens
gcaaggcagaccggcgaggacaccgcccagcccgagcaggccaacccaggccagaggcgaaagagggccagagacaag

SEQ ID NO: 218204 - RNA, 79 nt, Homo sapiens
gcagggccggccgggcacagcagaggccgcgcagcagcaaaggagagcggaaccggaaaagaaccgagacgcccgggag

SEQ ID NO: 218205 - RNA, 80 nt, Homo sapiens
ggagggagaacacagaaaccggccccagggcggacggaacagcccagacaaccaggcgccaaggagaaggagaggaagag

SEQ ID NO: 218206 - RNA, 74 nt, Homo sapiens
gaaggcgcgaggaggaaaggaggacgagccacagccaccaagaggaagagagaaaaaccaccagagggaagccc

SEQ ID NO: 218207 - RNA, 56 nt, Homo sapiens
ccagggcaggggacacgcgcagaggcaagggaggacccaggcagggccaggccagc

SEQ ID NO: 218208 - RNA, 42 nt, Homo sapiens
ggaaacgagaggggcaagcaggggccacgagcacccccggag

SEQ ID NO: 218209 - RNA, 68 nt, Homo sapiens
ggagaaagacggccagcaaggggaaccacaggaacggggacacgccggaaaaaagcgagcacccgcaa

SEQ ID NO: 218210 - RNA, 78 nt, Homo sapiens
aaacagccccacacaaagcagaagaagaccgaagggaagacccagagcccaaggaggaagccgcggagaaccgaacca

SEQ ID NO: 218211 - RNA, 74 nt, Homo sapiens
gcccgggaacaaaaacaaacaggagccgcggggcccgcccagaacagaagggcacacagggaccaagaagcccc

SEQ ID NO: 218212 - RNA, 82 nt, Homo sapiens
cccgaagaggagagagcgcgggcccaggaagcaagaacaacaggacagggacccagacgcggcaaaccccccaaccgaaaaa

SEQ ID NO: 218213 - RNA, 63 nt, Homo sapiens
ggcgagggaccacagcgccgaaagcgccccggaagaccgcgccgccagccggcgggccccaaa

SEQ ID NO: 218214 - RNA, 38 nt, Homo sapiens
caagcacggaccaaaacaacgacaaaccacaagaaggc

SEQ ID NO: 218215 - RNA, 78 nt, Homo sapiens
cccccaagaaccaacccccaaaggcgggacagcaggaagaagaaccaggcagacgcagcaggaagacagacaaacagc

SEQ ID NO: 218216 - RNA, 73 nt, Homo sapiens
agggacgggaccaacggggaaccccgggcccccgaggagggaacaagccagaccaggaggagaaaacaaaaac

SEQ ID NO: 218217 - RNA, 60 nt, Homo sapiens
cgcgccggcaccggggcggccggccaaagccagaaggccgggacagcagaaaacagccag

SEQ ID NO: 218218 - RNA, 77 nt, Homo sapiens
ggaagccaagcagaggacagaagaagacagggacagggcagccgacagggggcggggccgacaaaacagacggggcg

SEQ ID NO: 218219 - RNA, 72 nt, Homo sapiens
gaggaggcggggggccaggcgaagaccggaccgggggcaccggaccgagcaaagccagagaagaagcgggag

SEQ ID NO: 218220 - RNA, 71 nt, Homo sapiens
caggccagcgcgcggacaggaaccggacagcacaccagggccgggacacacgaagccggagaaagcgggaa

SEQ ID NO: 218221 - RNA, 76 nt, Homo sapiens
caaacggggggcgcggagggaccagcgagcgggcgcgcaggcaggcacaaggcccaggcacaggccccaggaggcc

SEQ ID NO: 218222 - RNA, 81 nt, Homo sapiens
gacacccgggggagcagacgcaagcagcaaggcgcggaccaggcgggcgcgacggggcagaggagcagcggccgcggacgg

SEQ ID NO: 218223 - RNA, 71 nt, Homo sapiens
gagcccacccaacgccccaccgcgaaaccacagaaacaaccgaaccagagacagcgaaagccgcagcaagg

SEQ ID NO: 218224 - RNA, 71 nt, Homo sapiens
cccagcaaaggagagcaggagaaaaacggcagcaggaagcacaaacaccagcccgaacgagacgagaaacc

SEQ ID NO: 218225 - RNA, 77 nt, Homo sapiens
gaaacgagcaggaaccccaggcggagcacggggcaacagaaccagggcgaacgacccccaacccccaccagcaccac

SEQ ID NO: 218226 - RNA, 90 nt, Homo sapiens
gcgcgaagaggcagcgcgaggaggagccgaagcccaaaaagcgaaggggaggcgccgcaagcgcgagaagcaacccaggcacccccaaca

SEQ ID NO: 218227 - RNA, 45 nt, Homo sapiens
aagaggagccaagcaaacagaagcgcggccaagcccacggcgcgg

SEQ ID NO: 218228 - RNA, 78 nt, Homo sapiens
aggacgcacccggggaaccagcaaacaagcaaccccagccagaagacagcgggggaagcagggaaaaagcagaaggcc

SEQ ID NO: 218229 - RNA, 59 nt, Homo sapiens
aaggagccggaaacggacaaacaggaagcaaggaagaggaaccccccaaggaggaaaag

SEQ ID NO: 218230 - RNA, 64 nt, Homo sapiens
ggcaccaccacagccgcccaccggaaggccaccccgcaggccagacgaagagcagagcccacag

SEQ ID NO: 218231 - RNA, 70 nt, Homo sapiens
gcaagcggcgccaccaccagcaccaggacccgagacagaaggccaaagagacagcagccagggcaacaga

SEQ ID NO: 218232 - RNA, 71 nt, Homo sapiens
agaaaacgggccgcagccccaccccaaccccggaggagaacggccgagcgaccaggagaggagcccccgcc

SEQ ID NO: 218233 - RNA, 81 nt, Homo sapiens
gagcgacgagcaggcggcgcagacaccaacgcgggcgcgaccgggagcggaccccgggaagacaaaacgaagccaggcaag

SEQ ID NO: 218234 - RNA, 70 nt, Homo sapiens
gaaagccagacaaaaggggcggagcaccaaaagcagaggaagaggcgcagcacgaagcaaccgaaggggc

SEQ ID NO: 218235 - RNA, 62 nt, Homo sapiens
agcagaggaggccggggaagagagacccgagagccaagggcagagcaaggcagcaaagagag

SEQ ID NO: 218236 - RNA, 79 nt, Homo sapiens
caccgggcggagaagccgcaaggccggccagccgacccagccaggcccagcaccagcacggccaagcagggcccagccc

SEQ ID NO: 218237 - RNA, 81 nt, Homo sapiens
acaacaagccagcagcggaagcaaccagagcccaggaagaggcggagacagcaggaagagaaaccacaaaaggaaaggaaa

SEQ ID NO: 218238 - RNA, 72 nt, Homo sapiens
gagagagacgggcacagcagagacacaagcaaaagccccagccaacaggacagcacaagaccggcaaaagag

SEQ ID NO: 218239 - RNA, 70 nt, Homo sapiens
gagaccaccaaacaggcgccaagcccaaccaagccgggggcgaaagccaaagcagcagcgcgagggaaag

SEQ ID NO: 218240 - RNA, 112 nt, Homo sapiens
gcccccggcccgagccgacacccagggaaccccaggaggaagagaaagggaagaccagagcccgagggcagggacgaaggacagccccagggcccagcagacccccggaccc

SEQ ID NO: 218241 - RNA, 71 nt, Homo sapiens
accacccccagcggaaccaagagggaagacaagagcaccaacggacaagcacaagcaaggaagaaggacgg

SEQ ID NO: 218242 - RNA, 91 nt, Homo sapiens
ccccaagagcgggacgcaggacaggaaaggccaggaggacaagggagaaagcagccaccaggcaagccaagagagagccccaccaggaacg

SEQ ID NO: 218243 - RNA, 64 nt, Homo sapiens
aggagccccaaagcccaggagcgggggcgacgagcagggggaggcccaggcaagcagagacaac

SEQ ID NO: 218244 - RNA, 70 nt, Homo sapiens
acaggcgccgccggaagacagccgaccacaaagccgagcccgccggcgccccccccccgagggcgggcag

SEQ ID NO: 218245 - RNA, 71 nt, Homo sapiens
cgggaaagggacaagaagggcaaagccgaacccgaagccggagagaagcgggaccgacggagacccagggg

SEQ ID NO: 218246 - RNA, 72 nt, Homo sapiens
ggcggagacgccggcgcccccccccccgccggagaaaccagaggcaagcgacgggaaggaccaccaaaccca

SEQ ID NO: 218247 - RNA, 63 nt, Homo sapiens
aagaccccccccacaggggagacagaggggagccgccaccaaaagcagacggaaaacccacgg

SEQ ID NO: 218248 - RNA, 74 nt, Homo sapiens
aagacaacagggcccccagcagccagaaccgcagccagaaacggcacgccggggaaagccaccgccagccggag

SEQ ID NO: 218249 - RNA, 36 nt, Homo sapiens
cggccaaaacacgaaccgagagacgggggcaccaga

SEQ ID NO: 218250 - RNA, 43 nt, Homo sapiens
gacggcagcgcacgggacaagaggaggggacacaaaggaagag

SEQ ID NO: 218251 - RNA, 53 nt, Homo sapiens
aaaagagaggagggagaacacagaaacccgccccgggcacaacaaaaccaaga

SEQ ID NO: 218252 - RNA, 76 nt, Homo sapiens
gaccgcaacacgagcaggcaggccccgcaggccacccaggcccggaggcagcgcagaaaaccagaaggcaccgaca

SEQ ID NO: 218253 - RNA, 75 nt, Homo sapiens
accacacccgcgccgacagaaaaagaacggggacacgcgagacaccaagagaagaacgaaaaaacagcaaaccgc

SEQ ID NO: 218254 - RNA, 84 nt, Homo sapiens
cagcccccaagagcgagaacagccacacgcacagacgccgggaccggaaagcagcaagcccgagaaaccaccagcagggaaagc

SEQ ID NO: 218255 - RNA, 79 nt, Homo sapiens
gcaaccgacaccaggaacaccaccagaaccccccacggaaaggacgaaagaaagaagcagccccagaaagaaggacgcc

SEQ ID NO: 218256 - RNA, 85 nt, Homo sapiens
gaggcccaggccgccacgcggccggcccgccggagaggaagaggagcaggacggagggagaaggggccacacggaagggccgagg

SEQ ID NO: 218257 - RNA, 77 nt, Homo sapiens
ggcagcgcaaacgggcgcgacccaaccagcagaacgaaaacaaacggaagagagggcagcaagaaagaacaagaaag

SEQ ID NO: 218258 - RNA, 79 nt, Homo sapiens
cacccgagaggaccggcgagggcacaggaggcggagcaagcggggagaaaccgggcggggaacagaccagggaagggga

SEQ ID NO: 218259 - RNA, 78 nt, Homo sapiens
gagcaagaggcgaccgggcaggcagcacgcgagaaggggagggggagaaagaagaggaagaagccacaggcaaggaga

SEQ ID NO: 218260 - RNA, 51 nt, Homo sapiens
cggagggggccccaccgggcccgaaggcgcgggcgcacaaaagagcacaaa

SEQ ID NO: 218261 - RNA, 86 nt, Homo sapiens
agccccaaagccgaacaggcagggccagacccaggcacgcgagaaggggagggggagaaagaagaggaagaagccacaggcaagga

SEQ ID NO: 218262 - RNA, 86 nt, Homo sapiens
agcccacggggaaacccaagcgccagcaccagggggagccacgaagacgaccccgacgcaggccaggagccgcggacagaagccga

SEQ ID NO: 218263 - RNA, 88 nt, Homo sapiens
cggcgcgaagcgcggggcgggcccgggcgcggcgggcgcgcccgccagcgcccggagaacgcgggcagaggggcaggagccgccgacc

SEQ ID NO: 218264 - RNA, 92 nt, Homo sapiens
gccggccaggaggcccaagacaccacagaagcccccgagcccaggacagaacaagcgagggaggcggcgggcgcaggaccgggggaaggggg

SEQ ID NO: 218265 - RNA, 78 nt, Homo sapiens
gaacagacgggacccccagccaaaggcaaagaaccagagagaaccaggaccaaagaaaaaggggacccaggggcccag

SEQ ID NO: 218266 - RNA, 85 nt, Homo sapiens
ggaggacgagggccagcgacggagagggcagaagaggaggagggcgccaagcgcaggagacagagcaggcgcacaggagcaggag

SEQ ID NO: 218267 - RNA, 78 nt, Homo sapiens
caaggagggagagaaagcagacacgcaccacaaaagaccaccaggcacccggaagcaaggcggccagcaaagaggaga

SEQ ID NO: 218268 - RNA, 82 nt, Homo sapiens
cagccgagccccaccgaagagaacagggccggggcacgacgacccaacagcaagacaacggcaagcggagaagagcaaggcc

SEQ ID NO: 218269 - RNA, 68 nt, Homo sapiens
gagaagaccaaagggaagagaaacgcaaccgagggaaagacaacaaggagaacagaagaacgaccaag

SEQ ID NO: 218270 - RNA, 72 nt, Homo sapiens
gccacacacgcaaacgagaaaagggcgccacagaggggccagagccacggaaaagggggacagacagcgcca

SEQ ID NO: 218271 - RNA, 70 nt, Homo sapiens
agcggccgcgcacccccggccggaggcaccagcgacagagcagccaggccacgagccagaaccgagacac

SEQ ID NO: 218272 - RNA, 77 nt, Homo sapiens
gacgccaagagacaaagaaaaacggaaaggaaacacaacaccaagcccacaagggcccagccacgggaaagggccgc

SEQ ID NO: 218273 - RNA, 73 nt, Homo sapiens
cacgcagaacgggcggacgggcgcccagccagccccaggaaaggacgccccccaaccaaaagcagccggaagc

SEQ ID NO: 218274 - RNA, 36 nt, Homo sapiens
cccggacggcacaggggcagccggcacccgcacaac

SEQ ID NO: 218275 - RNA, 82 nt, Homo sapiens
cccagcacgggaggcgagacgcccggagacgcgccgcccccgggagagccagaaagaggacaggcgcgggcagcgggaagcg

SEQ ID NO: 218276 - RNA, 96 nt, Homo sapiens
cggcgggccccaggcaaacgcacgacgccgccagggcgcagggggcagggccagaaggacccacggggcgacgaggcccagagcaagcgggcaccg

SEQ ID NO: 218277 - RNA, 75 nt, Homo sapiens
gcgcgccaccgggccgcaggaccaccccgcacaccacccaagacgcggacagaagaaaagcccccccggacagaa

SEQ ID NO: 218278 - RNA, 81 nt, Homo sapiens
cgcaaggaagaacaggaaccagcagcaaagaaggcacggaaagagaggacccgagccccaaagacagaaaagccccgagac

SEQ ID NO: 218279 - RNA, 82 nt, Homo sapiens
gcgggagcggagccgcggcccaccagcgcgcggcagcggacggcaaaggacccaggagcgacaccgaacccacgacccacgg

SEQ ID NO: 218280 - RNA, 75 nt, Homo sapiens
acccaccgacacacaggcaagcgcgaggaacacaagcgggggggggaaaagaaacaaacaacaagaagaaggaca

SEQ ID NO: 218281 - RNA, 68 nt, Homo sapiens
gggcccaagccggaaaaaaggacaaaccggcgaccacacacggggacgacggggaagccggacagcaa

SEQ ID NO: 218282 - RNA, 72 nt, Homo sapiens
ggacagcaaacaacggcgaccccaggcccacgccgcggagagcccagcgccgcaccccgcccccggcaggca

SEQ ID NO: 218283 - RNA, 62 nt, Homo sapiens
gcaaacaaagcagcgacgagaggaagcaaagccgaggaaggcaccaggagaggaggagggga

SEQ ID NO: 218284 - RNA, 77 nt, Homo sapiens
cacacaaggaaccgcaagggcagcacagaccaccacgccaacgagcagcggagcccaccaaaaaacacggcgggcgg

SEQ ID NO: 218285 - RNA, 73 nt, Homo sapiens
agggagacccaaaccgaaggcagcacggcacacgccaagcggacagcaaaaggagaaaaaccgcacaaaggcc

SEQ ID NO: 218286 - RNA, 71 nt, Homo sapiens
ggcccgcggcccggggacccacacccagagagacggcagaacacccagaacacagacaccaaaacagcaca

SEQ ID NO: 218287 - RNA, 80 nt, Homo sapiens
aagaggcccggcaggaagagaccagaagacagccaacgcagcccacagaccaaaccagaaccgggccgcccgcacccacc

SEQ ID NO: 218288 - RNA, 71 nt, Homo sapiens
gaaggaccaagaaccagcgcccccagcgagcagacacagggaggggcaccacgaccagcggaaacggcacg

SEQ ID NO: 218289 - RNA, 73 nt, Homo sapiens
gcacccgaaagccaggccagaaaacagcagcccagcacgaccaggaaagaggcaagcagaaggaggcccaggg

SEQ ID NO: 218290 - RNA, 70 nt, Homo sapiens
agcggccgcgcacccccggccggaggcaccagcgcagcccaaggccaaccccacgcaccgcccgcccccc

SEQ ID NO: 218291 - RNA, 100 nt, Homo sapiens
gagaagaacgggacccgcgcaagcggcacaaaggaggaaacagaaacaggggaagcgaagggaagcacgaaccccagggacaccgaaggagccaagaggc

SEQ ID NO: 218292 - RNA, 77 nt, Homo sapiens
cggccgaggcacgacaagcgaacacgggaagccaagagcaaggcaacaacagacaacacgggagagcacccgcacaa

SEQ ID NO: 218293 - RNA, 73 nt, Homo sapiens
gccagcagaagaccaacacaccagcgcgggaggcagaccggacgcaagccaccagagcccgggagccgggcag

SEQ ID NO: 218294 - RNA, 67 nt, Homo sapiens
gaaccaaagcaaagaagaaagaaacagagccaccgacaggccccagcagaacacccacaccccccga

SEQ ID NO: 218295 - RNA, 77 nt, Homo sapiens
ccgcgcagggcgcgagcgcccggggcacgcccgcggccgccggacggccgggcgcggagggccaagggcagggagaa

SEQ ID NO: 218296 - RNA, 60 nt, Homo sapiens
gaaaggacgcggggcccggagaggcgggacaagggcgcaccggggcgcagcgagggagga

SEQ ID NO: 218297 - RNA, 70 nt, Homo sapiens
ggaggaggggcgaagacgaaagagcgaagggggcaggcccagaggagcacccccaagccaccccaggaca

SEQ ID NO: 218298 - RNA, 43 nt, Homo sapiens
cgccggcggccgccagcaggaaacagcccgaacgcacagaaga

SEQ ID NO: 218299 - RNA, 83 nt, Homo sapiens
aggcaaaaacccacaccgcaacccagcgagagaaaggacgacaggccagcccacagggccaccggggcccgggaaggaggcag

SEQ ID NO: 218300 - RNA, 113 nt, Homo sapiens
gcagcgagcaagaacaagccaggaggcggagaaaacggcacaggcacaaaacgccagcaaggagggcagaacgcagaaagacgccccagacggaggccagaccggaagagcgg

SEQ ID NO: 218301 - RNA, 68 nt, Homo sapiens
ccgacgcaagggcaggaacgcacagaaggcccaagggggacccgaagcccgcgagaaggaggcgcaaa

SEQ ID NO: 218302 - RNA, 77 nt, Homo sapiens
cacacgagggcaggaggaccggacgccagccaagggcggagcccccacacggccaaccgaccggaagagcgcgaggc

SEQ ID NO: 218303 - RNA, 73 nt, Homo sapiens
agaaaacaaacaagcggccacccgaaagaaaaccgggcacaggaccaaagcaaacacagaccccccccccaaa

SEQ ID NO: 218304 - RNA, 73 nt, Homo sapiens
ggaagggcgggccaagacgcagaagagacgggagcacccaaaaaccaaccgcagagcccgggaagaaacaacc

SEQ ID NO: 218305 - RNA, 68 nt, Homo sapiens
gcaaaggaagcgcgaacagcagcgcaggccggggggggcacagagccccggaagacagcccccagcga

SEQ ID NO: 218306 - RNA, 81 nt, Homo sapiens
cacacgcagacccaccgacgaggagaggcggcgagccaagcaggcggccgaggccgccggagccccagacaccccccacac

SEQ ID NO: 218307 - RNA, 70 nt, Homo sapiens
cggcacaagaccccggcaggaacaagaccccaaacccagacgagaacacacaagaaaaacccggggaagg

SEQ ID NO: 218308 - RNA, 78 nt, Homo sapiens
cgaaggacccagcgaggaggggagcaaggaccacagaaacgcagaaaaaggggaaagaaaaggcacccagaagcaacc

SEQ ID NO: 218309 - RNA, 75 nt, Homo sapiens
ggcgcgcacaagggcagagggccagagcccagaaaagagccagggagcggagagcagagaggcagagcaagacgc

SEQ ID NO: 218310 - RNA, 73 nt, Homo sapiens
cccacgcccccgcgccggagccccgggccagacgcccagaagagcacaaagaaccaacgccaaggcagcgcgg

SEQ ID NO: 218311 - RNA, 49 nt, Homo sapiens
agcacgccggcccagaggccagaccaacaagcaacaaagacggccggca

SEQ ID NO: 218312 - RNA, 60 nt, Homo sapiens
ggccccggcaagcgccgccggagccccccagcccgcaggaggcagcgagaagaaaaagaa

SEQ ID NO: 218313 - RNA, 69 nt, Homo sapiens
ccacaccaccaggaggcgcggccaccagagcggaaaaaaaagggcaggcagagagaaagcaagaagccc

SEQ ID NO: 218314 - RNA, 73 nt, Homo sapiens
agagcaggggaaccgccagccggccgcacagaacaggagaaacaagagagcgagggagagcgcgggcaggcaa

SEQ ID NO: 218315 - RNA, 75 nt, Homo sapiens
gcagcaggcaaagaaaggccagaagagggcacgcacagagacccagacacacaagggggaagccaaaaccaaaca

SEQ ID NO: 218316 - RNA, 70 nt, Homo sapiens
aggggccgacccaagcacaccagaaagagaaaaaccggaagggaaacccgcgacaccgcgagggacaaag

SEQ ID NO: 218317 - RNA, 70 nt, Homo sapiens
cggccggccgaaaaaagaggcgaaaggagaacccccccccagcgagcgggaaaaagaacccgacaccggg

SEQ ID NO: 218318 - RNA, 76 nt, Homo sapiens
cgacgacggcgcgaggaggacgagcggcgagggacggaaacgaagaagaaagaagaacagaacggagccccacacc

SEQ ID NO: 218319 - RNA, 59 nt, Homo sapiens
ccgcacgagcagcggagaagagacggggcgacggggagaggcaggcgaggggacgaccg

SEQ ID NO: 218320 - RNA, 71 nt, Homo sapiens
ccagaacagcagcccggcagcaggccggcgagggggcaggggacgagccgcgcaaccgcagcgagacaccg

SEQ ID NO: 218321 - RNA, 74 nt, Homo sapiens
ggagcacagagggccccagggccacgaacgaggcgccacaccacccgccgggccccccccaagcgccgccaccc

SEQ ID NO: 218322 - RNA, 77 nt, Homo sapiens
agagcaacagcgcaaggcagagccacacaaccacaaccccaaaagagccacgcgcggaacacaacccaacgcagagg

SEQ ID NO: 218323 - RNA, 107 nt, Homo sapiens
cgcaaacccccccagccaaggccgacgcaaccgcccacagcgaaaggccgcccgggcgccgacggcgccgagacaagcgcaggcaccgcgcaccaccgcggaccacc

SEQ ID NO: 218324 - RNA, 59 nt, Homo sapiens
ggaagggaccccaggaaacaggaacccgggccacggagcaaggcgaagacagcaggacc

SEQ ID NO: 218325 - RNA, 72 nt, Homo sapiens
gcacaccggagagacgagggacgagagaagcccacaaaggaggaaacagaaaccagaccagaacgcagaagc

SEQ ID NO: 218326 - RNA, 77 nt, Homo sapiens
aaaggaggaaacagaaacaggcagaaagaagacccagagaaaaacgggagagaaagggaaggaaaagaccaagaccc

SEQ ID NO: 218327 - RNA, 80 nt, Homo sapiens
agcgagcgagggggggcgcgccggaaaccggagcgcgcagcaggcgccgcgaggccgcggccaggccgagcccgccacca

SEQ ID NO: 218328 - RNA, 81 nt, Homo sapiens
cggagacgccgggcagccgaacggagggcgacggagggagcacccaggccacagaggaggaaagagaggggaaagaagcag

SEQ ID NO: 218329 - RNA, 81 nt, Homo sapiens
gacagacgaaacggcaaaccaccaccaccagaagcaccacaaccgcagaggcagaagaaggcagaagggaacgaagacgcg

SEQ ID NO: 218330 - RNA, 54 nt, Homo sapiens
cgcaccaaagggacagaaccaaagacaggagaaaaccggaggaaaaccacaagc

SEQ ID NO: 218331 - RNA, 82 nt, Homo sapiens
caggacaccagccaaagccagcagcggccgcgggagggcgaccgagccggaggcaggggggacacagcaggcaggaacgccg

SEQ ID NO: 218332 - RNA, 77 nt, Homo sapiens
caacggcgacaaccgcacagccacgcccagaaggccgcagagagaaccggagggggcgccggggagcagggcgccac

SEQ ID NO: 218333 - RNA, 84 nt, Homo sapiens
caccaaagcaacgagcaggaggcaaagcaggagccacgagaccggagacagggcagccccaccggaagggagcccaaaggaacc

SEQ ID NO: 218334 - RNA, 83 nt, Homo sapiens
cccacaaggcggagccccaggcggcgggagcggcgggaggagcacaggacagaggcacgagcaggggaaaaaaccggccacag

SEQ ID NO: 218335 - RNA, 81 nt, Homo sapiens
gaccgacccgccgcacaccaaagggcagaggccaagaccggcccaagaaggagaaaagaagcgaggcggagcaagggcaga

SEQ ID NO: 218336 - RNA, 70 nt, Homo sapiens
ccccacacaggcgaggccaggcaaaggaaccacccaggaaacagcgcaagaccaagaccggacaaggcag

SEQ ID NO: 218337 - RNA, 76 nt, Homo sapiens
gcggcacaagaccaggagagcacagaggcccgaaagcagaacagagaaggaacgaaaagaaaaaaaaaggaagcga

SEQ ID NO: 218338 - RNA, 59 nt, Homo sapiens
gcaaagccaggaacccaggacaaggcccccaaaacacaagaggacggagaagcgacgaa

SEQ ID NO: 218339 - RNA, 33 nt, Homo sapiens
agacgaaccacaaaagagacagagcgccgggcc

SEQ ID NO: 218340 - RNA, 53 nt, Homo sapiens
gaaagaaaaaacgcgaagagcaacagagaggcgcggcccgcgccccgccagca

SEQ ID NO: 218341 - RNA, 78 nt, Homo sapiens
gacgacaaaggcggccgggaggaaggcgggagcagcggaagacaccaaggccagggagggccaccgcacggaagagac

SEQ ID NO: 218342 - RNA, 78 nt, Homo sapiens
gggcccgcagcccgacccgaggagcgcgggggcggcccgccccggacccgagcagagaggcgggaggcggcagaagca

SEQ ID NO: 218343 - RNA, 88 nt, Homo sapiens
gggcgccagagggggccagcgaccagggcaagaagagcacccgcacacacggaccgaaggagaagaaggagaaggggaggagaaggca

SEQ ID NO: 218344 - RNA, 75 nt, Homo sapiens
cagacagacccagagaaagaagcgaggaggccccacaggaggacgggaagggaaaacacacacaacaggcaacca

SEQ ID NO: 218345 - RNA, 80 nt, Homo sapiens
cccgaccgcaggagggagaccacagcaagacgccaggacccacggaagccagaaaggccagcaacagaagaaagcaagca

SEQ ID NO: 218346 - RNA, 79 nt, Homo sapiens
accgcgcgaggaccccaccacagaaaggcgaagacgggggaagaccgcaaggaaaggggcccgggcagagggaaagcag

SEQ ID NO: 218347 - RNA, 126 nt, Homo sapiens
cgaaaaacaagaaacccggagaccaaagaagacccaccaacaccagaaaggaaggggaggcaggcgacagaaggcagagagaggcagcagaaagcgcggaggccacgacagaaaagcaggaaacgc

SEQ ID NO: 218348 - RNA, 76 nt, Homo sapiens
gagcggagaacacaggaacgggccccggccggcaggagacaggcggacgcagcacccggccgggaaacgaccgcgg

SEQ ID NO: 218349 - RNA, 82 nt, Homo sapiens
gcaccagcagaggggaaaagggaaagacgcagcagaccgggaaacacagagcggcggcggaaggagaggaaggagaagagga

SEQ ID NO: 218350 - RNA, 78 nt, Homo sapiens
acgagccccggcgcccgcagggcgaaaagggaaagagccacccccgaacagaagccacccggaagaggggaagaggaa

SEQ ID NO: 218351 - RNA, 76 nt, Homo sapiens
cggcagcgcgagcgaagagagggcgcgagccggcagggccagaagaccaagcccgagagagggggagcccagaagc

SEQ ID NO: 218352 - RNA, 124 nt, Homo sapiens
aaggagcacgaggagggcgggaccggaggaggggccaagggggccccgaagaccgcacgaacagcaagaaagcaccagccaagcagaagggagccagcggacgagggcgccaggccagggcagc

SEQ ID NO: 218353 - RNA, 80 nt, Homo sapiens
ggcacgacgacggccccagcccagccaccagagcaccaagcagacacgcagacgggagcgggccgagaaaaaccacagag

SEQ ID NO: 218354 - RNA, 53 nt, Homo sapiens
cagccagcaccaagccggggcacacaggggacagaagggaccaacggccaaaa

SEQ ID NO: 218355 - RNA, 78 nt, Homo sapiens
aaagggggaaagagaagagcaacgagcagaccgaggccgaagacgaaaaccacagccagggcacccccgagaggacaa

SEQ ID NO: 218356 - RNA, 74 nt, Homo sapiens
gaagaaaggaggaagggaaagcagcaacacaaccaggggagcaggcgaagcgagccagggaagcgaaccaggcg

SEQ ID NO: 218357 - RNA, 69 nt, Homo sapiens
ggggagccggaggagcaccaggacagggcagaccgccagcagcacagcaagccacagagagggccggca

SEQ ID NO: 218358 - RNA, 74 nt, Homo sapiens
gaggccagccggaagacagagagagaaaagagggacgccaaacacccaaaggggcaccaccagcaggaccacag

SEQ ID NO: 218359 - RNA, 78 nt, Homo sapiens
gggggcggcggccacgccaaggacggaccgccagagcggaacgaccccagagcgagcccgcagcagcccagaaacaaa

SEQ ID NO: 218360 - RNA, 55 nt, Homo sapiens
cggacgccggagaggcaccggaccgaacagagagaagggcgggagaaaccaagga

SEQ ID NO: 218361 - RNA, 82 nt, Homo sapiens
gaggaccccagaggcaggaaccggcccagccagcggcaggagaaggaccaaaaggaacgagacggaagagggagcgcggcca

SEQ ID NO: 218362 - RNA, 63 nt, Homo sapiens
ggaggagagagggagagccaaagaagacggagccaccaccaccccgagagacggaccggacca

SEQ ID NO: 218363 - RNA, 72 nt, Homo sapiens
gcagcccgggaagagccgcggggcaaaaacacaagaagagagcgagaacaccgcaagcccagacggaccccc

SEQ ID NO: 218364 - RNA, 31 nt, Homo sapiens
aaagcacccgaaagaaaggccccccacccgg

SEQ ID NO: 218365 - RNA, 72 nt, Homo sapiens
agcagcgccaagcgagaacaaggggaagacccgcggaaggcacacaagacacagccaacaccgaaccgaaac

SEQ ID NO: 218366 - RNA, 70 nt, Homo sapiens
aagaaacgaaggggggaggcccaggccaaaagaggaaacacaaagaagacaccagaagggccagcaccac

SEQ ID NO: 218367 - RNA, 57 nt, Homo sapiens
cacaaggcgccgaagaacagacccaaagagccccggggcccgcgcaaaaccaaccgg

SEQ ID NO: 218368 - RNA, 67 nt, Homo sapiens
cgacgcgccaacaacgggcacacaagaagccagcccagaaagggaaaacgacaccagggaaaaagaa

SEQ ID NO: 218369 - RNA, 72 nt, Homo sapiens
ccgacagcggacgccccagcacccccagcgggcagagagaagaacgagagccaaaggaccgcagacaggaaa

SEQ ID NO: 218370 - RNA, 81 nt, Homo sapiens
gcggcgcgggccacaccagaggagccggaagaaaagcgcacaaacggccacaaaaagaagaaaaagagagacgaagacaca

SEQ ID NO: 218371 - RNA, 69 nt, Homo sapiens
gggggccaggccccgcccccaccaacaccaagaggaacaggacacccaaccgcgagaccagcaaggacg

SEQ ID NO: 218372 - RNA, 79 nt, Homo sapiens
ccaaagccaggcagaggccccggaggagcggagaaccggagcggccaacggcaggaggggcccagcggagaagagccca

SEQ ID NO: 218373 - RNA, 80 nt, Homo sapiens
gaggggcgcggaggcgaccgccaggcgcccaaacccggaccagaaaccaagcgcaacacgaagagggagcacaaagaaga

SEQ ID NO: 218374 - RNA, 100 nt, Homo sapiens
ccaggcagggagccccagagagacaagccccaaggagcccggccccacaccggcacacagcgccaacggacggggcaagacacagcaaggacacagcagg

SEQ ID NO: 218375 - RNA, 75 nt, Homo sapiens
gaaagagggcagcggaaaagcaaagacaagccgggaagagaaagcgcgaggacggaaggcaaacaaagacgagac

SEQ ID NO: 218376 - RNA, 75 nt, Homo sapiens
aggagagcgacggccagcccaccggaaccccaagaggaacgccagagcaagcaggaagccccacgggcacaaaca

SEQ ID NO: 218377 - RNA, 78 nt, Homo sapiens
agcggaagacgacgaggacgcaggcaacggaggcacccaccacgggccaggcgggccagaggcaagccgcgggagcca

SEQ ID NO: 218378 - RNA, 66 nt, Homo sapiens
gaacgcggacccccgcagaggagacaaacaagaagcgaccccgcaacaggcagaggaacgaaacga

SEQ ID NO: 218379 - RNA, 89 nt, Homo sapiens
aagccagcagcaaccgaaacgaacagccagcaacccaaagggagaagaggagaggaacggcagagcgaaacaaacaagagggcgaacca

SEQ ID NO: 218380 - RNA, 74 nt, Homo sapiens
gccgggcgcccggcgaaggagccgcggcggggggaaaaggagccccaccaagggcccgagcaggaaagagaagg

SEQ ID NO: 218381 - RNA, 84 nt, Homo sapiens
gcaggagcagaccggagccggaggaagagaaggcagcggacgaggcaggcgggcccgcggcagccggcacccgcacaacccagg

SEQ ID NO: 218382 - RNA, 65 nt, Homo sapiens
aacacgaacaaagagcgaccgagaaaaaccgaaagagccagcacggagggcccaggaagcagcca

SEQ ID NO: 218383 - RNA, 81 nt, Homo sapiens
ccggaacacgcgcagcgcggcagggccagcgaccggccggggccggccgggcgggcagagagacggggcaccggagccagg

SEQ ID NO: 218384 - RNA, 76 nt, Homo sapiens
cagcgacaagaccaaaaacacaagccacccagcgaaccgagagcaacaggaccgggcaaggagggacagcccgacc

SEQ ID NO: 218385 - RNA, 78 nt, Homo sapiens
aaaaaacgcccgacagccgccaaaaagcaagaagcacgaccagcggaagacccccgggccagcccagaaaaaaaacca

SEQ ID NO: 218386 - RNA, 74 nt, Homo sapiens
ccaaggcgccaggaggcggaccgcgacggagccggacacgggggaaaaaagagccggacgacagagcacggcaa

SEQ ID NO: 218387 - RNA, 77 nt, Homo sapiens
aaacaggaccccgcggagaccccgagaaaccgccgaccaagagcgaagcgacggcagcgggccccaggccggggcga

SEQ ID NO: 218388 - RNA, 70 nt, Homo sapiens
aagacagagggagacgaaggacaggaaaaggagagagggaagaagaggaagaagaagaagcccccagaag

SEQ ID NO: 218389 - RNA, 91 nt, Homo sapiens
cccaggacgcaggaagacaagaagaggcaggagccaggcggaaagcgccagcggcccgccgcccgcaagcgccacacccggcccagcccgc

SEQ ID NO: 218390 - RNA, 73 nt, Homo sapiens
ccgcaccaaggccgaaaaacccccaaccagcagggggcccacgagaagagcaggcgacgggggagagggagac

SEQ ID NO: 218391 - RNA, 72 nt, Homo sapiens
aagagacccccagaccaggaaagacaggagcaccacgaagaaacgcccagaggagccagaaacagccaaaca

SEQ ID NO: 218392 - RNA, 75 nt, Homo sapiens
gccccaagccgcagacgcggggagagaccaaacggaccaaagacagggcaagcagcgcaccggcaccagagaaga

SEQ ID NO: 218393 - RNA, 63 nt, Homo sapiens
cagggaggccacaggggccgaaacacagagcaagagcagcggggagaaagaacgagaaaccaa

SEQ ID NO: 218394 - RNA, 53 nt, Homo sapiens
ggaaacgggggcaacccgaggaggcagcagcagcgagccccaccgccggccgg

SEQ ID NO: 218395 - RNA, 71 nt, Homo sapiens
ccccaagacagccccaaggaagacgcagaacaccggaagaagacccagcaaaaccaggcaccccgggcccg

SEQ ID NO: 218396 - RNA, 40 nt, Homo sapiens
ccagagccaacacacagaagcagaagcaacaagagagaca

SEQ ID NO: 218397 - RNA, 59 nt, Homo sapiens
cgcacgagcaccagccagagccagacagcccaggaagcccagggcgaggacgccacggc

SEQ ID NO: 218398 - RNA, 68 nt, Homo sapiens
cccgggcgggccccacccgggacaggagagacaacggaggcaagaaagacggagaagcgagaagagac

SEQ ID NO: 218399 - RNA, 66 nt, Homo sapiens
gaaagccggccccagcaccaccaagggaacggagggaaagcgacaaacaaccaacccacagagacc

SEQ ID NO: 218400 - RNA, 73 nt, Homo sapiens
aaaaagagaggagcgaacgagacagaacaggaaaaagggaaacgagaggaagcaaagagaaaacaagaagaag

SEQ ID NO: 218401 - RNA, 67 nt, Homo sapiens
gagagccacggaaacgaagacgagaacaagcgcgaacagcagagacagagggaagaaacagacgcgg

SEQ ID NO: 218402 - RNA, 78 nt, Homo sapiens
gggcggacccaggccgagcggcacacccccgacccacgcacccgcagcccggaccgacaggaaagaaggagcccacaa

SEQ ID NO: 218403 - RNA, 69 nt, Homo sapiens
cggaaacagaggcaagccgggaacgcaaaaggaccagccaggggggaccaaggcaacgaacacaagcag

SEQ ID NO: 218404 - RNA, 78 nt, Homo sapiens
aaagcagcgaccgaccccccccggaccccaggagccggcgcccccgcccgagaaacgcacgagaccgaacccaaggag

SEQ ID NO: 218405 - RNA, 73 nt, Homo sapiens
ccgccgcaagcaaaaccaccagccaacggaaaggggagaggcccaacccgccgacacgagggaccacgcaaac

SEQ ID NO: 218406 - RNA, 51 nt, Homo sapiens
cgcggggacgccacaaggccggggggggcacagagccccggaagacagccc

SEQ ID NO: 218407 - RNA, 60 nt, Homo sapiens
caggagaagcccaggagacgccgagaagggagccccggggaaggacggcacaagcgccca

SEQ ID NO: 218408 - RNA, 81 nt, Homo sapiens
ggaagcccaccgacgaggacggaggacggagaggaccgcaccagcacgcccacccagagcagcagccgcccaaaacacaaa

SEQ ID NO: 218409 - RNA, 98 nt, Homo sapiens
aacaccacagccggaccgcacccgcaccgccaaccacgggcgaggaggcgccgcgcagaccgacagaaccccgggaagcgacccgcgggcccgagccc

SEQ ID NO: 218410 - RNA, 71 nt, Homo sapiens
cggggagggaaagggaagacacgaaaaaagagaaagggccaacgagccgggccagaagaaaccagaaccac

SEQ ID NO: 218411 - RNA, 86 nt, Homo sapiens
cagcccgcgagcacaggagcgagagaggaccccggacacgaaagccgggaaagcacgcaacgacaggcgcccccgccaaccgggca

SEQ ID NO: 218412 - RNA, 122 nt, Homo sapiens
gacaggccaaagagcggcaccgggaggaggaggagacgcaggcggcccaggaccgggaggagagaagcgccggaaagaaagacacgcagaggagaggagaaaggagacgcagaacgggcaga

SEQ ID NO: 218413 - RNA, 55 nt, Homo sapiens
acagaccaccacgccaacggcgggaccaggacggaccaacacaagcacccaaaag

SEQ ID NO: 218414 - RNA, 81 nt, Homo sapiens
aacggaaagaagcaccggagagacagcacagcacccacaaagcaacgacaagagagggcggcagaaggaacaccgagaaac

SEQ ID NO: 218415 - RNA, 68 nt, Homo sapiens
ccccggcgccgcgccggcggcgacgggagcgggccgagaaaaaccacagagacacacgcaagccgacg

SEQ ID NO: 218416 - RNA, 77 nt, Homo sapiens
caacaccacccacccaccacgacccgggcccaaagccgaaggcaagggaaggaagaccgaaaacagcaccagagacc

SEQ ID NO: 218417 - RNA, 74 nt, Homo sapiens
gggaggggggaggaccggccccaggcgcgccacagccgagccggaaaccaagcacccaaaaggccacccaaaca

SEQ ID NO: 218418 - RNA, 69 nt, Homo sapiens
aaacaaacgcgaacacccaaagaaaagcaaacccggaccccagagcgggcccagcaaggagggggacga

SEQ ID NO: 218419 - RNA, 87 nt, Homo sapiens
cggcagagacagaagagcggggcggggccggcgaccaggaaccgggcgagcagcggcgggggcccgagggggagagcagaaagacga

SEQ ID NO: 218420 - RNA, 78 nt, Homo sapiens
gaaacagcagaaacgcaccaggccaaagaaagagaagacaccagaggaccagaacccacgagaaacagacgagccaac

SEQ ID NO: 218421 - RNA, 75 nt, Homo sapiens
ccaaggggggggcacccccacaacgacacaccagcaaaaaaaccccacggaacccagagagaagaaaaaggaaag

SEQ ID NO: 218422 - RNA, 61 nt, Homo sapiens
caagcaggaccacccaccagccaccaggagcagcagccaagcggacagagaccgccccgcc

SEQ ID NO: 218423 - RNA, 76 nt, Homo sapiens
caaaaaccagacaacgagaaagagagaagaaagacagcgggaagagaaacaaaggaggagaggcccaagaccagcg

SEQ ID NO: 218424 - RNA, 59 nt, Homo sapiens
cacaccacgggcggccccagaagggggggccgcccgcccaaggcaggaagaggggccgc

SEQ ID NO: 218425 - RNA, 71 nt, Homo sapiens
cggggaaaacccaagaaacacaggcacaaaggccaaaccagaggacaacgaccaagaggagaccaaggaca

SEQ ID NO: 218426 - RNA, 77 nt, Homo sapiens
gcggacccgcggcaccgccccgcgcgcgcccggccccggccccacccgagcggccccaagaggcggagaagaaccca

SEQ ID NO: 218427 - RNA, 85 nt, Homo sapiens
cggccggcacggcgaaccacgcgaggggcgggagccgcgcacaccaccacacaccacaaaaagaggagaaacagaaaaagacaaa

SEQ ID NO: 218428 - RNA, 87 nt, Homo sapiens
gccgaccaagaggagacgccgagcagccgagccgaagcccccgagcgcccacagcagaaggaggaggccccccggcgccgcccccgg

SEQ ID NO: 218429 - RNA, 87 nt, Homo sapiens
ccagagccggagcgcgaaggccgggacccggccccggcccacaggggggggcaaacccgagagaacggaacaacagcagacgacagc

SEQ ID NO: 218430 - RNA, 80 nt, Homo sapiens
cccaccccacccaccggagaagcacggcccaagcagaaagcgggacacacaggaggagagaaagaacccacgcaggacga

SEQ ID NO: 218431 - RNA, 66 nt, Homo sapiens
acgggggcagggcaaaacacacagcgagggaagaaaagggaaccagcggagcgggacaacgcagca

SEQ ID NO: 218432 - RNA, 53 nt, Homo sapiens
acaacccgacccgacgaggaaccgagagacacaggggcacaagacgggacagg

SEQ ID NO: 218433 - RNA, 88 nt, Homo sapiens
agaagaccgcccggacgggaagcgggaaagcgcacgaccggggccgaaggaggccgcgggagcccagaagcgcggaggagccaccacc

SEQ ID NO: 218434 - RNA, 69 nt, Homo sapiens
ccgcgcgcccacgccgcgccagacagacagaagcgaaggggacagggggagaaccgccagggaaacccg

SEQ ID NO: 218435 - RNA, 85 nt, Homo sapiens
gagaagcccgacgacccccgaacaccccggggcgcgccggaggccgaccgggagcacgcaaacagcggagcgcggacggcccaga

SEQ ID NO: 218436 - RNA, 73 nt, Homo sapiens
gaaagagcccggagcagccaggaacagcaggaagagaaacaccaaggaaccacacaagaaaagaaagcaaaag

SEQ ID NO: 218437 - RNA, 77 nt, Homo sapiens
gcaccggagggacggcacagggaggccagccggagaagcgagcagcgggaagaaaacgccagagaagcagagcagcc

SEQ ID NO: 218438 - RNA, 51 nt, Homo sapiens
ggcagacaaaagggccaaagaagggagagagggaccgggagggagccacac

SEQ ID NO: 218439 - RNA, 84 nt, Homo sapiens
gacggcccgaacggccagacccggagacgacccgacgaagcccacgccgggacccagcgcagaacagaaggagcggcggacaca

SEQ ID NO: 218440 - RNA, 85 nt, Homo sapiens
ccccgagagcgggaacagccaggggcgacagcaagaagaggacagacccaaaggaggaagaggaagaagaagaagaagacgaccc

SEQ ID NO: 218441 - RNA, 85 nt, Homo sapiens
ggcgaagcacgagcagaccggcccgaccgcccacagacccaaacaaaggagcaagggaaccaaagaggccccaaagaggaagacc

SEQ ID NO: 218442 - RNA, 50 nt, Homo sapiens
ggagccggggacgccaggcccgcgcgggagcgacacgacaacaaccagag

SEQ ID NO: 218443 - RNA, 71 nt, Homo sapiens
cccgcccggccccgagagcgggacaggacccaacagccaagaaaaagaaagaaagggaagaggaagagcac

SEQ ID NO: 218444 - RNA, 56 nt, Homo sapiens
gccggaacgccccaaaaaagggcaggacccgaggcgccagcagcagcaagaccggg

SEQ ID NO: 218445 - RNA, 103 nt, Homo sapiens
gaacacggccccggggaccaggagccagccggccaaaaacgaagccgggcgcacacgcaggcacaacaagaagcaagggcaaccagaaaaggcgaaaagccga

SEQ ID NO: 218446 - RNA, 89 nt, Homo sapiens
aaccgaaccagaagacgagagccaacgcaaccaggcgcaggacacacagagagggaacaacgagagcgccccaagggagccagcgcagc

SEQ ID NO: 218447 - RNA, 78 nt, Homo sapiens
gaacagaaggcacagaagaggaaggaagagggaacaggccaacaccgccaccggccgaagggcaccggacacaagcac

SEQ ID NO: 218448 - RNA, 70 nt, Homo sapiens
cgcccccacgacgccgcgcggcgccaccgcagaccacagagaagcaggcgaccaggcgcgcgggcaagaa

SEQ ID NO: 218449 - RNA, 66 nt, Homo sapiens
gccccaaaagcgggaacaggaagacagaccgcgaggccacacccaagaccgagcccaagcccgggg

SEQ ID NO: 218450 - RNA, 83 nt, Homo sapiens
cgcggccgaaggccgggggccagccaggccgacacccaaccgggcaggcgagacgcagagggccagcggcggggcagccgagg

SEQ ID NO: 218451 - RNA, 73 nt, Homo sapiens
aaggaccaagaaccaggcaagaacgccccggcaaggacggaggcaggcaccaccaacagcggggaaaacccag

SEQ ID NO: 218452 - RNA, 68 nt, Homo sapiens
accagaaagaggcacagccccaaaagaaaggcagcgcagaaaggccagacagggaccgaacgacacaa

SEQ ID NO: 218453 - RNA, 84 nt, Homo sapiens
agcccgcgaggccgacaagagccacccggagcagagaaggagggggcagagcacggcaggcagaaggggccaacccgggggaac

SEQ ID NO: 218454 - RNA, 75 nt, Homo sapiens
ggccggccacagccccaaccggcccagccccccccggaggcagggagccaggagaaagaggaagagcaacagcca

SEQ ID NO: 218455 - RNA, 78 nt, Homo sapiens
gaacagcaggaacggcgcgcaaacgggccacggccaaggaacggaggcccggagaggccaccaaaggacaaagccaaa

SEQ ID NO: 218456 - RNA, 71 nt, Homo sapiens
agagagggagagccaaagaagccgggacagaccggagcggggaggagcgccggccgaaacgagcgggcggg

SEQ ID NO: 218457 - RNA, 74 nt, Homo sapiens
ccaaagaaccacccaggaagcaagacccaccacggagagcccaggaagccaagcggaggcagcggcggaccggc

SEQ ID NO: 218458 - RNA, 39 nt, Homo sapiens
gcgagcgggcggcacgcacgcaggagagcgcaggggaga

SEQ ID NO: 218459 - RNA, 53 nt, Homo sapiens
agcaggacaagccagcgcacagcaacaggccgagggaaagaaaccgaaccaaa

SEQ ID NO: 218460 - RNA, 102 nt, Homo sapiens
gacggagaacagagcaaagacagcaaaaaaaaggaagcacaccagagggccaagggcagggagaagggacaacacagaacacagaccagggcaggaccacca

SEQ ID NO: 218461 - RNA, 57 nt, Homo sapiens
ggacgagccggagcagcagccaggaaagggcaaaagaacaaacacgagaccccagag

SEQ ID NO: 218462 - RNA, 70 nt, Homo sapiens
cagaagaagagaggagggagaacacagaaaccggccccaggcaacgcgcccaagaggacagcgccagaaa

SEQ ID NO: 218463 - RNA, 77 nt, Homo sapiens
accagcgggcaacaggcacggcaccaagcccgaaggaagaaagaacacgaagagagggccggcacccgccggaaccg

SEQ ID NO: 218464 - RNA, 72 nt, Homo sapiens
acagaacgacgaggaaggcaccaagcccccagacaaaccgaaggcgacagagacaggcaccccaaacaccgc

SEQ ID NO: 218465 - RNA, 88 nt, Homo sapiens
agacgacgcaccgcaggcagacaaaagggccaaagaagggagagagggacgccagacgggacacgcacaggggcgaggccggcccgag

SEQ ID NO: 218466 - RNA, 73 nt, Homo sapiens
aggaagcccacaccgggcagccccagccgaaggagcgcggaaggcaaagaagaaccaccgggccggcccggga

SEQ ID NO: 218467 - RNA, 74 nt, Homo sapiens
gcgcgggaggccgggcccaacacacgcagcccgggagggagcgagcccggggaacagggaccgacccggcgcgc

SEQ ID NO: 218468 - RNA, 40 nt, Homo sapiens
gaggggaccggcgcggacccaggcaaaagcagaccggaaa

SEQ ID NO: 218469 - RNA, 75 nt, Homo sapiens
ggaccaagaaccagacaaagccgaggcaccaaacgacccggacgcgacgggcacgacaagagcagcaaaacgcgc

SEQ ID NO: 218470 - RNA, 85 nt, Homo sapiens
agcgggagcgcgcgcggcgcggcggccgggccccgagacggggacggggaaccagaagaggccaaccagcacgaacgccagcagc

SEQ ID NO: 218471 - RNA, 72 nt, Homo sapiens
agacaagcagagccggcaccacaggaagccgagcagcaaaagcaaacagacccccccagccaaaggaccgac

SEQ ID NO: 218472 - RNA, 71 nt, Homo sapiens
gagccacacgcccagcagccaccaacacccaaaggacaaaccggcgaccacacacggggacgacggggaag

SEQ ID NO: 218473 - RNA, 67 nt, Homo sapiens
ccaaccccgcgcgcggccggaagaccccaaggggaacggcgagggaacccaggaaggagggcgacaa

SEQ ID NO: 218474 - RNA, 76 nt, Homo sapiens
caccggccagcccagcccccgccgcgggcaccggagggcaaacaaggagcaacccccaggcaaaacaaccgccaga

SEQ ID NO: 218475 - RNA, 85 nt, Homo sapiens
ggcaggacggaaggggaagaggcccacccggagaaccccacggagaaccagaggaacaagacgccaaggagacgccgcagagacc

SEQ ID NO: 218476 - RNA, 78 nt, Homo sapiens
ggccgagagccgcggggagaaggccacacccaggcagcaagggcaccgcgagcaaggacacaaaacccgaagccagca

SEQ ID NO: 218477 - RNA, 71 nt, Homo sapiens
gccgcaggcagcccgcggcagcaggacacaggaaggacacagacaaaagaccaggagagagcagcaaagca

SEQ ID NO: 218478 - RNA, 77 nt, Homo sapiens
agaggaaaaaaaacagaacaggaggggagagggcaggaaccaccgcccaaaggagagccgagagccaaggcggacaa

SEQ ID NO: 218479 - RNA, 122 nt, Homo sapiens
cgcagcgcgccaaagggacgaccaaaaagcagcggacagcacaaggaaccacccgcggcagagacacgaagcagcacaggaggccaccaacagcagcaaccgagccggacgcgccccggacc

SEQ ID NO: 218480 - RNA, 73 nt, Homo sapiens
agaggaagaggcccgcccggcacgggcggcgggcccggggacgcgcgggagggcgggaaagaagcaagaagag

SEQ ID NO: 218481 - RNA, 76 nt, Homo sapiens
ggacccgcgaagaaagccaaagccccgaagacggaagaggaggacagcccaaaccgagagacgcagcggagaacgg

SEQ ID NO: 218482 - RNA, 69 nt, Homo sapiens
cagaagacgaacaggcgcacaccacaacagagagggccaaccaagccagcagggaccggacccaacaac

SEQ ID NO: 218483 - RNA, 66 nt, Homo sapiens
ggaaggcgcagcgcaccgaaagagcaccgcacaaaacaacaaggggagagacacagcccaagaaca

SEQ ID NO: 218484 - RNA, 72 nt, Homo sapiens
agggcgcggcggggggcacaaaaggagaggagccaagcccaacgggacgggaaaacggccacagccaacgac

SEQ ID NO: 218485 - RNA, 72 nt, Homo sapiens
gaggacaacggcgcgccgccagaaggccagaacacgaacacaggagccaccagaaaaacaaaaaggagggaa

SEQ ID NO: 218486 - RNA, 65 nt, Homo sapiens
gagcacccggcggagcagagccagaccccgaaaagagcccaacaggaaaagagaacagcagggag

SEQ ID NO: 218487 - RNA, 78 nt, Homo sapiens
gggaaggaagggacaagacccacagcaaagccagcgacagaagccagggaggaacacggccaaccacaaagaacaaca

SEQ ID NO: 218488 - RNA, 73 nt, Homo sapiens
aaaaagaagaggacaaccaagccccagaaccagcacgggaggaagggcaacagcgaacagagcgccgccaagg

SEQ ID NO: 218489 - RNA, 78 nt, Homo sapiens
gccggccagcgccggaaaccaacaaggagggaggagagaacaggaagggcagcaaaccaagaccaagagagagcacga

SEQ ID NO: 218490 - RNA, 60 nt, Homo sapiens
cccgcaccgcagagccggcgcccccggcaggaaaggaggcccaagaggcgaaacgcaaca

SEQ ID NO: 218491 - RNA, 79 nt, Homo sapiens
ggacacgaaagccgggaaagccggaggcgcagaccggggacagcaggcaagcgccggggaaccagaggaggggcggggc

SEQ ID NO: 218492 - RNA, 79 nt, Homo sapiens
cgcggagcgacccgccacgcgggaaacagggggcacaccgcacaggacccggcccggccccccccaggaaagccccaga

SEQ ID NO: 218493 - RNA, 81 nt, Homo sapiens
agcccagggggacgaggaacaccaccagccccggggccaccggcgcgcggcggggcgcggggggcgcgagcggacaccccg

SEQ ID NO: 218494 - RNA, 58 nt, Homo sapiens
ggacagccaagaaccaaaaaggaccacgaagacaaggcgcccgcgaagagcccgcggc

SEQ ID NO: 218495 - RNA, 69 nt, Homo sapiens
aacagcgcggaaaggaaacccggccgccaggccaagagccccaaaggcggccccacaggccccggaagc

SEQ ID NO: 218496 - RNA, 64 nt, Homo sapiens
caccggaggacgaagagggggagacaacggcaagcggagaagagcaaggccgaaccgagaggaa

SEQ ID NO: 218497 - RNA, 73 nt, Homo sapiens
aggagcccgagagagaaggggcggcgacggcggcgcgaggaccgaccgggcccgcggacgaagaaggcacccc

SEQ ID NO: 218498 - RNA, 64 nt, Homo sapiens
gaacaccggaccccaggcgcgacgccccagaacaggacagcacagggaaccggaggaaaacacc

SEQ ID NO: 218499 - RNA, 69 nt, Homo sapiens
agggaacaacacaaagcacaccgccaaacccaggccagagcacagaccgaagcgccggccagaccaggc

SEQ ID NO: 218500 - RNA, 62 nt, Homo sapiens
cggaacagggccagcaccgcaagcgagacggacgggggggcagggacgcacaagggaagcaa

SEQ ID NO: 218501 - RNA, 82 nt, Homo sapiens
cacccccagggcccccgacccaaaaggggcacgcacggggacgggcggggccacccggaaagagggcagcagcggaccggag

SEQ ID NO: 218502 - RNA, 36 nt, Homo sapiens
acaggacggaagccccaacaaaaccaccaagaaaga

SEQ ID NO: 218503 - RNA, 82 nt, Homo sapiens
gggcgcccggcgccggccgagaaggcagaggcggggagaagcagaccgcaccaggcgggaccccgaaaaagcccaaacagac

SEQ ID NO: 218504 - RNA, 63 nt, Homo sapiens
gccgaccgcaccccgagcgccaccgcgcccagcaggaacagacgccccaccaggccagcgggg

SEQ ID NO: 218505 - RNA, 81 nt, Homo sapiens
gggaaacgcgagggcaccaggcggcacagggagaacacagggccccaccgcgccccacagaaaacgagcaaagacaaccga

SEQ ID NO: 218506 - RNA, 75 nt, Homo sapiens
ccagcgaacagacccaaaccaggaaaaggaggagggacgcccggagccagcggaggcacccgacgaaccacccaa

SEQ ID NO: 218507 - RNA, 81 nt, Homo sapiens
aaccaagagccacaccggaacggaggaaaaagcagggccagcccagaaagcgcagggagacaacccagcgggcagacccgc

SEQ ID NO: 218508 - RNA, 77 nt, Homo sapiens
acggccaaaacacaaacaagaccgcaggcaccagacccgcgaccgacagcccccagcccccccagccgcagggagcc

SEQ ID NO: 218509 - RNA, 82 nt, Homo sapiens
ggcgcggcggcgccgcgcgcgcagggccgccggcccgcagccgccaccacccaggaccagaaggcggaggcagggcacggcc

SEQ ID NO: 218510 - RNA, 56 nt, Homo sapiens
caacagaaaacggccggaacgcgggacggagggacagacagggaaaaagcagggga

SEQ ID NO: 218511 - RNA, 76 nt, Homo sapiens
agaggccaaagaacccggacaccagacaggccagaccgacgaagagccggaagagaaccgaccacaccgggacgag

SEQ ID NO: 218512 - RNA, 57 nt, Homo sapiens
gagaagaagaagagcagcagaacaccaggaaagcgcagcagaaaaggcaagggccac

SEQ ID NO: 218513 - RNA, 76 nt, Homo sapiens
ggagaaaagacagcaaaagggaccaccccaaacacacagaaaagaccgaaggaccagagccgaggaaggcaccagg

SEQ ID NO: 218514 - RNA, 49 nt, Homo sapiens
gcagcccagcggcagcagaaagagcagggggcgagcccggcccggcccg

SEQ ID NO: 218515 - RNA, 40 nt, Homo sapiens
ccaccaacaccgaagaggccgacgcccccaacccacccca

SEQ ID NO: 218516 - RNA, 75 nt, Homo sapiens
aggccgaccccacagccggaggaacccaggcccagaagaaaagcgacacaccaggcgccaagccacaccagccgc

SEQ ID NO: 218517 - RNA, 68 nt, Homo sapiens
gcaaagcaaccaaaacccgaggcgagacaaagacagacccgcgacaggcgccacccgacaaaagacaa

SEQ ID NO: 218518 - RNA, 91 nt, Homo sapiens
acgcgcaccaggccagcgcgacggggagcgaagcggagcggagggccgaacaggggggaacgacaaacaaggccccagaagcaggggcgac

SEQ ID NO: 218519 - RNA, 56 nt, Homo sapiens
acacagccgacacaacaagacagacgccaggggcgacggccggccaaggcaggcgg

SEQ ID NO: 218520 - RNA, 74 nt, Homo sapiens
gccggaaaggaggaagaagaaaagcgaaaagcaaacacacgcagcagcgagaaccagaagccacaggccaacca

SEQ ID NO: 218521 - RNA, 80 nt, Homo sapiens
ggagaagcggaggcagccccgccccagcagagggagaccggaacaggggcgggcggaagcacccagccggagaaaaccca

SEQ ID NO: 218522 - RNA, 71 nt, Homo sapiens
gagaccagggcaacccagacccagcgccgcccggcacacaaccagaacggagacaggaaagaaaacgcagc

SEQ ID NO: 218523 - RNA, 72 nt, Homo sapiens
gcccgcccagcgccgcagcacgcggaccagagaccagaccgagaggaaacaaaacagagaggagagagagcg

SEQ ID NO: 218524 - RNA, 75 nt, Homo sapiens
ggcagggggccgcaacacaagcggaacaaggggaaaaacggaggcacaaggaccacaccaaggagaagaagaccc

SEQ ID NO: 218525 - RNA, 71 nt, Homo sapiens
ccccagagcccccccggcgggcacagaggaacacaccccaaaacggcccacgcccggccaccgacccccac

SEQ ID NO: 218526 - RNA, 68 nt, Homo sapiens
gagaaaaggcgaaccggaacacaagcagagggaagagcagaaaaagcgcgcaggagggcagcaccgca

SEQ ID NO: 218527 - RNA, 57 nt, Homo sapiens
gcgcggaggggcccgccaccagagcacacagagagcgccgccgcggcccccgggaga

SEQ ID NO: 218528 - RNA, 76 nt, Homo sapiens
accaagcgcgaaagcgccaaaaggacagcagggggaacacccaggccaggaggaagcgaagaaagagccaaaagaa

SEQ ID NO: 218529 - RNA, 82 nt, Homo sapiens
ccaagccacgagaacaccccgccagaccagcaggcagacggagagggaagcccaagggcagaagggcgcagggcagaagacg

SEQ ID NO: 218530 - RNA, 75 nt, Homo sapiens
agccagccagagaaacaaaacaagagagaccgaaccaccaaagaagcgaacggagaacggagcgccgcgcccagg

SEQ ID NO: 218531 - RNA, 81 nt, Homo sapiens
gaaacgggccgcgaaccgcagacagcggccaagaagacacaaaggacggaggcacggcgagaacgcggacaagcaaacaaa

SEQ ID NO: 218532 - RNA, 75 nt, Homo sapiens
aggcaacaggcagaaaaagaaccagggagcgggaaacgcacaacagagaacagaaaagacccgcagacaacgggc

SEQ ID NO: 218533 - RNA, 59 nt, Homo sapiens
caaaccgaacacacgagccacgaaaacaggagcaacacaagcggaaagaaggaaccgcc

SEQ ID NO: 218534 - RNA, 69 nt, Homo sapiens
aaagaccccgccggagacgagagaccccagacacgaccaggcagagggaaggagcgcaaccaaagagcg

SEQ ID NO: 218535 - RNA, 78 nt, Homo sapiens
agcccggccgagccgagggccacccccggcccgccccgcgccccgcagggccagacaacagacaaacgaaggaaacgc

SEQ ID NO: 218536 - RNA, 73 nt, Homo sapiens
cggccagagcccaggagcgaagcccggacgcaaccgagggcagcggggaagaagaaaaggaaccgaggccccc

SEQ ID NO: 218537 - RNA, 77 nt, Homo sapiens
ccgggaggaccaggagcgccccaagacccacaaggaagcgaagcaagcaaaagccacgcaaaccacaggccgacgcg

SEQ ID NO: 218538 - RNA, 70 nt, Homo sapiens
cgcggagaagcgcggaggaaagaccacagcaagaccacgcccccagccgggggaccaggccgaacgaccc

SEQ ID NO: 218539 - RNA, 74 nt, Homo sapiens
caaggccccagggaagaaacgagcccaaaccaagccgacgcaccacccgaggagacgacccgagacagagcgag

SEQ ID NO: 218540 - RNA, 80 nt, Homo sapiens
ccagacggggcccggaaccggagggggcacaaagacccaaccgcggcacacagaaaacccggacccaccccgcccagaac

SEQ ID NO: 218541 - RNA, 83 nt, Homo sapiens
gggagcaggaagagcgaagaacgaaccagggaaccgggcagcagccgcagccgcccccgggacggccggcccccccggaagcg

SEQ ID NO: 218542 - RNA, 68 nt, Homo sapiens
gaacccccgagggaggcggcagcgaagaagacgaaaaaaacccaggaccgccgcccaggcggaggcag

SEQ ID NO: 218543 - RNA, 78 nt, Homo sapiens
ccccggccgacaagcaagcagcgcgccggccccaacacggaccggaggggagccaacagcccagccagcccaagcccg

SEQ ID NO: 218544 - RNA, 79 nt, Homo sapiens
cgagcagaggacccggcgggcggcccgcgggcagagagggggcgccgcacccagcagagcacaggggcaacggagccac

SEQ ID NO: 218545 - RNA, 68 nt, Homo sapiens
aaaccacggggcgaagaaaccacggacacaacccagcacaaccgcagcgcaccagacggaaaggagca

SEQ ID NO: 218546 - RNA, 79 nt, Homo sapiens
gcgagccccaggcgaccagaaagaggaaagagagccgggcgacccaaccaagggaccaggggaaaaaacacagaggcag

SEQ ID NO: 218547 - RNA, 80 nt, Homo sapiens
cgccacgagcgccccccgagcggggggacgcgccaggcacagcagcagaaagccaacaggcagaccagagacagcgccac

SEQ ID NO: 218548 - RNA, 68 nt, Homo sapiens
aaaaccgacaagggcagcccaaggacacaaggaaagacacagcgaagagccaggaggaaaaggagaac

SEQ ID NO: 218549 - RNA, 74 nt, Homo sapiens
acgcccagcccgcgggcaccggcagaaaggaggaggaaaacacccccacccagaagcgaggcgaagcagcggcg

SEQ ID NO: 218550 - RNA, 83 nt, Homo sapiens
gaacccgacccagcaccaaccgcaggaaggccgggagaccaggagcagggccagggcggggcagggggcgggaagccgggagg

SEQ ID NO: 218551 - RNA, 56 nt, Homo sapiens
agccaagagagagaggggcaccggggaagggagcaggcagaagccgagggaacgag

SEQ ID NO: 218552 - RNA, 71 nt, Homo sapiens
acaaaaaggcaaggcaaaaccaaaaggaagcggaagaaagaagagccaagaagggaagaaaacaagaaaaa

SEQ ID NO: 218553 - RNA, 75 nt, Homo sapiens
cgccaaacaagcaaaagagaacaccgcccaagaaacgcgcgcccacccgggcagaaaacgcagaagcccacaggc

SEQ ID NO: 218554 - RNA, 72 nt, Homo sapiens
ccagaaccccacccgcccggacgccacaagagaaaggacgccccggggagaggacaagagcgcaaggagaac

SEQ ID NO: 218555 - RNA, 77 nt, Homo sapiens
aagagaagcaagggaaacacagcaccccaaaacagccaaacggcaagacgcagcaagaacgggacaacggcagggcg

SEQ ID NO: 218556 - RNA, 60 nt, Homo sapiens
accagcgccagggaaagaagacacaagaagcgagagcgcaaacaggcccagaccgcaagg

SEQ ID NO: 218557 - RNA, 52 nt, Homo sapiens
cacaagggccaggaacaaaagcaaccaccccccagaggacggggaaggaagc

SEQ ID NO: 218558 - RNA, 76 nt, Homo sapiens
cgcagacccgcgggagagcggagaagcgagcgaggcaaacccccccgcagacggggcggggagccaggagagaaac

SEQ ID NO: 218559 - RNA, 54 nt, Homo sapiens
aaacaaggcggaaacaacgggcaaggggggaagacgcacccgcaacgggaaaag

SEQ ID NO: 218560 - RNA, 77 nt, Homo sapiens
cgccagccgcgaaggggcggcgcgcgccgggcgccggaggacgaaggacagagagggacgggcagacgccccgacac

SEQ ID NO: 218561 - RNA, 65 nt, Homo sapiens
cggcgccggagacagaaaacaggggaacaacagacacgggcagccagccacagaccagccggggg

SEQ ID NO: 218562 - RNA, 30 nt, Homo sapiens
ccaaggcgaccggggccgagacgaaaagcc

SEQ ID NO: 218563 - RNA, 74 nt, Homo sapiens
gcggacggacagcggggcggaggagaaggaccccagaggaaagggccagacacacgcggggggacgcgcaacac

SEQ ID NO: 218564 - RNA, 76 nt, Homo sapiens
accaacagcgccacccaccgggcgccccgcgcgccccggcccgcaccgggcagcgacaggggccggccacagcggg

SEQ ID NO: 218565 - RNA, 60 nt, Homo sapiens
ccgaggaccagcagcagcagagaagagaaagaaacagagcccaagaccacaaacaaaaaa

SEQ ID NO: 218566 - RNA, 65 nt, Homo sapiens
accgagggagagaggaaacaggacgacagccaaggcagaaggacgacgggggacagaagaggaaa

SEQ ID NO: 218567 - RNA, 50 nt, Homo sapiens
aaccgcgacaccaagagggaagcacagacagcaagcagcccaaaaagccg

SEQ ID NO: 218568 - RNA, 79 nt, Homo sapiens
acgacgccgggaccggccaagggcccacacaccaagaccaagggggcccgggaagaacggacagggaagagacgacagc

SEQ ID NO: 218569 - RNA, 59 nt, Homo sapiens
ggccggagcggcgcagccggagggggccggagagaccggccagagcaagacaaaaagac

SEQ ID NO: 218570 - RNA, 73 nt, Homo sapiens
caagacccggcggccccccagcgcccaaacacgcccaagccgacggaggggagccaggggacggagacgccca

SEQ ID NO: 218571 - RNA, 66 nt, Homo sapiens
aacacaagcacagggcagaagcccaagggcaacgacaagaggagcccaaaggcaggcccggcaccg

SEQ ID NO: 218572 - RNA, 70 nt, Homo sapiens
aaaacgaagaaacccacgccgggacaaaaccacccggaagaaaacccggcaaccaagaagcacaaagaag

SEQ ID NO: 218573 - RNA, 83 nt, Homo sapiens
caagagccgcaacccccgccgcaaaccgcagcccaggagcccggaagacccgcaccggagcaaaggaggccagcaggggggga

SEQ ID NO: 218574 - RNA, 63 nt, Homo sapiens
ggaggcgcgcgcaaagcccgcagacaagcagcacagaaacggaccagacccagaaaaagaagg

SEQ ID NO: 218575 - RNA, 51 nt, Homo sapiens
aacagcgcacggcaaggcagcgccgaagggcgagcggcagcccagaaacag

SEQ ID NO: 218576 - RNA, 78 nt, Homo sapiens
ccaagcacgccgcaggggaccggccgggccggaggcaaggggccagaggacagaggacaggcacggccccggcccgca

SEQ ID NO: 218577 - RNA, 81 nt, Homo sapiens
caacagacagggacggaacaaacacaaaaacaacccaggggaagaccaagaaccaagggacagggcagaccgccagcagca

SEQ ID NO: 218578 - RNA, 57 nt, Homo sapiens
caaccagacccccgccccacggagaccgccaaggccgggccggcggggaccaaccgg

SEQ ID NO: 218579 - RNA, 73 nt, Homo sapiens
cgccacaagcagcaggccaagggccagcccgcaacccccggcgaccacgggcccggcaacagcgcagcgggga

SEQ ID NO: 218580 - RNA, 64 nt, Homo sapiens
ggagcggcagggcagaaggccaggcgcggccagagcaaaggcagacaagaccagccacaaaaag

SEQ ID NO: 218581 - RNA, 80 nt, Homo sapiens
agaggggggcaggaagacaggaccacaggaaagagcgggagcccacacgccagcccggcaagaggaacccaaggagcaag

SEQ ID NO: 218582 - RNA, 96 nt, Homo sapiens
gaaggccgacggcgggggagacggccccgcgcgagaccgcccagaggggcccaccgcgcccccccccaggcccaaaccaaagcaccacccgccaaa

SEQ ID NO: 218583 - RNA, 72 nt, Homo sapiens
agaaaccggaaccacacacaccacaggaagccaccccggagcaggccccggcaagcaagccacccggacgag

SEQ ID NO: 218584 - RNA, 75 nt, Homo sapiens
cggaggaggagccgcagccaaaaggcacaagcagaaagggaacgcaaaggaaacggcacaaggccaaaagggaaa

SEQ ID NO: 218585 - RNA, 81 nt, Homo sapiens
cgaggccggacagaacgcggaagcccaagcaaggaagaaaaacgcccaaagacaggacacggagagcgccgcgacgagaca

SEQ ID NO: 218586 - RNA, 78 nt, Homo sapiens
gacaacggaggagagcaaagacgagcagacacgcaaagaagcccgaggcgcaagagacaagcgcggagcgggaaagac

SEQ ID NO: 218587 - RNA, 70 nt, Homo sapiens
acagacagggggagggcaacgagaagaggacagagaagagaccgcccaagagaagacgaaaccaaaccag

SEQ ID NO: 218588 - RNA, 76 nt, Homo sapiens
gcaggcgacgaagacgagggacccacgcccgcacgaggagaaaacgaagagcaccccacagaaccagaaaagcaag

SEQ ID NO: 218589 - RNA, 69 nt, Homo sapiens
ggcccagacaggagcgggagaaaagaaccgacccacaccaaggccacggcacgagggaaggcgggagga

SEQ ID NO: 218590 - RNA, 73 nt, Homo sapiens
cagagagaggaagaaaagacaaacggcgcggcagcagggagaaacagccagccaaagaaaagcagggacaaca

SEQ ID NO: 218591 - RNA, 61 nt, Homo sapiens
ccagccgcaagacccgccacaagcaacgcgggaagagaagggcggcggcgaaacaccacga

SEQ ID NO: 218592 - RNA, 64 nt, Homo sapiens
ccaggccgcccccgaaagccccagcgaagacccaggcccagcaggcacaggccaccggaaagac

SEQ ID NO: 218593 - RNA, 58 nt, Homo sapiens
gcccacccacaagcgcacaggaccggcagggcagaaaagaacagacccagaagaagcg

SEQ ID NO: 218594 - RNA, 58 nt, Homo sapiens
cccaagcagcaaccaaaagagccaaggacccaaaaaccagggcgggagagccagggaa

SEQ ID NO: 218595 - RNA, 75 nt, Homo sapiens
agccaggcacaccgcaaggacccaaaggggaggacagagcgggagccaccagcgccaaagggaagccaggagccc

SEQ ID NO: 218596 - RNA, 57 nt, Homo sapiens
cagaggaagcgcagaacggggaggcaccgccccaacccccccccgcccggagaaccc

SEQ ID NO: 218597 - RNA, 69 nt, Homo sapiens
gagaccccacgagaaggaacccaccaccaaaccggcggagcacacagaaaaaccgagaggcgaccggcc

SEQ ID NO: 218598 - RNA, 72 nt, Homo sapiens
cacgcccggccgaaggcgggggaggagacccacccaaacaggagagagaaggcccaaaagccaggggccgac

SEQ ID NO: 218599 - RNA, 41 nt, Homo sapiens
cgaggaggcagcgcgaccccgcacgcccccgccccgacaaa

SEQ ID NO: 218600 - RNA, 61 nt, Homo sapiens
caaaagggaaagagacggagaaaagaagaacacgcccaaaacgaggccagaacgaagcaca

SEQ ID NO: 218601 - RNA, 71 nt, Homo sapiens
ggaaagcgaagaaaaggaccaaaaacacaacaaaagaaaccaacaccgcaacgccaggaagccggacgcgc

SEQ ID NO: 218602 - RNA, 61 nt, Homo sapiens
cagaaaggacaagaaaccccgacacaaagaacgaaccaaggggcaaagacacgaggacccg

SEQ ID NO: 218603 - RNA, 62 nt, Homo sapiens
caggagagcgacaaaccaaggaggcggcgggcacaagccaaggaagagagaagagccaaggg

SEQ ID NO: 218604 - RNA, 54 nt, Homo sapiens
gggggacccgcccaaccccggcgggagggacaagaagaaaggggaccgagagcc

SEQ ID NO: 218605 - RNA, 73 nt, Homo sapiens
aaaagagcagagaaaaccagaaaaaggccaacaacgcacccgcccccaaagagagaagcggaccacaaggggc

SEQ ID NO: 218606 - RNA, 82 nt, Homo sapiens
gcagcccgccgccagccgggccaaccaaccacaccaccgacaccgagcagaaaacacgagacgggcaagagagccggcaggc

SEQ ID NO: 218607 - RNA, 67 nt, Homo sapiens
ccggcgggcgacgaggcccggcggcccaaaccccaaagcggaccaggcaccgccaaaaacgaagcga

SEQ ID NO: 218608 - RNA, 82 nt, Homo sapiens
ccgagccgggaccaggcccgggggcggcggccacgccaaggacggacggcggaaaacccgaagcagaagcccgacacaggca

SEQ ID NO: 218609 - RNA, 76 nt, Homo sapiens
agcacgaacagcaggccaaagaccagaggccacggggcgccggccacgaggggcggaagaccaggcaggacagcca

SEQ ID NO: 218610 - RNA, 75 nt, Homo sapiens
gagggcggcgcccggggacggagcgcgcgcaaagacaggagacccaacaccccagccagacggcaccaggcggca

SEQ ID NO: 218611 - RNA, 89 nt, Homo sapiens
cagaagacgcgccagccccagccccggcagcgggacccggcgaagacgcgaccgcggcgcgagcaccagggaaagggagcagcaccggc

SEQ ID NO: 218612 - RNA, 59 nt, Homo sapiens
caaccaaagacgccaaggagaaggcagaccggcgaggaggaaaacccaaacgcagagga

SEQ ID NO: 218613 - RNA, 78 nt, Homo sapiens
gaagccggacacaaggcgccacggcagcggccaaaacagaagaggcaaagcccagccacagcagcagcccagcagcaa

SEQ ID NO: 218614 - RNA, 67 nt, Homo sapiens
agacgcggagccacccaaccaagggcacaggaaaaaagagcggaaaaaaaaggaggccccccgggca

SEQ ID NO: 218615 - RNA, 78 nt, Homo sapiens
accagagaaaacggcaaggaagcccacgggagaaggcacgccagccagccgggcaggagggcccgccgagaagccagc

SEQ ID NO: 218616 - RNA, 79 nt, Homo sapiens
gccgggcgcagaaccagaccgggagcacgcacgccacgaaggcacgcgagaaggggagggggagaaagaagaggaagaa

SEQ ID NO: 218617 - RNA, 76 nt, Homo sapiens
agagggcggcagaccagaagaaacaggaccgcccgcaccaggaggagcagggccacaggccaaagcccaaacccca

SEQ ID NO: 218618 - RNA, 68 nt, Homo sapiens
aaagaagaaaacacaaaaacgggaaagagagagggggaaccggggaaggcaccggcaaggggggaggc

SEQ ID NO: 218619 - RNA, 38 nt, Homo sapiens
ccccgcaccagaaacagcgcggcccagccagccccaaa

SEQ ID NO: 218620 - RNA, 75 nt, Homo sapiens
ggagaggcgcggcacaggaaagggggagggaccggggcggaagagcaggcaggcggagaggcacgaagccaacgc

SEQ ID NO: 218621 - RNA, 56 nt, Homo sapiens
cgccgacggagggcacgccgcccaaaagggaaggcccacaagaaaacaaaaacaca

SEQ ID NO: 218622 - RNA, 101 nt, Homo sapiens
agccggcaccgccaccccacaggcccccaccaggccgcggcagacacacgcgcgaaggagaaggacggaaaagaacccagaagcaagaagagaaaaaaaac

SEQ ID NO: 218623 - RNA, 71 nt, Homo sapiens
accagaaaggcggacagcagcagcgaggcaaacaagcagcccagggaagcaccggacgggcaacaacagga

SEQ ID NO: 218624 - RNA, 71 nt, Homo sapiens
accgccaagagacacacagggcaccagaccgcagaagagaagaacgaagcaacaggaccagcaggaacaga

SEQ ID NO: 218625 - RNA, 79 nt, Homo sapiens
acgggaaggcggaaccgacagccccccgagaagggcaccgcgagccacgaggaagaccgcagcagcgggaccgaagagg

SEQ ID NO: 218626 - RNA, 80 nt, Homo sapiens
gccccggcacgcggcacaccacaagcagagaagagggccaagaaaaccgcaacagaacccggcgagagacaggccgggcg

SEQ ID NO: 218627 - RNA, 75 nt, Homo sapiens
accaaggcagacagagaagaccgcccccacagagagcacacaaacaaagcgaaaccacggaagaaaagggcaaag

SEQ ID NO: 218628 - RNA, 82 nt, Homo sapiens
cggacaccccggacgaaccacaggaagcgcggggcggcggcgaaaggacggaaaaaagcagagagaacacaagccaagccga

SEQ ID NO: 218629 - RNA, 42 nt, Homo sapiens
acacagacgagcaggggaaggcccagagcgcagcaggaaaga

SEQ ID NO: 218630 - RNA, 63 nt, Homo sapiens
gaagcgccgccccggggccaccacagacaaagaaggccggaaagcggaagaacgcaagaccaa

SEQ ID NO: 218631 - RNA, 67 nt, Homo sapiens
gaagagacaggaggcagagccaaacacccaggcgccggaccgaaggcgcgaccacgacgagaagcgg

SEQ ID NO: 218632 - RNA, 74 nt, Homo sapiens
cgggaggcaacgaggcaccagcacccagaaccggagagcccagaacgcgggcagcccgaagaccccccagagaa

SEQ ID NO: 218633 - RNA, 94 nt, Homo sapiens
cgccgaggagcgggacaacccaggagcagacagagaagcgcgcagcagggccgagaagaagcggggacggcaaaacagccaacggaacaccaag

SEQ ID NO: 218634 - RNA, 72 nt, Homo sapiens
cacccagagcagccccacaacagcccaggagcaaaaacaccacggcagccagcacaaacggaggggggcgcc

SEQ ID NO: 218635 - RNA, 57 nt, Homo sapiens
agccagcagcaagggccgggccaggcacaggaccgggggcccgcgcacagaccaaac

SEQ ID NO: 218636 - RNA, 90 nt, Homo sapiens
cggccgagcaggcgagcgaacgacgggcgaaaggagggaccacaggacaccggacaagggaaggcggagagccgccgcccacgcagaagg

SEQ ID NO: 218637 - RNA, 61 nt, Homo sapiens
gcgggccgagaaagcaaacagaaaggccaaaacccccaaggccggacaagacgcagagagc

SEQ ID NO: 218638 - RNA, 84 nt, Homo sapiens
gcagaccgcgaaaggccgagagaagcggccgccacgagagaaaaaggagggggggaagaaacgacacggcccccaggccagcgg

SEQ ID NO: 218639 - RNA, 69 nt, Homo sapiens
cgggcacggacagggcgaaagccgaccacccggcgaaggggggcgaagacagcaagaaccgcaaggcca

SEQ ID NO: 218640 - RNA, 81 nt, Homo sapiens
gaacgagcgacggcggaacccggggccgggacgcagcccggcggcagcagaaaggcacggcgacgagcccgaaggaccgac

SEQ ID NO: 218641 - RNA, 78 nt, Homo sapiens
aaacgaccgacaccgcaagaccccgaagcccagacgaaacagcaaccagagcccacgcagagcccccccacaaacagg

SEQ ID NO: 218642 - RNA, 75 nt, Homo sapiens
agggccggggccaccccgacgaaaccagcaaagccggccagacaaggagagcaacacaaggaagcaagggccacc

SEQ ID NO: 218643 - RNA, 63 nt, Homo sapiens
ccgcagcaaggcgaggcagagcaccacagggggacgggagaaacgaacaagaaacagcccaga

SEQ ID NO: 218644 - RNA, 77 nt, Homo sapiens
gaacaggaggggaggcaacaccacgcaccacgagaaggacccggacgaacagagaaaaggaggccggacaaaaaccc

SEQ ID NO: 218645 - RNA, 58 nt, Homo sapiens
ccaacacacaaaacggaaacgaggcacaaagaaggcagagaccccccaagggccagag

SEQ ID NO: 218646 - RNA, 78 nt, Homo sapiens
gcgcccgagcccaacggcccggacgggcaggggcgagccacaaccgggaacagcgggacggcacgaggaggcgggagg

SEQ ID NO: 218647 - RNA, 71 nt, Homo sapiens
ggaaacaggaaaagcaaccacgccaaccagccgaagggaggcaggcgacaacagaggagaaggcgaagaaa

SEQ ID NO: 218648 - RNA, 88 nt, Homo sapiens
ggggcggccaggcgcggccgcaagaggagaccaagaggcgggggcgcacgacaaccagcagccgagagccccacagccaggaccgcag

SEQ ID NO: 218649 - RNA, 71 nt, Homo sapiens
gaaaggcaagaaacccaaacgacagggaccccgacggagagacaaagaagacggagggggggccagccacc

SEQ ID NO: 218650 - RNA, 72 nt, Homo sapiens
gccggccccggcggccagcccgcggcaccccgcggacagggcggccagccaacgcgggccggcaggccgaga

SEQ ID NO: 218651 - RNA, 74 nt, Homo sapiens
agcggacgcggaggcccaaccgaagaaaacaaggggaagcacgaaaggccagaagaacagcacccgaagaagaa

SEQ ID NO: 218652 - RNA, 81 nt, Homo sapiens
cgcagcgaggcggcgggcaggccccggggcaaaggagagcggggacgggaaagagggcagaagcagcaagaaaaggccaag

SEQ ID NO: 218653 - RNA, 79 nt, Homo sapiens
cggccacacgcccagcgagcgccccacacaggggaagcagcaagagaaccccaggaccacaggagggaggcgccccaga

SEQ ID NO: 218654 - RNA, 82 nt, Homo sapiens
aggcggccgcagcaacccgccgggccgcccaggccgcccaggaccccgagaaccaggcgcggcgaggacgcacacgagagga

SEQ ID NO: 218655 - RNA, 81 nt, Homo sapiens
cgcaaggcgccccccaggggcccagaaagaggccggggggggcacagagccccggaagacagcccccagcgaccagaccca

SEQ ID NO: 218656 - RNA, 82 nt, Homo sapiens
cacaacggcggcacccacgcagacaccagccgcgccagcgcgggccaggcacgacaccgcaacgacacagcagcgaagcgcc

SEQ ID NO: 218657 - RNA, 38 nt, Homo sapiens
gaccagcaggcggcggccgggagagacggggcaccgga

SEQ ID NO: 218658 - RNA, 82 nt, Homo sapiens
ccagagccaaggaggaaggggccggaaacccccgaaaaaggcagaagcagccagccccaaagaggaaaagaagaggagagac

SEQ ID NO: 218659 - RNA, 78 nt, Homo sapiens
aacaaacaggagccggacagacccagacggaacaagaaccacgaagcgaggggagaaagaagacagaaggaagccccc

SEQ ID NO: 218660 - RNA, 72 nt, Homo sapiens
ggggaccagcgcaccacacaaggcccgaggacggcacccccgaccagcagacagagacccaccaagggggga

SEQ ID NO: 218661 - RNA, 68 nt, Homo sapiens
gcaagaagaaaacgcaaaaaaaagcaagaggcaggccaaagagaggcacgagcccgggcggacagggg

SEQ ID NO: 218662 - RNA, 79 nt, Homo sapiens
ggaccaaaccgcaccccggccggggggggcgcaaccgggagcccaggaagcgcagacacagggaaaagccacggcagga

SEQ ID NO: 218663 - RNA, 39 nt, Homo sapiens
cggccaacggggccgcccgacgacgcccgggagcgcagc

SEQ ID NO: 218664 - RNA, 76 nt, Homo sapiens
agcgacgcgggcccaggccaaaccaaacggagcgggcagcaggaagggacggcgcgcggcccgagggcccggaaag

SEQ ID NO: 218665 - RNA, 62 nt, Homo sapiens
agggcaggagcaaggggagccaaaagcagcccgccacaacaaacagcacggaaagcagggga

SEQ ID NO: 218666 - RNA, 64 nt, Homo sapiens
agaggacacgggcgggcgcccccagaagcccgggaacaaacagaacagcccaaggaagcagcag

SEQ ID NO: 218667 - RNA, 57 nt, Homo sapiens
gcgcggcggcaagcggggcgggagccgcagaaaccgaaagagcaccgaaaacgggaa

SEQ ID NO: 218668 - RNA, 78 nt, Homo sapiens
gcgaccagcgccagcgcagccgccagcgccgggcaggaagaggagaggcggacgcagggccgaacggagaccagaggg

SEQ ID NO: 218669 - RNA, 84 nt, Homo sapiens
cgacaagccgcggcagccgcggaccaccgccgccaggacagcgcacgaaacacacaaagaaccaccaccgggaggaagccagac

SEQ ID NO: 218670 - RNA, 76 nt, Homo sapiens
aacgccccccagcccgagcgcgcccgagggcgagaagaaccccgacagcagagacgacgcggcaagcagcggaaga

SEQ ID NO: 218671 - RNA, 49 nt, Homo sapiens
gcgcacgacccacgcggaacggacgaaaaacggaaacgccggaccaaaa

SEQ ID NO: 218672 - RNA, 84 nt, Homo sapiens
caggccagaggacacaaaagaacaagagccccaagacccgggacaccaggaggaggagcggagggcgcggaggaggaggcagcc

SEQ ID NO: 218673 - RNA, 52 nt, Homo sapiens
cagcggcgagcgcaggccgggacgggaacgggggcgcccgcagacgcagaag

SEQ ID NO: 218674 - RNA, 60 nt, Homo sapiens
aacagagcagacccggacggaacaggcaaaagagcgacagacacagcaccggccccggca

SEQ ID NO: 218675 - RNA, 71 nt, Homo sapiens
agaagcgaaaagaaacccaagaaggaagagaccaaggggggccagggagcgcacgccgccgcgagcaaagg

SEQ ID NO: 218676 - RNA, 72 nt, Homo sapiens
cccaacccccaccccgcccaaggaggcccagcgccgaaaagacgaggcgaggaggcgagacacccaacccac

SEQ ID NO: 218677 - RNA, 120 nt, Homo sapiens
gagaagagaagagagcccgaaacaaacagggaggaaccaccaagaagcggcaggcaaagaggacaagaaagggacgcggcacagaacgaagaagaaagcagaagcaagagaaaaaagaaa

SEQ ID NO: 218678 - RNA, 80 nt, Homo sapiens
gcaccgggccccgcgaccggggcccggggaaggcccgcgcccgccccaggacaaggcgaaggaaaacaacaggcaacaga

SEQ ID NO: 218679 - RNA, 60 nt, Homo sapiens
gggcagaacaacacccaagccggcagcggcgaccagaagacagccgaaaaggcagcaagc

SEQ ID NO: 218680 - RNA, 76 nt, Homo sapiens
aaaagcgaggagggccgcggcagaaaccagggcgaaggacgaggaccgaaaaagggcagaggacgaccagagcggg

SEQ ID NO: 218681 - RNA, 75 nt, Homo sapiens
aagaaaagacaagaaacaggaaaagaaaccgaaagaacgcggacaccaaaagcgcaccccaccccaaggcaaaaa

SEQ ID NO: 218682 - RNA, 82 nt, Homo sapiens
ccaaagcacagccaagccagcagccgggcaaggaggggaggcgagaacacgaggagggaccgacacaagaagcagccagaac

SEQ ID NO: 218683 - RNA, 76 nt, Homo sapiens
acaaaacaggaagccaaaacggaccagccccaggaggagcaaggcaaacagaaagacagggacgcagcgggagagg

SEQ ID NO: 218684 - RNA, 77 nt, Homo sapiens
aggggcacaaggacgagaacagccccccacagggccgagaagaagcggggacggcaaaacagccaacggaacaccaa

SEQ ID NO: 218685 - RNA, 85 nt, Homo sapiens
cgaggagccccgcgcgacagcagcggagcggagacgcagccgccgcgggcgaaggcagacccacccacgggacagagagcagccg

SEQ ID NO: 218686 - RNA, 78 nt, Homo sapiens
cgcgcagagggagcacagcgcggaagccccgaggcagccccgcggaggagcagaagaaccccacgaaacaggcgccaa

SEQ ID NO: 218687 - RNA, 86 nt, Homo sapiens
aggacgggaccaggcgaagcggccgagcaggcgagcgaacgacgcaccaccaagaagcgaagaaaaagagaaaccgagaaaaccca

SEQ ID NO: 218688 - RNA, 80 nt, Homo sapiens
agcgaccgcgccggcagcgccgcgaaggcgggccgggccagcccccgccgcccgggagggaaccgaaaggcacccgaaga

SEQ ID NO: 218689 - RNA, 84 nt, Homo sapiens
gagagcggcggaaaggaaagcccgacagaagcaccgagacccaagaaagaacaaggcaacagagcagccagggcaaggaaagca

SEQ ID NO: 218690 - RNA, 77 nt, Homo sapiens
ggaacaaaggagacaagacaaaaacaccccagaaacagaggcgacaaagagcgaaagggcccaaggaacagaccaag

SEQ ID NO: 218691 - RNA, 79 nt, Homo sapiens
aacaaggcaacagaaagagcaacagcagggcaacagccagagacgcgcacgaaacgacgaagaggcccgaggacagagg

SEQ ID NO: 218692 - RNA, 67 nt, Homo sapiens
gcccggccacgccgccaggccaaggcaaccccagcggccggccccaaaaggagggcgagccggccca

SEQ ID NO: 218693 - RNA, 59 nt, Homo sapiens
agggagggcgaagaaacgaccccggggacaaacgacggagcagaagagcagagcccacc

SEQ ID NO: 218694 - RNA, 78 nt, Homo sapiens
aacaagagagaaagagggacagccgcacggaggcgaaacacaaagggaggggaaagaaaaagagcccaccaaaaggaa

SEQ ID NO: 218695 - RNA, 67 nt, Homo sapiens
gaggcggggaaagacaacagcacacaagaacacccagggcagccaggagaccaagcagaacagcacc

SEQ ID NO: 218696 - RNA, 74 nt, Homo sapiens
caggcaacacgggaggcggagcgcagccagaccgcacccacccagaacccacaggagggccagaggacaaagca

SEQ ID NO: 218697 - RNA, 56 nt, Homo sapiens
acggagccacaaagaggaaggacaccagcggccagaagggaggaggacaagagggg

SEQ ID NO: 218698 - RNA, 68 nt, Homo sapiens
acacacaggcgcacccggggccaaagcagcacccacgaacgaccggagcaaagaagaaaagccagcgg

SEQ ID NO: 218699 - RNA, 55 nt, Homo sapiens
gccccacacgcagaaaagggagagcgcccaccccacgggaggccgggacgggaca

SEQ ID NO: 218700 - RNA, 62 nt, Homo sapiens
cgcggcgggagcgcggcggggccgcagagacaaaaggagccacggagaaagaaaaaagaaag

SEQ ID NO: 218701 - RNA, 55 nt, Homo sapiens
ggcaaagcaccgaacgaaaacaacacagggagggaagaccacagagcagaggaga

SEQ ID NO: 218702 - RNA, 38 nt, Homo sapiens
ccccgagagggggaacaggaccgccgaaggaggacagg

SEQ ID NO: 218703 - RNA, 102 nt, Homo sapiens
ggaccacaaggaaaagagacaaacagcaaaagcaaggagacccacacgccagcagcaagagaagagcgacgcggcagcgagagagagagccgcagcaaagca

SEQ ID NO: 218704 - RNA, 119 nt, Homo sapiens
cggaacgccaccagcgaacggagaggagccagagccccacgggaaggagagcagccagcagggccacggacagagcgaaggggagaggaggaggcgacccacgcgcagggagggcagca

SEQ ID NO: 218705 - RNA, 58 nt, Homo sapiens
ccaggaggagcaacacgggaccggccgaaaagaacaggaacagacgacagggaacagc

SEQ ID NO: 218706 - RNA, 74 nt, Homo sapiens
cgccggggagaaaccacccacacccaccaacagaaacagacccaaacacgaggacggaagagcccgaacaagca

SEQ ID NO: 218707 - RNA, 80 nt, Homo sapiens
cggaagcggacgggggaggaggcaacgccgcgagagaggagcgagaggaagcggaagaaaaccaacaaaggacagcggga

SEQ ID NO: 218708 - RNA, 77 nt, Homo sapiens
gagcaggaaaagcaaacacagggacgaccgcccagcaaggaaagagaaccaacgaaacaccgcaggaaaaaggaaac

SEQ ID NO: 218709 - RNA, 118 nt, Homo sapiens
agaaacgaagaagaaacaacaagagaaagacccaggaagcagaagaagcgaggagaagaagaggacacagagcgggacaaaacagcaggaggacaaaaagaagacagaacgcaaaagc

SEQ ID NO: 218710 - RNA, 64 nt, Homo sapiens
ccccagcacccacccgggggcagggggcccgggacaggccccacacaggacgagaaggagcccc

SEQ ID NO: 218711 - RNA, 76 nt, Homo sapiens
agccggccgggaccacacgcagaacagccggcagcgagccggggccccgccggcccagggaaacgaaaagccacgg

SEQ ID NO: 218712 - RNA, 67 nt, Homo sapiens
caaccacagacgagaagaaacacccaccagggaaaaccgccgccggggccagcaagaacaaaaagca

SEQ ID NO: 218713 - RNA, 79 nt, Homo sapiens
gagagccaaagcgaggaaaccaagccgggcgcccgcaaggagacggaaacgaaaagagacagcagggcaaaacgggcca

SEQ ID NO: 218714 - RNA, 78 nt, Homo sapiens
gacgcaaggacggagcaacggcgggaaaaacacacacgaacagacagagaacaagacgcgcgaaaacggggaaccgca

SEQ ID NO: 218715 - RNA, 76 nt, Homo sapiens
ccaaaggacgggaagaacccacgcgcgacgaaaagcggaagccaaaccgaagggacagacccccaacaccaagagc

SEQ ID NO: 218716 - RNA, 34 nt, Homo sapiens
acaacacacccaaaagacacagccagaaaaaaca

SEQ ID NO: 218717 - RNA, 31 nt, Homo sapiens
acgggaaaagagaaacgcacggaacggcgga

SEQ ID NO: 218718 - RNA, 66 nt, Homo sapiens
ggcaccggagccagccccgcagcggacaaagacaccaccagccgggacgaggggaggaaaaaaacc

SEQ ID NO: 218719 - RNA, 73 nt, Homo sapiens
gaggccccgaacaggagaaagaaggcggaacaccacaaggcaccgcaagacggcgaaagagcaagcgggcaca

SEQ ID NO: 218720 - RNA, 73 nt, Homo sapiens
caagcgggccgggagggccaggccagcacggacacaagccgggggaggagaagaggggaggaaccaaggaagg

SEQ ID NO: 218721 - RNA, 76 nt, Homo sapiens
ccagcagcgcgcggagaagaacggggagccagaaacagacaagcaagcagagacacacagcaaaagccaacacaca

SEQ ID NO: 218722 - RNA, 70 nt, Homo sapiens
aggcgggaaaaaagcacggcagcgcgcgccacgggccaacaggcaaccaagaaaaagcacgccacgaaga

SEQ ID NO: 218723 - RNA, 59 nt, Homo sapiens
aggggagagcacggggcaggggacccaagggagagagggaacggcgaaagggcagcccg

SEQ ID NO: 218724 - RNA, 72 nt, Homo sapiens
ggcaccgggagagggaaacaaggcagcgggccaaaccaaacaggaagcacccaccagccaagagcaacagaa

SEQ ID NO: 218725 - RNA, 78 nt, Homo sapiens
gggggaaaaggcgggcacaggccgaccgcgcggagccgaggccagagcagaaaccagcccaggaacccagcgcccccc

SEQ ID NO: 218726 - RNA, 78 nt, Homo sapiens
gcgcggaacaggacgccccgaaggaccacccgcacccaggggacgcacggcccaaccccgagcaaggacgcccaccca

SEQ ID NO: 218727 - RNA, 71 nt, Homo sapiens
caacgaaggcgccaagaaggagagaacaagccacccacacagacgcaaaagaggggacgagccggacaccg

SEQ ID NO: 218728 - RNA, 72 nt, Homo sapiens
ggaggggcagccccgggcggcaccgcgaacccagccagagcaagacccacgaagggcacacaaaggacccac

SEQ ID NO: 218729 - RNA, 95 nt, Homo sapiens
accccaccacccccagaccaaggagaaggcaggaccagcgggggaaaagccacccggacagcaagagcagccccggaacggaggaagggagccgg

SEQ ID NO: 218730 - RNA, 74 nt, Homo sapiens
gacaacaagggccacggacggagggacgcccggagccagcggaggcacccgacgaaccacccaagggaccggag

SEQ ID NO: 218731 - RNA, 83 nt, Homo sapiens
ccgcaggagaacgagcccccaccccggcaagaaaggggccaaggaagcacgggaagaacagaaaagagaagcaccacggaaac

SEQ ID NO: 218732 - RNA, 72 nt, Homo sapiens
ccccacaaaggcccacgaggaaggcggaagcaggacggggggcaacgggaaaaagcggggaaaacaaaaaaa

SEQ ID NO: 218733 - RNA, 73 nt, Homo sapiens
cacaacgggcgaagggagagggcccaggacggcccaggccccccgagcgcacgcacgcggagccagcagaccg

SEQ ID NO: 218734 - RNA, 57 nt, Homo sapiens
ggcgggcaaaggacgccaggaggaagggacaaaaggacagcaaaggcggggagacac

SEQ ID NO: 218735 - RNA, 78 nt, Homo sapiens
cccgggggagaaggccgagggccgggagcccgcaccgggccggcagcagagcaccaaacaggggggaaggaagacaaa

SEQ ID NO: 218736 - RNA, 78 nt, Homo sapiens
gacacggaccggacagagaagaacgcgacaacaacagggagcgccaccaccggacggcgcgcccagaacggagggcgg

SEQ ID NO: 218737 - RNA, 70 nt, Homo sapiens
aaaagcagacaaacaagcaggagcagaaagggcagcgaaaggaaaaaaaacccgagaaagcgaaggaccc

SEQ ID NO: 218738 - RNA, 83 nt, Homo sapiens
cccggcgcgggggacgcgggaccaagaggcggcggagcggggaggccaaacgcgggccaggcacgacaccgcaacgacacagc

SEQ ID NO: 218739 - RNA, 79 nt, Homo sapiens
cacaggggggccgacagaagagcgccagaccaacagcaccaaggagaaacagagacgagcaaggcgagaggcaacgaac

SEQ ID NO: 218740 - RNA, 87 nt, Homo sapiens
aggaggaaaagcggcccggcgccaagacccagcacaaacaccgggaagagacccccaacacagcaggcgcaggggccacaggcggca

SEQ ID NO: 218741 - RNA, 82 nt, Homo sapiens
gaagaggaaggagcgaccaaaggaccgcggagcggccacgaggcccagggaacccggaccacagaaccaagaaagaggagaa

SEQ ID NO: 218742 - RNA, 79 nt, Homo sapiens
aggagaggggaccgcccggacacaagaaaaagagcgaaaaagacacgccgggaggcagagaggaagagacgagggaaga

SEQ ID NO: 218743 - RNA, 80 nt, Homo sapiens
aacacgcggagcggaagacggcaacccaggaaagcgcacggcagcagcaaaaccacagagaaacggcccaagagaacagg

SEQ ID NO: 218744 - RNA, 57 nt, Homo sapiens
caccacaaaaaccacgagagcccgcccaacaaacagaggacaggacgagcacgaagc

SEQ ID NO: 218745 - RNA, 60 nt, Homo sapiens
gagagaaagagggggcgagagaagaaggaagaagaaccgcagagaggaaaggcgccacac

SEQ ID NO: 218746 - RNA, 82 nt, Homo sapiens
acagcaccaaccacgacaaaccccggcagccgccaggaccccagacacgggagcgggaacaacgcagagcgagcagacaggg

SEQ ID NO: 218747 - RNA, 54 nt, Homo sapiens
cggaccagaagccagagcgaggacgccggcaggaaaagggggccaggaagcaaa

SEQ ID NO: 218748 - RNA, 61 nt, Homo sapiens
gcaacggccacagcaaaaagcgaagaaaggcagcccagccccggaaggccagagacgccag

SEQ ID NO: 218749 - RNA, 66 nt, Homo sapiens
agcaggcaggcgacggacaggaagaagacaagagcagacgagggagaagcgggcaaaacagacaaa

SEQ ID NO: 218750 - RNA, 83 nt, Homo sapiens
ccacgaccaccgcacacccgacacagcggagcgcccagaggcgagcccggggaggaagaggaagaaggaccggggagacagga

SEQ ID NO: 218751 - RNA, 97 nt, Homo sapiens
gaaaccaaacagagccccaaggaggaccccccacagccaggccacagaaccagaccgacccagacccgcccacggaagggaagcagaaaagacaggc

SEQ ID NO: 218752 - RNA, 77 nt, Homo sapiens
accaagccgaaggaaaggcagaacgccgaacaggagcaacaggggagaaccaggagggagacaaaggaaaccacaac

SEQ ID NO: 218753 - RNA, 114 nt, Homo sapiens
gcagggagcccagaccagccgcacggccaacagaaggcgagacaaggggaacacaggggagaagaaaggaaaagaacaccaaccaaagggacagaagggaaaggcgaaagggga

SEQ ID NO: 218754 - RNA, 75 nt, Homo sapiens
agcagaggacagagcagagcacccccaaagacagagaagaaagcagagacaggcgccacagaggagaccggcgcc

SEQ ID NO: 218755 - RNA, 76 nt, Homo sapiens
gggccgagaggcccgggcgagaccgggaccggccgagcgccccagcgcccggcgcgagcgcggcccgagccccagg

SEQ ID NO: 218756 - RNA, 76 nt, Homo sapiens
ggagccggccagcgcaccaaccagggcgcaaaggggagcagagggcgagaaaagggccacccaaaagcggagagcg

SEQ ID NO: 218757 - RNA, 54 nt, Homo sapiens
ccagcacggaccaggaggcgagcaacaggggacaaaacaggagagcagggggga

SEQ ID NO: 218758 - RNA, 80 nt, Homo sapiens
cggcgcccccacggcagacagagcggcagcagcgcacccggagcccggagcccagagccgaggagaaggcgaggacgcgg

SEQ ID NO: 218759 - RNA, 63 nt, Homo sapiens
gaagaagcagaagcgcgccagggcagcaggagagagggacccggcaaagagagaggcacacgc

SEQ ID NO: 218760 - RNA, 73 nt, Homo sapiens
aaccggaaggaaggcagaccccccgcgcggcgccgccaacgcgcccccgaggccagggacaaagcgagaaaaa

SEQ ID NO: 218761 - RNA, 74 nt, Homo sapiens
caagaacagcgacaaggagagaagcgcggagccccaaggcaaaagacggggagaggaagacacaggggaacaac

SEQ ID NO: 218762 - RNA, 56 nt, Homo sapiens
gcgggcagggggaagcggaggacgagaacacacaagaaaaacccggggaaggcaag

SEQ ID NO: 218763 - RNA, 59 nt, Homo sapiens
gcacagcaccacaacaaacaggccaccccagacgagaacgagggcacaggcaggagcaa

SEQ ID NO: 218764 - RNA, 76 nt, Homo sapiens
ggcgcaagaacggcagagcgaaacaccaaaaccagcggagcgacacagccaaggagaaagaagagagaccagaaac

SEQ ID NO: 218765 - RNA, 108 nt, Homo sapiens
gggaaacaagcacgggcgagccaggacacgaccacaacacagcccacagggcccccacagagagcacacaaacaaagcgaaaccacggaagaaaagggcaaaggaaga

SEQ ID NO: 218766 - RNA, 65 nt, Homo sapiens
cgcacggaaaaggcacccgggcaagcagggcacaagccagcaggggggcgcgccagcaaaacaca

SEQ ID NO: 218767 - RNA, 75 nt, Homo sapiens
caaggaaaaaacgccacgcccgggagccccacccgccacccaccagggaagccggcggcccgcccaggaaaagga

SEQ ID NO: 218768 - RNA, 59 nt, Homo sapiens
cagaacaaacggccaagaagggccaccccacagacgagagacaaccagccacccaggga

SEQ ID NO: 218769 - RNA, 84 nt, Homo sapiens
cagaccaaaacggccgggaaagaaccacaagcccacgggacacgcggcaggaacgggcccccacagagagcacacaaacaaagc

SEQ ID NO: 218770 - RNA, 83 nt, Homo sapiens
agagccggagcgcgaaggccgggacccggccccggcccacaggggggggcaaacccgagagaacggggagaagccccgaggcc

SEQ ID NO: 218771 - RNA, 56 nt, Homo sapiens
gggggcgcgcgggggcgggcccgggacgcgaccacacgaaggggcagaagagcaca

SEQ ID NO: 218772 - RNA, 74 nt, Homo sapiens
accaagcaagcacggcccgcaggcagcgccaacaaaaaaaaaccaagaaaccaccagagagcacccacaaagac

SEQ ID NO: 218773 - RNA, 71 nt, Homo sapiens
gagcaaggagagaacgcgagggaaggaaaggagaagcagggcccaacaagagagggaagcaggaaaagagc

SEQ ID NO: 218774 - RNA, 81 nt, Homo sapiens
agcgggaggaccaaaccagagggacagagccgggcccgccgaggcccggagggagagaaggcgcacaagagcagggacccc

SEQ ID NO: 218775 - RNA, 80 nt, Homo sapiens
ccgggccgaggggccgccgcaccgccagcacccccacgccgacgacaagccccagaagccaaaagcaggccggcaccgga

SEQ ID NO: 218776 - RNA, 76 nt, Homo sapiens
ccagacggggagccaaaagaagacaaggggacggcagcccaaagaaaacccagaggcccgcaaaacgagcgaacca

SEQ ID NO: 218777 - RNA, 68 nt, Homo sapiens
ccaccagccgccaacaggagacagacccagcacggaccccccccccagccgggcgaggccccgaaacg

SEQ ID NO: 218778 - RNA, 58 nt, Homo sapiens
cacaaggaggccgcccagcccagcaggcccagcgaccgcgaaaccgagcaggagaacc

SEQ ID NO: 218779 - RNA, 61 nt, Homo sapiens
acgcgcgcgaggccgccgaggggccccccgagacccccgcaagggaccgcgcaggagggag

SEQ ID NO: 218780 - RNA, 43 nt, Homo sapiens
acaaccgggcgccgacgagacggaaacgccgaagggaccaggc

SEQ ID NO: 218781 - RNA, 78 nt, Homo sapiens
aggaagacaggagacagggacacaagaacagggccaaacgggcccaagccggaaaaaagacccgcccgccagggggga

SEQ ID NO: 218782 - RNA, 74 nt, Homo sapiens
gaaagccccgggagaagcagcgccgcccggggcagaccaggcagggagagacagcgcgcagcaccgaccgaggg

SEQ ID NO: 218783 - RNA, 37 nt, Homo sapiens
gggcgaggacccccgagccaggaagaagccacaaagc

SEQ ID NO: 218784 - RNA, 76 nt, Homo sapiens
aaagggaagcacacggaccagcagaacagaaacaagaaaaacagagcggggaaagaccaacaaagcaccgagaaag

SEQ ID NO: 218785 - RNA, 77 nt, Homo sapiens
ggcagcggccagcaggcagagacaacagagaaagacgcaaagacacggggaagggacgcaaaaaggaagccccacaa

SEQ ID NO: 218786 - RNA, 74 nt, Homo sapiens
gacaaacgacggaaaaggagagagagccgcacccagaggaagagggcccggcgggccggcccagaccggcacag

SEQ ID NO: 218787 - RNA, 69 nt, Homo sapiens
caagaccaggagggaaggcagagaccgccgacgaaaagaggcggcacgaagaaccaaagcacccgaggg

SEQ ID NO: 218788 - RNA, 46 nt, Homo sapiens
aaaggaagcggagaaccacaaacgaacccggcaccagccgggcaaa

SEQ ID NO: 218789 - RNA, 74 nt, Homo sapiens
ccgacgcgcggaggagaagagacccggggaggcaggggacccaagggagagagggaacggcgaaagggcagccc

SEQ ID NO: 218790 - RNA, 73 nt, Homo sapiens
ggaacgcaggacccaaagcgaacacgacccaagaaccaaccgaaggacacacaaggacggggggaacggaacg

SEQ ID NO: 218791 - RNA, 57 nt, Homo sapiens
gggagccaccagccccccgagaggcacacacagccacgggaccggcacaaccgggac

SEQ ID NO: 218792 - RNA, 76 nt, Homo sapiens
gagccaccagcacggaccaggaggcgagcaacaggaaaaaagaggcaagggacagcaaagcgggagagaagcagcc

SEQ ID NO: 218793 - RNA, 68 nt, Homo sapiens
gcccacagaaggaagcacaaaaagggacagcgcgaggagaagaaagggaagcaaagaaagaagaaccg

SEQ ID NO: 218794 - RNA, 85 nt, Homo sapiens
aaaaagagccaagacaaaggcaaaccgaagaaaaaaaccagaagcggaacacagcagagacacaagccagcccacgagcaggcaa

SEQ ID NO: 218795 - RNA, 81 nt, Homo sapiens
cccgaccaggccccgcagacccaacggaagaagccaagaggagaaagaagcgacacccacacgaaggcccacagggacagg

SEQ ID NO: 218796 - RNA, 82 nt, Homo sapiens
gagagcgggggggggaccgccggcacgcgacccccccgggcccaaacacaacagacggcacacggggcccccgcgaagcgac

SEQ ID NO: 218797 - RNA, 76 nt, Homo sapiens
aaggcgcgaggaggaaaggaggacgagggggcaaggcggcccggcacgcacacgggcagaagagcccgaggcggga

SEQ ID NO: 218798 - RNA, 74 nt, Homo sapiens
gcgcccaggccagcgccccaggccaagagggacccacccggcggacccaaggccagccagccccaggcaccagc

SEQ ID NO: 218799 - RNA, 37 nt, Homo sapiens
cgacccagaagacaccaaaaagggacacggagaaaag

SEQ ID NO: 218800 - RNA, 77 nt, Homo sapiens
agaaggacccggcaggacagcggagcaggcacgaaaagaacggcaaaaggcaggccacagaccaaaaccaccaaaaa

SEQ ID NO: 218801 - RNA, 65 nt, Homo sapiens
caagaagcaaagaccaggagagggcggccaagcccggaaagagcacaggcagagcgaaggaaaac

SEQ ID NO: 218802 - RNA, 81 nt, Homo sapiens
ggggaagacgcagaaagaaccggaagacagaggcggagcagaaagcgaagcagaagccgagaacagcggcgagccggaaag

SEQ ID NO: 218803 - RNA, 110 nt, Homo sapiens
ggagcgaaccaacaagcacaaggagccaaaggacggcccgccaggggcggaggagaggccagagcaggagggggggaaccaacacaccggagacaacagcaagaacaaaa

SEQ ID NO: 218804 - RNA, 72 nt, Homo sapiens
gacgggccggaacacccggcgaaccagaggggaaaagagaagaacacgaaaagaagaacccaacagccccac

SEQ ID NO: 218805 - RNA, 92 nt, Homo sapiens
aacgcccccgcaagcgagaaagaacacccaacccagcccaccccacagcagggggggccccagcccggccgaacgggcgcacgacacaaaca

SEQ ID NO: 218806 - RNA, 48 nt, Homo sapiens
aggcagaaaagcaacaggacagccgcagcagaaacagcagaaagggaa

SEQ ID NO: 218807 - RNA, 49 nt, Homo sapiens
aggccccggcagcgccgggacaagggagcaacgacagaggaggggggga

SEQ ID NO: 218808 - RNA, 72 nt, Homo sapiens
gagagcaagagaagcccaagcccaggcagagccgggcacagaagcggcgggcagaaggacagcgaccaggcg

SEQ ID NO: 218809 - RNA, 75 nt, Homo sapiens
ggaaagcaccgccaagcggagaaacagccggaaacgccaaaccccagcaagcagggggaggcaccaaaaagaagc

SEQ ID NO: 218810 - RNA, 65 nt, Homo sapiens
gcccgcagcagaccgaggccccggggaagccaccccaccccccagagagccaccggcagaagagc

SEQ ID NO: 218811 - RNA, 59 nt, Homo sapiens
cgcggagaaagagaccaccgagagggaccacagagcaccagccgcaggaaccccccacc

SEQ ID NO: 218812 - RNA, 81 nt, Homo sapiens
cgacaggacccagggcaagaccagacggaggagagacacacaccgggggcaggaaacacagggagagccgcagaggccgcc

SEQ ID NO: 218813 - RNA, 83 nt, Homo sapiens
cggcgcagcccgaccagccaagagccggcagcagacgagccccgagccccggccccaaagacccaaaacagagacacccccca

SEQ ID NO: 218814 - RNA, 71 nt, Homo sapiens
agcccgcgcacgagaggagagaaaggcaaccagacacacaaccaccagaaggagagaagaacagaagccag

SEQ ID NO: 218815 - RNA, 78 nt, Homo sapiens
ggccaccacgcaaagagcaaagaaacaggccacaggagggcggacggcagacaggcagcaaccggccccgcccaccag

SEQ ID NO: 218816 - RNA, 72 nt, Homo sapiens
aacgcccgagccccaacccacgcgccccaagaggccccaaagccggggaagaccagccgaaacccggggagc

SEQ ID NO: 218817 - RNA, 85 nt, Homo sapiens
gagaccaaagcagcgaggacccccaaggacacacacgaaaagggcagcaagacacgaagccgagaaagagcagcgacaacaagga

SEQ ID NO: 218818 - RNA, 73 nt, Homo sapiens
aagcccaaacagacaggcacggaggaagcaggaaggaccacccaagcggaccgacccccagccgaggcagaca

SEQ ID NO: 218819 - RNA, 81 nt, Homo sapiens
gcggagagaagccgggagcgagcccaggcggcaggacagccagacaagaccccaacgaagggccagaaaagggagaggaca

SEQ ID NO: 218820 - RNA, 67 nt, Homo sapiens
cggccaggaccgcagcggcacccgcgccgcggggccggggagcccgggccagaccccccagacccag

SEQ ID NO: 218821 - RNA, 71 nt, Homo sapiens
aagaaacggcacgacgcgcgccaaagaaagccaacccagcgaaggaacaagcaaaccccaagcggcaagag

SEQ ID NO: 218822 - RNA, 78 nt, Homo sapiens
aaaacccagcgggaggagcgggagcgcgcgggcagccgggggaccggaaagggaccaaagaagccaaacccacaaacc

SEQ ID NO: 218823 - RNA, 81 nt, Homo sapiens
aggccggccagaagacgcgagagcaccgaagacggcaagcacggccacgccaaggaggaagaacggcaaaacggaggagca

SEQ ID NO: 218824 - RNA, 55 nt, Homo sapiens
caaaacggaagaacgcagaagacagcaacaggagcacaacacgaagcgaagcagc

SEQ ID NO: 218825 - RNA, 70 nt, Homo sapiens
ccaagccaacaggagaggagaggggcgggagccgagagaagccaacccggggagacaaccaaaccaacaa

SEQ ID NO: 218826 - RNA, 73 nt, Homo sapiens
ggcggcgggggcggcggggcaagcggcgccaccaccagcaccaggacgaaaaggcccaggccggcggaaaacc

SEQ ID NO: 218827 - RNA, 69 nt, Homo sapiens
cacccaggaaacagcgcaaggcaagaaacaacagcgaccagagccgaagagaacgcgaagaagggccaa

SEQ ID NO: 218828 - RNA, 61 nt, Homo sapiens
cccgaagcacccccccagcccagaaggaaacggcccgcagggcaaggggacccagaagcag

SEQ ID NO: 218829 - RNA, 63 nt, Homo sapiens
gaacgcacaacagccaccgcagcgaacagacccaggggagagaccacaacacaggaccgccag

SEQ ID NO: 218830 - RNA, 75 nt, Homo sapiens
agagggcggaagacgcacgggccaggaccaagacgcaacaaaaaggcaaaacaacaaaggaacgaagccgaccgg

SEQ ID NO: 218831 - RNA, 74 nt, Homo sapiens
ccagcgaagaggcagacggggacccagccccaaagaggagccaacccggaccggaaagaggcagaggaggaagg

SEQ ID NO: 218832 - RNA, 77 nt, Homo sapiens
gggagagccagcaccaggcaggccggaagaagcgagcgagaaggcggggacgagacacggggccgggaggaggagaa

SEQ ID NO: 218833 - RNA, 78 nt, Homo sapiens
aaagagcccaaggcccacccgcccacagcaggacagccgaacggaacggagagcagccaagcagacgcacaaccgggg

SEQ ID NO: 218834 - RNA, 61 nt, Homo sapiens
acgacaggccaccagccagcgggcaccagccgggcacagcccggccccagaaccacacgac

SEQ ID NO: 218835 - RNA, 82 nt, Homo sapiens
gcggaggcccgcgaggaacgacgccgaggaaggagaaacagaggcggggggggagaacgaacagcccggggagccaaaggag

SEQ ID NO: 218836 - RNA, 90 nt, Homo sapiens
cggagccgcgccgccgcccccagccccccgcccggggagggcaccagggaaaagaagaccccggagcaggcccgaaaggcggaccagcca

SEQ ID NO: 218837 - RNA, 78 nt, Homo sapiens
gggcccgggcccggggcccgcgcaggggggcaaggaccaacagcccccacaccccggggcgagaacggcccggagaca

SEQ ID NO: 218838 - RNA, 78 nt, Homo sapiens
ggagcgccccagagacccagcaacgggcagcgggcgcaggaccccgccccacgcccaggaagggcgcaggaggagccc

SEQ ID NO: 218839 - RNA, 76 nt, Homo sapiens
cggacacaggagcccgacagcaccagcagaggccgagaaacaagcagcaagaaaagaacaaggacaaaccccgacg

SEQ ID NO: 218840 - RNA, 81 nt, Homo sapiens
cagagacgcaccccgcggaggaaaacagccacaggaagaagcacagagaaggggcccgaacaaccacagaaacccacacgg

SEQ ID NO: 218841 - RNA, 37 nt, Homo sapiens
gcgcggggcaggaggacagcaggaaaggagcagacag

SEQ ID NO: 218842 - RNA, 75 nt, Homo sapiens
ccccagccgcagccacaacaccggcaggaaccaccaggacagaaaaagaaggagacagcgaccagagaaaggaac

SEQ ID NO: 218843 - RNA, 74 nt, Homo sapiens
aggaaagaagggggcagaagaggggacgagcagggggaggaacaaagcgaggaagggaagggaaggcgacaggc

SEQ ID NO: 218844 - RNA, 81 nt, Homo sapiens
cagcccgcccggacgcaggcgggagacgcacagcaagagccaggacaccggaagcgggaaaagggaccagacaaggagggc

SEQ ID NO: 218845 - RNA, 79 nt, Homo sapiens
gagcaaaggcaaaaggaccaccacaaagaaaaagaaagaaaaggccggaggccgcccagaaggacacaacagccaaaga

SEQ ID NO: 218846 - RNA, 67 nt, Homo sapiens
cgcggcagccgcgacgcaccaacagggacgcagcaacgggcaggaaggaaggaaggcaaagacgaga

SEQ ID NO: 218847 - RNA, 76 nt, Homo sapiens
gcagaagccagcgaaccaaagcagagggcggaagggacgcccagggcacccgcagcaaaccgccgagcagcgcccg

SEQ ID NO: 218848 - RNA, 56 nt, Homo sapiens
ggagagcaaggaagaaagcagcccagggcggagaacggaaaagcaccaggaagcag

SEQ ID NO: 218849 - RNA, 63 nt, Homo sapiens
agagccacacgaccagcagccggggccaaaagaaagggaaacgcagcagaggcagaacggaag

SEQ ID NO: 218850 - RNA, 64 nt, Homo sapiens
acaaaagagaagccagaaacggaaacagaacaacgcaaagggcagggccagggggagcgaaagg

SEQ ID NO: 218851 - RNA, 79 nt, Homo sapiens
gcgacggggcggcccggagccggcgcgaaccggcccccgcagcgggacccggaggcggccccaggggggaccaacaagg

SEQ ID NO: 218852 - RNA, 63 nt, Homo sapiens
gaggaacaacaagcaggcaggcgacggacaggcccccacaacacccaaaaccagagaccggcg

SEQ ID NO: 218853 - RNA, 69 nt, Homo sapiens
cgcagagcgaagcaagcggcccccgccagaaggaagaaaccaaacgaaacacaacgaccaacgggaagc

SEQ ID NO: 218854 - RNA, 65 nt, Homo sapiens
cacaccaacaaggcacacacagcccaggaggcaagagcgagaagagcgcaagacagaaagcgaaa

SEQ ID NO: 218855 - RNA, 67 nt, Homo sapiens
ggccaccgccacgggccgagacacgcagcggcggccagggaccaagaagaaaaacccaagccggaac

SEQ ID NO: 218856 - RNA, 65 nt, Homo sapiens
agcgagaagaaaggagaagaaagcagagagggaagcaaggagaggcgcgccaggacagaaaaaag

SEQ ID NO: 218857 - RNA, 74 nt, Homo sapiens
aaaggcaaagaacaagagaagacccagaggaagccaaaagggggcggaaagacgaggaaagccagaagggcaaa

SEQ ID NO: 218858 - RNA, 78 nt, Homo sapiens
aacgcacagcacgacccacccgcaaagggaagagccacaaagggaaccaggcgaagaggaaaaaaggaagaaaagcag

SEQ ID NO: 218859 - RNA, 56 nt, Homo sapiens
agcacagccgggaaggggagccaccagcccccggcaccggaaggcaaccaaccagc

SEQ ID NO: 218860 - RNA, 81 nt, Homo sapiens
caccccacaccgaccggcggacaacacgagcgcccaaagccaacgaggcccaagccccaggagagagagcccgacgccagc

SEQ ID NO: 218861 - RNA, 79 nt, Homo sapiens
ggagggcacgagcccgaggcgagcccagggcgggccggaagaaaagagagaacgcggccccaggaggaccccagcacgc

SEQ ID NO: 218862 - RNA, 81 nt, Homo sapiens
cagggcacgagcgggaaggacgagcaagagaagggcgggcagccgagcccaggagggaaaccgagcacagccaagagcaag

SEQ ID NO: 218863 - RNA, 80 nt, Homo sapiens
cccggagggaagcgagagcgacaggaagccgccagaccccgcagggacagcggggaaagaacaggggggaaaagaaagag

SEQ ID NO: 218864 - RNA, 81 nt, Homo sapiens
agaagaggaggaagaggaaagaaaaggagcaggaagcccaggaggcagggccggcagacagccggaggcagccgagaccca

SEQ ID NO: 218865 - RNA, 43 nt, Homo sapiens
gcaccaaagccgaccgggcaggagcagcagccggcccggcgcc

SEQ ID NO: 218866 - RNA, 75 nt, Homo sapiens
aaaacaacaccaaaaagccgcagggcagggacgagaaaggcccgcagaggagaggagagaggaggcggcagaaca

SEQ ID NO: 218867 - RNA, 82 nt, Homo sapiens
gggagagcagaggcaaaccgaaagaccccagaggagggaggaagaaagagggccacggacagaggcgcagcagaggaaccgc

SEQ ID NO: 218868 - RNA, 73 nt, Homo sapiens
caagcccgggagccggcgaggggacgcagagacaggcggacaccccacgaccgcacgacggcaccagcaacgg

SEQ ID NO: 218869 - RNA, 74 nt, Homo sapiens
gcggcagcgggcgggccccgagagcagcagcggcccagcaagagaggaaaaccagacgcggaagggagaaggac

SEQ ID NO: 218870 - RNA, 58 nt, Homo sapiens
ggcgcacgccacccgagcggggcgccagaggcgcagcccaacgggcccccaagacccc

SEQ ID NO: 218871 - RNA, 73 nt, Homo sapiens
gaagagccaccagcgacaaacaggaaagggagaaacggacaacacccggagcagaaggcacgcaagcggcgac

SEQ ID NO: 218872 - RNA, 112 nt, Homo sapiens
ccccgccaaccgcaaccagacgccagcgggacgaggaccgagaccgcggccgggaccgaggggcggaaaacaccccaaaagccaaaagggaaaggaaaagaccaacaacagc

SEQ ID NO: 218873 - RNA, 69 nt, Homo sapiens
accgcaaccagaaacaaagaggagcagcgacgagaaagagcaagagcccagggaaaagaagaaggagcc

SEQ ID NO: 218874 - RNA, 86 nt, Homo sapiens
gagagacaagaggggagaagcagagcaagagagcccacgaacggcgggaacagaaagccagaggccggagagcgcagacacagacc

SEQ ID NO: 218875 - RNA, 85 nt, Homo sapiens
cagaagaagaacaggaaaggaaacgcagcaagcaaggcagcgagggaaagccagagagcggcagaccccgacccaaacaaaagac

SEQ ID NO: 218876 - RNA, 66 nt, Homo sapiens
aggacccgcccgaaaggccccgcagcgcagacgcggacgggagggaaaaccaggacaaggcacgag

SEQ ID NO: 218877 - RNA, 72 nt, Homo sapiens
gcggcccaagggaggaacaggcagggcaagagaagagaaagaaaagaacagccgaaagaaaagcaaggaaaa

SEQ ID NO: 218878 - RNA, 75 nt, Homo sapiens
caccacagaaacaaaagcaacaaagaggcggaagccgcagaaggaccggccagaagcaagccggagaacagaaag

SEQ ID NO: 218879 - RNA, 68 nt, Homo sapiens
gaaggcaggagcgagaggagggggacggaagcggcagcgggcagccggcccagcacagggagcagaac

SEQ ID NO: 218880 - RNA, 75 nt, Homo sapiens
cgcaaccaggaagaccagagcccaaaagaaacagggcgcaggaaaagacgagccaggaaaagcaacaaagggagg

SEQ ID NO: 218881 - RNA, 64 nt, Homo sapiens
acaccaaggaccggccagggcccccagcgcgggccggccaaacgaccaagaaagcgggacgcgg

SEQ ID NO: 218882 - RNA, 44 nt, Homo sapiens
caccgccagcgaagcaccgagagacaggccgcaccaacaagaag

SEQ ID NO: 218883 - RNA, 82 nt, Homo sapiens
cggacaagagcgcggaacaggacgccccgaaaggccgggacagcagaaaacagccagcagaaaaagccaaaaagcaagcgga

SEQ ID NO: 218884 - RNA, 73 nt, Homo sapiens
agacgagcgacgacacgcagacaacggcgcaaagcgggcaagcgagaccgcccgcaaaccgggaggccgcccc

SEQ ID NO: 218885 - RNA, 65 nt, Homo sapiens
ggaacagcgccagcgcaagaggagccaagcaaacagaagcgcggccaagcgaagaagaaagaaga

SEQ ID NO: 218886 - RNA, 77 nt, Homo sapiens
cagccgcccgccaggccgggccgcgggagccgaggcgccgaaggaccgacgcccgggcggaggcaaggcacgaccgg

SEQ ID NO: 218887 - RNA, 82 nt, Homo sapiens
ccccagccgcagccacaacaccggcaggaaccaccaggacagaggaaggaacgcagagacaaaacgcagagcagaaacccgg

SEQ ID NO: 218888 - RNA, 74 nt, Homo sapiens
cgacgacggaaggagcagaacaaacggccaagaagggccaccccacagacgagaggagagggggcaaagcccac

SEQ ID NO: 218889 - RNA, 78 nt, Homo sapiens
agagccgacccaggccgccggccccacaggaagacgaccccgacgcaggccaggagccgcggacagaagccgagcacg

SEQ ID NO: 218890 - RNA, 110 nt, Homo sapiens
ccgcgaggggagaagcgcggcacgaccccggacaacaaccgcacacgaacgacgaaacaccgcacccagaagccgcagccgaccagggacgcagcagcaggagggacccg

SEQ ID NO: 218891 - RNA, 79 nt, Homo sapiens
ccgggcgccgccccagcggagggcagccccgagccaggcccgccgccgagcgagggcggcagaggccccaaagaaaaac

SEQ ID NO: 218892 - RNA, 73 nt, Homo sapiens
cccccacaacccgccagcgagacacccgaggcacgaggaccgcgaagagcagaaccaagccagcgaaggaaag

SEQ ID NO: 218893 - RNA, 71 nt, Homo sapiens
gcccagggaaggagcggagaagaaagacacccagacagagaggcccagggggaggcggcgcaacgcgggga

SEQ ID NO: 218894 - RNA, 57 nt, Homo sapiens
acggagcggggccaggcacagaaggccagccagacgccaggacccaccccgcaaaag

SEQ ID NO: 218895 - RNA, 51 nt, Homo sapiens
ggccgggcgcggggccaacagcggaacccggacccaaagacaggaccacgc

SEQ ID NO: 218896 - RNA, 86 nt, Homo sapiens
ggggggagcccgcgggcgcgcagagcgggccgggggaggccgggaggagccccgcggagaaacagcccgaaccggaacaacgggga

SEQ ID NO: 218897 - RNA, 77 nt, Homo sapiens
caaggaaaaaaacccgacagcagagacagagaggagccaacccccagggagcaaagaaggggccaaggcaggaaggc

SEQ ID NO: 218898 - RNA, 73 nt, Homo sapiens
acaggcaacaggaaagcaagggaaggcgccccaacaaagggcccaaaccacccagaccaggaaacaagagagc

SEQ ID NO: 218899 - RNA, 76 nt, Homo sapiens
cggaccaacacacccggcaaagcaccgacagcgggcagccgagacccaggagggcaccaggggagggaccggaccc

SEQ ID NO: 218900 - RNA, 78 nt, Homo sapiens
ccccaggcaaacgcacccccaagaagggggaaaacagacaagagcagggacgccccagcaagaagcccagaaaaggag

SEQ ID NO: 218901 - RNA, 65 nt, Homo sapiens
cacacaaggaaccaggagacagaaggacagcagccccagaagaccagcgggagcgacggaagcca

SEQ ID NO: 218902 - RNA, 81 nt, Homo sapiens
cggcacgaccaacaagaaccgaacgaggacacgaccccgccccacgcccaggagcaggccagacgggacccgaaccaggaa

SEQ ID NO: 218903 - RNA, 76 nt, Homo sapiens
gcaaaccggaagcaagggaggaggaacagcacagcagcgggccggaaaagcgagcgcaagaggaagagaagcaaaa

SEQ ID NO: 218904 - RNA, 68 nt, Homo sapiens
caacaccgcggccagacaacacgagcgggagcaagacccgacagacgcaagaacagagaggaacaggg

SEQ ID NO: 218905 - RNA, 60 nt, Homo sapiens
cacaacacggaaacccggggcgaaaaacaaagacaaaacagaggagaccagaccagaagc

SEQ ID NO: 218906 - RNA, 78 nt, Homo sapiens
gaaaggggaaccccggagaaaaggccaagaaggcagggacaggagccagcggcccaggggcgggggaggaaacagaga

SEQ ID NO: 218907 - RNA, 82 nt, Homo sapiens
gaggaagacccccgccaaaaggaaagcacagcagaaacacaaagcagcccaaccaaagggcccggggcgggaagcgacccag

SEQ ID NO: 218908 - RNA, 68 nt, Homo sapiens
gcgcccggacgcgaggggggaggcccaggaggcaagagcgagaagagcgcaagacagaaagcgaaagc

SEQ ID NO: 218909 - RNA, 101 nt, Homo sapiens
gagaccaaagagcaacacgcagggaaggccggaggacgcggccgagcccgagcaggaagggacgcaaaaaggaagccccacaaggaccaggcaaaacggaa

SEQ ID NO: 218910 - RNA, 78 nt, Homo sapiens
ggaaaccccgcccacagcacgagcaccgggccgaaccagaggggcagagaaaacgccagaaggacagagcaccaaagc

SEQ ID NO: 218911 - RNA, 60 nt, Homo sapiens
aagacgagacagcaagaagcaagaaggagaaacacaaggcaccggcacggaccaccccaa

SEQ ID NO: 218912 - RNA, 55 nt, Homo sapiens
ccaggggccagacccacacccaccaaaaggggagcgggagcacagacccaggaga

SEQ ID NO: 218913 - RNA, 79 nt, Homo sapiens
ccaaaagaaggcccgggaaagcacaaagcaagagacagcgaggacagaaggaaggccccgggaccaaggacacgcagac

SEQ ID NO: 218914 - RNA, 78 nt, Homo sapiens
gagcggaccggggcacagacaccccaggaacccgcgccgcgagggcccccccagcccaaggaaaggcccaggcacagc

SEQ ID NO: 218915 - RNA, 80 nt, Homo sapiens
ggcacgacagcgcaaggaggccgcacccaaggccgcagacaagcaggcaacaggaagaagaacccacaggggccaacaga

SEQ ID NO: 218916 - RNA, 73 nt, Homo sapiens
cgcaaagaccacgccccacaaccaggaaagcaccgccggccaggaggagagcgcaccaccaaaaaggcaaaca

SEQ ID NO: 218917 - RNA, 80 nt, Homo sapiens
ggcccgggggaccgccaggcagggccgagcagaccagaagacccacaggaccgcgaacaaggaggccacaaaacacccgg

SEQ ID NO: 218918 - RNA, 69 nt, Homo sapiens
gcggcgagcacagcacaaaaacccaaagcgaaaaacgaaagaagcaggaagcacccagccaaacccagg

SEQ ID NO: 218919 - RNA, 66 nt, Homo sapiens
gagaggcgagccaaaacacccagccagaacacaacaaagcccgagaaaagcacagcacccgcaggc

SEQ ID NO: 218920 - RNA, 83 nt, Homo sapiens
aaacgccggggaccccggcagccacccaccgccgccgcccccagccggaaccaaaaagaagccccagagccggggccaggagc

SEQ ID NO: 218921 - RNA, 78 nt, Homo sapiens
ggagggccccgcggaccaccgccggggacaccaccaggaacagcgccgagcgggccaaaacagagggaagcaagacgc

SEQ ID NO: 218922 - RNA, 84 nt, Homo sapiens
ccgcgaagagaaaagccccaaccgggcgagcaggagcgccccccgcagccccggagagcggaggagcggagcccgcaccccgga

SEQ ID NO: 218923 - RNA, 69 nt, Homo sapiens
accccgaagagcaacggaaccagcgccgagaaagagacaaccaaccgggcaagcgcccaccggacccag

SEQ ID NO: 218924 - RNA, 77 nt, Homo sapiens
acagaaccgagaagaagcacagcaaccaagaaacagccccgacaggcccgcagcgaacagaacagaacaccggcacc

SEQ ID NO: 218925 - RNA, 65 nt, Homo sapiens
agaggacgaacaaaacaggaaggacaccaaagggaaacacaaagaagacaccagaagggccagca

SEQ ID NO: 218926 - RNA, 77 nt, Homo sapiens
aaagaggacagacgccgaccaaacggggacgagacgggccgggcgcaaccacacgaggggagccagggcaagaacgc

SEQ ID NO: 218927 - RNA, 69 nt, Homo sapiens
ggaaggcagcgaacaggagaccagcccgagcaaacgacgccacagaaccaacaacaggagccgagaggc

SEQ ID NO: 218928 - RNA, 86 nt, Homo sapiens
cgcgagacaccggcagaaggaacacaaagagggagaaccgaagaacaggaggccagcagaggggaacaagagaagagaccgcccag

SEQ ID NO: 218929 - RNA, 79 nt, Homo sapiens
cacaaagccccagagagaacagagaggggaaaggaagaagaccagcgggaccccagggagcgggggcaccaccccgagg

SEQ ID NO: 218930 - RNA, 76 nt, Homo sapiens
cggccccaaccagcagagagggagagccagaaccaacagagccaacacaagcaccaggacaccgccgcccagccac

SEQ ID NO: 218931 - RNA, 86 nt, Homo sapiens
agaggaggcccgggccgcggccccgagcgcgcgggagcaggccgggaacccaacaagggagcaaacagagaaagaacccaaacaca

SEQ ID NO: 218932 - RNA, 76 nt, Homo sapiens
aagggagcagggagaggagcgggaaacgggagggaaccagcaacaagccgaaaacagggccagacgggaagaaacg

SEQ ID NO: 218933 - RNA, 78 nt, Homo sapiens
ggagagacgggaaggggagaagagaggagcggccagggaacaagcagaggaccgggaaccccggacaaaacgcgcaaa

SEQ ID NO: 218934 - RNA, 82 nt, Homo sapiens
gggagcccagggagcgccgcgcgaccaggaggcggcggcgccgccggcggacgcagaccggaaaaagccacagacggagcag

SEQ ID NO: 218935 - RNA, 85 nt, Homo sapiens
cggcggggcggcgaaggccgaggcggcaagaagaaacacacgcgcggccccgacgcccgcaggggggcggccccgcggcgcccag

SEQ ID NO: 218936 - RNA, 73 nt, Homo sapiens
accaggcaccagagcaagacagcggaagaagacccagggaaacccccaggcacaggaagagggcggcacgcgg

SEQ ID NO: 218937 - RNA, 72 nt, Homo sapiens
ccaaaacagcacaacccccagaggaaaagcggaagccgcagaaggaccggccagaagcaagccggagaacag

SEQ ID NO: 218938 - RNA, 82 nt, Homo sapiens
aggagccaccaggccgggaagcccacggggaggcaccgccccaacccccccccgcccggagaaccccgcggaacgagcagcg

SEQ ID NO: 218939 - RNA, 73 nt, Homo sapiens
acagaaaagggagccaaagaaagaccgcaacccaccaaggagcacaggacgaagaggaaggaaaaaacaggcg

SEQ ID NO: 218940 - RNA, 71 nt, Homo sapiens
gaggcaggccacaccgcacagccagccacgcgccaaggacaaaacgacgcgaaaaagaaacaaagacagac

SEQ ID NO: 218941 - RNA, 58 nt, Homo sapiens
cgaggagcgggaagaggcggggggacaagaaaaccagaaacgggggcccgacaagaca

SEQ ID NO: 218942 - RNA, 66 nt, Homo sapiens
gcgacaccagggcgaggcaggaccggcgcccaaggagaggccaaaggccacaggccaacgacaacg

SEQ ID NO: 218943 - RNA, 52 nt, Homo sapiens
aggcacggacaccacacacacacagcgaacagagaaaaggaggccggacaaa

SEQ ID NO: 218944 - RNA, 73 nt, Homo sapiens
ggaaacaggagcgaagcccagcgggccggacggggcggggggaacgagaaccgcagccagaagcaaagcagac

SEQ ID NO: 218945 - RNA, 76 nt, Homo sapiens
ggagcacagaagaacgcaggaaaagaacccaagaccccagccgggagacgggcgaacacagggaagaaggacggag

SEQ ID NO: 218946 - RNA, 75 nt, Homo sapiens
gggaacgaccaaaccagcccagggccgaaaagaaaacaggagaaccacccgccaacagcaagcgacccaaggcgg

SEQ ID NO: 218947 - RNA, 80 nt, Homo sapiens
ggcccagcacagagccacgaacgcgggcgagggccggccacggccgcagggaggcacgggcagcaggggccgcccagcaa

SEQ ID NO: 218948 - RNA, 74 nt, Homo sapiens
cgccgcggacgaccgcacgggcaggggagccgccaccaaaagcagacggaaaacccacggggaagaccacaccc

SEQ ID NO: 218949 - RNA, 84 nt, Homo sapiens
gggccacagaccgagcaggcccggcggcgccggggagggagccagaagagcgaaagccagggggcgaaacaaaacaaaaaggag

SEQ ID NO: 218950 - RNA, 76 nt, Homo sapiens
aaccagggagaagccgcccgaacaccaggcggcaggccccgagcccaacaggcggaagaggcgggaacaggccgca

SEQ ID NO: 218951 - RNA, 39 nt, Homo sapiens
aaacggcaccccggagaaagcggacaggacaaaacgaag

SEQ ID NO: 218952 - RNA, 72 nt, Homo sapiens
gacagagccagggacggacagaaagggagaaaccccaacacagaaaagcccaccaagcacgacgccaaaggc

SEQ ID NO: 218953 - RNA, 75 nt, Homo sapiens
cccagcaccaggaggcgaggagacaagagcgggagccgaccaaacagcagcagcaccagcaaaaacaagaagacc

SEQ ID NO: 218954 - RNA, 73 nt, Homo sapiens
acacaacggcagaccgcagaacacccagccagggggagacacacaacacaacccaagcaagcgaggcaaaaaa

SEQ ID NO: 218955 - RNA, 76 nt, Homo sapiens
ccgccgggggccgcgcgcccgggcaagaacggaagcacgggcggaggaaagcacaagcagagcccccgcagaggga

SEQ ID NO: 218956 - RNA, 73 nt, Homo sapiens
gggcccaagcacggagagggacaaaaacggccacgaaagagccgaaaccagggagacggacggaacgcggcgc

SEQ ID NO: 218957 - RNA, 82 nt, Homo sapiens
ccaggagacggccgcggacgaaggcaggaagcacgggggcgagaagggagcgggacagggcacagaagacgagcacgaggag

SEQ ID NO: 218958 - RNA, 96 nt, Homo sapiens
cgcggccccgacccccgcccggcgccggcccgggccgccagggcagaaggagaagaagcaccaacaggaaaaacggccaaagaagggccaagccgg

SEQ ID NO: 218959 - RNA, 83 nt, Homo sapiens
ccggccccgaccaagcgggaccccggagcgacccggacaccgacgcgccacgcggagcccggaaggggcaggaccagcgcccg

SEQ ID NO: 218960 - RNA, 71 nt, Homo sapiens
gcaaaaggcggaccgcccccgccaacgaagaccgagaccagaacaacgcaaacgcccacacagcaagcacg

SEQ ID NO: 218961 - RNA, 86 nt, Homo sapiens
agaagcagcccacgaaaggcagccgcggacgccgcgccagcgacaaacaaagcacaggagagcaggaaagaaaaggccacccggga

SEQ ID NO: 218962 - RNA, 72 nt, Homo sapiens
aacaagacagcgcgcagaagcccaaggcgaacggagagacacaggaacgagcagagcgacagcgaagcgcag

SEQ ID NO: 218963 - RNA, 77 nt, Homo sapiens
aggcgggccggggagaggaggaaagcaacgccagcgggaagaggacaaaccagcgcgcggggcgcacaaaggcgagg

SEQ ID NO: 218964 - RNA, 91 nt, Homo sapiens
gcacacgaccggcgacagcagccaggagcagagcgacagcggcgagcagaacacggcgagcggccggggccaaagcgaccaaccccccacc

SEQ ID NO: 218965 - RNA, 83 nt, Homo sapiens
gcggagcagcagcggcccccgccccgggaaccgcccgggccggaccggccccacacgaaaaaggcacaaacccagcacagaga

SEQ ID NO: 218966 - RNA, 79 nt, Homo sapiens
gggaccaggcgaagcggccgagcaggcgagcgaacgacgaaacagacgagaccggaaaggcacgcccgccacaaggagc

SEQ ID NO: 218967 - RNA, 30 nt, Homo sapiens
agcaagggagaaaaagacaagaaggcgaaa

SEQ ID NO: 218968 - RNA, 55 nt, Homo sapiens
aaccagacaaccgccagggagccagcgaaccaaaacgccacggaggaggcaagca

SEQ ID NO: 218969 - RNA, 73 nt, Homo sapiens
caaacgagccaagcacgaggcagaacacagggcagcagaccgcgcgccagacgccaaggacgcccacagagca

SEQ ID NO: 218970 - RNA, 80 nt, Homo sapiens
caaggaacccccaacacggaaagcaacaaagaggaacgcaagcacaggaccagaaacgaaaggcagcagaagaggaaagc

SEQ ID NO: 218971 - RNA, 85 nt, Homo sapiens
gcggaggaggaggaggaggcgaggaggagagacgggcgggaagaagcccgccgccaccaccccaccaccagcgcagcagagaaga

SEQ ID NO: 218972 - RNA, 77 nt, Homo sapiens
cccgcgccggcaggccggcccggggcgagccccaggccgcaggagggaagcgcacggaaaccgccccgggaggcaca

SEQ ID NO: 218973 - RNA, 81 nt, Homo sapiens
aaggcccccgaggagcgcgggcgccgagggaagcgcgagaaacaccacgcaacggcccaggacacaaggagcgccgagcag

SEQ ID NO: 218974 - RNA, 82 nt, Homo sapiens
agacccagcagccaagagggaagcagacgagagcaagaccaagacacccaggagaaagacagcggggaaaagaaaaaggagg

SEQ ID NO: 218975 - RNA, 77 nt, Homo sapiens
aagcgcccgaggcccgggcccgcgggggcaaccgggcgcagacgaggacaagcagaagaacagcagagggccaggac

SEQ ID NO: 218976 - RNA, 85 nt, Homo sapiens
gaaccgggcgagacccaaggagaggggagcagagccggagggggagacgaaggagaagaagcaccaacaggaaaaacggccaaag

SEQ ID NO: 218977 - RNA, 74 nt, Homo sapiens
caagccaagcacgggcgcggggggggagcccacacacgccccgcgcacaacaggcgacggcagccggcccgggc

SEQ ID NO: 218978 - RNA, 62 nt, Homo sapiens
acagcgcccccagccgccgccccccgcagcagcagcagcgagaagaccaacggacagcaggc

SEQ ID NO: 218979 - RNA, 65 nt, Homo sapiens
gaagagacaacacacaacagaagacaagaccccaagaagaagcggaagaggagccgcggaaccaa

SEQ ID NO: 218980 - RNA, 80 nt, Homo sapiens
cgaggcgagcgccgcgcgcaccacgccagccggccccaaccaaggcgggccgcagagagcaccggagagcaccaagagcc

SEQ ID NO: 218981 - RNA, 80 nt, Homo sapiens
ggaagaagcccaggacgagacacacggcacacaccagcaggcgcagaacgagggacaagggaccgagccagaggggaaag

SEQ ID NO: 218982 - RNA, 66 nt, Homo sapiens
cccccgagagccaggcccggccgcccacggggccagagccggacgacccaagcaaggagacccaac

SEQ ID NO: 218983 - RNA, 62 nt, Homo sapiens
gccccggaagagggaggcgggacgcgggaaaaagaaaagggcgaagacccgaagcagcgcag

SEQ ID NO: 218984 - RNA, 60 nt, Homo sapiens
ccacagaccggcagacgaccagcgggggcccgacacccaccacacagagccagggcccac

SEQ ID NO: 218985 - RNA, 61 nt, Homo sapiens
acaaggccagaacaccagagcaaccacacgccagaccagaaggcacaccaccgaacccacc

SEQ ID NO: 218986 - RNA, 75 nt, Homo sapiens
gcgagcccgggcggcggcgagcgcggcgagacgccagccaccccccccggaaagagccgcccgagagacaaaccc

SEQ ID NO: 218987 - RNA, 80 nt, Homo sapiens
accggcacccggacaggaggagccagggcccggcccgaaaggagagccgaaacagagcaaagcagcgacaacaaagacag

SEQ ID NO: 218988 - RNA, 77 nt, Homo sapiens
ggcggggggcccgcggccacgcccccgggaaaaaccagaagagaaaaaacaaaggggagaggcaccccgcgggacga

SEQ ID NO: 218989 - RNA, 77 nt, Homo sapiens
gagcagcccggcccaccaccccaaacagcaagacacaggccccgacaagggaccgggcgggccccgcaggaaacccc

SEQ ID NO: 218990 - RNA, 35 nt, Homo sapiens
gcggcagcagaaagagcagcacgaaggcaaaccga

SEQ ID NO: 218991 - RNA, 68 nt, Homo sapiens
aaccgcaaacaagcaacgacccaagcgcgcagagaagcacaccgccacagagcaacccagggccgcag

SEQ ID NO: 218992 - RNA, 80 nt, Homo sapiens
ccagaccggcccgggccgggccaggaggacacgcgcagggcccacgacgagacaaggcgcagaaaggggaaagcgagaaa

SEQ ID NO: 218993 - RNA, 61 nt, Homo sapiens
accaagaaccagaggcgagggcgccggcaccagggcgcaaccggaaagggaaggccacaag

SEQ ID NO: 218994 - RNA, 75 nt, Homo sapiens
gagacaaaccccagacgcgccggagggccaggagacaagcgacagagaagaagagaaccgcacgcacaggaaccc

SEQ ID NO: 218995 - RNA, 75 nt, Homo sapiens
cgcaccagaaggcagggaaacaacgaaggacaggagaaacaggggccaaaaaaccaaaggagaagaaaaccacag

SEQ ID NO: 218996 - RNA, 50 nt, Homo sapiens
gaccccccgcccgccgaccgcggcagacgggcgcgggacaaccaacacaa

SEQ ID NO: 218997 - RNA, 55 nt, Homo sapiens
cgaaagccacggagcacccggcaaacagagacaacggcaagcggagaagagcaag

SEQ ID NO: 218998 - RNA, 73 nt, Homo sapiens
cgcagcaaagccacgggggagaagaccacaagacggcacccagcgcacggcagcgagacaaacagaaaagggg

SEQ ID NO: 218999 - RNA, 74 nt, Homo sapiens
accaagggccagaagcaaccagggcacgaaagcagacgcggaagggaaagcaaccggcagcaacggcaaacgga

SEQ ID NO: 219000 - RNA, 78 nt, Homo sapiens
agacccgaaagcaaccaggaggcagaaaccagcgccggacagagaagcccccaaggagcgcagggcgacgccaggagc

SEQ ID NO: 219001 - RNA, 51 nt, Homo sapiens
gacacgaaaaaagagaaagggccaacgaccccgagagaaacggcgagaaaa

SEQ ID NO: 219002 - RNA, 64 nt, Homo sapiens
aagacaaaaaggaggcaaccaaggagaaagggaaagcaaagaagacggcaagagaagaagcaga

SEQ ID NO: 219003 - RNA, 56 nt, Homo sapiens
cggcccaaggaccaccgcccaaccccaaacgcggggagcagaagccccagcccagg

SEQ ID NO: 219004 - RNA, 84 nt, Homo sapiens
gggccgcgaggcacccacaccgcgaccgcacaagcagccgccagcggaaccaagcggcgcggcacacgagaccagggcggcacg

SEQ ID NO: 219005 - RNA, 87 nt, Homo sapiens
gacccgacccaaacgccccagaccccccagagcagagcaccggccagaacaagccaaggagccaagacgagagggacacacggacaa

SEQ ID NO: 219006 - RNA, 71 nt, Homo sapiens
gacggccgaggaaagccccccccaagccggcccccgcgggcgcgggcgaccccagaggagcacgagccgga

SEQ ID NO: 219007 - RNA, 60 nt, Homo sapiens
gccgcaaccgcccacgggcagaggggcgggcaaaggagaggcacaggaagcagaggcaag

SEQ ID NO: 219008 - RNA, 53 nt, Homo sapiens
cccggagagagagccgcgcacgcacagacaaggcccccccgggggcgagaaga

SEQ ID NO: 219009 - RNA, 74 nt, Homo sapiens
gcacgcaaacgccgagacgccagccgcacgaggagagaaaagccaagggcaacccaaggagacggcgcgggggc

SEQ ID NO: 219010 - RNA, 80 nt, Homo sapiens
aaagggcgcaggacaacccccgagcacaggggagaggacggagacaagcagagaggaaaggcaagggcagaaaagagggg

SEQ ID NO: 219011 - RNA, 75 nt, Homo sapiens
aaggccaacaaccccagcgaggaaaggggagcgggggaggaggaaggaagacagacaaggagaagccgagaagaa

SEQ ID NO: 219012 - RNA, 77 nt, Homo sapiens
agccaggagcccgaggaccgacgggccccagcacaagacaggcccacagcagccagcaccaagcagaccacaagaca

SEQ ID NO: 219013 - RNA, 39 nt, Homo sapiens
acccgaaaccacaaggccgaggccacagaacagcccgcc

SEQ ID NO: 219014 - RNA, 75 nt, Homo sapiens
gggacaccggggcgcgggggacgggagcggcagccccggcgccggcggcagagcggggagacgagacaaccgccc

SEQ ID NO: 219015 - RNA, 83 nt, Homo sapiens
cagacagacgccggggaggcagcgcgggacccagcccaggcggcgcggacggggcgggccgacacacagaccaaggaccgaag

SEQ ID NO: 219016 - RNA, 67 nt, Homo sapiens
ggaccgagagcgcgaaacgcacgagaagaggaaagagaaaaccacaaccggaacaacgaagcagagc

SEQ ID NO: 219017 - RNA, 72 nt, Homo sapiens
ggaccacagcaccgaaaacaccaggaaagacaggagaccaaaaagagggaagaggaaagcacaaagacaccc

SEQ ID NO: 219018 - RNA, 67 nt, Homo sapiens
cgaccggaaaagggccaagagcaggaacccgcaggcggaaccaacgaaagccaaagagagggccgaa

SEQ ID NO: 219019 - RNA, 37 nt, Homo sapiens
gcacaaggacaaaagcagcgggcgggggcgggcgccg

SEQ ID NO: 219020 - RNA, 54 nt, Homo sapiens
acggacacggaacaccagagaagaagaaggaaccccgcacacgcgaagagccag

SEQ ID NO: 219021 - RNA, 55 nt, Homo sapiens
gagcacgagaaagcgcacagacaaggagggcgggggcggcagagggcacgcccag

SEQ ID NO: 219022 - RNA, 81 nt, Homo sapiens
cgccaacgaggagcgcaaaaaggccgaggagcgccaggccacccaaccagggaggaggcacccgcccgccccaccggcccg

SEQ ID NO: 219023 - RNA, 73 nt, Homo sapiens
accacacaagagccaaacaagagcgccaaagccacaggaaagggcagcggaggcagagccgaagaaagcaacg

SEQ ID NO: 219024 - RNA, 52 nt, Homo sapiens
gcaggcgagggcgcggcggacgagaaaaccaaggcaccgcgcgccgcgcccc

SEQ ID NO: 219025 - RNA, 64 nt, Homo sapiens
gacgcccgccgcgcgcggccaagccagccggccccagaaaaccagaaaacggacaaaaacagaa

SEQ ID NO: 219026 - RNA, 63 nt, Homo sapiens
cgggcgcgagggcagaaccggaaagaccacacagggaaacgaccagggagagaccaacaggaa

SEQ ID NO: 219027 - RNA, 85 nt, Homo sapiens
accccacgcacaaggagcgagcagaacacacagagccaccaggccagggagaccagggggcaggggaggagcgcccaggcgaccg

SEQ ID NO: 219028 - RNA, 39 nt, Homo sapiens
ggccgccagccgggagaagacagccgcgcccgcaccagg

SEQ ID NO: 219029 - RNA, 88 nt, Homo sapiens
gaacggcaagagaaccccgcggggaaggggggcagaggccggaccccagcacacagaagccgagacggagcacagcaagcgggagcag

SEQ ID NO: 219030 - RNA, 84 nt, Homo sapiens
gcagagcaaggagaagcgggggaacgcccgcggacggcagggcgcgacaagaagcgcccgcccgacgagcggcccgccaccacc

SEQ ID NO: 219031 - RNA, 79 nt, Homo sapiens
caacaagagacgggacaagacagggcaaaggacagaccagggggaagagaccaccggaaaccgagggcgggagaaaacc

SEQ ID NO: 219032 - RNA, 55 nt, Homo sapiens
aagggcgggagaaccaggaagccgggaagcagagccccgggccgggaaggggaaa

SEQ ID NO: 219033 - RNA, 80 nt, Homo sapiens
ggaaaccagagcagacccggaacacgcacgcaggccggaaggaccaggcagggagcaggacaggaagcagaaggccagga

SEQ ID NO: 219034 - RNA, 63 nt, Homo sapiens
acagcgcgccaagcgaacggagagccagccgggagaggggagacaaaccaaagaaaacagacc

SEQ ID NO: 219035 - RNA, 82 nt, Homo sapiens
cggcaccacaagcaggacggcgcggacggccccccaggggccccagagcccgcgcaaacagaggcggagaagagcagacccc

SEQ ID NO: 219036 - RNA, 81 nt, Homo sapiens
ccagagggccagagggaaggacagaggacagcagcggacggccggaccaagaggcgccgccccccagcaaacgagaaaaac

SEQ ID NO: 219037 - RNA, 75 nt, Homo sapiens
agaaccggagaagaccagaggaaggacaacgaaaagacaaggacccacccacgaggaccacgggaaacacgaccg

SEQ ID NO: 219038 - RNA, 84 nt, Homo sapiens
aggaaaagcagggccgggccgccccgggggcgccaggcgaccggagcgaacgccacgccggggccgcaggagggaagcgcacgg

SEQ ID NO: 219039 - RNA, 60 nt, Homo sapiens
cccgagagcgccgccgccccgcgccgccgagccagcgccagaagggcacggcagaacgac

SEQ ID NO: 219040 - RNA, 109 nt, Homo sapiens
caagccaaacggacaggagaacggcgccacaagaaagagcaggacaagagaaaggacaccagaggaccagaacccacgagaaacagacgagccaaccagaccccaggag

SEQ ID NO: 219041 - RNA, 80 nt, Homo sapiens
agaagacgacgcaccgcaggcagacaaaagggccaaagaagggagaggccaagcggagaacaaccccaccagacagccgg

SEQ ID NO: 219042 - RNA, 68 nt, Homo sapiens
aaaagggccaaagaagggagagagcgcaagccccggggcagagacacaggacacccacccgccgggga

SEQ ID NO: 219043 - RNA, 86 nt, Homo sapiens
agaaggcccagccccaccacacaccgcccaaggcaagcggccagggacccaaggaagcagacaggcggaggcagcggcgcgaccgg

SEQ ID NO: 219044 - RNA, 55 nt, Homo sapiens
cacaaacgccgcaccaggcgagcagcgcccccggacaggagagacaacggaggca

SEQ ID NO: 219045 - RNA, 83 nt, Homo sapiens
agaaggcggagcgaggggaaagcaggggagcacccgcgagggcccaaccccggacgcaggcgaagaagaggaggaggaggagg

SEQ ID NO: 219046 - RNA, 94 nt, Homo sapiens
cgccgcggagaccccaccgccggcgcgggaaacgggcgaagcgacgagccgcgaggagcgggaaggcaaagaagaagcgcccacagaaggaagc

SEQ ID NO: 219047 - RNA, 56 nt, Homo sapiens
aaccgggcagaacggcggaaagggcagcagagggaaaccggacaaaagagcggaca

SEQ ID NO: 219048 - RNA, 63 nt, Homo sapiens
gcagaccccgccagaccaacaagcggagcggggccaggacacacgagcaagaagaccccaaga

SEQ ID NO: 219049 - RNA, 69 nt, Homo sapiens
cccccccggccggcgggcggcacaccacgggggcgcagaccgccagggcgcccaccgccggagacgccc

SEQ ID NO: 219050 - RNA, 59 nt, Homo sapiens
gcggaagggagaaccagagcgcgggcggcgccgcggcccgccgccgagagagcaggccc

SEQ ID NO: 219051 - RNA, 78 nt, Homo sapiens
acggccgaagaccacagagcaagcaagaggaaacagccggggacaggcaacagccgaccccgccccccgaggcgcagc

SEQ ID NO: 219052 - RNA, 70 nt, Homo sapiens
gcacccgcaagaagcaccagcaagggccccagggcaccccgcggggccaaccaggaggggcccgcaacgg

SEQ ID NO: 219053 - RNA, 75 nt, Homo sapiens
ccggcgcgacccggcgcgggcacgcccaccggcccgcgccgcccaggccccgcagaagccaggaaaaagcccagg

SEQ ID NO: 219054 - RNA, 74 nt, Homo sapiens
cacaaaagcggaagagcagagagaaggcagggcaaaccagaaagacggcaagcccagaggaaacaacaggaagg

SEQ ID NO: 219055 - RNA, 60 nt, Homo sapiens
caccagcagccaccaggagcccgagagagaagggggagagaagaagagaagagagccacc

SEQ ID NO: 219056 - RNA, 66 nt, Homo sapiens
cggcccgcgcgcgcaccccgcggacgccacagcgcaaagaggcagcagcacgcgaaaagccggaac

SEQ ID NO: 219057 - RNA, 101 nt, Homo sapiens
ccgagagccgcccgggccagcggccgcgcacccccggccggaggcaccagcaaccgggcggggcggcccaaggggaagcgggcccggccccgcgggaaggg

SEQ ID NO: 219058 - RNA, 55 nt, Homo sapiens
gacggaggaggccgcgccgagaaccgaccgagggacgccagaggggaagccgcac

SEQ ID NO: 219059 - RNA, 93 nt, Homo sapiens
cggcgcggagggcgacggagcgcccggagccccggacagccaggcggaagcaggcgaagccgcgccgggaaaggacggaaggccacacaaaag

SEQ ID NO: 219060 - RNA, 58 nt, Homo sapiens
cccagagcggaacacaggaggacaaagacacgacaccaaagagcccggagacccccca

SEQ ID NO: 219061 - RNA, 61 nt, Homo sapiens
gacccccagaagcagcagacggcacacgcagcagaagcccggaacccgaccagcggaccgg

SEQ ID NO: 219062 - RNA, 77 nt, Homo sapiens
gcccagagccagaagaggggaggaaaggcaggaagacggaaacacagcccaagcgcagagacagggcaccggagcca

SEQ ID NO: 219063 - RNA, 59 nt, Homo sapiens
cggcgcgcgaccgcgcaaaacggcaagggcggagcacgggaaagaaaccccaacgccgg

SEQ ID NO: 219064 - RNA, 118 nt, Homo sapiens
aggcaccacccagcggcgcggaggggccccgacgcaaggacaaacgacgaggaaaacgcgccccacacaagggcagcaaacccagcgaagggaggagggggcagcagcagacagacaa

SEQ ID NO: 219065 - RNA, 66 nt, Homo sapiens
agagacccccgccgaaagagccaggcagcaaccaccggagaccgggggccgggggacggccggcgg

SEQ ID NO: 219066 - RNA, 75 nt, Homo sapiens
aggccggggggaggcaccgcgccgcacgcgcagacgcaaacagcagacggaagaccccacggcaaaaccacaccc

SEQ ID NO: 219067 - RNA, 80 nt, Homo sapiens
ggcaagaagaacacagggggaagccaagcagaacaagccgccagcaaccaagcccagaaacaagccacagcagagagagg

SEQ ID NO: 219068 - RNA, 65 nt, Homo sapiens
gaaggcggacaaaggaaagccaaaacacgacagggacgggcaccagccaccgacccgccccgagc

SEQ ID NO: 219069 - RNA, 74 nt, Homo sapiens
ccgagaccgcggccgggaccgagggaacaagacaccaagggaaggaaacacaaaccagcacgaagaaaagccgc

SEQ ID NO: 219070 - RNA, 59 nt, Homo sapiens
aagaaaaagggcagccacaacacaacaacagcaacggaggcgggaccggaacaggcaca

SEQ ID NO: 219071 - RNA, 73 nt, Homo sapiens
agggagcagagggaaagggaaggagaaggagggacgcaggcgcaggccagggaagaaagcacgggaaaaggcc

SEQ ID NO: 219072 - RNA, 66 nt, Homo sapiens
acagggacgggggcagggacaagggaaagaaacggcggaaaaacaggggagaaacccggcgaaggg

SEQ ID NO: 219073 - RNA, 75 nt, Homo sapiens
cggccaacagggccaacccgaaccccaacacggcgccagcgagagcccaacaagggcagagggccagacccccaa

SEQ ID NO: 219074 - RNA, 56 nt, Homo sapiens
cccaagggaaaagcagcggccgcaagcacagacgcagccagcaaggaaggcgggaa

SEQ ID NO: 219075 - RNA, 71 nt, Homo sapiens
cgcgcccacgggcagcgagagagaaacagcggaaaaaaaaggagccggggaaaagaaccaaaccaacaaaa

SEQ ID NO: 219076 - RNA, 77 nt, Homo sapiens
cccgcggcggcgccccaggcgcacaaccaaaccagaccgcagcagcgaaaagggcgacagcaagccagggggcagag

SEQ ID NO: 219077 - RNA, 107 nt, Homo sapiens
acaggggcccccaccacccggaggagcagcccgccccgccgggggagacgacccccgccagcgggcggggcccggggcccgcgagccaggaccccaacccggcccag

SEQ ID NO: 219078 - RNA, 76 nt, Homo sapiens
agccgcggcggagacgcacaggcccgggccgccaggcccaacgacagaacccaagagccccccaggggagacggag

SEQ ID NO: 219079 - RNA, 78 nt, Homo sapiens
gaaaaacaaaggcaaaagcagaaaacaacgacgcaaaaggaaccggaacaccaaccaggaggcaccaagcaagaaaag

SEQ ID NO: 219080 - RNA, 82 nt, Homo sapiens
cagagaagaaacaagaaggaaaggaaggaaacccagcgggacgcagccgcaagccggaccaggagaaacaaggaagagcaac

SEQ ID NO: 219081 - RNA, 76 nt, Homo sapiens
ccgccgcccccgccagccacggagccaaggcggcagcgcgcgagggaccggccaggcggggcaaggggacggccac

SEQ ID NO: 219082 - RNA, 64 nt, Homo sapiens
gacgcagggcgcccccggacgggccaacgcacggcccggcagagccagcaccccccgcggcagc

SEQ ID NO: 219083 - RNA, 77 nt, Homo sapiens
aagaacaacagcaggccaagcccgccggaggggcgcggggggccaccaacacccccggaacaccagacccaaaagca

SEQ ID NO: 219084 - RNA, 81 nt, Homo sapiens
cgcccagagcgccacggagaagccgccgaagaggaaaggcaacgcgacaggaagggcaccacccccccagccccgagggac

SEQ ID NO: 219085 - RNA, 76 nt, Homo sapiens
agaaggacccccaacagagaggcccaggggcagggcgccaacagcaccaggcaggacgggaacacggggcacaggg

SEQ ID NO: 219086 - RNA, 82 nt, Homo sapiens
acgcacacgggggcggacaccacaagaagggcgccagccgccccggggccccgacccgccaaagacccagaaggggagcgcg

SEQ ID NO: 219087 - RNA, 75 nt, Homo sapiens
gacgaaacggcaaaccaccaccaccagaagcaccacaaccgcagagacgagccaacggaggcagccggcggaaac

SEQ ID NO: 219088 - RNA, 79 nt, Homo sapiens
aacacccggagcagcgccacaagggacaggcaaagaaacgccgccggcagaggccagaacagagggcggaggagccgca

SEQ ID NO: 219089 - RNA, 79 nt, Homo sapiens
accaaacaaacgcaaggacggacccagccgaaggacggaagcggacacggaccgacagcccccaggaaggaggcggcgg

SEQ ID NO: 219090 - RNA, 78 nt, Homo sapiens
caagggcggagcggggagagacagacagaaggacaaagagccagaggagaacgagaggggcggagaacggaaaagcac

SEQ ID NO: 219091 - RNA, 88 nt, Homo sapiens
cgcaagaccgggcagacggcccaacgaggcgagggcgccccaggagacgcaggaggcaacgcacgggccacaggcagccgcagaacag

SEQ ID NO: 219092 - RNA, 65 nt, Homo sapiens
gaaaagcggagcacgcgggcacgcgcggaaacggagggggaagaagaaaagaacagccagcagac

SEQ ID NO: 219093 - RNA, 66 nt, Homo sapiens
agaaggaccaagaaccagaacccaggagaaacgagagggacagcaaggaagacgccagagagcggc

SEQ ID NO: 219094 - RNA, 66 nt, Homo sapiens
ccaccaagagaacaaacagagccagcaagaacagccaaacagggggccagaaagagcaaagaagag

SEQ ID NO: 219095 - RNA, 74 nt, Homo sapiens
gagaacgacgacacacacgaaccagggacacagcaaggccagaacaccagaagcagccgaaacgaaccaagaac

SEQ ID NO: 219096 - RNA, 81 nt, Homo sapiens
agagccgcagccaagcccggaagacgcgaccgggcaccggcgggggaggggccaaagggagagggacaacacacgagcaca

SEQ ID NO: 219097 - RNA, 48 nt, Homo sapiens
accccccaaaccgcagcgcccgaaaggaaccgaaagacgacgcaccga

SEQ ID NO: 219098 - RNA, 66 nt, Homo sapiens
aaggaccaacagcccaagccggacacgcaaggaagagacagaggagaaggagaaaaaaccagggga

SEQ ID NO: 219099 - RNA, 86 nt, Homo sapiens
cgacgggagaggcggccagaagaaaacgaggggcggaacacccgccaaagcagagaaaagccgccagacccacccggacccccaga

SEQ ID NO: 219100 - RNA, 81 nt, Homo sapiens
acgcagcgcgacccagcagggaaagaacgccggacaacagcggcgaagaaggcaaaccgaaggcccacagagaagaagaac

SEQ ID NO: 219101 - RNA, 80 nt, Homo sapiens
aggagaaaagaagccaaagggacacgaaaagggcacagaaagccaggagcgaacacacagaacccgcaagaaaaaggaag

SEQ ID NO: 219102 - RNA, 79 nt, Homo sapiens
acccggacgcaagccgggagacgcacagcaagagcccggacaccggaagcgggaaagcaccgacagaaaggcacggccg

SEQ ID NO: 219103 - RNA, 78 nt, Homo sapiens
gggggagggggcggccgggcggagagaaccagcgaggacgagggcggagaacggaaaagcaccaggaagcagagagga

SEQ ID NO: 219104 - RNA, 73 nt, Homo sapiens
acacagcacaacccaacaggcagcgggaaaccggagcaaacacgcagacgcagcccagacccggacacggacc

SEQ ID NO: 219105 - RNA, 77 nt, Homo sapiens
aggccgcccggcgcagcggggaccggcggcggcgcccaggcacccggcccgggcggcacgccgggggcgcgccggcc

SEQ ID NO: 219106 - RNA, 77 nt, Homo sapiens
ccccagccaccacccgcacggcgcaggccggaacacgggcggccacgaggagcggagcggaggcagacacacacggg

SEQ ID NO: 219107 - RNA, 52 nt, Homo sapiens
gagcagggagaagagaaagagacgcaggagaccaacggaagcgagagccacg

SEQ ID NO: 219108 - RNA, 78 nt, Homo sapiens
cggggacgacccacacacagggccacaagaccagagccacgcacacagaaacagcgagacggaggggacacccaaggc

SEQ ID NO: 219109 - RNA, 80 nt, Homo sapiens
gccagcccagccggcacgccccccggcccagggaccccgcgcagaggacgggcccagggaacacgggagccccggaccac

SEQ ID NO: 219110 - RNA, 98 nt, Homo sapiens
ccagcccagccgcgaaggaccacagggccccagacagaacgaggaacaaaaacccccaccgggaaaaaggggaagcgcgggagagggaaagcggagag

SEQ ID NO: 219111 - RNA, 68 nt, Homo sapiens
gggagaaaggacggaaccagccaggggggaagaggaagaagcaaacgacagggaaccacagccccaaa

SEQ ID NO: 219112 - RNA, 79 nt, Homo sapiens
gcagcccagcaccaccaggcgggagcaaaacgacagaaggcgaggccgggggcagagaaccgccggcggaacacggacg

SEQ ID NO: 219113 - RNA, 72 nt, Homo sapiens
agccacaggaggccccccggcaccaacaggggcaagaccccaggggcccaaggaggggaaaagagacgaaag

SEQ ID NO: 219114 - RNA, 70 nt, Homo sapiens
aagggagcaccagccagaccgggaagaaacgaaggggggaggcccaggccaaaagaccacggaaacagaa

SEQ ID NO: 219115 - RNA, 52 nt, Homo sapiens
gggacgcacaacgggaagccaagcaacagcccacagacaagggcaaaggagg

SEQ ID NO: 219116 - RNA, 54 nt, Homo sapiens
ggcaccaccggccccggaaggcacacgagcggccacgagcaaccaagaggagaa

SEQ ID NO: 219117 - RNA, 57 nt, Homo sapiens
caggcccaggggagagaccccagagggaaggcaaacagggggcaccgacccgcacgc

SEQ ID NO: 219118 - RNA, 74 nt, Homo sapiens
cccgcggccccgcgccggcccgaccaggccccgcagacccaacgagccgcgaagcagccacggaccccagcacg

SEQ ID NO: 219119 - RNA, 83 nt, Homo sapiens
gggccacaacccacgaggacaaaagcaacgaccgaggcaaacaagcagcaaggaccagcacgggagaacaaacggagaagaaa

SEQ ID NO: 219120 - RNA, 80 nt, Homo sapiens
ccccgcagcgcgacggcacacacaccgcagaacagcggggaaacacaggcaaggggcgaagaagaagcacaaaaccacac

SEQ ID NO: 219121 - RNA, 65 nt, Homo sapiens
ccaccgcacaagagccaagaacaagggccgcgagggaagcagacgggagcgggccgagaaaaacc

SEQ ID NO: 219122 - RNA, 76 nt, Homo sapiens
agccggccgcacagcaaaagaagaggaggaaggcacaaaagccgcacaggaagcgggagaggccacccgcccacga

SEQ ID NO: 219123 - RNA, 66 nt, Homo sapiens
agcccggcagcgggaacacagagagcgaagccagccggagcaggaagcgcacacgccaaaggagag

SEQ ID NO: 219124 - RNA, 77 nt, Homo sapiens
aaacacaaacggagagagagacaagaaggggaagcaaaaacgccaaccaacgagggaagagccgcaggaggagaacc

SEQ ID NO: 219125 - RNA, 77 nt, Homo sapiens
ccgacacagggggagaaacagacaacaggcacaaagagagaaggaacacccacagggcagacagagaaagaacacaa

SEQ ID NO: 219126 - RNA, 80 nt, Homo sapiens
acaaaggcaccaggccaccacagaaacaaaagcaacaaagaggaggggaaagaggcagagaagccaagacaggcaaaggc

SEQ ID NO: 219127 - RNA, 50 nt, Homo sapiens
aaaaggcggacagcagcgcaggcaaaaaacaggaagcccacgcgagagac

SEQ ID NO: 219128 - RNA, 77 nt, Homo sapiens
cggcgcgggagccggcggggcggcggcaacggggcacgaccggggaagaaagaagccaaagagaaggcaaagcaggc

SEQ ID NO: 219129 - RNA, 79 nt, Homo sapiens
gaaaagaaaacgcagagagaaagagagaggaagccagcagccgacgaagaacagcgcgagccacaaggcaaggaagcag

SEQ ID NO: 219130 - RNA, 69 nt, Homo sapiens
gggagcagaaacggaggccgccacccaggagccggagagacaggggacagggaaggcaagagccgggaa

SEQ ID NO: 219131 - RNA, 92 nt, Homo sapiens
cggacaccccggacgaaccacaggaagcgcggggcggcggcgaaaggacgccaccaccgcccagcgcgcccccccaggaggccccaggccac

SEQ ID NO: 219132 - RNA, 43 nt, Homo sapiens
cagaaacaagccaggaccacaaaaggcgccggagacccaggcc

SEQ ID NO: 219133 - RNA, 79 nt, Homo sapiens
cccgcacccagagaggcgggcaggcccaagaagacaggcaaggagggggcggagggcgccggaccgaaggcgcgaccac

SEQ ID NO: 219134 - RNA, 67 nt, Homo sapiens
gaccgggggaagggagaagaccaaagggaagagaaacgcaaccggcacggggccaaaaaggcacgag

SEQ ID NO: 219135 - RNA, 68 nt, Homo sapiens
caaacgaacgaacaccagcgaaaaaaaaggggcggaggcagggagggacggccgggggacagccaagg

SEQ ID NO: 219136 - RNA, 66 nt, Homo sapiens
cccacgaacccaggcagcaggggagaagcagaccgcaccaggcgggaccccgaaaaagcccaaaca

SEQ ID NO: 219137 - RNA, 41 nt, Homo sapiens
ggaaggcccccagacccaaaggaaagggagcagcaccggcc

SEQ ID NO: 219138 - RNA, 74 nt, Homo sapiens
cccagaagcaaccgcccacagcacggcggggccgcccagcgcaagagaaagcacccggcaccacagccgccgcc

SEQ ID NO: 219139 - RNA, 99 nt, Homo sapiens
ccagcaccccgccaccacggccgaccagcgccacccccggccacagaccaggaccgccgggcaggacacgccccgacaggccagggcgcgaggagcagc

SEQ ID NO: 219140 - RNA, 77 nt, Homo sapiens
ccacagaggcggagcgagaagacagagacggggcgacggggagaggcaggcgaggggacgaccggcaccgccgaggc

SEQ ID NO: 219141 - RNA, 79 nt, Homo sapiens
aaccacgggggagcggcggaggaaaggacaaaacccggggggccgggacccgggacagggggccagcacggcagagaga

SEQ ID NO: 219142 - RNA, 78 nt, Homo sapiens
cggagaagccccagaccagaacccacaggagggccagaggacaaagcacggcggaagagaagccagccgccggcgaca

SEQ ID NO: 219143 - RNA, 50 nt, Homo sapiens
gcggcgggcacaaaaagagccgaaggaagaaagaagaaggaagcagaaaa

SEQ ID NO: 219144 - RNA, 41 nt, Homo sapiens
acacaaaaggaccacggcccccagaacccgcccaagagacc

SEQ ID NO: 219145 - RNA, 76 nt, Homo sapiens
caagcccagcccacacaggaacacgaagcccgaaacaagacgggaacagagaagcgagcggaggagacggaggcag

SEQ ID NO: 219146 - RNA, 68 nt, Homo sapiens
gccgggaagcgacaccggaaagaggcaagaaagacacaaagacgagcgaggaaacccaaaaagcagca

SEQ ID NO: 219147 - RNA, 81 nt, Homo sapiens
cgggagggcgagaacgaccccgagacggcggggccccgggccgcaccccccaccgcaacccgccgggaagcagccgccaaa

SEQ ID NO: 219148 - RNA, 96 nt, Homo sapiens
cccgggcgcgggggcggcggcagggggcggagcggaagggaccaaaccggaaaacagaaagaagaagcacaccagacacagaggaacagcaaaagc

SEQ ID NO: 219149 - RNA, 69 nt, Homo sapiens
gggacaagggcaacaaggccgggaccagacaggcaaaacaccagagaaaaaccaagccgggcacaacac

SEQ ID NO: 219150 - RNA, 69 nt, Homo sapiens
caccaccagaaaagggagcccaccacgaaagcagcaacaggaacccagccaagagccccgaacaagcgc

SEQ ID NO: 219151 - RNA, 81 nt, Homo sapiens
gagccccaaacaagggggacggacagagacgggccgacggcccccccaggggggccagacgagaggccggccaaggacgga

SEQ ID NO: 219152 - RNA, 77 nt, Homo sapiens
gcgccggcaagagccgggcggagaaccggggccggacgccccgagaggccccaggggcggggggagggaggcacagg

SEQ ID NO: 219153 - RNA, 74 nt, Homo sapiens
gcggacccgcaaccgcggcaggacacagacggaagggagggccacccacggcaggcccagccgcaacaagcgca

SEQ ID NO: 219154 - RNA, 83 nt, Homo sapiens
gagcaccaaaggggaaagccgaagaaaccagggggcggggccccgagcagacagcaggaaagaagaagccccggacacccagg

SEQ ID NO: 219155 - RNA, 85 nt, Homo sapiens
cggcgcgcggcgcgccgcccggcgagcgggccggaggaaaagaaaggaaaccccccaggcaagaggcgcaggaccgggaagacca

SEQ ID NO: 219156 - RNA, 84 nt, Homo sapiens
gcgggggcgcgcccgccgacccgcgcccgccccccagcaccgggcggacgacacgagaggcgagggacgacagagcaagcggca

SEQ ID NO: 219157 - RNA, 78 nt, Homo sapiens
cgggcggcgcggcgaccgggccccggagaggaaggagacacagggaaagcccaccaccgcccggggggacaacaggaa

SEQ ID NO: 219158 - RNA, 85 nt, Homo sapiens
cgaggagcggcggcggggcggccgcggaaaggggagcaagaagaaagagcagggaggagggagcgacaggaagaaagaaacccca

SEQ ID NO: 219159 - RNA, 74 nt, Homo sapiens
cgcgggcaaggcaagaaggaggagccacagcccccggcaagcaagagagagaagaagccggcagcccggcccag

SEQ ID NO: 219160 - RNA, 67 nt, Homo sapiens
cgaaaaggagcagggaacagcaggacccagcccaaagagcgcccgaaggaccacaagccgcagaaga

SEQ ID NO: 219161 - RNA, 76 nt, Homo sapiens
gccgggaaggggagccaccagccccccggaggcgaaaaccaagagacacggcccgcccaaggaagaaaaagacacc

SEQ ID NO: 219162 - RNA, 40 nt, Homo sapiens
aaggagcaccccccggccacgagccccaacggaaacgacg

SEQ ID NO: 219163 - RNA, 85 nt, Homo sapiens
ccggacccccaacacacccaaaaagagacagacacgccaagaaggccggcgcggaagaggccggcggcgggacggccccacggga

SEQ ID NO: 219164 - RNA, 77 nt, Homo sapiens
gcggccagccacagccccggaggggggccgcgacgagacggggagcgcgccagcagcccgccacgagcgccgcaggc

SEQ ID NO: 219165 - RNA, 76 nt, Homo sapiens
ccccgcccccaccgccgcagacccccaagcagcaggccagggcaggacagcagcccgcaacaggccggccagcccc

SEQ ID NO: 219166 - RNA, 81 nt, Homo sapiens
gggccaacagagggacggccccagaaggcagacgcaaacagcagacggaagaccccacggcaaaaccacacccgaggcgag

SEQ ID NO: 219167 - RNA, 79 nt, Homo sapiens
cgaggggcacaccagaacaacacaaaaaggggagcggacgggcccaggagcaggagccacgcagacgggccgcacaccg

SEQ ID NO: 219168 - RNA, 62 nt, Homo sapiens
accgccagcaaaccacacagccggacaggacacgacgaaccaggaagccccacccccaccgc

SEQ ID NO: 219169 - RNA, 82 nt, Homo sapiens
cccgcacgacgcaccccgcaccaggcgcagggaacaccaccagccgacagcccgggggccaaaaagcgccggacacgaggac

SEQ ID NO: 219170 - RNA, 58 nt, Homo sapiens
cagcccgggacaccaagaaagaaccagggaaccccacagacggccagagggggccacg

SEQ ID NO: 219171 - RNA, 40 nt, Homo sapiens
cgcacacagcaagcacgaggcgcccagccacccccgacgc

SEQ ID NO: 219172 - RNA, 80 nt, Homo sapiens
gccgcccgccaaccccaggggaccagaggaaccagcccgagcgagaagaaggaggagaaacaagagcaccaccagaagca

SEQ ID NO: 219173 - RNA, 88 nt, Homo sapiens
gcggagaccacaaccggaggagaacgagacgaggccccacaccccaccaaacccgaccagcggacccggccaacacacgcggaaccca

SEQ ID NO: 219174 - RNA, 75 nt, Homo sapiens
gaacccaaccacaggagcaaaacccacacaagccaggcagcgagcgggagcagacagggaaccgaaggcagcaga

SEQ ID NO: 219175 - RNA, 68 nt, Homo sapiens
ggagggaaaggaccggcccgccgcaccgcccggccagacgcagaaggggaaaagagaagaacacgaaa

SEQ ID NO: 219176 - RNA, 75 nt, Homo sapiens
cggagaggacagccaagggaccaaagaaaaaacacgccagccggagccccgggcaaggggagcagacaacaaaac

SEQ ID NO: 219177 - RNA, 59 nt, Homo sapiens
agccaccacaaaagcgaaagggcacaccacagccccacaagacacggacacaccaagcc

SEQ ID NO: 219178 - RNA, 64 nt, Homo sapiens
acacccggacggcaagcagagcgggggcggcgaaagaagacaggagaaagacagcaaagaaaag

SEQ ID NO: 219179 - RNA, 37 nt, Homo sapiens
ggcgcgcccagcggaaaagaccaggagaagacgaacc

SEQ ID NO: 219180 - RNA, 72 nt, Homo sapiens
cggggcggcgaagcggaggccggagcaggcgacccacaacggggacccaacggcgaacggaccgggcaaagc

SEQ ID NO: 219181 - RNA, 78 nt, Homo sapiens
gcggcggcagcgagccagcagcgccccccagaagcgaggaacagggcggacaaggcaaaggggcagcggaaaacaaac

SEQ ID NO: 219182 - RNA, 82 nt, Homo sapiens
ccagcccccgcaaggaggccccaccaggacaagaggacccaccgggggcagggcgcaccacgaaaacaacacagcagggaag

SEQ ID NO: 219183 - RNA, 72 nt, Homo sapiens
cgggaccggccgggaagcggccaccgacacgcagcagcggccagaggaaaccaaccggccaagcacaaccag

SEQ ID NO: 219184 - RNA, 85 nt, Homo sapiens
agagaggaggagccagacgacaagcacacacaggcgcgaaacggaaaaagaaggaacacaacgccacacaagaaaaaagacagaa

SEQ ID NO: 219185 - RNA, 44 nt, Homo sapiens
cgcgccagcgacccccaagacaggacagagcgggagccaccagc

SEQ ID NO: 219186 - RNA, 80 nt, Homo sapiens
caagaagcccgagaggggccggacggcaccacccagccaagcagcccacccagccgcccggaggccgcgggagaggcaac

SEQ ID NO: 219187 - RNA, 80 nt, Homo sapiens
acgcagggccgaggaagccaagcaaagaccagccagaagaagcaaaaggaaaccgaaggaaagggaagaacagaaaaacg

SEQ ID NO: 219188 - RNA, 37 nt, Homo sapiens
ggaagagcggcgcccaggaggaggagggggcagcaac

SEQ ID NO: 219189 - RNA, 71 nt, Homo sapiens
ccccaagcacaccccgaaccgggcgagccccggacgcaggaagaacccgagggccaacgacggaccggacc

SEQ ID NO: 219190 - RNA, 82 nt, Homo sapiens
cacagagggcgcaagaagaagaagcagcgaagccggggcggaacaaccaagcggagggcagaagaagacagccagaacagca

SEQ ID NO: 219191 - RNA, 80 nt, Homo sapiens
cgcacgcagccccgagcagcaggaggcaaagggaccccaagaaaccaaagggcaagagccgcagcccggcagacagcaga

SEQ ID NO: 219192 - RNA, 81 nt, Homo sapiens
gcagcgggagggagggagcgagcaggcgaagccgcggaggacgggggaagaggcggcccccgggagagaacagcacacaga

SEQ ID NO: 219193 - RNA, 57 nt, Homo sapiens
acacaccgccaccgaccccaaaggagggaaagccgcccgacaccggacggccaccgc

SEQ ID NO: 219194 - RNA, 77 nt, Homo sapiens
gaaagacaggccgacagcgggaagacccggggagcgggaagagcaggaagaccccgggcggacccccggccgcagca

SEQ ID NO: 219195 - RNA, 85 nt, Homo sapiens
cggcggcgcgcgacgcccagagccgcggccggggcgcgggagcgaaacagaaccgcagagggaaagaggaaagggaaccgggccc

SEQ ID NO: 219196 - RNA, 80 nt, Homo sapiens
ccgaggcggcgagccagaggccaacgcagaggaacggaacagaggaacagaaacgccggcagaggccgcccagacagagc

SEQ ID NO: 219197 - RNA, 68 nt, Homo sapiens
aagcccgcggacgccaggggccagacccacaaagcacgaggccaagggcggggaaggagcgcgagcag

SEQ ID NO: 219198 - RNA, 69 nt, Homo sapiens
accaaaaaccaggaccaaaaaggaagggaccccaaagccgcagaaagcaacaaagcgagagcacaagaa

SEQ ID NO: 219199 - RNA, 82 nt, Homo sapiens
cggacccgcaagcagcccaccacgccacaaacgccgcaccaggcgagcagcgcccccgaaccgcaaccaggcggccacagcc

SEQ ID NO: 219200 - RNA, 73 nt, Homo sapiens
cgccaagccaaggaaggccgagaagaagcaaagggcaaccagggaaacaggagagccggagagggggaagccg

SEQ ID NO: 219201 - RNA, 38 nt, Homo sapiens
acaggagccccacgccacggccgcccccccaccgcgga

SEQ ID NO: 219202 - RNA, 76 nt, Homo sapiens
cagccccaggaccgaacgaccgccgcggcggggcccaaacagcagaggggcagaggggaacaacagaggagggcgg

SEQ ID NO: 219203 - RNA, 77 nt, Homo sapiens
gcgcaaaaccaggcagaccccgagcccgggagaagcgaggaaacgcagagagcgggacaagggaaaaaagggaaacc

SEQ ID NO: 219204 - RNA, 80 nt, Homo sapiens
gggcagagcaaggagaagcggacccccccagcgcccgccccagcacccgaagacgccgacaacgcagagcaggccgaggg

SEQ ID NO: 219205 - RNA, 68 nt, Homo sapiens
gccaggcacccaaaaaaacgcgcacccgacccaaaccggagcaacaaaggaaagcgaaagaggcacgc

SEQ ID NO: 219206 - RNA, 94 nt, Homo sapiens
acacccaggagccagagcaaaaaggacacacgcaaaccacaagcagggacagaaaaccagaaggcaccgacaggaaaggaaaaggagaaccagg

SEQ ID NO: 219207 - RNA, 67 nt, Homo sapiens
gacgcagggcgcccccgcgcgaggagcgaaggaaaagaaaaccaccgggcgaagaaagaggaacagc

SEQ ID NO: 219208 - RNA, 82 nt, Homo sapiens
gagaagcaggggggccaggaggggagaggaggcaggcccgcgaaagaggcaggcaagcgagaaggaggacagggagagaaga

SEQ ID NO: 219209 - RNA, 77 nt, Homo sapiens
gccaacgcgcccagaacacgaggaaacaagccaggccagccaacacgagaccaccaaaggacgggcagcggaaacca

SEQ ID NO: 219210 - RNA, 83 nt, Homo sapiens
gaaggaaaagccggaagaaaaagaacaacgaacagcacaacgagggcggcggaagccccgcccaccaggccaacaaggaccca

SEQ ID NO: 219211 - RNA, 68 nt, Homo sapiens
aaggcagggggggaacagaaacacagcacacccagcgggaacagagcaaggaaacccaaaaagcacaa

SEQ ID NO: 219212 - RNA, 108 nt, Homo sapiens
gaaaggcgcccccgagaccccgcggaacgcccaccgcggagagcagcacgaccccagcacagggaagcgagacaacagagggagacgccaaagcacccaaagacgcca

SEQ ID NO: 219213 - RNA, 72 nt, Homo sapiens
ggaggcgaggcaaacggggggcgcggagggaccagcgagcgggcacggggccaaaaaggcacgagggaacgg

SEQ ID NO: 219214 - RNA, 72 nt, Homo sapiens
ccaccggaccgcagaaacgagcgcagagaagggaggcgccggcagaaaaccagggaacacgaagaaaagaca

SEQ ID NO: 219215 - RNA, 55 nt, Homo sapiens
ccaaggacacagagcacaagcccaaggggggcagaaagaagaggaggacaacaag

SEQ ID NO: 219216 - RNA, 67 nt, Homo sapiens
aaaacccacaggacaaaagaagaagcagcaagcccgcagggaaggagcaagacgagggaaacacaag

SEQ ID NO: 219217 - RNA, 84 nt, Homo sapiens
cagcgcgcaaccaccccccgccgccgcccaaagcaccgggacggagcacggagaccaccaggaaaacgaaggaaggaggacccg

SEQ ID NO: 219218 - RNA, 70 nt, Homo sapiens
cgaggaccaacaaccggaccgacaaggcaacagcggggaaagcacccaaaggagacgaaccggcggagga

SEQ ID NO: 219219 - RNA, 73 nt, Homo sapiens
cggaaccgacaagcgagcccaggcagagaacacagggagcgccgccgcgcgcgcgcccgcagacaggaggggc

SEQ ID NO: 219220 - RNA, 79 nt, Homo sapiens
ccaacaccgcccgccaggacgacggcacccccacgagcaacagcagaaggccggcccggccacccagaacgacacggag

SEQ ID NO: 219221 - RNA, 81 nt, Homo sapiens
ggcgaagccggcggggaagagagcagccggggcaggaaacagcccgaacgcacagaagaaaccagcgcccagcgccgggag

SEQ ID NO: 219222 - RNA, 69 nt, Homo sapiens
aacggaacgaaaaagcaaggaaaggcccagagaaccacaggcagagacacagaggcaccacaaagaaga

SEQ ID NO: 219223 - RNA, 79 nt, Homo sapiens
ggacacccggcccacgcagaggccagggggccccgagccggcaagaaaaacggagggaagaaagaaacaggcgccgagg

SEQ ID NO: 219224 - RNA, 42 nt, Homo sapiens
aacaaacacgacggaggggcgagaggcaccgccggccgccac

SEQ ID NO: 219225 - RNA, 71 nt, Homo sapiens
cagcagcggcgcaagcaggggcggcccccgcccgggcagagcgcaggagaacaccaaccaccagggaagag

SEQ ID NO: 219226 - RNA, 79 nt, Homo sapiens
agcagagcccaggcgacgcggagcgggagcaggaagagcgaagaacgagagcaggacacgagacacaggccgcacgcac

SEQ ID NO: 219227 - RNA, 54 nt, Homo sapiens
gagagaaccgagagaggagcaaagacacagcaacgagggaagaaccaggcagga

SEQ ID NO: 219228 - RNA, 62 nt, Homo sapiens
gcggaagcgggagaagcgcgagacggcacgaggccgagcagacaggagcagcggccagaaga

SEQ ID NO: 219229 - RNA, 67 nt, Homo sapiens
gggaggggccgggaggcagaggggcaggggcaggaggaagagcgcaggcgccggaagaagagagcgg

SEQ ID NO: 219230 - RNA, 83 nt, Homo sapiens
ggaccgcccgcaggccgcgagccgcccgcggcgaggggcccggaccgcaggccccaagagagcgaaacaaacaaacggcggac

SEQ ID NO: 219231 - RNA, 72 nt, Homo sapiens
ggcccccagaaaaccaccaaaacccaaaaaccgcgacaaagacaccagaacagcaggagagagccaaaacga

SEQ ID NO: 219232 - RNA, 56 nt, Homo sapiens
agaggaccaggcaccaccggccccggaagcacccagaaccggagagcccagaacgc

SEQ ID NO: 219233 - RNA, 82 nt, Homo sapiens
gggaggcccggccgccccggagggagacgcgcgccgaggagaacccagcggggggaaagcccaccgacacccagaacgggaa

SEQ ID NO: 219234 - RNA, 106 nt, Homo sapiens
acacccccaagaagaaggagagaaagcagcagagcaaaaacccaaaccccccaccagcgccaagaggaggggagccaacagcccagccagcccaagcccgcccgca

SEQ ID NO: 219235 - RNA, 59 nt, Homo sapiens
gagagaagggagagagaccaaagacgagaggcggcccaccgcacacccagggcgggcag

SEQ ID NO: 219236 - RNA, 68 nt, Homo sapiens
cgcaggccgagcaggaggagcaggagcggcgcagaagcaggaagaggagcaggacggagggagaaggg

SEQ ID NO: 219237 - RNA, 78 nt, Homo sapiens
gagccagagggaggagccgcggcgggcgccgagcgcaccgcaggaggccgaaggacgaggcagcccgagcccgccaac

SEQ ID NO: 219238 - RNA, 94 nt, Homo sapiens
ccgggccgaacagcagacgccgcggagaacacacaaccggcagacgcgccccgccaccaagacccccagagaaaaaaggagcccccgcgagcac

SEQ ID NO: 219239 - RNA, 73 nt, Homo sapiens
caggaaagaaaagaacccagacaagaggcaccacaggaccaagagagcccccgaggaccgcccccagcgccga

SEQ ID NO: 219240 - RNA, 71 nt, Homo sapiens
agcaaaggacaggacaaccccgcccaacacccaccgagaagcaagacgaggacgcgcacaggaaaggacgc

SEQ ID NO: 219241 - RNA, 61 nt, Homo sapiens
acacagcccggagccccagagacagaacacacgcaggacgaaagagacaaaagccacacga

SEQ ID NO: 219242 - RNA, 78 nt, Homo sapiens
gaggagcggagccgcacgggacaaggcggggcagcaggaggggggaagcaggaggcacggaggggaccccagaacccc

SEQ ID NO: 219243 - RNA, 73 nt, Homo sapiens
agagaaccgacaggaaccagacacgcaaacagacaaagaaacagccggaaaagcacgagcacaagacgaaaac

SEQ ID NO: 219244 - RNA, 76 nt, Homo sapiens
cgcgcccgccgagcgcaacagcggcgggcggggcaccccagaagccgggcggaagcccacgcacaggcgccggggc

SEQ ID NO: 219245 - RNA, 61 nt, Homo sapiens
ggggaaagagcagcagagcaggggaaggagcgccgaaggagaggccggaagggaacagacc

SEQ ID NO: 219246 - RNA, 69 nt, Homo sapiens
gaagcgccacgaggcacacgaaaacagaaccgaggggcgaagccggggaagcccaaagcagaagggcga

SEQ ID NO: 219247 - RNA, 88 nt, Homo sapiens
ggccgagcagggacggggacaagcccgcggcgccgcgggaacgcaccacgcggcggaagcccaggaaaaccagggcggcggcccaccc

SEQ ID NO: 219248 - RNA, 83 nt, Homo sapiens
agaagcgaaagcgcaagacaaacgagaggccaagaacccaaagcaaggcgagacaaggggccaaccagccagggccaacaaac

SEQ ID NO: 219249 - RNA, 74 nt, Homo sapiens
caggcgcgcacaacaacaaaaccagagaaaacggggcgcaagaaagcgaagagccacgaaaagcccaggggaaa

SEQ ID NO: 219250 - RNA, 83 nt, Homo sapiens
agcagcgcaaccaggccagaagagaccagaagacaacaacaagccacccagggccacgaaagagagaacaggggggacccaga

SEQ ID NO: 219251 - RNA, 77 nt, Homo sapiens
gggagaggggccgcgcccaggccggccagaggcggcagaggagcggacggccagaaccacaggacggaagaagcagc

SEQ ID NO: 219252 - RNA, 83 nt, Homo sapiens
cgagaagcgcccggccagccggcggagcccacgacgagcggaaaagacagcacacaccaagacgacccagaacggccgaagag

SEQ ID NO: 219253 - RNA, 97 nt, Homo sapiens
gcagcagcggacggccaggggagagcgaggccgagcccgcgcagccagaacggaagaccaaccagaagacacacaaagcaggggaagagacagagca

SEQ ID NO: 219254 - RNA, 74 nt, Homo sapiens
gcaggaagaggaggacgacaaggaaacggggacaggaaagaaaagggcagcccaacacgccaaaaggaaaaaac

SEQ ID NO: 219255 - RNA, 74 nt, Homo sapiens
caaaaggacaaacaaggaaaaccaacaacagggggaaaaaaaagaggaccaggaggcaacaaagaagaaaaccc

SEQ ID NO: 219256 - RNA, 81 nt, Homo sapiens
ggaaaggccgacgggaggaagaggaaaggagacggaagaagaagaaaggccggggagcagcaaaagcacggggccaaaaag

SEQ ID NO: 219257 - RNA, 74 nt, Homo sapiens
ccccacgggaaggagagcagccagcagcagaagaaccaggacaagaacgcgccacaaagacgaaaggccacaac

SEQ ID NO: 219258 - RNA, 67 nt, Homo sapiens
acaaggagcagaaacacgggccagggcgccacaaagagcgagacgacgggaccgaaggaccccgcca

SEQ ID NO: 219259 - RNA, 73 nt, Homo sapiens
aacagacgcagggcagggccccgcccggcggggaaggaaacgccaagagcgagcggacgaggagcccggaaga

SEQ ID NO: 219260 - RNA, 71 nt, Homo sapiens
caccccgaagagcaacggaaccagcgccgagacccacagcggggccgggccccgaccacccagagaaagga

SEQ ID NO: 219261 - RNA, 70 nt, Homo sapiens
aggaaggcccagcccaggggggccgaaagaaacgagacaacaggcacaaagagagaaggaacacccacag

SEQ ID NO: 219262 - RNA, 70 nt, Homo sapiens
gagccagcgaggccacacccgaaagcaagcccagaagggagggaaaagccgaacggggacgaggaagagg

SEQ ID NO: 219263 - RNA, 82 nt, Homo sapiens
cgggccgcggccgaggaggcagcgcgaccccgcacggaaaccgccagaagcgcggcgagaaaacagacgcagcaaacccaga

SEQ ID NO: 219264 - RNA, 82 nt, Homo sapiens
caaaagggaaaagaaagagaggagccccaagaaagaacaggaagcagccaggagacaggacccgagccccaaagacagaaaa

SEQ ID NO: 219265 - RNA, 79 nt, Homo sapiens
caaacgcaaaagccgccccaaggcggaaaacggccaccaaaggggaagacaacaagcacacagaccccaccagggcgag

SEQ ID NO: 219266 - RNA, 81 nt, Homo sapiens
cgaaccacaacggaggagagaaaccgaagcccacccaagggccagagaccgcaaaaccacacaccgcacacaggacgccag

SEQ ID NO: 219267 - RNA, 85 nt, Homo sapiens
accaagagcaaacgcacaaaaccaaggcccgggcgcaccgcccgcagaccgaggccgagggcggagcagagcgcgcagacgcgcg

SEQ ID NO: 219268 - RNA, 73 nt, Homo sapiens
caaaggcccagaggggagcagagggccgcgccggggagcacccacgggagaccggggggcaagaaaaggaaga

SEQ ID NO: 219269 - RNA, 77 nt, Homo sapiens
aagagcacagaaacacacagaaacaggcaacaggacacaccagagagggaaggaaggaacagcagcgcaaaaagagc

SEQ ID NO: 219270 - RNA, 74 nt, Homo sapiens
cacgaggagaggcgaagcacgcagaggaggcagggccccagggaaggccaggcccaagcagaagaccccggaac

SEQ ID NO: 219271 - RNA, 71 nt, Homo sapiens
agaaccaaagcacaagccggcccacgggcgcccaggaccccacacagggggcgaggaagagacaggcgggg

SEQ ID NO: 219272 - RNA, 69 nt, Homo sapiens
caccgacagacagcaaccaaggcaaagcgaagcagcccagaagggggagaaagagaggcaagagaggcg

SEQ ID NO: 219273 - RNA, 73 nt, Homo sapiens
gaggaccacccagaggagcaaccggcaggaccaacgcggaggcgcacaggaaggagcaaccacaaagccaacc

SEQ ID NO: 219274 - RNA, 73 nt, Homo sapiens
agaggccgaccgagacgggcggagaggagaagggggcaaaacaccccgacccagcaacaagcggagggagacg

SEQ ID NO: 219275 - RNA, 78 nt, Homo sapiens
cagaccaaaaacaggcccggcgagccccgcaggaccaaagggaggggaaacaagaaccagacaggcacaggcgagggg

SEQ ID NO: 219276 - RNA, 73 nt, Homo sapiens
gggagcccccggggggacgacgaccgccccccgcgcagcacagcgaaggggggcccacgcggaggacgcagaa

SEQ ID NO: 219277 - RNA, 82 nt, Homo sapiens
cgggcccgcggaaggggaccacggaccaagcgagcaccacaccccaccggccggagcacgccaagcagcccccacgcccgga

SEQ ID NO: 219278 - RNA, 56 nt, Homo sapiens
ccgacacccaagagaagagaaaaccagcgcaggacaaagacgggaacggagccccc

SEQ ID NO: 219279 - RNA, 76 nt, Homo sapiens
ggacgccggcacgcgaagggccgcaccgcaagggcagcacggccccacaacagggaacgaagaccaagccgagccc

SEQ ID NO: 219280 - RNA, 76 nt, Homo sapiens
ggacgggcgggccggcgccggagacgagccggacagaacccaccagacaacacacgggaagagcaagaccagagga

SEQ ID NO: 219281 - RNA, 52 nt, Homo sapiens
gcaggaagacccccagaaagccaacaacacggagcgcgccccaccgcggccg

SEQ ID NO: 219282 - RNA, 67 nt, Homo sapiens
acagaagggcaagccaaaaaagcccaggaagaagacgaggaggcgcggaggcggaggccacccagac

SEQ ID NO: 219283 - RNA, 84 nt, Homo sapiens
aaaaaaaaaaccagaagggccgaccagaaaggaaccccaagcgacgcaggcagaagcgagacggcaagacaacggcaagcggag

SEQ ID NO: 219284 - RNA, 82 nt, Homo sapiens
cgccccgcgccgccgagccagcgccaggcagcaaccaccggagggcgcagagaagagacagagcggaagaaaaaaaaacggc

SEQ ID NO: 219285 - RNA, 71 nt, Homo sapiens
accacgaacaaagagagagcagcacccggaaagagaaaccccaagccaaaggcaccgaggagcaacacccc

SEQ ID NO: 219286 - RNA, 77 nt, Homo sapiens
cccagaacccaccggcccagccggcacccaagccggcaggcacaaaggggcgagggagggcagagacacagaaagga

SEQ ID NO: 219287 - RNA, 80 nt, Homo sapiens
acgcaaggagacaaggaaaggcccaccgaaccacacccagcgcggacggagggccgagaacgggaggagagggacacacc

SEQ ID NO: 219288 - RNA, 76 nt, Homo sapiens
acggccgcagagcgcgccacagaggaacccaaggaccgcaaagaaaacccagagaacaccacccgaagagacaccg

SEQ ID NO: 219289 - RNA, 73 nt, Homo sapiens
aggaagagaggccaaaacaccaacaagagagaggggaaaaaccgaagggccagcaaggcaacccggaagacgc

SEQ ID NO: 219290 - RNA, 73 nt, Homo sapiens
aaacacgaagcgggaacaggcaggcacagaaaggcggaccaggcaggagggccccaaggcggcagccccgacc

SEQ ID NO: 219291 - RNA, 81 nt, Homo sapiens
agaaccggggcccaaaaaggacacccaaggagcacaagagcgccccaagcaaggaagcgacagagggagacggggggcggc

SEQ ID NO: 219292 - RNA, 74 nt, Homo sapiens
cccaaaggcacccgcgagcgcaacccaaggagaccacggggggaaggaagcgagacccggcgcgagaaggaacg

SEQ ID NO: 219293 - RNA, 57 nt, Homo sapiens
gccaggcagcacaaccagacagcgaaggaagagccaggaaagcaaaagggcacccgc

SEQ ID NO: 219294 - RNA, 73 nt, Homo sapiens
agaagggaggaagacccagcagggggagacaccgccgcagcgaagcgaccccgcaagacaagccccaaccaca

SEQ ID NO: 219295 - RNA, 73 nt, Homo sapiens
gaagagagcaggagggcagcagagaacacgggcacacagacacagggcggggacccgagcccagccccagacc

SEQ ID NO: 219296 - RNA, 63 nt, Homo sapiens
aacgggcgaagcgacgagccgcgaggagcgggcacagagagacccagcgacgagcaaaaggcc

SEQ ID NO: 219297 - RNA, 77 nt, Homo sapiens
cccagaaaagccaacaagcggggaagggcaggacgaagggagggccgaacaccgacaaggagacaggggagaaggaa

SEQ ID NO: 219298 - RNA, 76 nt, Homo sapiens
acaacgacaccgcaccgggccagcaagagggcacagcagaaaagcacgaaaggaacggagaaagaccagcagagag

SEQ ID NO: 219299 - RNA, 90 nt, Homo sapiens
ggaaacggcaagacggagaaaaggaaagcccacaaagaggacccccagccagcccggccggacacggcacaagaagaaggaggagcgcga

SEQ ID NO: 219300 - RNA, 86 nt, Homo sapiens
agacagggccgcaggcaggcgccccaaacccggacgaaacgaccccaccagccccaaaaggcggcaacagaaccagagagcgcgag

SEQ ID NO: 219301 - RNA, 79 nt, Homo sapiens
gacggccccgccccgcggcgggccccgcgccgcgcgcgcgccgggccaaagaacgccaaccgaaagaaagacaaagagg

SEQ ID NO: 219302 - RNA, 85 nt, Homo sapiens
gcagcccacccgggaagcccggcagaacccaggcgagggacagcccggacaggaaagaacagcaggcaggaacacaccagaagag

SEQ ID NO: 219303 - RNA, 62 nt, Homo sapiens
ccaaaccagaagaggagggcccagaagaaaaagacaggaggcacggacccaaccaacgacag

SEQ ID NO: 219304 - RNA, 60 nt, Homo sapiens
ggagcagacaggaaagaggacacaggaacgccacaagaaacaacagcaaggcgagggcca

SEQ ID NO: 219305 - RNA, 69 nt, Homo sapiens
caggagcccgagagagaaggcagcccgcccgacgagagagaagcccggacagaagcgagcagcagagga

SEQ ID NO: 219306 - RNA, 64 nt, Homo sapiens
cccaggccacgccgagccgccaggcagcaggacggaggcccgccccaccgggggccaccccagg

SEQ ID NO: 219307 - RNA, 72 nt, Homo sapiens
gccaacacgcccagaacagcggaacagcggaaccggagacaggcaggaagcccccccaaaaagcggcggcca

SEQ ID NO: 219308 - RNA, 50 nt, Homo sapiens
acgcagggcgcccccgagccgcggaaaggcacccaccagcacagagagcc

SEQ ID NO: 219309 - RNA, 83 nt, Homo sapiens
cgcgcccagcccgggccccgcgcacagccccagcgcagcaagaggagccaggagcacggggggaacaagaccgccgggacgga

SEQ ID NO: 219310 - RNA, 81 nt, Homo sapiens
gaccccggcgaggaggccgaaggcacggggacaagacagggaagacgaggaagaaacagcccaggccggcgcagagaaggg

SEQ ID NO: 219311 - RNA, 80 nt, Homo sapiens
cccagagcgggaccacagggcgacccggacacgacacacacaagagcgggaaaggcaagcagcgacaggaaagaagcgag

SEQ ID NO: 219312 - RNA, 78 nt, Homo sapiens
ggaggcgaggggcgaggcgcggagcccgggacgcgcgacgcccgcgccccgacgagcaagaagacaaacaagggaagg

SEQ ID NO: 219313 - RNA, 83 nt, Homo sapiens
aagacaaacagccacacacacaaagagaagaccacacgaggccccgcgcagcggagggcggggcaccaggcccacagggcccc

SEQ ID NO: 219314 - RNA, 75 nt, Homo sapiens
cggcgcaccgcgccgcggagaaagggacggcagcaggaaggaaaaaaacagggggaagagagaaagacacaaggc

SEQ ID NO: 219315 - RNA, 78 nt, Homo sapiens
ccagccaaacaaaaaggaaaggagacaagcagagacgaaccaggcaaagacaccgaaaacgagaaacgaaagagacac

SEQ ID NO: 219316 - RNA, 74 nt, Homo sapiens
agcgagaacgggccaggcaggaagagacgaagaggagcagaaccagaagggacacacaggacggcaggaaggcc

SEQ ID NO: 219317 - RNA, 57 nt, Homo sapiens
cccgagcaggacacgcacaacaaggcggacaaggacagcaggagagagaaacacacg

SEQ ID NO: 219318 - RNA, 74 nt, Homo sapiens
gagacagcggaagggaggcgcgcggcagcaggggcgacgaggcgggacgcaggaaggacaagcagaagaacagc

SEQ ID NO: 219319 - RNA, 71 nt, Homo sapiens
cgccccgcggccgccaccaccaccccagccaggcagcaccccagcaaaggacaaagaggccaggagacacg

SEQ ID NO: 219320 - RNA, 70 nt, Homo sapiens
cgcagaggaggaggaaagaagaaaagcacccgaaggaagaagcggcagaagagcccagaagaaaagaaac

SEQ ID NO: 219321 - RNA, 62 nt, Homo sapiens
ggaaaagccggagaggaccacacaaccgagcagcacaggggggccaggaggagccccagcac

SEQ ID NO: 219322 - RNA, 74 nt, Homo sapiens
cgcgacaagacgaacaaaagagggcaaagaacagcgaacgacaagaggagaggaagaagagaagaagaggaaac

SEQ ID NO: 219323 - RNA, 82 nt, Homo sapiens
ggggccaagagacagggcacaccaaacccacggaggggaggacaaaaccaacaacaagccacccacacgagaggaaggagag

SEQ ID NO: 219324 - RNA, 72 nt, Homo sapiens
gaaaagacaggagccgcaaaacagagcgccaaaaccgggacaaggaaagaacggagacgaccggggagaacc

SEQ ID NO: 219325 - RNA, 77 nt, Homo sapiens
gcagccgggcgagaggagcgggcgcccccccgccagacaagcagaccggaagaccgacggaagaccacaccccgagg

SEQ ID NO: 219326 - RNA, 75 nt, Homo sapiens
agagccgcaccgccaacccccgagcaagacggggcccagaggcagagcacacaaccaggaaccaaaaaccgcggc

SEQ ID NO: 219327 - RNA, 66 nt, Homo sapiens
acaggacaggcagacccgaccccagaaagcacaagggcagacaggacagcagagcaaaggccaagc

SEQ ID NO: 219328 - RNA, 51 nt, Homo sapiens
gcagggcagcggcccccgcccgcagggaacgaccacgggcggaagaaaggg

SEQ ID NO: 219329 - RNA, 76 nt, Homo sapiens
gccgacgagccgccaaagagcccaggcaaaacaagaagaccccagaaagagcaacagaaggagacagagcacggaa

SEQ ID NO: 219330 - RNA, 103 nt, Homo sapiens
ccgcgcaagggggacaggcggacgaaagaggacacgggaagaacaaagacagaccgaccgcgcacagaaagcccagacaacccagcgagaaaacccagaggac

SEQ ID NO: 219331 - RNA, 38 nt, Homo sapiens
gcgaaacaccaagaggaaccaaaaacgcagaaaacagc

SEQ ID NO: 219332 - RNA, 78 nt, Homo sapiens
ccagagccagacggaagggggcccacggacagaaggggacggagagggccacaagcacaaggacccagcgggaccgcg

SEQ ID NO: 219333 - RNA, 76 nt, Homo sapiens
accacagcaaggcccgagaagaacaggccaaagaagaacacaagacaaaaagaaccccgaagaggacaggaggaag

SEQ ID NO: 219334 - RNA, 78 nt, Homo sapiens
gcgcgacgcccgcgccccgacaagccgagaccaccaggagcagagcggaggcaaccagccaaaacaacggaaaacagc

SEQ ID NO: 219335 - RNA, 70 nt, Homo sapiens
gccaaaaacagggaaagggccagcacaggagagagcaagcaggaagccccacgggcacaaacacgcagag

SEQ ID NO: 219336 - RNA, 71 nt, Homo sapiens
cgacaggacacgagggcgagcccccacggcggcggggacacccgaccgaccacggcccggggaaacgacca

SEQ ID NO: 219337 - RNA, 73 nt, Homo sapiens
gcggggaaaaacaagaggccacacacccccacggcgagacccagagagccaagaggggcagcggaggaagccg

SEQ ID NO: 219338 - RNA, 98 nt, Homo sapiens
gcacccgagcagcgccagcggccgagcgggcggcccggccgggcgcccggggcggcggaggggaggggcgaccccggggcccggccagcacgaccgag

SEQ ID NO: 219339 - RNA, 72 nt, Homo sapiens
cccaagagaggagcggagaaacgggaaggccacgggaagggaccacagaccagcacgccggcgccacgaacc

SEQ ID NO: 219340 - RNA, 69 nt, Homo sapiens
gggaccccaccccgccgcagaggagcccgcggaaggagcgacgaaaggaagaagccaggggcgcggggc

SEQ ID NO: 219341 - RNA, 64 nt, Homo sapiens
cgagggcggccagggccccagaaggacaccaaagaccggaagaccgcccgaaaccaagacccgg

SEQ ID NO: 219342 - RNA, 74 nt, Homo sapiens
ggcgcccgcccccaggcgcgcccagccccgcagccagggcgaacccccgcagacgagccagagaggcaccaaca

SEQ ID NO: 219343 - RNA, 62 nt, Homo sapiens
aacgaagcagcaaaaagcggaaaaaaacaacgggggacacacaggaagacgaacacggaacg

SEQ ID NO: 219344 - RNA, 73 nt, Homo sapiens
gacgcaggaagagcgaaaaaacaggaggacacaagcaaggggcccagcagccacacaagcccacccagccaac

SEQ ID NO: 219345 - RNA, 66 nt, Homo sapiens
gcacgcagcgagcgagaagaggaggacaacagcacaaccggggggcaaggccagagaaggcgggag

SEQ ID NO: 219346 - RNA, 70 nt, Homo sapiens
gggcagccaccgccaaagcaccaaggagacagacgagccggcgcagaaaagaaggagcgggcgccaaaga

SEQ ID NO: 219347 - RNA, 71 nt, Homo sapiens
gaagcgaagacagagaacgaagcgaccaaagcgcacggcagcgagagggaggaacagcacacagccaagag

SEQ ID NO: 219348 - RNA, 81 nt, Homo sapiens
agcgccccaccaagagccgcgcgcccagccgcggcggcagacgcagacaaacaaaacaagaagccgaagaagaccggggag

SEQ ID NO: 219349 - RNA, 66 nt, Homo sapiens
caggaagggaccccaggaaacagggaggggggaagacagggcccagcaccacaggacgggccggga

SEQ ID NO: 219350 - RNA, 78 nt, Homo sapiens
gcgacggcgaccaagcccgccgccaggcacagagaaggcaaacgggagggcgaggacaccaagagcagcgcggagcag

SEQ ID NO: 219351 - RNA, 77 nt, Homo sapiens
agaaaccgggagaagcagaaaacccggccagggacaggaaagaaggagacacacagcaacgaagcaggggaggaggg

SEQ ID NO: 219352 - RNA, 85 nt, Homo sapiens
cgaacaaggggaaagcacagacgggcaaaccagccagcacgggggcccagccagccagcagcgaggggggacggaggcggcacgg

SEQ ID NO: 219353 - RNA, 69 nt, Homo sapiens
gccccggccgggccggccagcgccggaaaccaacaaccgacgaagacagccacacccccccagaacaca

SEQ ID NO: 219354 - RNA, 75 nt, Homo sapiens
cacacccacccgggcaaggagcaaagaaggacacagcacacacaccgggcggcaaagaaggggcgaccacagagg

SEQ ID NO: 219355 - RNA, 74 nt, Homo sapiens
agaaagcagaacagaggccagaaagaaaaaggccccaagcaaggcaggcgaccaaaaggaaagacgggaagaga

SEQ ID NO: 219356 - RNA, 71 nt, Homo sapiens
gcccagaagagacacacgaccccgacgcgagaagcaaaaggggaagcaacacgcagcaacaacaacagcca

SEQ ID NO: 219357 - RNA, 75 nt, Homo sapiens
ccacgacccggcgagcagcaccagggcccagaccggggaccacgggaaagcccccgcagccggcagacaaagaca

SEQ ID NO: 219358 - RNA, 74 nt, Homo sapiens
ccaccgcgcccggccgaccgggaaaggaaagccaagcaaagccaaccggcgaagggagaggcgaagggggcgca

SEQ ID NO: 219359 - RNA, 72 nt, Homo sapiens
gcaagacagccccccgcccccccccccacgcaaccccagaccaacacacacccgcccaaaagcgcaacaagg

SEQ ID NO: 219360 - RNA, 78 nt, Homo sapiens
cacaggaaaggagggaagccagaggccaaaggcaggaggcagcaaaggaggcagaagacaaaaaaaaaggcaaagaga

SEQ ID NO: 219361 - RNA, 67 nt, Homo sapiens
gacccgcacaaaggacggcgcacggcagcggagagccgcccgaccaaccggcacggaaccccagaga

SEQ ID NO: 219362 - RNA, 74 nt, Homo sapiens
acgagcgcaggagggacgggacgccaaccccagaccaaggcaccgaggagacgcagaccaggcgcaggcgacac

SEQ ID NO: 219363 - RNA, 75 nt, Homo sapiens
cggccgcaaggcggcaagaaagaaaagaagggcgcccggaaaggcgccgaagagagaggcccagaaggggaagac

SEQ ID NO: 219364 - RNA, 78 nt, Homo sapiens
gcaaaccccccgcgacaaaagacacacggcagggaaccccaccccggaaggcggggacacagacgagaacacgaagag

SEQ ID NO: 219365 - RNA, 78 nt, Homo sapiens
caacaggaggccggaagacccaaagcgagggcagcccaaggaccaagggagaagagacccaggaggcagggcagaacc

SEQ ID NO: 219366 - RNA, 71 nt, Homo sapiens
aggacacaaaagaaagcgacaaggaacaaggggacaggaggaagacccagaaggagagggaggagcggcag

SEQ ID NO: 219367 - RNA, 75 nt, Homo sapiens
ggaaaggcgccgaagagagaggagagaacagaaagaccaagcagaagagaggacaaagcaccgggcaggcgcggg

SEQ ID NO: 219368 - RNA, 76 nt, Homo sapiens
cgcgccggggaaaggggacccagcggaggccccggccccgccgcgcccgccccgccccagcaggaccacggcccgg

SEQ ID NO: 219369 - RNA, 64 nt, Homo sapiens
gaaagaccaaaaacccagaccagaagcgcaagccagagacggccaagaagacgcggagggaggc

SEQ ID NO: 219370 - RNA, 61 nt, Homo sapiens
ggagccgcgagcggaagccgccgccccgggggacggaaagagagccgcagcgcagaacaag

SEQ ID NO: 219371 - RNA, 72 nt, Homo sapiens
caaagcagagccgaaccgaaccaagccagccgccgcagcacgagcagacacagggaaacccagacgacaagg

SEQ ID NO: 219372 - RNA, 89 nt, Homo sapiens
cggccccggcgaggaggcgcggaaccaggccgagggggcgagggcgaagacgagaccagccgcgaacgagaacaccgaaggagaagcca

SEQ ID NO: 219373 - RNA, 63 nt, Homo sapiens
agccagccggagcagcggcacaggaccagagggaaaaggcacccagcggacggggccggaccc

SEQ ID NO: 219374 - RNA, 78 nt, Homo sapiens
gccgcccccgggcggccccgcgcgggcagcgcagccaggccgcgggacaagaagaagcaacagcagcaagaaaccgag

SEQ ID NO: 219375 - RNA, 36 nt, Homo sapiens
aaagccacagcgaccaagcaggaaccgaaagacgac

SEQ ID NO: 219376 - RNA, 71 nt, Homo sapiens
ggcaggacccaacgacaggcgccccggcccaacgggaagacgccacgcccagaccagcggccgcggacaag

SEQ ID NO: 219377 - RNA, 85 nt, Homo sapiens
ccagcacaaccagaaacgagaggagggcggaaagccaagaacaggggagcgcggccccaggagacgacgggagcgagcgggaggg

SEQ ID NO: 219378 - RNA, 70 nt, Homo sapiens
agaccaggcccaagcgaaaaagcgggaacgcaggacccaaagccgcaggaaggagaagaccaaaaccacg

SEQ ID NO: 219379 - RNA, 60 nt, Homo sapiens
cgacaccagccaggagacgccgcaagacagcccccgagcgcaagacccggggacggcggc

SEQ ID NO: 219380 - RNA, 68 nt, Homo sapiens
cccagagcggaagacaagacggcggcgcccagcggccacacgccccaagcgccacgcccgggcgccca

SEQ ID NO: 219381 - RNA, 78 nt, Homo sapiens
accgacacgaggcccccaccaggcaccacgaccaggaccaacaagcggccaacccagaagcaacaagagagacaagcc

SEQ ID NO: 219382 - RNA, 98 nt, Homo sapiens
gggagcagaggggagagcggccgccgccgcgccgcccaccacaggcgggggagcgggaggagccagagcacaccgcaccacggccacaggcgcccgaa

SEQ ID NO: 219383 - RNA, 77 nt, Homo sapiens
agcgcgagggagcgccaagggcacgggaagaccggaggggacgaagaacggggaagcgggagaggccacccgcccac

SEQ ID NO: 219384 - RNA, 75 nt, Homo sapiens
ccgacgccaggcgcgcgccgcggccggagcgggacggaaggggacacaggcaagaccacacggacgcacaacagg

SEQ ID NO: 219385 - RNA, 72 nt, Homo sapiens
acaagcagacgaagcagaggccggacccacccagagggcggcgaaggcgcgccacggagccacccaagcggc

SEQ ID NO: 219386 - RNA, 83 nt, Homo sapiens
cccagcaacagcccgcagcagaccgaggccccggggaagccaccccaccccccaggagccagagcgaggaaggcaacccccac

SEQ ID NO: 219387 - RNA, 77 nt, Homo sapiens
ggaaggccgccgagacaccagagaagaccgggcccaggccagcaggcggagcacgcaagccaggccccggggcccca

SEQ ID NO: 219388 - RNA, 84 nt, Homo sapiens
aaaaaagcggcgcaaccaaacacacaagcagagaaggaaaaggcaaccgaccaaacagaccgggaggcaggaaaaagacacaag

SEQ ID NO: 219389 - RNA, 76 nt, Homo sapiens
caccaaaaaccgcaacaaagagaacccagagagaaccagaccccgaggaacagcacagccccagagggagagacag

SEQ ID NO: 219390 - RNA, 65 nt, Homo sapiens
agcaccaggagcacgaccaggccaccggcacacgcagccacagagcgggaggcgggacgacaccg

SEQ ID NO: 219391 - RNA, 78 nt, Homo sapiens
cagcgcgggagggaggaccgggcgggacccacaacgggggcacaaggaccaagagcccgggcgcccccgcgcaccggc

SEQ ID NO: 219392 - RNA, 72 nt, Homo sapiens
ccacagcccaggcaggccccagcaaggaccaggcccccaccgcaacaagggcacccacagcaccaaccaacc

SEQ ID NO: 219393 - RNA, 55 nt, Homo sapiens
cggcaccaacggcccgcaaggccaggcaggccaggccacacaagccccagccaaa

SEQ ID NO: 219394 - RNA, 78 nt, Homo sapiens
gcccaaacaccaccaccaagagaagagacgccaacagaccggggagaagggaccgcgggagcagggaaggaacccaac

SEQ ID NO: 219395 - RNA, 76 nt, Homo sapiens
ggaggaaagggaggcaagaaggaagcagggagagaggcagaacagaacaaacggagaaacaccggagagcccaaaa

SEQ ID NO: 219396 - RNA, 76 nt, Homo sapiens
gcagggcgcccccgaggagaaggcagagcccccccaggcagaagcccgagcgggaaccagcgaagccagggcgcag

SEQ ID NO: 219397 - RNA, 50 nt, Homo sapiens
cgaaacgcgcgcccccgaaggcggccaacggccagcggggaacaagcacc

SEQ ID NO: 219398 - RNA, 35 nt, Homo sapiens
cagcagcacacaaggaaaggacccccacccacacg

SEQ ID NO: 219399 - RNA, 70 nt, Homo sapiens
gagcagcccccagccagccgcgagaacggagggaacggaagaggacccaaaaaagaagaaaaggcgcgcc

SEQ ID NO: 219400 - RNA, 65 nt, Homo sapiens
ggacacccgcaggaaccggcagaggagaaacagacggccccgaggccaggcccagacagccgccg

SEQ ID NO: 219401 - RNA, 74 nt, Homo sapiens
gggcccagcacagccagcaccgcacgcccgcaagggagggcgacaggccggccgcaaacggccgcaaaaccacc

SEQ ID NO: 219402 - RNA, 63 nt, Homo sapiens
acggagggcagccggaagaccacagcagccaaggcgaagcgcgaaagaggcagaagaaggggg

SEQ ID NO: 219403 - RNA, 73 nt, Homo sapiens
cgccccccaaccgggaaagccccggcccggcggcgcgccccgcggcgcccgcgccaggacccacccaggaggc

SEQ ID NO: 219404 - RNA, 82 nt, Homo sapiens
caagacggccacggaggagaccacaaacagccacaaggaagagccgcgggcagggaaagcagccacagacgccgaaaaccag

SEQ ID NO: 219405 - RNA, 59 nt, Homo sapiens
gggagcgcgcagccaggagaaggggagcgagaccagccccacaccaagcagaaggccca

SEQ ID NO: 219406 - RNA, 73 nt, Homo sapiens
gacaggccagacaacggccggaaccagagcccgccgcggcgcgggccaccaaaccacagcgggcaaagcagga

SEQ ID NO: 219407 - RNA, 75 nt, Homo sapiens
gccggcgacggccggacgcaacgcggcgggcgagacgccaggacgggagaccaccacagaagacgagaagcggga

SEQ ID NO: 219408 - RNA, 57 nt, Homo sapiens
gccgagcggaccccaagacccaaacagaggagaggaaagcgcgagccagagaaaaac

SEQ ID NO: 219409 - RNA, 70 nt, Homo sapiens
ggacaggagacggcagcaagacgaggggacaacgaaggaggcaagcaacaaagggacaaaaacgacaagc

SEQ ID NO: 219410 - RNA, 69 nt, Homo sapiens
agagcggaaaaaccccaagacacgggggaccgcggcgggagcggggcaaacaccgggcaccaaccccag

SEQ ID NO: 219411 - RNA, 73 nt, Homo sapiens
cggaagacccccggaaccgcaaacccaacaggagacacaacaagccccaagggagaagcagaaggccgaccca

SEQ ID NO: 219412 - RNA, 82 nt, Homo sapiens
cccagcgcccccaggccgccccggggccacggcacacgaaagcagaagcgccagcaagaaagaacagaagaccaaacacaaa

SEQ ID NO: 219413 - RNA, 81 nt, Homo sapiens
accaccacaacaagagacaacaccgcgcggaccacaaaccgcgccagaaaagcccccacagaggcacccgacacagcccga

SEQ ID NO: 219414 - RNA, 59 nt, Homo sapiens
agggggagaccagccgagcaacacaggggcaaggcggcccggcacgcacacgggcagaa

SEQ ID NO: 219415 - RNA, 73 nt, Homo sapiens
gcgacaccgcgagggacaaagaccgaaagacacgaagccagaagagagcaggccccaagacccaaacgaacca

SEQ ID NO: 219416 - RNA, 69 nt, Homo sapiens
gccgcgccgagcgcgcggagaaccagagaagccgggacccaaagagaagacgaaacggacggcacggga

SEQ ID NO: 219417 - RNA, 76 nt, Homo sapiens
cgacccgaggggggagagcgcgggggcgacggccgagcaggacaaaagacccacaccgaaggacgagaaacagggc

SEQ ID NO: 219418 - RNA, 49 nt, Homo sapiens
gaacaccccacagggaagagggaaaacagggcggcacccaggcgaagac

SEQ ID NO: 219419 - RNA, 62 nt, Homo sapiens
gcaaaagggaagcgaagccgaaaaaggcagcagcgaagggaccagcagaacagacagaggag

SEQ ID NO: 219420 - RNA, 78 nt, Homo sapiens
cacccaccgcacccgccggaaaaccaacggcccggaggaccacagcccaggggccccaggcgaaacccagccggagcg

SEQ ID NO: 219421 - RNA, 77 nt, Homo sapiens
caaggggcccggagcgcgccacgaacaccccagagcgaaaacaaggccccccgaaaaagccgaggaggagaggagag

SEQ ID NO: 219422 - RNA, 81 nt, Homo sapiens
gaagccgcgcgccgccgcaccccccggccgccgcccagaacagaacgaggagcccacgccaaggagagaccaccaaagcgg

SEQ ID NO: 219423 - RNA, 73 nt, Homo sapiens
ggagaagccgcccaaagaacgagagggccgaggcagacaagggaaaggccgcgcaggggaccaccccagacgg

SEQ ID NO: 219424 - RNA, 83 nt, Homo sapiens
ccgggaggcacgaaggcaccgggcccagcacagccagcaccgcacgcccgcaagggaggcgaagccggccacagccacccagg

SEQ ID NO: 219425 - RNA, 88 nt, Homo sapiens
cacgcgccgccgcagaccgacgccgcagaggacgggcgccgaccgaaggacgcgcagcaacaacagccgagcagcaagccagcccccc

SEQ ID NO: 219426 - RNA, 71 nt, Homo sapiens
aggcacccgaagaggcgaaggcgcaccaagagaaggagcggcagcaacagggcagcggaacgcgccgacgc

SEQ ID NO: 219427 - RNA, 77 nt, Homo sapiens
cagaagagacccgccccccagaacaacacacaccagaaacagcgcaccacccgcaggccccagggaaaggaccgagg

SEQ ID NO: 219428 - RNA, 78 nt, Homo sapiens
aggcccaaaacaaggacaacaggcagagaaaaaagaggggggagagccagggggcaccagggcaagaagagcggagcc

SEQ ID NO: 219429 - RNA, 76 nt, Homo sapiens
gggggcaaacccgagagaacgggggagccaggcaggcaggaaacgggaaaacacgaagaggcgacaaacagacccc

SEQ ID NO: 219430 - RNA, 74 nt, Homo sapiens
ggggcccgcccaacagaagacccgccacgcagcaccagcccggagagagagaagagagaacaaaccggggcgcc

SEQ ID NO: 219431 - RNA, 84 nt, Homo sapiens
cgcgagccaccagaacgagacagcccccaaagccacacccaccgcccgggcaggccacggcggagagggccgggcgcgcacccc

SEQ ID NO: 219432 - RNA, 73 nt, Homo sapiens
gcaccacccccacaccaaccagagggaagaagccgagagagcccccaacccgcgcccgaaagccgaccagaac

SEQ ID NO: 219433 - RNA, 80 nt, Homo sapiens
cggccagcgggacaggagggcaggaagagcgcagcggggacaagggcacgcagacgcagcaggagggaagcgcgcagacg

SEQ ID NO: 219434 - RNA, 81 nt, Homo sapiens
ggacgggaagcgcgaccagagccaggagggcgcggggacgcaacccaacagacgacacgggacccagcgaggaaagaggca

SEQ ID NO: 219435 - RNA, 54 nt, Homo sapiens
acaaggaggagaaaggaaaaaggacgaaggagacgcaggagggagagcagccag

SEQ ID NO: 219436 - RNA, 116 nt, Homo sapiens
agaaggagaagagcgaccagggacaaaagaggggaaacagggagcccaaaacaagaagcagaacaacgcaaacgcccacacagcaagcacgggcagaagaaggaacggaaaaagcg

SEQ ID NO: 219437 - RNA, 76 nt, Homo sapiens
aggagcccaagagcacaggggaagaagcacagccacgagccaacacaggcccccacagagagcacacaaacaaagc

SEQ ID NO: 219438 - RNA, 74 nt, Homo sapiens
aagaagcgaccacgcgaggagaagccaacggccacaaaaccaaagacaagccgagaccaccaggagcagagcgg

SEQ ID NO: 219439 - RNA, 85 nt, Homo sapiens
acccagggaggcaagcagagcgcggccaagaacagaggaagggggaccggaagaccggaggagcaggccagagcagacagccgag

SEQ ID NO: 219440 - RNA, 76 nt, Homo sapiens
ggaaaaaagggagcacacgaggggcgaaccacagagaagagaggccccggcccggcagaacagcgggaacccacac

SEQ ID NO: 219441 - RNA, 77 nt, Homo sapiens
gaaagacacggaagcacacgggcaagaccgaagccacagcagcacagaggaaagcagcgcgacccaagcgggccgca

SEQ ID NO: 219442 - RNA, 72 nt, Homo sapiens
agaccaacccgccaaaagcagcacaaggaaaacgagagaaacgaaggcgagagaaacagcaaggcccgagcc

SEQ ID NO: 219443 - RNA, 61 nt, Homo sapiens
cgagcggccaggacgacgaggagcagggccgacgcgcagccccgcggcccagccaacccgc

SEQ ID NO: 219444 - RNA, 106 nt, Homo sapiens
cgccacgccccagacaggggaacgcggcgaccgccaagaaaggcagcgaggggagagcggccggaagccagacaaccacggcccaccagcggccagcagcagccga

SEQ ID NO: 219445 - RNA, 57 nt, Homo sapiens
aaccggcacccggcggccgagagaccaggaacaagcacaaggaagagcccacagaaa

SEQ ID NO: 219446 - RNA, 72 nt, Homo sapiens
gcacgcaccgcccgccagacgaggggccgccggcaaaccgagcacgaggccagcagcagcaaaagggccccc

SEQ ID NO: 219447 - RNA, 83 nt, Homo sapiens
agcgagaaagcacgaggcacccccggaccagaacggcacggccacgggcgggcaggcaaggacgacacagcaagcaaaagaca

SEQ ID NO: 219448 - RNA, 76 nt, Homo sapiens
gaggagggggggccccgcggaggccgagaggcaaggaggcacgaacgagcaggagcagcaaccgaagcgaagggcc

SEQ ID NO: 219449 - RNA, 76 nt, Homo sapiens
cggaggagaccgggaaaccgccgaagacgaagaaaacccggacaaccagcggggcacaacaagggcacaacagagc

SEQ ID NO: 219450 - RNA, 49 nt, Homo sapiens
gcggccccacgaggcaggagcgcggacgggaacggagccccccgcacag

SEQ ID NO: 219451 - RNA, 80 nt, Homo sapiens
aagaccacgccggccgcgaccaaggaagcacacggagaaccacggggaccaagaagcgagcagcccaaacggacccggga

SEQ ID NO: 219452 - RNA, 74 nt, Homo sapiens
cagggccaacaaaggaacaccaagcggaaaagagcagcgcccagccccagcaggccggacccagcagggccccc

SEQ ID NO: 219453 - RNA, 78 nt, Homo sapiens
gcgccacccgcaagccagcacagaaggcggaggggacacagccgcgacaaccccaagccgaaggaaaccggaacggcg

SEQ ID NO: 219454 - RNA, 73 nt, Homo sapiens
aagaccagccacaggaaagcaggcgacacaccaaagaaaaaacacaccaagcagaaacggagccaaggggcag

SEQ ID NO: 219455 - RNA, 44 nt, Homo sapiens
gccccagaccgcggcgaaagggaaggagaacgaccgccagaaga

SEQ ID NO: 219456 - RNA, 75 nt, Homo sapiens
gaaaagcccaaaagaggacaaaaggcaacccagaaacagaaggcaagaacgcccccacaggagcaccggcaggga

SEQ ID NO: 219457 - RNA, 71 nt, Homo sapiens
agagacaacggagaacacaaagaagggaggccggaaaaacagggagagccacagagggggaaagccaagga

SEQ ID NO: 219458 - RNA, 82 nt, Homo sapiens
caacacacggccacagccacagaggacggagcgccgccgccgggaccccgcccagcagcccacaccccagaccacgccgcca

SEQ ID NO: 219459 - RNA, 81 nt, Homo sapiens
cgccgcggggcgcgggccggccccgcggggagcgcccccggcgcgagccccaggaaaggccagcgcgggccgccagcggcg

SEQ ID NO: 219460 - RNA, 89 nt, Homo sapiens
gggcccgccgccccgccggggcgcccgcgccggcagaggaggcgagcacccgccagggagaggaacccccgcgcacccagcgcagaagg

SEQ ID NO: 219461 - RNA, 76 nt, Homo sapiens
acgaccgcaggacaaaccgaagaaacaggggagaaaccccgcggggaagccgaggaaagcaacgcgccagcgccag

SEQ ID NO: 219462 - RNA, 75 nt, Homo sapiens
acggcaaggagggagccgccagaaggaagcgcaggcgcagcaacgccaaaaagaaaccgaagaagagaagaacac

SEQ ID NO: 219463 - RNA, 71 nt, Homo sapiens
agggcaggcccgacaagccgaccagccaaggacaaacacacacaagaagagacacaagaaggaaacagaga

SEQ ID NO: 219464 - RNA, 75 nt, Homo sapiens
agcgccgacaacccggcgccagagccggacgcggcccagagaccccccacgggaacggaagcaacgagccagcag

SEQ ID NO: 219465 - RNA, 103 nt, Homo sapiens
gcgagcacaccccccccccagcaccaagccagaagagaaggaaccgggggaaaccagaggagaccgaagaagacggagaccaaacaggacagaagccaaccaa

SEQ ID NO: 219466 - RNA, 33 nt, Homo sapiens
agacgaaccacaaaagagacagagcgccgcgcc

SEQ ID NO: 219467 - RNA, 79 nt, Homo sapiens
gccaccagccccaccggcccccaggaacagcccgcaccagccacagcccccaacagagagacgggacaccggagccagg

SEQ ID NO: 219468 - RNA, 76 nt, Homo sapiens
ggccacaagacagagagcagcagcagaccagaccgccggggaagaccgcgcacagaaagcccagacaacccagcga

SEQ ID NO: 219469 - RNA, 62 nt, Homo sapiens
aagagaagacacgagcacaaacgagccggggccggacgagaaagccgaaggagacgacggag

SEQ ID NO: 219470 - RNA, 84 nt, Homo sapiens
cggccggcggacggggggggccgcgcccggccccgcgcgggcggacggcggaggcgcccccagaagggaccgcgagaaaaggga

SEQ ID NO: 219471 - RNA, 88 nt, Homo sapiens
ggcccggcgccgccacgccgcagccaggagaggcgggccagcggagccgggacggagccacacgaaaacgacggcacccggggcgccg

SEQ ID NO: 219472 - RNA, 78 nt, Homo sapiens
cacacgagaaaagaaagacagcccacaggcaaccagcagcaaaccaggcagacaggaacaaaagagaaaggcaagaag

SEQ ID NO: 219473 - RNA, 54 nt, Homo sapiens
gaccacccaagcaggcaaaacaagggagagagaccacagaaggaaggaagaaga

SEQ ID NO: 219474 - RNA, 82 nt, Homo sapiens
cagaaagccgcgagaaagcaaaagaggagagaaagacagcaaagaaaaggagaagaaaggaaaaaaacaaccccgggcaccc

SEQ ID NO: 219475 - RNA, 57 nt, Homo sapiens
acaagaggaggcagacgagcaggagacccgcacagccacgccgaagcaggacacaaa

SEQ ID NO: 219476 - RNA, 83 nt, Homo sapiens
gggaaaggaagcgcacaggaagccggaaacgagcaaggggaacaaagcggcaaaagaacccacaaaaaaagccacaaaagcaa

SEQ ID NO: 219477 - RNA, 72 nt, Homo sapiens
ggcgccaccaggcggcgcccccgcagcccgcacccacccacgacaggacggacccggggaaaaggaaaccag

SEQ ID NO: 219478 - RNA, 58 nt, Homo sapiens
acaggacaagcaaccggcgacaaagaagagcagcccagagggcagaaaggacaggaag

SEQ ID NO: 219479 - RNA, 83 nt, Homo sapiens
ggccccgaagggcacgcagcagacagccccgggcaccaggcagcaacaggcacggcaagcgggccccgacgcacacggcccgc

SEQ ID NO: 219480 - RNA, 52 nt, Homo sapiens
gaaaaaggggggaaggcaccggcagccaagccggacacaagagggcaagaaa

SEQ ID NO: 219481 - RNA, 66 nt, Homo sapiens
ggacaacaagagaacggaccgagccaagccgcaaggcaagggagaaggacgcaagcgcaaacacac

SEQ ID NO: 219482 - RNA, 84 nt, Homo sapiens
cgagcaccagcgaacgagcaaaggcacgggcagccggaaggacaccaagagcggaccgggccccgaagccgaaacagcacaaag

SEQ ID NO: 219483 - RNA, 85 nt, Homo sapiens
cagccccggccacaagccagggcagacgacgacacgcgacaaccagcagggccaccaagcccacggacaaggccaccaacgcggc

SEQ ID NO: 219484 - RNA, 86 nt, Homo sapiens
gacgcgcggcgccgaggccgcccgcgcggagggggagggggggccgcagggcgggcggcgcgaccccggagaagaagcggaggagc

SEQ ID NO: 219485 - RNA, 83 nt, Homo sapiens
acgagcggagaaggccacaccacgcagaacgcaacaccaaggcacaccaccccagggaaagaggcaagaccggaaaggccaca

SEQ ID NO: 219486 - RNA, 92 nt, Homo sapiens
gcggagcgaagcgaacaaaaagcagcaaaccggaccaccccgaagaaagcacaggaggagagaaagaacccacgcaggacgacagaagaggc

SEQ ID NO: 219487 - RNA, 80 nt, Homo sapiens
aaagccaagccaccgagacccggaggaggcgaagcgagaggacagcccggaccaaaaaacaggccaccgaggaaagaggg

SEQ ID NO: 219488 - RNA, 75 nt, Homo sapiens
cacagagggacccggacaaccagaggcagccagcagggggaggcacccaggaacagccgcaacgccgcacaccca

SEQ ID NO: 219489 - RNA, 75 nt, Homo sapiens
gcgaccccaaaccacccggccgggaagacgacgccaaagagacccccaggaaaacagaagagaggacaaccgaag

SEQ ID NO: 219490 - RNA, 77 nt, Homo sapiens
ggaccaccggcggggaggagaccaggcgacaccgcgacaccccaacaaacaccagcgcggccggcccggccgccggc

SEQ ID NO: 219491 - RNA, 66 nt, Homo sapiens
gcggaaaaagcggaaaaagggagggacaagagcagcaccaagcgcaggagcagcaccaacacacag

SEQ ID NO: 219492 - RNA, 80 nt, Homo sapiens
cggcagccacccaccgccgccgcccccaggcgaagccagggcccgcgccgggaccaacaggggcaagacaagccagaacg

SEQ ID NO: 219493 - RNA, 83 nt, Homo sapiens
ggcgaaggcgcagccgcgaagccgaggagaggaacggaaaaggacagaaccagagcgaaaacgcaagaagacgaagaccccag

SEQ ID NO: 219494 - RNA, 83 nt, Homo sapiens
gaaaaacaagacggcaaagcaagggcacgagggcggaaaacaccccaaaagccaaaagggaaaggaaaagaccaacaacagcg

SEQ ID NO: 219495 - RNA, 42 nt, Homo sapiens
aaaaagcccaggaagggaaagcaaggacaacagaggaagaca

SEQ ID NO: 219496 - RNA, 78 nt, Homo sapiens
gggaaaccaagaccccaggacaacaaggaggacaccaaccagaagacggagagagcacccgcaaaaggacaggacaag

SEQ ID NO: 219497 - RNA, 80 nt, Homo sapiens
gcaacggcgggacagcaaaaagacccaccaaggaagcagcggccacgccaggcccgcagagggcagaggacgaaagcacg

SEQ ID NO: 219498 - RNA, 36 nt, Homo sapiens
gcggggaccccggcgaaaaagaacgacaaggaaaaa

SEQ ID NO: 219499 - RNA, 60 nt, Homo sapiens
gcgaaccaacggagcggggcaggggcgacgagagcgcgcggcagaagaagaagagcggag

SEQ ID NO: 219500 - RNA, 69 nt, Homo sapiens
cgacccgaacgaggagacgggcccccaaaaagcggcaaaagcaagagaacaggaccagggcgaggcacc

SEQ ID NO: 219501 - RNA, 71 nt, Homo sapiens
caaaaacagacagaaagggaggaaggccggccaacgcccaaggggcaagaaggacacccagaaaagaacac

SEQ ID NO: 219502 - RNA, 77 nt, Homo sapiens
cacggggcagagacaggaccgcaaacccaaaagcagggagcggcacgcacgaagagagaagacagcagcgaacaaga

SEQ ID NO: 219503 - RNA, 76 nt, Homo sapiens
gggcccccgaaggaaagagaggccggggaaagccggagagggggcccgcccgcccgacacaaagccccaaggaacc

SEQ ID NO: 219504 - RNA, 56 nt, Homo sapiens
ccgggcaccccgacaacccagaaacagaacccgggacccggacagaggggaagcaa

SEQ ID NO: 219505 - RNA, 47 nt, Homo sapiens
acgccgccacccccaccggaggggacggcagcacacgacgggaggag

SEQ ID NO: 219506 - RNA, 78 nt, Homo sapiens
cggaggaccccaaccgcccaggaaacagcccaaaaccgccgcgcgcgaccaaagcagacagccgcccaaccccagcca

SEQ ID NO: 219507 - RNA, 77 nt, Homo sapiens
cgcgccgccgccaccacgcccacgcaacacacgaccccgagccccccaggcgccgagggccccaccggccgccccgc

SEQ ID NO: 219508 - RNA, 75 nt, Homo sapiens
caagacagaaccacgccgcgcgcgcaaccccaagagcggagacacggggaaacgcagggcgcggggcagagcacg

SEQ ID NO: 219509 - RNA, 80 nt, Homo sapiens
aaaccgccaacccgcgccgccgccaccagcccaaaacgggcgccggccgagcccgggaaaacgacagcagcagcagggcc

SEQ ID NO: 219510 - RNA, 85 nt, Homo sapiens
cccggggcagcagcaccacagcagcaccgccagcccagcaaacgggagggcacgcacggaaaacagaccagacgccgggaaccac

SEQ ID NO: 219511 - RNA, 54 nt, Homo sapiens
gaagagacccagaacagggcgcgaaagaaaaacccggaaagagagaaaccagga

SEQ ID NO: 219512 - RNA, 81 nt, Homo sapiens
agaaggaaacggacagaggagaccagaacaagcagacggaggggcgcaaagaaaccagaagacaagcagaccggaagaccg

SEQ ID NO: 219513 - RNA, 65 nt, Homo sapiens
caagaacaagaaaaggaccaggcgacgagacgacgcaccaaacccccacggacagccccagaaca

SEQ ID NO: 219514 - RNA, 77 nt, Homo sapiens
gcgccccgccgcggggcgcgcggcgccggcggcgcgcgacccccgcgcagacacgggccggagacgaccgggagagg

SEQ ID NO: 219515 - RNA, 105 nt, Homo sapiens
acgacgggcggggaagacggccacacacggggacacgcgggggcggcacccggcaaaggaaggccacaagggcgcagaagccggcagagcccaagagacaacaag

SEQ ID NO: 219516 - RNA, 77 nt, Homo sapiens
ggccgacgcagaaggagagcccccgcccgccgggagggccgacagcacaggccccgggaccaaggacacgcagaccc

SEQ ID NO: 219517 - RNA, 85 nt, Homo sapiens
ggaaccaccaagaggcaacaagcaacgcacacggagcggccccgagcaaagaaagacaaccggcaaaacagcagcagcaacaaca

SEQ ID NO: 219518 - RNA, 84 nt, Homo sapiens
ggaggggcaaagccaagaggcggacaaaacgccaggcggaccagaaggccagcaaaggaagagccaggagccaacacacgcccg

SEQ ID NO: 219519 - RNA, 85 nt, Homo sapiens
aacaccgaggaggcggcggagcagcgggcggaggggaccggagccagaacacccggagacccggggcgcgagggcccgcagaacc

SEQ ID NO: 219520 - RNA, 72 nt, Homo sapiens
ccgccgcccccgggccgcggccgcaggcacaaggcacaaagcaggaggcaggaggccaggaagaggcccaga

SEQ ID NO: 219521 - RNA, 80 nt, Homo sapiens
ccaggggccgcagacgcggggacgcggccgcccccccccccccccgacgcgagaaacaggcgccaaacgacagagacccc

SEQ ID NO: 219522 - RNA, 74 nt, Homo sapiens
gcagcagaaaggaacacggcaggacagagggcacgccccggaagacacaaagccacggaaccgcccagccccaa

SEQ ID NO: 219523 - RNA, 62 nt, Homo sapiens
agacagacaaccaccacccacagccaaagcccaggaaagagggaaggaaggcaagaacaagg

SEQ ID NO: 219524 - RNA, 100 nt, Homo sapiens
gggcggaccaccggcggggaggagaccaggcgacaccgcgacaccccaacaaacaccagcgcggagcaggaggcaacggcagcagcagcggagggccgcg

SEQ ID NO: 219525 - RNA, 79 nt, Homo sapiens
gaaagcgggagagggaccggaacggcggcgacaaggggcccgaacagagggagagaacaacaggggaggacccgaagaa

SEQ ID NO: 219526 - RNA, 77 nt, Homo sapiens
gagaaccaagaacccaccacccagcagcagggcacaagcgcagccaagagccggggccacacaccgccggccgccag

SEQ ID NO: 219527 - RNA, 79 nt, Homo sapiens
ggaaaaacccggacggcacaccccaggaaccaggaaaggaaaagcgggaaaacaaagaaccgaacaacggaacacccaa

SEQ ID NO: 219528 - RNA, 77 nt, Homo sapiens
cccacccgccgcagcaagcagaggcaaaagcagaccggaaaacccaccggcaagaccacacccgaggggagcccagg

SEQ ID NO: 219529 - RNA, 59 nt, Homo sapiens
ccaccaccacgccgcggcgaccgccagcgccaacagggcccaggacgagagaggaggag

SEQ ID NO: 219530 - RNA, 85 nt, Homo sapiens
cccccaccagaacagaaggggggaagccagagccgccgccagccccagccagccccacagcaaacagggcaaacgaagaaaacga

SEQ ID NO: 219531 - RNA, 55 nt, Homo sapiens
acggggagccaagccggaaggagggccccggagcagccacaccaccgaggcccca

SEQ ID NO: 219532 - RNA, 79 nt, Homo sapiens
cgaaaaaacagacgaaaggccgccaaagccaagccaccaaacgaagagccccagcaggaggccagaggggacggcaccc

SEQ ID NO: 219533 - RNA, 53 nt, Homo sapiens
cgcagggggaaccagagaagagacaacagcccaagacacagcccccagaaaag

SEQ ID NO: 219534 - RNA, 51 nt, Homo sapiens
caggggcgaaagccccgggccccaagcagggccgcagccaggaaggaacag

SEQ ID NO: 219535 - RNA, 71 nt, Homo sapiens
gggcccggggaccgcggcgcggcggacgagacccaagcgggggcaagacgccaagagaaaaggcgagagca

SEQ ID NO: 219536 - RNA, 88 nt, Homo sapiens
gccgagaggccggcgggacgcgggcgccaggaccggccgaacgcagaggaagaaggaggccgaccaggccgacaaagcagacgcccgc

SEQ ID NO: 219537 - RNA, 90 nt, Homo sapiens
cccagagagcaaacacgcaagaagaacggagacagagaaagaagccacggccccggagccgggcgaacaaacaaggcggggaacgcaaga

SEQ ID NO: 219538 - RNA, 79 nt, Homo sapiens
gcaggccaagcgcccacgccggaccgggcaggccagccagccagcgaaagacacgcccagcaaccccaagaccgaaaac

SEQ ID NO: 219539 - RNA, 74 nt, Homo sapiens
cgagcccgccacagagccgaaagagaaggagggggcagagcacggcaggcagaaggggccaacccgggggaacg

SEQ ID NO: 219540 - RNA, 76 nt, Homo sapiens
ccgacacaagaaaggagcgacgaaagcaacccaaaggcggagaacggaaaagcaccaggaagcagagaggaccgca

SEQ ID NO: 219541 - RNA, 94 nt, Homo sapiens
cgccccgcccgcccgcggcccccagccccaggccgggaggcgcaagacaaggcccgcgggccaagacaaacaccacacaagaccccaggcgggg

SEQ ID NO: 219542 - RNA, 98 nt, Homo sapiens
cgcagcccgcgagcacaggagggagagaggaccccgggacacgaaagccaggaaaggaccaaacacggaacagggcacgcggaacaggagaggaggaa

SEQ ID NO: 219543 - RNA, 77 nt, Homo sapiens
gaagccaccccggcaaaggagcgagccggagcgccagcccaccggacacgagacggaccagaggacaacacaaggac

SEQ ID NO: 219544 - RNA, 77 nt, Homo sapiens
ggaagcacacccccaaccgccagggcccggccgccccgcaccgagcgccccgcccccccgcggcacagcccgcagga

SEQ ID NO: 219545 - RNA, 70 nt, Homo sapiens
accaaaacacaaaacagccgggggaggcccaaccagagcaagccaggaggacgggaaagacccaaaggcc

SEQ ID NO: 219546 - RNA, 68 nt, Homo sapiens
gggccagcaagacacagacccgggaagaggcccgcgcagccccaccaggggagggggagggggggaag

SEQ ID NO: 219547 - RNA, 76 nt, Homo sapiens
gacgacagggaaggaccaccacaacagaaagcacaggccaagggggggccgcccgcccaaggcaggaagaggggcc

SEQ ID NO: 219548 - RNA, 75 nt, Homo sapiens
agaggagaccagaacgaacccccccccccggagccgaggccagagcagaaaccagcccaggaacccagcgccccc

SEQ ID NO: 219549 - RNA, 35 nt, Homo sapiens
cacgggccagcccaagcagggccgggccagcgcca

SEQ ID NO: 219550 - RNA, 74 nt, Homo sapiens
ccgagagcgcgaaacgcacgagaagaccagaaaagacgagaaagcacaggggaggagagagaggaccaccaggc

SEQ ID NO: 219551 - RNA, 50 nt, Homo sapiens
ggagaccagacccacgacccaccgaagaagaaagaagagaaagcaaccac

SEQ ID NO: 219552 - RNA, 82 nt, Homo sapiens
gcgggcaggagcggcggccaggccagacccgaaggccaggagacccgaccccaagcggaggcacccaccacgggccaggcgg

SEQ ID NO: 219553 - RNA, 72 nt, Homo sapiens
cccgaccgggagaggacaagaccacgagccagggaacggagggaaagcgacaaacaaccaacccacagagac

SEQ ID NO: 219554 - RNA, 78 nt, Homo sapiens
aaccaaccagagaagagcggagaggaacagaaggcggaggaaacgcagcccgccgacacagccaccaagaaggcacaa

SEQ ID NO: 219555 - RNA, 83 nt, Homo sapiens
cgggccggagacgcgcccgcgcgcaggggaagcgggcagcagagcccggagggacaggaagggcaacccaggaaccccgccca

SEQ ID NO: 219556 - RNA, 33 nt, Homo sapiens
accacggaaacaaacaagggaaaaccagcagcg

SEQ ID NO: 219557 - RNA, 79 nt, Homo sapiens
ccgaagaaaagacaaaggagaaaggaggggaggacaccggcaagggacaggcccggccaacgcaacagggagcccacgc

SEQ ID NO: 219558 - RNA, 68 nt, Homo sapiens
agggggaaggagaccgaaaagaccgaagaaacggacgaaaacggccaggaaagccgccgggcggcaac

SEQ ID NO: 219559 - RNA, 73 nt, Homo sapiens
aggaaccacagggagccgcagggcggagaacggaaaagcaccaggaagcagagaggaccgcagaagggaagga

SEQ ID NO: 219560 - RNA, 73 nt, Homo sapiens
ggcccgaggcggcgagagaggcaggcggagccgaccgggccagaaccaaccaagcggaacagcccaggcaaac

SEQ ID NO: 219561 - RNA, 83 nt, Homo sapiens
gcaaagacagggacaggacagcgagcgaggacgaggaacggcggaaggggacccaggcagccgagacccccagcaacagaaca

SEQ ID NO: 219562 - RNA, 77 nt, Homo sapiens
gcgagcagcgcgggcggcagcccgggggaagcggagccaaacaaaggaacgccaagcccggcaggacgacaggaggg

SEQ ID NO: 219563 - RNA, 75 nt, Homo sapiens
acggagaacacgcgcagcggaggagaaagcaccaacagcagcggcagccaagaaccaagcccagaggagagcagc

SEQ ID NO: 219564 - RNA, 89 nt, Homo sapiens
cgacaacgggggacacaggggcaacggccgcccccccgaggagagcagggcagcccgagggccaggccgaggcccaagccacgagagaa

SEQ ID NO: 219565 - RNA, 62 nt, Homo sapiens
cagacccgcagcccagcccccgcaggcgaaacgccgggcaccagggcgcagggccagccgaa

SEQ ID NO: 219566 - RNA, 82 nt, Homo sapiens
aagagacgaccgcaacacgggaggacggggaaaaagcggccaaagaaggaagcgcgcaccgacgaaaaggggaaaggagaaa

SEQ ID NO: 219567 - RNA, 93 nt, Homo sapiens
aagcaggcccccagccgcagccacaacaccggcaggaaccaccaggacagagccaagaagcgaaccaccggaacagaaagagaagggagcaac

SEQ ID NO: 219568 - RNA, 73 nt, Homo sapiens
cggaaggagcagaacaaacggccaagaagggccaccccacagacgcaggggagcacgccagacacccagaacc

SEQ ID NO: 219569 - RNA, 77 nt, Homo sapiens
aaccgagacgacagggggccaccccaccccagagagcggaccaacgaggaacaggaggcccggacccccagcacaag

SEQ ID NO: 219570 - RNA, 75 nt, Homo sapiens
gcaaacggagccaggcacaagaaaagaaacaggaacacgaaagaggaaaaacgcacaagaaaccgaagccaagga

SEQ ID NO: 219571 - RNA, 78 nt, Homo sapiens
cagccgcaccaaggagacaggacgaagcccaaaccacaagccacaaaagggggccacggacggggccgagcacaacca

SEQ ID NO: 219572 - RNA, 53 nt, Homo sapiens
gcggggaaccaggcgccccgagagcacagcccgggagaggaaagcgcgcagga

SEQ ID NO: 219573 - RNA, 72 nt, Homo sapiens
gacaagaggaacaacaagcaggcaggcgacggacaggagaagaggaaaccgggcaggcgacaagaacgccag

SEQ ID NO: 219574 - RNA, 89 nt, Homo sapiens
acggagggcgcccagcgcaaggaggagcgcgggacaggcggacaagagcagggcgaccacagggagaccaaggaccaggagcaaccagc

SEQ ID NO: 219575 - RNA, 80 nt, Homo sapiens
ccgcgacagaggagggaggaaaacaaccgagggcagagagggccggggaccggagagccccccgggccgacgggggcccg

SEQ ID NO: 219576 - RNA, 85 nt, Homo sapiens
cagacggagacacaccgcggaaaacgagagcggcaggaaccacccagacacccgcacccgggcagccacacagggcggccaccgc

SEQ ID NO: 219577 - RNA, 82 nt, Homo sapiens
gcgcccgcggcgcagcggggcggcagcgaggcggaggcgacgaggaggcggacccccggcgcagagacggggcgccagggcc

SEQ ID NO: 219578 - RNA, 66 nt, Homo sapiens
aaaggaaaggaacagcgagcggaccccgaccccgaggcgagacggaaagcaaagggaaagaagagc

SEQ ID NO: 219579 - RNA, 42 nt, Homo sapiens
gcccaggacggcaccagaaaagaggccggccccagcagaccc

SEQ ID NO: 219580 - RNA, 90 nt, Homo sapiens
cggcgccagacccgaggcgcagggaagacgcaccgcggacgcccgcgagcggcgcacgggccgaccaggcacccgccggcgccccccggc

SEQ ID NO: 219581 - RNA, 77 nt, Homo sapiens
caggccgagcaaggagagaacgcgagggaagggccgacacaagggaagggcacccaccccgccccaccacagcgacc

SEQ ID NO: 219582 - RNA, 74 nt, Homo sapiens
gggagcgggagcgcggaaaggaccagagaaaaagcaccccaggcacgggaacggaggccacgagcaagccagac

SEQ ID NO: 219583 - RNA, 70 nt, Homo sapiens
aagagagaagcacacacgaagccagaaaaacggcgaagaccacacgaaggggcagaagagcacaagacgg

SEQ ID NO: 219584 - RNA, 86 nt, Homo sapiens
cgaggcccggccaacgggcgcgcagagccgcggcgccggaggaaacccaccagagaaggcgcggccacccaggacccgggggaggc

SEQ ID NO: 219585 - RNA, 78 nt, Homo sapiens
ggaacgcggggaaggcgaggcacgaccccacccccgaggcccgaccgacaagggaggcgaggacggacaaaaggaaac

SEQ ID NO: 219586 - RNA, 82 nt, Homo sapiens
ggcccgggaggcacgaaggcaccgggcccagcacagccagcaccgcacgcccgcaagggagggcggggagagccgggcacgc

SEQ ID NO: 219587 - RNA, 76 nt, Homo sapiens
cacccgagcacagagacgaagaggaccaggagcaaacagaagcgcacaaccggccacaagacacccaaaggaggac

SEQ ID NO: 219588 - RNA, 34 nt, Homo sapiens
gcagaccgcagagagagagaggacacaccagaca

SEQ ID NO: 219589 - RNA, 79 nt, Homo sapiens
cagaacgcccagccaaagaaacaagccgggaaagggacaagaagggcaaagccgaacacgcccgagcaacgggggggcc

SEQ ID NO: 219590 - RNA, 41 nt, Homo sapiens
gcgcgcccggcgggccggaccaagacgccggggagggccga

SEQ ID NO: 219591 - RNA, 69 nt, Homo sapiens
gagaccaaaaaaaaaacgcgaacaccgacggagccagacaacggcaagcggagaagagcaaggccgaac

SEQ ID NO: 219592 - RNA, 78 nt, Homo sapiens
cgcggaagaagcaggaggcaagaaaggggaaccccggagaaaaggccaagaaggcaggcggcaggacagcgcaggcaa

SEQ ID NO: 219593 - RNA, 85 nt, Homo sapiens
cccgacaccgaggaggacccccgccaacaaagaagaaggaggaggaggagaggaaggcccgcgaggagcaggcccagcgggagca

SEQ ID NO: 219594 - RNA, 77 nt, Homo sapiens
ccccccacccggacggccaacaccaccggcacaggacggccagagggagaaggaagccaacaccggagccagaaagc

SEQ ID NO: 219595 - RNA, 82 nt, Homo sapiens
gcccagcccccaagagcggaaacagcacgacaagccagagcccaggaaagcagcccccacaacgaggacaagaaaggacccg

SEQ ID NO: 219596 - RNA, 82 nt, Homo sapiens
gagccagacagcggaggaggaaccgaaccaggaccaggccccaagcccgaggcccagaggaggagacgcccaggcaggcgac

SEQ ID NO: 219597 - RNA, 81 nt, Homo sapiens
aaacggaggagccagacccggggaggcgcacacacaccaaagagagggccaccccgcacccaggcgaaggcggggcagacg

SEQ ID NO: 219598 - RNA, 76 nt, Homo sapiens
cccgcggccggccgggcagggccccgagaggcaggcaggggacccggacgcgacaaccaccagaagcggagaccgg

SEQ ID NO: 219599 - RNA, 90 nt, Homo sapiens
gaggcgaaggaccggaggcgggaggcgcggagcaggagcccggccaggcgcggggaaagcacgagacacgagacaggagagaaaggagag

SEQ ID NO: 219600 - RNA, 92 nt, Homo sapiens
aacgggaaagccggcaagagggagaaggacaccaggcagaggcaaggagcaccacgaagaaacgcccagaggagccagaaacagccaaacaa

SEQ ID NO: 219601 - RNA, 70 nt, Homo sapiens
cacgcccccccaaacggacagaggcggggcagcagacccaagccagggccagcagcacagccgcggggcc

SEQ ID NO: 219602 - RNA, 71 nt, Homo sapiens
acacgagcaagccaccgaaacccagccagaaacgcaacggacaaaaaagggaagcgcagcccccgagcacc

SEQ ID NO: 219603 - RNA, 78 nt, Homo sapiens
gccgggcacagcagaggccgcgcagcagcaaaggagagcggaaccggaaaaggcagcgaaagagagcaggaggagagc

SEQ ID NO: 219604 - RNA, 61 nt, Homo sapiens
gcagaaaacccagagcccaagcacacgcccaccacaaaggaaaccagcaggggagcagcag

SEQ ID NO: 219605 - RNA, 83 nt, Homo sapiens
gcggaaggagcggagacggcgagcgcggcgcgccgagaaagaacggccgagcgaccaggagaggagcccccgcccgaagaccg

SEQ ID NO: 219606 - RNA, 88 nt, Homo sapiens
cgaggaagcagcgaggagggcagcccccaccacccgcccaggccagccccagcagcaacagcagcacaggcagggagcacgcgggcag

SEQ ID NO: 219607 - RNA, 78 nt, Homo sapiens
acggcaggaggccgagcaacaagaaccagacgagcaaaccgacaccagcgacacaagcgcgagggaaccacagaggac

SEQ ID NO: 219608 - RNA, 85 nt, Homo sapiens
cagcaccaacggaaacacggaagccagagaaccggcgagcaccaagagccggaggaccagcagacaaggagaggacacacaaggg

SEQ ID NO: 219609 - RNA, 47 nt, Homo sapiens
cggagcggacgacgggggcggaccggccaaacagccaaagccacccg

SEQ ID NO: 219610 - RNA, 72 nt, Homo sapiens
cgggcggacgcagggcaccccgaagagaagagcagcagcgagcaggcccgacccggaggcaccacgccgacg

SEQ ID NO: 219611 - RNA, 82 nt, Homo sapiens
gaacgccaccacacaggagaacgaacaagaggcagagaaggccaacaagcccacggagacgaaaacgccccaaaacacagcc

SEQ ID NO: 219612 - RNA, 79 nt, Homo sapiens
aggacgcgcgacagccgaggagcggacgcccaggaccggaacagacgaggagccgcccagcaaaacccaacgggaaccc

SEQ ID NO: 219613 - RNA, 69 nt, Homo sapiens
acacgccgccgagcagccgccagccccacggacggacgccagccccacaacaagacggggcacagggcc

SEQ ID NO: 219614 - RNA, 73 nt, Homo sapiens
cacgcccggccgaaggcgggggaggagacccacccaaacagggacccccaaaagacaagggcaaaacggacca

SEQ ID NO: 219615 - RNA, 120 nt, Homo sapiens
gggaaccgaggagacgagccaacggcggccgccccgggcacacccggcccccggacgcccgaaacccgagaggagcaggagcaaccgacaggcgggccggacagcgcgcccagcacagga

SEQ ID NO: 219616 - RNA, 63 nt, Homo sapiens
ggaagaccgcgcccgcggagagcccaaacaccaccaccaagaaaaccgagcgagcagccgacg

SEQ ID NO: 219617 - RNA, 40 nt, Homo sapiens
cccgaaccagaagccaaacccgcaaagaagcgagccagca

SEQ ID NO: 219618 - RNA, 84 nt, Homo sapiens
gcaggccacacaggcacaggccgggagggaccgcccagaccggagagaagacggcccagcagagcacccaaccagcgggaacac

SEQ ID NO: 219619 - RNA, 82 nt, Homo sapiens
ccaaccggaggagagaccaaccgaagcggcggcaggggccgcggcccggagcacagaagcgaaggggacagggggagaaccg

SEQ ID NO: 219620 - RNA, 84 nt, Homo sapiens
ccgggaaggcccccaaggaccacgagcaaccacacagcagagaggcaggcaggcagcggaagagaaagaccgaggcaaagaagc

SEQ ID NO: 219621 - RNA, 85 nt, Homo sapiens
ggaggaggcgcgggccgaggagcggggccggagcacagcccacggagaaggacgaaagaagccaaggcgcggagccagcagagca

SEQ ID NO: 219622 - RNA, 79 nt, Homo sapiens
cgcacagaaagcggagcacccaaggcaaaggcggcaggcacagaggcaagacggagcggaaccgccagaccacaagaaa

SEQ ID NO: 219623 - RNA, 83 nt, Homo sapiens
ggaacggaaaggagaacggggaaaacgccaagccgagcccgaagccacacagagagaaccagaccacggcccggggagcccag

SEQ ID NO: 219624 - RNA, 86 nt, Homo sapiens
ccagcgcgccggaggagaacaagagcccgagaaacgaaggccagaagaggagaaaagaaaagaaagaccgaagaaagccaaagaca

SEQ ID NO: 219625 - RNA, 60 nt, Homo sapiens
ggccgccggcaggcgcagccgggcccggccccagccgacgagggaaaagaggacgaggcg

SEQ ID NO: 219626 - RNA, 64 nt, Homo sapiens
aacgagcccgggaacgccacccgcacgcaagggcgagaacaagagagggaaggagaaaacggac

SEQ ID NO: 219627 - RNA, 84 nt, Homo sapiens
ggagccccgcgacgcgcccggcccggagcccccagcgcagcggccgcgcgaagacacaggagaaacggacaaagagcaagcagc

SEQ ID NO: 219628 - RNA, 75 nt, Homo sapiens
aggaaggaaggaaagagccaaacgacgggaacggagccccccgcacaggacaaccaccagccacggacacaccgc

SEQ ID NO: 219629 - RNA, 81 nt, Homo sapiens
accccgcacaccacccaagcccaggcagcagccgacaccgcccccgcacgccagggggagcacaccggaaacgcacacccg

SEQ ID NO: 219630 - RNA, 82 nt, Homo sapiens
agccaaaagacgcagagccccagggcggacagcagcccggggcaaccggagccccccaggagggccagaaggagagaaaaag

SEQ ID NO: 219631 - RNA, 70 nt, Homo sapiens
cgccgaacccgaaaggagaggcccacgcggaccggcagcgccaccggaccaccagacaaggacacggccc

SEQ ID NO: 219632 - RNA, 78 nt, Homo sapiens
ccgacaggcgcggcacgggaggcggaggcgccccgccagaggagagcgggggcgggggagacaggacagccggcacca

SEQ ID NO: 219633 - RNA, 92 nt, Homo sapiens
aaaaccgccgaccacgccgggcaccccccggaagacgcgacgaggagagaccggaaagggaaggagaacgaccgccagaagagaagaggaag

SEQ ID NO: 219634 - RNA, 58 nt, Homo sapiens
ccagggcgacagcgcgagagagcgcggccccaggagcaaggcgaaagggggaagggaa

SEQ ID NO: 219635 - RNA, 75 nt, Homo sapiens
ggaaaagaaaaaacgaagaaaaaacgcaggcgaagaaaacaccaccaggacccgaaaagccagcaagcgagacca

SEQ ID NO: 219636 - RNA, 80 nt, Homo sapiens
cccagcgagagacgcagcaggcggcgcacgcccacgggcaggggacggaggggagcaggcacccccagaccggagcccaa

SEQ ID NO: 219637 - RNA, 76 nt, Homo sapiens
caggaagcccaagcagcaaccaaaagagccaaggacccaaaaaccagggccagcaacagaagaaagcaagcaccgg

SEQ ID NO: 219638 - RNA, 74 nt, Homo sapiens
aggcgccgaccccacaggaagggaagcacagcgacccgcccagcgccacgggcggggggccgagcgcccaagcc

SEQ ID NO: 219639 - RNA, 35 nt, Homo sapiens
ggaggggcacgcaacaacggaccgagcagagaacc

SEQ ID NO: 219640 - RNA, 81 nt, Homo sapiens
gcccggggccggccgccgcgggaccgaggaaaagccgcaccagccaccaggagagaacgccgcgccgcgcgacaacggccc

SEQ ID NO: 219641 - RNA, 52 nt, Homo sapiens
agagaagaaaagagcagacagacccaagcgcgcgcgaagggcagagcggaga

SEQ ID NO: 219642 - RNA, 75 nt, Homo sapiens
acgaaggcgggacaccgcccgcaccgacggaaggccggaaggccaggcagggagcaggagccagcgaagcaggac

SEQ ID NO: 219643 - RNA, 77 nt, Homo sapiens
ggccgagcaggcgagcgaacgacgggacgccagcgcagggaacacccacgacgaaaacgacacacaaggcagaccag

SEQ ID NO: 219644 - RNA, 57 nt, Homo sapiens
cggggacagccacgagagcacagaagggaaggggcgacggccggcaagggcaggggc

SEQ ID NO: 219645 - RNA, 75 nt, Homo sapiens
gcggaagaagcaggaggcaagaaaggggaaccccggagaaaaggccaagaaggcagggcagcgcaagaccccgca

SEQ ID NO: 219646 - RNA, 79 nt, Homo sapiens
agaggagaacaaagggacagaacggaagagccaggcacgggagaaacagacccgaccagaaaaagcagaaaaggagaac

SEQ ID NO: 219647 - RNA, 73 nt, Homo sapiens
aaaggacggcgccagccggagagcagagagaaggcagcccagaaacaggacagcacgccggaagaagaaggaa

SEQ ID NO: 219648 - RNA, 68 nt, Homo sapiens
aagggcacgaaggaggaggaaggaccgagcgcaggaaccaggccagcgcccagcaagcggaaggccac

SEQ ID NO: 219649 - RNA, 78 nt, Homo sapiens
ccaacgccaaccaaagagcacagccaccagccagcaagcccaagccagggagaacgcagacagaaaccaagccgcccc

SEQ ID NO: 219650 - RNA, 73 nt, Homo sapiens
gccaccaaaaccggcggggacagaaggcaaaggcagcaccccaggaaaaacgcccaaacccaaaagaggagag

SEQ ID NO: 219651 - RNA, 93 nt, Homo sapiens
ccgccggccaccgcgcacccacgaacgcccaccccccgaacccagccgcaccggaccccgccccccccaccagaccagggcacagcagagagg

SEQ ID NO: 219652 - RNA, 91 nt, Homo sapiens
gcagaaacagagaaggaacagggcgcacccacgacgcgcacaccaccggcagaccggcgccacagcaccacccgacggcagcgcggccacc

SEQ ID NO: 219653 - RNA, 74 nt, Homo sapiens
agccaggcccccccacacacagagcagaggacgaggcacccccagccgaggcgcgcaccccccgcggacacggc

SEQ ID NO: 219654 - RNA, 79 nt, Homo sapiens
cggcggcacgcacagggaaaccaggaccacaggggcggccccaccaacggccggagaagggacaggccgcgcggccggc

SEQ ID NO: 219655 - RNA, 82 nt, Homo sapiens
cgggccagcggagccgggacggaggcccaaccacgcaacggggggagacccgccccggagggcggggaagaacgagaaggcc

SEQ ID NO: 219656 - RNA, 88 nt, Homo sapiens
ccgagcgcccagcgagacccggggccccagaggccgcggacaccgaccggaggccacagcacagcaaagccacaacacccaggaggcc

SEQ ID NO: 219657 - RNA, 87 nt, Homo sapiens
ggcccggaggcggcgggacagagcgccgcgaccccagcgggcccggggaggcaccgacgaggagagccaggacaaaaccaggcagaa

SEQ ID NO: 219658 - RNA, 83 nt, Homo sapiens
cgggagaggacaagaccacgagccagagagaaaaggaacagccgaagccaggggcaagcgaaaccacagaagaaaggaggaac

SEQ ID NO: 219659 - RNA, 80 nt, Homo sapiens
gcacgacaagcggacaccccgagagggaagcgcgaggaacagccagccagaacaagggaggaagaagaaagaggaagcgc

SEQ ID NO: 219660 - RNA, 75 nt, Homo sapiens
gaaggcgcaagagggaggcgcacacacagccagaggcccaaaacagccccagagcaccacccgaacagcagcccc

SEQ ID NO: 219661 - RNA, 58 nt, Homo sapiens
agggaggcaggggcagaaacagagaaggaacagcccgcggaccccaaccgccgaagca

SEQ ID NO: 219662 - RNA, 76 nt, Homo sapiens
gcgggaagagaagacacgagcacaaacgggaaacacaaagaagacaccagaagggccagcaccacgacaacacggc

SEQ ID NO: 219663 - RNA, 75 nt, Homo sapiens
cagggaggacccacccccgggggaaaagaacgaggcgccggcggcagagcggggagacgagacaaccgccccgcc

SEQ ID NO: 219664 - RNA, 81 nt, Homo sapiens
gagaggagccagcacccgcaggagagccccagggccagagccgaagcggccccagagagaggagccgcggcccaggcggag

SEQ ID NO: 219665 - RNA, 43 nt, Homo sapiens
gacaaaggaccagccagaaaagggcaggcgccccaggagccac

SEQ ID NO: 219666 - RNA, 73 nt, Homo sapiens
agaaacagcagcgacccaaacacaaagggcgaaagacacacagaagccaggaaaggaacaaacaaaccacgaa

SEQ ID NO: 219667 - RNA, 80 nt, Homo sapiens
gaaccagccgaaagcgagaagcgccgcccagaagcagaaaggccggggggggcacagagccccggaagacagcccccagc

SEQ ID NO: 219668 - RNA, 107 nt, Homo sapiens
cggagcgcgcagggggcgcgccgccgcccgccccagaccgcggcgaaaggaaacccccaaccaccaagaggccagaccaacccacgccggggcccggggccaggaag

SEQ ID NO: 219669 - RNA, 49 nt, Homo sapiens
gagcgacccggccaaagcacgcgaacaaggagcaccaggacaaaagaag

SEQ ID NO: 219670 - RNA, 81 nt, Homo sapiens
ccgaaggccgcaggcagcccggggaggagcggagaggggacccccggagacccacccaacgaagagagagaaggggacggg

SEQ ID NO: 219671 - RNA, 70 nt, Homo sapiens
caggccccacaggaggcgcgagaggcgcgagccgcccgcccaaagaccagagaacagaaagccaaaggga

SEQ ID NO: 219672 - RNA, 31 nt, Homo sapiens
cagggcgcccccggccaccacacacgagccc

SEQ ID NO: 219673 - RNA, 70 nt, Homo sapiens
aacgggaagggagaaaggacgccaaaccaccggccaggaggcacaggacgcgacgccagacgaggccacc

SEQ ID NO: 219674 - RNA, 75 nt, Homo sapiens
aaacaaaaaggggagaagcaggcagaaagcaaacaacaacggcagggaccaagaaaggcccagggaccaaagccc

SEQ ID NO: 219675 - RNA, 77 nt, Homo sapiens
aaaccccccccccagccaccaagagaagacaaaaggacagcgacagacagcaaacacagccagaacagaggaccggg

SEQ ID NO: 219676 - RNA, 69 nt, Homo sapiens
cccccgagagcggaagacaggccggcaccgcgacccagcaaacgggaaagaagagccggccgggaccgg

SEQ ID NO: 219677 - RNA, 84 nt, Homo sapiens
cagcagaggccacacagggcaagcagacgccaagagaggagggcgcggggccggggcggagcagcgcgccccgcgggagccccc

SEQ ID NO: 219678 - RNA, 74 nt, Homo sapiens
ccaggggcggccacgaccaccaggcgccaggagcccacaggaagggcaaccacacaaaagcaacaaacacgaga

SEQ ID NO: 219679 - RNA, 98 nt, Homo sapiens
cagaacagcccagcaggaagggaaccaagccccaacaacagagacagaacagcgcgagccacaaggcaaggaagcaggcggcaccacccaagagaacc

SEQ ID NO: 219680 - RNA, 68 nt, Homo sapiens
cggcagcccccacgaaaaggcaaaccaaccaccgcccaaaacaagacccgcggaagaaagccacagga

SEQ ID NO: 219681 - RNA, 78 nt, Homo sapiens
cccgccccgccccggggaacccgcagaggacagaagaggccaccaaacccgaggcccggaagcgccgaaaaggaaaag

SEQ ID NO: 219682 - RNA, 59 nt, Homo sapiens
acacgccaagcagccagcccaggagagaaaggacgagaccgaagagaaggaaggacagc

SEQ ID NO: 219683 - RNA, 72 nt, Homo sapiens
gggccgggggcgagccggagcgaccccggcagggcgggaaaaagaaagccgagacgcaacccggaagaagac

SEQ ID NO: 219684 - RNA, 68 nt, Homo sapiens
cgcggggcgcgacgaccgaagagaggggaggaccaccgcacagagcccgaacagacacgccgaagcgg

SEQ ID NO: 219685 - RNA, 78 nt, Homo sapiens
acacgacacccccgggaccgcggagagaagcagcggacagcagaggggaccccagcccaacgccaaacgagccggacc

SEQ ID NO: 219686 - RNA, 84 nt, Homo sapiens
gccgaggccgggccaggaacggcggacggggggcggcagccagccgcaggggaccagggagacggaacccccggagccccagga

SEQ ID NO: 219687 - RNA, 79 nt, Homo sapiens
ccccccacccccgccgccacaacaaggagaaagcggccaggccaaagcaaagagcaaaagcgaagacccccaaccagcc

SEQ ID NO: 219688 - RNA, 66 nt, Homo sapiens
gaaggaccaagaaccagggcgagccccaggaaccaacaagggcagaagcgaccaaagacacaggaa

SEQ ID NO: 219689 - RNA, 80 nt, Homo sapiens
acggcggagcagggagcccaaagaccccggagacaggcgggagaccagggccagcccggccacaccccaggcggcacccg

SEQ ID NO: 219690 - RNA, 67 nt, Homo sapiens
gccgacaaagggaccagaggcagaccggaaggccaaaacaagggaagcaaaggaaacggagagacag

SEQ ID NO: 219691 - RNA, 34 nt, Homo sapiens
agccgcacagcacacacggcaccggcacggacca

SEQ ID NO: 219692 - RNA, 82 nt, Homo sapiens
cgacagaagagcgccagaccaacagagccagaaggccgggggaaagcaacacgagaccccggagaagaaccgcgccagaagg

SEQ ID NO: 219693 - RNA, 71 nt, Homo sapiens
agcagagcagacgagaagcaccaaaaaccacccaggaggagccaccaagcccgaaggaggcgagacacagc

SEQ ID NO: 219694 - RNA, 35 nt, Homo sapiens
gaaacgggcaagaacagaacccacaggagggccag

SEQ ID NO: 219695 - RNA, 87 nt, Homo sapiens
cgaggagaagaggacggcccgagcaagggggccggcagcaccaggcccagaggagcccacacgggcccacacgggggaggcggcccc

SEQ ID NO: 219696 - RNA, 84 nt, Homo sapiens
agaagaagaggagaggaaaaaggaagagagcacgcagccaggaaaccacgaggaacggacgggagacacaggaagagcgggcca

SEQ ID NO: 219697 - RNA, 71 nt, Homo sapiens
cccgggagagaggggggccaccaggcaggaaccccccacaccacaaggcgcaccagaaagacgggcgccgg

SEQ ID NO: 219698 - RNA, 80 nt, Homo sapiens
acaacacaaagcacaccgccaaacccaggccagagcacaggagacgggcagacaacgaacaagcgaagaaccagcagcaa

SEQ ID NO: 219699 - RNA, 77 nt, Homo sapiens
cccccgcaaagggaacagaccagggggagagcagccccagaaacagaacaagggcgccccagaacaaaccagaagca

SEQ ID NO: 219700 - RNA, 86 nt, Homo sapiens
caaggcaacaaggacaacaagagacgggacaagacagggcaaaggacagaccagggaaagaacgccggacaacagcggcgaagaag

SEQ ID NO: 219701 - RNA, 70 nt, Homo sapiens
aaagggaagcagcgggagaggagggacaaaggaaaaagaggaggaaaacagcagggacgaacaaaagcga

SEQ ID NO: 219702 - RNA, 72 nt, Homo sapiens
gaaggccacccaggaagaagcgcaaccacccaaaaggccgggcccaaagaggccgcaaagaagagagacaag

SEQ ID NO: 219703 - RNA, 75 nt, Homo sapiens
cgagagacacacaaaagcgaagccacaaggggaaccacagcaaggaggcacccaccaccccaagcaaaacaagga

SEQ ID NO: 219704 - RNA, 77 nt, Homo sapiens
agaaaacaagcaagcgcaggaagagaccagaggacagaccgaagcaaagcaccaggaagaagaggcggaagaaacaa

SEQ ID NO: 219705 - RNA, 75 nt, Homo sapiens
ggcaaacccgcgaggagaagaggacggcccgagcaagacaccgggaagggcacgacaggaaaagacgacgaagag

SEQ ID NO: 219706 - RNA, 77 nt, Homo sapiens
ccgggcccgcgggggcaaccgggcgcagacgagcgacaccacacaaaggccaccacagaccgcgagggcagcagagc

SEQ ID NO: 219707 - RNA, 80 nt, Homo sapiens
gcgccgggcagaggaccggaggccgggaagccaacgaccacacgcagggacgaagggaacccgccgggcggcccggcacc

SEQ ID NO: 219708 - RNA, 43 nt, Homo sapiens
ccccaaaggccgggaacaggaaacggagaggcgggcggaccaa

SEQ ID NO: 219709 - RNA, 83 nt, Homo sapiens
gagccgccggaaggcccccggcgcgagacccgccggaggaacgaccccccaacgccagaagcggccgagacacagacaagcgg

SEQ ID NO: 219710 - RNA, 41 nt, Homo sapiens
ggagcacgcacgccacgaagggacccgccaccccaggagcc

SEQ ID NO: 219711 - RNA, 46 nt, Homo sapiens
cagaaaacaagagaccacagaaggggaagaacacggaaaccggaca

SEQ ID NO: 219712 - RNA, 73 nt, Homo sapiens
acacaagcccaagagggagccccgcagacgggacacagcacaccggagagacgaggggcgaaggcacaagaga

SEQ ID NO: 219713 - RNA, 75 nt, Homo sapiens
gcgcaaaccaccaaaaacaacacccagaaagaggcgggcaggggcacggccaggcagcccgacccgggaccagcg

SEQ ID NO: 219714 - RNA, 83 nt, Homo sapiens
ggaaggaggccgagccgggaccaggcccgggggcggcggccacgccaaggacggggcacaggccaccaaacagaagaccgccc

SEQ ID NO: 219715 - RNA, 75 nt, Homo sapiens
cgaaacagaaaccacccgccacccgcccagcaaagaacagaaaccaggaaccgaagaagcgaagaaacagcggac

SEQ ID NO: 219716 - RNA, 57 nt, Homo sapiens
aagaagaacagagacagcagccaaacccccagggggaggggggcgaaaccgagcgcg

SEQ ID NO: 219717 - RNA, 76 nt, Homo sapiens
gagcaaccacccagccacccgaccacacacaccaggaaaaaggacgagcaggcccccccagccggcgaccagccac

SEQ ID NO: 219718 - RNA, 74 nt, Homo sapiens
cgcagcagccacccacgagcccggcaaaagcgcacaaacgcccaagaaaagcggacagaagagagagacaccac

SEQ ID NO: 219719 - RNA, 75 nt, Homo sapiens
agcacccggccgagacggcggcagcagcggcacagcccaagaagacggcagaacacccagcacgcccagaacgac

SEQ ID NO: 219720 - RNA, 77 nt, Homo sapiens
gggggcgcgcgggggcgggcccgggacgcgcggccaggcgacgagagaggcgggagggaagcgggagacacgggaaa

SEQ ID NO: 219721 - RNA, 83 nt, Homo sapiens
cagcagcacagcccagggcaaaaggaaaggcaggaaaagaaggggaccgcaaagaaaaggacgggccccaaaggcgagccaca

SEQ ID NO: 219722 - RNA, 75 nt, Homo sapiens
gagagagcgagcgagggggggcgcgccggaaaccggagcgcgcagcagccagaagagcggagagaagccggggcg

SEQ ID NO: 219723 - RNA, 47 nt, Homo sapiens
cgccccccagaagcgaggaacagagaaaacagccgagccacaagaag

SEQ ID NO: 219724 - RNA, 124 nt, Homo sapiens
cagcccggcacagccggcggcgaaggcagcgccgacggcagccggcaccgacggcggaccgacccgagccgagccggcagcgcccgagggagcaaggagaagagcggaacccagaccgcgcccg

SEQ ID NO: 219725 - RNA, 62 nt, Homo sapiens
gaaaaaaggagacccccccgcccgaacgcccaaacaagccgcgagaaggggccagcaaagac

SEQ ID NO: 219726 - RNA, 78 nt, Homo sapiens
gaggggacccccgggcggccgggacaacagaggcagaaaaggggacacggcgggcagaaaggcagacccggcaccaca

SEQ ID NO: 219727 - RNA, 84 nt, Homo sapiens
accagaagccagagcgaggacgccggcagagacggagcgcaagaggacggcagcgcggcgaagggaccgccgcacccaagacgg

SEQ ID NO: 219728 - RNA, 39 nt, Homo sapiens
cgcgcacgcccggagagagggaccaggccggcacgacaa

SEQ ID NO: 219729 - RNA, 90 nt, Homo sapiens
cgaggcgaggagaggccgaacccaagggacgacgccgcggaagcagagggggagccgaggaaacccagacccaagaccaaccgaggagga

SEQ ID NO: 219730 - RNA, 74 nt, Homo sapiens
cggaacgagaagagcagaaggaacccaaggaccgcaaagaaaacccagagaacaccacccgaagagacaccgag

SEQ ID NO: 219731 - RNA, 78 nt, Homo sapiens
gacaacgaagcagaacgcgccgaaaaaaggaggagcgacaagcacaaggggaacacacagcaaccaagcgccagacaa

SEQ ID NO: 219732 - RNA, 73 nt, Homo sapiens
cgaagagaaggggaagaaagagagaacaggagaggaccgaggaggggcgccgaggaaaagacagaccaacaca

SEQ ID NO: 219733 - RNA, 37 nt, Homo sapiens
aacacagaccacacaaggagaacgggaaagcgcacaa

SEQ ID NO: 219734 - RNA, 82 nt, Homo sapiens
gaaaagacccggaaagaagagacacagaggagccacacccccagagcaccaaggccgcgagacaagggcgacccccaaaggc

SEQ ID NO: 219735 - RNA, 74 nt, Homo sapiens
accggcacccagcaggcagaggggagcccaaaagcacgaagcgccagaggacaccgcggcccgaggacgccacc

SEQ ID NO: 219736 - RNA, 80 nt, Homo sapiens
acacgaagaaccacaagcaagaaacacaggagcccggagagccggcacagaaaacacccggaaagggccgcggaaaaccc

SEQ ID NO: 219737 - RNA, 111 nt, Homo sapiens
ggagccgcgccggccggcgacccggggaccggcccgcggcggcgcgccacccgccccgcagacccgaggagcggaaaaccgaagcagcgggcaagggccaagacccccagc

SEQ ID NO: 219738 - RNA, 69 nt, Homo sapiens
cggcccggccggggcgcgaggcgcgaggcgcaggaagcaggcacgaacccaagaccccaggaaaacagg

SEQ ID NO: 219739 - RNA, 63 nt, Homo sapiens
caaagaacaagagaagacccagaggaagccaaaagccaccaagaccccaggaccagagagaag

SEQ ID NO: 219740 - RNA, 68 nt, Homo sapiens
ccagacagcggacggccgccaccgaggacaaggcacgaggcgcggcgaccaccacagcagagcccggc

SEQ ID NO: 219741 - RNA, 82 nt, Homo sapiens
gcaggacggaaggggaagaggcccacccggagaaccccacggagaaccagagcggggcccacagacgcaacccgcaggggcc

SEQ ID NO: 219742 - RNA, 71 nt, Homo sapiens
gcaaggagccaccagcacggaccaggaggcgagcaacaggggaagaacacaaggcacacaaagccacccaa

SEQ ID NO: 219743 - RNA, 86 nt, Homo sapiens
caaaaaggacaccagcaagcgcaagaggagcgacagcagccaggcgagcggcagggagacagcgcacccgcggagcgggcacacag

SEQ ID NO: 219744 - RNA, 59 nt, Homo sapiens
cccccgagaccgagaagcccaggccagcaacagaagaaagcaagcaccggggaaagcgg

SEQ ID NO: 219745 - RNA, 78 nt, Homo sapiens
gccacccagaagaaggaagacccccgcgggagaacacgggacgagacccacccagaccgaagcccaggaggaggaaga

SEQ ID NO: 219746 - RNA, 78 nt, Homo sapiens
ggacgcaccgacgaggccaagacaaggggcgcagagcggggggacaggcgcaagaccggagaagcaggagcggaacga

SEQ ID NO: 219747 - RNA, 72 nt, Homo sapiens
accaagaaagagagagaggaaggaggaggggagaaggaaaaagccgaagacccagaaaccaccgccgagaca

SEQ ID NO: 219748 - RNA, 70 nt, Homo sapiens
gcggggcacaggcaacccaagacggcgggagccggaacgggccaggaaagacagagagacggggcaccgg

SEQ ID NO: 219749 - RNA, 69 nt, Homo sapiens
cagccggccaaaggcagggcgaccacaggcggaagaaagcaccagcgggcaacaagaaaggaaggccac

SEQ ID NO: 219750 - RNA, 78 nt, Homo sapiens
caagcgcgaagagagccaacaggagacacagcaagaaggccccaccagagcgagcagagccggcaccagccgggaccc

SEQ ID NO: 219751 - RNA, 84 nt, Homo sapiens
cggacccccccagggagacgcgagacggcggcccagggaccgcacacacaccccacgaccccaggggaacaagaggaggaccgc

SEQ ID NO: 219752 - RNA, 83 nt, Homo sapiens
gcaggagccgccacaccaggcaacaggcaccgcagcggacggcgagcacagagggcgaggcaaagcgcgggcacagacccaac

SEQ ID NO: 219753 - RNA, 77 nt, Homo sapiens
cccgggggacacgcgccggaaggggcccgaagcccccgcaggaaccacaacccaaccaggaccaagcacgcacagca

SEQ ID NO: 219754 - RNA, 76 nt, Homo sapiens
cagacaaaaagcaacaaagaagaaagaagcaggcaagcgaaaacgcgagagaagcgaaccggaacaaacaggacac

SEQ ID NO: 219755 - RNA, 74 nt, Homo sapiens
aacaaaacaccacagaacgaccaagaaaaaagcgaacgcaaggggccaagaagagcagagcccgagcaagaaga

SEQ ID NO: 219756 - RNA, 86 nt, Homo sapiens
gcgcgcccgacggggcggccgggggccagagaccaaggcgcgcccggcgggccggaccaaggcacacacgcagggcccgcgaggca

SEQ ID NO: 219757 - RNA, 80 nt, Homo sapiens
ggagaacagggacggacacaaggagaccccaaccaaagagcggggcccgggaggagaggcggcggcccggaccgagcggc

SEQ ID NO: 219758 - RNA, 78 nt, Homo sapiens
ggcgaaggacagaaagggcaaggcgccgagaagagcggccacggggaaaggagagcccagccaaccgcgggccaacga

SEQ ID NO: 219759 - RNA, 76 nt, Homo sapiens
agcgacagagccaaaacagagcggaaccgaggagagaggaggagccaagcgggaaaaggggcaccgacgcaccagc

SEQ ID NO: 219760 - RNA, 59 nt, Homo sapiens
agcaagcgaagaacccccaaacgacccaggggaggaacggaagaggaggcaacagaggg

SEQ ID NO: 219761 - RNA, 63 nt, Homo sapiens
aggggaaggcgccgaagaggacgaaggaaagaaccacaagcgccaaagaacacacccaagcag

SEQ ID NO: 219762 - RNA, 72 nt, Homo sapiens
cagggggaacgggagggggaggccgagagacccgcgaacgagcacaagggcaccacgcaaacagggaaacag

SEQ ID NO: 219763 - RNA, 79 nt, Homo sapiens
gggaggacgcaagcggagagccaggcaaggaccacacgcaggggacgcacaaggaccggcacggcagaagccgccacgc

SEQ ID NO: 219764 - RNA, 79 nt, Homo sapiens
ggggcggcgcaggaggagccgaggcgagccaacagcacgagggccccaaggcggcagccccgaccgacggggcaacgcg

SEQ ID NO: 219765 - RNA, 77 nt, Homo sapiens
gaaggcaaaaccaaacaccccagcccacagagagcaaaacacaagagagcagggaggagaggggaaagaaaaagagc

SEQ ID NO: 219766 - RNA, 78 nt, Homo sapiens
aggaaagaaaaaagaaagcaagccggaagcaagggcagaggaaggcggaacgcgacaaacagcgaggcgcgcgaccac

SEQ ID NO: 219767 - RNA, 82 nt, Homo sapiens
cacaggacaccgggaggggagagaggacgggagaccagcagagagcccccaccgaccagaagaggcgggggagcccgcagag

SEQ ID NO: 219768 - RNA, 84 nt, Homo sapiens
gccgccccagccagaccagcgccggacgcccgcaccgggcccccacccgcccggcggccagcgcagagccaggcgacggaggag

SEQ ID NO: 219769 - RNA, 79 nt, Homo sapiens
gggaggggagggaaaggcccaggaaaaagcccggaccaaaaaacaggccaccgaggaaagaggggcccaagcacaaaaa

SEQ ID NO: 219770 - RNA, 67 nt, Homo sapiens
ggcggacaaccacccggcaacaaacaccggcccaggaggagggcccgggccaagagagagggaccca

SEQ ID NO: 219771 - RNA, 63 nt, Homo sapiens
gaaaggacagggagagaagccaagaaagacaggcacaggccgccccagaccccggaagcccaa

SEQ ID NO: 219772 - RNA, 77 nt, Homo sapiens
agaagagaggggacgcaaagacacggaaagaaaccccccaggcaagaggcgcaggaccgggaagaccaacaaacgca

SEQ ID NO: 219773 - RNA, 102 nt, Homo sapiens
cagaaagccaggaccaagagacaggcagccaccagggggacaaacgccagagagggcaacggggggcaccacgccaggcggaggaagcagagaagaagaaaa

SEQ ID NO: 219774 - RNA, 26 nt, Homo sapiens
gaccaagaaccagggcgcgcacagac

SEQ ID NO: 219775 - RNA, 43 nt, Homo sapiens
acggcccgcaaggccaggcagggccagcccgcaacccccggcg

SEQ ID NO: 219776 - RNA, 60 nt, Homo sapiens
ccaaggcgaccaagggaggccccgggaggccgaggcggggagggagcggcgggaccgggc

SEQ ID NO: 219777 - RNA, 64 nt, Homo sapiens
caacaccccggccaccgacccacaagcggccgaagcaccgacaaggcaagaacacaagagcgca

SEQ ID NO: 219778 - RNA, 54 nt, Homo sapiens
gaagacaccgccagagacgccgagcaaaagcccagaagaggcagggccacaggc

SEQ ID NO: 219779 - RNA, 80 nt, Homo sapiens
gacacagaacggacacaggagaacggaagccagagaaaaggaagagagagcaagagaggccacgcccacgaggcgacaga

SEQ ID NO: 219780 - RNA, 77 nt, Homo sapiens
gcacgcaacggaaacaagcgcagagagaaaggaaagggcggcaggaagacaggaaaagagaaacaggccccaacgag

SEQ ID NO: 219781 - RNA, 72 nt, Homo sapiens
cggaggccagcaaggccagcacagccccgcgacaaccaggaccgccccgcaggaaagaaaggggagacccag

SEQ ID NO: 219782 - RNA, 59 nt, Homo sapiens
cgccggccgcagagcacgcggagcgacccgccacgcgggacaccaggccgccggccgcc

SEQ ID NO: 219783 - RNA, 72 nt, Homo sapiens
caagcaagagaaagccgggcggagaacggaaaagcaccaggaagcagagaggaccgcagaagggaaggagag

SEQ ID NO: 219784 - RNA, 82 nt, Homo sapiens
gccgcagcaacccagagcccacaggcaaaggagcaccgcgccccagaccaccggcagggaacagccgagcagaccgaggagg

SEQ ID NO: 219785 - RNA, 83 nt, Homo sapiens
ccaggcggcacccacgaaacaacagagaccaccagggggaagggagcacccgccgcaagacgaccccgaccacaacaaaacaa

SEQ ID NO: 219786 - RNA, 74 nt, Homo sapiens
aacccccgccgaccagagccagacacagagcagcagccccacaagacagaagaaagggagcccccaagaacagc

SEQ ID NO: 219787 - RNA, 82 nt, Homo sapiens
aaggaggaaacagcggcaagccacagacgaaaaagcggggaaaacaaaaaaaagaaggagggaagagggggccaggaccagg

SEQ ID NO: 219788 - RNA, 81 nt, Homo sapiens
cggcgggaacaaagcccaacaaccagaggcaaccgcagaaacacgaggagacggaaggcgaccacaccaccccagacacgg

SEQ ID NO: 219789 - RNA, 76 nt, Homo sapiens
ggaagcagcggggaaccgggcgagggcacacagccccgaccgacggcagggcaaaccagacgagagagaagaggga

SEQ ID NO: 219790 - RNA, 83 nt, Homo sapiens
gcggcagcgggcggacggccggcgggggcggcggcggccagcgccagcccccccgccggacggaagcccgggcaaaggaggcg

SEQ ID NO: 219791 - RNA, 78 nt, Homo sapiens
cgggagcgcgagggagcgccaagggcacgggaagaccggaggggacgaagaacgggaggaaggaaagcaagaaacagg

SEQ ID NO: 219792 - RNA, 67 nt, Homo sapiens
cgaaacaaagcaagaacaccagcagccagaaggacggaagaccccagccggcgcggaccgccaagcg

SEQ ID NO: 219793 - RNA, 56 nt, Homo sapiens
gcaggaccgcggggagcgaagcgcgcggaggcgaggcagagagggaggaggaaaac

SEQ ID NO: 219794 - RNA, 84 nt, Homo sapiens
acggcgcggcaaccggggagcccgccaggagggcgggaccccgcggaacggccgcggggagcggcgcgcgcacaggcacacgac

SEQ ID NO: 219795 - RNA, 83 nt, Homo sapiens
aagcgagggcgaagcacgacacagaaggggaggggagggaaaggcccaggaaaaaggaccagcagcgaagaggaccagagaga

SEQ ID NO: 219796 - RNA, 76 nt, Homo sapiens
gcagcccggcggacgccggcacagaaccgagagcccagcagccagagcggcggggaggcagcaaccgccccaacgg

SEQ ID NO: 219797 - RNA, 70 nt, Homo sapiens
aagcgaaaccacagacagacgagccccagaagaggacaagagaaaaaaagggcgggcgaacaaaaagagc

SEQ ID NO: 219798 - RNA, 75 nt, Homo sapiens
ggaacggaacagaagcaaggcaccggagagcgaagcaccagaaggacacagaggaaagaacacacacgcaaaaga

SEQ ID NO: 219799 - RNA, 60 nt, Homo sapiens
gccacacgggggcaccacccccagccgcagagaccacaccgcgccagaccccccaggaga

SEQ ID NO: 219800 - RNA, 69 nt, Homo sapiens
cgcggccccaagcaccagcccacaaaggaagcggaagagaagaccggcaacaagaaaaaaagccagaaa

SEQ ID NO: 219801 - RNA, 81 nt, Homo sapiens
ggcaggaaacagaagaaggccagcgaggaagacagcacagagggccaagccagaacaggggaaagccaaggcgagcaggag

SEQ ID NO: 219802 - RNA, 71 nt, Homo sapiens
ggaagccgggccggccgcgcgacgggggacagaacggcaccgacgagacggagggaagaacgggaggagcg

SEQ ID NO: 219803 - RNA, 70 nt, Homo sapiens
cccgcccgaagaccgaggagcaaggaaggagcgacgaaaggaagaagccaggggcgcggggcggggaggc

SEQ ID NO: 219804 - RNA, 75 nt, Homo sapiens
gcaccagagacgggaggagccaagggggaggcaacagggcgccacccagcaagagagccccgcagcggggagacc

SEQ ID NO: 219805 - RNA, 61 nt, Homo sapiens
gaaggagccaccgcccccgcccgaccaggccgagggaggacacgcgaccgaacaggaggag

SEQ ID NO: 219806 - RNA, 83 nt, Homo sapiens
caaaaggccacggcaccgaagccccgagccccccagcgcagggaggccaacagacccaacccagaaggcaccaaacggagggg

SEQ ID NO: 219807 - RNA, 81 nt, Homo sapiens
cccggaaaaccccccccgcaacaggccaacgcccggccagcgccacgcgagcgcgcaagggcggcgcgcccgcgagaagac

SEQ ID NO: 219808 - RNA, 71 nt, Homo sapiens
cagcacgaccagaagagcgaaaagagggcccagagagaaagagcccacaagcaggacacagccacgcacca

SEQ ID NO: 219809 - RNA, 77 nt, Homo sapiens
caggaaaaccggccacaaaaccagagcggagacacccaggaggcagaagccaaaaagcgcccaggaagcggaaaaac

SEQ ID NO: 219810 - RNA, 54 nt, Homo sapiens
ccgagaacagaggggagggacccgggagaccaacgggaagcagagcagaggaag

SEQ ID NO: 219811 - RNA, 76 nt, Homo sapiens
ccgagagccgcccgggccagcggccgcgcacccccggccggaggcaccagcgcgacagcgaccgaagaacagagcg

SEQ ID NO: 219812 - RNA, 71 nt, Homo sapiens
ggaagcagacaagcacccaacaaaccaagagggcgaagcagcaaaacacacagccccccggagaaaagagg

SEQ ID NO: 219813 - RNA, 84 nt, Homo sapiens
gagccacgcgcccggccgacagggcccaggagacaccagcgggggcgccgcgcagggaaagggaccgccacccaagcgcagaac

SEQ ID NO: 219814 - RNA, 70 nt, Homo sapiens
gagaaaagggacggaaaaaggcgccagacagcagcgggacaggagagacaacggaggcaagaaagacgga

SEQ ID NO: 219815 - RNA, 73 nt, Homo sapiens
ccccaccccgccccacccagggcaacccaccccaggagggaccacccgagcaacggggcggcacacaaggagc

SEQ ID NO: 219816 - RNA, 69 nt, Homo sapiens
aaagccacgcaaaaggaaagaagaagacaagagcagacgagggagaagcgggcaaaacagacaaaggaa

SEQ ID NO: 219817 - RNA, 67 nt, Homo sapiens
ccagaccccaacaggcgccccagaagggagaccggaaacgagagaaacgaagacgaagaaacagccg

SEQ ID NO: 219818 - RNA, 84 nt, Homo sapiens
aggcacccccccaaacagccccgggccagcagagcccaaaaggcagagcgaggagagaagaaggagggaaagccaaacaacgga

SEQ ID NO: 219819 - RNA, 78 nt, Homo sapiens
ccgcaaagaaaaaaaccaagcgaacaaagccccaggcagagccccaccgcaagcccggaaacacccccgagggccccc

SEQ ID NO: 219820 - RNA, 75 nt, Homo sapiens
cgggaagccagcgcagccaaagcagcagaagacagcccaagggcccagcaaccaagaggcacaaagagagacgga

SEQ ID NO: 219821 - RNA, 76 nt, Homo sapiens
cgacaacccaaccccaaggcaccagcaaggaggagacgggcaggggaagcagagcggagacggaccacacgcacag

SEQ ID NO: 219822 - RNA, 76 nt, Homo sapiens
aggagacccacccaaacaggaggagcggcaggagaagcaaagcaggaaacaagccaacaaacaacggaaacccaga

SEQ ID NO: 219823 - RNA, 86 nt, Homo sapiens
ggagcggccagccgacaggcaaaagcgcaaaggcggaagggccacgacacgagaaccccaaccgggggcacagacaaccaaaaagg

SEQ ID NO: 219824 - RNA, 74 nt, Homo sapiens
gaccgaccgcaacagaacggacccggcgagcggagaggcacgaagggccaagcagagaaaagaaccacgccaag

SEQ ID NO: 219825 - RNA, 81 nt, Homo sapiens
cgaaaccccgacagcagagagaagggaaaaccaaacaggcccccagaagagcggagagacgaaagaggcgggaaaaccgcc

SEQ ID NO: 219826 - RNA, 83 nt, Homo sapiens
accacaagaagagcaaaccacgaggcaggagagaggacgaaacccagcggcggcagaaccagccggcacaaagccgaaccaga

SEQ ID NO: 219827 - RNA, 63 nt, Homo sapiens
cccacacggccgcccggccaccgcgcccgacgagccgcaggcgagaagccggccccaaacagg

SEQ ID NO: 219828 - RNA, 57 nt, Homo sapiens
aggagggaggaaaacaaccgagggcagaaacacacagcaggacgaaagagacaaaag

SEQ ID NO: 219829 - RNA, 86 nt, Homo sapiens
ggaagggccaaagacccacagacgaggggaacggcgggacagaccaggcacacacgaccaggcccgcaagcggccaccaagcgccg

SEQ ID NO: 219830 - RNA, 96 nt, Homo sapiens
gagacgccaaacgagaccaaaggccagcccacaaccgccaccacccacaccgacagaaaggcacggccgacacagccaagggggaagacacagaca

SEQ ID NO: 219831 - RNA, 76 nt, Homo sapiens
gagccgggggagcggggccccacacccccccgggggggacaacccagaacccgagaccgcaacaagccaacagagc

SEQ ID NO: 219832 - RNA, 80 nt, Homo sapiens
agcgcacaaccgggaaggaacaggcggaaaagaggggagaagagcgagacgagaaagaagaggaagaagagagagaagag

SEQ ID NO: 219833 - RNA, 71 nt, Homo sapiens
gccaccgaggcagagaagcccgcaagcgcagcaagcccccaagcgcaaaaaaaaggccccaacaaaacaca

SEQ ID NO: 219834 - RNA, 81 nt, Homo sapiens
agggcagccgccgaaggaacgcgacggcggcgcccgcagagaccgcgacgaagccagaacagaacacccaggcaacccgga

SEQ ID NO: 219835 - RNA, 85 nt, Homo sapiens
gagaagccaaagcgagggagcaggagaaaacaggagcagggacggggggaaaagcgcacccgggcccgggcgagaaagaagacac

SEQ ID NO: 219836 - RNA, 83 nt, Homo sapiens
gacgggggccggaggggaggggaagacaccaagcgagggagacggagcgccagggcaacagagcagcgagaacgccggagacc

SEQ ID NO: 219837 - RNA, 62 nt, Homo sapiens
gaacaggccgacagcccagccaagaccgagacaggggcccggcaccgcgcccgagcccaccc

SEQ ID NO: 219838 - RNA, 74 nt, Homo sapiens
acgacaaggaggccaggaagaaggccaaacaagcagccagcacacacggaaccacaccaagaccgcagggaacc

SEQ ID NO: 219839 - RNA, 59 nt, Homo sapiens
gacaaaaccagaagcaggggacaagccgagaagggaaacgaggggagccggaagggaca

SEQ ID NO: 219840 - RNA, 51 nt, Homo sapiens
ccgcggacggcgagggaaggacaaaccggcgaccacacacggggacgacgg

SEQ ID NO: 219841 - RNA, 43 nt, Homo sapiens
ccggccgacaaccacgaagccgaaccggaaggacaacccggca

SEQ ID NO: 219842 - RNA, 77 nt, Homo sapiens
cccagagaagacacagggaaaggggacaacagagccgacacagccaagaagcagagcaaaacaggaaaaacagccaa

SEQ ID NO: 219843 - RNA, 81 nt, Homo sapiens
agggcgcgcggaggggaaaggcgccgaaaacaagccggaagccaccagccaaggacagagggcaagagagacccagccaag

SEQ ID NO: 219844 - RNA, 69 nt, Homo sapiens
gagaagcgacagccgcagcggaagaccaccaaaagcaggaaaacgagacggcggaagcgcaagagcccg

SEQ ID NO: 219845 - RNA, 87 nt, Homo sapiens
gggagaggaccgaggaggcagagcaggacgacgagcagaagacacggcgcggaggaccgggccaggaacagaggagcggaaacgcag

SEQ ID NO: 219846 - RNA, 69 nt, Homo sapiens
cggggaaagcaggccagcagaccgacccacagccaccgaggagcaggcggccaaggggacccagcagac

SEQ ID NO: 219847 - RNA, 70 nt, Homo sapiens
caaggggaggagcagcagcgcggcagagcaggggaaggagaagcgagccagagcggaggaggggcacaag

SEQ ID NO: 219848 - RNA, 88 nt, Homo sapiens
gggggacccagcgaccgggaaagcaaggcagaacagaccaagagaggaaagagagagcgccaaaaagagcccaacgcccagaacggcc

SEQ ID NO: 219849 - RNA, 76 nt, Homo sapiens
gagacccggagcccagaaaaggagaaaaagaagccggccggacaggagacaagccggagaacgcccagaccgaaaa

SEQ ID NO: 219850 - RNA, 59 nt, Homo sapiens
cgaaaggggagccccccaaacccggaacaaggaccaacaccaaggaccagccaccgaac

SEQ ID NO: 219851 - RNA, 73 nt, Homo sapiens
gcgagcggaccccgaccccgaggcgagacggaaagacacgcagaccccaccaagaggcggagcgacccggccc

SEQ ID NO: 219852 - RNA, 72 nt, Homo sapiens
cggagggacggcacagggaggccagccggagaagcgagcagcgaagccaacgggggaagacagaaggagacg

SEQ ID NO: 219853 - RNA, 76 nt, Homo sapiens
aacccccgcagaccaaggacacccaagagggcgagcaggacgaagcgcccgccaccaaggcgggccaaaggagaaa

SEQ ID NO: 219854 - RNA, 76 nt, Homo sapiens
aagcgaccaaagcgcacggcagcgagagccaaaagaagcaagggaaagaccaggagccagaaaccaaccaaagagg

SEQ ID NO: 219855 - RNA, 69 nt, Homo sapiens
ggccaagagagccgaacccaccgagccagggaggaacagcagagaacaaaggaccgcaaacgaagacgg

SEQ ID NO: 219856 - RNA, 65 nt, Homo sapiens
gcgggagagcccggcggcggagcggaccgcacaggcgcaggcgcaaggggccaggggaccaggca

SEQ ID NO: 219857 - RNA, 89 nt, Homo sapiens
ccggccgcggggaggacaggccgcgcacaggccggggaagggccaggccgggcagccgccgacgagcagaacccgccacagcacacgaa

SEQ ID NO: 219858 - RNA, 75 nt, Homo sapiens
cgccaagcgggacccccagccaacgaaggaggacgacagcagccgccacaggaccaggcaccaaggaacaccgac

SEQ ID NO: 219859 - RNA, 53 nt, Homo sapiens
gaggaaaacagccgggcagagcagcagaggaggcccaggaaaaggggccaaca

SEQ ID NO: 219860 - RNA, 78 nt, Homo sapiens
cgggagggccacaggaggcggcgggccccgcccgccgaaggcggcggagaaaccaccacaaacacgaggccagcaacg

SEQ ID NO: 219861 - RNA, 76 nt, Homo sapiens
gagcacggggggggccagggagcccggaagagaaaccaggcggggaacaagccagcagcccaaggagaagccccac

SEQ ID NO: 219862 - RNA, 84 nt, Homo sapiens
gaccggaggaggcgggggcgccggcagaggaccaggcaccaccggccccggaagggcacacaggccccgagaaccaagagaacc

SEQ ID NO: 219863 - RNA, 76 nt, Homo sapiens
aaacaacagaggagaaaagcacggaacaaacgccagggaagagagacccccaaacaaaacgccaggggcggggaca

SEQ ID NO: 219864 - RNA, 96 nt, Homo sapiens
gccaccaggcgagggggaccccgaaaggagagccccgggaccagagaacacccgcgagggcccaggccgaaacaaccagagagcacgggaaaggaa

SEQ ID NO: 219865 - RNA, 40 nt, Homo sapiens
ccgggagggaccacggaccccgcgcggaggcggggcggac

SEQ ID NO: 219866 - RNA, 53 nt, Homo sapiens
gcggacccccgcggcgcgcagcccagcagggagaagaaccaacaacggaaaac

SEQ ID NO: 219867 - RNA, 55 nt, Homo sapiens
ggaacagccaggggcccacggaggacaccgaagcgcgaggcgaccaggcggggca

SEQ ID NO: 219868 - RNA, 73 nt, Homo sapiens
accaaaaccagaagaagagagaacagaggccagcaggaccaacaccagaaaggcacacaggcagaaccaccag

SEQ ID NO: 219869 - RNA, 76 nt, Homo sapiens
acgaaagaacaaagcgaagagagaggcagaacaaaaagaccccggcgggacaaaaaagaaggaccggaccaggaga

SEQ ID NO: 219870 - RNA, 57 nt, Homo sapiens
gcccggagacacacgccagggggggcgccagcaaaccagccggcgggcgccacaacg

SEQ ID NO: 219871 - RNA, 74 nt, Homo sapiens
gagcggcacccgccgccacccacaaggcacaacaggaaggaagaaacaagcccaggacgaagaaaacaagaccc

SEQ ID NO: 219872 - RNA, 73 nt, Homo sapiens
agagcgacgacgaccaccacccggggcccccccagccgcaccaccaaggacgcgcgggcggccagcgcccccg

SEQ ID NO: 219873 - RNA, 36 nt, Homo sapiens
acaaggaaccacagccaggcgccggcggcagagcgg

SEQ ID NO: 219874 - RNA, 72 nt, Homo sapiens
caccacggggaaaggccaccacaccaagaacagccacagacggaacaagcagcagggcaacgagacacacgc

SEQ ID NO: 219875 - RNA, 74 nt, Homo sapiens
agaccgaccaccaaaagaaacgagaagaacgaaagagaaacccaaaaaaaggagcaaaagagcgaaagcaggcc

SEQ ID NO: 219876 - RNA, 73 nt, Homo sapiens
gaaggagaggggagaaccccagaagcagaagaaggacaccccacaccgaaacagaccccagagacagaggcag

SEQ ID NO: 219877 - RNA, 75 nt, Homo sapiens
aaccaaaagggacggacaaaggaacaggaccaggcaacgccagcgaggcagcccagaacccagagacaagacaaa

SEQ ID NO: 219878 - RNA, 77 nt, Homo sapiens
gcagggccagcaggccccagcaggggcagagccccgggccagccagcagcagggacgcaccaaaacggacagccgaa

SEQ ID NO: 219879 - RNA, 70 nt, Homo sapiens
agaccgaggaaggagaggcagggggacacgcaacacgggagagagagcgaaaacggaaagcaggggacca

SEQ ID NO: 219880 - RNA, 71 nt, Homo sapiens
gaaggaagaccccccagaacacaaagcaaggcacagaagacaggcaggagaacccaacaccccaaggcgcg

SEQ ID NO: 219881 - RNA, 73 nt, Homo sapiens
cgcgaagggccgggaaagaggcccgcccacaaccgagagcgaaaaggaaaagagcggaacaacgaaaacccag

SEQ ID NO: 219882 - RNA, 83 nt, Homo sapiens
gagaagggagacgacgcgcgggccgcgagcggggcgacccgagcgacaaccggaaagagggagaggggaagccaaacgcaaac

SEQ ID NO: 219883 - RNA, 57 nt, Homo sapiens
ccgacggaggaggagggcgcaaacaaaaaggggaaggagggcgaaacaaaggaccag

SEQ ID NO: 219884 - RNA, 77 nt, Homo sapiens
ccgacgccacaggccaacgaggaaccaaagggagaggaaaagacagggcgcaggccggcggcgaagccgggccaagg

SEQ ID NO: 219885 - RNA, 75 nt, Homo sapiens
gcccaaccccccgaagcaccgcgccggggcccagagcccaggggggcgcagggggggaagaaaagaccgagagga

SEQ ID NO: 219886 - RNA, 75 nt, Homo sapiens
caccaccccgacaccagaccagaaggaccacgggagaagcagaggagccacgggacgaagacggaaacaggggac

SEQ ID NO: 219887 - RNA, 73 nt, Homo sapiens
agaacagaagcacggaagaagcgcaaaaaacgaaggaacacagcacccacccacacccacacccgcgacggga

SEQ ID NO: 219888 - RNA, 74 nt, Homo sapiens
caaaaaagcccgcacagcaggccaagacggaaagcagaggacccagcaaagaaggggcagaccaacaccaccca

SEQ ID NO: 219889 - RNA, 54 nt, Homo sapiens
aacggccgaagaaagaagcaggacgaagaaacagaagccaacaaacagccacgc

SEQ ID NO: 219890 - RNA, 71 nt, Homo sapiens
caccacaacccagcagaccgagaggcggaacagaacgacgaggacaccccccaggcacagccacaccccag

SEQ ID NO: 219891 - RNA, 72 nt, Homo sapiens
gggcccggagaacaccgggcccagccagcagagccacgccagagcaccggggacaccacaccacgacccgaa

SEQ ID NO: 219892 - RNA, 57 nt, Homo sapiens
gccccgggcccagcagcgccaccaaggggaggcaagcaggggggcaaaggaaagaag

SEQ ID NO: 219893 - RNA, 56 nt, Homo sapiens
gaccgagagcgcagacccgaaagaagacgggcacagaagccacccgcaggagggga

SEQ ID NO: 219894 - RNA, 67 nt, Homo sapiens
agcgccagacacggcaaaacaggacggcgaacacaaccagaggccacaaaaagccacggcgaagaaa

SEQ ID NO: 219895 - RNA, 104 nt, Homo sapiens
ccaccaggggaacaagcagaccaccaccgaagagcagcagacaacaccaggccccaacgcaaccagacacggacaggagccagcagaagagagggaaagaacag

SEQ ID NO: 219896 - RNA, 61 nt, Homo sapiens
ggacacagaaagaaaacaaggaagacaagagcgaaaagccagcgcggaaaaggaacagaag

SEQ ID NO: 219897 - RNA, 77 nt, Homo sapiens
cggcaggggccggagggcccacaacccgcagagaccacggcgcgccccggccggagcagccagcaggaagagacccc

SEQ ID NO: 219898 - RNA, 73 nt, Homo sapiens
gaggccccccaacacccccgcacaggaacgcgcggacgccaccagccgggccccgaggaccgagacaggagca

SEQ ID NO: 219899 - RNA, 50 nt, Homo sapiens
agaccggagccagacagcagccaagagccgaagacacaaagcgcaagagg

SEQ ID NO: 219900 - RNA, 79 nt, Homo sapiens
gcgggggcagcgaccgcgggcggcgacgagaggaggacgcccacagccacccaaagacggcccgccacgggccccgcag

SEQ ID NO: 219901 - RNA, 112 nt, Homo sapiens
gggccccccagggccagccccggaggccccgcgcgcgagcccggggagaggagacgcgagcggaacccaagacagaccaggagaggagcagccggaaagcaacgagacgaac

SEQ ID NO: 219902 - RNA, 59 nt, Homo sapiens
caaaccgaaagggagcaaggcaaaacagaggggaagacagcaaggagaccgcccaggcg

SEQ ID NO: 219903 - RNA, 80 nt, Homo sapiens
aaaacacgggcgccaggaacgcggaacagaaccaaaggcaggacagccagcaggccggacgagcgggagaggacaccaca

SEQ ID NO: 219904 - RNA, 64 nt, Homo sapiens
gcaacccggcaccacaaccccgaaggcagggcgggcaagagaagaaagaggaaagggggacgaa

SEQ ID NO: 219905 - RNA, 85 nt, Homo sapiens
ccgggagaaacaggacacgcacgaagagccaggcccccaaagccgaaggccacgaaaacaggcccagcagccacagggaccagca

SEQ ID NO: 219906 - RNA, 51 nt, Homo sapiens
aacgacggggaccagggcggagcccacgccccaggacacgcagaggagcac

SEQ ID NO: 219907 - RNA, 67 nt, Homo sapiens
ggggaaaaaagaccagaaagaaaacaccgaaaagaggcaaaagcaagaagcggagaacagggggcgc

SEQ ID NO: 219908 - RNA, 71 nt, Homo sapiens
aggaaacggaagcgcaaacagagacgaaagcccccgaggagggaacaagccagaccaggaggagaaaacaa

SEQ ID NO: 219909 - RNA, 78 nt, Homo sapiens
agcccagccgaaggagaagggggccgaggccgccggagccccagacaccccccacacaccaccgacgcgcaccacgag

SEQ ID NO: 219910 - RNA, 71 nt, Homo sapiens
agaccgaacgcagaaagcagcccgagccccagaccagcccaggagacgggccgcaaggccaggcgcgcaga

SEQ ID NO: 219911 - RNA, 56 nt, Homo sapiens
gaacccgacaagaccaagacacccaagggaaggccccacagggaacggaccagggg

SEQ ID NO: 219912 - RNA, 59 nt, Homo sapiens
ccgccccgggcacacaccccgacccgcccccccagcggagacagggcgcaaccggccac

SEQ ID NO: 219913 - RNA, 70 nt, Homo sapiens
cgcgccgggagaccgcggaggccgacaggacgggcgccgccccgcgcggcagggagcgaccggaagggag

SEQ ID NO: 219914 - RNA, 75 nt, Homo sapiens
gccacgcccgagagcccgagccacgcagggaaacaaaagagcaaagaagccagcacaagacgagaaaaccggaga

SEQ ID NO: 219915 - RNA, 76 nt, Homo sapiens
cgcaagaagaacagagacagcagccaaacccccagccacggggaaaaggaaggccggaggaggcaacagcggacag

SEQ ID NO: 219916 - RNA, 82 nt, Homo sapiens
cagccacccaggccccgccgcccgggggcgccgcccaccgcgcccgccggccacagacccccgccccggagaaggaggagca

SEQ ID NO: 219917 - RNA, 79 nt, Homo sapiens
agacacgagccccaagaaagggagagaaaagcggaggaccacgaaaaacacacaacacgacgcagaccccaaaaggaag

SEQ ID NO: 219918 - RNA, 58 nt, Homo sapiens
gaaccgcgccccagaaggcagaggaacacaacagaagccagcccagaaagggaaaacg

SEQ ID NO: 219919 - RNA, 76 nt, Homo sapiens
ggaaaagggaaagaaggaggaccgcagcagcaggaaaacaaagcgaacagcacacacagagcaaacagaacagcac

SEQ ID NO: 219920 - RNA, 55 nt, Homo sapiens
aagggccaaagaagggagagccccgcgaacagccccgggcgggagaccaggaagc

SEQ ID NO: 219921 - RNA, 91 nt, Homo sapiens
ccggggcccggagcaaccacccgagcagacggagacacggagcagcggccccggccccgccaacgcgccgccggcaacaggccaacccaag

SEQ ID NO: 219922 - RNA, 75 nt, Homo sapiens
cccggcagacgggcgccaccgacgccgcccaccggcacagcggaccccgcccgagagaacacgagacccgcacaa

SEQ ID NO: 219923 - RNA, 72 nt, Homo sapiens
accgcaggaaaccacagcgagggcaacgaaaagcgggacacccacacagggcacaagaaggccaaccccaaa

SEQ ID NO: 219924 - RNA, 70 nt, Homo sapiens
gccggcagcagaaagcagaacagaggccagaaagaaaaaggccccaagagacgaggacgcgcacaggaaa

SEQ ID NO: 219925 - RNA, 84 nt, Homo sapiens
ccgcgagaggccgcgccgcgcagcccgggggccccaggggagcggcgcggaaccccaggcccagcagaccccgagagaaacggc

SEQ ID NO: 219926 - RNA, 66 nt, Homo sapiens
gaacggcagaccgccaaaaagaagaccaagcccaaggaacagagaccccacgaagagggaaacgag

SEQ ID NO: 219927 - RNA, 84 nt, Homo sapiens
ggccgccgaccaagacagagcaaggccacgacccacgagacaggggcccaagaaaaagcaccggacaccgcccagggcgaagga

SEQ ID NO: 219928 - RNA, 116 nt, Homo sapiens
gcgcggcgggccaaggccgcgccgggcgggacgggggggcggcccggccccgcagagacaccaggcgccgagaaggccagcagagaaacaggcaggagaggcccacaggcgcggac

SEQ ID NO: 219929 - RNA, 78 nt, Homo sapiens
gaaaaccggcccccaacgacaaaaggcgaaccacgggaacaaaggcgaggacaaggagggcaggggacgggacccaaa

SEQ ID NO: 219930 - RNA, 79 nt, Homo sapiens
cgcacagaaaggaccaacacacaagcacaggaaaccaccccacccaacccccgacacagaagaggagaaaacggaacaa

SEQ ID NO: 219931 - RNA, 74 nt, Homo sapiens
gcgaccgcggggcaccagcgcgcccaggacaggagagacaacggaggcaagaaagacggagaagcgagaagaga

SEQ ID NO: 219932 - RNA, 73 nt, Homo sapiens
gacacccagaaaaccgagagggaagccccggaaccagcgagagacaccaagaagcaagaccagagagcaaagg

SEQ ID NO: 219933 - RNA, 59 nt, Homo sapiens
cccacccgcgccgcgacccgccaccggggaccgcaaggccgcggggcccaacaaggcaa

SEQ ID NO: 219934 - RNA, 76 nt, Homo sapiens
aaggggcgcagagcgggccacgccgggggcggagcggagcacacggaggccggagaaggaagggcgcaggaggagc

SEQ ID NO: 219935 - RNA, 61 nt, Homo sapiens
cggcagagaaggagaaggggaccgggcgcgggcaaacagagaccacaccgcgccagacccc

SEQ ID NO: 219936 - RNA, 56 nt, Homo sapiens
cagagaggacggcaccagccaggagaaccgacaccgggaaggcaccaacgaaaaaa

SEQ ID NO: 219937 - RNA, 79 nt, Homo sapiens
gcgcagcagaagaaccacgcagagcgagcggaaacccccacgggcgcaaaggggacaccaagaacgaagcacccagacc

SEQ ID NO: 219938 - RNA, 61 nt, Homo sapiens
gacaaaagggccaaagaagggagagagagacagcagcaacaccccgcaagccccagcacga

SEQ ID NO: 219939 - RNA, 80 nt, Homo sapiens
cggaacaggcacaccccacacaagcacgccaaggagggagaaaacgcaggacacaaggaagaagaaggaccagaggaaaa

SEQ ID NO: 219940 - RNA, 65 nt, Homo sapiens
cagccaggggagcagacaaggccaagaccaaggaaagccaccacacggggacaagagaaaaaaag

SEQ ID NO: 219941 - RNA, 66 nt, Homo sapiens
gaagggcgacacacgaggcgcaccagagaccggacccgccaggaggcacccagccaacaccggaca

SEQ ID NO: 219942 - RNA, 61 nt, Homo sapiens
ggagaggaaaggggaaaaaggaacagacccaacaaaggaaggcagcaacaaccacccaggg

SEQ ID NO: 219943 - RNA, 61 nt, Homo sapiens
cagacccacaagcaagcacaggacccaaggccagccagccccaggcaccagcggacaggac

SEQ ID NO: 219944 - RNA, 68 nt, Homo sapiens
aaagcgcgaaggcaaagcagaggaagaacagaggccagaagccgcagagcagcagaacagacagaaac

SEQ ID NO: 219945 - RNA, 63 nt, Homo sapiens
caagcacaacgcggaagggagaaacgcgcaagccccgaaagaagagggcaggggaagacgggc

SEQ ID NO: 219946 - RNA, 54 nt, Homo sapiens
gccccaccgcgccccagcggccacggagggcaccccgagcccggagaggaccca

SEQ ID NO: 219947 - RNA, 46 nt, Homo sapiens
agaagcgcaaagaagcaacacaaaccccacagacggacaacggaaa

SEQ ID NO: 219948 - RNA, 74 nt, Homo sapiens
gggaggcgaggccggacgcacccggggggcccagcggcggagaaaccaccacaaacacgaggccagcaacgacc

SEQ ID NO: 219949 - RNA, 76 nt, Homo sapiens
aggcccaccggaagagcggcgaaaaagacgacacaagaccgacccagcccacacagcccagaggaggggggaagcc

SEQ ID NO: 219950 - RNA, 52 nt, Homo sapiens
accgcaggacggccacggagccggacagacacgcccggaacagagacagacc

SEQ ID NO: 219951 - RNA, 77 nt, Homo sapiens
aagcagaagaaaagggacgcaagaaacccaggacgagaacagcaacagggaagaagaacaagggacaggaccaaaaa

SEQ ID NO: 219952 - RNA, 76 nt, Homo sapiens
cgggagcggacacgcccgggcagggcccaccccgcgcccgacaggacaggagagacaacggaggcaagaaagacgg

SEQ ID NO: 219953 - RNA, 76 nt, Homo sapiens
gcgggaagaagcgggcgcgggcaggaaacaggaacacgaaagaggaaaaacgcacaagaaaccgaagccaaggagg

SEQ ID NO: 219954 - RNA, 54 nt, Homo sapiens
gcagaacaacgaacagaagcacaaccagagccggccccgacccccgcacggcac

SEQ ID NO: 219955 - RNA, 61 nt, Homo sapiens
caggaaccgccccgagaggaaacacccccagaagagggaccaagaaaggcccagggaccaa

SEQ ID NO: 219956 - RNA, 55 nt, Homo sapiens
aaggaccaagaaccagaaaccccacaagacgaagcagacgggcagaaaaccaggc

SEQ ID NO: 219957 - RNA, 61 nt, Homo sapiens
gagaaacggccaggaagaggcccgcggcgcgccaccacggaaacacaagacagggaaaaag

SEQ ID NO: 219958 - RNA, 67 nt, Homo sapiens
cgggagcgaggaaccagaacgaaaagcgccagaaaggaaaggcgacacaggaggagaaccgggagcg

SEQ ID NO: 219959 - RNA, 76 nt, Homo sapiens
ggccgggcagagggaccacggggagccccacgaggagggcaggagaaaggagaaaaagaggcagggagaagaaacg

SEQ ID NO: 219960 - RNA, 71 nt, Homo sapiens
gaaaaagggcacgacaacgcagaagagcgcaggagcaaccaccagggacacagacacaaccagacagaaaa

SEQ ID NO: 219961 - RNA, 65 nt, Homo sapiens
aacacaccgccaccgaagacgggccccaacacccagagacgaaaggacaaaccggcgaccacaca

SEQ ID NO: 219962 - RNA, 88 nt, Homo sapiens
gcccccgacagccaggcccgcgagaaccccggcgaagcgggcgccccagcccagagagccgccaagagcccgagagcgcggaagccca

SEQ ID NO: 219963 - RNA, 80 nt, Homo sapiens
aggcaggacagcggcccaacagcgccggccacaggcacacggcgaacgacggggaccaccagcggcaaagaagagacagg

SEQ ID NO: 219964 - RNA, 75 nt, Homo sapiens
cagccccaacggcaagcaacgaggaaccagagaaggagaaacagcagggccaaaggcaagaacccgggaaaggcg

SEQ ID NO: 219965 - RNA, 85 nt, Homo sapiens
gaagaggaagggcacgagccgccgacggagcagcacagcagagcccgagggccaacacgcccgggaggaagcgccacaagcggag

SEQ ID NO: 219966 - RNA, 76 nt, Homo sapiens
ggcagacaaaagggccaaagaagggagacgccacgcagagccccgccaggaagacacgccggggaacgaagcagaa

SEQ ID NO: 219967 - RNA, 69 nt, Homo sapiens
gccaacacagccgacaagaaccggaacacccacagggcgacacaccgcagaggcccgaagcgagcggga

SEQ ID NO: 219968 - RNA, 83 nt, Homo sapiens
agccagccgccgcggcagaggcccaggagcggagccagcaggggggcccggcgcccagagggacgccagccgacagcacccaa

SEQ ID NO: 219969 - RNA, 81 nt, Homo sapiens
ccgggagaggcgcgggaggcgaggaggcggcggcggagacggagagcccgagcccagcacaggcccgacaaccagcgccgc

SEQ ID NO: 219970 - RNA, 81 nt, Homo sapiens
gacgaagccgcagcagcagggaaggaacgcaaaacacgggaaaagagcaggaacaggaggccgcgcccgggacccccccgc

SEQ ID NO: 219971 - RNA, 35 nt, Homo sapiens
ggcggacgcacaggcagggccgcaaaaggaaagac

SEQ ID NO: 219972 - RNA, 60 nt, Homo sapiens
gggagagacaagagcacaaccaaagggggggcccgacacaggcacggaaaaagcacgaca

SEQ ID NO: 219973 - RNA, 114 nt, Homo sapiens
acagaaagccagaccagaggagccggcaagcaaaacccgcagaacggcgccaaacagcaaccagaggaaacgaaggacaccgaaggccacgggagagaagcaacaggaaacaag

SEQ ID NO: 219974 - RNA, 79 nt, Homo sapiens
ccgcgccaccgaaggaagcacccagacaccgggaagacgcggcgcgcaacgcaagccccaaccgcgaggagagcgcagc

SEQ ID NO: 219975 - RNA, 79 nt, Homo sapiens
gacacagcacagaccgcccaagccgaggaccaaaccaaaggagcaccgcggacgccccagggcacaccgcgcaccagcg

SEQ ID NO: 219976 - RNA, 53 nt, Homo sapiens
ccggagcagcggacccaggcagccacggggaaaaggaaggccggaggaggcaa

SEQ ID NO: 219977 - RNA, 58 nt, Homo sapiens
ccgaccgcaggcccccccccggccacacccaaccaggcgggaaaacggcacaaggcga

SEQ ID NO: 219978 - RNA, 85 nt, Homo sapiens
acgaaaggagcaagagcaagacaccggacaccgagggcccccaaaaggcccaggaaggacggccccacagagcagcaccacgacg

SEQ ID NO: 219979 - RNA, 72 nt, Homo sapiens
cccacccacgaagggaggaaaagggcagggacagcgcaggcagcaggaccaaaccaaagacggaaaagagcc

SEQ ID NO: 219980 - RNA, 76 nt, Homo sapiens
ggcccgggccgcaccagagcgcccggcccacgacacaggaagaagacagagacacaaggacgccggcaggggaaag

SEQ ID NO: 219981 - RNA, 64 nt, Homo sapiens
cgacaggcgcaagggaaggacagagcaaaaaggcaccacggcgagaaggagacacgccgaaggg

SEQ ID NO: 219982 - RNA, 82 nt, Homo sapiens
ggagccgccgaggagccaggcccccgacccccaccgccggccagcggggaagcgcaggagcggcgggggaggcagcaagcga

SEQ ID NO: 219983 - RNA, 82 nt, Homo sapiens
agaccccgcgccgacggcgccaaacacagggggaggggcgaccccggggcccggccagcacgaccgaggaggggcggacagc

SEQ ID NO: 219984 - RNA, 98 nt, Homo sapiens
cagagcggggcgggccccaggaccagcgcccgacaggacggcaccacccaaccagcggagaaaggcgaccaaagagggacgccggcgggaaggaaccc

SEQ ID NO: 219985 - RNA, 68 nt, Homo sapiens
gcagaccagccagcggcggcccaggagaaccgcgagacaacaaaagaaccgcccacagcaccgcaggc

SEQ ID NO: 219986 - RNA, 84 nt, Homo sapiens
ccccaggccgagaggcccacggcaggggccacagggaagaccgccgcagccagcggaaccagacacacaggagcagccccacac

SEQ ID NO: 219987 - RNA, 62 nt, Homo sapiens
cgcgcaccccaggcaacgccagcaaaaagaaagggaccccaccacgccgggacaccacccca

SEQ ID NO: 219988 - RNA, 80 nt, Homo sapiens
cgccgccgcgccagcggcaacaccacgcccacgggacgaggagagggagggaaccgggcagagagagaggaccagaacca

SEQ ID NO: 219989 - RNA, 79 nt, Homo sapiens
cggaacaggacgccccgaagaaacacagcccaaagaaacacacccccccacaacaaggcccaaagaaaagggaccagaa

SEQ ID NO: 219990 - RNA, 71 nt, Homo sapiens
gggcccaaaaagacgagcaccagaccggcaaagacaacgaagagaggaaagaagcggaaaggagggagcac

SEQ ID NO: 219991 - RNA, 80 nt, Homo sapiens
caggccagagggggccgccgcggcagcaagaacagagagagaggggacagacgagagaacgagaggaccagggaggaggg

SEQ ID NO: 219992 - RNA, 66 nt, Homo sapiens
cccacggggcaacaccccggcacacgaggaccggccgcccgcccccggggccgccccccggaacag

SEQ ID NO: 219993 - RNA, 71 nt, Homo sapiens
aggaccaagaaccaggcacgggaagcggagcccaccgccgagagcgggagcggggcagcggccggagcggg

SEQ ID NO: 219994 - RNA, 70 nt, Homo sapiens
cgacacacaccaaaggaaagaacgaagagaccaaaacagaaagcagcagagcaagcccgagcgcaaagag

SEQ ID NO: 219995 - RNA, 73 nt, Homo sapiens
gaagggaaggaaaaaccgagggaaccaccgacccaggggggaaccaaggccggaccacgacccagccgccgcc

SEQ ID NO: 219996 - RNA, 66 nt, Homo sapiens
cgcgccagaggcacagcgacagcccgcgcagcacagagaaaccaaggaaagcagaggccaaacacg

SEQ ID NO: 219997 - RNA, 97 nt, Homo sapiens
gaaaccaccgcggccggggcccggaagcgcggaagaccccaccccggaagggcacgccagccaaaacggccgcggaaacgaaaacggaagacaccga

SEQ ID NO: 219998 - RNA, 76 nt, Homo sapiens
ccgccaccggaccggaccggacaaggaggcccacaggaccgaaggcccagacagcaacgagccgaggcacacaggc

SEQ ID NO: 219999 - RNA, 73 nt, Homo sapiens
cggccaaggggacgagcaaaggaagcgcgaacagcagcgcagaccgggaacagccaggagggacgcgagccgc

SEQ ID NO: 220000 - RNA, 80 nt, Homo sapiens
gaggccgggccaggaacggcggacggggggcggcagccagccgcaggcccggacggagcccccccggcgccggcagcgcc

SEQ ID NO: 220001 - RNA, 37 nt, Homo sapiens
gcgggaagaggggcgaggacacggaggaccggagcag

SEQ ID NO: 220002 - RNA, 78 nt, Homo sapiens
ccaccaccacaggcagcaccccgggccccagacaacccggggaagccagggcgcgacaagagacggacaaaaagacga

SEQ ID NO: 220003 - RNA, 77 nt, Homo sapiens
cgacggcgcggggagagagccaagcaaccaagccagggcgggagcaggaggagagaaccccaagcccacacgaggcc

SEQ ID NO: 220004 - RNA, 86 nt, Homo sapiens
cggcagcggcggggcggggcgagcagaggacccggcgggcggcccgcgggcaggaagcccggggcggcgacggagcacgacccaag

SEQ ID NO: 220005 - RNA, 80 nt, Homo sapiens
aagagccgcagccaagcccggaagacgcgaccgggcaccggcgggacccgaagagggggaaaacgcagggaagagaggac

SEQ ID NO: 220006 - RNA, 34 nt, Homo sapiens
cacccccaccgccaggcaaagacaagggcagagc

SEQ ID NO: 220007 - RNA, 69 nt, Homo sapiens
cacccaaggagggaggggcagaggagaaccgacgaaccgggaggagagaaacaggagagagacagaggg

SEQ ID NO: 220008 - RNA, 39 nt, Homo sapiens
gaaggggggcgcccccgaggacaacccccaagaaaggga

SEQ ID NO: 220009 - RNA, 74 nt, Homo sapiens
ggaaacggcacacagacagccgccaggcacaaagaaggaaacagaacaggaagaagaacggccaaggaaaggcc

SEQ ID NO: 220010 - RNA, 73 nt, Homo sapiens
accaggcaaacaacccccaacgaccaggcaagggacgcaacaaagcagccagagaaccaggccccaaccacac

SEQ ID NO: 220011 - RNA, 81 nt, Homo sapiens
gcgcggacgccggcccgcgcgcgcaccccgcggacgccacagcgcgagcaggccgggcccgccagggcacgcgcccgccac

SEQ ID NO: 220012 - RNA, 75 nt, Homo sapiens
cgcacaggcccggccaggcacaagggcaccacaaaggcaaccagggagaggagccgcaagccgaacaaggacccg

SEQ ID NO: 220013 - RNA, 75 nt, Homo sapiens
cgggcgggaggcccggccagccgacgcaggcccaccggcggccagccagaggcacggacgaccccggagagagcg

SEQ ID NO: 220014 - RNA, 75 nt, Homo sapiens
agaacccgaaaacacaaggacaccaggcacgcagaccaccccacgaagaccaagcccagaaccagaagaaaacgc

SEQ ID NO: 220015 - RNA, 48 nt, Homo sapiens
gagcacgaagcaaaacgccccccacagcagaccggaaaaggagaaaga

SEQ ID NO: 220016 - RNA, 79 nt, Homo sapiens
ccgggcgggggcccggaggaccggcagccggggggaagacaaggaggcggaagaagaaagacggccaaaacaggagaaa

SEQ ID NO: 220017 - RNA, 67 nt, Homo sapiens
acaaggggacgcgcagcaggagaaaacagagcgcaaaaacaggaaaagcaacggcgcaagaggcggg

SEQ ID NO: 220018 - RNA, 54 nt, Homo sapiens
caagaccacacggaccagcgccgaagaaagacgagaggacccgaggaggaagcg

SEQ ID NO: 220019 - RNA, 56 nt, Homo sapiens
ggacccccccacagaaagccagagcccgggaggagcggggacacgaggacccccca

SEQ ID NO: 220020 - RNA, 74 nt, Homo sapiens
agcacgagagccaacggcacggggcaagaagccaaaacgagaaggaggagcgaggcccggccacaacgacagca

SEQ ID NO: 220021 - RNA, 71 nt, Homo sapiens
acgcggccgagacaaaggcaccaggccaccacagaaacaaaagcaacaaagaggggcagccaggcggagac

SEQ ID NO: 220022 - RNA, 76 nt, Homo sapiens
aacagagcacgcgaccagcgaggagcaacacaggagccggagaaaaggcaagacaacgcagaaaccaaagaaaaac

SEQ ID NO: 220023 - RNA, 68 nt, Homo sapiens
aagaggaccaaaccggccaggcgagagcaaaagaaagagacaaccaaccgggcaagcgcccaccggac

SEQ ID NO: 220024 - RNA, 109 nt, Homo sapiens
accgacgcggaaaaaaagacccaggaggagcaacacgggaccgacaaggacgaggggaccaccccaacaacagccagccccgagcgcccagaccgcagggccgcagaag

SEQ ID NO: 220025 - RNA, 71 nt, Homo sapiens
acaccagccggcgccgcaccaccccggccgagcgccacgggacacacagaggaaccgggccgggcagagcg

SEQ ID NO: 220026 - RNA, 77 nt, Homo sapiens
aaagacccaaaaaggacccaccaggccaaggagaaggccaagacaagaacccagaaaggccgagcgccacacagaga

SEQ ID NO: 220027 - RNA, 37 nt, Homo sapiens
cgcggcccccgaccgggagacagccaagccgaagccc

SEQ ID NO: 220028 - RNA, 66 nt, Homo sapiens
ggaccacagagggggggggaaagggcgcagggaaaccgaccaggcaagggaggaagccgccgcgag

SEQ ID NO: 220029 - RNA, 67 nt, Homo sapiens
ggagacgacaaagccccgccaaggggggaggcaggaaaaagacacaagacagcaggaccgggaccag

SEQ ID NO: 220030 - RNA, 57 nt, Homo sapiens
agaccccgcccggaccgcagaagcaacccaggcacccccaacaggcacccacccccg

SEQ ID NO: 220031 - RNA, 76 nt, Homo sapiens
gcggaggccccggagagaggcggaagccggcgagcaaggggaagcccagccgcagaccgcacaaaccaagaaaaaa

SEQ ID NO: 220032 - RNA, 69 nt, Homo sapiens
caaagaaacaacgacccagaaccgaccgggcagcggccgcaaaacggagcgaacacaggcgagagcgaa

SEQ ID NO: 220033 - RNA, 71 nt, Homo sapiens
ggccccccgagacggaggagagggccgcaagaggaaggggaggagggccaagagccacggaggagacacca

SEQ ID NO: 220034 - RNA, 75 nt, Homo sapiens
ccgagacccaggggggacaggccggaggggcccccgcgcagacacggccggagaagcccggaccagcaccaagcg

SEQ ID NO: 220035 - RNA, 77 nt, Homo sapiens
aagaggcgggagagcccgccgacagcgcgagcgacccgagccacaacgcgaccaaaagacgggagcccagcaaagga

SEQ ID NO: 220036 - RNA, 93 nt, Homo sapiens
gacgagccgcggggccgccccccgaagcccagggagagcaaggcgcgcggcgacccgcccgaagagccaaccacaggagggaaaccacgcagg

SEQ ID NO: 220037 - RNA, 120 nt, Homo sapiens
cgccccgcgagcacagagcccgccgccgaccgccgcccgccacacccgccgccagcccgggcgcgccaggcacagccaagagcggaccggcagcggccagcgcagcggccggagcagaca

SEQ ID NO: 220038 - RNA, 73 nt, Homo sapiens
cggcccagccccagaaaaggaacacaaggaaggacgagcccccgcggagacagcccgaagaacccgaacgcaa

SEQ ID NO: 220039 - RNA, 76 nt, Homo sapiens
caggcgaagccaaagcagcacgcgaggaggaaaggcaccccaccaggagaagacgacaccggggaaggggaaaaga

SEQ ID NO: 220040 - RNA, 78 nt, Homo sapiens
ggcggggcggcccaccaacaggaacagggcagacgagcggaggacacccaacccgggacaccgagagccggcagaaaa

SEQ ID NO: 220041 - RNA, 72 nt, Homo sapiens
ggagaaaagccggacacaggagcagcggaaggagcaagagccagccagacagacagcccaaagacagaagca

SEQ ID NO: 220042 - RNA, 76 nt, Homo sapiens
gacccgagcggccaaagaagcgccccggaggcccgggagggagaggggaagggacccaagagccggggcggacaag

SEQ ID NO: 220043 - RNA, 81 nt, Homo sapiens
ggcggggagcgcagagcgggcgagcgcggcccagagggaggcacaacagcgaggacaccaccgagcccccaccgcggcagg

SEQ ID NO: 220044 - RNA, 72 nt, Homo sapiens
gccaccagggggggagcgaggccaagcagagaaacgacaaggagacgaagaggccaaagggaccgaacagcc

SEQ ID NO: 220045 - RNA, 80 nt, Homo sapiens
cggaccagccgcaaagagccagaggggagacacgccaaagccccaaggaaaggaagcgacggcgcacaggaacccccacg

SEQ ID NO: 220046 - RNA, 69 nt, Homo sapiens
cagcagagcagcacaggagccgcagaaagcaacaaagcgagagcacaagaaaacagccccgagcaccag

SEQ ID NO: 220047 - RNA, 62 nt, Homo sapiens
agaagagcgccagacccacagagaccggccagccacagagcagagaaagccggaccagcagg

SEQ ID NO: 220048 - RNA, 101 nt, Homo sapiens
gcagccaaaggcacgacgcccgggaagagggggagcggccagcgagagccagggcccaaagaaccgcaccacgccacgggaaggcaggcaagagcggggag

SEQ ID NO: 220049 - RNA, 79 nt, Homo sapiens
acaggaggcaggccgccggccgaaggcccgagcgcccgaggcgcgggaggggggaccgggagaagacagaggagccaga

SEQ ID NO: 220050 - RNA, 65 nt, Homo sapiens
aggaccgggcggaggccgccaagacggcccaacgcagccaggcaagaagacccggagcacacagg

SEQ ID NO: 220051 - RNA, 71 nt, Homo sapiens
gcagcccccagagcgggaccacagggagaagcaggagaccccggcgccgaggcaagaggggagagggcggc

SEQ ID NO: 220052 - RNA, 69 nt, Homo sapiens
agccaagacggcaaagccccccagaagaccagaccgcagaccagacacacccgaaacacggacaccccc

SEQ ID NO: 220053 - RNA, 39 nt, Homo sapiens
gccaagcagagcacaggcaagagaagccaacaaagacca

SEQ ID NO: 220054 - RNA, 81 nt, Homo sapiens
gaaaaccccaccccgcggccccacggcccgccaagagccagaaaggggagcaagaagaaagagcagggaggagggagcgac

SEQ ID NO: 220055 - RNA, 74 nt, Homo sapiens
cgcgggcccgaggcgcaccaagggcgaaggagccggcccaaggaagcggcgcgggcccccccacccccaagaac

SEQ ID NO: 220056 - RNA, 79 nt, Homo sapiens
cggcgaaggaagaggagggcaagaagggcaagaaggaaagacaaggccccagcagcaggcaaagggaaggcacagcgga

SEQ ID NO: 220057 - RNA, 77 nt, Homo sapiens
gggcgggacaagcggcaagacagaacagggaggacaagaggaccaacgaggaagcaagagcacagacaaacccaggg

SEQ ID NO: 220058 - RNA, 74 nt, Homo sapiens
cggcaagacaacaggaaaacagcaaagaaaacagaccccacagaaaagggcggaacacggaaggaaacaagagg

SEQ ID NO: 220059 - RNA, 79 nt, Homo sapiens
gccgggagccggggagggcgccgagaggccgggggcgcgggcggcgaggagaaggaaagagcagcgaaacaaagagaac

SEQ ID NO: 220060 - RNA, 80 nt, Homo sapiens
gacaacggagaccagaccacgcagccacgcgggcgagcggcggggagcggcgaagccgcgggcgagaggggcgaggaggc

SEQ ID NO: 220061 - RNA, 81 nt, Homo sapiens
ggaccgcggccgagcagccgggcggccgcgcgagccggcggcccggagggggcggcgggggcgaccacgaccgaagagcca

SEQ ID NO: 220062 - RNA, 39 nt, Homo sapiens
ccaggccacccaggggcgccaggagggagcccagccgga

SEQ ID NO: 220063 - RNA, 82 nt, Homo sapiens
cgacagacaaagaagaccgcacacaagccaacaacaagggaaggcagaggagagagcgccagacagccggggcgcagccgga

SEQ ID NO: 220064 - RNA, 96 nt, Homo sapiens
cacaagaagaagagccgcccccaccagacgaggccaccagccagggaacgcaccaacggacaaccaggcacgggacaaccagcacggagcagaggg

SEQ ID NO: 220065 - RNA, 89 nt, Homo sapiens
gagcgcacgaccgcagccaggacgaagccaggaaggccaggcagaacagaccaagagaggaaagagagagcgccaaaaagagcccaacg

SEQ ID NO: 220066 - RNA, 81 nt, Homo sapiens
gccgggaacccgccagcaccaccgcccaaccccaggaccgacagcccccaggaaggaggcggcggccgcgagagcccagcc

SEQ ID NO: 220067 - RNA, 75 nt, Homo sapiens
acccaaaacagaagaggaagcaagcacgaagaaaaaccacaacaaggcaaaccgacaccagcgacacaagcgcga

SEQ ID NO: 220068 - RNA, 60 nt, Homo sapiens
cgcgggcgagcggcggggagcggcgaagccgcgggcgagagggaacaggcacgccccacc

SEQ ID NO: 220069 - RNA, 59 nt, Homo sapiens
caggacccccagaagccagaaaggggacgcacagaaaagacaaaacaaagacgcgccac

SEQ ID NO: 220070 - RNA, 80 nt, Homo sapiens
acaagaagggcaaagccgaagacagagcgggagccaccagcgccaaagggaagccaggagcccgggggcacggggagaag

SEQ ID NO: 220071 - RNA, 89 nt, Homo sapiens
cgcgggaggggggccgggagccgcagggcaggagaaacccagcgggcccagagacgcagcgggaaaaccaaggcaagccaggcgaggga

SEQ ID NO: 220072 - RNA, 70 nt, Homo sapiens
cgcaaccgcccagaaacgcgggagagagagcaccgcagagggagaagaaccaacaacggaaaaccagcgg

SEQ ID NO: 220073 - RNA, 84 nt, Homo sapiens
gcaacaccccgccgacccacaggccgacaagaaccccgcagccacccacaggggcggccgagcccgggggaggccccggagcgc

SEQ ID NO: 220074 - RNA, 67 nt, Homo sapiens
accccacccgcgccgcgacccggaccgaaggagaagaaggagaaggggaggagaaggcaagccggaa

SEQ ID NO: 220075 - RNA, 49 nt, Homo sapiens
acgggaggcgcagaaagagaggagcaccgagccagcaaggggcagggcg

SEQ ID NO: 220076 - RNA, 73 nt, Homo sapiens
aaccaggccaaggagaggcaagaaaccccggacagaaggcacggcgaacaaagggcaacaacacaagaacgca

SEQ ID NO: 220077 - RNA, 55 nt, Homo sapiens
ccgacagccgcagaacagggcccagaggagacaggggaaccaggaggaggacagc

SEQ ID NO: 220078 - RNA, 70 nt, Homo sapiens
ggccggcggccggaggagcggcgcgcgcgcgcgcgcggggccccgcaggcgaacaagaggcgccagcggg

SEQ ID NO: 220079 - RNA, 59 nt, Homo sapiens
cgaaggaggaggacaaagagcccccacgagcccgcaagcccccagaaacccacaaagcc

SEQ ID NO: 220080 - RNA, 81 nt, Homo sapiens
gggcacacagccaccacagcaccgaagccgggagagggccgagggagcaaacacaggaaggaagaagccaaaagaaggaga

SEQ ID NO: 220081 - RNA, 80 nt, Homo sapiens
cccgcgcccgccgcgggagagagcgcaaaaggaaacaaggcccccacggagccaccggccaaggcccaccccacagcacc

SEQ ID NO: 220082 - RNA, 43 nt, Homo sapiens
accggaacaacagcgaaacggcagagcaacacaccaggaagca

SEQ ID NO: 220083 - RNA, 77 nt, Homo sapiens
gcgcggaaacgcaagacgggccgagaagcagcgcgaggaacagcaaagagagggcgagaacccggaggagggcagcc

SEQ ID NO: 220084 - RNA, 78 nt, Homo sapiens
gaaacacccgaacagcgacaacgaacgaggaagggagcgggccagagacaaacaccgccccgaagacccaaaggcaag

SEQ ID NO: 220085 - RNA, 64 nt, Homo sapiens
aggcgaggacccaccgcccccggcccgaccagggcggccaccgagaggaagggcaggagggaac

SEQ ID NO: 220086 - RNA, 75 nt, Homo sapiens
cacccgagcagccagagcggaccggggcagaccaaacggcaaggggacgagggaccacagcggcggcgggaggaa

SEQ ID NO: 220087 - RNA, 71 nt, Homo sapiens
gaagcacaacaacaggaacccagacagcgcggacgagagaggagcgcgggccgagagcggagagcgggacg

SEQ ID NO: 220088 - RNA, 77 nt, Homo sapiens
ccgggccgcgcgcgcgaggcggagaggacaacacaccgcccaaccgggacaaagaaaggaaaagagaagaaccggag

SEQ ID NO: 220089 - RNA, 74 nt, Homo sapiens
aagcccagagcaggaaaggaggccggaccgaggaaccaccaagaggcaacaccagagacggacacgggaaaaag

SEQ ID NO: 220090 - RNA, 51 nt, Homo sapiens
aaaaaacagagcacacggaaagacgaagaagccaaaaccagaagaaggaac

SEQ ID NO: 220091 - RNA, 88 nt, Homo sapiens
agaaagacagaagaagagcaccgacgcagaccggacacgaagcagaggagccagacccaaagcccagacacaagacacggagccccaa

SEQ ID NO: 220092 - RNA, 78 nt, Homo sapiens
gacccacacgaccagcgccggaggcacccagccgccgaaaccaaagcagcgcagggaccccagcccagagcacacggc

SEQ ID NO: 220093 - RNA, 75 nt, Homo sapiens
caggcgggcgaacaggaccagcaagggacagagcagaagggcgaaagaccgggccgcagaagaggccccaacccg

SEQ ID NO: 220094 - RNA, 84 nt, Homo sapiens
ccaccccaaccccccgaacccccaggcgaaaaccaaagcagcgagagaagagacgcccggcaaacaagcacgagaagacacaag

SEQ ID NO: 220095 - RNA, 71 nt, Homo sapiens
cgccacaccaaggagcgaggcaccaagcagaagagaagaacggacacgcgaagaggaagaaacgagaacgg

SEQ ID NO: 220096 - RNA, 66 nt, Homo sapiens
gagggaacccacccccacccagcccaagggggcccaggccggaccaccggggaaaaccacagccca

SEQ ID NO: 220097 - RNA, 69 nt, Homo sapiens
aagcaaggaaaacagcggcaacaccaggcgggagcgagggggcggacgaaggacagagagggacgggca

SEQ ID NO: 220098 - RNA, 74 nt, Homo sapiens
ggggcggcccaccaacaggaacagggcagacgagcggaggacacccaacccgggaaggcaccaaacggacacaa

SEQ ID NO: 220099 - RNA, 77 nt, Homo sapiens
caaaacagaaacagacagacaagacggcaggacaggagggagcgccacagagcaaggggagcggaggccaaggggag

SEQ ID NO: 220100 - RNA, 69 nt, Homo sapiens
acccagcacaccccagcagaaagacaaagcaccagaaaacaccgggaaaggcccaaaccggcgaaaacc

SEQ ID NO: 220101 - RNA, 103 nt, Homo sapiens
gaacggacgacggcccaacccgccagacccaagggggcagagaggggccggagcgggcggggcagccagcccgcgggggcgaccccggcgcaggaaggcaggg

SEQ ID NO: 220102 - RNA, 74 nt, Homo sapiens
agaccgcaggacaccgggaccgggggcgcagcaccggcaacaccaacagcagaagaggaccagcacaagcaacg

SEQ ID NO: 220103 - RNA, 79 nt, Homo sapiens
gccgcagccaggagaggcgggccagcggagccgggacggaggaaagagcacacgggagcgcccccgagagaaccaaacg

SEQ ID NO: 220104 - RNA, 75 nt, Homo sapiens
gcagggagacaaaagagaaagcaggccacgaaaacacaaggaaaccgagaggaagaaaggccagaacgaacggaa

SEQ ID NO: 220105 - RNA, 54 nt, Homo sapiens
acgcagaacgggcggacgggcgcccagccagagccggaagagcgcagaagccgg

SEQ ID NO: 220106 - RNA, 53 nt, Homo sapiens
gaaacccgggaagaacgggaaaaggggagcgaagaaggaccgcagaccgaacg

SEQ ID NO: 220107 - RNA, 77 nt, Homo sapiens
cagggaaggggggggcccagcgccccaaccagagcgaagagcgccgcgaggcgagcccccgccccgggaaagcggcg

SEQ ID NO: 220108 - RNA, 79 nt, Homo sapiens
gggcgaccagcaacaacgagagggggagagaaaacgggaggcccaaacgccggcccgcagcaacagacagaaacgacag

SEQ ID NO: 220109 - RNA, 87 nt, Homo sapiens
gacccccaggcccggccgggccaagaagcaggccggggaccaaggggacgcggagcggacggcggaagggcccaccacgcggccgag

SEQ ID NO: 220110 - RNA, 73 nt, Homo sapiens
gaaaaaggaagcgaggcaaaggaaaaaaagacaccaccaggagcgaaggcaacagacacgcaacagaaacacc

SEQ ID NO: 220111 - RNA, 70 nt, Homo sapiens
ggagcagaaccgaccacagccgggagcaggccagcgggagcaccacagaacacgaccaggaaagacagac

SEQ ID NO: 220112 - RNA, 66 nt, Homo sapiens
acggccgggccacccacaggccgcaaaggccccccacccggcgccccgggccagcgggacaccagc

SEQ ID NO: 220113 - RNA, 74 nt, Homo sapiens
cccacacggagaccaggcaagcagggaccggagggaagaaggcccgagccaaaaaaaggcaggagcacaccaga

SEQ ID NO: 220114 - RNA, 73 nt, Homo sapiens
ggagaagaaagaagaaccgaaagacagaccagcaacagaacaggagggaagaggggcaaagaaaccggagcgg

SEQ ID NO: 220115 - RNA, 70 nt, Homo sapiens
acaaagacggggaagccggaaaaagcagggcacaaacgggagccacggaaaccgggaggcaaacgacggc

SEQ ID NO: 220116 - RNA, 42 nt, Homo sapiens
ccggaccaaaaggcgaaaagacagcaaaccggacagaaggac

SEQ ID NO: 220117 - RNA, 78 nt, Homo sapiens
gacgcaaaacaccaaaaggagaaggagaacaggaaacagcaacaaaagagggcaccagaagaaaaacacagggacccc

SEQ ID NO: 220118 - RNA, 63 nt, Homo sapiens
aacgagacgcgaaccaggagagaagaagagcccccaagcaccacggagggggagagcacgcca

SEQ ID NO: 220119 - RNA, 69 nt, Homo sapiens
gcagacgaaccggaacccgcgggacacagggagggggccccaagcgagaccccaggagcgcacacagag

SEQ ID NO: 220120 - RNA, 59 nt, Homo sapiens
gagccgcaggaacgacaaagacgaacagggccagggccggagcgagggagagcaggaac

SEQ ID NO: 220121 - RNA, 63 nt, Homo sapiens
aaagaaaaggccacccaagaaccggccaaagcagaagggagcggaaagaaagcggaaagaaag

SEQ ID NO: 220122 - RNA, 62 nt, Homo sapiens
agaagcaagaaggcccggacacagcaaaccgggccacaggggggacaaaggccgcgaccccg

SEQ ID NO: 220123 - RNA, 86 nt, Homo sapiens
ccgacgcggacaagggcaaggcggcccccggagcaccggccacacacaggacaagagcgaagccacacgcgggacgacgccaccgg

SEQ ID NO: 220124 - RNA, 70 nt, Homo sapiens
gcggcgcgggggaggaacaacaacggcaacagcggcaaaccgacacgaaaacacagcacaaaaggaggaa

SEQ ID NO: 220125 - RNA, 48 nt, Homo sapiens
cgcgagggcggacagcggggcccgcggaaaacaggagagaagaagagc

SEQ ID NO: 220126 - RNA, 72 nt, Homo sapiens
cacagaccccagcgagagccggggccggggcccacggacagcccagccaagcgccgaccggcaaaagggccg

SEQ ID NO: 220127 - RNA, 75 nt, Homo sapiens
ccgaggaggcgagcagccgggagacaccgccaccgccagcgcaagccccggggcagagacacaggacacccaccc

SEQ ID NO: 220128 - RNA, 73 nt, Homo sapiens
aacaccacagaagacaggacacaaagcacgcgacaggaaccagagcacaggggaggggaagcaacagggcggg

SEQ ID NO: 220129 - RNA, 77 nt, Homo sapiens
gccggaaagggaaaaccagagccgcgcaggagacggagcgcgcgcgggaagaggcccgacccgaggagcggaaaacc

SEQ ID NO: 220130 - RNA, 84 nt, Homo sapiens
gaggagcagcagaggggcgagcaggagcgaccgcgccaaacagggcggagaacggaaaagcaccaggaagcagagaggaccgca

SEQ ID NO: 220131 - RNA, 54 nt, Homo sapiens
gagaccgccacacaagagaagacccaccgaggaggaggaggccaggccagaggg

SEQ ID NO: 220132 - RNA, 61 nt, Homo sapiens
caccgggccaagggcggcccccaaagcgcgggaaagagcagaaaccaagaagccaagggaa

SEQ ID NO: 220133 - RNA, 83 nt, Homo sapiens
cagcggcagcacaggcacacagcaaagagcgccagaccaaaacgaagaagacgagccaaacccaaaaaggaaggggggggagg

SEQ ID NO: 220134 - RNA, 60 nt, Homo sapiens
agcggggcccggaggagggggcagaggccgacgccagccagagagcgaaggagaggacag

SEQ ID NO: 220135 - RNA, 80 nt, Homo sapiens
gcagaggacacgaggcggcgggcggagacaggaccgcggcgagcaaggggaaagccggggccccggggacccgcggcacg

SEQ ID NO: 220136 - RNA, 83 nt, Homo sapiens
aagccgaggcagaggcgacacaagaagagggcggagcggagacgggagaagaaaagacgcgcggcgcccacaagaaaggcagc

SEQ ID NO: 220137 - RNA, 55 nt, Homo sapiens
agcagagagcgggaccagagaaacggcgaggaaagagaggagccccggaaagaaa

SEQ ID NO: 220138 - RNA, 56 nt, Homo sapiens
acccaaggaccacccccacaggccccaggaaccacaggagaaggaagccaacaccg

SEQ ID NO: 220139 - RNA, 63 nt, Homo sapiens
ggcagagccaaccaggacacaaacagccagagaaagacgagagccgaggcgccggaaacaaca

SEQ ID NO: 220140 - RNA, 72 nt, Homo sapiens
ggggaggagccgcagcgccagcaccagaacaacggcagaaaaggcccaacacgcacaccggaaacacacgga

SEQ ID NO: 220141 - RNA, 50 nt, Homo sapiens
agcgacgacagaagcagccgaagggacaaggaggaaaacaagaaaaacgc

SEQ ID NO: 220142 - RNA, 50 nt, Homo sapiens
agcacggcgggcgaaacaggcgccacaggagccgcagaagcaaaggcacc

SEQ ID NO: 220143 - RNA, 79 nt, Homo sapiens
gaagacgcaacagcccacagaggcaccaaaccagggccaccaggagagcccccaccagcacagaaggccggccccagcg

SEQ ID NO: 220144 - RNA, 77 nt, Homo sapiens
ccgaggccccggacccaagacgcgcgagcacacaggagaagcaagaggcgcaaagaaggcccggccgcagccacgaa

SEQ ID NO: 220145 - RNA, 70 nt, Homo sapiens
cgcacgaacgcaagaaggaagggcgggaagcggggaaaggaaaacaccagcacaccaaagaccggggcca

SEQ ID NO: 220146 - RNA, 74 nt, Homo sapiens
gagaagccaccaccggaaaacccggagaacacaggagcgccccaaggcacaaaagaggaggaaagaagagcagc

SEQ ID NO: 220147 - RNA, 69 nt, Homo sapiens
cggccgaaacagaaaacaagagaccacagaagggacccccggggggcggccccaggaacacccaagccc

SEQ ID NO: 220148 - RNA, 68 nt, Homo sapiens
aacccgcccggaggcggagaaagaagcccagagacagcgcccaaggggcggcccacggaacgagggca

SEQ ID NO: 220149 - RNA, 54 nt, Homo sapiens
acggcagaccgcagaacacccagccaggggagcacgccaggcgagcggcggaag

SEQ ID NO: 220150 - RNA, 58 nt, Homo sapiens
ccgagggcgaggcggacgcgcggcgcgcagagcccagcaaaaagaggagaagcacccc

SEQ ID NO: 220151 - RNA, 77 nt, Homo sapiens
ccaaggcccaccgagccgcgcaccccgagcgccgggacagagcgaagaaccccccaagaagacgaaacccccgggcc

SEQ ID NO: 220152 - RNA, 87 nt, Homo sapiens
caacaagaggaaagacacaccaccaagaagccagcaagcggccaggaagaaaacaccggagcccaagacaccaaaacagacgcaggc

SEQ ID NO: 220153 - RNA, 76 nt, Homo sapiens
cacgggcacaacccagccaccgagaaggcacggcaccagacagaagacacggcccagccacagaaagaagacaccc

SEQ ID NO: 220154 - RNA, 83 nt, Homo sapiens
ggaccggcggcgcggaggagcgaggcagcgacaggacgggaacggaaggacccagcaagaaacgccagccacgcaaaccaaac

SEQ ID NO: 220155 - RNA, 79 nt, Homo sapiens
gcacccaaccagagaggaagacaacgagcaacagaagccaggcaaggaacgcggagaaacaaaaggcaggaaaggccaa

SEQ ID NO: 220156 - RNA, 82 nt, Homo sapiens
aaacaaaacaaaagagaagaagaaaaagagaggcaggagggcgaaaagcagaccagcaacaggcccgacaggcccccagagc

SEQ ID NO: 220157 - RNA, 38 nt, Homo sapiens
ggaggggaacgggccgaacgcagaccacaccgacccaa

SEQ ID NO: 220158 - RNA, 86 nt, Homo sapiens
ccaaggacacggcacaccgaccgacgccagccaccagaaccccgcagcagcagcgaggacacaagcccccccgggcccaaggcgcc

SEQ ID NO: 220159 - RNA, 49 nt, Homo sapiens
aaggaggacgaggcaagggaacagaaggagcagaggcggaagacagaac

SEQ ID NO: 220160 - RNA, 89 nt, Homo sapiens
caaggacggcgggccgcggggcaggcgggaccgccggccggaacggggggcaggaccgggccagacgcgccccaccaaccgcgggacgg

SEQ ID NO: 220161 - RNA, 72 nt, Homo sapiens
gagaggagaggcggggcaggggaggccaggagaaggaaggagcaggaggccaagccagggggcaaaccaacc

SEQ ID NO: 220162 - RNA, 75 nt, Homo sapiens
agaccgacagcaacaagaaagaaacgggcacaccaacgaggaacagggccgggcaccacaagccgaacagccagc

SEQ ID NO: 220163 - RNA, 65 nt, Homo sapiens
aaaaaaaggaccccgaaaaagcaaggaacagaagccaccgcaaaaaaggagcaccgcacccaggc

SEQ ID NO: 220164 - RNA, 75 nt, Homo sapiens
gcccagacggccaccggcgggaggaacaaaaggaccagcgggagcaggagaagagacacaccacccggcaagccg

SEQ ID NO: 220165 - RNA, 86 nt, Homo sapiens
agaaggagcccccggggggaaacacacggaaaagcccgaggacaacagaagcagggcccgagcggaagaggaaagaaggagccgca

SEQ ID NO: 220166 - RNA, 82 nt, Homo sapiens
aggagaccgcagaggacagcacagagcaccaccgagcccgcgcaccggccgcccaccccaccagccagcgggggagagagcg

SEQ ID NO: 220167 - RNA, 79 nt, Homo sapiens
caggagagggaggcaggccgaggcacggagcgcccccacaggagagccagacggaaggcacgagggccgacacgccccc

SEQ ID NO: 220168 - RNA, 80 nt, Homo sapiens
agacaagcacgagacacaagacacccccccagaggaacgagagcagccgcacccacacacacgcgcggccaagacgcagg

SEQ ID NO: 220169 - RNA, 76 nt, Homo sapiens
gaaaccagcacaggccagaaggagaaggggcgcacgcggcacagcgcagggcagagcaccccagcaagccaagcaa

SEQ ID NO: 220170 - RNA, 61 nt, Homo sapiens
caacccggaaagggaacacaaccacgggaaccaggccacgaagacggcaaggaggaaagga

SEQ ID NO: 220171 - RNA, 74 nt, Homo sapiens
ggacgccgccgggaggggcccagcaggcgcagcagcaagagggaaaaaggcaacgggaccgcggcaaaggccaa

SEQ ID NO: 220172 - RNA, 49 nt, Homo sapiens
ccaaacggacagaggcgggaagaaaacgccagagaagcagagcagcccg

SEQ ID NO: 220173 - RNA, 81 nt, Homo sapiens
aacaagaacacgcaagggagcgcccaacacggccgccgaacccgggaagcaaccccggcacccagagagcagagaagcgac

SEQ ID NO: 220174 - RNA, 77 nt, Homo sapiens
gggggacaaaaaagaccagaagaggaggaggcaacaggaagaagaaaccgcgaacagcgcaccacagaacacccccg

SEQ ID NO: 220175 - RNA, 68 nt, Homo sapiens
gagccagaaaacaacagaagaacaaacagcagcccccggaaaaacggccgcgcggccgcagcgacacc

SEQ ID NO: 220176 - RNA, 71 nt, Homo sapiens
ccacccggcaacaaacaccggcccaggaggagggcccggggaaggagagcccggacccacccaccggccaa

SEQ ID NO: 220177 - RNA, 79 nt, Homo sapiens
caagggacaaaacgcagacgaccaccacacacggagcggaaccaggcgcacgcgggacagagcacccgaagcgcccagc

SEQ ID NO: 220178 - RNA, 103 nt, Homo sapiens
ccggcgccgcagcccgggcccaggccccggcagcgccgggacaagacaagagaagcggaagcaaaaacagggaagagaacccaccccagaaggaggcaccggg

SEQ ID NO: 220179 - RNA, 66 nt, Homo sapiens
ccccgccagaacacccaggcgacaggaaaaagcaaaccaaagaagcaggacacaagaaaagaaaaa

SEQ ID NO: 220180 - RNA, 74 nt, Homo sapiens
aaccaagggacgcagggcggccagcaggggaggaaaagacacacccggagaacgacgacacaacacagcaccaa

SEQ ID NO: 220181 - RNA, 44 nt, Homo sapiens
cccgggccgggccccaccggacgggaccagccaacgcaggcgga

SEQ ID NO: 220182 - RNA, 75 nt, Homo sapiens
cccaaggcggcgcgggagcccggcgcggcaagggccccagcccccgcagaaaggaaggcaggcagccacaccgac

SEQ ID NO: 220183 - RNA, 52 nt, Homo sapiens
gccggccagcgccggaaaccaacaaacaacaggcacaaagagagaaggaaca

SEQ ID NO: 220184 - RNA, 79 nt, Homo sapiens
cccacgcggagcaacaaggaaaaggaagggggagccgagaaggaacggaacgggccggaccagccaaagaaccggcaaa

SEQ ID NO: 220185 - RNA, 81 nt, Homo sapiens
gcaggagaagccccggggggaagagcgccaccggcggcccgcaagaagaccgagaaggaccggagagaggaaaccaaaaaa

SEQ ID NO: 220186 - RNA, 56 nt, Homo sapiens
cagagggacgaccagaaacacagaaggacgacccagaaggcagagagggcaacggg

SEQ ID NO: 220187 - RNA, 79 nt, Homo sapiens
acaaggccagagaaggggaggaaccgaacgagcggccgggcgaggcgaggccacccgggccgccggcggccacgggcaa

SEQ ID NO: 220188 - RNA, 63 nt, Homo sapiens
cacacaggcgaggccaggcaaaggaaccacccaggaaacagcgcaaggcagcagaacgggagg

SEQ ID NO: 220189 - RNA, 82 nt, Homo sapiens
gcgacggagcacgccacgggccacgcccaccggacacgggggccacggacggggccgagcacaaccacccaccggacgggac

SEQ ID NO: 220190 - RNA, 105 nt, Homo sapiens
ggaccacagccaagcccaagcaaaagccaacagagcagcagcacgggcagcagacgccacgggacagccaacaccagaccgagcccacgcgcgccacagggaggg

SEQ ID NO: 220191 - RNA, 70 nt, Homo sapiens
cggcaacaacccgaggacgaaccaccccgcgccagcagcacagcacgcgaggagaccgcagccgagcagc

SEQ ID NO: 220192 - RNA, 65 nt, Homo sapiens
cgccgcgcccccggcccgcgggcggcccacggcgaggagggagaaaacgcaggacacaaggaaga

SEQ ID NO: 220193 - RNA, 80 nt, Homo sapiens
gcacaacaggaagaaacacccaaagacccacagaggacgcgccaggcggcaagcacagaggccccaaccacccagagcag

SEQ ID NO: 220194 - RNA, 74 nt, Homo sapiens
agaaacagcccggaaacagaggacagcagaccacagcccggcaggcccaaaaacccaaagggacagaagcaccc

SEQ ID NO: 220195 - RNA, 61 nt, Homo sapiens
gcggacaaggacgacaacgcaccagggagggcaggcgcaagaaagcgaagagccacgaaaa

SEQ ID NO: 220196 - RNA, 74 nt, Homo sapiens
acccggaaacagcaggcaagcaggacccgggaggaccaggagcgccccaaggacggaggggggaggagcaggcc

SEQ ID NO: 220197 - RNA, 79 nt, Homo sapiens
cgagccggagcgcagcccgagcgcgggggccccagccccgcccgcccccagcccggcaaaagcagaccggaaaacccac

SEQ ID NO: 220198 - RNA, 57 nt, Homo sapiens
aaaacccgaaagcgcgcagggacaacaacaaacagcgaccaaagccacaccagggcg

SEQ ID NO: 220199 - RNA, 78 nt, Homo sapiens
gcaaaggccgcaccagcgccagcggagaaagaaccgaacccggaaaagagaaggaggacccgccggagaccaagcgcc

SEQ ID NO: 220200 - RNA, 86 nt, Homo sapiens
gcggggaccgggcgccaagagaagggcacccacacggccggcccgggaccgaaggagaagaaggagaaggggaggagaaggcaagc

SEQ ID NO: 220201 - RNA, 70 nt, Homo sapiens
caagcaaacagaagcgcggccaaggacggcgggagcacaggggaaaagaacaacacagggaaagccgcca

SEQ ID NO: 220202 - RNA, 61 nt, Homo sapiens
gcaaacgcagaaggacgcccacgagcaaccaagaccagaaaaccagggaaaaagagggagg

SEQ ID NO: 220203 - RNA, 71 nt, Homo sapiens
aaaacaaaagaagacaaaaagaagccaacaaagcagcaggggcccggagcccaaaaagagcgcagggagaa

SEQ ID NO: 220204 - RNA, 68 nt, Homo sapiens
cccaccgacgagggcagaaaggaaggggaccgcaagagaggagaggagagcagaggcgaaaagagggg

SEQ ID NO: 220205 - RNA, 74 nt, Homo sapiens
cacccgcacacagccacgagcaaaggaagaaaacacgaagaaacgcaggagcccaccgcgagcccccaggaggc

SEQ ID NO: 220206 - RNA, 59 nt, Homo sapiens
ccgcgacgcaggcgcacggagacccgccggcagaggggcagcagcaggacagggaaccc

SEQ ID NO: 220207 - RNA, 76 nt, Homo sapiens
acagcacccacacaacgcggagacccagccgaagggaggcgaaaaaaagcagggaggagaagcgggccagaacaag

SEQ ID NO: 220208 - RNA, 81 nt, Homo sapiens
cccggaaagaggccgcccgggcccccccagagcaacccgcacaaaggaaagcgcacggcagcagcaaaaccacagagaaac

SEQ ID NO: 220209 - RNA, 86 nt, Homo sapiens
aaagacgacaggggagacaaagagacccgcagcgacaagggcggagaacggaaaagcaccaggaagcagagaggaccgcagaaggg

SEQ ID NO: 220210 - RNA, 53 nt, Homo sapiens
aaggcggcacaacacaagaccagacaacacaagccaaacaaaaacgcccggcc

SEQ ID NO: 220211 - RNA, 40 nt, Homo sapiens
gaggcaggaccagcgcagcgcgcaagcggcaccacgacaa

SEQ ID NO: 220212 - RNA, 50 nt, Homo sapiens
ggcagacccaaagcgcaagcagacgaagaaagaagacgacgccccagaga

SEQ ID NO: 220213 - RNA, 76 nt, Homo sapiens
ggcgaacgcacaccacaccaccagcgaggggaaagggccacgccaaggaccaacagacgcaccaaagccccagaca

SEQ ID NO: 220214 - RNA, 62 nt, Homo sapiens
gaaccgaagggaaacagagagccagaaggaagacaagcggagaaaaccggaagagaaaggcc

SEQ ID NO: 220215 - RNA, 78 nt, Homo sapiens
cggggagggggggaccacgaaaggagcaagagcaagacaccggacaccgagggcccccaaaaggaaagcgcagaaaag

SEQ ID NO: 220216 - RNA, 81 nt, Homo sapiens
gagaaggggcggaagaccggagcccgaagagggacccgaaaacagcccgcggacacacaaacgcgccgccggagacaggaa

SEQ ID NO: 220217 - RNA, 82 nt, Homo sapiens
caacaggcggaacgcaggagacacaagaagcggaccagaagacgaccccgacgcaggccaggagccgcggacagaagccgag

SEQ ID NO: 220218 - RNA, 78 nt, Homo sapiens
caaggcgcgcgagagagcgagggcggggcggcaccggcgagccagcacaccaacaaggaaagaacggaacgaccgaga

SEQ ID NO: 220219 - RNA, 75 nt, Homo sapiens
agacagcaacgaaggggcaacaccccggaaacacgacaagccaaagcaagcgcacggaagaccaggagagagagg

SEQ ID NO: 220220 - RNA, 58 nt, Homo sapiens
aaagaggcccaaccaaagacagaaggagaacagacagcacgggggaggacacccggga

SEQ ID NO: 220221 - RNA, 67 nt, Homo sapiens
aacggaccagaccgaccaccaaaaaaaccagcccgagcagcagccgagaaagggggccaggcaaaca

SEQ ID NO: 220222 - RNA, 89 nt, Homo sapiens
gcggccggcggcgcgggcccggcggcggcggcagcggggccgggccggagcgccacacagcaggaggaccaggacacaccccagaagaa

SEQ ID NO: 220223 - RNA, 85 nt, Homo sapiens
cggaccaggagaggcccgcgggaccgaggccgggccccggggaccaagaaaggcccagggaccaaagcccggacaaggcccgagc

SEQ ID NO: 220224 - RNA, 67 nt, Homo sapiens
caaaccaacacagaaaagggagcgcgcaaggaagcgcgggggcaggccgggcgaccagcccgagggc

SEQ ID NO: 220225 - RNA, 76 nt, Homo sapiens
acagggaaggcacacagcagaggccgcgacagccaccaaagcagcgcggacaagaaaagacagaaaggaaaagcag

SEQ ID NO: 220226 - RNA, 70 nt, Homo sapiens
gcccgagaccacgacaagagcgccgcgccagcccacccccccaacccccacggcgcgcgacgggaccaca

SEQ ID NO: 220227 - RNA, 79 nt, Homo sapiens
agggaccccccgccccggaccgcggaggcaccgagaacggacgcaagcggggaggggaagaaccggaaaaccaagcaac

SEQ ID NO: 220228 - RNA, 72 nt, Homo sapiens
aagcacacggaaaggagccgcaaggcacgaagcacgaaggaaccgaaggaaaagcacagaaaagagacccac

SEQ ID NO: 220229 - RNA, 59 nt, Homo sapiens
ggagcagagggaggcgcagacgggagccgggagccggcagacgcaaacagcagacggaa

SEQ ID NO: 220230 - RNA, 66 nt, Homo sapiens
aaaaacagaaaggggacgagcacaaagaaaggaaaaccaccacaaagggccgagcaaagaagacca

SEQ ID NO: 220231 - RNA, 80 nt, Homo sapiens
aaggaagagaagaaggaacggaaacaaagagccgccaacaggcagaccacagaaacgaagccgggagaacgcccggggcc

SEQ ID NO: 220232 - RNA, 58 nt, Homo sapiens
gcgcggggaccgagacaaaacgcagaagagcagcccgggcagagagacagcgaaggac

SEQ ID NO: 220233 - RNA, 74 nt, Homo sapiens
aagaagcgaaaagcaaaaaacggcaagcaacgaccaacaagggaggacaacaccaaaaagaaaaggagaaacca

SEQ ID NO: 220234 - RNA, 63 nt, Homo sapiens
gccacgcaccgacgccgcgcgagcggccagaagaagacagagcaacagccggacgccaaagcc

SEQ ID NO: 220235 - RNA, 83 nt, Homo sapiens
gcaagcccacggggagcagagcagcaaccacccagcacacaaaaggaccacggaaaggagcagcagaacgaaggaagaaggga

SEQ ID NO: 220236 - RNA, 83 nt, Homo sapiens
ccgagagccgcccgggccagcggccgcgcacccccggccggaggcaccagcccgacgacagaagagggacaccagcccgacac

SEQ ID NO: 220237 - RNA, 71 nt, Homo sapiens
agaaagaagagaccaagcgcacaggaaaaacaagccaagcagcacacacagaaagacagagcgcagaaaga

SEQ ID NO: 220238 - RNA, 82 nt, Homo sapiens
ccgggccgcggagaaggaacccgagcagcccccggcccgggaggaaggaaagaacaaaagcggagcagcgcgacccgccgag

SEQ ID NO: 220239 - RNA, 85 nt, Homo sapiens
aggccgaaaagacagagaggggaaaccccgaaaggggggcagggagagaaggagaggagccaagcccaacgggacgggaaaacgg

SEQ ID NO: 220240 - RNA, 74 nt, Homo sapiens
gcagagcacgcgcgcagcgaagcccagggaggccaccaggaaacagacaggagccaaaccggagcagggacagc

SEQ ID NO: 220241 - RNA, 91 nt, Homo sapiens
caaaccccaggccaagcagccaccagcagcccccagagcgggaccacaggccagaaccgcccaaacgagcagaagcgggaagaaacaggag

SEQ ID NO: 220242 - RNA, 102 nt, Homo sapiens
cgcagcgaagccgcgccccgcacagggacagggagcaaaaaaaaagaagaaaggaaaagccagaaaaaagagaagaaaggaaccagaagaaacaggccaaca

SEQ ID NO: 220243 - RNA, 69 nt, Homo sapiens
ggaggcgcgcaggagccaagggaagggcacaaggccaaaggaagcacaagggggcccgcacaccagccc

SEQ ID NO: 220244 - RNA, 78 nt, Homo sapiens
ccacagaaaaacaccacaacaaccagggcagcgccgacacgagaggagccgcccccccaccgcggaagagcaagggaa

SEQ ID NO: 220245 - RNA, 65 nt, Homo sapiens
cccaaaaacacgcacaaggggaagaggaagaagcaaagaggcagggcaccgcgcgcccaaagcgg

SEQ ID NO: 220246 - RNA, 100 nt, Homo sapiens
gacggccccagcccacagcagcagcagcggcgccgcccgcagcccacagcccggccaggggcgggccacaagcgcaaaacaggcaaaaggaagcaaaacg

SEQ ID NO: 220247 - RNA, 75 nt, Homo sapiens
ggacacgcagaggagccaaccgcgccagcagacgggcaccgggacagagcccgagaccggaggagccgaccgcga

SEQ ID NO: 220248 - RNA, 78 nt, Homo sapiens
cacaccggccccgcaagaggagccaggggcgacaaccaggggcaggagaacaaggagaccaggaggcagaaagacggg

SEQ ID NO: 220249 - RNA, 78 nt, Homo sapiens
aaaacaccggccgcaggaaggcagaagaaagaagaggagaaggagcagccggccaaggggaggagagacaagaagaag

SEQ ID NO: 220250 - RNA, 68 nt, Homo sapiens
cacgacccgcgggcaaaaggaaacacccaaggaaccaaagcaggccagcagaaaaccccgcgcacaga

SEQ ID NO: 220251 - RNA, 72 nt, Homo sapiens
gccaggagggaacccgaagcgggcgcgcgcacggcaggacggaggaggccagaggccggacccagccagagc

SEQ ID NO: 220252 - RNA, 85 nt, Homo sapiens
agccgaacaggcagggccagacccagggaccagaagcagcagccccagaagccccgaagccggggcaccccaccacccgcggcgc

SEQ ID NO: 220253 - RNA, 87 nt, Homo sapiens
gccgaagcagccgggagccggagcgggcgcggacgccgaggcaccgaggcaccagaggagggcccaggcgcacccaggcagaaggag

SEQ ID NO: 220254 - RNA, 83 nt, Homo sapiens
agagaggccggggaaagccggccaaaagaaacccccaaaaccggaagaaagagaaggaacagaggacacgcacaccacagacc

SEQ ID NO: 220255 - RNA, 64 nt, Homo sapiens
gagagcaccgccgagcggaccccaagacaggaagggaaggggcggagacgggcggaacgcagga

SEQ ID NO: 220256 - RNA, 73 nt, Homo sapiens
cgcgcgcgcccccagccccaagaaagagccgagagcgccggaggaccacacccggccacagccgcaggaacaa

SEQ ID NO: 220257 - RNA, 83 nt, Homo sapiens
ggccggcgcccggcggggacgcagggaacgaagcccaaaaggcagagacggaccgagacaggagagcaggggcccagccaccc

SEQ ID NO: 220258 - RNA, 66 nt, Homo sapiens
aaggcagaggacgcggcaacagaacggaaggcacagggagccaacgaccagccacgcccggacggc

SEQ ID NO: 220259 - RNA, 53 nt, Homo sapiens
accaaaacagcacaaaacggggagaagaccaggacgagacaagggcaacgaga

SEQ ID NO: 220260 - RNA, 65 nt, Homo sapiens
ccaccacaaaaacgaaggcggcggggagaacggcagaaccaagggaccaaagcgggacggcaggc

SEQ ID NO: 220261 - RNA, 37 nt, Homo sapiens
gggcaaacccgagagaacggaacgagggacgaaaaag

SEQ ID NO: 220262 - RNA, 59 nt, Homo sapiens
cacaccgggcagggccgagaggacgccagcggcgcgcagggaacgaagaaggacagaac

SEQ ID NO: 220263 - RNA, 53 nt, Homo sapiens
gcggggcacaccaggagaaagggccagccaccaggcccagccggagcgcacca

SEQ ID NO: 220264 - RNA, 86 nt, Homo sapiens
cagccaggcagacgggagcaggaaagccagggggacccagcacagagcgaaaggaccggccagaagggcggaccagggcacacccg

SEQ ID NO: 220265 - RNA, 84 nt, Homo sapiens
accaccaagcggagaggccgggcgccgagagcagccacccgaagggccccccaagcccagggaccgcagaggacggggaccagc

SEQ ID NO: 220266 - RNA, 70 nt, Homo sapiens
caggaggacggcgcagaagcccagaaaagaaagacaacaggcacaaagagagaaggaacacccacagggc

SEQ ID NO: 220267 - RNA, 74 nt, Homo sapiens
gaaggccggcaacccacacaagcgaaggcgcgcaccggaagcaccagcgaggaagaggacagccccgagccgac

SEQ ID NO: 220268 - RNA, 81 nt, Homo sapiens
cagaagaaaaaagagcaagaccggccagggccggaaggggaggccaccgggcagggggccgagacaaaagaagagcccagg

SEQ ID NO: 220269 - RNA, 78 nt, Homo sapiens
cggacccgccacagccccaccagcacgaagccaccccaagcaagggcggcgacggcggcgcgaggaccgaccgggccc

SEQ ID NO: 220270 - RNA, 71 nt, Homo sapiens
aaaaagccccaggcccgggcgccccccacagagaaagaacccacaggagggccagaggacaaagcacggcg

SEQ ID NO: 220271 - RNA, 61 nt, Homo sapiens
ggcccccgcgagccgcgcgcccagccaggggacaccaggacggccagcagaagcaggcgag

SEQ ID NO: 220272 - RNA, 67 nt, Homo sapiens
cacaacccgacccgacgacacagggaacaccagaggcgggaccacgggcagcgcccagggagcagga

SEQ ID NO: 220273 - RNA, 76 nt, Homo sapiens
aaagacccgaaaaaagcgagacccacacaagaaaggacccaacagaggaagccgcaagaaacgggacgacaggaag

SEQ ID NO: 220274 - RNA, 64 nt, Homo sapiens
gaagaccccccagaacacaaagcaaggcacagaaggcagagacccgcaccgccagaacacaaag

SEQ ID NO: 220275 - RNA, 79 nt, Homo sapiens
agaccagaaccagcccgggaaagagcagaaaacgagccgaggcgagaaggagaagaagcacaaccacagagaaggacaa

SEQ ID NO: 220276 - RNA, 87 nt, Homo sapiens
agcccaaggcaagacccaaggcgacgaccgacaggggggaaaggaacaggaggcccggacccccagcacaagcgcaggccaggggga

SEQ ID NO: 220277 - RNA, 58 nt, Homo sapiens
aagaccaagcccgcggacgccaggggccagacccacgcccggcccggagcccacgcca

SEQ ID NO: 220278 - RNA, 77 nt, Homo sapiens
ggccaggagaacaacacaggggcgcccccccgccaggggggcgcacaggagcgcgaggcaggaaaagcaaggaggga

SEQ ID NO: 220279 - RNA, 37 nt, Homo sapiens
aagacaaggcaaaagagcaaagacaacaggcacaaag

SEQ ID NO: 220280 - RNA, 70 nt, Homo sapiens
cccggccaccagccaccgcagaggacagacaggaaaaccagcagagcgcccaccacaggaccgcggaggc

SEQ ID NO: 220281 - RNA, 104 nt, Homo sapiens
aaacaggcaaaacaaccagaaggggagaaggcaggcaccacaaaaaggacagggccaagggcagggagaagggacaacacagaacacagaccagggcaggacca

SEQ ID NO: 220282 - RNA, 52 nt, Homo sapiens
gcagagccggaagcggcaggccacaaagccacagaggcagcgagaagaaaaa

SEQ ID NO: 220283 - RNA, 87 nt, Homo sapiens
ggagacaaacgaagggggaagccgcgaagagaacaaagcgccccaaagggaccacgggcgcagggccggcggagaggcccgacagag

SEQ ID NO: 220284 - RNA, 82 nt, Homo sapiens
cgaggggagccaagcggagacacaggcaaacgcagaaaagagagccgggcgcggaaacgaggggaccccacaagacccaagc

SEQ ID NO: 220285 - RNA, 83 nt, Homo sapiens
gacaacgggacccagaagagggaccccagagcaagcacagcgagcggaaggagggagaacaaggaaggagcgggaggaaccaa

SEQ ID NO: 220286 - RNA, 78 nt, Homo sapiens
aaacacacaagagccagcaaagggagcagcacagaggcagaacagacagcaagcccggccccaccccgccacaaacgc

SEQ ID NO: 220287 - RNA, 63 nt, Homo sapiens
agggccgcggggacaggaccccggacgagcccggcgaggggcagacagggaaagaagacaagg

SEQ ID NO: 220288 - RNA, 53 nt, Homo sapiens
gacagaggaagacgagaacacaggcagacacagggagcacacccccgcgcgcg

SEQ ID NO: 220289 - RNA, 73 nt, Homo sapiens
acacaagcggcgagagcgccaggaacagggcacaaagaaagaggaagagaacaggaaagaaacacacaaagaa

SEQ ID NO: 220290 - RNA, 82 nt, Homo sapiens
gggacccaaggccacaaaggagagcccgggagagaagaaggcagacggaacaagacccgcggagaaccacgaaggacccaca

SEQ ID NO: 220291 - RNA, 57 nt, Homo sapiens
ccggacaccgagggcccccaaaaggaaaggaagcgacggcgcacaggaacccccacg

SEQ ID NO: 220292 - RNA, 78 nt, Homo sapiens
gaaagggccaaaaggacaaacaaggaaaaccaacaacagggggaaaaaaagaccgcaggcccggcccggggagagacc

SEQ ID NO: 220293 - RNA, 72 nt, Homo sapiens
aaccaggccagagcggagcagccaaccaaacagaaagcacagaggcaaccacagcacggcacccaggcaggc

SEQ ID NO: 220294 - RNA, 77 nt, Homo sapiens
cagaggcgagacccaaagcccagaaacccggacaggacgagaccacgggcagcaaacgaagcgccagaccccgaaac

SEQ ID NO: 220295 - RNA, 81 nt, Homo sapiens
gcacacccaccgaaacaagacagccacccggcccgcgcgcccggaagccgcgagccggaagccggaaccagacggcaggaa

SEQ ID NO: 220296 - RNA, 70 nt, Homo sapiens
ccgcaggcccagagaaaaacgcaagggaaaagagaaaaagaaagcgacggaaaaaaacaaaagaacacaa

SEQ ID NO: 220297 - RNA, 78 nt, Homo sapiens
ggcagcgcggaggacaaagcagggacccgcgcccgggggcaccaagaacaggcaccaagcagccgaagagaaacaagg

SEQ ID NO: 220298 - RNA, 66 nt, Homo sapiens
agaacaaacggaccagcgaccgggcacaccagaagaaaggagagagccgaaagagaaaagcgcgcg

SEQ ID NO: 220299 - RNA, 80 nt, Homo sapiens
gggaacacggaaaagcagagcgcagagcccgaggaagagcagaagacgaaagaaacagcgacccggcaacaacagaggag

SEQ ID NO: 220300 - RNA, 52 nt, Homo sapiens
cacacgagcggaggcgaagacgagcgggagcaagacccgacagacgcaagaa

SEQ ID NO: 220301 - RNA, 77 nt, Homo sapiens
agcaaacacaccaaccaagcaaaacccaagcaaaaccagagcacgccacgcagagccccgccaggaagacacgccgg

SEQ ID NO: 220302 - RNA, 77 nt, Homo sapiens
gagcggcgcccaagacagcaagggacagacgggaaaaaagagcaccaggacggcagccggccgccaccccacaggcg

SEQ ID NO: 220303 - RNA, 46 nt, Homo sapiens
acaacgggcaagaagaccgcgagagccacaccagcggacagccacc

SEQ ID NO: 220304 - RNA, 84 nt, Homo sapiens
gcccccgaggcaggaccgccaaggcgaccccgcacacacacccaccagccacggcagcccagcggggacccagccgccccgccc

SEQ ID NO: 220305 - RNA, 48 nt, Homo sapiens
ggaccaagaaccagggacagcaacagaccagcgagagcggaccccagc

SEQ ID NO: 220306 - RNA, 71 nt, Homo sapiens
ggaaagccggagcgaagccaacccccgagcaggccacggaaccgcccagccccaagccccgccacggcgac

SEQ ID NO: 220307 - RNA, 80 nt, Homo sapiens
ccaggcccagggcgggacccagggcgcggccagggcagcacacccccgcccagggggccagagagcgccgggagccaggg

SEQ ID NO: 220308 - RNA, 58 nt, Homo sapiens
ggcgaacacgccgacagggcaaaagcagaccggaaaacccaccggcaagaccacaccc

SEQ ID NO: 220309 - RNA, 46 nt, Homo sapiens
ggaaaggccaacagaacaagagagaccaggggaagacgcgcgccca

SEQ ID NO: 220310 - RNA, 77 nt, Homo sapiens
ccaccacagggacggcggccggacaaacacgcaaggacccccccggccaagggcaagcaagagggccaggcagcaca

SEQ ID NO: 220311 - RNA, 77 nt, Homo sapiens
cgcgccagcgcggggggccgcccgcggcccgagggacggccagccgcgcggacaaaacagaggagaccagaccagaa

SEQ ID NO: 220312 - RNA, 66 nt, Homo sapiens
gggcagaaaccaaaaaccacgaaaccagccaaaccagccagcaaggcacaccggggcggacggcgc

SEQ ID NO: 220313 - RNA, 73 nt, Homo sapiens
gaggcgcgggacgcgaagcaacaggcggcagaaggccaaagcgaaaagggaaagaggcaggaagcgagaggag

SEQ ID NO: 220314 - RNA, 74 nt, Homo sapiens
agccgagcgacaaggagaggaagaacagcccaaacagagaagacacggaagccaccggccggagagacacaggg

SEQ ID NO: 220315 - RNA, 77 nt, Homo sapiens
caagggagccggggcccccagcaagaacgggaacaaaaccgggcaacacagagggccacacggggaaacggccaaca

SEQ ID NO: 220316 - RNA, 85 nt, Homo sapiens
gcgcgggggccggggcgcgcgcagggccaaccgccccccagcagcaggcacgggcgaaccccgagccccgccccacgcccgccgg

SEQ ID NO: 220317 - RNA, 82 nt, Homo sapiens
gacacccagacagagagagcgcacgaagaagggcggaggacaaggagaaggagagacgaggacgcgcacaggaaaggacgcg

SEQ ID NO: 220318 - RNA, 87 nt, Homo sapiens
aaggcaaagcgggaagacccaagcccacgggaggcacggagggggcgaggcagaacaccggaccggaggaaacggcgaggcgccagg

SEQ ID NO: 220319 - RNA, 71 nt, Homo sapiens
gcacaacgagagaacagagcgggagccgcggaggcccacggcggcgaccagggagcagagggaaaggaggg

SEQ ID NO: 220320 - RNA, 67 nt, Homo sapiens
accggagacagggaaaacacagaccaagagccgagagagacagacaagaaagaggaaacacagcgaa

SEQ ID NO: 220321 - RNA, 91 nt, Homo sapiens
gggagcggacggcgagcgcgagcggcgcgagaaagcagcaccgggaccggaggcccagagcgacggacggagaaccaggcccgcagcagca

SEQ ID NO: 220322 - RNA, 73 nt, Homo sapiens
cgagcaccgccggccccgggccagcccagcaaaagagccaacacccaggccaggccgcccggaaggaggccgc

SEQ ID NO: 220323 - RNA, 69 nt, Homo sapiens
ggaccccggagcccagaagacagagggcgaggggaaggcagagaccgcagaaggcccaggaaacgaggg

SEQ ID NO: 220324 - RNA, 76 nt, Homo sapiens
gaagggcgcagcggccagcaggcaggagcaggcgaccaggcagcaggaaagaaccaggaagcacaaaggagaaggg

SEQ ID NO: 220325 - RNA, 82 nt, Homo sapiens
ggccgaggccgcaccaggcccggcgcggcccccggcacccgccgccacacccccggaacccaggagaaacgagagggacagc

SEQ ID NO: 220326 - RNA, 72 nt, Homo sapiens
aagcgagccaaagggccggagggggaacacaccgaaacagaggaacagcagggcagaggacacgagccaaga

SEQ ID NO: 220327 - RNA, 79 nt, Homo sapiens
cgagggcgggaaacggcaagagaccagaggacccaaagcagaccccaaggaggccaaggaaccagcaggaaggcgcgac

SEQ ID NO: 220328 - RNA, 84 nt, Homo sapiens
gggaaaagcgccgggcggaccagcagggcggccggccggacggaccacacgacgcgcagacggagagggaccaggagaagccag

SEQ ID NO: 220329 - RNA, 77 nt, Homo sapiens
cggaccagggacccgcgaaagcggggcacaggcgggcacgcgcccaggagacaccgaaaccaggggcagcccacacc

SEQ ID NO: 220330 - RNA, 75 nt, Homo sapiens
gcaaaaacaacagacagcccagcgcaggaaagcagggaggaccagcaaacgggaaaggcgaaaccagaaaggcgg

SEQ ID NO: 220331 - RNA, 66 nt, Homo sapiens
agaacgcaagggaaagccaacgccgggacaagagaggcaaggagagcgaaaggaaaacaaggcacc

SEQ ID NO: 220332 - RNA, 41 nt, Homo sapiens
aggaagaggaacaccaaggagaacacgagacccgcacaaaa

SEQ ID NO: 220333 - RNA, 62 nt, Homo sapiens
ggaacacgaaaggaccaagaacacagccacaagagaagcgagggacccccaccaagcccagg

SEQ ID NO: 220334 - RNA, 119 nt, Homo sapiens
cacgcggacgccgaaggggcgagggcagaccaacgggccaaagaccacacagacacaccaaggaggcggcaggagacagacacagggcaagccgggcaggcaaagcagcagaaagcagc

SEQ ID NO: 220335 - RNA, 84 nt, Homo sapiens
ggagagccaagacagcccagggaacccaggacaggccccagacgggaggaacgagcccaagggccaagcgccaccaaccgagca

SEQ ID NO: 220336 - RNA, 73 nt, Homo sapiens
aaaaacccaaccagaaaagacgggaaacagggccccaacaaaggacaccacccccgcgggagaaacccacaaa

SEQ ID NO: 220337 - RNA, 72 nt, Homo sapiens
aaggaagggaagagagcgccaaggagaccgggagagagacgaaggacgcgcaggggcagcagacacggaaac

SEQ ID NO: 220338 - RNA, 69 nt, Homo sapiens
caagaccaaggaagacgaacgcaccccagagccgacccccaccgcaaggaaggggaggagcacagaacg

SEQ ID NO: 220339 - RNA, 80 nt, Homo sapiens
gaaggaccccagagaagacaggccccccccgagcccacacaaagcgaggggaagcggcaacacccgagagccgcacccgc

SEQ ID NO: 220340 - RNA, 70 nt, Homo sapiens
gcgcggaggaccacggacacccaggcaacgcccccggaaggacaacccccaggggggaccacgaagaagg

SEQ ID NO: 220341 - RNA, 36 nt, Homo sapiens
ccgaaggacacagaacagacacccagaaagcagaga

SEQ ID NO: 220342 - RNA, 76 nt, Homo sapiens
acgcgcgcacccaccgggcccgcgggccgccccaccccacagaggggaagcgagagaaaaacaagcgccacacggc

SEQ ID NO: 220343 - RNA, 74 nt, Homo sapiens
cccaacaaggaggccagggcggccagccacaaaagaagacccaaagcaccaacaaaaagcaacgagaacaagga

SEQ ID NO: 220344 - RNA, 71 nt, Homo sapiens
accaaaaaaaagagagagcacaggcaaccggagaaaccgcacacccgaggaggccgcgaggcacagaagac

SEQ ID NO: 220345 - RNA, 60 nt, Homo sapiens
gaacccacaaaccggagacagaacccgaggaagaagagaaaacaaaaaacgacaaaaaaa

SEQ ID NO: 220346 - RNA, 81 nt, Homo sapiens
gccagcccgagcaagaaagaggccggagcgcgaagacgcagggaaagcggcacacgaaaggggcacggcaggacgagcggc

SEQ ID NO: 220347 - RNA, 86 nt, Homo sapiens
acacggcaggcccgcccggaagaagcgaccaaagcgccgaggaccggcaacagggcggcggggaaaaggaacggaaaacagcccca

SEQ ID NO: 220348 - RNA, 50 nt, Homo sapiens
agcgggcacgcacagccggaaccgcaccagccaagaccacagacacccga

SEQ ID NO: 220349 - RNA, 73 nt, Homo sapiens
ccagccccaggccccagcgcgagagacacaggaacgacaacaggcacaaagagagaaggaacacccacagggc

SEQ ID NO: 220350 - RNA, 73 nt, Homo sapiens
cggcgacgagaagcgccccgggccgaacgcacggaccagaacacacaagaaccgggagaacgaacaaaccaag

SEQ ID NO: 220351 - RNA, 66 nt, Homo sapiens
ggaagaaaccacaaagcacaggcaaaggaagcaccgcacacagaccaacccggacaccaaacaggg

SEQ ID NO: 220352 - RNA, 92 nt, Homo sapiens
ggcgaaacacggggaacaaacggcaagagccagaagcccggcggaaggacgaaaccccgacccccgagacacgcgcaagacgaggcgcccgg

SEQ ID NO: 220353 - RNA, 75 nt, Homo sapiens
ccagcagcagcacgagagaacaaaaaaacaacaccgcgaaagaccgaaacaaggaccccccgggagaagaaaagc

SEQ ID NO: 220354 - RNA, 80 nt, Homo sapiens
aaccaaagcagaaaggcaaacaccagcaacacccgggacaaaaacgggggccaccacccccaccgaaccagcacccacac

SEQ ID NO: 220355 - RNA, 84 nt, Homo sapiens
gcagggccaggaaaaccccaggaagaagaccagcccgccgcccgacggcccccgacgcagcgcaccagcgacacccccaggccc

SEQ ID NO: 220356 - RNA, 78 nt, Homo sapiens
cccccggcacacgggcagaacgccaagggacgccaaaaagagcaagaccgccaaggaagaacagaaaggggcgcagag

SEQ ID NO: 220357 - RNA, 77 nt, Homo sapiens
acgcgcccgccgccagcaggggcgccccggacgagagcccggcgggggcgcagcaccagcagacggaacaacgagag

SEQ ID NO: 220358 - RNA, 78 nt, Homo sapiens
cggggcgaggaggccccaagggcgagcgggaccgagacccgaagagggggaaaacgcagggaagagaggacagcagga

SEQ ID NO: 220359 - RNA, 78 nt, Homo sapiens
cgccgggcgaccccgcccgggcccggagcccacccaccgggccgggacacgaggaggcggcggggccacagaggaccc

SEQ ID NO: 220360 - RNA, 82 nt, Homo sapiens
gaaagggacaagaagggcaaagccgaagggaaggagcgagacacgacgaaggagaagaagccaggagacgcgagagcaagga

SEQ ID NO: 220361 - RNA, 43 nt, Homo sapiens
aagaagccaacaaagcagcaggaaagaccccgaaaagaaagaa

SEQ ID NO: 220362 - RNA, 77 nt, Homo sapiens
ggcaggaggaggccacgcacaccagccgccgcgggcacaccggcccgggccaggcacaggccgaaaaaacaaaagag

SEQ ID NO: 220363 - RNA, 74 nt, Homo sapiens
aggaagagggggacgccccggcaacccaggggcggccacgaccaccaggcgccagaagggccaaaagaaacaca

SEQ ID NO: 220364 - RNA, 36 nt, Homo sapiens
agcagacggagccaggagcgggccaaaccggggaga

SEQ ID NO: 220365 - RNA, 85 nt, Homo sapiens
acaaaggagcaaccgaccccaccggccggagcgcgccgccaaggcggcgcgcgagcggagcaccgcggcggagaacggaaaagca

SEQ ID NO: 220366 - RNA, 79 nt, Homo sapiens
caggaaccccggaagccagaaaggggaagagacggacacacagaaagggagaaccgaacgggaagacccagacgcaacg

SEQ ID NO: 220367 - RNA, 88 nt, Homo sapiens
gccgccacacccacagcgcggcaccgcgacacggaaccccacccaacaagcaaccagcagcaaaacgaaagcggacaggaaagaaaca

SEQ ID NO: 220368 - RNA, 67 nt, Homo sapiens
cgcggagagcgcaagccgggcagcagcccagcggcagcagaaagagcagaagggcaacaacccagac

SEQ ID NO: 220369 - RNA, 57 nt, Homo sapiens
ggagacgaccgcaacggcaggaaccgccgaagacacggcggacgaggagacagaagg

SEQ ID NO: 220370 - RNA, 78 nt, Homo sapiens
ccagccaacaacgggaccaggacccaaagagcagacaacaccgcaacaggagccagacacagagaaccaagcccaaca

SEQ ID NO: 220371 - RNA, 72 nt, Homo sapiens
gaaaaccaaacccgggcagagggcaccacagacaagaaagcccccacggaaggccacgagggcggaccccgg

SEQ ID NO: 220372 - RNA, 77 nt, Homo sapiens
ggcgcccacagaccgacaccaccagacagggaaaaagcaggggagacggaaagaggaagaaacacagcaaggcagaa

SEQ ID NO: 220373 - RNA, 81 nt, Homo sapiens
cagagccggcggagcagggcagcaccacgagccagaagcagagccggacaaccccagcaagggagaagccggggcgcccgg

SEQ ID NO: 220374 - RNA, 83 nt, Homo sapiens
gaggcagggccagcagcaggcgggaggagaagacagaggagccagaccaagagacagcacaggcgagcgagcagagacaccag

SEQ ID NO: 220375 - RNA, 56 nt, Homo sapiens
aggcccgaggaagggagcgggcacgccaccaggaagggcgcgcccagacccgagac

SEQ ID NO: 220376 - RNA, 83 nt, Homo sapiens
cagggcaggacaccgacaggaacagggaccacgggggaaacagcaccccacagcgcgacagcggaccagcgcaggcagaaggc

SEQ ID NO: 220377 - RNA, 73 nt, Homo sapiens
accgccaccacccgacaagcccacacgcgaacacaggagcccgaaggccccggccagcggacacccacgccac

SEQ ID NO: 220378 - RNA, 54 nt, Homo sapiens
cgccacgcgcggaaggcagcgcccagcagcgcaggcgggggcaaacggaggccg

SEQ ID NO: 220379 - RNA, 68 nt, Homo sapiens
ccgcggcccagcaccaggaaagcagagccaaagaagaacaggagaaaagaaggggagaaagccagagg

SEQ ID NO: 220380 - RNA, 46 nt, Homo sapiens
ggcaaagacgaagaggaaaacccaccgcggcgagcaaaaaaagcaa

SEQ ID NO: 220381 - RNA, 77 nt, Homo sapiens
acacgcccgggagacgagaccgaaccggcaccgcacaccggaccaggaaacggaggcgggaccagcccaggagagga

SEQ ID NO: 220382 - RNA, 49 nt, Homo sapiens
gaaaccaaggacacggaaggaggcaggccccagcccaccacacagccaa

SEQ ID NO: 220383 - RNA, 76 nt, Homo sapiens
aggcacgggagaccgcaagagaagaaccgagggcaccggagggaagcgggccaccgcccggcccccaagacggccc

SEQ ID NO: 220384 - RNA, 68 nt, Homo sapiens
ccgcgcccccgcccgcccgggacccgcggccccgccgcgcgcggcacgaagacccgaagaaacacacg

SEQ ID NO: 220385 - RNA, 57 nt, Homo sapiens
gagcgggccaggcgcgcccgggaagggcacaaggccaaaggaagcacaagggggccc

SEQ ID NO: 220386 - RNA, 70 nt, Homo sapiens
cgacggcgcggggagagagccaagcaaccaagccagggccgcaaggccaggcgcgcagaggcacccaacg

SEQ ID NO: 220387 - RNA, 81 nt, Homo sapiens
ggccgagcaggcgagcgaacgacgggggccaacgaaaagaggaggagaaacggcaaggaagcccaaccgaaagacgaacag

SEQ ID NO: 220388 - RNA, 75 nt, Homo sapiens
gccccgagaggaaacacccccagaagaggcccggacaagcagagccgacccaacgggagaagcaagaagccgcac

SEQ ID NO: 220389 - RNA, 60 nt, Homo sapiens
agagcccggaaagaagagacagcgaggagacaacccccaggcagacaaccaacagggcaa

SEQ ID NO: 220390 - RNA, 110 nt, Homo sapiens
cggaccgagaccggaccgagagcggaccgagagcgcgaaacgcacgagaaggaaacagaacgacagcccgcaccgacgccggcggccagccagagagcacgccggccgca

SEQ ID NO: 220391 - RNA, 66 nt, Homo sapiens
ggccagcaagacagaaccgccaaagcgcggaaccggagggacggagggcaaccaggaagaagggga

SEQ ID NO: 220392 - RNA, 81 nt, Homo sapiens
ggcggaagaccccaaagaagggagccgaagcgaggcggaaaacgaagacagcagggccaagcgacagagaagcgacggaac

SEQ ID NO: 220393 - RNA, 65 nt, Homo sapiens
gcaccgggcgccccgcagggccaagggcagggagaagggacaacacagaacacagaccagggcag

SEQ ID NO: 220394 - RNA, 73 nt, Homo sapiens
aacaacggaaaaggagaaggcggcccagggcagcagcacacaaacaaccacaaacaacagccacaggaggcac

SEQ ID NO: 220395 - RNA, 67 nt, Homo sapiens
accccgccgcagaggagcccgcggcaagggaacaggccaggggccgcacagacacagccgccacaag

SEQ ID NO: 220396 - RNA, 83 nt, Homo sapiens
cggagcgcgacacggagacaggggcagagggagcgccgagcaacccacggccggaccccagagcccacccaggagcgggcaga

SEQ ID NO: 220397 - RNA, 76 nt, Homo sapiens
ggcaaggacccagccaggaggccgggcgaggacgggaccccggggaacgccagaaggaggggcgccacccccagca

SEQ ID NO: 220398 - RNA, 69 nt, Homo sapiens
gccacaacaccggcaggaaccaccaggacagagaacagagagcacagacaacgaaccagaagggaggaa

SEQ ID NO: 220399 - RNA, 76 nt, Homo sapiens
gaagcggacgcgggacggaagcacacgcggcgagagggccgaggcagacaagggaaaggccgcgcaggggaccacc

SEQ ID NO: 220400 - RNA, 79 nt, Homo sapiens
cagaacacgcagcccagcaacaaggagaccgcgaaggcgacacccgggggcccaggagaaacccgaacggagagccgcc

SEQ ID NO: 220401 - RNA, 67 nt, Homo sapiens
ggggcccagcacagagccaccccgaaggcccacccaaggacacgacaggcaacgagggccaaccgcc

SEQ ID NO: 220402 - RNA, 57 nt, Homo sapiens
ggcgcaggccaaagggacccaggcccgggaggagcggggacacgaggaccccccaaa

SEQ ID NO: 220403 - RNA, 57 nt, Homo sapiens
caacccgcccggaacgcaagaagcaccggagcacgacgacagcagaagccccgagac

SEQ ID NO: 220404 - RNA, 83 nt, Homo sapiens
gcccggcccccacgcagccagggacgggcaccacccggccaggcccaggaagacacgcagaccccaccaagaggcggagcgac

SEQ ID NO: 220405 - RNA, 53 nt, Homo sapiens
acagaggaccagcaacaaacggcagcgcaagaccccgcacggaagcagcaagc

SEQ ID NO: 220406 - RNA, 73 nt, Homo sapiens
gggcgcgcgccgcgcggccccacggaaacgagcacaggaccaaaaaggaaacgggcgacgaggaggagggcgg

SEQ ID NO: 220407 - RNA, 79 nt, Homo sapiens
cgggggcccagcgggcgccgcgcacgcggcagccagagcagccccccagcgcccgccgcaccgggccagcagggcagac

SEQ ID NO: 220408 - RNA, 75 nt, Homo sapiens
aagaggcaccccggagccagaggcgagcggcagcaccgacacaaaggaagaaccgaagagcaggaccgagacacc

SEQ ID NO: 220409 - RNA, 69 nt, Homo sapiens
cgcgagccgcccccggaacagagacgcaggcaagagcgcggaggagagagccaaaagaagggggccagc

SEQ ID NO: 220410 - RNA, 66 nt, Homo sapiens
accgaagaggacaaggagagaagcagacagaaggacaggggaaccccagggacggaaaaggagccc

SEQ ID NO: 220411 - RNA, 45 nt, Homo sapiens
gagcgggcaccaggaagcgaaggcgaccgaggaagccgacaggac

SEQ ID NO: 220412 - RNA, 35 nt, Homo sapiens
ggaccagcccaacagcggggagcgcaaggccaaga

SEQ ID NO: 220413 - RNA, 66 nt, Homo sapiens
gcgggcgccgcccccccggcccccgggacggcccaaggccagcccgcagggacgcggacgcgcagc

SEQ ID NO: 220414 - RNA, 56 nt, Homo sapiens
gcaagaaaagagagcccgggaccgagccaaaaccacagggcgaaaaaacgagaaag

SEQ ID NO: 220415 - RNA, 74 nt, Homo sapiens
aggcccacccggccaccccccagggagccgaagccaagggacggccaccccagccaggaccccacccgcggaca

SEQ ID NO: 220416 - RNA, 61 nt, Homo sapiens
cccaggacaccccgaagccgagaaaggccaagccgacgccagcgggcgccacccaacaggc

SEQ ID NO: 220417 - RNA, 59 nt, Homo sapiens
cgacccagcccaccaggcagcagaaagacagcagaacaccgaacaggggacccaagcca

SEQ ID NO: 220418 - RNA, 71 nt, Homo sapiens
ccgcacgacaccagcaccaacccagcgaagcaagacgggggagaccagcacgccccagaggagcgccgcac

SEQ ID NO: 220419 - RNA, 83 nt, Homo sapiens
cagccagcacaccccgcgagcaagggaagaaaacgccagagaagcagagcagcccggagcgaggggagaccggggaagcggcg

SEQ ID NO: 220420 - RNA, 77 nt, Homo sapiens
cccccgcgcaaggacaggcccgcagaaaagggagcagacaggacacgcccaagcaagggagccaccaccagaagagg

SEQ ID NO: 220421 - RNA, 79 nt, Homo sapiens
gagacgagaaagaacacgcggccaaacccggaggaggagacacagaacggggcagcgagaaggagggggcccacacaac

SEQ ID NO: 220422 - RNA, 69 nt, Homo sapiens
ggcgaaaggaacggaaggaaccaaaacaaaaacccggcaaccaagaagcacaaagaagacaagacccaa

SEQ ID NO: 220423 - RNA, 72 nt, Homo sapiens
acggaccaaaggccgggcgcagaacccccagaccacacgcgccgcgcgccgggagaggcccggggcccgccg

SEQ ID NO: 220424 - RNA, 87 nt, Homo sapiens
ggacgaggcgaggacacagggggacacagaggcacgagcgagaaggccggaagcggcacggggaacaaaaggaagacaaaaggagga

SEQ ID NO: 220425 - RNA, 73 nt, Homo sapiens
acaaacacacaaaagggaacagcgcagggcggagaacggaaaagcaccaggaagcagagaggaccgcagaagg

SEQ ID NO: 220426 - RNA, 80 nt, Homo sapiens
ggcagcgagaccccggggccaagaagcggggcggagagaaggaccagcgaagcaggccccggcagcccacgaacccaagg

SEQ ID NO: 220427 - RNA, 91 nt, Homo sapiens
aagggggaaccccccggaaaggacgagaccgaagagaaggaaggacagcgagagagaagagagcagcacaaggagacaaaaacgggagcac

SEQ ID NO: 220428 - RNA, 64 nt, Homo sapiens
aacgggaacccgcagacgggcgggaaagaggcgagaggcccgggggccaagccgaccacaaaga

SEQ ID NO: 220429 - RNA, 78 nt, Homo sapiens
cagggggggaaaccaccgcggagcagaccaccgcccagcaaaaagcggcggaaagaaagacaaaaggaaaaagagaaa

SEQ ID NO: 220430 - RNA, 67 nt, Homo sapiens
gaggacgggggaacggacgggaggaggaaaacacagcagcagcagcaaacaaccacccaagaagacc

SEQ ID NO: 220431 - RNA, 79 nt, Homo sapiens
ggaggcgagacgacagcccaaacaggagcggagcagccaaagaggagagaagaaaacgaccggaaggacgcccaggacc

SEQ ID NO: 220432 - RNA, 77 nt, Homo sapiens
gcagaccaaccagcccagcagcagcagcagggggagccaagccaggagcagcaggaggagaaaaggaagaagaaaga

SEQ ID NO: 220433 - RNA, 54 nt, Homo sapiens
cagccgggaacccccacgcggccagcgaaaacgcccagcacccagccaaaccca

SEQ ID NO: 220434 - RNA, 80 nt, Homo sapiens
cgcgagagaaacccagacagaggggagcacagagaaagagaagagaagagaaaggcccggagacgaccgaccgagagcga

SEQ ID NO: 220435 - RNA, 63 nt, Homo sapiens
cacgcgcgaggcggggccgggacgggcggcccaagaggacgcaggagacggcagcgaggcacc

SEQ ID NO: 220436 - RNA, 50 nt, Homo sapiens
cccacggccgcaggcgcaaaaggcaggcgccaggggggcgggccgagcac

SEQ ID NO: 220437 - RNA, 70 nt, Homo sapiens
cagaccagacacaagaaaaccagccgagaaggaggggcacagggccagagcagagggaggaagcggaggg

SEQ ID NO: 220438 - RNA, 46 nt, Homo sapiens
cgccccccggcagggacagggggacccacaaagcagaagaagagga

SEQ ID NO: 220439 - RNA, 52 nt, Homo sapiens
gacaagaggaagaagccgagcgccggaaaccagcccggccacagaaaccaga

SEQ ID NO: 220440 - RNA, 58 nt, Homo sapiens
ggacacacagacccccaccaagcaggcgacagggggaccgcggcgcgagggacgcacc

SEQ ID NO: 220441 - RNA, 86 nt, Homo sapiens
ggcgcccagccccaggaaggacccaggacacccggaagccggaaaggcagcgcggggagaccgagccgggccaagaggcccgaggg

SEQ ID NO: 220442 - RNA, 73 nt, Homo sapiens
cccacgagaaacgccaagagcagccgacaggccaaggccgcaacaccggaagcaaacaggagcgaccaccgcg

SEQ ID NO: 220443 - RNA, 82 nt, Homo sapiens
ggagcggacgcgcgggcgcgcccggcaagggcccggcgacgacgcccgcgggggggccaggccccacgcccacagcagcacc

SEQ ID NO: 220444 - RNA, 60 nt, Homo sapiens
gaccccgccagaccaacaagcggagggggaaaacaggaagagaacgaggagcaacccaaa

SEQ ID NO: 220445 - RNA, 72 nt, Homo sapiens
gccacccccaacagggccgccccaggacaggggacgggcgcccagccaaaaggagaagcgaacaaaaaaaac

SEQ ID NO: 220446 - RNA, 84 nt, Homo sapiens
ggccgcgcgcgcccccgggcggaccagccccgagcgggacagcgcggcggggagcgacgagagcagcggcaaaccagaaaagcc

SEQ ID NO: 220447 - RNA, 90 nt, Homo sapiens
aaccacggcaaaccaacaagagcccgccagagaagacaagggcagaaagcaccagaggggggcccaagggaggaaggcccgggggccgag

SEQ ID NO: 220448 - RNA, 70 nt, Homo sapiens
ccgccccgccaccgcaacccagccaggaagaagaaaagcaaccagacccgaggagcggggagagaaaggg

SEQ ID NO: 220449 - RNA, 72 nt, Homo sapiens
ggccaacaaaagcaccaccaagggcgaaaagccaggagcaaaagacgagcgcgacgccaccagcaacgaacc

SEQ ID NO: 220450 - RNA, 72 nt, Homo sapiens
cagcccccgggagcgggacacagagcaccaggcccaggccaggcaacgaggacagcccacgcaccccgcccc

SEQ ID NO: 220451 - RNA, 73 nt, Homo sapiens
acaggggcccaggcggaacggccaaacagggaccaggcagaagaagccacacggggagccgcaaagccaaccc

SEQ ID NO: 220452 - RNA, 75 nt, Homo sapiens
cgaccggcacacagcagagagaggaccggccgagaccagccagggagcgcgaaccgcccgcggaaccacagccca

SEQ ID NO: 220453 - RNA, 71 nt, Homo sapiens
ggccagaagagaccccagaggacaacagcagcagcagagaccagcaggacaggcagagcagcgcaggagga

SEQ ID NO: 220454 - RNA, 78 nt, Homo sapiens
aaggaccgagccgggccgcccacagggggaagaggcgccgcccgggggacggcaggacaccaaaaaggcacagaagaa

SEQ ID NO: 220455 - RNA, 73 nt, Homo sapiens
gcaaggaaaacagggcaaccggggaggacagcagccgggcagaacaccagaagcagccgaaacgaaccaagaa

SEQ ID NO: 220456 - RNA, 84 nt, Homo sapiens
gacaacgacaggaacccaagaagaggcgccagaggagccgcccgcccagaacggcggaccggaggcacccccagcaggacagca

SEQ ID NO: 220457 - RNA, 76 nt, Homo sapiens
cgccccggggcgcggcccgggcacagcaagcccgagaagcaagaccgccccaaaaagcaagaaaagaccggagggc

SEQ ID NO: 220458 - RNA, 64 nt, Homo sapiens
ccggggcggcccaggcgagcgggagcagggaaaaccgagggcggaggccagacacaagaagagg

SEQ ID NO: 220459 - RNA, 104 nt, Homo sapiens
cccgccaaggacaggcgaggcgagccagggcccgcagcgaggaagcggacacaggaaaacgagaagaggcaggcaagcaaagagcagagcaccggaacgggacc

SEQ ID NO: 220460 - RNA, 107 nt, Homo sapiens
aggacgaaccaccaaccagcagaaggaagccaagacaaagccagacccagcggacgaaccacgaagaccaagagccaaaacacacccccccaaagaaaaaagcggga

SEQ ID NO: 220461 - RNA, 88 nt, Homo sapiens
gcgcagccagagccaccagcgcagcgcgccaggagcccagcagcaagacgcccaggaccacaccgcagcgaacgcaggccccagcgaa

SEQ ID NO: 220462 - RNA, 78 nt, Homo sapiens
ggacccccggagcccgaagacagcaccgccagccaagggaaggagaaaaggccagaggaaccaagaaccaacacagac

SEQ ID NO: 220463 - RNA, 82 nt, Homo sapiens
agaccaggaaagaagggggcagaagagggagagcacagcagacgaaccgaaaaaaagaaaagcaggccgacccaaagacaag

SEQ ID NO: 220464 - RNA, 78 nt, Homo sapiens
gccgagaaggagggaggggaaacacaaagccggcacgcgcgcgaggaaccaagaacagagaccagcacaaccagggaa

SEQ ID NO: 220465 - RNA, 76 nt, Homo sapiens
ggcaccccaggcgacgagagcaagccaaagaccaaggggggggcacccccacaacggacagcacaaaccaggcgga

SEQ ID NO: 220466 - RNA, 77 nt, Homo sapiens
ccggcaccaggaccaccgcggcagcacgcggcgaccacacaaagaggggagcgaccaaacagaacaacaccagcgac

SEQ ID NO: 220467 - RNA, 69 nt, Homo sapiens
cgcccggagggggccccaccgggcccgaaggcgcgcaaagcaaacgccagaaggacaaggccgccagag

SEQ ID NO: 220468 - RNA, 80 nt, Homo sapiens
ccgaacgcgaggccaacagccccggacccccagcaacccagaagccagacgggagggcaaggccgaaccgcaagagcggc

SEQ ID NO: 220469 - RNA, 83 nt, Homo sapiens
gcgaggcagcgaccgaaagccgccaggggcaaaagcagaccggaaaacccaccggcaagaccacacccgaggggagcccagga

SEQ ID NO: 220470 - RNA, 43 nt, Homo sapiens
accccgacggaccgcgacgagaccgccggccagcgggacggca

SEQ ID NO: 220471 - RNA, 73 nt, Homo sapiens
gaagaaagaaacaagaagaaaagaggaccggcggggcgcggaggacgcagcggaacgagacccgggccccgca

SEQ ID NO: 220472 - RNA, 70 nt, Homo sapiens
gggcacacaaaacagccacaccaggaagggggcccgcagcaaaagcgaccccgacaccccagcaagccaa

SEQ ID NO: 220473 - RNA, 68 nt, Homo sapiens
caccaagggcggggcgaggaagaggcagaagacagccacacaggcacccacccaggccaacgaggagg

SEQ ID NO: 220474 - RNA, 100 nt, Homo sapiens
cgccacccgcgccccccgccgccgccgccgcgcgccaaagcgcgccgccccgggcaaaagcaacggggcggcacacaaggagcgaagggcagggagaacg

SEQ ID NO: 220475 - RNA, 76 nt, Homo sapiens
agcggccgcgcacccccggccggaggcaccagccccaggaccgggggccgggcgaggaggccgggagaagccgaag

SEQ ID NO: 220476 - RNA, 137 nt, Homo sapiens
cgccagccccccgccgcgcggagcccacgaaggggacagcgcagccggcccagagccgggcccggggaccgagggaaaccgccccccgacagaccgaggggagaagaggggagcaagcacggcccgggggccgcaag

SEQ ID NO: 220477 - RNA, 71 nt, Homo sapiens
aagcagcccggagccagccagggcacgaaccagacccgaagacaaaaccacccacgaaagcgaaaagaccc

SEQ ID NO: 220478 - RNA, 81 nt, Homo sapiens
cagccacccggcaagccccaacaagaagaggaaaaaccaaagcacggaacagcaaacgagaaggaagacacagaaagaaaa

SEQ ID NO: 220479 - RNA, 76 nt, Homo sapiens
ccggaaagcaggaccgcgacggcagcagagcacaaagcccaacccaaggagggcggggcaaccagggaccagacag

SEQ ID NO: 220480 - RNA, 67 nt, Homo sapiens
gagcgagcaagaacaaggccgcaaaggaacgccacaaagaggagggcaaagcagaaaagcccacgga

SEQ ID NO: 220481 - RNA, 74 nt, Homo sapiens
gaagaagcacgaaagccccacccgccgcagcaagcagagacccaccgaagagggaaggcaacaagccagacagc

SEQ ID NO: 220482 - RNA, 72 nt, Homo sapiens
ccccacgcgggccaagacgaacccgcaagaggacgcaggagggccaacccggaggaccccagcaacaaaggg

SEQ ID NO: 220483 - RNA, 81 nt, Homo sapiens
aaaagcagagcgaccggaagggaaagcgccgagagacgggccgcgccgcccgcaagcagagggacccaacggccaagacgg

SEQ ID NO: 220484 - RNA, 51 nt, Homo sapiens
ccaaagcgaagaagggcccgcggagcagaagcacgccccgagaaacggggc

SEQ ID NO: 220485 - RNA, 77 nt, Homo sapiens
gcagaaggaaaacggaagggaaaggcacggaagggcgagaccgaccccggcccaagcaaaagagccaacacccaggc

SEQ ID NO: 220486 - RNA, 70 nt, Homo sapiens
cacaacaccaaccacaccggagcaggacaagcgaacagcagaaaaggggaaggaacaaaccaaagagcag

SEQ ID NO: 220487 - RNA, 79 nt, Homo sapiens
agaaagccgcaaagccacccgagaccgaagaggccaccaggcaccggacagggaggaaccggccagcgggaggacaggc

SEQ ID NO: 220488 - RNA, 74 nt, Homo sapiens
accccaggggaacaagaggccacgcagagccacgccggggccaccgcaggccgcgcgcgcgggacgcgacccag

SEQ ID NO: 220489 - RNA, 87 nt, Homo sapiens
cgggaggagcgccggaacgccgaggcccaggagcagcagccaagcggacagagaccgccccgccaccccggggggccagccccaacc

SEQ ID NO: 220490 - RNA, 82 nt, Homo sapiens
cagcacgcacggacacccgagcacagagacgaagaggaccaggagcaaacagaaacacaaggaggaagagcgagagaagaag

SEQ ID NO: 220491 - RNA, 81 nt, Homo sapiens
ggaacaagggagcccaaaccagaccccagccccgcaaaaacagaaccaaaaaagaacgagcagcaaccagcacccaccagg

SEQ ID NO: 220492 - RNA, 70 nt, Homo sapiens
aagcgccccaaggaagccaggagagagcgaccagccgacggaagacggaaggccagcagcaacgagaaac

SEQ ID NO: 220493 - RNA, 76 nt, Homo sapiens
aacagggacggagcggagaaaaggaaccggccccggaaagacccggaagcaagaagacaaacgaggggagaaagaa

SEQ ID NO: 220494 - RNA, 58 nt, Homo sapiens
aacacgccggaaacaagggcgagaaccacgccgacaacggcggaagaggaacgggaac

SEQ ID NO: 220495 - RNA, 82 nt, Homo sapiens
gcaccaaacccccggacccggcaacgacggaaacggagcagcgagcagggaagagcaaccaggcagagggaacgccacgcga

SEQ ID NO: 220496 - RNA, 58 nt, Homo sapiens
cgacccacgcagaggcgaagacggggagccacgagacccgccccaggcaaggaacaga

SEQ ID NO: 220497 - RNA, 73 nt, Homo sapiens
gaagagcgaaaaaacaggaggacacaagccgggacaccacagcaagaggaacgggcacgccagaaaagaccag

SEQ ID NO: 220498 - RNA, 71 nt, Homo sapiens
gaacccgcgaagcgggaagggcgacccaccaacaggcaacccagacaaagaagagcagccgcagaaaaaaa

SEQ ID NO: 220499 - RNA, 69 nt, Homo sapiens
cacacaggccagaacgagggaaggaagggaacacggacgacgagacacgaccaacacaggcgaccaaac

SEQ ID NO: 220500 - RNA, 33 nt, Homo sapiens
cccgagagagaagggcccacagaaaggggcgga

SEQ ID NO: 220501 - RNA, 39 nt, Homo sapiens
ggcaaacccgagagaacggagcggaggagaagaagggaa

SEQ ID NO: 220502 - RNA, 78 nt, Homo sapiens
gaggggaggcgagaacacgaggagcacccgccagaaaaaacaaggaaaaccaagcacacaaaagagagagaaagaaag

SEQ ID NO: 220503 - RNA, 73 nt, Homo sapiens
caggaaaaacacagagacagacggcggcaggaagggagcggggagcgaaaggaaacgggcgaaaggaggacaa

SEQ ID NO: 220504 - RNA, 68 nt, Homo sapiens
gccacaggagcaaaagaggcaccgaacaagaggagaaaggagccggaacaaacccgggagaaccgacc

SEQ ID NO: 220505 - RNA, 67 nt, Homo sapiens
agggcgaaaccccacaagggaaaggaaaggacccccccagggcgggaagcggggaaaggaaaacacc

SEQ ID NO: 220506 - RNA, 88 nt, Homo sapiens
aagacgacgcaccgcaggcagacaaaagggccaaagaagggagagagaccccaaaagaaccggccccggggcaaaagcgcaggagaaa

SEQ ID NO: 220507 - RNA, 76 nt, Homo sapiens
accacagaccagcagggaccgggcacagacaacccccaccgcaaccagaaacaaaaccagggaagggacgagacag

SEQ ID NO: 220508 - RNA, 73 nt, Homo sapiens
caccccgcccgcccagagcggcgcagaggcaacgagacccagagccgccaacaggaacggccgaacacagagg

SEQ ID NO: 220509 - RNA, 81 nt, Homo sapiens
aagcaggcgcgaaagcacgagaggaacagaaaggcgccaggggagaggaggcagaaggagaccgcgggacagaaccgcggg

SEQ ID NO: 220510 - RNA, 67 nt, Homo sapiens
caaccccaccgggccccccacgcgccccccaccggacagcaagaagcacgcgagaaggggaggggga

SEQ ID NO: 220511 - RNA, 74 nt, Homo sapiens
gagccaaacaaaggaacgccaagcccggcaggacgacaggagggacaaaaaggcagccccaggagcgacagcag

SEQ ID NO: 220512 - RNA, 55 nt, Homo sapiens
cgacaaggcaaacaaagcagcgacgagaggaagcaaaggcagagcaacagggaca

SEQ ID NO: 220513 - RNA, 96 nt, Homo sapiens
ccagggagccaaagaccccccacaccggcccacgcccccgacgccaccgacaaccccggaacgcgggcaaaaggccccaggggaccgggggaggcc

SEQ ID NO: 220514 - RNA, 75 nt, Homo sapiens
gaaccgggcaaacagcgaaagaagacagccagaaagacccccacccaacaccaggccacgagggcacagaacgag

SEQ ID NO: 220515 - RNA, 60 nt, Homo sapiens
aacagacagacaggcccagagccgcgaaggacagaggaaggccagcacgacaaccccggc

SEQ ID NO: 220516 - RNA, 81 nt, Homo sapiens
aaggcgccgagggagacaggacaagaggcgggagcggagaggaggcaggggccggaggccagcaccacccccgggcgccgc

SEQ ID NO: 220517 - RNA, 58 nt, Homo sapiens
aggacaacgaccacaggaacggaaaaaacagacagccgacccaaaccagaagacggcc

SEQ ID NO: 220518 - RNA, 75 nt, Homo sapiens
ggacacagagccaacccagaagagccaagggccacccgcacggcagcaagaggaaagccgccggggccagggggg

SEQ ID NO: 220519 - RNA, 68 nt, Homo sapiens
agggcgccagcccccccgcccgcgcgccccggagcgcgaaggagcgcggggggcgaaggaacacgagc

SEQ ID NO: 220520 - RNA, 56 nt, Homo sapiens
ccggacgaaacgaccccaccagccccaaaaggcggcaacagggacgggcgcggcga

SEQ ID NO: 220521 - RNA, 83 nt, Homo sapiens
cggcgggcggcagcagcggggcggggcgaagaagcagcacaaggcgagccaggagcgcacgccacgaggagcagggggggcgc

SEQ ID NO: 220522 - RNA, 59 nt, Homo sapiens
agagaacacgagacaccgcaacaccccacaaggacaggcaaccacagagagagcagccc

SEQ ID NO: 220523 - RNA, 56 nt, Homo sapiens
gcagcggaagaggacgacgcgacacaaacaaaaggggacagaagggaccaacggcc

SEQ ID NO: 220524 - RNA, 74 nt, Homo sapiens
acaagaagcccgacgagacgaccaaaaaacggaggagagcaggaggcagaagcaaagaagaccgcagaagaagc

SEQ ID NO: 220525 - RNA, 59 nt, Homo sapiens
acccgaggcgcggagacagaccccggcggcgacacagcgagagcaggcccgggggaccg

SEQ ID NO: 220526 - RNA, 83 nt, Homo sapiens
gcgaagcccagggaggccaccagaccacaaggccgcgaccacccaaccccgagcgcaccaacgaggaggcgggccgccgccgg

SEQ ID NO: 220527 - RNA, 68 nt, Homo sapiens
cgagcacaagaccaaacgcccagaaccccggacgcacaagcagccgggcaggacagaagcagagaacc

SEQ ID NO: 220528 - RNA, 73 nt, Homo sapiens
ccccaggcgagcagcaggcacaccgcagcaaggggaaaagagaaggggcagaaggaaggggaccaagccaacc

SEQ ID NO: 220529 - RNA, 73 nt, Homo sapiens
cccgcgacgccaaccacgacgaagcggaaggcagaagcgaccagggaggagaccaggacagcagaggggcgaa

SEQ ID NO: 220530 - RNA, 48 nt, Homo sapiens
gccccacgcccgaggcaaaccagacccaacacgccggaggggcccagg

SEQ ID NO: 220531 - RNA, 55 nt, Homo sapiens
gaacaccagagcaaccacacgccagaccagaagaggaaggggaagacacagaaaa

SEQ ID NO: 220532 - RNA, 82 nt, Homo sapiens
agcacgagccacagagagagaagaggcagggagcagcaagacaacacgcagagaaccagggaaaccagacgaaacaacagcc

SEQ ID NO: 220533 - RNA, 71 nt, Homo sapiens
aaccagcacggcgcaacaggaccacagcaagacgacaagcacggcagaacaagggagaagagagcagcaag

SEQ ID NO: 220534 - RNA, 53 nt, Homo sapiens
gcagcaaacacaggacagccaacaaaaagacgaaaaaaacagaggcgggaaac

SEQ ID NO: 220535 - RNA, 70 nt, Homo sapiens
caccggccagcccagcccccgccgcggagcccagaccgagaaccgggggaacgcgggcgccggaacgacc

SEQ ID NO: 220536 - RNA, 67 nt, Homo sapiens
cccccaggcagccaagcggccagagcgcagaaaaccccaggaacaacaggcagcacggccccccagc

SEQ ID NO: 220537 - RNA, 76 nt, Homo sapiens
acggaccccagggaaagagccaaagcggacgccggccaccacgaaggcgacacagaagacgagcgacaaaagcacg

SEQ ID NO: 220538 - RNA, 82 nt, Homo sapiens
cagccgccgcccacggcacggcagccaccaggcgcccgcggccggcccggcggagagggccggcagaacacagaggcagaga

SEQ ID NO: 220539 - RNA, 52 nt, Homo sapiens
ggcaagccgggaacgcaaaaggaccagccaggggcaagacgccaagagaaaa

SEQ ID NO: 220540 - RNA, 78 nt, Homo sapiens
aagcagcccaccacgccacaaacgccgcaccaggcgagcagcgcccccgacaagcagaccggaagaccgacggaagac

SEQ ID NO: 220541 - RNA, 78 nt, Homo sapiens
caccccaggaaaaagacagcccgcagcacgaccagcaggaacgaagaagcccaggacccaggaaggagacacaggaaa

SEQ ID NO: 220542 - RNA, 81 nt, Homo sapiens
ggcaaaaggcggcgccgaggagcgggacaacccaggagcagacagagaagcgcgcagcagccacccccacaagaacacgga

SEQ ID NO: 220543 - RNA, 59 nt, Homo sapiens
gcagaaaacgaaggaagaggagaacgaaaacaaacggaagagagggcagcaagaaagaa

SEQ ID NO: 220544 - RNA, 82 nt, Homo sapiens
aggagaagaccaggaggcgggccaaggagccggcccccagaagcagccgcggcgcgggggcccaagcccggaacccggcagg

SEQ ID NO: 220545 - RNA, 63 nt, Homo sapiens
accagagaaaaaccgaccaaaccacgcacaccagggagagacgccggagcaaaagcccaacaa

SEQ ID NO: 220546 - RNA, 67 nt, Homo sapiens
gccagcgcaagaggagccaagcaaacagaagcgcggccaagcggacaaacaaaagcagagaccgacg

SEQ ID NO: 220547 - RNA, 77 nt, Homo sapiens
gaaaaggaagaaaggacaaggagaaaaccacaggaccgacaagacggaaaccgggagggggaaaagcgagaaaaaga

SEQ ID NO: 220548 - RNA, 81 nt, Homo sapiens
ccagacgcaggacacgaggcaggagccaaagcgaccgccggagcgaggaccagggcgaacaccggggacaaccaaaacgcc

SEQ ID NO: 220549 - RNA, 77 nt, Homo sapiens
agcacaaggaacggccaaacaacagggaaccaaggggacaaaccaacagaagggcaaccagcggggaggggagaggc

SEQ ID NO: 220550 - RNA, 71 nt, Homo sapiens
cggcgcccacgggcccaggacaggaggccagggcacgggaaggcagcacgaggcaaaacaaggagcaaacc

SEQ ID NO: 220551 - RNA, 61 nt, Homo sapiens
aggcggaggcgacgaggaggcggacccccggcgcagagagacgggggcaccagagccagga

SEQ ID NO: 220552 - RNA, 72 nt, Homo sapiens
ggagcaaaacgccaggccggaggaaagagcgcacgcaagggagcgccgcaggcgccaaaaggaaacacggaa

SEQ ID NO: 220553 - RNA, 83 nt, Homo sapiens
agcgaggaagaagaggacgacgacgacgaggaagaggaggcgaggagccacaaggaagcccgacagccagagcgccggccagg

SEQ ID NO: 220554 - RNA, 80 nt, Homo sapiens
ggcgggccaccaggcgcgcgcccacgccggcagagagacacggaagccggcccaagggggagcacaaagagcccggcccg

SEQ ID NO: 220555 - RNA, 79 nt, Homo sapiens
cccgggacacaacgacgacaacagaaccaagaaggagcgagggaggagcagcgagacagcaagagacgaccacagagcc

SEQ ID NO: 220556 - RNA, 86 nt, Homo sapiens
gaagcgcccaacaccgacagacgaagaaacagccagggaggacaagcagggcgggccagggacagacgcaagaggcccgccccggg

SEQ ID NO: 220557 - RNA, 74 nt, Homo sapiens
ccaggacggagagggagaagggacgcagaccagaggaaagggagaaacacaggacagaagggaagaaaaaggga

SEQ ID NO: 220558 - RNA, 77 nt, Homo sapiens
gggaccggggagagcagacgcacacaggagagccaggacagccacaccccaagagggaaagggagcagcaccggcca

SEQ ID NO: 220559 - RNA, 67 nt, Homo sapiens
cgccagcgacaaccagccgacccaccaccggcccaggaccccacccccagggggcaccagccgaagc

SEQ ID NO: 220560 - RNA, 77 nt, Homo sapiens
ggaagaccgccaaaaaggacacggagccaggaccaaaacaggcacaaaagggaacaaaaagcaccgaagaggaggcc

SEQ ID NO: 220561 - RNA, 68 nt, Homo sapiens
ggagcgaccccgcggggcgcggagaagacagaggagccagaccaagagacagcacaggcgagcgagca

SEQ ID NO: 220562 - RNA, 86 nt, Homo sapiens
ggccgagcgcggggcgccggaggcagagcggggcccggcgcacccaccaccgccgcccacggcagcccagggacccgagcaccgcc

SEQ ID NO: 220563 - RNA, 82 nt, Homo sapiens
aacccaagaccaggaacccgcgcaaaaaggaacaagccagcacaaggcggagaccagaaggccaaaacaaaagagggcaggc

SEQ ID NO: 220564 - RNA, 66 nt, Homo sapiens
aggcagcccaaaaggacaaccagcaggcaagacgcggagagcacagaagaagaacaaagcaaggca

SEQ ID NO: 220565 - RNA, 53 nt, Homo sapiens
cacaagggaaaccacaggaaaaggcacacaaaggaaaagacacgaagggaggc

SEQ ID NO: 220566 - RNA, 71 nt, Homo sapiens
ggcccggccagagggcagccaaagacagaaaagccacacccacaaaagcgaaaagccagacaggaacacca

SEQ ID NO: 220567 - RNA, 57 nt, Homo sapiens
gggaggaggggcaggcccggcgcccagccacaggcaacgaaaacaacgagccacaag

SEQ ID NO: 220568 - RNA, 88 nt, Homo sapiens
cccaccccacgccccccccgggcaggcccgggcaccaccacggggccccaggccaccaccaccagccgccaccggcacggccaggcca

SEQ ID NO: 220569 - RNA, 73 nt, Homo sapiens
gaggcccaacccccaccccgcccaaggaggcccagcgacaacaggcacaaagagagaaggaacacccacaggg

SEQ ID NO: 220570 - RNA, 71 nt, Homo sapiens
ggaaacaggaggcggaaaaccccccaaggacacaaggagacagagccagcaacagcagcgagaagaggaga

SEQ ID NO: 220571 - RNA, 81 nt, Homo sapiens
aggaggcaagaaaggggaaccccggagaaaaggccaagaaggcagcgcagaaccggccgaaaagcacaaacagcaagaaag

SEQ ID NO: 220572 - RNA, 78 nt, Homo sapiens
gggaagaccgagaaagaggcgcacaccccgcacagcagcacacagacacagaggcaaaaagcaccgggaggaaagaga

SEQ ID NO: 220573 - RNA, 58 nt, Homo sapiens
agaacagggaaacagaagaggcagcgcgacgaaagcaagaaggaaacaaaagagcaaa

SEQ ID NO: 220574 - RNA, 71 nt, Homo sapiens
cacagcagagcgcaggaaagacaagccgggagcagacaagaggacaccgagccaggggggcaagacccagg

SEQ ID NO: 220575 - RNA, 86 nt, Homo sapiens
cgccggagaggcgggcggcgccgggacagagccaggacaaaaccaggcagaaccaacacgaacccaagcacaaacaagaaaacgag

SEQ ID NO: 220576 - RNA, 59 nt, Homo sapiens
cgccgagagaccggaacgaccgcccgaggaaggagcgaagaccggaagggagggccaag

SEQ ID NO: 220577 - RNA, 72 nt, Homo sapiens
gacgggagacgagagaacacgccggagagcagaagaggagccaggaagacaggggcaaggccgaggggaaca

SEQ ID NO: 220578 - RNA, 37 nt, Homo sapiens
cccaaagcacgggggcaacagaggacccggcggaaac

SEQ ID NO: 220579 - RNA, 58 nt, Homo sapiens
caccacccgcacgggaaaaggacaggaaaaaacggaagcacaaaacaagagaagcacg

SEQ ID NO: 220580 - RNA, 82 nt, Homo sapiens
ggcacccaaaccacccaagcaacgacgagacgcgacgagcgcgggcagggagggcggggccggggggacagggccagaggaa

SEQ ID NO: 220581 - RNA, 78 nt, Homo sapiens
cgacgcaggagggagagcacagcaagagccaggaccaccggaagccagaaagaagcccggcaggcacccagagagcaa

SEQ ID NO: 220582 - RNA, 71 nt, Homo sapiens
cagacaagacggacacacaacaaaccagagcagcgcagggcgagggcgcacaaaggcggaccagaggacgg

SEQ ID NO: 220583 - RNA, 88 nt, Homo sapiens
ccgaggagcagaacaccagagagcagcagccagccaagcgagacagcagaaggagcaaagcccaagaaaccacagaaaccagaagacg

SEQ ID NO: 220584 - RNA, 67 nt, Homo sapiens
cgccgaccgaagccgcaaaaccgccacggcccagggagcgcacccagcccaaccaaaccacccggac

SEQ ID NO: 220585 - RNA, 77 nt, Homo sapiens
acacagcgaggagaaacagaggagcagccgcgcaagggggaagggccggcggggcaaagaaggcggcgcgagccagg

SEQ ID NO: 220586 - RNA, 74 nt, Homo sapiens
caggaagacggccagggaaccaaacagcagagcaggcagcgccaacgcaaacacagcagggggacacacacacc

SEQ ID NO: 220587 - RNA, 86 nt, Homo sapiens
ccgggaggaaggaacgaggcaaggagcaaagcagcggcgcagcccgggaagcaaaccaaggcaggcacgcaacaagcggacgagaa

SEQ ID NO: 220588 - RNA, 66 nt, Homo sapiens
ggggagcggcaaacagcgaagaccggacaccgggaccagcaacggggcagaagccaggagcagcaa

SEQ ID NO: 220589 - RNA, 70 nt, Homo sapiens
gggaacacagacccagccgccaaggaaacccagaaacagggaagaaaagaagaggggacgaaaggaagac

SEQ ID NO: 220590 - RNA, 77 nt, Homo sapiens
gggaaaacgcaggcagacaggccgaaagggacgaaacgcccaccccgggaagcaggacgcgcacagagcgacagaaa

SEQ ID NO: 220591 - RNA, 80 nt, Homo sapiens
agggacggcacgggaccacccgcaaggacccggaaggccggggggccgagaagacaggcaagcaaagcaaacgacgcaag

SEQ ID NO: 220592 - RNA, 62 nt, Homo sapiens
gcgcagcggcaggcggagagacccgccgccaggaaggcacagcgagcacccaaaccaaccca

SEQ ID NO: 220593 - RNA, 73 nt, Homo sapiens
ccggggcgagacgagcgcccccgcggagccacaaggggggagaaaaggccaagggcaggagacacgagacgca

SEQ ID NO: 220594 - RNA, 80 nt, Homo sapiens
gacgacagaccgagggaggacaccggaccccggacgcgggaaagggcaaaaaacaggcagccagacgaaacacaggagac

SEQ ID NO: 220595 - RNA, 60 nt, Homo sapiens
gagaaaaggccaagaaggcaggaagaagaccagcacaaggaaaaccgaaaaacaccgaac

SEQ ID NO: 220596 - RNA, 76 nt, Homo sapiens
gccccccccacaacccccaggcgcagggaccgagggccacacgcccccccacgccggcagggaccgccgcgccgac

SEQ ID NO: 220597 - RNA, 74 nt, Homo sapiens
cggaacagccgagagccaggagggcccgggcagcagacaccccgggaaccacggcccggccccgggccagccgg

SEQ ID NO: 220598 - RNA, 71 nt, Homo sapiens
gagaaagagcagggccaaccagcagcaacgagcacgaaggaagaggcccggaaaggaaggggggaaaggcc

SEQ ID NO: 220599 - RNA, 61 nt, Homo sapiens
cacgagcaaaggacgccggggagggccgcggcgccagacacgaagcgcagaggaccagggg

SEQ ID NO: 220600 - RNA, 89 nt, Homo sapiens
ggaaagaggaggaaaacaaaagcgcacaggaagaacaaaggcagaccagccagccccaagcagccgcacgacaaagaacgaagacaaga

SEQ ID NO: 220601 - RNA, 69 nt, Homo sapiens
gggacaaacgcacagacagcagcgccagacaaccagagcgcgacgcacaaggaaaaacagagagaaagg

SEQ ID NO: 220602 - RNA, 75 nt, Homo sapiens
agagggacaaacgcacagacagcagcgccagacaaccagagcgaacaaaaccagccaagcagaggagaaaaagac

SEQ ID NO: 220603 - RNA, 81 nt, Homo sapiens
gggccagccgggcaggccccgagaggaacccagccgacacgacgccgccggcaggcccgcgcaccagagacaagggcagag

SEQ ID NO: 220604 - RNA, 65 nt, Homo sapiens
gccacccgcccggccccagcccagcgcggccgcgaccccggcggagggagaagaccaaagaagag

SEQ ID NO: 220605 - RNA, 86 nt, Homo sapiens
cccggcagccacaccgcgagaaagaggaaacgagacccagaaaggggaagcacgcaaggcacgccccaggaagcagggccacgacc

SEQ ID NO: 220606 - RNA, 80 nt, Homo sapiens
cgagacaggcagccgcgcagcagaaacgagcccccggaagggcacgagaaggcacggaagccgggccccaggcaccaacg

SEQ ID NO: 220607 - RNA, 75 nt, Homo sapiens
ccggagcccaccgcgagagaaggagacagggggaaggaagacgacacgagcaggagaccgaggacgcaaacagca

SEQ ID NO: 220608 - RNA, 61 nt, Homo sapiens
ccgacagccgcgacggcgagcccgggccgcgcccgagggaacgccgcagaaagaagaaggg

SEQ ID NO: 220609 - RNA, 85 nt, Homo sapiens
gggaccggcggcggcgcccaggcacccggcccggggaagccgggggaggccacggacaacagacgacagaggacagggacaaaag

SEQ ID NO: 220610 - RNA, 52 nt, Homo sapiens
gcagggacgaacaaaacagcggaaaagggcacagaccagggacccagaaagc

SEQ ID NO: 220611 - RNA, 84 nt, Homo sapiens
accgcgaaggagcagagagagcgacaacacgcgaacggcgaggcccagcaaaaaccaaagaggccaaacggagcgagcaacgag

SEQ ID NO: 220612 - RNA, 68 nt, Homo sapiens
aaaacaaggacaaagaacaccgccgccagcagaaaagaagccggaacaaagaaacgcaacaccaagaa

SEQ ID NO: 220613 - RNA, 59 nt, Homo sapiens
gaagaacaagaaaaagcacaagagcaccaacgaggggcgggacccgagagaacgcaaga

SEQ ID NO: 220614 - RNA, 85 nt, Homo sapiens
gaggggcgcgcaggaggaaggcgccgcgcgggacccggaggaccgaccccagcccacgggcacgcagcccggggcaagacggcag

SEQ ID NO: 220615 - RNA, 63 nt, Homo sapiens
gcggaacagaggcagcacagcaaggcagcacagccagcccacaggagcccagcagaaaagaac

SEQ ID NO: 220616 - RNA, 99 nt, Homo sapiens
caagcacaaacgaggcaggagcgaaaggaaaccggccaacggacagggcaaggccagagaaggcgggagaaagacacgaaccacagaacgcaacaggac

SEQ ID NO: 220617 - RNA, 57 nt, Homo sapiens
caaaggaaaacccgagacaagggcccacggggggagagaaagagacacggggcgacc

SEQ ID NO: 220618 - RNA, 72 nt, Homo sapiens
ccccggagagcgggacacagcccacaagacagggacaagaggacaacgcagaaagaacacacacagaagcgg

SEQ ID NO: 220619 - RNA, 125 nt, Homo sapiens
caacgccagcggggcaaccagacagcaggaggcagaaagagggaagcaagccggcggcagaacagaaacacacccccacaacacaagacagggccacgaggggggcagaacgccaacgcaccagg

SEQ ID NO: 220620 - RNA, 77 nt, Homo sapiens
ccccacaccagggggccagccaggcagcccgggagccccaccaccccgcggcaagaacagcaggcggggccgaccag

SEQ ID NO: 220621 - RNA, 79 nt, Homo sapiens
gggcccgaggcggcgagagaggcaggcggagccgaccgggccagagcgggacaaagaaggacaagaacacacggagaag

SEQ ID NO: 220622 - RNA, 44 nt, Homo sapiens
gacagccgggccaaagcagaggcaaaaacccagcccacagagac

SEQ ID NO: 220623 - RNA, 83 nt, Homo sapiens
cgcggcccgccaccggcgcaggggaggcgaacgcacgacccccgaccggaacgggacgccgcgcgccagagcacccggaggcg

SEQ ID NO: 220624 - RNA, 70 nt, Homo sapiens
agacacaacaagggcgacaggaaggagaagcagaaaacaccacaggagagagagccggaagagccggcca

SEQ ID NO: 220625 - RNA, 80 nt, Homo sapiens
gggcagaagaacaaggaagcggagaggcaagagaggacaagaagggcagagaagccagaacggagaaacaacgaagacca

SEQ ID NO: 220626 - RNA, 77 nt, Homo sapiens
gagggccggaagaccacagccaggaggaagccgcggggaaaagccgggccacagaagcaccaccacaagccacacca

SEQ ID NO: 220627 - RNA, 55 nt, Homo sapiens
gaaccagcaacaagccagcaacagccaaccagaaaaccagaaacaccggcaggga

SEQ ID NO: 220628 - RNA, 70 nt, Homo sapiens
ggcccaccaacaggaacagggcagacgagcggaggacacccaacccgggacacagagagcaaagaaagaa

SEQ ID NO: 220629 - RNA, 73 nt, Homo sapiens
accacggacaggcggacaaaacggagggacagaccaccgaaggaccggaagaggacggaaagcgaagaccaca

SEQ ID NO: 220630 - RNA, 77 nt, Homo sapiens
gaaaccgcagccaaggaggaacacaaggacccagagagggaccagggccaaagaagagccggggggcaggcggacag

SEQ ID NO: 220631 - RNA, 69 nt, Homo sapiens
cccggcccggccggggcgcgaggcgcgaggcgcaggacccgacaaacggacagcaggaccagaacaagg

SEQ ID NO: 220632 - RNA, 78 nt, Homo sapiens
cgagcacagccagggaagagcaagcagcagaccaaaaaccacgggcgggaagcacggaaacagagagccaccaagacg

SEQ ID NO: 220633 - RNA, 53 nt, Homo sapiens
agaggaaccggcccagagcacagaaggggcaagacgccaagagaaaaggcgag

SEQ ID NO: 220634 - RNA, 62 nt, Homo sapiens
gaaggaccaagaaccagagcagaaaacaggaaagaggaagaaaaggaagacgcaggaaacaa

SEQ ID NO: 220635 - RNA, 68 nt, Homo sapiens
acgccccggaccccaagcagccgccgcaaagggacgacgaagggacagccagaagggaagacagaagg

SEQ ID NO: 220636 - RNA, 78 nt, Homo sapiens
ggaacccgccgccagggaggaggcccggggaccagaagaggaggggcgaggaacaccggcacaggccgcgagacaccc

SEQ ID NO: 220637 - RNA, 70 nt, Homo sapiens
gccgggaccagcagaagacccagaagaagacagggaaacaagaagagggagaggcaaacaacgggccaag

SEQ ID NO: 220638 - RNA, 77 nt, Homo sapiens
gcaaccagaaacgggaccccacgcaccagagagaagcgacaacacgggagaagcccagccacaggcaacgaaaacaa

SEQ ID NO: 220639 - RNA, 70 nt, Homo sapiens
ggggaaacacagaacgcaggagccccagcagcacaaagaggcggaaagccggcacaccacccccccaacc

SEQ ID NO: 220640 - RNA, 77 nt, Homo sapiens
aggagggaccagagggaccagggacaccccacaaaaccagccagaccagaaagggacgaagaagaaaaagagcggaa

SEQ ID NO: 220641 - RNA, 73 nt, Homo sapiens
agaaacccccaccagagccaagagaccacacaaagcgcaaaagcaaagagcgaggccgaagacccagaggacc

SEQ ID NO: 220642 - RNA, 79 nt, Homo sapiens
gagggggaacaaaggccaacccaaaacccaaaccaggacgacgcgggccaccgcacacccagggaaccgggacaccccg

SEQ ID NO: 220643 - RNA, 76 nt, Homo sapiens
ccacggaggggagagacagagaacaagggcacagagcagggagcccagcacgaaagggcaaacgaccgccaacaga

SEQ ID NO: 220644 - RNA, 73 nt, Homo sapiens
gccaaaccagagaaagaaacacccgaacagcgaaacgcaaggagggacaggacggaaggagcggaggaagaca

SEQ ID NO: 220645 - RNA, 57 nt, Homo sapiens
gggagccgggcccgaccagaccgggcaggcacccccagcaggacagcacacccaacc

SEQ ID NO: 220646 - RNA, 75 nt, Homo sapiens
acagaaagaggaaaggcagaagcgaccgggcagccagaacagcacacagcaccggacggcacacgccggcgccgc

SEQ ID NO: 220647 - RNA, 41 nt, Homo sapiens
agggggacagcgaaacggaggacccacaggaccaagcacca

SEQ ID NO: 220648 - RNA, 79 nt, Homo sapiens
agcaggggcggaagccacacaggccagaacgagggagacaagcgcaagcagccagagcccgggcgcaaagaaccaggcc

SEQ ID NO: 220649 - RNA, 76 nt, Homo sapiens
acaagaacgcccagcggagggagagggcgacacaacgaaaccagccccgcgcaggggaaaccgcccccaaaggcca

SEQ ID NO: 220650 - RNA, 82 nt, Homo sapiens
ccccggcggagcgccggcaggcaccgcgcgcgcgggcaagagcaacgaaccaaagcaaaggaggccgggggaagacggaaaa

SEQ ID NO: 220651 - RNA, 84 nt, Homo sapiens
cgcccacaccccaagcacccaggaaccggcaacaggacaaccaccaccagcgagcaaaagaacaaagaccaagaccaagaagcg

SEQ ID NO: 220652 - RNA, 68 nt, Homo sapiens
aggcacgagggaacgggaaagaacagagaaggccccccgggcagaagaaacaccaccagcgagcaccc

SEQ ID NO: 220653 - RNA, 73 nt, Homo sapiens
agaggccccccaaagcaccgcgcaggagaggagccaagcccaacgggacgggaaaacggccacagccaacgac

SEQ ID NO: 220654 - RNA, 73 nt, Homo sapiens
cagcgaacacgcagaaaggaaaacagggcgggagaagagaggcggcaaccggaaacaagaccgcgcacgggag

SEQ ID NO: 220655 - RNA, 70 nt, Homo sapiens
ccaccccgaaacgccccgaaaagacgggcaacagacaacaggcacaaagagagaaggaacacccacaggg

SEQ ID NO: 220656 - RNA, 54 nt, Homo sapiens
caggagacgaaccaggccacccaagaaacaaacaggaacggaaaacagccccaa

SEQ ID NO: 220657 - RNA, 73 nt, Homo sapiens
ccgacgccaggcagcgcccccaaacgcagggacgcagccagcgaggccaccagcgccccgcgaaaggagcgcc

SEQ ID NO: 220658 - RNA, 77 nt, Homo sapiens
acggcgggacaggaagccacagacaagagaaagaaaaccgcaacagggcgaggcagagaaaaaaacaacacaaagaa

SEQ ID NO: 220659 - RNA, 74 nt, Homo sapiens
cagcaaaaacacaaacgagggagcaaggacaccaccagggagccaggagagcggcagcagcagagacaagaaca

SEQ ID NO: 220660 - RNA, 67 nt, Homo sapiens
cgaacaaaaggagcaggcccaccgaccccagaacggaaacacagcacgcgccaagggcacacgcaga

SEQ ID NO: 220661 - RNA, 80 nt, Homo sapiens
acccgggggagcggcgcggcggcgcgggaggacggaaaaaggacaaggaggaaagaaacgcaccacacggacagcccggg

SEQ ID NO: 220662 - RNA, 79 nt, Homo sapiens
cgggagcagagagacaccgggaagagaacgggaccggcaccacgagaaagccaacaaaggaacgagcagcaacggccag

SEQ ID NO: 220663 - RNA, 68 nt, Homo sapiens
ggcggcgcccaggccaacgggaaacggcaccgacaacggcgggcacgagagcagagccggaaaccccg

SEQ ID NO: 220664 - RNA, 78 nt, Homo sapiens
gggaagggcgcggaccggcagcagcgccaaagagaagcaggagaaggaacgggaaaagaccaaaaaaccaggccagag

SEQ ID NO: 220665 - RNA, 69 nt, Homo sapiens
gaagccgggcgccgcgcgccacgagcgcaaaagccaggaaccagggcaggccggccccgcaagcggcgc

SEQ ID NO: 220666 - RNA, 58 nt, Homo sapiens
gagaaaaggaaccggccccgggacggccagcagaagcaggcgagccccccgagaaaaa

SEQ ID NO: 220667 - RNA, 69 nt, Homo sapiens
ccacacggcggccgcagggcgccggagccccccagacaacggcaagcggagaagagcaaggccgaaccg

SEQ ID NO: 220668 - RNA, 54 nt, Homo sapiens
ccagcaaacccaaaccagcggcacaggaagaaaaaagacgcgcccgcaagaaaa

SEQ ID NO: 220669 - RNA, 68 nt, Homo sapiens
aagggcccggagcgaagcccaaacaaccgggcaccaggggaggaagaaggagagaggcgccagagcgg

SEQ ID NO: 220670 - RNA, 82 nt, Homo sapiens
caccccgagcgcgcacgggacgaaaagcaaacagccggcaccaggagcagcaccagagcgaacgagcccccggggagcggcg

SEQ ID NO: 220671 - RNA, 71 nt, Homo sapiens
ccgaccggacccagccccagaaggccccgaccccaaaacaacccaagcaggaccagcccccacgagaaacg

SEQ ID NO: 220672 - RNA, 62 nt, Homo sapiens
agcccaccccggagcgcggccgcagggcaccgaaggacacagcaggggccagacaaccagac

SEQ ID NO: 220673 - RNA, 76 nt, Homo sapiens
agcgagcgagggggggcgcgccggaaaccggagcgcgcagcagggggagcccggcccagccccccaccccccgccc

SEQ ID NO: 220674 - RNA, 73 nt, Homo sapiens
cagagcccagcccagagaggcccacaaccaagccacaaaagacacgccacaaccgggcccgaaaacggccagc

SEQ ID NO: 220675 - RNA, 42 nt, Homo sapiens
gaaccccgcagccacccacagccccaacggacccaggcaaaa

SEQ ID NO: 220676 - RNA, 80 nt, Homo sapiens
gccagggacgggggccaccggacagggcacgcagacgcagcaggagggaagcgcgcagacgggcaggcgcgcggggggcg

SEQ ID NO: 220677 - RNA, 73 nt, Homo sapiens
cagaagaggcaagccacacggaaacaagcgaaaaacgacaggccaggacacgcagcacagcagaggacgagaa

SEQ ID NO: 220678 - RNA, 84 nt, Homo sapiens
gaggaggcgagcagccgggagacaccgccaccgccagggacccccgagagcgggcaggaggcgggagaggacgaggagaaaacg

SEQ ID NO: 220679 - RNA, 79 nt, Homo sapiens
gcggagaacccgaagcacccccggcgccgggacgcccggcagccgacagggaagagcagaacagcccaagggacccgac

SEQ ID NO: 220680 - RNA, 78 nt, Homo sapiens
gcgaggacggcggaccccgcggcgggaggagccgccccgaggacgaaaccagcacggagcccaaggaaaggggcccac

SEQ ID NO: 220681 - RNA, 76 nt, Homo sapiens
ggacgggaccaggcgaagcggccgagcaggcgagcgaacgacggagggaagggcaacaacccaccgggggaaacac

SEQ ID NO: 220682 - RNA, 76 nt, Homo sapiens
ggaccgccgagccacaccggcaggcccccacgggaacgacgccgcgagagccagggagccaaagaccccccacacc

SEQ ID NO: 220683 - RNA, 65 nt, Homo sapiens
gacgccacaggcacaaaagggggcagcggcaagcaggggagccagccacacagagacagaccacc

SEQ ID NO: 220684 - RNA, 74 nt, Homo sapiens
cccaccaacaggaacagggcagacgagcggaggacacccaacccgggacaggccaaacggccggaggagggcaa

SEQ ID NO: 220685 - RNA, 77 nt, Homo sapiens
aacagcaccagcaccaagaggcgcagcagcagacaggacacagaacagagaagaagcagacgagacagaaaaagaac

SEQ ID NO: 220686 - RNA, 79 nt, Homo sapiens
cggggcgccacggccacggcgcggcaccggggcgccggacaggaggagggcagagccaagacgccagggaagaagggac

SEQ ID NO: 220687 - RNA, 73 nt, Homo sapiens
agaccgccaaaccagagaaagaaacacccgaacagcgaaaacaacgaacgagcaaggaagggccaaggcagac

SEQ ID NO: 220688 - RNA, 86 nt, Homo sapiens
gacgggggcccgcgaggcgggcagccggggcgccaggggcagcggcgccgcaagcacgcgagcggccagacgcaacccaagaacac

SEQ ID NO: 220689 - RNA, 73 nt, Homo sapiens
gcagagcgccgaggaggcccgcggggcaaccgccacgagacaccaagcggggacgagagccccggcacaaacg

SEQ ID NO: 220690 - RNA, 75 nt, Homo sapiens
cggaccaccgcccccgcgccccgcaccgcggcaaagagaggacgcagcgagaaaggccccaccaagaagaaagcc

SEQ ID NO: 220691 - RNA, 70 nt, Homo sapiens
gggccacccccagaagcggaggcagcacggcaggagacgaggagaggacagcaggacacccggaccccac

SEQ ID NO: 220692 - RNA, 70 nt, Homo sapiens
ggaccagcagaggaagggccagcagcaaaaacccgaccaagcaggcaggacaaagaaacagccggaaaag

SEQ ID NO: 220693 - RNA, 67 nt, Homo sapiens
gcggggcggggaggcgggaccagacgaggaacagcaaaaagcacccgaagcgggcccgaagccaagc

SEQ ID NO: 220694 - RNA, 73 nt, Homo sapiens
gggcgacgcagcaacgggaaccgaagccacgcaacaggggcaaacgcccagaggagaggaagacacccccccc

SEQ ID NO: 220695 - RNA, 70 nt, Homo sapiens
cccccaggacccgagcccaccaaggaggacgggccacgaggcaccggccgcgagcaccagcgccccagca

SEQ ID NO: 220696 - RNA, 74 nt, Homo sapiens
caccccggaggagccgaagcaagcccgggggccgggacgagccgcaaacacaccaaccgcaaacaagacaccca

SEQ ID NO: 220697 - RNA, 76 nt, Homo sapiens
ggaaaaagcacaagcgaagaccgaagcccaaagcagggcccacgagacgcgaacaaacgccgcgccgccagaagaa

SEQ ID NO: 220698 - RNA, 74 nt, Homo sapiens
aacccaggcacgaggccagccgaaggacaagggggaggggggcgaaaccgagcgcggggcagagaaacaccccg

SEQ ID NO: 220699 - RNA, 75 nt, Homo sapiens
gggccccggcccagcaaccgacaacgcggcccggcacaggcgcacaacgagaacccacacagggaagaggcaaac

SEQ ID NO: 220700 - RNA, 70 nt, Homo sapiens
cgcagggcgcccccgcacacagcacagcacgcgcaccacaacgcaggaaggaacgagaaaccagggagca

SEQ ID NO: 220701 - RNA, 40 nt, Homo sapiens
gaagaagcagggggcaaaaagacagagggaaaaggaagaa

SEQ ID NO: 220702 - RNA, 79 nt, Homo sapiens
cccccccacgacaccgaagcagcgacggcacagcgggaagaaggggaccccgggcccgggcgggggagaagacagaccc

SEQ ID NO: 220703 - RNA, 42 nt, Homo sapiens
ggaccacaagacccacgacagggcagcgggggcagagacggg

SEQ ID NO: 220704 - RNA, 50 nt, Homo sapiens
agggagaacagcccgagaaagggacaggagaagaggggccgaaagggaga

SEQ ID NO: 220705 - RNA, 51 nt, Homo sapiens
acagcaaaaagcagagaccacgcggcggaccaagccagcgggcagcaaggc

SEQ ID NO: 220706 - RNA, 55 nt, Homo sapiens
gccacccgcaacaccaccccagcccagaaaaagcagaagaaccaggacaagaacg

SEQ ID NO: 220707 - RNA, 69 nt, Homo sapiens
gcgcaggccgcggggagcaccggagccccgcgacaagagaagcaccagaagacgcagggcgcccgacgc

SEQ ID NO: 220708 - RNA, 63 nt, Homo sapiens
cggagaccggagcagcggagcagcggaaaagcaaagccaccaggagagaacgccgcgccgcgc

SEQ ID NO: 220709 - RNA, 78 nt, Homo sapiens
aagccacaaacagggcacgcaaagaacacggcagcccagaaaaggcacagggcaggcgaaggccagagggaacacagc

SEQ ID NO: 220710 - RNA, 68 nt, Homo sapiens
gaagagaggcaagaagggcgcagaccaaaacccagccccagcacggaggagaggggagccaggacagg

SEQ ID NO: 220711 - RNA, 54 nt, Homo sapiens
cgcggaaagggcggagccacggcccaggaaccggccgaaccagaccggagcagg

SEQ ID NO: 220712 - RNA, 84 nt, Homo sapiens
gaaggcccagacgcaggaggggagacggagcacacaacacacaaacagggaggcacagaaagcaccgggaggaaagagagccac

SEQ ID NO: 220713 - RNA, 65 nt, Homo sapiens
agccccagacggaaagagcacgcgagaccacaccacggagccaggaggaagccaggacacggaag

SEQ ID NO: 220714 - RNA, 40 nt, Homo sapiens
ccaagacaaggacaccaaagaaccagggaaaaggagaggg

SEQ ID NO: 220715 - RNA, 67 nt, Homo sapiens
cccgaggagcccgaggagaaagacgccaaccagccacagacccccgccccggagaaggaggagcagg

SEQ ID NO: 220716 - RNA, 75 nt, Homo sapiens
ggacagcgggaggggcaagcaaccaggcccgcaagaagcccagcgcagcaagaccgccagccagagaacgcgaga

SEQ ID NO: 220717 - RNA, 78 nt, Homo sapiens
aaacgaacggaagaggcagacgaacgggggcaggaggacggcaagcagagaccgggcacaaccagccagcaacccgcc

SEQ ID NO: 220718 - RNA, 77 nt, Homo sapiens
ccagccccagccccggagaggagcaggccaaggaaaaggaacagagagagcagaaccgaaacggggaaagaccgaag

SEQ ID NO: 220719 - RNA, 69 nt, Homo sapiens
cgaacacggggacaccaacaggacccgggaagagagaaccaaaaagaagaacgggagaaccacagacgg

SEQ ID NO: 220720 - RNA, 77 nt, Homo sapiens
ccaggaggggggaccccgcccagggcccagaggacccaacaccagaagacacacaggcccgcagacagaccagaaga

SEQ ID NO: 220721 - RNA, 69 nt, Homo sapiens
cgagagagggaagcgcccggccggaggcaggggaaaggaccgaagacccccccgagcccggccgccgcg

SEQ ID NO: 220722 - RNA, 84 nt, Homo sapiens
accgcggcccccagcagagcccgccgcccggcagaaagccaacccagcgaaggaacaagcaaaccccaagcggcaagagaccga

SEQ ID NO: 220723 - RNA, 80 nt, Homo sapiens
caggaccgggccggaacgagacgcacggaaaaccagagacccagacacgcgaaggaacgaaaggccaaaaggcaaaagac

SEQ ID NO: 220724 - RNA, 54 nt, Homo sapiens
gacaagaagcagcacgcgaagaaagagccagaaggggcgacaaggcccccaaga

SEQ ID NO: 220725 - RNA, 71 nt, Homo sapiens
caggaaaaaagaaaaagggcagagaaagcccaccagaaagcgcggaacccaaggaaaggacggcggagccg

SEQ ID NO: 220726 - RNA, 81 nt, Homo sapiens
ggagaccgaagggcccggggcccgggagagcgacaacaaaggaaaaaaaaaagacagagacacagccaaaagcagacagaa

SEQ ID NO: 220727 - RNA, 80 nt, Homo sapiens
ggcaaagagaggacgcagcgagaaagacgaaggaagaccaaggaagaacaggcaagcgaaaaagggaaaaggagagaaaa

SEQ ID NO: 220728 - RNA, 78 nt, Homo sapiens
cggaaggaaggagcaagacgcccccaaagcagccccgcgcaggagcgaaagcccacgggggaagcaagcaggaccacc

SEQ ID NO: 220729 - RNA, 82 nt, Homo sapiens
aggcggcagcgcgcgagggaccggccaggacccaaggccagccagccccaggcaccagcggacaggacagggaggacgaagg

SEQ ID NO: 220730 - RNA, 75 nt, Homo sapiens
aggggaaaccaagaagaggccagaaaccgcccggagcacgaccgaggcggagaaacaagagaggcccacaaaggg

SEQ ID NO: 220731 - RNA, 73 nt, Homo sapiens
aaccgaaacacgcagaaagagagaaacaacgaacgagcaaggaagggccaaggcagaccccacaccggagaac

SEQ ID NO: 220732 - RNA, 53 nt, Homo sapiens
ccgcacccccggcggcagcacgaaagaccaggggcacagcgacaccagggcga

SEQ ID NO: 220733 - RNA, 78 nt, Homo sapiens
ggcgaggagaaccaacggcccgaaagaggggacgcccagaaccagcgcaccggcccgccgcaccacgccgcacacgac

SEQ ID NO: 220734 - RNA, 69 nt, Homo sapiens
cagacagcaagagcacccgacccacaggccagagaggccggaaggggggcgacgcggaaggcacaacac

SEQ ID NO: 220735 - RNA, 79 nt, Homo sapiens
gggcccggccccgaccccgcggccggacgacccaagcccgcgagcaggagaggacccaacagaggaagccgcaagaaac

SEQ ID NO: 220736 - RNA, 73 nt, Homo sapiens
caccgcaggcagacaaaagggccaaagaagggagagagcggaccggaggccaacccaccagcagcggacgaac

SEQ ID NO: 220737 - RNA, 40 nt, Homo sapiens
aggccgggccaggccaccggacagggcgggcaagaagggg

SEQ ID NO: 220738 - RNA, 86 nt, Homo sapiens
ccgcggggacaccacgcagacacaacacgggggggagagccacaggcagcggcgagggaccaagaaaggcccagggaccaaagccc

SEQ ID NO: 220739 - RNA, 59 nt, Homo sapiens
gggaggcggcggcccagccacgagcagagaagccgaacgggaaccagcagaaaacaagc

SEQ ID NO: 220740 - RNA, 55 nt, Homo sapiens
ggaccgaaagaaagcgaaaacacaaacaccgaccagagacaaggccccgagggag

SEQ ID NO: 220741 - RNA, 70 nt, Homo sapiens
gagcccacacacgccccgcgcacaacaggcgggacagagagccgaaagccgggcaaggggaaagaaggcc

SEQ ID NO: 220742 - RNA, 55 nt, Homo sapiens
acagggagaaacacagccagaaggacaagacgagacaccggcgacaggaagacgg

SEQ ID NO: 220743 - RNA, 60 nt, Homo sapiens
ccaaacacagcgaacggacacacaacagggcccaccagaaaacacgaaggagaagcgcaa

SEQ ID NO: 220744 - RNA, 83 nt, Homo sapiens
cccaacgggcacgccacaaggcaaggagcggcagacagccaaccggaccccggcacgcgaggaaaaaaacagggggaagagag

SEQ ID NO: 220745 - RNA, 76 nt, Homo sapiens
gcgacgacccgccgccgccgggcggaggcccacaagacccggccccggccccacacaacggcaccccaccagcaga

SEQ ID NO: 220746 - RNA, 84 nt, Homo sapiens
aaaggaccgaagggcccaacccagccagggcccgcagcaaagaggggagcccggagcaaccaggagcaaaaggcaaaacaaagc

SEQ ID NO: 220747 - RNA, 70 nt, Homo sapiens
acgggccaacagccagaggacaagaaaggaggacagggcaggcagaagaaaaagagggcacagacccaag

SEQ ID NO: 220748 - RNA, 83 nt, Homo sapiens
gagagagagggggagacgaggaaggaagccaacaaaaagaagggccaggaagaacaccaagggaaaccgcagcaccagaacga

SEQ ID NO: 220749 - RNA, 74 nt, Homo sapiens
aggggccggagcccggcgggccggaccgacggcggcccccccgggacacccgggaggaaccgccccggccaacc

SEQ ID NO: 220750 - RNA, 77 nt, Homo sapiens
cccagccgccgcggcccggaaacgggcacccagcaccggccacagccgggaaggccgagggcccaggagcaggagga

SEQ ID NO: 220751 - RNA, 74 nt, Homo sapiens
cacgacaccaggggacagagaccggcaaggccaagaagggcccaagacccacccagcagagcaccggcccaggc

SEQ ID NO: 220752 - RNA, 78 nt, Homo sapiens
acgcacaaaaaagggcagaagagaagcaggaaggaggcagaggcacaccgaaagacccaggacccggccccgccgccg

SEQ ID NO: 220753 - RNA, 83 nt, Homo sapiens
cccagcagcgccagaggcggcacggccagcggcaccacccccagcaccaccccagccccgcgcccgggaagccggagcgagaa

SEQ ID NO: 220754 - RNA, 71 nt, Homo sapiens
acccagaaggaaggcgccgaagccaggacaaaggaggacagcaccaaaaaccgaaaaagcggggaaggggg

SEQ ID NO: 220755 - RNA, 58 nt, Homo sapiens
cgggacgcggcggcgccggccccggggagaaacggggagcgcaccggaccccaagagg

SEQ ID NO: 220756 - RNA, 53 nt, Homo sapiens
accgaaggcgcaagagggaggcgcacacacagggaccaccacacgaaaccaag

SEQ ID NO: 220757 - RNA, 75 nt, Homo sapiens
agcccgcccagacaccacaggcgggaaaggacccaggcgggaccaagaaaggcccaacccgaccaaagggggaga

SEQ ID NO: 220758 - RNA, 69 nt, Homo sapiens
acagcagggaggcagaagcggcaccaccgcgaggccagaccccaaagacagacggaagcagcaaaagac

SEQ ID NO: 220759 - RNA, 82 nt, Homo sapiens
aaggaagagacccccaagccacccaggaagcggacacaggaaaacgagaagaggcaggcaagcaaagagcagagcaccggaa

SEQ ID NO: 220760 - RNA, 75 nt, Homo sapiens
ggggagccaagaccacgaggggcggacgcacagaacacacaagcagacagccccacagcgagcagcacgccccaa

SEQ ID NO: 220761 - RNA, 45 nt, Homo sapiens
gccaggaggcgcgggacccggaacaaaccagccccaggaaagaag

SEQ ID NO: 220762 - RNA, 40 nt, Homo sapiens
cggccgccgaccccgggaggccagacaacgaagagaggaa

SEQ ID NO: 220763 - RNA, 82 nt, Homo sapiens
ccagacacgccgggcccggggcaccacagccaggccgagcgcaggcgcaccgggcgcacgccagcagaagagagacaagaaa

SEQ ID NO: 220764 - RNA, 80 nt, Homo sapiens
gaacaccaggacacccagagcgggaaagacagaagcgaaggggacagggggagaaccgccagggaaacccgggggacaga

SEQ ID NO: 220765 - RNA, 56 nt, Homo sapiens
cgccaccgggagaagcggccgggccaaggcgggcaacacaacaaggcgcggacacc

SEQ ID NO: 220766 - RNA, 104 nt, Homo sapiens
cgagaagccgaaaagcgcagcgagcggagccgccggaggggccacaacgaagaagacagagagacaacgcaaagcagacgcgcacaaaaagaaaaacgaagaaa

SEQ ID NO: 220767 - RNA, 76 nt, Homo sapiens
gagaagaaaagcggcaccaaccaggccaacgccagggcggccacaaaaaaggaccccggagaagcacggcccgcca

SEQ ID NO: 220768 - RNA, 77 nt, Homo sapiens
ggaccgagaccggaccgagagcggaccgagagcgcgaaacgcacgagaagaacagaaaggaccaagcgggcccgaga

SEQ ID NO: 220769 - RNA, 89 nt, Homo sapiens
aacacacgggacaaccagcgacgccggagcagcccaacccagggcagcaaggagcgcccacggcagagccacaacggaagcagagcggc

SEQ ID NO: 220770 - RNA, 85 nt, Homo sapiens
agaggaagagaaaaagcaaacgaccagacggcagggaggcacaaaggggaacacaggcaaagaaaggaggacaggcccgagcggc

SEQ ID NO: 220771 - RNA, 73 nt, Homo sapiens
aacagagagcgacaagcggaagaaccaacagagacacaagagcccgggaaccccagcccgcggcggaagccgg

SEQ ID NO: 220772 - RNA, 107 nt, Homo sapiens
gcggcgccggagaggcgccggcgcgcgggccccgcagcgcacccggcggcggacagggacagagagaggcagaagaaaaagcacccccaagcgagagagcggcccaa

SEQ ID NO: 220773 - RNA, 76 nt, Homo sapiens
cgccaacaggcaaggaagccggcagcaggggcccaaggggaggagcggcagcccacaagcaggaagaccagcccca

SEQ ID NO: 220774 - RNA, 92 nt, Homo sapiens
aaacaggcaaaacaaccagaaggggagaaggcaggcaccacaaaaaggacagccaccagggagaagaggagaccaccccacaggacaacggg

SEQ ID NO: 220775 - RNA, 77 nt, Homo sapiens
aagcaccaagaaaacgccaaggaacggagcaaggccaagcccaagcaaacaggagacgccgaagccagaagcacgaa

SEQ ID NO: 220776 - RNA, 52 nt, Homo sapiens
caagggcacgcagaggagagaaccagaacgcaagcacaggaccagaaacgaa

SEQ ID NO: 220777 - RNA, 78 nt, Homo sapiens
aacgcgggagacccacggccgcaggccgcaacccggccagcggcaagcagagaccggcgcgaagacgacggggcccag

SEQ ID NO: 220778 - RNA, 57 nt, Homo sapiens
agaagaggacaccacagcagcaggcaacgagaaacacggaagacggagaaagagagg

SEQ ID NO: 220779 - RNA, 81 nt, Homo sapiens
ggacaagaccggaccagccagaggacgcgggccgaggagagcggaggagggggaagccagcagaccgcagaacggccccgg

SEQ ID NO: 220780 - RNA, 57 nt, Homo sapiens
aaaacccacgaagaaaaaacagcccccagaccggggcagcggggaagaccgacaacc

SEQ ID NO: 220781 - RNA, 71 nt, Homo sapiens
ccccgggaacgccggcagcacggccgaaggagacagcccagaagaacgaggaagggcccggaggggccgcc

SEQ ID NO: 220782 - RNA, 63 nt, Homo sapiens
caacccagaacggagagccccccagaaaaggaagaagacggcacgggacccccagcacaggca

SEQ ID NO: 220783 - RNA, 52 nt, Homo sapiens
cagacgcagggcgcccccggagacaggcacaaaagacccgaagccccacccg

SEQ ID NO: 220784 - RNA, 71 nt, Homo sapiens
cagcccgcagcacgaccagcaggaacgaaccccggaaaaggagacagaagcgcaagaacccgacaagaagg

SEQ ID NO: 220785 - RNA, 53 nt, Homo sapiens
aaagggccaaagaagggagagaggagccacaacgaccgagcggacaggagaca

SEQ ID NO: 220786 - RNA, 76 nt, Homo sapiens
ggaaaaaaaaacgagaaacaaaacaaaacccgcacccaaacaaacggcgaggagagagaacaagaacacagaaaaa

SEQ ID NO: 220787 - RNA, 69 nt, Homo sapiens
agacccggggacccccgacgccaggcagcgcccccaaacggagaaggaagccaacaccggagccagaaa

SEQ ID NO: 220788 - RNA, 52 nt, Homo sapiens
acgggcaggggggagggagggcaccacaaaggagagacaaagcgaaagaaac

SEQ ID NO: 220789 - RNA, 59 nt, Homo sapiens
cggaccgagagcgcgaaacgcacgagaaggaacaaagacaaccccacgaggacaaagga

SEQ ID NO: 220790 - RNA, 84 nt, Homo sapiens
cggagacagcccaaaacccggaagagcgccccaggagaaacaagcgcgggcacagggagggcggaccacccaggaggagggagg

SEQ ID NO: 220791 - RNA, 64 nt, Homo sapiens
cggcaccaccgcgcagaggggcagggggagccagacaacacagggacacaacaaacacaaccgc

SEQ ID NO: 220792 - RNA, 75 nt, Homo sapiens
acccaggaaaagggagacaagaggagagaagaacagggaagcggaaccaaaaaaagacaaaaacaacacgggaag

SEQ ID NO: 220793 - RNA, 63 nt, Homo sapiens
ggacggagaacgccccgaaccccgcacacgaggaagaagaccccgcggaagacaccagaaggg

SEQ ID NO: 220794 - RNA, 73 nt, Homo sapiens
gccacaggccgaggaaacgcgagcgaggggcaaggagagccaagcggaccaagaaggcaagagaggaagcaga

SEQ ID NO: 220795 - RNA, 80 nt, Homo sapiens
cggcaccgcagaggcaggggcagggcgggcggcgagccagggcggagaacggaaaagcaccaggaagcagagaggaccgc

SEQ ID NO: 220796 - RNA, 81 nt, Homo sapiens
gcgccgcgcggccccggccgaccaggacaggggaaaagccccagagcggaaggcgaagcacaaacagaagagcgaaagcga

SEQ ID NO: 220797 - RNA, 72 nt, Homo sapiens
cgcagggcgcccccgccggcgcggccaacaaagcaccccaccaggcaccacgagagaccagaagcgcacacg

SEQ ID NO: 220798 - RNA, 81 nt, Homo sapiens
gaaaaggacaaggggaaaggaaggggccccagggcgcagacaaggcaggcacgcagaggggcgggcacgcacgacagcggg

SEQ ID NO: 220799 - RNA, 76 nt, Homo sapiens
aggccaggagagcccacgccggaaaccgcagggggagagagagagcacggagcggaagaaaacgccccagaccggc

SEQ ID NO: 220800 - RNA, 59 nt, Homo sapiens
gggggcggccgggacggaggacgcgcagcaaaaaacccagaaggggagaaagaacacgg

SEQ ID NO: 220801 - RNA, 57 nt, Homo sapiens
aagagcccgcaagaagaacagagacagcagccaaacccccaggacacacagcaacga

SEQ ID NO: 220802 - RNA, 62 nt, Homo sapiens
acagacccagaagagacgaaaaagacgagcgaggcacagaagaaaaggagcaccaaaccacc

SEQ ID NO: 220803 - RNA, 95 nt, Homo sapiens
gaggagaagccggaggaggacaacgacaccaccgcagcgacgagcagacagcaagaaagcaccagccaagcagaagggagccagcggacgagggc

SEQ ID NO: 220804 - RNA, 72 nt, Homo sapiens
gaagaagcaggaggcaagaaaggggaaccccggagaaaaggccaagaaggcagcaccgccggccaggaggag

SEQ ID NO: 220805 - RNA, 80 nt, Homo sapiens
gccccaccagacaggagacgcacaaccaagcgccccaggacgacccagggcaccagaagacagagccgccgcacccaggc

SEQ ID NO: 220806 - RNA, 87 nt, Homo sapiens
agccaacccggagcccgccgcggcccccggcacaggcagcggaggagcccgaccgacccgggggaaacagcagcacagacagacaag

SEQ ID NO: 220807 - RNA, 83 nt, Homo sapiens
ggcggagcggccaacaggcggaacgcaggagacacaagaagcggaccagaacggagacacagcgggcccccaccacgagcggc

SEQ ID NO: 220808 - RNA, 54 nt, Homo sapiens
ccacccccgagcccagcaccgcgggaaggcagaggcagcgacagagaaaacccc

SEQ ID NO: 220809 - RNA, 55 nt, Homo sapiens
aagggccagcgggaggagggcgacacgaggcgggaaaagcagcagcaagccacca

SEQ ID NO: 220810 - RNA, 58 nt, Homo sapiens
cccgcccagcccccgggagcgggacacagaaaagaacaagcggagaaggggaagggac

SEQ ID NO: 220811 - RNA, 78 nt, Homo sapiens
gacacgggagggaaagagagcgaggagacggcgaccgacaacgaacaagaaaccagggaaaggggaccagaagaaaag

SEQ ID NO: 220812 - RNA, 73 nt, Homo sapiens
gagggacagagggcccccccgaagacgaccacggaaggacgacaagcacccaggaccggaaaagagcaagaga

SEQ ID NO: 220813 - RNA, 50 nt, Homo sapiens
cggaacgggcccgaggcgagcgggccccgcgagccggggaaagaaaaggc

SEQ ID NO: 220814 - RNA, 49 nt, Homo sapiens
acaaaggcgccaaacggaacggcgagagaagggcaacgcggggcgagcc

SEQ ID NO: 220815 - RNA, 50 nt, Homo sapiens
aaaggcgggcacaggccgaccgcgcgggacccccaccaaccaggaaaagg

SEQ ID NO: 220816 - RNA, 79 nt, Homo sapiens
acggcagaaggagcggaaggcggagcgaagagccggaccaagcgccaggccacggaaaacgagacaagacgcaaggaaa

SEQ ID NO: 220817 - RNA, 82 nt, Homo sapiens
ccacaagaaggagcacaagagagggacaagaacccaagaaacaggaaaaaacccaaaacaccaaaaggaccagcgagaagac

SEQ ID NO: 220818 - RNA, 77 nt, Homo sapiens
agaggaaacaccaggcgcggcggcccagccccgacacagaaagcaccgggaggaaagagagccacacgaagaacacg

SEQ ID NO: 220819 - RNA, 76 nt, Homo sapiens
gggccccccgggccgagaccagagcaggccagcaacagaagaaagcaagcaccggggaaagcggcccgaaacaagc

SEQ ID NO: 220820 - RNA, 37 nt, Homo sapiens
aggaaccaaagggagaggaaaagccgccggccgacga

SEQ ID NO: 220821 - RNA, 58 nt, Homo sapiens
ccagcggacccccacacgaaggccgcaaggcgggaggacccagccccagcccaacgag

SEQ ID NO: 220822 - RNA, 73 nt, Homo sapiens
ggccggagaaaggaaaaagacccgccgaggccccaggaaggccaaagcggaggcacccgccacaagagacccg

SEQ ID NO: 220823 - RNA, 75 nt, Homo sapiens
gggcccagcagacgcaaagacgcaagccacgccgcgggggccccaaaagccaaggccgccagcccccgacaacac

SEQ ID NO: 220824 - RNA, 41 nt, Homo sapiens
cgcggcccggcacgcaccgcgagaagaacgaacagaacagg

SEQ ID NO: 220825 - RNA, 55 nt, Homo sapiens
aaaaagaaaagaaacgacaaaaacacgagccaaccaggagcaaagaaaaaggaag

SEQ ID NO: 220826 - RNA, 63 nt, Homo sapiens
caccaccccaccagacggcgccccaagaccaggccagaagcgagcaccaccccagaaaccccc

SEQ ID NO: 220827 - RNA, 51 nt, Homo sapiens
ggacacagaaagagagaaagccccacgaagagagaagcgcggaccaaagca

SEQ ID NO: 220828 - RNA, 57 nt, Homo sapiens
ggaaacgcagagaaaacaagagacggaaggaaggacagacccagagaagagacagcc

SEQ ID NO: 220829 - RNA, 75 nt, Homo sapiens
gcgacgagacagccaagaggcagacgagcgagaagaaaggcacagggaggggacccagaaaggcaaaccagccac

SEQ ID NO: 220830 - RNA, 61 nt, Homo sapiens
cacgcggcccggcccagggcagccggacaacgaggcagagcacaaggaaagaagcgagaaa

SEQ ID NO: 220831 - RNA, 75 nt, Homo sapiens
cccaccaccgcaaacaaggcccacgcggaccggcagcgccaccggaccaccagacaaggacacggcccaagcgac

SEQ ID NO: 220832 - RNA, 82 nt, Homo sapiens
ggcccaggggcgccaggagacgcaggcggaagggcccaggacccccaggagcccaaaggaccgcacagcgacccgggaggcc

SEQ ID NO: 220833 - RNA, 87 nt, Homo sapiens
ggcggcgcgcgcggcgcggggcccagggccgccccgcccgcagggcagcggggccccgccagaggccagaaaagggcggggcaccgg

SEQ ID NO: 220834 - RNA, 48 nt, Homo sapiens
acgacagagaggagggagaacaagcaacggcggggaagaagaaggcaa

SEQ ID NO: 220835 - RNA, 61 nt, Homo sapiens
ccaaaagaagaccaacaagaacacacgagaacagggcaggaaagggaacaacgaccggggg

SEQ ID NO: 220836 - RNA, 77 nt, Homo sapiens
agaacccaacggaccaaaagcgcagaaagccacgcaaaaggaaagagaaacacaggccggagcaaggccaaacaaac

SEQ ID NO: 220837 - RNA, 67 nt, Homo sapiens
agcagcagagcaaccagagcacacgagagggccgggacaaggaaggacgaacagaaagcacgaccgc

SEQ ID NO: 220838 - RNA, 63 nt, Homo sapiens
caccgccagcccaagaaaaaggcgcaaggaagaagagacgccgcgcggcagacaaggcccggc

SEQ ID NO: 220839 - RNA, 63 nt, Homo sapiens
cggaggcagccagggcggcaagcacagaaggggaaacgaggcccaaggaaagagaccgcaaag

SEQ ID NO: 220840 - RNA, 70 nt, Homo sapiens
gcaccgccaccgcaaggacaaagaaggacaaaccggcgaccacacacggggacgacggggaagccggaca

SEQ ID NO: 220841 - RNA, 94 nt, Homo sapiens
gacgaagggccgcgccaagaagaggacaagagggcagaagaagaacgcggaaaacacagcggagcacgacagcaagagagcaagaacacgcggg

SEQ ID NO: 220842 - RNA, 62 nt, Homo sapiens
gagccaggcggcagagaaggggagcagggagaccagaggccagaccgccgggggagaagcac

SEQ ID NO: 220843 - RNA, 82 nt, Homo sapiens
gcgcgcgcgagagcccacgagcgaggccgcaggggagcccggcagccgcccggccgaagaacaggagaaggaagaacaaaga

SEQ ID NO: 220844 - RNA, 80 nt, Homo sapiens
gaaaggaacacccccagcggccaggccgaagggcaagagggcacagaagacggcgccccacacacggcccacacggaccc

SEQ ID NO: 220845 - RNA, 83 nt, Homo sapiens
ccacccgcaccagccccagaaggcggacaccgacccgagaacaccgagacgcacagcgccccagagcacacagcaggccccag

SEQ ID NO: 220846 - RNA, 68 nt, Homo sapiens
cccccagcaagaaccagaaaccaggacaacaagccgaaacagggacaagagccacgaaaggaagcgcg

SEQ ID NO: 220847 - RNA, 71 nt, Homo sapiens
ccagacaaaccgagccagacaacaggacggcgggaaccccgaaaaacaaaggacggacaagaagccagggc

SEQ ID NO: 220848 - RNA, 52 nt, Homo sapiens
aaggaccaagaaccaggaacgggcgcaccacgccaccccgccacgagagcag

SEQ ID NO: 220849 - RNA, 75 nt, Homo sapiens
aaccgaggacccagaaggcgcaaacaacccggaccaagagcaaacgcacaaaaccaaggaccaggaaggcacacg

SEQ ID NO: 220850 - RNA, 74 nt, Homo sapiens
ccgaaccgggcgacaagaggccgggcgccccgcaggacacaagagcagcaaggcgaaccggcgcggagcggccg

SEQ ID NO: 220851 - RNA, 101 nt, Homo sapiens
cggagcgcagcccggaagacggagaaacccaggagccgacgaaggcaaacgaaggaggcccaaccacaaaaggagccgacggaacccagacggagaacaaa

SEQ ID NO: 220852 - RNA, 74 nt, Homo sapiens
aggggcccacgaggagccaacacaccagcagcccagaccagacaggaggacccgagagcgggaccccaagacca

SEQ ID NO: 220853 - RNA, 84 nt, Homo sapiens
ggcggccgaaccccaacccagaggacgcagcgcggcagggacccagggcaacgccgccggaaggacccaaggggggacgcgcgg

SEQ ID NO: 220854 - RNA, 83 nt, Homo sapiens
cgggcggccggcgcgaggcgagaagacgaccccgacgcaggccaggagccgcggacagaagccgagcacggccgagacaaaag

SEQ ID NO: 220855 - RNA, 40 nt, Homo sapiens
ccggcacgggaggccaaggaacggcggcagcccgaaggag

SEQ ID NO: 220856 - RNA, 71 nt, Homo sapiens
agaggacgaggaggaacccacacccccaaggcacggggccacaccacgaagggcacgagcaaaaaaaagcc

SEQ ID NO: 220857 - RNA, 66 nt, Homo sapiens
acaagggcagagggaacaggcagcaggaagcacggcgggcgaaacagaagcaggagacaacgaggg

SEQ ID NO: 220858 - RNA, 72 nt, Homo sapiens
ccggggccgcgcggccccgcggagccaggcacagagcacaggaaggagcccggcagcgccgggaaacaccgg

SEQ ID NO: 220859 - RNA, 72 nt, Homo sapiens
caggagcgaagaacgcagcaggacggcaaggacgacagcgaaggcagggaaggcgggccacgaagcaaggag

SEQ ID NO: 220860 - RNA, 76 nt, Homo sapiens
ggggaccgggcggcggagcggcggaagaaggcgaaaagaaagcgggggaaacaaaaacgcaagagcacgaagcccg

SEQ ID NO: 220861 - RNA, 76 nt, Homo sapiens
cgggaagagaaagcgaaaaagcgagcccacccccacaccaacccccggaagagagccaacaccagagaggaggaac

SEQ ID NO: 220862 - RNA, 47 nt, Homo sapiens
gaaggagacgcgcagcacgcggacccccccaagacacaagacccacc

SEQ ID NO: 220863 - RNA, 63 nt, Homo sapiens
ccaccgcagcaaggcgagccccaccaggaggcccagagcaagagaggcacccacccgaagacc

SEQ ID NO: 220864 - RNA, 80 nt, Homo sapiens
cccaccacgacccacaccccccgcaacccagcagcgccgagaagcccccgggggagcagaggacccacggaagcagggac

SEQ ID NO: 220865 - RNA, 58 nt, Homo sapiens
cgagagaacgaggaggagccccacccgcgcaggaggagagaaagaacccacgcaggac

SEQ ID NO: 220866 - RNA, 70 nt, Homo sapiens
gggccaaggaaaaacgagcagaaagaagccagagcccaagagaacgaaagcacagaaaacaacgccccag

SEQ ID NO: 220867 - RNA, 64 nt, Homo sapiens
ccagaagcgagcagcccaaaccccaccggggaccgcaaggccgcggggcccaacaaggcaagac

SEQ ID NO: 220868 - RNA, 75 nt, Homo sapiens
ccacaccaggcaagggggagaagaaaagcagaacagggaaggaaggaggcccagaagccaagagccgcgcagaac

SEQ ID NO: 220869 - RNA, 73 nt, Homo sapiens
caaccacgccaagacccaagaacaacaacccagaggagacgggccagcgcagcaaggacaccaaaagaacccc

SEQ ID NO: 220870 - RNA, 69 nt, Homo sapiens
cccccaccccagaaccccacacagacagaacaaggaggggcagagggaaaaagaaaagaaacaagacaa

SEQ ID NO: 220871 - RNA, 68 nt, Homo sapiens
ggcccgccaccccacggagagccaaagcagacccccaagcgagcggagcggaaggagcgcgccccaca

SEQ ID NO: 220872 - RNA, 76 nt, Homo sapiens
acgcaggcagaggccaagcgcgccacgagccagaagagggagcgcagggcgggccggaagaaaagagagaacgcgg

SEQ ID NO: 220873 - RNA, 72 nt, Homo sapiens
aaccaaggaagcaggccagaggacacaaaagagaaccccagcacaaaaggcaacagaaagccccaagaaccc

SEQ ID NO: 220874 - RNA, 54 nt, Homo sapiens
aaccacagggcgacacccagggcaaagagcggggacgggaaagagggcagaagc

SEQ ID NO: 220875 - RNA, 74 nt, Homo sapiens
ccagggagcgcgcgcaggcgcaccacaacggaggagaaagccaggaagcaccgccgcgagcagggggcacaagg

SEQ ID NO: 220876 - RNA, 76 nt, Homo sapiens
gacaaaagggccaaagaagggagagagacgaaggcccaccaccacgagcgcggccaccaaccccggcagaccagag

SEQ ID NO: 220877 - RNA, 72 nt, Homo sapiens
cgcacaccaggggaggccaaagaagcagcaaccgaaaggcgagggaaaaagacggaagggggcgaaacggag

SEQ ID NO: 220878 - RNA, 72 nt, Homo sapiens
gggaaggaaaccggagcccaagaaagccgcaggcaccaagaagaccaacaagcagaagagccaagacaaaaa

SEQ ID NO: 220879 - RNA, 70 nt, Homo sapiens
acgagcccccaggccgagaaaaaaagccgcaaaggcgaagcgcacaaaaccgacaaaaacgcgcgcgcca

SEQ ID NO: 220880 - RNA, 57 nt, Homo sapiens
ggaaaaaagacagagggaaagcacggaacacggggaagacagccgccggcccaggcg

SEQ ID NO: 220881 - RNA, 60 nt, Homo sapiens
ggaagaaccagaggaacgggacaaagcggccagggagcacagaaacagaagaaagggagc

SEQ ID NO: 220882 - RNA, 58 nt, Homo sapiens
gcaaaacagagcggaacgaacaagggaacacagagccagagaaaaaaaacacagaaag

SEQ ID NO: 220883 - RNA, 67 nt, Homo sapiens
aaagagccgacaaaccgcaagcaacacagcgagaagagagccaaaacccccgccaacagagcagaca

SEQ ID NO: 220884 - RNA, 60 nt, Homo sapiens
ccgccgggcccaggcccgcgaccgccgccagcgcccgagcccgcagcgcaaaggccggac

SEQ ID NO: 220885 - RNA, 88 nt, Homo sapiens
agcaggggcgcagaagggagaggggagcgacccggggaccgaccggggaccccgccgaagaggccgaaaggaacaacggaaagccaga

SEQ ID NO: 220886 - RNA, 71 nt, Homo sapiens
caaacacgaacccggcgaagggacagaggaagaagagacggcggaaaacccgaagcagaagcccgacacag

SEQ ID NO: 220887 - RNA, 74 nt, Homo sapiens
caccaggaagagcaagggaacgccaaaagaacaagcgcgagaaggaacaaaccaggagaaaccgaacagaagag

SEQ ID NO: 220888 - RNA, 87 nt, Homo sapiens
cacgcagagggcggagcggcaggcacccgggacaacggcacaagcgccgcaaaaccgggggcaagagaaagcccaccacaagaagcg

SEQ ID NO: 220889 - RNA, 69 nt, Homo sapiens
gaaccacggaaaggaggaagaagacaccggggacagacaggggggagaaggcaacggccggaagagcag

SEQ ID NO: 220890 - RNA, 68 nt, Homo sapiens
ccacaaaaaagagacccacagccagcaacaccccagacaccaagaaggaaggcccccgaagcgacacg

SEQ ID NO: 220891 - RNA, 79 nt, Homo sapiens
ccgcagaaggccggagacaccagcagggggccccacgcacccaggcacccggcagggccgggcacccccgagcccagcc

SEQ ID NO: 220892 - RNA, 70 nt, Homo sapiens
ggacagacccccgccccgagagacaagccagagacccaggagggaaccacccaaacaagagcaccccaca

SEQ ID NO: 220893 - RNA, 69 nt, Homo sapiens
gagcgcgcccacggagccgcaggacccaccacagacagcagacaggaacgcaaaaacaaggccagcaga

SEQ ID NO: 220894 - RNA, 74 nt, Homo sapiens
ggggacaaagagcagggggggcgacccagaggagagcccaaacagacgacgcaaaccaaggccagggcagaggg

SEQ ID NO: 220895 - RNA, 60 nt, Homo sapiens
cggcagaagccaccacaaaagcgaaagggcacaccacaggaaggagcgagccgacggaaa

SEQ ID NO: 220896 - RNA, 76 nt, Homo sapiens
aagcccggcccaagacccccgggccgcccacaaaggaagggcagaaacacagagacccaacagcaaaccacccaac

SEQ ID NO: 220897 - RNA, 87 nt, Homo sapiens
agccccaccgaagagaacagggccggggcacgacgacccaacagcaaggcagcaggaggagccagagcagggcagaagacaagcaac

SEQ ID NO: 220898 - RNA, 61 nt, Homo sapiens
cgggccggcgccggcgcgcgcagagccagcaagaccaaccgaaagaaccccagccccggag

SEQ ID NO: 220899 - RNA, 79 nt, Homo sapiens
ccgggaccgcgcggacccggccgggagaagcagcagcgcaagcagccggagccaaccgccaaccacagggaccaagcga

SEQ ID NO: 220900 - RNA, 76 nt, Homo sapiens
ggcgaaaccgcaaagcgagaaccgcacaacccaccggcccaggacacacagaaaaccaaaaggaaagaaaaaaaaa

SEQ ID NO: 220901 - RNA, 92 nt, Homo sapiens
acacacggcacaaggccccaaacaacggggagccccaaacagggagacaaacccagaggcaacgaaaaggaacgcgaggcgcaagcaagggg

SEQ ID NO: 220902 - RNA, 71 nt, Homo sapiens
ccacggaaaacggggcgcgcgagccaaggccacgcagccgggagaggccacgaggaacgcaagaggaagcc

SEQ ID NO: 220903 - RNA, 77 nt, Homo sapiens
gcccaaacacgcccagaggaggggaacaggccggcgaacacaaagggggggccgcccgcccaaggcaggaagagggg

SEQ ID NO: 220904 - RNA, 64 nt, Homo sapiens
cggacgggaggaccgcggacgacggccgcagaggagggacaccgccaaacaaggaccgaaaggc

SEQ ID NO: 220905 - RNA, 88 nt, Homo sapiens
gaaaaggcggacgggaaggcgggagacgagaagccgaaaagcgcagcgagcggagccgccggagcaccaaccgcgccgccaagggcga

SEQ ID NO: 220906 - RNA, 70 nt, Homo sapiens
aacagaccgccacaccagaaagagaaggacccgaagcaggagccagagagggcagcacaaccggggccga

SEQ ID NO: 220907 - RNA, 84 nt, Homo sapiens
gagacgcaaggagccaccagcacggaccaggaggcgagcaacagaaaggacgagaccgaagagaaggaaggacagcgagagaga

SEQ ID NO: 220908 - RNA, 82 nt, Homo sapiens
cgcacgcaacccccagggcaggagaaacccagcgggcccagagacgcagcgggaaaaccaaggcaagccaggcgagggaggc

SEQ ID NO: 220909 - RNA, 33 nt, Homo sapiens
aggaggcgagcaacagaacaaagaagcggagca

SEQ ID NO: 220910 - RNA, 73 nt, Homo sapiens
aaggaggcaccaaagagcagagacaagcaacaggagaaccgaaagcaggggagcagacaaggggcccaagcag

SEQ ID NO: 220911 - RNA, 77 nt, Homo sapiens
cacagcgccacagaaccgcccaaaaaggcaaagaaaccacgaggcaccgggcagaaagaggggaacagacaggaacc

SEQ ID NO: 220912 - RNA, 52 nt, Homo sapiens
gcacaccaccaggagcagaacggaaacggccaggcagaagcaagcaaacagc

SEQ ID NO: 220913 - RNA, 36 nt, Homo sapiens
ggacccgccgggaggacgcgcccaggcgccccagaa

SEQ ID NO: 220914 - RNA, 70 nt, Homo sapiens
ggcggacggcggaggcggcgggacggcccgcagaaaagagacacacaaaggaagcaaagccggaaccaag

SEQ ID NO: 220915 - RNA, 70 nt, Homo sapiens
aagcgcgagggagcgccgacagcgacacccagcggcagcccgacacaacccaggaccaaaccaggcaaga

SEQ ID NO: 220916 - RNA, 78 nt, Homo sapiens
ccccagccgggagcgcgagcggccaggccggcgccggccggcgccccggggcccaaggcagaaaaaaccagcaggcca

SEQ ID NO: 220917 - RNA, 61 nt, Homo sapiens
gggaccccggaccccggaccaaaaggcgaaaaggggccaggaacgaagggagaagagaagc

SEQ ID NO: 220918 - RNA, 66 nt, Homo sapiens
gagggccgggcgagacaccagggcccacccaaaaacagcgggcaaagacacaaagcgcgcagggag

SEQ ID NO: 220919 - RNA, 67 nt, Homo sapiens
agccgggccgcccacagggggaagaggcgccgcccgggggacggcagggccgagggccaggcaggag

SEQ ID NO: 220920 - RNA, 78 nt, Homo sapiens
cgacaagccagccgggccgcggacacagacaaggcaggcccagaaaccaccacaagacaccccgagaaggagaaacac

SEQ ID NO: 220921 - RNA, 76 nt, Homo sapiens
ccgccagcacgcgccgccccgcgcgcgagccacgcagcccccagaccccgccccccgaggcgcagcccgaacccag

SEQ ID NO: 220922 - RNA, 51 nt, Homo sapiens
agaccaagaacaaccgcggacacggagaggaagggaaaacaacgggcccga

SEQ ID NO: 220923 - RNA, 74 nt, Homo sapiens
aacgaagaaaggccgcaaggcacaaagacagcaggagagcacagccgaaggcccaacacagggaaaagcagacc

SEQ ID NO: 220924 - RNA, 111 nt, Homo sapiens
ggacgaccccgaaagaaagcaggaacacgaacaccaagccccgaagcacacagaaagggaaaagagccgccaccaggaccgccggcggacaaggggaaacccaaccgacgc

SEQ ID NO: 220925 - RNA, 51 nt, Homo sapiens
caagccaaggaagaacagaagggaagaccaacgacaggcgcaagaaaccga

SEQ ID NO: 220926 - RNA, 59 nt, Homo sapiens
aagagcgaccagccacaagaacaggggacacggaacccaaggagacgaagcgaagcagg

SEQ ID NO: 220927 - RNA, 71 nt, Homo sapiens
cgcgcagaaccggcgcaggaccgggcaggagcgaagcgaccaggacgggaaggaggacaggaccacaaccg

SEQ ID NO: 220928 - RNA, 75 nt, Homo sapiens
ggcccacacgccaggcacgaaaacggggcaaaccgacaccaccagagccaggcgccgcaccgccccccggagacc

SEQ ID NO: 220929 - RNA, 72 nt, Homo sapiens
cacaaaacgcccccaggccacgcacaggggcgagcagacaccgcaggaaagggcaaaggacgcggcccggca

SEQ ID NO: 220930 - RNA, 75 nt, Homo sapiens
aacccaaacgaacccaaaggccccaacaagaagagacaggggaaacaaaagacccaagacaaaccagggaccaga

SEQ ID NO: 220931 - RNA, 84 nt, Homo sapiens
ccgaaaagccccaacagcaaggcggggaagagcgggcgaccaagagccgccaggcagcacacaaagcaggagacccgaagccaa

SEQ ID NO: 220932 - RNA, 76 nt, Homo sapiens
ggacagccagaccggagaagcaaaacggagccgccgcgcaggcaagacgaggcaaggagaccgaacagcccagcga

SEQ ID NO: 220933 - RNA, 72 nt, Homo sapiens
aaaagcagcacaaagcagccagagaaccaacaagaacggaacgggaaaaccagcagagacgagacaagaaag

SEQ ID NO: 220934 - RNA, 83 nt, Homo sapiens
aaaggcacgacgggggcaacccaggccaacggaagcacgggaagaagaggagggggggaagggagcccaaaacaggagcgcag

SEQ ID NO: 220935 - RNA, 76 nt, Homo sapiens
ggagggggaccacacagccagaacagcggacgccagccgccaggggaagaccgggggccaaacgaaagcagaaggc

SEQ ID NO: 220936 - RNA, 80 nt, Homo sapiens
ggcccggcccagaccacccccccaccgcgcccccacgcaaaaaggccggaggcggcaaagacccagaaggaggcagagaa

SEQ ID NO: 220937 - RNA, 86 nt, Homo sapiens
aaagccaagaggcggacaaaacgccaggcggaccagaaggccagcaaaggccaaaacagaagaggcaaagcccagccacagcagca

SEQ ID NO: 220938 - RNA, 63 nt, Homo sapiens
gggaccagacgaggaacagcaaaaaggcgggaaaacggcacaaggcgacgagggagggcagac

SEQ ID NO: 220939 - RNA, 73 nt, Homo sapiens
accccgcagcagggggagcagggcgagagggcaccgcggacggggccgcccaggaggaccgggggaaagcaaa

SEQ ID NO: 220940 - RNA, 80 nt, Homo sapiens
ccagcccggcgcacggcccaggacaaggcgaaggaaaacaacaggcaacagaccaccaggaagcgaaaggcgaacacgaa

SEQ ID NO: 220941 - RNA, 85 nt, Homo sapiens
ccgcgcgccgggcgaggccgcggcagggcccgcaggcggcgcacaggaagcacgaacaccggaaagaaaacagaccacaaagaaa

SEQ ID NO: 220942 - RNA, 84 nt, Homo sapiens
cagacgccggggaggcagcgcgggacccagcccaggcggcgcggacggggcgggcacgcgccacaagaagcgaacagcgcgcgc

SEQ ID NO: 220943 - RNA, 78 nt, Homo sapiens
cagccccaccgcagcagcccaccccggaggcaccccagcccccgggaggcccacagagacgcagcgaaaacccgccca

SEQ ID NO: 220944 - RNA, 69 nt, Homo sapiens
cacacggacgccaaccagccccggcaagaccgaaggcgccggccaaaagagagagacagagagagacag

SEQ ID NO: 220945 - RNA, 84 nt, Homo sapiens
gcggcaccgccagacggccagaaagccgccagagcggggcacggagcgggggacgcccggagcggcccacacacgggccgccgg

SEQ ID NO: 220946 - RNA, 51 nt, Homo sapiens
aagcagcggcgcagcccgggggggcgccacagggaaggaccaagacgcagc

SEQ ID NO: 220947 - RNA, 74 nt, Homo sapiens
ccggccgccggcccccaacagcgccggaggacgcacccagacccagccaacgagcacagcccacagcaagggcc

SEQ ID NO: 220948 - RNA, 70 nt, Homo sapiens
gaaagcagcagacgaaccccggaggagaagagaaaccgacccacagaacagaccccgaaagaaagagaga

SEQ ID NO: 220949 - RNA, 80 nt, Homo sapiens
ccacagcacaaaagaacaggacaagaaaaacaggaggacccaacagggacggaacggagagggggaccaacacagcgagg

SEQ ID NO: 220950 - RNA, 81 nt, Homo sapiens
gacaacagaaacagaaacgagggaaacaggagccacagagagcagcaaaggaggaccaagccaaaggagagggaggggagg

SEQ ID NO: 220951 - RNA, 79 nt, Homo sapiens
cccggaagccccggcgcgcaccccggcagcgcgaggaaagcccaaaggcgagaacgcggacaagcaaacaaagaggaaa

SEQ ID NO: 220952 - RNA, 87 nt, Homo sapiens
ggaaacaccaggcgcggcggcccagccccgacacaggcccacacacagggaaagcacacccgaaaggagaagccagaggcaggaaca

SEQ ID NO: 220953 - RNA, 82 nt, Homo sapiens
accacacggccggggcgcagcgcgcccagccaccaggggaagggagaacaaggcagggacagcagggacagccgggagagca

SEQ ID NO: 220954 - RNA, 73 nt, Homo sapiens
gaggagagggcaacaaaacccacaggacgggaggcacgaacaagaagaagaggggaaaaaaccaagcaaaaac

SEQ ID NO: 220955 - RNA, 86 nt, Homo sapiens
agcgccgcgaagcgccgccggccccgccgccaagaggagcgagcggacccgcgagggcaccagagaagacaaagaaagcaagcaac

SEQ ID NO: 220956 - RNA, 41 nt, Homo sapiens
caaagaaacgggaacaaccagaccaaaagaaggggagccca

SEQ ID NO: 220957 - RNA, 65 nt, Homo sapiens
ggcggggggacgccagagggaaaggccagaccagagaagaaacacccgggaaaccagaaacccca

SEQ ID NO: 220958 - RNA, 80 nt, Homo sapiens
cagacccacccaaacacggggcaaagaaccaggcacggcaggagggcacaaaggagccagaggaggcgaagagccacgcc

SEQ ID NO: 220959 - RNA, 68 nt, Homo sapiens
aaaaccggcccgaggggacgggggaacccggggccagagaaacagggcaaggagcggagcgggggaac

SEQ ID NO: 220960 - RNA, 79 nt, Homo sapiens
gccgcggcgggggagagagggccccgaaccgccagggaaagaccacagcaagaccacgcccccagccgggggaccaggc

SEQ ID NO: 220961 - RNA, 75 nt, Homo sapiens
gagcgcggcggagacgagccgagacagagcacgcccgggaacacagaaacgccccgggccagccgccaaggccgc

SEQ ID NO: 220962 - RNA, 76 nt, Homo sapiens
gaccgcaggcgggcccccgaccggaaagcaggcagcgagaggggccaccacagagcccgcagggacacagcagaac

SEQ ID NO: 220963 - RNA, 67 nt, Homo sapiens
ccccgaagaggcgaggagcaacccaaccagacccacaccggggcagggccccacgagacacagcccc

SEQ ID NO: 220964 - RNA, 50 nt, Homo sapiens
gagcaaggcgaagacagcaggaccccaaaagcagggaccgccaagcagac

SEQ ID NO: 220965 - RNA, 83 nt, Homo sapiens
agccccggcggcggcggcggcggcgcgcgggggcgacgcgcgggaacaacgcgagcggcgcgcgggacgaaggggcgaaggag

SEQ ID NO: 220966 - RNA, 52 nt, Homo sapiens
ccacaaaccggcccaacaaccacaagggagacagacccagcacggacccccc

SEQ ID NO: 220967 - RNA, 76 nt, Homo sapiens
cgggcgcggccacacgcgacgggggagccgcggaaacgaaggaggcccaaccacaaaaggagccgacggaacccag

SEQ ID NO: 220968 - RNA, 67 nt, Homo sapiens
ggaagacagcagcaaaacaaaggaagagccccgaggagaccagagggagccgagcgcgcccagaaga

SEQ ID NO: 220969 - RNA, 84 nt, Homo sapiens
acaagggaaacgcccagcgggagggggccaagaggcccacggcgccacaggaaagacggagcgacaccaggaacaaccggaaga

SEQ ID NO: 220970 - RNA, 78 nt, Homo sapiens
cgggggcgcgggcggcggcgccggcaggaaggcggagccgggagcggaggaggccagcagccaggcagcaggccgcac

SEQ ID NO: 220971 - RNA, 84 nt, Homo sapiens
acgacgggaccgggaccgcgcggacccggccgggagaagcagcagcgcaagcggccaagggaggccgccagccgaggcgaggag

SEQ ID NO: 220972 - RNA, 59 nt, Homo sapiens
agagaccacccaagcccgaaacggaagaggaggcggggccccgggagacgggcgggaga

SEQ ID NO: 220973 - RNA, 71 nt, Homo sapiens
gaaccaagacgcggaacagcacaccaggagagaagcgacagccgcagacggcgaagacaaacacccacaga

SEQ ID NO: 220974 - RNA, 61 nt, Homo sapiens
ggaagccacacccaggcacgggaccaggcgcccgcaccagggcagccggagcagcaagcgg

SEQ ID NO: 220975 - RNA, 82 nt, Homo sapiens
gcaaacgcacacgacggccccgcccccggccagccaacggacagcggagcacgagagaagaggagccccgcacccaggcgga

SEQ ID NO: 220976 - RNA, 76 nt, Homo sapiens
cagaccaagaacaaccgcggacacggagaggaaggggcacccccaaccacaggccccagcacgcccgcggcaacca

SEQ ID NO: 220977 - RNA, 74 nt, Homo sapiens
ccggagcgcgcaagcggcggaaagggcgcgcgggcccccgaagcagaggcgcggccagcgaagaagacgcagcc

SEQ ID NO: 220978 - RNA, 45 nt, Homo sapiens
ggggaaccacggaagacgcccaccaacggcagggaggagaaagag

SEQ ID NO: 220979 - RNA, 84 nt, Homo sapiens
gccgagccccagccaggacgagaggagcggagcccgcagaaccccacagcaagaggacggaagcacacacacccgcacgagacc

SEQ ID NO: 220980 - RNA, 62 nt, Homo sapiens
aaggagccagacgacagcagggcaaagggacaagagccaacggcaagcagcagcgacaggca

SEQ ID NO: 220981 - RNA, 78 nt, Homo sapiens
ccgcacacccgacacagcggagcgcccagaggcgagcccggggaggaagagcgcagccgcccgaggacgccggcacgg

SEQ ID NO: 220982 - RNA, 40 nt, Homo sapiens
cgacaggacgggaacggacaaagggagccaaaggaaaaaa

SEQ ID NO: 220983 - RNA, 73 nt, Homo sapiens
accgaaccgcggccgacccagagccacccaccgagagacagaaaagaagaggaggagcaccgcacagcacgga

SEQ ID NO: 220984 - RNA, 63 nt, Homo sapiens
ccaggccccgccgaggcggccaggcccacagcagccccccgcccgccccccaccaaagaagcc

SEQ ID NO: 220985 - RNA, 84 nt, Homo sapiens
acccagcgccggcccccaggcgaagaagcgcagccgcaccggccaagggccgagggggagacacgcccagggagaccacgcccc

SEQ ID NO: 220986 - RNA, 93 nt, Homo sapiens
cagcccgccgggacacaccccaggaaaaagacagcccgcagcacgaccagcaggaacggggccaccgagacaaacacgggaaaaaagaaaaac

SEQ ID NO: 220987 - RNA, 73 nt, Homo sapiens
agaacgccacgcgggccggcgaaagcgacaagcaggggaccaaaacaaccccggaagagaggacaaacaacaa

SEQ ID NO: 220988 - RNA, 57 nt, Homo sapiens
ggggccgaaccccccccccaagcgagagcagccacacagcagggacgcaccaaaacg

SEQ ID NO: 220989 - RNA, 81 nt, Homo sapiens
gagaacgcaccaccaggcccagcccggagagccccacaaagggaaggccgaagacgcaaccaaccaaaacagccagccgca

SEQ ID NO: 220990 - RNA, 64 nt, Homo sapiens
ccacggcggaggacgacgcgccaaccagacgcgcgggagaacccaggacgagaaaaaacagagc

SEQ ID NO: 220991 - RNA, 80 nt, Homo sapiens
aggacgacgaggaggagacgaccggccggaaaaccgcaagaccacagcaggcccccacccggaccggccagaaggcccgc

SEQ ID NO: 220992 - RNA, 81 nt, Homo sapiens
ccgggcgccgggcccccagccgacagccagggcggaagcccgccccagagcagaaggagaagaagcaccagccgacgcgaa

SEQ ID NO: 220993 - RNA, 50 nt, Homo sapiens
gaagggaacaccaaaaacaacagcgaacccacccaacacggcaaaacaaa

SEQ ID NO: 220994 - RNA, 87 nt, Homo sapiens
gcagaacgccccccggggacccccccaagggacccggaggaagcagcaccagaccaagcccaggaggccagagccacgaagcggcgg

SEQ ID NO: 220995 - RNA, 88 nt, Homo sapiens
gacaaccggccccaagggcaacaggggacagccaggcaccagggccacccccagaagcggcagcggaggaggagaaagagaggacccc

SEQ ID NO: 220996 - RNA, 112 nt, Homo sapiens
aacacgaacgaagcgaaagcaaaacaagaagggaaaagccagaaaaaagggagaccggaacccccaaaacagaccagcgagaaagacgagagcgcacgcaaagaaccagaga

SEQ ID NO: 220997 - RNA, 85 nt, Homo sapiens
gcacagccagggagccaagcgccgcccggccaaacgaaggaggcccaaccacaaaaggagccgacggaacccagacggagaacaa

SEQ ID NO: 220998 - RNA, 70 nt, Homo sapiens
cagcgaacgaacggcaagcacagacgggacaacagaccaggggaccaagaacaaaagccacacacgagga

SEQ ID NO: 220999 - RNA, 78 nt, Homo sapiens
accgggggccaccaccgaggaaagcaggggcaaaagaaaagggccgcggagacaagagaagaaaagcaaagaaccaaa

SEQ ID NO: 221000 - RNA, 80 nt, Homo sapiens
cgacccggggcagccggccccgggcccccggagcggaccgacgggggagaaggccaaacccacggccagagagagggcgc

SEQ ID NO: 221001 - RNA, 32 nt, Homo sapiens
accaccccggaaaccaggccacacacgacggg

SEQ ID NO: 221002 - RNA, 41 nt, Homo sapiens
gaggagcggaaaccccggcaggggcgccaggcacgaggagg

SEQ ID NO: 221003 - RNA, 91 nt, Homo sapiens
gcacggaggcgcaaaaaaagcccgccggaaagccaggccagaagaaggaaggccggggaggggacaggaaagacacaccaccccaccgaac

SEQ ID NO: 221004 - RNA, 79 nt, Homo sapiens
gcgggcccccgccgcgcgcggcgccagagaacaaccgcaacgaacaaacaggagacagagagcaagagcaccccaacgg

SEQ ID NO: 221005 - RNA, 71 nt, Homo sapiens
caggagccagcaaccaggcgccggagcacgcaacgggaacgggaacggccagagggcgacccagcaacgaa

SEQ ID NO: 221006 - RNA, 68 nt, Homo sapiens
acaggcaccaggcccaggggccgccccgacggaacagggaaggcgagcccagggaaaggacagacaga

SEQ ID NO: 221007 - RNA, 43 nt, Homo sapiens
cccccggccaacaggcaaaggacccagcaggacgaccagccaa

SEQ ID NO: 221008 - RNA, 66 nt, Homo sapiens
caagagacagggaacaccagaccggagcaggaacacgcacaggcaacaggaagaagaacccacagg

SEQ ID NO: 221009 - RNA, 70 nt, Homo sapiens
ggaaccgaggagccagggagccgagagcaggaccaagaagggccaagagaagaagggaccagcgcaaacg

SEQ ID NO: 221010 - RNA, 52 nt, Homo sapiens
cacgacccaacaacccacgggcaaagcgagaacagcaccaggcagggccacc

SEQ ID NO: 221011 - RNA, 76 nt, Homo sapiens
cccggcggcacggcgccgaccagcaccaggggaagcgggacaacggggacaacggcaagcggagaagagcaaggcc

SEQ ID NO: 221012 - RNA, 52 nt, Homo sapiens
aaggccccagacaggaccccgacgggacagaaggaagcgaagcaacagagga

SEQ ID NO: 221013 - RNA, 59 nt, Homo sapiens
cagggccaccagcgccccgggaaaaagccccccgccccccccgcagcgcgcagagcccg

SEQ ID NO: 221014 - RNA, 75 nt, Homo sapiens
gcggccaacaggcggagcgacggggaggcgcggccaacggggccacaagacagaacgagacgaaaaagcgacgaa

SEQ ID NO: 221015 - RNA, 87 nt, Homo sapiens
cggagaccccgcgccgacggcgccaaacacaggggaggaacaggggcgacaagagagggacaacgggagacggaaccaccaagccac

SEQ ID NO: 221016 - RNA, 81 nt, Homo sapiens
cggcgaaacgcgaggcgcggcccgcggggggggaccacaagaccgacgcaagagcaacaccagcaccaccgccccacaagc

SEQ ID NO: 221017 - RNA, 54 nt, Homo sapiens
caagagacagccgaccgacgaggcgcagggggcccccgcccgaccgacaggcca

SEQ ID NO: 221018 - RNA, 67 nt, Homo sapiens
aaccaaaaggagacgaaccaagaaacagagcggcagcagcagacagagaagccagcggagcaaaacg

SEQ ID NO: 221019 - RNA, 82 nt, Homo sapiens
cggaacacccgccaaagcagagaaaaaacaagcaaagagcggcaggggcccggaggcacgggcagccaccaccccgaagaac

SEQ ID NO: 221020 - RNA, 68 nt, Homo sapiens
cggagaaccaacaaggccaggaaacgccagagagaccaagaggcgccacaaaagaagggagaaaagcc

SEQ ID NO: 221021 - RNA, 89 nt, Homo sapiens
gacaaggaccgaaacagaaacggaacaccaaggaggggaggccggaaaggcgcaccaagagagaagcgcgccaacaccaaccgccccag

SEQ ID NO: 221022 - RNA, 76 nt, Homo sapiens
aaggcccggcccacacgggaagcgcgggaagggaaagcaaaagcagaccggaaaacccaccggcaagaccacaccc

SEQ ID NO: 221023 - RNA, 63 nt, Homo sapiens
ccccgggggggaccgaaaaccagcacaccagaccagaaagagccaggacagaagcggaaaaac

SEQ ID NO: 221024 - RNA, 78 nt, Homo sapiens
cccgccccacccgcagccgcacccccggcggcagcacgaaagaccaggccagcgacgaggagcggggcccccgacgga

SEQ ID NO: 221025 - RNA, 72 nt, Homo sapiens
cgggcgacaaaaccgcccaccaaccagggacgggcaacgccaaccgaacccccccgcgcgcgagcggccgaa

SEQ ID NO: 221026 - RNA, 82 nt, Homo sapiens
gcgggaggagcggcagccgcgaggaggcgcgggagggcgagaacgaccccgagacggccccgggggcgccgagggcacaagg

SEQ ID NO: 221027 - RNA, 79 nt, Homo sapiens
gcgagcaacgggcccgagcacacaggcaacagcaagagaaaagcccacagaagaggggccgaggcagcacacagaggaa

SEQ ID NO: 221028 - RNA, 75 nt, Homo sapiens
aagggcccgagaccccgcgcgcggaggcaagccgagagaaccgggaaagaagacacaagaaaaggagccgaggag

SEQ ID NO: 221029 - RNA, 96 nt, Homo sapiens
cgcagaagggagaccacagcaagacgccgggaccccggaaaccagaaagagagaagaagaaggaggccgcggccagaaacccaagaaaaagcgaag

SEQ ID NO: 221030 - RNA, 73 nt, Homo sapiens
gacgggaggggcgccgcggcggcgggcgcccccaggcccagcacgacagagacccggaaagcgagcagcaaag

SEQ ID NO: 221031 - RNA, 70 nt, Homo sapiens
gaaccgcaaagcaccccccgcggggaggcaaggggggaccagacaggcggcaaagcgcgcagagcgagaa

SEQ ID NO: 221032 - RNA, 74 nt, Homo sapiens
aggacgacaccccgaggggcaggaggggccgcagccagaaccagacccaaaagagcaaacaaccgacggagaag

SEQ ID NO: 221033 - RNA, 68 nt, Homo sapiens
aagagagcaagacgacggaaccaacacacaaagccgcagaaagcagcaacagccaagaacgagccaac

SEQ ID NO: 221034 - RNA, 68 nt, Homo sapiens
acaacacagcagggaagcagaaggccgaagaggggaaaaacaccccgcacaaggcagacggggaggca

SEQ ID NO: 221035 - RNA, 82 nt, Homo sapiens
ccagacccagccgcgccgaaaggccggcagcggggcaggagaaccgaagcggcacacacaaacacagaaccaagcccgcgag

SEQ ID NO: 221036 - RNA, 62 nt, Homo sapiens
ccggaacgaagaaaagaaaggccaagaccaggaaaggaaggcccggcgcgggggcaccacaa

SEQ ID NO: 221037 - RNA, 55 nt, Homo sapiens
ccgcagccccccaacaccgcccgccaggacgacacgggagcacccgggacgccag

SEQ ID NO: 221038 - RNA, 86 nt, Homo sapiens
ccgagccgggccgcggcgccgagcgaacggggagccgagcggagcgccgcggcgcagccagggagcaaaaggacggaagcaaggca

SEQ ID NO: 221039 - RNA, 70 nt, Homo sapiens
gaacccgcaggcccaaagcacagacaagcagcagggaaaacgacacagccacccccagacaaaaccacca

SEQ ID NO: 221040 - RNA, 81 nt, Homo sapiens
agaggagcagaaggagcaaaaggcggacaggcagggggggaccaggggaacgccacgagcggggcagaccagacgcaccca

SEQ ID NO: 221041 - RNA, 55 nt, Homo sapiens
gagcgcagcccccggcgggaaggaagggaacacggacgacgagacacgaccaaca

SEQ ID NO: 221042 - RNA, 73 nt, Homo sapiens
ggaagcgcgaacagcagcgcagggaggccagccacggcgccgaaaaaccagcagggcaaaggggcaggaagac

SEQ ID NO: 221043 - RNA, 81 nt, Homo sapiens
cagcccgggcccaaagcacccagaagagcgccaagaggagccagcacccccggaaaaacaccggcggaggcaaggcgcgac

SEQ ID NO: 221044 - RNA, 65 nt, Homo sapiens
ccaagcgaggaagaaacagaaaagaccaagaccaccaaggcaaaggagaaaaggacgacggaacc

SEQ ID NO: 221045 - RNA, 70 nt, Homo sapiens
caccacccccacacacaagcacagcaacagcccccaagagcacacacagcccaggccgaaccccgagaag

SEQ ID NO: 221046 - RNA, 75 nt, Homo sapiens
agaggaggcgggccggagaacacgcagagggaacggcaaacaggaaggggagagacagagagaggagaaagcggc

SEQ ID NO: 221047 - RNA, 73 nt, Homo sapiens
gccacaggacggaaagaaagccaggaaagggcacaggccccaagagggggagagcaacaaacccccagaaacg

SEQ ID NO: 221048 - RNA, 73 nt, Homo sapiens
ggcgggagggcggcgccacacaagggaggagaacaaggagcggcccagagcaaaacagaggaacggacaccag

SEQ ID NO: 221049 - RNA, 73 nt, Homo sapiens
cccagcgccggagaggaacaagcgcccgaccagaagggcgccacgcccacaaagcacaaccgaacagcaggga

SEQ ID NO: 221050 - RNA, 69 nt, Homo sapiens
aagccagaggcacagcaggagagaagcgcagcggcaccagacgccacacacagaacgacaccacagcga

SEQ ID NO: 221051 - RNA, 75 nt, Homo sapiens
ccaaccgccacgccaaaaccagcacggcgcaacaggaccacagcaagacgacaagcacgggccgcacaagagcgc

SEQ ID NO: 221052 - RNA, 78 nt, Homo sapiens
ggccgacacacaagccagcccggaggaagacacaacagccgcaacaaggacagcggccagggcacacgagacaacagc

SEQ ID NO: 221053 - RNA, 76 nt, Homo sapiens
gccagcagcacagacacagaccgcaagaacaagaccgccccgaccgcgcagaggaccagcagaaacagaaggggaa

SEQ ID NO: 221054 - RNA, 41 nt, Homo sapiens
aacgaaaagacagcaaggaagcgacagggcacaaacaaggc

SEQ ID NO: 221055 - RNA, 72 nt, Homo sapiens
cgcgcgaacggggcgggccggggcgcgcgccaggcaaaggcaggacaaagcggaggcgccagcacacggggc

SEQ ID NO: 221056 - RNA, 72 nt, Homo sapiens
gcgggccgcgagcggggcgacccgagagaagacgcgcaagaccgagcaagacgccgcagccgagcacgagca

SEQ ID NO: 221057 - RNA, 75 nt, Homo sapiens
agcgggccccgcccgcgcccaggagcagcgacccgccgggcccagggccccagggacggccaagaagaggcgagc

SEQ ID NO: 221058 - RNA, 90 nt, Homo sapiens
ggagagccaccccccaaagcaggacaacggacggccggcagggggagagcgccaccccagggcccaggaggccagcgcgagaagggaaca

SEQ ID NO: 221059 - RNA, 77 nt, Homo sapiens
cggcgcggcagcgcgcccgagggacggacaagggagggccaagaacccggaggagggcaacaccggacagcacagca

SEQ ID NO: 221060 - RNA, 75 nt, Homo sapiens
cagaggacaacgaaggcggacccaaagacaggaccacgcaccagcagagaaggaaagcaaaccgaagcaggcggg

SEQ ID NO: 221061 - RNA, 51 nt, Homo sapiens
aggcaaaccggggcggcaaagagcaagacagccaaaagggagcaaacagag

SEQ ID NO: 221062 - RNA, 58 nt, Homo sapiens
cgcagacggcgagaccccgcacagggcaaaccgacacaaagcgagagggaacaggacg

SEQ ID NO: 221063 - RNA, 78 nt, Homo sapiens
ggaagccggaagaagacaaagcgccgcgaaacacaacgcgacagagccaggccccccagcacagcacacgcgacaaga

SEQ ID NO: 221064 - RNA, 73 nt, Homo sapiens
gacccagcccggagcccagccagagggggccgacacacggcggccagggcgaccgggcaaggaacgggagacg

SEQ ID NO: 221065 - RNA, 77 nt, Homo sapiens
cggacaggagaacggcgccacaagaaagagcaggacaagagaaaggaggaacaggaaagggcagaagaagcagagga

SEQ ID NO: 221066 - RNA, 73 nt, Homo sapiens
gaggaaacccagaaaacaggagaccgaaggaccaccggcagcgggaaaaaacgaccaagacaaacaaaagcag

SEQ ID NO: 221067 - RNA, 80 nt, Homo sapiens
gaccgaggccgcagaccagccagagagaagggcccggcggacaggacccgcggccgagagacgcggaggagcggacgcgg

SEQ ID NO: 221068 - RNA, 77 nt, Homo sapiens
aaaaaagcaacggccacgaagaagccgacacagcccccgaggagcagccacaccagccccaggcgcccccccacgcc

SEQ ID NO: 221069 - RNA, 39 nt, Homo sapiens
agcgacagaggccggcagacccccacaggcgcgccgaga

SEQ ID NO: 221070 - RNA, 59 nt, Homo sapiens
gaaggaggccgggacccagacaggaccaacccacagagcaaggcgaccggcccgaggac

SEQ ID NO: 221071 - RNA, 82 nt, Homo sapiens
ccccagagagcgggacacaggaccagaacgacaagcaaccaaaaaagaacgggggacgaccccccagagccaacacacagaa

SEQ ID NO: 221072 - RNA, 81 nt, Homo sapiens
gacacagaaaccagaggaggcgcgaccagaagaagaacaaacagcagaaagaaaccaaggagacacccccgagcaccagag

SEQ ID NO: 221073 - RNA, 84 nt, Homo sapiens
cgagggggagcagcgcggggccgggagcaccggggcccgcacgcggagcccgggcgcgccaggcacagccaagagcggaccggc

SEQ ID NO: 221074 - RNA, 87 nt, Homo sapiens
gcacgcgaggccgaggcggagaaggggcccgagcgcccagacacgacagaggcccgaaaccggcagagcgacgggagaggcaaagcc

SEQ ID NO: 221075 - RNA, 78 nt, Homo sapiens
gagcacaacccgaagcggccggaccggaacagggcggggagaggcaccggaacccaacaacgccgaagcccagaaaag

SEQ ID NO: 221076 - RNA, 76 nt, Homo sapiens
ccaccggagaacacagggcccccggccaagggcgccacaaaggggggagggggccaccccgaagcgagacgggaca

SEQ ID NO: 221077 - RNA, 55 nt, Homo sapiens
aaaaacggagggagaaaaagcaagaggaaagcaaaccaagcccagaggagagcag

SEQ ID NO: 221078 - RNA, 69 nt, Homo sapiens
aacgccggagggaagaccacggaaaaacagaccagcaccagacagcgaaaaagaggacccaaaaaagag

SEQ ID NO: 221079 - RNA, 63 nt, Homo sapiens
ccagccggaaagacaggagcccaggaggcaagagcgagaagagcgcaagacagaaagcgaaag

SEQ ID NO: 221080 - RNA, 81 nt, Homo sapiens
acgcagacacaacacgggggggagagccacaggcagcggcgaggcagcgggccccaggccggggcgagcgggcccgggagc

SEQ ID NO: 221081 - RNA, 82 nt, Homo sapiens
cacaacaagaaagcagaaacgaaagaaagcaagagcgggaggaagagcagagcagaagagaagaggaggaggaggaaaccaa

SEQ ID NO: 221082 - RNA, 72 nt, Homo sapiens
ggacgaggggacgcaaacccaacaaggccagcaaaagaacgcagacggcaagcaacaagggggagcaaagga

SEQ ID NO: 221083 - RNA, 77 nt, Homo sapiens
gagacgacagcgagagacccggaggcacaggcgaagggaggaggggcagcagcaggacagggaacccgggagacagc

SEQ ID NO: 221084 - RNA, 93 nt, Homo sapiens
cgggccgggaggggacggccgccggagccgcgaggccaaagacaccaggcgccgagaaggccagcagagaaacaggcaggagaggcccacagg

SEQ ID NO: 221085 - RNA, 60 nt, Homo sapiens
ggcggcgccgaccggccacgggcgagcgcggcagggccagcccaaggcaagaaaaaaaga

SEQ ID NO: 221086 - RNA, 71 nt, Homo sapiens
ccccgacgcgcggccaggaggaagagaaagagacagcccacagaagggcccggaggggccgccccacgccg

SEQ ID NO: 221087 - RNA, 70 nt, Homo sapiens
gccgacgccagaagacaaagagccaagaaacccacaggaagggaaggggcggagacgggcggaacgcagg

SEQ ID NO: 221088 - RNA, 79 nt, Homo sapiens
aaacgaagaaaaaggaaccccaaaggagcgacaaaaaccgccggaaagcaaggcaaaccagggggccacacagagcgca

SEQ ID NO: 221089 - RNA, 72 nt, Homo sapiens
aaaaagagaggagggagaacacagaaacccgccccggaacaagcaagaagggcggagcaccagccgcacgag

SEQ ID NO: 221090 - RNA, 77 nt, Homo sapiens
gcagacacacaacccgacccgacgacaagcagagcccggacaggcccgccaccggggcacgggcgccccccggaagc

SEQ ID NO: 221091 - RNA, 67 nt, Homo sapiens
aacccgcgacgccaaccacgacgaagcggaaggcagaaggcggcggcccgacagagaccgacgaaga

SEQ ID NO: 221092 - RNA, 70 nt, Homo sapiens
gcccagccccagccaccccaagacggaaccagccagggaacagagaacaacaaccaggccagaagagcaa

SEQ ID NO: 221093 - RNA, 89 nt, Homo sapiens
gcaaacaccccggaccaacggagcaaaaaaaggccggaagaagccgggccacccggaagccaggcgggcaaaggaggagcgccggagac

SEQ ID NO: 221094 - RNA, 63 nt, Homo sapiens
cccccgggaggagaacggggagggaagccgcgccccgagggggaggaagagaacccagggaag

SEQ ID NO: 221095 - RNA, 70 nt, Homo sapiens
gggacgagagccaggaagaaagaagcgaaggacgacagcagccagaaaacagccagcaaagacaagagca

SEQ ID NO: 221096 - RNA, 77 nt, Homo sapiens
agagcccaacagaccacaaaaggacacaaccccaagcagacacaggagaaccaggggaaccggaagacgcgaagacg

SEQ ID NO: 221097 - RNA, 78 nt, Homo sapiens
gggccagagggccccccaggccgccccgcccggaagcaggacaagcggcagaaaaaacaacacgggaaagcaacagaa

SEQ ID NO: 221098 - RNA, 75 nt, Homo sapiens
gcggacaagagagggccagcggagagagagcacagaccagcaggagccaaaaaggagaaggcgcaagaagggaga

SEQ ID NO: 221099 - RNA, 55 nt, Homo sapiens
ccggaaacacgacaagccaaagcaacgcgccgggggcccggaaagggacgcgcgc

SEQ ID NO: 221100 - RNA, 86 nt, Homo sapiens
ggcgccaccagcagccaaagcccagaaggaccgggacgaggcacggcgccacaagcaggccgccagaagcgaacgcaggcagaccc

SEQ ID NO: 221101 - RNA, 84 nt, Homo sapiens
ccagggcgaggagccgcagccagcccccaacccggcagcagggccggaaagaacacaggcacgaccaagaaaacgacagggaga

SEQ ID NO: 221102 - RNA, 105 nt, Homo sapiens
gggagaagaggacaaaaaaaaggcaaagacgggagcagacaacagccagcaagcgaacgcaaaaccggacaaacacgcaaggagggccgaaaacgaggcccaccg

SEQ ID NO: 221103 - RNA, 74 nt, Homo sapiens
gccaccgagggagcgaaaaccgggccaggagcgcagaggacacaagaccagcgccccaggaggcccagcagagg

SEQ ID NO: 221104 - RNA, 48 nt, Homo sapiens
acccagccggcgaccaggacaaggcgaaggaaaacaacaggcaacaga

SEQ ID NO: 221105 - RNA, 41 nt, Homo sapiens
gcaggggaggcgccgaggaggaaagagccaaccagacagcc

SEQ ID NO: 221106 - RNA, 56 nt, Homo sapiens
ggggagaacgcggacagcccaagagagagccacggagagaaccagaccaggaggcg

SEQ ID NO: 221107 - RNA, 76 nt, Homo sapiens
agcgggcccggcagcggcgcagcgcccgccgcggcccgggcccccccgccggaaacagccggaaccaaaaagaagc

SEQ ID NO: 221108 - RNA, 50 nt, Homo sapiens
aaaaggggccaagaaccgcaaggagaggggacggggcaaccgccaggaga

SEQ ID NO: 221109 - RNA, 56 nt, Homo sapiens
cgcccccccaggaaccccacagcaccgaaagaggccgagaagcaggagaaaggaga

SEQ ID NO: 221110 - RNA, 73 nt, Homo sapiens
cgcgcgggcgccccgcccgcgcaccgcgcggcagcgccgagaaccccccacggaaaggacgaaagaaagaagc

SEQ ID NO: 221111 - RNA, 80 nt, Homo sapiens
cagcaacgcagagccccacccccaaaaaacagaaggagcaaggaagaaagacaaaccaccaggcagagagacgggaagag

SEQ ID NO: 221112 - RNA, 65 nt, Homo sapiens
gagaacgaagcgaccaaagcgcacggcagcgagaggcaacagcagcgcaggagaaggagaaagaa

SEQ ID NO: 221113 - RNA, 84 nt, Homo sapiens
gagaaccgcggcagaagccgagcaacaccccggccaccgacccacaagggcggaaaacaccccaaaagccaaaagggaaaggaa

SEQ ID NO: 221114 - RNA, 71 nt, Homo sapiens
gcaggaaaagaaacccacgcgcaaaagaagagccaaagaacaagcaagaagacaacgaaaaccagcaggcc

SEQ ID NO: 221115 - RNA, 84 nt, Homo sapiens
cgccccagccacccaggcagagcggagagcgagaagaagacgagggccccggagcgcagcacaccagcgccgcgcggggccagc

SEQ ID NO: 221116 - RNA, 74 nt, Homo sapiens
ccaggccaggccagccgcgcaacacgcggaccagagaacccagggcagaacaagaaccccgaccagacccacca

SEQ ID NO: 221117 - RNA, 80 nt, Homo sapiens
gagagccaccccaaccccccgaacccccaggcgcaagaaagcgaagagccacgaaaagcccaggggaaaaagggaggcca

SEQ ID NO: 221118 - RNA, 55 nt, Homo sapiens
caagcagcaaccaaagagagaaaagaagaacccagacccacaggaccgcgaacaa

SEQ ID NO: 221119 - RNA, 71 nt, Homo sapiens
agaaaaagggcacagcaccccagcacgaagacaaaaaggaaccaccaggaaaaaccagaagagaaaaaaca

SEQ ID NO: 221120 - RNA, 80 nt, Homo sapiens
gagaagcccagcccagagcccccagcccccgagaagacgggaaaacgccaggcaccggcagggccggcccacgccacacc

SEQ ID NO: 221121 - RNA, 79 nt, Homo sapiens
caacaacaggacggaagccccaacagagagaaaggccagcacgggggaacaaagggaccggaaaggagagagaagacgc

SEQ ID NO: 221122 - RNA, 51 nt, Homo sapiens
ggccggaaaagccaacgccggcgaagggcaacaacacggcaccacacaagc

SEQ ID NO: 221123 - RNA, 55 nt, Homo sapiens
aaagcaaacaaggcgggaagaagagacaccaaaggagccgacccgagccacgccc

SEQ ID NO: 221124 - RNA, 68 nt, Homo sapiens
aggaaacgaaagcagaaaagcaaaacgcacccccaggagggacgggaaaacgcagcacagacagccca

SEQ ID NO: 221125 - RNA, 88 nt, Homo sapiens
cgccgcgcacccgcgccagcaccacgcccgcgccgcgccgccgccaccagcccaagagaaagcacccaggccacagaggaggaaagag

SEQ ID NO: 221126 - RNA, 84 nt, Homo sapiens
gcacgcacccacccacgccaggaccccgccaaggagccccacgagagcagcaacaaaggagagagcgggaagcagaaggcagca

SEQ ID NO: 221127 - RNA, 59 nt, Homo sapiens
ccccagggaccgcgaggacgaaggggacagaggccgagccaagaacagaggcgccggac

SEQ ID NO: 221128 - RNA, 70 nt, Homo sapiens
aagcagacgcggaccaacaacaagcggcagaagcaaagagacagcgggagaaacaaaaggaagaaacgca

SEQ ID NO: 221129 - RNA, 75 nt, Homo sapiens
cgcgcaggggcggcccagccgagacagcagacgcgcagaagaagcccacccagaacgccccccagggaacccagc

SEQ ID NO: 221130 - RNA, 74 nt, Homo sapiens
gaggcaagagaccaccagcggccaccacacgggcgaccggcccgaggaccgccgcacgaccaaacgcagaaccc

SEQ ID NO: 221131 - RNA, 76 nt, Homo sapiens
cagacgaaaaaaaaaggagagaagcgaagcagccaaagcaggggcaacccagaacccccagggcgaagagagaaca

SEQ ID NO: 221132 - RNA, 79 nt, Homo sapiens
cgcaacagaccacgcgccgcgacggccggccgcgccaccgcaccgccaccggcccgacccagccacccgggccaaaacg

SEQ ID NO: 221133 - RNA, 60 nt, Homo sapiens
gaggccagaaaccacccaggccagagaggaccgagaggcccaagaggagcgagaaaccgg

SEQ ID NO: 221134 - RNA, 84 nt, Homo sapiens
cgaaaacggaagcgcagggagaaggaagaggggaaaaggcagggagcacgcgggcaggcagcccagcaaacccaggcaagaacg

SEQ ID NO: 221135 - RNA, 65 nt, Homo sapiens
gacgacacacacacggagaggacgggacagaaggcaggccgggcagcccggccccgcgagcgacc

SEQ ID NO: 221136 - RNA, 60 nt, Homo sapiens
gggcccagagggcaggagaggggccaagaagccaagaagcaaggacgaaagagcaagcac

SEQ ID NO: 221137 - RNA, 81 nt, Homo sapiens
cagcgcaccaccgcagcggcgccgcgggcacggcgaggggggcggccgcccaccgcgagacgacgggaccgaaggaccccg

SEQ ID NO: 221138 - RNA, 94 nt, Homo sapiens
gcgcggcgcggacggagcagaaccccaggacgcgcccccgggagcgggcgcccagagcagaaaaaaggccaggagacaaccagaccccggggcc

SEQ ID NO: 221139 - RNA, 73 nt, Homo sapiens
ccggagaggagggcccgcccgcggcaagcagaaccagcaaacggcaagagcaccaacaagacaaggcacaccc

SEQ ID NO: 221140 - RNA, 55 nt, Homo sapiens
aaggaccaagaaccaggcccagaaggggaagacccccagcgaacagagacccaaa

SEQ ID NO: 221141 - RNA, 74 nt, Homo sapiens
cgggagcagcaggaggcgggacggaaggaccagagcccagcagccaaaccacagaacaggaaggcggaaccgag

SEQ ID NO: 221142 - RNA, 74 nt, Homo sapiens
agcgcccaagaagaaaggagggggcaagaacaaacaacaaagagccagagaagcaagcacaaagcagaagaagg

SEQ ID NO: 221143 - RNA, 83 nt, Homo sapiens
ggagaggcacccggaagccccggcgcgcaccccggcagcgcgaggaaagcccaaaggccgccccccccacacaccagcccgcg

SEQ ID NO: 221144 - RNA, 80 nt, Homo sapiens
gcagccagaccaagaacaaccgcggacacggagaggaaggaaaagccaccaagaagggcccaggaaacgggcacagaaga

SEQ ID NO: 221145 - RNA, 70 nt, Homo sapiens
gaggagcaggcggagcacccaccacggagggaaagaccaggcaggcgggcgccacggaaaggagggcggc

SEQ ID NO: 221146 - RNA, 75 nt, Homo sapiens
aaaccaagaaacagagagcaagcacgcagaagacgagaaggggccaaagacgcaagcgcaaacacaccagcaccc

SEQ ID NO: 221147 - RNA, 80 nt, Homo sapiens
acggccagaacacaggaagaaagggacccgaaaaccacggaaggcgcggcgcgggcgcaggcagaagcccccggggagag

SEQ ID NO: 221148 - RNA, 82 nt, Homo sapiens
ggggcggcagcagagcaaggggaacgaagcgccacagaggcacacaacaccaggcgaagcgcgggaccaggaacagaacgcg

SEQ ID NO: 221149 - RNA, 81 nt, Homo sapiens
accacagcgcagcaaagaacacagagaaccccccacggaaaggacgaaagaaagaagcagccccagaaagaaggacgccgc

SEQ ID NO: 221150 - RNA, 82 nt, Homo sapiens
caacaggaggcggaggcgaaagcggaacgaggaggaaacgcaggagggccggagggcacacaacaccaggacaaccagcccg

SEQ ID NO: 221151 - RNA, 75 nt, Homo sapiens
gacccaagaaccaggggagaagaagagcaccgaacccagaccagacgcgaacccaagggacacacccggacccgc

SEQ ID NO: 221152 - RNA, 63 nt, Homo sapiens
gagggggcccgacaaagcccccaagagagaaaggggagcaagaagaaagagcagggaggaggg

SEQ ID NO: 221153 - RNA, 91 nt, Homo sapiens
ggcccgcgggccaggagagcgccggcggcacaggaagccggagaaccgaaggaccgcggaccaggcggacagccccccgcagaccgcgcga

SEQ ID NO: 221154 - RNA, 69 nt, Homo sapiens
aaccccagaccaacacacagggcccgggcagagggaaagcagaggacggaacaacccgggggaccgcgg

SEQ ID NO: 221155 - RNA, 74 nt, Homo sapiens
gcccgaggagccccgcgcggcgcggacgccagccgggagaggccggggggaacgcgagacaaccaccagcgggc

SEQ ID NO: 221156 - RNA, 80 nt, Homo sapiens
acaaggaggaccgcacgacagcggcccgcggggaagaaccaacgagagacagagccagagaagaggcccaggccccacaa

SEQ ID NO: 221157 - RNA, 38 nt, Homo sapiens
caagagagacgggggaggggagaaggacggcagaaaac

SEQ ID NO: 221158 - RNA, 76 nt, Homo sapiens
cgagcaaaaccaccaaccgggaccagggcgccaaaacagccggggagcaaaagcagccagaagcaaaaggacaacc

SEQ ID NO: 221159 - RNA, 73 nt, Homo sapiens
gccggaaagcacaggaaaaaccaaaggaaccagaggggagaagaagagaagcaaaaaagaggccacaaaaaga

SEQ ID NO: 221160 - RNA, 73 nt, Homo sapiens
aaaggggcaacaagaaaggaaagaagccaaaaagaggcccggaacgcaccggaaaaacagacacccaaaagag

SEQ ID NO: 221161 - RNA, 78 nt, Homo sapiens
aggcgagaggaagacgacgaggaagagcccgccgaagaacaggccacgcacaagcaaagagagcggcaaaaacaggga

SEQ ID NO: 221162 - RNA, 71 nt, Homo sapiens
caacccaagcaagaccagcagagaggaaaaacacaacccaagaaacggggcacgaaacaccccgcccgcgc

SEQ ID NO: 221163 - RNA, 74 nt, Homo sapiens
gcggccacccgaccggcacagggcagaacccacggggaccaggccggcggaagaggaccaagaagggggcagcg

SEQ ID NO: 221164 - RNA, 77 nt, Homo sapiens
gcccgaagccgggcggaggagagccaagcaagggggaccagcaggcggcggccgacgcgcagcaccggaggcgcggg

SEQ ID NO: 221165 - RNA, 56 nt, Homo sapiens
caaaccccgaaaaacgggaacaggacggcccaagacggggaggaaggggagaagaa

SEQ ID NO: 221166 - RNA, 70 nt, Homo sapiens
agggagggcgaagaaagagcgcaagcagaacaaggggagagcccgacgcagaacagcggagcccccggca

SEQ ID NO: 221167 - RNA, 102 nt, Homo sapiens
gcccaggggcccggcacgaccgcggggcagcaagagggccccgcgaccaggggcgcagccagaggccaggccgcgccacccccagcccgcagagcaagccag

SEQ ID NO: 221168 - RNA, 81 nt, Homo sapiens
gaagaagaggaagaggaagaagagacaaggagagaaaggaacccgaaccagggcacaagagacaagccccggcagaggcag

SEQ ID NO: 221169 - RNA, 81 nt, Homo sapiens
caccgagcccgaaccagcccagccccgcacagccgccgcccagccgccacgccgcggcgcgcggagcccgaggccccaaga

SEQ ID NO: 221170 - RNA, 86 nt, Homo sapiens
cggcggcggcggcagcgggcgggccccgagagcagcagcgggaggcgcaggagcgggcagccaggcagccgcccgacgacaaggcc

SEQ ID NO: 221171 - RNA, 74 nt, Homo sapiens
ggcggagacggagccgcagcagcgagacgacgggaccgaaggaccccgccagagacaaccgagcgccaggagag

SEQ ID NO: 221172 - RNA, 70 nt, Homo sapiens
ggaccagcagagggccgacgggacaaggaaggaccgaaggaagaggaagcagagaggcaagagggacgaa

SEQ ID NO: 221173 - RNA, 77 nt, Homo sapiens
caggaaccaaagaaccaaaaccaagacccagccaagcagaggccacacgaacggaaaggcaacgcgacaggaagggc

SEQ ID NO: 221174 - RNA, 80 nt, Homo sapiens
gagcggaaagaggaggagaggggaggaggcgaagcgcaggagaggaggcagaagaaccgggacacaggaacaacaagacc

SEQ ID NO: 221175 - RNA, 80 nt, Homo sapiens
cggcgggcgggggccccgcgccgcggccgagcagcggaagcgaaaccacaacacccaaaagcaaggaagaccacggacga

SEQ ID NO: 221176 - RNA, 74 nt, Homo sapiens
aaggcgcccacaagggacacgagcgggaagcaggcggcaaccacccgcacggaggcacgggacacagcagaaag

SEQ ID NO: 221177 - RNA, 73 nt, Homo sapiens
gccgggcagagggaccacggggagccccacgaggcccaagggccagcgcgccgccaggaccgggcccacgcac

SEQ ID NO: 221178 - RNA, 50 nt, Homo sapiens
gaaagaaccggaagacagaggcggaggggcaagggacaaggggcgaaccc

SEQ ID NO: 221179 - RNA, 108 nt, Homo sapiens
ggcagacacgagaagcaaagacagggacaggacagcgagcgaggacgaggaacggcggacccaaagacaggaccacgcaccagcagagaaggaaagcaaaccgaagca

SEQ ID NO: 221180 - RNA, 61 nt, Homo sapiens
gcaaggccccaagccaggaggcaccagagaagacaaagaaagcaagcaaccaggcacaaca

SEQ ID NO: 221181 - RNA, 76 nt, Homo sapiens
cgggaggcagaaaccaacaaccgcccccgccgccgaaaaggaaaagagccgcaggcgccgcgacccggacagacgc

SEQ ID NO: 221182 - RNA, 75 nt, Homo sapiens
agcaccaaagcgaaggagggccgcaaggaacaagcagaaagcacgaacaacgagaacaagacacgagcaaacccc

SEQ ID NO: 221183 - RNA, 71 nt, Homo sapiens
agacggggcgccccacagaggggcgacggacagcccaccaccaccgggcgggccaccaccagggcaagacg

SEQ ID NO: 221184 - RNA, 77 nt, Homo sapiens
accgcagaaaaggaagcggggaaaaagagaaagaggggaaagaaaaggaacaagcgaaaaaagaaaaccaagaaaca

SEQ ID NO: 221185 - RNA, 72 nt, Homo sapiens
cggggacgaggagaggaccaggaggaggaggcagagagacgaccagagaggcaaagggaggacagggccaga

SEQ ID NO: 221186 - RNA, 71 nt, Homo sapiens
aggccaacagaaaccaccgccgacaggcacagccaggaggcaggagcccccgccaggccccaggaagaccc

SEQ ID NO: 221187 - RNA, 80 nt, Homo sapiens
gaacgccgccgccgccgccgcagagcgcagccggggccgaggcgcgccgggggcccggaaagggacgcgcgcccagggag

SEQ ID NO: 221188 - RNA, 55 nt, Homo sapiens
ccagagcgggcgccagcgcagggcagacaaaaaaaacagaggcgggaaacacggc

SEQ ID NO: 221189 - RNA, 70 nt, Homo sapiens
agagcgggagccacacgcccagcagccaccaacacccaaagacaggggcaaggccgaggggaacagcaca

SEQ ID NO: 221190 - RNA, 72 nt, Homo sapiens
cgccgggcgagacaaggcaaaacggagaagcacgagcccagaaagcagaaacggaaacaagccaaccaagca

SEQ ID NO: 221191 - RNA, 75 nt, Homo sapiens
gaacaaacgaaggaaaggaacgagaagcaacggcccggcccgaggacagaagggcgagcaaagacacagccaggc

SEQ ID NO: 221192 - RNA, 73 nt, Homo sapiens
cgacaaccccagccaacccccacacggggagaaagaaagaaaacaagacaaaacccaaagaaaccaagccccc

SEQ ID NO: 221193 - RNA, 78 nt, Homo sapiens
ccaggcgagcagaggccgcgagcgacgcggcgccgagccggggacgaagggaacccgccgggcggcccggcacccagc

SEQ ID NO: 221194 - RNA, 75 nt, Homo sapiens
ggcgggacagagggagccaggcagagccggcccgacgcacaaggcgggggcggaagccgaccgcgcccgcccccg

SEQ ID NO: 221195 - RNA, 62 nt, Homo sapiens
cgcgcccgcgcggcgcggggaccgcggcccgagacgaagagaccgcagaagcgaaaaggagg

SEQ ID NO: 221196 - RNA, 75 nt, Homo sapiens
cggcagcggcaaaacaaccccagccccccaaagccggaacagaggggacaccccccaggcacagccacaccccag

SEQ ID NO: 221197 - RNA, 71 nt, Homo sapiens
gaaacccggagggaaccaagaaacggaagaggaggaagcgggaacaaggaacaccaaaacaggggcacaag

SEQ ID NO: 221198 - RNA, 77 nt, Homo sapiens
gcaggacgggcacagcagagaccaaaggcagggcaaggaaacggccacaagaagcgaggaggaaagagagcccacca

SEQ ID NO: 221199 - RNA, 84 nt, Homo sapiens
gcgggccacgcacccgcaccaaggccaagggaaaagccaccgaccacacgccacaaacccaccgcaagcgccaccaccacagag

SEQ ID NO: 221200 - RNA, 58 nt, Homo sapiens
agaaacaccaccaacaaaccgcaccgccggccaggaggagagcgcaccaccaaaaagg

SEQ ID NO: 221201 - RNA, 86 nt, Homo sapiens
caccacccagcggacccggccaggccaggcccggagccgccccagccacagcgcggccgccggagccgccgcgcgcgacggccggg

SEQ ID NO: 221202 - RNA, 82 nt, Homo sapiens
ggacaccgccacgcgagccggcggggagggcccgacgcccagcggaacagaagggcccggccagggagaaccccccggagcc

SEQ ID NO: 221203 - RNA, 74 nt, Homo sapiens
gaaccagcaagacccccacagacgagggccccaacaccaagaacagagagcacaagcagagcaacaaagcgcac

SEQ ID NO: 221204 - RNA, 58 nt, Homo sapiens
agggacccaaagagcaggaccaagaagccacgggaaggaccgggaagcgagccgacgc

SEQ ID NO: 221205 - RNA, 74 nt, Homo sapiens
cccgggcagggcccaccccgcgcccgacagagaaagggaagcgagaagagcagaagaggcagacacaagaagaa

SEQ ID NO: 221206 - RNA, 64 nt, Homo sapiens
acgcgagcaggcggccacacggaagccagcggccaaccgcacaaaaaccaagaaaaccaggccc

SEQ ID NO: 221207 - RNA, 70 nt, Homo sapiens
acaaaagcccgacgcccaggaggaggagaagcggagcagaacaaaggacgagccgggaggggagacaccg

SEQ ID NO: 221208 - RNA, 77 nt, Homo sapiens
cagccccgaagcgggaacagaccgcagcccaccaaagaaaccgcccgcccggagccccggcacgggaagccgccagc

SEQ ID NO: 221209 - RNA, 57 nt, Homo sapiens
gcccgaggcgcaagagacaaggcgacaaggcccccaagaaggacaaccagaacgccc

SEQ ID NO: 221210 - RNA, 76 nt, Homo sapiens
aagagcaagacacagacacaaaacacgaaccccccggccggagagaaggagcaagggcagggcacgggcccaccac

SEQ ID NO: 221211 - RNA, 64 nt, Homo sapiens
aaccagccaggccgaaaccccccccacacgcagggaaaaggggaaaacaggaaagacgaaagac

SEQ ID NO: 221212 - RNA, 72 nt, Homo sapiens
gaccgcggacagagacaacaccgagagagaacaccgaggagcaacacccccagggagcccagaccgacagga

SEQ ID NO: 221213 - RNA, 76 nt, Homo sapiens
agcaccaggcggcgccgagcgcggacggccaggccccgggccaggggaaaaaaggccagagacagacggcacagac

SEQ ID NO: 221214 - RNA, 51 nt, Homo sapiens
gaaaaagcgcagagagaggagagagaaaaccgccaagagaaaaaaggcaac

SEQ ID NO: 221215 - RNA, 76 nt, Homo sapiens
gagacgaggcccagaagaacaaaggggacgggcagagaaacaaaacgacagaagcacgacaacaacgggcagcaag

SEQ ID NO: 221216 - RNA, 60 nt, Homo sapiens
gcggaagggagcccaagaggaccaggggagcgcggccacagacgcacaggcagagacaca

SEQ ID NO: 221217 - RNA, 77 nt, Homo sapiens
gcccaccccaacccggaaagggcgcgagggaacgagaaagggaacgggggcggccgccccaacccccaacaaacagg

SEQ ID NO: 221218 - RNA, 74 nt, Homo sapiens
cggaaggggaaccccggccgcgagacgcggcgcgcgcggcaccaggccggccggaggaggcggaggccagccga

SEQ ID NO: 221219 - RNA, 70 nt, Homo sapiens
gaagccagaccacagccgaaacaaccaacgacaacaaggcagaagggaagggccgagcaaaaccccagaa

SEQ ID NO: 221220 - RNA, 77 nt, Homo sapiens
aacagccaaaaagcagaggaggagacagcagaggcggcccggccgggcaccggagcaggcgggaggaggagaacccg

SEQ ID NO: 221221 - RNA, 79 nt, Homo sapiens
gagaaggagccgaggagcgccggaagccagcaggaaccgggcaggagacacggacacagcaaacggggacagcgccgac

SEQ ID NO: 221222 - RNA, 81 nt, Homo sapiens
cacaaccgcccagccggcgagggacgccgcagaaacagaccagggaggagaaagaaaacgagcacccaaccggaggaagga

SEQ ID NO: 221223 - RNA, 68 nt, Homo sapiens
caaagggaccgggcgagcacagacagcaggaggaggcgccccaccacgaacgcgaacgacaccaccga

SEQ ID NO: 221224 - RNA, 79 nt, Homo sapiens
agcgggcccgaggagggggaccgaagacgaccgacccgcccagcacgaccagccagcaggaccagggcccgaggagggc

SEQ ID NO: 221225 - RNA, 72 nt, Homo sapiens
cgggacgggccgagaggggggccacgggccccgaccgcccacaagcgcacgggggcacccaacaccgaacga

SEQ ID NO: 221226 - RNA, 78 nt, Homo sapiens
ggagcaccgcgcggcggcacacaacacggcgcaagcggcgcgccagagcggcacgagcccccggcagggccaaggccc

SEQ ID NO: 221227 - RNA, 97 nt, Homo sapiens
gaagagggagcaccacggaccccaaggaagccacggcagacacacaacccgacccgacgacacacaccacgggacacaggggaaaggcgcgcaagcc

SEQ ID NO: 221228 - RNA, 81 nt, Homo sapiens
gccacaccccgagagcccggacacaagacccgcgcggccacgaccgggagagagaggagcgagaggaagcggaagaaaacc

SEQ ID NO: 221229 - RNA, 75 nt, Homo sapiens
caacagggacggccgcacacacagcccaagggcacacggcagggacaaaggcgcagcaccccagaggaagagaag

SEQ ID NO: 221230 - RNA, 86 nt, Homo sapiens
gcgcggggcgcggacacccccgcgagagccgccgccaggaccggaaaacagcggcgaccagcagaccagaaggaaaacacaccagg

SEQ ID NO: 221231 - RNA, 83 nt, Homo sapiens
caccaagaaaaccaccagggagaaaagaagagccaccgccccaccaacggggccaaccaaaaggagcaggccagcaagacgaa

SEQ ID NO: 221232 - RNA, 59 nt, Homo sapiens
gcacagggagcgggccgcagcaccggggcacccaagacagagaagcagccaggccacac

SEQ ID NO: 221233 - RNA, 73 nt, Homo sapiens
ggggaagccgggccggccgcgcgacgggggacagaacggcaccgacgagacggaggggacgaagggaacccgc

SEQ ID NO: 221234 - RNA, 71 nt, Homo sapiens
gggcagccagaaaggggagagcgcgaagcaaaggagcaagcggccgagccgaggaggccaaaggaagacca

SEQ ID NO: 221235 - RNA, 54 nt, Homo sapiens
cgccaggaccggcggccagaaaacaagaagcagacaaagacaccaccagccggg

SEQ ID NO: 221236 - RNA, 79 nt, Homo sapiens
ccagaggcagggggcgacccgaacccaaaggaggaaacagcggcaagccacagacgacacccgagacaaaggaagaagg

SEQ ID NO: 221237 - RNA, 77 nt, Homo sapiens
aggcgggggcccagaagagccaggaacgaaagccaggaacaaccacccggcccaagaaccgcccagagaagaccacg

SEQ ID NO: 221238 - RNA, 72 nt, Homo sapiens
ggaggaagcaaacaccagagaggccccagcaggaggacccgccggaccagccacgaaaagccagagacaagg

SEQ ID NO: 221239 - RNA, 68 nt, Homo sapiens
cggccgcacgacgcgcgggcaccgcgcgacgcaaaagacaggacgcaaggcaaaaaccagagcaggac

SEQ ID NO: 221240 - RNA, 81 nt, Homo sapiens
acagccgcccgcagcgcagcagcggggccaggcggggcagggagccacggggagccccacacagaggagccaccggcccag

SEQ ID NO: 221241 - RNA, 78 nt, Homo sapiens
caggcgggcggagcgagcaggaaagaccacagcaagaccacgcccccagccgggggaccaggccgaacgacccggaca

SEQ ID NO: 221242 - RNA, 49 nt, Homo sapiens
gcggcccacgggcaccagaaggcaaggagacagacccacaacacccccc

SEQ ID NO: 221243 - RNA, 66 nt, Homo sapiens
gaaccaacaaaaaagaacaaccggacacggaagaaaggaaaggcacggagcccagaaaaagccgcc

SEQ ID NO: 221244 - RNA, 83 nt, Homo sapiens
cccacagcgcggcgcggccgagagccgcggcccggcggaaaggacagcaggcgggggcgccgcgccaagcagcgggcagcgcc

SEQ ID NO: 221245 - RNA, 68 nt, Homo sapiens
gaaaccgagaagacacaggaagagaaggagggcaggagaaaggagaaaaagaggcagggagaagaaac

SEQ ID NO: 221246 - RNA, 63 nt, Homo sapiens
agcagcggaagcaccacacacccgaggacggagacacgagggcgaagggaagaagcagaaacc

SEQ ID NO: 221247 - RNA, 71 nt, Homo sapiens
cccccaccacccggcagaaccggaaggccaggaggagagaccagcagcaaacccacgcggcgcaccgcaca

SEQ ID NO: 221248 - RNA, 82 nt, Homo sapiens
cacgccaccaagaccgccaaggagcacgagcagcggcaggagcccaggggcccagcaggccagagcccacgggcgccagccc

SEQ ID NO: 221249 - RNA, 72 nt, Homo sapiens
aggcggcacaagcagcgagagaaggagaaaacgccggggaaccgcaggaaagcacagccggcccgaaaggac

SEQ ID NO: 221250 - RNA, 83 nt, Homo sapiens
ggcggaggccccagggaagcgcagaaagcaggcgaacccgcggcgcaaaacggaaggcaggccccgaagccccagaacaagcc

SEQ ID NO: 221251 - RNA, 78 nt, Homo sapiens
gacagacaccagccccgaggaagcacagacaaagcaccgagccagaaaggaggagcaaggaagcccaggaacgagaac

SEQ ID NO: 221252 - RNA, 38 nt, Homo sapiens
ggaacagggaaccacggaaggccggaagaaacgcggac

SEQ ID NO: 221253 - RNA, 76 nt, Homo sapiens
gggccgaaggccccggacgagacggcccggcgccaaggggcgcagcgggcagggcccaggggccgcgggacccggg

SEQ ID NO: 221254 - RNA, 71 nt, Homo sapiens
gccagacacaaacaagacagagccccagcaacggaaagccaagcaagcaaggagccagcccacgcaagcac

SEQ ID NO: 221255 - RNA, 51 nt, Homo sapiens
aagacaccgccggaaccgacaaggagccaggacgcagaggacagaaagcca

SEQ ID NO: 221256 - RNA, 76 nt, Homo sapiens
aaaagcggaggaagcgggaggcccgaggggcccggaaggccaaagccgacagaaaaggaagagacccagcgaacaa

SEQ ID NO: 221257 - RNA, 75 nt, Homo sapiens
cacaacggaacgccacacagaggaaagcacaaaggaagacgaaccggagaagagagaggacagaccccaggacca

SEQ ID NO: 221258 - RNA, 86 nt, Homo sapiens
cagggagagcggcgagacgacagcgagacccccaggcccgcggcgccgcaacaggagcgaagcaacagagagaggccgcaggccca

SEQ ID NO: 221259 - RNA, 67 nt, Homo sapiens
gacgaggaggcggagcggacaaagaggagaacgaaaacccaccaggaaggagcacaggaagaagcag

SEQ ID NO: 221260 - RNA, 77 nt, Homo sapiens
cggcacggagacagcaagcagaggccgcagcgacagcgagggcggaaccgacaggaaaagccgagacagaagcgggc

SEQ ID NO: 221261 - RNA, 69 nt, Homo sapiens
ccgggcaaggaccccgccgagcccccaagagcaggacaaggacaaaccggcgaccacacacggggacga

SEQ ID NO: 221262 - RNA, 37 nt, Homo sapiens
gcaacagacgggaccgaaagacagagggaaagggcgg

SEQ ID NO: 221263 - RNA, 67 nt, Homo sapiens
accacagacgacccgcaccgcaagaccgacacgcgaggagcagggccgggagagcaaggcggcccgg

SEQ ID NO: 221264 - RNA, 68 nt, Homo sapiens
accgggggaagggagaagaccaaagggaagagaaacgcaaccgagccacgcgcccaggcgcaggcagg

SEQ ID NO: 221265 - RNA, 38 nt, Homo sapiens
gagggacacacggcgcagcgaacaaaggacccgaagac

SEQ ID NO: 221266 - RNA, 55 nt, Homo sapiens
aagacgacaaccaccaacccaccggggagaagacaaaaaggacccgacagcacac

SEQ ID NO: 221267 - RNA, 72 nt, Homo sapiens
cgaacacaagccacacaacacaaccagaagggagaccagcgggccgccgcgggagacacaaggagacaaacc

SEQ ID NO: 221268 - RNA, 63 nt, Homo sapiens
agagccaggcgccggcccaacaccccaacaagaacagcacccgaaagagcgaaagcccagaca

SEQ ID NO: 221269 - RNA, 81 nt, Homo sapiens
ccagcggcgacacgcgacgcgccaaaacccgcccggaaaggggacaccgaaacggcagacccaccgaccaacaaagaaaca

SEQ ID NO: 221270 - RNA, 70 nt, Homo sapiens
ggaagccgccgcgccacgacagaggacggcaccacacagaaaccacgaggagggccaggacacacggacg

SEQ ID NO: 221271 - RNA, 80 nt, Homo sapiens
ccgggaggaaggaacgaggcaaggagcaaagcagcggcgcagcccgggaaaacaccgggaaaggcccaaaccggcgaaaa

SEQ ID NO: 221272 - RNA, 78 nt, Homo sapiens
gagcaaggcaaggcaaagaaaaagacaaaaggaagagaagacaagcccgaacgggcacacgggcgaggggcaggaccc

SEQ ID NO: 221273 - RNA, 61 nt, Homo sapiens
gcgccgcggaccgcgcgggcccggccaacgcaacagggagcccacgcaagaggggccgggg

SEQ ID NO: 221274 - RNA, 76 nt, Homo sapiens
ggagaggagagacggaccaggagacacagcaaggaacggccagcaccaagggcaccaggagaaaggggcggacggc

SEQ ID NO: 221275 - RNA, 73 nt, Homo sapiens
gccccagcgggggggccccacccgagacaagagcaacaagacacgaggcgggaggggacggcaaagggcgcgg

SEQ ID NO: 221276 - RNA, 83 nt, Homo sapiens
cagccggaaggagaggacacgagagggcgggcgaaggaagaggaacccacgccacgccggagcccggaggggggccaaggcgc

SEQ ID NO: 221277 - RNA, 64 nt, Homo sapiens
gacagaccaaccagagaacaaagaaggcgacccgcaagccgaccagggcagacacaccggaagg

SEQ ID NO: 221278 - RNA, 30 nt, Homo sapiens
cccgccgccagcaaaaccagccaccaacga

SEQ ID NO: 221279 - RNA, 58 nt, Homo sapiens
cacagcggagaaggaaagcaaagaagaaagccaaggggccgaccgccaaaggaaccca

SEQ ID NO: 221280 - RNA, 78 nt, Homo sapiens
cggagcgggcggagacgccgggcagccgaacggagggcgacggagggagacaagagagaccaggcaagggagccacac

SEQ ID NO: 221281 - RNA, 74 nt, Homo sapiens
gcgaaaacccgaagcaggaaaaccagaaaaccgggaagcggaaccaccgccagggcgaaggagacacaaccggc

SEQ ID NO: 221282 - RNA, 66 nt, Homo sapiens
accaacagagaaggacagagcaggccccggagcggcagggaagggaccggaacgccagaaagccca

SEQ ID NO: 221283 - RNA, 67 nt, Homo sapiens
gacagcaacaaaaagcacagcggggcagcgcaccccacaacaaccagagagggcgcaagccccgaaa

SEQ ID NO: 221284 - RNA, 55 nt, Homo sapiens
agccgagaaagggaggcggaacagaccaccaagaaaaaggacagcacaaaggaag

SEQ ID NO: 221285 - RNA, 78 nt, Homo sapiens
agccccacaacacaccgcaccggcccggcaagggcgccggcccagagcaaaaggaagacaacccccccgggcagcaag

SEQ ID NO: 221286 - RNA, 73 nt, Homo sapiens
ggaccgacacagccacaagaaggcagcaaaccaagcaaccagcgacaccgaacagcgagcacacggcagacac

SEQ ID NO: 221287 - RNA, 83 nt, Homo sapiens
cgcaccacccagcggacccggccaggccaggcccggagccgccccagccacaggccggcggaccgcaggcagcgagccgcccg

SEQ ID NO: 221288 - RNA, 94 nt, Homo sapiens
aaaaagacggacagcccacgggaacaagaggggacagaaagccagagacgcgcacgaaacgacgaagaggcccgaggacagaggagcaaaggag

SEQ ID NO: 221289 - RNA, 78 nt, Homo sapiens
gaccagggcacgccggagcaaaaaagaccccagcgcacaggaagaaacgccaggaacacaagaaaagacagcagacga

SEQ ID NO: 221290 - RNA, 76 nt, Homo sapiens
gcacaaggacgccggagaggaccgggaaggcaaaggaaagcccagcaaaaccgccagcaagaggaaaaaaagaaga

SEQ ID NO: 221291 - RNA, 76 nt, Homo sapiens
gcgcagcgcgaccgggaggcccagagccgagcccacccgaccagggcccggcacccagcagaaggacagaaaagag

SEQ ID NO: 221292 - RNA, 35 nt, Homo sapiens
accaggcccaggacagcacgagccaggggcaggga

SEQ ID NO: 221293 - RNA, 69 nt, Homo sapiens
ggaagaggcggcgggcaagggccgcaaggccaggcgcgcagaggcacccaacggcacagaccccacaca

SEQ ID NO: 221294 - RNA, 73 nt, Homo sapiens
gcaccagaaccccacccggcccgagccggcaaacgagagcaaaagggaccgaggcaagaagggacgaacgggg

SEQ ID NO: 221295 - RNA, 74 nt, Homo sapiens
agaccaaaagcggggagaagagggaccgagggcccgagggcaggacagcaggcaccggcgaagcacagagaggc

SEQ ID NO: 221296 - RNA, 57 nt, Homo sapiens
gaaagagacgagagggccggcagaaaacggcaagagcaacgaaccaaagcaaaggag

SEQ ID NO: 221297 - RNA, 77 nt, Homo sapiens
aaacacagaaagacggggcaaccagggaccgcgaaggagacagaacagacagaaaaaacaacaagaaacccacaacc

SEQ ID NO: 221298 - RNA, 68 nt, Homo sapiens
accaaaacggcgaagcccaccagacggagcgaaccaccgaagcacagaaggcccaggagggcgacgga

SEQ ID NO: 221299 - RNA, 86 nt, Homo sapiens
cggccgggccagcacccggccgagacggcggcagcagcggcacagagacaccaggcgccgagaaggccagcagagaaacaggcagg

SEQ ID NO: 221300 - RNA, 82 nt, Homo sapiens
gaagagccgaccacaaggggaggacaaccgcccgggaccaggaggcccaaggaacagcacagcagcgacacacggaccggag

SEQ ID NO: 221301 - RNA, 76 nt, Homo sapiens
ccgaccccccggcgccgcgccggcggcgaaccggggagaccacgacgcgccccgggcgccagagccgcagcccagc

SEQ ID NO: 221302 - RNA, 73 nt, Homo sapiens
cccagcccgccccccgggccgggcagcgaagccggccagcgcagaaccgcagcccagccgacaggcaccaagg

SEQ ID NO: 221303 - RNA, 32 nt, Homo sapiens
agcaagaggaaagcagagaaaacgggaaacgg

SEQ ID NO: 221304 - RNA, 74 nt, Homo sapiens
gaagaccaggcgggaaaaaggaaaaaagcgagaagcgaaaaagagagcaacgaccgagaacccagcaacaaggg

SEQ ID NO: 221305 - RNA, 85 nt, Homo sapiens
ggccggccgggacgcggcccggagccgggaccgcgcaagacgcgagcaaaaagagaaaacaaagaagcaaagcccgacccacgcc

SEQ ID NO: 221306 - RNA, 76 nt, Homo sapiens
ggaccgacgagccgcagggcggagagacaccacagaacgagaaaagggcgcccgggagaagaagcaaagcacaaga

SEQ ID NO: 221307 - RNA, 56 nt, Homo sapiens
gggggagagcaaaccaccaaaggggcaacgcgaacccgaagagcccaagcagccaa

SEQ ID NO: 221308 - RNA, 75 nt, Homo sapiens
cggccccggggaacgcgagcgcgaccgaagacccccgccccaacaagaggccaacggccaagaccgcccggcagc

SEQ ID NO: 221309 - RNA, 72 nt, Homo sapiens
aagcaaagcgaggaagaggagcccagcagcagcagagcgagagaacgcaccgggggcagacaccaccaagga

SEQ ID NO: 221310 - RNA, 102 nt, Homo sapiens
ccggaagcgccaggacaaggggacccgggacgacgagacgacaccacaaagacggcccgccacgggccccgcagccgcgcccgagcgcccgagcagggacag

SEQ ID NO: 221311 - RNA, 60 nt, Homo sapiens
ccccaaagcagccaaaaggcccagaagcaaaaccgaacaccggaagaggacccagcggac

SEQ ID NO: 221312 - RNA, 83 nt, Homo sapiens
gccggggccgccaggagcccgaccgggagaggacaagaccacgagccaggaccggaaggaaaccaccaacagccggcccagag

SEQ ID NO: 221313 - RNA, 80 nt, Homo sapiens
gaccacggcaccagggccggacaacagacccgggggagacgccgccaagcgcggaaaaggaacagaagaggaaccgaaac

SEQ ID NO: 221314 - RNA, 77 nt, Homo sapiens
cccggagcacgcaagagacaacacgccaccaggaccaccccccgccaggcaccaaaaagggcgaggaacccaacaac

SEQ ID NO: 221315 - RNA, 86 nt, Homo sapiens
cggggcgcgcgcgaagcgagcgagaaggcacggagcgccgcggagcgcagcacccgagggacccgaggagcccaccaagccgaccg

SEQ ID NO: 221316 - RNA, 87 nt, Homo sapiens
gccgagccgcgaggagcgcacccgggccccgaggagcggacaaagagcaaccaaaacaggacaagaaacaccaaacaagcaacagcc

SEQ ID NO: 221317 - RNA, 51 nt, Homo sapiens
caggaccagagaaagcgccgcaacgcccccagccaaaagaagaacccggac

SEQ ID NO: 221318 - RNA, 62 nt, Homo sapiens
cccggggacccccgacgccaggcagcgcccccaaacggaccccaacacgggccgacagagca

SEQ ID NO: 221319 - RNA, 72 nt, Homo sapiens
gaacaaaccgaagaacagcgggaaagaaggcaaaacacggagacaggggaaacgaacaagaaagaagagcaa

SEQ ID NO: 221320 - RNA, 72 nt, Homo sapiens
ccaggagcagaaggcaaagcggagcgccgcaaggcacagccagcccgccagggacacacagacgccacagag

SEQ ID NO: 221321 - RNA, 69 nt, Homo sapiens
acgagaacgccgcgacagaaaacggagcaaaagggaccacgcgcgcaggggcgccccagcagcagcgcc

SEQ ID NO: 221322 - RNA, 72 nt, Homo sapiens
gccccacaggagccggacacgcagacagcaaggcgaccggcccgaggaccgccgcacgaccaaacgcagaac

SEQ ID NO: 221323 - RNA, 50 nt, Homo sapiens
aacgagcacacagaccacaaacaaaggaccgcaagggaagcaagcacaac

SEQ ID NO: 221324 - RNA, 41 nt, Homo sapiens
acccgcaccggccgcgcgagaggggaagagagcgcccggca

SEQ ID NO: 221325 - RNA, 71 nt, Homo sapiens
ggcagccggcccagagggcaggcgaaggggccccaacaaacgaccacagccaaaggcggcccagggcagca

SEQ ID NO: 221326 - RNA, 60 nt, Homo sapiens
aaaagagaacaaccagagaaggccgccaaagcgaagaacgcagggcggcgcccgcgccgg

SEQ ID NO: 221327 - RNA, 71 nt, Homo sapiens
aaaggagaagacaaaagagagaaaagaaaggagagcaagaaccaaggccccgccagaggaacaaagcaaaa

SEQ ID NO: 221328 - RNA, 67 nt, Homo sapiens
cacaccagagacggcccgcggccggcgcgcagggggaaggcgaagaagagggcaacccgaagaacag

SEQ ID NO: 221329 - RNA, 83 nt, Homo sapiens
ccaacccacagcgccccaggagaaagaagaaacaaagagggacccagccaccaaaaggaggcgaagggccaggagaagcagga

SEQ ID NO: 221330 - RNA, 61 nt, Homo sapiens
agcgaggcaggaacgcaaggagaggaagaggagagaagcccacccaaagaaacaggacccg

SEQ ID NO: 221331 - RNA, 70 nt, Homo sapiens
acggcagcaggaggcacggcccgcgagacggggagagcgacaccgccaagaacccagcaccgggccccaa

SEQ ID NO: 221332 - RNA, 51 nt, Homo sapiens
ggccgggaagcaggccggggacgaaaaaggggaagccaaaaaggccaagag

SEQ ID NO: 221333 - RNA, 87 nt, Homo sapiens
aggcggcgggccaggggcagcgggcgcgcgcggcgggggcgcaccagacaacggcaagcggagaagagcaaggccgaaccgagagga

SEQ ID NO: 221334 - RNA, 71 nt, Homo sapiens
gggagaaaccaaaccaagggggacagcaagcccaagccaccagcggaagaaaggaggaagagaggaaaaca

SEQ ID NO: 221335 - RNA, 79 nt, Homo sapiens
gagggcaagaggacggagacccacaggagacccacagaaacccacaaggaaggaaaggaagggacgaagagaagaaccc

SEQ ID NO: 221336 - RNA, 61 nt, Homo sapiens
gccacagaaccgcccaaaaaggcaaagaaaccacgagggcaggccacgcacgcgcagcaca

SEQ ID NO: 221337 - RNA, 92 nt, Homo sapiens
agcgccggagacaaccagggagacaagcagccccgcaaagggaacaggaagcagccacggaggggacgcccagacccaccgcacccccaaac

SEQ ID NO: 221338 - RNA, 57 nt, Homo sapiens
caagcaccccaaaacccaagcaagggaccgcaagcgggacgaacggacgaaagacgg

SEQ ID NO: 221339 - RNA, 36 nt, Homo sapiens
agagagaggaaggccagcccaaaccacccagaccag

SEQ ID NO: 221340 - RNA, 69 nt, Homo sapiens
gccagggaggacgaagaaagcacacagggacgcgagcagccagcccagaaacgcgcccacaacacaaag

SEQ ID NO: 221341 - RNA, 57 nt, Homo sapiens
gggagacaggcggccacaggccgggacaaccagaggcgaagagcccacccgccaacc

SEQ ID NO: 221342 - RNA, 90 nt, Homo sapiens
caagcagcagaagagccaaggaaaaacagcaagaacccaaaaggaaaggggggcgcccccgcaccagcaaggccaagacccaaccagccg

SEQ ID NO: 221343 - RNA, 80 nt, Homo sapiens
agcacagccgggaaggggagccaccagccccccgggccaggcccgggcacgaccccgacaagaagagagaagaggcccca

SEQ ID NO: 221344 - RNA, 85 nt, Homo sapiens
gccaagcccagccaagccccgccgacgcgggcaccggagccagccccgcagcgggacggggggcccgggcgaaaccggaccgggc

SEQ ID NO: 221345 - RNA, 75 nt, Homo sapiens
acaacaggacggaagccccaacaccagaaaggaggagcaaggaagcccaggaacgagaacccaagcgcaggcaaa

SEQ ID NO: 221346 - RNA, 73 nt, Homo sapiens
cagcagggaaacccagcgagagaccaggaagaagacggcacgggacccccagcacaggcagcaggccgggaga

SEQ ID NO: 221347 - RNA, 62 nt, Homo sapiens
gcgcgaagccacaagaaaggcagacccaggaaaagcgcaagcaacacagaggaaaaacccag

SEQ ID NO: 221348 - RNA, 88 nt, Homo sapiens
ccggcagcggagagccgagcccaaggcaagacccaaggcgacgaccgacaggggggaaaggaaaagaaggaggccagcgggacacaca

SEQ ID NO: 221349 - RNA, 74 nt, Homo sapiens
cagaaaaaccgaaccccagggagcgaagcagaaacacagagagaccaggagagaggagcacccaacaggacgag

SEQ ID NO: 221350 - RNA, 71 nt, Homo sapiens
agaggacgacgaagagacaaaggcaccggaaagccaggaaaaacacacacaagcagaccggaagaccgacg

SEQ ID NO: 221351 - RNA, 61 nt, Homo sapiens
gcggcccggggggaagaggccaccaacacggacggcagccgacaggcagaccaaggcagcc

SEQ ID NO: 221352 - RNA, 75 nt, Homo sapiens
ccccgaggagggacgaggaaggccaggggagaggaaccagaaagagacaagaagggaccggcgcgggggacccac

SEQ ID NO: 221353 - RNA, 93 nt, Homo sapiens
aaaggcgaagcacacaagagcggcgaaggagcacgaagaagcaggggacccccgggagacaaccccgccccgccgcccagagaaggaccacca

SEQ ID NO: 221354 - RNA, 80 nt, Homo sapiens
ggccacacggcggccgcagggcgccggagccccccaggacggagaaagagagcgaaaagcagaagcagaaacacagaaaa

SEQ ID NO: 221355 - RNA, 89 nt, Homo sapiens
gcgggaagggaagcggccaaggcacggaggccgcgacccgggaaaaggagaagagaaggaagccaaggagcccgcaaccaagggcaccc

SEQ ID NO: 221356 - RNA, 58 nt, Homo sapiens
caaggcccagcagccagaccggagaggaaaagcggggcacccccccggacacccacag

SEQ ID NO: 221357 - RNA, 75 nt, Homo sapiens
gaccaaaagaaaaacgggaccgcaacgacaagcacccccacagcccagcgaggcagaacaagaagggcaaccagg

SEQ ID NO: 221358 - RNA, 58 nt, Homo sapiens
cggcccagaaacacacaaaccggcagcgcccccccccaacacacgcgacacgaagaag

SEQ ID NO: 221359 - RNA, 81 nt, Homo sapiens
ccagcagcgccccccagaagcgaggaacagaacaccggaaacgccaggccacaagggagcaaacgaaaagccacgaagacg

SEQ ID NO: 221360 - RNA, 76 nt, Homo sapiens
cggacacgcaacccagaccacccacaggagcaacagaaccccccacggaaaggacgaaagaaagaagcagccccag

SEQ ID NO: 221361 - RNA, 75 nt, Homo sapiens
gagcaccgagcaagaaacaaaaaaaaccagccacacaggggagccagaaggaccagcagggccggcaacacccca

SEQ ID NO: 221362 - RNA, 82 nt, Homo sapiens
cagagggaccaggcggaacaaggagaagaaccaggagacggaggaagaacccaagccagagcccagggcgcagaacagccag

SEQ ID NO: 221363 - RNA, 60 nt, Homo sapiens
agacccaacgagaggccaaaaaccggaccagaccagcccaggaaccgaagaccgcagaaa

SEQ ID NO: 221364 - RNA, 67 nt, Homo sapiens
caaagcaacgacgccgcacaggcacccagaaaacggaaacaccggacaaagccagagaagacgcacc

SEQ ID NO: 221365 - RNA, 69 nt, Homo sapiens
ggaaacggggaaggagccagacggaccaaaagcacgcaggcccagaagcacagaaaacggcaacgagag

SEQ ID NO: 221366 - RNA, 58 nt, Homo sapiens
aaggaccaagaaccaggacaccaggggggaaaaaccacacaggcaaagaacgcgcaaa

SEQ ID NO: 221367 - RNA, 69 nt, Homo sapiens
gagcgacaagcgccccgacggagcgccaggacgggggagagacaaccagagcggaaagggagaaaagcc

SEQ ID NO: 221368 - RNA, 73 nt, Homo sapiens
ccccaccccggcccccagcgagccagcagcaccggaacaccaagagaagacacccaccgggacaccgagagaa

SEQ ID NO: 221369 - RNA, 74 nt, Homo sapiens
gcacccacccaagccaggacccgacagggcagaccgccagcagcacagcaagccacagagagggccggcagggc

SEQ ID NO: 221370 - RNA, 77 nt, Homo sapiens
ggggaggaaagcagacagacccaccaagagggcgggagaaccacgaggagagggggaagagcccccccaacaaagga

SEQ ID NO: 221371 - RNA, 72 nt, Homo sapiens
caacgccggccggagcagcagcccgaggcacggggccaaaaaggcacgagggaacgggaaagaacagagaag

SEQ ID NO: 221372 - RNA, 57 nt, Homo sapiens
cacggcgccccgcaagaagacgaccccgacgcaggccaggagccgcggacagaagcc

SEQ ID NO: 221373 - RNA, 56 nt, Homo sapiens
acccaggagcaacgaacccgggcaggaacagagacagacccgggggcccccaagga

SEQ ID NO: 221374 - RNA, 82 nt, Homo sapiens
ccgcgccggagcggagcgcgggcgccggggagccaggaacagaccaaggaccagaacaggagagaagggagaacagcagggg

SEQ ID NO: 221375 - RNA, 42 nt, Homo sapiens
acaaagggagaaggcagagacgaagccgagagcggcccagga

SEQ ID NO: 221376 - RNA, 85 nt, Homo sapiens
gcgcgaagcggccaaagccgcccagacggccaccggcgggaggaacaaaagggaagacacaggaagcgccgaggaaggaaaccag

SEQ ID NO: 221377 - RNA, 76 nt, Homo sapiens
cgaggcggagggagaaggccgagcggccccgagccgggacacccggcggcggccccggagaaaggggagacaggcc

SEQ ID NO: 221378 - RNA, 86 nt, Homo sapiens
cacgggacaaaaaccaaagggagcgggaaacgcacaacagagaacagaaaagacccgcagacaacgggcacagacagagcaccggg

SEQ ID NO: 221379 - RNA, 71 nt, Homo sapiens
gaaaaccgggggcacaaaacaacaacgccagaaagaaagccaccagagagggcagccggggagaagaaacg

SEQ ID NO: 221380 - RNA, 76 nt, Homo sapiens
cgccccaccgccccaggacagcaccagcgggccggaggagccagagcgcagaaagacgaggggacaacgaaggagg

SEQ ID NO: 221381 - RNA, 69 nt, Homo sapiens
ggccgaacagcccacgccaagaccgcgcacagaaagcccagacaacccagcgagaaaacccagaggacc

SEQ ID NO: 221382 - RNA, 56 nt, Homo sapiens
ccacagcaccccagcacccagggaagaaccccaccaacacacaggggccgaacagg

SEQ ID NO: 221383 - RNA, 61 nt, Homo sapiens
caacaagcagaggagcggacgagggagccacaccaaagccggacccccccagccggaccgg

SEQ ID NO: 221384 - RNA, 50 nt, Homo sapiens
cccaaggcgaccggcgaacaacgccacagcagcaagcaacgagaagagga

SEQ ID NO: 221385 - RNA, 80 nt, Homo sapiens
gaaccgagacccagacaagcccacagcagagggaggccgcgaagcgaagagaagaagaccgagcgccagggaaggcgacc

SEQ ID NO: 221386 - RNA, 77 nt, Homo sapiens
agggggcacccgcggccggcccggggccccgggaccggcgcccccccgaacaggccaagacaaccgggaaagcagcc

SEQ ID NO: 221387 - RNA, 75 nt, Homo sapiens
cgacggacgaagggcccagggagaaccccggaacgccaggagagccacgggcccaggcgaagcagcccaaacccg

SEQ ID NO: 221388 - RNA, 61 nt, Homo sapiens
gccagggaacccggcaccgccccagggggagagccagcaaccggaagcaggagaagaggag

SEQ ID NO: 221389 - RNA, 74 nt, Homo sapiens
aacaggccaagaaggacgggggagcagccaggacgagagcacagaggagggagcaagcacaaaccacccagcac

SEQ ID NO: 221390 - RNA, 66 nt, Homo sapiens
aaagaagaaccaaccgacggaaacagaaccgaagccggaccggggcccagcaaagccaaaggaagg

SEQ ID NO: 221391 - RNA, 55 nt, Homo sapiens
agaagccacccgacgcgggaacccagccagcccggagagaacggggcccgccacg

SEQ ID NO: 221392 - RNA, 78 nt, Homo sapiens
aggcgccgcggggagggcgggcccgggcagccgcgggcgcaaagacgcaggaaggaaggaaacgaggcaaaagaagaa

SEQ ID NO: 221393 - RNA, 70 nt, Homo sapiens
acaccggaccccggcgccggcccccaaggggcacaacaggggcggaaaacgaaaaacgggcagggacaag

SEQ ID NO: 221394 - RNA, 81 nt, Homo sapiens
cgacacccacccgaaggaacgggagcggcgaagaaaagggacacccggcacaccacaaaggccgcccccaccagcggggcg

SEQ ID NO: 221395 - RNA, 77 nt, Homo sapiens
accaaggcaaaacgacgaccaggaagaacggagcacgacagaaacacagccgcagagcaaacggagaccgggacaga

SEQ ID NO: 221396 - RNA, 76 nt, Homo sapiens
agaagccaccaagaggcaacagacagaggaccaggagcaccgcccaggacccagaaacacagaagaaggggagcca

SEQ ID NO: 221397 - RNA, 39 nt, Homo sapiens
ccgcccaaggaggcccagcgagcaagcggccgaccacag

SEQ ID NO: 221398 - RNA, 68 nt, Homo sapiens
ggaagacggcccaaaacacagcgcaccacacacagagggaaacggaaagaaagagggaagaaagaggg

SEQ ID NO: 221399 - RNA, 65 nt, Homo sapiens
aagaacagcacgcccaagcagaaagaggcagcagcacgcgaaaagccggaacccagaagcaagag

SEQ ID NO: 221400 - RNA, 86 nt, Homo sapiens
gggacaagaagggcaaagccgaaccggaggcgccacgagaacccaagaagccaagaacagcaaagggacgcaaagagcgcacaggg

SEQ ID NO: 221401 - RNA, 87 nt, Homo sapiens
gacacaccgccggcccggggcggcgccgaggggaggaggcggaagaccgaaggagaagaaggagaaggggaggagaaggcaagccgg

SEQ ID NO: 221402 - RNA, 75 nt, Homo sapiens
acggagccgaagaccaaagagaaagaggaagaaggagagacgaccacgcaacagaaaaagagcgcacccaaggga

SEQ ID NO: 221403 - RNA, 73 nt, Homo sapiens
ggccccggcaccgcccggagggggccccaccgggcccgaaggcgcggcgcaaaaggccacgccggagggaacg

SEQ ID NO: 221404 - RNA, 78 nt, Homo sapiens
cacggccggaaggcagcaagccaggccagacagcaacagagaagagaaccccagaaacacaaaacaccgaggggcaga

SEQ ID NO: 221405 - RNA, 77 nt, Homo sapiens
cccagaagacacccccagggcagaaaagcgaccaggcgaggcagccaccggaagagaaaaccaagaacgacagaggg

SEQ ID NO: 221406 - RNA, 74 nt, Homo sapiens
ggagagaaagcaccgacagcacaaccgccggaaacaggagaaaacgaaggaaggaggacccgaggagagagaag

SEQ ID NO: 221407 - RNA, 78 nt, Homo sapiens
caaaggcgcccccagggaccgaccgaacgcagcaggaggcgcagcagcacaagcagcccgcaccaccccaccaccgac

SEQ ID NO: 221408 - RNA, 38 nt, Homo sapiens
gccacggggcaccaccgggcccgacgccaaccaagaag

SEQ ID NO: 221409 - RNA, 69 nt, Homo sapiens
gcggggagcccgccccgcagacccacagggaagagcaaacagaacaacaccccggagcaaaagaacgcc

SEQ ID NO: 221410 - RNA, 54 nt, Homo sapiens
gcagcgcggccgggagcgcgggccccgagggaccagcggacaggccgccggggc

SEQ ID NO: 221411 - RNA, 81 nt, Homo sapiens
gaggaaagagagcaaaaccgggccgggcacagaccggaagcggagacgaacccggagcagcggcgcgaaggcgcgaggggg

SEQ ID NO: 221412 - RNA, 74 nt, Homo sapiens
cgcgcgcccccaggggcggccgcggcgccgggcgccgaggcggaagagagcagcgaagcagggcgagcggcgac

SEQ ID NO: 221413 - RNA, 75 nt, Homo sapiens
gaagccagggggcgggccccagacggacccaggaggaaacgggaagcgaagggaaagaacgaagaaacggaaaaa

SEQ ID NO: 221414 - RNA, 102 nt, Homo sapiens
gggagagggccaccgcccgccacccgcgcgccgccgccgaggagaaagggcggagaacggaaaagcaccaggaagcagagaggaccgcagaagggaaggaga

SEQ ID NO: 221415 - RNA, 70 nt, Homo sapiens
gccccagccacagcccccgcgcccgccagcccaacagagaggagagggggcaaagcccaccccccacacc

SEQ ID NO: 221416 - RNA, 81 nt, Homo sapiens
cgcgcgaccgccgaacgcccgcagcagagcacacggcggcggcgaagccaagacacgggcccgccgagggcgggacccgcg

SEQ ID NO: 221417 - RNA, 65 nt, Homo sapiens
ggaacagcgagacacgggacaaaaaccaaagagggagaagacgaagccgagaggacccccgagaa

SEQ ID NO: 221418 - RNA, 79 nt, Homo sapiens
cccagaggggcaccgccagagccagccggagccgaagagggcagcagaccgcgcgccagacgccaaggacgcccacaga

SEQ ID NO: 221419 - RNA, 81 nt, Homo sapiens
ccccccaacaggcgcagcaagaggacaacacagccgagccgcgggggaaagaaacagccagcagacgggaagaaccggaaa

SEQ ID NO: 221420 - RNA, 82 nt, Homo sapiens
cccagagcaccacagaggcgaaacacaaaagaagacgggggacaggagaggccagccagggcagcagcaaggagaacaccag

SEQ ID NO: 221421 - RNA, 77 nt, Homo sapiens
gcaccaggaagcagcagcgcaaagaacaaggagacacacggcagccaggccgaagggccaaccacaggcccccacag

SEQ ID NO: 221422 - RNA, 79 nt, Homo sapiens
gaggcaaccggaccccaaaaaccgacccgcacggcaaagcaaagaagagccgcgcagaacagaaggacagacagcacac

SEQ ID NO: 221423 - RNA, 81 nt, Homo sapiens
cccagcaggcgcggcccgccaggccagaccagaaggagcacaggcggaggccggcagacccaaaaaggccaggcagaagaa

SEQ ID NO: 221424 - RNA, 84 nt, Homo sapiens
ggagcggacggcgagcgcgagcggcgcgagaaagccgcgggagagcgggggcgggaggcgggccccgggggcagcacccccagc

SEQ ID NO: 221425 - RNA, 77 nt, Homo sapiens
ggcacagaggggcccagaaaacaagccagcaggaaaagaaggaggccagcgggacacacaaagaaagacgaaggaca

SEQ ID NO: 221426 - RNA, 69 nt, Homo sapiens
cgcccccccagcacacagaggagagcgacgagaagagccaggaagaaggcaggccccaacgccacagag

SEQ ID NO: 221427 - RNA, 72 nt, Homo sapiens
ccagacgccgacggccagagggaccggagcaaaaagcgcacgcaaggaaaccggccgacaggagggaagaaa

SEQ ID NO: 221428 - RNA, 77 nt, Homo sapiens
gaaaaagaggcccccccccccgcgacggggaaaggacaagggacagcagccgcagaagacgacgccaagcaagccaa

SEQ ID NO: 221429 - RNA, 37 nt, Homo sapiens
gccagaaggggagcgaacgcggcccgagcccaacagc

SEQ ID NO: 221430 - RNA, 77 nt, Homo sapiens
cggcagcgaagagaggggagccccggaagagggaggcgggacgcccgacgggagcccgccagcggggccgagacaaa

SEQ ID NO: 221431 - RNA, 71 nt, Homo sapiens
cgggggcagcgaggggaggccaggacgccggaaaaccgccgccggggccagcaagaacaaaaagcaccaac

SEQ ID NO: 221432 - RNA, 80 nt, Homo sapiens
aaaagccagaggaccccaaacgggccacaaaccggcccaacaaccacaaggaccagaggacaagacaaagggagcaagac

SEQ ID NO: 221433 - RNA, 83 nt, Homo sapiens
ggacacccagcggcgacacgcgacgcgccaaaacccgcccggaaaggggacaccgagggagacgcgcacggaccggaaccaga

SEQ ID NO: 221434 - RNA, 62 nt, Homo sapiens
gaagcaggaggggagaagggaagagggacagagcacgcagccccgaaggcggcccggccccc

SEQ ID NO: 221435 - RNA, 65 nt, Homo sapiens
gaacgaccgagggcacggccgaggaccgccgaccagagcgagccaaggcagcaaggagacgacag

SEQ ID NO: 221436 - RNA, 68 nt, Homo sapiens
ggagaaggaccaagaaccaggccacgaacgacgcacggaggccacaacaccacaccacacaagacaaa

SEQ ID NO: 221437 - RNA, 77 nt, Homo sapiens
aagaaacggggccaagagacgacaaaggagaggaaaacagccacccgacagagcacaagccgggggcagagcaacaa

SEQ ID NO: 221438 - RNA, 73 nt, Homo sapiens
aacacaccgccaccgaagacgggccccaacacccagagacgaaagcgcaaagccgaaaaacagcagcagagga

SEQ ID NO: 221439 - RNA, 66 nt, Homo sapiens
accggacagcagaggaaacgagggacaacacagacccaccagcagaaccacaggcaaacgagagac

SEQ ID NO: 221440 - RNA, 85 nt, Homo sapiens
gcaggacggcgcggcagagccccgacgccacagaacgaccgggaaaaccggaggccagcccacccagagaggccgaaaaccggcg

SEQ ID NO: 221441 - RNA, 75 nt, Homo sapiens
gagagcgaaaggaaaacaaggcaccaggaccaaagaaggaacaaaaggggacaaaaggcccgaagaagagaagaa

SEQ ID NO: 221442 - RNA, 42 nt, Homo sapiens
aggggacgccacgcaacgccgaagcacacaaggaagacagga

SEQ ID NO: 221443 - RNA, 85 nt, Homo sapiens
aagccgcccagcgggaccagcaaggcaggcgacgcccaggcccagcagggcagcggccacacacagacgagagacagggcgccgg

SEQ ID NO: 221444 - RNA, 75 nt, Homo sapiens
cagccaagcaggaccacccaccagccaccagggagccgcaaagaaggagccaagggcccacgcaggaaggagccc

SEQ ID NO: 221445 - RNA, 58 nt, Homo sapiens
cgcagcggccaccccaggaaaaaagcagcaagcccagggccaggagccgacacaagag

SEQ ID NO: 221446 - RNA, 75 nt, Homo sapiens
gaacagacacggggaagcgcaaaaacaagacggggcgccccacagaggggcgacggcgagaaagccgagcacccc

SEQ ID NO: 221447 - RNA, 40 nt, Homo sapiens
cccacaccacacaaaacccgaggaaaagacacacaagcca

SEQ ID NO: 221448 - RNA, 37 nt, Homo sapiens
gcccagcacggagcggaggaagcaccacaacggagga

SEQ ID NO: 221449 - RNA, 83 nt, Homo sapiens
cgcagccaggcaaaaagcaccaccgccagcgaagcaccgagaggacccaaagacaggaccacgcaccagcagagaaggaaagc

SEQ ID NO: 221450 - RNA, 87 nt, Homo sapiens
ccgcccacgggcgaaggcagcacagccagaggagcagaagcagccggcggccgggaacccaacaagggagcaaacagagaaagaacc

SEQ ID NO: 221451 - RNA, 54 nt, Homo sapiens
agcacaggcccgggcgaaggggccacgcgagggggaaaagagcacggcagagcg

SEQ ID NO: 221452 - RNA, 73 nt, Homo sapiens
aggagcaaacccaagaccacaggaagaaaggaacagaagacgggagcccagaggccgagacaaccgaagacgc

SEQ ID NO: 221453 - RNA, 85 nt, Homo sapiens
ggacaaggagagccgagaaggcgaccaggaggaagaagaccggcggcaggggggccgcagccgagccagccgcccaccccagcag

SEQ ID NO: 221454 - RNA, 65 nt, Homo sapiens
accacagggggaagacgagagagagaggggagcaagaacaaagggggccaacggagacacaagaa

SEQ ID NO: 221455 - RNA, 73 nt, Homo sapiens
ccgcacgacacaggaaaggacaaaaccagaagcagggggccggagcgagggagagcaggaacacagagaggag

SEQ ID NO: 221456 - RNA, 70 nt, Homo sapiens
gaggggaccagccacaggaggcggccgcacaaagaaaaaccgggagaagcggacagcaagaagcacccaa

SEQ ID NO: 221457 - RNA, 67 nt, Homo sapiens
gaagagagaaaagagagaaccccaaccggggaggaaaaccgacgaagcaccaggacaaaagaagggc

SEQ ID NO: 221458 - RNA, 77 nt, Homo sapiens
caggcccgagggcccgagagcaccgcgccagacagccagaaccagcgaagccagacaggcccggggcgcccagccaa

SEQ ID NO: 221459 - RNA, 81 nt, Homo sapiens
gaagagaagcacgaaagcgggagagggaccggaacggcggcgacaaggggcccgaacagagggacggacagcggcaaagga

SEQ ID NO: 221460 - RNA, 100 nt, Homo sapiens
cggaccgagaccggaccgagagcggaccgagagcgcgaaacgcacgagaagaacaccaccgaagccacaccgaagagccccagcggcccggacaaaaaag

SEQ ID NO: 221461 - RNA, 71 nt, Homo sapiens
cgaccggcaccgcggcaagcaccacaaaggaacgccacacgcgaaaaacggcagagcccgcccagaacgag

SEQ ID NO: 221462 - RNA, 80 nt, Homo sapiens
caggcggacggcacgcagcccggcgggaggaaaagaccaccacgcgacaaaagaagcgaagccaggaacaagaggcggaa

SEQ ID NO: 221463 - RNA, 77 nt, Homo sapiens
aaaaaagcagcaacccaaaccggccagagcaggggcacaaggcccaggagagcaagccggaaacgaaacagcgcagc

SEQ ID NO: 221464 - RNA, 79 nt, Homo sapiens
caacagcacgggagaaagcgcccacgcacgaaagcccaggccaaaaagaggagcaaccagggagcacagaaacggccaa

SEQ ID NO: 221465 - RNA, 74 nt, Homo sapiens
ccaagccgcagggggaaggagcagaaaagcccaaaacgagaagaaaccaaaaaggaagacgagagaaaaccacg

SEQ ID NO: 221466 - RNA, 57 nt, Homo sapiens
gggaaccacaccaccccgcgcaggcaaggcagccgcggagcccgacacaggcccacc

SEQ ID NO: 221467 - RNA, 80 nt, Homo sapiens
aaagcggccgggagcgcgccccccaccccgagacagaagacaaaggacagacccgcgaggccagacccagagaagccgag

SEQ ID NO: 221468 - RNA, 76 nt, Homo sapiens
gcgcccgggaaaagaacccgccaaaacacagcgaggagacagagaagaagacaagagcagacgagggagaagcggg

SEQ ID NO: 221469 - RNA, 103 nt, Homo sapiens
cagagcccaaaccccaggccaagcagccaccagcagcccccagagcgggaccacagacggcggaaaacccgaagcagaagcccgacacaggcacaagaccgag

SEQ ID NO: 221470 - RNA, 79 nt, Homo sapiens
cacccagcgcacccagagcaaccgcccaccagccggagggcgagcaacccgcaggcgggcacgggggacaagacagccg

SEQ ID NO: 221471 - RNA, 71 nt, Homo sapiens
caggcggcggaacggaacagaagcaagggaagcccagaggcacggggcagaacaccaacagagggccgacc

SEQ ID NO: 221472 - RNA, 71 nt, Homo sapiens
gcaaggagaggaacggccaaaacgggcgcgaccgcccagggagacggaacccacacagaccaacgcagcag

SEQ ID NO: 221473 - RNA, 81 nt, Homo sapiens
gcgagaccaccggaggaagcggcgcgagcgccccgccacgcccgaaagcaccgggaggaaagagagccacacgaagaacac

SEQ ID NO: 221474 - RNA, 75 nt, Homo sapiens
cgaagcacgcacaagcgcacccagcgcagggcccagaggcgccagcggggcccgaccgggcggaggccagcaggg

SEQ ID NO: 221475 - RNA, 74 nt, Homo sapiens
gaaagagagcgccagggcagcagacacaacgaacagccacagaggcacagcagggacgacaacacggccagccg

SEQ ID NO: 221476 - RNA, 78 nt, Homo sapiens
acgcccgggagaggccgcggcggccaggccccagacacagacgagcaggggaaggcccgggaggagccagccaacgcc

SEQ ID NO: 221477 - RNA, 79 nt, Homo sapiens
gcgcgcagcccggaccagccaagccccaacggcccccgcgccgggcgcagcggaaggcccgccgaaggagaagggcagg

SEQ ID NO: 221478 - RNA, 73 nt, Homo sapiens
aagcaagaccgacccagccggaaagaaaaggaaaacagagacgcgaagacccaggaacagggcgagacgaaca

SEQ ID NO: 221479 - RNA, 79 nt, Homo sapiens
cagaaagaagaacaggagcagacccggagacacacggccgagcaggcccccagcacaagggggcaccaggcggagaagg

SEQ ID NO: 221480 - RNA, 78 nt, Homo sapiens
agggagccccgcagacgggacacagcacaccggagagacgaggggcggagaacggaaaagcaccaggaagcagagagg

SEQ ID NO: 221481 - RNA, 62 nt, Homo sapiens
cccgaaacccgcagaggaaaacaggcaacgcccgcggcaaaacgggaacagcggagaagaag

SEQ ID NO: 221482 - RNA, 71 nt, Homo sapiens
gggggaacaggcacacgggaccaggggagaagagagcgagacagcgcccaaagaacccgagccggagaccc

SEQ ID NO: 221483 - RNA, 60 nt, Homo sapiens
cccgagagagaagggaagaaccacgccgggagcgggaccagcaacacaccgcggacaaac

SEQ ID NO: 221484 - RNA, 57 nt, Homo sapiens
cccagggaacagccaagaaaagacgcaaagaggacagggggagaggcaaggaaacga

SEQ ID NO: 221485 - RNA, 79 nt, Homo sapiens
gcagcgggcccgccacaccacaccaagaacagcgagcaggcgcgcagccaccggagaaggcggcgacacaacccaagac

SEQ ID NO: 221486 - RNA, 74 nt, Homo sapiens
ccgccaccggagacaacgagaggagccagggccccccacgcgagaacccgggccggggcccgggggcccgagcc

SEQ ID NO: 221487 - RNA, 85 nt, Homo sapiens
gagcagaaggagcaaaaggcggacaggcagggccaggccgagggcccgcccggccccaggagaagaaccagccgcagaggaggcg

SEQ ID NO: 221488 - RNA, 77 nt, Homo sapiens
ggagagaaagcgagaacaaaaccagcgaggaagggaccacagaccagcacgccggcgccacgaaccgagcgacagga

SEQ ID NO: 221489 - RNA, 74 nt, Homo sapiens
gaaacaggaggccagacaggacaaccagcgggccagacgcaacgcagccagccagacgaagaacgggcagcggc

SEQ ID NO: 221490 - RNA, 60 nt, Homo sapiens
gccacccacacccccaggcccaccaccccgagacagggaccagaaaagaaacggccaccg

SEQ ID NO: 221491 - RNA, 71 nt, Homo sapiens
accggcaggaccgggcagaacaacgaacagaagcacaaccagagccggccccggaggcaccggggggccca

SEQ ID NO: 221492 - RNA, 80 nt, Homo sapiens
cacgagagacgagcaacccccgggaagccaagccgcagcgcacgaccggggccgaaggaggccgcgggagcccagaagcg

SEQ ID NO: 221493 - RNA, 81 nt, Homo sapiens
cgcagcaacagaagagaggccagccgggaggacacacaagcgggaacccgcgcccagaagggaaggccacggacggggaaa

SEQ ID NO: 221494 - RNA, 56 nt, Homo sapiens
aagacagcgcgcagaagcccaaggcgaacggagagacacaggaagcgggcaccaac

SEQ ID NO: 221495 - RNA, 74 nt, Homo sapiens
gaccgaagaagccaaagccacaggaagaaggagaaaaacagaacaaacgaggccgcaaaaagcgcagagaacgc

SEQ ID NO: 221496 - RNA, 101 nt, Homo sapiens
ccgggcagggagaagggggcggcgggcggcgggcggcaaaggagcagccagagggccgggcccagcaccgaccagggaggaaccgaaaggaaaccgaggac

SEQ ID NO: 221497 - RNA, 82 nt, Homo sapiens
gcagcaacagccgaaggcgaccccgccagaacacccaggcgacaggcggcggcggcggcggcggcgcccgggagccggagcc

SEQ ID NO: 221498 - RNA, 61 nt, Homo sapiens
acacgggggcaggaggcagcgcgcccccagacacagaaaccaacaagacggcagaacgcca

SEQ ID NO: 221499 - RNA, 57 nt, Homo sapiens
gccagaccacacacacggcacagaaggcaacagggcggcgacggcggcgcgaggacc

SEQ ID NO: 221500 - RNA, 79 nt, Homo sapiens
ccccacccccgaggcccgaccggcacccacaccaaggaggagcaccccgggcaaggcacggggccgaaccaggagaccc

SEQ ID NO: 221501 - RNA, 73 nt, Homo sapiens
gagagggcggcagaccagaaggaacagagacagacccgggggcccccaaggagagggaagaagccaggcagaa

SEQ ID NO: 221502 - RNA, 39 nt, Homo sapiens
gggacgggggccaccggacagccaccggggaccgcaagg

SEQ ID NO: 221503 - RNA, 86 nt, Homo sapiens
ccggagccggagccgacgggcggggccgcacgggaccccggaacccgcgcgcgcccacgacgccgaggcgaaaacaagagccagaa

SEQ ID NO: 221504 - RNA, 77 nt, Homo sapiens
cacagcgcgcaacgcgggagagcccgggccacccccccaggcaagggcggagaacggaaaagcaccaggaagcagag

SEQ ID NO: 221505 - RNA, 69 nt, Homo sapiens
ccagccggggggcacagccgggaggcaaggaggccacggggccgaagacaccaaccgggcaccagccaa

SEQ ID NO: 221506 - RNA, 80 nt, Homo sapiens
agaaaagacagcaaaaaaccagccccacgacaccagaggaccagaacccacgagaaacagacgagccaaccagaccccag

SEQ ID NO: 221507 - RNA, 79 nt, Homo sapiens
ccccggcacacgcgcagccccggccccggcccgccggagaaacagccgggagaacaagacaagcacgcgaagcaggcac

SEQ ID NO: 221508 - RNA, 57 nt, Homo sapiens
gaacagaaagaaaagccgaaagagcgggaagaccacaacaagcaagcagcagcacgc

SEQ ID NO: 221509 - RNA, 58 nt, Homo sapiens
acgcagaaggagcacagcgagagagggacgccggacacaagagggcaagaaaggcgcg

SEQ ID NO: 221510 - RNA, 70 nt, Homo sapiens
gcacaagccagggaagagcgcaagcccaggccaacagcggggcacaggcaggacgaccgggaacgcggca

SEQ ID NO: 221511 - RNA, 110 nt, Homo sapiens
gggacacgggggaaacaaagagcaaggacccaaccccggcggcaggagaagccaaccagccggaagaacaccggaagaacaggcaggcgggaggacaaggacaccggcca

SEQ ID NO: 221512 - RNA, 75 nt, Homo sapiens
gccacacccgacggcagcgcgaggcgcggcgcgcgccagaccggcgagcccgagcagccgacaaccccggaacgc

SEQ ID NO: 221513 - RNA, 51 nt, Homo sapiens
gccacacaagaaggccagacacgcaggcagggcgcccgccgagaccaccga

SEQ ID NO: 221514 - RNA, 69 nt, Homo sapiens
agaagggacgaccaccacagccacaaacagccagcaaagacaagagcagaccagcagccgcagcgcgac

SEQ ID NO: 221515 - RNA, 83 nt, Homo sapiens
caagcggcggcccggccgacacccgcccaggcagcaccagggggaaggacagcaagccaggggagccaccggaaggaaggaga

SEQ ID NO: 221516 - RNA, 81 nt, Homo sapiens
ccaagcaaacgcagaaggacgcccacgagcaaccaagaaccaaagagaacccgacagaagaaaagggggacccacagaaca

SEQ ID NO: 221517 - RNA, 40 nt, Homo sapiens
gggagaagagaaagagacgcagcccccccagccccagagc

SEQ ID NO: 221518 - RNA, 80 nt, Homo sapiens
gaccgaggggacgccgcccgccgcccgccgcaggccacccgggaacggaggagggggcggagaacggaaaagcaccagga

SEQ ID NO: 221519 - RNA, 78 nt, Homo sapiens
cccggaggagccggcccgggggcacggaccagacccagcccagaacacaagcaaagggacagcaaaggcgcagcacca

SEQ ID NO: 221520 - RNA, 38 nt, Homo sapiens
ccagggccgggagggcgccaggcggaggcaaggcaaac

SEQ ID NO: 221521 - RNA, 57 nt, Homo sapiens
ggcggggccgcagcccaaggaagggaagcagagccccgggccgggaaggggaaacgg

SEQ ID NO: 221522 - RNA, 41 nt, Homo sapiens
accagaagagaggagcagagagccaaggcagaggccccagg

SEQ ID NO: 221523 - RNA, 83 nt, Homo sapiens
aacggcggaaaagaaggacggggggaagagcaagagggcaggggacaacccacgccgccacggcaagccagccgaaggaccag

SEQ ID NO: 221524 - RNA, 45 nt, Homo sapiens
cgcggaccacaaaccgcgccagaaaaagacagggaagaacgaggc

SEQ ID NO: 221525 - RNA, 81 nt, Homo sapiens
gacccagcgacaggacccggcgccgggcacgagcaccgccaccaggggaagggggaaggcccgccgaaggagaagggcagg

SEQ ID NO: 221526 - RNA, 67 nt, Homo sapiens
aaggaccaagaaccaggcaccccgcgacgaaaggaaaccgacgaaaagaagaaaaggaacagcccca

SEQ ID NO: 221527 - RNA, 76 nt, Homo sapiens
ggccacgacgagaagggaccgaaacaaggcgcggggagccccacgacggacagggcagaccgccagcagcacagca

SEQ ID NO: 221528 - RNA, 85 nt, Homo sapiens
cgaacaaaggcgacccagacaacagaagaacccgaagaaccaaaggcaacaccagaagaacaaagcagaaaacgcggcaaagaaa

SEQ ID NO: 221529 - RNA, 81 nt, Homo sapiens
gcacgcccgacccccacaaccacacccagcgaccacgcaggcaccccggccccagcccgccaggccgcccacccgggaccc

SEQ ID NO: 221530 - RNA, 83 nt, Homo sapiens
ggccccggagcgcggcgcccgcggccgggcggcgcggccgcccgggccgggccccaccggacgcccaaggagaagacaccgga

SEQ ID NO: 221531 - RNA, 73 nt, Homo sapiens
cgccaggagggcgcgggcgaaaaacggagccaaaccccacccacagcggagacccagaaaacccagggaccag

SEQ ID NO: 221532 - RNA, 72 nt, Homo sapiens
gcaagaggcgagacaggcgacaacgaacagcccaccagaaaggaagagaggaagacgggacacagaagcacc

SEQ ID NO: 221533 - RNA, 77 nt, Homo sapiens
ggaaaggaaagcccgacagaagcaccgagacccaagaaagagcggagggaccagagaaagcgcagagaaccagaagg

SEQ ID NO: 221534 - RNA, 57 nt, Homo sapiens
cgcaccagcagccaccaggagcccgagagagaaggcggacggaggaggagcgcccgg

SEQ ID NO: 221535 - RNA, 84 nt, Homo sapiens
ggaagcaagaggcaccgcgcgcacagagagcggaggacaccccggagaggacgggaggacggcagcacagggaaccacagaaca

SEQ ID NO: 221536 - RNA, 64 nt, Homo sapiens
cccacgccaacagacaggcagagcaaagaaggcccgaagaacaccgaagcagcacacagaccga

SEQ ID NO: 221537 - RNA, 87 nt, Homo sapiens
agccaggcccagccccgaagggcacaccggagagaggagccacacaggccggaagccacccagggccaggagaaacgagaagaagga

SEQ ID NO: 221538 - RNA, 82 nt, Homo sapiens
accaggcgacaccgcgacaccccaacaaacaccagcgcgggggcaaagaaaaaggagagaaaaagaggcaaaacaacaagaa

SEQ ID NO: 221539 - RNA, 80 nt, Homo sapiens
cgccgagcccccgaccccgaccgcggggccggacaagaaccgaccgagagggaggacagcggagacagccggaagaaacg

SEQ ID NO: 221540 - RNA, 60 nt, Homo sapiens
ggccaaacccggacagacaccagggccgcggagggcgcacgggcccagagacgacgcagg

SEQ ID NO: 221541 - RNA, 65 nt, Homo sapiens
gacacgggaaaagaggaaacagggacgcgcacaaaggcggcagaccgaagcaggcgccaaagcag

SEQ ID NO: 221542 - RNA, 78 nt, Homo sapiens
caggacccaggccacccacaggggcgcgcggccggcgcccccaccccgccaagcccccacgcacacaacccaacagag

SEQ ID NO: 221543 - RNA, 54 nt, Homo sapiens
caggcgccaccagcccggagaaaacaaagccacggaaaaacgcccggggaaaag

SEQ ID NO: 221544 - RNA, 83 nt, Homo sapiens
cggaggagcagacagacgccgagaagcagaggccccgaggcaaaagcagaccggaaaacccaccggcaagaccacacccgagg

SEQ ID NO: 221545 - RNA, 55 nt, Homo sapiens
aggaagccgggcggcgggagacggcgcccagcgagaaagcagaccgcaggcccca

SEQ ID NO: 221546 - RNA, 91 nt, Homo sapiens
cagaacagagagacagccagcccagaccaaggaacaagaggcgagaggcgcaggcagccacaaaaaagcaagagccagaacagaagaggag

SEQ ID NO: 221547 - RNA, 51 nt, Homo sapiens
gcaaaccaacacaacaccccacgagggaagagccgcaggaggagaaccaaa

SEQ ID NO: 221548 - RNA, 78 nt, Homo sapiens
cccccgcacccacgcggcccgcgaaagggcgcaaaggaccgacggacgaggcggcaccgcagaggaagagcaaagcaa

SEQ ID NO: 221549 - RNA, 69 nt, Homo sapiens
gcaaacggagcagagaaggagcccaaaaggcagagcgaggagagaagaaggagggaaagccaaacaacg

SEQ ID NO: 221550 - RNA, 78 nt, Homo sapiens
aggccacaaaccagggaaggccaaggacaaaggcagcccaagagaacgaaagcaaaaagcgccgaccagccgcaaaaa

SEQ ID NO: 221551 - RNA, 76 nt, Homo sapiens
gaaccgcccgggcacgcccccacacgggcccgagacgggagaaaggagaaagaaacgccgaagcgcgaccaggccc

SEQ ID NO: 221552 - RNA, 59 nt, Homo sapiens
caggcccacgcggcgcccggcgaccgggggggcgcgagcggcgaaaagggacgcccccg

SEQ ID NO: 221553 - RNA, 95 nt, Homo sapiens
gcgcaggagaccaaaaaccccacacccaccagcggcaagcaagagcaagagaccagaacggaacagaagacccaacaagagacaggagaccaaca

SEQ ID NO: 221554 - RNA, 84 nt, Homo sapiens
cccaagcaacgagagacagcacgaaaaggagacgaacaggaggcagaaccaacagaacgacggggcccccagagaaccgacgca

SEQ ID NO: 221555 - RNA, 71 nt, Homo sapiens
ccagagaccacagaaggacgggagaacaccccacagggaagagggcccaaaggacgaaaacaagaaaggag

SEQ ID NO: 221556 - RNA, 73 nt, Homo sapiens
gaacagaaaacgcaaggagaaacccaagagcagcggcagagcagaagacaacaggcagagcacgaagaaagaa

SEQ ID NO: 221557 - RNA, 87 nt, Homo sapiens
ccccgccaccccgagccgcccggcgggaagggcccgccgcacccgagcaggccagaagcggacccagaagaggggagcagcaaggag

SEQ ID NO: 221558 - RNA, 75 nt, Homo sapiens
cccagccccgaaagcgggaacaggccacgagaagcaaaggaggaaggaggcgaacggggcgcggagcacgaagac

SEQ ID NO: 221559 - RNA, 117 nt, Homo sapiens
caaggaggggcccaccagcagggcacacaggaaggaacaggaggaaaccacagagaagcaaaacggaccaaggggccaggcgaagagaaccgcacgcaccaaccccgcaggaggaag

SEQ ID NO: 221560 - RNA, 93 nt, Homo sapiens
caaacgcggcaacgcccccgggacagcacgccccggaccccaacgggagagggaaagcggagaggggaagagcacacaccagagcggcgcggg

SEQ ID NO: 221561 - RNA, 70 nt, Homo sapiens
agacaccgacccacgccagaccaggagcccgaggcacggagggcgccaagagaacaaaagacggaagggc

SEQ ID NO: 221562 - RNA, 40 nt, Homo sapiens
cgcaacagccggcgagagagccgccgaggccgcgagcagg

SEQ ID NO: 221563 - RNA, 79 nt, Homo sapiens
gacggaccgcacacggagaaggaagcccggaggagccacggagcgggcaccggcacgccaaccacgcaggggcggggag

SEQ ID NO: 221564 - RNA, 68 nt, Homo sapiens
gagcgcgcccgaacgccaccagccagaacagagccgggcgcaagcagcagccaaaggagcaccgcacc

SEQ ID NO: 221565 - RNA, 64 nt, Homo sapiens
cagcagcccggcggagaagaggagcacgcccagaggcgcggccagcgaagaagacgcagccaga

SEQ ID NO: 221566 - RNA, 77 nt, Homo sapiens
cgcagcggggacgcggacgcacgaagcccaccagaggcgaggggaggaggaagcgagcgaaaagaggcgggaaacag

SEQ ID NO: 221567 - RNA, 63 nt, Homo sapiens
gcaaggaaggacaacaacaaggcccaacgaaccccgagagcccagaagaagcaacaaaaagcc

SEQ ID NO: 221568 - RNA, 59 nt, Homo sapiens
caccacagacccagccagccaccagccggagcaaggaaagaccacagcaagaccacgcc

SEQ ID NO: 221569 - RNA, 78 nt, Homo sapiens
gaacacagggagaaaacggcagcgagacggccggccggagcacccacgggagaccggggggcaagaaaaggaagaaga

SEQ ID NO: 221570 - RNA, 81 nt, Homo sapiens
acagcaagacgccaggacccacggaagccagaaagggaggaaagagaaaggacgagccacccacgccagacaaaacccgaa

SEQ ID NO: 221571 - RNA, 70 nt, Homo sapiens
gcaccaggcgccagacccacagcgggggcgcaggggcccggcagcggcccgaccccgggaacgagcagga

SEQ ID NO: 221572 - RNA, 80 nt, Homo sapiens
ccgagcggagcggggcgcaggcgccgccgccggacgcggcaacggagaagcagacgccagagcggccccccgcgaaacag

SEQ ID NO: 221573 - RNA, 74 nt, Homo sapiens
gggggaccagccagccccccaggaccacagccccgaccgagagaaccagcgccaggacggacccgacggggccg

SEQ ID NO: 221574 - RNA, 81 nt, Homo sapiens
aagcagcacaaggcgagccagcgcccccacaggccccgcccgcagggcgaaaaccagaggaggcagcgaggagaggaagag

SEQ ID NO: 221575 - RNA, 56 nt, Homo sapiens
ggggccggggggaaaggggcagcagaggcgagaggggggggcagggcccaggggac

SEQ ID NO: 221576 - RNA, 76 nt, Homo sapiens
ccgaccaaacggggacgagacgggccgggcgcaaccacacggagcgggaccgcaaaccgcccgcagaccagcacgc

SEQ ID NO: 221577 - RNA, 84 nt, Homo sapiens
cggacacggaaaaaaccaggagacagaagaggagcacggcggcggaggaagaaagaccgacacagagaacaggaggaacgaggc

SEQ ID NO: 221578 - RNA, 71 nt, Homo sapiens
acacgccgagagagaagccagggggcgggccccagacggacccaggcaggaagagacgggaaagcggaaga

SEQ ID NO: 221579 - RNA, 85 nt, Homo sapiens
gacagggacggaaaaacagacagacaggacccagaccagccaaagagaagaagaaaggaagcaaaacaaagaaaaaaaaaaaccc

SEQ ID NO: 221580 - RNA, 64 nt, Homo sapiens
aacagccaggggaaaggccacagaagaggagggaaaagagacacccccggaggagccccccagg

SEQ ID NO: 221581 - RNA, 79 nt, Homo sapiens
cgaaagagaacaccagggccgaaaaagcaacgaagcaaaccagacaggaccgacccaaccgaagaaagccaaaagaaaa

SEQ ID NO: 221582 - RNA, 77 nt, Homo sapiens
ggcagaacaccgggaaccgacagaagcaaagagcaccgaccgcggccaggaccgacccccggggaaccacggcccaa

SEQ ID NO: 221583 - RNA, 65 nt, Homo sapiens
agggcaaaccggcaggcgcccggacacagaagaggacaggaaggggaaagcagcagacaaaggag

SEQ ID NO: 221584 - RNA, 74 nt, Homo sapiens
aggcgaccacaccaagcgaacaccagcaggaaaaaagagcggcagaaggccaaacggccgagcaggcgagcgaa

SEQ ID NO: 221585 - RNA, 38 nt, Homo sapiens
cgcccaggccgggagcgcacaagagcaccggggcaagc

SEQ ID NO: 221586 - RNA, 77 nt, Homo sapiens
acacaccgcacgcaacagaagaagacgccagggaagcgagaggagagaggggcagcaggaggaggccgggcacacac

SEQ ID NO: 221587 - RNA, 49 nt, Homo sapiens
gccggagacaccagcaggacacagagagcaaagaaagaacacagggagg

SEQ ID NO: 221588 - RNA, 80 nt, Homo sapiens
gagaccgagaaccggcccaggcgccccaaaaaccgaccccgggaacggggcgaccgccaggaggaagggggccagccacc

SEQ ID NO: 221589 - RNA, 92 nt, Homo sapiens
cgcgccgccacccggcgcgaccgcccggcaccgggagaaccaccgccaccgccaccaggaaggaagacccacaagagaccacgcagagacag

SEQ ID NO: 221590 - RNA, 67 nt, Homo sapiens
agacacaagacgagacgcacagagcgaagaaacaagccacacacagacacgagagagaaggagcgcg

SEQ ID NO: 221591 - RNA, 72 nt, Homo sapiens
ggcggacgcgcgggagggccgccgcaacccagcagagagcaggagaccagaaagcgggcaacaccaaccgag

SEQ ID NO: 221592 - RNA, 82 nt, Homo sapiens
gagggggggccgcagacgcgcccggaacagccaccagggccaagagcgccacagcagccaaacggggacgcccagagagccg

SEQ ID NO: 221593 - RNA, 86 nt, Homo sapiens
cagcgcccacgcaccgagccccgaggagaaggcgcgaggagccgaccacgacccgcgggagaacaacgaccgaacacccagccaca

SEQ ID NO: 221594 - RNA, 72 nt, Homo sapiens
gcggaaaaaagacaccagcgacaaggacagggggaaagcccaccgacacccagaacgggaagcggaaggcaa

SEQ ID NO: 221595 - RNA, 67 nt, Homo sapiens
aaggaaaacgcggaaaaccgacacaacagacaaaccgggacacagcagcggacaggagcaaagggac

SEQ ID NO: 221596 - RNA, 74 nt, Homo sapiens
agaacaaaccggcgcgagcaggaaagaggaaaggaagccagaaccgaaaacccaccgacaccagccacgccacc

SEQ ID NO: 221597 - RNA, 99 nt, Homo sapiens
aacggaagccgacgggacggagagagaaagggggacgaaggaaaacaaggcaggggccggggcagccgggggcccggagggccaaccaagaagaaaacg

SEQ ID NO: 221598 - RNA, 65 nt, Homo sapiens
aggagagagcgaaaaaaggacaaacgcgaccaaagaggaaaaagaaagagcggcgagggagaccg

SEQ ID NO: 221599 - RNA, 65 nt, Homo sapiens
ccaaaaggccccccgcgcaggcacacagcaaagggagcagcaaggcgaaccggcgcggagcggcc

SEQ ID NO: 221600 - RNA, 74 nt, Homo sapiens
gacaacccggacggccggccaaagcggaaggcggagagcagagggacaggccacgcaaccggaacccgggccaa

SEQ ID NO: 221601 - RNA, 43 nt, Homo sapiens
aagacagccagaacacaaccagagagcgacagaccagaagggc

SEQ ID NO: 221602 - RNA, 61 nt, Homo sapiens
cgaagccgggccacacggcagcgccagcccggccaaaaagcaaaggaccaccgacaaaccg

SEQ ID NO: 221603 - RNA, 72 nt, Homo sapiens
gaggacgcccaagaaaaggcagggcacggagcaccagaccggaggagagcgacacagacaaggggcgcagag

SEQ ID NO: 221604 - RNA, 83 nt, Homo sapiens
agcaaaccgcacaagaggcggcggagcggcagggcggcgcgaggaggcggagcaggaccagccgcggccggacgggcgggagg

SEQ ID NO: 221605 - RNA, 67 nt, Homo sapiens
ggaacaggcagcaggaagcacggcgggcgaaacaggccaaagagcacagggacagaaaaacagcgca

SEQ ID NO: 221606 - RNA, 78 nt, Homo sapiens
ggaaaaaagcgagcacccgcaagaagagaacccagggaagccgaagagccaggccggggaacaagaccaggaggaaag

SEQ ID NO: 221607 - RNA, 72 nt, Homo sapiens
ggaaaaggcaacaaagaagcagaagaagcgaaagaaagggaccaaaccaaggcgcgcgggccccgacagccg

SEQ ID NO: 221608 - RNA, 53 nt, Homo sapiens
gccacccaggcccaggcaaccaaaagcgcggagacccggacagacaccaggga

SEQ ID NO: 221609 - RNA, 72 nt, Homo sapiens
cccacgacaggacacggaccccgaggaagcccgcaccagccggaaacgaaacagcgcagccaggaacaggac

SEQ ID NO: 221610 - RNA, 74 nt, Homo sapiens
agaaacggaagcacaagaccgcccggggaacagggcagcaagcgacagccagcagggagaagcgcggaagccac

SEQ ID NO: 221611 - RNA, 82 nt, Homo sapiens
ccccggcagcagacacagccacgcacgaccgggcgacagcgggggagaaggaggagccggcaccagcaacgacggcccgcac

SEQ ID NO: 221612 - RNA, 121 nt, Homo sapiens
cccggccccagccgccgcgcggagcccgccgggaccccccggagcgcggccacggcgcagggacgaacagcggggacgccccagcagaccgcccaggagaggaaagcaggaggaaagacca

SEQ ID NO: 221613 - RNA, 79 nt, Homo sapiens
aagagacgacgaggacgccagacccacggaaagcagccagcagcacccaggacacgggggggaaacaagcacgggcgag

SEQ ID NO: 221614 - RNA, 90 nt, Homo sapiens
gacaacccggcagcacgggaaggcccaggcccaggcccaaggccaaggagagagcccaggccacaggacagcgccacgccaagagaggcc

SEQ ID NO: 221615 - RNA, 73 nt, Homo sapiens
aagagaagaagacccaaaaaaaagaggagcagcaggcacagcacgggcagagccagaggagagaaggcgagga

SEQ ID NO: 221616 - RNA, 63 nt, Homo sapiens
ccggcagcgcccgcggagacggaagagaggaccacccgcacccaggggacgcacggcccaacc

SEQ ID NO: 221617 - RNA, 82 nt, Homo sapiens
ggagcggcccgcaggagagcaggcgggagcgaggccagcggaagagcgagaaggcgaaggggcgcgggcaggacaccgccgc

SEQ ID NO: 221618 - RNA, 44 nt, Homo sapiens
aaaagaaacaggacacacaagcggagaagcggaggagaccaagg

SEQ ID NO: 221619 - RNA, 53 nt, Homo sapiens
aaaggcaccaggacaagcaaaggacggaggccacaggacaagagggaccggaa

SEQ ID NO: 221620 - RNA, 77 nt, Homo sapiens
ccaaaggacagcccaggccgcacgcccaaagcggaaacgcggaagagaccgggagccagcacgaggccacacaccag

SEQ ID NO: 221621 - RNA, 72 nt, Homo sapiens
gcggagcaggcacaggcgggacgcaagagaggagcagaaaaggcgccacaacacagcagcccccaggagagc

SEQ ID NO: 221622 - RNA, 56 nt, Homo sapiens
gcaaggcaaggaaaggaccccaaagccagaccaggcccaccgcaccggacgacggg

SEQ ID NO: 221623 - RNA, 76 nt, Homo sapiens
cggcgaccgcaccacaagggacgagaccaaacggaagaggccaccccagagaagaggacgagagacaagacaacca

SEQ ID NO: 221624 - RNA, 84 nt, Homo sapiens
ccgcggcgacccacccaccggcgggcgggggcgcacgaagagccggaacagcacaaaccaacaaggaccaggggaggagcggac

SEQ ID NO: 221625 - RNA, 65 nt, Homo sapiens
caggagcaccggagaaggagcgcagaagcgccggaggggcggaccccccagcgacaccaggccag

SEQ ID NO: 221626 - RNA, 44 nt, Homo sapiens
ccaaacaggggaaacccgcaagaccgaagccaggacagcacagc

SEQ ID NO: 221627 - RNA, 83 nt, Homo sapiens
ggcgaaaaaaagcggcggaagaagggcaagcgacggaagaaggggagcccgcagcgcaaccaaaaggagaccaagaacgagac

SEQ ID NO: 221628 - RNA, 58 nt, Homo sapiens
ccaaaagccgacaaccccagaaacagaggcgacacgggaaacgcacccgcacagagcg

SEQ ID NO: 221629 - RNA, 60 nt, Homo sapiens
gacgccagcggagaacgcggcaaagcgaggaccgccagcagcagccgaaaacgcacaaga

SEQ ID NO: 221630 - RNA, 45 nt, Homo sapiens
ggaccgggcggagccccgcccgccgagagcggcccaggaggaaca

SEQ ID NO: 221631 - RNA, 81 nt, Homo sapiens
gaggagcaggcggagcacccaccacggagggaaagaccaggcagcacgcagagacaacacaaagaacaagacacagcaaaa

SEQ ID NO: 221632 - RNA, 81 nt, Homo sapiens
gcaaaaagaggcgaaaggaagcaagcagcagaagagccaaggaaaaacagcaagaacccaaaaggaacaacaagaaggaga

SEQ ID NO: 221633 - RNA, 65 nt, Homo sapiens
ggaagaccgcgcccgcggagagcccaaacaccaccaccaagagccggacgagcgggagaggacac

SEQ ID NO: 221634 - RNA, 80 nt, Homo sapiens
ggcccggcacgagcggccgcggccaggcgacgccacccaagacacaaacggcgacacagcagacgacccagacaccaagg

SEQ ID NO: 221635 - RNA, 72 nt, Homo sapiens
accgaagagaaaggccaacgagaacaagcacagcaagggaacaggccaggggccgcacagacacagccgcca

SEQ ID NO: 221636 - RNA, 53 nt, Homo sapiens
gcacgccgcacaggccgcgaacggggcaaaggccccccaggccagaagcacaa

SEQ ID NO: 221637 - RNA, 74 nt, Homo sapiens
ccgggccagccccgcgacggcccacgagccaagcccagcaagcccggagaaaacaggacccggaaggaaacggc

SEQ ID NO: 221638 - RNA, 81 nt, Homo sapiens
cggaagggcagccccgcaacgaagcggccccagcccgaaagcaaccgggcgcaggccacagggccgcggcccaccaggacc

SEQ ID NO: 221639 - RNA, 55 nt, Homo sapiens
cagaggcgggggaccgggaaagcagacaaagggaagaagcgccgaaagcaagcaa

SEQ ID NO: 221640 - RNA, 70 nt, Homo sapiens
acccgaaaccaacacggagcaaccgaaaagaaaggggacacgaaagccaggcagaaagcaaaaggaacag

SEQ ID NO: 221641 - RNA, 85 nt, Homo sapiens
ccccaggggccccagagcccgcgccaccccaccccacggaggagagaagaggcagacgcagcccagaccaacccacccccgcaag

SEQ ID NO: 221642 - RNA, 76 nt, Homo sapiens
gaggaggggaggggccgcaagcgcgaccggcggggaacacgggggcagacacgaggccagcagcacacccccgcga

SEQ ID NO: 221643 - RNA, 94 nt, Homo sapiens
caccaggaaaaggagaagggaaagaaagaaagagacaacgacagccaacagccagggggacccccggacacgggagaaaaccaaaaagccccag

SEQ ID NO: 221644 - RNA, 64 nt, Homo sapiens
agcggccaacggcgagggaaccacgcaagccacggcgcaaggacacaccaacccaccggcacca

SEQ ID NO: 221645 - RNA, 82 nt, Homo sapiens
aggcacaggcgaccaccccaaaagcaccggccccgcacagcaaaccaggcgcgggggaaaggaccaagaagaagaaaagaca

SEQ ID NO: 221646 - RNA, 52 nt, Homo sapiens
gcccacacacgcccaccgggcaggaagcccgggggaagacacagaaccgacc

SEQ ID NO: 221647 - RNA, 90 nt, Homo sapiens
acggggacagcgacgacgcggaggcagagaagggaacgcccggcccagccccggagagagaaggcccaaaagccaggggccgacggacaa

SEQ ID NO: 221648 - RNA, 77 nt, Homo sapiens
gccaccccgcggccgcacccccgccccagccagcagccagccggggagccaccaccaacacaggcagcacacgccac

SEQ ID NO: 221649 - RNA, 58 nt, Homo sapiens
caaagcaagagcaggcgacacgcaggaggagaagagaaaagggaaggcacggaggaag

SEQ ID NO: 221650 - RNA, 70 nt, Homo sapiens
agaagcagcagacggcacacgcagcagaagcccggagccccccaggccacccaggaccagcggcacaccc

SEQ ID NO: 221651 - RNA, 76 nt, Homo sapiens
gcagaggaggggacagaagaccccggccgagcccgcagggggaaagaccaccgcaccagaaagcaaacagaagaaa

SEQ ID NO: 221652 - RNA, 59 nt, Homo sapiens
cacaagcaagagaagcgaggcgaccggccgccgcccagacccacgaagagaagggaagg

SEQ ID NO: 221653 - RNA, 75 nt, Homo sapiens
caaaaacgggaaagccggcaagagggagaaggacaccaggcagaggcaagcgaccacaaaccccccacccagccg

SEQ ID NO: 221654 - RNA, 78 nt, Homo sapiens
gggaaacggggccaagcgcaagccacgaaagggccagaagaagacacaaggagcgaagagacaacagccacaagggac

SEQ ID NO: 221655 - RNA, 114 nt, Homo sapiens
cagcagcagagggaggagagggcagccccaccggggagccacgcggagaagagccaagggaaacaccacaaagcgagcaaacccaccaaagagggccggaacagcccaaaccgg

SEQ ID NO: 221656 - RNA, 46 nt, Homo sapiens
ggagacggggagagggagaagggaaagggaaggacccgaggggccg

SEQ ID NO: 221657 - RNA, 67 nt, Homo sapiens
gcaagggacccggccagcgacgcaccgagaaaggaaggaaaaccgacgagacaacacacacaaagag

SEQ ID NO: 221658 - RNA, 72 nt, Homo sapiens
agaggaggaagcacccggggcacgaccaacccgcgagaagacaaggcaccaggagaaagagcgcccccccag

SEQ ID NO: 221659 - RNA, 66 nt, Homo sapiens
acagaaaccccccacaggaaaggagggaagccagaggccaaaggcaggaggccgggcagagcgaaa

SEQ ID NO: 221660 - RNA, 86 nt, Homo sapiens
aacaaacacccccaagaagaaggagagaaagcagcagagcaaaaacccaaaccccccaccagcgccaagaggagaagacagaggag

SEQ ID NO: 221661 - RNA, 79 nt, Homo sapiens
ggccccgggacggagaggagccgggcccccaagagagaagaagaagggagggaaccgagaaaggagaggagaagaagaa

SEQ ID NO: 221662 - RNA, 57 nt, Homo sapiens
ggcgggcacaacgggcggcggccaggaggcaggccgcgccagaagggaagaaaggcg

SEQ ID NO: 221663 - RNA, 74 nt, Homo sapiens
gaagagacaaggaccacagccgagcgagagcaggaagacggaggaaagcgaacgcgaaaagaaaagccgagagc

SEQ ID NO: 221664 - RNA, 67 nt, Homo sapiens
cacgggaaacccggggacgcccggaggggccccggaaacagcaacggagcgcgccagcgccgcagcg

SEQ ID NO: 221665 - RNA, 86 nt, Homo sapiens
gggagccacgcagaggacgccggaacacccggaagccgagaaagcaaggcgccaccggaagaaacgggaggggaggagccgggaaa

SEQ ID NO: 221666 - RNA, 80 nt, Homo sapiens
cacaagaaacgacggcccggcaagagagaagaagacaacgcagggaaaacgaggcggcccagaagcccaggaggaagggg

SEQ ID NO: 221667 - RNA, 62 nt, Homo sapiens
ggaccggacccgcgggcccggcggcgaagcccgggcccagagcccggccagcaggagcaggg

SEQ ID NO: 221668 - RNA, 73 nt, Homo sapiens
gggacggggccaggaccccaggaaggacaggagccccacaccagacaccaacaacagacaggacccgggagca

SEQ ID NO: 221669 - RNA, 77 nt, Homo sapiens
cccaaggggggacccagccaggcgggaccaacgagcgggacaagcaaggaagggaagaagagcgcaacaggaggaaa

SEQ ID NO: 221670 - RNA, 80 nt, Homo sapiens
gaaacaccgcaccaagggccgggacccgagggagcccaagagagagccccgcgcgaaggggaggggaccaggagagaaga

SEQ ID NO: 221671 - RNA, 71 nt, Homo sapiens
ggagcaaaaagcgcacgcaaggaaaccgaccgaaacaaggaccccccgggagaagaaaagcgggacgagga

SEQ ID NO: 221672 - RNA, 72 nt, Homo sapiens
acagaaaacaagagaccacagaagggcccagagagcaaagcccgaggacggacccggccaccagacagaacc

SEQ ID NO: 221673 - RNA, 58 nt, Homo sapiens
caaaggccgagacccgccggaagggacaaaacaacgaagagaggaaagaagcggaaag

SEQ ID NO: 221674 - RNA, 73 nt, Homo sapiens
aaaacgaagggcagaacaaggagaagcggcagcggccaggcaaccaacgacaaaccagcagcagagacaggcc

SEQ ID NO: 221675 - RNA, 67 nt, Homo sapiens
agaaaccacaagcggcacgggcaaaagacagaccagaagaagaagaccaggggagcagaaaagaccc

SEQ ID NO: 221676 - RNA, 75 nt, Homo sapiens
ggagaaaagaacccagaagaaagcagcagacgaccagggaaaacaagggcgacaggacaacggacagcaaaaaag

SEQ ID NO: 221677 - RNA, 73 nt, Homo sapiens
gggcccggcggcgcgagcaggaagaagggccagagaggggaagaggaaaccggaacccaaagagaagaaacgc

SEQ ID NO: 221678 - RNA, 66 nt, Homo sapiens
gcacacggaccagcagaacagaaacaaggcggcaccaggacgccgaaaagcgaccggacgcaggca

SEQ ID NO: 221679 - RNA, 54 nt, Homo sapiens
ggggccggagggcagggggcagggcggcagagagcccaaacgagaaggaagccg

SEQ ID NO: 221680 - RNA, 82 nt, Homo sapiens
cgaggaggacgaggagaggaggaggaagggaagaggaggacggagggagaggaggagacagcaaagacccgagaccaggcgc

SEQ ID NO: 221681 - RNA, 80 nt, Homo sapiens
ggacgggggagggggcggccgggcggagagaaccagcgaggacgagagccgcagggcacccaaccaccagcaaggccaaa

SEQ ID NO: 221682 - RNA, 69 nt, Homo sapiens
gagagacagcacccaaccacccaacacagaagaaggaagcgaggaaaaaaaaaaaccggcagagaagaa

SEQ ID NO: 221683 - RNA, 72 nt, Homo sapiens
gccgccgccgccaccacccacccggacacaggacccacccaggaggcagaaacacgccgcgcgccacaccag

SEQ ID NO: 221684 - RNA, 73 nt, Homo sapiens
aaagcagagaaaccacaagcggcacgggcaaaagacagaccagaagaaggagcgccccacaaaaccaagcgag

SEQ ID NO: 221685 - RNA, 70 nt, Homo sapiens
gacgagacccaagcagggaccaacgacaccaacggaagagcggcagaaaagagaccacggcacgggagga

SEQ ID NO: 221686 - RNA, 72 nt, Homo sapiens
agcagcgccccagaaaggccgcccagaagccggacacacaacgcaccaaggagacgggggaggagaaagaag

SEQ ID NO: 221687 - RNA, 86 nt, Homo sapiens
cggcgcagcggcggacccgggcagaagaggcgggagagcccgccgacagcgcgaggagcagccacagggcggacagccggaagaga

SEQ ID NO: 221688 - RNA, 78 nt, Homo sapiens
gaaccgcacgcggcgggggaagaccagcggccagcaagcacaaagagagagagaacggggggaccgcggggccaaaaa

SEQ ID NO: 221689 - RNA, 78 nt, Homo sapiens
cacgaaagccggccacgccgggccggagccgggagagggcacagcgaaggacccccagccgcccagaaaggaggacca

SEQ ID NO: 221690 - RNA, 34 nt, Homo sapiens
gaggcaccgcagcaccaggcaagaaggaaggacc

SEQ ID NO: 221691 - RNA, 76 nt, Homo sapiens
gaccccgcccggcagccgcagcggcaagagcgggcaggcgggaaagagccgaaacagaaggaaacaacagagaggc

SEQ ID NO: 221692 - RNA, 80 nt, Homo sapiens
gggccccgcgggaccgcggccacggacggaacccggagggcggaccacaagaaagaacgggagagaggccaacggccagc

SEQ ID NO: 221693 - RNA, 75 nt, Homo sapiens
agaacgcagaggcccacagcaagccggaaacgaaacagcgcagccaggaacaggacgaagaccagcgccagggaa

SEQ ID NO: 221694 - RNA, 82 nt, Homo sapiens
gaccaggcgacaccgcgacaccccaacaaacaccagcgcggcccaccgggggacggcacggcaggcggacgcccggggcccc

SEQ ID NO: 221695 - RNA, 84 nt, Homo sapiens
cgccgcccccggagggcccacgcagcgccggacaaagccggcagcgcccgagggagcaaggagaagagcggaacccagaccgcg

SEQ ID NO: 221696 - RNA, 74 nt, Homo sapiens
gcgacaggagaaccaagcccaaaacgagggaacagcgcgagccacaaggcaaggaagcaggcggcaccacccaa

SEQ ID NO: 221697 - RNA, 75 nt, Homo sapiens
ggggcccggcagccccgaggcccccacaacccgaccggagcgggaagcaacagccacggggccaagcgggagcag

SEQ ID NO: 221698 - RNA, 77 nt, Homo sapiens
aggaacgagacaagcaacaaccaaccccccaccccgaaaccaaccaaagaagcccccaaaccaaaaggagaaaacca

SEQ ID NO: 221699 - RNA, 30 nt, Homo sapiens
gcggcgacacacgacggacagaggcacaaa

SEQ ID NO: 221700 - RNA, 82 nt, Homo sapiens
gccgcaggagggagaccacagcaagacaccgggaccccggaagccaaaaaggcagagggccaggaccgccgccacggcggcc

SEQ ID NO: 221701 - RNA, 57 nt, Homo sapiens
gcaagccagaaagaaacagaaagaagggagaaggggcaagggccggaacagccacaa

SEQ ID NO: 221702 - RNA, 82 nt, Homo sapiens
cacacggccacgccggcccgcccaccagcaagcgcacccaggagacgacaccaagaggaaaaaccaggcaaggaagcacaag

SEQ ID NO: 221703 - RNA, 64 nt, Homo sapiens
ccgaccgacggagcagcacaggcgggcgcccaacgaaccagccgaccagaggcaagacacaaga

SEQ ID NO: 221704 - RNA, 79 nt, Homo sapiens
cccacggcccccggcgccccggcccccgccccagcccgccggcggcggcggggccggccaaagaacagaggaaccaagc

SEQ ID NO: 221705 - RNA, 77 nt, Homo sapiens
cggaccgcgagacagccagccgaccgaggcagaagcccccggggagagacagacagagggacacagagaggaagaaa

SEQ ID NO: 221706 - RNA, 77 nt, Homo sapiens
cggaagcgccgcgaagccgcaagcaggggccaccgggacgccagacaccaaccagaggagcgaaccgagccgacaga

SEQ ID NO: 221707 - RNA, 78 nt, Homo sapiens
cagaaggcgacaaggccaagaccgccagcaaaggaagacgaggaccgggggagcggccgaggacaagcacaagcagca

SEQ ID NO: 221708 - RNA, 72 nt, Homo sapiens
ccccaccgggcgccgcgagggacagcacagcccgccgcccccccccccgccggccgggacagcccccggacc

SEQ ID NO: 221709 - RNA, 78 nt, Homo sapiens
ggaacaagagcggaggcagccgcgcccaggaggcgccccccacccaagcggccaggaaccgggagggagcggcagccg

SEQ ID NO: 221710 - RNA, 79 nt, Homo sapiens
gccccccaggaacacaacagcacaggaccacagggacgcagaggagaggaaccaagcaacgaccaaagcagcaggaggc

SEQ ID NO: 221711 - RNA, 83 nt, Homo sapiens
aagggccgcgccacaacgaagggaacccgagaaacaccacaacacacaagcgcaccaggagacgcggccagacccccaagcag

SEQ ID NO: 221712 - RNA, 77 nt, Homo sapiens
agcagaaaaggacaaccagaaccacaaaacaaggccggcgaggaccacagacacagggcacccgaccgacccccagg

SEQ ID NO: 221713 - RNA, 77 nt, Homo sapiens
ccagagaaagagacggcagccgcggagaccgggcggccgcagagacgcgcaacccagcgagacgacgggaccgaagg

SEQ ID NO: 221714 - RNA, 71 nt, Homo sapiens
agcgacaaaaacgggacgcggaaacacacccgcagggccagagacaccagagcaccaggaagaagaacaca

SEQ ID NO: 221715 - RNA, 78 nt, Homo sapiens
ccccacgcggccagcgaaaacgcccagagaaccaggagcggcagaccgccgccaggaggaggcacgcagcccgagaag

SEQ ID NO: 221716 - RNA, 83 nt, Homo sapiens
gagggcccacggggaagcgagagaggagggcggagaagaagaaaccaaaaaacaggagggcaggaacacaggaggaacagagg

SEQ ID NO: 221717 - RNA, 83 nt, Homo sapiens
cccccccagcccagcccgcagcccgccgcggacggccccgccccgaccaacaaacaggacgaaccagccgacaccaggaaaga

SEQ ID NO: 221718 - RNA, 76 nt, Homo sapiens
cgcgcgccaaagggcgacggcacacagagagaccgacgacggaaaaccggcagcaggagaggccacgccagggaag

SEQ ID NO: 221719 - RNA, 96 nt, Homo sapiens
cgagaaccgcccagcaagcgaccgagaaacaaaggaaccggaaaagcaaaacagggcggcagcggaaaggcagccacagcagaggaaagagggaaa

SEQ ID NO: 221720 - RNA, 71 nt, Homo sapiens
gaccggccagcgcgcggcgggcgaggaacaacgccacaaccccgaacgacacaaaggccgcgcccaggaag

SEQ ID NO: 221721 - RNA, 79 nt, Homo sapiens
accaacaagcagagaaggggacccaaacacaagagaggcgccacaaccaggcaaggagcaagagaggacaaaggacaca

SEQ ID NO: 221722 - RNA, 59 nt, Homo sapiens
gggagagaacccaaccagggggaaacacagaacgcaggccagagcccagacgaccgcac

SEQ ID NO: 221723 - RNA, 79 nt, Homo sapiens
aaacgagggagaacacaccgagccagcagcagaaacagaagaaggaaccaaggcagccccaaccagacggaacaaacca

SEQ ID NO: 221724 - RNA, 69 nt, Homo sapiens
gaaaacccccgggaccaggcgggaaaacggcacaaggcgacgagggagggcagaccgccaggccagcac

SEQ ID NO: 221725 - RNA, 77 nt, Homo sapiens
agcgcagcaaaccggagcaacagaagagcagagggaccaccccagaacccgaagccaccaccggacgccagcagcca

SEQ ID NO: 221726 - RNA, 82 nt, Homo sapiens
cagaaggacgcccacgagcaaccaagacggcggagaaaccaccacaaacacgaggccagcaacgaccaacaagacagacccg

SEQ ID NO: 221727 - RNA, 73 nt, Homo sapiens
ccgccccccaccgcccgggcccgaggaggcagccaagccgagccgccacccggcacggcaccaacgacccagc

SEQ ID NO: 221728 - RNA, 79 nt, Homo sapiens
acaacaggcaggagaaagggagcgcaccccagggcacccacaccaaggaggagcaccccgggcaaggcacggggccgaa

SEQ ID NO: 221729 - RNA, 59 nt, Homo sapiens
cgccgccacaggacaccagccgggcagccacaagcggccaggcgagcaggcgacccaaa

SEQ ID NO: 221730 - RNA, 86 nt, Homo sapiens
cgggggggagaagaaaggggccgggggacggaggagccccggcggagaccacgcaaggccacaggaggacccagacagcggccccc

SEQ ID NO: 221731 - RNA, 80 nt, Homo sapiens
cgcgcggcgcgggacgcgcgcgggcacccacggagccccggggcggcccgggcaggacggggcggggaccaggagaggcg

SEQ ID NO: 221732 - RNA, 69 nt, Homo sapiens
cggaacccacaaccagaccaggcaggaggaagagcgcaggcgccggaagaagagagcggcggcagcaag

SEQ ID NO: 221733 - RNA, 74 nt, Homo sapiens
agacaaccaaccggaagagggacagagaaccaaagagccaggagcaggggcgcggcagaggcgcggacgagcag

SEQ ID NO: 221734 - RNA, 82 nt, Homo sapiens
gaaccaggagacggaggaagaacccaagccagagcccagccgccagggagaaaagacgaggaagcccaaaaaccgcaagaaa

SEQ ID NO: 221735 - RNA, 65 nt, Homo sapiens
cccgaccacacgcccgcgcgaggcgcgaccgcccagggagacggaacccacacagaccaacgcag

SEQ ID NO: 221736 - RNA, 73 nt, Homo sapiens
ccggaccgggcgcgccgcgggagcgaggcccaaaaacacacagggaaaaaccagcacagacgccccagcaccc

SEQ ID NO: 221737 - RNA, 54 nt, Homo sapiens
ccggacggggacgagcggcagggcgggggcggagggcaagacgacgacaggaga

SEQ ID NO: 221738 - RNA, 54 nt, Homo sapiens
ggcgcccaggccgcccgacccaaagggaaaacagaaacagagagagggcaccag

SEQ ID NO: 221739 - RNA, 73 nt, Homo sapiens
ggaaaacagggagccaaggcagaaaagcccacccaaaacggagccagaaagcacgaggacgacagaaacacag

SEQ ID NO: 221740 - RNA, 72 nt, Homo sapiens
ccgggccagcggccgcgcacccccggccggaggcaccagcaacggccgagcgaccaggagaggagcccccgc

SEQ ID NO: 221741 - RNA, 74 nt, Homo sapiens
cgccccggcgcccccgaccccggcagccaaaagacccgcaaccgcgcccgggccgccggacaaaacacggggga

SEQ ID NO: 221742 - RNA, 94 nt, Homo sapiens
caggacacgggcacgaaagggaaaggagagaaaggcgaccaacaaaaccagaagagaggccaaccaacggcaacaaagagcgggaagggaaggg

SEQ ID NO: 221743 - RNA, 75 nt, Homo sapiens
caaccgccccggccaggaacacagacgggggcgagcggacccgcagccccaaaaaggaacccagccagccggcgg

SEQ ID NO: 221744 - RNA, 82 nt, Homo sapiens
gccagaagcgggcggcgcgggggagaggcgggaaaaccgccacaaagcccccaagccacaagcaacgcgcaggccggaagac

SEQ ID NO: 221745 - RNA, 75 nt, Homo sapiens
cggagacagacgccaacggagaacgcgggcagcgccgacaccccagccggcgacacagacgcaacgggaagggac

SEQ ID NO: 221746 - RNA, 56 nt, Homo sapiens
ggagacaccaggggggaccacgcacaggcaagaaggaacagacaaaaacggccgga

SEQ ID NO: 221747 - RNA, 57 nt, Homo sapiens
cgcgacgcaggcgcacggagacccgccggcaagaccacaccgcgccagaccccccag

SEQ ID NO: 221748 - RNA, 55 nt, Homo sapiens
ccggcgccaagcaccggcgccaccagcaaaaccagagaaacaggcagagaaagac

SEQ ID NO: 221749 - RNA, 53 nt, Homo sapiens
gggccacaggccggggcgaccagggcagaagggcaccagggaagccagggcaa

SEQ ID NO: 221750 - RNA, 81 nt, Homo sapiens
agaccacaaaaaagagacccacagccagcaacaccggcggcgacggcggcgcgaggaccgaccgggcccgcggacgaagaa

SEQ ID NO: 221751 - RNA, 65 nt, Homo sapiens
cgccaaaagacgaaagggggcgaccacagcgaccgagggagagaccaaggaggaccggcgaagga

SEQ ID NO: 221752 - RNA, 82 nt, Homo sapiens
gaccacgaaaggagcaagagcaagacaccggacaccgagggcccccaaaaggcaggaagagaacacagaagaagaggagagg

SEQ ID NO: 221753 - RNA, 77 nt, Homo sapiens
agagagaggggccagagaacagaaacggcaaagggccggggacaccaggaccacgcacgaagaagagccaggccaag

SEQ ID NO: 221754 - RNA, 69 nt, Homo sapiens
cccccccccccccccaagaaaagcaccgagcagaaggcccgaacaggcacgaaaaaacccagcgaagac

SEQ ID NO: 221755 - RNA, 53 nt, Homo sapiens
aaacaaggacccgaaagcgccgaccaggcccgacagggcaagaagaagagaga

SEQ ID NO: 221756 - RNA, 77 nt, Homo sapiens
cacagggggcccggcgcgacgggcccccaccccccacgcagaggcagcagggccaccgcaggggacccagaccaaac

SEQ ID NO: 221757 - RNA, 73 nt, Homo sapiens
caccaaaggacaccacagaacccgagaaaccaccgaccccccagaaaaggacagcaaagacccaagcaaacgc

SEQ ID NO: 221758 - RNA, 110 nt, Homo sapiens
agaaaaccaaaggcagcacccaacaacaggcaacaaaacacaaacggcaacaaaggaacccaaaacccgaaagaggaaggagagccacgccaagaaagagggccgaagga

SEQ ID NO: 221759 - RNA, 81 nt, Homo sapiens
caccgcgagggcgcaagagccaagcgaagcaccgccgcaacccagcacaccgccgggaaagcaggcaggagggagagcgcc

SEQ ID NO: 221760 - RNA, 73 nt, Homo sapiens
agcccgcacgcggcgggcagaagaagacaagagcagacgagggagaagcgggcaaaacagacaaaggaaacaa

SEQ ID NO: 221761 - RNA, 82 nt, Homo sapiens
gaggacagggagggcgaagaagcccgcccagcccagcccccagagagcagaccccagggcggccccgggggggcgagcccag

SEQ ID NO: 221762 - RNA, 85 nt, Homo sapiens
acccgggggagggaggcgggggccgacagcggcaccagcagcgcgccccgaagaaccgagcggccagcgcgacaggccccagaaa

SEQ ID NO: 221763 - RNA, 97 nt, Homo sapiens
gccagagcggcacgaccacaccgcgagaagacaaggaccacagggcgcaaggaacaaagggcagaagcagagaacagaggccgagcaggagaaagcg

SEQ ID NO: 221764 - RNA, 51 nt, Homo sapiens
cccggcgccccccccggcggagagaacagggggcgggagaggggagaagac

SEQ ID NO: 221765 - RNA, 77 nt, Homo sapiens
acgcaggcacccccagcgcgccggcaggcggggccggggagcccgggccagaccccccagacccagcccaccccgga

SEQ ID NO: 221766 - RNA, 79 nt, Homo sapiens
ccgcccgagcccgccggaccccccgacccagaggccgggaagaaggagggacacagcagcgcggagagcggcccgggac

SEQ ID NO: 221767 - RNA, 75 nt, Homo sapiens
caagcaccagcagggaaggagaagagagcaagggcacgagacaaggaaagcacaaagagccagaccgaaaaacac

SEQ ID NO: 221768 - RNA, 51 nt, Homo sapiens
gaaagccacacacccgacacaaaggaagacccgcggaaggcacacaagaca

SEQ ID NO: 221769 - RNA, 84 nt, Homo sapiens
ccccaacccagaccacacccgagccgagcccgacaaccgaggaccaacggaggccgcagaagaagcggaggagcagagcgagag

SEQ ID NO: 221770 - RNA, 70 nt, Homo sapiens
gcccccgggcacaggaaagggagccgccaccggacaccaaccagaagagaagaccgcagccacgagaaag

SEQ ID NO: 221771 - RNA, 66 nt, Homo sapiens
cgagaacgcgccaagcagccagggagagaagaccggcaggagaaccagggaaagaacggagaagcg

SEQ ID NO: 221772 - RNA, 53 nt, Homo sapiens
agcgggaccccagacaggcaggaggaacagcgacacacgacgggagcccggag

SEQ ID NO: 221773 - RNA, 71 nt, Homo sapiens
agcaccccgcaccaacgagaagaggcaccgcagacacccggcgggcgagcgaggcgcggagacccccccag

SEQ ID NO: 221774 - RNA, 60 nt, Homo sapiens
cgcgaccgcgcaaaacggagccccccaacagagcgagagaggcacggagcgcagcaggac

SEQ ID NO: 221775 - RNA, 76 nt, Homo sapiens
aggggggacaggccggaggggcccccgcgcagacacggacggaccgggccaaccggggccgcaacagcccaggacc

SEQ ID NO: 221776 - RNA, 86 nt, Homo sapiens
gcagcacagcaggcagcccccaggggcagggcagcaggcccaaacccccacaggccggaaaaagggaaagaacaaaacacacagcg

SEQ ID NO: 221777 - RNA, 73 nt, Homo sapiens
accgcggcgcaggaggaggaggagggagacccgaccaccggaagccacggcccggacccccgccacgcaagac

SEQ ID NO: 221778 - RNA, 68 nt, Homo sapiens
ccccagccaggccccggggcagaccccggaggagggcaaacgcagaccaagcgacgcgaccagaagaa

SEQ ID NO: 221779 - RNA, 60 nt, Homo sapiens
gcaccaccggccccggaagagcagaaacgaggcccagcagagagagaacagcgaggcacc

SEQ ID NO: 221780 - RNA, 71 nt, Homo sapiens
agcgcagcccccggcggagagccaggagagcagcaagccggccaggcagggggcagaaagacaacaccgag

SEQ ID NO: 221781 - RNA, 68 nt, Homo sapiens
aagcgcggaagccccgaaaccccaggacccagacacagcaagaacgccccggcaaggacggaggcagg

SEQ ID NO: 221782 - RNA, 74 nt, Homo sapiens
aagaacggcagaaggggaaaagacggacaggagaaaaggaacccccgcgaaagagaagaaggggaaaagaggaa

SEQ ID NO: 221783 - RNA, 74 nt, Homo sapiens
ccggagaagagagagaaagaccaagccggccacacacggcacaagggaagagaaaagacacagggacaagagcg

SEQ ID NO: 221784 - RNA, 77 nt, Homo sapiens
cagccaaggggccaaggacaaaaagcagcccggaggggaagacgaaggagacgcaggagggagagcagccagaggaa

SEQ ID NO: 221785 - RNA, 74 nt, Homo sapiens
gagggcaacgaccagccggggacaaccggccaccaaagggaccccaacgaagcagaaagaacaacacaagcggg

SEQ ID NO: 221786 - RNA, 81 nt, Homo sapiens
gacccggaccgagcagcccgacccccaacggaccccgccccggaggagcgcgcaccgaacacggcagaaccgacggaagaa

SEQ ID NO: 221787 - RNA, 75 nt, Homo sapiens
cacacgacagcaacaagacacggagcaaggaggaaaacacacgggaagaaagcccccaacaagacagcagaagag

SEQ ID NO: 221788 - RNA, 71 nt, Homo sapiens
agcgacccgacagaggcacaaaaagcggggaccacaccacacaggagaggccaaagagaagccaccgaaac

SEQ ID NO: 221789 - RNA, 80 nt, Homo sapiens
gccaaagcgagagagggaagcgcccggccggaggcaggggaaaggaccgaaggagaagaaggagaaggggaggagaaggc

SEQ ID NO: 221790 - RNA, 54 nt, Homo sapiens
acaaaaaaagagcagaaggagccacaaaaaacgcaagagacaggggccgggccc

SEQ ID NO: 221791 - RNA, 75 nt, Homo sapiens
agagcggcggacagcagggagcggccgagccacccaaaaacagggaaaagccgggccacagaagcaccaccacaa

SEQ ID NO: 221792 - RNA, 49 nt, Homo sapiens
acgccaggcagcgcccccaaacgggcaaagcaagcaagccggacaaagc

SEQ ID NO: 221793 - RNA, 56 nt, Homo sapiens
caaggccagcccggccgcaggcacagccacagccgcaagccaagagcagcagaaaa

SEQ ID NO: 221794 - RNA, 73 nt, Homo sapiens
aaacagaagaaaagacggaacccagggccaccggggaaacaaacacacgcaggcagggggagagccagcaacc

SEQ ID NO: 221795 - RNA, 88 nt, Homo sapiens
ggaggggccaccggaccccccaacaccccacgaaggcggcaccaagggagcagaaacgggagaaaggaaagaagaaggcaacaagcaa

SEQ ID NO: 221796 - RNA, 33 nt, Homo sapiens
gaagcccagaaccacaaagccagcaccccggcc

SEQ ID NO: 221797 - RNA, 71 nt, Homo sapiens
aacgccgaggaagaacacccagacgaaggaggggaggagagagggacgaaaccaccagacgggaaccagac

SEQ ID NO: 221798 - RNA, 69 nt, Homo sapiens
gaaggaccaagaaccagagacagcgggcgcggacacgaccaggcgggacggaccccccccaccccccgc

SEQ ID NO: 221799 - RNA, 77 nt, Homo sapiens
cgaggcgcgcccgaacggagagcgccacccgggacacagcgccaccccgagcagcggggaagcgggggacggaagcg

SEQ ID NO: 221800 - RNA, 76 nt, Homo sapiens
gaaagaagaacggaacagaaagcacacgcaagaggcaagcgccaggaccgcggggggcgagccgccgcgccccagg

SEQ ID NO: 221801 - RNA, 70 nt, Homo sapiens
gaccaccaaacccaggaggagacccccggaaaaccccccccggcccccaaaccggcacgggcgaaggccc

SEQ ID NO: 221802 - RNA, 81 nt, Homo sapiens
ccggccgcccggcgccccggggacgccgccccccgggaaaccccccaggcaagaggcgcaggaccgggaagaccaacaaac

SEQ ID NO: 221803 - RNA, 55 nt, Homo sapiens
aagacaccggggacagacaggaaccaggaagacagcgcccagcaacccggcaccc

SEQ ID NO: 221804 - RNA, 73 nt, Homo sapiens
ccggggacagggacagaggcacagaagagggccaagcgaacacccgggcggcaaaaggacgacaacaagcgac

SEQ ID NO: 221805 - RNA, 68 nt, Homo sapiens
caagacaagaaaaacacaaccagagcgccaagaagcaccacaaagaaaggggaccaaaggaccaacag

SEQ ID NO: 221806 - RNA, 41 nt, Homo sapiens
acagcccggccgcgcgcaccacgacgaggaccaaccagagc

SEQ ID NO: 221807 - RNA, 77 nt, Homo sapiens
cccgaccggaggagaaccccgacccaccacacgagccccggacaaagcagccagaccaaagcacagcgccagagacc

SEQ ID NO: 221808 - RNA, 92 nt, Homo sapiens
ccaggggcagcgagcaagacagcaagcagccaaaacagagggagacgagaaaagggccgagcacaagccaagaaggcgccccaaagcagcga

SEQ ID NO: 221809 - RNA, 61 nt, Homo sapiens
gcacagcggacaggaaagaacaggagcacagcggaaggggcaacaaaccacaccccccaaa

SEQ ID NO: 221810 - RNA, 79 nt, Homo sapiens
ccaggccaagcagccaccagcagcccccagagcgggaccacaggaccccccgccgcccgcgcccgcggcagcagcccag

SEQ ID NO: 221811 - RNA, 101 nt, Homo sapiens
cagaagacgagagccaacgcaaccaggcgcaggacacacagagaggcgagagcccagagagcgaaccgcacccggaccgcggcgaccgcgacaccagggcc

SEQ ID NO: 221812 - RNA, 68 nt, Homo sapiens
cagagaagggaaacagaggaaaaagcacaagcgaagaccgaagcccaaagcaggacacaagaggaagc

SEQ ID NO: 221813 - RNA, 65 nt, Homo sapiens
ggagggaaagagagggagccccgaccccaggccccccacagaaaaggaaagagcaaacaggacca

SEQ ID NO: 221814 - RNA, 43 nt, Homo sapiens
gcgccccagaaggcagaggaacacaacagcgcggagggaaaaa

SEQ ID NO: 221815 - RNA, 67 nt, Homo sapiens
gggccaccaccgaggaaaaaccgcgcaagaggacggcagacggcaggcaagccgacccaccacgaac

SEQ ID NO: 221816 - RNA, 76 nt, Homo sapiens
ccggccagacaaggagagcaacacaaggaagcaagggccaccgcccagccaaccacagggccggagcgagcggcgc

SEQ ID NO: 221817 - RNA, 69 nt, Homo sapiens
gcggcacaaaggaggaaacagaaacagagaaggaagagaacgaaagcccaacaacaagcaccccggcaa

SEQ ID NO: 221818 - RNA, 70 nt, Homo sapiens
gaaaagaggacgcagaccagaaacagcaaggcgggaacagaacgaaggacagaagccccagaagaggacg

SEQ ID NO: 221819 - RNA, 72 nt, Homo sapiens
gcacgagggacccccacaagcaagcacaaggcgcggcgcaggcgcggggccgggggcagggaggagcgccgc

SEQ ID NO: 221820 - RNA, 61 nt, Homo sapiens
gcgacaggggaacagacagaaggagcaggaaccaaaggaaggggggcagaaagaagaggag

SEQ ID NO: 221821 - RNA, 81 nt, Homo sapiens
ggagacggaaagccgggacaggagcagaagaggaaccacccagaaagaaaccacaacaggaaacgaaagccaacaaaaaca

SEQ ID NO: 221822 - RNA, 67 nt, Homo sapiens
aggagaaagaagcccagcccaccggagacacaggaacaaacgagcacgcaaagcccagaggcccgga

SEQ ID NO: 221823 - RNA, 82 nt, Homo sapiens
gggggcgcgggagcaacgggaggccggacccagcgagcgggcggcacgcacgcagccggaaccaaaaagaagccccagagcc

SEQ ID NO: 221824 - RNA, 85 nt, Homo sapiens
aaacccagagcagacaccgcagccaccgcggagcaaagcgaagccgacgagcccgaacagacgcaccagcgggaggaagagggac

SEQ ID NO: 221825 - RNA, 68 nt, Homo sapiens
cgagacacgggacaaaaaccaaagagaaacacagcccaaagaaacacacccccccacaacaaggccca

SEQ ID NO: 221826 - RNA, 85 nt, Homo sapiens
ccgggaggagccgcagcgccgggcgaccccgcccgggcccgggacccaaagacaggaccacgcaccagcagagaaggaaagcaaa

SEQ ID NO: 221827 - RNA, 76 nt, Homo sapiens
gcagacggaaacaaggcaacagaaagagcaacagcagggcaacagaggacgccagccccgccgccgacaaccgcac

SEQ ID NO: 221828 - RNA, 89 nt, Homo sapiens
accaagaccgcgcagccgccaacgaggagcgcaaaaagcgcggaaaaggaacagaagaggaaccgaaacccaagaaaaaccacccagca

SEQ ID NO: 221829 - RNA, 131 nt, Homo sapiens
cggaaccggcggaccacccagcaaaggcgccagcccagcacgccgcgacggccccgggaaggagcccaggaccgacagcagaggagcgcaagaacggagaacaccgacggagaaaacaggagcgcggcgac

SEQ ID NO: 221830 - RNA, 82 nt, Homo sapiens
gaaggaagaggcggacggcgggaccacaagacaacgcggagcggcgaagagcaaccagaggggaaagaaaaagagcccacca

SEQ ID NO: 221831 - RNA, 68 nt, Homo sapiens
ccaagcacaaacaggcccccaagcgcccccccccaacacacgcgacacgaagaagagaggagggaacc

SEQ ID NO: 221832 - RNA, 87 nt, Homo sapiens
cagccccgagcagcggaacacagaagaaaaacgcgccagacaagaaagcaggacagaggaaagaaacaaggaagccgcagaaaagaa

SEQ ID NO: 221833 - RNA, 83 nt, Homo sapiens
cggcggccaagcagccaaccagccaaccgggccccccagcagacgcggagcgaagaaaccgcaaaggggagaaaaacccgaac

SEQ ID NO: 221834 - RNA, 71 nt, Homo sapiens
cagccaggggaaacccggagggaaccaagaaaaaccaaagagccaggcgacccccgcgcccgaggcccaga

SEQ ID NO: 221835 - RNA, 81 nt, Homo sapiens
acgacccggagcacccgaccccgaaggggaccacaaacaggcccaccggagcagcagcccgacccgaccagcagacaaaga

SEQ ID NO: 221836 - RNA, 70 nt, Homo sapiens
agagaaagcaaagagaaaggaagcaggcccgggaaggggcaagggggaacaggcaaagggcagcaccgac

SEQ ID NO: 221837 - RNA, 74 nt, Homo sapiens
aacaaggccgccgggcaagcaaagccccaggccaccggagcccacaagcgcacccacgggcgggacacggcgag

SEQ ID NO: 221838 - RNA, 57 nt, Homo sapiens
gggcaggaacccaggacgaagggacaccccaaaaggaaggccaggcgaaccagccga

SEQ ID NO: 221839 - RNA, 111 nt, Homo sapiens
gacgggacagagcggcgggacagcccaagggccagcaccgcgcccaggcagagccagacccgcggagccagcgcccggcaaggagcgagcgggagacaccggccggaaagg

SEQ ID NO: 221840 - RNA, 80 nt, Homo sapiens
gacaaagagaacaaggccgagaaaaggacaggcgacacaacagggaagaccgggagaccagacaagaaaagaagcggagg

SEQ ID NO: 221841 - RNA, 61 nt, Homo sapiens
agaaaccggcacggagcgggggagaaaacgggccggaggaaaagggcggcaggggaccacc

SEQ ID NO: 221842 - RNA, 78 nt, Homo sapiens
aaggcgccaaacaagaaaaacaaagccaaggaaaccccaacacagagccaagcgccaacggagcaggccccagagccg

SEQ ID NO: 221843 - RNA, 61 nt, Homo sapiens
aggagggccaggacagacgaaaaggaggcgcgcccaaggcgggccccgaagaaacgaagac

SEQ ID NO: 221844 - RNA, 48 nt, Homo sapiens
cacacgcccaagggcagcaagaaagggaagggaaggcgggagacagag

SEQ ID NO: 221845 - RNA, 72 nt, Homo sapiens
cccaaccgccacagggaggaggagacggcgaagaacagaggaacaacgccaacgacaagacgaggaccaacg

SEQ ID NO: 221846 - RNA, 72 nt, Homo sapiens
cacagcaaacccacccagcacaccccgcgaaaggaggaggcacagagagccacagggagaagcagacacaca

SEQ ID NO: 221847 - RNA, 50 nt, Homo sapiens
agcgcgcagggccgccaggggcgccggacacagcaggggccagacaacca

SEQ ID NO: 221848 - RNA, 81 nt, Homo sapiens
acgaggacgaggagcggaggagccgcgggcggcgcggcccagccgccagcggaaggagagacaggaagggcacagaaacgg

SEQ ID NO: 221849 - RNA, 80 nt, Homo sapiens
cgaagacaggaccagggcacggagggacacccacaggagagacgacgccccagcggcccccaccaagcgccccgccccag

SEQ ID NO: 221850 - RNA, 80 nt, Homo sapiens
cgcaacgccgccccccccgccgcggcggccggcgaagcccggcgccagacagaaaaaaaaccggagccgcggcgccccag

SEQ ID NO: 221851 - RNA, 70 nt, Homo sapiens
cccgaccggggcccggagcgccccaacccagcgccaccccaccgaaagaccacagcaagaccacgccccc

SEQ ID NO: 221852 - RNA, 63 nt, Homo sapiens
ggaacgagggggaagcggcccagggaggcagaccccgaaagcccagaccggacccgcaccagc

SEQ ID NO: 221853 - RNA, 80 nt, Homo sapiens
cagaggagagccaagacgaaacccggggacaccgacacacgccccagaggccaaggccaggccaggacaagaggaacccg

SEQ ID NO: 221854 - RNA, 65 nt, Homo sapiens
cagcacgacccaccgcacgcagaagcgggaacaagacaacacacacgcaccagggcagaaaaagg

SEQ ID NO: 221855 - RNA, 84 nt, Homo sapiens
gcaccagcgcaggagacgcggccgcccgcaacggaaccccaagccccacacagaggcgccgaccccgacagaacgggccccgca

SEQ ID NO: 221856 - RNA, 78 nt, Homo sapiens
cgggggcaggcgcccgcccccaggcgcgcccagccccgcagccagggcgaacccccgcagacaagggaggcgaggacg

SEQ ID NO: 221857 - RNA, 77 nt, Homo sapiens
cgaaaacggccagggccgccgagccgggccacggggggcgggccaggggcccggacagcagagcggggccacggcgc

SEQ ID NO: 221858 - RNA, 67 nt, Homo sapiens
gcaggccccggggcgcgacgcggaacacagggaggcaaaagaaggcggagaggagagagcgaccacc

SEQ ID NO: 221859 - RNA, 100 nt, Homo sapiens
gggggccgaggggccaaccagcgaagagcgacaagccgcggcagccgcggaccaccgccgccaggaacagggcaggaaagggaacaacgaccgggggaag

SEQ ID NO: 221860 - RNA, 81 nt, Homo sapiens
gacaagaacggcggacccgggggaaaccgcaaaaggcccccgcggacccccagccccgggcccaggagcccgagaaggagg

SEQ ID NO: 221861 - RNA, 83 nt, Homo sapiens
cacaacgcagacgggcgccggcagccccccaggggagacacggcagacggagcaccgaagacgagcagcagcacgcagcagcc

SEQ ID NO: 221862 - RNA, 60 nt, Homo sapiens
cgccccacgaccgccaggaaacaccaaggaagaagagacgaccgagaccaggggaaagca

SEQ ID NO: 221863 - RNA, 83 nt, Homo sapiens
gcggcggcgaccagcgggggcgcggccggcggacgcagccggacggcgccagacggaaaccagcggcacggcagacacaccga

SEQ ID NO: 221864 - RNA, 78 nt, Homo sapiens
gggagcggaggacacgggggccacaaagccccccggagacgcaaccaaggagacacggacggcagccgccaccgccaa

SEQ ID NO: 221865 - RNA, 79 nt, Homo sapiens
cccccccccggggcccgcgaggagacccgggcgaggcggcgccgaggaagagcagaaggaggcccaagggccagggacg

SEQ ID NO: 221866 - RNA, 72 nt, Homo sapiens
aaagaccaggacggacaagcacagccggaaggacaaaccggcgaccacacacggggacgacggggaagccgg

SEQ ID NO: 221867 - RNA, 92 nt, Homo sapiens
cgaacaaagaggcccaagagaagagaacagcgggggaggacaccaggccgccggccgccggaaggcgacggcgggcccaccgggccggcagc

SEQ ID NO: 221868 - RNA, 74 nt, Homo sapiens
ccccgcggagacagcgagacccgccaggagcaaaggcggacgaaagaaagaaggagcaccaacgcaaagaaaaa

SEQ ID NO: 221869 - RNA, 79 nt, Homo sapiens
ccggggcgacgacaagcggggaaaacaccaagagaccaccgcagaaaaaggacggcagcaacacaaacaaggaaggagg

SEQ ID NO: 221870 - RNA, 39 nt, Homo sapiens
cgggcccaggccggcacaccacacccaccgcccgggcag

SEQ ID NO: 221871 - RNA, 73 nt, Homo sapiens
ccgaaccagggccacgggggaagaggacagaggcagccccggccaccacaaagggggaccgagcgaagagcaa

SEQ ID NO: 221872 - RNA, 72 nt, Homo sapiens
aggccgcgacaggggacgcaggaacgaaagagacccagcagacaggccaaagcgcgacgacaaagggagaag

SEQ ID NO: 221873 - RNA, 84 nt, Homo sapiens
gccgcccgggcccggagcgggagccagaggccagggaggacaccgagggaacaggcacgccccacccgccagccgagcccccga

SEQ ID NO: 221874 - RNA, 77 nt, Homo sapiens
cagaggcgacgcccagaaaacagcacaaccacccaggccagcgggaccccacaccacaaaccgaggaaagaagggac

SEQ ID NO: 221875 - RNA, 75 nt, Homo sapiens
aaccaccgaacacaacaaaaagaaaggaaggcccagcaacagacaacgagcaaccagaagaaggacagaagagag

SEQ ID NO: 221876 - RNA, 78 nt, Homo sapiens
acagaccgaaagacaaaacggcacgacaaacaacagaacccgaaacccacagggacaagaggggaaggagggacgggg

SEQ ID NO: 221877 - RNA, 73 nt, Homo sapiens
cgggaggacaacagaggcaccgagagagcaccagcacaaggcagaccgaaaagggcggaaaaggaccaaggcc

SEQ ID NO: 221878 - RNA, 41 nt, Homo sapiens
cagagacacagagggcagcagagggaaagcagacaaaggga

SEQ ID NO: 221879 - RNA, 72 nt, Homo sapiens
ccccacagacaccccaggacaagccacgcaagaggaagggaaggcgcagcacagcaaaggcagaaaaaacac

SEQ ID NO: 221880 - RNA, 53 nt, Homo sapiens
accgcaggcaggcaacgccaccgacccaggaggagccaggaggagagaacaag

SEQ ID NO: 221881 - RNA, 56 nt, Homo sapiens
caagggccaacggaagccagagaaagggcagcagcccagccaaagccggaaaagga

SEQ ID NO: 221882 - RNA, 55 nt, Homo sapiens
gaccgggaaaagacgcagcccccaagagaaacagaagcggagagacagggacaag

SEQ ID NO: 221883 - RNA, 76 nt, Homo sapiens
cagaggcaaggggccaccaggaggccagggggcgccaggccgagcaaaaaccagaccagccacccccccagcaccc

SEQ ID NO: 221884 - RNA, 73 nt, Homo sapiens
gggaacgacgcggcgcgcgcggacgaagagccccccccccaacaccgcgacacgcagacaacggcaagcggag

SEQ ID NO: 221885 - RNA, 113 nt, Homo sapiens
cgggcgcgacagcgagaagcaggggacgcccgacgccagcggagccccgagagccaggcgagaggggcccagcaacccaccaggaggacccaggccgcaagaagccaccagag

SEQ ID NO: 221886 - RNA, 84 nt, Homo sapiens
agacaccaccagcccaagaaagcaccgggcgaacagaaacagacgccggaggggcccaggcccccggggccccacaagacacac

SEQ ID NO: 221887 - RNA, 64 nt, Homo sapiens
gaacaaacaaaaaaagagagagcccgcccaacaaaagcagcaagaagagagaagacagcagcga

SEQ ID NO: 221888 - RNA, 76 nt, Homo sapiens
gagggagggccgagccagccgcggccggaggagcccccaggccgaaaaagacaagggcagagcagccggggaaaag

SEQ ID NO: 221889 - RNA, 82 nt, Homo sapiens
gcccagccccgaagggcacaccggagacaagggaggcgaggacggacaaaaggaaacggacgggaggccagccagcagaagg

SEQ ID NO: 221890 - RNA, 86 nt, Homo sapiens
gaaagcaggcgaacccgcggcgcaaaacgagcccagcaagaccacgacacgagagcgccgccagccggaaggagacacggccaccg

SEQ ID NO: 221891 - RNA, 98 nt, Homo sapiens
gcggcggaagagggccgggggcgcggccgcgcgccgccggcgaaggaggaggcggccgggcggagcaggagcaaaggagcaagaaaccagacccggaa

SEQ ID NO: 221892 - RNA, 69 nt, Homo sapiens
ccaagaaaagccgagaaaggggccaaggaagggagcaccagcccaggcaccagacgacaagacaacaag

SEQ ID NO: 221893 - RNA, 91 nt, Homo sapiens
cccccaccgagacgaagcgggcggcgaaggggagcgggagagaagggagacaaaggcgcccccggacggccggaagagcggccccacggga

SEQ ID NO: 221894 - RNA, 82 nt, Homo sapiens
ggagaaggccacacccaggcagcaagggcaccgcgagcaaggcagccgccagaacggggggcagccaaggaaggacggcaga

SEQ ID NO: 221895 - RNA, 75 nt, Homo sapiens
accggcccacggaagaccccgaagcaggccgaagacgggacagggaggagagaagggcggcaggggcggacgacg

SEQ ID NO: 221896 - RNA, 68 nt, Homo sapiens
cccccacagccccccagggagacaaaagcgccaggcaggcaggaaagcgccgggaagaaagccagagc

SEQ ID NO: 221897 - RNA, 80 nt, Homo sapiens
ccaaacccaccaccggcagaaagaaggcgccaccaaccagccaagagaacagggaagaggacaggggcggccgaggcagg

SEQ ID NO: 221898 - RNA, 70 nt, Homo sapiens
agaggcggcagggaccagcagacgggaagagggcaaacgccagcgggggcaggacgggcaggccagccac

SEQ ID NO: 221899 - RNA, 67 nt, Homo sapiens
ccagagcggaagccaaaggcaacgacaagagagaagaagcaaaccgggaccggaagcaccaaggaga

SEQ ID NO: 221900 - RNA, 85 nt, Homo sapiens
ggaggcgcggccgagccccgacggccacccggcgggaaggagggccccggagcagccacaccaccgaggccccacccagcacgag

SEQ ID NO: 221901 - RNA, 73 nt, Homo sapiens
aggccgggacaggcagagaggagaaggagagccccaacccaagaaaacccgaggcccagagcaccacagagac

SEQ ID NO: 221902 - RNA, 81 nt, Homo sapiens
cggggaccaggacagcgcgaggcgagggcagagccgcggggcaagacgacccaaagacaggaccacgcaccagcagagaag

SEQ ID NO: 221903 - RNA, 77 nt, Homo sapiens
cgagcaggcgagcgaacgacggagcacccacgggaacagcccagaaacgagggaaaaacgaagccgaccggaacagg

SEQ ID NO: 221904 - RNA, 106 nt, Homo sapiens
ggagagaggggcgggcgagcagaggggaagcggcggagcaggaggagggcggccgggaagcgaaagccccgaagggggaaccgcaagcggccaagcacaaagagcg

SEQ ID NO: 221905 - RNA, 87 nt, Homo sapiens
caccaccacgccagccgcaccagccgcccaagccgcacagccgcggcggcagcagcaggagagggacaccacaccgcccaccgggaa

SEQ ID NO: 221906 - RNA, 37 nt, Homo sapiens
gaagagcaggaccgggaggcgaaaaccaagagacacg

SEQ ID NO: 221907 - RNA, 83 nt, Homo sapiens
gaggagccggcgcggcgcagcccacggcgcaggcccacggagcgcagccgccgagcgccccacaggaagcccgcagaaggcaa

SEQ ID NO: 221908 - RNA, 45 nt, Homo sapiens
gcgccgccgacaaggcgcacaacagcccgagcgggaagaagccgc

SEQ ID NO: 221909 - RNA, 76 nt, Homo sapiens
ccagaagacagagggcgagggaccaagaaaggcccagggaccaaagcccggacaaggcccgagcaccaggaccgca

SEQ ID NO: 221910 - RNA, 79 nt, Homo sapiens
caaagcccccaagaaaggaagaagaagagagggaggagaggcggccccaacaagcgaacaaggcacgcgaaggcgggga

SEQ ID NO: 221911 - RNA, 54 nt, Homo sapiens
aagcgggaggacgggccaccgcggcgcaggaaggcgccagaaaaaaaaacacgg

SEQ ID NO: 221912 - RNA, 57 nt, Homo sapiens
agaaccaagcaagcaggaccggaaaccggaccacgcgacggaaggcgggcccccgcg

SEQ ID NO: 221913 - RNA, 66 nt, Homo sapiens
gcgccaccaccaaccagggaagcgagagcagcggaaaaccgggcaccagccagagcaagcacaagg

SEQ ID NO: 221914 - RNA, 69 nt, Homo sapiens
aagcacagccgcgagaggaggaccgaccccagggcgcgggccgacccgacgaggagggcggggaagaga

SEQ ID NO: 221915 - RNA, 83 nt, Homo sapiens
agccaccccaaccccccgaacccccaggaacaaggcagaggaagacccagcaaaaaaacacaaaacaggccgaggacccgggc

SEQ ID NO: 221916 - RNA, 81 nt, Homo sapiens
aggcacagaaccgaagaaaagaggaggagaacggggcgaggaggaagaagaagaaacgccgaggaggagaggaggaagaga

SEQ ID NO: 221917 - RNA, 59 nt, Homo sapiens
gggaaacgggcgaagcgacgagccgcgaggaggaagggccccacaccaaaccgccacgc

SEQ ID NO: 221918 - RNA, 85 nt, Homo sapiens
gcgccccaggcggagggaagggaagggcagccgccgacgcggaccggcgaaaagaaaacagggagaagaagaaggagcaagcccg

SEQ ID NO: 221919 - RNA, 78 nt, Homo sapiens
cgaggggacgccgcccgccgcccgccgcaggccacccgggaacggaggagggggaaacacaaagaagacaccagaagg

SEQ ID NO: 221920 - RNA, 79 nt, Homo sapiens
gcacaggggagaggcaagcacggaccagcgcccagaggggggagccaggaccgcccaacgaggaccagcaccgagaccc

SEQ ID NO: 221921 - RNA, 71 nt, Homo sapiens
caacgggccccgcaggccagaggcaggggaagcacaaaagcgcacccgcgccagcgaggaccggaacgggg

SEQ ID NO: 221922 - RNA, 57 nt, Homo sapiens
gaaaggcaccggagagaaagacaacagcacagccaccaacaggaccacacgcccgcc

SEQ ID NO: 221923 - RNA, 76 nt, Homo sapiens
aggagggcaccaacgccgccagcgcgaaaagagaagcagaagacacaggccgagagccacaacagaagcaacagca

SEQ ID NO: 221924 - RNA, 78 nt, Homo sapiens
gcgaccgcgggcggcgacgagaggaggacgcccacagccacccaaagagccagccccaggccgcgagccggacaacac

SEQ ID NO: 221925 - RNA, 58 nt, Homo sapiens
cacccacgaacgcccaccccccgaacccagccgcaccggaaaacaacccgaacaggaa

SEQ ID NO: 221926 - RNA, 72 nt, Homo sapiens
gaccaccgccggggacaccaccaggaggccagcaagccgccagggagcacaccaaccgcccaccaccccacg

SEQ ID NO: 221927 - RNA, 84 nt, Homo sapiens
ccagcccgagcaagaaagagggccaggaggcggggagcgcgaacaaacagaccgggagccgcgaggagaaccggcggaccagcc

SEQ ID NO: 221928 - RNA, 80 nt, Homo sapiens
accaggcccacgcgcgggggagaccgggcccggcccccccggagagagagacgacagggagaggagaagagaggacgagg

SEQ ID NO: 221929 - RNA, 69 nt, Homo sapiens
gggcgaagagcccccccccaagggcccgacaagagaggcggagccacccccacaacggaccaggagaag

SEQ ID NO: 221930 - RNA, 79 nt, Homo sapiens
cccaacacagggaaacgagaccagagagccgcagagcggccacgcgaacccggaggaccagcggaaggggagagcggcg

SEQ ID NO: 221931 - RNA, 86 nt, Homo sapiens
acccccaagaaccaacccccaaaggcgggacaggcaagcacagcccacaaagagcagagggcacggacgacggggacaaagcaggg

SEQ ID NO: 221932 - RNA, 78 nt, Homo sapiens
aagggaagagaagcaaggaaagcggcaagagagcaagacggcgaaagagccagcaaaaagcgggcggcagaaagagcc

SEQ ID NO: 221933 - RNA, 78 nt, Homo sapiens
gggcgggccaccgcaaggccaacacacgccccggcgccgaccagaagaaaaccaaccggacaaggcagagccagaacc

SEQ ID NO: 221934 - RNA, 74 nt, Homo sapiens
ggagcggcccacgcgccccggccgaaagcccgccggccacgggagcccagaccggggaagagaaacgacaaaca

SEQ ID NO: 221935 - RNA, 75 nt, Homo sapiens
gagcccagggaagcagccgaccagccgcggagccgggggcaggagcaggcccagaaagaacagacaaagaccgaa

SEQ ID NO: 221936 - RNA, 83 nt, Homo sapiens
gacgagcagggacacccaggaagagcggccccgcggggggcgagaccggcgcgacccgaccacccaggaaggaagggaacacg

SEQ ID NO: 221937 - RNA, 73 nt, Homo sapiens
ggcgacacgacaggaacacagcccaaagcaagaggggaaggggacaagagccaacggcaagcagcagcgacag

SEQ ID NO: 221938 - RNA, 58 nt, Homo sapiens
ggaagggacaagacccacagcaaagccagcgacagaagccagagccgcgaggagggaa

SEQ ID NO: 221939 - RNA, 86 nt, Homo sapiens
cagagggggaaagccaaggaaaaacggagagccacaaaaaaggaagcgaaaggcggaccaacgggccggggggcgaccggccagca

SEQ ID NO: 221940 - RNA, 55 nt, Homo sapiens
agccaagaccgggcgcaaaggacagaacaccggaagaacagacacacagagccac

SEQ ID NO: 221941 - RNA, 74 nt, Homo sapiens
acacaagaagagaagcgcaagggaccagggaacgcgagacagggacagagcgaagaaccccccaagaagacgaa

SEQ ID NO: 221942 - RNA, 71 nt, Homo sapiens
gaggacgggagggggaaggggccggagggcagggggcagggcggcagaggcgaggcgaggggccccgaacc

SEQ ID NO: 221943 - RNA, 79 nt, Homo sapiens
ccaagcgaagggcccaggccacacacagaaccgacccaaggaacccaaagccgaacacaaccccagagccggcagcggg

SEQ ID NO: 221944 - RNA, 71 nt, Homo sapiens
aaagcacggacgaaaaaaagaaacccggacaaaagcagcaccagacggagaagcaaaagcaggccgaacac

SEQ ID NO: 221945 - RNA, 63 nt, Homo sapiens
cggagcccagggaagcagccgaccagccgcggagccgggggcaggaacagaggagcggaaacg

SEQ ID NO: 221946 - RNA, 72 nt, Homo sapiens
caggcaggccgaaccagggggagccaccccgcgggagagagggccaccaaaaggagaccccccgagcgccac

SEQ ID NO: 221947 - RNA, 117 nt, Homo sapiens
cccgggcagaggaggccgggggaccagggacaaggggcaagccacaagcgcgagcaagaaaaggagcggcgcgggccggagcgcccacggcaaccagagggggacgcacgcaccccg

SEQ ID NO: 221948 - RNA, 80 nt, Homo sapiens
gacccagcgagagaagagcggagggaggacccacgcgcgacccaggcaagggcgcaaggaccagaccgcaaaacgggaca

SEQ ID NO: 221949 - RNA, 73 nt, Homo sapiens
cgacagcagccgcaccgcgcgccagccgaggccgccggagccccagacaccccccacacaccaccgacgcgca

SEQ ID NO: 221950 - RNA, 62 nt, Homo sapiens
cagaagccagagcgaggacgccggcaggcccagaggcagagcacacaaccaggaaccaaaaa

SEQ ID NO: 221951 - RNA, 84 nt, Homo sapiens
gagcgcaacagcggcgggcggggcaccccaggcaaaagcagaccggaaaacccaccggcaagaccacacccgaggggagcccag

SEQ ID NO: 221952 - RNA, 77 nt, Homo sapiens
ggccccaagaggccagccccccgagggcaacgagaaagagacgggaggcccccccccacaaggcccgcaagcaccag

SEQ ID NO: 221953 - RNA, 75 nt, Homo sapiens
gaaggaagcaccaaagaggagggaacgcccccaagcccaaggaaacacggaggccccgcagaagaagaccggcag

SEQ ID NO: 221954 - RNA, 61 nt, Homo sapiens
gcgacgacggcaggaagaaaacgagccaggaacaaagagcaagcgccgcgcccaggcggag

SEQ ID NO: 221955 - RNA, 60 nt, Homo sapiens
gaagaggaggagaccaagcgcacagccaggcagcagggagaccagaccaggacagaccgg

SEQ ID NO: 221956 - RNA, 71 nt, Homo sapiens
gagaaagggccagacaacgaagaagaccgaagcagaaggaaaacacaaaagaacggaggagcccccgcacc

SEQ ID NO: 221957 - RNA, 80 nt, Homo sapiens
gacaccgggcaaccaaagacgggcgccacagacacaaaaggaagaaaagggggcaccacgaagaggaaagagaaggacgc

SEQ ID NO: 221958 - RNA, 78 nt, Homo sapiens
cagcaccggagagcggccaagcccagaggagacgagcacgaagcgggaaaacaaggggcggggacagagagcaccagc

SEQ ID NO: 221959 - RNA, 86 nt, Homo sapiens
gcgcggacccaggcgcggaggcgaggccagcagggcccagccccggaaggcaggaaggggacggagacacgacgaggcgagggagc

SEQ ID NO: 221960 - RNA, 41 nt, Homo sapiens
caaagccggaaaggagaaggcccagagacggaaagacaaag

SEQ ID NO: 221961 - RNA, 81 nt, Homo sapiens
agacgcccggcaagagagccgcacaagcgccggccaagcggcaggagaaggcggaggggccgaggggaccaagcggagaga

SEQ ID NO: 221962 - RNA, 70 nt, Homo sapiens
gaagcgccgcgcgcgcgccgcgagcgcagacccaagcaggcgccagcccgaggacggggcaagagcacag

SEQ ID NO: 221963 - RNA, 78 nt, Homo sapiens
aaagccaagccaccgagacccggaggaggcgaagcgagaggacaggcacccacaccaaggaggagcaccccgggcaag

SEQ ID NO: 221964 - RNA, 66 nt, Homo sapiens
gcaagaggaaacagaaggaggagaacccgccgcccgagggcgaaaccaccacccgggacggggacc

SEQ ID NO: 221965 - RNA, 82 nt, Homo sapiens
cgcccagggggagccggagggcaaagcggggcgagcagggaagggcgagcacgggccagcccggccacagcagcacgagcgg

SEQ ID NO: 221966 - RNA, 71 nt, Homo sapiens
gccgccggggagaaaccacccacacccaccaacagaaacagacccaaacacgagggccagcagaagggaag

SEQ ID NO: 221967 - RNA, 76 nt, Homo sapiens
cgcagggcgcccccggaagagcagcacagggccgccgagagagcaccacagcggggccgcaccgaccggggaacgg

SEQ ID NO: 221968 - RNA, 72 nt, Homo sapiens
gccacccacaaacagagagaaggaaccacccacgcaggcagcggccaggcgacgagagaggcgggagggaag

SEQ ID NO: 221969 - RNA, 70 nt, Homo sapiens
gcgccaccagcaaccagagggccagagggaaggacagaacccagaaagagcccaagacccgacccggaag

SEQ ID NO: 221970 - RNA, 40 nt, Homo sapiens
cccccaccggaggacacaaggagggccccaaggaccgaga

SEQ ID NO: 221971 - RNA, 79 nt, Homo sapiens
gaggagccaaggggagcagcgcgcgggaggcccgagccggcaaacgagagcaaaagggaccgaggcaagaagggacgaa

SEQ ID NO: 221972 - RNA, 102 nt, Homo sapiens
gggggagggagacggagggaacacaccaccaggacagcacccaacagacccacgcagccacccagcccagcaccacgcgcagccaggaggcccgggaccggg

SEQ ID NO: 221973 - RNA, 67 nt, Homo sapiens
cccgagcagggggggggggaagccgcagcggaaagcaggagcacagccccggcacaaagcagaccgc

SEQ ID NO: 221974 - RNA, 78 nt, Homo sapiens
aagccgccccccaccgcccgggcccgaggaggcagccaagccgggccgcccgcggcgagggaaaagaagaccgaaggg

SEQ ID NO: 221975 - RNA, 75 nt, Homo sapiens
ggagcaaagaggaccacaccagggcggagaaagaaggccgggccgagccagggcccccagaggagagaaggaggg

SEQ ID NO: 221976 - RNA, 72 nt, Homo sapiens
gagacccggaacaagcaaagggaagaaagagggccacggacagaggcgcagcagaggaaccgcagaagaacg

SEQ ID NO: 221977 - RNA, 72 nt, Homo sapiens
cgagccaggccagcagccgaaccagggccaagggcagggagaagggacaacacagaacacagaccagggcag

SEQ ID NO: 221978 - RNA, 74 nt, Homo sapiens
gccacgcgggcagaccgacagaagagaaggagggggcagagcacggcaggcagaaggggccaacccgggggaac

SEQ ID NO: 221979 - RNA, 79 nt, Homo sapiens
ggcccagcacacaggcacacaggcagaccagaaggagggaacaggcggcaggacccccgaggcagaagagggcccggaa

SEQ ID NO: 221980 - RNA, 68 nt, Homo sapiens
gggcaccgcgccagacgcccgagaagccaggcagcaaacacacaggccaaccaggggagcgacaggga

SEQ ID NO: 221981 - RNA, 74 nt, Homo sapiens
acgcgagcccgcacaacaccaggcgcaggagcgcccagaagaacaaccaacaccgggaaaacagcgaggggcaa

SEQ ID NO: 221982 - RNA, 83 nt, Homo sapiens
ggaccacccaggaccggacccacccccaggagcacgaggagagaggaccagaaccagaccggaaagcaccaggcaaagaaaaa

SEQ ID NO: 221983 - RNA, 84 nt, Homo sapiens
ccaagggaaaggagccaagagggaccgcgcaagcaccagaggacaggaaaacaggaggcagaggaacaaaaaaagacaccacga

SEQ ID NO: 221984 - RNA, 86 nt, Homo sapiens
acgcaaacgcgaaaagggcgcaccaacaccaccagaaagaccagccacgccggaacaggaagagcccaaaggcgaaggaacgagga

SEQ ID NO: 221985 - RNA, 81 nt, Homo sapiens
accgggcccgaggccacccccccagcagggagcggaccggggaccacccacagccgaggaggagcaagcgcgcacccaagc

SEQ ID NO: 221986 - RNA, 74 nt, Homo sapiens
gacacggaggggccggaagagacaagaccgggggcccagaaagacacgaggggacaccaccccaaaaaaaaaaa

SEQ ID NO: 221987 - RNA, 75 nt, Homo sapiens
ccaagaagaagaccgcacgacgcaaggacccacagaccgggagcggggcccggcgcacccaccaccgccgcccac

SEQ ID NO: 221988 - RNA, 43 nt, Homo sapiens
accaaacaaagagaagaaaccaaggacacgggaaaagcacagg

SEQ ID NO: 221989 - RNA, 88 nt, Homo sapiens
ccagcagggcgccacccgggaacaagcaggaagcgacacagaacggggaggggccacccagagcacaacaggacacggacacagcggg

SEQ ID NO: 221990 - RNA, 76 nt, Homo sapiens
gggagaacggaaaaccccaacccggccagcgcaacggaaacagaaaagagcgggaaccagccaacagaaacaacac

SEQ ID NO: 221991 - RNA, 84 nt, Homo sapiens
gggcacggaaagcggggagggggggacacacgcaggggccacagagggagccgagcaagggaagaagaaagaccccgcacggca

SEQ ID NO: 221992 - RNA, 54 nt, Homo sapiens
cacgacaagggcccgcggaccggccccggggcagaagagcggcgccgaggagaa

SEQ ID NO: 221993 - RNA, 96 nt, Homo sapiens
gcggaggcgcaaggagagggaggagagccgagggcacgaaaagaccggacaggccccaaagcaaccggaaacagaagcaaagaccgagggccgcgg

SEQ ID NO: 221994 - RNA, 56 nt, Homo sapiens
gacagcggccaagggagaagcacgagcgccggcccaggcggaggcaaggcgcaacc

SEQ ID NO: 221995 - RNA, 82 nt, Homo sapiens
ccagcggagggcgaggccaagggacgcgacaacggccagacgagcaaggcgcggccaagagggcgcgcccagccaacagccg

SEQ ID NO: 221996 - RNA, 58 nt, Homo sapiens
caccgacgcacagcgaccaccaacagaccgaaggccacgcccagaccaccgcgccccg

SEQ ID NO: 221997 - RNA, 72 nt, Homo sapiens
ggcaaaacacagaagaagcaggccgcacgaacgcaagaaggaaggaggcagacgggcaaaaggaagcgaaaa

SEQ ID NO: 221998 - RNA, 78 nt, Homo sapiens
gacacagcccagcagccaggcccagaagggcagaagaaaaaccagcacgcaggaacaacagacaagcggaacaccgaa

SEQ ID NO: 221999 - RNA, 79 nt, Homo sapiens
ccaggaaaagaaagcgggagagacaagaagggccgcacagaaggaagaaaagccaggcaagggggaacgaagcagggca

SEQ ID NO: 222000 - RNA, 82 nt, Homo sapiens
cggagaagccgcggcggcagcacgacagcgccggcaacacgcggcacaagaccgggcgacgcacgaggcacacaggaaggag

SEQ ID NO: 222001 - RNA, 74 nt, Homo sapiens
cgagaacagaagaaagaagacaaaaagccaggagccaacagagcccaaaagacaggagaaacacaaggcaagcc

SEQ ID NO: 222002 - RNA, 64 nt, Homo sapiens
ccggcgccggccgagaaggcagaggcgagagaagcgcccagacccgcaaacaacagcccccgga

SEQ ID NO: 222003 - RNA, 78 nt, Homo sapiens
gccgggccggccccccagcaagcgggggaaaacaacacggcagaagccacgaaaggggagcacgaaaggaaaaggaga

SEQ ID NO: 222004 - RNA, 75 nt, Homo sapiens
accggccgaggcaaggagaaagaacaaaccccgaagacgaacgcacaccagcaccagcccaccaaaccagcacga

SEQ ID NO: 222005 - RNA, 39 nt, Homo sapiens
ccccaaggcgggaacagagcagaaagaccaggggagggg

SEQ ID NO: 222006 - RNA, 72 nt, Homo sapiens
caggaaagggcaacccacccagacagaaacgccaaggaaagaaaacccagaagacacgagaaaaacccaacg

SEQ ID NO: 222007 - RNA, 58 nt, Homo sapiens
caggacgaggagccaccaacaggcgcaggcacaggagggcccccgaggaccgaacccc

SEQ ID NO: 222008 - RNA, 53 nt, Homo sapiens
cgcacagccacgcacacagcgggccaaggaaagcggagggagccccagaggac

SEQ ID NO: 222009 - RNA, 71 nt, Homo sapiens
ggcagaagccgaacacgacagaaagaaaggccaaagcagcagccagaaagcgagcgacggaacacaaacag

SEQ ID NO: 222010 - RNA, 72 nt, Homo sapiens
agacaacagcaagcaaaaaggaagagacgaaaacaggaaacgaccaaacagccgcagacccaagcagagacc

SEQ ID NO: 222011 - RNA, 62 nt, Homo sapiens
cacgcaaaggagaaaggaaccgacaggaccacgagaaaagaccagggggcccgagagaccac

SEQ ID NO: 222012 - RNA, 119 nt, Homo sapiens
ggcgcaagccggaacaacagagagagcagggagaaaaacaggcgggcagacagcagagccacaaagggcggcccaggcccgaccccgaagagagggagagagccgaaggccagagagag

SEQ ID NO: 222013 - RNA, 57 nt, Homo sapiens
cgagcaggacagcagcgccgagaagaccgcccacaaagaccaccggcaccagccacc

SEQ ID NO: 222014 - RNA, 54 nt, Homo sapiens
gcaaaacaggacgacccgaggaacagagcacacaaagcgcccaagacgcgagca

SEQ ID NO: 222015 - RNA, 64 nt, Homo sapiens
agaggagcggagaaccaggaaccgcgcaggggaggacccaggcggagacagaacagacgacccc

SEQ ID NO: 222016 - RNA, 73 nt, Homo sapiens
agaagggaaacagaggaaaaagcacaagcgaagaccgaagcccaaagcagaacgaaaacaaacggaagagagg

SEQ ID NO: 222017 - RNA, 82 nt, Homo sapiens
cggcgccagaccacaaccaccacccaagggagcgaccccaacagcaggaaagccccggacccaaaaggcgggcgaaaacgcc

SEQ ID NO: 222018 - RNA, 79 nt, Homo sapiens
ccgcgcacccccggccggaggcaccagcaccgccccagcacaccccaccccaccagccgccagccccccagacccagac

SEQ ID NO: 222019 - RNA, 74 nt, Homo sapiens
agaggaggaacaccaggcacaagggcacgcaaaaaaaccaagggaaaagagacaagaccgagacacaaaaaaag

SEQ ID NO: 222020 - RNA, 83 nt, Homo sapiens
gcccgagccaacaaggggaaagaggggggcagacaagccacagccagacaagccgccgccgcgccgccgcgccccaacgccag

SEQ ID NO: 222021 - RNA, 89 nt, Homo sapiens
agagagaggcagagagggagagagggagaggacagcagcgccgaaagaagagcgaagcacaacacggagaaccggaggacggggcagga

SEQ ID NO: 222022 - RNA, 82 nt, Homo sapiens
agcgcagaagccgagccgcgaggagcgcacccgggccccgaggagcggacaaagaggcccacgcggaccggcagcgccaccg

SEQ ID NO: 222023 - RNA, 51 nt, Homo sapiens
aggaagaggaacaacggaaccaggaacagaaaagagagggacagacacaac

SEQ ID NO: 222024 - RNA, 88 nt, Homo sapiens
agagaaggcacaggcccgggaggagaagcaccagaagcagaggagcggccacacggcgaccgcggggacgaggggacacaagacggcg

SEQ ID NO: 222025 - RNA, 73 nt, Homo sapiens
aaggacgaacaaagcgccaaacccgcggaaccagcagaagaacagggcagagggccagacccccaacaaagcc

SEQ ID NO: 222026 - RNA, 75 nt, Homo sapiens
aaccgcggggcaagcgggccacgcacccgcaccaaggccaaggaggagagcacccagcacggagggaacagcaga

SEQ ID NO: 222027 - RNA, 76 nt, Homo sapiens
aaaagaaaccccccaccccaacgggccccagcgccaaccaaaccgaaagccagaagacaggcaggagacacacaca

SEQ ID NO: 222028 - RNA, 77 nt, Homo sapiens
aaagcggccccagcaagaaggggcaagaggaagagaaacaccaaggaaccacacaagaaaagaaagcaaaaggacca

SEQ ID NO: 222029 - RNA, 86 nt, Homo sapiens
accgccacacaaaagcggacaagcgaaggcggaccgcacaagacggcaaagccgggaggccaccaacgcgcccacaccgaaaccgg

SEQ ID NO: 222030 - RNA, 62 nt, Homo sapiens
cgcgaaacgcacgagaaggaccccaagaggccaggccagcccaggacccgggaccaggacaa

SEQ ID NO: 222031 - RNA, 74 nt, Homo sapiens
gaggaacaaggaaaaaagaaaaacaccaaaaaagcagacgaccacaggggccagacagcacgccagcagggggc

SEQ ID NO: 222032 - RNA, 66 nt, Homo sapiens
gaagacaccaaaaagcaaacggaccagaccgaccaccaaaagcgcccccgacacgagcagccaaca

SEQ ID NO: 222033 - RNA, 80 nt, Homo sapiens
ccagaagacagagggcgagacaccacgacagcgaggcagccagcagcagccaccagagcccaagagcacagccaaagggc

SEQ ID NO: 222034 - RNA, 82 nt, Homo sapiens
cggcccgcgaaggaaacaagaggccaaaaccgaagaggaggacgagaccgaaggagcagacgaggcacgagcgccagcgcga

SEQ ID NO: 222035 - RNA, 77 nt, Homo sapiens
gcgcaaagccggcaccgcccggcccgccagcgccagcggcacggcccgccgcccaagagccgagagcgccggaggac

SEQ ID NO: 222036 - RNA, 110 nt, Homo sapiens
agcaggccaaaaggagccacaaggaagagagagcacaagccagcgcaagaaaggggacggcgacggccgcgccccagcccaccgggaccgcaggagaggagaaacgagcg

SEQ ID NO: 222037 - RNA, 84 nt, Homo sapiens
ccagcgggggaaccggcgcgccggcgcgcggcgcggacaggcccaaacggcgaaggggagcaagggagaaaagcaaagggaagg

SEQ ID NO: 222038 - RNA, 77 nt, Homo sapiens
agggacgggcccaggaagcaggcgagcgcggacaccagaacgaccgggagcgaggagaccaaggaccaggaaggccg

SEQ ID NO: 222039 - RNA, 69 nt, Homo sapiens
ccaaagaagggagagcacggaaaaaccgcgagcccgggggccagcacaggaggaaagcacggcacgccg

SEQ ID NO: 222040 - RNA, 58 nt, Homo sapiens
aggccgaaaaaaaagaagggagaagagccagggaggaccgaggcagcccaacggcggc

SEQ ID NO: 222041 - RNA, 91 nt, Homo sapiens
cagccaccacaagcccgagcccgaagagagaaggcaaagaacccggggaaaggcacggaaacagaagagacaaacaccgcacagaaagaac

SEQ ID NO: 222042 - RNA, 69 nt, Homo sapiens
ccacggcgaaaccaagccaacaacaacgagagacagggcagggcagcagcacgaccgacccagcagccc

SEQ ID NO: 222043 - RNA, 76 nt, Homo sapiens
cgaaacgcacgagaaggcacgcagaagccagcggacgcccgcaacggggaccggccagagaccgccggcgaggccg

SEQ ID NO: 222044 - RNA, 80 nt, Homo sapiens
ggaacacacacagaccccacaagcagacgaaaaggggccagggcagaaaagaggaaaaaaggacaggcaccgccccaaag

SEQ ID NO: 222045 - RNA, 87 nt, Homo sapiens
cggagcgcgaaggccgggacccggccccggcccacaggggggggcaaacccgagagaacgggccaagacaagcaaaagcgcgggaaa

SEQ ID NO: 222046 - RNA, 55 nt, Homo sapiens
cacacccaggacacggccaccaccccaggccggaaggggggcgacgcggaaggca

SEQ ID NO: 222047 - RNA, 40 nt, Homo sapiens
gcagaccggcagagaagagaaaaccgcaggacggacggac

SEQ ID NO: 222048 - RNA, 58 nt, Homo sapiens
ggccgccggcacgcgaagggaggcaccgccccaacccccccccgcccggagaaccccg

SEQ ID NO: 222049 - RNA, 72 nt, Homo sapiens
gaacccgaggacagaaaaccggagagaggacaagaaaggaccagcagaagagcaagggagaaacgggcaagg

SEQ ID NO: 222050 - RNA, 64 nt, Homo sapiens
aaacccaggacagccccaagacccagaaaagcagaccccgacacgggaggagagagaacggagc

SEQ ID NO: 222051 - RNA, 59 nt, Homo sapiens
gcccggacacccacagagagaggaccagaaccagaccggaaagcaccaggcaaagaaaa

SEQ ID NO: 222052 - RNA, 61 nt, Homo sapiens
ccggcagagggagcgcgggagccaacgcgcccaaggaagaagggagccaccacccacgaga

SEQ ID NO: 222053 - RNA, 51 nt, Homo sapiens
cgagaaaggaaggaaaaccgacgaggaggacaaaaggagccaaacaaaagg

SEQ ID NO: 222054 - RNA, 83 nt, Homo sapiens
cgagcgaggaggaggcggagcggggcccgacgcacccacaaaagcgaaaagccagacaggaacaccagacagaagaacgccgg

SEQ ID NO: 222055 - RNA, 80 nt, Homo sapiens
acaaggcacaaaaccacagaaacaaagaccagaccaaggagggacccaacagggacaggcacagggcaggcgaaggccag

SEQ ID NO: 222056 - RNA, 74 nt, Homo sapiens
gcgcagcccacgccagacgaccccacccgcgccgcgacccggcagcaaccaccggagggcgcagagaagagaca

SEQ ID NO: 222057 - RNA, 81 nt, Homo sapiens
agcaggaacgaccggaagcccgcaaggaccgaacacccccaccccgaagaccgcggcgggaggagaaaaggaaggaaggag

SEQ ID NO: 222058 - RNA, 74 nt, Homo sapiens
ggaagaggagacaccccgggggccccgagcaaaccagggaaggcggaccccggcagcaagcaacagagcgccaa

SEQ ID NO: 222059 - RNA, 53 nt, Homo sapiens
gaggagacggggcagacaacggagcccggggcgaacaagaggcgccagcgggc

SEQ ID NO: 222060 - RNA, 76 nt, Homo sapiens
cgaccgagaaaggagacagcacgggcaccgcgcgcggaccgagaggcaagcggacgggcgcaaaccagggcggcgg

SEQ ID NO: 222061 - RNA, 75 nt, Homo sapiens
ggcgccaaagcgagagagggaagcgcccggccggaggcaggggaaaggacccaaagacaggaccacgcaccagca

SEQ ID NO: 222062 - RNA, 73 nt, Homo sapiens
aacaaacaaaggaccgaagggcccaacccagccagggcccgcagcaaagagggaccgcggaggaaggaagagg

SEQ ID NO: 222063 - RNA, 77 nt, Homo sapiens
ccaccggccccccacccccacacacaggcgagacaaccagcaacacccccaaccccgcccaccaaagcaaggcaaga

SEQ ID NO: 222064 - RNA, 78 nt, Homo sapiens
ggggaccggagcgacgccaacaggggcaaggccgaggggaacagcacacagagaggaggcggaagcacgccagcagga

SEQ ID NO: 222065 - RNA, 68 nt, Homo sapiens
ggaggagggggcaggagacaaggaccgggcaaaccagaacaagaccgaaccgggccagcaggagcccc

SEQ ID NO: 222066 - RNA, 74 nt, Homo sapiens
cccgcgcggcgcggggaccgcggcccggggcaaaagcagggcaacggcccggccaaaggaagaggcggccccag

SEQ ID NO: 222067 - RNA, 85 nt, Homo sapiens
gggcgagggccgaacgccagggacgagcccgcacagggggccggcggcagagaccacgcccagcaggagcggcgcaggccacgca

SEQ ID NO: 222068 - RNA, 51 nt, Homo sapiens
gcccaacccccaccccgcccaaggaggcccagcgggacaaggcccaggagg

SEQ ID NO: 222069 - RNA, 68 nt, Homo sapiens
cgccagggagcagcaggacaaccgccaacacaccaggagagaaagacaaagaaacgggccacaggacc

SEQ ID NO: 222070 - RNA, 70 nt, Homo sapiens
ggaaaggcaccaggacaagcaaaggaccgacggacgaggcggcaccgcagaggaagagcaaagcaaacac

SEQ ID NO: 222071 - RNA, 87 nt, Homo sapiens
cgcagggaggagcgggacaccccggaagcgggaaaggccggcgcggaagaggccggcggcgggacggccccacgggacccgccccga

SEQ ID NO: 222072 - RNA, 73 nt, Homo sapiens
acagaggagcacgccaacccaaccggggcggacggcagagggcccccaaaagcagaaacagcgcagacaaaaa

SEQ ID NO: 222073 - RNA, 84 nt, Homo sapiens
aggcggcgcagcgggcagcgggcagggaggcagaggccaaccgacggcaccacgggacacagacgacgccaggacggcaaggcg

SEQ ID NO: 222074 - RNA, 49 nt, Homo sapiens
cccaccaggagccagggaggacgaagaaaggacgccgccagccaccggc

SEQ ID NO: 222075 - RNA, 75 nt, Homo sapiens
ggacggagggggcccagaagcggggacccgagacgcaagccccagcgaccccaagcaaaccggggagacaacagg

SEQ ID NO: 222076 - RNA, 75 nt, Homo sapiens
cgcccagcagggagcggaggagccagacagggacagcagccacgccgcaacaaccgcgagacagggaagaaaaaa

SEQ ID NO: 222077 - RNA, 68 nt, Homo sapiens
aagaaaccgcagacacaggaaaggagagcaaccgccgagagagaggaaggccagccgagaaacagaca

SEQ ID NO: 222078 - RNA, 79 nt, Homo sapiens
gccgagaagcgccacaagaacagcgacaccgcccccgccagccagaaggccagggaaacccggacaagggcgccccccc

SEQ ID NO: 222079 - RNA, 79 nt, Homo sapiens
gcgcacccaacacgccccacgcggccgggccccagcccgccagcgcaggggaaagaaccagacgacaggaaggcacaga

SEQ ID NO: 222080 - RNA, 46 nt, Homo sapiens
aaaggggcaggagaaagagagaacgaagaagagagggcgaaggagg

SEQ ID NO: 222081 - RNA, 81 nt, Homo sapiens
cgaacgagcgacggcggaacccggggccgggacgcagcccggcggcagcagacagaccaggaccgccgggcaggacacgcc

SEQ ID NO: 222082 - RNA, 82 nt, Homo sapiens
gcgcaggaggaaggcgccgcgcgggacccggaggaccgaccccagcccacgggcacgcagggggacgggcagaggggcccgg

SEQ ID NO: 222083 - RNA, 71 nt, Homo sapiens
gccgaaacagaaaacaagagaccacagaagcagaaacaacgcgagagcccccaagggaccgagcgccagag

SEQ ID NO: 222084 - RNA, 75 nt, Homo sapiens
ccggcaacgcccaaccggccagagcccacggcagcgccggagacaaccagggagacaagagccccggggcggaaa

SEQ ID NO: 222085 - RNA, 62 nt, Homo sapiens
gaccgcgcgccggagccccagggggagaggcaccagcaacagaccaaccgcagcaagcacag

SEQ ID NO: 222086 - RNA, 63 nt, Homo sapiens
gcgcccgcgacagaggagggaggaaaacaaccgagggcagagacagcccagagcaagcacacg

SEQ ID NO: 222087 - RNA, 74 nt, Homo sapiens
gggcccacaggcgccgcacacgcagcagaagaagacacaaccaaggcgcacccgggaccgggccgcgccggagg

SEQ ID NO: 222088 - RNA, 72 nt, Homo sapiens
aaagagcagcaggagacaggaggaccgggggaaagcaaaaaaaccaccccaaggagcagacaggaggcagga

SEQ ID NO: 222089 - RNA, 72 nt, Homo sapiens
agagggaaacagggaaggcaggcagaagggcaaagacgagaggcgaagcaaggacagcaccggcccaggcgg

SEQ ID NO: 222090 - RNA, 70 nt, Homo sapiens
gaagagggaaacagccacaaggcaaaagagccgggaacaacccaggggaaccaggggaccagcagggcag

SEQ ID NO: 222091 - RNA, 62 nt, Homo sapiens
acccaagagggaaccacccccaacaaccagggcaaaagcaggggccaccacccccggaaaga

SEQ ID NO: 222092 - RNA, 75 nt, Homo sapiens
acgagccccagggcgcccaccaggggacgcccagacacagggccgcaagcagggggaacacccgcccagccgccg

SEQ ID NO: 222093 - RNA, 80 nt, Homo sapiens
cggagcaaagaaaagagcccacaaggaagaacaaagacgagccagacccccagaggacaagaacaaggaaaacaagagaa

SEQ ID NO: 222094 - RNA, 52 nt, Homo sapiens
aacaccaggagaaaccgaaagcaaggcacaggaagagggcggcacgcggcca

SEQ ID NO: 222095 - RNA, 77 nt, Homo sapiens
gcgccgcgagccgcccaccggcgccacgcaagggcgaggcagccccaaacaccgccgccagaccaccagaggagacc

SEQ ID NO: 222096 - RNA, 90 nt, Homo sapiens
gggaccaggcgaagcggccgagcaggcgagcgaacgacggaagcaggagcggccaacagccggagcgaccccccagaccggccgcccccc

SEQ ID NO: 222097 - RNA, 66 nt, Homo sapiens
ccaaccaggcccgagacaaaaagggggaaaaacaacccccagaccaccccccgagccacaccgccg

SEQ ID NO: 222098 - RNA, 79 nt, Homo sapiens
gcgcgccccaccacccaaccgccaccggcgacagagaccgggggcacccacccaacgacagggcagaccgccagcagca

SEQ ID NO: 222099 - RNA, 60 nt, Homo sapiens
ggaagaagggaagggaaaagagccgggaacaaggggaaaaggagggagcgcccaggcgcg

SEQ ID NO: 222100 - RNA, 53 nt, Homo sapiens
gagcagccagcggacgagcgaggacaaacaaggcacaacgaccgaaacgcggg

SEQ ID NO: 222101 - RNA, 79 nt, Homo sapiens
gagcgggagcgcgcgcggcgcggcggccgggccccgagacggggacggaaggcccgccgaaggagaagggcaggaagac

SEQ ID NO: 222102 - RNA, 69 nt, Homo sapiens
ggacagccgcacccgcgccccagcaggcgaccggcccgaggaccgccgcacgaccaaacgcagaaccca

SEQ ID NO: 222103 - RNA, 74 nt, Homo sapiens
gaggccccagcccgggccggccaacgagagagcggcaagacccagcgggagcagcgagaccaacagccgcgcgg

SEQ ID NO: 222104 - RNA, 74 nt, Homo sapiens
cgcagacgcggggccaggggccaagacgcaggagagagagacgccggaagaaagaaaggagacggaagcaacag

SEQ ID NO: 222105 - RNA, 61 nt, Homo sapiens
acccaccggccccggaccgagggagcccaggggagcaaggagaccgagaagcaaagcgccg

SEQ ID NO: 222106 - RNA, 76 nt, Homo sapiens
agcaacaaaagaagaggcaaagacccaggaaagccaacaaggagagccgccagaacgagcacagccagcagaacaa

SEQ ID NO: 222107 - RNA, 87 nt, Homo sapiens
accgagccgcgaggacacgggcgcaaccgcagcacacagcgaccgggagaacaagacggagacacgggaagccgaggagaaaagaaa

SEQ ID NO: 222108 - RNA, 70 nt, Homo sapiens
cacgcaagagaaacaggcacacaagggaggaggcaaagccagcaaggcagcaagccgcggggccccaacc

SEQ ID NO: 222109 - RNA, 72 nt, Homo sapiens
caccgaacagacccggaaggacggcgagggcagggaaaaaccaggacaaaaagcaaaggacggcgcaaggag

SEQ ID NO: 222110 - RNA, 71 nt, Homo sapiens
gggaccgaccgcaacagaacggacccgggcgcaggaccggcccagaagccccgccgccacgccaaaaccca

SEQ ID NO: 222111 - RNA, 67 nt, Homo sapiens
ggcgccgggggggaaaccagaaggaggaacagagggcgcagagacaaggaagggaagcggagaaaag

SEQ ID NO: 222112 - RNA, 73 nt, Homo sapiens
acagaagaggagaaagagaggaaggaggcacagagcagggagcgcgccggaagaagacgacaagccccacccc

SEQ ID NO: 222113 - RNA, 75 nt, Homo sapiens
gaccaccaggcagaggcaacagaggagcaacaaggaggacccaggaccacccccacccccaacagggaaaccacg

SEQ ID NO: 222114 - RNA, 75 nt, Homo sapiens
ccaaggaagcgaggagcacacagagaaccgcggaaacaggagcggcacacggagagccagcagggggcgaggagg

SEQ ID NO: 222115 - RNA, 66 nt, Homo sapiens
gcccggcgccccgagccggccgagcggcgacggaccgcgaggaacaggaggcccggacccccagca

SEQ ID NO: 222116 - RNA, 75 nt, Homo sapiens
cgcaccggaagcaccagcgaggaagaagaaagaaacccaggcaccaacaggaaaggacagccaggaggagccaaa

SEQ ID NO: 222117 - RNA, 43 nt, Homo sapiens
caaagcaggagagacccgccagaaaccccaaggcgcagacacc

SEQ ID NO: 222118 - RNA, 75 nt, Homo sapiens
ccagccgggccaaggaaagaagggaaaccagacgaaacaacagccaaagacaaacagcacaacaaacaaccggaa

SEQ ID NO: 222119 - RNA, 69 nt, Homo sapiens
gaaccacgaagagcagaggcaacgaccaacagacaagacacgaaggccgagccaagaacagaggcgccg

SEQ ID NO: 222120 - RNA, 38 nt, Homo sapiens
gacagacccgacgcacaggaacaagaaagcggcaacaa

SEQ ID NO: 222121 - RNA, 79 nt, Homo sapiens
gaggcggcggacaggcgacagcgaccgcggcaggccggagagacacagggccgccagaagcgacagccccgacgagagg

SEQ ID NO: 222122 - RNA, 80 nt, Homo sapiens
gcaaaggcacagcccccacaccaagcccgccaggccgacaggacggcccgcacaaccaccgaagcaggccgccacagccc

SEQ ID NO: 222123 - RNA, 68 nt, Homo sapiens
acggggaaccgccgcccaggcgcagccgggcccgggaggagcaggggcagaggggagaacccagccgg

SEQ ID NO: 222124 - RNA, 77 nt, Homo sapiens
ggaacgcaaggcccccgaccacacgcccgcgcgaggacagcccagagcaagcacacggaggcccgggagccagaccg

SEQ ID NO: 222125 - RNA, 72 nt, Homo sapiens
gaagcaccagggccccaggcagcagaacgcccacagagcggaagaagagccgccccacacgcagaaaaggga

SEQ ID NO: 222126 - RNA, 79 nt, Homo sapiens
caaagcgaccacaacgagaaaggaacagggggaggaagagcagcaaacaagccagccaaccgaaaaagcagcaagaaaa

SEQ ID NO: 222127 - RNA, 83 nt, Homo sapiens
ggccggggaagggccaggccgggcagccgccgacgagcaggacaacccccaagaaagggagcccagaacgaaacaacccagca

SEQ ID NO: 222128 - RNA, 88 nt, Homo sapiens
accggaaaaacaacaacggggggcagcagcgcgaagacagcaaacacgaaaacaccacaggacgaggccacaagcacagaggcacaaa

SEQ ID NO: 222129 - RNA, 71 nt, Homo sapiens
agaggagagacgaaacaaagaagcaaggaccgggaaacaaaaccacagagaagcaggcgaccaggcgcgcg

SEQ ID NO: 222130 - RNA, 78 nt, Homo sapiens
gagaaaaagagcagaaggcacggaggacgcagcaacagaggagcggccacgaaaacgagaggacaggacaacaacacc

SEQ ID NO: 222131 - RNA, 75 nt, Homo sapiens
gccaggaggccgaccccccggagcaccaggccaagaaccccaaaaacagcagcagaaaccaggacagaaggagaa

SEQ ID NO: 222132 - RNA, 60 nt, Homo sapiens
acacagcgccaccccgagcagcggggaagcggcaagccacagccaggaaacaccagcccc

SEQ ID NO: 222133 - RNA, 57 nt, Homo sapiens
cagccgggcagccacaagcggccagggaaggcccgccgaaggagaagggcaggaaga

SEQ ID NO: 222134 - RNA, 101 nt, Homo sapiens
agaggaggaggcggccggccgagcacaggagggccgaggaacgcaggaccggaaagccccacaaacgcagagccccgcccagccccgccgggcccacaggg

SEQ ID NO: 222135 - RNA, 70 nt, Homo sapiens
ccggcgagggcgcgcggcgggccgccccgcccgaaagcaaagggcgagagaagcagcgcagaaaaaaccg

SEQ ID NO: 222136 - RNA, 77 nt, Homo sapiens
gccggccacaacccggcggagccgccgcaggcagaccagggccagagcaccagaccagcagaggagcgccgccaggc

SEQ ID NO: 222137 - RNA, 55 nt, Homo sapiens
caaagacgccaaggagaaggcagaccggcaacccgagcccggggccaagaggaaa

SEQ ID NO: 222138 - RNA, 81 nt, Homo sapiens
cccaaacccggaaacccagcggcccagccgggaacccagcagaagccagccgccacgccgagccagccagcaccaaccaac

SEQ ID NO: 222139 - RNA, 42 nt, Homo sapiens
gaacacgccaaggaggggcagggagacgaggacgcgcacagg

SEQ ID NO: 222140 - RNA, 72 nt, Homo sapiens
cagaggacccaagaaaaacaagcggcacgagcgggagagaggagacgggaacgcgagccaaaggccaaagaa

SEQ ID NO: 222141 - RNA, 74 nt, Homo sapiens
cagaaaccaagccaacaaaagaagcgccgcaggggcccagaggccagaaggagcagagccgagacgacgcagac

SEQ ID NO: 222142 - RNA, 76 nt, Homo sapiens
agcagagccgccggggagggagccagaagcaacgaggccccaggccacgagaccggagcccagccagcacacccag

SEQ ID NO: 222143 - RNA, 72 nt, Homo sapiens
agacaaaaccaagccaaacacaagcagaaggagcgaagaagaggagagcaacaggggccagagaagaagcag

SEQ ID NO: 222144 - RNA, 84 nt, Homo sapiens
acgacaccaagaggggaagagagcacaggagaagcccaggcgcaccacgggaggccaacagggaagaaaaccccggaaagccaa

SEQ ID NO: 222145 - RNA, 74 nt, Homo sapiens
aaaacaggagaaaacggagaggaacagggaaaagcccgcagcaaaagaaacagaacacaagagacggaaaaccc

SEQ ID NO: 222146 - RNA, 60 nt, Homo sapiens
ccaagccccagcagaacgagaccccgcagagacaaggcgccagcgaacgggcgaaccgcg

SEQ ID NO: 222147 - RNA, 55 nt, Homo sapiens
agaaaaaagagcagcgaggcgaaagcaaccacaggcacgggccacagagacgaga

SEQ ID NO: 222148 - RNA, 70 nt, Homo sapiens
gccaaggaaaaacggagagccacaaaaaaggaagcgaaacggagcagaccaccgcccagcaaaaagcggc

SEQ ID NO: 222149 - RNA, 76 nt, Homo sapiens
aggaaaagagccaaagcacaggagggaagacagcaaaagagccacaaggaaggaggggaaaggggacaaggaaaag

SEQ ID NO: 222150 - RNA, 82 nt, Homo sapiens
gcacggacgcggagaggggagccgcaacggggagcaggccggggagggagaccaagagcaaaaggagacaggagcacacaga

SEQ ID NO: 222151 - RNA, 78 nt, Homo sapiens
acggggacaacccggaagggggaacgagaggaaaggcagcaacaggggaagcggagggaggcaaagaagccaaaaaaa

SEQ ID NO: 222152 - RNA, 74 nt, Homo sapiens
cggggccagcgccgcgggacacgaaaacacgagacccgccgggagggccgaacaggggggaacgacaaacaagg

SEQ ID NO: 222153 - RNA, 72 nt, Homo sapiens
gccaaaacacagcgaggagaaacagaacacagagccagagaaaaaaaacacagaaaggcccaagaaaccaca

SEQ ID NO: 222154 - RNA, 79 nt, Homo sapiens
gaccacgggagcagcaaccgggcgccagcccccaggaggaccgacgaacccccaaggcacggggcggagcgcaggacga

SEQ ID NO: 222155 - RNA, 82 nt, Homo sapiens
ccggggccggcggggggcgcgcccggcagcccgccacagccacgggacacggccaacacgggaaggaaaagcgggaggaagc

SEQ ID NO: 222156 - RNA, 75 nt, Homo sapiens
gacaaacacgacggacagagcgaagcgaccaagcagaaggacgacacagcaagcaaaagacaacagaacaaacag

SEQ ID NO: 222157 - RNA, 37 nt, Homo sapiens
cccagggggacgaggaagccgccaggagcaaggcagc

SEQ ID NO: 222158 - RNA, 68 nt, Homo sapiens
agcagcggcccggggacgcagggcccgggcagcagacaccccgggaaccacggcccggccccgggcca

SEQ ID NO: 222159 - RNA, 73 nt, Homo sapiens
gggacgcagacaccagaggaccggccgagcagccagacccacccagcgaacaacgccagacacgggcacccag

SEQ ID NO: 222160 - RNA, 54 nt, Homo sapiens
agacgagcgccagccgagcaagagcaacaaggacaggagcgaaggaaaaaacag

SEQ ID NO: 222161 - RNA, 61 nt, Homo sapiens
gccacgcccccgggccgacgccagaagacaaagagccaagaaacccaggacgagagagagg

SEQ ID NO: 222162 - RNA, 83 nt, Homo sapiens
ccagggggaaccaaacccggcagagcggaaaacgccagcggacaaaagggacgcgcggagaccgaacacgcacagacgggacg

SEQ ID NO: 222163 - RNA, 85 nt, Homo sapiens
cacagcagagaccaaaggcagggcaaggaaacggccacaagccccgagccccggccccaaagacccaaaacagagacacccccca

SEQ ID NO: 222164 - RNA, 73 nt, Homo sapiens
gcccaccagccaagaacaaagaaacggacaacaaaacaacggacacccccgggaacccaccaaaaaggacacc

SEQ ID NO: 222165 - RNA, 74 nt, Homo sapiens
acgccagagcccagggcccagaggaccccagccgcgcccgggagagcaagagagcccaggaccacaaggagagc

SEQ ID NO: 222166 - RNA, 68 nt, Homo sapiens
gaccgcagcgagggaccagcgaaaagcagcgaagagcccagcgaggcaccgccacagaggcgcacacg

SEQ ID NO: 222167 - RNA, 86 nt, Homo sapiens
cgggagcaggaggacggaaccagggccaggcgaggaccaacccaccccgcagggcgcaagagaaaacaaaagcaagaaaaggcgga

SEQ ID NO: 222168 - RNA, 71 nt, Homo sapiens
gggaacagcaaaacaaaggacaagaacgaacggcgacaggggcaagaaaagaacgcagacaagaaaacagc

SEQ ID NO: 222169 - RNA, 82 nt, Homo sapiens
acgcgaaggaacggcaaagcggccaccacggcacaccacaaccagccccgaggaggaaaggagcgcaacaaggaccaccagc

SEQ ID NO: 222170 - RNA, 83 nt, Homo sapiens
cgccgacgcgggcaccggagccagccccgcagcgggaacccgagccccccaaaccaagccagcagcccccccccacgcacccc

SEQ ID NO: 222171 - RNA, 79 nt, Homo sapiens
ccagcacaccagcgggccaaacacagccaccgcagagccggaagacagacaaaacgcagcaggagagcgcaccgaggac

SEQ ID NO: 222172 - RNA, 69 nt, Homo sapiens
aagcccagaaaagaaagaacaaccgggaaaagacagacagacccagaagagccaccaccgagaagagcc

SEQ ID NO: 222173 - RNA, 75 nt, Homo sapiens
cggaaggaccaggcggagagcaccacaacggaggagaaagccaggaagcaccgccgcgagcagggggcacaagga

SEQ ID NO: 222174 - RNA, 74 nt, Homo sapiens
accaggcccgccgcagagaggagaaagcaggagaaggaagcgccggccaaacgagcacagcaaacgcgaaagag

SEQ ID NO: 222175 - RNA, 77 nt, Homo sapiens
gcagcgagggcccccagccagcccgacagccgcaaaacgaagggaccacagaccagcacgccggcgccacgaaccga

SEQ ID NO: 222176 - RNA, 78 nt, Homo sapiens
cgaagcgacgagccgcgaggaggcgacacaaggccaacggacacacgggcagcgcccgacagagcgcccgagggcagg

SEQ ID NO: 222177 - RNA, 38 nt, Homo sapiens
agccgcacgcagcagccaagacccacaggaccgcgaac

SEQ ID NO: 222178 - RNA, 75 nt, Homo sapiens
ccccccagccccagagcgggaacaggcacgcgccaccacaccggagaggaaagggcagaacaagcgaaaaaaaac

SEQ ID NO: 222179 - RNA, 74 nt, Homo sapiens
acaaagagcccaacagaaagagccagagaaagcacacgcagccagaagcaacaagagaagcagaaaaacagaca

SEQ ID NO: 222180 - RNA, 59 nt, Homo sapiens
cggcagcgacgagaaccggacagcgacggaaaaccggcagcaggagaggccacgccagg

SEQ ID NO: 222181 - RNA, 84 nt, Homo sapiens
cacaagccagaggccaacccaggaaggaacccagccagccggcggaagcaagcagcagaggaagcggaggcggggccggcagac

SEQ ID NO: 222182 - RNA, 78 nt, Homo sapiens
cggggaggaggcggggcccgcggaggagccggagaacaggagagggaaggcaaaacaacccgcagggcacacgcaccg

SEQ ID NO: 222183 - RNA, 73 nt, Homo sapiens
agacccacccccaccagaggagaaccggaaggcagagaaaaggaaggcccgccgaaggagaagggcaggaaga

SEQ ID NO: 222184 - RNA, 85 nt, Homo sapiens
ggcggcccaggcgcacaccgcgggcgcacccacgacgcgcacaccaccggcagaccggcgccacagcaccacccgacggcagcgc

SEQ ID NO: 222185 - RNA, 79 nt, Homo sapiens
gccccggcccgcggggcgcgggccgccagcccggcaccgcccccccccgcgaggcgccgcgaggccgcggccaggccga

SEQ ID NO: 222186 - RNA, 79 nt, Homo sapiens
ccgggcgagcccggagaagaggaaggacccaaggccagccagccccaggcaccagcggacaggacagggaggacgaagg

SEQ ID NO: 222187 - RNA, 72 nt, Homo sapiens
caccgccccagaaagccccagacggaaagagcacgcgaggaagcagagccccgggccgggaaggggaaacgg

SEQ ID NO: 222188 - RNA, 82 nt, Homo sapiens
agacccccaggagcaggagccccagggcaagaaaagcacccccggacacggagaacaaggggcgggaaacagagaaaggacg

SEQ ID NO: 222189 - RNA, 81 nt, Homo sapiens
ccggaccgagagcggaccgagagcgcgaaacgcacgagaagagacaggaaaaacgggccgagccaagagaaaaggacaccg

SEQ ID NO: 222190 - RNA, 57 nt, Homo sapiens
caccaaaaagccgggaacggagacccccaggcccaggcgggaagcaggggacgaccc

SEQ ID NO: 222191 - RNA, 119 nt, Homo sapiens
cccggggacgccagcaccagcaggagcagccaaccagcagcagccacaggaggcagagaaaaccgaaggagcaagagcggcggccacaaaaccccgaccggcggaggagaagaacaaag

SEQ ID NO: 222192 - RNA, 75 nt, Homo sapiens
agcagagcagaaaccgggggcccacaacagaaacagaccccgacagaagaaggaaggcaccagaccagaaaccga

SEQ ID NO: 222193 - RNA, 68 nt, Homo sapiens
ggaaccggaggagaagcccagggagcgcaccccaggaaaccagccgaaacagaggagccgacaaagaa

SEQ ID NO: 222194 - RNA, 70 nt, Homo sapiens
gacgaaaagccggacccaggagaagaggggagagggaccacacagaaacggaacaagcagaaagcacgaa

SEQ ID NO: 222195 - RNA, 84 nt, Homo sapiens
cagccgggacacagaagaaaagagcaagggggaaagcaagagaccaggcccaggaaggaacgaggaagggccagaacggagacg

SEQ ID NO: 222196 - RNA, 79 nt, Homo sapiens
gaaaaaaccaagggcggaacaaaggaaacaggacccaaagacaggaccacgcaccagcagagaaggaaagcaaaccgaa

SEQ ID NO: 222197 - RNA, 73 nt, Homo sapiens
aagacaacaggcgaagaagggaaacgaggaagggcccaggacagaaggcgggcaaggagcgccccccgagcac

SEQ ID NO: 222198 - RNA, 103 nt, Homo sapiens
cggccaacaggggggaaagccaacacaccacagccacagggcacgccacagaacagggaccgaaaagcccgccgggaccgagagaccagcccgaccgagcggg

SEQ ID NO: 222199 - RNA, 67 nt, Homo sapiens
gggagaggacaagaccacgagccaggcacgggacccgccggagccagagaaccgcagggccacagga

SEQ ID NO: 222200 - RNA, 68 nt, Homo sapiens
agaagaggaccgaaggaccacaagcccaagcagccacaaagacaccaaagcaaaaccggacacaagag

SEQ ID NO: 222201 - RNA, 78 nt, Homo sapiens
cgcagccgcggcccggagccccggggcggcggacggccgcgggcagggcggaagagcgcgggaggggaggccaccaag

SEQ ID NO: 222202 - RNA, 53 nt, Homo sapiens
gaccgcacagacgaaagcaccacagccaccaccaccacagacagagggaagag

SEQ ID NO: 222203 - RNA, 65 nt, Homo sapiens
ccacgcagaggcgaagacggggagccacgaggggagcagaccccgcccagggaacgccacaccgc

SEQ ID NO: 222204 - RNA, 79 nt, Homo sapiens
acagcagaaacaaagaagcagcgcgaaaggaggaacaagggcgaaccaccagcacagcagcagcggcggccaaggacag

SEQ ID NO: 222205 - RNA, 78 nt, Homo sapiens
gaacagagagacagccagcccagaccacggcggagaaaccaccacaaacacgaggccagcaacgaccaacaagacaga

SEQ ID NO: 222206 - RNA, 75 nt, Homo sapiens
acagagagacggcagccgcgacagacacaccacgggaagaacccccacagccgccggagcaggagggaagagaga

SEQ ID NO: 222207 - RNA, 76 nt, Homo sapiens
ccggaccagccaagccccaacggcccccgcgccgggcgcagcggggaaaggcagggccccgaagagacagaacaga

SEQ ID NO: 222208 - RNA, 121 nt, Homo sapiens
cccggggcgcggagggccgagggagggccgagccagccgcggccggaggagcccccaggccggcgaaccgaccaagaacaacacccagagggccaggagaaggcgaagagagcagcgacca

SEQ ID NO: 222209 - RNA, 70 nt, Homo sapiens
acggagcccagcagaaaaagggaaggagccgaacgggacccaccagggcgcaaccccaagacacagaaag

SEQ ID NO: 222210 - RNA, 80 nt, Homo sapiens
aacaacgagagagccgaggagccagagcaaggggaacgccacggacgggagcggccacggagacggcggccccagaccgg

SEQ ID NO: 222211 - RNA, 84 nt, Homo sapiens
aagggagggcgacgagagccgaagcagaggccaagaccaaccccaggagaggagacgccggagcgggacgaccagagaccgaga

SEQ ID NO: 222212 - RNA, 82 nt, Homo sapiens
gaccacacagagagaaaaacacccagagaaacaacagaggccaaacgcgcagaaaccgcgggacccgcggcagagaaggaag

SEQ ID NO: 222213 - RNA, 74 nt, Homo sapiens
aaagaggaacacagaacggagacccggcaaaccaccaaaccgcaacaggaaagaaagcaagacgccacaaggga

SEQ ID NO: 222214 - RNA, 76 nt, Homo sapiens
ggcgcgccccccccggcccaccgaccccaacgcagacacgaaggaagacacacgcaaaaagggacaccccccaagg

SEQ ID NO: 222215 - RNA, 52 nt, Homo sapiens
ggccaaagaagggagagaggccccggaccagacgagcacagaccaaccaggc

SEQ ID NO: 222216 - RNA, 67 nt, Homo sapiens
gaaaacgggaggacgcacccggggaaccagcaaacaaggacaggagagacaacggaggcaagaaaga

SEQ ID NO: 222217 - RNA, 58 nt, Homo sapiens
ccggacaagggcagccccgcggacacagcgcgagaagaagcagaagaaacgaggagac

SEQ ID NO: 222218 - RNA, 66 nt, Homo sapiens
cacccccaccggagacccacaggaccgcgaacaaggaggccacaaaacacccggacccaccagagc

SEQ ID NO: 222219 - RNA, 77 nt, Homo sapiens
aagcaaacaaaaccagacacgcaacgaaccaggacgcgagaaaggcgaggaaaagaagagccaggaccaaggaaacc

SEQ ID NO: 222220 - RNA, 75 nt, Homo sapiens
caagcagcccacccgcagccacgcaccgaccacgaacccaggagaaacgagagggacagcaaggaagacgccaga

SEQ ID NO: 222221 - RNA, 72 nt, Homo sapiens
aacaccagaggaccaacgaaagagacgcacaagaaccaaacagaagaggccaccaagcgacaaagagcccaa

SEQ ID NO: 222222 - RNA, 76 nt, Homo sapiens
agggggcagaagcgggggccccacccccaaagagcagccccagaaccgcagagacagcagcccgcgcccaggaggc

SEQ ID NO: 222223 - RNA, 61 nt, Homo sapiens
cagcggcgcccccgccacgaaaagcaacgcacccgcccccaaagagagaagcggaccacaa

SEQ ID NO: 222224 - RNA, 59 nt, Homo sapiens
ccgaacacacggacacgcggcgccacgggccagacaggggcagcggccaggcacagcaa

SEQ ID NO: 222225 - RNA, 75 nt, Homo sapiens
cggacaaaggaacaggaccagcaacagcgcacaacacagaaagaaaaacagagacgaaaaacggcaaaaccacag

SEQ ID NO: 222226 - RNA, 64 nt, Homo sapiens
gcgaggcggcgcggcagcggagggacggcagccgcgcgacgggaacgccaggaaccagcaagag

SEQ ID NO: 222227 - RNA, 84 nt, Homo sapiens
gacccggagacagcccaaaacccggaagagcgccccaggagaaacaagagaaccacagagagccgaggaaaaccagcggaaccc

SEQ ID NO: 222228 - RNA, 80 nt, Homo sapiens
accgaccggggaccccgccgaagaggggccgacgagaagaacaggaacaaccgacacccggaagaaagagacagaggcca

SEQ ID NO: 222229 - RNA, 76 nt, Homo sapiens
acacacacaggccagaggcacggaaaaggggaacgggaaaggcgcagagaagcacaggacgagaacccccgcgaac

SEQ ID NO: 222230 - RNA, 71 nt, Homo sapiens
caggagcgccacgcgcggaaggcagcgcccagcagcgcagaaaccagggcgaaggacgaggaccgaaaaag

SEQ ID NO: 222231 - RNA, 72 nt, Homo sapiens
caggaaacgaaaccagggcaaaacaccacccccccacaggaaacagagcaagcccaggccccgaaaggcagc

SEQ ID NO: 222232 - RNA, 66 nt, Homo sapiens
cgagagaggcaggcggagccgaccgggccaggaaaagccaagaaagacccaaaagaccccagacca

SEQ ID NO: 222233 - RNA, 71 nt, Homo sapiens
aagaccaccccccagaggccgcgacgacccccagacccacaggaccgcgaacaaggaggccacaaaacacc

SEQ ID NO: 222234 - RNA, 76 nt, Homo sapiens
aaaaagagcagcgaggcgaaagcaaccacaggagaaagacagcaaagaaaaggagaagaaaggaaaaaaacaaccc

SEQ ID NO: 222235 - RNA, 69 nt, Homo sapiens
gaacagaaggcgcggccgaaaaagggaaacccagacgacaaggaaggccaagggacccacgaccaacca

SEQ ID NO: 222236 - RNA, 70 nt, Homo sapiens
cccggcaccaggaccaccgcggcagcacgcggcgcggggggagaagaacggagagaaccaaccaggagcg

SEQ ID NO: 222237 - RNA, 96 nt, Homo sapiens
gggccggcggaacccgagcggggccaccgggaagacagccgccaccaggcgcccccccagcaaccacccacagacccgagacaggacggaaccagg

SEQ ID NO: 222238 - RNA, 45 nt, Homo sapiens
gaccagcccaaggagagaagaagcagaccaagccgcaggccaccc

SEQ ID NO: 222239 - RNA, 84 nt, Homo sapiens
aggagacaagaaccggcccgacgaccccacccgcaaaaccaaagcccgcgcagagggccagacaaggggaacacaagaggagag

SEQ ID NO: 222240 - RNA, 71 nt, Homo sapiens
cacaaaccagacaacccggacagcaaggagaaaaccggaagagaaaggccgggaagcaggaaagaaaaaaa

SEQ ID NO: 222241 - RNA, 74 nt, Homo sapiens
ccgagacaaaggcaccaggccaccacagaaacaaaagcaacaaagaggaaccacacgggaagaccaacaaaggc

SEQ ID NO: 222242 - RNA, 71 nt, Homo sapiens
ccgaccccccggcgccgcgccggcggcggcgacgccggaccgcgaagagacgagaggggcacggaagggga

SEQ ID NO: 222243 - RNA, 69 nt, Homo sapiens
cagcggaagaggggcgagaggaacgccccccgggcggcggggagggagggagcgaggcggccagggccc

SEQ ID NO: 222244 - RNA, 82 nt, Homo sapiens
caaacacccgggaagacacacacaaggagaagggagcgaacgcggggagccgggggagccacagacgcacccaacaaaacac

SEQ ID NO: 222245 - RNA, 75 nt, Homo sapiens
ggggcgcgcccagagccccgcgcagcccagggaagggcagcacaacacaggcggaagaaagacgcacggaaaaac

SEQ ID NO: 222246 - RNA, 84 nt, Homo sapiens
caggaagaaaacaggagggagaaaagacgaagagaaaagcggagcccaggaaaggcacgccgaaggaggcggcgacgcgaaaag

SEQ ID NO: 222247 - RNA, 76 nt, Homo sapiens
gaccacccagagggaaacacacgcacagaaccggggaacaggcacaaaaaaaccagcggacaaccaggaaacccca

SEQ ID NO: 222248 - RNA, 56 nt, Homo sapiens
gcagaccgcagccaaggcccgggaaaaaaaaggagaaacaaccaaaacgaagaaaa

SEQ ID NO: 222249 - RNA, 81 nt, Homo sapiens
agacgaaagaggacagacgccgaccaaacggggacgagacgggccgggcgcaaccacacggcgaccgggcaaaaggggccc

SEQ ID NO: 222250 - RNA, 37 nt, Homo sapiens
gcagccccccgccccaaagcagcggccaggcggccgg

SEQ ID NO: 222251 - RNA, 78 nt, Homo sapiens
gggccgcaggaagcccccgcggaccgaaaggcaaaagaaaagacggcaaccaacacacgcagagagacggcacacaca

SEQ ID NO: 222252 - RNA, 75 nt, Homo sapiens
gccgggaagccgaccgccagaaaccccccgaccaggccacagccggggggggggagcacgggaggcagcgacagg

SEQ ID NO: 222253 - RNA, 72 nt, Homo sapiens
ggccaaagccgcccagacggccaccggcgggaggaacaaaagcgaaccagaaaaggaaaacgggaccaacgg

SEQ ID NO: 222254 - RNA, 103 nt, Homo sapiens
aaaggaggaggaaccggagaccccgaaaacggaagcgcagggagaaggaagaggggaaaaggggcgcaacgccggagcgggggaaccgacgcccagccgagag

SEQ ID NO: 222255 - RNA, 80 nt, Homo sapiens
cgcccaggaagccaggcgggcaccaggcccgacaccagaagcagaagaaggacaccccacaccgaaacagaccccagaga

SEQ ID NO: 222256 - RNA, 52 nt, Homo sapiens
cggcaaagccacccaggaaggcagacagacaaccgagcacaaaaaaggcacc

SEQ ID NO: 222257 - RNA, 69 nt, Homo sapiens
agccaaagcagcagccccgacagccacggaacagacagcgaacccacccaacacggcaaaacaaagaca

SEQ ID NO: 222258 - RNA, 80 nt, Homo sapiens
gaggacccgcgccggagacaagggcacacacgcaccagaagaagagaaagagccgcagacgcacagcaaccaccggaccc

SEQ ID NO: 222259 - RNA, 76 nt, Homo sapiens
acaagaccgggagggggacccccggcccagggaccagcaccgggaacaccagagcgagcacgaacgggacccagcc

SEQ ID NO: 222260 - RNA, 78 nt, Homo sapiens
gggcggcccggaccgggagacacggccagacgcccccagacgagagaggagcgcgggccgagagcggagagcgggacg

SEQ ID NO: 222261 - RNA, 66 nt, Homo sapiens
acggaccaagcaccagggaagcagagccccgggccgggaaggggaaacggccacgcaggaaccaca

SEQ ID NO: 222262 - RNA, 59 nt, Homo sapiens
gaaagcaaagaaacaacgacccagaaccgaccgggcagaccaacacggaacagaaagaa

SEQ ID NO: 222263 - RNA, 56 nt, Homo sapiens
acccccccagcacaccaccagcaagacccagcaacacccagcggaaagccgccacc

SEQ ID NO: 222264 - RNA, 85 nt, Homo sapiens
accggaacggacagcccccccaggcagaaggaacgagggagcacggagggaaaagaagccgccgacccccgccccagagagccag

SEQ ID NO: 222265 - RNA, 71 nt, Homo sapiens
cagcgccagcacggcaggagaggagccaagcccaacgggacgggaaaacggccacagccaacgacgcagca

SEQ ID NO: 222266 - RNA, 85 nt, Homo sapiens
aagccacgagcacacccgcagacgcggggaggaggaggaggaagggagcggcagcaggaaggagaccccccgccacgaaggcagc

SEQ ID NO: 222267 - RNA, 76 nt, Homo sapiens
cggcccacgacacaggaagaagacagcaaagcgggccagacacgaagaggccggcgaaggaagaaggaccagccag

SEQ ID NO: 222268 - RNA, 77 nt, Homo sapiens
ccacggaagcaccagcgcacacaacggccgaccacggaccaagaaacagaagaaacgcaaagaggacaagaccaggc

SEQ ID NO: 222269 - RNA, 77 nt, Homo sapiens
gcgaacggcgccacgcagggccagggaggggaagaaggaggcagcagccggcaaaaagcgggagaccagggcacacc

SEQ ID NO: 222270 - RNA, 91 nt, Homo sapiens
agcaggcggcgcagacaccaacgcgggcgcgaccgggagcggaccccggggcgaccccgcacacacacccaccagccacggcagcccagcg

SEQ ID NO: 222271 - RNA, 92 nt, Homo sapiens
cgcacgcgggaccagggaccaggcgagaccggggcgccagccgggcaggggcagcgggagccggccgggcgcgccccagaccccagagcacg

SEQ ID NO: 222272 - RNA, 67 nt, Homo sapiens
cagcagagagagagcggaacgggagaaagcacgggaggagaggccagcaacagaagaaagcaagcac

SEQ ID NO: 222273 - RNA, 82 nt, Homo sapiens
cacgagggcggcggaaaaagccgccacacgccaaagacgccgcgcgcgacaaggccccaacaccaaacacagaagcaacagc

SEQ ID NO: 222274 - RNA, 70 nt, Homo sapiens
ggacggcccccaagcaccgagaggcagcaaagacagaagaggacaaaagcagccccccggggcaggggag

SEQ ID NO: 222275 - RNA, 70 nt, Homo sapiens
caaagaacaaagcagggagggacagcaacacaaggaagagcggccagccccggagggagaccgaaacggc

SEQ ID NO: 222276 - RNA, 65 nt, Homo sapiens
gaggggagaccaaagagagacagacccgagaaaccggacagcagaggaaacgagggacaacacag

SEQ ID NO: 222277 - RNA, 117 nt, Homo sapiens
gacacaccacagaacggggagacgacaaagcgacacacgcgagggagcagcacggaccagcaagccagcaggccagagagaagaacagcagaaaggaccacgagagcgaaggaccca

SEQ ID NO: 222278 - RNA, 39 nt, Homo sapiens
gcacaccacaagcagagaagggacagagcgaagaacccc

SEQ ID NO: 222279 - RNA, 66 nt, Homo sapiens
cagagcccgccgccgaccgccgcccgccacacccgccgccagccaccagaacaagcagaagaaaga

SEQ ID NO: 222280 - RNA, 75 nt, Homo sapiens
cgagaaggccccagccggcagacccaacccggagccggggacggcacacgggcgggggcaacgggaggagaagac

SEQ ID NO: 222281 - RNA, 79 nt, Homo sapiens
ccgacagagacggcggagaccccgaaggcgcaaacgacaccacccgaccgacgaagaagacacgaacaggggacgaaaa

SEQ ID NO: 222282 - RNA, 73 nt, Homo sapiens
cagcaacgacccgagcacaaggcaagagaccaaccccagccccgaaaggccaccccaggccaccagcaagacc

SEQ ID NO: 222283 - RNA, 73 nt, Homo sapiens
agaacgccggcccagccccagcggcagacggaaacgacagaagcagaggaggaacagcagaacaagcgaggcc

SEQ ID NO: 222284 - RNA, 58 nt, Homo sapiens
gacccggggcagcaggcgaccaccggggaccagccaaagaggagacgagaaagagcgg

SEQ ID NO: 222285 - RNA, 79 nt, Homo sapiens
gcagcgaggcggcgggcaggccccggggcaaaggaggacggagaggccgcccacggagcgcagagccaaccccaagccc

SEQ ID NO: 222286 - RNA, 80 nt, Homo sapiens
cgaggagcgagaaagaaaaacagggccgagcaccggagaaaacacaaacccaggagcaccacgagcagcgagaacaggga

SEQ ID NO: 222287 - RNA, 82 nt, Homo sapiens
agcggggccggacagccgggcaaaggcccccggagacagaggccccccggacagagagcacagcaaggaggaaacagcaagg

SEQ ID NO: 222288 - RNA, 79 nt, Homo sapiens
cggccgcgcgccgccggcgaaggaggaggcggccggaccacagacacagacaaaaagcaacaaagaagaaagaagcagg

SEQ ID NO: 222289 - RNA, 78 nt, Homo sapiens
ggacgagggggcagacggcccccggaaccgccgagacgccccggccaagaaaccaggcccaagaaggaaaaaagaaaa

SEQ ID NO: 222290 - RNA, 80 nt, Homo sapiens
ccaaccagcaaagaaaagaagaaaaagaaacgcacggagaaacaggagaacagggccggaagaaacacaccggaaaccgg

SEQ ID NO: 222291 - RNA, 78 nt, Homo sapiens
cgcaccaccacgccaccccacgagaccaccgcacaccacaggacagagcagccaggccacgagccagaaccgagacac

SEQ ID NO: 222292 - RNA, 84 nt, Homo sapiens
gcaccggagagacagcacagcacccacaaagcaacgaggggagaaaacccgggccagcacgagcgagaacacaccggggcagcg

SEQ ID NO: 222293 - RNA, 78 nt, Homo sapiens
cccccgccgcgcgcggcgccaggcaccggagcagagcgccaccagacagaggagcccggaggaggcaggagcccgagg

SEQ ID NO: 222294 - RNA, 70 nt, Homo sapiens
gcgcgcgcggaacgaaagcgccgcggcaaagggaacaaagagcagaggccagcagccaccgacagcccgc

SEQ ID NO: 222295 - RNA, 73 nt, Homo sapiens
agaacccaccacccagcagcagggcacaagacgaccgccacgagggcgagaagagagcgaccaaccacaaggg

SEQ ID NO: 222296 - RNA, 80 nt, Homo sapiens
cagagagggaaggcgccgcggcaacgcgcccccagccccgccccccagaccgggacgacgaggagcgccaggaaagaggc

SEQ ID NO: 222297 - RNA, 75 nt, Homo sapiens
acagacgccaccaaaagcaccaggacccgaagacaaaaccacccacgaaagcgaaaagacccaaaacaaggcagc

SEQ ID NO: 222298 - RNA, 70 nt, Homo sapiens
gaacagacaccgagccagcaagcccccaacggaacccccaggaaacaccaacaagagaaaaaacccacac

SEQ ID NO: 222299 - RNA, 61 nt, Homo sapiens
aagaggaagagccaaagagcaacaacgagcgacaccaaagacccccgacccggaaggagac

SEQ ID NO: 222300 - RNA, 62 nt, Homo sapiens
caaggaggccccagcggaccgaacaggcccgggagaacgcaccagcaaaagggaacgggggc

SEQ ID NO: 222301 - RNA, 78 nt, Homo sapiens
ccggaacaaaaagccccagaccagagacagaagcagaggacgccaggggacccacgagcagccaaaaaaagaagcaaa

SEQ ID NO: 222302 - RNA, 88 nt, Homo sapiens
gaacagcccgaaccaccaccggacaggaccgagcaagaccgagacacccagcgggaccgcccacaagacgagggacacgaccgagaac

SEQ ID NO: 222303 - RNA, 78 nt, Homo sapiens
gagcccaggcccaagcagaaagaagggcaaacccaccacaccgccgggggagacccagaaagcaaaccccacgagaac

SEQ ID NO: 222304 - RNA, 72 nt, Homo sapiens
aacaacaagaaaaggaggccgcgccacagagacaaggggcggggcccaaaacacgcgccgagggccgggacc

SEQ ID NO: 222305 - RNA, 65 nt, Homo sapiens
ggaaccggagccgggagagaccaaacccccaccccaacgcaaccgccgggacagggccagaagcg

SEQ ID NO: 222306 - RNA, 88 nt, Homo sapiens
ggcgaggaggcgagcggacgaggagggggcaggaggccggcgcgggggaggaggaaccccaggagggagggagaaagaggacaggaga

SEQ ID NO: 222307 - RNA, 76 nt, Homo sapiens
ccgggagcgcagggcggcgccgagcaggacaccgagaggggaggcaagcaggggggcaaaggaaagaaggcagaaa

SEQ ID NO: 222308 - RNA, 66 nt, Homo sapiens
agagaggagggagaacaagcaacggacacagggaagggagcccaaaacaggagcgcagcaagcacc

SEQ ID NO: 222309 - RNA, 78 nt, Homo sapiens
cggagcgcggcggagaggagggggacgaagcccccagaaagacaccgagaggacggcagggcacggaagaagcaaaca

SEQ ID NO: 222310 - RNA, 82 nt, Homo sapiens
ccaccccgggaggccagccacccaaagccccaaggagaagaacggagacggaaaagaaaagccaagaggaaagccgagggaa

SEQ ID NO: 222311 - RNA, 75 nt, Homo sapiens
ggacggccggcggcacccgcacccggggacaagcgcgggaacggcgcggaagagagaaaaggaacagccgaagcc

SEQ ID NO: 222312 - RNA, 84 nt, Homo sapiens
acaaaagagaaacccggcagacaaaaggacagcgacagacagcaaacacagccagaacagaggaccggggagaaggggggaggc

SEQ ID NO: 222313 - RNA, 74 nt, Homo sapiens
ggagagaagccaagaaagacaggaaccagacacaaagaggaagcccacacagaacgaacaaaaagaaaacaaga

SEQ ID NO: 222314 - RNA, 71 nt, Homo sapiens
cacacaagcagacccaggcgccccgcccccagggcccgcccgcgcgaagagagacggggcgccggagccag

SEQ ID NO: 222315 - RNA, 80 nt, Homo sapiens
ggagccggccccgggggggggccccggagcccacggagcaggagaagcccaaggcccagaccccgccccggacccgacag

SEQ ID NO: 222316 - RNA, 75 nt, Homo sapiens
gaaggaccagacagaacaagggcccagccgcaacacaaggccggccccacagcggcagagcagccccgcgagccg

SEQ ID NO: 222317 - RNA, 78 nt, Homo sapiens
ccggcggcgaaggcacacgcggcagagagaagcggacagagagaagacagaagagccagggccgggggaaggaggaca

SEQ ID NO: 222318 - RNA, 42 nt, Homo sapiens
cggaaaacggagagacggggagaaagacggggaccccagcac

SEQ ID NO: 222319 - RNA, 83 nt, Homo sapiens
gaggacgcggggccgggccacgcagagacgacaggccagcccacagggccaccggggcccgggaaggaggcagccagaaggaa

SEQ ID NO: 222320 - RNA, 95 nt, Homo sapiens
agccaggccacaaggaaccaagacagcgccacagacagaaaagaccgaggacaccagaacaaccgaggagcgcaagaaccgaggaaaggaaaaac

SEQ ID NO: 222321 - RNA, 63 nt, Homo sapiens
gggacggggcgccgcccggggcgaggcagggccagcagcaggcgggaggggccgaaccgggcc

SEQ ID NO: 222322 - RNA, 75 nt, Homo sapiens
ccaaaaaacaggaacaaaacagaccggagaagagcgcgcagagcgagaacgagagggggacagcagccgcagcgc

SEQ ID NO: 222323 - RNA, 69 nt, Homo sapiens
cagcggccacagcaacggacggagagacaagaccagccagcggccccgagaaacccaagaacagaccgc

SEQ ID NO: 222324 - RNA, 39 nt, Homo sapiens
ggagcagccggggcggagcggacgggaacggagcccccc

SEQ ID NO: 222325 - RNA, 80 nt, Homo sapiens
gggcgggggccccagccccacagaccagcccagcacaggaccgaaaagacgcggccccaaaggaaacacccgaagaacac

SEQ ID NO: 222326 - RNA, 81 nt, Homo sapiens
aagaagagcagaaaaaccccacaaaccaaaggcgaaagccgagccaggagaaacacagaggaggaggaagcagcacaaggc

SEQ ID NO: 222327 - RNA, 45 nt, Homo sapiens
caagaggaggcgggccgaagcaacaaggggacacaccggggcgcg

SEQ ID NO: 222328 - RNA, 81 nt, Homo sapiens
cgagagcgcgcaaccgcgggagcagccaagggacggacccgacagcaccaggaccaggccaaccggagcgcacccacgcca

SEQ ID NO: 222329 - RNA, 55 nt, Homo sapiens
cggcccgcccgagaggccgcaaaggccggcagccgcagagcgcagacagacacca

SEQ ID NO: 222330 - RNA, 77 nt, Homo sapiens
acgacagcaccccagccagacccccgccgggaccccaccagaaggaaggcgacagccaacagaacccagccaggagg

SEQ ID NO: 222331 - RNA, 83 nt, Homo sapiens
ggggacaggcaggagcgaagcagcagaaccccaggcgggacgcacgggcaaaaaccaccagaaaagaggaccaggagaaagag

SEQ ID NO: 222332 - RNA, 77 nt, Homo sapiens
agacccagccagaccagaccgagccacccagaaccacagccaaggccgagcggccccgagccgggacacccggcggc

SEQ ID NO: 222333 - RNA, 66 nt, Homo sapiens
gggacaagacagcgcagagacggccggcaacaagcgaggggggaggccaggcgcccagaacggccg

SEQ ID NO: 222334 - RNA, 36 nt, Homo sapiens
aacagcccccacgcaggccggaggggacggccacca

SEQ ID NO: 222335 - RNA, 77 nt, Homo sapiens
acagcgccccccagcagagcgaggcaacgagcaagcagaagaggaacagaagaagcagagcagagacggagcagcag

SEQ ID NO: 222336 - RNA, 65 nt, Homo sapiens
ccggaagaaaagagccaacaccacacgagagaaagagacccaccagaaaggccagacacgaagaa

SEQ ID NO: 222337 - RNA, 95 nt, Homo sapiens
aaagaaggcaaggagagaagagaagaacagcacaggacagagcaccaagaaagcaaggacagacaagaccaaagaccggaaacgcaagcagcaca

SEQ ID NO: 222338 - RNA, 73 nt, Homo sapiens
aaccagcaggccaaaacccccgcgaaaaagggacaaacggaagcaaggaaaacaagaagaaacacggcaagac

SEQ ID NO: 222339 - RNA, 73 nt, Homo sapiens
cacccccacacaggcgacaccgagcgggacgccccagaggaagaagaagacggaggggacagcccagaccaaa

SEQ ID NO: 222340 - RNA, 57 nt, Homo sapiens
gaagaagcgcggaccccgcgagacgccaacaccaggaagaacagaaaggggaccaaa

SEQ ID NO: 222341 - RNA, 86 nt, Homo sapiens
gcgacccaagaagcagcccacgaaaggcagccgcggacgccgcgccagcgacaaacaacgccacagcaaaagaaccgaaacacaaa

SEQ ID NO: 222342 - RNA, 76 nt, Homo sapiens
cgcacaagagggggaaacggggaaaaggcaagcaggaacgaagggccacccaagcgggcccagaccgcaggacggc

SEQ ID NO: 222343 - RNA, 64 nt, Homo sapiens
gccaggcggccccgagcggaacggagaaagcgaggccaaccggccgcagcccaagccacgaccc

SEQ ID NO: 222344 - RNA, 42 nt, Homo sapiens
gccgccccagggcaagacgcgcagacccaggggagcccacca

SEQ ID NO: 222345 - RNA, 78 nt, Homo sapiens
cacagcggaacggcaaagcagcacacaaagagggcacccagaccgcagggaccgcaggggcggcgaccacaacaacac

SEQ ID NO: 222346 - RNA, 80 nt, Homo sapiens
aggcgccgggcagaggaccggaggccgggaagccaacgaccacacgcaggggggccccagcccggccgaacgggcgcacg

SEQ ID NO: 222347 - RNA, 79 nt, Homo sapiens
cgaccacaccgggcaagaggacccagaacccgaggacgaaaacgagagaagagcagcaagggcaggcagagacggaaga

SEQ ID NO: 222348 - RNA, 76 nt, Homo sapiens
cgagaccagcgcccgacaaccaaaggaaaaccgggacgggcgaaagagaagaaagaaacgcacaggcaccagagca

SEQ ID NO: 222349 - RNA, 73 nt, Homo sapiens
cgccccgggccccccagcagaagaccccggcggacacaggccccccccaaccaagcggcagcggcggagcggg

SEQ ID NO: 222350 - RNA, 56 nt, Homo sapiens
ggaacaaaaggaaacccaccaagggaagaagcaagccagaaagaaaccacccaaga

SEQ ID NO: 222351 - RNA, 85 nt, Homo sapiens
ggcccggaggcggcgggacagagcgccgcgaccccagcgggcccggggaggcaccgacgaggaggacgggaaacaacgagccaag

SEQ ID NO: 222352 - RNA, 64 nt, Homo sapiens
gaccgcacggaaacgaagcgacacacgccaggaagccggacgcgcagggaaaacgagaggaccc

SEQ ID NO: 222353 - RNA, 71 nt, Homo sapiens
caaaaaccacgagagcccgcccaacaaacagaggacaggcacgcgaccaaaccggagagaagaacccaggc

SEQ ID NO: 222354 - RNA, 74 nt, Homo sapiens
gggaacagcgagcggagccggcaggaaggggaccgggcggcggagcggcggaagaagagagacgggcaccggag

SEQ ID NO: 222355 - RNA, 76 nt, Homo sapiens
gaagcccaacccagagcccccggcaggggcaggcaagaaagagagcggaggacagagcacgcgcgacagagagaag

SEQ ID NO: 222356 - RNA, 75 nt, Homo sapiens
cggcgaggaacggcaaaccccggccggggagaagccaaaacagaccacccaaggaaccccacagccccaggcccc

SEQ ID NO: 222357 - RNA, 55 nt, Homo sapiens
ccggacaaccagaggcagccagcagggggagacaggaagggaaggggcggagacg

SEQ ID NO: 222358 - RNA, 69 nt, Homo sapiens
aaaacccgcagaccgaagagcagggcagacacgagagggcgaagggcgccaacgcggaaaaacaagggc

SEQ ID NO: 222359 - RNA, 72 nt, Homo sapiens
ggaagcacggcgggcgaaacagggacagagcagaagggcgaaagaccgggccgcagaagaggccccaacccg

SEQ ID NO: 222360 - RNA, 57 nt, Homo sapiens
gcaccagacgaccgcggaacaaacagaagacagcgaaaacccccggaagagcaccga

SEQ ID NO: 222361 - RNA, 93 nt, Homo sapiens
gcgggcccgaggcggcgagagaggcaggcggagccgaccgggccaggccaacccaggccagcacagacagaggaaaaagacgagcacacaaaa

SEQ ID NO: 222362 - RNA, 85 nt, Homo sapiens
ccgccggccgccgcgccgcccggcagcccggcaggcagaaccagagaccacagaagaaggaagggccacccaggacaggggcacc

SEQ ID NO: 222363 - RNA, 84 nt, Homo sapiens
cacaagcgcacgaccaccaagcaaaacagagacgaacacagagcgaaaaagaaagccagaaggaacgaacaaaacaaagaaaag

SEQ ID NO: 222364 - RNA, 81 nt, Homo sapiens
agcggcggacagcagggagcggccgagccacccaaaaacagggcggaagggcaagaaagaaggaaagcccaagagggagcg

SEQ ID NO: 222365 - RNA, 76 nt, Homo sapiens
aaaaacgaccgaggaggccgcggggccacggagaccgaagcgcacgaacggaccgacacgggccaggccacgcgcg

SEQ ID NO: 222366 - RNA, 77 nt, Homo sapiens
caaagacagaccacccaggaagcgcccaagaacagaagaaaagaccaggcccaggccacaggaggaccggcagcgcg

SEQ ID NO: 222367 - RNA, 74 nt, Homo sapiens
ggagccgacaaaccccagagccagcccggaagcgaaaagccaggaacggaggccggaaagagaccgcgcaggca

SEQ ID NO: 222368 - RNA, 76 nt, Homo sapiens
gcgaagagggccggcccaaccagggcgagcgaaggaccagacagagaaggcagaagccgaggagaagcgcagcgag

SEQ ID NO: 222369 - RNA, 66 nt, Homo sapiens
ggacccggacaaccagaggcagccagcagggggaggaaccaccggacaaacaccggaaaccacaag

SEQ ID NO: 222370 - RNA, 81 nt, Homo sapiens
cagagcgagccaccccgcagaccccccggcccagcagaagagccacgaacccccgaacaaggagccgacgggccagcacaa

SEQ ID NO: 222371 - RNA, 78 nt, Homo sapiens
ggggagcgcgggaaaggaagcgccaggagagacgcgcaacgaacagaccgaagagaaacagaaagaaaacagacaaga

SEQ ID NO: 222372 - RNA, 69 nt, Homo sapiens
aacccagggccaccggggaaacaaacacacgcaggcagaaggagcggagaacggaccacccagcagccc

SEQ ID NO: 222373 - RNA, 79 nt, Homo sapiens
gagcaagcccggagcgacagggccaagcaaggccccgagcgcccaaccaacagaacggggaacacgaggaaccggggac

SEQ ID NO: 222374 - RNA, 51 nt, Homo sapiens
gccggaggaacggagcaccgcgcaaaaaaacggggaaagcccgaaaaggac

SEQ ID NO: 222375 - RNA, 59 nt, Homo sapiens
gccacagccgcgcggacaggcccaggcgcaagcacaaaggaaggccagccagccgaaag

SEQ ID NO: 222376 - RNA, 80 nt, Homo sapiens
aaaacagagcgggggagaagcaaagaagccacgaacagacgcacgagggaagaggaacccagagaagacgaagccgggaa

SEQ ID NO: 222377 - RNA, 66 nt, Homo sapiens
agccacaagccagggaaggaaaaaacagcgccacgaagagaaacagcccgcagagggaccgaagaa

SEQ ID NO: 222378 - RNA, 63 nt, Homo sapiens
ggccacaccagccgggccaggcagaggcacgagaagagaagcccagagcaaaacaccccaaac

SEQ ID NO: 222379 - RNA, 72 nt, Homo sapiens
gggggaaaaaggcggacgaagaggagggcagaaaaagcaacacgagcagaaacaagaaaaaaaggaaaccca

SEQ ID NO: 222380 - RNA, 76 nt, Homo sapiens
aacaggcgaagccaaagcagcacgcgaggaggaaaggcaccccaccagggcgaaacgcaaaccaaaccgcaaacgc

SEQ ID NO: 222381 - RNA, 85 nt, Homo sapiens
cccgccgggcccgacgggcagccaagaagagagaccgggggaggcgacgcaaggcgacgggcgagacaccaggcgccgagaaggc

SEQ ID NO: 222382 - RNA, 72 nt, Homo sapiens
cagacacaccggagcaagaccggccaccccgaccaagcaggaaacccccggccaacccggcggcagccccac

SEQ ID NO: 222383 - RNA, 82 nt, Homo sapiens
ccaagacacaaacggcgacacagcccgggcgcgccaggcacagccaagagcggaccggcagcggccagcgcagcggccggag

SEQ ID NO: 222384 - RNA, 56 nt, Homo sapiens
acacccacagaaggagagcaaaggagacagacggggcgggagcgcgcccacgagac

SEQ ID NO: 222385 - RNA, 41 nt, Homo sapiens
ggggaggaaaagacacacccgcaaaggcgaaagaagaccag

SEQ ID NO: 222386 - RNA, 35 nt, Homo sapiens
gaaaagcggaggccccggaccgccgaacccaggcc

SEQ ID NO: 222387 - RNA, 72 nt, Homo sapiens
aacaccgggaaaggcaggaaacaagccgcgggaaagaaagaggcccaggagggaacggaaaagagcacagag

SEQ ID NO: 222388 - RNA, 68 nt, Homo sapiens
gaagaaaaaacgcacagggggcagcagcacccggaggagaagaggcgcggaacaagcgggagagcaag

SEQ ID NO: 222389 - RNA, 83 nt, Homo sapiens
aggccggccgcggaacgaaaggaacaggagccgccaggcgacacaccggaagcagaccggagaagaacaagccgacccaaagc

SEQ ID NO: 222390 - RNA, 56 nt, Homo sapiens
cacagacaccaagcgcggaggccggagcgaacaccgggagggaaacccagaggacg

SEQ ID NO: 222391 - RNA, 53 nt, Homo sapiens
cccgggagcagagaaagcagccaaaacagggaaccggaagccacgaacgaagg

SEQ ID NO: 222392 - RNA, 76 nt, Homo sapiens
ccacagcaagacgccaggacccacggaagccagaaagggaacgaaagggagagaagcaagaaagggggcgcaccca

SEQ ID NO: 222393 - RNA, 87 nt, Homo sapiens
gagagagggagcggcacagaggaagggaaaaggccgaggcacagcgggaagaccgcaaagacgacccgagacagggaacagcagcgc

SEQ ID NO: 222394 - RNA, 78 nt, Homo sapiens
cgccgcccgccgcccgccgcaggccacccgggaacggaggagggacggagccgagccacgcggagcgccgggggccca

SEQ ID NO: 222395 - RNA, 71 nt, Homo sapiens
acaaggacccgccacagcccgacgaaaggagccaaacaccggccgaaccgggccaagaggaaagggaggac

SEQ ID NO: 222396 - RNA, 102 nt, Homo sapiens
agcagaagcgcaccccgacgccgaggaacgagagcgcgaagcaagaaaaaagcgaacgcaaggggccaagaagagcagagcccgagcaagaagaggacgaaa

SEQ ID NO: 222397 - RNA, 80 nt, Homo sapiens
gaccagcgcagccgggagacagagcgaggcggcggcaggccaccgaggccgacgcccgggaacaaccccaaccgggcgcg

SEQ ID NO: 222398 - RNA, 77 nt, Homo sapiens
gcccacagcagggggcagagcagcccgacggccaggaggcgaagagacgaggaagcccaggagcccgaacacaaaaa

SEQ ID NO: 222399 - RNA, 74 nt, Homo sapiens
acacccgccaccagcgacaagaaggaccagagaaaaggcacagaacacgaggcgcgcaacagcggacgcggaga

SEQ ID NO: 222400 - RNA, 117 nt, Homo sapiens
gacgcagcaggagaagcggaggaagcgaagggaggaagcacgagagaggagccaaagaaccccggaagacgaccccgacgcaggccaggagccgcggacagaagccgagcacggccg

SEQ ID NO: 222401 - RNA, 73 nt, Homo sapiens
cgagagacgggaacagaaacccaaccccaaaaagcgaacaagagaggccggaaacacaagaccccggacagac

SEQ ID NO: 222402 - RNA, 64 nt, Homo sapiens
aggcagaggaccacccgcgagcgcagaaaggggggcacaagaaggccaaccccaaaagagagaa

SEQ ID NO: 222403 - RNA, 73 nt, Homo sapiens
acgggggcaagaaaaaccgacgaacaccacacgaccgaagaacaccaaggaggagggccacgcgaaggcacgc

SEQ ID NO: 222404 - RNA, 81 nt, Homo sapiens
acaggccaagggcgcccccaggaagggcagcagcaagggaggcagaagggagccagcgagaggggagagaagccggacaga

SEQ ID NO: 222405 - RNA, 61 nt, Homo sapiens
agcaggcgagcgaacgacggcggcaggaggggccaagagggaacgcccaccccagagacgc

SEQ ID NO: 222406 - RNA, 66 nt, Homo sapiens
aaccggccaacgccaaaccagacccaccgggcaaacaccaagcaagcgacagaccaccgcggcaga

SEQ ID NO: 222407 - RNA, 80 nt, Homo sapiens
cggggccccccagccccgccaacccagaagagccgaggcgcgccccagacaaccccaggaccggcaaaacaacgaggagc

SEQ ID NO: 222408 - RNA, 53 nt, Homo sapiens
gcccggcccacacgggaagcgcgggaagggaaagcaagaacggaagcacgggc

SEQ ID NO: 222409 - RNA, 51 nt, Homo sapiens
gcaaagaaaagcaagagggagcaacaccgggccccggaaaaagaagagcac

SEQ ID NO: 222410 - RNA, 112 nt, Homo sapiens
cggccaggcggacaacgagaaacggacaaccaacggccaagaacaagaacaaaggccgcgacggagcgaaagcgagagagaaaaaccgcccaaggaaacgcacagaacgaaa

SEQ ID NO: 222411 - RNA, 87 nt, Homo sapiens
ccagcgccaccaccacgccagccgcaccagccgcccaagccgcacagccgcggcggcagcagcaggagagacagcgcacgaaacaca

SEQ ID NO: 222412 - RNA, 59 nt, Homo sapiens
cgagcggacccggaccggggccacgaaccgacggggaccccaagaggaaggaaccggag

SEQ ID NO: 222413 - RNA, 60 nt, Homo sapiens
ggaaggaagggcacgggcagaaaggacccaggagcgaaacagaaacaaaaagaagcgggg

SEQ ID NO: 222414 - RNA, 71 nt, Homo sapiens
cccgcccggccgccgccgcccgcccgcccgacggagacggagcaacgcacgaaaacgcacgaggagcacag

SEQ ID NO: 222415 - RNA, 79 nt, Homo sapiens
cccgaccgggacggccggcaggccgccgccgagcgcaagaggagccaggagcacggggggaacaagaccgccgggacgg

SEQ ID NO: 222416 - RNA, 62 nt, Homo sapiens
gacggagacagacacagaccaggccaggccaagagacagagaaggggggccccagaccccga

SEQ ID NO: 222417 - RNA, 60 nt, Homo sapiens
gaaaaggccgcccggcgcccgcaggagcaggccagacagaaaagggagccaggaccccag

SEQ ID NO: 222418 - RNA, 57 nt, Homo sapiens
aaaaaaagccagaagaaggacaacgacaaaaaggcagaaggcggcagggagcacgca

SEQ ID NO: 222419 - RNA, 77 nt, Homo sapiens
gagcgcgcgcggccagcgccaggggcaaagcaccggaggagccgcgcccgcaggagcggacaccagcagcgggccgc

SEQ ID NO: 222420 - RNA, 85 nt, Homo sapiens
agccccggacgagaagcgcagcaacggcgggggaccacgagagcaccggcggcacacggacaaccgggcgaggggcagggaccag

SEQ ID NO: 222421 - RNA, 72 nt, Homo sapiens
gaaggccagagcacgagcacgggaagcaaggacagcagccagaaagcagcgggggacgaagaagaccccaac

SEQ ID NO: 222422 - RNA, 80 nt, Homo sapiens
agagaaagaaacacccgaacagcgagaccgcacaggacgagcgaagacagggaaaagaaaagggcgccgaagaagccacg

SEQ ID NO: 222423 - RNA, 75 nt, Homo sapiens
gcgagcgacacaaacaagcagaaagccagaaaagacgcgcccccgccgcacggaaaaggacaggagacaaggcaa

SEQ ID NO: 222424 - RNA, 77 nt, Homo sapiens
gggaaaacccccgggaccagcggagaagaagcaggcgccccccaccagccacagacacagacgacacggcggacaac

SEQ ID NO: 222425 - RNA, 73 nt, Homo sapiens
ccagacggggccaccgcccgcgaggacaggagagagaccgggacccaagccgcccccccccaaaaagaccacg

SEQ ID NO: 222426 - RNA, 60 nt, Homo sapiens
accccagcaacgggacgggccccaccggccgcggcccaacaaggcacgcagaagaacccc

SEQ ID NO: 222427 - RNA, 74 nt, Homo sapiens
gccgcagccgcgagggccagggagacaaggaccaaggacaccccaagcagaccagcaccagacagcgaaaaaga

SEQ ID NO: 222428 - RNA, 98 nt, Homo sapiens
gaaagagccgacggaaagagccgacggacggccggcgagggcacgggagcccagcaagaccacgacacgagagcgccgccagccggaaggagacacgg

SEQ ID NO: 222429 - RNA, 88 nt, Homo sapiens
gaggccccccgaaccccaaggccaaccgcgagaagagacccaggcaccgggaaaggaccggggcgggaggggcccggaggagccgccc

SEQ ID NO: 222430 - RNA, 65 nt, Homo sapiens
gacaggccccggccaccagccaccgcagaggacagacaggacccaaagacaggaccacgcaccag

SEQ ID NO: 222431 - RNA, 59 nt, Homo sapiens
aggacaaggcgcaagacgccagcgcaagcgggcggagaaaccacaccaccgcggaaaca

SEQ ID NO: 222432 - RNA, 59 nt, Homo sapiens
aggaaggaaggagcgcagcgggacgcagaaaacgcacagcacgagaaaagcgaaaagaa

SEQ ID NO: 222433 - RNA, 76 nt, Homo sapiens
aacaaaggaaggaaccacgagggaaggagagcagcaaaaacaaggagaccgaggagcccaggaggaggaacccaca

SEQ ID NO: 222434 - RNA, 79 nt, Homo sapiens
cggcccgccgcgccccaccgcaaccggaggcaagcaccaagaaggccaagagaggccaacagaggaacaaggcccgcag

SEQ ID NO: 222435 - RNA, 69 nt, Homo sapiens
cgcgggcaagaagcgcgaaggaaaaagagagcagcaccagcagaagagggcccgaccacggcaacccag

SEQ ID NO: 222436 - RNA, 71 nt, Homo sapiens
gccaggacaacagcgcacggcaaggcagcgccgaagggcgagcggcagaagaccgcggggggcaaaagaag

SEQ ID NO: 222437 - RNA, 84 nt, Homo sapiens
cagagcaccagagacaaggagagccaggaggagcgggccccaacccaccaaaagcacagccaagaacgacaggcaaaccagcgc

SEQ ID NO: 222438 - RNA, 74 nt, Homo sapiens
aagggaagagcgaccccagcaaaacagaccaagccacccaagcggggccaggaaaaaccccgcccggccagcac

SEQ ID NO: 222439 - RNA, 83 nt, Homo sapiens
ccgcccaggggccaggcgaagcacgagcagaccggcccgaccgcccacagacccaaacaaaggaaacaaagccagaccgccga

SEQ ID NO: 222440 - RNA, 84 nt, Homo sapiens
cgggacggaccgagaccggaccgagagcggaccgagagcgcgaaacgcacgagaagggaggcacaacacagagccaaaacgcac

SEQ ID NO: 222441 - RNA, 79 nt, Homo sapiens
cagaccacagaagcgccaagccggccaaggagcagcagccaagcggacagagaccgccccgccaccccggggggccagc

SEQ ID NO: 222442 - RNA, 57 nt, Homo sapiens
acccggggaaccagcaaacaagcccgacacgggagcgcgaggccaggccaacgccgg

SEQ ID NO: 222443 - RNA, 72 nt, Homo sapiens
cgggccggcgagcgcagcgcgaccgggaggcccaggagaagacgacaccggggaaggggaaaagacgaccca

SEQ ID NO: 222444 - RNA, 83 nt, Homo sapiens
aaggaacagaaacaagagaggaacggagcaagaagcgacacaaggagaaaaggcagaagacgcaagagagccgcgaagggccc

SEQ ID NO: 222445 - RNA, 67 nt, Homo sapiens
caaaaacccaccacaaaaaacacaaaaaaccaccggccaaagacccaaagacccaagaagaccagac

SEQ ID NO: 222446 - RNA, 62 nt, Homo sapiens
gaagaaaaacaaacacacgcaaaggagaaaggaaccgacaggaggccaggagcacagaaaca

SEQ ID NO: 222447 - RNA, 43 nt, Homo sapiens
gaaaaccaagaaagccccacgaacacgcggaaaaacccaacag

SEQ ID NO: 222448 - RNA, 72 nt, Homo sapiens
agaggagcccgcaagaggccagcgaaaaccgaaggggcacaagaccgaaagagcaggcaagcaaaagcgggg

SEQ ID NO: 222449 - RNA, 73 nt, Homo sapiens
ggcggccagccaaagcccccccccgagaaaacaggaacccagagagcaagaccaggggcggccgagcccgggg

SEQ ID NO: 222450 - RNA, 71 nt, Homo sapiens
cgaacgccgcagaacacgcggacacgcccggggcgaggcccgcggggccaggaggcacacaggaaaagaac

SEQ ID NO: 222451 - RNA, 75 nt, Homo sapiens
gaaggaggacgagcgacggccagagagaaggacgcggccaggcagaacaaaccgaagcacagccgagaccggacc

SEQ ID NO: 222452 - RNA, 72 nt, Homo sapiens
cagcccccaaagagagaggaaagaacaaggaaaggcacaacgaaaaggggcgcgcggagcggcagacgaccc

SEQ ID NO: 222453 - RNA, 74 nt, Homo sapiens
gaaagagacagcgacggcaaaagcgcaaccagggagacaaagaaacagccggaaaagcacgagcacaagacgaa

SEQ ID NO: 222454 - RNA, 82 nt, Homo sapiens
gcgaggccccggcgccgcccggaacgcagcgggcccgagaacgccgcacagccggaccccgcgccaacgcaccagcgccggg

SEQ ID NO: 222455 - RNA, 68 nt, Homo sapiens
gcccagacaacgacaagaaaacagaaacgacggagagaaaccacaaggggcaggcagggaaaggcccc

SEQ ID NO: 222456 - RNA, 73 nt, Homo sapiens
gagcagcaaacgcaaggggaaagagggggacccaaggacgcgaaagccagaccaagaagaacagccccagaaa

SEQ ID NO: 222457 - RNA, 79 nt, Homo sapiens
cggaggacccagcccccggcggggccgccgcccgccgccaagagccccggagaagaagcaccagccgacgcgaacggaa

SEQ ID NO: 222458 - RNA, 65 nt, Homo sapiens
acacggccaagagcgggcaccaggaagcgaaggcgcgaccaccgagacaagccggccaccggaac

SEQ ID NO: 222459 - RNA, 70 nt, Homo sapiens
aaggaccgaaagaagacacagaaagcagacgaagcacgcagccagaacggaagaccaaccagaagacaca

SEQ ID NO: 222460 - RNA, 66 nt, Homo sapiens
caagccgaagcaaaaacacacagaccggccaagcaggcaaagcgaccggcccgaggaccgccgcac

SEQ ID NO: 222461 - RNA, 52 nt, Homo sapiens
ccaggcaccgaccggcgaacaaggagcaggcgaagcgagccagggaagcgaa

SEQ ID NO: 222462 - RNA, 72 nt, Homo sapiens
cccccaacgcggacagcgggggaccggacgcaggaagacgcagccggccgcgcccccagggagcacgcaccc

SEQ ID NO: 222463 - RNA, 73 nt, Homo sapiens
aaggggaggacgcccgaggcagcgagaagagaacgcaccaaagagaacaaagccacacggcgcgacgaggaac

SEQ ID NO: 222464 - RNA, 56 nt, Homo sapiens
gcagggcggaacgcaacgagagaaacgacaccaagaacgagcgcgaaggacaagcg

SEQ ID NO: 222465 - RNA, 73 nt, Homo sapiens
acagaagagcagcccgccgacaagcgcgcgggacacgccgggcccccaaacagacccagaacccacagacagg

SEQ ID NO: 222466 - RNA, 71 nt, Homo sapiens
gacacgagccaggagcgggaaaagaaaacacgcacacaaagaggaggacgggcaagggaggcgacacacca

SEQ ID NO: 222467 - RNA, 76 nt, Homo sapiens
agggagcgcgcccggccacacagacacccgggaacccacccaccagcgggcccaggcccaggggacacccagcagg

SEQ ID NO: 222468 - RNA, 75 nt, Homo sapiens
aagccacaggccccgggccgcccgcccccgggagcgcgcgaggcacagcggaccgccaacaagaaggccaagcgc

SEQ ID NO: 222469 - RNA, 77 nt, Homo sapiens
aaccagacgcagaaaaccaggaaggggagccgggcagagaaaagaacgcgaggagaaccccaggaggaggccagagg

SEQ ID NO: 222470 - RNA, 83 nt, Homo sapiens
cggagggggacaccaccggaccccgacccgccgccggcccggccgcgcccgggaaagggacacagaacgggggcaaagcgggg

SEQ ID NO: 222471 - RNA, 73 nt, Homo sapiens
cagagaagcaaagaagcagagcgaaggaaggccgacgggcaagaacgggaagccgaaccagggacgaagaaag

SEQ ID NO: 222472 - RNA, 80 nt, Homo sapiens
gagcaacgaggcccggggggcaaaagaccgcaggcccgccgccccggggcacgccaggcaaccaagacaacaagccaaag

SEQ ID NO: 222473 - RNA, 75 nt, Homo sapiens
cccgccccgggccggaggggcgaccgccaaacgggagccccgaaccaaggaaacggaaacggccagaagcaggac

SEQ ID NO: 222474 - RNA, 76 nt, Homo sapiens
gacgaccgggacaacccgggagacgaaagaacgagcgaagcaggcccccaggcggggaggcagggagcccagaaag

SEQ ID NO: 222475 - RNA, 74 nt, Homo sapiens
ccgccgacgacccagcagccgccaggccgcccgaggcacacagagaaaaaaagggaacaaaacacagcaagcag

SEQ ID NO: 222476 - RNA, 81 nt, Homo sapiens
ccgcggggaaaggcgcggccgggccagaggaagagaagaggagcacagcaagcgggagcaggcagaccaaaggaacagaag

SEQ ID NO: 222477 - RNA, 63 nt, Homo sapiens
ggggcggaagccagagaccaacgagaccgcacagccccccacccaggaaggaacaaccccaca

SEQ ID NO: 222478 - RNA, 75 nt, Homo sapiens
agggaggcgggacgcgggcccaccggccacggggagagagccacacagccagccaacacaagggacgcaggccac

SEQ ID NO: 222479 - RNA, 71 nt, Homo sapiens
gccaccagaccgggcgacaacagccaagccaagcagaaggcggagggacaacggaagacaaggcaacagaa

SEQ ID NO: 222480 - RNA, 81 nt, Homo sapiens
gagccgggccggcgcggggccggggagggcaaggaagaaaaggcggaccggcgaacgaagggcggagaacggaaaagcacc

SEQ ID NO: 222481 - RNA, 64 nt, Homo sapiens
ccggaagagagaaccaccccagccggaagccggaccgcccaagcaaggcaacggggcccgccgg

SEQ ID NO: 222482 - RNA, 35 nt, Homo sapiens
caaaacggcacgggagagagagccaggaacaaaag

SEQ ID NO: 222483 - RNA, 74 nt, Homo sapiens
cccgcggcggcgggcacccggaggcgcccgagcgggccagaagcccccaggaggagaacgagcaacggaagcca

SEQ ID NO: 222484 - RNA, 38 nt, Homo sapiens
cgcacaaccccacgaggcaacccggcaggggcaggggg

SEQ ID NO: 222485 - RNA, 84 nt, Homo sapiens
cagcggcaccgccagacggccagaaagccgccagagcggggcacggagcgggaaaaacacggagagcaacaaagagggaagcgg

SEQ ID NO: 222486 - RNA, 77 nt, Homo sapiens
gcgccgcgccgccgcccacaagcggcgccgcgccccggccgcacggcccccagacaggccaacaagggccccaggca

SEQ ID NO: 222487 - RNA, 61 nt, Homo sapiens
gaaaggccaaagcagcagcaaaaaacccagaaggggagaaagaacacggcgacgacaccag

SEQ ID NO: 222488 - RNA, 78 nt, Homo sapiens
cccccgaccacacgcccgcgcgagcccgcacggcaaagcaaagaagagccgcgcagaacagaaggacagacagcacac

SEQ ID NO: 222489 - RNA, 58 nt, Homo sapiens
accccagacgagcacaaaacgccgggcaggcgaggcaaaggacacagaagaaaggaca

SEQ ID NO: 222490 - RNA, 74 nt, Homo sapiens
ccgccggacaccacccgggaagaggcgccgggcccaaaagaggccccggggcgcacgggcgcagcccgaccggg

SEQ ID NO: 222491 - RNA, 66 nt, Homo sapiens
gagcaggaagacgcagaggaaacggcagcagaacgccgccgggcccaggcaaaaccagcacagccc

SEQ ID NO: 222492 - RNA, 76 nt, Homo sapiens
gcagagaaggaaaaaaggaccagagacggagcaagaacaaggaacacaaaggaaacacagcgccccccccaaccca

SEQ ID NO: 222493 - RNA, 73 nt, Homo sapiens
ccagacgggaagccgccacaaggccaccggggggggggaccaggaaaagacaccgaagccagcggccgcagac

SEQ ID NO: 222494 - RNA, 80 nt, Homo sapiens
aaaagacagcgaggagcagcagcagcccagcaggcgcggcccgccagggcacaaggcccacaaagaaaaaaacacacacg

SEQ ID NO: 222495 - RNA, 73 nt, Homo sapiens
cagagcgaacgccacccagcccaggacgggcgcgggcccaggccagagagaacacaagaagaaagacagcacg

SEQ ID NO: 222496 - RNA, 71 nt, Homo sapiens
gggcgggggccgcggccaagaacgccggcgccccaaccgcacaccaagaagccaaaggacacaccggagga

SEQ ID NO: 222497 - RNA, 70 nt, Homo sapiens
ggagagaccaaacccccaccccaacgcaaccggcaacacaacaccaagcaccaggccaaagccggaagga

SEQ ID NO: 222498 - RNA, 74 nt, Homo sapiens
cggagaaccagaccggcgacccgcgacgccgagcacccaggcgacgcccaccaaggcgggcgccacggaaagga

SEQ ID NO: 222499 - RNA, 45 nt, Homo sapiens
agccagcgagaacccaagagaggggaccaagggagacagcaaaaa

SEQ ID NO: 222500 - RNA, 66 nt, Homo sapiens
cggcggcccaccaaggaaagggcgacagcaacagccgccggcggaagaagagagcgaagcggagca

SEQ ID NO: 222501 - RNA, 74 nt, Homo sapiens
gcccccccagcgcgaggaaggccccaagggaggccaacgcccaccaagcccgggagcccagggccgagccaacc

SEQ ID NO: 222502 - RNA, 64 nt, Homo sapiens
gcggaagcccaaacgggaagagaagccaaggaaggaaacagggaaaaagcgccagaaggccgag

SEQ ID NO: 222503 - RNA, 57 nt, Homo sapiens
aaagggaagacgagggcaggcgcgacacgccgaccgccgcgccagcacacccccggc

SEQ ID NO: 222504 - RNA, 69 nt, Homo sapiens
aaaacgaagcgaaagcgccaagaaagcgacaccgcagcaacaggcgacagcaaagggacaaagccgcga

SEQ ID NO: 222505 - RNA, 73 nt, Homo sapiens
agcggacggcccccggggacaggagaaggggcccagcgcacaggaccccagcccagcaccggacaaagaaggg

SEQ ID NO: 222506 - RNA, 55 nt, Homo sapiens
cccacaccggacacggcagagcgccgcaacgagcaagcacaccagaccagaaaga

SEQ ID NO: 222507 - RNA, 78 nt, Homo sapiens
ccccagccccgcaggcccaaccgccgccagcaccaggccagcaccaccgggcagccggacccagggaggcgaaagaag

SEQ ID NO: 222508 - RNA, 75 nt, Homo sapiens
ccgagcacgggccgagaccaccgaggagagccggacgaagaacggaagcgccccagaggagagggcggagagacg

SEQ ID NO: 222509 - RNA, 56 nt, Homo sapiens
ggaggagcccagaccgggcgacccgccgagcacaaaaggccgcagcgagccgccgc

SEQ ID NO: 222510 - RNA, 47 nt, Homo sapiens
aaacagcagcgaggaggggaagagaggcaagccaggaagcagacaag

SEQ ID NO: 222511 - RNA, 53 nt, Homo sapiens
gcagcgcaaaaacagccggaaggccggaagagacacaccaggaggaagaagac

SEQ ID NO: 222512 - RNA, 80 nt, Homo sapiens
caaagcgagagagggaagcgcccggccaacgagggggagcccagacgcgacggaagggaccccaccacccagaggacaag

SEQ ID NO: 222513 - RNA, 76 nt, Homo sapiens
gcccgccggcgccccccgcgccggacgcggcaccagcggccagaaaggccaggcagagcagcccaccagggagggg

SEQ ID NO: 222514 - RNA, 73 nt, Homo sapiens
agaccaacaccaacacgagggcggcggaaaaagccgccacacgccaaagaaccgggggaaacacaaccgcccc

SEQ ID NO: 222515 - RNA, 73 nt, Homo sapiens
ccagggaaggaagcagcagcaagggacccagcaggaaacaggaggaaacacaaaccaacggcgaggacgcgag

SEQ ID NO: 222516 - RNA, 59 nt, Homo sapiens
agccgagaggggacggccgccccgcggggcacacacgaaacgggcaaccggggccaggg

SEQ ID NO: 222517 - RNA, 84 nt, Homo sapiens
ggggccccggacgcgcccaaagccaagccggagaagaaaagacagacagcaaaagaggaagaagagaggcccagcggcgcacag

SEQ ID NO: 222518 - RNA, 78 nt, Homo sapiens
aaagacagcaaaaaaaaggaagcacaccagagaaagcaggagcccggaaaggagaaggaaaagacggcaggaggaaga

SEQ ID NO: 222519 - RNA, 78 nt, Homo sapiens
ccgacccgaggagcgcgggggcggcccgccccggacccgagcagagcaaaaaggcagggagaacgagccgcggggacg

SEQ ID NO: 222520 - RNA, 71 nt, Homo sapiens
ccacggaagccgacagacaaccagagaagaggcgaaagaagagggaaaagacgagcaggagaagaaaacaa

SEQ ID NO: 222521 - RNA, 52 nt, Homo sapiens
ggagcagcggacccaggcagggcggagccgagcgaggccccagaaggacaag

SEQ ID NO: 222522 - RNA, 67 nt, Homo sapiens
gaaaaggcgggcacaggccgaccgcgcgagagccgaggacgggaccgaaagggggggacgggaaaac

SEQ ID NO: 222523 - RNA, 62 nt, Homo sapiens
cggcgcgccacggaggggcagccacccccggccaaaacagaagaggcaaagcccagccacag

SEQ ID NO: 222524 - RNA, 77 nt, Homo sapiens
gcggcagccaggccgcgacgagcccaggaccacgaaaaacacacaacacgacgcagaccccaaaaggaagagggaaa

SEQ ID NO: 222525 - RNA, 79 nt, Homo sapiens
ccacaagcacggagaggggcaacacgagacgcggccccggggagagccaaagagcgaaacaccccgaagacccagaaaa

SEQ ID NO: 222526 - RNA, 42 nt, Homo sapiens
ccgcccagagcaacccacaagcggaacggaagccgcccccaa

SEQ ID NO: 222527 - RNA, 79 nt, Homo sapiens
aacagcgccccggcaccacaagcaggacggcgcggacggccccccaggggccccagagcccgcgcaggcagaaccccac

SEQ ID NO: 222528 - RNA, 82 nt, Homo sapiens
cgaaagaagggcacccgagggagggaccggagccgcaaagcgaagcaccaggacaaaacagaggagaccagaccagaagccc

SEQ ID NO: 222529 - RNA, 69 nt, Homo sapiens
aacagagcacaacaaaccgacggcaggcaaggccggagcgaagaacaccacagggacgccagggcacca

SEQ ID NO: 222530 - RNA, 78 nt, Homo sapiens
ccaccaaaacaccaaagaaacacgaagggaaaacagccagaccccggagacgccccacccggcaaggagagcgaaagg

SEQ ID NO: 222531 - RNA, 70 nt, Homo sapiens
agcaaggacaaacacccgggaagacacacacaaggagggggaccggagagaaaaaagagagcgcaaggga

SEQ ID NO: 222532 - RNA, 76 nt, Homo sapiens
gagagcaagagggcaccagcagcgacggagccacccgcgaaaacggccagggccgccggggggaaagggcccaccg

SEQ ID NO: 222533 - RNA, 49 nt, Homo sapiens
ggaaacgaggaccagagagggacacgagcgagggcgaccagggaacggg

SEQ ID NO: 222534 - RNA, 68 nt, Homo sapiens
cgccaaaggcagaagcaccagaaaaagcggaagccgcgcacaaaagaggagaaaccccaaaaccagca

SEQ ID NO: 222535 - RNA, 80 nt, Homo sapiens
ccaacccacccaacccaccaagaagagaagaagagggagccggacaagacaaggacagggaaaacgacccggaaagagcc

SEQ ID NO: 222536 - RNA, 74 nt, Homo sapiens
caccagagcaagacagcggaagaagacccagggaaacccccaggcaaaagcagaccggaaaacccaccggcaag

SEQ ID NO: 222537 - RNA, 52 nt, Homo sapiens
aaaggaaaggacgaagcaaaaggggacaaacgaagaggagccaccgcgccca

SEQ ID NO: 222538 - RNA, 82 nt, Homo sapiens
cccaccgaccacggaggagaagaagagcgggggagagagcagacaaccccaaacgaggaaggcgccgaaaaccgaccgaccc

SEQ ID NO: 222539 - RNA, 81 nt, Homo sapiens
gggacagcggccgcagaccgcgcggggccgcgccgcgccgccacggccagcccccggggcccagcaccagagggccggacc

SEQ ID NO: 222540 - RNA, 63 nt, Homo sapiens
cggagccgcggcggccgcggagagaaaaagagaagcgcagcgaaaagaagagcaccgaggaac

SEQ ID NO: 222541 - RNA, 78 nt, Homo sapiens
gaggcacaaaacgcccagcaaaccaagagggagaagacggaagaaagcagccaagggcaggcgaagagagcgaagaag

SEQ ID NO: 222542 - RNA, 52 nt, Homo sapiens
cccggggccggcaccccgacccacaggaagagcaaggcaacagaaaagcagg

SEQ ID NO: 222543 - RNA, 76 nt, Homo sapiens
gggaaggcacagcgcggggccaagaccagacgcaggagagagacaaaggcagccggcgcggccaacaaagcacccc

SEQ ID NO: 222544 - RNA, 56 nt, Homo sapiens
acggagagcccagagacacgcgccaaacaagggaaccgacccagagaggaaagaaa

SEQ ID NO: 222545 - RNA, 82 nt, Homo sapiens
gccgagcaagccgccgcccgacccagggcccgcgggccaggagagcgccggcgggggacgaagggaacccgccgggcggccc

SEQ ID NO: 222546 - RNA, 60 nt, Homo sapiens
gccagggggcagcagcgcaccccaccgaccagcggacacggcggagcggaggcagacaca

SEQ ID NO: 222547 - RNA, 74 nt, Homo sapiens
cgagacagcgcccacacaaccacaccaaagaagggggccaccaagcaagcgagaagaagacaggggcgaaaagc

SEQ ID NO: 222548 - RNA, 50 nt, Homo sapiens
cgcagggcgcccccggggccgcaaggccaggcgcgcagaggcacccaacg

SEQ ID NO: 222549 - RNA, 58 nt, Homo sapiens
ggggagcaaaaccaacgccggccggagcagcagcccgagagaagacggaacaagaaag

SEQ ID NO: 222550 - RNA, 70 nt, Homo sapiens
gaaggggagacccggaagggcccagaacagcaagagaagacgacaacggagacagggaaacgaaaaccac

SEQ ID NO: 222551 - RNA, 82 nt, Homo sapiens
cgagccgaggcacgacgacggcaccaacaccccggccaggagggggccacaccgaacccagccgggaggccaaggccaggga

SEQ ID NO: 222552 - RNA, 72 nt, Homo sapiens
acacaacccgaaggcgaacacagaggaaaccgcaccgcccggaggcccgccgccccggggcacgccaggcaa

SEQ ID NO: 222553 - RNA, 72 nt, Homo sapiens
cccagaagacaaagacacgggaaacacaggagcggaagggaaagaaggaagagacccaagcaggcgccagcc

SEQ ID NO: 222554 - RNA, 70 nt, Homo sapiens
cagggccaggagcgaaaccaggggagagcgcgaaacgcagacacagacccagcaccacgaaaaaagaaca

SEQ ID NO: 222555 - RNA, 102 nt, Homo sapiens
gaaacgcacagaagagagccaaaggagggagagggcccaggaagaggcaagggggaaccggagagaaccaagcaaaccaggcacagcagggggacgagggag

SEQ ID NO: 222556 - RNA, 56 nt, Homo sapiens
aaaaaaacagcagagagccgcggagaaccgaaccaacagccagccaaagccaggca

SEQ ID NO: 222557 - RNA, 62 nt, Homo sapiens
gaggaaaacagaagacaccaaaagcccaaggaaaggcccaggcacagcagacgcacggaggc

SEQ ID NO: 222558 - RNA, 100 nt, Homo sapiens
gaggccgaggcgggcagacaccgagggcccacagccggccccacaaccaacccaggcgcggacagcccagagagggggagagggccgggaggaacaagaa

SEQ ID NO: 222559 - RNA, 110 nt, Homo sapiens
cgaccaggagcgcacagagcgccagcgcaagcccaaggacagcaggcaggaggaaggagggacgggaaggaagcagcacaccgaggaacaagaacgcagaggagcggcac

SEQ ID NO: 222560 - RNA, 92 nt, Homo sapiens
cgcgccccgcggagccggagccgcagaggccccgggcggaccaggcccaggagaacaaggagcggcccagagcaaaacagaggaacggacac

SEQ ID NO: 222561 - RNA, 40 nt, Homo sapiens
gggagacgcccgcgccgccggcccccaaaggaccaaaacg

SEQ ID NO: 222562 - RNA, 55 nt, Homo sapiens
accgcccggagcacgaccgaggcggacagcacaaggcgggcagcgaggccagggc

SEQ ID NO: 222563 - RNA, 70 nt, Homo sapiens
aggagaagcacggccacacaggacgcaaggaccaaaaaacaaagggcggaaagaagcagaagaaaagaaa

SEQ ID NO: 222564 - RNA, 78 nt, Homo sapiens
cgcggcgcgggacgcgcgcgggcacccacggagccccggggcgggcgccagggaaggaccgcacacaagccgcaccgg

SEQ ID NO: 222565 - RNA, 49 nt, Homo sapiens
gaggacacagccagggcggacgggaaagcagagggcaaaagcagcgaga

SEQ ID NO: 222566 - RNA, 57 nt, Homo sapiens
aagcccccaaagagagaaccggagagcacccaacagcaagcagaagaggaacagaag

SEQ ID NO: 222567 - RNA, 75 nt, Homo sapiens
gggccaacgggaaaccaaaggccaagccggaagagacggggggggacaccagggacaccagcggagggggcccca

SEQ ID NO: 222568 - RNA, 49 nt, Homo sapiens
gaaaagcaacgagaaaaaccaagggggacggaagcggcagcgggcagcc

SEQ ID NO: 222569 - RNA, 80 nt, Homo sapiens
caaagcgccacagggaaacaaccacagacacaggaacaggaggcacgccgacccaaaaaaccccaggcccacggcagacg

SEQ ID NO: 222570 - RNA, 82 nt, Homo sapiens
ccagaagccggaagccccagaaaccaaagagcccgaagaggaagacgaggggaagacggaacacacggggaagcgcgagcgc

SEQ ID NO: 222571 - RNA, 68 nt, Homo sapiens
ccacaacgcagccaacacacagcccaaggcagagacagaccagaagacggcacggcacgggaccgagc

SEQ ID NO: 222572 - RNA, 74 nt, Homo sapiens
ccgccacaaggccaccggggggggggaccaggaccccgcgcccaggggaggaccgcagccgaggagccgacgag

SEQ ID NO: 222573 - RNA, 70 nt, Homo sapiens
ggacccaacggagcacgccggcaaacccacgggaaaaagaggggaagaggaaacaagcccaggcgacgga

SEQ ID NO: 222574 - RNA, 79 nt, Homo sapiens
gacggaaaaaaacagagccgagaaaggaagggcgggaccaacagggagccaggggagcagcgcgccaggccagaagaac

SEQ ID NO: 222575 - RNA, 73 nt, Homo sapiens
cccaagcgcccgggaaaagaagggaaacccagacgacaaggaaggccaagggacccacgaccaaccaagaaaa

SEQ ID NO: 222576 - RNA, 82 nt, Homo sapiens
caaccagacgccagcgggacgaggaccgagaccgcggccgggaccgagggagaggaaccgcacccaaggacggcggaggccc

SEQ ID NO: 222577 - RNA, 59 nt, Homo sapiens
gaccgcccgggagacggagcgaaggccggaggcccccgcagccaccaggccaccggagg

SEQ ID NO: 222578 - RNA, 78 nt, Homo sapiens
cacagcagacccccaagccccgagaacacccagccccggaagcagcccaccacagcggagaagagaacccgaccgaag

SEQ ID NO: 222579 - RNA, 58 nt, Homo sapiens
gagccccacccaaaaaaggaggcacgagaagagaagcccagagcaaaacaccccaaac

SEQ ID NO: 222580 - RNA, 78 nt, Homo sapiens
acgcgaggacagaaaacgcaagacaacaggagaggaaagcggaaagccaagacaacaggcacaaagagagaaggaaca

SEQ ID NO: 222581 - RNA, 80 nt, Homo sapiens
gcggagcggagcgcgcgcccgccccgccgggaggaccgcgaggaaaaaaagcggaaaggacacgacaaccaaagcaaaag

SEQ ID NO: 222582 - RNA, 72 nt, Homo sapiens
gcaagacggagcacaagaaagccagaagaaaaggacaaccaaacccaggaacgggcgcaccacgccaccccg

SEQ ID NO: 222583 - RNA, 33 nt, Homo sapiens
aaagcggcgcaacgagcaccagcccgaagaagc

SEQ ID NO: 222584 - RNA, 75 nt, Homo sapiens
acccgcagaagagcacaacagaagcgagggacccccaccaagcccaggcgcaggaaaagaacaccacgaagccac

SEQ ID NO: 222585 - RNA, 106 nt, Homo sapiens
ggcccgagccccgcaacaccgcggcccacgggacccccaggagggacccgcagagggcacgaaaggagccacaaggagcagcaagaggcaggaaagccgaagcgaa

SEQ ID NO: 222586 - RNA, 58 nt, Homo sapiens
aagccaggaaggagacacggccccccaaggaaaacaggcccccagaagccgccgaacg

SEQ ID NO: 222587 - RNA, 58 nt, Homo sapiens
cccccgagggcgggaacagacagcaaggaacgcacagaacagcaagagacgcaaccac

SEQ ID NO: 222588 - RNA, 59 nt, Homo sapiens
agcagcccggcaggccaccagacagagcgaaaccgaaagccagagccccgcgagaccag

SEQ ID NO: 222589 - RNA, 79 nt, Homo sapiens
gcccgcccggccagacgacgcacgggcagagaacaggacacccaaccgcgagaccagcaaggacgggggaccaaccgcg

SEQ ID NO: 222590 - RNA, 78 nt, Homo sapiens
cggcggggggcggacaccagccaagcagcggaacgacagagaagaagagaaaccgagccaggagagcaagaaacccaa

SEQ ID NO: 222591 - RNA, 104 nt, Homo sapiens
ccccgggaggccggcgccgcagcccgggcccaggccccggcagcgccgggacaagggagggagcaacgcgagccaagcagcaggccccaaaaaggagaaagggc

SEQ ID NO: 222592 - RNA, 80 nt, Homo sapiens
gccacgagcacaaggaaacaggacacaacgcgcaacggggccagaagcaagggcccgaggcaccaacgcaaggacccccc

SEQ ID NO: 222593 - RNA, 76 nt, Homo sapiens
ccacgccccacacaggccccacacggcacggcagcaccacaaggaaacccccacagggcaaaccagcaggagcgcg

SEQ ID NO: 222594 - RNA, 77 nt, Homo sapiens
cgcacgccgggcggggaaacccggaccggaacaagcagaaagcacgaacaacgagaacaagacacgagcaaacccca

SEQ ID NO: 222595 - RNA, 50 nt, Homo sapiens
cccagagacaacgagagaacgagaccgcgccaccccaaagaaggggccgc

SEQ ID NO: 222596 - RNA, 71 nt, Homo sapiens
ggagggacgcacccccacagggcagaaggggaaccagaagaggccaaccagcacgaacgccagcagcacgg

SEQ ID NO: 222597 - RNA, 80 nt, Homo sapiens
gggaaggaaacagcaagcgaagccgaaaaagcgcccgagacgggcccgccgaaaggagagagagagagagaggaagcgaa

SEQ ID NO: 222598 - RNA, 35 nt, Homo sapiens
agccagaggaaaggcaccaaacggagcgccggccc

SEQ ID NO: 222599 - RNA, 58 nt, Homo sapiens
gggaagcaggacgcgccgcgccccaaggccgccaggcacagagaaggcaaacgggagg

SEQ ID NO: 222600 - RNA, 99 nt, Homo sapiens
acacagcaaggaccgaacccaaccacaggagcaaaacccacacaacgccccagggccaccgccagcagacgacagaagggaggcgcaaagaagggaaaa

SEQ ID NO: 222601 - RNA, 74 nt, Homo sapiens
gacaaagcagggacagcagagagcacagcacagaaagcaagaaaagaaccgcgaaccagcaaggcagaaaaaaa

SEQ ID NO: 222602 - RNA, 58 nt, Homo sapiens
gagcccagcgagacaccggaggcccacccgggcaggagaggccgaccacccggggggc

SEQ ID NO: 222603 - RNA, 83 nt, Homo sapiens
ggggccgccccccgaagcccagggagagcaaggcgcgcggcgacccggaggcagcacggcaggagacgaggagaggacagcag

SEQ ID NO: 222604 - RNA, 47 nt, Homo sapiens
ggagcacaacaggcagacagacaaggcggacaggaccaccaggaaca

SEQ ID NO: 222605 - RNA, 77 nt, Homo sapiens
gaggagccgccgggggccggcaaggaaacccaaccccagacaacccagaaaagaaaaggccaggggcgccgaaaaac

SEQ ID NO: 222606 - RNA, 83 nt, Homo sapiens
ccgccgcccccagccccccgcccggggagggcaccaggggaggggcgaccccggggcccggccagcacgaccgaggaggggcg

SEQ ID NO: 222607 - RNA, 71 nt, Homo sapiens
gcaacaaaggagcacgacggcaggaaggaggagacgaagaaaggaggcccgcgcgcccaacagcagggagg

SEQ ID NO: 222608 - RNA, 61 nt, Homo sapiens
gagcagaggggacagaggcaccaaggaccccaagacaggcaccaccggagaccgggcccac

SEQ ID NO: 222609 - RNA, 65 nt, Homo sapiens
ccgcacgcaagcggaaaccagaaacggcgaggaaagagaggagccccggaaagaaaaggacagac

SEQ ID NO: 222610 - RNA, 83 nt, Homo sapiens
cgccagcaccgaccaccgaggcggagggggagaacacccaggggcgggccgagcgccgagacagagaaacacaccaggcagag

SEQ ID NO: 222611 - RNA, 78 nt, Homo sapiens
ggaggcaggcagaaagaggagcccaaagagaccagggaacagagacaaagcgaaggagccccaggagggcaagagacc

SEQ ID NO: 222612 - RNA, 57 nt, Homo sapiens
ggagaaaggacacacgaaaacagacgggggaacaagagcggaggagcaccggaacac

SEQ ID NO: 222613 - RNA, 86 nt, Homo sapiens
ccccggagccgcccaagccgcgccccagagagcgcccgagagaacagggggccgcggccagagagggccaaaaccaaagacccgga

SEQ ID NO: 222614 - RNA, 77 nt, Homo sapiens
gagcagcggacgccggccgccgcaggagcagaccaccccacgaagaccaagcccagaaccagaagaaaacgcacgac

SEQ ID NO: 222615 - RNA, 85 nt, Homo sapiens
aggaagaggaggagagaagagaggaagcgagcagcacgggcaagcgggcagcgaagagagaggacaccggaacacgggggcaacg

SEQ ID NO: 222616 - RNA, 71 nt, Homo sapiens
ccggccagagggcaagcaaagaccaagagaagagaacgcaagaaccacccggcaccaccacccccagccgg

SEQ ID NO: 222617 - RNA, 66 nt, Homo sapiens
aaaaaaacagagcccgcgcagcagaagacggagacaagaggaaagcgaacgcgaaaagaaaagccg

SEQ ID NO: 222618 - RNA, 76 nt, Homo sapiens
aaagcccaaaaggcaaggcacaagggaccagccaaggaggcggagcaacagcaggaaaccaacgaggaagaacaag

SEQ ID NO: 222619 - RNA, 83 nt, Homo sapiens
ggcgcgcccgaacggagagcgccacccgggacacagcgccaccccgagcagcggggaagcgcaccccaccgacccagggccgc

SEQ ID NO: 222620 - RNA, 74 nt, Homo sapiens
ggacacaagaaaaagagcgaaaaagacacgccggggacgacgcagcacagagaggaaacgaggaaacgaccacc

SEQ ID NO: 222621 - RNA, 74 nt, Homo sapiens
aaagcaggccccggaaacagcccgaaggagagggcggcaagcaagacgaggacgcgcacaggaaaggacgcgga

SEQ ID NO: 222622 - RNA, 52 nt, Homo sapiens
cccgcagggggggcgggaccccacagaggaggagagcggcgacacacgggga

SEQ ID NO: 222623 - RNA, 72 nt, Homo sapiens
gcacccgggaagaacacagcccgggaaagcacagaaagccaaaagggcggagaacggaaaagcaccaggaag

SEQ ID NO: 222624 - RNA, 70 nt, Homo sapiens
acgccgccgagcagccgccagccccacggacggacgccagccccacaacaaggccgggggggcaaagcgg

SEQ ID NO: 222625 - RNA, 77 nt, Homo sapiens
caggcacgcaggaccgggaccagcagcagcaacggggacgacacaaccaacaacagaaggagaagaagcaccagccg

SEQ ID NO: 222626 - RNA, 82 nt, Homo sapiens
gacaggacagcgagcgaggacgaggaacggcggcgccgaccccgacagaacgggccccgcacccgcggccccggggcagcgg

SEQ ID NO: 222627 - RNA, 70 nt, Homo sapiens
acggcagagggccccggaccaaaaggccgagagaggggcccaggccggggaacgggagccgcacggggag

SEQ ID NO: 222628 - RNA, 83 nt, Homo sapiens
ccagaaaaaccacgaaaggacaggccacagacaagacaagaccacacccgggagagacagaggcaccagacccgccaggacga

SEQ ID NO: 222629 - RNA, 81 nt, Homo sapiens
aagaagacaacaagagaccaggcgaggaagaaggagcgacaaagcaaaggaggcacagacccaggcaagcggaaaaccagc

SEQ ID NO: 222630 - RNA, 71 nt, Homo sapiens
acccccgaacccccagcccaaacccggaaacccagcggcccagccgggcccgggcgcacgaccgcggcccg

SEQ ID NO: 222631 - RNA, 39 nt, Homo sapiens
agaaccaggacccaagccacgaagacggcaaggaggaaa

SEQ ID NO: 222632 - RNA, 62 nt, Homo sapiens
gccacgagagcaaccgacacagaagcacggagcccaagcggacagcagcagcacagcaaaga

SEQ ID NO: 222633 - RNA, 58 nt, Homo sapiens
gcaggcacaaggcgcagggggaaaggacagcgccagccaaggcaagcaaaaggaaaag

SEQ ID NO: 222634 - RNA, 72 nt, Homo sapiens
aaccgccccaagccccaaacagccggcgaaaacacaaaccaaagccagcgccggcgcccccccgcggccgga

SEQ ID NO: 222635 - RNA, 80 nt, Homo sapiens
acggccgggaccaccagagggaaagcggggcggcgagagccacagaaggaggaggggacagcagcaggagcccagcaaag

SEQ ID NO: 222636 - RNA, 102 nt, Homo sapiens
gcgaaagcacccagaggagaaaagcccaaagcgagccaaagggccggaggggacccaacaagccccaggacagaaggaaagcccgcacaaagggcgcgcgag

SEQ ID NO: 222637 - RNA, 99 nt, Homo sapiens
accagagaccaggggcaccgcagcgaccacccacacaaacccgggacgggccgagaggacagggcagaccgccagcagcacagcaagccacagagaggg

SEQ ID NO: 222638 - RNA, 76 nt, Homo sapiens
cccaccggcggccacgcaccgcgcgaagacggaagacgcgcccgcgccggggaccgggaggagggcgccaggagca

SEQ ID NO: 222639 - RNA, 69 nt, Homo sapiens
gcagaagacaagaacaaacaagacaggggcagaaagggaacaggcaggaaaacgacccaaaacagccac

SEQ ID NO: 222640 - RNA, 71 nt, Homo sapiens
cacagaaaaacccagaacagccccagggccacgacagggcgggaccaccaggagcagagcggaggccacca

SEQ ID NO: 222641 - RNA, 82 nt, Homo sapiens
gggcaggcccggcgccgccacgccgcagccaggagaggcgggccagcggagccgggacggaggggacaagaccccccccagg

SEQ ID NO: 222642 - RNA, 68 nt, Homo sapiens
aggagaggccaggacgagaaaggacggaccagagcagccccgcgagccgcccagggggagggcagaca

SEQ ID NO: 222643 - RNA, 65 nt, Homo sapiens
acgcccaagagaccaaacggacaacagcaccaggagaaggaacggaagagagccccaggacgaaa

SEQ ID NO: 222644 - RNA, 72 nt, Homo sapiens
acaacgaaagagacagcacaaaaagacggcaccaaacggcaaggaggaaaaaaccagaaaccagacggcggc

SEQ ID NO: 222645 - RNA, 84 nt, Homo sapiens
cgcacgcgagaacaagaacgacaagcacacaccaccgcaggcacagggaacacccaacagaagaaaaggagaaaaagcgggcag

SEQ ID NO: 222646 - RNA, 52 nt, Homo sapiens
cgaccggggccacccagaaacaggacgaaagaaccaccggaacaaagaaggc

SEQ ID NO: 222647 - RNA, 39 nt, Homo sapiens
gccggaccggcgcgcgcgagagagcgcgcgagaaaacgc

SEQ ID NO: 222648 - RNA, 87 nt, Homo sapiens
caccgagacgaagcgggcggcgaagaggaggccaccagaaacggccagcgagacccggaggagcggacgggcggaccagcagagacc

SEQ ID NO: 222649 - RNA, 79 nt, Homo sapiens
cgaagaagcagccccaggccaggaacggccagggggagccagcagaccagacacgaacacaccacagagaacacacccg

SEQ ID NO: 222650 - RNA, 80 nt, Homo sapiens
aagcccgggcgggcggggcgagcccccccccggagcccgccagggcagagcggcgggaaaccaccaacaacacccccaaa

SEQ ID NO: 222651 - RNA, 75 nt, Homo sapiens
cacagggacccccaccacaacacccgcgcgcacagccaggcccaaggcggggaccaggaggaagaagagagccga

SEQ ID NO: 222652 - RNA, 88 nt, Homo sapiens
agcggaggacagccgagaggagggcagcgggggcagagacggggaacagggccacccacacggacgccaacgcgggggcagaaccgga

SEQ ID NO: 222653 - RNA, 73 nt, Homo sapiens
caggaggcccggcacaccaccaggggaggaggaaaacacacagacgaaggcaaaagagcacaagagggccagg

SEQ ID NO: 222654 - RNA, 77 nt, Homo sapiens
aacagaacagcaacaagggcccgaccagccacaggaacacaaacagagaggggcggaaggcacgaaggaaagaaaca

SEQ ID NO: 222655 - RNA, 77 nt, Homo sapiens
ccgcacgccagcccaagccgacagggcggggaagacgggacggaacgcgacaccacgggcgggccgaaggacaagcg

SEQ ID NO: 222656 - RNA, 78 nt, Homo sapiens
cggcgcgcccgggccggggagcaagcgccaggcagaacgcgcgccgggcggacgcgcagggcaagggggccaaagccc

SEQ ID NO: 222657 - RNA, 79 nt, Homo sapiens
agagcgaggaacgccgagacgcaaaggagaaaaaacgcaagccgcaggaccgacgcaccgggaggcgaagcggcagccc

SEQ ID NO: 222658 - RNA, 72 nt, Homo sapiens
gcggcccaggcgcacaccgcggaccgaaggaaaaaagacgcacgaagagaagaagggccacggggacgaaga

SEQ ID NO: 222659 - RNA, 64 nt, Homo sapiens
ccagaaagccccgacggggggacagaaggggcacacaaaaaaaacgagccaacggagaacaaca

SEQ ID NO: 222660 - RNA, 71 nt, Homo sapiens
agggggaggagcagaaacacagcaggacaggccccccaccgaagacaagcgagagcggcaccaaaggcgac

SEQ ID NO: 222661 - RNA, 75 nt, Homo sapiens
caacacggcaacgcaggccagcaaccccagccaagcaagagagaagagggggaaaaaggaaggccgccggacagc

SEQ ID NO: 222662 - RNA, 62 nt, Homo sapiens
gcgggcagagcgcggcggcgcggggcgcccacccgccacaggaagagaccaaagagcaacac

SEQ ID NO: 222663 - RNA, 74 nt, Homo sapiens
ggccaccggcgggaggaacaaaaggcccggcaacacagaacaaaaaggccaaacagacagacaaccacacggcc

SEQ ID NO: 222664 - RNA, 69 nt, Homo sapiens
agaagcgagcacaaaaagaaagaagagaaccaggcgaccggcccgaggaccgccgcacgaccaaacgca

SEQ ID NO: 222665 - RNA, 111 nt, Homo sapiens
ggaagaagaccccgaccccgggaagcacgagcacgccaccggcgccagcgggcgagggaaagggagcagcaccggccacacccacagcacgaccggaacccagcgaccgac

SEQ ID NO: 222666 - RNA, 78 nt, Homo sapiens
ccagcgagcgaaccagaccaaaaacgcaacaacagacgcccagcgaccccggcccaaagcgcagggaagaacaaacac

SEQ ID NO: 222667 - RNA, 79 nt, Homo sapiens
gcccccagagcggaacacaggaagaaaacccagcccggaacaaagacgcaaccggcagaagccaggacgaccagaagag

SEQ ID NO: 222668 - RNA, 75 nt, Homo sapiens
acgagaaccaccccgacacaacaccaccaacaggcccagaacaggacagagcaggacacaaaaaggaacccagaa

SEQ ID NO: 222669 - RNA, 74 nt, Homo sapiens
ccacaggcccgcagcccggggcgaacacggacaccaacgagcgaagcagccacccggccaagccggaaaggaag

SEQ ID NO: 222670 - RNA, 78 nt, Homo sapiens
ccacacacgggaaacacaaaacgacagcccaaggcggaaaagcgaaggaagccacaagcacagcccacacaaaccaga

SEQ ID NO: 222671 - RNA, 70 nt, Homo sapiens
aaaacacaaaacagccgggggaggcccaaccagagcaagccaggcggaccgccaagaacggaaaacaaga

SEQ ID NO: 222672 - RNA, 52 nt, Homo sapiens
cacaacaggcagacagacaaagcacgcgggagaggaagagggggaagcccag

SEQ ID NO: 222673 - RNA, 77 nt, Homo sapiens
agaacagcaaccggggggaagagaggcgagggagccgaccacagcgaagcagaaggccccccggaggaggggaggcc

SEQ ID NO: 222674 - RNA, 53 nt, Homo sapiens
cgcaaggcccccgaccacacgcccgcgcgaggaggccaagcaccccagagcaa

SEQ ID NO: 222675 - RNA, 53 nt, Homo sapiens
ggaacggaggcggagcacccacgggaacagcccagaaacgagggaaaaacgaa

SEQ ID NO: 222676 - RNA, 61 nt, Homo sapiens
aggaaggccaccacagggccaacaagcagcgaggggccgggagaggaaggccccaagcagc

SEQ ID NO: 222677 - RNA, 78 nt, Homo sapiens
agcaggagcgccgcccacgcggagcaacaaggaacaagaggaagccgagcccgggcccccaagcgcacgccagcacgg

SEQ ID NO: 222678 - RNA, 81 nt, Homo sapiens
agcggggacccaggagccggccagcgcgccggagccgccgaggcccggaggccggggacgcccagaagggagacaagccaa

SEQ ID NO: 222679 - RNA, 78 nt, Homo sapiens
aagcgccgacccacaccccgccaggaaccccgagcccccggggcaaggccacccagcaggagcgcaaagaggcgaccc

SEQ ID NO: 222680 - RNA, 74 nt, Homo sapiens
aggcgcggacacgcaaaccacacaaggaggagacacacagccccagacgggaggaaaaaaggaaggaccgcgac

SEQ ID NO: 222681 - RNA, 74 nt, Homo sapiens
gcgaacgaaggaaccaaagaccgccgcacaacgccagcgagcagcgaaaagcgcaggaaggaaagggacaaaga

SEQ ID NO: 222682 - RNA, 79 nt, Homo sapiens
ggacgacggggcgggaccggcgccaccgcagccaccgacccgggcgacccaagaaggaagagagcaagagcgaaagaga

SEQ ID NO: 222683 - RNA, 80 nt, Homo sapiens
ggccgcggcacggaaccaggcccgcagggggaccacacccggggaaccagcgcgcccccagcaacgggccacacggggcc

SEQ ID NO: 222684 - RNA, 78 nt, Homo sapiens
caccaagaaagaaagagcagcggaaagacgacagcaacccgaagacagggaaaagagccaggacaaaaccaggcagaa

SEQ ID NO: 222685 - RNA, 73 nt, Homo sapiens
aggcccgagaaaaaaaacagccaagcagggaaagggagcagcaccggccacacccacagcacgaccggaaccc

SEQ ID NO: 222686 - RNA, 58 nt, Homo sapiens
gcccaaacaccgacggcagcagcaccaagaaaaaggggacccagagccaccaagcacc

SEQ ID NO: 222687 - RNA, 76 nt, Homo sapiens
ggacagcagagaggagcccacaacgaagcaaagcgagaggagaaggagcgagcgagcggccagcaacagccacccc

SEQ ID NO: 222688 - RNA, 81 nt, Homo sapiens
aacaagggcgcggcagagcggagaggcaaaagcagaccggaaaacccaccggcaagaccacacccgaggggagcccaggac

SEQ ID NO: 222689 - RNA, 80 nt, Homo sapiens
gacagcaaaaagacccaccaaggaagcagcggccacgccagacagcacccaagaaaacccaggccgcgaaggagaagacc

SEQ ID NO: 222690 - RNA, 53 nt, Homo sapiens
acgccgagggacccacacaaccaccagcggagggcccccccccagcgcgaccc

SEQ ID NO: 222691 - RNA, 77 nt, Homo sapiens
ccaaccggacagcaccaacggaaccaaaaagcgaaaacagggacccggcgggggcaaggaagcacggaggcccggga

SEQ ID NO: 222692 - RNA, 80 nt, Homo sapiens
cggagcgcgcagcccgcgccccccgcccccccaccgacacagcccagccgggagaagagcaaccggacacagaaggggaa

SEQ ID NO: 222693 - RNA, 107 nt, Homo sapiens
ccagcaacggcgagggaccacagcgagaccgcgccggcgaccaggagccggcggggcaccccgagaagcagcaggagcagccaacagaaaggcaagccgggaaggac

SEQ ID NO: 222694 - RNA, 60 nt, Homo sapiens
cgaccagccggcgccaaagagaacacaaggaacgaaaggaagggaagaagcagaaccaag

SEQ ID NO: 222695 - RNA, 62 nt, Homo sapiens
agagagaaaaacaagaacgggccaagaaggaagcgcccggggaagaagaaaacgccaacaga

SEQ ID NO: 222696 - RNA, 56 nt, Homo sapiens
ggcccaagggaaaagcagcggccgcaagacgcgaccggaaaggagagagagacaga

SEQ ID NO: 222697 - RNA, 73 nt, Homo sapiens
ccacaccggggcagcagagggaggcgccagcgcgacgagaggcacgaccgcccaagagacgggccccaggagg

SEQ ID NO: 222698 - RNA, 62 nt, Homo sapiens
cgcaccagcagccaccaggagcccgagagagaaggagagaagaagaaggaggccgcggccag

SEQ ID NO: 222699 - RNA, 65 nt, Homo sapiens
cgggacaggcgcgccccccccggcccaccacccaggaaacgcaaacagaaccaaccgaaggagga

SEQ ID NO: 222700 - RNA, 82 nt, Homo sapiens
accggccacaggcagacggcagggccggccagggagaccacaggaggacacacaaaacaagcaagagaggagaccagagaga

SEQ ID NO: 222701 - RNA, 82 nt, Homo sapiens
agggcgggaaaacgcggaacagagacggaaagaacaggccaagaaaagccaaagaaagcaaaaccagcagcagcagagcaac

SEQ ID NO: 222702 - RNA, 51 nt, Homo sapiens
gccgaagaaagaagcaggcgaacaagaggcgccagcgggcgcgccggaaga

SEQ ID NO: 222703 - RNA, 64 nt, Homo sapiens
gggggacgcagccaaaagaaacagggggaagcagaccaagaagacagaaggggcccgccaccgc

SEQ ID NO: 222704 - RNA, 58 nt, Homo sapiens
caggaccccggacaaacaacaggcgcgaaacaaaccagaccgaggcacgcaagccaga

SEQ ID NO: 222705 - RNA, 72 nt, Homo sapiens
cggaggcgggaccggaacaggcacaccccacacaagcacgccaaggaaacaggaacacgaaagaggaaaaac

SEQ ID NO: 222706 - RNA, 67 nt, Homo sapiens
agaaaaacaacaaagcaagaaacggacaggacagaaggaccagaaacacgacaggcaccagcaaacc

SEQ ID NO: 222707 - RNA, 60 nt, Homo sapiens
gcgccgcaggccacggcccaggccccggcacccacaagagcaccaggacaaccccaccac

SEQ ID NO: 222708 - RNA, 76 nt, Homo sapiens
ccgggagcacgaacaccacccaaggcacaaccggcccgggggagaagcgcagaaccgggagaacgagacgagaagc

SEQ ID NO: 222709 - RNA, 51 nt, Homo sapiens
gaaggaccaagaaccaggaggcacaccagaggcagaaccacaacccaccca

SEQ ID NO: 222710 - RNA, 79 nt, Homo sapiens
cccgccagcaaggcggcgcgcccaggagaggagaacgccaagccaaccgaaaaagccgacaaaaaaaagcaaaagcgcc

SEQ ID NO: 222711 - RNA, 67 nt, Homo sapiens
accaggagggggaaaacagcaaagcaagccaagagggcccagccaagaagcacggcaagagcagaaa

SEQ ID NO: 222712 - RNA, 54 nt, Homo sapiens
gaaaacaaaacgagaaggagggccagcccaaggcaagaaaaaaagaccaggagc

SEQ ID NO: 222713 - RNA, 81 nt, Homo sapiens
ggccagccccggagccgcccaagccgcgccccagagagcgcccgagagaacagggggccgcggccagacacacaggccacc

SEQ ID NO: 222714 - RNA, 76 nt, Homo sapiens
gcgcagccgcgcagggagaagaggcacccaggccacagcaaacacaggggcaggaaccggcaggaagccagggagc

SEQ ID NO: 222715 - RNA, 80 nt, Homo sapiens
agccccggcccaggacccccaaaaggaaagggagcagcaccggccacacccacagcacgaccggaacccagcgaccgacg

SEQ ID NO: 222716 - RNA, 72 nt, Homo sapiens
gcccagggagaaaggcccaccggccgggagggcccagggcggggcccgagacagaacggcaggggagacaac

SEQ ID NO: 222717 - RNA, 86 nt, Homo sapiens
ccgcggccaaacgggccgcgggccgagcgaggaggccgaggccgggaggccggcccggaggggcaggcagggcccagcaggacgcg

SEQ ID NO: 222718 - RNA, 70 nt, Homo sapiens
ccaccgccggcgcgggaaacgggcgaagcgacgagccgcgaggagaaggaccgcaaggaaggaccgacaa

SEQ ID NO: 222719 - RNA, 69 nt, Homo sapiens
agagggaagagggcaccaaaggccaggagaagggagaaacgaaggagggccgaggcaaggacggacaga

SEQ ID NO: 222720 - RNA, 61 nt, Homo sapiens
ggaggagcccccacacaccagcaccgcagaggaagcaagcccaccagagaagcgacccagg

SEQ ID NO: 222721 - RNA, 85 nt, Homo sapiens
ccacggcgaggaagcagccaagaaaaaaagacgaaagaagaagaagagcaaagggcccgcagaaaaccggaggacaacgaagccg

SEQ ID NO: 222722 - RNA, 73 nt, Homo sapiens
agccggccgaaccgagggaaacgccgggccaggagcgaagcagcacgcaagaagcccagggcgaaccaaacgg

SEQ ID NO: 222723 - RNA, 78 nt, Homo sapiens
ggacaggggggcacgacccccccagaggcgggacgcacaccgagacgaacacagaacagcacgaccagaggggaagcc

SEQ ID NO: 222724 - RNA, 80 nt, Homo sapiens
ggccacagcgcggaacggccccggagccaccagccagagagaccagaggagaaggaaaggcaaggacgccagagccaccg

SEQ ID NO: 222725 - RNA, 72 nt, Homo sapiens
gccaggaccagaggaggacggcccgagcgggagccaagagccggccagccgaccggcaacagcaggcagcag

SEQ ID NO: 222726 - RNA, 93 nt, Homo sapiens
ggcccgcgaggagccgccgcgcgcccgcgcccccgcgcgacgccagcgcccgggggcggagaaggccaggcagcagcgcaggaggagcccggc

SEQ ID NO: 222727 - RNA, 72 nt, Homo sapiens
cagcagcagcagcccgccacccaacagaccggagcgaaccaccccaaacagcaggcaggcagggccaacggg

SEQ ID NO: 222728 - RNA, 77 nt, Homo sapiens
caggcagaggagcggcgagaggagaggcggggcaggggaggaacgcacagggcccgagcaggagcccccgggccacg

SEQ ID NO: 222729 - RNA, 74 nt, Homo sapiens
gaaggacgccggccaaacccaggacaagagaaaagagcagaacacaaaaaaacaaagaggcagaagcgaccaga

SEQ ID NO: 222730 - RNA, 101 nt, Homo sapiens
cggcgacagcggcgagccaggcgcgcggagaaccccgaggcggcccggaggcggcggagggcaccccgggcgggcggcggcgccgccggccccggcggagg

SEQ ID NO: 222731 - RNA, 72 nt, Homo sapiens
accagaccgaccaccaaaacagcacaaggaaaacgagagaaacgaaggcgagagaaacagcaaggcccgagc

SEQ ID NO: 222732 - RNA, 78 nt, Homo sapiens
ggccccgaccgcggcggagcccgacccacccaagaggcgcaagccgcagcgggccccgcggaccggaagcccaagacc

SEQ ID NO: 222733 - RNA, 71 nt, Homo sapiens
gcgagggcgccgcacccacaccgcgcgcgcaggcgcccagcgcgaagggaccaggaaagggagcaacaaga

SEQ ID NO: 222734 - RNA, 49 nt, Homo sapiens
accaggccaaagaaagagaagccccagaggcgcgcccacaaaagcaagg

SEQ ID NO: 222735 - RNA, 79 nt, Homo sapiens
gaaaggagggaagccagaggccaaaggcaggagcaagaagggaacgcacagcgaagacaccccaacgggacaagaaacg

SEQ ID NO: 222736 - RNA, 76 nt, Homo sapiens
ggaagaccacggcgagcagaagccaccgacaagaagagacgagagaaaccgaacagaaacacagagagcgccacac

SEQ ID NO: 222737 - RNA, 42 nt, Homo sapiens
accaggagcccgagagagaaggggacggcgaacaggagccca

SEQ ID NO: 222738 - RNA, 82 nt, Homo sapiens
gcacaaaccgccacacaaaagcggacaagcgaagggcaccggccggcggcccgcagcggcaaggcagaccacccaggcaccc

SEQ ID NO: 222739 - RNA, 58 nt, Homo sapiens
cgagcggcggccagccggcaggacgccagaaagagggcaacggccgacgaacaccgcc

SEQ ID NO: 222740 - RNA, 83 nt, Homo sapiens
accaccgagccacaagggaccgggacggaccccgggagcccagacaaacagccaacccgcaacaacggcagaagaaaagcccg

SEQ ID NO: 222741 - RNA, 54 nt, Homo sapiens
gacgagcgcaaacgagcagcaaaacagggcaggcgccccaacccaagccagagg

SEQ ID NO: 222742 - RNA, 81 nt, Homo sapiens
ccccgagggcgggacacagccacacaccccaagcaacgagcaagacagagaaaggaagcacaggaccccaggaacaccaca

SEQ ID NO: 222743 - RNA, 71 nt, Homo sapiens
ccaaccagaaaagcgagggaccgacacaagaagcagccagaacagacgggaaaagaaacccaccacaaaac

SEQ ID NO: 222744 - RNA, 73 nt, Homo sapiens
ccgcccggccgacacggcaaccaaagggcggagaacggaaaagcaccaggaagcagagaggaccgcagaaggg

SEQ ID NO: 222745 - RNA, 80 nt, Homo sapiens
aagcggagaccagccgagcggcggcccggggcagcccggcgggcgaacccgcccagagccagcgcccccgcgaggacacc

SEQ ID NO: 222746 - RNA, 79 nt, Homo sapiens
ccaaggggcagggacgcggagagaagcaggaagcagggcaaacaagacggcaaggacggagcagcagcaaggaggaagc

SEQ ID NO: 222747 - RNA, 78 nt, Homo sapiens
ggggagcagacgaaccggaacccgcgggccccagccaacccgaaaaccccccagcggccacagagagcacaaagagcc

SEQ ID NO: 222748 - RNA, 83 nt, Homo sapiens
ccggcagcggcccagaccggcggcaggcaaaggagccccaagcagcgggagcggcagcggacacagacaggcaggagaagaag

SEQ ID NO: 222749 - RNA, 34 nt, Homo sapiens
gaacgcaagagacgacccggaagcgccgaacaaa

SEQ ID NO: 222750 - RNA, 56 nt, Homo sapiens
gggaacaacagaagcaccagggcagaggacccagccccagcccaacgagaacccag

SEQ ID NO: 222751 - RNA, 80 nt, Homo sapiens
gccgcaggacaagaaaaagaaaagaaaggcaaagaaaagaaggaaaggaaaaaagggccagcaaagccagccggaggagg

SEQ ID NO: 222752 - RNA, 77 nt, Homo sapiens
ccccacgcggccagcgaaaacgcccagcacgccagcacgcaggcaggaggaagcgggcaaaggagacccagcaaagg

SEQ ID NO: 222753 - RNA, 76 nt, Homo sapiens
gcaccccgcaaaaccagaccacccaaccgacccaggaagagcacgggacaggaagaagcaaggccgacgcagcccg

SEQ ID NO: 222754 - RNA, 81 nt, Homo sapiens
ggagaaaacaaccgcgggagcaccccgggcgccccaggagacaccgcgccaggagacagagcagaggcgacagggagacga

SEQ ID NO: 222755 - RNA, 76 nt, Homo sapiens
agcgcccaggaaggagccaaagcacaagaagaagacgaggccccagggaaaggaccgaggcaggaaagaggccaga

SEQ ID NO: 222756 - RNA, 65 nt, Homo sapiens
gggaggaagagagaaaagagagaaccccaaccggggaggaaaaccgacgaagcccggaaacagac

SEQ ID NO: 222757 - RNA, 63 nt, Homo sapiens
agaagcaggcccacacaaggccccacaggaagaggccagcgcccaaggaggacaaaccaacca

SEQ ID NO: 222758 - RNA, 75 nt, Homo sapiens
gcagcccaggaccgagaccggagcagccggggcggagcggccagaaagcgagcgacggaacacaaacaggcggaa

SEQ ID NO: 222759 - RNA, 69 nt, Homo sapiens
ggaccgggcagcaggacacggaaagcgggccggcgcaagacaccaagggacaccaccccggcacgagac

SEQ ID NO: 222760 - RNA, 75 nt, Homo sapiens
cccaacaaccacaaagcggaagagacccccccagcgacccagagaaggggacgggacgaaaacacagggccagcc

SEQ ID NO: 222761 - RNA, 48 nt, Homo sapiens
cagcccaaacgccccacgaccagcgcacccacagaagagcccccacaa

SEQ ID NO: 222762 - RNA, 116 nt, Homo sapiens
ccccacgagaccagaagcaagaaagagacagagaagaccagagggaacagccaagcagacgaggcaaagccccgccgacacagacggacagcaaaggagaagacaaacgggcccag

SEQ ID NO: 222763 - RNA, 72 nt, Homo sapiens
aaggaccaagaaccagaacgccaaaagacgaacacaaagggaaagaggagaggcacccgaaagccaggccag

SEQ ID NO: 222764 - RNA, 50 nt, Homo sapiens
cccaaaaggaaccagaacagggaaggcgagcccagggaaaggacagacag

SEQ ID NO: 222765 - RNA, 52 nt, Homo sapiens
gaaacagagaaagaaggcggccaggccaaccgaagggagcggcaggggaggc

SEQ ID NO: 222766 - RNA, 65 nt, Homo sapiens
cagaggaggccccccagccagggaaccccgagaaccggaggaagcaccaacaaaaagccgcgggc

SEQ ID NO: 222767 - RNA, 76 nt, Homo sapiens
caagaagagggccgaaaacaggaacagggccaaggaaggagggcggagcaggagaagagaaaaaagcacagagccc

SEQ ID NO: 222768 - RNA, 118 nt, Homo sapiens
ggagcggcggggccgggccgcgagcggaggagcaccgccgcggaaggagaccggagacgagaacccaccaggaccggaaacaaccgggggacgagagaggccaagcccagcacccaca

SEQ ID NO: 222769 - RNA, 35 nt, Homo sapiens
gcgggaagcaagagagagacggcaagcaggaaacg

SEQ ID NO: 222770 - RNA, 78 nt, Homo sapiens
ccgggaggggggaggaccggccccaggcgcgccacagccgagccgagggggcggagcccggacggaaagaaacacgag

SEQ ID NO: 222771 - RNA, 76 nt, Homo sapiens
aaaagaaccagaacagagcaggaaggaagggccggaacccccaaggagcacaccagcacacagcccgcacaagaca

SEQ ID NO: 222772 - RNA, 70 nt, Homo sapiens
aagacgggccccaacacccagagacgaaaggggcgcacggaccaacgaccggaaaaaggcgcgcgcgcgg

SEQ ID NO: 222773 - RNA, 74 nt, Homo sapiens
ggaacagcgcaaccgaaggcacggggcaggaaacagaagagcacagacaacagcagcgccgagaaaccggcagc

SEQ ID NO: 222774 - RNA, 70 nt, Homo sapiens
gcacaaggaggcgggaagcccagcacacacccccagcagaccggcaaagaacgcaacgcaggccagcgaa

SEQ ID NO: 222775 - RNA, 68 nt, Homo sapiens
cgaaggaaaagggagcgacgcaaaggcaccaacccaggaagaaccaaaaggcagacacacaggaaaaa

SEQ ID NO: 222776 - RNA, 72 nt, Homo sapiens
gcgcaagaaggccgggcgaggaggcccaaagcaccgagcgcccagacggaaccaaagccgaccccgaaacag

SEQ ID NO: 222777 - RNA, 78 nt, Homo sapiens
gacaaagaagaaagcccacagagacacaaccggagcccagagccacgcaaaggaaaggaggacaaaaggaaaaaaaaa

SEQ ID NO: 222778 - RNA, 81 nt, Homo sapiens
gcagagcagaggaagaagaccaacccaacgcacagcacgagacccgcagaccacgccagggacacccgccgcgcggcggcc

SEQ ID NO: 222779 - RNA, 73 nt, Homo sapiens
ccccagagcgggacacaggcaagcgagcccaacaagaagcacaagaaaggcgaaaacacagcgagagccagga

SEQ ID NO: 222780 - RNA, 76 nt, Homo sapiens
ggcggcggcagcgggccagacccaggaccgcgacaccaggagcagaagagcgaagaagcgggcacgcagaaaaaca

SEQ ID NO: 222781 - RNA, 81 nt, Homo sapiens
ggcggcccggcgggccaccccacccccgggcgggcaagggcagacgggggaggaggacgcaaagacaagccacagacagga

SEQ ID NO: 222782 - RNA, 75 nt, Homo sapiens
gcagcgcgccggccccaacacggaccgcgagcgccccccggaccgagaagcgacgaaggcgccccgccgagccag

SEQ ID NO: 222783 - RNA, 76 nt, Homo sapiens
agcgcaccccaccgaccagcggacacggaggcccacgcggaccggcagcgccaccggaccaccagacaaggacacg

SEQ ID NO: 222784 - RNA, 92 nt, Homo sapiens
gccgagggagggccgagccagccgcggccggaggagcccccaggccgcacacagagaaaaaaagggaacaaaacacagcaagcagacaaaag

SEQ ID NO: 222785 - RNA, 70 nt, Homo sapiens
aaaagaacagagaacaaggccaggaagaccagagaagagggaagccacagggaaaacaagggcgacagca

SEQ ID NO: 222786 - RNA, 73 nt, Homo sapiens
gcccaagcagcagaaggccagcgccgagcggacccaccgcgaggcgggggaagcccgcaaaccccccgaaccg

SEQ ID NO: 222787 - RNA, 81 nt, Homo sapiens
gcacaggcacccacgcggggaaagcgggagccgagaccaaagagaaagggacaaccaccaccagcgagcaaaagaacaaag

SEQ ID NO: 222788 - RNA, 57 nt, Homo sapiens
ccgggccacaccaaagagcagagccaaacggacgggcagcacgagaaaggaacgaga

SEQ ID NO: 222789 - RNA, 86 nt, Homo sapiens
cggccgcgggagcccgggcgcgcaccgccgcccccccagacaagaggacaccgcggaggaagggcggagaacggaaaagcaccagg

SEQ ID NO: 222790 - RNA, 72 nt, Homo sapiens
agagcccgcccaacaaacagaggacagggaagaggaccccaaaagggcacccgcaaaacagggacaaagaac

SEQ ID NO: 222791 - RNA, 75 nt, Homo sapiens
cggcgacgccccaggggaaaacccccgggaccagacacagcaggagccaagcccccccagacacaagccggccaa

SEQ ID NO: 222792 - RNA, 61 nt, Homo sapiens
gccagccaccggaccggggccaagcagaaccccgagagccccgcccacaaaagccgaggac

SEQ ID NO: 222793 - RNA, 60 nt, Homo sapiens
cggacagcaggcccacacccaggaaagagggaaagggagcagcaccggccacacccacag

SEQ ID NO: 222794 - RNA, 80 nt, Homo sapiens
acaccagccagcagcccagacaaggaaagaaggaccaggaagggggggaagcaaaaggacgacgaaggccgcaggaccag

SEQ ID NO: 222795 - RNA, 78 nt, Homo sapiens
agccgcggggcccgcacggaccccaccaaacagagaacgaggaagaaaaggaaacccaaaaagacaaggccaagcagc

SEQ ID NO: 222796 - RNA, 68 nt, Homo sapiens
accgcaggcacggggacaacagggcagacggcggggcgcagcccacggcggacggacaacagacaacc

SEQ ID NO: 222797 - RNA, 75 nt, Homo sapiens
aaagcagcaggagcgcagcacgaaaacggaaagggaagggaggccagcccggacgccggcagccagcacagacgg

SEQ ID NO: 222798 - RNA, 75 nt, Homo sapiens
ggggccagcaaacaaagccaggacccaaagacaggaccacgcaccagcagagaaggaaagcaaaccgaagcaggc

SEQ ID NO: 222799 - RNA, 77 nt, Homo sapiens
gagaaacgaaaaaccgaggaaggacagacggccagccagcacaaacacagacaagagaagagaggaaaagaaacccg

SEQ ID NO: 222800 - RNA, 55 nt, Homo sapiens
gcccgggcacgcccccacacgggcccccggcgaaaaggaagaaggaaacacaggc

SEQ ID NO: 222801 - RNA, 92 nt, Homo sapiens
ccgcagcgccaggagggagaggagagggagcacgcaggcaaggcagcagccccgcagaccgccggccaaacaacagaccccaggaaacaggg

SEQ ID NO: 222802 - RNA, 81 nt, Homo sapiens
gggccggacacaggaccgcgacgaagccaaaaacgaagaagaggggaaagcccacccagggccgagcgaggaagacaaacc

SEQ ID NO: 222803 - RNA, 74 nt, Homo sapiens
aagacgcaagacaaagaaggggaaggacgacaggccgggggagcacccagaacagcagcaaggcaagaaaggca

SEQ ID NO: 222804 - RNA, 82 nt, Homo sapiens
acggggcccgcgggcgagcagcggaagacacccccggacccccacagaccaaagagcagaagacgcaggaaacccaagaacg

SEQ ID NO: 222805 - RNA, 79 nt, Homo sapiens
cagagcgagccggagaagcaggggggccaggaggggagaggaggcaggcccgcgggcggagaacggaaaagcaccagga

SEQ ID NO: 222806 - RNA, 87 nt, Homo sapiens
gggaggcagcgcgggacccagcccaggcggcgcggacggggcgggccaagacaaggccgagaccgcgggaagaagaaggaggagcgc

SEQ ID NO: 222807 - RNA, 59 nt, Homo sapiens
ggaagcagccagggccaaaacgaccaggagaagcaacccccagccacaacgcgaaccgg

SEQ ID NO: 222808 - RNA, 84 nt, Homo sapiens
cggcacggcaagcccaggggagaggcgcgacacagaagggaaggagggaccccaagagaggacagaccccaggaccaagacccg

SEQ ID NO: 222809 - RNA, 76 nt, Homo sapiens
cgcaggaccgcacccgcggagacggacgcccgggcaaagccccacaagggacggcccccgaggcagcccgacggga

SEQ ID NO: 222810 - RNA, 58 nt, Homo sapiens
cgaagcgaacgaaagcaaaaccaaacacccgacacagaggcgcggggccgagaggccg

SEQ ID NO: 222811 - RNA, 77 nt, Homo sapiens
agcacgccgggagcggacacagcccaggcccaggccccccgagcgcacgcacgcggagccagcagaccggggaaccc

SEQ ID NO: 222812 - RNA, 69 nt, Homo sapiens
gcagccaagggccaggaagcagagagaacaggccaacgagcgcccccaagcggagccggagggcacggc

SEQ ID NO: 222813 - RNA, 81 nt, Homo sapiens
cccgacaggcccagaacaaggaaacagccaccacgcaccggaagcgagaccaggaggagcgccggaagcagcgagggacca

SEQ ID NO: 222814 - RNA, 56 nt, Homo sapiens
ggggaacggaaagcaaaggaagaccagaggagagaaacaaggaacccgaaaagcga

SEQ ID NO: 222815 - RNA, 84 nt, Homo sapiens
ccgggggggagggggcccggcaggacgaggacgaaggccgaggaacggacgggagacacaggaagagcgggccaaccggggacg

SEQ ID NO: 222816 - RNA, 71 nt, Homo sapiens
ggccccacgacacaagcaaagaagaaggaagaaaccagaagcgcacgaggaagacacagggagacgccgcc

SEQ ID NO: 222817 - RNA, 75 nt, Homo sapiens
gaaggagacagcccagaagaacgaggggcccccaccaccggagccagagaaggggcacacgccacccccggcccg

SEQ ID NO: 222818 - RNA, 70 nt, Homo sapiens
acggccccgacaccacaagagcaagaggggagggaaaaggaaaagcgcgaaagagcaccagcccggaaaa

SEQ ID NO: 222819 - RNA, 75 nt, Homo sapiens
ccgcagccgcgcccggccccaggacgcccggcggccggggagccggcccaagcggcaacccccagccacaacgcg

SEQ ID NO: 222820 - RNA, 43 nt, Homo sapiens
cgccaaccggccagaggacgaggggaggagaggcggcccagga

SEQ ID NO: 222821 - RNA, 54 nt, Homo sapiens
cgggaaagacgagcagcgaccgaaggagggaaaccgcaggaggaccaacggacc

SEQ ID NO: 222822 - RNA, 119 nt, Homo sapiens
cgagccagacagcggaggaggaaccgaaccaggaccaggccccaagcccgaggcccagaggaggagaaggagacccaacaccccggccagacgggccaccaggccggcgccccacgccc

SEQ ID NO: 222823 - RNA, 83 nt, Homo sapiens
aacggagaccagaccacgcagccacgcgggcgagcggcggggagcggcgaagccgcgggcgaggaaggaagaccaagaagcag

SEQ ID NO: 222824 - RNA, 74 nt, Homo sapiens
ggagcgaggccggggcccagccggaggcggacaccaaaggaaccacgcaagagcccaacacccccccagccaag

SEQ ID NO: 222825 - RNA, 92 nt, Homo sapiens
ccacggggacacaaaccagaccaaacgaaccaggcgacaaccaccagaagcggagaccggggaggcagaacggacccagagcaaggccggag

SEQ ID NO: 222826 - RNA, 77 nt, Homo sapiens
aaggaagcggagcccagacgaaccggaagcgcaccccccggaggcggccgagcccacgcgacgaagaacaggagagg

SEQ ID NO: 222827 - RNA, 67 nt, Homo sapiens
acaggcggcaagcagagagacaaccagaagacgacagcacagccgccaaagcgacgaaaacacaagc

SEQ ID NO: 222828 - RNA, 80 nt, Homo sapiens
caggagggagaccacagcaagacaccgggaccccggaagccaaaaagacgccgcggcccgacaggagccagacggagaaa

SEQ ID NO: 222829 - RNA, 66 nt, Homo sapiens
cagcccagcgacagcaggccacacagcgagcccagaggcccggaaggcgcaaaagggggagaacaa

SEQ ID NO: 222830 - RNA, 111 nt, Homo sapiens
gccacccagcccacaagggaggagccagaaaaaggggccgcgcgagcagaccaaacgcagccaaaggcagggaagaaaaagaagacaccagagaaacacgagagcagcgga

SEQ ID NO: 222831 - RNA, 71 nt, Homo sapiens
cgaacagccggcgcccggacgcgaggggggagggaaacacaaagaagacaccagaagggccagcaccacga

SEQ ID NO: 222832 - RNA, 74 nt, Homo sapiens
agggaagaacaaggccaaggcgaaaaccacaaagggaaggaaaaccagaccagccagagcaaggaagcgaaaag

SEQ ID NO: 222833 - RNA, 69 nt, Homo sapiens
cagagaaggcagccaagcccgggaaacaagaagaggaagaaagccaacaaccccggggacacggcacag

SEQ ID NO: 222834 - RNA, 64 nt, Homo sapiens
cgcgagcagacccgacaacacacccggcaggagcccacagccaggccacggacagagcgacgag

SEQ ID NO: 222835 - RNA, 78 nt, Homo sapiens
ccaaggccgggcaggaccggccagggacaggcacgcaggagaaggaaagagcagcgaaacaaagagaacagcaacaca

SEQ ID NO: 222836 - RNA, 78 nt, Homo sapiens
gcagaagccgagcaacaccccggccaccgacccacaaggccgcgggagagcgggggcgggaggcgggccccgggggca

SEQ ID NO: 222837 - RNA, 57 nt, Homo sapiens
acccaaaagccgacaaccccagaaacaggaacacagaaacgccccgggccagccgcc

SEQ ID NO: 222838 - RNA, 82 nt, Homo sapiens
cggaaccaccagaagccagcccccaggcggaacgcccgccccgcagagagggggccacggacggggccgagcacaaccaccc

SEQ ID NO: 222839 - RNA, 74 nt, Homo sapiens
aggcccgaacaggcacgaaaaaacccagcgaagaccacagaaaccaaaaaagaaacgcagaaggacagaaagca

SEQ ID NO: 222840 - RNA, 126 nt, Homo sapiens
caccccagcacgccccagcagagacaggaagacagggaaaaagaaccgcccccggcagcagcccaggggcgacccgcacaaaacccaagggaggcgccacagaccggggcgaggcggcccggaccc

SEQ ID NO: 222841 - RNA, 55 nt, Homo sapiens
ggggcacgcgagcagacgagcgaccagcagacacaggggcaaacaacggagaccg

SEQ ID NO: 222842 - RNA, 54 nt, Homo sapiens
cgcgggcgcgagaacggccgcccgccgcagcggagggcacagaacagagcagag

SEQ ID NO: 222843 - RNA, 77 nt, Homo sapiens
gaacgcagccaacagcagcaaagcaagcagcagccagcagccacaaagcggcccagggcagcagcagcagcccgcca

SEQ ID NO: 222844 - RNA, 80 nt, Homo sapiens
gaaaaacccagaagaaacagacagaaggaaaagaagggaaaacgaaggagaagcaagagcaacgaaccaaagcaaaggag

SEQ ID NO: 222845 - RNA, 55 nt, Homo sapiens
caacccgggcgaagcgaaaggaacccaggaagagccagaagggagacgggcagag

SEQ ID NO: 222846 - RNA, 69 nt, Homo sapiens
gccccccacaacccggaccacccaccaccgcaaggcagacacgccagcacagggaacaccagaggcggg

SEQ ID NO: 222847 - RNA, 38 nt, Homo sapiens
cacgagccagacgcaaaaaacgcggaaaaaaccggagg

SEQ ID NO: 222848 - RNA, 80 nt, Homo sapiens
cagagcaagaaaagcccgggagcagaagggaggcccaagacccacaacaaaagagaccaagcgaccaagcaagcagcgcc

SEQ ID NO: 222849 - RNA, 82 nt, Homo sapiens
cgcagaggaggagcgcagcccggcccgaggccggaagagcgggagcgggagccaggcagaaggccaaccaaccccaggaaaa

SEQ ID NO: 222850 - RNA, 70 nt, Homo sapiens
caccacacgcaaagagaagaagggggaaaaagggaccgcgggccaaaaggagccaccagccggaacgccc

SEQ ID NO: 222851 - RNA, 79 nt, Homo sapiens
gcaggcaggccccgcaggccacccaggcccggaggcagcgcaggggcagagccggcgcaaaacaccggaaagaccgaaa

SEQ ID NO: 222852 - RNA, 59 nt, Homo sapiens
accaagaaggccgagaggggaagacacccaaggacaagcgcaccacaaccacgagacac

SEQ ID NO: 222853 - RNA, 61 nt, Homo sapiens
ccagcagccgccaccgagaggggaggaccaccgcacagagcccgaacagacacgccgaagc

SEQ ID NO: 222854 - RNA, 68 nt, Homo sapiens
gcaagaaagcggaaaacgaacacccccgggaaccagccagcaggcaacaggcccagaccaggcccaaa

SEQ ID NO: 222855 - RNA, 82 nt, Homo sapiens
gaaccgcgggccccaccaacggccacccaagcacagaggaaaccccccaggcaagaggcgcaggaccgggaagaccaacaaa

SEQ ID NO: 222856 - RNA, 63 nt, Homo sapiens
cgcaaaagaagagaaaaaccccggggcccccccagaccaaagggagaaaagaagcagcccacg

SEQ ID NO: 222857 - RNA, 85 nt, Homo sapiens
gagggcggaccccagaccaggcgggggcccgaccgaccccgcgccagaccaaaacgaagaagacgagccaaacccaaaaaggaag

SEQ ID NO: 222858 - RNA, 79 nt, Homo sapiens
accaacgacgcgcccacaaccgggccggccccagagcccaccgggaggagaaggaggaggaacgacccagaagaagaag

SEQ ID NO: 222859 - RNA, 93 nt, Homo sapiens
gcggcggaccaccggagaagcacaagcagcacacaaggccgagcgcaggaggagggaagaacgccacaaccgcccccagcccaacccgagcgg

SEQ ID NO: 222860 - RNA, 44 nt, Homo sapiens
gccccgggcccgcccgcccgcaccaggcgagaaccacgccgaca

SEQ ID NO: 222861 - RNA, 55 nt, Homo sapiens
gagagacacagcacagaaaaaagagagagcccggcagggccagggccacgagcac

SEQ ID NO: 222862 - RNA, 59 nt, Homo sapiens
cccccccgccaggccccagagacaccagccacgggccccgccagcagagcgcacccaac

SEQ ID NO: 222863 - RNA, 60 nt, Homo sapiens
gagagggaggagaaacagaagcgggaaaacaaagagggaaaacggagaaaagccccccca

SEQ ID NO: 222864 - RNA, 96 nt, Homo sapiens
acgcacgaggcaccagggcgcggggacgaaagaggggcacgcggagaaggcagggagccgagcggagccagggccccaggggaccgacccaaagcg

SEQ ID NO: 222865 - RNA, 81 nt, Homo sapiens
aacggaaaggggagggcgaagaccccccgaaagaccacagaggaagacaagaagagggaaagaaccccgcagcacgagcag

SEQ ID NO: 222866 - RNA, 80 nt, Homo sapiens
gacccggccccggcccacaggggggggcaaacccgagagaacggccacgggcagaggcagggaggcaggggaacagcaga

SEQ ID NO: 222867 - RNA, 70 nt, Homo sapiens
gcagcgcaccgagggacaggcgccgcggaggacaagaggaaaaacagcgagggaaaagcagcaaggaaac

SEQ ID NO: 222868 - RNA, 75 nt, Homo sapiens
cggcggcagggcggaggcccgccgccgcagagcacccaacggcgccggagaagaaggcgggggcgcaacacacag

SEQ ID NO: 222869 - RNA, 79 nt, Homo sapiens
caaaaaaggaacaagacagaaaaacaacgaccaaaaacacacggaagcacaaagcgagaccaagaaaacacggccaaaa

SEQ ID NO: 222870 - RNA, 77 nt, Homo sapiens
cccgacgccaggcagcgcccccaaacgggagcgggaaacgcacaacagagaacagaaaagacccgcagacaacgggc

SEQ ID NO: 222871 - RNA, 90 nt, Homo sapiens
cgaggcaggcggacaccgagaacaaacggacccaggacaaaacgacaccagccaaaccagcagcccccagcaccagcaacaaagcggagg

SEQ ID NO: 222872 - RNA, 80 nt, Homo sapiens
gcgcccagcgcgcccgggccgcgccgccccgccccagcaagacagacggcgccaaaggacagaagaccaaaagagccaga

SEQ ID NO: 222873 - RNA, 65 nt, Homo sapiens
cagaccaccaccaaaagcagggcagaaagcacaggcaagcacgaggagcggcaggacgagcaggc

SEQ ID NO: 222874 - RNA, 65 nt, Homo sapiens
agcgcccgccgcaaggcgggggaggcggcggcccagccacgaggaccacgagggagaaacagagg

SEQ ID NO: 222875 - RNA, 75 nt, Homo sapiens
ggaaacaaaggggaagaccagagcagaagacagacaaaaaccaagaaacaagaccggaacacgaaagaggcagag

SEQ ID NO: 222876 - RNA, 77 nt, Homo sapiens
agaggccagaagcgcccaagaggccgaggaagaccggaaggccagcagggcaggaaaccaggcgcagcccacagaaa

SEQ ID NO: 222877 - RNA, 39 nt, Homo sapiens
cccccaccaggccgcggcaggggcaacagagagaccaac

SEQ ID NO: 222878 - RNA, 76 nt, Homo sapiens
aacacacgcccaagggccggggaaaggccgcaggaggccaggcacagaggagccagcggcgagcgcggccagggcc

SEQ ID NO: 222879 - RNA, 64 nt, Homo sapiens
gagcacggccaaagcagcaaggacggcaaggacaagcaacgggcgaccgacgcacagcggcaaa

SEQ ID NO: 222880 - RNA, 101 nt, Homo sapiens
gaccgagaccggaccgagagcggaccgagagcgcgaaacgcacgagaaggagaagccccggggaaagaggaggaaaacaaaggcagcgaacaaaccacaaa

SEQ ID NO: 222881 - RNA, 72 nt, Homo sapiens
ggaggagacacgaacagcaagagccaacacagcacaagggcagcaccagaaagaggcgggagcaccagacag

SEQ ID NO: 222882 - RNA, 78 nt, Homo sapiens
agaggagagcggaaccaacgcaggagcccacaagccagaccgacaccgcggagcaaggaaaagagcccggaaaaaaga

SEQ ID NO: 222883 - RNA, 73 nt, Homo sapiens
gcagaaaagacgagacagcaagaagcaagaaggagaaacacaagcacaacgggaagcggaaacccgagagaga

SEQ ID NO: 222884 - RNA, 52 nt, Homo sapiens
gggcggggagaggggaggacaagagcaccaagagagaccaggacacaccacg

SEQ ID NO: 222885 - RNA, 77 nt, Homo sapiens
cgcagagcgccgaggagggcggaggccagaagaggacgacgccagcgacgagcagggcccaggacgacgaacggaag

SEQ ID NO: 222886 - RNA, 82 nt, Homo sapiens
cgacccacaggccagagagagccggcagagagcagggggaacacgcgcagggacgaccgaggaacagggcaaacagacacca

SEQ ID NO: 222887 - RNA, 81 nt, Homo sapiens
ccgagccaggcgcccaagcagaaacaggaggaaaggaaacaggaggacccagaccacaacagaaacagaaacaacgccaaa

SEQ ID NO: 222888 - RNA, 100 nt, Homo sapiens
gaggcggccgccgcagcccaggcgcgggggcgacgacagggacgcacaccgagacgaacacagaacagcacgaccagaggggaagccaagcaaacgcaga

SEQ ID NO: 222889 - RNA, 72 nt, Homo sapiens
acccccgaaagccagacagaccggaacacgaaagaggcagagcgggaaaagaggaagaagggaaaaacggac

SEQ ID NO: 222890 - RNA, 55 nt, Homo sapiens
ggaccaagaggcgagaaagaagacagaaagagcacgaggcgagcggggagacccg

SEQ ID NO: 222891 - RNA, 88 nt, Homo sapiens
gaggcggagcagcgcccagcgagcccggggcagcggcgccgggccgggacgggcgcgaggggcgacaaagaacagccaagagaccagg

SEQ ID NO: 222892 - RNA, 81 nt, Homo sapiens
cagaggcggcacggccagcggcaccacccccagcaccaccccagccccgcgcccgggccagcaccccaagccaggccagcc

SEQ ID NO: 222893 - RNA, 74 nt, Homo sapiens
gcggaaagcccagaaggggccagaaggaccccaagcaaaggacacccccccccagacacaggcaaaaccagcgg

SEQ ID NO: 222894 - RNA, 84 nt, Homo sapiens
aacagcagcgccgcccgccgacagccaggcccgggagaagacagacaagcagacggggccgccacacgcccaaccagggcaccg

SEQ ID NO: 222895 - RNA, 85 nt, Homo sapiens
agacggcggcagcagcggcacagaccccaagaagaagcggaagaggagccgcggaaccaagacacaaggaacagaagacaggacc

SEQ ID NO: 222896 - RNA, 43 nt, Homo sapiens
cgagcaggcgagaccacgggcgaaaaaacgagaaagaaagcag

SEQ ID NO: 222897 - RNA, 73 nt, Homo sapiens
gggagagcgaggacccacaggagcccaccccggaggggggcagcagaggagaggaggagggaggggaaaagga

SEQ ID NO: 222898 - RNA, 74 nt, Homo sapiens
ggccgagcccggccgccagaccacagcacagccgggaaggggagccaccagcccccgaaagagcacgaggagca

SEQ ID NO: 222899 - RNA, 66 nt, Homo sapiens
cagagaggagaaaagagaccaagaggacaggaagaccggacagagacgagcgaaacaagggcacac

SEQ ID NO: 222900 - RNA, 82 nt, Homo sapiens
gacagcagcgcaggcaaaaaacagcgaacagagcagagcacgcccagaaggccggaaaggagcacacccagcaaagaagcga

SEQ ID NO: 222901 - RNA, 73 nt, Homo sapiens
agccaggaacaagcaaaaagacccagaagcccagaaccagcaggggaaggaaacaaaggagggggagacccca

SEQ ID NO: 222902 - RNA, 74 nt, Homo sapiens
ccaaagccccgccacccaacgcccgcacggggcagagcgcgcgggaagcacaagccagcagacgacaacaggcg

SEQ ID NO: 222903 - RNA, 74 nt, Homo sapiens
agcgcagccccccaaagccaaacggcaagacgcagcaagaacgggacaacggcagggcggcacccaacaaaacg

SEQ ID NO: 222904 - RNA, 71 nt, Homo sapiens
cgggaccggagcaccggcagacccggggaccgggaagggcgagccagcccccacccagaggagaacgaaac

SEQ ID NO: 222905 - RNA, 40 nt, Homo sapiens
gcgggacccgaggcgagccaagcagccggacagggacggc

SEQ ID NO: 222906 - RNA, 75 nt, Homo sapiens
ggaggggaccgacgccggcagaacacgcgcgggaccccgggcacggcgcgcgggagacggagccaccaccacccc

SEQ ID NO: 222907 - RNA, 58 nt, Homo sapiens
aaaagcgaaaaaccggagccaacgaaacaaaaagcagggccggagcgagggagagcag

SEQ ID NO: 222908 - RNA, 79 nt, Homo sapiens
gaacccgagcaagagaaaggagagaggagccggaaagccagggaaaagcagagacagaagcacaaccagaacagcagac

SEQ ID NO: 222909 - RNA, 76 nt, Homo sapiens
gagcgcgcggccgcggccaccggaagcagccgccaacgcggaggcagggcgcaaaagcaccaagcccaacccccag

SEQ ID NO: 222910 - RNA, 90 nt, Homo sapiens
ccgcccggcagcgccccgcgagaagaggggacccagacacgccaaagccggagccacaggaaggagacagggccccaggacgacacagca

SEQ ID NO: 222911 - RNA, 75 nt, Homo sapiens
aagaaaacagggcaaagccccaaccaacgaggcaacagagggaaaagacaaacggagcaggaaaaagaacaggag

SEQ ID NO: 222912 - RNA, 118 nt, Homo sapiens
ggggcccccacccgcaccaccaccgcccagccggcccgcacaacccccccgggcccacgccaggaagggccgggccggggcacgggcccacggccccccaccgggccaccccgggggc

SEQ ID NO: 222913 - RNA, 77 nt, Homo sapiens
gaggggccgacgggagcagaggaagccgaggaccaccacagaaggaagaagggcagcagcccagccaaagccggaaa

SEQ ID NO: 222914 - RNA, 72 nt, Homo sapiens
gcccaccaccccgcccccgcccgagcgggagagcacaacaggaaccagagaaacaaggagccaggcgcagag

SEQ ID NO: 222915 - RNA, 81 nt, Homo sapiens
cggggcagaagagacgaagacagacacacaagaggacagggagaaagggccccaagagaaagaaaccgacggccccaggag

SEQ ID NO: 222916 - RNA, 70 nt, Homo sapiens
gaaaaagagcgaaaaagacacgccgggacagaagcccaacacgagaaagcaagaaccgaacgcccggagg

SEQ ID NO: 222917 - RNA, 89 nt, Homo sapiens
ccagacccaaggcccccgaggagcgcgggcgccgaggccagcacccgcccgaggacagagaggcgagcgcccggaggggagagagcgga

SEQ ID NO: 222918 - RNA, 83 nt, Homo sapiens
gaggaagagaagcagaaggaagagaggaaaggagaaggagccagagaagaggaggagagaagagaggaagcgagcagcacggg

SEQ ID NO: 222919 - RNA, 76 nt, Homo sapiens
ccccgagggcgggacacaggccgaaccggggcagcgcgcaaggaggagcagcgagagcggccagcacgggcggcga

SEQ ID NO: 222920 - RNA, 78 nt, Homo sapiens
cggaggggccgcgccccaaggcggcgcgaagccacaagaaaggccccgagccccggccccaaagacccaaaacagaga

SEQ ID NO: 222921 - RNA, 82 nt, Homo sapiens
caagaaggccagcacagccccacaagggggggccacacaccgcgccggccccgggcggggaggcccgcagagggaggggggc

SEQ ID NO: 222922 - RNA, 69 nt, Homo sapiens
agccacaggacacaacgaacagacggaaacagagagaaccagaccccgaggaacagcacagccccagag

SEQ ID NO: 222923 - RNA, 83 nt, Homo sapiens
gagagcgagcggacacggccacggccccacgccagccggaggagaaccccacacaagcacggcagcaggagccccagcgaccc

SEQ ID NO: 222924 - RNA, 78 nt, Homo sapiens
ccgcaggccaccaagaccgggaacaagcaaacacccaagaacgaggccccgcagcaggcagaaagggagaagcccgca

SEQ ID NO: 222925 - RNA, 55 nt, Homo sapiens
gccgggaggacagaagacagaaggcaccgcagaagggagccagcgaggcgacaca

SEQ ID NO: 222926 - RNA, 81 nt, Homo sapiens
accggacgcggcggccaccaggggccaaaagccaccagcaggggcgacaacagcacagggggagaagagggagacccgaac

SEQ ID NO: 222927 - RNA, 71 nt, Homo sapiens
cgggcgcggcgcgcccccgcgccccccggagccccgggccagagaacccgggccgagaccaaccgacaggg

SEQ ID NO: 222928 - RNA, 64 nt, Homo sapiens
agacccagaagccaagccacgcaaaagccccagaacccccacaaaagagccaaccaaaggagaa

SEQ ID NO: 222929 - RNA, 66 nt, Homo sapiens
gcggcgagcgcgaaggcacgagcggagggagaacaagaacgcaggagcagcccagaacaaaggaga

SEQ ID NO: 222930 - RNA, 81 nt, Homo sapiens
acagagaagggagccaagcggagggagaacgcaagcgagaagaagaaaagaagagagcgaggagcggcaggagcaagccaa

SEQ ID NO: 222931 - RNA, 37 nt, Homo sapiens
ccggaacagacgcaggaaggggagcccacaagacgca

SEQ ID NO: 222932 - RNA, 82 nt, Homo sapiens
ggaccggaggagacacggcccgcaggcgccgaagaagggagggaaccagaccgggacagagcccgcacgcggacacgcagcc

SEQ ID NO: 222933 - RNA, 77 nt, Homo sapiens
gacggaaagagacccagggcgccaaaaacagggccagaacccaaaaagagccacccaaggccgacgcaggaccaggg

SEQ ID NO: 222934 - RNA, 61 nt, Homo sapiens
cgcaagaaacagcccacaggcacaggggaaccgcccaaaagcccgccagaagaaggacggg

SEQ ID NO: 222935 - RNA, 54 nt, Homo sapiens
aaaggccagggacaaagaccaggcggcagaagccaaaaagaggcaagcagcaga

SEQ ID NO: 222936 - RNA, 70 nt, Homo sapiens
aagcaaaggaggaagccccacagaagagcgaagaaagggaccgagggggacgaaagcggaaaaccgcaac

SEQ ID NO: 222937 - RNA, 81 nt, Homo sapiens
aagacaagcccacacccagaaacagcggcacagcgaagacaggacacagccgcgggggcaccacgacgggaccgggcagag

SEQ ID NO: 222938 - RNA, 77 nt, Homo sapiens
gccccaacaacacaggcacacggaagaacagggaaccgagaacagccaaggaccccaagcgaacaagagcaaaagag

SEQ ID NO: 222939 - RNA, 70 nt, Homo sapiens
gaggcacagcgcagcgacgagagggccaagaggggaaggaccccaaccggcccccgccgcgcgggaggga

SEQ ID NO: 222940 - RNA, 88 nt, Homo sapiens
ggccaacacgcgggcagcgaacaagcgggagcaaggagggcgaagagcgaggaggagcacagcaagcgggagcaggcagaccaaagga

SEQ ID NO: 222941 - RNA, 71 nt, Homo sapiens
gacaaggcgcacacacaagaaaggcaacaaaaccacgcaggccggacagcagacaggacaaagagggaaga

SEQ ID NO: 222942 - RNA, 80 nt, Homo sapiens
acagcgaagccacccagcgccgagggaaggcgccgcgccaggccgggcgggcgacggagccgacagacccacccacacgg

SEQ ID NO: 222943 - RNA, 58 nt, Homo sapiens
cggacccggaaaaccggcccccaacgacaaaagagagaagaagaaggaggccgcggcc

SEQ ID NO: 222944 - RNA, 78 nt, Homo sapiens
caggacggacaccgggcacccacagagccagcgagaagggccagaagaacgaccaaaggaaaggaggacggcggacga

SEQ ID NO: 222945 - RNA, 68 nt, Homo sapiens
aaaaccccacccaaacgcagcaagaccgaaacaaggaccccccgggagaagaaaagcgggacgaggaa

SEQ ID NO: 222946 - RNA, 80 nt, Homo sapiens
gcccaccagcaggcaagcccacaggccaagggaacgaagaaggacagaacggacaaggcagagcaaggaaaagacggcca

SEQ ID NO: 222947 - RNA, 68 nt, Homo sapiens
ccgcccgggaagggggccgggggccagcaacagaagaaagcaagcaccggggaaagcggcccgaaaca

SEQ ID NO: 222948 - RNA, 73 nt, Homo sapiens
acagcaacaaagcaaccccggagacggaagccgccacaaacacccagaagccgcaggaggaaaaccccccgca

SEQ ID NO: 222949 - RNA, 77 nt, Homo sapiens
cgccaagcccgaacagagccacacgaccccgcggccaaggacgccggagcagccacgcagccccaccagcacgggag

SEQ ID NO: 222950 - RNA, 74 nt, Homo sapiens
agaacgaacccaaaaggagccaggagaaaaaggacagggaagcacaaacaccagcccgaacgagacgagaaacc

SEQ ID NO: 222951 - RNA, 67 nt, Homo sapiens
ggggaggcgggaccagacgaggaacagcaaaaaggggagccaagaagaaccagagaaaccaacaggc

SEQ ID NO: 222952 - RNA, 77 nt, Homo sapiens
aaaggagagacacggaacacaaggaagcaaaagcccagaaacggggggagcagcgcgagcagggacggaaagcagcg

SEQ ID NO: 222953 - RNA, 75 nt, Homo sapiens
cacacacacaacgagcggacagaacaaagagaagcccagaaccacaaaggcccagccagccgccgaagagcaacc

SEQ ID NO: 222954 - RNA, 53 nt, Homo sapiens
cacacgccagcagaccaccccgggagggagcccaaaggacgaaaacaagaaag

SEQ ID NO: 222955 - RNA, 82 nt, Homo sapiens
cgcgcgcccggccaagaggcaaaggggaggacgcagcaaaccaccagaaggcgggggacagccggcgcggcccaagaagaga

SEQ ID NO: 222956 - RNA, 75 nt, Homo sapiens
aagccaagagcgcacgggggaaacaagcgaaaaacaggcaagggcagcccggcggcccgcgagcccgggagacgc

SEQ ID NO: 222957 - RNA, 75 nt, Homo sapiens
gggaagaccacaacaagcaagcagcagcacgcgaaaggagacaagcgacagagaagaagagaaccgcacgcacag

SEQ ID NO: 222958 - RNA, 74 nt, Homo sapiens
cgaaggccagagaagaggaaccaaagggaaaggggacccccaaaagacaagggcaaaacggaccagacacaaag

SEQ ID NO: 222959 - RNA, 71 nt, Homo sapiens
ccacgaaggagcagacaccaggcgggaacgaggacaaacaaagggaaaaagagccgaggacagaagccgac

SEQ ID NO: 222960 - RNA, 65 nt, Homo sapiens
ccggcggcccgaccggccgcgacagcgaacagcgcggccgcaggacacaggaaagggaagcgccc

SEQ ID NO: 222961 - RNA, 68 nt, Homo sapiens
cccgaacagcagcagcgcgagcgacaacgggacgggaaacaagagaccgacccaaacccacccaaggg

SEQ ID NO: 222962 - RNA, 79 nt, Homo sapiens
agagaacaagaggagaggaagagagcaaggacaccagcagggccggcccagggagaacgcaaaaccaccacccccacaa

SEQ ID NO: 222963 - RNA, 41 nt, Homo sapiens
ggggggcggcccggccccgcagaaagaagcccggcgaggcc

SEQ ID NO: 222964 - RNA, 84 nt, Homo sapiens
aacaagcaagccgccaaaggagaaggaaagccacagcgaaaggaggagaacaagacccacggagaacccccaacaaggccaagg

SEQ ID NO: 222965 - RNA, 81 nt, Homo sapiens
aacaggcccaacacgcagacggcagcaaagcgccaccggaccacgagaccggagcccaaggagcaacagagaccgcgagag

SEQ ID NO: 222966 - RNA, 77 nt, Homo sapiens
gaaaaccggcccgaggggacgggggaacccggggccagaggcagccggcacccgcacaacccagggggccgaaccca

SEQ ID NO: 222967 - RNA, 75 nt, Homo sapiens
gcgcgcgcccaaagccaaacaggagcgccgcggccaagcccgccaggcacggagagagagaagaaacgagagaga

SEQ ID NO: 222968 - RNA, 81 nt, Homo sapiens
ggcccccaccacccggaggagcagcccgccccgccgggggagacgacccccgccagaggggggcgggccgagcacccgcag

SEQ ID NO: 222969 - RNA, 68 nt, Homo sapiens
caccggccccagcccacccaccccagacagcaggaacagagcaaagaggggcggggagaaaaaagccc

SEQ ID NO: 222970 - RNA, 76 nt, Homo sapiens
agcgcacggcagcgagaggcagaagcccccggggagagacagacagagggacacagagaggaagaaaggaggcccg

SEQ ID NO: 222971 - RNA, 68 nt, Homo sapiens
cagggggaacgaggcgccgaccccacaggaagggaagcacagcgaccccgcagaaccggccgaaaagc

SEQ ID NO: 222972 - RNA, 67 nt, Homo sapiens
acggcgaccggacccaaaacagaaggaaaggcaagggcagaaaagaggggaaaaggccagccgcacg

SEQ ID NO: 222973 - RNA, 79 nt, Homo sapiens
acgacacggacgaccgcgcgcccgcccggcccgcacgccaagcacggggggcaggccaccgcaaagggcacaagccccc

SEQ ID NO: 222974 - RNA, 74 nt, Homo sapiens
caaaccaggagagaaacgggaaggaagagggaccaggggagacggccaagcaagcagcaaccgcacaaaccgaa

SEQ ID NO: 222975 - RNA, 53 nt, Homo sapiens
cacgcaaccccacccccagggaaaaagacacagcaaagcccccagcacaaaag

SEQ ID NO: 222976 - RNA, 79 nt, Homo sapiens
gaacagggacgaaccgccacggaccgcaagccaaggcagaagcaaagaagcgcggcagcaaacggacaaaggaaaaaga

SEQ ID NO: 222977 - RNA, 82 nt, Homo sapiens
gcgcccggccccaggacgcccggcggccggggagccggcccaagcgggggggggaagacaacccggagaacacccaggggac

SEQ ID NO: 222978 - RNA, 85 nt, Homo sapiens
cggggggccaccgaacgcgcacgccggcaggaaaagcggccaggaccaccaggcggccacgggcccccagcaccaccgcacccca

SEQ ID NO: 222979 - RNA, 35 nt, Homo sapiens
gccggagggaagccgccaagagacggagcagcaga

SEQ ID NO: 222980 - RNA, 82 nt, Homo sapiens
gccgaggaaaagagaaagacagcaacaacaaccagcagcaacaaggaaacagaagaagccacacacagaagacccaaagaga

SEQ ID NO: 222981 - RNA, 83 nt, Homo sapiens
ggcacgggcggcccgcaggaccggaccgggggagcccgccgacacagccaccaagaaggcacaagcagaacgggaaaaggggc

SEQ ID NO: 222982 - RNA, 46 nt, Homo sapiens
acagcgcacggcggaaggaccgggggagaacagcgagacaaccacc

SEQ ID NO: 222983 - RNA, 78 nt, Homo sapiens
ccgccaacccagaaggagcaacaaggcacggcaacaagcaggggaagaacccaagacacacacagcggagcaacaagg

SEQ ID NO: 222984 - RNA, 102 nt, Homo sapiens
cgcaggggcgagcaaaccaccaaaaaagcggaggcgcgcaggagccaagggcggagaacggaaaagcaccaggaagcagagaggaccgcagaagggaaggag

SEQ ID NO: 222985 - RNA, 82 nt, Homo sapiens
acccaacaacccgacggcggaaggccccaacacccggagcagcgccacaagggacaggcaagagagaagagacagggagacc

SEQ ID NO: 222986 - RNA, 74 nt, Homo sapiens
agcagccgaaggaagccgagaacaaaggacacccggaccagaaacacacagaagagaaacagagaccgcgaagc

SEQ ID NO: 222987 - RNA, 80 nt, Homo sapiens
ccgcaccaaggagacaggacgaagcccaaaccacaagccacaaaagaggagaagaagagacggccacaaaccaccccagc

SEQ ID NO: 222988 - RNA, 70 nt, Homo sapiens
gaagagaccaccaaccagaggaaccagagaaggagaaacagcagggccaaaggcaagaacccgggaaagg

SEQ ID NO: 222989 - RNA, 79 nt, Homo sapiens
caaggggcggaggacggcaaggagggaagacaacaaaaacaacgcaggacagcaaagggcgcacccccgagagagccac

SEQ ID NO: 222990 - RNA, 77 nt, Homo sapiens
gcgggaaagacccaggagaagccgcccaaagaacgaaaaaaacggagcccgaaagacagcggcgggagagcccacca

SEQ ID NO: 222991 - RNA, 77 nt, Homo sapiens
caagcgcccagaagcaaccgcccacagcacggcggggccgcccagcgcaagagaaagagaaagaaacgggcaaaaga

SEQ ID NO: 222992 - RNA, 77 nt, Homo sapiens
cgagagccgcccgggccagcggccgcgcacccccggccggaggcaccagcccacgaggcggccccagcgcgggcgac

SEQ ID NO: 222993 - RNA, 79 nt, Homo sapiens
ccgagaggcggggggacgccagagaagcccaccagaggcgaggggaggaggaagcgagcgaaaagaggcgggaaacagg

SEQ ID NO: 222994 - RNA, 54 nt, Homo sapiens
gggaaaaggaagagaagccgcgacccaaaggcaggcagaagccgaaggcgacag

SEQ ID NO: 222995 - RNA, 78 nt, Homo sapiens
gaggaagagcaagcgggggaccgaacaaggcaaaagggaaggccgggacagcagaaaacagccagcagaaaaagccaa

SEQ ID NO: 222996 - RNA, 66 nt, Homo sapiens
cagggcaagaaagacccagggcggcgaagggaagagggaaacacaaagaagacaccagaagggcca

SEQ ID NO: 222997 - RNA, 67 nt, Homo sapiens
gggccaggagcgcagaggacagacaggaaacaaagagcggagaaacaaaacaacaagggaaaaggag

SEQ ID NO: 222998 - RNA, 80 nt, Homo sapiens
aacgggacagcccacacccggcgcggaggacgccaggaagccggacgcgcagggaaaacgagaggacccagccacggggg

SEQ ID NO: 222999 - RNA, 79 nt, Homo sapiens
agcacgccaccggcgccagcgggcgagaagcccaccagaggcgaggggaggaggaagcgagcgaaaagaggcgggaaac

SEQ ID NO: 223000 - RNA, 62 nt, Homo sapiens
caagacaacaggagaggaaagcggaaagccaagcgaaccggcacgagcagcaggaccgggag

SEQ ID NO: 223001 - RNA, 73 nt, Homo sapiens
cggaggaacgagacgcgaaccagggacgccagaggggaagccgcacgagggagagacggaccaaaggcgcagc

SEQ ID NO: 223002 - RNA, 69 nt, Homo sapiens
aggacgccccaccgccgacgcccccagccaccagcaaccagccaagggaccgcagggagacggcaccac

SEQ ID NO: 223003 - RNA, 69 nt, Homo sapiens
acaccgccccaacccacgagaggacagcccaggacgaaagaggagagaacgaccccagggcaggaacaa

SEQ ID NO: 223004 - RNA, 81 nt, Homo sapiens
gagaggcaccgggacggaccgagaccggaccgagagcggaccgagagcgcgaaacgcacgagaagcgcgcaaagcagaaaa

SEQ ID NO: 223005 - RNA, 58 nt, Homo sapiens
cgcagggcgcccccgcgcgccccagaccaccggcagggaacagccgagcagaccgagg

SEQ ID NO: 223006 - RNA, 60 nt, Homo sapiens
cacaggcgaaccaaaccgaaagccgacaggagcgcgaacaaagccaaacagaagaaagaa

SEQ ID NO: 223007 - RNA, 70 nt, Homo sapiens
aagggaacgcaaggcccccgaccacacgcccgcgcgaggaaacacaaaccagggagggaggacacaaaaa

SEQ ID NO: 223008 - RNA, 81 nt, Homo sapiens
agcgacgagagagaccggagaggggagagacccaacagaggaagccgcaagaaacgggacgacaggaaggccagagaaggc

SEQ ID NO: 223009 - RNA, 78 nt, Homo sapiens
gcgccaagaggagccagcacccccggaaaaacaccgacggaagccggaacgccccaccccaccccgaagcgaccccgc

SEQ ID NO: 223010 - RNA, 69 nt, Homo sapiens
aagaaaaaccagaaaccaggaagagcaggagaagagaagaaaaggacaacggcaagagagcaccgcccc

SEQ ID NO: 223011 - RNA, 95 nt, Homo sapiens
cccagcggaccgaacagaccccgccccccgaggcgcagcccgaacccagcagccacacgccaacaacgagacagccgcggacggaggcacggcga

SEQ ID NO: 223012 - RNA, 59 nt, Homo sapiens
gaaaaagaaccccacagaccaagcccaaaccggcaaccagagggacaggaaaaacagga

SEQ ID NO: 223013 - RNA, 78 nt, Homo sapiens
gagggccaaccaaaacgaagccgagccacccaggaccgaaggagacccccgagacccacgcggagcccgcggagagaa

SEQ ID NO: 223014 - RNA, 80 nt, Homo sapiens
gacgcgcgggccgcgagcggggcgacccgagcagaccgaaaagggcggaaaaggaccaaggcccgcaaaagggcgcgaac

SEQ ID NO: 223015 - RNA, 66 nt, Homo sapiens
cccaaccagaaaacaaagacaaaaggagacgagaagaagacaagaggagggcgacagcgggggagc

SEQ ID NO: 223016 - RNA, 88 nt, Homo sapiens
cacggccgggagaagcagggaaggaggccgagccgggaccaggcccgggggcggcggccacgccaaggacgggcgggcgccacggaaa

SEQ ID NO: 223017 - RNA, 88 nt, Homo sapiens
acagcagccaggagcagagcgacagcggcgagcagaacacggcgagcgggggcaaagagaaccaggagaccccaccaccacagaaaaa

SEQ ID NO: 223018 - RNA, 78 nt, Homo sapiens
cgacagaggagggaggaaaacaaccgagggcagagacaagcaggccacgccgcaagcgaggagaggggaggggacacc

SEQ ID NO: 223019 - RNA, 77 nt, Homo sapiens
aacgggccgaaccgggagcgaggaaccagaacgaaaagcgccagaaaggaagcaagaggcccccaagaacacaccga

SEQ ID NO: 223020 - RNA, 59 nt, Homo sapiens
caggaacaaacaccgccgcaaaagcgaacggaaaccaccgccaacagaagcgagaggcc

SEQ ID NO: 223021 - RNA, 75 nt, Homo sapiens
gcaggcggagaggaaaggggaaaaaggaacagacccaacaaagaaaaaccagagcagaggcccgcagccgcgccc

SEQ ID NO: 223022 - RNA, 75 nt, Homo sapiens
gaccgccccccacgcaaagcgcaaaacggccagagacacagagaaaaaagacaaaagacccaaagaaacagaaca

SEQ ID NO: 223023 - RNA, 71 nt, Homo sapiens
gggcccccggccggcccggacacaggcccgcgcgccgcggcaccaggcgcagcagccgaagacgacccagc

SEQ ID NO: 223024 - RNA, 60 nt, Homo sapiens
gaggggaaccagagaaacagcccaaagaccgccgagacggcccagacgcgcggcacaggc

SEQ ID NO: 223025 - RNA, 76 nt, Homo sapiens
ggcagcaagcagccaacgcagaaacgcagcaccgagacaaccaagcaagggccagcagaaaccgacagaaaagcgc

SEQ ID NO: 223026 - RNA, 67 nt, Homo sapiens
gaagcggagacaccaaagaaccccaggacaggagccaggagcacccacaggcacaagagacgaccgc

SEQ ID NO: 223027 - RNA, 75 nt, Homo sapiens
cgcggccgcgcgccacgcgccaggagcacgcacgggggcccgggccgaccgagcaccaggcggaaacagccggac

SEQ ID NO: 223028 - RNA, 77 nt, Homo sapiens
accggacgcagccgccaccgagacgagacacggaaccagaggcagcagcccaaccccgaggacagcccaggccacgc

SEQ ID NO: 223029 - RNA, 84 nt, Homo sapiens
gacccgagccgcaagcagcgcggccaagccacgccaacggagcaaagaaggacgcagagccagccacacagccccacaggccca

SEQ ID NO: 223030 - RNA, 76 nt, Homo sapiens
gaccgcggagggaacaccgccgaagacggaagaagggaggcagaggcgcccgccagcggcaccccccagcccagca

SEQ ID NO: 223031 - RNA, 87 nt, Homo sapiens
caaaggcaccggacaggccaaggcaggggccagaagacaaagcaaccaccaaacccaccaagggacgaagcgcaccacgcagagaag

SEQ ID NO: 223032 - RNA, 92 nt, Homo sapiens
gcggagaaccgccccggacggaggcgcccgcggcccggggcgccgcgcgccagcaggaaaggacacagggagggccaagaccccggcaggag

SEQ ID NO: 223033 - RNA, 62 nt, Homo sapiens
ggcgcggcgcggggaggcgaagggacgccgggaggcaagggcggagaacggaaaagcaccag

SEQ ID NO: 223034 - RNA, 75 nt, Homo sapiens
caaaagcgcacaaacgcccaaggaaccaacgcagagccccagaacaaaagaacacagaggaaccagaacagaccg

SEQ ID NO: 223035 - RNA, 60 nt, Homo sapiens
aggaaaccgcccgaaaagagacagacaagcagccacaaaagccagacgccaacccaggcg

SEQ ID NO: 223036 - RNA, 67 nt, Homo sapiens
cagaggagaaggcgaagaaaacagccaagcaccagaaggagagaagggaaaacagacggagggaagg

SEQ ID NO: 223037 - RNA, 86 nt, Homo sapiens
acacaccaccagacgaagaccgagcggccagcacagcccaaccagagccacacaaccacaaccccaaaagagccacgcgcggaaca

SEQ ID NO: 223038 - RNA, 74 nt, Homo sapiens
gaaaaagggaagcacaagaaagcagagagagagagggccacgcaagaacaaagagcggagggaaaggaagcacc

SEQ ID NO: 223039 - RNA, 73 nt, Homo sapiens
cacccggccccgccgagcgcgccggaccggcgcccggacaacccgcggaagagccgagcccacaaagaagaag

SEQ ID NO: 223040 - RNA, 84 nt, Homo sapiens
agacaagaccaaggcaacaaggacaacaagagacgggacaagacagggcaaaggacagaccaggccgacgcccgccgcggccgg

SEQ ID NO: 223041 - RNA, 75 nt, Homo sapiens
gaccaggacagacagagacaagaggaagagcgagggcccagcggccgggccgagaaaaccccccggccagcgcga

SEQ ID NO: 223042 - RNA, 77 nt, Homo sapiens
gaggggcgaaccacggaaaggaggaagaagacaccggggacagacagggcgaggaaaaccaccacacaggggaaaca

SEQ ID NO: 223043 - RNA, 73 nt, Homo sapiens
gcgggaaacggggaaggagccagacggaccaaaagcacgggacggaagagaaagagacaacaagggaccgggc

SEQ ID NO: 223044 - RNA, 84 nt, Homo sapiens
accccgcagcggccgggcgcgcggcccccacccaggagagaggaccggaaaacccccaaggccaggagagccccaacacccacg

SEQ ID NO: 223045 - RNA, 51 nt, Homo sapiens
cagcccaacaacacccaacagacagaaagcgcccaggacaggaccaggagg

SEQ ID NO: 223046 - RNA, 97 nt, Homo sapiens
ccaccagaaccgccacaacgccagacaccaccccaaagaggagcaggaaggagagaagggaaggacccagggaaaccggagacacagagaaaacgac

SEQ ID NO: 223047 - RNA, 67 nt, Homo sapiens
cacaggacgggccagacagcagaagcaggccaagccacagaagggggcggccagcccacgacacccc

SEQ ID NO: 223048 - RNA, 85 nt, Homo sapiens
ggaagaaggaggaaggaccgaaaacgggcaaggcggcaagagcgagcacaccagcccaccccccaccgcccccgggccaccgacc

SEQ ID NO: 223049 - RNA, 53 nt, Homo sapiens
ccagcgagccccacacagacaacgaagagaggaaagaagcggaaaggagggag

SEQ ID NO: 223050 - RNA, 84 nt, Homo sapiens
agcccccgagggcgggacacagaaaacccgcagcccaaagggcagaagaagaagaagacgcaagacggcagggggcccacaccc

SEQ ID NO: 223051 - RNA, 66 nt, Homo sapiens
gggcagcaaaacaaaaaggcgcggagaaaagaggggaaacaagagcgcacacaccacagggcacca

SEQ ID NO: 223052 - RNA, 68 nt, Homo sapiens
aacaaaagaaaccaacaccgcagcagggccgccaagaccggagacaggaacacggccccggggaccgc

SEQ ID NO: 223053 - RNA, 59 nt, Homo sapiens
ggaaaccccaacacagagccaagcgccaagacgcaaagccgaccacagaaagaccgggc

SEQ ID NO: 223054 - RNA, 74 nt, Homo sapiens
aacaccaagcggaaaagagcagcgcccagccccagcagagagaacggacgagaccaacgcggaaaccagcaaga

SEQ ID NO: 223055 - RNA, 73 nt, Homo sapiens
aacacgagacccacagcagggccacaaccagcgggaaaaggccggggggggcacagagccccggaagacagcc

SEQ ID NO: 223056 - RNA, 79 nt, Homo sapiens
aagaacaccgaacaaggacaagggacgaggggcaccaaaaaaccccagagcacgcacccgagcaccggaccacacggag

SEQ ID NO: 223057 - RNA, 62 nt, Homo sapiens
ggggaagaggaacaccacacccggaagcaggcgaacgaaggcaaacgagcagacggcccagg

SEQ ID NO: 223058 - RNA, 52 nt, Homo sapiens
ggagaaacccgggccggcccaagagagagacacggaggaaaaccgacggcgc

SEQ ID NO: 223059 - RNA, 60 nt, Homo sapiens
accaaacccaggccgagcccagcacagccccgaagaagaggccgaccggacaggaagaca

SEQ ID NO: 223060 - RNA, 72 nt, Homo sapiens
ccaacaagcccaggggggacacccacaggccacaacgcacacgcccccgccaaggggcagccaaagccgacc

SEQ ID NO: 223061 - RNA, 71 nt, Homo sapiens
cgcagaagaagcacccagcaagcgagggaccgggacgccacagccaggagcagcagaacggagagaaacag

SEQ ID NO: 223062 - RNA, 59 nt, Homo sapiens
ggggaaggaggcgaacaggaagcaggcaggagaagggcaccggggaggaccgcgcgacg

SEQ ID NO: 223063 - RNA, 75 nt, Homo sapiens
caggcacccgggcgccgggcccccagccgacagccagggcggaagcccgccccagagcagaggaacccaagacac

SEQ ID NO: 223064 - RNA, 69 nt, Homo sapiens
aggcgggcacgcgcccaggagggaccaaccgaaaacagaaacgacagcccccagccagagccgacgaaa

SEQ ID NO: 223065 - RNA, 81 nt, Homo sapiens
gggaggacaaccgaggggaggaaggaggacaaaaagggaaagccaggccagaagaaggaaggccggggaggggacaggaaa

SEQ ID NO: 223066 - RNA, 82 nt, Homo sapiens
aagggaaggcgcgaggaggaaaggaggacgagcggaaaccgaacgccagcagacgaaggaagcggagaagaaaggggaaagg

SEQ ID NO: 223067 - RNA, 82 nt, Homo sapiens
ggccgagcagccaacacaccagcccagacagcgcaagcaccaggacgcgaagggacaccggagaccgaagaacggaagcgca

SEQ ID NO: 223068 - RNA, 78 nt, Homo sapiens
cccacacggcaaggaggacacccggacaccggaagcgggaaaggccccgggggcgccgagggcacaagggcaacgaca

SEQ ID NO: 223069 - RNA, 88 nt, Homo sapiens
ggagcccggccccgcaccaggaggaggacgacagcacgggacgcacaccgagacgaacacagaacagcacgaccagaggggaagccaa

SEQ ID NO: 223070 - RNA, 81 nt, Homo sapiens
cacacacgggcacaacgaccacacagacgaaccaggacagcagacgacccgaacggacggaaagagcggaggacccggacc

SEQ ID NO: 223071 - RNA, 69 nt, Homo sapiens
ggaaagcgccaaaggaggcaacaagggagaagcagcaacgacaccgggaagggcacgacaggaaaagac

SEQ ID NO: 223072 - RNA, 75 nt, Homo sapiens
ccgcgccacgccgccaccacacccgccaggcccggagccaaccccccacagcagccccgagaaaaagaccaggca

SEQ ID NO: 223073 - RNA, 80 nt, Homo sapiens
gaggagaagcgcaggagaaaggcgcgaggacccggaacgccccagcgggaacgggacagcgccaacgccagaccccaacg

SEQ ID NO: 223074 - RNA, 83 nt, Homo sapiens
ccgaccgggcccgggcggcgcacgacgccgcccggcccggacccgagcgcggggaggcagaccgagaggacagaccccaggac

SEQ ID NO: 223075 - RNA, 80 nt, Homo sapiens
gccagggagccggacgacggcacaacccgaccccagagaaggagaaggccggcgggacaaaccgacggaaggagcggacc

SEQ ID NO: 223076 - RNA, 36 nt, Homo sapiens
accgggccacaagcaaccccgcggagcggaggcaga

SEQ ID NO: 223077 - RNA, 64 nt, Homo sapiens
ccagaccaaaagggagaagacgcaggaacccgaggcgaggcccacgacaggacaggccggaaga

SEQ ID NO: 223078 - RNA, 58 nt, Homo sapiens
agggccagcaagcaaaaaggaaaagagcgaccaaggacaacagagcaaagacacgcac

SEQ ID NO: 223079 - RNA, 74 nt, Homo sapiens
aaaaacgccaccagccccagcggaggacacagcagccccaccgacgggcagaagcacaggacaagaaggaacac

SEQ ID NO: 223080 - RNA, 59 nt, Homo sapiens
agagcggccgcggccaaggggagccggccagcggcccaaaggagagagcggaacaaggg

SEQ ID NO: 223081 - RNA, 76 nt, Homo sapiens
ccaaagcaggcaagaggcagagaaaggcaaggaccagaaggacccaaggacgaaggcaggggaaaggaccccagcc

SEQ ID NO: 223082 - RNA, 68 nt, Homo sapiens
ccaacagacccagccggcgaccaggggcaagaaaggaccccgcaaaagaacaagaagccagaggaggg

SEQ ID NO: 223083 - RNA, 56 nt, Homo sapiens
ccagaggacacagacagcgacacggaagccccacggcccgcccaaaagaaaaccgg

SEQ ID NO: 223084 - RNA, 76 nt, Homo sapiens
cccagccgaccgagcccaggagcgccacgcgcggaaggcagcgcccagcagcgcagggacaccgagaagaaagggc

SEQ ID NO: 223085 - RNA, 55 nt, Homo sapiens
aggccgcgcgcggcgcccgcggggggacggaaagagagccgcagcgcagaacaag

SEQ ID NO: 223086 - RNA, 77 nt, Homo sapiens
ggcgcaggggaacccggcggcggagagagcgcggacaccgaagcccgaggccacaggacacgccaagggagcggccc

SEQ ID NO: 223087 - RNA, 71 nt, Homo sapiens
ggcgcgaggcgcgaggcgcagggcgacaccacaagccaagagagaagagcgaccagaggcggcgcccaccc

SEQ ID NO: 223088 - RNA, 57 nt, Homo sapiens
acccgaagcgggcgcgcgcacggcaggacggagggaagcaccgggcacaagacgaag

SEQ ID NO: 223089 - RNA, 61 nt, Homo sapiens
gagagaggcaggcggagccgaccgggccaggagccaaaaaccgaacacccggaaggggaca

SEQ ID NO: 223090 - RNA, 38 nt, Homo sapiens
aggaggggagcggggaaggcaagcccggcgaggccaag

SEQ ID NO: 223091 - RNA, 78 nt, Homo sapiens
acggcagaacccggccgagggcacggccagcccgacgccagcaccggaagcagaccagaacaagcaaccaagcgcagg

SEQ ID NO: 223092 - RNA, 79 nt, Homo sapiens
cgccgcgggccgcaggccgcgagcagcggacgccggccgccgcaggaggaccgggggacacccgacagcccaggcaccg

SEQ ID NO: 223093 - RNA, 79 nt, Homo sapiens
acacagaccggcgccgggacccggcccaggcgggccccgaagaacgccagacgggccccaggacgacaaccagaagagg

SEQ ID NO: 223094 - RNA, 81 nt, Homo sapiens
aacaccacagaagacaggacacaaagcacgcgacaggaaccaggagcagaacccccaggcccggcaagcccaggcaccagg

SEQ ID NO: 223095 - RNA, 79 nt, Homo sapiens
aacaagaagagaagaaggaccaaggaggaagacaaggggcacccggacaccgcccccagagagagaggggcgcagcaca

SEQ ID NO: 223096 - RNA, 110 nt, Homo sapiens
gggcagaagacggacgccgaagaggcaggcgaaggcaacagcccaaaaccgcccggcaccggccccggcggggggcacggcggcccagggcaaggggaaggcaggacggg

SEQ ID NO: 223097 - RNA, 81 nt, Homo sapiens
aagaccacccccagacacacagagaggggaaagaaccagacgacaggaaggcacagaacgaagccgcagaagccaaacaag

SEQ ID NO: 223098 - RNA, 54 nt, Homo sapiens
gacaaggacagaacaccagcacggcgaaggagcggcgacaaaggccaaaagagg

SEQ ID NO: 223099 - RNA, 78 nt, Homo sapiens
caccggaccccagagccaccaacaacccaccagcagccaccaaggacacaggaacgccacaagaaacaacagcaaggc

SEQ ID NO: 223100 - RNA, 54 nt, Homo sapiens
ggccgagaaaggagcgagagcgcaggggcccaggacaaagggacgcagggcaaa

SEQ ID NO: 223101 - RNA, 81 nt, Homo sapiens
ggcacacagacaccaacaagagaggaacggaggcaggcggccccccaggaccccaacgaagcagaaagaacaacacaagcg

SEQ ID NO: 223102 - RNA, 74 nt, Homo sapiens
gaaacaggcaaaggaagaagccagcgagcggggcgcgcggccccgacaggcaagacggcagggacacaacaacc

SEQ ID NO: 223103 - RNA, 65 nt, Homo sapiens
cgccagagcgagcgccccgcccagagacaccaggcgccgagaaggccagcagagaaacaggcagg

SEQ ID NO: 223104 - RNA, 75 nt, Homo sapiens
cgaggacaaaggaacagcacagggcgcaacaagagcgacaaacgcaggagaagagagcggacccacaccagggaa

SEQ ID NO: 223105 - RNA, 98 nt, Homo sapiens
ggggcgagcaggcgacccgggcccggggaccgagcgagcccgcgaccccgcagaaaacggaacaacgaagaacaaggaaggacacagaaagaaagaac

SEQ ID NO: 223106 - RNA, 68 nt, Homo sapiens
ggggcgaccgccaaacgggagccccgaaccaaggcagagcccgcccagaacgaggacgcacccgacac

SEQ ID NO: 223107 - RNA, 77 nt, Homo sapiens
cacgacacacacacggcgcaccccccgagacccccggacccggccgcccagaagaagaaaccaccacagggcgggcc

SEQ ID NO: 223108 - RNA, 69 nt, Homo sapiens
gccccggcaagaccgaaggcgccggccaaaagagaaccccacaaggacaacgaggcaacgcagacccag

SEQ ID NO: 223109 - RNA, 79 nt, Homo sapiens
cccgcgagcgcaacccaagaaccacacgacgcgggaaccaccagagggcccgggaaggaccggcccggccggagagaca

SEQ ID NO: 223110 - RNA, 79 nt, Homo sapiens
ggcaagcccagagccgccggaaggcccccggcgcgagacccgccggaggaacaacacccccgcagcccgacacgggaca

SEQ ID NO: 223111 - RNA, 66 nt, Homo sapiens
cgccccgagaggaaacacccccagaagagagacagaagagcagcacaggggaagagacagaaggca

SEQ ID NO: 223112 - RNA, 62 nt, Homo sapiens
ggaagcggggcagagccgggggagcccagcccagccagccccaggacccaaggccagccagc

SEQ ID NO: 223113 - RNA, 75 nt, Homo sapiens
cgcccacagacgcaacgacacggacggccccgccagcaccagaggagacaggggcaaggccgaggggaacagcac

SEQ ID NO: 223114 - RNA, 81 nt, Homo sapiens
gcaacgacgcagcacgcagcacggggaacgaggaccagcggaagcagaaagaagaaaggccaacacagggcaccaaacaag

SEQ ID NO: 223115 - RNA, 79 nt, Homo sapiens
cagcagaagacaaaagcagccgccaggaaaacgcagaaagaccagaagagaacggcagagggacagagaacacggggag

SEQ ID NO: 223116 - RNA, 82 nt, Homo sapiens
gccacccgcccggcccccgccggcggcagcacggccaaggaaagccaggccagaagaaggaaggccggggaggggacaggaa

SEQ ID NO: 223117 - RNA, 73 nt, Homo sapiens
aagccgacaaggggcggaggaagggaggagacccgaccccagaagagcaggcacccccagaccggagcccaag

SEQ ID NO: 223118 - RNA, 78 nt, Homo sapiens
ccaaacgggagccccgaaccaagagagggggcagagagccaaacgacaacccagaagccagggccacgggcacccagg

SEQ ID NO: 223119 - RNA, 75 nt, Homo sapiens
gggccaaccgcagaggccgacgggaagcacgcagcaacgcagagagcaaaacccagacgcagccccaagaaagac

SEQ ID NO: 223120 - RNA, 56 nt, Homo sapiens
cgaaaggggcgacaccagggccgcagagcgggacagcaagggaggcagcagacggg

SEQ ID NO: 223121 - RNA, 74 nt, Homo sapiens
cacggccccggccgccccaacgggggcacgaagggggacacaggcgagagaagcagaacggaaaaagcaaaagc

SEQ ID NO: 223122 - RNA, 89 nt, Homo sapiens
gacagcccagccaaggcgagcaggggagagggccagcagaaggaaacaggcgccaaagggagccaggcaagggccggccagcggcagga

SEQ ID NO: 223123 - RNA, 71 nt, Homo sapiens
gacgaagccacgcaagccacagacaaagcgaggaaaacgaggaagaagaccaggcgaaaaccgccaggcag

SEQ ID NO: 223124 - RNA, 70 nt, Homo sapiens
agcaaagcccgggacaggacagcgcaagcagacccagacacgaagcgagaggcgagaagaagcaggaaaa

SEQ ID NO: 223125 - RNA, 75 nt, Homo sapiens
aggcccaagccaggagcggagaccaaagcgagcccccagcggaaaacagaaccacaccaccgcgccgccgggaag

SEQ ID NO: 223126 - RNA, 57 nt, Homo sapiens
caaggaaccaaaccacaaaccgagaaaaaaaccaggacgccagaaagagggcaacgg

SEQ ID NO: 223127 - RNA, 77 nt, Homo sapiens
caggggagccaagcggagagccaggacacaacaccgcggagcccgcaggcggggcgggaagaagcccgccgccacca

SEQ ID NO: 223128 - RNA, 80 nt, Homo sapiens
ccagcagaagaggaagaacagcgaagcgcggacagagagagagcggaagagcggaaaagggccgagcaccacagacagcg

SEQ ID NO: 223129 - RNA, 68 nt, Homo sapiens
gagagcaaggaaacagcgacagaagccagcacaccaccacaacagaggacacaacggacaaagagaag

SEQ ID NO: 223130 - RNA, 102 nt, Homo sapiens
cgaacacccaaacgacaacagggcaaaaaaagggcggaaaccgcacaggagacgggaggcaagcaggggggcaaaggaaagaaggcagaaagggaggccagg

SEQ ID NO: 223131 - RNA, 74 nt, Homo sapiens
cagaacacggcggagccgaaagaccagacccgaacgacaacacgaagaggaagagaacacagagacggaccaaa

SEQ ID NO: 223132 - RNA, 78 nt, Homo sapiens
aaaaacacaaggagcagagacaaaaccaagccaaacacaagcagaaggagcgaagaagaggaacaaaacaggaagcgg

SEQ ID NO: 223133 - RNA, 72 nt, Homo sapiens
cgaccccagcggagacggaccgaccgagcacggccagccgagccaccgcgcggcgccacccaggggaacgag

SEQ ID NO: 223134 - RNA, 55 nt, Homo sapiens
gaagccagaacagcaccaaaaagaggaacagaagaaagggagcccccaagaacag

SEQ ID NO: 223135 - RNA, 74 nt, Homo sapiens
ggagccaaaggagaccaaaccggggagagaccaaacggaccaaagacagggcaagcagcgcaccggcaccagag

SEQ ID NO: 223136 - RNA, 78 nt, Homo sapiens
cgcgggacaccgcaaccccgcagagcgcaccacaaagcgcgcaacgccaacccaggcgagagcaagagcggcacaaga

SEQ ID NO: 223137 - RNA, 65 nt, Homo sapiens
gggaagaagacggcgaagcaccaacgccaaggagaggagcaggaagaagaccacgcccccagaag

SEQ ID NO: 223138 - RNA, 85 nt, Homo sapiens
aggaaacccaccacagggccggcgagcaccgcggaacgcccgggcacacaggaaacaccccggccaggcgggagagacggcagga

SEQ ID NO: 223139 - RNA, 45 nt, Homo sapiens
gccagacccaccagaagcagaggcccacgcggaccggcagcgcca

SEQ ID NO: 223140 - RNA, 76 nt, Homo sapiens
cccgggcccccagcggcaaaggagaacaaccgcaacgaacaaacaggagacagagagcaagagcaccccaacggcc

SEQ ID NO: 223141 - RNA, 71 nt, Homo sapiens
ggaaccaggccagggaagagaccaaccgcccaccccggggcgcacaggaaggggagagagagaagcgaagg

SEQ ID NO: 223142 - RNA, 76 nt, Homo sapiens
cagcacaccccgcgaaaggaggaggcacagaaggagaaggagaaacggaggacgcccccacacaagccaacacggg

SEQ ID NO: 223143 - RNA, 81 nt, Homo sapiens
cccggcccgccgccggagccgggggcagccccgggaggagcacggcgcgcccgccacgccggaaccggaaacacaccagag

SEQ ID NO: 223144 - RNA, 69 nt, Homo sapiens
caagacacaagagacagcaacaaagcaaccggaaaggggacccaaaagcccacgccgcagggggaacca

SEQ ID NO: 223145 - RNA, 65 nt, Homo sapiens
ccagccgcgaagagacccgacagaagacagaagagcagcacaggggaagagacagaaggcaggac

SEQ ID NO: 223146 - RNA, 62 nt, Homo sapiens
cgcacaccccccacgccccgacagaggagaacgccaagccaaccgaaaaagccgacaaaaaa

SEQ ID NO: 223147 - RNA, 72 nt, Homo sapiens
ccaaggaaaacaaggagaccagggaccggacaggaaaggaacacagacagagcaagaacgccccggcaagga

SEQ ID NO: 223148 - RNA, 83 nt, Homo sapiens
aagcaccggacagaaaaccacagacacaggcagaaccagaagaaagcaacggaggaaagaacgagaaagaagaaacaagaaac

SEQ ID NO: 223149 - RNA, 71 nt, Homo sapiens
cagaagcgcagccagaaacaacaggaggccggaggccaccagggaagccgcagcgggcagcagaaccacag

SEQ ID NO: 223150 - RNA, 77 nt, Homo sapiens
aaagggagaagaggacagaaaaagaccagacgcggaaaaagaagcgaggcagccgaaacgggaaacgacaaggagga

SEQ ID NO: 223151 - RNA, 74 nt, Homo sapiens
aagcacaagaagaagacgagaggaagcccaaaaggaaagaaccagagacgacacccgccccccagcaccagccc

SEQ ID NO: 223152 - RNA, 68 nt, Homo sapiens
cccagaccagccgccgcccagacagacggaagagccaacacccagccccaagaacaaacgcgaacgga

SEQ ID NO: 223153 - RNA, 76 nt, Homo sapiens
ccgcgccgcgccgccgcccacaagcggcgccgcgccccggccgcacggggagaaaggggagcagcaaccaagccaa

SEQ ID NO: 223154 - RNA, 77 nt, Homo sapiens
cccaggccccgccgcccgggggcgccgcccaccgcgcccgccggcgggaaccaggaccgaacccgagaagcaaacca

SEQ ID NO: 223155 - RNA, 82 nt, Homo sapiens
cgcagccagaagaacaagaagaggcagaccccgccagaccaacaagcggagacaagggccgaacaccaacagaggaagaaag

SEQ ID NO: 223156 - RNA, 71 nt, Homo sapiens
gaagagaccaagcaccaagaaaacgccaaggaacggaagacgagggagaccggaagcagaagaccccccgg

SEQ ID NO: 223157 - RNA, 76 nt, Homo sapiens
cggaggagcggagaaccggagcggccaacggcaggaggggacccccaaaagacaagggcaaaacggaccagacaca

SEQ ID NO: 223158 - RNA, 69 nt, Homo sapiens
agcgggacgaggaacgcgcgagggagaaccagccgccggaacagccccaaggcacaaaagaggaggaaa

SEQ ID NO: 223159 - RNA, 78 nt, Homo sapiens
ccaggacgccacagggcccaggcgggaaaggacaagggaccacgcgggggacgggacgaaaccacaaaacgcccacca

SEQ ID NO: 223160 - RNA, 64 nt, Homo sapiens
agaaaacggcagaaggaagcccccgcaagaaggagcaggacagaacgaggagccccggcagccg

SEQ ID NO: 223161 - RNA, 76 nt, Homo sapiens
gccacgacgccggcacccaaccagagaggaagacaacgagccccagggcgaagacccccccccagggcaaaccacc

SEQ ID NO: 223162 - RNA, 67 nt, Homo sapiens
accgccgagcggaccccaaggagagcaccaccgacaccgagaagcagagagggcgcggccccaaaga

SEQ ID NO: 223163 - RNA, 84 nt, Homo sapiens
gcgcgcccgggagcgccgacggacggagcgcccccgcccccgcccggccgcccgaaagagccgcagacgcacagcaaccaccgg

SEQ ID NO: 223164 - RNA, 77 nt, Homo sapiens
gcaacgaaacagcagcgggagaagaggacaagagaaagccgggcgacggccaccaccgacaaacgggacacgcacca

SEQ ID NO: 223165 - RNA, 74 nt, Homo sapiens
cgacccgcgcagacacggaccgcgggccagccgccaaagaccccgccggagcaacggggcggcacacaaggagc

SEQ ID NO: 223166 - RNA, 78 nt, Homo sapiens
gcccagggcggggcccgaggaaggaaggagaaagacaaacccaagaaaacaagaagagaaaagccgaagaacacgaca

SEQ ID NO: 223167 - RNA, 75 nt, Homo sapiens
cccagcaagagcccccccccacagcacgccgcaacacaccacaaaccaagccgcccagcaggccagggccaaggg

SEQ ID NO: 223168 - RNA, 54 nt, Homo sapiens
aggaagccacggcagacacacaacccgacccgacgaggagggaaccacagcacc

SEQ ID NO: 223169 - RNA, 76 nt, Homo sapiens
gaggacaaccgcaggacccagcagcgcagcagccaaggagacaccccagaaagcaccgggaggaaagagagccaca

SEQ ID NO: 223170 - RNA, 77 nt, Homo sapiens
ccacccccacaggaggccaggggaaaggggaaaggacaagggacagcagccgcagaagacgacgccaagcaagccaa

SEQ ID NO: 223171 - RNA, 72 nt, Homo sapiens
ccacgggaagcagaaccgagggccaaggacaaaggacaacaaggacccgacaaacggacagcaggaccagaa

SEQ ID NO: 223172 - RNA, 54 nt, Homo sapiens
agaagggggaagccgcaaaccagcaaggcccaaaaaagcccggccacccccaga

SEQ ID NO: 223173 - RNA, 59 nt, Homo sapiens
cgacaagaccggcccacccagcaggacaggcgcagcagcgggacgacgaccggcacaca

SEQ ID NO: 223174 - RNA, 72 nt, Homo sapiens
caacagagcaacgagaaggacacccaaagagagggggcagcacagcccagaagcaggaccggaaaacgcagc

SEQ ID NO: 223175 - RNA, 78 nt, Homo sapiens
aacggagacagaggaaccccggggaaaggaagagagagacaaagaagcaagcacagaccggacacggaagcagaacgc

SEQ ID NO: 223176 - RNA, 70 nt, Homo sapiens
gcagagaaagacccccagaaaccaccaccgggaaccggggacccaggaaggggaaaaagagagaaagcag

SEQ ID NO: 223177 - RNA, 85 nt, Homo sapiens
gaggagcggcagccgcgaggaggcgcgggagggcgagaacgaccccgagacggccacaaaccgaacagcagcaaccggagccgag

SEQ ID NO: 223178 - RNA, 66 nt, Homo sapiens
agaagacaccggggacagacaggggcgaagcagcaaaacacacagccccccggagaaaagaggcaa

SEQ ID NO: 223179 - RNA, 68 nt, Homo sapiens
cgaagcgagggaagggcggacacaccggagagggagagcgaacagagacgacccacgcgaaaggagag

SEQ ID NO: 223180 - RNA, 51 nt, Homo sapiens
agagcccaacacgcccgggagcgcggcggggaggaggaagacgcacgccgg

SEQ ID NO: 223181 - RNA, 74 nt, Homo sapiens
cagcaaggagaggcagggggagccagccaccgagacgccgacagcccgacggggaggcaggaggccaccgaggc

SEQ ID NO: 223182 - RNA, 70 nt, Homo sapiens
aaacgaaccaggacggcaagggagaagcagaccgcaccaggcgggaccccgaaaaagcccaaacagacag

SEQ ID NO: 223183 - RNA, 77 nt, Homo sapiens
caggagagacccggaaggccaaaggcgcgcaaggaggaaggagacagcacgcccgaagagaccggcacggcacgcac

SEQ ID NO: 223184 - RNA, 61 nt, Homo sapiens
agggaaaaaagagaggagcgaacgagacagaacaggaaaaagggccgaggaagcaccacag

SEQ ID NO: 223185 - RNA, 81 nt, Homo sapiens
agccccgcgacgcgcccggcccggagcccccagcgcagcggccgcgagcacaaccaaaaacacaagaaaaggaaacgagcg

SEQ ID NO: 223186 - RNA, 72 nt, Homo sapiens
cacaacagcaagaaagcagcaaacagcgaccgccaagagacacacagggcaccagaccgccgcagcaacccg

SEQ ID NO: 223187 - RNA, 85 nt, Homo sapiens
cagagcccccgaccgccagcaccaccgaggaccagaaaccgccccagcgaggaagaggacaggagcggagagagccgcgagaagg

SEQ ID NO: 223188 - RNA, 84 nt, Homo sapiens
ggccccaccagcagacgcagccgagacaccagcccgaaacaccaccaaggcaccaagagaacccggaccccacccggccagacc

SEQ ID NO: 223189 - RNA, 74 nt, Homo sapiens
ggggccagcggagacagcaaggacagcccaaggcggaaaagcgaaggaagccacaagcacagcccacacaaacc

SEQ ID NO: 223190 - RNA, 84 nt, Homo sapiens
cggggccccgcagcgacaacaggaggccggaagacccaaagcgagaggcgcgggcagggaggcccccgcggagcccgcagggcc

SEQ ID NO: 223191 - RNA, 78 nt, Homo sapiens
gccaaggggagaagaaaaccgggacgggacaccgagggagccagagacaaccaggcgcggcgcagcaaagcccgggag

SEQ ID NO: 223192 - RNA, 106 nt, Homo sapiens
gggcggagaggaacagaagcaaagaaacggaacagagggagggagcagaggcgagcagaccaggaccgagaaacaggaaagcaagaaacagaggagaggaccccaa

SEQ ID NO: 223193 - RNA, 73 nt, Homo sapiens
gcccggcagacgcgccacagcagaaggaaaccaccagcaaacaaggaagcaggaaggaccacacgcagcgcac

SEQ ID NO: 223194 - RNA, 77 nt, Homo sapiens
ccacaccaccaaaacgaaacaaaggaccaaccaagaggagaggcccccccccagggacaggcgcagcccagcgaggg

SEQ ID NO: 223195 - RNA, 70 nt, Homo sapiens
ccagaaggaccaagaggcagcaggaccgcggcggcgaacacaggaaagcaggaaaacggcgcaaacggag

SEQ ID NO: 223196 - RNA, 78 nt, Homo sapiens
gaaacccgggcgccgccaagagccgggggcagagggaggaggcggagagacaggaggaccaccaaccagggacaagcg

SEQ ID NO: 223197 - RNA, 73 nt, Homo sapiens
ggagagagagccgcgcacgcacagacaagaaaagaagggcacagaaaccggcccagaccacaaagagaagcgc

SEQ ID NO: 223198 - RNA, 80 nt, Homo sapiens
aggccgccaggcgacgggccaagggacagccggcggacaccccaccaggagacgcagacagcacaaggggggggccgggc

SEQ ID NO: 223199 - RNA, 68 nt, Homo sapiens
caagagagccacccaaagccacaccgacccagcgcacggggcaacagccacacccggagcacccacca

SEQ ID NO: 223200 - RNA, 70 nt, Homo sapiens
cgaagggggcaaccggaagggcacagaaaacaaagcaaagaggcagggggcacagagcggagagccagag

SEQ ID NO: 223201 - RNA, 54 nt, Homo sapiens
aaggaccaagaaccagggagacggggcacgcccagagcaggccgccagcccgcg

SEQ ID NO: 223202 - RNA, 87 nt, Homo sapiens
gcggcgcagaacaacgaggcgccgcaggacaggagaggacagagcgggagccaccagcgccaaagggaagccaggagcccgggggca

SEQ ID NO: 223203 - RNA, 81 nt, Homo sapiens
aaccgggcgcccggacgggggcaagcggaagggagcccaagaggaccaggaggccagagaggagcccacccccaacagaag

SEQ ID NO: 223204 - RNA, 77 nt, Homo sapiens
caagaccacacaccagccggacggcggggccgggcccccggccgcaagcagggggaggggggcgaaaccgagcgcgg

SEQ ID NO: 223205 - RNA, 70 nt, Homo sapiens
gaaaaccagaagcggagcgggggcccgagaagccgacggggaaagacaaggagccgggccgagaaaccga

SEQ ID NO: 223206 - RNA, 77 nt, Homo sapiens
cagcccccaccaacacaggaagagagccaccaaagaagaccagacaggggaaggagagacagagagggaagggaaac

SEQ ID NO: 223207 - RNA, 80 nt, Homo sapiens
gggccgcacccggagaccgcgggcacgcgcaccaggcggagccagaacaacaggcagcggcaaggagagagcggcacggg

SEQ ID NO: 223208 - RNA, 83 nt, Homo sapiens
cccccgccagaagccgaggaaagcggaagcggccggcaggggaaggacgaggggggaaggaggagacgagacaagccaagccc

SEQ ID NO: 223209 - RNA, 36 nt, Homo sapiens
gaagaagaccagacggaacacgccaaaaagaccagg

SEQ ID NO: 223210 - RNA, 73 nt, Homo sapiens
aaaagaaacgcccacagaacaccgaggagaaaagaaagccagaaggaaggaagcaacgaaccaagaaaaaacg

SEQ ID NO: 223211 - RNA, 67 nt, Homo sapiens
gggagccaacgccggaccagcaaggcggacggaaaagaaccaacaggaggaagccacaaacgaggga

SEQ ID NO: 223212 - RNA, 76 nt, Homo sapiens
gcaagcaggcaaccgaaacagcaaggaagccccacagccaacagaaagcacaagcaaccccacccaacggacaacc

SEQ ID NO: 223213 - RNA, 80 nt, Homo sapiens
acagaccggagcgaaccaccccaaacagaagaagcacagacgagaaacaaggcaagaaggcagccgagaagccaaggagg

SEQ ID NO: 223214 - RNA, 82 nt, Homo sapiens
gggccggcacagcacgcccggcaccccgaccagcccgaagcggaggacccggcccagccgggcaggccgacccccaccagcc

SEQ ID NO: 223215 - RNA, 83 nt, Homo sapiens
ccgcagccccccgcccggaggccgggaaggagaaaaaggcacaggaggacaaaaagcgggaagaaacaaagaagaagaagaga

SEQ ID NO: 223216 - RNA, 82 nt, Homo sapiens
ccggcggcggcggccaggcccgcgaacacacgccgccaccgggaggcccagggaaggcagagaggagggcaaaaagacaaac

SEQ ID NO: 223217 - RNA, 78 nt, Homo sapiens
cccaagagcgggagacagcaagaacccagaggcaaggcgcggcgaagcccgcggcacggaagcagcggaaaacacaac

SEQ ID NO: 223218 - RNA, 83 nt, Homo sapiens
gagagaggaccagcggccagagcccaggacgccacccggaggacagggcacaacaaccgcgcaggcaccacacccgagggcgc

SEQ ID NO: 223219 - RNA, 75 nt, Homo sapiens
cggagcggcgcggccccagcccccgggggggcccgagcacccgagggacccgaggagcccaccaagccgaccgca

SEQ ID NO: 223220 - RNA, 71 nt, Homo sapiens
ggacgagcagagaacagcaaaagagcacaaggaaaagcagcagcaacgggaacgaagagagaaagcaaaca

SEQ ID NO: 223221 - RNA, 76 nt, Homo sapiens
cgccaggccccgggagcgcccaccacgccgcgcccccaggaccgggcagaccagaaaaggccccaaagaagcgcgc

SEQ ID NO: 223222 - RNA, 70 nt, Homo sapiens
ccagcggacaaagcggcaaaggagaagaacgaggcggagaagaacccaaccaaaaccaggcggcaacccc

SEQ ID NO: 223223 - RNA, 56 nt, Homo sapiens
aaaagacgcccccccaaaagggaccacaggagagaaaagcaggagccaccgcaccc

SEQ ID NO: 223224 - RNA, 74 nt, Homo sapiens
ccggcacaggcccaggcaccccccaggccagaccacggaaacagcaaacggagcgaacaaagcggagaggaccc

SEQ ID NO: 223225 - RNA, 68 nt, Homo sapiens
acagcccacccggcaggacaacaaccaagcaaggcgcaggaccggcccagaagccccgccgccacgcc

SEQ ID NO: 223226 - RNA, 79 nt, Homo sapiens
accgccgcaccaaggagggcccccgagacacggaggcagaggggcaccggccggagcgcgaagacgcagggaaagcggc

SEQ ID NO: 223227 - RNA, 80 nt, Homo sapiens
agcgcacacaaagaacgagagaaccaggagcggcagaccgccgccaggaggaggcacgcagcccgagaaggagccacgcc

SEQ ID NO: 223228 - RNA, 95 nt, Homo sapiens
caacccacaccaggccagccgggaaccgaacccaaaacgagcagaccgaaaagggcggaaaaggaccaaggcccgcaaaagggcgcgaacaacaa

SEQ ID NO: 223229 - RNA, 67 nt, Homo sapiens
ccagcccaggaaaggcgccgaagagcccaaaggcaaggaagccccggggaaacaccgagggcacaca

SEQ ID NO: 223230 - RNA, 108 nt, Homo sapiens
aggccggcaacccacacaagcgaaggcgcgcaccggaagcaccagcgaggaaggagaaagacagcaaagaaaaggagaagaaaggaaaaaaacaaccccgggcacccc

SEQ ID NO: 223231 - RNA, 57 nt, Homo sapiens
gcgcaaggacagaaacgcaggcgcccaagaagccaaaagggaagcacgagaagcagg

SEQ ID NO: 223232 - RNA, 81 nt, Homo sapiens
gcgccaaagcgcgccgcagcaaaacaggcagaaaggaagcaagagggaacagcaagagaaagaagggcacccaaacaacaa

SEQ ID NO: 223233 - RNA, 72 nt, Homo sapiens
cagcccgacaaccaggcgaaggcaagagaggggagggagaaaaacccgaccccccagggcagagacaagaaa

SEQ ID NO: 223234 - RNA, 61 nt, Homo sapiens
gcgaaaagcaaggcagcggacacacgccgccggcaggcacagggaaggacccagaacagag

SEQ ID NO: 223235 - RNA, 77 nt, Homo sapiens
aaaaggagagccggcgccagccaggggaaaccgcaagcaggcagcgcgcaggcccggcccagccccgggagcagaac

SEQ ID NO: 223236 - RNA, 94 nt, Homo sapiens
caaaagccagcaacccagggaccgagggaacggacccaggagaaaaaaggaacaggaagaccgagggcccggcgaaccaccggccggccgagcg

SEQ ID NO: 223237 - RNA, 72 nt, Homo sapiens
ggaccgaccgcaacagaacggacccggaaggcacggcgcaaacggcgccgggccaggaggaggaggaagccc

SEQ ID NO: 223238 - RNA, 69 nt, Homo sapiens
gggagcaggcaaggggagagccagagccccacagggcaacggagacagaaaccaggaggccaagcaagg

SEQ ID NO: 223239 - RNA, 75 nt, Homo sapiens
aagagcggaccgggccccgaacaaggacaagacagcaaagcagcgaagcaaagaagaacgaaggaaagacacaag

SEQ ID NO: 223240 - RNA, 93 nt, Homo sapiens
cggagacaaaaggaggaagagagcggcgcgcccggcggccgagcggcaacggggcccgggcccaagggcgccaaggggccaagggagagcggg

SEQ ID NO: 223241 - RNA, 65 nt, Homo sapiens
acagcccccaccaggaaaaaccaagagcccaaaaggcagagcgaggagagaagaaggagggaaag

SEQ ID NO: 223242 - RNA, 91 nt, Homo sapiens
ccgccccagccgccgcaccaaaccggaggaagaagcgaacagggcgacaacaccccgggaccccgacggagagacaaagaagacggagggg

SEQ ID NO: 223243 - RNA, 80 nt, Homo sapiens
ccacagaaggcagaggcagaaccacagaaggagaccggggcagcaaaccgcgcgggaacaggggccgagccggacagggc

SEQ ID NO: 223244 - RNA, 72 nt, Homo sapiens
agacagagacacacacccagccccagcacaaggaaccacaccgcacgacagggcgaaacccaaacccgccgc

SEQ ID NO: 223245 - RNA, 80 nt, Homo sapiens
ccaagcaggcccgagcaccggagagcagagcgcaacaaagacggccaggggccgcaaggccaggcgcgcagaggcaccca

SEQ ID NO: 223246 - RNA, 57 nt, Homo sapiens
ccgaccaccacgccaagcaccacaggagagcccggcgaagagacgcagacaacgaaa

SEQ ID NO: 223247 - RNA, 68 nt, Homo sapiens
cggagagcccagacccagcccccgggccaagagaagggacaaaaggccgagcagcggggaaagcacaa

SEQ ID NO: 223248 - RNA, 83 nt, Homo sapiens
cgacgcgcgggccgcgagcggggcgacccgagaccaagacacccaggagaaagacagcggggaaaagaaaaaggagggggcaa

SEQ ID NO: 223249 - RNA, 88 nt, Homo sapiens
cgaagcggccaaagccgcccagacggccaccggcgggaggaacaaaagaagccccgaaggacaggaccgcaggggggaaaaacaccag

SEQ ID NO: 223250 - RNA, 72 nt, Homo sapiens
ggccgggagggagcaacggagcaggggcagggaagaccgagacggaagacaggagagccccgacgcagaaga

SEQ ID NO: 223251 - RNA, 39 nt, Homo sapiens
ccaacccgcaccagccccgagaaggacacgaggcggaag

SEQ ID NO: 223252 - RNA, 75 nt, Homo sapiens
agaagcgaccaacacagaaggacacgcccaccaagaaagaaccggaaaggggaccgggccaggaaagcagaaaag

SEQ ID NO: 223253 - RNA, 87 nt, Homo sapiens
cgggcccggcggacagccgcacccgcgccccagcagagccggacgagcgggagaggacaccacacaaaaaacaggaaaagagaacag

SEQ ID NO: 223254 - RNA, 73 nt, Homo sapiens
gcagaagaaacagaacggaacccaccccacagaacagccagcaaagacaagagcagaccagcagccgcagcgc

SEQ ID NO: 223255 - RNA, 74 nt, Homo sapiens
ccggaccagccagaggacgcgggccgaggagagcggaggaggggagggaaacccccggaaacagggccgaacaa

SEQ ID NO: 223256 - RNA, 75 nt, Homo sapiens
cagcagggagacagaccagccccaagggccaacccagggaggagcaaacagcggcaacaaggaccgaggggacag

SEQ ID NO: 223257 - RNA, 93 nt, Homo sapiens
ccccgccgcgcggagcccacgaaggggacagcgcagccggcccagagccgggcccggggaccgagaccgccaccaggaagaaagagacaaaga

SEQ ID NO: 223258 - RNA, 82 nt, Homo sapiens
gccaagaaggaggcaccaccaggagaaggacgcagagagacgaagagagaagcagggcagaaagagcggaaacgagaagagc

SEQ ID NO: 223259 - RNA, 78 nt, Homo sapiens
ggaaggaaaagaaaggaggaccgaccagggggaaccagaaaccgaccgaaaaggaacgcccaagcaggagaaggagag

SEQ ID NO: 223260 - RNA, 71 nt, Homo sapiens
cccgaacgcgggggccgacaacccaaggaccacaaccagagaaaccaccgagcagagaggaaaggagggag

SEQ ID NO: 223261 - RNA, 67 nt, Homo sapiens
agccggcaggagagcgacaaaccaaggaggcaagagagaagagaaggaaaggacggcgaacaaagca

SEQ ID NO: 223262 - RNA, 75 nt, Homo sapiens
gcgacagaggagcgccacgcaagacaaccaacaaggccgcgccagaacggaaagaagcccacccaaggaaggacc

SEQ ID NO: 223263 - RNA, 69 nt, Homo sapiens
gacgaaaaaaggggaaagaaaggcacagaaagaagaggcgcggagaaggggacggccagcagaagcagg

SEQ ID NO: 223264 - RNA, 76 nt, Homo sapiens
ggaggggcaacaaaccaccccaacacccaggaggcgggaagcgaggacgggaaccacgcagaaggagcaccggaag

SEQ ID NO: 223265 - RNA, 75 nt, Homo sapiens
aggaagcggccgaaagggggcgcggccagacgacacccaaccgggccagaagcaggcgcaggcaggagacaaaga

SEQ ID NO: 223266 - RNA, 61 nt, Homo sapiens
cccagccccaggcacagaccccagcgaggcgggcgcggacggcaggggcgccggggaaccc

SEQ ID NO: 223267 - RNA, 71 nt, Homo sapiens
cccaaccagggcagaagccgaacacgacagaaagaaaggccaaagcagcagcccaaaggcaggcccggcac

SEQ ID NO: 223268 - RNA, 76 nt, Homo sapiens
accgcgccaacgagacccccgagccccgacaagggaccggccccagcaggaggcaacggcagcagcagcggagggc

SEQ ID NO: 223269 - RNA, 104 nt, Homo sapiens
gcccgaggaggcagccaagccgagccgccacccggcgaaaaccaacggcccggaggaccacagcccaggggccccaggcgaaacccagccggagcgcaggcagg

SEQ ID NO: 223270 - RNA, 57 nt, Homo sapiens
gagacagcccagccaggcccggcgccccggacaggaggcaagccaggacacggccaa

SEQ ID NO: 223271 - RNA, 77 nt, Homo sapiens
gcgcagcgccccaggccagaaggagcgcccccaggacagcccacaccggcccagaagaagggcgaggggcaacggag

SEQ ID NO: 223272 - RNA, 78 nt, Homo sapiens
gaaccgaagcagaagcccagggcaaagcaaaaaccaggaaagaccacagcaagaccacgcccccagccgggggaccag

SEQ ID NO: 223273 - RNA, 80 nt, Homo sapiens
gcggcggagacgcgggcccgagcgggccgcgaggagagagagcggagacaaggccacagcaggccacggcgggggcagcc

SEQ ID NO: 223274 - RNA, 43 nt, Homo sapiens
cccgagaagcgggacacagggacccagccccaacacgccccgc

SEQ ID NO: 223275 - RNA, 82 nt, Homo sapiens
aggggaagcgcccggcgcccgcacggcacggaacgcaccggacgggcgcaagcacgaccggccacaccaagcgccaacgagg

SEQ ID NO: 223276 - RNA, 71 nt, Homo sapiens
agaacacccaaggaaagagacgcagaggacacaggcgaaccacaagcacgcgaagcagaaccacaaaagcc

SEQ ID NO: 223277 - RNA, 103 nt, Homo sapiens
ccagaagcacaggccagggcagaggaccaacagggcagagagcaaggggacacaggcaaaacggacaaagaccgcaaaaagacccgaacggaaagccaaaccg

SEQ ID NO: 223278 - RNA, 79 nt, Homo sapiens
gggaaaggccggccagcgggacaggagggcaggaagagcgcagcggggacaaggccccgagccccggccccaaagaccc

SEQ ID NO: 223279 - RNA, 78 nt, Homo sapiens
agagaccgaaagaaagacaacccgaaagaacaccgaaccagggagcaacagcgagcaacaggcaacgaaaacagacaa

SEQ ID NO: 223280 - RNA, 68 nt, Homo sapiens
acacaggccaagaaagaccaaggcgaaagacgaccacagcaggccgagaagcagcaaaggcaaacaaa

SEQ ID NO: 223281 - RNA, 61 nt, Homo sapiens
gccgaggccccacgaggaagaaaaagaacggccagacggagggagagcgccggaaacagca

SEQ ID NO: 223282 - RNA, 83 nt, Homo sapiens
cgaccacacgacgagccagacacaagcacagcgagaccgcggcgcaggaggaggaggagcaccaagggcccaccaacaggacc

SEQ ID NO: 223283 - RNA, 72 nt, Homo sapiens
gcccagcaagcgaccgagaaacaaaggaaccggaaaagcaaaacagggcggcagcggcggagaaaccaccac

SEQ ID NO: 223284 - RNA, 82 nt, Homo sapiens
ggaaacgccacacgcggagagcacagaggcacaaacgacacacacagggcgggaggccaggcagcacgcagacaagaagcgc

SEQ ID NO: 223285 - RNA, 82 nt, Homo sapiens
ccgcgaggcgagagggggcaccggagggacaacaaaacaagacgcccggacaagagggagggagagggacagaccagcagac

SEQ ID NO: 223286 - RNA, 86 nt, Homo sapiens
gcggacgacgcggagcaggcccgagcgcaagcgccaacggccaccagaagcaggggcaggagggggcaacggagcccagggcgaaa

SEQ ID NO: 223287 - RNA, 65 nt, Homo sapiens
cccccagaggcggaacaggcacccggggcaaagcggccgggcccaaccagcggagcagagggaaa

SEQ ID NO: 223288 - RNA, 97 nt, Homo sapiens
aaaggaaacggagaaaacaacccaacaggaaaaagcacaaacgaacggaagaaagcggaagccagcaaccccacagaaagcgcggaaccaaacacga

SEQ ID NO: 223289 - RNA, 74 nt, Homo sapiens
ggaaacggggcgagaggaggacgccggggacacacagacggaagcgcaccagcagacaccgggagcccacggag

SEQ ID NO: 223290 - RNA, 78 nt, Homo sapiens
cacagcccggacccacgaccccccggccagacaaaaagcgagaaagaccccggacaggacaggcagaaagccgaacgc

SEQ ID NO: 223291 - RNA, 67 nt, Homo sapiens
caccaaaggaagccaagaacagccggagaacccagcacaggaaaagaggggagagcagaaccgccgc

SEQ ID NO: 223292 - RNA, 42 nt, Homo sapiens
gcccacagcagaggagcaccgcagaagaaggaaccagcaaag

SEQ ID NO: 223293 - RNA, 55 nt, Homo sapiens
ggaggaggaggagaagaagagagaaacaacgaacgagcaaggaagggccaaggca

SEQ ID NO: 223294 - RNA, 70 nt, Homo sapiens
ggccagagaaggagaacaagaggaagcacacggaagagcgaaaaagagaaagccggcggagaaaccacca

SEQ ID NO: 223295 - RNA, 59 nt, Homo sapiens
ccacccaccacacacggcaagcccgcaagcacaccggcccccgccccacccggccgaaa

SEQ ID NO: 223296 - RNA, 54 nt, Homo sapiens
agggaagacggacagcgaagccacccagcgccgagaggacagcagcggacggcc

SEQ ID NO: 223297 - RNA, 67 nt, Homo sapiens
cggcaacgaaaagacagcaagacagaaacccaacgccaaagggggacccgcaggcccgacgcaggga

SEQ ID NO: 223298 - RNA, 81 nt, Homo sapiens
ccaaggcggcaccaagacaccagccgaaggaccaaggcggagacagcgagacaaggcggacgaccccaacgaggaagccaa

SEQ ID NO: 223299 - RNA, 79 nt, Homo sapiens
ggagaagccccggggggaagagcgccaccggcggcccgcaagaagaccgagaagggcggagaacggaaaagcaccagga

SEQ ID NO: 223300 - RNA, 77 nt, Homo sapiens
gccgcgcgggccgcgcgcgcgcgcccggaaaccggaccgaaaagacgcggccccaaaggaaacacccgaagaacaca

SEQ ID NO: 223301 - RNA, 80 nt, Homo sapiens
gcagcgcgggacccagcccaggcggcgcggacggggcgggggacaacagagccgacacagccaagaagcagagcaaaaca

SEQ ID NO: 223302 - RNA, 70 nt, Homo sapiens
caagcacaaggggaaaggcgcaacacacgaaaaggaaaggcaaacaagaagacaggcgagcagaaggccg

SEQ ID NO: 223303 - RNA, 75 nt, Homo sapiens
aaccccgaaaaaggcaccgaggccaaaagaaaggaagaaaacccccaaaaagccaaaaggccaagacaagaagaa

SEQ ID NO: 223304 - RNA, 71 nt, Homo sapiens
cgccaggacagacgcacagacaccgcagaaaaggggacaagccacaagagaagagacaacaggaaggacaa

SEQ ID NO: 223305 - RNA, 85 nt, Homo sapiens
aacaggaagaacacggggaagaaaagcgaggcagagggacaacagagagcagagaagacgcggcacggaggagcagaagagcagc

SEQ ID NO: 223306 - RNA, 44 nt, Homo sapiens
aagaagaggccaagcaaggccagagaggcggcgcagaggcggca

SEQ ID NO: 223307 - RNA, 83 nt, Homo sapiens
aacacccacaggacacgaaggcggcccgccggcagagcgagagacaaagcaggaggacacaagaagggaggaaaggcggaccc

SEQ ID NO: 223308 - RNA, 81 nt, Homo sapiens
cagaacagcaaagaggaggccagcgcggccagcagaaggacccaggaagccacccgcagaggggcaaggagaaagggcaaa

SEQ ID NO: 223309 - RNA, 69 nt, Homo sapiens
acgacagacgagagaaaaaaacagggccacgagaaacaaagagcgaagaacgaaccccaaaagacagag

SEQ ID NO: 223310 - RNA, 63 nt, Homo sapiens
cgccagcgggacgaggaccgagaccgcggccgggaccgaggagccccagcccccagcagccga

SEQ ID NO: 223311 - RNA, 71 nt, Homo sapiens
aggaagaggacacacagagaggccaaagccagagacagagcacaaaggcaaacagaaggaaggcgccgagc

SEQ ID NO: 223312 - RNA, 34 nt, Homo sapiens
caaaagcaacaaagagggagaccagagacagacg

SEQ ID NO: 223313 - RNA, 72 nt, Homo sapiens
acaccaaggccacggccaaacacccccaaagcaccgggagaaccagccaaaaaagggcagaaccgacaacgg

SEQ ID NO: 223314 - RNA, 77 nt, Homo sapiens
cgcccccagcggagggacaagacccgaagacggccaaccacacaaggcgacccgcggcgagagcccccccagagcgc

SEQ ID NO: 223315 - RNA, 86 nt, Homo sapiens
aaacgccccgaggagcaggaaggccacgaagacggcaaggaggaaaggaagaggaagacggcaagaagcgaaaaagacgaagaaag

SEQ ID NO: 223316 - RNA, 77 nt, Homo sapiens
ggcagagccccacagcccacgggaacgggagcacaccgcggggcgggagcagcgccaccaccagcccgcaccacaac

SEQ ID NO: 223317 - RNA, 92 nt, Homo sapiens
ggaaacaggagcgaagcccagcgggccggacggggcggggggaacgggagaaaacgggccggaggaaaagggcggcaggggaccaccacaca

SEQ ID NO: 223318 - RNA, 71 nt, Homo sapiens
gagcacgcacggaggccagccccgcggggcccaagacccaggcagacccgcagaccaacgaaaaccacggc

SEQ ID NO: 223319 - RNA, 90 nt, Homo sapiens
ggagccggacccgccgcccccgggagaaggggcgccacgcacccgggacggacaggcgcggaggacccaaaagaaggcggagaggacaaa

SEQ ID NO: 223320 - RNA, 82 nt, Homo sapiens
agaagaggagaaaacggaacaacaggagggcaacccagaacacaaaaacaccccacagaacagggggggaggagggacaaca

SEQ ID NO: 223321 - RNA, 74 nt, Homo sapiens
gcacccccacagggcagaagagaacagaacaccaaggagagaacagaagaccggcaacgggccaagacaaccac

SEQ ID NO: 223322 - RNA, 75 nt, Homo sapiens
ccaaaaaggcaaccacagagagagagagggaggggggccagagaacaagcccagacagcaagacgcgagcgcagg

SEQ ID NO: 223323 - RNA, 76 nt, Homo sapiens
aaacaaagccacaagacacgcgaaaggaggcagccgcgaacccccagaaccgaaacgaccaccgagacgcccagcg

SEQ ID NO: 223324 - RNA, 74 nt, Homo sapiens
cagccccggcgcccaccgcccaccgagccgggaaaaaccgagagcagccgagggaagcaggaagaaacaaggcc

SEQ ID NO: 223325 - RNA, 73 nt, Homo sapiens
ggcaagcaagccagaccaagcgcgcacaagcccgccaccacccaaagagggggaggacgggaacaggaccgga

SEQ ID NO: 223326 - RNA, 81 nt, Homo sapiens
gaagaaagagccaaaagaaagcaaagcgcagaaagggagaaggccggcccagggagaacgcaaaaccaccacccccacaaa

SEQ ID NO: 223327 - RNA, 72 nt, Homo sapiens
gacaaaggccagagaaggcaaaagaggaaacaaccagaaggacgaggcggccaccgagcggaaaaacccaac

SEQ ID NO: 223328 - RNA, 99 nt, Homo sapiens
gagaacaccgaagcccccacaagggaagaaccacagaagcgcagaaaggaagagaagaagaagcagaaagggcaggacgaagaagaagaaaccaaagag

SEQ ID NO: 223329 - RNA, 62 nt, Homo sapiens
gaagaacaccaaggaggaggacagagcgggagccaccagcgccaaagggaagccaggagccc

SEQ ID NO: 223330 - RNA, 66 nt, Homo sapiens
caaagggaaagaggaacaaggaggccgacccgaacgccacaaggaaaaggcccaccgcaggcaaac

SEQ ID NO: 223331 - RNA, 74 nt, Homo sapiens
aagacaccacacccacacccacacggcaaacacccccaccgcccaggcaacaaaggaaaccgaggggaaaagca

SEQ ID NO: 223332 - RNA, 72 nt, Homo sapiens
cccggacccggcagaaagcgacgggaggagggagaacacaggaaccggcccggcgccaggcagccacgcgga

SEQ ID NO: 223333 - RNA, 76 nt, Homo sapiens
aaaccgggggcaaggccaaaaagaagagagcacaagccggacccccacccggcccgagaagaggacccgaaacaga

SEQ ID NO: 223334 - RNA, 83 nt, Homo sapiens
agaacaacaacaaaaagaagcaacccccaccacagaccagcgcaaaggagaagcgaaggaagaaggcaaaaaggacaaagccg

SEQ ID NO: 223335 - RNA, 80 nt, Homo sapiens
agagcggccccgaaggaggggaagggacggggggcggccacggcagcaccagaacagaagaggaacgacagcgccacccc

SEQ ID NO: 223336 - RNA, 82 nt, Homo sapiens
aagggaacggggggaagaggggacaacaggagaagcggaaggagaccacccaccaggcgcaggcccagcaggagcgcaacaa

SEQ ID NO: 223337 - RNA, 73 nt, Homo sapiens
gcacagccccgagaggaacagcggagaccacccgaaaccccagaacagacaggaaggaggggaaagaaaaaga

SEQ ID NO: 223338 - RNA, 67 nt, Homo sapiens
gagcccaaggcacaacgccacaagaaaaggccaaacgagacccagcgccaccccccaccagaagcga

SEQ ID NO: 223339 - RNA, 78 nt, Homo sapiens
ggccggcacgccgagcagggcgaccggggcccaccgcaggcaaaccagaagagaagaaaacaacaaaaaaggggagcc

SEQ ID NO: 223340 - RNA, 61 nt, Homo sapiens
acaggcccgggaggagaagcaccagaagcagaggagcgcggcaaccagaaccacggagaag

SEQ ID NO: 223341 - RNA, 68 nt, Homo sapiens
cgggcaaccagaagggcccaggacaaaccggcgaccacacacggggacgacggggaagccggacagca

SEQ ID NO: 223342 - RNA, 79 nt, Homo sapiens
gaagcaaggaacaaaccgaagaacagcgggaaagaaggcaaaacacggacaacgggagacgcagcaggcgagagacaag

SEQ ID NO: 223343 - RNA, 82 nt, Homo sapiens
ccaaggaggaaggggccggaccgaggccaaaagaaaggaagaaaacccccaaaaagccaaaaggccaagacaagaagaagga

SEQ ID NO: 223344 - RNA, 57 nt, Homo sapiens
ccaaacaagcgcgcaaaagcgaggagggccgcggcagccagaaccagcgaagccaga

SEQ ID NO: 223345 - RNA, 86 nt, Homo sapiens
cgggcgggggccgccagaccaggcgcggagaaggacgaagaggaagccggaaaagcggccaggaccaccaggcggccacgggcccc

SEQ ID NO: 223346 - RNA, 49 nt, Homo sapiens
acgacccgcccggggcagcagggggcccccaaagggaagccaaacacaa

SEQ ID NO: 223347 - RNA, 84 nt, Homo sapiens
ggcaagaagaaacgcagaaccacccacaaccagcagcaccgaccccgaccaagagccccagaaggaggaagcgagagaacaaac

SEQ ID NO: 223348 - RNA, 66 nt, Homo sapiens
cagggagacagaagccaaacaggaggaggaagggaggaacccagcggggccgccccacccgaggcc

SEQ ID NO: 223349 - RNA, 71 nt, Homo sapiens
cggagaagcagaggcacgccggagcgcagcggaagcccgcgggccccgcagaagcagccggaggaggaaaa

SEQ ID NO: 223350 - RNA, 74 nt, Homo sapiens
gaccacgacacccagcaccagagcccacgagcaggcaacgggaacgagcagacaggccgaccacacggggccag

SEQ ID NO: 223351 - RNA, 74 nt, Homo sapiens
caacaccaaaccggcaggcacccgggcgccggaccgggaaacaaaaccagcaagccggaacagcacccgcgaga

SEQ ID NO: 223352 - RNA, 71 nt, Homo sapiens
caagcaacaccacaccagaacaccaggcagaacgaaaacaggcccaacagcccagaggacgagcaaaggga

SEQ ID NO: 223353 - RNA, 82 nt, Homo sapiens
gcggagcgggcagccgccgccaccccgcggccgcacccccgccccaggcaaggggagagccaggcgcagagcccgcaaccag

SEQ ID NO: 223354 - RNA, 66 nt, Homo sapiens
accaccacgcaccaacaaaggagaagcagcaggcagggacagagcaggcggaggggaacggacggg

SEQ ID NO: 223355 - RNA, 76 nt, Homo sapiens
ggggggcgcgcccagagccccgcgcagcccagggaaggagggagcaaaggacggcacgggaaaaacgccaaaaggg

SEQ ID NO: 223356 - RNA, 55 nt, Homo sapiens
ggggaaggggcccacccccgccagacccccgagggaccggcccaaggagccggga

SEQ ID NO: 223357 - RNA, 80 nt, Homo sapiens
gccgcgaccccagcgggcccggggaggcaccgacgaggaggaagcgggacgaccaggacacaccacgaggaggacagcgg

SEQ ID NO: 223358 - RNA, 77 nt, Homo sapiens
cgccgcgggagacggaagaccccgcccccaggagggcagacgacgcaccgaccgaccaggaggagagcaaaagacaa

SEQ ID NO: 223359 - RNA, 82 nt, Homo sapiens
aaaggggagcgccgccgccgcagcgggaccgcgcgaccggcgcccgcccgcgagagcagagcgacacgaaaagacagaccga

SEQ ID NO: 223360 - RNA, 74 nt, Homo sapiens
agaaaagaccaccggagaaagaaacgacggcgcaagggacaccgaccagaccccggaaacagggaggacccagc

SEQ ID NO: 223361 - RNA, 68 nt, Homo sapiens
caccaccccgagcagcagagggccaaccagaagacggagcaggcaaaggagaaaagccaagaagaccg

SEQ ID NO: 223362 - RNA, 95 nt, Homo sapiens
ccggcggcacccgcacccggggacaagcgcgggaacggcgcggaagaggcagcgagaagaaaaagaagagagagacacggacaaggaggacaagc

SEQ ID NO: 223363 - RNA, 58 nt, Homo sapiens
gcgggaacggcgcggaagcaccaggagacaaagccacaaaaacaccagaaaaaccaag

SEQ ID NO: 223364 - RNA, 82 nt, Homo sapiens
ggaggccgggcgggggcgcgccccgcgcgcagggaccgcccgaccagggccacgcaggcgcgggggacgacggcgggggcac

SEQ ID NO: 223365 - RNA, 85 nt, Homo sapiens
agcggggaggccgcccggcgcagcggggaccggcggcggcgcccaggcacccggcccggcaaacagcggcacaacaagcgggcgc

SEQ ID NO: 223366 - RNA, 51 nt, Homo sapiens
aggcgaggaaggccggggcaccgggacagacagcagaccacagcccggcag

SEQ ID NO: 223367 - RNA, 76 nt, Homo sapiens
ccacccccgagcccagcaccgcgggaaggaacagaggagcggaaacgcaggaggagagagacggacccacgccaaa

SEQ ID NO: 223368 - RNA, 80 nt, Homo sapiens
gccgagccagaagccaggccagaggaaagaacagcagcccccagcgggcagaaacgaagaagccccaggggcaggacagg

SEQ ID NO: 223369 - RNA, 81 nt, Homo sapiens
gggggaaacaggcgaggcggcggcgcccggagggcagcgagggggagaggcaccagcaacagaccaaccgcagcaagcaca

SEQ ID NO: 223370 - RNA, 81 nt, Homo sapiens
acgcggagggggagaagcacaggcaacaaaagaaacgaagccgggcacggacaggacagagaaagcaggcgccagcgaccc

SEQ ID NO: 223371 - RNA, 110 nt, Homo sapiens
cgcgagggaaccacagaggacaggcgagggggcaggagagaccacacagggcagacacaaacaacacgacccaggggaagaaccaaagcgcacgaggaggacacgcgggg

SEQ ID NO: 223372 - RNA, 58 nt, Homo sapiens
aaaagaaccaacgagggacacaccaggagacacagggggaaacaggcacgacgacgga

SEQ ID NO: 223373 - RNA, 75 nt, Homo sapiens
gcagcaccgcggggggcggggccgcgacaaggccgacccaaagcggaaaacccgcaagggccagcaaaaccgcaa

SEQ ID NO: 223374 - RNA, 79 nt, Homo sapiens
gcgcggagccggaggaggaggggagaggccggaggacaccaacagagaagggagcccggacaggaccaacggagagcgg

SEQ ID NO: 223375 - RNA, 83 nt, Homo sapiens
gggaccccggaagccaaaaagacgcaaacagcagacggaagaccccacggcaaaaccacacccgaggcgagcccaggacacca

SEQ ID NO: 223376 - RNA, 70 nt, Homo sapiens
cgggagagaggacccccccccccccccaagaggcccaccacagagccccaacgcagcagcaccgacaaag

SEQ ID NO: 223377 - RNA, 77 nt, Homo sapiens
accgcaagagcggagaccgccaccccccgcgggggggagaggccccagcagaccacccaagaagccagggaagagac

SEQ ID NO: 223378 - RNA, 82 nt, Homo sapiens
gcgccgaaaagagagaggcgcccgggagggcacaaagaagggagacagacgaacagaagggcaaagcccaacacccccccac

SEQ ID NO: 223379 - RNA, 72 nt, Homo sapiens
ccaaaaacaaaacgaaccaggacggcaaagagacaagagccaacgaccagccgacagaagcgcaacaggcac

SEQ ID NO: 223380 - RNA, 87 nt, Homo sapiens
cagcgggccggagccccgagaacccacaccgcggacagagcaaacagcaacaaggagcggggggaccaggagcagaggagggcaaag

SEQ ID NO: 223381 - RNA, 41 nt, Homo sapiens
gagggagccaacaccaggggaagccaaaaaggccaagagca

SEQ ID NO: 223382 - RNA, 83 nt, Homo sapiens
caccccacagcccagggaaggcaccaaaagggggggcaggaaaggaacacaacagcgagcaacagcacagcaaggagagaaaa

SEQ ID NO: 223383 - RNA, 63 nt, Homo sapiens
gaggcacgccagaagaccgcccggacgggaagcgggaaagggaggcaccgccccaaccccccc

SEQ ID NO: 223384 - RNA, 67 nt, Homo sapiens
aaccagcagaagaacaggaagcgggacgaccaggacacaccacgaggaggacagcggcggagacggg

SEQ ID NO: 223385 - RNA, 81 nt, Homo sapiens
accgcggccccccgggcgcacaagcagagggccagaaccaccgccagagccgaccgagcacaccagagccaggacgcagac

SEQ ID NO: 223386 - RNA, 64 nt, Homo sapiens
cacagaaaccggccccaggacgggggcaaccggacagagaagcccaagagaagcaggaggagca

SEQ ID NO: 223387 - RNA, 88 nt, Homo sapiens
acccagacaggggcgacggcagaggacccgggcaccgaccaagacgacgcccaggcggacacaaccccaaggcgggacagcaagacgg

SEQ ID NO: 223388 - RNA, 74 nt, Homo sapiens
caggcgaggagaaagcggcgcgcggagaacccagccggggcagggagccagaagcacgccagccacaaaaccgg

SEQ ID NO: 223389 - RNA, 99 nt, Homo sapiens
gcgcgaccggcccgaaacacaccacgcggcgcgacccacacagacaacagccggggcagcgaagccaggggaccagaacgcagccagccgcgggcgccg

SEQ ID NO: 223390 - RNA, 73 nt, Homo sapiens
accccacaaggcagacaaagcggcaacacacgcaacccacgagcggagaacagggaacgaaaccggagacgac

SEQ ID NO: 223391 - RNA, 39 nt, Homo sapiens
ccaggggaagacaagccaggggcagaaaaaaccccaaac

SEQ ID NO: 223392 - RNA, 72 nt, Homo sapiens
accaaaagaaagacacaggccaaggaaagaccagccgagaaaacaaggacgagcgaagcagggaaaaaaacg

SEQ ID NO: 223393 - RNA, 78 nt, Homo sapiens
gcagacgcgagaacaggcccgaaaggcaaaaagggagagagggagcgggaagacagggcagccaaaaacagggcacac

SEQ ID NO: 223394 - RNA, 82 nt, Homo sapiens
ccacggaaaaaaaagccacggggaagccaaaaaccccccacccggggccgagcaagagagggagcacgcacgggaaccggac

SEQ ID NO: 223395 - RNA, 70 nt, Homo sapiens
gcagaggggagcagcgccggggccgccgaccaacacccgaggcggacgcagagacagagccgagagcgcc

SEQ ID NO: 223396 - RNA, 79 nt, Homo sapiens
cggaaaaccaaccagaagacgaacaaacagcaagaaagaccacaagaccagagcccccggagcccagcacgagaaaagg

SEQ ID NO: 223397 - RNA, 55 nt, Homo sapiens
acgaagcagaaccggcccgccgcccggagcacggggagacggacgcaaagacaag

SEQ ID NO: 223398 - RNA, 75 nt, Homo sapiens
ccggaaagcccgccacagcggcccggccccccggacagacgccgacgcccagggacaaccgagcagcgcccgggg

SEQ ID NO: 223399 - RNA, 57 nt, Homo sapiens
ggagggaaagccaaacaacggacaaagaccagggaagaaaccaaccaggaggcgccc

SEQ ID NO: 223400 - RNA, 80 nt, Homo sapiens
ccggccaggagcggccagccgcgggcgcccccacgcgggccgggggcgccggccacagcgaggcggaacacgaggaccca

SEQ ID NO: 223401 - RNA, 70 nt, Homo sapiens
caaccggacagaggacgacgaagagacaaaggcaccggaaagccaggaaaaacacacccgaaaagcgaag

SEQ ID NO: 223402 - RNA, 71 nt, Homo sapiens
ggccccaccagcggaagcgcgcgcgggggaagggccccagggcagccaaccccgcggcaggcacggccacc

SEQ ID NO: 223403 - RNA, 66 nt, Homo sapiens
aagaagccggaggacccacaggcgccgcccggcaccagcaaaggggagagacagagcaacgaaagg

SEQ ID NO: 223404 - RNA, 74 nt, Homo sapiens
gagcccggcaggacacaagcggcgagagcgccaggaacagggcacaaaggaaaaccaaggagaggacacgccag

SEQ ID NO: 223405 - RNA, 68 nt, Homo sapiens
caaaggagcccaaccagagcggagcgcagaccgaggaaaaggagagaggacagacaacgacgaaagag

SEQ ID NO: 223406 - RNA, 84 nt, Homo sapiens
ccgcggacgaggaccagcagaggccagcacgagaacccagggagaccagggcgggagacggggacagacgccggcggaacgggc

SEQ ID NO: 223407 - RNA, 77 nt, Homo sapiens
caacagagggcgaacaccgggaaggaaggcacggagccggacaacaaaacgaccggccaagccaaaggcaaccaaag

SEQ ID NO: 223408 - RNA, 74 nt, Homo sapiens
gcggaaggcccaccaaagggaaccaggagccgacaacaacccgacgcaaggcagccacaccacccaccaccacc

SEQ ID NO: 223409 - RNA, 81 nt, Homo sapiens
gccgcccgcgacaaaagccggcagcccgccccgggggccgaggcaggcgcacagaaggaggcccgccgcccagcacagcac

SEQ ID NO: 223410 - RNA, 56 nt, Homo sapiens
gggggaacgaggaagcgcccaagggcacaacacagaagaaggcggggcaaaggaaa

SEQ ID NO: 223411 - RNA, 85 nt, Homo sapiens
ggcacagccggcgcggagcgccgcaggcggcggccgagggcgcgcggaccccccgcgagagccggaacccagcagaagccagccg

SEQ ID NO: 223412 - RNA, 67 nt, Homo sapiens
gcaggaccaaccaggccaaaaccagggagagccgcccagagaaagcacaaggacaacaggaaaagag

SEQ ID NO: 223413 - RNA, 79 nt, Homo sapiens
ccagaagcgagccccaagccacgacaagacagccggcggaggcgcggcagaggaagaagaaggcgcaaagcgccgaagg

SEQ ID NO: 223414 - RNA, 84 nt, Homo sapiens
gaggcggccgccgcgcacccaccgcgacccgggacccgcccgcccgcgggagagaaaaagcaacagggagacgcaagaaagaag

SEQ ID NO: 223415 - RNA, 63 nt, Homo sapiens
accaccccgaagaaagcacaggaggcagaaaccagcaggagaaggaaaaggaaacaagaaaag

SEQ ID NO: 223416 - RNA, 111 nt, Homo sapiens
ccgggacggaccgagaccggaccgagagcggaccgagagcgcgaaacgcacgagaagaagacaaacagaccccagaaagaagaagaggaaagcccgacaaggaaggaagaa

SEQ ID NO: 223417 - RNA, 66 nt, Homo sapiens
gaccgagcccaggagcgccacgcgcggaaggcagcgcccagcagcgcaggagcccagaccgagaac

SEQ ID NO: 223418 - RNA, 80 nt, Homo sapiens
gccgcccccaggaccccagggagagcgggcagccccaggggacagaaagaagcggcacggaaggaaacggcccagcagac

SEQ ID NO: 223419 - RNA, 66 nt, Homo sapiens
acggagagggaaccacccgacacacagccaggcccacgggaaaagcgcagaaagcggacgagcggc

SEQ ID NO: 223420 - RNA, 70 nt, Homo sapiens
gggacaccgggcccaggaaaagaacaagaagcaccccaggcaaaggcccgacaagagaggcggagccacc

SEQ ID NO: 223421 - RNA, 55 nt, Homo sapiens
gcgcccgcgcggcgcggggaccgcggcccggagcagcgacccgccgggcccaggg

SEQ ID NO: 223422 - RNA, 77 nt, Homo sapiens
cccgcggccgccggacggccgggcgcggaggaggcacaaaaagaacaaccagaaggaacgcagagaccgacggagag

SEQ ID NO: 223423 - RNA, 72 nt, Homo sapiens
cgaacggggcgagccggaggagcacccaaccccgcgggaaagacaaggagccgggccgagaaaccgaaccag

SEQ ID NO: 223424 - RNA, 82 nt, Homo sapiens
gcagcgccaagaccgccggacccggggcgccgcggcccggcacgcaccgggcgcacccacgacgcgcacaccaccggcagac

SEQ ID NO: 223425 - RNA, 86 nt, Homo sapiens
gaaaaggcggacgggaaggcgggagacgagaagccgaaaagcgcagcgagcggagccgccggaggaggagggagaggaaaacggga

SEQ ID NO: 223426 - RNA, 79 nt, Homo sapiens
aaccaagcggagagagcagcccggcagacgcagaaccagacagcccgagccaagcagcccacaaagaccaccaaagaag

SEQ ID NO: 223427 - RNA, 84 nt, Homo sapiens
cggccggagaccgggggcccccgggccgccccccgggagagccgccgggacacagacccccccgagaggcccgagggcagcgac

SEQ ID NO: 223428 - RNA, 79 nt, Homo sapiens
aaaagaccgaacgaggaacccaaaggcaccgggggcacagacgccagcagcccggacgccaccaagccgagccacgggc

SEQ ID NO: 223429 - RNA, 81 nt, Homo sapiens
cgcgccccggccgcgccggggccgcgcggccccgcggagccagggcggagaacggaaaagcaccaggaagcagagaggacc

SEQ ID NO: 223430 - RNA, 72 nt, Homo sapiens
ggcggccccgacacccgcacaccgagacagcagaccacagcccggcaggcccaaaaacccaaagggacagaa

SEQ ID NO: 223431 - RNA, 70 nt, Homo sapiens
caaccgcgccgggcaaacgaaggaagagcagcaaaggaagagagggggcaagacgccaagagaaaaggcg

SEQ ID NO: 223432 - RNA, 50 nt, Homo sapiens
accacaaagagagagaaagcccggaccagacagcaggaaaagacaagaaa

SEQ ID NO: 223433 - RNA, 99 nt, Homo sapiens
ggacggggcaaaccgccgccgcccccaccagacagacgcgcaaaacccagacacaggaccgaaaggcgaccagggcaaaggaaagcgcaggacaccgaa

SEQ ID NO: 223434 - RNA, 75 nt, Homo sapiens
ggaaaccgagaggaaccggggcaggaagaacaccccaccagaccacccagcaagcccacaaaaaaggcacaagca

SEQ ID NO: 223435 - RNA, 78 nt, Homo sapiens
agaaaggccaacgagaacaagcacagggcccccagaaccacagcaacaccggaccgcccaacagcagccagcccccac

SEQ ID NO: 223436 - RNA, 69 nt, Homo sapiens
cccgcgcggaggcgcggccgacggcgccacaggagccgcagaagcaaaggcaccgccaaaccgaaaacg

SEQ ID NO: 223437 - RNA, 85 nt, Homo sapiens
gaggaggagcccgcccccagagaggggagccggcgaggacaaaaccgaaggagggagaagagagcggacccacaccagggaagac

SEQ ID NO: 223438 - RNA, 77 nt, Homo sapiens
gcaaagaagagaccacagacgagcgcggcgggaagcagaaggacaacagaaagccgggaaggaccagaagagcgaga

SEQ ID NO: 223439 - RNA, 70 nt, Homo sapiens
gcgacgcaccgagaaaggaaggaaaaccgacgaaaccccccgacccaaccgcagagcccacacgaggaga

SEQ ID NO: 223440 - RNA, 70 nt, Homo sapiens
acccacaagaaacagagcaaagcgaaggggaagacagaggcggaagaaagagcacagacggcccaccaga

SEQ ID NO: 223441 - RNA, 52 nt, Homo sapiens
ggagcggggcgcaggccccgcgcgaggagagagcacgcgcacccaagccgag

SEQ ID NO: 223442 - RNA, 69 nt, Homo sapiens
gcgcccaggaagccaggagaccacccggcaagagaaaaggcccgccgagacacgcagcgaagggacagg

SEQ ID NO: 223443 - RNA, 60 nt, Homo sapiens
ggaaacaccacgaagcagccaaggcagggccaaaacggaaccaaggaaaaacaagacaag

SEQ ID NO: 223444 - RNA, 82 nt, Homo sapiens
aagaacgcaggacggccgcggcaccgaaccacaaggaggacgagggacacaggacaaggagccaccggagaggaagcggcag

SEQ ID NO: 223445 - RNA, 80 nt, Homo sapiens
cgcagggcgaggacggccgaaccccgcgcccgcaggacgccccagccaggacaggcgcaagacagaaaaagcgaagcagg

SEQ ID NO: 223446 - RNA, 93 nt, Homo sapiens
cccacgcgcacacaagggagcccccccaccacccccgaacgcgggagcgaaggaaaggaggcagaaaaaaggacggggcagccacaaggcaag

SEQ ID NO: 223447 - RNA, 71 nt, Homo sapiens
gccgccaagaagaccgagagcaccacaaggccaagggcaaggagacaggcagagaggcggaccccgcgggc

SEQ ID NO: 223448 - RNA, 47 nt, Homo sapiens
agaggagagagcgcgggcccaggaagaaaccaccagagaaggcgagc

SEQ ID NO: 223449 - RNA, 89 nt, Homo sapiens
cgcagggcagcgcccgcgccccgccgcgagccgcgcggagccgcgcagccccggagcacggcgccgcgaggccgcggccaggccgagcc

SEQ ID NO: 223450 - RNA, 62 nt, Homo sapiens
aacgaacaggaacagaaggggccgcaaggccaggcgcgcagaggcacccaacggcacagacc

SEQ ID NO: 223451 - RNA, 75 nt, Homo sapiens
cccggcgcgcagcccgcgcacagcgcccccgcccgcccccacccgcggcagcggaagagggaccaggggagacgg

SEQ ID NO: 223452 - RNA, 70 nt, Homo sapiens
agggggaacccaggcagacggacgccgccccaacacacaccacagcggaaacgaagagagaagaagaaca

SEQ ID NO: 223453 - RNA, 79 nt, Homo sapiens
agggggccgcagggcaccccaccgcaaaccaaacaaaggcgaccccgaaagaccccgacaggaggagacgccaagagcc

SEQ ID NO: 223454 - RNA, 68 nt, Homo sapiens
ccgaccgcaacagaacggacccggcaccagaaggagacacaacgcgacaacggaccaaaaacacgaga

SEQ ID NO: 223455 - RNA, 83 nt, Homo sapiens
cacaaccccacaggcacgccgaaaccgcaaaccccaaaggccacaggcagcgacgaggagaagagccccaagaggaagggaca

SEQ ID NO: 223456 - RNA, 53 nt, Homo sapiens
gcaaccaagaacgcaaacacccaacgagagagcaaaagagacgccgccagcca

SEQ ID NO: 223457 - RNA, 71 nt, Homo sapiens
gagccagggaggaccagcggacccgccgaagcagacaggggaaccaaacccaccgaaaacaggaagaaacc

SEQ ID NO: 223458 - RNA, 68 nt, Homo sapiens
aagcgcacaacagcagacaggcaggacacagaaaaggccagagaacaagaagaaaagagacagcccgg

SEQ ID NO: 223459 - RNA, 57 nt, Homo sapiens
cgcaagaaaccacagagacaaagcgccagccaagggccggagcgagggagagcagga

SEQ ID NO: 223460 - RNA, 62 nt, Homo sapiens
ggccccccagccagggaacccggcgaaggccgagcaggcggcgggcaagcccacggcgccgc

SEQ ID NO: 223461 - RNA, 60 nt, Homo sapiens
gaaaccagcaccaacggccaaaagggaaaacggcccgggaagcggcagccaggacaaccg

SEQ ID NO: 223462 - RNA, 72 nt, Homo sapiens
gaaagcgccgccgccggcccgggagcgcaacacgcagcggcgggagaggaaggaaaggaaacaaagagcaag

SEQ ID NO: 223463 - RNA, 59 nt, Homo sapiens
acagacagaaggagaaaggaggaaaaacagccaggacccgaaccacaaagacacacaga

SEQ ID NO: 223464 - RNA, 70 nt, Homo sapiens
aaccccgcccaacacccaccgagaagcaaggcaggaggggcggcaaagggaggcaaagcaagaaaggaag

SEQ ID NO: 223465 - RNA, 74 nt, Homo sapiens
cccgacagggcaacacccgacaaagggacggggaggacgcacgacgcgcggcacgggaacgcagccggcacaac

SEQ ID NO: 223466 - RNA, 58 nt, Homo sapiens
acaaaggcaggccgaacagagagaccaaaacacgcagcccccgacaggaccccggcaa

SEQ ID NO: 223467 - RNA, 106 nt, Homo sapiens
cagcgcgggagagccgggaccggccgggaagcggccaccgacacgcagcagcggccaggaaaacaaagagggaaaacggagaaaagcccccccaggccagcgcagg

SEQ ID NO: 223468 - RNA, 57 nt, Homo sapiens
gcgaaacgcacgagaaggcgggggagcgggaggagccagagcacaccgcaccacggc

SEQ ID NO: 223469 - RNA, 91 nt, Homo sapiens
cccacaggcccaccccacaaggagaccaggccaagacggacgccgggcaggcaggccacgggacagcagccgccaccgcccagggaagcca

SEQ ID NO: 223470 - RNA, 74 nt, Homo sapiens
gggcacggacgaggagccgcgaacgccaccaccccgcagccccaacccagcagcggaagaagagcgaccaaggc

SEQ ID NO: 223471 - RNA, 78 nt, Homo sapiens
cggggagggggacacacaaccgcccagccggcgagggacgccgcaggcaacgcggaaaaaagccggggggacgcggac

SEQ ID NO: 223472 - RNA, 75 nt, Homo sapiens
ggggggacacacgcgaccggcgaggcccaccaagccaggcagaggaggagcgagaggacaggagaagggaagcgg

SEQ ID NO: 223473 - RNA, 42 nt, Homo sapiens
gcagaagaaccaaaggacgaagaacaaggaccaacaccaagg

SEQ ID NO: 223474 - RNA, 75 nt, Homo sapiens
cagaaccgagaagcgccccagaaaggagccaaagcgccaggagcagagaggcgggccccaaagccgcagcagacc

SEQ ID NO: 223475 - RNA, 61 nt, Homo sapiens
accaccaccggccgccccgagggacgaaaagcccgacaccagcaggcggaggacccccgca

SEQ ID NO: 223476 - RNA, 78 nt, Homo sapiens
cacccgcccagaagacacgaaccaaaacagcggaccaagcccagagagcagcccacgcggcaaggcaagaagaacagc

SEQ ID NO: 223477 - RNA, 36 nt, Homo sapiens
accggcaggcccgccgagagagaagcccacaccagc

SEQ ID NO: 223478 - RNA, 67 nt, Homo sapiens
cgaccgcggaacaaacagaagacagcaggaggacgagaaggacacgacgggagacagcagccaaaga

SEQ ID NO: 223479 - RNA, 77 nt, Homo sapiens
gcgcccccgcaagaggacggcgccggcagccggggcagacaccccacaggcaccagcagcaacgaacaggaggaaaa

SEQ ID NO: 223480 - RNA, 59 nt, Homo sapiens
gaaggaccaagaaccaggggacacggaaaacgacagaacgaagcagaagaacgcccagg

SEQ ID NO: 223481 - RNA, 75 nt, Homo sapiens
cgcgcgaacccggccgcagggacccgcaggagcggaaacgcgggcaggccagccaggagagaacacaccccgccg

SEQ ID NO: 223482 - RNA, 80 nt, Homo sapiens
gaaaacggaagcgcagggagaaggaagaggggaaaaggaggaccgggggaaagcaaaaaaaccaccccaaggagcagaca

SEQ ID NO: 223483 - RNA, 73 nt, Homo sapiens
aaaaccaggcgaaaggcgaggcagaggggcacaaaacaaacggagagaggagggagaaacaaaggccaaagac

SEQ ID NO: 223484 - RNA, 71 nt, Homo sapiens
aacaaaagccagaaaaccccaaagcaaacgagcaacacggacgcggcaaacagagcagagggagaaacgac

SEQ ID NO: 223485 - RNA, 78 nt, Homo sapiens
ccggacacagcaaaccgggccacaggggcccagacagacgagagcggcacgaggaccaaggggagcagacccagcagc

SEQ ID NO: 223486 - RNA, 60 nt, Homo sapiens
agaccccagagcggaccaaaccgacaaggagcgacaaacaagaccccggagaaaaggccc

SEQ ID NO: 223487 - RNA, 85 nt, Homo sapiens
gagcgaaacaagacaacggagcacgagacaacaaaagaagccaaaccgccccaagagccgcaaacaaacaccgcgcagaacagaa

SEQ ID NO: 223488 - RNA, 68 nt, Homo sapiens
ggcccggaccaggcacgcacaaaaagggcgacgccaggagcacaccgaaaagaaaggaaaaccgggag

SEQ ID NO: 223489 - RNA, 64 nt, Homo sapiens
gggccgaaagaggcaacaggccccagaggagggaaaggcaaaccgacaccagcgacacaagcgc

SEQ ID NO: 223490 - RNA, 76 nt, Homo sapiens
agaccaagaacaagaccgggaaaagcaccgccaggacagagaacagagagcaggacgagagcagggaacagggacg

SEQ ID NO: 223491 - RNA, 112 nt, Homo sapiens
gcagggcaggccaccgcaccggggagccccgccaccgcaagagccgcagcagcgccccgcaggcgaggcccgggcagcgggccagcgggaggggccccggcccgcccaggga

SEQ ID NO: 223492 - RNA, 61 nt, Homo sapiens
gccgagccagcgccggccgcgcgccgcgcccgcgccacaggaacaggcccaaagacgcacc

SEQ ID NO: 223493 - RNA, 75 nt, Homo sapiens
gaagagggagccccaccaagcgaagcgggacaaaaagccaaaggcgcgacacgccgaccgccgcgccagcacacc

SEQ ID NO: 223494 - RNA, 79 nt, Homo sapiens
gggccggcagcgcccgcggagacggaagagcaaaccaagaaggaggggaccgaagcgccaggccggcgaaggaccggag

SEQ ID NO: 223495 - RNA, 80 nt, Homo sapiens
gccacaagcaggacaagggacacgaaggagccacaagaccaagcgccacaagggaggaaagccaggaagcaagccgcgag

SEQ ID NO: 223496 - RNA, 90 nt, Homo sapiens
ggcggggagggacccggaccaaagggcgcggcccccggcggcggggccccggcccccggaccccgcggaccggcccggggcgccgggcac

SEQ ID NO: 223497 - RNA, 74 nt, Homo sapiens
gcacaaggaccgaccgggcgagcgagagagagcaagcgcagcgccacaaacagcccgggcaaacgaaaagccaa

SEQ ID NO: 223498 - RNA, 78 nt, Homo sapiens
agaacggagcagggaacacgaccccaagggagcaggggaaggagacgggcaggagcgagccacccggaacaagcgggc

SEQ ID NO: 223499 - RNA, 72 nt, Homo sapiens
acacacgcaccccggggacagggacagaggcacagaagaggccgacggagaggcggccagggaggcccacaa

SEQ ID NO: 223500 - RNA, 67 nt, Homo sapiens
gagagggaggaacagcaccccacacccgggaaacacacccaagcacggcgcggaagcaggaaaggca

SEQ ID NO: 223501 - RNA, 80 nt, Homo sapiens
gcacaccaggcacccgggcccagccgggaacccccacgcggccagcgaaaacgcccagggcgcaggcccgagaccaccaa

SEQ ID NO: 223502 - RNA, 75 nt, Homo sapiens
gccgcggagcggacccagcaagacggaacacagacaaccagggacacaccccgccaggcaggaagcaggaggacg

SEQ ID NO: 223503 - RNA, 77 nt, Homo sapiens
aaagcacccgcccggaggaagcgggccaaacgaccaagaaagcgggacgcggaaaacgggacccgcaggggcccccc

SEQ ID NO: 223504 - RNA, 53 nt, Homo sapiens
ccacacgggagagaaggaggcaccgccccaacccccccccgcccggagaaccc

SEQ ID NO: 223505 - RNA, 77 nt, Homo sapiens
agagcgccaaagacccccgaccccaaccaggaacagaggccaccagcagagcccccaaccagcagcagggcaccccc

SEQ ID NO: 223506 - RNA, 59 nt, Homo sapiens
ccgaccgcaacagaacggacccggaaaaccagcaggaacagcgacaggagccagaagcg

SEQ ID NO: 223507 - RNA, 63 nt, Homo sapiens
caaagggggaggcaaacaaaagacggcaaggacagccgagaggagggagaaaacacagcaccg

SEQ ID NO: 223508 - RNA, 85 nt, Homo sapiens
gaccagccgcggagccgggggcaggggaaaacgaagccacccaacggcaaagccaaggcagcgaccccaggaccccggagaggaa

SEQ ID NO: 223509 - RNA, 70 nt, Homo sapiens
aggaggcgaagagcacagagagaagggaagccacagaagaaagcgcagcaggagcaacaagaggaacccg

SEQ ID NO: 223510 - RNA, 76 nt, Homo sapiens
ccggagagaggagaacgaacaccggaccgccaggggggagacgggaagagcaaaccgcccagcacgacccaggcgg

SEQ ID NO: 223511 - RNA, 74 nt, Homo sapiens
ccgcgggcgccggagccgaggcgagcgccgcgcgcaccacgaaccagacgacagaaaagaagacaccagaacaa

SEQ ID NO: 223512 - RNA, 77 nt, Homo sapiens
aggcagaacaccaaaagcaagaggcaaggaagggacaacaaccagaccagccggcgaggcagcccccaagcaagagc

SEQ ID NO: 223513 - RNA, 31 nt, Homo sapiens
aaaggggcggaagccaagggcacccgcacag

SEQ ID NO: 223514 - RNA, 77 nt, Homo sapiens
gaacaccagaagaaaaacccacaggacaaaagaagaagcagcaaggccggcccggagcggccagcccacggccccaa

SEQ ID NO: 223515 - RNA, 83 nt, Homo sapiens
ggaccggccgagaggaagacgagccgggaggaacggcccggaaacaggaggacgaggccccgggggccgcggcccggccccac

SEQ ID NO: 223516 - RNA, 59 nt, Homo sapiens
cgaacgaagcggcaccagggccaagcgggcaacaaccagccacggagcccgcacgccac

SEQ ID NO: 223517 - RNA, 59 nt, Homo sapiens
cccagacaagccggggaggaagggcggcggaccgacccacaaggaagcgaagcaagcaa

SEQ ID NO: 223518 - RNA, 65 nt, Homo sapiens
gggcaccggagacacagaaggggcaggcaggcgcagcaggcccaagaggaaaaaaagggaagcaa

SEQ ID NO: 223519 - RNA, 48 nt, Homo sapiens
gaagcacggcgggcgaaacaggcgaagaaagcaacaagggaggaagga

SEQ ID NO: 223520 - RNA, 56 nt, Homo sapiens
cgccccacacccaaaaggcgaaaggaggggcggcagggggaccagccagcaacccg

SEQ ID NO: 223521 - RNA, 64 nt, Homo sapiens
ggcccagaaggagaacccaccccggcccacggccgacagacgagacgaggacgcgcacaggaaa

SEQ ID NO: 223522 - RNA, 73 nt, Homo sapiens
gaacagaggacaggagcgcccgcccccagcgggcaaggagaggggcaaaggaaagcccgccccacaagagaag

SEQ ID NO: 223523 - RNA, 76 nt, Homo sapiens
gcaaaaccagccaaaccaggaaaggacaggagacagcagaagcggcaccaggcccaaaggccaacccagagccccc

SEQ ID NO: 223524 - RNA, 35 nt, Homo sapiens
cagagcaagcggacagaggccaagaggcgccgagc

SEQ ID NO: 223525 - RNA, 39 nt, Homo sapiens
gggaaggcgccgaagaggacgaagacccagcgccacccc

SEQ ID NO: 223526 - RNA, 92 nt, Homo sapiens
cgacagggagacacggcaggaacccgcgaagcgggaagcgcacgggaagcaggaaaacgaggccgcgggccggggcggggcaaaggagccgc

SEQ ID NO: 223527 - RNA, 41 nt, Homo sapiens
gccaccacgccaacaggcaaggagggccccaaggcggcagc

SEQ ID NO: 223528 - RNA, 68 nt, Homo sapiens
aaggagagaggaccacccagaggagcaacgcggcagggcgcccacgggaagccccaacccaggaaaca

SEQ ID NO: 223529 - RNA, 74 nt, Homo sapiens
cgcccagaggacaaaaggggccgggcaccacaaggggaccggccggggaagcacagccaggggcggacgagccg

SEQ ID NO: 223530 - RNA, 68 nt, Homo sapiens
acacaggccaggggagacgcaccccaacagcaccccagcaggggaaaacgacccccaggaaaaagaaa

SEQ ID NO: 223531 - RNA, 67 nt, Homo sapiens
gggagaaaagcccaaccgcgcaaacaagcagaagggacggaaaagaagaaaacagggaaaggaggca

SEQ ID NO: 223532 - RNA, 74 nt, Homo sapiens
agagggggcccaagaaggcccgcggcggaagccggcaggacacgaaagcccaacgggagacagcaaggaaaccc

SEQ ID NO: 223533 - RNA, 58 nt, Homo sapiens
aagcgcacgacgggaccacaaggcccgcaggagcgcaagccccggggcagagacacag

SEQ ID NO: 223534 - RNA, 84 nt, Homo sapiens
gccggagacagcgcgaccggacgggcagggagacagaagccaaacaggaggaggaagggaggggacagaggacgcagaaaacaa

SEQ ID NO: 223535 - RNA, 81 nt, Homo sapiens
caggaagggccgagcggcgggaaagcaaggacacccaggcccaaccccagccccaggaccacagcccaaggagagagagga

SEQ ID NO: 223536 - RNA, 76 nt, Homo sapiens
agaaacaaagaacaacccccaaagagagacacaagcgggacagcccagccaggcccagagagaggggcggggagag

SEQ ID NO: 223537 - RNA, 77 nt, Homo sapiens
ggccgggaaggaacgccagacagcaggcacagagagcggcggacccgacgccgccagcccccaggcccgcccagcaa

SEQ ID NO: 223538 - RNA, 72 nt, Homo sapiens
gaggaaggccaggaacgcagaagaccgcaggggaaaaccaaagaccgacaagacccaccagaaaagccagac

SEQ ID NO: 223539 - RNA, 81 nt, Homo sapiens
gaagcagcacaaggcgagccagggccccagcgcaaagcccaaggccacaccaggacccagcacgccccgggggcaagaccg

SEQ ID NO: 223540 - RNA, 59 nt, Homo sapiens
ccgggaacccccacgcggccagcgaaaacgcccaggaggaacaagcagcagaaaaaaga

SEQ ID NO: 223541 - RNA, 73 nt, Homo sapiens
gggccagcggccgccggacccccggggacccacgagccaccgagcaagaaaggggcgagaaagcgcgcacggg

SEQ ID NO: 223542 - RNA, 76 nt, Homo sapiens
aaaggaagccaagaacaagcacaaagccacagcgaccaagcaaggacggggaaccaccaaccggcaagaaagcgca

SEQ ID NO: 223543 - RNA, 66 nt, Homo sapiens
ggacaaagacaaaggaaagccaaaaggggaagaaggccaaccgggggccaagggggaagggaggca

SEQ ID NO: 223544 - RNA, 74 nt, Homo sapiens
cacagaaacggaggcagacaccaacgggcgacgccaggagcacaccgaaaagaaaggaaaaccgggaggaaaag

SEQ ID NO: 223545 - RNA, 69 nt, Homo sapiens
cgggacccaaagcgggaaccaaaggcacggaggcgaaacaaaacaaaaaaggcccaaaagagccggcac

SEQ ID NO: 223546 - RNA, 76 nt, Homo sapiens
ggcggcggcgcccgcgcacgcgcaagaccgcgaggcgagacccgcggcggccggggcagcgccgcgagccagcaac

SEQ ID NO: 223547 - RNA, 79 nt, Homo sapiens
gcgaagcccagggaggccaccaggccagcccgcgggagcgccacacagagcggaagaaccgaccgggacgagggcacca

SEQ ID NO: 223548 - RNA, 76 nt, Homo sapiens
gacagagaccagaaacacaggcagacggaagcacagaagcgcagacggcccaagcagccagagaggcaggaccgac

SEQ ID NO: 223549 - RNA, 77 nt, Homo sapiens
aagcaaagacacccggccgcgcggggagaagcgcccgcaccaggacacagggaaggggaagcaggccaacccagaac

SEQ ID NO: 223550 - RNA, 69 nt, Homo sapiens
aggggcagccacccccggcgggaaaacggcacaaggcgacgagggagggcagaccgccaggccagcaca

SEQ ID NO: 223551 - RNA, 36 nt, Homo sapiens
gggacacggcaggcgccaggcacagaagaggaaagc

SEQ ID NO: 223552 - RNA, 87 nt, Homo sapiens
aagcaaggaaacgagcagaagggaaacccaacagcccaagagggaaacccagcagaggagcagacacccggagccgagcggaggagg

SEQ ID NO: 223553 - RNA, 73 nt, Homo sapiens
ccgggcaaaaaagaaaagaagagagagagaagcaacggaccccaagcagagaggaaagcccgaaaaggaccag

SEQ ID NO: 223554 - RNA, 74 nt, Homo sapiens
ggaaccgccgccccggccggacccgacccgagccaccaggacacgaaaagcaaacgccagcagaccacacccag

SEQ ID NO: 223555 - RNA, 77 nt, Homo sapiens
cggcccccgaaccacccacgccaaccccagcccagagcagagcagggaagccaaaaggcgggcagccacgccggaga

SEQ ID NO: 223556 - RNA, 87 nt, Homo sapiens
cgcgaagcggccaaagccgcccagacggccaccggcgggaggaacaaaaggagccgcccggcaaagcgaaagcgcaggaccgaggag

SEQ ID NO: 223557 - RNA, 73 nt, Homo sapiens
gcaaagagagcagacccgaggagcccgcagagaggacggggacgggccccaggacgaggaagacaaggccagc

SEQ ID NO: 223558 - RNA, 64 nt, Homo sapiens
ggcggccgcggcgagaccggacccaggcccagccagagggaaaaagaacaagacagagaagcga

SEQ ID NO: 223559 - RNA, 71 nt, Homo sapiens
cgcacacccagcagggagcagcccacaccgaaccaggacagagacacggagcgaagacgagaaggggcagc

SEQ ID NO: 223560 - RNA, 85 nt, Homo sapiens
ccgccacgccgggcgacgacgaggaggaggcggccgccgcagccggggcccccgccgccgccggagcgggagagcccagagacaa

SEQ ID NO: 223561 - RNA, 61 nt, Homo sapiens
aaaacccagagcccaagcacacgcccaccacaaagcccgaagagccaaccacaggagggaa

SEQ ID NO: 223562 - RNA, 65 nt, Homo sapiens
gaggccacaggcgcaagcaggcagagcgaaggacgcgcgcacaacagaacaacagaaagcggaag

SEQ ID NO: 223563 - RNA, 70 nt, Homo sapiens
gcaaaaagcaaggccaccaacaagagcaacccagaaaacgacagaagcacgacaacaacgggcagcaagc

SEQ ID NO: 223564 - RNA, 68 nt, Homo sapiens
gaagcagggaaaacaggaaggaaccagccaaaaagcaagagagcgcagaaaggagcaacgcgacagca

SEQ ID NO: 223565 - RNA, 79 nt, Homo sapiens
ccggccggaggagggggcgcgcgaaggccagagcaggcggggaaggggagaagggccggagagcagagaccaaaacggg

SEQ ID NO: 223566 - RNA, 72 nt, Homo sapiens
ccccgaagcgagggaagggcggacacaccggcgggaagcggggaaaggaaaacaccagcacaccaaagaccg

SEQ ID NO: 223567 - RNA, 62 nt, Homo sapiens
ggagcccggcaagccgccaccgggagaagcggccgggccaagacagcgcacgaaacacacaa

SEQ ID NO: 223568 - RNA, 79 nt, Homo sapiens
cccccagccagggaacggcaggcgcccgcaggacccacgacggcgaaccagacggggaaagagaggcaaaacccaaaga

SEQ ID NO: 223569 - RNA, 68 nt, Homo sapiens
ggacccgaccaacaaaaaccagaagacaaccacagaggcacgccaacaggagaggagcaggaagaaga

SEQ ID NO: 223570 - RNA, 117 nt, Homo sapiens
cggcaggcggcgccggccggggacccggcccgggaccggcggcgcgcggcggccgaggccagggggcccgaaggcaccgcagaacggggcgggacgacaggagccaagaccagccag

SEQ ID NO: 223571 - RNA, 56 nt, Homo sapiens
cgcacaggccagccggcaaaaacaagaccggagacccgaaagaggaagagcgccgc

SEQ ID NO: 223572 - RNA, 65 nt, Homo sapiens
gcggcaaagggaaaaaggcggagcaaggccgcaagaggacgaaggaccaagacgacaaagcggac

SEQ ID NO: 223573 - RNA, 62 nt, Homo sapiens
cgaacccgagagcgggagcgggcgggccagagagggggcagagagccaaacgacaacccaga

SEQ ID NO: 223574 - RNA, 73 nt, Homo sapiens
ggaggccacaggggccgacaacacagagcaagcacaagggaaggcgccgcgcacacggcccagccggagcaca

SEQ ID NO: 223575 - RNA, 77 nt, Homo sapiens
cagcgggggaaccggcgcgccggcgcgcggcgcggacaggcccaaacggaacagacgccccaccaggccagcggggc

SEQ ID NO: 223576 - RNA, 77 nt, Homo sapiens
gccggggcgcaggcgcccggcggaaggcagacagagagaagggggaggacgcagccagaaaggaacaacccaaaaaa

SEQ ID NO: 223577 - RNA, 74 nt, Homo sapiens
cccaaccagagcggagcgcagaccgaggaaaaggagagaggaagggagcggggagcgaaaggaaacgggcgaaa

SEQ ID NO: 223578 - RNA, 52 nt, Homo sapiens
cggaggaacggagcaccgcgcaaaaaaacggggaggcacccaagacagagga

SEQ ID NO: 223579 - RNA, 80 nt, Homo sapiens
ccgccaagccgccccccaccgcccgggcccgaggaggcagccaagccgagccgccacccggcgcccagcccccggacacg

SEQ ID NO: 223580 - RNA, 81 nt, Homo sapiens
ggcggagcacccaccacggagggaaagaccaggcagaccgaaggacacagcccgcagaaaggaagcgggccagagcgccgg

SEQ ID NO: 223581 - RNA, 80 nt, Homo sapiens
cggggaccagcagccgggccagggccagagcaaaggaccagagaagaaaggccaaaacgacaggacggcgagggaccagg

SEQ ID NO: 223582 - RNA, 50 nt, Homo sapiens
cgcgaacaagcacgagcgcaagggccagcgcaccaccacggaccggacac

SEQ ID NO: 223583 - RNA, 85 nt, Homo sapiens
gcgggcggacgcgccggcgggaagagagcggcggccgccacaacagcacagccggcgacggcgcggcgcgcacagagcacacccc

SEQ ID NO: 223584 - RNA, 62 nt, Homo sapiens
gccggaccacagcaacacaccgaaagacaccagaagacaccaaggacagagaaaagcaagag

SEQ ID NO: 223585 - RNA, 82 nt, Homo sapiens
gaggacagagcccgcggccgcgccgagcgggggaggcgccgggcggccgcccgcaggcccgcgggcggaagagcgcgggagg

SEQ ID NO: 223586 - RNA, 79 nt, Homo sapiens
cccgagaccagcccaaccagggaccgccacgcacagggcccaggggacacccagcaggccagggaagaggcagcccagg

SEQ ID NO: 223587 - RNA, 82 nt, Homo sapiens
accccgcgccaccaaagggagggcggccaaccgcacagacgaccaaccagggaaccgggcagcagccgcagccgcccccggg

SEQ ID NO: 223588 - RNA, 70 nt, Homo sapiens
cggcagcagccaggcggagaacaacaaacagacaggaagggaaggggcggagacgggcggaacgcaggag

SEQ ID NO: 223589 - RNA, 73 nt, Homo sapiens
ggaacaaagccagacggcagaagaaaaaccagcacgcaggaacaacagacaagcggaacaccgaagagaagag

SEQ ID NO: 223590 - RNA, 72 nt, Homo sapiens
ccccaccccagacaggggaacagggcacagcccacccagggacggcaaacgcggaccggaccagcaaccgca

SEQ ID NO: 223591 - RNA, 81 nt, Homo sapiens
gcgcaaccacgggggacgggaacgagggggaagcggcccagggaggggccaaccgccccccagcagcaggcacgggcgaac

SEQ ID NO: 223592 - RNA, 79 nt, Homo sapiens
ggcccacaggacggggagacagcagcaggaacacagcggacccacaaaccgggagaccaagaacggcacacggacggag

SEQ ID NO: 223593 - RNA, 79 nt, Homo sapiens
ggcgaggacgacggggcgagaccccgcccggaccgcagaggaagcacccgcgagaaagaagggcacagcgaaacagccc

SEQ ID NO: 223594 - RNA, 78 nt, Homo sapiens
acgcaggccggaggcaggcaggaggcccccggcagcgcagcacgaggcagccggccgggaccaccaccagcagaccag

SEQ ID NO: 223595 - RNA, 82 nt, Homo sapiens
gaacgccgcggacccggagccgcacaaaccagggccgccagaagccagacggcccgccacgggccccgcagccgcgcccgag

SEQ ID NO: 223596 - RNA, 55 nt, Homo sapiens
cagacaagccggggaggaagggcggcggaccgagaccacaccgcgccagaccccc

SEQ ID NO: 223597 - RNA, 84 nt, Homo sapiens
gcgcgcggcaccccggccaccggcagggcccgcacagcggagcgaccccaggcaccaagcaaaaggcaccggccccgagagggc

SEQ ID NO: 223598 - RNA, 37 nt, Homo sapiens
ccggcccgcaagcaacaggaaacggaaacggccagaa

SEQ ID NO: 223599 - RNA, 76 nt, Homo sapiens
cacaccagcggcagcagcacgagccccccagccgcgaagagacccgacagagcagaaaacagcccggaagcgcccg

SEQ ID NO: 223600 - RNA, 70 nt, Homo sapiens
aaggaccaagaaccaggagcgccaaaagcaggggaagccggaagacacagaggacaagccccaggccgag

SEQ ID NO: 223601 - RNA, 74 nt, Homo sapiens
aagccggaggagaagcaagaaggcccggacacagcaaaccgggccacaggacagacgcaaagagacaggaggga

SEQ ID NO: 223602 - RNA, 75 nt, Homo sapiens
accgaaagacgggccagagacgacaacccgggccccgagaaccggccgagacagggccccgacggaagacacaaa

SEQ ID NO: 223603 - RNA, 76 nt, Homo sapiens
cgccagcacgacccaccgcacgcagaagcgggccccgccgcaggaagaccacccgcaggaacaccccagaccgagc

SEQ ID NO: 223604 - RNA, 82 nt, Homo sapiens
cggcgccgccaaacagcccagccgcgccagcgcccggcgccgcgcgccacccccgaagcacagcacgaggcgccggaagaaa

SEQ ID NO: 223605 - RNA, 61 nt, Homo sapiens
caagcaacaacaacaagcgaaacggaaggacggagcaaggcgccggccagagccgggggcc

SEQ ID NO: 223606 - RNA, 73 nt, Homo sapiens
cgaagcgggacagaacagccaccaaaacagaaggaaagaccacagcaagaccacgcccccagccgggggacca

SEQ ID NO: 223607 - RNA, 68 nt, Homo sapiens
gcggaggaagacgggaggggacagccgaaagccacgaagaacagcagccaaagaaagagcaaaaaagg

SEQ ID NO: 223608 - RNA, 80 nt, Homo sapiens
gcccgggcgagcccggagaagaggaaggggaggcaagcaggggggcaaaggaaagaaggcagaaagggaggccaggagcg

SEQ ID NO: 223609 - RNA, 78 nt, Homo sapiens
cagagagagcggacgacagaacccggccgacccggaccaacaaccccaagggaaggggccaccagaaggaggacgcag

SEQ ID NO: 223610 - RNA, 85 nt, Homo sapiens
aggcccgcggagcgccgccgcgcggagaaggccccaggcaaggcacgcacgaccgagaaagccagggagcggaaaacaccgcagg

SEQ ID NO: 223611 - RNA, 73 nt, Homo sapiens
cggaggaacgcaggcgcgccagaagaaaaagcagcacgaaggcgaggaaccagcagacaaaaaagaagaaaaa

SEQ ID NO: 223612 - RNA, 94 nt, Homo sapiens
cccagacgcgcccgcgggcccggccacggcggagccaaggccgcgggagagcgggggcgggaggcgggccccgggggcagcacccccagccagc

SEQ ID NO: 223613 - RNA, 58 nt, Homo sapiens
gagcaggcgagcgaacgacgagcagcccaggaacaaaggggccgaacgacacgaccca

SEQ ID NO: 223614 - RNA, 79 nt, Homo sapiens
acccggcacccggacagcgcacgccgcccgcccgggcgccgcgccacagccgcgcggacagggacaaaggaaaaagagg

SEQ ID NO: 223615 - RNA, 47 nt, Homo sapiens
ggaacccgacgccaggcgcgcgccgcacaaagggaagagcgggcggg

SEQ ID NO: 223616 - RNA, 64 nt, Homo sapiens
aagaacaacaccgcacgaggagaaaccagaggcaagcgacgggaaggaccaccaaacccagcca

SEQ ID NO: 223617 - RNA, 60 nt, Homo sapiens
caaagcaccggaaagcagcggaaagagcacaggcgcccccacgagaaggggacccagacc

SEQ ID NO: 223618 - RNA, 84 nt, Homo sapiens
ggccggagcccggggaaagaggcgggagagggaggagcccagaccgggcgacccgccgagaaagaagacccggagaagagggcc

SEQ ID NO: 223619 - RNA, 80 nt, Homo sapiens
ccccagcggggagacacagaagggcgcaagaggcagacagacaggcgacgggcagccaacaagaaacgacacccagcaca

SEQ ID NO: 223620 - RNA, 80 nt, Homo sapiens
acagaaccgggacagcaacacccacaggacacgaaggcggcccgccggcagagcgagacgcaacaaggaggaacaaaagg

SEQ ID NO: 223621 - RNA, 63 nt, Homo sapiens
acgacacaacccgggcgcgcggcagccaaggaggcgaagccgagaccggaggaccacggcccg

SEQ ID NO: 223622 - RNA, 57 nt, Homo sapiens
accagaaagaggcacagccccaaaagaaaggcagcaacaggccaacccaagcgccag

SEQ ID NO: 223623 - RNA, 108 nt, Homo sapiens
acaccgccggagcaacgaaaagagcccggaaggaagagacaggaggcagcagacggacaccaggagcaagacagaaaagagacaacgcccagcggcaagacgcaagac

SEQ ID NO: 223624 - RNA, 68 nt, Homo sapiens
ggagaaaagaagccaaagggacacgggagcagggccccagaagaggaagacgcgagaagacaggagag

SEQ ID NO: 223625 - RNA, 59 nt, Homo sapiens
agagagggcggggagacaaggaggccgagagaccgcagggaggagcgcacagcacagcc

SEQ ID NO: 223626 - RNA, 75 nt, Homo sapiens
caaacacaacaaaagcaccccacgcacaaggagcgagcagaacacacagagccaccaggacggccagcagaagca

SEQ ID NO: 223627 - RNA, 73 nt, Homo sapiens
acaccagcccgaaacccgacaggaaggaaggaaccaagcacccagggagaaaaacgacaaacagagcgaaaaa

SEQ ID NO: 223628 - RNA, 43 nt, Homo sapiens
gaggcacaccgggccaccaaccacaagaggcgccgaagcacag

SEQ ID NO: 223629 - RNA, 72 nt, Homo sapiens
cgacaagcgcgcaaagaggggaaagaaaaagagcccaccaaaaggaacagacggccccaggcggacaacgca

SEQ ID NO: 223630 - RNA, 73 nt, Homo sapiens
gggacgcgcggaggcgcacgacccggggacccacagcgcggcaggggaaaagaaacaaacaacaagaagaagg

SEQ ID NO: 223631 - RNA, 81 nt, Homo sapiens
cggaccacgcgccacgccgccacacccgccgccacagggaagccgcgaaggagaagaaggaaggggaagaggcagaaaagg

SEQ ID NO: 223632 - RNA, 75 nt, Homo sapiens
gaaacaaggcaacagaaagagcaacagcagggcaacaggccaaacccagacgcaaccacccccagagggaacagg

SEQ ID NO: 223633 - RNA, 49 nt, Homo sapiens
agaagagaacgaagggaggcagacagaaggccgcggacccccccccccc

SEQ ID NO: 223634 - RNA, 81 nt, Homo sapiens
cccgggcaagaggcgcaaacaagccaacccaggaggaaaaacgacaccacgccacccaagagagagcaaaaaccgagaacc

SEQ ID NO: 223635 - RNA, 82 nt, Homo sapiens
gggagccgcccccgcggggcgcccggagccggccagcgcaccaaccaggagcaacgagagcaaaacaacaagaggagaagag

SEQ ID NO: 223636 - RNA, 79 nt, Homo sapiens
caccccaccggcgcgcgcggcggcccgcgcacagaaccaagaaggagcgagggaggagcagcgagacagcaagagacga

SEQ ID NO: 223637 - RNA, 70 nt, Homo sapiens
ccccagggaccaccgcaagaccacagacgagcggggcaagaaggccagcaaaggacccagaaggagaaaa

SEQ ID NO: 223638 - RNA, 74 nt, Homo sapiens
gaggcagaaaggaagcagcaggcagaacaccaaaagcaagaggcaaggcccagaggagagccaacccgacggga

SEQ ID NO: 223639 - RNA, 77 nt, Homo sapiens
gagccggacccagcgccggcccccaggcgaagaagcgcagccgcaccggccaaggaggggcgcacccaacgcgcacc

SEQ ID NO: 223640 - RNA, 75 nt, Homo sapiens
ccggcgggggacacgcccccggcagcagaagccaagacaagaagcggagaagcgagagaaacacagggacagagc

SEQ ID NO: 223641 - RNA, 68 nt, Homo sapiens
gagcccaggagcgccacgcgcggaaggcagcgcccagcagcgcagggcggacgcagcccccaacccga

SEQ ID NO: 223642 - RNA, 77 nt, Homo sapiens
cagcagcaggacaccggagccccacccagcccacagagaaaaaacaggagaaggagagcagcaggggaccaaggaag

SEQ ID NO: 223643 - RNA, 78 nt, Homo sapiens
ccggggaccaacaaccaccaagaaacagagccagagacgcgcacgaaacgacgaagaggcccgaggacagaggagcaa

SEQ ID NO: 223644 - RNA, 74 nt, Homo sapiens
ccaggccccaaagcgaggaaagggcaccccaacagaaaaaaagggaccaccaaccacagacacagggagagaaa

SEQ ID NO: 223645 - RNA, 61 nt, Homo sapiens
aagagaaaaaaggcgccagcaaacagcccgcaggaaggagagggcacaagaaaggacgagg

SEQ ID NO: 223646 - RNA, 81 nt, Homo sapiens
aaacggaaccgggaggcgacgcacacgagcggaggcgaagaaacgaaggaggcccaaccacaaaaggagccgacggaaccc

SEQ ID NO: 223647 - RNA, 77 nt, Homo sapiens
ccagacgaccacgacgaggccggggcacgcggcgagggaacccccaggccaccgggcgaaggaggagccgggaagga

SEQ ID NO: 223648 - RNA, 50 nt, Homo sapiens
aaaagcggccccaaggcgaacaaagaacaaaggcgcggaacaaacccaca

SEQ ID NO: 223649 - RNA, 78 nt, Homo sapiens
cccaagaagaacggaaaagccagccaggacaggcaagacccagagaaaggaacaagacccgcagacaaccggaggaaa

SEQ ID NO: 223650 - RNA, 84 nt, Homo sapiens
gcagacggaaacgacagaagcagagggaccaagaaaggcccagggaccaaagcccggacaaggcccgagcaccaggaccgcaga

SEQ ID NO: 223651 - RNA, 77 nt, Homo sapiens
agaagcaccagcaagggccccagggcaccccgcgaacggcacaaaaccacaacaagccaggacgcaaacaaaagcag

SEQ ID NO: 223652 - RNA, 79 nt, Homo sapiens
acgcccccgcccccgccccccaccccgcccaacgcggggagccaggaacgggggacaaggagaggcacacacacagaac

SEQ ID NO: 223653 - RNA, 69 nt, Homo sapiens
gccagggcagaaggaaaacacagaggaaagcacacacacaccgcaaggaccacccaagaagaccaaggc

SEQ ID NO: 223654 - RNA, 74 nt, Homo sapiens
agccccccacacagccacacagacaccgccacaggagagagcaaggacgggcagaaaggagagacaagcagggc

SEQ ID NO: 223655 - RNA, 72 nt, Homo sapiens
ccggaggacgacccaacagacgcagaaagaggcaggggaagcacaaaagcgcacccgcgccagcgaggaccg

SEQ ID NO: 223656 - RNA, 45 nt, Homo sapiens
cggacgccgcgcggcgcggacggcgcgcacaaagcgggaagaaca

SEQ ID NO: 223657 - RNA, 64 nt, Homo sapiens
aagcggacacaaaaggacggacaggaggacaacgggaccgcagagaacagcgcgacacccgaac

SEQ ID NO: 223658 - RNA, 83 nt, Homo sapiens
aagaaccaaaaccaagacccagccaagcagaggccacacgaacgagaaggagggggcagagcacggcaggcagaaggggccaa

SEQ ID NO: 223659 - RNA, 80 nt, Homo sapiens
gggagaggggaagaggggacaaagccgcccacccccagcggcacagcagcagggacgcaccaaaacggacagccgaagac

SEQ ID NO: 223660 - RNA, 72 nt, Homo sapiens
aggccaaagccccagcccgggagcgaagaggaaagaaagacccccgggacagaaacaagcccaagagcaggc

SEQ ID NO: 223661 - RNA, 60 nt, Homo sapiens
gaccgcagaaggccggagacaccagcaggagccgaggccagagcagaaaccagcccagga

SEQ ID NO: 223662 - RNA, 69 nt, Homo sapiens
ggagcagagaaaaacccagccaaaagacacagacacagaggagaggacaccacaggccagaaacaaaaa

SEQ ID NO: 223663 - RNA, 86 nt, Homo sapiens
cacccccagcggggaccgcccgggacaacagcgcggggcacaggcaagcacagcccacaaagagcagagggcacggacgacgggga

SEQ ID NO: 223664 - RNA, 81 nt, Homo sapiens
gaaggagcgcgcagcaaagacgggcacaccaggcggccccgggggaaccgaacggggcggcaaaggcaagaagcgaacacc

SEQ ID NO: 223665 - RNA, 80 nt, Homo sapiens
gacccacggaccggggcaggaaaggaaccaggagagagcagccagagggaaggaaaaacgggagacccgagcacacacgg

SEQ ID NO: 223666 - RNA, 77 nt, Homo sapiens
cgccacggcgacgccccagcccgcccaaagaaagaaggagccaagacaggccccacagcacaccaggcaggaaaccg

SEQ ID NO: 223667 - RNA, 74 nt, Homo sapiens
gaagcaaggaccgggaaacaaaaaacgaaaaacagcagaaacggaaggaagccaagaacgcagagaaaacaaac

SEQ ID NO: 223668 - RNA, 68 nt, Homo sapiens
ggaagaaaagaaccgagcaacggaagccagaagacaagacggaagaagaggaaggcacgaagaagggg

SEQ ID NO: 223669 - RNA, 83 nt, Homo sapiens
caacaggcaacaacacacagaggggggcaggaagacaggaccacaggacaggcgacacaacagggaagaccgggagaccagac

SEQ ID NO: 223670 - RNA, 51 nt, Homo sapiens
cggcggcaaacaagaaagaacagagacgcaggcaagagcgcggaggagaga

SEQ ID NO: 223671 - RNA, 57 nt, Homo sapiens
cccggccccggcccgcccgggacaaccagagggaaaaaacaaaggcagcacggccga

SEQ ID NO: 223672 - RNA, 83 nt, Homo sapiens
cagaaggacggcccgacggaaggcccgcagcccccggaagccaaagacccccagggacccggccccagcaccgccgggagcgc

SEQ ID NO: 223673 - RNA, 81 nt, Homo sapiens
agaggaagcggaaaccagggccacagcacgcagccccaggcagaccgccacacaaaaagaaccacaaacacacagagaaac

SEQ ID NO: 223674 - RNA, 73 nt, Homo sapiens
cacagaaaccggccccagaacgaaaacaaacggaagagagggcagcaagaaagaacaagaaagcgaacggaaa

SEQ ID NO: 223675 - RNA, 70 nt, Homo sapiens
gaaccaacccgcccaggacaagccgcgcggggacccgacgcccgcacgaacggccgagcgaccaggagag

SEQ ID NO: 223676 - RNA, 68 nt, Homo sapiens
cggaccagccgaaaagccccgcccgcccggaaggcacagaaacaccaacacacacccagaaggccaca

SEQ ID NO: 223677 - RNA, 52 nt, Homo sapiens
cggccaagcgggagaaagccccgcagccggcgaccaggagcggccaccccgc

SEQ ID NO: 223678 - RNA, 76 nt, Homo sapiens
gcaacaggagccccacgccacgggccaaacagcagagggaggcgaacggagacggcacacaacagagagcaaaaag

SEQ ID NO: 223679 - RNA, 78 nt, Homo sapiens
accacagcagcccagcacacagaaggcagccacaccagcccagggcaccaggcgaagggaggaggcagcgaaaacaca

SEQ ID NO: 223680 - RNA, 81 nt, Homo sapiens
ggcgaacagcgcgacacaggaggagcagggccgccccgaggagagcgacgcccgggcgcgccccggcagagcgagccaaaa

SEQ ID NO: 223681 - RNA, 74 nt, Homo sapiens
aacggcaagaccaaaaaacacaaaccaggcaacaggcagaaaaagaaccaggccaagaaaaccagaggacacca

SEQ ID NO: 223682 - RNA, 72 nt, Homo sapiens
cgcacccaaagggacaccgcgacccacaccaaggaaggaagaagcaagcggagggcaaagaccaccccaacc

SEQ ID NO: 223683 - RNA, 80 nt, Homo sapiens
ggaaggaagggacaagacccacagcaaagccagcgacagaagccagcccggggacaaaggggggaacagaaaggaacggc

SEQ ID NO: 223684 - RNA, 80 nt, Homo sapiens
accccagacgggaccggggaagccgcacaccagaggccagcaagcggagggcgggagcgagggcgcgcgccgcgcgccgg

SEQ ID NO: 223685 - RNA, 77 nt, Homo sapiens
cacgaggagacggaaccggagaaaagccccggcccgccaagccaacagcaagccgcccgccacccaaacaaggacaa

SEQ ID NO: 223686 - RNA, 78 nt, Homo sapiens
gaacacacgcgcagggccgaggaggaccagccgcaccgcgcaagacgccaagggaagaaagccgaaggagaaaacacc

SEQ ID NO: 223687 - RNA, 73 nt, Homo sapiens
gcagcagggccgacccgacaaaccccgagggacagccgccgccccgagggaccaaaggcagaagccccaaccc

SEQ ID NO: 223688 - RNA, 55 nt, Homo sapiens
gagaaaaccccggccggcgccaggcaagcagagaggagagaaagaacccacgcag

SEQ ID NO: 223689 - RNA, 79 nt, Homo sapiens
gccaccccacgacccgaagaaccccaagccacgagcacacccgcagacgcggagaaaccaccgacaaagagaggagggc

SEQ ID NO: 223690 - RNA, 78 nt, Homo sapiens
acagcggccgggcccaggaaaccagggcacagggccaaaaagcagaaaaacaaaccagcccaagaagcgacaaagccc

SEQ ID NO: 223691 - RNA, 68 nt, Homo sapiens
cacccggcacgccacggcgccccgcaagccacaccagagcgcaaagccccaaaaccgaggccgggacc

SEQ ID NO: 223692 - RNA, 72 nt, Homo sapiens
ggagaacacaagagcccacaagacgggaagaccacggcagcaagagaaagggggacaccaaagcggaaacca

SEQ ID NO: 223693 - RNA, 74 nt, Homo sapiens
acaagccgcgcggggacccgacgcccgcacgaagcgcccccggccggggcgagaagggaacaaacacacgggag

SEQ ID NO: 223694 - RNA, 66 nt, Homo sapiens
gaccggacccagaaaccggacccaaaggaagcgaaagggggcagacagaagagagacgagcaaccc

SEQ ID NO: 223695 - RNA, 82 nt, Homo sapiens
caacgggaagaaagagccccaaggacaggccacgcaggaagaacgaagcacagcggaacaagcgaaccacaaagaaaccgac

SEQ ID NO: 223696 - RNA, 83 nt, Homo sapiens
gcgcggaccgcgccgccccgccgcggcggggacgcagagacaccaggcgccgagaaggccagcagagaaacaggcaggagagg

SEQ ID NO: 223697 - RNA, 89 nt, Homo sapiens
cccagacgcggcacagagagggccgggagcgcgcagccagccaaaacagagggagacgagaaaagggccgagcacaagccaagaaggcg

SEQ ID NO: 223698 - RNA, 78 nt, Homo sapiens
gcggaaagccgaccaccgccgagcccacgcaggagacgggaggagcgacaacggagcacacccaccccgcgcaagggc

SEQ ID NO: 223699 - RNA, 86 nt, Homo sapiens
cggaggagccgcgggcggcgcggcccagccgccagcccgggaccgggagcccgggaccgggagccggggggccaccccgaccggag

SEQ ID NO: 223700 - RNA, 76 nt, Homo sapiens
cgagggaggcggacacggaacggaagccgcccccaacagaagcaagaggccaacacagcccagaagacccccaacg

SEQ ID NO: 223701 - RNA, 74 nt, Homo sapiens
ccacagagaagaaggagcagcaaaacccgaacggggagacggccggggacacaagcaacagccagaacaagccg

SEQ ID NO: 223702 - RNA, 84 nt, Homo sapiens
ggcgggcgcaggcccggcgcagcgcgggaggaccgcgccaacaggacgaggagaccgaccaggagaccccagcggagacgaccg

SEQ ID NO: 223703 - RNA, 82 nt, Homo sapiens
ccagccaccagagcaccaagcagacacgcagcacaaggacaagagcgagggggcgccagcgcgggggaggagaaaaccgcca

SEQ ID NO: 223704 - RNA, 80 nt, Homo sapiens
ccacgccaccccacgagaccaccgcacaccacagaccgccccgcccagcaagacgccagccacccgcaccgggcccccca

SEQ ID NO: 223705 - RNA, 60 nt, Homo sapiens
agaacagaacccaaaagccgacaaccccagaaacaggagccaggcagaaaagaaaagaag

SEQ ID NO: 223706 - RNA, 64 nt, Homo sapiens
cagaaaacaacaacccacagcaccgaacccaagaagagggaagagaagaacagaagaggacaca

SEQ ID NO: 223707 - RNA, 59 nt, Homo sapiens
gaagaagagggaggggagaaccgcaaggagagcagccagaggaaccaggacagaaaccc

SEQ ID NO: 223708 - RNA, 50 nt, Homo sapiens
acagaaacaaaagcaacaaagaggcgcagaacggcggaggaaagccaacc

SEQ ID NO: 223709 - RNA, 79 nt, Homo sapiens
gaggaggacccggaggccgcggaagcggggggcagagaacacacagaagagaaaaaccgaacacaggacacacgacggc

SEQ ID NO: 223710 - RNA, 119 nt, Homo sapiens
ccaaagacagagacaagcggggaagaacggcggagcacaccgaccaaaaaagaagggccggagcaaggaagacagaacgaggccaggaagcgagaagacaaagcgaagagagaagcaga

SEQ ID NO: 223711 - RNA, 37 nt, Homo sapiens
ggaacgccccaaaaaaggagccgaggaaggacagggc

SEQ ID NO: 223712 - RNA, 72 nt, Homo sapiens
aacacagcacgagaccccccgcgagagcgcaaacacccccagacaaaggaagagaccgagaccaggaaccag

SEQ ID NO: 223713 - RNA, 72 nt, Homo sapiens
cagcagagaggaaaaacacaacccaagaaacggggagaaagaagagagaccagaaacgagaggagaagaaac

SEQ ID NO: 223714 - RNA, 83 nt, Homo sapiens
cggccccgacgacagcgggccgggaaaagggcacgaggccggaaccgcccagccccggaaggacacagacaaaagaccaggag

SEQ ID NO: 223715 - RNA, 64 nt, Homo sapiens
cccacagcaggacagccgaacggaacggagagcagccaagcagaaaaaaggcagcggaaagaag

SEQ ID NO: 223716 - RNA, 75 nt, Homo sapiens
gacccgcccccggacacaacacccacgcaggccagagagccaagaaccagaggcaggaagaagaaaaacgccgag

SEQ ID NO: 223717 - RNA, 75 nt, Homo sapiens
ccgaaccgcgggagaggggaagagacaagaccagccaagggaagaagcagaagcaagcccagggcaaggaccggg

SEQ ID NO: 223718 - RNA, 90 nt, Homo sapiens
gaggaggccagccggaagacagagagagaaaagagggacgccaaacacccaaaggagcgcagcgcccgaacaacaccagacaaacgaaag

SEQ ID NO: 223719 - RNA, 71 nt, Homo sapiens
gccacggaggggcagccacccccggaaacaccagcgaagagaggcaaccagcccacaagaaacaaagcaac

SEQ ID NO: 223720 - RNA, 79 nt, Homo sapiens
aagagagggccacgagagagaaagacacaggagacaagcgcaagcagccagagcccgggcgcaaagaaccaggcccgga

SEQ ID NO: 223721 - RNA, 79 nt, Homo sapiens
ggagcgggccggacacaggaccgcgacgaagccaaaaacgaagaagaggggaaagcccacccagcggaacgggcacaaa

SEQ ID NO: 223722 - RNA, 55 nt, Homo sapiens
ccccgagagcaggaacagcaaacgccaggggcagagcggccccaaaaaaggacag

SEQ ID NO: 223723 - RNA, 79 nt, Homo sapiens
gcaaagcgcccaaccaaaacgaggcccagggagcaggaagaagcgacgaggaccaggagaaaaccggaagagaaaggcc

SEQ ID NO: 223724 - RNA, 77 nt, Homo sapiens
gggaaggagccaaggaggaggaaaacagggccgcaaggaacaaagcaggacccgccagaagagaaaccaagaaagag

SEQ ID NO: 223725 - RNA, 80 nt, Homo sapiens
gcgccagcccggagcaagaagggaacgaggggccagccccggggagcccacgcgccacagcaggaggagggagggcgggg

SEQ ID NO: 223726 - RNA, 67 nt, Homo sapiens
gaaggaccaagaaccaggcggcagcgccgggcccgagcaggaaccgaggagggacacacggcgcagc

SEQ ID NO: 223727 - RNA, 76 nt, Homo sapiens
cggacggacgagggaacaaaacgggacaaacgcagccggaccaaccaaacccgcaaaaccacaccaccagccggag

SEQ ID NO: 223728 - RNA, 82 nt, Homo sapiens
ccccgggaccgcggagcggagccggccgacgcgggcgcgagggcagaaccgggcacagcaaaggcccagaagaaccaaagaa

SEQ ID NO: 223729 - RNA, 100 nt, Homo sapiens
ccggccacagccaacgcccgcgcggggccgcgcagggcggccccggcgggggcgcgggaggcagcacggcaggagacgaggagaggacagcaggacaccc

SEQ ID NO: 223730 - RNA, 53 nt, Homo sapiens
ggcaagggcgacaaaggacacacggaacacgcaggaaagcacaagaggaagag

SEQ ID NO: 223731 - RNA, 56 nt, Homo sapiens
acacagcagaagaaggcgcagaaagagagagcacaggacaaggagcacgaccaagc

SEQ ID NO: 223732 - RNA, 82 nt, Homo sapiens
cagggcacaaccagggcagcaggggaggcaaaacccaacgaggacgggggaaagaaggaagggaaaaaaaccaaagcaggac

SEQ ID NO: 223733 - RNA, 81 nt, Homo sapiens
gccggggacgcccgggagaggccgcggcggccaggccccagacacagacgagcaggggaagggaacaggcaggaaaacgac

SEQ ID NO: 223734 - RNA, 71 nt, Homo sapiens
ccccaccgcagcagcccagccacggccaaacagggaccaggggagaagcaaaaaacgaaagaagaacgccc

SEQ ID NO: 223735 - RNA, 88 nt, Homo sapiens
ccggacgaaccccacgcgggcgcggacgaccggagcagagagcggcgagcaagcagcacccgcggccgccccgacaagcgggagggac

SEQ ID NO: 223736 - RNA, 73 nt, Homo sapiens
ccaggcgcccagaccaagggaacggagaagacgcgcaagaccgagcaagacgccgcagccgagcacgagcagc

SEQ ID NO: 223737 - RNA, 77 nt, Homo sapiens
ggcaggggcggaggcggaggcagaggggaggcgcgaaagggggcccagagagagggagcccacacgggggccgggaa

SEQ ID NO: 223738 - RNA, 69 nt, Homo sapiens
gcacgccaccaagcagccagcacaacccagccacagcccacaaacagccacacagaaaagaaagaagac

SEQ ID NO: 223739 - RNA, 74 nt, Homo sapiens
agccaaggggcaggagagaagggagcgaacacaggaaccaaagaggggaaagggagagaggagcacagaaccga

SEQ ID NO: 223740 - RNA, 73 nt, Homo sapiens
cccgcccggggcagcagccgcagaaagcaacaaagcgagagcacaagaaaacagccccgagcaccagaccacg

SEQ ID NO: 223741 - RNA, 79 nt, Homo sapiens
gcgacggccgggggcccgcgaaccaacggagcggggcaggggcgacgagagcgcgcgggaacggcacaaaggaaccaag

SEQ ID NO: 223742 - RNA, 81 nt, Homo sapiens
ggcccgacaagaaccacgcgggagcagagcccacgcaggagacgggaggagcgacaacggagcacacccaccccgcgcaag

SEQ ID NO: 223743 - RNA, 75 nt, Homo sapiens
aagcagaaaaccagaagcacaaggacagagcacccaccacaggagcgcggaccggaaacaacgggacgaagcccc

SEQ ID NO: 223744 - RNA, 61 nt, Homo sapiens
aagccaggaaggagacacggccccccaaggaaaacaggacaaccgcaccagggggcacgag

SEQ ID NO: 223745 - RNA, 72 nt, Homo sapiens
caccaaggcggggaagggccaacccaacagcacagaggaggagggacagccaagagcaaacaccagaacacg

SEQ ID NO: 223746 - RNA, 77 nt, Homo sapiens
caaaaacgcaaaaccagcagcagcacgagagaacaaaaaaacaacaccgcgaaagggacgacgagaccacagaaggc

SEQ ID NO: 223747 - RNA, 75 nt, Homo sapiens
gacaggagcgaaggaaaaaacagaagacgcagcccaggcaccgccggccaggaggagagcgcaccaccaaaaagg

SEQ ID NO: 223748 - RNA, 63 nt, Homo sapiens
gacaggaagaaggaagaggacaggagaaaaccacagagaagcaggcgaccaggcgcgcgggca

SEQ ID NO: 223749 - RNA, 83 nt, Homo sapiens
cgaaacgcgagccggagaggagccgcaggagaaggaaccagcggggagaaggcccagcgagacccaaagacaggaccacgcac

SEQ ID NO: 223750 - RNA, 68 nt, Homo sapiens
ccaaggggagccaggaagcaggagaaaagggaccggcgcggaagaaacagcgccccccaccgaagaca

SEQ ID NO: 223751 - RNA, 82 nt, Homo sapiens
gcagcgcagccgccagcgcaagcggcccccggcgaagaagccccaagacagccagcggaggagggcaaacccggcacggagc

SEQ ID NO: 223752 - RNA, 52 nt, Homo sapiens
gcagacaacgaagcccacggccgggagggccgcacaaaccagggcaggggag

SEQ ID NO: 223753 - RNA, 66 nt, Homo sapiens
aaagagcgaccgagaaaaaccgaaagagccagaagaaagacaaacccaagagcagcaagcaggagc

SEQ ID NO: 223754 - RNA, 84 nt, Homo sapiens
gacccagccccagccccaagggcagagccagaggagcagccaagaagccccccaggggcccgcagaccaacaacaagccacagc

SEQ ID NO: 223755 - RNA, 68 nt, Homo sapiens
cgaccaccacccggggcccccccagccgcaccaccaagccacacacaaacgaggaccagaacaggggg

SEQ ID NO: 223756 - RNA, 62 nt, Homo sapiens
aacgccagaaacagggacaacacccccagcaccagggacgggagccaacaaccccacaacca

SEQ ID NO: 223757 - RNA, 73 nt, Homo sapiens
gaggacccccggaggcccaggagcaaagagaaagggagcgggaaacaagcaccaagacggaacccgcaaacag

SEQ ID NO: 223758 - RNA, 74 nt, Homo sapiens
caggagagaagcgcagcaagcccggcccgcagggcgaagagccaagaagccagaacacagcagaaaggggggac

SEQ ID NO: 223759 - RNA, 81 nt, Homo sapiens
ggagaggggccggcgcccggcggggacgcagggccaaggcagcgcagagaggccacggaagcacagccaaggaagaccccc

SEQ ID NO: 223760 - RNA, 75 nt, Homo sapiens
cgggagacccgcaccacacccaccagccggaggcagccgagcagagcgggagaggggagccggcggcagagcgcg

SEQ ID NO: 223761 - RNA, 76 nt, Homo sapiens
aacggcccccccccagcccgccccaaaagaagaagaacggcaacccccacagaggcacacccaggaggacaaggcg

SEQ ID NO: 223762 - RNA, 80 nt, Homo sapiens
aggagggcggcgcgccgagcgggcccagaggcggggaccgagcggaggcgggacgcccgggggccccgggcccggaaggc

SEQ ID NO: 223763 - RNA, 84 nt, Homo sapiens
gcaaggcaaaggacagcacgaaggcagggccaacgcccaagcggaacacaagacccagaggagagggaaaggcgaccagacggc

SEQ ID NO: 223764 - RNA, 35 nt, Homo sapiens
cccagcagaacaggccaaggaccgagcagagaacc

SEQ ID NO: 223765 - RNA, 118 nt, Homo sapiens
agccggggcgaagcccaggaagccacagccacccaggccgcacacccggaaaaaaggcgcagaaaggggaaagcgagaaaccaaagagaacgagaacaaagcgcagcaaccaccaaca

SEQ ID NO: 223766 - RNA, 55 nt, Homo sapiens
gcaacaggggcgagaaaggggggacggaagcggcagcgggcagccggcccagcac

SEQ ID NO: 223767 - RNA, 74 nt, Homo sapiens
agagcggggaagggggaaaggcaccaggacaagcaaagaaaccgaagcgaaagacggcaccccgggggcacggg

SEQ ID NO: 223768 - RNA, 74 nt, Homo sapiens
cggaacaaagaaaaccaaaacgcaacagaaacaacaggcgaaggaagaacagcccgccaagccgaggcgccaga

SEQ ID NO: 223769 - RNA, 87 nt, Homo sapiens
cccaggaagccggcggccggagcgcccacggggcccccgccccggggccccggccggccaagcagcagaaaacacagagaaaacacg

SEQ ID NO: 223770 - RNA, 85 nt, Homo sapiens
gccaagcggcgcagcggcggcaaagggccagcgcccggccccagggccggggcagagaagagccgggagcggcgacaggaacacg

SEQ ID NO: 223771 - RNA, 64 nt, Homo sapiens
agacggccggggcggcgaagcggaggccggaggacggcaagccgcaccaccgacacgaacccaa

SEQ ID NO: 223772 - RNA, 81 nt, Homo sapiens
gaaagagcagaaaggagggggcgagaaggcgggaagccgaaggcagccacagaacgaaaacaaacggaagagagggcagca

SEQ ID NO: 223773 - RNA, 74 nt, Homo sapiens
agaaagaagcagagggccagaagcggaaccacaaaaccaaacaggccagaagcgaccggaggggcagcggacgc

SEQ ID NO: 223774 - RNA, 79 nt, Homo sapiens
cgcacggaccccaccagaaagagagccccagcacagcacaacagcaagcagccccaacagcgcgggccgcgcagcacgc

SEQ ID NO: 223775 - RNA, 78 nt, Homo sapiens
acccgaccagcacggcgaccgaggcagccccccaaagcccggccccacaggaaaggaagccgggggaccaacaacaaa

SEQ ID NO: 223776 - RNA, 59 nt, Homo sapiens
cccggcccccgcgcgcacgccccgacgcaagacgcccggcccggacggcgaagacaaac

SEQ ID NO: 223777 - RNA, 71 nt, Homo sapiens
gacagaagccaaagggcagcggcaaagcgggccagacacgaagaggccggcgaaggaagaaggaccagcca

SEQ ID NO: 223778 - RNA, 79 nt, Homo sapiens
ccgcgcacaacaccacccccgcccgggccgggggccgccgggacccggccaccagcaagccgccagaacgcaaagcaga

SEQ ID NO: 223779 - RNA, 77 nt, Homo sapiens
gccgggcgaggcgaggccacccgggccgccggcggccacgggcaaacaggacgcggggaagcaggaaggcgaggggg

SEQ ID NO: 223780 - RNA, 79 nt, Homo sapiens
ccccggcagaagggaccaagacacaagaggacaagccgaccgccccaacaagggagaaccccagccccaggaaccaccc

SEQ ID NO: 223781 - RNA, 56 nt, Homo sapiens
ccaacgcccggaacagcaggggagacaaggaacgcccaagccacaaaccgacccaa

SEQ ID NO: 223782 - RNA, 56 nt, Homo sapiens
cccccggaagacgcgacgaggagagaccggaaagggagggaaacggaacagaacag

SEQ ID NO: 223783 - RNA, 77 nt, Homo sapiens
ggcggcgcgaagccacaagaaagggggcccacgagaagagcaggcgacgggggagagggagacagcggcgcaaagaa

SEQ ID NO: 223784 - RNA, 41 nt, Homo sapiens
cggagcagaacacaggacaagaggagacccgccccggccaa

SEQ ID NO: 223785 - RNA, 58 nt, Homo sapiens
gacggaaacgccaccagcaggaggaagagagaaggacggagaagcgaaagccagaccg

SEQ ID NO: 223786 - RNA, 78 nt, Homo sapiens
cgcggcccgagaagcaaacaaccagcccgagcccccaaaccacaggcgaacagaagacaagacgaaaacgcaacgcga

SEQ ID NO: 223787 - RNA, 76 nt, Homo sapiens
agccccagccacccacaaacagagagaaggaaccacccacgcaggcagaaaaggccaagagccagggaaaaagaac

SEQ ID NO: 223788 - RNA, 59 nt, Homo sapiens
gcccccgagggcgggaacagaggacacgagcccagccaggcgagccagcgccaaagaaa

SEQ ID NO: 223789 - RNA, 84 nt, Homo sapiens
ccgcgcgccaccggcccccgcggggcaggggcgcgcgagccgccgggcgcccagaccggagaaccccgccaaccagaggcaagc

SEQ ID NO: 223790 - RNA, 68 nt, Homo sapiens
cagacacagacaccaaggacgaaccccaccggccagcaaccacgacaggagacacaacacgcgaaacc

SEQ ID NO: 223791 - RNA, 72 nt, Homo sapiens
aaacccggggcagacagagaagaacagacgccgcacccccgcgacacagggaaacgccgccacgaaggaccg

SEQ ID NO: 223792 - RNA, 78 nt, Homo sapiens
cggcagcccagagagacggaaacaggaacaccaaggaagcaaaagccccagaacgcggacgaaagaaagaaggagcac

SEQ ID NO: 223793 - RNA, 43 nt, Homo sapiens
gacccggccaccagcaagccgacagaccccaacaccaacaaga

SEQ ID NO: 223794 - RNA, 84 nt, Homo sapiens
agcaagaacagagagagaggggacagacgagagaacgagagccaaccggaagcaagaagcagagggaaagaaaaggcaaaaagg

SEQ ID NO: 223795 - RNA, 78 nt, Homo sapiens
cgggccgagagccgccccgaacgggggcccccccgccggacagggcgggaaaccaacccgcaaggcagaaccagcaag

SEQ ID NO: 223796 - RNA, 79 nt, Homo sapiens
gccggggggggaccaaacgagaggcgggcaggaggacccaaacgaagcgagggcagaaagggcccagccggcagaggga

SEQ ID NO: 223797 - RNA, 77 nt, Homo sapiens
caccagcgggccagggaaaaagaagaccacaagaagaaaccaagaacagcacagaagaggacacaaagaagaaggag

SEQ ID NO: 223798 - RNA, 78 nt, Homo sapiens
agcccaagaagaggcgggggacccaagacaggagcaggacagagcgggagccaccagcgccaaagggaagccaggagc

SEQ ID NO: 223799 - RNA, 72 nt, Homo sapiens
gccaaagccccgggggcaggcaaaccgacaccagcgacacaagcgcgagggaaccacagaggacaggcgagg

SEQ ID NO: 223800 - RNA, 73 nt, Homo sapiens
aaggaagagagcgcccaggaaggagccaaagcacaagaagaagacgaggcgaaagacaccagcacccgaggcc

SEQ ID NO: 223801 - RNA, 82 nt, Homo sapiens
cagccgggagccggagcgggcgcggacgccgaggcaccgaggcaccagaggaggacagcccagagcaagcacacggaggccc

SEQ ID NO: 223802 - RNA, 70 nt, Homo sapiens
accagccagggagacgacccgcgggaacccacggagggacccacccaaaaggaagacagcacaaaggcgg

SEQ ID NO: 223803 - RNA, 78 nt, Homo sapiens
acaaaaagcagaagaaacaccgagacggcgaggagcaccccagacagggaaggaaccaggccagacccacagcaagcc

SEQ ID NO: 223804 - RNA, 79 nt, Homo sapiens
aggggccaggcgaagcacgagcagaccggcccgaccgcccacagacccaaacaaaggaaacacgagccccaccaaagca

SEQ ID NO: 223805 - RNA, 74 nt, Homo sapiens
gaggagaggagccgcgcacgagcgccaaccccgaaagggccccagcagacagaagcccacacaggaccccaccc

SEQ ID NO: 223806 - RNA, 80 nt, Homo sapiens
caagagcgagcacaccagggaccaagccgagacaccagacccgagccaagaagaccaagagcaaagcaggaaagggggag

SEQ ID NO: 223807 - RNA, 73 nt, Homo sapiens
ccacccagaacagcagcgacaggacagaaacagaagcggggaacaagaagggagcgaagaacagagccgccca

SEQ ID NO: 223808 - RNA, 64 nt, Homo sapiens
cgaacggagccgagcccgagccggagcaaacggggacagcgccgaccggaacagggaccacgga

SEQ ID NO: 223809 - RNA, 65 nt, Homo sapiens
accacggcacaaacccgggggccccgcaggggggaggggaacagcagcggagaacacggcagaga

SEQ ID NO: 223810 - RNA, 63 nt, Homo sapiens
caccaaacggcagaggaaacagaaccgaagccggaccggggcccagcaaagccaaaggaagga

SEQ ID NO: 223811 - RNA, 55 nt, Homo sapiens
cagacgcagggcgcccccggaagagagaagggcacagaccaagacaacgaacccc

SEQ ID NO: 223812 - RNA, 85 nt, Homo sapiens
acaggcgccgcgccgccgcacgggaccgccgagccacaccggcccgggcgcgccaggcacagccaagagcggaccggcagcggcc

SEQ ID NO: 223813 - RNA, 84 nt, Homo sapiens
gccgaggcccggagggagagaagacgagaacaaaacccacaaggcgcggcccggaggggaaaggagggggcaggagcgaaggag

SEQ ID NO: 223814 - RNA, 52 nt, Homo sapiens
aaacaaagcagcgacgagaggaagcaagcaggcacagaacgaaccaaaaagg

SEQ ID NO: 223815 - RNA, 85 nt, Homo sapiens
cgggcagccaagaagagagaccgggggaggcgacgcaaggcgacgggcggcacagcaagcagaagcacggcagccagggaaggcc

SEQ ID NO: 223816 - RNA, 70 nt, Homo sapiens
ccaacacaagcggcccagcacccaccagcgggagaccgccagaagacaacacggagaggcaccccgaccc

SEQ ID NO: 223817 - RNA, 81 nt, Homo sapiens
gccacgggggcagcgccgaaccaggaccggacccggacccaaaggccagcaaggaaccgagagacacaggggcacaagacg

SEQ ID NO: 223818 - RNA, 71 nt, Homo sapiens
ggagagcacaaagaagccaggggagagcgcaccagaagaccacacgaaggggaaccccagcggcgaccgga

SEQ ID NO: 223819 - RNA, 69 nt, Homo sapiens
gaaagaggagaggcacccgaaagccaggccagaaaacaggggaaaacgacccccaggaaaaagaaaagg

SEQ ID NO: 223820 - RNA, 70 nt, Homo sapiens
aaaggccgcagagcgagacaacgcaccgacagggcgcagaagagcaagaccgaagacaacaaaagaaaac

SEQ ID NO: 223821 - RNA, 70 nt, Homo sapiens
ggaacgcaggacccaaagcgcaagaaaaggagaagaaagaagaaaaaaaagagcaaaacaccggaaaacc

SEQ ID NO: 223822 - RNA, 84 nt, Homo sapiens
aaggacggcagagcgcaggacgccacagcaagaggaccccaccggaagcggggagcgagagccgcagccaagcgggcggcggac

SEQ ID NO: 223823 - RNA, 63 nt, Homo sapiens
ccaacaacccaagggagcgcacgacccacgcggaacgggggcagcggcaagcaggggagccag

SEQ ID NO: 223824 - RNA, 77 nt, Homo sapiens
ggaggaaggcagcaagaagggacgaccaccacagccacaggcccacccagaaaacacgaaggagaagcggaaggaaa

SEQ ID NO: 223825 - RNA, 77 nt, Homo sapiens
agcagagccagcccccggggacagcaaccagcagcgcaggccggaacaacccaacaaccacaaagccgcccacaccg

SEQ ID NO: 223826 - RNA, 77 nt, Homo sapiens
ccggcaccagccgcccaggcgcagagcgggcccgcggaccagccagggcacggccgggacggaaggacgacagacgc

SEQ ID NO: 223827 - RNA, 67 nt, Homo sapiens
agggccaaagaagggagaaacccgaccggcagaaaaggaaaagaggacggacagccagaagacgcca

SEQ ID NO: 223828 - RNA, 52 nt, Homo sapiens
aaggcaagagccaacccaaaaccaacaccaggacaaaagaagggcagcacaa

SEQ ID NO: 223829 - RNA, 85 nt, Homo sapiens
gcaccagaggcccgagcagccagcacggaggagggcaagcaggcggaccgcccccggcgaccccacaacagggcagcgcagacgc

SEQ ID NO: 223830 - RNA, 76 nt, Homo sapiens
aaaaccagaagcggagcgggggcccgagaagccgacggagagaagaagaaggaggccgcggccagaaacccaagaa

SEQ ID NO: 223831 - RNA, 108 nt, Homo sapiens
gcgccaccagccggcagcccggagcgcccgcgccagccgcgcacaacggggcaccgagccgccaacgaggaacggacaaaccaggagcacagcagagaaacaaacaag

SEQ ID NO: 223832 - RNA, 75 nt, Homo sapiens
aaacagaggagggaggcacaaaaagagagggccacgagagagaaagacacagcaaaagaggcggcaaggcagccc

SEQ ID NO: 223833 - RNA, 76 nt, Homo sapiens
caagcgccacacggcgacagcgggggcagagggaggaggcggagagacaggaggaccaccaaccagggacaagcgg

SEQ ID NO: 223834 - RNA, 66 nt, Homo sapiens
cgacgcaccgcaggcagacaaaagggccaaagaagggagagagcgggagaacccccaacaccggga

SEQ ID NO: 223835 - RNA, 76 nt, Homo sapiens
gggcaacccggagcaaccccccaggacgggcggaggcggggggaccggcgggcgggggaagaggacaggcccacgg

SEQ ID NO: 223836 - RNA, 81 nt, Homo sapiens
cccagagcgggaggccagcgccgcacaccaggcaaaacgggagacgcaccacaggggaacaagcacaagcccggcggagcc

SEQ ID NO: 223837 - RNA, 102 nt, Homo sapiens
acccggcaagaagaacacagggggaagccaagcagaacaaagacaagagcacccaaaggcagcagcccaaggagcagccaggccccagacgcgcacggagca

SEQ ID NO: 223838 - RNA, 77 nt, Homo sapiens
cgggcgcagcgagccggagagcgggccaccacgggacccaccgcccggcgccccagccgccccgaggagggaaaaaa

SEQ ID NO: 223839 - RNA, 72 nt, Homo sapiens
acacaacaaggcaccaggagacagagccaaaaaggaccccggacccagcgaccaacgccccgcagggcggcc

SEQ ID NO: 223840 - RNA, 64 nt, Homo sapiens
gcggccacccgacagcaagcaccggagggagaagacaggggacaagaaggccccgacgccgcgc

SEQ ID NO: 223841 - RNA, 78 nt, Homo sapiens
cggccgcgacagcgaacagcgcggccgcagaaacacgaagacaccgacgcccgcggggggccgccccacaaggcagcg

SEQ ID NO: 223842 - RNA, 65 nt, Homo sapiens
acggaaggcggccgagaggcgcggggagaggaacaacggacagcgcccagaaagagcgccggaag

SEQ ID NO: 223843 - RNA, 72 nt, Homo sapiens
aaaagacaggcaacaggaaagcaagggaaggcgccccaacaaagggagcagacaagggcccacaccaaagcc

SEQ ID NO: 223844 - RNA, 69 nt, Homo sapiens
gcagccccccccaggaccccaggcaggcggagacacgaaaacagggcacgggccacagagacgagaccc

SEQ ID NO: 223845 - RNA, 74 nt, Homo sapiens
agcagacgcccaagcaaaagagacaaggaggccaaggaccgcacaaccaggaacaaagaccaggaacggagccg

SEQ ID NO: 223846 - RNA, 79 nt, Homo sapiens
aggccagacggagccaaacagccacagaaggaagcgagaagacaaagcgaagagagaagcagagggacaagggcaccaa

SEQ ID NO: 223847 - RNA, 71 nt, Homo sapiens
gacagaccaacacagacaacgcaccaagacccgggagacccccgcgcaggcccgagggagggacgagaaaa

SEQ ID NO: 223848 - RNA, 67 nt, Homo sapiens
ggacgcacgaacgcggacccaaggacaggggcgggaacgcgaagagacccccaggccaaagcaccca

SEQ ID NO: 223849 - RNA, 82 nt, Homo sapiens
gcagaagcggcggacaaccaggagacgacagagaggacgccgccagagacgaaaggcagaaggagacaaggaggaagaggag

SEQ ID NO: 223850 - RNA, 93 nt, Homo sapiens
ccggaacggcgaagaggcaccaaaaagaaccgcagacagggacacggcagggggaaggacagacggcaagggggaaaggggaaaccagaaggg

SEQ ID NO: 223851 - RNA, 84 nt, Homo sapiens
gcgaccgaggcccgagccccaggaggggggaagacagggcccagcaccacaggacgggccgggaagccgccagcagggacagcc

SEQ ID NO: 223852 - RNA, 91 nt, Homo sapiens
cgcagcacccagccggccacgaccagcacgggacggacgagacgacggagaggggaagaggagcagaaggggcccccggagggccagagac

SEQ ID NO: 223853 - RNA, 85 nt, Homo sapiens
cggccgggcaacgaccggcggggggcgcggcgccgggacgcaccgcaccgagggcgagcccagcggagcccccgggccggaggcg

SEQ ID NO: 223854 - RNA, 81 nt, Homo sapiens
cccaaaccgggaaaacaagcaagggaccaagaaaggcccagggaccaaagcccggacaaggcccgagcaccaggaccgcag

SEQ ID NO: 223855 - RNA, 76 nt, Homo sapiens
gcgccgccgccgaggagaaaggggacaggaccggcccaacagggcagccgggccccccgcgccgcgggggccaagc

SEQ ID NO: 223856 - RNA, 76 nt, Homo sapiens
gcgggcgccgccggagacaccaggagggcgaccggggagggggcgcggcgagaaagaacgcagcgcagcggacgca

SEQ ID NO: 223857 - RNA, 41 nt, Homo sapiens
accaggaccaccccagaagaaccgccaagacccagcccccc

SEQ ID NO: 223858 - RNA, 78 nt, Homo sapiens
gacaagcgaggaaggagccccagaagcaaggcagaagaagaagagcggagaaccgaacaggcgcagggagcccccacc

SEQ ID NO: 223859 - RNA, 82 nt, Homo sapiens
accaccagccccccaggggggaaggagggccccgggacggagaggagccgggcccccaagagcacacaaccccgggccgccc

SEQ ID NO: 223860 - RNA, 69 nt, Homo sapiens
agggggaggcaaacaaaagacggcaaggacagccgaggggaggcaagcaggggggcaaaggaaagaagg

SEQ ID NO: 223861 - RNA, 68 nt, Homo sapiens
agaggcgcggggagaggaacaacggacacgcaagccccggggcagagacacaggacacccacccgccg

SEQ ID NO: 223862 - RNA, 79 nt, Homo sapiens
aagaggagcgcaagcgccggggagacagagcacccgacccaggcggaggacaagaggaccgggcaccacaaccccgccc

SEQ ID NO: 223863 - RNA, 75 nt, Homo sapiens
ggagagggaccggaggccccgggcccacgccaggaaaagaacgccaccccagagagggcaccccaggagaacagc

SEQ ID NO: 223864 - RNA, 58 nt, Homo sapiens
ccacaagggccgcaagccccgggaacacaagaaacgaagggaaaacacagaacaaaag

SEQ ID NO: 223865 - RNA, 74 nt, Homo sapiens
gaaaaacggaaacccaaagcccgaaggcgccaccagaaacgaaagacaagaaccaccacgaacggggcccgcga

SEQ ID NO: 223866 - RNA, 87 nt, Homo sapiens
cgggacgcgcgcgggcacccacggagccccggggcggaggcaacgcacgggccacaggcagccgcagaacaggccggggacggaggg

SEQ ID NO: 223867 - RNA, 83 nt, Homo sapiens
ggaggagaccgcagggaggggagaggaagcagaagggccgaaggccccccagccccagcgcgcgcgccaggaggcagacgcca

SEQ ID NO: 223868 - RNA, 66 nt, Homo sapiens
ccagcgaccagcaccgccgcccaccacccgacccagagcccccgcccggcagagacccagagaacc

SEQ ID NO: 223869 - RNA, 70 nt, Homo sapiens
caaaggaaaacaccacaagaggacaaccggaaaggagcgccgcagggccaacaaaaagggcaggggaccc

SEQ ID NO: 223870 - RNA, 76 nt, Homo sapiens
acccgcagaggccccgcaacggggacagggaccacaacagacaaagaacagaaaaagaaagccagagaacagaaag

SEQ ID NO: 223871 - RNA, 76 nt, Homo sapiens
ggccggcccgccgggcgccgcagaccccaccacgcgagagcgggaggaagcggccaccggaaagaccaggcaaaag

SEQ ID NO: 223872 - RNA, 67 nt, Homo sapiens
acacgggccaaaacgagagggacgacggcccggcggaagaccccaaaggacgacacccgcgggccag

SEQ ID NO: 223873 - RNA, 73 nt, Homo sapiens
cgggcagaggcagaaacaaccgcggaaaacacgaaaggaaacccaagaagaaacagacaaggaccagaagcgg

SEQ ID NO: 223874 - RNA, 60 nt, Homo sapiens
ggcagccccgagccaggcccgccgccgagcgagaccgagaaggacaccgcgcgaccgagc

SEQ ID NO: 223875 - RNA, 76 nt, Homo sapiens
cgacaacagagaaacgaggacaacgcaacgggcgagagagcacagcagggcacaaccgaacaaagacagccagagg

SEQ ID NO: 223876 - RNA, 78 nt, Homo sapiens
agcggccgcaggagggaccaacggaggccccccaacaacccgggcgcggggagcgggccggagagaagagaggggcgc

SEQ ID NO: 223877 - RNA, 100 nt, Homo sapiens
gaaccgcgagcacccgagaggaccggcgagggcacaggaggcggagcaagcggggagaaaccgagccccggggcccgcgcaaaaccaaccggaagggaaa

SEQ ID NO: 223878 - RNA, 74 nt, Homo sapiens
agccacaaggagaaaccaccgagagagcaaagcaacgaaaccaggcaccaggccccaagacgcagagaagccac

SEQ ID NO: 223879 - RNA, 82 nt, Homo sapiens
aacgaagagaccaccgcccgagcagcacgccagcacgcaggcaggaggaagcgggcaaaggagacccagcaaaggagagaca

SEQ ID NO: 223880 - RNA, 54 nt, Homo sapiens
acagagacgaagaggaccaggagcaaacagaagaagaccgcaggaaagcaggaa

SEQ ID NO: 223881 - RNA, 80 nt, Homo sapiens
aggagcgaggcagcgacaggacgggaacggcaccgcaggcagcagaagaccggaggaccggggcgagggaccgagaagac

SEQ ID NO: 223882 - RNA, 81 nt, Homo sapiens
ggcgacaggaacagggcaaacgcagggcccagcaagcacacacagaccagccaccacaacagcggcacagaagacccggcg

SEQ ID NO: 223883 - RNA, 66 nt, Homo sapiens
cagccgggccaaggaaagaagagagcggcggcaccaggcaagcgggagcggggaggccgaagcggg

SEQ ID NO: 223884 - RNA, 55 nt, Homo sapiens
gcggccccagcccgaaagcaaccgggcgcaggccacaggcggaggcaaggcggac

SEQ ID NO: 223885 - RNA, 57 nt, Homo sapiens
gcaccccacccaaaagacagccagacacaacaacagggggcgagaggaaccaggaac

SEQ ID NO: 223886 - RNA, 79 nt, Homo sapiens
ccccgcacacgggccgcggcacccagcaggccaacccgggcccaacagcaacaggccaagagccaagacacccgaaccc

SEQ ID NO: 223887 - RNA, 71 nt, Homo sapiens
gccccaggccccagcgcgagagacacaggaacgacacccgcagccgcacagccgggccggacccggagcag

SEQ ID NO: 223888 - RNA, 70 nt, Homo sapiens
ggacagaggacgacgaagagacaaaggcaccggaaagccaggaaaaacacacggaggggcaagacgcaac

SEQ ID NO: 223889 - RNA, 76 nt, Homo sapiens
cgcaagaaacgggggaagcagagcgcacaaagggaaagggccgaaggcgcagcaaaaccaacaacgccggcgggcg

SEQ ID NO: 223890 - RNA, 76 nt, Homo sapiens
ggcagacagacgggcccccgccaaacccaccagggagacgcgcacggaccggaaccagaacaagacgaaagacaac

SEQ ID NO: 223891 - RNA, 67 nt, Homo sapiens
acacccgaggccccggggggccgcaaggcgcggccccggagagggcagaaaccaaacgcccaaaagc

SEQ ID NO: 223892 - RNA, 66 nt, Homo sapiens
gagcccaggagcgccacgcgcggaaggcagcgcccagcagcgcagacagaggcacaaaaggagaaa

SEQ ID NO: 223893 - RNA, 70 nt, Homo sapiens
gccagacagcgagcccggaggcggaagcaaggcgcaaccagccacgcaaacccgcccccgagaaaggacc

SEQ ID NO: 223894 - RNA, 55 nt, Homo sapiens
cagcacccagaggcgccagccaaaggagccgaacccaaaaagagcagcaccgcga

SEQ ID NO: 223895 - RNA, 80 nt, Homo sapiens
gcaccaggccgaaaacgaagcagaggaacaacaaggcaaacaggcgggcaacgcggcgcggaagaagacagagaggaggc

SEQ ID NO: 223896 - RNA, 77 nt, Homo sapiens
ccgcccgccccgccgcccgagccggcgccaagagcgccagcgcacgccccacggaacaccccgcgccgccaacccgc

SEQ ID NO: 223897 - RNA, 82 nt, Homo sapiens
cggcccaggaggagggcccgggacaccgaaagaccccgccgggcacccagggcccgaggccgcccacgccgccccgaaccac

SEQ ID NO: 223898 - RNA, 35 nt, Homo sapiens
agacagagagacggcagcaggcaaccagccaggac

SEQ ID NO: 223899 - RNA, 76 nt, Homo sapiens
gcggccggcgagaggaccaacggagcgcgaggcgggcgcggagaagcgcggagcgggaagcacaggagagcaggca

SEQ ID NO: 223900 - RNA, 76 nt, Homo sapiens
agaagcaggaggcaagaaaggggaaccccggagaaaaggccaagaaggcaggaaagagggggcagacccggaagcc

SEQ ID NO: 223901 - RNA, 82 nt, Homo sapiens
acaacaacaagcaccagagaccgggggcggcagagcaaagacaccaggaaacggaggggagcgacaacgaaccgaaccacaa

SEQ ID NO: 223902 - RNA, 54 nt, Homo sapiens
ggaagagagggaacacgcaggagggagcgagcccagccccgcggaaccaaggcc

SEQ ID NO: 223903 - RNA, 74 nt, Homo sapiens
caggacgggccaagagagcccgggcccggaaaggccaagaacccaaagcaaggcgagacaaggggccaaccagc

SEQ ID NO: 223904 - RNA, 71 nt, Homo sapiens
ggaacccgggcgaagcgaccccaaccggccccaaagcgggaaagacagaaggaaggaaagacaggaaagaa

SEQ ID NO: 223905 - RNA, 72 nt, Homo sapiens
gcccgaaaagaggagcggacaaacgaaaccggcagcagccggaggggaaggggaaaacacgacccccaccaa

SEQ ID NO: 223906 - RNA, 53 nt, Homo sapiens
aacgccgcccaagagagcaagaccgggcccacgagacacagcgagacagcccg

SEQ ID NO: 223907 - RNA, 70 nt, Homo sapiens
gaaggaccaagaaccagcccgggaagcaggcgcaaaaacaggaaaacgacacgacggccgagaaagcgga

SEQ ID NO: 223908 - RNA, 59 nt, Homo sapiens
cgcggccggaggagcccccaggccgcacgcagcacgggggcaggggccgacccagaacg

SEQ ID NO: 223909 - RNA, 73 nt, Homo sapiens
cccggcgccccggcccccgccccagcccgccggcggcggcgggcggcggaccacgcaacagcagcagcacaca

SEQ ID NO: 223910 - RNA, 78 nt, Homo sapiens
gccccgaagaccaagccagccacaccgagcccggcaccgggccggaccaacgcccaaccaagagccaagggcacaaac

SEQ ID NO: 223911 - RNA, 118 nt, Homo sapiens
ccgccacccggcgcgaccgcccggcaccgggagaaccaccgccaccgccaccaggccggcgcggaagaggccggcggcgggacggccccacgggacccgccccgaccacagcagcgac

SEQ ID NO: 223912 - RNA, 78 nt, Homo sapiens
aggaacggcccagcacaagaccgcgacaggccaaaagcacagcaagggcaaagcccggaagagggaaggggaaacgcg

SEQ ID NO: 223913 - RNA, 83 nt, Homo sapiens
agaggccacgaggcgcacaccgccagcccaagaaaaaggggagccgccaccaaaagcagacggaaaacccacggggaagacca

SEQ ID NO: 223914 - RNA, 77 nt, Homo sapiens
ccacccagcccccaagaggagacacgggaagccgaggagaaaagaaaaggacaaggggaaagcgggaaagaagcccc

SEQ ID NO: 223915 - RNA, 58 nt, Homo sapiens
gaccccaaaggcacccgcgagcgcaacccaaggaaaggacagcaaccaagacggggaa

SEQ ID NO: 223916 - RNA, 71 nt, Homo sapiens
gacgaagcggaccgagaaggaacccaaccgaagaagaacagacccagacaaacacagcagcgacgggaaga

SEQ ID NO: 223917 - RNA, 73 nt, Homo sapiens
cggggggaacaagaccgccgggacggaagacgggagcgggcccggagaacaccgggcgaaacagaccccgaaa

SEQ ID NO: 223918 - RNA, 66 nt, Homo sapiens
agagagcgcaaaagcggaggaagggaggacccaaccccacgaacacaagcgggggcagggacgcag

SEQ ID NO: 223919 - RNA, 65 nt, Homo sapiens
ggcggagggcacaccagaggggccaccggagagaagacagggacgcaagggcagccgcgcgaacg

SEQ ID NO: 223920 - RNA, 43 nt, Homo sapiens
gggaccgccccgcggcccagacaaggaggagcagcaccagcag

SEQ ID NO: 223921 - RNA, 48 nt, Homo sapiens
cacaacccgacccgacgagcgaccggcccgaggaccgccgcacgacca

SEQ ID NO: 223922 - RNA, 73 nt, Homo sapiens
gggcaagcgggagggcgggcgcaggcggagaaggccccggccccagagggcaccaaacccgggggggcccggg

SEQ ID NO: 223923 - RNA, 72 nt, Homo sapiens
gacagaccccaggagacagccagaccaccagagcgccacgaaggccgagcggcgagacaaaccgaacaggag

SEQ ID NO: 223924 - RNA, 54 nt, Homo sapiens
gaaagaaccaagagcaaaggaaagcaagcaggggaggcaagcaggggggcaaag

SEQ ID NO: 223925 - RNA, 100 nt, Homo sapiens
ggcccaccccagcgaccggaagcgagcagcagcgccgccagaaggaaacaggaacacgaaagaggaaaaacgcacaagaaaccgaagccaaggaggagag

SEQ ID NO: 223926 - RNA, 80 nt, Homo sapiens
ggggaggcgcccccgggggcccgacgcacacgggggcggacaccacaagaagggcgccaggggaacaaccaaagaacaaa

SEQ ID NO: 223927 - RNA, 74 nt, Homo sapiens
gaagcgagcaaggcccccacccccccgagggcggggccggggggggcacagagccccggaagacagcccccagc

SEQ ID NO: 223928 - RNA, 88 nt, Homo sapiens
gccagccgccgccgccgccaccgcgcccgagcccgagccgaggaaacccagacccaagaccaaccgaggaggaggaggagggagacgc

SEQ ID NO: 223929 - RNA, 75 nt, Homo sapiens
cgaccccgaaagaaagcaggaacacgaacaccaagccccgaagcacacagaaagacggcggggaaaaacgcagga

SEQ ID NO: 223930 - RNA, 91 nt, Homo sapiens
ccacaagaaaacaaaagaaacgcccacagaacaccgaggcaaaccgacaccagcgacacaagcgcgagggaaccacagaggacaggcgagg

SEQ ID NO: 223931 - RNA, 71 nt, Homo sapiens
ccagcccaacggggggagaacccaaagaggcgcagccgagccaaagaaaaagccggccagggcggaaaaag

SEQ ID NO: 223932 - RNA, 37 nt, Homo sapiens
aacacagacagcggaagagggcacgaaacaccccgcc

SEQ ID NO: 223933 - RNA, 77 nt, Homo sapiens
ccacggaaaaggaacagagccaaaccagaagaggagggcccagaagaaaaagacgagaagaggcgaacggaagcaac

SEQ ID NO: 223934 - RNA, 83 nt, Homo sapiens
gagcaagaccacagcgcgcggcccccacaccacacagagagcgaaccaaaaggaaagcccggccgagagacagagagaccacc

SEQ ID NO: 223935 - RNA, 79 nt, Homo sapiens
aaaggaaaaaggaaggaaccaggagaaacggaggcacccgaaagccaccacaaagaacaaaaggaagggggcaaaggcg

SEQ ID NO: 223936 - RNA, 54 nt, Homo sapiens
ggggccggagggcagggggcagggcggcagagcacagccagaagaaccacaggc

SEQ ID NO: 223937 - RNA, 80 nt, Homo sapiens
ggacacccgaagcgggaaaggcgccgaccccgacagaacgggccccgcacccgcggccccggggcagcggaggccgggac

SEQ ID NO: 223938 - RNA, 78 nt, Homo sapiens
caggggggagcaaccgcaaacggaaaggcagcccacgacaccacacaagcaggagaggaaaagcaaagcacacaacag

SEQ ID NO: 223939 - RNA, 38 nt, Homo sapiens
ggggacacgggccgcgcgaaaaagcaagaaccagcggc

SEQ ID NO: 223940 - RNA, 77 nt, Homo sapiens
cgacgaagcaacaggccaaaagaaagggcagaaccagaggcgcaacggaggcgggagggaaaggcaggagagcgaaa

SEQ ID NO: 223941 - RNA, 79 nt, Homo sapiens
acagccacccggagccaggaaagggcgcccgcggacaggggacaccgaggaacagaagagaaccagacagcccacaggg

SEQ ID NO: 223942 - RNA, 73 nt, Homo sapiens
aaagggaacgaaaacagccgagacaggaaagacacaaccacgcaaggaagagccaggagcagaggagaagacg

SEQ ID NO: 223943 - RNA, 83 nt, Homo sapiens
aaagacggcaccgcagcgggaagcgaaggacaagccacgaggaggagaaggagaagcggcgcccgaccagcggaacgaagaag

SEQ ID NO: 223944 - RNA, 75 nt, Homo sapiens
aaaacaagagccccaaagcagccaaaaggaacacgagaaccacgaagcacgaaagaaaaaggaagccagagcggc

SEQ ID NO: 223945 - RNA, 81 nt, Homo sapiens
acagccgaggggagcgcggggcccggcagaaagaagcgacgggcgcccagcggccggggaggagcaggcggccccgcaggg

SEQ ID NO: 223946 - RNA, 65 nt, Homo sapiens
acacagaagggagccagcacaccggcaagcggacgacagcagacgacccgaagggcccggggcaa

SEQ ID NO: 223947 - RNA, 57 nt, Homo sapiens
cagccccggcccagccacgacagaaaaccagacgagagacagaagacgaaagggcaa

SEQ ID NO: 223948 - RNA, 79 nt, Homo sapiens
ccggagcaggcagagcagccgagccaggacccaccgcgaggcgggggaagcccgcaaaccccccgaaccgaggacaccc

SEQ ID NO: 223949 - RNA, 84 nt, Homo sapiens
gcccggggcccagcagcaaccagccacccgcccccaagaaggaagcacagggccggccggaacaggcgaccccgcacacacacc

SEQ ID NO: 223950 - RNA, 92 nt, Homo sapiens
cccgcgcccggccggacccgggcccgagaccccaagaagaagcggaagaggagccgcggaaccaagacacaaggaacagaagacaggaccag

SEQ ID NO: 223951 - RNA, 51 nt, Homo sapiens
cagcgcccccaaacggcgaccaagcaaaaggggggcgcggcccagccgcgc

SEQ ID NO: 223952 - RNA, 102 nt, Homo sapiens
ggcggcacgacgggcaaagaggccacagaggcagccaaggaaccgcggcagaaaaggaggcaagcaaagcaaaaagaacaacccaagagagccaagcgcaaa

SEQ ID NO: 223953 - RNA, 80 nt, Homo sapiens
cggcccggcccgagccccgcccagcacccgccggacggccgagaccgaacaggacagggcagaccgccagcagcacagca

SEQ ID NO: 223954 - RNA, 79 nt, Homo sapiens
aacgcaagccagacacgcgagaaaagaagcgggcaggcacagcagaaacaacaaaacaagagaaaggaagagagacacg

SEQ ID NO: 223955 - RNA, 42 nt, Homo sapiens
gcagccggggcgcaaaaaaagagaacaggaccccggcccggc

SEQ ID NO: 223956 - RNA, 72 nt, Homo sapiens
aaaaagcaaaagagcagaaaccgaggcaagacgagagcagcacaaagcaagggaagaaagcacgggaaaagg

SEQ ID NO: 223957 - RNA, 57 nt, Homo sapiens
acaaacacgaggcacaggcaaccaagaaggggcgaaagggcaggcagcaaaggcaca

SEQ ID NO: 223958 - RNA, 71 nt, Homo sapiens
caggcagccagagaacggccccgcgccccgacaggagcagcagcagagagggaccgagaagggccgggcca

SEQ ID NO: 223959 - RNA, 56 nt, Homo sapiens
accagagggggacagcaaaacccgagcgaaaagccaaaggccgggagacccaaccc

SEQ ID NO: 223960 - RNA, 76 nt, Homo sapiens
cacagagcacacagggaacaaaacgagccgagaacgggaggaagcggagaaaagagccccgaaaggggcgcccagg

SEQ ID NO: 223961 - RNA, 73 nt, Homo sapiens
caacaaagcggcccacgcacgggacagcacggccaagcagagcaaggcaggaaaaggaagagcaaaaacaaaa

SEQ ID NO: 223962 - RNA, 77 nt, Homo sapiens
gccaggaggacgagcggaaaaacggagccacggggaccccagcccaacgccaaacgagccggacccggaggacggaa

SEQ ID NO: 223963 - RNA, 77 nt, Homo sapiens
aaccagacgccagcgggacgaggaccgagaccgcggccgggaccgaggcccgaaagagaaccaggcccaagcaacaa

SEQ ID NO: 223964 - RNA, 85 nt, Homo sapiens
gcagagagaggcgcagaaggaccgggagcacagccgccgaggccgacccgggacggaggggaaaaggggcccgggcagcaagaag

SEQ ID NO: 223965 - RNA, 53 nt, Homo sapiens
ggcagacaaaagggccaaagaagggagagagacagcccgcaccccgggccggc

SEQ ID NO: 223966 - RNA, 77 nt, Homo sapiens
caaaagcccaacacaaaccgaccacacacaaggaacgaacgaaaacaaacggaagagagggcagcaagaaagaacaa

SEQ ID NO: 223967 - RNA, 79 nt, Homo sapiens
caaccccaacccggagagcggcgagggagaagagccaaggagaccaaacccagcagcaccgcagcagcagaagaacaag

SEQ ID NO: 223968 - RNA, 65 nt, Homo sapiens
ccgaccagggcaacaccaaaaacaaaacgaaccaggacggcaagagcaccaagccaaggggcgca

SEQ ID NO: 223969 - RNA, 80 nt, Homo sapiens
gaagccaggcagcccgaagagagggcggagcaggacggcagccccggacgggggaggagcagcccccgagcccccaggga

SEQ ID NO: 223970 - RNA, 90 nt, Homo sapiens
ccgggaggggacggccgccggagccgcgaggccaaagcccacgcaggagacgggaggagcgacaacggagcacacccaccccgcgcaagg

SEQ ID NO: 223971 - RNA, 60 nt, Homo sapiens
gggacagagcaacgcaccccacagcaagacaagcccaccaccaacagcaggaaggcgccc

SEQ ID NO: 223972 - RNA, 55 nt, Homo sapiens
gaaagagccccagaaggacaacagaacacagggcaggagacgacccagacagccc

SEQ ID NO: 223973 - RNA, 69 nt, Homo sapiens
gccgcaccggagagggacaagaaagaggaggagcgcgaagaagaccacagcccaggagcggagaccacg

SEQ ID NO: 223974 - RNA, 78 nt, Homo sapiens
agagggcaccgcggacggggccgcccagcaagagaacaacggagagagacgaggagcgggaagaagaggacacaagcg

SEQ ID NO: 223975 - RNA, 77 nt, Homo sapiens
ggagacacgccaaagccccaagaccagacaaagggagcaccagccagaccgggaagaaacgaaggggggaggcccag

SEQ ID NO: 223976 - RNA, 61 nt, Homo sapiens
cagacccgggggagacgccgccaagaccaggcccgcaagccaaggaacaagaacggaaaac

SEQ ID NO: 223977 - RNA, 61 nt, Homo sapiens
acagagcaacgagaaggacacccaaagagagaaggccagcggcaggccacgcagacagacc

SEQ ID NO: 223978 - RNA, 67 nt, Homo sapiens
gagaagagagacagaagagcaacacaacagccaagcggagcgacaagagcgggaccgacaaagaaag

SEQ ID NO: 223979 - RNA, 40 nt, Homo sapiens
ccgcggacacaccgccccgagagcccaagagacacaggca

SEQ ID NO: 223980 - RNA, 72 nt, Homo sapiens
acacccaaaacacaggaagaagggcgccaggcggccagacaccccacacaggcggaggcaaggcaagaccgg

SEQ ID NO: 223981 - RNA, 76 nt, Homo sapiens
gcgcgggggccgacagacaggcacagaggaaaaggccaaagggagccccggacagagaagagcccaaagaaaaacc

SEQ ID NO: 223982 - RNA, 63 nt, Homo sapiens
ggagccgagggcggagcggagacgaccgagggagccaacccagccccagagagcacgaaccag

SEQ ID NO: 223983 - RNA, 78 nt, Homo sapiens
cagaagaaggccagcgaggaagacaaaacgggacaaagcgcaaagcacacaaaagcccaaacagacagaacacggaaa

SEQ ID NO: 223984 - RNA, 81 nt, Homo sapiens
cagagaagaacaagaggccagcaggacccaccgcagcaaaacaccagggaagaaggagaaagggccaaccccgaagaagca

SEQ ID NO: 223985 - RNA, 52 nt, Homo sapiens
ccaggaccccaccaaaccgaaaagcaagcccaagccacagaccaaaaagaga

SEQ ID NO: 223986 - RNA, 68 nt, Homo sapiens
ggcaccgcggacagagcagacagaacagacaaggggacacgcacccaacggcagcaacgagcccaagg

SEQ ID NO: 223987 - RNA, 56 nt, Homo sapiens
ccgggccacaccaaagagcagagccaaacgggacgggggaaggagcagagccaggg

SEQ ID NO: 223988 - RNA, 72 nt, Homo sapiens
caggagccaagaccacagcagcacccagaacagcgcgagccacaaggcaaggaagcaggcggcaccacccaa

SEQ ID NO: 223989 - RNA, 70 nt, Homo sapiens
ccagacgaccccacaaaccccgccccaccccgaagaaggaaagacgacgacaccgcgacgaccccacaac

SEQ ID NO: 223990 - RNA, 108 nt, Homo sapiens
cgagaacgcacaggccgcgcagagcgggaccacccgggcacagcaggcacggagagagcagcaccagcagaagagggcccgaccacggcaacccagaggcgaagcagg

SEQ ID NO: 223991 - RNA, 79 nt, Homo sapiens
gccaccagacccgcaccagaaaacccccaccagaaccagccacgcgcacaaagagccaccaggagcaccggcgcgccag

SEQ ID NO: 223992 - RNA, 73 nt, Homo sapiens
aaggggaaggaagaccaagggcggcagaggagcgacagcaaccggaaagggccaaccggcgcacagggagcag

SEQ ID NO: 223993 - RNA, 77 nt, Homo sapiens
cgagaggaagacgagccgggaggaacggcccggaaacaggaggacgagggagcccagccggagacggggccggggac

SEQ ID NO: 223994 - RNA, 76 nt, Homo sapiens
caacaccagcaccgcagaggcaaggggccaccaggaggccagggggcgccaggggacgaagagccagcgaggcgca

SEQ ID NO: 223995 - RNA, 82 nt, Homo sapiens
cgccagcagccgccggagccagccaacgagcgagacgagagccgaggcgccggaaacaacagccaacaaaaccaagccggga

SEQ ID NO: 223996 - RNA, 74 nt, Homo sapiens
aacaaccagggcacaaccagggcagcaggggccccggcagggcaggacaggcacccgaaccgaagcagaaccga

SEQ ID NO: 223997 - RNA, 51 nt, Homo sapiens
acaagcacgagcgcaagggccagcggccaacgccagccccgaggccaccgg

SEQ ID NO: 223998 - RNA, 80 nt, Homo sapiens
caagagcaccgacggccccacgaggggcggcgggggcccgggccaccggggggacaggcaccgggaaaacgcagaggaac

SEQ ID NO: 223999 - RNA, 75 nt, Homo sapiens
gaagacacggaacggacaggagaaggaacagaacagacaccaccgaaacgcgccaagcagacaggcaaggaacaa

SEQ ID NO: 224000 - RNA, 40 nt, Homo sapiens
ggcggcgcaccgggcggcaggcagcaacgaagaggcacgg

SEQ ID NO: 224001 - RNA, 77 nt, Homo sapiens
ggacgcggaaggcgggcgacagcggcaggggccccgaaccagaagccgcacgaagggcagcagcacagggagccccc

SEQ ID NO: 224002 - RNA, 76 nt, Homo sapiens
ggaccagcaggggcccggccggccaggccgaaaacaacacaccacgaaagggcgacagaaaacgggcagggcagcc

SEQ ID NO: 224003 - RNA, 71 nt, Homo sapiens
gcggggggcgggggaggcgagcgcgccgcccggagccgcgcacacgagaggagcacggcagccaggaggcc

SEQ ID NO: 224004 - RNA, 48 nt, Homo sapiens
gccacgcgcggaaggcagcgcccagcagcgcaggcacgagaacagggc

SEQ ID NO: 224005 - RNA, 75 nt, Homo sapiens
agagacgggagccaaacacccagggaccagcggccagaacgacgcgcacacgacaccgcaaaacaccagagaaag

SEQ ID NO: 224006 - RNA, 80 nt, Homo sapiens
ggcccagagcgcaacaaggagcgaaggaaggagcccgcgcaagcagcgcgaggagaacaggccacccaccccaaccagcc

SEQ ID NO: 224007 - RNA, 77 nt, Homo sapiens
agccagggcacccgccagccgacgaaggggagccacaggagagcgcccagggaggagggagcgggccaccagaggcg

SEQ ID NO: 224008 - RNA, 40 nt, Homo sapiens
aggggaccacgcaggagcaggcccgaggacggcgaacaca

SEQ ID NO: 224009 - RNA, 69 nt, Homo sapiens
cacaagccaaggacgcaggcaggacgggccagggggagggagaagaacccggaagaagaaacaggagcg

SEQ ID NO: 224010 - RNA, 50 nt, Homo sapiens
gccgccgaccccccggcgccgcgccggcggcgcggcaagccacgcggaca

SEQ ID NO: 224011 - RNA, 47 nt, Homo sapiens
gaccaagaaccagggacaaaccgccgggcgagccccgcgagcgcaga

SEQ ID NO: 224012 - RNA, 82 nt, Homo sapiens
gaagcgcacgccagagcaccaggcagcaagagacaggaagagcccggaacgccagagcggaaaggaagagaacgccggaagc

SEQ ID NO: 224013 - RNA, 79 nt, Homo sapiens
ccgcacacgccagcgaagcagggagaaacgccacaccgggaaaggagggcccagaagccaagaggaagaccgaccgaag

SEQ ID NO: 224014 - RNA, 81 nt, Homo sapiens
aaagcgcgccaaacaggaccacgcaaggaacaacagaccgaagaagaagcaggagacacaccagccaaaggaaagaaagcg

SEQ ID NO: 224015 - RNA, 58 nt, Homo sapiens
ccgacgggagaaggccggggagccccgacagaccccgagagaaacggcgagaaaacca

SEQ ID NO: 224016 - RNA, 58 nt, Homo sapiens
agggccaaagaagggagagagggcgcggaagagggagcgcgaaggagcgcaccagcac

SEQ ID NO: 224017 - RNA, 78 nt, Homo sapiens
agacaacacaagcaagaggccacaaagcaacacggagaccaaacagccagccacacagacgaccggggcggggggcgc

SEQ ID NO: 224018 - RNA, 57 nt, Homo sapiens
cgagagcgcgggccgcagacgggggaccgccgccgcccaggcggcaggacacaagca

SEQ ID NO: 224019 - RNA, 49 nt, Homo sapiens
cacgggcggcagcccgagaccgcagcaggccgcacagcccacagagaga

SEQ ID NO: 224020 - RNA, 80 nt, Homo sapiens
gacgggccccaaggaggccccaacggcggcccacggcacccacggccccagcacaccccaggacggccagcagaagcagg

SEQ ID NO: 224021 - RNA, 70 nt, Homo sapiens
aaggcgcaagagggaggcgcacacacaggcccggcgaccggcagggagcagccgcccgccacgcgaggcc

SEQ ID NO: 224022 - RNA, 78 nt, Homo sapiens
ccaagcccagggcccagaaacccaggaaacgagaccagaccccagagaggaggcacagaagcacaggaaagagaggag

SEQ ID NO: 224023 - RNA, 66 nt, Homo sapiens
cccaaaaccagccgacaaagagggggcccaagaagacggaacagccaaccaagaaaggggcacggc

SEQ ID NO: 224024 - RNA, 60 nt, Homo sapiens
caacgggcccgccagccccagcggcgccgagaaagggcagacaggccaagccaagaacca

SEQ ID NO: 224025 - RNA, 63 nt, Homo sapiens
acccggcagcgggggcagcagagcggagccaagagcgaaggggccccccaggccacccaggac

SEQ ID NO: 224026 - RNA, 80 nt, Homo sapiens
gccgagccgggaccaggcccgggggcggcggccacgccaaggacggacaacggaccgggggacagaggaccggaaaaaaa

SEQ ID NO: 224027 - RNA, 56 nt, Homo sapiens
ccagaggcacagaggacagacagaccagcgagcagcaggggccagaaaaacacaaa

SEQ ID NO: 224028 - RNA, 86 nt, Homo sapiens
cccgggcccgagaggaggaggccggggccccgggcccccgccgcagccgagcggaaggacgaagggcagcgcaagaccccgcacgg

SEQ ID NO: 224029 - RNA, 83 nt, Homo sapiens
gggccgggccgccgcgcaccgcagcgccggggcacgacacaaaaacagacacacagcagcgcccagaccaccacacgacaacc

SEQ ID NO: 224030 - RNA, 72 nt, Homo sapiens
cgccccacagccccagacaagcccccccaggcggacagagggcgcagccaccacccacaagacagagagcaa

SEQ ID NO: 224031 - RNA, 88 nt, Homo sapiens
ggcggagcgacgagcaggcggcgcagacaccaacgcgggcgcgaccgggagcggaccccggggcaggcagcggaagagaaagaccgag

SEQ ID NO: 224032 - RNA, 74 nt, Homo sapiens
gcccacaggaaggaggccacagagagcggcacaagcccagaacccagcagcggaaggagacggcgggaagcgaa

SEQ ID NO: 224033 - RNA, 32 nt, Homo sapiens
aagacacgccacaaccgccagcaggacaggca

SEQ ID NO: 224034 - RNA, 73 nt, Homo sapiens
gccccgcgccgccgaccccccggcgccgcgccggcggcggggaccagaagccaggagaggcgccgggacgggc

SEQ ID NO: 224035 - RNA, 73 nt, Homo sapiens
cccacgcggaaaagggacccccgggaagaagacacagaaaacaggcgaccaggccgcgggaagcgcggacgcc

SEQ ID NO: 224036 - RNA, 82 nt, Homo sapiens
caccgaacagccagggcacagcggaggcgacacccagagagcccagacaggaggagaaaaggaagaagaaagaaccacagaa

SEQ ID NO: 224037 - RNA, 78 nt, Homo sapiens
cgcagggcgcccccgggggcgacgaggcccgaggggcgggacaccagggacccggcaaacccaccagcaaaaggaacg

SEQ ID NO: 224038 - RNA, 78 nt, Homo sapiens
cggcgggaggccaccgccagccacacgcacagacgccgggaccggaaagcagcaagcccgagaaaccaccagcaggga

SEQ ID NO: 224039 - RNA, 68 nt, Homo sapiens
agaaggcggcgcacaagcaagagggacagaaggaggacaaacagaaagggaagacgacaccagaaacc

SEQ ID NO: 224040 - RNA, 73 nt, Homo sapiens
ccaccgaagaaagcaagcgagccagaaaaacgggcaaacccccccgagcacgcgcagcaaacccacccgcccg

SEQ ID NO: 224041 - RNA, 50 nt, Homo sapiens
ccaagagagaaaccaacaagcggcacaaagcaaagcggcacgccaaacgc

SEQ ID NO: 224042 - RNA, 83 nt, Homo sapiens
cagccagggccggagcacgacacggacaaggacgaggcggaaaggaaccccaaggcggaggacgagacaagggcaacgagaca

SEQ ID NO: 224043 - RNA, 67 nt, Homo sapiens
cggcagacgcagagccccccaagggaagagccgcaggaggagaaccaaacgcgcgcaaagaagcaac

SEQ ID NO: 224044 - RNA, 84 nt, Homo sapiens
gcccggagagacgaaccgaagcgggcgggcccccccacccagagaaccccccacggaaaggacgaaagaaagaagcagccccag

SEQ ID NO: 224045 - RNA, 79 nt, Homo sapiens
cccggcgggacagcggggcggcggcgccgggggccggggagcgccagcacgcagcagagagcaaaagaagacgcggaga

SEQ ID NO: 224046 - RNA, 57 nt, Homo sapiens
gcgcgcgcgcgccgagccgcgggcccgcaggaaaccaaggcaccccggagcccggaa

SEQ ID NO: 224047 - RNA, 79 nt, Homo sapiens
ccgcccgcagacagaaagaggccccccggaggggcggaccggcgcccagaagccccgggagaaagccggccccgacgcg

SEQ ID NO: 224048 - RNA, 74 nt, Homo sapiens
ggcaagaccacccgcaagcacgcggaacgacgaagcgggacgggggcggccccgggaacgccggcagcacggcc

SEQ ID NO: 224049 - RNA, 64 nt, Homo sapiens
cgccagcaccaccgcccaaccccagagagaagcgcagaggccaaaagaacacagaagaagagag

SEQ ID NO: 224050 - RNA, 74 nt, Homo sapiens
cccagcccaggcggcgggcggcgggacgccacaggcgggaaggaacaccaagaagcaagcgcagcgaggggagc

SEQ ID NO: 224051 - RNA, 85 nt, Homo sapiens
cgccagccggggcggcacccacgggggcaccgccaagcccggggcaacggccgcaacgcgagcggacaccaagcacaagcagcgc

SEQ ID NO: 224052 - RNA, 104 nt, Homo sapiens
aggaggagcccccgcccggcagccaccccacgggaagcgggagacacaacaacggcaagccccaagggccaagaagccgaaggacagacacaccgcggaggacg

SEQ ID NO: 224053 - RNA, 69 nt, Homo sapiens
aaagaagaaaaacccaacacgaacggacagcaaacgaacacaagagacagggaacaccagaccggagca

SEQ ID NO: 224054 - RNA, 71 nt, Homo sapiens
acaaccagaggcagccagcagggggaggcccagaaagcgggcaccagcgcaaggaacccagcccaacacca

SEQ ID NO: 224055 - RNA, 86 nt, Homo sapiens
gggccgggaccgaaaccagccccggacgagaagcgcagcaacggcgggggaccacgagagcagacaggacggaacccccgccggac

SEQ ID NO: 224056 - RNA, 71 nt, Homo sapiens
gcgccccaacacccgcgcgcccgcccgcgccgccgccggcacccccccggacaaaccggcgaccacacacg

SEQ ID NO: 224057 - RNA, 80 nt, Homo sapiens
aaaagggccgaaagcagaagaaaagggacgcaagaaacccaggacgagaacagcaacaggaaccccaggagcaaaaagaa

SEQ ID NO: 224058 - RNA, 78 nt, Homo sapiens
cacccaggaaaaccggccacaaaaccagagcggagacacccaggaggcagaagccagcggaaagaccggcaccagaag

SEQ ID NO: 224059 - RNA, 64 nt, Homo sapiens
ggagccgccaaggcggcgcagcggccaggcagagcagcccaccagggaggggagggggggaggc

SEQ ID NO: 224060 - RNA, 62 nt, Homo sapiens
aggcagacaaaagggccaaagaagggagagagcaggagcggcccccaggacaaagacaagga

SEQ ID NO: 224061 - RNA, 79 nt, Homo sapiens
caaggagagaaacagccgacgaggcccagaggcagagcacacaaccaggaaccaaaaaccgcggcgacggggaaaaaaa

SEQ ID NO: 224062 - RNA, 49 nt, Homo sapiens
aagccaaggggccaagaggagaagaagggaggaggaggagagaggacca

SEQ ID NO: 224063 - RNA, 78 nt, Homo sapiens
agagcccagaagcaggcccccagccgcagccacaacaccggcaggaaccaccaggacagaagcgcagagaaacgaacg

SEQ ID NO: 224064 - RNA, 84 nt, Homo sapiens
gccaggagcggccaccggccgcggcacggcccggggccgggagcgcccgaggaacacgccgcagcggcagacaaggcccaaaga

SEQ ID NO: 224065 - RNA, 90 nt, Homo sapiens
cagcagcagccgccaccaccgccaaaccgcaaagggcaacaggccagcagccaaagcaaaagacccaaaaccagaggggagcaaaacgag

SEQ ID NO: 224066 - RNA, 78 nt, Homo sapiens
cccgcccggaccgcgcagaaccagggcggcggccagcgccacgcgcccacggagacagaaccagcccccgggccgggg

SEQ ID NO: 224067 - RNA, 66 nt, Homo sapiens
gccccacaggcaggcggcccgccaaggcacggggaccgcgcccgcagaagcacagcccgacagacc

SEQ ID NO: 224068 - RNA, 81 nt, Homo sapiens
gccccgagagcgggaacagggaaagcaacggcgcaagcggcggcggcgggcagaggacacacagagcaaagaaggagcccc

SEQ ID NO: 224069 - RNA, 61 nt, Homo sapiens
cggcgcgacacaggcggggccgacgggggagacggagccccagaaccccggaaaaggagac

SEQ ID NO: 224070 - RNA, 88 nt, Homo sapiens
cccccccccaccgagcggcccgccccaacccgcgcgccagggaaaaggaaaccagaagagggacgaagaaaacagcgcagcgcccaga

SEQ ID NO: 224071 - RNA, 74 nt, Homo sapiens
agaaaagagcagcacccaagagaagaaggccagagcggcgaagagagggaagagaaacaaagcaacaaaaaaac

SEQ ID NO: 224072 - RNA, 40 nt, Homo sapiens
ccgaggcggccaaagcagccgcccccccaccgcggaagag

SEQ ID NO: 224073 - RNA, 68 nt, Homo sapiens
ggacacaaagagcaggcagcccgggacgaaagagcaacagcaggagcagccgcaacagcgcaccgaca

SEQ ID NO: 224074 - RNA, 90 nt, Homo sapiens
cggcgccagccaggaccgcgcgccgggcgaggccgcggcagggcccgcaggcggcgcacaggaagcacggaacaagacaccaagggaagg

SEQ ID NO: 224075 - RNA, 67 nt, Homo sapiens
agccgcggggcgcacgagccggggagcggaggaaggagagaaaaggcgaaccgaaagagaaaaccaa

SEQ ID NO: 224076 - RNA, 83 nt, Homo sapiens
agaaaggagacccgacgcaacgcggagcgcaaggcgagggacgagaacgagccgggagaagaggcacaaggacaggcacagag

SEQ ID NO: 224077 - RNA, 80 nt, Homo sapiens
cggcggccgcagggcgccggagccccccagggagcggagcgcccggccggcagcgggaagggggaccagggagaggacgc

SEQ ID NO: 224078 - RNA, 73 nt, Homo sapiens
ggggagcaaaaccaacgccggccggagcagcagcccgaggacagaaagcgggacacaagcaggagcacagacc

SEQ ID NO: 224079 - RNA, 76 nt, Homo sapiens
cagaggggcgccaagagcgggcccccgcagcaaggccgggaggaggcgagaaaagagcaccaggaccagccacggg

SEQ ID NO: 224080 - RNA, 57 nt, Homo sapiens
gaaaggcgcgaagggaacaccaaaaacacaaaggaggaaacaccacacgaaacacag

SEQ ID NO: 224081 - RNA, 69 nt, Homo sapiens
ggggcgggggccccagccccacagaccagcccagcacagagcagcccgacggccaggaggcgaagagac

SEQ ID NO: 224082 - RNA, 74 nt, Homo sapiens
agggagagcaagcccgggacccacgagaccacaaccacccccaggagggcggcggaggagccaagagcgcagaa

SEQ ID NO: 224083 - RNA, 67 nt, Homo sapiens
ggcaggcccgcccggaagaagcgaccaaagcgccgaggaccggcaacagggggggccgcccgcccaa

SEQ ID NO: 224084 - RNA, 63 nt, Homo sapiens
gcccaagaaacgggcagccaggcccccacagcccgcagggacagaggacgcagaaaacaacca

SEQ ID NO: 224085 - RNA, 75 nt, Homo sapiens
gagaccggaccgagagcggaccgagagcgcgaaacgcacgagaagagaggagcacggcagccaggaggccgaccc

SEQ ID NO: 224086 - RNA, 80 nt, Homo sapiens
aagagcaaaacaaaaagagcagaggagacaaaccggagaaggagccaagaaagagaagggccggagcgagggagagcagg

SEQ ID NO: 224087 - RNA, 36 nt, Homo sapiens
cgaaagagaagccccggaggcggaggcgaggcagac

SEQ ID NO: 224088 - RNA, 75 nt, Homo sapiens
aaggaccagcgacaaggagcgcagcagcagaaagcaggacagccccaaggaacagaggaaagaggcccaaagcac

SEQ ID NO: 224089 - RNA, 80 nt, Homo sapiens
ggagccgggcgcggcgcacgccgcccgcccagggcagcgaggcacaggccccaccgcgaggcgagccaccccagggaacc

SEQ ID NO: 224090 - RNA, 82 nt, Homo sapiens
cgggacccagcccaggcggcgcggacggggcggagacacgggggaaagcagccgcggacgggcgcccgccaagcgcgggacc

SEQ ID NO: 224091 - RNA, 80 nt, Homo sapiens
cgccgcgccgccgccaccagcccaagagaaaggacccaaagacaggaccacgcaccagcagagaaggaaagcaaaccgaa

SEQ ID NO: 224092 - RNA, 84 nt, Homo sapiens
gcagggcaccgcgcgaagcggccaaagccgcccagacggccaccggcgggaggaacaaaaggacgccaggaaagcaggcagagc

SEQ ID NO: 224093 - RNA, 76 nt, Homo sapiens
cgcaaagcagacggcagaaaaaggagaggaaacccccagaaagacaccgccagaccaacacaagacaacacacaga

SEQ ID NO: 224094 - RNA, 72 nt, Homo sapiens
ggcccggcgcagcgcggaacagcgcaaaagagaacggcgagagagaaagagcaacaccagaggaggggaccc

SEQ ID NO: 224095 - RNA, 53 nt, Homo sapiens
accccgcccaaggaggcccagcggcaggccagacggcacccgacagaagcagc

SEQ ID NO: 224096 - RNA, 73 nt, Homo sapiens
caccacgccgcaaggaccggcacaaggacgccaagggggcgagaggccgaacggccacagggacaggaaccca

SEQ ID NO: 224097 - RNA, 75 nt, Homo sapiens
cggaggaaccggcccagcacgaacacacaagcccagcccgggaaagaggcaagcaacaacaggcgacgggcccaa

SEQ ID NO: 224098 - RNA, 69 nt, Homo sapiens
gacgcagccgccaccgagacgaggagaacaccaacaccagcagcagaggcccccagacccgagccagca

SEQ ID NO: 224099 - RNA, 77 nt, Homo sapiens
cccccagaagccaaagagaagccagcccaagaaggaacggaagcgaggaagaaggggagaaaaacaggaaaagaaag

SEQ ID NO: 224100 - RNA, 74 nt, Homo sapiens
gcacgggaccccacaagaacaccgggagaagagaaaccgacccacagaacagaccccgaaagaaagagagagaa

SEQ ID NO: 224101 - RNA, 114 nt, Homo sapiens
caccaacaggccagaggagagggaggaaggaccaagagcaggacgaagcacacagagacaccaaggcggaaggaaaagcagaaaagagaaaagaagaagaacggccacagaggc

SEQ ID NO: 224102 - RNA, 82 nt, Homo sapiens
ggccgccgcagggggccacgcggcccaccaggaccgcaccagcaggggcccgaccaggaggcccggaggaccccccccgagc

SEQ ID NO: 224103 - RNA, 91 nt, Homo sapiens
cagacccgaaggagggacgaagggggacacagaaggcccaggggacacccagcaggccagggaagaggcagcccaggggacacaggagccc

SEQ ID NO: 224104 - RNA, 86 nt, Homo sapiens
ccagaggggaagccaagcaaacgcagaaggacgcccacgagcaaccaagagaggcgggcagcccgcagaccaggccagcacggcag

SEQ ID NO: 224105 - RNA, 53 nt, Homo sapiens
agaaggaagaggggaaaagaaaaccagaaggcaccgacaggaaaggaaaagga

SEQ ID NO: 224106 - RNA, 91 nt, Homo sapiens
cggaaagcggccaagaaagacaaagacccaggaacaaaccgggggcaaggccaaaaagaaggggcagaagcgccaaggacggcccggagga

SEQ ID NO: 224107 - RNA, 71 nt, Homo sapiens
agccacgcaaccggaaccccagccaagagaccccagcccagcccccggaggcgaggaggcaagcagagacg

SEQ ID NO: 224108 - RNA, 80 nt, Homo sapiens
acagaaggagaaaggaggaaaaacagccaggaagagcccggaaacgaggaacaaaagacagaaaacaacacagcacccaa

SEQ ID NO: 224109 - RNA, 71 nt, Homo sapiens
accaagaaaaccaccagggagaaaagaagagacacagagagacccagagaccaacggagaggccgaggggg

SEQ ID NO: 224110 - RNA, 88 nt, Homo sapiens
gaagaaaagaggagcgccagagcgaaaagagaaggcaaacagcgaaggccccaacaccgcagcccacaaccagcagacagcccaacca

SEQ ID NO: 224111 - RNA, 58 nt, Homo sapiens
agcaccgaagagcgcgccgcccccgaaggacccaaagacaggaccacgcaccagcaga

SEQ ID NO: 224112 - RNA, 59 nt, Homo sapiens
ccggacacgaaagccgggaaagcccccagaaacccacaaagccccgaggggcagggagc

SEQ ID NO: 224113 - RNA, 68 nt, Homo sapiens
agaaaagagagcccaacaaggaaaacaaacaagcaacgcacccgcccccaaagagagaagcggaccac

SEQ ID NO: 224114 - RNA, 71 nt, Homo sapiens
gacgccgccagaggcagcagaacacgaagaaagaggaagggaagagaaaaacggacagccccaggaggaag

SEQ ID NO: 224115 - RNA, 55 nt, Homo sapiens
gaaccaagcaacccggccaccgggaagaacggccgagcgaccaggagaggagccc

SEQ ID NO: 224116 - RNA, 85 nt, Homo sapiens
cgccgcaccaggccaccgccacgggccgagacacgcagcggcggccagggaccaaaggcagagggggcgagggaggaaagggggc

SEQ ID NO: 224117 - RNA, 78 nt, Homo sapiens
caggacgcccgccacaggccaggagggggaaggaaggagccaagccgacgccagcgggcgccacccaacaggcgcacc

SEQ ID NO: 224118 - RNA, 75 nt, Homo sapiens
caggggccagggaaaggagcagagagagagagcagaaggaagaaggagaaagacaaagccccgagaaagaccagc

SEQ ID NO: 224119 - RNA, 74 nt, Homo sapiens
ccgagaccccgcggaacgcccaccgcggagagcagcacgaccccagcacaggcaagaagcgaaagaagagaagc

SEQ ID NO: 224120 - RNA, 50 nt, Homo sapiens
gaggcgccccgaaacgggggcagcagggggcaagaaggagagacacagcg

SEQ ID NO: 224121 - RNA, 80 nt, Homo sapiens
cagcagcaaccggaaagcaagggagcggcacagccagaagaccgaagcgcgacggaagggaaagggagcagcaccggcca

SEQ ID NO: 224122 - RNA, 79 nt, Homo sapiens
cccaggcaaggcgagcacaggagagcgcagggccgagcgggccgggacaggcaacagggaggaaaagacgagcagggga

SEQ ID NO: 224123 - RNA, 67 nt, Homo sapiens
aagcagagaaggagaagaagggaccaggagcaggggagagaagacagaagaggggagaggcagggag

SEQ ID NO: 224124 - RNA, 73 nt, Homo sapiens
agcggaaagcagaggaccgggccaggagcgagacccaggagaccagagacagagagccccgaaaacagaagga

SEQ ID NO: 224125 - RNA, 38 nt, Homo sapiens
ccgcggcagcacgcggcgaaacaagggaaaagaaaggc

SEQ ID NO: 224126 - RNA, 104 nt, Homo sapiens
cggccgcaaggccaacggaaccggcaacgggcgccaagccgcggagccccagacgggcgggcacgaaaggaaagccgagaaggcacgacaagccggacccccca

SEQ ID NO: 224127 - RNA, 82 nt, Homo sapiens
acagaccaggcacccgcaggagaggccccaacaaggagcacagaccaggaggaaaaagcagaaaaggaaagagcaagcagca

SEQ ID NO: 224128 - RNA, 67 nt, Homo sapiens
agacagcgcacaagaccacacccgacaccgcaaaccggcccacgaggccgagaacaccaggcggggg

SEQ ID NO: 224129 - RNA, 79 nt, Homo sapiens
aggggaggccagacagaacccaggaggggcccagagggcgagaccccccacgcgcaacccccgggcgggccgggacaag

SEQ ID NO: 224130 - RNA, 81 nt, Homo sapiens
gcggagggaacaccgcccccgcggggaggcagagcccgcgggcccgcccgagcacagccggcccaggggagccgggcgcag

SEQ ID NO: 224131 - RNA, 78 nt, Homo sapiens
caacccgccacacccggggccggcaccccgacccacagaccccaggcaggagcacacacaagaaaacccaaccagcag

SEQ ID NO: 224132 - RNA, 71 nt, Homo sapiens
ccccaaacccggacgaaacgaccccaccagccccaaaaggcggcaacaggaggagcacggcgaaccgcaaa

SEQ ID NO: 224133 - RNA, 57 nt, Homo sapiens
ccgggggcagggcacgcgcccgagcaacacgcgccaaccccagagagcgccacgccg

SEQ ID NO: 224134 - RNA, 83 nt, Homo sapiens
ccccaacagcagagaaacaaggggggaaagccacaccaagcgggccccagcaccggcccccccccgcccaccccggggccccg

SEQ ID NO: 224135 - RNA, 49 nt, Homo sapiens
gggaagagagacaggagaggaacaagaagcaagagagcgccgacaaagg

SEQ ID NO: 224136 - RNA, 69 nt, Homo sapiens
aacaaaagaaaaaaaaaccaaaagagagagggaagggggcagggaaccagagagaagaggaagagaaga

SEQ ID NO: 224137 - RNA, 63 nt, Homo sapiens
gcgaaggagaggcccagaaccgaggggaaagcgcgaaaaagggcgcaaggccaagccagagac

SEQ ID NO: 224138 - RNA, 77 nt, Homo sapiens
gagaaagcgagggaagcggcacgaacaccaagaagaaaaagcagcacgaaggcgaggaaccagcagacaaaaaagaa

SEQ ID NO: 224139 - RNA, 80 nt, Homo sapiens
gaagagagaagaacgaccaggggacaaaagaggggaaacgagagcccaaaaaagaagcaggggacgaagaaaacaaagcc

SEQ ID NO: 224140 - RNA, 77 nt, Homo sapiens
acgggcacaagagccacccacagcgcagacacggcccgggcaaacagcagaacgcaagaggggaaccacccaccgag

SEQ ID NO: 224141 - RNA, 87 nt, Homo sapiens
ggccaaaaacaaagaaaagacggcaaagaagcaccaagaacagaagacaaacagaccccagaaagaagaagaggaaagcccgacaag

SEQ ID NO: 224142 - RNA, 121 nt, Homo sapiens
cgaaaccggaggcccggggggcccagccccgagggagccggggcgccgggcccgggccgggcaggaacccaaggaccgcaaagaaaacccagagaacaccacccgaagagacaccgagaaa

SEQ ID NO: 224143 - RNA, 52 nt, Homo sapiens
cagccggggacccggaaagcaaagacagcggaagccaaagccaccaaggccg

SEQ ID NO: 224144 - RNA, 69 nt, Homo sapiens
cggcgcagaacacaagagcgcaccgcccgccagccgcgggaaacacaaagaagacaccagaagggccag

SEQ ID NO: 224145 - RNA, 51 nt, Homo sapiens
ccgggagggcgcagcggggacgcggacgcacgaagcgacgggcgcccagcg

SEQ ID NO: 224146 - RNA, 77 nt, Homo sapiens
gggcccgacccccccaccgcagcccaccccgcaggcgggcaggcccccgcggacccccagccccgggcccaggagcc

SEQ ID NO: 224147 - RNA, 74 nt, Homo sapiens
acaaaagaaaaccaaagcagaccagaaaaaacagcacaccaggaagcaagggagcgcagaggcacgaaaggaac

SEQ ID NO: 224148 - RNA, 95 nt, Homo sapiens
cccgaaccccaaggccaaccgcgagaagagacccagacgaagaaccacagggaagaagggggggcagccaccacaacgaccaaagccccagacca

SEQ ID NO: 224149 - RNA, 80 nt, Homo sapiens
ggggagggaccggaagcagcacagggaagccacaccccaagagccgaggccaggggcccgcggagaccaaccccaccgcg

SEQ ID NO: 224150 - RNA, 81 nt, Homo sapiens
gccaccaccaggagcccgggaagagaggaaccacggagccgcccaacgggaccagcaagcggcgcgaggaccagagcgacg

SEQ ID NO: 224151 - RNA, 73 nt, Homo sapiens
ggggagacacaagggcacgaagggagggccaaacaggggcaacccgaagaacgacaagcagacaggcaggaaa

SEQ ID NO: 224152 - RNA, 87 nt, Homo sapiens
cggcgcggcgaccggggcagcggagcagggcggccgagacggcccggcagagggggagccccccagacccgaaaggagacaagagga

SEQ ID NO: 224153 - RNA, 73 nt, Homo sapiens
ccaggcagagaagagagaccagcccagggaaaagcagcgggacccagacccgcccccgggaaacagcccgcaa

SEQ ID NO: 224154 - RNA, 59 nt, Homo sapiens
ggggcaggcgagcccgccacagagccgaaagcccggaagagggagaccaccagaaacgc

SEQ ID NO: 224155 - RNA, 69 nt, Homo sapiens
gaggcaggccgacggaggaggagggcgcaaacaaaaagagaccccgcggaagacaccagaaggggcagc

SEQ ID NO: 224156 - RNA, 72 nt, Homo sapiens
gcaagcaagaggccaggacccgccaggaacagagcgggagagccccccacgacccagaaccagggaagaggg

SEQ ID NO: 224157 - RNA, 88 nt, Homo sapiens
accgggacggaccgagaccggaccgagagcggaccgagagcgcgaaacgcacgagaagcagcaggcgcaaaaacgaacccacaaccga

SEQ ID NO: 224158 - RNA, 72 nt, Homo sapiens
aaaccacgccagcccggaaagacggacagaagaagaccaccgaaaacaacgagacccaccgagaggagaagc

SEQ ID NO: 224159 - RNA, 82 nt, Homo sapiens
agccgcggagccggcgcgagaggggcgcggccggagcgggcggcgagacaaaggcgacgagcaccacaagcaaggaacaaaa

SEQ ID NO: 224160 - RNA, 54 nt, Homo sapiens
cgaagagccaagcccagcccgccggagaacgaggaaaggcggagcagcggaaag

SEQ ID NO: 224161 - RNA, 52 nt, Homo sapiens
gaggaggaaaggaggacgagacaagagcgagcaagccgccgcagcaagccag

SEQ ID NO: 224162 - RNA, 36 nt, Homo sapiens
ccaggaggccagggggcgccagcaccgagacaacca

SEQ ID NO: 224163 - RNA, 98 nt, Homo sapiens
agcaagcgaagccgaaaaagcgcccgagacgggcccgccgaaaggccccacacaggacgagaaggagccccgagaccggggagcggggagcgcccgga

SEQ ID NO: 224164 - RNA, 82 nt, Homo sapiens
caccacccgccacccgagaaagagacccaggccccggcgagcaggacagcagcgccgaggcaagggcaaaggaaaaacagga

SEQ ID NO: 224165 - RNA, 83 nt, Homo sapiens
aaaacaggacggaccccagccgagaaccagaaacaacgcggcaggaccaagcaacacaagggagcaccccccgggagacacga

SEQ ID NO: 224166 - RNA, 62 nt, Homo sapiens
cccaccacaaaaaccacaccccgcgcgccgggaccagggaccaggaggaagaagagagccga

SEQ ID NO: 224167 - RNA, 60 nt, Homo sapiens
cgccccgccgcagccagcacccggcccaggacggccagcagaagcaggcgagccccccga

SEQ ID NO: 224168 - RNA, 76 nt, Homo sapiens
gcaaggggcgacacacacgcgggccccggaaggaaagccgagcaggggccaagacaagcagcagagaggagcagcg

SEQ ID NO: 224169 - RNA, 89 nt, Homo sapiens
agcccagacgcggcacagagagggccgggagcgcgcagccagaaaacccgcagcccaaagggcagaagaagaagaagacgcaagacggc

SEQ ID NO: 224170 - RNA, 115 nt, Homo sapiens
cccagagccgaccgcagcaaaaagcagcaacagaaccgcggaggagccagcccagacgccaccccgccccaccgaggccggcgggccacagcaggcgccccgccggagaaccccc

SEQ ID NO: 224171 - RNA, 72 nt, Homo sapiens
aacggcgcgagagcggggacccgcgggacccgcagccccgcgcgggcaccaggacccaaggccagccagccc

SEQ ID NO: 224172 - RNA, 73 nt, Homo sapiens
acaccgcggccgcgcggcggcgacaagggcagaccacagcaagggccgccagcgcagcagacgaggagccggc

SEQ ID NO: 224173 - RNA, 71 nt, Homo sapiens
cgggcagaagcagaacaccgagaacaaaggcaagagcaacgaaccaaagcaaaggaggccgggggaagacg

SEQ ID NO: 224174 - RNA, 84 nt, Homo sapiens
cggagcaaagaaaagagcccacaaggaagaacaaagacgagccagacccccaggaggccgggaaccccgcagaagaagaggggg

SEQ ID NO: 224175 - RNA, 78 nt, Homo sapiens
gcaggccacaaaggaggggaacgaccgaaaacggccccccaggacaaagccggaagaagacgacgaagacgcgagaca

SEQ ID NO: 224176 - RNA, 79 nt, Homo sapiens
gccacagaagcccaaacagagcgcagggcgcgcaaacgaaggaaaaggaaaaccaacagcgccacaaagaccggacaca

SEQ ID NO: 224177 - RNA, 38 nt, Homo sapiens
ccccaaaggaaggccgggaccagaccccgcgagcaaag

SEQ ID NO: 224178 - RNA, 82 nt, Homo sapiens
ggcaccaggacccccgagcagaacccccccccacacgggccccagcgcgccccagaccaccggcagggaacagccgagcaga

SEQ ID NO: 224179 - RNA, 116 nt, Homo sapiens
ccacaagccacccgcccaccaaagagacccccggagaaccgggcccagcagcacgggcccgaagcgacacagggaggaagagacccagcagaggaggccgcagcggcaggagcgca

SEQ ID NO: 224180 - RNA, 38 nt, Homo sapiens
gcagagccaccagccggccagggccacaggcccaggcg

SEQ ID NO: 224181 - RNA, 70 nt, Homo sapiens
ccaccaccgagggcaagaagccgcccagacccccccgggaagacacaaacgcaccaccagaaagccaagc

SEQ ID NO: 224182 - RNA, 70 nt, Homo sapiens
ggaccgggagaagagaggaaaaccacacagcaagaagagggagaaacccacaaggccgcacggacagccg

SEQ ID NO: 224183 - RNA, 74 nt, Homo sapiens
ggacacgaaggcggcccgccggcagagcgagccaaacagaggaaagagcggagcccgccagaaacagacaccac

SEQ ID NO: 224184 - RNA, 81 nt, Homo sapiens
gggccccagaaaccccccgaagaagaccccccacacgggcacaggagggcagaccaaaagcacaaaaagaacggcccgaag

SEQ ID NO: 224185 - RNA, 70 nt, Homo sapiens
aaccgcagcaccacccaaaaccagcaagcaaaagacccacaggaccgaagccagacgggcgccagccacg

SEQ ID NO: 224186 - RNA, 72 nt, Homo sapiens
gccgagacaaaggcaccaggccaccacagaaacaaaagcaacaaagaggggccagcgagacagaccgaaacc

SEQ ID NO: 224187 - RNA, 77 nt, Homo sapiens
ccgcgagccgcagcaacccagagcccacaggcaaaggagcacgggaagagcgcaggggggcaacagggcagagagcc

SEQ ID NO: 224188 - RNA, 73 nt, Homo sapiens
acacaaggcgcagcaggggacaaccaggcaaacgcagaaccaaccagcggagaggagacacaagaacagccag

SEQ ID NO: 224189 - RNA, 59 nt, Homo sapiens
aggcgggaggggccgggaggcagaggggcaggggcgccaccaggggccagaaccgccca

SEQ ID NO: 224190 - RNA, 71 nt, Homo sapiens
gggagagccaaagagcacaaagagaagccccggggaaagaggaggaaaacaaaggcagcgaacaaaccaca

SEQ ID NO: 224191 - RNA, 89 nt, Homo sapiens
cggcggccggggccccggagggcgggagaccggaaggcaaagcagaggagccaggccccggggagacagcacgccaggagggagaggag

SEQ ID NO: 224192 - RNA, 40 nt, Homo sapiens
aggggagagcggagcacaagacaaaggccacacaaaacac

SEQ ID NO: 224193 - RNA, 70 nt, Homo sapiens
gccgaggagagaagaaggcaagcgacggcccgaacgagcggaggccaacaaagcaggggcaaggcagaaa

SEQ ID NO: 224194 - RNA, 78 nt, Homo sapiens
agacccgccaaagccgccgggcaaggcaaaccagccaccagacccagggcccagcgccggccaccgaccgcaccccag

SEQ ID NO: 224195 - RNA, 79 nt, Homo sapiens
gaggagcgccgcggcgggccccgggaggcagaagagaagcccgcgggaaacacgagcgaggggaggccaacggcgagcg

SEQ ID NO: 224196 - RNA, 69 nt, Homo sapiens
aacaccggaggagcaaaacacaaagagaccacaacaaaaggaaacccagacaggggaaacgggagcggc

SEQ ID NO: 224197 - RNA, 82 nt, Homo sapiens
ccaaacaagacaggacccaggacgaagacagggaagaagcaccaaagggcagagcccgagaagaagccagagaaaaacacag

SEQ ID NO: 224198 - RNA, 81 nt, Homo sapiens
ccgggaggggaccggacaggcgccgcgccgccgcacgggaccgccgagccacaccggggcggagaacggaaaagcaccagg

SEQ ID NO: 224199 - RNA, 55 nt, Homo sapiens
cgaagagaagaagcaacagacaaaagggccacagcggccaaagcgcacagagcac

SEQ ID NO: 224200 - RNA, 77 nt, Homo sapiens
gacgaacaaggccagagaaggggaggaaccgaacgagcggaaggggccggaaccaagaaggacgccacaaccaaaag

SEQ ID NO: 224201 - RNA, 88 nt, Homo sapiens
ggccaggccagggcagaggcgaagggcgggggcgagggcccgggacagcgcacccacacagaacacaccacagccacagcacggaagc

SEQ ID NO: 224202 - RNA, 75 nt, Homo sapiens
ggcaaaaggcgcgcgcgccgccccccacccgccccgggagaggaaagacgagaagggaccgacggaaaagaaaag

SEQ ID NO: 224203 - RNA, 58 nt, Homo sapiens
ggaaccccaagccaagcccaagacaaaaacgggacaccaaaaggagcacgcaacccca

SEQ ID NO: 224204 - RNA, 100 nt, Homo sapiens
gaagagaggaagaagcagggaggaccggccaggaacaagacgagaaaggacgacggaaagaaaacgcaaccgggaggcgcaggaaacccacggcacaagg

SEQ ID NO: 224205 - RNA, 68 nt, Homo sapiens
ccacacgcgcaaagcccgccgagcacaccacaggccaaacggaggaaggcaccacggcgccaaacgac

SEQ ID NO: 224206 - RNA, 76 nt, Homo sapiens
agaccggaggggacgaagaacgggcagagagagagcggagagaggagcccaggggaccaacgcacaccagcagaaa

SEQ ID NO: 224207 - RNA, 81 nt, Homo sapiens
ggcgcgagagggcagaggagcggcggagagcggccgcgggcgacgggccgagggccagagggggcgaccgggacaaacggc

SEQ ID NO: 224208 - RNA, 69 nt, Homo sapiens
ccacccccacagcccgcagggggcacccaagggaagagcaacaacaacaccacagggcaacaagaaaga

SEQ ID NO: 224209 - RNA, 73 nt, Homo sapiens
ggaaaacaggaaagaccgaccaggacacgagcgggaacgcaaacgaaggcagaaggcggcagggagcacgcac

SEQ ID NO: 224210 - RNA, 73 nt, Homo sapiens
gcagcgcccgaaagaaggaagaaccgccaaaaagagggaaaaacgggcgccaggaacccggacagcacagagg

SEQ ID NO: 224211 - RNA, 73 nt, Homo sapiens
gccgggaccgcgaacggaaccgcaaaccaagaccgacacacaacacgaaagacaaacggcaaagaagccaaca

SEQ ID NO: 224212 - RNA, 81 nt, Homo sapiens
aaagaagcaggagggaagaaagaagcaagaaggggaaaagacagcccaggaacgccacagaacacagagcccccggacgag

SEQ ID NO: 224213 - RNA, 86 nt, Homo sapiens
gggacgggagggcaaacaagcaggacagcaagacccaaagagggggagcagcagcaacaccacacccggcacgccgcgagcagaag

SEQ ID NO: 224214 - RNA, 74 nt, Homo sapiens
aaaggagaggaagcggaagacgggccacggacaggggggcacgacccccccagaggcgggaaagggacggagaa

SEQ ID NO: 224215 - RNA, 71 nt, Homo sapiens
gacaagccgcaccacgccaaggaaagaaaagagcacgccacgcgggaaaacagagccagaaaccgaacccg

SEQ ID NO: 224216 - RNA, 75 nt, Homo sapiens
ggcagacgcggccggaaaccagcgggccaaggaaagcggagggagccccagaggacggccacagccagaaaagag

SEQ ID NO: 224217 - RNA, 58 nt, Homo sapiens
ccggaccaggcggacgacagccgccgcgaggaaagacccaagggagggaaacggcccg

SEQ ID NO: 224218 - RNA, 72 nt, Homo sapiens
cccccgcccgccccgccgcccgagccggcgccaaggagcaggccgggcccgccagggcacgcgcccgccacg

SEQ ID NO: 224219 - RNA, 80 nt, Homo sapiens
cagcgcggagaaacagccaaaggggacacccggaggcggcgcagcagcaccgggaccagcaaggcagcacgggagggacc

SEQ ID NO: 224220 - RNA, 78 nt, Homo sapiens
ccgaccaagcgggaccccggagcgacccggacaccgacgcgccacgcggagcccgccacccgccacccgggcacccag

SEQ ID NO: 224221 - RNA, 74 nt, Homo sapiens
ccaagccaaaacacagcgaggagaaacagcggggggagaagaacggagagaaccaaccaggagcgagagaaaac

SEQ ID NO: 224222 - RNA, 76 nt, Homo sapiens
gggagacaggccacgcaggcgcaacgcaaagaccagccacgagaggacagaaggaagcaaggcaccaagaccggag

SEQ ID NO: 224223 - RNA, 74 nt, Homo sapiens
gaggcgcaccgccccagacaacaagagccaagaccgggcgcaaaggacaggcagaagcccccggggagagacag

SEQ ID NO: 224224 - RNA, 75 nt, Homo sapiens
gcacaacaggcagacagacaaacggaaaccaaaaggaggaaagagaaagacaagaagcgagaggaacaaaagacc

SEQ ID NO: 224225 - RNA, 86 nt, Homo sapiens
cccacaagagccaaggaaagaagccgcagggacccggcagcaaccccaacaaacgccagaggcagccccccccgggagacaccccg

SEQ ID NO: 224226 - RNA, 70 nt, Homo sapiens
cggacgaaggaggcgaagaggcgcgcagaggcagagcaacagggacacaagcaagaagaaagggaccgac

SEQ ID NO: 224227 - RNA, 80 nt, Homo sapiens
caggacaagagaagcacaaaacagcagacccaagagcagcggaaaagaccagcacagaacagccagcaaagacaagagca

SEQ ID NO: 224228 - RNA, 71 nt, Homo sapiens
gcgggccccgggcacaccaacaagccacgaccggggagcagacaaaaggccagaaggccaccaaagaggac

SEQ ID NO: 224229 - RNA, 72 nt, Homo sapiens
cgccgagagacccaagaaacagggacccccgaacccggaacaggcacccaccggacaggagcacgccaggac

SEQ ID NO: 224230 - RNA, 78 nt, Homo sapiens
cagaccagaagccccccacacaccacgggacccagggcaagcacgaggagcggcaggacgagcaggcacaccccgggc

SEQ ID NO: 224231 - RNA, 99 nt, Homo sapiens
gaagagggacggaaccaccagaagccagcccccaggcggaacgcccgccccgcagagagggaaacccagacgacaaggaaggccaagggacccacgacc

SEQ ID NO: 224232 - RNA, 77 nt, Homo sapiens
gcgcgcgcgccggagccgccgccgccgccgcggccccgccaggaggaacgcggcaccacgagaccacccaacccaca

SEQ ID NO: 224233 - RNA, 83 nt, Homo sapiens
gaggggcagcaagggccaaacgggcccgggacacccagacagagagagcgcacgaagaagggcggaggacaaggagaaggagg

SEQ ID NO: 224234 - RNA, 54 nt, Homo sapiens
caagagcaccagaagcggccgaggcggcaaagaaacgaacccgacaaccgaggg

SEQ ID NO: 224235 - RNA, 75 nt, Homo sapiens
agaagacggacgaaccacccacaaccaagaggaccaaacacggaacagggcacgcggaacaggagaggaggaaac

SEQ ID NO: 224236 - RNA, 77 nt, Homo sapiens
acccggaaaggagaggaacaggcggcgggcgagccgggccgcgcaagccagcgacggagcggaagcagaagcaggac

SEQ ID NO: 224237 - RNA, 78 nt, Homo sapiens
gagagcagaaccaggagcccccaacagaggaaggggaccaggagacgaaaagagaaagggagcaaacacggagcagaa

SEQ ID NO: 224238 - RNA, 93 nt, Homo sapiens
aaaagaagagcagaaacccgccaggaccgggacacagaggacaccagaggaccagaacccacgagaaacagacgagccaaccagaccccagga

SEQ ID NO: 224239 - RNA, 39 nt, Homo sapiens
cagaaaaggcaccgcccgggggaggggccgcaggggaaa

SEQ ID NO: 224240 - RNA, 73 nt, Homo sapiens
agaggggcaagggccagagcccggccaacaaacagcaccaggccggacccagcagggcccccggaacaaaccc

SEQ ID NO: 224241 - RNA, 79 nt, Homo sapiens
gccacaggcccaccacaaagagacagagaccagggcccgggcccgcgggccagaccacggaaacagcaaacggagcgaa

SEQ ID NO: 224242 - RNA, 82 nt, Homo sapiens
aggggccagcagacccagcagcagcaacagacagcagcggccggcaaccaacaacagcccagccgcggcccgagggagcccc

SEQ ID NO: 224243 - RNA, 60 nt, Homo sapiens
cggacgaaggaccacaagagaccccaaggggagcgaacacgcggcggcaggcaccagccc

SEQ ID NO: 224244 - RNA, 78 nt, Homo sapiens
ggcaacgggcggggcggagcgccgggccgcgcagcgccgaacgacgggccacagaaccaagccgccacagggagaaaa

SEQ ID NO: 224245 - RNA, 46 nt, Homo sapiens
cagcgccaccccaccgacagagaggcgcaggcaagacccggaaggc

SEQ ID NO: 224246 - RNA, 81 nt, Homo sapiens
gccacccaagaggagccccggggaacccgcagcacaccagggggcaggcccggaaggagcaagacgagaacaacgacaaaa

SEQ ID NO: 224247 - RNA, 82 nt, Homo sapiens
acggcaaaagcaacagaggcccaagaacaggcacagaacgaaagggaccaagaaaggcccagggaccaaagcccggacaagg

SEQ ID NO: 224248 - RNA, 71 nt, Homo sapiens
gggagccccacgggagaagcccaggaagacggccagggaaccaaacagcagagcagagccgccgacaaaac

SEQ ID NO: 224249 - RNA, 66 nt, Homo sapiens
aggagcccagggagagaacacaggacgccgccagccaccggcgcgaagccagaccagaccagcagg

SEQ ID NO: 224250 - RNA, 78 nt, Homo sapiens
caaggaaaccacggaaaaggcacaaacccgaaaccaaagaccccagaaggggagaaggagaccgagcaacaagacgaa

SEQ ID NO: 224251 - RNA, 76 nt, Homo sapiens
agccagagccccacgggaaggagagcagccagcagaacccaccggccacgcccaaaggggccacgaggaaacgcga

SEQ ID NO: 224252 - RNA, 66 nt, Homo sapiens
caggacagcggcggcgggccgggcagcccggccgacaaccacgggcaggggccggggcagccgggg

SEQ ID NO: 224253 - RNA, 75 nt, Homo sapiens
caagccggaggagaagcaagaaggcccggacacagcaaaccgggccacaggcggaggcagggcgcgaccggccac

SEQ ID NO: 224254 - RNA, 76 nt, Homo sapiens
gaacacaacccaaaaacgaacgccacgcgcccggcgcccagcccaccagcacggcagcaaagaaaagaagggcaca

SEQ ID NO: 224255 - RNA, 84 nt, Homo sapiens
gcgagcacaggagcgagagaggaccccggacacgaaagccgggaaaggaggagccaagcaccgaagccaaaacgagaagcacaa

SEQ ID NO: 224256 - RNA, 82 nt, Homo sapiens
ccgccagccccgagagcgggaacaggagcaagaggggagggaaaaggaaaagcgcgaaagagcaccagcccggaaaaaggga

SEQ ID NO: 224257 - RNA, 79 nt, Homo sapiens
cacacagggcaagcagagacacagcagaaggaaccggggcaggacccaggggaaggaagacacaaaaagccgagagagg

SEQ ID NO: 224258 - RNA, 68 nt, Homo sapiens
cgcggccaggcgacgccacccaagacacaaacggcgacacagagccaagacacggaccggcagacgaa

SEQ ID NO: 224259 - RNA, 84 nt, Homo sapiens
agacccgaaggccaggagacccgaccccaagcccgggcgcgccaggcacagccaagagcggaccggcagcggccagcgcagcgg

SEQ ID NO: 224260 - RNA, 54 nt, Homo sapiens
ggggcggcgccggccccaaggaggcacagcacaagggggggaaaagaacacaag

SEQ ID NO: 224261 - RNA, 71 nt, Homo sapiens
aggaaacagcagaaaccggaaccacacacaccacaggaagccaggaagcaccgggcacaagacgaagaccc

SEQ ID NO: 224262 - RNA, 75 nt, Homo sapiens
aaaaacaagacggggcgccccacagaggggcgacgccccagggaaaaaaggcgaaaaaaagcagaaaaaggcagg

SEQ ID NO: 224263 - RNA, 75 nt, Homo sapiens
aagcacaacagaggcaaagaggaacagggcaaagagagaaacaacgaacgagcaaggaagggccaaggcagaccc

SEQ ID NO: 224264 - RNA, 62 nt, Homo sapiens
cgcgccgcccggcgccggcccgcccccgcagcagcgccaggcaaaagcagaccggaaaaccc

SEQ ID NO: 224265 - RNA, 82 nt, Homo sapiens
ccggagcagccggaccagcccagaaggcagcggcggcccaggccagcacccgcagccgacgcccgccgcggccggggaacag

SEQ ID NO: 224266 - RNA, 66 nt, Homo sapiens
gaccccgccagcccaagaagcgaggacaggcagaggcggaccggcgccagggcccggaagacacgc

SEQ ID NO: 224267 - RNA, 80 nt, Homo sapiens
gaaaaccaccagaccaaggaaaacgaacccaaaacaaaaccgaagccagcaggacacccgcaagacgggagccagcggag

SEQ ID NO: 224268 - RNA, 70 nt, Homo sapiens
aagccacggcagacacacaacccgacccgacgaggagcaccccacccagaccagacgcgcacgccacaag

SEQ ID NO: 224269 - RNA, 72 nt, Homo sapiens
aagaagaagcaacgacaaaccaggagaacggcagaaccaagggaccaaagcgggacggcaggccacgaccac

SEQ ID NO: 224270 - RNA, 81 nt, Homo sapiens
gacccggacgcgaccaggggaggcagaaggagaccgaggacaggccggacaccgcagcccaaaggagagagggcccggaca

SEQ ID NO: 224271 - RNA, 80 nt, Homo sapiens
ccaacgcagaggaacggaacagaggaacagaaacgacaggacacccagcaacagaccgagaagacagcggcaaaaccagc

SEQ ID NO: 224272 - RNA, 72 nt, Homo sapiens
cggcacccccccgcgcgcggggaggcacaaaaagaacaaccagaaggaacgcagagaccgacggagagcagc

SEQ ID NO: 224273 - RNA, 47 nt, Homo sapiens
gcaggggaggccggccccagagcaacgggcaggaaaggaagaaagga

SEQ ID NO: 224274 - RNA, 72 nt, Homo sapiens
aaagcaaagaacaggaagaccacgggccaccggaccaaaaaccaccgaaggagggaaacaagacaaaggaaa

SEQ ID NO: 224275 - RNA, 73 nt, Homo sapiens
cagaccagaccgccgaccggcgcccgccgacgacccgaagaagagacacgccaccagaagacgcagaccgcca

SEQ ID NO: 224276 - RNA, 75 nt, Homo sapiens
agcaggcacacagggaacgcgcacgacaccggaagagccagccacccccacaccaaggcggaggcaaggcggacc

SEQ ID NO: 224277 - RNA, 70 nt, Homo sapiens
accagggcagaagccgaacacgacagaaagaaaggccaaagcagcagaaaacgaaggaaggaggacccga

SEQ ID NO: 224278 - RNA, 42 nt, Homo sapiens
acgaagacggagccaaaccaagaaagaaagacgccccccccc

SEQ ID NO: 224279 - RNA, 79 nt, Homo sapiens
ccccacaccccagagcacccccagggggaccgggggacgccggcggcagagagagcaccaacggcagaaaagacgagaa

SEQ ID NO: 224280 - RNA, 81 nt, Homo sapiens
gcgggcagccaacgagcgcggaggacgagggccagcgacggagagggcagaagaggaggaggggaacagagaaaagacgac

SEQ ID NO: 224281 - RNA, 80 nt, Homo sapiens
agcaaggcggacaagaccaagcgagcaggaaaagagccaaagcacaggagggaagacagcccggcccagcccacccagga

SEQ ID NO: 224282 - RNA, 81 nt, Homo sapiens
aagcgccaagaagccaaagacaagacgcaggagaaaacgagacccaagaacacccaagccggccagcgcggaccgcggagc

SEQ ID NO: 224283 - RNA, 80 nt, Homo sapiens
aaaaagagcaaagaaagaagagaaaaagagaagagaagaaacccagcgaaggcggagcagccagcagaggcgcgccggag

SEQ ID NO: 224284 - RNA, 74 nt, Homo sapiens
caaaacacagggagggccccgagaacccgaaggcacgagcaaaaaaaagccccgagcaacaaaccagggaacga

SEQ ID NO: 224285 - RNA, 72 nt, Homo sapiens
aaaagagccaggaagggccgcccaaaaaagagcaggaaacgaagaagccagaggacaacagagcaaccagcc

SEQ ID NO: 224286 - RNA, 81 nt, Homo sapiens
gagaagggagacgacgcgcgggccgcgagcggggcgacccgagggaaaacaagagaccagaaaaccagcagccaaggccgc

SEQ ID NO: 224287 - RNA, 74 nt, Homo sapiens
aaaggacaaggacgccaggaaaccaagacaaggcgacaacccggaaaccacaaaaggaaggaccaaagaaagac

SEQ ID NO: 224288 - RNA, 74 nt, Homo sapiens
cagacgagggacaggccaggacggcaggcaggaagcgagcagcgcaaagcacaaagaacgcacaccaccagaac

SEQ ID NO: 224289 - RNA, 84 nt, Homo sapiens
cgacccaaggaagggagagcgaaaaggccaagaggaccaagaaaggcccagggaccaaagcccggacaaggcccgagcaccagg

SEQ ID NO: 224290 - RNA, 74 nt, Homo sapiens
ggaggaagaaaaagagcaggaagcaacagggcaccaagaagagaaacagagcagaccacacaacaccggaccaa

SEQ ID NO: 224291 - RNA, 82 nt, Homo sapiens
gcgcggggggccagaccacggcgccaccagcagccccgcaacgcgcccccccggcccggacccacgacaaagcaaggacagg

SEQ ID NO: 224292 - RNA, 69 nt, Homo sapiens
cccacccagaaagaagagacagacaaggccgcaaaaagcgaggaaacagagccaacagaccagaagaga

SEQ ID NO: 224293 - RNA, 77 nt, Homo sapiens
aagaacggacccacaccgaggcacccgaagaagagaccaccaaccagaccagaagcagacgggagagccaggcaagc

SEQ ID NO: 224294 - RNA, 76 nt, Homo sapiens
cggaacgcgcccagcaacacgaccagaaaagggggagaggcaccagcaacagaccaaccgcagcaagcacagagac

SEQ ID NO: 224295 - RNA, 84 nt, Homo sapiens
caaccggacccgcaagcagcccaccacgccacaaacgccgcaccaggcgagcagcgcccccgaaccagaagccaccgcgaacga

SEQ ID NO: 224296 - RNA, 84 nt, Homo sapiens
gccgacaagaggcggacggggagcgaacgggacagcccacacccggcgcggaggcgccagaccaaaacgaagaagacgagccaa

SEQ ID NO: 224297 - RNA, 70 nt, Homo sapiens
aggaaacccacggaagaagaaggcggagaaaagaacagagcaccacgaaagaccccgacaaacacgaaag

SEQ ID NO: 224298 - RNA, 35 nt, Homo sapiens
aaccacggcaaaccaacaagcccacgcgccgacca

SEQ ID NO: 224299 - RNA, 72 nt, Homo sapiens
gcgcccgaccggccggaacacgaaaccagcacacgcacggcaaaccagggagaggggacggccccaggagaa

SEQ ID NO: 224300 - RNA, 84 nt, Homo sapiens
gaggagagcggaggcgcgagggacagaccaaaccaaggcaggccgcagaccaacaaaggggcgcaggccggccaagaaccagga

SEQ ID NO: 224301 - RNA, 80 nt, Homo sapiens
gggaagcccccccagcggcaagcccgccaggcccagccaacccgcaggacaaccagggaagcagaaggcaaggaccccgg

SEQ ID NO: 224302 - RNA, 71 nt, Homo sapiens
ccacgaaccaaaagggacggacaaaggaacaggaccagaaaagaagcagcacaagggagcccaagggaggg

SEQ ID NO: 224303 - RNA, 73 nt, Homo sapiens
cacccccagcaccaccccagccccgcgcccgacaaggccgacgcgcacgaacacgggggcaaagacagggaga

SEQ ID NO: 224304 - RNA, 86 nt, Homo sapiens
gcggccagaccccagaccaggggggagcaggaccagcaggacagccgggcccagagcgcgaaagaaggaacgagggggcaaccaga

SEQ ID NO: 224305 - RNA, 79 nt, Homo sapiens
ccagaccaagacacacaaccaaacaggagaaaaagaagaaccgcaaaaagcccaccacccgaagacgaaggagacaaag

SEQ ID NO: 224306 - RNA, 60 nt, Homo sapiens
gccgaacaccaagcgccgcacaaggcgcagccaaacggagcagggagacgagcccagggc

SEQ ID NO: 224307 - RNA, 69 nt, Homo sapiens
agaggcggggagcagcgccgggagaaggaccacgcagacgagaacacacaagaaaaacccggggaaggc

SEQ ID NO: 224308 - RNA, 67 nt, Homo sapiens
ggcaacgggaagccgggacgacggccccagccagcgacggagacgcccgcagcaaagagacacagga

SEQ ID NO: 224309 - RNA, 85 nt, Homo sapiens
cgcggagagcagcacgaccccagcacaggcggggccccgggagacgggcgggagagagcaccaacccgagaacagcgagccaaga

SEQ ID NO: 224310 - RNA, 74 nt, Homo sapiens
gccaacccgagggcaaagccgcgaagaaaaccaagaaccgaggaggcgcagccagccagacaacggcaagcgga

SEQ ID NO: 224311 - RNA, 85 nt, Homo sapiens
ggggccgcggacgaggaccagcagaggccagcacgagaacccagacgcccgcagcagaacgggaccaccagcgccccgggagaac

SEQ ID NO: 224312 - RNA, 81 nt, Homo sapiens
gggcgcagaccgcggagaagggagacacaaggacagcagcgacggggcccgcaccccaggggcccacggcccagggccgga

SEQ ID NO: 224313 - RNA, 73 nt, Homo sapiens
acaagcaaagaaccaggacaaaaaggaagcacaacaacagcaacggaggcgggaccggaacaggcacacccca

SEQ ID NO: 224314 - RNA, 75 nt, Homo sapiens
gcgcgacgcaggggccccccacagcaccccccaggcaaagcaggaccgcaacagagccaggcagccgcgaacccc

SEQ ID NO: 224315 - RNA, 76 nt, Homo sapiens
gcgcaccacaaagcgcgcaacgccaacccaggcgagaggcaacggggaagacagaaacagcaggaaggcaacacag

SEQ ID NO: 224316 - RNA, 83 nt, Homo sapiens
gccgcgacacagagaaaccccaacgcgaggaaaggaaggccagccacacccgcggacggccggagcagcagaacaagagcgga

SEQ ID NO: 224317 - RNA, 55 nt, Homo sapiens
ggccgaagggccgacccggcgggagagaaagagcgcgcagagcgagaacgagagg

SEQ ID NO: 224318 - RNA, 69 nt, Homo sapiens
ggcagacagacagcggaacgggagcaagaaaaccgagaacagggggggcaaaaccaagcacggacggaa

SEQ ID NO: 224319 - RNA, 80 nt, Homo sapiens
acagcgccgcgccgagcccgccagcgacggcgcccgggagcggccggaggaccccagagcacagcccacaggggaagcgc

SEQ ID NO: 224320 - RNA, 80 nt, Homo sapiens
ccaggaagccggaacgggggcgcggagcggaccggaccggaagaggagcggcaggagagcccacccagcagggcacacca

SEQ ID NO: 224321 - RNA, 93 nt, Homo sapiens
aagacgagccgggaggaacggcccggaaacaggaggacgcgcagcccagacgccccccaggccggggccaccacagcaccaccaccaccaccc

SEQ ID NO: 224322 - RNA, 71 nt, Homo sapiens
agaaccgaaagaggggggaccacaaaccccaaggcgacgaacaggccgagagcagccagaagacaaagagg

SEQ ID NO: 224323 - RNA, 42 nt, Homo sapiens
gaaccagaccagaagcaggcaagagccgacaaaaggacaagg

SEQ ID NO: 224324 - RNA, 86 nt, Homo sapiens
cccacccgcccccgcgggcgccgggccaggacggaccccaagaagaagcggaagaggagccgcggaaccaagacacaaggaacaga

SEQ ID NO: 224325 - RNA, 69 nt, Homo sapiens
agacggcgcagacgccccccccggccagccccgggcgcggaggccgagagacccgcgaacgagcacaag

SEQ ID NO: 224326 - RNA, 79 nt, Homo sapiens
aaccaaaacgagcagcgggaccacagaggaggcggcggaggcggggggggaagagggaggaagaacaaagcgccggaag

SEQ ID NO: 224327 - RNA, 70 nt, Homo sapiens
agaacagagcgagcgcagcagcagcccagcaacgccgacaccccaagaaaccgaagaacgagagaaaccc

SEQ ID NO: 224328 - RNA, 67 nt, Homo sapiens
cagacgcagggcgcccccgcgaggacgagacagaagaggacacagagagaggagcgcgcacaccaga

SEQ ID NO: 224329 - RNA, 74 nt, Homo sapiens
ccggggcggcccggcggagggggcgccgacccaccaaaggacccggagcaggaacgacccggggcggccgaggg

SEQ ID NO: 224330 - RNA, 79 nt, Homo sapiens
cggggaagacaccagagacgaagagacccaaaacccaagacacgaagaaaggaaaggccaaacgaaacacagcagcaga

SEQ ID NO: 224331 - RNA, 100 nt, Homo sapiens
cagagacagacacacggggagacgaagaaggcagaaggagccacaaggagacccaacaccccggccagacgggccaccaggccggcgccccacgcccggg

SEQ ID NO: 224332 - RNA, 66 nt, Homo sapiens
gacgaggagggagaagacgaggagagcggaaaaaccccaagccacaacacagcagcccccaggaga

SEQ ID NO: 224333 - RNA, 66 nt, Homo sapiens
gagccaccgcacccggcacagacaaaccaggggacagggaaagcagaaccgcgggaaaagaaggga

SEQ ID NO: 224334 - RNA, 72 nt, Homo sapiens
aggaaggaaccaagcacccaggccgaaaaggaaaaggagccagggcggaccccgcgggacagaacgcacggg

SEQ ID NO: 224335 - RNA, 94 nt, Homo sapiens
acggagagacaggagcgacccaaccgaggagaggaggaagggaagcggcagccggcacccgcacaacccagggggccgaacccagaccaacaaa

SEQ ID NO: 224336 - RNA, 60 nt, Homo sapiens
gggacgcagggaggagcgggacaccccggaagcgggaaaggcgaacaagaggcgccagcg

SEQ ID NO: 224337 - RNA, 76 nt, Homo sapiens
ccagccagccacacggcagaaaaagagcggaacccacacagggacccgcagggaaaagaaaacggcgggcaaagcc

SEQ ID NO: 224338 - RNA, 68 nt, Homo sapiens
aacaaaacagaagacaacaagcaagccaccagcccccagccgagaccgaaggcacacaggggagcgcc

SEQ ID NO: 224339 - RNA, 86 nt, Homo sapiens
gccacacagaccggggggcggccgcgcggccgggggcgcgggcggcggcgccggcaggaaggcgaccaacgacgaagagcagagca

SEQ ID NO: 224340 - RNA, 74 nt, Homo sapiens
ggacccaaaggccagcaaaagccgaggccgccagcgccaagaaaaaaacaaggccaaagccagccccagaaaca

SEQ ID NO: 224341 - RNA, 46 nt, Homo sapiens
gaaccagccggagggcaaccccccgacgagaggaaagggcagaaca

SEQ ID NO: 224342 - RNA, 53 nt, Homo sapiens
agaagacaggcaaagacagagcggcgaaaagggacgcccccgaacagacaacc

SEQ ID NO: 224343 - RNA, 103 nt, Homo sapiens
ggacagaaaacgcaagacaacaggagaggaaagcggaaagccaagggaccaagaaaggcccagggaccaaagcccggacaaggcccgagcaccaggaccgcag

SEQ ID NO: 224344 - RNA, 62 nt, Homo sapiens
cacggcccgcgcacgcccggagagagcacgagggccgggaggaggacagcgggacaacggag

SEQ ID NO: 224345 - RNA, 74 nt, Homo sapiens
gaagacaccggggacagacaggggaaagggagcagcaccggccacacccacagcacgaccggaacccagcgacc

SEQ ID NO: 224346 - RNA, 78 nt, Homo sapiens
aaccggacacacggcagggagggagacgcgacaccgccagcaaaaaacaggacagcccagagcaagcacacggaggcc

SEQ ID NO: 224347 - RNA, 57 nt, Homo sapiens
ccaaaaccaagcacgacagccaccaggggccccacgaaggacggccagcgcggcagg

SEQ ID NO: 224348 - RNA, 59 nt, Homo sapiens
gaaagaaggaaacggaaccaagaacaagcacgcaggaaccgaaggaagaagagaacaga

SEQ ID NO: 224349 - RNA, 82 nt, Homo sapiens
ccagcggcagaacgcacagagggagagcagggggagaaaggaaggacgagcccccgcggagacagcccgaagaacccgaacg

SEQ ID NO: 224350 - RNA, 75 nt, Homo sapiens
cgcggcgcagccccagcccacaggaaaggcgacagcgagggaacgaaacagacggaggcagcagaggccgagcca

SEQ ID NO: 224351 - RNA, 58 nt, Homo sapiens
agaggccccagagagacacgggacgggaggacgaagaaacgcacagcaacgacccccc

SEQ ID NO: 224352 - RNA, 77 nt, Homo sapiens
ggcggccgggacggaggacgcgcagggcagaccagaaacgggggcagagccggccaggggcaccggaaggagccaca

SEQ ID NO: 224353 - RNA, 52 nt, Homo sapiens
cgcacgcgcccagcaggccagcacccaaacaagcaaacaacggaaaggaggg

SEQ ID NO: 224354 - RNA, 75 nt, Homo sapiens
accacccgacacacagccaggcccacgggaaaagaaacggcgaggaaagagaggagccccggaaagaaaaggaca

SEQ ID NO: 224355 - RNA, 71 nt, Homo sapiens
gaacgaaaaagaagaaccgcaaaagccagaggccagccagcaggcaacaggcccagaccaggcccaaagag

SEQ ID NO: 224356 - RNA, 79 nt, Homo sapiens
gccgaagcagccaccaggaggcgcaggcacaagggaaaggaggacaaaaggaaaaaaaaaaagggaagacagagaggcg

SEQ ID NO: 224357 - RNA, 73 nt, Homo sapiens
gggggacggccggcggcacccgcacccggggacaagcgcgggaacggcgcggaagcgccaaccgaagaacagg

SEQ ID NO: 224358 - RNA, 71 nt, Homo sapiens
acaaaggagcccaaccagagcggagcgcagaccgaggaaaaggagagaggccaagccgacgccagcgggcg

SEQ ID NO: 224359 - RNA, 75 nt, Homo sapiens
agaaacaggccgcgccgcaaggcacagggcgggcagccccaggcccagagacggcgccgcgggggcccacacaca

SEQ ID NO: 224360 - RNA, 71 nt, Homo sapiens
gagaacccaggacaaagaagaaagcacgacggccaggcaagggaaagaaccaggacacccacgcagccaga

SEQ ID NO: 224361 - RNA, 76 nt, Homo sapiens
gggaaaaggaagaaccagagaaagggagcagggaaggaagggaggaaaagagcccaaagccacagaagagagcgag

SEQ ID NO: 224362 - RNA, 56 nt, Homo sapiens
ggaagggaagcggccaaggcacggaggccgcgcacacggcggcggcgaagccaaga

SEQ ID NO: 224363 - RNA, 75 nt, Homo sapiens
cacacccgccgccacagggaagccgcgaaggaaggggcaggaccagcgcccggcaggcgccacgcgccgcagacc

SEQ ID NO: 224364 - RNA, 76 nt, Homo sapiens
agcacaagcaggcagagggcagcacaggacccagggaacagccaagaaaagacgcaaagaggccaagacgggaaaa

SEQ ID NO: 224365 - RNA, 68 nt, Homo sapiens
gagaccaggaaagaagggggcagaagaggggagaagacagaggagccagaccaagagacagcacaggc

SEQ ID NO: 224366 - RNA, 76 nt, Homo sapiens
cagggaagcacagagggaaaggaaggcggaaaagcccaaacaggcacgacaggccgccgcgcgggggaagcgccca

SEQ ID NO: 224367 - RNA, 73 nt, Homo sapiens
ggaggaagcccccccggcacgacaccgccccaacccacgagaggacagcccaggagagcgcgagagacacgag

SEQ ID NO: 224368 - RNA, 78 nt, Homo sapiens
gcgggacagcgcagaaaagacagaggccgggacaggcagagaccacaagaaccaggagagacccagagccagcgcagg

SEQ ID NO: 224369 - RNA, 75 nt, Homo sapiens
ggcaggcccacaccccgaagccccccccagccagacccagaagaaccacgcgcaggccagagcagcccaggcccc

SEQ ID NO: 224370 - RNA, 76 nt, Homo sapiens
ccaccacgggcagccgcagagcgagcggcagcggcccggaaccgggccagcccgcaacccccggcgaccacgggcc

SEQ ID NO: 224371 - RNA, 86 nt, Homo sapiens
agcagcgaccccggaccgagcgcgagggcgccgccgccgcccgccggacccccggaccccccgaccggaagaagcccagcggaggc

SEQ ID NO: 224372 - RNA, 125 nt, Homo sapiens
cgggccgggcaacggccggcacacgcgggacagcaggaagggaagggacggcgacggccacgggcagagacgccggcccaccagccagcggggagccgcccaccccacaagggaggacccagacg

SEQ ID NO: 224373 - RNA, 70 nt, Homo sapiens
acccaaggagaggcacccgggacggaaccgagggacggagagaccggaggaaaccagaagaaaaacacag

SEQ ID NO: 224374 - RNA, 70 nt, Homo sapiens
cggccgagacaaaggcaccaggccaccacagaaacaaaagcaacaaagaggaacagccagagcaccggac

SEQ ID NO: 224375 - RNA, 77 nt, Homo sapiens
ccgccccccacagacccagggcaggggacacgcgcagaggcaagggaggcaagaagcaagcaaccaggcgccgcacc

SEQ ID NO: 224376 - RNA, 54 nt, Homo sapiens
ggcaggggcgcccccaggaccgagcaggaaccggagcagagccccagaccagag

SEQ ID NO: 224377 - RNA, 81 nt, Homo sapiens
aggaggaacccaccacggaggcggagccacggaaagaggcgggggccagcgagacgccacccgagcgccccaacagaaaga

SEQ ID NO: 224378 - RNA, 72 nt, Homo sapiens
gaaaaccaacaggccagggcaagaaggaacagacaaaaacggccggaaggaaacacaggacaccagggacag

SEQ ID NO: 224379 - RNA, 81 nt, Homo sapiens
gccccacgagaaaggccgcgcggcaggaacaagcagaaagcacgaacaacgagaacaagacacgagcaaaccccaccgagg

SEQ ID NO: 224380 - RNA, 63 nt, Homo sapiens
acccagagcgggagcgccggcaggagccggaagagggaagaaggaagcagaaaggaaagagga

SEQ ID NO: 224381 - RNA, 76 nt, Homo sapiens
cgcgagcgcccggggcacgcccgcggccgccggacggccgggcgcggaggggaaccagaagaggccaaccagcacg

SEQ ID NO: 224382 - RNA, 42 nt, Homo sapiens
cagacccagcagaaggcaaaccggcacgagccaggcaccaga

SEQ ID NO: 224383 - RNA, 89 nt, Homo sapiens
gagagaggaggaggaggcggcgcggcggccccgggaccaaggagcgccgcgccaggacggcagccagacgagcagggccgcagcaggcc

SEQ ID NO: 224384 - RNA, 73 nt, Homo sapiens
aaccagcgggcacggacccccacccgggacaccggagaccgaagaacggaagcgcacgaacaaggcggaccaa

SEQ ID NO: 224385 - RNA, 36 nt, Homo sapiens
ggaaggcggccccgcaggagagccacccgcacgagg

SEQ ID NO: 224386 - RNA, 72 nt, Homo sapiens
gcggcggggggcccgcggcgggacccgggcggcgagagcgcgggccgccgcccggcgaaaagggggcccacg

SEQ ID NO: 224387 - RNA, 33 nt, Homo sapiens
caaagcaggcacgggagagaaacagaggaaagc

SEQ ID NO: 224388 - RNA, 61 nt, Homo sapiens
ggaaaccggcccagcggcgaaagggagaagaggacagaaaaagaccagacgcggaaaaaga

SEQ ID NO: 224389 - RNA, 72 nt, Homo sapiens
agaccgagacccaccccccaggagacaacacgaagagccacaccagcaaaaagccgcagacccaagcagaga

SEQ ID NO: 224390 - RNA, 80 nt, Homo sapiens
ccaggagaggagacccacggaaagcaggagcgagggaccaaaaaggagcggccccagcgcacccgaagcggcagcggaag

SEQ ID NO: 224391 - RNA, 68 nt, Homo sapiens
agccaaccaagaaaggggcacggcaaaagaccaagagcacagcagaaggacacaacaacaagacgagc

SEQ ID NO: 224392 - RNA, 78 nt, Homo sapiens
agccgcgcagagcgggccgcccgggaaccaaggagaaagagaaaagcacaggggaaacacgagaggagccccaggccc

SEQ ID NO: 224393 - RNA, 67 nt, Homo sapiens
acccacagccagcaacaccccagagacggacacgggaaaaagacacaaagagagcacaaagagcccc

SEQ ID NO: 224394 - RNA, 69 nt, Homo sapiens
gaaaaacaaccaaaaagagcgaaccgacccccagggaaacagggcaagacagaggaagaaaaggaagag

SEQ ID NO: 224395 - RNA, 46 nt, Homo sapiens
cggagcagaacaaaggcacgagaagagaagcccagagcaaaacacc

SEQ ID NO: 224396 - RNA, 76 nt, Homo sapiens
cgcccgccaccacccgccacccccagacccccagcccagggcccaaagcacaagcgaccgccgaaggagcccccga

SEQ ID NO: 224397 - RNA, 62 nt, Homo sapiens
ccagaccaaaagaaaaaagggacccacccagcgggaaggcaaagaagaagcgcccacagaag

SEQ ID NO: 224398 - RNA, 71 nt, Homo sapiens
agaccaacagccgacagagagcacaagccggacccccacccggcccgagaagaggacccgaaacagaacag

SEQ ID NO: 224399 - RNA, 90 nt, Homo sapiens
caagagaggcggggcgcccccgccacgcagccggccaccgccgagacccagcacacgccgaccaggagagcagcgacagaagagcagaaa

SEQ ID NO: 224400 - RNA, 57 nt, Homo sapiens
cccgccagcccagagagccgagaccacaggcaaaagggaaagcaaggggaagggccc

SEQ ID NO: 224401 - RNA, 74 nt, Homo sapiens
ggacccccggccaccggcggcaagccagaacccaacaaggaggccagggcggccagcgaaccagccggccgacg

SEQ ID NO: 224402 - RNA, 76 nt, Homo sapiens
ccagccgggcaggggcccagaccaacaccaagaagccggcccagaagagggggaaccgacacgcagcaacaaggag

SEQ ID NO: 224403 - RNA, 88 nt, Homo sapiens
ccaggcaccgcgcgggcagaggacgggaggggcaagcgcggccaaccaaggccaagagcgagcggaagaagaagagccggccgcgccc

SEQ ID NO: 224404 - RNA, 77 nt, Homo sapiens
aaacagaagaagccagcagccacaccagggagcggagaaagagacaacacggccagggaagcacagcagagaagcgg

SEQ ID NO: 224405 - RNA, 71 nt, Homo sapiens
ccgcgcccggggggcacccaagcgaggacgcggagcgcagaacaaaaaaggaaacaaaaaagggccaagac

SEQ ID NO: 224406 - RNA, 67 nt, Homo sapiens
gcaaagagccggacaaaaacgcaagggccccgaaacaaacaggggaaccagaagaggccaaccagca

SEQ ID NO: 224407 - RNA, 71 nt, Homo sapiens
aaccaggaagaggagggggaaagaccagcgcgagagagagggcgggaaacgggcgcgcagcagaagcgccg

SEQ ID NO: 224408 - RNA, 71 nt, Homo sapiens
ggggacgcggacgcacgaaaccagagacgaccacaagaacccacaggacaaggggggaaagaagggcaaca

SEQ ID NO: 224409 - RNA, 90 nt, Homo sapiens
aagccgggcggccgccccgccggagcagcacacaaggccagcggaagccagaaagccacgcaggacccagagggccacagagggcccggc

SEQ ID NO: 224410 - RNA, 79 nt, Homo sapiens
gagcgaccgggagccggcgcgcgggcggggaggcgaggccggacgcacccggggggcccaggagaaagaccaacgcgaa

SEQ ID NO: 224411 - RNA, 35 nt, Homo sapiens
caagccaaagaacccagaggcaggggaggccaggc

SEQ ID NO: 224412 - RNA, 78 nt, Homo sapiens
aacagccagaaccggaaagagccgcagacgcacagcaaccaccggacccgaaggccaccacccagaggggccgcccga

SEQ ID NO: 224413 - RNA, 79 nt, Homo sapiens
aggacgagagagaggacgaggaccaggggaggaggagcagaggacacagagaaaggccagcggaagccgccaccccagg

SEQ ID NO: 224414 - RNA, 79 nt, Homo sapiens
agaagaccacacacgggaaacacaaaacgacggccagcagaagcaggcgagccccccgagaaaaagaagaaacgcggga

SEQ ID NO: 224415 - RNA, 83 nt, Homo sapiens
caggagaacgaaacggagccagagaaggcagaagagacgaggacgcgcacaggaaaggacgcggaacaagcaggcagccaggc

SEQ ID NO: 224416 - RNA, 86 nt, Homo sapiens
gaagccccgaggcagccccgcggaggagcagaaggcagcgcacccagacaccggggcccaaggaggggacacgccagaaagggaga

SEQ ID NO: 224417 - RNA, 74 nt, Homo sapiens
cgcgggcgccgggccaggacgggacccaaagacaggaccacgcaccagcagagaaggaaagcaaaccgaagcag

SEQ ID NO: 224418 - RNA, 83 nt, Homo sapiens
gggcccacgcagcggagaccgcaggacaccgggaccgggggcgcagcaccgcggggagcagggaggagcccggcccgcccagg

SEQ ID NO: 224419 - RNA, 37 nt, Homo sapiens
ccaggcacgcacaaaaagcggccccgacaggaacaag

SEQ ID NO: 224420 - RNA, 78 nt, Homo sapiens
agcgcagcccgagcgcgggggccccagccccgcccgcccccagcccgggaggaagaggcagagaggacggaccagcac

SEQ ID NO: 224421 - RNA, 72 nt, Homo sapiens
gcaaaaggacccgggcgaaaccaccagagacaggaggacggggaagagacgaagaagccaaagagaaaaaaa

SEQ ID NO: 224422 - RNA, 73 nt, Homo sapiens
cggagaagccaaaggcaaaggggaagaagcgggcagggccgaagaaaaaggaacgaaccccgaaagcgccggc

SEQ ID NO: 224423 - RNA, 70 nt, Homo sapiens
gcgcagagcgggaccacccgggcacagcaggcacggagcggagaagaagcaggcgccccccaccagccac

SEQ ID NO: 224424 - RNA, 80 nt, Homo sapiens
gagccggccagaccccaccaaggagggcaccaacgccgccagaacccaccaccaaggagcagcaccaaccggaagccaaa

SEQ ID NO: 224425 - RNA, 82 nt, Homo sapiens
gcgccggcgcgcgccgagcaagaaccaggcgcagacaagaggaagagaagagaaggaagacgcgccgagccacggcccacag

SEQ ID NO: 224426 - RNA, 72 nt, Homo sapiens
cagccggaccaggacaacacacgccaggacccagacgaaagcagcaaaaaagcagagcaggacccacacgac

SEQ ID NO: 224427 - RNA, 76 nt, Homo sapiens
cccggagacagcggcacagagggccgccagacggcaccaaacggcaaggaggaaaaaaccagaaaccagacggcgg

SEQ ID NO: 224428 - RNA, 79 nt, Homo sapiens
aaagagggggcccaagaagagcggaggggagcagcagagaaggcggggagcgcgaaggcggcccagggccgggaagcgg

SEQ ID NO: 224429 - RNA, 74 nt, Homo sapiens
ccaaccacgcaccaaaaggaaccgagacagaaagaggaccaggccaacggagaagcacaggcagagacacaagc

SEQ ID NO: 224430 - RNA, 93 nt, Homo sapiens
cgccgccgccgcgcgccaaagcgcgccgccccgggcaaaaggcaaagggaaagacgagaccccccggaagcccacacggaaaccgagggggca

SEQ ID NO: 224431 - RNA, 83 nt, Homo sapiens
gcgcgccgcgccggagccggagaacggccaggcggccccgagcggaacggagaaagcgaggagcaggacaaacaacgagaaag

SEQ ID NO: 224432 - RNA, 56 nt, Homo sapiens
aaaccgggaccacagaaccggaccaaaacagggaaggaagaaccaggagggaaaac

SEQ ID NO: 224433 - RNA, 82 nt, Homo sapiens
acaccgccagcaccgaccaccgaggcggagggggagaacacccaggcgccaccagcaaaaccagagaaacaggcagagaaag

SEQ ID NO: 224434 - RNA, 57 nt, Homo sapiens
aaaaccggacagccaagcaacagcccagcaaggggcccacggccccacggggcgacg

SEQ ID NO: 224435 - RNA, 79 nt, Homo sapiens
ggacggcgaggaggaggccgaggcccgagagccgaggccacgcagcggacccggacgacaccaaagagacccccacgag

SEQ ID NO: 224436 - RNA, 82 nt, Homo sapiens
aagcggcagcgacccgccggcaggagagcgaacacgccaccagagggacccaaaaaagaggacagcggaccacccgggcgcg

SEQ ID NO: 224437 - RNA, 69 nt, Homo sapiens
cagacagaaaaaacaaagcagcagagaaccaacagcccaggaccaaagagggcgccaaaagggaagcac

SEQ ID NO: 224438 - RNA, 33 nt, Homo sapiens
aggagagagacgggcacacacgcacgccagccc

SEQ ID NO: 224439 - RNA, 77 nt, Homo sapiens
ggcgccgcgccggcgggggaagagaccgacagcaccgaggcccgaagaagacaaggggcgacagcgggggagagcga

SEQ ID NO: 224440 - RNA, 70 nt, Homo sapiens
acggacacacaggaacgggggccacgcacggagaagacaaggcacgaggcgcggcgaccaccacagcaga

SEQ ID NO: 224441 - RNA, 78 nt, Homo sapiens
gaggggaacagggcaaacagagaaccaagcagccacaaaagcaaacaccgacaaaagaaagaaaaaaacccaccgcag

SEQ ID NO: 224442 - RNA, 48 nt, Homo sapiens
gggaagacgccgaagggcgggagggggacccgaagcccgcgagaagga

SEQ ID NO: 224443 - RNA, 60 nt, Homo sapiens
gccgccccggagggagacgcgcgccgaggagaacccagcgggccaagcacaccacggaac

SEQ ID NO: 224444 - RNA, 88 nt, Homo sapiens
ggcggagcgggagcggccggaggagccaggacgcagcccggcggacgccggcacagaacaggaagagaaacaggacacgaaacagaaa

SEQ ID NO: 224445 - RNA, 59 nt, Homo sapiens
aaagaggacacgcccacagccaaaggcaaacccaccggagcccccgcagaggcccgcaa

SEQ ID NO: 224446 - RNA, 72 nt, Homo sapiens
ccagaccaccagaaccagcaaacaggaaagagcaaacagcaagagggaaacagaaaaaggacaaggagcaag

SEQ ID NO: 224447 - RNA, 75 nt, Homo sapiens
ccaccccgcccgcgccggaacaagcagcgcgccccagaccaccggcagggaacagccgagcagaccgaggaggcc

SEQ ID NO: 224448 - RNA, 73 nt, Homo sapiens
gcccggcaacagcaacaagagcccaacaaggaaacccagaaaaaagagaggcaagaagcaagcaaccaggcgc

SEQ ID NO: 224449 - RNA, 76 nt, Homo sapiens
ccgcggggaggaggagggggcaaccagaggggccaacggacgacagagacaccagcagaaaacgaagagacaaagg

SEQ ID NO: 224450 - RNA, 78 nt, Homo sapiens
aagcagcaagcccaaaacacacccgcccggacggccggagccaggcccaagaaacagaacgacagcccgcaccgacgc

SEQ ID NO: 224451 - RNA, 61 nt, Homo sapiens
caaaaacacaaaccaagaaggcgcccggggggaccaaaagaacccagccaacccgcagagg

SEQ ID NO: 224452 - RNA, 78 nt, Homo sapiens
gaaaaccaaaccagagaggggaacaaaccgacgcaacggaggaaagagcaagggaccaagaaaggcccagggaccaaa

SEQ ID NO: 224453 - RNA, 72 nt, Homo sapiens
agcacgcggcgacccggggccccgccgggaaaagaggaagggcaagaaagccagagcccgaacggaacccag

SEQ ID NO: 224454 - RNA, 69 nt, Homo sapiens
cacagcccaaaacgaaggcaagcacaaagaaggacagaagaccaagcccaggaagagaagaaagaacca

SEQ ID NO: 224455 - RNA, 64 nt, Homo sapiens
gccaggagccaccaacaccaaaaaggacaaaccggcgaccacacacggggacgacggggaagcc

SEQ ID NO: 224456 - RNA, 63 nt, Homo sapiens
gcccagccccgcaaacgggacacagccacaacacagcagcccccaggagagcaggaaaagccg

SEQ ID NO: 224457 - RNA, 80 nt, Homo sapiens
aggcacccgcgccccagagccacgaaggcaccgacgcacagcgaccaccaacagaccgaagacagagaagcagccaggcc

SEQ ID NO: 224458 - RNA, 76 nt, Homo sapiens
aaaagcgagccccgaaaccaggaacgaaacaaaaggagacccaaccaggcaacagagacccgagcggaagagaagc

SEQ ID NO: 224459 - RNA, 58 nt, Homo sapiens
cgcagcacaggccgacccgcaggccccgaacaggccggcaggcagggaccagggcccc

SEQ ID NO: 224460 - RNA, 81 nt, Homo sapiens
aaaccagcacccaaggcagccggaaacgagggcaggcagaacaccaccggaaagacccgggcgcacaaagaccaaggccca

SEQ ID NO: 224461 - RNA, 71 nt, Homo sapiens
caagacacgcccgggcaaagagagcgacaacaccaagaggagacgaggacagaagagagaggaccaccggc

SEQ ID NO: 224462 - RNA, 79 nt, Homo sapiens
ggcccgccaggacagagcccgcggaacagccccgggccccggacccagcagccagcgaagccccaaggaagccgggacg

SEQ ID NO: 224463 - RNA, 32 nt, Homo sapiens
ccaccaggcgcaaagcacgggcccagacgcag

SEQ ID NO: 224464 - RNA, 63 nt, Homo sapiens
cagacccaggcagcccaggcggcaggggaccgaaaagacgcggccccaaaggaaacacccgaa

SEQ ID NO: 224465 - RNA, 74 nt, Homo sapiens
cccgacggcccacgccagggagggggagaaagccaggaagggaaagacggagacaacagagagagaggcccacc

SEQ ID NO: 224466 - RNA, 73 nt, Homo sapiens
agaagagagaaaaggaagcaagaaaggcggacaccagaaagaggaagagaacaggaaagaaacacacaaagaa

SEQ ID NO: 224467 - RNA, 78 nt, Homo sapiens
cggaaaccccagccgggaggggagcgggaggaggccgccacaggaagaacgaagcgcgcagaaaacacagaaggcaaa

SEQ ID NO: 224468 - RNA, 69 nt, Homo sapiens
gcggggccaccgcggcggagcccgagaggcagaggaggggacacggggacgcccggcggcccgcagagg

SEQ ID NO: 224469 - RNA, 119 nt, Homo sapiens
aagaagaagagcccaggggggccccaccggagccaaggagaggacggacaaaagcacagcggccaagaagggacaggacgcccggcggccaagcccagcccacccccagaagggcaccg

SEQ ID NO: 224470 - RNA, 71 nt, Homo sapiens
cagccacggacgccacagagggaagaccccaagcgcaccacgacaaagaagagaaaacgcggcagagcaac

SEQ ID NO: 224471 - RNA, 50 nt, Homo sapiens
gcccagacaccaaagaacagccggaagaggaggagcgagaaacgcgaaaa

SEQ ID NO: 224472 - RNA, 72 nt, Homo sapiens
cggaaaaagcaaaaaaagcagcacacacagggaaaaaccaacaaggcaaagcaacagcagaaaagaaaacaa

SEQ ID NO: 224473 - RNA, 56 nt, Homo sapiens
ccaagccaggcccagcagccgccaccgaccgggccgaaaccagcacagccacaaac

SEQ ID NO: 224474 - RNA, 73 nt, Homo sapiens
gccagcagggcaagccggcacagacaggcgagcggggacggcagagcgggccgaacccagagcgaggggggga

SEQ ID NO: 224475 - RNA, 85 nt, Homo sapiens
cggggccagccccacaacccgccagcggcacagggccgacacaagggaagggcacccaccccgccccaccacagcgaccggcagc

SEQ ID NO: 224476 - RNA, 73 nt, Homo sapiens
cgccgagagacccaagaaacagggaaagacaaggagccgggccgagaaaccgaaccagagaccagagaagaaa

SEQ ID NO: 224477 - RNA, 63 nt, Homo sapiens
ggcgaaggagccggcggaacaccaccgagcacagagaaggcaggagccccagagcggaggacg

SEQ ID NO: 224478 - RNA, 70 nt, Homo sapiens
gccccaacagagccccagcaaggaggagagcaaacacacacggagaaagcgacggcgccggaaccagacc

SEQ ID NO: 224479 - RNA, 55 nt, Homo sapiens
ggcagccgggcagccgggccgaacaggaacacgcgaaaggcagcagccacaccgc

SEQ ID NO: 224480 - RNA, 73 nt, Homo sapiens
gcaaacccaaagaccccgccggagacgagaggagaacaaggagcggcccagagcaaaacagaggaacggacac

SEQ ID NO: 224481 - RNA, 41 nt, Homo sapiens
ccccgaaaggcggaaacagaaggccagggagaccgccacga

SEQ ID NO: 224482 - RNA, 70 nt, Homo sapiens
ccgcagacaccgggggcgcccggaggagcccgaagacagccccgacggcaacagagggaccaaacaacaa

SEQ ID NO: 224483 - RNA, 60 nt, Homo sapiens
cgggccacgcccccccagggcccaggcggaccgccccggaagaacagacacaccaacagc

SEQ ID NO: 224484 - RNA, 74 nt, Homo sapiens
cccccgcgggcgacgcgagcccagggcgcgcgggggcacagcccaggcgcagcagcggacccccccggccccgg

SEQ ID NO: 224485 - RNA, 53 nt, Homo sapiens
cggcgcgcccaaaaggcagacgacaaggagggccgggcacgcccccgagggaa

SEQ ID NO: 224486 - RNA, 62 nt, Homo sapiens
aacggagagggaaccacccgacacacagccaggcccacgggaaaagacggccggggcaaccg

SEQ ID NO: 224487 - RNA, 80 nt, Homo sapiens
agaagaggagagaggaacccgaagaagaaaggacgacagccagagagggcccgccagggcagaggggcggaccccagcga

SEQ ID NO: 224488 - RNA, 81 nt, Homo sapiens
gagaagaaggggacgggcccagaggcccagggaggcaggggcagaaacagagaaggaacagccgccaccggcaacaaccag

SEQ ID NO: 224489 - RNA, 84 nt, Homo sapiens
cggcggcaaaaggcggcgccgaggagcgggacaacccaggagcagacagagaagcgcgcagcaggaccgagccgacgggcaagc

SEQ ID NO: 224490 - RNA, 56 nt, Homo sapiens
cacaggcgcggagagcccagggggacacgcaagagacgcaccgagagaagcgcagc

SEQ ID NO: 224491 - RNA, 64 nt, Homo sapiens
agaaggcgagaagacagggaccagaaaccccccaccgcccccaccaacaccccaaaaccgaaga

SEQ ID NO: 224492 - RNA, 66 nt, Homo sapiens
ccgacgccaggcagcgcccccaaacggacaaaccagaacaaggagccagcgaaggaacagacgaca

SEQ ID NO: 224493 - RNA, 66 nt, Homo sapiens
aaagggcggggaggggacgaaccaggcagcccaaagagggaaaagagacacccccggaggagcccc

SEQ ID NO: 224494 - RNA, 68 nt, Homo sapiens
gggccgggagcagcagagcagggagacggaggaggaggagaagaagagaggaaaccagccaagcaacc

SEQ ID NO: 224495 - RNA, 72 nt, Homo sapiens
aaagccgccggaggggggcaggggccacgcgccgccacacacgaaggagcagccgccagaccagcccacagc

SEQ ID NO: 224496 - RNA, 73 nt, Homo sapiens
gagcgcagagacagaccagggaacagaaggacaacggacacagcaaagaaggaacagaaaagcagccagcaac

SEQ ID NO: 224497 - RNA, 41 nt, Homo sapiens
aagacgggccgagcccgaggggagccacccagagaacaacg

SEQ ID NO: 224498 - RNA, 77 nt, Homo sapiens
gaagaagcccaagaccgcaggaagaagcagcgcagacagaccccgcccagaacacacggggagacagagacgccgac

SEQ ID NO: 224499 - RNA, 38 nt, Homo sapiens
aggcagacagcgagggcgacgacagaaaacacagagaa

SEQ ID NO: 224500 - RNA, 91 nt, Homo sapiens
ccagaggaagaaccagaggaacgggacaaagcggccagggagcacagaagcacaagggcggacccgacccgagaggaggcgccagcgagaa

SEQ ID NO: 224501 - RNA, 89 nt, Homo sapiens
aaaccgggcgcagccggcagcgcaagaccccgcacggaagcagcaagcacaggcagcgcagagccagagaccacaggagcgagagcaaa

SEQ ID NO: 224502 - RNA, 69 nt, Homo sapiens
cgcaaagagccaagacggcagcaacaagaaggaaaaagggacggcagggaagagggcaaggcagccgga

SEQ ID NO: 224503 - RNA, 70 nt, Homo sapiens
caggaacaaaagaagagcgcaaagaaaaccagcccggacccaaagaaaacagggccagacgggaagaaac

SEQ ID NO: 224504 - RNA, 76 nt, Homo sapiens
cgagagccgcccgggccagcggccgcgcacccccggccggaggcaccagccccgcagagcccagggagaggaagac

SEQ ID NO: 224505 - RNA, 72 nt, Homo sapiens
gccccgaccccaggccccccacagaaaaggaaagaacaaaaccagccaagcagaggagaaaaagacagcacc

SEQ ID NO: 224506 - RNA, 79 nt, Homo sapiens
caggacagcacaggcacagaaggccaaaaaggcaaccacagagagagagagggagggccaagccagcagacggggccag

SEQ ID NO: 224507 - RNA, 64 nt, Homo sapiens
gccgaggcaaagagacaaggagagaagaaccaaagaagcaaaacacgagccccaagagacgaca

SEQ ID NO: 224508 - RNA, 74 nt, Homo sapiens
gcaaagcgcccggaccgaagaaaccaaaacgggccaggaaggacaacagcagaacccgggcggggccggacggg

SEQ ID NO: 224509 - RNA, 72 nt, Homo sapiens
ggaagcgagggcacgggcggcagcccgagaccgcagcagggagaagacaacacgaagaagaccacgacaggg

SEQ ID NO: 224510 - RNA, 88 nt, Homo sapiens
gggcgccgcccccccggcccccgggacggcccaaggccagcccgcagcaaagcgggccagacacgaagaggccggcgaaggaagaagg

SEQ ID NO: 224511 - RNA, 77 nt, Homo sapiens
agcaaaaaaggaaaggaccacgcagaacgcccaaccaggccaaggaagaggagcaggacggagggagaaggggccac

SEQ ID NO: 224512 - RNA, 65 nt, Homo sapiens
caagacaacaggcccgaagaggaagccacagggaggcgagaagacaaaacccaagcgcacagaaa

SEQ ID NO: 224513 - RNA, 77 nt, Homo sapiens
gagcggaagacaggaacggcggacaagagcggacaccagggaagccccaccacaagcagagaaagaagaccagaaag

SEQ ID NO: 224514 - RNA, 79 nt, Homo sapiens
cgggagcagaacagagacaacgaagaccaccagcggcagcaggggcagagagaagagcacacagaaggccaggagcgac

SEQ ID NO: 224515 - RNA, 81 nt, Homo sapiens
cacccgaggaaaaaaaggcgaggaggcagacgcagacaacaaacagaggaagccgaagaagcggacacaaagcagcagacc

SEQ ID NO: 224516 - RNA, 57 nt, Homo sapiens
ccgccgcccaccccacccgcacagccaggacgaacacgaaggaggagagaaaccgaa

SEQ ID NO: 224517 - RNA, 75 nt, Homo sapiens
gccaacggaggaccagcaccccaaccccgaagccaggggacgagcagcccccgcgcgcgggcgggaggaagcaca

SEQ ID NO: 224518 - RNA, 70 nt, Homo sapiens
ggggagcagcgccggggccgccgaccaacacccgaggcggacgcagagacagaacgaaaacaaacggaag

SEQ ID NO: 224519 - RNA, 89 nt, Homo sapiens
acgagccgggaggaacggcccggaaacaggaggacgggacgacaccggagaaggcagcgacgacagcgacagcgagaagaggaggccga

SEQ ID NO: 224520 - RNA, 78 nt, Homo sapiens
cgccaggacccacggaagccagaaagagcacgcacgagaagcgaacagagaggcccagaagaggacccacaagcgcag

SEQ ID NO: 224521 - RNA, 83 nt, Homo sapiens
ccgcccaggggccaggcgaagcacgagcagaccggcccgaccgcccacagacccaaacaaagccaagggaagaagcagaagca

SEQ ID NO: 224522 - RNA, 46 nt, Homo sapiens
gaggaacgaggacccagggacagaggacgcgccgggccagagaggg

SEQ ID NO: 224523 - RNA, 97 nt, Homo sapiens
cccgggcgaaaccggaccgggcccggaggagcgaacaaggcgacaacacaggacagcaaaggcggggagacacccaagaaaacaaagaaggggcaga

SEQ ID NO: 224524 - RNA, 118 nt, Homo sapiens
ggcggggcccgccgccccgcgggggagggcggagcggcgcggccccagcccccgggggggcccgagcaccgaccacgacaccccgggcgaggaagaccgagacccagagcccgggaac

SEQ ID NO: 224525 - RNA, 101 nt, Homo sapiens
ggcagcccgcaaccaaggggacggagaccgagaggaagaaaaggccagggggaaggaaagacgcgaccggaaaggagagagagacagaaccacagacaagg

SEQ ID NO: 224526 - RNA, 71 nt, Homo sapiens
aggacgcccacgagcaaccaagagcacgggcgcgagcccgaaagcaacggccggaacagcgcacggccagg

SEQ ID NO: 224527 - RNA, 40 nt, Homo sapiens
ccgcgggcaaaccagaccgaaggcgcccagacgagcccac

SEQ ID NO: 224528 - RNA, 77 nt, Homo sapiens
gcagaaggccggagacaccagcagggcccggccaggccccaccgccacaagcaggggaacaccgccaaccccaaggg

SEQ ID NO: 224529 - RNA, 94 nt, Homo sapiens
aagggaacaggggcccgccagccccgcggcgcccgggcccgggcggcggcccaccgcccacgggcccccacagagagcacacaaacaaagcgaa

SEQ ID NO: 224530 - RNA, 61 nt, Homo sapiens
ccaccaaccagcaaggacagggcaggagaagaggaaccgcaaaggcgaagaaagggaggca

SEQ ID NO: 224531 - RNA, 67 nt, Homo sapiens
accacgaaccgcagcaacccgagccaagcaggaaggcccagcaaagagaagaaggcgggagcgaccc

SEQ ID NO: 224532 - RNA, 35 nt, Homo sapiens
gggcgaaggggccacgcgaaaccaaagaacgaaga

SEQ ID NO: 224533 - RNA, 76 nt, Homo sapiens
gaccagaggacagaccgaagcaaagggcgcaggaaacaaccgagaggaggacgggcacccaggagagagcaacggc

SEQ ID NO: 224534 - RNA, 75 nt, Homo sapiens
caagccgccaaacaggcggaggagcccagaggagaccgagaagcaaagcgccgggcaccagcaagcagggcaggc

SEQ ID NO: 224535 - RNA, 70 nt, Homo sapiens
gacacccgggcggggcagagcagcccccagccagccgcgaggcgaagccacaaggggaaccacagcaagg

SEQ ID NO: 224536 - RNA, 51 nt, Homo sapiens
acgacgcgacacaaacaaaagcaccagaagaaaggagagagccgaaagaga

SEQ ID NO: 224537 - RNA, 63 nt, Homo sapiens
caagcagcgacgccagcggcggagaaccgacgaaagggaagaaaaggacccccagagagcaaa

SEQ ID NO: 224538 - RNA, 58 nt, Homo sapiens
aagaaaggggaaccccggagaaaaggccaagaaggcagccaagacaagcaaacccagg

SEQ ID NO: 224539 - RNA, 95 nt, Homo sapiens
cgcgcccgccgacccgcgcccgccccccagcaccgggcggacgacggaaggaaaaggacaggaggacccagacccagcaagcagaccgaaacagg

SEQ ID NO: 224540 - RNA, 39 nt, Homo sapiens
gcccacccccagcaccacaccggcggagacaaggcggac

SEQ ID NO: 224541 - RNA, 75 nt, Homo sapiens
agggggaggagacgcgcggggcgggccgccagcggggacaggcagcaaagaaggcgccaccaaccagccaagaga

SEQ ID NO: 224542 - RNA, 44 nt, Homo sapiens
gaaaaggagagaagcggcgacgagcccggacgaggggcaggacc

SEQ ID NO: 224543 - RNA, 60 nt, Homo sapiens
gcacggaaagagcaggcggcggcggcggaacgccaggcagagagccaggaacaaaagggg

SEQ ID NO: 224544 - RNA, 98 nt, Homo sapiens
cagagacacccacgagcaaccgaggcacccaagagaagccgaggcaagaaaggcaacaagaaacaccaagacaagacgcaagaaaaagcaagaccgag

SEQ ID NO: 224545 - RNA, 70 nt, Homo sapiens
gggacaccggggcgcgggggacgggagcggcagccccggaccgcgacgagaagagcaaaacggagcccaa

SEQ ID NO: 224546 - RNA, 89 nt, Homo sapiens
cgagcgcgacgaccgccgagcggcggccgaggcggcggggggcgcgcaggccgcgacgagggcgcgagaaccccgcacagaagcaggag

SEQ ID NO: 224547 - RNA, 75 nt, Homo sapiens
ggaagaagagccagagggacccgggccccacagagagcccggcagcgacaagcccagacagacagaagcacccgc

SEQ ID NO: 224548 - RNA, 74 nt, Homo sapiens
ggcagccgggcccgcccaggccgacgggccacacgccaacgaggacgacaagcgacaccacacgaccgcacgcg

SEQ ID NO: 224549 - RNA, 75 nt, Homo sapiens
gcgcgacccccagacaggaggagccacccgcacagacacgccaaggagcccggaacggccgagcgaccaggagag

SEQ ID NO: 224550 - RNA, 75 nt, Homo sapiens
aggaacaggagccgccaggcgacacaccggaagcagaaagcacgaggccaagggcggggaaggagcgcgagcaga

SEQ ID NO: 224551 - RNA, 58 nt, Homo sapiens
aaggcgaccccagaaaggggggaaaaccagcagcgcagcgcccaaggccgcggaggac

SEQ ID NO: 224552 - RNA, 47 nt, Homo sapiens
ggaccggaagcgggcccagcgaaccccaagcccgacggggacccacc

SEQ ID NO: 224553 - RNA, 64 nt, Homo sapiens
aaaggccaagaccaggaaaggaagagcccaccagggaggaccccccgagagacagaggagaggc

SEQ ID NO: 224554 - RNA, 64 nt, Homo sapiens
gagaggagcagcccccggagacagcggcacagagggccgccaggagcaccgggggcgcgaccac

SEQ ID NO: 224555 - RNA, 74 nt, Homo sapiens
cggcaaacgaagcaaagaaaggccgcccgcaaagcaaagggacaggcggggaagaaagccggagaaaagcaccg

SEQ ID NO: 224556 - RNA, 74 nt, Homo sapiens
agcccggagcagaggaggacgagacgcagaggaccaggggagcggacgcaggccacggaaccgcccagccccaa

SEQ ID NO: 224557 - RNA, 80 nt, Homo sapiens
ggaagcaccgcacccggagccgggggggcggccgcaagaagaaacacacgcgcggccccgacgcccgcaggggggcggcc

SEQ ID NO: 224558 - RNA, 102 nt, Homo sapiens
ggaaagggagccaaccgaacgggcgcggaacacgcaccgggacaggcccagcggccgccaggagagccggggagcagcgggccggcgcgaggcgcccggcac

SEQ ID NO: 224559 - RNA, 79 nt, Homo sapiens
ggcgccggcgagagccgcaccgccaacccccgagcaagacgggccaagaaaaccaggcccgacagcaagaaaaaaggag

SEQ ID NO: 224560 - RNA, 57 nt, Homo sapiens
gaccaaaagaaccgaacgacacagaggacccaaggagaaagacagcaaagaaaagga

SEQ ID NO: 224561 - RNA, 57 nt, Homo sapiens
gaaacgcggaacgcccccggagccgagacccaaggggaagaaacgagcgagcccggg

SEQ ID NO: 224562 - RNA, 77 nt, Homo sapiens
cggccgccccacccacccagaagggccgcagagagaggccgagacagacaacgaggggcccaccgaggagcgcagac

SEQ ID NO: 224563 - RNA, 70 nt, Homo sapiens
cccgagaccccgcggaacgcccaccgcggagagcagcacgaccccagcacaggaacaagcagaaagcacg

SEQ ID NO: 224564 - RNA, 74 nt, Homo sapiens
gggagagcggggaagggggaaaggcaccaggacaagcaaagaacacgacgggccaaccacaccagcaaaacagg

SEQ ID NO: 224565 - RNA, 96 nt, Homo sapiens
gggccgggggccagacgcacgcccacagggaagggagagcagagccggagccagggcaggccaggagagaaggcccggcccaggccaagagagaag

SEQ ID NO: 224566 - RNA, 57 nt, Homo sapiens
gaagccacagccccaagcccaggccacagcccaccgaacccaacaccagcccacccc

SEQ ID NO: 224567 - RNA, 57 nt, Homo sapiens
agacgggaaacacagagagcacaacgaaaggacagaacgaccgcccggccagcccac

SEQ ID NO: 224568 - RNA, 71 nt, Homo sapiens
gcaagcaaagcgaggaaacagggacccaagaagaacagaaggaagacaaagagacggcacccccaaagaag

SEQ ID NO: 224569 - RNA, 71 nt, Homo sapiens
agcccaccagaacgaccaaggaaaaaggccacgcacaacaacacagaaggcacaggcggagaacaaagggg

SEQ ID NO: 224570 - RNA, 82 nt, Homo sapiens
gacccgaaaaaacaaaacaaaagaacagaaagcgagcagagcccgcgaacaagacaagggcacgcgggacggccacaagcgg

SEQ ID NO: 224571 - RNA, 68 nt, Homo sapiens
agaaaccaacgacccaccagggacaaccgaaaacaaccaacaccagccaggaaaaccgggggagaaga

SEQ ID NO: 224572 - RNA, 58 nt, Homo sapiens
gccgggggacagggcagcacagaaggccaagagaggccaacagaggaacaaggcccgc

SEQ ID NO: 224573 - RNA, 72 nt, Homo sapiens
gcgccgcggccgagcagcggaccagaccgccgacccagcggacgccaagaagaaaggcccagaagcggagga

SEQ ID NO: 224574 - RNA, 59 nt, Homo sapiens
gaggccagcgcagcagccaaagcccacgccccgaagaagaggcaaaagagaggaggagg

SEQ ID NO: 224575 - RNA, 85 nt, Homo sapiens
gcgcaaacaagccaacccaggaggaaaaacggcaaaagggaaagcaaggggaagggcccaagaagacaccccaccagaaaccgaa

SEQ ID NO: 224576 - RNA, 83 nt, Homo sapiens
gaagagacacagaggagccacacccccaggcacggcagacacaccgaccagaggaaggcgaacccgccacgcagcaggagcag

SEQ ID NO: 224577 - RNA, 78 nt, Homo sapiens
ggagaccacgcccaaacaggaagcagagagacaaggaaacccaccgagaggaaacaaacgcgagcagcgaggaaaagg

SEQ ID NO: 224578 - RNA, 59 nt, Homo sapiens
accgaccaccgaggcggagggggagaacacccagaaccggggaacagaccggaggaacc

SEQ ID NO: 224579 - RNA, 73 nt, Homo sapiens
cagcacaccagggggcaggcccggacacgacaccaaaaaagaagacgggacacacagaaaaaaacccaagagc

SEQ ID NO: 224580 - RNA, 65 nt, Homo sapiens
cgaaaggccaggcagaacagcgcgcacacggcgagcaagaccgggggcccgcgcacagaccaaac

SEQ ID NO: 224581 - RNA, 71 nt, Homo sapiens
acgcgaaaagcgcacgggaccccacaagaacaccgggaaagaccacagcaagaccacgcccccagccgggg

SEQ ID NO: 224582 - RNA, 58 nt, Homo sapiens
cgccagcaacgcgggcagaggagcggagcggagaagccaagggccgccccccgggcga

SEQ ID NO: 224583 - RNA, 83 nt, Homo sapiens
cccggccccagcgcagcagaaccggagcgaggccaagaggagaaagaaccggccggaagacaccggacggcccgccacgggcc

SEQ ID NO: 224584 - RNA, 60 nt, Homo sapiens
ggaccgagacaaaacgcagaagagcagccccgccggccgcccgcaggacaccgagggccc

SEQ ID NO: 224585 - RNA, 72 nt, Homo sapiens
cacgccaaaagcgccagcaaacccgcagggaggagcgcggcaagacaaccacgaaaacgaagaggggagaag

SEQ ID NO: 224586 - RNA, 81 nt, Homo sapiens
aaacccccgacaggcccagaacaaggaaacaggccgaggggcaccccacgcaaacaggcagcccgggcagagaagaagaaa

SEQ ID NO: 224587 - RNA, 79 nt, Homo sapiens
ccggcggggaggcaccggaagcgcgggccgggcagcccacagcaagggcccagccagaccgaaggccaacaaagcgaag

SEQ ID NO: 224588 - RNA, 63 nt, Homo sapiens
ggaaaagaacccgccaaaacacagcgaggagacagaggacagagcgggagccaccagcgccaa

SEQ ID NO: 224589 - RNA, 102 nt, Homo sapiens
ggacgcgcgcgggcacccacggagccccggggcgccggaaccaaaaagaagccccagagccggggccaggagccccaagcgccccagcagcaaacacagaag

SEQ ID NO: 224590 - RNA, 85 nt, Homo sapiens
gccgggacccggccccggcccacaggggggggcaaacccgagagaacgggagagagaagcccagaaacagcggagaagcaaacga

SEQ ID NO: 224591 - RNA, 77 nt, Homo sapiens
acaacggcccgaagagagaccgggacaaaacaccaacacggggagaggagaacacccggcccgacggaaagagggga

SEQ ID NO: 224592 - RNA, 69 nt, Homo sapiens
acagaggcgagccacaaggaaggcccaagcagggaccaccagaccccagcccccagcgaacacgcacac

SEQ ID NO: 224593 - RNA, 82 nt, Homo sapiens
gaccaggcgcggagaaggacgaagaggaagccgagacgccggggcccggcgccaccaccggggagccagagcaagaggccaa

SEQ ID NO: 224594 - RNA, 79 nt, Homo sapiens
gccgggccgggcgcgggcgagaaaggggccgaggcccgcacaacggagccccgggcacgcgggggggacacgccacagg

SEQ ID NO: 224595 - RNA, 69 nt, Homo sapiens
cagcaccccacgcccggccgacaagcacgcaagccgaacaagaaggaacacagaggggcgacagcccag

SEQ ID NO: 224596 - RNA, 79 nt, Homo sapiens
ggggggccgggcccagacaaaaaacaggagccacccacgagaaaggggacacggaaagcacaaggagaaaaaaggccag

SEQ ID NO: 224597 - RNA, 78 nt, Homo sapiens
cgggacaaccgaaagggaggcgcgaaaaagggagaaccaggggaaccggaagacgcgaagacgggggcaagacgaaca

SEQ ID NO: 224598 - RNA, 78 nt, Homo sapiens
ccaccaagcccggcaggagagcaggcgacagaccaaaagaagccaaggcccccagggggacagcacgcagaggggcgg

SEQ ID NO: 224599 - RNA, 82 nt, Homo sapiens
cccggcccgagcgcaccggagggacggcacagggaggccagccggagaagcgagcagcggcaggcagcggaagagaaagacc

SEQ ID NO: 224600 - RNA, 76 nt, Homo sapiens
cccccccgccaggccccagagacaccagccaagaaggggacacggccgcagcggaaaacgccaagaaggaaagaaa

SEQ ID NO: 224601 - RNA, 81 nt, Homo sapiens
cacggcccccggcgccccggcccccgccccagcccgccggcggcggcgggcccaccagaagagccgacaagccggcagaag

SEQ ID NO: 224602 - RNA, 72 nt, Homo sapiens
cggaagccgccacaaacacccagaagccgcaggagaagccagcaacagggaaacagacgcacccgaagaccg

SEQ ID NO: 224603 - RNA, 87 nt, Homo sapiens
ggcacgggagccacggcggggccgcaccaggaggcaaccccgaggagaaggcagagcccccccaggcagaagcccgagcgggaacca

SEQ ID NO: 224604 - RNA, 73 nt, Homo sapiens
acgcgcgggaccccgggcacggcgcgcgggaggcggaacagggcgcagaaacggccggaaagacaggcgccgc

SEQ ID NO: 224605 - RNA, 39 nt, Homo sapiens
gccgcacagcacacacgagcaacaagaaggaggaaagaa

SEQ ID NO: 224606 - RNA, 80 nt, Homo sapiens
gcgggcgacgcagggcaccggcggccgaagcgccccccgagaggaagcacagcgcaccagcaaagaccacagcggcacca

SEQ ID NO: 224607 - RNA, 65 nt, Homo sapiens
gacagcccaaacgccccacgaccagggcggagaacggaaaagcaccaggaagcagagaggaccgc

SEQ ID NO: 224608 - RNA, 81 nt, Homo sapiens
ccccggcagcgggacccggcgaagacgcgaccgcggcgcgagcaccagaaagcagggcgcaggcgaaaccgggccccaaca

SEQ ID NO: 224609 - RNA, 38 nt, Homo sapiens
cgggcagccccaggggacagacagagagaagggggagg

SEQ ID NO: 224610 - RNA, 54 nt, Homo sapiens
gggaggcggaaccagcgagaagccagacgcacagagagaaaccacgcaacaggc

SEQ ID NO: 224611 - RNA, 71 nt, Homo sapiens
ggaagaggacgacgcgacacaaacaaaagggaaggcgccagacacagaaaagaaagagagcaaccacccac

SEQ ID NO: 224612 - RNA, 53 nt, Homo sapiens
aaaagcgcagagagaggagagccgacgggcagaagcacaggacaagaaggaac

SEQ ID NO: 224613 - RNA, 73 nt, Homo sapiens
gaacgcacaccagccccggcccaggacccccaaaacacacacgggcgacagccgcaccccgaggggcagcccc

SEQ ID NO: 224614 - RNA, 74 nt, Homo sapiens
ccccggagacccgggccggcccccaccagagaccggaggcaggggaagcacaaaagcgcacccgcgccagcgag

SEQ ID NO: 224615 - RNA, 74 nt, Homo sapiens
aaccaaccccagcggggaccagcgaccgacaccccaggaagaagccaagccaaaggcccaccaacgagggagac

SEQ ID NO: 224616 - RNA, 89 nt, Homo sapiens
ccacccacaagcacgagagccgcagggcaccggcaccgccagggaggagagcggggcacgcgcccaacgcgcaagaagcccaccacgga

SEQ ID NO: 224617 - RNA, 71 nt, Homo sapiens
aaaaccgcggaaacacacaaaagacagcacacggagcgcgaagaaacacaaggcaggaggacagaagcgag

SEQ ID NO: 224618 - RNA, 68 nt, Homo sapiens
aggaagaacaagaccagccacaaaagcaaagaggcccgaagcaaagaggagagaagagacgaggagga

SEQ ID NO: 224619 - RNA, 65 nt, Homo sapiens
cacagacgcacgggacaggagagccgggcaagacggagagcgaaaagccagccgcacagagcaga

SEQ ID NO: 224620 - RNA, 76 nt, Homo sapiens
acgaagaaacaccacaaaccgggaaaagagcaggcgggagaccagcagaagagaggaggcgggaaaacacaccgag

SEQ ID NO: 224621 - RNA, 85 nt, Homo sapiens
cccccgggaaggagcgcccggcggagaagaccgaacggccccacagccgggcggggggaaaggagcgcagaggcggagacagagg

SEQ ID NO: 224622 - RNA, 59 nt, Homo sapiens
ccaacgggggaacaccgacagccacagaaaagggacgcggaagcaacaggagcaagaag

SEQ ID NO: 224623 - RNA, 80 nt, Homo sapiens
aggccgagcaacaagaaccagacgagagaccagaccggaagggggggaggacgccaccacaccgccccagaggcacacac

SEQ ID NO: 224624 - RNA, 51 nt, Homo sapiens
gggacggcacaagcaaggaaaggcgcaaaacaaggaccggacagagcacgc

SEQ ID NO: 224625 - RNA, 80 nt, Homo sapiens
gaggacagcaccggcgcgggggcaggcgcgcgccgcaacgccgagcgcaccgacacgccgccaaagaccccgagagaaac

SEQ ID NO: 224626 - RNA, 53 nt, Homo sapiens
cgccccccccacgggaaccacagaagaagaggaggagcaccgcacagcacgga

SEQ ID NO: 224627 - RNA, 121 nt, Homo sapiens
cgggagcggagcccgcgcagcgccccgcagggcgaggacggccgaaccccgcgcccgcaggacgccccagccaggacaggagagacaacggaggcaagaaagacggagaagcgagaagaga

SEQ ID NO: 224628 - RNA, 71 nt, Homo sapiens
gagagcagagagcggaccaagggaaaaagacccgagaagcgcagacccaccagggaaagcaaaggcagggc

SEQ ID NO: 224629 - RNA, 74 nt, Homo sapiens
agccggagcacggcggacagcggccagagagccaacgggccggcaagccacggggggaccaccgaagagacgag

SEQ ID NO: 224630 - RNA, 77 nt, Homo sapiens
gcggggcccggcaccaggaccaccgcggcagcacgcggcgcaggacggcacaaacaagcacacaggaaagccaaaac

SEQ ID NO: 224631 - RNA, 76 nt, Homo sapiens
ccccaggccgcacacaccccccaaccccaggccaaaggcaggacgcgacccgcagaagagccgccgcagggcgaag

SEQ ID NO: 224632 - RNA, 65 nt, Homo sapiens
gaagcggcacccccaggaagcgcgcagaaaagagacacacaaaggaagcaaagccggaaccaaga

SEQ ID NO: 224633 - RNA, 97 nt, Homo sapiens
aaggagcgagaagaacgaagaagccagacacgggggaagaagaaaaaaccaaaaacgccaagacagcaaggccacccccaaccaggaccaaagacga

SEQ ID NO: 224634 - RNA, 33 nt, Homo sapiens
accagcccgcagcacaggaggggacccaaccag

SEQ ID NO: 224635 - RNA, 36 nt, Homo sapiens
gaccagcccacccggcgaggcagcggcggagaaacc

SEQ ID NO: 224636 - RNA, 79 nt, Homo sapiens
accgacagggacaccaccgaaccccagcccaagccgcgcccggaaaagccaggaagaaagaaccggaacggagaagaaa

SEQ ID NO: 224637 - RNA, 72 nt, Homo sapiens
cgaaccggcaaccaccaccaggagccagcacgaggaccgacagcacgaggaggagagaagaaaagcggcccg

SEQ ID NO: 224638 - RNA, 58 nt, Homo sapiens
ggcgggcccgcgggaccaaggggggacagggcgacaggagaaagagcaaaaaaccaaa

SEQ ID NO: 224639 - RNA, 36 nt, Homo sapiens
cgcaccacacaacagcagccaaaccggcgcaagcag

SEQ ID NO: 224640 - RNA, 77 nt, Homo sapiens
aacaagcagggcacgagacgggccggcccagggagaacgcaaaaccaccacccccacaaaaaacgcagggagaaaag

SEQ ID NO: 224641 - RNA, 88 nt, Homo sapiens
gagaccaggacgagaacagggagaggcgacccgacccccagggcccgggccaggacagagaccagcagcgagagcaaagaagacgaag

SEQ ID NO: 224642 - RNA, 77 nt, Homo sapiens
gaacaggagccgacgacccggaccaagaaggggaggcccgcggcagggcgaacgggccaggcccaggacaggccaca

SEQ ID NO: 224643 - RNA, 56 nt, Homo sapiens
aaggacaacgaccacaggaacggaaaaaacagccaaaacaagcagaagcaagaaga

SEQ ID NO: 224644 - RNA, 52 nt, Homo sapiens
cgggaccagcaagccgagaaagggaggcggaacagggaaacccagacgacaa

SEQ ID NO: 224645 - RNA, 85 nt, Homo sapiens
ccagcacacgggcaggaaaaaaaagaacaaaggacaccacgcagaggggaaagagggaccagcgcagcagaagcagggagacggc

SEQ ID NO: 224646 - RNA, 82 nt, Homo sapiens
accgccgcagcggcgcagcccacgccagacgaccccacccgcgccgcgacccgccgcacaaacacgcagaggcaagaagaga

SEQ ID NO: 224647 - RNA, 71 nt, Homo sapiens
cgaaaaccacggaaagacagaccaggccgggccggggaacacgggaccgcgcacagaaagcccagacaacc

SEQ ID NO: 224648 - RNA, 73 nt, Homo sapiens
aggaagcaacggaagcgcagcaacagcaagccccgggcaggaagaagccaagcaaacagagcgccagaggccg

SEQ ID NO: 224649 - RNA, 80 nt, Homo sapiens
caaagacacggaccaagaagccaacaggagaaacgaggaggaagagaaggaccgaacacagaagaaggaacgcagagaaa

SEQ ID NO: 224650 - RNA, 65 nt, Homo sapiens
gcaaggagccaccagcacggaccaggaggcgagcaacagggcccgagggcaggacagcaggcacc

SEQ ID NO: 224651 - RNA, 70 nt, Homo sapiens
gcacaagcaaagcggaaacaagaagcacggggccggaggaaaccagaggcacacccagaagccacaggag

SEQ ID NO: 224652 - RNA, 76 nt, Homo sapiens
ccgcgagcccacaagccgcagcgcaccaagcaagggggcgaccggacaacaccccaagagcagcaacccagcaccc

SEQ ID NO: 224653 - RNA, 79 nt, Homo sapiens
caagaccccagaggaccagaacagaccaagacacgacacagcccgaacgcaggacagacacaccagaggaagaggcgaa

SEQ ID NO: 224654 - RNA, 72 nt, Homo sapiens
cgacagaagagcgccagaccaacaggaagcagaacccaaagaagcgaagcagaaaggacagagcaaaaaagc

SEQ ID NO: 224655 - RNA, 76 nt, Homo sapiens
cacccccgccggcggccacacgccacgccaccagcggcaagcacgccaaccaccggagaaaagaaaaagccaggaa

SEQ ID NO: 224656 - RNA, 81 nt, Homo sapiens
gagaaaccacgcggagaacaggcaggaacaacccacaaagggcagccagaacaggggccgaacacagaccccaaacaccaa

SEQ ID NO: 224657 - RNA, 77 nt, Homo sapiens
gaaaagggagggggaacagagggcaagaggacgccacaaacacccaccacagcagagaccccccagggagagccgcc

SEQ ID NO: 224658 - RNA, 66 nt, Homo sapiens
cagcaacagcggccgggaacgaccgaaacaccagcaagccccagccaagacccaccaggcagggga

SEQ ID NO: 224659 - RNA, 81 nt, Homo sapiens
ggagagaagccgggagcgagcccaggcggcaggagagccaggaggggccagagagaaacaagaagaacacaagcccgcgca

SEQ ID NO: 224660 - RNA, 81 nt, Homo sapiens
aagcgcagggaaaaaacggcggcccacgcaacacgcaccgagcacgaaagcaagagaacaaagcacgaacaacgacgaagc

SEQ ID NO: 224661 - RNA, 75 nt, Homo sapiens
gagacagaggcccacgcacgaagaccaaagggacagagaggggacaacgagccggaagggaggaggggagcacca

SEQ ID NO: 224662 - RNA, 78 nt, Homo sapiens
acgccgaccagcgacacgcggccgcggagaccaccgcggcgcggcagcgcgcccgagcccccaaaacacaagaggacg

SEQ ID NO: 224663 - RNA, 77 nt, Homo sapiens
ggggcggaggcgccaccacacagagaggcccggaggggccgcaagacgcgaggagagcaaacgccagccgcgagggg

SEQ ID NO: 224664 - RNA, 79 nt, Homo sapiens
ggggcgcagcagccccgaggagggacgccgcccgccaggcccggacgaagagaaaaaccaccgcacagcgcgagaagag

SEQ ID NO: 224665 - RNA, 75 nt, Homo sapiens
agaacacgagaaaagaagaagaacaagcacagagacacaacccagagggagaaaacgggccggaggaaaagggcg

SEQ ID NO: 224666 - RNA, 74 nt, Homo sapiens
ggggcccggagcagagccagcaaggggcacgccgcgaaagaccgaggccccacgagcggacccccccccggaaa

SEQ ID NO: 224667 - RNA, 82 nt, Homo sapiens
gcccgccggacagaccaccgagggcgggaagggacggcccgccgccccggggcacgccaggcaaccaagacaacaagccaaa

SEQ ID NO: 224668 - RNA, 73 nt, Homo sapiens
cccgcaacgcccccggcccgcagcccccgccggccgcccaacaccgaacaccgcaggcacagaacgaaccaaa

SEQ ID NO: 224669 - RNA, 79 nt, Homo sapiens
ggccgcaggccaccgacacgagacaaccgggagccggggggaaaccacaccacccgccacagacagggaggaggacagc

SEQ ID NO: 224670 - RNA, 95 nt, Homo sapiens
ccgcccgggccagcggccgcgcacccccggccggaggcaccagcaagacgaccccgacgcaggccaggagccgcggacagaagccgagcacggcc

SEQ ID NO: 224671 - RNA, 63 nt, Homo sapiens
aaacaggacaaaggaagccaagcaggaggccaaaagcagacaggcaaaaacacacagaggaag

SEQ ID NO: 224672 - RNA, 86 nt, Homo sapiens
ccacggggagcccaggcacgcggaagaggaccagcaagacggcaggggcacaccaggcaaaagaagagaagagagacgaagaggac

SEQ ID NO: 224673 - RNA, 52 nt, Homo sapiens
ccaacaccacccacccaccacgaccaaacaccccacgcccaggccagaagag

SEQ ID NO: 224674 - RNA, 74 nt, Homo sapiens
agacgaggaagagcagagcagccagcagagcccgcagggagcagcggccacgcccggcaccgagcacagcaaac

SEQ ID NO: 224675 - RNA, 70 nt, Homo sapiens
caccaccaaggaacgccaagagccaccaacaggaagaggaccgaagaggggcgccggagaggagacgagc

SEQ ID NO: 224676 - RNA, 89 nt, Homo sapiens
agggcagggccggggaagcaccaaaggccggaggcaccacaacacggagaagaaaggccagaagcaaaacgcagagaaggaccaccgcc

SEQ ID NO: 224677 - RNA, 78 nt, Homo sapiens
aagacgcgacgcgggcccgagcagccgccccgccggagggcagggacaaacagaggcagacaaaggagagaggcacca

SEQ ID NO: 224678 - RNA, 69 nt, Homo sapiens
ggcgagagccgggaagaaacaccaggaaacagaacgacagcccgcaccgacgccggcggccagccagag

SEQ ID NO: 224679 - RNA, 64 nt, Homo sapiens
acacagagccgggaagacgccgaagggcgggaggcacacaagaaagggcggaaccgggccggcg

SEQ ID NO: 224680 - RNA, 74 nt, Homo sapiens
aaaagcgcacaggccgcagaaaagagaggaacgggaacagaacaaacgggaaacaggaaccaagccagaaagga

SEQ ID NO: 224681 - RNA, 78 nt, Homo sapiens
agccagcagaagggagaaccaaaaggaaaagccgaaagaagaacagcagagaacacaacacaggacaagcaagcccag

SEQ ID NO: 224682 - RNA, 73 nt, Homo sapiens
cgcacccccgccccacccggcacccccaccggaggacacaagaaagacacccagcaccgaggcggacccgccg

SEQ ID NO: 224683 - RNA, 73 nt, Homo sapiens
ccaccgcccggcgcccgagaggccaccgcggcagaggcaaacgccccgcccaggggcacgggcacagcccaga

SEQ ID NO: 224684 - RNA, 69 nt, Homo sapiens
agccgaaccaccacacacaaaagcaccagaggccgccagacagcgcagacaagaaggagagcaagcaca

SEQ ID NO: 224685 - RNA, 73 nt, Homo sapiens
cagacaaaccgagccagacaacaggacggcggacacgcagccggaccaacacagggccacaaacagagagcag

SEQ ID NO: 224686 - RNA, 35 nt, Homo sapiens
ggaggagaccccccccagggaaccaggaaggaaac

SEQ ID NO: 224687 - RNA, 81 nt, Homo sapiens
cggggggagcccaggaacggccggaggacaggaaccaggcgaccgaaaggccggacaaaaagcggacagcggaagagagca

SEQ ID NO: 224688 - RNA, 77 nt, Homo sapiens
gcaaacaaaagacggcaaggacagccgaggaaacccccaaagagaaagaagaagaaaacgagacccaaaagggagaa

SEQ ID NO: 224689 - RNA, 67 nt, Homo sapiens
gggacccccgacgccaggcagcgcccccaaacgggcagagacaggcaacagacggcaacgaaaggca

SEQ ID NO: 224690 - RNA, 82 nt, Homo sapiens
cgaagcgagggcgaagcacgacacagaaggggaggggagggaaaggcccaggaaaaaggcacccccagcaggacagcacacc

SEQ ID NO: 224691 - RNA, 71 nt, Homo sapiens
gaagaccacgggagaaacaaagaccacaccagaaccagacccaaaagagcaaacaaccgacggagaaggaa

SEQ ID NO: 224692 - RNA, 78 nt, Homo sapiens
aaacaacacgggagccaagaaaaggagcgccccacagcaaggcgggcaggagggcgcacgcccacagacggggggcag

SEQ ID NO: 224693 - RNA, 52 nt, Homo sapiens
cgaaaaccggagagggacaccggccaggggagaagcagaccgcaccaggcgg

SEQ ID NO: 224694 - RNA, 74 nt, Homo sapiens
ccccggggcgcagagaagcgagccgcgacacccgagcagcaccccccagcaaccagcacgcaccccgcgccgcc

SEQ ID NO: 224695 - RNA, 76 nt, Homo sapiens
ggggcaggcacacaccaccagacgaagaccgagcggccagcacagcccaaccagaccgcaaaacgggacaagcccg

SEQ ID NO: 224696 - RNA, 74 nt, Homo sapiens
ccaggaccaccggaagccagaaaggccaagacccaggaaaagccgaagcaggagagaaacaacacaagaagaag

SEQ ID NO: 224697 - RNA, 76 nt, Homo sapiens
cgagggccacggccgagcagacacaacacaggggaagaccgggaggcaacgaggcaccaggccggacccagcaggg

SEQ ID NO: 224698 - RNA, 69 nt, Homo sapiens
ccacaccgggcgccccaggcgcaaaacccgagaaagggcaaccgacaggacaccccagggagagaccga

SEQ ID NO: 224699 - RNA, 77 nt, Homo sapiens
caaccgcgacccaaacacccaacgagacgggcaagcacacgagagaacaagaacacaaccagcagagaagaagagga

SEQ ID NO: 224700 - RNA, 73 nt, Homo sapiens
agaacagcgacaaggagagaagcgcggagccccaagggacgaggagaaggacgccaggaaaccggggaaaaac

SEQ ID NO: 224701 - RNA, 67 nt, Homo sapiens
ggaccaagaaccagaagaagcagcgcaccagaggccgccacagcccaccgaaaacagcagcaacacg

SEQ ID NO: 224702 - RNA, 81 nt, Homo sapiens
gggcagcgagacgaaaaacgacccgggcccgcccagagcccagaggcaggagggacaggagcccgcgacgcacagaaggcc

SEQ ID NO: 224703 - RNA, 72 nt, Homo sapiens
gcgccagacggacgaggcggcggagaacaagcggcaggaagaaagagggccacggacagaggcgcagcagag

SEQ ID NO: 224704 - RNA, 66 nt, Homo sapiens
gaagcagggacccaggagccaggaacaagacaacacacacgcaccagggcagaaaaagggagaaag

SEQ ID NO: 224705 - RNA, 75 nt, Homo sapiens
aaagcagacccaacaccggaggggaaagaaaaagagcccaccaaaaggaacagacggccccaggcggacaacgca

SEQ ID NO: 224706 - RNA, 86 nt, Homo sapiens
ccgcccagccccgagggcgggacaagaaacagcgcgaacgaagaacagacacgagaacaaagagaacagcagcagagccgggcggg

SEQ ID NO: 224707 - RNA, 86 nt, Homo sapiens
gaggagcagagcgaaacggaagagaaaaccgaaaaagcagaagcacaagccaaacggacccagagagggaccagggccaaagaaga

SEQ ID NO: 224708 - RNA, 68 nt, Homo sapiens
ggcagcagccccggcagggggcacgaaccacgcacaggagcggaggagggaagaacaggggccaggga

SEQ ID NO: 224709 - RNA, 67 nt, Homo sapiens
aaaggaaaagaaaagcacagggagcgacgcacccccaaggccaaccaagcagacgaagacagaagaa

SEQ ID NO: 224710 - RNA, 73 nt, Homo sapiens
ggaaaacagagcgaaacaagggacccaggggggcagcgcaagaccccgcacggaagcagcaagcacaggcagc

SEQ ID NO: 224711 - RNA, 77 nt, Homo sapiens
acgggaggggagcgcccagacacccccgaagcgacgggagagccccacacgcgacgacgggcaaggaggagccccgg

SEQ ID NO: 224712 - RNA, 84 nt, Homo sapiens
cccccacccggcaagccgaaaacggcgagaaggacccagcagccagcgaagccccaaggaagccgggacgcccacagacccagc

SEQ ID NO: 224713 - RNA, 69 nt, Homo sapiens
agagaagccccggccgggccggccagcgccggaaaccaacaaggcagagaaacagcccagaagagaaaa

SEQ ID NO: 224714 - RNA, 78 nt, Homo sapiens
aggcggcggcgaaacggcacaggacggaaaaggagaggacacaccccccagcaagaccagaagaaacagaagaacaaa

SEQ ID NO: 224715 - RNA, 71 nt, Homo sapiens
gaagaccgaggcagaaacacagaaacaacgcgaaaacacaggacaaaccggcgaccacacacggggacgac

SEQ ID NO: 224716 - RNA, 65 nt, Homo sapiens
cggaaacagaaaaggagcgcccgaaagaaagacaagccaacgaccaagagaaggcccaaaaacag

SEQ ID NO: 224717 - RNA, 65 nt, Homo sapiens
acaaggcagaagaacagagccggaccagcagaggacagagaagaaccaggaccgaggggaacgcc

SEQ ID NO: 224718 - RNA, 80 nt, Homo sapiens
agaggggccgggagcgcaacaggagccaacgcaacgcccagcacagagcgagaaaaaccaaagagcgaaggaagaacgga

SEQ ID NO: 224719 - RNA, 59 nt, Homo sapiens
agcagggaaaggagagcaccacacaagaaaaagccgagagaagaacagggaggaaaagg

SEQ ID NO: 224720 - RNA, 65 nt, Homo sapiens
cacaagagacccaacaacgaccaaggaggagcggggaagaacacaagcagagaagcagccgccag

SEQ ID NO: 224721 - RNA, 67 nt, Homo sapiens
ccccacacaccgcagaaaaccccagaggccaccaaccaccagcgccacccaggcagggcagccccca

SEQ ID NO: 224722 - RNA, 74 nt, Homo sapiens
accacagacccacagcgaaagcaacagacaacgaagagaggaaagaagcggaaaggagggagcacacaacaagg

SEQ ID NO: 224723 - RNA, 82 nt, Homo sapiens
aaaaggccgagaagaacacaacaagacccacggacgacaggggagaaagcacggcaggggcaacagcccaacaaaaaggcaa

SEQ ID NO: 224724 - RNA, 83 nt, Homo sapiens
gggcccgcagcgcccgcaaccggggcgaacaggcggccgccaagacgggcggcagagaagagaagagcacagcgggaggaaag

SEQ ID NO: 224725 - RNA, 82 nt, Homo sapiens
gcgcaaggaggaggagacgcgcgcgggaaggcagcccgcacgaccagcgaaccgcccaagccccaaaagcacgcacgaaacc

SEQ ID NO: 224726 - RNA, 80 nt, Homo sapiens
cagaaagcagaggccagagcggagacagacgaaaccaggaaccgaagaagcgaagaaacagcggacaagacgaggaagag

SEQ ID NO: 224727 - RNA, 52 nt, Homo sapiens
aacgcaacgcgagagagggcacacaggggcgagaggaccacaggccaggcgg

SEQ ID NO: 224728 - RNA, 80 nt, Homo sapiens
gaggagacacaagacgggaaggcggcgggacacggacacccagcgggggggcggcagacacccgggcgggggggaggccg

SEQ ID NO: 224729 - RNA, 71 nt, Homo sapiens
aaaaccgaccagggcaacaccaaaaacaaaacgaaccaggacggcaagggccaagacaagcagcagagagg

SEQ ID NO: 224730 - RNA, 86 nt, Homo sapiens
ggccaaaacaggacagaaagaaggaaaaagcagaaagccagaggaagggagaagcaaggaggagggcggacagaaaagcccaggcc

SEQ ID NO: 224731 - RNA, 76 nt, Homo sapiens
gagcaaccccccaggacgggcggaggcggggggaccggcgggcgggaagaagacggcacgggacccccagcacagg

SEQ ID NO: 224732 - RNA, 83 nt, Homo sapiens
ccgcgccggagccggagaacggccaggcggccccgagcggaacggagaaagcgaggggacgaacagcggggacgccccagcag

SEQ ID NO: 224733 - RNA, 86 nt, Homo sapiens
acgcccccagaggaaacggcccacgggaccacagcagcagcaagccccgcagggagccggagcaggggccggaagcacagagagac

SEQ ID NO: 224734 - RNA, 60 nt, Homo sapiens
caacacaagacaacacacagaaaccccgggaggcccgagggcacgcaggcaccggacacc

SEQ ID NO: 224735 - RNA, 78 nt, Homo sapiens
ccgcagcaccagagaacaacggcccaagagcacagagaagaccaagggccgccagcggggccgccagccgcgggaggc

SEQ ID NO: 224736 - RNA, 76 nt, Homo sapiens
caaggaccagcggcccccacaccccccgagccggagcaccaaaaccaccccggggccgggaccggacccgggaacc

SEQ ID NO: 224737 - RNA, 55 nt, Homo sapiens
ggcgagagggcggcgaaggaggcagaggcacagcgcaggggacggaccccggcac

SEQ ID NO: 224738 - RNA, 54 nt, Homo sapiens
cgccgcaccagccgccacccgcccagccccccgccccccccgcagcgcgcagag

SEQ ID NO: 224739 - RNA, 70 nt, Homo sapiens
ggaaaggaacagcgagcggaccccgaccccgaggcgagacggaaaggaacccgcccacgccagcgaagcc

SEQ ID NO: 224740 - RNA, 77 nt, Homo sapiens
aggcacagcccgagaaaccgcagcacacacgcggggccggggagcccgggccagaccccccagacccagcccacccc

SEQ ID NO: 224741 - RNA, 72 nt, Homo sapiens
aagaccacggggcacaacaggggacccccgcagccgaagcaagccacacaaacccagagggaagagggcacc

SEQ ID NO: 224742 - RNA, 75 nt, Homo sapiens
gcagacaacaagcagacccgagacacggggcgagaaggcggcgcacaagggaaagggagcagcaccggccacacc

SEQ ID NO: 224743 - RNA, 104 nt, Homo sapiens
ccagggaagcggaagacacaacaggggagcagcccacacgcagagaccaggagaacaagcagccagggcggcaagaggcagcaagacacacagacagccacaga

SEQ ID NO: 224744 - RNA, 65 nt, Homo sapiens
acaccggaagcgggaaagggaacccacagcccccggagggccagagggcgggcgcacggacccag

SEQ ID NO: 224745 - RNA, 76 nt, Homo sapiens
gggcccaaaagggcgaggcccgcccgcccgaggagggagcccggcccgggggccgcaggaaaaaaggggcagacag

SEQ ID NO: 224746 - RNA, 86 nt, Homo sapiens
gggacccgcaggagccagaaccaccggcgccgccgggcagggaggggagccgggccaggaaagaaagacaaggcgaccgaaccaag

SEQ ID NO: 224747 - RNA, 79 nt, Homo sapiens
ccgcgccgccgaccccccggcgccgcgccggcggcggggcaaggaagcgcagaccccaagagaccggacaccagcgggc

SEQ ID NO: 224748 - RNA, 57 nt, Homo sapiens
acacccacgccacccggggggcgcacccccgggggacagacgggagacaacagggcc

SEQ ID NO: 224749 - RNA, 74 nt, Homo sapiens
ccgacgacagaagcgcccccggggagcgggggacagaggaggggaagcagggcagacgaagaaagacggggcca

SEQ ID NO: 224750 - RNA, 80 nt, Homo sapiens
cagcccaaacccagcaagagaagaaccaaccgggagccccccaagagacccaggggaagacccaaaggcagcaaaaacaa

SEQ ID NO: 224751 - RNA, 93 nt, Homo sapiens
agcagaggaggccagaagcagcagagaagaaaaacagaaccacacaaacggcggcagcgcgaagccagagggggcggaagcacggcacaaaca

SEQ ID NO: 224752 - RNA, 76 nt, Homo sapiens
cagccggacgagcagaaacagccaagcggcagaacacaccagaagaaaacccagcaagggagcggacacccaggcc

SEQ ID NO: 224753 - RNA, 83 nt, Homo sapiens
cggagagccagaaaccaggaaaaggcaccgggagagggaaacaaggcagcgggcagccgaggaagaagaaggcagcagaaaag

SEQ ID NO: 224754 - RNA, 76 nt, Homo sapiens
gggacaccgcggcggccgggccgggggcgccggaggagggcggcccgccggcgagaagcacaaggaccgaggaacc

SEQ ID NO: 224755 - RNA, 74 nt, Homo sapiens
gccgggcagagccccaaccaccaggaggaaagcccagaccgcaacagagaccaaggaaggggaagccaaggagg

SEQ ID NO: 224756 - RNA, 80 nt, Homo sapiens
gcccgggcccgaggaggcagccaagccaggccgccacgcggcgaaacacgccgcaccagggaggagagaaacgacacccc

SEQ ID NO: 224757 - RNA, 71 nt, Homo sapiens
gacgaccagcgggaggccagaggaaggagaaagcaaccagcgagagaaacgcgaggacggggcccaggaac

SEQ ID NO: 224758 - RNA, 74 nt, Homo sapiens
gccacaaccgccagacaaccggagccacgccccacgaccgccagaaaaacgaggccgggaaggaagcaccaacc

SEQ ID NO: 224759 - RNA, 77 nt, Homo sapiens
gggaaaagcaaaggggcaagcaaagcacagcaaggccagcagagcccaagggcgccagccaccacccagacgaccag

SEQ ID NO: 224760 - RNA, 54 nt, Homo sapiens
aaaagaaagagaagaagggagccccgacccacaaaaccccagaagacaggcagc

SEQ ID NO: 224761 - RNA, 79 nt, Homo sapiens
accggccccacgcacgacgagagggacagcacggaggagaagaaggaaacgaggagaggagagacgaggaagagaagaa

SEQ ID NO: 224762 - RNA, 57 nt, Homo sapiens
ggaacccggcaccgccccagagaggacggggacgggccccaggacgaggaagacaag

SEQ ID NO: 224763 - RNA, 83 nt, Homo sapiens
cgcagccgggcgccagaagaagcggaggacagcaggccccgcgccggggacagagcgaagaaccccccaagaagacgaaaccc

SEQ ID NO: 224764 - RNA, 41 nt, Homo sapiens
aacagcacacagacaacaggcaaaacagaggggaagacagc

SEQ ID NO: 224765 - RNA, 77 nt, Homo sapiens
ggcccagcacagccagcaccgcacgcccgcaagggaggacggaggccacaggacaagagggaccggaagcgcagcga

SEQ ID NO: 224766 - RNA, 68 nt, Homo sapiens
gacagggaaccgcagcggaccggaaaaagaaaaggggcgcagcagcacagacgaagaagggagcagca

SEQ ID NO: 224767 - RNA, 100 nt, Homo sapiens
ccgaaagaaacacaagacgaacgggagaacagcagcagcccacgaacagaaaggaaaggccaaagaagagacgaagcaaaggcgcccggagccccagaac

SEQ ID NO: 224768 - RNA, 58 nt, Homo sapiens
gcgagcgggcgacggcgcccggcaaggacaaggcgcgagccggcacgaaacaaaggag

SEQ ID NO: 224769 - RNA, 71 nt, Homo sapiens
cggaagaagaaagaagcagaaagaggagaaggagagcagacgcaaacaacgggaacgggaagggcacagga

SEQ ID NO: 224770 - RNA, 71 nt, Homo sapiens
gccagaggaaggaaagaaaagcaccaggaccaaacggaaaacgggccacaacacaacccccacaccagagg

SEQ ID NO: 224771 - RNA, 80 nt, Homo sapiens
cgcccccggccgagcgacggggagaagggccggagagcagagaccaaaacgggacaccaagcagaaacagcgagaaccaa

SEQ ID NO: 224772 - RNA, 76 nt, Homo sapiens
ccgagcgcagccagaacggaggaggagccgcagccaaaagggacaaccaccaccagcgagcaaaagaacaaagacc

SEQ ID NO: 224773 - RNA, 77 nt, Homo sapiens
gggagcccacacacaggaccgccccggacaggaggagaaggccgccaacagggggaagccaaaaagagacaagcacg

SEQ ID NO: 224774 - RNA, 68 nt, Homo sapiens
accgagcaccagaacaggagcccacccagcaggacagcagagggaaaaggaaaagacgaggagagaag

SEQ ID NO: 224775 - RNA, 65 nt, Homo sapiens
cagcaacggagaaaaacccaggaaggggaagcccgaaagagagacaaacaggaaacccgggagag

SEQ ID NO: 224776 - RNA, 76 nt, Homo sapiens
cgcgccccagagccacgaaggcaccgacgcacagcgaccaccaacagaccgaagaccccgccccccgaggcgcagc

SEQ ID NO: 224777 - RNA, 90 nt, Homo sapiens
cgggccgggccacggaaaccggaggaccagaggagggacacgcgaacagagcagagcacgcccagaaggccggaaaggagcacacccagc

SEQ ID NO: 224778 - RNA, 61 nt, Homo sapiens
ggcaagacggcacccagcacagcagcagccacccacgcacccgcggccaaaacacgacagg

SEQ ID NO: 224779 - RNA, 65 nt, Homo sapiens
gcacagggcgcaacaagagcgacaaacgcagcgagaacagcccccccaaaggaggcgcgacggcg

SEQ ID NO: 224780 - RNA, 78 nt, Homo sapiens
agccggcaggagagcgacaaaccaaggagggagaggcaaggaggggaagaagaccagaaggaaaaagcacaacaacca

SEQ ID NO: 224781 - RNA, 68 nt, Homo sapiens
cacgcaccagggcagccacagagaagcaagagcgcaggaccgaccgggccgggcaaggaagaagacca

SEQ ID NO: 224782 - RNA, 76 nt, Homo sapiens
gcgcggaagaagcaggaggcaagaaaggggaaccccggagaaaaggccaagaaggcagcagaaacaggaggcaaga

SEQ ID NO: 224783 - RNA, 69 nt, Homo sapiens
gccaaggccaaggagaaccccccaggcgcaggaccccaccgagcccaagacaaggagcgaggggcgaac

SEQ ID NO: 224784 - RNA, 88 nt, Homo sapiens
cgggacgcgagcggcgagccggagcgcggagcccggccccgcaccaggaggaggacgacagcacggccgcaggagggaagcgcacgga

SEQ ID NO: 224785 - RNA, 66 nt, Homo sapiens
agcagaacagaggggggaaagaggacacgggagcggccaccaagcggacccgccggggagagccca

SEQ ID NO: 224786 - RNA, 60 nt, Homo sapiens
aaacaaaaggagggggcgacagggggacccgaaaggaggcaggaagcagagaggcagcag

SEQ ID NO: 224787 - RNA, 86 nt, Homo sapiens
cgaccaagcacaaggacaagcaggaaaacggcgagaggacggagggggcccgacaaagcccccaagagagacgccagcaacccaga

SEQ ID NO: 224788 - RNA, 77 nt, Homo sapiens
gacgcagacggaacagcacgagcacgagcaggcccgcaagaccgaaagacccagagcaggacggacaccgaaccggc

SEQ ID NO: 224789 - RNA, 56 nt, Homo sapiens
gcgacgaggcacagcgcgcaagaagggagaaaaggggaaggaacaaaccaaagagc

SEQ ID NO: 224790 - RNA, 50 nt, Homo sapiens
cggaggccgaagccagaagagccgaggcagcagacggcagcccagccacg

SEQ ID NO: 224791 - RNA, 71 nt, Homo sapiens
agaaggaccaagaaccagccggccaccggaccaccccaagccacccccgcgggagcaacgccagccaccag

SEQ ID NO: 224792 - RNA, 87 nt, Homo sapiens
agcacaccaccgggccaccgcgcacagaggacacgcacagcacgacggagaccaagagggcggcgacggcggcgcgaggaccgaccg

SEQ ID NO: 224793 - RNA, 82 nt, Homo sapiens
gcgggcgcgagcagcggcccgggggaaggcgaacgaaggagggcgagggagcaaggacaccgcggagcacggaggacacgag

SEQ ID NO: 224794 - RNA, 84 nt, Homo sapiens
gagcccgcgcggcgcggagagagacaagagccgccagagcgcggccgccaagggaggcacccgagcagagcacagaagaagcgg

SEQ ID NO: 224795 - RNA, 70 nt, Homo sapiens
cgaaacaggaagcagaaaagagcaaccaaccagaacgaccgaagacaaaggcaaaaaaaacagcgaacac

SEQ ID NO: 224796 - RNA, 76 nt, Homo sapiens
gaagggaagccacccacaagacaacacgagagcccggagccgagcccgggaaggcggagccccgcaaacagccgcc

SEQ ID NO: 224797 - RNA, 91 nt, Homo sapiens
cggaacagcaggcccgagcccaccgcgccgggccccggacgccgcgcggaaaagggaccagaccccacaagaaaacacacaaccacaggcc

SEQ ID NO: 224798 - RNA, 62 nt, Homo sapiens
ccaggcgcggcgcggcgcggcgagggcgcaagaggcagacagacaggcgacgggcagccaac

SEQ ID NO: 224799 - RNA, 70 nt, Homo sapiens
cagacccccagccacgacgcagccaggagggcgggcccgggcccaggggccagccggggcacccacgggg

SEQ ID NO: 224800 - RNA, 83 nt, Homo sapiens
ccgaaggcgaggcgaaaccccaagcggccagcaacgggacccccagggcagcagcccacaaaagggaggggcaggacccagac

SEQ ID NO: 224801 - RNA, 104 nt, Homo sapiens
cgggacacaccccaggaaaaagacagcccgcagcacgaccagcaggaacggcaacagaggagaagaggaagaggaaaccagcaagaaggcagggggacagaagc

SEQ ID NO: 224802 - RNA, 72 nt, Homo sapiens
aggcggcgcgcgcggcgcgggacgcgcgcgggcacccacggagccccggggcggagacaaagacgaaacgaa

SEQ ID NO: 224803 - RNA, 63 nt, Homo sapiens
cggccaagaccagcgcgagggcccgggcaaggcccgacagggagcccacaggacaggcagaag

SEQ ID NO: 224804 - RNA, 84 nt, Homo sapiens
gcagaaggagcacgccgccgcagcggcagggaaggcgccagaaggggaccaaaagaacccagccaacccgcagagggaggggag

SEQ ID NO: 224805 - RNA, 70 nt, Homo sapiens
gcggggcagcgcgagccgggaaggggagaaaacgcaggccacaaagacaggaccaagaggaaaaaacaac

SEQ ID NO: 224806 - RNA, 65 nt, Homo sapiens
agaggaacagccacagggccagagaaccagagagcacagagaaagcgggaaacggccaaacagaa

SEQ ID NO: 224807 - RNA, 71 nt, Homo sapiens
acagggaggccagccggagaagcgagcagcgcaagccccagccaagacccaccaggcaggggaagaagaca

SEQ ID NO: 224808 - RNA, 71 nt, Homo sapiens
aggggggaaaaggcgggcacaggccgaccgcgcgcagacaagaagacagcaacacaaagccccggacaagg

SEQ ID NO: 224809 - RNA, 74 nt, Homo sapiens
gaaaaaggaaggccgccggacagcgcagagccaagacggagaaacaagcccggcccggcgaggaccccaaggcg

SEQ ID NO: 224810 - RNA, 83 nt, Homo sapiens
aggggaggggcggcagaagcggaagccaggggaagaaggaggccagggccgggcgcgagccgcagcaccagacacggcacccg

SEQ ID NO: 224811 - RNA, 71 nt, Homo sapiens
agaggcacaaaaggaaccgacgggggggaaaggaacaaacgcgaagagaaaacaaaggcagacggacagag

SEQ ID NO: 224812 - RNA, 73 nt, Homo sapiens
gaggggggagcggccaacccaagggccccagcccgggcccccaacgagagcgaagagcggcagaagggcggaa

SEQ ID NO: 224813 - RNA, 74 nt, Homo sapiens
ccaggggcacggggccgggggaagcaccagacccggaggagcagcaccccggcaggcagaccagccggccccca

SEQ ID NO: 224814 - RNA, 72 nt, Homo sapiens
cgcgccggcccacgcgcggccaaggcgccccaagcccccaccccggagcgagccgccaggccccaggcgggc

SEQ ID NO: 224815 - RNA, 84 nt, Homo sapiens
aaggcaagagaacagcagcgccgcccgccgacagccaggcccgggagaaagaaggagggggcagagcacggcaggcagaagggg

SEQ ID NO: 224816 - RNA, 85 nt, Homo sapiens
ggccgggcgggcgaggcgcagggcccccacaccgcgccgccaaggcaagggagggagagagcaaaaccagacggagcgccgcacc

SEQ ID NO: 224817 - RNA, 73 nt, Homo sapiens
gaacggcggggggacgccacacagcacaacacaacacgccccgaaggggggccgaacgccaacgaccagacga

SEQ ID NO: 224818 - RNA, 64 nt, Homo sapiens
ggacgcccacgaccccagcaggggaagaaggagagaaccaggagaccgaagcaaccaacaagcg

SEQ ID NO: 224819 - RNA, 82 nt, Homo sapiens
gcggccgagggcgggagggaacgggacagcggccaccaaaccaaccgcagagaggcccggagcacacaaggcgaaagaaaag

SEQ ID NO: 224820 - RNA, 75 nt, Homo sapiens
cgaaagaacggcaaagacggcaggcacaccgaagaccaaagccaagcaggaggccaggccagagggaccaacgaa

SEQ ID NO: 224821 - RNA, 61 nt, Homo sapiens
agaaaggaacgcaaacgaacgaacaccagcgaaaaaaaaggaagccaccaagagggggcag

SEQ ID NO: 224822 - RNA, 64 nt, Homo sapiens
agacacagcagcgaagcaaaaacagaccaagaaagacacgcccacgggagaagaaccaacaacg

SEQ ID NO: 224823 - RNA, 90 nt, Homo sapiens
gggccgaaacacaggcaggacggagccgcccagcacagggccccggaaacagagaaaaagcaacagggagacgcaagaaagaaggcgaag

SEQ ID NO: 224824 - RNA, 75 nt, Homo sapiens
agggcagacgagcggaggacacccaacccggcaagacagacggcgccaaaggacagaagaccaaaagagccagaa

SEQ ID NO: 224825 - RNA, 68 nt, Homo sapiens
aagcaaaacaagaggccaagaaaaaaagaaggaaggaaccggacaacacaaacgggaaacaaccagaa

SEQ ID NO: 224826 - RNA, 79 nt, Homo sapiens
cggacagcacccgggcccggggaggcagggagcccagaaagaagagaaaaagagagagaagccaccgcggagaacgcgc

SEQ ID NO: 224827 - RNA, 81 nt, Homo sapiens
gcgacggcgaccaagcccgcgcggggaggcccagcccgccgcagggccaccccgcggcccaccgccgccgccccgacccca

SEQ ID NO: 224828 - RNA, 65 nt, Homo sapiens
cacaaaaaagagacgacgacaacaggaaaagaaacacacgagcaaaggagcaaagacacagcaac

SEQ ID NO: 224829 - RNA, 68 nt, Homo sapiens
gacccccgagcgcagccagaacggaggaggagccgcagccaaaaggcggagcggaggcagacacacac

SEQ ID NO: 224830 - RNA, 77 nt, Homo sapiens
caacggccaaccggcaagaccagacgggaacgggagacaagcgcagcgagagcccaaaaggcagagcgaggagagaa

SEQ ID NO: 224831 - RNA, 69 nt, Homo sapiens
accaacgaggcgccacaagaaaaagaccagaaaacacgcagccgcaggggcccagcccacagaacccag

SEQ ID NO: 224832 - RNA, 81 nt, Homo sapiens
agaagacggggcccgggaccacaggccccggcccagaggaagcccgcagccgagcacagagcccagccgaccgaaagccag

SEQ ID NO: 224833 - RNA, 45 nt, Homo sapiens
aggagaaaaccgggcgcagcccccccggccacgcagggcggcaca

SEQ ID NO: 224834 - RNA, 80 nt, Homo sapiens
acccgcggcaacggcgccggcaggcacaacaaccaagaaaaacgggggccgccgccaagagcccgcgcgggacgcccaga

SEQ ID NO: 224835 - RNA, 75 nt, Homo sapiens
gacgaagcccccccaggcccaacgaagagacgacacaaggagacgaggggaagaggccgacaaccagcgggagaa

SEQ ID NO: 224836 - RNA, 64 nt, Homo sapiens
gagcgaacgaggggacggcccaccgaagagacaggggacaaggcccaggaggccaccagcacgg

SEQ ID NO: 224837 - RNA, 55 nt, Homo sapiens
ggcagcaggacaacgagccacggaggcggagagagagacggaacagagaagcaac

SEQ ID NO: 224838 - RNA, 46 nt, Homo sapiens
aagagggagaacgagaaggacagggcggcccgaaaaggcggagggg

SEQ ID NO: 224839 - RNA, 54 nt, Homo sapiens
gaaggaccaagaaccaggaacgaaagcggcacggagaagaaggaaaagaacggc

SEQ ID NO: 224840 - RNA, 70 nt, Homo sapiens
aaaccacgccagaaccgcaaagaagaacaccaagaaccaggacaccgaacacgggcacagacaccggccc

SEQ ID NO: 224841 - RNA, 61 nt, Homo sapiens
gccaccgcccgccacccgcgcgccgccgccgaggagaaaggagacagacccagcacggacc

SEQ ID NO: 224842 - RNA, 68 nt, Homo sapiens
cagaggagagaaccaaggccagacagaaaaaacgggacggcaaaacagaacaagacagaaaaaaaaca

SEQ ID NO: 224843 - RNA, 72 nt, Homo sapiens
gcgccgccggccgacggccggcgggcgggggccccgcgccgcggccgagcagcggcgggcaccccagcaccc

SEQ ID NO: 224844 - RNA, 71 nt, Homo sapiens
acaagaaaagccaacgccggggagacaaagaacagacaccccgaagaaccccaaagaaacccagagaccaa

SEQ ID NO: 224845 - RNA, 60 nt, Homo sapiens
gcgccagagcgagcgccccgcccagagaggaggcagagagccccgcgacgagagagacag

SEQ ID NO: 224846 - RNA, 108 nt, Homo sapiens
cccgagcagggggggggggaagccgcagcggaaagcaggagcacaggacaaagccggaggcagaagcaggaaaccagagggagagccggcgcaggcggaggagcgcaa

SEQ ID NO: 224847 - RNA, 81 nt, Homo sapiens
gcacagagcccagcgccgccccagccacagcccccgcgcccgccagcccaacagaaggcagaacgccaaccaggaaccgaa

SEQ ID NO: 224848 - RNA, 72 nt, Homo sapiens
gaagaaaagaagaaccacccaccagagaccaagccacagaacggcaaagaaggccaagcccaacaggggaca

SEQ ID NO: 224849 - RNA, 76 nt, Homo sapiens
acaaaccaacccagccagcaaacccagcagcgcaagcggcaggaccaacgcggaggcgcacaggaaggagcaacca

SEQ ID NO: 224850 - RNA, 84 nt, Homo sapiens
cgacaagccgcggcagccgcggaccaccgccgccagggaaacacacgaacgccggaggaggaggggacccgcgcgcgagacacg

SEQ ID NO: 224851 - RNA, 39 nt, Homo sapiens
aagcaaaggcgcagaggaaagaggcggggcaccaggccc

SEQ ID NO: 224852 - RNA, 72 nt, Homo sapiens
acggaaaaaaacagagccgagaaaggaagggcgggaccaacagggagccagaccccaaaggacccaacgcca

SEQ ID NO: 224853 - RNA, 60 nt, Homo sapiens
gccccgacgcccacgaggcagccagggaagggcccgagggaccgccaacaagcggcccgc

SEQ ID NO: 224854 - RNA, 72 nt, Homo sapiens
ggagacaaggcacagccggggaaaacccaagaaacacagcgaagagcgcgccggagcaaagggagacggcgc

SEQ ID NO: 224855 - RNA, 72 nt, Homo sapiens
accgcgcaggccgcccccagaaccgcccaaccgcacggcacccgaagacgagggagaccggaagcagaagac

SEQ ID NO: 224856 - RNA, 74 nt, Homo sapiens
cgaccacaacgccggcacgagcaggagaagaaaggaagagacgacagccagcaggcaggagcccgcccagaaca

SEQ ID NO: 224857 - RNA, 78 nt, Homo sapiens
gaggcgggacgcgaacacagagggaagagaaagcaaacgagcagggcaagagaacacaagacgacagaagaaaaccac

SEQ ID NO: 224858 - RNA, 77 nt, Homo sapiens
gaggaccgagagcagaaggcaggcaggggcagaaggcgacccagcgcagagcaaacagaaccacccagacagaggga

SEQ ID NO: 224859 - RNA, 79 nt, Homo sapiens
ccgggaacccgggccggacgcgccgcgccgaggggggccgggccccaacaacacacaggccagccagcagcagaagccg

SEQ ID NO: 224860 - RNA, 57 nt, Homo sapiens
aacgcacagaagaaacaacagagagccaccagaacgagaggacgaaagaggagagaa

SEQ ID NO: 224861 - RNA, 89 nt, Homo sapiens
ggagaacggcagggccgccaaccacaggccaggcagcgcgcagcagcaggcagcagagaccacacggcggcgcagacgccccccgcagc

SEQ ID NO: 224862 - RNA, 62 nt, Homo sapiens
ggccggaagagaacgcgcacagcggaagagagggcgaggcaggaagcgggagagaacacggg

SEQ ID NO: 224863 - RNA, 81 nt, Homo sapiens
ccgaaggcaaagaaccccaggaaagaccccaccaaggcgaggacaaacgggcgaaccagcgggaggaggcaaagccacgcc

SEQ ID NO: 224864 - RNA, 37 nt, Homo sapiens
caccaagcggccgcagaaagaagagagggagggaaac

SEQ ID NO: 224865 - RNA, 83 nt, Homo sapiens
cccagcacaagagccggggaagacagggaagccagacaggagggacaggcaagaaggaagaaggcagaggcgcagccaggggg

SEQ ID NO: 224866 - RNA, 82 nt, Homo sapiens
agacagaagaagcggaggccggcaaagccaaggcgcacgcgggacagagcacccgaagcgcccagccagcacgccacccccg

SEQ ID NO: 224867 - RNA, 67 nt, Homo sapiens
ggaaggcgcaggagcccggccaccacacccagcggaggagcggagaagggccccgcgcccgagggac

SEQ ID NO: 224868 - RNA, 79 nt, Homo sapiens
gaacccaccagcacgacaacgcccacaaggcaaaagcagaccggaaaacccaccggcaagaccacacccgaggggagcc

SEQ ID NO: 224869 - RNA, 85 nt, Homo sapiens
acaaggccgcgcccgcggagggggcaggccacaccccagcagggagcgcagccaggcgaccaggagcagggcaccagccgccaca

SEQ ID NO: 224870 - RNA, 66 nt, Homo sapiens
ggagcggcgcagcggcggcagcggagagcgagagaggggagcaggcggagagaccaaccaaagcgc

SEQ ID NO: 224871 - RNA, 45 nt, Homo sapiens
gaacaaccacggaacccggggggagaagaacggaacccagaagaa

SEQ ID NO: 224872 - RNA, 80 nt, Homo sapiens
cagacgcagggcgcccccgacagcccaagaagccagcagaggacgaaaagacgaagggaggcagaagcacggcccacaaa

SEQ ID NO: 224873 - RNA, 78 nt, Homo sapiens
cgagacagccagccgaccgagcgccccacacccacgcggggcaccgggacgaggcggaggcacaggaccagcccgacg

SEQ ID NO: 224874 - RNA, 61 nt, Homo sapiens
gccggaccggagacggggccaacagccaagggaagaagcagaagcaagcccagggcaagga

SEQ ID NO: 224875 - RNA, 69 nt, Homo sapiens
caagccaccgaccacaccgcccggggccgggcagcgagcccacacagagccaacacagggagcagggaa

SEQ ID NO: 224876 - RNA, 63 nt, Homo sapiens
gcccgcacgaacacagaaagagggcagcccaaaaaaggcacaaacaagaaggaggaaccaggc

SEQ ID NO: 224877 - RNA, 77 nt, Homo sapiens
cgaaccaccccggggcacgcgcacgccggcgccgcacacgggcgcagggggccgggacagaccggagcggggaggag

SEQ ID NO: 224878 - RNA, 50 nt, Homo sapiens
caccaggcgcgcgcccacgccggcagagggaagaaagcacgggaaaaggc

SEQ ID NO: 224879 - RNA, 79 nt, Homo sapiens
cagaggggaagcaagagggggagcgaagccagaccaccaacagcaaacagcgccccacgccccccagggaggaggaagc

SEQ ID NO: 224880 - RNA, 76 nt, Homo sapiens
gaccgcccgcgccggcaccggggcggccggccaaagccagggcccgacaagagaggcggagccacccccacaacgg

SEQ ID NO: 224881 - RNA, 77 nt, Homo sapiens
cccccgagcgcgcgcgcccagccgccgccgcgcggcccgggccgccgccgaggaaggcgggggagaaggagaggaac

SEQ ID NO: 224882 - RNA, 81 nt, Homo sapiens
gggccgcggagaaggaacccgagcagcccccggcccgggaggaaaaagcaccgggaggaaagagagccacacgaagaacac

SEQ ID NO: 224883 - RNA, 82 nt, Homo sapiens
cccagcggcccaggcgccgcggcgaggagcgagcgcgcgaggggcggccgaggcgccggagacccaggcccaaggaaaaaag

SEQ ID NO: 224884 - RNA, 80 nt, Homo sapiens
aagccccccccccgcagacggggccagacgggacccgaaccaggaacccggaggagcacgggcggacccggccccccaag

SEQ ID NO: 224885 - RNA, 76 nt, Homo sapiens
gaacagcgacaaggagagaagcgcggagccccaagcaggaccggcaagccgagcgacccggcggagcagggagaag

SEQ ID NO: 224886 - RNA, 65 nt, Homo sapiens
cccgcggacgccacagcgcggcgaccagacgaggggagacggacgggggagagaggccaaacgga

SEQ ID NO: 224887 - RNA, 75 nt, Homo sapiens
accgaggagcaagcacccgcagggggacccccagcgggcacggccaggcagaagccccagaggagcccgaaaccc

SEQ ID NO: 224888 - RNA, 82 nt, Homo sapiens
gcggcaccacggggacgcaaagggagcacccggaccaccccaagccagggagcgagccaacacaccacaaagcaacggaacc

SEQ ID NO: 224889 - RNA, 77 nt, Homo sapiens
agcgaagcgccgggaagaggagcaagcaagagcgcggaccggcaaagccggggggaagcaacggaagaaccccccaa

SEQ ID NO: 224890 - RNA, 73 nt, Homo sapiens
gaagagacaagaggcaccaaagcagccgcccccgcagccccgacaaggaaagcaggaccggcacgcgccggca

SEQ ID NO: 224891 - RNA, 82 nt, Homo sapiens
aacacacaaaacggaaacgaggcacaaagaaggaaaacgaagaggcggggacacgagaggacccagcggcaggcacgagcag

SEQ ID NO: 224892 - RNA, 51 nt, Homo sapiens
gacccgccggccgaagacggccggagcgagagcgagaacacggcaaaaacc

SEQ ID NO: 224893 - RNA, 34 nt, Homo sapiens
ccaccagccaggccacaagggggcaccaaagcgg

SEQ ID NO: 224894 - RNA, 65 nt, Homo sapiens
ggccggacggagggggaggccggcccgcggacccggccccagccgggcaggaagggggagcaaca

SEQ ID NO: 224895 - RNA, 72 nt, Homo sapiens
gcaaacagagcaccagcgcacacgccagcccgcgaagaggcgaaaccccgcccgaaggcggaccgacacgac

SEQ ID NO: 224896 - RNA, 76 nt, Homo sapiens
gcagacaagagcacaaaacagagagagcacacgccaaggaggccgcaggaccgaaagagccggcccaaaaggaaaa

SEQ ID NO: 224897 - RNA, 64 nt, Homo sapiens
agcaggaagacgcagaggaaacggcagcagaaccgaccgccccacaagcccggagagccgccgc

SEQ ID NO: 224898 - RNA, 83 nt, Homo sapiens
aagaacgaaaaccgaggagcagaaggcagagaaaagcaccagcaacaaggggcaggcgggaacgggccaagcagggaccaggc

SEQ ID NO: 224899 - RNA, 71 nt, Homo sapiens
cgcggcggacaccacaccccaaaagacaggcaagacagccgccacccaacgcaagggaggcagaaaggccc

SEQ ID NO: 224900 - RNA, 76 nt, Homo sapiens
gcacccccggccggaggcaccagcgacaaagcaaaacaggacaccagagaaaaggggacccaggaaccggaaaaga

SEQ ID NO: 224901 - RNA, 37 nt, Homo sapiens
ggagcggcgaagagcaaccagagacgggcaccggagc

SEQ ID NO: 224902 - RNA, 71 nt, Homo sapiens
aaccaaaccaaggggcaggcaaacaaaagaaggagagagccaacaacagcaaggcaagagacggacgagac

SEQ ID NO: 224903 - RNA, 54 nt, Homo sapiens
cggccgcagaacgggaccagccgcggacacacaaaagagggacaacacaagcca

SEQ ID NO: 224904 - RNA, 83 nt, Homo sapiens
gaaacagggagccaacccaggaaacgaacggcccgaccagaccacaggcacccaggaaaccagacacagggccagcccgcaca

SEQ ID NO: 224905 - RNA, 57 nt, Homo sapiens
aagaaagaacaggaccggcagcacagcagcaggaggccgagggggcgacccggaagg

SEQ ID NO: 224906 - RNA, 59 nt, Homo sapiens
cagccggaccggaccaacccaccacgcagcagacaaggggaacgaagcccagaagagag

SEQ ID NO: 224907 - RNA, 71 nt, Homo sapiens
cgacaggaggagacaggcgagagaggaggacacgaccgccacagcaaggaagggcgaagggaccgcagaaa

SEQ ID NO: 224908 - RNA, 67 nt, Homo sapiens
gggaggaaaaaacaggacacagaaggaggcaacaaaaggggacaacagagccgacacagccaagaag

SEQ ID NO: 224909 - RNA, 79 nt, Homo sapiens
aaagaagaccacacacgggaaacacaaaacgaaacaggccaggaggcagggaggaaggggggagggggaggagccgaac

SEQ ID NO: 224910 - RNA, 77 nt, Homo sapiens
aaaaaagcaaggcaggggccccaaaaccggaaaggacgcgaggacagaacccaagaaggcagaagccagccccgcag

SEQ ID NO: 224911 - RNA, 90 nt, Homo sapiens
gcccgggcccggcaggggagccgcccgcacagcggcccggggaaggaagcggagaacgcgggcaggaagaagagaagaccggacgagaga

SEQ ID NO: 224912 - RNA, 76 nt, Homo sapiens
cccacaagcggggagcggagaacaagccagggcacggagcaccgcaccaaaagccagaagagaggaggaaaaaacc

SEQ ID NO: 224913 - RNA, 75 nt, Homo sapiens
aagaagaacagccagaaaaaccagcagaaagggacgcaacaggagagagcgacgcaaaaacacagacaaagaggc

SEQ ID NO: 224914 - RNA, 75 nt, Homo sapiens
gcggcgggacgcgcgagccggccggggggaaggaagagagcgacaggacagaaggacacgagaagaggagcagga

SEQ ID NO: 224915 - RNA, 72 nt, Homo sapiens
caaagggcgcaggcgaagggcgaaagcagacaccaagcaaacagagcaccagagaggcaagcaaccccgggg

SEQ ID NO: 224916 - RNA, 74 nt, Homo sapiens
agaaaaacaccaggaacaaagcacgccagaccaggccaacgaagggggagcagcccacgccagcgacggccagc

SEQ ID NO: 224917 - RNA, 36 nt, Homo sapiens
acacggggccccaaagaagcaaggcggcagagggag

SEQ ID NO: 224918 - RNA, 64 nt, Homo sapiens
cccaccagccgccgaagcgaccccaacgagacaaagcggccaaggaaaaggaacagagagagca

SEQ ID NO: 224919 - RNA, 72 nt, Homo sapiens
agaaacagagaaggccacccacaggggccacagagaaagggaccggcagacacgaaagacccccgggccgcc

SEQ ID NO: 224920 - RNA, 81 nt, Homo sapiens
ggcgaggaaagcaggaggaggggcggcggcgggaagagagaaacaggcgccaaacgacagagaccccaccacgggccggcg

SEQ ID NO: 224921 - RNA, 65 nt, Homo sapiens
cgcgcgcgcccccaaccccgcaccacccgagccaaagagccgaggaaggacagggcgggaggggc

SEQ ID NO: 224922 - RNA, 38 nt, Homo sapiens
ccagaggaacacagccgagcaacagaagccaggcaagg

SEQ ID NO: 224923 - RNA, 83 nt, Homo sapiens
agaaaccaacacccaacagccaccaccaccaccagaggggaccccacaccacaaaccgaggaaagaagggacagcagaaaacg

SEQ ID NO: 224924 - RNA, 84 nt, Homo sapiens
cagacagacaagacaaaggcccggcgggacaccaggagaaagcagcgcagaacccaaaaaggcaacgcagaagaagaccgaccg

SEQ ID NO: 224925 - RNA, 73 nt, Homo sapiens
aacaagacacggagcaaggaggaaaacacacggaagaagacggcacgggacccccagcacaggcagcaggccg

SEQ ID NO: 224926 - RNA, 74 nt, Homo sapiens
gcacccgaagccggggaggccagcggaggccaacgaccccagccaccgaaaggagacacgcccgcgccagcggg

SEQ ID NO: 224927 - RNA, 72 nt, Homo sapiens
gaaacagacgagaaagaaggaaacggaaccaagaacaagcacgcaggagaaagaaccgagaacgcacacaaa

SEQ ID NO: 224928 - RNA, 56 nt, Homo sapiens
cgccaacgcaaggcacccgagaaccaggcagggccgcgcgaagcggcccccgaggc

SEQ ID NO: 224929 - RNA, 94 nt, Homo sapiens
agcgagcgagggggggcgcgccggaaaccggagcgcgcagcagaacagccagcaaagacaagagcagaccagcagccgcagcgcgacagccaaa

SEQ ID NO: 224930 - RNA, 62 nt, Homo sapiens
aggccaccacagaaacaaaagcaacaaagaggaagagaagcgaaggacgacagccaggggag

SEQ ID NO: 224931 - RNA, 73 nt, Homo sapiens
accaagccacaaaagacacgccacaaccgggcgcacccccgagagagccacggaagggcgccaaggagccacc

SEQ ID NO: 224932 - RNA, 58 nt, Homo sapiens
gcgaggcgcagaaaccccggacaaggcacgccagacggcccacccgggcaggagaggc

SEQ ID NO: 224933 - RNA, 73 nt, Homo sapiens
agaggcaacccaggagcacgaagggaagccaaggccaccaaaacaggcaaacgcgggagaaccaccacagacg

SEQ ID NO: 224934 - RNA, 76 nt, Homo sapiens
ccacgacccacgagacaggggcccaagaaaaagcaccggacggaaagaaccccgggagcgaagaagcggaacgaca

SEQ ID NO: 224935 - RNA, 43 nt, Homo sapiens
ccggggcacggccacgcacggccaggcagagcagcccaccagg

SEQ ID NO: 224936 - RNA, 89 nt, Homo sapiens
ggaagcccaccgacgaggacggaggacggagaggaccgcaccagcacgcccacccagagaacacgcccaggacgggacagaagccacga

SEQ ID NO: 224937 - RNA, 55 nt, Homo sapiens
cagagcaggaacgcagccggggacaccaaacagacaggagaaagagcgcccaaga

SEQ ID NO: 224938 - RNA, 57 nt, Homo sapiens
ggagccagagcggccggcccccagacagaccggaccaaaccagagacaaaaggcaca

SEQ ID NO: 224939 - RNA, 95 nt, Homo sapiens
agaacagagacaaacaacaacgggcaccgggccggagaagaggccagggcaggacagcagcccgcaacaggccggccagccccccacaaccaccg

SEQ ID NO: 224940 - RNA, 79 nt, Homo sapiens
caagaggacggcgccggcagccgagggagcccaggcggcaggagagcaaggggcaacgaaggagacacacggccaagcg

SEQ ID NO: 224941 - RNA, 73 nt, Homo sapiens
aggagcgaagaaaaaagcaccaaaaacccacaggggcacacagaaaggcaccagaaggcagaaggagcggaac

SEQ ID NO: 224942 - RNA, 76 nt, Homo sapiens
acggagccagcggacggcccgagaagagcgaccagaccaggacgacaaagagggggaaacaggaagagaacagaac

SEQ ID NO: 224943 - RNA, 83 nt, Homo sapiens
aagaaaagaagagagcgaggagcggcaggagcaagccaagaaagaaccgaagacagaaacgagcagacaaccgaacagaaggg

SEQ ID NO: 224944 - RNA, 86 nt, Homo sapiens
aagagcacagcagcccacaagcagggaggcggcgcaccaggagacaaagccacaaaaacaccagaaaaaccaagcagaaaaggagc

SEQ ID NO: 224945 - RNA, 81 nt, Homo sapiens
ggaaacggaggagcgcagggccagagccaggccgcccacagacgggggcccaaaacaccacccaggaggggggaccccagg

SEQ ID NO: 224946 - RNA, 88 nt, Homo sapiens
ggcgaagcggacgcagccgcgagcccggaggcggcgggaggaggcggcggccgcaggcaaggccagcaaggaggggggccgagccggc

SEQ ID NO: 224947 - RNA, 70 nt, Homo sapiens
caaaacccccagcccagaaggacacacaccaaaccgaagcacagagggaaggagaaggagacacagaagg

SEQ ID NO: 224948 - RNA, 75 nt, Homo sapiens
ggagccaggggcgggggccgaccccggaaccaggccccaacagacgacgccggccaccacacaggcccggacacc

SEQ ID NO: 224949 - RNA, 62 nt, Homo sapiens
agccccagaaagggcgacaggcaccaacacccgagaccaggagggaaccaaccagaccacgc

SEQ ID NO: 224950 - RNA, 81 nt, Homo sapiens
agacgcccgggaccgcaggccaggcagagcagcagcgcaggggaaggggagccgccaccaaaagcagacggaaaacccacg

SEQ ID NO: 224951 - RNA, 67 nt, Homo sapiens
cagaggaagacacacaaacggcgcggcagaaaaaccagcccggcgcagacacagcgagaagaggcca

SEQ ID NO: 224952 - RNA, 70 nt, Homo sapiens
cgagacagaaaggacccggccccccacgacagaaagaaaccacgaagaggaaaaggaacggagacaaaag

SEQ ID NO: 224953 - RNA, 49 nt, Homo sapiens
gccggggcagcccagcggccgcggaccagagcagaggggcccagacgag

SEQ ID NO: 224954 - RNA, 75 nt, Homo sapiens
gcccacgccgccagcaaggaggagacggcggcaacagaacagcacgggaaaaacagaaaagggaccaagcaccaa

SEQ ID NO: 224955 - RNA, 74 nt, Homo sapiens
aaacagcagacccaagagcagcggaaaagaccagcacagggcgcgccagaggacaccagacccaaggcgcaaga

SEQ ID NO: 224956 - RNA, 56 nt, Homo sapiens
cacgcagaacacaacaggaaaggccacgccagccgggcaggagcgaaagcaggcga

SEQ ID NO: 224957 - RNA, 80 nt, Homo sapiens
ccgccgcagcggcgcagcccacgccagacgaccccacccgcgccgcgacccggcgcacaagagcagggaccccaggcgcg

SEQ ID NO: 224958 - RNA, 48 nt, Homo sapiens
gcaagagggaaccaggggggcccagagagggccgaaccggaggacaag

SEQ ID NO: 224959 - RNA, 77 nt, Homo sapiens
aacccagaacagggccgggcggcccaagggaaaagcagcggccgcaagcagcagccgcccaaaacacaaaccaaaga

SEQ ID NO: 224960 - RNA, 79 nt, Homo sapiens
ggaccacacagccagaacagggacgccagccgcagaggaagacccggagaagagcacagggggcgacaagacaggaaga

SEQ ID NO: 224961 - RNA, 69 nt, Homo sapiens
ccaggagcaagcagcaggcacaaggcgagaagggaaggcaagagaccaccaggagcgaaagcgaacaac

SEQ ID NO: 224962 - RNA, 76 nt, Homo sapiens
aagcccagcaacaccacaggcacacccaacaggcaaaaggaaaggccgaaccccagaccagggacaaaggaaaaag

SEQ ID NO: 224963 - RNA, 74 nt, Homo sapiens
aggaaacacagaaagaccccaaggacacagagcacaagcccgcaaaagcagaccggaaaacccaccggcaagac

SEQ ID NO: 224964 - RNA, 61 nt, Homo sapiens
cacaaggcgggggagcaggaacacaccaagccgaccggaggaacaggagcaccacgagaga

SEQ ID NO: 224965 - RNA, 81 nt, Homo sapiens
acggaaccccaagccccacacagaggcacacaggaaaagaaccaaaaggcaacagcacacgagagcaacacaccaccacag

SEQ ID NO: 224966 - RNA, 49 nt, Homo sapiens
ggaccaagaaccaggccaggcgcgggccaccccacggggcaacaagggc

SEQ ID NO: 224967 - RNA, 81 nt, Homo sapiens
ccgacaacgggggggagggagagcggcccccccccggggggccgcggggaagcccccgcccgggaagcagagccccgggcc

SEQ ID NO: 224968 - RNA, 63 nt, Homo sapiens
gggagggccacaggaggcggcgggccccgcccgccgaagggaagagcaaggagcaaaccaaga

SEQ ID NO: 224969 - RNA, 70 nt, Homo sapiens
ggagccgcacagcacacacggagagagcgaagcaccgcgcagaccgaaaggcacacggagcgaaacccaa

SEQ ID NO: 224970 - RNA, 87 nt, Homo sapiens
cacccggagggaaacgggcaagaggccccagcccggaaaaggagagccaggacgccccaaggcccgcagggaggggagcgcacggcg

SEQ ID NO: 224971 - RNA, 82 nt, Homo sapiens
caccaggaaaaaggacgagcaggaaaaaggaccaggcacagagcgcaaagacagaccccaggagacagccagaccaccagag

SEQ ID NO: 224972 - RNA, 61 nt, Homo sapiens
cagaggcccccacaccagccacgaagacagccggagcagcacaaggaaaacgagagaaacg

SEQ ID NO: 224973 - RNA, 128 nt, Homo sapiens
aaaccccaggaagcggagaagcaaccaagacgcccccagggcacccccaagcagcccaccaagcccgcgcgaggccgcgcccccccgcccgagggggggcccaccaggagagcaagcgcccagggagc

SEQ ID NO: 224974 - RNA, 78 nt, Homo sapiens
agaagaaccaggccgggccagacacgacaccaccaccccaccccggggaaaggaggacaaaaggaaaaaaaaaaaggg

SEQ ID NO: 224975 - RNA, 64 nt, Homo sapiens
aacgaacaccacgcaccgcagccgcgagagaggcaagccggggcaaaggaagaccagaggagag

SEQ ID NO: 224976 - RNA, 71 nt, Homo sapiens
caagaaccaaaaacaccaccaaacccagaacagcacacaaaaaacaaggcacaggaagacgaaacgacaag

SEQ ID NO: 224977 - RNA, 74 nt, Homo sapiens
acgggccacaacacacgaccaccggagggggccccgggcccacaggcagccacacaaaggaacggaggggagcc

SEQ ID NO: 224978 - RNA, 85 nt, Homo sapiens
aaagaggaggggaggaggaggaggacagggaaaggagcggggagccccgcgccacaggacaaggaccaagaacaaaggagaagaa

SEQ ID NO: 224979 - RNA, 78 nt, Homo sapiens
aaggcgaggcacgaccccacccccgaggcccgaccgggagggaccaaaggacaaccggaccaagggaccccgggcgcc

SEQ ID NO: 224980 - RNA, 70 nt, Homo sapiens
cagagaccaaagagagacaaacaagaagcacgacagacgcacagggcaggaaacaggagagagcagccgg

SEQ ID NO: 224981 - RNA, 107 nt, Homo sapiens
acacacccggaacaaagcccggaagaagcccagcgagcggcgacagaaacccgagaaggcaagaccaggcacacacccaaaaaaaccagggaagccaacgacggaac

SEQ ID NO: 224982 - RNA, 63 nt, Homo sapiens
gcgaccgagaaaaaccgaaagagccaacaggcacaaagcagcagaaaaaaaaaccgacgcaga

SEQ ID NO: 224983 - RNA, 65 nt, Homo sapiens
aaagaagcgcagcggaggaaggcgaggacgccaagaggccgaggagaggcccccagacacgggaa

SEQ ID NO: 224984 - RNA, 100 nt, Homo sapiens
gccgcaccagccgcccaagccgcacagccgcggcggcagcagcaggagaggaaacgccaagagcgagcggacgaggagcccggaagagaccaggaagcag

SEQ ID NO: 224985 - RNA, 75 nt, Homo sapiens
aaagcgaaggaacccccagccgccaaccggacaaccccgcggaacagagaggcacccagacgccccacagccagc

SEQ ID NO: 224986 - RNA, 68 nt, Homo sapiens
gaaacaagacaccacaagggcacacagaggaaacaaaggacagcacacgcacgaagcaaaaaggagaa

SEQ ID NO: 224987 - RNA, 91 nt, Homo sapiens
aaaagacccggaaagaagagacacagaggagccacacccccagggggaagccagccaagcagacgaccgggaaggagggcaccgggcccag

SEQ ID NO: 224988 - RNA, 75 nt, Homo sapiens
ggccagcgggacaggagggcaggaagagcgcagcggggacaaggcgcggggaggcccagcccgccgcagggccac

SEQ ID NO: 224989 - RNA, 83 nt, Homo sapiens
ggagaccgggagcggcagaagacggcgacagccccgcgcagcagacccaacagaggaagccgcaagaaacgggacgacaggaa

SEQ ID NO: 224990 - RNA, 86 nt, Homo sapiens
cggccgggagcccgccgcgcggagcgcgaggaccaggaggagaccaggaagcagccgcacggcagccgccggggccgcggagcggg

SEQ ID NO: 224991 - RNA, 78 nt, Homo sapiens
agcccgggcacggggcggaggcacagagaccccaaagacaaaccaggacccagggagcagggccacaagaacaccgag

SEQ ID NO: 224992 - RNA, 61 nt, Homo sapiens
gagggacaccccaaaacaggagacccgaggaggaaggccccaagggagcaagggagcccgg

SEQ ID NO: 224993 - RNA, 67 nt, Homo sapiens
cgcggaagcgcagaagcaaccaaaaggaagacgggaacccggcgcaaggcaacagcgcacaacacag

SEQ ID NO: 224994 - RNA, 71 nt, Homo sapiens
ccaaaggcaacaacagcagggcacccaaacaacaaaccgagggacaaggaccgcccaccggacacaacacc

SEQ ID NO: 224995 - RNA, 73 nt, Homo sapiens
ccgcccccgcgcccgggcccgccccggccgcggccgggcccagcgcagaaggccagacacagaaccaggaaag

SEQ ID NO: 224996 - RNA, 77 nt, Homo sapiens
gagaacgcgagggaaggaggcagccagccagagagacagagcaaaaaaacgaagcccagaccagcagagaaaaaacc

SEQ ID NO: 224997 - RNA, 80 nt, Homo sapiens
cgaaggaccgacgcccggaaggcagcgggggcacagcgagggggcagaccccagcgccacgaacggcgccccaggcccac

SEQ ID NO: 224998 - RNA, 78 nt, Homo sapiens
cgcgagccgaggaggggcgcgaggagggacggaagaggcggaagggccgaaagcgaggaaaccgcagggcgaacacag

SEQ ID NO: 224999 - RNA, 62 nt, Homo sapiens
gacacaagaagagggcggagcggagacgggagaagaaaagaccacaaacgccagaagacaac

SEQ ID NO: 225000 - RNA, 80 nt, Homo sapiens
aaccccaggaaacggccaggaagaacgagacgccaaacaagaagaaggaaccacaacagagcgcagaaggagccagaagg

SEQ ID NO: 225001 - RNA, 76 nt, Homo sapiens
aaagagaagcccaaaacaccaggaaggaacagacagaggacaggaggaaaaccagggaccgagcagagaaccaacg

SEQ ID NO: 225002 - RNA, 60 nt, Homo sapiens
acgggcaggggcagcgcgagcacccggaagcaccagggggaaagcccaccgacacccaga

SEQ ID NO: 225003 - RNA, 64 nt, Homo sapiens
caggaacagacccgagcaaaggggccagacaagcgccccaagaggaaagcaggagaaaggagac

SEQ ID NO: 225004 - RNA, 53 nt, Homo sapiens
acagacggaagagaagaaacggagcaagagcagacggcaccaaacggcaagga

SEQ ID NO: 225005 - RNA, 51 nt, Homo sapiens
caggaagggagccccaaaggccgaaaaggaaaaccaagaagggaggggacg

SEQ ID NO: 225006 - RNA, 56 nt, Homo sapiens
cgaagaagcacgaaagccccacccgccgcagcaagcagagaaaagaacagggacac

SEQ ID NO: 225007 - RNA, 70 nt, Homo sapiens
caggcacccaggggccgccccaggacacgccggacccccccggagaaagcccgaacgcgggaagaacgaa

SEQ ID NO: 225008 - RNA, 47 nt, Homo sapiens
ggcaccacccccggccgcccccagagccaggcagcgagcgggagcag

SEQ ID NO: 225009 - RNA, 83 nt, Homo sapiens
cgggagccccgcgacgcgcccggcccggagcccccagcgcagcggccgcggccggggggggcacagagccccggaagacagcc

SEQ ID NO: 225010 - RNA, 85 nt, Homo sapiens
gacggaaccgggccagccgccaacacaccccaaaaagggaaagaagcggaaggcacaaagggaagaggaacaggaacacaaaaaa

SEQ ID NO: 225011 - RNA, 90 nt, Homo sapiens
cggcgagacgaggcgcagccaccaacgcgcacgggcgccacgcgcggcgcacacgggcgcgggccgaggagacgaagcccaccacaaaag

SEQ ID NO: 225012 - RNA, 73 nt, Homo sapiens
ggcagaaggggcacaggacaccgaccggaccgaaacgggccgggggaaccagaaaagaaagaacgccaagccg

SEQ ID NO: 225013 - RNA, 74 nt, Homo sapiens
gacccccggggagccagcgagcccccccgacacggccaagggacaggcccagaggcacaccacaggagcacaaa

SEQ ID NO: 225014 - RNA, 74 nt, Homo sapiens
gcccggacaggggccccagaggcaaagccgcagcgcaaaaccagcacagcacacaaggcggaccccaaacaacg

SEQ ID NO: 225015 - RNA, 66 nt, Homo sapiens
cggcgccggccgagaaggcagaggcgccgccacgaaacgcaccgccgaagcggcaggacaggggca

SEQ ID NO: 225016 - RNA, 81 nt, Homo sapiens
aagcaaaggaggcagggaccagccacccggaccggggccccccccccaaggcagcgagaagagacgccaacagaccgggga

SEQ ID NO: 225017 - RNA, 31 nt, Homo sapiens
aaagacaacaaggcaccgccaacgaacccgg

SEQ ID NO: 225018 - RNA, 80 nt, Homo sapiens
gcacaaccgaagacacgagaaggccccagccggcagacgccaacgagcccaggagacaggaagcaaccagagcaaacgcc

SEQ ID NO: 225019 - RNA, 32 nt, Homo sapiens
gcagggcgcccccgaggcacccaacacgcgcc

SEQ ID NO: 225020 - RNA, 83 nt, Homo sapiens
gcgggccggggcgcgcgggcggcgcgggccacaccagaggagccggaagagcaggaaccaagggggagcccaccagaaacccc

SEQ ID NO: 225021 - RNA, 72 nt, Homo sapiens
ggaggggacaaaaccccgaaaaaggcaccgaggagggcagcacaacaaaggccggccaagggaacaccccgc

SEQ ID NO: 225022 - RNA, 91 nt, Homo sapiens
gggccacaaggaaggcaacgggcccacggaggccggccccgaaggacagcccagagcaagcacacggaggcccgggagccagaccgggagc

SEQ ID NO: 225023 - RNA, 47 nt, Homo sapiens
ggaccaagaaccagggaacgaccacgggcggaagaaagggcccaaaa

SEQ ID NO: 225024 - RNA, 80 nt, Homo sapiens
ccgggagcgggacacagaccccgccccggacccgacagccgcagaggggcaggccagccggggaccggcccagggaaggc

SEQ ID NO: 225025 - RNA, 67 nt, Homo sapiens
gcgccgaaccaggaccggacccggacccaaaggccagcaaggggagagagacgcgggaaccgccagc

SEQ ID NO: 225026 - RNA, 55 nt, Homo sapiens
accccgccgagagcacaccccagacaccgccgacacacagacccaaagagaagac

SEQ ID NO: 225027 - RNA, 67 nt, Homo sapiens
acagagaaaaaggagcacacagcagaagaaccacgccgggagcgggaccagcaacacaccgcggaca

SEQ ID NO: 225028 - RNA, 85 nt, Homo sapiens
gccaccaaggcaagaagaacacccgcggacacgaggacacccccacacgagccccaaccccccagaccaaacacaccgccccaac

SEQ ID NO: 225029 - RNA, 56 nt, Homo sapiens
cagagccccgggcgccggggccgcgagggaccggggccagccaggggaacggggcg

SEQ ID NO: 225030 - RNA, 69 nt, Homo sapiens
caaaagccgaagagaagagacgacaagggcaagacaaggccaacacacagacccccagagcaaacgcgg

SEQ ID NO: 225031 - RNA, 79 nt, Homo sapiens
ccacacccggccggagcgccacaccaaggccaagaacgggcaccggcggcaaccccaacagagcggcaaacagggcaga

SEQ ID NO: 225032 - RNA, 59 nt, Homo sapiens
cggcggaacaaaccaggccgcagaaccggaaaaaggagggcagggacccaaaaaccgaa

SEQ ID NO: 225033 - RNA, 63 nt, Homo sapiens
aaagaccaacacaagaagagacagaaacaaacgggaggaccaggaagcgcgagaacaacgaag

SEQ ID NO: 225034 - RNA, 79 nt, Homo sapiens
agaggagggccccgccgagcccagcccccagaaaggaggacaacgggacccagaagaggacgaggagaaaaaaaagaca

SEQ ID NO: 225035 - RNA, 72 nt, Homo sapiens
aagaacaggagaaaacggaaaaaagggaagacaggcagcagaaggcgagaggacaagcaagcacaaacccag

SEQ ID NO: 225036 - RNA, 73 nt, Homo sapiens
cagcggcagagagaaaagcagaacaaagcagcaccagagccggggaaaaaaacacaaggaccaagcgccgcac

SEQ ID NO: 225037 - RNA, 72 nt, Homo sapiens
cagagggaggcgcagacgggagccgggagccggcaggacacgggacccaggccacgggccggggcccccacc

SEQ ID NO: 225038 - RNA, 78 nt, Homo sapiens
gaacccaagccaaaacacagcgaggagaaacagcaagggaagacagcaagaaaaaacgagaagacccccgcgcccccg

SEQ ID NO: 225039 - RNA, 74 nt, Homo sapiens
gcaggaagcgcggcgagcgagagggccgaggcagacaagggaaaggccgcgcaggggaccaccccagacggacc

SEQ ID NO: 225040 - RNA, 52 nt, Homo sapiens
caagccggacaggagcggaaaggaaagccccggggggagcccagcaaaagac

SEQ ID NO: 225041 - RNA, 75 nt, Homo sapiens
aaacagcaacaaggcaccagacacaccaaccaaggagacgcgacacgggaaagggccagagaggcagaagaccaa

SEQ ID NO: 225042 - RNA, 34 nt, Homo sapiens
aggaacaaagagagagaagcaccgggccacagaa

SEQ ID NO: 225043 - RNA, 84 nt, Homo sapiens
gagcgcccggccgaacccgcgaggaaaagcccagcggcccgccaggcccggcaccgccagggaggagagcggggcacgcgccca

SEQ ID NO: 225044 - RNA, 78 nt, Homo sapiens
agcaggcggagcacccgaaacagcaccaccgccgcccggagcacgcgcgaggagcagccggagcacggcgaaccccac

SEQ ID NO: 225045 - RNA, 79 nt, Homo sapiens
gacggcgggcgacgcgaggagagagcgacgaagccaacgccagcccccacccggccccaccccccgggaggggcaggac

SEQ ID NO: 225046 - RNA, 76 nt, Homo sapiens
ggggggcgggccggaggggagacgggaggcagacgcaaacagcagacggaagaccccacggcaaaaccacacccga

SEQ ID NO: 225047 - RNA, 64 nt, Homo sapiens
gacaaaccgaagcacagaagagcaaagagcaagcgagcaaggggcgaccaaaggggccccgcgg

SEQ ID NO: 225048 - RNA, 73 nt, Homo sapiens
cccccgaaggaacccagaccaagcacacagagagccaagaaaaggagggaaacaccccgccaagcaagggggg

SEQ ID NO: 225049 - RNA, 81 nt, Homo sapiens
ccgggggcacagacgcgccagcacgccgccgccaggcgaccccgcacacacacccaccagccacggcagcccagcggggac

SEQ ID NO: 225050 - RNA, 40 nt, Homo sapiens
ggaccgaagcacagacagcacgccaagaacccaaagcaag

SEQ ID NO: 225051 - RNA, 77 nt, Homo sapiens
aagaaacagcagccaaccaggcccgagacaaaaagaggcgagaacagagcgagaagacaagcagaagcccggccgca

SEQ ID NO: 225052 - RNA, 78 nt, Homo sapiens
gcacaagaaggagaagccggcgcagggcaagccaccaagcggcggcagacgggaaggcgggagcagcgagaagagcca

SEQ ID NO: 225053 - RNA, 78 nt, Homo sapiens
gccggccaacagccggaaggacagcccgcccccggcccgaaagcaccgcacaggacagccaccaggcccagacaccag

SEQ ID NO: 225054 - RNA, 67 nt, Homo sapiens
gcggacgggcgcccagccaggggccgcaaggccaggcgcgcagaggcacccaacggcacagacccca

SEQ ID NO: 225055 - RNA, 76 nt, Homo sapiens
cggaggggaaagccagccagagaccacggcgaacgccggggagagcgggcacaaaacaacgcagcagccagaggaa

SEQ ID NO: 225056 - RNA, 77 nt, Homo sapiens
cccagcggggcccagcgagccccgcagggacagaggcgagggcaggggcgccagaggcaccacagcgaacacaaccc

SEQ ID NO: 225057 - RNA, 76 nt, Homo sapiens
gccacaaaagccgggcaagcaaccacaacagagaaacaccaccaagaggggggacgcacaagagaaggagaggcac

SEQ ID NO: 225058 - RNA, 80 nt, Homo sapiens
aggagcggcggccaggccagacccgaaggccaggagacccgaccccaagacagcgcacgaaacacacaaagaaccaccac

SEQ ID NO: 225059 - RNA, 73 nt, Homo sapiens
gaagagccccagcacagagggaccgggagccgcaccaacgggcgcaagcagccccagacaagccaaaaacagc

SEQ ID NO: 225060 - RNA, 70 nt, Homo sapiens
gacgcgagagaaggacccacggcgcgcgaagccacgccaggaacagacccgacagggccaggccgaacga

SEQ ID NO: 225061 - RNA, 75 nt, Homo sapiens
cagacggaggggcgcaaagaaaccagaagaaggcccggaggcgcccgcgggccagcgcgccgacggggacgggac

SEQ ID NO: 225062 - RNA, 80 nt, Homo sapiens
gcggacccccaaaggcgaacaagcagagccacgggcccagccaccaccagagggagaaccgaagaacaggaggccagcag

SEQ ID NO: 225063 - RNA, 83 nt, Homo sapiens
agacacgccaagcagccagcccaggagaggaaagagcagagggagcagccgggacacagagacaagcgaaacgggaaccaaag

SEQ ID NO: 225064 - RNA, 54 nt, Homo sapiens
cgggagaggaagagcaagcggaacccgaacccgagggaacagaaccagaagaaa

SEQ ID NO: 225065 - RNA, 78 nt, Homo sapiens
gcgcccggggaaagccgggccccgagggcggaccgaggggaagggacaagaaaggaagaagacaccaaacgaaagagg

SEQ ID NO: 225066 - RNA, 58 nt, Homo sapiens
gacacccggacccaaaaaaggcgacggcggagacagaagagaggagagcccacaaacg

SEQ ID NO: 225067 - RNA, 75 nt, Homo sapiens
ggaggagcccgcccccagagaggggagccggcgaggacaaaaccgaaggagggccccgcgagaccggcgcggcgg

SEQ ID NO: 225068 - RNA, 71 nt, Homo sapiens
cggagagcagcacgaccccagcacagaaccagaagacaaaaacaaggccgcgcagacggagcgacggcaga

SEQ ID NO: 225069 - RNA, 60 nt, Homo sapiens
acagaaggcgaaacagaaggcggaggcagaacgaaagagggaccaagaaaggcccaggga

SEQ ID NO: 225070 - RNA, 80 nt, Homo sapiens
aacaaagccaaggaaaccccaacacagagccaagcgccaaacacacaccagagggagcaccgacggcaacacggaggggc

SEQ ID NO: 225071 - RNA, 75 nt, Homo sapiens
cgacccaacccaagggccaaagggccccccggcccccggcccccggaccccagggaagcggggggagacggacga

SEQ ID NO: 225072 - RNA, 73 nt, Homo sapiens
gagcagcggagaacacaggaaccggccacggcgcggcccgagccccaggagagccgaggacccacccccacaa

SEQ ID NO: 225073 - RNA, 37 nt, Homo sapiens
gccaacccacgccgaaagcagaagcggccagcccgaa

SEQ ID NO: 225074 - RNA, 74 nt, Homo sapiens
aacggcaagaaccccgcccaaccggaagaaacaaaccagggaccagacaggcaaaacaccagagaaaaaccaag

SEQ ID NO: 225075 - RNA, 75 nt, Homo sapiens
acacagggaccgagacgcggaacccgaggacagccgcacagagggcgcaagcaggcggaggcagggcggaccggc

SEQ ID NO: 225076 - RNA, 72 nt, Homo sapiens
caaccaaagcacaaaaaacaccgaagccagaagacggaaaaaacaggagagaaggaaccggacgacgaacac

SEQ ID NO: 225077 - RNA, 66 nt, Homo sapiens
aggggccagggaaaggagcagagagagagagcagaagcacaacacgaaaggagaagaggacgggag

SEQ ID NO: 225078 - RNA, 69 nt, Homo sapiens
gccacaaaggcccacacaggacagcgccggccacccaaagcacgggggcaacagaggcacacggggcgg

SEQ ID NO: 225079 - RNA, 81 nt, Homo sapiens
gccagcccggccaggccgccagagagcagcacaagcacccagcagcccagcccagacccaagggagaaaacccccaacacc

SEQ ID NO: 225080 - RNA, 71 nt, Homo sapiens
ggagaaggaccaagaaccaggacggggggaaacaaagagccgaaaagccggaaagagcaaccaggaacggg

SEQ ID NO: 225081 - RNA, 79 nt, Homo sapiens
ccgacggcacagcgcgacaaacaaccgcccgggagcgccgaaacaccagcggaagggacaaccaagaagccaaccaaaa

SEQ ID NO: 225082 - RNA, 66 nt, Homo sapiens
aaccggcaggcgcccggacacagaagaggacagaaacacaggcgggaaaggaaccggaacccaaag

SEQ ID NO: 225083 - RNA, 82 nt, Homo sapiens
accacgccgggcagaaggccgaaagagcacggacccggaaggagcccccacaccaaggagaaagcagccaccaggccccaac

SEQ ID NO: 225084 - RNA, 84 nt, Homo sapiens
gaggacagcgcacacagcaagcacgagagacccaaaggcaagggaacagccaagggggaagaaaaggagacgggggaagaggag

SEQ ID NO: 225085 - RNA, 95 nt, Homo sapiens
caacaccacccccgcccgggccgggggccgccgggacccggccaccagcaagccgcaacggggcggcacacaaggagcgaagggcagggagaacg

SEQ ID NO: 225086 - RNA, 82 nt, Homo sapiens
gcggagcaccgggaggcggcgggaggcgcgaggaggagccaagccaccagcaagaagcacaacaccgcccgcaggaggcagg

SEQ ID NO: 225087 - RNA, 83 nt, Homo sapiens
agaaagaaagaacgagaagaaggccgagaagagcagagagagcccagaggaggaaccaaccagaggcggggccaaagcacaga

SEQ ID NO: 225088 - RNA, 80 nt, Homo sapiens
gaagagagggcacggcgagcgagaagaaaacaagaagcgaaccaggcccgccgagcggcagggcggagaacggaaaagca

SEQ ID NO: 225089 - RNA, 76 nt, Homo sapiens
gaggaaccaaaaggaaagaaggggggccaggaaacgccaaaacaccagaaccaaccggggagggccccaaagccaa

SEQ ID NO: 225090 - RNA, 62 nt, Homo sapiens
cgcccggggacccagcgcaacaaccaagcagcagcgcacaccagagaagcgcacagcagggc

SEQ ID NO: 225091 - RNA, 55 nt, Homo sapiens
agcaggcaagaaccacagaacaacggcaggaagacaaagccacggccagacagag

SEQ ID NO: 225092 - RNA, 78 nt, Homo sapiens
gagaccaagacaaccaggcagaagaaaagaagccagggcccaggaaacccagcaagggacaggccggcggcacaaccc

SEQ ID NO: 225093 - RNA, 42 nt, Homo sapiens
caaaagaaagcgggacagcagaacgggaggagaaagcacagg

SEQ ID NO: 225094 - RNA, 55 nt, Homo sapiens
aagagcaaccaggagagagagagacacacacaagaaaaagaagcagcaaaaacaa

SEQ ID NO: 225095 - RNA, 57 nt, Homo sapiens
cgaacaagggaaggacaacagcaaggacagcaccaaggcaagaggaaaggcacagag

SEQ ID NO: 225096 - RNA, 78 nt, Homo sapiens
gccggggggggcggagggggagacggccgggagggcccgccagccgcgcccgagaagggaaagggaaggacccgaggg

SEQ ID NO: 225097 - RNA, 71 nt, Homo sapiens
ggaacggaaccgggacaaaagagaccgggaaaagcaccgccaggacagagaacagagagcaggacgagagc

SEQ ID NO: 225098 - RNA, 69 nt, Homo sapiens
cgggggaagaagcgggagaaagcacgccaaggcaaaggggccagggggcagcaaggcccaggggggaca

SEQ ID NO: 225099 - RNA, 109 nt, Homo sapiens
cgccgccgccccagccgcccgcggccgggagcggagccccgggaaaaacaaccaccagcgagcaaaaaggcaaagaccaagaccaccaagaagcgccccagcggcaaca

SEQ ID NO: 225100 - RNA, 72 nt, Homo sapiens
acgggggcgcaggcgaggagggcacggacggggaaggggcccacccccgccagacaccagcgggaggacaca

SEQ ID NO: 225101 - RNA, 74 nt, Homo sapiens
gcgccccagaacccccccgagacacagcacccaggccaggccaccaccgccgcccgaccaggcccggcccgacg

SEQ ID NO: 225102 - RNA, 85 nt, Homo sapiens
gaccgagaggcacgggaagcggcacccgcagaggaccaaccaagaagcgaagaaaagagaaagaaacagacaagcgagagagcag

SEQ ID NO: 225103 - RNA, 74 nt, Homo sapiens
caaacgaccgggcccggaccaggcacgcacaaaaagggaagaggaacagagcgccagaaaggggccagaaaggg

SEQ ID NO: 225104 - RNA, 70 nt, Homo sapiens
cgacgcaagggcaggaacgcacagaaggcccaagggcggcaaccggaaacaagaccgcgcacgggagcgc

SEQ ID NO: 225105 - RNA, 60 nt, Homo sapiens
gccagacaaggaggaccgcacgacagcggcccgcggaaaggacggagccgaagagacacg

SEQ ID NO: 225106 - RNA, 60 nt, Homo sapiens
cagcaagcgaagccgaaaaagcgcccgagacgggcccgccgaaaggagaggagccaagcc

SEQ ID NO: 225107 - RNA, 73 nt, Homo sapiens
gcccagcagccgggcaggacagggcgagagaggagaaaaacaacaccaggacacagaaggcgaaacagaaggc

SEQ ID NO: 225108 - RNA, 76 nt, Homo sapiens
ggcccgggcaagccaacacggccacaaggggcggacaggacaagccccagagagagcccgggagcacgggagagaa

SEQ ID NO: 225109 - RNA, 80 nt, Homo sapiens
agccaccacagcaccgaagccgggagagggccgagggggagggcagaacgacgaaagacggacaggacgagggagagggc

SEQ ID NO: 225110 - RNA, 65 nt, Homo sapiens
ccacgccggccaaccaggaccacgcccagcggcgccagagcaaagaaaaagaaggaagcacagca

SEQ ID NO: 225111 - RNA, 82 nt, Homo sapiens
gcgcaaacggaggcggaggaggacgccaggggacacgcccaccggacccgaaaagacccaggccgaacgaggcggggggccc

SEQ ID NO: 225112 - RNA, 57 nt, Homo sapiens
cccaagggggacaaacacccacagccagcaggccacccagggaagcgaagaaaaaac

SEQ ID NO: 225113 - RNA, 66 nt, Homo sapiens
agagccagcaggagggggaccacaggggaaccccaggagcgagccgaaaaccaaccccggaccaca

SEQ ID NO: 225114 - RNA, 54 nt, Homo sapiens
cacagggcgcccacggcaaagggggacagaagccagccaggcgcaagagagcac

SEQ ID NO: 225115 - RNA, 81 nt, Homo sapiens
aggagccgcgaggcaccgccccagccgcacccaagccccagcggggcccgcccgaagcgcgaaaagcagggccgacgggcc

SEQ ID NO: 225116 - RNA, 61 nt, Homo sapiens
cggcccgccacgaaaggagagggagagggaggagcgcggcaagacaaccacgaaaacgaag

SEQ ID NO: 225117 - RNA, 65 nt, Homo sapiens
aacaccacaccccaaaaggagagagagaccagaacacagcaagaagaaaagaagaaaaaaaggca

SEQ ID NO: 225118 - RNA, 77 nt, Homo sapiens
aaaggggcaaaaaccccggagcccgaccaggacccgagaacaagacacaggaagcccggggcggcgacggagcacga

SEQ ID NO: 225119 - RNA, 109 nt, Homo sapiens
gcagcgccccgcgagaaggaggagcccccgcccggcagccaccccacgggaaggaccccaacagggcgaccggcggcccacacacgggaacccacacacggaaaacagc

SEQ ID NO: 225120 - RNA, 78 nt, Homo sapiens
ccagaaccccaccagggccccagaaaccaggcacagagcggccgcggacccaaaccgcaccgcggaggaaccccacag

SEQ ID NO: 225121 - RNA, 69 nt, Homo sapiens
agaaggcccggacacagcaaaccgggccacagagacagaagagcagcacaggggaagagacagaaggca

SEQ ID NO: 225122 - RNA, 67 nt, Homo sapiens
gcagggagggaaggcaagagccaacccaaaaccaaagcacagaaagggccccccggacacaccacgc

SEQ ID NO: 225123 - RNA, 90 nt, Homo sapiens
gcagaagcagcccaagggcaagcacaagccaaaagagcccgcagagaacagcgcacgcggcccacgacaagagggggaggacgggacccg

SEQ ID NO: 225124 - RNA, 78 nt, Homo sapiens
ccgcccccaaggacaccccgcagcaccggcggggccgcccggagggacggggcccgggcgcaaggacagcccaaggag

SEQ ID NO: 225125 - RNA, 80 nt, Homo sapiens
gagaaaccgagcaacagacaaagcccggggcaacaggagaaaggggaggaagcccaaagaagcagcgaaggaagggagca

SEQ ID NO: 225126 - RNA, 55 nt, Homo sapiens
gcggcgcagcgagaggcggcggcggaggacaacggcaagcggagaagagcaaggc

SEQ ID NO: 225127 - RNA, 81 nt, Homo sapiens
gggcccaagacaagagcgcgcgggccccagggcagccaaccccgcggcaggcacggccaccggaacagccggagagcaccc

SEQ ID NO: 225128 - RNA, 39 nt, Homo sapiens
gcccggccaccacgcgcaacgccgcaccgcgaggaaccc

SEQ ID NO: 225129 - RNA, 56 nt, Homo sapiens
cgggaagaagacacagaaaacaggaaggaagacccacaagagaccacgcagagaca

SEQ ID NO: 225130 - RNA, 73 nt, Homo sapiens
acccggcgccagagccgggacacaaaagcaaccgagagggaaacaaccacgcgaaaaggagacacagcacaaa

SEQ ID NO: 225131 - RNA, 53 nt, Homo sapiens
agggcagggggcaaacaagccgaccggaaaaagaagcaccagggaccaaaaga

SEQ ID NO: 225132 - RNA, 56 nt, Homo sapiens
cagcagcccacggaaaaaaagacggaagcagcaaaagaccaaaccagccaaaacaa

SEQ ID NO: 225133 - RNA, 71 nt, Homo sapiens
cccggccgggccggccagcgccggaaaccaacaaaagcgaggaaacgaccaaaccccccaacagagaaagg

SEQ ID NO: 225134 - RNA, 78 nt, Homo sapiens
cccccgcaagaggacggcgccggcagccgacaacacagacaagaaaaaccaaaggacgcaaaaaagcacagaaccacg

SEQ ID NO: 225135 - RNA, 74 nt, Homo sapiens
cccagcaaagacagccgcaaaaacacagaagccgagaaagaacgcagcgcagcggacgcaaagacaagcagcca

SEQ ID NO: 225136 - RNA, 77 nt, Homo sapiens
ggcagaagaacaccggcggcggccagcccgacacagagaggaggacagccagaagaaagccacaggccgagagcaaa

SEQ ID NO: 225137 - RNA, 96 nt, Homo sapiens
aggcgggggcagaaggaccacgccgaggcccacgcaccccgggccgggcccgggaggagcaggggcagaggggagaacccagccgggaccaagcac

SEQ ID NO: 225138 - RNA, 79 nt, Homo sapiens
ggacagagaagccccggccgggccggccagcgccggaaaccaacaagaaaagacgagggaagaagaccgacaacaacca

SEQ ID NO: 225139 - RNA, 36 nt, Homo sapiens
gcaaaccacacaagccacaaggagaagagaaggagc

SEQ ID NO: 225140 - RNA, 36 nt, Homo sapiens
cggagggcgacggagggaggaagaagagagggcgaa

SEQ ID NO: 225141 - RNA, 76 nt, Homo sapiens
ccccccgcccacccgcaccgcaggacacccaacaccgggcaacagacaaaacagaggagaccagaccagaagcccc

SEQ ID NO: 225142 - RNA, 74 nt, Homo sapiens
cggccccagagaaaaacggcagagacagcgccagaaccacggcaaaaccggggaccacgggaaagcccccgcag

SEQ ID NO: 225143 - RNA, 85 nt, Homo sapiens
ggggcaccggcgacagcggccgccaaacgcggggggacggggccaagcaggagggaaagaaggaagaaccgccaaaaagagggaa

SEQ ID NO: 225144 - RNA, 81 nt, Homo sapiens
accccgacccagacaagaggcaggaagcagagaggcagcagaaaggcagcacaagcagccagagaccacccgagcagaagc

SEQ ID NO: 225145 - RNA, 70 nt, Homo sapiens
gacaaaagggccaaagaagggagagcacccaggggcaaagggacccaggccagcagcagccagcaggggg

SEQ ID NO: 225146 - RNA, 81 nt, Homo sapiens
aacaagccggcagagcaccgaaccccagaggccaagaaagccagcagacgagacgccccccggagccccaggccggaagcg

SEQ ID NO: 225147 - RNA, 77 nt, Homo sapiens
cagaagcaaaacaggacgacccgaggaacagagaaacaacgaacgagcaaggaagggccaaggcagaccccacaccg

SEQ ID NO: 225148 - RNA, 75 nt, Homo sapiens
ggggcgagccgcgcgggagaagccagggggggccgaagaagccagggggaggaaagcagacagacccaccaagag

SEQ ID NO: 225149 - RNA, 74 nt, Homo sapiens
aagcggccagagcagaggccgcgagacaggcccaggcagcgcagacgaaacagcgcgcagaagccaacagaccc

SEQ ID NO: 225150 - RNA, 75 nt, Homo sapiens
accaagcagcagaggagcacgaggacggggagcaagaacccaccaacaccccaaaaccgaagagacccagacacg

SEQ ID NO: 225151 - RNA, 72 nt, Homo sapiens
ccagccagaccgggaagaaacgaaggggggaggcccaggccaaaagagcgaccagccagcgcaaccacaaac

SEQ ID NO: 225152 - RNA, 93 nt, Homo sapiens
gagaagaaggcgcccggacggaggaggaggggggcgaggaaacgcaagcacagcagacccggcgaagaaaccacgcaagaagcaagaggaaca

SEQ ID NO: 225153 - RNA, 66 nt, Homo sapiens
aggcacaacaggcgccgggacccagccaaccagccaagaccaagaagcaagagccagccagagaac

SEQ ID NO: 225154 - RNA, 54 nt, Homo sapiens
gcaggagcagcgaggaaacaggcggcaccgcagagccggcccgccgacccccgg

SEQ ID NO: 225155 - RNA, 57 nt, Homo sapiens
cgacaggacaaagccacaaggggcacgcccgagacaaagacgccgaaaaacaccaac

SEQ ID NO: 225156 - RNA, 72 nt, Homo sapiens
cgccaccacacacggaagccagacaggaagggaaggggcggagacgggcggaacgcaggaggccagaggaca

SEQ ID NO: 225157 - RNA, 67 nt, Homo sapiens
gagaggcaaagcggggaggaacacagcaagagcaacccccgggcacggagagggagcgcgcgaaaac

SEQ ID NO: 225158 - RNA, 79 nt, Homo sapiens
ggcaggcaggaaaacgggagaacacgacaccggcgaggaacggcagcacaaaaagaaacccgaaaacccagggagaaga

SEQ ID NO: 225159 - RNA, 79 nt, Homo sapiens
cccaccccgccggagcccacacagaccgccccccaggaccacaggcgaacaagaaaaacgaccgacagaccagcaacaa

SEQ ID NO: 225160 - RNA, 79 nt, Homo sapiens
ccgcccgggagcgagcggaggagcaggcgccggaggcacgggcaggagacaaccagaggaggaccaggaacgcagaccc

SEQ ID NO: 225161 - RNA, 72 nt, Homo sapiens
gccaaaggcaacacacaacggaccgaaaaacacagaagccacccacacagaaagccagggccggagggagaa

SEQ ID NO: 225162 - RNA, 73 nt, Homo sapiens
ggagagccacaaaaaaggaagcgaaacggaagccgcagaaggaccggccagaagcaagccggagaacagaaag

SEQ ID NO: 225163 - RNA, 85 nt, Homo sapiens
aagaggaaacgagcacaggaccacaaacagcaacacagaacgcaagaaggcaaaaggccaaaacggaagaacccccgcaacagcc

SEQ ID NO: 225164 - RNA, 84 nt, Homo sapiens
cagccccagcagcaacagcagcacagaccaacaagccacccacggcgccacccaaaagcacgggagcccccggccaggccgcac

SEQ ID NO: 225165 - RNA, 80 nt, Homo sapiens
ccggagggcccacgcagcgccggacaaaggaccacccgcacccaggggacgcacggcccaaccccgagcaaggacgccca

SEQ ID NO: 225166 - RNA, 52 nt, Homo sapiens
acagcagccgagagacacaacgacgagcaagcaagaaaaaggggcagaacag

SEQ ID NO: 225167 - RNA, 71 nt, Homo sapiens
gggaccgccaaccccccaagaagcagagcaaaggagcgcccgaagaacaaaaaggaaagcagacccagagg

SEQ ID NO: 225168 - RNA, 77 nt, Homo sapiens
gggagccgcgggcacgggcacccagcaggcggaagaccggccggagcagcgaggagacacaagagacggggcgccgg

SEQ ID NO: 225169 - RNA, 78 nt, Homo sapiens
ggagagaccggacccccggaaaggggcaacggcgagagcgagaaagaacgcagcgcagcggacgcaaagacaagcagc

SEQ ID NO: 225170 - RNA, 76 nt, Homo sapiens
acacagcgccgccccacgggggcagcgcaggacaacggcaggacggaaggcagaaagcggggccagagcgggcaaa

SEQ ID NO: 225171 - RNA, 74 nt, Homo sapiens
gacacaacgagggaccgggcacgaaacgcgcgcccccgaaggcggccaacggccagagaggacagagacgaggc

SEQ ID NO: 225172 - RNA, 51 nt, Homo sapiens
gcacaacccaccacaaagagagagaaagcccgcacccgaaagagcgaaagc

SEQ ID NO: 225173 - RNA, 54 nt, Homo sapiens
gccgggaaagggacaagaagggcaaagccgaagcaacagagggaaaagacaaac

SEQ ID NO: 225174 - RNA, 76 nt, Homo sapiens
gcaccgccgaccccaggcagccccgcacgagcggcaaccgaaagccagcagcggggggagcgggaagacccggaca

SEQ ID NO: 225175 - RNA, 87 nt, Homo sapiens
ccggccggcccggagcaccgagccgcggcacggaggagggggccgacgacgagccccgcgaggagcgcagcggagaggccagaacgc

SEQ ID NO: 225176 - RNA, 64 nt, Homo sapiens
caagacaacgaagccaccggcgggccccgacggcgacgaccaccaacaacaccagggacacaac

SEQ ID NO: 225177 - RNA, 50 nt, Homo sapiens
accaagaaccagacggcggggaaaaacgcaggaccaaaagaaggcaaaag

SEQ ID NO: 225178 - RNA, 82 nt, Homo sapiens
cggaccggccgagaggaagacgagccgggaggaacggcccggaaacaggaggacgccccgagagcagggaccgggccaagac

SEQ ID NO: 225179 - RNA, 77 nt, Homo sapiens
gaaaggagaaaacacccaaacggaaggacacagagccaacccagaagagccaagggagagaagcacaaggcgaccac

SEQ ID NO: 225180 - RNA, 89 nt, Homo sapiens
cggcgggacgggacggcggcccagcgagggcggcccggggcacccgcacgggaagcaggcccgccacagaggcggcaaagacccagaag

SEQ ID NO: 225181 - RNA, 81 nt, Homo sapiens
ccccgagcccgcggcggagccacccgcacacgcacccaggggcagccgcaagggaccagaggagcgagagcagcaagaacc

SEQ ID NO: 225182 - RNA, 85 nt, Homo sapiens
cgggcccacacaacccaggcaaccaacagggacgagaaggagcggccacagcggcggaagcgaggagccgccacacagcccggcc

SEQ ID NO: 225183 - RNA, 57 nt, Homo sapiens
gacccgcagcacaccgccacgagaccaccaagcaggaagagcccagcggcccaacac

SEQ ID NO: 225184 - RNA, 81 nt, Homo sapiens
ccagggcacacggcaccggacaagggcgccgaggggcgcaccagaacgcccgcgcacgagccagacccagggaagagccga

SEQ ID NO: 225185 - RNA, 75 nt, Homo sapiens
aaaagaaggaaacaagaaaaaacaaacgagccacagagacaggcggaggaaagagaagcgagaacggcaagaaag

SEQ ID NO: 225186 - RNA, 79 nt, Homo sapiens
cgggagaaagacgacggacagacgaagaggagggcagaggcacccaaagggagccccggggagacaaagagagaagcgg

SEQ ID NO: 225187 - RNA, 84 nt, Homo sapiens
cgagaccggaccgagagcggaccgagagcgcgaaacgcacgagaagccccacccggccgggaccacagcaagggccggaggccc

SEQ ID NO: 225188 - RNA, 75 nt, Homo sapiens
agaaaaaaaggcaacagacaaaagcacccagacaaaaaccggcaagagacaaaacacgacacagagaccgacaag

SEQ ID NO: 225189 - RNA, 60 nt, Homo sapiens
cagcagcggcaccaggagcacgccggagcggagcgcgccacagccgggacaaaagcagcg

SEQ ID NO: 225190 - RNA, 51 nt, Homo sapiens
aacacggaagccaaggacagaacaccaggccgaaagaggcacaaagcggcg

SEQ ID NO: 225191 - RNA, 83 nt, Homo sapiens
cgacggacgagaggacccccggacccaaggggccccggggaacggagcgcacggggcggacgcagagacgagaaaaccaagca

SEQ ID NO: 225192 - RNA, 92 nt, Homo sapiens
ggaagggcgccaccccggagaggcgcaagacaggggcagacagagaggcagagcccagcaaggggaaacaaaagcgcagaagagaagccaac

SEQ ID NO: 225193 - RNA, 86 nt, Homo sapiens
aagcaaacggaccagaccgaccaccaaaaaagagaagcgaaggacgacagccaggggaggacaccacggcaccggagcacgaagag

SEQ ID NO: 225194 - RNA, 53 nt, Homo sapiens
gccacggccaggcccaggagaggaaagaacccagggaccaagcgaaacgcaaa

SEQ ID NO: 225195 - RNA, 53 nt, Homo sapiens
cggaaagagcgacaaacaaagaaagacggacgaagaccgcaggaaagcaggaa

SEQ ID NO: 225196 - RNA, 72 nt, Homo sapiens
gaaggccgggcgcaacagaggggccgcgcgacagcggaagaggcgggggccggcacaaagggcccccaagaa

SEQ ID NO: 225197 - RNA, 69 nt, Homo sapiens
gacccaagagcagcggaaaagaccagcacaggacgcaggacgagcggcaagaagcaacgacgcagcaca

SEQ ID NO: 225198 - RNA, 105 nt, Homo sapiens
ccaacagaagccgcggcgaagagcaccgcagaggccggcaaggggccagaccacagcccgccaaaagacccccagaaggaggcagagcccgcaccggacgaggga

SEQ ID NO: 225199 - RNA, 76 nt, Homo sapiens
gaagacagaaaaggaagacacagacagaacaacaggagaagagaacggaaagggagcggccccaccaaacgacaca

SEQ ID NO: 225200 - RNA, 38 nt, Homo sapiens
aggcgaccggccacagccagaagcgcacagagcacgcg

SEQ ID NO: 225201 - RNA, 75 nt, Homo sapiens
ccgggagcagggaccgcggaggccacgggacgagggagaagcgaccggagagacccaggaggacacagcacggca

SEQ ID NO: 225202 - RNA, 78 nt, Homo sapiens
cagacaacggggggggcaaggcgggaggccgagggcgaggagggcccggcggacccgggccagaggagccgcgaacac

SEQ ID NO: 225203 - RNA, 82 nt, Homo sapiens
gggcacacacaacacagcaacagacagaaacaccagacagcgacagaccgcaacccaccaaggagcacaggacgaagaggaa

SEQ ID NO: 225204 - RNA, 91 nt, Homo sapiens
cccacgaagggaggaaaagggcagggacagcgcaggcagcagacgcaggagacaaccaacagagggacagacacagaaaggcgaagaaacg

SEQ ID NO: 225205 - RNA, 58 nt, Homo sapiens
cgcccggacagggaggcacaagaccccaaacgacacaagaccacagagaaaacccgcc

SEQ ID NO: 225206 - RNA, 51 nt, Homo sapiens
acggccgcccgagggaggcacgacaggcgggagccgaggagccaccacacc

SEQ ID NO: 225207 - RNA, 70 nt, Homo sapiens
cggcaagccaggccaaaggcgccaggaaggagacaacggcaagcggagaagagcaaggccgaaccgagag

SEQ ID NO: 225208 - RNA, 85 nt, Homo sapiens
cccagacccacgcccggcaccagcccgcccgaggaccccccagggggcccgagcccaccccagggaaggagaccgccaggccagg

SEQ ID NO: 225209 - RNA, 73 nt, Homo sapiens
cgagcagcaaaaacagacaagaaagaagacaagcggaagcgggaacgacagaaagccaaaaagagagaaaaac

SEQ ID NO: 225210 - RNA, 73 nt, Homo sapiens
cggcgcggcgcgcgcggaagcaagggaccgcaagcgggacgaacggacgaaagacggagcaaaagaaaaggac

SEQ ID NO: 225211 - RNA, 86 nt, Homo sapiens
ccaaacaaacaagcaccaagcgccaggccggcgaagagaccgaagacagaaagacacaaggcaccagcagaacagacacccccaaa

SEQ ID NO: 225212 - RNA, 76 nt, Homo sapiens
gaacggccgagccaggccccaagacaccaggggacccaccacacagaggacacaagaaccacacgagccaacaggc

SEQ ID NO: 225213 - RNA, 83 nt, Homo sapiens
aggcacgggcagagagcggacacaccagaaggagcccaccaccagggagacagacggcaggaggggacacggaacccaaggag

SEQ ID NO: 225214 - RNA, 82 nt, Homo sapiens
cagcaagggcgggccacggaagccaccgacaggcccgagggcccgagagcaccgcgccagacagagccggcagcgcccgagg

SEQ ID NO: 225215 - RNA, 83 nt, Homo sapiens
caaaaagaccaggggcgggaaacgcccgagacagcgacagacacagcaccggccccggcagcgggacgcaggacggcagccgg

SEQ ID NO: 225216 - RNA, 74 nt, Homo sapiens
acaaaaaagcaaggcaggggccccaaaaccggaaaggacgcgaggacagagagggaaagggcgggggcaagacc

SEQ ID NO: 225217 - RNA, 85 nt, Homo sapiens
ggcgagcggagccgcggggaccgcggacgcacgaaaaaggcgaagaagagcagagcagccgaagcggggacgacacgaggccacg

SEQ ID NO: 225218 - RNA, 103 nt, Homo sapiens
ccccaccccgaaccagggcgccgagggaaacccaggcgccgcggcccgggcgaaggaagcagccgacacgagcggcaaaaacagcgaaaggagagcacacccc

SEQ ID NO: 225219 - RNA, 69 nt, Homo sapiens
caaaccaaagaggcgacacggcaagagagcccaaggccgcaacaaaacgccaagggaccacggaacagc

SEQ ID NO: 225220 - RNA, 63 nt, Homo sapiens
cgaaagccggggaccgagagaaagagcggcaccaaggacccgagccccaaagacagaaaagcc

SEQ ID NO: 225221 - RNA, 78 nt, Homo sapiens
ccgaaacgaaccggcaggaccacgagccaaaacgggcgcagggggcgaaagcgagggcccagggccacccccggccag

SEQ ID NO: 225222 - RNA, 72 nt, Homo sapiens
cccaacgcacaggggaacaagacaccccccaccccagaaccccacacagacagaacgcgacggggacgacca

SEQ ID NO: 225223 - RNA, 81 nt, Homo sapiens
ggacggcggcccagcgagggcggcccggggcacccgcacgggaagcaggcccgccacagggcccgaaaacggccagcagcc

SEQ ID NO: 225224 - RNA, 71 nt, Homo sapiens
aacccaggcaaccaacagccaaagcacagcaaaccagggccaagggaagaagaacagaagaaaccgagacc

SEQ ID NO: 225225 - RNA, 70 nt, Homo sapiens
ggaacggggggagagaacccaaccagggggaaacacagaacgcaggaggcccccaagagaacccgggcag

SEQ ID NO: 225226 - RNA, 76 nt, Homo sapiens
agcaaagggcaaccagggaaacaggagagaaaacacgagccacgaagaccgcacaccacagaccccacaaagaagg

SEQ ID NO: 225227 - RNA, 70 nt, Homo sapiens
ggaagccgagagccagagagaaccagaggcaagccagcacaccgggcaaaccgacaccagcgacacaagc

SEQ ID NO: 225228 - RNA, 84 nt, Homo sapiens
ggacgcagagccaccagacacaaccaaccaggccaggaaacgggggcgcacaggaaacagaaaaaacagcaaagggagcaagac

SEQ ID NO: 225229 - RNA, 82 nt, Homo sapiens
cgagaacgccacgcgggccggcgaaagcgaccgacagaacaagcgcaaaaaaagaagagcagaaacgccaacaaaaagacca

SEQ ID NO: 225230 - RNA, 41 nt, Homo sapiens
gggaagccaacgaccacacgcagaagcccggggcggcgacg

SEQ ID NO: 225231 - RNA, 77 nt, Homo sapiens
ccaccaggcgcacaccagccgacgcccgccgcggccggggaacaggccacagccaggagcgcacacaggagcccgcg

SEQ ID NO: 225232 - RNA, 80 nt, Homo sapiens
acaccgcaagacggggcgggagccggcagccgacggcaaagggcgggggcaaagcggagaccgaaaaaagggacccaaga

SEQ ID NO: 225233 - RNA, 71 nt, Homo sapiens
acaggaagaaaagcaggagggcaaggagcggaacaagcggagcagccagccaaaacccaacagaaagcagg

SEQ ID NO: 225234 - RNA, 68 nt, Homo sapiens
ccacgaccgggaaacggagaagagccaaccgcaccgcgcagggcacagagcagaggacaccacaggaa

SEQ ID NO: 225235 - RNA, 79 nt, Homo sapiens
ggccgcaccagagcgcccggcccacgacacaggaagaagacagacagagcagaacccaggaaggaaaagaggccaagcg

SEQ ID NO: 225236 - RNA, 76 nt, Homo sapiens
cagcccccacgccgggcacaggaacaacccgggggccaccaggcccgaagcagcgaagcccggaccccacggcgga

SEQ ID NO: 225237 - RNA, 74 nt, Homo sapiens
cgggaaaaccgaaaggaagcgacaaagccgagcacaacacggaaggcggaaacgaaggaggcccaaccacaaaa

SEQ ID NO: 225238 - RNA, 80 nt, Homo sapiens
caaaggaccgaggccaacgagaagcacagcaagaacacacccagcgcggcaacgcgccaagacccgagccgcgagaaggg

SEQ ID NO: 225239 - RNA, 58 nt, Homo sapiens
agcgggaaagaaggcaaaacacggggcacacggcacggacagggcgggacgcagaacc

SEQ ID NO: 225240 - RNA, 54 nt, Homo sapiens
ccccgccaggcccaccaaggcggaggacccacaggagaggcacaggaccagacc

SEQ ID NO: 225241 - RNA, 66 nt, Homo sapiens
ggaacgggagaaagcacgggaggagaggagaagacaagggcgaagaggcgggccccaggcaccaga

SEQ ID NO: 225242 - RNA, 83 nt, Homo sapiens
agggaaagaaggagcagaagagaggcgggcggcccacgagaggccccggcaggcgaggggcaagacagaaaaggccgagcggg

SEQ ID NO: 225243 - RNA, 69 nt, Homo sapiens
ggaagaccccaaggggaagcgacgaggaagccaagcaggccggaaggggaaagggagagcaagggcaac

SEQ ID NO: 225244 - RNA, 71 nt, Homo sapiens
accgagcaaagagcgaaaccagagcaagcagggcaaaaggggagaggagccaagcccaacgggacgggaaa

SEQ ID NO: 225245 - RNA, 79 nt, Homo sapiens
gaaagcggacagacaaaccagaaggggaaacacgaccagaacggcagaaaaaaccagcaggccaggaacacaacccacc

SEQ ID NO: 225246 - RNA, 57 nt, Homo sapiens
caaacagaaggaaccaaagccgccaggagcaaggcagcgacccagggcacagcgggg

SEQ ID NO: 225247 - RNA, 79 nt, Homo sapiens
aggacaaaaccagaagcaggggcagcccaagagaacgaaagcaaaaagcgccgaccagccgcaaaaaacaaaaagaagc

SEQ ID NO: 225248 - RNA, 85 nt, Homo sapiens
gggagcagcgggcagccacggcgcgagaacacgagcgaagggaagggagagcgaaacgagaacccaggacaagaaacagcacgga

SEQ ID NO: 225249 - RNA, 77 nt, Homo sapiens
agcaaacaggacagggggggacaagcagaccaggagcagaaaaaggcagccgagcagaacgaagagggaagaacagc

SEQ ID NO: 225250 - RNA, 77 nt, Homo sapiens
cggccaagagggacggacggcgagcgggcaccgacacgacgcggggcaaaggagcagagaacgacaagccacacgag

SEQ ID NO: 225251 - RNA, 87 nt, Homo sapiens
ccgaacgcagggagcgccgcggagaggggccggcgcccggcggggacgcaggcaaaagcagaccggaaaacccaccggcaagaccac

SEQ ID NO: 225252 - RNA, 51 nt, Homo sapiens
aaaggccacgggaggaagacccaaaaggacgagaacccccgcgaaccagag

SEQ ID NO: 225253 - RNA, 80 nt, Homo sapiens
cgccgcagggacccaagccgagcagagaagacccaggaagaaggcacaccgagcaggggaccagccagcgcggaggaaga

SEQ ID NO: 225254 - RNA, 35 nt, Homo sapiens
cggcacaggagagagacacgagcgcagcaacaaac

SEQ ID NO: 225255 - RNA, 72 nt, Homo sapiens
cggaccggcgcccggacaacccgagggcggcgaaggcgcgccacggagccacccaagcggccgccacccgga

SEQ ID NO: 225256 - RNA, 84 nt, Homo sapiens
gcggccccggggcacagcgggcccggcagcgaccagcggccggcccagccgcgggcagggaagccgccgaggccgcgagcaggc

SEQ ID NO: 225257 - RNA, 72 nt, Homo sapiens
ccacacacgaagagaacacaagggaaagaccaagggccccagcggacgcaaaaccaaaaacgcaccaagcca

SEQ ID NO: 225258 - RNA, 72 nt, Homo sapiens
cgacaggcaagaagcagagcgcagaggacagaagagaaaccccacggaacaggcgcgagaccagacccacaa

SEQ ID NO: 225259 - RNA, 53 nt, Homo sapiens
acggaaagaacaccaaaagggccaagggaaacccagacgacaaggaaggccaa

SEQ ID NO: 225260 - RNA, 72 nt, Homo sapiens
cggacggagggggaaaggaagccaagaacaagcacaaagccacagcgaccaagaccgacagaacaagcgcaa

SEQ ID NO: 225261 - RNA, 74 nt, Homo sapiens
ccagccaccacgcggcgcacaacgcaggaacaccgcacgcgcggaggagagccgcgagaaggggccagcaaaga

SEQ ID NO: 225262 - RNA, 71 nt, Homo sapiens
caagccggaggagaagcaagaaggcccggacacagcaaaccgggccacagaaagagccagagaagcaagca

SEQ ID NO: 225263 - RNA, 72 nt, Homo sapiens
cccacgcgcgggcacgggacgggccaccagccccgaggaagagggaagcccccgaaggagaccagcgacgcg

SEQ ID NO: 225264 - RNA, 67 nt, Homo sapiens
cggccggccggagcgcggcaggacggcggagggcgcacaaaagagcacaaaagcaccaaggcgcaca

SEQ ID NO: 225265 - RNA, 78 nt, Homo sapiens
gagaggccccaaggacaccaaaacgcaccaggaccgcggcgaggggacaaacagccacagggcaggcggccagcgcgc

SEQ ID NO: 225266 - RNA, 57 nt, Homo sapiens
caaagaggaccgagacaaaccacggggcgaagaaaccacgaggagcacggcacccag

SEQ ID NO: 225267 - RNA, 91 nt, Homo sapiens
cggggaccaagccggggacaaggcgagccggagaccgagcccgaacagcagccggaaggggcgaccggaccgggagaagaaggcgccgagg

SEQ ID NO: 225268 - RNA, 65 nt, Homo sapiens
cgccccgcggcgggccgcgcccggccgggcccaacggccagccccaggcgcacccgacaacgaca

SEQ ID NO: 225269 - RNA, 78 nt, Homo sapiens
cggcgagacccggcggcggcgccccaggagcccgcccgcggggaccacggaagaagcggggggaaacccagccgaggg

SEQ ID NO: 225270 - RNA, 52 nt, Homo sapiens
acggacagacccacaacaccaggcgccagggcggcacaggacaacccaagga

SEQ ID NO: 225271 - RNA, 75 nt, Homo sapiens
ggaggaggcggggaccgggaccgggacggaccgggagggacagaacccaccagacaacacacgggaagagcaaga

SEQ ID NO: 225272 - RNA, 58 nt, Homo sapiens
cgagaccagccggccaaccggcagcagcggcccccggaggacacgcacccgaaacgaa

SEQ ID NO: 225273 - RNA, 82 nt, Homo sapiens
gcggccgggggcccagcccgggcggcgcggccagggcccacgagacgcgaacaaacgccgcgccgccagaagaacagaccgg

SEQ ID NO: 225274 - RNA, 78 nt, Homo sapiens
gaaaaccagagacgggagaggaagaacacaggaacgcacagcacgaagcagccacggccaccggagacgggagggcca

SEQ ID NO: 225275 - RNA, 66 nt, Homo sapiens
ccggcccacggccgacagacgcaggaagaaccggacccggcgaaccggaagggaccagacccagga

SEQ ID NO: 225276 - RNA, 81 nt, Homo sapiens
gagccgcaccaccaacgcggccgacaacagccggcgccgccacgggggaaagagcccgggagaggcccgcgccaccccggg

SEQ ID NO: 225277 - RNA, 82 nt, Homo sapiens
gggacagaaggcggccaggaccacgagaccgcagcccaacccaggccccccgggagccgcagggcgcgacgccccgcggcaa

SEQ ID NO: 225278 - RNA, 78 nt, Homo sapiens
agacgagaagccgaaaagcgcagcgagcggagccgccggagaacgggaggagggaagaaaagcgccgaccggaaaaca

SEQ ID NO: 225279 - RNA, 34 nt, Homo sapiens
ccacccccgccccccagaacccaggagaaacgag

SEQ ID NO: 225280 - RNA, 71 nt, Homo sapiens
cgccgaaacaccaaaagcgggggaagaagagaggacgaggacaaaggggaccaaggccagacgcagagcag

SEQ ID NO: 225281 - RNA, 54 nt, Homo sapiens
cccggcccggagcgccgcgggccgccgcggcgcaggaacagagaagacagcgag

SEQ ID NO: 225282 - RNA, 80 nt, Homo sapiens
cgaggcgagccagagccgcagcccacacgcaccagcccgaagaagccgggcagaccaggcagcagcggaaaggagcaggg

SEQ ID NO: 225283 - RNA, 79 nt, Homo sapiens
gccgggggccagagaccaaggcgcgcccggcgggccggaccaagcacacgccaaagaagagagcaaggaccacacccgg

SEQ ID NO: 225284 - RNA, 83 nt, Homo sapiens
caccgaagacggcaagcacggccacgccaagaacggcggccaaagcgccagacaagggccgagccccggagagccccccgcaa

SEQ ID NO: 225285 - RNA, 81 nt, Homo sapiens
ccgcgcaaaggccccggcaagaagggaaagaacgccggacaacagcggcgaagaaggcaaaccgaaggcccacagagaaga

SEQ ID NO: 225286 - RNA, 78 nt, Homo sapiens
ccggacaccggaagcgggaaagcgcacggggcaacagccacacccggagcacccaccaaacacagcaaacgcaggcag

SEQ ID NO: 225287 - RNA, 66 nt, Homo sapiens
cgaacacagccacagaaaaaaagagaacaaaaacgggacagaaaaggcgacggcggagacagaaga

SEQ ID NO: 225288 - RNA, 77 nt, Homo sapiens
gagcccgcgacaaagcaggcagacgcaaggcagaaaagagggaccaaggaccagagagcagaagcgccggaacccaa

SEQ ID NO: 225289 - RNA, 41 nt, Homo sapiens
cagaagaaagcaaaaggcccacccagaggaagccccaaggg

SEQ ID NO: 225290 - RNA, 103 nt, Homo sapiens
ccagacccggagcccagggaagcagccgaccagccgcggagccgggggcagagacccaaaggcaagggaacagccaagggggaagaaaaggagacgggggaag

SEQ ID NO: 225291 - RNA, 82 nt, Homo sapiens
ccagcagccccgcgacccagcgaggccggggaaggcaaggaccggggaccccacccacaggaaagcgcaggcaggagaagga

SEQ ID NO: 225292 - RNA, 65 nt, Homo sapiens
ggggaaaacagagaccggggaaccaccccacgacggagggcaaacaaggggaaggaggagggagg

SEQ ID NO: 225293 - RNA, 73 nt, Homo sapiens
gggacagaccccagagcccaggccaacagaaaccaccgccgacaggagagaaggcagaaacaaaaaagggaga

SEQ ID NO: 225294 - RNA, 81 nt, Homo sapiens
gcaggcagagagccagaagaacaaggaggacagagccaccaagcaggacacgggaagacacacaggacacagagaagggac

SEQ ID NO: 225295 - RNA, 74 nt, Homo sapiens
gacacaaaacccagacaccgacgggccgcgaggggaagaggaagcaaagccaagagcgcgcagagcgagaacga

SEQ ID NO: 225296 - RNA, 80 nt, Homo sapiens
ggacacgggcggagccagagcgcagaaacggagggcagcagggaccggcggacgccccacagcccacggccagggcacgg

SEQ ID NO: 225297 - RNA, 76 nt, Homo sapiens
cacagcacccgcagcgaccagcccgcagaccacccagcccccaggcccggaaacaaaaccagcggccacaggagca

SEQ ID NO: 225298 - RNA, 74 nt, Homo sapiens
ggcccggagcgcggcccgaggcccgcccagaggggaggggcgaccccggggcccggccagcacgaccgaggagg

SEQ ID NO: 225299 - RNA, 73 nt, Homo sapiens
gaaggccagagcacgagcacgggaagagacagcacaaccacagcccacaacacccaaaagacagacgacgagc

SEQ ID NO: 225300 - RNA, 50 nt, Homo sapiens
ggcagacaaaagggccaaagaagggagagaggagaacgcgccgccggccg

SEQ ID NO: 225301 - RNA, 34 nt, Homo sapiens
caggacccccaccagccagagagaggggcgccgg

SEQ ID NO: 225302 - RNA, 74 nt, Homo sapiens
ggagccaccagcagcggggggcgacccccagaagcggccgcgggagagcgggggcgggaggcgggccccggggg

SEQ ID NO: 225303 - RNA, 75 nt, Homo sapiens
cccacgaccccgacaggcaccggaagcaccaagccgaaaggaggaagcccgacccgggcaacccccacgccgcgc

SEQ ID NO: 225304 - RNA, 78 nt, Homo sapiens
gcaccagagcgacgggcaggaaggagggggcgcacaaacgagcagaaaagacaccagccagcgcagggagcggaaggg

SEQ ID NO: 225305 - RNA, 68 nt, Homo sapiens
cccgcggaggagcgcccggcacagggaacaccagaggcgggaccacgggcagcgcccagggagcagga

SEQ ID NO: 225306 - RNA, 57 nt, Homo sapiens
ccgccggaccaaccacgcccgggcgcaggcggggccggggagcccgggccagacccc

SEQ ID NO: 225307 - RNA, 77 nt, Homo sapiens
caggccacccgggaacggaggaggggaaagaccacagcaagaccacgcccccagccgggggaccaggccgaacgacc

SEQ ID NO: 225308 - RNA, 80 nt, Homo sapiens
gccgcaaccggcacagccgagcgccagccgaaagaaaccacccccagcagaaagcgggcagcccggagaacagggccagg

SEQ ID NO: 225309 - RNA, 77 nt, Homo sapiens
cgagaaaaacacgggcgccaggaacgcggaacagaaccaaaggcaggacagccagcaggaacagagggcgacccgaa

SEQ ID NO: 225310 - RNA, 80 nt, Homo sapiens
caaaaacaaaacgaaccaggacggcaagccggggggggcacagagccccggaagacagcccccagcgaccagacccaggg

SEQ ID NO: 225311 - RNA, 76 nt, Homo sapiens
gcagacaacggagcccgggagaggagacgccggaggagagaaggcaaccccaccggccaggcgacggcgcgggaca

SEQ ID NO: 225312 - RNA, 75 nt, Homo sapiens
gacggcacccacacaccagagggacggagccaggcccggggcacccggacggggcggacccaggcccgcgggccc

SEQ ID NO: 225313 - RNA, 56 nt, Homo sapiens
cacaaaccagaggaggacgccgaccgccgcgccacagagcacaccaaccccgggca

SEQ ID NO: 225314 - RNA, 74 nt, Homo sapiens
gcagaccgcagaaggccggagacaccagcagggcaacaaagaaacaagaacgagaagaagggggcacggcccca

SEQ ID NO: 225315 - RNA, 78 nt, Homo sapiens
caagggaaaaggcacacccaagaaggggaccagcggggcagagaccagaggagaagcgcccgggcaggccacgaacag

SEQ ID NO: 225316 - RNA, 70 nt, Homo sapiens
cgcggcaaacaggcggggaccggcgaggagcgaagaacaaacacccgagcgcgagacaggcagccagcga

SEQ ID NO: 225317 - RNA, 88 nt, Homo sapiens
ccaaacgggccgcgggccgagcgaggaggccgaggccgggaggccggcccggaggagagccggagaggaggaaggagaagcccgggag

SEQ ID NO: 225318 - RNA, 78 nt, Homo sapiens
gcaagcaggccgacagacagcagggacagacaagcaacggaagccccgggcccacccaggagggacaccaggccaaac

SEQ ID NO: 225319 - RNA, 62 nt, Homo sapiens
acaccaccccaagaggagaagcagcaagagaacggcgccacgggaagccccccgcacaccgg

SEQ ID NO: 225320 - RNA, 74 nt, Homo sapiens
ggggcaaaacagcacccccagagggagccagagcagcgcacaccaggccccaggcaggacaccccacgcggacc

SEQ ID NO: 225321 - RNA, 75 nt, Homo sapiens
gacaggcccaaccacccaaggccagagcagcgccaagcgagaacaagggagaggagcccggaagaaagacagggg

SEQ ID NO: 225322 - RNA, 72 nt, Homo sapiens
aaggacagcaagaggacggaagcaggcgaagcgagaacaggaaggggcgaggcagacgccaaacgcgaaagg

SEQ ID NO: 225323 - RNA, 52 nt, Homo sapiens
gagccggcaggccgagccacccccagaaaagggaccccaacagaaagagccc

SEQ ID NO: 225324 - RNA, 79 nt, Homo sapiens
gcccggcccccaaccgcgccagcggagcgaacccgagagcgggagcgggcgggccaggacagaaaagacccacggaaaa

SEQ ID NO: 225325 - RNA, 74 nt, Homo sapiens
aagaccaccacgcccagggccagggaacagccagggcagagaggcggaagcaaggaggaaaaagaaaacgaaga

SEQ ID NO: 225326 - RNA, 67 nt, Homo sapiens
gacggacaggcaggggagaggaacagacagaagaagaccgaaaccagccagggcgcacggagaaagc

SEQ ID NO: 225327 - RNA, 70 nt, Homo sapiens
gagcccgccggcccaaacgcggacacagcaacaagaacaaggccgcgcaccaggcgcagaacccaagcaa

SEQ ID NO: 225328 - RNA, 84 nt, Homo sapiens
gagacagccggaagcaaggcagaagaggccaaggccggaaaaagaacccccccgagaaacggcaaggaaggcgagggccagacc

SEQ ID NO: 225329 - RNA, 52 nt, Homo sapiens
aaaaagaagaaaagggccaaaaccaagcgcagggagcaggagaagcggagcg

SEQ ID NO: 225330 - RNA, 79 nt, Homo sapiens
agagccgcgggcgccggagccgaggcgagcgccgcgcgcaccacggggcaggagaggcggaggacaggagggagcgggc

SEQ ID NO: 225331 - RNA, 74 nt, Homo sapiens
aaagggcccgcccaagagcgacagccccagaagcaagagaggaaaacagaagcgggcggggcgaggaagagaca

SEQ ID NO: 225332 - RNA, 49 nt, Homo sapiens
ggagagcaaggaagaaagcagcccaggcagcgccaacgcaaacacagca

SEQ ID NO: 225333 - RNA, 71 nt, Homo sapiens
ggagaccccccaggacaacagcacacgcacccaagcgccaagaaggaggggcgacgcacccccagaaagag

SEQ ID NO: 225334 - RNA, 73 nt, Homo sapiens
ggaaccccccacagacagaagacccaccgggggagacgaggcagagcagggcccgagggcaggacagcaggca

SEQ ID NO: 225335 - RNA, 82 nt, Homo sapiens
caccccagcgcgcaccacccaacgccacgccgcgccgccgcccccacgccaggcagaagaaccgacgacagaaacggagggg

SEQ ID NO: 225336 - RNA, 86 nt, Homo sapiens
ggacagagcgccgcgaccccagcgggcccggggaggcaccgacgaggaggccgagaaacagacaacccacagaacaaagcggacca

SEQ ID NO: 225337 - RNA, 36 nt, Homo sapiens
ggacaccgaagccaaccgcgcccgaagacaacaaac

SEQ ID NO: 225338 - RNA, 78 nt, Homo sapiens
cgcaaagaagaagaaaacaaaggagaacaggaggacgcaggccaaacaaaacggaagcaagaccagagagcaaaggga

SEQ ID NO: 225339 - RNA, 72 nt, Homo sapiens
cagagggcccgcaggaaggacaccgaaggaggcaaccggaccccaaaaaccgagcaaaggccaagaaggggg

SEQ ID NO: 225340 - RNA, 77 nt, Homo sapiens
ggagcccagggaagcagccgaccagccgcggagccgggggcaggaaggagggccccggagcagccacaccaccgagg

SEQ ID NO: 225341 - RNA, 81 nt, Homo sapiens
cgggaccacaagacaacgcggagcggcgaagagcaaccaggaccaagaacgcccagcccgcgggcaccggcagaaaggagg

SEQ ID NO: 225342 - RNA, 83 nt, Homo sapiens
agaggcaaccaaaccaagccgaaggaaaggcagaacgccgaacaggagcaacaggcgaaaccagagaaagaaaacgggaacag

SEQ ID NO: 225343 - RNA, 98 nt, Homo sapiens
aggggccaggcgaagcacgagcagaccggcccgaccgcccacagacccaaacaaagggaaggaaggaacagagaagacccgcccccagcagggcacag

SEQ ID NO: 225344 - RNA, 71 nt, Homo sapiens
gggaacagcggcgagaccagaccaggacaaaggaagagccccacaacacgcaggaaccaacaggaggaaaa

SEQ ID NO: 225345 - RNA, 83 nt, Homo sapiens
gaggaagagcgaggggacaaagaggaagagcggcggaagcagccagggcagccggggacacagccaaggccgggagcccaagc

SEQ ID NO: 225346 - RNA, 72 nt, Homo sapiens
ccgccgccgccccgccagcgccagacggacgaggcggcggagaacaagcggcagaaagagcacgaggcgagc

SEQ ID NO: 225347 - RNA, 74 nt, Homo sapiens
aacgcacaggagaccaccaccccggcgccaccaccgacgagcgaagagcaagaggcgagggcgaaaaagagacc

SEQ ID NO: 225348 - RNA, 69 nt, Homo sapiens
acggggcgacgcagcaacgggaaccgaagccacgcaacaggggcaaacgcccagaaccccagccggcac

SEQ ID NO: 225349 - RNA, 80 nt, Homo sapiens
gaggccggcggggcgacaggccccaagacgcagagaagccaccagggggaaacaagaagaaaagaagcggggacgagggg

SEQ ID NO: 225350 - RNA, 79 nt, Homo sapiens
cggagccgcgcgcgcgccaggccccggaccgagcgcaaagggccccggggcggcggccgcgggcggagcgcgcggccgc

SEQ ID NO: 225351 - RNA, 75 nt, Homo sapiens
aaggcggaggaacgagacgcgaaccaggcaccggcccagagagcagggacacacgagggccggaaccaaacgaaa

SEQ ID NO: 225352 - RNA, 75 nt, Homo sapiens
ggggggagacggcaaccagggcaaccgggcccggaaggcaaggaagccgcaccgggcaacggcacccagacccga

SEQ ID NO: 225353 - RNA, 87 nt, Homo sapiens
cgcccaacacgacccagcagccagagagccaggaagaaccccacagacgaaaccggagggcagagagcgaggccccggggcccacaa

SEQ ID NO: 225354 - RNA, 83 nt, Homo sapiens
ggcgcaggcagccccagccggccgagacccacccaacagggggccagcagcccccccgagggcgcagcaacgaggggcccagg

SEQ ID NO: 225355 - RNA, 81 nt, Homo sapiens
gacgaagcgaccaacagccaaagcgggaggcaccgaaagcgaaggaagcccgcccccaaagccgaagccaaagcgaaggca

SEQ ID NO: 225356 - RNA, 71 nt, Homo sapiens
cgccgcgccgcgcgcgggagcgccagcaagggcgacccaccaacaggcaacccagacaaagaagagcagcc

SEQ ID NO: 225357 - RNA, 74 nt, Homo sapiens
ggaaagaccacaggaaggaccgagaaggcagcgccccagcaaaagaccgaagaacggcaaagagaaaagaagca

SEQ ID NO: 225358 - RNA, 87 nt, Homo sapiens
acaacagcagcggcccgcgcccgccgggccaccgcgcccgcccagccccgcccggcccaacgcagccaggcaagaagacccggagca

SEQ ID NO: 225359 - RNA, 65 nt, Homo sapiens
agcgacgagagagaccggagaggggagaggacccacccgaggacgggcaccaggcggagcaccgg

SEQ ID NO: 225360 - RNA, 72 nt, Homo sapiens
agcaaagagggcagcaggcccagaaacgcacacaagaagcccgacacgggaagagaagaggaggccacccga

SEQ ID NO: 225361 - RNA, 72 nt, Homo sapiens
gagccggccagcgcgccggagccgccgagcccacagaacaagcccaaccagcggacggaaaacagcgcccgg

SEQ ID NO: 225362 - RNA, 38 nt, Homo sapiens
ggagagcccacgcaggagaacaaacgccagaaccacca

SEQ ID NO: 225363 - RNA, 120 nt, Homo sapiens
ggaagagggagaagagggggaagaaaggagagggccggggaaggaggggaggaagaaaacgccggcgaggcgcagagcacaagaggaagaaacccccaaccagggggacagagaaggcgg

SEQ ID NO: 225364 - RNA, 58 nt, Homo sapiens
cgaaaacaggccggggccgaaaagccagaagaaaggcccggaaagaaaaagagcgcaa

SEQ ID NO: 225365 - RNA, 72 nt, Homo sapiens
acggaccagagacacgccaagcagccagcccaggagagaccgcgcgaaacgcccagaaaccaagaagcagca

SEQ ID NO: 225366 - RNA, 38 nt, Homo sapiens
ccagaaacacgcagcaaaaagaaagcagaccacacaga

SEQ ID NO: 225367 - RNA, 75 nt, Homo sapiens
cgcgcagggccgccaggggcgccgggcccgccgagaggggcccccgggaggagagaagcagaaccacgggaaaca

SEQ ID NO: 225368 - RNA, 75 nt, Homo sapiens
agacaaggaaagagccggaaaaggagcagaccggacgagggggaccgaaaaaaacccaagagacggaaaaaaagg

SEQ ID NO: 225369 - RNA, 69 nt, Homo sapiens
ccccccccccccccaagagacaaagccacaaggcaaagccaaggaacggcgaaggaccccaggcaacgg

SEQ ID NO: 225370 - RNA, 57 nt, Homo sapiens
gggcgcgaccgacggggcgcgcgcggggacaaagagggaaaaagacacagcaaagcc

SEQ ID NO: 225371 - RNA, 70 nt, Homo sapiens
ggacagagaagagagaagccaccagcaaaaggagaacggaaaaaacaaagcgaaacagcggggccaccca

SEQ ID NO: 225372 - RNA, 58 nt, Homo sapiens
gggaccaagaggcgacggcgagacaacaggcacaaagagagaaggaacacccacaggg

SEQ ID NO: 225373 - RNA, 72 nt, Homo sapiens
cccacagccccagggcccgaagcacggggacagaaggacaggccgccgcgaccccccccggacacaccgagg

SEQ ID NO: 225374 - RNA, 79 nt, Homo sapiens
cgcgacaggcccaaggggcccccgggcaccccggaccgcgcagccaccgcggcccccgcggaaagacagaacgcgggag

SEQ ID NO: 225375 - RNA, 76 nt, Homo sapiens
cggacagcaaaaacacagggcagaccccgcaaaaggcgaaaagccccaagaaagcccaggacgggccaagagagcc

SEQ ID NO: 225376 - RNA, 38 nt, Homo sapiens
gacaaaggagcggaggaaggaaacgcccgcagaagaag

SEQ ID NO: 225377 - RNA, 64 nt, Homo sapiens
aacccagcgcaaaggaagaggaagaagcagaccccacgagcgaaagggaaaaaacgaaggaggc

SEQ ID NO: 225378 - RNA, 48 nt, Homo sapiens
aaaccgcgaccaagacagccaaggacgacagagggggcagagacaaga

SEQ ID NO: 225379 - RNA, 108 nt, Homo sapiens
ggacaaccacaacagaaagcgacaacagccaagagggcgcccagagacaacgagagaacggcccaaaacgacagacgcgaaaggggacgacgaagaggaacagagagg

SEQ ID NO: 225380 - RNA, 75 nt, Homo sapiens
gcaggcaaagccggcgacccgcacagccgcaccccaacccccaggcccgacaggagcacaagacgaccagccggg

SEQ ID NO: 225381 - RNA, 81 nt, Homo sapiens
cacaagcgaaggcaaaaccaaacaccccagcccacagagagcaaaacacaagagagcagggaggagcggagccggagcgag

SEQ ID NO: 225382 - RNA, 108 nt, Homo sapiens
gaaacgaaagaaagacggaccaaaaacaggaggaagcccagggaacggcgaaacgaaggaggcccaaccacaaaaggagccgacggaacccagacggagaacaaaagg

SEQ ID NO: 225383 - RNA, 55 nt, Homo sapiens
gggagaccacaccaagcgggagacacaccacgccaagggacacccgagcgaaaca

SEQ ID NO: 225384 - RNA, 78 nt, Homo sapiens
cgcggcccaagccaaaggagaggcccacggcggcaggcggaggagaccgaaagacgaggccggaagccacaggagaaa

SEQ ID NO: 225385 - RNA, 63 nt, Homo sapiens
ggaaacccaaacaacacccgcaccgggcgccccgcagagccagaaacagagaggcagaccaca

SEQ ID NO: 225386 - RNA, 77 nt, Homo sapiens
aacaacggaaaaggagaagcaacacaagagaggacgcacacccaccccaaaacaacaagcaagcagaaaagagagga

SEQ ID NO: 225387 - RNA, 76 nt, Homo sapiens
ggcagggcacaaggaaaacgaagaccacgggccaaaccaacgcgcaaccgggcaggagacggggcccaagcaccca

SEQ ID NO: 225388 - RNA, 111 nt, Homo sapiens
cgggcggagcgggggcgcgcccgccgacccgcgcccgccccccagcaccgggcggacgagggagacggggggcggccccggacacgacccgaggacagcagagccccggac

SEQ ID NO: 225389 - RNA, 50 nt, Homo sapiens
aaaccaggacagcagcaacggagaaggggcacccgaggaggaagagggca

SEQ ID NO: 225390 - RNA, 73 nt, Homo sapiens
ccagaagggggaagccgcaaaccagcaaggcccaaaaaagcacagcaggaagcggcccagaggaaaggcgcag

SEQ ID NO: 225391 - RNA, 80 nt, Homo sapiens
gaacccgaccggacccagccccagaaggaaacgaaggcagcaaaaagaagagcagaaacgaaggaaaaggcgggaagagg

SEQ ID NO: 225392 - RNA, 74 nt, Homo sapiens
agcgccaagggcacgggaagaccggaggggacgaagaacgggcaacggaggcaggagcgccgacacaggagcag

SEQ ID NO: 225393 - RNA, 80 nt, Homo sapiens
gaggaagcaggggaaagcccgggccaagcgggaggcgccaggccacaagaggaagcgaagaagaggacgccgccagcgag

SEQ ID NO: 225394 - RNA, 77 nt, Homo sapiens
cgacgcggagagcaaggagaagagacaccaggccgcccagcgcggcccggacggccccagggcggccccgggggcaa

SEQ ID NO: 225395 - RNA, 73 nt, Homo sapiens
gacccgagcacgccagaggacacgaggaggggacggcccgccacaggcacagacgaggagggaagcgaagcgg

SEQ ID NO: 225396 - RNA, 72 nt, Homo sapiens
gcgcgagcggcccggcgcccgggaacaagggacaaaccaaagaccaaccaagaggccagagagcaacacccc

SEQ ID NO: 225397 - RNA, 90 nt, Homo sapiens
cggcggcggcgccgcggcggggcgacggccgcggggaccggagcgagaggagcgcgccggaccagcgcgaaagaacgggagagaggccaa

SEQ ID NO: 225398 - RNA, 81 nt, Homo sapiens
acaggagccccacgccacggagacgaggacgcgcacaggaaaggacgcggaacaagcaggcagccaggcagcagaaggcag

SEQ ID NO: 225399 - RNA, 71 nt, Homo sapiens
gggacaggacagcgagcgaggacgaggaacggcgggacagagagccgaaagccgggcaaggggaaagaagg

SEQ ID NO: 225400 - RNA, 80 nt, Homo sapiens
cggggaagcccggccgacacggccaacaggccccacgggaccagcccagaacaccgcgcagacagcaccagagcagcccc

SEQ ID NO: 225401 - RNA, 72 nt, Homo sapiens
gagacagggaagcaaagcgcaacagaaacagagagaaacggagaagagcccggaaaaagggaagaaggaaac

SEQ ID NO: 225402 - RNA, 58 nt, Homo sapiens
aaaacaaggccaaagacaagcagaagccagcccagccacaacagcccgagcaacacga

SEQ ID NO: 225403 - RNA, 86 nt, Homo sapiens
gaaagagcaggcggcggcggcggaacgccaggcaggccggggggggcacagagccccggaagacagcccccagcgaccagacccag

SEQ ID NO: 225404 - RNA, 73 nt, Homo sapiens
acggaaaagagacaggaccccacaaagaaacgaggagcagcaacagaggccgaccccccaggccacaagccca

SEQ ID NO: 225405 - RNA, 67 nt, Homo sapiens
agagaccagaagacaacaacaagccacccaggccgagaagcgaggggaaggaccgagaccggaaaag

SEQ ID NO: 225406 - RNA, 69 nt, Homo sapiens
cgagggaacgggaaagaacagagaaggacccacgcgcaccaaacagccacccagcgccaaacagaacga

SEQ ID NO: 225407 - RNA, 69 nt, Homo sapiens
gaaggcagcagcacgcagaagggaggagcagcccaacagaagcacccgaaagagcgaaagcccagacag

SEQ ID NO: 225408 - RNA, 79 nt, Homo sapiens
ccacaaacagcacagcccaggccgaagcccgacaggaccaaccagagaagcggcggcagagaagaagccgcgaggagcc

SEQ ID NO: 225409 - RNA, 79 nt, Homo sapiens
acgcccgcccgcgggccaagaaacggagaaaccggaggacccgccgcaagaagcagggaagcaggaccgaagccagaca

SEQ ID NO: 225410 - RNA, 84 nt, Homo sapiens
agccccaagacggaggagggggccccccagagggagggagaggaggaagacagcagcgcccaaggacaagccaagcggcccaaa

SEQ ID NO: 225411 - RNA, 82 nt, Homo sapiens
ggacggccggcgggggcggcggcggccagcgccagagcgccacagcagccaaacggggacgcccagagagccgaagaaggag

SEQ ID NO: 225412 - RNA, 70 nt, Homo sapiens
gcccagcagaagaagagaggagggagaacacagaaaccggccccaggaagccccagcaagacccggccag

SEQ ID NO: 225413 - RNA, 73 nt, Homo sapiens
ggcaagcagggaccggagggaagaaggaacacaaggcccgaggagaggagcaccaacgggggaagaccgccca

SEQ ID NO: 225414 - RNA, 82 nt, Homo sapiens
cgcaaccagaaccgggcaccagacgccaaaaacagcagcagacacggcacaaggccgcaggaagaaaagagagaagaaggca

SEQ ID NO: 225415 - RNA, 69 nt, Homo sapiens
acgaagagagcaagggaccgggacacggccggagggacccaccaggccacacccagcggaaaagaccgc

SEQ ID NO: 225416 - RNA, 75 nt, Homo sapiens
ggggcccgcacggaccccaccaggcggagaacggaaaagcaccaggaagcagagaggaccgcagaagggaaggag

SEQ ID NO: 225417 - RNA, 58 nt, Homo sapiens
caaagccaaggaaaccccaacacagagccaagcgccaagaagaaaacacgaagaaacg

SEQ ID NO: 225418 - RNA, 93 nt, Homo sapiens
ccacgggcaaagacaacaccacgagcacccgcccccccggccagcgaaggagaggcaggcccgccccgccaagcccacaccaccccggggaaa

SEQ ID NO: 225419 - RNA, 70 nt, Homo sapiens
caacaccgaagaacgcccggaaacagaaaacagcagccaagaagagggaaagaagacaggaaacaaggga

SEQ ID NO: 225420 - RNA, 78 nt, Homo sapiens
cgcggggccacggcggccgaggagaggcagggcgcgagggcgggggcagcggcaggggagcccagcacgccccacccg

SEQ ID NO: 225421 - RNA, 56 nt, Homo sapiens
caagaggacccaccagaaaggagaagagaaaagggaaggcacggaggaagcccgag

SEQ ID NO: 225422 - RNA, 53 nt, Homo sapiens
ccgaccccccggcgccgcgccggcggcggggagagaccccgagaagcaggcaa

SEQ ID NO: 225423 - RNA, 37 nt, Homo sapiens
caacaagagcaacccagagagaacgagggccaaagcc

SEQ ID NO: 225424 - RNA, 74 nt, Homo sapiens
cagcccgcaagacacagaaaccccgcagaaccagaaccaggcggggagcgggcacagaaagcgagagagccaaa

SEQ ID NO: 225425 - RNA, 76 nt, Homo sapiens
ggcccaaaacacagcgcaccacacacagagggaaacggaaagacacgagaggcgagggacgacagagcaagcggca

SEQ ID NO: 225426 - RNA, 81 nt, Homo sapiens
cgcggccccagcgcccggccccccaccggacacccgcggaacccagcggggccgccccacccgaggcccaccccaacgagc

SEQ ID NO: 225427 - RNA, 39 nt, Homo sapiens
ccgcgcaggccgcaccacggccccgggaccaaggacacg

SEQ ID NO: 225428 - RNA, 79 nt, Homo sapiens
ggggcccaacgcacagacaaaccaagcgccgacaacacccgaaccaagaccaggagcaggccgggcccgccagggcacg

SEQ ID NO: 225429 - RNA, 48 nt, Homo sapiens
gcccagcgaaacaaaacccaccagacaacaagcccaagccggagaaag

SEQ ID NO: 225430 - RNA, 75 nt, Homo sapiens
gagagggccacgaaaccgccccacacacccggggacagccaaacaggccagaacacagacacggaaaggaaacga

SEQ ID NO: 225431 - RNA, 80 nt, Homo sapiens
ccgcgcaagaggcgaccccagcacggcaaagcccggagacaagcgcaggcagcccgaggcccacaagcagagaagagaac

SEQ ID NO: 225432 - RNA, 38 nt, Homo sapiens
cagggagaggccgggcagccagaacgggcagaccccac

SEQ ID NO: 225433 - RNA, 76 nt, Homo sapiens
aacacaccacccaggcaaacgaccaaagacaagaagaacccgaggaaaggaggccaacagaaagaacccagcaccg

SEQ ID NO: 225434 - RNA, 92 nt, Homo sapiens
cagaagagagaccagcggccaaacagaagccgagagagacacgcccagggacaagcagcaaaagaaccaagggaagcaggaccggaagaaca

SEQ ID NO: 225435 - RNA, 51 nt, Homo sapiens
ggagggggaccaccccaggaagaagacaacagcccacagaacgagcccagc

SEQ ID NO: 225436 - RNA, 102 nt, Homo sapiens
cgggccgagagccgcccgggccagcggccgcgcacccccggccggaggcaccagcagaaggagggggcagagcacggcaggcagaaggggccaacccggggg

SEQ ID NO: 225437 - RNA, 57 nt, Homo sapiens
ggaaaagaacagagccacacaagaaggccagaaccacgacacgacacaaggccaaga

SEQ ID NO: 225438 - RNA, 83 nt, Homo sapiens
ccggccccggcccacaggggggggcaaacccgagagaacgggggagaagcagaccgcaccaggcgggaccccgaaaaagccca

SEQ ID NO: 225439 - RNA, 72 nt, Homo sapiens
gccggggcgaccaacgggaccaccacggcaagaagcaggacagaagaaggggggaccccaagcgcgagggag

SEQ ID NO: 225440 - RNA, 57 nt, Homo sapiens
ggagcgaagagcgccgacaagaaaaggacccaagggggcaaaggcggaaacagcaga

SEQ ID NO: 225441 - RNA, 63 nt, Homo sapiens
ccgcgggccggcggcgcggcacgaggcccaggcgccgccgcggcgcgagggacggggcaccgg

SEQ ID NO: 225442 - RNA, 73 nt, Homo sapiens
cgagggacgaaggagaccgcgcagagagacacccccaacacaaagacaccaacaagaagcaaaccaaggcccc

SEQ ID NO: 225443 - RNA, 80 nt, Homo sapiens
gagaccaagacgacggacgacggacacacaggggggcgaggaggccgaggagagaagaaggcaagcgacggcccgaacga

SEQ ID NO: 225444 - RNA, 83 nt, Homo sapiens
aaagcaggcgaacccgcggcgcaaaacggacagagcagccaggccacgagccagaaccgagacacacacaggaccccaaaaca

SEQ ID NO: 225445 - RNA, 68 nt, Homo sapiens
gcgagccgcgacacccgagcagcaccccccagcaaccagacacagaggaaaaagacaaaccagccccg

SEQ ID NO: 225446 - RNA, 69 nt, Homo sapiens
ccacaaaccccagggaagaggaccaaagcgaacaaacaggaccagagagaagcacggagacccagaagc

SEQ ID NO: 225447 - RNA, 111 nt, Homo sapiens
cgggaggcggggcccacccaccagccaccgggcccggccaacagggcaggggacacaacagaccgaggaagccgacaggaccgggggcacggaggggaagcacccagaacc

SEQ ID NO: 225448 - RNA, 73 nt, Homo sapiens
acacgccagagggcccaaggaacccacagggggaccggaggagagaacaaccaagcggaaacccacccaagcc

SEQ ID NO: 225449 - RNA, 74 nt, Homo sapiens
ggagcacccaaccccgcgaagacccgaggaccgggaacgaaggggccccgaggaagcagaagccgagggacggg

SEQ ID NO: 225450 - RNA, 70 nt, Homo sapiens
cccaccacgggaggggccaggccacggacgaagcccagagacggggaaaaggggcggaaccccaacgcag

SEQ ID NO: 225451 - RNA, 76 nt, Homo sapiens
gaaaaaccaggacgaaaagagagaaggagcggagaacggaccacccagcagcccccacacaccaaccaccgacacc

SEQ ID NO: 225452 - RNA, 37 nt, Homo sapiens
gggcacacggcacagaccagggacaggcacccaccgc

SEQ ID NO: 225453 - RNA, 61 nt, Homo sapiens
acaacaccacagccgggagcggaggaggcgacggaagcgacacgaggcgaaaggggaacag

SEQ ID NO: 225454 - RNA, 71 nt, Homo sapiens
ggagacccggggacccccgacgccaggcagcgcccccaaacggggaagagccaagaaaaaaaagagcaagg

SEQ ID NO: 225455 - RNA, 61 nt, Homo sapiens
agccggccgcacccaccagcagggggcagaggacaccacaaaggcgagccccaacagaccg

SEQ ID NO: 225456 - RNA, 57 nt, Homo sapiens
ccccgccagccacccccagggaccacgcagcacccaccaaaaaaaagaacagcccaa

SEQ ID NO: 225457 - RNA, 69 nt, Homo sapiens
ggcggggcagagcagcccccagccagccgcgagcggcagacagagcaagagagaggaggaaaaaaagga

SEQ ID NO: 225458 - RNA, 65 nt, Homo sapiens
ccagccagacaggagagaaagggcggcgacggcggcgcgaggaccgaccgggcccgcggacgaag

SEQ ID NO: 225459 - RNA, 83 nt, Homo sapiens
aacaccaacacgagggcggcggaaaaagccgccacacgccaaagcgcgaggaacagccagccagaacaagggaggaagaagaa

SEQ ID NO: 225460 - RNA, 59 nt, Homo sapiens
aaaagaccaagaagggaagaagaccaagacccacagccccagccccgcgccacggcggc

SEQ ID NO: 225461 - RNA, 74 nt, Homo sapiens
cgcccccgacacggggcgacacagcggccgagagacggacacaggacaaggagccaccggagaggaagcggcag

SEQ ID NO: 225462 - RNA, 74 nt, Homo sapiens
gaaaacccagggggcgaacacggaaggagcccaccgggaggaaccagagacacgcgagacccgcggaaggagcc

SEQ ID NO: 225463 - RNA, 53 nt, Homo sapiens
cgggaaaagggaacccacaggcaggcaaacaaggcggcaaggaagaggcccgg

SEQ ID NO: 225464 - RNA, 82 nt, Homo sapiens
ccggcccgcgcggcagacgggccccccgggagacacagacagaagcgaaggggacagggggagaaccgccagggaaacccgg

SEQ ID NO: 225465 - RNA, 49 nt, Homo sapiens
cgccgcagacccccaagcagcagcccgggcgcgccaggcacagccaaga

SEQ ID NO: 225466 - RNA, 85 nt, Homo sapiens
gggccgcggaccccaagcccgccacgccgcccagcccggccccgcccgcgccggaagagccacgccgcgagaaccgccggcgaga

SEQ ID NO: 225467 - RNA, 54 nt, Homo sapiens
cagcggaagcggaggaggaggccagagaggagcccacccccaacagaagagaga

SEQ ID NO: 225468 - RNA, 76 nt, Homo sapiens
gagggcgcgcgcccagaagaggccagagcggaagccaaaggcaacgacagaccaggcgagcccagggaaagacaaa

SEQ ID NO: 225469 - RNA, 79 nt, Homo sapiens
gcacggagagcaacaaagccgacccaacccaagggccaaagcaggcagccagggaccgagcaacagggacagaagcagg

SEQ ID NO: 225470 - RNA, 73 nt, Homo sapiens
gcggcgggaggccaccgccagggggcacccgaggaggaagagggcagggcccacggaaagaagggaaacccgg

SEQ ID NO: 225471 - RNA, 55 nt, Homo sapiens
acgcagggccccaagggcagacagcggacagaaggggagcggcagagaggggacg

SEQ ID NO: 225472 - RNA, 83 nt, Homo sapiens
ccgcgcccgccacggcccgccgcccggaaggccaccgcgcgcaaaccaagccaggcccgaagagcacccagacagggaccccg

SEQ ID NO: 225473 - RNA, 72 nt, Homo sapiens
aagggaagcaaccagcgcgggccacgcaccagaccgggcaaaagggcagagacgcgcaaagcggggaggagc

SEQ ID NO: 225474 - RNA, 42 nt, Homo sapiens
aggacgccgagacaagccacaagcgacgagaacacacaagaa

SEQ ID NO: 225475 - RNA, 68 nt, Homo sapiens
aaacaaggagccaggacacacaaacgcaaagggaaaaagccaaccgggaacggaccgagagagaagac

SEQ ID NO: 225476 - RNA, 72 nt, Homo sapiens
gagagagaaaggagaggcgggagccaggagggcagcgcacacacccaaccagcaggaccccgaggggaacac

SEQ ID NO: 225477 - RNA, 54 nt, Homo sapiens
cgggagcacagccgccgagcaaggccccagcccaagcgggccgacgagaggaaa

SEQ ID NO: 225478 - RNA, 77 nt, Homo sapiens
cagcgcccggccccccaccggacacccgcgggagacggaagcggaagcacacgccagacgccagcaggccggagcac

SEQ ID NO: 225479 - RNA, 59 nt, Homo sapiens
agcaacgaggcagcggcaggccagggcagccgcgacagcgaccagacgggcagcagcgg

SEQ ID NO: 225480 - RNA, 78 nt, Homo sapiens
cccgccccgacgggcacaacccaaggcacaacgcccgaacgcaaacgagaaccgcaaaccccaaagaaggaggaaaaa

SEQ ID NO: 225481 - RNA, 79 nt, Homo sapiens
aaacggaagaaccagaagagagaagaaagaacggaaggcaaagagggcagaaagaaggagggaaacaggaacacgaaag

SEQ ID NO: 225482 - RNA, 76 nt, Homo sapiens
gcgagagaggagcgggaggagcacgcaaacacggacacggagcagaggagcagggaacgagaagacccgagaaaaa

SEQ ID NO: 225483 - RNA, 76 nt, Homo sapiens
aggcagcgggccgccacggaggagccaggcccgcgagccacaacggggcagaagccaggagcagcaacaccaagga

SEQ ID NO: 225484 - RNA, 75 nt, Homo sapiens
cgagaccccaccagaccggcgagaaacccacccgcacgggaacaacgcaaagcagaaaaaccacagaaacgaaag

SEQ ID NO: 225485 - RNA, 78 nt, Homo sapiens
cagcaggaagccagaacgcccaccccaccccaggcccccaaacgaagccaaaggaagccaaaggcagcaacggaggcg

SEQ ID NO: 225486 - RNA, 80 nt, Homo sapiens
gccacgggccccggaccagccacccggagaaggcaggaaccccccacaccacaaggcgcaccagaaagacgggcgccggc

SEQ ID NO: 225487 - RNA, 82 nt, Homo sapiens
ccagacaccggagacgggaaagagcagccaccccagagccgcagcgagcgacccaaagggacaaggacaaccacccgggcag

SEQ ID NO: 225488 - RNA, 72 nt, Homo sapiens
gagagacaccccaccgagcaccgaagacgggcaggggcgggacagcggggagccggcccaccggcacaccaa

SEQ ID NO: 225489 - RNA, 81 nt, Homo sapiens
gcgccaggaggggggcgacaagggaccaacacgagcggcgacccaaaagaaccaacgagaagggcagagagggcagaaagg

SEQ ID NO: 225490 - RNA, 91 nt, Homo sapiens
cggcagaaccgacaagagaggcaccccaggaccccaaggagagaagggcagcaaaggcgagggggccaggcccaaaaggggaaacggaaca

SEQ ID NO: 225491 - RNA, 78 nt, Homo sapiens
cagggggaccgggggacgccggcggcagagagagcaccaacgaggggagcaacacgaagaaacgaagccggaggggag

SEQ ID NO: 225492 - RNA, 112 nt, Homo sapiens
ccagggacgaggaccagacggacaacgaccacgcccaaaagagcgcaccaacccccacacgggacagagcgagagagaccacgagaggccccgcgggggcgaccccccggcc

SEQ ID NO: 225493 - RNA, 82 nt, Homo sapiens
ggcagcagcagccccggggcccggagagcagggcagaaaagaacagacccagaagaagcgaaaggggagaaagaagaaagca

SEQ ID NO: 225494 - RNA, 71 nt, Homo sapiens
gggacgaaagcaagacggaaccacagacaaaaacccaaagcagacgaccgaaaacccagccagacaaaaga

SEQ ID NO: 225495 - RNA, 74 nt, Homo sapiens
cgcccgggccagcggccgcgcacccccggccggaggcaccagcggaccggagggccggaagcgggccgggacaa

SEQ ID NO: 225496 - RNA, 74 nt, Homo sapiens
cccccagaccccggcgcgggaagaaaacaggcgaaacaaggcacccccagcgccgaacacaggacgccagaccc

SEQ ID NO: 225497 - RNA, 71 nt, Homo sapiens
gcaacaccggcggccagcaccggacaggaggaggccggaagaaaacggggagcccgaggcaacgcccaggc

SEQ ID NO: 225498 - RNA, 74 nt, Homo sapiens
gggacaaaaggaggcagcaggagcgacgcgggcaggaacgcccaggagaaagagggaagagaaaaggaacaagg

SEQ ID NO: 225499 - RNA, 77 nt, Homo sapiens
gacaaaagggccaaagaagggagagacagagggccgcccagcagggcacaaggaggagaaggggccagggggaaaag

SEQ ID NO: 225500 - RNA, 56 nt, Homo sapiens
cccagcaggaaaccaagagaagcaaagcagcccgaggaggcacgcaaaacaacagg

SEQ ID NO: 225501 - RNA, 38 nt, Homo sapiens
aaaggaggaaacagaaacagcgcgcagggacagcaggc

SEQ ID NO: 225502 - RNA, 82 nt, Homo sapiens
aacagagaagaagagagaaagacagagaagcagaagaggagacggacaagcaacagaagagccgccgcagggcgaaggcgag

SEQ ID NO: 225503 - RNA, 55 nt, Homo sapiens
agcgcgaaacgcacgagaaggcaaaagcagaccggaaaacccaccggcaagacca

SEQ ID NO: 225504 - RNA, 56 nt, Homo sapiens
gcagcgagcgggcaggagcgaggggcaaagaaaaaggagagaaaaagaggcaaaac

SEQ ID NO: 225505 - RNA, 57 nt, Homo sapiens
gaggaagaccaagaaggagaccaccagcagaacacgaccagcgcgaccgcagcccca

SEQ ID NO: 225506 - RNA, 74 nt, Homo sapiens
gaaacagccagcacgccaagacacgcccgggcaaaggcccgggggagcaagagaaacggacaaccgagcggagg

SEQ ID NO: 225507 - RNA, 81 nt, Homo sapiens
gcggccgcagggcgccggagccccccagacaggccggacacaaccacaaacgagccacgccaaagggcccggccgggacac

SEQ ID NO: 225508 - RNA, 124 nt, Homo sapiens
cgccccgggcgggcccccggagacgcgcaggagccacacgaagagcgccgcgcgcagagaccccgcaggcggggagccagcagggacggccaccagcacagggcggggcacgcggcacccccgg

SEQ ID NO: 225509 - RNA, 74 nt, Homo sapiens
gaggagaaaaaaccaaccagaacccacagaccagcagaagccgcggaggcccgagagcggccgcacaccggagg

SEQ ID NO: 225510 - RNA, 82 nt, Homo sapiens
acccacaggagcgcggaagacgcacaagggaagacgcgcagcaagcgcgggaagcccgaaagagagacagaaaggcaaagac

SEQ ID NO: 225511 - RNA, 66 nt, Homo sapiens
gccccccggaagaaaaggcgcgaagacacaccagcaggacaacaagcccccagcccggccacgccg

SEQ ID NO: 225512 - RNA, 76 nt, Homo sapiens
cgaaaccacggagacccacaagggaaaacgaagagaacgaaaagcggacaaagaaacacaagaacaggcagaggca

SEQ ID NO: 225513 - RNA, 76 nt, Homo sapiens
gggccgccgcccgccccggccaccgccccgggaagcccggaaagacaacgacgaaagacccacagaagcgcgccgg

SEQ ID NO: 225514 - RNA, 72 nt, Homo sapiens
ccgaccgagacgggcggagaggagaagggaccccgggagggcccagcaaccggccagcgaaccggagacaaa

SEQ ID NO: 225515 - RNA, 90 nt, Homo sapiens
ccgcggggcgccaggcacgcgaggcccccagacgccagcagcccggacgccaccaagccgagccacgggcagcgggcgacgggagcaccg

SEQ ID NO: 225516 - RNA, 67 nt, Homo sapiens
cacgaacaaagagcgaccgagaaaaaccgaaagagccacacaaacacacgaagaacaaacaaggcaa

SEQ ID NO: 225517 - RNA, 55 nt, Homo sapiens
acagcacgcccaagcagaacccgcccagagccagcgcccccgcgaggacacccgg

SEQ ID NO: 225518 - RNA, 79 nt, Homo sapiens
ggagggaggaccggccagcccccccaaaaaggaaagacaccggcggggaagacgacaaccgcggcccaagcgccaccag

SEQ ID NO: 225519 - RNA, 72 nt, Homo sapiens
aaaacagagacgacaagaaagggaacacaaaggacaggacacaaaccaaccaggccccaagagacacgaaaa

SEQ ID NO: 225520 - RNA, 73 nt, Homo sapiens
ggcggccacagccgcagggagaacccgaggcgggaaccaagaaagaggaagaagaggagacaaaggaaaagag

SEQ ID NO: 225521 - RNA, 81 nt, Homo sapiens
gggcagcacgaccgcagcgacaagaacgcaggacggccgcggcaccgaaccacaaggaggacgaggacaaggcacgaggcg

SEQ ID NO: 225522 - RNA, 76 nt, Homo sapiens
gcgcgcgccggggcccgcgggcagcgagggagccgaacagccaggccgccgcggcagcgagaaagaccagcccgcc

SEQ ID NO: 225523 - RNA, 74 nt, Homo sapiens
cgacccccggggagccagcgagcccccccgacacggccaaggaggagcacggcgaaccgcaaacagaagaggga

SEQ ID NO: 225524 - RNA, 77 nt, Homo sapiens
ggacggcagcggaaaaggcgaccaccgcggacgcaaacagcagacggaagaccccacggcaaaaccacacccgaggc

SEQ ID NO: 225525 - RNA, 69 nt, Homo sapiens
agagaagcagaacgcaggaggagaacgacaggacccaggaagcacggaccaaccacgaggaggacaggg

SEQ ID NO: 225526 - RNA, 66 nt, Homo sapiens
cagggcaaagcaacagccaaaaaacagaggacaaaaagagagccccagaaagaagaagagaacccc

SEQ ID NO: 225527 - RNA, 78 nt, Homo sapiens
gagacacggccagacgcccccagaacagcacaccgagcaagaaacagaaggaaggacggaacaaggaacaggaaagag

SEQ ID NO: 225528 - RNA, 77 nt, Homo sapiens
ggggacgcaaaggccaaggggcggcaaaaagaacccaaaacgccgaacacgacagccacaagagacccagagagaac

SEQ ID NO: 225529 - RNA, 69 nt, Homo sapiens
gggaaggcgcgaggaggaaaggaggacgagacgacgcgaaggagcgggagcgaaaaggaagcagacgca

SEQ ID NO: 225530 - RNA, 73 nt, Homo sapiens
gccgcggggggagaccccaccaccgggaccgacccacgcccgcccccaaaggccagaccgaggaggcgcccag

SEQ ID NO: 225531 - RNA, 72 nt, Homo sapiens
cagcccaggaccgcacgccagggggcggagaacggaaaagcaccaggaagcagagaggaccgcagaagggaa

SEQ ID NO: 225532 - RNA, 68 nt, Homo sapiens
gacacagaagcagaaggaagagaccagagacacaacgcaaaacgaaccccaaaagcacgcacgaaacc

SEQ ID NO: 225533 - RNA, 60 nt, Homo sapiens
gccaggcgcaccacggccaggcaaagaaagacgggccgagggccaggcaggaggggcaca

SEQ ID NO: 225534 - RNA, 73 nt, Homo sapiens
cgggcggaagcacagcacggacggagaacacggagggaggcaggcgacaacagaggagaaggcgaagaaaaca

SEQ ID NO: 225535 - RNA, 55 nt, Homo sapiens
acacgagcagcgcagggaagcaagagcaagcggaacgggcacaaagaaggcgcag

SEQ ID NO: 225536 - RNA, 78 nt, Homo sapiens
gcagacaagcgcgggcaggcaggggacaccagccgcccggagaaacggagcaccaggccgcgaaccagggcgcgggag

SEQ ID NO: 225537 - RNA, 77 nt, Homo sapiens
caaccgaagaccagaagcaaggccaggacgcaaaagaaggacaaggagaacaccacacagaggaagagaagaaacca

SEQ ID NO: 225538 - RNA, 65 nt, Homo sapiens
gcaaaggcaggggaggaagccacccgagagcaaacacaggaaggaagaagccaaaagaaggagaa

SEQ ID NO: 225539 - RNA, 59 nt, Homo sapiens
gccagacacagaaggaacaccgaaagacggaaggaaagaacaggccgggcagcggacgc

SEQ ID NO: 225540 - RNA, 39 nt, Homo sapiens
cggacagaaggggacggagagcgggggcgggggagggca

SEQ ID NO: 225541 - RNA, 40 nt, Homo sapiens
cccagggacccaggccgggagacggcgaagaacagaggaa

SEQ ID NO: 225542 - RNA, 94 nt, Homo sapiens
gcgagccgcgaagggcgaaggaggaggacaaagagcccccacgagcccgcaaggaaagcgagaaccccgaacagaggagccaacagaacgacac

SEQ ID NO: 225543 - RNA, 62 nt, Homo sapiens
ccggaccccgcgcgcaaaagaacaggacccaggccaagccaccaagcgacagaagggcccga

SEQ ID NO: 225544 - RNA, 80 nt, Homo sapiens
gcagccccaacccccaagaagacaacaccgggaccaagccacaggaaagagcggggccagaggaagacccggcccccccc

SEQ ID NO: 225545 - RNA, 86 nt, Homo sapiens
caccccgaggaggaagacgaacgaaacacgaaagggcaggagaaacgaggaggaagagaaggaccgaacacagaagaaggaacgca

SEQ ID NO: 225546 - RNA, 83 nt, Homo sapiens
ccgccacggggagcaaaaccaacgccggccggagcagcagcccgaggcggcgcccagcggccacacgccccaagcgccacgcc

SEQ ID NO: 225547 - RNA, 78 nt, Homo sapiens
cgaccaccgggcagcgccgccggagccagcagaaccccgccggagacaccacggcaaggccaaccgaagggaggcaag

SEQ ID NO: 225548 - RNA, 82 nt, Homo sapiens
gcagggagcaaacgagcgccaacggagaaaaaaaggagaagaaggaaggggaagaggcagaaaaggaagagacgccccgcaa

SEQ ID NO: 225549 - RNA, 75 nt, Homo sapiens
ggcccggccccagccaccccccccagcgccaggcgccaccaggggccagaaccgcccacggcccccacagcggac

SEQ ID NO: 225550 - RNA, 74 nt, Homo sapiens
ggaacgaaaacggacagcaagggaaaaagaaaaaagcgcggaagagggaccaagcgagacggacgggaaaaacg

SEQ ID NO: 225551 - RNA, 78 nt, Homo sapiens
gaacacaacccaaaaacgaacgccacgcgcccggcgcccagcccaccagcacggcagcaaaggggagaagaagcaaga

SEQ ID NO: 225552 - RNA, 75 nt, Homo sapiens
ggacgggaggggcgccgcggcggcgggcgcccccagagcacggggaccaggggagggggggacaggagaacgcag

SEQ ID NO: 225553 - RNA, 88 nt, Homo sapiens
agaagagaaacagaaagaacacaccaaggggagagaagcagggaacgcggaagcggcgcaccgaagaggcgaacgaaacagacggcag

SEQ ID NO: 225554 - RNA, 78 nt, Homo sapiens
aagagggcggaggaacagcggggaccgagacaggggcccggcaccgcgcccgagcccacccacagacagaaggggagg

SEQ ID NO: 225555 - RNA, 78 nt, Homo sapiens
cagaagaggacacagagagaggagcgcgcacaccagaagaaggggccccacggagcggaccaggaggagcgaggcggc

SEQ ID NO: 225556 - RNA, 63 nt, Homo sapiens
cgaggaggaaggagagaaaaggcgccacgggacccaaagacaggaccacgcaccagcagagaa

SEQ ID NO: 225557 - RNA, 62 nt, Homo sapiens
aagaagggacaaaacacgaaacagagaccaagcagaagacacggccgccaggggaacaggga

SEQ ID NO: 225558 - RNA, 81 nt, Homo sapiens
gaagcgcaacccgacccggaggcgcgaggggcccgggggcagggcggagaacggaaaagcaccaggaagcagagaggaccg

SEQ ID NO: 225559 - RNA, 68 nt, Homo sapiens
gcccggcgccccagccgccccgggggaaacccgcccagggcgggagaccgccaagaaacaccacaagg

SEQ ID NO: 225560 - RNA, 79 nt, Homo sapiens
gacgccagagggcaccagaccaaacagcgaggaagcccacaaaagcaggcaacacaaggaggcccacgcggaccggcag

SEQ ID NO: 225561 - RNA, 77 nt, Homo sapiens
cggccacacggaggcgggccagggccagcgcgggggacgaccagggccggagcgagggagagcaggaacacagagag

SEQ ID NO: 225562 - RNA, 81 nt, Homo sapiens
cgccacccagacacacgagacacaacaggggcgggaagcccagccgccaccgcgaccgaggccaacacgggcggccaggcg

SEQ ID NO: 225563 - RNA, 81 nt, Homo sapiens
cggcgggacagagcgccgcgaccccagcgggcccggggaggcaccgacgaggagaagacgaccccgacgcaggccaggagc

SEQ ID NO: 225564 - RNA, 81 nt, Homo sapiens
ccgaccgggcacgaggagaagggcagacaagcgcgggcccgaaggaccgagccggcggaagcacgaccccgcccagccagg

SEQ ID NO: 225565 - RNA, 79 nt, Homo sapiens
ggcaccaggagccgagaggaaagccgaaaccaaaagcaacgacaacaggcgggacaacacaagggaaccaaggagggcg

SEQ ID NO: 225566 - RNA, 70 nt, Homo sapiens
gaaagcccagccagccaggggggcaggagaaggaagaaccgaagcaccccaagcacagggaacaccagag

SEQ ID NO: 225567 - RNA, 54 nt, Homo sapiens
gaagccgcaggacgcggacaccggcaggacagcagaccacagcccggcaggccc

SEQ ID NO: 225568 - RNA, 82 nt, Homo sapiens
ggagcgcggagccgcgagccccgagccccgagcccggcgccggcgagagagccgcccagcaaaacccaacgggaacccgccg

SEQ ID NO: 225569 - RNA, 75 nt, Homo sapiens
gcccgcccagaggcagaagggcaccacgccccaaacccccggagaggcggcaggaagacaaccgcggcaggcacg

SEQ ID NO: 225570 - RNA, 87 nt, Homo sapiens
cggacagggcggagcagcgcagaggaaaggcggcagccaggaaggagaggagaggcccggaaaaaggcacgaaacagccgacaaacc

SEQ ID NO: 225571 - RNA, 73 nt, Homo sapiens
agcaggcgcacccacccgcggcgaacagaaggccaaaacaaaggggagggaggaggcgagaaggaaacaaaac

SEQ ID NO: 225572 - RNA, 81 nt, Homo sapiens
agccccgccccacgccggcagccccacgaggagaggggaagagagaacgcgaccgaggaggcgccagccagggccaagggg

SEQ ID NO: 225573 - RNA, 80 nt, Homo sapiens
caacccggacggacaacaccggggagcgcggccccggagcccgccgcccgccaccaggccagcagcgaaggagcccaccg

SEQ ID NO: 225574 - RNA, 62 nt, Homo sapiens
ggacgcgcgagccggccggggggaaggaaacggaacgccaagcgaagaagaacgaaacggaa

SEQ ID NO: 225575 - RNA, 77 nt, Homo sapiens
cgagaagggaaggaaacagcaagcgaagccgaaaaagcgcccgagacgggcccgccgaaaggagcagcagaacggag

SEQ ID NO: 225576 - RNA, 50 nt, Homo sapiens
gggggagaccggaagacaggcagacgagaccggagaaggaaagacaagcc

SEQ ID NO: 225577 - RNA, 70 nt, Homo sapiens
ggaaaaccaagaaccagaacggccacagaacacagcacccccagcaggacagcacacccaaccagacaca

SEQ ID NO: 225578 - RNA, 83 nt, Homo sapiens
ccccagccggccgggaggcaccacggccgagcccgaggaaagcgaacgcgaaaagaaaagccgagagcagccagaccggcgaa

SEQ ID NO: 225579 - RNA, 85 nt, Homo sapiens
ggccggaaccccgcggggacccgcggcccggcggcggcgaccggagaaccgcacggggcacggaggaaaaccggcgcagagccaa

SEQ ID NO: 225580 - RNA, 75 nt, Homo sapiens
gccaccacgcccacgcaacacacgaagcgggacccaacaggagccccagccccacgccagggcacaccccacaag

SEQ ID NO: 225581 - RNA, 75 nt, Homo sapiens
aggcccggcccgaccagaaaaagagccggaaacgaaacagcgcagccaggaacaggacgaagaccagcgccaggg

SEQ ID NO: 225582 - RNA, 67 nt, Homo sapiens
cacgagccccacagccaaaggaggcaccagaaaccagagagcagcgcaagcacacagcacgaaggag

SEQ ID NO: 225583 - RNA, 83 nt, Homo sapiens
aaggagcgcgggcaacggcgggacagcaaaaagacccaccaaggaagcagcggccacgccaggggggcaccgacggagaagca

SEQ ID NO: 225584 - RNA, 87 nt, Homo sapiens
acggcgagaccccgcgagaaggaaggcgagccaggaaacaacagacgggaagagaggggggagcagggaagaaaagaaccacaagaa

SEQ ID NO: 225585 - RNA, 69 nt, Homo sapiens
agaccgggcgccagggccgccgccccgcccggggggcagcacgccgaaggagagaccagacaacaggcc

SEQ ID NO: 225586 - RNA, 81 nt, Homo sapiens
ggagccggcaggacggaaggggaagaggcccacccggagaaccccacggagaaccagaggaaagaaggagaaggaagagaa

SEQ ID NO: 225587 - RNA, 70 nt, Homo sapiens
cacgggcagaaccgggaacggagagaggaggccaggagcacagaaacacccaccaggagccaagcagaag

SEQ ID NO: 225588 - RNA, 63 nt, Homo sapiens
ggcaccagggaccaaggaccaaaacccaaagaaaacccacacagcaggagccagacacacagg

SEQ ID NO: 225589 - RNA, 110 nt, Homo sapiens
aggagaggacgaggaggaacccacacccccaaggcacggggccacaccacgaaggaggagcaaccgaaagaacgacaagcagaaaagaagcacccagaagcagaaagaag

SEQ ID NO: 225590 - RNA, 67 nt, Homo sapiens
cccaggaagaagacaacagggagggaagccggaagcggcaacagcaaagggaaaagaggagacgaag

SEQ ID NO: 225591 - RNA, 74 nt, Homo sapiens
ggagcaggggccaaggagcacggacggacccagcacgaggaggcgcgaggagaggggaacacccagaggaacgc

SEQ ID NO: 225592 - RNA, 73 nt, Homo sapiens
agcaacccgaggaagaaaccgcaaagggcaaccaagggacaagcacaacagaaccacaaggcaagccagagcc

SEQ ID NO: 225593 - RNA, 69 nt, Homo sapiens
cacagaaaagccaccgagggcacagcccgggaaaagggcgcggagggccaacagaagaaaaacggaaca

SEQ ID NO: 225594 - RNA, 73 nt, Homo sapiens
gcccgcccacccagggccggaaaagccaacgccggcgaaggacaaagaggccaggagacacgccaccgccggc

SEQ ID NO: 225595 - RNA, 60 nt, Homo sapiens
gcaggcggcagaaacggaagcccgcagacgcggaaagacgcggccgggcaggccggcgca

SEQ ID NO: 225596 - RNA, 109 nt, Homo sapiens
ggggcgggggcggggcggcaggagccggccggcaaccgagggacccgcgccaggagcacccacgggaacagcccagaaacgagggaaaaacgaagccgaccggaacagg

SEQ ID NO: 225597 - RNA, 82 nt, Homo sapiens
acggggccccccgcgcgaggccgccgccgccaggaaccagaggaggcccgcagggacagcacgagcagccgcagcgcaagaa

SEQ ID NO: 225598 - RNA, 70 nt, Homo sapiens
gcccaccggccgggagggcccagggcggggcccgagagaggggcagagaggcagaagggaggcagaaaca

SEQ ID NO: 225599 - RNA, 77 nt, Homo sapiens
accgaagggcgaccaccacaacgccgcggacgaccgcacgggcagcccacccgggaacgccagaggcggcaaaccag

SEQ ID NO: 225600 - RNA, 106 nt, Homo sapiens
aaagccagcggagaaagccggagggagcacagccagaagagaagagaaaacagcccacccggacgcaaagcaaggagagcgcgagagaacaggggccgaacgaggg

SEQ ID NO: 225601 - RNA, 70 nt, Homo sapiens
cgaagccagcggacgggcagggcccagggggccgagacaacaagaaggggaggaacaaaagcgcaaaccg

SEQ ID NO: 225602 - RNA, 63 nt, Homo sapiens
cgcgccagcagcacagcacgagccgaggaaacccagacccaagaccaaccgaggaggaggagg

SEQ ID NO: 225603 - RNA, 74 nt, Homo sapiens
cggcccggaccgggagacacggccagacgcccccaccggcggaagaggaccaagaagggggcagcgcgggaacc

SEQ ID NO: 225604 - RNA, 86 nt, Homo sapiens
ccacccaggccccgcaagaagggccgggggcgagccggagcgaccccggcagggaagaagcccagcggaggcgaacggcccccgcc

SEQ ID NO: 225605 - RNA, 59 nt, Homo sapiens
ccgacaaagagggggcccaagaaggccaagaagacgcggagggaggcgaggagggaccg

SEQ ID NO: 225606 - RNA, 49 nt, Homo sapiens
acacgaaagagaagccccggaggcgggcgcggacggcaggggcgccggg

SEQ ID NO: 225607 - RNA, 67 nt, Homo sapiens
ggccccccaccgaggagggaaacacccgaaacagcgcggaaaggaaacccgaccaagaccaaaaccc

SEQ ID NO: 225608 - RNA, 70 nt, Homo sapiens
aaggcagggccggaacccaaaccaggggcacacaggccagagaccagaacaaggggagaagaagcccagc

SEQ ID NO: 225609 - RNA, 83 nt, Homo sapiens
ccgcccgaacaccaggaggacggaagaaagaccccaaaaaagaaagacccacacagcaaggagaagagaaagcacaaagcagg

SEQ ID NO: 225610 - RNA, 60 nt, Homo sapiens
cgcgcagccgccggcgcgccgccaggaccagaaacagagggaggaccaagccacaggggg

SEQ ID NO: 225611 - RNA, 131 nt, Homo sapiens
gacggcccgggaggcacgaaggcaccgggcccagcacagccagcaccgcacgcccgcaagggaggaaccaagaagaagcaggggagaagaagaggagcaacaggaagggaagacggggaccaacaagcaaa

SEQ ID NO: 225612 - RNA, 66 nt, Homo sapiens
ccccgcaaaaagggccgggaaacaaaaggcgaaccggggagggcccgagggcaggacagcaggcac

SEQ ID NO: 225613 - RNA, 76 nt, Homo sapiens
ccagcaccggccccaccacagacggagccagccaaagaaggcacagggggaccccaagccagaccccccgcggacg

SEQ ID NO: 225614 - RNA, 80 nt, Homo sapiens
cgcgaggaggaaaggaggacgaggggacgcccgccacggcccgccagaacgggcgggcccgcacagcccagaagaacggc

SEQ ID NO: 225615 - RNA, 52 nt, Homo sapiens
gaaacaaggacacgggaaaagaggaaacagaccacggggcgggaacaggaac

SEQ ID NO: 225616 - RNA, 77 nt, Homo sapiens
gacggcacccgcaaccacagaggaggggaagagagaagggcacagaccaagacaacgaaccccggccaggacaggcc

SEQ ID NO: 225617 - RNA, 75 nt, Homo sapiens
cgaggccagaacccaaggagggcaaaggacagagccaacgcgaagcggccggaaggagccacccaccaggcggag

SEQ ID NO: 225618 - RNA, 63 nt, Homo sapiens
caagacacggagcaaggaggaaaacacacggagggaagcacaaaagcaagaggaaaagaaaca

SEQ ID NO: 225619 - RNA, 79 nt, Homo sapiens
gcggacgaccgcacgggcaggcgcaggcagggaacgaccagcacgcagcccccccccagggcaagcgaccggcccagcc

SEQ ID NO: 225620 - RNA, 73 nt, Homo sapiens
aagaagagaaaaagcaaacacaggacaccacagaccacacgcgcacagggggaccaggcagacgaccaaggag

SEQ ID NO: 225621 - RNA, 72 nt, Homo sapiens
caccaacaacgagcgggcggcgcaacgaggcgaagcaaggacagaccaagaccaagaccccaggagagggaa

SEQ ID NO: 225622 - RNA, 74 nt, Homo sapiens
ggcaacacaggccaaggagaccccccgacaacagaagggagaagagaagaccagagaaagaacaaccccgcgca

SEQ ID NO: 225623 - RNA, 90 nt, Homo sapiens
gcggagaggcgcacggcgaggcggagaccgagggggagccccgcgcgcggcgcgcagaacaacagaggcagcaggcacgaacgccaaaac

SEQ ID NO: 225624 - RNA, 117 nt, Homo sapiens
gacccacgacggaaaggaaaaccacgcgcccacggacacggcaggcgaagggcccagcaccaggaggacccgaacccgaagagaacagaagcagcaggacacccaaggagagaagcc

SEQ ID NO: 225625 - RNA, 62 nt, Homo sapiens
cagaggcaccaaggaccccaagacagggcaaggccagagaaggcgggagaaagacacgaacc

SEQ ID NO: 225626 - RNA, 77 nt, Homo sapiens
gcggcgcggccccgcgccggcccggccaccgagaccgcgacgccggcagggagaagacagaggagccagaccaagag

SEQ ID NO: 225627 - RNA, 71 nt, Homo sapiens
accgacgccgggcggaaaaccaccaaaaccggcagcgagccgagcaaggcggagaacggaaaagcaccagg

SEQ ID NO: 225628 - RNA, 46 nt, Homo sapiens
ccgaaggagcacagcagcccagaaggaccgggacgaggcacggcgc

SEQ ID NO: 225629 - RNA, 67 nt, Homo sapiens
ggccagggagcacagaagaacacggaagccagcggagcgaggacagcaccgggaccaaaaggaagag

SEQ ID NO: 225630 - RNA, 74 nt, Homo sapiens
aggaccaggcgacgagagaaacacagcccaaagaaacacacccccccacaacaaggcccaaagaaaagggacca

SEQ ID NO: 225631 - RNA, 85 nt, Homo sapiens
gggggcgcccagcacgaccccgggcagcccaacgagaaccggagggcaccggagaaagaaggaacacacggacgcccagaaagag

SEQ ID NO: 225632 - RNA, 67 nt, Homo sapiens
agagagaggagggggcaccgagcaacgagggcaggcggcggccggggcagcgccgcgagccagcaac

SEQ ID NO: 225633 - RNA, 83 nt, Homo sapiens
aagaggggacggcaggagggaaggagaagcccaacaaagccccacagcagccagaaggaaaggaccgcaggccgcccccagag

SEQ ID NO: 225634 - RNA, 82 nt, Homo sapiens
aaggccgagagccggaacaaacgagggcccgggaggaccgacgcagccagaagaaccggaagcccagccagggacaagcacc

SEQ ID NO: 225635 - RNA, 68 nt, Homo sapiens
gggcccggaggagcgaacaaggcgacaacacaggacgacgcgggaaagccgacaacacaggaccgagg

SEQ ID NO: 225636 - RNA, 72 nt, Homo sapiens
ccaaagcagcccggaacccccagccaggaacgggcaaggagaggggcaaaggaaagcccgccccacaagaga

SEQ ID NO: 225637 - RNA, 72 nt, Homo sapiens
acacgccagccagcgggcccagccccaccgcgaccgcagccccaggccccagaggggacccacagaaagggc

SEQ ID NO: 225638 - RNA, 65 nt, Homo sapiens
acaaacacaacggaaaggcggaagcacagccggggaaagggggcagagcggcgggaaaccaccaa

SEQ ID NO: 225639 - RNA, 73 nt, Homo sapiens
ccagggagcaccaggagaacaacaaggaaagagcagaacgcccaagggagcaggagggaacccgacaggacgg

SEQ ID NO: 225640 - RNA, 122 nt, Homo sapiens
cgccgccgcgccaccaccgcgaggcaggagagaggaggaggaggcggcgcggcggccccgggaccaaggagccggaaccaaaaagaagccccagagccggggccaggagccccaagcgcccc

SEQ ID NO: 225641 - RNA, 60 nt, Homo sapiens
gaaacagcggggccacccagaacaaaaagggccagggccggcccagggagaacgcaaaac

SEQ ID NO: 225642 - RNA, 80 nt, Homo sapiens
cccagcccagcccccacgggaacgcgcagaagcaccgcagcccgcagcccagggcggaaaacaccccaaaagccaaaagg

SEQ ID NO: 225643 - RNA, 79 nt, Homo sapiens
cccgcagcccgccgcggacggccccgccccgaccaaaaacgaaggaggcccaaccacaaaaggagccgacggaacccag

SEQ ID NO: 225644 - RNA, 71 nt, Homo sapiens
ccgacggggacaggccacaggcaccggcaggcagacccccccgggacgcgccacagacgggggaacccaga

SEQ ID NO: 225645 - RNA, 66 nt, Homo sapiens
cccaaaacccggaagagcgccccaggagaaacaaacagagaagcagccaggccacacggagcaggg

SEQ ID NO: 225646 - RNA, 76 nt, Homo sapiens
aagacccaacgccaaaaggcaaggacggccaggaaagccgccgggcggcaaccggcgggaacccgacacaagcgac

SEQ ID NO: 225647 - RNA, 76 nt, Homo sapiens
accccacgggggccggcgaaccggcccgacaagaagggaaccagaaggcaacacccgaacaaccccaccagaaccc

SEQ ID NO: 225648 - RNA, 51 nt, Homo sapiens
gcgagaagacaccggcagaaggagaacaggaggaggaaaacagaacagccg

SEQ ID NO: 225649 - RNA, 52 nt, Homo sapiens
cgcgggccgcgagcggggcgacccgagaacaaaccaggggagggaaacgaga

SEQ ID NO: 225650 - RNA, 84 nt, Homo sapiens
gagggccagccccacggcggaggcaccccaccccagaccaggacgagccccagcagggagggagacgggccgcgcaccgcccga

SEQ ID NO: 225651 - RNA, 78 nt, Homo sapiens
agaggcacgagacggggccagaaaccgcaggaaccagcaccagacagaagacgcagaagagcagcgaagagcaaaagg

SEQ ID NO: 225652 - RNA, 90 nt, Homo sapiens
agcagacagcgccacagaaccagcagcaaagaagcacgaaagaaaacacgagccacgaagaccgcacaccacagaccccacaaagaaggg

SEQ ID NO: 225653 - RNA, 77 nt, Homo sapiens
aagcggacaaaagggcagcaacgcccacggaccgagaaaaggcgacggggacgaccagcgggagccggcgcgcgcga

SEQ ID NO: 225654 - RNA, 85 nt, Homo sapiens
cggaggccccagggaagcgcagaaagcaggcgaacccgcggcgcaaaacggacgagagaggagcgcgggccgagagcggagagcg

SEQ ID NO: 225655 - RNA, 80 nt, Homo sapiens
gcgggaaggccggaaaggaccagaccgcccaggaaacgacaagccaggagcccggaagacagccgcagggcagacaccac

SEQ ID NO: 225656 - RNA, 55 nt, Homo sapiens
gacaaagggaacacaggaccccagagcggcacaccacacacaggcagcgccaggg

SEQ ID NO: 225657 - RNA, 54 nt, Homo sapiens
cgccgagcccgagggcacgaaccgggaaagagacaagcaagcgacaagaaggca

SEQ ID NO: 225658 - RNA, 68 nt, Homo sapiens
agacccaagaaagcacggacagcggaaaagcggccccaaggcgaacaaaggggcgaggaagagacagg

SEQ ID NO: 225659 - RNA, 82 nt, Homo sapiens
ggagcaggaggaagcgggcccacagaaaagcagcccaacgaaaaccgcgccccagggaaaggaccgaggcaggaaagaggcc

SEQ ID NO: 225660 - RNA, 74 nt, Homo sapiens
agaaagcaggccaggccggaggaacggagcaccgcgcaaaaaaacggacagcccaagcacaaaacaacccaaaa

SEQ ID NO: 225661 - RNA, 74 nt, Homo sapiens
accgaggaaagacaacccacccgcgggaacccgccgccagggcggcaccaggacgccgaaaagcgaccggacgc

SEQ ID NO: 225662 - RNA, 76 nt, Homo sapiens
gcaagaccagcagagaggaaaaacacaacccaagaaacgggaacacccacaaaagcagaagcagaaacgcagagcc

SEQ ID NO: 225663 - RNA, 106 nt, Homo sapiens
ggggcgacaaggaagaagaaccccagcaaagccaggacccaccacgccggcagggccagagagaggagcgagaggaagcggaagaaaaccaacaaaggacagcggg

SEQ ID NO: 225664 - RNA, 79 nt, Homo sapiens
agccgggcaggccccgagaggaacccagccgacacgacgccgccggcaggcccgcgcaccaggcaccgggaaaacgcag

SEQ ID NO: 225665 - RNA, 70 nt, Homo sapiens
cccagagaacagacgggcgccggaaaccaacaggcgaccccaacaggggagaggaacaacaaagaagcca

SEQ ID NO: 225666 - RNA, 82 nt, Homo sapiens
ggccacaggggcggccggcggccgagcgcgagcacccgggacggaggggacccccggacagccaacaccaaagccgcgggca

SEQ ID NO: 225667 - RNA, 47 nt, Homo sapiens
gcggaccgcgggggagaacgggaagcgagagaagcagcaacgcggag

SEQ ID NO: 225668 - RNA, 68 nt, Homo sapiens
gccaaaacagggaaaacagcaaccgaagaacagggcgccagaacagccccggaaccaaaagacgaaaa

SEQ ID NO: 225669 - RNA, 77 nt, Homo sapiens
gccgcgcaggaacgggccgacgacaccagcgccccgccaggcccgcggaagagcggagcaccgagcaacggacagcc

SEQ ID NO: 225670 - RNA, 69 nt, Homo sapiens
ggagaaaacaaagaaaggaaaagaacgccagcaaagagcacaagccggacccccacccggcccgagaag

SEQ ID NO: 225671 - RNA, 36 nt, Homo sapiens
ggcagaaggacagcccccaaggaaaccccaaagaga

SEQ ID NO: 225672 - RNA, 92 nt, Homo sapiens
cggcgcgggacgcgcgcgggcacccacggagccccggggcggaggaacaggaggcagcccggcgccgccagcagcgcgagagcaagagcaac

SEQ ID NO: 225673 - RNA, 81 nt, Homo sapiens
gcccgagagaaggccacgcccccccagcgaaaggcaaaggggccagggggcagcaaggcccaggggggacaaagaaagaac

SEQ ID NO: 225674 - RNA, 51 nt, Homo sapiens
ccgacccaccacgaacacaggagcacccacgggaacagcccagaaacgagg

SEQ ID NO: 225675 - RNA, 75 nt, Homo sapiens
cacacaccacaggaagccagacaacagaacgaagagcagggcaaaagcagcaagcgaaaaggagggcagaaaaga

SEQ ID NO: 225676 - RNA, 73 nt, Homo sapiens
ggggagaccgcgccgagcaaaggcagagaacgagggacaagagccggacagaagagagaggggagacagcagc

SEQ ID NO: 225677 - RNA, 73 nt, Homo sapiens
cgagccgcagggcggagagacaccacagagggggaggggccaggaagacaaaaacagagagaacagccaaaac

SEQ ID NO: 225678 - RNA, 50 nt, Homo sapiens
caagacaggagcaaacggcccaggacgacaagggagcgaagaaaagaaac

SEQ ID NO: 225679 - RNA, 72 nt, Homo sapiens
acggagagccacaaaaaaggaagcgaaaaccaacagcaacggacaggacagaaccagagcccaaggaagcaa

SEQ ID NO: 225680 - RNA, 83 nt, Homo sapiens
ccaaaaaaaccagagaggaaaacacaaaaaacaggaaaaacagaagaggcagggcaaaacgaggaccagaaaagacgagaaag

SEQ ID NO: 225681 - RNA, 88 nt, Homo sapiens
cgaccaccgcagcaccagcgcgggccggcgaccccgcacacacacccaccagccacggcagcccagcggggacccagccgccccgccc

SEQ ID NO: 225682 - RNA, 83 nt, Homo sapiens
gccggcaggcccgaggagcagggcccccagaccaggggcacagggcaacaacccgggcgcaggggccgaggccgggaaaaccc

SEQ ID NO: 225683 - RNA, 65 nt, Homo sapiens
gcacaccgcaaggacccaaaggggaggcagacacggggccccccaggaggcgacccggggccaac

SEQ ID NO: 225684 - RNA, 40 nt, Homo sapiens
gacagccaacacggcacccacaggagcagcgacgcaaaag

SEQ ID NO: 225685 - RNA, 83 nt, Homo sapiens
cagccgagccccagaagaaaaaccccgacagggagcgaccggagcaaggcgggcggggggcggagcaaacccccccccagcag

SEQ ID NO: 225686 - RNA, 69 nt, Homo sapiens
cgaaagaacagcagcacaggaaaccccaaagagaggagaaacagcgacgacccaaaggggaaacgggag

SEQ ID NO: 225687 - RNA, 71 nt, Homo sapiens
cacggaacagagccggggggacgaccacaagaccgggagccaggacaaaaccaggcagaaccaacacgaac

SEQ ID NO: 225688 - RNA, 57 nt, Homo sapiens
gggaggagaggagaaaccaagcagacccagagaaaggacagggacaggaaagaaaga

SEQ ID NO: 225689 - RNA, 58 nt, Homo sapiens
caaagacaggaggccaacaccacagggaagcagagccccgggccgggaaggggaaacg

SEQ ID NO: 225690 - RNA, 86 nt, Homo sapiens
ccaccaaacacgccggaaaccccgcccacagcacgaggcaccggagagcgaagcaccagaaggacacagaggaaagaacacacacg

SEQ ID NO: 225691 - RNA, 82 nt, Homo sapiens
aagcccagcaacagccagggagacggaacacaaccaagccgcgagccaaaagcgagagcggcgcccgccggccgcgcgcggc

SEQ ID NO: 225692 - RNA, 86 nt, Homo sapiens
agagcggaccgagagcgcgaaacgcacgagaagacccccccaccacagcagcagccaccgccaccaccaccgcagaggggcccccg

SEQ ID NO: 225693 - RNA, 76 nt, Homo sapiens
ccacgcagggcaggaagcggaaaggaccagaagaggggcagccaggccggcccaacagaccccaacagggcccccg

SEQ ID NO: 225694 - RNA, 83 nt, Homo sapiens
ggcaccagcaggcacccgaagacccccagcagcagacccaagaagacagaccccgaggagacggaggaggaagccaagaacgg

SEQ ID NO: 225695 - RNA, 82 nt, Homo sapiens
cggggccggggaacacacaggggcgagcaccaaagccaaggaagcccagaagaaagagcaccccccggaagcagcagggaaa

SEQ ID NO: 225696 - RNA, 107 nt, Homo sapiens
acgggaaggaagggacaagacccacagcaaagccagcgacagaagccaggggcaaagaaaaaggagagaaaaagaggcaaaacaacaagaagaaaagagaaaaaaga

SEQ ID NO: 225697 - RNA, 79 nt, Homo sapiens
ggggcccgaagggagcgggaggaggcgcaccccacagcaacccaaagggggagaacccgaaagccacgcagggccgcac

SEQ ID NO: 225698 - RNA, 66 nt, Homo sapiens
cgaaccccaaggccaaccgcgagaagagacccagaccggaccacgccacaagcgaaggcacccgag

SEQ ID NO: 225699 - RNA, 77 nt, Homo sapiens
ggaggcagaaaaaaggacggggcagccacaagggcggagaacggaaaagcaccaggaagcagagaggaccgcagaag

SEQ ID NO: 225700 - RNA, 71 nt, Homo sapiens
ggcaaacgggcccgcgccgggcaacgcggcgcaaccccacacacaaccaaagaaagccggacccacagccg

SEQ ID NO: 225701 - RNA, 43 nt, Homo sapiens
ggcaccccaccaaccgccagacggacgccggaggcgcgggcaa

SEQ ID NO: 225702 - RNA, 75 nt, Homo sapiens
cagggcagccagcggccaggggggcccgcgggccagccaccgggccgccccgacgccacaccgcggggggcacgc

SEQ ID NO: 225703 - RNA, 111 nt, Homo sapiens
gccgagcaaacacaacagaagggaacccccacaaagaacagaagcaaggaagcgggcaagacccagcgagaaagccacccacagacccacgcccccacccagaacaaacac

SEQ ID NO: 225704 - RNA, 70 nt, Homo sapiens
acccaggagagacgcaaagaccagggaaaaggaagaacaacaggaacaccagccagaacagaagaaagca

SEQ ID NO: 225705 - RNA, 66 nt, Homo sapiens
accgcacgccagagaaccgcccgcaacacaacagacccacgccgaggacaccggacgcgcagcagc

SEQ ID NO: 225706 - RNA, 82 nt, Homo sapiens
accacccagggacaagagggcgagaccgccaaggagcccgcacagcgaaagaagagacaagaaaacagagcggagagccgcg

SEQ ID NO: 225707 - RNA, 60 nt, Homo sapiens
aaaaaccagggcccacagaggaggacaacccaaaaggagacaggagaagaaccaagcggg

SEQ ID NO: 225708 - RNA, 75 nt, Homo sapiens
cagagagcgggggggggaccgccggcacgcgacccccccgggcccaaacgagcaacagcagaaaagagaagagac

SEQ ID NO: 225709 - RNA, 84 nt, Homo sapiens
ggaggcgccggcgcggcagcgagcggcggaaccccgcggcgggagcgcggcggggccgcagagccacgaggcggccccagcgcg

SEQ ID NO: 225710 - RNA, 74 nt, Homo sapiens
ccccggaaagaaagacacccaagaaggcaagaaacaacagcgcccgacaagccaggagaagacgaacacaagcc

SEQ ID NO: 225711 - RNA, 81 nt, Homo sapiens
ggagcggagccaggccccgcaagcaggccccgccagaggcaacccacagccaccccagcccccggggacaccccaacagca

SEQ ID NO: 225712 - RNA, 83 nt, Homo sapiens
cgagcgaccaggagccggggcggcgcaggaggagccgaggcgagccaacagcacgcgcaaggaagaagagacgccgcgcggca

SEQ ID NO: 225713 - RNA, 46 nt, Homo sapiens
cgccggccgacgggacaccaaggaggacagcaagacgacccgcaag

SEQ ID NO: 225714 - RNA, 63 nt, Homo sapiens
gcagggcgcccccggaagggaaacccaggaaccaaaagaggccacccagcgcgaggggaaaca

SEQ ID NO: 225715 - RNA, 81 nt, Homo sapiens
caggccgccgccggccgcgggccccggaggacgcagacggcgagcaaaacacaagaaccaaaagcacacggagaagccaaa

SEQ ID NO: 225716 - RNA, 79 nt, Homo sapiens
cgcgcgccagaccggcgagcccgagcagagcgaagaagcaggggagaggccgagcgaagaaccagcggccaaggaggcc

SEQ ID NO: 225717 - RNA, 78 nt, Homo sapiens
caaggccaagaccgccagcaaaggaagacgaggaaccagaaagagacaagaagggaccggcgcgggggacccaccacc

SEQ ID NO: 225718 - RNA, 75 nt, Homo sapiens
ggcaggaagggagggggagcaccccggaaaggaggaccacaaagaagcagaacacggagcaaagaccaggaaggg

SEQ ID NO: 225719 - RNA, 79 nt, Homo sapiens
gcaggaccgggcagaacaacgaacagaagcacaaccagagccggccccggagcaacacaagcggaaagaaggaaccgcc

SEQ ID NO: 225720 - RNA, 81 nt, Homo sapiens
gaagaccgacggaagaccacaccccgagggagcccaggacaccacgagaagcaaggcaggacgaagaccgagagaccccag

SEQ ID NO: 225721 - RNA, 75 nt, Homo sapiens
aagcagacgaaggacaagaggagggcaggagaaagcccggagggcgagggaaaaacacccagggggaagaaggaa

SEQ ID NO: 225722 - RNA, 60 nt, Homo sapiens
ccagaaaagccaaaaaaaacaaggacagcaaacaagcaggcaggaacgcagaccacacga

SEQ ID NO: 225723 - RNA, 101 nt, Homo sapiens
gacgagaggagcggagcccgcagaaccccacagcaagaggacggaaagaccacagcaagaccacgcccccagccgggggaccaggccgaacgacccggaca

SEQ ID NO: 225724 - RNA, 73 nt, Homo sapiens
caaggaagacagagccccgcagccggagacccgaaaccacggaagaggagaaccggaaccgggagcacaggag

SEQ ID NO: 225725 - RNA, 80 nt, Homo sapiens
gggcggcaagagaagaccccgcgggagggcgggcggcagcggcggcggaaccggggcagcgggcgccccacaacacgcgc

SEQ ID NO: 225726 - RNA, 32 nt, Homo sapiens
ccaggagcagaacggaaagagaaaagagccgg

SEQ ID NO: 225727 - RNA, 55 nt, Homo sapiens
acggaacgggagaagaggcaaagaaacaccaagggggacccgcgaaggccacagc

SEQ ID NO: 225728 - RNA, 54 nt, Homo sapiens
ccccacacgcccccagccaaacagacacaccacaaagggcagaagagaggggga

SEQ ID NO: 225729 - RNA, 67 nt, Homo sapiens
ggcgccccaggagaaggaccgaagcgcgacgcggagaagagcgaggaccagaaagagaaacagcggc

SEQ ID NO: 225730 - RNA, 73 nt, Homo sapiens
gaagagaagaaaccagcccgaacgaacgagaaggagaaagagaaaggaagccgaaaagcagcacgaagcaaaa

SEQ ID NO: 225731 - RNA, 75 nt, Homo sapiens
gccgaccgcccaacgcacgagacacacaccacgccaagaaccggaccccaaaggcacagaggccccacgaagaaa

SEQ ID NO: 225732 - RNA, 34 nt, Homo sapiens
ccgccccagcgacggaagacacacggcagggaac

SEQ ID NO: 225733 - RNA, 66 nt, Homo sapiens
gggagagaggacccccccccccccccaagcaccgaggagcaacacccccagggagcccagaccgac

SEQ ID NO: 225734 - RNA, 84 nt, Homo sapiens
gaaacacaccacgcggcgcgacccacacagacaacagccggggcagcggacaagaaggacccaccagccgggcaacaccccaca

SEQ ID NO: 225735 - RNA, 66 nt, Homo sapiens
acgccacggaccaaagcggagagagaggagaaaagcaacacccccagggagcgggggcggaaacac

SEQ ID NO: 225736 - RNA, 71 nt, Homo sapiens
gaacggacggaagaccagccaagcaccacaacgaagagaggaaagaagcggaaaggagggagcacacaaca

SEQ ID NO: 225737 - RNA, 72 nt, Homo sapiens
acgaccgggcgcgcggggcaccagaaggggcgagggccaagggaacggggggaagagacaccggagacaggc

SEQ ID NO: 225738 - RNA, 77 nt, Homo sapiens
gaacccaaccagggggaaacacagaacgcagggccaccaaaccacagcgggcaaagcaggacagcgaggcgcgcgag

SEQ ID NO: 225739 - RNA, 66 nt, Homo sapiens
ccaccaccaaccagagcgcgcaagggcaccgaaggaggacaaaggacagacccacgcaccccaaaa

SEQ ID NO: 225740 - RNA, 81 nt, Homo sapiens
ccccgagagcgggcacagggaaccagggccaccagagaagcgacagaccaggaaccagggggaagggagggcgggagccgg

SEQ ID NO: 225741 - RNA, 59 nt, Homo sapiens
cgagaccgccggcgcgagcgcaagacacgaaacaccgagagagagcgcagcggaacagc

SEQ ID NO: 225742 - RNA, 81 nt, Homo sapiens
cagaacagcgaaaacaagaacaggaccccaagccgaaagcagacacaggaaagcaggaaaggacaaaaggaaagagagaaa

SEQ ID NO: 225743 - RNA, 48 nt, Homo sapiens
aagcagcccaccaaccagcaaacggacagagacggagaagggaacgcc

SEQ ID NO: 225744 - RNA, 70 nt, Homo sapiens
ccccaggcagcagcagagccacccgcaggcaaccggggccgaggccagagcaagaggggaaacgaagaga

SEQ ID NO: 225745 - RNA, 35 nt, Homo sapiens
cgaggcccacagcgaaaagggagacagcgccgggg

SEQ ID NO: 225746 - RNA, 76 nt, Homo sapiens
acaagaagaagagccgcccccaccagacgaggccaccagccagggaacgccggacacccaacagcacgcagacaag

SEQ ID NO: 225747 - RNA, 80 nt, Homo sapiens
gcagcccaggccacaagacagagagcagcagcagaccagaccgccggggaaggcaccgacgagagggcgcaccgcgccgg

SEQ ID NO: 225748 - RNA, 82 nt, Homo sapiens
ggaacgaaaggaacaggagccgccaggcgacacaccggaagcagcagacaggcagcaaagaaaggaggagaagcccagccgc

SEQ ID NO: 225749 - RNA, 50 nt, Homo sapiens
gccccgggaaaacggacagcaaggccccccgcagaaacacgagggccgga

SEQ ID NO: 225750 - RNA, 56 nt, Homo sapiens
agaacaccggaaggcgggccacagagcggagcgacccggccagaccccaacagaca

SEQ ID NO: 225751 - RNA, 73 nt, Homo sapiens
gccgcaaagaggagcaagaaagaaaaagaggaagaggcaccaggcccgcaggagcaaaacaaaaccagcgaca

SEQ ID NO: 225752 - RNA, 77 nt, Homo sapiens
agaggagccgggacacgccagcgcgggcccaggaaggaggggcccggggggaggaaaacagggcgaggacgggagaa

SEQ ID NO: 225753 - RNA, 92 nt, Homo sapiens
ggacagcagagcggaacggacacaagcgcaacgaacgaagaggggagagacaaccagagcggaaagggagaaaagcccccagaaaggaggca

SEQ ID NO: 225754 - RNA, 74 nt, Homo sapiens
ggggggggcaaacccgagagaacggggcccgacaagagaggcggagccacccccacaacggaccaggagaaggg

SEQ ID NO: 225755 - RNA, 82 nt, Homo sapiens
gacgcaacgcggagcgcaaggcgagggacgagaacgagcaaaagaggcggcaaggcagcccaggcaaagaagaaaggcgagg

SEQ ID NO: 225756 - RNA, 81 nt, Homo sapiens
gggggccgccccgcgcacccgacgccccggcgggaggaggccaggccgcgcaccaacggcgaacaacaggcggcccgggcg

SEQ ID NO: 225757 - RNA, 79 nt, Homo sapiens
gagacgcgcacaagcccaggagaaacaacaagaggaacacggagacaccaccgcaccgggaaagcgggacgggaccaca

SEQ ID NO: 225758 - RNA, 67 nt, Homo sapiens
gcggaaagccaagagcgcacgggggaaacaagcgaaaaacaggcaaggaagcgcacaccacaacagc

SEQ ID NO: 225759 - RNA, 68 nt, Homo sapiens
cgccaccggacaccaaccagaagagaagaccgcagccacgagaaagagcagcacccacacacgggacc

SEQ ID NO: 225760 - RNA, 74 nt, Homo sapiens
aacgcgggcccacgggcaggacccgaggcgccagcagcagcaagaccgggggaccaggcgaacgaggcaggcac

SEQ ID NO: 225761 - RNA, 61 nt, Homo sapiens
gccccgcaccggacacagcggaggagaagcgcaggagaaagaagcagcgcaagcaagagcg

SEQ ID NO: 225762 - RNA, 71 nt, Homo sapiens
cgcgcgcggagggcaccgcggccccccaaaagcggaaagcaaccgaacccaaaacccgaaagaggaaggag

SEQ ID NO: 225763 - RNA, 85 nt, Homo sapiens
ggcacgccagagcgcgcagcagcccgaccccacaccaacggcggggcgcgcggcccggcacaccaggccacccgcgccccggacg

SEQ ID NO: 225764 - RNA, 77 nt, Homo sapiens
gcggcccacagcaggacggaagcgagggcacgggcggcagcccgagaccgcagcagggggggacaggaggacacccc

SEQ ID NO: 225765 - RNA, 69 nt, Homo sapiens
caagacaaacagacaagacaccagaaagacagagcagaaaacaggaaagaggaagaaaaggaagacgca

SEQ ID NO: 225766 - RNA, 76 nt, Homo sapiens
cacaccaccgaagaacccgaagaaaagcaacgggcagacagagcaccgggccgaaccagaggggcagagaaaacgc

SEQ ID NO: 225767 - RNA, 75 nt, Homo sapiens
aacagaagcaaggaagcgggcaaaggcacccaaaacacgggggaggcagaaaaccacggacaagaggaggaggca

SEQ ID NO: 225768 - RNA, 72 nt, Homo sapiens
gggggaaagcacagggggcagaagaaaaaccagcacgcaggaacaacagacaagcggaacaccgaagagaag

SEQ ID NO: 225769 - RNA, 77 nt, Homo sapiens
gggagcccagggaagcccgggaccgaaaaaacggacacacagcaacgaagcaggggaggagggaagaccggacagcg

SEQ ID NO: 225770 - RNA, 114 nt, Homo sapiens
ggccagcggcgcggcgggccaaggccgcgccgggcgggacgggggggcggcccggccccgcagccaccggggaccgcaaggccgcggggcccaacaaggcaagacacagcgggg

SEQ ID NO: 225771 - RNA, 62 nt, Homo sapiens
caaaggacaaccaaggagcacggggcgagaggaaaccacggaggcacaagcagaaacggggg

SEQ ID NO: 225772 - RNA, 71 nt, Homo sapiens
ccgggcggaggcggcagagaccgggcgagcgacccaggaaggagagagcaggagaagaaaggaagagacga

SEQ ID NO: 225773 - RNA, 72 nt, Homo sapiens
caacagcccaaaagcagggagccacgggccgcaaccgcccacggggaacccacgacaccacgaacaagaagc

SEQ ID NO: 225774 - RNA, 82 nt, Homo sapiens
gagagccggcgcagcagcaagcccacggaggacccccgcccgaaccgagggaacagcagccaaaggcagggaagaaaaagaa

SEQ ID NO: 225775 - RNA, 63 nt, Homo sapiens
gcgccgcgcgacaacggcccggcaggcaaggccgcaacccaggagcccccggcagcagcgaaa

SEQ ID NO: 225776 - RNA, 72 nt, Homo sapiens
gccaaggccaaggagaaccccccaggcgcagaaccagaggaagagacagccgaggacagacgagaccgggac

SEQ ID NO: 225777 - RNA, 83 nt, Homo sapiens
gcccacccggcagcacccaccccgagccccggcacccagcaagaacaccccaccagaccacccagcaagcccacaaaaaaggc

SEQ ID NO: 225778 - RNA, 75 nt, Homo sapiens
acccagagccaacagacccacaaccgagcaaagaagagacgaaaaacccggacaaaagggagacaccaccagaac

SEQ ID NO: 225779 - RNA, 65 nt, Homo sapiens
ggcaaggaagagcaagcggcggaacagaaaagacagaaaaaaaaacaaaaggagccccacacagc

SEQ ID NO: 225780 - RNA, 80 nt, Homo sapiens
agacgcaaaaggaaccagcaaaggaacacggcggaccggaaggcaacgggcgagagcagcaggaaaaggaagggaaggaa

SEQ ID NO: 225781 - RNA, 82 nt, Homo sapiens
ccggagccgcacaaaccagggccgccagaagccagagcagagaagggaagaggccagcacgccgggcaggaagagcccacac

SEQ ID NO: 225782 - RNA, 59 nt, Homo sapiens
cagggaccaaacggaccccaaagaggagcagcaggagcccaaaagaaacagggcgcagg

SEQ ID NO: 225783 - RNA, 36 nt, Homo sapiens
caggaacagcgggacccagggccgcaggggcgcggc

SEQ ID NO: 225784 - RNA, 77 nt, Homo sapiens
caccggcagccgacagcggacggcgcggcccagaacagcgaaaccagccaccccagaggagaagccaagcggaggac

SEQ ID NO: 225785 - RNA, 102 nt, Homo sapiens
gaagagaaggggagaagaaaaacccccacacagagaacgccagcaaacagcagcccccggccaccgccagcgcagcagcgcgaagggccaggagacacgccg

SEQ ID NO: 225786 - RNA, 80 nt, Homo sapiens
gacccaaaaggcgcagggagagaagagacgaggaggaggggagaccgcggcaggacacgaggacagcaacggcgcacaac

SEQ ID NO: 225787 - RNA, 61 nt, Homo sapiens
aaaaaaaaggcgcggagagccccacagcaaccccacccaggggccagacgggagccagacc

SEQ ID NO: 225788 - RNA, 74 nt, Homo sapiens
aagggcacagagggagagcaccgcgccgagccacgcggccacgcaacgcccgcggcggaaccccgcaccacagc

SEQ ID NO: 225789 - RNA, 80 nt, Homo sapiens
gaccgcacgccccgcgcaaggagggagagccaagcccagggccgaaaagaaaacaggagaaccacccgccaacagcaagc

SEQ ID NO: 225790 - RNA, 68 nt, Homo sapiens
gaaagggagaaacacagacacgaccgacacaggcacaagcagccggcagagccaagccaacacagaaa

SEQ ID NO: 225791 - RNA, 59 nt, Homo sapiens
gaaacccagacacacccaggagcgcgccagcacacgccggaacggggccaagggcgcag

SEQ ID NO: 225792 - RNA, 79 nt, Homo sapiens
aaaagaggagcgcggagggcggcgcaggccggggcgagcggcgggcccgcgggccaggccgggagggaaaaagcccagg

SEQ ID NO: 225793 - RNA, 70 nt, Homo sapiens
gcgcggagcacaaaagagcccgcggggaggcgcggccgccccgcgggggacggggaggcgagcagcccag

SEQ ID NO: 225794 - RNA, 85 nt, Homo sapiens
ggccgaagacacgcgacccggagacagcccaaaacccggaagagcgccccaggagaaacaagcaggaaacgcaaccggacagaag

SEQ ID NO: 225795 - RNA, 79 nt, Homo sapiens
ggaccggaccgcaacagagccaggacaaaaccaggcagaaccaacacgaacccaagcacaaacaagaaaacgagcaggc

SEQ ID NO: 225796 - RNA, 73 nt, Homo sapiens
gggaggagcagccgcgcgccgagaagcacccgcgacccagaagggcgagaaaacaaaaaagcagaaaagggcc

SEQ ID NO: 225797 - RNA, 75 nt, Homo sapiens
cacaggagccgggaaagggaggccaagggaggacaccaggcccagcacgagagagcgacgacagcgggggaaaca

SEQ ID NO: 225798 - RNA, 50 nt, Homo sapiens
gagaggggaagaccaagagcacagggcgagcagccccccccccccgaccc

SEQ ID NO: 225799 - RNA, 83 nt, Homo sapiens
accaaccacagacaccacgcagagacacccaggccgggcaccagaaggaaaaccaaacagccccaaaggcagagcccggcgag

SEQ ID NO: 225800 - RNA, 34 nt, Homo sapiens
acggacagcaaggaaccccgaacccaggaacaac

SEQ ID NO: 225801 - RNA, 89 nt, Homo sapiens
cgacggcgcgggagagcgcgccagccggccgcgaccccagcagagaccagagaagccccccaccagccccaacagcaacaacaggacca

SEQ ID NO: 225802 - RNA, 66 nt, Homo sapiens
ggcaccaaacacccagaacaacaaagaggggaagagacggacacacagaaagggagaaccgaacgg

SEQ ID NO: 225803 - RNA, 81 nt, Homo sapiens
gccggggcggacccggaacggcagcgcacccacccacccccgcacccgggaccgaaaagaaggcaacaggccaggggcgcc

SEQ ID NO: 225804 - RNA, 72 nt, Homo sapiens
aaaagcacaaaagaagaaaacaagaagagcagacaaaccccagaaaaggcagccggcacccgcacaacccag

SEQ ID NO: 225805 - RNA, 71 nt, Homo sapiens
ggccgaccgacacccaacgccacggcccccgcggaggagccgccccggccgcacaacccgaaacaagagag

SEQ ID NO: 225806 - RNA, 83 nt, Homo sapiens
ccgcaggacggaaacccacaggcacacccaaagggagcccaggcggcaggagagcaaggggcaacgaaggagacacacggcca

SEQ ID NO: 225807 - RNA, 78 nt, Homo sapiens
cgccgaccccccggcgccgcgccggcggcggccgacggcgcaaggccacggcaagcaccgggagcagcagcgaagcca

SEQ ID NO: 225808 - RNA, 71 nt, Homo sapiens
cccagcgacacagagccagggccagccaggaaagcgggagcgcgggagcaaaggaaagaagagaagcgcgg

SEQ ID NO: 225809 - RNA, 79 nt, Homo sapiens
cacgacaccgggggagagcccaagacgaaagggagcaacgggagcgccaaaagggcgcgagaccgggagcagcaaagag

SEQ ID NO: 225810 - RNA, 75 nt, Homo sapiens
cgagaaccgcgaaggccccaaccacggggaaacaccaaacccaccccgaggggggcaaccaggggcagagagcaa

SEQ ID NO: 225811 - RNA, 81 nt, Homo sapiens
cggagcgggcccgggccagaggcagaaaacggacggaagaaaaggcggccggcccgcagagggcagaggacgaaagcacgc

SEQ ID NO: 225812 - RNA, 72 nt, Homo sapiens
cagagaagagcgaaagggacgcaaggaacaaaaggaaacccaccaaggaaagaccacagcaagaccacgccc

SEQ ID NO: 225813 - RNA, 60 nt, Homo sapiens
aaaaaccagcggagagagagacggaggagcaggaacacggcagaaccgacggaagaacgc

SEQ ID NO: 225814 - RNA, 80 nt, Homo sapiens
caaaaggcgaagacgccaagaccacgaagagcggacggccaaggaggaggagcgcagcacccagggaaggcagagacggg

SEQ ID NO: 225815 - RNA, 81 nt, Homo sapiens
cggagggaaccgggcgcggcggccgaggccggggcggaacaacagaggcagggaagacgaggacaacggcacagcagagcg

SEQ ID NO: 225816 - RNA, 80 nt, Homo sapiens
gcggaggcgaggcgaggaagggagcggaaaacaaagaccaagacacccaggagaaagacagcggggaaaagaaaaaggag

SEQ ID NO: 225817 - RNA, 74 nt, Homo sapiens
acacaagccaaccccaggaccgagaaccgcagagacgcccgagccagcggcacgaaaccccccaggacacaccc

SEQ ID NO: 225818 - RNA, 69 nt, Homo sapiens
cgaccagaaggcgcgcggagccgcgacaccaccgacaacacccaaggcccagcgggagaagccggaaaa

SEQ ID NO: 225819 - RNA, 90 nt, Homo sapiens
ccccagccacagcacacaggaccaggcgcgagaacagagagacacgggccaaggaacccaagagagggaagaacgcaaaacaagagaaag

SEQ ID NO: 225820 - RNA, 72 nt, Homo sapiens
cggcgaccggaaaaggcccaaaggccgccaggccgcagacgcgaaggaacggcaaagcaaaccaaggcgaga

SEQ ID NO: 225821 - RNA, 32 nt, Homo sapiens
ggaccagggcagacaggcgaagaggagaggaa

SEQ ID NO: 225822 - RNA, 75 nt, Homo sapiens
gcaggaggaccaaacccaaagcaggcaagaggcagagaaaggggggagcgacacccaacaggaagaagacccccg

SEQ ID NO: 225823 - RNA, 88 nt, Homo sapiens
agaagcacagaacggaagggaagaagcgagagcaggcagaaagggggcagggcggacccgaagagagacggggcgccagggccaggag

SEQ ID NO: 225824 - RNA, 71 nt, Homo sapiens
caccccaacgcaagagcacaccacacgacaggccacaccacaaacaggacaccgacgcccggagacagccc

SEQ ID NO: 225825 - RNA, 36 nt, Homo sapiens
ggcgagggacgccgcaggagcgaccggaagggagag

SEQ ID NO: 225826 - RNA, 76 nt, Homo sapiens
gaagcagcgcaggcccaaggcggaaccggggaccggaccggggcgaggaagaggagaggcaaggcaacggaacagg

SEQ ID NO: 225827 - RNA, 53 nt, Homo sapiens
gaggcaccggaacagacgcaggaagaggcagagcaacagggacacaagcaaga

SEQ ID NO: 225828 - RNA, 76 nt, Homo sapiens
ccccgcgcagcggccccggcggggcaagagcgggggcgggaccccgccgcggcgggaggagggcagaacgaagcaa

SEQ ID NO: 225829 - RNA, 75 nt, Homo sapiens
ccgcagcccccagcacggacaggaaaacaaggaaaaggccgcgggaaaaaacggagcaacaccccgcaccgggaa

SEQ ID NO: 225830 - RNA, 40 nt, Homo sapiens
ggagaggcggcgcgggcgcgagccccaggccaaggaggag

SEQ ID NO: 225831 - RNA, 70 nt, Homo sapiens
gcccccgcgcgcccccaggccggagccggacgagcgggagaggacaccacacaaaaaacaggaaaagaga

SEQ ID NO: 225832 - RNA, 42 nt, Homo sapiens
caccaggccgcccagaaccaagaacacacacccgccgcagga

SEQ ID NO: 225833 - RNA, 86 nt, Homo sapiens
caggccacccaggggcgccaggggcgaccgacggaagaaacaggagacagaaaagcagcggcagcagcgccgcggcccacagcccc

SEQ ID NO: 225834 - RNA, 79 nt, Homo sapiens
acaaggcacggagagcaacaaagccgacccaacccaagggccaaaggaggaccagagagagaagaaaaccggaccaaac

SEQ ID NO: 225835 - RNA, 71 nt, Homo sapiens
agaggaggaggcagccagcagccggccaccaggggcgccgccagcagaagaaagccaaaaccaaagaggag

SEQ ID NO: 225836 - RNA, 70 nt, Homo sapiens
cgcccccaccggaggagcccaccggcccaaaggcccggacccaaaacaggaaaaggaaagaggcagaagg

SEQ ID NO: 225837 - RNA, 75 nt, Homo sapiens
gacagggacgaagaaaagggggagacagacccagcacggaccccccccccagccgggcgaggccccgaaacgcag

SEQ ID NO: 225838 - RNA, 61 nt, Homo sapiens
gagaagcggcaccggacacaggacccccgggcaggcaaaagcagaccggaaaacccaccgg

SEQ ID NO: 225839 - RNA, 73 nt, Homo sapiens
cagcacacgacaccgagccgccgccgaccgaggacaagcagaacgacggcggcaccaaaagagccgcgcaaag

SEQ ID NO: 225840 - RNA, 80 nt, Homo sapiens
acgcacaaaaaagggcagaagagaagcaggaaggaggcagaggcacaccgaaagcaaacagccggcaccaggagcagcac

SEQ ID NO: 225841 - RNA, 69 nt, Homo sapiens
aagagagacccgacgaagggaggggaagacaacccagaaaagaaaaggccaggggcgccgaaaaacccg

SEQ ID NO: 225842 - RNA, 57 nt, Homo sapiens
aacacacgaagccagcccagccccccagaacccacaggagggccagaggacaaagca

SEQ ID NO: 225843 - RNA, 81 nt, Homo sapiens
ggccggggccgggagcgggaacgggcgcaaccagcgacacaggaagaacagggcgaggacgaggggacagcccaccacaag

SEQ ID NO: 225844 - RNA, 74 nt, Homo sapiens
ccacggacaacccagaggacaacgaaggcgaggcgccaccacaaggacagcacaaagagaagaaaaaaaagaag

SEQ ID NO: 225845 - RNA, 85 nt, Homo sapiens
gcagggcagcccaggaagaagacgccgaagaccacgggccgcaagccacagggaccacagccgcaaagagcccaggagaggaaag

SEQ ID NO: 225846 - RNA, 78 nt, Homo sapiens
ggagagaggaacaaagcgaaacggaccaacacgggaaaacgaaaaaggagagggcgaaggcaaagcgccagggccccc

SEQ ID NO: 225847 - RNA, 77 nt, Homo sapiens
aagaaggagagccacaagaacgaaggaagggcccccgagcggggaagagaaaacaccagaaaccgagcaagaccacg

SEQ ID NO: 225848 - RNA, 59 nt, Homo sapiens
ccagcagcgccgagggaaacccggagaccaaaccgacaaggcgcccgcgaagagcccgc

SEQ ID NO: 225849 - RNA, 74 nt, Homo sapiens
aacaccggccaccggccaacaaaggacacacacaaggacgcccccagcgcgcgaccggccccaacgcacaccac

SEQ ID NO: 225850 - RNA, 59 nt, Homo sapiens
gacgcaagaaacccaggacgagaacagcaacagcaaccagccaagggaccgcagggaga

SEQ ID NO: 225851 - RNA, 59 nt, Homo sapiens
cccagacgcggcacagagagggccgggagcgcgcagccagacggagcaccgcgcccagg

SEQ ID NO: 225852 - RNA, 71 nt, Homo sapiens
ccggccaaaaaagcccgaggaaaagggccagcggagcgaccaggaggcaagacgcgaagccaggcccaaga

SEQ ID NO: 225853 - RNA, 89 nt, Homo sapiens
ggaacagcgcccgaaacaaccacagcaccagacaagcaaagcccgcaggaccggagccgcagcagcgcgcgcggcagcgggcaccccgg

SEQ ID NO: 225854 - RNA, 87 nt, Homo sapiens
ggcggaggacgacgcgccaaccagacgcgcgggagccgagccccgaggacagaaagggccgacccggagggagcggcgggagcgcgg

SEQ ID NO: 225855 - RNA, 84 nt, Homo sapiens
caccccggcgggccaggacagagcgggcagacacacgggcaccaggcccacccccagcaccacaccggcggaggcaaggcggac

SEQ ID NO: 225856 - RNA, 61 nt, Homo sapiens
cggcgcggaggagcgaggcagcgacaggacgggaacgggcaaaagcagaccggaaaaccca

SEQ ID NO: 225857 - RNA, 75 nt, Homo sapiens
gcccgcaacagaaaaaaaaagcccagcaaagagccacaggcccacgaagaggacgccagggccggggcagaccac

SEQ ID NO: 225858 - RNA, 67 nt, Homo sapiens
agacagagaggagccaaacccccagggagagacaaaggcagcgcgccccgggggagaggcccggcgg

SEQ ID NO: 225859 - RNA, 81 nt, Homo sapiens
agacgcaggacacgaggcaggagccaaagcgaccgccggagcgaggaccagggcgaacaccgcaaagggcacaagcccccg

SEQ ID NO: 225860 - RNA, 81 nt, Homo sapiens
agcccccaagagcgggacacaggagagaaaaacgaagcaacgcagccggggggcccagcgaggaagcggggaggccggcga

SEQ ID NO: 225861 - RNA, 74 nt, Homo sapiens
gaggggaaccggccccacccgggaggggggagcggcgggaggccaccgccagggaggagcgcggcaagacaacc

SEQ ID NO: 225862 - RNA, 53 nt, Homo sapiens
gaggacaacgggcagcccccacaccaaagcagaaggagggaggcgccaggcgg

SEQ ID NO: 225863 - RNA, 68 nt, Homo sapiens
cgccaagcgcgagccagggaaaaaaagaaacaagagaggagaaaagcaggagacccaaaaaaaagccg

SEQ ID NO: 225864 - RNA, 72 nt, Homo sapiens
caaggagggcgaagagcgaggagaaggcgaccaagccacgggacaagcaaaggaacagaaaaacggagaagg

SEQ ID NO: 225865 - RNA, 75 nt, Homo sapiens
gcacacgcacccaagcggcacgaaccgaaaggacgggaaacggaggagcgaagcggagggaagacaggccaacaa

SEQ ID NO: 225866 - RNA, 83 nt, Homo sapiens
cccaggcgccgcacgcggggcagcccgaggcgcaccagggaaggggagcggcagccaccccaacaaggcaaagaacggccccg

SEQ ID NO: 225867 - RNA, 79 nt, Homo sapiens
gaggagacgcgggcccgagcagccagaccgacccacccgcgcggcgagcccccagcagccgcacgggaggagggccagg

SEQ ID NO: 225868 - RNA, 78 nt, Homo sapiens
agcgggcgcggacgccgaggcaccgaggcaccagaggaggaccagaaaccacggcacccagccccccccaaacacaga

SEQ ID NO: 225869 - RNA, 71 nt, Homo sapiens
gggaaaggccgcaaggagaacgcagccagcaccagagccggagagacggagcacaaaggacccgagaccca

SEQ ID NO: 225870 - RNA, 71 nt, Homo sapiens
ccggcacgcaacaaacgcccgggaagaacgaaggcggcccagcaaaacggccaagaggggcacacaagagc

SEQ ID NO: 225871 - RNA, 71 nt, Homo sapiens
gcaggacccgcaggccagaccccgggagcccagccaccacagacaggagaaccagccaaaaaagggcagaa

SEQ ID NO: 225872 - RNA, 55 nt, Homo sapiens
ccccgagcccaaggaagggcccacccacgcagcaacgccagaacaagcacgacgg

SEQ ID NO: 225873 - RNA, 76 nt, Homo sapiens
accagccacaaggcagccagcagcagcaggacaccggggaacagagaacaacaaccaggccagaagagcaaagaac

SEQ ID NO: 225874 - RNA, 66 nt, Homo sapiens
gcgagaagccccgaagaaagcgaaacccaaggccagcggcaggccacgcagacagaccacacaacg

SEQ ID NO: 225875 - RNA, 64 nt, Homo sapiens
gaacaaaggggagacgccaggcaggaccggaaggaacaacaccaaacccaagagggcagcggca

SEQ ID NO: 225876 - RNA, 91 nt, Homo sapiens
cgaaggccgggacccggccccggcccacaggggggggcaaacccgagagaacgggacaccccccaggcacagccacaccccagcggccaag

SEQ ID NO: 225877 - RNA, 61 nt, Homo sapiens
aagaccgccacgagagcaaccgacacagaagcacggagcccaagaggagcaagcaaccacc

SEQ ID NO: 225878 - RNA, 59 nt, Homo sapiens
caaccacgacgaagcggaaggcagaaggcggcagaggagaaagagcacaaaagaggcgg

SEQ ID NO: 225879 - RNA, 60 nt, Homo sapiens
aacccagacccagcccgggcccggagcaggacagacccccagggcagagaacacaccgcc

SEQ ID NO: 225880 - RNA, 86 nt, Homo sapiens
ggccgacccgcggagacagacaagacaagaccggcggggaagcgggaggccgcaggcgggccgggccgggagcgcgccccagcaga

SEQ ID NO: 225881 - RNA, 71 nt, Homo sapiens
gggaaccgacggaagaggacgaggaccaccacacgaaaccaaggaaaaaccgggaacagcagaggccagag

SEQ ID NO: 225882 - RNA, 79 nt, Homo sapiens
accggcgcaaagaagacaaagacgcacaccaaagcaggagcggggggcccgggcacacgggcagccgcgcccgaagaag

SEQ ID NO: 225883 - RNA, 69 nt, Homo sapiens
caagggaggcggaagaaggaaccccgaagaggacgcccccgggccaaacggcagcaaaaacagacagaa

SEQ ID NO: 225884 - RNA, 72 nt, Homo sapiens
cgcgggagagaggacccccccccccccccaagagccgggcagcgacgacagcccgcgggggggcaccagccg

SEQ ID NO: 225885 - RNA, 78 nt, Homo sapiens
agaaccccaagcaacaaccacagggaaaggggcgggaaagaggccaacagaaaaccacgcacacagcaaccacacggc

SEQ ID NO: 225886 - RNA, 82 nt, Homo sapiens
gaccgagaccgcggccgggaccgaggagaaggagggggcagagcacggcaggcagaaggggccaacccgggggaacgcaccg

SEQ ID NO: 225887 - RNA, 56 nt, Homo sapiens
ccagccgcgaagacgcccagcccaagcaacaggagaaccgaaagcaggggagcaga

SEQ ID NO: 225888 - RNA, 79 nt, Homo sapiens
ggacgaagcccaaaccacaagccacaaaaggccggcgcggaagaggccggcggcgggacggccccacgggacccgcccc

SEQ ID NO: 225889 - RNA, 75 nt, Homo sapiens
aggaccagggccaaggggcgcaggggccagcagccggcacccgcacaacccagggggccgaacccagaccaacaa

SEQ ID NO: 225890 - RNA, 42 nt, Homo sapiens
gcgagagggagccgcagcgagcagcagaaaaagccaccggag

SEQ ID NO: 225891 - RNA, 60 nt, Homo sapiens
ggaacaacacaaagcacaccgccaaacccaggccagagcacagcgcaccacgacaaagaa

SEQ ID NO: 225892 - RNA, 103 nt, Homo sapiens
gcccggccgccgccccacacggagaggcccggcggcgcgcccaaccggcgacggaaccaaggcaccacagggagcagcagcggaggacgggaagggggcgcgg

SEQ ID NO: 225893 - RNA, 80 nt, Homo sapiens
gcacccagcacggcaaggacacaggaacccccacgcgccccccccaacccaacggcaccaaggaagagagaagggaaacc

SEQ ID NO: 225894 - RNA, 78 nt, Homo sapiens
caacgcgcagggcagcggcccccgcccgcagaaagagggaagaaagaggggcaagacaccgggaaagagaaaccacag

SEQ ID NO: 225895 - RNA, 84 nt, Homo sapiens
cgaggaccgagaccgcggccgggaccgagggagggagcacaggccagccccggaccgggaagaaccggagcaggagcggggaag

SEQ ID NO: 225896 - RNA, 74 nt, Homo sapiens
cgcccccagaggaaacggcccacgggaccacagcaggaggccggaaacacaccagaacgggacaaaaacaaaca

SEQ ID NO: 225897 - RNA, 72 nt, Homo sapiens
aaacccaccgagcccgccaaagaagccacgggcagaggcagggaggcaggggaacagcagacccagaccgag

SEQ ID NO: 225898 - RNA, 34 nt, Homo sapiens
gaaagaaaggcagaaggcgacccgaccaacacac

SEQ ID NO: 225899 - RNA, 63 nt, Homo sapiens
cagcagcgcagaccaccccagagaagagcagcgagccggcaacggcagaagaggcgggaagag

SEQ ID NO: 225900 - RNA, 61 nt, Homo sapiens
cgagagcgagcgacccagcccgcgagcgagggagcccaagacgaaggggccacggaagaag

SEQ ID NO: 225901 - RNA, 58 nt, Homo sapiens
gggacagggcaaagaccaccaaaacccacgggcacaacggggcgacaagagaaaaaga

SEQ ID NO: 225902 - RNA, 31 nt, Homo sapiens
gcagaggacgccagaaaccagggcgaaggac

SEQ ID NO: 225903 - RNA, 72 nt, Homo sapiens
caaggggcggaggaagggaggagacccgaccccagaaggagccgggcagagaaaagaacgcgaggagaaccc

SEQ ID NO: 225904 - RNA, 41 nt, Homo sapiens
ccggcgcaggagcagcagcgcagccacagaaagcccgcccc

SEQ ID NO: 225905 - RNA, 79 nt, Homo sapiens
aacacccgacacaaccgaccaggaaaaggaaaaccgccagaacagcccaagcccaagagagccccaaaacagaagaaag

SEQ ID NO: 225906 - RNA, 76 nt, Homo sapiens
cgacccccggggagccagcgagcccccccgacacggccaaggaaggaagagggaaggaaaaagaagacgccaaaaa

SEQ ID NO: 225907 - RNA, 81 nt, Homo sapiens
gccggcggacaagcaaggcaaaggaagccggacccggccacaagaccagcacaaggacagggggggccgcccgcccaaggc

SEQ ID NO: 225908 - RNA, 80 nt, Homo sapiens
ccagcaccaccaggacgcccgccgcaaaccggagaccaacccggagggacagaaccggagcgaggcaccgcagggcgccc

SEQ ID NO: 225909 - RNA, 79 nt, Homo sapiens
caagacgagacacccaaccccagaccagagaaacggaacgagccagaccaaaagggacaggcacaaaggggcaaagaag

SEQ ID NO: 225910 - RNA, 83 nt, Homo sapiens
acaaggcaaacacacaaaagagaaaaacaaccagcaagggacgcgaaaaagacaagaaccagaggaccggcaacaacccgagg

SEQ ID NO: 225911 - RNA, 78 nt, Homo sapiens
agaacggcaaaagcacacaagaaggaagacggagcaaagccaggaggacggccagcccccggagcgccacacacgccc

SEQ ID NO: 225912 - RNA, 74 nt, Homo sapiens
gggggggagagaggacagggccccgacagccaccgaaccaaaagggagcgagagcaccagaggcccggcagccc

SEQ ID NO: 225913 - RNA, 69 nt, Homo sapiens
agacgaggcgcccgggagaagggggaggccccgcaaccaggcggagcaggagcaaaggagcaagaaacc

SEQ ID NO: 225914 - RNA, 78 nt, Homo sapiens
caccggcggcgggcacacagacacgcacggagggcccaacccacagcgccccagggaggcgggacaccaggacacagg

SEQ ID NO: 225915 - RNA, 70 nt, Homo sapiens
gaggcccaacccccaccccgcccaaggaggcccagcggacgagaagcgagaagcgaacaaaaaaaaacag

SEQ ID NO: 225916 - RNA, 82 nt, Homo sapiens
ggagcacagaacgaggagagaagcagagaaagagccaccccaggcaagggggcggcaccaaccgggaacggcccaacagggc

SEQ ID NO: 225917 - RNA, 55 nt, Homo sapiens
gccaggaaggaggaggaaaaaaggagcaaaaggaacacaacagggagcgcaggaa

SEQ ID NO: 225918 - RNA, 84 nt, Homo sapiens
aggacgagaacagggagaggcgacccgacccccagggcccgggccaggacaggcccccacagagagcacacaaacaaagcgaaa

SEQ ID NO: 225919 - RNA, 70 nt, Homo sapiens
caaaaccacaggcacaaagaggaaagacaggggagacacacccaccaaacggggacgacagaaagacccg

SEQ ID NO: 225920 - RNA, 76 nt, Homo sapiens
caggagaagaaggccgacacggagggggccagggacaaaccgaagaaaaaaagcagcacacaccaacgaggccagg

SEQ ID NO: 225921 - RNA, 83 nt, Homo sapiens
ccgcgagcggcgcagcgagccgcggcccgggcgggcgccggcgcggggaacaggcaggaaaacgacccaaaacagccaccaac

SEQ ID NO: 225922 - RNA, 83 nt, Homo sapiens
cgaacagagaacagcgccggaaaaccaccaccccagcaaaagagggccgaccaacccaccggggcacgccgagacacccgcca

SEQ ID NO: 225923 - RNA, 62 nt, Homo sapiens
ggacccggcgaagacgcgaccgcggcgcgagcaccagagaggacaccgagaaaaagggccgg

SEQ ID NO: 225924 - RNA, 76 nt, Homo sapiens
agccccggcggcccccagagccagagcgcccgccaagcaagcgagccgcagcccccaaggccgcgcagcacacgcg

SEQ ID NO: 225925 - RNA, 84 nt, Homo sapiens
cccgcgggcccaagcacaccggagcaacaaccggcgggccgaggccgcaggaggagggaggaaagaaggagagagagaaggcga

SEQ ID NO: 225926 - RNA, 78 nt, Homo sapiens
agaaccaccagcaaccaaggacccccaaaaccacaaacgccacgcagaacagccaccaagagaaaaccccgggaaaca

SEQ ID NO: 225927 - RNA, 79 nt, Homo sapiens
cagggcgaagggaagcagagagcccgggcccggccgggggcggcggccggcgggcaaaggacgccaggaggaagggaca

SEQ ID NO: 225928 - RNA, 80 nt, Homo sapiens
agcagcgcgcaagaaggccgggacagcagaaaacagccagcagaaaaagccaaaaagcaagcggacaaaagaagaaacaa

SEQ ID NO: 225929 - RNA, 67 nt, Homo sapiens
gacaaccagaccggaggagacaaaggcaccagggacgccaagaaagccagaaaacgaaccgaaagca

SEQ ID NO: 225930 - RNA, 75 nt, Homo sapiens
gagagcccacagcagacccaacggcaaccgagacgaagacaaggggcaaaggagcagagaacgacaagccacacg

SEQ ID NO: 225931 - RNA, 83 nt, Homo sapiens
gcggccaagcagaaaggaacagaacgcggccccagccacaccaagcaggacagaagcagacaacaccacggggaacgcggaca

SEQ ID NO: 225932 - RNA, 75 nt, Homo sapiens
gagccgccacgccagccgcgcaggccgggaacggcagacgcagcagagagaccaccagcgagcgcaggccgggaa

SEQ ID NO: 225933 - RNA, 80 nt, Homo sapiens
gagaagcaaggcgacgccagaggaggaaaggaagacaaggaacacagcacccacccacacccacacccgcgacgggaggg

SEQ ID NO: 225934 - RNA, 77 nt, Homo sapiens
gcacgccggcacgggaggcagaaggaggaagaagaagcacagaaaaccgcagaacgggagccggcgcggcaggggcg

SEQ ID NO: 225935 - RNA, 67 nt, Homo sapiens
ccagggcggcggccagcgccacgcgagcggcagcccacaagcaggaagaccagccccaggagggaaa

SEQ ID NO: 225936 - RNA, 78 nt, Homo sapiens
gaagaaacgcagaaccacccacaaccagcagcaccgaccccgaaaggagacccaacaccccggccagacgggccacca

SEQ ID NO: 225937 - RNA, 82 nt, Homo sapiens
ggaggaccgacgcagccaggacgaaggagacgcaggagggagagcagccagaggaagaagaggaccaccgcacaaaaagccc

SEQ ID NO: 225938 - RNA, 131 nt, Homo sapiens
agagcccagccaagcacaggagaaggcgacaggaaccagccgggggccaaccgaggagccacgcagcagaaaagagcaccggccagcagaaccagccggggccggcaagccccgcccaagaagagccagag

SEQ ID NO: 225939 - RNA, 80 nt, Homo sapiens
caggccaagaggaggggcccgcgcaggccaccgaaaggccaggagcgcccaggaaacaaggccgacggcgagaccccacg

SEQ ID NO: 225940 - RNA, 78 nt, Homo sapiens
aaagagaaacccggagggcgccgggcagggcagaaaagaacagacccagaagaagcgaaaggggagaaagaagaaagc

SEQ ID NO: 225941 - RNA, 83 nt, Homo sapiens
agaggggcaaacagaggaagaggaagccagaagagggagagacagaagacagcagggaagaacggaaaccagagaaagaaacg

SEQ ID NO: 225942 - RNA, 75 nt, Homo sapiens
aagcccggccgcagagaagagcgaccaagagcaggagacgaaaggggcgaggccacgaggaaaacagaaaagcag

SEQ ID NO: 225943 - RNA, 72 nt, Homo sapiens
ccggaaggcaagaaaccagaaagagaacgggacaacaaaagagccacccaagaccgaaaccgagcagcaaaa

SEQ ID NO: 225944 - RNA, 66 nt, Homo sapiens
gaaaaacacaggacacaaccagcaccacccaacacagaccgaacaaccacagggaacaccagaggc

SEQ ID NO: 225945 - RNA, 70 nt, Homo sapiens
gccccagccagggaccggaggacgaccagcgcaacaaccaacgggaccaaacccccgcagcaacccaaac

SEQ ID NO: 225946 - RNA, 74 nt, Homo sapiens
cgagaagggagacgacgcgcgggccgcgagcggggcgacccgagaaaggagaccaggcggacgacacaaaccca

SEQ ID NO: 225947 - RNA, 76 nt, Homo sapiens
ccagcgccaccgacccggaagccacagggaggaggaccagcgggagggccacggaacgccacaccggcaagacaga

SEQ ID NO: 225948 - RNA, 68 nt, Homo sapiens
acaacaaaagagccacccaaggcgggagagccgcccccccggcgccaccgccacaaagagccaccggc

SEQ ID NO: 225949 - RNA, 85 nt, Homo sapiens
cgggacccccgggccagggggaggggcgaccccggggcccggccagcacgaccgaggaggggcggacagcggaggagaacggaga

SEQ ID NO: 225950 - RNA, 67 nt, Homo sapiens
agccaacggagaaccaaggccaagaccagaaccagcccgggaaaggaaccgaggcccccaccacggg

SEQ ID NO: 225951 - RNA, 70 nt, Homo sapiens
ccacagagaagagcaaaaccagaagcggggagaaggccacacgggaaggaccagagcccaaaagaaacag

SEQ ID NO: 225952 - RNA, 63 nt, Homo sapiens
gaagaggcggacggaggagcaggcgagaagagaaggccgcacccagcgcggagagggaggcag

SEQ ID NO: 225953 - RNA, 73 nt, Homo sapiens
agcggaaggaaggcggccgccgagacaccagcccgggcaagggagaggagaacggccacggcccaaggaggac

SEQ ID NO: 225954 - RNA, 78 nt, Homo sapiens
agcggccggagggcgcgggaaggagccggaggcggcgaggagcgccgccgaggagagcaggcgcagaacagcgggaaa

SEQ ID NO: 225955 - RNA, 72 nt, Homo sapiens
aaaacagggagaaacacagccagaagacgaaggaagaccaaggaagaacaggcaagcgaaaaagggaaaagg

SEQ ID NO: 225956 - RNA, 74 nt, Homo sapiens
aggcgcacccacccgcgccggcacgagggcacccaggcgacacacgggaggggaggacaccagaggcggggccg

SEQ ID NO: 225957 - RNA, 48 nt, Homo sapiens
ccgcgcgggcgcaagaggacaagaggaaaaacagcgagggaaaagcag

SEQ ID NO: 225958 - RNA, 85 nt, Homo sapiens
gcggaccccccgccaccgcccgagcccagggaaaccagacgaaacaacagccaaagacaaacagcacaacaaacaaccggaacca

SEQ ID NO: 225959 - RNA, 80 nt, Homo sapiens
aaggaccggcacaaggacgccaagggggcgagagaacaggcaagggccaagacaagcccagagggccgaggaacggcccg

SEQ ID NO: 225960 - RNA, 35 nt, Homo sapiens
acagaacgcaagaagaccggagagaacagaaaaaa

SEQ ID NO: 225961 - RNA, 72 nt, Homo sapiens
cagccccaaagagcgagacacaggaccgacagcacgaggaggagagaagaaaagcggcccgagacaacaagg

SEQ ID NO: 225962 - RNA, 66 nt, Homo sapiens
agcaaagacaaggaaaaaaccgggagacacgggaccaagaaacagcaaagacagggccacccaggg

SEQ ID NO: 225963 - RNA, 67 nt, Homo sapiens
ggccaggcagggaggagacagcacgggaagcccaacaggcaaaaaccgggcaaaggaggagcacgcc

SEQ ID NO: 225964 - RNA, 40 nt, Homo sapiens
gccaccggaccggggccaagcaggggccgggagaggaagg

SEQ ID NO: 225965 - RNA, 78 nt, Homo sapiens
gccaacggccccagcacacagccagagagccaggaagcaaggagggcccagcaagagccccagggccggagcaccgcc

SEQ ID NO: 225966 - RNA, 117 nt, Homo sapiens
gcgagaccggagagccgcaggacggcgcggcagagccccgacgccacagaacgggacccggcaaagagagaggcacacgccgccgaaggccaggagcagaggccaacgccccaagcg

SEQ ID NO: 225967 - RNA, 69 nt, Homo sapiens
gcgggacagaccacaggagccagcggcaagaccagggcagcaaggagaggacgacagaggaacggcaaa

SEQ ID NO: 225968 - RNA, 72 nt, Homo sapiens
gccgagagccgcccgggccagcggccgcgcacccccggccggaggcaccagccggagcggaggcagacacac

SEQ ID NO: 225969 - RNA, 79 nt, Homo sapiens
ccgacccccgccaccccccaccgccgcgggccgggagcggagcagacccccagccggcgagacaggcaacagagagcag

SEQ ID NO: 225970 - RNA, 80 nt, Homo sapiens
cacggaccccaaggaagccacggcagacacacaacccgacccgacgagcaggccgacagaaaacaaagaaaagaggcagg

SEQ ID NO: 225971 - RNA, 54 nt, Homo sapiens
aaggagagaaagcacgaagggagcgcaaccccagaagacgcagagccagaagac

SEQ ID NO: 225972 - RNA, 68 nt, Homo sapiens
cagcagggggcgaacgaagaaaggccgcaaggcacaaagacagcagacagcaggcaaggagacagaca

SEQ ID NO: 225973 - RNA, 62 nt, Homo sapiens
aagcgcagaacaggagaaaacacaaccgagacaccaaaaagaagcaagaaccgagcagacaa

SEQ ID NO: 225974 - RNA, 79 nt, Homo sapiens
acgcccaaaggccagagcacagcgccaaagcaggaagagcgaaccaggcagcaaaagagcccaccgagaccaaagggaa

SEQ ID NO: 225975 - RNA, 87 nt, Homo sapiens
ggacaccaacccgccaccgggagcagacggcaagagacaggggccaggccaggggcaggggaagcacccaaccaacgagcgggccac

SEQ ID NO: 225976 - RNA, 74 nt, Homo sapiens
gcagcaaagaagggaccaccaagaccgaacccaacaaacagagcgacccgggaaagaaggagcacaagaacaaa

SEQ ID NO: 225977 - RNA, 72 nt, Homo sapiens
cacggaccagcagaacagaaacaagccggagacgggaagcccaacgcgaagaaaagaagccagcggaggggc

SEQ ID NO: 225978 - RNA, 78 nt, Homo sapiens
aaagcaccaacgagacccgccacacgagagcgcacgccacgaggagcagggggggcgccgcgcgaagcaccgcacgcc

SEQ ID NO: 225979 - RNA, 79 nt, Homo sapiens
accacccgacccagagcccccgcccgcagacggccgggggccccagagccccacgcggcccgggcaggccgaggccggc

SEQ ID NO: 225980 - RNA, 59 nt, Homo sapiens
ggggaggcgcccccggagccgccccggaggagaaggacacgcccaccaagaaagaaccg

SEQ ID NO: 225981 - RNA, 73 nt, Homo sapiens
ccgacaagcacaggggagaagaggagaagggcggacgccgaggcccacgagaggcagagaaaggacgccgcac

SEQ ID NO: 225982 - RNA, 57 nt, Homo sapiens
ccaaggaagccacggcagacacacaacccgacccgacgagagcccagcgccagaaac

SEQ ID NO: 225983 - RNA, 80 nt, Homo sapiens
ccacggacagacacgcgccggagagaaacagcgacaggacacaggagccaggcgagaagcaacacagcacccggcggcaa

SEQ ID NO: 225984 - RNA, 71 nt, Homo sapiens
aagagaagccaacagggcaagaaccgacaagccaccggcggaaagcgcaggcggcaacaagaacaaccgca

SEQ ID NO: 225985 - RNA, 68 nt, Homo sapiens
gcccaaccgccacacagagccgacaaggccgaccggccccaaaagcacgcacgaaaccggcaagccag

SEQ ID NO: 225986 - RNA, 74 nt, Homo sapiens
gcacgacaagccagaagacacaagcaggcacgaacaaagaaggcacaagaagcgggaccagcgacgacgcagaa

SEQ ID NO: 225987 - RNA, 93 nt, Homo sapiens
agaacgaacccaaaaggagccaggagaaaaaggacaggagccagcccgagaagcaggagagaaagaagccaagcgaaaaaccaaaccagcaca

SEQ ID NO: 225988 - RNA, 49 nt, Homo sapiens
caggcaggaagcagaaaccaagagaccggggcaagcggaacggcacccc

SEQ ID NO: 225989 - RNA, 72 nt, Homo sapiens
gagcaccggacacgaggagaaacagcagaaacgcaccaggccaaagaaagagaagaaaagggggccaggaag

SEQ ID NO: 225990 - RNA, 42 nt, Homo sapiens
cagcccccaccaacacaggaaggcccagaccaggaccaacaa

SEQ ID NO: 225991 - RNA, 77 nt, Homo sapiens
aggcccggaggcggcgggagggccgccggaggaaacgcgcacgggaaacgccggccacggcaacccggcccgaagag

SEQ ID NO: 225992 - RNA, 82 nt, Homo sapiens
gcagcccaacccagcaggacaaggagccccccaacagagcgagagaggcacggagcgcagcaggaccagcgagagccccgcc

SEQ ID NO: 225993 - RNA, 74 nt, Homo sapiens
ggacgaggaaacaccgaagggaagaacacaccagggcagacacgaaaaaaacccaagcgggacacgaaagcacg

SEQ ID NO: 225994 - RNA, 72 nt, Homo sapiens
gcaagagcagaaaacagaagcggacagacggaaaccaaggagcgagagcaaaccccggccacacgagacaca

SEQ ID NO: 225995 - RNA, 78 nt, Homo sapiens
gcggcggagacgcacaggcccgcaacacagaagggaacaagcggacagaaaaagagaacaagccccggccagaaagac

SEQ ID NO: 225996 - RNA, 71 nt, Homo sapiens
gcgagcgagcgggccgcccaccacgccagagggggacggaagcggcagcgggcagccggcccagcacaggg

SEQ ID NO: 225997 - RNA, 77 nt, Homo sapiens
gcggagcaaagacgcaaagcgcccaggcggcagcggcccccggcgaagaagccccaagacagccagcggaggagggc

SEQ ID NO: 225998 - RNA, 80 nt, Homo sapiens
gagccgccaagaggcggcgcagccaccccgcgggaacgcccagcgcgggccaaccgccccccagcagcaggcacgggcga

SEQ ID NO: 225999 - RNA, 83 nt, Homo sapiens
aaaggccggagagcggcggacagcagggagcggccgagccacccaaaaacagagccagagcacagagcaccacgaacaaacag

SEQ ID NO: 226000 - RNA, 87 nt, Homo sapiens
ccagaagagagagaagagggcagagccggcaggggcgcccccaggaccgagcaggaaccggagcaggacagagcgggagccaccagc

SEQ ID NO: 226001 - RNA, 84 nt, Homo sapiens
cggcgagaccaccgggcccgcggccggccggagcgcggcaggacggcggaggagcacaggcggaggcagcggaggccccgccgc

SEQ ID NO: 226002 - RNA, 58 nt, Homo sapiens
cccaaaagccgacaaccccagaaacaggggggcaagcggggccccggcagacggaccc

SEQ ID NO: 226003 - RNA, 65 nt, Homo sapiens
cgcagcaaagcgcccagccgccgcccgcgcccgcggccgggggaaaggcagcaacaggggaagcg

SEQ ID NO: 226004 - RNA, 81 nt, Homo sapiens
ggacaacgaaacaaaaaggaaaaggcagcaaacccaggacaagccagcgcccagccggggccccagaaaagcagggaggcc

SEQ ID NO: 226005 - RNA, 88 nt, Homo sapiens
gccgagcacccgaccgcacccaggccgcgaccccaggaccccacgcggcgggcgcgcgagggacgcccgcagggccccggaccccggc

SEQ ID NO: 226006 - RNA, 68 nt, Homo sapiens
gccagccggacacaccacggaggccaaaccaggggaaaggaggacaaaaggaaaaaaaaaaagggaag

SEQ ID NO: 226007 - RNA, 75 nt, Homo sapiens
aaccagaggagggaaaacgccgaagaagacggcaccaaacggcaaggaggaaaaaaccagaaaccagacggcggc

SEQ ID NO: 226008 - RNA, 70 nt, Homo sapiens
ccccggagcgcacacacccgacaccaaagagccaacacccgaagcgaagggcggacagacccagagcagc

SEQ ID NO: 226009 - RNA, 76 nt, Homo sapiens
ccgcggacacgcaaggggccaagaaggccgggcgccaccccaaaccaggaaagacaggagaggaagacgaggaagc

SEQ ID NO: 226010 - RNA, 82 nt, Homo sapiens
caaggagcgcggaaccgcgcgccgccggcaggcgcccgagcacgccaaccccaaccccacggacagcgcccccaccgaacac

SEQ ID NO: 226011 - RNA, 70 nt, Homo sapiens
ccagaagaaggaccggaagcacacaacaggaaaacaaaagaggagaaaggacagggggaccgcccaggcc

SEQ ID NO: 226012 - RNA, 55 nt, Homo sapiens
acgaccccacgacggcaccgcaaggcacagaccaacgaagggccgaacgcccaaa

SEQ ID NO: 226013 - RNA, 66 nt, Homo sapiens
aggaccaagaaccagagagaacacaagaagaaagacagcacgggccgagccgcgcaacgccccgcc

SEQ ID NO: 226014 - RNA, 70 nt, Homo sapiens
acaccgcgaagaacggaccggaccgaagacacgggaaaaggagaaggcaagacagcgccagggacaagaa

SEQ ID NO: 226015 - RNA, 63 nt, Homo sapiens
caccacagcacgacagccaggagaacacccaccaagggcagaagccccagaggagcccgaaac

SEQ ID NO: 226016 - RNA, 68 nt, Homo sapiens
ccccgagagggccacgaaaccgccccacacacccggggacaggaaggacacagacaaaagaccaggag

SEQ ID NO: 226017 - RNA, 83 nt, Homo sapiens
caggccgcgcgggcccgaggccggaggaacccggacccggcgagcgggaagaaagcacgggaaaaggccgggcccacagggga

SEQ ID NO: 226018 - RNA, 86 nt, Homo sapiens
gccgagccgggccgcggcgccgagcgaacggggagccgagcggagcgccgcggcgcagccagaacggccgagcgaccaggagagga

SEQ ID NO: 226019 - RNA, 67 nt, Homo sapiens
ccaacccggagagcggcgagggaccggggcgccagcaaggcccagacgccggcgcagcagcccccaa

SEQ ID NO: 226020 - RNA, 67 nt, Homo sapiens
aaccaacccaccagccagacaacacaagaagcgaccaggcaccggccagggccggccacagcggggg

SEQ ID NO: 226021 - RNA, 74 nt, Homo sapiens
cacacaggccagaacgagggcgaccggcccgaggaccgccgcacgaccaaacgcagaacccacaccccaaggcc

SEQ ID NO: 226022 - RNA, 49 nt, Homo sapiens
aaagcaaagacaagccgggaagagaaagcgggaccgagggcggcaccac

SEQ ID NO: 226023 - RNA, 68 nt, Homo sapiens
aggagggcaaggcgcccaggaggcacacacgaaggaaccaggaagacagaggagcggggaaccgggca

SEQ ID NO: 226024 - RNA, 67 nt, Homo sapiens
aacacgcgcaagaagaacaagaaacccacacacagacgccaagacgagaagaagaccgcaggaaagc

SEQ ID NO: 226025 - RNA, 89 nt, Homo sapiens
gcagaggaagaggcggcggcgaaaggaacggcgaaggcccacgggagaaaaccgggcgcaagggcaagacacagcagcagccaagcgca

SEQ ID NO: 226026 - RNA, 57 nt, Homo sapiens
cgaacaccggaccgccaggagccacagggagaagcagacacacagcgcgagacggcg

SEQ ID NO: 226027 - RNA, 80 nt, Homo sapiens
cacccagggcccccgcgccggaggacccccagggcccacgagacgcgaacaaacgccgcgccgccagaagaacagaccgg

SEQ ID NO: 226028 - RNA, 85 nt, Homo sapiens
aggaaacacccaccccgcgaggcccccgggcccgggaaaacacacggccaggcacgggacgcgcacgaccagcgcagaaggaacg

SEQ ID NO: 226029 - RNA, 57 nt, Homo sapiens
cacacgacgggacccacgagcggcggagaaaccaccacaaacacgaggccagcaacg

SEQ ID NO: 226030 - RNA, 80 nt, Homo sapiens
caagcggagaacaaacccgcccaaccgagcaagcagaacagaccaagagaggaaagagagagcgccaaaaagagcccaac

SEQ ID NO: 226031 - RNA, 77 nt, Homo sapiens
gcaaaccccacaaccccaagcgggaccagcgacgacgcagaagagaggcacagagagaaagaaggaaaaagaacgac

SEQ ID NO: 226032 - RNA, 73 nt, Homo sapiens
aaaaaaagaacacaagaaaccaccaaaagggaggccagcaaagacacgggaaagagaaacgaggcgaaaagca

SEQ ID NO: 226033 - RNA, 75 nt, Homo sapiens
aggagaaaagcagagacagaagagaagaacaccgggacccagaaaagcccaaacagaagaacggaagggccggaa

SEQ ID NO: 226034 - RNA, 85 nt, Homo sapiens
acagcgaaggcgcgagggacaagagcagaggcccgccacaaaaacggcagcagagccaaaccaggacggaccagagaaggagaga

SEQ ID NO: 226035 - RNA, 74 nt, Homo sapiens
gggaacagcccaggagccagagaggccccaaaagccacgccgaagaaagacaaaaacacaggagagaacaaaca

SEQ ID NO: 226036 - RNA, 58 nt, Homo sapiens
acaggcggaccagaacggaagaccaaacaggggcacacaaggcagcccgacaaagcaa

SEQ ID NO: 226037 - RNA, 73 nt, Homo sapiens
gcaaaggcgggagaaaggaggcgcacagaacgcccaccgggggaagcccagccccagaacacagaacgcgcac

SEQ ID NO: 226038 - RNA, 49 nt, Homo sapiens
gcggggacgcggacgcacgaccccgccccccgaggcgcagcccgaaccc

SEQ ID NO: 226039 - RNA, 88 nt, Homo sapiens
ggacgaggggagccgcgcggcccgacgagcggagcgccgcaggcgggaggaggaggaggagagcgcaaaagacgagaggaccgacacc

SEQ ID NO: 226040 - RNA, 76 nt, Homo sapiens
accaacggagacaaaacagccagccaaaacagaagaggcaaagcccagccacagcagcagcccagcagcaaacaac

SEQ ID NO: 226041 - RNA, 70 nt, Homo sapiens
agagacagggaacaccgcaccggcaaaccgacaacagagccgaagaagccccacagcacggggggcaggc

SEQ ID NO: 226042 - RNA, 73 nt, Homo sapiens
cgggagcccgcagccccggcgcgcgaggaccggcagcgccaacccaggcaccagccacaggggagaacaaaac

SEQ ID NO: 226043 - RNA, 74 nt, Homo sapiens
gagaccaacgcacaaaaaaaaccggagaaaaagcagacagcaggagcaaaccacacacccaaaaaggccgacag

SEQ ID NO: 226044 - RNA, 79 nt, Homo sapiens
aaggggagccaaaagcagcccgccacaacaaacaggcgaagagagaacacgcacggaaggaaggagaccacgagaaaga

SEQ ID NO: 226045 - RNA, 84 nt, Homo sapiens
ccccaagagcggggcacagacgcgccaggggccagcgacggggaaggcaggggcgaacgcgggggaaggggaggcgacacccag

SEQ ID NO: 226046 - RNA, 92 nt, Homo sapiens
cgccagcccagcaaagcagacggccgcacgcgacccgaaggcacgggcgagagcgggaagagcacgcacaagcagagcgcacaccacggcgc

SEQ ID NO: 226047 - RNA, 73 nt, Homo sapiens
acgcagccccgcacagaaccggcggagaaaccaccacaaacacgaggccagcaacgaccaacaagacagaccc

SEQ ID NO: 226048 - RNA, 38 nt, Homo sapiens
gagccgcccggaccgcgcaccacagcagcagaggagaa

SEQ ID NO: 226049 - RNA, 36 nt, Homo sapiens
ggacacccgccacgagccggaggagccaccaacaga

SEQ ID NO: 226050 - RNA, 78 nt, Homo sapiens
cccgccaggcgagaggccccggcacgccccgcccaggagagaaggccaaggacgccaacacaaagacaagaccccaag

SEQ ID NO: 226051 - RNA, 63 nt, Homo sapiens
ggaggcgcccccggagccgccccggaggagaagggccacggacagagcgaaggggagaggagg

SEQ ID NO: 226052 - RNA, 60 nt, Homo sapiens
gcgcgggcagccgggaggagacaacaacaaggggccggaggacgcggggaaccagaccgg

SEQ ID NO: 226053 - RNA, 73 nt, Homo sapiens
caggcgacaaccgaccggagcccgccagacggggagggcagcgcggcagagaagaccacggggcgggaacagg

SEQ ID NO: 226054 - RNA, 70 nt, Homo sapiens
cgcgagaggacgcaaaggagcagcgcagcccgcgacacacccaggcgcgcaggcccaagcgggggcgaga

SEQ ID NO: 226055 - RNA, 85 nt, Homo sapiens
acggggaaagaccacgaccgcagacccaaaaagcgccagcgcccgggagcgggcgggagcgagccgggagcgagccagcagccgg

SEQ ID NO: 226056 - RNA, 75 nt, Homo sapiens
aagaagagaagaccagcaaaaggagaccccccgcaaaacacaagaaggcagaaggaaagaaaggcagccggccaa

SEQ ID NO: 226057 - RNA, 74 nt, Homo sapiens
cgaccgcgcgcacccgcacggaaggggcacacccgccgaggacggcacccccggaggccaagagaacccaagaa

SEQ ID NO: 226058 - RNA, 76 nt, Homo sapiens
ggacaagaggccaaccaaccggaggggacaaacaacggaaagggcgaagacaacaggccacgccaaccccaccagg

SEQ ID NO: 226059 - RNA, 67 nt, Homo sapiens
agggaccgagaccgaaggcaccaaacagagaggccagggaggaacaagagacaacaagacggaacac

SEQ ID NO: 226060 - RNA, 77 nt, Homo sapiens
cgggccgccccgcccgaaaggagaacaaccgcaacgaacaaacaggagacagagagcaagagcaccccaacggccca

SEQ ID NO: 226061 - RNA, 79 nt, Homo sapiens
ggggacgaacaacagcaccagacggaaacgaaacacacagcccacccaaacaggccagggaaagggagcagcaccggcc

SEQ ID NO: 226062 - RNA, 92 nt, Homo sapiens
gacgagacgccccgaaggagagaaagggaccagaggaagagcaaggcagcaccagcgaggaggggggaccacagggccgcgcgggcaggccc

SEQ ID NO: 226063 - RNA, 94 nt, Homo sapiens
gcagagccgccggggagggagccagaagcaacgaggcccagggccccggccaggcccagccccgcgggagacccggccagcaccacggacggcg

SEQ ID NO: 226064 - RNA, 78 nt, Homo sapiens
ccagaggggaagccaagcaaacgcagaaggacgcccacgagcaaccaagagaccgcacaggcgcaggcgcaaggggcc

SEQ ID NO: 226065 - RNA, 71 nt, Homo sapiens
gcacacaaagaggaaaggacacaaggcccagaaacacccggaacacaacagcgagcaacagcacagcaagg

SEQ ID NO: 226066 - RNA, 83 nt, Homo sapiens
ccggggccgccaccacacgaaacagggcaagacgaaagaggcggacgaacccaaggaggcaggaggaggcccagcccacggcc

SEQ ID NO: 226067 - RNA, 64 nt, Homo sapiens
agcaaggaagaaagcagcccagaacgagaaagcccacagaagaaaggaaggcaagaccgaaggg

SEQ ID NO: 226068 - RNA, 83 nt, Homo sapiens
aggaagcgggagggaccacgggcggagacgaggcacggaaggacgagcgcacaggagccggaggaaccacggacaacaacagc

SEQ ID NO: 226069 - RNA, 72 nt, Homo sapiens
cggcgcgggacgcgcgcgggcacccacggagccccggggcgggaaacccagacgacaaggaaggccaaggga

SEQ ID NO: 226070 - RNA, 73 nt, Homo sapiens
aaaagcccggggagcgaagggcaggaaggaggcagcgcaccgggagacgcggggagggaggggcccacccaga

SEQ ID NO: 226071 - RNA, 75 nt, Homo sapiens
agaagcagcagcccaggccaacagggaagcagcggcggaaggaggaacacggccagggcgcccaagcacacgcag

SEQ ID NO: 226072 - RNA, 82 nt, Homo sapiens
acacgcaggaaagccccagccacccacaaacagagagaaggaaccacccacgcaggcaggcagagaaagcaagagacgcaac

SEQ ID NO: 226073 - RNA, 72 nt, Homo sapiens
aagagaacagccgcgcggcgagcggcccgcacaaggccggcagaaaaccgcacggaggggccccccccccgc

SEQ ID NO: 226074 - RNA, 81 nt, Homo sapiens
gcgccacggccccagcggcgggagcaggagagcccagggcgcaaaaacaccgcaaggccaaaaacggcacagagacacaca

SEQ ID NO: 226075 - RNA, 80 nt, Homo sapiens
aagagcagaaaggagggggcgagaaggcgggaagccgaaggcagccacagagaaggcaacagaggagggcaagagaagag

SEQ ID NO: 226076 - RNA, 69 nt, Homo sapiens
ggccaagcggccacacccagccccccagagcgaccacaggaccaaccccggcacaacacacgccgagac

SEQ ID NO: 226077 - RNA, 73 nt, Homo sapiens
caagcaaagagaggaaaggaaaccagacaagcgacaaacagagaccgggggggaccgcggggccaaaaagggg

SEQ ID NO: 226078 - RNA, 36 nt, Homo sapiens
gaaaaagggaaccagcaggcccggcccaagaaaacc

SEQ ID NO: 226079 - RNA, 74 nt, Homo sapiens
gaagacaacccagggccgcagaggaaaggacccaaaccaaacgcgacacacgccgcagcagagcccccgccgca

SEQ ID NO: 226080 - RNA, 67 nt, Homo sapiens
agccgaccagccgcggagccgggggcaggcaaacaccagcaacacccgggacaaaaacgggggccac

SEQ ID NO: 226081 - RNA, 75 nt, Homo sapiens
ccacgccacacaccaaacgaaacggcgaggaaagagaggagccccggaaagaaaaggacagacccggccagaaag

SEQ ID NO: 226082 - RNA, 74 nt, Homo sapiens
ggagacgacggcgagaggaagagggacaggccaaacgcaggggcgggccaggcccagaagcggacaaccagccg

SEQ ID NO: 226083 - RNA, 78 nt, Homo sapiens
ggcggcggcgcaggcgaggcaggaaccgaacacagggagggccaagaacccccgaagagggaaagcggacccgcccag

SEQ ID NO: 226084 - RNA, 58 nt, Homo sapiens
cgcgccgagcgcgcggagaaccagagaagccgggccaacacaaccaggacaagccgag

SEQ ID NO: 226085 - RNA, 71 nt, Homo sapiens
accccaacaagaacagaaacaacgggaagaaccaacgaaagcaggcaacccaggaagacgcaaaagaaaac

SEQ ID NO: 226086 - RNA, 66 nt, Homo sapiens
cgacgcggaaccacgggaggaaaaagcggccaacagggggacgggaaagacaccacccagggaaaa

SEQ ID NO: 226087 - RNA, 107 nt, Homo sapiens
ccgagaccggaccgagagcggaccgagagcgcgaaacgcacgagaagagagacaagagagacaccccaaccgacaaagagcaccagacagccgggaacgacccccac

SEQ ID NO: 226088 - RNA, 55 nt, Homo sapiens
ggggccggcagcaccgcggccgcagacaggccaagaggaagaaaacacgcagcca

SEQ ID NO: 226089 - RNA, 78 nt, Homo sapiens
cggagccaccggaaaacgacagaaggccccaaaagaagaagggcaaggcgagcgaagagaaacaaaagcggcggccac

SEQ ID NO: 226090 - RNA, 71 nt, Homo sapiens
ccggaagaaacgccgagaagcccaaaggacgaagcggggaacgcaccgaacacaaggaggaaccccgagcc

SEQ ID NO: 226091 - RNA, 58 nt, Homo sapiens
acgagcacacgaagaaacaagacgagaagaacccggaagcaaaggacaggagaaacag

SEQ ID NO: 226092 - RNA, 73 nt, Homo sapiens
gcccccggccggccccgcccccggccgagcgacgcacgcaggaacagaagacacagcagagagcaggccaagg

SEQ ID NO: 226093 - RNA, 75 nt, Homo sapiens
gaaccaggggagagcgacccaaacaaaggcagggagcacgcgggcaggcagcccagcaaacccaggcaagaacgg

SEQ ID NO: 226094 - RNA, 65 nt, Homo sapiens
ccgccgccgccgccgccgccgccgcgcacgccagggagccggacgacggaagcggacacaggaaa

SEQ ID NO: 226095 - RNA, 83 nt, Homo sapiens
ccgagacgccccgccgccccggcccaggagaccccacgagccgagagcgccggaggaccacacccggccacagccgcaggaac

SEQ ID NO: 226096 - RNA, 77 nt, Homo sapiens
aaaagggagacgagcacaacagagaggaccagaagaaaaccagaagagacagaccgaggaaacgaaaggaaacgcca

SEQ ID NO: 226097 - RNA, 83 nt, Homo sapiens
acgcaacagagaaacagacaggcgacacggaaggcacgccccaccggaggaagcaaaaaaagcaggaaaggagaagggagacc

SEQ ID NO: 226098 - RNA, 75 nt, Homo sapiens
ggagggcggcgcgccgagcggacgccccaagggaagggcaggaaaaggacacagcggaagcagggagagagcgag

SEQ ID NO: 226099 - RNA, 69 nt, Homo sapiens
agacaaggccccagggaagggcccacaaaccaacaacgaaaaaaggggacaacaccccagccacacggg

SEQ ID NO: 226100 - RNA, 72 nt, Homo sapiens
gccccaaaagcgggaacaggcgagcgagcagcaaaaacacagccaccaacgacaaccaggaaggaacaacca

SEQ ID NO: 226101 - RNA, 83 nt, Homo sapiens
caaacgccccagcaggaggagcaaaggggcgggaagaccaacgggcccgaggcagcccgagagagggaaacacaaaacaggac

SEQ ID NO: 226102 - RNA, 91 nt, Homo sapiens
agacccaccaggcgcagcgggccccggcaccggccgacccagcgagacgcaaaaggcacgacaggccgccccaaacgcgggaaacacgcaa

SEQ ID NO: 226103 - RNA, 70 nt, Homo sapiens
ggaagaagacaccggggacagacagggaagggaggaacaagccaccgcacgagggcccaagacccaagga

SEQ ID NO: 226104 - RNA, 81 nt, Homo sapiens
gccgccaccgcaggcgaggacggcggaccccgcggcgggaggagccgccccgagacccaaagaagggcgacacaacgcccc

SEQ ID NO: 226105 - RNA, 60 nt, Homo sapiens
aacagaagacagcagagcagcaacagacgaggcaggcagaaagacagaggaaaaacaaag

SEQ ID NO: 226106 - RNA, 56 nt, Homo sapiens
ccgggccggccaccgcggcccccgccgcaaccaagaccaggcaaccacaaaacaga

SEQ ID NO: 226107 - RNA, 67 nt, Homo sapiens
acaaaaaagagacccacagccagcaacaccgaaaggcccgagccaaaagacccagagaaaggagcac

SEQ ID NO: 226108 - RNA, 81 nt, Homo sapiens
gcggcggcggggccgagcgcggcccgcaggcgagcgccgaaaccgggcgcaggcgggaagcgaggaacggagacagcaggc

SEQ ID NO: 226109 - RNA, 88 nt, Homo sapiens
aagccaagaggaggacagcgcacacagcaagcacgagaaccagacccaaaagagcaaacaaccgacggagaaggaaaaaagccgagaa

SEQ ID NO: 226110 - RNA, 56 nt, Homo sapiens
cagcgcaagcgaaaaggccgcaagccaagaaaagaaagcaccgggaggaaagagag

SEQ ID NO: 226111 - RNA, 82 nt, Homo sapiens
acggcagcgaggaggccggggggcaccgggcgccgcaacagcagcccggagacaggccgaaccacgcaggcacgagccgcgg

SEQ ID NO: 226112 - RNA, 73 nt, Homo sapiens
gacaccgagccagcaagcccccaacgggacaacaacgcagggcaccgagcaaacaaaggcaaagcaccgacaa

SEQ ID NO: 226113 - RNA, 80 nt, Homo sapiens
ccaggaaaaggaaacgggcaagaaagaagaaacaaccaccacaaacacaccagaaacagaccaccccaggaaaagagaac

SEQ ID NO: 226114 - RNA, 84 nt, Homo sapiens
gcgcaagggagcccacgcagacggccaagaaagaccaagcccacgaagaccggagaagaggacggcgccacccgccacccacga

SEQ ID NO: 226115 - RNA, 85 nt, Homo sapiens
agaaaggcgcaggccaagcgcccacgccggaccgggcagggacagcaggcgccgcgaaggcccaagcgcacacaccgggccagac

SEQ ID NO: 226116 - RNA, 63 nt, Homo sapiens
acggagagaacgaggaggaaggagagaaaaggcgccacgggacacaaagcgagaagacccagc

SEQ ID NO: 226117 - RNA, 64 nt, Homo sapiens
ggcccggagaaagcccaaaggaggacacgggcaccccaagaacacggagcgaccccgggaagag

SEQ ID NO: 226118 - RNA, 80 nt, Homo sapiens
agaagagggcagagccggcaggggcgcccccaggaccgagcaggaaccggagcaggaaaacgggaccgagagaaaaagca

SEQ ID NO: 226119 - RNA, 79 nt, Homo sapiens
gcggccacaacccgcaggacccaaggcacgggagaaagccccagaaacgaaggaggcccaaccacaaaaggagccgacg

SEQ ID NO: 226120 - RNA, 77 nt, Homo sapiens
gaaagaaaccaggcgaaaggacgacacgagggggcaaggaaaggaggaaaacaagcgaagcggcaacaaaacggaaa

SEQ ID NO: 226121 - RNA, 78 nt, Homo sapiens
ggccggccggagcgggcacggagcgggcgcgcggagggaggaagaagagccagggaggcacaacccacgggagagcag

SEQ ID NO: 226122 - RNA, 79 nt, Homo sapiens
ccagacccgaggaagagagcaagggcgggggaacgaccgaaccaaagaaggggggcagaaagaagaggaggacaacaag

SEQ ID NO: 226123 - RNA, 75 nt, Homo sapiens
gaggcaagcgcagggggacggggaccagcagcgcgccgccgcccagcgcaggaacaaagaaggagagagagaaca

SEQ ID NO: 226124 - RNA, 81 nt, Homo sapiens
cgcaggggcgcgcgaaggagcggaagaaggcaggccaaaccaccgaccaggaccccgcaagcaggcaaccgaccgaacggc

SEQ ID NO: 226125 - RNA, 56 nt, Homo sapiens
agccaccagggcccaggccgggaacaaaggcaggcacaggcacaggagaccaccaa

SEQ ID NO: 226126 - RNA, 74 nt, Homo sapiens
caaacaaggacccgaaagacccccacaggcgcgccgagacccagccggccccgcgacagcgggagcccgacgca

SEQ ID NO: 226127 - RNA, 88 nt, Homo sapiens
gaggcgcgcggcggcgagcagaccgaagccagaacccaccccggcgcccgcgccagcggcgggagaggagagaacaggagagaaaacc

SEQ ID NO: 226128 - RNA, 72 nt, Homo sapiens
aggcccggggagggggaccgcgaggagcgcagccgcaaggccagaagcacaagaaggcaggagagaccaaac

SEQ ID NO: 226129 - RNA, 84 nt, Homo sapiens
acgggccaagaccacaagccacggacccagagacaagccagggccacacggcagccccagccccagcaggagcgggacacccca

SEQ ID NO: 226130 - RNA, 77 nt, Homo sapiens
agagcaccccagcgaggcccacagaaaagccacaacccagaagcagggcgagcgcgagcagccgggaacgaggccaa

SEQ ID NO: 226131 - RNA, 78 nt, Homo sapiens
caggaggccagggggcgccaggcgacaaaaccagacccccgacgccgggcagggcgaaggggccggcaccaacgcgaa

SEQ ID NO: 226132 - RNA, 94 nt, Homo sapiens
gagcgcccggccgcggccagcggagcccgggcggggcaggagccgaccaacgggagccgcaaggacaacagccgcggccagacagcggccggag

SEQ ID NO: 226133 - RNA, 72 nt, Homo sapiens
ccaccggggaaacaaacacacgcaggcagggagagaacagcacacagaggcgcaaggggaagagaaaagaca

SEQ ID NO: 226134 - RNA, 56 nt, Homo sapiens
cagacgcagggcgcccccggggaccccaagccgaggaacagcgcgccaagaagcac

SEQ ID NO: 226135 - RNA, 55 nt, Homo sapiens
gggggaccacagcagcacccccagcagcacacaggaaacagggggcacaccgcac

SEQ ID NO: 226136 - RNA, 70 nt, Homo sapiens
caggacgcaagaaccagcggccgggaagcaagacccaaccagagccgcaacaggaagaaggagaaagaca

SEQ ID NO: 226137 - RNA, 73 nt, Homo sapiens
acaagaaacaaggacaggaaggccaaagaaaaagggggcggagcacccacccagcgagagagccaggggcacc

SEQ ID NO: 226138 - RNA, 60 nt, Homo sapiens
ccagaggagccaccaggcccacggccgagcacccgccccagcgagccccggaaagagccg

SEQ ID NO: 226139 - RNA, 77 nt, Homo sapiens
ggaacgaaagggaaaggcacgacagggagcagagaaacagaaggcacaggcagcccgggacacgacaagagaaggag

SEQ ID NO: 226140 - RNA, 72 nt, Homo sapiens
gagccgagccgcaaggggccgcccacaaggccacggacccagcggaaacgggagaaggaagaccaaagaaaa

SEQ ID NO: 226141 - RNA, 77 nt, Homo sapiens
aggggcgcgggacacacccccaggaggcccggcagagcaggcagccggcacccgcacaacccagggggccgaaccca

SEQ ID NO: 226142 - RNA, 69 nt, Homo sapiens
ccagaaacaacgcggcaggaccaagcaacaacaacggcaagcggagaagagcaaggccgaaccgagagg

SEQ ID NO: 226143 - RNA, 75 nt, Homo sapiens
cggggagccaacagggaagcacccacaaaagacgcacggcccaaagaagagcaggccaaggaacaagaagagaaa

SEQ ID NO: 226144 - RNA, 65 nt, Homo sapiens
ccgggaggcaccgagaggaaaggcgagggaagcgccggcagggcgcacggagaaagccagggaac

SEQ ID NO: 226145 - RNA, 36 nt, Homo sapiens
ccacgggggaccagccggggcccccacccaagagcc

SEQ ID NO: 226146 - RNA, 76 nt, Homo sapiens
ggcaccgagcaacgagggcagccacgaggcggccccagcgcgggcgacaggccgacacccccagagagccgggcca

SEQ ID NO: 226147 - RNA, 63 nt, Homo sapiens
aagcacaggaccaaacaagacagaacgagaggggagggaagagagcccaagggagcagggcac

SEQ ID NO: 226148 - RNA, 98 nt, Homo sapiens
gagcgagggggggcgcgccggaaaccggagcgcgcagcaggaagagacccagacgaagagcgcacagaaagagggaaaacaaagaaccaaaacagcga

SEQ ID NO: 226149 - RNA, 85 nt, Homo sapiens
gggacggccacagacccacagaggcaccccagacacagccgcaggagggaagcgcacggaaaccgccccgggaggcacagagcag

SEQ ID NO: 226150 - RNA, 69 nt, Homo sapiens
agacacaccaggccggcaggcgagaaaagcgagaccgcggcgaggaccgaacgggcaccccgggcggaa

SEQ ID NO: 226151 - RNA, 74 nt, Homo sapiens
cgggggccggcaccaggagcaccagcccgggacccacaggcggagaagagggaacgggaaccagaagaggagaa

SEQ ID NO: 226152 - RNA, 55 nt, Homo sapiens
ccagaccggagccagacagcagccaagccagagacgcgcacgaaacgacgaagag

SEQ ID NO: 226153 - RNA, 76 nt, Homo sapiens
aacagggcaaaggagagcacaaccacgcagggaagcccaggggcaggaaagcgcagaccaggccggaaaaaccccg

SEQ ID NO: 226154 - RNA, 69 nt, Homo sapiens
gagccaaccgggaagggaaccggaaaagacaagggggcaaagagacaaagcaggaggacacaagaaggg

SEQ ID NO: 226155 - RNA, 79 nt, Homo sapiens
cagaaagaaaaaagaagaagccccgagcaccaaaacagacagacaagaagagcccggacccccggcgggcgaacaaaga

SEQ ID NO: 226156 - RNA, 57 nt, Homo sapiens
cagaaagcaggcgaacccgcggcgcaaaacggcaggcacaaggcgcggccaacagag

SEQ ID NO: 226157 - RNA, 70 nt, Homo sapiens
gcagaaaccgggggcccacaacagaggcggacaacagagcaccccagacgcccgccgcagaggaaagaca

SEQ ID NO: 226158 - RNA, 68 nt, Homo sapiens
cacgccgaccccggcgccccaggcggccggacaacggcgcggcgacaaacacaagacacccaagaagc

SEQ ID NO: 226159 - RNA, 83 nt, Homo sapiens
gagggccccagcacagccagcgaacaggcccgggccgaggagggggaccgggaccacaagacggaaagcccgccgcgcaccgg

SEQ ID NO: 226160 - RNA, 86 nt, Homo sapiens
gaaccgccgggccggaggagccaggacccacgggaggaaccccgagaaggaggggggcaagaggaggaagcaaaagagaaaaccag

SEQ ID NO: 226161 - RNA, 74 nt, Homo sapiens
aacgcggaccagggacccgcgaaagcggggcacaggcgggcacgcgcccagaaagacagaacgcgggagagaac

SEQ ID NO: 226162 - RNA, 76 nt, Homo sapiens
cagcgcggggcagcgcgagccgggaaggggccccagacacgacgcccccggccggcccgggccgcgccagagcgcg

SEQ ID NO: 226163 - RNA, 68 nt, Homo sapiens
agggcagcaccagcagcccgaccacaccacccccgccagcagggggacacccacggccaaccaaaaac

SEQ ID NO: 226164 - RNA, 73 nt, Homo sapiens
gcgcgcgcccacgccggcagaggcccccacagagagcacacaaacaaagcgaaaccacggaagaaaagggcaa

SEQ ID NO: 226165 - RNA, 77 nt, Homo sapiens
gcgaagacagcggaacacacacccccggggacccgagccagaaaagcagagcggggcccggcgcacccaccaccgcc

SEQ ID NO: 226166 - RNA, 75 nt, Homo sapiens
ggggcaccacagaagcccagccgaccacgagagcacagaaggaaagaccacagcaagaccacgcccccagccggg

SEQ ID NO: 226167 - RNA, 93 nt, Homo sapiens
cccccccagaggcccagacggccaaaggaggaagggacgacggaccgaaaagaaacgagacgcacagaggccccaacgccgggagggacacca

SEQ ID NO: 226168 - RNA, 77 nt, Homo sapiens
gacagcgacgcgccaccggcggggggcgagcaacaccgggcacccgcgagcccacgggcggagccccgggaccaaca

SEQ ID NO: 226169 - RNA, 82 nt, Homo sapiens
aagagaagcacaaaacagcagacccaagagcagcggaaaagaccagcacagccgggcggggcgcgggaggggcacggccccg

SEQ ID NO: 226170 - RNA, 75 nt, Homo sapiens
caccggaggcgggacacccagcaccccacgcccggccgacaagcacgcaacgcccaccccacgggaggccgggac

SEQ ID NO: 226171 - RNA, 85 nt, Homo sapiens
gccgagggcagccccaacaggcgcagcgcgaccccccagcgcccggagagccagggccgaaggaggccccgccagaagagaccga

SEQ ID NO: 226172 - RNA, 76 nt, Homo sapiens
aaggaccggccgacacgcggcccccgaccggagacgggacggcaggccaaggggcgcaccagccgccagagccggc

SEQ ID NO: 226173 - RNA, 39 nt, Homo sapiens
aaaaaaccagaacacgccaaggcagaaaagaaccaggaa

SEQ ID NO: 226174 - RNA, 85 nt, Homo sapiens
gcggggcggcaggagccggccggcaaccgagggacccgcgccagaacggaagaacaccagaaacgaggggaaaacaacccggaga

SEQ ID NO: 226175 - RNA, 80 nt, Homo sapiens
gccgaggcaggcggacaccgagggaccagaccccacaagaaaacacacaaccacaggcccaagcaaacacaccaaccaag

SEQ ID NO: 226176 - RNA, 77 nt, Homo sapiens
agacggagcaggaagaagcaccaggagggaggcagcagcccgggcgccacggggggcggagaacggaaaagcaccag

SEQ ID NO: 226177 - RNA, 82 nt, Homo sapiens
gcagacgggggacgcagggaggagcgggacaccccggaagcgggaaagacaagcagaccggaagaccgacggaagaccacac

SEQ ID NO: 226178 - RNA, 65 nt, Homo sapiens
cggaggcggcagcgggcgacggaccgggcccagacggcaagaagaagcgaaaaccgcccacaaca

SEQ ID NO: 226179 - RNA, 87 nt, Homo sapiens
gacggacaggaggacaacgggaccggagcccaggcgaggaagagacaagcaagagagaacacacgcagcagaagcgaagagcagcag

SEQ ID NO: 226180 - RNA, 63 nt, Homo sapiens
cggcacacacaccccagcaggggcgcgccagccgaaacaaaaaaacgagcaaaggcagaaaaa

SEQ ID NO: 226181 - RNA, 80 nt, Homo sapiens
aacccagaaggccgaggaaggacggcagagcgcaggacgccacagcaagaggaccccaccgggccggaagcccccggccg

SEQ ID NO: 226182 - RNA, 44 nt, Homo sapiens
acggcggaccgacccgagccggaaagacaggagagagggagaaa

SEQ ID NO: 226183 - RNA, 49 nt, Homo sapiens
ccagcaccgcgggaaggggagaagcagaccgcaccaggcgggaccccga

SEQ ID NO: 226184 - RNA, 59 nt, Homo sapiens
ggagcgggcggagcggcgagagcccccacgggcccgagagagaaagggaaagaaggagc

SEQ ID NO: 226185 - RNA, 56 nt, Homo sapiens
gcgcagagggcaggacaacacggcccgcacccaggaacccaaaggcacagagacga

SEQ ID NO: 226186 - RNA, 66 nt, Homo sapiens
cgggccagaaaaaggaaggacaagaagaggcaaacgcacccgcccgagaaccgggcaggaagacca

SEQ ID NO: 226187 - RNA, 87 nt, Homo sapiens
gccgacgccagccagagagcgagacaccaggcgccgagaaggccagcagagaaacaggcaggagaggcccacaggcgcggacgggag

SEQ ID NO: 226188 - RNA, 66 nt, Homo sapiens
ccgcgccccgcgcagcgagcgcgccgccgccgcagcaggggaccaggaggcaaaagaaacaaaaga

SEQ ID NO: 226189 - RNA, 81 nt, Homo sapiens
gcggccgcggaagcggggcgcacaccaccggacaaccgacaaaaacgcaggcaccaccgggaaccggacagaaacgggggc

SEQ ID NO: 226190 - RNA, 86 nt, Homo sapiens
aagacgcccgggccaccaagcaaggggcaaggaggaagagcaggaccgcgggacacggcacagcgacccacagcaccggcggaagc

SEQ ID NO: 226191 - RNA, 70 nt, Homo sapiens
cgcccgggccagcggccgcgcacccccggccggaggcaccagcagacgagagccgaggcgccggaaacaa

SEQ ID NO: 226192 - RNA, 80 nt, Homo sapiens
ggaccacagcagccgacgcggaggaggccgagcgcaaacaccggggcgcagaccgacgaacagcagagaacacaacacag

SEQ ID NO: 226193 - RNA, 63 nt, Homo sapiens
cggggcaccacagagagcggcgaaccagccggccgacgaggagcagggcccccggacgcacac

SEQ ID NO: 226194 - RNA, 61 nt, Homo sapiens
ccagccggagaaaggaggacaccaggggggaaaaaccacacaggcaaagaacgcgcaaaac

SEQ ID NO: 226195 - RNA, 66 nt, Homo sapiens
cgggaggggcaggacggggcagggaccagaagcagcagccccagaagccccgaagccggggcaccc

SEQ ID NO: 226196 - RNA, 72 nt, Homo sapiens
ccagaagagggcaacaccaccaaccagcacccaacaccacagaagacacggcggagaaaacggaagcgggcc

SEQ ID NO: 226197 - RNA, 54 nt, Homo sapiens
cccaacgcgaaaaaaggacagaggcgcccaggcagggagggcagaacgacgaaa

SEQ ID NO: 226198 - RNA, 73 nt, Homo sapiens
cgccggaggaggcccccagccacgggaacagccacccaggaccccaggaccagaaggcaaccaacagaaccac

SEQ ID NO: 226199 - RNA, 77 nt, Homo sapiens
aggaaccgaggaaaaaacagccacaggaagagggaacaaagaaggaaacaggagaagcgggagaagaagcgaccagc

SEQ ID NO: 226200 - RNA, 72 nt, Homo sapiens
agaccgacaccggcgcagccagcgaacccacgacagccgccaggaagcaacgcagcgcggaaaggcacaacc

SEQ ID NO: 226201 - RNA, 81 nt, Homo sapiens
cccgcgagagcgcaaacacccccagacaaaggaggaagaacggcaaaacggaggagcagagcgaaacggaagagaaaaccg

SEQ ID NO: 226202 - RNA, 79 nt, Homo sapiens
agcaccacggaccccaaggaagccacggcagacacacaacccgacccgacgaagccccaaaacccagaaggaagaagaa

SEQ ID NO: 226203 - RNA, 74 nt, Homo sapiens
ccagggcacccacaaccgggagccggggcgaccgacacaaacggaccgcccgaaagggaccgaaaccgcaagag

SEQ ID NO: 226204 - RNA, 72 nt, Homo sapiens
ccaggcgcgacaagcgcgcacgggaaacaaaacaaggcgccaccggaagaaacgggaggggaggagccggga

SEQ ID NO: 226205 - RNA, 77 nt, Homo sapiens
ccaacggcaggacaacagcccgcacagcaagccagagcaggggcccgaaggaaagaaggagagagagaaggcgacca

SEQ ID NO: 226206 - RNA, 76 nt, Homo sapiens
gcacccgcaagaagagaacccagggaagccgaagagccaggcacaggcgcgaacaccaaggggcagaagacacgca

SEQ ID NO: 226207 - RNA, 78 nt, Homo sapiens
gcggggcagaagagaggaaagggaggcaccacacacaaaaagggacccgcaccgcgccggcccgcaaagcaaagaggc

SEQ ID NO: 226208 - RNA, 71 nt, Homo sapiens
ccagcgcggcacggagacgaagaacggaagcgccccagaggagagggcggagagacggagaaaacgcagga

SEQ ID NO: 226209 - RNA, 57 nt, Homo sapiens
caccacgacgaaaccgaggacaccagggcggaaaacaccccaaaagccaaaagggaa

SEQ ID NO: 226210 - RNA, 77 nt, Homo sapiens
gaccacggcagaaggagcggaaggcggagcgaagagccggaccaagcgccagaaagaggaagagaacaggaaagaaa

SEQ ID NO: 226211 - RNA, 68 nt, Homo sapiens
gcgcgcgccacgggcggacgcggcacgcaggcaggcggcccgcagaggaggccagaggagcaccggcc

SEQ ID NO: 226212 - RNA, 73 nt, Homo sapiens
acccagcggcagcggagccagaaagcagaagagaccgagaccaggaaccaggcaggggaacggagcgaaccag

SEQ ID NO: 226213 - RNA, 82 nt, Homo sapiens
ccaggggggcgcccgccgggacgccgaccgccgggacgagcccgccgacacagccaccaagaaggcacaagcagaacgggaa

SEQ ID NO: 226214 - RNA, 112 nt, Homo sapiens
gaggaaaaacaaaagagaaaaccacccccacgaggggaagccacaaagaaaggccgacagacagagccggacgggaggaagccccaggacgggaggggaaagaaaagccaca

SEQ ID NO: 226215 - RNA, 83 nt, Homo sapiens
gcgaccaggcccggcgcgcgcccccaggggcggccgcggcgccgggcgccgagcgccacccgacagagaaaaacaaaagggac

SEQ ID NO: 226216 - RNA, 82 nt, Homo sapiens
cacgagcggaggcgcgagaagcgcagcgagcccagagaagaagaagggagggaaccgagaaaggagaggagaagaagaaaaa

SEQ ID NO: 226217 - RNA, 35 nt, Homo sapiens
cccacaaacaaacacagggcacgagacaaggaaag

SEQ ID NO: 226218 - RNA, 79 nt, Homo sapiens
aagcggccccccccccacaaaggaaaggggaaaagccagcgaaagggaaagaaaacaagccacccagacaagaggaaag

SEQ ID NO: 226219 - RNA, 72 nt, Homo sapiens
ccgaggacaggaccgacagcacaacaccgcacggggagccaagccggcacgggaagcgcccacgggagagcc

SEQ ID NO: 226220 - RNA, 76 nt, Homo sapiens
gacagcagcgagcccccgcggacccacccccgaacccccaaggcggcacagcaaacacacaagagccagcaaaggg

SEQ ID NO: 226221 - RNA, 80 nt, Homo sapiens
ccgggaaggacaagccggaaaggaggaagaagaaaagcgaaaagcaaacacacgcagcagggcaagagagccggcaggcc

SEQ ID NO: 226222 - RNA, 77 nt, Homo sapiens
cgccaacggggagcacgggcacgcaagcgcagccgcgagggcaaagaagggccacgggggacaacaagaaagagaaa

SEQ ID NO: 226223 - RNA, 61 nt, Homo sapiens
agagaaaaagaaagagcaagaacagacggcgggcacaagccaaggaagagagaagagccaa

SEQ ID NO: 226224 - RNA, 60 nt, Homo sapiens
gagagccgccgccaacgcgcagggcagcggcccccgcccgcagggcgagcaacggcccaa

SEQ ID NO: 226225 - RNA, 87 nt, Homo sapiens
cggcggcggccaagcccaacaacccccgggggcacggaccgggggacgcgccgggaccggagacagcagcagaagcagaaaaaggca

SEQ ID NO: 226226 - RNA, 61 nt, Homo sapiens
ggagagagacagcgacgagagagaccggagaggggagaggaaggagggccccggagcagcc

SEQ ID NO: 226227 - RNA, 69 nt, Homo sapiens
ccacagcccggggaggcagccacgagccagaccaaaaggaacggcacggagacaagggagccacgcagc

SEQ ID NO: 226228 - RNA, 75 nt, Homo sapiens
agaggcgaggcagggaggacccacccccgggggaaaagaacgagcggacgaaaagaacaagcgcccggagacagc

SEQ ID NO: 226229 - RNA, 71 nt, Homo sapiens
aagagaaacaaaaggacagagaaaaggcccaggcaaaaccagacccacaccggggcagggccccacgagac

SEQ ID NO: 226230 - RNA, 67 nt, Homo sapiens
gagaaaggaaaggcgcacccaaccgaggacggaaccgagagcaacccccagagcgcagaggcagagc

SEQ ID NO: 226231 - RNA, 77 nt, Homo sapiens
cggaaccaacgccacgacccagaaggggcccagcggagaagagcccaggcccggaagagaggaaacggagaagagag

SEQ ID NO: 226232 - RNA, 69 nt, Homo sapiens
ggcggggggcccaagcaaggccggaagaagagcgcagagaccaaaaaaccaaggacgacgggaaaccgg

SEQ ID NO: 226233 - RNA, 46 nt, Homo sapiens
gccaggaccggccgaacgcagaggcagacccaacaccaacacgagg

SEQ ID NO: 226234 - RNA, 36 nt, Homo sapiens
gagccaagcgcgcgccggcagagacccagagaaccc

SEQ ID NO: 226235 - RNA, 69 nt, Homo sapiens
cggccagaacggagaaacagggcagagacccgcaccgccagaacacaaagcaggcaggaccaaccgcaa

SEQ ID NO: 226236 - RNA, 46 nt, Homo sapiens
ggacccccccccccccccaagaggcaggaaccgcagaacgaagcca

SEQ ID NO: 226237 - RNA, 79 nt, Homo sapiens
aggccccccagccagggaacgccgcgagcagaagcgcacagaaagaggagaaaaacagagaaaagcaaaggcgagcaac

SEQ ID NO: 226238 - RNA, 77 nt, Homo sapiens
ccaaccaagccaggcacacagaaaggccccaacgagcaaccgagacaaaaagaaggagaagaaaaggcaagacaaaa

SEQ ID NO: 226239 - RNA, 71 nt, Homo sapiens
gcggccgcccccccgcgggaggggggccgggagccgcaggaaacgagaagaacgaaagagaaacccaaaaa

SEQ ID NO: 226240 - RNA, 84 nt, Homo sapiens
ccgcagcaagaggcggacgagaaggacagggaagggagaagcccaccacgcaacgggacggcgcggcggaaggcgcgccagacg

SEQ ID NO: 226241 - RNA, 48 nt, Homo sapiens
caggagaacaagcagggaaccagcaggacagagcaagcaagcagcaag

SEQ ID NO: 226242 - RNA, 93 nt, Homo sapiens
gacagaggaaccaagcaccgcaaaccacaaccggagcagagaaagcaagacgccacaagggaaaagcaccccccagccaaacaagccgccaga

SEQ ID NO: 226243 - RNA, 35 nt, Homo sapiens
gccacgccgccccaagggaacaagagccaacaagg

SEQ ID NO: 226244 - RNA, 65 nt, Homo sapiens
gaaccgcagccgagcggggccggccacaggcacacacaacgaccaagccaaggaccagccaaaga

SEQ ID NO: 226245 - RNA, 70 nt, Homo sapiens
acagcacgaacagacagaaagcaccacagaaaggggagccgggaacgacggccccagcagcggcccggac

SEQ ID NO: 226246 - RNA, 73 nt, Homo sapiens
ccgacaaggggcggaggaagggaggagacccgaccccagaagaggacacagggaagaaaaacaggagggaaac

SEQ ID NO: 226247 - RNA, 55 nt, Homo sapiens
gaagaggcaccggaggagagaccacaccgcgccagaccccccaggagagccgccc

SEQ ID NO: 226248 - RNA, 54 nt, Homo sapiens
cggcaaccaagaagccccaaggagagacgaccaggggcaacggggcccacagac

SEQ ID NO: 226249 - RNA, 95 nt, Homo sapiens
cggacgagcgggaccagccagggcacggagcgcaaagaggacccaccacaacaagagaggaacccggggagagcgagacaggcaggggcagccgg

SEQ ID NO: 226250 - RNA, 85 nt, Homo sapiens
aaaacgggaagagaccaggagaccaggcaagcccgaccaaacacgaggcccggcccagagggacaacagggcagaaaagaacaga

SEQ ID NO: 226251 - RNA, 72 nt, Homo sapiens
gccgcagcgcgaggccgggccgggggagaccgccacccccggcgaggaaaagcgcaacaccggcagaacacg

SEQ ID NO: 226252 - RNA, 46 nt, Homo sapiens
gaagggaacaaaaaccaggaccaaaccgaaaccgccagagcaggcg

SEQ ID NO: 226253 - RNA, 74 nt, Homo sapiens
aaacagagaacgacgggggaagcagcagccaggaagcagcagcggagaaacagaaagggagaagaggacagaaa

SEQ ID NO: 226254 - RNA, 72 nt, Homo sapiens
gcccagaaccggggggagacacagccagccaagcacgccccgaggaagcaaaccaggagccacagcggcagg

SEQ ID NO: 226255 - RNA, 82 nt, Homo sapiens
gaggcgccgcccggggccccgcggcgcaggaggcggggagcgcagagcgggcgagcgcgccacagaccccgccggggaagaa

SEQ ID NO: 226256 - RNA, 57 nt, Homo sapiens
agcaccaggggaagcgggacaacggggggcagcaggagcggagggcccccgcccagg

SEQ ID NO: 226257 - RNA, 77 nt, Homo sapiens
agcccagggcgggcgcgcaccaaggcccgagggggaacaggcaggaaaacgacccaaaacagccaccaacgacgacc

SEQ ID NO: 226258 - RNA, 86 nt, Homo sapiens
cacaaaccacacaaggcaaacacacaaaagagaaaaacaaccagcaagggacgcgaaaaagacaaggcacagagaccaagacagag

SEQ ID NO: 226259 - RNA, 75 nt, Homo sapiens
agggggcaaacaagccgaccggaaaaaggaaagaccacagcaagaccacgcccccagccgggggaccaggccgaa

SEQ ID NO: 226260 - RNA, 75 nt, Homo sapiens
cggcgaggggcacgacccgacggcaagcgaggagggaggggaagcacgacagagacggacggacaaaaagacgga

SEQ ID NO: 226261 - RNA, 81 nt, Homo sapiens
ccggcgcaggcccggaccgcgcaggaagcgcgcccaagagcccagccgagccggccgaggaacaagacgccaaggagacgc

SEQ ID NO: 226262 - RNA, 77 nt, Homo sapiens
gaaaggacacgggagaaagggagccgagcgagaccacgcaccacgggcgggcgcggggcgcgggggcccaggccgga

SEQ ID NO: 226263 - RNA, 90 nt, Homo sapiens
aggaacacgaaccccaacgccgcgcacaccccaaccacgagaagaaggccggccccgggcccaccgcccccccagcccacgggcacccgg

SEQ ID NO: 226264 - RNA, 95 nt, Homo sapiens
agcgccggcccccaggcgaagaagcgcagccgcaccggccaaggaagagggaaggcaccaggagaaggcaccgggaaacagaaagcaaggaagcg

SEQ ID NO: 226265 - RNA, 122 nt, Homo sapiens
aggaggaagggcaggacgagggcggcgcgggagcagcacccacagccaaggcgggagccacggcgggcccaccggaggcaggggaggaagcgagccacaaaaacggaagcgaagggaaagag

SEQ ID NO: 226266 - RNA, 76 nt, Homo sapiens
gaccagcagcgccaaccgcaccacgcgcgccaggaccagcagccagaaaagacgaggaaacaacccagacagaaga

SEQ ID NO: 226267 - RNA, 73 nt, Homo sapiens
aacccagaacggacaacggaagagaccagaagagcaggaggaaacaaaggaagaccaccaagaagagcgggac

SEQ ID NO: 226268 - RNA, 80 nt, Homo sapiens
gcgagagaaaccgggcaaccgagcgcgaaacggagggaagaaaacacacccacccgccccgggaaggggcccccggacag

SEQ ID NO: 226269 - RNA, 63 nt, Homo sapiens
aggccggggccaacgagccaacgccaggcgccgcccacaggcggcaccaggacgccgaaaagc

SEQ ID NO: 226270 - RNA, 76 nt, Homo sapiens
cacggcgcaggaaggaagagagaagggcacagaccaagacaacgaaccccggccaggacaggcccccacggaacca

SEQ ID NO: 226271 - RNA, 64 nt, Homo sapiens
caacggccaaggacacagcgcagcacagaaggaaaaagcagcgaaaaccgacgggcgcacacgc

SEQ ID NO: 226272 - RNA, 88 nt, Homo sapiens
cagcgggagcgcggaacagcaggcccgagcccaccgcgccgggccccggacgccgcgcggaaaagaaaaaagggacccaagaaagccc

SEQ ID NO: 226273 - RNA, 74 nt, Homo sapiens
gggacccaggaagagaagaaagaggacaacagacggacccagcccccggagaagccaaggaagaccaagccaga

SEQ ID NO: 226274 - RNA, 81 nt, Homo sapiens
aaaaaggaacacagcacaaaacaaccaggaaacaaccacggaacaacagacagccacgacggggcacgaaccagaaaccac

SEQ ID NO: 226275 - RNA, 98 nt, Homo sapiens
gcccgcggacgcgcccacaggcccgggaggagccggacacaaagaagaaagcaccccacgaacaaccacaggaagagacacacaagaaacaaaacggc

SEQ ID NO: 226276 - RNA, 82 nt, Homo sapiens
cgacgcccagagccgcggccggggcgcgggagagcacaacagacgaggaaaagcaggaaacagaaaacaacaaaaaacaagc

SEQ ID NO: 226277 - RNA, 72 nt, Homo sapiens
aaggaaaaacggagagccacaaaaaaggaagcgaaagacagagagcgagggagggaagccgcagaagcccgc

SEQ ID NO: 226278 - RNA, 84 nt, Homo sapiens
gcccggagcggacagccacgccgaagggagcccacccagaggcagggggcgacccgaacccaaaggaggaaacagcggcaagcc

SEQ ID NO: 226279 - RNA, 57 nt, Homo sapiens
acgaaagagcgaggcgaaccgcaagcagacccaagagcacaggcccggcaacccacc

SEQ ID NO: 226280 - RNA, 62 nt, Homo sapiens
cgcgggaccggcggcaaggcaagaggaccccccgaaccagagcagaccgcaggccccagacg

SEQ ID NO: 226281 - RNA, 78 nt, Homo sapiens
gcgggggggggagcccgcccccggcggccccccgcgcacagaacgggccggagcgagggagagcaggaacacagagag

SEQ ID NO: 226282 - RNA, 56 nt, Homo sapiens
gagcacgcacccacgaggaaaccaaagagccaggcgacccccgcgcccgaggccca

SEQ ID NO: 226283 - RNA, 71 nt, Homo sapiens
aacggggggcgaaggcaaggcacaaagcccgacagggcaacacccgacaaaggcaaaagggagaccacaac

SEQ ID NO: 226284 - RNA, 78 nt, Homo sapiens
gaggacaagcccagcgaagcaggccggccggcgccacgaagccagcagaccgcagagagacggagcccaagcgggggc

SEQ ID NO: 226285 - RNA, 87 nt, Homo sapiens
cggcagcggcggcgcggcgcgcgcgagccgagggagcggaaaggggcccggcgcgcccgagacgaagaccggacccaaagacaggac

SEQ ID NO: 226286 - RNA, 75 nt, Homo sapiens
cagaccccgcacaagcgaaaggcaggcacaaagaaccaagaaaaccgaagaccagcagccaccggaagagaaaac

SEQ ID NO: 226287 - RNA, 61 nt, Homo sapiens
caacaacccaacgacaccccaacgcccggaacaggccccgggaccaaggacacgcagaccc

SEQ ID NO: 226288 - RNA, 79 nt, Homo sapiens
agcacgaccggagcccaagaaaggcaggaggccaggcaggcaaaaggcacacaagggcgggccagcaccggccacagac

SEQ ID NO: 226289 - RNA, 79 nt, Homo sapiens
cggcaacccaaccgcagagggaccgggccacccgggggcccacagagagggacaccgagccccaggggacagcaagcgg

SEQ ID NO: 226290 - RNA, 75 nt, Homo sapiens
cagacgaaagaaaaaaaaaaccggagaggaagagaagagagcaaggggaacaaagcggcaaaagaacccacaaaa

SEQ ID NO: 226291 - RNA, 80 nt, Homo sapiens
aggagagcgcgggcgggcgcgccccagaaagcaggagcccggaaaggagaaggaaaagacggcaggaggaagagagagag

SEQ ID NO: 226292 - RNA, 78 nt, Homo sapiens
ccgcacagagccgcgggcccgcagcgcgacgcccacgcaacggagggccccccaggccacccaggaccagcggcacac

SEQ ID NO: 226293 - RNA, 57 nt, Homo sapiens
gcgcaggaacacggcagacgaagaggcggccacccacgagccgacggcaaacgccag

SEQ ID NO: 226294 - RNA, 72 nt, Homo sapiens
cagaagaccaaacgcagaccagcccaggaagcacacggcggagagagacgaagagaagcagcgccagccagg

SEQ ID NO: 226295 - RNA, 80 nt, Homo sapiens
gaccccaagcaggcgaaacagaaccgcagagggaaagaggaaagggaaccgggcccaccaggaccaccaccagaaaaccc

SEQ ID NO: 226296 - RNA, 79 nt, Homo sapiens
gaggcgggggcgccggcagaggaccaggcaccaccggccccggaaggggagccgccaccaaaagcagacggaaaaccca

SEQ ID NO: 226297 - RNA, 52 nt, Homo sapiens
gcgagaacagcaccacgagaggaccgcgaggagcaccagaagcccccagcgg

SEQ ID NO: 226298 - RNA, 66 nt, Homo sapiens
gacaccgccccaacccacgagaggacagcccagaaaggcaaggaccgaaggacggaacaagcgagc

SEQ ID NO: 226299 - RNA, 106 nt, Homo sapiens
ccgaccaacgacgcgcccacaaccgggccggccccagagcccaccgggaggagaaggaggaggaacggagaaggaaagagcagcgaaacaaagagaacagcaacac

SEQ ID NO: 226300 - RNA, 72 nt, Homo sapiens
cagaaggaacgacgcggaccagaagccagagcgaggacgccggcaggggacgcgaagaagcccccaccacca

SEQ ID NO: 226301 - RNA, 81 nt, Homo sapiens
acggcggcggcgagggggggcggaaggggcaggaccagcgcccggcaggcgccacgcgccgcagaccgaccggcacgcaac

SEQ ID NO: 226302 - RNA, 70 nt, Homo sapiens
aggaccggagacagccagcacgagaacaggagacgggaagcacagaggggaagaacgcacccacaccgaa

SEQ ID NO: 226303 - RNA, 75 nt, Homo sapiens
aaaaacagaccaaaaaggcgacaacgggcagaaagagaaaaacggacagccccaggaggaaggcgggcggaacga

SEQ ID NO: 226304 - RNA, 86 nt, Homo sapiens
aggccgggcccgccagggagcaagcgcacgcagaggccaggcagcaagcagagcccggacaggcccgccaccggggcacgggcgcc

SEQ ID NO: 226305 - RNA, 77 nt, Homo sapiens
cgacaagcaggaacaagccgaaacccaagagacagcccgccaaggaacccgcggggcagaccacaccagcacaccca

SEQ ID NO: 226306 - RNA, 75 nt, Homo sapiens
ggaggggacggaaacgccaccagcaggaggaagaggggcccccgcgccccccagaggcggccgaaggaaaggccg

SEQ ID NO: 226307 - RNA, 79 nt, Homo sapiens
acaggcggacgaaagaggacacgggaagaacaaagacagaccggacccagggggggaccaggccgaggaggaaccaacc

SEQ ID NO: 226308 - RNA, 84 nt, Homo sapiens
cgcaccacggcaagggcaaccgcggggcaagcgggccacgcacccgcaccaaggccaaggcagacacggcccgggcaaacagca

SEQ ID NO: 226309 - RNA, 77 nt, Homo sapiens
aggaaaagagacaaacagcaaaagcaaggagacccacacgccaggccaaaacagaagaggcaaagcccagccacagc

SEQ ID NO: 226310 - RNA, 89 nt, Homo sapiens
ccgggcccgggcagcccgcggggcaccgcggaggagccacacgaagaagaaacggccaagaagcggaaagagaccagagcagcacccga

SEQ ID NO: 226311 - RNA, 78 nt, Homo sapiens
agaccccacgagcgccacacggccgcaccgcgcgagcacgggcggagcgaacgggaaagagagccaagggagacagcc

SEQ ID NO: 226312 - RNA, 83 nt, Homo sapiens
gagccgcggcccggaacggggcgccgccccgggccccccagcagaagaccccggcggacacaggccagaacacaaaccaccag

SEQ ID NO: 226313 - RNA, 91 nt, Homo sapiens
accgcagagcaaggaaaagagcccggaaagaagagacagcgaggagacaacccccagggaccaagaaaggcccagggaccaaagcccggac

SEQ ID NO: 226314 - RNA, 69 nt, Homo sapiens
ccacaccccagcaacccggaaaccgcaagaagcaagcgaacagaagcgcccgggggcaggggacgcgca

SEQ ID NO: 226315 - RNA, 72 nt, Homo sapiens
gaagcgacgagccgcgaggagaggcgagggcgccggcaccagggcgcaaccggaaagggaaggccacaagac

SEQ ID NO: 226316 - RNA, 73 nt, Homo sapiens
aggacaccagaaagagaggagaagggaacaaccgaaaacacagaaaggggaggccacacaggaagaaaagaag

SEQ ID NO: 226317 - RNA, 70 nt, Homo sapiens
ggggaaccgcggcgaaccggcgggaccccaagaccaagaacgcccagcccgcgggcaccggcagaaagga

SEQ ID NO: 226318 - RNA, 75 nt, Homo sapiens
acacccaaccaggcacagagaaagccagaagccagacgccgggaaggccaaacccagacacaggaaaacccagag

SEQ ID NO: 226319 - RNA, 80 nt, Homo sapiens
cggcccggaaaccagcaccaaggacagccaagcaccaacaccaggaagcggcgaaggggggccacgaggggagggagcgg

SEQ ID NO: 226320 - RNA, 66 nt, Homo sapiens
acacacgaacaaagaaaaggaaggcagaccaaggcaaggcacacaaggaacaaaaaacaacagagg

SEQ ID NO: 226321 - RNA, 64 nt, Homo sapiens
ccgaaaaaacagacccaaccgcgggggaaaagaaaccaagcaaaacagaagaaagggcacaacg

SEQ ID NO: 226322 - RNA, 35 nt, Homo sapiens
gggacacacaaagaggacccacgcacgagcccgcg

SEQ ID NO: 226323 - RNA, 48 nt, Homo sapiens
agccagcgacagaagccagaggggaagaacgaaaagacaacaaagacc

SEQ ID NO: 226324 - RNA, 68 nt, Homo sapiens
gaacaaggcggagcccaagaggggaagaacgaaaagacaacaaagaccggaaccaaacagagcaagaa

SEQ ID NO: 226325 - RNA, 71 nt, Homo sapiens
cgaccagaagggcgcacccgcaggaacccgccgaggcaacagagcaaccccagccacaagggagcaaccgg

SEQ ID NO: 226326 - RNA, 75 nt, Homo sapiens
accgaggggggggagaaaggaaaggagcaggcccagaaagaacagacaaagaccgaaaaacacgaggaaagcaga

SEQ ID NO: 226327 - RNA, 57 nt, Homo sapiens
agcgcaaaaacaagacggggcgccccacagaggggcgacgagcgaggaagcacacag

SEQ ID NO: 226328 - RNA, 75 nt, Homo sapiens
gagagccagagcaagagcggaccgccccaggagcgggcgccccacgggaaggaagagcggggagacagcagcacg

SEQ ID NO: 226329 - RNA, 76 nt, Homo sapiens
cagcccggccacaacagagcgaggaacaaaaacagagaggcacccagacgccccacagccagccggggcggaagac

SEQ ID NO: 226330 - RNA, 86 nt, Homo sapiens
caggccggagaggacaggggaagagcgaagccgaacagccagggggccgaggcccgggaaccgccgaaccccaccgcccccgcgcc

SEQ ID NO: 226331 - RNA, 75 nt, Homo sapiens
gggaggagaccacccaaacgcggcacgggaggagggcgggacccgagaagggcagcccccacccagccagggcgg

SEQ ID NO: 226332 - RNA, 56 nt, Homo sapiens
gcgcggaaggcagcgcccagcagcgcagggaacaagaaggggcccaggccggggac

SEQ ID NO: 226333 - RNA, 52 nt, Homo sapiens
gaagcaaggcagaagaggccggagaagaaacagaaagcaggagaggaaggcg

SEQ ID NO: 226334 - RNA, 67 nt, Homo sapiens
gagaccagaggagggaaggccccccgacaaagcgaacaaagggcagaagcagagaacagaggccgag

SEQ ID NO: 226335 - RNA, 83 nt, Homo sapiens
agccgacaaggagggaagcggccccagcaccccagcgcgcagggccgccaggggcgccgagaacagcagcagcgaccagaggc

SEQ ID NO: 226336 - RNA, 84 nt, Homo sapiens
agcgccccaggccaagagggacccacccggcggcgggcgcaaagacaccgccagaagaccagaggaccccggaggaagcagccg

SEQ ID NO: 226337 - RNA, 65 nt, Homo sapiens
ggagagcgcagcgccaccccaaacgaggagagcacccgcaaacgggagaggagccaagcccaacg

SEQ ID NO: 226338 - RNA, 30 nt, Homo sapiens
caggggcggccgccggaccgggcgaggcag

SEQ ID NO: 226339 - RNA, 73 nt, Homo sapiens
aaggagacaggacacagaacagaagcgaagaagggacgaaaggcagccgggagcaaacagcaaggaaccccgc

SEQ ID NO: 226340 - RNA, 89 nt, Homo sapiens
acgacgaacgcgccccccgccggaggcgaggaggcccgaggaggcagaggaggaggagggaccacaagccacaaggaaagaagacgaag

SEQ ID NO: 226341 - RNA, 74 nt, Homo sapiens
gccaccaggagaagcaaaagagcgccgaggccccacaggggcccacggcggggaggcgcggcaggggcaacgca

SEQ ID NO: 226342 - RNA, 75 nt, Homo sapiens
gcggcgcggacggggcggaagacgcacacgccagagcgcccaaccaggcagagcacacaccagagaaccacagca

SEQ ID NO: 226343 - RNA, 59 nt, Homo sapiens
cgaggaaaaacgcgagcacaagacagggagcgcagaaacggagaaagaggaaacagaag

SEQ ID NO: 226344 - RNA, 74 nt, Homo sapiens
ccgaacgagcggaggccaacaaaccccggcacaaagcagaccgccccacgggcgcgcccgcgacagcaccccgg

SEQ ID NO: 226345 - RNA, 69 nt, Homo sapiens
acgcggcaacgcccccgggacagcacgccccggaccccaagaggagcagcgacgagaaagagcaagagc

SEQ ID NO: 226346 - RNA, 70 nt, Homo sapiens
ccggcaaagagagggggacaagacaagaggaaaagggagaaccaacaaagagggcaccacgaaacaaagc

SEQ ID NO: 226347 - RNA, 82 nt, Homo sapiens
aagaaacagacagaagggaggcaaagaaaaggagaaaagaagccaaagggacacgaaaccagagcaacggaagacagacgga

SEQ ID NO: 226348 - RNA, 65 nt, Homo sapiens
cggccaaagccgcccagacggccaccggcgggaggaacaaaaggagaaagacagcaaagaaaagg

SEQ ID NO: 226349 - RNA, 69 nt, Homo sapiens
agaacgggcggacgggcgcccagccagggcgcaggaccggcccagaagccccgccgccacgccaaaacc

SEQ ID NO: 226350 - RNA, 72 nt, Homo sapiens
gcacaaagcaagggacgcaccaacacggaccagcaagacaccccgagggggaaaaacagaccaagccaagag

SEQ ID NO: 226351 - RNA, 82 nt, Homo sapiens
gaagcggcagagagggggacgaccccgaacccaggacagcaccaggcccaggacagcacgagaaacacgaccccccgagagc

SEQ ID NO: 226352 - RNA, 80 nt, Homo sapiens
gcccaggagcgggggccccgcagaaggggggaccggcgggccacgaggcggccccagcgcgggcgacaggccgacacccc

SEQ ID NO: 226353 - RNA, 75 nt, Homo sapiens
aagcaagagagacccaacagaagaaagaaacccgaggacagcaccaaacaacaccaaaggaagagaaaagacaca

SEQ ID NO: 226354 - RNA, 76 nt, Homo sapiens
gcgcggggaacgggagcggagaggaccgcagaccgcccaagcaccacccggaagcaaagagccgccagcagagaca

SEQ ID NO: 226355 - RNA, 79 nt, Homo sapiens
ccgcgcgaaccaaacgaaagagaggcggacaacagagcaccccagacgcccgccgcagaggaaagacacggcggaaggg

SEQ ID NO: 226356 - RNA, 84 nt, Homo sapiens
gaccgcaccacggcaagggcaaccgcggggcaagcgggccacgcacccgcaccaaggccaagggccaagaaacagaggagagcc

SEQ ID NO: 226357 - RNA, 85 nt, Homo sapiens
aggggcacagccgagagaagacggaggacgagcgcggggcggcaccggaggaggagaaccgagggacaacgggagaacacgccca

SEQ ID NO: 226358 - RNA, 74 nt, Homo sapiens
cagaaaccccggacaaggcacgccagacgcgccgggaggaaccgaggccacagagaggcaccccaccaccgcac

SEQ ID NO: 226359 - RNA, 76 nt, Homo sapiens
aacggaggagccagacccggggaggcgcacacacaccaaagccaccaaaaccccaacaggggcaccgagcacggag

SEQ ID NO: 226360 - RNA, 40 nt, Homo sapiens
gagacgaccgcaacggcagggcacgggaccccaaccagga

SEQ ID NO: 226361 - RNA, 78 nt, Homo sapiens
aaaaggaaccgaaacgcccacggagagacaagggggagaagcaaccacagacacaacaagcgaaacaagcacagcgca

SEQ ID NO: 226362 - RNA, 71 nt, Homo sapiens
gaacaggcggggagaggccacagcccggacccacgaccccccggccagacaccaggcccagacagccgccg

SEQ ID NO: 226363 - RNA, 55 nt, Homo sapiens
gagcgacgccagaaacagccaccagaacccacaaccccacgcagagggggacgac

SEQ ID NO: 226364 - RNA, 73 nt, Homo sapiens
caagccggagggcaagagggcgaaacaggccgacgcaaacggggaggcaagcaggggggcaaaggaaagaagg

SEQ ID NO: 226365 - RNA, 70 nt, Homo sapiens
ggcgacacagaaggaacagcagacaagacgagcccaccacggacagcaaacagacagagcgcggcacgag

SEQ ID NO: 226366 - RNA, 44 nt, Homo sapiens
ggaccccccccaacgaggaagaaacccgcgccgagcgccaacgg

SEQ ID NO: 226367 - RNA, 71 nt, Homo sapiens
cccaaggacgcggagcgaaaaaggggacaagaaaaccagaaacgggggcccgacaagacacaaaaagggaa

SEQ ID NO: 226368 - RNA, 85 nt, Homo sapiens
cgcccggccacaccagggagcccccacaccaaggagaaagcagccaccaggccccaaccccacagcccgcaggagggggccggcc

SEQ ID NO: 226369 - RNA, 78 nt, Homo sapiens
ccccagcgcagcagaaccggagcgaggccaagaggagaaagaaccggccggaagacaccgggcacacagagaaaaaaa

SEQ ID NO: 226370 - RNA, 72 nt, Homo sapiens
ccccagggcccccaaacgcacagaaagagcgaacacccagaaacggagcccccccccggaggagagagagag

SEQ ID NO: 226371 - RNA, 80 nt, Homo sapiens
ggaagagaggaagaggggccaaaaggagggcagaggccggacagagccacgcgaggacaccccggaagagcggaaggaga

SEQ ID NO: 226372 - RNA, 80 nt, Homo sapiens
acagccacgcgcacagcaccacagccgcggcaaggaggaagccagccaggcccacgaggcaacgcaaccaccaccgaggc

SEQ ID NO: 226373 - RNA, 78 nt, Homo sapiens
gccgggcaccggaagagagcaacaggagcgaagccgaccgaggggcgaacagagccccggcaggggggcggccgggag

SEQ ID NO: 226374 - RNA, 85 nt, Homo sapiens
ggggccgccggggcccaggcccagggaccaggcggaggcgcgcgggagccggggcaccacagagagcgggggacagagaaagacc

SEQ ID NO: 226375 - RNA, 63 nt, Homo sapiens
cccagcggcagcagaaagagcaacaacggcaagcggagaagagcaaggccgaaccgagaggaa

SEQ ID NO: 226376 - RNA, 75 nt, Homo sapiens
gcaggccgcggcggagggaccggcccgcgaagggcgaggccagaggacaggccgagcgccggccggaacacgggc

SEQ ID NO: 226377 - RNA, 78 nt, Homo sapiens
cacagaagccgacaaggcgcaagcgaaaacagaccgcgagcccagagggcagagacaggcaacagacggcaacgaaag

SEQ ID NO: 226378 - RNA, 79 nt, Homo sapiens
gcgacgaaggccgggcggcgaagggcgacggcccaggcagggcacacaacgagcagaagggagaaaagaagcagcccac

SEQ ID NO: 226379 - RNA, 77 nt, Homo sapiens
caaaccgaggacccaagggaacgaggagaagagccaggacacagcaggcaaccgcggaggagcaccgcgcccaggcg

SEQ ID NO: 226380 - RNA, 79 nt, Homo sapiens
aaggaggacagaagaaccgccagggcaccagacagccacgcagacacagccagaaaaacagccaggacccaaacaaaaa

SEQ ID NO: 226381 - RNA, 79 nt, Homo sapiens
gccggagaaccgacgggagccagagcgggacaaagcgagcagcgggccgccaccggccggagaccccacaaccccagcc

SEQ ID NO: 226382 - RNA, 71 nt, Homo sapiens
aggaacaacaagaaccaagccacaggcaagaacaacccaagaaggacagcgcgacagaaggacagcagccg

SEQ ID NO: 226383 - RNA, 95 nt, Homo sapiens
agaggaccacgagacaagcggcagcgccaacgccgcacgcgcacccgacaacgcgcacgggacggcagcgcggaagaccgcaaaagaaggagaac

SEQ ID NO: 226384 - RNA, 73 nt, Homo sapiens
ccgagcgacggcgagacccagaagggcggagggggcagggcagaaggaccaggggcgacgaggcccagagcaa

SEQ ID NO: 226385 - RNA, 71 nt, Homo sapiens
gccaaaaagacaagcgaaaaagggcagaccaagaaggaagaaaccaaacgaaacacaacgaccaacgggaa

SEQ ID NO: 226386 - RNA, 70 nt, Homo sapiens
cggcaacaaaagaaaaagacagcagcgaaaagaacggaagagagaacgaaagaggcgaaaagagaacggg

SEQ ID NO: 226387 - RNA, 47 nt, Homo sapiens
cggaccacgaggacggaagagcggcggagaacggaaaagcaccagga

SEQ ID NO: 226388 - RNA, 76 nt, Homo sapiens
agaaaggacgcagcacaagccagaaagccccgccgaagagaaggccagagaaggggagaccgcggagagacaggga

SEQ ID NO: 226389 - RNA, 88 nt, Homo sapiens
gagcggcgagggaaaagcgaggcaaggcaggcgggaaagccaggccagaagaaggaaggccggggaggggacaggaaagacacaccac

SEQ ID NO: 226390 - RNA, 84 nt, Homo sapiens
aagagcagaggagacaaaccggagaaggagccaagaaagagaagggagcccgggagcagcagaagcaggcaagggaaacgagga

SEQ ID NO: 226391 - RNA, 124 nt, Homo sapiens
cccagcgccaccaccacgccagccgcaccagccgcccaagccgcacagccgcggcggcagcagcaggagagccgagagcagcagaggccgcgacaagacaaccggccacgacagcaccaccagc

SEQ ID NO: 226392 - RNA, 54 nt, Homo sapiens
cggagccgagcaaccaggaaaggcgcgcccaaaacggcacaaagccgggaaaag

SEQ ID NO: 226393 - RNA, 79 nt, Homo sapiens
gcgaggagccagcaggcaccgcgccggagacagaggacgagccacgggccgaagaagcgcgcccacccgggcagaaaac

SEQ ID NO: 226394 - RNA, 75 nt, Homo sapiens
gaaaacaggcagaacaccacacaagggagcagcgggacgcaagagaacacgaaagaaacccaggaagcccgcaga

SEQ ID NO: 226395 - RNA, 78 nt, Homo sapiens
ccaccgacccagagggcacgaccagaggggagcggaagagagaagggcacagaccaagacaacgaaccccggccagga

SEQ ID NO: 226396 - RNA, 55 nt, Homo sapiens
acagaggagagcgacgagaagaagcacccaagccagggagcggcaaaagcaaaag

SEQ ID NO: 226397 - RNA, 35 nt, Homo sapiens
gggacggacccagccaaaaagaagacaccagcaac

SEQ ID NO: 226398 - RNA, 73 nt, Homo sapiens
aggccagcgcggccaagacccgccgcaagggaaagaggcaaaaccgagaaaaggaccaaagagagcgagaaag

SEQ ID NO: 226399 - RNA, 74 nt, Homo sapiens
agcagcaacaagcgccaagcaaggccacgcaaccacgggcggcgaaaggggcgggggagaagcagaccgcacca

SEQ ID NO: 226400 - RNA, 97 nt, Homo sapiens
gcagcaggaccaaacccgccccccgagaagcccagaggcgcccggggcaacgggccgacagcacagcaaaagacgagaggaccgacaccagagcaga

SEQ ID NO: 226401 - RNA, 38 nt, Homo sapiens
gggaaggccaggggaaccggccgaggcccgagacgcgg

SEQ ID NO: 226402 - RNA, 125 nt, Homo sapiens
aacaccgacaagaagaagagaacaaagagccgggagacggagcacggcgccgcggcaagagccagacaagcagaccggaagaccgacggaagaccacaccccgagggagcccaggacaccacgag

SEQ ID NO: 226403 - RNA, 78 nt, Homo sapiens
gcgggcgccaggccgcgccgacgcacccagcacgggccagaacccaaggagaaaggcggcgggcgccggccgagcccg

SEQ ID NO: 226404 - RNA, 78 nt, Homo sapiens
aaacaaagcaaaaaaaacaggagaaaaagacgaggcccccaagcggggcgccacgcagagccccgccaggaagacacg

SEQ ID NO: 226405 - RNA, 53 nt, Homo sapiens
accgccagcgccgcaagcagcaagagaaaggcagcaggcgcccaaccaggagc

SEQ ID NO: 226406 - RNA, 83 nt, Homo sapiens
gcggagcccggagcggggcgacgaggcgagcgggggccgggcaggaacgaggcacgaaggaggcacaccagaagggaagagaa

SEQ ID NO: 226407 - RNA, 76 nt, Homo sapiens
gcaaagaaggccaccacccccagacagggcaagaaggggaaagaacccaacgcggagagccacaacaacgaacacc

SEQ ID NO: 226408 - RNA, 73 nt, Homo sapiens
ccggcggacagccgcacccgcgccccagcaggagagcgcgcgccgcgcgcccgcacaaacgccggggacaaca

SEQ ID NO: 226409 - RNA, 78 nt, Homo sapiens
gacgcccccagaggaaacggcccacgggaccacagcagaaccaagccgccacagggagaaaagagcagaggccgaccc

SEQ ID NO: 226410 - RNA, 78 nt, Homo sapiens
aagcagagaggggccagcacacaggcccgggaggcgaagacagagccaggccgccggcccccgggaagcgagacagaa

SEQ ID NO: 226411 - RNA, 81 nt, Homo sapiens
accgagggaagaccacaaccacgaccacaaaccggcggagccacagaacccaaggacgcagcaaagccaaaaagcggggaa

SEQ ID NO: 226412 - RNA, 76 nt, Homo sapiens
cgggcagcaaggcgcgcggcaccccggccaccggcagagacagaagacagcccacgacacaggcccagaccagccc

SEQ ID NO: 226413 - RNA, 103 nt, Homo sapiens
gaaacgagcacaggaccacaaacagcaacacagaacgcaagaagccacggagaaagacacacgcagggaaggaaacacaaagagaaggaaagacaacagaaag

SEQ ID NO: 226414 - RNA, 75 nt, Homo sapiens
caggaaggggagcaaaagggagagaagcccccagccaggagagcagcggaacaaggcaccaggaggaggcgcgga

SEQ ID NO: 226415 - RNA, 87 nt, Homo sapiens
gccgcccgacccagggcccgcgggccaggagagcgccggcggaccgcgaccgcacaagcagccgccagcggaaccaagcggcgcggc

SEQ ID NO: 226416 - RNA, 69 nt, Homo sapiens
cccacggcagaacccggccgagggcacggccagcccgacgccagagcggggcccgagggaaaggacaca

SEQ ID NO: 226417 - RNA, 76 nt, Homo sapiens
gagcagccgggagacggagggccaagaaaagacaaaaacgcggaggggaccagagaccaaaaaaaaaacgcgaaca

SEQ ID NO: 226418 - RNA, 39 nt, Homo sapiens
gcggaaaaaccgaacaagaaacggcgaggaaagagagga

SEQ ID NO: 226419 - RNA, 70 nt, Homo sapiens
gcgacaccccagaccacggaaagacggacagccaagcaacgaagagagaggaacaaacaggcaaggagcg

SEQ ID NO: 226420 - RNA, 72 nt, Homo sapiens
cggaccagccgaaaagccccgcccgcccggaaggccggaaggggggcgacgcggaaggcacaacacggcaac

SEQ ID NO: 226421 - RNA, 88 nt, Homo sapiens
ccagagccaaggccagggggcaaggcggcaaagcacacaaggaggaccgaacaaaagaagcccaagaaagaaaagaaaaagaaagaaa

SEQ ID NO: 226422 - RNA, 61 nt, Homo sapiens
ggaccaaagcgacagcacggcagaggcaccaaaaagcacgaaaggccagcaagaaaccaag

SEQ ID NO: 226423 - RNA, 75 nt, Homo sapiens
caagcccaagacaaaaacgcccagcaggcgcagcagcaagagggaaaaaggcaacgggaccgcggcaaaggccaa

SEQ ID NO: 226424 - RNA, 56 nt, Homo sapiens
cgcgccgcgccgcaccccgagcgaccggaaggagggccccggagcagccacaccac

SEQ ID NO: 226425 - RNA, 77 nt, Homo sapiens
ggacaagacgaaagcgaacagagaacggcacgcacgggaggaaaaagagaaaccaagaccaggacacaaccaccaaa

SEQ ID NO: 226426 - RNA, 70 nt, Homo sapiens
ggaaccaaccgggaaagcccggggcagggagccgggaacgacggccccagcagcggcccggacccggcgc

SEQ ID NO: 226427 - RNA, 45 nt, Homo sapiens
ccgagaaaggagaacagggaaacggacacaggaaagggaagcgcc

SEQ ID NO: 226428 - RNA, 78 nt, Homo sapiens
gacgcagccaggccacaggcagcgaacgggaaagcgggccaagaccgaacggcgggcggccaggaagaaaggcagcca

SEQ ID NO: 226429 - RNA, 84 nt, Homo sapiens
gcgcggacccaggcgcggaggcgaggccagcagagaggggcaccacggccaggcggccgaacgcgacccggaccacccacccgg

SEQ ID NO: 226430 - RNA, 58 nt, Homo sapiens
gaaaccccggaggccccagggacagcaggagaaaaaggcagccgagcagaacgaagag

SEQ ID NO: 226431 - RNA, 79 nt, Homo sapiens
gaacacgcacaaaaaagggcagaagagaagcaggaaggaggcagaggcacaccgaaagacgaccgggcgccgaccccgg

SEQ ID NO: 226432 - RNA, 83 nt, Homo sapiens
aagacaggccggaacccgaaaggagccaaggacaggaacgcgggcccgcagccaacaaacaaaaagaaaaccaaaaaagccca

SEQ ID NO: 226433 - RNA, 61 nt, Homo sapiens
cagggcaaacaggagcagccagagccaagccaaaagccaaaagccgagaacgacgaagacg

SEQ ID NO: 226434 - RNA, 87 nt, Homo sapiens
gcgagccgcaaacggcaggcgagcgaaggcacaggcccacaaccgcaccaagaagcacgaccgcgaggaccgggccgcagcgacgcg

SEQ ID NO: 226435 - RNA, 66 nt, Homo sapiens
caaaacgggaagaagaaagaacccagaagaaagagggcagagagaagcgaagccagacacaccaac

SEQ ID NO: 226436 - RNA, 74 nt, Homo sapiens
agcaaagcccaacgcagcccagaacaggaggacaccccaccagggaagacccgaacgaaggcagaagagaagag

SEQ ID NO: 226437 - RNA, 61 nt, Homo sapiens
gaagaggcagcgcccacgcagccggaccacagcccgggccagaagcggacccagaagaggg

SEQ ID NO: 226438 - RNA, 38 nt, Homo sapiens
ccaacccacgccgaaaggcggaggcagcggcggaccgg

SEQ ID NO: 226439 - RNA, 79 nt, Homo sapiens
aagccgagaacagggaaagcccccaaagaaggaaaaggcacaccgaggaacgagaccagaacagaagaagggaaaagcg

SEQ ID NO: 226440 - RNA, 75 nt, Homo sapiens
agccgggagcagcgccccggcacagccagggcgaaagaagaccccgccaccggcccccacgcaccaccaaagccg

SEQ ID NO: 226441 - RNA, 71 nt, Homo sapiens
agcacagggacgagacagaacaacgagagagagcaaaaacaccagacaagagacccaaagaaagggaagaa

SEQ ID NO: 226442 - RNA, 82 nt, Homo sapiens
gccgcccagaggacgcccaacaccacccacccaccacgaggcagaaagcagagagcgagcccaaaaagagaagaaaaaagga

SEQ ID NO: 226443 - RNA, 69 nt, Homo sapiens
ccccgaggacgagcggacggaacagaccacagggaccaccggggacgaacgacaccgggccccccccgg

SEQ ID NO: 226444 - RNA, 70 nt, Homo sapiens
agaagccaagacaccgcgaaagggggacaaggagaagaaaccgccgaccagaggggagcacacaaagaag

SEQ ID NO: 226445 - RNA, 77 nt, Homo sapiens
ggaggccgcggcccgggccgcaccagagcgcccggcccacgacacaggaagaagacaggccgcagccaagccggaac

SEQ ID NO: 226446 - RNA, 67 nt, Homo sapiens
gcgccacagccaccagagccggcagcaaagagggaacagggcggcaccccaccgcccagccacagcc

SEQ ID NO: 226447 - RNA, 82 nt, Homo sapiens
gccgccacccacggaccaaggagaaggggcaacagcgcagcccggaaagagggaaaggaacaagaccgagcaaaggcaaaag

SEQ ID NO: 226448 - RNA, 77 nt, Homo sapiens
ggaaagccgccccaagagcaggaggggggcaaaccacagacagacgaaggaaccccccgcgagggccacgggaacac

SEQ ID NO: 226449 - RNA, 53 nt, Homo sapiens
aagccacgagcagaccaaaacaaaggaacggcagaccaagaacgagccgagaa

SEQ ID NO: 226450 - RNA, 71 nt, Homo sapiens
acaacggacaacagacaagccacaagaaggagaccaaggcaagcaagagaggccagcagaaaagagacgag

SEQ ID NO: 226451 - RNA, 79 nt, Homo sapiens
gcccggacaaagccgaaaccagcaggaaacagagcccgggcccagcggcggggggagaagagaagcccccgcagaagcc

SEQ ID NO: 226452 - RNA, 76 nt, Homo sapiens
aaaggaggaggacaaagagaggaacccccgcaggagaaaacgaaaagcgcgagagcaaagccgccacaggaccaga

SEQ ID NO: 226453 - RNA, 80 nt, Homo sapiens
caccgcccgccagccggcgccagggcgccacggagcgggagcaccgggcagaaggacgagagccccccaagagaacccag

SEQ ID NO: 226454 - RNA, 59 nt, Homo sapiens
gaaggaccgcgagcagacccgacaacacacccggcagggcagaggaaggcggaaggagc

SEQ ID NO: 226455 - RNA, 67 nt, Homo sapiens
gcggagggaccagcgagcggaacaggagagagcagccgggcggcccagccaaacaggccccgagagc

SEQ ID NO: 226456 - RNA, 44 nt, Homo sapiens
gcgcccaggggcaggcgaccaggccgccagaaggaggaacagaa

SEQ ID NO: 226457 - RNA, 64 nt, Homo sapiens
ccaaaaccagccgacaaagagggggcccaagaaggcgggcaaggaacccacaaggcgcgccagg

SEQ ID NO: 226458 - RNA, 77 nt, Homo sapiens
cgacccggcggcagaggcggccccagcggccgacaagcagaccggaagaccgacggaagaccacaccccgagggagc

SEQ ID NO: 226459 - RNA, 76 nt, Homo sapiens
ggccgcggcggccaggccccagacacagacgagcaggggaaggaccagggccgaagagggcggaaccacacaagag

SEQ ID NO: 226460 - RNA, 80 nt, Homo sapiens
aaagcggacacccgcccgccgaacagaacaacccgagagcacaagaacccacacggcagaggcccgcgaagggcaaggga

SEQ ID NO: 226461 - RNA, 75 nt, Homo sapiens
cgcgcgggcccgggccaggccgccgccgagccgaggacagaaagcgggacacaagcaggagcacagaccccgaaa

SEQ ID NO: 226462 - RNA, 67 nt, Homo sapiens
caacacgcaccgcaggcacaggccggcaccgcgacccagcaaacgggaaagaagagccggccgggac

SEQ ID NO: 226463 - RNA, 67 nt, Homo sapiens
cgaggacacacccaggaaaagaccaggacggacaagcacagccggaagagcccgaggagagacagga

SEQ ID NO: 226464 - RNA, 115 nt, Homo sapiens
caacaacccaaggcacgccacgggagcccggcaagccgccaccgggagaagcggccgggccaagaaggacagaaaggacaccagccaccacgggacaccagcacagaaagcagcc

SEQ ID NO: 226465 - RNA, 69 nt, Homo sapiens
aagaaaacacgggaaacgccggaaacgagaacgcccgggccgaaaacacagcgccaaagcccggcagca

SEQ ID NO: 226466 - RNA, 76 nt, Homo sapiens
ccgggcacgccccccaccggaccacacggcgaggggaaccacgacccaacaaaaaacggaaggaaaagggagcgaa

SEQ ID NO: 226467 - RNA, 75 nt, Homo sapiens
gcaccacaggaggggcaggaaacgaaggaagaaggagaaagacaaagccccgagaaagaccagcaccgccgaaaa

SEQ ID NO: 226468 - RNA, 108 nt, Homo sapiens
gcgggccgcccggagacaaccaaacacaccagccggggaaccaccgccagagcaagacccacgaagggcacacaaaggacccaccgggaaaggacagagcagcaccca

SEQ ID NO: 226469 - RNA, 56 nt, Homo sapiens
cagccgaacaacacaccggaaggagggccccggagcagccacaccaccgaggcccc

SEQ ID NO: 226470 - RNA, 69 nt, Homo sapiens
ggcaaggggaaaaagacgcgcaacgggaagcccagaggcacggggcagaacaccaacagagggccgacc

SEQ ID NO: 226471 - RNA, 77 nt, Homo sapiens
caggaaagagaaaaggaacacaagcacagcaaaagcagagaaagacagcaaagaaaaggagaagaaaggaaaaaaac

SEQ ID NO: 226472 - RNA, 81 nt, Homo sapiens
cagagcagcagaagccggcgcgcggaggggcccgccaccagagcacacaggaccgaaaagacgcggccccaaaggaaacac

SEQ ID NO: 226473 - RNA, 70 nt, Homo sapiens
caccagcggaaaggagcccgccggcccaaacgcggacacagcaacaaggcaaccaacccacagccaaggc

SEQ ID NO: 226474 - RNA, 41 nt, Homo sapiens
ggaacgcccggcccagcccccagagcggcccagcgaccagg

SEQ ID NO: 226475 - RNA, 81 nt, Homo sapiens
cacacgccccagggcggagaccaccacgaaaaggacaggccccccacagcagagcaccaaacaggggggaaggaagacaaa

SEQ ID NO: 226476 - RNA, 81 nt, Homo sapiens
gaggcaacaaccacggcccaggaaccgaaaaggcgaggagaagacggcaaaaaacgcgaacaaggcaacagaacgaggaga

SEQ ID NO: 226477 - RNA, 78 nt, Homo sapiens
aagcgagcgagcgcagagcccggggacggcgaggccccagaccacacgaacaaccggacggcacccccggcaagggga

SEQ ID NO: 226478 - RNA, 74 nt, Homo sapiens
gcacacggccccgaccggcgggccccgggcacaccaacaagccacgaccggggagcagggaaagcccgccagcg

SEQ ID NO: 226479 - RNA, 52 nt, Homo sapiens
cccaccaacagaagccacgaggagccagagaagagaaacgaaccaagccaac

SEQ ID NO: 226480 - RNA, 69 nt, Homo sapiens
caaaggaaagcgcaggagacagcacaaaaaaagccaccacaaggggacaacggagcaggccccaacccg

SEQ ID NO: 226481 - RNA, 68 nt, Homo sapiens
gccaggcacaccgcaaggacccaaaggggaggggcgccgaccggaccacccagccaacaacccaacga

SEQ ID NO: 226482 - RNA, 56 nt, Homo sapiens
gcaaggggccaccaggaggccagggggcgccaggcgaagggaggaggcagcgaaaa

SEQ ID NO: 226483 - RNA, 84 nt, Homo sapiens
gcagcccgcagagcccgagagaggagccgacgggacgcccaaccgcccggagagaagcgaagcggcggcgcagcggcccaaccg

SEQ ID NO: 226484 - RNA, 85 nt, Homo sapiens
gacccgaaacacgaaagcaggaggagacagaagcggaacaccagacgaaacaggcagaagccccagaggagcccgaaacccccag

SEQ ID NO: 226485 - RNA, 79 nt, Homo sapiens
cggcgaggagcgccgccgaggagagcagagcaggccggggagccccggacgagaagagaagaaggagaagcccccccca

SEQ ID NO: 226486 - RNA, 73 nt, Homo sapiens
gggcccacacaacccaggcaaccaacaggggcacgggcagagcgggccggcaccggaaagcgggaccgcgcca

SEQ ID NO: 226487 - RNA, 69 nt, Homo sapiens
caacaagcccccgacagcacgcccacggacacaagcacgacggagaagagaggaacccgccaaaggaac

SEQ ID NO: 226488 - RNA, 107 nt, Homo sapiens
cgggagagggccaccgcccgccacccgcgcgccgccgccgaggagaaagaacaccagcaggaaaaaagagcggcagaaggccaaacggccgagcaggcgagcgaaga

SEQ ID NO: 226489 - RNA, 83 nt, Homo sapiens
ggggccacgcgcgggcccgggccaggccgccgccgagccgagacacgcagcggccgaggcaggggaagagagcggccccggac

SEQ ID NO: 226490 - RNA, 81 nt, Homo sapiens
gccgaccccagcgaagaggcggccgagaccagccacacgcggagcaggaagaaggagagacgaccacgcaacagaaaaaga

SEQ ID NO: 226491 - RNA, 79 nt, Homo sapiens
ggagaagaaggcggggggcgggggaggcgagcgcgccgcccggagccgcgcacacgagcggcccaagggcagccccccc

SEQ ID NO: 226492 - RNA, 72 nt, Homo sapiens
gagccccacccccaaaaaacagaaggagcaaggaagaaagggggaagaacacgagggaagaaggccccgaaa

SEQ ID NO: 226493 - RNA, 74 nt, Homo sapiens
cacaacagaagggaacccccacaaagaacagaagcaaggaagcgggcaagagggcacagaaggaaggaaaccac

SEQ ID NO: 226494 - RNA, 71 nt, Homo sapiens
cggccaaccgaacccagggaggaagaaccacgacaaaggcgcgacccccgcgaagacccccacgcacggac

SEQ ID NO: 226495 - RNA, 60 nt, Homo sapiens
caccagaggaccggcaggggggcggacgaagcaggacacaccgaacacgcacccgagcca

SEQ ID NO: 226496 - RNA, 73 nt, Homo sapiens
caaagcccacagaggccaaggcaagccagagaacacccgccgcgcaaaagcgaccccagagacccaccacgcc

SEQ ID NO: 226497 - RNA, 69 nt, Homo sapiens
ccaccgaggcccagggcgggaagaaagccccaccgagcacagggccagcgagcgcaaaagacaacccac

SEQ ID NO: 226498 - RNA, 74 nt, Homo sapiens
ggaggagcagcccgccccgccgggggagacgacccccgccaggcgacgccggaccgcgaagagacgagaggggc

SEQ ID NO: 226499 - RNA, 66 nt, Homo sapiens
cgccgcaggcgcgggggacggccccggggggcgcgcccgccgacggggaggaccccaccaggaaac

SEQ ID NO: 226500 - RNA, 73 nt, Homo sapiens
ggcaggggcaggaagaacccacgggcagcacacacgaaagagaagccccggagcacagggaacaccagaggcg

SEQ ID NO: 226501 - RNA, 55 nt, Homo sapiens
cacccgcagcgggaacagagcgaccaagccagaagaacaaccagaaacaaacaac

SEQ ID NO: 226502 - RNA, 60 nt, Homo sapiens
ggagggcgagcgaggaggaggcggagcggggcccgacggcgaacaagaggcgccagcggg

SEQ ID NO: 226503 - RNA, 95 nt, Homo sapiens
ggcccgagcgcaccggagggacggcacagggaggccagccggagaagcgagcagcggagacagggaaacgaaaaccaccgggcaccacgagccca

SEQ ID NO: 226504 - RNA, 59 nt, Homo sapiens
aggacacagcacacacaccggcaaccggccagcaaggggacagccaccaccgacccaga

SEQ ID NO: 226505 - RNA, 73 nt, Homo sapiens
gaccgcggacagagacaacaccgagagagaagagagagaaggaggaacccaggaggaacaaagggcgcggggg

SEQ ID NO: 226506 - RNA, 70 nt, Homo sapiens
acaccacgcagagcaaacccaggggagaaacagcagaaaacaacggagaagcgggagaaaggcagggaag

SEQ ID NO: 226507 - RNA, 59 nt, Homo sapiens
cccagcaccccgagaaccgcaggagccagaggcaggaaagcaggaccagcaagcccaac

SEQ ID NO: 226508 - RNA, 68 nt, Homo sapiens
gaccacgggccaggaaggaaacccaggagaacagaccaagcacgaaaaccgcacgaaagcgaccgcag

SEQ ID NO: 226509 - RNA, 76 nt, Homo sapiens
gaaaagagccgacagagcacagcccaaggcgaagaaccagaaaagaaagccgagggaaaaaccggagaagagaaac

SEQ ID NO: 226510 - RNA, 77 nt, Homo sapiens
gcggggcggaccggagaagccccgagcaccccacagcagaccgaaaagggcggaaaaggaccaaggcccgcaaaagg

SEQ ID NO: 226511 - RNA, 85 nt, Homo sapiens
caccacggagagcacgagagacccgagcacgccacccccacccgcacaggaccaaggaagaagccaccgagacagacaacaaaag

SEQ ID NO: 226512 - RNA, 77 nt, Homo sapiens
acaggcaagcaccggcacagcccaggccccggacacgagagaaacgccgagcaaggggcaacacgcccgcacgccaa

SEQ ID NO: 226513 - RNA, 73 nt, Homo sapiens
gaggccgagcccgcgcagaaggagaagaggcccgaaaagagcagaagagggacacagagaagaacagagcaag

SEQ ID NO: 226514 - RNA, 78 nt, Homo sapiens
ccagaaggaaacacgagagaagccaaagagggaacccccaccaagcaaaccaggagcaagacgacagagcaaccgcag

SEQ ID NO: 226515 - RNA, 82 nt, Homo sapiens
ccgagggaaaccagccaccaggccagaacggggcccccagagcagaagagcgaaccagacggggacagaaggggaggaaggg

SEQ ID NO: 226516 - RNA, 84 nt, Homo sapiens
cggagcccgcagaccgcagaaggccggagacaccagcaggacgccacccaccagagcacggcaagcgccggagcggcggccacg

SEQ ID NO: 226517 - RNA, 77 nt, Homo sapiens
ggaaaaacccacaaacagcacaacgggcaggcgacggaaaagccgaggggagaagcgcaggagccaccccccaaaaa

SEQ ID NO: 226518 - RNA, 66 nt, Homo sapiens
aaacagaaggaggccggccgacacaaacaggccaagagcccagggcaaaaacagaccaggaacgca

SEQ ID NO: 226519 - RNA, 71 nt, Homo sapiens
gagcggggcccggaccccaagacggccacggaggagaccacaaacagccacaagaccagcaggccggagcg

SEQ ID NO: 226520 - RNA, 74 nt, Homo sapiens
acgagggcgcacagccagaaaggggggccgacaggcgcccacacccaagcaggaaagccaggccagaagaagga

SEQ ID NO: 226521 - RNA, 60 nt, Homo sapiens
caaaagcgaggagggccgcggcaggaaaagcccggaaaagcagccaagcggaagacagag

SEQ ID NO: 226522 - RNA, 69 nt, Homo sapiens
caggaggaagacaaaagaggaaacaagaagaggaagaaagccaacaaccccggggacacggcacagcgc

SEQ ID NO: 226523 - RNA, 81 nt, Homo sapiens
agagggacccggacaaccagaggcagccagcagggggaggacagagcgggagccaccagcgccaaagggaagccaggagcc

SEQ ID NO: 226524 - RNA, 83 nt, Homo sapiens
ccagcccgcaggagcggcgcgcccaggcgacagcagccaggcgagcggcagggagacagcgcacccgcggagcgggcacacag

SEQ ID NO: 226525 - RNA, 77 nt, Homo sapiens
gggcaagccaggcaggacaccagagggagagcgagaggcggaggacccagaaacgcagcggacgggcagccggggca

SEQ ID NO: 226526 - RNA, 79 nt, Homo sapiens
cagcccccccggcgccccccccccaaagcggggcggagacccggccccaaaggcaggaaacccaccagggaagcccgac

SEQ ID NO: 226527 - RNA, 85 nt, Homo sapiens
aaaacgaggacccaagaagcagaaggagaacaagccaggaaaaccccgaaaacgcaagaagcgcagaacacgcagaccggcaccg

SEQ ID NO: 226528 - RNA, 66 nt, Homo sapiens
cacagcaccccagcacgaagacaaaaaggaaccaccagaacaaaccaggggagggaaacgagaaaa

SEQ ID NO: 226529 - RNA, 82 nt, Homo sapiens
cgagaaaaggaagacaagaagagcggcagcccacagacaccaggaagcccaggaagaagaggcaggagagacggggcgccag

SEQ ID NO: 226530 - RNA, 73 nt, Homo sapiens
aaccccgggaagaaggaggacccaccgaagccaaccagagcacaaaagcggagccgccaccccagagaaaaac

SEQ ID NO: 226531 - RNA, 77 nt, Homo sapiens
aagggaaggccagcagcgcgcggagaagaacggggagccaggcccaccgagaccagagaagaccgacaacaggcaaa

SEQ ID NO: 226532 - RNA, 54 nt, Homo sapiens
agcaaccagacagaccaggccagccccaaaggagccacagggcaagccaggcac

SEQ ID NO: 226533 - RNA, 57 nt, Homo sapiens
caagcaggaccacccaccagccaccaggaaccccgacagcagagacgacgcggcaag

SEQ ID NO: 226534 - RNA, 77 nt, Homo sapiens
cggagcggcgcggcgggccggcggcgcggccaccaggggaacaacggaagaccacagaaaaaagaaccggagaaaac

SEQ ID NO: 226535 - RNA, 72 nt, Homo sapiens
agagggcggaggccacgaacacgccggagccgccagggagacaggaaccaaaaagcaacagaagaaagacgg

SEQ ID NO: 226536 - RNA, 85 nt, Homo sapiens
gcagaagaaaaacaagcagaagcacgagggaacccgagagccgggcacagaggacagaggccacgaagccagagcgcaaccagac

SEQ ID NO: 226537 - RNA, 78 nt, Homo sapiens
gagggaaggcgccgcggcaacgcgcccccagccccgccccccagaccgggacgaggaaagaacccagggaccaagcga

SEQ ID NO: 226538 - RNA, 79 nt, Homo sapiens
cgaggaagacaaggccagccacggaaggagacacccgaacacaaaagcgggaggaagagcagagcagaagagaagagga

SEQ ID NO: 226539 - RNA, 53 nt, Homo sapiens
ggacccaccaccacccccaaggcagcggggaaaaagaccacaagaggaaaacg

SEQ ID NO: 226540 - RNA, 85 nt, Homo sapiens
cccaacgcaccagagccgccgggcagcccgagcggcagcggcagagaggcgagacacggaacggcgaagaagcgcacgggcccgg

SEQ ID NO: 226541 - RNA, 80 nt, Homo sapiens
ccgcgcagcccggccgccggcccccaacagcgccggggaagccggggaacaccagagcggcgcaccgggcgcagagcagg

SEQ ID NO: 226542 - RNA, 52 nt, Homo sapiens
gggccaacaaaacggcggaaaaaagggggagggaacaagaaccaagagaagc

SEQ ID NO: 226543 - RNA, 60 nt, Homo sapiens
accccaacgagaagcccgaaggacaaagacgggcacgggaaccacggagaccagaccgcg

SEQ ID NO: 226544 - RNA, 78 nt, Homo sapiens
cgcgagcgcgaacagaagagaggaagaaaggacagggagagaagccaagaaagacaggccaaggagaggcagacccag

SEQ ID NO: 226545 - RNA, 53 nt, Homo sapiens
ccaagaaccaccggaaccacaagaaggagaaagaagaaacaaagagggaccca

SEQ ID NO: 226546 - RNA, 79 nt, Homo sapiens
ccgagcgccaccgcgcccaggaagggaccacagaccagcacgccggcgccacgaaccgagcgacaggacgggccgagag

SEQ ID NO: 226547 - RNA, 86 nt, Homo sapiens
gcacacgcacgggccccggcgccaccggagagaggccgcgccgggcagagggagcgggcggcgcgcagagcagaaccacaagggac

SEQ ID NO: 226548 - RNA, 80 nt, Homo sapiens
ggggccaacggacgacaggacaccagaaaggaagaagaacagaacccaggaagagcacaagcagacaaaacaaagggaga

SEQ ID NO: 226549 - RNA, 39 nt, Homo sapiens
gaagcacaagagacaccgaggcacgagaagagaagccca

SEQ ID NO: 226550 - RNA, 78 nt, Homo sapiens
ggaacgcaccaggggaaagggaaacgggaagagaacacgggaacgagaggggaacagaggagcagcggcagaaaaagg

SEQ ID NO: 226551 - RNA, 71 nt, Homo sapiens
ccgcgacagacaccaagggcgcgcgacacgaacaccgaggaggccaagaacaaccggccaaaagagggcgc

SEQ ID NO: 226552 - RNA, 86 nt, Homo sapiens
gagaagggaagcaagaacgcgggaggagacacacaaaccacgagaagcaaaaacagaggaagagccaaggacaagaaccagcgaga

SEQ ID NO: 226553 - RNA, 39 nt, Homo sapiens
ggcggaaacaacgggcaaggagcaccaagaaagcaagga

SEQ ID NO: 226554 - RNA, 79 nt, Homo sapiens
ccagaccccggccgccgaccgcggccccgccggccgccggccgcgcggggggagagaccgcacgcagggccacagcagc

SEQ ID NO: 226555 - RNA, 79 nt, Homo sapiens
aggagagcacgccggggagagggagaaaaggccgggaaacggcaaaagcacaaagcaaggaggagaggcagcacaagca

SEQ ID NO: 226556 - RNA, 38 nt, Homo sapiens
ccgcccaggccgggagcgcacaagaaggggaccaacag

SEQ ID NO: 226557 - RNA, 45 nt, Homo sapiens
caaagaagggagagaggcaacgagaggacgaccaaaacgaacagg

SEQ ID NO: 226558 - RNA, 64 nt, Homo sapiens
ggccaaccccacacaaggggcgaaggaaccgaaaggcaacggcagcagcagggcacagagagcg

SEQ ID NO: 226559 - RNA, 80 nt, Homo sapiens
gccgaaccggaagggcggaggccccggcggcagggaccaagcgccagaacgaccaacgaccacaacgacgggagagccaa

SEQ ID NO: 226560 - RNA, 78 nt, Homo sapiens
gccaacgaaacaaaaagcaggagaagacagaggagccagaccaagagacagcacaggcgagcgagcagagacaccagg

SEQ ID NO: 226561 - RNA, 110 nt, Homo sapiens
ggggccaaaggaaaacggaaaggggaaaaggcaaaggacagaacagagacaccaagacggggcggccgcacccaggcggaggcagggcacgaaggccagcagcccgaccc

SEQ ID NO: 226562 - RNA, 74 nt, Homo sapiens
ggagaaccaggaaaacccaagaacggggaagaaggaacaaacggcaaaacaaaagcaaaaagaagggacaagac

SEQ ID NO: 226563 - RNA, 86 nt, Homo sapiens
gcaagacgccaggaaccccggaagccagaaagaaggggcagaccaacaccacccagcaaaaaccccgacgaacgcgccagggagcg

SEQ ID NO: 226564 - RNA, 72 nt, Homo sapiens
gaggacgccagcggcgcgcagggcgggcagcagcggcgcacaaaagcaggaaaggcagccgacaggggaaag

SEQ ID NO: 226565 - RNA, 81 nt, Homo sapiens
ggcaggagcggcggccaggccagacccgaaggccaggagacccgaccccaagaccggaaacaggcacagaacagaaggaaa

SEQ ID NO: 226566 - RNA, 67 nt, Homo sapiens
aaggggcccacccccgccaggaaaacagcaagagagcagacgccaaagagacggccgggacagaccc

SEQ ID NO: 226567 - RNA, 43 nt, Homo sapiens
caagaagaagccgcagaccccgggcccaacaccccccccagcc

SEQ ID NO: 226568 - RNA, 68 nt, Homo sapiens
agcacacaacacgggacggagagaaggcaaacaggcacagaaccaccagaccagccgcagagcacacc

SEQ ID NO: 226569 - RNA, 77 nt, Homo sapiens
gaacagccgccgggaaggcgcacccacacgggggggggaccagaccagacccggagagaacagcaaagaaaaccagc

SEQ ID NO: 226570 - RNA, 81 nt, Homo sapiens
aagccgagggcgaacgcacagccaaaacggcaaagacggcccacccggaaggaagcccccggacccaccagagcacgacgc

SEQ ID NO: 226571 - RNA, 68 nt, Homo sapiens
cgcggagccgcgcagccccggagcacggaaaacggcggccacaaagggggaggagggagcgaaacccc

SEQ ID NO: 226572 - RNA, 74 nt, Homo sapiens
gggaaagaaagaaagagacaacgacagccaacagccagcaccgaggagcaacacccccagggagcccagaccga

SEQ ID NO: 226573 - RNA, 72 nt, Homo sapiens
agagcccgggaacgggagaaaaacagcacacagaaccgcacggccaagcccacacagaggaaaccgggagag

SEQ ID NO: 226574 - RNA, 84 nt, Homo sapiens
acgggacaacaaaagagccacccaagagagcccgagggaaaagacaggcaacaggaaagcaagggaaggcgccccaacaaaggg

SEQ ID NO: 226575 - RNA, 73 nt, Homo sapiens
acacaagggggccgcaagggccaagaccgccagcagagaggcgagggacagcgacacgggccagccgccggag

SEQ ID NO: 226576 - RNA, 77 nt, Homo sapiens
ggagcgacgcgggccgccggggcacagccaaaagcgaagccacaaggggaaccacagcaaggaggcacccaccaccc

SEQ ID NO: 226577 - RNA, 45 nt, Homo sapiens
acgcccgacacacaggcagaccagccaagggcgagcgccagcagc

SEQ ID NO: 226578 - RNA, 73 nt, Homo sapiens
cgcagccccagagccccaagaaaacggaagggaggagaagcacaaccacggacggcccagaaacccaaaacac

SEQ ID NO: 226579 - RNA, 72 nt, Homo sapiens
agcggagcggagcgcggaagccaagcgaaagacagaggcccagccgaaagaggggaggcacgacgacagaag

SEQ ID NO: 226580 - RNA, 99 nt, Homo sapiens
cccgcgagagagagaaagacgcgaggggacgaggaagacaggggccaggaagaagaggacacagaaggcgcacccccagggaaaacaccccccccggga

SEQ ID NO: 226581 - RNA, 66 nt, Homo sapiens
caaagcgaggcgaagaaggccaaggcgcagaagccaaagccacgacacggcaggccacaccagcaa

SEQ ID NO: 226582 - RNA, 80 nt, Homo sapiens
cgaaagccacagcaagaaggaccgggcaaggagggacagcccgaccaagcccggaggagaaggcggggccgacaagcgga

SEQ ID NO: 226583 - RNA, 107 nt, Homo sapiens
cagggaacaacggacaggagacagacaccacggaagcacaacccaaaacaacagggggagccccagcagccaacagccacagagaaaaacaacgaaagacaagaagc

SEQ ID NO: 226584 - RNA, 40 nt, Homo sapiens
gccaaccggccagaggacgagggagccgccgcagggcgaa

SEQ ID NO: 226585 - RNA, 78 nt, Homo sapiens
aagacacaccaccgagcggccggacggcccggcagacagaaacccggagaagggacagcacgagccaagggaggacga

SEQ ID NO: 226586 - RNA, 68 nt, Homo sapiens
cgaagaggaacgcccgggaaacaaacacgagggagggacgaagcagcagagaaagggccccagaggaa

SEQ ID NO: 226587 - RNA, 80 nt, Homo sapiens
ggcacccgcccagcgggggggcagcagaagcccagagcccagacgcagaagccccccagggaaagcccaaccagcagaca

SEQ ID NO: 226588 - RNA, 102 nt, Homo sapiens
aaagaggcggcgggccggacgcggacgaggcccaacagcgaggggacgagaaaggggggcgaggaagagacaggcgggggagaagaagcagggccaaacgca

SEQ ID NO: 226589 - RNA, 79 nt, Homo sapiens
caaagagacaccagcggcaccggagaccaccggagcaccccgacacagcagcgaggaacgaggaaagaagaacgcgagc

SEQ ID NO: 226590 - RNA, 77 nt, Homo sapiens
ccgccccacagagaggcgaacccagcgggacggcaaaggcacgggcacccaacaaaaggaccccagaggcggcaagc

SEQ ID NO: 226591 - RNA, 79 nt, Homo sapiens
aaggaagaaaaggcggaccggcgaacgaaggccgaccgccgcgccacagagcacaccaaccccgggcaccccgaaggag

SEQ ID NO: 226592 - RNA, 79 nt, Homo sapiens
gaaccacccggaggagacggggcagacaacggagcccgggagagaagaagaaggaggccgcggccagaaacccaagaaa

SEQ ID NO: 226593 - RNA, 81 nt, Homo sapiens
ggccagggcaagcgccccggcccaggagaccgcaccagcccgcgcacagggaccccaccggcgcggccagagagacgggaa

SEQ ID NO: 226594 - RNA, 73 nt, Homo sapiens
accaaacaagcagggaccgcagaaagacgaaggcgaacaggaacaaagagagagaagagcacagaaagggccc

SEQ ID NO: 226595 - RNA, 76 nt, Homo sapiens
ccagacccaccccccaagggggacaaacacccacagccagcagggcgaaagaacaggaccgaaccggacacacccc

SEQ ID NO: 226596 - RNA, 68 nt, Homo sapiens
agacccaacaaaggccacgcgagaacaaaaaggagcacagaccaacagaaaacagacgacgggcacga

SEQ ID NO: 226597 - RNA, 84 nt, Homo sapiens
caggaggcaccaggcccgcacccccccagagggccgcccgagggcggcacccacggccggcggcagagaccacgcccagcagga

SEQ ID NO: 226598 - RNA, 79 nt, Homo sapiens
aacaaacgggggagaacaaagcgaggccagagaaagagaagcggcacccccaggaagcgcgagcgaagccgcaccaggc

SEQ ID NO: 226599 - RNA, 68 nt, Homo sapiens
gccccagacgcggggggcgggacaggaggaacacagcaccagaaggaagcggcccagagcacacgcca

SEQ ID NO: 226600 - RNA, 85 nt, Homo sapiens
cgccgccccaggaagccaagaccgacaagcgggcacggcggccaagccccgacaagggaccgggcgggccccgcaggaaaccccc

SEQ ID NO: 226601 - RNA, 33 nt, Homo sapiens
cccaaagaggcacacgcgaagaggagcaccggg

SEQ ID NO: 226602 - RNA, 56 nt, Homo sapiens
acagagggcacacggcacagaccagggaagaggaagaacgcgagaaaaaaacgagc

SEQ ID NO: 226603 - RNA, 60 nt, Homo sapiens
accacaccaagcggaaaaaagacaccagcgacaaggacagagaccgaaggagcagacgag

SEQ ID NO: 226604 - RNA, 79 nt, Homo sapiens
gcaccaagaccgaggcagaaccccccagcagcagcagaccaagcgcccacacccggagcacgccaaccaccggagaaaa

SEQ ID NO: 226605 - RNA, 56 nt, Homo sapiens
gccaggccacaaaagaaagaaaccgcgaggcagggaaagaagagggaaaggccaac

SEQ ID NO: 226606 - RNA, 75 nt, Homo sapiens
ggcggaccccggcagggaacaacgccggcacaaacagacacggaaagacgggaccggagaccaaaacaaggggga

SEQ ID NO: 226607 - RNA, 67 nt, Homo sapiens
acccgccgcgcaccgacccgacgcgccggcccacgcgcggccaagaaagcaggagcccggaaaggag

SEQ ID NO: 226608 - RNA, 57 nt, Homo sapiens
gagcgcggacgaggcagcagagcgcacagggcccaggacagaaggcgggcaaggagc

SEQ ID NO: 226609 - RNA, 60 nt, Homo sapiens
gcaggaagggacggcgcgcggaagcacccccgggcgcagggcccgaagaaccccgccagg

SEQ ID NO: 226610 - RNA, 74 nt, Homo sapiens
aggacaccaagcccaagagaaccgcaaggagagaagcagacccccagcccaggaaaccacacacagacagccag

SEQ ID NO: 226611 - RNA, 74 nt, Homo sapiens
agaagggccccaggggcccaggaaaaccccagagaaaaagaaccccaggaacaaaaacaaagaaagaagaggag

SEQ ID NO: 226612 - RNA, 38 nt, Homo sapiens
aagaagaagcgcggaccccgcgggaccgcaggagggag

SEQ ID NO: 226613 - RNA, 56 nt, Homo sapiens
ggacagcgccacggcgggccgcgggaggacaccacccacagcacggcccaaagaag

SEQ ID NO: 226614 - RNA, 93 nt, Homo sapiens
gaaacggaacgcccgagccccagagaagaccaaaagaggaagcaaagaggaaacacggaagcacagccccgccacccaacgaagcggcaaaga

SEQ ID NO: 226615 - RNA, 72 nt, Homo sapiens
cagaccacagcacagccgggaaggggagccaccagcccccgcgacccagggggaaagccaccgaaaccaccg

SEQ ID NO: 226616 - RNA, 84 nt, Homo sapiens
gaaggagagggaacccagaggcgcagacaccaggccaacaaagcgcgggccaaaggaaaaggaaagggagaagaggacagaaaa

SEQ ID NO: 226617 - RNA, 51 nt, Homo sapiens
ggcagacaaaagggccaaagaagggagagagcacggaagcccgcacgcagg

SEQ ID NO: 226618 - RNA, 79 nt, Homo sapiens
ggacacgaagcgcagggacgcaaaaagaccacacagggaaacgaccagggagagaccaacaggaaccacagcggccgcg

SEQ ID NO: 226619 - RNA, 69 nt, Homo sapiens
aggcgacgaaggacacgcaacccccagcacaggggggaggggcacgacaggcagaaggacgcaacaagc

SEQ ID NO: 226620 - RNA, 68 nt, Homo sapiens
cccgagccccgcaagaaccgcaagagaggggcgaggaggcgggccaggaaaggagggaaaaccagcca

SEQ ID NO: 226621 - RNA, 57 nt, Homo sapiens
gcagcagcggagaaacaaaacggcgaggaaagagaggagccccggaaagaaaaggac

SEQ ID NO: 226622 - RNA, 62 nt, Homo sapiens
cggcacacaaaagacaaccccagggaaggggcagcacagggagaccacacccaaaacgaaac

SEQ ID NO: 226623 - RNA, 60 nt, Homo sapiens
accgggggcaccggaccgaggacagaaagcgggacacaagcaggagcacagaccccgaaa

SEQ ID NO: 226624 - RNA, 85 nt, Homo sapiens
acaagacgccagaggaagggccccgcccagagcaccacccgagacacaggagcccacggggcagggaagaccccgggaccaacgg

SEQ ID NO: 226625 - RNA, 73 nt, Homo sapiens
gcagacgaagaccaagacggcgacgaagcagccaaacaccaagagcccgggaagcgcagagggaacacggcca

SEQ ID NO: 226626 - RNA, 104 nt, Homo sapiens
gggcccagccgacgcagcccgagagcccgccgcccccacccacacgccaccgggcgccgccccagccgccacgcagccgggaaaccacaacgagaggccgagag

SEQ ID NO: 226627 - RNA, 75 nt, Homo sapiens
gcagaagaagcacccagcaagcgagggaccgggacgccacagccagcaccagccggaaaacggaagaggcacaga

SEQ ID NO: 226628 - RNA, 36 nt, Homo sapiens
ggaccaagaaccagggagcaggccgggccgggccca

SEQ ID NO: 226629 - RNA, 72 nt, Homo sapiens
gccccgccacacacgcaaacgagaaaagggagcccccagaggaggaagggaggggcccgggcacccacccca

SEQ ID NO: 226630 - RNA, 81 nt, Homo sapiens
aagaagacgaacccgggaaggaacgcacacaacaaacagcacgaagcacacccaaacagggacaccaaccagaaaacgaag

SEQ ID NO: 226631 - RNA, 68 nt, Homo sapiens
agcgagaaacaaagccacccagccaagaaggaaacagagcaaagcagcgacaacaaagacagaggaag

SEQ ID NO: 226632 - RNA, 75 nt, Homo sapiens
ggggcgcaaagggacgaaagcccccaagaagggaaaaggagcggggaaacaaggcgccgggggcggagaccgcgc

SEQ ID NO: 226633 - RNA, 77 nt, Homo sapiens
ggaaagaaaccgagagaaggcgcacaaggggaggggcgaagcaaaagcgaaaaaccccaagggcgccggccgagccc

SEQ ID NO: 226634 - RNA, 63 nt, Homo sapiens
gccgcaacgccgagcgcaccgacacgccgccaaagacgagcccaagggggcagcacagacccg

SEQ ID NO: 226635 - RNA, 70 nt, Homo sapiens
aaacagcaggcagcacaaggccgcgaacggcccacccaggcaaccggcacccggaggccagcccaccagc

SEQ ID NO: 226636 - RNA, 80 nt, Homo sapiens
agagggcagcaagaggcgcgcagagggcgcaggccgggcccgggaggagcaggggcagaggggagaacccagccgggacc

SEQ ID NO: 226637 - RNA, 78 nt, Homo sapiens
acgggcccagaaaaccccagcaggacgcacgcacgagccggcccagccgaagggagagcaggccaagccgacgccagc

SEQ ID NO: 226638 - RNA, 82 nt, Homo sapiens
ggcggcaaccggagggccagaacccaccgcccccgcaggaacaaagccggaaagaggaacagaaacaaagcaggaaaggcgc

SEQ ID NO: 226639 - RNA, 73 nt, Homo sapiens
agacagcaagcccacgagcggccccccgagacggaggagagggccggaggaggagcgcgaagaagaccacagc

SEQ ID NO: 226640 - RNA, 73 nt, Homo sapiens
ccgagcccgagccgcagcacgagccaaaccgagcggagcggaggcagacacacacggggggagagggaggggg

SEQ ID NO: 226641 - RNA, 39 nt, Homo sapiens
gcggaaaacaaggggcagcagcggacaggagaaccaacg

SEQ ID NO: 226642 - RNA, 73 nt, Homo sapiens
gccgcagccgccggcgcgggaggggcaacaggaaaacaacccagagaacccaaacccccagacaagacacccc

SEQ ID NO: 226643 - RNA, 74 nt, Homo sapiens
ccgggggagcggggccccacacccccccgggggggccaccaccagccgagggcaacgaagagggaggaggcaag

SEQ ID NO: 226644 - RNA, 34 nt, Homo sapiens
ggacacacccgggccaggcgaggggaacaacccc

SEQ ID NO: 226645 - RNA, 68 nt, Homo sapiens
ccaggcccacgcacaagcgggcaccagggccgaccgccgcagaagcgaaaagagggcaacaagggaag

SEQ ID NO: 226646 - RNA, 77 nt, Homo sapiens
accgcccgggccagaagccccgggccccgaggagcgcgcggagcacacgccgagcgcggaacgcccgcacggccgcc

SEQ ID NO: 226647 - RNA, 85 nt, Homo sapiens
ccgccccgccgaccccccgaggcggcaccaagaggcccgggcgcgggcgcgaagaagagggcaccaaccagcggacacacggaaa

SEQ ID NO: 226648 - RNA, 83 nt, Homo sapiens
aaagcgagcgcgaggaaaaggcggcgggaggcaccaggggcaagacagcccccagcagcaacagcagcagcaagagggaaaaa

SEQ ID NO: 226649 - RNA, 74 nt, Homo sapiens
caaggcagccggaaacgaggagggcaggagaaaggagaaaaagaggcagggagaagaaacggcagagacaaaga

SEQ ID NO: 226650 - RNA, 73 nt, Homo sapiens
gaagacccaccgccaggagaaccgagcaggccacccaggcacaaacgcagaaagggaggggggaaggaggaga

SEQ ID NO: 226651 - RNA, 83 nt, Homo sapiens
cgagaagcagcgcagccgcagccgccccgaagagggggacacgacccggagcacccgaccccgagaggaccagagagagaaga

SEQ ID NO: 226652 - RNA, 85 nt, Homo sapiens
aacgccagcggaaccggagacaagcccaggaaagcaacaggcccggcgaccagacaggagcggcgagaggccccggagccccaag

SEQ ID NO: 226653 - RNA, 59 nt, Homo sapiens
ccgagcgggggagggggccccacgagccggaagagagggcggagcggccgggcccggaa

SEQ ID NO: 226654 - RNA, 58 nt, Homo sapiens
gacgaaggggccccagagccaaggaggaaggggccgggccccggggcagaagagcggc

SEQ ID NO: 226655 - RNA, 77 nt, Homo sapiens
gagcccccggcgggggcaagggaacagggcacaaccaaggagggccagccaccccacagaagacggagacagccagc

SEQ ID NO: 226656 - RNA, 42 nt, Homo sapiens
ccgcagcacccagccggccacgggccaaccgccccccagcag

SEQ ID NO: 226657 - RNA, 74 nt, Homo sapiens
gggagagaggacgggagaccagcaggaaaagcaaccagcaaccaaaagaaagcccacgcccaccagcccagcgg

SEQ ID NO: 226658 - RNA, 83 nt, Homo sapiens
agcagagcagcggccgccgccgaacggggcggaagaaccgcagggaaggggcccggccaggaccggggaagggggccgagagc

SEQ ID NO: 226659 - RNA, 58 nt, Homo sapiens
gccgagggcggagcggagacgaccgagagccagaaacaggaaggaaaccaggagggcc

SEQ ID NO: 226660 - RNA, 75 nt, Homo sapiens
aaagagcagaccgaaaagcggcacgacaacaaaaccacagagagaccgggccccgagagaagcagacggaaagaa

SEQ ID NO: 226661 - RNA, 72 nt, Homo sapiens
ggcacccaggggacaaaaaaggaacgaggaggagaagagcacaaccgcccccaaaaggagaaacagaagaaa

SEQ ID NO: 226662 - RNA, 78 nt, Homo sapiens
cagcggaggcggacgcgcaggcgcgaggcgcacagaaaaaccagagggagaagccacagcacagcaggcacgggcaga

SEQ ID NO: 226663 - RNA, 75 nt, Homo sapiens
aaccacccaggacaggacaacagaccagagggggagcaacccgcaagggaacaaaacggcaaacacggaaaccaa

SEQ ID NO: 226664 - RNA, 39 nt, Homo sapiens
cagcaggaggggagagccaagcggagaaaacacccaaag

SEQ ID NO: 226665 - RNA, 80 nt, Homo sapiens
cccagaggccccacaacgcgggagacccacggccgcaggcgaaggggcgccgaaccgagcccgaagggaagggccggcgg

SEQ ID NO: 226666 - RNA, 75 nt, Homo sapiens
caggaaagcagcccgaaaaagacgcgagaagccacacgaacggccgagcgaccaggagaggagcccccgcccgaa

SEQ ID NO: 226667 - RNA, 84 nt, Homo sapiens
aggcaccagcccgggcagcgagcgcaaaagcagaggggaggagacacgaagcgacgcagagccagaagggaggcagggaacacg

SEQ ID NO: 226668 - RNA, 91 nt, Homo sapiens
gccagccggcccgaggacaccgacaccagcagacaaacgagggagcaggagacacccccgacaccgacacgagaggcacaagcggagagcg

SEQ ID NO: 226669 - RNA, 76 nt, Homo sapiens
aggaagcaccaaagaaaacaccccaagaaggacaacgccacagcagcggaaagggaaacgagacaacacacccaag

SEQ ID NO: 226670 - RNA, 78 nt, Homo sapiens
ggacggccaggccccgggccaggccccaacaagaaggcaaacaggcacaagccagcgaaaaagaagagcccaagccga

SEQ ID NO: 226671 - RNA, 72 nt, Homo sapiens
gcacccaaaccgcacagcagccgcaaacgcaaaggaaagagcaagggagcagagagcggaaaggcggcaaca

SEQ ID NO: 226672 - RNA, 66 nt, Homo sapiens
gagaccgggccggcgggaagagcacccccaacggccacccggcacaaggggcaggaaggaacgaaa

SEQ ID NO: 226673 - RNA, 114 nt, Homo sapiens
gacaagacgaggaagagaaggagcggagcgccaagcccggccaaaaagaaaccaccccacccaacccccgacacagaagaggagaaaacggaacaacaggagggcaacccagaa

SEQ ID NO: 226674 - RNA, 77 nt, Homo sapiens
aaagaaaaaagggacccacccagggaccagaagagacaaagaggcccaccaccgcaccacaaagggccgacagacca

SEQ ID NO: 226675 - RNA, 87 nt, Homo sapiens
ggggagcggacgcaggagcccccccggcagcaacccccacacccagcaccagagcgggcagagaagagggccagaaccaaccgacca

SEQ ID NO: 226676 - RNA, 78 nt, Homo sapiens
gggccacaccccggcacacggccggagagagagcgagaaggagaaagacacaaaaggcaacgcaaaggaggaacgcca

SEQ ID NO: 226677 - RNA, 63 nt, Homo sapiens
cgaagaagcgacaggaccgacgaaacagacccaggaggagaaggcagagcccccccaggcaga

SEQ ID NO: 226678 - RNA, 57 nt, Homo sapiens
aacggcgcaccggagagacgcagaggggcggcgggggggagggacggcagcaagcgg

SEQ ID NO: 226679 - RNA, 78 nt, Homo sapiens
ccccagcacacagaggagagcgacgagaaggagcacagcaagcgggagcaggcagaccaaaggaacagaagccagggc

SEQ ID NO: 226680 - RNA, 71 nt, Homo sapiens
caagaccgaaaaaagagcgagaagcgaaaacagaggcgaccggcccgaggaccgccgcacgaccaaacgca

SEQ ID NO: 226681 - RNA, 71 nt, Homo sapiens
cagaagaaggaaaacccagcgaggacaagagagcgggggacccgaagcccgcgagaaggaggcgcaaaaaa

SEQ ID NO: 226682 - RNA, 77 nt, Homo sapiens
accaggaaaaaggacgagcaggcggacagggccgaaagccacgagcccgaaacgggccgaaagaccgccgcccagcc

SEQ ID NO: 226683 - RNA, 76 nt, Homo sapiens
cgggcgcggggagcgcgcgaagccggggcggagcacgcgagcagaaaaggggaagaaggccaaccgggggccaagg

SEQ ID NO: 226684 - RNA, 93 nt, Homo sapiens
cagcgccaccaccccgcgccagggagcgccgcggcggagcggcaacggggcggcacacaaggagcgaagggcagggagaacgccaggcacagc

SEQ ID NO: 226685 - RNA, 79 nt, Homo sapiens
aacagcagacccaagagcagcggaaaagaccagcacagagcaaacagaacgggaggcccacaggaaggaaccaaaaccc

SEQ ID NO: 226686 - RNA, 55 nt, Homo sapiens
cgcgccacccacggagccaaccagaccaaggcagaagcccccagaaacccacaaa

SEQ ID NO: 226687 - RNA, 53 nt, Homo sapiens
caaggaaccgcggcagaaaagaacacagccggcggaaaacgagcaccgagaaa

SEQ ID NO: 226688 - RNA, 73 nt, Homo sapiens
cgggagccgccggcaccgccggaaccggcgcaggagccagggcagaaacccccaccaggcgggcgccacacgg

SEQ ID NO: 226689 - RNA, 62 nt, Homo sapiens
caagcagcggaagaggacgacgcgacacaaacaaaagaccccggagaaaaggccccaaaccg

SEQ ID NO: 226690 - RNA, 124 nt, Homo sapiens
cggccacgacacggacgaccgcgcgcccgcccggcccgcacgccaagcacggggggcaggccaccgaacccgggcaccccccccccggcccgaccgcccgcggccggaccgcaccggacagagc

SEQ ID NO: 226691 - RNA, 72 nt, Homo sapiens
cgggcgggcccgcagagaggcggccccaggggggaccaacaagggagaaccaacagaacaaccggaggaaga

SEQ ID NO: 226692 - RNA, 64 nt, Homo sapiens
gacaaggagagaagcgcggagccccaagggacccaccaggccacacccagcggaaaagaccgcc

SEQ ID NO: 226693 - RNA, 75 nt, Homo sapiens
cagcgcagcccggccaagcccgccgcgcccgcgaaggaagagccaggaaagcaaaagggcacccgcccccaacca

SEQ ID NO: 226694 - RNA, 81 nt, Homo sapiens
ggggcacgcacagaggcaagacgcgagcaagcagggccacacccccggagaccaagagaagaaacagcgggaaccaagaaa

SEQ ID NO: 226695 - RNA, 78 nt, Homo sapiens
cgggcaagcccagagccgccggaaggcccccggcgcgagacccgccggaggaacaggcagacgccagcagacacacag

SEQ ID NO: 226696 - RNA, 79 nt, Homo sapiens
agacgcagggcgcccccggagcccccaacaagcccaagaggagagaccccagaggagcgcagaagcgagaggaggagga

SEQ ID NO: 226697 - RNA, 60 nt, Homo sapiens
gccgagcacgggccgagaccaccgaggagagccgggaaagcacagccggcccgaaaggac

SEQ ID NO: 226698 - RNA, 96 nt, Homo sapiens
ccccagcaaacacgcgagaaagaccagaagccagcccgcccagcagaccgggaaaaacaagccaggcagcgagcgggagcagacagggaaccgaag

SEQ ID NO: 226699 - RNA, 55 nt, Homo sapiens
ggcagacaaaagggccaaagaagggagagacccgagccccaaagacagaaaagcc

SEQ ID NO: 226700 - RNA, 85 nt, Homo sapiens
ccgaggccaggcgccggccggcgcgaagacgcgggggccgccccccgcccaacagcaggggggaacaccccgagcccaaggcagg

SEQ ID NO: 226701 - RNA, 76 nt, Homo sapiens
accgcaggagggagaccacagcaagacgccaggacccacggaagccagaaaggggaccaaaacaaaacgagagcaa

SEQ ID NO: 226702 - RNA, 73 nt, Homo sapiens
aagccaagcacgggcgcggggggggagcccacacacgccccgcgcacaacaggcgggggggccccagcccggc

SEQ ID NO: 226703 - RNA, 80 nt, Homo sapiens
aaagccaccccgagccgacaagaaggacaaagagacaagccgagagaaagcaagcaaagcccgagagagacgcagcgcaa

SEQ ID NO: 226704 - RNA, 52 nt, Homo sapiens
gacagcgacagcggcaacgagaaacggcccaggcggcacagggagaacacag

SEQ ID NO: 226705 - RNA, 41 nt, Homo sapiens
cacgggaaacacaaaacgcgagggcggaggccggcagaagg

SEQ ID NO: 226706 - RNA, 79 nt, Homo sapiens
cggacacgccaccaagagagcccaggacggccaggacaccacagcgggacccaccaagcaccgacggagccgccgcgcc

SEQ ID NO: 226707 - RNA, 79 nt, Homo sapiens
agcgcgacacggagacaggggcagggccaaccgccccccagcagcaggcacgggcgaaccccgagccccgccccacgcc

SEQ ID NO: 226708 - RNA, 69 nt, Homo sapiens
aaaagaagcgccaggagggagcgggcagaagccaaaacaggaaagacgaaaggccacagcacaccagag

SEQ ID NO: 226709 - RNA, 87 nt, Homo sapiens
caagaggcgcgcggaggcgggagcgcggaaacggaaccgggaggcgacgcacacgagcggaggcgaagcccaccgggggacggcacg

SEQ ID NO: 226710 - RNA, 71 nt, Homo sapiens
agcagagaacacgggcacacaggcagcccaacacaccggcacccgggagaaagcccgaaagcagcaggcca

SEQ ID NO: 226711 - RNA, 75 nt, Homo sapiens
cggagaaccagagaagccgggccaccgaggaacgggagcgggggccaaacccgggagaagaagaagcgcgagaaa

SEQ ID NO: 226712 - RNA, 80 nt, Homo sapiens
gaagggaaaacgacagaagagaggagccccaaccagggcaacagccagccccgcaggccagcagccaggccgggacccag

SEQ ID NO: 226713 - RNA, 57 nt, Homo sapiens
ggagaaggacggggggcagacaggagcccaagggagcccacgcaggcgcgacgcgga

SEQ ID NO: 226714 - RNA, 75 nt, Homo sapiens
gagaaggcagcgggacggacaggcagggaagcaacgcagagagggaccggaccagaacagccacacgaacaaccc

SEQ ID NO: 226715 - RNA, 77 nt, Homo sapiens
cagggcccgagacccgccgccgaggaggcccggggagcgaaggagcgcagcaccagcgcccccgaggagccaaggca

SEQ ID NO: 226716 - RNA, 67 nt, Homo sapiens
cggaaagaaaaggagcaggaagggagaaggggccaaccaaaggaaagcagaacagaggaaaccaggc

SEQ ID NO: 226717 - RNA, 76 nt, Homo sapiens
accgcaggacgcaaagcacccacacagccccacgaagagaaggaggagaaaccaacagcaagaaggaacgacaagg

SEQ ID NO: 226718 - RNA, 77 nt, Homo sapiens
agaacaccggagaaggacacacaccggaaagagggagccaccaggagagaagggagggcccaaccccagccggaagc

SEQ ID NO: 226719 - RNA, 72 nt, Homo sapiens
caggcagcgcccccaaacgcagccgaaccagggagcagcgacaggagccagccacgcgacgaaacaaaagcg

SEQ ID NO: 226720 - RNA, 82 nt, Homo sapiens
cacacgcacacagggggacaacagcaggagcaagccccaaggcacaaaagaggaggaaagaagagcagcagagagaccgaaa

SEQ ID NO: 226721 - RNA, 57 nt, Homo sapiens
gagacggccacagacaacggaggaaggagggccccggagcagccacaccaccgaggc

SEQ ID NO: 226722 - RNA, 79 nt, Homo sapiens
gcggaagacgaggagcgcgcggcgccggggggcgcgccgcgaccgcccgccggcggaggcacccaccacgggccaggcg

SEQ ID NO: 226723 - RNA, 64 nt, Homo sapiens
gacccggagacagcccaaaacccggaagagcgccccaggagaaacaaagacgaggacgcgcaca

SEQ ID NO: 226724 - RNA, 78 nt, Homo sapiens
agggccacgagaaacaaaggaaaggagccccgggaacacccagagaacgagaccgggaagggaggacccaaaaaacca

SEQ ID NO: 226725 - RNA, 72 nt, Homo sapiens
gaacgcgcgcacccaccgggcccgcgggccgccccaccccacaggaaaggaaggcaaagccagccccgcacc

SEQ ID NO: 226726 - RNA, 37 nt, Homo sapiens
ggccgcccccggcaaggcacccaaaagagaaaccacg

SEQ ID NO: 226727 - RNA, 73 nt, Homo sapiens
ccgggggcgcgccacgcccaccgcccaagaccagccaaggcagaggccaggagcgacacaacaaagaccccac

SEQ ID NO: 226728 - RNA, 76 nt, Homo sapiens
cacacaggagagagcaagaccagccaggggaaacccggagggaaccaagaaacacgaagcccgggcaagacaacaa

SEQ ID NO: 226729 - RNA, 76 nt, Homo sapiens
cagcccagagcgcaaagaaaccccgagagccccgcccacaaaagccgaggacggggcgcccacaccggggcgcgcc

SEQ ID NO: 226730 - RNA, 81 nt, Homo sapiens
ggcccacccccgcccccgacgcggccggagcgcagcccgaggcccaggggccagcccgccagaggcccacccacagagcgc

SEQ ID NO: 226731 - RNA, 85 nt, Homo sapiens
cgcccgccacccaggaggggagaaccaaagaaaaccaagagaggcccaagcaacagcccccaccccaacacaccgggcccgcgcc

SEQ ID NO: 226732 - RNA, 78 nt, Homo sapiens
aaggcgccgcagcaccccccggacccagccccggagccaaagcagacccccaagcgagcggagcggaaggagcgcgcc

SEQ ID NO: 226733 - RNA, 72 nt, Homo sapiens
aggaggcgcggaggacgccccaccgccgacgcccccagccaccaggggcagggaaggccgagccagccgggc

SEQ ID NO: 226734 - RNA, 60 nt, Homo sapiens
cgggacccagcccaggcggcgcggacggggcgggcccaaaggcccccccacggacaaaag

SEQ ID NO: 226735 - RNA, 89 nt, Homo sapiens
cgcgcccagccccggggagaagacaccagcagcagcccagccagggcagggggagagcgcagcgcagggcgggagagagaagaaaaaac

SEQ ID NO: 226736 - RNA, 63 nt, Homo sapiens
gcgccagggcccgaagagggaagacacgcggaaacagaagacaggcagggacaaacaggagaa

SEQ ID NO: 226737 - RNA, 57 nt, Homo sapiens
cccgcggcgcgcagcccagcaggcaacgcggaaaaaagccggggggacgcggacagc

SEQ ID NO: 226738 - RNA, 38 nt, Homo sapiens
ggccagcaccgcaagcgaggcaggagagggcgaggagc

SEQ ID NO: 226739 - RNA, 79 nt, Homo sapiens
gcggaagacccaagccaacccaccaacacggaaaaccgacccaaaaagaaaacaccgaagggacaggaggccagggcac

SEQ ID NO: 226740 - RNA, 73 nt, Homo sapiens
cacccacacaaagaaaagccacgaccaaggagcccaaaagaaacagggcgcaggaaaagacgagccaggaaaa

SEQ ID NO: 226741 - RNA, 72 nt, Homo sapiens
ggcacccaccggaccgagccagaaacgcaggccaacaaaacgagcaaaagggaccggggcaaacaaaaaaac

SEQ ID NO: 226742 - RNA, 81 nt, Homo sapiens
gggaagaaaaacgaagaccggaggacagcacggacagcagggagcagcccaagccagaagacaaggggggccgggcggaga

SEQ ID NO: 226743 - RNA, 58 nt, Homo sapiens
cgccgccagaggacccgacacccagcggaggaggacagcacaggagggagcaggaaaa

SEQ ID NO: 226744 - RNA, 72 nt, Homo sapiens
ccacagcccgcagccccgccagccacccccaggcacacgagcggccacgagcaaccaagaggagaaggaagc

SEQ ID NO: 226745 - RNA, 72 nt, Homo sapiens
aaagggggagagacagaggcagacacaccgcagagaaagaagaggaggggaagggcaacgagcaaccaaaac

SEQ ID NO: 226746 - RNA, 93 nt, Homo sapiens
cgcaccaccaccaccgaggaccaccagagcagcacgggacaaccaccaccagcgagcaaaagaacaaagaccaagaccaagaagcgccccagc

SEQ ID NO: 226747 - RNA, 79 nt, Homo sapiens
gcggaaccagccgcacgcgcggcccggggacagccgcgcgcccggccagccaagagaaaccaccaagagccaggaaggc

SEQ ID NO: 226748 - RNA, 88 nt, Homo sapiens
agaagagaagaacaaaccagcacccaacccaagggcaccaagcaaggaagaagcccgccgacacagccaccaagaaggcacaagcaga

SEQ ID NO: 226749 - RNA, 83 nt, Homo sapiens
gcaccagggggagaaacccgggaccagccggggcgcggcagcggaacccccagacaaggccccaacgggggaagacccccacg

SEQ ID NO: 226750 - RNA, 59 nt, Homo sapiens
agggagcaggcagcccaacgcacgccaggcaacgcgccaagaccccccgcccgaaagcc

SEQ ID NO: 226751 - RNA, 60 nt, Homo sapiens
caggccgcgggaggggagcaccgaagagagccagcagacaccccagccccgacaggacca

SEQ ID NO: 226752 - RNA, 80 nt, Homo sapiens
cgggggcggaagcagaggcaacggcggccaggaacgcaccgggaggcaggccgggagagggcaaaacagagcgagaaaaa

SEQ ID NO: 226753 - RNA, 48 nt, Homo sapiens
gaccaggaagcagcaggggggacacagccagggcgcaggcagcgccca

SEQ ID NO: 226754 - RNA, 84 nt, Homo sapiens
ccccaaacccaggaccaagggaaccacaccccgaggcggagaaccgggacgaacagcggggacgccccagcagaccgcccagga

SEQ ID NO: 226755 - RNA, 53 nt, Homo sapiens
acagaaaagggacgcagggcacacaagcaacagaagaaaaggagggaagaggg

SEQ ID NO: 226756 - RNA, 77 nt, Homo sapiens
cggcgaggagaacgcccgcggacgacccgaggaacgaagcagagcccaacaggggagccgagaagccgaagcagaag

SEQ ID NO: 226757 - RNA, 78 nt, Homo sapiens
cggccgagaggaagacgagccgggaggaacggcccggaaacaggaggacgcaggacccgggccgcgcgagccggaagc

SEQ ID NO: 226758 - RNA, 65 nt, Homo sapiens
agggaggaagaagcgaagcgcagagcagcagcccggaagaaagagagacaaggaagaggagcgag

SEQ ID NO: 226759 - RNA, 75 nt, Homo sapiens
ggagcaacgagcgcagcgccgacagaagcgaaggggacagggggagaaccgccagggaaacccgggggacagaca

SEQ ID NO: 226760 - RNA, 83 nt, Homo sapiens
ggagaaggagccaaacccaaagaggaagcacagcagacaagaccaaaggaggggagacgccagaagcaggacgacagaagagc

SEQ ID NO: 226761 - RNA, 76 nt, Homo sapiens
gccgggccaggaggacacgcgcagggcccacgacgagacaacaggcaacaggaagaagaacccacaggggccaaca

SEQ ID NO: 226762 - RNA, 106 nt, Homo sapiens
gggggaggagaaggcggcggcccggccgcagcggcaacagaacgaaaaacagggcgggcgcagcagcacagacgaagaagggagcagcagaagcaaaaccagaaag

SEQ ID NO: 226763 - RNA, 64 nt, Homo sapiens
gagcagagccgccgaggagaaaacacccaggacagagacaacagccgcacccaagcgaacgaac

SEQ ID NO: 226764 - RNA, 57 nt, Homo sapiens
gaagacagagaagcaaagaagcagaggccaagaggaacccgcacaacagaaagcagg

SEQ ID NO: 226765 - RNA, 91 nt, Homo sapiens
ccggacggcagccacagcgccgaccgaccggagggcggagagacaaagcgaaaggaacaggacaagcgaaccggagcccaaaacagcaagc

SEQ ID NO: 226766 - RNA, 68 nt, Homo sapiens
gcgaccgcgacgaggcccgagagaaaccgcagagggcccgacgggccggaagcaaagaagaagaagaa

SEQ ID NO: 226767 - RNA, 73 nt, Homo sapiens
cacacaccccaacaagcaggacggacacccaaggcaccgcgcacagcagggaggaaggaggcccagcccagga

SEQ ID NO: 226768 - RNA, 92 nt, Homo sapiens
ggaaaggagcagggaaaagaccagaagcagagcgacacacaccgaaggccgagacggacgaaaaacaggaaaaaacaagcggaaaaacccag

SEQ ID NO: 226769 - RNA, 60 nt, Homo sapiens
acccggagaagggagcccagcagcaaaggcagcccccaaggcggcacagcaaacacacaa

SEQ ID NO: 226770 - RNA, 69 nt, Homo sapiens
aggcagaggacaagagacccgagaagcaaaggccgcaaaacccagaggagcggaccaagaaaggaccaa

SEQ ID NO: 226771 - RNA, 78 nt, Homo sapiens
aaggaaaagcggagcggagaccagagacaagcagaaggaaggaggaaaggcaaccagcgacacaggagccagaggaga

SEQ ID NO: 226772 - RNA, 111 nt, Homo sapiens
cggacgcacacaccggcacaccgcaaggccaagagaggacgcccaaccacagcccagacacgaagcagaggagccagacccaaagcccagacacaagacacggagccccaa

SEQ ID NO: 226773 - RNA, 79 nt, Homo sapiens
ccgggaccacaggccccggcccagagggagccgccaccaaaagcagacggaaaacccacggggaagaccacaccccgag

SEQ ID NO: 226774 - RNA, 69 nt, Homo sapiens
cggaaaaccccaacccgcaggcacagccgagagcagccgggccgaaggacgccaggaaaccgaacacgc

SEQ ID NO: 226775 - RNA, 83 nt, Homo sapiens
ccccccaccgggcagagagggcccacgagagggaagaagagaggaagaagacacagcacaaacgggccgagcaggaggcagag

SEQ ID NO: 226776 - RNA, 80 nt, Homo sapiens
cgcagaggcaaggggccaccaggaggccagggggcgccaggaaaaggcgaggagggacgcgacagaaccgcccccccccc

SEQ ID NO: 226777 - RNA, 87 nt, Homo sapiens
cagcgggagggcacgaagcccccggcaaaggggggcagggggggggccgaggaggacccagggaggggggcggggaggacagcagcg

SEQ ID NO: 226778 - RNA, 69 nt, Homo sapiens
caaggcagcgcgcagggaagggacacaggagacaggcacaccaaccaccaccagcacgggaacagcggg

SEQ ID NO: 226779 - RNA, 73 nt, Homo sapiens
ccaacaggagagcgcgaaacaggcggaccacacgaaacgcggaccagaagaaagaagcaccaaagaaggcgcc

SEQ ID NO: 226780 - RNA, 63 nt, Homo sapiens
aaagaacggccccaacgaagccaaacgcccagcgcacagaggaaaagcgagaaaaaagagcgg

SEQ ID NO: 226781 - RNA, 71 nt, Homo sapiens
cacaggccgccccaacaccagggaagagacacacccaggcaaccccgaccagcccaaaaaacacaaacccc

SEQ ID NO: 226782 - RNA, 78 nt, Homo sapiens
ggcacccccgacgccccacccgcccagcccccgacagcgcccgggagccgcccccgacacccgagccccgccggcgcc

SEQ ID NO: 226783 - RNA, 82 nt, Homo sapiens
ggccgccgcagccagaccgggagcgaggaggcgcaaggacccccgcgccagagccaggacaaaaccaggcagaaccaacacg

SEQ ID NO: 226784 - RNA, 87 nt, Homo sapiens
caacacgcgagcacagcgaaaaaaaccccgaagaagagacagaaagaggcagaagcagagaaagcgagaacaaccaacgaagacaaa

SEQ ID NO: 226785 - RNA, 82 nt, Homo sapiens
agacagggcaaaggacagaccaggcaccggcccgaccagccacgacacccacgaaaggacaggcagggacgggggcagagcc

SEQ ID NO: 226786 - RNA, 80 nt, Homo sapiens
agaaacagccggcagccggcccgcagcgcgccccgggagagggacgccagaggggaagccgcacgagggagagacggacc

SEQ ID NO: 226787 - RNA, 86 nt, Homo sapiens
cggcgcgagccagccgggacggacagcgcgggagggcgccgcggggcagccgccgcccccggggacccaaggccagccagccccag

SEQ ID NO: 226788 - RNA, 38 nt, Homo sapiens
acagacggaggacgaacagaaaagcaacggcgcaagag

SEQ ID NO: 226789 - RNA, 38 nt, Homo sapiens
acccgagaaaggggacgggaagggaaacggcgggccac

SEQ ID NO: 226790 - RNA, 81 nt, Homo sapiens
ggaagaaagaagaggccacagagggagaccagggggagcgggccggagagaagagaggggcgcgaggagaaggaaacaggc

SEQ ID NO: 226791 - RNA, 59 nt, Homo sapiens
agcgcccggccgaaccccccgcagcagaacggccccaaaaaaaaggcaggaaagccaag

SEQ ID NO: 226792 - RNA, 81 nt, Homo sapiens
aaggaccaagaaccagcggagagagagagagaaagacgagacgagagaaagacacccagaggaaacgcccgggaaagaccc

SEQ ID NO: 226793 - RNA, 83 nt, Homo sapiens
gggggccgcggccggaccgagcgcccgacccggcgagagccaggacaaaaccaggcagaaccaacacgaacccaagcacaaac

SEQ ID NO: 226794 - RNA, 50 nt, Homo sapiens
ccggccgggccggccagcgccggaaaccaacaacgcaagccccggggcag

SEQ ID NO: 226795 - RNA, 58 nt, Homo sapiens
cccgcggaggccgcggagcgccagccaagaaaaccagagacgagacgggcggagacga

SEQ ID NO: 226796 - RNA, 64 nt, Homo sapiens
gaccggaagaaagccaaggcaagcaaggggccgccacaagccaacgaggggaaggaccaaaaaa

SEQ ID NO: 226797 - RNA, 72 nt, Homo sapiens
cagagagcgcccgagagaacagggggccgcggccagggcgcggggcagagcacggaggcagcagagagaggc

SEQ ID NO: 226798 - RNA, 72 nt, Homo sapiens
ggcaggggcaggaagaacccacgggcagcacacacgaaagagaagccccggagggggaggcaagcggagcag

SEQ ID NO: 226799 - RNA, 57 nt, Homo sapiens
acgagcggcgagggacggaaaaacagagcgggagagccccccacgacccagaaccag

SEQ ID NO: 226800 - RNA, 70 nt, Homo sapiens
ggaaaagcccacggaaccgcgaagaccaagaggcacagagaagagcagagaccgcgaaggggaaaccagg

SEQ ID NO: 226801 - RNA, 82 nt, Homo sapiens
ccaggacgacacgaaggaggaagaagagacgaagagacagcggagaagagaaaaaacgcaagccgcaggaccgacgcaccgg

SEQ ID NO: 226802 - RNA, 68 nt, Homo sapiens
gggcgggaagaaagccccaccgagcacagggccagcggaaagcgcaggcaggagaaggacagcagagc

SEQ ID NO: 226803 - RNA, 75 nt, Homo sapiens
cggcagacgggaccacgaggcaacgccccaggaagaaaacacgaagaaacgcaggagcccaccgcgagcccccag

SEQ ID NO: 226804 - RNA, 60 nt, Homo sapiens
gcgccccccgagcggggggacgcgccaggcacagcagcagaaaaggggaagaaggccaac

SEQ ID NO: 226805 - RNA, 73 nt, Homo sapiens
agacaacagccggaacgccccaaaaaagggcacaagacaagaaagacccagcggagaagaaaacgaagaagac

SEQ ID NO: 226806 - RNA, 70 nt, Homo sapiens
ggaccccaggcggacgcccggcacgggccgcgcacggcaagacggagcaaagagacaggggcagaaaaca

SEQ ID NO: 226807 - RNA, 66 nt, Homo sapiens
ggaacaagaaccacgcccgcaccagccacgaccagccgcccggagaagacaggggaaaaagggacg

SEQ ID NO: 226808 - RNA, 121 nt, Homo sapiens
gcgaccggccgcagccccacgcgccggccggaggggcgaagaggacgagggggccaaggcccccgggggcaacgagcaaccaaaaccacggaagaaaacccagaagaaaaaagaaaagcca

SEQ ID NO: 226809 - RNA, 57 nt, Homo sapiens
agaagaagcgcgaaggaggacccgaaaaccccgagaggcaaccaaaaaaacggagga

SEQ ID NO: 226810 - RNA, 81 nt, Homo sapiens
gaccgcccgagggcagcgaggccggaaaccggcggcgccagccaccggagcaaccacaacccgcaacacgaagagcgccag

SEQ ID NO: 226811 - RNA, 70 nt, Homo sapiens
cagccacaggaggcgcggaggacgccccaccgccgacgcccccagccaccaggcagccagcacgagcccc

SEQ ID NO: 226812 - RNA, 75 nt, Homo sapiens
aaaacaggggaaagccagaaggagaaggacccacccacagggccggaggacgcggggaaccagaccgggccagac

SEQ ID NO: 226813 - RNA, 73 nt, Homo sapiens
agccgaagcagcaagaagcccagccgaggaaaacaggggcccaggagagaagaacagccccccggggacagag

SEQ ID NO: 226814 - RNA, 78 nt, Homo sapiens
accgccccggcagaagcggcagcaaagggacaccagccaggagagaaccagaccgggcggagacaagccagccggacg

SEQ ID NO: 226815 - RNA, 82 nt, Homo sapiens
ccagggcccggaccggcacccggacaggaggagccagggcccggcccgaaaggagagccgggacccccaaaagacaagggca

SEQ ID NO: 226816 - RNA, 71 nt, Homo sapiens
cgcgccgacggcagaacaagcgaggagcacaaaaagagagcgaagcaacgcaaaagcgcgaaaccgcacaa

SEQ ID NO: 226817 - RNA, 71 nt, Homo sapiens
ccccacccgaggcgagccggcagacagcaagcgcgggcggcgacccagacgccccacagcggcgggggccc

SEQ ID NO: 226818 - RNA, 67 nt, Homo sapiens
acacgaacaagccgagcgaccacccaggggagaagggggacccacaaagcagaagaagaggaaagac

SEQ ID NO: 226819 - RNA, 77 nt, Homo sapiens
cccccgggacaaccccaggaccaccaaaaaaacggcgggccccagggaaaggaccgaggcaggaaagaggccagacg

SEQ ID NO: 226820 - RNA, 76 nt, Homo sapiens
ggaaagcagaggacccagcaaaggcggcaccaggacgccgaaaagcgaccggacgcaggcacagggacacgcgaga

SEQ ID NO: 226821 - RNA, 72 nt, Homo sapiens
cccaagcacagccccaccagcgaaacaccgaagccaaaccagacacggagcgcgaaacagagcgccccgcac

SEQ ID NO: 226822 - RNA, 80 nt, Homo sapiens
caaggcaagaccgaacagaaggaacgacgcggaccagaagccagagcgaggacgccggcagccgccgccagcgcgcacgc

SEQ ID NO: 226823 - RNA, 73 nt, Homo sapiens
cgcaaccccagaccaacacacagccgggcaccaggagggcgacagacggacaggagaccaaccaaaagaaacc

SEQ ID NO: 226824 - RNA, 71 nt, Homo sapiens
agaagaggagaagagggacggcccaggacggccacccccgcaggaaggagggccggccagggaagggaacg

SEQ ID NO: 226825 - RNA, 77 nt, Homo sapiens
cggaagaacagcacagggcagcgagaggagccaggagccgccagaggaaaccagggccgggaagcacacaggaggcg

SEQ ID NO: 226826 - RNA, 84 nt, Homo sapiens
gccggggcacacagccaccacagcaccgaagccgggagagggccgagggacgcacaccaccccgggagcggcacccaaagggag

SEQ ID NO: 226827 - RNA, 73 nt, Homo sapiens
accgcagaggcaaggggccaccaggaggccagggggcgccaggcagcgcgaggaggccgagccgcaggcccca

SEQ ID NO: 226828 - RNA, 71 nt, Homo sapiens
acggaagaccgaagggcggcccaacaccggccaggcacagcagcccaagaggagagaacagccaccaaaca

SEQ ID NO: 226829 - RNA, 75 nt, Homo sapiens
ggcgacccccaccgagacgaagcgggcggcgaaggggccccagacacgacgcccccggccggcccgggccgcgcc

SEQ ID NO: 226830 - RNA, 81 nt, Homo sapiens
acccgggcccagccgggaacccccacgcggccagcgaaaacgcccagggggcagggcccagggaccggaaagcaggacgaa

SEQ ID NO: 226831 - RNA, 52 nt, Homo sapiens
caggccagccggcaaaaacgggcccggcagcggcccgaccccgggaacgagc

SEQ ID NO: 226832 - RNA, 81 nt, Homo sapiens
ggagcggggacccaggagccggccagcgcgccggagccgccgagaaggcagcgggggcacagcgagggggcagaccccagc

SEQ ID NO: 226833 - RNA, 87 nt, Homo sapiens
ccgcccagggcggcggcggcgcggggacgccagggagggaggggagccaggcggccgcccagaacgaaaacaaacggaagagagggc

SEQ ID NO: 226834 - RNA, 79 nt, Homo sapiens
ggccggagcgcgccgacccgaggagaaccagcggagagggggaagacacgcaaccgggcagagcgaccggcagcaagca

SEQ ID NO: 226835 - RNA, 77 nt, Homo sapiens
aggcgcggaccagcggagagggagagcccggaagcagacagaagagaccgcgcacggagagcgcggcgcccaggcgg

SEQ ID NO: 226836 - RNA, 68 nt, Homo sapiens
ccgccaccgaagacgggccccaacacccagagacgaaaggccgccaggccaagagccccaaaggcggc

SEQ ID NO: 226837 - RNA, 70 nt, Homo sapiens
gggggggcggcacaacgcaagcacagcgaaagaacgccggagccagagagacggacggacgaggagcgga

SEQ ID NO: 226838 - RNA, 77 nt, Homo sapiens
ccacaggagaacgaggcacagggacccaccgagacaccaagggcggggcgaggaagagagacaccagccccagccga

SEQ ID NO: 226839 - RNA, 85 nt, Homo sapiens
cggagagagaaggaaggaggggggcaggaggcgacggcggccacgagcagcgaagcgaaaccccagaagcgcacaggaggaaagc

SEQ ID NO: 226840 - RNA, 79 nt, Homo sapiens
gcggcccggcccggccccgaggccggcaacggagacccaaggaagaccgaggagcagggagcaaccacaaggaaaggaa

SEQ ID NO: 226841 - RNA, 76 nt, Homo sapiens
ggccagcgccagcgcagccccggcgcccaccgcccaccgagccgggccaccagcggaagaaaggaggaagagagga

SEQ ID NO: 226842 - RNA, 79 nt, Homo sapiens
gagcagccgcagcggaagagcagccggccagggacagcagccgagcagaccgggaaccgcaccgggaaagaggaggagc

SEQ ID NO: 226843 - RNA, 76 nt, Homo sapiens
ggacgagacacaaggaagcgacaggcaacagacgcccagaagcgaggcgaagcagcggcgagaaacgagagcacga

SEQ ID NO: 226844 - RNA, 78 nt, Homo sapiens
ccgagacggcggcagcagcggcacagagaaggagaagcggcgaggaaggaagccgacgcccagcagcgcacgcgcaga

SEQ ID NO: 226845 - RNA, 62 nt, Homo sapiens
cgaacacaacggcaggaggcgccccaagagcagagagagaaggaggaagagagagagaaggg

SEQ ID NO: 226846 - RNA, 65 nt, Homo sapiens
cacaccgagcgcgaggcgcggagagcaacgccgggacagcgcaagcccggaggaaacaaacaggc

SEQ ID NO: 226847 - RNA, 82 nt, Homo sapiens
gcgcacccgcgccagcaccacgcccgcgccgcgccgccgccaccagcccaagagaaaggaaggaggccagaaggagaccccc

SEQ ID NO: 226848 - RNA, 81 nt, Homo sapiens
accccccaaggccgaggccgcggccagggcggcgccgcgccccccacggagacgaaagagggcccagaaaaagagagcgac

SEQ ID NO: 226849 - RNA, 63 nt, Homo sapiens
agaaggaccaagaaccagcacgcggcagggaggaggcaaccggagagcgacccgccggggaaa

SEQ ID NO: 226850 - RNA, 52 nt, Homo sapiens
ggaaacccagagccaagaggaacccagaagcagggccacgagcacccccgga

SEQ ID NO: 226851 - RNA, 72 nt, Homo sapiens
accagcaccggcccgaaacgccgaaaaacccaagacaacgccgcaagcccaccacagcgaaaggagggcgca

SEQ ID NO: 226852 - RNA, 55 nt, Homo sapiens
aacccgacaaaaggcgagagcggcagcgcgacaaggacgcacaggagaagcagca

SEQ ID NO: 226853 - RNA, 82 nt, Homo sapiens
ggacgggaaaggaaccagcacaagacaccaaaagcagggacagccaccagcaaaaaggggcgcgcgaggccagagcgcaagg

SEQ ID NO: 226854 - RNA, 56 nt, Homo sapiens
gggaaagcaacaaccaaaggccagggcacaaaaaagggccaggaagccacaaggca

SEQ ID NO: 226855 - RNA, 72 nt, Homo sapiens
gaaccgggaggcgacgcacacgagcggaggcgaagggcacgagcaaaaaaaagccccgagcaacaaaccagg

SEQ ID NO: 226856 - RNA, 66 nt, Homo sapiens
agccgaaggagaacaggagacagaaacaacaggcgcgcaaggaaaagcacccacccgcgagacccc

SEQ ID NO: 226857 - RNA, 72 nt, Homo sapiens
cggacaaagaagcccaccgcaacagagagacggacagcaggaaaagagcggggagcgcaaggccaagaaaga

SEQ ID NO: 226858 - RNA, 70 nt, Homo sapiens
caggaagagggagcagaaccggacagacaaaccggcgaccacacacggggacgacggggaagccggacag

SEQ ID NO: 226859 - RNA, 76 nt, Homo sapiens
cgccccgcgagcggaaggcagacagcaccgaaggacaggccaagagaacgaagcagcccagaaggacacagaggcg

SEQ ID NO: 226860 - RNA, 76 nt, Homo sapiens
cgggaacagccacagcccaccccgggacagagaacaacggcggaaggaagagaaaaagcaggaaagaaaccgaaag

SEQ ID NO: 226861 - RNA, 71 nt, Homo sapiens
cgagccaaaagaacaagggaagagggcgaaagaccagacgcaaccccccgacacagcccaaagacaccagg

SEQ ID NO: 226862 - RNA, 70 nt, Homo sapiens
gagaaacagcaagcaaaggaaaagcaggcacaagggaacaggcaagaaacaacagcgaccagagccgaag

SEQ ID NO: 226863 - RNA, 126 nt, Homo sapiens
gacagaccgcgaacagaccgagaccgaggagcgcccaccagaagcaggcgcccacccagagcagaggcaggagagcggcgacaaaaaggaccggagcacaccccaaggaggaaaggaagcgacacg

SEQ ID NO: 226864 - RNA, 82 nt, Homo sapiens
gagcccccagcgcagcggccgcggacaccaggggggaaaaaccacacaggcaaagaacgcgcaaaacaggacgaaaacaaag

SEQ ID NO: 226865 - RNA, 83 nt, Homo sapiens
agcaaacgaccagacggcagggaggcacaaaggggaacacagaagacaaggagagcgggaaacgagaaaaacagcagaacaaa

SEQ ID NO: 226866 - RNA, 84 nt, Homo sapiens
gcacccaagaagggaccagaggccgccaacgccgaagggaaaacagggacaaggccacccaggaggaccagagcagaagacagc

SEQ ID NO: 226867 - RNA, 77 nt, Homo sapiens
agaaccagccgcagaggaggcgccggggcacagacaaggagccaggaccccggaccagcaggaacaggacacccaac

SEQ ID NO: 226868 - RNA, 84 nt, Homo sapiens
gacagcgggccggagcagccgcgggcgcccgaggggccgagcgaggccgacgcccgccgcggccggggaacaggccacagccag

SEQ ID NO: 226869 - RNA, 57 nt, Homo sapiens
ggaaaaacaaaaagaagaacaagaggagaaaacagaccggccccccaaacacccgag

SEQ ID NO: 226870 - RNA, 74 nt, Homo sapiens
cgccgaccccggcagcacaccggcgccccagacgcgcgccggacaacgaacaggagaagagaaaagaaaacgaa

SEQ ID NO: 226871 - RNA, 71 nt, Homo sapiens
gagcggcgggaggccaccgccagaggcccacgcggaccggcagcgccaccggaccaccagacaaggacacg

SEQ ID NO: 226872 - RNA, 61 nt, Homo sapiens
gaaaagaacacggaccaacaggacaggaaaacggcagaagacaaggagcagaaagaagaca

SEQ ID NO: 226873 - RNA, 87 nt, Homo sapiens
ccccaacccgcgcggcaagaagacggcgcggcaaccggggagcccgccaggaagaccggggcgcggcaagccaagaccgaagaccca

SEQ ID NO: 226874 - RNA, 73 nt, Homo sapiens
aacgccccggggagaagcgagaacgccaggagccagaaccccgaggaaaggggaaaagccgcaaccggcacag

SEQ ID NO: 226875 - RNA, 71 nt, Homo sapiens
cgcccgcccccagccacggaagcccacgccgacacaggcagcaccggcagggaaaaaggacagggaaagcc

SEQ ID NO: 226876 - RNA, 78 nt, Homo sapiens
ccgaccgcacgcgggcgcgagaacggccgcccgccgcagcggagaacaacaagaaggagaaagacacaacgacagaag

SEQ ID NO: 226877 - RNA, 71 nt, Homo sapiens
gaagacgacaagaaagaaacagacagaagagggaaaagagggccagaagaaacacagaagcacacccacag

SEQ ID NO: 226878 - RNA, 75 nt, Homo sapiens
ggaaaaaacacccaaaggaaaagccaggggaaaagagacggcggacagacgaagggaggcaaacaaaaaagcgac

SEQ ID NO: 226879 - RNA, 78 nt, Homo sapiens
agacacggcagcgcaggcagaccgcaggcgcaaggccaggcgacccgacgggccaccggaagaagagagggcgaagga

SEQ ID NO: 226880 - RNA, 71 nt, Homo sapiens
aaagcagcggcgccggccgccccaccggcggaacccagcaagagggaacaggcacgccccacccgccagcc

SEQ ID NO: 226881 - RNA, 73 nt, Homo sapiens
ggcacaacaccagcaaaacagaaccccaaaccccaacaagggagcgcccgcaaagaacagccggaaaaaacgg

SEQ ID NO: 226882 - RNA, 71 nt, Homo sapiens
gccacacaaagccgggggcccccacggacgcgcgagacaagaggagggaagcccagaggcacggggcagaa

SEQ ID NO: 226883 - RNA, 53 nt, Homo sapiens
aaccgagaacggaaggcagaaaggaagaccgcaggaaagcaggaaggcaagaa

SEQ ID NO: 226884 - RNA, 73 nt, Homo sapiens
agcccgggccagcgccgggaccgccacaaccacacccgagggcggccaccaagagggaacccagaaccgcgga

SEQ ID NO: 226885 - RNA, 70 nt, Homo sapiens
gacacagacccaggccgggcccccagcagaaggcagaacagaaccgagccagaagcggggggaggaggaa

SEQ ID NO: 226886 - RNA, 79 nt, Homo sapiens
ggcccccgcaacgcccccggcccgcagcccccgccggccgcccaacaccgaacacccagggagagcaacaagccccggc

SEQ ID NO: 226887 - RNA, 68 nt, Homo sapiens
gggacagacggccggcgggagacgccgggaacggagggaaagcgacaaacaaccaacccacagagacc

SEQ ID NO: 226888 - RNA, 81 nt, Homo sapiens
ccagacccgcccgccagaaccgcgcgccacccacaaccagagccaggacaaaaccaggcagaaccaacacgaacccaagca

SEQ ID NO: 226889 - RNA, 48 nt, Homo sapiens
cgcagggcgcccccggaacaaggggagaacggacagcaggccgacccc

SEQ ID NO: 226890 - RNA, 84 nt, Homo sapiens
gggaggccggccgggccagcacccggccgagacggcggcagcagcggcacaggccaccagcccccgggccaagagcagcacgga

SEQ ID NO: 226891 - RNA, 79 nt, Homo sapiens
gggccagcacccggccgagacggcggcagcagcggcacaggaaccggcaggagcacgagcacacacacggggaacaggg

SEQ ID NO: 226892 - RNA, 51 nt, Homo sapiens
ggacgcccagcccggcgcacggcccagcccaccacacacccccgagcggag

SEQ ID NO: 226893 - RNA, 103 nt, Homo sapiens
cgggacggaccgagaccggaccgagagcggaccgagagcgcgaaacgcacgagaaggggaaccgcccaaaagcccgccagaagaaggacgggagccaaaagaa

SEQ ID NO: 226894 - RNA, 70 nt, Homo sapiens
aaaccagggcaaacggcaggccaccgagaccacagaggcacacccagaagccacaggagaagcaagaggc

SEQ ID NO: 226895 - RNA, 80 nt, Homo sapiens
cccgaggcccgggcgcagccgcaccaagcgcggccggcaagaagaacaagaacccagaacgggcggccagcggcgagcgc

SEQ ID NO: 226896 - RNA, 72 nt, Homo sapiens
cccgccccgcggggcggcgagaaaaggcccggggcccgggacgagggaaggcaggcgggcggaacaacacgc

SEQ ID NO: 226897 - RNA, 73 nt, Homo sapiens
cgccacaggccaagaagcaccggggaggacagaccgaagaaaaccagaaggcaccgacaggaaaggaaaagga

SEQ ID NO: 226898 - RNA, 74 nt, Homo sapiens
aacacagaaacacgaagaagagagacaaccaaaagacacaagggcacgaaagaggcacggggccaaaaaggcac

SEQ ID NO: 226899 - RNA, 76 nt, Homo sapiens
ccccaaggaaggaagaaacggaaaaggaacgccccaaacaagcgacgccaaagggaagaacaccacacgcaacggg

SEQ ID NO: 226900 - RNA, 73 nt, Homo sapiens
cagcaggaagggagagccacccaagagacaagcaggaggggcagcagcaggacagggaacccgggagacagca

SEQ ID NO: 226901 - RNA, 76 nt, Homo sapiens
ggcgccggcggggcggcaacaaggccagcaccacgcgggacccccgccccggccccccagcgaggaagaagagcaa

SEQ ID NO: 226902 - RNA, 71 nt, Homo sapiens
agcgccccgcccgccaaggcggaaaaaaaggaacggaaccgaacagaagaaagagaagaccccaaggacag

SEQ ID NO: 226903 - RNA, 67 nt, Homo sapiens
accgaggagcggggaggacccacaacgcagaacagacagaagcacagagacacccggagcgcggaca

SEQ ID NO: 226904 - RNA, 61 nt, Homo sapiens
gccggcgcaagacacagagcaggggccgggcgcagaagaaaccgacaaagcggccccagca

SEQ ID NO: 226905 - RNA, 70 nt, Homo sapiens
ccgggccccagccccaaccaacagagcgggggcaaaagaaagggggggccagccaaagcagcagaaagaa

SEQ ID NO: 226906 - RNA, 80 nt, Homo sapiens
aaacgggccgcgaaccgcagacagcggccaagaagacacaaaggacggaggcacggaaggcacggcgcaaacggcgccgg

SEQ ID NO: 226907 - RNA, 75 nt, Homo sapiens
cagaccaacaaccagcgaccacgccacaaccagaggcaagaaagacacaaagacgagcgaggaaacccaaaaagc

SEQ ID NO: 226908 - RNA, 60 nt, Homo sapiens
aacagacagaaggagcaggaaccaaagggggagaaagaaccacacgagaagcgagaagga

SEQ ID NO: 226909 - RNA, 79 nt, Homo sapiens
gggccaacgcgaccgcacgcccccgcccccgaggccaggaacgggagacggaggagaagccaccccaccacccaccaga

SEQ ID NO: 226910 - RNA, 78 nt, Homo sapiens
cggccaccggcgggaggaacaaaagagaagcacagaacaaaagaagcaagagcaagaaaaaaacccgcccaagccggc

SEQ ID NO: 226911 - RNA, 78 nt, Homo sapiens
gggcgagccggcgacggacgcggcgcgcgaccgacacgaaggcaaaacccaaggcggggcgcccggcccagagggacc

SEQ ID NO: 226912 - RNA, 58 nt, Homo sapiens
agccagggaaccacggagcacgagaaaacggcggggcaccagggagagccaggacaac

SEQ ID NO: 226913 - RNA, 41 nt, Homo sapiens
ggggcggcggcggccagcgccagagacggggcgccagggcc

SEQ ID NO: 226914 - RNA, 79 nt, Homo sapiens
gcgcccacgcacgaaagcccaggccaaaaagaggggaaggacaaacacgaaaaacaacacggaaccacaccacgacaag

SEQ ID NO: 226915 - RNA, 75 nt, Homo sapiens
cagccagaagaaggaccggaagcacacaacaggaaaacaaaagaggagaaaggaagagagagaaaacccaaaacg

SEQ ID NO: 226916 - RNA, 75 nt, Homo sapiens
ggcacccggcaaaggaaggacacaaccaacacccggaggaggaggagcagacgcaaacagaagacaacccaaaca

SEQ ID NO: 226917 - RNA, 62 nt, Homo sapiens
cgaaacagaagaagcgaggaaagaccggacgaacaagaggaacgagaaggggaacggaaggc

SEQ ID NO: 226918 - RNA, 81 nt, Homo sapiens
ggaccgaagaggaagggcggccgggcccacacagccggcccaagggggcaaacgaccccaagaccacagagaggagaccac

SEQ ID NO: 226919 - RNA, 83 nt, Homo sapiens
ggagcgcgaaggccgggacccggccccggcccacaggggggggcaaacccgagagaacgggacgagagaggagcgcgggccga

SEQ ID NO: 226920 - RNA, 77 nt, Homo sapiens
ggcgcaggcaggcggaggaagaagccacccgagcggaccccgagacaaagcagccgagcggaaaaggaagacgagca

SEQ ID NO: 226921 - RNA, 72 nt, Homo sapiens
acacggacccccggaggacccagggccaggcgcagagagacaagggcacccgaggcaaccaccggggcagaa

SEQ ID NO: 226922 - RNA, 66 nt, Homo sapiens
cccagacagagacacacggcacgcagcgaagccgcgccccgcacaggaaagaccacaggaaggacc

SEQ ID NO: 226923 - RNA, 67 nt, Homo sapiens
ccggccgccccgcagcgcagccccgcacggaaagccaggccaagggcgccggccgagcccgggaaaa

SEQ ID NO: 226924 - RNA, 73 nt, Homo sapiens
ccgcacagaggacccccagacaacggaacgacagacaccaacagacaacagcggcccagaggccacggccagc

SEQ ID NO: 226925 - RNA, 67 nt, Homo sapiens
gcccgccccacaccaggggggaacaaagcccccagacaggggggagaaaaggccaagggcaggagac

SEQ ID NO: 226926 - RNA, 80 nt, Homo sapiens
cgacggcggaacccggggccgggacgcagcccggcggcagcagcccaggcagagccgggcacagaagcggcgggcagaag

SEQ ID NO: 226927 - RNA, 51 nt, Homo sapiens
ggcaaaagacagaccagaagaaggggcaaaagcagcgagagcaagcagaac

SEQ ID NO: 226928 - RNA, 69 nt, Homo sapiens
cacgagcaaccccaaaccaaacccgaccagcggcccaggccccgaggccagagagaaccccagaagggc

SEQ ID NO: 226929 - RNA, 53 nt, Homo sapiens
ccggccccccgccagggaccaggcgaacggccgagcgaccaggagaggagccc

SEQ ID NO: 226930 - RNA, 50 nt, Homo sapiens
aggggcaaaaggcaaaggggagagaaggagcccaaaagaaacagggcgca

SEQ ID NO: 226931 - RNA, 64 nt, Homo sapiens
gcccccggcccgcccggcgcaaaaaccagacaccccacaccaccacccagacgaccaaaagggc

SEQ ID NO: 226932 - RNA, 77 nt, Homo sapiens
gcgaaaccaggaagagaggaggcagacccgcagaccaacgaaaaccacggcgccacgaagagggaaaaggacagcgc

SEQ ID NO: 226933 - RNA, 86 nt, Homo sapiens
cggagcggcggcggaccaccccagggaaagcaggcaggagggagagcgccgaagaaccaccccccgccccgggcgggggaagcgaa

SEQ ID NO: 226934 - RNA, 89 nt, Homo sapiens
cgggaccgcggggagcgcggggacccggagccgcgagggacgaccgggaagaagcagaggaaaagaaggcaagaagaagggggaaggaa

SEQ ID NO: 226935 - RNA, 59 nt, Homo sapiens
gaaaagccaagcaggagaaaccagccaaacaacagagaggcgacccgcggcgagagccc

SEQ ID NO: 226936 - RNA, 77 nt, Homo sapiens
aacaccaacacaaaaaaaaccaacagccccccagggaaaacacacacaacaggcaaccaagaaaacacccaaaccag

SEQ ID NO: 226937 - RNA, 39 nt, Homo sapiens
gaagaagcgaggagaagaagagaccacaagcccagccaa

SEQ ID NO: 226938 - RNA, 58 nt, Homo sapiens
ccacgacacaaacggaacgccgcgcgaggacgcgggccaggagggggccacaccgaac

SEQ ID NO: 226939 - RNA, 66 nt, Homo sapiens
ggcgagcggcggccacaaaccagaggaggacgacagaaagggaaagcgagagccgagagaacaaga

SEQ ID NO: 226940 - RNA, 70 nt, Homo sapiens
cgaagaaaagggaaaacgcgcgggccaagggaaacacaaagaagacaccagaagggccagcaccacgaca

SEQ ID NO: 226941 - RNA, 61 nt, Homo sapiens
agacacagccacaagaaggggaaccagaccgaccgcaacaaggccaaggggggcgcaaagc

SEQ ID NO: 226942 - RNA, 51 nt, Homo sapiens
cgagagagccaggcggcagagaaggggagaaaaagcccacgccaaggaaca

SEQ ID NO: 226943 - RNA, 56 nt, Homo sapiens
aagaccacagaggaacccgaaaaccccggcagaggggcgggcaaaggagaggcaca

SEQ ID NO: 226944 - RNA, 77 nt, Homo sapiens
cagcggcgacggcgccaaccgcaagagcaccgccaagaccgccccccagcgccagaaggccgcaaggacgaagagca

SEQ ID NO: 226945 - RNA, 29 nt, Homo sapiens
accaacgggaaggcagaacaagaagggca

SEQ ID NO: 226946 - RNA, 70 nt, Homo sapiens
ggccgaagacaccccccccccggaccagaggggaacaaacagagcaccaagaaagcacgcagccagagca

SEQ ID NO: 226947 - RNA, 71 nt, Homo sapiens
caagaggaggagcgaccaggacggaccgggggagccaaacaacagggagacgagcagaaagaccaaagcac

SEQ ID NO: 226948 - RNA, 80 nt, Homo sapiens
aaggaagccaagggaccgcgaggacgagagagaagcaacaggggcccggggcagaagagaccaagacgcccggcacagag

SEQ ID NO: 226949 - RNA, 81 nt, Homo sapiens
cggcaccaggaccaccgcggcagcacgcggcgaggagcagcacagagaagaaagacagggcgaagaagacaggacaaggaa

SEQ ID NO: 226950 - RNA, 74 nt, Homo sapiens
cacacgcagaaacaaagagggaggcgagaggcccgggggccaagccgaccacaaagacccccggcgaaagaagc

SEQ ID NO: 226951 - RNA, 65 nt, Homo sapiens
ccggaggagcccaccggcccaaaggcccggacccaaaacaggaaccccggccggagagacagaaa

SEQ ID NO: 226952 - RNA, 81 nt, Homo sapiens
gggccgcccgcgggccggggccacgccagcgccgagggcgagacggcagaccaggcgaccagaagcaagaacaacaaacgc

SEQ ID NO: 226953 - RNA, 66 nt, Homo sapiens
gacgagcaacaggagagggaacgggaggaccaggggcggggacgagagccccggcacaaacggacc

SEQ ID NO: 226954 - RNA, 73 nt, Homo sapiens
gagcgagggggggcgcgccggaaaccggagcgcgcagcaggggggagcaaagcgggaaagacccacacagcag

SEQ ID NO: 226955 - RNA, 73 nt, Homo sapiens
gaagaagcagcacaaggcgagccaggccgaacggccacagggacaggaacccacaggggaagagacaccgaga

SEQ ID NO: 226956 - RNA, 82 nt, Homo sapiens
accgaggaccagccaagacagaaaggagacacggcgcgccgcagcagggggaagaagagaaaacgaggacccaagaagcaga

SEQ ID NO: 226957 - RNA, 75 nt, Homo sapiens
gaagagacgagaagagaaagaagggcgagacaagaagcccaagaccgaaggagccgggaggagcaaagacggccc

SEQ ID NO: 226958 - RNA, 71 nt, Homo sapiens
gccccgagaaggcccgcgccagaggcacccgcaacaccagacggccacgccacccggggcaagacagcaac

SEQ ID NO: 226959 - RNA, 114 nt, Homo sapiens
cccggggcagcgaacgagcgaggccacgccgcccaggagacccccgcgcaccaccaggcgaaaacaggagacaaagaacagaacagcgagaagccacaacaaggggacgaggcc

SEQ ID NO: 226960 - RNA, 72 nt, Homo sapiens
acacaggaaacgcagaagaggccgccaacacacgcaaagcagagaaagggaggggggaagacagggcccagc

SEQ ID NO: 226961 - RNA, 86 nt, Homo sapiens
cagaagccggcgccacgagagagagaacccgagcgccgcagcggagaaagaaggaacgagcaagcaacccgggagcagagaaagca

SEQ ID NO: 226962 - RNA, 75 nt, Homo sapiens
aggaaaacaagaagacgaagaacccgggaaagacaaggagccgggccgagaaaccgaaccagagaccagagaaga

SEQ ID NO: 226963 - RNA, 75 nt, Homo sapiens
cggagcgggagcaggaagagcgaagaacgagaaaaggacaaccggggaagcagaacacgacgaggaaggccccaa

SEQ ID NO: 226964 - RNA, 95 nt, Homo sapiens
gacgaacacccaggcaggccagagccgaaccaaagagcagcaggagacagcgagcaggagcacgaaggggagaaaagggaaggccccaagccaag

SEQ ID NO: 226965 - RNA, 63 nt, Homo sapiens
ggcgagggcgaccccccaaagcagcgcccggcaaagaacgaaaacaaacggaagagagggcag

SEQ ID NO: 226966 - RNA, 101 nt, Homo sapiens
gagaccggcaggcagcacacgaccgcggagaagcgccccgggccgggcaaaggaaggagggccccggagcagccacaccaccgaggccccacccagcacga

SEQ ID NO: 226967 - RNA, 65 nt, Homo sapiens
aaacccccccacaacccgccagcgagacacccgaggcacgaggaccgcgaagcaacggggcggca

SEQ ID NO: 226968 - RNA, 82 nt, Homo sapiens
aaaacacccaaccaggcacagagaaaggccccagggaaaggaccgaggcaggaaagaggccagacgcagggaccggcaccga

SEQ ID NO: 226969 - RNA, 84 nt, Homo sapiens
ccgccgggcccaggcccgcgaccgccgccagcgcccgaggcgaccccgcacacacacccaccagccacggcagcccagcgggga

SEQ ID NO: 226970 - RNA, 89 nt, Homo sapiens
agccacagcgggagccgcgcccaacaaccccgaccggccaaggcggcggaaagcccaggcccaggcccaaggccaaggagagagcccag

SEQ ID NO: 226971 - RNA, 72 nt, Homo sapiens
acacaccagaaccggaggaggaccgcggagggaacaccggccgaacggccaaggcccacgagagggccccac

SEQ ID NO: 226972 - RNA, 68 nt, Homo sapiens
ccaggcccagcagccgccaccgggagaggagaacggccacggcccaaggaggacgccaccccaacccg

SEQ ID NO: 226973 - RNA, 61 nt, Homo sapiens
ggacaggacagagcccccgaggccccagaacaccgccgcgagggagcccaagaagccaggg

SEQ ID NO: 226974 - RNA, 68 nt, Homo sapiens
agaccaccacgaggggaccaccaggaacagaggggcacaaaacaacgaagagaggaaagaagcggaaa

SEQ ID NO: 226975 - RNA, 79 nt, Homo sapiens
aggacaaggacccaacagcaagcaacacgaagaagacagaccgaacagcaaaccggcacgagccaggcaccagaaccag

SEQ ID NO: 226976 - RNA, 76 nt, Homo sapiens
cccgcagcacgaccagcaggaacggccaggcagcagcgcaacggaccccggcgggccaagggcaccccacgaccga

SEQ ID NO: 226977 - RNA, 79 nt, Homo sapiens
cgggaccagcccggcggaacggcggaacaccggaaagcagaggcagccagaaggaaaaagagccaaaggggacagaacc

SEQ ID NO: 226978 - RNA, 80 nt, Homo sapiens
cccaaggaggcccagaaggagaacccaccccggcccacggccgacagacggaggggaggacaaaaccaacaacaagccac

SEQ ID NO: 226979 - RNA, 86 nt, Homo sapiens
ccgggcagcggcgaggggacggagccggacaggagccgccgccgccaacaggagaacggaagccagagaaaaggaagagagagcaa

SEQ ID NO: 226980 - RNA, 76 nt, Homo sapiens
gaaacggaaagacacacgccagcaaaagaaaggccaggccagacaaagggaagggacaggagaaagcagaaagccg

SEQ ID NO: 226981 - RNA, 98 nt, Homo sapiens
accaaaccaagaggcggccagcaggaggcgagaagagccccgcagcagcagcaggcacgaagaagaagccgcgcccccaccgcgaagccagcagccac

SEQ ID NO: 226982 - RNA, 87 nt, Homo sapiens
agggccaaggcaggccagaagacccagcaaggacgaagaggaggaggaaggcacagaagaaaggccggaagacgaccagagacgggc

SEQ ID NO: 226983 - RNA, 73 nt, Homo sapiens
cccgccaggcggcaagggggcaccggcccgcaccaagagaagagaccgcgacagacccccggacaggccacag

SEQ ID NO: 226984 - RNA, 77 nt, Homo sapiens
agcaaagcgaggaccagaccagccgcaagagagaaccgaacgaagaaaccaagggcgagggcaggacacacaaaaac

SEQ ID NO: 226985 - RNA, 62 nt, Homo sapiens
gacagacaagaggcgaaggagacaggcacaaaagacccgaagccccacccgaacccaaacac

SEQ ID NO: 226986 - RNA, 84 nt, Homo sapiens
agagcaggaggcccgggacccaaggcccggagaaacgcaggaaacacacaggagccgacagcagcagaaggagaaaaaaccaaa

SEQ ID NO: 226987 - RNA, 86 nt, Homo sapiens
cgcccgcgcggcgcggggaccgcggcccggaaaccccagacagccagcagcaggccgggaccagcaggggccgcgcagcagcagac

SEQ ID NO: 226988 - RNA, 64 nt, Homo sapiens
gggcgcggacacgagcgcggggacggacagaggaagcagggcggagaacggaaaagcaccagga

SEQ ID NO: 226989 - RNA, 67 nt, Homo sapiens
aagcaggcggagcacccggagggagcagaccaggggaaggggcaccgaaccagacacaaggccacac

SEQ ID NO: 226990 - RNA, 71 nt, Homo sapiens
gccacgccgccagaccgcgcgccaagccgcacgcaaccaccgcccggccacaccaggccagaaaaaggcac

SEQ ID NO: 226991 - RNA, 62 nt, Homo sapiens
gaaaagacccggaaagaagagacacagaggagccacacccccagcgcggaccggaaacaacg

SEQ ID NO: 226992 - RNA, 75 nt, Homo sapiens
ccccccagcccagaaggaaacggcccgcagaggccggaagagcgggagcgggagccaggcagaaggccaaccaac

SEQ ID NO: 226993 - RNA, 61 nt, Homo sapiens
cagcacaccggcaagagcaggggcccggagcccaaaaagagcgcagggagaagccaacgag

SEQ ID NO: 226994 - RNA, 66 nt, Homo sapiens
ggccaagacgaagggaccacaagggaaacccagacgacaaggaaggccaagggacccacgaccaac

SEQ ID NO: 226995 - RNA, 60 nt, Homo sapiens
cacgaaagagcccacacacacgagcgcaggacgggccaggagcgccaccacaaagccagc

SEQ ID NO: 226996 - RNA, 79 nt, Homo sapiens
cggccccggcggcccagccgcgggcacccccgcagagagaggaccaaacgcccccggcgcgccgaaacggccagggacg

SEQ ID NO: 226997 - RNA, 80 nt, Homo sapiens
ggagagccacggagaagaagcgcggcccacacacccagccgggacgcaggagcccacaaaccggaggacacccccagacg

SEQ ID NO: 226998 - RNA, 38 nt, Homo sapiens
aagaccgggaacaagcaaggaggccaacagacccaacc

SEQ ID NO: 226999 - RNA, 44 nt, Homo sapiens
accggccaccaaacgcaccacggggcggagaacggaaaagcacc

SEQ ID NO: 227000 - RNA, 76 nt, Homo sapiens
ccacagaaccgcccaaaaaggcaaagaaaccacgagaggggcaccccccaccccgggacaccccagggcaccacag

SEQ ID NO: 227001 - RNA, 68 nt, Homo sapiens
gacagcaggggcgacgaaaccgcagaccagaacaggcggcaaggaagaggcccggaaagggaaaaacc

SEQ ID NO: 227002 - RNA, 79 nt, Homo sapiens
ggaacagcgcgggccgccaaggcccccggccggccccgcccccggccgagcgacgcgacagggcagcccgcagaggacc

SEQ ID NO: 227003 - RNA, 71 nt, Homo sapiens
acgcgcggaaggcagcgcccagcagcgcagggagcacagaagaagagcaaacacggcgaacgcacgcagac

SEQ ID NO: 227004 - RNA, 77 nt, Homo sapiens
aaaaggccgacccccgcacaggaaccgggacgccaacaccgaacaagaggagaaaggagccggaacaaacccgggag

SEQ ID NO: 227005 - RNA, 72 nt, Homo sapiens
ccgaggccgcgggcggaggcaaggacaaaaacccagagaccagaaggcgcggcagcacgagaacagaaagac

SEQ ID NO: 227006 - RNA, 70 nt, Homo sapiens
cgcacacagccacccgcgcaggagccgaggagaaaaacaccccaaaacgcggagagagggacagagcgag

SEQ ID NO: 227007 - RNA, 67 nt, Homo sapiens
agcgcagccgcaccggccaaggcccacagcgcggcaccgaccccggggggcgcggggggcccagacc

SEQ ID NO: 227008 - RNA, 82 nt, Homo sapiens
aaaacggcgcacacaggcgcgggaacagcacggggacccaagggagagagggaacggcgaaagggcagcccggaaggagcac

SEQ ID NO: 227009 - RNA, 72 nt, Homo sapiens
acaggaagcggcaccgaagagccgcccagcacaaggaaccggccacgcccggccggcaagacgggacccgca

SEQ ID NO: 227010 - RNA, 58 nt, Homo sapiens
cgccacgacagcccaccaggccaccacgcggcgggccggaaagcaaggcaaaccaggg

SEQ ID NO: 227011 - RNA, 52 nt, Homo sapiens
gacacggagcaaggaggaaaacacacggccaggggagagagaaagcccagaa

SEQ ID NO: 227012 - RNA, 76 nt, Homo sapiens
gacggcgcgacgagacccgaccagcgggggcgcggcggccgcgcagccacccaagggggagcgacacccaacagga

SEQ ID NO: 227013 - RNA, 76 nt, Homo sapiens
ggggccgagcgccacagaggagccccaccacgagaccgcaggagcaaagccggaaaagagcaagaccaccagccga

SEQ ID NO: 227014 - RNA, 78 nt, Homo sapiens
ggaaagcgggcccacaaagagaaagcgagggaagcggcacgaacaccaagaacagcgcgagccacaaggcaaggaagc

SEQ ID NO: 227015 - RNA, 61 nt, Homo sapiens
aggagagcccggagcgcgaacccgagcccaggagacgagcccagacacgagaagaagaaca

SEQ ID NO: 227016 - RNA, 70 nt, Homo sapiens
cccaaaccagaccccggcacccaagagcagccagggcaggggagacacacaacagccgaaggaggacgag

SEQ ID NO: 227017 - RNA, 77 nt, Homo sapiens
caaagcgcgcagaaagggcgaccaccaaaaaaacggacccgcgggacgagcgggaggggcggcaaggaaccacggac

SEQ ID NO: 227018 - RNA, 77 nt, Homo sapiens
ccggaagacccaaagcgaggcaagaaagcgcaaggggaacgcacaacacagcaaaggaaccagggaccacaaagaga

SEQ ID NO: 227019 - RNA, 75 nt, Homo sapiens
ccgccaccggaggcccaccggcagcaagaccagacacagaggcacgggcgcaccaccagcgcacgcgcccacacc

SEQ ID NO: 227020 - RNA, 80 nt, Homo sapiens
gcccgggacaacgcgacgagcaacccagcgccgaaggggccacggacggggccgagcacaaccacccaccggacgggacc

SEQ ID NO: 227021 - RNA, 61 nt, Homo sapiens
caagcgcaggaagagaccagaggacagaccgaagcaaagaggaggaaggaccgagcgcagg

SEQ ID NO: 227022 - RNA, 57 nt, Homo sapiens
gacccggaagcccaagaagggggaccggcccaaaaagcacagcggcggcaaggcaag

SEQ ID NO: 227023 - RNA, 73 nt, Homo sapiens
ccgagagcgggacacagaaggccgcgggaaaggcaaaaccccaagaggggacgaaggaggagggcgccgggag

SEQ ID NO: 227024 - RNA, 72 nt, Homo sapiens
cgacagccagggcggaagcccgccccagagcaggccagggggaaccgaccagaggaagcggaagcagcagag

SEQ ID NO: 227025 - RNA, 73 nt, Homo sapiens
cgaccaagccgacccaccacacaagacggaaaaagcgacggagcccccccccggcccgagaaaagcacagcac

SEQ ID NO: 227026 - RNA, 76 nt, Homo sapiens
ggagaagcccccagaaccaggcccccaaccagccacgcggaggcaagacagggaaggccgccaaggggaacagaaa

SEQ ID NO: 227027 - RNA, 73 nt, Homo sapiens
cccgccggccaaaagaaaaacccagaaggacagaccacagcgcgaaggaggcaggggccacaccaggagggaa

SEQ ID NO: 227028 - RNA, 80 nt, Homo sapiens
ggagggaagcccaggagaccaggcagcgcgccgacagccaggaccagggaacggaagaagaaggacaagcacagccgggg

SEQ ID NO: 227029 - RNA, 80 nt, Homo sapiens
cgcgggcgcacggccaccagcaacggcgagggaccacagcgagaccgcgccggcgaccagacggcgacggcgggaggcgg

SEQ ID NO: 227030 - RNA, 75 nt, Homo sapiens
cgcgggcacccaggagcccacacacacacgaaacaggagaaggacacgagacagggacaggggcggaggagccca

SEQ ID NO: 227031 - RNA, 80 nt, Homo sapiens
ccagggcacagccagaaacccaggagcacaaaaacagccggacacccacagacaaaggaggaagaaggcaccacgacaaa

SEQ ID NO: 227032 - RNA, 77 nt, Homo sapiens
ccagccgccaagaacgcagcagcagccgccaagacggaggggccacggggccggggagccaccaggagacagcccag

SEQ ID NO: 227033 - RNA, 72 nt, Homo sapiens
cgcggacccacccccgaacccccaaggggaccaaaacaaaacgagagcaagaggaaagaaaaagaacagacg

SEQ ID NO: 227034 - RNA, 67 nt, Homo sapiens
gaagaggcacgaccagaaaaccggagggaagagggaaaacggaagaccacggaacagccaacagacc

SEQ ID NO: 227035 - RNA, 79 nt, Homo sapiens
acaggagaagagaacgcggggagacggcacacacaggcagcccgagccgggcaggggaagggccgagccccgagaaagg

SEQ ID NO: 227036 - RNA, 81 nt, Homo sapiens
gcagacaagacccggagggcgagccggcaccagggcccaggaacgaaaaagcggccgaccgcgagccgaggccagccacac

SEQ ID NO: 227037 - RNA, 81 nt, Homo sapiens
gggagggcgcggacgcggacggggcacaccaggcacagggcgccaggcggggaccaagagaagagcagaggaccagcaccg

SEQ ID NO: 227038 - RNA, 67 nt, Homo sapiens
gacacagaaaagggagccaaagaaagaggcgagcgacagcgccaagaaaagccaccaacagcccagg

SEQ ID NO: 227039 - RNA, 69 nt, Homo sapiens
gccccaaccacaccccccccaaaccgagccaaaagcggcaaggcaacaggagcggagcgcacaggcggg

SEQ ID NO: 227040 - RNA, 82 nt, Homo sapiens
gggggcaggcgggcacgaggaccagcgggccggagccccgagaacccagagaaacagagggcaaagaggaccaaagaacaaa

SEQ ID NO: 227041 - RNA, 50 nt, Homo sapiens
aagccccgcacagcagagagcaacccgaaaaggccgagacggcaaacccc

SEQ ID NO: 227042 - RNA, 69 nt, Homo sapiens
ccagacaagaaccgagagcccacgaacggacacaccagcgcgcccagggaagaaagcacgggaaaaggc

SEQ ID NO: 227043 - RNA, 75 nt, Homo sapiens
agaccaaacacacaggggagagcaacacccccagggagcgggggcggaaacacggaagagggggaggccagggcc

SEQ ID NO: 227044 - RNA, 78 nt, Homo sapiens
ggaggagcgaggcagcgacaggacgggaacggggaaacccagacgacaaggaaggccaagggacccacgaccaaccaa

SEQ ID NO: 227045 - RNA, 74 nt, Homo sapiens
acagcaagacagcagggcccagaaacaggagcgcgggcgcggagacacagcggccagagcagcgaccgcgggca

SEQ ID NO: 227046 - RNA, 56 nt, Homo sapiens
agaaagaggagcagagacgccggacagaagccacccagaggaggaaagacaagccg

SEQ ID NO: 227047 - RNA, 82 nt, Homo sapiens
acgccgccaacccgggcagcccggccgcaccccagcgcccgggcgaggcacccccgccaaaccccgcacaccccccaacccc

SEQ ID NO: 227048 - RNA, 58 nt, Homo sapiens
ccgagacaccaagggcggggcgaggaagagggcacgcaaaaaaaccaagggaaaagag

SEQ ID NO: 227049 - RNA, 67 nt, Homo sapiens
cccaacccccaccccgcccaaggaggcccagcggaacgcaggagaaaagagaagagacacgccacag

SEQ ID NO: 227050 - RNA, 87 nt, Homo sapiens
aggaacggcggagcagggagcccaaagaccccggagacagagccaggacaaaaccaggcagaaccaacacgaacccaagcacaaaca

SEQ ID NO: 227051 - RNA, 80 nt, Homo sapiens
agcaggggaagcgacagacagggcagggccgggagcacgcacccggcgcaggagcagagccccggccaggcgcgccccca

SEQ ID NO: 227052 - RNA, 68 nt, Homo sapiens
aggaaccaaggaaaagaaagaggacggaagcaaagggcagccaccgaagacagcgaccagacaacagc

SEQ ID NO: 227053 - RNA, 71 nt, Homo sapiens
gggcggcgccaggccggcccaggaagagacccccgacgacagagaagagccgcagggacagagcggacaca

SEQ ID NO: 227054 - RNA, 76 nt, Homo sapiens
ggacagaaaagacaggcgccaggagcacagaagagcgaggaggggagggagcaaagccgcacacggaggggacagc

SEQ ID NO: 227055 - RNA, 87 nt, Homo sapiens
gggaagcagaaccggccggagccacagacagagccgggccagcccagagacaggagaggcacaacccagccgcagcgccgcgagccc

SEQ ID NO: 227056 - RNA, 36 nt, Homo sapiens
cccagaccaggaaagacagcgaaaggcgagaaaacc

SEQ ID NO: 227057 - RNA, 69 nt, Homo sapiens
ccagcaagacaaaagaagacgccacaaacacaggcccaggaagaggcgagacgaaacggcgagggacac

SEQ ID NO: 227058 - RNA, 61 nt, Homo sapiens
ccgcccggggacgaaagcagaaccagaagaagaagcagcggaaccaggagagaaacaaaaa

SEQ ID NO: 227059 - RNA, 77 nt, Homo sapiens
cagacacaaggagggagaacagcacaagagcccaaagggcacgcaaaaagaacagaggaacccaaggaagcgccgaa

SEQ ID NO: 227060 - RNA, 54 nt, Homo sapiens
cgcaggagcaagcgcagcaccaccaacaaaaaggcccacccaagacccgaagaa

SEQ ID NO: 227061 - RNA, 61 nt, Homo sapiens
ccggccccgagacagaagccgccacaccgggacagccaacacagggccacagcgggggcac

SEQ ID NO: 227062 - RNA, 79 nt, Homo sapiens
gggaaggcgaggacgaggacgaggacgcaagaagaaagacaaggcgaccgaaccaaggagcaggccagaaaagaccagg

SEQ ID NO: 227063 - RNA, 79 nt, Homo sapiens
ccgggagcggccagggccgcggcacaggagccgaccaggccagggcaccacaccagccacaggcgcagggccacgccag

SEQ ID NO: 227064 - RNA, 86 nt, Homo sapiens
cgagcgcaacaccccgagccagcgagccagcgagccgccgacccgccgagcaaaagaccacgccacaacgacagcaacccccggac

SEQ ID NO: 227065 - RNA, 74 nt, Homo sapiens
gcaaaaggcacaaaaccaaaaccagaacagaaagaaaggcagaagagcaaaggcaggagagggaaaaccagcag

SEQ ID NO: 227066 - RNA, 72 nt, Homo sapiens
cggccagacacaaagacccagaagaaaaagcagcacgaaggcgaggaaccagcagacaaaaaagaagaaaaa

SEQ ID NO: 227067 - RNA, 88 nt, Homo sapiens
cgggaaagaaaggacccaccgaaaacgggccgagagacgggcagaaagacaaggacagggacaagcgcacagcggagaaagcagcgcg

SEQ ID NO: 227068 - RNA, 73 nt, Homo sapiens
ccccgcgccccgcaccgcggcaaagagaggacgcagcgagaaaggcagggggaggcaagcccaggaaagagag

SEQ ID NO: 227069 - RNA, 80 nt, Homo sapiens
cggagccagaacggaaccacgaggacccgccgccggggacccggaggggggaccccgagggggcggcagaggaacgggac

SEQ ID NO: 227070 - RNA, 67 nt, Homo sapiens
gggacacgccgagagacccaagaaacagcacccagccaaacccaggcccgagaagaagaggaaaacc

SEQ ID NO: 227071 - RNA, 78 nt, Homo sapiens
cccacggagccgcagggccccaaagggagcggcggccccaggaaaccacccacgcccccgagggcaacaggaaaacaa

SEQ ID NO: 227072 - RNA, 64 nt, Homo sapiens
ccaaccaccagagaaccgaaggaagaagagaacagagagaaaagaacaacccagcacagaaaac

SEQ ID NO: 227073 - RNA, 61 nt, Homo sapiens
gcggggcagggcagaggacagcaagggacaacagaagagccagagaagcagagcggcagcg

SEQ ID NO: 227074 - RNA, 81 nt, Homo sapiens
gcaaaacagaccaggaggagaagaagggaggcagagaagcagcgggcccaggccaggagggcaagaacacgcagaagaccc

SEQ ID NO: 227075 - RNA, 67 nt, Homo sapiens
acccagagccggaacgggcccagaaggaaaacaccgaaaagacggagcagcaaacacgccgaccaag

SEQ ID NO: 227076 - RNA, 81 nt, Homo sapiens
acgagccacccacagagcccggaagagccgaccacggaaggagacacccggcaccggccggagcaggaccagccgcacgaa

SEQ ID NO: 227077 - RNA, 79 nt, Homo sapiens
aagggcgacaggccaccaacacacgggaaaggacagaagccacaaaacacggcacgccagacacaacgagggccagccc

SEQ ID NO: 227078 - RNA, 87 nt, Homo sapiens
aggccgccggccaccgcgcacccacgaacgcccaccccccgaacccagccgcaccgcaaaccagccggcgggcgccacaacggacga

SEQ ID NO: 227079 - RNA, 68 nt, Homo sapiens
ccaggccacggacgaagcccagagacaacggcaagcggagaagagcaaggccgaaccgagaggaaggg

SEQ ID NO: 227080 - RNA, 76 nt, Homo sapiens
gcccaagcaccgccggggcgccgcacgagaccgggcggccagacaggagcccaggagaaacgccaaggccgcagca

SEQ ID NO: 227081 - RNA, 80 nt, Homo sapiens
cccgccgcaccagcaagcgcgggagaaaccaggcggggaacaagccagcagcccaaggagaagccccacagagcaagcga

SEQ ID NO: 227082 - RNA, 66 nt, Homo sapiens
cggcagacgaagcgagcccccggggaagccagcagaaccagaagccaagcaaagccaaccggcgaa

SEQ ID NO: 227083 - RNA, 47 nt, Homo sapiens
gcacaaaaagcacacagcaagcacccgaggcgaaacaacaaaaccag

SEQ ID NO: 227084 - RNA, 54 nt, Homo sapiens
gaaaggagggaagccagaggccaaaggcaggaggcacagccgcgcgaggccccg

SEQ ID NO: 227085 - RNA, 72 nt, Homo sapiens
ccagccaagaaccgcacgacacgaacaaccaggagggagcgggagccaaaaagcccgaccaccggaacaaaa

SEQ ID NO: 227086 - RNA, 76 nt, Homo sapiens
aggaagcggcaaagccagaaagaggaggccagagcggggaccaaaaccggcaaaacaaggccccggagaccaaaac

SEQ ID NO: 227087 - RNA, 78 nt, Homo sapiens
gcgcgccaagacccggagcaccgcacaaacacgccacgcgcaggagcacacacggaggacaggaggaggaaggcgagc

SEQ ID NO: 227088 - RNA, 75 nt, Homo sapiens
acggaacccggacgcggagagcagcggacccaagggacaggacgacgccaacaggcgaaggggcgccgaaccgag

SEQ ID NO: 227089 - RNA, 85 nt, Homo sapiens
gaagcaacgcgagccgcccgccaccgcaccaggaagggggagacgaaccggcaaggaacagacgaagagcagagccaggcgaccc

SEQ ID NO: 227090 - RNA, 57 nt, Homo sapiens
gcggagagcagcacgaccccagcacagggcggagaacggaaaagcaccaggaagcag

SEQ ID NO: 227091 - RNA, 72 nt, Homo sapiens
cagggaaggggacacacggaccggcggggcgggaccagaaacgggagaaggccacacggcacagacagaacg

SEQ ID NO: 227092 - RNA, 68 nt, Homo sapiens
agccacaggggggagacgggaccagcaagccgagaaagggaggcggaacagcgcgggggcgcggaggg

SEQ ID NO: 227093 - RNA, 70 nt, Homo sapiens
caggccccacgagcggggccagagaggagaagacagaggagccagaccaagagacagcacaggcgagcga

SEQ ID NO: 227094 - RNA, 85 nt, Homo sapiens
acaagcccacaagccccgccgcgcaagaaggccgggcgaggaggcccaaagcaccgagcgcccagagccaaggagcaccaggaag

SEQ ID NO: 227095 - RNA, 80 nt, Homo sapiens
cggcgcgcccagaagaagggaaggcgcgaggaggaaaggaggacgaggaaggaagggaacacggacgacgagacacgacc

SEQ ID NO: 227096 - RNA, 86 nt, Homo sapiens
cagaagaggacgggaccgggaccgcccggacccggccgggagaagcagcagagaaagacaaccagccaaccaggaccccaggaccc

SEQ ID NO: 227097 - RNA, 78 nt, Homo sapiens
caacggagaccgggggggcaagcaaccagggcaaggcggagcagccaaggaagcagcagcgccgaccaaggaccggac

SEQ ID NO: 227098 - RNA, 38 nt, Homo sapiens
ggggagagaaaaccgaacacaggaccacagccggacag

SEQ ID NO: 227099 - RNA, 74 nt, Homo sapiens
gaagagcagagggaccaccccagaacccgaacacacggcagcagcaggagggccccgagggcccggcccgacac

SEQ ID NO: 227100 - RNA, 83 nt, Homo sapiens
ccgcaaagcagcgcaaaggcaagacgcacaggaaaggcacagcaaccggagaagaggcacgaggagaggacagggcagaacaa

SEQ ID NO: 227101 - RNA, 52 nt, Homo sapiens
aaaggcaaacgacagagccaaggaaagggggcgaacagcgaccagagggcac

SEQ ID NO: 227102 - RNA, 72 nt, Homo sapiens
aaggcgaacgccgcggccaaggagccgccaaagccagacggaccgacagcacgaggaggagagaagaaaagc

SEQ ID NO: 227103 - RNA, 54 nt, Homo sapiens
agcgggcgcggcggcagcaccggaacaacagacaaggccgacgcgcacgaacac

SEQ ID NO: 227104 - RNA, 74 nt, Homo sapiens
gacgggcagaacagaagcaggagaaccagagaaagaggcccacaaaaccaaacagcagccgccgcaaagggacg

SEQ ID NO: 227105 - RNA, 82 nt, Homo sapiens
ggccaccgccccagcgccaccaaagaccgcgacgccagggaacgaagcccaaaaggcagagacggaccgagacaggagagca

SEQ ID NO: 227106 - RNA, 58 nt, Homo sapiens
cagggccaccgcgcaagaccggacaccggggcagcgcaggaggacagccaggcacggg

SEQ ID NO: 227107 - RNA, 74 nt, Homo sapiens
cggcccgggcgggcgcccgccggcacgccgccagccccgggggccacgagcggcagcgcgcagacaggacaacc

SEQ ID NO: 227108 - RNA, 74 nt, Homo sapiens
ggcaggaaccaccaggacagagaagggccgacgaaggagaagcgggaagcacaggaggccacgggggaccgggc

SEQ ID NO: 227109 - RNA, 72 nt, Homo sapiens
aaggagcccgcaggaaggaggcccgagcagggccgccggggaccaggagaggaaaggcacggagggcgggaa

SEQ ID NO: 227110 - RNA, 80 nt, Homo sapiens
agcgccaaggacccgggacagggaccagcgggaaggcagacagcgagggcgacgagaggaggaaaagcccccacgcccag

SEQ ID NO: 227111 - RNA, 83 nt, Homo sapiens
cccgcgcgggccaacgggggagacaaccggagcagggaccaggagcggaggagacacacgccgggacgcacgggggcagccca

SEQ ID NO: 227112 - RNA, 77 nt, Homo sapiens
gacccaaaaaaaagaggagcagcaggcacagcacgggcagagccaggggacccccaaaagacaagggcaaaacggac

SEQ ID NO: 227113 - RNA, 80 nt, Homo sapiens
agggggacggcgccacgcaccggacgacgcccggcgccagcacacgcaggcgccacggggggaaccagaagcacaagcac

SEQ ID NO: 227114 - RNA, 85 nt, Homo sapiens
gaacgggccggaaggggagaccggagggcccgggcaaagaagcccgcagaacacaacgaccagagcagagggaaggcaacacgag

SEQ ID NO: 227115 - RNA, 43 nt, Homo sapiens
caccgcccaggcaacaaaggagccaagccgccaggccaccaca

SEQ ID NO: 227116 - RNA, 59 nt, Homo sapiens
caaacgccgaaaggacgaggaacgggccggaaaaggaggagggacagacgagagacaac

SEQ ID NO: 227117 - RNA, 76 nt, Homo sapiens
cgcgcggcgccgcaacaaagcagacaccagggagaagcccaccacgcaacgggacggcgcggcggaaggcgcgcca

SEQ ID NO: 227118 - RNA, 73 nt, Homo sapiens
ccagcgggaggccaggaaagacagcaaagaagaagagaaccgcagccagaagcaaagcagacagacgcgaaaa

SEQ ID NO: 227119 - RNA, 76 nt, Homo sapiens
acccgaagacccccagcagcagacccaagaagacagaccccgaggagacgccagaggaggacgagccccgccaggg

SEQ ID NO: 227120 - RNA, 75 nt, Homo sapiens
gaggcgagacgacagcccaaacaggagcggagcagccaaagagagaagaccaagagacagaagggacgggacgag

SEQ ID NO: 227121 - RNA, 80 nt, Homo sapiens
agacaagcggagcaacggcggcccaagggccggcagaaccgagccagcagaagagacacgagcaaaggaaggaacaacag

SEQ ID NO: 227122 - RNA, 56 nt, Homo sapiens
acagaacccaaaagccgacaaccccagaaacagggaccagacaggcaaaacaccag

SEQ ID NO: 227123 - RNA, 68 nt, Homo sapiens
aaggacaagaaagccaccaggacgagaaaaaccaccggacagaacagggcgccgaccggaccacccag

SEQ ID NO: 227124 - RNA, 77 nt, Homo sapiens
cccaccgcgcccccagaacagacgaaaccacaaaacgcccaccagcacagcggcagaaacaaagcaaccccaaggca

SEQ ID NO: 227125 - RNA, 82 nt, Homo sapiens
aaggacacgagaaaagacgaccgaggagaagacagagcaggcgggcggggagcgcggaccagaagagaacacgccaggaaag

SEQ ID NO: 227126 - RNA, 79 nt, Homo sapiens
ggaaacagcagagaccccagacgccaccacaacccccagacgcaagccaaggggaggcaggaaaaagacacaagacagc

SEQ ID NO: 227127 - RNA, 75 nt, Homo sapiens
cacgggaaacacaaaacgccaagccaggaagcccccgcccaaacagcggcgccgcgggccccaggaaggcagcga

SEQ ID NO: 227128 - RNA, 69 nt, Homo sapiens
agcaggcagagcaaggaaacgaggcacccgagaggcggaccacacaaccggacgaccagccaagaagcg

SEQ ID NO: 227129 - RNA, 80 nt, Homo sapiens
aaggggacccgcgccaaccagcccggcggcggggggagcgcaggaggaagggcgggggggagagacagcccaccaggccc

SEQ ID NO: 227130 - RNA, 69 nt, Homo sapiens
cgaccgggagaggacaagaccacgagccagcggcgcccagcacccaaaggaaggacagagcgggacaag

SEQ ID NO: 227131 - RNA, 56 nt, Homo sapiens
gggggaggaggacaggagcccgccagcccgccaaaagacccccagaaggaggcaga

SEQ ID NO: 227132 - RNA, 37 nt, Homo sapiens
acaagaagggcaaagccgaaggccaccgcacccaggc

SEQ ID NO: 227133 - RNA, 71 nt, Homo sapiens
aaaacggaagaacccaccgcccccgacacggggcgacacagcggccgagagacccgcggcgagccgcacag

SEQ ID NO: 227134 - RNA, 69 nt, Homo sapiens
gaaggaccaagaaccaggggcacaagaaggccaaccccaaaagagagaacacaggcaagacgaaaaccg

SEQ ID NO: 227135 - RNA, 82 nt, Homo sapiens
cgccaagggccaagccgcagaagaagggcccaccggacaacagaggcagagaagaagcggaggcaagcagcgagcaaggaag

SEQ ID NO: 227136 - RNA, 51 nt, Homo sapiens
cggggcccgcccagaacagaaggagaacggaagaggacaagagacgacacg

SEQ ID NO: 227137 - RNA, 47 nt, Homo sapiens
aagaccccccaagacaccgccaggggccgcccagaccgagcgacacc

SEQ ID NO: 227138 - RNA, 77 nt, Homo sapiens
gagaggagccccaccgggcgaggcgaggggaggagggcagggacagggaagaagagaaagccgaaaaagacaagggg

SEQ ID NO: 227139 - RNA, 84 nt, Homo sapiens
cccggcgcccgcccccgccccggggaacgcgcccgccgcaaagagcccccccgcggaaagcgaagacgaccccgacgcaggcca

SEQ ID NO: 227140 - RNA, 79 nt, Homo sapiens
ggaagaaaggcgagggaggcgcaggaaccaagggaacggaagccccagcccgcgcgagccaggcgcccacaggagaaca

SEQ ID NO: 227141 - RNA, 65 nt, Homo sapiens
gggaacaccaccgcaccagaaacacgccacgcagaagagccaaaagagaggaggccgaaaacgcg

SEQ ID NO: 227142 - RNA, 76 nt, Homo sapiens
cggaaaccgggaaacaccgccagaacccgcgcaggcagccaccggcagcacccggcagagccccgcgaagacccca

SEQ ID NO: 227143 - RNA, 86 nt, Homo sapiens
cgcggagccggagccgcagaggccccgggcggaccaggcccagcgccggccgcccgcaggacaccgagggcccagccgcgcaccag

SEQ ID NO: 227144 - RNA, 72 nt, Homo sapiens
aaagaagaggaagcagggggccagcaaaccggagagccagaaagaaagggacccagaagaaagaggaacgaa

SEQ ID NO: 227145 - RNA, 78 nt, Homo sapiens
gccacggacacggcgggagccggcgaggggaagaccaagacaggccggaacccgaaaggcaccaagccagacacggga

SEQ ID NO: 227146 - RNA, 72 nt, Homo sapiens
acggcggcgagggcggacacgggccgagcgcacagacgagaccgcgcaggcgacgccggaccgcgaagagac

SEQ ID NO: 227147 - RNA, 75 nt, Homo sapiens
cccagccccagaaaccagagaccgggggagacaggagaagaccaggccggcaggcggcaccaggacgaggagaca

SEQ ID NO: 227148 - RNA, 81 nt, Homo sapiens
cccacagaaggcaaaaaaggccaggagagggagccacacccacgggaccgacgcccagcccgagaccccggccgaggaacg

SEQ ID NO: 227149 - RNA, 75 nt, Homo sapiens
gaccaccacagacagggccagacaaaagaaacggcagacccaccgaccaacaaagaaacaacccaaaagagcaaa

SEQ ID NO: 227150 - RNA, 56 nt, Homo sapiens
cggggcgcccggcgccggccgagaaggcagaggcgaaaacgcgcgcaaccaaagcc

SEQ ID NO: 227151 - RNA, 57 nt, Homo sapiens
agaaaggcagacgaagggaaagcccagaacaggaccggagggccggaagcgggccgg

SEQ ID NO: 227152 - RNA, 73 nt, Homo sapiens
ccgggcagaggagacgaacaaggccagagaaggggaggaaccgaacgagcgaaggagaaacccgcccaagaac

SEQ ID NO: 227153 - RNA, 73 nt, Homo sapiens
ccccgcgccgccgaccccccggcgccgcgccggcggcggacgggacccggaggacgacgcgcggccgggcgcc

SEQ ID NO: 227154 - RNA, 72 nt, Homo sapiens
cccaccggccgggagggcccagggcggggcccgagaagcggggggagagagcgagccccggcagccgccgac

SEQ ID NO: 227155 - RNA, 64 nt, Homo sapiens
ggcccggaggagcggccgcgccgccgcgcgagaggaagagaaaccagagagcaagacaaagaaa

SEQ ID NO: 227156 - RNA, 80 nt, Homo sapiens
ggccccccagccagggaacgaggccggcaccgacggggccgcccggaccgccgcacgcgcagaacccgcccagcgcccac

SEQ ID NO: 227157 - RNA, 75 nt, Homo sapiens
cggggcgaggacccccgagccagggagagaggcagaacagaacaaacggagaaacaccggagagcccaaaacaag

SEQ ID NO: 227158 - RNA, 47 nt, Homo sapiens
aacgcaaggcccccgaccacacgcccgcgcgaggcacggaaagcagg

SEQ ID NO: 227159 - RNA, 53 nt, Homo sapiens
gccgcggccgccccagaagggccaagggacgcacgaaacaacggacacccccg

SEQ ID NO: 227160 - RNA, 79 nt, Homo sapiens
gaggagccgaagcccacagaaggggaccaagggggcagcagcggcccaggaccgagggaaacggagagaaccagagaaa

SEQ ID NO: 227161 - RNA, 58 nt, Homo sapiens
cggcggaggcgcaggcggcgaggggggccgcagcggaggaggggcgcccggaaccagc

SEQ ID NO: 227162 - RNA, 73 nt, Homo sapiens
gccgagggagccgagaggcaccagggagagccaggacaacccacggcgcccagaggacaaaaaggggggccca

SEQ ID NO: 227163 - RNA, 80 nt, Homo sapiens
cccccccgcccgcgagcggcgggcgggcgggagcgcccaagggggcggagagcggggggggacccacaggaccgcgaaca

SEQ ID NO: 227164 - RNA, 79 nt, Homo sapiens
agcgggcccggcagcgaccagcggccggcccagccgcgggcagggaagcaccacgggagcgaggcgacagaagagacgc

SEQ ID NO: 227165 - RNA, 57 nt, Homo sapiens
ccgccaggagcccgaccgggagaggacaagaccacgagccaggcgggagcgaccccg

SEQ ID NO: 227166 - RNA, 75 nt, Homo sapiens
ggaagcccagaagggcgacgcgccggaaagcccccgccgcggccaccagccccagcccacggcccacgccgaacc

SEQ ID NO: 227167 - RNA, 78 nt, Homo sapiens
ggcgaagcggccgagcaggcgagcgaacgacggcccaggcggccgagccgcgagaacaacggagacggcgcgccaagc

SEQ ID NO: 227168 - RNA, 65 nt, Homo sapiens
agcacaaagcaaaaaacgcaacaccagcacagagccaaagagaagcaggagaaggaacgggaaaa

SEQ ID NO: 227169 - RNA, 72 nt, Homo sapiens
agacaacggccggaaccagagcccgccgcggcgcggggcgggaacgcggaagaagaggaacacaagcaccaa

SEQ ID NO: 227170 - RNA, 44 nt, Homo sapiens
cggaagcagaaggagcgaaaaagggacaggagagagggcaagag

SEQ ID NO: 227171 - RNA, 93 nt, Homo sapiens
ggagaaacggaagcacaagaccgcccggggaacagggcagcaagcgacagggcggagaacggaaaagcaccaggaagcagagaggaccgcaga

SEQ ID NO: 227172 - RNA, 67 nt, Homo sapiens
agaagaagcccaaggagaggcagagacccacgcgggaggcacccgagcagagcacagaagaagcggc

SEQ ID NO: 227173 - RNA, 76 nt, Homo sapiens
gcacgggcagcacacaacgccaccggaaggccgcgggggaaggaggacgcagagagggcacacggggcgaaggaga

SEQ ID NO: 227174 - RNA, 69 nt, Homo sapiens
gacacacggaaaagggcagagaaaagccaggaaggacaaaaccgcaagagggcgaagaagaaaagacgg

SEQ ID NO: 227175 - RNA, 78 nt, Homo sapiens
ggaagacaggccacccagcggggagcacggcgagcagccaggccaggagagaaggaaaggaacagggcgaaggcggac

SEQ ID NO: 227176 - RNA, 107 nt, Homo sapiens
gggaaagcaagaaaaggagaggcagagaaacaagaacacagagagccaagaacaaaggcaaggccccccagcacccaggcggaagcagggcgccacgacagcaaccg

SEQ ID NO: 227177 - RNA, 111 nt, Homo sapiens
ccaaacccagacaggaccagagacaacacgccccgcacagaccgacaagaacaaagcagagcccacagacaaggccaaaggcaaagcgcacagaggggcccaggcagagag

SEQ ID NO: 227178 - RNA, 51 nt, Homo sapiens
caaaacagggccgagcacagaaggaaaccagggggaccgcggggccaaaaa

SEQ ID NO: 227179 - RNA, 84 nt, Homo sapiens
ccggaaccccgcggggacccgcggcccggcggcggcgaccggagaaccgcacggggcacggagggaaagccacaacacgcaaca

SEQ ID NO: 227180 - RNA, 77 nt, Homo sapiens
agaaaaccacacccgaaggcacgggaggggagagagaaccggcacaccggagcaacccagaacacagcggaggaaag

SEQ ID NO: 227181 - RNA, 76 nt, Homo sapiens
caggcaagggcgaggaagcaggcacgcaagaagaagggggcggcaccaggaaaaagaaagacggcacagaacaagg

SEQ ID NO: 227182 - RNA, 83 nt, Homo sapiens
ccaacccaccgccgccaggaggaaaagggccaaagggagcgggcggcccggcccaaccgcacacccggaagcagccacggcgg

SEQ ID NO: 227183 - RNA, 40 nt, Homo sapiens
ccggggccgagaagacacgggaaagggagcagcaccggcc

SEQ ID NO: 227184 - RNA, 54 nt, Homo sapiens
aacgaaaaccggaaaagggggaaacgaccaccggagccaagacagagggagccg

SEQ ID NO: 227185 - RNA, 55 nt, Homo sapiens
cggcaagggcgacaaaggacacacggaacacgcaggaggagagaaagaacccacg

SEQ ID NO: 227186 - RNA, 46 nt, Homo sapiens
gaaccggccagcacaggaggacccaccgcgaggcgggggaagcccg

SEQ ID NO: 227187 - RNA, 55 nt, Homo sapiens
agaggacaagagacgacacgcaagcaggcaaccgaaacagcccaccacggagggg

SEQ ID NO: 227188 - RNA, 67 nt, Homo sapiens
aggccaagaagcaccgagcggaggaggaggagagaggaccaagagcagccgaaaacccacgaaccgg

SEQ ID NO: 227189 - RNA, 78 nt, Homo sapiens
ccccagaacaaccgcggggcacacaaagggaggcagcagaaggaccgggcacggggagcgcgcgagagaaggcgggcg

SEQ ID NO: 227190 - RNA, 79 nt, Homo sapiens
ggagcccggcgcggcccgggcagccgcgccccaacaacggcaagcggagaagagcaaggccgaaccgagaggaagggca

SEQ ID NO: 227191 - RNA, 63 nt, Homo sapiens
gagcgaggaaccagaacgaaaagcgccagaaagacggccaagggaacgggaggccaaaggggg

SEQ ID NO: 227192 - RNA, 65 nt, Homo sapiens
gcgcacaagggcagagggccagagcccagaaaagagagccgggcagagaaaagaacgcgaggaga

SEQ ID NO: 227193 - RNA, 71 nt, Homo sapiens
gccaagggcggccccgaggaagcaaggccgcggggggagaccccaccaccgacacaagcgggacggaagag

SEQ ID NO: 227194 - RNA, 73 nt, Homo sapiens
gcaccgggacgacacagaaagggcgggagacccacaagaagaacccgcagacagaaccgaaagggaaagagca

SEQ ID NO: 227195 - RNA, 62 nt, Homo sapiens
ggaagacaaaaaggaaagaaacgaaggagagaccaggaagaggaggacgcagcagagagggc

SEQ ID NO: 227196 - RNA, 72 nt, Homo sapiens
ccaccaaaaagccaaaagcaggcacccggaaacaagccacgaaggagagaaaaccagcagcagcgcagcaga

SEQ ID NO: 227197 - RNA, 71 nt, Homo sapiens
aacaagaaaggacgaagaaagcagcagcggaggcggggaccccaaagggcggcggccccacccaaagcaga

SEQ ID NO: 227198 - RNA, 72 nt, Homo sapiens
acagagccgagaaaggaagggcgggaccaacagggagccagagggaaggggaacaggaccggccacagacag

SEQ ID NO: 227199 - RNA, 114 nt, Homo sapiens
ggacagaaagaacgcggagggaacaagaaggaagaacggcagagcaggccgaagcaccgaagggagcgcgcaaggaagcgcgggggcaggccgggcgaccagcccgagggcggc

SEQ ID NO: 227200 - RNA, 59 nt, Homo sapiens
cacgcgcggaaggcagcgcccagcagcgcagggggggccgcccgcccaaggcaggaaga

SEQ ID NO: 227201 - RNA, 40 nt, Homo sapiens
gcagcccaagcgccccccaccggagaggagaaaaagaaac

SEQ ID NO: 227202 - RNA, 78 nt, Homo sapiens
aagcgaaaaagcgggaacgcaggacccaaagcgcggccagcagacccagaacagagccaccgaagaagcagggcggga

SEQ ID NO: 227203 - RNA, 64 nt, Homo sapiens
ggcgaaacgaagagacagaagaaagaagaggcccgaaccaacgccacgaaggcaacaaaacaga

SEQ ID NO: 227204 - RNA, 84 nt, Homo sapiens
gcccgagccggagcgccagccagcggcccacccggggggcagcaacggcgacaccagcaaggcagcggcccagcgcaagccaaa

SEQ ID NO: 227205 - RNA, 71 nt, Homo sapiens
cacaggaaaggagggaagccagaggccaaaggcaggagagcggcccggccacgaagaagcccgggaaaaca

SEQ ID NO: 227206 - RNA, 83 nt, Homo sapiens
cgcccaggagggagggacacagccccaaacaggacgaaggcggcgaaggacgagacaagggcaacgagacacccagcggcccg

SEQ ID NO: 227207 - RNA, 68 nt, Homo sapiens
gagggaggaagagaacacccaccggcacaacacacaaaggacagacacaccagaggaagaggcgaaac

SEQ ID NO: 227208 - RNA, 64 nt, Homo sapiens
ggcccccaacgacaaaagacgaagagagaaaggcagggcaccccaccacagcgacaaagacccg

SEQ ID NO: 227209 - RNA, 40 nt, Homo sapiens
cggcggaaaggacagcaggcagcaccgggaccggaggccc

SEQ ID NO: 227210 - RNA, 78 nt, Homo sapiens
cccgcaacacgccaaccagaccagcgcacgggacggagagagaagaagaaggaggccgcggccagaaacccaagaaaa

SEQ ID NO: 227211 - RNA, 88 nt, Homo sapiens
ccgcgccgggagcggcgcggccccaaggcgcgcccgcgcaggaggcagagcaacagggacacaagcaagaagaaagggaccgacagca

SEQ ID NO: 227212 - RNA, 51 nt, Homo sapiens
gggaagagagaaagccaagcaaaaaggccaggcaagaaacacagaaggggg

SEQ ID NO: 227213 - RNA, 61 nt, Homo sapiens
gccaagaggaggacagcgcacacagcaagcacgaggaagcggaggaggaagaagcaaaggg

SEQ ID NO: 227214 - RNA, 78 nt, Homo sapiens
gacgcggagccaggccgaggggcggacgcggccgggcgaaaccaagaggagggaagcaggcagacgcgaggccggcca

SEQ ID NO: 227215 - RNA, 74 nt, Homo sapiens
gaaagccagagcccgaaaagaagaaccgcaacagcaaaggaagaaagcggccggcggagccccgaccacgagaa

SEQ ID NO: 227216 - RNA, 75 nt, Homo sapiens
ggcggagggcagggccaggaggaacagagcaagaggcacggagcccaggcgccggaacccggaccaaggacccac

SEQ ID NO: 227217 - RNA, 79 nt, Homo sapiens
ccagcaaaagagccaaagaaggaaggacaccaccccaggaaaaggaaggacccgagaaacaaagaacacgcacagggcg

SEQ ID NO: 227218 - RNA, 52 nt, Homo sapiens
agccaggcgcaaacacacacagagcaaaggaccgggagacaacaaaaaaggg

SEQ ID NO: 227219 - RNA, 73 nt, Homo sapiens
gcgagcaagcgggccgcggacaaccaccccggagcaagaccggccgcccgcccccggggccgccccccggaac

SEQ ID NO: 227220 - RNA, 72 nt, Homo sapiens
gaagcccaccagagagcgcggcgggagcgaggccgccgcgcaagaacccccgaggccagcacccagaccaca

SEQ ID NO: 227221 - RNA, 70 nt, Homo sapiens
aaaaaaagaacgcagccacccaggcaagacagaacacgccggagagaggccgacacgaaaaaagggaacc

SEQ ID NO: 227222 - RNA, 80 nt, Homo sapiens
ggaaccaaagaagccaagaagcagccgccaggggacaaaggagccaggacaaggccacaggccaacgacaacgacaagcg

SEQ ID NO: 227223 - RNA, 78 nt, Homo sapiens
aggcaagccgccaaccccgaacacgggcaaggggcccaagagcgggggagagagaaggggaggcggaagccacaaacg

SEQ ID NO: 227224 - RNA, 79 nt, Homo sapiens
caccgggacggaccgagaccggaccgagagcggaccgagagcgcgaaacgcacgagaagagcaaggccgggccgcaggg

SEQ ID NO: 227225 - RNA, 55 nt, Homo sapiens
ggcaacagaaagagcaacagcagggcaacaggccaagccgacgccagcgggcgcc

SEQ ID NO: 227226 - RNA, 82 nt, Homo sapiens
cgggaaaaggggcacaggagccaagaggggcggggaccgccgccgggaaggaagggccaggccgcaccgggcggggaagaga

SEQ ID NO: 227227 - RNA, 81 nt, Homo sapiens
ggcgaacaggaacggagccaaccgcccaggaaggacaaagacaaagaaacagccggaaaagcacgagcacaagacgaaaac

SEQ ID NO: 227228 - RNA, 73 nt, Homo sapiens
gccagaaggaagaggcggacggaggagcaggcgagaagagaaggggccaaggagaccgcacgccggacggagc

SEQ ID NO: 227229 - RNA, 84 nt, Homo sapiens
gcccgaaagaagcggacggagcccagccgaagccccggaggccccgaacggagaggacgagggcggcgacggcccagaggccag

SEQ ID NO: 227230 - RNA, 77 nt, Homo sapiens
accaacccgaccgcccccagaggccgggccgcacccccgaccagagaagacacacaacaaccccacggagccccacc

SEQ ID NO: 227231 - RNA, 69 nt, Homo sapiens
cccagggccggaaaagccaacgccggcgaagagagacaaccagccacccagggaaaaaccccagccggg

SEQ ID NO: 227232 - RNA, 76 nt, Homo sapiens
agggagcgcgagcgaccgaggggagcggagcgggacggcaaccccgcacaaacccagcgaacaacggaggaggacc

SEQ ID NO: 227233 - RNA, 78 nt, Homo sapiens
gcagaagaaaccagccgaaccagggccaccgcgcaagcggagccggagcgaggcgggggaggcagcagaagcccgccc

SEQ ID NO: 227234 - RNA, 72 nt, Homo sapiens
acgggagaggggccgaaccggaagggcggaggccccggcggcagcacaggaaagagaggagaggagcgccgg

SEQ ID NO: 227235 - RNA, 88 nt, Homo sapiens
ccgcgcgcgcagccgacgcgggaagaagcgggcgcgggcaggacaacccaaaaggagacaggagaagaaccaagcgggcaaaggaagc

SEQ ID NO: 227236 - RNA, 53 nt, Homo sapiens
cgcaggcgggcgagagagcacaacggcaagcggagaagagcaaggccgaaccg

SEQ ID NO: 227237 - RNA, 67 nt, Homo sapiens
gaggaggcacgcgcagcggccggaaagaaaggggcacaggacaaacaagagagccgccggcccaggc

SEQ ID NO: 227238 - RNA, 32 nt, Homo sapiens
gaccaggagcaaacagaaggcgacgccaggag

SEQ ID NO: 227239 - RNA, 69 nt, Homo sapiens
gacgagggcaacgaccagccggggacaaccggccaccaaagggggaagaggaaacaagcccaggcgacg

SEQ ID NO: 227240 - RNA, 80 nt, Homo sapiens
gaacaacaaacggcacggcacgaaggcacgcagccagaggggccagaagagagaggaggcacgccccacacagcaacgca

SEQ ID NO: 227241 - RNA, 62 nt, Homo sapiens
ccgagcccagccgaaggagaaggggggagaaaagaaagccagaaggaaggaagcaacgaacc

SEQ ID NO: 227242 - RNA, 88 nt, Homo sapiens
cgaagcgggagagccgacgagcgcgcacaacgcaggaccggcgccgaaggcccgccagccacgacgagacaagccccaggagcaccac

SEQ ID NO: 227243 - RNA, 72 nt, Homo sapiens
gaacgccgcaccacgaaccagaccaagcggggcggaaagaagagaaccaacgaacaccgaagagagaagaag

SEQ ID NO: 227244 - RNA, 82 nt, Homo sapiens
cacacaagcggaagacaagcagaaagagaacacggacaccgacagagcacgggaagaaggaggccccaacccgagcacaaca

SEQ ID NO: 227245 - RNA, 72 nt, Homo sapiens
gacaggaccccggacgagcccggcgagggcaaagaggggagaaaaaagaagaagcaaggggaagaaagaagc

SEQ ID NO: 227246 - RNA, 81 nt, Homo sapiens
cgggcggacgacagaggagccgaaccacccacgccggcccaggcggaggcaggggccacagccaacccgaccccggacaag

SEQ ID NO: 227247 - RNA, 82 nt, Homo sapiens
caagcaggcaaccgaaacaggcaggccggaaggaccaggcagggagcaggacaggaagcagaaggccaggaaacccaccaga

SEQ ID NO: 227248 - RNA, 71 nt, Homo sapiens
cacggcgcgcggggacccaccaggagaccagggcgacgggaggcacaccgggagggccagacagcaaggaa

SEQ ID NO: 227249 - RNA, 74 nt, Homo sapiens
ccaaaaaggagcagccggccggacagagccggaagcccggacaagacgccgacagccacaccacccacccccac

SEQ ID NO: 227250 - RNA, 75 nt, Homo sapiens
cccagaagcgcagaacacaagacccacgcacaaaaacacaccgccaaacaggcaggagccgcggaggccggggga

SEQ ID NO: 227251 - RNA, 82 nt, Homo sapiens
gcggacgggcggcggggaagcgcagccgccccagccacaccccccaacacccccaagcgggaggaggggaggagcgacaagc

SEQ ID NO: 227252 - RNA, 79 nt, Homo sapiens
gaacaaaacgacaggagcacccaggaaggggcccagaagcagaaccaagaggggaagaggaccacacgcccagaggacc

SEQ ID NO: 227253 - RNA, 88 nt, Homo sapiens
acgacgcacgggggaccaagggcaaaggcacaaaggaaaaccgggagggggagacggcgcaagaacacgagcacgagggaaggagggc

SEQ ID NO: 227254 - RNA, 77 nt, Homo sapiens
cagaaacacaggaggggggaaaagcgaaaaagacagacaaggaacagaacaaaaaggaacgggagaagcaagagaga

SEQ ID NO: 227255 - RNA, 60 nt, Homo sapiens
cccgaaaccacaaggccgagcgccccacggcgaaccgggaaaaggcgcccacggaccccc

SEQ ID NO: 227256 - RNA, 63 nt, Homo sapiens
agacagaaagcggaaggaaagggccaaaaaggggggacgcgggcgagaagccgggcagcggaa

SEQ ID NO: 227257 - RNA, 57 nt, Homo sapiens
cggcccggggccgacccggcccgaggggaagcagccaggaagaagagagggcgaagg

SEQ ID NO: 227258 - RNA, 76 nt, Homo sapiens
acaacaggaaaccaagaagcacagcaaaagcacaggagacacacagaagacgaaagacgaaagaagaacaaaagaa

SEQ ID NO: 227259 - RNA, 74 nt, Homo sapiens
gagaacgaccaaccgggggccaagaggagacgacacgcaccaagccaggacggaggcgaaggcacaagaacacc

SEQ ID NO: 227260 - RNA, 78 nt, Homo sapiens
gacacgccaaaccgagcacagaaagagaccgcccgcccaacggcaccggcacggaccaccccaacaccgggggagaac

SEQ ID NO: 227261 - RNA, 71 nt, Homo sapiens
gcaccaggccaaagaaagagaacccccaaacaggaccccgaagaagggaacgacgcaaaagacgcagacgg

SEQ ID NO: 227262 - RNA, 69 nt, Homo sapiens
gccacgcagaacagccaccaagggaagcggcagacggcccagaccccaagaccccccagggcaggaaag

SEQ ID NO: 227263 - RNA, 62 nt, Homo sapiens
gccagaagcaggcgaaaacgaaaccgaggcggccagagacgcaccgcagaaagcccgggaaa

SEQ ID NO: 227264 - RNA, 79 nt, Homo sapiens
cgccaaggagacgccccacgaggcccaaaccgccaagacaaggcgagggaaaccaacacaagacggcagccaaagaaag

SEQ ID NO: 227265 - RNA, 71 nt, Homo sapiens
ccagagccgcacggacccggagaagaggcacccaaacaacaaaccgagggacaaggaccgcccaccggaca

SEQ ID NO: 227266 - RNA, 72 nt, Homo sapiens
gagcaagagagagaggcagccaagaaggacaggagaaacaggggccaaaaaaccaaaggagaagaaaaccac

SEQ ID NO: 227267 - RNA, 113 nt, Homo sapiens
cccagcgccaccaccacgccagccgcaccagccgcccaagccgcacagccgcggcggcagcagcaggagagagaaggagggggcagagcacggcaggcagaaggggccaaccc

SEQ ID NO: 227268 - RNA, 69 nt, Homo sapiens
gcaagccacagaaagcgacaccacagggggaagggggaaggcagcacgcaggagcagaagagcgaagaa

SEQ ID NO: 227269 - RNA, 81 nt, Homo sapiens
agaggggaaacagcggagacggaacgggagaagaggcaaagaaacaccaaggagagaacggaagaaagggccacgcaacag

SEQ ID NO: 227270 - RNA, 70 nt, Homo sapiens
ggacacaccgaaagccggaccccaagaacggggccacaccaaaaaaccggagagaacggagaaacgaggc

SEQ ID NO: 227271 - RNA, 89 nt, Homo sapiens
ggccaccccccacagccccacaccagcccccacagggcaggaagccgccgcccagccaggacggggaggagcagcagccaccgcacgag

SEQ ID NO: 227272 - RNA, 83 nt, Homo sapiens
ggccgcacacaagcggcgacccggcaccaggagacaaagccacaaaaacaccagaaaaaccaagcagaaaaggagcggcagca

SEQ ID NO: 227273 - RNA, 55 nt, Homo sapiens
acgcaagacaacaggagaggaaagcggaaagccaagggaggcagcacaccccccg

SEQ ID NO: 227274 - RNA, 65 nt, Homo sapiens
gcaaaaaagaaccccgccaaagccaaacgaaagcaacacagccggaagaacaacaaaagaaaacc

SEQ ID NO: 227275 - RNA, 64 nt, Homo sapiens
ggggaacgccacggacgggcgagggcagaaagggcccagccggcagagggaccggagaacgccg

SEQ ID NO: 227276 - RNA, 51 nt, Homo sapiens
gaggaacaaagacggagagcccagagacacagaagcagaacagacaaacag

SEQ ID NO: 227277 - RNA, 66 nt, Homo sapiens
cagagcgccccaggggggcgcccgccgcgcagaacgcggcagaacggaggcaggcagcacgagaca

SEQ ID NO: 227278 - RNA, 60 nt, Homo sapiens
ccccagcacacagccagagagccaggaagcaaggaggacagacaaagggagaggcgggcc

SEQ ID NO: 227279 - RNA, 79 nt, Homo sapiens
aagaggaggacacgacccagggcgcggggaagccacgagagaagaaagaaaaagaaaccgccagcccagagacacgaaa

SEQ ID NO: 227280 - RNA, 81 nt, Homo sapiens
aagcggagccacggagaagaaggccccgaccccccacccggccccaccccccgggaggggcaggaccagagaccccaaaag

SEQ ID NO: 227281 - RNA, 80 nt, Homo sapiens
acaaaggcaggggcgccagggcaccagacgggcgggaaagagaggcccgaccccgagcccaccagggccccggaaaggaa

SEQ ID NO: 227282 - RNA, 53 nt, Homo sapiens
cgaacagaggacagagcgcagggaaaacagagaagcccacgggcacggagacc

SEQ ID NO: 227283 - RNA, 73 nt, Homo sapiens
gggcggggccggcagcaccgcggccgcaggagggggggggggccaagcaccaaaggcaccggaggggaagcag

SEQ ID NO: 227284 - RNA, 46 nt, Homo sapiens
gcccagcgggaaagacaacccgaaggccgcaggcaggcaggcagaa

SEQ ID NO: 227285 - RNA, 75 nt, Homo sapiens
gcccgcagagaaccccccccaccgccccagaaagccccagacggaaagagcacgcgaaagcggcaccagacacag

SEQ ID NO: 227286 - RNA, 104 nt, Homo sapiens
cacaccgccccgaagcaaagaggaggaaggagggaccggcccccagcaagccccaggacggaccccacacaagaagaccgaagaaaaaaaaaagcaggaacagc

SEQ ID NO: 227287 - RNA, 50 nt, Homo sapiens
cgcgacccggagaggcagaagaaaggcgggcggaagaagcaagaaggccc

SEQ ID NO: 227288 - RNA, 74 nt, Homo sapiens
cacggggagacacagcggaagagaggaaggagacagagagagcaaagaaaccaggacacgagaaacaagaacac

SEQ ID NO: 227289 - RNA, 70 nt, Homo sapiens
ccgacggaccaccggaacggaaaaacaccacaggcagcagcagagaaccgggaacccaaccccggaacca

SEQ ID NO: 227290 - RNA, 40 nt, Homo sapiens
cagaaggacgcccaagacaccaccgagcagcgagcagcga

SEQ ID NO: 227291 - RNA, 50 nt, Homo sapiens
ggaggccaaaccagggaaggaagaaggaaaagcggaagcgcagacaagaa

SEQ ID NO: 227292 - RNA, 108 nt, Homo sapiens
cgagccgaagggaagccggagagggccgggacgggagagaaaagccgagcacggaaaccggagaagacacaccacagagcacccagagcgacgccgggaacaggccgg

SEQ ID NO: 227293 - RNA, 83 nt, Homo sapiens
ccccgccgacgcgccgcaccgccgcggcccggcccggccccgaggccggcaacggagacccaaggaagaccacggaacaagag

SEQ ID NO: 227294 - RNA, 67 nt, Homo sapiens
gaagccccggccgggccggccagcgccggaaaccaacaacgcaacgggcacaacaaccgaagcacca

SEQ ID NO: 227295 - RNA, 90 nt, Homo sapiens
ccggagagacaccccaccgaaagcgcgcagggccgccaggcacccggaaggcagccccccagacaggcacacaggagaagcacagcgcag

SEQ ID NO: 227296 - RNA, 68 nt, Homo sapiens
cacaaaccggccaaggcacaaaagcggcaaccaggccaggcccgacggccgagagaccaaggccagac

SEQ ID NO: 227297 - RNA, 84 nt, Homo sapiens
agccgggacccaggaccagccgccgccagaggagagcaccggccacggaaaagcaaagggaaagcaggcaggagggagagcgcc

SEQ ID NO: 227298 - RNA, 80 nt, Homo sapiens
ggccccccgcgacagacccagcccccgggcagaccggaaaggccaagcaaagaggaaaccccggaggaaggccagcagga

SEQ ID NO: 227299 - RNA, 62 nt, Homo sapiens
cggaggcgaggagaaggaggagcgggccgggaggccgccgccaggcccccagccggagaccc

SEQ ID NO: 227300 - RNA, 64 nt, Homo sapiens
gaacccggcaccgccccagggaacccacccaccacccagggcacaacaccacagccggaccgca

SEQ ID NO: 227301 - RNA, 78 nt, Homo sapiens
gagaaggcaaggcagcgcgaagccaggacccgaaaagccagcaagcgagaccaacaccaacacgagggcggcggaaaa

SEQ ID NO: 227302 - RNA, 70 nt, Homo sapiens
aaagaccaccacagacagggccagacaaaagagacaaacccgagagcaaaacaaccagccggaaccggac

SEQ ID NO: 227303 - RNA, 80 nt, Homo sapiens
ggagccagacacaaaacgcagccgcgaacgcggccgggaggcagagcgaggcaccggcgccacaaggcaacacgcccacc

SEQ ID NO: 227304 - RNA, 67 nt, Homo sapiens
caacagcccgacaaccaggaaaaccaggagaaaaggaacgagaccccggggaaagaggagaacaagg

SEQ ID NO: 227305 - RNA, 79 nt, Homo sapiens
cggagcaaacacggcagcacacgaaccgccgccgacccgcgcagcggggagaagaccgcgccacgcccgaggaagagga

SEQ ID NO: 227306 - RNA, 69 nt, Homo sapiens
gaagaggggcaaaccgcgcgcaggcagaagaaggagccagcagagcgccaggggcagccaccacagcac

SEQ ID NO: 227307 - RNA, 70 nt, Homo sapiens
gcgcgccacgcgggagcgagaccggagcgccagggccacggcccaccacccgaccaggagagaccaggag

SEQ ID NO: 227308 - RNA, 74 nt, Homo sapiens
ggggacaaaaccccgaaaaaggcgaaacaggaacacgaaagaggaaaaacgcacaagaaaccgaagccaaggag

SEQ ID NO: 227309 - RNA, 35 nt, Homo sapiens
aaacacccagaaacaagaggccaaagagcacaggg

SEQ ID NO: 227310 - RNA, 110 nt, Homo sapiens
agaaaagaagaaaggaggagggcagaaggggacagggaaaagaaagagaccaaagaagcacaaagacggcgaagaaacaggaagaaaagagggaaacaaagcaaggaccc

SEQ ID NO: 227311 - RNA, 79 nt, Homo sapiens
gcggaacgcagcccaacagaaggaagcaaccagcaggccacggagaacgcccgaaaagcaagcggaagaggcgcgcgaa

SEQ ID NO: 227312 - RNA, 71 nt, Homo sapiens
gcgaaaaccgaggagccacaacaaaagacagaggacgggcacggagccgcagccaaaacagcagcaaacag

SEQ ID NO: 227313 - RNA, 71 nt, Homo sapiens
agacaagagccagacaaacggggcaaccacaacacccaggcgaaggcggacagagcccgaggagagacagg

SEQ ID NO: 227314 - RNA, 65 nt, Homo sapiens
agagcccgaccaacccgcaaaagagagggacgggaccggaaaaaaggcacaacccaagacaagca

SEQ ID NO: 227315 - RNA, 83 nt, Homo sapiens
ccggcgcccgcgcccgggccgcgggagcggagcccccgggaccaggacaccaggggggaaaaaccacacaggcaaagaacgcg

SEQ ID NO: 227316 - RNA, 66 nt, Homo sapiens
gagagagccgggagcccgagcgaggccccagcaggcagcggaaccggagaacagccgcccgccaag

SEQ ID NO: 227317 - RNA, 67 nt, Homo sapiens
caaggcaacgcggggggccggggaccggacccccggcggccgcgagagaagccccgagcgaaaccac

SEQ ID NO: 227318 - RNA, 76 nt, Homo sapiens
ccagacgggaacgggagacaagcgcagcgagggggagccccccagacccgaaaggagacaagaggacagccgcacg

SEQ ID NO: 227319 - RNA, 60 nt, Homo sapiens
gggaggccgaggcgggcagacaccgaggacaggaccgggggcacccacacgagcaaaagg

SEQ ID NO: 227320 - RNA, 64 nt, Homo sapiens
ccccgcagccgcccgggcccgccgaaggagagaaccaggagaccgaagcaaccaacaagcgagg

SEQ ID NO: 227321 - RNA, 66 nt, Homo sapiens
ggaggcaccgcgagagagccggagggcaggaagccgccaccaggaaccccaaagaaggagagacaa

SEQ ID NO: 227322 - RNA, 60 nt, Homo sapiens
cgaaagagaggacaaaagaacgacgacgccgggaaacggccagcaaggacaaaaaagaga

SEQ ID NO: 227323 - RNA, 124 nt, Homo sapiens
agaagaccaccaccacagccacaggggaacccacgcacaccgcgcccagcagccgcaggcccccggccacacggccacaccagagcccacagcagccgccacagggaagccaaggacagccacc

SEQ ID NO: 227324 - RNA, 89 nt, Homo sapiens
gagccgccaccggacaccaaccagaagagaagaccgcagccacgagaaagagcaggaaaaacgaggcaaagaggaacgggaaaacagcg

SEQ ID NO: 227325 - RNA, 67 nt, Homo sapiens
acagcacacccaggacaacgaaaggccagcaccaggaaacaacggacacccccgggaacccaccaaa

SEQ ID NO: 227326 - RNA, 60 nt, Homo sapiens
caagaaggaccagccacaccaaggcaagagcacccgcggccaggcggcaacagccagcag

SEQ ID NO: 227327 - RNA, 56 nt, Homo sapiens
accacgagcaccgaagagcgcgccgcccccgaagagccgggcacaaagccagcgag

SEQ ID NO: 227328 - RNA, 80 nt, Homo sapiens
accagaggccgccacaaccgccagacaaccggagccacgccccacgaccgccaggcagcgcccggaccacaggccaagcg

SEQ ID NO: 227329 - RNA, 81 nt, Homo sapiens
ggggccacaaagccccccggagacgcaaccaaggagaagacacccgggcgggaaaaaggagcaaagaaaggggaaagagaa

SEQ ID NO: 227330 - RNA, 91 nt, Homo sapiens
aggagaacgaaaaaaagagaaaccggggaaccacggacaacccagaggacaacgaaggcgggcggagaacggaaaagcaccaggaagcaga

SEQ ID NO: 227331 - RNA, 76 nt, Homo sapiens
ccacgggccagggcggagaacagaccgaggaagccgccgacagacccagcagaaggaaagaccccacccaaccccc

SEQ ID NO: 227332 - RNA, 71 nt, Homo sapiens
gcgcggagggccgagggagggccgagccagccgcggccggaggagcccccaggccgaggcacaggaggaag

SEQ ID NO: 227333 - RNA, 91 nt, Homo sapiens
aagagaccaagaaacgccaagccaaccccaggagagcgggaagacgaggccgggggaaggccaggccacagagagaagaaggagcccaagg

SEQ ID NO: 227334 - RNA, 76 nt, Homo sapiens
ccgggcaggagagacaacaaagcgcaaccaagggcccccgagcgcgccccaagagcaaaagaagccagcccaagga

SEQ ID NO: 227335 - RNA, 70 nt, Homo sapiens
ggagaaggaccaagaaccagggaaagcaggcaggagggagagcgccgaagaaccaccccccgccccgggc

SEQ ID NO: 227336 - RNA, 50 nt, Homo sapiens
aaaagggaagggccagcgggaggagcccaaaggggcaggacaagacagaa

SEQ ID NO: 227337 - RNA, 81 nt, Homo sapiens
gagcccccgaggccccagaacaccgagggggcccggaggggcgcccaggccgagcacccaggcgcagacagcgggcaggcc

SEQ ID NO: 227338 - RNA, 73 nt, Homo sapiens
gaaaccggcacggccgcccgagcggaaaaggaccaccggccgccaggcccaacaaggagaaagcggagaggga

SEQ ID NO: 227339 - RNA, 75 nt, Homo sapiens
gcagcggaaacaacaacaggcaaaaagaaaagcccgaaggcaaaaggggggcgcccaagagcacacaaccaggcc

SEQ ID NO: 227340 - RNA, 80 nt, Homo sapiens
ggaggcggcgcgaaggagaacggagaggaagaacgagccgcacaggcaggagacgcaaaacacgggaggaaggaggcagg

SEQ ID NO: 227341 - RNA, 74 nt, Homo sapiens
gaaggaccaagaaccagagcagagaaagggggaggcggacccggcaacacgaaccggaaagccaaggaagagcc

SEQ ID NO: 227342 - RNA, 83 nt, Homo sapiens
ccccgccggcaccagccgcccaggcgcagagcgggcccgcggaccagccagggcacggccgggacgcaacacaagagaggacg

SEQ ID NO: 227343 - RNA, 55 nt, Homo sapiens
gaacagcggcccagggcaggcaagcaaaaagcagaagaacccagaaaagaaggga

SEQ ID NO: 227344 - RNA, 77 nt, Homo sapiens
gcagaaagggcagacacaggcacaccaagggggcacccacagccagcaggcaggaaaggcaccaaaccgggaggaac

SEQ ID NO: 227345 - RNA, 66 nt, Homo sapiens
gggaaaaaagagcgggagccggcgagaacgccgggagggaagaaagcaaaggagaaagaggacgca

SEQ ID NO: 227346 - RNA, 79 nt, Homo sapiens
ggcccaaaggccgccaggccgcagacgcgaaggaacggcaaaggaaagaagggacgaggagggagaagacgaggagagc

SEQ ID NO: 227347 - RNA, 70 nt, Homo sapiens
agaaagggacccaggaagagaagaaagaggacaacagacgggggggccgcccgcccaaggcaggaagagg

SEQ ID NO: 227348 - RNA, 78 nt, Homo sapiens
gaacaggaaaccggcccggcggaaggccaaagacagacgggcccagcacacagggacaacgccaggggcacacggggc

SEQ ID NO: 227349 - RNA, 73 nt, Homo sapiens
acacccacaccaaaaagggaagccagaacaggccagccaaggcacagccgaaaggagagaagcccaagaagac

SEQ ID NO: 227350 - RNA, 83 nt, Homo sapiens
accgagcacggggagggacgagacccagcccggacgccggagaagggggaccacagaccgaaggaggcagagaaggcgcaggg

SEQ ID NO: 227351 - RNA, 40 nt, Homo sapiens
gaggaggagaccgagcgccaaaacgaagacagacagcagc

SEQ ID NO: 227352 - RNA, 77 nt, Homo sapiens
ccaggggaggcgaccagagagcggcggaaaggaaagcccgacagaagcaccgagacccaagaaagacgcgacccggg

SEQ ID NO: 227353 - RNA, 72 nt, Homo sapiens
agaacccagcccacaccacaacacagaacgaagagaagaagcgagaccccaccaacaacgaacgcggcaggc

SEQ ID NO: 227354 - RNA, 72 nt, Homo sapiens
caacccaaaccaaggcccaggaaaagagcacagaggaagaaaaacacggaacaggggcgagagaacggccag

SEQ ID NO: 227355 - RNA, 78 nt, Homo sapiens
cagcccaggagccagaggcgcacgggaagacccaccggggagagggcggccggcaggggacggagaggccgggccagc

SEQ ID NO: 227356 - RNA, 86 nt, Homo sapiens
gggagcggaaacagcggcagccagagagggaaccggggcaaggagacaagaaaagaagaaaggaaacaccagaaagacagcgcagc

SEQ ID NO: 227357 - RNA, 78 nt, Homo sapiens
gccgcacccggccgcccggcgccccggggacgccgccccccggccgcagcccgacgccaggagaccccaagcgacgac

SEQ ID NO: 227358 - RNA, 38 nt, Homo sapiens
ggcaggccgcccccggcaagggacgggagcagcggaag

SEQ ID NO: 227359 - RNA, 74 nt, Homo sapiens
gggcgcggggaaccaggcgccccgagagggcgggaaggaagagccaaccgcgcaacgaaccgcacccccccaac

SEQ ID NO: 227360 - RNA, 79 nt, Homo sapiens
gcgcgggagcaagccgacaacaccggccaaaaagggccaaggcccaccccaggcaggcgggccgggaaacagcaggaca

SEQ ID NO: 227361 - RNA, 71 nt, Homo sapiens
gcccacgagccaagcccaggaggagcacggcgaaccgcaaacagaagagggagccagaagaacaaggaaag

SEQ ID NO: 227362 - RNA, 76 nt, Homo sapiens
aaaagcaaacggaggaggaaaaacacacaacgaaaacagacgaggaagaccggcaacagagaccgagacacaagaa

SEQ ID NO: 227363 - RNA, 67 nt, Homo sapiens
gccagggcggggagcacagcacagcaaggacagcagccagaaagcagcgggggacgaagaagacccc

SEQ ID NO: 227364 - RNA, 73 nt, Homo sapiens
ggaaacagacccaagcggccgggcccggcagccccgacgcagccgggaaggagacacccgccaggacacaaaa

SEQ ID NO: 227365 - RNA, 59 nt, Homo sapiens
cgaacgccgcggccaaggagccgccaaagccagacgacgcccgcaccgggcccccaccc

SEQ ID NO: 227366 - RNA, 68 nt, Homo sapiens
aggaccaagaaccagggaaaagaccgaggcaaggaacggagcaaggaaaggaacagcgcgcagcaaca

SEQ ID NO: 227367 - RNA, 43 nt, Homo sapiens
gaaccggccccccacagccacgcaggagacagacccagcacgg

SEQ ID NO: 227368 - RNA, 73 nt, Homo sapiens
gggacccagcccaggcggcgcggacggggcgggcagaaaaaaccagcaggccaggaacacaacccaccgacag

SEQ ID NO: 227369 - RNA, 36 nt, Homo sapiens
agaaacaggcaagagggcgggagcccgagccccaca

SEQ ID NO: 227370 - RNA, 60 nt, Homo sapiens
ccgagagccggggaccccaaggagagagcagagacccagacagacagcgcggcaggagca

SEQ ID NO: 227371 - RNA, 73 nt, Homo sapiens
agaaacggaagcacaagaccgcccggggaacagggcagcaagcgacagagcccagaggcccggaaggcgcaaa

SEQ ID NO: 227372 - RNA, 75 nt, Homo sapiens
gaagcgcaagcagacaggcaaccggccccgcaaagccaaccgcaaccgccagggaagaccaacccgaggagaaga

SEQ ID NO: 227373 - RNA, 74 nt, Homo sapiens
gagcaaacaggaaaacaaggggaggagacgcaagcaacaaggcaaggaaagagaaaggagaccacaagaccccg

SEQ ID NO: 227374 - RNA, 111 nt, Homo sapiens
gaccagcacacggggccgggagacaacgccaacccaaggaaggaccaaacggagaaccaggcagaggggaggagacacgaagcgacgcagagccagaagggaggcagggaa

SEQ ID NO: 227375 - RNA, 59 nt, Homo sapiens
ccggccgggccggccagcgccggaaaccaacaagaacacaagggcaagacagccgggaa

SEQ ID NO: 227376 - RNA, 80 nt, Homo sapiens
gagccgccgcacaccggccccacgcacgacgagagggacagcacgggacaagaacacagccaggagaacaaggacccccg

SEQ ID NO: 227377 - RNA, 72 nt, Homo sapiens
aaccaaagggaaggcagcacgggggcagggcaaaacacacagcgaggcgagaggccagcgaacgaacacgaa

SEQ ID NO: 227378 - RNA, 80 nt, Homo sapiens
agcaccaccagcaggcacaggccgaaccggggcagcgcgcaaggaggagcagcgagagcggccagcacgggcggcgaccc

SEQ ID NO: 227379 - RNA, 72 nt, Homo sapiens
gaaaacccgacccccaggcggcgcccagacccacacccagcaagcgcaggggagaaacagccggaccgaggg

SEQ ID NO: 227380 - RNA, 74 nt, Homo sapiens
ggagcggcacagccagaagaccgaagcgcgacggaagggaaagacaaggagccgggccgagaaaccgaaccaga

SEQ ID NO: 227381 - RNA, 68 nt, Homo sapiens
ggaggaagaaggccagacggaacagcgaagggcgaagcagcaaaacacacagccccccggagaaaaga

SEQ ID NO: 227382 - RNA, 70 nt, Homo sapiens
cacggggcccagcccggggccggcgcagggcggaaggacaacagcccgacaaccaggagcgcacaccaga

SEQ ID NO: 227383 - RNA, 109 nt, Homo sapiens
aggaaccgaaccaggaccaggccccaagcccgaggcccagaggaggagaccccccaggcgccccgccgccgcacagcccccaagacgaaaaacccccgcacggaagaaa

SEQ ID NO: 227384 - RNA, 73 nt, Homo sapiens
ccgagggaggcgacgggggcgaagagcgcgccgcccccgcccacccaggagcaggaacacaaacaccgaagca

SEQ ID NO: 227385 - RNA, 87 nt, Homo sapiens
aacaagaaaaaaagaagaagaaaggagacagagcaacaacaaggacagagcgggagccaccagcgccaaagggaagccaggagcccg

SEQ ID NO: 227386 - RNA, 72 nt, Homo sapiens
gcagacggaaggagggaaaagcaacacaagagaggacgcacacccaccccaaaacaacaagcaagcagaaaa

SEQ ID NO: 227387 - RNA, 85 nt, Homo sapiens
cccgggccccgagcgcccgaacagagggaacaggcacgccccacccgccagccgagcccccgacgcagcacaaagcccccacgga

SEQ ID NO: 227388 - RNA, 69 nt, Homo sapiens
agcagaaaacaaggagaagcacggaccaaagcagcgcaacccagccacagggaccccaccacgccggga

SEQ ID NO: 227389 - RNA, 72 nt, Homo sapiens
caacaggaacagggcagacgagcggaggacacccaacccgggcccaaaggacgccaggcaaaagaaggcacg

SEQ ID NO: 227390 - RNA, 78 nt, Homo sapiens
gccaaacaagaaaaacaaagccaaggaaaccccaacacagagccaagcgccaagagaaacaagagagcgagggagagc

SEQ ID NO: 227391 - RNA, 74 nt, Homo sapiens
agcaaaggaagcagaaaaggggcggaacgggacagagaaaccgggcacggagccacagagcaaagacgccccag

SEQ ID NO: 227392 - RNA, 70 nt, Homo sapiens
gcaagagccgccgcagaagcaaccaacgagacaagagggcacggacaagacggacagaaacgaacagcgg

SEQ ID NO: 227393 - RNA, 85 nt, Homo sapiens
cagcagccagccggcccgaggacaccgacaccagcagggccccccgggccggccgccggacgacacagcccgccgccaggcacgg

SEQ ID NO: 227394 - RNA, 68 nt, Homo sapiens
cccccgccgcgacggcacaagaccccacccaaaagaccaacggcagagcgagagcagccggaccagcg

SEQ ID NO: 227395 - RNA, 88 nt, Homo sapiens
accaaaaaagacaaggaaaaggacaaggggaaaggaaggggccccagggcgcagacaaggcagggggcaaagaaaaaggagagaaaaa

SEQ ID NO: 227396 - RNA, 72 nt, Homo sapiens
ggggagagcaaaccaccaaaggggcaacgcgaccgaagggaacgacaaccaagcccacaacggagccaccac

SEQ ID NO: 227397 - RNA, 107 nt, Homo sapiens
cgagcaacaccgagagaggaggagccagacgacaagcacacacaggcgcgaaacggaaaaagagaagaacggcacacaccccccagaacccgaagggaaccaaagag

SEQ ID NO: 227398 - RNA, 70 nt, Homo sapiens
gcccggcggagcagaggaaccacacgcgacagacggaccacgcaaccagcgcccaaaccccgcaaaacga

SEQ ID NO: 227399 - RNA, 68 nt, Homo sapiens
ggagcagcaagaaccgcgcgcaaaccaccccaaaccaccagcgaagaaggaccgcggcaagcgggagc

SEQ ID NO: 227400 - RNA, 78 nt, Homo sapiens
ggaccacgaacaaagagagagcagcacccggaaagagaaaccccaagccaaagggccaacagagagagaaacacagaa

SEQ ID NO: 227401 - RNA, 95 nt, Homo sapiens
ccagccgccccccagcggacccccaaccggccgccgcccggcgcgcgcaaaggcgcagccgagccaaagaaaaagccggccagggcggaaaaagg

SEQ ID NO: 227402 - RNA, 77 nt, Homo sapiens
cagaagccagagcgaggacgccggcagggggcacccgaggaggaagagggcagggcccacggaaagaagggaaaccc

SEQ ID NO: 227403 - RNA, 76 nt, Homo sapiens
agggagaccacaaaagagcagaggaggaacaccaggcacaagcaagaggcagaaagaaagacaagggcgcacaggg

SEQ ID NO: 227404 - RNA, 83 nt, Homo sapiens
gagggaacccagagagacccagccccagccccaagggcagagggccccccggagccccccgagaagcggaggagacaagaagg

SEQ ID NO: 227405 - RNA, 42 nt, Homo sapiens
agaccagagagaagcaaggacggaagagaaagagacaacaag

SEQ ID NO: 227406 - RNA, 72 nt, Homo sapiens
ccgaagggaccagaacggaggaggagccccccaagacaaaaccgacccacacgggaaaggaacggagcgaac

SEQ ID NO: 227407 - RNA, 78 nt, Homo sapiens
ggcagccgagcaccgagccagcccaggaaaaggagagggcccccagcagaaggcagaacagaaccgagccagaagcgg

SEQ ID NO: 227408 - RNA, 74 nt, Homo sapiens
gagcccacggcgggcgcaaagggaaaaggacacggaggcaagcgaaaagaaacaagacagaacgcaaagaagcg

SEQ ID NO: 227409 - RNA, 53 nt, Homo sapiens
accaagaaccagacccagagcaggacggacaccgaaccggcggcgaggcccag

SEQ ID NO: 227410 - RNA, 108 nt, Homo sapiens
cgaaaagggagcccgagaacgggagaagcggaccaggcacgagaggcgggggggagcggcgaggaagagcgcagggacagccgacaagccaacaggcagcggagagcg

SEQ ID NO: 227411 - RNA, 58 nt, Homo sapiens
aaagaacgcaaagaggaagaacgcgccagagcaaaagggacacagacagcagaccaca

SEQ ID NO: 227412 - RNA, 76 nt, Homo sapiens
gccgccccagaacgcagacagaggagcggacccccgcggcgcgcagcccagcagggccgcaccggcgcagcgcccg

SEQ ID NO: 227413 - RNA, 74 nt, Homo sapiens
acacggacacccaagacaaaggccacagccgcgaagacgcccaagccgagccacaccacgagaagcacacaacc

SEQ ID NO: 227414 - RNA, 65 nt, Homo sapiens
acacagaagcggaagcgagccacgaaacacaaggaaagcgacgacgcaaagcaccacaggggaaa

SEQ ID NO: 227415 - RNA, 54 nt, Homo sapiens
acaagagaaacaccaaacaaggccaaaacagaagaggcaaagcccagccacagc

SEQ ID NO: 227416 - RNA, 62 nt, Homo sapiens
ggcaaagagacaaggagagaagaaccaaagaagcaaaacacgaggcaagaggccaaacagag

SEQ ID NO: 227417 - RNA, 68 nt, Homo sapiens
ggccagagaaaggaggcaggggcgaagccgaagacccaagcaaagcacgacaaggaaaccagacagag

SEQ ID NO: 227418 - RNA, 80 nt, Homo sapiens
gagaaacacacagaccagaggggggacggggaggaacacccagcaaaaccccggacaagaaagccagagaaacgacacca

SEQ ID NO: 227419 - RNA, 74 nt, Homo sapiens
agcacaccgggaaacggacacagaacaggcacagcccagacagcaaaaagagaaaaggcaaagaagagaacacc

SEQ ID NO: 227420 - RNA, 79 nt, Homo sapiens
gacagacagaaagcacagagccacacgagaggaacccgcaaaaagccagccacacgcacagacgccgggaccggaaagc

SEQ ID NO: 227421 - RNA, 38 nt, Homo sapiens
cacccaggaaacagcgcaagggcggggaacagaccagg

SEQ ID NO: 227422 - RNA, 36 nt, Homo sapiens
gacggcaaccagggcaaccgaggagcgcccgcccag

SEQ ID NO: 227423 - RNA, 66 nt, Homo sapiens
cagccacaggcggcggaacggaacagaagcaagggagcccggacgacagcgcaaacagcaaaaccc

SEQ ID NO: 227424 - RNA, 72 nt, Homo sapiens
aggggacaccagccgaagaagcacagagaacgcgcacgcaacaacagcagaacccaaggaaagaccggaaag

SEQ ID NO: 227425 - RNA, 63 nt, Homo sapiens
gaaaggacagggagagaagccaagaaagacaggagaaaagaaagccagaaggaaggaagcaac

SEQ ID NO: 227426 - RNA, 56 nt, Homo sapiens
gcagacgcgaaggaacggcaaagggccaaccaccacccccaccgcccgagaacacc

SEQ ID NO: 227427 - RNA, 75 nt, Homo sapiens
caaaagcgaacccaggaggagaacacgcacccaagggacgggcggaggggcccggcccccgacagacgagacacg

SEQ ID NO: 227428 - RNA, 56 nt, Homo sapiens
cgcaacccccaaaggaaccgagaagcacaaagcgagagaagaagagaagagagccc

SEQ ID NO: 227429 - RNA, 58 nt, Homo sapiens
cgcgcggcgacagcggcagcccgcacagcccgacaccaaggcaggaggcaggaggcac

SEQ ID NO: 227430 - RNA, 67 nt, Homo sapiens
ccaggagcgccacgcgcggaaggcagcgcccagcagcgcagacggggacagaagacccacgccgagc

SEQ ID NO: 227431 - RNA, 76 nt, Homo sapiens
gagaaaggagacccgacgcaacgcggagcgcaaggcgagggacgagaacgagacacgaagacgagagaagaagaag

SEQ ID NO: 227432 - RNA, 77 nt, Homo sapiens
cacagcacaagaggggagaaaaccagaggcaaaagcagaccggaaaacccaccggcaagaccacacccgaggggagc

SEQ ID NO: 227433 - RNA, 79 nt, Homo sapiens
ggaaagacagaacaacacccaaaaaaggaaggcaacaggaagacagccaagagcccgaccagggaagggaaaccgcacg

SEQ ID NO: 227434 - RNA, 84 nt, Homo sapiens
ccacccggccgcagcaaagccggcgcggaagaggccggcggcgggacggccccacgggacccgccccgaccacagcagcgacac

SEQ ID NO: 227435 - RNA, 77 nt, Homo sapiens
ggggaagacggacacaaccgccgccagagaggggaaagaccacaggcggagcaccccagaaaaacgcaagggaaaag

SEQ ID NO: 227436 - RNA, 77 nt, Homo sapiens
aggcaggcggagccgaccgggccagcagacagagccaaggccaggccagcgacagagccggacacagaagaggagaa

SEQ ID NO: 227437 - RNA, 77 nt, Homo sapiens
acccaccaaaccaacacccagccaaggggcaggagagaagggagcgaacacagagacagcgccgcgcaagagcagga

SEQ ID NO: 227438 - RNA, 74 nt, Homo sapiens
accgagaagcgaagacaaggcgacgccaagagggggaggggagcggaggaagacaccgagcccccgcagagcgc

SEQ ID NO: 227439 - RNA, 82 nt, Homo sapiens
cgccccacgagcgggcgcgcggagccgagcgcccaagcgcgagaagcaggaccaaaggaaacaaacacccaaaaaccggagg

SEQ ID NO: 227440 - RNA, 70 nt, Homo sapiens
gcgcgcgggaagaggcggaacaggcaccaagccggcggggcgggggcgggaagaagcccgccgccaccac

SEQ ID NO: 227441 - RNA, 73 nt, Homo sapiens
ggccgccacgcccgggccgcccggccaggaaccaccgaaaacgaaaaaaaaaggagagagacagaaaaagaac

SEQ ID NO: 227442 - RNA, 77 nt, Homo sapiens
aagccgacaaggcgcaagcgaaaacagaccgcgagcccagagcagaagaaccaggacaagaacgcgccacaaagacg

SEQ ID NO: 227443 - RNA, 109 nt, Homo sapiens
ggaccaggccccaagcccgaggcccagaggaggaggggaccgggcaaggggccgaagaagacaagaggcacacagagacagaccaacggcagccaggcagccccagagg

SEQ ID NO: 227444 - RNA, 80 nt, Homo sapiens
aaagcgggcggaggcgggcggccagggcacggccaaacaacaaacgcagcacagccaaagcagcggaaccaacaaaaaca

SEQ ID NO: 227445 - RNA, 74 nt, Homo sapiens
ggcccaggaagagaacggaaggagaagaaaagggaaccggccgggcaccggaaagaaaaagacagaagcagcca

SEQ ID NO: 227446 - RNA, 74 nt, Homo sapiens
ccaacaccccgcagccggccgggccccccgggcaggagaccgagccacgaccaggccacaagcagagagacagc

SEQ ID NO: 227447 - RNA, 78 nt, Homo sapiens
acgggcaggaaggcagcgcacgacagcaaaagcggaagccgcagaaggaccggccagaagcaagccggagaacagaaa

SEQ ID NO: 227448 - RNA, 77 nt, Homo sapiens
gagggaaaacccacggggggggccccagaagaaaaaagagcaagaccggccagcaagccaggcggcagacaaacgga

SEQ ID NO: 227449 - RNA, 77 nt, Homo sapiens
ggcccccgccacgcccaaacgcgaagcagccccgcgaggaccacccgacgccaggaagccggacgcgcagggaaaac

SEQ ID NO: 227450 - RNA, 76 nt, Homo sapiens
caccggggggccgccgggcgcggcaaggagcaggcccagaaagaacagacaaagaccgaaaaacacgaggaaagca

SEQ ID NO: 227451 - RNA, 71 nt, Homo sapiens
acccagacaggaggagggagacagacccagaaagacacacagaaaaagcaaaggagaaagagaaaaaaaga

SEQ ID NO: 227452 - RNA, 63 nt, Homo sapiens
gcacgcaggccaggggccggccagcacagagagagggaaacagcacaacggaacaacagggaa

SEQ ID NO: 227453 - RNA, 82 nt, Homo sapiens
gagggcaacacgggcaccggacccgccagaggcggggacggacagccaggaccgcgaggcgggcggccgccagggggcgacc

SEQ ID NO: 227454 - RNA, 82 nt, Homo sapiens
agacccccagggacggcaccagaaagggcggcgacggcggcgcgaggaccgaccgggcccgcggacgaagaaggcacccccc

SEQ ID NO: 227455 - RNA, 50 nt, Homo sapiens
aagaacaaccgcggacacggagaggaaggggacaaaggcgcagcaaaaaa

SEQ ID NO: 227456 - RNA, 73 nt, Homo sapiens
cgcgacgccggggcaccgcaggggaccgcgaagcggaagagagaaccaacccgggccaagcaaaggaccgaca

SEQ ID NO: 227457 - RNA, 82 nt, Homo sapiens
accagcggcacgcccaaggggaaggaagccgggcagggcagcgggggggaccagcagccggacaccagcagccgcaacggca

SEQ ID NO: 227458 - RNA, 38 nt, Homo sapiens
ggcggcgcggacggggcggggaccgacgaggagggcca

SEQ ID NO: 227459 - RNA, 78 nt, Homo sapiens
cccagccagccgggccccaggcgaacgcccaggcccagcgcagcagccacagcgagcgcgaagaaacaggaggagcca

SEQ ID NO: 227460 - RNA, 71 nt, Homo sapiens
caccaccagagaagcccccaccggccgggagacccaacagcgaagggaggagggaagacgaaaagcagaaa

SEQ ID NO: 227461 - RNA, 85 nt, Homo sapiens
ccggcccgaggacaccgacaccagcaggaacgcacaccagcaccagcccaccaaaccagcacgaccccggagcagaagaaggagc

SEQ ID NO: 227462 - RNA, 64 nt, Homo sapiens
cggaggcagggacgaaggcacaccacagcgcgaagagagaagggcacagaccaagacaacgaac

SEQ ID NO: 227463 - RNA, 70 nt, Homo sapiens
gaaagaccaaggaggcgcccaggaagaaagacacaggacaacgaacgaaacggccaagaacccaaagcaa

SEQ ID NO: 227464 - RNA, 73 nt, Homo sapiens
agaaaagcagaaaagcaaccgagagcacaaacaagggcaggccgaccaaccagaagcgaaacaacaagagaga

SEQ ID NO: 227465 - RNA, 80 nt, Homo sapiens
caggccgcagcgcccgagcgagcaccccccaacgggcaaaccccgcccagcagaagacgaccccgacgcaggccaggagc

SEQ ID NO: 227466 - RNA, 66 nt, Homo sapiens
gaaacgcaaaagaccaagaccagggggcccggcagcggcccgaccccgggaacgagcaggaacgga

SEQ ID NO: 227467 - RNA, 107 nt, Homo sapiens
ggaggggaaggcacggacgcaacacggaacagacgcaggagcacggaaaggaaaagccgacaaggcacgaggcgcggcgaccaccacagcagagcccggcgaaggag

SEQ ID NO: 227468 - RNA, 75 nt, Homo sapiens
accaagaaccagagaacacgagcgacccgaagacagccccaagaacagcagggacacaagaaagaacgaaaagca

SEQ ID NO: 227469 - RNA, 54 nt, Homo sapiens
cgccgcggcaagcgcggcggccgcacagcggacaagcaacgaggagaccgggca

SEQ ID NO: 227470 - RNA, 93 nt, Homo sapiens
cggacaccggcggccccaccagcagacgcagccgagacaccagcccgaaacaccaccaaggaccaggggaaggacgaggacaccgaagagcag

SEQ ID NO: 227471 - RNA, 73 nt, Homo sapiens
cccagagacagcccaagcccagaagggaggagaacaccagcccaagaagacggcagaacacccagcacgccca

SEQ ID NO: 227472 - RNA, 61 nt, Homo sapiens
cccggccaccagcaagccgggcgcagcaacggcacacagaggggagaccagacagaggaca

SEQ ID NO: 227473 - RNA, 73 nt, Homo sapiens
cgcaccaagagagaggagggaacggaaaaagcaacaaaacacaccaagaaaagggaaccgaagcggacaacag

SEQ ID NO: 227474 - RNA, 57 nt, Homo sapiens
cagcgcagccccggcgcccaccgcccaccgagccgggagacggacaaacagaaccaa

SEQ ID NO: 227475 - RNA, 82 nt, Homo sapiens
ccgggacccaggaccagccgccgccagaggagagcaccggccacggaaaagcaaagggggaggaacacgaccggaagacagg

SEQ ID NO: 227476 - RNA, 44 nt, Homo sapiens
acagggcaaaggacagaccagagcagaagccggaaggccgcgaa

SEQ ID NO: 227477 - RNA, 73 nt, Homo sapiens
cggacacgggagagaggccgggcgagcagcaggagcaccggcccaagaaacagacaacacggggaagagacga

SEQ ID NO: 227478 - RNA, 78 nt, Homo sapiens
gggccgcgaaggacaaacaggaacgaaccagaaaaccggagagccccagagcaacacaccacgcacccagcgcccgga

SEQ ID NO: 227479 - RNA, 62 nt, Homo sapiens
ccgaccccccacccgccgccgccaggagcacagagaggagcaaaaaaggaacaagacagaaa

SEQ ID NO: 227480 - RNA, 88 nt, Homo sapiens
gagggcgcagcgcggcgcggcagggacgcgggcgaccacccggcgcaggagcggccgcgcggcccagaagaagagagccacaagcgaa

SEQ ID NO: 227481 - RNA, 75 nt, Homo sapiens
aagcagaaccagcagcaaaaggggcaaggggaaaagacagacgaagaacggaagcgccccagaggagagggcgga

SEQ ID NO: 227482 - RNA, 70 nt, Homo sapiens
gagcggccaaaaggaagagaacaccaagagaaagcagcagcacacaaggaaagggggaaaggaagaaaag

SEQ ID NO: 227483 - RNA, 81 nt, Homo sapiens
aggagcagacaagaccccaacaacaaggcccccaagacaagaaggccagcggagaacagccgagggaggggaggcccgcac

SEQ ID NO: 227484 - RNA, 68 nt, Homo sapiens
ggaccgggggaagggagaagaccaaagggaagagaaacgcaaccgggagaagacacgggccaaagacc

SEQ ID NO: 227485 - RNA, 81 nt, Homo sapiens
cccgcccggaaaggggacaccggacaccaggggggaaaaaccacacaggcaaagaacgcgcaaaacaggacgaaaacaaag

SEQ ID NO: 227486 - RNA, 55 nt, Homo sapiens
cccacccccgagcccagcaccgcgggaaggcaaaggggcgagagaagccccagcg

SEQ ID NO: 227487 - RNA, 85 nt, Homo sapiens
gggccaaccagcgaagagcgacaagccgcggcagccgcggaccaccgccgccaggacagaagcgaaggggacagggggagaaccg

SEQ ID NO: 227488 - RNA, 85 nt, Homo sapiens
cgagagcccggacacaagacccgcgcggccacgaccgggaggggccacacgcagggaacgagcgcagaggacaagacccacaaag

SEQ ID NO: 227489 - RNA, 61 nt, Homo sapiens
ggacaagggaccagagaggcagggagaccccaaggcaaaaccaccacacgacaaaaaccgg

SEQ ID NO: 227490 - RNA, 72 nt, Homo sapiens
agcccaaagaccgcagggaagggcaagcggaaggacagccgagcagaacccagaaaacacgaggcacaggcc

SEQ ID NO: 227491 - RNA, 62 nt, Homo sapiens
aagaagaggaggagaggagccaggagaggcaggaaaggaagcgcaacggccaagggcaaaag

SEQ ID NO: 227492 - RNA, 71 nt, Homo sapiens
aggccccgcccgcgggccagggcgccggcgcagacaccaagggaacccaaggggaagcgagcgggcccacc

SEQ ID NO: 227493 - RNA, 77 nt, Homo sapiens
caggccacccacgagaaaaggcagccagggcgaggggaacccaaggagaaggagaccacaaaccaaaggcccggaga

SEQ ID NO: 227494 - RNA, 69 nt, Homo sapiens
cagcgggaggccagaggaaggagccaaggagcaccaggaagaggcaacgagacagcccgccccgcaccc

SEQ ID NO: 227495 - RNA, 76 nt, Homo sapiens
ccggaccacagccagcagaacgacaaaagagaggacagagaagcaaggcgcagaacagaagaaaacagaaagccag

SEQ ID NO: 227496 - RNA, 57 nt, Homo sapiens
ccagccggaagagggccaagaacaaaagcccggcagaacccgagccccccagagaga

SEQ ID NO: 227497 - RNA, 77 nt, Homo sapiens
ggcgccgggccgcgggacccggagcaccgggccggcggacaggagggcgcgagaccacagaaggaaggaagaagaca

SEQ ID NO: 227498 - RNA, 87 nt, Homo sapiens
cccggcgcgagaggcccgggagccgccggccaggacgcccccgaggggagaccgcgccccggagaggaagcaccaaccgcccccagg

SEQ ID NO: 227499 - RNA, 83 nt, Homo sapiens
ccggaacaggagggacggcaccaggaaaaggagcgaacaggggccacagcggaagaagcaggggagcgagcccacagcacggc

SEQ ID NO: 227500 - RNA, 55 nt, Homo sapiens
cagacacccgaacgggggacaaggagcaaaaaacccagaaggggagaaagaacac

SEQ ID NO: 227501 - RNA, 68 nt, Homo sapiens
gacggacacagacaccaagggaggccacagagacaagagagagacggacaggcaaagaggcccccaag

SEQ ID NO: 227502 - RNA, 84 nt, Homo sapiens
caaacgccaggggacccccagaccaccgacagcaccaaggacgacacagcaagcaaaagacaacagaacaaacagccaggaaac

SEQ ID NO: 227503 - RNA, 81 nt, Homo sapiens
ggacaaccaacggccaagaacaagaacaaaggccgcgacggagggccggcccagggagaacgcaaaaccaccacccccaca

SEQ ID NO: 227504 - RNA, 86 nt, Homo sapiens
cccaccccggagggggaccacaagacccacgacaggccccgagccccggccccaaagacccaaaacagagacaccccccagccccc

SEQ ID NO: 227505 - RNA, 77 nt, Homo sapiens
ggagcccggcccaggcagaccgggcccagcgagagcccgcgaaggaggagagaccgccgggcgcaggcacaggaaca

SEQ ID NO: 227506 - RNA, 58 nt, Homo sapiens
cagagaaaacaaacggacagcccagaaacaccacgacagacacaagaagaagaaaaag

SEQ ID NO: 227507 - RNA, 63 nt, Homo sapiens
ggcccccagaggaaccaacaggcacccggacacgaccaaaacccccaaagccaccagaaagcc

SEQ ID NO: 227508 - RNA, 68 nt, Homo sapiens
gagaacccaaggaacaagacgcgggaacccaccaaagaaggaaacgaacccaacagccacaaaacaaa

SEQ ID NO: 227509 - RNA, 69 nt, Homo sapiens
ccagaacgaagccagcaacgggaacaagaacccacgacaaaaaacggggcggggccaggacgaaccagc

SEQ ID NO: 227510 - RNA, 82 nt, Homo sapiens
gccccgaacacgagacgcgggcggggaaccagcacagggaaggggacccccggagaaggagaggcggaggcagggcggaccg

SEQ ID NO: 227511 - RNA, 59 nt, Homo sapiens
gccgggcgacggccaccaccggagagaaaggggggcaagagcggggcaacgagaaaggg

SEQ ID NO: 227512 - RNA, 40 nt, Homo sapiens
gccgcaaaaacacagaagcagccccccccagcgccgaagg

SEQ ID NO: 227513 - RNA, 73 nt, Homo sapiens
aacacagcgggaccggccgccccacaccgagcacccgcagaacaggagaggcggaaggccaaagacagacggg

SEQ ID NO: 227514 - RNA, 88 nt, Homo sapiens
gcccagcgccgccgcgcccggccaagagcgcacagcgaggaggggggcgcgcagcccggggaccccccgccccagcaggcacccagac

SEQ ID NO: 227515 - RNA, 79 nt, Homo sapiens
cccgccggaacccgcaggaggaccgagcgacagcgcacggcagcggcaccacggcgacgcacaagcgggacgacaaaca

SEQ ID NO: 227516 - RNA, 74 nt, Homo sapiens
acaagaccagcgggaggcacaaaggcaacagcgagcgccgcagagccacagcggcacgcccgcagcacccgaca

SEQ ID NO: 227517 - RNA, 75 nt, Homo sapiens
gggccagggccagagcaaagaacagagaacgaggaagaaaaggaaacccaaaaagacaaggccaagcagcaaaac

SEQ ID NO: 227518 - RNA, 74 nt, Homo sapiens
cagaaacgcacaggaagagcgagaaacgcggaaagaagcagaaggggacaccaccaagacgacacgagacgaga

SEQ ID NO: 227519 - RNA, 52 nt, Homo sapiens
agcccgcggaaaagcgcagacaggagagaacccggacccagaggaaagcaga

SEQ ID NO: 227520 - RNA, 70 nt, Homo sapiens
cgcgccacgccagccaacaggagagcaccagacaacaagacaacgaagagaggaaagaagcggaaaggag

SEQ ID NO: 227521 - RNA, 55 nt, Homo sapiens
cgaccgagcagaacccccgaacagaacggcccagccagggaacaaagaaaccagc

SEQ ID NO: 227522 - RNA, 85 nt, Homo sapiens
gaacagggcgcccgagacccccagcgcgccggaggagaacaagagcccgagggaaagcacgaagggagcccagcgacacaccagc

SEQ ID NO: 227523 - RNA, 78 nt, Homo sapiens
cacccggcgcgagggggcgcaggaccggccgcaggccaccgacacgagacaaccgggagccggacgcgcagaagaagc

SEQ ID NO: 227524 - RNA, 85 nt, Homo sapiens
cagagccacccgccaagcagggacgaacagcggggacgccccagcagaccgcccaggagaggaaagcaggaggaaagaccaccca

SEQ ID NO: 227525 - RNA, 78 nt, Homo sapiens
aagacaccggcacgcaacagagccgcgaagcagccacggaccccagcacgaaaagacgggagaaaaaggggccaggga

SEQ ID NO: 227526 - RNA, 79 nt, Homo sapiens
caaggcaaggcccagaaaaaggaagaaaacaaccaggcaaagacacagcgcacgaagccgagccgcagcggcccacccc

SEQ ID NO: 227527 - RNA, 50 nt, Homo sapiens
ccgcggccacccaaccggagccagacaccaccacacgaccgcgagagggc

SEQ ID NO: 227528 - RNA, 76 nt, Homo sapiens
cagagcgcgcgacaaccacacaaaaaaaccagacgagagacagaagacgaaagggcaagaaagagagcacggacaa

SEQ ID NO: 227529 - RNA, 53 nt, Homo sapiens
ccaacccaaacagacgagggagggggacagccagggaggaggacaggccccgc

SEQ ID NO: 227530 - RNA, 70 nt, Homo sapiens
gacgccggaacgggaccggaacagaacagcagacgcccccccgacagggacgccgaaacaggacgccaca

SEQ ID NO: 227531 - RNA, 85 nt, Homo sapiens
gaagaaccgacaccgggcaggggaggggcgaccccggggcccggccagcacgaccgaggaggggcggacagcggaggagaacgga

SEQ ID NO: 227532 - RNA, 69 nt, Homo sapiens
agggacacgagcgggaagcaggcggcaaccacccgcacggagagggaaaagaggacgaggcgcgaaaag

SEQ ID NO: 227533 - RNA, 79 nt, Homo sapiens
gggggcggcgaccggacaagagcagcccagccaccacccgagaagcggccccccgggcccagagcagacgggccgaacg

SEQ ID NO: 227534 - RNA, 36 nt, Homo sapiens
gaaggggaaggagaccacaaagcagacggcccaacc

SEQ ID NO: 227535 - RNA, 86 nt, Homo sapiens
gcccggggcccagcagcaaccagccacccgcccccaagaaggaagcacagggccggccggaacaggacaccaggaacccagggacc

SEQ ID NO: 227536 - RNA, 72 nt, Homo sapiens
gacgacacgcaagcaggcaaccgaaacagcacagggaacaccagaggcgggaccacgggcagcgcccaggga

SEQ ID NO: 227537 - RNA, 96 nt, Homo sapiens
cagcgagaaggagggagaaaggcgggcccgggaacagaggcccacgcggaccggcagcgccaccggaccaccagacaaggacacggcccaagcgac

SEQ ID NO: 227538 - RNA, 75 nt, Homo sapiens
gcacaacgggcaggcgaacgagggaccaagcacgccagaaagccaagagaaaccaccaagagccaggaaggcaaa

SEQ ID NO: 227539 - RNA, 76 nt, Homo sapiens
gcgaaacagaagacaaacacgaagaacaaaggagaccgcaagcagagcgacaagcaacgcaaaaacaggcggggcg

SEQ ID NO: 227540 - RNA, 76 nt, Homo sapiens
cgcagaacgccccccggcagggacaggcagaaccggccacacccaggaccggaacacccccacagacccgagccag

SEQ ID NO: 227541 - RNA, 86 nt, Homo sapiens
cgcccaccacgccagccaccacgcggcgcacaacgcaggaacaccgcacgcgcggaggaggcgagcacacagagaggggaagggca

SEQ ID NO: 227542 - RNA, 87 nt, Homo sapiens
agccgcgcccgcagcaggacacacaggcagcgccaaaggccgcccaggaccagagaccggaggcacaaccccaagcggggggaaagg

SEQ ID NO: 227543 - RNA, 75 nt, Homo sapiens
ggccgcgcggcccgcagggcacgaggagaggacagggcagaacaaccggggccgccaagagcaccgcacaggcac

SEQ ID NO: 227544 - RNA, 81 nt, Homo sapiens
ggacacgaagggagcagaggacagaaccggaccggaggcagggccgaagcacgaggacaaacgggaggagcggaccacaac

SEQ ID NO: 227545 - RNA, 75 nt, Homo sapiens
aaaagagaaagcaggccacgaaaacacaaggagggagaaaacgcaggacacaaggaagaagaaggaccagaggaa

SEQ ID NO: 227546 - RNA, 74 nt, Homo sapiens
cccgacccaccacacacggcaggccaggaccagcccggcacagcagccggaggccaaagcaggcaagggacaca

SEQ ID NO: 227547 - RNA, 70 nt, Homo sapiens
gccaggcaaagcggacccaacacaaaggcccagcacgcacgccaagacgaggggcagggaggccaccagg

SEQ ID NO: 227548 - RNA, 50 nt, Homo sapiens
cgcagggcgcccccgcgccgagacggcgcgcgggggccaccaacggcacg

SEQ ID NO: 227549 - RNA, 58 nt, Homo sapiens
gccccccccaccagaggacgggaggagcagcaacaggacggaaaccagaacgaaaacc

SEQ ID NO: 227550 - RNA, 81 nt, Homo sapiens
aggaggcgcaccacggagaaaccaaccaaagccgcccaggaagccagagacccccgccccagcgccgcccaagaaccaagg

SEQ ID NO: 227551 - RNA, 79 nt, Homo sapiens
gaagagccggccggccaagggggacgggagcggggccggcggccaccggaaccgcaacgagacagacccagcacggacc

SEQ ID NO: 227552 - RNA, 56 nt, Homo sapiens
cgcaggcccgcgggcgcaccggcgacgagacgcagcgcaagacgaaggacaagaaa

SEQ ID NO: 227553 - RNA, 86 nt, Homo sapiens
agaggagacgcaaggagccaccagcacggaccaggaggcgagcaacagcacccgaaagagcgaaagcccagacaggaagcaacgag

SEQ ID NO: 227554 - RNA, 86 nt, Homo sapiens
ggggaccgcaggggcgcgcgaaggagcggaagaaggcaggccaaaccaccgaccaggacccaaaccaaaaagggggaagaaagaaa

SEQ ID NO: 227555 - RNA, 68 nt, Homo sapiens
cgaggggcgaaccacggaaaggaggaagaagacaccggggacagacaggacccgccccaggcaaggaa

SEQ ID NO: 227556 - RNA, 59 nt, Homo sapiens
gccgacaaggacgagcagaaggaggacggaagaaagaccccaaaaaagaaagacccaca

SEQ ID NO: 227557 - RNA, 72 nt, Homo sapiens
gccaacggaagccccaagaaggaagacagaagaggagaggcagcgcgaccaacaaagccgagggagaggccg

SEQ ID NO: 227558 - RNA, 76 nt, Homo sapiens
ccagggaagcaccacagccaccacaccaagacaccaggggagaccgacaagagaaggcacagaaacccacaagaaa

SEQ ID NO: 227559 - RNA, 80 nt, Homo sapiens
aacgcgcgcacacggacgagaacggagagaacgcggaaggagacggagaagaaagaccaggaaaaaaggggaaacccagg

SEQ ID NO: 227560 - RNA, 86 nt, Homo sapiens
gagcccgcagaccgcagaaggccggagacaccagcagcagccccgcaaagggaacaggaagcagccacggaggggacgcccagacc

SEQ ID NO: 227561 - RNA, 74 nt, Homo sapiens
gcgcgccaaggacccagccggagacggggacccggcccgagcacagcaagaagcccacgacgaggaggaagacg

SEQ ID NO: 227562 - RNA, 96 nt, Homo sapiens
cgaacgcacaaggaaacacgacacaaaaagcaagcgggccaccacagaaaagcccgcacggcaaagcaaagaagagccgcgcagaacagaaggaca

SEQ ID NO: 227563 - RNA, 76 nt, Homo sapiens
gcgccagcacacacaagcagaaacagaacgacagcccgcaccgacgccggcggccagccagagagcacgccggccg

SEQ ID NO: 227564 - RNA, 76 nt, Homo sapiens
cggaaaacagcacaaaacccagcaacagaacaagagggcagcagcggagaccgagcagcagggaaggaaagaacca

SEQ ID NO: 227565 - RNA, 77 nt, Homo sapiens
cggaccccgcgcgcaggccggggcgcgacaggcagacaggagccggaacaggggaggccacaagcgaggccggaggc

SEQ ID NO: 227566 - RNA, 79 nt, Homo sapiens
gggggcgcccccgcgacccggaccaccgggcgcggcgccccagccggggaacaaggaagagcgagaaggaagagcacac

SEQ ID NO: 227567 - RNA, 69 nt, Homo sapiens
gcccaaaaagcaggcacacagcgcacccaagcggcggcacggagcacagacaggaagccacagcaaaac

SEQ ID NO: 227568 - RNA, 36 nt, Homo sapiens
cgaccccaagaccacaaaggcacccacagaaggaga

SEQ ID NO: 227569 - RNA, 72 nt, Homo sapiens
aagccggaggggcgcgggggacagagagagccacggaccaaagccaccacccaacaaacgcaccaaaaggac

SEQ ID NO: 227570 - RNA, 84 nt, Homo sapiens
cagggagcaagaggcagacagaccgagacgggcaaccaacaagaaacagacacaccgcacagaaaagggacacagacgccaggc

SEQ ID NO: 227571 - RNA, 73 nt, Homo sapiens
cacgcgcagggcccacgacgagacaacaaccccgggggccaaggaaacggaagaccaacccagcaacacacgc

SEQ ID NO: 227572 - RNA, 80 nt, Homo sapiens
aaagaagggagccccaccgcgggaaacaggagggcaggagggccgcacaaagggcgcagccagacgacccaggagagaga

SEQ ID NO: 227573 - RNA, 81 nt, Homo sapiens
gcccgcagccccgggcacggcggaggcagcggagcccgggccacgaccggaaacaggcacagaacagaaggaaaggacgaa

SEQ ID NO: 227574 - RNA, 84 nt, Homo sapiens
acggaaagcagccagcagcacccagagcccacggcaacagcccccccagcgaccccagcacaggacacaagagaaggcacccga

SEQ ID NO: 227575 - RNA, 65 nt, Homo sapiens
agccgcccagacggccaccggcgggaggaacaaaagcccgccaaaagacccccagaaggaggcag

SEQ ID NO: 227576 - RNA, 82 nt, Homo sapiens
ggaaagggccgcccgcccgcccgggggaccgcaggccacgaggcccagggaacccggaccacagaaccaagaaagaggagaa

SEQ ID NO: 227577 - RNA, 78 nt, Homo sapiens
cacgaagccgagagcaccaggagacaaagccacaaaaacaccagaaaaaccaagcagaaaaggagcggcagcaaaaag

SEQ ID NO: 227578 - RNA, 58 nt, Homo sapiens
acagcaacacagacaagaaaaggaggccaaaccaaccggcagaggggcagcggcgaag

SEQ ID NO: 227579 - RNA, 73 nt, Homo sapiens
gaggacaggccagcgcggccaagacccgccgcaaggagaagacgcagggcagcaagaaaaagagaaagacgaa

SEQ ID NO: 227580 - RNA, 78 nt, Homo sapiens
cacgcaacaggcgacccggggcggcggcggggcgaccgcgagccgggaacgcccgaagccgcagaagagacaacgcgc

SEQ ID NO: 227581 - RNA, 80 nt, Homo sapiens
accagaaacccaaacgcaccaacagggcacagccagggcgaaagaagaccccgccaccggcccccacgcaccaccaaagc

SEQ ID NO: 227582 - RNA, 70 nt, Homo sapiens
aaaaaaagaagaagcggcaagaacagacgacaccagacagccagcaggggcagaagcagcagacggaacg

SEQ ID NO: 227583 - RNA, 60 nt, Homo sapiens
agacacaaaggacggaggcacgacaagcagaccggaagaccgacggaagaccacaccccg

SEQ ID NO: 227584 - RNA, 85 nt, Homo sapiens
ggaccgggcgccacgcgggggcaagacgaagccggcccaggccggggaagcggggcgccacggcaggagcgccccgagagcacag

SEQ ID NO: 227585 - RNA, 59 nt, Homo sapiens
cacaagaaaggaaaaagccaaacaggaggccaggccagagggaccaacgaaggcaaaca

SEQ ID NO: 227586 - RNA, 71 nt, Homo sapiens
aggacaacgggacccagaagagcccaggccacacacagagaccccacgggaagggcaaggcgagaaagaga

SEQ ID NO: 227587 - RNA, 81 nt, Homo sapiens
ccgcccgcccgaggcgaccgcggaccggcgccccggcgcgaagaggcggaccggacggccgagccaggaacggaggccgga

SEQ ID NO: 227588 - RNA, 87 nt, Homo sapiens
caccacagggacggcggccggacaaacacgcaaggacccccccggccaagggcaagcaagcaaacagcggcacaacaagcgggcgca

SEQ ID NO: 227589 - RNA, 73 nt, Homo sapiens
gagagccacaaaaaaggaagcgaaagaccaccacaaaacaaacggaaggaaggcaagaccagccaccagcccc

SEQ ID NO: 227590 - RNA, 75 nt, Homo sapiens
cgaaccggccgcaccgggggaagagacaaccgcgacacaaaaacacgcaggggaaccaagaccaggacaaagaag

SEQ ID NO: 227591 - RNA, 68 nt, Homo sapiens
acaggaacccagacagcgcggaccaggaggacaacccgcgggagaggagccgacgcgaagaacacacc

SEQ ID NO: 227592 - RNA, 73 nt, Homo sapiens
gcagagcggggcacccacccaaggacaacaggcacaaagagagaaggaacacccacagggcagacagagaaag

SEQ ID NO: 227593 - RNA, 74 nt, Homo sapiens
cgggaaaccgccaggggacggggaaccaagcgcgaacagacagcgcacgaaacacacaaagaaccaccaccggg

SEQ ID NO: 227594 - RNA, 82 nt, Homo sapiens
gaccggccgcaggccaccgacacgagacaaccgggagccggggcaggaggcagcagagaaagccacagaacacgcggcccag

SEQ ID NO: 227595 - RNA, 72 nt, Homo sapiens
cagggaaacaaccaggaaaaagaacggggacacgcgagacaccaagagaagaacgaaaaaacagcaaaccgc

SEQ ID NO: 227596 - RNA, 75 nt, Homo sapiens
cgcccggcgcgagccaagcgcgcgccgagacgccggggcccggcgccaccaccggggagccagagcaagaggcca

SEQ ID NO: 227597 - RNA, 74 nt, Homo sapiens
cgccacccggcgcgaccgcccggcaccgggagaaccaccgccaccgccaccagcggccaggcgacggcggaagg

SEQ ID NO: 227598 - RNA, 71 nt, Homo sapiens
ggaccaaaaacccagagagagcacacaaaaaaagggggacgaaggccaccaagaaggggaccaacagggcg

SEQ ID NO: 227599 - RNA, 87 nt, Homo sapiens
ccgcccgccccggcacacgcgcagccccggccccggcccgccggagaaacagcaacacaagcgagggagaagccaagagcacagacc

SEQ ID NO: 227600 - RNA, 76 nt, Homo sapiens
cgggaggcaacgaggcaccagaacaagcaacagacaaggccacacaccgcagacacagcagcaaacaaacaaggag

SEQ ID NO: 227601 - RNA, 75 nt, Homo sapiens
aagacaggccccacggccgccaccgcgcaggaggcaaagaagcgaggagcaggcaaccaccacaagccaacaaac

SEQ ID NO: 227602 - RNA, 70 nt, Homo sapiens
aggcccgagacgagaaggcgacacgagaaaaacaagaacagaaaagcaagagggaagacaacggcagcag

SEQ ID NO: 227603 - RNA, 70 nt, Homo sapiens
gacagagcccagaaaaagcaggggcaagcaaaagcggcagaggcgaagagagaacacgcacggaaggaag

SEQ ID NO: 227604 - RNA, 56 nt, Homo sapiens
gcccagcccccgagggcgggaacaggccgacgagaaaagaaccccggaccgcagca

SEQ ID NO: 227605 - RNA, 67 nt, Homo sapiens
aaacaggcaaaaaaccggaccaacaaccccgagacaggcaaggagccagcaggagacaacgccccac

SEQ ID NO: 227606 - RNA, 59 nt, Homo sapiens
gcccgcgagcaaacgccgcggccccaggggagagcccggaaaaccaaaagggacaaagg

SEQ ID NO: 227607 - RNA, 76 nt, Homo sapiens
aagagaaggaaaaggaagagcacgacagaacgaacgaaacaccaaagggcgcccggggaagagggcggaagacgaa

SEQ ID NO: 227608 - RNA, 67 nt, Homo sapiens
caccagcaggcccgccaagacgcacaggaggagagcgcaagcagaacaaggggagagcccgacgcag

SEQ ID NO: 227609 - RNA, 69 nt, Homo sapiens
aaggagagagccgaaaggcagccaaacgggccggcaggacaggagacagagcacaccggaaacaagaaa

SEQ ID NO: 227610 - RNA, 57 nt, Homo sapiens
aggcagaccgcagcaaagaacagagccgacaggcacgaagaaaaggaaaacccacgc

SEQ ID NO: 227611 - RNA, 67 nt, Homo sapiens
gagaggcccgaaccacacaggaaccggccgaaccagaccggagcaggggcagcgaaccagggccaga

SEQ ID NO: 227612 - RNA, 81 nt, Homo sapiens
ggacaccggaagcgggaaagggggacgaccaccagccaggccggggacaaacaggcaaccgacggggaggggcaagggcac

SEQ ID NO: 227613 - RNA, 58 nt, Homo sapiens
aacagcggagacggaacgggagaagaggcaaagaaacaccaaccagaccagacccagg

SEQ ID NO: 227614 - RNA, 91 nt, Homo sapiens
gacgaaagagaaacccggagggcgccgggcaaacggggacagcgccgaccggaacagggaccacggaagcccaggaccagccccgacaagc

SEQ ID NO: 227615 - RNA, 64 nt, Homo sapiens
agcagggacgacgagcagaagagaaccaccaagcaacaacaggaaagcagaacacagacacacc

SEQ ID NO: 227616 - RNA, 80 nt, Homo sapiens
cacgcccccgcgccggagccccgggccagaaggaagaaccgccaaaaagagggaaaaacgggcgccaggaacccggacag

SEQ ID NO: 227617 - RNA, 87 nt, Homo sapiens
gagaggccaagagcagcaggcggaggaaacagccagaccgagagcagccgccggggcggaggggaagacagccccgcgaggaaggag

SEQ ID NO: 227618 - RNA, 78 nt, Homo sapiens
gcagggcgccaaagcgagagagggaagcgcccggccgcgaggcgaggggccccgaaccgaggaccagcgggaagaaga

SEQ ID NO: 227619 - RNA, 71 nt, Homo sapiens
acagaggcccggagacggcagaaaaagaggcgaccgagcggaagcagaggaaacccgcccagcccgcagcc

SEQ ID NO: 227620 - RNA, 73 nt, Homo sapiens
gcagcgcccccacaagagcccagcgccgaagcgaggcccccccacaagggggggcgcaggccccggaagaggg

SEQ ID NO: 227621 - RNA, 35 nt, Homo sapiens
gcagcagcaggccggccggcacgcgggcgagcggc

SEQ ID NO: 227622 - RNA, 62 nt, Homo sapiens
ggccagcccagccagaagccaggagcccggaaggggaaaacggacgaaaccaagcggggaac

SEQ ID NO: 227623 - RNA, 80 nt, Homo sapiens
gccgccgcccgagcgccgagaaagccccgggagaagcagcgccgcccggggcagaccaggcaggcacagccccggcgggc

SEQ ID NO: 227624 - RNA, 72 nt, Homo sapiens
cagccgcccacggccaccacggcgcgaggacgccacggggggcgaagacagcaagaaccgcaaggccaggag

SEQ ID NO: 227625 - RNA, 72 nt, Homo sapiens
aggaacggccaaacaacagggaaccaaggggacaaaccaacagaagggcaaccagggaccaggaggagaagc

SEQ ID NO: 227626 - RNA, 64 nt, Homo sapiens
aagcgagaacccccagcagacgaggcagcgcgcacagggcacggaccgaagagggcggaacccc

SEQ ID NO: 227627 - RNA, 65 nt, Homo sapiens
gacccagcccgcaccgcaccccacagccgccaggggggaggcccagggacaaagaagcagaaaaa

SEQ ID NO: 227628 - RNA, 83 nt, Homo sapiens
aggggaccccaagaagaccacagagggacccggacaaccagaggcagccagcagggggagccggacacaagagggcaagaaag

SEQ ID NO: 227629 - RNA, 55 nt, Homo sapiens
aacacaccaagaagaggcacaagccccagggcgaagacccccccccagggcaaac

SEQ ID NO: 227630 - RNA, 80 nt, Homo sapiens
gcgcgggagccgggcggcgagccgggggagcgccgaaaagcaccggagccgccgcgcagacagagcagccaggccacgag

SEQ ID NO: 227631 - RNA, 79 nt, Homo sapiens
gacgccaccgggaggggaccggagccgccagcgcggccagaaacgggaaccgggggcggccggacgcaaagggaagagc

SEQ ID NO: 227632 - RNA, 63 nt, Homo sapiens
gaaggaccaagaaccaggacggaggggggaggagcaggcccccaccgcgacccacaacccgaa

SEQ ID NO: 227633 - RNA, 32 nt, Homo sapiens
agagagccagaaacgaaaggaacaccggccca

SEQ ID NO: 227634 - RNA, 75 nt, Homo sapiens
aaagggacacccccagagccggaaaggagcaaaggaagagacgaaaaccacggcacgcccaccaccgaggccgcc

SEQ ID NO: 227635 - RNA, 74 nt, Homo sapiens
accagacagagacaggacaacaccacaggaagagccgcccgggagacgcaccagagcgcaagcccccccaccac

SEQ ID NO: 227636 - RNA, 66 nt, Homo sapiens
gccaacagggccacgccgcgggacacacaggaagacgaacacggaacgggcgagaagaaagcagag

SEQ ID NO: 227637 - RNA, 70 nt, Homo sapiens
aggaaaacgccacgacagacacaaccaagcaccggagaaaacccacggggaccaggaggcaaaagaaaca

SEQ ID NO: 227638 - RNA, 83 nt, Homo sapiens
acagaacgcggccccagccacaccaagcagggcgcccgaagggcagacaggagggcaacagcgggaaaacagcggggacggcc

SEQ ID NO: 227639 - RNA, 84 nt, Homo sapiens
cgggacccgaggaggccgagggccgggcggggcacccaaggaagcagcagccccgccccaggggagcggccccggcagcccggc

SEQ ID NO: 227640 - RNA, 83 nt, Homo sapiens
ggaggccaacggcagaagccaccacaaaagcgaaagggcacaccacagcccgggagggagggcgcgggaggggagggacgccg

SEQ ID NO: 227641 - RNA, 80 nt, Homo sapiens
aagacaaagaaaccagccgagcaaccaaaccaaagggagaacagcagcgacccgaaccgcagacggagaacaaaggcagc

SEQ ID NO: 227642 - RNA, 81 nt, Homo sapiens
cgagccagggaaccaggaaggaaagggaagaagacacggggagcccgaaccgagcaaggccggcaagcgaacggggaggcg

SEQ ID NO: 227643 - RNA, 88 nt, Homo sapiens
gccggcaggccggcccggggcgagccccaggagaagacagaggagccagaccaagagacagcacaggcgagcgagcagagacaccagg

SEQ ID NO: 227644 - RNA, 40 nt, Homo sapiens
ggccggcgggcgcgcggcaacggggagggccacggcgcgc

SEQ ID NO: 227645 - RNA, 75 nt, Homo sapiens
gaacggcacacgcgagcgacgggcacgcaggcaggacccccacaaacgcacacccaggagcgcaaaccccaaaga

SEQ ID NO: 227646 - RNA, 77 nt, Homo sapiens
cgaggcgcagacggagccaacggggaaggcccacaacacaagacaccaagaggggaccaggacacagacaccaagga

SEQ ID NO: 227647 - RNA, 76 nt, Homo sapiens
aggaagacagagaagaggcccgcgaagacaaaaaacccaagaacccaaggggaaccggggcccgcgaggaaggacg

SEQ ID NO: 227648 - RNA, 77 nt, Homo sapiens
ggagggcggcacagagacgagcggcgcagaggagagaaggaggacgacgcccagcggggcgcccgcccgggcccacg

SEQ ID NO: 227649 - RNA, 77 nt, Homo sapiens
gggccggggcgacccgggaagcggggccccgcccgccgcgccacagcaggccagaacacaaagcggaaccggaagaa

SEQ ID NO: 227650 - RNA, 75 nt, Homo sapiens
gggagggaaagggaagacacgaaaaaagagaaagggccaacggacacgcacaagaacacagcaaacaagaaaggg

SEQ ID NO: 227651 - RNA, 78 nt, Homo sapiens
cagccccgagagcgggaacagaccggcacaggaagcaccgaggaacgagagccaagaggcaacgccccacacgacccg

SEQ ID NO: 227652 - RNA, 83 nt, Homo sapiens
gcacgggaggacaccgccgggcaacgcccgcgcggcggcggccgcagggggcggagagggcaagagaagcggaacaccgggcc

SEQ ID NO: 227653 - RNA, 76 nt, Homo sapiens
aacaagggcaacgccagccagagccagagaaaaccgggccccgaccgacagccgccaaggagagcgagcggcgcag

SEQ ID NO: 227654 - RNA, 74 nt, Homo sapiens
ggcaagagaccagggacagccgggcccaggaccccagccagggagcagccccccaggacccacaccgggcagcg

SEQ ID NO: 227655 - RNA, 77 nt, Homo sapiens
gggccgcacgagaagagagccagaggggggacgaacccacagacagccagcagaagcggggacagaagagaagaggc

SEQ ID NO: 227656 - RNA, 41 nt, Homo sapiens
cgccagaaggcccgggcacggagcaacgacaaggacagaac

SEQ ID NO: 227657 - RNA, 72 nt, Homo sapiens
cgagaccgccaacaggacaccgaagccaaccggcaggaaaaggaagagcaaaaacaaaaacccagcagacaa

SEQ ID NO: 227658 - RNA, 90 nt, Homo sapiens
cccggcggcggcggcggcggcgcgcgggggcgacgcgcgggaacaacgcgagcggcgcgcgggacgaaggaaaccccaaggagagcagcc

SEQ ID NO: 227659 - RNA, 73 nt, Homo sapiens
gaacacacagacgggcacccggcacacagagccccgaggcaggggaagaaaacgccagagaagcagagcagcc

SEQ ID NO: 227660 - RNA, 91 nt, Homo sapiens
aaacgcaaggacggacccagccgaaggacggaagcggacacggacagagcagccaggccacgagccagaaccgagacacacacaggacccc

SEQ ID NO: 227661 - RNA, 71 nt, Homo sapiens
gggaccgcaaaaaagaccagaaaagggcccagcggcggaaaccggcaggaaccacaagccgagccaaaaga

SEQ ID NO: 227662 - RNA, 78 nt, Homo sapiens
aggcagagggggcccagagccgggcgccacccgaggacaagggaaccggggacccaggaaggggaaaaagagagaaag

SEQ ID NO: 227663 - RNA, 83 nt, Homo sapiens
caaggaggccaggaagaaggccaaacaagagggcggacaacaggccgagggcgggagggagcaaggagcacagcccagcaccc

SEQ ID NO: 227664 - RNA, 77 nt, Homo sapiens
gaaccagccgggcggcgcggcggcccgcaggccaaggggcagagcacaagaacagccggggcggggaaaacccgacg

SEQ ID NO: 227665 - RNA, 75 nt, Homo sapiens
gcgcgggagggacacacccggcacacccaaccgagacgccgggagcgcgcccgcagccagaaaccacgaagaggc

SEQ ID NO: 227666 - RNA, 55 nt, Homo sapiens
acaccgccaccccgggccagggcagaagcccccggggagagacagacagagggac

SEQ ID NO: 227667 - RNA, 86 nt, Homo sapiens
cgcgaggggagggggaacgcgggcgccgaaggagggccggcagcgcccgcggagacggaagaggacagcagggaggaggcacagcc

SEQ ID NO: 227668 - RNA, 85 nt, Homo sapiens
ggcggcgaggaaagcaggaggaggggcggcggcgggaagagacagcccagagcaagcacacggaggcccgggagccagaccggga

SEQ ID NO: 227669 - RNA, 60 nt, Homo sapiens
cagcccaccgacccggcccagggacgagaggggcgccgacagccacagcgccccaccaca

SEQ ID NO: 227670 - RNA, 55 nt, Homo sapiens
ggccgcagcccagcacagcaccgccgcgggccgggcgcacaaaagagcacaaaag

SEQ ID NO: 227671 - RNA, 84 nt, Homo sapiens
ggagcccgcggaagagagagcagcgagggggaaagaaagagcccggagcagccaggaacagcgccaaacgaccaagaaagcggg

SEQ ID NO: 227672 - RNA, 71 nt, Homo sapiens
cccagcccgggcgggggcagagccaggccacagcacgagcgaggccgcccggaagcagcggggagcgaccg

SEQ ID NO: 227673 - RNA, 81 nt, Homo sapiens
gcaccggcccaggggccaaaacccggacaaccagcggggcacaacaagggcacaacagagccaccccaccacccccaaaaa

SEQ ID NO: 227674 - RNA, 106 nt, Homo sapiens
aagaaagcacagggacgagacagaacaacgagagagagcaaaaacaccagacaagaacaacgggcccaacaccacgagcagcccaggggaagaacgcgagcgccca

SEQ ID NO: 227675 - RNA, 76 nt, Homo sapiens
ggagggagacaaagcagcgcccgcgccgggcccggaaagcgccgcccagcagccgcagggaagcggagaggacgaa

SEQ ID NO: 227676 - RNA, 75 nt, Homo sapiens
gcaaggaacaggcggggcgcaaaacggacagaaggaacagcccaggacagaggaggaagaagcgaaaagcaagaa

SEQ ID NO: 227677 - RNA, 66 nt, Homo sapiens
ggggccaccaggacgggggcccccccccccccagacccacggaacgcaagcacaggaccagaaacg

SEQ ID NO: 227678 - RNA, 79 nt, Homo sapiens
ccaacaggaccagcagggcgggcaggcccacacagccgaggcaggcgcccaggcaagagcccgcccacgggaaaccgcc

SEQ ID NO: 227679 - RNA, 78 nt, Homo sapiens
ccggcaggcccgggaaggacgacacccagaggcgcaacccagagagaggaagagacccccgaagccacagagcccagg

SEQ ID NO: 227680 - RNA, 78 nt, Homo sapiens
agggcgaaggagccggcccaagaccaagacacccaggagaaagacagcggggaaaagaaaaaggagggggcaaaaggg

SEQ ID NO: 227681 - RNA, 89 nt, Homo sapiens
gccaacggcccagccgaggagcggcgggcggcggcgcgcggacccaggcgcggaggcgaggccagcaggcagaagacgcaagccggaaa

SEQ ID NO: 227682 - RNA, 51 nt, Homo sapiens
ccgcaggagggagaacggggaagaaagcacgggaaaaggccgggcccacag

SEQ ID NO: 227683 - RNA, 83 nt, Homo sapiens
ccagaggcagagccgccccagcagcaggggcgccagaggaaagcgaacgcgaaaagaaaagccgagagcagccagaccggcga

SEQ ID NO: 227684 - RNA, 58 nt, Homo sapiens
aaacacgggacaaaaaccagaccaggggggaggcaaagaaagaagcccggaaacgggc

SEQ ID NO: 227685 - RNA, 74 nt, Homo sapiens
aaccacacagcaagaagaggacgagagcacagcccccaggagaggcaggcgcaaaggaggcaacagaggagcag

SEQ ID NO: 227686 - RNA, 39 nt, Homo sapiens
gaagaacgcagcccaggcaggaggaaaagcgcgcgcccg

SEQ ID NO: 227687 - RNA, 79 nt, Homo sapiens
ccagcagacggggggggccggaggagcagcgggccagaacggccaggagacgcaacgggcggagaacggaaaagcacca

SEQ ID NO: 227688 - RNA, 77 nt, Homo sapiens
ccgggggcggacacaaccgcgggcccgggacagacacagggaaagggagcagcaccggccacacccacagcacgacc

SEQ ID NO: 227689 - RNA, 79 nt, Homo sapiens
ccacacaaaaacaagaaacagccgaagcacccgaaacccgaaagacccaaggaccagggcccgaggagggcggaaccac

SEQ ID NO: 227690 - RNA, 79 nt, Homo sapiens
ggaggaaaccaagacagcccaaacgccccacgaccaggagacagggggacaaaggacagaaaggcagggggcgcaggaa

SEQ ID NO: 227691 - RNA, 71 nt, Homo sapiens
agggcacacaaaacagagagcagaggcgcggcccgaaacgggggagaaggaggaacacaaagaggaccagc

SEQ ID NO: 227692 - RNA, 57 nt, Homo sapiens
cagaaagagaggagaagggaacaaccgaaaaccaggcaaacgcagaaccaaccagcg

SEQ ID NO: 227693 - RNA, 69 nt, Homo sapiens
gggcagggggaagcggaggcgccccaaagacgggaaacaagcaagagcaccaccgaacacggaagaaag

SEQ ID NO: 227694 - RNA, 82 nt, Homo sapiens
aaggcggagccaccggccggcgaaggcaaagcgaaggcggagcaggagaaagcggcacagaccccagaggaaaaacccccaa

SEQ ID NO: 227695 - RNA, 74 nt, Homo sapiens
aagcccagaggccccagacccccagccaagaagaggaaaccagaacacggcaagagcagccaccaccaaaccca

SEQ ID NO: 227696 - RNA, 89 nt, Homo sapiens
ccaggccagccccaaagcggcggagaacccggacggccccgagagcagggaccgggccaagacgagcgacaggagcacacccggagaag

SEQ ID NO: 227697 - RNA, 82 nt, Homo sapiens
ccaggccccgggcgacaagaaccaccccaagacccacaggccggagaggacaggggaagcaccaagccaggagaagggagac

SEQ ID NO: 227698 - RNA, 78 nt, Homo sapiens
gccaagccagacgagccccgggcaccgcgcgcgcccgaggcgcacacgagaggcgagggacgacagagcaagcggcag

SEQ ID NO: 227699 - RNA, 71 nt, Homo sapiens
ccaccgccagagcagaacaggaggccagcccagccccacggcccgcccaaaagaaaaccggcaccgaaacg

SEQ ID NO: 227700 - RNA, 55 nt, Homo sapiens
aagaagaaaaagccacacacaccaaaggaacacgaaagaacccgaacacccggag

SEQ ID NO: 227701 - RNA, 42 nt, Homo sapiens
gggaggccgaggcgggcagacacaaggcgggaacaggcggag

SEQ ID NO: 227702 - RNA, 89 nt, Homo sapiens
cggaggcagaggggaggcgcgaaaggaagaccgcaggaaagcaggaaggcaagaaagccaaggacgaaacccacacggaggagagaggc

SEQ ID NO: 227703 - RNA, 82 nt, Homo sapiens
gcgcaggcggcccacggcagcgagccacacccaccgcccgggcaggccacggcggagagggccgggcgcgcaccccgaaccc

SEQ ID NO: 227704 - RNA, 75 nt, Homo sapiens
aaccccaggaaacggccagcacaaaaacaaccaaaccagcacccaaagcaaaaagcaggccacccagaaaaggcc

SEQ ID NO: 227705 - RNA, 59 nt, Homo sapiens
gcgggggaccgagcgccggcggcgggagcggccaaaaagagagaaaaaccagaaagaaa

SEQ ID NO: 227706 - RNA, 61 nt, Homo sapiens
gccggaggagccagagcgcagaaagaagcacccaagccagggagcggcaaaagcaaaaggg

SEQ ID NO: 227707 - RNA, 60 nt, Homo sapiens
ggggaccgcggagaccgccaccaggcccgggacacacaccccgcaggggcgcccaacacg

SEQ ID NO: 227708 - RNA, 94 nt, Homo sapiens
gacaaggccaggggcgacagaggcgagaaggaggggcgagaaacaccccaagagaagcacggagagcccaagaagcaggcagccccgcgggccg

SEQ ID NO: 227709 - RNA, 77 nt, Homo sapiens
cggaaccaggcccgcagggggaccacacccggggaaccagggaggggagaccggaagcgccaggggccaccggccgg

SEQ ID NO: 227710 - RNA, 79 nt, Homo sapiens
cgggccagacagggaggcggaggggacagggcagaccgccagcagcacagcaagccacagagagggccggcagggcggg

SEQ ID NO: 227711 - RNA, 82 nt, Homo sapiens
ccccgggaagcaacagaacgcggacagacgaggaagaggcgaaaggagcacaaaagcagccgagggcagcgggcgaagcaga

SEQ ID NO: 227712 - RNA, 75 nt, Homo sapiens
gccgggagcgggggcgggggacaggcggcaccgacccccggcgcggcacggcacagaagcacccaagccagggag

SEQ ID NO: 227713 - RNA, 64 nt, Homo sapiens
gaagaccaccaggccagcggggcgggggaccccggggggagggacagcagaaagggaaaacaca

SEQ ID NO: 227714 - RNA, 56 nt, Homo sapiens
ggagaacgacgccagccagccgcagacagcccagaggcgagcgacagcgccaagaa

SEQ ID NO: 227715 - RNA, 44 nt, Homo sapiens
aggccaaagaaagagaagcagaacaagaagggcaaccagggggg

SEQ ID NO: 227716 - RNA, 73 nt, Homo sapiens
gaagggacccaaaaagacggacagcccacgggaacaagaggggacagaaagagcaggacaaacaacgagaaag

SEQ ID NO: 227717 - RNA, 69 nt, Homo sapiens
accgaagaggaaagagcaagaccccgccggagccccaaacaggaccagaagaacccaggagaagcgagc

SEQ ID NO: 227718 - RNA, 55 nt, Homo sapiens
gacccggcgcccagcggagcccccgcgccccgacccaggaaaccgaggggaaaag

SEQ ID NO: 227719 - RNA, 80 nt, Homo sapiens
cagacaaaagaaccaggagcccaagagcacaggggaagaagcacagccacgagccaacacagccgcggagaaccgaacca

SEQ ID NO: 227720 - RNA, 82 nt, Homo sapiens
cgcccgaaaacggagaagcagagagcacgcgaaccaggaccaaggagaaggagaaacggggcggggaaaccagccgcccccc

SEQ ID NO: 227721 - RNA, 70 nt, Homo sapiens
ccccaccagaggacgggaggagcagcaacagggggggaggagggacaacacacaacgcaggcgcacagcc

SEQ ID NO: 227722 - RNA, 79 nt, Homo sapiens
cggcacgcagcgcgcccgccagggcccagagacacccagacagcccgaacacggaaaccgacgacggccacagcccagc

SEQ ID NO: 227723 - RNA, 82 nt, Homo sapiens
acgggaggcgcacgccaggaccgacgggaagggcgggagagagaagaaaaaacaacccagaacggaaacgggggaccaggaa

SEQ ID NO: 227724 - RNA, 93 nt, Homo sapiens
agggcccgagccccggcgccgccgccaccgcccggcgagggacccccggacaagaggaccacagcccacgaccaggcaacgggcggacggagg

SEQ ID NO: 227725 - RNA, 68 nt, Homo sapiens
ggagaaaccgcccgaaaacggagaagcaggggcacaaggaccacaaacgcagaggccgcccgccggag

SEQ ID NO: 227726 - RNA, 76 nt, Homo sapiens
gccacccagagcgcacggcgacgccccaggggaaaacccccgggaccaggccagcaaaggacgcccgaacggcgca

SEQ ID NO: 227727 - RNA, 81 nt, Homo sapiens
cgcccccccgcccagccaaagcaggccgccgccccccgaggagaccgggcccggaaggacccagaagaccccagacgggga

SEQ ID NO: 227728 - RNA, 61 nt, Homo sapiens
caccacacggaaggaaaaggcaccacagagaccaagagagggaggccagacagaaaaaacg

SEQ ID NO: 227729 - RNA, 59 nt, Homo sapiens
gagcccaggcaccccccccccagcccaggaaacgacaaaaaaagagagaaaagcgggaa

SEQ ID NO: 227730 - RNA, 70 nt, Homo sapiens
aaacagagccacccccacccaagagcccggacaaacaagggaaaaggcacacagccacagagaggaaaca

SEQ ID NO: 227731 - RNA, 70 nt, Homo sapiens
gacgacggaaggagcagaacaaacggccaagaagggccaccccacagacgggggcagaaacggcggggca

SEQ ID NO: 227732 - RNA, 76 nt, Homo sapiens
caagcaagggccagcagaaaccgacagaaaagcgcacaaagacgccgacccccaaaaggaggggagacgccagggg

SEQ ID NO: 227733 - RNA, 69 nt, Homo sapiens
ccagcaacaggaacaacaacgcagccaccagagaaaccccgaaccaaacagagcccaaggagcggcaaa

SEQ ID NO: 227734 - RNA, 97 nt, Homo sapiens
cagcacccaaaggagcaacagacagcccccagaacagcaccagaccagaggacaagacaaagggagcaagacaagccaaagaggaaaagcaaagccc

SEQ ID NO: 227735 - RNA, 76 nt, Homo sapiens
gaaccacgagaaaggaggcagcaagagcacaaaggacgaggggggcccacccagagcggccagagccacccaccca

SEQ ID NO: 227736 - RNA, 73 nt, Homo sapiens
ggaccaagaaccagaaaaggaagaggcgccacaccaagaccgaggccacagacaacgaggagacaagaaaggg

SEQ ID NO: 227737 - RNA, 72 nt, Homo sapiens
gccaagagcgacaggaggagacaggcgagagaggaggacacgaccgggggacgaccaccagccaggccgggg

SEQ ID NO: 227738 - RNA, 76 nt, Homo sapiens
aaccacagaacccccaaagagaaaggagaaaaagcagcagagggggaaaggccaagaacgccaggcaaccagaaaa

SEQ ID NO: 227739 - RNA, 80 nt, Homo sapiens
cgcgagcccagcgcgcggccccgcccggcggccgggcccaggccccacagaagaaaaccgcgccccacaccaaacaacca

SEQ ID NO: 227740 - RNA, 78 nt, Homo sapiens
gacgcgccgcgccccaagggaagcccgcagccgagcacagagcccagccgaccgaaagccaggccagagccaacgcaa

SEQ ID NO: 227741 - RNA, 59 nt, Homo sapiens
cccagcgaggcacaaacaaaggaccgaaagcacagaacacgggcgaagcagaaccacac

SEQ ID NO: 227742 - RNA, 59 nt, Homo sapiens
agacaccacggggcaacgaggcggggaccaagagaagagcagaggaccagcaccgccga

SEQ ID NO: 227743 - RNA, 38 nt, Homo sapiens
gacccagcaacaaaacgcaagggaggaagaagagacag

SEQ ID NO: 227744 - RNA, 79 nt, Homo sapiens
aggaaaacacgaaaaaaaagggaaggaaaccccacacagaggagagaaggcgaggaagcccaagcacaaaggagaagac

SEQ ID NO: 227745 - RNA, 68 nt, Homo sapiens
ggagaagagacaacaagacaggggaacaaacgaaagccacaccccagggggaaacagggggccaaagg

SEQ ID NO: 227746 - RNA, 73 nt, Homo sapiens
ggcgggaaagaggaagcaaaaaaaaggcagcacagagcacacgagggaagcccagaggcacggggcagaacac

SEQ ID NO: 227747 - RNA, 73 nt, Homo sapiens
agcgggaacaccccagcaggcagaacggcgggaccggagcaagccgaagaaaggacccgagaaccagccccgg

SEQ ID NO: 227748 - RNA, 79 nt, Homo sapiens
gaaaacgaacacccccgggaagagaaaaggcgcccccaaccaggcgaaacaccaccaggggccagaaaccggagcagga

SEQ ID NO: 227749 - RNA, 77 nt, Homo sapiens
cagagcaggggccggaagcaccaggacagagcagacagacagcgaacacggaagccacgaaaagcaaaagcacagga

SEQ ID NO: 227750 - RNA, 58 nt, Homo sapiens
caaacaaaaagacacgaagaggaggaagcccagcaccaggaagaagaggcggaagaaa

SEQ ID NO: 227751 - RNA, 77 nt, Homo sapiens
gccagaggggagcacagagcgagaccaggaaagaagggggcagaagagggggcacgaagaaaccagaggagccagga

SEQ ID NO: 227752 - RNA, 60 nt, Homo sapiens
gcccaccagcccgacaaggccggagcgggaaggaggcacagccagagaacaacacacaca

SEQ ID NO: 227753 - RNA, 70 nt, Homo sapiens
ggaccccggggaagaggaagcaccaaccgcccccaggggcagcggggagcgggggccgcaggcaaggccg

SEQ ID NO: 227754 - RNA, 80 nt, Homo sapiens
gcagccgccggccgagccccgccacccacccgaaggacaagcgcgggacccgcagagggccaaggcagcgcagagaggcc

SEQ ID NO: 227755 - RNA, 63 nt, Homo sapiens
gcacccggagcagccgggagaagggcgcggagggccaacagaagaaaaacggaacagagccaa

SEQ ID NO: 227756 - RNA, 45 nt, Homo sapiens
acaccagaaaccccaagccccaaaggcaccacagaaaagcaaggc

SEQ ID NO: 227757 - RNA, 85 nt, Homo sapiens
gcaaggccagcagcacccggacgggaaggagcaaggggaggccgccaccccggggccaacaagaccccaggcagccccgccccac

SEQ ID NO: 227758 - RNA, 58 nt, Homo sapiens
ccagcagccaccaggagcccgagagagaaggaagggcgcaacccccaaaggaaccgag

SEQ ID NO: 227759 - RNA, 80 nt, Homo sapiens
ggagagcaagaccaaagagcccgccaaaggcccaaaagcaggacggggccagccaccccacgccccgcacgccaacccac

SEQ ID NO: 227760 - RNA, 77 nt, Homo sapiens
cccgggggcaggcgcccgcccccaggcgcgcccagccccgcagccagggcgaacccccgcagcaaccccaagcgccc

SEQ ID NO: 227761 - RNA, 72 nt, Homo sapiens
gcccagagaacgaaccgccccgcccaaggagagaggagagagccccgggacagagcagaagcccccaaagca

SEQ ID NO: 227762 - RNA, 76 nt, Homo sapiens
cagaagcacaaggacagagcacccaccacaggagggacaagaccaccccagcacaggcgccaggggaggacaccgg

SEQ ID NO: 227763 - RNA, 70 nt, Homo sapiens
cagacggaaacgacagaagcagaggacgacaaggcgaacaagaacgggagccaccaaacggcaccccaac

SEQ ID NO: 227764 - RNA, 66 nt, Homo sapiens
gcaggccggggagcgccaggcaccagaaggagaaaagccgaaacgggaagaagaagcccaaccacc

SEQ ID NO: 227765 - RNA, 71 nt, Homo sapiens
cagcgacaacccccagaagagaccaacgccaccaaccaaccgagccgaggaacagaaacaggagaagcccc

SEQ ID NO: 227766 - RNA, 76 nt, Homo sapiens
ccagaaggaccaagaggcagcaggaccgcggcggcgaacacagagggcacacacaaaggaaagaaggaggaagaag

SEQ ID NO: 227767 - RNA, 53 nt, Homo sapiens
ggcgacgccacccaagacacaaacggcgacacaggagaaaacgggaaacggaa

SEQ ID NO: 227768 - RNA, 75 nt, Homo sapiens
aggaccacggagccggagaaacagaagcgggacaccgagaggaaccagcaggcaaagaaagcaaaagaagagcga

SEQ ID NO: 227769 - RNA, 77 nt, Homo sapiens
cgcagacccaacagcccgcaagccagcaagaggcacggaacagcggaacgggagcgcccagacaagaggcaagaacc

SEQ ID NO: 227770 - RNA, 58 nt, Homo sapiens
gcccccaggcggaacgcccgccccgcagagaggccggagcgcgaagacgcagggaaag

SEQ ID NO: 227771 - RNA, 62 nt, Homo sapiens
cacaggaggcccgaggagcggccacgcgacggcccccccacgggacgcccacgggcagaccg

SEQ ID NO: 227772 - RNA, 74 nt, Homo sapiens
gcgagccgaaagagaaaaagcggaaggccacacgcgagacgacgggaccgaaggaccccgccagagacaaccga

SEQ ID NO: 227773 - RNA, 68 nt, Homo sapiens
ccaacacgagaaacaaaggacgcgccgccaggaggaccccccgcggagggagcaccccgagcacgcca

SEQ ID NO: 227774 - RNA, 64 nt, Homo sapiens
ggcccgggggcgcgggccgggggaagagacaacagccacaagggacaaaaggaagacaagggag

SEQ ID NO: 227775 - RNA, 79 nt, Homo sapiens
cacgccggccacggagagaagcaggggcggggaccgccgccgggaaggaagggccaggccgcaccgggcggggaagaga

SEQ ID NO: 227776 - RNA, 63 nt, Homo sapiens
ccccgccaccaaaggcccaggagagagggaaagaagcagcaggcggaaacgcgaacgccaaac

SEQ ID NO: 227777 - RNA, 67 nt, Homo sapiens
ggaccccggacgagcccggcgaggaccagcgagaggacggaccaagacacggcaaggcccaaaacac

SEQ ID NO: 227778 - RNA, 74 nt, Homo sapiens
cgcgaggggcgccgaagcgaggggaagggggagcaacagacaagcccgaaaggaacagcagcaggaacgaaacc

SEQ ID NO: 227779 - RNA, 79 nt, Homo sapiens
ccaaaggcgggaacaagcgaaccgaacacagggagggccaagaacccccgaagagggaaagcggacccgcccagcagaa

SEQ ID NO: 227780 - RNA, 76 nt, Homo sapiens
gaccaggcgcaccagcgcagcccacgacaccaccccgcacaggccgccgacacacaccgggagaccacagccacgc

SEQ ID NO: 227781 - RNA, 76 nt, Homo sapiens
gcgggggaaccggcgcgccggcgcgcggcgcggacaggcccaaacggaagccaccgacaagagcacagggaagggg

SEQ ID NO: 227782 - RNA, 68 nt, Homo sapiens
agagaacaggcccagacagcgaaaccgcggcacgcgcaccaccaaaggcaaaccagaagcgacaagac

SEQ ID NO: 227783 - RNA, 53 nt, Homo sapiens
aaggaccaagaaccagacacagagagagagagcccgggaaccccgacaacagg

SEQ ID NO: 227784 - RNA, 72 nt, Homo sapiens
aaggaagcagcccagaacaaaagcagacccagagagagcagggaggagggagaaaggggacccaagagaaag

SEQ ID NO: 227785 - RNA, 54 nt, Homo sapiens
cgggcgcgccgcaccccagcagcacccaagcagaccaagggaacggaagcccca

SEQ ID NO: 227786 - RNA, 82 nt, Homo sapiens
cgacgaaggcgcaggacgaaggccacaggcgccaagaagccgagacaagccagaaaagccaaaaaccgacagcccccagcaa

SEQ ID NO: 227787 - RNA, 74 nt, Homo sapiens
gaagaagaaaggacgacagccagagagaagaccggagacccgaaagaggaagagcgccgcaacccaaaaaccaa

SEQ ID NO: 227788 - RNA, 101 nt, Homo sapiens
cagccgcagggggagaacccgcggaaaccccgcacagcccagaagcccgagaaaaccagaaggcaccgacaggaaaggaaaaggagaaccaggcacccggg

SEQ ID NO: 227789 - RNA, 39 nt, Homo sapiens
gccggaggaacgggagagggacgccagccgacagcaccc

SEQ ID NO: 227790 - RNA, 78 nt, Homo sapiens
agccaccacacgaccacagcagagacaggacaaggaggaaacaccaaggaagccccgccaacgaagaaaacaccgaac

SEQ ID NO: 227791 - RNA, 81 nt, Homo sapiens
gggaaagggcagcgggcccggcgggggaccgagggaggagcggggacggcgacccaggagaggaacagagacagacccggg

SEQ ID NO: 227792 - RNA, 80 nt, Homo sapiens
gggcggccagagcgccggcaagagccgggcggagaaccggggccgccaggggagacgcacagcggaccagcggccccaca

SEQ ID NO: 227793 - RNA, 75 nt, Homo sapiens
ggaaagaaccagagcgcaaaagcaagaggcaaaaaggaggcgggaaggaagaaagaggaaagcgggcagcgcgga

SEQ ID NO: 227794 - RNA, 74 nt, Homo sapiens
gagacggaggagccgagagaacggggcaaacgccgaaaggcaaccgcacacaaggaggccccggcaggccaccc

SEQ ID NO: 227795 - RNA, 76 nt, Homo sapiens
gaccgcaaaacagagaccggaaaaggagaacccaccccccacggaccgacgaagcggcacaaggcacgcacaggcg

SEQ ID NO: 227796 - RNA, 76 nt, Homo sapiens
agcccgagggcagcgcccacggccgcgaccggccgagcgcacagcgaggaggggggcgcgcagcccggggaccccc

SEQ ID NO: 227797 - RNA, 59 nt, Homo sapiens
caagaggagcgagccgagagccgggacaccacagcaagaggaacgggcacgccagaaaa

SEQ ID NO: 227798 - RNA, 77 nt, Homo sapiens
acccgccgcgaggcagcccccaaggaccgacgggaggaaaggagagaaggaaccggacgacgaacacaggcccgccg

SEQ ID NO: 227799 - RNA, 79 nt, Homo sapiens
gaccggagggaaagaaagagcccggacggaagaggaggagaccaagcgcacagccagacccgccggacgggagcccagg

SEQ ID NO: 227800 - RNA, 80 nt, Homo sapiens
gggcccacagcaggcgagacaacgggggcagccagaaccgcacgaacgacacccggcgacgagagaagcagaagggaagc

SEQ ID NO: 227801 - RNA, 72 nt, Homo sapiens
aaccagccgaaaagaagacgcaagggcccacacagcccagaggaggggggaagcccaggggaggaagcaccc

SEQ ID NO: 227802 - RNA, 82 nt, Homo sapiens
cacgaggacgcacagaagaaacgaaggaggcccaaccacaaaaggagccgacggaacccagacggagaacaaaaggaagaaa

SEQ ID NO: 227803 - RNA, 56 nt, Homo sapiens
gcggcgggacccccacccgccgcagcggccccaggaacgggcgcaccacgccaccc

SEQ ID NO: 227804 - RNA, 82 nt, Homo sapiens
gccgcccgacccaaagggaaaacagaaacagggaacggcaggacgagaaccaggaagagagccaagcaaaaaggacgggccc

SEQ ID NO: 227805 - RNA, 57 nt, Homo sapiens
caccaacgcagcaccccggccaaggaccacaaaacaaaccacccaacacaagcaaag

SEQ ID NO: 227806 - RNA, 76 nt, Homo sapiens
ccacgccgagaccagcgcccgacaaccaaaggaagacgacagcgaacacccgaaggagccagcaacagaggagaac

SEQ ID NO: 227807 - RNA, 64 nt, Homo sapiens
ccgcagagccaagccgagccagcagaaccaggaagacagcgcccagcaacccggcacccccaac

SEQ ID NO: 227808 - RNA, 79 nt, Homo sapiens
ggccgcggaaaccgacgcccgggggaaacagagaaagaaggcggccaggccaaccgaagacaggaaggccaggcaacac

SEQ ID NO: 227809 - RNA, 31 nt, Homo sapiens
gcagcacagcagcagagagaaaccgaagaag

SEQ ID NO: 227810 - RNA, 87 nt, Homo sapiens
ccgcccccccaacacgacccgagaccccgaaaagcgccgcagacagaagggggagaagcggaggagggacaggcaagaaggaagaag

SEQ ID NO: 227811 - RNA, 64 nt, Homo sapiens
gccgagcggaccccaaggagaagcaaaaagccacgagggacacaaggccagcagggcccagcca

SEQ ID NO: 227812 - RNA, 71 nt, Homo sapiens
aacaggcgagcgcccgaccacaccaagcggaaaaaagacaccagcgacaaggacaggacagggacaagcgc

SEQ ID NO: 227813 - RNA, 79 nt, Homo sapiens
cgggcgcaaagggaagccgaggcccgcggccccagacgcaaccagccaacagaccgggcgagggagcaagagaacgcgc

SEQ ID NO: 227814 - RNA, 83 nt, Homo sapiens
ccggcagcggcgagacgccaacgaacgaggggggaccaggggacacaccggaagacgcaacacaggccgcgagggggcaccga

SEQ ID NO: 227815 - RNA, 83 nt, Homo sapiens
gcggccagaggccacccacacaccaagacagcaccaggcccgaagcagaaaacagagggaaagaaacagccccagagcccaga

SEQ ID NO: 227816 - RNA, 62 nt, Homo sapiens
aggaccaggccccaacccagcaggagcgaggagcagcggaggaggaggagagcgcccggcag

SEQ ID NO: 227817 - RNA, 57 nt, Homo sapiens
aggaagcggaggagccccggaggcagagcggcgccagggggcgaggaagagacaggc

SEQ ID NO: 227818 - RNA, 53 nt, Homo sapiens
gagcacaacgcacaaaaggggcccccgcaaccagcgacaaacccgaaggcgag

SEQ ID NO: 227819 - RNA, 78 nt, Homo sapiens
cggggccaccacacccaggcagagccacagggcccaggggcccgggccgccccagggcacggcggaaccgcgaggccc

SEQ ID NO: 227820 - RNA, 80 nt, Homo sapiens
ggaggggcgcggaggcgaccgccaggcgcccaaacccggaccagagcaaagaggcgaccgccagcaagggaaaacgcgcc

SEQ ID NO: 227821 - RNA, 78 nt, Homo sapiens
ccgcccgccacccgcgcgccgccgccgaggagaaaggcaagacccacaaaccaccaccaacacagaaagccagaacgg

SEQ ID NO: 227822 - RNA, 61 nt, Homo sapiens
cggaccgcccccgagcccggaggggggagaaaaggcacagcagcggccaagggaggaaccc

SEQ ID NO: 227823 - RNA, 68 nt, Homo sapiens
agcgcggccaggaggagaaaaccggaaaccgggaggggggcaggcgagacagagggaaagaaccacca

SEQ ID NO: 227824 - RNA, 83 nt, Homo sapiens
ccccagagcaggggcgggcaagaacgggaacaccacaagggacggggacggagcgacagaaagcaggacccgccagcggagga

SEQ ID NO: 227825 - RNA, 56 nt, Homo sapiens
gccacggaggcaccagaagaagcaccagcgaggggcacagaggcaggcacaaaacc

SEQ ID NO: 227826 - RNA, 63 nt, Homo sapiens
cagccgccggccgcgggccccggacgggaaaagccagccggcacggccacaaccgaccggaca

SEQ ID NO: 227827 - RNA, 66 nt, Homo sapiens
aggaaaaacaaagaagacccaggccaaggaaaaggaacagagagagcagaaccgaaacggggaaag

SEQ ID NO: 227828 - RNA, 57 nt, Homo sapiens
aagaggcggcgggagaccccaaccgcagagcgcccggcgaccacgagaaacaggcaa

SEQ ID NO: 227829 - RNA, 65 nt, Homo sapiens
accccgagccggaagcggaggagggaccagcagccaccaacaacaccagggacacaacagcaagg

SEQ ID NO: 227830 - RNA, 56 nt, Homo sapiens
acaacgacagaggcagacaacacaaaaggaaagccaaggacacgcaggacgaagaa

SEQ ID NO: 227831 - RNA, 64 nt, Homo sapiens
ggggcacagacaccagaaacaacagacagcgggcagcagagaaagcaagagacgcaaccgaacg

SEQ ID NO: 227832 - RNA, 59 nt, Homo sapiens
gcaaccagcaagagcgagaagcacgagaaaacgagaagagaagcagcagggcaccgggg

SEQ ID NO: 227833 - RNA, 54 nt, Homo sapiens
gccgacccacgcaacaacaggcaggaaaagaagcaaacacccggccaggcacca

SEQ ID NO: 227834 - RNA, 66 nt, Homo sapiens
ggcccgaagcgcagaacgaaaccaagcacccaaaaggccacccaaacaacgaagagaacaacagag

SEQ ID NO: 227835 - RNA, 74 nt, Homo sapiens
gcggcacagacaacgggcgaagaggggccaggaaccgaaggggaaaacgagacaacgaaggggaaagacacgga

SEQ ID NO: 227836 - RNA, 70 nt, Homo sapiens
cgcagacaaaagaagggagaggagcgaaagaacgagagcagaggaaagagcacgaaacccccaggcacca

SEQ ID NO: 227837 - RNA, 74 nt, Homo sapiens
gggcggagacaggaccgcggcgagcaaggacagcccaggccaagacagcagccacgaggaaaaagaaggggaag

SEQ ID NO: 227838 - RNA, 74 nt, Homo sapiens
cagcaccagcgggcgagcgacacacaggagccccccaaccaggcccaggaaggaacccgcccagaccgaaccgc

SEQ ID NO: 227839 - RNA, 82 nt, Homo sapiens
ggcgcccgcccccccaccgaggaaggccgaagacaccgagggccagggaccaccgagcccaccacaagaccagagacggagc

SEQ ID NO: 227840 - RNA, 76 nt, Homo sapiens
cccgcagggcgaagcacggcccgcacaacacaagccacacgcggcagccgaccagccccaccccccaacaacaagg

SEQ ID NO: 227841 - RNA, 75 nt, Homo sapiens
gaccacccacacaaacccgggacgggccgagagaggccccagacgacccgaccccagcgaaagagaagccagaag

SEQ ID NO: 227842 - RNA, 55 nt, Homo sapiens
gcaagggagggcgcgcaacaagccagggcgagcaggaagaagaacaagaacacac

SEQ ID NO: 227843 - RNA, 73 nt, Homo sapiens
cgggaagcgacacaaacaaaccgaaagaagaagaggagaagaaaagaccagacaagccgggcaaggagaacaa

SEQ ID NO: 227844 - RNA, 53 nt, Homo sapiens
gaaaggaggcgcgcccggcgccccaggacaggacggggacaacggcaagcgga

SEQ ID NO: 227845 - RNA, 71 nt, Homo sapiens
gccaggagcgagagcacaggaaaagaaaaccggagaccagggcaacccagacgcggaggagagaggacgcg

SEQ ID NO: 227846 - RNA, 85 nt, Homo sapiens
  misc_feature (44)..(85): n is a, c, g, or u
cacaggaaacgcaggagagggggccaccgagcaccgagggcagnnnnnnnnnnnnnnnnnnnnnnnnnnnnnnnnnnnnnnnnnn

SEQ ID NO: 227847 - RNA, 76 nt, Homo sapiens
aaaaagagaagagcagaggaaacacagaaagaccccaaggacacagagcacaagcccgagaaagacgcagaaagag

SEQ ID NO: 227848 - RNA, 93 nt, Homo sapiens
ccggcccccccacccgcgggccgcggcgcccggggaaagccgggccccgagggcggaccgaggccgggaacgggaaacgcgcgccgagaagcc

SEQ ID NO: 227849 - RNA, 80 nt, Homo sapiens
gggaccccggagagaccgacggcccgggacccacaaccgaggcggccgacaccccacaggagggcggcggaggagccaag

SEQ ID NO: 227850 - RNA, 83 nt, Homo sapiens
cacggaccgagccgcgaggacacgggcgcaaccgcagcacacagcgaccgggagaacaagacgcccgccgacacagccaccaa

SEQ ID NO: 227851 - RNA, 81 nt, Homo sapiens
caccccgagcacgaggaggacagacggaggcgggggacccaaccccagcggaccaggccgacaccacggagaaggaacaag

SEQ ID NO: 227852 - RNA, 56 nt, Homo sapiens
ggagaaccaacggcccgaaagagagcccaaaaggcagagcgaggagagaagaagga

SEQ ID NO: 227853 - RNA, 53 nt, Homo sapiens
gacgggaggcgaacggcgccacgcagggccagggaggcagcgagaaaaggaca

SEQ ID NO: 227854 - RNA, 31 nt, Homo sapiens
aagcacgggaggagagaaccggggaacagac

SEQ ID NO: 227855 - RNA, 77 nt, Homo sapiens
ggacaagcacccggaaccacacacgcaagcgccccacagagcaagacacagggcaaaccggcacgagccaggcacca

SEQ ID NO: 227856 - RNA, 74 nt, Homo sapiens
aggacgccagcggagaacgcggcaaagcgaggaggggcaggaggaacacaacagcagaaaaagagcagaggaca

SEQ ID NO: 227857 - RNA, 36 nt, Homo sapiens
ggcggcaccgaggagacaagaaacggcagacccacc

SEQ ID NO: 227858 - RNA, 72 nt, Homo sapiens
acaaccccgagcagcccggcgccccaaaggggggaaagggagcagcaccggccacacccacagcacgaccgg

SEQ ID NO: 227859 - RNA, 77 nt, Homo sapiens
aaaaccaaaagaagcacacagaaaacaggcaaccaaaagcccaaaggaggcacagaaagaaaggcacagagaagggc

SEQ ID NO: 227860 - RNA, 77 nt, Homo sapiens
agagcggaccgagagcgcgaaacgcacgagaaggccgacagcaggaagcaccagacaccaaccacagcgcagcaggc

SEQ ID NO: 227861 - RNA, 77 nt, Homo sapiens
ggcaccaccgggcagacagccagaagcggccagcagcgacaccagaagcgcccaggggccgcaccggcgcagcgccc

SEQ ID NO: 227862 - RNA, 81 nt, Homo sapiens
ggcccccacgcccaccgcccgcgagcaaaggacccagcgcacaaagggccacaaaccaaagggcgggagcaaggcggcgga

SEQ ID NO: 227863 - RNA, 88 nt, Homo sapiens
cgcccaagccgcacagccgcggcggcagcagcaggagagcgaccaccgagacaagccggccaccggaaccagacaccgcgagcgcagg

SEQ ID NO: 227864 - RNA, 55 nt, Homo sapiens
cgaccaacacccgaggcggacgcagagacagaaagcagaagccacggagaaaaac

SEQ ID NO: 227865 - RNA, 87 nt, Homo sapiens
gaggaaggaacgaggcaaggagcaaagcagcggcgcagcccggggggcgggacaggccagggacagcccaacccagcgcgaagccag

SEQ ID NO: 227866 - RNA, 81 nt, Homo sapiens
agagcgcgcggcggacgcgcccgggacgcgcggcggcaccgggaggccgggccgagcgaggcagcgacggaagcccgcgcc

SEQ ID NO: 227867 - RNA, 73 nt, Homo sapiens
gccgcggagcggggagagcgggggccagcgccccgaggagaggcagacagggggagagccagcaaccggaagc

SEQ ID NO: 227868 - RNA, 60 nt, Homo sapiens
caagcgcacgggcccgccgccagaacgaaggggcagaccaacaccacccagcaaaaaccc

SEQ ID NO: 227869 - RNA, 119 nt, Homo sapiens
ggccagagcccaaaccccaggccaagcagccaccagcagcccccagagcgggaccacagaggagcggaggagccccaggaaggcgccaaaggggcagaagaaacgcagacagccagaac

SEQ ID NO: 227870 - RNA, 72 nt, Homo sapiens
ccaaagagaaagagcaagaggaagaccgcaaaggacgagggcgcacagaacgggaagaaagccaaacagaca

SEQ ID NO: 227871 - RNA, 66 nt, Homo sapiens
gaccaccccgggcgggaagacagaaccagggccgggggccaggcacccccgacagacaaaccccag

SEQ ID NO: 227872 - RNA, 88 nt, Homo sapiens
cggagagggaggcgggaggagcggcagccgcgaggaggcgcgggagggcgagaacgaccccgagacgagccgggcagcgacgacagcc

SEQ ID NO: 227873 - RNA, 56 nt, Homo sapiens
gggaaggagggcgccgagcaacaaccgccgagcggcgggaaaacggcacaaggcga

SEQ ID NO: 227874 - RNA, 68 nt, Homo sapiens
gggcagcgccaacagggcggaaacaggaggaaaaccccgaacacgaaagagcagcccgaaacggacca

SEQ ID NO: 227875 - RNA, 78 nt, Homo sapiens
gcgaacggcaggcgccggcgggccggccgccagcaagaggccgacgagaaaagaaccccggaccgcagcaggccaaac

SEQ ID NO: 227876 - RNA, 67 nt, Homo sapiens
ccagaggcgccccccacaccccccgccgcagcagcaccggcgacagggggggccccagcccggccga

SEQ ID NO: 227877 - RNA, 58 nt, Homo sapiens
aaaccccaacacagagccaagcgccaaggacaagcaaggggccaaggagccaaggagg

SEQ ID NO: 227878 - RNA, 75 nt, Homo sapiens
agccccagcagaaacaccaaagaaaagaggagcacgaaagaacggcaggcagggagagcaccaggaccagaagag

SEQ ID NO: 227879 - RNA, 71 nt, Homo sapiens
cagccccaccagcaggagcacacagggccaaaaaaggaaagaaaaaacaggaaacaaccgaagcagagcga

SEQ ID NO: 227880 - RNA, 39 nt, Homo sapiens
ggagccggccgaggaggcacagcacagggacgagaacac

SEQ ID NO: 227881 - RNA, 79 nt, Homo sapiens
accgggaaaccgggaccgaccaccgcaggcgcgcacccaggcgacagggcagaccgccagcagcacagcaagccacaga

SEQ ID NO: 227882 - RNA, 33 nt, Homo sapiens
gaggagagccccgccaggagaccaacggaagcg

SEQ ID NO: 227883 - RNA, 77 nt, Homo sapiens
ggaggccccagggaagcgcagaaagcaggcgaacccgcggcgcaaaacggggacgaagggaacccgccgggcggccc

SEQ ID NO: 227884 - RNA, 77 nt, Homo sapiens
ccaggccaagcaaccaccagcagcccccagagcggaacacaggggggacgccgccagaggcccgaaaggaaaggaaa

SEQ ID NO: 227885 - RNA, 88 nt, Homo sapiens
agccaacggcccagccgaggagcggcgggcggcggcgcgcggacccaggcgcggaggcgaggccagcagagagacgggggcaccagag

SEQ ID NO: 227886 - RNA, 73 nt, Homo sapiens
caaggacccgggacagggaccagcgggaaggcagacagcgagggcgacgagagaagaaacagcacaaaacacg

SEQ ID NO: 227887 - RNA, 86 nt, Homo sapiens
gcagcggggacgcggggccgcggcgccggcagcagagaccaccagaagggagccaaaaaccgaacacccggaaggggacaagggac

SEQ ID NO: 227888 - RNA, 67 nt, Homo sapiens
agagcgggcgcgccacggccacacgcccagcgagcgccccacacaggaaggccgcggaccccccccc

SEQ ID NO: 227889 - RNA, 68 nt, Homo sapiens
cccagaaaaaggaacaccaagaagaaacagagaacgaggaagaaaaggaaacccaaaaagacaaggcc

SEQ ID NO: 227890 - RNA, 75 nt, Homo sapiens
ccccaggagcacacacgggagaaggcagggagagacagaccagcgaggccaggccacacaagccccagccaaaac

SEQ ID NO: 227891 - RNA, 68 nt, Homo sapiens
gaacagacacccacccgacggggccggcccgccgcccaaacagcaagaggaccgccgcggagaccaca

SEQ ID NO: 227892 - RNA, 70 nt, Homo sapiens
gcaaggagggcgaagcggggcggaccgcacagagaccgccccagccagcacacccagagcccaacacccc

SEQ ID NO: 227893 - RNA, 48 nt, Homo sapiens
ggaaaggcagaacgccgaacaggagcaacagccaaaaccagagacaag

SEQ ID NO: 227894 - RNA, 76 nt, Homo sapiens
ccccagccgcagccacaacaccggcaggaaccaccaggacagagagcaagaaacgcagacacagcaagaagaaggc

SEQ ID NO: 227895 - RNA, 113 nt, Homo sapiens
caacaccaggccggccgccaagaagaccgagagcaccacaaggccaagggcaaggagacaggaacagaaagacaacggacaaggcaggaagaaaacccacacgaggacggagc

SEQ ID NO: 227896 - RNA, 82 nt, Homo sapiens
ccaccagagcggcccccagcaccacagcccgcagccccgccagccacccccaggaaccgggacggaagggggaggaccaggc

SEQ ID NO: 227897 - RNA, 89 nt, Homo sapiens
cgcccgggaaggggcgacggccggcccgaggggccagcgcccacccaagcgccgggacgacagcagcccgcagcagcggcacagcgaca

SEQ ID NO: 227898 - RNA, 69 nt, Homo sapiens
ccagaggcccaaagaggcgcaagagagaggagggggcaccgagcaacgagggcagaaacaggggggaag

SEQ ID NO: 227899 - RNA, 85 nt, Homo sapiens
cccagccagagggagcaggggcccagccagggacggaccccacccccagggaccccagacccgccccggagaaagacgaccgcca

SEQ ID NO: 227900 - RNA, 73 nt, Homo sapiens
ggaaaggagaccccccgggaaagcaagaaagaaacaaaagcacccgcgaagaaaaccgcgaagccgccccgga

SEQ ID NO: 227901 - RNA, 78 nt, Homo sapiens
cagcagcggcagcccgcggcggcgcgcccagggcagggcccaaggaaggacccgccagcccgcagacacaaaacgcac

SEQ ID NO: 227902 - RNA, 90 nt, Homo sapiens
gagacccagagccagacgaggccggggggccgggcccccccaggaaacacgacaaggacgaggcccaaggaaacggcggcgccagcagga

SEQ ID NO: 227903 - RNA, 34 nt, Homo sapiens
cggcacccccaggaagcgcggccgaggaaggcgg

SEQ ID NO: 227904 - RNA, 74 nt, Homo sapiens
ggccgggagagaggcgagaagaggaagaagcaagccgacgcagaaagcagacccccggagcagagggggagagg

SEQ ID NO: 227905 - RNA, 78 nt, Homo sapiens
ggagcacgacagaaacacagccgcagcaacagaagccaggcaaggaacgcggagaaacaaaaggcaggaaaggccaag

SEQ ID NO: 227906 - RNA, 80 nt, Homo sapiens
ggcgcccgcggccagccgcaagacccgccacaagcaacgcgggaagagaagggcaacccaacaacagccaccgggacacc

SEQ ID NO: 227907 - RNA, 91 nt, Homo sapiens
gcggcggcgccggcgaggaggcgcccggagcggccgccccagcaaaaaggcacaaacccagcacagagaagacggcgacaagcaaaagacg

SEQ ID NO: 227908 - RNA, 73 nt, Homo sapiens
aaagagccccgaaaaccacccagccgccggggccggcacgaggaggggccgcgaacccccgaagcacagaaag

SEQ ID NO: 227909 - RNA, 77 nt, Homo sapiens
ccgacccgaacgaggagacgggcccccaaaaagcggcaaaagcaagagaacaggaaggcaaacagggggcaccgacc

SEQ ID NO: 227910 - RNA, 83 nt, Homo sapiens
gcgccacgcggagcccggacaccggaacacgggggcaacggcccggagggacgagaccccccacggggcacgaccggaggcag

SEQ ID NO: 227911 - RNA, 76 nt, Homo sapiens
cggaaaacagcacaaaacccagcaacagaacaagagggcacccacagaaggagaacaagcagagcaccggacacga

SEQ ID NO: 227912 - RNA, 57 nt, Homo sapiens
gcggaggccgcaaccaggcccgcgccgccaccagggcggagaacggaaaagcaccag

SEQ ID NO: 227913 - RNA, 72 nt, Homo sapiens
aacacacaaaaagaagcccgacagggcccacccagcgaaaccccagaagacaggcagcagagagaagaccag

SEQ ID NO: 227914 - RNA, 62 nt, Homo sapiens
cacgcaaccaccgcccggccacaccagggaaacccagcggcggcagaaccagccggcacaaa

SEQ ID NO: 227915 - RNA, 72 nt, Homo sapiens
gaccgcagggaaaaaaagaggaagccgaacgagcggggacgggaacggacagcggaacagagaaggagaaaa

SEQ ID NO: 227916 - RNA, 84 nt, Homo sapiens
cagagccgggagcaagaagaacacccagaggacaccagaggaccagaacccacgagaaacagacgagccaaccagaccccagga

SEQ ID NO: 227917 - RNA, 75 nt, Homo sapiens
cccggcgaggcgcagaaaccccggacaaggcacgccagacgaggcagcgagaagaaaaagaagagagagacacgg

SEQ ID NO: 227918 - RNA, 57 nt, Homo sapiens
gcgcagggcccagaacgggacaggacagagcagcacgccggacacaagagggcaaga

SEQ ID NO: 227919 - RNA, 79 nt, Homo sapiens
gcacagcaaccggagaagaggccccagggcaggggcccggagagcgcgccccccaggacccagaccgagccccgcaggc

SEQ ID NO: 227920 - RNA, 69 nt, Homo sapiens
cagagcgacagagcggcgaagggcggaggccaaggacaccacccccgcgggagaaacccacaaaacccc

SEQ ID NO: 227921 - RNA, 75 nt, Homo sapiens
aaacagaggacaaggaggcagggaagaaagcacgggaaaaggccgggcccacaggggagagcccagaaaaggcac

SEQ ID NO: 227922 - RNA, 74 nt, Homo sapiens
gaaggcgcgacccagccccagcccagccgcggcacaagggcacagcacccacgagggaagacacaggaagcgcc

SEQ ID NO: 227923 - RNA, 50 nt, Homo sapiens
ggggacggagcacaaacggaggaaacgacaaaacgggcgaaacagacccc

SEQ ID NO: 227924 - RNA, 80 nt, Homo sapiens
cagcagaaacgcaccaggccaaagaaagagaagacagcccagagcaagcacacggaggcccgggagccagaccgggagcc

SEQ ID NO: 227925 - RNA, 76 nt, Homo sapiens
ccagccccgaggagcgggaacagcgcccaggcaaaacgggggggcagaaggagcaggccaacaccagagacacgcc

SEQ ID NO: 227926 - RNA, 56 nt, Homo sapiens
aaacggaaggaaaaggaacaacagccacaggggcagagagaacccaacacagggag

SEQ ID NO: 227927 - RNA, 83 nt, Homo sapiens
cagcgggggcggggcggcggcgccggcgcgggcccgggccccgagcgcccgaacagacggcccgccacgggccccgcagccgc

SEQ ID NO: 227928 - RNA, 72 nt, Homo sapiens
cgagagggcggcgaaggaggcagaggcacagcgcaggaagaccgcaggaaagcaggaaggcaagaaagccaa

SEQ ID NO: 227929 - RNA, 78 nt, Homo sapiens
gcccgaagaaaacgggggcgccaccgggccgcgggggcaggggaaaggaggagcaggaggacgaggacaaggaggacc

SEQ ID NO: 227930 - RNA, 81 nt, Homo sapiens
gaagagcggccccgaaggaggggaagggacggggggcggccacggcaggggagccaaccaaggagagcgaaggagacccac

SEQ ID NO: 227931 - RNA, 41 nt, Homo sapiens
aagcaccagaaggagagaagggagaaggaacaagaaaaggc

SEQ ID NO: 227932 - RNA, 74 nt, Homo sapiens
cgggcggaaccccggaaccaggccgggcccaagaagcacgaagcgggggcagcccaaagcaggagcggaaaaga

SEQ ID NO: 227933 - RNA, 48 nt, Homo sapiens
ccgggagggcgcagcggggacgcggacgcacgagcggggcccggcgca

SEQ ID NO: 227934 - RNA, 82 nt, Homo sapiens
gaaggccaagaggcggcgggagaccccaaccgcagagcgcccgaaaagaccagcaaaaacagaaccaaagacaaaaaccacc

SEQ ID NO: 227935 - RNA, 69 nt, Homo sapiens
caagaaaaggaaagacccaaaggagaaaccaggcgacccaccagacgacggaccagagaagcggggccg

SEQ ID NO: 227936 - RNA, 72 nt, Homo sapiens
aaaggcagggaaaaggaagagaagccgcgacccaaagacacaagcaggagaagagaagaaacagaaaaacag

SEQ ID NO: 227937 - RNA, 81 nt, Homo sapiens
ggaagaaaacccaaagaagagaggaagaagaccccaagcaaggggccaccacagagcccgcagggacacagcagaacaagc

SEQ ID NO: 227938 - RNA, 76 nt, Homo sapiens
cccacaaagcagccggggggcgcaaggaaagggggcgaacagcgaccagagggcaccagagagaccccaaggcgga

SEQ ID NO: 227939 - RNA, 73 nt, Homo sapiens
ccgccaccccacaggcccccaccaggccgcggcagaccagacccacaccggggcagggccccacgagacacag

SEQ ID NO: 227940 - RNA, 78 nt, Homo sapiens
cgcgcccagaagaagggaaggcgcgaggaggaaaggaggacgagggcagagcacaggcaacagagcacacaagaccgg

SEQ ID NO: 227941 - RNA, 76 nt, Homo sapiens
gggcacggccacacgccccgcaggggccagggagagaagcacaaggcgaccaccagcagaccggacaccgccccgg

SEQ ID NO: 227942 - RNA, 75 nt, Homo sapiens
aaaaacaccacaacaaccagggcagcgccgacacgagaggaggcgcgagaaacagggaaacgagaaacagaaaga

SEQ ID NO: 227943 - RNA, 89 nt, Homo sapiens
aaggcgggggaccagcggcgaggccaggagccgccaggcggcgcggcggccccaccacccagagcgagaagcccagcgcgaaccaccgg

SEQ ID NO: 227944 - RNA, 69 nt, Homo sapiens
aaaaaaacagacgcgacaagagcgcaacgaagcgccccccccgaggccagaaacaagacccgccaccca

SEQ ID NO: 227945 - RNA, 67 nt, Homo sapiens
gaaacccaagagcagcggcagggaagccgaagaggacccaaaaaccggaagaaagcgaccaacggaa

SEQ ID NO: 227946 - RNA, 72 nt, Homo sapiens
gggggccacacgcaaggggaacagacccagcgccaccccccaccagaagcgaggacaaaccaccacccaaaa

SEQ ID NO: 227947 - RNA, 67 nt, Homo sapiens
aaaacgccgcaacggccggcggggccaaagccgggacagccaacaaaggaacgagcagcaacggcca

SEQ ID NO: 227948 - RNA, 71 nt, Homo sapiens
gacacgaaagcagacccaacaccgggagccaggaggcgacaagacaggacccgaagaagcacgggcaccac

SEQ ID NO: 227949 - RNA, 59 nt, Homo sapiens
cagacgagccccgggcaccgcgcgcgcccgaggcgcgaaggaagacccacaagagacca

SEQ ID NO: 227950 - RNA, 77 nt, Homo sapiens
aagccaaaacagagaacagaaagaccggcacgcacagcaccacgaaaagaccgagacagccagcgccggaggaaccc

SEQ ID NO: 227951 - RNA, 65 nt, Homo sapiens
acgacaccgccccaacccacgagaggacagcccaggagcagggccgagagccaggggaaaggcca

SEQ ID NO: 227952 - RNA, 77 nt, Homo sapiens
cggccgaaggcgaacgccgcggccaaggagccgccaaagccagacgaccggagaagaacaagccgacccaaagccgc

SEQ ID NO: 227953 - RNA, 79 nt, Homo sapiens
gggaagagggggccgccgaggagccccggccgcagccgggcccgagagccaccaaagccggcacgcaaaggcaacgcag

SEQ ID NO: 227954 - RNA, 77 nt, Homo sapiens
ggacacggagaggaaggccaagagaaaccaccaagagccaggaaggcaaaggccgagagagagccccagcaccagca

SEQ ID NO: 227955 - RNA, 85 nt, Homo sapiens
gacgggaccgggaccgcccggacccggccgggagaagcagcagagaaagaaaagcccccaccccgcgcacacagcgcaacaaaca

SEQ ID NO: 227956 - RNA, 71 nt, Homo sapiens
gcaagaacagcgacaaggagagaagcgcggagccccaaggacgacaggcagcgcgggagcaccggaagagc

SEQ ID NO: 227957 - RNA, 72 nt, Homo sapiens
cgacccgccccggaacaggccagcggccaacaggacaaaccggcgaccacacacggggacgacggggaagcc

SEQ ID NO: 227958 - RNA, 68 nt, Homo sapiens
accagcaccgccgcccaccacccgacccagagcccccgcccgaggaagcgcagcgggaaagaaagcag

SEQ ID NO: 227959 - RNA, 72 nt, Homo sapiens
cggagagagaaagagaccaaaggagaaacaagagacaccagcggcgaaaaaggccgaggaaaacaggaagag

SEQ ID NO: 227960 - RNA, 79 nt, Homo sapiens
gaggcgcgcgcgcgccgagccgcgggcccgcagacgccgacaccccaggccacgagccccaggccacggcagcaggccc

SEQ ID NO: 227961 - RNA, 72 nt, Homo sapiens
acccaaagagcgacgaagcagcaacgcagcggagaagagccaagcacacaggaggggacccccggcgaagcc

SEQ ID NO: 227962 - RNA, 69 nt, Homo sapiens
gaacgcaaaggagagaaggcagcaggaggagccggcaacaagagaggagaccacaaccaccagaagacc

SEQ ID NO: 227963 - RNA, 85 nt, Homo sapiens
agaagcgacagaacaaagcaaaaacccagaagggaggccggcccagggaaggagagcagcacaaggaaaacgagagaaacgaagg

SEQ ID NO: 227964 - RNA, 117 nt, Homo sapiens
agcgcccggaccggccgagaggaagacgagccgggaggaacggcccggaaacaggaggacgccgccaggcacagagaaggcaaacgggagggcgaggacaccaagagcagcgcggag

SEQ ID NO: 227965 - RNA, 82 nt, Homo sapiens
cggagcgacaaaggccacaaagcgcgacaccccggacccagccccaacggcaagcaacggaaaccacacagcggccgacccc

SEQ ID NO: 227966 - RNA, 59 nt, Homo sapiens
cggagagacgaaccgaagcgggcgggcccccccacccagagcgaacagagcagagcacg

SEQ ID NO: 227967 - RNA, 77 nt, Homo sapiens
ccgaaggaggaagggaaccaacccacccggcgccgcggcccaaaagccccacgcgaagagaagaagcaacagacaaa

SEQ ID NO: 227968 - RNA, 52 nt, Homo sapiens
agggccaaagaagggagagcagaagacagacagaagcgacccgaccacagca

SEQ ID NO: 227969 - RNA, 80 nt, Homo sapiens
gagcccgagcgccccagcccgggcggaagagcgccacgccccccccaccgcccacgccggaaggacgggaccccggccac

SEQ ID NO: 227970 - RNA, 78 nt, Homo sapiens
agcaggcaaaggggacgcaggggccgaaagggcaagaaggcaggaaaaaggccagcagggaaccccaacacggacgcg

SEQ ID NO: 227971 - RNA, 81 nt, Homo sapiens
cgcgcccccgcgcgagcacccgagcggcggcggcggcagcagcggcagcggcaagcaccggagggcagaacgacgaaagac

SEQ ID NO: 227972 - RNA, 81 nt, Homo sapiens
gcgaccagcccgcgccccgcccacacagaacgaaagacgcgccagcaggcaacaaaaccaaggggaccaaaagcagagaca

SEQ ID NO: 227973 - RNA, 83 nt, Homo sapiens
ccgagagagagacggcccggccagccagggaacagcccacccaacaagacaccggacaagagagaaaaggaacagccgaagcc

SEQ ID NO: 227974 - RNA, 68 nt, Homo sapiens
gggaccgaccaccagaggaagagacgagaagcaaggaagggaggagaacagaaaaaaaggaaaagaga

SEQ ID NO: 227975 - RNA, 76 nt, Homo sapiens
gcgggcgcgacccacagggaaaacagaccgccaggggaccgggggcccaccccgcccgggagggccggaccgacgg

SEQ ID NO: 227976 - RNA, 53 nt, Homo sapiens
ggcgacaggaaggagccggcacaggagacgaaagggaagggagggggagcggc

SEQ ID NO: 227977 - RNA, 57 nt, Homo sapiens
gggcaaagggcccaggagcgcaggagaaagggggagcggcccaaagggcgaggcccc

SEQ ID NO: 227978 - RNA, 77 nt, Homo sapiens
gaccagcaagccgagaaagggaggcggaacagggagaagggcggagaggaaaggaaacacccgaccaaagcggaacc

SEQ ID NO: 227979 - RNA, 82 nt, Homo sapiens
caaccgcaaccagacgccagcgggacgaggaccgagaccgcggccgggaccgagggagaagcgccacccaaggaacgcacca

SEQ ID NO: 227980 - RNA, 76 nt, Homo sapiens
ggcgacgggcacgggggaccggggggaacccagggggcaaaggcgagacaaggagggacaggccagaaagaggcca

SEQ ID NO: 227981 - RNA, 80 nt, Homo sapiens
ccgaagacaagcccaaagaaaggacaaggggacaaaggagagaaagggcccagaggggcaagggccggcggaggcggggg

SEQ ID NO: 227982 - RNA, 71 nt, Homo sapiens
gccagccccgggggccacgagcggggcggagaagagaaacgagggcacacgcacagggggcaacaccagcg

SEQ ID NO: 227983 - RNA, 72 nt, Homo sapiens
gcaacgggagcaagagacgagccgaggaaacaaaacgagaagaagaagagaggcaaaacaacaaacaggagg

SEQ ID NO: 227984 - RNA, 62 nt, Homo sapiens
gaaacacgccgcagcccacaaagagcagaaaccacaagacgaaaacagaggggaaaacaggc

SEQ ID NO: 227985 - RNA, 72 nt, Homo sapiens
acaaacgacaccccaaaaagaccaggggcgggaaacgcccgagacaaacagccagacaccagaaccgcaggg

SEQ ID NO: 227986 - RNA, 87 nt, Homo sapiens
gggggagcaaacaaaaccgagggcgagaagaagcagaggaagaacaagaagagaaccgaagcaagggcaagaagcaagcaaccaggc

SEQ ID NO: 227987 - RNA, 56 nt, Homo sapiens
agaccacggccggggaggcgggcaaaccccacgagagaagaacggcacacaccccc

SEQ ID NO: 227988 - RNA, 72 nt, Homo sapiens
agagccacgacgggcacagggcccagggagggaggggaaaaaggcccgaacccccccaggagaaccaccgcc

SEQ ID NO: 227989 - RNA, 71 nt, Homo sapiens
caacaacgccagccagcagcaaggaaggcagggccacagacggccagcggaggaccagaggcgggaacgag

SEQ ID NO: 227990 - RNA, 81 nt, Homo sapiens
gggcaccgggagcccacccaaggcacggcggagcacacagaagccgcgcagacacaccacggcccgagcccagggccgaag

SEQ ID NO: 227991 - RNA, 69 nt, Homo sapiens
aggggaccgccaccacccgagccaaaaggccggacccagcagggcccccggaacaaacccgggagccac

SEQ ID NO: 227992 - RNA, 76 nt, Homo sapiens
cgacaagcccacacgcgaacacgggggccggagaccacgacagaaacccggagcccaagacggagcaggaaagcac

SEQ ID NO: 227993 - RNA, 79 nt, Homo sapiens
gggaccgcccaccggcggccacgcaccgcgcgaagacggaagacgcgcccgcgccgagcgaggaaaacgccacgacaga

SEQ ID NO: 227994 - RNA, 73 nt, Homo sapiens
gaccggagcggggggcggagcagacacagacagcagagggagaacacgacgggccaaccacaccagcaaaaca

SEQ ID NO: 227995 - RNA, 76 nt, Homo sapiens
ccgcgcgccccggcccgcaccgcgggcaacaaccagccacggagcccgcacgccaccgcccccaccgccccacagc

SEQ ID NO: 227996 - RNA, 72 nt, Homo sapiens
gccaaaaaggcaaccacagagagagagagggagggggaagcagagccccgggccgggaaggggaaacggcca

SEQ ID NO: 227997 - RNA, 79 nt, Homo sapiens
cccgccgagcgcaacagcggcgggcggggcaccccagggacaaggagggacgaagaggcggacccccggaggacaagcc

SEQ ID NO: 227998 - RNA, 73 nt, Homo sapiens
acccgcccggggcagcaggacaggaccggaaagccggcaagcggaaaaccaccaagaaccacaccaaaccgcc

SEQ ID NO: 227999 - RNA, 111 nt, Homo sapiens
acagacgcaccggaaaaccaccaggccagaccaacacccccagggcccccgacccaaaagcccgaccccacgcacccggagccaccgagacgaaccaaacccaggaagcgg

SEQ ID NO: 228000 - RNA, 75 nt, Homo sapiens
aggcagcagggaggagggaaagaacgaccaaacaggcaaagggaaaccgaagggggggcccagcaggaagcccaa

SEQ ID NO: 228001 - RNA, 58 nt, Homo sapiens
aagggaccccaggaaacaggcggaaaccccacaagcggccaccaccaaccggaagaac

SEQ ID NO: 228002 - RNA, 74 nt, Homo sapiens
gaccccagcaccacagaaaaaagagggagaccaaccgaaggacaagggaaggagcagaggcaaagagcgacgca

SEQ ID NO: 228003 - RNA, 75 nt, Homo sapiens
agccccgggggaaacgggaccgaacgacgcagcaaacccaaagggagaagaaagaacaaagacaaggaacagcgg

SEQ ID NO: 228004 - RNA, 76 nt, Homo sapiens
gcgacgacgggggaagggcgcggaccggcagcagcgcaagggggaaagcggaccaagaggaaacccgaagaggcac

SEQ ID NO: 228005 - RNA, 80 nt, Homo sapiens
cggacgcagcgaaccgcggacagcagcgccccccgagggcgagcccccccacagcaggcgaacaagaggcgccagcgggc

SEQ ID NO: 228006 - RNA, 79 nt, Homo sapiens
aaaagacgaaagggggcgaccacagaaagcgcaacccaggcccaagaaacagacagcagcggaggcagggagacagcaa

SEQ ID NO: 228007 - RNA, 84 nt, Homo sapiens
cgcgggggcggggggccgagcaaccagaaccggagcaggaggcgcacaacacccagggcggagaacggaaaagcaccaggaagc

SEQ ID NO: 228008 - RNA, 77 nt, Homo sapiens
cagaccagaaacgggccccccaaaccagaagccacgcaaaggagcccgcagggccgccaccagcacagggagggaga

SEQ ID NO: 228009 - RNA, 67 nt, Homo sapiens
acaagagaacgggcccacacaacccaggcaaccaacaggcgggcaaccagaaccaaagaaaagaaag

SEQ ID NO: 228010 - RNA, 69 nt, Homo sapiens
ggaagacgggacagcaacaggcagaaaacgggaaccggaagggaagaaaaaaaaacgaggaccagcgaa

SEQ ID NO: 228011 - RNA, 75 nt, Homo sapiens
ggcaaagaggggccggaccacaaggcaagagcaggagccgcagcgggggcacacagaggcgacaggcacgcaaga

SEQ ID NO: 228012 - RNA, 76 nt, Homo sapiens
aaagcgcgagagcaagaagcaaacagaacgggaggcccacaggaaggaaccaaaacccggcagaacagccggggag

SEQ ID NO: 228013 - RNA, 85 nt, Homo sapiens
cagacaacgccccgggaccggagcagaacccccgcagagaaagcggacaaggcaaaaccagcaagcggacccagacaaaaggcga

SEQ ID NO: 228014 - RNA, 103 nt, Homo sapiens
gggccagcgccgcggggagggggcccgggcgccccgcagccccccaacaccgcccgccaggacgacaaaacagacgacgaggagacccggggaacggggagag

SEQ ID NO: 228015 - RNA, 84 nt, Homo sapiens
gagcacagagcccgccgccgaccgccgcccgccacacccgccgccaggcccaccagcgagcagcccgcgcacaagcaaccagcg

SEQ ID NO: 228016 - RNA, 78 nt, Homo sapiens
ggccgcgcgggcccgcagccgcgcacaggagggggccgcaggagagaggccggcccggaccagaagaccccggacggg

SEQ ID NO: 228017 - RNA, 79 nt, Homo sapiens
aagcccgggcgggcggcgggggacgcggggccagcccaggacccagaagaccccagacggggagcgcagcagagggagc

SEQ ID NO: 228018 - RNA, 66 nt, Homo sapiens
gaagcaaccagagcccaggaagaggcgaacgcggcagaacggaggcaggcagcacgagacacacca

SEQ ID NO: 228019 - RNA, 40 nt, Homo sapiens
aaagaaaacgaaccacgggagggcccaccggaccagaggc

SEQ ID NO: 228020 - RNA, 73 nt, Homo sapiens
cggccccgacgacagcgggccgggaaaagggcacgaggccggaaccgcccagccccgacagcaagcgcgaagc

SEQ ID NO: 228021 - RNA, 73 nt, Homo sapiens
gcggaggcggggggaccggcgggcgggcgcagcccaacgggcccccaagaccccgaggagagagagggacgag

SEQ ID NO: 228022 - RNA, 85 nt, Homo sapiens
gaggggcagaaagagaccgcagagacagccaacacggcacccacaggcagaggggaggagacacgaagcgacgcagagccagaag

SEQ ID NO: 228023 - RNA, 82 nt, Homo sapiens
accccccgccggccagaaggaggccaccagcccagccccgaaggcccgcggagacgagaccaaaaaaacaaccaccagcgag

SEQ ID NO: 228024 - RNA, 74 nt, Homo sapiens
gaacaaaggaaaccagacccagaggccaacccaaagaaggggagagaggcacggcccccgggacggccgccgga

SEQ ID NO: 228025 - RNA, 84 nt, Homo sapiens
cgggaaacgggcgaagcgacgagccgcgaggagggcaacagaagacacacaaagaccacaagccagcagcacacccccccacgg

SEQ ID NO: 228026 - RNA, 78 nt, Homo sapiens
agccgcacgccgaccggcgccgggagaccggggcggagaacggaaaagcaccaggaagcagagaggaccgcagaaggg

SEQ ID NO: 228027 - RNA, 69 nt, Homo sapiens
cgcgcagagccccagaagcgcaaaccacacaacaaacggcaccaacggcgaagacgggggcccgggcca

SEQ ID NO: 228028 - RNA, 79 nt, Homo sapiens
aacgaccaagaggggcgacgcagagccgagcgaagcggcgcaagaggcagacagacaggcgacgggcagccaacaagaa

SEQ ID NO: 228029 - RNA, 59 nt, Homo sapiens
cacaggcgcgagaaagcagacacccggccaagagcggaggccggcgggcgacccgcccg

SEQ ID NO: 228030 - RNA, 74 nt, Homo sapiens
cagaagcagagacccacagggcaggggcacgacaaggagcgcggggccagagcgaggaggcgaccgaagagaaa

SEQ ID NO: 228031 - RNA, 52 nt, Homo sapiens
cggagaacaaagaacaaaggggccaaaccaagcacaacaaagagagcaggga

SEQ ID NO: 228032 - RNA, 79 nt, Homo sapiens
aaggagacacggccccccaaggaaaacagggagaagccaaaaggacaggcagagggcccaacaacagaagaacccgcca

SEQ ID NO: 228033 - RNA, 81 nt, Homo sapiens
ggagaggggagccgcacgccacagcgaaggcgcgagggacaagagcagaacggcgaagacaaacacccacagagggccaca

SEQ ID NO: 228034 - RNA, 55 nt, Homo sapiens
caggaccaagaacagagcacagcaaggcggggcgggcacagagacaaggcagaac

SEQ ID NO: 228035 - RNA, 83 nt, Homo sapiens
ccgccagcccagccccagccccagcccacagagccgcagggacccgggccgcccggaagaggacggacaacggccaggacgcc

SEQ ID NO: 228036 - RNA, 105 nt, Homo sapiens
caaagacagagacaagcggggaagaacggcggagcacaccgaccaaaaaagaagggaaaggaaggcaaagccagccccgcaccacaaaggccccccaagggccgg

SEQ ID NO: 228037 - RNA, 38 nt, Homo sapiens
ggggaggaggggcaggcccggcgacagggcgccggggc

SEQ ID NO: 228038 - RNA, 72 nt, Homo sapiens
cgcaggaaggagaaacacagacccgcagcacgagccaccagcacagaagaagacagaagcggaagcccaaac

SEQ ID NO: 228039 - RNA, 76 nt, Homo sapiens
ccacgagcgggagcgaagagggaaccagcgcgcggcagccgcgacgggaacgaagcccaaaaggcagagacggacc

SEQ ID NO: 228040 - RNA, 64 nt, Homo sapiens
cccagaaaagaacggacagcaccacaggacgccaagccagcacaaaggggaccaccaggaaaac

SEQ ID NO: 228041 - RNA, 95 nt, Homo sapiens
cgacgcccccagcagccggcagcagcccccggggcaagagcaggagcccggcaccccccgccgacaaggagggccccgggaccaaggacacgcag

SEQ ID NO: 228042 - RNA, 74 nt, Homo sapiens
ccggggcgaagaagaagagaagagagaacagaggaagcgaagaacgaaaaagccaccacagggacccgaccgcc

SEQ ID NO: 228043 - RNA, 71 nt, Homo sapiens
cggaaaagacggagagaacaagggaagcagcggcagagaggagacaagagaagagcaaggcaagggaccag

SEQ ID NO: 228044 - RNA, 81 nt, Homo sapiens
gacggaagccacagccagcaggccccgccacacagaccacgggccacggaaggaaacccaggcaaaaggcaacacaagggc

SEQ ID NO: 228045 - RNA, 65 nt, Homo sapiens
gcgagaacggggccagcacagagaggcgacagcggagaagggaaggcggaggcaaggcgcgaccg

SEQ ID NO: 228046 - RNA, 78 nt, Homo sapiens
cgagcgggaagagacggagagaggaggagggagcccacgcagagcaacacaccaggaagcagagcggcaacaaaaacg

SEQ ID NO: 228047 - RNA, 74 nt, Homo sapiens
caggaccaaaagggaaaagcaccgcccaggacgggagaaccggcaagagaccggaagcaacagacccccacaac

SEQ ID NO: 228048 - RNA, 83 nt, Homo sapiens
agcgcgggagaagcggcgcccaccggcgggcaacacccgccgcagagccgccagggagaaaagacgaggaagcccaaaaaccg

SEQ ID NO: 228049 - RNA, 92 nt, Homo sapiens
gcaacacacaaggaagggcaggagaccccgaaaccggagcgagacccgaagagccacacccagcaggaggcccaggcacccagggggacaag

SEQ ID NO: 228050 - RNA, 71 nt, Homo sapiens
cgggacccgcgcccccggacggccacgagaccgggaacacgaaaaggacggagggaaaagcgccgggccca

SEQ ID NO: 228051 - RNA, 81 nt, Homo sapiens
ccagggagccaagcgccgcccggcccaagccaggcggcagacaaacggaaccaaccaaagcaaaacagggaaccagaagag

SEQ ID NO: 228052 - RNA, 82 nt, Homo sapiens
ccgagaaagccccgggagaagcagcgccgcccggggcagaccaggcagggaccagaagcagcagccccagaagccccgaagc

SEQ ID NO: 228053 - RNA, 115 nt, Homo sapiens
ggaaaagcaagaagggaaagaaaccgaagccccacaagccagggaagaccccgaaggaccaaggcgaggccgccaaagggagcgaggagacacgaagcagaagcagccagcggac

SEQ ID NO: 228054 - RNA, 79 nt, Homo sapiens
agaaggacaagcgcccgggcaccgcagggggaagcccaggccgacccacagccgcccagaccagggccagacaccaagg

SEQ ID NO: 228055 - RNA, 70 nt, Homo sapiens
aagcaacggaaacgaagaaggcccagcccaccagaacgaggaaccccagagaggacagaagccaaccagg

SEQ ID NO: 228056 - RNA, 82 nt, Homo sapiens
gccgaaacacagagaggcggaaaggcaccggagacagaggcggaaccaaaagcagggaaaccggcccccagagcaggagcag

SEQ ID NO: 228057 - RNA, 72 nt, Homo sapiens
agcgaccgagaaacaaaggaaccggaaaagcaaaacagggcggcagaaaaccaagccaggagggaacgcaac

SEQ ID NO: 228058 - RNA, 79 nt, Homo sapiens
gggagacggaccggcgggaacaacacccggagacgcccagagccgggggcaccacaggaggcagggaggacagcacgcg

SEQ ID NO: 228059 - RNA, 73 nt, Homo sapiens
agagacaaagccagcacccaaaggagcaacagacagcccccagaacagcaccagcaaaccagccagggaccaa

SEQ ID NO: 228060 - RNA, 53 nt, Homo sapiens
ccgccgacggagcagcacagcagagcccgagcgagacgacgggaccgaaggac

SEQ ID NO: 228061 - RNA, 32 nt, Homo sapiens
ccggaggcaccccgaccagggaaagaaaagca

SEQ ID NO: 228062 - RNA, 50 nt, Homo sapiens
accaaaagggaagggacccaggcgacaggaaaggaccacaaagaaagagc

SEQ ID NO: 228063 - RNA, 60 nt, Homo sapiens
cacccgccccccagccaggaccgaaccggaggagaagcggccacggaggcccagaggccg

SEQ ID NO: 228064 - RNA, 81 nt, Homo sapiens
gcagcgcggccgggcggggccgagggcccggacgaggaaagcaacgaggcgagcgaagaaagccggacgcccagagaagcg

SEQ ID NO: 228065 - RNA, 61 nt, Homo sapiens
gcagagacagacacaagcgggccaacaaaagaggcaggggaccccccgagggcagcccggc

SEQ ID NO: 228066 - RNA, 69 nt, Homo sapiens
ggacgggcaagcaagcagcagacagagaggacacgaaacggacaaaaagcggggaaaaggcccgagcag

SEQ ID NO: 228067 - RNA, 75 nt, Homo sapiens
ccgccggcgggaccgcagcacggggaaacgaccgccccaaaacggccagcaacagaagaaagcaagcaccgggga

SEQ ID NO: 228068 - RNA, 81 nt, Homo sapiens
cgcgccaaggagagccaggggaccccacgggcgaccggcaagagaggccagagagcacaagaagaaggacacacccagggg

SEQ ID NO: 228069 - RNA, 80 nt, Homo sapiens
gggagccccggaggggggcggcgcccacgggggagcgagccggagacagacaagcagaccggaagaccgacggaagacca

SEQ ID NO: 228070 - RNA, 81 nt, Homo sapiens
accaacacagcggcgccagcccgggccggggaagaggcccgcccagcgaccaggaccagcggagcagccaggagagcaaag

SEQ ID NO: 228071 - RNA, 67 nt, Homo sapiens
ggaggaccccaaccgcccaggaaacagcccaaaaccgccgcgcgcgaccaaagggaaaagcacaggg

SEQ ID NO: 228072 - RNA, 75 nt, Homo sapiens
cggcgacagacaagaggcgaaggcgccaggggagaggaggcagaaggagaccgcgggacagaaccgcgggcaaaa

SEQ ID NO: 228073 - RNA, 62 nt, Homo sapiens
agcgacagagacaagcgagcgccgcacaaaaagcagagagggggcagcagcaggaaggaaaa

SEQ ID NO: 228074 - RNA, 96 nt, Homo sapiens
cacccacgcaccacagaaaacagcaggagagcaccaacagggcgcggccaggacagacacaccccccggcaagcgccgcacagcccggggaaaggc

SEQ ID NO: 228075 - RNA, 62 nt, Homo sapiens
cgaaggccacgaggcaacccagcagcgcaccacaggcgccagaaagcagaaggaggcgggag

SEQ ID NO: 228076 - RNA, 93 nt, Homo sapiens
gaaagcaggggaagccgcaaccagccacaccaagagaccacaaaagcaaaggcagcgagaccggccgcagcaagccagccacaaaagacaaag

SEQ ID NO: 228077 - RNA, 54 nt, Homo sapiens
gcgagcgacccggccaaagcacgcgaacaaggaggccaaaacagaagaggcaaa

SEQ ID NO: 228078 - RNA, 69 nt, Homo sapiens
aacaagagccagacaaacaggggagagacaccggcccgggggccaggccgcggcgcgaacacaccaacc

SEQ ID NO: 228079 - RNA, 74 nt, Homo sapiens
cagggggaagccaagcagaacaacgagcaacagcagaaaagagaagagacccacgcaacgaagcagcccccacc

SEQ ID NO: 228080 - RNA, 80 nt, Homo sapiens
gcgaacccggcacacggccagacggagcagagaggcgggagagagcagcaccgaagagccgaagcgacccagccagcacc

SEQ ID NO: 228081 - RNA, 70 nt, Homo sapiens
gagggccaccaccgcagggggggcagagcgggaccgggaccgcagccgccgcggcgggagggcacacgcg

SEQ ID NO: 228082 - RNA, 52 nt, Homo sapiens
cagaaggaagaaaaaagacgggaacagggagaccaaacgaaggagcaagggc

SEQ ID NO: 228083 - RNA, 66 nt, Homo sapiens
gaacgagggacccggccacaggggggcacgcgaaaaaagcccaggacccacccggcagagaggacc

SEQ ID NO: 228084 - RNA, 70 nt, Homo sapiens
acgccccagggccaagcagagacacaaaaccggacccggaacaggccaaaagcaaaggagccaccgcacc

SEQ ID NO: 228085 - RNA, 68 nt, Homo sapiens
gccgcagcggaaagcaggagcacaggagagagcgaagcaccgcgcagaccgaaaggcacacggagcga

SEQ ID NO: 228086 - RNA, 85 nt, Homo sapiens
gcgcagccccggccccggcccgccggagaaacagcccgggcgcgccaggcacagccaagagcggaccggcagcggccagcgcagc

SEQ ID NO: 228087 - RNA, 40 nt, Homo sapiens
ccccaggaggcccggcagagcagaccaagggaacggaagc

SEQ ID NO: 228088 - RNA, 71 nt, Homo sapiens
cgaaccgccagagggcggcagcggcaccacggggacgcaaagggcccacaggccacccgccagacgcagcg

SEQ ID NO: 228089 - RNA, 56 nt, Homo sapiens
cggacccgccaggcccgagccaagaagaggcgccaccagcaaaaccagagaaacag

SEQ ID NO: 228090 - RNA, 78 nt, Homo sapiens
gacgcgagaacgacgaggacgcggcgcggcgcgcgaggcccgagggggcggaaaaacaaacgagccaccagcgcccac

SEQ ID NO: 228091 - RNA, 51 nt, Homo sapiens
acccacagcaaagccagcgacagaagccagaggagacagaagcggagaaga

SEQ ID NO: 228092 - RNA, 80 nt, Homo sapiens
cgcgaaggacagccccgcgcgggacccggggcgccacgggggccagaagcagcgagggagaccacaaaaggccccagcca

SEQ ID NO: 228093 - RNA, 79 nt, Homo sapiens
gacggcggagacgggaacaaaacacagccaccacgcaggaccaaccgaaggagagaaaggaggcaagcaccggcagacc

SEQ ID NO: 228094 - RNA, 79 nt, Homo sapiens
ccggcccggccgcggcccccgccgcggcacgaccccacagagacggaaagaacaggccaagaaaagccaaagaaagcaa

SEQ ID NO: 228095 - RNA, 50 nt, Homo sapiens
acagaaaagagcgcaaagggcaggaaacaaacagccacacggccagcgaa

SEQ ID NO: 228096 - RNA, 86 nt, Homo sapiens
gggggccccgcggaggccgagaggcaaggagggagcagcagccccgagaaggaagaggaggaagcgagggcccgcgagggcgcagg

SEQ ID NO: 228097 - RNA, 69 nt, Homo sapiens
ggaggacacagccacggacagaacgcgggaccgaaggacgaacagagaaacccccagaacagaaacaag

SEQ ID NO: 228098 - RNA, 71 nt, Homo sapiens
agacacaggagaacgggaggcgcagaaagaggcgacgagaagagcaccccccagagcaccgacccaccaca

SEQ ID NO: 228099 - RNA, 84 nt, Homo sapiens
caggagaggcgggccagcggagccgggacggagcagggacgagaaaggcccgcagaggagaggagagaggaggcggcagaacag

SEQ ID NO: 228100 - RNA, 89 nt, Homo sapiens
cgagcggcgagccggagcgcggagcccggccccgcaccaggaggaggacgacagcacgccaccaggagagaacgccgcgccgcgcgaca

SEQ ID NO: 228101 - RNA, 43 nt, Homo sapiens
gggcggaagaaagcgacacacagggaccaggcagacgaccaag

SEQ ID NO: 228102 - RNA, 55 nt, Homo sapiens
agcgggagaggggaggaaaccgcacacccagcaaccaggccccccaccagaaaga

SEQ ID NO: 228103 - RNA, 73 nt, Homo sapiens
ccaggagccacggacaagaccaaaaggcccgagccgccaggggggagaacaccccccccccagcagccgaaga

SEQ ID NO: 228104 - RNA, 66 nt, Homo sapiens
aggaagggacccacgagaagacgcagaggcaaaaaccacaacaagaagaaaccgacggccggaaga

SEQ ID NO: 228105 - RNA, 98 nt, Homo sapiens
accaagaggggggagacggggaagacaggccagcgcggccaagacccaccgcaagcaggggaaggcagccaacagggaagccagcagaaagggaccgg

SEQ ID NO: 228106 - RNA, 77 nt, Homo sapiens
gaggagaaggccgccaagcaagcggcaccacgacaaccccacaccaacgagaggcaacgcgaggagggcaacgagac

SEQ ID NO: 228107 - RNA, 82 nt, Homo sapiens
cggagacaggccaacacgcgggcagcgaacaagcgggagcaaggagggcgaagagcgaggaggaggagcagcacaaggcacg

SEQ ID NO: 228108 - RNA, 71 nt, Homo sapiens
agagaagaaagcacaaaccggccagcggagcaacaccccgcaccgggaaccgcggaacccgcaggccacgc

SEQ ID NO: 228109 - RNA, 82 nt, Homo sapiens
aaaaggcacacaccggaccaacggaaaagagcaaagcagcagaagggccagcagacagcgacagcagacaagcaacacaagg

SEQ ID NO: 228110 - RNA, 67 nt, Homo sapiens
cagagcagggacggccgggaaagaaccagaagccaggaagaggagaaagacagcaaagaaaaggaga

SEQ ID NO: 228111 - RNA, 75 nt, Homo sapiens
gccgagcgggcgccgccaaccgggggaccggaccccgacggcaccacaacaggcacaaagagagaaggaacaccc

SEQ ID NO: 228112 - RNA, 83 nt, Homo sapiens
gacaagcaggaacaagccgaaacccaagagacagaagcaacacagccacagcacaacagcaccaaccgcacccagcaaaggag

SEQ ID NO: 228113 - RNA, 74 nt, Homo sapiens
aaccagacagcaaggccgcccagcagaccgccacccagcccaagagagcaaagaacgggcgcaccacgccaccc

SEQ ID NO: 228114 - RNA, 76 nt, Homo sapiens
gacggcgggagccggaacgggccaggaaagacagcaacccgaagcaagcccgcaccgaaccgcggaagaaccaacc

SEQ ID NO: 228115 - RNA, 62 nt, Homo sapiens
acccccggcggagcgacagcggcaaagcgacccgggacccacagccaccacgcccccagagg

SEQ ID NO: 228116 - RNA, 57 nt, Homo sapiens
gcgccgccgcccgccccagaccgcggcgaaagggcacggcaccggggccacccagca

SEQ ID NO: 228117 - RNA, 75 nt, Homo sapiens
aaacccgaggacccccaggacagaagaccgaagaggggcgccggagaggagacgagccacgagaggaccacacac

SEQ ID NO: 228118 - RNA, 81 nt, Homo sapiens
agggaagcgcagaaagcaggcgaacccgcggcgcaaaacgcggagcagggagagcaggaccacacacggagggaggcacca

SEQ ID NO: 228119 - RNA, 83 nt, Homo sapiens
gcaagaccccgccggagccccaaacagaaaaacaaccaccagcgagcaaaaaggcaaagaccaagaccaccaagaagcgcccc

SEQ ID NO: 228120 - RNA, 92 nt, Homo sapiens
gcacagcaaacccacccagcacaccccgcgaaaggaggaggcacagagcgcgagccggcacgaaacaaaggagcgagacagaagagaaccgg

SEQ ID NO: 228121 - RNA, 82 nt, Homo sapiens
cacgggcccccggcaacgaacgggcaaaagcagaccggaaaacccaccggcaagaccacacccgaggggagcccaggacacc

SEQ ID NO: 228122 - RNA, 72 nt, Homo sapiens
gggccccgagggcggaccgaggaaagaagcgaagccaggagggagaagggaagccagagacaccaagacgag

SEQ ID NO: 228123 - RNA, 82 nt, Homo sapiens
cgccgaagccccgggcggccagggggcccggcgagcacccccagccggcccaggaggcaagagcgagaagagcgcaagacag

SEQ ID NO: 228124 - RNA, 32 nt, Homo sapiens
gaagaagaggaccgccccagcggcggaggaaa

SEQ ID NO: 228125 - RNA, 70 nt, Homo sapiens
gggagaacacagaaaccggccccagacaacaggcacaaagagagaaggaacacccacagggcagacagag

SEQ ID NO: 228126 - RNA, 64 nt, Homo sapiens
cacccaggccacggggggacccaggacaagccaaagagaggaagcaggaaaaaagaacaagaac

SEQ ID NO: 228127 - RNA, 79 nt, Homo sapiens
ggggaggccgaaggggcaggaggagaaggcaaagagccagcccgaggcgcggccagcgaagaagacgcagccagacccg

SEQ ID NO: 228128 - RNA, 72 nt, Homo sapiens
cagcggggccacccagaacaaaaagggccagacaaaggagagaggcaccaccagaccaaagagagcgagaac

SEQ ID NO: 228129 - RNA, 61 nt, Homo sapiens
cccgaggaacaccggcagcggaaaagagaagaagaagcggaaaggcagagaaggagaaaga

SEQ ID NO: 228130 - RNA, 76 nt, Homo sapiens
cgcggagggggagaagcacaggcaacgaagccgccggaaagagggccacgccacgggcggcgagacaacacaagcc

SEQ ID NO: 228131 - RNA, 80 nt, Homo sapiens
ccgcccgcccagagccgaggcggcggcacgagggccccgacccaggcccccgcaaacgcggacacgcccggggaacccca

SEQ ID NO: 228132 - RNA, 57 nt, Homo sapiens
acccggcaccgccccagggggcgaacacagacaaccacaagggcgagagcaggccag

SEQ ID NO: 228133 - RNA, 80 nt, Homo sapiens
caggcggcgcgcgcggcgcgggacgcgcgcgggcacccacggagccccggggcgggaaacacaagaccggaggccacgga

SEQ ID NO: 228134 - RNA, 67 nt, Homo sapiens
gaagggaggagcagcccaacagaagaaaaaggagggagcgacgaagagggagagcacagaaaaggag

SEQ ID NO: 228135 - RNA, 77 nt, Homo sapiens
aagcgaagggcccaggccacacacagaaccgacccaaggaacccaaagggagggacaaagaaccgcgaccgaccaga

SEQ ID NO: 228136 - RNA, 85 nt, Homo sapiens
cggggccacgcgcgggcccgggccaggccgccgccgagccgagaaaaggccagacggccagcagccacgccaggcaccgcccagg

SEQ ID NO: 228137 - RNA, 73 nt, Homo sapiens
ccccagggcgccagcccagcccaaccagcagccgccgcgccgaggcaaggacggcgaccgcaggaccgccgcc

SEQ ID NO: 228138 - RNA, 62 nt, Homo sapiens
ggccccgacccggagagcggcaaccgcgcaccaaagcggagaagcggaggagaccaaggagg

SEQ ID NO: 228139 - RNA, 79 nt, Homo sapiens
ccaggaccagaggccgccacaaccgccagacaaccggagccacgccccacgaccgccagagcgccgcaaggcacagcca

SEQ ID NO: 228140 - RNA, 77 nt, Homo sapiens
cggacggccaacaccaccggcacaggacggccagagggaaaagcggccaggaccaccaggcggccacgggcccccag

SEQ ID NO: 228141 - RNA, 73 nt, Homo sapiens
agaccgcgggcggggcaacaacacgcgaagagacagacccaagaagaagaacaggacaccaggccgagcacga

SEQ ID NO: 228142 - RNA, 67 nt, Homo sapiens
gggagacggagcggcggcacccgggcaaccgccaggccaaagaccaacaggcccgaagaggcacagg

SEQ ID NO: 228143 - RNA, 57 nt, Homo sapiens
aaagggccaagagagaccagaagaacccagagaaggaagaaaggccgaaaacagaac

SEQ ID NO: 228144 - RNA, 53 nt, Homo sapiens
cccgagagagaagggaaaagcagcagcaacgggaacgaagagagaaagcaaac

SEQ ID NO: 228145 - RNA, 54 nt, Homo sapiens
gccccgcgagaggcggcgaccaccagcaagcggcggagaaaccaccacaaacac

SEQ ID NO: 228146 - RNA, 58 nt, Homo sapiens
gcagcaccaccgaccagccacccagacaggacacgcagagcgaagccaccacagggga

SEQ ID NO: 228147 - RNA, 73 nt, Homo sapiens
ggacggcagaccagcgccagggcccggccgacaagcccgggccgcggccccagccagcgggggcaaggccaga

SEQ ID NO: 228148 - RNA, 85 nt, Homo sapiens
accagggccccgagaggacaccgaggcgcaccagcggggagacggggaacaaagggaggagaagacaagcagacccaccgaagac

SEQ ID NO: 228149 - RNA, 71 nt, Homo sapiens
aaaggccagaaggccaaaccacaagccaaaacccgaaaaaggccccccgagaagccaccaccgcccagcgc

SEQ ID NO: 228150 - RNA, 97 nt, Homo sapiens
ccgcccgacaccaggaccagccaggacccgccccaccccaagagcccacaacccggccgaagggacagaaccaggagacaaagcacggaggcacgag

SEQ ID NO: 228151 - RNA, 49 nt, Homo sapiens
gcggagaccgcccgccccgccggggaaagcgaacgcgaaaagaaaagcc

SEQ ID NO: 228152 - RNA, 83 nt, Homo sapiens
cggagcgggaggcgccggggaccggggcgaggcggcccccgccgccgccaggaggcgcgggacccggaccgcgaaggccaccg

SEQ ID NO: 228153 - RNA, 69 nt, Homo sapiens
cagccagggcggaagcccgccccagagcaggcggcaaagacgcaacaacagcgagcaagagaggaacgc

SEQ ID NO: 228154 - RNA, 67 nt, Homo sapiens
gggaagggaccggccgccgcaggagcgcggcgagccccaaaagcacgcacgaaaccggcaagccagc

SEQ ID NO: 228155 - RNA, 91 nt, Homo sapiens
cgccccggcccgagaggggccggcgccagcagcccggaggcccggcccgcgcaggaggcgccccccccaccgggaagaccacgcccaggcg

SEQ ID NO: 228156 - RNA, 58 nt, Homo sapiens
gacacaacaagaccagcagcaccagaagaccgcacaggacgagcgaagacagggaaaa

SEQ ID NO: 228157 - RNA, 55 nt, Homo sapiens
caaggaggaggaaaacagggagccacacacgcccagacaacggaagaggcaaccg

SEQ ID NO: 228158 - RNA, 58 nt, Homo sapiens
agaaagaaggggaaggacgcgcggaagccgaacggagcaaaggagaagaacgacaccg

SEQ ID NO: 228159 - RNA, 72 nt, Homo sapiens
cgcaccagggcgagagaggacggcacggcagagacccgggaggcggacgggccaccagagaacccaggagcc

SEQ ID NO: 228160 - RNA, 39 nt, Homo sapiens
ccccgccaccgaccggggagccccagggaacccgagaag

SEQ ID NO: 228161 - RNA, 113 nt, Homo sapiens
gcagaagcagagacaccaggacagaaaagacaggcgccaggagcacagaagagcgaggagggaaagacaaggagccgggccgagaaaccgaaccagagaccagagaagaaacg

SEQ ID NO: 228162 - RNA, 72 nt, Homo sapiens
aaaccaacgaaccaaaagcaaccgcgaagagcagacaacggcaagcggagaagagcaaggccgaaccgagag

SEQ ID NO: 228163 - RNA, 69 nt, Homo sapiens
gacgaggcgcgggcgcgcacccgagccgcaaggagggaggaagaggcgcggcaagggcgcggcaagaaa

SEQ ID NO: 228164 - RNA, 70 nt, Homo sapiens
ccgagagccgcccgggccagcggccgcgcacccccggccggaggcaccagcagcccaaaaggcagagcga

SEQ ID NO: 228165 - RNA, 95 nt, Homo sapiens
ggagggaacccgaagcgggcgcgcgcacggcaggacggagagcaggaagcaggcggcaagcccgggagcaaggaccccacggggcagccgggggc

SEQ ID NO: 228166 - RNA, 61 nt, Homo sapiens
caccagcagacgcagccgagacaccagcccgaaacaccaccaagcccccagaaacccacaa

SEQ ID NO: 228167 - RNA, 68 nt, Homo sapiens
ggaggcgcgcggcagcaggggcgacgaggcgggacgcaggaagaaaaagaggcggccagacgaagaag

SEQ ID NO: 228168 - RNA, 34 nt, Homo sapiens
gcgggaccaacagggagccaggacagcagaccac

SEQ ID NO: 228169 - RNA, 76 nt, Homo sapiens
agggagagaccaggacacagagaacagggaaccagaccgggacagagcccgcacgcggacacgcagccagcaaccg

SEQ ID NO: 228170 - RNA, 82 nt, Homo sapiens
acgggaggcaccaccggagcgccagcaggggccccgagcagagggaccgcacacagagaccccccgggcccggcaccaggcc

SEQ ID NO: 228171 - RNA, 83 nt, Homo sapiens
cgggggaagcagcacgggacccagcccaggccgcacggacgggggggggaccgggcaccgagccgggaggggcgaagccagac

SEQ ID NO: 228172 - RNA, 77 nt, Homo sapiens
aagaaaggaaaagaaagagaagaaaaacagcccgcaacccagccggacacaagagggcaagaaaggcgcgacgggcc

SEQ ID NO: 228173 - RNA, 69 nt, Homo sapiens
gagacagaacaggaaaaaggcaacgaaggcgaaccaaccacggagaccggcgaccccacacagcccaag

SEQ ID NO: 228174 - RNA, 75 nt, Homo sapiens
cccgcccccgccgccgcgcacaaccgcacggcagacgggaacggagccccccgcacaggacaaccaccagccacg

SEQ ID NO: 228175 - RNA, 51 nt, Homo sapiens
caggaagggacggcgcgcgaacccagaaagaggcaaggacggggcagacaa

SEQ ID NO: 228176 - RNA, 66 nt, Homo sapiens
gccacgcaaggacacagagaagagcgcccggccccccgccaccagagcgagcagacggcaaaagca

SEQ ID NO: 228177 - RNA, 62 nt, Homo sapiens
cagaagaccccgggaaaggcgacgcccacgcgcccgcaacaggaccgcccaagacgacagac

SEQ ID NO: 228178 - RNA, 73 nt, Homo sapiens
gccccagacaagagcacaaccccaaacaaaaaagccccaggcaccaaaagagacgaacgcaacagagaggcaa

SEQ ID NO: 228179 - RNA, 76 nt, Homo sapiens
gcgcgccgcgaccagaccgcggccggggagcccccggcccggcagcaaggcggaaagaaggcggcacaagaaaaga

SEQ ID NO: 228180 - RNA, 61 nt, Homo sapiens
ggcaagaagaacacagggggaagccaagcagaacaaaggggagagagcggagccgaaacca

SEQ ID NO: 228181 - RNA, 75 nt, Homo sapiens
cgaagaagacaaagaacccacaaccaccggggaaccggcccggaagcagccaccccagagcaaccccccgcgccg

SEQ ID NO: 228182 - RNA, 41 nt, Homo sapiens
gagagaagggagcgaacacaggaaaagccccgcagggagga

SEQ ID NO: 228183 - RNA, 76 nt, Homo sapiens
gcaggggcagacagcacaaccagcgacaacgggcggagaaggaagcaaccagagacaaagggcaccaccgaacgcc

SEQ ID NO: 228184 - RNA, 48 nt, Homo sapiens
gccaggagggggaagagagagacaccagcagaaaacgaagagacaaag

SEQ ID NO: 228185 - RNA, 71 nt, Homo sapiens
aacgggagggaaccagcaacaagccggcggagacgccagcgacgaaccgaagacaagagccacagcccaga

SEQ ID NO: 228186 - RNA, 71 nt, Homo sapiens
accgaaggcaccaaaagcaagaaacacaacgaaaggaaaaggcgggaagaagaacaacagccgaggccaac

SEQ ID NO: 228187 - RNA, 76 nt, Homo sapiens
aggaagcagagagacaagaggcgccaggaacccaagcaagcaccagcccaaaagaaaacgaagaaacgagagaaga

SEQ ID NO: 228188 - RNA, 83 nt, Homo sapiens
gcccagaaagaccacgccacagcgcccagcgaaagccaaggagagccccaagagcccaagaacccaacaagggccccagaaga

SEQ ID NO: 228189 - RNA, 71 nt, Homo sapiens
ggagcggcggaggccaaccagcgcccgccccgcgcagagacagggcaaagacaagcacggagcggaacaag

SEQ ID NO: 228190 - RNA, 77 nt, Homo sapiens
aaagaccagggaacaaaaccggaccagcacgagaagggagaaaaggaaagacacccccaaccgggaagacgaaccac

SEQ ID NO: 228191 - RNA, 79 nt, Homo sapiens
gaacgagccaccgcgggaagcacaacagaggcaggggcgggaagaagcccgccgccaccaccccaccaccagcgcagca

SEQ ID NO: 228192 - RNA, 71 nt, Homo sapiens
gccggacaggggcccaacaggagagccgggacaaccagaggcgaagagcccacccgccaaccggagcagag

SEQ ID NO: 228193 - RNA, 76 nt, Homo sapiens
gggcggagaacagaccgaggaagccgccgacagacccagcagaagggcccaggaaaccagagaaaaaccgagggga

SEQ ID NO: 228194 - RNA, 91 nt, Homo sapiens
ccgggccaggggacgacccaagcccaagagaggagaggaagcggcagagggagccggaaccaaaaagaagccccagagccggggccaggag

SEQ ID NO: 228195 - RNA, 89 nt, Homo sapiens
cgcggcccaggggagacgacgacagggacgcgggacaggaggaggagcagcgacgagaaagagcaagagcccagggaaaagaagaagga

SEQ ID NO: 228196 - RNA, 105 nt, Homo sapiens
gggaaagaaccacaagcccacgggacacgcggcaggaacggagccagccccaggccgcgagccggacaacacaccacaagaaccgcagcacagacacagcacgac

SEQ ID NO: 228197 - RNA, 76 nt, Homo sapiens
gaagagaaaaacaccggagagcaagagcgaccagaggagaaggagacccaaagcgcaagacggcccccggacaaag

SEQ ID NO: 228198 - RNA, 52 nt, Homo sapiens
cggacccgaacaaagacaaagacaaaccgacgcaaggagcccgaggcaaggg

SEQ ID NO: 228199 - RNA, 72 nt, Homo sapiens
cgggccgagacacgcagcggcggccagggaccagaccgccagagaccaccccgggagccaggcccacccccc

SEQ ID NO: 228200 - RNA, 62 nt, Homo sapiens
aacaacccaagggagcgcacgacccacgcggaacgaagccagcccagaaagggaaaacgaca

SEQ ID NO: 228201 - RNA, 76 nt, Homo sapiens
gagacagagcgagggagcaagagggcggaggccacgaacacgccggagccgccaggaggaagaagacagaagagcc

SEQ ID NO: 228202 - RNA, 73 nt, Homo sapiens
gcacaaaaccacacaggcaagcaggagggcaccccaaaagaaagggacagagagaggcagaagaaaaagcacc

SEQ ID NO: 228203 - RNA, 76 nt, Homo sapiens
ggcagggcccgaagcaggccagcgcacagcaggaagacacaaggaggggcaccgaggaagaggacggaagaccggc

SEQ ID NO: 228204 - RNA, 56 nt, Homo sapiens
cgcccgagacgggcccgccgaaagggacaaacagcaggggccaagaaagaaggaga

SEQ ID NO: 228205 - RNA, 72 nt, Homo sapiens
ccgcgagacaaccaagcaggaacaaagcaaagcagcggcagggagaaagaaacccccagaggaggagagggc

SEQ ID NO: 228206 - RNA, 78 nt, Homo sapiens
ggaacaagaaaaagagccggacagaaagagacaaggaggggccgaacccccaggggaggcaagcaggggggcaaagga

SEQ ID NO: 228207 - RNA, 78 nt, Homo sapiens
cccaggacaaagggaaagcggccagaagaacgaggaagagggaacccccgcagaccccggaccaggccccaagcagcg

SEQ ID NO: 228208 - RNA, 77 nt, Homo sapiens
cgacgcccgcgccggcgccccggcaccgccccggagccacagcaaagccacccaaggcaggcacagcaccagaccag

SEQ ID NO: 228209 - RNA, 70 nt, Homo sapiens
ccacgcgcccgcgcccccgcaccaggcccgcaaccagccgcacacgaaagccgcagcggggagaagccca

SEQ ID NO: 228210 - RNA, 104 nt, Homo sapiens
accagacccggacagcaggagccaaagccgcaggcccccccccacacgcaaagcgaaaaagaccgcagggaaggccgccacgagacagaaaggagggaacacca

SEQ ID NO: 228211 - RNA, 86 nt, Homo sapiens
aaaggccaacgacaccggcgcagcggcgcggggcacggggaggaaggcggaggggggccacagacccgggaagaggaagaccaaca

SEQ ID NO: 228212 - RNA, 63 nt, Homo sapiens
cgcagacccacccgccagaagccccccgcagaaagggcaagcagaaaccgggaagggggcgcc

SEQ ID NO: 228213 - RNA, 68 nt, Homo sapiens
cagccgaagaccaaaggaagggacaaaccggcgaccacacacggggacgacggggaagccggacagca

SEQ ID NO: 228214 - RNA, 61 nt, Homo sapiens
ggcgagcggcggggagcggcgaagccgcgggcgagagggagagacacagaccaagaacaag

SEQ ID NO: 228215 - RNA, 75 nt, Homo sapiens
aacgaagcgggccaaaggggcgccgaaaggacaaaacaccacaggagccagcggaccacaagcaaacaaaagcca

SEQ ID NO: 228216 - RNA, 73 nt, Homo sapiens
aaccaggacgcaggcgacaaggcggcaaaaccccgaccgggggcggcccacggaacggggaaggagcgagagc

SEQ ID NO: 228217 - RNA, 84 nt, Homo sapiens
cggccgcagcccagcaccgcagagcggagagcggagcccggagcccgccgccccaggacagcccgagcaccacaagccccaaca

SEQ ID NO: 228218 - RNA, 75 nt, Homo sapiens
accgccaaaccaggaaagccaccgaagagccaggggcccggacaaaaggagcaaaagaaggcagcggcagcagag

SEQ ID NO: 228219 - RNA, 122 nt, Homo sapiens
ggcccaagcgaccaacccggcccaagggacccccgccagcccccaaagcagggcacagaccagcagggacacagcaggacaagaacgacagaaagagcaggcagcacacacagaaagacagc

SEQ ID NO: 228220 - RNA, 82 nt, Homo sapiens
gcaaccacaccaagaacaggcccccggcgggcacaggcaaaggcacgacccagaaagccaagaggcccacgcggaccggcag

SEQ ID NO: 228221 - RNA, 67 nt, Homo sapiens
cgagacacaggccaggacagaagagaccgagaaaaccacgcccccagacggccagcccccaggaaag

SEQ ID NO: 228222 - RNA, 72 nt, Homo sapiens
acaaggaagacagagccccgcagccggagacccgaaaccagaccacagcacggcccacgacaccagaccagc

SEQ ID NO: 228223 - RNA, 71 nt, Homo sapiens
cacccagcggcacaaaaaggacgccggcaaccaagcagaagaagaacccagccggaaaacggaaaggaggc

SEQ ID NO: 228224 - RNA, 83 nt, Homo sapiens
gcgggggagaggcgcagggacggcacgggaccacccgcaaggacccggaaggccggggggccgaggagcgaggacacacagga

SEQ ID NO: 228225 - RNA, 57 nt, Homo sapiens
gagaagagaagaaacccagcgaaggggaccgggcagggagacacccacaccccggga

SEQ ID NO: 228226 - RNA, 62 nt, Homo sapiens
cacagcccagggaaggcaccaaaagggggggcaggaaaggggaaaggacaagggacagcagc

SEQ ID NO: 228227 - RNA, 114 nt, Homo sapiens
cgacacgcaccaggcccggcagcagcggcccgccgccgcccgcccgcgcgcagccccccggcgcgagggcggcccgcagaagagcacagaaggagaaggccagcaaagcggaag

SEQ ID NO: 228228 - RNA, 70 nt, Homo sapiens
accaggaccagaggaaagagagaaagcacacacagaaagccgaagagcagacccagcaggccacagcccc

SEQ ID NO: 228229 - RNA, 80 nt, Homo sapiens
agcaaccagagggccacccgaggagccgcccccggcaaagagagggggacaaggcaggaaaggaggaaacagcaacgaac

SEQ ID NO: 228230 - RNA, 71 nt, Homo sapiens
cgcggcagaagaaagcaagacccaggacaccccgaagccgagaaagaaggagcacaacaggcagacagaca

SEQ ID NO: 228231 - RNA, 53 nt, Homo sapiens
cacgcggaggaggacgaggacacggccgcggccccacaggggaacccagaaag

SEQ ID NO: 228232 - RNA, 76 nt, Homo sapiens
agagcagcaaaaacaagaaaacccagggaccagcggagcccagccgcaacacccccccacacaacaaaggggacga

SEQ ID NO: 228233 - RNA, 87 nt, Homo sapiens
gcaccacgcgcagaggaccaccagggcaaaagagagcaacaagcgccaacagcccgccaagccaccgcagggcaaccgcaggcaagc

SEQ ID NO: 228234 - RNA, 81 nt, Homo sapiens
gagggcggcagcccacacgagacccgggcggcgcgcgcccgaggggagcaaggacagggcgcccgccaagccgggcccacg

SEQ ID NO: 228235 - RNA, 85 nt, Homo sapiens
ccaccgggcagcgggggagcggcgcagcggcggcagcggagagcgagagaggggagcaggagaacggaagaggacaagagacgac

SEQ ID NO: 228236 - RNA, 80 nt, Homo sapiens
gcaaccggggagcccgccagaccacacgaaggggcagaagagcacaagacggaagagaggagcgaccagacggcaggagg

SEQ ID NO: 228237 - RNA, 73 nt, Homo sapiens
aaaaagacagcccgcagcacgaccagcaggaacggcaggggcaaggcagaaagcggcgcgagaccccaggccc

SEQ ID NO: 228238 - RNA, 58 nt, Homo sapiens
cacgcgcggaaggcagcgcccagcagcgcaggcacaggcacaggagaccaccaacaca

SEQ ID NO: 228239 - RNA, 55 nt, Homo sapiens
cccgaaggcgggaacagggggagacaccgccgcagcgaagcgaccccgcaagaca

SEQ ID NO: 228240 - RNA, 72 nt, Homo sapiens
aaagacggacaggagaaaaggaacccccgcgaaaacgaaaccgaagcgacagagaggagaacggaggaggaa

SEQ ID NO: 228241 - RNA, 71 nt, Homo sapiens
accccccaaacgacgcagccacggagaggaggacacaagacgccgaaggacagaaaaagaaaggccaagaa

SEQ ID NO: 228242 - RNA, 76 nt, Homo sapiens
ggagcggagaacaagccaccggccgggacccggcaaagagagaggcacacgccgccgaaggccaggagcagaggcc

SEQ ID NO: 228243 - RNA, 74 nt, Homo sapiens
gaacagagggcaagaggacgccacaaacacccaccacagcagagacggaggaaagaaagaagaagaaccacccc

SEQ ID NO: 228244 - RNA, 73 nt, Homo sapiens
caacaacgcgacaaaggagagaaacagccaaaacagcacaacagcgcccaacaggagcacaagagaccacaga

SEQ ID NO: 228245 - RNA, 83 nt, Homo sapiens
agggaagcagaaccaacagagaagagagcggacccacaccagggaagacaggggagagggggcaccagcgggccacaagcacg

SEQ ID NO: 228246 - RNA, 70 nt, Homo sapiens
ggaaagacagaaccgaaaacagcaggaaagcacaccggcccccaaaaacaagaggcaagaacgccagcaa

SEQ ID NO: 228247 - RNA, 84 nt, Homo sapiens
ccggggcacggccacgcacgccgccaccggcacggccaggccagcaggggaccacacccagggacgagaacccgcgccaaaagc

SEQ ID NO: 228248 - RNA, 71 nt, Homo sapiens
cgacgggccccccggcaaagcacacaaagacagaagccagaggggaaaaacggggaaccagaagcaccgga

SEQ ID NO: 228249 - RNA, 94 nt, Homo sapiens
ccaaaacaagggcgcggccgcgcccaggagcacggacgccagaacgagccaggacaaaaccaggcagaaccaacacgaacccaagcacaaacaa

SEQ ID NO: 228250 - RNA, 79 nt, Homo sapiens
cgacccccaggcggcgcccagacccacacccagcaagggcaggcagggcccagcaggacgcggaaacaccccggaggcg

SEQ ID NO: 228251 - RNA, 79 nt, Homo sapiens
ccaccccagacaccaaaagaggacggggacaccaaaggcagggagcaagacagccacacggggcacgaagaaggacgga

SEQ ID NO: 228252 - RNA, 67 nt, Homo sapiens
cgaaaggcccccaggagaggagccaagcccaacgggacgggaaaacggccacagccaacgacgcagc

SEQ ID NO: 228253 - RNA, 106 nt, Homo sapiens
gccgccggccaccgcgcacccacgaacgcccaccccccgaacccagccgcaccgggaggggggaagacagggcccagcaccacaggacgggccgggaagccgccag

SEQ ID NO: 228254 - RNA, 60 nt, Homo sapiens
cggaggagcggcgaagcgcggcgcagaaagacaacgaaacggcaaaccgagccacgcaaa

SEQ ID NO: 228255 - RNA, 68 nt, Homo sapiens
gaacaagaaccagggagaagccgcccgaacaccagcccgagaacacgaaacaaggaagaaagaagcaa

SEQ ID NO: 228256 - RNA, 80 nt, Homo sapiens
cgcaggcaaagcaggccgaggccggagaaggcaccgcgccgagggcccgagggcaggacagcaggcaccggcgaagcaca

SEQ ID NO: 228257 - RNA, 79 nt, Homo sapiens
agcccacccggggcaccccacaaggaaccgggagagaccccagccccaagcgggagccacacgccagcccgcggccgga

SEQ ID NO: 228258 - RNA, 89 nt, Homo sapiens
gcgcaaggagcacccggcggagcagagccagagcaaaaggggacaagcaaccgccagccccaaccaccacagaccaccagccgcacccc

SEQ ID NO: 228259 - RNA, 77 nt, Homo sapiens
agagggagaagcagcagaaccagaccagcaggagaaacaaaacccgcagagaagggaagggacgcaaaaaggaagcc

SEQ ID NO: 228260 - RNA, 78 nt, Homo sapiens
gcaccacaggggcgaagcaaagccaccacagacagcccgaacaagaaaggcacccgaaaggggaaggaaaagaaggaa

SEQ ID NO: 228261 - RNA, 77 nt, Homo sapiens
aagcgcgcaacgccaacccaggcgagagggccggcccagggagaacgcaaaaccaccacccccacaaaaaacgcagg

SEQ ID NO: 228262 - RNA, 79 nt, Homo sapiens
agggagaacaggcgggcgccgagcgaacgcgcaacagggccgcacgcaagggaaacacaaagaagacaccagaagggcc

SEQ ID NO: 228263 - RNA, 38 nt, Homo sapiens
gcacaggaagcaaggcggcgacggcggcgcgaggaccg

SEQ ID NO: 228264 - RNA, 41 nt, Homo sapiens
agcagcgggggggcaggcgacgaagccgcacaccaagcgaa

SEQ ID NO: 228265 - RNA, 83 nt, Homo sapiens
agagagagccaccggccaaagaccacaccacccgcgcagaggcaccccacacagaacagaaggagcggcggacacacagaccc

SEQ ID NO: 228266 - RNA, 76 nt, Homo sapiens
cgccagaggaggccccccagccacggaaacgcgccagccggaagcccgagggcagcgcccacggccgcgaccggcc

SEQ ID NO: 228267 - RNA, 89 nt, Homo sapiens
caccgcaggcagacaaaagggccaaagaagggagagagagccgaaaaccagccccgcccacacacaccaacagaacccgggggaccccc

SEQ ID NO: 228268 - RNA, 80 nt, Homo sapiens
ggagacaaggagacaaaacacaggcagacggaccggcagaagggaagccaaagcaaagccagccgccagccggaacggag

SEQ ID NO: 228269 - RNA, 70 nt, Homo sapiens
caagcaaagcccaagacaccccgccgaagaaagggacacggacaggaccccagaagggagaaccaggggg

SEQ ID NO: 228270 - RNA, 54 nt, Homo sapiens
gccggggggcacagccgggaagaaggagaaagacaaagccccgagaaagaccag

SEQ ID NO: 228271 - RNA, 77 nt, Homo sapiens
gaagagcgaggaggaacgcgcaaggcaaagcaccggaaaggaggcccaagaggcgaaacgcaacacggagccgccac

SEQ ID NO: 228272 - RNA, 66 nt, Homo sapiens
gcacacagaaccacaggaaagcagcgaggaacacagccaccaggacaggaagacccagagccccgg

SEQ ID NO: 228273 - RNA, 78 nt, Homo sapiens
gcaccccgggagcgcgcgaagggacacaaaaggcccgggaaaccgcaagaccgcacgcgccaaccaggaaacaggcag

SEQ ID NO: 228274 - RNA, 49 nt, Homo sapiens
cagcgcacgaggaggagcaccggcagcaccaggggaggggagcaggcag

SEQ ID NO: 228275 - RNA, 83 nt, Homo sapiens
ccgggcccgccgggcgaagccgaacaggcagcaaaaccccagaagaggcgaaccgcaggaaaccagagcaagaaacgagcgac

SEQ ID NO: 228276 - RNA, 79 nt, Homo sapiens
caggcggagccgaccgggccagaggaaaaccccccgagagaaaaagcaaggccaggaagaaccagcggaaacagagaag

SEQ ID NO: 228277 - RNA, 61 nt, Homo sapiens
gcgggggcgacgcgcgggaacaacgcgagcggcgcgcgggacgaaggacaggagagacaac

SEQ ID NO: 228278 - RNA, 76 nt, Homo sapiens
ggaagaaccaaggaacacacagcgcagagccgggccgcccgcggcagagcagcagagcgccgcccacaagagacaa

SEQ ID NO: 228279 - RNA, 74 nt, Homo sapiens
cagcgccgccgacaggggccgggcgcccgagccggcacacagagaaaaaaagggaacaaaacacagcaagcaga

SEQ ID NO: 228280 - RNA, 75 nt, Homo sapiens
agaggcagaaaggcagaagggaagcaaccaaggacagggcgagggcgcgccggcaacggaaggaccagacaggag

SEQ ID NO: 228281 - RNA, 82 nt, Homo sapiens
gcgcagaaccagaccgggagcacgcacccacgagggccgaagcacacgccaacgccgggggagaacgcgccgcacacgcaac

SEQ ID NO: 228282 - RNA, 81 nt, Homo sapiens
aagaaagggagaaacacagacacgaccgacacaggagcggccaccacccagcggcaagagccccaggggagcaggcggcag

SEQ ID NO: 228283 - RNA, 72 nt, Homo sapiens
cgcggaaacgggcgcccggccagggggagagcccgggccccagaagcgagcgcagggccacaacaaagcggg

SEQ ID NO: 228284 - RNA, 79 nt, Homo sapiens
caacacgcggagcggaagacggcaacccagcggagaccaggccaaaaggagggaaaacccaccggacaaagaggagggg

SEQ ID NO: 228285 - RNA, 76 nt, Homo sapiens
gaaaacaacaccaaacggggcaccgccgaggcagacccgaagccagaaacgcacccaaggcaagggggggaagaac

SEQ ID NO: 228286 - RNA, 91 nt, Homo sapiens
caccaccggggcagccagaaagcacgggcaggaacgagggcgcagccgaaacagggacccaggccaggccaggagcagagggagcgggaac

SEQ ID NO: 228287 - RNA, 82 nt, Homo sapiens
cggagcagccagccggaccgaccaaggcaccgggccccgcccaggccccggacaaagggccacaggaacgcgccgaaacacg

SEQ ID NO: 228288 - RNA, 78 nt, Homo sapiens
gcgcacagccccggggagccgggcgggaccggcgcggcgccgggggcaccgcgccgccgaggacggggaggacgcacg

SEQ ID NO: 228289 - RNA, 101 nt, Homo sapiens
cgagggagaagaccaccacaacaagagacaacaccgcgcggaccacaaaccgcgccagaaaagccgaaaccagaggcccaccaccgcgggcggccgccagg

SEQ ID NO: 228290 - RNA, 72 nt, Homo sapiens
ccggccgggccggccagcgccggaaaccaacaaggacccagaaagcgggaaacaggaaaaaaccaacaaaag

SEQ ID NO: 228291 - RNA, 72 nt, Homo sapiens
gggcgaagcaaagccaccacagacagcccgaacaagccggaggacaaggaggcgcaaggacagacgagaacg

SEQ ID NO: 228292 - RNA, 82 nt, Homo sapiens
cccagacagagcacagggagcgggagagccggacgcgaaccagccagcaccaagggcacaccgggaagaccagaggaccaga

SEQ ID NO: 228293 - RNA, 76 nt, Homo sapiens
ccgacacggcgagggcgccacggcagggggaaaggacagaagccacaaaacacggcacgccagacacaacgagggc

SEQ ID NO: 228294 - RNA, 71 nt, Homo sapiens
agcccgcgccgccggcaccagagagccaccaaagaacaacaagagccgcagaaggcagcagggaacggaca

SEQ ID NO: 228295 - RNA, 78 nt, Homo sapiens
gacccaggggcggagcgaacccagaccagccggcaccggacgaggaagggcaggcggcggagaagagcccaaccagac

SEQ ID NO: 228296 - RNA, 87 nt, Homo sapiens
cggcaccgggaggaggaggagacgcaggcggcccaggaccgggaggagagaagggcggcacccaccccccgagcccgcccgccggcc

SEQ ID NO: 228297 - RNA, 51 nt, Homo sapiens
aagcagaaagcagaagaaaacgaggccaaaacagggccaaaccccaggacg

SEQ ID NO: 228298 - RNA, 118 nt, Homo sapiens
gggcgcggccagaggccgggcggagcgcccagacgcggggagccgccggagcgagaaggaggaaaccgacacaaagaggaggggaaccagaagcgcgaagccggaaaaagggaagaag

SEQ ID NO: 228299 - RNA, 81 nt, Homo sapiens
caagagaaagacccaggaagcagaagaagcgaggagaagaagagaaacgggagaaggccacacggcacagacagaacggcc

SEQ ID NO: 228300 - RNA, 71 nt, Homo sapiens
gaccccccacgacgcgcggaaaagagcgcccgcgagcaggcccaaaaagagagaggaagccaccacgcaac

SEQ ID NO: 228301 - RNA, 74 nt, Homo sapiens
gccgcgcgccgcgaccccaagcagggaaacgccgccacgaaggaccgcaccccagaaggaaacgaccaggcaga

SEQ ID NO: 228302 - RNA, 78 nt, Homo sapiens
cagccgcggcccaagccgcacccagcccgggccgcggccccacggagaaagaggagcggcagcccacaagcaggaaga

SEQ ID NO: 228303 - RNA, 74 nt, Homo sapiens
accggcgcagagacaggcgcgaggagacaccgcaggccagaccgccccccggagcgggcccgccccagcccacc

SEQ ID NO: 228304 - RNA, 70 nt, Homo sapiens
agccaaaaaaggcacggcacccccacgcaccaaacgggacccgaggaacccacgaccaagcaccaggaca

SEQ ID NO: 228305 - RNA, 68 nt, Homo sapiens
gaggagagaagagggaggcagaacgaagggcccagcaagagaggaaaaccagacgcggaagggagaag

SEQ ID NO: 228306 - RNA, 85 nt, Homo sapiens
ggggacaaaacaaccaacgaagacaccgagcgaaagagaaagagagcgggcagggagcacagaggacagaccgcaggcgcagaga

SEQ ID NO: 228307 - RNA, 46 nt, Homo sapiens
ccgcaggcagacaaaagggccaaagaagggagaacagggcaaaccg

SEQ ID NO: 228308 - RNA, 82 nt, Homo sapiens
ccgccgcacccggcccagcgacccgaccccgcgcgacgacccgccgccgccgggcggagaccccacggaagaaccaaacagc

SEQ ID NO: 228309 - RNA, 82 nt, Homo sapiens
gggccacggccgagcagacacaacacaggggaagaccgggaggcaacgaggcaccaggcacaagaccaggcacaagcccgaa

SEQ ID NO: 228310 - RNA, 96 nt, Homo sapiens
gcgcgcaaccgggccgcacggacggggcgccgcgcggcggagccgacgccggggaccgcagaccggaccaccaggggcacaaagcaccacagccgc

SEQ ID NO: 228311 - RNA, 65 nt, Homo sapiens
gccggccgagaaggcagaggcgggccaaccagcaagaagcggaaaaagccgaggaagcgagggac

SEQ ID NO: 228312 - RNA, 76 nt, Homo sapiens
gaacccaacaccagagggcagacgaaagcgcgcgcgcagggagcagcacccccaccgcaggggcagaagggagcgg

SEQ ID NO: 228313 - RNA, 56 nt, Homo sapiens
aaggaccaagaaccagaacacgagaaccaagcagaaggaagaagcgaacacagcgg

SEQ ID NO: 228314 - RNA, 81 nt, Homo sapiens
cagaaaaagcaccccgaggaggaagacgaacgaaacacgaaagggcagggaagcacacgagaaagcggaagagagaggaac

SEQ ID NO: 228315 - RNA, 119 nt, Homo sapiens
aaagaagagccagggccaccacccaaaacgaggcgaggaagacccgagggaaagccacacagcgccggaaagaaagacacgcagaggagaggagaaaggagacgcagaacgggcagaga

SEQ ID NO: 228316 - RNA, 67 nt, Homo sapiens
agaacaagagcaaaacaaggaagagcggaaggagcaaagaaaaaacggagggaagaaaccaaaccac

SEQ ID NO: 228317 - RNA, 93 nt, Homo sapiens
cccagggaagcgcagaaagcaggcgaacccgcggcgcaaaacgaccccaagaagaagcggaagaggagccgcggaaccaagacacaaggaaca

SEQ ID NO: 228318 - RNA, 77 nt, Homo sapiens
aaagagcaaagaaagaagagaaaaagagaagagaagaaacccagcgaaggcgcagaaccggccgaaaagcacaaaca

SEQ ID NO: 228319 - RNA, 69 nt, Homo sapiens
gaaacgaagggagaggaaccagacaaagcagaaaggcgacccggcccagacgaagaaggggaccaagga

SEQ ID NO: 228320 - RNA, 84 nt, Homo sapiens
agcggacccaccggggagacaccgcgggcaccccacaggcccgcaagcgccggcgcggaagaggccggcggcgggacggcccca

SEQ ID NO: 228321 - RNA, 83 nt, Homo sapiens
ggagagcacgccggggagagggagaaaaggccgggaaacggcaaagcacacacccgggccgagcgaccagagcccagaggggc

SEQ ID NO: 228322 - RNA, 80 nt, Homo sapiens
cagcagaagcccggagaaacggaacgccaagcgaagaagaacgaaacggaagcacaaagcagcgcgagaaagcccaggaa

SEQ ID NO: 228323 - RNA, 75 nt, Homo sapiens
caagagggaaccacccccaacaaccagggcaaccaaaccacgagcaagaaacagggaacaacacggcaggaacgg

SEQ ID NO: 228324 - RNA, 77 nt, Homo sapiens
aagcaggacaacacccacgagaagagaacaccagccaaagcaaaagaggcgggggcgaacccgccccaggaaccgga

SEQ ID NO: 228325 - RNA, 82 nt, Homo sapiens
ccaaggcagcgaagagacaaggccagagaaccaagaggcccgggccgcacaacgcggagcggaagagcccaagaggcagaaa

SEQ ID NO: 228326 - RNA, 58 nt, Homo sapiens
ggccgcgcgcgcgcgcccggaaaccggaagaaagcagaggccacgaacgacagacaca

SEQ ID NO: 228327 - RNA, 55 nt, Homo sapiens
cacagccagaccaacacaaagggccaggaaaacaaagaaacggacgcagaggcaa

SEQ ID NO: 228328 - RNA, 73 nt, Homo sapiens
ggagagaggaccacccagaggagcaacgagcagggacggggggaaaagcgcacccgggcccgggcgagaaaga

SEQ ID NO: 228329 - RNA, 56 nt, Homo sapiens
aaaaaggcccgggacccaggaaccagaaccgcacggccaagcccacacagaggaaa

SEQ ID NO: 228330 - RNA, 67 nt, Homo sapiens
aagaacgaaaagaaagaccaagacaaaaagcagccgcggaaaagacaacagcgcacccgaacagggg

SEQ ID NO: 228331 - RNA, 72 nt, Homo sapiens
gccgggcccggcaccgccgcggacggccgaaaaaccaccagacacagcaaaaagaacaggcagcacacaaag

SEQ ID NO: 228332 - RNA, 75 nt, Homo sapiens
cgaagcgcggcgagcggacaccggagacacaagaaagagaagaaaaggagaaagcaaaaaaaaagagaagaaaca

SEQ ID NO: 228333 - RNA, 71 nt, Homo sapiens
acaaaggcaggggcgccagggcaccagacgggcgggaaagagaggcccgcaggagcggcccccaggacaaa

SEQ ID NO: 228334 - RNA, 80 nt, Homo sapiens
gagccgaaagagaaaaagcggaaggccacacggaccgcagggagcagaacggaaacagccccgacccccagcaccgccac

SEQ ID NO: 228335 - RNA, 55 nt, Homo sapiens
acacaaaaccaaccccggggacggaaagagagccgcagcgcagaacaagggaaaa

SEQ ID NO: 228336 - RNA, 96 nt, Homo sapiens
gggacccggccccggcccacaggggggggcaaacccgagagaacgggaaaacggaagaccggccggccgaacaaaagaccggaacaaccagacagc

SEQ ID NO: 228337 - RNA, 85 nt, Homo sapiens
gggagacgagaagccgaaaagcgcagcgagcggagccgccggagggagcccaggcaggggaccaaaggaccccacaaagaagaca

SEQ ID NO: 228338 - RNA, 53 nt, Homo sapiens
cagccccgacaccccccaagagggcgacccagcaacgcggccggccaggggca

SEQ ID NO: 228339 - RNA, 85 nt, Homo sapiens
gaacagacaccgagccagcaagcccccaacgaccacaccaccccagagccaaggcaccgaggccggccaagcagagccggcagga

SEQ ID NO: 228340 - RNA, 78 nt, Homo sapiens
gccgccgaccccccggcgccgcgccggcggcgaggcccacgcggaccggcagcgccaccggaccaccagacaaggaca

SEQ ID NO: 228341 - RNA, 81 nt, Homo sapiens
cgacgcggaccagaagccagagcgaggacgccggcagaaagaccccacccaacccccgagaagaaacgccaagcaagaagg

SEQ ID NO: 228342 - RNA, 85 nt, Homo sapiens
aaaacagccggaaaagacagcccaccgaacaacgccagggacagacaagaaagaggaaaacccgcagagacaagaaagagggaca

SEQ ID NO: 228343 - RNA, 81 nt, Homo sapiens
gcagacagggacggacgcagcaaagaggccgccaacagaccggggagagacccagccacaagccgagcagcaccaaccaaa

SEQ ID NO: 228344 - RNA, 78 nt, Homo sapiens
cgcggacagcgggcggagccgacgagcggcggcccgagagagacgcagcgcaaggccgggggaggccacaaaacaaag

SEQ ID NO: 228345 - RNA, 73 nt, Homo sapiens
gggcagccacaacaagggcgccagggagcggaccaagaaacaagaagggagcagagagccaaacgaggacagc

SEQ ID NO: 228346 - RNA, 76 nt, Homo sapiens
gagcccaagcaagaagccgcggaaccaaaccccaccgagacagcagaccggggaaccagcaccccagaaggaggag

SEQ ID NO: 228347 - RNA, 43 nt, Homo sapiens
gccaagaacgagcaggagcgagagcggaaggaccgggggccaa

SEQ ID NO: 228348 - RNA, 38 nt, Homo sapiens
accgaccagcggacacggcccaggccccggacacgaga

SEQ ID NO: 228349 - RNA, 78 nt, Homo sapiens
gccgccggagcagcggggacaggaaggggcagacaagcacgccgcccagacaaccgaagcgccacgcagagagcaagg

SEQ ID NO: 228350 - RNA, 38 nt, Homo sapiens
gaacacaggcaaaagggaaaggcccagaaacaaccagc

SEQ ID NO: 228351 - RNA, 61 nt, Homo sapiens
gagaagcgagcccggacagaccaaccgcaggcgcaagcgcgagaaacagggaaacgagaaa

SEQ ID NO: 228352 - RNA, 66 nt, Homo sapiens
gaaccgaggggcccccaggaccaacccgaggcccacacgggaagagaccagccacagaagcaggag

SEQ ID NO: 228353 - RNA, 53 nt, Homo sapiens
ggaacagccccaccccgcaccaacagcagaagaaggaaccagcaaagcgccac

SEQ ID NO: 228354 - RNA, 75 nt, Homo sapiens
ggacgcaagaaacccaggacgagaacagcaacagagaccgcaacagaacagagagaccaaccggggcacaggcgg

SEQ ID NO: 228355 - RNA, 72 nt, Homo sapiens
gcggcggccgagggggaggagcgagcgccgagccgggcaggggagaagcagaccgcaccaggcgggaccccg

SEQ ID NO: 228356 - RNA, 77 nt, Homo sapiens
acgccaccgcccgccacgcacgccagaaccgaggagagaaggcagccaggggccaagcgcagggaaggaaccgcacc

SEQ ID NO: 228357 - RNA, 79 nt, Homo sapiens
ggaaccaaagaagccaagaagcagccgccaggggacaaaggagccaggacaagacggcgcggacggacagaaggaaccc

SEQ ID NO: 228358 - RNA, 85 nt, Homo sapiens
ggggagagcgaggccgagcccgcgcagggaagaggaagaacgcgagaaaaaaacgagcgacagagaaggccggaagaagcaaaag

SEQ ID NO: 228359 - RNA, 79 nt, Homo sapiens
gggggagaccgcccggagacgacccggaaggagacgcaccaccaaaggacaggagaaaagaaagcaaccagccgagaca

SEQ ID NO: 228360 - RNA, 90 nt, Homo sapiens
cggccaaggaaaccccagggcccgcccaggacccccaagccgccgcggacgcaggggccaagcgacagagaagcgacggaacagaaggag

SEQ ID NO: 228361 - RNA, 76 nt, Homo sapiens
ccgcgccggccgcccggcacaagggaaggcgccgcgcacacggcccagccggagcacagaagagaccacagaagaa

SEQ ID NO: 228362 - RNA, 76 nt, Homo sapiens
gcagcccgaacccggaccaagcaaccccgcccagccccgagaggaccaaccggagagacaccgacacaaaggccgc

SEQ ID NO: 228363 - RNA, 66 nt, Homo sapiens
ccgaaacccaaaaccggaacaaccacagcaccagaagcaggcaccgcaagagagaccgcgggaagc

SEQ ID NO: 228364 - RNA, 65 nt, Homo sapiens
ggcggcgcgcgccacccgccacggcacgggaaccagaagaggccaaccagcacgaacgccagcag

SEQ ID NO: 228365 - RNA, 76 nt, Homo sapiens
aacaacaggaaagagaggcgacgcgcagcaaaggcaacggcagcaacacaagagagacacaggaaacgggcacgcg

SEQ ID NO: 228366 - RNA, 68 nt, Homo sapiens
cccccaagagcggaacagacaaaagagaacgaacgcagaccgggaaaaccaacaaaccaagagggacg

SEQ ID NO: 228367 - RNA, 81 nt, Homo sapiens
gaagaggcgccaggacgaaggcccacgggcaagaaaaaagccagggaccacgccggaacacgccccgggcagggcggccag

SEQ ID NO: 228368 - RNA, 71 nt, Homo sapiens
aggagcacagaacgccaggaccaaaacagggagaaacacagccagaagggaagaacagccggaagggccaa

SEQ ID NO: 228369 - RNA, 79 nt, Homo sapiens
cgggcacaagccaggaggagcccggaagacacgagacccagaggcgggccggcaggcccagaaccaacaccaccccgag

SEQ ID NO: 228370 - RNA, 74 nt, Homo sapiens
aaagggccaggacgaggaggaagagcccagggacacccgggggaaggaaggcagaggagccaccggcccaggcg

SEQ ID NO: 228371 - RNA, 69 nt, Homo sapiens
gaagaacaaacgagaaggcagagaggggaagaccaagagcacagagccaaggggaaacagaaggcacac

SEQ ID NO: 228372 - RNA, 67 nt, Homo sapiens
aggagcccaagaggcacgcaccccacaaaaaaagaggaggggcagggggaggagagcagccaagcca

SEQ ID NO: 228373 - RNA, 88 nt, Homo sapiens
cggccccggcccggcccccgcaggagcaggcccacacacgaggaaggcgcccccgacgacgcccgcagcaccgacggggacagcgaca

SEQ ID NO: 228374 - RNA, 75 nt, Homo sapiens
aaggagacgaaaacaccggaacaaaaggacggcaacaagcgggccacacccaaaaccggacaggcagggcaagaa

SEQ ID NO: 228375 - RNA, 52 nt, Homo sapiens
aggccgaccaaggacgagaccaaccccaaggccaaagagcacagggacagaa

SEQ ID NO: 228376 - RNA, 70 nt, Homo sapiens
agacaggcaggggagagcccggacggggcggccgccgagggaagagaagacgcgcaagaccgagcaagac

SEQ ID NO: 228377 - RNA, 71 nt, Homo sapiens
acaacgaccagcaccagcaaaccaaaccagggaacggagcagcaagaaggaccggggagggagaaagcgag

SEQ ID NO: 228378 - RNA, 74 nt, Homo sapiens
acgaaagggcaaagagcggccacacaacggagagcgcaagcccagcgggacagcggaggaaagcaggaagcaga

SEQ ID NO: 228379 - RNA, 57 nt, Homo sapiens
gggccgagcgacccccacccagcccgagagcagacacgggaagggccgggccggggc

SEQ ID NO: 228380 - RNA, 58 nt, Homo sapiens
agcccagcgcaaccccaagcgcccaaagggcaggcgccccaacccaagccagaggagg

SEQ ID NO: 228381 - RNA, 43 nt, Homo sapiens
gccggcggccccaccccccaggaaggcggagccagagcaagaa

SEQ ID NO: 228382 - RNA, 81 nt, Homo sapiens
ccaacggaccgcaccaacacccgcccgggagaagacgcggggaggaggaggaggaagggagcggcagcaggaaggagaccc

SEQ ID NO: 228383 - RNA, 80 nt, Homo sapiens
accaggcccagcgggagagccgagaccggcccggacccagagaggaaaaggaagacgaccgcccgccaaaaagacgcagc

SEQ ID NO: 228384 - RNA, 83 nt, Homo sapiens
agcccgacgagcggcccggaccgggaccccgcggcccccaaaccacacagggcccgagcagagaggcggcagagcagagcggc

SEQ ID NO: 228385 - RNA, 60 nt, Homo sapiens
gcgaggcgcagaaaccccggacaaggcacgccagacgaagaaccggaagcccagccaggg

SEQ ID NO: 228386 - RNA, 65 nt, Homo sapiens
gaaagagagaagacgaaagcgaaacagaccccgaaaagcccggaaggacaagccagcccaaacga

SEQ ID NO: 228387 - RNA, 73 nt, Homo sapiens
caacgagacgcacaagaaaagcgcaagaagaggaggaagccagcgagggcccaaaccagggagaaaacaggca

SEQ ID NO: 228388 - RNA, 75 nt, Homo sapiens
cgagccagccgacgggaacaacagaccacgggagaaaaacaagaaacagcagccaaccaggcccgagacaaaaag

SEQ ID NO: 228389 - RNA, 72 nt, Homo sapiens
aacgaggagacaggcggggaaacgaaacgagggcgagaccgcacccgaaagcacaaagaccgacagaaaaac

SEQ ID NO: 228390 - RNA, 56 nt, Homo sapiens
gagaccgcagagacagccaacacggcacccacagcaagcggaaaaggaaaccagaa

SEQ ID NO: 228391 - RNA, 75 nt, Homo sapiens
gcgggagccgaaccaggccacgagccaggggagagcaacggagcggaggcagacacacacggggggagagggagg

SEQ ID NO: 228392 - RNA, 86 nt, Homo sapiens
gcggggcgcaccagcgacgggggcggagagagacgaacccaagcccaccaggggcaacagaagaagcccgaggagcacggaggaag

SEQ ID NO: 228393 - RNA, 79 nt, Homo sapiens
agagcagagccccaaaagaggagggcaggaaccccagaggcggagagggccacgcacccaagggaggcagaggcacaag

SEQ ID NO: 228394 - RNA, 68 nt, Homo sapiens
gaacgagaggaacaccccggcgaaagagccgaagaagacacagagggaacggccaggggaagggggag

SEQ ID NO: 228395 - RNA, 71 nt, Homo sapiens
gagcaaaggcacaaggaaccacgcccgcgggacacaagacgggcaagggggggagccagaacgagaaacag

SEQ ID NO: 228396 - RNA, 77 nt, Homo sapiens
agcagcagcggccaggagaacccagggccggagcggagggaagaccaccggccaggcggaagggggcagacacagcc

SEQ ID NO: 228397 - RNA, 64 nt, Homo sapiens
gcgcccggcgccggccgagaaggcagaggcgcaaaggagacgaacaaagaaaaagaaaacgaaa

SEQ ID NO: 228398 - RNA, 63 nt, Homo sapiens
acgcacggaggcggggacagacagcacccaccgggcaacccacagagagagaggaaacgaagg

SEQ ID NO: 228399 - RNA, 75 nt, Homo sapiens
gccccccccccccccccgcaccaccaccacaccagaaacagcaccagccccaaaccaacagacaacgagcaacca

SEQ ID NO: 228400 - RNA, 60 nt, Homo sapiens
cgccccagaaggcagaggaacacaacagcaacagccaaccagaaaaccagaaacaccggc

SEQ ID NO: 228401 - RNA, 64 nt, Homo sapiens
ggaacgcccgcagaaaaagaggcccccccccccgcgacgacggcaaaggaacacgcaaacacac

SEQ ID NO: 228402 - RNA, 74 nt, Homo sapiens
accacgagggcgaaccacccacagaccagccggaacaagagacccgagcacgcagccccgaaggcggcccggcc

SEQ ID NO: 228403 - RNA, 74 nt, Homo sapiens
gaccggcgccagggcgccaagcgccggcccgagagagacgcagcgcaaggccgggggaggccacaaaacaaagc

SEQ ID NO: 228404 - RNA, 69 nt, Homo sapiens
gaaggcccggacacagcaaaccgggccacagacacacgcgcgaaggagaaggacggaaaagaacccaga

SEQ ID NO: 228405 - RNA, 36 nt, Homo sapiens
caaggacgaacaccgaaagagccggaggaaaccaca

SEQ ID NO: 228406 - RNA, 71 nt, Homo sapiens
gggcccggggacacgcgcgggcgggagcggcccacgacgggacacgccccggaggggaacgaagcccaaaa

SEQ ID NO: 228407 - RNA, 80 nt, Homo sapiens
agcggcggggagcggcgaagccgcgggcgaggaaccgacaaaagccacgaaaaagccagacaagcacagccagagaaccg

SEQ ID NO: 228408 - RNA, 77 nt, Homo sapiens
cccgcaggcccggcccgcccggacagagcccgggcgcgcagggacggaaaaggcgcacacgacccggagaaccccac

SEQ ID NO: 228409 - RNA, 74 nt, Homo sapiens
ccacggcaggagcacagcaggaggacggaacccaggaacagagacagacccgggggcccccaaggagagggaag

SEQ ID NO: 228410 - RNA, 73 nt, Homo sapiens
aagcagcgggaagaagcgcccagcacaccagcaaaccggaagacaacgaagagaggaaagaagcggaaaggag

SEQ ID NO: 228411 - RNA, 73 nt, Homo sapiens
gcaacgccacgaaacaccaccggggagaaagggacagagccggccggaacaaacggagccgccggccaggcgg

SEQ ID NO: 228412 - RNA, 57 nt, Homo sapiens
gggggaaaaacacaaggccccacgaagcagaagcccggcacaagcggggaggagaca

SEQ ID NO: 228413 - RNA, 40 nt, Homo sapiens
cgaagacgcacgccaagacagggccccgggcgcgggagcc

SEQ ID NO: 228414 - RNA, 76 nt, Homo sapiens
caagaacaacagccagacgaaagcaccagagagagcacagcagcacccaagccgccggccggcccaggacgcccag

SEQ ID NO: 228415 - RNA, 73 nt, Homo sapiens
gccaaaaccacgaaaagcacgggagaaaagggggccaaacaaccagaaaaggccgaagaggggaaagcagccc

SEQ ID NO: 228416 - RNA, 84 nt, Homo sapiens
cccagagacgcgagcccgccgccgccgccaccacccacccggacacagggcggaaaacaccccaaaagccaaaagggaaaggaa

SEQ ID NO: 228417 - RNA, 80 nt, Homo sapiens
cggcccggccggcagcccccccggaagcgggcccccaccaagccagcaaggcaggacaacacacagcccccggccccacc

SEQ ID NO: 228418 - RNA, 66 nt, Homo sapiens
cagccaccaggagcccgagagagaagggcacccgcaacaccagacggccacgccacccggggcaag

SEQ ID NO: 228419 - RNA, 87 nt, Homo sapiens
ggcggaagaaaaacaaacacacgcaaaggagaaaggaaccgacagcgcgggccaggcacgacaccgcaacgacacagcagcgaagcg

SEQ ID NO: 228420 - RNA, 78 nt, Homo sapiens
ccccacggcccaggcaggaacccgagaccacagccaccacacagcaccggaaggagcagaggcagaggacagacacaa

SEQ ID NO: 228421 - RNA, 70 nt, Homo sapiens
ggccacggcggggcacaggcccaaggcacccaggcagggaaagccaagggcgaggcggccccgggcgccg

SEQ ID NO: 228422 - RNA, 65 nt, Homo sapiens
acgagccacaagcgcaccaagcggccacaaagccgagacaaccgagagagacgccgcgcgcaccc

SEQ ID NO: 228423 - RNA, 79 nt, Homo sapiens
gggcccggaggagcgaacaaggcgacaacacagcacaacacgaaaggagaagaggacgggaggagaaaagccgaagaag

SEQ ID NO: 228424 - RNA, 79 nt, Homo sapiens
ggcgcgcggccgcgacgacgccgcgcgaggccggcacggggccacgcggggaagaaagcagacagcaccgacagagagg

SEQ ID NO: 228425 - RNA, 84 nt, Homo sapiens
cgggcccagagcggaagacaagacgcgccgcccaagagagagaagagaggcgcgagggcagggaagaggcggacaagcgcaaac

SEQ ID NO: 228426 - RNA, 106 nt, Homo sapiens
ggaggcgcaggcagcaacgaggcagcggcaggccagggcagccgcgggcaggcagagagaaagcaagaagcccccgaggaggagagcaaggcgaagagaaggaaaa

SEQ ID NO: 228427 - RNA, 110 nt, Homo sapiens
gcgcgagcgaaagagaggcccccggccgacaagcaagcagcgcgccggccccaacacggaccgggcggagaacggaaaagcaccaggaagcagagaggaccgcagaaggg

SEQ ID NO: 228428 - RNA, 111 nt, Homo sapiens
ggaaaccaagcaccagcgagacccagggaagagccagaagacaccagaccgcggcaacacaagcgagggagaagccaagagcacagacccaaggagaaggaacgaaacagg

SEQ ID NO: 228429 - RNA, 58 nt, Homo sapiens
ggccaggcgggagcaccccagcagcagcccgggaggcccgcccccccccacccccgga

SEQ ID NO: 228430 - RNA, 75 nt, Homo sapiens
cgcgcgcgccgcggagcaccgcggagccgccgaaaccgcaggaagaggaggaaagcaccgcagaacaaacccaaa

SEQ ID NO: 228431 - RNA, 81 nt, Homo sapiens
cccagagcgcacggcgacgccccaggggaaaacccccgggaccagaaagagacggcgccgaggaagcacaggcaacaccac

SEQ ID NO: 228432 - RNA, 70 nt, Homo sapiens
caaaccaccacacaccagcaaaggggggacaaggagcggccaaaaagaacgggcagagcccccccgccga

SEQ ID NO: 228433 - RNA, 62 nt, Homo sapiens
acaggagacaaacggcggaaaggaagggaaacaggaggaggccgcggaagaccgacaaagca

SEQ ID NO: 228434 - RNA, 63 nt, Homo sapiens
ggagcaccgcacaaacacgccacgcgcaggagcacacacggaggcagccaacagccgaccgag

SEQ ID NO: 228435 - RNA, 69 nt, Homo sapiens
gcccaccacccgaagacgaaggagacaaagaacaggcagccagcagaacagcagaaaaagcaagccaaa

SEQ ID NO: 228436 - RNA, 72 nt, Homo sapiens
cagaccgcagcaggagggaaaagagaaccggagaaaagggcggacaacacaaaacgggcgcagacacagaag

SEQ ID NO: 228437 - RNA, 87 nt, Homo sapiens
acaaagggccgggagcgagagcccccacgccagaccgcccacggagaccgcagcaccagccgaggccgacaccacgacggcagcccc

SEQ ID NO: 228438 - RNA, 79 nt, Homo sapiens
aaccggccgcccgccccccggaggccagcggaagccgccaccccaggcggaccaccacaacaagaagccgcgccacgcc

SEQ ID NO: 228439 - RNA, 78 nt, Homo sapiens
gcaacggagaaaacccggaaccgcgacggcggcagagaagagaggagcaggaggcacgccaccggaaaaccggcggac

SEQ ID NO: 228440 - RNA, 80 nt, Homo sapiens
aaacggcgggcccgggaagcgggccggcagcgcccggacgaggagacgccaggacggccggcagcaaagaggaccccaag

SEQ ID NO: 228441 - RNA, 70 nt, Homo sapiens
gggaggaccgcagcagagaacaaccaacaggagcagacaggaaagagagagacgagcaggagagccgacg

SEQ ID NO: 228442 - RNA, 77 nt, Homo sapiens
cggccgagacaaaggcaccaggccaccacagaaacaaaagcaacaaagaggaagagagaagaagcaaaccgggaccg

SEQ ID NO: 228443 - RNA, 82 nt, Homo sapiens
agcacaggaaagacaggagggcagagcccgagaagcgcacacggagaagaggaggagagaagagaggaagcgagcagcacgg

SEQ ID NO: 228444 - RNA, 77 nt, Homo sapiens
gagccacaaggccaagcagacaagacaaccgaaaagaaggacgaacaggaggcagaaccaacagaacgacggggccc

SEQ ID NO: 228445 - RNA, 80 nt, Homo sapiens
gcgggacaggagggcaggaagagcgcagcggggacaagggcgcacccacgacgcgcacaccaccggcagaccggcgccac

SEQ ID NO: 228446 - RNA, 37 nt, Homo sapiens
aagggccagcgcggaggagcacaaggaggaaggccag

SEQ ID NO: 228447 - RNA, 73 nt, Homo sapiens
aagaagaagaaggaccaagccccaaaaggccaccaccccgaggcgcgccccagccagccccgccagcagggga

SEQ ID NO: 228448 - RNA, 80 nt, Homo sapiens
cggacacagaagaggacagcccagaagaacaggcggcgggcagagcgaggcagaaagaggagaagagccggaaaaagcgg

SEQ ID NO: 228449 - RNA, 86 nt, Homo sapiens
ggagcagagagagcggagagaacgacggacaggaaccaagagcacagcaaagaaacagacaggacgacacaaacacagcgaagcaa

SEQ ID NO: 228450 - RNA, 72 nt, Homo sapiens
caacggaaaccaggaaaccgcagaagaaaaggacgaaccccagaaaacagggcagaagccaaaccgaccaca

SEQ ID NO: 228451 - RNA, 71 nt, Homo sapiens
ggggagcccgcgcccgccgcgggagagaggacccccccccccccccaagagaggggcgaaaacgcggaagc

SEQ ID NO: 228452 - RNA, 55 nt, Homo sapiens
caccccggagggggaccacaagacccacgacagggaagaaagcacgggaaaaggc

SEQ ID NO: 228453 - RNA, 117 nt, Homo sapiens
ccaccgaaccgcgggaggcaacgcccgggccccgacccggagagcggcaaccgcgcaccaaagcaggcaacaggaagaagaacccacaggggccaacagaggaaggaacaaaggaac

SEQ ID NO: 228454 - RNA, 53 nt, Homo sapiens
aaagcaccccccaaagccggagcggcgacgaaaggccaggagccaagggaggc

SEQ ID NO: 228455 - RNA, 69 nt, Homo sapiens
caccaccgacagcgcgcccggccaggaaccagaccaaggcccaacaccaccaccgccaagaggaaccgc

SEQ ID NO: 228456 - RNA, 79 nt, Homo sapiens
ccggacccagaaggcgcgaaggcagaccgcccagcggcggcccccaaaacacaagaggacggagaagcgacgaaagaag

SEQ ID NO: 228457 - RNA, 81 nt, Homo sapiens
cgcggaggagcgaggcagcgacaggacgggaacggcagacaggcagcaaagaaaggaggagaagcccagccgcgcgagggc

SEQ ID NO: 228458 - RNA, 85 nt, Homo sapiens
gggcggagagcggggggggacccccaccagccacaaagagggcagaagaggccgacaggcaccagaagaccccaccgggggacca

SEQ ID NO: 228459 - RNA, 79 nt, Homo sapiens
ccaaggacccgggacagggaccagcgggaaggcagacagcgagggcgacgagaaggcaacgaggaagcgacccaccaac

SEQ ID NO: 228460 - RNA, 37 nt, Homo sapiens
cccccagggggaccccgccgggccagagggggcgacc

SEQ ID NO: 228461 - RNA, 72 nt, Homo sapiens
caaaacggaagaacccaccgcccccgacacggggcgacacagcggccgagagacaggaggacggccaacccc

SEQ ID NO: 228462 - RNA, 88 nt, Homo sapiens
cagcggccggcgccgaggcggcggacgcaaggcggagccgcagcgggagcccccgggaggggggaagacagggcccagcaccacagga

SEQ ID NO: 228463 - RNA, 77 nt, Homo sapiens
agaacagaggcgcacaggggaggccaaacacacaggaacgccagaccccagccgagggaggcaacagcaaagggaca

SEQ ID NO: 228464 - RNA, 75 nt, Homo sapiens
ccagaacagaggagcccaggcacaagggagaggacagacaggccccacacaggaaggaggaggaccacaaacccc

SEQ ID NO: 228465 - RNA, 78 nt, Homo sapiens
ggaccaacaaccaccaagaaacagaggcggagcccaaagccggcacagagcaaccgccgggaagcgccggccagggca

SEQ ID NO: 228466 - RNA, 112 nt, Homo sapiens
gcggcggcggcagcggcggcggcggcggcggcccggccccagccaccccccccagcgccaggaaaggcgccgaaaaggggggaagggagcacagcaacacaccacaagacac

SEQ ID NO: 228467 - RNA, 70 nt, Homo sapiens
agggggcagcccacgggaacgaagaagcccacgcagaaacccaccagacggaggagacccgaacagacac

SEQ ID NO: 228468 - RNA, 67 nt, Homo sapiens
ggggcgccgcgcgccagcccaggaaaggcgccgaagagccaaggaagaaaaagaaaaagccaacaaa

SEQ ID NO: 228469 - RNA, 73 nt, Homo sapiens
caagcgagccgcggacccaaggccagaaccaggaagaggagggggaaagcgcggaaaaggaacagaagaggaa

SEQ ID NO: 228470 - RNA, 80 nt, Homo sapiens
ccgccacagcggcccggccccccggacagacgccgacgcccaggcggaacaacagaggcagggaagacgaggacaacggc

SEQ ID NO: 228471 - RNA, 74 nt, Homo sapiens
gggagcacaggccggcggggggcggacaccagccaagcagcggaacgacagagcacagcgcagaaacgcaccgg

SEQ ID NO: 228472 - RNA, 69 nt, Homo sapiens
acaggaaggaaccagccaaaaagcaaggagggaggacagcagagcagcaaacacgacaggaaaaggaca

SEQ ID NO: 228473 - RNA, 85 nt, Homo sapiens
aggaaggaccaagggacggggcgcccagggggagccggagggcaaagcggggcgagcaggggaagccagagggaccccagcgggc

SEQ ID NO: 228474 - RNA, 65 nt, Homo sapiens
aagccggaagagagccaagccaggcccagcagccgccaccggcgcaggggagaaacagccggacc

SEQ ID NO: 228475 - RNA, 72 nt, Homo sapiens
aaaagacggacagcccacgggaacaagaggggacagaaaggaagcaagccagaaagccagggacgcagaacg

SEQ ID NO: 228476 - RNA, 87 nt, Homo sapiens
aaggacaagcgaagaagggcgagcgggcaggacacggaggaccggagcggccgccgaggaaagcccggcaacgcccggaacccagag

SEQ ID NO: 228477 - RNA, 84 nt, Homo sapiens
agaacaccgaaaccagaagggggagcccaaacacccgaagcgcacggccaccccagcagaggaacacgagcgcagaagaaaggg

SEQ ID NO: 228478 - RNA, 78 nt, Homo sapiens
aacacaccagcaggcgagaggcacagccagggcgaaagaagaccccgccaccggcccccacgcaccaccaaagccgca

SEQ ID NO: 228479 - RNA, 66 nt, Homo sapiens
ggggagacccggggacccccgacgccaggcagcgcccccaaacggaggcaaggaggccacggggcc

SEQ ID NO: 228480 - RNA, 75 nt, Homo sapiens
cacccccggcgggcccgaggcggcgagagaggcaggcggagccgaccgggccagcacccggacacagcaaaggag

SEQ ID NO: 228481 - RNA, 72 nt, Homo sapiens
aaacggaacacgacgaagaagaaagacgaccacaaaccagaggcgcagcgaggacgccgcagaaaacacaaa

SEQ ID NO: 228482 - RNA, 77 nt, Homo sapiens
cggaagcgggaggacgggccaccgcggcgccaagaggcacggagcccaggcgccggaacccggaccaaggacccacc

SEQ ID NO: 228483 - RNA, 77 nt, Homo sapiens
caggcagaagaaggggaacccgcgcccaccagggaagcacggacaagccacaacgggaggggggcgggggcacacag

SEQ ID NO: 228484 - RNA, 41 nt, Homo sapiens
cgcagcgagcggagccgccggagaccagaacagaggggaga

SEQ ID NO: 228485 - RNA, 74 nt, Homo sapiens
cacgccgcccgcgccgaggacgcggagcccagcaaggaagggccgcccagcggcacccacgacgcagcgcccca

SEQ ID NO: 228486 - RNA, 75 nt, Homo sapiens
caaaacccgcccggaaaggggacaccggagcagaacagaaggcgcacaaaggaaagagaagcaaaaccacccaag

SEQ ID NO: 228487 - RNA, 57 nt, Homo sapiens
cgggaagagaagacagcagagaaccacaaagacacagcggaaacgcaaaagcgagaa

SEQ ID NO: 228488 - RNA, 64 nt, Homo sapiens
aacaccaaggaaccaacaaaggacacagcaggggccagacaaccagacccgggaggcaagagac

SEQ ID NO: 228489 - RNA, 78 nt, Homo sapiens
agcagggggacgaggccagacaacacaacacaaggcagccacaggccaaaacagagagcgaaagcacacgaagaggca

SEQ ID NO: 228490 - RNA, 77 nt, Homo sapiens
gaaaagacgggcgccgcgggcagcgcgcggcccgggcagcagcaagcagagcccagagaagagacagaagaacagcg

SEQ ID NO: 228491 - RNA, 93 nt, Homo sapiens
ggcccgcagcaagaggcggacgagaaggacagggaaggagaagacagaggagccagaccaagagacagcacaggcgagcgagcagagacacca

SEQ ID NO: 228492 - RNA, 79 nt, Homo sapiens
agccagcccgcgaccgcccgcgccggcaccggggcggccggccaaagccagcaacaggcccacccccaccggagagacc

SEQ ID NO: 228493 - RNA, 69 nt, Homo sapiens
ccacaacaagaaggacagcaaaggagcagggaggcgagcggcacacgggaggaccacggagggggccac

SEQ ID NO: 228494 - RNA, 76 nt, Homo sapiens
cagaaggggagaaggcaggcaccacaaaaaggacagaacgcgacaacaagacaaaacagcaagacaacaaaagccg

SEQ ID NO: 228495 - RNA, 91 nt, Homo sapiens
ggcggaggccgagaccagacgcggagccaggccgaggggcggacgcggccggaacccaagacagaccaggagaggagcagccggaaagcaa

SEQ ID NO: 228496 - RNA, 79 nt, Homo sapiens
gagccaggcagggagccccagagagacaagccccaaggagcccggccccacaccggcacacagcgcagaacagcgaaca

SEQ ID NO: 228497 - RNA, 72 nt, Homo sapiens
gcagaggaaacgagggacaacacagacccaccagcagaagccacgggcccaggcgaagcagcccaaacccgg

SEQ ID NO: 228498 - RNA, 75 nt, Homo sapiens
agaagaagccaccaaggagcaggaaaacggaacaggaggcccggacccccagcacaagcgcaggccagggggaga

SEQ ID NO: 228499 - RNA, 92 nt, Homo sapiens
ggaaaggcaggagcaagggaaaaccgagcgaaccgaggaccaaaagggcacagaagagacgaaagggcgagggacgaagaaagaaagaaccg

SEQ ID NO: 228500 - RNA, 59 nt, Homo sapiens
cccagaccgaccagcccaagaaacaccaccaacaaaccgaggccagaacaaggagacaa

SEQ ID NO: 228501 - RNA, 72 nt, Homo sapiens
aggcgcacaccccagcgcgcaaagcgcgaggggcgaggagaagagaggcagcaaagggaccccacagcagca

SEQ ID NO: 228502 - RNA, 77 nt, Homo sapiens
cagaccagcgaacaccgacgagcggaaccgacaggcaccgacggaccgaagcgcgcagccgaccaccggagaggaca

SEQ ID NO: 228503 - RNA, 38 nt, Homo sapiens
aaccaagcaaagcccaaggggcgaaccacagaggagcc

SEQ ID NO: 228504 - RNA, 50 nt, Homo sapiens
aggaagaaaaacaaggcgaaagcgcccgcaaacgcagacccagagagaga

SEQ ID NO: 228505 - RNA, 69 nt, Homo sapiens
gcaggaccaaaggccagaagccagcagggcagaaaagaacagacccagaagaagcgaaaggggagaaag

SEQ ID NO: 228506 - RNA, 70 nt, Homo sapiens
ccaggaagagcagaagggacgagcgcggacgcaaagccgaccacagaaagaccgggcacccaaacgggaa

SEQ ID NO: 228507 - RNA, 77 nt, Homo sapiens
gagacaaaccccagacgcgccggagggccagagaaaggaaagggcggcaggaagacaggaaaagagaaacaggcccc

SEQ ID NO: 228508 - RNA, 68 nt, Homo sapiens
agcagcccaggccgagacgaaaggcagaggcggggcaccaggcccagacggcgaacccgagcaagcaa

SEQ ID NO: 228509 - RNA, 42 nt, Homo sapiens
gggaggaggggcaggcccggcgggagagcgggacggccccaa

SEQ ID NO: 228510 - RNA, 75 nt, Homo sapiens
gacagagaagggaggacggggcccacagcagacgcaaacagcagacggaagaccccacggcaaaaccacacccga

SEQ ID NO: 228511 - RNA, 54 nt, Homo sapiens
cccccagggaagcagaggggaagcaggaaacacacgccgagaagacggccccac

SEQ ID NO: 228512 - RNA, 76 nt, Homo sapiens
gacgacgcaaaaccgaaagagggcaagagaagaacagaagaaacaaaaggccaccgaagagggagagagaccggca

SEQ ID NO: 228513 - RNA, 75 nt, Homo sapiens
gcaacaagaaggaacacagcagacagggcgccagagagggaaaggcgcccaaccaaaaaagcaacacagaggaaa

SEQ ID NO: 228514 - RNA, 87 nt, Homo sapiens
cggcccgggggaacccgccgccgggagcccaaacaacgacagcccagaagaggaaggcagccagacccaggccccaggaaggcacaa

SEQ ID NO: 228515 - RNA, 78 nt, Homo sapiens
gaaaggaagaagcaagagaggagaggcaaccaagcgcgagccggcacgaaacaaaggagcgagacagaagagaaccgg

SEQ ID NO: 228516 - RNA, 70 nt, Homo sapiens
ccaccggaaggaaggcgaggggcacaccaaagggaaccaagaagggacccaaaaagacggacagcccacg

SEQ ID NO: 228517 - RNA, 109 nt, Homo sapiens
aagaaaagcgggagccagggcaaaaagacaacagaggccggagacacagacaggcaagcacaaccaagcccaaccagagaggccgcagggaggcccagagcacacagac

SEQ ID NO: 228518 - RNA, 63 nt, Homo sapiens
agagcaaagggacgaaaaaggacaggccacaaaaccgaggggaaagagaccgggccgacgggc

SEQ ID NO: 228519 - RNA, 82 nt, Homo sapiens
cacaggcgcccacaccacgcccagcaaccaccccaggccagaaccccaggagcgagcggagagaggacgccgagggcagcag

SEQ ID NO: 228520 - RNA, 69 nt, Homo sapiens
ggccaaggggacgagcaaaggaagcgcgaacagcagcgcagagcccaaaaggcagagcgaggagagaag

SEQ ID NO: 228521 - RNA, 99 nt, Homo sapiens
cgggggcgcccccccgaggcgcgccacccccggcacccacggagaaccacggggaccaagaagcgagcagcccaaacggacccgggaacaagagccgaa

SEQ ID NO: 228522 - RNA, 75 nt, Homo sapiens
cccgccccccgggccggagggaccaggaagagagacaaccaccggcccaagagaagggagagagagagcgaaggc

SEQ ID NO: 228523 - RNA, 69 nt, Homo sapiens
cagacaaaaaagaaagggagcagacaaaacgccaagacagaccaaggaaggacgaggaagaaaaggaaa

SEQ ID NO: 228524 - RNA, 68 nt, Homo sapiens
aaggagcacgacggcaggaaggaggagacgaagaaaggagggccgagcaccacagacagcgcgccccc

SEQ ID NO: 228525 - RNA, 76 nt, Homo sapiens
cacggggcgacccgggcgaccacggggcgcggcgcaaaggccgcaggcgcgcgggaaaagcgcagcaacaggaaaa

SEQ ID NO: 228526 - RNA, 66 nt, Homo sapiens
caaacacccgcagacagaacccacgaggcaccagcaacgaggaaaacggaagaccggccggccgaa

SEQ ID NO: 228527 - RNA, 66 nt, Homo sapiens
gacccaccccgaagagcaacggaaccagcgccgaggagggcgcccacgggccgcgggcccgccacc

SEQ ID NO: 228528 - RNA, 55 nt, Homo sapiens
ccgccggcacgccgccagccccgggggccacgagcgggggggggcgcaagccagc

SEQ ID NO: 228529 - RNA, 76 nt, Homo sapiens
agaggacggggaccaaaggcacaggacagagcgggagccaccagcgccaaagggaagccaggagcccgggggcacg

SEQ ID NO: 228530 - RNA, 79 nt, Homo sapiens
cccacagccaaaacagcaagaaccagaccagagggccaccccaccccagaaaagccgaacccccacacaagccacccaa

SEQ ID NO: 228531 - RNA, 67 nt, Homo sapiens
caaaacgagcaaacacaggaacccaacgagccaaagaggggcagaggcccaaccacaaaaccaaaca

SEQ ID NO: 228532 - RNA, 83 nt, Homo sapiens
agccaggaacaccgaggcgggcaagccaccggaagacgccgggccgacgccgaggaggcccggaggcccgggcgcgaggccgc

SEQ ID NO: 228533 - RNA, 77 nt, Homo sapiens
aaccaaacccaagaacaaaaagacccacagaccacgaccggccagcgccggggcgcacggaacccacggcagagccc

SEQ ID NO: 228534 - RNA, 69 nt, Homo sapiens
gaaccacggaaaaacggagaggaaaacccaaaaaaccggcgcacaagaagagaaagcggaaacgcacaa

SEQ ID NO: 228535 - RNA, 70 nt, Homo sapiens
gggaagaagaaaaacaaggcacgaccccaaaggaagccagcaaggagggcgaaagggaacgggccacagg

SEQ ID NO: 228536 - RNA, 66 nt, Homo sapiens
acgggcacagagcagacgcgacggagccaggggagaaacacaaaaagacagaaacggggcacaacg

SEQ ID NO: 228537 - RNA, 78 nt, Homo sapiens
gggggcgcgggcggcgggcagcccgcgggcgcccagggggaggcgaagaaacccgaaacgccaccaaagggagaagaa

SEQ ID NO: 228538 - RNA, 60 nt, Homo sapiens
agaaaaagcaccgaacagaaaggggggagaagccgcccagggaagacaaacggaccacca

SEQ ID NO: 228539 - RNA, 78 nt, Homo sapiens
cagcagacacccaacggggaaccccagcggcggccgaagacggaagaagggaggcagaggcgcccgccagcggcaccc

SEQ ID NO: 228540 - RNA, 50 nt, Homo sapiens
aacaagggagcccaggagcccagacccggccagccaggacacaggagaag

SEQ ID NO: 228541 - RNA, 54 nt, Homo sapiens
acgcaccagcagccaccaggagcccgagagagaaggggcgaagaagagccacag

SEQ ID NO: 228542 - RNA, 71 nt, Homo sapiens
acaacggcacagcggggggggacaagagggcaagcgaaaaaggaagacgagcgacaggcgacgaggaagcg

SEQ ID NO: 228543 - RNA, 35 nt, Homo sapiens
gaacgccgcgacagaaaggcaaagaccaccacaaa

SEQ ID NO: 228544 - RNA, 79 nt, Homo sapiens
cggcgccccccgccagcgcgggcgcagcagggcgggcgcaggagcccggccccggagccaccggcacacagagaaaaaa

SEQ ID NO: 228545 - RNA, 78 nt, Homo sapiens
gcaggggcggcaggacacaaacccagacagccgccaggaagcaacgcagcgcggaaaggcacaaccaaggacacgcag

SEQ ID NO: 228546 - RNA, 83 nt, Homo sapiens
agacaaagccaggccgcgcccaggagccgggaagaagaggagcaggccgggacgcccaccggaaccaacaccccagcaaagga

SEQ ID NO: 228547 - RNA, 80 nt, Homo sapiens
caacacgcggagcggaagacggcaacccagcgccacagaccgggccaaacaacccaggaggaagagacacgcggagggag

SEQ ID NO: 228548 - RNA, 70 nt, Homo sapiens
cgcggcgcccaggagcacccagggaagcacggcccaacgccggacaggaagcgcgccgaacgggagcccg

SEQ ID NO: 228549 - RNA, 35 nt, Homo sapiens
agggacccggacaccaaggcccagcacagaagaca

SEQ ID NO: 228550 - RNA, 73 nt, Homo sapiens
gagccaaaaaaacggcggaaaaaagcggagaagagaaacggccacaaggcaaaccacacaccaagacaagaga

SEQ ID NO: 228551 - RNA, 75 nt, Homo sapiens
cgagggcccgagagcaccgcgccagacaggccagaggcagaggcagcaggcagcacaacagacccccaccaacag

SEQ ID NO: 228552 - RNA, 75 nt, Homo sapiens
gaagagccaacagacacgagccccgaaacagcccaccaaagccccccagcgggcggccggggccaggagagaagg

SEQ ID NO: 228553 - RNA, 82 nt, Homo sapiens
ggcggcgcgcggcggcggcgccggcgaggaggcgcccggagcggccgccccagcacaaagaggcagcgaacgccaaaaacag

SEQ ID NO: 228554 - RNA, 72 nt, Homo sapiens
acaaaggaagaagagcagccgccggaggagaccagagcaaaaaaaggcagagggcggagaaggaacagggag

SEQ ID NO: 228555 - RNA, 69 nt, Homo sapiens
ggagcccaccacccacccgagcggagaagcgaggacacacagggccccagcaggaggacccgccggacc

SEQ ID NO: 228556 - RNA, 99 nt, Homo sapiens
agccagcaccaacaggccgccaaaccggaagaagagaggaaacagacccgagagggcggcgcgcacaaggccgaggaccaccacacaccggaaggcacc

SEQ ID NO: 228557 - RNA, 93 nt, Homo sapiens
gggcggggaggcgaggccggacgcacccggggggcccaggacagagcgggagccaccagcgccaaagggaagccaggagcccgggggcacggg

SEQ ID NO: 228558 - RNA, 83 nt, Homo sapiens
agagacgcgcgaggggcgccgaagcgagggccagacaacacagggacacaacaaacacaaccgccacagaagcacaggcaacc

SEQ ID NO: 228559 - RNA, 74 nt, Homo sapiens
caaaacggcggagaaagacaggcaggccccgggcgcgggagccagccgaagaaaggaaaagagaggcgccgaca

SEQ ID NO: 228560 - RNA, 71 nt, Homo sapiens
ggcaaacgcaagcgggagagaagccgaggggggcgccgggccacggggacccgcccgagcgcggcagcggg

SEQ ID NO: 228561 - RNA, 70 nt, Homo sapiens
ccaggagccagggaggacgaagaaaggccacaccaacaagacaagaaccaaacagaacccacgaagggag

SEQ ID NO: 228562 - RNA, 69 nt, Homo sapiens
gcggaaagcacgcgcacagagaacggcaacgaaaagagacacgacgcaaacccccaagagaaacagcac

SEQ ID NO: 228563 - RNA, 79 nt, Homo sapiens
aggaggaggagcgcggaaacggcgggcccaggaccggaagggcggcacccggcacaggaacacagccaggcggcagcac

SEQ ID NO: 228564 - RNA, 87 nt, Homo sapiens
ccgccgccggcccgggagcgcaacacgcagcccaagacacagccccagcagcccccagacccacagacacacccagggaaaacaaaa

SEQ ID NO: 228565 - RNA, 73 nt, Homo sapiens
ggagagcccagaaacagggaggcagcacccccaggcagagcggccgggacagaacggcccggcaccgaaaccc

SEQ ID NO: 228566 - RNA, 95 nt, Homo sapiens
gaccccgcggaacgcccaccgcggagagcagcacgaccccagcacagcggaagccgcagaaggaccggccagaagcaagccggagaacagaaaga

SEQ ID NO: 228567 - RNA, 78 nt, Homo sapiens
gaagacaccaaaaagcaaacggaccagaccgaccaccaaaaggaacgcaccccacaaccagcgcaaccagcccggcca

SEQ ID NO: 228568 - RNA, 84 nt, Homo sapiens
gcaaaaagaggcgaaaggaagcaagcagcagaagagccaaggaaaaacagcaagaacccaaaaggggggcagggcccagaggcc

SEQ ID NO: 228569 - RNA, 63 nt, Homo sapiens
acccggaccgcgaaggcgggggagacgaaaacagcgggccaacagacgggccacaggacagcg

SEQ ID NO: 228570 - RNA, 99 nt, Homo sapiens
gaagaccgcccaagcgcccggaggcccacagcagggggcagaaaccaaagagccaggcgacccccgcgcccgaggcccagaaggggacaagcgggagac

SEQ ID NO: 228571 - RNA, 41 nt, Homo sapiens
caaagcggagcgcccaagaggggcggcaagaaaacaggaac

SEQ ID NO: 228572 - RNA, 80 nt, Homo sapiens
ggaagacagaacgggaaacggcgccacccagaagcaggggaggggcgaccccggggcccggccagcacgaccgaggaggg

SEQ ID NO: 228573 - RNA, 78 nt, Homo sapiens
ggagccagggccgcggcccgcgccgaacgacgcagccagagcagcaagaggccaaggggacgacggccacgggcccgg

SEQ ID NO: 228574 - RNA, 77 nt, Homo sapiens
acagcgaagaccggacgccgggaagcccaccgaaggcgccccccagaaaaagcggaaaaccacgccacgagccccag

SEQ ID NO: 228575 - RNA, 72 nt, Homo sapiens
ccacaaaaccaaacaaaagaaccgcgggccaaaccaaagaacgaggacgaaggcggagaagaagaaaccaaa

SEQ ID NO: 228576 - RNA, 37 nt, Homo sapiens
accagaggaggacggcccgagccaccggcgccagagc

SEQ ID NO: 228577 - RNA, 49 nt, Homo sapiens
cccacagccagcaacaccgcaagacagccaccacagacaagaccagcag

SEQ ID NO: 228578 - RNA, 67 nt, Homo sapiens
gaagcgggggcgaagcgaggcgacacaccaaagaaaaaacacaccaagcagaaacggagccaagggg

SEQ ID NO: 228579 - RNA, 74 nt, Homo sapiens
cagcggccacggaggggagccggaaagccagggaaaagcagagacagaagcacaaccagaacagcagaccagaa

SEQ ID NO: 228580 - RNA, 85 nt, Homo sapiens
aaacaaagccaaggaaaccccaacacagagccaagcgccaagcaccacccccccaacaccccacagagcagaaacccggaggagc

SEQ ID NO: 228581 - RNA, 68 nt, Homo sapiens
agaagccaaacagaggacgcagccaggccacgcgcggggagcccccacccccaaaaacgcggaagacg

SEQ ID NO: 228582 - RNA, 79 nt, Homo sapiens
gaccccgaccgacgagccccaccccccaacggacgcccgcccaccgcccgaaccgccagcccaggccgggcgggcgccc

SEQ ID NO: 228583 - RNA, 78 nt, Homo sapiens
gcgaggggagcaccaggaccgggccggaacgagacgcacgccccacaggcccggaggcggagcccgaagaaaaacaga

SEQ ID NO: 228584 - RNA, 77 nt, Homo sapiens
ggcacaaggacaagacacccagccgggagaacacagagggcgagacagcagccggagcagagcccccgcaaccagcg

SEQ ID NO: 228585 - RNA, 97 nt, Homo sapiens
gacccagcgccggcccccaggcgaagaagcgcagccgcaccggccaagggccacacggcgaccgcggggacgaggggacacaagacggcgaggagaa

SEQ ID NO: 228586 - RNA, 91 nt, Homo sapiens
aggcgggggcccagaagagccaggaacgaaagccaggaacaaccacccggcccaaggacaaggagaagaaggggccaaccagcacggagcc

SEQ ID NO: 228587 - RNA, 64 nt, Homo sapiens
gcacccgagcggcggcggcggcagcagcggcagcggcaagcaccgcgaacaagaggcgccagcg

SEQ ID NO: 228588 - RNA, 85 nt, Homo sapiens
ccgccgccgccccagccgcccgcggccgggagcggagccccgggacgaccaaagcaaaaaaaaggccagaggacaggccgagagg

SEQ ID NO: 228589 - RNA, 74 nt, Homo sapiens
cagcggaaggaagaggcgccggggacagcaaaggcgagaaacagaaggagcagaggaaccagagaaggagaaac

SEQ ID NO: 228590 - RNA, 78 nt, Homo sapiens
gcaccgcgcaagccaacacggggggggggaagacaacccggagaacacccaggggacgcccagaccaaacaacaaaca

SEQ ID NO: 228591 - RNA, 74 nt, Homo sapiens
aaacaccagcacggaaccgccaccagggcagcgagcgcaaacccaggccgagggaggcaggaaacaacagacgg

SEQ ID NO: 228592 - RNA, 78 nt, Homo sapiens
ccccggagcccggagcaagaaacgacccggcgccgaccgcgagacggcaggaagagcgaacggccgcccccaagcccc

SEQ ID NO: 228593 - RNA, 66 nt, Homo sapiens
ggaaaccggcccagcggcacccacaggaccgcgaacaaggaggccacaaaacacccggacccacca

SEQ ID NO: 228594 - RNA, 105 nt, Homo sapiens
ggcagcgggccgccggacgcgcacggccagcaagcagcagggaccggaccgcagggcgagaaaaacaggcgaggccgaccacagcggaagcaggggcccacccac

SEQ ID NO: 228595 - RNA, 89 nt, Homo sapiens
cccacaggggcccccgcgccccccgggacccccacgccgccgccaggaccagggagcaacaagagcaagcccaaggagccagccagcgg

SEQ ID NO: 228596 - RNA, 82 nt, Homo sapiens
gccaaggggagaccacaccaagcgggagacacaccacgccaagggagacgcaggcagaaggaaagggcgcagaccgggcagc

SEQ ID NO: 228597 - RNA, 59 nt, Homo sapiens
acgcagggcgcccccggagcagcggcaaaccagaaaagcccagagcgagaggaggaagc

SEQ ID NO: 228598 - RNA, 77 nt, Homo sapiens
gcgggcccgaggcggcgagagaggcaggcggagccgaccgggccaggggaggggaaacacagagaacggaacagaag

SEQ ID NO: 228599 - RNA, 86 nt, Homo sapiens
cgggacccaccacccaggccccgacgccccgagcacaggaagccggagaaccgaaggaccgcggaccaggcggacagccccccgca

SEQ ID NO: 228600 - RNA, 84 nt, Homo sapiens
agccccaccccagccccgccacaggagagaccacggcagaggaacgaggacgccgaaggaagagcggaagaggccgggacaagc

SEQ ID NO: 228601 - RNA, 78 nt, Homo sapiens
gggccgggagaccaccacggcaagcagcccggaccagccccaacacggagccacaccaccaccaaggagcccaccccg

SEQ ID NO: 228602 - RNA, 57 nt, Homo sapiens
caaccacagagacccacagggcaacaacggaccacgggaaggccggggcaccgaccc

SEQ ID NO: 228603 - RNA, 77 nt, Homo sapiens
aggaaaagcacaaagagggaagaaaaagagggaaggagcgagaaacagggaggcaggacagggaagaagggaagggg

SEQ ID NO: 228604 - RNA, 85 nt, Homo sapiens
ccggccgggccagcacccggccgagacggcggcagcagcggcacagccgagaaagacaaaagagaggagcaaaggcaagcaagag

SEQ ID NO: 228605 - RNA, 75 nt, Homo sapiens
aagcggcaaaaagcgggagaagcgcggaagagagcccgccaaagaggccagagcacgagcagcagccacgaaccc

SEQ ID NO: 228606 - RNA, 77 nt, Homo sapiens
gcccccagagggggaacaggcagcgccccaaccccagaaccgcgcgggacggacaccgcgcaagaggggaaggcacg

SEQ ID NO: 228607 - RNA, 86 nt, Homo sapiens
cgcacgagcaacagacgagcgcgccaggccgacagccgcggccgggcccgaggaaaccccccaggcaagaggcgcaggaccgggaa

SEQ ID NO: 228608 - RNA, 76 nt, Homo sapiens
gcagcagcagcggagcgcccaaggaggacacgggggggaaacaagcacgggcgagccaggacacgaccacaacaca

SEQ ID NO: 228609 - RNA, 57 nt, Homo sapiens
acccgggacacaccacaagggggaaaggcgcgcagccgagagcaccaggggacccgc

SEQ ID NO: 228610 - RNA, 65 nt, Homo sapiens
gcacacccaccgagccgagaggggggaagggggccagacaaccagggaagcacagacacgcgcac

SEQ ID NO: 228611 - RNA, 57 nt, Homo sapiens
gagaggcaccaagaccacacgaggaccaggaagcccacccccaaccccagaggaccg

SEQ ID NO: 228612 - RNA, 78 nt, Homo sapiens
gcccggcgggagcccaggagacgaggcccagcagagccgggcccagacccggccggccgcgcgccgggagagagcaca

SEQ ID NO: 228613 - RNA, 65 nt, Homo sapiens
cccagacccgcccgccagaaccgcgcgccacccacaaccagggggcagcacgccgaaggagagac

SEQ ID NO: 228614 - RNA, 74 nt, Homo sapiens
ggggaaaaaaaccgcagggcggagagaccagaggagcagccccagaagcacgaaacagcccacaggagaagaga

SEQ ID NO: 228615 - RNA, 70 nt, Homo sapiens
gccggaaacaagccaccgcgggagaggacgccccacggagaaagagagggccgggagcccaaccgaggcc

SEQ ID NO: 228616 - RNA, 72 nt, Homo sapiens
gagcgcgcccggcggggagcgcagcgcggaagagagaaggccacgcccgaccccaagcaacaacggggcagg

SEQ ID NO: 228617 - RNA, 79 nt, Homo sapiens
gacaagaggcgacgccgggggcaccgagcgggaacgcacggggcgcgccgggcggagcagaacgcggcagaacggaggc

SEQ ID NO: 228618 - RNA, 63 nt, Homo sapiens
gagcaaagaagagcccgaacaaacaaacacccagaaacaagagaacgaggaaccccagagagg

SEQ ID NO: 228619 - RNA, 67 nt, Homo sapiens
gggcccaaccaggagcggagcaaggagcacagaaacacgggaccgaccaacgccaaacgcgaaaggg

SEQ ID NO: 228620 - RNA, 78 nt, Homo sapiens
gggcagcagaaccagccacggggacaggaacgaagggccagcacgaagcccgaacaaccgcgacagaagccagaagcg

SEQ ID NO: 228621 - RNA, 71 nt, Homo sapiens
agaacagaaagcgagcagagcccgcgaacaagacaagaacccaggacgagaaaaaacagagcggaacaagc

SEQ ID NO: 228622 - RNA, 77 nt, Homo sapiens
agaaaagcccgggagcagaagggaggcccaagacccacaacaaaagaaggcgacacacaacaacaggacaaccccaa

SEQ ID NO: 228623 - RNA, 74 nt, Homo sapiens
ccacacgcacagcaaggaagaaggggcgaagaaaagagaaacaaggaggagacggcgcaggaccggggaaccgc

SEQ ID NO: 228624 - RNA, 70 nt, Homo sapiens
caagccagccgagacgcagccaagggacacaccaccaaaccgacgcccccgaaaaggacacagcacaagc

SEQ ID NO: 228625 - RNA, 75 nt, Homo sapiens
cggccaccacccgcgcgaaccaagccaacaggacgaaggacagagagggacgggcagacgccccgacacgcagcg

SEQ ID NO: 228626 - RNA, 75 nt, Homo sapiens
agcaagagaacgaaaagcacacagcaggcgagcgcagcccacgaaagcaacgaagagcaaagcaccccgagccgc

SEQ ID NO: 228627 - RNA, 74 nt, Homo sapiens
gcaaaaacaagacggggcgccccacagaggggcgacgcacagaggacccgaaaccggagagcaccgcgaaaagg

SEQ ID NO: 228628 - RNA, 73 nt, Homo sapiens
gcggcgcccagcggcggccgcgccggccagcagcccgcgcccgggcaggcgcaaaaaaggagcagcaacaaga

SEQ ID NO: 228629 - RNA, 79 nt, Homo sapiens
aggggagccaccagcccccggagaaagacagcaaagaaaaggagaagaaaggaaaaaaacaaccccgggcaccccgcca

SEQ ID NO: 228630 - RNA, 59 nt, Homo sapiens
cgcagaaagagcgcgacagaacggaaggcagcagccgggccggcccagggagaacgcaa

SEQ ID NO: 228631 - RNA, 74 nt, Homo sapiens
caagcaccacccccggaagcaccaggagccacagacgaccggcacacagcagagaggcccagcaacggccaccc

SEQ ID NO: 228632 - RNA, 59 nt, Homo sapiens
ggccggcaagagcaggccagaaagccaggccgccccacccaccccagggcccagggccc

SEQ ID NO: 228633 - RNA, 64 nt, Homo sapiens
agacaaaagggccaaagaagggagagaggaggcacaggaggaagaccacgcggcaagcaaaaag

SEQ ID NO: 228634 - RNA, 86 nt, Homo sapiens
ccgcagccagggcgggggggaggcgcccccgacccaccgagggacggcccgggcccccaggcccaggaagcccacccagccccgcc

SEQ ID NO: 228635 - RNA, 72 nt, Homo sapiens
acaaaaggagcagcgcaggagacagggcccgggcacaaaaaccgacgagccagacaccacgccacccaagag

SEQ ID NO: 228636 - RNA, 55 nt, Homo sapiens
gacggcaggaaggaggagacgaagaaaggaggagccgggaggaagccggaacggg

SEQ ID NO: 228637 - RNA, 63 nt, Homo sapiens
ggaacagaaccgacgagcagccccgagaccccagagagggagcagaggcaaccaccgaaacgg

SEQ ID NO: 228638 - RNA, 77 nt, Homo sapiens
cggcaacagggcggcggggaaaagagaaaaagcgcgacccagcaacaccccagaccaagggaacgcaaaggcaggag

SEQ ID NO: 228639 - RNA, 83 nt, Homo sapiens
ggggggggaagccgcagcggaaagcaggagcacagaggagacccgacagcaccccggaaccagcaacagcccgaagacagcac

SEQ ID NO: 228640 - RNA, 78 nt, Homo sapiens
cccaaaggccccaacaagaagagacaggggaaacaaggaggaacaggagcaccacgagagaggcaggaagacaaacag

SEQ ID NO: 228641 - RNA, 84 nt, Homo sapiens
cggcccgcgcccgcccccggccgggcggacggcagaaggccagacacacaccaacaaggcgcccaagagcagagaacgccggca

SEQ ID NO: 228642 - RNA, 81 nt, Homo sapiens
cgagcccccacagggagaaaccccacccccaagaaccaacccccaaaggcgggacagaaagcaccgggaggaaagagagcc

SEQ ID NO: 228643 - RNA, 110 nt, Homo sapiens
ggccagcacgccggcggccggggcacccccaccaccacacgccaccgcaaggcgcaacagccggccccgggcgaagagccggccgccgcgcgcccgacacagaagagccg

SEQ ID NO: 228644 - RNA, 73 nt, Homo sapiens
gcccaacaaagccccacagcagccagaaggaaaggagaggagccaagcccaacgggacgggaaaacggccaca

SEQ ID NO: 228645 - RNA, 83 nt, Homo sapiens
accaaacaccccagcccacagagagcaaaacacaagagagcagggaggagggcacacaggcccgagcacaaacacaagaaacg

SEQ ID NO: 228646 - RNA, 74 nt, Homo sapiens
gcgccggaaaccggagcgcgcagcagaacccaggagcccccgcagggccccggagcccacacggagcagcccga

SEQ ID NO: 228647 - RNA, 72 nt, Homo sapiens
ggccggagcccggggaaagaggcgggagagggaggagcccagaccgggcgacccgccaaaacagaaacgccg

SEQ ID NO: 228648 - RNA, 70 nt, Homo sapiens
acaaaggcagaaaagaagcccagaagcgcagaaccgcgcaccagccgaacacgcagggagaggagcaggc

SEQ ID NO: 228649 - RNA, 75 nt, Homo sapiens
accccagagcgacagcccgggacaccaagaaagaacgcaagacagccgccacccaacgcaagggaggcagaaagg

SEQ ID NO: 228650 - RNA, 84 nt, Homo sapiens
cgaaaccgggccgaagacgcacacggagcagaggaaaggagacggggcaaggccaagggacaagaaaggaccagccaggcgcag

SEQ ID NO: 228651 - RNA, 77 nt, Homo sapiens
gggaccgcagcacggggaaacgaccgccccaaaacgagcacaacgggggccgacacagcaaggaagagcacccccag

SEQ ID NO: 228652 - RNA, 81 nt, Homo sapiens
ccccagaaaaacgccgccaccaccgggcaaaccaccccagaccgaggcgagagacaggcgagagacagaagaagagcagga

SEQ ID NO: 228653 - RNA, 78 nt, Homo sapiens
ggagcgcagagcgggcgagcgcgaaaaaggagggagcgacgaagagggagagcacagaaaaggaggagcgaaagaaga

SEQ ID NO: 228654 - RNA, 81 nt, Homo sapiens
ggccaggcgaagcacgagcagaccggcccgaccgcccacagacccaaacaaagaacaccgcccagccaagggggagggcag

SEQ ID NO: 228655 - RNA, 80 nt, Homo sapiens
cggcccgcaggagaggaaaaggagcgagcagacgacaagccgggagcgggcggccaaccagcggcagagcgagagcagcc

SEQ ID NO: 228656 - RNA, 58 nt, Homo sapiens
cagaaacaaaagcaacaaagagggagacgaccagaaaaccccaaagagagggaccaag

SEQ ID NO: 228657 - RNA, 78 nt, Homo sapiens
gaaaggccaacacagcagaacaaagggaccccgcagaggggcgcggaggaggccgggggaggagcgccgggggcgagg

SEQ ID NO: 228658 - RNA, 82 nt, Homo sapiens
agagccccaccaccagagggggggaaggaggcgaggacagcacgccgccccacacccacggagcccaaaagaaagagacaag

SEQ ID NO: 228659 - RNA, 72 nt, Homo sapiens
gacagggcacaagaacgaggcgcccccacgacccccgaccaccccgaaggagacacacccgcgcagcaaggc

SEQ ID NO: 228660 - RNA, 38 nt, Homo sapiens
gaagacccaccgaggaggaggacaggaaagcagaccca

SEQ ID NO: 228661 - RNA, 82 nt, Homo sapiens
gagaagaagaccccacggaaagacaccggccagcggccagagcgagcaggcccgaaaagaaagcgaacacacaaaacaagaa

SEQ ID NO: 228662 - RNA, 79 nt, Homo sapiens
ccgcggcaacgcgcagcggagggacacggaccgaaggaacaagcagaaagcacgaacaacgagaacaagacacgagcaa

SEQ ID NO: 228663 - RNA, 68 nt, Homo sapiens
cagggaggcaagaagacaccggacaccacaggacagcaccaaagaccgcacagaagcagaagaaccgc

SEQ ID NO: 228664 - RNA, 78 nt, Homo sapiens
gcggggcccgccaggcgcgcggagccacacaaagagccgagcccacccgaccagggcccggcacccagcagaaggaca

SEQ ID NO: 228665 - RNA, 88 nt, Homo sapiens
ccgagagcccccaaacacgcagcgcagacccaagacacagccagggcggaaacgcgcgccaagaaaagggggggacagccccagagac

SEQ ID NO: 228666 - RNA, 68 nt, Homo sapiens
aaagcacgggaggagaggagccaagaggacaccagaaaccagaagggacgaggcgaaaacaacgaagg

SEQ ID NO: 228667 - RNA, 83 nt, Homo sapiens
ccggacgccgaggaccaccaccgcgaccgccccgcccggcgcgggcccagaaggcacaaagagcacacggaacgccagggaag

SEQ ID NO: 228668 - RNA, 136 nt, Homo sapiens
gacggcgccaccgacacgcagaacgcaaagccgacgcgcaccgacacacacaaggagaacccaaagacgggccccgagacacgacgggggagaccaggcccggggggcccgagccaggaggcgccgcagacagaga

SEQ ID NO: 228669 - RNA, 82 nt, Homo sapiens
gcgacgcgcccggcccggagcccccagcgcagcggccgcggcgacaaaaccagacccccgacgccgggcagggcgaaggggc

SEQ ID NO: 228670 - RNA, 77 nt, Homo sapiens
agggggacccggacccaggaagagccgacccaaggaggagccaccaagcccgaaggaggcgagacacagcaggaccc

SEQ ID NO: 228671 - RNA, 75 nt, Homo sapiens
ggcggaccgcgggggagaaccggaaggcagacagagcgccaacagaggggagggagagcccaagaaccgagggaa

SEQ ID NO: 228672 - RNA, 80 nt, Homo sapiens
caccgggaaaccagcgaggacagcccgagaaccagcagcccaaaggagagcggaaaaaaccggagaggaaggggaaaggg

SEQ ID NO: 228673 - RNA, 75 nt, Homo sapiens
gacgcacacgggggcggacaccacaagaagggcgccagacggcggaaaacccgaagcagaagcccgacacaggca

SEQ ID NO: 228674 - RNA, 72 nt, Homo sapiens
ccagccgaggcgccagaaacagaaccagccaggaacagcaggacggcacaaacaagcacacaggaaagccaa

SEQ ID NO: 228675 - RNA, 75 nt, Homo sapiens
gaagaaaaaagaggagcgcaggggcaggcgagaagaaggacagcacccgccccccccaggcagcagccggaccgg

SEQ ID NO: 228676 - RNA, 86 nt, Homo sapiens
caagaacgcccagcccgcgggcaccggcagaaaggaggaggaaaacacccccagggaaaaagaaaagggcgaagacccgaagcagc

SEQ ID NO: 228677 - RNA, 75 nt, Homo sapiens
cgccgaggaaccacacgggggcacggggccacccgaccaccacacccaccagcaaagaggcagacaggggcaacc

SEQ ID NO: 228678 - RNA, 56 nt, Homo sapiens
ccccagcggccccggggcgcgggcagccacgcccgagaaacagcacccaggacacc

SEQ ID NO: 228679 - RNA, 79 nt, Homo sapiens
aggccacagcagccagccggcccgaggacaccgacaccagcaggcccgggcccgccggccacaccacacgcccccgccg

SEQ ID NO: 228680 - RNA, 91 nt, Homo sapiens
gcgacccgcagaaggcggggaccagccgcgccagcggaccggaggccaacccaccagcagcggacgaacgccacgcccgcagaacgccacg

SEQ ID NO: 228681 - RNA, 76 nt, Homo sapiens
cccgccagcgcccggagaacggaacgccagacccgggagggagaaacgagaggcagggggcagcacgccacagggg

SEQ ID NO: 228682 - RNA, 72 nt, Homo sapiens
aaaagcgacagccaacggcgcgagaaacccaggccgcgcacaagaaccggcagcgaacaaggagaaagccac

SEQ ID NO: 228683 - RNA, 57 nt, Homo sapiens
gcgggcgccgggccaggacggacaccaagggaacccaaggggaagcgagcgggccca

SEQ ID NO: 228684 - RNA, 75 nt, Homo sapiens
gaacaaaagagagaacacgaaaaagggccccgagccccggccccaaagacccaaaacagagacaccccccagccc

SEQ ID NO: 228685 - RNA, 85 nt, Homo sapiens
agcggcggagcaggacgcggaacacccagaggccagcacaacagcgcggagacacaggaccacagagaaggagcggacacgggaa

SEQ ID NO: 228686 - RNA, 75 nt, Homo sapiens
ccccgacgggaaggcggcgggggggcggcgggaccccgagggccgaggcaaacaagggccacgcgcccagggagc

SEQ ID NO: 228687 - RNA, 81 nt, Homo sapiens
ggcccgccgccaccaggccccccgccccggccgccaggagcagccgccggcgccaagaggggccagccgcggacccaacgg

SEQ ID NO: 228688 - RNA, 78 nt, Homo sapiens
gcggccgcggcccggacccgcgggggcgagcgcccggagaacagaggcaggaaaggccggcccagcaaaaggaccaga

SEQ ID NO: 228689 - RNA, 88 nt, Homo sapiens
gacacacccaggcaggaggagaaagagcaaaaacacagccagcccacaaggcagcagggagaccagaccaggacagaccggcaggagg

SEQ ID NO: 228690 - RNA, 75 nt, Homo sapiens
gagggagaccacagcaagacaccgggaccccggaagccaaaaaggaggaaaacaggagcagccaccaacgagcca

SEQ ID NO: 228691 - RNA, 69 nt, Homo sapiens
agcagcccgagccccgccccaacccgcccggcacccacaagcgacagcccggggcgagacacaagagag

SEQ ID NO: 228692 - RNA, 37 nt, Homo sapiens
acacaggaacaggcgcgggcgaggagggaccacgccc

SEQ ID NO: 228693 - RNA, 66 nt, Homo sapiens
gaggccccggaccccagccaaaggaccacgccaagcgagaacgaacaaaacgggaagaagaaagaa

SEQ ID NO: 228694 - RNA, 73 nt, Homo sapiens
ccgccaccaaccccgacaggaggaaaaacacaccgacagcagaacacacgcgaaaggaaaccaagcggaaggg

SEQ ID NO: 228695 - RNA, 79 nt, Homo sapiens
cagcccgccgggagccgaccgaggcgcccgcggggcggggaccgccgcccgggaaagacagaaccagcacagcaaaaaa

SEQ ID NO: 228696 - RNA, 113 nt, Homo sapiens
cggaaacgaaacagcgcagccaggaacaggacgaagaccagcgccagggaaagaaggaggagaaagcaaggacccagagccacacgaacgccccgaccacagggccaacacag

SEQ ID NO: 228697 - RNA, 72 nt, Homo sapiens
ccgaggcacaggcggccaggacccgagcggcaggcaagcagggggacaccagccaggagagaaccagaccgg

SEQ ID NO: 228698 - RNA, 70 nt, Homo sapiens
aggccggaggaacggagcaccgcgcaaaaaaacggaaagaaggcgacgcacaacacaaggcgaccagacc

SEQ ID NO: 228699 - RNA, 57 nt, Homo sapiens
aggaccccgggcgaggccgcggccccccggcccccggcccccggaccccagggaagc

SEQ ID NO: 228700 - RNA, 73 nt, Homo sapiens
ggacggagggagaacacaggaaccgccccgagaggaaacacccccagaagaggagccaaaaaccgaacacccg

SEQ ID NO: 228701 - RNA, 75 nt, Homo sapiens
gcacgagggcagggcggaagagccgaaaggcagagccccggcagaagagcgccaacaacgaaaaacacacacaag

SEQ ID NO: 228702 - RNA, 52 nt, Homo sapiens
gcagaagcgggagcagacgcggaggcacacccagaagccacaggagaagcaa

SEQ ID NO: 228703 - RNA, 85 nt, Homo sapiens
cagacacccgggcgggggggaggacccccagccacagggaccccagccgggcagacggagaacaggacacaaggacgacacccac

SEQ ID NO: 228704 - RNA, 85 nt, Homo sapiens
ggaagagagaaccgaggaacgaagaaacagacacaacagagcagaagaggagaaggaggaaggaccaggacacaaggaaaacaga

SEQ ID NO: 228705 - RNA, 72 nt, Homo sapiens
aagagaaacccacggagagaacagccaggggagaaaaccaggcggaccgccaagaacggaaaacaagacgac

SEQ ID NO: 228706 - RNA, 80 nt, Homo sapiens
gcgcagccgacgcgggaagaagcgggcgcgggcaggcccgagagagaaagggaaagaaggagcggagcagaacaaggacc

SEQ ID NO: 228707 - RNA, 71 nt, Homo sapiens
gccccgagacgggacacaggacaccaacaggaaaaggaagccagagacacgaggagaaagccccaaaccac

SEQ ID NO: 228708 - RNA, 42 nt, Homo sapiens
cggcgccagaaccccggacaccaacaggaaaaggaagccaga

SEQ ID NO: 228709 - RNA, 48 nt, Homo sapiens
acggcgagaagacaccggcaggaagcacaaaaggacaaaccaacgcac

SEQ ID NO: 228710 - RNA, 70 nt, Homo sapiens
acggcacccccaggaaagaaggaaggccagagaggacagaggcaagaaaaggacgggggacaggaaagaa

SEQ ID NO: 228711 - RNA, 80 nt, Homo sapiens
acacggaggccaccaaccccacggacacgccaggccaggggaggcaaacacagggacgacacaagaccaccaccaccgcg

SEQ ID NO: 228712 - RNA, 77 nt, Homo sapiens
gagacgcagggccaggagcgaaaccaggggagagcgcgaaacgcaggggaagacagagggggccaccagcgcgccag

SEQ ID NO: 228713 - RNA, 72 nt, Homo sapiens
agcacacgcgcgccaggcgcaaaagaagcggagaaaagaagaagacacgcagaagaaggaaggaaagcgcca

SEQ ID NO: 228714 - RNA, 83 nt, Homo sapiens
caggggagggaaggacggcccagccggccaggagaacacgagcgcaggagcggaagacacagccaaggagccccggagaccaa

SEQ ID NO: 228715 - RNA, 96 nt, Homo sapiens
gcgcgggcaaacccggccccggacgacgccgccaaaacacgcccgacagagaaagcaggaagagggacaagcaaagggggagacagcagacagaca

SEQ ID NO: 228716 - RNA, 75 nt, Homo sapiens
ggcccgggaagaaagaccaggggcgaggcagcagcccgggaagcgggaccgaagaaggcggcgcacagcgaccac

SEQ ID NO: 228717 - RNA, 80 nt, Homo sapiens
gcccggcgcccgcggccagccgcaagacccgccacaagcaacgcgggaagagaaggccgccgaccaacgggggagaaccg

SEQ ID NO: 228718 - RNA, 65 nt, Homo sapiens
ccggcaggacacgaagcgcagggacgcaaaaagaaagaccgcccggaggccacgagagccccgcg

SEQ ID NO: 228719 - RNA, 56 nt, Homo sapiens
caacgcccagcgggccggcgcccggggccccggagagccgagcacaccacaggcca

SEQ ID NO: 228720 - RNA, 72 nt, Homo sapiens
gacgacacagggcccgcaccccccgcaggggccgagggcgagacggcgacccagacccacagacgggcaccc

SEQ ID NO: 228721 - RNA, 60 nt, Homo sapiens
cccagcgacgagggcaacccgagcgccgcgaagagaagcacacagaaaaagagaggaaca

SEQ ID NO: 228722 - RNA, 56 nt, Homo sapiens
ggggaagagacagaggaagacagagagcaagaccccagcccaaccgaggcggcaag

SEQ ID NO: 228723 - RNA, 72 nt, Homo sapiens
gggcgcagcggacggcggcacacagggagagagaccaaggccaaaaacaggggaaacgaaagcgcaggcgga

SEQ ID NO: 228724 - RNA, 85 nt, Homo sapiens
cgaggaggagcgacccggagcagcgcacccacaccagaaagcggcgggcacaggggaaaaaacaaaacaagaagaaagggaggag

SEQ ID NO: 228725 - RNA, 77 nt, Homo sapiens
gaacacgcccaaaacgacaggacagcaacgaggacagaccccaccggggcaacagcgcaaaacaccaaagggaagga

SEQ ID NO: 228726 - RNA, 73 nt, Homo sapiens
agcacacaacaggaaaacaaaagaggagaaaggagagcgaagccgcaccaggcaagccggaaaacagaacggc

SEQ ID NO: 228727 - RNA, 67 nt, Homo sapiens
agaaacgaacagacaaacgcacaacacacacagcacacaaaaagggacaaaaccacaaggcaagaag

SEQ ID NO: 228728 - RNA, 62 nt, Homo sapiens
ggcgcgaagaggacggaacacagcacaaaagggagggcacagagagcgcgaaggaccccgac

SEQ ID NO: 228729 - RNA, 83 nt, Homo sapiens
ggcgccgaccaggccggccgcgccccccaggacccgccggcgcgagaagggaccccacaagacccaagccagggggagcccaa

SEQ ID NO: 228730 - RNA, 88 nt, Homo sapiens
acccaacagagacccgcccacgcaggggaagaagagcccgaagaagaaccgaagagacagcagaagacacaacagaagacacagagca

SEQ ID NO: 228731 - RNA, 83 nt, Homo sapiens
gccacggggcgggggcggggcggcaggagccggccggcaaccgagggacccgcgccagcgccggggaggcagaaggggccggg

SEQ ID NO: 228732 - RNA, 77 nt, Homo sapiens
cgagccagccgcggccggaggagcccccaggccaagaggccccaggaccggcgaggccccccccccagcagcaaagg

SEQ ID NO: 228733 - RNA, 71 nt, Homo sapiens
acccaaaaagacggacagcccacgggaacaagaggggacagaaaggacgcaaggaccaaaaaacaaagggc

SEQ ID NO: 228734 - RNA, 84 nt, Homo sapiens
aaggggcacgcagaaggaccggccacggcgaggaggaggccgagaccagccaggggagacccaggggggaggcgcacaacccac

SEQ ID NO: 228735 - RNA, 74 nt, Homo sapiens
cacggcccaggaccgcacaaggcgcgggcacagggagggcggaccacccaggaggagggaggggagcccgccag

SEQ ID NO: 228736 - RNA, 79 nt, Homo sapiens
gagcccaggagcgccacgcgcggaaggcagcgcccagcagcgcagaccaaaccggaccacccaaaaagccgaagacccc

SEQ ID NO: 228737 - RNA, 75 nt, Homo sapiens
gcaccacaccgaaaagccccacagcgggccaaccacacaggggggcgccacgcagagccccgccaggaagacacg

SEQ ID NO: 228738 - RNA, 85 nt, Homo sapiens
agagcagccaaggggaagaaaggcacagcagcggccaagggaggaacccgacacgggcacggagcaaagaagggaaccggagcgc

SEQ ID NO: 228739 - RNA, 81 nt, Homo sapiens
cgaaaggaacgcaagaacagaagaagaaagcagggggacgcaaaggccaaggggcggcaaaaaggaccgacagaaccgaga

SEQ ID NO: 228740 - RNA, 69 nt, Homo sapiens
gaggggagcgggaggaggccgccacaggggaagccgggggaaagacggggacaccgaccagagacacaa

SEQ ID NO: 228741 - RNA, 62 nt, Homo sapiens
cagacacaggaccacgcgaaggggagccacaaacgagagcggaagacaagaaacacagggca

SEQ ID NO: 228742 - RNA, 80 nt, Homo sapiens
ccggggccccagaggccgcggacaccgaccggaggagaccaggccaagggaagaaagagggagagaacagggaagaggac

SEQ ID NO: 228743 - RNA, 73 nt, Homo sapiens
gccgacaggacgggcgccgccccgcgcggcaggggaaccccacaaggagccacccagaagcagagagccaaaa

SEQ ID NO: 228744 - RNA, 77 nt, Homo sapiens
ccaccgcccaccgccaagggcggagaggcacgccccccaccacgaaaagcagcaaccgaccaggcacggggcacgac

SEQ ID NO: 228745 - RNA, 73 nt, Homo sapiens
ccagcccacgcgcagggcaaacacgcgacagcacaggcgcgccggcacagcaaacagagcagccagaagcagg

SEQ ID NO: 228746 - RNA, 40 nt, Homo sapiens
aaaagagcggaggcccaaaggacagaggagagaagaagaa

SEQ ID NO: 228747 - RNA, 79 nt, Homo sapiens
gcggggcacaacacgcagagccaaagcggaacgagagacggcacacgggccacagaggaccagcaaggagaagaaagga

SEQ ID NO: 228748 - RNA, 62 nt, Homo sapiens
gaacgaaaagaggagccagcggagaccggcaagcaagagaggaggagaaaagggagccggaa

SEQ ID NO: 228749 - RNA, 56 nt, Homo sapiens
aggagggagaacacagaaaccggccccagcgaagaagcacgagggaaccagaagga

SEQ ID NO: 228750 - RNA, 83 nt, Homo sapiens
ggcgccggcggcgggacgaagagggacgggcccgcggcgagcgagcccgagacaggagaccggcacaccacaggcccaaggac

SEQ ID NO: 228751 - RNA, 69 nt, Homo sapiens
cagccccaacagaccggcaagggacagcggggagccaaagaaggagaaggaagcaacgaagcagcaaag

SEQ ID NO: 228752 - RNA, 69 nt, Homo sapiens
gcaagcaagccagaccaagcgcgcacaagcccgccaccacccaaagaggaaaagaaggaggccagcggg

SEQ ID NO: 228753 - RNA, 76 nt, Homo sapiens
caggaccccagcggggcacacgaaggccaccggggccagaacagcggcggacaccgggaagagaacaccacgcccc

SEQ ID NO: 228754 - RNA, 119 nt, Homo sapiens
gaaaagcccggaaggaaggcccgaacgcgggacggagcgcagcgggggggaccaggaaacagggggggcgcggggcccacgccccaggacaaaaggcgggacaacaccccgaggacccg

SEQ ID NO: 228755 - RNA, 61 nt, Homo sapiens
aagagcagggaaacaccacgaagcagccaaggaggccgggaaccccgcagaagaagagggg

SEQ ID NO: 228756 - RNA, 89 nt, Homo sapiens
cggcaaaggagcagccagagggccgggcccagcaccgaccagaagggcgccccgcccacgccccgcggccagcccaaccccccgggacc

SEQ ID NO: 228757 - RNA, 61 nt, Homo sapiens
ggggacgcacgagcccggcgccggcaggccccgggccggagaaagacagcaaagaaaagga

SEQ ID NO: 228758 - RNA, 83 nt, Homo sapiens
ggggagacggccgaggagacccgcggcgggaagcccagagcgcggcgcaggccgcaagcagccggcggccggaagcacccgca

SEQ ID NO: 228759 - RNA, 71 nt, Homo sapiens
cacccccagcgacacccgcgcccggaggcaggaaaagcaaggagggacaagacaccgagcaaagagcggcc

SEQ ID NO: 228760 - RNA, 84 nt, Homo sapiens
agcgcgggagaagcggcgcccaccggcgggcaacacccgccgcagagggcgcgggagagcagccggacccagaccagggagccc

SEQ ID NO: 228761 - RNA, 105 nt, Homo sapiens
ccgccacccccagagcgcgggaacgggggcggccgggacggaggacgcgcaggacagcccagagcaagcacacggaggcccgggagccagaccgggagcccgccc

SEQ ID NO: 228762 - RNA, 66 nt, Homo sapiens
gaggagacccccccggaaaccgccggagaaggaccacgaacacaggcggcagggcagaagcgggaa

SEQ ID NO: 228763 - RNA, 31 nt, Homo sapiens
gcaaaggaggaagagagagcggggcgagaac

SEQ ID NO: 228764 - RNA, 66 nt, Homo sapiens
agagagacgagagaaacccacgaagacgcgcggagaaagagaccaccgagaaaacagaaacgccgg

SEQ ID NO: 228765 - RNA, 77 nt, Homo sapiens
cccggaaacggcgacccgcaccccagcgacggaaaaccggcagcaggagaggccacgccagggaaggggccaccagc

SEQ ID NO: 228766 - RNA, 83 nt, Homo sapiens
acccagccccgcggggccagccgcgggagagaagagacgaggaggaggggagaccgcggcaggacacgaggacagcaacggcg

SEQ ID NO: 228767 - RNA, 58 nt, Homo sapiens
ggaggacacaccaaacagggaacccaagccgacgcggaaaaaaccggagggaacacac

SEQ ID NO: 228768 - RNA, 75 nt, Homo sapiens
ggaaaacccaccgggagcacgaagaggagccccgccacaccagcaggcgccaaacaccgggccagggcaacaaga

SEQ ID NO: 228769 - RNA, 69 nt, Homo sapiens
ggccgacgcaccccacacccgcaccagacaggaccaccgaggacagaaacccaaagaaccaaagccgag

SEQ ID NO: 228770 - RNA, 59 nt, Homo sapiens
ggagcaccggcccaaaaaggcaaaggaccgacagggcagggaaccagagaccacaaggc

SEQ ID NO: 228771 - RNA, 73 nt, Homo sapiens
gacaacagcgcgccgggacggaaacagagcggcagaggacacgccacccaggcagaagagagcgaccggaccc

SEQ ID NO: 228772 - RNA, 84 nt, Homo sapiens
gaccagggacaaagagcaaacagacagggccgcaggacaccaggggggaaaaaccacacaggcaaagaacgcgcaaaacaggac

SEQ ID NO: 228773 - RNA, 53 nt, Homo sapiens
caagaagacaccggacaccacaggacaggacgccgccagccaccggcgcgaag

SEQ ID NO: 228774 - RNA, 69 nt, Homo sapiens
acggggaaccacaggagaaggaaggggcccccacggggagaaggaacaaccaaggggagcgaagaaacg

SEQ ID NO: 228775 - RNA, 73 nt, Homo sapiens
agaccgaagagacagacaaggcaaagcgaaaggcaccgcaacaacgcccagcgagagacagaagacagcccac

SEQ ID NO: 228776 - RNA, 52 nt, Homo sapiens
aacacgaaccgggaaggccccacaaggccagcaacagaagaaagcaagcacc

SEQ ID NO: 228777 - RNA, 86 nt, Homo sapiens
ccaacagacacgccaccccaaggagcacgcagggcgagggaacagagagaaacccggcaagaaagcggaggcaaggcgcaaccggc

SEQ ID NO: 228778 - RNA, 72 nt, Homo sapiens
accgcagggccacacagacacgcggagcagggacgggaaggggcggagcggcgcggacacaccaggacgaca

SEQ ID NO: 228779 - RNA, 73 nt, Homo sapiens
cgcgacagaggagggaggaaaacaaccgagggcagaggaaggagaacagagggaaaaagaccagagaaagggg

SEQ ID NO: 228780 - RNA, 76 nt, Homo sapiens
cgcgaagggcaggccacaccaagaagaggacagacgggcccagacagaaaagcaggcaaccagcagcaaccagaac

SEQ ID NO: 228781 - RNA, 92 nt, Homo sapiens
cgcggaagggcaggccgaggcgggaagccccagcgccgggccaaggccaaggccagccggacaaaacaaagagcccaggagcagacaccacc

SEQ ID NO: 228782 - RNA, 63 nt, Homo sapiens
aagcggcaaagggaaaaaggcgagccagagcccagaggggagcagagggaggggggaacggac

SEQ ID NO: 228783 - RNA, 76 nt, Homo sapiens
cccaccaaacagaaacgagacccccggcggccaagacacagcgaaaaacccagcacagcccagccagccgaacagg

SEQ ID NO: 228784 - RNA, 70 nt, Homo sapiens
cagaacagcacgagccccgggcccgccgagaggggcccccgggaggagagaagcagaaccacgggaaaca

SEQ ID NO: 228785 - RNA, 79 nt, Homo sapiens
gagaggccggagaaaacaccaaggaggagagagcgaggccacccagaaggccagccccagcggcccccagccccggaag

SEQ ID NO: 228786 - RNA, 68 nt, Homo sapiens
gccggagggagggcaagcggacaaggccgaccagggggacagacaccgccagaagcaccaggacagcc

SEQ ID NO: 228787 - RNA, 79 nt, Homo sapiens
ccccaggccaagcagccaccagcagcccccagagcgggaccacaggcggaagggccaccagcggcacccaggaaaccac

SEQ ID NO: 228788 - RNA, 57 nt, Homo sapiens
cgccggccgccgcaggaggcacgggaggaagccggccgccaggccacgaacccggac

SEQ ID NO: 228789 - RNA, 82 nt, Homo sapiens
gagacccaggggaggggcgcgcggagcgcccgggccccagcagggccagagaccacggaagccccgcggcccaaggcgcacc

SEQ ID NO: 228790 - RNA, 77 nt, Homo sapiens
acgccgcgcgcgcacccaacagcgaccgagcggccagccaggaaagcgggagcgcgggagcaaaggaaagaagagaa

SEQ ID NO: 228791 - RNA, 72 nt, Homo sapiens
gcagcgccagaccaaagccagcagaaaccaggaggaagaagcagacgccaagcaagaaccaagcaagcacca

SEQ ID NO: 228792 - RNA, 78 nt, Homo sapiens
ccgccgccgagccgcccgcagcggcccccgccggggagcgggaaacgcacaacagagaacagaaaagacccgcagaca

SEQ ID NO: 228793 - RNA, 76 nt, Homo sapiens
ccggacccaaagagaagccaacagggcaagaaccgacaagccaccggcggaaagcgcaggggaagagagaaaagac

SEQ ID NO: 228794 - RNA, 72 nt, Homo sapiens
acccgagagcaccgccgagcggaccccaagaaccagcccccccaagccccggggccagccacaagccccaac

SEQ ID NO: 228795 - RNA, 82 nt, Homo sapiens
aagccccggaagggacaggcccccagaccggcagagagccaggcccagggacgagaccggacagcacgcaaaagcacccccc

SEQ ID NO: 228796 - RNA, 69 nt, Homo sapiens
aaaagaccaagaccccagagcggaccaaaccgacaaggagcgacaaacaaggccgcgccaacccgacga

SEQ ID NO: 228797 - RNA, 60 nt, Homo sapiens
gggcccggaccaggcacgcacaaaaagcagcaggaaaaaaccaggaacgccccaaaccag

SEQ ID NO: 228798 - RNA, 87 nt, Homo sapiens
aggggccccggagcgcggcgcccgcggccgggcggcgcggccgcccgggccgggccccaccggacggccagaagggagcgcggacgg

SEQ ID NO: 228799 - RNA, 60 nt, Homo sapiens
caggaggaaaccggagagcagacgccagccagcagcaaaaggcaagcaggccccgccaga

SEQ ID NO: 228800 - RNA, 78 nt, Homo sapiens
gggcaccacgggaagacagacaccccgaaccgccggacccggagaccacccagagaggaaggaagcacaagaagaggg

SEQ ID NO: 228801 - RNA, 73 nt, Homo sapiens
aacagacagcccaacagcccaagaacccgacaagaaagagcaaagggacagcaaaggcacaacacagaaagac

SEQ ID NO: 228802 - RNA, 79 nt, Homo sapiens
caagacagccggcagaggcaagcaggggggcaaagcagagggcaggaggggaggccggaaaggcgcaccaagagagaag

SEQ ID NO: 228803 - RNA, 84 nt, Homo sapiens
cgcccagcaggcgaagcgcgagagcagcgagcggcgggcggccagaaggacgagggacagaacaagcacgggcgacccacaaag

SEQ ID NO: 228804 - RNA, 77 nt, Homo sapiens
gccccccggcgacgacgcccgaggccaggcaagacccgcccgccaagcgagcaggaaaggccagcacagaagaacgc

SEQ ID NO: 228805 - RNA, 34 nt, Homo sapiens
ccgccgcaggcgcccccggaacacggagcagaga

SEQ ID NO: 228806 - RNA, 76 nt, Homo sapiens
agggcccaaaaaaagggcaggaaccacgaaggacagaagacaccacagagagaagggcaacaaacaaacgagagga

SEQ ID NO: 228807 - RNA, 56 nt, Homo sapiens
caagcaaggaagacgaccagagagcagcgagagccagacaagccagacaccaagac

SEQ ID NO: 228808 - RNA, 102 nt, Homo sapiens
cgaagcggacgcagccgcgagcccggaggcggcgggaggaggcggcggccggagaaacaggcgccaaacgacagagaccccaccacgggccggcgaacaccg

SEQ ID NO: 228809 - RNA, 70 nt, Homo sapiens
caacgcaagacaccggcacgcaacagcgccccacaaggaaagacgccaaggaagacccagaggagcaaga

SEQ ID NO: 228810 - RNA, 62 nt, Homo sapiens
cccaagggcgagcgggaccgagcggccgaagcaccgacaaggcaagaacacaagagcgcaca

SEQ ID NO: 228811 - RNA, 51 nt, Homo sapiens
aagccacacccaaaaaaagacaacggccagccaaaccaaaaggccgggggc

SEQ ID NO: 228812 - RNA, 32 nt, Homo sapiens
gaaccgcagcacaaaagaagcacaaggaccga

SEQ ID NO: 228813 - RNA, 57 nt, Homo sapiens
gcccggcgccgcgcgagggaaaccacgccgggacgggggagaaggaaaggcagaccg

SEQ ID NO: 228814 - RNA, 53 nt, Homo sapiens
ccgcaccgcggaaccaagcgaggcgagcaccacgccgaaaaacgggagaacgc

SEQ ID NO: 228815 - RNA, 98 nt, Homo sapiens
aacgcagagcgggcagcccggcagagcagcagcagaagcgagcaggcgaagaccagggcccgccccccaggcccaggaccaagggacgacccaggggc

SEQ ID NO: 228816 - RNA, 78 nt, Homo sapiens
ggaccaagaaccaggacggccggagcagcagaacaagagcggagaccaagggagccccgcagcagcagaagacggccg

SEQ ID NO: 228817 - RNA, 81 nt, Homo sapiens
ggggcggggggaacggccagcgcccaaggaggacaaaccaaccaggcacacccgaggccagcagcgaaggcccaggaagaa

SEQ ID NO: 228818 - RNA, 62 nt, Homo sapiens
cccgcagcaagacgcgggcgcgcgaggacgggcaaagaacggccaaggaaggagcgagggcg

SEQ ID NO: 228819 - RNA, 74 nt, Homo sapiens
agacagagacagagcaaaaccagggggcaacaagggacagagaacaaggacaaggcaaacacggacaggcagga

SEQ ID NO: 228820 - RNA, 77 nt, Homo sapiens
aacaaagacaaaaggagacgagaagaagacaagaggagcaaccaccagacggcaggaagcaaaagccagaccagggg

SEQ ID NO: 228821 - RNA, 86 nt, Homo sapiens
cgagccccaccgccgccgagaggaggccagagaacaggaccagggagcaacaagagcaagcccaaggagccagccagcggcgccgc

SEQ ID NO: 228822 - RNA, 51 nt, Homo sapiens
caagaagggaagagaacccaacagcccaagcacggggccaaaaaggcacga

SEQ ID NO: 228823 - RNA, 81 nt, Homo sapiens
gggcagagcgcacgggaggccccgcagggcagaaccaccagccggacagggaccacacggcgacgcagggacgggcgggcc

SEQ ID NO: 228824 - RNA, 86 nt, Homo sapiens
acaacgcaggagggggcggggcaccggaaacaccacccaggcccccccgagaaaagagaaaggaagaaggacacagccaccaaacg

SEQ ID NO: 228825 - RNA, 62 nt, Homo sapiens
cagaaccagaccgggagcacgcacgccacgaaggggcagcaggcaagaggagagccgcacca

SEQ ID NO: 228826 - RNA, 73 nt, Homo sapiens
accaaaccggaaaccgccaaaaccccccacacaccccgccgggcaaaagcagaccggaaaacccaccggcaag

SEQ ID NO: 228827 - RNA, 97 nt, Homo sapiens
ggggcccaacaagggccacaaaggaccaagaacggagcaagcccaggcacagccgacgccgcggggcagcaccgggaccggaggcccagagcgacgg

SEQ ID NO: 228828 - RNA, 51 nt, Homo sapiens
gaggaagaaaggggaccacaggccaaggagcgaagccaaggacggaggaac

SEQ ID NO: 228829 - RNA, 71 nt, Homo sapiens
cacggcggccgcggaccaagcggcgcgccgcgaccggagagccggcaacggaccaagggccagcccgacac

SEQ ID NO: 228830 - RNA, 58 nt, Homo sapiens
caggcgacacaccggaagcaggcagaggcagcgacagagaaaaccccggagcagggag

SEQ ID NO: 228831 - RNA, 79 nt, Homo sapiens
gacaccacaacccgaagaacgccacagccagcacaggcaccggccgagcacaccacagacccaccgcccgcccgagccg

SEQ ID NO: 228832 - RNA, 71 nt, Homo sapiens
gacggccagggaccgcgccaacggagacaacgacaagagaagagcccccaagcaccgacccaagcaaggaa

SEQ ID NO: 228833 - RNA, 58 nt, Homo sapiens
agccggaacggccaacggccagccccaaggaagccgccacccagaacagagaggaaga

SEQ ID NO: 228834 - RNA, 71 nt, Homo sapiens
gaaccacggaaaggaggaagaagacaccggggacagacagggccaaggcacgagaacaagccacgcagggg

SEQ ID NO: 228835 - RNA, 67 nt, Homo sapiens
ggcaccaggaagcagccaaagcacccaccacagaaaaacagaaacgcgccacagcaccggaggaaac

SEQ ID NO: 228836 - RNA, 63 nt, Homo sapiens
ggaggaaggaagaaccacagaacggacgccacgacccccagaagcaggccaagaagggaccca

SEQ ID NO: 228837 - RNA, 75 nt, Homo sapiens
caccacaaagccaggaaaaagcagcaaagggagaaaagaaggccaaacagaagcaggcccagccgcaaaaacgga

SEQ ID NO: 228838 - RNA, 75 nt, Homo sapiens
ccaggcccggacccgcggccggcccggcgcggcccagcgccccagcgcaacaggagacgaacccagaccagcaaa

SEQ ID NO: 228839 - RNA, 76 nt, Homo sapiens
cacagaagcagaaggacaagaacgcagaccgcaccaaggagacagacgagccggcgcagaaaagaaggagcgggcg

SEQ ID NO: 228840 - RNA, 77 nt, Homo sapiens
gcacgagcaacagacgagcgcgccaggccgacagccgcggccgggcccgaggggcaggcacacaagaggcccggaaa

SEQ ID NO: 228841 - RNA, 70 nt, Homo sapiens
aaaagggccaaagaagggagagaggcaggagccgcggaacagagacaaccacaaccacagaagggacaga

SEQ ID NO: 228842 - RNA, 81 nt, Homo sapiens
ccaccagcgcgcggagcaccagcgccgagcgcaccaggggcgcgcggcaacacaagcgagggagaagccaagagcacagac

SEQ ID NO: 228843 - RNA, 80 nt, Homo sapiens
gcgccggagcggagcgcgggcgccggggagccagggcggagaacggaaaagcaccaggaagcagagaggaccgcagaagg

SEQ ID NO: 228844 - RNA, 68 nt, Homo sapiens
gagcgcgaaacgcacgagaaggaacccccaggaaacaccaacaagagaaaaaacccacaccccaagcc

SEQ ID NO: 228845 - RNA, 92 nt, Homo sapiens
cgcagggaagcccaggggcagggcagcagggcgacagcaagaagccaagaagaagaacaacaagaaaaccaacaagaacaaaagcagcacag

SEQ ID NO: 228846 - RNA, 52 nt, Homo sapiens
aaacaacagaacagcaaaagcgaagagagaacacagagcgacaaggcacaac

SEQ ID NO: 228847 - RNA, 86 nt, Homo sapiens
gaagagaagaagaagcaggagaacgaaacggagccagagaaggcagaagagcccaggcccggacgaacacaacagcaacaacaacc

SEQ ID NO: 228848 - RNA, 59 nt, Homo sapiens
accacgaggcaggagagaggacccaccacaacgaccggagccggcacgacgacgacgac

SEQ ID NO: 228849 - RNA, 76 nt, Homo sapiens
cggagagagagccgcgcacgcacagacaagagagaggagcgagaggaagcggaagaaaaccaacaaaggacagcgg

SEQ ID NO: 228850 - RNA, 90 nt, Homo sapiens
ccgcccagcccccgggagcgggacacaggaaaccagacaaaagaccaagaagagagaaccaacagaacaaaacaaggaagaaagggaaca

SEQ ID NO: 228851 - RNA, 79 nt, Homo sapiens
caacgcgggcagcaccccgcagacaccggcgacaccccggcaggacaaagcagccagaccaaagcacagcgccagagac

SEQ ID NO: 228852 - RNA, 73 nt, Homo sapiens
cggagcagcggacccaggcagggcccaaaaaagggaaccgcacagcgagacaccccacacagagggaccgcaa

SEQ ID NO: 228853 - RNA, 71 nt, Homo sapiens
gagccgcccgggccagcggccgcgcacccccggccggaggcaccagcgagcggagcgcaagaagaaggccg

SEQ ID NO: 228854 - RNA, 72 nt, Homo sapiens
gaagaaaaacccaagaaagagcgcagcgggagaaggaggggcagcagcaggacagggaacccgggagacagc

SEQ ID NO: 228855 - RNA, 76 nt, Homo sapiens
gagacgcaggaagcagcgaaagagcagaaaaaagaaggaagcccaaagacgcaaaggcccaccaagccgagaacac

SEQ ID NO: 228856 - RNA, 81 nt, Homo sapiens
cggggcgcgcgcccggccggcggggagcgggaccggcgccagaccgacggcgaaggaaaagaacgcgcgagaaggggaagc

SEQ ID NO: 228857 - RNA, 81 nt, Homo sapiens
ggaccaagagaccgaccgccagacccagcaggacccacgcccaccagggaccaaggcccccaaggggggagggaccgggcc

SEQ ID NO: 228858 - RNA, 61 nt, Homo sapiens
cgaaccgccaaagagcgcgcccccagacgaagggggcgcagcccagggcacggcccccagg

SEQ ID NO: 228859 - RNA, 67 nt, Homo sapiens
caccaaggaggagccggagaccaaaggaggcccagaggaaaaagacacgcgagaagacgaggacccg

SEQ ID NO: 228860 - RNA, 76 nt, Homo sapiens
agcaacggaccaagaaccaaacgaccgacaccgcaagaccccgaagcccaggagaacgcgacacacaccaagcgaa

SEQ ID NO: 228861 - RNA, 86 nt, Homo sapiens
gagagagcagaaaggagcacaggcgggagccaaggacacccgagaaccaccgggaggaacgggccacaacacccggcaccagcggc

SEQ ID NO: 228862 - RNA, 80 nt, Homo sapiens
ggaaggaccggaccgccggacacgcccggaggacaccagaggaccagaacccacgagaaacagacgagccaaccagaccc

SEQ ID NO: 228863 - RNA, 76 nt, Homo sapiens
gaccaagccgccccgcccagcccccaagagcaggaggggaccaccacacacaacccaagaccaggagcaagaagag

SEQ ID NO: 228864 - RNA, 75 nt, Homo sapiens
cagccaagaaagcaggcgaagagaacagaaagaaaccacgcagaaccacaggcagaggcagaaaagcagagacag

SEQ ID NO: 228865 - RNA, 58 nt, Homo sapiens
ggaccgggacggaccgggagggacccaaggccagccagccccaggcaccagcggacag

SEQ ID NO: 228866 - RNA, 76 nt, Homo sapiens
ggccacgcgggagcaggaccgaaccgaaaacccaggcgaccggaacaccgaaaaaacaaacaacagcagaagcaca

SEQ ID NO: 228867 - RNA, 64 nt, Homo sapiens
accccagcgggcccggggaggcaccgacgaggagccgcacaaacacgcagaggcaagaagagag

SEQ ID NO: 228868 - RNA, 79 nt, Homo sapiens
ccaagggcacagagggagaggaggagcggagcggaaaagcgcacagaccgcccagcccagcggacgacagcaggacggg

SEQ ID NO: 228869 - RNA, 80 nt, Homo sapiens
caggacgagcagagccccccccaccagaggacgggaggagcagcaacagacgcgagggccacaagacaagaccggacaac

SEQ ID NO: 228870 - RNA, 74 nt, Homo sapiens
gaccgaaagccgccaggggaaaacaaagagggaaaacggagaaaagcccccccaggccagcgcaggaacacgag

SEQ ID NO: 228871 - RNA, 80 nt, Homo sapiens
cgggacccggccccggcccacaggggggggcaaacccgagagaacgggacagaacccagggccccacacccaccacccaa

SEQ ID NO: 228872 - RNA, 67 nt, Homo sapiens
cacgggacgccaccccggcccgacgccagggaggacgcccacaagagagggaaggagaaaggcagac

SEQ ID NO: 228873 - RNA, 73 nt, Homo sapiens
aaaaggagaacgggagcgagagacgaagcacagagcaaaagggaagccacaagaaagccaggaacggaggaag

SEQ ID NO: 228874 - RNA, 78 nt, Homo sapiens
gcggagccccgcgcagcgcgacgcgcgaccagaccggcccccccgagggaaaccgggcgcagacagcaacgacaaagg

SEQ ID NO: 228875 - RNA, 71 nt, Homo sapiens
agaaacgaggccggaagaaaccacaaggacccagggcggagaccgacgcggaaaaaaagacccaggaggag

SEQ ID NO: 228876 - RNA, 85 nt, Homo sapiens
ccgcccccagggggaaaggggagccaccacacccagccacaagagacaaagcaggaggacacaagaagggaggaaaggcggaccc

SEQ ID NO: 228877 - RNA, 66 nt, Homo sapiens
ggcggcgcacggaaacagccacagcaggcagggccgcaaaacgccagccccaaaccgcccaaaacc

SEQ ID NO: 228878 - RNA, 90 nt, Homo sapiens
ccaggaacgcggaaggcgacacaggggcgagggaaggacaacggaaacacggaaaagaaagagccaaccacggcaccccaaaagcacacc

SEQ ID NO: 228879 - RNA, 72 nt, Homo sapiens
cacaggcaggaggcgggaaacgcagccggccccaaagcccagagaagaccagagaggggggcagaaaccgaa

SEQ ID NO: 228880 - RNA, 76 nt, Homo sapiens
ggcccgacaacgaagaaccgcgaccgcacaagcagccgccagcggaaccaagcggcgcggcacacgagaccagggc

SEQ ID NO: 228881 - RNA, 88 nt, Homo sapiens
cgccagcgggacgaggaccgagaccgcggccgggaccgaggaggagcaggagcggccgcggagcaggagcgagagcaggaacagaaga

SEQ ID NO: 228882 - RNA, 76 nt, Homo sapiens
ggaaagagaaccaacaggaggaggcccgcgcggaagagccggccgcgagaggagacgacgaagacccaaccgaccc

SEQ ID NO: 228883 - RNA, 78 nt, Homo sapiens
aaagagcccggaaagaagagacagcgaggagacaacccccagggccagcgagacagaccgaaacccaaagaaaaggag

SEQ ID NO: 228884 - RNA, 65 nt, Homo sapiens
accgggagagcaggagaaaggaaaggccacaggaggagcagcgacgagaaagagcaagagcccag

SEQ ID NO: 228885 - RNA, 82 nt, Homo sapiens
cgcgagccccagcgccgcccacccgccgaacccgcgacccgagcgcaagccggaagaaaacccgagcgcacgcaagaacaag

SEQ ID NO: 228886 - RNA, 76 nt, Homo sapiens
cccacccagggccggaaaagccaacgccggcgaaggcccaaccccccccacgaagccggagacggggcccggagga

SEQ ID NO: 228887 - RNA, 85 nt, Homo sapiens
cagccagggacccgggagagggggcggaggaaagcgcaaagggaaaagcaagaagggaaagaaaccgaagccccacaagccaggg

SEQ ID NO: 228888 - RNA, 89 nt, Homo sapiens
agggagcgagccagcaagcggaagcgccccaccgcgggcgccaaggggagcagaaggaccggacacaggagacccggaagacacccgcg

SEQ ID NO: 228889 - RNA, 69 nt, Homo sapiens
gccagaaacaggaccagagagcccagcccacaaaaaggaacaaggaagccccccagaaaagaggcgagg

SEQ ID NO: 228890 - RNA, 84 nt, Homo sapiens
caaaaccaacgaaccaaaagcaaccgcgaagagcaggacaagaaaagcgaaccccagcacgccgcagcaccggagagcagaaac

SEQ ID NO: 228891 - RNA, 83 nt, Homo sapiens
gaagcgaaggagcccaggagaagcggaacggcagagaagaaggcgcgaagccacgcgcccaggcgcaggcaggggccacacgc

SEQ ID NO: 228892 - RNA, 55 nt, Homo sapiens
acaggcccaggcagaccgcagcaaacaaggcgccaccggaagaaacgggagggga

SEQ ID NO: 228893 - RNA, 78 nt, Homo sapiens
agaaacagcgaccccgaacaggcgaagccgacgagcccgaacagacgcaccagcgggaggaagagggacggcccagga

SEQ ID NO: 228894 - RNA, 70 nt, Homo sapiens
cagccggccccccgccgcgggggaccgccggccggccccacccaagggcccaaacgggcaacagaaagag

SEQ ID NO: 228895 - RNA, 53 nt, Homo sapiens
gccacagcggcaaacaggcagacaggagaaaaccaccaaaaaaagaagaagaa

SEQ ID NO: 228896 - RNA, 80 nt, Homo sapiens
ggggacacccggaggcggcgcagcagcaccgcgccccacaggaagcccgcagaaggcaagccgaaagaaggacgaagccc

SEQ ID NO: 228897 - RNA, 66 nt, Homo sapiens
gaggaagcagccagcgccgcaacaagcggcagcaagaaggccccgagcgagggcgcccgcacgagg

SEQ ID NO: 228898 - RNA, 74 nt, Homo sapiens
gaaaccgggagacccccccagcacaccaccagcaaggagcaagcagagccgaacaaagaacgaaggcgaagaac

SEQ ID NO: 228899 - RNA, 39 nt, Homo sapiens
ggagggcgagaacgaccccgagacgacagcgcacgccag

SEQ ID NO: 228900 - RNA, 72 nt, Homo sapiens
aaggaaggagagagaacacagaaaccggccccgggcaggggcaaggcagaaagcggcgcgagaccccaggcc

SEQ ID NO: 228901 - RNA, 73 nt, Homo sapiens
ccaagccccgaagcccgcaccaacacacgaggcgaagaaagaccacaaaacaccagacagacccgaacccgcc

SEQ ID NO: 228902 - RNA, 71 nt, Homo sapiens
cagaagaaggaagacgggacgaaagaccgggaccgaaaaccacccggagggaaaagaaagaacccgaaaga

SEQ ID NO: 228903 - RNA, 68 nt, Homo sapiens
acaaaggaccaggccccaagaaggccagcaggaagaccaagaagaaggaaggggggcccccgggccca

SEQ ID NO: 228904 - RNA, 74 nt, Homo sapiens
ggacacgaaacagagaggggaaggagcccagcgacagcgaggaaaacgccacgacagacacaaccaagcaccgg

SEQ ID NO: 228905 - RNA, 69 nt, Homo sapiens
ggaagagccaacacgcgcgccggagggagacaaagccagcaggaggaacagagacagacccgggggccc

SEQ ID NO: 228906 - RNA, 56 nt, Homo sapiens
aaaggaagcaaggagggaagggaagaaagacccgcgacgaacacgacaacccaaca

SEQ ID NO: 228907 - RNA, 71 nt, Homo sapiens
accagccggaccccgacacgcgccgcggccacaccccaggagcagccaccaagggccaagcaccagaaggc

SEQ ID NO: 228908 - RNA, 85 nt, Homo sapiens
caagcgaaccccaaacccaaaccgcggcggcgacccaccacgccagccagaagccagcgagaagaccgagaggccgcgacccaac

SEQ ID NO: 228909 - RNA, 77 nt, Homo sapiens
gaagaggaggagcggggggaaggcggggcccaaggcgccacaagaacggccagacggagggagagcgccggaaacag

SEQ ID NO: 228910 - RNA, 66 nt, Homo sapiens
gaaggccgccggacagcgcagagccaagacggagaaacaaggagacagggaacgcgcgggcacggg

SEQ ID NO: 228911 - RNA, 73 nt, Homo sapiens
agaccacgcaccacgggcgaggcccgccaggggagccccacgccggcccggcccggccgccgggacgcccagc

SEQ ID NO: 228912 - RNA, 62 nt, Homo sapiens
aaagggacaagaagggcaaagccgaaacagcaggccccgcggccaggccagggcaggcacca

SEQ ID NO: 228913 - RNA, 81 nt, Homo sapiens
aaaaggccacacagaaagacgcccaaaaggaaaagcacccccggaagaagggagaggaccccccgaacagacaaccccgaa

SEQ ID NO: 228914 - RNA, 70 nt, Homo sapiens
acaacagacagagcagcgaagcaccgagagaacaagcccaaggacacgagggaacaagccaagcaagcag

SEQ ID NO: 228915 - RNA, 75 nt, Homo sapiens
ggacgccgagaagccagaagaaagggggaaagcaggggagaaaagaaaagaaagacgggaaagaagcgcaaagca

SEQ ID NO: 228916 - RNA, 83 nt, Homo sapiens
acggaccccgagacccggaacccaggcccggccaacgcaacagggagcccacgcaagaggggccggggaccgcccagcagcgg

SEQ ID NO: 228917 - RNA, 75 nt, Homo sapiens
cccagaacgcccccgaacggagaagagcgaaccgccagacccccagcgcagagaagaaggcaggcccacaccacg

SEQ ID NO: 228918 - RNA, 67 nt, Homo sapiens
aaacaaggcaaggcaccggagcggaaaaaccgaacaaggcagaaacgccacagcgaaaccaccgagg

SEQ ID NO: 228919 - RNA, 71 nt, Homo sapiens
cccaaaaagagcagagaaaaccagaaaaaggccaacagcaggcgcaaaaacgaacccacaaccgaacgacg

SEQ ID NO: 228920 - RNA, 36 nt, Homo sapiens
gaacgaaccagaagagcacaagcaacgcacccgccc

SEQ ID NO: 228921 - RNA, 78 nt, Homo sapiens
accacccagaaaggaaaaaagaggcagagagacagcggccaacaaccaggccccagaggaaacggggacagccagaca

SEQ ID NO: 228922 - RNA, 81 nt, Homo sapiens
caacccagaccacaaagaggaaaggacgccaggacacacggcacaaggaccgcaccagcaggggcccgaccaggaggcccg

SEQ ID NO: 228923 - RNA, 86 nt, Homo sapiens
ggggcgcaggggccagagcgaggcgccccgcccgcggaccgcggcagcccagagcagggaccagaccccacaagaaaacacacaac

SEQ ID NO: 228924 - RNA, 84 nt, Homo sapiens
cccaaacccggaaacccagcggcccagccgggcaacagaggagaagaggaagaggaaaccagcaagaaggcagggggacagaag

SEQ ID NO: 228925 - RNA, 85 nt, Homo sapiens
gaagagagcacgcagccaggaaaccacgagacccccccagcgcccgccccagcacccgaagacgccgacaacgcagagcaggccg

SEQ ID NO: 228926 - RNA, 75 nt, Homo sapiens
ccaacaaccagaaggcacagccccgggaggggaagccaccgacacaacaagaagccacagggaaaacaagggcga

SEQ ID NO: 228927 - RNA, 85 nt, Homo sapiens
gcgaaaaccgaaggccgcggaaagggagggccagcccgccagaggcccacccacagagcgcggaggagaaggaccggagaaggag

SEQ ID NO: 228928 - RNA, 79 nt, Homo sapiens
ggaaaaagaagggagcggccgaaggagccaccaggccgggaagcccacgggcccaaaaaaacagaccaccagccgcgag

SEQ ID NO: 228929 - RNA, 85 nt, Homo sapiens
aaaggcaagagaacagcagcgccgcccgccgacagccaggcccgggagaaagcaaagccggccagacaaggagagcaacacaagg

SEQ ID NO: 228930 - RNA, 72 nt, Homo sapiens
cacacccccagaagagcgcaaacgagaacagcacgcacccaagacgccgagacaaggaagcaagccaacgga

SEQ ID NO: 228931 - RNA, 59 nt, Homo sapiens
ccgcagcgaaaacccaacgagaccaaagaggcaagacaccgaaaacgagaaacgaaaga

SEQ ID NO: 228932 - RNA, 51 nt, Homo sapiens
aaggcaaaaacggaaacaccacagcacggggccaaaaaggcacgagggaac

SEQ ID NO: 228933 - RNA, 79 nt, Homo sapiens
cgacgaggcacagcgcgcaagaagggagccaaggcaaggggacacccaaccaaggacccgggggggcgcgggggagcga

SEQ ID NO: 228934 - RNA, 74 nt, Homo sapiens
gcacgccgcccgccgcggcccgcgggggggcgaacacgccgcggcccgcggagacaaccagaacaggaggagag

SEQ ID NO: 228935 - RNA, 84 nt, Homo sapiens
agcagggaagccacccccccggaccccacccacacccccccccaccgcagcagcacccgacagaagaagaagaggacaggccca

SEQ ID NO: 228936 - RNA, 80 nt, Homo sapiens
aggacgagcccgggaccgagaaaggaaggcagcggcggcggcgcgagcagcggcgagagggcagcccagcagaagcaacg

SEQ ID NO: 228937 - RNA, 53 nt, Homo sapiens
gacagcggcaggggccccgaaccagaagccgcccgagaagcaggggaaacaga

SEQ ID NO: 228938 - RNA, 79 nt, Homo sapiens
gggggagagcagaggaaaaacacaggagagagcccaaaaaccaggccccgccggcccccggggccccacgcagcgcagc

SEQ ID NO: 228939 - RNA, 99 nt, Homo sapiens
ggacgagccccggggggcgaagggaggccagcacccccccccgcaggagaacaagcagccagggcggcaagaggcagcaagacacacagacagccacag

SEQ ID NO: 228940 - RNA, 80 nt, Homo sapiens
gaggcagagccaaacacccagccaagaaccccaaaaccaagacccaggccccagacagaacagaggaaaacccccagggg

SEQ ID NO: 228941 - RNA, 69 nt, Homo sapiens
gagaagacaaggaccacagggcgcaaggccccccacccggcgccccgggccagcgggacaccagcaagc

SEQ ID NO: 228942 - RNA, 79 nt, Homo sapiens
ccgagacaaggcgcagccccagggacccccggacagccaacaccaaagccgcgggcacagcggccgcagcggcacgcag

SEQ ID NO: 228943 - RNA, 74 nt, Homo sapiens
gagcggaagaagcgaaccaaagaagagacaaaagagagagcggaaacgagggaaagaaaaggggagcggacggg

SEQ ID NO: 228944 - RNA, 88 nt, Homo sapiens
ggaaacaagaaacggaaagaacaaggacgggggaaagacccgcgaagaacaccacaagcccacaggaacaagggccagaagcagcgaa

SEQ ID NO: 228945 - RNA, 84 nt, Homo sapiens
cacccaacgcgaagacggaacccgggacgacgggacccagcagccagcgaagccccaaggaagccgggacgcccacagacccag

SEQ ID NO: 228946 - RNA, 72 nt, Homo sapiens
aagacaaaaggagacgagaagaagacaagaggccagaacacagcagaaaggggggaccaacagaagcaaaaa

SEQ ID NO: 228947 - RNA, 69 nt, Homo sapiens
acacgcagcagggcggaagcgggggcaccagcaccccgcaccacagccaggcaaagggccgaccgaaga

SEQ ID NO: 228948 - RNA, 62 nt, Homo sapiens
cgccgaggaacaggagcagcggcgaaacccaggcgcggacgagacagacgggggcggcaaga

SEQ ID NO: 228949 - RNA, 70 nt, Homo sapiens
gaccaggcccagaccaaccagcccaaggaacacgccaacaaacgggccacaagaccccggagagggggaa

SEQ ID NO: 228950 - RNA, 84 nt, Homo sapiens
caccaagccccccgggcgcgcagggcggaaaacaccccaaaagccaaaagggaaaggaaaagaccaacaacagcgcaggacacg

SEQ ID NO: 228951 - RNA, 77 nt, Homo sapiens
cggaaccagcgccagcccaccggaaggaccgaagaagcagagggcaggaccccaggagcggaaagaaacaagagaag

SEQ ID NO: 228952 - RNA, 73 nt, Homo sapiens
gggagaggcaacaaggcggaaaaagacaccaccaacggaaaacaacacaggggcaccaccacgaggcgagggg

SEQ ID NO: 228953 - RNA, 65 nt, Homo sapiens
ggagccaccagcccccgaacaacgagagccaacaagccgggacgggggcggagggaagcaaaaac

SEQ ID NO: 228954 - RNA, 72 nt, Homo sapiens
aaagacagcacaaagaagccgagacaaacggcaccaagaggagaaggacaaagccgaacagaaccaaaagac

SEQ ID NO: 228955 - RNA, 75 nt, Homo sapiens
gaacggaggaccaagagcagggagaaagccacaccaaaccagaaaagaacaaaacgacccggaagccgcggaaag

SEQ ID NO: 228956 - RNA, 57 nt, Homo sapiens
cacaagcgcacaggaccgggcgaacggaaggacacccaagagaaaggagagaacgaa

SEQ ID NO: 228957 - RNA, 77 nt, Homo sapiens
cacccccaccgacgcggggcggcagccccaacgaccacgcaagccaccggaaaacccgaggaacccaggcccgcagg

SEQ ID NO: 228958 - RNA, 34 nt, Homo sapiens
cagccagaagagaagaaagggaagggcaggcgcc

SEQ ID NO: 228959 - RNA, 72 nt, Homo sapiens
accgccaggggaccacaagcccaggagggcagacccaagggcagccacacgcgaaggcaagaagacaggaac

SEQ ID NO: 228960 - RNA, 69 nt, Homo sapiens
acggaaacagaacgaagccagggaaccaacccaagcaaggaaaccaacccggaaggccagaaaggcagc

SEQ ID NO: 228961 - RNA, 72 nt, Homo sapiens
agacggaaagccgggacaggagagcggcgggaggggaaggagcagccacccgggcagaaaggccgggcgaag

SEQ ID NO: 228962 - RNA, 74 nt, Homo sapiens
gaagcccacacgggcacaggggccccgccagcaaggcaccaaaaagcccgggcaccgcccagcgcccagaccac

SEQ ID NO: 228963 - RNA, 84 nt, Homo sapiens
gcgagagaggacaaggaagaagaaagaacagcaaggcgaagacagaggggacagccacacagaagggggcagcagacggcacca

SEQ ID NO: 228964 - RNA, 81 nt, Homo sapiens
ccgggaccaggcccgggggcggcggccacgccaaggacggcgggaggccaccgccccaccagcaggcaacgccacagaccg

SEQ ID NO: 228965 - RNA, 82 nt, Homo sapiens
aggagaacgaaaaaaagagaaaccggggaaccacggacaacccagaggacaacgaaggcgcagaccgaaaagggcggaaaag

SEQ ID NO: 228966 - RNA, 74 nt, Homo sapiens
caccaccccgcgccaggccaaccagccggaacacgcgggaaaggcagcagcgcagcggacgacagcccgggaga

SEQ ID NO: 228967 - RNA, 79 nt, Homo sapiens
agaaccgacgccaccgggaggggaccggagccgccagcgcggccagcaccacgccccaggaagcccccgagggaaaaga

SEQ ID NO: 228968 - RNA, 79 nt, Homo sapiens
agaagcgagcccggacagaccaaccgcaggcgcaagacgcgcgcagcggcccagcaaacagaaaccggacccgcagggc

SEQ ID NO: 228969 - RNA, 80 nt, Homo sapiens
gaaggcggagacgcccgccgagggaaaccgacgccgcagaagaaagcagaagaacaaagagaccacgaccgccagcagag

SEQ ID NO: 228970 - RNA, 60 nt, Homo sapiens
ggcgggccggaggggagacgggaggcagccaaaagaagcaagggaaagaccaggagccag

SEQ ID NO: 228971 - RNA, 73 nt, Homo sapiens
gagcagaggcggggaggcaccagcggcccgggagacacacagcaggggagggcggagcggccgggcccggaac

SEQ ID NO: 228972 - RNA, 74 nt, Homo sapiens
ccagcgcccggcccccgcggcggccggcccccccccagggccaggcgccgccagaacgagccgcagaccgacag

SEQ ID NO: 228973 - RNA, 69 nt, Homo sapiens
acaacaagcagcaggaggcacagcgcgccaagcgaacggagagccagccgggagagaggaagaagacac

SEQ ID NO: 228974 - RNA, 70 nt, Homo sapiens
gcaggacgaggggcaaggagcccaagagaaacaggcacgccgcaccacccaccagcggaccggacaaggg

SEQ ID NO: 228975 - RNA, 76 nt, Homo sapiens
gaaggccagcggcaccgacagggacaccaccgaaccccagcccaagccgcgcccgggcccgagggcaggacagcag

SEQ ID NO: 228976 - RNA, 72 nt, Homo sapiens
gaagaagcacaaagcagaagaagagggggaaacacaacagacaaggaagaaccaaagcccgcaagcaaagcg

SEQ ID NO: 228977 - RNA, 78 nt, Homo sapiens
ggggcaggaggcacccggggcaggagaggcgggagagagcagcaccgaagagccgaagcgacccagccagcaccaccc

SEQ ID NO: 228978 - RNA, 62 nt, Homo sapiens
ggaagaggagagaagaagaacagagagaacaaaagagcaggggaagaacacggaaaccggac

SEQ ID NO: 228979 - RNA, 72 nt, Homo sapiens
accacaagacgaccaaaggaggaagccgcaagcaggaagaaaagagcggggcaaggcagccagcagccaaag

SEQ ID NO: 228980 - RNA, 77 nt, Homo sapiens
caaagaaacagaaacagagggagaaggagacacacagaagacgaaagacgaaagaagaacaaaagaaaaaacccggg

SEQ ID NO: 228981 - RNA, 69 nt, Homo sapiens
gccggcgccccgcccggagagcacgcaaacaaggagcagaaccacgcggacaacagaaagaaaaaaacc

SEQ ID NO: 228982 - RNA, 54 nt, Homo sapiens
cacacaagagcccaaagcagcagaccagacggccagaaggggaggaacacacca

SEQ ID NO: 228983 - RNA, 47 nt, Homo sapiens
gaaagcggaagcggcagccggaaccagaagaagggaaggggcacgaa

SEQ ID NO: 228984 - RNA, 82 nt, Homo sapiens
ccggggagaagcccaacaaggacggagaaaagcgccacacccccgaagaagccaaaacgagggccagcacaggaacacaaag

SEQ ID NO: 228985 - RNA, 76 nt, Homo sapiens
ccccgcgggcgacgcgagcccagcaccccgagcccggagaggacccacgcggacccgggccaagaccacgagagag

SEQ ID NO: 228986 - RNA, 60 nt, Homo sapiens
gcgaagacacaagaagaccgagcaaagagaccccggaacaagccgggcggaagcccacgc

SEQ ID NO: 228987 - RNA, 41 nt, Homo sapiens
cccccgagagcggggcacagagcaagagagacaggccagga

SEQ ID NO: 228988 - RNA, 76 nt, Homo sapiens
gacccccaccggccccaggcggcggagccgaagcaaggcggagaacggaaaagcaccaggaagcagagaggaccgc

SEQ ID NO: 228989 - RNA, 78 nt, Homo sapiens
acagccgcaggcaacagcaagcagaagaccacccccagacacacagagaccacgccagcagaccggccgcccgacacg

SEQ ID NO: 228990 - RNA, 60 nt, Homo sapiens
gcgacagccccgcgcagcaggagcacagcaagcgggagcaggcagaccaaaggaacagaa

SEQ ID NO: 228991 - RNA, 61 nt, Homo sapiens
gccgcacccaaacccagccgcgcagcccgaagaggcgggcgcagcgcccccacaccccccg

SEQ ID NO: 228992 - RNA, 83 nt, Homo sapiens
aaaaacccagagccccagaacccaggaaagaaaagaacccagacaagaggcaccacaggaacagaagggcccggccagggaga

SEQ ID NO: 228993 - RNA, 59 nt, Homo sapiens
ggagccccaaagcaacacggcaggacaaccagagggaaaaaacaaaggcagcacggccg

SEQ ID NO: 228994 - RNA, 51 nt, Homo sapiens
gacccgggcaccaacaaaggacccgggcgaaaacaacgcacacggcgccac

SEQ ID NO: 228995 - RNA, 53 nt, Homo sapiens
gaaaaaacgcagacagcccagcccggaaacagacagcacagaaaaacagggaa

SEQ ID NO: 228996 - RNA, 72 nt, Homo sapiens
acaagccgagcagacgaagcagccccagggacgccgagggcaacccgggggggacagagaccccgcggcgcg

SEQ ID NO: 228997 - RNA, 77 nt, Homo sapiens
cagcagaagacggggagaaggggaggagacaaaaaggcaaagcgaaggcggagcaggagaaagcggcacagacccca

SEQ ID NO: 228998 - RNA, 41 nt, Homo sapiens
gacgaacaggaacagagaagcgcagaaccaacaggaccggc

SEQ ID NO: 228999 - RNA, 80 nt, Homo sapiens
gcgggcagcaccgcaccagaaaagaaagaccgcccggaggccacgagagccccgcgggccccgggcccgaaccgccgcgg

SEQ ID NO: 229000 - RNA, 77 nt, Homo sapiens
ccaaggcaccgggacgcgcacccccgcgccgcacggggacgagcaggcagcggggcggaggccgcaccgccgagagc

SEQ ID NO: 229001 - RNA, 59 nt, Homo sapiens
gacacgaagcagagaaggacggccaagaaaccaggacccccagacagagccaccggccc

SEQ ID NO: 229002 - RNA, 71 nt, Homo sapiens
gccacgacagaaggcgccaggcgggaaaccggcccagcggcggagagcacaaccggaaaaagaagaaggaa

SEQ ID NO: 229003 - RNA, 52 nt, Homo sapiens
gaaagccacgcacagcagccagagaacaggccaaggacagcgagagagagag

SEQ ID NO: 229004 - RNA, 74 nt, Homo sapiens
gcaaggggccaccaggaggccagggggcgccagcccaggccaccagaagaccaagcggagccccccaggcacca

SEQ ID NO: 229005 - RNA, 60 nt, Homo sapiens
agaaagagaagagaaaaacgggccaaaaacgcggcccccacaagggggcacaggcaagac

SEQ ID NO: 229006 - RNA, 86 nt, Homo sapiens
gccccccagacgggagcccccaaccaaaagagggagccggcacagaaaacaacacgggagcggggacgacagacaggagaccagag

SEQ ID NO: 229007 - RNA, 109 nt, Homo sapiens
aaccgacccaaggggccacccccgcgcgcgcccgccaccagggccgcgggccccaaggcaccgcacgacaaccagcggacggaagcggcccgcgggaggagcggacgcg

SEQ ID NO: 229008 - RNA, 82 nt, Homo sapiens
gacggccaccggcgggaggaacaaaaggcaagagcgaaggagaaaggcaacaaggcccgagcggggaacacgagagccacag

SEQ ID NO: 229009 - RNA, 43 nt, Homo sapiens
gccggccacccccaggaaccggcaagaagcaagcaaccaggcg

SEQ ID NO: 229010 - RNA, 71 nt, Homo sapiens
cccccaaaagccgcaaaggagaaacgcccacaccaagaaaaacggaggccggggaaggccccgccagcgac

SEQ ID NO: 229011 - RNA, 74 nt, Homo sapiens
gggagcggcggccacggcaccggcggggggcacgaggaaaggagccaaaaccgcaggcagaagagaaaagaagc

SEQ ID NO: 229012 - RNA, 77 nt, Homo sapiens
cgcccagccccgagagcgggacacaggaagggagcgagaaaccacagaacagaggggccgaacccacacaagcagag

SEQ ID NO: 229013 - RNA, 60 nt, Homo sapiens
ccagcaaccaccaagggaacagcacaggacccaaagacaggaccacgcaccagcagagaa

SEQ ID NO: 229014 - RNA, 56 nt, Homo sapiens
cgggaggagaccacccaaacgcggcacgggagaaccgcagccccggaagccgagca

SEQ ID NO: 229015 - RNA, 87 nt, Homo sapiens
caaacaagccgaccggaaaaagggacagcccgccacaaggaagacagcacaggacgggacccacccagaacccccaggacaacccaa

SEQ ID NO: 229016 - RNA, 79 nt, Homo sapiens
gggaaggcggggcgacccggggggcgcgcccagagccccgcgcagcccagggaaggagggccagaccaggacggcaaac

SEQ ID NO: 229017 - RNA, 74 nt, Homo sapiens
aggacagcgccagaagcagaggcgcaaagaagcgaaacacggcacagcgaggagaacgcacccaaccagagaaa

SEQ ID NO: 229018 - RNA, 82 nt, Homo sapiens
gcaacccgccaagcaccaaagccagccgccagccggagccccgccaacggagacaaggaaacagcggagaaggacagacgga

SEQ ID NO: 229019 - RNA, 76 nt, Homo sapiens
gacccagaacaggaagcagaacgggccaagcccagcccggcgaagagaaacgagcaagcagaaccgcaaaggcaga

SEQ ID NO: 229020 - RNA, 81 nt, Homo sapiens
gagcggagacgggagaagaaaagaccccagaaggccgagcccggccacacagcaccgacacccgcggccgaaaccaccccg

SEQ ID NO: 229021 - RNA, 76 nt, Homo sapiens
gcccccgcaagcgagaaagaacacccaacccagcccaccccacagcaggccgaacgaggcggggggcccgagacca

SEQ ID NO: 229022 - RNA, 71 nt, Homo sapiens
gaacagagaagggagccaagcggagggagaacgcaaggggacaggcgggccacacggagagcgcgaccagg

SEQ ID NO: 229023 - RNA, 80 nt, Homo sapiens
ccagacgccaccacaacccccagacgcaagccaaggacaagaacccaaccagcagcaaaacaccaaggaaagggagcagc

SEQ ID NO: 229024 - RNA, 53 nt, Homo sapiens
cccggagcccagaagacagagggcgagggggaaaaaaacaggggaagagccag

SEQ ID NO: 229025 - RNA, 84 nt, Homo sapiens
gccagaaggcgccgggcagaggaccggaggccgggaagccaacgaccacacgcaaccaacgggagccgcaaggacaacagccgc

SEQ ID NO: 229026 - RNA, 76 nt, Homo sapiens
ccaacgcacagaggcagccagagggaggggacacgcacgaagacagaccgaggccaaaagaaaggaagaaaacccc

SEQ ID NO: 229027 - RNA, 78 nt, Homo sapiens
aacgccggcgccccaaccgcacaccgcgacaacagaagaaagcccaaggcgaagacgaagaaagaaaaaaaacccaag

SEQ ID NO: 229028 - RNA, 96 nt, Homo sapiens
cagccccgcgcggccgccagccaagccgccggaggacgagccggacgccgacggcacgagcggacgacgcaacccccccaagacacaagacccacc

SEQ ID NO: 229029 - RNA, 57 nt, Homo sapiens
ggcagcccgccggcgagcagccccagaggaccgcaacaccaggacagaacaagacaa

SEQ ID NO: 229030 - RNA, 63 nt, Homo sapiens
agagaaaaagagcggcgaggaacccagaaacaagggcagacgccagaaggagacagcagcagc

SEQ ID NO: 229031 - RNA, 69 nt, Homo sapiens
acccccgggaaggggaaaaaagccgcacaggaaaggcagaccgaccaaacagggagcagcggacaggag

SEQ ID NO: 229032 - RNA, 82 nt, Homo sapiens
gcaagcaccacgaccgagagggccacccggagaaaggccacggccccagcccaccggaccggaccgcgggcaggggaaggcc

SEQ ID NO: 229033 - RNA, 80 nt, Homo sapiens
ggcgagaacgcgcagaccggggagggaaagaaaaaacacaggccggccaacaggacggaaaaacagaaaacaagaagcgc

SEQ ID NO: 229034 - RNA, 56 nt, Homo sapiens
ccccccgcacacagcaagcacaacaggagggagcaaaggaggcgcgcccaccgcga

SEQ ID NO: 229035 - RNA, 76 nt, Homo sapiens
ggacaacccagaggacaacgaaggcgggcacaccaaagggaaccaagaagggacccaaaaagacggacagcccacg

SEQ ID NO: 229036 - RNA, 77 nt, Homo sapiens
gccgaggcgcgccgcacccggacggaccgccacgcgcccgggagacgcccgcgccgccgagacaccaggcgccgaga

SEQ ID NO: 229037 - RNA, 80 nt, Homo sapiens
cgacgggcacacaaggccaagggccaaggcggcggggagacgagaagaaggccaggggagccaacaggaaagccagcgga

SEQ ID NO: 229038 - RNA, 33 nt, Homo sapiens
agaaagggacaaaagcaggagcaccacgaagaa

SEQ ID NO: 229039 - RNA, 76 nt, Homo sapiens
cacaagcccgaggaagaagcccccgacgcgcccagaacccacccaaaacaggaaacagggagaccggccccagcgc

SEQ ID NO: 229040 - RNA, 72 nt, Homo sapiens
accgagcgggccagaagaccagcggaaaagcgaagccgagcccaaacaaaggcacggcccaaagaagagcag

SEQ ID NO: 229041 - RNA, 72 nt, Homo sapiens
cagcgcacacagcaagcacgagccagaaggaaagaacaaaaagagagagggcgggaagacaaaaagcaagcc

SEQ ID NO: 229042 - RNA, 85 nt, Homo sapiens
gcgaaggccgggacccggccccggcccacaggggggggcaaacccgagagaacggggagcaccgaagacgagcagcagcacgcag

SEQ ID NO: 229043 - RNA, 60 nt, Homo sapiens
gccaggcccccggaaaccagaaaggcagcggggaaaccagcacgaggccagcaccggaga

SEQ ID NO: 229044 - RNA, 76 nt, Homo sapiens
gaaggcagggacacacagcaggagaaacccgcaagcaccaccacgaggccggcccaagcccccaagaagcccggga

SEQ ID NO: 229045 - RNA, 88 nt, Homo sapiens
cagcgagggggcccgggccgggagcagagcgcccggagggcacggcgcaggccaacggaccacaccaaaagccaccaaaggaacacgc

SEQ ID NO: 229046 - RNA, 77 nt, Homo sapiens
gacgggcaggaagcaaggagggaaaaggcagaaggagaaaaggcagccaaacgggaagaacacccacccgcaaagcc

SEQ ID NO: 229047 - RNA, 77 nt, Homo sapiens
cgaggggacgcgcacggcgggccggccaggagccggggacaggggaacccaccagccggacccagggaaaaaacgca

SEQ ID NO: 229048 - RNA, 80 nt, Homo sapiens
agcggaggccgagcggccaggcccccgaggagcccagacagcgcagccacagcccccgacaagaaagccacacgagggac

SEQ ID NO: 229049 - RNA, 71 nt, Homo sapiens
ccaaggacccaaagcacaggaaccaccgaaagcggcgcaacgagagccgcagagcaagcgaaaacaaacaa

SEQ ID NO: 229050 - RNA, 71 nt, Homo sapiens
agaacgaggaagacagagaagaggcccgcgaagacaaaaaacccaagaacccaacaagcccgagaagcaag

SEQ ID NO: 229051 - RNA, 81 nt, Homo sapiens
cgcgcacgcgccgacagacagcgccgccagccccgcccgagcacgggccccgggggcgccgagggcacaagggcaacgaca

SEQ ID NO: 229052 - RNA, 73 nt, Homo sapiens
aagccaaacacaaaggaagaagcccggagacgaccaagaggacccgagccccaaagacagaaaagccccgaga

SEQ ID NO: 229053 - RNA, 70 nt, Homo sapiens
cggcagccagcaacaggggacagccaaaggacagacagcacagaaggaggaggcgccccaccacgaacgc

SEQ ID NO: 229054 - RNA, 82 nt, Homo sapiens
ggagaggggagcaggggccaaggagcacggacggacccagcacgaggaggcgcgaggagagaccaagagcgagccagagcaa

SEQ ID NO: 229055 - RNA, 71 nt, Homo sapiens
gagcacagagcagaagccaagaggacagggcacagaaaacagacacagagacagccccaaggcggagaaaa

SEQ ID NO: 229056 - RNA, 120 nt, Homo sapiens
ggggggagagaaaaaacccagcgagaccgggccggaacgaaagcaggacggaggagcgaccaccgaagcggagcaaaccccgaccaccaagggcaagcacaaccgagcaaaccaaacgga

SEQ ID NO: 229057 - RNA, 81 nt, Homo sapiens
cgagcggaggacacccaacccggagaaagacgaccgccaaccagggagaacacagagaaaaaccgcaagaaaccaggcggg

SEQ ID NO: 229058 - RNA, 59 nt, Homo sapiens
cagggaggaaaaaggcaaacgcaaaggggacaaccaaagccaagcaacgaaggacagga

SEQ ID NO: 229059 - RNA, 76 nt, Homo sapiens
caacaaagaaccccacgaaccgccgaaccggccaccccccagaaaacgacaaacaggagaagaaacgaggccggaa

SEQ ID NO: 229060 - RNA, 73 nt, Homo sapiens
cccccagcaaccgcggggggaacccgaggaaaaacggccaggcagagaagggcggaacaggggggcggcacag

SEQ ID NO: 229061 - RNA, 59 nt, Homo sapiens
agccggaccaggagaacggcggcgggggccagacaaggacccaaaaacccgggcccaag

SEQ ID NO: 229062 - RNA, 78 nt, Homo sapiens
cagcgcacgcgccgggcccggacccgcgcagcgagcccgagcggcagcgccggaggcccggccaacgcaacagggagc

SEQ ID NO: 229063 - RNA, 98 nt, Homo sapiens
cggggaagcgcaaaaacaagacggggcgccccacagaggggcgacgacaagccagcaccagcggccaagccagacgaaaagccggacccaggagaaga

SEQ ID NO: 229064 - RNA, 88 nt, Homo sapiens
gaacccaaggcggggaaccgcagcgcaggacaggcagaaccccggcgcggcccgagaagagaggagaggaggaacaaggaagaagaac

SEQ ID NO: 229065 - RNA, 80 nt, Homo sapiens
cgggggcaaccgggcgcagacgaggaagcggggagagggggagagagaccccggaggacagggcgccacaggccgccagg

SEQ ID NO: 229066 - RNA, 71 nt, Homo sapiens
gcaacccaaaaacaggacgccccaggcagacgcacacaggcccgaacaagcgacaaaaacgagaaaagcag

SEQ ID NO: 229067 - RNA, 81 nt, Homo sapiens
cgaaaggaagcaagcagcagaagagccaaggaaaaacagcaagaacccaaaagggaagaaagagcggcgcggggccacacc

SEQ ID NO: 229068 - RNA, 84 nt, Homo sapiens
cagaaggagcaggaaccaaaggagggcgggaagagaagcaaaaggaaggaggcaaaaagaagaacaaagaaggacggagaggag

SEQ ID NO: 229069 - RNA, 65 nt, Homo sapiens
aagagaacagaaaaaacagggcagggagaggcagcaaaacacggacacaacaaaaccacaaacaa

SEQ ID NO: 229070 - RNA, 69 nt, Homo sapiens
ccgaaccccggcgaacagcaaggcacaagacgggaagaagagcaggcagcagccaaaacacgacaacaa

SEQ ID NO: 229071 - RNA, 78 nt, Homo sapiens
gcaggagcaaggaccaggagcaggacggggacagggggaaacagcagcacagacagacaagaggcagccaggcagacc

SEQ ID NO: 229072 - RNA, 77 nt, Homo sapiens
aagaagaagccgcggaccccgcggagaagacagaggagccagaccaagagacagcacaggcgagcgagcagagacac

SEQ ID NO: 229073 - RNA, 74 nt, Homo sapiens
cagggccaggcgccgccagaacggagaagcagaggcacaacaggaggacgacccaaaacgccagggcaaaacag

SEQ ID NO: 229074 - RNA, 82 nt, Homo sapiens
cagccgggaggggaggagcgcaggggcgcaccacaccagggcaaacgaacaagaggacgcaggacacaggaaggggaacaca

SEQ ID NO: 229075 - RNA, 79 nt, Homo sapiens
ccgagagccgcccgggccagcggccgcgcacccccggccggaggcaccagcggacgggagaaagaacagacaagccgca

SEQ ID NO: 229076 - RNA, 81 nt, Homo sapiens
aaggccaacggagagggccccaggagggacgaaagcaggagaagaccaacaaggaccaggagcagcccgcaaagagccaga

SEQ ID NO: 229077 - RNA, 71 nt, Homo sapiens
gagcaaaggaagcgcgaacagcagcgcaggacagcccaaggcggaaaagcgaaggaagccacaagcacagc

SEQ ID NO: 229078 - RNA, 93 nt, Homo sapiens
aacagacaacacacccaagagcgaacccgagccagcggaaacagggggcggaacaggccaggggcgaccccggcggccaggccacgcgagcgc

SEQ ID NO: 229079 - RNA, 69 nt, Homo sapiens
cagagggcgagacccaacggccggcccgcacccagcaggcggccagcggaaaccacgccgggacggggg

SEQ ID NO: 229080 - RNA, 75 nt, Homo sapiens
caccacgggcagagcaagcgcggaggcacagccagagcaagacccacgaagggcacacaaaggacccaccgggaa

SEQ ID NO: 229081 - RNA, 73 nt, Homo sapiens
caaaaacagaaacgcaggccaaggaaaaggaacagagagagcagaaccgaaacggggaaagaccgaagaaaga

SEQ ID NO: 229082 - RNA, 42 nt, Homo sapiens
ccacggagagcaccaccgggggaaggagcgccgaaggagagg

SEQ ID NO: 229083 - RNA, 65 nt, Homo sapiens
ccgcagagcaagcgcggggaaccaaggagacgcccggcacgcagcccgaaaaccgacacagcaag

SEQ ID NO: 229084 - RNA, 81 nt, Homo sapiens
agccccgcgcgggacccggggcgccacgggggccagaagcagagagagcacaaggagagaacaggggggcccacacgcccc

SEQ ID NO: 229085 - RNA, 53 nt, Homo sapiens
caggcagaaggcacaaggggacagagagccgaaagccgggcaaggggaaagaa

SEQ ID NO: 229086 - RNA, 80 nt, Homo sapiens
gggaagccgcggagcagcgccaagcccacaccagaccagaaagaggggacgaagccccaaggcacccccagcggagaaca

SEQ ID NO: 229087 - RNA, 73 nt, Homo sapiens
cggagccgccagaagaaccgacagagagggagcggagaacacaggaacgggccccggacaagcccagagggcg

SEQ ID NO: 229088 - RNA, 77 nt, Homo sapiens
aaggaggagagcccccaggaccagggcaggaaaaaacccaggaccaaaacagagaaaggagaccaagcgaagaacac

SEQ ID NO: 229089 - RNA, 41 nt, Homo sapiens
cccccgagggcgggacacagacaagagaggccagcccagcc

SEQ ID NO: 229090 - RNA, 107 nt, Homo sapiens
aacccgccgcgcaccgacccgacgcgccggcccacgcgcggccaagaaacgaaggaggcccaaccacaaaaggagccgacggaacccagacggagaacaaaaggaag

SEQ ID NO: 229091 - RNA, 84 nt, Homo sapiens
cggcaccaccgcgcagaggggcagggggaggggaaaggaaaccaaaccaggaaagaaggacaaggagcgaggagaaagagggac

SEQ ID NO: 229092 - RNA, 77 nt, Homo sapiens
caaccacggaagcccacgggcaccgagcccgcccacgacggagaggagccggagcgggcagggcacacaaccgggca

SEQ ID NO: 229093 - RNA, 71 nt, Homo sapiens
ccccggaccccggcggagggcgccgggagcagcagcagcacccacccacagccaaccgccgaaaaaaggac

SEQ ID NO: 229094 - RNA, 37 nt, Homo sapiens
gggcggaccgaagagccacagcagcccggacggagag

SEQ ID NO: 229095 - RNA, 59 nt, Homo sapiens
agggccaaagaagggagagagaaggggaagcacagcaacccccacaccccccccagaca

SEQ ID NO: 229096 - RNA, 70 nt, Homo sapiens
gaaaccaaaggcagacagacgggcccccgccaaacccaccaagacagcccaacaaggcgggacgacaaca

SEQ ID NO: 229097 - RNA, 78 nt, Homo sapiens
gcaacaggaggaaccagaaagaaagggagagcaagacgacgaccagggcaaagcaccccagagcaaaaaacggggaga

SEQ ID NO: 229098 - RNA, 81 nt, Homo sapiens
aagaccaagcccgcggacgccaggggccagacccacaaaaacaagacgcagcccaaaccgcccgaacacaaacacaaggac

SEQ ID NO: 229099 - RNA, 76 nt, Homo sapiens
agaaaaccagcgggcagggcaagaaaaggaaaccacacagcggccgaccccggagaccaccacccgacggcgccaa

SEQ ID NO: 229100 - RNA, 88 nt, Homo sapiens
ggagcggacgcaggagcccccccggcagcaacccccacacccagcaccaggaggcccgagccggcaccggccaggcaacccgaggagg

SEQ ID NO: 229101 - RNA, 82 nt, Homo sapiens
acccgggaacaggaccgcccccccccccaagcgcaggccacgcaagcccacagcagacaccgccaggggacagaaccacgag

SEQ ID NO: 229102 - RNA, 62 nt, Homo sapiens
cgagacccacagacccaagccgaggacgggaaaggaaaaaagaagaagcacacccagaacaa

SEQ ID NO: 229103 - RNA, 40 nt, Homo sapiens
ccccagagggaccgcgccacagggaagggccgggccgggg

SEQ ID NO: 229104 - RNA, 81 nt, Homo sapiens
agggagaagagccagggcccgaccgcagggagcagaggggacagaggcaccaaggaccccaagacaggcaaaaaccgaaag

SEQ ID NO: 229105 - RNA, 53 nt, Homo sapiens
cagacaaaagggccaaagaagggagagagcaaacaggagcgaccaccgcgagc

SEQ ID NO: 229106 - RNA, 86 nt, Homo sapiens
gaaagcccgccaagaggcggaaggccaaggcaccggcccccacgggcggcgcagggggaggaagcaccgaagaacagcccgccaca

SEQ ID NO: 229107 - RNA, 71 nt, Homo sapiens
cgcgccccgcccggaccgcgcagaaccagggcggcggccagcgccacgcggaaaccgggcgcagacagcaa

SEQ ID NO: 229108 - RNA, 71 nt, Homo sapiens
caaccacggccgagggcaccacacaccacaaaccgagggaagaaaggacaacagaagacgcaaaggagccg

SEQ ID NO: 229109 - RNA, 61 nt, Homo sapiens
ggggacccaggccaccaccgcccagcaaacgaggagagaggacagcagagcaggacgcaag

SEQ ID NO: 229110 - RNA, 75 nt, Homo sapiens
ggacacaggagaagaaaggagaaacagagggagaacaaggggcggaaagaaacaagaaagacgcaccgaggcagc

SEQ ID NO: 229111 - RNA, 88 nt, Homo sapiens
acgcaccacgacggcgccacaccgagcgcgaggcgcggagagcaacgccgggacagcgcaaggagaacggcagcagccaccaccaaca

SEQ ID NO: 229112 - RNA, 81 nt, Homo sapiens
aagaagaaacaacaagagaaagacccaggaagcagaagaagcgaggagaagaagagaaccaccaccaccaaaaccccaaaa

SEQ ID NO: 229113 - RNA, 78 nt, Homo sapiens
cccagagccgaagagcacgaaacaggacagcggccgaagccagagccggggcggcgccaggccccacacgggcgcggc

SEQ ID NO: 229114 - RNA, 83 nt, Homo sapiens
ccaagccgcgcggcgaaagccgggcaaaagaggaggagagaaagaaagccagcgcaacgagagaaccagcagaaaagaagccc

SEQ ID NO: 229115 - RNA, 69 nt, Homo sapiens
caaaagaacagaaagcgagcagagcccgcgaacaagacaagaggaaccagagaaggagaaacagcaggg

SEQ ID NO: 229116 - RNA, 79 nt, Homo sapiens
gaagccgaaaagcgcagcgagcggagccgccggagaccagaccgccgacccagcggacgccaagaagaaaggcccagaa

SEQ ID NO: 229117 - RNA, 71 nt, Homo sapiens
agcacggagaacccaagaaaaggcgaagggagaaagcagaggagaaacacgaagggcaagaaaacgcagcg

SEQ ID NO: 229118 - RNA, 73 nt, Homo sapiens
caacgccccacgccggcgcggagccgaagggaaccccgaggaagcagcgcgcggccagagaaacggcagacga

SEQ ID NO: 229119 - RNA, 68 nt, Homo sapiens
caccgcccccagcgacccgagaagaagcagagcggccaagggcggagcacgagaaagcggcaccggca

SEQ ID NO: 229120 - RNA, 73 nt, Homo sapiens
gggggggcagggccccacggccagacaggaaacgccgccccgccagggaccgacccagccccccagcagacgc

SEQ ID NO: 229121 - RNA, 51 nt, Homo sapiens
cacgacagcccaaccgccacagggaggagggacaacgcaccgaaggaccaa

SEQ ID NO: 229122 - RNA, 58 nt, Homo sapiens
gggggccgcggccggaccgagcgcccgacccggcgaggaagaagagagggcgaaggag

SEQ ID NO: 229123 - RNA, 75 nt, Homo sapiens
ggggcaaggcgggcggggcccgggcgggcaccgccgggaaccaccggcacgccaagacagaccacaggccgcggg

SEQ ID NO: 229124 - RNA, 79 nt, Homo sapiens
cgagagcaagccaaagaccaaggggggggcacccccacaacggacccagagagggaccagggccaaagaagagccgggg

SEQ ID NO: 229125 - RNA, 80 nt, Homo sapiens
ccccccgcccgcgagcggcgggcgggcgggagcgcccaagggggcggagagcggggggggcggagccggagcgaggcggg

SEQ ID NO: 229126 - RNA, 80 nt, Homo sapiens
agacagagaggagccaaacccccagcagcaagcagcaagcggaaaaccacggagcgccccgcacggagcagaagaaaaga

SEQ ID NO: 229127 - RNA, 59 nt, Homo sapiens
ccagacggaaccagaacagagggagagaagcccccagccaggagagcagcggaacaagg

SEQ ID NO: 229128 - RNA, 40 nt, Homo sapiens
cgaaggcgggacgaggacgagggccgccaacaccacaacc

SEQ ID NO: 229129 - RNA, 54 nt, Homo sapiens
gagagaaccgacaggaaccagacacgcaaacagaaaacaaagccacggaaaaac

SEQ ID NO: 229130 - RNA, 74 nt, Homo sapiens
cgcagaaccagggcggcggccagcgccacgcggagggagcaacgcgagccaagcagcaggccccaaaaaggaga

SEQ ID NO: 229131 - RNA, 71 nt, Homo sapiens
aaagaaagagggaacgagcagaccacacgaggcaagcaagaaaagccacgcggaagcccgcgggccccgca

SEQ ID NO: 229132 - RNA, 71 nt, Homo sapiens
aggcgggcaaggaacaggcgagaaacagccggacacaagagggcaagaaaggcgcgacgggccgaaaaggg

SEQ ID NO: 229133 - RNA, 71 nt, Homo sapiens
cgaacccggaaagcaccagccgaagaaagccaggcacaacaaccaacaagacaccaagaaaaacaaaaaaa

SEQ ID NO: 229134 - RNA, 78 nt, Homo sapiens
ccccagccagggaacgcgccccaaacacacaccccccacaccaaagccacccgccaccgcggccccgcagcggggagg

SEQ ID NO: 229135 - RNA, 85 nt, Homo sapiens
cagccgggcccggaaggggaaggaacgggagcagaccgaagaagaagcaggagacacaccagccaaaggaaagaaagcgcaaaag

SEQ ID NO: 229136 - RNA, 75 nt, Homo sapiens
agggccggcaacggccacagcaccgggagagggacaccagggggaaaacaggaaacgaagcccgagcgacaacag

SEQ ID NO: 229137 - RNA, 70 nt, Homo sapiens
ggcgggaccgggcgcagacggcgagaccccgcacaggggacgaagggaacccgccgggcggcccggcacc

SEQ ID NO: 229138 - RNA, 78 nt, Homo sapiens
aaagggaagaagggagacaaaggaaaacaaaggcgagccaggcagcgagcgggagcagacagggaaccgaaggcagca

SEQ ID NO: 229139 - RNA, 67 nt, Homo sapiens
cacacacgccagcagaccaccccgggagggagaagggagagaccagcagccgcgaaaccacccgaaa

SEQ ID NO: 229140 - RNA, 74 nt, Homo sapiens
cagcggaagaagacccagggaaacccccaggagaccggacgcgggacacaagaaaaaacccggaacaaggaacc

SEQ ID NO: 229141 - RNA, 74 nt, Homo sapiens
gcagacggcacacgcagcagaagcccggagccgacccccccaaggacagccgcagccccacgacccaggagagg

SEQ ID NO: 229142 - RNA, 76 nt, Homo sapiens
agagaacaagacgaagaacagaaggcgacaaggccaagaccgccagcaaaggaagacgagggaggcggaagagcgc

SEQ ID NO: 229143 - RNA, 80 nt, Homo sapiens
gaaagccagggcccgcccgcagggaagcgagaaacggggaggcgaccaaaagaaaaacgggaccgcaacgacaagcaccc

SEQ ID NO: 229144 - RNA, 62 nt, Homo sapiens
gagaaagcccacagccaaagccgggcggacgcgaccccgaaggaggaccggcccaaggggag

SEQ ID NO: 229145 - RNA, 74 nt, Homo sapiens
cgaaccagaccaaaaacgcaacaacagacggaagaagccacaaagccggagaacaggaagggccgggacaaggc

SEQ ID NO: 229146 - RNA, 72 nt, Homo sapiens
cgccagagaagcaaaacccagagaagagagaagaacaccgaaaccagaagggcgcccgaagagcggaaagag

SEQ ID NO: 229147 - RNA, 85 nt, Homo sapiens
ccaaacgaagcgggaggggcgaaacgaggaggagaaacgcggccgggccgccgagagcagcagaggccgcgacaagacaaccggc

SEQ ID NO: 229148 - RNA, 84 nt, Homo sapiens
gcggcggccaggcccgcgaacacacgccgccaccgggaggcccagggaagggaagcagccgagaggcgagaaagaagaaagaaa

SEQ ID NO: 229149 - RNA, 73 nt, Homo sapiens
ggcagcgccagcaacccagccgccggccgcgggccccgaacagccagcaaagacaagagcagaccagcagccg

SEQ ID NO: 229150 - RNA, 66 nt, Homo sapiens
agacgcagcgggagaaggggcagccagggagcaacgggccgagccccaggcggagacaaggcggac

SEQ ID NO: 229151 - RNA, 51 nt, Homo sapiens
cagaccccagccagcggaggacacgaaagacccagccgccaagggcacagg

SEQ ID NO: 229152 - RNA, 70 nt, Homo sapiens
ggacagacgccgacgcccagggcgggaaaccaacccgcaaggcagaaccagcaagggaagggcgaaacag

SEQ ID NO: 229153 - RNA, 78 nt, Homo sapiens
agagggaagaaaagcggagaaggagccaaacccaaagaggaagcacaggagggcacagaaggaaggaaaccaccaccg

SEQ ID NO: 229154 - RNA, 76 nt, Homo sapiens
cgccggcacgcgacccccccgggcccaaagcgaacaagaggcgccagcgggcgcgccggaagaacagcgccacgcc

SEQ ID NO: 229155 - RNA, 71 nt, Homo sapiens
gcgagaaaagggacggaaaaaggcgccagacagcagcggcaacccccaggaccgggcagacggcggggcaa

SEQ ID NO: 229156 - RNA, 66 nt, Homo sapiens
cggagccggagcaggaggccccagggccaggcccggccggagcccggagggcagcacggagccaga

SEQ ID NO: 229157 - RNA, 77 nt, Homo sapiens
ggcacgaccagacgcccacccacaaagccaggcgggagggacaagaagaaaggggaccgagagccgggaaggccgac

SEQ ID NO: 229158 - RNA, 69 nt, Homo sapiens
caccccgaaacaccaaacaaagcaccacggaacagaaaggaaaaaagcagggccaccgcccaggcggag

SEQ ID NO: 229159 - RNA, 64 nt, Homo sapiens
ccggaggcagagcggcgccagcggggaggggagaggcacacgaaaggacccacacacagacacc

SEQ ID NO: 229160 - RNA, 69 nt, Homo sapiens
ccagggcggccaccgagaggaacagagacgcaggcaagagcgcggaggagagagccaaaagaagggggc

SEQ ID NO: 229161 - RNA, 67 nt, Homo sapiens
cagggaggacccacccccgggggaaaagaacgagacagcgaacccacccaacacggcaaaacaaaga

SEQ ID NO: 229162 - RNA, 77 nt, Homo sapiens
gacccgaacaaggccaacaccagcaggacagacgagccagcgcagcagccgacacgggagccgagccacaagccggg

SEQ ID NO: 229163 - RNA, 62 nt, Homo sapiens
cgaagagcgccgacaagaggacggggagccgaggaggagcaggagccgggacaccggggagg

SEQ ID NO: 229164 - RNA, 83 nt, Homo sapiens
aggggcgcgcaggaggaaggcgccgcgcgggacccggaggaccgaccccagcccacgggcacgcagaaccggaaagaagacca

SEQ ID NO: 229165 - RNA, 72 nt, Homo sapiens
gggagaaggggagaacgcggcacgcgcaaacccaaaagagaaggcagaaacaaaaaagggagagaaaaagcc

SEQ ID NO: 229166 - RNA, 83 nt, Homo sapiens
gagcagccaagaaaccggaggaaagaaacaacagggaaagcccacagcgaagccaagcaaaaggagaagcggcaggcagcccc

SEQ ID NO: 229167 - RNA, 78 nt, Homo sapiens
cagaaaacacggaacaaagagggaaggcaaggaacaaacagggagccacaaacccagacaagcaaacccccaaaaccc

SEQ ID NO: 229168 - RNA, 84 nt, Homo sapiens
ccgcggcgacggcggcggggcggcggacgaccggagagccgagaaggagggggcagagcacggcaggcagaaggggccaacccg

SEQ ID NO: 229169 - RNA, 75 nt, Homo sapiens
gggcggcggagcggcggaagaagaggccccacagacaaaaccgccggcggaagagagcgcaccacgcacgaaggg

SEQ ID NO: 229170 - RNA, 77 nt, Homo sapiens
gcacaagaccaggagaggacacaggaacgccacaagaaacaacagcaaggcgagggccacgaaacagaggagaagaa

SEQ ID NO: 229171 - RNA, 77 nt, Homo sapiens
gaggaaaagaaacagcaacagacaaagccacaaaggagcgaccgaccaaggagggcgcacgggaggagaacagcggg

SEQ ID NO: 229172 - RNA, 76 nt, Homo sapiens
gacgcagggcgcccccggagcgaaaacgccacaacagagggggccagggcggggaagacaaacagaacaacgggca

SEQ ID NO: 229173 - RNA, 78 nt, Homo sapiens
gagccacggaagccgacagacaaccaggaaacaaacagaagcgcacgagaacccaggccgcaaggaacgaaacccaac

SEQ ID NO: 229174 - RNA, 101 nt, Homo sapiens
caccgcccccgacacggggcgacacagcggccgagagacgacaggagcgcgggcaagcagccaagacggcagaaagggaagaaaaggagaagcgaaagagg

SEQ ID NO: 229175 - RNA, 76 nt, Homo sapiens
ccagccggcaccgccaccccacaggcccccaccaggccgcggcagagagggaaagggcgggggcaagacccagaga

SEQ ID NO: 229176 - RNA, 80 nt, Homo sapiens
gggcaggcaggcgcgagaaggacgcgcagccaccccagggaacagagcagaggcagcagaaacggagaggaaaagaagag

SEQ ID NO: 229177 - RNA, 79 nt, Homo sapiens
ggaaagaagagacagcgaggagacaacccccagagccacacaaccacaaccccaaaagagccacgcgcggaacacaacc

SEQ ID NO: 229178 - RNA, 71 nt, Homo sapiens
cacaagcagggacagagaaccggcaaacgacagagcccaaaagggccagaacgaggacaggagcgagaccg

SEQ ID NO: 229179 - RNA, 56 nt, Homo sapiens
cagcagggaagcagaaggagcaacagcaggaagaacgacagcagacaaccggcgag

SEQ ID NO: 229180 - RNA, 69 nt, Homo sapiens
aaacaggcacccacccacacaaaaacccagccgccgagcgaaaaggagagcaccagaaccggcgcaaca

SEQ ID NO: 229181 - RNA, 74 nt, Homo sapiens
aggagcagcggagcaaggaaaccggagaggcggagccacaagcacgcggaagagccaggacagcaaggacaaac

SEQ ID NO: 229182 - RNA, 62 nt, Homo sapiens
aaaaaggacacagacagacggcaaccagccaggacccggaggcccagagggagacggaccca

SEQ ID NO: 229183 - RNA, 72 nt, Homo sapiens
aacacccgagaacggcgggaagagaagacacgagcacaaacgcggccgcgcggggcgcaggcgccccgcgga

SEQ ID NO: 229184 - RNA, 70 nt, Homo sapiens
gcagaaaacccaccgagacggccacagacaacggagagaaagggacaaagcaaggaccaaccccaaaggg

SEQ ID NO: 229185 - RNA, 74 nt, Homo sapiens
ggaacaacagaaagcccaaaaaaaagaacggcacagggaagacaccaaccaggccaagcagaagaaccagcaca

SEQ ID NO: 229186 - RNA, 83 nt, Homo sapiens
cgagaggcggcgccgccccaagagcgcagacggccagccgaaaccacggacaacggcaagagagcaccgcccccccgggaaac

SEQ ID NO: 229187 - RNA, 76 nt, Homo sapiens
aggcgcgaccagaagaggaggcccccgaggacgcgcaggcaccaacagggaaaagagcaaggaccagcccacagca

SEQ ID NO: 229188 - RNA, 47 nt, Homo sapiens
aagggaaagaccccagaaaaccacacccgaagaaggagcacaacagg

SEQ ID NO: 229189 - RNA, 68 nt, Homo sapiens
aaaccacagcagaagaccgggggaaacgaccaccggagccaagacagagggagccgacaccacccccc

SEQ ID NO: 229190 - RNA, 51 nt, Homo sapiens
aaggccggagcgcccaagcccaccggccacggggagagagccacacagcca

SEQ ID NO: 229191 - RNA, 54 nt, Homo sapiens
gcaccaggccaaagaaagagaaggacaagcgggggggcggcccaccggcccgcc

SEQ ID NO: 229192 - RNA, 62 nt, Homo sapiens
agacaaggcggagaacgagacacccggagcgcggacaggaaaagagaggaacaagcaacgca

SEQ ID NO: 229193 - RNA, 85 nt, Homo sapiens
acgaacccgggcagccgcccggccaggcccagccacgcccaggccaggccaggcccgccgccgccacagccagccacgggaaagc

SEQ ID NO: 229194 - RNA, 72 nt, Homo sapiens
aggcaggcggagccgaccgggccaggcaaaaacagcaaaagaaaagaaaaaacaagaaggagcgacaaaaag

SEQ ID NO: 229195 - RNA, 77 nt, Homo sapiens
ccaccccacacgggagaggacaggagaccggaacagggcagcgaaaaacaaggccagcagggaggccccaagaaccc

SEQ ID NO: 229196 - RNA, 76 nt, Homo sapiens
acaagccaacccaggaggaaaaacggaggggccacggggccggggagccaccaggagacagcccagacaagcaggg

SEQ ID NO: 229197 - RNA, 69 nt, Homo sapiens
cccgaaagaaagccgcgaacccaaggcagacacaacaccacaagcaggggcaaggaggagccccggagg

SEQ ID NO: 229198 - RNA, 77 nt, Homo sapiens
gaggggagcaccaggaccgggccggaacgagacgcacgagccagaaggccgggggaaagcaacacgagaccccggag

SEQ ID NO: 229199 - RNA, 75 nt, Homo sapiens
ccacagagcacacccaaaggccaacacaagacaagccagcagccgccagacaagaggcacaagcagaggaaccag

SEQ ID NO: 229200 - RNA, 79 nt, Homo sapiens
cggcgggggcggcggggcaagcggcgccaccaccagcaccaggccgaagcagagaacacaaacacccgaaagaacagga

SEQ ID NO: 229201 - RNA, 70 nt, Homo sapiens
accgaggaaaaggagagagcgggaaaacccagaaacagaaagaaaagaaaagaaggccaaccagacgaga

SEQ ID NO: 229202 - RNA, 75 nt, Homo sapiens
ggggaaggggccgacaaaagcgcagcaagacggccgcgcggcccgcaggagacgaggacgcgcacaggaaaggac

SEQ ID NO: 229203 - RNA, 74 nt, Homo sapiens
gagggcggaccccagaccaggcgggggcccgaccgaccccgagaccaggcacggaccaggaagccccccccccc

SEQ ID NO: 229204 - RNA, 97 nt, Homo sapiens
acgcgcccggcccggagcccccagcgcagcggccgcgggaccccgaaaaagaccaggaagggaaaacccagagaaacggagaaagaagagccagggc

SEQ ID NO: 229205 - RNA, 112 nt, Homo sapiens
cccagagcaaggcaaagagcccggaggggagagaggggcggaggccggccagagggcaagcgggccacagagcgccccaggccccaagcaaagcagggcacgccggacggaa

SEQ ID NO: 229206 - RNA, 66 nt, Homo sapiens
acagaacaagacacgagaggccgcgcagagacaagagaacagaaccagaaacaccccacaaagaca

SEQ ID NO: 229207 - RNA, 75 nt, Homo sapiens
gaccgaggcagggaagagagcggacgggcacagggaaaggaagaggaaaaccaccggcagcaaccaggaagaagg

SEQ ID NO: 229208 - RNA, 68 nt, Homo sapiens
cgaggaggaaaggaggacgagggcaccagagcaaagagaaagggcagacggagagaaaagaaaaagag

SEQ ID NO: 229209 - RNA, 59 nt, Homo sapiens
cacagcgccccaagaccaccgggcgggcgcacaggagcgagagacccaccccacccgcg

SEQ ID NO: 229210 - RNA, 73 nt, Homo sapiens
cccagagaaaccgcccggaggaacgaaagacaggcccagaggaaaaaggagggaacaccacccacccaagccc

SEQ ID NO: 229211 - RNA, 78 nt, Homo sapiens
caaccaagaggaaagggggccagcaacccagacgcccacaggacaaggcgggccaacacgcgggggacagacagcaga

SEQ ID NO: 229212 - RNA, 81 nt, Homo sapiens
ccccccccccccccagcggggccccaagaagccgagacacgcgggcgccggccgagcccgggaaaacgacagcagcagcag

SEQ ID NO: 229213 - RNA, 71 nt, Homo sapiens
cggcccgaaagaacgagagaagcagcgggcggagaacggaaaagcaccaggaagcagagaggaccgcagaa

SEQ ID NO: 229214 - RNA, 85 nt, Homo sapiens
accacccacacccaccaacaacaccacaaaaccacagccaagaaacgaaggaggcccaaccacaaaaggagccgacggaacccag

SEQ ID NO: 229215 - RNA, 68 nt, Homo sapiens
cccgcgccgggagaaggcgccccgcgccagagcaggcccgaccacgaagaagaggacaggggacgcgc

SEQ ID NO: 229216 - RNA, 79 nt, Homo sapiens
ggcgacgaaggccgggcggcgaagggcgacggcccaggcagggcacacaacgagcagaaggcgaggaacccacagacgc

SEQ ID NO: 229217 - RNA, 58 nt, Homo sapiens
accgggagcggcgaagaggcaccggaggagggggccgcagccggccaggggacccgaa

SEQ ID NO: 229218 - RNA, 75 nt, Homo sapiens
aggaccagaacaaaccagacagaggcagacaaggccacccccaggagaccccgagaaggccccaagcagacagac

SEQ ID NO: 229219 - RNA, 71 nt, Homo sapiens
cgggcgggcgccccgcgcggagggaagggggcccgaccgaggaccagggcgaggagggcggaaccacccag

SEQ ID NO: 229220 - RNA, 74 nt, Homo sapiens
cagcaggaccaaggaagaagagaccacagaacggaagaggaacgcacgaccagcagggccaccgccccagagcc

SEQ ID NO: 229221 - RNA, 61 nt, Homo sapiens
gccgggcgcccccggacagaccaacgacggaagcccccaaagcagaaacacaagaggacag

SEQ ID NO: 229222 - RNA, 78 nt, Homo sapiens
gagaggcagaaaaggagcacagagagcagagcaaaaacaacagggacgaaaaaagacagagcccaaaaggcagagcga

SEQ ID NO: 229223 - RNA, 77 nt, Homo sapiens
acggcagccacccgcgggaagggacaaccaggaccccccgaaccagaggcgaagagcagaggcgcggcagaggaaga

SEQ ID NO: 229224 - RNA, 81 nt, Homo sapiens
acgggcgggagagacaacagcagcaagaccggaacaggggcgggcggaagcacccagccggagaaaacccaaccaaagagg

SEQ ID NO: 229225 - RNA, 74 nt, Homo sapiens
cgagggcagcgcccacggccgcgaccggccggccccgagacagcagcaagaggggacgacacggccccagcacg

SEQ ID NO: 229226 - RNA, 78 nt, Homo sapiens
gcgcgagcacacaggagaagcaagaggcgcaaagaaggggaagacagccccgcgaggaaggaggaggccggagcagcc

SEQ ID NO: 229227 - RNA, 85 nt, Homo sapiens
ccagacgccaggagcccaggcaggaacgaagagcgcagaagaaagacagcaacggagccaaaaaaagaccagcccaaaaaagcgc

SEQ ID NO: 229228 - RNA, 69 nt, Homo sapiens
ggagggaaaggcaaagcccagcgaaccgccagggagccagaagcaggggcgagccgcgccgccggcgaa

SEQ ID NO: 229229 - RNA, 50 nt, Homo sapiens
agagaacccgaggaaaccacacagcaaggaaagcaaacaaacggaacaaa

SEQ ID NO: 229230 - RNA, 65 nt, Homo sapiens
cggcagagccccacaggggaaacccgcccagggcgggagaccgccaagaaacaccacaaggagac

SEQ ID NO: 229231 - RNA, 85 nt, Homo sapiens
gcgggcccgggagacccaggcgggacagagggagccaggcagagaacgaagcgcgcggcaggcgcgcgccgccccaggccgcaag

SEQ ID NO: 229232 - RNA, 55 nt, Homo sapiens
gaagagcaccgggagcggcgaagaggcaccggaggagcccgccccccaaagcgaa

SEQ ID NO: 229233 - RNA, 71 nt, Homo sapiens
aaccacgaagaagaaaccggcggccaaaaaaaaaaaaggaagcacaccaaggacaaccccccaagcggaag

SEQ ID NO: 229234 - RNA, 83 nt, Homo sapiens
gggaagacgcgaagccacccagcgcgagacaaaggccacacaaaacaccaaagaccaagacacagaagagagagggagccagg

SEQ ID NO: 229235 - RNA, 81 nt, Homo sapiens
gacgagcgcaagaggccgagcagacaaggagcagggccagagccggcccgccagccggcaacgcgggcacggacgggccgg

SEQ ID NO: 229236 - RNA, 46 nt, Homo sapiens
ggacaccaacacggacacggggcgccaccggccacgggccaagccc

SEQ ID NO: 229237 - RNA, 79 nt, Homo sapiens
gaaagccccggaacggagcagcggaccagcaccagagagaagaagcgcgcagcaaaacaaaggaaaagcaggacgccac

SEQ ID NO: 229238 - RNA, 74 nt, Homo sapiens
cgcgcgcgccaaaggacaggcgggcggccccaagcccaagagcaggcgaacgaaggagggcgagggagcaagga

SEQ ID NO: 229239 - RNA, 72 nt, Homo sapiens
gagacgcgggcaggccgaaggggacacggagaaggcagcggcagcccgggacacgcccccagagccaacccc

SEQ ID NO: 229240 - RNA, 74 nt, Homo sapiens
acaaaacgaaccaggacggcaagcaccggcccagagagcagggacacacgagggccggaaccaaacgaaaggcc

SEQ ID NO: 229241 - RNA, 82 nt, Homo sapiens
gcaaggaagaaaaccgaccagaagagaaagagagaagccaaaccccagaaaacccaacggggaaggacaccacacagaaacc

SEQ ID NO: 229242 - RNA, 58 nt, Homo sapiens
ccagcacaggaagaccggagggacacacccgcggagcccccaccgccacgccggaacc

SEQ ID NO: 229243 - RNA, 68 nt, Homo sapiens
gaacccaccacacagaaaccaggacacagcaaagagcaaaaacaaaagaagcagaagacgaaaagaag

SEQ ID NO: 229244 - RNA, 58 nt, Homo sapiens
cacaagaagggaagcgggcggcagccagccaggggccacaagcagcccacagcgccgg

SEQ ID NO: 229245 - RNA, 66 nt, Homo sapiens
cgcaccacaccagggccgcacccaggcggaggcagggggaccagcacgcagccgacccaagccaag

SEQ ID NO: 229246 - RNA, 66 nt, Homo sapiens
agaccccggcacccaagagcagccagggcaggggaggcccaaagcccagccaaggacccgaaaaac

SEQ ID NO: 229247 - RNA, 80 nt, Homo sapiens
aaaaaaaaggacacaaggcgaagaaacagcggagaaggagaagggagaagaaacagcagccgcaggcagcaaacggagag

SEQ ID NO: 229248 - RNA, 55 nt, Homo sapiens
aaaaaacagcacaccaggaagcaagggcaccaaacaacaagcagcacagggcaca

SEQ ID NO: 229249 - RNA, 33 nt, Homo sapiens
acccaccccaaagaccagggccggggcagagca

SEQ ID NO: 229250 - RNA, 74 nt, Homo sapiens
gcgaaaagccccaagaaagcccaggacgggccaagagagcccgggcccggaaaggcacggaaagcaggggaaga

SEQ ID NO: 229251 - RNA, 62 nt, Homo sapiens
gggaggaacgggggagcccacaggagccagaaagcgagaccccacggcgggcggacacgcgg

SEQ ID NO: 229252 - RNA, 72 nt, Homo sapiens
gcccaccggaaaaaacaaagcccaaagaaaaaaagcagggcaccaggagccacggaaagacaaaagaagaac

SEQ ID NO: 229253 - RNA, 86 nt, Homo sapiens
cagacagcaaacaaagaagaaggaacaaacgaggcccaaaggaccaagacaagaaaggcgcagcggccgagggaaacagcaggcgc

SEQ ID NO: 229254 - RNA, 79 nt, Homo sapiens
aaaagacccccgccgccggcccagaggaagccggaaaggccccacggggcaccggagcaggagcgcgcggcgacagcgg

SEQ ID NO: 229255 - RNA, 67 nt, Homo sapiens
ccggaaaaggcccacgccgggcgagggcagaacaaagaagcggggacacagaacacaacaggaagaa

SEQ ID NO: 229256 - RNA, 81 nt, Homo sapiens
cagggaccggcagaggccccccccaggaggggaggcacggggggccccagcccggccgaacgggcgcacgacacaaacaca

SEQ ID NO: 229257 - RNA, 84 nt, Homo sapiens
cgccgcgcgccgcgaccccaagcaggcccgcggcaggcggggccaggcccgagccagaaggaggcccacagagccccccacaca

SEQ ID NO: 229258 - RNA, 62 nt, Homo sapiens
gggaaacaccacgaagcagccaagccagacagcaaagccgacaggcagccggggaggagccg

SEQ ID NO: 229259 - RNA, 77 nt, Homo sapiens
ccgggcgagcaggggcgccggcccgaggccgcgcgcggcgcccgcgggcccgggaacacagagcaccaagacagccg

SEQ ID NO: 229260 - RNA, 66 nt, Homo sapiens
ggaaagccaaaacacgacaggaacaggaggcccggacccccagcacaagcgcaggccagggggaga

SEQ ID NO: 229261 - RNA, 73 nt, Homo sapiens
agagaccacagagaggagggagaacacaagaaccaaacagaaaggacgagaccgaagagaaggaaggacagcg

SEQ ID NO: 229262 - RNA, 76 nt, Homo sapiens
ccccgccagcaagagaagaggggcggagaagggacaaccgaagggccccccggcccacccgggagaaggcggcccc

SEQ ID NO: 229263 - RNA, 90 nt, Homo sapiens
gcacgggcacggcacccggacagagccaagggacagcagaaagcacgggaacggggcgccaaaacagcgggagcccgggagagcaagaca

SEQ ID NO: 229264 - RNA, 74 nt, Homo sapiens
ccagcggcagggacgaccccgcgcggccggagacaagaagagcccggacccccggcgggcgaacaaagacccag

SEQ ID NO: 229265 - RNA, 60 nt, Homo sapiens
cacaaggccaagggcaaggagacagggccacccccccaaagcggagcaaccggcggacaa

SEQ ID NO: 229266 - RNA, 70 nt, Homo sapiens
agaagagagaggaagaccgagaaacggccagacagaagccagacagccaagcccccggcccccacccagc

SEQ ID NO: 229267 - RNA, 75 nt, Homo sapiens
cggagcaggggccagcgagaggcggacgaggccagcgggcggagagggagccccggaagcgggggacacccacgg

SEQ ID NO: 229268 - RNA, 64 nt, Homo sapiens
gagcagggggggggggaagccgcagcggaaagcaggagcacagagccgagagcgccggaggacc

SEQ ID NO: 229269 - RNA, 74 nt, Homo sapiens
ggacggcccccaaacacgaagagacgacagaccagaccaagcaacaggggggaccacgaagaaggcggcagaaa

SEQ ID NO: 229270 - RNA, 105 nt, Homo sapiens
caggggcccagcgcccagcagcaaccagcagcagagaccagcggcggaagggaaaccacagagaggcgcgcaggggggccagcgcaccaagcagaggaaggagcc

SEQ ID NO: 229271 - RNA, 73 nt, Homo sapiens
cggccgcgaggcgaacagacccaggggaggagggcaccccggaaaagggggaaacaggaagagaacagaacgg

SEQ ID NO: 229272 - RNA, 61 nt, Homo sapiens
aaacaaaagaacagcgaacccagacaggggaggagagcaagagaaagcagaaggaaccaag

SEQ ID NO: 229273 - RNA, 79 nt, Homo sapiens
gaagcgccgccaggcccgcaggaccgccggagacagggcaagcaaaagcagaccggaaaacccaccggcaagaccacac

SEQ ID NO: 229274 - RNA, 66 nt, Homo sapiens
cggagcccacgagaggcagcgccaggcggagcagaccaccgggcaaggccaccccaagccccccac

SEQ ID NO: 229275 - RNA, 88 nt, Homo sapiens
acggcgcgcgcccagacccgcacaggccggcgaccacgcaaacaaccagagggcaagaaggaacagacaaaaacggccggaaggaaac

SEQ ID NO: 229276 - RNA, 76 nt, Homo sapiens
agcgacagacaaagaagaccgcacacaagccaacaacaaggaacacagaaacgccccgggccagccgccaaggccg

SEQ ID NO: 229277 - RNA, 85 nt, Homo sapiens
ccacccagacaagagcaccacgggcaggaaggcagcgcacgacagcaaaagaaagcaccgggaggaaagagagccacacgaagaa

SEQ ID NO: 229278 - RNA, 56 nt, Homo sapiens
cgggcaagccgggagaccagggggcaaggcggcccggcacgcacacgggcagaaga

SEQ ID NO: 229279 - RNA, 108 nt, Homo sapiens
gcggagccgaggcgggaaacacgggaagccgaaaagacagcagacgaagccaaggccagcaaggggccgcaaggccaggcgcgcagaggcacccaacggcacagaccc

SEQ ID NO: 229280 - RNA, 74 nt, Homo sapiens
gaaagaagccaagaaagaagcgagagagagcaccggacggggaaacagaacgagcacagagaacaagacccgga

SEQ ID NO: 229281 - RNA, 54 nt, Homo sapiens
cagaaggggaggggagggaaaggcccaggaaaaagaagcggcccagagggacag

SEQ ID NO: 229282 - RNA, 71 nt, Homo sapiens
gccgccgaccccccggcgccgcgccggcggcggcgggcaacacaacaaggcgcggacacccagacaagcgc

SEQ ID NO: 229283 - RNA, 73 nt, Homo sapiens
gaagcgacgagccgcgaggagccccagaccagcggcgccggagcaccggagcagaagaccgagcccccgaacc

SEQ ID NO: 229284 - RNA, 69 nt, Homo sapiens
acacggggggaacgacgaacagggcaaaccgcaggcacaacacaagggaacgccaggagcgccgggaga

SEQ ID NO: 229285 - RNA, 75 nt, Homo sapiens
accaacagccccaacccagaaagcagaggccagagcggagacagacggggccaggaagaagaggacacagaaggc

SEQ ID NO: 229286 - RNA, 74 nt, Homo sapiens
cccaccaacaggaacagggcagacgagcggaggacacccaacccgggccagcaacagaagaaagcaagcaccgg

SEQ ID NO: 229287 - RNA, 72 nt, Homo sapiens
ccagacacagcggcgaagcgcggggaggaccaccgggcaccaaccgccggggccaaggcgcccaagagcaaa

SEQ ID NO: 229288 - RNA, 77 nt, Homo sapiens
cgcccgggcccgaggaggcagccaagccgggccgcccgcggcaggacagcagcggacggccggaccaagaggcgccg

SEQ ID NO: 229289 - RNA, 78 nt, Homo sapiens
aggagcagggaggccacaggggccgaaacacagagcaagagacgaagcgaaagaaaagccagggccagcggaagaaga

SEQ ID NO: 229290 - RNA, 55 nt, Homo sapiens
aaaacagaacagcgcccgcgaaaggacgggaacagcaggagagcagggagcggcc

SEQ ID NO: 229291 - RNA, 76 nt, Homo sapiens
ggcagcccgacggggccaccgcggcggcgcccgcaccgcgcccgcaaagaacgcaagcacaggaccagaaacgaaa

SEQ ID NO: 229292 - RNA, 85 nt, Homo sapiens
gcaaaggagagcacaaccacgcagggaagcccaggggcagcacaagcccagagagagacgggagagggacgcccgaagagcgacc

SEQ ID NO: 229293 - RNA, 80 nt, Homo sapiens
cgggaaccgccgcaaccccccagcaccccgaagggccacagaggagaagaagcagaagaagacaaagcagcaaaaacaaa

SEQ ID NO: 229294 - RNA, 70 nt, Homo sapiens
aaaagccgccggcaacaaacaagaggccgcccacacgagcaaccgacggagcacacagaagccgcgcaga

SEQ ID NO: 229295 - RNA, 80 nt, Homo sapiens
gcgccacccggggccgccgcgcaggagcccccggagcgggggcacccgaggaggaagagggcagggcccacggaaagaag

SEQ ID NO: 229296 - RNA, 73 nt, Homo sapiens
ggaggagagaagaggcggaagcggagcagggacgggggccggaggccaggagagaggcaggaaggcccagaag

SEQ ID NO: 229297 - RNA, 72 nt, Homo sapiens
gcagagaaaagagaggaaacacgaagaaggaccccaagaagcaggcagacacaggcccaccaggacgagaga

SEQ ID NO: 229298 - RNA, 79 nt, Homo sapiens
aagagaggcaccgcggaacacaagaggcgcagccaaacggagcagggagacgagcccagggccaaggggcgaaaagagc

SEQ ID NO: 229299 - RNA, 76 nt, Homo sapiens
gggccaaaacaggacagaaagaaggaaaaagcagaaagccagaggaagaaacccgaagagagcccacgggacaaaa

SEQ ID NO: 229300 - RNA, 60 nt, Homo sapiens
acaagggcacggacgagaggcacagaacagcaggaaaccaaccgaacaaaggacacaagg

SEQ ID NO: 229301 - RNA, 56 nt, Homo sapiens
acaaacggccaagaagggccaccccacagacgaaagaacaagacccgaagagaagc

SEQ ID NO: 229302 - RNA, 63 nt, Homo sapiens
ggccccgggccccacgccaggacacgagaggagagggcgaccgcagaacaaggacagcagaaa

SEQ ID NO: 229303 - RNA, 76 nt, Homo sapiens
gccgaggagagcggaggagggggccgacaacaaccacccagcgcaaacgaccaaaagaacggaccgcagacgcagg

SEQ ID NO: 229304 - RNA, 74 nt, Homo sapiens
agcagcagcaggaccaggaaaccagacgccgccacagagaaggaagacaagagaacaagggccagcaaagaaac

SEQ ID NO: 229305 - RNA, 80 nt, Homo sapiens
accccggaagccagaggagcgaaccaagagagaggacagcagcccaggagagagggggcgcacacgcagaaagaacagcg

SEQ ID NO: 229306 - RNA, 74 nt, Homo sapiens
aggagccccccgcccagacaagggcggagaacggaaaagcaccaggaagcagagaggaccgcagaagggaagga

SEQ ID NO: 229307 - RNA, 80 nt, Homo sapiens
gcagaacccaaaagccagaggccgaacaacggagagcaacaggagaaaagaaagccagaaggaaggaagcaacgaaccaa

SEQ ID NO: 229308 - RNA, 73 nt, Homo sapiens
ggaccaagaaccagacaaagggagccaaaggaaaaaagaccccagacccgcagaaaaccacagcagcagagga

SEQ ID NO: 229309 - RNA, 81 nt, Homo sapiens
gcagaccccgaaaaccaagccgaggacgcggggccgggccacgcagagaaaaggaccaggaagcagcacgcgagaaagagc

SEQ ID NO: 229310 - RNA, 93 nt, Homo sapiens
ccgcggccggcccggccccccgcgcacggccagcgcagggaggaaaaaggaacaagagcaagaaaaaaacaaaacgcagaagcacggagacgc

SEQ ID NO: 229311 - RNA, 74 nt, Homo sapiens
aaaaacacaagaccgccacaaaaaaaaaaaaggcgaggcggagccaagcgaagcaggaggggaaggcgccgccc

SEQ ID NO: 229312 - RNA, 56 nt, Homo sapiens
gcggaacacacaacacacaggggcacgacacgaaggacgaaaagagcaggccggag

SEQ ID NO: 229313 - RNA, 81 nt, Homo sapiens
gaccaagggcaggcgagaggccggacggagggcgccaaggaggagagaaccccacccaagagacaaagaccaacgagccac

SEQ ID NO: 229314 - RNA, 71 nt, Homo sapiens
gaacgacccgcccggggcagcagccgcgagcaagggaagacacgcgggagagcagcaggagagccagggag

SEQ ID NO: 229315 - RNA, 62 nt, Homo sapiens
ccacgggggacagcagaggcgagcagaaggagcccagggggggccgaagaagccagggggag

SEQ ID NO: 229316 - RNA, 72 nt, Homo sapiens
cgaggggccccaagagcacagaccagcagccgccaaagacaaagggcaaagcgccaagcccccacgaaagca

SEQ ID NO: 229317 - RNA, 61 nt, Homo sapiens
cgggcacaagccagcgcacccaggagcacaggagagggaacgcagcggcccggagcggcga

SEQ ID NO: 229318 - RNA, 83 nt, Homo sapiens
cgcgccccccggcgggccggacgaaagcgccgagaggaggacaccgcgacagcgcagaacacacaggccacgccagggagaca

SEQ ID NO: 229319 - RNA, 76 nt, Homo sapiens
ggaaaggcaccaggacaagcaaagcgcccgaagagcggaaagagagaagaaaaccaggccggagaacacggacagc

SEQ ID NO: 229320 - RNA, 68 nt, Homo sapiens
ccgcaggcagacaaaagggccaaagaagggagagagaaccggaggagaaccacaaagaagaacgagag

SEQ ID NO: 229321 - RNA, 74 nt, Homo sapiens
gacaaaaccaccagaggcacaagcccggaccgacaggaaagaaggagcccacaaagaaaagaacaccgccagca

SEQ ID NO: 229322 - RNA, 58 nt, Homo sapiens
ggacaagagacgacacgcaagcaggcaaccgaaacagcacaagggcaaggaaagcagc

SEQ ID NO: 229323 - RNA, 74 nt, Homo sapiens
cccaggaggggcaaccagcaaggagggaggaagaggcgcggcaagggcgcggcaagaaaaccggggccgcccca

SEQ ID NO: 229324 - RNA, 59 nt, Homo sapiens
ccagcacgaaaaagccagcgggccaacgcaccaaacgccagggacacaggcaaaacgga

SEQ ID NO: 229325 - RNA, 73 nt, Homo sapiens
aacaaaccagccgggaggacaagcagcagggaagcagagcgaggagaccaggaggacccgagccccaaagaca

SEQ ID NO: 229326 - RNA, 73 nt, Homo sapiens
cgccccacagaggggcgacgggagaagaaaaagcagaaaggaacagaaaacaaaagaacaaggcacaacggac

SEQ ID NO: 229327 - RNA, 61 nt, Homo sapiens
gaggaaacacccaagaaaccacaccaaaacacagacgggaggggacgcagccagcagcaca

SEQ ID NO: 229328 - RNA, 77 nt, Homo sapiens
gcacaggcaagaaagggcagaaccggccaaaacaccagcagagccaaaggagacccccacccagaagaccagcggga

SEQ ID NO: 229329 - RNA, 55 nt, Homo sapiens
ccccgcagcagcagcccaaaggaaggcagagacgcccccaaagggacacgcccag

SEQ ID NO: 229330 - RNA, 75 nt, Homo sapiens
caagccgacccaccacgaacacagaggagagaacggacacggggcagaggacccaaagagagggagagcaaacag

SEQ ID NO: 229331 - RNA, 72 nt, Homo sapiens
gaacccaaacccacgaaaacaggcccagcaaccgccaagagacccggcagaaacgaggaagcgcaaaacaag

SEQ ID NO: 229332 - RNA, 72 nt, Homo sapiens
gggagagacgccgaacgacgccccgcacaccggagcgcccagcgcgaggaggaaggggaggagcacagaacg

SEQ ID NO: 229333 - RNA, 79 nt, Homo sapiens
gcgggccgggcccaaggccccgacgcccccaggcccgccagggcccgaggccggggaaaccagacgaaacaacagccaa

SEQ ID NO: 229334 - RNA, 68 nt, Homo sapiens
aggccaaggccaaaagccaaagcggaaccaacgccgcgccaacccgacgacccgccgagcaaaaaaag

SEQ ID NO: 229335 - RNA, 70 nt, Homo sapiens
cgaccggacgggacacaagacgaccggcgggggagcgggaggagccagagcacaccgcaccacggccaca

SEQ ID NO: 229336 - RNA, 79 nt, Homo sapiens
ccagcgagaaggagggagaaaggcgggcccgggaacagggggggccgaagaagccagggggaggaaagcagacagaccc

SEQ ID NO: 229337 - RNA, 66 nt, Homo sapiens
gacacgcaggaagggggaccggaggagcggaaaacacggaaaggggccggcagacggagcacaaac

SEQ ID NO: 229338 - RNA, 48 nt, Homo sapiens
cccggcgccgcgccggcggcggaccgcggcaagcgggagcggacccac

SEQ ID NO: 229339 - RNA, 73 nt, Homo sapiens
cgaccggccccggagcacacaccaagccagacacgggaaccacacaagacagaagaacggccagaagcccaaa

SEQ ID NO: 229340 - RNA, 76 nt, Homo sapiens
agccagccgcggccggaggagcccccaggccacacccggaagcaggcgaacgaaggcaaacgagcagacggcccag

SEQ ID NO: 229341 - RNA, 77 nt, Homo sapiens
gccaaggccaaaagaaaggcagacgaagggaaagcccagaacagccagagccccacccccacacagggaggagagag

SEQ ID NO: 229342 - RNA, 80 nt, Homo sapiens
aggcccagagacaaagccagcacccaaaggagcaacagacagcccccagaacagcaccagggaaaccggaaaaaagggag

SEQ ID NO: 229343 - RNA, 79 nt, Homo sapiens
cgagcacaccgcgcagggcgcgcgcgcgcccacgccgggcccaggcacgaacgaagcacacaggaagagcgcaccacgg

SEQ ID NO: 229344 - RNA, 72 nt, Homo sapiens
ggggaaaggccagcgcagaaacgcagccagcgagaacccagacccccaaagccaggaccgaaaaggagaaaa

SEQ ID NO: 229345 - RNA, 73 nt, Homo sapiens
ggcacccgcacagcaaagagaagggacagggaggaaaaccagagagaaggagagccccgaagaagcaggggga

SEQ ID NO: 229346 - RNA, 71 nt, Homo sapiens
gggggcgggcgcagcgcggacaggaagaccgcaggaaagcaggaaggcaagaaagccaaggacgaaaccca

SEQ ID NO: 229347 - RNA, 75 nt, Homo sapiens
gcgccaagaagaggacaagagggcagaagaagaacgcgaaaacgaggaacacgggagcagcgacaggaggacggg

SEQ ID NO: 229348 - RNA, 58 nt, Homo sapiens
ccgagagcgcgaaacgcacgagaagggagaccaaagaggaaggggaccaacacagagg

SEQ ID NO: 229349 - RNA, 113 nt, Homo sapiens
ccccagcccgaccgcccagcccagcagcagcaccgacccagcacaggagcccacagcacccagacggaaggagaccaagccaccgcagagaaaaagaaggcggcgggcaacca

SEQ ID NO: 229350 - RNA, 101 nt, Homo sapiens
gcggaggccccagggaagcgcagaaagcaggcgaacccgcggcgcaaaacggagcagaaggcaagaaagggagaagccagaaaagcagaaagagacagcgg

SEQ ID NO: 229351 - RNA, 81 nt, Homo sapiens
aaccagccacgcagaagagacaaggaccacagccgagcgagagcaggaagacggacaaggccgacgcgcacgaacacgggg

SEQ ID NO: 229352 - RNA, 58 nt, Homo sapiens
cgcggcaggagcgcggggaccccaagggcgcgcgggggcacagcccaggcgcagcagc

SEQ ID NO: 229353 - RNA, 73 nt, Homo sapiens
gagagcgaggccgagcccgcgcagacaacaaacaccccggcacagggcagccaaccacacaggacccagcgaa

SEQ ID NO: 229354 - RNA, 76 nt, Homo sapiens
ccacccccccccgccccccacagacccagggcaggggacacgcgcagaggcaagggagcgcgccccagaccaccgg

SEQ ID NO: 229355 - RNA, 77 nt, Homo sapiens
gaaaacgccacgaaaccaaaccagcaccgggcaccacaggcaagagacagaccccggcggcgacacagcgagagcag

SEQ ID NO: 229356 - RNA, 80 nt, Homo sapiens
cgaacgagccgccgaccgagaaacaccgggcgggccccgggcgagcgggggaggaggcaaaacagacagaacgcagaaag

SEQ ID NO: 229357 - RNA, 72 nt, Homo sapiens
ggcgaagaggaagaaggagaacagcaacagacggcggggccccccgggcagacccagccgcagggaaagccg

SEQ ID NO: 229358 - RNA, 64 nt, Homo sapiens
gagcacgcaggcggacccggggggaacgaaacagacggaggcagcagaggccgagccaggagac

SEQ ID NO: 229359 - RNA, 72 nt, Homo sapiens
gaccacaaggacgcgcgcacgagggcagccccacggcaccaccacggccggcccccccaggccaggccggac

SEQ ID NO: 229360 - RNA, 56 nt, Homo sapiens
ccgcagagaagaaacaccacgcaggagcagggcaacgagcacagacagaaagcaac

SEQ ID NO: 229361 - RNA, 40 nt, Homo sapiens
accgagacaagaccgcccagcgcaccggaaaaggagaaag

SEQ ID NO: 229362 - RNA, 76 nt, Homo sapiens
acgcggaacccgaggacagccgcacagagggcgcaagcagcaccgaaagccagaagcggccccagcaccgcagccc

SEQ ID NO: 229363 - RNA, 53 nt, Homo sapiens
gggaccaccacgcccagcacccggcgaggaaaagacaaaccggaaggacagag

SEQ ID NO: 229364 - RNA, 83 nt, Homo sapiens
gcccccagggaccagggaggccaccagccaaggacagagggcaagagagacccagccaaggcgggacaacccaaccgcagcaa

SEQ ID NO: 229365 - RNA, 62 nt, Homo sapiens
ggcggcggccaaggggagaaccgcagacaggaagggaaggggcggagacgggcggaacgcag

SEQ ID NO: 229366 - RNA, 86 nt, Homo sapiens
gcaaggaaaagagcccggaaagaagcaacagagaggggagaacccacagagcaaccaaaacaggacaagaaacaccaaacaagcaa

SEQ ID NO: 229367 - RNA, 83 nt, Homo sapiens
cgagacccagacgggggcagcccggaagcagcaccacaaggcccaaacaaaggagaccgacagagccaaaacaaaggaacagg

SEQ ID NO: 229368 - RNA, 66 nt, Homo sapiens
aggacggaaccagccagggacggaacgaagcaccgagagaagaaacccccaggagcgagacaaaca

SEQ ID NO: 229369 - RNA, 55 nt, Homo sapiens
gcgggagaggagagaaaggcggaagacgagacacgcagaccccaccaagaggcgg

SEQ ID NO: 229370 - RNA, 71 nt, Homo sapiens
cgcccacgcccgggcccccgggagccaaggaccaggggacgggcagaggcgaaggaagggaacacggacga

SEQ ID NO: 229371 - RNA, 83 nt, Homo sapiens
accgccaacggccgcagccccggcaccaggccgccgaccgaagcggagcagccggaggacggagaagcggggggcggacacgc

SEQ ID NO: 229372 - RNA, 57 nt, Homo sapiens
cacccagaggagcaacgagacggggccagggagaaaggaaggccaggagcaaacaga

SEQ ID NO: 229373 - RNA, 74 nt, Homo sapiens
cgggccgggagacgccagcggccggccggcagccggaaacgaaacagcgcagccaggaacaggacgaagaccag

SEQ ID NO: 229374 - RNA, 75 nt, Homo sapiens
cgaaaggccggaaagaggggaggggcacgcaacaaccgacgagcgcgggcagggagggcggggccggggggacag

SEQ ID NO: 229375 - RNA, 82 nt, Homo sapiens
gaaggagcaaccagacagagcagccccaggaaggacgggaaccgcgcagcacaggcccagacgccccaaaagggcaagaaca

SEQ ID NO: 229376 - RNA, 64 nt, Homo sapiens
acaccggaagcgggaaagggggcagaagcagcgaggggccccgccgcggcgccacacagaaagg

SEQ ID NO: 229377 - RNA, 87 nt, Homo sapiens
ccacgcccagccaggagcaccgccgaggacccagcacaccgaggaaaacagacgacgaggagacccggggaacggggagaggcggcg

SEQ ID NO: 229378 - RNA, 72 nt, Homo sapiens
ccaggccagacccgaaggccaggagacccgaccccaagggacaagagaaaaaaagggcgggcgaacaaaaag

SEQ ID NO: 229379 - RNA, 72 nt, Homo sapiens
gggagaaacaccacacacgaagagagggcacagaccaggagggaagaaagcacgggaaaaggccgggcccac

SEQ ID NO: 229380 - RNA, 77 nt, Homo sapiens
gccaccacgcaagaccacacaccagccggacggcggggccgggcccccggccgcaagcaggagcagggccgccccga

SEQ ID NO: 229381 - RNA, 89 nt, Homo sapiens
ccgcgcgaagacaggaccagggcacggagcccaccgggggacggcacggcaggcggacgcccggggccccccggaccacgaggagcacc

SEQ ID NO: 229382 - RNA, 77 nt, Homo sapiens
ccggagaccgggggcccccgggccgccccccggggccaccggaaaacccggacccaacccaacagggcgcggaggac

SEQ ID NO: 229383 - RNA, 85 nt, Homo sapiens
cgcagccaccccgcgggaacgcccagcgcgcgagagccgcggcagcccaagcgaacaccgaagggagagcaagccggcccggcgg

SEQ ID NO: 229384 - RNA, 70 nt, Homo sapiens
ggcaaaggaacacgcaaacacacaagaggggacaagaccagaaccaggacccaaagaagccagccaaagg

SEQ ID NO: 229385 - RNA, 70 nt, Homo sapiens
acgggccaagggagcgaaaagaacccccaaaaggccaagcccaaccaagccgggggcgaaagccaaagca

SEQ ID NO: 229386 - RNA, 69 nt, Homo sapiens
caagagcaagacaccggacaccgagggcccccaaaagacaacggcaagcggagaagagcaaggccgaac

SEQ ID NO: 229387 - RNA, 88 nt, Homo sapiens
cgaaacaccggaggagcggggagccgcagggccgaggcagccaggcgcccagccggaaggcaggcgaagccccacccacaaggacggc

SEQ ID NO: 229388 - RNA, 77 nt, Homo sapiens
gaacggggcccgcccgcggcccccgcgcggaggacaccagggcagggcgaggaaaggagacggcaccaaccaaaggg

SEQ ID NO: 229389 - RNA, 69 nt, Homo sapiens
gagagccacaaaaaaggaagcgaaagggagaaccaggagggagacaaaggaaaccacaaccaaagaaca

SEQ ID NO: 229390 - RNA, 72 nt, Homo sapiens
acagagccgagagaccagggcgaccgcgggggcaccaccgcaccaccccggaaaggcagccggccggcccag

SEQ ID NO: 229391 - RNA, 74 nt, Homo sapiens
gagcggggccggccacagccggacggaccccaggggcagagacgccacagggaccagccacgggccagggcgcg

SEQ ID NO: 229392 - RNA, 77 nt, Homo sapiens
caggacagggcccccgccgcacacccgagacaggccggggccccggcggccccccggaaggccgcccaccgcgggcc

SEQ ID NO: 229393 - RNA, 75 nt, Homo sapiens
ggagaagaaggaaagagaagacgaagagaccgaaggaccaaaacagggcagaagccaggaggacgacgaccaaaa

SEQ ID NO: 229394 - RNA, 69 nt, Homo sapiens
agaggggggccccggagagaaggcagacggaacagaagggaggccaggagaaggcggggcagcagaaga

SEQ ID NO: 229395 - RNA, 73 nt, Homo sapiens
gaaggaccaagaaccagggagcaacggacaaagccacagaacacccccaaagagcaacgaagacaacgcagcg

SEQ ID NO: 229396 - RNA, 78 nt, Homo sapiens
gagaggagagaaaggcggaagacgagagcagcgcgaccggccccccgcggaaccgagagggcagcagcggacccggcc

SEQ ID NO: 229397 - RNA, 82 nt, Homo sapiens
ggacgagggcgccggcgacgggccgagacggacgaaaaacaggaaaaaacaagcggaaaaacccagaaaacaaaaaagaagg

SEQ ID NO: 229398 - RNA, 71 nt, Homo sapiens
gcggacccagagaagccgaccccaagaaagagagagacagaagccacagggaggagcgggagcacccgagc

SEQ ID NO: 229399 - RNA, 75 nt, Homo sapiens
ggggacccgacggacacaacggcagaccgcagaacacccagccagggggagccgccaccaaaagcagacggaaaa

SEQ ID NO: 229400 - RNA, 73 nt, Homo sapiens
gagaccggagcggggggcggagcagacacagacagcagagggaggcccgggccggcgaggcgagccagccacc

SEQ ID NO: 229401 - RNA, 72 nt, Homo sapiens
aggccaagacccacagaacaaaggagccggcagacagcaacacagggcagggcgagcccacagcggccccag

SEQ ID NO: 229402 - RNA, 76 nt, Homo sapiens
gaaaaaccgagggaaccaccggaaccaacacagcccaggcgggaagaaacacaagcgaccacaccacaacacagga

SEQ ID NO: 229403 - RNA, 65 nt, Homo sapiens
aaggagaacagaaacgacaaacacgagccaaaagagggaggaaccgaaaggaaaccgaggacaca

SEQ ID NO: 229404 - RNA, 83 nt, Homo sapiens
cggaaccgccaccagggcagcgagcgcaaacccaggccgagggagccgcccgcccacgaggagaaggcgggaggagacaggca

SEQ ID NO: 229405 - RNA, 82 nt, Homo sapiens
gcggacgcgcggcggggcagaccgcggggacgcgggcggcgcggccgcgccagacaggcaaaagggaaagcaaggggaaggg

SEQ ID NO: 229406 - RNA, 40 nt, Homo sapiens
gaagaggaccaaagcgaacaggccacaacaaagcaccaac

SEQ ID NO: 229407 - RNA, 65 nt, Homo sapiens
caaaccgggccacaggagcagccacagcagcacggagacagaacaaacagaagggaaacacagac

SEQ ID NO: 229408 - RNA, 69 nt, Homo sapiens
gggccccgaggccgcgggcgggcaccgccgacaccaaacagccaacgccgggaacggagccccagaaca

SEQ ID NO: 229409 - RNA, 61 nt, Homo sapiens
ggccaaggacaaaccgcaccaaaggagagaaccaggagaccgaagcaaccaacaagcgagg

SEQ ID NO: 229410 - RNA, 62 nt, Homo sapiens
ggagaaacagacccccaaaaacagaaaggaggacgacaacaaacgaaagacaagcaacgaag

SEQ ID NO: 229411 - RNA, 78 nt, Homo sapiens
cgcccggcccagcccgcgccccgggagggagggggaggccaggcccaagacgccgcgcgaggccaggagaacgagaag

SEQ ID NO: 229412 - RNA, 33 nt, Homo sapiens
gccgaacagcccacgccaaggcacaaagaaaac

SEQ ID NO: 229413 - RNA, 72 nt, Homo sapiens
cccaagcgccagcacaagaaaaggaacaacgcaagaacaaaccagcagcaagggagaacacggggacaaaga

SEQ ID NO: 229414 - RNA, 76 nt, Homo sapiens
aaccgcaccacggcgggaggccgcgcagccaggaaacaggaacacgaaagaggaaaaacgcacaagaaaccgaagc

SEQ ID NO: 229415 - RNA, 73 nt, Homo sapiens
aaaaaacaaaacaaaagaacagaaagcgagcagagcccgcgaacaagacaaggagaagaaacagcacaaaaca

SEQ ID NO: 229416 - RNA, 65 nt, Homo sapiens
aaagacgggaacagggagaccaaacaagaacaggaaaaagcaaggaacggacggaaggagcaggg

SEQ ID NO: 229417 - RNA, 79 nt, Homo sapiens
cggcgcgcgccggagagggagggcaccgcgcgcggcccccagcacaagggggcaccaggcggagaaggacgccacacgc

SEQ ID NO: 229418 - RNA, 71 nt, Homo sapiens
ggaggggaggcgcccccggagccgccccggaggagaaggaacaacgccggcacaaacagacacggaaagac

SEQ ID NO: 229419 - RNA, 84 nt, Homo sapiens
gcccaccagccccgcccccgagcacgcagccaaccccagcaagaccgaggaagccgacaggaccgggggcacggaggggaagca

SEQ ID NO: 229420 - RNA, 88 nt, Homo sapiens
acggcaccggagggaagaacgagggagaggaaggaagagaagaaaccacccccccggcccaaagaagccagccaaaccaagccggcag

SEQ ID NO: 229421 - RNA, 73 nt, Homo sapiens
agaaaagcaaaaaaagccgggcgaaaaaccccgagcacacgaaaaacacagcaaacccaaagcaccgacaagc

SEQ ID NO: 229422 - RNA, 87 nt, Homo sapiens
cggggccgggaccggcgccacagcagggacgaggagcgccgccgccccgagcccggaagaaggaccggggagacaggaacacgggca

SEQ ID NO: 229423 - RNA, 84 nt, Homo sapiens
agcacaaggcagggggaaggaaaggcacccaagaccagaagacgaggcgcagcgagagggcgacccacgccagacccagaccgg

SEQ ID NO: 229424 - RNA, 75 nt, Homo sapiens
cgaaggcccgacaacaacagaggaagaaagcaaaacaagagagacaaaaggcagaggagccgccggcccaggcgg

SEQ ID NO: 229425 - RNA, 78 nt, Homo sapiens
ccacaagcaagccaagcacgaaggggaaaccgagcaggacagaggaaaagaacaggcaaacaaggaaagaaaagcgcc

SEQ ID NO: 229426 - RNA, 83 nt, Homo sapiens
cggggaggcagcgcgggacccagcccaggcggcgcggacggggcgggagcccccaaaggaccgccgagacagcgccccccgca

SEQ ID NO: 229427 - RNA, 70 nt, Homo sapiens
agggaaagacagcgggaagagcccgggaagcgcagagggaacacggccacgaggggaacgggacagagag

SEQ ID NO: 229428 - RNA, 81 nt, Homo sapiens
gaagcggcaggccacaaagccacagaagcagaagaaggaaaaaaacgagaaagaaacacaccagagggaacagcaggccca

SEQ ID NO: 229429 - RNA, 77 nt, Homo sapiens
caccaggaaagccagagcgagggaaagccaagagaaagaaacgagcggacaaggaacggcaaccccgcccggcaaca

SEQ ID NO: 229430 - RNA, 76 nt, Homo sapiens
cacccgggagcggcggccacggaggcaccagaagaagcaccagacagggccacccagggaaacaccacagagggag

SEQ ID NO: 229431 - RNA, 33 nt, Homo sapiens
ggagccagcgcaggagagccagggccccccgag

SEQ ID NO: 229432 - RNA, 83 nt, Homo sapiens
gcacccccggaccagaacggcacggccacgggcgggcaggcaagcagcagcagaggaaaaaagagaccgagagaaagcagcag

SEQ ID NO: 229433 - RNA, 109 nt, Homo sapiens
gggcgggccgcgcgaagcccgagaggagccacaaggagacgccgccgcgcccccgcgaaagaaacgcggcaagaaagcgacccgagggccaggaacagaagaggacaca

SEQ ID NO: 229434 - RNA, 81 nt, Homo sapiens
gacacccccagggcagaaaagcgaccaggcgagaggggagcaaggaagacaagaccaaagcagcacgcgggagagaggacc

SEQ ID NO: 229435 - RNA, 60 nt, Homo sapiens
caggccggacccgggccgcaggcagcccgcggcagcaggacacagggaggacgcccgacc

SEQ ID NO: 229436 - RNA, 75 nt, Homo sapiens
gaaagagagggagccccgaccccaggccccccacagaaaaggaaaggcacaaaaggcggcagaagaggaggggac

SEQ ID NO: 229437 - RNA, 101 nt, Homo sapiens
ggagcagggcgggaggagaccgcgcagaaccaggaggcgagggcaagagaagaaggccgagcggaaacagggcaaaggaggaaacaagaagagacggagga

SEQ ID NO: 229438 - RNA, 93 nt, Homo sapiens
agacagacaagcaggggggagaaccagaacaccaacagaagcccggcccccacgacacaccgaagaggcccacggagaggacaagagggcaag

SEQ ID NO: 229439 - RNA, 57 nt, Homo sapiens
agcgcgacgcgcgaccagaccggcccccccgaggaaggccgcggacccccccccccc

SEQ ID NO: 229440 - RNA, 61 nt, Homo sapiens
ggaccaagaaccagaaagccgggaccgacgccaggccccacaccaggcaccccccgcggga

SEQ ID NO: 229441 - RNA, 55 nt, Homo sapiens
gcggagggaccagcgagcggaacccaacaggacaccaggcccacaaagcacaagc

SEQ ID NO: 229442 - RNA, 73 nt, Homo sapiens
gggcccggagcaggcaaggaggagcagcaggccaccaagcaacaggggggcaccacggccccacgcgcaaaaa

SEQ ID NO: 229443 - RNA, 79 nt, Homo sapiens
gaaagaacaggcacagggaagcccaaacacagaaaaacagggaagcgagcagcgcaaagcacaaagaacgcacaccacc

SEQ ID NO: 229444 - RNA, 76 nt, Homo sapiens
agcaacccgagggcgcggaaaagccacgagccaggcagcgagcgggagcagacagggaaccgaaggcagcagaaaa

SEQ ID NO: 229445 - RNA, 72 nt, Homo sapiens
aaaagcgcgaagcagaagggcaaacggaggaagaaccaggaacagcgacacaaagcaacaggagcgccgcag

SEQ ID NO: 229446 - RNA, 75 nt, Homo sapiens
ccggagggcgcaagcagcaggaaggagaccaagggggcacccgaggaggaagagggcagggcccacggaaagaag

SEQ ID NO: 229447 - RNA, 73 nt, Homo sapiens
ccaaagcccaaaccccaggccaagcaaccaccagcagcccccagagcggaacacagaaaaagaggcaaaccac

SEQ ID NO: 229448 - RNA, 79 nt, Homo sapiens
ccaacaggagagcaccagacaacaaggaaggacaccccaagaagggccaaacggggggcacacacaggaagccaccccc

SEQ ID NO: 229449 - RNA, 78 nt, Homo sapiens
ggcagggaagccccacgaaggaagaagcaagaggaaggccaagccccgaggcccgcacacgagcaacaaaaagaagaa

SEQ ID NO: 229450 - RNA, 81 nt, Homo sapiens
agaagaaagcagaaaaacaaaaggagcagcagaagccgaccaggaccacgaaaggcagggagaaaagccagccgggcagca

SEQ ID NO: 229451 - RNA, 48 nt, Homo sapiens
ggaaacacccgcgagcaaaggaagcgccgcgcccggggagacagaaac

SEQ ID NO: 229452 - RNA, 67 nt, Homo sapiens
gcccaacaaccgccggccaagacggcaaacgggaacagggaagcaggcgccccagaccagaagacca

SEQ ID NO: 229453 - RNA, 79 nt, Homo sapiens
ggcccacggagaaagggccacgaggaccaggccaaagcaaaacaccgaagccaaaaccgcaccaaaccaaaaaccagaa

SEQ ID NO: 229454 - RNA, 81 nt, Homo sapiens
acacccagcagggagcagcccacaccgaaccagaacagaaaggccccggagcagcgcgacccccaggaaacacgaggcaga

SEQ ID NO: 229455 - RNA, 82 nt, Homo sapiens
gccgcgcagccagagcggagccggaccccggcacgcccgggaggagcggacagaaccaggaagacaacaggcccagacccag

SEQ ID NO: 229456 - RNA, 71 nt, Homo sapiens
agacacgaaacgaacggaagagagaaggccacgcccgaccccaagcaacaacggggcagggacaggcgcga

SEQ ID NO: 229457 - RNA, 86 nt, Homo sapiens
caccacggggaaaggccaccacaccaagaacagccacagacggaacaagcagcaggacaagccagccccgaccccagggaagcagc

SEQ ID NO: 229458 - RNA, 60 nt, Homo sapiens
cagcccccagaaaggaggacaacgggacccagaagaggccgaggaggccacacagacaac

SEQ ID NO: 229459 - RNA, 72 nt, Homo sapiens
agaaaggcggggcaccgcgcagaagagacaacacccgcagagggcgaaccaaagaaggaaggcgacccaaaa

SEQ ID NO: 229460 - RNA, 97 nt, Homo sapiens
cacaaacaagcccagaacagagaaggaggaccaagccagaaccaggggcaacaaagcggaccagcgggggccagggcgagaccaccccgaggcagcc

SEQ ID NO: 229461 - RNA, 80 nt, Homo sapiens
gggacgcagcaccagggggcacgcccccggcgggcccaggaacgacccgcaccgccgacccaggagcagggacagccggg

SEQ ID NO: 229462 - RNA, 68 nt, Homo sapiens
acccagagcgccaaacccccaaggaaggaaggagaccgcaagcagagcgacaagcaacgcaaaaacag

SEQ ID NO: 229463 - RNA, 81 nt, Homo sapiens
gggcggcccggggcgggcgcgggcgcggcgcgcccccgcgccccccggagccccgggccagagacccacccagccaacaaa

SEQ ID NO: 229464 - RNA, 57 nt, Homo sapiens
ggggaacaccgacagccacagagcccagcaaaaagaggagaagcacccccccagaag

SEQ ID NO: 229465 - RNA, 66 nt, Homo sapiens
gaaaaaagccgagccccgaaaacgaaaaccacgccacagaacggagagccaggaggcgacaagaca

SEQ ID NO: 229466 - RNA, 79 nt, Homo sapiens
acaaaaaaggaagcgaaagagccccagaaaaagaccagggaaaagcccagcgaagaggacccagcaggaacagagggaa

SEQ ID NO: 229467 - RNA, 69 nt, Homo sapiens
caaccggcaagaccagacgggaacgggagacaagcgcagcgaggcaaaacccccagaacgcgggcaccc

SEQ ID NO: 229468 - RNA, 64 nt, Homo sapiens
caggagaaagggccacaccaaaccagacccaagacagagggaacagccgagggagccccggccg

SEQ ID NO: 229469 - RNA, 80 nt, Homo sapiens
gaagcggccggcaggggaaggacgaggagaagacagaggagccagaccaagagacagcacaggcgagcgagcagagacac

SEQ ID NO: 229470 - RNA, 74 nt, Homo sapiens
gcgaagccaaagcagcacgcgaggaggaaaggcaccccaccagggaggcacccgagcagagcacagaagaagcg

SEQ ID NO: 229471 - RNA, 75 nt, Homo sapiens
cgcccgccaaaccgccacgaggagggccagagcgccccacacaacaaggagggaccagaagcagcagccccagaa

SEQ ID NO: 229472 - RNA, 58 nt, Homo sapiens
aaagcgcagcaagacggccgcgcggcccgcagggaaagcaccgaaaggagagggagag

SEQ ID NO: 229473 - RNA, 87 nt, Homo sapiens
cccggcacaagcagacggcaaaggcaagagaacagcagcgccgcccgccgacagccaggcccgggagaacaaggcaccagcagaaca

SEQ ID NO: 229474 - RNA, 82 nt, Homo sapiens
ggaaccaggaggggagaaccgcgaccgcacaagcagccgccagcggaaccaagcggcgcggcacacgagaccagggcggcac

SEQ ID NO: 229475 - RNA, 56 nt, Homo sapiens
cgcgccgccgaccccccggcgccgcgccggcggcggcacaaagggacccaagcgag

SEQ ID NO: 229476 - RNA, 74 nt, Homo sapiens
gacacaccgcagcaacgggggcacagagagcggagaggagaaaaagaaacccaaaggggcacaagaggagacgc

SEQ ID NO: 229477 - RNA, 79 nt, Homo sapiens
aaggccccacagcaacgagagccagagaagaagggccgcgaggaaaaggaggccagagcccaggccgaggcgaaaggag

SEQ ID NO: 229478 - RNA, 65 nt, Homo sapiens
cgagcagccgggagacaccgccaccgccagggagccgcccacacaaagggcgaacggggccgcca

SEQ ID NO: 229479 - RNA, 71 nt, Homo sapiens
cccacccacccgagaacaaggaaccagagaaggagaaacagcagggccaaaggcaagaacccgggaaaggc

SEQ ID NO: 229480 - RNA, 82 nt, Homo sapiens
agcaaaaagccagaggccgaagacaaagcagagggaaaggaccaccacaggaaagaaggacccgagccccaaagacagaaaa

SEQ ID NO: 229481 - RNA, 75 nt, Homo sapiens
gcccggccgaaggcgggggaggagacccacccaaacacacccgagggacccgaggagcccaccaagccgaccgca

SEQ ID NO: 229482 - RNA, 77 nt, Homo sapiens
acgaagggcaccgccagcggaggcagcccagaccccccaccgaccgggcgggacaagggcgcaccggggcgcagcga

SEQ ID NO: 229483 - RNA, 73 nt, Homo sapiens
aggaaggaagaggcaccgccggagccgccggaagggcgcccgcagccccccacgcaacacccccagggagcgg

SEQ ID NO: 229484 - RNA, 35 nt, Homo sapiens
ccgaagggcgggagccacggcgaaccccagcaggc

SEQ ID NO: 229485 - RNA, 75 nt, Homo sapiens
acgaagaccagccagaacagcggcagcccagggggagggagagccaccacagagaaaggaacggcccggccagcg

SEQ ID NO: 229486 - RNA, 80 nt, Homo sapiens
acaaaagcaacaaagaggaggagcacggaccccagaaggaagccaagcggacacgaccaagagcccaagaaaacaaaaag

SEQ ID NO: 229487 - RNA, 69 nt, Homo sapiens
cagaaggaagcacaaaaagggacagcggacagaagagcagaagacagagaaggaaaagaaaggaacaga

SEQ ID NO: 229488 - RNA, 85 nt, Homo sapiens
gaacaaaccgaagaacagcgggaaagaaggcaaaacacgggaccaggaagaaacaggcccgccagcaccgacagcaacgaaaagc

SEQ ID NO: 229489 - RNA, 81 nt, Homo sapiens
gagaacccaagacgccccaaaggaagagggcaaagcggagccgaggcgggaaacacgggaagccgaaaagacagcagacga

SEQ ID NO: 229490 - RNA, 70 nt, Homo sapiens
ccaggaagaaggccaaacaagaaacaggggggaagcccgagagcagccacagcacgcccagggaaaaagg

SEQ ID NO: 229491 - RNA, 76 nt, Homo sapiens
gagccggcgaggggaagaccaagacaggccggaacccgaaagggcaaccaacccagggaaaaggacagaccaccgg

SEQ ID NO: 229492 - RNA, 52 nt, Homo sapiens
acaacaggcaaacccacccacgcgcaaaagggcagaaaagcagggcaagcag

SEQ ID NO: 229493 - RNA, 71 nt, Homo sapiens
aggaggcccgggaaccgaaaaaagcagggaagaagagcaaacgagacggaagaaaaaaccgacggcccgaa

SEQ ID NO: 229494 - RNA, 84 nt, Homo sapiens
aagggcgcggagccgcgggccggcgagcgcgcgccaccagaccaccccccacccgaaggggccaccagcgggcacggcacaccg

SEQ ID NO: 229495 - RNA, 81 nt, Homo sapiens
gcccaggcaggaagcagcccccagcccggacgccgggcccgggagagagccaccaccagcccggagcccgcggcgagggcg

SEQ ID NO: 229496 - RNA, 52 nt, Homo sapiens
gccgggaaggggagccaccagcccccgggcgacccgggccaggcgaaccgag

SEQ ID NO: 229497 - RNA, 72 nt, Homo sapiens
agcccccgaaccaccgggcccacagcacaccgacaaacccacagggaaacacaaagaagacaccagaagggc

SEQ ID NO: 229498 - RNA, 49 nt, Homo sapiens
ggacgacgacgacgaggaagaggaggcgagcagacaggcagcaaagaaa

SEQ ID NO: 229499 - RNA, 64 nt, Homo sapiens
cagcacagccccaaacgcagggcgcaagcaggggcaccgaggcacccggcaggagccccagggc

SEQ ID NO: 229500 - RNA, 82 nt, Homo sapiens
caagccgaccggaaaaagcaaacagaaggacaggggacaagcagggcagaagaagagaaccaaaccaggaaccagagcagac

SEQ ID NO: 229501 - RNA, 37 nt, Homo sapiens
cgagaacacgcagacagccgaccgagcgggcccgccg

SEQ ID NO: 229502 - RNA, 72 nt, Homo sapiens
cgaccagcggaacgaagcaacggggcggcacacaaggagcgaagggcagggagaacgccaggcacagcacga

SEQ ID NO: 229503 - RNA, 90 nt, Homo sapiens
accacgcaccgggacaagacaccccgcaccagaaacagcgcggaggacagccaggcagagccacacgggaggaacacggagccaagagga

SEQ ID NO: 229504 - RNA, 62 nt, Homo sapiens
gcccgcggagagcccaaacaccaccaccaagacggcaaacaaaggaacagaggcacgcggac

SEQ ID NO: 229505 - RNA, 71 nt, Homo sapiens
ggaggccagcggggggccaggaggggcgcccaacaggagagagcaacaagaaggccgaggccaaccccaga

SEQ ID NO: 229506 - RNA, 56 nt, Homo sapiens
gaggacggccaggagcagacaagcgagacccgggggcaacgagcgcacgcaagggc

SEQ ID NO: 229507 - RNA, 64 nt, Homo sapiens
ggggaggagaaccagccgagcagcaagacagaaaaaaggccaggagacaaccagaccccggggc

SEQ ID NO: 229508 - RNA, 84 nt, Homo sapiens
aagaacccaggcgccacggagcccgaaaaccgagaccacgaagaagcccaaaggaaccagacacaaagaggaagcccacacaga

SEQ ID NO: 229509 - RNA, 81 nt, Homo sapiens
gcggggaggccgcccggcgcagcggggaccggcggcggcgcccaggcacccggcccgggggaacggcgagggaacccagga

SEQ ID NO: 229510 - RNA, 89 nt, Homo sapiens
agagcgcgccggcgagaagcggccgagccagcagcagaaaacaggggcacagacgacagaagccaagagggcgcaaagaggaaaagaag

SEQ ID NO: 229511 - RNA, 73 nt, Homo sapiens
ggcagacccaggggcaagacagaccggggagaccgccagcacaacagaaaggaacccgagaacagagaaacgc

SEQ ID NO: 229512 - RNA, 75 nt, Homo sapiens
acggcccggccccgcccggcgccgaggacccccgacccagaagccacacccccgagaacacagcagccgcccaac

SEQ ID NO: 229513 - RNA, 86 nt, Homo sapiens
ggcagacgcggggacccggcgcggggcgcgggacgacgagggcaaagaaaaaggagagaaaaagaggcaaaacaacaagaagaaaa

SEQ ID NO: 229514 - RNA, 79 nt, Homo sapiens
cagaaagcgacaacagccaagagggcgcccagagacaacgagagaacggggaaccacgggaacacccccagagcccaag

SEQ ID NO: 229515 - RNA, 51 nt, Homo sapiens
aggacacggccggaccaggggaaaagccgggccacagaagcaccaccacaa

SEQ ID NO: 229516 - RNA, 80 nt, Homo sapiens
ggaggccggcgcagcgcgaccgccaccgcggggaccaggaagcacgcagcggcacgacgccccacgggagcaaggaggcc

SEQ ID NO: 229517 - RNA, 72 nt, Homo sapiens
gggaaagagaaacagcggagaagaccccacggaaccaggaagagacgcgaaggccaagaaacagaaccgaag

SEQ ID NO: 229518 - RNA, 89 nt, Homo sapiens
cagcagcagcagcagcaacccccgaacacgagcaccacaggcgcccgaaggccggaacagggacggggggcacgcggaagggaaggcac

SEQ ID NO: 229519 - RNA, 75 nt, Homo sapiens
agaaaagaaaaaaacaagagcacgaagccacaaagcaaaacggacaagcggaagggcaacaacacaccagagaag

SEQ ID NO: 229520 - RNA, 67 nt, Homo sapiens
ggaaggcaagaaaccagaaagagaacgggacaacaaaagagccacccaagacagagcaaaccgccac

SEQ ID NO: 229521 - RNA, 81 nt, Homo sapiens
ccaaaaccgaagcgcgaaaccacagagaaaagcacgcgacccagagcaggacggacaccgaaccggcggcgaggcccagac

SEQ ID NO: 229522 - RNA, 72 nt, Homo sapiens
cagagcgggaagacacaaaagaggcacggcggcagacaaagccgaggcaccaaacgacccggacgcgacggg

SEQ ID NO: 229523 - RNA, 88 nt, Homo sapiens
gaacccggggggccgcggcggagcgccggccggcggggagcgccaaggccgcaggcagacgccagacacacagccccagcaaccacca

SEQ ID NO: 229524 - RNA, 82 nt, Homo sapiens
aacaacagacagcgccagccaccgccacacgccagggcaggaaagccaccgagggcccagccggcgcacgagaaccgcgcaa

SEQ ID NO: 229525 - RNA, 62 nt, Homo sapiens
gcaacccggagccggaccgacccgccgcacaccaaaggcagaaaaccaagccaggagggaac

SEQ ID NO: 229526 - RNA, 80 nt, Homo sapiens
ccagcagacgcagccgagacaccagcccgaaacaccaccaagggcgaaaccaagaggagggaagcaggcagacgcgaggc

SEQ ID NO: 229527 - RNA, 72 nt, Homo sapiens
gacaaggacgcgacccagggacaaaccaccgagcaccggccaggaaacaccaccacaccaccggaaaccaca

SEQ ID NO: 229528 - RNA, 59 nt, Homo sapiens
ccgagcggacccggaccggggcacccaagaaaacccaggccgcgaaggagaagaccgga

SEQ ID NO: 229529 - RNA, 55 nt, Homo sapiens
aaagggccaaagaagggagagaggaccgagccaggagacacgagccggagaggag

SEQ ID NO: 229530 - RNA, 81 nt, Homo sapiens
cggagcaaggaaaagacccggaaagaagagacacagaggagccacacccccaggacacgcccaccaagaaagaaccggaaa

SEQ ID NO: 229531 - RNA, 81 nt, Homo sapiens
cagcgcgagccaggacccgccaccaggagagaacgccgcgccgcgcgacaacggcccggcaggcaaggccggccgcgggcg

SEQ ID NO: 229532 - RNA, 70 nt, Homo sapiens
gagaagcacgagaaagggaaaaccggacagacaagccccgagggacacggaaagcagcagacgaaccccg

SEQ ID NO: 229533 - RNA, 68 nt, Homo sapiens
cgcagggcgcccccggcagccaaacgggccggcaggacaggagacagagcacaccggaaacaagaaac

SEQ ID NO: 229534 - RNA, 54 nt, Homo sapiens
acgccaaccggccagaggacgagggaccggcgggggcccagggccagcgcggca

SEQ ID NO: 229535 - RNA, 74 nt, Homo sapiens
caaagcagcaggagcgcagcacgaaaacggaaagggaaggacaggggcaaggccgaggggaacagcacacagag

SEQ ID NO: 229536 - RNA, 73 nt, Homo sapiens
cggcccaaccccgcaagacccagagaccagaccggaagaagcagggaaagcagaaaaaaggaccagaccacaa

SEQ ID NO: 229537 - RNA, 74 nt, Homo sapiens
cccccaagagcgggaacagcaagccccaagccagcaccaggacaaagcacaccaagaggaaaagcagggcccag

SEQ ID NO: 229538 - RNA, 75 nt, Homo sapiens
caaaaggcgcaacacgggaacccaccacaaaccaaacgagcaagaaggagcgaggcagagccacaggagaagcag

SEQ ID NO: 229539 - RNA, 72 nt, Homo sapiens
acaagaacccagccaaagccccaagaagaacggaaaagccagccaggacaggaaagagagcgcacaaggaaa

SEQ ID NO: 229540 - RNA, 70 nt, Homo sapiens
gaaggcgcgaagaacggaaggcgaagagacacaacaaggccaagcagaccggcaacaggaaacagaacag

SEQ ID NO: 229541 - RNA, 59 nt, Homo sapiens
acggagaacaaaccgcgagaagcacgcacgccaggggaaagggagcagcaccggccaca

SEQ ID NO: 229542 - RNA, 88 nt, Homo sapiens
ggcagcgcccggaccggccgagaggaagacgagccgggaggaacggcccggaaacaggaggacaggcgggaggcggcagaagcagcca

SEQ ID NO: 229543 - RNA, 57 nt, Homo sapiens
gccccaaggggcccagacggggaggacagaagaaaacccgcagaggaaagagcgaaa

SEQ ID NO: 229544 - RNA, 74 nt, Homo sapiens
aagagcgccagaggcccccgagccccccgagaagacccagacagaaggagaaaggcgggaccgcacaccccacc

SEQ ID NO: 229545 - RNA, 49 nt, Homo sapiens
cggggggcgcccaggagagcgcgggcgacggggcgagagagccgggggg

SEQ ID NO: 229546 - RNA, 71 nt, Homo sapiens
caaggaccgggaaagaggagacaaaccccagacgcgccggagggccagcacacgaccgcgagagggcgaag

SEQ ID NO: 229547 - RNA, 82 nt, Homo sapiens
ccggccggagcccccgcccaaggagaagcgcccaagcggacgggaaaccacaacaagagaagaaaggagaaggggaggaaga

SEQ ID NO: 229548 - RNA, 76 nt, Homo sapiens
agaaagaacaaagacaaggaacagcggcgccaacgcaaagagaagaaaccaagagggaagaggaaagaagaaaccc

SEQ ID NO: 229549 - RNA, 43 nt, Homo sapiens
ccaggacgagaaccaccgagccaggccgaggcccacacaaagg

SEQ ID NO: 229550 - RNA, 72 nt, Homo sapiens
acccagcggaaagagcaggcacacagacaacaggcacaaagagagaaggaacacccacagggcagacagaga

SEQ ID NO: 229551 - RNA, 70 nt, Homo sapiens
ggccagacccgcaagcgacacacacgaccaggacaagcgccccaaaccagagaaccggaacagaacaagc

SEQ ID NO: 229552 - RNA, 81 nt, Homo sapiens
cgaagcgacgagccgcgaggaggccccgcgaacagccccgggcgggagaccaggaagcgagccggggcagacgacaacgag

SEQ ID NO: 229553 - RNA, 88 nt, Homo sapiens
ggagcggcggcggcggcggacccggagagccccggaggagcggagagcgagcggcaacccggagaggagaaggcagagcccccccagg

SEQ ID NO: 229554 - RNA, 78 nt, Homo sapiens
gagacgccaaggaaagagggacccccggcccagagaagaaccacaggaccaggcggcgaaccggcacccaagcgaccg

SEQ ID NO: 229555 - RNA, 86 nt, Homo sapiens
ccggaaccgcgacggcggcaggcaccgccagggaggagagcggggcacgcgcccaacgcgcaagaagcccaccacggaggggcacc

SEQ ID NO: 229556 - RNA, 82 nt, Homo sapiens
gcgaaggcgacagccggccccaaagcaccaggccaaacgacaagggaagaaggaccgccggagcgggcacggaggaagagca

SEQ ID NO: 229557 - RNA, 60 nt, Homo sapiens
gcgggccgcgccgcgaaggagaagaaaaggcagacaaaccagacagggggaaacgccagc

SEQ ID NO: 229558 - RNA, 61 nt, Homo sapiens
agagagaagcacagaggaccaaaggagcacagacaacgaagagaggaaagaagcggaaagg

SEQ ID NO: 229559 - RNA, 73 nt, Homo sapiens
acagccccggaacgccgaacacggaaacccacagcagcgagcgagcaggcccccagacccaacaggcagcgga

SEQ ID NO: 229560 - RNA, 64 nt, Homo sapiens
cagggaagccacagcaccccagcacccaggagacaagcgcaagcagccagagcccgggcgcaaa

SEQ ID NO: 229561 - RNA, 74 nt, Homo sapiens
gcccggcggagccacgcccgccaacccaagcggggaggccaggcaggcgagcccccaagccacgcacgaaaaac

SEQ ID NO: 229562 - RNA, 76 nt, Homo sapiens
ccccccggccaacccgaagccgcgccacgacagcgcagggccgcggccgggagaaaaaaggagcccgaaagcccca

SEQ ID NO: 229563 - RNA, 76 nt, Homo sapiens
aaagagcgaagccaagaagacgaagagccaaaaacgagaggcaaaaaggagggaagggccaccacagagcccgcag

SEQ ID NO: 229564 - RNA, 72 nt, Homo sapiens
gaccagggggcaagaaaaccgggagacaaagcaaaaaggaacccggcagaagagacaacacagaaaccaggg

SEQ ID NO: 229565 - RNA, 81 nt, Homo sapiens
aaaaaaccggaaaaagaagccaagaagcaaaaaagggacgcaagaagaaccaccaggaaagggagcaacaagaaaaagcaa

SEQ ID NO: 229566 - RNA, 56 nt, Homo sapiens
aagcaaggacaaggccagagggagacggggggcggccccggacacgacccgaggac

SEQ ID NO: 229567 - RNA, 93 nt, Homo sapiens
ggcggcaaaaggcggcgccgaggagcgggacaacccaggagcagacagagaagcgcgcagcaggggccggcacagcagcaagaccggaaccca

SEQ ID NO: 229568 - RNA, 78 nt, Homo sapiens
gccggcgacggccggacgcaacgcggcgggcgagacgccagaacaacaaccagacgaccgaacggacagaccggaacc

SEQ ID NO: 229569 - RNA, 86 nt, Homo sapiens
cgacccgcgcagacacggaccgcgggccagccgccaaagaccccgccggacagcccagagcaagcacacggaggcccgggagccag

SEQ ID NO: 229570 - RNA, 83 nt, Homo sapiens
ccaggcggcgcgccggccggagcgcagcggagcagggcgggaggagaccggagagccacaagaagaggacagcagcagacaaa

SEQ ID NO: 229571 - RNA, 42 nt, Homo sapiens
ccgcccgccaggacgacaaaacccgcagcccaaagggcagaa

SEQ ID NO: 229572 - RNA, 61 nt, Homo sapiens
cgaaggaaagacacaagagaccacaagaccgaccaggaaaagggaagggcaacaaggaaac

SEQ ID NO: 229573 - RNA, 72 nt, Homo sapiens
agaaaaaggaaaacgcggaaaaccgacacaacagccagaaaaccagggaaaaagagggaggggccccaaaca

SEQ ID NO: 229574 - RNA, 59 nt, Homo sapiens
ggggaagggaccagggcgccgggccggcccgggcccagccgagcccaggaaggcgcccc

SEQ ID NO: 229575 - RNA, 77 nt, Homo sapiens
ggcccgggggccgccccggcgagccgcgacggcgccgcccacggcgaggagaccggaaacgagagaaacgaagacga

SEQ ID NO: 229576 - RNA, 79 nt, Homo sapiens
ccccggaagccgccccacagcgcaggaaagccagccgagagacgggaggcagggcaccaaaaccaggacaaggaaagaa

SEQ ID NO: 229577 - RNA, 76 nt, Homo sapiens
ggaacagggacagcacccaccccggagggggaccacaagacccacgacagggaaagacaaggagccgggccgagaa

SEQ ID NO: 229578 - RNA, 89 nt, Homo sapiens
cgaagcggccaaagccgcccagacggccaccggcgggaggaacaaaagaccccaagaagaagcggaagaggagccgcggaaccaagaca

SEQ ID NO: 229579 - RNA, 64 nt, Homo sapiens
acgccaccggagaagggaggaaaaccaacaaggacaaaaggaggagggaaaaaaccaagaagaa

SEQ ID NO: 229580 - RNA, 38 nt, Homo sapiens
accaaaggacccaacaaaggccacaccacgccccgagc

SEQ ID NO: 229581 - RNA, 43 nt, Homo sapiens
ggaccgagaccgcggccgggaccgagggccccgggggcgccga

SEQ ID NO: 229582 - RNA, 68 nt, Homo sapiens
gaggcaaagaagaacaggaaggaaggaaagagccaaacgggcccgggccccgcgcgcgggggcccggg

SEQ ID NO: 229583 - RNA, 63 nt, Homo sapiens
cagagcccgccagacccccgaaggcaaaggaccggggcggcgcggcgggaggacacccggagg

SEQ ID NO: 229584 - RNA, 74 nt, Homo sapiens
gccgcggcccccgccgcggcacgaccccacaggagaagagacaacgggaaacacacaaagcccagaaggaacaa

SEQ ID NO: 229585 - RNA, 64 nt, Homo sapiens
gaaagaagaggccccagcacacgaaaagacccgcaccaccccaggaccaaggccggagagaggg

SEQ ID NO: 229586 - RNA, 83 nt, Homo sapiens
gcccgccaccaagcacacccgcaaggcggcacgagccaagcggaagcccgaccaggcaggagaccacaaagagacgacccggg

SEQ ID NO: 229587 - RNA, 61 nt, Homo sapiens
cgaggacggcgacccagacgacagcgagcccgaaaagcaaacgccagcagaccacacccag

SEQ ID NO: 229588 - RNA, 64 nt, Homo sapiens
cgcacaccacgcccaccaggggggggcgcccacccgcgagagccccaacgagagagaaggccca

SEQ ID NO: 229589 - RNA, 63 nt, Homo sapiens
gcccggagagcggcgcgcaggaaagaacagccaaagggaagcgccggcaaagaggaaaagaaa

SEQ ID NO: 229590 - RNA, 72 nt, Homo sapiens
accccagacgacacaaggcacacggggcacccggaccggagaggaggggaggccaaaacagaagaggcaaag

SEQ ID NO: 229591 - RNA, 73 nt, Homo sapiens
gagcgccgcaggcgggaggaggaggaggagagcggggcgggacagcggggagccggcccaccggcacaccaaa

SEQ ID NO: 229592 - RNA, 78 nt, Homo sapiens
agaggcgcccacgggggcccgcggcgcccggcgcgaaggggaacaacagcaccaccaaccgaccaagaggggggagac

SEQ ID NO: 229593 - RNA, 79 nt, Homo sapiens
cgaccccacaggcagcgcccgggcacggggacaagggccagggggacaaggagaagaaaccgccgaccagaggggagca

SEQ ID NO: 229594 - RNA, 37 nt, Homo sapiens
cccggaggagcagccggaccaagcaccaggcacgaac

SEQ ID NO: 229595 - RNA, 43 nt, Homo sapiens
cccaccacgggaggccgaggaggaggaagggaggacggcgacc

SEQ ID NO: 229596 - RNA, 57 nt, Homo sapiens
cagcggaacacacaacacacaggggcacggacggcccagaccggcgccacaagacca

SEQ ID NO: 229597 - RNA, 76 nt, Homo sapiens
gaccaccacaaaagaaccacaccgccccaaacaaccccaaggacgggagcagcggaaggcccagaccgagcggcgc

SEQ ID NO: 229598 - RNA, 82 nt, Homo sapiens
ggcgccgcgccgcggaggacagcccggggcagggcgccggagaaaagagccagaccaggaccaggcggggcgaaccagcgcg

SEQ ID NO: 229599 - RNA, 75 nt, Homo sapiens
gaggcccgagccgcaaagagcaagagcagggaacaggcgacacaaggccaacggacacacgggcagcgcccgaca

SEQ ID NO: 229600 - RNA, 73 nt, Homo sapiens
acagcagggggcacgcggccacgcacgaggagcagcaagggcacgcgcccaagggaggccaagcgaaggaagc

SEQ ID NO: 229601 - RNA, 77 nt, Homo sapiens
gggaacgacacagcgggccgcccaacacaagaaggagaggccccaagcacccaaggcaacagcaagagaaaagccca

SEQ ID NO: 229602 - RNA, 75 nt, Homo sapiens
caccggacaaccggcccacacgcaagaccaccagcgcgaaagcaaaacgccagcagcccggacgccaccaagccg

SEQ ID NO: 229603 - RNA, 30 nt, Homo sapiens
aacgggcagcgaaggccggcccaggcagaa

SEQ ID NO: 229604 - RNA, 72 nt, Homo sapiens
caaccccggggccacaaagcgagagaccgcagcccacaccccgacggaagagcaaggaaagcagaaggcggg

SEQ ID NO: 229605 - RNA, 70 nt, Homo sapiens
ggcaggaagggggacggccagcgaaagacacccagcaaccagaagaacaacagggcaacggagacagaaa

SEQ ID NO: 229606 - RNA, 79 nt, Homo sapiens
ccgggggagcggggccccacacccccccggggggggcgaaggcaagagaggggagggagaaaaacccgaccccccaggg

SEQ ID NO: 229607 - RNA, 130 nt, Homo sapiens
gcgggcccggccggcccgccgccgcacccaggacggaggcgcagcccgaggaccaggccggcgcagccaggcgccagggcagaaccgcggcagcgagaggggaagccggaaagaggcaagccgggcaaag

SEQ ID NO: 229608 - RNA, 68 nt, Homo sapiens
gccacgagcagaccccagaccaagacccacccaaccccgcgacgggaccacagagacagggcgcgggc

SEQ ID NO: 229609 - RNA, 78 nt, Homo sapiens
caacgacccagcaaaccacagcagccgcccaaaacacaaaccaaagaagaaacccgaaggaccacagagaaccaaaac

SEQ ID NO: 229610 - RNA, 87 nt, Homo sapiens
ggccgcgaggcacgccgcgggcccagcgcgaccccggccccgcccccgggaccccggccaggacgaaacaccacgacagacacaaga

SEQ ID NO: 229611 - RNA, 77 nt, Homo sapiens
aggaaagccagccggcgagagcaggagcacagaccagcgcgcgaccggagccccacagcggcacaggccccagccaa

SEQ ID NO: 229612 - RNA, 36 nt, Homo sapiens
ccaggcaagcagacaccacagggcagagcagaagcg

SEQ ID NO: 229613 - RNA, 86 nt, Homo sapiens
ggaagcgccaaacacaagaaaacacacagacccaacgacaagaggagaggaagaggaagagaaagcacagcgagacaagcaacgga

SEQ ID NO: 229614 - RNA, 71 nt, Homo sapiens
aaaaggaaggaacaaaaagggagcagagaacgggaaagcggaagacggcagaagagcgagcacggaaaccc

SEQ ID NO: 229615 - RNA, 76 nt, Homo sapiens
cgagcccaggagcgccacgcgcggaaggcagcgcccagcagcgcagcaggagcagggaaaaggcccacgagacaag

SEQ ID NO: 229616 - RNA, 59 nt, Homo sapiens
gcccaggagcagcccaacaaagagcacgccgaggcagacacccgccaccaacccaggcc

SEQ ID NO: 229617 - RNA, 60 nt, Homo sapiens
caccgcccgccaggacgacgaaccaaccgggagccccccaagagacccaggggaagaccc

SEQ ID NO: 229618 - RNA, 81 nt, Homo sapiens
ccgacagccgcagaacgagacaagcccaaggcccgccacgcccagcgcgacacagccacccaaccaagcagggggccacag

SEQ ID NO: 229619 - RNA, 68 nt, Homo sapiens
ggaagacaagcggaaaacagggaggacgggggaagaaagagagacaagacaacacccagaagagaggg

SEQ ID NO: 229620 - RNA, 76 nt, Homo sapiens
acaccgcggagcaaggaaaagaaccggaaggaagagacagagaggagcgaacccccagccaccgaaaaaaagggag

SEQ ID NO: 229621 - RNA, 76 nt, Homo sapiens
caaccagacgccagcgggacgaggaccgagaccgcggccgggaccgagggcggacccagaccgcggggaagcacgg

SEQ ID NO: 229622 - RNA, 39 nt, Homo sapiens
agaggggcgacgaccgcacaacagaaagggcaccaagag

SEQ ID NO: 229623 - RNA, 75 nt, Homo sapiens
ccccccgagggcaacgagaaagagacgacacaagacacccaagaagcccagcagacccaacgcccagcaccaaaa

SEQ ID NO: 229624 - RNA, 85 nt, Homo sapiens
gacaggggccgcggggcccaggacggcgcccagcgacaccaggcaaagccagacacagagggacagggacccaaagcgagccaca

SEQ ID NO: 229625 - RNA, 78 nt, Homo sapiens
ccccaaagcacgggaacagcacaaccccgcgcgcggaggaggcaagaacaccagggaaccaagcgcggcggaagacaa

SEQ ID NO: 229626 - RNA, 84 nt, Homo sapiens
gaccacgagaggaagcgagggagaccaagacgaccccgacgcaggccaggagccgcggacagaagccgagcacggccgagacaa

SEQ ID NO: 229627 - RNA, 71 nt, Homo sapiens
ccccgacccccacaccgggcccccagcgagaccgagccgcacccggagaggagacgccccgggaagacggg

SEQ ID NO: 229628 - RNA, 74 nt, Homo sapiens
acagggccagaaccagagaaggaaagcaaagcgaccaagaggccgcccgaggccccggaagaggcaacaccgga

SEQ ID NO: 229629 - RNA, 79 nt, Homo sapiens
gcccacacgccaaccggccagaggacgagggggcggcacggccccaccacagaggggaggagacgggacacgggacaca

SEQ ID NO: 229630 - RNA, 90 nt, Homo sapiens
gcgcggcgggacgcgagcggcgagccggagcgcggagcccggccccgcaccaggaggaggacgacagcacggagaagacagaggagccag

SEQ ID NO: 229631 - RNA, 77 nt, Homo sapiens
ccgcgaggagcgagaacagaaggagacagcgaagcggggggaaggagcgaaagagagcagggagcggggaaggaaag

SEQ ID NO: 229632 - RNA, 71 nt, Homo sapiens
ggaagacggcccaaaacacagcgcaccacacacagagggaaacggaaagggcaccaaccagaccaaagaga

SEQ ID NO: 229633 - RNA, 59 nt, Homo sapiens
aacggacaaagaccagggaagaaggacagaaaacgggccccagacacaagccccaccaa

SEQ ID NO: 229634 - RNA, 73 nt, Homo sapiens
gggaaacagaggaaaaagcacaagcgaagaccgaagcccaaagcaggagaagacgcagaaaagggccacggaa

SEQ ID NO: 229635 - RNA, 35 nt, Homo sapiens
cggccgcccagaagaaggccaaaacagaagaggca

SEQ ID NO: 229636 - RNA, 83 nt, Homo sapiens
gcaggagcggcggccaggccagacccgaaggccaggagacccgaccccaaggggcaggaaacacagggagagccgcagaggcc

SEQ ID NO: 229637 - RNA, 66 nt, Homo sapiens
cagaggggccaaaagcgccaaagcgacaggagccccgaacaacacgccccagcggagggagaccgg

SEQ ID NO: 229638 - RNA, 61 nt, Homo sapiens
cggcggggacgagcaggaagcgcggcgagcgacaagggccgaacaccaacagaggaagaaa

SEQ ID NO: 229639 - RNA, 55 nt, Homo sapiens
gaaggggacacacgggccacagccggggggggcacagagccccggaagacagccc

SEQ ID NO: 229640 - RNA, 57 nt, Homo sapiens
cgaagcgggcgcgcgcacggcaggacggaggccaggggcggacccaggcaacgggcc

SEQ ID NO: 229641 - RNA, 68 nt, Homo sapiens
aaccggggcgaaccaaccgcaaagcccaaagcgagaaaagagaagagagaccacggccagcgagagga

SEQ ID NO: 229642 - RNA, 83 nt, Homo sapiens
cgagaacggcgggaagagaagacacgagcacaaacgcacgccaaccaccggagaaaagaaaaagccaggaagagacaaacagg

SEQ ID NO: 229643 - RNA, 86 nt, Homo sapiens
cgagacccaccgcaggacccacagagccaaaacagagggagacgagaaaagggccgagcacaagccaagaaggcgccccaaagcag

SEQ ID NO: 229644 - RNA, 68 nt, Homo sapiens
gaaaccccaggacccagacacagggcgagaggcaagacaaaagaaaaccccagacggaaagaggaagc

SEQ ID NO: 229645 - RNA, 76 nt, Homo sapiens
gagaaagccacaccaccaaaacgaaacaaaggaccaaccaagcagggaaaaggggagagaagaaagaaaagacggg

SEQ ID NO: 229646 - RNA, 85 nt, Homo sapiens
aacgccgccacggaaggggcccccggggaggccgacccaccagggacgcggcgcacggcgcggaggggccgagggcaggggggcc

SEQ ID NO: 229647 - RNA, 76 nt, Homo sapiens
gaagcgagggcacgggcggcagcccgagaccgcagcagggacaccagggcggacacggacgcgcggagaggagaag

SEQ ID NO: 229648 - RNA, 116 nt, Homo sapiens
ggcggcacggcgcagccggagggaagcaagacgcgaagccacccagcgccggaggaaccccaaggagcagccccagcccgcaacagcacgcggaccagacagcgacggcgggacgc

SEQ ID NO: 229649 - RNA, 100 nt, Homo sapiens
aggaacccggcccccagggccacggcagcgggcgcggacagagcaagagccccaagggcccaacagcgccaagaaagaggaagaaaaaaccaacaacagc

SEQ ID NO: 229650 - RNA, 58 nt, Homo sapiens
ccccacaagggaagaaccacaggcgggcacggccgagggcagggagcaggagccacgg

SEQ ID NO: 229651 - RNA, 78 nt, Homo sapiens
gcgcagggacccgggacagcggagaggcgcagagacccaaggccagccagccccaggcaccagcggacaggacaggga

SEQ ID NO: 229652 - RNA, 75 nt, Homo sapiens
aggacagcacccggcacgccacggcgccccgcaagccaaaggagccgaacccaaaaagagcagcaccgcgagcga

SEQ ID NO: 229653 - RNA, 87 nt, Homo sapiens
gggcgcggcgccccccccgcgggaagaacgggcccgccggcccgggacaagagaaaaaaagggcgggcgaacaaaaagagcagagga

SEQ ID NO: 229654 - RNA, 69 nt, Homo sapiens
caggagaccagccaagacagcagaacggaagaccccggcaaagccaaggccgacaaaaccggccgggaa

SEQ ID NO: 229655 - RNA, 78 nt, Homo sapiens
cggcagcgggcgggccccgagagcagcagcgggcgggacaccgccacaaaaggaaaagacccccggaagagaccagaa

SEQ ID NO: 229656 - RNA, 52 nt, Homo sapiens
aacgagacccgccacacgaacaaaacaacaggcaaggaagaacagaaagcga

SEQ ID NO: 229657 - RNA, 83 nt, Homo sapiens
ggcgccggcgaccgaggggagagggaacgcagcgaaagcggaacgggcaaggagagccaagcggaccaagaaggcaagagagg

SEQ ID NO: 229658 - RNA, 86 nt, Homo sapiens
cgcagccgccggcaagccgcgaaggaagaccgagccagaggacggagagagggagccagggaagccccaggaaaccccaaagagcc

SEQ ID NO: 229659 - RNA, 74 nt, Homo sapiens
agccgagaaggccgggcgccgagccggaccggagagcacaagccggccacgcggacagaaggcacgggggcccg

SEQ ID NO: 229660 - RNA, 81 nt, Homo sapiens
acaggaagccgaggagagccgaggaggacaccaggagaaaacagggccagacgggaagaaacgagaagggaccaggggcgg

SEQ ID NO: 229661 - RNA, 86 nt, Homo sapiens
ggaccagaagaaacgcaccggaaaggccaccaggagggacaaaacaagagaagcacagggcaaagacacgcaaacccaagaacaag

SEQ ID NO: 229662 - RNA, 59 nt, Homo sapiens
ccaagagcgggaccacaggggcaccacacgcccagacggaagccccagcagagagcgaa

SEQ ID NO: 229663 - RNA, 86 nt, Homo sapiens
ccagccccggcagcgggacccggcgaagacgcgaccgcggcgcgagcaccagggacagagcgaagaaccccccaagaagacgaaac

SEQ ID NO: 229664 - RNA, 71 nt, Homo sapiens
ccccaccccgccgcagaggagcccgcggaccacacgaaggggcagaagagcacaagacggaagagaggagc

SEQ ID NO: 229665 - RNA, 75 nt, Homo sapiens
acggggaccaggcaacagccgccagaaaggcaccaccccaccagaaagaggacccgaagacccagacagcgacag

SEQ ID NO: 229666 - RNA, 81 nt, Homo sapiens
aaggagcggagaagcacggagcgggggaggcacagaagggcggaccgggaccagccagggccacaaggaaaccggccccac

SEQ ID NO: 229667 - RNA, 80 nt, Homo sapiens
caccagcacaagaccacccagaccacaaagcaccccgagacacgacgaggcacagagagcggcggacccgacgccgccag

SEQ ID NO: 229668 - RNA, 82 nt, Homo sapiens
gaacagaccgccggagagaggagggggccggccgggacgcggcccggagccgggaccggaggccgagaggggagcgaagcac

SEQ ID NO: 229669 - RNA, 68 nt, Homo sapiens
agcaaaggaaagaaggaccagcagaagaaagaaccagcagcggcaaaggcggggccggggagcccggg

SEQ ID NO: 229670 - RNA, 81 nt, Homo sapiens
gaacacaaggagacgacggccgcaaggagagaggaaaagaggcccaaagaaggagccacggaaggcccagagcaggcagaa

SEQ ID NO: 229671 - RNA, 80 nt, Homo sapiens
agaccaggaacgcgaaagaaaggggaacaggggccgccaagcccgacacgggagcgcgaggccaggccaacgccgggaag

SEQ ID NO: 229672 - RNA, 54 nt, Homo sapiens
ggaaggggagaaccaaccaggcaccaaggaacggggggccacgacgggccaaag

SEQ ID NO: 229673 - RNA, 61 nt, Homo sapiens
gcaacaggcagagacgccgggacggcagagaacccacaaagaggcgccgagagggagacgg

SEQ ID NO: 229674 - RNA, 78 nt, Homo sapiens
gggaacagcacccacgaggaaccccggccgggcgaagcggggaccaagcaagcaggaggggccagcgagcaggcgccc

SEQ ID NO: 229675 - RNA, 78 nt, Homo sapiens
acaaagaccgggcgacgaggcacagcgcgcaagaagggagcggaagaagagcaccaaaaagaacagaaaagaaaccca

SEQ ID NO: 229676 - RNA, 75 nt, Homo sapiens
cacaaaaaaaaagaggggaaccaccagaacaggccgaagaagcaggaaagcacaaaacgcacaaaagggaaaggg

SEQ ID NO: 229677 - RNA, 53 nt, Homo sapiens
ggcccagcaccccccggcacggggggccccagcccggccgaacgggcgcacga

SEQ ID NO: 229678 - RNA, 79 nt, Homo sapiens
aacaggaagccaccagcacaagaaaagagcaagaggaaaggggggagagacaagcaagcagggggaaaggacaccaagc

SEQ ID NO: 229679 - RNA, 74 nt, Homo sapiens
gcagggaagcccaccgcgcacccgaggaccccaccaacaacggaaagccaagaaaggcagccaggccccggccc

SEQ ID NO: 229680 - RNA, 81 nt, Homo sapiens
gccggagaggggcggcgccgcgcggccgaggaccgggaagggaacgggagacaagaccaaccaagggaccagaggaagcca

SEQ ID NO: 229681 - RNA, 66 nt, Homo sapiens
aaagagaccaggacccccgagacgcggggagccccgagggaaacaaacggagggcccacaaggaag

SEQ ID NO: 229682 - RNA, 82 nt, Homo sapiens
agagggaggcgcagacgggagccgggagccggcaggcgagaaccacgccgacaacggcggaagaggaacgggaacggggaag

SEQ ID NO: 229683 - RNA, 108 nt, Homo sapiens
aagagcgagccagcgcccggagcaagcggagccccccaagagccggaaagagccggggccggacgagaaagccgaaggagacgacggaggagaccggcagagggcacg

SEQ ID NO: 229684 - RNA, 97 nt, Homo sapiens
acggcgacccgccgccgccgaaggcccgcagcaagaaaacccgacaaaaagaagcggaccgcgcgaaacgcccagaaaccaagaagcagcacgccgg

SEQ ID NO: 229685 - RNA, 81 nt, Homo sapiens
cccgaacggccagacccggagacgacccgacgaagcccacgccgggacccagcgcaggggaccaaaagaacccagccaacc

SEQ ID NO: 229686 - RNA, 74 nt, Homo sapiens
caggcagacaagcgggcagagcccgagcgagggccaagaggagcagagcacaacaaggaccagcgcagaagggc

SEQ ID NO: 229687 - RNA, 95 nt, Homo sapiens
ggcgccagaaggaagaggcggacggaggagcaggcgagaagagaagggcggcgacggcggcgcgaggaccgaccgggcccgcggacgaagaaggc

SEQ ID NO: 229688 - RNA, 35 nt, Homo sapiens
acccggcagagagccagaagaagccaaaggcccac

SEQ ID NO: 229689 - RNA, 86 nt, Homo sapiens
cagccccccaggaccacagccccgaccgagagaaccagcgccagaaaacccgcagcccaaagggcagaagaagaagaagacgcaag

SEQ ID NO: 229690 - RNA, 67 nt, Homo sapiens
caaggggggaaggacaaagcacagaagaccaaaccggaccacccaaaaagccgaagacccccaagac

SEQ ID NO: 229691 - RNA, 75 nt, Homo sapiens
cccgccccacccccagccgaggccgccgccgcccccgcgcagccaggagagcggcgagccgaagcacggaagaca

SEQ ID NO: 229692 - RNA, 72 nt, Homo sapiens
ggaccccgcgccgacccaagcacaggcaagagggcaacaagagccaggcaacgaggaccaggaccccagccc

SEQ ID NO: 229693 - RNA, 84 nt, Homo sapiens
cggccgcggacgaagaggcgaccgccagacggagcacacggacagccccgagccccggccccaaagacccaaaacagagacacc

SEQ ID NO: 229694 - RNA, 79 nt, Homo sapiens
acacagcggcagcggaggaacaaacccacagaaacagacacccaggccccagaaccgaacccaagaagaagcagcagaa

SEQ ID NO: 229695 - RNA, 96 nt, Homo sapiens
ggcgcccgggggcgcagggaaggagggcgccgagcaacaaccgccgagcgcgccgcccaagagagagaagagaggcgcgagggcagggaagaggcg

SEQ ID NO: 229696 - RNA, 83 nt, Homo sapiens
gcaggccaagagcacaggcagcgagagaagagcagagggggggacccccgaacccccccacgagcccccaccaccagccagcc

SEQ ID NO: 229697 - RNA, 36 nt, Homo sapiens
gaaagaaggagaagcgaaggagcccggggacgcagc

SEQ ID NO: 229698 - RNA, 73 nt, Homo sapiens
ccggcacccagacaggggcgacggcagaggagccgggaccccaccagcgccggcagggccaaggggcagagcc

SEQ ID NO: 229699 - RNA, 82 nt, Homo sapiens
gagaggacgggaggcccgagaaggaggggagagccacacaccccgaccacgcggccgagaggaaggggacccaggcagccga

SEQ ID NO: 229700 - RNA, 83 nt, Homo sapiens
ggccgcagcagcagagccgcgcagccaggccccaacaaggcgcgggacggccgggcggcggggaggcggaggaccggaggggg

SEQ ID NO: 229701 - RNA, 74 nt, Homo sapiens
gaccggcggcacggcagagacagagacaagagacaggagcaaggcagacgcagcaaagcaaagagcacgaagac

SEQ ID NO: 229702 - RNA, 67 nt, Homo sapiens
gagagaagagcgccgaggaaacagggccaagaaaccagcaccagaaagccccgggaagaagcccagc

SEQ ID NO: 229703 - RNA, 79 nt, Homo sapiens
gcaggcaggaaaacgggagaacacgacaccggcgaggaacggcagaggcggacacgagcgaaccgaaaagagacacgga

SEQ ID NO: 229704 - RNA, 73 nt, Homo sapiens
cacaggaaacggaggagcaacccgaaacgaggacagccggaaacagcgggggggcccaagaccaacacgccca

SEQ ID NO: 229705 - RNA, 80 nt, Homo sapiens
accacaacacgcacacaaacggggacggcagcccaccggcaccaagcccgacggccaggaggcgaagagacgaggaagcc

SEQ ID NO: 229706 - RNA, 54 nt, Homo sapiens
gcagacccaagagcagcggaaaagaccagcacagaggacccaagaagaccagcc

SEQ ID NO: 229707 - RNA, 77 nt, Homo sapiens
ggagggccagcgcacccaagaggggaagaggacgggcaggcggaagcgccagaggagccaccagcccccgaaaacac

SEQ ID NO: 229708 - RNA, 53 nt, Homo sapiens
ggaaagggaagaaggagaacaaaagccaagaaacagaccgcacaccgaggccc

SEQ ID NO: 229709 - RNA, 76 nt, Homo sapiens
gggccgcaggcaggggggacccgcccaaccccgacgccagaagcagcgaaaaagaacacaaaacggcagaaccagc

SEQ ID NO: 229710 - RNA, 68 nt, Homo sapiens
cccaagaaccggccaccggccccacacgaccggccggggggggcacagagccccggaagacagccccc

SEQ ID NO: 229711 - RNA, 82 nt, Homo sapiens
accacacagcagccaaaacgagaagaagaagaaggagaccaggggcccgcccgcgccgcccccggccaccccggcccccggc

SEQ ID NO: 229712 - RNA, 80 nt, Homo sapiens
gggcgcccgagcaccgagcaaaaacgaagcagccaaccgaggacaaggagacccaacaccccggccagacgggccaccag

SEQ ID NO: 229713 - RNA, 69 nt, Homo sapiens
ggcggagaacgcggagagcagcgcagcagacaccagacagcaaccagccgcagaccggcaaagcacagg

SEQ ID NO: 229714 - RNA, 83 nt, Homo sapiens
gacgacccgcgcagacacggaccgcgggccagccgccaaagaccccgccggagagaaggagggggcagagcacggcaggcaga

SEQ ID NO: 229715 - RNA, 80 nt, Homo sapiens
accgagccgacggagccggaggcgggagccgcggcggccgggcaccagcagacggaacaacgagagaaaacggggaaaga

SEQ ID NO: 229716 - RNA, 61 nt, Homo sapiens
accaacgcgggcgcgaccgggagcggaccccggggccgcaggagggaagcgcacggaaacc

SEQ ID NO: 229717 - RNA, 76 nt, Homo sapiens
aagcaaaagcaagcaacaggaaggccgacaccaacggccgcccagccggcagaggcgagacaacccaggcgcggcc

SEQ ID NO: 229718 - RNA, 82 nt, Homo sapiens
ccagaggaagccaaaaaccgcggggaaggggggacgcaagcgccaggaagacccgcgggaggggcgaacggggaagacaggc

SEQ ID NO: 229719 - RNA, 77 nt, Homo sapiens
gaggaaggaacaagggaaccgagcgagcaggccaacaaagcccaagcaggggaaggcgaagcacgacagcacggcca

SEQ ID NO: 229720 - RNA, 75 nt, Homo sapiens
ggcgggaacccgaagaagaccaccgggagagagggaaaaaacaaccccgccgggacgaggaaaagaggcaccaaa

SEQ ID NO: 229721 - RNA, 73 nt, Homo sapiens
ccagccaggaggcgccgagagacgcaagagggggcccgcaagaccagcggagagcccgcagagcaggcagaca

SEQ ID NO: 229722 - RNA, 74 nt, Homo sapiens
acaagacgcccaccccacaagggcccggccccaccaaaccgggccagaaagcgagcgacggaacacaaacaggc

SEQ ID NO: 229723 - RNA, 36 nt, Homo sapiens
agcgaggacagaaggaaggccgcagaggggacgaac

SEQ ID NO: 229724 - RNA, 80 nt, Homo sapiens
cgaagcgccgccggccccgccgccaagaggagcgagcggacccgcgaggcacagaggacccgaaaccggagagcaccgcg

SEQ ID NO: 229725 - RNA, 107 nt, Homo sapiens
acggacgagaacgccacggaccaaagcggagagagaggagaaaaggccaacaaagcccaagcaggggaaggcgaagcacgacagcacggccagaggaacccaagcac

SEQ ID NO: 229726 - RNA, 78 nt, Homo sapiens
acgccaaggccgcaagagagcacgagaaagagccagagccggaaggaaccaacggacccaaaaaacaaggaggaaagg

SEQ ID NO: 229727 - RNA, 49 nt, Homo sapiens
ccaaagaagggagagagggcccagaccaagccccaccaacagaagagcc

SEQ ID NO: 229728 - RNA, 79 nt, Homo sapiens
cggcggagggggggcaccaggagccgggggggcgagcccgccgagagcgccaaggaggagacaacgggggaagaagaag

SEQ ID NO: 229729 - RNA, 64 nt, Homo sapiens
ggagcagggagcccaaagaccccggagacagagcggccacagcaggaccacaggagcagggcca

SEQ ID NO: 229730 - RNA, 69 nt, Homo sapiens
aacgaagcaagagaagaagagaacagaaagaaaacaggcgccaccacgacagagacccccacccgggaa

SEQ ID NO: 229731 - RNA, 81 nt, Homo sapiens
gccgcgaacggaggcgagggagccccgcggacgaggaaagccggccaggcagaaccacgagcccagccaaggccgcacaag

SEQ ID NO: 229732 - RNA, 66 nt, Homo sapiens
cgaccggcgaggcccaccaagccagaccacaaggccccacgagcggagaaacaggcaaggacaggc

SEQ ID NO: 229733 - RNA, 80 nt, Homo sapiens
cacagcgggcgacagccacgaggccagggcggggagcccggaccgcagcgccggcgaggggagggaagccgggcgccaag

SEQ ID NO: 229734 - RNA, 79 nt, Homo sapiens
ggcggcggcagcgacggcagcggcggcggcggacaaacaggcaccgcaggaaggaagacccacaagagaccacgcagag

SEQ ID NO: 229735 - RNA, 61 nt, Homo sapiens
gcaaggagcacacaccagaaaccagggcaccccagacaggagcacccaacaccgggaagag

SEQ ID NO: 229736 - RNA, 77 nt, Homo sapiens
aagacaccgcacagggcagaggccggcgaccagaagcggaaacgaacaaagagccagacgcgaagaagagacaaaag

SEQ ID NO: 229737 - RNA, 61 nt, Homo sapiens
cagcaccggaccagcggagcggccgaacagacaggaaggaggggaaagaaaaagaagaaaa

SEQ ID NO: 229738 - RNA, 81 nt, Homo sapiens
gcagggaaaagacagagaagaagaccccgagacacagaaaagcccacgaggaaaaacggccaacaaaaacacagcgcagac

SEQ ID NO: 229739 - RNA, 75 nt, Homo sapiens
ggccgggcgccaccccaaaccaggaaagacagccccccagaccggccggaccaccaggcacgaccacgcacagcc

SEQ ID NO: 229740 - RNA, 85 nt, Homo sapiens
ccgcaccgggaccggagaggaagcggagcccagccaacaggcaaggccccggggcaccagccgagggacaacgggcgccggagga

SEQ ID NO: 229741 - RNA, 69 nt, Homo sapiens
ggaagaggggaagagacagaggaagagaagaggaggacaggaaacaaagagccccgggaaaagaaaaaa

SEQ ID NO: 229742 - RNA, 73 nt, Homo sapiens
ccagagggggggggaagcaccagcagaaggcgaggagggaagccaacagaccacaaagcaggcagcaagcccc

SEQ ID NO: 229743 - RNA, 78 nt, Homo sapiens
caaggggcgggcgccggagccgacgccgggaacccgccgcgcgccgcgaccccaagcaggaaacccaccagagaaggc

SEQ ID NO: 229744 - RNA, 72 nt, Homo sapiens
ccgaccacacaaagacaaaagggaaaacccagaaaccaccgcaccggacaacgccaggagacaagcccaagc

SEQ ID NO: 229745 - RNA, 52 nt, Homo sapiens
gggcgggccggaggcgacagacacggccgagacgccacaagccccaagaacc

SEQ ID NO: 229746 - RNA, 75 nt, Homo sapiens
cggggggagacggcgcggccggaagaagaggcggcacaacaccggcaaacgcgccccgcgggcgcacaagcacag

SEQ ID NO: 229747 - RNA, 72 nt, Homo sapiens
cgaaaaacaaccaacagagacccgccgaaaaggaaggaaaggaaacagaaggaaggcacacaggaaaaggcg

SEQ ID NO: 229748 - RNA, 64 nt, Homo sapiens
cccgcccggacggccggagccaggcccaagacgggggaggaggggaggccaaagagcagagccg

SEQ ID NO: 229749 - RNA, 86 nt, Homo sapiens
agcgacccgcgcaaggagaagcgcacgacgggaccacaaggcccgcaggaggaagaaaaaagcgggcacgggcagcacaaagccgg

SEQ ID NO: 229750 - RNA, 81 nt, Homo sapiens
aagcagaagcgcccgcgaggcccgcgccaaggggggcccaccggacaggcaaaacagagggcagcagacaaccaacacacc

SEQ ID NO: 229751 - RNA, 73 nt, Homo sapiens
acccagaccgaggcgacccacgaagcaaccgggagagaccagcggcaggccgccaagccagacgaacaggcga

SEQ ID NO: 229752 - RNA, 120 nt, Homo sapiens
aggggaagcgccacccgagcaggcaggacgaggggaagacacccgccggaacccaaggcacagggagcggaagcgagcaccccagcgagaggcccgccggggagccgagggccaccaccc

SEQ ID NO: 229753 - RNA, 67 nt, Homo sapiens
ccacggaaaaaacaacccaaagcgcacacacagggaacaggacgccagacgaaaggaaaggcgcaca

SEQ ID NO: 229754 - RNA, 77 nt, Homo sapiens
gcaacgcggcgggcgagacgccagggagcgcagggagaaagcgaaacaggcaagagagcgccaggccagacaggccc

SEQ ID NO: 229755 - RNA, 47 nt, Homo sapiens
aacggacccaacagagcacgcaaaggaaccccaggaccccagcgaac

SEQ ID NO: 229756 - RNA, 92 nt, Homo sapiens
ggccccgagcagggggggggggaagccgcagcggaaagcaggagcacagggaagagagggcagaaccacagacaccaacaggagaggcggag

SEQ ID NO: 229757 - RNA, 79 nt, Homo sapiens
agggacccacagccccgggccgccgcacccaccaggaaggcccgccaaggacccaaacacgccaacacgacgcacagac

SEQ ID NO: 229758 - RNA, 68 nt, Homo sapiens
accggcgccccggcgcgaagaggcggaccggacggccgaggaagcaaggagcgcgaagcagggcccgg

SEQ ID NO: 229759 - RNA, 84 nt, Homo sapiens
aaagagcagaagaaagaagcaaaggaaaagagaaaaaggcgaggcccagaaaggggagaaacacagagaccacaaggaaaggag

SEQ ID NO: 229760 - RNA, 38 nt, Homo sapiens
gcaaagggcgaaagcaccgaagaaacgaaaagagaaag

SEQ ID NO: 229761 - RNA, 71 nt, Homo sapiens
gggcaaacgaaggaagagcagcaaaggaagagaggaaccaacagcagaacaagaaaagagccaaaccaggc

SEQ ID NO: 229762 - RNA, 69 nt, Homo sapiens
aagagggccacagaccaggggagaaggaaccgacagaaaagccaaacgagccgggcgagaaagcccccc

SEQ ID NO: 229763 - RNA, 64 nt, Homo sapiens
aacagaagccaccgcaaaaaacgccaaggacagggcaacacgaagacggagacagacaccagac

SEQ ID NO: 229764 - RNA, 86 nt, Homo sapiens
cccacccgagagccgcgagcgcccggccgaacccgcgaggaaaagcccagcggcccgccaggcccgaagacgaccccgacgcaggc

SEQ ID NO: 229765 - RNA, 79 nt, Homo sapiens
gccccagccagccccacagcaaacaggcaacaccaccgagaacggggaaaaagacggccgacacaagccgggggccggg

SEQ ID NO: 229766 - RNA, 77 nt, Homo sapiens
agacgggaccagcaagccgagaaagggaggcggaacaggccgaaagaagcaggagccaggaaaacagaaagggcccc

SEQ ID NO: 229767 - RNA, 71 nt, Homo sapiens
ccgagaaccccgcacggcggcggcccgcaccccgccccccgaccacccagcgggcgggaaagaagcaagaa

SEQ ID NO: 229768 - RNA, 70 nt, Homo sapiens
gcaggagcaaccaccagggacacaggaacgaacagcaaagcggagcaagaaacaaacggggacgacggga

SEQ ID NO: 229769 - RNA, 74 nt, Homo sapiens
cagaggaaagccggagaaagaagaaggggagaagccccccgcggggaagaaccgggacggcgcgcagaccccgg

SEQ ID NO: 229770 - RNA, 90 nt, Homo sapiens
agccaccggcgggccccgacggcgacgaggacgaacagcggggacgccccagcagaccgcccaggagaggaaagcaggaggaaagaccac

SEQ ID NO: 229771 - RNA, 38 nt, Homo sapiens
ccccgggcacccgcagccagcagccagccggggagcca

SEQ ID NO: 229772 - RNA, 58 nt, Homo sapiens
ggaagccagggcagagagaaacaagagcacccaggccggaacgcgcgccacccggcag

SEQ ID NO: 229773 - RNA, 51 nt, Homo sapiens
gcagggagaaggaagaaccggcgggaaaacggcacaaggcgacgagggagg

SEQ ID NO: 229774 - RNA, 80 nt, Homo sapiens
gaagggcacccgaggagcagaacaccagagagcagcagccagccaagcgagggcggcgacggcggcgcgaggaccgaccg

SEQ ID NO: 229775 - RNA, 69 nt, Homo sapiens
caggaaaacaaagcagccaacagacaccaggaagagcaaacagaacaaaaacaagaaaagcgacagagg

SEQ ID NO: 229776 - RNA, 62 nt, Homo sapiens
ggaggggacgaagaacgggaaccacggaaggagggggcgacacacaagcaggggggaccgac

SEQ ID NO: 229777 - RNA, 87 nt, Homo sapiens
ggcaggaaacaagccagccaagcagccgcacaaagacagcgaggacagacagcgcaggacagccagaccagcccgacgcgcgcacac

SEQ ID NO: 229778 - RNA, 74 nt, Homo sapiens
ccagggacgccagcagcaaaagaaaaacggcagcagccaagcacgcaaccaagagggaaggagacagggaagca

SEQ ID NO: 229779 - RNA, 48 nt, Homo sapiens
gaggacacgccccacaccccagaaccacggggacaggcacaaggcagc

SEQ ID NO: 229780 - RNA, 60 nt, Homo sapiens
gacccaggccacgccgagccgccaggcagcaggacggagagcaccggaagagcgacacag

SEQ ID NO: 229781 - RNA, 66 nt, Homo sapiens
gccgcggccggccacgcggagggcacagaaggaaggaaaccaccaccggacacggcaagacgagaa

SEQ ID NO: 229782 - RNA, 75 nt, Homo sapiens
ccgggccagccacagcaccccgaagggccagcagaagggaagcaccaaaaaaagaccagaagaaggaccgaagcg

SEQ ID NO: 229783 - RNA, 81 nt, Homo sapiens
gcaggagggagaccacagcaagacgccaggacccacggaagccagaaaggagccaaaaaccgaacacccggaaggggacaa

SEQ ID NO: 229784 - RNA, 71 nt, Homo sapiens
ggagcgaccagagcaggcgggcgccaggcccagcagcccagaaggacccagagaaaacaagccgacagaag

SEQ ID NO: 229785 - RNA, 68 nt, Homo sapiens
ccgcagccggcagacaaagacagcgcccaaagacgaagaagagagaaggggcaagaaaggaagagaac

SEQ ID NO: 229786 - RNA, 71 nt, Homo sapiens
gccgaccgaagccgcaaaagcagccaaggccgaaacaacgaacaaggacggaccaacgaggagcaagaaac

SEQ ID NO: 229787 - RNA, 83 nt, Homo sapiens
ggcagaccggagccagaagcacagaccccaaacgaggccagaccagccagcgcggggaagcagccgcggggagccagggcagg

SEQ ID NO: 229788 - RNA, 84 nt, Homo sapiens
gaccagacgcggagccaggccgaggggcggacgcggccggccaccagcgggcccccacggagggcagcaaggggacggggaacc

SEQ ID NO: 229789 - RNA, 55 nt, Homo sapiens
cccgcgcggcgcggggaccgcggcccgccacgcaaacaaccacagggaacaaaga

SEQ ID NO: 229790 - RNA, 74 nt, Homo sapiens
gagccaaagaacaaggagagggcaggcgagggggggccaacccacagagcgaaaacccggccacacacggcaca

SEQ ID NO: 229791 - RNA, 72 nt, Homo sapiens
aaccacaaggaggaaaggacagggaagcggaaagcaccagggcaaaagacggacaccagcaccccccaaacc

SEQ ID NO: 229792 - RNA, 54 nt, Homo sapiens
agggggacacgacccggagcacccgaccccgaaacggccgagcgaccaggagag

SEQ ID NO: 229793 - RNA, 65 nt, Homo sapiens
gccgaccgaggaacggcagcagcggcccagcggaagaacgccgcagagagcagagagaggggcca

SEQ ID NO: 229794 - RNA, 56 nt, Homo sapiens
cacaccggaaccgcgggagccgaaggaggaagccagcccgagcaggcccaggggag

SEQ ID NO: 229795 - RNA, 53 nt, Homo sapiens
cagcaagaagcagaagaaggcaccaagcgggaggcagggggaggacagggccg

SEQ ID NO: 229796 - RNA, 69 nt, Homo sapiens
ggacgcgcgcgaggggcgacggggagaaggaaacccaaccggaacccacacccggggaaaggaggagga

SEQ ID NO: 229797 - RNA, 53 nt, Homo sapiens
gcggcgggacgccacaggcgggaaggaacaccaaggcccagcacgacagagac

SEQ ID NO: 229798 - RNA, 76 nt, Homo sapiens
cacagccagaagaccgaagcgcgacggaagaaaagaaacgaagccgggcacggacaggacagagaaagcaggcgcc

SEQ ID NO: 229799 - RNA, 36 nt, Homo sapiens
gccagggcacggccgggacggcaagaacggaagcac

SEQ ID NO: 229800 - RNA, 78 nt, Homo sapiens
gaaacagaagcaacagcagaacaagaagacaagagcaaaagcccccccaccagagccaggcgacagggcgcggcgccc

SEQ ID NO: 229801 - RNA, 85 nt, Homo sapiens
aaagaagagagccaacgaaaggaagagggagcagagcaagaaaaaaaggaagacgagaccaggaagagccagggacggagagaaa

SEQ ID NO: 229802 - RNA, 70 nt, Homo sapiens
cggaaaccggagcgcgcagcaggacaaccaggggaaagcacgggacgagagaagggaaaaacaagagagg

SEQ ID NO: 229803 - RNA, 70 nt, Homo sapiens
cacacgcggagaagagacaaacggacagcccagaaaagaagggaccagaggcgccgaacggcgacagcgg

SEQ ID NO: 229804 - RNA, 76 nt, Homo sapiens
ggagaaggaccaagaaccagcggcggagaaaccaccacaaacacgaggccagcaacgaccaacaagacagacccgc

SEQ ID NO: 229805 - RNA, 72 nt, Homo sapiens
gggcaacccggagcaaccccccaggacgggcggaggcggggggaccggcgggcggggggacggcgcgaagaa

SEQ ID NO: 229806 - RNA, 77 nt, Homo sapiens
aacaaacaacagggacacagaaaacagagagggggaaacccgaaaaagaagcgaagagacaagcagaagggaaaaaa

SEQ ID NO: 229807 - RNA, 83 nt, Homo sapiens
gcggagcggacgccgcgacgggggcccgcgaggcgggcagccggggcgccagacggaaaggagagcggacccaccgaccaagc

SEQ ID NO: 229808 - RNA, 79 nt, Homo sapiens
ccgacgccacgaagaacagcagcaagaccccccgggaaccacccgcgcccccagccccacaggagacaggaccgaagca

SEQ ID NO: 229809 - RNA, 83 nt, Homo sapiens
accgccgcgccaggccacacccacccaggaggcccggcaccaccggagcccggagaacgccacgaggacaagcagaaaccaag

SEQ ID NO: 229810 - RNA, 72 nt, Homo sapiens
ggggccggcacccccaggggcaaggccacgcccgcaacgagccggggcaggaacagaagcgcaccgagaccc

SEQ ID NO: 229811 - RNA, 80 nt, Homo sapiens
gcaggacccagacccccccccgagaccggaagagaaagagcaggaaacagagcaaagcagcgacaacaaagacagaggaa

SEQ ID NO: 229812 - RNA, 74 nt, Homo sapiens
cagaaacacagccagccagacccaagagagaaaagccaagggacaccgaaaagcaaagggagaggacacacgag

SEQ ID NO: 229813 - RNA, 73 nt, Homo sapiens
gaggacaggcagaccgcaaacaccaccaggcagggaccaacgcgggggacgagagaaaagggaagggcagcag

SEQ ID NO: 229814 - RNA, 69 nt, Homo sapiens
gcaaaagacgccaaagagagcaccagccgcccgaggggccaaaggaaaaggaaggaaaaccacagcaac

SEQ ID NO: 229815 - RNA, 77 nt, Homo sapiens
gccgagggccgggagcccgcaccgggccggcaggcgaggcgaggggccccgaaccgaggaccagcgggaagaagagc

SEQ ID NO: 229816 - RNA, 80 nt, Homo sapiens
gaggagaagcaagaaggcccggacacagcaaaccgggccacaggaacaaggcgcgccagggcacagggagcagccgaaga

SEQ ID NO: 229817 - RNA, 85 nt, Homo sapiens
gccccggcacagcacgggcggcccagcgcgcccgcccagcagacgcgagcagaacagcccgggcccccacagcccagcccaaagc

SEQ ID NO: 229818 - RNA, 76 nt, Homo sapiens
aaagaaaagcacagagaacaggaacggacaaggcagggcaaacggagagcaggagccacaggaaagagcagaacca

SEQ ID NO: 229819 - RNA, 81 nt, Homo sapiens
gcgacccgaacccaaaggaggaaacagcggcaagccacagacgggaaccaggagccgacaacaacccgacgcaaggcagcc

SEQ ID NO: 229820 - RNA, 68 nt, Homo sapiens
gcgcgaagcacgacacgggggcccaagggaccacaaaacggaggagagaggaaccagaagagaaagaa

SEQ ID NO: 229821 - RNA, 72 nt, Homo sapiens
aagacaaggacccaggaggaggagagggcaacaaaacccacaggagaccggaaacgagagaaacgaagacga

SEQ ID NO: 229822 - RNA, 76 nt, Homo sapiens
cgggagaaaaaggaaaacgcggaaaaccgacacaacagggagagcaggaggagaccaaacaccagacggaggccgg

SEQ ID NO: 229823 - RNA, 47 nt, Homo sapiens
ggagaaggaccaagaaccagggaggaagaggggcgacagacccaggg

SEQ ID NO: 229824 - RNA, 92 nt, Homo sapiens
gcagggaccacagcaccgaaaacaccaggaaagacaggagaccaaaaagggccgccagcagacagccggcacacaggcacaagggcggagcc

SEQ ID NO: 229825 - RNA, 65 nt, Homo sapiens
ggaaaaacccaccagcagcaaagagcaaccaggagagagagaaacggagaaacccgcgacgaacc

SEQ ID NO: 229826 - RNA, 74 nt, Homo sapiens
cgcacacgggggcggacaccacaagaagggcgccaggccagagaaacaccaaaacacgagaacaaacgcgcacc

SEQ ID NO: 229827 - RNA, 88 nt, Homo sapiens
gcacagcgcgggagagccgggaccggccgggaagcggccaccgacacgcagcagcggccaggcccagaaggggaagacccccagcgaa

SEQ ID NO: 229828 - RNA, 67 nt, Homo sapiens
ccgccgaagcgaccccaacgagacaaagcgccccgacaagggaccgggcgggccccgcaggaaaccc

SEQ ID NO: 229829 - RNA, 86 nt, Homo sapiens
acgcgcgcaggcgcgcagaaaggaagacgagggaacgagagggcacggggcccccaccacagcaccaggagacaaagccacaaaaa

SEQ ID NO: 229830 - RNA, 83 nt, Homo sapiens
cgcggcagggagcgcgggggcccgcgcagcagcgaccacgggaggcggaaccaacccccggccagggaggggccgggggacga

SEQ ID NO: 229831 - RNA, 75 nt, Homo sapiens
ccgcgccgccgcccacaagcggcgccgcgccccggccgcacggggaagaaaacgccagagaagcagagcagcccg

SEQ ID NO: 229832 - RNA, 72 nt, Homo sapiens
ggcgaggcgggggcaggcggagaaggagacaccggaggacgaagagggggagaccacgacaaaacacacgaa

SEQ ID NO: 229833 - RNA, 67 nt, Homo sapiens
cggaaagcaggagcacagggcaggagggaacccggcgcaaccgcacccacgaagacacaaagagaag

SEQ ID NO: 229834 - RNA, 80 nt, Homo sapiens
ccaaccagcggggcgaaaaacgggaaggagaagcaggagcacgcaggaggcacaaggagacagggaaacgaaaaccaccg

SEQ ID NO: 229835 - RNA, 67 nt, Homo sapiens
ggggaccaccgccccagcagacgcggaagggggccgccccgggggcccagacaacgaccgaagaaag

SEQ ID NO: 229836 - RNA, 79 nt, Homo sapiens
cggacagcaaggaaccccgggggacgaccaccagccaggccggggacaaacaggcaaccgacggggaggggcaagggca

SEQ ID NO: 229837 - RNA, 76 nt, Homo sapiens
accaagcaagagcgaccggaggcccgagaagaagacaagagacacagcaagacaaggcccagacccagccggaccg

SEQ ID NO: 229838 - RNA, 53 nt, Homo sapiens
ccaccacgaggggggacgcggagcagccagcaggcagaaggaggcgaggagga

SEQ ID NO: 229839 - RNA, 132 nt, Homo sapiens
cgagcggggcagaccacgagccaagaagagagcaaaacccaagaacagggagaagagacgacaacccacggcagggcaaccccaccgcggaaggcaggcacacagacgagaacagagaggacccgagacggg

SEQ ID NO: 229840 - RNA, 69 nt, Homo sapiens
agacacgggacaaaaaccaaagagagaggaaaacgagacagcccacccaccgccccgcagagaagacgg

SEQ ID NO: 229841 - RNA, 54 nt, Homo sapiens
aaggaccaagaaccagaagagagcaaaaaccgaccaggaccccaaggccgcaga

SEQ ID NO: 229842 - RNA, 72 nt, Homo sapiens
ccagaaccaaagggaaggcagcacgggggcagggcaaaacacacagcgaggaaggagggccggccagggaag

SEQ ID NO: 229843 - RNA, 70 nt, Homo sapiens
agcggaaaaacacagagggcacacggcacagaccaggggagccaggacaggagaggaaaaccaagcggaa

SEQ ID NO: 229844 - RNA, 79 nt, Homo sapiens
caaaagggcccccacggggaggaagaccggagccaaagaggccaccgacaggaaaagccggaaacgaaacagcgcagcc

SEQ ID NO: 229845 - RNA, 59 nt, Homo sapiens
aaaagagagagagagagaggaagaacaggggacccaggaggcagcggcaggcaagagcc

SEQ ID NO: 229846 - RNA, 77 nt, Homo sapiens
acagcgcccgacgcgcaggccggcacgagcccgagagggggggccccagcccggccgaacgggcgcacgacacaaac

SEQ ID NO: 229847 - RNA, 70 nt, Homo sapiens
agccggacgaagaagacggaaccggaaggggacagcgcacacggcaaggcaagcgagggagaggcgacga

SEQ ID NO: 229848 - RNA, 63 nt, Homo sapiens
cgcgacgagcaacccagcgccgaagaccccggaggaaaagcggaagcggcagcggcgaacgcc

SEQ ID NO: 229849 - RNA, 80 nt, Homo sapiens
acccccaccagggaccaccggggaaacagcagcaccaaaacgaggacagagagcaacgccacccagccgccgaccagcgg

SEQ ID NO: 229850 - RNA, 35 nt, Homo sapiens
aaaccgccgaagacgaaggcagacccgcagaccaa

SEQ ID NO: 229851 - RNA, 72 nt, Homo sapiens
aaacccggcagacagaagaaaggggagggaacccaacagagcccggaggcagaggcgccacaccacgcaaag

SEQ ID NO: 229852 - RNA, 61 nt, Homo sapiens
ggcggcgagccagaccaagcgaagagcgcggagacagcccggggggggaaagacagaggag

SEQ ID NO: 229853 - RNA, 50 nt, Homo sapiens
ggcgacgaaaagcgggcgccaacaagggcagggggccagggcagccaggg

SEQ ID NO: 229854 - RNA, 125 nt, Homo sapiens
ccgcccccgccgccggggacagcaaccccggaggccggaggaacgggcccgcaagcgcgccgacagggggcacccgaggaggaagagggcagggcccacggaaagaagggaaacccggggagaaa

SEQ ID NO: 229855 - RNA, 57 nt, Homo sapiens
cgacgcgcggaggagaagagacccggggaggcaggaaaccccccaggcaagaggcgc

SEQ ID NO: 229856 - RNA, 73 nt, Homo sapiens
gaccccaaagggcaggcaccagaagcaaacaacacccaacagcccaaagcaaaggagcaacagcccaggagaa

SEQ ID NO: 229857 - RNA, 110 nt, Homo sapiens
agggccagcaacggagaccgcagaaagacagagcacgaaaggcaacgcgggcccaccggacggaaagcagaagagaaggaagaggagacaaaacgccgcgaagccgaacc

SEQ ID NO: 229858 - RNA, 72 nt, Homo sapiens
gcccgggcaggggagagagcgcccgggcagccagaacgagggacgccggacgaccacagagcgcagccggga

SEQ ID NO: 229859 - RNA, 33 nt, Homo sapiens
agggggaacgggaggggggcacccgaagacagg

SEQ ID NO: 229860 - RNA, 75 nt, Homo sapiens
cgccggacgcccccccgcagcgccgagagacgccccaccaggcacagcgcggcagaccagggaaggggaaagaca

SEQ ID NO: 229861 - RNA, 72 nt, Homo sapiens
caaaccgcacgacacaggaaaggacaaaaccagaagcaggggcccagcaggcgcagcagcaagagggaaaaa

SEQ ID NO: 229862 - RNA, 81 nt, Homo sapiens
acaagacgcccaccccacaagggcccggccccaccaaaccggggcgggagaccagggccagcccggccacaccccaggcgg

SEQ ID NO: 229863 - RNA, 54 nt, Homo sapiens
accacccagaggagcaacagagcacgcgcccaggcggaggcaaggcgcgaccgg

SEQ ID NO: 229864 - RNA, 71 nt, Homo sapiens
acgaggccccagccgaacaagggaaggacaacagcaaggacagcaccaagggaggagcgcacgacgggaac

SEQ ID NO: 229865 - RNA, 62 nt, Homo sapiens
ggcagcgaaggggaagaggaggagaagcccagcccgcaaaggccagcagcagggacgcacca

SEQ ID NO: 229866 - RNA, 77 nt, Homo sapiens
cggggagccggcccaagcggacacgagaggcgagggacgacagagcaagcggcagagggcaagcgggaaaaagacca

SEQ ID NO: 229867 - RNA, 69 nt, Homo sapiens
gagcccgcgcccgccgcgggagagaggacccccccccccccccaaggacagggggacagcagcaccaga

SEQ ID NO: 229868 - RNA, 73 nt, Homo sapiens
gagaagcagacggaaagaagagagaggaacagcaaaaagaccaagacacccaggagaaagacagcggggaaaa

SEQ ID NO: 229869 - RNA, 106 nt, Homo sapiens
cccgccagggggaggacgaagacacgcccagcagggagcggaggagccagacagaggaacagagcgaaggcggaacggagcagcggcgccgggggagaccaggaag

SEQ ID NO: 229870 - RNA, 74 nt, Homo sapiens
aagaagaacagccccagaaaggaagaagcgaaaagcaaaaaacggcaagagggaaacccccggaaacagggccg

SEQ ID NO: 229871 - RNA, 71 nt, Homo sapiens
acccgggagccgccggcaccgccggaaccggcgcaggggaaccagaagaggccaaccagcacgaacgccag

SEQ ID NO: 229872 - RNA, 79 nt, Homo sapiens
cgccgccgccaccgccggggccgcgccggaggaggagacggaggagaccgacggaggagacagacccagcacggacccc

SEQ ID NO: 229873 - RNA, 115 nt, Homo sapiens
gcacgcccccggccccgacggggcgggggccccagccccacagaccagcccagcacagaaagccaacgcgggcgcaagaggagccaggaggagagcccacagggcaaagagagca

SEQ ID NO: 229874 - RNA, 54 nt, Homo sapiens
ccagggagaagccgcccgaacaccagaacggcgcacgaccccagagccgcccaa

SEQ ID NO: 229875 - RNA, 77 nt, Homo sapiens
ggagacgagaggacgggaccaggcgaagcggccgagcaggcgagcgaacgacggcacacagagaaaaaaagggaaca

SEQ ID NO: 229876 - RNA, 67 nt, Homo sapiens
ggaagggcccaaagccagaaggcaggcagcggaagagaaagaccgaggcaaagaagcaggagcacac

SEQ ID NO: 229877 - RNA, 87 nt, Homo sapiens
gcggcagaccagggcccacgaagacgaaaccacggccacagcacagcaaagccacaacacccaggaggcccccggaaggagaagcac

SEQ ID NO: 229878 - RNA, 77 nt, Homo sapiens
gaagaaagaagagacgccaagcgaccaaacaaaagagagaaaaaccggacccaagcacaaggccaacagccccccca

SEQ ID NO: 229879 - RNA, 75 nt, Homo sapiens
aaacaggaacacacacaacgcacaaggagcggcgcacaccccgggggggagcagaccgcaccgggccagggcggg

SEQ ID NO: 229880 - RNA, 53 nt, Homo sapiens
gccgcggagccgggggcagccagaccagacccaggggccaccgagcggaaagg

SEQ ID NO: 229881 - RNA, 56 nt, Homo sapiens
agcagagggggaagaaaaacagaggagcaaagacgagagaagaagaaggaggccgc

SEQ ID NO: 229882 - RNA, 85 nt, Homo sapiens
acaggaagaacagaagagaccggcccacagcaccccagcccagcaaaccaagaggagccaccggaagagaccgcagcccagcaag

SEQ ID NO: 229883 - RNA, 53 nt, Homo sapiens
gccccgaagagcgggaacagaggagcgccggcccaggcggaagcaaggcagac

SEQ ID NO: 229884 - RNA, 85 nt, Homo sapiens
aacggcgacccaagaagcagcccacgaaaggcagccgcggacgccgcgccagcgacaaacaaggaccccggcccagcacggccac

SEQ ID NO: 229885 - RNA, 74 nt, Homo sapiens
aacgccagcagaaacagaaaaacagacgcaggagagaaggacggagaagcgaaagccagaccggcaagagcgga

SEQ ID NO: 229886 - RNA, 75 nt, Homo sapiens
cgaccggcaccagcaagcaagaaaggaggaggaagaaacaagcaagaaaaacagccgcagaaagcaccaaaaagc

SEQ ID NO: 229887 - RNA, 85 nt, Homo sapiens
cgggggcgccagcccaccaagaagggccgagcacagcaagcaaaaacccgagaggagcaggagcaaccgacaggcgggccggaca

SEQ ID NO: 229888 - RNA, 91 nt, Homo sapiens
cgacacaggcccaggaggacgacgggaccgggaccgcgcggacccggccgggagaagcagcagcgcaagagcaaggcccaagcacaagcag

SEQ ID NO: 229889 - RNA, 79 nt, Homo sapiens
cgccccaggaacgccgggaaagggcccaaaacacaccaggacaaaacaggccacaccagcgccacgcacagcaacaacg

SEQ ID NO: 229890 - RNA, 87 nt, Homo sapiens
ggcgccaaggggagcagaaggaccggacacaggagcagaagcgccagcgcagaccagccaggaggccgggagaagaaggggagcgca

SEQ ID NO: 229891 - RNA, 67 nt, Homo sapiens
ccaccagcagcgcaaggcgcccgccgccagcaagaccgcaaacaagcaagagaaaaaaacaagaaga

SEQ ID NO: 229892 - RNA, 74 nt, Homo sapiens
gacgcgcccacaggcccgggaggagccggacacaaagaagagcccgggccccccagggccgggcgacgcccagg

SEQ ID NO: 229893 - RNA, 81 nt, Homo sapiens
aagccgaaaaagcgcccgagacgggcccgccgaaaggaggagccgaggaaggcgccaccacgaccgccgaaccggaaggca

SEQ ID NO: 229894 - RNA, 79 nt, Homo sapiens
acggacacccagcggcgacacgcgacgcgccaaaacccgcccggaaaggggacaccggcagcgggccccaggccggggc

SEQ ID NO: 229895 - RNA, 84 nt, Homo sapiens
cggagcagagcagggacccaggacaagggccgccagggaggcacccaccaggggccaggccggaggcagagggcaagccgcggg

SEQ ID NO: 229896 - RNA, 85 nt, Homo sapiens
cggcgccgcgcccaggagggagggacacagccccaaacaggacgaaggcggcgaagggaaacacaaagaagacaccagaagggcc

SEQ ID NO: 229897 - RNA, 79 nt, Homo sapiens
caaaaccccagcggcagaacgcacagagggagagcagggggagaaaggggagaagcccgacagagaaaggagaaaaggc

SEQ ID NO: 229898 - RNA, 95 nt, Homo sapiens
ggcaccgcgggcgcaagcgcaaccgcgggggcggggacggcgccgagagaccccggcaagagccgcgacgagcgccaacccgggcgccagggccc

SEQ ID NO: 229899 - RNA, 77 nt, Homo sapiens
acacccagcagggagcagcccacaccgaaccagagagcggacggacaagagaaagaaagagaagagagccgaagaca

SEQ ID NO: 229900 - RNA, 111 nt, Homo sapiens
cacagacaggaaggacaaaaggcagcaaaggggcagcacgaaccaagcggagacagccaggacgcacaagaggacgaggaacgcggaggaggaaagaggaagccagacacc

SEQ ID NO: 229901 - RNA, 65 nt, Homo sapiens
aacaacccgggacagaccagaacaaacggaaacaagacagacgaagaaggaaaagcgaacagaac

SEQ ID NO: 229902 - RNA, 70 nt, Homo sapiens
gaaaccgcccgaaaacggagaagcagaccgcgggcagaggggacggcaacccagcaacacgaaccacaac

SEQ ID NO: 229903 - RNA, 69 nt, Homo sapiens
gaccaaaaagaacacaccaaaagagcagagaagcaaaaggaaagaccacagcaagaccacgcccccagc

SEQ ID NO: 229904 - RNA, 32 nt, Homo sapiens
acaccaaaccaacaccagcaccgaacccagac

SEQ ID NO: 229905 - RNA, 79 nt, Homo sapiens
cccagcccggggcgcacgccacccgggcaaccggccccacggagaccacgggcccggaggcaccacccccccccaccac

SEQ ID NO: 229906 - RNA, 63 nt, Homo sapiens
ccaggcgacccgacgggccaccgcaggaggcaaagggaccccaagaaaccaaagggcaagagc

SEQ ID NO: 229907 - RNA, 67 nt, Homo sapiens
agaacccgggagaaaggcggagaagagaaccacacaagacccggcgacacagcaggacgaacagccc

SEQ ID NO: 229908 - RNA, 50 nt, Homo sapiens
accagaaccaggaggaaccacagcaaggagccagacgagggaggagagcg

SEQ ID NO: 229909 - RNA, 74 nt, Homo sapiens
ggaggaggagcgcccaccaccggaaaagcccacaaaaacggccacaccagaagcacagcccagaacgccaagag

SEQ ID NO: 229910 - RNA, 84 nt, Homo sapiens
ggaagaggcggacggcgggaccacaagacaacgcggagcggcgaagagcaaccagacccccccagcgcccgccccagcacccga

SEQ ID NO: 229911 - RNA, 51 nt, Homo sapiens
gaacgacccaaggaagggagagcgaaaaggccaagagacagagacacggag

SEQ ID NO: 229912 - RNA, 71 nt, Homo sapiens
accagccccaggaccagaggacaaagcagcaccaggaagaagaggcggaagaaacaacaagcgcaaggagc

SEQ ID NO: 229913 - RNA, 79 nt, Homo sapiens
aacaggagggaaaaagagggacagcagagaccaccgaagacgcacgccaagacagcagaaacaacgcgagagcccccaa

SEQ ID NO: 229914 - RNA, 80 nt, Homo sapiens
cgggccgacaaggagggaggaaggagccgggaaggacacgaggagcccgacaggcagagaacggaaggaggccccgaccg

SEQ ID NO: 229915 - RNA, 81 nt, Homo sapiens
cacagagaaacaggagcgagagcggaagaaaggagaaggaaaggcgccccagcccaaagggaagacccgaccgaagagaac

SEQ ID NO: 229916 - RNA, 73 nt, Homo sapiens
gcagcgcccgcagagccggacggccccccacgcccgaccgacaagacggaaaccgggagggggaaaagcgaga

SEQ ID NO: 229917 - RNA, 86 nt, Homo sapiens
agggccgacccccccgccggggagggcccagcgcaccgacaggggccaaggggaaacgcaggaagaagccaaaaaaaagaagccag

SEQ ID NO: 229918 - RNA, 69 nt, Homo sapiens
ccagcagacccgaggaagcgcgacccaggaccacaccagagaaacaacgcagacgaggaggaggcagag

SEQ ID NO: 229919 - RNA, 76 nt, Homo sapiens
gaacccagaggaaaccacaaggaaggagcggaaaccaggaaccgacccgagaagcaagcaagaacccgaacaaggc

SEQ ID NO: 229920 - RNA, 64 nt, Homo sapiens
aagaaacgcacagccccgaccagaccagacggggcgacaggcgccacccgacaaaagacaaacg

SEQ ID NO: 229921 - RNA, 84 nt, Homo sapiens
gcgcgaggcggcggcagcgagccgggcccaccaggccgcgaagaagccaggagggaagcccagaagacgcacaagagagaccga

SEQ ID NO: 229922 - RNA, 80 nt, Homo sapiens
gccagaccacaggagaacgaggcacagggacccaccgagacaccaagggcggggcgaggaagagagggcacgaaaggagc

SEQ ID NO: 229923 - RNA, 49 nt, Homo sapiens
gaagaaagaagcgaaggacgacagcagccagaaaaggaggaagcaccgg

SEQ ID NO: 229924 - RNA, 85 nt, Homo sapiens
ccaagccaaagaacccacacaaggacaaggagccggcccaacagagaacggcaaacagcgagaaaccacagacacaaccaccgac

SEQ ID NO: 229925 - RNA, 74 nt, Homo sapiens
cacaagggagcaaaggggccagggacgcccacccaggaggaggcaaggcagcacaaccaggcagcccaaccccc

SEQ ID NO: 229926 - RNA, 59 nt, Homo sapiens
ggcccgccagccgcgcccgacgaggagcgccaggaaagaggcagagacgaagcagaagc

SEQ ID NO: 229927 - RNA, 74 nt, Homo sapiens
ccagccgcgacaccgacagcagcagaaaagaccagacagaacaccgcgcacccacgcaacggaccgaggaaagg

SEQ ID NO: 229928 - RNA, 37 nt, Homo sapiens
aaaccacaggagaggaggacagcggagacagccggaa

SEQ ID NO: 229929 - RNA, 64 nt, Homo sapiens
cgaggggcagcggcaggagagccggccgcgacaggacgggaggaaaaaggaacaagagcaagaa

SEQ ID NO: 229930 - RNA, 69 nt, Homo sapiens
accgggagcgcggacaagacggggccacggcggggcacaggcccaagagaacagaaagccaaagggagg

SEQ ID NO: 229931 - RNA, 71 nt, Homo sapiens
caggccgaagaacggcacagaggcgggggcgaacccgccccaggaaccggagcgcaaacccagaagcagcc

SEQ ID NO: 229932 - RNA, 79 nt, Homo sapiens
ggaaacagacccggcgcccagcggagcccccgcgccccgacccaggggacaccagccaggagagaaccagaccgggcgg

SEQ ID NO: 229933 - RNA, 77 nt, Homo sapiens
aacccagcccggcccagaggacaggcagcccagaggcccacgaaggaggccccggcgcaggccggcgcagcacaggg

SEQ ID NO: 229934 - RNA, 63 nt, Homo sapiens
caccacaaaagcgaaagggcacaccacagggaccaagcaggcaggggcagccagcagaacaag

SEQ ID NO: 229935 - RNA, 76 nt, Homo sapiens
ccaccacgccgcggccggggcccgaccgcggggacccaaagaggaacagagcgaaggcggaacggagcagcggcgc

SEQ ID NO: 229936 - RNA, 85 nt, Homo sapiens
accagcggacgacccccgggacaggaaaagagagcgcaccggaaagcaaaaggaaaccaagaaccagaccaccagaagaaaaaag

SEQ ID NO: 229937 - RNA, 50 nt, Homo sapiens
ggcaccaacaaaggacccgggcgaaaaacacaccagcaagcaacacaccg

SEQ ID NO: 229938 - RNA, 105 nt, Homo sapiens
caggagggaacccgaagcgggcgcgcgcacggcaggacggagaggagccagcccccacagagcgggagcgaccggaccaccggacagcccgaacccaagcgaaga

SEQ ID NO: 229939 - RNA, 70 nt, Homo sapiens
ccccgcgccgccgaccccccggcgccgcgccggcggcgggaaaacgacaacgccaccacgagaggacaca

SEQ ID NO: 229940 - RNA, 79 nt, Homo sapiens
ggggacgacgacccacaaagagaagaggaccgcagagcaggacgcagcccacaggcccgcccacgcacagaggacacca

SEQ ID NO: 229941 - RNA, 59 nt, Homo sapiens
ggaggacggcccgccaagaaagagccagggccccgaggacccagaaaggccagcagcag

SEQ ID NO: 229942 - RNA, 69 nt, Homo sapiens
agggccggccgcacggcccgggagcaggcccgaagcaggcacgaccgaaagcacgaggccaagggcggg

SEQ ID NO: 229943 - RNA, 65 nt, Homo sapiens
gaacgccgcccacagggcagcgggagagaggagagcagagagcagaaacaccgaccacccaaccc

SEQ ID NO: 229944 - RNA, 79 nt, Homo sapiens
cacaggaccccccccaacgagcacaagcagagaaggcacaaagacagagcgcgggaagcccccgaaaccaaaacagcca

SEQ ID NO: 229945 - RNA, 81 nt, Homo sapiens
cccacgcaccgggggagcgggagcgcggaaaggccccaccgaggcaccaccaaccaaagcggcaacccgacagaccgaaag

SEQ ID NO: 229946 - RNA, 80 nt, Homo sapiens
gggcacgccgaccgagagacccaggcacccagggaaacgagaggggagaagcagaaaaagccaccggagcgaagcgaagg

SEQ ID NO: 229947 - RNA, 110 nt, Homo sapiens
aggcagggcagggaccaagaaccagccggggaccagacagacaaagccacaaccagggcaacaggaaggagacccaacaccccggccagacgggccaccaggccggcgcc

SEQ ID NO: 229948 - RNA, 83 nt, Homo sapiens
accaggaacagagaccccgccgaaaaaaccgcccgcaggagcggaaaccacaaggcgagagcacggagcaccagaagcacagg

SEQ ID NO: 229949 - RNA, 76 nt, Homo sapiens
cgcccggaggccacagggcagcgcggaagagaccgacaaccggacgagcagaaccggaagcaccgccccagccgac

SEQ ID NO: 229950 - RNA, 72 nt, Homo sapiens
cacgaacccgaagcccccaaagagagaaccggagagcacccaacacggaagccgcagaaggaccggccagaa

SEQ ID NO: 229951 - RNA, 81 nt, Homo sapiens
cgagccccgagaaccagcgcgacgagggcgccgccgcggccgccccagcacaagagggccagggaccaggggacgcccaag

SEQ ID NO: 229952 - RNA, 74 nt, Homo sapiens
cccacccgaacacaccaaccaaccagcaaccagccagcgacggaaccggccaaaacagaagaggcaaagcccag

SEQ ID NO: 229953 - RNA, 72 nt, Homo sapiens
cacaaggaaacacagaggaaaacgcccggagcggacaagaacagagccaagaaacgcccccagcccgaaccc

SEQ ID NO: 229954 - RNA, 104 nt, Homo sapiens
agcaagccggcacggcggcgagcccggcagagcggcgaggccggcggggcccggggcgaggcaagaggcccaccaacaacgccaaaagacgcaaccgaagacca

SEQ ID NO: 229955 - RNA, 77 nt, Homo sapiens
cccgcgcggcgcggggaccgcggcccgagccgccaggcagcacacaaagcaggagacccgaagccaacacagaacca

SEQ ID NO: 229956 - RNA, 68 nt, Homo sapiens
ccggacaaagccgcgaaaccaagggacacagagagaaaaacaaccaccagcgagcaaaaaggcaaaga

SEQ ID NO: 229957 - RNA, 40 nt, Homo sapiens
gagacgggagaagaaaagaccaggagagccgccgccccag

SEQ ID NO: 229958 - RNA, 77 nt, Homo sapiens
ccccaaaaacgggaaaggcggagccaccagcccagccaaaaacaaacagaagaacagcaagagagggggccgggccc

SEQ ID NO: 229959 - RNA, 80 nt, Homo sapiens
agggagcagcaacagaaccaacgaacccacgaagcagggcgaaaacccgggggagaaaacaggcaccagaagcagagcac

SEQ ID NO: 229960 - RNA, 85 nt, Homo sapiens
gcgaccgagacggggagcccaaagcaaagaaacgaaggaggcccaaccacaaaaggagccgacggaacccagacggagaacaaaa

SEQ ID NO: 229961 - RNA, 82 nt, Homo sapiens
aggccagagagaaaagacgcgaggggccgcagcgggccggagagggagcacggagggaggccgccaggccggcaccccgggg

SEQ ID NO: 229962 - RNA, 83 nt, Homo sapiens
aggcggacgggccggcgcagcaggaggagaagcggcagggcggagagcggaccacgccgccgccagggacaaagaacagcagg

SEQ ID NO: 229963 - RNA, 75 nt, Homo sapiens
gcgcagggccgggccgccgcgcaccgcagcgccggggcacgacacaaaaacagagggcccccaaggaagacagca

SEQ ID NO: 229964 - RNA, 81 nt, Homo sapiens
cgccgccgccgccgccgccgcagcgggagggcgccaccacaggaagacggaaggccagcagcaacgagaaacagaacaaag

SEQ ID NO: 229965 - RNA, 75 nt, Homo sapiens
agacgcccggcaagagagccgcacaagcgccggccaagcccaggggcacgggcacagcccagaagaccagcgaga

SEQ ID NO: 229966 - RNA, 59 nt, Homo sapiens
cagccagcagaggcgcagggccagcagggggggagccgcacgacccgaacgccagagac

SEQ ID NO: 229967 - RNA, 76 nt, Homo sapiens
agacccacaccaccagcgcaagagcaccggcgcacgggccacgggaacgggaccgagggaaaagaggacgaggcgc

SEQ ID NO: 229968 - RNA, 81 nt, Homo sapiens
cggcgccgagccgcggccgaagagcagagcgacacgaaaagacagaccgacaacagcccagaagaagccaggaggaccaga

SEQ ID NO: 229969 - RNA, 52 nt, Homo sapiens
cgccggggccgggccaggagcagagacaaaagagcaacgagaccggacgaac

SEQ ID NO: 229970 - RNA, 52 nt, Homo sapiens
gacccaggacaaaagaaaggcgggaaaaccgccacaaagcccccaagccaca

SEQ ID NO: 229971 - RNA, 78 nt, Homo sapiens
gacaagaccggaccagccagaggacgcgggccgaggagagcggaggaggggacagagagagcaaaacgacgaaggagc

SEQ ID NO: 229972 - RNA, 74 nt, Homo sapiens
agacagagcagcagaaacgcagaacgcacaggccagaaccgcgccggaccgggccggaaccacgaggagagcag

SEQ ID NO: 229973 - RNA, 40 nt, Homo sapiens
gcgcccccagacaccggcgggacgccccgagaaccaagaa

SEQ ID NO: 229974 - RNA, 72 nt, Homo sapiens
ggagacaacccccacaggcccagagacccacccacgaaacaaacaagacacagacggaagggagggccaccc

SEQ ID NO: 229975 - RNA, 59 nt, Homo sapiens
agacacaaaccagacagccgcgaggcaagagagacccaaaagagaaaagaggaagccca

SEQ ID NO: 229976 - RNA, 67 nt, Homo sapiens
cgaagagaaacacacggacaacaaacggcaaccacacaggaaccaacaaccaggacccagaggaacc

SEQ ID NO: 229977 - RNA, 72 nt, Homo sapiens
ggggagcacagggcaccacggaaggccacagcgaacaccaagacacgagccagaaaagagcccgagcccaca

SEQ ID NO: 229978 - RNA, 74 nt, Homo sapiens
aaagaaagagaggaagaaagaacagaacagcgaaacaagagggcaggaacggagccgaagagagaggaggaaca

SEQ ID NO: 229979 - RNA, 60 nt, Homo sapiens
cgcggagaccgggcggccgcagagacgcgcaacccagcacgagagacaaggaggggcgcg

SEQ ID NO: 229980 - RNA, 86 nt, Homo sapiens
cggcaccgccgccgccgcccccccgaggaggacccagagcaggacagcggcccggaggaccgccccgcagggacaagagaaaaaaa

SEQ ID NO: 229981 - RNA, 78 nt, Homo sapiens
ggccgagcaccagccgggacgcggggaccggaacaggaagggggagcaacagacaagcccgaaaggaacagcagcagg

SEQ ID NO: 229982 - RNA, 72 nt, Homo sapiens
gagcgcgaaacgcacgagaaggcagcaaccaccggagggcgcagagaagagacagagcggaagaaaaaaaaa

SEQ ID NO: 229983 - RNA, 81 nt, Homo sapiens
caagggagccgcgcaaaggccccggcaagaaggaacggggaggcgagcccacacgccagcgggaacggacggccccaacgg

SEQ ID NO: 229984 - RNA, 77 nt, Homo sapiens
accccggccgagccgggccgcgccgccgcgccgccgccgcgcgcggggacacacaggaagacgaacacggaacgggc

SEQ ID NO: 229985 - RNA, 74 nt, Homo sapiens
cgggaggagcagccgcgcgccgagaagcacccgcgacccagaagcgggacggcacggaagaaagcaaagccacc

SEQ ID NO: 229986 - RNA, 81 nt, Homo sapiens
ggcggcggcgcgggcgagcggcgagccgaaaagcgagcgcgaggaaaaggcggcgggagacacacaggccacccagcgaga

SEQ ID NO: 229987 - RNA, 57 nt, Homo sapiens
aaaaaggcaaaggaagccccagagacaacccagaccagcaagaggcacggagcccag

SEQ ID NO: 229988 - RNA, 75 nt, Homo sapiens
acacaaaccaggcaacaggcagaaaaagaaccagaaaggagagcgaagaccaaagaacaaaggccgagggaccac

SEQ ID NO: 229989 - RNA, 77 nt, Homo sapiens
acaccaggcgcacggaaacggagcagcaaggaaaaggaaaccgcccgcccccagcccgccgacacagccaccaagaa

SEQ ID NO: 229990 - RNA, 81 nt, Homo sapiens
cggaggggaggaaggagagagcgagagggaacggggggcagccgaccgaagaagcggggccaaggagcggagaaggagcga

SEQ ID NO: 229991 - RNA, 88 nt, Homo sapiens
gcgggcccaaggcggaggcgccgcccggggccccgcggcgcaggaggcggggagcgcagagcgggcgagcgcgagaacaggaacaacc

SEQ ID NO: 229992 - RNA, 71 nt, Homo sapiens
gggcaaccaacgccggggcggggagcacggaacgacagggcgcaggggaaagacaaaccggagaaagcccc

SEQ ID NO: 229993 - RNA, 66 nt, Homo sapiens
agcgcggcgggcgggaccagaagcgggaggaggagcgcgaagaagaccacagcccaggagcggaga

SEQ ID NO: 229994 - RNA, 78 nt, Homo sapiens
gagagaggacggggacccgcgacccagccccccacccaacgcgggccaggccgagggcccgcccggccccaggagaag

SEQ ID NO: 229995 - RNA, 74 nt, Homo sapiens
aacagggagaaaaccagaccccacccaaggaaagagcaggggcgaccacgaccgaagagccagagacaagcccc

SEQ ID NO: 229996 - RNA, 67 nt, Homo sapiens
ggcagggagggaaggcaagagccaacccaaaaccaaaaaccccacagcggagaaaaaggagaaaccc

SEQ ID NO: 229997 - RNA, 81 nt, Homo sapiens
ggagcggcaggcccccagaccccgagggcggaagcggggggacaggcagcccgagaaagggacggccaggagcggggggca

SEQ ID NO: 229998 - RNA, 79 nt, Homo sapiens
cgaaagcagcagagcccaacggagacaaaacagcagcgcaccaacagaggccaagcgacgccccaacagcacggcgggc

SEQ ID NO: 229999 - RNA, 60 nt, Homo sapiens
gacaaagcccccgaaggaacaccccacacaccggacaaggcccgcacaaccaccgaagca

SEQ ID NO: 230000 - RNA, 65 nt, Homo sapiens
caaggggcaaaccagacgacaaagccgaaaggccgcaagcagaaacacaggaaaaagagaaaacc

SEQ ID NO: 230001 - RNA, 60 nt, Homo sapiens
acgccgccacacccggagaccccaagggaccaggaggagaagcaaccagagaggaagcga

SEQ ID NO: 230002 - RNA, 76 nt, Homo sapiens
cggaaagcagcaggaaaagaaaacccggaggagacccaacggaggggacaagaccacaccaaagcgccacaagcga

SEQ ID NO: 230003 - RNA, 90 nt, Homo sapiens
aggaccccaggacacccggacagagaggcgagaccgcagaacaaaaaaggaaacaaaaaagggccaagacagcaacaaggaccacggaca

SEQ ID NO: 230004 - RNA, 75 nt, Homo sapiens
aaggcgccccacccagcacgagaaaaaagggcgacagcaagaaggagccagcacagaggcaaaagaaccaacaaa

SEQ ID NO: 230005 - RNA, 80 nt, Homo sapiens
cccagaggcgggaggggccgggaggcagaggggcaggggaggcgccaggaacccaagcaagcaccagcccaaaagaaaac

SEQ ID NO: 230006 - RNA, 62 nt, Homo sapiens
agacgggcgggaaagagaggcccgggaacgggcggaggaagaagacgcggcccagggccgcc

SEQ ID NO: 230007 - RNA, 78 nt, Homo sapiens
aaaaagcagcgagggaagccgagagaaggcgggaagaaacggcaagagaccggggccgagcagacaggcagcagggag

SEQ ID NO: 230008 - RNA, 61 nt, Homo sapiens
gagaagcaaagagggcagcaggcccagaaacgcacacaagaaggccaccaaggcccagagc

SEQ ID NO: 230009 - RNA, 68 nt, Homo sapiens
acagggggaggccggggggcagccgggggcacggaggagcggaggagcacacaagaggcaacaccagg

SEQ ID NO: 230010 - RNA, 70 nt, Homo sapiens
gcccggccgggacaggaggaagaggcagcgccaacccacgccgaaagaagaaaaacacaccccgccaaag

SEQ ID NO: 230011 - RNA, 81 nt, Homo sapiens
gacagcaagaacagggccagcaaaagacgaccaggagacacaacaggccaaagccaagagaagaaaagcagcgccaaggca

SEQ ID NO: 230012 - RNA, 82 nt, Homo sapiens
gggaagccacccccccggaccccacccacacccccccccaccgcagcagcacccgacagaaaaccagacgagagacagaaga

SEQ ID NO: 230013 - RNA, 72 nt, Homo sapiens
ccgagagccgcccgggccagcggccgcgcacccccggccggaggcaccagccacgagccagggagccgccgg

SEQ ID NO: 230014 - RNA, 75 nt, Homo sapiens
cgccgcgcgggccgcgcgcgcgcgcccggaaaccgcagaagaaccaggacaagaacgcgccacaaagacgaaagg

SEQ ID NO: 230015 - RNA, 54 nt, Homo sapiens
acacaaagcacaccgccaaacccaggccagagcacagaagccccgacacagaag

SEQ ID NO: 230016 - RNA, 80 nt, Homo sapiens
aacgaacaggaacaaagccagacggcaacggacagccaagacgagaccaccaagacgacgaacggaacagaaccggcagg

SEQ ID NO: 230017 - RNA, 79 nt, Homo sapiens
cgaggagaccgaaggcaacgcgaagaggaaggccaggagaagcgagacccccccggggagcgaccgcaggccaaccaga

SEQ ID NO: 230018 - RNA, 84 nt, Homo sapiens
ccccaggacacacacagcgcccccgggcgagaagaagaccccggcgagaggaggagacaaggagaaggccaggacacgggggag

SEQ ID NO: 230019 - RNA, 44 nt, Homo sapiens
gggcggaaccggcagccgcggagagggacaagggacagaccagg

SEQ ID NO: 230020 - RNA, 74 nt, Homo sapiens
aaagaagcggcaaaggccaagcacggcaaagggcagcaaccaaaagccaggacaggaacgcgcagcaccccaag

SEQ ID NO: 230021 - RNA, 63 nt, Homo sapiens
ccgggagaggcaccaaacggccgggggcccgagaagcccccaggaggaccgcgccaacaggac

SEQ ID NO: 230022 - RNA, 71 nt, Homo sapiens
aaccaggcgcccccaagaagaaaaccgggaggaacgaagccagccgcagagagcagcgagagcccaaagga

SEQ ID NO: 230023 - RNA, 89 nt, Homo sapiens
ccaccgcgccgcagccggcggggagggggccagccccccaggcccccacccccgagccagaaccagagaacagcagaggcccaggaaac

SEQ ID NO: 230024 - RNA, 62 nt, Homo sapiens
agaaggcaacaagagagagggcgcggcagaccggggcacggcaggaggaagaaaccacagcg

SEQ ID NO: 230025 - RNA, 72 nt, Homo sapiens
agaaaacaaaaaggccagaaagaggagcagagacgccggacagcacaaccccaagagggaaaacacccagaa

SEQ ID NO: 230026 - RNA, 92 nt, Homo sapiens
cccccggacggaaagcacccaaagccgccccaaggcagcccgaagaggaaggagaaggaaagagcagaaaggagcggcggcacggagaagag

SEQ ID NO: 230027 - RNA, 68 nt, Homo sapiens
cacgccaagggcagagaacacaagaaagagagcaaacacgcacgcaaaagggacagagaagaggacgg

SEQ ID NO: 230028 - RNA, 76 nt, Homo sapiens
gaacggagcgagaaccacaagggggaaagcggaccaagaggaaacccgaagaggcacaggaagaaacagggcaaaa

SEQ ID NO: 230029 - RNA, 68 nt, Homo sapiens
caaggagaacagaaacgacaaacacgagccaaaagcggggagagaggaagaacaacaagcagaccgag

SEQ ID NO: 230030 - RNA, 96 nt, Homo sapiens
gaaaggggaaccccggagaaaaggccaagaaggcagaaggccggcccacagcccaaaaagaaacaggaccgaaagccagagcgaagccaaagccgg

SEQ ID NO: 230031 - RNA, 56 nt, Homo sapiens
agcccaggaagcgcagacacagaaagcccggaaggaaggagagaacggcgcaagcg

SEQ ID NO: 230032 - RNA, 71 nt, Homo sapiens
gagcagaaaaaggcaggacaggggcaaaacaccacagacgaaccagagaaaaccaaacaaaacaaagacag

SEQ ID NO: 230033 - RNA, 71 nt, Homo sapiens
caagagcccggggccaaccaaaccacaggcgaaagaaccacccccggccgcgcagacagcgacggggcaag

SEQ ID NO: 230034 - RNA, 78 nt, Homo sapiens
ccgccccaggacagcaccagcgggccggaggagccagagcgcagaaaggcccccacggccccaggagaaagcgcgggc

SEQ ID NO: 230035 - RNA, 94 nt, Homo sapiens
agccccaaccacacaccagcggcgcaggacgggcacagcagagaccaaaggcagggcaaggaaacggccacaaggggaacacaccgaaacagag

SEQ ID NO: 230036 - RNA, 80 nt, Homo sapiens
accacgcccacgggacgaggagagggagggaaccgggcagaggaccgggaaaaaaaacagacaagcgcccagacagagcc

SEQ ID NO: 230037 - RNA, 55 nt, Homo sapiens
cgggaggcgcagaaagagagcagagagcaaaaacaaggaagcagaacagacaccc

SEQ ID NO: 230038 - RNA, 79 nt, Homo sapiens
aaggacaacgacgggccccagggcaaagaaaaaggagagaaaaagaggcaaaacaacaagaagaaaagagaaaaaagag

SEQ ID NO: 230039 - RNA, 55 nt, Homo sapiens
gacagaccccgaggagacgaccgcgcgaaacgcccagaaaccaagaagcagcacg

SEQ ID NO: 230040 - RNA, 68 nt, Homo sapiens
gagccggaaacggacaaacagcccccgccccgacaaagaagacaccaggagccacagcccggaggccc

SEQ ID NO: 230041 - RNA, 56 nt, Homo sapiens
ggaaacggaagagaaaggaccgaagaacagcacgaagggagggagccaagcgcaga

SEQ ID NO: 230042 - RNA, 71 nt, Homo sapiens
agaaggcagccaagcccggagaaagggccagccaaagaagaaaaccagagcacagagcggacagacacgga

SEQ ID NO: 230043 - RNA, 77 nt, Homo sapiens
ccacgagaccaacgacagaaaacgagcgccgcggcgggggccgaaccgggccagagagcaaacaaggggccgagaga

SEQ ID NO: 230044 - RNA, 68 nt, Homo sapiens
gaccgggggaagggagaagaccaaagggaagagaaacgcaaccgaaggaaaaccgcaccgaagcagcc

SEQ ID NO: 230045 - RNA, 67 nt, Homo sapiens
gaccgggaccgcccggacccggccgggagaagcagcagagaaagaaggagaagaagcaccagccgac

SEQ ID NO: 230046 - RNA, 81 nt, Homo sapiens
gacgggcccccaaaaagcggcaaaagcaagagaacaggaacagggaaagaaggaagacaggcgcaagaaacaggacagcaa

SEQ ID NO: 230047 - RNA, 64 nt, Homo sapiens
ggacagaggcacagaagaggacacaggaagcgccagaccaggccacgcagaaaaggaaccaggg

SEQ ID NO: 230048 - RNA, 70 nt, Homo sapiens
gggcggaggacacagccggacccgggacaggacaccccagggagagaccgagaccagaaaaaggaagaga

SEQ ID NO: 230049 - RNA, 88 nt, Homo sapiens
accagcaccccgcaccacagccaggcccgaaaaagcccaagacagcagaagcagacaccccaggaacagcaaagaaaagcaaagaaga

SEQ ID NO: 230050 - RNA, 80 nt, Homo sapiens
ccgggcagccccagcagggaccggacaggcccgaagaccccagacccacgaccgcccgcgcaggagacgccaacgggggc

SEQ ID NO: 230051 - RNA, 72 nt, Homo sapiens
cacaagagaagaccagcacacgcagaaacgccggacagacgacacagccagaagacccggaccaaccagcca

SEQ ID NO: 230052 - RNA, 61 nt, Homo sapiens
cacacagcaggagaaacccgcaagcaccaccacgaggcgccaggggagaggaggcagaagg

SEQ ID NO: 230053 - RNA, 71 nt, Homo sapiens
acgaagaaagagcaaaggcggagggcgagaccagcagacaaggcggaagaccaccgcagggggacgggcgc

SEQ ID NO: 230054 - RNA, 92 nt, Homo sapiens
ggcgacgcgaggagagagcgacgaagccaacgccagggcggacaggaggaaggcaaggaaggaggcacaggcgggcacagcacacgggcaag

SEQ ID NO: 230055 - RNA, 50 nt, Homo sapiens
gaaaagaaacggccgcaggcgagacgacgggaccgaaggaccccgccaga

SEQ ID NO: 230056 - RNA, 79 nt, Homo sapiens
cgaaggccgcagacgacccgagggagcgaacggacaccaggagacaaagccacaaaaacaccagaaaaaccaagcagaa

SEQ ID NO: 230057 - RNA, 68 nt, Homo sapiens
caagccggaggagaagcaagaaggcccggacacagcaaaccgggccacagcccccagacgaggaacga

SEQ ID NO: 230058 - RNA, 53 nt, Homo sapiens
cgccagagacagagaagacaacgagcccagaggcccggaaggcgcaaaagggg

SEQ ID NO: 230059 - RNA, 53 nt, Homo sapiens
gccacacggcggacacccgcggcgcgcagcaccgccggccaggaggagagcgc

SEQ ID NO: 230060 - RNA, 64 nt, Homo sapiens
acaccacgggagaacagagcgcaaaacccaaaaagacccccaagaagcaaacaacagcaaaggg

SEQ ID NO: 230061 - RNA, 63 nt, Homo sapiens
cgcggcccggcccggccccgaggccggcaacggagacccaagccagaaaggaggagcaaggaa

SEQ ID NO: 230062 - RNA, 75 nt, Homo sapiens
agcaccacagcccgcagccccgccagccacccccaggggccgcaaggccaggcgcgcagaggcacccaacggcac

SEQ ID NO: 230063 - RNA, 75 nt, Homo sapiens
cagaggagcgaagccagcacacgagaacacggcagaaaagcaagcaggcgcgggacagccaacggcagaaaccgc

SEQ ID NO: 230064 - RNA, 57 nt, Homo sapiens
cccaaacgaggacaccccgggaagggacgcaaaaaggaagccccacaaggaccaggc

SEQ ID NO: 230065 - RNA, 78 nt, Homo sapiens
ccccaaggccagacaaaacgaccgaagaagacggggcaccacggggcgggggaaggaccagacaaaacgccgcggaga

SEQ ID NO: 230066 - RNA, 56 nt, Homo sapiens
gggggggaccgaccgcaacagaacggacccggagacgacacaaccaaagaggggga

SEQ ID NO: 230067 - RNA, 74 nt, Homo sapiens
gagccccgcaccccccccagaaacagaccggaaggccaaaacaagggaagcaaaggaaacggagagacagaaga

SEQ ID NO: 230068 - RNA, 60 nt, Homo sapiens
ggcagccggcaggcagggggcaacgaggaacaggccaagaaacaacacagccaaggccag

SEQ ID NO: 230069 - RNA, 60 nt, Homo sapiens
gcgaaccgccgcaggagcccaggggcaaagagaaccaggagaccccaccaccacagaaaa

SEQ ID NO: 230070 - RNA, 80 nt, Homo sapiens
cgggccgcaacgacgcagcacgcagcacggggaacgagcaccagggcagcgcagccccaggacggccgcacgccaccggg

SEQ ID NO: 230071 - RNA, 46 nt, Homo sapiens
cagggggagacaaacaaacagacaagcagcaaggaacagcgggacg

SEQ ID NO: 230072 - RNA, 69 nt, Homo sapiens
ggagagaccacaaggaaaaccaagaaccagaacggccacagaacacaaaggagcgacagaaaagcagaa

SEQ ID NO: 230073 - RNA, 83 nt, Homo sapiens
aggagagggcagcccggaggcagcgcggcccgcgaaaaaggacaagcgcgccaccacgacgaggagcggcagcaccccaggag

SEQ ID NO: 230074 - RNA, 57 nt, Homo sapiens
aaacaaagcagcacccggccccaaagaagaacaagcacacggacccgacaccggcgc

SEQ ID NO: 230075 - RNA, 67 nt, Homo sapiens
aacccaccagccacgggcacccacccgcaggccggaggaacgaaacagcaaggagaaccaacaaccg

SEQ ID NO: 230076 - RNA, 74 nt, Homo sapiens
ccggcccgaggaaggcaagacccggcgggaaaacggcacaaggcgacgagggagggcagaccgccaggccagca

SEQ ID NO: 230077 - RNA, 78 nt, Homo sapiens
cgcagcggggcccagcacgagagcgggagcgacacagcaaagagaggaaaagcaaaggaaacagcccaaaggaggacc

SEQ ID NO: 230078 - RNA, 68 nt, Homo sapiens
gcagccccgcggaggagcagaaggcgacaacgaagcagacggacaccggaaggaagggaccaagccgc

SEQ ID NO: 230079 - RNA, 71 nt, Homo sapiens
gaaggaccaagaaccagcaaggccagcagagcccaagggcgccagccaccacccagacgaccagacgagag

SEQ ID NO: 230080 - RNA, 79 nt, Homo sapiens
acggaaagagcaagacggcagcccaaaaccaagagcaggagaccagcggaaggccagaggggaacgggacaagggaaag

SEQ ID NO: 230081 - RNA, 50 nt, Homo sapiens
ccaaggaacaccaccaaaaacagagaccaggcccacgccaacaacgcccg

SEQ ID NO: 230082 - RNA, 66 nt, Homo sapiens
caggaggacaccgcaggggcgagcgccgcagcagcccggcacagccacaaacggcagaacagccgg

SEQ ID NO: 230083 - RNA, 43 nt, Homo sapiens
ggagaagaaagagcgaaaaggggagaggcaccagcaacagacc

SEQ ID NO: 230084 - RNA, 69 nt, Homo sapiens
agcaaaaggccccgcgcgggcgaacacacaaagccgcaccaggcaacaccaagacacggccacggcaag

SEQ ID NO: 230085 - RNA, 52 nt, Homo sapiens
cgagaaaaggccagggcccacgcaaggcaacgagggccaaccgccgcagcag

SEQ ID NO: 230086 - RNA, 70 nt, Homo sapiens
gaaccacagcagcgcagcaagaagggccggagagcgcaggacacagggcgggaccaccaggagcagagcg

SEQ ID NO: 230087 - RNA, 71 nt, Homo sapiens
ccagagccagagcacacgggggagaaaaacagcgcgagaaggaggaacacaggaagaagacaaaacaagaa

SEQ ID NO: 230088 - RNA, 33 nt, Homo sapiens
ggagcggacggaaaggacccagagagggaccag

SEQ ID NO: 230089 - RNA, 62 nt, Homo sapiens
ccccaaaaggccagcgggaagaagcacaggaggccagagggaagcaaagcagccaacaccag

SEQ ID NO: 230090 - RNA, 56 nt, Homo sapiens
gcagaaacagagaaggaacaggggacaccagcagcgccgccggaccaccgggcagc

SEQ ID NO: 230091 - RNA, 89 nt, Homo sapiens
agaagagccagggcccgaccgcagggagcagaggggacagaggcaccaaggaccccaagacaggaaaggcagacacaagacgagcaccc

SEQ ID NO: 230092 - RNA, 77 nt, Homo sapiens
gccgccacacgcgcaaagcccgcgcagagccccaaggagccgaaaccaagccgaagcaacgacaagcaagaggcgag

SEQ ID NO: 230093 - RNA, 82 nt, Homo sapiens
cgccgccgcgccgcgccgcgccgcaccccgagcgaccgccaccaggagagaacgccgcgccgcgcgacaacggcccggcagg

SEQ ID NO: 230094 - RNA, 58 nt, Homo sapiens
ggcaaggagacagacccggggaccgaacgcaagcggcccgaagaccaccccgagagcg

SEQ ID NO: 230095 - RNA, 82 nt, Homo sapiens
acgggcaggaggacaagacacgacgccacaggccccagaagccccagaccgagcgcagcaaaggaaaggcgggcccaccagg

SEQ ID NO: 230096 - RNA, 80 nt, Homo sapiens
cacagagagaccacggaaaaggaacagagccaaaccagaagaggagggcccagaagaaaaaggaccagaacagagaagaa

SEQ ID NO: 230097 - RNA, 76 nt, Homo sapiens
gcaagggccccagggcaccccgcggcaacaagcgaacgcgaccacccaaagccagacgcgaacagggaagaaaacg

SEQ ID NO: 230098 - RNA, 70 nt, Homo sapiens
ggacagggaaagcaggggaaagaacccgaagacaaaaacccaacagcccgagaaaggaggagaaacaagc

SEQ ID NO: 230099 - RNA, 76 nt, Homo sapiens
aaacagacagccggaacgagaaccgggagacgacgcgcacgcgggggcggggagaagaaaggggccccgggcccgg

SEQ ID NO: 230100 - RNA, 73 nt, Homo sapiens
gcgccggaccagaaagccgagacccagaccagcaggaaaccagaagggaaagacagcacacgacgccggggac

SEQ ID NO: 230101 - RNA, 77 nt, Homo sapiens
agaacaaacaaagcacacagcagcggagaaaaaaacccagaagaagcacggaaagggaaccgcacaagaaaaggacc

SEQ ID NO: 230102 - RNA, 78 nt, Homo sapiens
cagccccgggcagcaagaaaccacagcaacagaacagggaagaacaggaagagcagagggggaagcccaaagaacaaa

SEQ ID NO: 230103 - RNA, 81 nt, Homo sapiens
gagggaacacggacgccgcaggagggccaagaggccagcggaagccagaaagccacgcaggacccagagggccacagaggg

SEQ ID NO: 230104 - RNA, 73 nt, Homo sapiens
ccgcgacgccggaacaacgggaaagccgcacacccaccaggagagcgcgcgccgcgcgcccgcacaaacgccg

SEQ ID NO: 230105 - RNA, 38 nt, Homo sapiens
gcggcgcggcgccgcccacgggaggggacaccaaacgg

SEQ ID NO: 230106 - RNA, 84 nt, Homo sapiens
cggggggagcagcgcgggaacgggcggcgcggcgggggccggagggcgaagcggccaggcccgggcggacgcagagccagagcg

SEQ ID NO: 230107 - RNA, 78 nt, Homo sapiens
acgccgcgccagcgacaaacaacaccgcaggcagcagaagaccggaggaccggggcgagggaccgagaagaccccaga

SEQ ID NO: 230108 - RNA, 56 nt, Homo sapiens
aacccagcaacacaagcacagccacaagacaagcaacagggaagaaggggaggccg

SEQ ID NO: 230109 - RNA, 93 nt, Homo sapiens
ggcccggacccagagaccggggggccccagccccgagccggcgaacaagagaagaaagggcgaaggaaaagagaagaagcccaggggagagaa

SEQ ID NO: 230110 - RNA, 79 nt, Homo sapiens
caggccagaggacacaaaaggcacagggcgggcagccccaggcccagagacggcgccgcgggggcccacacacacggcc

SEQ ID NO: 230111 - RNA, 71 nt, Homo sapiens
agacaaggaccgaaacagaaacggaacaccaaggggaagggcccccgccccaggcggaggcaagggggacg

SEQ ID NO: 230112 - RNA, 76 nt, Homo sapiens
accaagcgaagagcgcggagggagagaacagcacacagaggcgcaaggggaagagaaaagacagaagcaccaaaca

SEQ ID NO: 230113 - RNA, 70 nt, Homo sapiens
ggagacccggggacccccgacgccaggcagcgcccccaaacggacagagccagaggaccccggacaaaca

SEQ ID NO: 230114 - RNA, 89 nt, Homo sapiens
acgcccgcgccacccagggccggcgccgggcagggaggcgccgagacgcgcggacaagcaggggcaaagaaaaaggagagaaaaagagg

SEQ ID NO: 230115 - RNA, 89 nt, Homo sapiens
gccgacaggcggaggcccccgggcaagaggcgcaaacaagccaacccaggaggaaaaacgggcgaaccgaccaagaacaacacccagag

SEQ ID NO: 230116 - RNA, 39 nt, Homo sapiens
gcaaacacccccagacaaagggcagcgcaagaccccgca

SEQ ID NO: 230117 - RNA, 72 nt, Homo sapiens
gcaagggacccggccagcgacgcaccgagaaaggaaggaaaaccgacgagcaagaacggaagcacgggcgga

SEQ ID NO: 230118 - RNA, 78 nt, Homo sapiens
gcgaggcggcgcacgcgcggggacggcacaacggaagcaccagacaagacagcggagcaaggaaacaaagccgaaagc

SEQ ID NO: 230119 - RNA, 92 nt, Homo sapiens
cacccccggcgggcccgaggcggcgagagaggcaggcggagccgaccgggccagggcaccgccgaccgaaaccgcaaacacacgacagaggc

SEQ ID NO: 230120 - RNA, 72 nt, Homo sapiens
cggccaggcaaagaaagacgggagaccgaaggaccaccggcagcgggaaaaaacgaccaagacaaacaaaag

SEQ ID NO: 230121 - RNA, 79 nt, Homo sapiens
ccaacaagaagagacaggggaaacaagaaacagaacgacagcccgcaccgacgccggcggccagccagagagcacgccg

SEQ ID NO: 230122 - RNA, 42 nt, Homo sapiens
gccccaaaacggcaccccggagaaagcaacgaaagcaaaccg

SEQ ID NO: 230123 - RNA, 76 nt, Homo sapiens
cggcggaaaaagccgccacacgccaaagcgacaaaagaagcgaagccaggaacaagaggcggaagacacacaacac

SEQ ID NO: 230124 - RNA, 53 nt, Homo sapiens
cgaacaccgacggagccagaagaacagagggacacagagaaggcgcaagaaaa

SEQ ID NO: 230125 - RNA, 67 nt, Homo sapiens
cgccagcacgaccggcaaccgcccgacaccggacggccaccgcccgagaagaccccgaggagcacag

SEQ ID NO: 230126 - RNA, 77 nt, Homo sapiens
caggcggagccgaccgggccaggcgcgaagacaacaccgcccaggcaagaaggggggcgggggaacggcccgggagg

SEQ ID NO: 230127 - RNA, 71 nt, Homo sapiens
aagacacccagggcgcacaagcagggaggaaccccagaacagacagaggggacagcaaaaccacgacgcag

SEQ ID NO: 230128 - RNA, 76 nt, Homo sapiens
gggcaccagcccgcgcggggcgcgggcgcggccggaccgcagccgcaagccaggaacggaggccggaaagagaccg

SEQ ID NO: 230129 - RNA, 83 nt, Homo sapiens
gcaaaagcgggaagaacaaaggaaggggagcccgggacccccgggggcgcagggcgcagaagaggggcaaacaaagggcaaca

SEQ ID NO: 230130 - RNA, 76 nt, Homo sapiens
cagaaaaaacacagccgacagacgccaccaaaagcaccagccgaagcgcccaacagccaaacggaacgcgacgcgg

SEQ ID NO: 230131 - RNA, 74 nt, Homo sapiens
aagccagagcgagcaccaggagcacgagcgaagacagcaggagggcagcgagagcccagagaagggaagaaagc

SEQ ID NO: 230132 - RNA, 70 nt, Homo sapiens
gaagaaaaccaaagccagggagagaacgggacaggagaggaaacagaaccccaggaccccagcgaacccg

SEQ ID NO: 230133 - RNA, 74 nt, Homo sapiens
ccggcgggaccaaagggcaaccaaaaaccccccccaaaaagcggggaccccacacacccccaagggcgaaaagc

SEQ ID NO: 230134 - RNA, 60 nt, Homo sapiens
gccgccacccccgacacgaaagcagacccaacaccggcacaagcgccagcccggaaacgc

SEQ ID NO: 230135 - RNA, 60 nt, Homo sapiens
ccaacaagaggacccaggagaaacgccccaaacaaaccaggcgagacagcaggagcacca

SEQ ID NO: 230136 - RNA, 79 nt, Homo sapiens
caaagacggcaacaacacaaccggacacaggaaagggccgagaaagaagagaggaagaagaggaggaggaggaagagga

SEQ ID NO: 230137 - RNA, 84 nt, Homo sapiens
ccaggcacagcaggcaacgaagcgggaaggaaagcgggggcgagaacgacagagagacggcaggaccacaggaagcagcgggaa

SEQ ID NO: 230138 - RNA, 74 nt, Homo sapiens
gagccgaccacaaggggaggacaaccgcccgggaccaggaaaaacgaagagccgaagaacaccagccccagaag

SEQ ID NO: 230139 - RNA, 75 nt, Homo sapiens
aacaagcccacccgaaaccacaaggccgagagggcaccggcgcacccgggacgaacgccaggacgagccccagaa

SEQ ID NO: 230140 - RNA, 69 nt, Homo sapiens
cagagaagaggcccgcgaagacaaaaaacccaagaacccaagcaaagggaaagaaacccaaaccaagcc

SEQ ID NO: 230141 - RNA, 63 nt, Homo sapiens
accccggagaaaaggccaagaaggcagggaagaagaacagggaccaaaaggaaaaaaacagca

SEQ ID NO: 230142 - RNA, 76 nt, Homo sapiens
caggacccaggagaaaaaaacagaaaggcagaaaaaaggccacagaaggagccagagacgcgcacgaaacgacgaa

SEQ ID NO: 230143 - RNA, 81 nt, Homo sapiens
acacccaggcagcaagggcaccgcgagcaagcaaagcgggccagacacgaagaggccggcgaaggaagaaggaccagccag

SEQ ID NO: 230144 - RNA, 67 nt, Homo sapiens
cgagggccgggccgggcgcgggcgagaaaggcagaggcaaggcggcagcaaaacgggcgcccgggca

SEQ ID NO: 230145 - RNA, 57 nt, Homo sapiens
cagggcgacagcgcgagagagcgcggccccaggagcaaggcggaaggaaacaccagc

SEQ ID NO: 230146 - RNA, 75 nt, Homo sapiens
agggcgcacggcagccaggaagagccaggcggagcgacaaaacgcagggacccaggcccacagaagacgaagagg

SEQ ID NO: 230147 - RNA, 60 nt, Homo sapiens
cgaaaccgcaaaccccaaagagcgaggaccccagcccccccagaccacaccggaacagcg

SEQ ID NO: 230148 - RNA, 58 nt, Homo sapiens
agacggcggagaccccgaaggcgcaaacgacaccacccgaccgaccgggagggaaacc

SEQ ID NO: 230149 - RNA, 52 nt, Homo sapiens
caagaccagcagagaggaaaaacacaacccaagaaacggacccccggcggcc

SEQ ID NO: 230150 - RNA, 78 nt, Homo sapiens
acaaaaaggccccccaaggaaaccggaaacgcaaggaaggcacaggggcgcaacggaggggaaccaccaagcacaaca

SEQ ID NO: 230151 - RNA, 79 nt, Homo sapiens
ggagccacagcacggaacggaaaaaagcacaaggcgaaaccaggaaggcaaagaccagcaagcgcagaagcaaaaagaa

SEQ ID NO: 230152 - RNA, 72 nt, Homo sapiens
aggagggcgagaaacacaggagacgacaaggagagcagaaacaccagaggccgcagcaagagaaggccagca

SEQ ID NO: 230153 - RNA, 56 nt, Homo sapiens
gacaagaaacaaccgcacaagcccgggggaaaggcagcgcgcagcagcggcacaca

SEQ ID NO: 230154 - RNA, 76 nt, Homo sapiens
cggccaggccggccggccggacaagcccaggagccgaccagagagcagcgcgccgcgcgccgggagaggcccgggg

SEQ ID NO: 230155 - RNA, 70 nt, Homo sapiens
caccacccgacccagagcccccgcccggaggccagagggaagcaaagcagccaacaccagaagaagggac

SEQ ID NO: 230156 - RNA, 81 nt, Homo sapiens
cagcggagcccacgagaggcagcgccaggcggagcagaccaccggccgccagggagaaaagacgaggaagcccaaaaaccg

SEQ ID NO: 230157 - RNA, 76 nt, Homo sapiens
aacaaacgcgaagacgaaagccgacaaagaggagcagagacgggaagaagcgcgaaaggggcggagaacaagagag

SEQ ID NO: 230158 - RNA, 34 nt, Homo sapiens
gccggaaagagacccggcccacagacaagccgcc

SEQ ID NO: 230159 - RNA, 62 nt, Homo sapiens
gcgggcagcagaagaggacgaagaaacagaaggcggagcagcaaaacaccaacaagaacaaa

SEQ ID NO: 230160 - RNA, 72 nt, Homo sapiens
acaaacagcacaacgggcagccacaaaagaagacccaaagcaccaacaaaaagcaacgagaacaaggacaaa

SEQ ID NO: 230161 - RNA, 75 nt, Homo sapiens
aaaaacgggacgcggaaacacacccgcagggccagagggaacaggcaggaaaacgacccaaaacagccaccaacg

SEQ ID NO: 230162 - RNA, 56 nt, Homo sapiens
agacacaggacaacgaacgaaacgccaagaaggaaaggcccaggaccgagacaaaa

SEQ ID NO: 230163 - RNA, 69 nt, Homo sapiens
ggcgagcccccaaggcgcagcgggggaacagcagcggcaagagacccaaagagacagagaacccccaag

SEQ ID NO: 230164 - RNA, 78 nt, Homo sapiens
aacagcagacccaagagcagcggaaaagaccagcacagagacacagcaccagagaaaaaaaacggaccaccgcggaag

SEQ ID NO: 230165 - RNA, 54 nt, Homo sapiens
gaaaaaggagcagcccgggcaccacagaaaaggacaagcccccacgaggaaaac

SEQ ID NO: 230166 - RNA, 76 nt, Homo sapiens
caccacagaaacaaaagcaacaaagaggggaaaggacgccgcacaccccaccaccacgcgaagaacgcacacaaac

SEQ ID NO: 230167 - RNA, 73 nt, Homo sapiens
gcggaggacgcggcagcccgggagcggcgagggaaaagcgaggcaaggcaggcgggacacggcgcggagagac

SEQ ID NO: 230168 - RNA, 78 nt, Homo sapiens
ccccaaacggggccggaaaagggcgcacgcagcaaagccacgaggccaacacacgggagaggaacgaaccccagcgga

SEQ ID NO: 230169 - RNA, 79 nt, Homo sapiens
cagcaccagcagccccgggagcaccggacggggacagggcaggggcgccgaccccgcgcaggacgcagacaacgaaaac

SEQ ID NO: 230170 - RNA, 111 nt, Homo sapiens
gaggggcacacgcaacaacgagacccaacccgagcgcggagaacccgcccagaagccagaccccaggaaagaacagccaaagccaaagaagacaaaaaagggaaagcccgc

SEQ ID NO: 230171 - RNA, 36 nt, Homo sapiens
caagaagaagcgcggaccccggagacgcaccgggaa

SEQ ID NO: 230172 - RNA, 84 nt, Homo sapiens
cggaacccgcaggaggaccgagcgacagcgcacggcagcggcaccacggcgacgcacaagagacacagcaccagagaaaaaaaa

SEQ ID NO: 230173 - RNA, 67 nt, Homo sapiens
aaaccgccggccggaccagaccggggggaaaggcggaacagaaagacaacggacaaggcaggaagaa

SEQ ID NO: 230174 - RNA, 80 nt, Homo sapiens
caggaaaaagcgcaggaaaagaaagcggagaaagcagcagcgccaacaagagaaggcagaagcagagacccacagggcag

SEQ ID NO: 230175 - RNA, 72 nt, Homo sapiens
gacaccagcgagggccacacaggagcccggacggcacagggcagggacgcagccagcgaggccaccagcgcc

SEQ ID NO: 230176 - RNA, 78 nt, Homo sapiens
caacgccacgaggcacaccccagcaaggagcgaaaacgccacaacagagggggccagggcggggaagacaaacagaac

SEQ ID NO: 230177 - RNA, 38 nt, Homo sapiens
ccagacggacacaccaaagaaggccaagagaggccaac

SEQ ID NO: 230178 - RNA, 63 nt, Homo sapiens
gcccgggagcagaagggaggcccaagacccacaacaaaaggggaggcaagcaggggggcaaag

SEQ ID NO: 230179 - RNA, 75 nt, Homo sapiens
gaaacgaccaaagaccagcaccggcccgaaacgccgaaaaacccaaggaagcccggcccacacggacaagaagaa

SEQ ID NO: 230180 - RNA, 81 nt, Homo sapiens
cggcggcagcagcggaggaggacgcacgccacggccacacaacacaacgccaggcagagggaccagaccagcgagaacccg

SEQ ID NO: 230181 - RNA, 79 nt, Homo sapiens
agccccccaggaccacagccccgaccgagagaaccagcgccaggaggggcagcagcaggacagggaacccgggagacag

SEQ ID NO: 230182 - RNA, 72 nt, Homo sapiens
gaaaaccaagaaaggacggacaagaaccacccgccgaggagcgaagaaaccagcacagcacccacacgccca

SEQ ID NO: 230183 - RNA, 61 nt, Homo sapiens
caccagcccaaccgggaggagggaggaaaacgcaggagaggaaccgcacccaaggacggcg

SEQ ID NO: 230184 - RNA, 66 nt, Homo sapiens
gaagagacacccaaggaaccccagagaagcagaaaagggcacagaaaccccgaaccaaacagagcc

SEQ ID NO: 230185 - RNA, 77 nt, Homo sapiens
agcagacggaaggagggaaaaggaccaaaacagaccaggaccgcccccaacggcccccgagagaaccgcggagagac

SEQ ID NO: 230186 - RNA, 66 nt, Homo sapiens
aaccgcgccccagaaggcagaggaacacaacaggaagaccgggagcacagaagaaaagaacaaggc

SEQ ID NO: 230187 - RNA, 71 nt, Homo sapiens
gcacaaacggggcggggccggggaacacacaggaggacaaccggaaacacacaggaacagaccaggcaccc

SEQ ID NO: 230188 - RNA, 71 nt, Homo sapiens
aaacaggagccgacgaagggcaaaaccccaaggcaacagcaaacacccgggccagcaccagcaaggcccgc

SEQ ID NO: 230189 - RNA, 69 nt, Homo sapiens
ggcaggccggcagacccacggccacgagcgacacaagccagcgcagacggcccgacaagcaacgagaac

SEQ ID NO: 230190 - RNA, 80 nt, Homo sapiens
gcaaagaaaaccgggcccgccgcgaccacggcagaaacggcgaggaaagagaggagccccggaaagaaaaggacagaccc

SEQ ID NO: 230191 - RNA, 80 nt, Homo sapiens
gcagcccccggaaaaagcaagcgaagacacaagaagaccgagcaaagagaccccggaacgaagcccggggcggcgacgga

SEQ ID NO: 230192 - RNA, 81 nt, Homo sapiens
cgagaccgcggccgggaccgaggcgggagaacagagacccaccaagaaaccagaacccggacaagggaagggcccgaggag

SEQ ID NO: 230193 - RNA, 41 nt, Homo sapiens
cgcgcgggggccaacaagcagagaccgccaggcggacgaac

SEQ ID NO: 230194 - RNA, 67 nt, Homo sapiens
caacgagcccccggccggaccccgcgcggaaaggcccacaaaacacggccgaaggccgccagcagag

SEQ ID NO: 230195 - RNA, 82 nt, Homo sapiens
aagcaccagagaacaagcaccaaagcgaaggagggccgcaagggaccaagaaaggcccagggaccaaagcccggacaaggcc

SEQ ID NO: 230196 - RNA, 77 nt, Homo sapiens
ggaggggagagagcggaggacagccgagaggagagcgggaacagcccacggcgaccagggccaggccaaggagggcg

SEQ ID NO: 230197 - RNA, 66 nt, Homo sapiens
cccacaacccacgcgcaccggcagccaggaagaaagggacccggagggcggagggaacacgaaaac

SEQ ID NO: 230198 - RNA, 86 nt, Homo sapiens
ccgcgagcgcccggccgaacccgcgaggaaaagcccagcggcccgccaggcccggagaaggaagcgccggccaaacgagcacagca

SEQ ID NO: 230199 - RNA, 51 nt, Homo sapiens
gagagcgcaccaaccggccgcccgccccccggaggagagccgaccacagga

SEQ ID NO: 230200 - RNA, 80 nt, Homo sapiens
ggcaacggccaaccggcaagaccagacgggaacgggagacaagcgcagcgagacgggagagaagcgccggccggaaagaa

SEQ ID NO: 230201 - RNA, 58 nt, Homo sapiens
gccgcggggggagaccccaccaccggagagccacccgcacgaggcccgcgcccacgcc

SEQ ID NO: 230202 - RNA, 71 nt, Homo sapiens
cgacaggcgccccacagacggagcaaagacgcacagagaggaccaccaacacacgagaggcgcgccaacac

SEQ ID NO: 230203 - RNA, 75 nt, Homo sapiens
agaagccaggggagagcacggggcagggcccccagcgaggacccccagccccaagggcagggccaccccggaacg

SEQ ID NO: 230204 - RNA, 69 nt, Homo sapiens
agccaggaggacccccggggaaagggccacacacggccaaaagaggaggacgcgcgcggacaccaaacc

SEQ ID NO: 230205 - RNA, 59 nt, Homo sapiens
cggggcacgcgcccacaggcagcccccgaggaaagcacgcacaacgaggaaaagagaaa

SEQ ID NO: 230206 - RNA, 74 nt, Homo sapiens
aaaaagacaccagcgacaaggacagaaccagggggaaggccccgggcagccgagcgccagggaaacaacccacg

SEQ ID NO: 230207 - RNA, 79 nt, Homo sapiens
gagaccggaccgagagcggaccgagagcgcgaaacgcacgagaagagaggccaagagacgaacccgagccaaggcacca

SEQ ID NO: 230208 - RNA, 71 nt, Homo sapiens
gcacaggccgaccgcgcggaaaccccacgggcccacccgagacaggacgcgaggacgggccacaccccgag

SEQ ID NO: 230209 - RNA, 82 nt, Homo sapiens
ggcgcaggacacggaggagaacgcgaggaaggaagagggcccagggccgcacaagacgcccggaggaggccgccggaccagg

SEQ ID NO: 230210 - RNA, 79 nt, Homo sapiens
aaccgccgccccgcagagcggcgaaccggggcaggaggccacgagaagcaaaggaggaaggaggcgaacggggcgcgga

SEQ ID NO: 230211 - RNA, 73 nt, Homo sapiens
cagaggaaccccgggcaggagacccagggggacagaaaagacccacggaaaagaaacagaaagccacccccgg

SEQ ID NO: 230212 - RNA, 52 nt, Homo sapiens
agaccaacggagacaaaacagccagaggaccacccgggcacccggacaccgc

SEQ ID NO: 230213 - RNA, 45 nt, Homo sapiens
gcgagccacgccggcacccaagggacccaaaacgaaccaacagac

SEQ ID NO: 230214 - RNA, 70 nt, Homo sapiens
gcgagaacaacagcagacaagaaaccagccaaggaacaacgagccagcggcacggaacgccggccaagaa

SEQ ID NO: 230215 - RNA, 59 nt, Homo sapiens
aagccaacaggagacaagaaccagagcccaaaggcagagggcaaacagcgcacagcaag

SEQ ID NO: 230216 - RNA, 74 nt, Homo sapiens
caaaacacagaggaaaagggaaagaggaacccaagaaggagagaaaagagcagaacacaaaaaaacaaagaggc

SEQ ID NO: 230217 - RNA, 38 nt, Homo sapiens
gaaaggcagcccagcaagacggaaagcagaagacgggc

SEQ ID NO: 230218 - RNA, 70 nt, Homo sapiens
cagggaggaaaaaggcaaacgcaaagggcaaaccgacaccagcgacacaagcgcgagggaaccacagagg

SEQ ID NO: 230219 - RNA, 37 nt, Homo sapiens
ccagaagcagccaaaggaaaacaggcagaacaggaga

SEQ ID NO: 230220 - RNA, 42 nt, Homo sapiens
ccaccagcgcgggcgcgggccaagcagcggaggaacccgggg

SEQ ID NO: 230221 - RNA, 68 nt, Homo sapiens
aaaagggccaaaggaagaagaagggagcgacaaaacaggacaaaacgggaagcgagacaacagaggga

SEQ ID NO: 230222 - RNA, 53 nt, Homo sapiens
ccgaaaagcaagaaacaaaaacacagggaaccgccggcgcccccccgcggccg

SEQ ID NO: 230223 - RNA, 72 nt, Homo sapiens
gccgcgagcccccgccgcgccccacgccggcacacacacagagagaccagacacaaagcaagaacgaaaaca

SEQ ID NO: 230224 - RNA, 83 nt, Homo sapiens
aaggcaaagcggccccccccccacaaaggaaaggggaaaagccagcgaaaggaacaagacaggcagaaaagagaccaaaagac

SEQ ID NO: 230225 - RNA, 71 nt, Homo sapiens
agaggccacccgagaaagcaagaaccagagaaacacacgccgaggccaaagaaaggacccaggccaagcca

SEQ ID NO: 230226 - RNA, 77 nt, Homo sapiens
agcgggccccaacaccagccgccgccccgcagccccccgcagcacccagccggccacgccgcggcgagccgcacagg

SEQ ID NO: 230227 - RNA, 82 nt, Homo sapiens
cacacgcgaccggcgaggcccaccaagccagaggccaagagaaggacggagccacaacgcgacggcccagaacggcagagag

SEQ ID NO: 230228 - RNA, 81 nt, Homo sapiens
cagagggcaggaccggcacccggcgccggaccccgagaaacagggagcacgagacagcgccggccccaacgagggagacac

SEQ ID NO: 230229 - RNA, 71 nt, Homo sapiens
aggaaccaacccgcccaggacaagccgcgcggggacccgacgcccgcacggccgcgccaacccgacgaccc

SEQ ID NO: 230230 - RNA, 77 nt, Homo sapiens
aaaaaacagacgaaaggccgccaaagccaagccaccaaacgaagagccccagcaggaggcggcagagggaaagaaaa

SEQ ID NO: 230231 - RNA, 56 nt, Homo sapiens
cgcgcaccggagccggcacggccggcggagagggaagcggcagggcccccccccag

SEQ ID NO: 230232 - RNA, 85 nt, Homo sapiens
agcggccaaagccgcccagacggccaccggcgggaggaacaaaagaggcggccagcaacagcgccaggccccaccgacaccacag

SEQ ID NO: 230233 - RNA, 67 nt, Homo sapiens
ggagcccaagaggcacgcaccccacaaaaaaaagagccaagaggaaggaagcccaacaggagaaaaa

SEQ ID NO: 230234 - RNA, 53 nt, Homo sapiens
caagaaagcagaagagcgccagcacacacaagcaaccccccggcgaagggcgc

SEQ ID NO: 230235 - RNA, 76 nt, Homo sapiens
gacgggcgggaaagagaggcccgcgaaacgagaaagggcagccaggaacccaagggaaaagcggccagccaacaac

SEQ ID NO: 230236 - RNA, 36 nt, Homo sapiens
agcccgggcagcgagcgcaaaagaccccggcaccag

SEQ ID NO: 230237 - RNA, 75 nt, Homo sapiens
cgcagggcgcccccgacggggcccggagcagagacgagcggaagagacaggcgacgggaagaagaggagccagag

SEQ ID NO: 230238 - RNA, 54 nt, Homo sapiens
acaccaaagggcgagacacaccgcacccaaccaccaccaagggaaagaaccccg

SEQ ID NO: 230239 - RNA, 69 nt, Homo sapiens
ccagaccacggacggaagacaaaagagggacgcagccgcaagcacaacaaccagagcgagagaggggaa

SEQ ID NO: 230240 - RNA, 74 nt, Homo sapiens
caaccaaggacccccaaaaccacaaacgccacgcagaacagccaccaagacaacgaagagaggaaagaagcgga

SEQ ID NO: 230241 - RNA, 73 nt, Homo sapiens
gcaccggcccgcaccaagagaagaggcgacccagcaacgcggccggccaggggcaagcgagcacggagggagc

SEQ ID NO: 230242 - RNA, 77 nt, Homo sapiens
ggccgacaccaaggccaggcgcggcgcgcaggcaggagcaccgcaacagagaccaaggaaggggaagccaaggaggc

SEQ ID NO: 230243 - RNA, 80 nt, Homo sapiens
cgccccgcgccgccgcgcccacggccccgccagcaaggcggcgcgcccaggagaacccccagagcaggacagccagaggc

SEQ ID NO: 230244 - RNA, 74 nt, Homo sapiens
cacacgagacccgggcggcgcgcgcccgaggggagcaaggacagagcagcaaggcgaaccggcgcggagcggcc

SEQ ID NO: 230245 - RNA, 79 nt, Homo sapiens
cgccgccggccggcgcggccccgccccagcgcagggccgccagaaggagcagaaaggaggacagaaaagcgcggaagag

SEQ ID NO: 230246 - RNA, 84 nt, Homo sapiens
aaacagggccggccgcagagcccaccggaaggagaaggaagaggagcgcaggcggacaccgaccgcaggaaggaggaggaggag

SEQ ID NO: 230247 - RNA, 56 nt, Homo sapiens
cccccaccacccccgaagacagacgcagccgaggaaggggcacccacagccaaccc

SEQ ID NO: 230248 - RNA, 73 nt, Homo sapiens
gcggcggagcccgacccacccaaggcccgccgaaacccacaaagaaaccaagagaggacaacaaaggaagcaa

SEQ ID NO: 230249 - RNA, 78 nt, Homo sapiens
cgagaacagaaggagacagcgaagcggggggaaggagcgaaagagaggcacacaccccaggagggggaggggggaggg

SEQ ID NO: 230250 - RNA, 72 nt, Homo sapiens
acgagaaagcagccaagacggcgagaggagagaagcgggggccaccgccccgacgggggcgcaaggccaaga

SEQ ID NO: 230251 - RNA, 77 nt, Homo sapiens
cggggcgcgccaaggacacggcacaccgaccgacgccgggcagaacgaacacgcaccgaagggcgggagcccccgga

SEQ ID NO: 230252 - RNA, 64 nt, Homo sapiens
caccagaaagcaccccacagggcccgagggcaggacagcaggcaccggcgaagcacagagaggc

SEQ ID NO: 230253 - RNA, 85 nt, Homo sapiens
gaggaggaggcgagggcggagaggcgcacggcgaggcggagaccgagggggagccccgcgcgcggcgcgagccgcgaagcagcca

SEQ ID NO: 230254 - RNA, 60 nt, Homo sapiens
ccggcagccagcagaacaacgacagagaacaggcccaaaccagagacccacggcaggggg

SEQ ID NO: 230255 - RNA, 77 nt, Homo sapiens
ggaacaggaccaaggagaaggaagaacaaaacagaggacaaggaggcaggaaggcaaacagggggcaccgacccgca

SEQ ID NO: 230256 - RNA, 80 nt, Homo sapiens
acacggacgcccgccaacacaaggcaaaagccagcaggagcccagcgccagaaaccacaccccgagcccggagaggaccc

SEQ ID NO: 230257 - RNA, 72 nt, Homo sapiens
caagagcaagcccaagaaccggcaacaagcagcgaggaggcccgacggagacgagcgaggacacagcccccc

SEQ ID NO: 230258 - RNA, 74 nt, Homo sapiens
ggaacgagggggaagcggcccagggaggacccggacccccacaccggagcagggccacgccgcagcgcagggag

SEQ ID NO: 230259 - RNA, 85 nt, Homo sapiens
gccccccacggggcccaccggagagcagacggcggcgcagaagggcacaagaagggccccgcccagagcaccacccgagacacag

SEQ ID NO: 230260 - RNA, 78 nt, Homo sapiens
ggccacacagaaggacggcccgacggaagagccgaggaaggcaccaggagaggaggaggggagacgcccaggcagaaa

SEQ ID NO: 230261 - RNA, 88 nt, Homo sapiens
ccgaggcaccgaggcaccagaggagggcgcgcggagccaggacagcggagcagcgcggaccccgcgggccagggcagggccagcagaa

SEQ ID NO: 230262 - RNA, 68 nt, Homo sapiens
aagagcaggcaaggagagcaagccagggcaacgaggccagggaagaaccacaaggagccgcaaaacac

SEQ ID NO: 230263 - RNA, 61 nt, Homo sapiens
aaggaccaagaaccagggcacaggggaagaagaaaggaaggcaaccaccaacaggcaaaca

SEQ ID NO: 230264 - RNA, 76 nt, Homo sapiens
gcgcccacgcacgaaagcccaggccaaaaagagcagacggcccaaccagagaaaggaaaacccagcgaagcaagag

SEQ ID NO: 230265 - RNA, 78 nt, Homo sapiens
gaaaacgaagaaggcaaaaccaagaggaaaagaggagaaagacagcaaagaaaaggagaagaaaggaaaaaaacaacc

SEQ ID NO: 230266 - RNA, 72 nt, Homo sapiens
aggggcgacaagcacagaggcagaacaagaagggcaaccaggggggaaggagggagcggagaacgcgaagga

SEQ ID NO: 230267 - RNA, 72 nt, Homo sapiens
gcgcgcagcggcaaaaggccaggaacgggagcagacgaaagcggaagaagcaggacacaaaagcggaagagc

SEQ ID NO: 230268 - RNA, 78 nt, Homo sapiens
cgcgcagccgacgcgggaagaagcgggcgcgggcagacggagccaagaccgaagaaaacacggaaaaacgacgggaag

SEQ ID NO: 230269 - RNA, 70 nt, Homo sapiens
ccacggcgccccgcaaggccagagcagaaaacgcgcggaacgcacaaacagagaagagcagcccaagggc

SEQ ID NO: 230270 - RNA, 63 nt, Homo sapiens
aggccagcccgcagcaccggggccagggcgcaggggagaaacagccggaccgagggcgaaagg

SEQ ID NO: 230271 - RNA, 86 nt, Homo sapiens
ccgagaaagcccacgcgagcacagaaggacagaaaacgggccccagacacaagccccaccaagaggacaccccaggaacgcggagg

SEQ ID NO: 230272 - RNA, 73 nt, Homo sapiens
ggaagaacacacacaccagagaacggaggaccacccgcacccaggggacgcacggcccaaccccgagcaagga

SEQ ID NO: 230273 - RNA, 39 nt, Homo sapiens
cgacagaagacggagccgaggagcggcccggccacgaag

SEQ ID NO: 230274 - RNA, 73 nt, Homo sapiens
aggcggccagcaaagcccaaaacaccccgccggcacacaccgcaagaaaaaggcgggaaaaccgccacaaagc

SEQ ID NO: 230275 - RNA, 70 nt, Homo sapiens
accaggcagacccgaccccagcgaacacagaagcgggagaagggccggcggacgggaacgacgcgagcag

SEQ ID NO: 230276 - RNA, 69 nt, Homo sapiens
gccgagaagcggggcaccacgaaggaccgaagagggcaggaacggagccgaagagagaggaggaacagg

SEQ ID NO: 230277 - RNA, 84 nt, Homo sapiens
ccccccggcagcaacccccacacccagcaccaggaggaaacgcaggagggccggagggcacacaacaccaggacaaccagcccg

SEQ ID NO: 230278 - RNA, 91 nt, Homo sapiens
gaaggagcgagcagacacccccaccgccccagggccaaccgacaaggagggaaaaaacgcgggacgggaacagaagaacaaaccaaaggca

SEQ ID NO: 230279 - RNA, 80 nt, Homo sapiens
ccagccccacgcagggcccaccggcccggccggagggcagcgccagaggcgccagggcaccacacccgggaagcaagaga

SEQ ID NO: 230280 - RNA, 34 nt, Homo sapiens
ggcaagcaaagcacagacaagaagaagagcgccg

SEQ ID NO: 230281 - RNA, 68 nt, Homo sapiens
ggcagcgcccagcagcgcagggcaccgagggcggccgagcccggaccacgggcagccgcccaccgcca

SEQ ID NO: 230282 - RNA, 39 nt, Homo sapiens
agcagcaccgaccccgaacacccaaaggacggcgggaag

SEQ ID NO: 230283 - RNA, 58 nt, Homo sapiens
aggagaagcaacaaaagaagagaagaggacagcaggcaacagagacacaaggacgccg

SEQ ID NO: 230284 - RNA, 75 nt, Homo sapiens
aggccgcccgggaacgcgacgcgagagaaggacccacggcgcgcgaaggcgaaccgcagaagaagacgaacagaa

SEQ ID NO: 230285 - RNA, 76 nt, Homo sapiens
ccaacccacgggcccgcggccaccaccagggcccacgcgcgcgccaagcccagggccccgagcaccggcccaggcg

SEQ ID NO: 230286 - RNA, 78 nt, Homo sapiens
acgcaccgcacaacaagaggccggcggggcgacaggagaagccgcgggagcggaagacaggcccggagcccgacggac

SEQ ID NO: 230287 - RNA, 75 nt, Homo sapiens
gagaagggagacgacgcgcgggccgcgagcggggcgacccgagaagacagcccaacaaggcgggacgacaacacc

SEQ ID NO: 230288 - RNA, 74 nt, Homo sapiens
gagaccccgaaaagcgccgcagacagaagggggagaagcggagagaagagaacgagcggaagaggcagaagccg

SEQ ID NO: 230289 - RNA, 79 nt, Homo sapiens
accaaggcaccgggccccgcccaggccccggacaaaggagagaagaacgagagccaaaggaccgcagacaggaaagcaa

SEQ ID NO: 230290 - RNA, 89 nt, Homo sapiens
gcgcccggacggaggaggaggggggcgaggaaacgcagggagaggaacaacaaagaagccacaagcacaggaaaggaaccaggagaaga

SEQ ID NO: 230291 - RNA, 79 nt, Homo sapiens
gccccccagagcggaaacaggccggcacccagccccaagaaacgcaaagagaacagagaacccagcaaaggccaaccaa

SEQ ID NO: 230292 - RNA, 39 nt, Homo sapiens
ggggccagaagacaaagcaaccaccgccagggagaaaag

SEQ ID NO: 230293 - RNA, 81 nt, Homo sapiens
cccccacccccgacccgcggacggagagcccagcaaggagaagacgcagccgcaggagacaagcgacagagaagaagagaa

SEQ ID NO: 230294 - RNA, 80 nt, Homo sapiens
ggggcgcgcaggccgcgacgagggcgcgaggccccgagccccggccccaaagacccaaaacagagacaccccccagcccc

SEQ ID NO: 230295 - RNA, 59 nt, Homo sapiens
accagagcgcgaccggccaaaagaacggcaaagagccaggcaaaagcagaccggaaaac

SEQ ID NO: 230296 - RNA, 78 nt, Homo sapiens
ggaaaacgacgcccacggaggaagaggggaggccgcccgagggggcgaagggccgcaccgggggccccgcacgccgac

SEQ ID NO: 230297 - RNA, 66 nt, Homo sapiens
gagagcaccaggcacccggggaggaggcccagcccagggagaacagaagggcaacagccaaaacac

SEQ ID NO: 230298 - RNA, 77 nt, Homo sapiens
ccgcgccagcaccacgcccgcgccgcgccgccgccaccagcccaagagaaagacacgacacaccggcaacagccgga

SEQ ID NO: 230299 - RNA, 41 nt, Homo sapiens
caggagaacaagaaggcgggggggagcacaggaggcgaaaa

SEQ ID NO: 230300 - RNA, 77 nt, Homo sapiens
aagaacaccaaaacaacaggaacggcccaaaggaggcaaaacaaagggaccaagaaaggcccagggaccaaagcccg

SEQ ID NO: 230301 - RNA, 74 nt, Homo sapiens
gcaaaggcgaacaaagagaaaagagagagcgagagagggaccgcagacggggacccaagggagagagggaacgg

SEQ ID NO: 230302 - RNA, 71 nt, Homo sapiens
gccgcaagcacagaaaggccgcaggcaggcaggcagaagacaacagacagggcggaaaaggaagagagaaa

SEQ ID NO: 230303 - RNA, 75 nt, Homo sapiens
cgaggcccgggcccgcaccaccggaccaagccaacaacacgggaccagcgacgacgcagaagagaggcacagaga

SEQ ID NO: 230304 - RNA, 74 nt, Homo sapiens
gcccaggccccggcagcgccgggacaagagggaaggagagaaggagagagacccagcccaccaaaggaagcagc

SEQ ID NO: 230305 - RNA, 70 nt, Homo sapiens
cagggcgagagggcaccgcggacggggccgcccagggggaaacccgcccagggcgggagaccgccaagaa

SEQ ID NO: 230306 - RNA, 79 nt, Homo sapiens
aggagccgccccgcgcccccgccgcgccccaggggagcccggggagcaagaagggaccacaggaccacaccagaaaccg

SEQ ID NO: 230307 - RNA, 81 nt, Homo sapiens
gcaaagacaaacgccaaagcaccaccccaaacaaggaaccaaacaccaaaagccagagaacaagaaagcacgcaaaagaag

SEQ ID NO: 230308 - RNA, 88 nt, Homo sapiens
ccagccggcagacggaaccaccccccgggaaggaacccaagccagacagaaaagaaggaacccagccagccggcggaagcaagcagca

SEQ ID NO: 230309 - RNA, 57 nt, Homo sapiens
gccagcaagccggccaaacaacaagcagaacccagagagagaagacgaaaaggcgaa

SEQ ID NO: 230310 - RNA, 37 nt, Homo sapiens
accgcaagggagaaaagaaagaagagaaagcaaccac

SEQ ID NO: 230311 - RNA, 86 nt, Homo sapiens
gcaaacaagccaacccaggaggaaaaacgggaggagaccagcagagcgagggccccccgcccccccacccccgccagcccgacacc

SEQ ID NO: 230312 - RNA, 84 nt, Homo sapiens
cccccgccgccggccgccgccacagccggacccgccacccggcgagggaaaaagcgggaggaggcgggccagaacacgaccggg

SEQ ID NO: 230313 - RNA, 32 nt, Homo sapiens
gggacaagacagcgcagccaacagccagacaa

SEQ ID NO: 230314 - RNA, 52 nt, Homo sapiens
gacagaggcacaaaaagcggggaccacaccacacagacaacaaacccaagaa

SEQ ID NO: 230315 - RNA, 60 nt, Homo sapiens
cccccgagacggaggagagggccggccaggggaaggagccccaccaaagccccaggccag

SEQ ID NO: 230316 - RNA, 77 nt, Homo sapiens
gccccagcagcaggggcgccagcggcggagaaaccaccacaaacacgaggccagcaacgaccaacaagacagacccg

SEQ ID NO: 230317 - RNA, 73 nt, Homo sapiens
ccaacccccccacgcgcacgccgggggcgaggagacaaaaaagcccaagcccccaggaccgggaggcacgggg

SEQ ID NO: 230318 - RNA, 81 nt, Homo sapiens
ggggcccccgaagaccccaccgccagagccgccaggcacgaagccagggcgaacagcagacaaagagacgggagcggaggg

SEQ ID NO: 230319 - RNA, 77 nt, Homo sapiens
gcaaaggcgccaaaacgagacggaaagagacccagggcgccaaaaacagggaacggaaacacaaagcggaagaacac

SEQ ID NO: 230320 - RNA, 84 nt, Homo sapiens
gccaaagagagccgaaaaccagaccacagaacagagagccggcagagagcagggggaacacgcgcagggacgaccgaggaacag

SEQ ID NO: 230321 - RNA, 76 nt, Homo sapiens
caagccgggcaccagaagcgggacaaagaggggaaagaaaaagagcccaccaaaaggaacagacggccccaggcgg

SEQ ID NO: 230322 - RNA, 82 nt, Homo sapiens
gccgcgcccacacacacacagcccaaccgcagggcaacagacacaaagcgacaaagaccaagccaacgaggccccgcagcga

SEQ ID NO: 230323 - RNA, 76 nt, Homo sapiens
gggcgaagcacgcacaccgggcagggccgagaggacgccagcggcgcgcaggaagagagaaggccacgcccgaccc

SEQ ID NO: 230324 - RNA, 67 nt, Homo sapiens
cgcgcgcggacaagaccagaaagaaaagaaccaaggagcggagagcagggagacagcagccagacca

SEQ ID NO: 230325 - RNA, 64 nt, Homo sapiens
cggaggagcggagaaccggagcggccaacggcaggagggacagaacacaggaaaaacaaacacg

SEQ ID NO: 230326 - RNA, 68 nt, Homo sapiens
cgggaagacagagacacgcgcagaagaggcacacaagcaggacccagacagccagccacaagcagccg

SEQ ID NO: 230327 - RNA, 78 nt, Homo sapiens
ccgcggcgggcgcacaccacgccggaaccaccaaagcccccacaaaaaaaagggggagaaacggaagcagacaaaaag

SEQ ID NO: 230328 - RNA, 83 nt, Homo sapiens
acccccggggacgggggagggcacggccgccacagccacaggggccgaaaaccacaccggcggccaccgggaagcacagcgag

SEQ ID NO: 230329 - RNA, 65 nt, Homo sapiens
gacccaggaccgagcggacccacagcaagaacggccaggccaacggagagacggcagagagaaca

SEQ ID NO: 230330 - RNA, 74 nt, Homo sapiens
ggcaacaggggacaagagaaaggacaaacccgaggcgagaaccaagacaacaggcgaagaagggaaacgaggaa

SEQ ID NO: 230331 - RNA, 69 nt, Homo sapiens
gcggcagacgggaccacgaggcaacgccccagcgcagaaccggccgaaaagcacaaacagcaagaaagg

SEQ ID NO: 230332 - RNA, 56 nt, Homo sapiens
cacccaggacgccgggcaccaccggaagaggggaaggaaggaagagcccagggccc

SEQ ID NO: 230333 - RNA, 65 nt, Homo sapiens
ccgaaccgaggcaaaagaaaggcggacagggccgaaagccacgagcccgaaacgggccgaaagac

SEQ ID NO: 230334 - RNA, 83 nt, Homo sapiens
gggccccagccagagggaaagccacggaccaaggaggagccaccagacggagacgggagagcgggcgaagcaaggagggcaac

SEQ ID NO: 230335 - RNA, 51 nt, Homo sapiens
caaggccggaagaagagcgcagagggacccagaaagcagagaacgaccacg

SEQ ID NO: 230336 - RNA, 72 nt, Homo sapiens
gcaccccgcaaaaccagaccacccaaccgacccaggaagcacggccacagggaagcccgggggggcacaacg

SEQ ID NO: 230337 - RNA, 73 nt, Homo sapiens
aaaccaaagaccgacaagaccccacaggccaaagagcaccaagagaccaccaagaagagagaagaagcgaaga

SEQ ID NO: 230338 - RNA, 52 nt, Homo sapiens
caccggaaggccacgccaagacaggagaacggcggccccgagccaaggaaaa

SEQ ID NO: 230339 - RNA, 84 nt, Homo sapiens
ggaccaagggcaaaggcacaaaggcaaaggggagggggcccaggaagccgggagcccaggaaccggaccaaaggagagcaagga

SEQ ID NO: 230340 - RNA, 80 nt, Homo sapiens
cggggagcgcgacgggggacgacgccagcagcccggacgccaccaagccgagccacgggcagcgggcgacgggagcaccg

SEQ ID NO: 230341 - RNA, 60 nt, Homo sapiens
ggggaccccggccacggagcaggcaccgacaaggcaacggcgaaagaggagagcaaaaac

SEQ ID NO: 230342 - RNA, 68 nt, Homo sapiens
aaccggagaggcggagccacaagcacgcggaagagccagcgccgcggcccacggaagaaggacacaag

SEQ ID NO: 230343 - RNA, 73 nt, Homo sapiens
caaagcacagacaggagaaagaagacagccacagaaagggcggagaacggaaaagcaccaggaagcagagagg

SEQ ID NO: 230344 - RNA, 88 nt, Homo sapiens
ccggccccaacgcacagccagggagccaagcgccgcccggccgcgccacgggacacggaaccaggaggagcggagcgccgcgcgccca

SEQ ID NO: 230345 - RNA, 70 nt, Homo sapiens
cggccaggcacagaagggaagaacaacgacagcaggaggggaggaagcagaaacaaacacccaaaaaaac

SEQ ID NO: 230346 - RNA, 80 nt, Homo sapiens
cgaggcgcaccaagggcgaaggagccggcccaaggccccgagccccggccccaaagacccaaaacagagacaccccccag

SEQ ID NO: 230347 - RNA, 75 nt, Homo sapiens
cgggggaagggggcaagacgggggcgcaccgcagaaggacccacagagagggccgaggcagacaagggaaaggcc

SEQ ID NO: 230348 - RNA, 114 nt, Homo sapiens
gccggaccgcacccgcaccgccaaccacgggcgaggaggcgccgcgcaggccggcgcggaagaggccggcggcgggacggccccacgggacccgccccgaccacagcagcgaca

SEQ ID NO: 230349 - RNA, 71 nt, Homo sapiens
acccagaccagccaaagcggacgccggcgccgacgcgggaggacagaacaccggaaagaaaacagaccaca

SEQ ID NO: 230350 - RNA, 70 nt, Homo sapiens
gagcccgcacccagccacaccggaaccgcgggagccgaagccagagacgcgcacgaaacgacgaagaggc

SEQ ID NO: 230351 - RNA, 64 nt, Homo sapiens
cgcccaggagaagcgaaacgaggagcagaaggcgcgaacaggcaggcagaacaacggggaacgc

SEQ ID NO: 230352 - RNA, 71 nt, Homo sapiens
acgggcaccggggagaaaaagcgagggacagacacgaaaaccaagaaccagcagccggcaaaaaaacggga

SEQ ID NO: 230353 - RNA, 77 nt, Homo sapiens
cccgcggccaggcgggggcggcgccaagcgggggccccgaggacggcgacggaggggagagaggggcgccagggcca

SEQ ID NO: 230354 - RNA, 64 nt, Homo sapiens
aacggaccaccagaaagcaccccacaggggaggcgggcaagaaccccgcacacccgccacacag

SEQ ID NO: 230355 - RNA, 72 nt, Homo sapiens
gcgaccgcgccaggccggccacacggaggcgggccagggccagcgcgggggacgaccagcaaaagagacccg

SEQ ID NO: 230356 - RNA, 83 nt, Homo sapiens
accaacccgccccccccagaccaaagagagcagcacgacagcaaccgaccacgccaacggccggcaccaaggcgcagagcacg

SEQ ID NO: 230357 - RNA, 62 nt, Homo sapiens
aagccggaggaggacaacgacaccaccgcagcgacgagcagacccccccccccccgccggcc

SEQ ID NO: 230358 - RNA, 73 nt, Homo sapiens
cgaccgcggccccagacagggcaggccgggccccgccccacggcggcacagggagaacacagggccccaccgc

SEQ ID NO: 230359 - RNA, 80 nt, Homo sapiens
ccccaaggccggaagaagggagagcagaagccgcgaaaaaggggggccgagcgcgagcaaggaaccccgggccccgccac

SEQ ID NO: 230360 - RNA, 68 nt, Homo sapiens
ggcacgggaagcacggaggcagcggcggaggaagaaaaagagcaggaagcaacagggccgggaggaag

SEQ ID NO: 230361 - RNA, 62 nt, Homo sapiens
cccccacgagcgcgacccgaagaccaaaaggagcgaaggacaggccagaaaggccaagccgg

SEQ ID NO: 230362 - RNA, 73 nt, Homo sapiens
gcgagaccgcaccagaggcgggaagcgggggcacgcgcaccgccagaaggggccacaagacgcaaccggagaa

SEQ ID NO: 230363 - RNA, 70 nt, Homo sapiens
gcagccacgcaccgaccacggggcccgggcagagggaaagcagaggacggaacaacccgggggaccgcgg

SEQ ID NO: 230364 - RNA, 121 nt, Homo sapiens
gagggccccgggagcgacgccgacgccaggccgagcaccagccgggacgcggggaccggaacagacaacggagcagcaacgaagcaacaagcgccaacacccggcaagaccgaccaagagc

SEQ ID NO: 230365 - RNA, 73 nt, Homo sapiens
gcccggggccagggcgaagcacgccaccagccacggaaagcagagcaaccacgcccccgagagccgccaacac

SEQ ID NO: 230366 - RNA, 72 nt, Homo sapiens
cagagggagaagaaacagaacgccccacgaggcggcgcccgcgaaagggaggagagagcgaggccacccaga

SEQ ID NO: 230367 - RNA, 85 nt, Homo sapiens
gccccacaccacccgcagggccggcacggccaaggagagccggaaccaaaaagaagccccagagccggggccaggagccccaagc

SEQ ID NO: 230368 - RNA, 70 nt, Homo sapiens
aggccccgcgggaggagagaaccgcagaaaccgacaggacaaaggaaagaagccacagcaacgagacaga

SEQ ID NO: 230369 - RNA, 67 nt, Homo sapiens
gagagcggggagggcggagcgcgccgagcgcccacgccgccacccaggcaaggcaaggaggaccaag

SEQ ID NO: 230370 - RNA, 79 nt, Homo sapiens
acaaggcgccaaacaagaaaaacaaagccaaggaaaccccaacacagagccaagcgccaagggaaaaagaaaagggcga

SEQ ID NO: 230371 - RNA, 49 nt, Homo sapiens
gggccagaggacagaggacaggcacaggaaaagagccagcgcgaccgag

SEQ ID NO: 230372 - RNA, 69 nt, Homo sapiens
agagaccaggcgccacagccggaagcgggagaagcaagacgaagaacagagaaaccaccaagaaagaaa

SEQ ID NO: 230373 - RNA, 73 nt, Homo sapiens
aaaccgcgggagcgagaccgcaggcaaaaggaaagaagaccaaaaacaggcggagaaacgaaccagcaagcaa

SEQ ID NO: 230374 - RNA, 51 nt, Homo sapiens
gcccacaccaccgcgaccaagccagcaacagcgcagcaggggagaaacggg

SEQ ID NO: 230375 - RNA, 48 nt, Homo sapiens
ccggaagccaaagcagaagcaaaccccagaaaagacagccaagcaaca

SEQ ID NO: 230376 - RNA, 81 nt, Homo sapiens
aagacaaccggcgggaggaaaccagggcggcaaaaaggcagagacccaaccaaaaaggacacaccacggaaagagaagggc

SEQ ID NO: 230377 - RNA, 86 nt, Homo sapiens
ggcggcgaggaaagcaggaggaggggcggcggcgggaagagagaacaccgaaggagaagccaagccaggcccaggaaggagccgac

SEQ ID NO: 230378 - RNA, 78 nt, Homo sapiens
gcacacgcgccagccagaccaagcccgcggagcggagaaccggacgagaacacacaagaaaaacccggggaaggcaag

SEQ ID NO: 230379 - RNA, 73 nt, Homo sapiens
gaaagggacgcaaggaacaaaaggaaacccaccaaggagaccggaaaccgagagaaacgaagacgaagaaaca

SEQ ID NO: 230380 - RNA, 78 nt, Homo sapiens
ccacggcagacacacaacccgacccgacgacggacagagcacaccgggaagacccggcacacacgcggcccgcggccg

SEQ ID NO: 230381 - RNA, 57 nt, Homo sapiens
cagacaagggacaaccagccagcgaccgaggagagggaggggggaagacagggccca

SEQ ID NO: 230382 - RNA, 65 nt, Homo sapiens
gccccgacgccccgaggcccagggggcggcgggggaacagcagcagcaccaaagacccaccaaca

SEQ ID NO: 230383 - RNA, 36 nt, Homo sapiens
ccccagaccaacacacagacgaccgaaaacccagcc

SEQ ID NO: 230384 - RNA, 77 nt, Homo sapiens
caaaagcaaccgcgaagagcagaggccggcgacgaaagccccagagagaacgacacggccggaagcaaagaacgaac

SEQ ID NO: 230385 - RNA, 80 nt, Homo sapiens
gcaccgccagggcgcaggcacagcccgagaaaccgcagcacacacggagcaccgaagacgagcagcagcacgcagcagcc

SEQ ID NO: 230386 - RNA, 40 nt, Homo sapiens
ggagaccgaagaggggcaggcagcgaaacagaaggcccca

SEQ ID NO: 230387 - RNA, 82 nt, Homo sapiens
gggaccgccgccgccgccgccaccaggacacaccgagaagccgaaacagccacaaccagagacaccacagggaccagagccc

SEQ ID NO: 230388 - RNA, 70 nt, Homo sapiens
gaagaaacaggaaaagggccgcaccaaaaagagaaggagcaagaagagaaaaacaaagcacacacggcag

SEQ ID NO: 230389 - RNA, 66 nt, Homo sapiens
cgaacggccccacagccgggcggggggaaaggacagagcgggagccaccagcgccaaagggaagcc

SEQ ID NO: 230390 - RNA, 81 nt, Homo sapiens
ccaaggcagaagcagacgcaggcaagagccaagggcgcaaaacgaccagacccgccccgccacgagaacacacccccaggc

SEQ ID NO: 230391 - RNA, 67 nt, Homo sapiens
aacgaagagggaaacagccacaagaagagcacaacacagaagaaacggcaagcaaggacgaacacac

SEQ ID NO: 230392 - RNA, 77 nt, Homo sapiens
gccgaggcggccacccgagacgcggcgcgcacgcccggccgcggagcaagaggggagggaaaaggaaaagcgcgaaa

SEQ ID NO: 230393 - RNA, 74 nt, Homo sapiens
acccgcaagaagagaacccagggaagccgaagagccagacaacaggcacaaagagagaaggaacacccacaggg

SEQ ID NO: 230394 - RNA, 52 nt, Homo sapiens
gggcaacggagaaggcaaggcagcgcgaagcagagaacagcgcgacacccga

SEQ ID NO: 230395 - RNA, 59 nt, Homo sapiens
caaagagaagagacggcaagcagaagacagcggacaggggacccaagggagagagggaa

SEQ ID NO: 230396 - RNA, 79 nt, Homo sapiens
ggccccgccgccaagaggagcgagcggacccgcgagggggagcacagggagacaccagagagaaccaagcgaagcacag

SEQ ID NO: 230397 - RNA, 77 nt, Homo sapiens
ccacggggaggacaaccgcaggacccagcagcgcagcagccaaggagacaccccagagaacagcccaccaccacccg

SEQ ID NO: 230398 - RNA, 75 nt, Homo sapiens
agaagggcagcagcaaagaacgccgcaagaggcagcgcgaaaaagaaacccccaaagagaaagaagaagaaaacg

SEQ ID NO: 230399 - RNA, 76 nt, Homo sapiens
ggcgggggaggagacccacccaaacacggacccacaaaccgggagaccaagaacggcacacggacggagagagaac

SEQ ID NO: 230400 - RNA, 118 nt, Homo sapiens
ccgcagccaggagcagcagccgcgccgcagaccggcccgcggagcccgcgcgccgagccccacacaggcagggaggaaagacaggaaagaagccaccacagaaaccgaagagccaggg

SEQ ID NO: 230401 - RNA, 77 nt, Homo sapiens
agaggagccacgacacaaggaccccaacgcagacacgaaggaagacacacgcaaaaagggacaccccccaaggaaag

SEQ ID NO: 230402 - RNA, 67 nt, Homo sapiens
aggaccaagaaccagcaacccagaccaacaagcagcaaagaggaccgcaggggggcgaacggcagcc

SEQ ID NO: 230403 - RNA, 56 nt, Homo sapiens
cacaaaggaagacgaaccggagaagagaggaagccaaacacgaagggcccagacaa

SEQ ID NO: 230404 - RNA, 76 nt, Homo sapiens
gagacgagcgccccaccagcaggaaccagggcgagccaggagcagcagccccggagaagaagcaggcgccccccac

SEQ ID NO: 230405 - RNA, 78 nt, Homo sapiens
gagagaaaagcccccaaaagcagcacaggggacccaagggagagagggaacggcgaaagggcagcccggaaggagcac

SEQ ID NO: 230406 - RNA, 79 nt, Homo sapiens
cagcgaacaagaagagagccaccccaacaggaacagagacaaaggacccagaaggaaagaaacccacacagagagcacc

SEQ ID NO: 230407 - RNA, 58 nt, Homo sapiens
agggacagcgcaggcagcagcggggagcgcaaggccaagaaagaagcaggagaggcac

SEQ ID NO: 230408 - RNA, 34 nt, Homo sapiens
gaaaggacacaccgagacagccagcaggggcaga

SEQ ID NO: 230409 - RNA, 87 nt, Homo sapiens
aaggaacggccaggacgcaggcaaagagagccaccaagaagccacgcgccccacaaagccaagcgaggagagaccaagaccacagcg

SEQ ID NO: 230410 - RNA, 83 nt, Homo sapiens
ccagaacggccaggagacgcaacggaacgcaagcacaggaccagaaacgaaaggcagcagaagaggaaagccagaaagacgag

SEQ ID NO: 230411 - RNA, 53 nt, Homo sapiens
caagcggaagggagcccaagaggaccagggggagaagggcgcagagacccccg

SEQ ID NO: 230412 - RNA, 73 nt, Homo sapiens
gcggggccaacacacagaccacccccagaacagaagggcaccagggaagccagggcaagcgagcaaccacccg

SEQ ID NO: 230413 - RNA, 35 nt, Homo sapiens
gcgagacgccagccacccgcaagaagcaaggccgg

SEQ ID NO: 230414 - RNA, 75 nt, Homo sapiens
aaacaacagggaaccaaggggacaaaccaacagaagggcaaccagaacacaaaaagcggggagcacaaaaccgca

SEQ ID NO: 230415 - RNA, 59 nt, Homo sapiens
cgaggaggaaaggaggacgaggcagcgagaggaagaaaggacacaaagcagaagaaaag

SEQ ID NO: 230416 - RNA, 46 nt, Homo sapiens
ccggcccaccaagaacccagagaacccacaggagggccagaggaca

SEQ ID NO: 230417 - RNA, 74 nt, Homo sapiens
agccaccgcaccgccggcagcggaagacgacgaggacgcaggcaaggccggaagcaggaccgggcgcaggccag

SEQ ID NO: 230418 - RNA, 45 nt, Homo sapiens
ggccgcgggagcccgaaagcgaggacaggacaacagaaaaacaca

SEQ ID NO: 230419 - RNA, 59 nt, Homo sapiens
aggccagagcagcaccaggccagagccagaacagacccgagccccaaagacagaaaagc

SEQ ID NO: 230420 - RNA, 60 nt, Homo sapiens
cacgaggggagggcgagccgccagcccaaaccagaggaagccgaacaaccacgagaaaac

SEQ ID NO: 230421 - RNA, 62 nt, Homo sapiens
cccagagaccggaagacccgccggccaggcaggaagaaaagcacggcggacacgcgcgaaga

SEQ ID NO: 230422 - RNA, 49 nt, Homo sapiens
accagccgggaggccgaggcccgcccgagcaccccagaaggggcagcca

SEQ ID NO: 230423 - RNA, 84 nt, Homo sapiens
gcggaaccggaggaggggagcggggaagggcgacgcgccacagagcgggcgggcgggccacgcggcgggacaggaacccaaccc

SEQ ID NO: 230424 - RNA, 68 nt, Homo sapiens
ggacccgggggcacacccccgccggcggccacacgccacgccaccagcggcaaggaccacaaccagaa

SEQ ID NO: 230425 - RNA, 77 nt, Homo sapiens
acgaaaggagacaaagaccgggcgacgaggcacagcgcgcaagaagggagagacaaaacggccgcacccaggcagag

SEQ ID NO: 230426 - RNA, 96 nt, Homo sapiens
cgacgcaccgcaggcagacaaaagggccaaagaagggagagagcagcgcaaagcggagcccagcggccgaacaccgaaacaagaagcggagagagc

SEQ ID NO: 230427 - RNA, 83 nt, Homo sapiens
gcggcgccgccgaggcccagagcgccagccaggcggcgaagagagcaggccgcccagaaggccagggcccagaaccgcaacca

SEQ ID NO: 230428 - RNA, 40 nt, Homo sapiens
caaagcggagagaaagcggaggaggccgccgaaggaggag

SEQ ID NO: 230429 - RNA, 76 nt, Homo sapiens
ggcaaaaagaaaaaccagcgaagcacagggccggcccagggagaacgcaaaaccaccacccccacaaaaaacgcag

SEQ ID NO: 230430 - RNA, 79 nt, Homo sapiens
gaggcaccggaacagacgcaggaagcgagccagcacaagacgggaccagcaaagcaggccagagcacagaggaagagag

SEQ ID NO: 230431 - RNA, 75 nt, Homo sapiens
gaaggaacagaccccgagcgggaaacaggagaagggcacccaagaagaccgaaggggagcaagcaggccaggggc

SEQ ID NO: 230432 - RNA, 87 nt, Homo sapiens
gggcggagaggagcggccggagcagcgagggcccggcgaggagaaccaacggcccgaaagaggaccacacgaagaaaaaagacagag

SEQ ID NO: 230433 - RNA, 77 nt, Homo sapiens
caacacggagccaagcaggcaggaccacaggaacgggacacaaggacaagggagaaaggaacaggcccaaagacgca

SEQ ID NO: 230434 - RNA, 72 nt, Homo sapiens
cgagaccagcccaacaggaccaggagcgggagagggccaggcaacaaaaagcccgcccagaagccaagcacg

SEQ ID NO: 230435 - RNA, 59 nt, Homo sapiens
gacgcaccgagaaaggaaggaaaaccgacgagcaaaaggccaaaacggaagaacccccg

SEQ ID NO: 230436 - RNA, 36 nt, Homo sapiens
cccaccgcaccacgcgcgggcccagcccagggcggc

SEQ ID NO: 230437 - RNA, 72 nt, Homo sapiens
gaacaggaggaagaacccacgaaacacaggcacccagagcaccgcacccagcccaagggggggagcccaggg

SEQ ID NO: 230438 - RNA, 79 nt, Homo sapiens
ccagcgaccccaggaccacacacagccccgcccaggaacacggcggacgccagcccaccggccagcaccagagccacca

SEQ ID NO: 230439 - RNA, 77 nt, Homo sapiens
gaaccagccacagcggggcggagaggaacagaaggccgcaagcaaagagaccccccaaagaaagaacggagaaaaag

SEQ ID NO: 230440 - RNA, 42 nt, Homo sapiens
gaagcggggcggagagaagaccaaccagccacccaaagcccc

SEQ ID NO: 230441 - RNA, 79 nt, Homo sapiens
gaacaggagaaaccccggaccggaaccgaaccgcaccagggacgagacgaaccaaccaggagaaagagcagcgagccag

SEQ ID NO: 230442 - RNA, 75 nt, Homo sapiens
gagcaaccgccccccgcaccaccagcagccaggaaccaagccagaagccagacgccgggaaggccaaacccagac

SEQ ID NO: 230443 - RNA, 85 nt, Homo sapiens
ccaggcgacgcccaccaagcacgggcgagggccgacccgcaccggagccacccgcaggagaccaggagggcacagcacgcaccgc

SEQ ID NO: 230444 - RNA, 71 nt, Homo sapiens
caccccgacccccacaccgggcccccagcgagaccgagccgcaccccgccaggcacacgccacaggccaac

SEQ ID NO: 230445 - RNA, 77 nt, Homo sapiens
gcgccccggcacggagcagcaaacgcagagacaaaagaaacgggccccgacgagcgccccaaacccaagaaggaagc

SEQ ID NO: 230446 - RNA, 69 nt, Homo sapiens
aaacacacaaaaagcaccaggacccaaacaaaacggccaaagagaaagcccccgaggaagagagaagaa

SEQ ID NO: 230447 - RNA, 73 nt, Homo sapiens
cgagagccgcccgggccagcggccgcgcacccccggccggaggcaccagcgagcccacgaaagggccagcagc

SEQ ID NO: 230448 - RNA, 68 nt, Homo sapiens
gacgagggcgcagcacaggccaagaaagccggacagggccagcaaacaagaaccgccaaggaacaaag

SEQ ID NO: 230449 - RNA, 40 nt, Homo sapiens
acagaccagcagccgccaaagcacgcacccggcaaagaac

SEQ ID NO: 230450 - RNA, 77 nt, Homo sapiens
ggcggcgccgcgaccccggagacccgggccggcccccaccagagaccgggagcgggcaagaagaggaagacagaacc

SEQ ID NO: 230451 - RNA, 41 nt, Homo sapiens
aaacacaaagcagcccaaccaaaggaggagggaggaagaga

SEQ ID NO: 230452 - RNA, 98 nt, Homo sapiens
gaacccccccgcgccgggggcccggcccgaccgagaccgggccgcccaaaaaaacgcgccggacaagaagaggaggaaaagaagaagaaaaaaaggaa

SEQ ID NO: 230453 - RNA, 56 nt, Homo sapiens
gaacggcacacgcgagcgggcagcagcgccggagcagcaccaaggagaaagggcca

SEQ ID NO: 230454 - RNA, 72 nt, Homo sapiens
gaacggcacagacccaggccagccaacagcacacacccaggggcaaagaaaagcagcgcaccagaggacgcc

SEQ ID NO: 230455 - RNA, 71 nt, Homo sapiens
aaacgacggagaacagagcaaagacagcaaaaaaaaggaagcacaccagaggacggccacccggaagagag

SEQ ID NO: 230456 - RNA, 75 nt, Homo sapiens
ggaagaggaaagcaagccggacacacaaaacgacaggagcccagaggacagaaccccagcccagagccaacaccc

SEQ ID NO: 230457 - RNA, 82 nt, Homo sapiens
aggcggagaccacccaaaccccccaagaaggcggccaaaaccgccgggccaagggaggaagaaggagaacacgaaaaagggc

SEQ ID NO: 230458 - RNA, 69 nt, Homo sapiens
cgcaagaggaacaagacagagaccccgaggaagacaacgaaaaaagacccacaggcgaagaacaaaagc

SEQ ID NO: 230459 - RNA, 61 nt, Homo sapiens
gaagacgaacgcaccccagagccgacccccaccgcaagggaggggggaagacagggcccag

SEQ ID NO: 230460 - RNA, 67 nt, Homo sapiens
agcaacggaaccagcgccgagcgcgcaggggaacaaggggcggcgcacccgcccaccgcccacgccc

SEQ ID NO: 230461 - RNA, 79 nt, Homo sapiens
caggggggacagccagccagcagcaggagggagggaggaagaggcgcggcaagggcgcggcaagaaaaccggggccgcc

SEQ ID NO: 230462 - RNA, 90 nt, Homo sapiens
cgcacccccagccagccgcgaccagcgccagcgcagccgccagcgccgggaggcgacacccgaagccccgaccgccacagcagagagaga

SEQ ID NO: 230463 - RNA, 52 nt, Homo sapiens
gccagagggagaaaacccaggaccgcccacaggacaaacagcgaagaacagc

SEQ ID NO: 230464 - RNA, 78 nt, Homo sapiens
ccagaccagccgggaaggaacagcacccggggacagcagggggcccccaaagggaagccaaacacaaaggaagaagcc

SEQ ID NO: 230465 - RNA, 76 nt, Homo sapiens
aaaaaaaaggaagcacaccaagggcacggaggggggggggagagggcaagaaccaaccacaggcaacggagaggaa

SEQ ID NO: 230466 - RNA, 75 nt, Homo sapiens
agaaagaaaaacagggccgagcaccggagaaaacacaaacccaggagcaccacggcggagcaggagcaaaggagc

SEQ ID NO: 230467 - RNA, 76 nt, Homo sapiens
cggcggacaacccacaccaggccagccgggaaccgaacccaaaacgagcgggccaaggaaagcggagggagcccca

SEQ ID NO: 230468 - RNA, 71 nt, Homo sapiens
ggaggggaaacgaagcgcacgaaacaccaagaaacgaaggaggcccaaccacaaaaggagccgacggaacc

SEQ ID NO: 230469 - RNA, 73 nt, Homo sapiens
cagaggaaagccagaaggcaccagagagaggccgaacggagcagacaaaggacacacgagaagagcaaccgaa

SEQ ID NO: 230470 - RNA, 75 nt, Homo sapiens
cccaaccggaccaaaggaggagcggaagcgggagagacgccgaccgcagcaaaagagccaacacccaggccaggc

SEQ ID NO: 230471 - RNA, 50 nt, Homo sapiens
ccgacgccaggcagcgcccccaaacgggaagcgggagaggccacccgccc

SEQ ID NO: 230472 - RNA, 80 nt, Homo sapiens
cagggcagccaccgccaaagacaagcagagcccaggcgggaaggcagcccaggacacagcagcacccaccgagcagaagg

SEQ ID NO: 230473 - RNA, 72 nt, Homo sapiens
gccaggagggaacccgaagcgggcgcgcgcacggcaggacggagagcgagggggaaaagcaaaagcagaggg

SEQ ID NO: 230474 - RNA, 75 nt, Homo sapiens
gaccagacgaaagcaaccagcaagagcgagaagcacgagaaagcaaaagggaaagcaaggggaagggcccaagaa

SEQ ID NO: 230475 - RNA, 71 nt, Homo sapiens
acggacgagcacgcaaccacgggcccccgcgcgcagacaacccagaaaagaaaaggccaggggcgccgaaa

SEQ ID NO: 230476 - RNA, 70 nt, Homo sapiens
cgagagccgcccgggccagcggccgcgcacccccggccggaggcaccagcgaaggaagacccacaagaga

SEQ ID NO: 230477 - RNA, 70 nt, Homo sapiens
gagaacacagaagacagacaagaaaagcacgaaggacaggaaaaggcccaaaaaggaagaaggcgccgag

SEQ ID NO: 230478 - RNA, 82 nt, Homo sapiens
cagaagaggaggaaaaggccacgggaggaagacccaaaagaacaaaccaggggagggaaacgagaaaaacgacgccagcggc

SEQ ID NO: 230479 - RNA, 57 nt, Homo sapiens
gggaaaacagagacagcagcagacgcagcaggcgcaaaaacgaacccacaaccgaac

SEQ ID NO: 230480 - RNA, 51 nt, Homo sapiens
ccagccccccccccccgccgcccaggccgcgaggagaacgccaagccaacc

SEQ ID NO: 230481 - RNA, 76 nt, Homo sapiens
gggcccaaaagacgaacgcaaggagggacaggacggaaggagcggaggaagacacaagagcgagcgaagaaggcgg

SEQ ID NO: 230482 - RNA, 68 nt, Homo sapiens
ccagcacacacaagcaaaccagacccaaaagagcaaacaaccgacggagaaggaaaaaagccgagaaa

SEQ ID NO: 230483 - RNA, 63 nt, Homo sapiens
gggggcgaggagacaaaaaagcccaaggccagcgagagaggagcaccggccaggagaagcgca

SEQ ID NO: 230484 - RNA, 78 nt, Homo sapiens
aacggagcgcccaccagaggcgcgaagcacagcagagcacgccaccgaccagccaaaagcagaaaacacccgacaaga

SEQ ID NO: 230485 - RNA, 81 nt, Homo sapiens
cggacaagagcgcggaacaggacgccccgagcgagcccagacaccagaagcgaaggagaaggcggggagaacagccccgac

SEQ ID NO: 230486 - RNA, 73 nt, Homo sapiens
ggcggaacccggggccgggacgcagcccggcggcagcagccagaggcgcagaggacaggaggcgaagcacaag

SEQ ID NO: 230487 - RNA, 83 nt, Homo sapiens
cgaccaagacagagcaaggccacgacccacgagacaggggcccaagaaaaagcaccggacaaggagaagaggcccgaaaagag

SEQ ID NO: 230488 - RNA, 51 nt, Homo sapiens
aggcggcccagcacccccgaggccacagagcagcaggaggccacgcgcagc

SEQ ID NO: 230489 - RNA, 80 nt, Homo sapiens
caccggccgccgccgccgccgcccaggcgcagcggcagcaagcaaaacccagaaccagagggcgggcacagaagaaacca

SEQ ID NO: 230490 - RNA, 72 nt, Homo sapiens
gagaaacagaacccaagccaggcacccaaaaaaacaacagaccacagcgcggccagaaggcacagcccaggc

SEQ ID NO: 230491 - RNA, 69 nt, Homo sapiens
ggagacgcaaggagccaccagcacggaccaggaggcgagcaacaggaggaggagcggcacccacgagga

SEQ ID NO: 230492 - RNA, 76 nt, Homo sapiens
gaggagaaaaggaacccaaacagagccacccccacccaagagacggcaaacagaagggcgcaggaaaaggcgcaca

SEQ ID NO: 230493 - RNA, 74 nt, Homo sapiens
gagcccacgaacccgaagcccccaaagagagaaccggagagcacccaacagagggaaaaccccgaccaaaagaa

SEQ ID NO: 230494 - RNA, 68 nt, Homo sapiens
gacgcacaacagcaagaccaggaccacaaaacaaaccacccaacacaagcaaagaccacgaagccgga

SEQ ID NO: 230495 - RNA, 59 nt, Homo sapiens
gggaacaaacacaagccccagcaccacgaacaggaagaagagccggaaaagaaccggcc

SEQ ID NO: 230496 - RNA, 71 nt, Homo sapiens
acaccagaccaaaaccaacagaaacgaacggagaggcagacagcaaaggaggaagcagagccgaggaagac

SEQ ID NO: 230497 - RNA, 81 nt, Homo sapiens
acgcggggggcgggaagagccggggccgggcgacaggagcagcgaagccacaaacagcaccaccagagaaggagagcgggg

SEQ ID NO: 230498 - RNA, 69 nt, Homo sapiens
cgcagaagcgcggagaagcgaaaaccgcaggccaggaggaggaaaaccaggaaggacaggaccagaaga

SEQ ID NO: 230499 - RNA, 78 nt, Homo sapiens
aaaaacaagacggggcgccccacagaggggcgacggacaacccccaagaaagggagcccagaacgaaacaacccagca

SEQ ID NO: 230500 - RNA, 74 nt, Homo sapiens
ggcagaaaaagaaggaaaacccagacccccgccagcagggaacccaggagcaggagagaagaggcgccagagaa

SEQ ID NO: 230501 - RNA, 74 nt, Homo sapiens
accacaggagcgagagcaaacaggacacggaaacggagaaaccaagggaaagaaacgaaggaaacagaaagaag

SEQ ID NO: 230502 - RNA, 73 nt, Homo sapiens
caaaaccccgcacgaaaggccggaaagaggggaggggcacgcaacaacgggagaaaacgcaggccacaaagac

SEQ ID NO: 230503 - RNA, 78 nt, Homo sapiens
ggaagcgcgaacagcagcgcaggcaccggcccgaccagccacgacacccacgaaaggacaggcagggacgggggcaga

SEQ ID NO: 230504 - RNA, 86 nt, Homo sapiens
caggagcagcacaagagcccagcagcggccaagccacagagcgccgaggagccgcaaggagaaacagaggggggggcaaggagccc

SEQ ID NO: 230505 - RNA, 83 nt, Homo sapiens
caggcccgaccagcacgcgaaagccacgagagaagaaagaaaaagaaaccgccagcccagagacacgaaagggacagagaggg

SEQ ID NO: 230506 - RNA, 64 nt, Homo sapiens
cccgcgccgagcgcgcaagcaaaaccaaagaggcaaagaagccgagaaacaagccacccccgaa

SEQ ID NO: 230507 - RNA, 73 nt, Homo sapiens
gccccgaaagaaagccgcgaacccaaggcagacacaacaccacaagcaggaccagaacagagaagaaagcagg

SEQ ID NO: 230508 - RNA, 76 nt, Homo sapiens
acaaggaaagaggcacacccagcccgagcaaggaccagaccccacaagaaaacacacaaccacaggcccaagcaaa

SEQ ID NO: 230509 - RNA, 63 nt, Homo sapiens
cggagagcccagagcgacccccggccaccgggcgggggaaaaggagggagcaccaaggcgagg

SEQ ID NO: 230510 - RNA, 39 nt, Homo sapiens
agaaagacacccagacagagaggccaaacccaaaggaaa

SEQ ID NO: 230511 - RNA, 83 nt, Homo sapiens
aaagaaaaaagagagagaaaaaggacaaaagccaagaggaggacagcgcacacagcaagcacgagcaccagagcagagcgggg

SEQ ID NO: 230512 - RNA, 33 nt, Homo sapiens
ggacccagcgaggagggccggaggaacgaaaca

SEQ ID NO: 230513 - RNA, 71 nt, Homo sapiens
gaacccaccggaagggaagggcaccccgaagaaaaaaagagcacaaggacaggcaagaagcgaggcccacg

SEQ ID NO: 230514 - RNA, 58 nt, Homo sapiens
ggcccagcgagccagaagcccccccagcagggaaagcaaggcaacagagagcacagaa

SEQ ID NO: 230515 - RNA, 82 nt, Homo sapiens
gggaagcaggacgcgccgcgccccaagagggccgaggaggcgggcgcccccgccggcagcagcaagagacggcggagggagg

SEQ ID NO: 230516 - RNA, 77 nt, Homo sapiens
cagcccaagcgccccccccgccccccaggaggggcgagagggagccgcagcgagcagaaaacccgacccaaccagcc

SEQ ID NO: 230517 - RNA, 64 nt, Homo sapiens
ccagcgcagcaccaccggcagccggggagccacgacaacagcagcccagaaggaaaaccagaag

SEQ ID NO: 230518 - RNA, 83 nt, Homo sapiens
gaccggaggaaggaaggcggagccagccgaggggagaagagcccagagacgggcacagagagacccagcgacgagcaaaaggc

SEQ ID NO: 230519 - RNA, 79 nt, Homo sapiens
gggcacgacgacccaacagcaagggcgccagaacaaagaagagaaacgcagcgcaaccaaaaccacgcggagcgggaag

SEQ ID NO: 230520 - RNA, 81 nt, Homo sapiens
ggccgagggaagcccacacaacccgaccaccggagaaccggggcgcaccgccaagagcgggggggggagccggaggagaag

SEQ ID NO: 230521 - RNA, 81 nt, Homo sapiens
ccccgggccacgcccaccccgggccgcggacagcgggaggaaaaccccgagagaacacccacagcgagaaaccaaagagga

SEQ ID NO: 230522 - RNA, 80 nt, Homo sapiens
agaaccgcccaaccgcacggcacccggaaagggagcagcaccggccacacccacagcacgaccggaacccagcgaccgac

SEQ ID NO: 230523 - RNA, 106 nt, Homo sapiens
cgaagcgccgcaggcgcgcccggaccgacgcgcaccccggacaccccggggcgaaccgaccaagaacaacacccagagggccaggagaaggcgaagagagcagcga

SEQ ID NO: 230524 - RNA, 56 nt, Homo sapiens
gacaagcaaggcagccccaaggaaaaagaagaccaccggacagcacggagaaaggg

SEQ ID NO: 230525 - RNA, 72 nt, Homo sapiens
gagcaccgcgccggcccagcaccccgagaaccgcaggagccagagggcaggagacagaacgagcgaaaggag

SEQ ID NO: 230526 - RNA, 71 nt, Homo sapiens
acaccccacagggcgcacagccgcgccagggcacccccgagaggacaacaggcacggaaggccccgccacc

SEQ ID NO: 230527 - RNA, 78 nt, Homo sapiens
ccccggaccgaccagggcagacccaggagagcacacagcgcacaaagccgcaggcagacagcgccgaaccagcacacg

SEQ ID NO: 230528 - RNA, 51 nt, Homo sapiens
gggaggaagccacacaaagaacaaagcagggaggcgaccggcccgaggacc

SEQ ID NO: 230529 - RNA, 76 nt, Homo sapiens
caggacggcagggaacggagaccaggcaggcagcgggcccgaccagcccggccgcgagccaaccaggaaaccgcca

SEQ ID NO: 230530 - RNA, 69 nt, Homo sapiens
ggaacgggaaagaacagagaaggcaaagagagacaccacaagggaaacccagagagaaaaaaccaggga

SEQ ID NO: 230531 - RNA, 77 nt, Homo sapiens
acacaccacgggcgaggcaacgcggccaaccagagaggaaagccgaggacagccacacacgccccgggcaccagcag

SEQ ID NO: 230532 - RNA, 73 nt, Homo sapiens
ccggcagacgcagaaccagaaggccccaagggaggccaacgcccaccaagcccgggagcccagggccgagcca

SEQ ID NO: 230533 - RNA, 88 nt, Homo sapiens
ggcgcagcccaggagcaagacccaggaagcacagagcgaccagacacggcccacggccaggaaacaagcggaagcagcggaggagcag

SEQ ID NO: 230534 - RNA, 81 nt, Homo sapiens
gcaccgccgcggcccggcccggccccgaggccggcaacggagacccaagagcgcggcccccccccgaggcacccagggcgg

SEQ ID NO: 230535 - RNA, 79 nt, Homo sapiens
aggagcgggccgcgcggagccggagggcgggaggaacagacacgcggaggaaacccaagaagaaacagacaaggaccag

SEQ ID NO: 230536 - RNA, 64 nt, Homo sapiens
gccgaggcaccgaaggcaggccggcagagcaagacggcaaggagaaaacggaacgagccaaaag

SEQ ID NO: 230537 - RNA, 69 nt, Homo sapiens
aacccgccgcgcaccgacccgacgcgccggcccacgcgcggccaagaagccgggcggaagcccacgcac

SEQ ID NO: 230538 - RNA, 111 nt, Homo sapiens
cccgggcaccgaggagacgccaccccacgaacccaccgcgacccggccacgccgccccaaggccggcaagaagccaacggagaaccaaggccaagaccagaaccagcccgg

SEQ ID NO: 230539 - RNA, 79 nt, Homo sapiens
acccagaacaaggaaaagcaaggcagacacaagaaccgccagcagaaaacgagcccggcacagagaacggcagacgacc

SEQ ID NO: 230540 - RNA, 75 nt, Homo sapiens
acagcaacccaaacacagaagccggacaccagaaggccagaaggaacgaccaaagagaacgagacaaaagaaaaa

SEQ ID NO: 230541 - RNA, 72 nt, Homo sapiens
cagacagcagacggaaggggccaggaaaggagcgaagacaccccgcgcacccaggggcagacccccaagaca

SEQ ID NO: 230542 - RNA, 39 nt, Homo sapiens
aggaggagacgaagaaaggaggacgaaagaggagagaac

SEQ ID NO: 230543 - RNA, 76 nt, Homo sapiens
gaaccagcagccgcgacccacgccacccagcaacaaaaagaccacagacaggggacggcgaagagagcggagagga

SEQ ID NO: 230544 - RNA, 52 nt, Homo sapiens
acacagaacaagcacaaaagaagggccacgccgcccccagaaccccgaccca

SEQ ID NO: 230545 - RNA, 74 nt, Homo sapiens
cgaccacagaacacaccaagaggcaaggaggccacggggccgaagacaccaaccgggcaccagccaaacggaac

SEQ ID NO: 230546 - RNA, 78 nt, Homo sapiens
gggggaagaagcgcagagacagcagaccaaaaggacggaaggcccacgccccgaagacaaaggaagcgccagcgccgg

SEQ ID NO: 230547 - RNA, 84 nt, Homo sapiens
gacccgcgagacagcgcgggcggccgggccccggggcccgcagcaggaggacgccaggacgacaaggagagacacagcaggcga

SEQ ID NO: 230548 - RNA, 84 nt, Homo sapiens
aagagaaggcagccgagcaccgagccagcccaggaaaaggagagacagagcaccagaagcccgccaggaacagcacccgacagc

SEQ ID NO: 230549 - RNA, 68 nt, Homo sapiens
caagaagccgggacaaggagccaggcggcggcccgcgcgggggcccgacccaggacccggccccgccg

SEQ ID NO: 230550 - RNA, 72 nt, Homo sapiens
gaccccacgcggggggggccaagagacagggcacaccaaacccacgacggcccgccacgggccccgcagccg

SEQ ID NO: 230551 - RNA, 81 nt, Homo sapiens
gggggagacgacccccgccaggagcagcagccggcccggcgccagcaggaaaacagaaggagccgggggaggcagacccgc

SEQ ID NO: 230552 - RNA, 39 nt, Homo sapiens
gccgggaggcagaggggcaggggcccagaaacaaccagc

SEQ ID NO: 230553 - RNA, 85 nt, Homo sapiens
acggcacccccaagacaaccaaagggcagaaagcaccgacaaccgcggcccaggagcccgccggcccggcccccggccgcccggg

SEQ ID NO: 230554 - RNA, 86 nt, Homo sapiens
gcgagaggcggggacccgccgaacggcagccccaagaacggaaaggacccagcagccagcgaagccccaaggaagccgggacgccc

SEQ ID NO: 230555 - RNA, 78 nt, Homo sapiens
cggccgcccaacaccgaacaccagcgaaccaacgggcccaaccagaggaagcaaaaagcagaggcagagaagaggaaa

SEQ ID NO: 230556 - RNA, 90 nt, Homo sapiens
agaaggaccacaaagggagcaaacaagccgggagcgacaagaggggcacgcccacggaagccccccaaagcgagggacacaagaccccac

SEQ ID NO: 230557 - RNA, 86 nt, Homo sapiens
gaaaggggccgcgagcggagggggcggacgcagcgccccgggggacacaggcaaaacggacaaagaccgcaaaaagacccgaacgg

SEQ ID NO: 230558 - RNA, 65 nt, Homo sapiens
cccaccggaaagcacggaacgcgaaagcgacaccagaaaaccaagcggacagcaaacgcaacaca

SEQ ID NO: 230559 - RNA, 70 nt, Homo sapiens
agaaacccaaaccgaaaaccaggacgccacaggcacaaaagaaaggaagcggaagagaagaccggcaaca

SEQ ID NO: 230560 - RNA, 81 nt, Homo sapiens
gcccggcgaagccacagaaaccgcccgcacagagcaggaggccgcagccccaggcgagacagagagaacaacaggggggag

SEQ ID NO: 230561 - RNA, 36 nt, Homo sapiens
aagaggacccccagagacagggaccagacaaggagg

SEQ ID NO: 230562 - RNA, 81 nt, Homo sapiens
ggagcgcggagccggagcggacgccgccgccgccaccgccaccgcgcggcagcacaagcgacaggcgccacccgacaaaag

SEQ ID NO: 230563 - RNA, 65 nt, Homo sapiens
aaggaggacaccaacagagagacagcgaggaagaaccagcaaagaacagacacaaaaagaaggaa

SEQ ID NO: 230564 - RNA, 77 nt, Homo sapiens
aaaaggcaggaacaaccacaaggccccaaagcaggaggaggaaggacgcgcgccagacaagaaccagacccaaagcc

SEQ ID NO: 230565 - RNA, 54 nt, Homo sapiens
gaggggggcggcgcccacgggggagcgagccggagacagcgcacggaacggcgg

SEQ ID NO: 230566 - RNA, 71 nt, Homo sapiens
gggacaacacggcgaggcaccccaacagcagagaaacaagggggggaacggcaggagcagcgagggaacgg

SEQ ID NO: 230567 - RNA, 86 nt, Homo sapiens
gaaaagcgcagcgagcggagccgccggagaaacagaccaccccaggaaaagagaaccgccgaaaagacaagaacaaaccgaacccg

SEQ ID NO: 230568 - RNA, 69 nt, Homo sapiens
cgcccagcagaagaagagaggagggagaacacagaaaccggccccaggccccacagggcaacgccaggg

SEQ ID NO: 230569 - RNA, 74 nt, Homo sapiens
cgggcggcggccgccaccgcagcgggcaacacgcccccccagaggcgggagagccagggaacgagcccacggga

SEQ ID NO: 230570 - RNA, 90 nt, Homo sapiens
gacaagaccaccgagggaagccaaggcccccagaacacaaggaggggccaagggagaagcacgagccgcggcaggagagcaagcgcagaa

SEQ ID NO: 230571 - RNA, 38 nt, Homo sapiens
cccccgagggcgggaacagcaggcaaggaacaacggag

SEQ ID NO: 230572 - RNA, 70 nt, Homo sapiens
cgcagggcgcccggcaaggcgacggagaaagagggaccaaagcacagaggcgggccaaaggggaggcacc

SEQ ID NO: 230573 - RNA, 77 nt, Homo sapiens
gacagcggcaccgccagacggccagaaagccgccagagcggggcacggagcgggggaggcccaagcagccccaaaaa

SEQ ID NO: 230574 - RNA, 87 nt, Homo sapiens
gccggacgacacgaccgccgcccgcggagccccagcccccagcagccgacaggaggcccgcaagagcaggcaggcagccaccccagg

SEQ ID NO: 230575 - RNA, 73 nt, Homo sapiens
ggcgggaggaacagacacgcggaggcaccagaaacgccacacgggcgggagcccacccacggaaaaaaacacg

SEQ ID NO: 230576 - RNA, 77 nt, Homo sapiens
cgcaaggccgcccccccggagggcgcggaggcggggccaggaggaacagcacagcagcgggccggaaaagcgagcgc

SEQ ID NO: 230577 - RNA, 66 nt, Homo sapiens
aaggcgcggccgagccagaaccaggcaggaacggagcagacaggcaaacagaggcgaaaaaaggac

SEQ ID NO: 230578 - RNA, 52 nt, Homo sapiens
gcgaaggccggaggacaagagagacaccaaagcgggaggggcccgccccgca

SEQ ID NO: 230579 - RNA, 35 nt, Homo sapiens
ccagaacggagaaacaggaaagcaccgggaggaaa

SEQ ID NO: 230580 - RNA, 59 nt, Homo sapiens
ccgccagggcgcgcagcccgccccccgccgcgcaggagcagcgcaggcaggaagaacca

SEQ ID NO: 230581 - RNA, 68 nt, Homo sapiens
aacgaacagaaaaaagggggcccccaaagggaagccaaacacaaaggaagaagcccggagacgaccaa

SEQ ID NO: 230582 - RNA, 79 nt, Homo sapiens
gggaaggcgcgaggaggaaaggaggacgagcaaaggacccaaaagagaccgaaggcccaaacagaagacacgaagagcg

SEQ ID NO: 230583 - RNA, 71 nt, Homo sapiens
cggcaaagaaccagcaagggaacacagcccgacggaccagcacagaaagaccagccgagaaaacaaggacg

SEQ ID NO: 230584 - RNA, 79 nt, Homo sapiens
acgagaggaagaccgaaggacaagccccccccacccggcacccgccagcaagcacgcagacagcaagcccgcgccgcga

SEQ ID NO: 230585 - RNA, 78 nt, Homo sapiens
aaaaccacaaacgccacgcagaacagccaccaaggagaaagagagaagaaagaaaggggcaacccaagagagaccgaa

SEQ ID NO: 230586 - RNA, 66 nt, Homo sapiens
ggagcgacgcacccccaaggccaaccaagggaaagcccagccccgggcaagcccaggaggacacac

SEQ ID NO: 230587 - RNA, 62 nt, Homo sapiens
aagcaagccaaaacgcaccgggacccacaggacaagaaaagaaccaagcaaaacaggaacga

SEQ ID NO: 230588 - RNA, 76 nt, Homo sapiens
agcacagagacaccacacacagcaagggaaacagacaggagccaaaccggagcagggacagcgcgggaacaaacaa

SEQ ID NO: 230589 - RNA, 64 nt, Homo sapiens
gccccaggacaccaccagccggaggaccaaggcgccgcggcccacggaagaaggacacaagaca

SEQ ID NO: 230590 - RNA, 73 nt, Homo sapiens
gcggacgcgcagcggaacagcggccaagagccggaagagcgcagaagccggaagagagccaagccaggcccag

SEQ ID NO: 230591 - RNA, 80 nt, Homo sapiens
cggcgacagccaggcccggaagcgagggcggccgcgccggcccagggcgggcgcccaacaaaaaacccgaggcacgagaa

SEQ ID NO: 230592 - RNA, 67 nt, Homo sapiens
accaaagacggcagcgcggaccagcagagcccgagccaggccaggcgacgcaagcaggccgacgagg

SEQ ID NO: 230593 - RNA, 50 nt, Homo sapiens
caggaccgacaacacagaaacagacagcgaacccacccaacacggcaaaa

SEQ ID NO: 230594 - RNA, 73 nt, Homo sapiens
aagcagccacacaagcacaccgacaaggcgggcaacgacccaccacccaaaggccgcggggaaagaaccaaag

SEQ ID NO: 230595 - RNA, 67 nt, Homo sapiens
cccacccagcacaggacaaaaaggggaccgacacaagaagcagccagaacagacgggaaaagaaacc

SEQ ID NO: 230596 - RNA, 81 nt, Homo sapiens
ggacgacgacgacgaggaagaggaggcgaggagcacagcaagcgggagcaggcagaccaaaggaacagaagccagggccgg

SEQ ID NO: 230597 - RNA, 53 nt, Homo sapiens
ccccaaaacagcccagcaccggacaaggaccaaacaggacacagcaggggcca

SEQ ID NO: 230598 - RNA, 100 nt, Homo sapiens
agacggggccgaccacagcagccgcacccggggaacccagacgcccggggcagacggccaacacaggcaggaagagaaggcggggcgcggcggcacaccg

SEQ ID NO: 230599 - RNA, 86 nt, Homo sapiens
ccgcagcccagcccgcagaaggaagggaaaaggccgaggcacagcgggaagaccgcaaagacgacccgagacagggaacagcagcg

SEQ ID NO: 230600 - RNA, 77 nt, Homo sapiens
gagcggaccggcagagaaaaggcccgagccaggggccgcggcccgccaccgagaccagaaaccaccaccacaaagag

SEQ ID NO: 230601 - RNA, 82 nt, Homo sapiens
caacaacggaacagacaaggcaaaaacaagcaccagaggcccgagcagccagcacggaggcgcacaagagcagggaccccag

SEQ ID NO: 230602 - RNA, 78 nt, Homo sapiens
aggcaccaggccaccacagaaacaaaagcaacaaagaggggaaggggaagacggcagcgggccggaggcccaaaagaa

SEQ ID NO: 230603 - RNA, 75 nt, Homo sapiens
caggacggaaagccggccgcgccgccccgccagaaccgcccggcccccgccacgacacagaaaagcccacgagga

SEQ ID NO: 230604 - RNA, 89 nt, Homo sapiens
cgagccgagccgagccgagcgggggcgcagagcgcgggaggcggcggcggcgcggagcccagcccggcccccacgacacaccgaagagg

SEQ ID NO: 230605 - RNA, 70 nt, Homo sapiens
gccgcgggccgggccggaaaggaagggccaggacaccagaaaacacggggaagagaaagccaaaaagaag

SEQ ID NO: 230606 - RNA, 73 nt, Homo sapiens
cgacagggccccgcaggaaaggcaccggagagcgaagcaccagaaggacacagaggaaagaacacacacgcaa

SEQ ID NO: 230607 - RNA, 74 nt, Homo sapiens
gggccggaaacaggcggaggcgggaccaaacacaagagggcaggcacgagcaaggaggagccccgaaaagcaaa

SEQ ID NO: 230608 - RNA, 79 nt, Homo sapiens
cagagaaaccagaaaaagacgacgcccggaagaggcgaaacggaccgaaaagacgcggccccaaaggaaacacccgaag

SEQ ID NO: 230609 - RNA, 77 nt, Homo sapiens
aggaccaacagcaaagacgaacaggaaagaaagcgccgcccaggcccacccgcacacccacaacagacagagacagc

SEQ ID NO: 230610 - RNA, 64 nt, Homo sapiens
agaaacacgggccggagcgcaaaagacaacccacgaaaaccacacccagggacccccagaagga

SEQ ID NO: 230611 - RNA, 62 nt, Homo sapiens
ggagcgacggggaggcgcggccaacggggccacaagacgcggggaggaggaggaggaaggga

SEQ ID NO: 230612 - RNA, 77 nt, Homo sapiens
ccacaagccaggaaggagacacggccccccaaggaaaacaggacagggcagaccgccagcagcacagcaagccacag

SEQ ID NO: 230613 - RNA, 68 nt, Homo sapiens
gcacaagcaaggccaaaggcggagcggggccggcagaagagaagagaaggaaggcaaacccaagcaaa

SEQ ID NO: 230614 - RNA, 79 nt, Homo sapiens
caagaccgaacagaaggaacgacgcggaccagaagccagagcgaggacgccggcaggaaacaagccacacccggggaaa

SEQ ID NO: 230615 - RNA, 88 nt, Homo sapiens
caagcaaaggaagcagagggacacaccacccaccaaaaagggaaaccggcaagcagcccagccgagcagccccagaccgcgccgcccg

SEQ ID NO: 230616 - RNA, 76 nt, Homo sapiens
gaaagaagaggaaagcgcccccacccgcagaggccagacagaaaagggagccaggaccccagagaggagacccagc

SEQ ID NO: 230617 - RNA, 79 nt, Homo sapiens
gcagcaaaaaaccccccacaacacaaccacagcccaggggaggaagaagagaggagacacaggggggagaaagacacag

SEQ ID NO: 230618 - RNA, 51 nt, Homo sapiens
agggaggagagagggagagccaaagaagaggaaccagagaaggagaaacag

SEQ ID NO: 230619 - RNA, 80 nt, Homo sapiens
gcgggaggcaacggagcaccagccggaggcacaaagagagacggaacgcagaaagaccacaagggagagaaggaaaggaa

SEQ ID NO: 230620 - RNA, 76 nt, Homo sapiens
cgcacccagagaacgagcagacaccaccagagagagagccgagaacgacgggaacggagccccccgcacaggacaa

SEQ ID NO: 230621 - RNA, 75 nt, Homo sapiens
gcacgccgcccagccgccgccgccgccgcgccgcagcgccaccgagacaccgaggcccggcacgagccgccagcc

SEQ ID NO: 230622 - RNA, 58 nt, Homo sapiens
aaggccggagacaccagcaggaacgcaagcacaggaccagaaacgaaaggcagcagaa

SEQ ID NO: 230623 - RNA, 76 nt, Homo sapiens
aaagcgaacgaagagcaccgggagcggcgaagaggcaccggaggagagccgaggaaggcaccaggagaggaggagg

SEQ ID NO: 230624 - RNA, 72 nt, Homo sapiens
ggagcagcggaaaaagcggaaaaagggagggacaagagcagcaccaagcgcaggaccgcgacgagaagagca

SEQ ID NO: 230625 - RNA, 131 nt, Homo sapiens
aacaggccacgccagcaagcgcgaaaccacggagaggaagagcagcacaggcagcgaccacggcaacaacgcacaaaaagccagcacccacgacagaagaagagaaaccaaagccaaaggccagaaagaaa

SEQ ID NO: 230626 - RNA, 60 nt, Homo sapiens
gaaagaaggaggaagaggaacaacggaaccagagagaacaaggagcaggccaacggccag

SEQ ID NO: 230627 - RNA, 84 nt, Homo sapiens
aagaaacagccaggagagccaaccgagccggcgacacgccacgggccgagccagaagggaaaaaggacagacaagcagacgggg

SEQ ID NO: 230628 - RNA, 85 nt, Homo sapiens
gaccgccgcagcccgcggagccgggccgggcgccggagccgcgccccaccccgccagcccagagccacacggagccgccgcaccc

SEQ ID NO: 230629 - RNA, 74 nt, Homo sapiens
gccgcccagcgccgccccaggcccgggccgcgccaggagccgccccccccagacgccccgagccggacccccgg

SEQ ID NO: 230630 - RNA, 76 nt, Homo sapiens
caaacacgcagcgagaaaaaaaggcagagacgcgcaaagcggggaggagcacagggcaggcgaggcaccagaccca

SEQ ID NO: 230631 - RNA, 86 nt, Homo sapiens
caccgagacacggcaagcgggaaacaaagacccgcggaggaagagagcgggacgggcagaagaaaacccaccaaggggcaacaagc

SEQ ID NO: 230632 - RNA, 76 nt, Homo sapiens
ccccgcccgcaggcggcagcggccgcacaccaagggcgcccccccggaacggcaccacaaggggacaacaggagaa

SEQ ID NO: 230633 - RNA, 55 nt, Homo sapiens
cagaaaggcagcgggccggcgcacacggagaagaaaaccagaccagacccagggg

SEQ ID NO: 230634 - RNA, 31 nt, Homo sapiens
ccccgacacggccaagcagccaggcccgggg

SEQ ID NO: 230635 - RNA, 71 nt, Homo sapiens
ggcgccgagggcggccagcaaaacaccaaccccccagggcggcagaacagcaaagcaccacaggggaaaac

SEQ ID NO: 230636 - RNA, 57 nt, Homo sapiens
ggggacggccgggccggccggcagaaaaggcgaggccggaaaccaacagggagaaac

SEQ ID NO: 230637 - RNA, 83 nt, Homo sapiens
agagcacagcaagagccaggaccaccggaagccagaaaggagaggcagagcgaaccagaacaagggaccccccaggacacagc

SEQ ID NO: 230638 - RNA, 69 nt, Homo sapiens
gagacagcagacgcaccaaagggacagaaccaaagcaacagccagacgccgcacgccagcccagcccac

SEQ ID NO: 230639 - RNA, 74 nt, Homo sapiens
gggggcgggccgcggccaggaggaagcacagacccgcgaacagagaggcgaacacgcggaaaaggcagcccccc

SEQ ID NO: 230640 - RNA, 83 nt, Homo sapiens
aagggggaacagcagaagaacaaagaagaagcaaaggcacaggggaccaagacagcagccagccagccaaggagagccccccc

SEQ ID NO: 230641 - RNA, 77 nt, Homo sapiens
ccacgagcacacgcagaagggggaaagagaccgggacagaacaggcaggaagaggagaggcggacgcagggccgaac

SEQ ID NO: 230642 - RNA, 82 nt, Homo sapiens
agaacaggcccaggggcaaccaggcagacccgaccccagcgaacaggaaacccaggcccaacggcaggggagcaagaagaaa

SEQ ID NO: 230643 - RNA, 55 nt, Homo sapiens
ccaagcaaacgcagaaggacgcccacgagcaaccaagaagcgcaccccggaagcc

SEQ ID NO: 230644 - RNA, 105 nt, Homo sapiens
agaaccaccccgcggagagcgcaagccgggcagcagcccagcggcagcagaaagagcacacccgaggaggccgcgaggcacagaagaccgggagacgcaggaaag

SEQ ID NO: 230645 - RNA, 76 nt, Homo sapiens
gccaaggaaaccccaacacagagccaagcgccaaaggagggcccacagacaaaccagaagacccacccacaccacc

SEQ ID NO: 230646 - RNA, 61 nt, Homo sapiens
gcacgagcaccgccaccaggggaaggggggcacggagcgagcagaggaggaggaaacccgg

SEQ ID NO: 230647 - RNA, 67 nt, Homo sapiens
ccgccccacgaagccagaaagaagccacccagagagaaccagggggaagaaggagccgcagccagaa

SEQ ID NO: 230648 - RNA, 78 nt, Homo sapiens
ccaccgacacaggacgaggaaaagaggacaagggacgccccaagccacgcacccagaacaacggaacgcagaggaagg

SEQ ID NO: 230649 - RNA, 75 nt, Homo sapiens
agaaccccacccgccgcagccacaccaggcccagaggccaggcagacccagccaaaccgagcccgccagcagcca

SEQ ID NO: 230650 - RNA, 70 nt, Homo sapiens
gcagacggggcggagaagggcagggcgagcgcccccgccagggccgaccagagcccaaaagcaaagcagg

SEQ ID NO: 230651 - RNA, 58 nt, Homo sapiens
ggcgcgcgcgcacgggcggcgcggcgccaaaccagggcagagaaggggccccagaacg

SEQ ID NO: 230652 - RNA, 80 nt, Homo sapiens
ggcccggggagcgaaggagcgcagcaccaggaaagaagaggacaaaggcccaggccgcagagagcagacagaagcaccgc

SEQ ID NO: 230653 - RNA, 72 nt, Homo sapiens
cgcaccagagccgagaaacgcgaaaaggaagcggaaggaacagcgcgagccacaaggcaaggaagcaggcgg

SEQ ID NO: 230654 - RNA, 79 nt, Homo sapiens
agacgaagagagagaacagccccgcggcaagcaagggcaacccgcagccgagaaagagccgaagcgggcgacaccagag

SEQ ID NO: 230655 - RNA, 77 nt, Homo sapiens
cggccggcccggagcgagcaggaggacgagagaagccaggacaaccagaaagcccaaggaagaggcaagaaaaagga

SEQ ID NO: 230656 - RNA, 76 nt, Homo sapiens
ggcggaagacaccacgaggcccccccggagcggacagacccccaggccccagaccaggaaacaggccgacagcgga

SEQ ID NO: 230657 - RNA, 80 nt, Homo sapiens
ggggacggcgagagggcaagcccaggaacgggcgccacaccggacacaggccagccggaacgcgcgccacccggcagaaa

SEQ ID NO: 230658 - RNA, 79 nt, Homo sapiens
gagcccgggcccaagcgccccggggggcagcccgaaccagccacaaagcaaaggaggccgcccaaggaggacaggaaac

SEQ ID NO: 230659 - RNA, 76 nt, Homo sapiens
ccgcccccggcggccccccgcgcacagaacggaaaagcagcagcaacgggaacgaagagagaaagcaaacacggga

SEQ ID NO: 230660 - RNA, 75 nt, Homo sapiens
ccacaccgagcacccgcagaacaggagagggcaccggaacagcacaaccgcccggcggaggaacccccgcgcacg

SEQ ID NO: 230661 - RNA, 71 nt, Homo sapiens
gagggaagccaccaacaggaggaaacaaccaggacacgcaggggcaacgaggaacaggccaagaaacaaca

SEQ ID NO: 230662 - RNA, 71 nt, Homo sapiens
gaaagaaacaacacaaccagaagcggaaacaagcggaaaggacacaggcgggaaagaggaaagaagacacg

SEQ ID NO: 230663 - RNA, 52 nt, Homo sapiens
caagccacacaggggagaccagcgagagaacggccgagcgaccaggagagga

SEQ ID NO: 230664 - RNA, 82 nt, Homo sapiens
ggacggagacgggcggcgcacgagggaggccgcaacgcagggccaggaggacaaagagaagacgagagacggggcgccaggg

SEQ ID NO: 230665 - RNA, 72 nt, Homo sapiens
aagccagagcagacaagagaaggccgccaacaaagaccgaaagaaccagccaaaacagaagagggggagcca

SEQ ID NO: 230666 - RNA, 67 nt, Homo sapiens
ccgcaggggccaggcccacggccaccaggccgacacaccacgggccgaaccacagcagcgcagcaag

SEQ ID NO: 230667 - RNA, 59 nt, Homo sapiens
cgggacaggagcagcggccgggagcccagggaggcaggggagcgggacgggcggcgagc

SEQ ID NO: 230668 - RNA, 64 nt, Homo sapiens
gcgcgccggaaaccggagcgcgcagcaggaaaccccccaggcaagaggcgcaggaccgggaaga

SEQ ID NO: 230669 - RNA, 51 nt, Homo sapiens
gaaagcgaaaaggcccgaagccaaaaagaggcagaacaagaagggcaacca

SEQ ID NO: 230670 - RNA, 81 nt, Homo sapiens
cgcacgggaccccggaacccgcgcgcgcccacgacgccgaggcaagaacggaagcacgggcggaggaaagcacaagcagag

SEQ ID NO: 230671 - RNA, 80 nt, Homo sapiens
cgagccggccaggaaaggcagccgcccaccacccacgcgcccagccccacgcagaaaccccccaggcaagaggcgcagga

SEQ ID NO: 230672 - RNA, 36 nt, Homo sapiens
aaacagcaagaacccaaaaggacaccgccagaagca

SEQ ID NO: 230673 - RNA, 74 nt, Homo sapiens
aacacagcagaaacaaagaagcagcgcgaaagaaaacggcaaggaagaagccgaaggaaaaaagcaggcgagaa

SEQ ID NO: 230674 - RNA, 80 nt, Homo sapiens
cggccaaccggcaagaccagacgggaacgggagacaagcgcagcgagagaccaccccgggccgcgaaggcggagaacagc

SEQ ID NO: 230675 - RNA, 80 nt, Homo sapiens
aaccagaggaccggagcaggaaggggaaaaccgggacaaaggaacaccccaccagaccacccagcaagcccacaaaaaag

SEQ ID NO: 230676 - RNA, 77 nt, Homo sapiens
gaacccacacaaggacaaggacacggcacagcgaggagaacgcacccaaccagagaaaggagaaacacaacaagaag

SEQ ID NO: 230677 - RNA, 85 nt, Homo sapiens
cagaagagcgaagcgaggacacacccaggaaaagaccaggacggacaagcacagccggaagcgcagccgcgagggcaaagaaggg

SEQ ID NO: 230678 - RNA, 77 nt, Homo sapiens
gccggccgggaggacagagaggagaagccagacccagggcggacaacgagaagcgcaggcgagaacaagagagggaa

SEQ ID NO: 230679 - RNA, 72 nt, Homo sapiens
cagacgcagggcgcccccgccgggacagggccagaagcgagcaccaaagcaaagaccaccaaggaccaaaca

SEQ ID NO: 230680 - RNA, 84 nt, Homo sapiens
gcccccccaaaagagcgccggagggcgcgcagggcaggaaaaccaacggcccggaggaccacagcccaggggccccaggcgaaa

SEQ ID NO: 230681 - RNA, 52 nt, Homo sapiens
ggacgacgacgacgaggaagaggaggcgaggaacgcgaagagacccccaggc

SEQ ID NO: 230682 - RNA, 60 nt, Homo sapiens
acggagggagggcgaagaagcagcaggaagggaaagaccaagacacccaggagaaagaca

SEQ ID NO: 230683 - RNA, 74 nt, Homo sapiens
accggcgaccgcaccacaagggacgagaccaaacggaagagacgaaagcgcgcgcgcagggagcagcaccccca

SEQ ID NO: 230684 - RNA, 77 nt, Homo sapiens
gcgccagcaggccgggcgcaggccacaaacgaacagcgaaacggagaacggaagaaagccccagcaccccggcgaag

SEQ ID NO: 230685 - RNA, 69 nt, Homo sapiens
gagcaggccagaggaccacccccaaccccacgccaccgaagagccaagcccagaagaagaagcaagaca

SEQ ID NO: 230686 - RNA, 98 nt, Homo sapiens
ccgggggcacagacgcgccagcacgccgccgccagaccagcaccagacagcgaaaaagaggacccaaaaaagagagaaaaggccaaagagagggcgaa

SEQ ID NO: 230687 - RNA, 70 nt, Homo sapiens
ggacagcgacccgccccacccgcagcagaacaaggcacaaaaacaggggcaaccaggcgagaagagaaaa

SEQ ID NO: 230688 - RNA, 87 nt, Homo sapiens
cggcggcgaagcgggagagccgacgagcgcgcacaacgcaggaccggcgccgaaggcccgccagaaagcaccgggaggaaagagagc

SEQ ID NO: 230689 - RNA, 80 nt, Homo sapiens
gccggcgaaccaacccaccccacaggcccacgacccagacagagcgcggcacgagcaccagagaggggcccaggcaaggc

SEQ ID NO: 230690 - RNA, 74 nt, Homo sapiens
gaacagaagaagggcacccgcacagcaaagagaagaaagccgagccgggccagcccacacaccgcccccccgga

SEQ ID NO: 230691 - RNA, 54 nt, Homo sapiens
aggaccaagaaccagacagggccgccggccaggcggaggcagggcgcggaacag

SEQ ID NO: 230692 - RNA, 99 nt, Homo sapiens
aacaaagcaagaagaaccccaccaaagagcaccagacggagaacacaaaagccaggaagacaagagcagaagaaacagaccgaaagacaacaagaaacc

SEQ ID NO: 230693 - RNA, 84 nt, Homo sapiens
ggacgaagagaagcagcgcagccaaccagcgaaggagcaaggcaaaagcagaccggaaaacccaccggcaagaccacacccgag

SEQ ID NO: 230694 - RNA, 64 nt, Homo sapiens
gccaagaggaggacagcgcacacagcaagcacgaggccgcaccgcgaggaacccgagcccaccg

SEQ ID NO: 230695 - RNA, 74 nt, Homo sapiens
aagaagaggaagagagagagagaaagagagagaacaacgacggaacaaagcgggcagagaagagggccagaacc

SEQ ID NO: 230696 - RNA, 78 nt, Homo sapiens
acacacacaggccagaggcacggaaaaggggaacgggaaaggcgcagagaagcacagcgaagaaaagggacggccaga

SEQ ID NO: 230697 - RNA, 73 nt, Homo sapiens
cagcgcaagagagcaaagcagaagagcgccgaacccccgcaaagaggacggggacgggccccaggacgaggaa

SEQ ID NO: 230698 - RNA, 74 nt, Homo sapiens
ccgggcggggcaggagccggaaaaaagcggcaccaagccaaggagggacgaacgacccaccaggagccaaggcg

SEQ ID NO: 230699 - RNA, 55 nt, Homo sapiens
gcacgcaaccacgggcccccgcgcgcaggaggaagccagcccgagcaggcccagg

SEQ ID NO: 230700 - RNA, 74 nt, Homo sapiens
cggaggaaagccaacaaaccccaagagagccaccagccaagccagggacaagaccagacaaagggagcaccagc

SEQ ID NO: 230701 - RNA, 103 nt, Homo sapiens
gaccgcacgaaacgcccgaaaacagggccggccgcagagcccaccggaaggagaaggaagaggagcgccaagccagcagacggggccagcaagcacaccaaga

SEQ ID NO: 230702 - RNA, 65 nt, Homo sapiens
agcgcgcaccaaacccccggacccggcaacggccgcaccgggggccccgcacgccgacaacacac

SEQ ID NO: 230703 - RNA, 50 nt, Homo sapiens
ggcgccccggggcccaagggagacggaaaccaacaagcagaagacaacag

SEQ ID NO: 230704 - RNA, 58 nt, Homo sapiens
ccccgcggggggcggccaggagacgcgggcggcagacaaccaagccgaggccggcaaa

SEQ ID NO: 230705 - RNA, 76 nt, Homo sapiens
aaaggaaaaggaacaccaacaaccagcggccgaaccgaagcacaacacacggagaaccacggggaccaagaagcga

SEQ ID NO: 230706 - RNA, 81 nt, Homo sapiens
acgcacacgacggccccgcccccggccagccaacggacagcggagcacgagagaagaaagaggaagaagcaagccggaccc

SEQ ID NO: 230707 - RNA, 81 nt, Homo sapiens
cgggaccggcgcggcgccgggggcaccgcgccgccgaggaggcaacgcacgggccacaggcagccgcagaacaggccgggg

SEQ ID NO: 230708 - RNA, 82 nt, Homo sapiens
cgggagcggagaggagggccgacccccccgccggggagggcccagcgcaccgacagggggggccccagcccggccgaacggg

SEQ ID NO: 230709 - RNA, 74 nt, Homo sapiens
accccggcaccggcgcccagcgcgcccgggccgcgccgccccgccccagacaacggcaagcggagaagagcaag

SEQ ID NO: 230710 - RNA, 78 nt, Homo sapiens
aagcagaagcccggccgcagagaagagcgaccaagagcaggagacgaaaggggcgaggcgagccccggcacaaaggaa

SEQ ID NO: 230711 - RNA, 81 nt, Homo sapiens
ggggagcgcccccgaaggcaggacagcggggcggcagggcggagaacggaaaagcaccaggaagcagagaggaccgcagaa

SEQ ID NO: 230712 - RNA, 72 nt, Homo sapiens
ggacacgcaaaccacacaaggcaacacccccagacaaaaggagccaacacccacacgagggacccagaaccc

SEQ ID NO: 230713 - RNA, 56 nt, Homo sapiens
gggaagagagccaacggcaccaccagcagaaggccgagggagccagggaacccaag

SEQ ID NO: 230714 - RNA, 75 nt, Homo sapiens
cccagcgggccggacggggcggggggaacgaacagaaagccgagggaacaaaacccagcgaagcggcgagacgag

SEQ ID NO: 230715 - RNA, 66 nt, Homo sapiens
aggcagcaggaagcacggcgggcgaaacagcacgcggcagggaggaggcaaccggagagcgacccg

SEQ ID NO: 230716 - RNA, 77 nt, Homo sapiens
ccgcagcccaccgggacacgagcaggggacaacggagagcaagcaggaggaaagggcgaacggagaggccagcgcgg

SEQ ID NO: 230717 - RNA, 67 nt, Homo sapiens
agaggcccgcgaagacaaaaaacccaagaacccaagaccgcacaggcgcaggcgcaaggggccaggg

SEQ ID NO: 230718 - RNA, 61 nt, Homo sapiens
gccaccgccaccgccacaccaccgcgagcgcagcccgaggccgcggcgcggagacacaaac

SEQ ID NO: 230719 - RNA, 76 nt, Homo sapiens
gaaacgaagcgggacggaggaaacagcagaggcacacaggacaacgagggaaaaacgagaaccagcaacagcggag

SEQ ID NO: 230720 - RNA, 72 nt, Homo sapiens
aaacaagggaaaccacaaggaccaaacaccaaaacagaaagcgcaggaaggaaagggacaaagagcgaagcc

SEQ ID NO: 230721 - RNA, 82 nt, Homo sapiens
cgaacacccgagaagggggaccccggagaggaccaccgagagggaacagcggagcagggagagcaggaccacacacggaggg

SEQ ID NO: 230722 - RNA, 82 nt, Homo sapiens
gaaaaggcggcgcccgaagaaggcaagagcagaggccccagaccgccaagaggcacaggcaaaagcagaccggaaaacccac

SEQ ID NO: 230723 - RNA, 72 nt, Homo sapiens
ggaagagagggagcagagaaaggggacaagagagggacgcaggcaagaaaacaagcggggccccacgacaca

SEQ ID NO: 230724 - RNA, 81 nt, Homo sapiens
caacaacaaaaagaaagcgcgacacaggcgagagcaagacacaagggcgacaccagaaagcgcgcgaccggggggagagac

SEQ ID NO: 230725 - RNA, 55 nt, Homo sapiens
ggaggggaggcaaagggaggaggaggaccggaggggagcggccggggacacagca

SEQ ID NO: 230726 - RNA, 78 nt, Homo sapiens
aagcggagaacacagcaacccaccacgggggaggaagcaagagccgacggaggccgagccggcaagacccgaccccac

SEQ ID NO: 230727 - RNA, 61 nt, Homo sapiens
gccgcgaggaggcgcgggagggcgagaacgaccccgagacggggaaccggccgggcaccgg

SEQ ID NO: 230728 - RNA, 83 nt, Homo sapiens
gccgacccgcgaacccccgggaccccgccgccgcacaacccgaggaagaaggaggccgaccaggccgacaaagcagacgcccg

SEQ ID NO: 230729 - RNA, 51 nt, Homo sapiens
agaaaacagcgcaaagcagaaggaaggacaacggccaacggcggaagcagc

SEQ ID NO: 230730 - RNA, 58 nt, Homo sapiens
cacagacgcccgacccacaccagcgggacagaggaaacgagaaaggacgcagaaacag

SEQ ID NO: 230731 - RNA, 51 nt, Homo sapiens
cacgccagcaaacgggccaagcgcaagccccggggcagagacacaggacac

SEQ ID NO: 230732 - RNA, 73 nt, Homo sapiens
ccaagccagcaagaggaacacagaccaccgggaggcgcagcccccaagacgggcccccccacggcaaggaggc

SEQ ID NO: 230733 - RNA, 81 nt, Homo sapiens
agcaacgcacgcaaaaccccacccaggccacgggcacaagggcggaaaccaagaaaacacggccaaaacaggggaagacgc

SEQ ID NO: 230734 - RNA, 114 nt, Homo sapiens
caccgacacgaggcccaggagagaggagccgggcacgagaaacagcccccaaggcgacggccgcagccagacggaaggcacgagggccgacacgccccccaacgcagacacccc

SEQ ID NO: 230735 - RNA, 62 nt, Homo sapiens
gcggacagcggcccgggagaacggcgcaagcgggagcagcggaccaggagggacagcacagg

SEQ ID NO: 230736 - RNA, 62 nt, Homo sapiens
cacaaaccaggccaagaccacgcgacgcagagcggaaggaggagagaagaagagcccccaag

SEQ ID NO: 230737 - RNA, 80 nt, Homo sapiens
gagaacgccacgcgggccggcgaaagcgacaagcagaccggaagaccgacggaagaccacaccccgagggagcccaggac

SEQ ID NO: 230738 - RNA, 89 nt, Homo sapiens
cgcggccgggcagggaggagaccggcacccagacaggggcgacggcagaggacagcagccgcccaaaacacaaaccaaagaagaaaccc

SEQ ID NO: 230739 - RNA, 77 nt, Homo sapiens
gaggaagcaaaagacggggaaaagaacagaacccaggagcacagcagcgaagcagcaggaccaccgagagcgcgcca

SEQ ID NO: 230740 - RNA, 80 nt, Homo sapiens
gaacacagcccacccgcagcaacgccaagcagagaaagccggaaaacgcaaggagggacaggacggaaggagcggaggaa

SEQ ID NO: 230741 - RNA, 78 nt, Homo sapiens
caaggggcagagacgcaccgaggaccaccagcaggaagggagcgaacgaagaaaggccaagagggagagacaaggaga

SEQ ID NO: 230742 - RNA, 78 nt, Homo sapiens
agcgaagccgaaaaagcgcccgagacgggcccgccgaaagacacgaaggacgaaaagagcaggccggaggacaggaca

SEQ ID NO: 230743 - RNA, 74 nt, Homo sapiens
cacggaggcgcgcgcacccaaacgcaaggaacggccagaggaacggcgaagagggcgacccagcaacgcggccg

SEQ ID NO: 230744 - RNA, 78 nt, Homo sapiens
gagaacacaaggcggcgagggaagacgagacaaagcaggaggcagcagcaaagaagcagcgcggccgcagaagcgagc

SEQ ID NO: 230745 - RNA, 78 nt, Homo sapiens
ggacgggcggggagccccgggcggcggggaccgccagcccagcgaccagcagggaaaggggcggccacacagccaccg

SEQ ID NO: 230746 - RNA, 66 nt, Homo sapiens
ccgcaggagggagcgacgcaccggggagacagaaaaagggccaggcgaggcaaacacacagccaag

SEQ ID NO: 230747 - RNA, 51 nt, Homo sapiens
aaaacccgcccggagcacaaaacgggcaaggcaagagcgaacacaaaaaag

SEQ ID NO: 230748 - RNA, 54 nt, Homo sapiens
gaccaaccaagagcgaaggccgagagcccacgcggcacgaagacccgaagaaac

SEQ ID NO: 230749 - RNA, 81 nt, Homo sapiens
cggacgcgcagcaggcggggaggacgaggggcccgggcccagagcggaagacaagacgggcggcaaaaccccgaccggggg

SEQ ID NO: 230750 - RNA, 85 nt, Homo sapiens
agaaagggaacagcggaagggagagagagcgcagaaacaaggcgagccagccccaggccgcgagccggacaacacaccacaagaa

SEQ ID NO: 230751 - RNA, 71 nt, Homo sapiens
ccggaccgcccccgacaagaagcgagagagaggccccgggggcgccgagggcacaagggcaacgacagaag

SEQ ID NO: 230752 - RNA, 45 nt, Homo sapiens
gagagcaaaaggcagcgaaacaggcacgccggcaggggccggcac

SEQ ID NO: 230753 - RNA, 75 nt, Homo sapiens
cgcgggcgcggcacccggcaaaggaagaggcggagaacggaaaagcaccaggaagcagagaggaccgcagaaggg

SEQ ID NO: 230754 - RNA, 76 nt, Homo sapiens
ccaaacaagcagggaccgcagaaagacgaaggcgaacaggaacaaagagagagaaggggaaagccagagacacacc

SEQ ID NO: 230755 - RNA, 53 nt, Homo sapiens
aaagacccagccagagggcaaagaacagacacccagcgacgaaagcagagccc

SEQ ID NO: 230756 - RNA, 78 nt, Homo sapiens
ccggccccgggccccacgggagaccagaacaagccgagcagacgaagcagaggccagccggccgaccgcacagacgac

SEQ ID NO: 230757 - RNA, 69 nt, Homo sapiens
ggagggaggagaaaaccggaccaggcacgggaagagcccaggggcgggcccggcagcgggaagaacacc

SEQ ID NO: 230758 - RNA, 76 nt, Homo sapiens
cccagagcaggagaagcgagcccggacagaccaaccgcaggcgcaagacggacaagaggaacgcccgcaccgccag

SEQ ID NO: 230759 - RNA, 53 nt, Homo sapiens
gagcagcaaccggccgcaggaaaccgcaagaagcaagcgaacagaagcgcccg

SEQ ID NO: 230760 - RNA, 60 nt, Homo sapiens
cacagcccaccgaggcaccacagggacggggacaccagacgggaaaacacccgaagacgc

SEQ ID NO: 230761 - RNA, 76 nt, Homo sapiens
aggcccgggggcggcggccacgccaaggacgggggaggaaggaaccggcgccgagaggcaacaagggcgcgccaga

SEQ ID NO: 230762 - RNA, 76 nt, Homo sapiens
agcggacccagccagaaccaacccacaccagaaaggacacacagggaagaagcccagcggaggcgaacggcccccg

SEQ ID NO: 230763 - RNA, 73 nt, Homo sapiens
ccacccgcagcaacgccaagcagagaaagccggaagccgccgacccccggcaaagcaccagaggaagaggagg

SEQ ID NO: 230764 - RNA, 78 nt, Homo sapiens
gaaagaccagaggacggggagcggacaggcgagagcgcaggaaaaggagcacccagaagcaaacaaggaacgggaaaa

SEQ ID NO: 230765 - RNA, 80 nt, Homo sapiens
cgcgccgcgcgggcgcccggcaaaagcagaccggaaaacccaccggcaagaccacacccgaggggagcccaggacaccac

SEQ ID NO: 230766 - RNA, 84 nt, Homo sapiens
gagagaaccagcaccgggacgcacagagaccggaagaccaagcaggagaaccgaccgcgacgagaagcaagaaggagaggaaaa

SEQ ID NO: 230767 - RNA, 79 nt, Homo sapiens
caacaggacccgccgcggagcaggaaagcagagcaccaagagcgccccaaacccaagaaggaagcccagagcccaaaga

SEQ ID NO: 230768 - RNA, 79 nt, Homo sapiens
caggcgcaggaccccggacaaacaacagggaaggcggaagaccccagcagcaaaaggaccaaagcagggagaagaagaa

SEQ ID NO: 230769 - RNA, 50 nt, Homo sapiens
ggaggccacagagacaagagagaggacacacagcaacgaagcaggggagg

SEQ ID NO: 230770 - RNA, 76 nt, Homo sapiens
gaggacgaccggggggcaggaggcacccggggcagcgcagccgcgagggcaaagaagggccacgggggacaacaag

SEQ ID NO: 230771 - RNA, 87 nt, Homo sapiens
ccgacaccgcgcggcgcgccggccgcccaaggcgcccaaggcaggaggagcaagcacaacaggccgaagaggccggagaaggacacg

SEQ ID NO: 230772 - RNA, 74 nt, Homo sapiens
ggacagggagggcagaccgggaccagccccgggcacccccaggggaccaacccagaaacgccggaccgaacacg

SEQ ID NO: 230773 - RNA, 84 nt, Homo sapiens
ggacgcccacagaaggaagcacaaaaagggacagcgaaggacagaaaacgggccccagacacaagccccaccaagaggacaccc

SEQ ID NO: 230774 - RNA, 71 nt, Homo sapiens
gaggacagcgggaagcgaaagaacgcagaggcccacagcaaggacagaggagagaagaagaagggggaggc

SEQ ID NO: 230775 - RNA, 50 nt, Homo sapiens
ggaaggagacaagcggaggccaggaacaaagagaagagggcaagaacaaa

SEQ ID NO: 230776 - RNA, 49 nt, Homo sapiens
cagacgcagggcgcccccggggagagcggagcgaagcgaacaaaaagca

SEQ ID NO: 230777 - RNA, 71 nt, Homo sapiens
gagccaggaggaaaacacaccaagccgaaagaaaaccgggccagacgacaagcaaacaaaagagaggacag

SEQ ID NO: 230778 - RNA, 82 nt, Homo sapiens
caaggacggcagcggcgcgggccacgggcaaccagccggcccgaagaccgcaggggaaaagaccgaaaaacggaaacagaaa

SEQ ID NO: 230779 - RNA, 85 nt, Homo sapiens
gaccgcggggcagcaagagggccccgcgaccaggggcgcaggacgcaagagccccgaagaaagagcggcaagggaagagcgacac

SEQ ID NO: 230780 - RNA, 57 nt, Homo sapiens
caagaggcaaagagaacggggcaccacaacggaggagaaagccaggaagcaccgccg

SEQ ID NO: 230781 - RNA, 68 nt, Homo sapiens
ccgagagccgcccgggccagcggccgcgcacccccggccggaggcaccagcaccggggggccgcgcgc

SEQ ID NO: 230782 - RNA, 80 nt, Homo sapiens
gcacaacgaacgggcaacacacacgcacggccgcccgcacagggggcacgaagaaagcaggacgagcaaggacaggagga

SEQ ID NO: 230783 - RNA, 67 nt, Homo sapiens
ggccgccgcgcaccgcagcgccggggcacgacacaaaaacaggaggccccgggggccgcggcccggc

SEQ ID NO: 230784 - RNA, 59 nt, Homo sapiens
cgcagcaagaggcggacgagaaggacagggaaggaaagcggggcagcaaggcaaggaaa

SEQ ID NO: 230785 - RNA, 79 nt, Homo sapiens
gaggaaaagggcagggacagcgcaggcagcaggcaacgcagaagaagaccgaccgaaacgcgcacaggagaccgggcac

SEQ ID NO: 230786 - RNA, 81 nt, Homo sapiens
cgaaccgcacagcaagcccaggccaacaggggcgaaggcagacagacacggccccgcgaaccgcggcggccaggcggcagc

SEQ ID NO: 230787 - RNA, 76 nt, Homo sapiens
cgagcgacagcgcacggcagcggcaccacggcgacgcacaaggaccaaagggaggggaaacaagaaccagacaggc

SEQ ID NO: 230788 - RNA, 73 nt, Homo sapiens
cacgaggacgccaaccagccgcggacgacaaccaagaggcacggagcccaggcgccggaacccggaccaagga

SEQ ID NO: 230789 - RNA, 53 nt, Homo sapiens
gaggagccagaacacaaagcaccgcaggccgaagcagacacagaagcaggaag

SEQ ID NO: 230790 - RNA, 79 nt, Homo sapiens
ggcagagggcggggcgcgagagagacgccaggccaccaggcgagcccgggcgccaccagccgggacagcccagcaacgc

SEQ ID NO: 230791 - RNA, 59 nt, Homo sapiens
cccgcacaaggagccgggcgcggagaacgcccccaacaaaaggacggaccggcggacag

SEQ ID NO: 230792 - RNA, 62 nt, Homo sapiens
cagacacgcgacggaacagcgaaacggcccgagcaggaaagagaaggcggagcaggacagcc

SEQ ID NO: 230793 - RNA, 75 nt, Homo sapiens
gaggcacaccagcaggaggcgccagaaagaacaacccgaacgcaaaagaagggaggcaggggcagaacccgggcc

SEQ ID NO: 230794 - RNA, 33 nt, Homo sapiens
agaaaaagacgcgaaaaagccgggggaagacca

SEQ ID NO: 230795 - RNA, 75 nt, Homo sapiens
cggaagcaacagaggccccagaaaagcacaccaagagccagcaagcaaagagccagacagggccgccggccaggc

SEQ ID NO: 230796 - RNA, 77 nt, Homo sapiens
cgaaagccaaggcagaacagcaaaaccggacaaaacagaggccaacccaggggaacaaacagagcaccaagaaagca

SEQ ID NO: 230797 - RNA, 85 nt, Homo sapiens
ggccaggccagcgacggggccaggaagcaacggaagcgcagcaacagcaagccccgggcaggcacgggaccccaaccaggacgca

SEQ ID NO: 230798 - RNA, 70 nt, Homo sapiens
aggggcagaggccaagagcccaacaccacccgagagccccaagggggaaggaccgcaggacgaaaacggc

SEQ ID NO: 230799 - RNA, 92 nt, Homo sapiens
cacacccggagaagcaggagcccaccggcagcacgagccagggagccgccgggaccggcccgggagacgacaacccaaaccgaaaaggcaaa

SEQ ID NO: 230800 - RNA, 54 nt, Homo sapiens
aaacaacccaagaccaacagcgagcaggcgacccaaaagagcgaaggaaaacca

SEQ ID NO: 230801 - RNA, 60 nt, Homo sapiens
gcgcgcagccggagacccggagaaaggccacaaaagaagacccaaagcaccaacaaaaag

SEQ ID NO: 230802 - RNA, 69 nt, Homo sapiens
cgacccgggcgcggccaagcacggacccccgggacaagagacgagacccaacaggcagaagccaaagga

SEQ ID NO: 230803 - RNA, 74 nt, Homo sapiens
cggggaaaagaaacacagcacacaaggcggagggcggagaacggaaaagcaccaggaagcagagaggaccgcag

SEQ ID NO: 230804 - RNA, 56 nt, Homo sapiens
aggagcaaaagaacccgaagaaaggaccggacagccagagccccaaagcaaccccc

SEQ ID NO: 230805 - RNA, 61 nt, Homo sapiens
acaccagacccaaggcgcaagaaaaggagccggaaacggacaaacagaccccaaaggacga

SEQ ID NO: 230806 - RNA, 69 nt, Homo sapiens
cgggggcgagcaaaggaagaacaaaagcgcagggagggggaccaaggcagcaaaagaacaaggagaccg

SEQ ID NO: 230807 - RNA, 87 nt, Homo sapiens
agaaaacaaaaacgagaccaagagaaggcagccgagcaccgagccagcccaggaaaaggagaggaaggagccacaagaccaagcgcc

SEQ ID NO: 230808 - RNA, 72 nt, Homo sapiens
gcagaagggaagaaagagccccagggcgacccagcaacgcggccggccaggggcaagcgagcacggagggag

SEQ ID NO: 230809 - RNA, 64 nt, Homo sapiens
acacaggcagcagcacgacacagggcaaaaggagcgggcagagaagagggccagaaccaaccga

SEQ ID NO: 230810 - RNA, 57 nt, Homo sapiens
gagaagcgggaggagaccacccaaacgcggcacgggaggcacccggaaacaagccac

SEQ ID NO: 230811 - RNA, 78 nt, Homo sapiens
aaggagagaagcagaagagcaagaaagaaaaccgggaccacagaggaaaggaaaaagcccagaggaacaggcagaaga

SEQ ID NO: 230812 - RNA, 107 nt, Homo sapiens
cacaccccagggagagaggacggggacccgcgacccagccccccacccaacgcggccgcagccaagccggaacaggagcggcgagcccaaacgcaagggggaagaaa

SEQ ID NO: 230813 - RNA, 70 nt, Homo sapiens
gaagcagaacgcaggaggagaacgacagagcggcacaccacacacaggcagcgccagggggcaagaacgg

SEQ ID NO: 230814 - RNA, 79 nt, Homo sapiens
acggggcgcggcgcaaaggccgcaggcgcgcacagaacaaggcagcccgagacaaaggcagggaggaagggaacaacgc

SEQ ID NO: 230815 - RNA, 74 nt, Homo sapiens
cccgggccgggggccgccgggacccggccaccagcaagccggagaaaccagaggcaagcgacgggaaggaccac

SEQ ID NO: 230816 - RNA, 90 nt, Homo sapiens
agccgcacagccgcggcggcagcagcaggagaggcccagggccccggccaggcccagccccgcgggagacccggccagcaccacggacgg

SEQ ID NO: 230817 - RNA, 78 nt, Homo sapiens
aaccgagaccaggccagccagacaaaccgggaccggaccgggggaagggaccagcagaagcaccccacagcaaggaga

SEQ ID NO: 230818 - RNA, 76 nt, Homo sapiens
ggacaagaaacagagcaaaaaccggaaacaggggaaagcgcgagcgagcacccggagcagcagagcacccaacagg

SEQ ID NO: 230819 - RNA, 81 nt, Homo sapiens
caccccggggcagccgaccggcgcgggggacggccgccagagggcagccacaaggaggcaaccggccaccaggccgcggga

SEQ ID NO: 230820 - RNA, 78 nt, Homo sapiens
gaggagccacaccacaaaggacggcagccgagcgcagagcaacacgcgccaaccccagagagcgccacgccgacagag

SEQ ID NO: 230821 - RNA, 83 nt, Homo sapiens
cagcgaaacgccgcgcaccggagccggcacggccggcggaaggaaaaaccacgcgcccggccacgggaggcggacagacgcgg

SEQ ID NO: 230822 - RNA, 74 nt, Homo sapiens
ggacgaggggggagaggacaagcagccgcaacgggcaacccgcccagaagaggcaccaggcccaccaaagaggg

SEQ ID NO: 230823 - RNA, 60 nt, Homo sapiens
cgagacgcagcaaaggccggaccggacaaaggccacgcgccccggccggccacaacggcg

SEQ ID NO: 230824 - RNA, 83 nt, Homo sapiens
gcccaccgggaggagaaggaggaggaacgagagaagaggaccccaagggaccgaaagacaagagcacggaaaaacgccccaac

SEQ ID NO: 230825 - RNA, 69 nt, Homo sapiens
ggaaggggcggcaccaaggaggacccacgagacagggacaggcggccaaaagcaaccaccgaaacgggc

SEQ ID NO: 230826 - RNA, 76 nt, Homo sapiens
agcggggacccaggagccggccagcgcgccggagccgccgaggacaaagaccagggagaccaaggaaccaaaagaa

SEQ ID NO: 230827 - RNA, 70 nt, Homo sapiens
aagagcaaggagaggcccagcaaacaaaggcaggaagagaaaaggcgacaggaagggaggagcccacgca

SEQ ID NO: 230828 - RNA, 73 nt, Homo sapiens
gcgccgaacaggagcgcaaacaacacaaagcgcgagacccgaagccacggcacgagggaaggcgggaggagga

SEQ ID NO: 230829 - RNA, 76 nt, Homo sapiens
aggacagaggaaccaggagcaacccgagggaacgcagaggagagggagagaccagaggcgcccccacgcgcggaaa

SEQ ID NO: 230830 - RNA, 71 nt, Homo sapiens
gggaccagacaggcggcaagcgcaaccaaagacaaaaacaagagaagggaagaggaaccaccacgaggagg

SEQ ID NO: 230831 - RNA, 79 nt, Homo sapiens
aaaccccaacacagagccaagcgccaagcagaaaagagaccccggacggacgcacagcaggaggcgcagagaggccgga

SEQ ID NO: 230832 - RNA, 58 nt, Homo sapiens
gcccagacaccaagggagccagcggaggagcaagaaggagagagcaggagacggaggg

SEQ ID NO: 230833 - RNA, 72 nt, Homo sapiens
ccagagacggaggaggcgggcccgggcaaaagaaagcgggacagcagaaacaacgggaagacacggagaaaa

SEQ ID NO: 230834 - RNA, 77 nt, Homo sapiens
cgaagcggaagacaggacgaccacggaccaaaaacaccacagcacagaacagaaccggaaccgcagggagaccaccg

SEQ ID NO: 230835 - RNA, 77 nt, Homo sapiens
cgcagcggccagaggagcacgcgggggggagaggcaccagcaacagaccaaccgcagcaagcacagagacaggaagc

SEQ ID NO: 230836 - RNA, 62 nt, Homo sapiens
accaaggaagagaagaaggaacggaaacaaagagccgacgaacaggaggcagaaccaacaga

SEQ ID NO: 230837 - RNA, 52 nt, Homo sapiens
ccacccgaccacgacaaggaggagaggagcaaccggaagggacaaaagaaca

SEQ ID NO: 230838 - RNA, 73 nt, Homo sapiens
acggaagaggaggagaccaagcgcacagccagggcccgagggcaggacagcaggcaccggcgaagcacagaga

SEQ ID NO: 230839 - RNA, 76 nt, Homo sapiens
gacccagccagaccagggacaaagagcaaacagacagggccgcagcgggccaaaagcagagaaccaaagaacacgg

SEQ ID NO: 230840 - RNA, 72 nt, Homo sapiens
caacaacaggcaaccagaaggaccaccagagaggaaacccggaacagagacgaaacagccgaaacgacagaa

SEQ ID NO: 230841 - RNA, 76 nt, Homo sapiens
ccggagcgaaccaccccaaacagacggagccacacgcacaggcggaggcgggcagaccggcacgcaaccccacccc

SEQ ID NO: 230842 - RNA, 79 nt, Homo sapiens
gcgcggggccgaggccgccccgagcgccaggagagcaagcccggaggcacccaagaagcgggcgagggaagcacacaag

SEQ ID NO: 230843 - RNA, 69 nt, Homo sapiens
gaggcagcaggccagcagggaacgcacgacaccaaacaccgcgggaaacaggaaacagcccaaacccaa

SEQ ID NO: 230844 - RNA, 83 nt, Homo sapiens
gcgggggaaagggagacggcgagacgcgcagcgccggcgcccgggagacccaggaggagcccgcagcaaaagcggaaggagag

SEQ ID NO: 230845 - RNA, 87 nt, Homo sapiens
ccgagcgacaccccaaggaaaagacagaccccaggaaaccaggaggccacccagcgagcaggaaccgcggagcagggaaaaacccac

SEQ ID NO: 230846 - RNA, 57 nt, Homo sapiens
gcaccgccaacccccgagcaagacgggggcagcggaccacacaagcaggccgcgacc

SEQ ID NO: 230847 - RNA, 78 nt, Homo sapiens
acaaacacacgcaaaggagaaaggaaccgacagacaacaggcacaaagagagaaggaacacccacagggcagacagag

SEQ ID NO: 230848 - RNA, 74 nt, Homo sapiens
caggaggccggagccagcaggcacccacaaggcaacacaggagcaggaggcccagaaggagacaccagggagcc

SEQ ID NO: 230849 - RNA, 75 nt, Homo sapiens
cgcaagacaaagccgaggggggcaagaagaggcaggccgcggggcgaagccaagacgagagagagagggagggag

SEQ ID NO: 230850 - RNA, 38 nt, Homo sapiens
agggcacaagaaaaggaggccccaccgcagcggcggac

SEQ ID NO: 230851 - RNA, 78 nt, Homo sapiens
accaacgccccagcagcccaagagaaccaaggaaggagaagaaagcaccgggaggaaagagagccacacgaagaacac

SEQ ID NO: 230852 - RNA, 74 nt, Homo sapiens
ggacagcggcaccacgacgaacccccgacgcacaaggcaccccgccaggaagaggcggcggcggaggagccccg

SEQ ID NO: 230853 - RNA, 63 nt, Homo sapiens
aacaccaaccaagaagacagggagaggcagggaacaggccgagcggaggagggaggggagagg

SEQ ID NO: 230854 - RNA, 79 nt, Homo sapiens
gaggagaagcagcaagcacacggaaaaaaggaagcagcacaacggcagaaacgccagaagggcccacggccacacccaa

SEQ ID NO: 230855 - RNA, 80 nt, Homo sapiens
gggaccagacaacacaaagcagcggccccgacaagggaccgggcgggccccgcaggaaacccccaccggcccacacagac

SEQ ID NO: 230856 - RNA, 73 nt, Homo sapiens
cagaccagccccgcgggaaaccagcggcgggaagccgcaaaaagggaacaagacccaaacagaggcagacaaa

SEQ ID NO: 230857 - RNA, 78 nt, Homo sapiens
cggggagaggccggcgggaacgaacagccgacggggcgaccgccggcccaggggaggacagcagcggacggccggacc

SEQ ID NO: 230858 - RNA, 70 nt, Homo sapiens
gggcgacgcgcacgcgcggcggaaggccagaagacagaacgaagaagaagagccagagaccacagagacg

SEQ ID NO: 230859 - RNA, 60 nt, Homo sapiens
cgcgacaacacacacacagcgacagcacaagaaggcaagccgaaaagcaggaaaacccac

SEQ ID NO: 230860 - RNA, 53 nt, Homo sapiens
gacagccaaagggccagaagccaaaccaaacgacaaaagcgaaaaaaggaagg

SEQ ID NO: 230861 - RNA, 79 nt, Homo sapiens
acgcggcccaccagggcgcacgggacccgcccaagagccccaaaaacaccagggaccaagccgagacaccagacccgag

SEQ ID NO: 230862 - RNA, 76 nt, Homo sapiens
gccgcgccccggcgcccccccgagggaacaacgagagcgccccaagggagccagcgcagccacacaagcacaccac

SEQ ID NO: 230863 - RNA, 40 nt, Homo sapiens
gaaccggaagacagaggcggaggcgagcaacgaacgcaaa

SEQ ID NO: 230864 - RNA, 80 nt, Homo sapiens
cagggagaagcgcccaccccaggcggccccccagagccacgccgagccaaccgacggcaccacgggacacagacgacgcc

SEQ ID NO: 230865 - RNA, 78 nt, Homo sapiens
ccaaacggccgggggcccgagaagcccccaggagagaacagaaagaccaagcagaagagaggacaaagcaccgggcag

SEQ ID NO: 230866 - RNA, 76 nt, Homo sapiens
aagcagcagaaaaagccgagccgaaggacaaggaagggcggaaaaggcaaaacagcgcaaccaagagagaggaaga

SEQ ID NO: 230867 - RNA, 71 nt, Homo sapiens
ccacgcgggaggcccaggcccccggacggcgcggaccccgacggcgccggggacaccggagaccgaagaac

SEQ ID NO: 230868 - RNA, 81 nt, Homo sapiens
gggagagcggccgccgccgcgccgcccaccacagggcggagaacggaaaagcaccaggaagcagagaggaccgcagaaggg

SEQ ID NO: 230869 - RNA, 64 nt, Homo sapiens
cgcgaaccccgcccgagcccgccggaccccccgacccagaaacggcgaggaaagagaggagccc

SEQ ID NO: 230870 - RNA, 73 nt, Homo sapiens
caagaagacagcccgcacggcaaaagacggccgccacagcccagacggcgaaagcgggccaagagacccccgc

SEQ ID NO: 230871 - RNA, 82 nt, Homo sapiens
ccaagaaccacacaggaacacgggcacaagcagaggaaccagggaaccgccgccagcaaccaacaggcacgaggaagggcag

SEQ ID NO: 230872 - RNA, 65 nt, Homo sapiens
gcgccacgcgggagcgagacgcagcgccacggccacggcccccacgcaaacggcacaggagaggg

SEQ ID NO: 230873 - RNA, 77 nt, Homo sapiens
aggagacaagcggagcgagcgggccagcagggagaccccccccgcaaccaggaaggcggggagagcgggcagacaca

SEQ ID NO: 230874 - RNA, 74 nt, Homo sapiens
ggccccccccacagccgcaggacccacggagccgccccccagcagggccaggacaaaccggacccagagagcgg

SEQ ID NO: 230875 - RNA, 78 nt, Homo sapiens
agcgcggcgccgcggcccgccgcggccggggacagcggccggccagcaacgccgagcagcgacggccacaacagccgc

SEQ ID NO: 230876 - RNA, 76 nt, Homo sapiens
cggggccccgcagaccccaacaggaagcacaaaagcaacaggccagggaagcaccaaaagaaaaacaaaagaacaa

SEQ ID NO: 230877 - RNA, 55 nt, Homo sapiens
ggccggagacaccagcagaacagagagaagggcgggagaaaccaaggaaagagaa

SEQ ID NO: 230878 - RNA, 56 nt, Homo sapiens
gcacaggaagccgcagacgcacgaacacccaaccgacaccacgagggaacaaacgg

SEQ ID NO: 230879 - RNA, 64 nt, Homo sapiens
acgccaaagaggaagcccaccacaaaaacgaaggcggcggggaagaaaagggaaccagcggagc

SEQ ID NO: 230880 - RNA, 32 nt, Homo sapiens
gaaaaacacgacaaagcaacccccagccacaa

SEQ ID NO: 230881 - RNA, 55 nt, Homo sapiens
aacaacggacaaagaccagggaaggaccaaccaagccgagggaccccagcggaac

SEQ ID NO: 230882 - RNA, 74 nt, Homo sapiens
gaaagcaggcgaacccgcggcgcaaaacgacagcgaacccacccaacacggcaaaacaaagacaccacacccaa

SEQ ID NO: 230883 - RNA, 71 nt, Homo sapiens
gccgagccgccaggcagcaggacggaaaccgagccagcagaagagacacgagcaaaggaaggaacaacaga

SEQ ID NO: 230884 - RNA, 82 nt, Homo sapiens
agaagcagaaagagcagaaaggagggggcgagaaggcgggaagccgaaggcagccacaggccccggagccgcagaaccaggc

SEQ ID NO: 230885 - RNA, 55 nt, Homo sapiens
aggggccaaagagcaacggaacccggacggcggacaaggcccagaacaagcacaa

SEQ ID NO: 230886 - RNA, 105 nt, Homo sapiens
gcgagaccccagacacccgccgacgggcagcacacccaccgagccgagaggggaaccaacgcagagccccagaacaaaagaacacagaggaaccagaacagaccg

SEQ ID NO: 230887 - RNA, 104 nt, Homo sapiens
cagcccagaaccaggagcagaaccaccggcagaaaagagacggacgcggagaagacgaccccgacgcaggccaggagccgcggacagaagccgagcacggccga

SEQ ID NO: 230888 - RNA, 45 nt, Homo sapiens
gccaacgagcaaccaacagcagaggcaaggcggcagcaaaacggg

SEQ ID NO: 230889 - RNA, 80 nt, Homo sapiens
gaagaacggcaaggagcgaaggaacgccccaaacaggaaggggcacgaagaccaaccggccaaagaagagaacccagaaa

SEQ ID NO: 230890 - RNA, 69 nt, Homo sapiens
gccgggaggcaaccaccacggcgcgagaagaagcagaagaaacgaggagacaaaggagagaggaaggac

SEQ ID NO: 230891 - RNA, 72 nt, Homo sapiens
caccgaccagggccagccaagcagcaggggcagaagcccccggggagagacagacagagggacacagagagg

SEQ ID NO: 230892 - RNA, 51 nt, Homo sapiens
gagaccgggcggacagggggcagcgagggcggggccgcaaggccaggcgcg

SEQ ID NO: 230893 - RNA, 48 nt, Homo sapiens
gcaggaccaggcggacccagagcagggaagcagagacggggcgccagg

SEQ ID NO: 230894 - RNA, 75 nt, Homo sapiens
gaaccggcgggggacagggggacggacacgcccagccccgggcacggaaaggaagcagcggccaggagaaaacag

SEQ ID NO: 230895 - RNA, 84 nt, Homo sapiens
cagacgaggccacagcccaggcacaggaaaggccagcaccagcgccaaccccccagcaggccccaccgccccacccggccccgg

SEQ ID NO: 230896 - RNA, 87 nt, Homo sapiens
gcggggcggcggcgccggcgcgggcccgggccccgagcgcccgaacagaaaggcacccgaaaggggaaggaaaagaaggaagaacag

SEQ ID NO: 230897 - RNA, 56 nt, Homo sapiens
cgggacccgggcgcccgcgcccgccccaacccagccacagaggaaccgggccgggc

SEQ ID NO: 230898 - RNA, 69 nt, Homo sapiens
ccgcagccacaacaccggcaggaaccaccaggacagaagagagaggcccagggcaggcggccgaacccg

SEQ ID NO: 230899 - RNA, 86 nt, Homo sapiens
agggagcacccccagccggagcagccggaccagcccagaaggcagcggcggcccaggccagcacccgcagcggacggcgcccccca

SEQ ID NO: 230900 - RNA, 107 nt, Homo sapiens
ggcggccggcgggagagccgccagggccacaaggggcgggacccagcaacccaggccacgaggcccagggaacccggaccacagaaccaagaaagaggagaacaagc

SEQ ID NO: 230901 - RNA, 54 nt, Homo sapiens
ggggaccgggaccgggacggaccgggaggacggagccaccaccaccccgagaga

SEQ ID NO: 230902 - RNA, 85 nt, Homo sapiens
cccgccccccccgccgcccccggcgggcccggcggcccacaccagacaggaggagccaacaaacagggaaaaggagcacaggagc

SEQ ID NO: 230903 - RNA, 67 nt, Homo sapiens
agaacacggcgggccaagacacccaaggagggcacccggccccacgccccaggcaccccgcaggccg

SEQ ID NO: 230904 - RNA, 55 nt, Homo sapiens
caagaaacacggacggaggaccgcagcaccagagaccggccaccaaaccacaacc

SEQ ID NO: 230905 - RNA, 74 nt, Homo sapiens
ccgaccgaggcgcccgcggggcggggaccgccgcccgggggagaacggaaaaaacaaagcgaaacagcggggcc

SEQ ID NO: 230906 - RNA, 78 nt, Homo sapiens
gcgggagcgcgcccgccgagcgcaacagcggcgggcggggcaccccagcacacgacggcgcccaaaacgagagaggac

SEQ ID NO: 230907 - RNA, 130 nt, Homo sapiens
aaagacgcacagaaccgaaacgccccagcagcacgcaaacaacacagaggacacagaagacacagccgccagcccaaacagcagcggcagggcagcgccagcccgggcgagcagcgacccccagccaccc

SEQ ID NO: 230908 - RNA, 79 nt, Homo sapiens
ccgggggaggacccgaggaacccagccaggaacggacgggagacacaggaagagcgggccaaccggggacgagccagac

SEQ ID NO: 230909 - RNA, 105 nt, Homo sapiens
acacggaccaccgaaaaacacgaagcggggcgacccaaaggcaggaacgcaggggccaaggcgacagcaaaacggagaaagaggagagggcaggggccgccggag

SEQ ID NO: 230910 - RNA, 73 nt, Homo sapiens
cgagaaacacagcgggaccggccgccccacaccgagcacccgcagaacaggagaggaagaggccccaggaccg

SEQ ID NO: 230911 - RNA, 85 nt, Homo sapiens
gcggcggcggcgcggcgaagaaggggacgccgacaaggaggccagcagggggggagagaagaggacgagggccaggagacagggg

SEQ ID NO: 230912 - RNA, 76 nt, Homo sapiens
gaaaaagaagcgagaaaaacacagagagagagagagcaacccaagacccagcaagaaagccgccaagaggcacaag

SEQ ID NO: 230913 - RNA, 78 nt, Homo sapiens
ccggcgcaccaggcgggcaagagcaccgggacccacgcgaccccggggccacccaagggcacgagaaacagacacccg

SEQ ID NO: 230914 - RNA, 40 nt, Homo sapiens
cacaggacgcggacaagggcggcagcagaggaagggcagc

SEQ ID NO: 230915 - RNA, 57 nt, Homo sapiens
cggccggaggagcccccaggcccaccgcaccaacgaccgaagcaccaggcacaccca

SEQ ID NO: 230916 - RNA, 60 nt, Homo sapiens
ccgggaggaccaggagcgccccaagaaaacaccccgaggggcccacaggaagagagaaaa

SEQ ID NO: 230917 - RNA, 75 nt, Homo sapiens
cccacccggcaaccccacggcacgacgccagaccgcgccaccggaagccggggaggcaagcaggggggcaaagga

SEQ ID NO: 230918 - RNA, 71 nt, Homo sapiens
ccccggcacgacaccgccccaacccacgagaggacagcccagagccagaccaggaccaggcggggcgaacc

SEQ ID NO: 230919 - RNA, 90 nt, Homo sapiens
cccaagaaaccaaccacaggacaagaccagccccgacaccccccaagagggggcggcagaggaacgggacccaagcaacccaagggaacc

SEQ ID NO: 230920 - RNA, 72 nt, Homo sapiens
aagacaaaaggagacgagaagaagacaagagcaacggcggcacaagaaaggagagcaagacccccggacaga

SEQ ID NO: 230921 - RNA, 76 nt, Homo sapiens
cgccacacgacgcgcaggagacggcccggagccgaccggagcgaaaccggcacggaacagagggccaaacaacagc

SEQ ID NO: 230922 - RNA, 70 nt, Homo sapiens
gccaggccgggaaaggccaacagaacaagagagaccagggggcagacccgaagagccaaggccagcgcca

SEQ ID NO: 230923 - RNA, 67 nt, Homo sapiens
aaagcggagaaaaggcacggcagggagggaagcggagagacaggaaccaggggggaccaaaacaacc

SEQ ID NO: 230924 - RNA, 75 nt, Homo sapiens
ccgcaccgaggagaacccgaacgaggcgcgacacaccagcggagcgggggaacccccccgggcagccacgcgcgc

SEQ ID NO: 230925 - RNA, 73 nt, Homo sapiens
cggacgcacaggaaggaaaaaggaaagaccacagcaagaccacgcccccagccgggggaccaggccgaacgac

SEQ ID NO: 230926 - RNA, 79 nt, Homo sapiens
agccccaggccgcgggggagaagacccgccagggggaaaggaggccgagaagagcccacagcgggacgggcgccccccc

SEQ ID NO: 230927 - RNA, 79 nt, Homo sapiens
cacaccacagccagagaaggcagccaagcccggcgcggaaaaggaacagaagaggaaccgaaacccaagaaaaaccacc

SEQ ID NO: 230928 - RNA, 72 nt, Homo sapiens
caccagagccggcagcaaagagggaacaggacgagaacccccgcgaaccagaggaacccagcgagcgagagc

SEQ ID NO: 230929 - RNA, 81 nt, Homo sapiens
ccagaaaaaacacaggaaacagcaaccccaagcgaagagggggagcgggccggagagaagagaggggcgcgaggagaagga

SEQ ID NO: 230930 - RNA, 78 nt, Homo sapiens
cgcggcgccgcgggcgcgacgacgcggcaccggccgacgccccgcccgcccagaagcagcaacagagaccaaaaacgg

SEQ ID NO: 230931 - RNA, 83 nt, Homo sapiens
ccggagaagaaggcgcccggacggaggaggaggggggcgaggaaacgcaacaccgaaccacgcccggaccgaccgcagccgcc

SEQ ID NO: 230932 - RNA, 78 nt, Homo sapiens
ccggcacacacgcgcccccggaccaggacagggcagaccgccagcagcacagcaagccacagagagggccggcagggc

SEQ ID NO: 230933 - RNA, 70 nt, Homo sapiens
aacgcaccaggccaaagaaagagaaaaccgcccagagagcagccaaacgagggccccgacgacacagcaa

SEQ ID NO: 230934 - RNA, 96 nt, Homo sapiens
acccaagcagaggcaagggccagaggaaaacggcccgcagaaagaaaaaggagaagaagcccggaccacggggaaggccccgaggaagcaccggca

SEQ ID NO: 230935 - RNA, 71 nt, Homo sapiens
aacccgcggaaaagacacgccgacgaagggcagaggaacaagggggaaacccgaaaaagaagcgaagagac

SEQ ID NO: 230936 - RNA, 68 nt, Homo sapiens
cagagaccaacccaagcgaagaagagcggaaaacaagggagaccgcgcagcaccccaaaggagaagcg

SEQ ID NO: 230937 - RNA, 77 nt, Homo sapiens
gggccaaaggcagaaggaacacaggcaaggcacgacgccgcacagccccaagccccaaacccccacacagcacaccg

SEQ ID NO: 230938 - RNA, 78 nt, Homo sapiens
gcgcgggcacgccgcggccacgcgccgagggcccaggaagcgggccggagcggcgaagcagcagagccccgggggccg

SEQ ID NO: 230939 - RNA, 78 nt, Homo sapiens
gcggacaagcagggcaaccaacgccggggcggggagcacggaacgacagggcgcagggcacagacacagcagcgggag

SEQ ID NO: 230940 - RNA, 90 nt, Homo sapiens
ggagaaaaacgagccgcccagaagagccgacagaggcagacacagaaggccgacacccgcaccgacaggcccaaaaacgcgacggcaaca

SEQ ID NO: 230941 - RNA, 77 nt, Homo sapiens
caaacagcaccggggacaaaaccaagaaaaaaccgagccagccagcaggaaaacagcaacagccaccgcacggccga

SEQ ID NO: 230942 - RNA, 55 nt, Homo sapiens
caaaaaggagccagcagcgcggggacgaacagcggggacgccccagcagaccgcc

SEQ ID NO: 230943 - RNA, 44 nt, Homo sapiens
ccccaaagccacgaggagaaggagaaagacagcaaagaaaagga

SEQ ID NO: 230944 - RNA, 54 nt, Homo sapiens
aaggcggacagcagcgcaggcaaaaaacagaaaagagccacgggaaggcaagag

SEQ ID NO: 230945 - RNA, 85 nt, Homo sapiens
acgccaagacggagaggaagcgacgcgggcaacgcagaagaagaccgaccgaaacgcgcacaggagaccgggcaccccccaaccc

SEQ ID NO: 230946 - RNA, 60 nt, Homo sapiens
cacccccaacgcgacggaaaggcacgaaagccagaagcaaagccagggagggaaccgaag

SEQ ID NO: 230947 - RNA, 76 nt, Homo sapiens
aagaacgcgaaccgaccgagaaaggaaaacaaaaagcccccgacaccaaaaaaaaaaacgacaccacacggagaga

SEQ ID NO: 230948 - RNA, 41 nt, Homo sapiens
gcccccagggaccaggacgagagcagcccgacggccaggag

SEQ ID NO: 230949 - RNA, 78 nt, Homo sapiens
ccgaaggagccaccaggccgggaagcccacgggacaaagaacggcaccagggcaggagggcgaggccagcaggcagac

SEQ ID NO: 230950 - RNA, 125 nt, Homo sapiens
gggcggcgggcggcgggcggcaaaggagcagccagagggccgggcccagcaccgacccccgccccccaaagcgaagccaaagcgaaggcaaaggccaagaaggcagggaaagggccacagccaca

SEQ ID NO: 230951 - RNA, 87 nt, Homo sapiens
cagaagggccacagaaggcagaaacccccaaaccgaaggcgaaaagaagaggcgggaaacgcccaggacaaacccagaccacacaag

SEQ ID NO: 230952 - RNA, 70 nt, Homo sapiens
ccaccagcgacaaacaggaaagaaggaacgagcaccacaggacaacgcaaaaaccccaacaccggggcac

SEQ ID NO: 230953 - RNA, 55 nt, Homo sapiens
acgggacaaaaaccagaccaggaaggccaaagaaagacaagagcgagcacacccc

SEQ ID NO: 230954 - RNA, 59 nt, Homo sapiens
cgggggacagaggcaggagacgagaccaccggcaacaaggccgcaagacaacagacaca

SEQ ID NO: 230955 - RNA, 80 nt, Homo sapiens
ggccccggcagcagcccgacgcaaaccaaggacggggaccgcacacccaaggaaccacacggcggaggcaccgacaaacc

SEQ ID NO: 230956 - RNA, 81 nt, Homo sapiens
aaagagaaggcgaggaaccagcaaccagcagcaccgagaggacccgggggagaagagacagaaggcaccggagaaaaggac

SEQ ID NO: 230957 - RNA, 75 nt, Homo sapiens
caacgcgcagcggagggacacggaccgaagaagcaaagccagggagggaaccgaagccacgggcgggggacgcga

SEQ ID NO: 230958 - RNA, 76 nt, Homo sapiens
cagaaaacaaagaagccagaggaaacagccagcaacagaaggagcccagccacccaggagaggagcagggcgcgcg

SEQ ID NO: 230959 - RNA, 82 nt, Homo sapiens
aaggaagcaccaccgggccgcgacggcgcgaggacaagagccccacaagcagaaccggcggcgagaacacaggagggcggca

SEQ ID NO: 230960 - RNA, 57 nt, Homo sapiens
acagccaaaacagcacaacagcagggagaacaagaccaagaggaaagccagccagag

SEQ ID NO: 230961 - RNA, 88 nt, Homo sapiens
gcgggacgacaacgagcagccacacccagacgagcgggagaaggcgcgcgcaagcacgcgaggagagaagaacgccagcagcgaagcg

SEQ ID NO: 230962 - RNA, 69 nt, Homo sapiens
gacggcaccagccaggaggacaaaccggcgaccacacacggggacgacggggaagccggacagcaagcg

SEQ ID NO: 230963 - RNA, 68 nt, Homo sapiens
cgcagcccgccgaaggcgcggagcaggaacgcaacggaaagggaaggaccgaccccaaggggagaaga

SEQ ID NO: 230964 - RNA, 74 nt, Homo sapiens
gaggaaaaggaaccgggcagcgggccccacggccgccagcccgcccgccaccgggccgggcccgcagcgaggcc

SEQ ID NO: 230965 - RNA, 46 nt, Homo sapiens
agggcgcccccggaaagagagacgacggaaacaggaccgaggccgc

SEQ ID NO: 230966 - RNA, 76 nt, Homo sapiens
ggaaaacaaaagaggagaaaggggccgcaaggccaggcgcgcagaggcacccaacggcacagaccccacacacaac

SEQ ID NO: 230967 - RNA, 72 nt, Homo sapiens
aggaagacgaaaggcaaggccaaaaggacaagaccaaacccaaaagaaccacaaacagacgcagagcggcag

SEQ ID NO: 230968 - RNA, 74 nt, Homo sapiens
caaggaggccccagcggaccgaacagaggcggagaagaacccaaccaaaaccaggcggcaaccccggggcgaca

SEQ ID NO: 230969 - RNA, 74 nt, Homo sapiens
agcgcccgccggaggagcagccagcacccgagggacccgaggagcccaccaagccgaccgcaggcaagggccgg

SEQ ID NO: 230970 - RNA, 80 nt, Homo sapiens
ccgcgcccaggcagagccagacccaaccggccaggaccagccggcggccgcaggggacacgcccgggggggagcagccgg

SEQ ID NO: 230971 - RNA, 73 nt, Homo sapiens
acagagcggggcacaagcagcccagggcaaagggccacaagaacaccgagacgacacaagaacaaagacgggc

SEQ ID NO: 230972 - RNA, 72 nt, Homo sapiens
cagccgagccccaccgaagagaacagggccggggcacgacgacccaacagcaaggaagacagccggacacag

SEQ ID NO: 230973 - RNA, 86 nt, Homo sapiens
cgagcggacccggaccgggggggaggagccccagccccgcgacgaggaggaagcggagcggagcgcgaggcaggaccggccggcag

SEQ ID NO: 230974 - RNA, 74 nt, Homo sapiens
acaaggcaaggcaccggagcggaaaaaccgaacaagaggacacccccacacgagccccaaccccccagaccaaa

SEQ ID NO: 230975 - RNA, 55 nt, Homo sapiens
gacagcagacgcaccaaagggacagaaccaaaggacgcccccgggccaaacggca

SEQ ID NO: 230976 - RNA, 75 nt, Homo sapiens
agaagccgaaggaccagaagaagcaaaagcagccaacacaacgaagaggcacagcagagaaggaaggccaagccc

SEQ ID NO: 230977 - RNA, 75 nt, Homo sapiens
ccaggggcccgaaaccaaccagaggaggacccacagaccaaacaacaggaacggcagagcgaaacaaacaagagg

SEQ ID NO: 230978 - RNA, 73 nt, Homo sapiens
ggaaggggcagacaagcacgccgcccagacaaccagagagccggagggcaggaagccgccaccaggaacccca

SEQ ID NO: 230979 - RNA, 66 nt, Homo sapiens
agaacaaaggagagaggaccacccagaggagcaacgacgaggaaagccccaggaagaagaagaagc

SEQ ID NO: 230980 - RNA, 69 nt, Homo sapiens
gcaccgccgcgggagcgccgccaagcacagggaacaccagaggcgggaccacgggcagcgcccagggag

SEQ ID NO: 230981 - RNA, 68 nt, Homo sapiens
gaaggacacgcagggcggggaggagccagggagcccagcacaggcccagcagcagggaacaggaagca

SEQ ID NO: 230982 - RNA, 84 nt, Homo sapiens
ccgcccggccgcgcagccgagaccccaggacaacaaggccccagcgggaggcaacagggccagacccaaacaaccagcaaagcc

SEQ ID NO: 230983 - RNA, 75 nt, Homo sapiens
cgccgggaacagaaggaacaaccgagcacaaaaaaggcacccggagaacagacagaccagccgaacccagaagcc

SEQ ID NO: 230984 - RNA, 80 nt, Homo sapiens
aaggaccaagaaccaggaaaaccaacggcccggaggaccacagcccaggggccccaggcgaaacccagccggagcgcagg

SEQ ID NO: 230985 - RNA, 87 nt, Homo sapiens
gaagcggcggcggagcagaacggagcaggggcgcacccacgacgcgcacaccaccggcagaccggcgccacagcaccacccgacggc

SEQ ID NO: 230986 - RNA, 67 nt, Homo sapiens
aagaaaagcagcagaccagacacaagaaaaccagccgagaagacaagggaggcgaggacggacaaaa

SEQ ID NO: 230987 - RNA, 42 nt, Homo sapiens
gccggaggcccacgaaaccaaaaggaagaacagggaaccgag

SEQ ID NO: 230988 - RNA, 59 nt, Homo sapiens
gaacggaaaaagcgaagcacgccaccccacgcagcgcagcgccgcagagacaggcgccc

SEQ ID NO: 230989 - RNA, 82 nt, Homo sapiens
gccaaacggccagacgccgacgcgaccagcagagacgacaacagccaaggcggcacgcgagcggccagccccggggcgaacg

SEQ ID NO: 230990 - RNA, 78 nt, Homo sapiens
agccaccaaagagaccagcagcccaaggacaggacggacccccgaaagaggaggggcagaacgaagaaaacaaggaaa

SEQ ID NO: 230991 - RNA, 74 nt, Homo sapiens
gaaaaaggcacacaccggaccaacggaaaagagcaaagcagcagaagggccagcaggcgggaggccaggcagca

SEQ ID NO: 230992 - RNA, 100 nt, Homo sapiens
gaaacgcagagaagaaacacggcaaaaagaaaaaccagcgaagcacaggaggggcagcagcaggacagggaacccgggagacagcaacagacggaggaac

SEQ ID NO: 230993 - RNA, 66 nt, Homo sapiens
gagcggggagagaaaggggaaggaacagcgccaaaggccaacagacccacacccagaaaaaacccg

SEQ ID NO: 230994 - RNA, 87 nt, Homo sapiens
gccagacaggaacaagacccggacaccaggccacagccgggaagcagagggagaaagagcgagcccagaggaagcgccagccaacgc

SEQ ID NO: 230995 - RNA, 67 nt, Homo sapiens
gggccgacgaggggggcggggccggcaggaaacaaggaaagcaacaaaagaccacagcaaaaaggcg

SEQ ID NO: 230996 - RNA, 61 nt, Homo sapiens
gagggggcacccagcacacccaagacgcggcaacagaaacgacccggcgccgaccgcgaga

SEQ ID NO: 230997 - RNA, 70 nt, Homo sapiens
cgagcccaggagcgccacgcgcggaaggcagcgcccagcagcgcagcgagacgacgggaccgaaggaccc

SEQ ID NO: 230998 - RNA, 69 nt, Homo sapiens
aaggaacaggcggcaagaacaaaaggagccacagcaaaaagccacgccacaaggcaagcaaaaacacag

SEQ ID NO: 230999 - RNA, 76 nt, Homo sapiens
cggaggaggagaacacagaaccaccaggagagcaagccacccacaccgagagaaaagagacaccggagaggccaag

SEQ ID NO: 231000 - RNA, 62 nt, Homo sapiens
gggaaacccacaggaggcaaccacacagagggaaaagcgaagacgcagccaaggggaccgca

SEQ ID NO: 231001 - RNA, 75 nt, Homo sapiens
gaaaacaacaggccagccgaggcaacaggaaagaggggagccacaaagaaacccccaagaagagcacagcgcaaa

SEQ ID NO: 231002 - RNA, 79 nt, Homo sapiens
gcaaccgcgccggagccggcgagcaggaagcggccgccgcagggagaggacgcagacggaaccgaccgagcagggcaca

SEQ ID NO: 231003 - RNA, 73 nt, Homo sapiens
cccaagagcagcggaaaagaccagcacaggcccgcagaaacaggagacggaggagaggcaagaacaacgcgca

SEQ ID NO: 231004 - RNA, 82 nt, Homo sapiens
ggagcgcccgcgacagaggagggaggaaaacaaccgagggcagagcaagaaccacgaggccacccgacacgggagccacacc

SEQ ID NO: 231005 - RNA, 74 nt, Homo sapiens
caccggccacccccccggagcccggagcaaggacagagcgggagccaccagcgccaaagggaagccaggagccc

SEQ ID NO: 231006 - RNA, 78 nt, Homo sapiens
ccgaggcccgagccaccagaacgcgcaggggggacccccccagccccaggaccccggaccaggagggcaccgagcagc

SEQ ID NO: 231007 - RNA, 96 nt, Homo sapiens
gcagagcagggagacagcgggccggaggccaaggcggagcagggagcaacagaaagacaaggacaacgaagagaggaaagaagcggaaaggaggga

SEQ ID NO: 231008 - RNA, 82 nt, Homo sapiens
cggagaggcggagaggcaggagcggacagacgaaccagaggcccggaggaagagccagggaggggggccccgagcccgcggc

SEQ ID NO: 231009 - RNA, 64 nt, Homo sapiens
accagggcgaagacagagacaaacaagagaccccagcaaaacaaaggagagaaaacaggccccc

SEQ ID NO: 231010 - RNA, 76 nt, Homo sapiens
gacaacaggaaacggaaggggacacagagggcccccagaagcaaaaggagggaaagagcccgccagcgaaaacaag

SEQ ID NO: 231011 - RNA, 87 nt, Homo sapiens
gcggcgcccccggcccggagcaacgagcgcagcgccggcaaaagcagaccggaaaacccaccggcaagaccacacccgaggggagcc

SEQ ID NO: 231012 - RNA, 80 nt, Homo sapiens
acggcgccgaccagcaccaggggaagcgggacaacggggggccaggccgagggcccgcccggccccaggagaagaaccag

SEQ ID NO: 231013 - RNA, 71 nt, Homo sapiens
gggaaccagacccaaaaaggaacacaagcagccaagagccggcccaagacacaaaccagcagcaacccagg

SEQ ID NO: 231014 - RNA, 78 nt, Homo sapiens
gcaaaccgaaagaagagaaggccacgggcaaggagacaccaggggagaagcgacgggccggcggccgcacccacaccc

SEQ ID NO: 231015 - RNA, 69 nt, Homo sapiens
acgacacagacagaccgaggggacggggaggcaagcaggggggcaaaggaaagaaggcagaaagggagg

SEQ ID NO: 231016 - RNA, 83 nt, Homo sapiens
ccacggggcgggggcggggcggcaggagccggccggcaaccgagggacccgcgccagggcggagaacggaaaagcaccaggaa

SEQ ID NO: 231017 - RNA, 74 nt, Homo sapiens
agcgcagcaacacagggcccaccaccccaacagggccgacaagggcgcccgagaccgcccagggggaccccgac

SEQ ID NO: 231018 - RNA, 73 nt, Homo sapiens
gagaaacaaggaaaggccacaacagcaagaaaagaagcgagaacgcccacaacaaccaggcaaacccagaagc

SEQ ID NO: 231019 - RNA, 77 nt, Homo sapiens
cgagcagagcccggcggacacgagcgccagaccgccggcaccgccacaagccaagaaagggagggggaaacagccaa

SEQ ID NO: 231020 - RNA, 72 nt, Homo sapiens
gacgcgccggcgcaaagaagcccaagccaggacggaccccaagcaagccgggacaggagccagcggcccagg

SEQ ID NO: 231021 - RNA, 75 nt, Homo sapiens
ggcagcgggcgggccccgagagcagcagcggaagccgagccagggcagcagcaaaaggcacacggaagacagaag

SEQ ID NO: 231022 - RNA, 74 nt, Homo sapiens
cggaccaggaaacggaggcgggacagcagaggcacacaaacggaaccgcacaaagcagacaacaaaaagcagcc

SEQ ID NO: 231023 - RNA, 87 nt, Homo sapiens
caaccgaaagcgggcccgggagacccaggcgggacagagggagccaggcagagggcgcccgcgccggcagaggaggcgagcacccgc

SEQ ID NO: 231024 - RNA, 72 nt, Homo sapiens
gggagggcagcgccacccggcccgcccagagcagcagggaacgcaccaagaagcaaaaccagaccgacagaa

SEQ ID NO: 231025 - RNA, 91 nt, Homo sapiens
ggaagagacgaaaaaggccagaaacgcagagagaggcacgaaacaccaggaagaaaccagccaaaaaccaggaaaacaggaaaagccaacc

SEQ ID NO: 231026 - RNA, 78 nt, Homo sapiens
ccgagcggacccggaccggggacccacaagaagcggaggaagggggccacgccaggcaggcacccggcagccaccacg

SEQ ID NO: 231027 - RNA, 74 nt, Homo sapiens
agaagaacagagcaaacagacggaagaggcgggggaagcaccgcaaacaacaaagcggaaaacaaaaaacggaa

SEQ ID NO: 231028 - RNA, 85 nt, Homo sapiens
cggaggggaggagccaaccagaggacgaggcccccaagccgagccgagagcagcagaggccgcgacaagacaaccggccacgaca

SEQ ID NO: 231029 - RNA, 72 nt, Homo sapiens
gagccaggagggcccagaggaggacagcgacaaggaacagagacagacccgggggcccccaaggagagggaa

SEQ ID NO: 231030 - RNA, 66 nt, Homo sapiens
aggcaaagaccccagcaccacagaaaaaaggggaacaaacgaaagccacaccccagggggaaacag

SEQ ID NO: 231031 - RNA, 74 nt, Homo sapiens
aaggaccaagaaccagaaaaccccaaccagagagaaagagaggaagaaagaagacgggcaagagagcacagcga

SEQ ID NO: 231032 - RNA, 75 nt, Homo sapiens
cagaacaaagccgcgggccccagggacacaagcaaagagaagcgacaccgagccaggacaaagagaccacccaag

SEQ ID NO: 231033 - RNA, 79 nt, Homo sapiens
gaaaagaaccagcagagcgcccccagcagacccagacacgagaggcgagggacgacagagcaagcggcagagggcaagc

SEQ ID NO: 231034 - RNA, 54 nt, Homo sapiens
gccggaaaccggagcgcgcagcagagaggacggggacgggccccaggacgagga

SEQ ID NO: 231035 - RNA, 80 nt, Homo sapiens
gacgaggccaggccaccaggccgccaccgccccgccccgcacgcccacagccggccaccacaacccgggaaccaccccac

SEQ ID NO: 231036 - RNA, 80 nt, Homo sapiens
ccgaggaggcggcggagcagcgggcggaggggaccggagccagcaccagcagcgcgcacccagggcacaggagacagaga

SEQ ID NO: 231037 - RNA, 71 nt, Homo sapiens
caccaacacccaaagaacacgccaaaaagaccagggggaagaagaccccagacgagaccccggcagcagac

SEQ ID NO: 231038 - RNA, 72 nt, Homo sapiens
cacggaggaggcgccgaggagacgcagccaaacaccgggcaaacgaagggggaccccaccccccgagcgggc

SEQ ID NO: 231039 - RNA, 78 nt, Homo sapiens
gccgaaccgggagaagaccccggcgcgggaacgagacacgagaccagaagccaagaaacgaggagagccaccaccaag

SEQ ID NO: 231040 - RNA, 67 nt, Homo sapiens
gaagagacagcccgcacggaccgggaagagaaaagaggagcacccacgaagaggcgagcagccaaaa

SEQ ID NO: 231041 - RNA, 86 nt, Homo sapiens
gaaggaacccagaccaagcacacagacagcacaggaaacggacggaaaggagacacagaggggaagagaaaacagaaggggaggaa

SEQ ID NO: 231042 - RNA, 72 nt, Homo sapiens
ggggcacgccccgagccgcccgccgccgagagaaaagaaaccgacccggaaaagagaagacaaacagcccac

SEQ ID NO: 231043 - RNA, 40 nt, Homo sapiens
ggccccagaacaccggagaggggcgggagccgagagaagc

SEQ ID NO: 231044 - RNA, 79 nt, Homo sapiens
gggcaccaaagaaaacagaagccagaagcagagaaaaagggaaggccccaaagcagaccccagcggagaagagagcgga

SEQ ID NO: 231045 - RNA, 80 nt, Homo sapiens
gcccaaccggcgacggaaccaagcaaagcagcagcacaccccgacaagggaaggaacccacgcggccaccccccgccgga

SEQ ID NO: 231046 - RNA, 59 nt, Homo sapiens
gcccccgaggacggaggcacagcgcagcgacgagagggagcgagccacccccggcgccc

SEQ ID NO: 231047 - RNA, 78 nt, Homo sapiens
ccagcccaggcccgcgacagaaggaagagaccgcaccacgccgggaacggcccaccagagagggaaggcaggccaacc

SEQ ID NO: 231048 - RNA, 81 nt, Homo sapiens
gaagccgcgcccgcggacaagcagacgagaccgggccccccgaggcgggcccaccgccgcccccgagacggggcaccagcg

SEQ ID NO: 231049 - RNA, 78 nt, Homo sapiens
gccagaagccgaggaaagcggaagcggccggcaggggaaggacgagaacgagcaccagccgaccagaccgcacagaac

SEQ ID NO: 231050 - RNA, 85 nt, Homo sapiens
ggccgccggacggccgggcgcggaggggacggaaagagagccgcagcgcagaacaagggaaaaaagggcaaaaagggcaaaaaag

SEQ ID NO: 231051 - RNA, 77 nt, Homo sapiens
cgagagcgcagacccgcagaagagaacaagcagaggaaagacacgccagagaagaacaggacacaacaggagacgga

SEQ ID NO: 231052 - RNA, 81 nt, Homo sapiens
gccaaaagaaggcccgggaaagcacaaagcaagagacagcgaggacagaaggaaggaagcggacacaggaaaacgagaaga

SEQ ID NO: 231053 - RNA, 76 nt, Homo sapiens
cagcgcccaaccgcccgggccaagacaaggggcgcagagcggggggacaggcgcaagaccggagaagcaggagcgg

SEQ ID NO: 231054 - RNA, 64 nt, Homo sapiens
cgcagaagaacagagggaaagggacggcacaggaacggagcagagcgaggcagggccccagaga

SEQ ID NO: 231055 - RNA, 79 nt, Homo sapiens
gggcaccgcgcgaagcggccaaagccgcccagacggccaccggcgggaggaacaaaagaggcagcgagaagaaaaagaa

SEQ ID NO: 231056 - RNA, 69 nt, Homo sapiens
aaacgagaaacacaagggaacaagacgagggaaaaaagaacccaggccggaggagccaagggacccgcc

SEQ ID NO: 231057 - RNA, 54 nt, Homo sapiens
caccgaccccaggcaccacgagggcccgaaacagacgcacgccgaaaaaaaacg

SEQ ID NO: 231058 - RNA, 75 nt, Homo sapiens
aggagggcccgccccccagccaccagggggaagcggcccggacacccgaaggagaggagcagaccacgagcgaca

SEQ ID NO: 231059 - RNA, 58 nt, Homo sapiens
aaggaccccgcccagcccccaggagaaaaaggcagccccggagacgaaaagacaaagc

SEQ ID NO: 231060 - RNA, 79 nt, Homo sapiens
gcccacgacgacaggggcaccgcccggacaacggacagagaaagcggcacaggcgccggacgcaaggacacgccccaga

SEQ ID NO: 231061 - RNA, 74 nt, Homo sapiens
gaggaggaaaggaggacgagaaaggggaagagcgaagaccgccccagcaaggacggcggaccaccccgccggag

SEQ ID NO: 231062 - RNA, 74 nt, Homo sapiens
aacagacacagccagccagccacacggcagaaaaagagaagggcaggagggaacaacagcaaagcagcaccgaa

SEQ ID NO: 231063 - RNA, 56 nt, Homo sapiens
caaagcagggcaaccagccaggagaaagccacagaccgaaggcagagggggcgagg

SEQ ID NO: 231064 - RNA, 66 nt, Homo sapiens
aaaggaacggcaagacaacaacccggcccgaccgacgacccgcccgggcaccaacagagcgaagcg

SEQ ID NO: 231065 - RNA, 68 nt, Homo sapiens
aaggccggaggacccccaaaagcaaagacggaaaacacagagccagaaggcccggagaccgaaggccc

SEQ ID NO: 231066 - RNA, 78 nt, Homo sapiens
aaaccagacagacaacacccacagggcagccacacaaaagggaagcgggcagaaccgagaaaaacagcagagaccagg

SEQ ID NO: 231067 - RNA, 98 nt, Homo sapiens
ggcgagcgggagcagcgggaagagcagaaccggggcggagcaccgcagccccgcgccacccggcaagcaggcgaccaggcgccccgacacggacgcaa

SEQ ID NO: 231068 - RNA, 59 nt, Homo sapiens
agagggggaagggcccaaagccagaagggcaaaggaaacaggagaaaggcaggaagcgc

SEQ ID NO: 231069 - RNA, 75 nt, Homo sapiens
gccgagcaggcgccgccccagcccgcgaacgagagcagcaacagagaaagaccagaccgacaccacccaaagagc

SEQ ID NO: 231070 - RNA, 72 nt, Homo sapiens
gaagccacggaaggacaaggggcaccagccacgccccaccagcaaggcgccaccggaagaaacgggagggga

SEQ ID NO: 231071 - RNA, 70 nt, Homo sapiens
gcgcaggaaggaaaaggaccgcacagagaacagaagcgcaagagaccagcccgggaaccgaacacaaggg

SEQ ID NO: 231072 - RNA, 54 nt, Homo sapiens
gaaggcgccgggcccgacccgcgagaggggcggaaacagacccgccagaagaac

SEQ ID NO: 231073 - RNA, 78 nt, Homo sapiens
agagagagagaggccgggcccagcgccacggcgaggaaggcggcccagaggagagggaaggcacacacaccaagagag

SEQ ID NO: 231074 - RNA, 85 nt, Homo sapiens
ccgccccgcgagcacagagcccgccgccgaccgccgcccgccacacccgccgccaggcacgcagcacgggggcaggggccgaccc

SEQ ID NO: 231075 - RNA, 80 nt, Homo sapiens
agcaaggaacaaaccgaagaacagcgggaaagaaggcaaaacacggggccgacgccaccgccgagcccagaccggaacag

SEQ ID NO: 231076 - RNA, 67 nt, Homo sapiens
gagggcgcagcggggacgcggacgcacggcaccacagcgccgccaccagccccagaccagaaagcag

SEQ ID NO: 231077 - RNA, 70 nt, Homo sapiens
acaaccggaagcggcagagagggaaacagacaacacaccaaaggagaagaccagaaagaacacaggcgaa

SEQ ID NO: 231078 - RNA, 77 nt, Homo sapiens
gggaggagaacgaccggagaacgcaggcccgaagggccgggaggggcaacaagggaccaggcccggagacgcgacgg

SEQ ID NO: 231079 - RNA, 74 nt, Homo sapiens
gcgacaggggaacagacagaaggagcaggaaccaaaggggggcacaaagaaaccgaagagggagaaacaggacc

SEQ ID NO: 231080 - RNA, 36 nt, Homo sapiens
gggaagaaaaaccgggacaggaggccagggcacggg

SEQ ID NO: 231081 - RNA, 84 nt, Homo sapiens
cgaaggcccacagcaaaaaggccaagagacagggggcggaggagcggaagccgaagaagaaccaaaagagcagaaggagcgaga

SEQ ID NO: 231082 - RNA, 74 nt, Homo sapiens
aagacgaggaaagaaccgggcacaacccccagcagagggccacccgccccaagcagcaggcgcaaaaacgaacc

SEQ ID NO: 231083 - RNA, 80 nt, Homo sapiens
cccaaaggcggaaacaggacacacaaacgggagaccggaacgggggaggccggcgaccgcacaagggcaaaaaccaagcg

SEQ ID NO: 231084 - RNA, 60 nt, Homo sapiens
gcccccgagagcgagaacaggcgggcaaaacgccgagcccgagaacgaccccagaaggaa

SEQ ID NO: 231085 - RNA, 83 nt, Homo sapiens
ggacggagcccggcccgggcgagcggggcgcgccgcagagcggcaccgaaggacaggaggcgacaaccaccagaagcggagac

SEQ ID NO: 231086 - RNA, 75 nt, Homo sapiens
acagcggaggagaccgggaaaccgccgaagacgaagacaccggacaaggacggacaacccacagaaggagacaaa

SEQ ID NO: 231087 - RNA, 69 nt, Homo sapiens
aggaaaggcccaacacacagcggagcaaagaagaacgaggcagcacaacaaaaacaaagaaaacgaaaa

SEQ ID NO: 231088 - RNA, 79 nt, Homo sapiens
agggaggaaaacagggaaggcccaagacgccagccaccggaccagccggccgcagccaacagccgaccgagcacgagcc

SEQ ID NO: 231089 - RNA, 69 nt, Homo sapiens
aacaaaaaagcaaaaaaccagggcaaggaaagaggaaaacccgcagagacaagaaagagggacaggacc

SEQ ID NO: 231090 - RNA, 53 nt, Homo sapiens
cagcagccggaacagggccagcaccgcaagcgaggaaagaagggggcgaaagg

SEQ ID NO: 231091 - RNA, 62 nt, Homo sapiens
gcccagcccgagcacaggcgcgacggccaccccccaggcacagggaacagcgagagccccag

SEQ ID NO: 231092 - RNA, 78 nt, Homo sapiens
caagagaaaagcggcgagaacagcgaaaaccagcaaaagggaccccagggcggggcagccccgcccccaggacagcag

SEQ ID NO: 231093 - RNA, 40 nt, Homo sapiens
cggccaggcacaggcgagcagcaggcccagaagcggacaa

SEQ ID NO: 231094 - RNA, 75 nt, Homo sapiens
agaccaagaaagccggcggaagacaaaggaggcacccacgaaggaagaagagagggcaaccgcaagaaccaccag

SEQ ID NO: 231095 - RNA, 82 nt, Homo sapiens
ggcgggcccgggggcccagcgggcgccgcgcacgcgagagaagaagaaggaggccgcggccagaaacccaagaaaaagcgaa

SEQ ID NO: 231096 - RNA, 84 nt, Homo sapiens
agcaacagaggcacagccaagggggaggaggccagcagaacggaaagagcgaaggagggagaccgcagagaggaaggccacgcc

SEQ ID NO: 231097 - RNA, 79 nt, Homo sapiens
gcagaaagcaggcgaacccgcggcgcaaaacgggaacccgagcgcagaggggaagcagaggacccaggcgaacagcaag

SEQ ID NO: 231098 - RNA, 74 nt, Homo sapiens
gaagccaccaaggagcaggaaaacggcgagcggccggaagaagaagaacacaggccaccggagcagcaacaaga

SEQ ID NO: 231099 - RNA, 71 nt, Homo sapiens
agcgcagaccaccaaacccaggaggagacccccggaaaaccccccccgggaagggagcccaaaacaggagc

SEQ ID NO: 231100 - RNA, 80 nt, Homo sapiens
caaagcacccgaggggcgaacaagcaggaggacgcccaagaaaaggggacaccggcaccaagagccgcccacaggccaga

SEQ ID NO: 231101 - RNA, 60 nt, Homo sapiens
acgcagagggcggagcggcaggcaggaagagaacacagaagaagaggagaggaaccagca

SEQ ID NO: 231102 - RNA, 68 nt, Homo sapiens
cagagaacaaaagcaaggcaacaagcacaaggagccccggcgcaggaacacaggacggccgaacacga

SEQ ID NO: 231103 - RNA, 80 nt, Homo sapiens
cgaaggcgcaaacgacaccacccgaccgacaaagggagccaaaggaaaaaagaccccagacccgcagaaaaccacagcag

SEQ ID NO: 231104 - RNA, 69 nt, Homo sapiens
ggcacgcagaaggccggacgaagaggggccggaagaaggcgcggaccagggcagcagacaggccagccc

SEQ ID NO: 231105 - RNA, 55 nt, Homo sapiens
ccaccaaaggagccagcgcggagcaggcgcagagcaggccagcccgcagcgggcc

SEQ ID NO: 231106 - RNA, 80 nt, Homo sapiens
aagagaagccaaggccgaagccgagcagaggacaaaacaagagggccagcccagagaagccgggacaccaagagaagcaa

SEQ ID NO: 231107 - RNA, 66 nt, Homo sapiens
gccagggacagccaccggcggccgggacccacaggaaaagccccgcagggaggagggaaccaaccg

SEQ ID NO: 231108 - RNA, 53 nt, Homo sapiens
agggcgcaacaagagcgacaaacgcaggcaggagcccagaggaggaggcacag

SEQ ID NO: 231109 - RNA, 79 nt, Homo sapiens
ggcgcgggcggcgggcagcccgcgggcgcccaggccggggggggcacagagccccggaagacagcccccagcgaccaga

SEQ ID NO: 231110 - RNA, 69 nt, Homo sapiens
cgccgaagaagcacgaaagccccacccgccgcagcaagcagaggggaggagagccggaggacacagccc

SEQ ID NO: 231111 - RNA, 42 nt, Homo sapiens
acgcacacggcggagaacgggccgaagaggccccaggaccgg

SEQ ID NO: 231112 - RNA, 83 nt, Homo sapiens
gccgggagccggggccgccgccggagcggcgccggagccggagccggaacccagccgcgccagccaccaggagagaacgccgc

SEQ ID NO: 231113 - RNA, 58 nt, Homo sapiens
cgccccgagaggaaacacccccagaagaggggagccgccaccaaaagcagacggaaaa

SEQ ID NO: 231114 - RNA, 67 nt, Homo sapiens
ccaaccacaccggagcaggacaagcgaacagcagcaacaggacaccagcaacagcgccaggagaacg

SEQ ID NO: 231115 - RNA, 86 nt, Homo sapiens
ggagacgaggggcgagagacggcggcggccgaaagcggagagagcgggcgggcggccgggagacccacagcccagccacaggcaac

SEQ ID NO: 231116 - RNA, 53 nt, Homo sapiens
cggaccgggagacaccccgcacacacacccaaggagcagggccaggacgaaca

SEQ ID NO: 231117 - RNA, 68 nt, Homo sapiens
cgcggacaggggggaaacgaggccgagcggaccccaagacagcgggcgcgaccaaggaaacaaaggac

SEQ ID NO: 231118 - RNA, 75 nt, Homo sapiens
ccaacaggggagaccacgcggaaagcgggaggagccgccggcccaggcggaggcagggacagcagccagcagccc

SEQ ID NO: 231119 - RNA, 74 nt, Homo sapiens
aaacccaaggccacaacgccgcaacaaaagaaacccgggccgcggaaggcccgaagggcacaaaaagaagcgag

SEQ ID NO: 231120 - RNA, 70 nt, Homo sapiens
acaccagacaccaaggacagcccgcaagacacgaagcccgggcaagacaacaaaacccgcgggcagaaag

SEQ ID NO: 231121 - RNA, 82 nt, Homo sapiens
cggcgaggacaaaaccgaaggagggaacaaagaggcccaagccaaacggagaagaagagcaaaaaaccaaagccagcagcag

SEQ ID NO: 231122 - RNA, 44 nt, Homo sapiens
ccaaaaacagaaggagacagagggcaccgaaggacagaagagga

SEQ ID NO: 231123 - RNA, 65 nt, Homo sapiens
cagggccgccaaaccagccaaaggaaacgccacacccgcgcagccaaagaaacacaaaaaaagaa

SEQ ID NO: 231124 - RNA, 78 nt, Homo sapiens
cccccggagaaaccaacgggccggccccccgggaacccaggccgaccagggaagcagcacggcaagcggaaacacagg

SEQ ID NO: 231125 - RNA, 67 nt, Homo sapiens
agccggaaacggacaaacagaaccaggagaggaaacaggaacaaaaccgaaagccggagcagaagcc

SEQ ID NO: 231126 - RNA, 56 nt, Homo sapiens
ggcacgaccccacccccgaggcccgaccgggcgggacccgagagaacgcaagaccc

SEQ ID NO: 231127 - RNA, 67 nt, Homo sapiens
aggcgagccacaacgcgcaccccggaccaccccaccagagccagaaaaacaaccaccagcgagcaaa

SEQ ID NO: 231128 - RNA, 69 nt, Homo sapiens
ccccggggggaacgacccgaggggggagagcgcgggggcgacggccgagcagaggacaaggaagacccg

SEQ ID NO: 231129 - RNA, 81 nt, Homo sapiens
agccacggacggcccgcaaggccgaggcgcagcgaccccaaaggcacgcccccggggcaaagcaggcaaggccagcaagga

SEQ ID NO: 231130 - RNA, 76 nt, Homo sapiens
gcaagacccccacagacgagggaacggcacaaaggaaccaagagccgcaggaaaagaaacacgaccaggcacggcc

SEQ ID NO: 231131 - RNA, 65 nt, Homo sapiens
agcagggacacgagacggcagacccagcgccggggaagcgagacaacagagggagacgccaaagc

SEQ ID NO: 231132 - RNA, 78 nt, Homo sapiens
aaacggggagcgccccaccaacaggcccgcagagaagcagggcggcacgaacggccagcagggagcgggaaacgcaca

SEQ ID NO: 231133 - RNA, 78 nt, Homo sapiens
ggggcgcgcgacggcggcccgaagccagcgccccaccggggcaagcagcccagaaccgggacaacccagcaaacaggc

SEQ ID NO: 231134 - RNA, 64 nt, Homo sapiens
agcccagggcaggacaccgacaggaacagggaccacggggagcaagggccagagaaggaggaga

SEQ ID NO: 231135 - RNA, 84 nt, Homo sapiens
ggagcagcccccgccgggcgcgcaggagagcggcaacaccgggagaaacagaaggggaagaaccccagcacaagaagaaaagac

SEQ ID NO: 231136 - RNA, 83 nt, Homo sapiens
ccgggacgccgagcccgacccgggcgccccgccggcaccccgcgcggacaccagaggcgagggcgccggcaccagggcgcaac

SEQ ID NO: 231137 - RNA, 78 nt, Homo sapiens
agagaaacggccagcccgggcgaagccagagagaacggacccagagaagaaacaggaaacagaagaagagaagaaaag

SEQ ID NO: 231138 - RNA, 72 nt, Homo sapiens
cgacgccaccgaccgacagagcaggagacacaggaacgaaaacaaacggaagagagggcagcaagaaagaac

SEQ ID NO: 231139 - RNA, 35 nt, Homo sapiens
gcaggacagccagcaggcgcaagccccggggcaga

SEQ ID NO: 231140 - RNA, 58 nt, Homo sapiens
ggccgagacggcggcagcagcggcacagcaccgccggccaggaggagagcgcaccacc

SEQ ID NO: 231141 - RNA, 76 nt, Homo sapiens
gccgacgggaagcagaagacaggaccagacccgcagccaagcgcgggaagaagacccgcgccaacccgacgaacca

SEQ ID NO: 231142 - RNA, 71 nt, Homo sapiens
cgcggccgcgcacaccgacgccacgccgagcggcacccaggggcgccacagccccaccagcagccgcaccg

SEQ ID NO: 231143 - RNA, 46 nt, Homo sapiens
cagccagcaacaccgggccgccagcgagaaaccgccccccaaagaa

SEQ ID NO: 231144 - RNA, 71 nt, Homo sapiens
ggaaaaggccagaacccgagcccagaggcccggaaggcgcaaaagggggagaacaacaccaccaaaccaga

SEQ ID NO: 231145 - RNA, 83 nt, Homo sapiens
aacaagaaccgaacgaggacacgaccccgccccacgcccaggagcaggccagcgacagaagcccagggaaaaggccccaaaag

SEQ ID NO: 231146 - RNA, 52 nt, Homo sapiens
accccaaagacaaggaggagaaaggaaaaagggacgaacaagagagacgaag

SEQ ID NO: 231147 - RNA, 84 nt, Homo sapiens
ccaccccaaacggaccacagccaagcccaagcaaaagccaacagagcagcagcacgggcagcagaacgaaagcgcgcgcgcagg

SEQ ID NO: 231148 - RNA, 120 nt, Homo sapiens
accacgccggcgcaacccccagcggagggcagaaccagaaaaaaccgaaaggcaaagcagacaaagagggcagcaaaagcgaacaaaagacaaaagagccaggaccccaaccagaccaga

SEQ ID NO: 231149 - RNA, 59 nt, Homo sapiens
gaacagcacacccaccccagaaacaacgaacgagcaaggaagggccaaggcagacccca

SEQ ID NO: 231150 - RNA, 77 nt, Homo sapiens
caagccgcccccccccaaaaagaccacggggaaaggagggaagggcaacaacccaccgggggaaacaccagacgaag

SEQ ID NO: 231151 - RNA, 55 nt, Homo sapiens
gcgggaagccgaaggcagccacaggcagaccgaccaaacagggagcagcggacag

SEQ ID NO: 231152 - RNA, 72 nt, Homo sapiens
cgaggagagccccgccaggcggcaccaggacgccgaaaagcgaccggacgcaggcacagggacacgcgagac

SEQ ID NO: 231153 - RNA, 74 nt, Homo sapiens
aggcagaaggcccaaagagcagcaccgaggccacgcgacgccagcccgcccccagcgggagcagcgcccagcag

SEQ ID NO: 231154 - RNA, 76 nt, Homo sapiens
gcaaccgggaaagcaaccccacgagaaagacgcagaaagaggggcaaaaaagagcacaaagcgccgcgggggagga

SEQ ID NO: 231155 - RNA, 52 nt, Homo sapiens
ggcacgcgcacgccggcgccgcacacgggcgcagggggggcaagaggaaaac

SEQ ID NO: 231156 - RNA, 64 nt, Homo sapiens
ccccccgaaccccaaggccaaccgcgagaagagacccagaccaccggccggggccggcccaaag

SEQ ID NO: 231157 - RNA, 63 nt, Homo sapiens
cggggaacagggagcgcccggcgcacagcgccagccgaacagcaacagggggcaaagccgcca

SEQ ID NO: 231158 - RNA, 65 nt, Homo sapiens
ccagcgagagacaccaagcgcgaaaagccccccgggagcagccagaacagagaaagcccagcgca

SEQ ID NO: 231159 - RNA, 81 nt, Homo sapiens
aaacgccggaagccccaacaccagagcgcacaccggggcaaaagggacaaggacagcaaacacccaccgaggcaaaaggag

SEQ ID NO: 231160 - RNA, 74 nt, Homo sapiens
agcagaggacagaaccggaccggaggcaggcgaacggccacccagcaacggcagcaccggaaccggggacccca

SEQ ID NO: 231161 - RNA, 73 nt, Homo sapiens
ggccacggggacgccaccaacaagacaaaagaacggaagaaaaaaccagacccgggagagggcccaaggcgaa

SEQ ID NO: 231162 - RNA, 62 nt, Homo sapiens
acccgagaacacaccaaagcccgcccccaaagaccaaaacagagggagacgagaaaagggcc

SEQ ID NO: 231163 - RNA, 87 nt, Homo sapiens
cccgaagcaagaggcgggaacagagccacaccgagaaccgccgcggagccccacccaacgggaaagacccccccagcgcccgcccca

SEQ ID NO: 231164 - RNA, 89 nt, Homo sapiens
cgacacgagaaagaggccaaaaaaaaacgaacagacgagcgaagagacccagaacaggagaagcaaaacacagaggaaaagggaaagag

SEQ ID NO: 231165 - RNA, 76 nt, Homo sapiens
acggagcgggcgcgcggagggaggaagaagagccagcccacccgcgaccggcaagccaggagacgacaacggagcc

SEQ ID NO: 231166 - RNA, 41 nt, Homo sapiens
gacccggaaggacggcgagggaaaaaggggggagacacacc

SEQ ID NO: 231167 - RNA, 60 nt, Homo sapiens
gggacgcgccgcccggacggccgcagagcgcgccacagagaagaaaagcggcgggggggg

SEQ ID NO: 231168 - RNA, 79 nt, Homo sapiens
cccaggccaggcggccgccaccaggcagagccgaggaagcgaagcagaggcccaggggaccaccacagccgggcgagga

SEQ ID NO: 231169 - RNA, 81 nt, Homo sapiens
gcccggggaaggcccgcgcccgccccagaagacgacagcgaacacccgaaggagccagcaacagaggagaacacaagcccg

SEQ ID NO: 231170 - RNA, 70 nt, Homo sapiens
ccgcacgcgcacggacggcacagcccgccgaacccgaaaggaggcagaggcaaaaacaagcaaaccccag

SEQ ID NO: 231171 - RNA, 71 nt, Homo sapiens
gggagcaaacaaggacaaccgaaaacgaacccaaaggagagcccgccaccacccagggaacggagccggga

SEQ ID NO: 231172 - RNA, 85 nt, Homo sapiens
ccggcacgccggcgcccgcaccccggggcccaggaagggcggcccagcacaagagggccagggaccaggggacgcccaagacggc

SEQ ID NO: 231173 - RNA, 65 nt, Homo sapiens
agccacagccagacagggagacgcgccccgggccagaccggccagacagaggcacaggcgcgggg

SEQ ID NO: 231174 - RNA, 64 nt, Homo sapiens
agcccggaccccgacgccgcgggcccggccccggacgcgggcgacaccccaagagggccgccac

SEQ ID NO: 231175 - RNA, 81 nt, Homo sapiens
acacgcagcagcggccaggcgcgcaggcaggcacaaggcccaggcacaggccccaggaggcccaaaagggcaggaccagca

SEQ ID NO: 231176 - RNA, 70 nt, Homo sapiens
caaagcacaagaagaagacgagggacacggccacggaccgcgcccaccaaggaggacgagccggccgcgc

SEQ ID NO: 231177 - RNA, 74 nt, Homo sapiens
gcggcgagacaggaagcagagggcagggggcaaacaagccgaccggaaaaagaaaacggagaaacagaggagag

SEQ ID NO: 231178 - RNA, 72 nt, Homo sapiens
cccccacgcagcccagaagacgccacacacagaacgacaccacagcgacaaccggcgaaccacaggagaaag

SEQ ID NO: 231179 - RNA, 48 nt, Homo sapiens
cagaggagagaacgagccagacagcgggagcgaccccggcaggaaggc

SEQ ID NO: 231180 - RNA, 82 nt, Homo sapiens
gaacggccaaacaacagggaaccaaggggacaaaccaacagaagggcaaccagggaccaagaaaggcccagggaccaaagcc

SEQ ID NO: 231181 - RNA, 80 nt, Homo sapiens
accacaaggccaagggcaaggagacagcggaaaggcagccacagcagaggaaagagggaaagacaaaggccagcagagcg

SEQ ID NO: 231182 - RNA, 76 nt, Homo sapiens
acggaacccagagagacgacacagcagcaagaaacaagggaagccgggcggaccaggagagggaaagagccggacc

SEQ ID NO: 231183 - RNA, 76 nt, Homo sapiens
gaccagggacaaaagaggggaaacagggagcccaaaacaagaagcaggcggaaccagcccagccacgacagagcac

SEQ ID NO: 231184 - RNA, 103 nt, Homo sapiens
ccaccaccacgccagccgcaccagccgcccaagccgcacagccgcggcggcagcagcaggagagagacggagcgcaagaggacggcagcgcggcgaagggacc

SEQ ID NO: 231185 - RNA, 71 nt, Homo sapiens
aggaggagaaggcaaagagccagcccgggcaccacagaacagccgaagcaggccaccagccgagaacgagg

SEQ ID NO: 231186 - RNA, 76 nt, Homo sapiens
caaagccgcgagaggcccgagaccaggcggaaggacggacgacacagggagcagcacggggaacagggcgagacaa

SEQ ID NO: 231187 - RNA, 71 nt, Homo sapiens
gaaaaacccgaccccccaagcaggcccccacagagagcacacaaacaaagcgaaaccacggaagaaaaggg

SEQ ID NO: 231188 - RNA, 77 nt, Homo sapiens
ccccacggggcgggcggaagaccccccaagcgccagaaccccccaaccaagagaagaaagagagccgaagagaagag

SEQ ID NO: 231189 - RNA, 83 nt, Homo sapiens
cacggccagacgcccccagggccacaacgaagaagacagagagacaacgcaaagcagacgcgcacaaaaagaaaaacgaagaa

SEQ ID NO: 231190 - RNA, 40 nt, Homo sapiens
ccgagaggagcgagcgagcgcggaagacggagcaccgcgc

SEQ ID NO: 231191 - RNA, 71 nt, Homo sapiens
gaggcgcacaaaaggcgccccggaaagaagaacgaagcacagcggaacaagcgaaccacaaagaaaccgac

SEQ ID NO: 231192 - RNA, 78 nt, Homo sapiens
aagggaaacacagaaccaaaggaaaaccaacccggacacagggcagaagcggccagcccgaagccaacggggggcaag

SEQ ID NO: 231193 - RNA, 65 nt, Homo sapiens
gccgcgcacagcagcgcacgaaggacagaaaacgggccccagacacaagccccaccaagaggaca

SEQ ID NO: 231194 - RNA, 83 nt, Homo sapiens
gggccaccccgggcacggacggcacggacacagcaaaagaggcggcaaggcagcccaggcaaagaagaaaggcgagggccagc

SEQ ID NO: 231195 - RNA, 73 nt, Homo sapiens
ccggcccccgggacggcccaaggccagcccgcagaaaggcgaaaagcgaagacagccccgcggaaggacaaaa

SEQ ID NO: 231196 - RNA, 76 nt, Homo sapiens
aacgcagccaagaacgagaagagccgcaggaggggcaggcggccaagcagacaaggccgacgcgcacgaacacggg

SEQ ID NO: 231197 - RNA, 66 nt, Homo sapiens
caagaacaaggggacgcgcagcaggagaaaacagagcgcaaaaacagggcgggaacccccacgcag

SEQ ID NO: 231198 - RNA, 75 nt, Homo sapiens
caaggaacaggccaagagagccgaacccaccgagccagggagacacagaaagacaagggaagagcccaaaacgcc

SEQ ID NO: 231199 - RNA, 79 nt, Homo sapiens
ggcaggcgagggagcccgcgcggcgagagcccacaggcccccacagggggggccccagcccggccgaacgggcgcacga

SEQ ID NO: 231200 - RNA, 37 nt, Homo sapiens
gagcccccccggccggccagcggacgacagcagacga

SEQ ID NO: 231201 - RNA, 64 nt, Homo sapiens
ggagacccggggacccccgacgccaggcagcgcccccaaacgccaagcaagaaaagagacacag

SEQ ID NO: 231202 - RNA, 81 nt, Homo sapiens
gcagccaccggccgggcgcgcgccgagccgcgcagggcggcgacggcggcgcgaggaccgaccgggcccgcggacgaagaa

SEQ ID NO: 231203 - RNA, 73 nt, Homo sapiens
gcggccccaaggggcccagacggggaggacagaagggaaagggagcagcaccggccacacccacagcacgacc

SEQ ID NO: 231204 - RNA, 80 nt, Homo sapiens
ggcccagccgaagcgggggagggccagcgcccaaaggcgacaggcgcgcagagccagagccggggaccagggccccgagg

SEQ ID NO: 231205 - RNA, 52 nt, Homo sapiens
accaccaccgcccgcccgagaaaagcgagaagccgcagcaagcgggcggcaa

SEQ ID NO: 231206 - RNA, 81 nt, Homo sapiens
aaaaagaccaagcgaccgggggacgcggcgacaacccgaagggaggaggcagaagaggagaaacgaccaagacagcccccc

SEQ ID NO: 231207 - RNA, 82 nt, Homo sapiens
agagaaaaaaaggaaaagcggcagggcaagaaagaaggggcgcgccagcgcacggacccaagacaagaggagaacggacgga

SEQ ID NO: 231208 - RNA, 83 nt, Homo sapiens
gggaagcgcccggggccggccgccgcgggaccgaggaaaagccgcaccagaacaccccaccagaccacccagcaagcccacaa

SEQ ID NO: 231209 - RNA, 82 nt, Homo sapiens
gaaaaagaaggcccgagcaaagaagagcccgaacaaacaaacacccagaaacaagaggaggcagcacggcaggagacgagga

SEQ ID NO: 231210 - RNA, 83 nt, Homo sapiens
ggcgaccccagccagcgcagcgacggggcgcgccggcccaggcgcacacggaaggcgcagaagagagccgcccgggaggcccc

SEQ ID NO: 231211 - RNA, 81 nt, Homo sapiens
gaaggggcccgaagcccccgcaggaaccacaacccaaccaggaccgcgggacaacccccggagcgagaggaccgagaaaac

SEQ ID NO: 231212 - RNA, 58 nt, Homo sapiens
ggcccacaggacggggagacagcagcaggaacacagaccagaaccggcgcaacacccc

SEQ ID NO: 231213 - RNA, 83 nt, Homo sapiens
cggccggaggcaccagcacgaaagcaagaagacacaccggaaagccaggcacccgcccaggcggggacagcaggaccgagcac

SEQ ID NO: 231214 - RNA, 69 nt, Homo sapiens
acggggaccccggagcccagaagacagagggcgaggcaaccagaggccaggccagagacaccccaagcc

SEQ ID NO: 231215 - RNA, 80 nt, Homo sapiens
gagcccccacagggagaaaccccacccccaagaaccaacccccaaaggcgggacaggacagggccacccgcagagcccac

SEQ ID NO: 231216 - RNA, 88 nt, Homo sapiens
ggagggcagaaagccaggaccaagagacaggcagccaccagggggacaaacgccagagaggagagagcacagggagagaacagggagg

SEQ ID NO: 231217 - RNA, 56 nt, Homo sapiens
cggggacagcccccgagggagggcccaaaaaagggaaccgcacagcgagacacccc

SEQ ID NO: 231218 - RNA, 72 nt, Homo sapiens
caggacaacagcgcacggcaaggcagcgccgaagggcgagcggagaaaccccgggacagagcaaaagccgaa

SEQ ID NO: 231219 - RNA, 76 nt, Homo sapiens
ccaggccgaaaacgaagcagaggaacaacaagaggaccaaaagaccacgaaaaagaaaaggagaaagaaaaagaaa

SEQ ID NO: 231220 - RNA, 61 nt, Homo sapiens
cgaagcagaaagcaaggaaacgagcagaagcagaccgaaaagggcggaaaaggaccaaggc

SEQ ID NO: 231221 - RNA, 89 nt, Homo sapiens
gcccaccgcgggcccggaggccgagccccggcggcgcccgggcccacgcggaacgacggggcgagagaaccgggagacgacgcgcacgc

SEQ ID NO: 231222 - RNA, 44 nt, Homo sapiens
cgcccgaaggcggcacaacccgggccccagccccaccccagccc

SEQ ID NO: 231223 - RNA, 68 nt, Homo sapiens
gaaccaaacccaccgcaagacagggaagcgcggcgggccagagaagcagacgcccagcgaacaagcag

SEQ ID NO: 231224 - RNA, 75 nt, Homo sapiens
gaccacccacacaaacccgggacgggccgagagggggaagaggagagcgccgaacaacgaagaagggcgaaggga

SEQ ID NO: 231225 - RNA, 72 nt, Homo sapiens
agaacaaaaagggccagagcgcgggcccaggcggaggcggaggcaaggcagaccggccaacgcaaccacacc

SEQ ID NO: 231226 - RNA, 78 nt, Homo sapiens
agacaaggacaagaggcagcaagacaaccgcaagccagagacggaaacgccaagagcgagcggacgaggagcccggaa

SEQ ID NO: 231227 - RNA, 60 nt, Homo sapiens
cagcgggccggccacggcgggagagcggcaaccaaaagcgagacaagacgaaaggacgcc

SEQ ID NO: 231228 - RNA, 78 nt, Homo sapiens
gcgacaggaggagacaggcgagagaggaggacacgaccggacagggaagaagccaaaacagaaggggcaagagaacac

SEQ ID NO: 231229 - RNA, 113 nt, Homo sapiens
cccgaagggaaacccagacgcaaaggaacaagcgccaccaaggaagcccggcaaacgagacggcacagagagcgcgaaggaccccgacaagaacgcgcccccagccgaaaaaa

SEQ ID NO: 231230 - RNA, 69 nt, Homo sapiens
ccagagcaggaagcagagcgcagggacaaggcccaggaggccaccagcacggccacgggcggcacggag

SEQ ID NO: 231231 - RNA, 53 nt, Homo sapiens
aagcagcaacagaaccgcggaggagccagcccaggaggcagcacggcaggaga

SEQ ID NO: 231232 - RNA, 86 nt, Homo sapiens
ccgaaaggaagggaaaaagacagggaaacaggaaaaaaaaggaggcgacaagcaacaacaacaagcggcccccgcaaacgcggaca

SEQ ID NO: 231233 - RNA, 75 nt, Homo sapiens
gcgaggagggggaagcccacggcggacgcaagccgcaacggaaaaccaaaccgaaccaagggaacaccaaaaaaa

SEQ ID NO: 231234 - RNA, 86 nt, Homo sapiens
cccaagaagggggaacacaagaaaccaaacaagccgaaagagcaaggagacacccggagcgcggacaggaaaagagaggaacaagc

SEQ ID NO: 231235 - RNA, 73 nt, Homo sapiens
ccccacgcaaccccagaccaacacacagaaccgaggaggcgcaaaggggaagaaagacccaaccagagagcgg

SEQ ID NO: 231236 - RNA, 64 nt, Homo sapiens
gccaggggagagaaggccgagacagagggaggggaagacgggccccgcgacaaaaaagagcagc

SEQ ID NO: 231237 - RNA, 83 nt, Homo sapiens
cgcggcacggcccggggccgggagcgcccgaggaacacgccgcaggcaaggaaccggagcaaacgacccgaccagcgcgcggc

SEQ ID NO: 231238 - RNA, 80 nt, Homo sapiens
agcgggcggcaagagcaggaggcggaggggggaaggcgcccgcggacaggaaaagccagagagcggcagagaagaaggga

SEQ ID NO: 231239 - RNA, 78 nt, Homo sapiens
ccgaccgaagccggaaacgaggcaccagggaagagccagcaagccaaggccaccgagccacaagaccacagcaccgac

SEQ ID NO: 231240 - RNA, 80 nt, Homo sapiens
ccccgaacagcaaagggaagaaacaaagaagacggcaccaagacagaaggcaccaaacggacaagcagcggggcagagca

SEQ ID NO: 231241 - RNA, 70 nt, Homo sapiens
gggagcccagagagaacccgggagaaaggcggagaagagaccgcccacagagggccgccacaccagaaga

SEQ ID NO: 231242 - RNA, 77 nt, Homo sapiens
gcgcggggcggcgggccggccgaaggggcggcgccccgcccggccgagggggagcagacagcccgcgacgcacgccg

SEQ ID NO: 231243 - RNA, 65 nt, Homo sapiens
caccgcggccgcccgggccgcgggaagcgaggagcccgggaaggacccaaagacaggaccacgca

SEQ ID NO: 231244 - RNA, 78 nt, Homo sapiens
ccccgagcaaggagcggcgaagccacaaaaacagcgcaagcgggaccggcccaggaggaggggagagcaaacacgacg

SEQ ID NO: 231245 - RNA, 69 nt, Homo sapiens
cgcaccacggcgggaggccgcgcagccaggaccgaggaaggaaaacggagccaagacagaacgaagaga

SEQ ID NO: 231246 - RNA, 82 nt, Homo sapiens
aggagcggagcccgcagaaccccacagcaagaggacgcccccgcgacgagcccccaacgagccaccaacaggaacagacccg

SEQ ID NO: 231247 - RNA, 69 nt, Homo sapiens
gagcgaagcccagagacagacgagaagacagaagacccccgccagagccaggaaccaaacgcaaggcca

SEQ ID NO: 231248 - RNA, 68 nt, Homo sapiens
aggaaaacaggaacagagcgagggaggagagagggagagccaaagaaggagggccaaaaaggggacca

SEQ ID NO: 231249 - RNA, 78 nt, Homo sapiens
gcccgaggaccccaggcggacgcccggcacgggccgcgcacggcaaggccccaggccaggccagacgggcgccagggc

SEQ ID NO: 231250 - RNA, 76 nt, Homo sapiens
agacgcagggcgcccccgaccacagcggaccacaaggaggaacggaagaccggcccgaggggcacaaggcaagggg

SEQ ID NO: 231251 - RNA, 75 nt, Homo sapiens
cccgcacccacgcccggcccggcccggccccgacacgggaccagcgccagccagccagggggggcagagccccac

SEQ ID NO: 231252 - RNA, 36 nt, Homo sapiens
aacacagcgaggagacagaggaacggggaggggcaa

SEQ ID NO: 231253 - RNA, 56 nt, Homo sapiens
gaagcagaacccacagagagccaggaggaggggaacgggacaccaagcagaaccac

SEQ ID NO: 231254 - RNA, 74 nt, Homo sapiens
gaacccaggcagacacaccacagagaccggagcccggccagggcaccagcaccaagcaagagagcgccgacaaa

SEQ ID NO: 231255 - RNA, 60 nt, Homo sapiens
gccaggacccccagaagccagaaaggaccccgaacaagaacacacgaaaaacagccaagg

SEQ ID NO: 231256 - RNA, 62 nt, Homo sapiens
gcggccagagcggggcagccgcccaggagggaaaaccagacgagagacagaagacgaaaggg

SEQ ID NO: 231257 - RNA, 72 nt, Homo sapiens
gacaccgcgaagcaggggaggaagcgggcaccaacagacaaccagggcaagcagaggcaaaggcaagggcgg

SEQ ID NO: 231258 - RNA, 83 nt, Homo sapiens
caccgggagagcgcggcccagcccggccacgcggacccgaaaccaagcacagaacacaccagaggcggaccaagaccccagga

SEQ ID NO: 231259 - RNA, 72 nt, Homo sapiens
ggacggaggagcaggcgagaagagaagcgacaccagccacaggaacgacgaacagcagacagggcgccaggg

SEQ ID NO: 231260 - RNA, 75 nt, Homo sapiens
ggagagagcaccgcagaagaacgaagacggggcccccgcagaaggggcaccagaccccccgcacacgcagccaga

SEQ ID NO: 231261 - RNA, 72 nt, Homo sapiens
agccggaaaacacaggggggacaccagacacccaccacacggcgcacaaccagagaaaccaccgagcagaga

SEQ ID NO: 231262 - RNA, 60 nt, Homo sapiens
ggcggagcgcgagagccgagcggaccaggcacgaaggaagcacagaagagaaagggagag

SEQ ID NO: 231263 - RNA, 85 nt, Homo sapiens
cccgcaccgccgcccgcgccccaccaggaaggcgggccacccgggcaacgggaacaccaggccgcaggacgggagcgcgccccgg

SEQ ID NO: 231264 - RNA, 71 nt, Homo sapiens
aggagagaacgggagaccaccgggccagaagccagaagaaagcagggggggcgcacacgcagaaagaacag

SEQ ID NO: 231265 - RNA, 69 nt, Homo sapiens
cccacgggcccagaaccggaaagcaggaagaggaaggacgccgccccaacagcagacccaaaaacacaa

SEQ ID NO: 231266 - RNA, 79 nt, Homo sapiens
gcccagcagccccacgcaggggcccggaacgcccgaccgcacacggccacccgagaaacacaggggaaacacgagagag

SEQ ID NO: 231267 - RNA, 70 nt, Homo sapiens
aggcccaggagaaagcacaggacagggcaggacccgaggcgccagcagcagcaagaccgggggaccaggc

SEQ ID NO: 231268 - RNA, 69 nt, Homo sapiens
gcaaggaagcgggcaagaggagagaaagaacccacgcaggacgacagaagaggccggacaagagaagaa

SEQ ID NO: 231269 - RNA, 130 nt, Homo sapiens
gccgggcgccagagagcgacccggggggagcgcggggcgacgcggcgcagggacccgggacagcggagaggagggcggagagaacaccccgaaccgggaggcagagggacacggacgcacggaaacagag

SEQ ID NO: 231270 - RNA, 68 nt, Homo sapiens
ccgcggccgggcggcgcggccgcccgggccgggccccaccggacggccagcgcgggccgccagcggcg

SEQ ID NO: 231271 - RNA, 84 nt, Homo sapiens
gcccggcaaccgcccggcaacgccaaccgcccgcgcgcgcaggcgggcgcaggcccggcgcagcgcggagcgaagggaggcaac

SEQ ID NO: 231272 - RNA, 69 nt, Homo sapiens
ggaaaggaacaacgggcaagaaagggaagccaccgcaaaaggggacgcaacggccacagccaagggaca

SEQ ID NO: 231273 - RNA, 79 nt, Homo sapiens
acgggaagcgcgaccagagccaggagggcgcggggacgcaacccaacaggagccagcaccgccgaccgccagcgccaga

SEQ ID NO: 231274 - RNA, 75 nt, Homo sapiens
agggcaggaccggcacccggcgccggaccccgagaaacagaggagaggggcggagcgggggggcacacagaccgg

SEQ ID NO: 231275 - RNA, 72 nt, Homo sapiens
agccaaagcagcacgcgaggaggaaaggcaccccaccaggaccgcggcaagcgggagcggacccacccaagc

SEQ ID NO: 231276 - RNA, 75 nt, Homo sapiens
accgcaccggccacccagaagcacagagcgaggacaaccaccgagcaaacgccggggggggcacagagccccgga

SEQ ID NO: 231277 - RNA, 81 nt, Homo sapiens
gcccggagagacgaaccgaagcgggcgggcccccccacccagaggagaaccagggcacagcgcagcggagcgaggaaagca

SEQ ID NO: 231278 - RNA, 62 nt, Homo sapiens
agagacacgccaagcagccagcccaggagagggaggaagacaccaggaggccaaggaccggg

SEQ ID NO: 231279 - RNA, 66 nt, Homo sapiens
ggggagacacgcgaaagcaaaccgaggagccaagccacccaggaaggaaaaggcgcccgagagccg

SEQ ID NO: 231280 - RNA, 56 nt, Homo sapiens
gggaaccccggagaaaaggccaagaaggcagcaaagagaccaaacaacaaaggagg

SEQ ID NO: 231281 - RNA, 57 nt, Homo sapiens
gcagacgcaaaggcaagacacgacaacgggaaaggccggacagacgacacagccaga

SEQ ID NO: 231282 - RNA, 74 nt, Homo sapiens
caaaaccaacgaaccaaaagcaaccgcgaagagcaggcgaacaagaggcgccagcgggcgcgccggaagaacag

SEQ ID NO: 231283 - RNA, 82 nt, Homo sapiens
ggggcgcggggcggcgggagaggcgaggagagaccgggcccgaccgccccagcagggagacagaagacacccaagcagcccc

SEQ ID NO: 231284 - RNA, 54 nt, Homo sapiens
aaggaaagaaacccacgggcagagcgaaaaaggaggagcgcccgcccaggcgga

SEQ ID NO: 231285 - RNA, 110 nt, Homo sapiens
gaggccgccacaaccgccagacaaccggagccacgccccacgaccgccagcccagcgacccaacagagacccgcaagggcacagggcccccccaagacaacccagaaaca

SEQ ID NO: 231286 - RNA, 126 nt, Homo sapiens
agccgagaggaggaaccggcaagacgccagggccagccgagaggagggcagcccagagccggaacagacaacagggagaccccacgggacaccagcccaccggccgaggcggggccgaagaagacc

SEQ ID NO: 231287 - RNA, 67 nt, Homo sapiens
ggcggcccaaggacacacaggacaaacacacagaggagaccagggagacaaaccggaacacgacaga

SEQ ID NO: 231288 - RNA, 87 nt, Homo sapiens
cgccagcgggacgaggaccgagaccgcggccgggaccgaggggaagcggaggcggaccggaaacgaccacagaccggccgagagcag

SEQ ID NO: 231289 - RNA, 79 nt, Homo sapiens
aacaccagagggccaggccagaagagccgaccacaaggggaggacaaccgcccgggaccagaagcagggaagcaggacc

SEQ ID NO: 231290 - RNA, 56 nt, Homo sapiens
gaaggcagagaggggaagaccaagagcacaggcaaggacggggacacaagaccagc

SEQ ID NO: 231291 - RNA, 36 nt, Homo sapiens
gggagcaacccggcgagaaaagaggacacaaccaac

SEQ ID NO: 231292 - RNA, 73 nt, Homo sapiens
ccccaccgccggcgcgggaaacgggcgaagcgacgagccgcgaggaggaaggagggccccggagcagccacac

SEQ ID NO: 231293 - RNA, 67 nt, Homo sapiens
gacccggggacccccgacgccaggcagcgcccccaaacggaacagcgggaggagggacgacggaagg

SEQ ID NO: 231294 - RNA, 81 nt, Homo sapiens
aagccggaagcaagccgccgggagaaggaagaacggcgagaacaacaagaaggagaaagacacaacgacagaagaaaaaac

SEQ ID NO: 231295 - RNA, 73 nt, Homo sapiens
agaacacgggagaaaaaggaaaacgcggaaaaccgacacaacaggcgaacaggcccaaacgggggccgcaggg

SEQ ID NO: 231296 - RNA, 72 nt, Homo sapiens
accaccgccgaaacagagaagacgcaacagcccacagaggcaccaaaccagacaagcccgcagcaggcgagc

SEQ ID NO: 231297 - RNA, 78 nt, Homo sapiens
cgaaagagggggaccacagcggagcggaccgaggaccgagggaagaccagacgagcccgcgaagagaccacagccagc

SEQ ID NO: 231298 - RNA, 74 nt, Homo sapiens
gccaggccgacagccgcggccgggcccgaggagaggagcaggaagaagaccacgcccccagaaggcaaaaccag

SEQ ID NO: 231299 - RNA, 80 nt, Homo sapiens
gcaacagaaacaaaagcaggcaaaggagcggggaagaggaagacaaggccaaagcccggaaagaaaaggaaacgagcgca

SEQ ID NO: 231300 - RNA, 60 nt, Homo sapiens
agggaggaggaggaccggagcagagaaacagaaaacagccaaaaggacagggacagcaaa

SEQ ID NO: 231301 - RNA, 66 nt, Homo sapiens
cgcgccacccgccggcccgcgggcaccccaaagcaccacaccccaccggccggagcacgccaagca

SEQ ID NO: 231302 - RNA, 93 nt, Homo sapiens
ccccaggagaaggcggaggacaagcccagcaccggcacgggcgagagcgggaagagcacgcacaagcagagcgcacaccacggcgccggcacc

SEQ ID NO: 231303 - RNA, 48 nt, Homo sapiens
ggagcgcggcgggcgcgcgccagggcaggggaccaaaacgaagagagg

SEQ ID NO: 231304 - RNA, 90 nt, Homo sapiens
ccagaacccaggcccacggaggaagagccgggcagcccggagcgggccagagggggcccggaggggcgcccaggccgagcacccaggcgc

SEQ ID NO: 231305 - RNA, 75 nt, Homo sapiens
ccgacccccgagcgcagccagaacggaggaggagccgcagccaaaaggcagaaacccacgagcgaacaccggagc

SEQ ID NO: 231306 - RNA, 75 nt, Homo sapiens
caggacaggagccgagaacacgggccaaccgcgcgcgaaagcgcgcaagaaggaaagcgcaaacccagcaagcga

SEQ ID NO: 231307 - RNA, 76 nt, Homo sapiens
aaaaccaaccagaagacgaacaaacagcaagaaagaccacaagaccaggcacaaaaccgccccagccaggaggcag

SEQ ID NO: 231308 - RNA, 77 nt, Homo sapiens
gaagcgagcccagcaaagacaacagccagaagacgcgggggcaggaacggagaaaaacgagcccccgaccggaacag

SEQ ID NO: 231309 - RNA, 88 nt, Homo sapiens
cccccccggggggcgggcagagggggcacggagagcccccgagcgcagcaggccgccccgccagcagagaaaccaggcggggaacaag

SEQ ID NO: 231310 - RNA, 65 nt, Homo sapiens
cagagaccaaagagccccgagcaccacgggaaccacggagaccagaccgcgccacaggacaagaa

SEQ ID NO: 231311 - RNA, 76 nt, Homo sapiens
accggacagaaagccagagaagaaaccagaagggccggagaagccacgagcagacagcaacaagggcccgggaagg

SEQ ID NO: 231312 - RNA, 76 nt, Homo sapiens
ccagcccgcgcagcaagccccagggacgccgagggcaacccgggggggacagagaccccgcggcgcgagcgcccgc

SEQ ID NO: 231313 - RNA, 75 nt, Homo sapiens
acaaggagaacagaaaacaccaaaggaagagaaaaggagcagccacggcgcagaggaacagccagcagaagaggg

SEQ ID NO: 231314 - RNA, 56 nt, Homo sapiens
aagggacagcacagagaagcaggggcaaaagaaaagggccgcggagacaagagaag

SEQ ID NO: 231315 - RNA, 86 nt, Homo sapiens
gcccgccagccccagcggcgccgagaaaggcacccggacacgaccaaaacccccaaagccaccagaaagccgcgagcccacagagg

SEQ ID NO: 231316 - RNA, 75 nt, Homo sapiens
gagggcccagacaagcccaaggaggagcggagaaggaccaccccagacacaaaccgacccagcagaccacgggag

SEQ ID NO: 231317 - RNA, 56 nt, Homo sapiens
agcaaacggccaagagaagaaggacagagaagacccagaaggcaaaacaaaagaag

SEQ ID NO: 231318 - RNA, 68 nt, Homo sapiens
caccggcggaacccagcaaggcccagagaacagcggggagcgcccgcaggcccccaaggcggaaccag

SEQ ID NO: 231319 - RNA, 77 nt, Homo sapiens
aaaacgaggagaccagcacaagccaaagggcccacaggaagacccagagagaagacagacgccacaaagagagggca

SEQ ID NO: 231320 - RNA, 82 nt, Homo sapiens
ggcagaacacagggggaggacagcccaagaacaccggacaccaggggggaaaaaccacacaggcaaagaacgcgcaaaacag

SEQ ID NO: 231321 - RNA, 79 nt, Homo sapiens
gacgggaccaacggggaaccccggaaacgggggagaaggaggaacacaaagaggaccagcgacaaaccagaccagaggc

SEQ ID NO: 231322 - RNA, 68 nt, Homo sapiens
ccgagacaagacaaaagagccacgacaacggagagaaacccacggaaacgggcaaaagccaccagccg

SEQ ID NO: 231323 - RNA, 67 nt, Homo sapiens
aaccaggcgccccaggagaaggaccgaaggaaggacaacccgggggacgccgccacgaagaagagac

SEQ ID NO: 231324 - RNA, 79 nt, Homo sapiens
ggagaagaaaagaaacgcaccgggaacgaagacacaggagcacagcaagcgggagcaggcagaccaaaggaacagaagc

SEQ ID NO: 231325 - RNA, 50 nt, Homo sapiens
gccgggcccaggcccagaaccaacgcagagcgcggaagcacagcgacaac

SEQ ID NO: 231326 - RNA, 73 nt, Homo sapiens
ggccacaagaccggacaaggccagccggggacagaggaagacaggcaccacaggaagaaccaagagagcgcga

SEQ ID NO: 231327 - RNA, 83 nt, Homo sapiens
cggcgcccagcccagcgcccggccgaaccccccgcagcagcgggccaaggaaagcggagggagccccagaggacggccacagc

SEQ ID NO: 231328 - RNA, 82 nt, Homo sapiens
agccccggagcagcccgcagggacaaggaggagcgaacaaccgccggcgcagagacacacgggcggacgcgcgacggggacg

SEQ ID NO: 231329 - RNA, 53 nt, Homo sapiens
cagagcacaagaccgaagcgagaaccagccagcagaaagaaacgagccgacaa

SEQ ID NO: 231330 - RNA, 75 nt, Homo sapiens
acacgaaaaacaagagccagaaccgaaaggggcggaggcgggaggaccacgccgccaaggagcgcgcagagggac

SEQ ID NO: 231331 - RNA, 85 nt, Homo sapiens
acaagccgcggcagccgcggaccaccgccgccagggggaccgagacccgacgagagagacgaggggaagagaggaaggaggggcg

SEQ ID NO: 231332 - RNA, 68 nt, Homo sapiens
aaacagcagaaacgcaccaggccaaagaaagagaaaagaccggagacccgaaagaggaagagcgccgc

SEQ ID NO: 231333 - RNA, 77 nt, Homo sapiens
gaagggaaggcgcgaggaggaaaggaggacgaggcacaggcgcgaacaccaaggggcagaagacacgcagccccccg

SEQ ID NO: 231334 - RNA, 38 nt, Homo sapiens
ccgggcggaccaggcccaggcaaaagcagaccggaaaa

SEQ ID NO: 231335 - RNA, 55 nt, Homo sapiens
caccagcaggacgccgccgcggccggcgcgaggcaccaaagcgaacgaagagcac

SEQ ID NO: 231336 - RNA, 61 nt, Homo sapiens
agggggccaggccaccaaacacgacaggagggcaagaccgccagcaggcgagaggcagaac

SEQ ID NO: 231337 - RNA, 87 nt, Homo sapiens
caaccaccgcccggccacaccagggggacagaccagagcaggaccaaaggcgcacagagccgaaccccaccaggggccaggcagcgc

SEQ ID NO: 231338 - RNA, 61 nt, Homo sapiens
aaggcggccagcaagcaaaaacagcaccacaccaaacgcccgggcgacacagaacgccgga

SEQ ID NO: 231339 - RNA, 51 nt, Homo sapiens
aacacaacaaaaccaagaagggacagcagccacgccgcaacaaccgcgaga

SEQ ID NO: 231340 - RNA, 37 nt, Homo sapiens
ggcggacgccccagagggaccagccccggaccaccac

SEQ ID NO: 231341 - RNA, 58 nt, Homo sapiens
agcgaccgagggacgggagcgaggaggccccagggcaggggcccggagagcgcgcccc

SEQ ID NO: 231342 - RNA, 60 nt, Homo sapiens
caggaggccagggggcgccaggaaaagggccagggacgaagccccgggcccggaccggag

SEQ ID NO: 231343 - RNA, 66 nt, Homo sapiens
gaggaaaagaggaagagggcgggaaggcagggagcacaggagaagagccccgcagccaaccagaag

SEQ ID NO: 231344 - RNA, 65 nt, Homo sapiens
agccacgagccgccaaacgcccagggggaggcggcgcaacgcggggaaagcaaccagggggcacg

SEQ ID NO: 231345 - RNA, 74 nt, Homo sapiens
aaaagacaaaccagaggccaagacacaccaagggaagaacagacacagcaccgacacgcgcaaaagcacgacag

SEQ ID NO: 231346 - RNA, 77 nt, Homo sapiens
gggccaccggcggagcggacccacaccccggaccgagggacgcggggccacaaagcccagacaagcgcagaagcaac

SEQ ID NO: 231347 - RNA, 78 nt, Homo sapiens
ccaaaagaggaagaagcgggacccgcagggcaaaggggggaagaacaaggacccgagccccaaagacagaaaagcccc

SEQ ID NO: 231348 - RNA, 80 nt, Homo sapiens
gacccacgggacagagaaacgaaaaaccgaggaaggacagacggccagccagcacaaacacccagggcaggccaggaacg

SEQ ID NO: 231349 - RNA, 57 nt, Homo sapiens
caacccaccgcgccgaaagaagaaaggcgccgcgcccggggagacagaaacgaggcg

SEQ ID NO: 231350 - RNA, 80 nt, Homo sapiens
cggggggacccaccggaggggaaagggcggagggacaagcaaggggccaaggagccaaggaggaaacccacaacagagga

SEQ ID NO: 231351 - RNA, 79 nt, Homo sapiens
acaaaaggcgaaccggggaggcggacaccgccccccaaaccgcccgggggcaaggcacaggagcagagacaagggagcg

SEQ ID NO: 231352 - RNA, 70 nt, Homo sapiens
ggacgagaaaggggcagaaaagaagagccgcaacaccagacggcaagaggaaccgccacgaacacaccca

SEQ ID NO: 231353 - RNA, 71 nt, Homo sapiens
gaaggcgagaaggaaaagggagaacagaagggaagagggggagaaaacacagaccccaccaggaccagaaa

SEQ ID NO: 231354 - RNA, 70 nt, Homo sapiens
cgcggacccgggcccaggcgcgcagggggcggacagaacacgaagccagaaaggaagaaaaacacaaacc

SEQ ID NO: 231355 - RNA, 72 nt, Homo sapiens
cgagagcggaccgagagcgcgaaacgcacgagaagcccgagaaaagcacagcacccgcaggccaacacagga

SEQ ID NO: 231356 - RNA, 78 nt, Homo sapiens
cgggcagcccgggaaacccaagcagaaaggcagccggcacccgcacaacccagggggccgaacccagaccaacaaaag

SEQ ID NO: 231357 - RNA, 78 nt, Homo sapiens
accgcggcacaagcaggccggacccacggcgcggagcgcaccaccagaaaagcagacaacgccgaacgccacccacaa

SEQ ID NO: 231358 - RNA, 82 nt, Homo sapiens
cggagcgcgcaccgcaggccggcggccgagccgcggcccgaggccagaggggggggcaccggaaccccagcagccagaccca

SEQ ID NO: 231359 - RNA, 78 nt, Homo sapiens
cgcgggcccagaccgccgggcaagcaccagagaggccaaccgcaaagagagcaaacgccgagaaggggagacagaaca

SEQ ID NO: 231360 - RNA, 84 nt, Homo sapiens
ccgccagcccagagcaggcaccgcgccgaggccccgccgcggagcgcgaggacaggggacccaggcaaagaaaccccaaagcca

SEQ ID NO: 231361 - RNA, 51 nt, Homo sapiens
cggcaggggcaaccagacgggccaagggcccgaagacaccccgccaaaagg

SEQ ID NO: 231362 - RNA, 53 nt, Homo sapiens
accggcggccaaaaaaaaaaaaggaagcacaccaaggccggggggggcacaga

SEQ ID NO: 231363 - RNA, 62 nt, Homo sapiens
gagccaaacagagaggggaagaacacggcaaaaagcaaagaaacaaaagacaaccgcccaga

SEQ ID NO: 231364 - RNA, 80 nt, Homo sapiens
gaaagagcggaaaacgggccaaagcaggaaacgcccagaagaaaaaacaccagcagcccagcaaccaaaaagaagaccgc

SEQ ID NO: 231365 - RNA, 73 nt, Homo sapiens
acaccggcaggaaccaccaggacagagagacaagcggaggacaacgcagaagccaagggggagaggggaaggc

SEQ ID NO: 231366 - RNA, 79 nt, Homo sapiens
ccaagcgccccggggggcagcccgaaccagccacaaagcaaaggcacaaaccgaagagcccggggcgggacgccacgaa

SEQ ID NO: 231367 - RNA, 85 nt, Homo sapiens
gcccgaggccggcgccggcgccggcgccgcggccccggcgcggacccgccaccggaggagcgcccgaagagcggaaagagagaag

SEQ ID NO: 231368 - RNA, 57 nt, Homo sapiens
gcggggacccacgagaagagccgcgaaacacaccagaagaccaggcaaaagaaacca

SEQ ID NO: 231369 - RNA, 55 nt, Homo sapiens
ccaggccaggagcggccacagaccccaccagcacgaagggacacgggggcagaaa

SEQ ID NO: 231370 - RNA, 78 nt, Homo sapiens
ggcggccgcggggaggaggagggggcaaccagaggggccaacggacgacagagacacaagcagcgaggaccaggaaca

SEQ ID NO: 231371 - RNA, 73 nt, Homo sapiens
cggcgccagagccggggacgaaagggaaggacaggcagagcaaacaaggcagacacggcccgggcaaacagca

SEQ ID NO: 231372 - RNA, 81 nt, Homo sapiens
cccacaccgcccagagcaggcaccgagccccaggcccgacaacccgggaaggcgccagacacagaaaagaaagagagcaac

SEQ ID NO: 231373 - RNA, 68 nt, Homo sapiens
gaggaagaggcccgcccggcacgggcggcgggcccggggacgcgcgggaggacagcgaaaaacagccg

SEQ ID NO: 231374 - RNA, 87 nt, Homo sapiens
ggggaggagcccgggcgaagaggaggcggaagccaagcgcggaaaaggaacagaagaggaaccgaaacccaagaaaaaccacccagc

SEQ ID NO: 231375 - RNA, 76 nt, Homo sapiens
agaacagcgaggggacacagaagggagcacgccaacacaacaccgaaaaaaggagcagggaaccaacccgaagaaa

SEQ ID NO: 231376 - RNA, 79 nt, Homo sapiens
gccaaacccaggccagagcacagagaggaaacgagacccagaaaggggaagcacgcaaggcacgccccaggaagcaggg

SEQ ID NO: 231377 - RNA, 72 nt, Homo sapiens
agacacgcccaaaagagaaaagcgagacggaagggcgaaggacaaaccagaaaacaacagacgaggaagaag

SEQ ID NO: 231378 - RNA, 85 nt, Homo sapiens
acaccgaccagccgcacgccgaccggcgccgggagaccgggcacgagaagagaagcccagagcaaaacaccccaaaccagaccac

SEQ ID NO: 231379 - RNA, 67 nt, Homo sapiens
agacgacggacagagagacacaggacagggacaagcgcacagcggagaaagcagcgcggccaggagg

SEQ ID NO: 231380 - RNA, 57 nt, Homo sapiens
ggaagaggagagccagaagccaagaagacaggaccccaaacagaacgcggcagagaa

SEQ ID NO: 231381 - RNA, 62 nt, Homo sapiens
aagaccgcacgacaggcacagacacaagcgggacggaagaggcccggcgaccggacagaaac

SEQ ID NO: 231382 - RNA, 39 nt, Homo sapiens
cccacaccaggccccgaaggcagagccggaagaagagga

SEQ ID NO: 231383 - RNA, 58 nt, Homo sapiens
cccgccccacccggcacccccaccggaggacacaagccagcccaccccaagccccagg

SEQ ID NO: 231384 - RNA, 78 nt, Homo sapiens
agaggaacaaagacggagagcccagagacacagacacaagcagcgaggaccaggaacaacagagacaagaacaagcag

SEQ ID NO: 231385 - RNA, 78 nt, Homo sapiens
cgaaggccgggggccagccaggccgacacccaaccgggcaggcgagacgcagagggagagcgcaaccaacccacgacc

SEQ ID NO: 231386 - RNA, 84 nt, Homo sapiens
aaccacaaggaggaaaggacagaaacagaccagggaggagaaagaaaacgagcacccaaccggaggaaggaagaggaagaagag

SEQ ID NO: 231387 - RNA, 70 nt, Homo sapiens
ggcacacaccaacggaaccgcgggagcgacggaggccacaccggaggaaaggaaaggacccggaagccca

SEQ ID NO: 231388 - RNA, 59 nt, Homo sapiens
ggcgaggccccagaccacacggccccaggggcgccacagccgaggcagcccggggggcc

SEQ ID NO: 231389 - RNA, 78 nt, Homo sapiens
agaaaccagaaaaacagaaagcagcgcacaaaacagcgaacaaggcggaggccgagaccccacagcgagcagagcccc

SEQ ID NO: 231390 - RNA, 75 nt, Homo sapiens
gcgaaggcagggcggagacggggcccggcaccaaaacaggagacagccggacagaggccccggaggaagcacacc

SEQ ID NO: 231391 - RNA, 65 nt, Homo sapiens
gaaacgcgcaggcagcagcagcacagccgcccccgccagagacacagaggccagcacccacgccg

SEQ ID NO: 231392 - RNA, 101 nt, Homo sapiens
gcgcccgggccgcgaggacgaggcggcgccgccgggcgggagggacgaacagcggggacgccccagcagaccgcccaggagaggaaagcaggaggaaagac

SEQ ID NO: 231393 - RNA, 51 nt, Homo sapiens
gcgaaacggaaagcaagcaagcccaagccacagaccaaaaagagaaaggga

SEQ ID NO: 231394 - RNA, 40 nt, Homo sapiens
cagcccgacagccgcaaaacgacaggaagcaggcggggag

SEQ ID NO: 231395 - RNA, 86 nt, Homo sapiens
cgccccggcgcaccgacggaccgggaaggagcacccaggaccaccagaacggacagcccagagcaagcacacggaggcccgggagc

SEQ ID NO: 231396 - RNA, 74 nt, Homo sapiens
cccaagaaaagaacggcgagaagaagcggaaccacaaaaccaaacaggccagaagcgaccggaggggcagcgga

SEQ ID NO: 231397 - RNA, 64 nt, Homo sapiens
cggcacgccggcccgcagggggcagaaacgggacgggagcgccacggggggaagagagggcgag

SEQ ID NO: 231398 - RNA, 37 nt, Homo sapiens
cgcccccggccgagcgacgccaaaggagagaccaacc

SEQ ID NO: 231399 - RNA, 36 nt, Homo sapiens
acacgccggcggccaaggggccaccgagacaaacac

SEQ ID NO: 231400 - RNA, 77 nt, Homo sapiens
gagccgccgagacaggcaacgggcaacgaggccgccaagcagggagacggcaagaaaagcacacaccgcgccaaggg

SEQ ID NO: 231401 - RNA, 68 nt, Homo sapiens
ggaagccaagaacagcaacgacccaaaggagaggaaggaacaagagccgccggggaggggccgcccaa

SEQ ID NO: 231402 - RNA, 81 nt, Homo sapiens
gcgggaacgggcgcaaccagcgacacaggaagaacagggcgaggacgaggcaccgaggagaaagcgcccgaaagagaacgg

SEQ ID NO: 231403 - RNA, 75 nt, Homo sapiens
ggcaccgagcgggccagaagaccagcggaaaagcgaagccgagcccaaacaaagggagcaaagaagaacgaggca

SEQ ID NO: 231404 - RNA, 52 nt, Homo sapiens
cagacgcagggcgcccccggaggaagaggagaaaggcccaaaggggcgaaaa

SEQ ID NO: 231405 - RNA, 56 nt, Homo sapiens
ccaccacggagggaaagaccaggcagacccagcaggcgaagaagcagcagcccaag

SEQ ID NO: 231406 - RNA, 83 nt, Homo sapiens
ggaggcacgggcggcccgcaggaccggaccgggggaggcggacgaaagaaagaaggagcaccaacgcaaagaaaaagaccaag

SEQ ID NO: 231407 - RNA, 82 nt, Homo sapiens
caccccagcccgggccgagccaacaggaccagcagggcgggcaggcccacacagggacgaacagcggggacgccccagcaga

SEQ ID NO: 231408 - RNA, 66 nt, Homo sapiens
gaggcgggcgggccggcgagcgcagcgcgaccgggaggcccagggggacaggagccaggccaagag

SEQ ID NO: 231409 - RNA, 66 nt, Homo sapiens
gcagaaacagagaaggaacaggcggagggcgaacgaacgcccgccagaagccccgaggggccgggc

SEQ ID NO: 231410 - RNA, 68 nt, Homo sapiens
cgaaggagacagcccagaagaacgaggggaaacccagacgacaaggaaggccaagggacccacgacca

SEQ ID NO: 231411 - RNA, 71 nt, Homo sapiens
agacgagaagagaagggagcaccaggagacgccaggaggagccaggaggagagaacaagaaaagcgcggaa

SEQ ID NO: 231412 - RNA, 69 nt, Homo sapiens
cgcgccggcccgcggaaaggccaaagcccagccccaggcacagaccccagcgagcagcaagagcaccgc

SEQ ID NO: 231413 - RNA, 73 nt, Homo sapiens
gcgcccggcaccagcacccacacccaggcccgccgcaagcggcaccaaaccgaggcaagggagaggcccgcgg

SEQ ID NO: 231414 - RNA, 54 nt, Homo sapiens
ccgccccaggcagcggccacaccaccaggagagaagaagagcccccaagcacca

SEQ ID NO: 231415 - RNA, 55 nt, Homo sapiens
ggaaggaaaagggacaagcaagagcaacaacagccaagaccaagaccccaggaga

SEQ ID NO: 231416 - RNA, 85 nt, Homo sapiens
gccgcaggggcacccccaacgagaaccgaacacacaaaaagccccggggcccgcgcaaaaccaaccggaagggaaaggcgaaggg

SEQ ID NO: 231417 - RNA, 69 nt, Homo sapiens
gagccacgaaacacaaggaaagcgacgacgggacagccggaggggaggaacagcccgagaaccaacacc

SEQ ID NO: 231418 - RNA, 71 nt, Homo sapiens
gaccgcgcccccccgccggcccaacgcaggcagacgcaaaggagcccacccaccacggaacagcaccgcac

SEQ ID NO: 231419 - RNA, 80 nt, Homo sapiens
gagcccggcgcccccgcaagaggacggcgccggcagccgcaggagagagccaaaacgacaggccagggaagaaaacaaga

SEQ ID NO: 231420 - RNA, 69 nt, Homo sapiens
ggaaagacccaggagaagccgcccaaagaacgagacaccaggcgccgagaaggccagcagagaaacagg

SEQ ID NO: 231421 - RNA, 68 nt, Homo sapiens
gccaaccaccagaagcgaagggggaagcagaacagcagacagaaaggaacagcaccaaaggcaagcac

SEQ ID NO: 231422 - RNA, 74 nt, Homo sapiens
caaagaagcagcaaccgaaaggcgagggaaaaagacggaaacagcaggaacaggaacaccacaagaaacacaga

SEQ ID NO: 231423 - RNA, 81 nt, Homo sapiens
cggccagaggccgggcggagcgcccagacgcggggagccgccggagcgagaagggaaacccaaagaacgaaggggagaacc

SEQ ID NO: 231424 - RNA, 87 nt, Homo sapiens
ccaggcccgcgggaagggcaaaccaggagaaaggggacagaagggaaccggggaaaggagaaagaggggcccggggagaaagggaag

SEQ ID NO: 231425 - RNA, 74 nt, Homo sapiens
gggcgccagccacggaagaccggcggccacaaggccgcccagccgcacgcgacgacaggaacaagcagaaagca

SEQ ID NO: 231426 - RNA, 75 nt, Homo sapiens
acacacacgccagccaggcacaaagacaggcccaaggggagagggccagcagaaggaaacaggcgccaaagggag

SEQ ID NO: 231427 - RNA, 74 nt, Homo sapiens
ccaggacggacaagcacagccggaaggcaggcccagaaaccaccacaagacaccccgagaaggagaaacaccac

SEQ ID NO: 231428 - RNA, 76 nt, Homo sapiens
ggacagcagagaaaagcggacaccaaaacccgacggcgaacgcaagcagacggaagaagacgaagaaaacccgaag

SEQ ID NO: 231429 - RNA, 61 nt, Homo sapiens
cggagcgcagcgcggccgcacagaacagccagcaaagacaagagcagaccagcagccgcag

SEQ ID NO: 231430 - RNA, 75 nt, Homo sapiens
caaaaccccagcggcagaacgcacagagggagagcagggggagaaaggcacacccaccagaagggagcgcgcggg

SEQ ID NO: 231431 - RNA, 68 nt, Homo sapiens
acgcgaaggaacggcaaagaaagcagagagcgaagacgaacaagaaccaagaccaggaaacccgaacc

SEQ ID NO: 231432 - RNA, 73 nt, Homo sapiens
aggcagcaagaggacgcgagccaaggagaccacggggggaaggaagcgagacccggcgcgagaaggaacgcgg

SEQ ID NO: 231433 - RNA, 82 nt, Homo sapiens
acaggcacagaaggccaaaaaggcaaccacagagagagagagggagggagcccggaagcaggaagaggagggcaggcacgca

SEQ ID NO: 231434 - RNA, 70 nt, Homo sapiens
gaccaagcccagagacaaccacccacggcagacaccacaaaagcagcaggagcacagaggagcagcgaaa

SEQ ID NO: 231435 - RNA, 85 nt, Homo sapiens
gacaaaaccagccagccacaacccagcggagagcgcaacaagcgaccaggacgaaaaggagaaacgaggaggaagagaaggaccg

SEQ ID NO: 231436 - RNA, 66 nt, Homo sapiens
gaacagaacagcccggaaaaaagaggcaccgagcggccagagagccagagcaccagcaaaggaaaa

SEQ ID NO: 231437 - RNA, 72 nt, Homo sapiens
gggcaagaagccagaagagaacgccagggagccgagccaccagggccaggggcagcagagaccgcagcaagg

SEQ ID NO: 231438 - RNA, 78 nt, Homo sapiens
gaacccacccccaccaaaaagggcacacacggagagaacaacgaaccccgggcgaagcagagaaagcgaaagccaaag

SEQ ID NO: 231439 - RNA, 67 nt, Homo sapiens
cacagaaagcaacaaggaaggaaacggaccccaccaccaggcagagaagcgcccccacagaggcacc

SEQ ID NO: 231440 - RNA, 80 nt, Homo sapiens
gacgcccccaagaagacgagagcaccacaaggccaaggacccagaagggcagagccggaggagagggcacggaaacaaag

SEQ ID NO: 231441 - RNA, 56 nt, Homo sapiens
aaggggggaccagacaggcggcaaaacccagacacccgagccagcgcaaaaaacag

SEQ ID NO: 231442 - RNA, 69 nt, Homo sapiens
cagaccacagccgaaacaaccaacgacaacaaggcagaagggccccccaaccgcaagcgccgcaacgag

SEQ ID NO: 231443 - RNA, 70 nt, Homo sapiens
cgacagggacgaagaaaagggggacgccgccagccaccggcgcgaagccagaccagaccagcaggggcac

SEQ ID NO: 231444 - RNA, 77 nt, Homo sapiens
gcgaagcgaacaaaaagcagcaaaccggaccaccccgaagaaagcacaggacagcggggaagaggccgagcgggcac

SEQ ID NO: 231445 - RNA, 72 nt, Homo sapiens
cacccacccccacaacccagagcaagaagaccgaaaggaacacgacgccgcagacaacaaaacacagaaccc

SEQ ID NO: 231446 - RNA, 74 nt, Homo sapiens
gacaagcagagcccagccccagaaaggggaggcaagcaggggggcaaaggaaagaaggcagaaagggaggccag

SEQ ID NO: 231447 - RNA, 85 nt, Homo sapiens
gcagaaggagacacgcccggcacccagcacaagaagacaagacacgcacccccagagcgcaagaccgggggacggggcccaccgg

SEQ ID NO: 231448 - RNA, 78 nt, Homo sapiens
gcacgagaacaggaccaccaggaaacgcgcaagacgcccaagagaagagggcaaaccgcaaaacccaaaggaccaagg

SEQ ID NO: 231449 - RNA, 80 nt, Homo sapiens
aaaacaccgggagcgaaaagacagaagaagagaaccgaccggaccgacgaaggccggcggggccggcaaccgagccacac

SEQ ID NO: 231450 - RNA, 71 nt, Homo sapiens
acgcagggcgcccccgagcgccagggaacagggacccaggaggccgaagaaaccgacccacaaaaaagcgc

SEQ ID NO: 231451 - RNA, 53 nt, Homo sapiens
gaacacagaggaaaccgcaccgcccggagagaccacccaggccccgggaccgg

SEQ ID NO: 231452 - RNA, 39 nt, Homo sapiens
accaagacggcagagagaggccacgcgcagccccggaag

SEQ ID NO: 231453 - RNA, 73 nt, Homo sapiens
aacaaggccaccaaacgagagcagccaacgggacacagagccacaaaagaggaaacaaacaggaacgacaacc

SEQ ID NO: 231454 - RNA, 77 nt, Homo sapiens
ccgacaaagaccgaaaagaagagaacaaagaagaggcgggcggagggcacaccagagggacggagcaaaagggacca

SEQ ID NO: 231455 - RNA, 78 nt, Homo sapiens
agccggcaggcgaacaggaacggagccaaccgcccaggaaggacaaaggcagcaagacaagaaacgccccgaaaagag

SEQ ID NO: 231456 - RNA, 86 nt, Homo sapiens
gccgccgccaccagcccaagagaaaggcgggccggagaaggggcgacgcgggcaccccccgaaggacaaccccgcaacggcagggg

SEQ ID NO: 231457 - RNA, 76 nt, Homo sapiens
ccaagacggcgaccacaggaaggacacaggcagagaaacggagcgggagacaaagcacaagagaaaagcggggagc

SEQ ID NO: 231458 - RNA, 70 nt, Homo sapiens
cggggccacaccaaaaaaccggacccaagaaaagaggaggaggagagggaaccagagcgccgggaagcgg

SEQ ID NO: 231459 - RNA, 70 nt, Homo sapiens
aaacgccccacgaccagaacaacgcaaacgcccacacagcaagcacgggcagaagaaggaacggaaaaag

SEQ ID NO: 231460 - RNA, 79 nt, Homo sapiens
ggccacagcaagaagcggagacagaggccaagaagggacccagacacgacccggagaaaaagccagaccagcgccacaa

SEQ ID NO: 231461 - RNA, 68 nt, Homo sapiens
aagcagggcaagagagcagaacacaagccaacaaaagacagcaggaacgaggaagagaggaggaagag

SEQ ID NO: 231462 - RNA, 58 nt, Homo sapiens
gcccaagaggccgaccgagacgggcggagaggagaagagaacacgcacgcgggaagca

SEQ ID NO: 231463 - RNA, 84 nt, Homo sapiens
aacccccggggacccacccgagaacacaccaaagcccgcccccaaagaaccgccccgaggccaagcagaaacggcgccaagccc

SEQ ID NO: 231464 - RNA, 88 nt, Homo sapiens
gaagaggggcccccgccccgcgggcccacgaggagcacagcaagcgggagcaggcagaccaaaggaacagaagccagggccggaaaac

SEQ ID NO: 231465 - RNA, 79 nt, Homo sapiens
cgagcggagaacgccacagccgcgcaaagagccaagggaggggagaaccgaggcaacaggccacccagaggccgcccag

SEQ ID NO: 231466 - RNA, 63 nt, Homo sapiens
gcagcgcggacacccagccccagcaaaagggagaccacaacagccaccaaacagaagaaccgc

SEQ ID NO: 231467 - RNA, 83 nt, Homo sapiens
gcgcggggcggcgcgggcggaggcggcggagcgcgagagccgagcggaccagcaagaggagccaggagcacggggggaacaag

SEQ ID NO: 231468 - RNA, 81 nt, Homo sapiens
aaacaggagcgaagcccagcgggccggacggggcggggggaacgaaaaggacccaagggggcaaaggcggaaacagcagag

SEQ ID NO: 231469 - RNA, 114 nt, Homo sapiens
gccacgagcccgaaacgggccgaaagaccgccgcccagccccaaagagcgagacacagaaaagaaggggacaaagagagagaggagaagagaaacggagcccacaggggagcag

SEQ ID NO: 231470 - RNA, 72 nt, Homo sapiens
acgagcacccaaggacagacacgggacaaagcagaccgaaacagaagaggcaggcagaagaacccagaaaag

SEQ ID NO: 231471 - RNA, 81 nt, Homo sapiens
gcgaggagcgcacggacaagcgcagggaccgagaaccaaggaaagagaggcgacgagcgacagaagaaaaagagagggaga

SEQ ID NO: 231472 - RNA, 72 nt, Homo sapiens
gccccagacagaagcgacacaaaccagaaccaaaacgccagccaggaacaagcgcgagaaggaacaaaccag

SEQ ID NO: 231473 - RNA, 80 nt, Homo sapiens
aacaaggaggccgacccgaacgccacaaggaaaaggacgccagaaagcagcgagggacccagcgagaagaaagagaagaa

SEQ ID NO: 231474 - RNA, 71 nt, Homo sapiens
caccaccaggagcagaagaacggcgccacaaacagcgaacccacccaacacggcaaaacaaagacaccaca

SEQ ID NO: 231475 - RNA, 76 nt, Homo sapiens
gaggcaggcccaacagaagaaaggcaggagcagccggagaaaacacggagaagagagggcgcccaccacggggaag

SEQ ID NO: 231476 - RNA, 81 nt, Homo sapiens
acccgagcgcccccagcacgagcgccccagcccgaagcggaggacccggcccagccgggcaggccgacccccaccagccga

SEQ ID NO: 231477 - RNA, 80 nt, Homo sapiens
ccgaggcaagcggagaaaagaagacccgggggagagaagcagaagaagaaggagaaggagagaaggaagcgaggcgaaga

SEQ ID NO: 231478 - RNA, 79 nt, Homo sapiens
gaagacaagaaaaggagcagagcccgaggagacgcgggcgggaggccacgaccgaggagcgaagcgagaggagaagcgg

SEQ ID NO: 231479 - RNA, 75 nt, Homo sapiens
ccaggcaggaagagcggccagaggccagcaggccacgcaagggcagacagagcgaccgcccaacaccggaacgac

SEQ ID NO: 231480 - RNA, 74 nt, Homo sapiens
cgaaaggagaaggaacaaaagaacaagcaggccgaaggaaacacaacagacggaacacgcgaacacgcaaaagg

SEQ ID NO: 231481 - RNA, 74 nt, Homo sapiens
ggggacgaggcaaaaagcacagaagagagaccgggagaccagacaaaaccccggagcagggcagaggagagccg

SEQ ID NO: 231482 - RNA, 51 nt, Homo sapiens
ggcgagaagcggcaagggaaggaaccacagcgaggcccagagaagaaaggg

SEQ ID NO: 231483 - RNA, 71 nt, Homo sapiens
gaagaaggaggaacagggccagcagggagagacagagacgagaagcaaagacaccgaaaacgagaaacgaa

SEQ ID NO: 231484 - RNA, 66 nt, Homo sapiens
accagcgacaaacaggaaagagaaaaaccggaagggaaacccgcgacaccgcgagggacaaagacc

SEQ ID NO: 231485 - RNA, 64 nt, Homo sapiens
gaaagggacgcaaggaacaaaaggaaacccaccaagggacaggagacaaggcaaccgcgcccag

SEQ ID NO: 231486 - RNA, 74 nt, Homo sapiens
gcagggcgcccccggaagccaggagggaagcccagaagacgcacaagagagaccgaccaaaccccggaacgcca

SEQ ID NO: 231487 - RNA, 70 nt, Homo sapiens
gacggccagcgcccaaggaggagcagaaaagcgaggcaagggcggcaggggggggcgcaaaccgaaccaa

SEQ ID NO: 231488 - RNA, 84 nt, Homo sapiens
gcgccgacccagacaggaagccacaacccggagcagggaggaaacggcaggcaggaggggagcaagacccgcaccggaggagag

SEQ ID NO: 231489 - RNA, 71 nt, Homo sapiens
cgaacagagcacggaaaacccagaaggcaccggaaggagacgaccagaaaaccccaaagagagggaccaag

SEQ ID NO: 231490 - RNA, 78 nt, Homo sapiens
caggcccggagaagccgcggcggcagcacgacagcgccggcaacacgcggcacaagacagccaaggacaggaacgcgg

SEQ ID NO: 231491 - RNA, 84 nt, Homo sapiens
gaaccgaaaaggaaggcggagagaagaagaacaggaagcagagcgggaccggaagaccccgcccaccccccacccggaagcacc

SEQ ID NO: 231492 - RNA, 74 nt, Homo sapiens
gaccaaaacagggacagggcgaagcacagaaccagcacggggccggacaagggagggcaagaacccaggaggag

SEQ ID NO: 231493 - RNA, 77 nt, Homo sapiens
cccgcccgacacaccggcacgaaaaacccgcagggcaggaggcagcagagaaagccacagaacacgcggcccagcaa

SEQ ID NO: 231494 - RNA, 132 nt, Homo sapiens
cgaagaaggcccgcccccaagcccggagcccggcgcccccgcaagaggacggcgccggcagccgaaaagcgaaccagacggacgacaagaggagaggaggagccgccgagaaagaaccgagccagagcccag

SEQ ID NO: 231495 - RNA, 78 nt, Homo sapiens
ccaagacgccggacggcagaccagcgccaggaacacccacaaaagcagaagcagaaacgcagagcccccgcagccccc

SEQ ID NO: 231496 - RNA, 81 nt, Homo sapiens
agacgcggggccgaagggccccgcgcggggcccgaggcagaaggcaccacacgggccgacccgggaccccagcggaggcag

SEQ ID NO: 231497 - RNA, 76 nt, Homo sapiens
cggcagcgaggcggcgccgcaggagcccccgccccgacaaagaagacaccaggagccacagcccggaggcccaccc

SEQ ID NO: 231498 - RNA, 84 nt, Homo sapiens
ggaaggaccgagaccaggaggaagacggcgaaggcccaggggaggacgcgagcggaagagaagcaaaaagacaaggaggaaagc

SEQ ID NO: 231499 - RNA, 80 nt, Homo sapiens
cgcggagcggaagacggcaacccagaaaaccaagccaggagggaacgcaacacaacccgcacacgccaccccaaggcccg

SEQ ID NO: 231500 - RNA, 91 nt, Homo sapiens
cagcgccggcccccaggcgaagaagcgcagccgcaccggccaagggaccccggaggaaaagcggaagcggcagcggcgaacgccggaacgg

SEQ ID NO: 231501 - RNA, 72 nt, Homo sapiens
gaaacagaagaaggcaggaacagaaggaaaccagcccagggaaacccaaagaacgaaggggagaacccccgc

SEQ ID NO: 231502 - RNA, 74 nt, Homo sapiens
cgcgaaaaggaacccacaaacaccacacaagaggaccagcaaccacagaagaagagccaaagcccaggacgggg

SEQ ID NO: 231503 - RNA, 78 nt, Homo sapiens
gaaagaggagacaaaccccagacgcgccggagggccaggggccaccacagagcccgcagggacacagcagaacaagca

SEQ ID NO: 231504 - RNA, 72 nt, Homo sapiens
gaggaagaggccagacaggacaagaccggaagagcacaacgaaaacgccgggagccaaagccaacacaagga

SEQ ID NO: 231505 - RNA, 85 nt, Homo sapiens
acaaaggggaagaccagagcagaagacagacaaaaaccaagaaacaagggaggggggaagacagggcccagcaccacaggacggg

SEQ ID NO: 231506 - RNA, 62 nt, Homo sapiens
cgcggccaaggagccgccaaagccagacgccaggcgggcaccacggcaggggcgagcacccc

SEQ ID NO: 231507 - RNA, 76 nt, Homo sapiens
agcgggccgagcccggccgccagaccacagcacagccgggaaggggagccaccagccccccgagacaggggccagg

SEQ ID NO: 231508 - RNA, 70 nt, Homo sapiens
ggcgagcagaacacggcgagcggacaggaagggaaggggcggagacgggcggaacgcaggaggccagagg

SEQ ID NO: 231509 - RNA, 63 nt, Homo sapiens
gagccccgcgcagccgccggcgcgccgccaggaccagggcggagaacggaaaagcaccaggaa

SEQ ID NO: 231510 - RNA, 41 nt, Homo sapiens
ggcaagcgagcccggggagagagaaaaggcggggccagcgc

SEQ ID NO: 231511 - RNA, 76 nt, Homo sapiens
ggggggccggcgcagacggccaaaggacgggacaaaggcagggaccaaccagcaggcagccggaaaccacgaaaac

SEQ ID NO: 231512 - RNA, 82 nt, Homo sapiens
gacaggggcgaaggcagaggagaaaacgcagcacagcccgaccagagcccaccccagagcggaggcgaccccaaaccacccg

SEQ ID NO: 231513 - RNA, 73 nt, Homo sapiens
acgcagggcgcccccgcccgccgggacccaccaagggcccccacgacgcaggcggacgagaccacaccggagc

SEQ ID NO: 231514 - RNA, 57 nt, Homo sapiens
cccggaggaccgccccgcagaccggaccaaaccagagacaaaaggcacagccagaac

SEQ ID NO: 231515 - RNA, 34 nt, Homo sapiens
cagcccgagaccgcagcagggacggagcaaaacc

SEQ ID NO: 231516 - RNA, 83 nt, Homo sapiens
gaaggggagcgggagggccgggcaacccgaccgaaccaaacggcagaggggcgggcaaaggagaggcacaggaagcagaggca

SEQ ID NO: 231517 - RNA, 72 nt, Homo sapiens
gacaccagaacggacggacaacagaccccgaggacaacacccacaccaggccccgagccaagaaccgccggc

SEQ ID NO: 231518 - RNA, 62 nt, Homo sapiens
cgagacgacaccacaaaggaaaccccccaggcaagaggcgcaggaccgggaagaccaacaaa

SEQ ID NO: 231519 - RNA, 86 nt, Homo sapiens
aaggaggcagaggcacagcgcagggaccaagggagacagcaaaaagcaaaaagaagaaaaaagaaaaccagcaaaaaaagagcagc

SEQ ID NO: 231520 - RNA, 61 nt, Homo sapiens
acaccgagcccagaagacaagacagggagcaacaaagcaaggacggggacacaagaccagc

SEQ ID NO: 231521 - RNA, 77 nt, Homo sapiens
cgacaaggcaaagaaccgaagacgacccaaaagggaccaggagaccggaaacgagagaaacgaagacgaagaaacag

SEQ ID NO: 231522 - RNA, 79 nt, Homo sapiens
agcggcgaacccacacacacgaaacccaggcgcggcagcgggcagccagacagggcgggaagaagaacaacagccgagg

SEQ ID NO: 231523 - RNA, 76 nt, Homo sapiens
aaacccacacacagacgccaagacgagaaggggaaggaacgagcaagaaaagcagcgagggaaagcggcaacaggg

SEQ ID NO: 231524 - RNA, 75 nt, Homo sapiens
acccgcccagcagaagaagagaggagggagaacacagaaaccggccccagggcgacaggacaacggacagcaaaa

SEQ ID NO: 231525 - RNA, 73 nt, Homo sapiens
gcagacccggcaccaaccggagcagcagcgggagggcaacagacagggagagcacgacaaaacacgggccccg

SEQ ID NO: 231526 - RNA, 82 nt, Homo sapiens
gccaaggggagcagaaggaccggacacagcggaaagcagaaacacaaaagaagcaggggaggggcgcgaccaaaccgagagc

SEQ ID NO: 231527 - RNA, 85 nt, Homo sapiens
gagcgcgaggaaaaggcggcgggaggaggaaaacccaccaccacgacgggggcagccaccccccggaaacaccgggccacccgcc

SEQ ID NO: 231528 - RNA, 74 nt, Homo sapiens
aaggaggcgaaagcagggaaccaaggaagaaggaaagggaagaccaacaacaaacggaaggagcacacagacaa

SEQ ID NO: 231529 - RNA, 84 nt, Homo sapiens
gagcgaggcggggccgccggggccgccaggagcccgaccgggagaggacaagaccacgagccagggcccgagagcacaacaagg

SEQ ID NO: 231530 - RNA, 75 nt, Homo sapiens
cggcaaagccacccaggaaggcagacagaagagcccggaacgccagagcggaaaggaagagaacgccggaagcgc

SEQ ID NO: 231531 - RNA, 75 nt, Homo sapiens
gcaccggaagacgcccggggaggagcaggacgcagaaccaccaaaagccaagaaacggaaccagacgccgcaggc

SEQ ID NO: 231532 - RNA, 76 nt, Homo sapiens
gaacaaagagagcaacggggcaagaaacaccgaccaaaacggcagccccaggagcgacagcaggacccagggccgc

SEQ ID NO: 231533 - RNA, 81 nt, Homo sapiens
cgaggaaaaagaagcgaggaacagcaggacggaaggaaacagcaaaggcgccacgcagagccccgccaggaagacacgccg

SEQ ID NO: 231534 - RNA, 82 nt, Homo sapiens
ggccggggccaggccagcccagccggcacgccccccggcccagggaccccgcgcagagggcgaccagacgaggggagacgga

SEQ ID NO: 231535 - RNA, 75 nt, Homo sapiens
acccgaaagcggcgagagcgaagacccaacccaagagccacgggaagaagggcgacggcgaggggacccccgagc

SEQ ID NO: 231536 - RNA, 59 nt, Homo sapiens
gcgccgcggcgcccgagcggcgggccgcagaggcaagccacagccaggaaacaccagcc

SEQ ID NO: 231537 - RNA, 71 nt, Homo sapiens
gccagaggagagagagagacaacaggggaggcaccgcgggccacagcaccacaacgggaaagaagagcgca

SEQ ID NO: 231538 - RNA, 74 nt, Homo sapiens
gcgcagcgaggaagaaccgccggggacgaaacaaaaagaccggaagcgagacccagagcaccaaacagggggga

SEQ ID NO: 231539 - RNA, 76 nt, Homo sapiens
aaaagcccggaaacacacacaaggggaagaaggaggccggggaggaagagagcaggggggcgccaggcacccgaga

SEQ ID NO: 231540 - RNA, 71 nt, Homo sapiens
gcccagcaacacaggagcaaaccacacggagacgagggggcccagacgccaccgagagacccgcaaggagc

SEQ ID NO: 231541 - RNA, 59 nt, Homo sapiens
gcggaaggcagcgcccagcagcgcaggcaccccccagaggaagcacagggcccacgccc

SEQ ID NO: 231542 - RNA, 71 nt, Homo sapiens
cgccaccaccccgcagccccgaacccagcagaagccagccgccacgccgagccagccagcaccaaccaacg

SEQ ID NO: 231543 - RNA, 76 nt, Homo sapiens
caaaggaagcgcgaacagcagcgcagcccgggcgcgccaggcacagccaagagcggaccggcagcggccagcgcag

SEQ ID NO: 231544 - RNA, 60 nt, Homo sapiens
cacccagacgcaggaccaccagacaaagacccgcaccgagaacacagccaagaagaaaag

SEQ ID NO: 231545 - RNA, 40 nt, Homo sapiens
cagcaaccccagccaagcaagaaaccgaaaagaagcagag

SEQ ID NO: 231546 - RNA, 66 nt, Homo sapiens
aacaaccggacacagagagggccccaaaacagacagcccagcggaaaccgggagaagcgagaggac

SEQ ID NO: 231547 - RNA, 77 nt, Homo sapiens
accaccccgacacaacaccaccagccaaacccaaaggaaagaaaaccaaagaagaaaaaaccgcagagaccgcgaac

SEQ ID NO: 231548 - RNA, 74 nt, Homo sapiens
aaagcaaaacgacaccagggacgcagaccccacaacggaccagcagccaccgaggaggcgcggaggaggaggag

SEQ ID NO: 231549 - RNA, 66 nt, Homo sapiens
cagcagaggcgggccccgcgacccgagacacgacgaagcaccaccgccagggagaaaacccacaca

SEQ ID NO: 231550 - RNA, 72 nt, Homo sapiens
ggggaaacaggcgaggcggcggcgcccggagggcagcgaggagcggaaaacacggaaaggggccggcagacg

SEQ ID NO: 231551 - RNA, 73 nt, Homo sapiens
cacggacagcacaaaccgccacacaaaagcggacaagcgaaggcggggccggggagcccgggccagacccccc

SEQ ID NO: 231552 - RNA, 85 nt, Homo sapiens
cccgagaaccgcaggagccagagcgcagacccaggggagcccaccagccagcaacaggcccggaagacagccaagcggcagagac

SEQ ID NO: 231553 - RNA, 82 nt, Homo sapiens
gagggggcgaggagagccggagcggggacccaggagccggccagcgcgccggagccgccgagggacaaaaagccacacagag

SEQ ID NO: 231554 - RNA, 77 nt, Homo sapiens
cggggaacacagacggaagaacaggcacagggcgcacacgggaggagcaggcagaggcgccccgacgagagacaaga

SEQ ID NO: 231555 - RNA, 51 nt, Homo sapiens
ggggaacaaagagggagcacacggccagagacaagggcagagccaagcgcc

SEQ ID NO: 231556 - RNA, 79 nt, Homo sapiens
agcgaccaggagccggggcggcgcaggaggagccgaggcgagccaacagcacggaaccagaccgggacagagcccgcac

SEQ ID NO: 231557 - RNA, 78 nt, Homo sapiens
gaagaggccggaacgacggacagccaggcaagaaaccaagagaaaagcaggaaacgaggcgacacaccaaagaaaaaa

SEQ ID NO: 231558 - RNA, 70 nt, Homo sapiens
ggaaagagccccgaagacaaggacagccccggcaggcacagaacgaaccaaaaaggaaaggacccacaaa

SEQ ID NO: 231559 - RNA, 80 nt, Homo sapiens
ccgcaccccaaccccaggaagccagcgggggcagccagccgagggccaccgggaaggacagaagccggaaacgaaacagc

SEQ ID NO: 231560 - RNA, 71 nt, Homo sapiens
aggggccgaagcaaggcacgacaaaagacgggaaggcaggggaacccgggcagacacccacaagcaagaga

SEQ ID NO: 231561 - RNA, 80 nt, Homo sapiens
cacagagaacccagacaacaggacgccgccaaggaaagaaacacgaccaaaagaacaaccagagaaacgaggaagagagc

SEQ ID NO: 231562 - RNA, 78 nt, Homo sapiens
cggggcgaaggcgcagccgcgaagccgagaggaaagagggcaccgggagaagacaaaggccccagagccaggcaagac

SEQ ID NO: 231563 - RNA, 41 nt, Homo sapiens
cacaggcccgcccggacaccgagaggcggggcaccaggccc

SEQ ID NO: 231564 - RNA, 66 nt, Homo sapiens
acggaaaagcagaggagaacacagaccgcgagaaaccgaaaggaacagcacccgcgagaaccagcc

SEQ ID NO: 231565 - RNA, 82 nt, Homo sapiens
ggaaaccaggcaccggggggcaacacccgagaacggcgggaagagaagacacgagcacaaacggcggggcaaggcggaccag

SEQ ID NO: 231566 - RNA, 77 nt, Homo sapiens
cgagcagcgaacgaggaagcagcgaacgagaaccaaggcggacgcggcgagaagggcacacaaaggaacagaaaaca

SEQ ID NO: 231567 - RNA, 54 nt, Homo sapiens
cggaggacacggggaaccaacagaagaagaacaccagaagaaaagaacacgcag

SEQ ID NO: 231568 - RNA, 82 nt, Homo sapiens
ccgccacagggccaacgccgccccagagcggcgccgagagacggcgacgaccaggacgaggggcccggccccgggcgcggcc

SEQ ID NO: 231569 - RNA, 54 nt, Homo sapiens
aacgacacacgaaccagcggaggaggcacagacaggcgagcggggacggcagag

SEQ ID NO: 231570 - RNA, 70 nt, Homo sapiens
gaccaagcgagcaggaaaagagccaaagcacaggagggaagacagaagcaccgcgaaaacgcgaaacgca

SEQ ID NO: 231571 - RNA, 75 nt, Homo sapiens
gcaccaagaggaagcaagacaaggaacgaccggagaccgggcccaaacaacaagaagagcccccagagccgaggg

SEQ ID NO: 231572 - RNA, 77 nt, Homo sapiens
ccgggagacgcccgcgccgccgggacccggcaaagagagaggcacacgccgccgaaggccaggagcagaggccaacg

SEQ ID NO: 231573 - RNA, 68 nt, Homo sapiens
agaacaagcagggcacaacggcaaggacaaaacgcacaagcaccagccgacacgccaagcagaagaag

SEQ ID NO: 231574 - RNA, 59 nt, Homo sapiens
ccaaggggacaaaccaacagaagggcaaccagggcgggaaaccagaccgcaagggcaga

SEQ ID NO: 231575 - RNA, 67 nt, Homo sapiens
gaccgcccccagccgacaggagcacccacgggagaccggggggcaagaaaaggaagaagaagcacac

SEQ ID NO: 231576 - RNA, 43 nt, Homo sapiens
gggagccggcgcccacagcagaggcagcggcggcccagccgaa

SEQ ID NO: 231577 - RNA, 50 nt, Homo sapiens
cgacacgagccaagaaaaggcagcgagggaacagccagaccaaggggaaa

SEQ ID NO: 231578 - RNA, 57 nt, Homo sapiens
caccagcagcccccagagcggaacacagaacaagaacccggagcgaaagccgggcgg

SEQ ID NO: 231579 - RNA, 99 nt, Homo sapiens
caagccgagacgacaaggccacaaccgcagggaccacagcaccgaaaacaccaggaaagacaggagaccaaaaaggagagaccggaagaagggaaggaa

SEQ ID NO: 231580 - RNA, 83 nt, Homo sapiens
gcacccgcggccggcccggggccccgggaccggcgcccccccggccagccgagaggaagaggcaagcgaggagcacccaaccc

SEQ ID NO: 231581 - RNA, 86 nt, Homo sapiens
cggacgcagaagacaagaaagaggaccacacaagaacgaggagacagcagcaagaggcagaaacggggacacaagcgaaaggcaac

SEQ ID NO: 231582 - RNA, 78 nt, Homo sapiens
cacgggccgcgccgggcacagccggaaagcaggaccgcgacggcagcagagcacaccccagagccgagacacacggaa

SEQ ID NO: 231583 - RNA, 42 nt, Homo sapiens
gcagaacccccagaccacaggcacacaggcccgagcacaaac

SEQ ID NO: 231584 - RNA, 81 nt, Homo sapiens
ggccaccccccagggagccgaagccaagggacggccaccccaggccccccccgagcccacacaaagcgaggggaagcggca

SEQ ID NO: 231585 - RNA, 77 nt, Homo sapiens
aaagaaaggacagagagaaccagcagcaaagcaaccagggcggcacccaagacaaagcaaccgaccccacaaagaag

SEQ ID NO: 231586 - RNA, 90 nt, Homo sapiens
ggcggcacagagaagagcccagagaagagcggaagcaagagaggggaggaggagcaagagacacccgaagaaaagggaagcgagaaggag

SEQ ID NO: 231587 - RNA, 84 nt, Homo sapiens
cggagcagacgggggccaagaaccccaagcgagcgcgcaggcgccaagccagaagcccaaggagcagcagcggagcggccgccc

SEQ ID NO: 231588 - RNA, 79 nt, Homo sapiens
accaccaaaagaacagaggaccagaggcacacggaaaagcagacaacaggcacaaagagagaaggaacacccacagggc

SEQ ID NO: 231589 - RNA, 79 nt, Homo sapiens
agcaaaaagccagagaagccgccgaagaccacaagggcagaagacagcaggagcccagccccaagcagcacaagacccc

SEQ ID NO: 231590 - RNA, 77 nt, Homo sapiens
caaagaagggagagagcgcgaagccaggggcaaaacggggaaccgggaggacccaccccccaggacccgaaggcggg

SEQ ID NO: 231591 - RNA, 74 nt, Homo sapiens
caagaagaggaggaagccagcgagggcaaaaacagcaaaagaaaagaaaaaacaagaaggagcgacaaaaagag

SEQ ID NO: 231592 - RNA, 75 nt, Homo sapiens
cggcaaaaccacagacccacccgcaccagacgagaagacaggagaccggaaagaagggagaccgcggggaaaaga

SEQ ID NO: 231593 - RNA, 70 nt, Homo sapiens
cagacggacaagagcgcggaacaggacgccccgaggagagccgcccagagaaagcacaaggacaacagga

SEQ ID NO: 231594 - RNA, 70 nt, Homo sapiens
gcccgcgcggacgcaaaccgagccccgcgccgcagggggggaccagaccaggccaggagaagcccccgca

SEQ ID NO: 231595 - RNA, 75 nt, Homo sapiens
caccaaggagcgcagcagcacgaaagcaggacagcccagcgagaccgaggaagacccagagggacggaaccccag

SEQ ID NO: 231596 - RNA, 87 nt, Homo sapiens
gcgaccacccggggccgcggaccgcacgcagcagcacacacgagcgcgaccccaagaggcgaggggacggcggggagcgcaggacag

SEQ ID NO: 231597 - RNA, 79 nt, Homo sapiens
gccggcccagccgcccgggcagggagaagaaaggggaccggggacacacccacgaacacaaagggcccggacggagccc

SEQ ID NO: 231598 - RNA, 92 nt, Homo sapiens
agacgagccgggaggaacggcccggaaacaggaggacgcccagggccccggccaggcccagccccgcgggagacccggccagcaccacggac

SEQ ID NO: 231599 - RNA, 79 nt, Homo sapiens
accggggacacagcagaaaggagaagaagaaggcaggcccaggagcagggcaaaacaaccgaaccccgcacagaacagc

SEQ ID NO: 231600 - RNA, 70 nt, Homo sapiens
gcaacccagcgagagaaaggccgcaacgggcccaagaagcaacaggcggagccgggcagaaagacaaagg

SEQ ID NO: 231601 - RNA, 77 nt, Homo sapiens
gcagaccgcagaaggccggagacaccagcagacgaagggaacgcacgggaaagcgcgcaaaagacgcacacgggccg

SEQ ID NO: 231602 - RNA, 80 nt, Homo sapiens
aagcaaaaagcgggaaggaaagaagaacaacagacgagaagagaagggagcaccaggagacgccagaaagccagaagcca

SEQ ID NO: 231603 - RNA, 76 nt, Homo sapiens
aagcagacgagaggccaagcaggccaggagagggggcccccccgccaccaagaagcagggagccagccaagacacg

SEQ ID NO: 231604 - RNA, 83 nt, Homo sapiens
ggaccagcagcgccgagggaaacccggagaccaaaccgagccaagaaagggagggggaaacagccaaggccgaggagagaaga

SEQ ID NO: 231605 - RNA, 71 nt, Homo sapiens
aaaaccgagccacacgaagggagaaggggagaacagaaccggagaggacccacgaacccgcaccaaagcag

SEQ ID NO: 231606 - RNA, 75 nt, Homo sapiens
ccagcccgccaggggggaaagaccacgagaggacacaaaccaccgagcccccggaagcacagccccacgccacac

SEQ ID NO: 231607 - RNA, 77 nt, Homo sapiens
cggagggcggagagacccgggggcgagcacaaacggggcggggccggggaacacacaggggaaccagaagaggccaa

SEQ ID NO: 231608 - RNA, 44 nt, Homo sapiens
caccaagcacaaaaaggacagaccgcgcgaaacgcccagaaacc

SEQ ID NO: 231609 - RNA, 111 nt, Homo sapiens
caaggcaagaccgaacagaaggaacgacgcggaccagaagccagagcgaggacgccggcagcagcaggcgagaggcagaacccggaaagaaggaagggaccaccacaaggc

SEQ ID NO: 231610 - RNA, 77 nt, Homo sapiens
aacaccaaccgccacccgcggggagacacggcaaagggccaccaggcgcacacccagaacggagggaccaaagcagc

SEQ ID NO: 231611 - RNA, 73 nt, Homo sapiens
gaaaccggaacccagcagaagcagggacagggcagaccgccagcagcacagcaagccacagagagggccggca

SEQ ID NO: 231612 - RNA, 84 nt, Homo sapiens
agagaggcaccgggacggaccgagaccggaccgagagcggaccgagagcgcgaaacgcacgagaaggacgggggaggagagcaa

SEQ ID NO: 231613 - RNA, 48 nt, Homo sapiens
agaccggacagcgcagcaaagcgcagcgcgcaaacacaacagaggaga

SEQ ID NO: 231614 - RNA, 68 nt, Homo sapiens
cagcaagaaagcagaagagcgccagcacacacaagcaaacagaccggccccccaaacacccgagccca

SEQ ID NO: 231615 - RNA, 78 nt, Homo sapiens
ccacccaacacagcagccagcaccagagagacggagggccgccgagcaagacaccgagacaggaagcggaacccagac

SEQ ID NO: 231616 - RNA, 71 nt, Homo sapiens
ccagaccgaccaccaaaaacacggccgagacgccacaagccccaagaaccgcaaagccacgggaaagagcg

SEQ ID NO: 231617 - RNA, 79 nt, Homo sapiens
gcggagaagaagcgcggccgcaccggccaaggaggccaggccagagggaccaacgaaggcaaacaccacacgcagaggg

SEQ ID NO: 231618 - RNA, 74 nt, Homo sapiens
cacgcagccagacccaacggacacgcagagaggagacacacagccccagacgggaggaaaaaaggaaggaccgc

SEQ ID NO: 231619 - RNA, 50 nt, Homo sapiens
cgcagggcgcccccgagaggaagacccaggccccagcacaagacaacaaa

SEQ ID NO: 231620 - RNA, 77 nt, Homo sapiens
ggaccccgccgcggcgggaggggcgcgccagagcaaaaggcacacacagagcgaaaaggaggaaaaagcaaagcaag

SEQ ID NO: 231621 - RNA, 112 nt, Homo sapiens
caacacaccgacgcaggaagccaccgagacggcgaccgggcgccgagacaccagagccacaaggcccacagagccaagccaaagagacaccaacagaagggaagccgcagac

SEQ ID NO: 231622 - RNA, 80 nt, Homo sapiens
gagcgaagccaccccggcaaaggagcgagccggagcgccagcccaccggacacgagacggagggaggaaagggggacggc

SEQ ID NO: 231623 - RNA, 66 nt, Homo sapiens
aacgagcagaaagaacagaccacccgaaagacagggacaagcgcacagcggagaaagcagcgcggc

SEQ ID NO: 231624 - RNA, 62 nt, Homo sapiens
agcggaggcgcgcaggagccaaggcccaggaggcaagagcgagaagagcgcaagacagaaag

SEQ ID NO: 231625 - RNA, 80 nt, Homo sapiens
gcggcggcacccggcaccgccacgggggcgacggcaggccacgcaccagggaccggaagccccgcgccaaaggacaagac

SEQ ID NO: 231626 - RNA, 72 nt, Homo sapiens
agggcgccgcagcgagcgaagaccagcaggacagcgggaggaccaagacaacggaagggaggcgaagacagc

SEQ ID NO: 231627 - RNA, 72 nt, Homo sapiens
ccgacagccgcagaacgagaacaaccgcaacgaacaaacaggagacagagagcaagagcaccccaacggccc

SEQ ID NO: 231628 - RNA, 55 nt, Homo sapiens
ggagagagaggggagccggcccccgaaagagggaaacaacagccagaaaacacaa

SEQ ID NO: 231629 - RNA, 78 nt, Homo sapiens
cgaacccgggaggcagagggcgggccacgagcagggaaggggggagacgagaaaacagaagcagcggagcacggaaaa

SEQ ID NO: 231630 - RNA, 75 nt, Homo sapiens
acgagaaaagcccgaggccccccagaagcagagcgcggcccgaagcgcagaacgccgacggccagaaggagaaaa

SEQ ID NO: 231631 - RNA, 61 nt, Homo sapiens
accgagccgaggcacgacgacggcaccaacaccccgcgggaacgcggcccgcaagcgaaga

SEQ ID NO: 231632 - RNA, 66 nt, Homo sapiens
gcaggaaccaccaggacagagcccagaaaaggcaaagcagaccaggacacggacaacaccaagaaa

SEQ ID NO: 231633 - RNA, 59 nt, Homo sapiens
aggagccacaggccgaggaaacgcgagcgagggaagcaaggaagaggaaccccccaagg

SEQ ID NO: 231634 - RNA, 76 nt, Homo sapiens
cgcaaccccgcgcgcgcgcccgcgaagggagccccggggccacacgaccggcagaagccaagaccggcccgaggcg

SEQ ID NO: 231635 - RNA, 68 nt, Homo sapiens
gaccacaccgcccggggccgggcagcgagcccacacaggggcgacagccaggagcaaaaagcagcaca

SEQ ID NO: 231636 - RNA, 65 nt, Homo sapiens
cagcgggaggcaaacgacagaccacacggcccggaaggcaaaagggaaagcaaggggaagggccc

SEQ ID NO: 231637 - RNA, 101 nt, Homo sapiens
ggcgccagggccggcgggaggaggcggggacgcgcgcagcaccgcgccaggcaaaagcagaccggaaaacccaccggcaagaccacacccgaggggagccc

SEQ ID NO: 231638 - RNA, 68 nt, Homo sapiens
aagaccaggagagggcggccaagcccggaaagagcacagaaccgagggaaacgacaagaagcagcagc

SEQ ID NO: 231639 - RNA, 81 nt, Homo sapiens
ggcaccaggccgaaaacgaagcagaggaacaacaaggacaccaggggggaaaaaccacacaggcaaagaacgcgcaaaaca

SEQ ID NO: 231640 - RNA, 40 nt, Homo sapiens
agccgggcgcaaggagcggaagagcggggacgacgagccc

SEQ ID NO: 231641 - RNA, 66 nt, Homo sapiens
cccgcgggacccgcagccccgcgcgggcaccagccggccccgagcgaggcaccggacccgacaccc

SEQ ID NO: 231642 - RNA, 86 nt, Homo sapiens
gagagaaacccagacagaggggagcacagagaaagagaagagaagagaaaggcccggagacagaggacgaggagcccccacaagcc

SEQ ID NO: 231643 - RNA, 56 nt, Homo sapiens
ccagaggcagccagcagggggagaaggcagaggcacacggaagcgcaccgcaggag

SEQ ID NO: 231644 - RNA, 72 nt, Homo sapiens
cgcgaagcccagagcacccaaggaccacccccacaggccccaggaaccacagcgcaagcaccaggaaaccga

SEQ ID NO: 231645 - RNA, 76 nt, Homo sapiens
acccagccgagccccacgaggccggggacgaccggaagccgcaggcgggaagaagaacaacagccgaggccaacac

SEQ ID NO: 231646 - RNA, 77 nt, Homo sapiens
ggagcaggcggagcacccaccacggagggaaagaccaggcaggacaaccaaaggggacggcaaaagggaaggcagcg

SEQ ID NO: 231647 - RNA, 72 nt, Homo sapiens
cccccgccggaggaagaaaaaaaaccccgcacacgaaggcccccacaagaagacaccgcggccggcgacccc

SEQ ID NO: 231648 - RNA, 57 nt, Homo sapiens
cccgagagcgggagcagggaccgggacggacacccggaccaggcccccagagcggca

SEQ ID NO: 231649 - RNA, 54 nt, Homo sapiens
agccaggggccgggagggcgccagggcgccgggggaagaccagcccgcccagac

SEQ ID NO: 231650 - RNA, 56 nt, Homo sapiens
ggaaacaggaaaggaaagagccaggcaccaaccagcggacacacggaaaagggacg

SEQ ID NO: 231651 - RNA, 56 nt, Homo sapiens
gggcccacacggcagaggggaaaggaagaccgcaggaaagcaggaaggcaagaaag

SEQ ID NO: 231652 - RNA, 73 nt, Homo sapiens
caacgacccccagacgagaacgccagaaacacaagcacgagcacaaaagaccccacagcgagagagagcaaac

SEQ ID NO: 231653 - RNA, 69 nt, Homo sapiens
agcgggcccagccagcagggaacccgcaggggaaagaaaaggcacccaaaagcccagagggacaccgaa

SEQ ID NO: 231654 - RNA, 49 nt, Homo sapiens
ccaagaaagagcgcagcgggagaagaccagaacacacaagaaccgggag

SEQ ID NO: 231655 - RNA, 90 nt, Homo sapiens
ggcccgggacacgaccaccccaagcgccacacggcgacagcgaagacgaccccgacgcaggccaggagccgcggacagaagccgagcacg

SEQ ID NO: 231656 - RNA, 75 nt, Homo sapiens
agaccgccgcggccggcccggccccccgcgcacggccagcgcagacacagaaaagcccacgaggaaaaacggcca

SEQ ID NO: 231657 - RNA, 74 nt, Homo sapiens
aaagaagccaagggggcaacgacagggagagagcggaaagacgcagaaccgggcgaaaggcggggaacaggacc

SEQ ID NO: 231658 - RNA, 80 nt, Homo sapiens
cggaacacggagccgccacaggcaagaagcgggaaggacgagcagaagacacacaaggaaagccaagacaaacgggcaag

SEQ ID NO: 231659 - RNA, 79 nt, Homo sapiens
gggccaccaggaggccagggggcgccagacagggcgggaccaccaggagcagagcggaggccaccagcccaacaccacc

SEQ ID NO: 231660 - RNA, 72 nt, Homo sapiens
cgcccgccagcgcccggagaacgaacgaaggcacagccgacccaggaaaaaaaccaccagagaagaggggcc

SEQ ID NO: 231661 - RNA, 78 nt, Homo sapiens
aaaacacaaacccaggagcaccacgaacagcagaaccaggcggagaagaacagagaaaccgggccccgccggcagcga

SEQ ID NO: 231662 - RNA, 55 nt, Homo sapiens
aaaggagccggccggcggcaaaggcgggaggggcgaacggggaagacaggccgag

SEQ ID NO: 231663 - RNA, 70 nt, Homo sapiens
aaccgcgcgcaggcagaagaaggagccagcagagcgccaggcaccccgcgacgaaaggaaaccgacgaaa

SEQ ID NO: 231664 - RNA, 58 nt, Homo sapiens
gggggcacaaggcggcggaggaggaagcccgaccccgaggaaccagcgacagaccggg

SEQ ID NO: 231665 - RNA, 64 nt, Homo sapiens
aagaggcaccaaaaagaaccgcagacaggaagagcgaagagagaccgaaaaaagaaagaaaaag

SEQ ID NO: 231666 - RNA, 58 nt, Homo sapiens
acaagaccaagagaaaaaaaaggagcaagaggaaacaggacaagccacacaagaagga

SEQ ID NO: 231667 - RNA, 101 nt, Homo sapiens
cgcggcgccgggccgcgggacccggagcaccgggccggcggacaggagggcgcgaaaccccaacaaggccggccgcgccaaagaggcccccgacaggacac

SEQ ID NO: 231668 - RNA, 81 nt, Homo sapiens
cggacgcgggaggacggcacaccgcggcgggacgaggcaccaagccagacgcccaagggagcaaggagaacccccagggaa

SEQ ID NO: 231669 - RNA, 48 nt, Homo sapiens
ccaggcacccaaaaaaacgcacacagagaaaaaaagggaacaaaacac

SEQ ID NO: 231670 - RNA, 53 nt, Homo sapiens
gagaaggaccaagaaccagagcacccaaaccgggacaagagagaaaaggagaa

SEQ ID NO: 231671 - RNA, 74 nt, Homo sapiens
caacccacaaagaaaaagggaaacccacagacagggagaagccaggaggagagaaagaacccacgcaggacgac

SEQ ID NO: 231672 - RNA, 72 nt, Homo sapiens
gcagacccgggaagcgcggaaaaagggacaaagggagaaagaagagagaccagaaacgagaggagaagaaac

SEQ ID NO: 231673 - RNA, 78 nt, Homo sapiens
ggccgggagagacgaagcccccccaggcccaacgaagagacgacacaaggagacgaggggaagaggcagcacaccgcg

SEQ ID NO: 231674 - RNA, 70 nt, Homo sapiens
aggagaagaagagaacccacagagacgggagggagacaagagccggcgcaccgcaaagcggaagcggggg

SEQ ID NO: 231675 - RNA, 81 nt, Homo sapiens
aagaacggacccacaccgaggcacccgaagaagagaccaccaaccaggggaccaaagaccggcggcgagagaggagcagaa

SEQ ID NO: 231676 - RNA, 73 nt, Homo sapiens
agccaggaggaaaacacaccaagccgacgaagacagccacacccccccagaacacaacagggaagaaaaacgc

SEQ ID NO: 231677 - RNA, 73 nt, Homo sapiens
ggaggaggaggaagaagagaagcggacgccgcaggggaccccgcccggggcgcaggcgaccacccgacgggaa

SEQ ID NO: 231678 - RNA, 79 nt, Homo sapiens
gcccacgccgcgggggagaagccccggacacaacagccaagcggagcgacaagagcgggaccgacaaagaaaggaggac

SEQ ID NO: 231679 - RNA, 73 nt, Homo sapiens
gggaagacgcccgggccaccaagcaaggaaggcggccccgcagcagaggcgagccgccaggggaagggggcaa

SEQ ID NO: 231680 - RNA, 56 nt, Homo sapiens
gaaggaaaagggacaagcaagagcaacaacaggaggcccccccagcgcccggaaac

SEQ ID NO: 231681 - RNA, 66 nt, Homo sapiens
aggaacagaaacccccagcacacgaagaggccaaggcagggaagcaccaacgagaacccgcccacc

SEQ ID NO: 231682 - RNA, 81 nt, Homo sapiens
ccagagcgagcgggggaggcccaagccgcgcccgcgcccccagcgcaggggaaagcaacggcgcaagcggcggcggcgggc

SEQ ID NO: 231683 - RNA, 75 nt, Homo sapiens
ggacggagaaaaagaggacagaagacaaggagacgcagagaaacggcagaggccagggggaccagagacgaacaa

SEQ ID NO: 231684 - RNA, 77 nt, Homo sapiens
aaggagaaggccgagacaagagggccgggacagcgcggaaagggagaagaggacagaaaaagaccagacgcggaaaa

SEQ ID NO: 231685 - RNA, 74 nt, Homo sapiens
caggccaagcagcagaacagaagagacccggccacgaaagacagcacaaagaagagagaacaaggaagcccccc

SEQ ID NO: 231686 - RNA, 73 nt, Homo sapiens
gagacagggacagcgccgaaagcaaacacgacaagccaggagcccggaagacagccgcagggcagacaccaca

SEQ ID NO: 231687 - RNA, 76 nt, Homo sapiens
gaagaaggccagcacacggggaaggaagcgaaaccacagacagacgagccccagaagaagcgggaacagcccacgg

SEQ ID NO: 231688 - RNA, 72 nt, Homo sapiens
ccgccccccgcggggcaaggggaagaccagcaagcacaaaggacaccacagacaaacccccgcgaccaagga

SEQ ID NO: 231689 - RNA, 81 nt, Homo sapiens
ggaacaaccgaacgcaccgaggagaagaccaggaggcgggccaagggcaggcacagaacgaaccaaaaaggaaaggaccca

SEQ ID NO: 231690 - RNA, 64 nt, Homo sapiens
cgagaagccgaaaagcgcagcgagcggagccgccggaggaagaaggagaaagacaaagccccga

SEQ ID NO: 231691 - RNA, 77 nt, Homo sapiens
ggcccccggcgccccggcccccgccccagcccgccggcggcggcgggcggccgggagaacaagagccaccaccaaga

SEQ ID NO: 231692 - RNA, 80 nt, Homo sapiens
aagaaaccaaccagaagcaacaagcaacgcacagagcaaaaagcacccagggccacaagggaacagaaggcaagaaagcc

SEQ ID NO: 231693 - RNA, 80 nt, Homo sapiens
cgacacgggaggagcgaagagcgagaaggagcagcgccggcggcggagaagacggcagcgaacgagaagagcaaggcgcc

SEQ ID NO: 231694 - RNA, 53 nt, Homo sapiens
acggagcaagaagcgacacaaggagaaaaggcgggagacaggaaaggaaaaca

SEQ ID NO: 231695 - RNA, 77 nt, Homo sapiens
cacccaaaggcgccaggcgcaagggaagggcaggcgcccagccaaagagaacagagagcggaaaccaacgcccaaga

SEQ ID NO: 231696 - RNA, 81 nt, Homo sapiens
ccaccgggcggggccgcggcggcggagcggaacacaagggcaagacagccgggaaccccaccccaccccacagcacagaaa

SEQ ID NO: 231697 - RNA, 75 nt, Homo sapiens
ggaccagccggaagacggcggcacaggagcgcacgagcggagcgcaaacacggccacagcaggcccggcaacaag

SEQ ID NO: 231698 - RNA, 66 nt, Homo sapiens
gcgagacaaagggcacacgccacgggcgccaacacagcccagagaggaccaggaaaaaccccagac

SEQ ID NO: 231699 - RNA, 70 nt, Homo sapiens
gggcccccgccccgggcccggggagaagacgcggcggcgcaccgagacaaccaagcaagggccagcagaa

SEQ ID NO: 231700 - RNA, 76 nt, Homo sapiens
aaacaaagagaaaggcggaaccgggagcaccagcgcgccacgacccgcagacaagaaagcaagccaggcggcagac

SEQ ID NO: 231701 - RNA, 56 nt, Homo sapiens
caaagagagaggaaagaacaaggaaaggcacaacgaaaaggccggacacaaaaagg

SEQ ID NO: 231702 - RNA, 68 nt, Homo sapiens
ggccagaagagaccacgcacaggaggcccgaggagcggccacgcgcgaaccggcagaggcccgacggc

SEQ ID NO: 231703 - RNA, 74 nt, Homo sapiens
cagggcgcccccggagcacacgcagagccaccagaagagagcaggaagaggcagggcggaaggaaccagcccac

SEQ ID NO: 231704 - RNA, 65 nt, Homo sapiens
ccgcgcggcaggccaggggaccgaacagccgaggcacgcaagccaaaaagacagacgagaagccg

SEQ ID NO: 231705 - RNA, 78 nt, Homo sapiens
cgcccgagccagcccgccagcagccccagccaaagggaaagacaaggagccgggccgagaaaccgaaccagagaccag

SEQ ID NO: 231706 - RNA, 70 nt, Homo sapiens
agacaagggcagagggaacaggcagcaggaagcacggcgggcgaaacaggaccccggaggaaaagcggaa

SEQ ID NO: 231707 - RNA, 78 nt, Homo sapiens
gcagcacagccagccagcgaccaccggggggcccagacgcacccgcacggcggcacggagacggagcccccgcgcccg

SEQ ID NO: 231708 - RNA, 68 nt, Homo sapiens
aaaacgccggccgaacagcccacgccaaggacaaaccggcgaccacacacggggacgacggggaagcc

SEQ ID NO: 231709 - RNA, 75 nt, Homo sapiens
cgcaccaggaggaaaacagagacaaagacaacgaaagagacagcacaaaaagggcagcgggcccacggcggccag

SEQ ID NO: 231710 - RNA, 83 nt, Homo sapiens
gaaggcggagcgaggggaaagcaggggagcacccgcgagggcccaaccccggacgcaggacccaaaaggggggaacagccgga

SEQ ID NO: 231711 - RNA, 91 nt, Homo sapiens
ggaggacgcccaacagcccccaccaagcaggggggcacgcggaccaaaggagggcagaacgcagaaagacgccccagacggaggccagacc

SEQ ID NO: 231712 - RNA, 90 nt, Homo sapiens
gcagaacaaaaaagaagaagaaaaggcaggagaaagaagaacacaacacaccaaaagagggccaccaggggcaccaggaagagaggcaag

SEQ ID NO: 231713 - RNA, 84 nt, Homo sapiens
ccaaccggcgaagggagaggcgaagggggcgcagcggcagacccggcagagaacgcagacagcggcagccaggaggcaggagca

SEQ ID NO: 231714 - RNA, 71 nt, Homo sapiens
cgggcacgcgcggaaacggagggggaagaagaaaagggaggccccgaaggagcaaggaaacgcgaaccaag

SEQ ID NO: 231715 - RNA, 67 nt, Homo sapiens
gaaaccgcgaggcagggaaagaagacaaaagcccaccgcagagcaagaccaggacagggcacaagca

SEQ ID NO: 231716 - RNA, 72 nt, Homo sapiens
aggcgcgaagcacaggaggaggggccggcacagcagcaagaccggaacccagaagccccccccccggaaaca

SEQ ID NO: 231717 - RNA, 57 nt, Homo sapiens
ggagagggaacgccccgcagcagcccccggggaggcaagcaggggggcaaaggaaag

SEQ ID NO: 231718 - RNA, 65 nt, Homo sapiens
gcagcgccgggaggacggaccaggcgggcccaggccgcaaacacagcgaaggggaccgaagacag

SEQ ID NO: 231719 - RNA, 85 nt, Homo sapiens
cgggaggcaaaggcacaagcgccccagaggacacacgccaagcccgggcgcaggccagccggcggcacccccagacccaggggag

SEQ ID NO: 231720 - RNA, 82 nt, Homo sapiens
aaaaaagaaaaccaaagggaccagaaagggccgaagccaaacacaggccggacgagaagaaccgaggcgcggccggggcccc

SEQ ID NO: 231721 - RNA, 75 nt, Homo sapiens
ggaggccgcggcccgggccgcaccagagcgcccggcccacgacacaggaagaagacagggccaagggcagggaga

SEQ ID NO: 231722 - RNA, 77 nt, Homo sapiens
aacggcggcgagcggacggcgcaacggggccccggagggccagagcggaaagacagaacgaggcacacagcccggcg

SEQ ID NO: 231723 - RNA, 66 nt, Homo sapiens
gaaccagacagcagagagagagcggaacgggagaaagcacgggaggagaggggaggcaagcagggg

SEQ ID NO: 231724 - RNA, 76 nt, Homo sapiens
gacggagcagagccgcgggcgccggagccgaggcgagcgccgcgcgcaccacgcggccgcgagaaccgggcagagc

SEQ ID NO: 231725 - RNA, 81 nt, Homo sapiens
gccagaacggaaaccacggacaaacaccccaagggcaggagaaacccagcgggcccagagacgcagcgggaaaaccaaggc

SEQ ID NO: 231726 - RNA, 52 nt, Homo sapiens
gaaggacacgcaacccccagcacaggaggacagcaagacgacccgcaagcag

SEQ ID NO: 231727 - RNA, 36 nt, Homo sapiens
agaaagccgggacaaagggagaccgaacgacgcgga

SEQ ID NO: 231728 - RNA, 83 nt, Homo sapiens
ggaccccggggccaggccggaagcagaccccagcagcagccacgaggaaggcggcgacgcggaaggcgcagcaagacgccgac

SEQ ID NO: 231729 - RNA, 83 nt, Homo sapiens
cgaaggaggccggagaagaaagaggccacggaccggaacaagagagagaaccaaaaaccgccccgaggcagaggccaaggcca

SEQ ID NO: 231730 - RNA, 79 nt, Homo sapiens
cgggaccccgacagcaccaacggcagggcaacacgcaggacacacggcacaaggggagcgcgcgagccacacaccgacc

SEQ ID NO: 231731 - RNA, 77 nt, Homo sapiens
agcagagggaccaccccagaacccgaccggcagacggcacggcagcaccccacaccggaccgcccaccaaagggccc

SEQ ID NO: 231732 - RNA, 61 nt, Homo sapiens
cccaaaccagagaaacgccagggaagaagaagcgggaagcgccacccagagcccggagccc

SEQ ID NO: 231733 - RNA, 75 nt, Homo sapiens
aggccgggaggcgaggaaaccggcgcaagccccggggcagagacacaggacacccacccgccggggacagacgcg

SEQ ID NO: 231734 - RNA, 79 nt, Homo sapiens
ccaaacccagaagacaggcagaagccaggggacaccgccagcccaaacaacggcccaggaaaagacaggcagggaggca

SEQ ID NO: 231735 - RNA, 70 nt, Homo sapiens
aggggacagacgagagaacgagcacgaaacacgggaaggagggaccgccggaggacccagggagcacggc

SEQ ID NO: 231736 - RNA, 61 nt, Homo sapiens
ccaggcaaaagaaagagacaccacaagggaagcacaaaggggcaccaagagagcggaaccc

SEQ ID NO: 231737 - RNA, 74 nt, Homo sapiens
acgagaccaagaaaagggcgccaacacgaaaaggaaggaagggaacacggacgacgagacacgaccaacacagg

SEQ ID NO: 231738 - RNA, 94 nt, Homo sapiens
gggacccccgcagcgacgcggcggcaagacggggcgggggccggaccaaggaaggggaaccacaaagaagagaaggcgggccaagaccgacaac

SEQ ID NO: 231739 - RNA, 81 nt, Homo sapiens
ccgccagcaggcggccaacccaccaggagagggacagcgccaagacagcaagggagagaacaacgcgacgcagacaaaaaa

SEQ ID NO: 231740 - RNA, 58 nt, Homo sapiens
cagagccagagacaaccgcacaaagaaccgaggaacaaaacagccagagcaggcacga

SEQ ID NO: 231741 - RNA, 79 nt, Homo sapiens
ggcccgcagggagcgccgccagcagaccaagcccagggcgaaagcggcaccaggacagcccgagagaaaaccaagcacc

SEQ ID NO: 231742 - RNA, 99 nt, Homo sapiens
cggggagcaaaaccaacgccggccggagcagcagcccgaggcagcgggccccaggccggggcgagcgggcccgggagcgggaagagcacccgcgaagag

SEQ ID NO: 231743 - RNA, 81 nt, Homo sapiens
gacgcgggaagaacgccgggagaggcggcggcagcggaaaaacaagaaggggcaaccccaaacagccacaaaccccggaaa

SEQ ID NO: 231744 - RNA, 75 nt, Homo sapiens
acaagacccccagcacaacacaccggccacagaaagaagacacccgccacacaggacagagaagccaaagaaaac

SEQ ID NO: 231745 - RNA, 57 nt, Homo sapiens
gaaggaccaagaaccaggggcgggcccaaagggcccgaagccccccaccagaggaag

SEQ ID NO: 231746 - RNA, 67 nt, Homo sapiens
ggcaaagcagcacgccgaggccacacacggccaaaagaggaggacgcgcgcggacaccaaaccgaac

SEQ ID NO: 231747 - RNA, 78 nt, Homo sapiens
ggggacgcagggaggagcgggacaccccggaagcgggaaaggaagaccagaggaaaagagagaagagaacaaggagac

SEQ ID NO: 231748 - RNA, 97 nt, Homo sapiens
cgccagccaccacgcggcgcacaacgcaggaacaccgcacgcgcggaggagagagccaaaccggcgccaagccccaacacaggccaaggaccacaaa

SEQ ID NO: 231749 - RNA, 71 nt, Homo sapiens
caacgaccaaaggaacaggacgaaaaacggaaacgccggaccaaaagcaagccagagagaaccagagggca

SEQ ID NO: 231750 - RNA, 68 nt, Homo sapiens
ccgggcgaacagcaaaaggcacaaaacaacccaaggggaaagaaccagcacgcgggagaggaagaggg

SEQ ID NO: 231751 - RNA, 71 nt, Homo sapiens
aacgcccgggaccgagcacccgccccgggcaccaacgaacacgaggacccaaagaacaaacccggagagaa

SEQ ID NO: 231752 - RNA, 53 nt, Homo sapiens
gcgaccgggagcacaccacaggcaaggaaacgaccggaaacaaggaagacagc

SEQ ID NO: 231753 - RNA, 74 nt, Homo sapiens
gccgccagcagaggcggagcccgcagaccgcagaaggccggagacaccagcaggggggaccgcggggccaaaaa

SEQ ID NO: 231754 - RNA, 62 nt, Homo sapiens
caagcccaagaagaaagccgagaaggcaggcgacacggcccggggacacagccacgagcggc

SEQ ID NO: 231755 - RNA, 69 nt, Homo sapiens
ccccacgccagcaaacgggccaaggagcgcacgccacgaggagcagggggggcgccgcgcgaagcaccg

SEQ ID NO: 231756 - RNA, 81 nt, Homo sapiens
aagggaaccagccaaaaagccagagcccagaggggagcagagggaggggggaacggacaggacaggagaacacccaggagc

SEQ ID NO: 231757 - RNA, 70 nt, Homo sapiens
cgcgagcgcgggcgggggagggcggagaacggaaaagcaccaggaagcagagaggaccgcagaagggaag

SEQ ID NO: 231758 - RNA, 87 nt, Homo sapiens
ccgccccgcgagcacagagcccgccgccgaccgccgcccgccacacccgccgccagcccgaaggaggcgccaagggagacaccacag

SEQ ID NO: 231759 - RNA, 71 nt, Homo sapiens
ccggggccgcagcgccgaggcccgacccgccggacaacggcaagcggagaagagcaaggccgaaccgagag

SEQ ID NO: 231760 - RNA, 76 nt, Homo sapiens
ggggacccgacgcccgcacgacagaaggcgcgggagaaaagccacccccacagaccgcaaccacccccgcaggcgg

SEQ ID NO: 231761 - RNA, 65 nt, Homo sapiens
gccagccaggccaccccgggaacgccagcccgcagcgggcccaggcggaggcgccaacagaagaa

SEQ ID NO: 231762 - RNA, 83 nt, Homo sapiens
ccacagcgaaacgccgcgcaccggagccggcacggccggcggaccgggcaaggagggacagcccgaccaagcccggaggagaa

SEQ ID NO: 231763 - RNA, 37 nt, Homo sapiens
gccacacacaccacaggccgccaggacacggccaagg

SEQ ID NO: 231764 - RNA, 71 nt, Homo sapiens
gcaaggacaacaccggggggaaccagcagcgcccacaccaccaaacaggcgcggcaaacagaaaacaggga

SEQ ID NO: 231765 - RNA, 50 nt, Homo sapiens
caagccacgccaaccagaacgcgaggcccagaagaccagagaggacaacc

SEQ ID NO: 231766 - RNA, 73 nt, Homo sapiens
cacaaagacccaagaaccgagagcccaagccacaccaagaagcaagggacagaagagagggggccaggcccag

SEQ ID NO: 231767 - RNA, 80 nt, Homo sapiens
caaaggcccacacaggacagcgccggccacccaaagcacgggggcaacagagggacgaccacagcccagagcagcaaggc

SEQ ID NO: 231768 - RNA, 73 nt, Homo sapiens
gaaccggagccaaggccgccggaggcaggcagcaccgggagaagccaacggagacccaaggcaacaagaaccg

SEQ ID NO: 231769 - RNA, 50 nt, Homo sapiens
cccacaaggccacgaaaggagaggaagaggcagggcccaaagcacaagcg

SEQ ID NO: 231770 - RNA, 78 nt, Homo sapiens
ccgggccagaggaagagaagaggcggggaaggaaaacagcaacacagagcgaacaaaaaaccaggccggacgacaccc

SEQ ID NO: 231771 - RNA, 74 nt, Homo sapiens
ccgccagcaaaggaagacgagggggggaagagcggcaggcgaagagaaaagcaggcggcaggacccagccccca

SEQ ID NO: 231772 - RNA, 75 nt, Homo sapiens
ccgaaccaggaagagagacgacgagcaacagacaggcgggacagcacaagacggcagacgaggccgaggccaccc

SEQ ID NO: 231773 - RNA, 79 nt, Homo sapiens
gcgcaggggcgggaaagacccaggagaagccgcccaaagaacggggaccccgggcccgggcgggggagaagacagaccc

SEQ ID NO: 231774 - RNA, 79 nt, Homo sapiens
cgggggaggcgccgggaagcgacggcgccggcggcccggagcggcagcccacaagcaggaagaccagccccaggaggga

SEQ ID NO: 231775 - RNA, 79 nt, Homo sapiens
gaacccgggacaagaacgcagccgccggccgaccaccggaacggacagcccccccaggggaacaaaggccgacaaagaa

SEQ ID NO: 231776 - RNA, 79 nt, Homo sapiens
ggggacacacacaggccagaggcacggaaaaggggaacgggaaaggcgcagagaagcacaggagaaggaagccaacacc

SEQ ID NO: 231777 - RNA, 63 nt, Homo sapiens
ggcgcaccgacggaccgggaaggagcacccaggaccaccagaacgagagcaacgaaagagagg

SEQ ID NO: 231778 - RNA, 81 nt, Homo sapiens
acagaaaacccgcccccagcgggaggaaggacccggggaggccggccacgccccgcacgagcccaaaaggcagagcgagga

SEQ ID NO: 231779 - RNA, 84 nt, Homo sapiens
ggcacccgcaggggcagacagcacaaccagcgccggaaccaaaaagaagccccagagccggggccaggagccccaagcgcccca

SEQ ID NO: 231780 - RNA, 96 nt, Homo sapiens
accaggaaggaagaccccccaagacaccgccaggaggaagacaagggggacacggacacgccgccagaaagagaggggagaacaagagaaaagggg

SEQ ID NO: 231781 - RNA, 92 nt, Homo sapiens
accaaacagcagacacaagaaggaaaaaaaacgggaagaagaggaaggagaaccccggcagagcgggagacgaaccgcaaagagaccgaccc

SEQ ID NO: 231782 - RNA, 60 nt, Homo sapiens
cggaagcaggaccacgggcccaggggaagcgcaagaaagaagggagcccagcccagacag

SEQ ID NO: 231783 - RNA, 75 nt, Homo sapiens
cacagcaacagacagaaacaccagacagcgacagccaaggccaccgagccacaagaccacagcaccgacccccga

SEQ ID NO: 231784 - RNA, 55 nt, Homo sapiens
gcccagcccccgagggcgggaacagacaaaacaccggggcccacaggacagccgg

SEQ ID NO: 231785 - RNA, 75 nt, Homo sapiens
ggagagcccggccccccacaggacgggaagccgagaagagaggaaacaaggaacgcaaagaagaagaacagaaac

SEQ ID NO: 231786 - RNA, 73 nt, Homo sapiens
gagaacaacaaacggcacggcacgaaggccgaagaagcaggaaagcacaaaacgcacaaaagggaaagggggc

SEQ ID NO: 231787 - RNA, 60 nt, Homo sapiens
accccgagcgagggccgcccagaggacagagcaaggagcagggggagcaggaaagagaga

SEQ ID NO: 231788 - RNA, 76 nt, Homo sapiens
cggccccgccggccgccggccgcgcggggggcccagcccccggacacgggcggccggaaggcgaggccccgccagc

SEQ ID NO: 231789 - RNA, 81 nt, Homo sapiens
gggagggccccgcggaccaccgccggggacaccaccagaagggccccgcccagagcaccacccgagacacaggagcccacg

SEQ ID NO: 231790 - RNA, 71 nt, Homo sapiens
ggaaaacaaaggccgagagacccgagcccacagcccccaacccagcggaagagacacccaaggaaccccag

SEQ ID NO: 231791 - RNA, 86 nt, Homo sapiens
ccgggacaacagcgcggggcacagcagaagaccgaagaagcagccgaacacggagcagaaacgagcgcgaacgggacccaacagag

SEQ ID NO: 231792 - RNA, 83 nt, Homo sapiens
gcgccgacaccgaggcagccaccggcccgcgccgcgacaagacgggccgagcccgaggggcgacgggcaggccggagagcagc

SEQ ID NO: 231793 - RNA, 73 nt, Homo sapiens
aaacccccccacaacccgccagcgagacacccgaggcacgaggaccgcgaagagaaggagcacaagagaaaca

SEQ ID NO: 231794 - RNA, 75 nt, Homo sapiens
acgacgggaacagcacgcaacagaagagagaaggccaccaaaccacagcgggcaaagcaggacagcgaggcgcgc

SEQ ID NO: 231795 - RNA, 66 nt, Homo sapiens
aacagcggcaagccacagacgggccacacaccaggagacagcaccaaacaccacaacgggagaagg

SEQ ID NO: 231796 - RNA, 79 nt, Homo sapiens
gccggccgcgaccaaggaagcacgacgaagcggagcaggggggggggagacgagacggaggaaggagcacacgacccac

SEQ ID NO: 231797 - RNA, 92 nt, Homo sapiens
gcggaggccccagggaagcgcagaaagcaggcgaacccgcggcgcaaaacgggcggaaaacaccccaaaagccaaaagggaaaggaaaagac

SEQ ID NO: 231798 - RNA, 72 nt, Homo sapiens
caaacagccaagaaagaccgcaaaaagccgagccacgaacaacagaaaccaccggcaacagcgcgagcccgc

SEQ ID NO: 231799 - RNA, 82 nt, Homo sapiens
aaccaacacaagggcaaaccccacaggagaaggagcgcagccagagaaacagcaaaaaaccaacaaaagccccagcacaaga

SEQ ID NO: 231800 - RNA, 82 nt, Homo sapiens
gaaacaccaaaagcagaaaaagaaagggaagcaccgccgagaagcacaagaagacaagggcccagaaaccacaaaggccccc

SEQ ID NO: 231801 - RNA, 73 nt, Homo sapiens
gcgcggccgccggacgcccccccgcagcgccgagagacgccccaccaggcacagacgcggccggagccccccc

SEQ ID NO: 231802 - RNA, 71 nt, Homo sapiens
agcccggaaacacacacaagcccagcgaaccgccagggagccagaagcaggggcgagccgcgccgccggcg

SEQ ID NO: 231803 - RNA, 56 nt, Homo sapiens
ggccagccccgccagccagcagagccgcccccgggcagggcgaagaagagccacag

SEQ ID NO: 231804 - RNA, 79 nt, Homo sapiens
ccaaccaggccacggcgccgaccgggagaacgagaagacaaggccccagggaaaaggcagcgggggcacagcgaggggg

SEQ ID NO: 231805 - RNA, 90 nt, Homo sapiens
cggacagccggcccagaccaggaccgcagcgaggagaccgaagaacggcaaagagaaaagaagcagaaaaaacaggaaggagaaacccga

SEQ ID NO: 231806 - RNA, 68 nt, Homo sapiens
ccagaagacagagggcgagaccgcaacaccagaagggaaagaaaccaggcgaaaggacgacacgaggg

SEQ ID NO: 231807 - RNA, 67 nt, Homo sapiens
agcaagaaaggcaggaaccaggaacagggcagcggcagccacagaaggcagaacccaggaaggggaa

SEQ ID NO: 231808 - RNA, 71 nt, Homo sapiens
cccagggaaaggcaacagaccaccacgggcagcaggaaaaacaaagcagaggcaagaacccaccgcgcggg

SEQ ID NO: 231809 - RNA, 78 nt, Homo sapiens
cgaacagcggagcaaggcgacgaaccggagagaggagaacgaacaccggaccgccaggcaagacaacaagaaacgaag

SEQ ID NO: 231810 - RNA, 67 nt, Homo sapiens
cacgagcgccacaaccccaggaaggggcaggaccagcgcccggcaggcgccacgcgccgcagaccga

SEQ ID NO: 231811 - RNA, 57 nt, Homo sapiens
gcaaggagagaacgcgagggaaggcgccccccagggagccacgaaccacgaacccca

SEQ ID NO: 231812 - RNA, 60 nt, Homo sapiens
ggacgggggaggaggcaacgccgcgaaacgccggaccgaacacgcccccgacgaccagag

SEQ ID NO: 231813 - RNA, 89 nt, Homo sapiens
ggggacgcagagacgcagcgccacgaagaggagagggcgaagacaggacggcccaggcagacacggaggaggaggaagaggaggagggc

SEQ ID NO: 231814 - RNA, 73 nt, Homo sapiens
cggaagacaagaagccaaagagcggaggcggcccgcggacgagaagaggcgaacggaagcaacacccgggaaa

SEQ ID NO: 231815 - RNA, 50 nt, Homo sapiens
ccaaagaccccgccggagacgagaggggacgaagggaacccgccgggcgg

SEQ ID NO: 231816 - RNA, 72 nt, Homo sapiens
gaggcccaagccaggcgggggaaaacacgggggcaagagagacacaccaaaagggacacaggaacgccacaa

SEQ ID NO: 231817 - RNA, 84 nt, Homo sapiens
cggcaaaggcggaccgacaccacgacgacgggccacagcagccggcggcggcagaggggaagaaccgaagacccagaacaggca

SEQ ID NO: 231818 - RNA, 102 nt, Homo sapiens
ccgggccccccccaggaacggcccggggccgacccggcccgaggggaagcagccagcccgccccccaaagcgaagccaaagcgaaggcaaaggccaagaagg

SEQ ID NO: 231819 - RNA, 56 nt, Homo sapiens
caccgcccaccaaccagagagccaaggggaaaaagaaaagggcgaagacccgaagc

SEQ ID NO: 231820 - RNA, 82 nt, Homo sapiens
ggagcagcgcagaagcgagcggccagaggccggcgcaagcgcgggccccggcgaggccgcagagcggcaaccccgagcggag

SEQ ID NO: 231821 - RNA, 76 nt, Homo sapiens
ggggaccaggagcgaaagcaggagcaagcacccggaggagaagaggcgcggaacaagcgggagagcaaggaaagcg

SEQ ID NO: 231822 - RNA, 69 nt, Homo sapiens
caaaaaagccccaggcccgggcgccccccacagagaaagcggacacccaaagggaccacccaggaaacg

SEQ ID NO: 231823 - RNA, 68 nt, Homo sapiens
acagacccaaggccaagaaccccacaggccgaggagcaggcagaggaggaaaacgagagggcaacggc

SEQ ID NO: 231824 - RNA, 93 nt, Homo sapiens
cccggcgcccgcggccagccgcaagacccgccacaagcaacgcgggaagagaagggaagaaaacgccagagaagcagagcagcccggagcgag

SEQ ID NO: 231825 - RNA, 84 nt, Homo sapiens
caccagcagcgacgcaagccccccaagaagaaaccaggagcggcggcgaggcaaagcccaaagggaagagacggggcaccacgg

SEQ ID NO: 231826 - RNA, 76 nt, Homo sapiens
cgaacgacacggcggaaacgacgcaggaggaaacagcccgaacgcacagaagaaaccagcgcccagcgccgggaga

SEQ ID NO: 231827 - RNA, 79 nt, Homo sapiens
gaagacacaaacagcagggagaagagacaacaagacagaccgcaaaccaagggccaaaaaaagaccgcggcacagaaca

SEQ ID NO: 231828 - RNA, 79 nt, Homo sapiens
ggccgaacgaggcgagaacgcgcagaccggggagggaaagaaacagaccgaaaagggcggaaaaggaccaaggcccgca

SEQ ID NO: 231829 - RNA, 42 nt, Homo sapiens
cgaaagagaggaacaggacgccccggggagacccagcccccc

SEQ ID NO: 231830 - RNA, 63 nt, Homo sapiens
gacgggcaaccaacaagaaacagacacaccgcacagggaggagaacaccaaacagaggaacag

SEQ ID NO: 231831 - RNA, 63 nt, Homo sapiens
cgaagaggcaccaaaaagaaccgcagacaggcagcaagagagggaaaggaaaggcaaaccgac

SEQ ID NO: 231832 - RNA, 78 nt, Homo sapiens
ccccggaagggcggacaccccacacgccgccacccccaccggaggggacaccgcgcagggggcccccggccccgaagc

SEQ ID NO: 231833 - RNA, 79 nt, Homo sapiens
acagcggggcggcggcgccgggggccggggagcgccagggaaggacaacaagacggacccaggggccggcggacagcga

SEQ ID NO: 231834 - RNA, 73 nt, Homo sapiens
aaagcaggggaaagaacccgaagacaaaaacccaacaggacccccgcaggcagcggcaggaccgaaggacaca

SEQ ID NO: 231835 - RNA, 74 nt, Homo sapiens
cgcgccaggccccagggcgagcacagcacacaaggaccaccaagcagaggccacagccaaggagcccaggaacc

SEQ ID NO: 231836 - RNA, 61 nt, Homo sapiens
gcgcgcaccggaagcaccagcgaggaagacggcaagaagaagcgaaaaccgcccacaacac

SEQ ID NO: 231837 - RNA, 66 nt, Homo sapiens
cgcccgggccagcggccgcgcacccccggccggaggcaccagcgggcccgggcagagggaaagcag

SEQ ID NO: 231838 - RNA, 74 nt, Homo sapiens
gaccggcaaaacaggaggcacaagagaaaaacaacaccaacagacggagagcccccccagcaggaaaagacggg

SEQ ID NO: 231839 - RNA, 60 nt, Homo sapiens
ggagacggccccaccggcaccgagaaagacaagcaaagggagaggcgaggccagaggaaa

SEQ ID NO: 231840 - RNA, 70 nt, Homo sapiens
ccgcccccggcaaagagagggggacaagggaaggcaccaccccagaggccagagcccgacaagacaacca

SEQ ID NO: 231841 - RNA, 68 nt, Homo sapiens
accagaggacacgaaccaggaggggcgagacggaaacccaaaagaggcaaaagagcgccgggacgacc

SEQ ID NO: 231842 - RNA, 71 nt, Homo sapiens
ccgccaaaccagagaaagaaacacccgaacagcgacacgagacaaagggcacaaaggcaaaaaaacagcaa

SEQ ID NO: 231843 - RNA, 71 nt, Homo sapiens
ggacgaacaaccaccaaggaggggaaggggagcaacgggacaccccagcaaagccggcagaaagaacaggg

SEQ ID NO: 231844 - RNA, 44 nt, Homo sapiens
gggagccggcccccgaaagaggaacaccccaccagaccacccag

SEQ ID NO: 231845 - RNA, 73 nt, Homo sapiens
gggacaacggccaagcccggcagggcagagacacccaagacacccccagcaaagcagcagaccccagcaacaa

SEQ ID NO: 231846 - RNA, 74 nt, Homo sapiens
gaccacagcacagccgggaaggggagccaccagccccccgggagagaacagcacacagaggcgcaaggggaaga

SEQ ID NO: 231847 - RNA, 58 nt, Homo sapiens
acgcggcgaaggaagaggagggcaagaagggcaagaagggaagcccagaggcacgggg

SEQ ID NO: 231848 - RNA, 60 nt, Homo sapiens
gcgaaagagccacgaacagacagcgagcgcacacagccagagacgcgcacgaaacgacga

SEQ ID NO: 231849 - RNA, 57 nt, Homo sapiens
gcggagaaccggcacagcccccgggggaccaaaacaaaacgagagcaagaggaaaga

SEQ ID NO: 231850 - RNA, 56 nt, Homo sapiens
cagaaggggccggccccggcgcacgccaagcaccgcaccaacgaccgaagcaccag

SEQ ID NO: 231851 - RNA, 82 nt, Homo sapiens
agaccacgcagccacgcgggcgagcggcggggagcggcgaagccgcgggcgagggcccgccccaccgggggccaccccaggg

SEQ ID NO: 231852 - RNA, 75 nt, Homo sapiens
aaggggcagacccaagaggacggcccgccgggaggagaaaaaagccaccacggcacgaggccccgccaagacagc

SEQ ID NO: 231853 - RNA, 56 nt, Homo sapiens
cagaacacccaggcgacaggaaacagaacgacagcccgcaccgacgccggcggcca

SEQ ID NO: 231854 - RNA, 77 nt, Homo sapiens
gccccccagccacgggaaccccccaaaacacaagaggacggagaagcgacgaaagaagccgggacaaggaccagaca

SEQ ID NO: 231855 - RNA, 72 nt, Homo sapiens
gacacaaaaggaggcagccgaaaacaacggacaacccagacaagccgaagagacccaagaaagagagccagg

SEQ ID NO: 231856 - RNA, 85 nt, Homo sapiens
gaggacagcgcacacagcaagcacgagggccacgaggggccaaggcgaccacaaagcgaagaaaaggaggaggccccgaaaccga

SEQ ID NO: 231857 - RNA, 79 nt, Homo sapiens
gacggcgaagcgcgcgccgcgcccggaccccagagaggacggggacgggccccaggacgaggaagacaaggccagccac

SEQ ID NO: 231858 - RNA, 63 nt, Homo sapiens
accagcaggacacagagggccagggaaacagacgaaaacccggcgccggcagaggaggaaaac

SEQ ID NO: 231859 - RNA, 67 nt, Homo sapiens
cacagacagaaggagcgagggcaacacggcaggagcaagcgagacacagccagcgcgccagaaaccg

SEQ ID NO: 231860 - RNA, 79 nt, Homo sapiens
aaacacgggcgccaggaacgcggaacagaaccaaaggcaggacagccagcaggccaaaacaagcagaagcaagaagaga

SEQ ID NO: 231861 - RNA, 73 nt, Homo sapiens
ccgagaaggaggccagcagggggccagagaacaagcccagacagcaagacgcgagcgcaggggaccaggcaga

SEQ ID NO: 231862 - RNA, 39 nt, Homo sapiens
gaagcaccacgaaaggagggcggggcgcagccccgaagc

SEQ ID NO: 231863 - RNA, 123 nt, Homo sapiens
gagaacgagagaggcaccgggacggaccgagaccggaccgagagcggaccgagagcgcgaaacgcacgagaagacaacgaagagaggaaagaagcggaaaggagggagcacacaacaaggagc

SEQ ID NO: 231864 - RNA, 61 nt, Homo sapiens
ggcgagacgagaacgcagagcagcgggcccaggccaggagggcaagaacacgcagaagacc

SEQ ID NO: 231865 - RNA, 64 nt, Homo sapiens
cccaaggcgcaagaaaaggagccggaaacggacaaacagacagaaggcgcgggagaaaagccac

SEQ ID NO: 231866 - RNA, 78 nt, Homo sapiens
gaaaaacccaggagagaaacacgcaaaacaaggaaaggcacaagcaggaacacagccaggcccccacccccaggaggc

SEQ ID NO: 231867 - RNA, 76 nt, Homo sapiens
ggccgccgagaaggaccgcgcgcgggagcgaggcccgcggagcgccgccgcgcggggaggacgaagccagcggggc

SEQ ID NO: 231868 - RNA, 84 nt, Homo sapiens
gcggggcggcagcgaggcggaggcgacgaggaggcggacccccggcgcagcaaggcgccaccggaagaaacgggaggggaggag

SEQ ID NO: 231869 - RNA, 116 nt, Homo sapiens
gaacaagagcagcccccacgccagggggaaacgcaggagcccagaaagcccaggaacgagagaggaaccagaaccaccacgaccaagaggccagaaccaccagagcccagcaaaac

SEQ ID NO: 231870 - RNA, 73 nt, Homo sapiens
gagacgccagcccacccacaagcaaaccgacaccagcgacacaagcgcgagggaaccacagaggacaggcgag

SEQ ID NO: 231871 - RNA, 86 nt, Homo sapiens
gccggaaggccccagcggggggggaagcggaggcacgggcggcccgcaggaccggaccgggggagcacaaagagccaaaacaaggc

SEQ ID NO: 231872 - RNA, 84 nt, Homo sapiens
agcaagcggagccccccaagagccggaaagccaaggacggcgaagagccaagagcagagaaaagaagaccacacaaagagcagg

SEQ ID NO: 231873 - RNA, 64 nt, Homo sapiens
caccgaagaacagacgacagccacgccgacagagagaacagaccccgaagaggggaaggacacc

SEQ ID NO: 231874 - RNA, 77 nt, Homo sapiens
cagacgggcagcaccggagggaaaacaacacacagcagcacaagcagacagcaagaagaagggcaaccccaaccaag

SEQ ID NO: 231875 - RNA, 76 nt, Homo sapiens
acggccgcgaagggcccgagaccccgcgcgcggaggcaagccagcaagagacgggagaagggccgcggacagcccg

SEQ ID NO: 231876 - RNA, 97 nt, Homo sapiens
cacaaccggcgccagagccgagcaggcacagagacgaagaccccccggccacccccagacgccgaggaaggagacagagccccaacgcaaggccaag

SEQ ID NO: 231877 - RNA, 39 nt, Homo sapiens
ccccaggggccaggacccacagcaaggaaaaacagaggc

SEQ ID NO: 231878 - RNA, 86 nt, Homo sapiens
cagagccggagcgcgaaggccgggacccggccccggcccacaggggggggcaaacccgagagaacggcaaaaaaaagaggccgcac

SEQ ID NO: 231879 - RNA, 73 nt, Homo sapiens
agcgaggaaaacgccacgacagacacaaccaagcaccggagaaaacccacggaaccaggacacgaacaaaaag

SEQ ID NO: 231880 - RNA, 73 nt, Homo sapiens
aagcaaggggaggagcagcagcgcggcagagcaggggcaacccaaggagacggcgcgggggcggagagggaaa

SEQ ID NO: 231881 - RNA, 72 nt, Homo sapiens
cagcaggaaggacgggggagacaaggaggagcccaaaggcgaaaggggcagcccgcccgcaaaccaaggaac

SEQ ID NO: 231882 - RNA, 61 nt, Homo sapiens
aacagaacccaaaagccgacaaccccagaaacagacaggacccagaccagccaaagagaag

SEQ ID NO: 231883 - RNA, 78 nt, Homo sapiens
ccgggcaccgcgggcgcggcacggccaacggggccgcccgacgacgaacacgaggacccaaagaacaaacccggagag

SEQ ID NO: 231884 - RNA, 75 nt, Homo sapiens
gccgcacgccaaacgggggaggacccccgcccggagagcagagcaacacggaggagaaccagaggacaaaaagcc

SEQ ID NO: 231885 - RNA, 65 nt, Homo sapiens
aaaggcaagggaagcaggacgcaggggaccagcacagagcagaaaaccaaggagcaggccccgcg

SEQ ID NO: 231886 - RNA, 75 nt, Homo sapiens
acggaccgaccggacaccaacagacgagcgccaacagcggaaaaacgcaagggaaaagagaaaaagaaagcgacg

SEQ ID NO: 231887 - RNA, 59 nt, Homo sapiens
cccacccaaggaaagagcagcaaccgagacaaggacacacccaggacacgcacagcccc

SEQ ID NO: 231888 - RNA, 76 nt, Homo sapiens
caagagccaccacgaccgggccagcgcaccgccccgcagcaggcggcacagggagaacacagggccccaccgcgcc

SEQ ID NO: 231889 - RNA, 33 nt, Homo sapiens
ccgaagagcgaccggcgcagaggcaccagaaaa

SEQ ID NO: 231890 - RNA, 56 nt, Homo sapiens
ccgcagccgcacccccggcggcagcacgaaagaccaggggggagccgcacgacccg

SEQ ID NO: 231891 - RNA, 57 nt, Homo sapiens
ccgggcaaccaaagacgggcgccacagacacaaaaggggaggagcgggagcacccga

SEQ ID NO: 231892 - RNA, 76 nt, Homo sapiens
agaacgcccgcggacgacccgagcgcgaaccaagacaggaagcccacccaaagagagaaaagagagaagagaggaa

SEQ ID NO: 231893 - RNA, 73 nt, Homo sapiens
gacagagggccaaggcaacacccgacgagagggcaaaaaacacagacaccggcgaacaacaagaaccggggag

SEQ ID NO: 231894 - RNA, 72 nt, Homo sapiens
acagacccacggggggacccacaagaggaaggaagggcgcgcaggaacaagaagaagggcaaccacagagcc

SEQ ID NO: 231895 - RNA, 81 nt, Homo sapiens
cacagggacccacggccagagcccggagcaggaaaaacacagagacagacggcggcagcccaaagacaacaggcccccccg

SEQ ID NO: 231896 - RNA, 65 nt, Homo sapiens
gccagacaccacgaagggcacacaagagagcagagcccagagagcagagacccccccggacgcga

SEQ ID NO: 231897 - RNA, 70 nt, Homo sapiens
acaacccacaccaggccagccgggaaccgaacccaaaacgagcaagccacacccagaaccagcagcccgc

SEQ ID NO: 231898 - RNA, 76 nt, Homo sapiens
cccagagcgccacggagaagccgccgaagagaacgcaaggagggacaggacggaaggagcggaggaagacacaaga

SEQ ID NO: 231899 - RNA, 81 nt, Homo sapiens
agggcccggccccgaccccgcggccggacgacccaagcccgcgagcaggagagggagcaccaggccaagaaccccaaaaac

SEQ ID NO: 231900 - RNA, 58 nt, Homo sapiens
gggggagcggggccccacacccccccgggggggaccagggaagggacgagacagaccg

SEQ ID NO: 231901 - RNA, 66 nt, Homo sapiens
cgacggcagaggaccccggagagcaaggaagaaagcagcccagggagaaacgccacaccgggaaag

SEQ ID NO: 231902 - RNA, 68 nt, Homo sapiens
ggggcgagagaggaaaagaggcagacgggcaaaaggaagcgaaaaggagagcagaagacccgaccacc

SEQ ID NO: 231903 - RNA, 69 nt, Homo sapiens
gcagagaacacagagaaccgcagcaccagagcgacaacccacccagggcaagcagaagaggaacagaag

SEQ ID NO: 231904 - RNA, 73 nt, Homo sapiens
cgaacgccccaaggaggcccgccccggagagagcggcgccgggacaccggaggccgggcccgacagcgggcgg

SEQ ID NO: 231905 - RNA, 69 nt, Homo sapiens
gccccacaacaagccaaaccagccaagagccaccggaacaaggagcacacgcagacacagaaaagcaac

SEQ ID NO: 231906 - RNA, 73 nt, Homo sapiens
cgcgcaaggggccagcaccggaacaccacagcacggcagggaccccaacaccaaaaagcaaggccaggcccag

SEQ ID NO: 231907 - RNA, 76 nt, Homo sapiens
acaagacggggcgccccacagaggggcgacggggggaagcgaggcaggaagcccagcacgccgaaggccacgcgac

SEQ ID NO: 231908 - RNA, 99 nt, Homo sapiens
ggaaccgggggcagcgcaaggcagacgcgaaggccaaaacgaggaggggagccggaggacaaggaggcgcaaggacagacgagaacggacaccgccccc

SEQ ID NO: 231909 - RNA, 74 nt, Homo sapiens
gaacacaagagacacagcaccaacaccagagcagcaaaaaggagggagcagggacacacgaacaaagacaggag

SEQ ID NO: 231910 - RNA, 76 nt, Homo sapiens
cgagcggacaacgaccggggcaccagggaaaacacacccgagacccagacagagcaccggaacccagacccaagag

SEQ ID NO: 231911 - RNA, 92 nt, Homo sapiens
aagcacgacccggcagcggccgggaaccagcgagcaggcgagagcccacccgcgaccggcaagccaggagacgacaacggagccggacacag

SEQ ID NO: 231912 - RNA, 86 nt, Homo sapiens
ccccgggcgaggcacaccccggagccaggaggccccgcccaggccgagagaggagccccagaaagcgcgccgggaggacccgggcg

SEQ ID NO: 231913 - RNA, 49 nt, Homo sapiens
acgcgcacgggaaccgaagagagccgggcacgggacccagagagagaaa

SEQ ID NO: 231914 - RNA, 79 nt, Homo sapiens
acgcagaccacgcgaaccagaaagacccgccgcagcaagagagagcaaggagcaggcgcagagcagagcagagcagggc

SEQ ID NO: 231915 - RNA, 84 nt, Homo sapiens
cagcgggcgggccccgagagcagcagcggacccagccgccgccccaccgacggagacggacgcccgggaggggagcagagccag

SEQ ID NO: 231916 - RNA, 85 nt, Homo sapiens
agccacccacaaacagagagaaggaaccacccacgcaggcaggcagaagccccagaggagcccgaaacccccaggcgggcaggaa

SEQ ID NO: 231917 - RNA, 65 nt, Homo sapiens
aagcaagacccaggacaccccgaagccgagaaaggcaggaacacagccaggcccccacccccagg

SEQ ID NO: 231918 - RNA, 59 nt, Homo sapiens
ggcgcgagagagagacagaacagggccaaacgaccaagaaagcgggacgcggaaaacgg

SEQ ID NO: 231919 - RNA, 71 nt, Homo sapiens
ggaccaagaaccaggccagaacacaaaccaccaggagaaagcgggaaaacggacacagaagcgcccccggg

SEQ ID NO: 231920 - RNA, 79 nt, Homo sapiens
gacacaagaaaaccagccgagaagcccacagcccaaggagcgcccggccgcagccccggggagaaaccgcaccacccca

SEQ ID NO: 231921 - RNA, 48 nt, Homo sapiens
ggcagacaaaagggccaaagaagggagagaggaagcgccacgcagaga

SEQ ID NO: 231922 - RNA, 70 nt, Homo sapiens
aaacagcacccggcaagaagaacacagggggaagccaagcagaacaagaaggggaggagcacagaacgcc

SEQ ID NO: 231923 - RNA, 72 nt, Homo sapiens
gcgccccaaaaggccccccgcgcaggcacacagcaaaggggcagccggcacccgcacaacccagggggccga

SEQ ID NO: 231924 - RNA, 82 nt, Homo sapiens
ggcaaagacggcaaaagcacaaggaccgcggacagagacaacaccgagagagaaggacccccgagagccaccacccgaagac

SEQ ID NO: 231925 - RNA, 88 nt, Homo sapiens
agcgagagacgcagcaggcggcgcacgcccacgggcaggggacggagggggaagaaagggcaggcgagagagggggaacaggaccaac

SEQ ID NO: 231926 - RNA, 90 nt, Homo sapiens
accgagcagaacagagaagagaagaaaagagcagacagacccaaggggccgcaaggccaggcgcgcagaggcacccaacggcacagaccc

SEQ ID NO: 231927 - RNA, 73 nt, Homo sapiens
gaagaggcacaagcgccaaggggagagagggaacagaaaggagaacaccacaggaacacaagacaaaagccag

SEQ ID NO: 231928 - RNA, 80 nt, Homo sapiens
aacaaaagagcacaaaggaaaacgaggaaagcccaggagacacggcaagggaaaagcgcagcaacaggaaaaaagcagaa

SEQ ID NO: 231929 - RNA, 75 nt, Homo sapiens
gcgcgagaccagacccacaacgaaaaggggagccgccaccaaaagcagacggaaaacccacggggaagaccacac

SEQ ID NO: 231930 - RNA, 78 nt, Homo sapiens
acggacggacccagcacgaggaggcgcgaggagagagagcgaccaaacccccacaacaaggacaaagggacccaagga

SEQ ID NO: 231931 - RNA, 77 nt, Homo sapiens
gcccagggaggagccagaacacagaccgccagagcaagcccaggccccgaaaggcagcaagaaaagagcaaaacgag

SEQ ID NO: 231932 - RNA, 77 nt, Homo sapiens
ggacccgacaaggcgcggcaagggcaccaaaccagggaggggcacgccagagaagacggcccagcagagcacccaac

SEQ ID NO: 231933 - RNA, 70 nt, Homo sapiens
ggcgcacggccaagaacgcaaggagcagcagcaaaagccagacaggaacgaagaaaagcggaaaaaaggg

SEQ ID NO: 231934 - RNA, 80 nt, Homo sapiens
gcgggacccagcccaggcggcgcggacggggcgggcaggagaccacccacaaacaaaggcaccggagaagaagccgagag

SEQ ID NO: 231935 - RNA, 81 nt, Homo sapiens
aaaaaggcccgcacacagggacagcaaagccagccggccccaaagacggagccaaagaaaaccacgggaaaacgaagagag

SEQ ID NO: 231936 - RNA, 83 nt, Homo sapiens
cccccccgaaggccgccagcaccccggagaagcgcgaaggagcggccagcgccaaggggccaagggagagcggggcccccccc

SEQ ID NO: 231937 - RNA, 63 nt, Homo sapiens
gcgggcggaggagcaaagaaggcgagaaccacgccgacaacggcggaagaggaacgggaacgg

SEQ ID NO: 231938 - RNA, 95 nt, Homo sapiens
aaggacaggaagacacccccaaaaggcgcgcagaaaccaagcagccggacggaaaacagcaacacagagacacacggggcacaccaagcgacccc

SEQ ID NO: 231939 - RNA, 79 nt, Homo sapiens
cgccgccgccagaggcaggaagagccggcgggacagcggagacaggggggacgaagaacggacggggcggaggagaaga

SEQ ID NO: 231940 - RNA, 76 nt, Homo sapiens
cgggccggcccccaagagccgaggcagcggcgcgccgaggcgcccgaccagccggaggcgcagaccggggacagca

SEQ ID NO: 231941 - RNA, 35 nt, Homo sapiens
gcccagacaggggccagggagaagaaccaacaacg

SEQ ID NO: 231942 - RNA, 52 nt, Homo sapiens
ccccgggggagccggcggcggaccccgccgaccagaagaacagagcgccggg

SEQ ID NO: 231943 - RNA, 68 nt, Homo sapiens
cacggcgccccgcaaggaccggggacgggaacaagcaggcacacaccaaaccaggagggcgaacacga

SEQ ID NO: 231944 - RNA, 80 nt, Homo sapiens
aaaggaaagggcgggcggaacgacccagaaccggcgagccggccccgggcgaagagccggccgccgcgcgcccgacacag

SEQ ID NO: 231945 - RNA, 78 nt, Homo sapiens
cccagcccaggcggcgcggacggggcggcacccgccccccccaggcagcagccggaccgggccggcagaggagaaggg

SEQ ID NO: 231946 - RNA, 73 nt, Homo sapiens
caaggaaacagggagccaacaaagaaaccggccgaaacggcggggaagacagcagaacaccgaacaggggacc

SEQ ID NO: 231947 - RNA, 78 nt, Homo sapiens
accgggcgagcagagaagaagcagggacaggcaggggacgggaaggacgccccaccacgacaccaggccgcgggcaga

SEQ ID NO: 231948 - RNA, 84 nt, Homo sapiens
ccccaacagagcgagagaggcacggagcgcagcaggaccagcgagagccccgcccccgcccgcagcaggcaaggccagcaagga

SEQ ID NO: 231949 - RNA, 64 nt, Homo sapiens
aaaacaaaagagacccccaaaccaaaggaaagcgcagaccaggccggaaaaaccccgaaggacg

SEQ ID NO: 231950 - RNA, 78 nt, Homo sapiens
aagcacgggccagcacagagcgcacaacccagagcaagaagggaacgcacagcgaagacaccccaacgggacaagaaa

SEQ ID NO: 231951 - RNA, 42 nt, Homo sapiens
aggggcaggcacacaccggacaggaggcacacccagaagcca

SEQ ID NO: 231952 - RNA, 78 nt, Homo sapiens
acggaagcaaggaacaaaccgaagaacagcgggaaagaaggcaaaacacggaaaagcacggcgccgagaggaaggaca

SEQ ID NO: 231953 - RNA, 84 nt, Homo sapiens
ggcgggagcggcggaagcccagcggcgccacgggacacggaaccaggaggagcggagcgccgcgcgcccaggccaggacggagg

SEQ ID NO: 231954 - RNA, 69 nt, Homo sapiens
cggggcagacaacggagcccggggacaggagagacaacggaggcaagaaagacggagaagcgagaagag

SEQ ID NO: 231955 - RNA, 79 nt, Homo sapiens
ggagggcgccccagggacagcaacagcggccgggaacgaccgaaacaccagcagcagaaagcagagagcccagaagaaa

SEQ ID NO: 231956 - RNA, 40 nt, Homo sapiens
gggaccgggacgccacagccaggaccacagacacaaggac

SEQ ID NO: 231957 - RNA, 83 nt, Homo sapiens
aggaaagaggcgcagcgaggaaagggcaacgacagaggaagaaccaagacgcccaaccaagaaaacagcagccacaggagagc

SEQ ID NO: 231958 - RNA, 68 nt, Homo sapiens
aaaaaaccaaagggggaggcaaacaaaagacggcaaggacagccgagaggaaaagggaaacagcccag

SEQ ID NO: 231959 - RNA, 76 nt, Homo sapiens
gggagacaaaaggaccggacccagaaaccggacccaaaggcaaaagcagaccggaaaacccaccggcaagaccaca

SEQ ID NO: 231960 - RNA, 79 nt, Homo sapiens
accggaaaccccagccgggaggggagcgggaggaggccgccacagccagacagacacagcacagcagccacgaagagca

SEQ ID NO: 231961 - RNA, 70 nt, Homo sapiens
agacggagacagcggacaccagggccgggagacgcaaaaagaggcaccacacggggaggaagacggcaaa

SEQ ID NO: 231962 - RNA, 62 nt, Homo sapiens
ggacccccgacgccaggcagcgcccccaaacgaacaccgaccgaggacaacaggagagaagc

SEQ ID NO: 231963 - RNA, 79 nt, Homo sapiens
ccacccaccagggaagcccgcacgcggaagcgccagacgaccaaagcaaaaaaaaggccagaggacaggccgagaggaa

SEQ ID NO: 231964 - RNA, 87 nt, Homo sapiens
gccgccgccccccagaggcgccggagcccggaacccgccggagccagccagccgcccgagcaccagcagaaccaggaaccaagagcg

SEQ ID NO: 231965 - RNA, 77 nt, Homo sapiens
gaggcgaggcaaacggggggcgcggagggaccagcgagcgggcccagcagcaaagaaaccggaaacacgcgcaacaa

SEQ ID NO: 231966 - RNA, 80 nt, Homo sapiens
gcgcccagagaaggacgcccaagaggcggcgaggagacgagaacgcacagcaaggaggggacagcagcagagaaagcaag

SEQ ID NO: 231967 - RNA, 44 nt, Homo sapiens
aggggcgccgaagcgagggccagaggagcagccaagaagccccc

SEQ ID NO: 231968 - RNA, 82 nt, Homo sapiens
aagaggaccacgagacaagcggcagcgccaacgccgcacgcgcacccgacaaccaaaccgggggaacggggcagagacccca

SEQ ID NO: 231969 - RNA, 68 nt, Homo sapiens
accaggagccacagacgaccggcacacagcagagagaaacccgcaaagaagcgagccagcaaagaaac

SEQ ID NO: 231970 - RNA, 69 nt, Homo sapiens
ggagggggacgcacagcggaggaccgacaagacggaaaccgggagggggaaaagcgagaaaaagaccca

SEQ ID NO: 231971 - RNA, 87 nt, Homo sapiens
cacgccggaaacagcgccacgccagacgcaaaggcccagccgcagccccagccccagccccagccccaagcccagccagccaccgca

SEQ ID NO: 231972 - RNA, 73 nt, Homo sapiens
gacggaacacaccaagaaccccacgggccagagcgcgcagaccaccgggggcggacgcagcccccaacccgac

SEQ ID NO: 231973 - RNA, 58 nt, Homo sapiens
caacaacacgaagcacagcacaagacagccaagacgcgcaggagacccaggccgagaa

SEQ ID NO: 231974 - RNA, 81 nt, Homo sapiens
gagcgagggggcgcccgccacgacagaccgacacgacgcagcacggcgccaagccggcaagagaaagagaggccagaacag

SEQ ID NO: 231975 - RNA, 74 nt, Homo sapiens
cagcacaaccggcagccagaaaagacaggggcgaccacacgccgaggcgccagacgcagaaaagaaaagaacca

SEQ ID NO: 231976 - RNA, 74 nt, Homo sapiens
gcagaagcaaaggagaagaaacaaaaggaagagggcgggaaagaaggaggagaccccagaaccagagcggacac

SEQ ID NO: 231977 - RNA, 78 nt, Homo sapiens
aacaaacggcaagagccagaagcccggcggaaggccagaagcgggcacagagaccaaaggcagaagaaaacagaaaag

SEQ ID NO: 231978 - RNA, 78 nt, Homo sapiens
gacaacagaagccacgaccggggaaagagaccgggccccccagagccagaaccggggcccgacaccaggcccccaccc

SEQ ID NO: 231979 - RNA, 81 nt, Homo sapiens
gacccaccccacacagcaacaggccaaccaagccccgagcagacccagccgaaaccaaggaaggggcaaacagaaaaccaa

SEQ ID NO: 231980 - RNA, 74 nt, Homo sapiens
aaaaggggggaaggcacacaacgacccggacagcgaccgcaagaaggcggagggcgagaccagcagacaaggcg

SEQ ID NO: 231981 - RNA, 74 nt, Homo sapiens
gacaacgcaagggggaagagagagaaacaaaagcgccagagccaagaacggggagaacagaggacagagaagac

SEQ ID NO: 231982 - RNA, 62 nt, Homo sapiens
acggaccgggggcagcgccccgacgaggaggagagaaagaacccacgcaggacgacagaaga

SEQ ID NO: 231983 - RNA, 75 nt, Homo sapiens
ggaggcagaagcgcgcgagcccgggagccgacaaccggaaagaaggcagacggagacccggagacccggcaaccc

SEQ ID NO: 231984 - RNA, 55 nt, Homo sapiens
aacaagacggggcgccccacagaggggcgacgccaccccaaaggaagcgcaaacg

SEQ ID NO: 231985 - RNA, 79 nt, Homo sapiens
cgcggccaccgcaggcacaggccgaacagaacaccgcccagccaagggggagggcagcgccaaacagcgcaaaggcagc

SEQ ID NO: 231986 - RNA, 84 nt, Homo sapiens
ccgagcaacaccccggccaccgacccacaagcgggcgacgcacgaggcacacaggaaggaggggagcagggacgcgcggcggcg

SEQ ID NO: 231987 - RNA, 41 nt, Homo sapiens
gggaacgggcacagggcagggggaacggcccaggaaagacc

SEQ ID NO: 231988 - RNA, 68 nt, Homo sapiens
ccgagcggacaggagacagccagcgcacgaggacaggaggggcgagacgggacacccccggaacacag

SEQ ID NO: 231989 - RNA, 94 nt, Homo sapiens
ggcggaggccccagggaagcgcagaaagcaggcgaacccgcggcgcaaaacgggacaagagaaaaaaagggcgggcgaacaaaaagagcagagg

SEQ ID NO: 231990 - RNA, 69 nt, Homo sapiens
cggacggcccaccgccaggaccacacgaaggggcagaagagcacaagacggaagagaggagcgaccaga

SEQ ID NO: 231991 - RNA, 49 nt, Homo sapiens
aaggaccaagaaccagggaggcgaccaggcggggccaccaacaaaagag

SEQ ID NO: 231992 - RNA, 77 nt, Homo sapiens
caggacaggggaaaaccccggaagcaagggaggcccggggcggagaaccgagagagaagagagagaggagaagaaag

SEQ ID NO: 231993 - RNA, 55 nt, Homo sapiens
ccagagagaccccagaagggaagcagagccccgggccgggaaggggaaacggcca

SEQ ID NO: 231994 - RNA, 72 nt, Homo sapiens
ccggcgccgcgccggcggcgacggaacagccccaagccggaaacccaggaacggaaacagaacggaacagcc

SEQ ID NO: 231995 - RNA, 62 nt, Homo sapiens
agagcgggagcgggcgggccaggacccaaagacaggaccacgcaccagcagagaaggaaagc

SEQ ID NO: 231996 - RNA, 72 nt, Homo sapiens
acgaaaaagcagaggcaagaaccaggaaaaacggagccgagaccaagacccaacccggagccggggacggca

SEQ ID NO: 231997 - RNA, 77 nt, Homo sapiens
ccgcgcgcgcccggcgccggcccgccccggcgagaacacaggaagaggaacaaaggcagccccaagagaaggaggga

SEQ ID NO: 231998 - RNA, 76 nt, Homo sapiens
ccgggcggggccggggggaaggaaccaaacgcggcacaaacccaagacaagaaacccacagaagagagaacgcgcc

SEQ ID NO: 231999 - RNA, 75 nt, Homo sapiens
gccgcccggagagcccgccgagaaggcgacacaccaaagaaaaaacacaccaagcagaaacggagccaaggggca

SEQ ID NO: 232000 - RNA, 103 nt, Homo sapiens
gggcagacagagaagaacagacgccgcacccccgcgacacagcggcagaggaacggaagccccgaggcaacgggagaaaccaagcaaggcgccaacgagaaaa

SEQ ID NO: 232001 - RNA, 80 nt, Homo sapiens
gccggcgggagcgcgaacgagcgacggcggaacccggggccgggacgcagcccggcggcagcaggaaagacagaacgagg

SEQ ID NO: 232002 - RNA, 76 nt, Homo sapiens
gcgacggcggagggcccgacaagggaggcgaggacggacaaaaggaaacggacgggaggccagccagcagaaggag

SEQ ID NO: 232003 - RNA, 75 nt, Homo sapiens
accccacgacagaacaaagcagaaacccaacgggaacgaagggcgcagaaaaggggagagccgccacacaggcca

SEQ ID NO: 232004 - RNA, 79 nt, Homo sapiens
ggcaccacagacgacacccagaaacaaccacacaacaccccgcacagaaaaccgggcacaggaccaaagcaaacacaga

SEQ ID NO: 232005 - RNA, 52 nt, Homo sapiens
ggaggcgagcgcgccgcccggagccgcgcacacgccgaagacccacaggaga

SEQ ID NO: 232006 - RNA, 75 nt, Homo sapiens
ccagacaaggacggagaaaggccacaggccccccgagaaggccccccccccccaaggaggcccagaaggagaacc

SEQ ID NO: 232007 - RNA, 59 nt, Homo sapiens
gagaggaggggagacacccaaaacacaccgaagccaggaagcgcccggacgcgggaccg

SEQ ID NO: 232008 - RNA, 82 nt, Homo sapiens
acaaacaaaaccggaagaggccgaagaacgccccgagccagcacaagacgggaccagcaaagcaggccagagcacagaggaa

SEQ ID NO: 232009 - RNA, 69 nt, Homo sapiens
aggcaacagacagagaagcagacggaaggagggaaaaggccaaggagccaacaaggagagcgaaagagc

SEQ ID NO: 232010 - RNA, 43 nt, Homo sapiens
ccggcgcgggaagagcacgcagcagagcaccggccagaacaag

SEQ ID NO: 232011 - RNA, 71 nt, Homo sapiens
cggagcgccacaccacgggcggacgcagcgcgccccagaagaagacacaagcacgggccacagagacgaga

SEQ ID NO: 232012 - RNA, 72 nt, Homo sapiens
ggagacagaaggaaggaaacacgaggaggcgaagcggagagaaaaggagaggggagagcaagggaaccaagc

SEQ ID NO: 232013 - RNA, 78 nt, Homo sapiens
cgcccacaggggggggccaagagcgcccagcggacacagccccggagggcagaagggaaacccaagggcgcagaagaa

SEQ ID NO: 232014 - RNA, 85 nt, Homo sapiens
ggaccagagcgccagcaaacgccacgggaggaagaacggcaaaacggaggagcagagcgaaacggaagagaaaaccgaaaaagca

SEQ ID NO: 232015 - RNA, 84 nt, Homo sapiens
cgaccaagacgggcaggggcagcgcgagcacccggaagcaccaggcccaccgacccagcgaaagaagggaggcagcgcagaaga

SEQ ID NO: 232016 - RNA, 81 nt, Homo sapiens
gcgcgcacgccccgacgcaagacgcccggcccgggcacgaaccccagcccgccgggaagcgccgccaggccccccacccag

SEQ ID NO: 232017 - RNA, 56 nt, Homo sapiens
cccccgcaacaaccgaggaccagacgcgaaggaaggaagaccaagaagcagaaacc

SEQ ID NO: 232018 - RNA, 91 nt, Homo sapiens
ccggccgagcaagcggccgcgcacgaggaggcggcggccgacggggcggcgggagcagggcacggcggaccccgggacgagagaccggccg

SEQ ID NO: 232019 - RNA, 83 nt, Homo sapiens
cgcccccccagacaagaggacaccgcggaggaaggcacgcagcacgggggcaggggccgacccagaacgccagcgccgcaagg

SEQ ID NO: 232020 - RNA, 75 nt, Homo sapiens
gcaaggcaagcacaaaccacagcaccgagagcggcccgcagaacgccagcagaaggaaaaagacaagggcagagc

SEQ ID NO: 232021 - RNA, 57 nt, Homo sapiens
cgccaacgcgcccccgaggccgagaccgggaggaagcggagaaaagagccccgaacg

SEQ ID NO: 232022 - RNA, 47 nt, Homo sapiens
cggcggacgcaagcagcgcaagaccggccaccaacaccggaaagggc

SEQ ID NO: 232023 - RNA, 56 nt, Homo sapiens
cggagagagagccgcgcacgcacagacaaggcaccagaagaaagaagagaccaagc

SEQ ID NO: 232024 - RNA, 74 nt, Homo sapiens
gcccagaagcggcgcgcacggacgcggagaggggagccgcagacccccgccgaaaagacaggaaagccagccca

SEQ ID NO: 232025 - RNA, 84 nt, Homo sapiens
gggcaggggaccccgacccaggacggaccggaaggcccagaaccaagggacaagcaaggggccaaggagccaaggaggaaaccc

SEQ ID NO: 232026 - RNA, 54 nt, Homo sapiens
ggaagagcgcggccagcaccccaacgggccaaagaaagaccccacccaaccccc

SEQ ID NO: 232027 - RNA, 41 nt, Homo sapiens
agaagcgggcggcgcgggggagagacaaaacagaggagacc

SEQ ID NO: 232028 - RNA, 74 nt, Homo sapiens
cacagcgaccgggagaacaagacgcgagggcaacaacaacagaacaccgagcgcggacccagcccccacgcgac

SEQ ID NO: 232029 - RNA, 76 nt, Homo sapiens
aaccgccacccgcggggagacacggcaaagggccaccaggaacgagcagagcgacagcgaagcgcagcaacacaag

SEQ ID NO: 232030 - RNA, 82 nt, Homo sapiens
cagggaagaccccgaaggaccaaggcagcagagaaagccgaacagaacagcacgaacaagagcaggaacaggcaacaaacga

SEQ ID NO: 232031 - RNA, 110 nt, Homo sapiens
cgcaggcgcgcgaaggaggggggcccgcaggcgcggagcgccgcccccgggaccacgagaaaggaaaaaaaccagagacgaacgaaaccccgagcgaaaaaaagccaagg

SEQ ID NO: 232032 - RNA, 41 nt, Homo sapiens
gcgaggcgggcggacaccgaggacccagggggggaccaggc

SEQ ID NO: 232033 - RNA, 87 nt, Homo sapiens
gggagggcccagcgccccccccgaccgcacggggcgcccgccgcccccgacccagcgaacgccccggcagcgcggagagcgaggggc

SEQ ID NO: 232034 - RNA, 79 nt, Homo sapiens
ggagcgagcaggcaaaaaaggaagaggccagaaaccacccaggccagagaggaccgagaggccaggaccagccagccca

SEQ ID NO: 232035 - RNA, 70 nt, Homo sapiens
cgggccaacccaaaaccagggcggcaaaacgagcgggccaggggccggcccgagaccacccccgggcgca

SEQ ID NO: 232036 - RNA, 74 nt, Homo sapiens
gggccaaggccaaggccagccggacaaaacaaagggcggaaagcaggaaggacaaaacgcaagcagaagaggga

SEQ ID NO: 232037 - RNA, 66 nt, Homo sapiens
gggcgcgccgaaagcggaaggccgaggcgcaaaaaccagacaccccacaccaccacccagacgacc

SEQ ID NO: 232038 - RNA, 85 nt, Homo sapiens
gcaaaaccaacgccggccggagcagcagcccgagggcggaaaacaccccaaaagccaaaagggaaaggaaaagaccaacaacagc

SEQ ID NO: 232039 - RNA, 80 nt, Homo sapiens
gggaacccgccgcgcgccgcgaccccaagcagcgaccccccagaaaaggacagcaaagacccaagcaaacgcgccgccag

SEQ ID NO: 232040 - RNA, 84 nt, Homo sapiens
agagagcgcggccggaggacaggcacaggaaacccagcagcgccggacccgggaagaacgggagccaagggacagccgcgaagg

SEQ ID NO: 232041 - RNA, 103 nt, Homo sapiens
ccacacagaggacaagaaggggaacaaagagggagcacacggccagaggccggcacgggaccggggcagcagagaggccgaggaagggcccagcagggcgcgc

SEQ ID NO: 232042 - RNA, 81 nt, Homo sapiens
gcggcacccgggacaaggcagacgggagcgcaaggcgccccaaggccagacaaaacaggagaaggcagagcccccccaggc

SEQ ID NO: 232043 - RNA, 79 nt, Homo sapiens
acaagcagggacacacggacaccagaagcaccacgccggaacgggccacaccgcaacaccgcccagcaacgagcggccc

SEQ ID NO: 232044 - RNA, 73 nt, Homo sapiens
gagccaccccaaccccccgaacccccaggagagccgaacaggaaccgagaccggacagaaacgaagacagaca

SEQ ID NO: 232045 - RNA, 72 nt, Homo sapiens
ggcggacccgcgcacgacccagaagggcccggaggggccgccccacgccggcgagccaggacagcccaacca

SEQ ID NO: 232046 - RNA, 81 nt, Homo sapiens
gcaggccaaggcggccaagcacaacggcggcacccacgcagacaccagccgcgccaggcccccacagggcaggaagccgcc

SEQ ID NO: 232047 - RNA, 52 nt, Homo sapiens
cggccagcccagggagccaaaacgaagagcgcgccggagcaaagggagacgg

SEQ ID NO: 232048 - RNA, 57 nt, Homo sapiens
caaggacgcgcgcacgagcaccggcggagacccacaaagaggaaaagacagaacaca

SEQ ID NO: 232049 - RNA, 37 nt, Homo sapiens
aaaccgcccgagggaccagggcccagcgcgcccgccc

SEQ ID NO: 232050 - RNA, 75 nt, Homo sapiens
gaggacggagcgccgccgccgggaccccgcccagcaggcccgcaggcccgcaggaggaaacacacgggacagcac

SEQ ID NO: 232051 - RNA, 72 nt, Homo sapiens
agagcacgcgaccagcgaggagcaacacaggagccggagaagcaagggacccccagacgaggggacgcacag

SEQ ID NO: 232052 - RNA, 73 nt, Homo sapiens
agagaaagccaagcaaaaaggcagcgagggagaagaaaacagagacggcagaaggagggggagaacggagcaa

SEQ ID NO: 232053 - RNA, 75 nt, Homo sapiens
ggcggagacgccggcgcccccccccccgccgaaagaggagccaggcaagcacaaacacagacaggccggagaaag

SEQ ID NO: 232054 - RNA, 81 nt, Homo sapiens
cggcagagagggaagggcaggcaggcgcgagaaggacgcgcagccaccccagaagcaacccaggcacccccaacaggcacc

SEQ ID NO: 232055 - RNA, 80 nt, Homo sapiens
aaagaagaggccccagcacacggccggaagaaacgcggaccgcggagggccggagagcgggacccagagcggaaacacaa

SEQ ID NO: 232056 - RNA, 78 nt, Homo sapiens
ccggaccccgacccgccgccggcccggccgcgcccgggaaagggacaagagagggcggcagaaggaacaccgagaaac

SEQ ID NO: 232057 - RNA, 79 nt, Homo sapiens
gcggacaaggcccggccgcgaggagaaggcccgggggaagaggaaaagggagaaggccaaaggcaccccagcaggaagc

SEQ ID NO: 232058 - RNA, 76 nt, Homo sapiens
cggccccacagacaccaaacacgcacccgccgggccccagccccagaacgccgagaggagggagacccaggaccaa

SEQ ID NO: 232059 - RNA, 56 nt, Homo sapiens
cccaccccacaagggcccggccccaccaaaccggggcaacaccgggcgcgcacaga

SEQ ID NO: 232060 - RNA, 66 nt, Homo sapiens
acaaaaaaaagaagccacgccaaaagacgaaagggggcgaccacagagccgagagcgccggaggac

SEQ ID NO: 232061 - RNA, 80 nt, Homo sapiens
ggaccaaagggaaaaaggggacaggaggcagcaggagaaaaggccccggccccccaggaacaaagcaaagcagcggcagg

SEQ ID NO: 232062 - RNA, 78 nt, Homo sapiens
aaaagcgagccccgaaaccaggaacgaaagaaaggagaccaaccaccaggcaggaaaggaggaaacagcaacgaacag

SEQ ID NO: 232063 - RNA, 60 nt, Homo sapiens
gcgggcgcagacggcgcgaggcgcgggcacagggcggagaacggaaaagcaccaggaagc

SEQ ID NO: 232064 - RNA, 78 nt, Homo sapiens
gggaaaaaccgaccccggaaaacaacaccagaagaaagccaacccgcaggcacagggggcgggccagcgaggaaggca

SEQ ID NO: 232065 - RNA, 83 nt, Homo sapiens
gaagagaggaggcgcgagagcgggaagaggcggcagacagcgggaaacgccgaagggaccaggcagacgggaagaacccagaa

SEQ ID NO: 232066 - RNA, 72 nt, Homo sapiens
cccgccaccaccaaaaaaccaccccccaggggacagcccaccacaagcaggccccaagcccaacagagagcc

SEQ ID NO: 232067 - RNA, 76 nt, Homo sapiens
ggcccagcccggggccggcgcagggcggaaggacaacagcccgacaaccaggaaaaggcaccagaagaaagcacga

SEQ ID NO: 232068 - RNA, 86 nt, Homo sapiens
ccggagccggcgcgaaccggcccccgcagcgggacccgggcgacgcggggaagggggacagcaagggaggaggagaagaggaggag

SEQ ID NO: 232069 - RNA, 43 nt, Homo sapiens
agccgagagaaagcaagcaaagagcggaagcgagggcaccaac

SEQ ID NO: 232070 - RNA, 87 nt, Homo sapiens
cgcaaagcggggacccagacccggagcccagggaagcagccgaccagccgcggagccgggggcagacggggcggacccagagcgacc

SEQ ID NO: 232071 - RNA, 62 nt, Homo sapiens
gcaaacggcccaccgccccgggggagaggcaaaagcagaccggaaaacccaccggcaagacc

SEQ ID NO: 232072 - RNA, 73 nt, Homo sapiens
cgacgagggcagacgccccggcaaaagaaggaacgcggccacgaaaaacgaaaaaagccgccccaaaaacaac

SEQ ID NO: 232073 - RNA, 81 nt, Homo sapiens
cgggagagcacgaagcccgacgcgcgcacccaagcagagcggacaccgaggaaaaaggagcccgggccgaggccccccagg

SEQ ID NO: 232074 - RNA, 57 nt, Homo sapiens
gacgagaacagggcacagaggccagagccggccacagccagaggcccagaaggggga

SEQ ID NO: 232075 - RNA, 50 nt, Homo sapiens
aaaagcccgcgcagaaagagcaaaagggaaagcaaggggaagggcccaag

SEQ ID NO: 232076 - RNA, 80 nt, Homo sapiens
gcaaagcgcaacccgaaggaacgggcggaccagggcgagcacgagcacccgccccaacgagaaggaagaaccgccaaaaa

SEQ ID NO: 232077 - RNA, 86 nt, Homo sapiens
agacaccacgggcagaccacggagcaccacaccccaccggccggagcacgccaagcagcccccacgcccggaaacggcgcagcccg

SEQ ID NO: 232078 - RNA, 80 nt, Homo sapiens
ggacgacagaggagccgaaccacccagcaaagagaagaaaccaagagggaagaggaaagaagaaacccagagaaagcaaa

SEQ ID NO: 232079 - RNA, 75 nt, Homo sapiens
acaagaccgacgggagaaagaaaaagggagaagaaacagaaagcaggagaggaaggcgacccaagaaacaaagga

SEQ ID NO: 232080 - RNA, 74 nt, Homo sapiens
cgggacaaaccaggggaaggcgaccggcccgaggaccgccgcacgaccaaacgcagaacccacaccccaaggcc

SEQ ID NO: 232081 - RNA, 67 nt, Homo sapiens
ggcccggcggcgggccgaggagccgggcgcaaggagcggaagagaaaggagacacggcgcgccgcag

SEQ ID NO: 232082 - RNA, 94 nt, Homo sapiens
ggcaagcggggacccagaaagagaagcggacccggaagcggaaacggggccgcccagcccgaggcggcgcagaggcggcacacaacaccgcaga

SEQ ID NO: 232083 - RNA, 76 nt, Homo sapiens
gcacggcaggacggagggcagcgcaagccacaggaacgagccacgagaagccccaacaaaacaagacccacagaga

SEQ ID NO: 232084 - RNA, 72 nt, Homo sapiens
cgaagaagcacagagaacgcgcacgcaacaacagcaggacgacgcagcacagagaggaaacgaggaaacgac

SEQ ID NO: 232085 - RNA, 56 nt, Homo sapiens
ggaaaaaaggacggcagcacacaacaaaacacaggagggggaagggaacaaaccag

SEQ ID NO: 232086 - RNA, 77 nt, Homo sapiens
acgcgcagccccgagcgccgcggacgcgcacgagggacggggaaagaacagaccggccccccaaacacccgagccca

SEQ ID NO: 232087 - RNA, 86 nt, Homo sapiens
accggaggaggggagcggggaagagagcagcaccagcagaagagggcccgaccacggcaacccagaggcgaagcaggacacccgca

SEQ ID NO: 232088 - RNA, 67 nt, Homo sapiens
gcccaacgcaaaagacagagcgaaggccggcgaggacgagcgcaaggggcagcgcacacgcgggcgc

SEQ ID NO: 232089 - RNA, 75 nt, Homo sapiens
cacgaagcacaagagagaggaaaaggagaaggccgagacaagagggccgggacagcgcgaaggacgagaagggcg

SEQ ID NO: 232090 - RNA, 82 nt, Homo sapiens
gcaccgccaggcgggcccccgcggcccgggcgagcccggagaagaggaaggacagagcgggagccaccagcgccaaagggaa

SEQ ID NO: 232091 - RNA, 71 nt, Homo sapiens
ggaaaagagggcaccgccaccggacacagggcaacaccccgacaccagcccgaagaagccgggcagaccag

SEQ ID NO: 232092 - RNA, 118 nt, Homo sapiens
cacacgcgccccccgacgagacccgcaaccggagaacgccaagcgccgccacgacaaggccccgagccccggccccaaagacccaaaacagagacaccccccagcccccgcgccccga

SEQ ID NO: 232093 - RNA, 65 nt, Homo sapiens
caacagaacccgaaacccacagagagccgggaaagaagcaaacagagggaagagaggccggaacg

SEQ ID NO: 232094 - RNA, 66 nt, Homo sapiens
agggcagcgacccgcagccacgacccgccccgggggccggacagcagaccacagcccggcaggccc

SEQ ID NO: 232095 - RNA, 60 nt, Homo sapiens
agagaagcagagcagcacaagccagaaccgaccgcgcacaggacagcaagagcagccccg

SEQ ID NO: 232096 - RNA, 73 nt, Homo sapiens
aaaaagcaagaaaggcaggaaccaggaacaggccacaggaggaacagccaacggagcccaggaggagcgacca

SEQ ID NO: 232097 - RNA, 56 nt, Homo sapiens
ccgagagcaagggaaacaccgaaagcgaggaaccgcagacgagagaaacgacacca

SEQ ID NO: 232098 - RNA, 67 nt, Homo sapiens
aaccacgacgggcggacgcagccagcacgaccaaagagagaccggcagaagacgaccagaggcacaa

SEQ ID NO: 232099 - RNA, 43 nt, Homo sapiens
gccagccccagccccggagaggagcagcgagcagaggacacag

SEQ ID NO: 232100 - RNA, 79 nt, Homo sapiens
agcgggaccagccaagacaagagagcggcgaggccaacaggcaagcacaaagcagggcacagaagccccgacaaaagag

SEQ ID NO: 232101 - RNA, 55 nt, Homo sapiens
caagaacaggaacagaagaacaaacgaggcaccaggccccaaaggcaacaaggga

SEQ ID NO: 232102 - RNA, 82 nt, Homo sapiens
gggagcggggccgaaacgccgggaagagagaccaagcgagacggccggccgccacgggggccgagcggggggagagcaagcg

SEQ ID NO: 232103 - RNA, 56 nt, Homo sapiens
gcgcgcgggaagcagcaccaagcacggccaacgccggcacaggccccaaaagcacg

SEQ ID NO: 232104 - RNA, 73 nt, Homo sapiens
gcagcgagaagaaaaagaagagagagacacggacaagagaagacaaaagcacccgagaacccaaacacaagga

SEQ ID NO: 232105 - RNA, 54 nt, Homo sapiens
gaggagaaacaaggaaaggccacaacagcaaggaacgggcgcaccacgccaccc

SEQ ID NO: 232106 - RNA, 81 nt, Homo sapiens
gggacaagaggacaacgcagaaagaacacacacaggaggggggaagacagggcccagcaccacaggacgggccgggaagcc

SEQ ID NO: 232107 - RNA, 77 nt, Homo sapiens
aaagaaccaagaaaaccgaagaccacaagccacacccagaaccagcagcccgcagaagaaaggcaaacccaaggccc

SEQ ID NO: 232108 - RNA, 39 nt, Homo sapiens
gcgaggacagaaggaagcccgagcacacggaaacccacc

SEQ ID NO: 232109 - RNA, 78 nt, Homo sapiens
caaggacaaaggagacaacagaaaagccaggaagggaagagaaaacccagggagacagcaccccagcgacgcggccag

SEQ ID NO: 232110 - RNA, 67 nt, Homo sapiens
aaaccaaagaggcgacacggcaagagagcccaaggccgcaacagcaaagaaaccccaaagccagcaa

SEQ ID NO: 232111 - RNA, 73 nt, Homo sapiens
cagggccgcggcccgcgccgaccaaacccccaaaggccccccccaggcacagccccccagagaggaggagcac

SEQ ID NO: 232112 - RNA, 41 nt, Homo sapiens
gccaggacgcgcccggagaagggaaagcaacggcgcaagcg

SEQ ID NO: 232113 - RNA, 71 nt, Homo sapiens
gaggaagcccacacacgccagcagaccaccccgggagggagaaccacagaacggagcacagaaaccagagg

SEQ ID NO: 232114 - RNA, 67 nt, Homo sapiens
cccgaagaccggggaaaaggcgccgccaggccgggacagggggggcaaaagaacagagcaagcaaaa

SEQ ID NO: 232115 - RNA, 78 nt, Homo sapiens
cggacgggacaagacagcagccggcccgcccgagaggccgcaaaggccggcagacgcaccaggggaccccccgagcgg

SEQ ID NO: 232116 - RNA, 54 nt, Homo sapiens
agcagcggagggggaggacgcaggacgcacaggagagcaaagagaaaggcaaga

SEQ ID NO: 232117 - RNA, 39 nt, Homo sapiens
ccggaaggccaccccgcagaccccaaaggcacacggccc

SEQ ID NO: 232118 - RNA, 72 nt, Homo sapiens
ggcaaaggagagcacaaccacgcagggaagcccaggggcagccagccagcaggcaacaggcccagaccaggc

SEQ ID NO: 232119 - RNA, 65 nt, Homo sapiens
ccagcccagagaggcccacaaccaagccacaaaagacacgccacaaccgggccgagggccaggca

SEQ ID NO: 232120 - RNA, 123 nt, Homo sapiens
cacagccccggccccggcgcaggcgcccgacgcccgggcagagggagccggaagagcgagcccgggaggaaaagacgagcaggggagaaacaagaacgagcaaaggaaaagaaccaaaaggcg

SEQ ID NO: 232121 - RNA, 81 nt, Homo sapiens
ccgcgcagcccgcgccgcccgcccggccgccgccgcccgcccgcccgacggagacgagaccgacgcaggcccaaagaacca

SEQ ID NO: 232122 - RNA, 66 nt, Homo sapiens
ccgccgcgcccgcccgacccgccaccgccaggccagggccgaaccacagcagcgcagcaagaaggg

SEQ ID NO: 232123 - RNA, 98 nt, Homo sapiens
gcggaggcgggggcgcgcccaacgcaccgaaagacggcggaggccgaccaggcgcaaaaaccagacaccccacaccaccacccagacgaccaaaaggg

SEQ ID NO: 232124 - RNA, 58 nt, Homo sapiens
gacggggaggcgcggccaacggggccacaagggcacacaggccccgagaaccaagaga

SEQ ID NO: 232125 - RNA, 74 nt, Homo sapiens
gaggaaccgaacgagcggagaccggaaacgagagaaacgaagacgaagaaacagccgcacacagaagaaaacga

SEQ ID NO: 232126 - RNA, 82 nt, Homo sapiens
cgaacacaaaaggcgccgaagcaggacccgaagccaaaccaggaggaacagcagagaacacaacacaggacaagcaagccca

SEQ ID NO: 232127 - RNA, 107 nt, Homo sapiens
cagcccagcaggaccggccccaagaggaagggagcggcggccgcgccgcccaaggcgcaacggggggccccgagccccggccccaaagacccaaaacagagacaccc

SEQ ID NO: 232128 - RNA, 83 nt, Homo sapiens
cccaaacaacgccgccccccccagaaaccccacaaccacacaccaccagaaagcaagcgcgaagggcagcaggaggggggaag

SEQ ID NO: 232129 - RNA, 80 nt, Homo sapiens
aggcccacacacgcgggcacacgaccagccaaaacaaccccgacaagggcagcacgaccgacagggccggcgggggccgg

SEQ ID NO: 232130 - RNA, 67 nt, Homo sapiens
caaaggaccacgcgccacagagcgggcgcacaacggaaaaacgacgcaagagagacggggcaccaga

SEQ ID NO: 232131 - RNA, 81 nt, Homo sapiens
aaaggaggaggaaccggagaccccgaaaacggaagcgcagggagaaggaagaggggaaaagaagccccccagccgaggaga

SEQ ID NO: 232132 - RNA, 70 nt, Homo sapiens
cgacgccaggcagcgcccccaaacgaaaagggagaggacaaaacgcaccacccgacacaaaaaccccaaa

SEQ ID NO: 232133 - RNA, 60 nt, Homo sapiens
gaccggagcaccggcagacccggggaccgggaagaacaacaagccaccccccgccagcgc

SEQ ID NO: 232134 - RNA, 88 nt, Homo sapiens
aaggacggccccggggagacggacgcgggcaacagcgagggcaaagagcggggcccagggaaaaaaacagcgggagccacggaagggc

SEQ ID NO: 232135 - RNA, 80 nt, Homo sapiens
gagaagccgaaacacccacacagcaacaaacaggacagaaagaaggaaaaaacgcaagaaggaagaaagagagaaagcaa

SEQ ID NO: 232136 - RNA, 81 nt, Homo sapiens
ggaggaagcgaccggccaacggccacccccaagccaagcgcaacaggagccacggcaggaagcacagaacccgggccgcca

SEQ ID NO: 232137 - RNA, 86 nt, Homo sapiens
ccgcggcacaccggagagcgacgggacccccccgcagaagaggcaggagaggagaaccaaggaagagccagacccaggagcccagg

SEQ ID NO: 232138 - RNA, 70 nt, Homo sapiens
ccgaaggagacagcccagaagaacgaggccccgcgcaggggaaaccgcccccaaaggccagaggacgaca

SEQ ID NO: 232139 - RNA, 79 nt, Homo sapiens
ccccagggagccgaagccaagggacggccaccccagacgagcgaaggacgcgcggcggcccccagaggccaagaagagg

SEQ ID NO: 232140 - RNA, 66 nt, Homo sapiens
ggcgaaccggccccccacagccacgcaggagaacaccaggcgaggggcagccggggccccaaggag

SEQ ID NO: 232141 - RNA, 82 nt, Homo sapiens
gaggagagaggaacccgaagaagaaaggacgacagccagagaggggagccgccaccaaaagcagacggaaaacccacgggga

SEQ ID NO: 232142 - RNA, 76 nt, Homo sapiens
cagacccagaacaccaaagcgcacacgccagcccgcgaagaggcgaaaccccgcccgaaggcggaccgacacgacg

SEQ ID NO: 232143 - RNA, 55 nt, Homo sapiens
aaaagggaggggagggacgaaaaagcggcccaaaagaaaggccagggaacgggag

SEQ ID NO: 232144 - RNA, 71 nt, Homo sapiens
gagccgcggccggcgggccagcccgggcccccagcggcaaaggcagacgacccgaacacccacggcccacc

SEQ ID NO: 232145 - RNA, 69 nt, Homo sapiens
ccagcggccgcagcaagcgaggcaagaaagaaaacggggggcaaaccgagggacacccagcgagcacaa

SEQ ID NO: 232146 - RNA, 71 nt, Homo sapiens
gcaaggaggcaccgcggcagacgggaccacgaggcaacgccccagcgagcaggagcacgaaggggagaaaa

SEQ ID NO: 232147 - RNA, 81 nt, Homo sapiens
aagaggacaagagacgacacgcaagcaggcaaccgaaacaggggaggacgcgagcggaagagaagcaaaaagacaaggagg

SEQ ID NO: 232148 - RNA, 79 nt, Homo sapiens
gaagcgggaggggcgaaacgaggaggagaaacgcggccgggccggaacagcgccgagcgggccaaaacagagggaagca

SEQ ID NO: 232149 - RNA, 59 nt, Homo sapiens
acgcgggcgcaaacccgcaaggggggcagacagcgcgggagccaggaaacgcagacccc

SEQ ID NO: 232150 - RNA, 75 nt, Homo sapiens
gcgaagacagcgaccccagacgccgcaacggcggacagggagcagaagaggggaagaaagagacccgcgggcccc

SEQ ID NO: 232151 - RNA, 71 nt, Homo sapiens
ccggaaagcccgccacagcggcccggccccccggacagacgccgacgcccaggcagaaagccaagagcaca

SEQ ID NO: 232152 - RNA, 106 nt, Homo sapiens
gaggaggaagggcaggacgagggcggcgcgggagcagcacccacagccaaggcgggagccacggggaagcgcgagggccgcccggacggagcagccgggaccccgg

SEQ ID NO: 232153 - RNA, 75 nt, Homo sapiens
acagggcaagacaagaaaaacacaaccagagcgccaagaagcaccacaaagaaagcaggacggggagcaacacag

SEQ ID NO: 232154 - RNA, 85 nt, Homo sapiens
cgagcgacgggagccgggacgagcgagcgccggggccagcggagccggagccgccgggacaggccgcaaccaggaggaaggaaga

SEQ ID NO: 232155 - RNA, 54 nt, Homo sapiens
aaccccagcggggaaaacaaagggggacgaccaccagccaggccggggacaaac

SEQ ID NO: 232156 - RNA, 70 nt, Homo sapiens
acgaccgcgcccagaagcgaagggagagcgccagagaagggaagaagagagggcgaaggaggccacacag

SEQ ID NO: 232157 - RNA, 40 nt, Homo sapiens
gaaacccaaccaagaaggcccaggcggccgaaccccaacc

SEQ ID NO: 232158 - RNA, 65 nt, Homo sapiens
aaacaaggcaacagaaagagcaacagcagggcaacaggccccgggaccaaggacacgcagacccg

SEQ ID NO: 232159 - RNA, 58 nt, Homo sapiens
cgggaacgcagcgcgcaggaccacggggaaagccaagaaaagggacgcggcacagaac

SEQ ID NO: 232160 - RNA, 101 nt, Homo sapiens
agcgacacacagggacccacggccagagcccggagcaggaaaaacacagagacagacggcggcagacccaaccgcgagcaccgcacacccaccaggagggg

SEQ ID NO: 232161 - RNA, 73 nt, Homo sapiens
ggagaaccaacggcccgaaagaggagggccagagaaaaacccaagacgacacgcgcgcagaaaccaagccgaa

SEQ ID NO: 232162 - RNA, 76 nt, Homo sapiens
ggagccagcagaaggagggacgagaaaagcgacgaggagcaaccagagaaaaacggacagccccaggaggaaggcg

SEQ ID NO: 232163 - RNA, 80 nt, Homo sapiens
cgacgcacagcgaccaccaacagaccgaagcacccgagggacccgaggagcccaccaagccgaccgcaggcaagggccgg

SEQ ID NO: 232164 - RNA, 71 nt, Homo sapiens
cggaggaccgacaggagagaacacaacagacaacacggggaagagacgagaccacaaaggacaagaacaag

SEQ ID NO: 232165 - RNA, 57 nt, Homo sapiens
ggagaccagacggggaggggcccagcagggccagcggagagcggcgggacggcagca

SEQ ID NO: 232166 - RNA, 78 nt, Homo sapiens
gcccggcgcgaccccaacccagccccagggccggggaggcacaagaggcgaaacagaagaacaagaacccaggaacgc

SEQ ID NO: 232167 - RNA, 75 nt, Homo sapiens
gacaccaagagcggaccgggccccggaaggaggcagaaagggagccccaagagagagggccaagccaaccggcca

SEQ ID NO: 232168 - RNA, 68 nt, Homo sapiens
ggccgacaacccaccagacaccgaaacccccaagcacaaacggcagaacgaagcccccggcaccaaga

SEQ ID NO: 232169 - RNA, 77 nt, Homo sapiens
ggaggggcggacccaggccgagcggcacacccccgacccacgcacccgcagccagcgccgcccggcacacaaccaga

SEQ ID NO: 232170 - RNA, 77 nt, Homo sapiens
ccccagagaaagagggcacacaggaagaggacaccagcccgggagaagaggcaacacccgagcggggcccgaaaacg

SEQ ID NO: 232171 - RNA, 42 nt, Homo sapiens
gagaagaaagggagaagcgaggaggaagccccaacagaagag

SEQ ID NO: 232172 - RNA, 99 nt, Homo sapiens
ggaagaggcgaacaaggagaaccagcagccggacaagagaacaccaaacaccaggaggagggcgacgcgcaagggaaaagacgcgagacgaggaggaga

SEQ ID NO: 232173 - RNA, 69 nt, Homo sapiens
gaaccggggagcgacagaagacaaacagcaaggggcaaaggaggccaccggcgagccgcggagaaaggc

SEQ ID NO: 232174 - RNA, 69 nt, Homo sapiens
caccaggccaagccaaccagccagcaggccgggcgggggccaaagccgacagaaaaggaagagacccag

SEQ ID NO: 232175 - RNA, 70 nt, Homo sapiens
gcagacggcgagaccccgcacaggggcaacagaaagccacaaccggacaagaaaaaaaagaaaacgaaag

SEQ ID NO: 232176 - RNA, 54 nt, Homo sapiens
gagcaggacgcacagaaagaccggccaaggaaacacaagcgagaagaacgagca

SEQ ID NO: 232177 - RNA, 97 nt, Homo sapiens
ggacggaccgggccaggaaagagacgcaaggggaccggaagacacagcaacgagccaccgaggcccaaaccaggcccgcaacaggcgcggcagacag

SEQ ID NO: 232178 - RNA, 77 nt, Homo sapiens
gagcagaggagacaaaccggagaaggagccaagaaagagaaggccggcagaggccgcccagacagagcacagggagc

SEQ ID NO: 232179 - RNA, 65 nt, Homo sapiens
ggacgcgcagcggcacaagaaagcacaagaggaagagaacgcccaagaagagaagacccggacgc

SEQ ID NO: 232180 - RNA, 76 nt, Homo sapiens
cgcgccacccgggaacgaagggaaaacggcgacagcggggcagcaggggcgggccaagccgcccgccaaccggcag

SEQ ID NO: 232181 - RNA, 64 nt, Homo sapiens
gggaccaccggcgacagcagaaaggaacagaaagaacagccaaaagagaaagaccgggcgagcc

SEQ ID NO: 232182 - RNA, 79 nt, Homo sapiens
gcgggcccggcacaccaggccacgggcccggccaggccccaccgccacaagcaggggaacaccgccaaccccaagggcc

SEQ ID NO: 232183 - RNA, 72 nt, Homo sapiens
gccgcgacagaaaaccggaaggccaaaacaagggaagcaaaggaaacggagagacagaagaaggagaagcga

SEQ ID NO: 232184 - RNA, 76 nt, Homo sapiens
accgcaacagaacggacccggggaccccacaccacaaaccgaggaaagaagggacagcagaaaacgcagagggagc

SEQ ID NO: 232185 - RNA, 82 nt, Homo sapiens
gcagaagccagggacccaaacccacaggcgaaaccaaggcgcaagacaaggcccgcgggccaagacaaacaccacacaagac

SEQ ID NO: 232186 - RNA, 71 nt, Homo sapiens
acaagcgaacaggacggaaaacgcaggcacggaagcaggcccaggaggccgcaaccgaccacaccaaagca

SEQ ID NO: 232187 - RNA, 60 nt, Homo sapiens
gcgcgggggacgggagcggcagccccggaagcaaggcagccgccaggagaagcggcagga

SEQ ID NO: 232188 - RNA, 79 nt, Homo sapiens
aggagccaagaccacagcagcacccaggccagcgaagacggaggaccacaccggaagccagcaaagaaaacgccagcgg

SEQ ID NO: 232189 - RNA, 75 nt, Homo sapiens
aacaggcgaaggagcggggccggcacgccaaaaaagaagacaccaaagaacaagacaaaaacagaaggcaagaac

SEQ ID NO: 232190 - RNA, 76 nt, Homo sapiens
ggagaagcaggcgcggcggacggcccccgcagcccaccgcacgaaaacggggacggacccaggccaggaaagaaag

SEQ ID NO: 232191 - RNA, 67 nt, Homo sapiens
aaccccaaaccccaacaagacgacacaagcccacacaaggaccggacccaagcagaaagaaggaccc

SEQ ID NO: 232192 - RNA, 67 nt, Homo sapiens
ccacacaagaaaagcgaaccacaccagcaagacgacgaagaacagcaggggcccgagaaaaagaagc

SEQ ID NO: 232193 - RNA, 73 nt, Homo sapiens
gagccgcagccagcggggacgagcaaaaagaaaagcccaccgaagggggaaagagacacagggaggaaccaag

SEQ ID NO: 232194 - RNA, 63 nt, Homo sapiens
cggccacgaggcaggaaggcaagggggaagccgcgcgagcgaggcggacggggagagaagacc

SEQ ID NO: 232195 - RNA, 71 nt, Homo sapiens
agaagaagaggaccggagagagcaccgacagaacacaagaccacggaagaccaggccacacaagcacaaga

SEQ ID NO: 232196 - RNA, 57 nt, Homo sapiens
gaagggcgggaccaacagggagccagagcaggaagacgcgaaaccagaacgcacaac

SEQ ID NO: 232197 - RNA, 91 nt, Homo sapiens
ccgcgggcggccgacgcagcagaggcgacgcgagaggcggcagccagcggcggcgaccaggagaaagacagcaaagaaaaggagaagaaag

SEQ ID NO: 232198 - RNA, 55 nt, Homo sapiens
gagcccggccaccacacccagcggcaagaggcacggagcccaggcgccggaaccc

SEQ ID NO: 232199 - RNA, 62 nt, Homo sapiens
cgcagccgagaacgccgcgcgcgcacccaacagcgaccgagcggcaccgggaaaacgcagag

SEQ ID NO: 232200 - RNA, 76 nt, Homo sapiens
agcccgcagcagccaaaaagcggcgcccgaaggccagggggcaagccaaaggcaaaggacggggaaggacaacgga

SEQ ID NO: 232201 - RNA, 68 nt, Homo sapiens
aaacacgacgggggaaaaccagcaaaagcacagccaacccagaggcaagagaagcaaccaagcaacag

SEQ ID NO: 232202 - RNA, 84 nt, Homo sapiens
ccaggacgcacgaccccacccagggcggccaggaaaaagcccaggaccaacaaccgaaaagaggagaaaagcagcacgggacag

SEQ ID NO: 232203 - RNA, 76 nt, Homo sapiens
cagccgaagaggggcggcacccccgcagggccggaaagagggcgggcccgcacggagcgcggggagaaaccggaga

SEQ ID NO: 232204 - RNA, 74 nt, Homo sapiens
aagcccgagggcagcgcccacggccgcgaccggccggcaacgccaccccacgaaaaagcacagaaaagaaaaaa

SEQ ID NO: 232205 - RNA, 66 nt, Homo sapiens
cggccgcgcggcccgcaggggacaagaacccaagaaacaggaaaaaacccaaaacaccaaaaggac

SEQ ID NO: 232206 - RNA, 73 nt, Homo sapiens
cggcgcgccccgcccggaccgcgcagaaccagggcggcggccagcgccacgcggggacagccgcgccgcgcgc

SEQ ID NO: 232207 - RNA, 70 nt, Homo sapiens
gcgacaagaaggaccagagaaaaggcacagaacaaaaccagagacgaccacaagaacccacaggacaagg

SEQ ID NO: 232208 - RNA, 75 nt, Homo sapiens
cgaggcaccaagccggccagcaagacccgagcccaggaaagcccgaaaaggaccagcgaagcaagcacagggagg

SEQ ID NO: 232209 - RNA, 80 nt, Homo sapiens
gaggcaagagggccaccaagcagggacccggaaacgggaaagagggcagagggccagacccccaacaaagccaaaggaga

SEQ ID NO: 232210 - RNA, 74 nt, Homo sapiens
ggaaaccgcaccgcccggagagaggacagagacgaggcgggcccaagggcaccaccggcacccacaaagaggca

SEQ ID NO: 232211 - RNA, 67 nt, Homo sapiens
gaaggaccaagaaccaggccaagaagcgagagaagaaaaacagaaaaagccaagacagaaacaagaa

SEQ ID NO: 232212 - RNA, 84 nt, Homo sapiens
agcacgaccccaggagcgccaccaccccagccagccagcaggccccaacagcggcgcgagggcggcccgcagaagagcacagaa

SEQ ID NO: 232213 - RNA, 80 nt, Homo sapiens
gcaacagaagagaggccagccgggaggacacacaagcggccggacgaaggaagagacccgaagcgaaaccccgaccgaca

SEQ ID NO: 232214 - RNA, 69 nt, Homo sapiens
agcgccacgcgcggaaggcagcgcccagcagcgcagggcagagacaggcaacagacggcaacgaaaggc

SEQ ID NO: 232215 - RNA, 75 nt, Homo sapiens
aagggcccggggcaaagcacagacaggagaaagaagacagccacagaaagcaacaagccaaccaaaggaagacga

SEQ ID NO: 232216 - RNA, 69 nt, Homo sapiens
ccgccgccgccccgccagcgccagacggacgaggcggcggagaacaagcggcagagcgcaaaagacaac

SEQ ID NO: 232217 - RNA, 75 nt, Homo sapiens
cgacggggaggcgcggccaacggggccacaagcacgaaacaaagcaggacaaggcggacccaggcgcccggaagg

SEQ ID NO: 232218 - RNA, 73 nt, Homo sapiens
caggcacccgagaaaggggacgcacgcaggaacagaagacacagcagagagcaggccaaggcagaccaccgga

SEQ ID NO: 232219 - RNA, 77 nt, Homo sapiens
agccccaagaaaacggaagggagaggagcggccgccgcccaggcgaagggggcaacccagccacgcaacccgccccc

SEQ ID NO: 232220 - RNA, 80 nt, Homo sapiens
agaaaaaaaaagcaccaacacaaaaagcgcaggggagcggagcaagaaaccaagacaaacaaaagacgcccccgagagga

SEQ ID NO: 232221 - RNA, 72 nt, Homo sapiens
ccggagcggaggacaggagaccgaacacgaaccagacccagggggcagaaggcaggcaaggacaccacccac

SEQ ID NO: 232222 - RNA, 72 nt, Homo sapiens
cccgcgcgaaccaagccaacaggagccccgcagacaaaccaaacaagcaaaaagaaagaagaaccacacaac

SEQ ID NO: 232223 - RNA, 76 nt, Homo sapiens
gcaaaacaaaaagagcagaggagacaaaccggagaaggagccaagaaagagaagggcagagacaggcaacagacgg

SEQ ID NO: 232224 - RNA, 58 nt, Homo sapiens
cagcaagagggcagccgccgacccccccacaaggccaagaacaagcagaggccagcac

SEQ ID NO: 232225 - RNA, 79 nt, Homo sapiens
gcccacaccgggcagagacaaacaggagagacagagccggagaggaacaaaaaacgccagcgagacagccaggaggcag

SEQ ID NO: 232226 - RNA, 73 nt, Homo sapiens
ggaggacgcccacagccacccaaagaaacacaccagcggagagaccggacgacacgggcagagacagcagggc

SEQ ID NO: 232227 - RNA, 86 nt, Homo sapiens
aacggcaagcgagagccgaagagggaccaggaccggagacggggacgacaccggagaaggcagcgacgacagcgacagcgagaaga

SEQ ID NO: 232228 - RNA, 65 nt, Homo sapiens
ggggaggaagaggaggaggaagaagaagggagaaaacgacgggcaagaggaaacgaaagaagaga

SEQ ID NO: 232229 - RNA, 72 nt, Homo sapiens
ggggccgccgaccaacacccgaggcggacgcagagacaggagcagagcgaggcagggccccagagacacaag

SEQ ID NO: 232230 - RNA, 59 nt, Homo sapiens
accacgcaaacagggaaacagcacaaaagaccccacagcgagagagagcaaacgaaaca

SEQ ID NO: 232231 - RNA, 85 nt, Homo sapiens
gaaaaggaaggggcgaacaggaggagcggcagggcagaaggccaggcgcggccaggcacggggaaaaagcgccagaaggcggccc

SEQ ID NO: 232232 - RNA, 65 nt, Homo sapiens
gcacagagcaagcggacaaaagaagaggggcgaggaggcgggccaggaaaggagggaaaaccagc

SEQ ID NO: 232233 - RNA, 70 nt, Homo sapiens
gaaagcagccccgcaggagaagcgaaaagaaacccaagaagacaagaagcaccagaagcggagcagagga

SEQ ID NO: 232234 - RNA, 75 nt, Homo sapiens
ggaacaacacccgcagaagcgcaaaagggaagacgagggcaggaaaagaaggaggccagcgggacacacaaagaa

SEQ ID NO: 232235 - RNA, 74 nt, Homo sapiens
gaggaagaaccgcacaaagacggcgccggagccaggacgcagaggacagaaagccaagaggccagacagaaacc

SEQ ID NO: 232236 - RNA, 92 nt, Homo sapiens
gcgggcgccaaggggagcagaaggaccggacacagggcgggacgaccccacaacccgagcgcccaagccccccgcgcagagggagaaggcac

SEQ ID NO: 232237 - RNA, 67 nt, Homo sapiens
gagaagggccggaaaccgaaacggggaaaaaaaccgcagggcggagagaccagggaccccaccacgc

SEQ ID NO: 232238 - RNA, 45 nt, Homo sapiens
cccaaacaggacgaaggcggcgaagagacacaggacagcggaagc

SEQ ID NO: 232239 - RNA, 74 nt, Homo sapiens
ggccgaaaacacagaagacaagggaggcgaggacggacaaaaggaaacggacgggaggccagccagcagaagga

SEQ ID NO: 232240 - RNA, 81 nt, Homo sapiens
gcccccgccgccgcgccggagcagcccgccacgccggggccagccagaggagcagccaagaagccccccaggggcccgcag

SEQ ID NO: 232241 - RNA, 68 nt, Homo sapiens
agaaggaccaagaaccagggcagggcaaagacgggcagaggacagcaggaaaggcagaggggagggaa

SEQ ID NO: 232242 - RNA, 63 nt, Homo sapiens
cacaaacccagcaagaacagcagaccaggcagcagccgcagcaggcagacaggagcgcgaaag

SEQ ID NO: 232243 - RNA, 72 nt, Homo sapiens
agacaccaacgcaaaacaaaggagcagccccaaacaggagaaggaagagaggaaagagcggcaaagcagacc

SEQ ID NO: 232244 - RNA, 77 nt, Homo sapiens
aagaggcggcccaggagcggcggcgaagaaggaggcaggcacggcgggccggagaaggggcgacgcgggcacccccc

SEQ ID NO: 232245 - RNA, 64 nt, Homo sapiens
ccccggcggagaagaagcgcggccgcaccggccaagccgagagacacccgaagacagcaaacaa

SEQ ID NO: 232246 - RNA, 132 nt, Homo sapiens
aacggcccaccggcagcgaccgagagccgccagaggccgggacagcgccggggccccaccgcggccccacagccggaggcaaaagaaagagacgcgggcaagacaagggcagcagggcgacccccaaggccc

SEQ ID NO: 232247 - RNA, 76 nt, Homo sapiens
gaaaaccggcccccaacgacaaaagaaaaagcggggaaggggggcaaaaaaaagaagcaagcgaagcaccgagcac

SEQ ID NO: 232248 - RNA, 59 nt, Homo sapiens
gagcgccaggaacagggcacaaaggcccaggcggccgagccgcgagaacaacggagacg

SEQ ID NO: 232249 - RNA, 75 nt, Homo sapiens
ggcgcgcgaaccgagcgcaagggaagaaaagaagacagccagagacagggcagggcagcagcacgaccgacccag

SEQ ID NO: 232250 - RNA, 83 nt, Homo sapiens
ggagaccagcgcaccagaaggagcacggccagaacacccagcggaccaggcaacagccgcggacagacgcaagaccaacaggg

SEQ ID NO: 232251 - RNA, 77 nt, Homo sapiens
caggagcagcgcacagcggggaccacccacgacccgagcgagagaaggacggagaagcgaaagccagaccggcaaga

SEQ ID NO: 232252 - RNA, 79 nt, Homo sapiens
cccggacagccgccacagcacacccaaccacgcccgccccccagcaccacagaccggaggaccagggaggagcaggcaa

SEQ ID NO: 232253 - RNA, 80 nt, Homo sapiens
acgcaggaaaacagagaaccaagcggcaaagcaccgaacgaggaggaacccgcacagacaagacagcaacgcaggaaaag

SEQ ID NO: 232254 - RNA, 63 nt, Homo sapiens
ccaaaaagaaccgcagacaggcccaagaaacagaacaagaaaaagaagaggaaaggacaggag

SEQ ID NO: 232255 - RNA, 54 nt, Homo sapiens
gccccgacgcagccgggaaggaagacacaagagaagcgcaagaaaacacaaaag

SEQ ID NO: 232256 - RNA, 87 nt, Homo sapiens
agccagcccagcccgccccggcgccccaaccccggcagccccagaagagaaaaagccaacagaagagccgaaaacagacacgaccac

SEQ ID NO: 232257 - RNA, 72 nt, Homo sapiens
cacccacaaggcacaacaggaagaaaagacggggaggcaaacgggcagcggagaggcaggacccgcgcgggg

SEQ ID NO: 232258 - RNA, 87 nt, Homo sapiens
gcagcgccgcgccggggccgagcgccgccccccgccgcccgaaaacccggaggccccgcacaggaaaagaaggaggccagcgggaca

SEQ ID NO: 232259 - RNA, 81 nt, Homo sapiens
ccgccgagggaacgggcaagaggcagacacagccggagaacaccgggccccacaggcccccccgaggcacccaggggaaaa

SEQ ID NO: 232260 - RNA, 77 nt, Homo sapiens
ccagcgccgccgacaggggccgggcgcccgagccgaagaagaagaggagggggagaaggacccagaagccgaccgcc

SEQ ID NO: 232261 - RNA, 67 nt, Homo sapiens
gccccaaagcgcgggaacagagaaagacagggagcagagagaaagccgaagaaaaaacggagagaga

SEQ ID NO: 232262 - RNA, 63 nt, Homo sapiens
cgcaaggggagcacggggccggaccagccccgaaacacgggggaaaaccagcaagaccgcaag

SEQ ID NO: 232263 - RNA, 66 nt, Homo sapiens
gggcaggacaggggagagaagacagaggaaacagcaagcgaagcgacaggaccaacacaggacaga

SEQ ID NO: 232264 - RNA, 72 nt, Homo sapiens
cggcccgccccgcgccccgcagggccagagagaaagagcagaaacgaaccagaagaagaacggaacacaggc

SEQ ID NO: 232265 - RNA, 88 nt, Homo sapiens
gcggccccggcccggcccccgcccggccccggcgcaggcagcagaagcacagagggaaggagaaggagacacagaaggagcagcagga

SEQ ID NO: 232266 - RNA, 86 nt, Homo sapiens
agacagcgaggagcagcagcagcccagcaggcgcggcccgccaggaagaagacggcacgggacccccagcacaggcagcaggccgg

SEQ ID NO: 232267 - RNA, 56 nt, Homo sapiens
gcccggaagaggcgaaacggaggccaggagcacagaaacacccaccaggagccaag

SEQ ID NO: 232268 - RNA, 76 nt, Homo sapiens
cagaaagccggcgggaggggggcaaggagaagaccgccaagcggaagcagaagggacaggcccccagaagaaggga

SEQ ID NO: 232269 - RNA, 47 nt, Homo sapiens
acggcccggaaaaagaccaccggaccccggggaggcaagcagggggg

SEQ ID NO: 232270 - RNA, 55 nt, Homo sapiens
agccgagaaagggaggcggaacaggaaagcgagaggcaagacaaacaaggacaga

SEQ ID NO: 232271 - RNA, 79 nt, Homo sapiens
caagaggccaaccaaccggagagacgcagccaaacaggaagcaaacagcgagcgccccgaggccagacccgcaagcgac

SEQ ID NO: 232272 - RNA, 86 nt, Homo sapiens
gagcgcgcacaacgcaggaccggcgccgaaggcccgccagcacccagaagaaccgaaaggccaaggaaaaagaaagagagagacag

SEQ ID NO: 232273 - RNA, 68 nt, Homo sapiens
cccgacacaagacgaaggagagcgaagcaagggaccgaagaagccaaaggacccaaaagggccaggac

SEQ ID NO: 232274 - RNA, 71 nt, Homo sapiens
ggagcggaaaacccgaaagagggccgaggcagacaagggaaaggccgcgcaggggaccaccccagacggac

SEQ ID NO: 232275 - RNA, 81 nt, Homo sapiens
gagagaaaggcggaagacgagacagccgacccaaaccagaagacggccaggaaggggggccgagccagacaacaagaacgg

SEQ ID NO: 232276 - RNA, 76 nt, Homo sapiens
acccaaggcagccggaaacgagaaaaccagacgagagacagaagacgaaagggcaagaaagagagcacggacaaga

SEQ ID NO: 232277 - RNA, 38 nt, Homo sapiens
gccaaccggacggccgccgacaggaaagcagaggaaca

SEQ ID NO: 232278 - RNA, 112 nt, Homo sapiens
ggaccacacgaccgcgagcccaacaccggaaggcaggagacaagccggcgacgcaaagcgaaccaacgggcccaaccagaggaagcaaaaagcagaggcagagaagaggaaa

SEQ ID NO: 232279 - RNA, 83 nt, Homo sapiens
aggaggaggacaccaaacacacgggaccgaaacaggccggggcacagcacagcgccggcgcaagagcagggcagaacgggagc

SEQ ID NO: 232280 - RNA, 73 nt, Homo sapiens
aaccaccgaaaccacacaggacccggcgagcgaacaacaacccaaccaacgggaaaagcaggacaggagaaaa

SEQ ID NO: 232281 - RNA, 74 nt, Homo sapiens
gaggcggaggaggaaggaagagagggagagaggccgaacaaagcggagagaaaggagggaggaagaggcgcggc

SEQ ID NO: 232282 - RNA, 85 nt, Homo sapiens
gccggagcgcgaaggccgggacccggccccggcccacaggggggggcaaacccgagagaacggaacagaccggccccccaaacac

SEQ ID NO: 232283 - RNA, 82 nt, Homo sapiens
ggcgggcggagagggggagcgggagccccgaggccgaggaaaggaaaagcgggagccaggagccgccgaagccacacaaaac

SEQ ID NO: 232284 - RNA, 69 nt, Homo sapiens
gaacgagaaaaggaacccagccaagccaacaacagaacaccaaccaggcacgcgggggagggacaacac

SEQ ID NO: 232285 - RNA, 72 nt, Homo sapiens
aaccagagagcccaacacagaaacaaagaaggaaaaaacccaggaccaaaacagagaaaggagaccaagcga

SEQ ID NO: 232286 - RNA, 71 nt, Homo sapiens
acacgagaccggacaccccagaggacacggccacaggacagagcgggagccaccagcgccaaagggaagcc

SEQ ID NO: 232287 - RNA, 55 nt, Homo sapiens
acacacagcgaccgggagcacaccacaggcaaggaacagaggagcggaaacgcag

SEQ ID NO: 232288 - RNA, 99 nt, Homo sapiens
agagccaaagaagagggaaaggaacaaccaaacccgaagagggagagacggaaggcagcacaagggggcggcacacggagcccagcaggcggccaggca

SEQ ID NO: 232289 - RNA, 43 nt, Homo sapiens
ggaaaaacgagacaggaaccggacaaaggcgacaggagcaaca

SEQ ID NO: 232290 - RNA, 73 nt, Homo sapiens
ggacacagagcacaagccccaggaaaccggagaagacacaccacagagcacccagagcgacgccgggaacagg

SEQ ID NO: 232291 - RNA, 58 nt, Homo sapiens
cggaggcggcgggacggcccgggcacagagcagaggacaccacaggaaggaggcgcag

SEQ ID NO: 232292 - RNA, 64 nt, Homo sapiens
ggcgggaccgcgccgacggcagggcagcaggacaaacaaagccagagaaccccggcaaggcagc

SEQ ID NO: 232293 - RNA, 76 nt, Homo sapiens
ggaaaaccagaccagaaacggaggagcccgccgaagcaggacagggacaagcgcacagcggagaaagcagcgcggc

SEQ ID NO: 232294 - RNA, 78 nt, Homo sapiens
aggacggaagcgagggcacgggcggcagcccgagaccgcagcagcccccagacaggcacgccaacaaccgacacacgg

SEQ ID NO: 232295 - RNA, 56 nt, Homo sapiens
aacagaaagaggaaaaccagagaaacaagaggaggagggccagcacgcccacccca

SEQ ID NO: 232296 - RNA, 37 nt, Homo sapiens
agccgaacagaacaaagaagaacgaggaaagcacagc

SEQ ID NO: 232297 - RNA, 88 nt, Homo sapiens
cacgccagcacgccaacccggacggacaacaccggggagcgcggccgggaacagacgaaaccaacaacaaacccggaggagaagagcg

SEQ ID NO: 232298 - RNA, 73 nt, Homo sapiens
gcgagggcgggagcgcgcccgccgagcgcaacagcggcgggcggggcaccccaggagaagcaaaaagccacga

SEQ ID NO: 232299 - RNA, 112 nt, Homo sapiens
aagaagccaagggaaagccagagggcacgcgaaagagccacgaacagacagcgagcgcacacagggcaggaagccccccccggacacggagagcaaaggagacaaacaagag

SEQ ID NO: 232300 - RNA, 84 nt, Homo sapiens
agacagcgccggaggggagggcgcccagggccgagcgccagggccggacaccaggcgagccccagggccgcacagggaacgaga

SEQ ID NO: 232301 - RNA, 64 nt, Homo sapiens
aaggaaagaaagcacgagacaacgagagcgaagaccgagccccccagcccccgccgcggcagcc

SEQ ID NO: 232302 - RNA, 77 nt, Homo sapiens
gccaccaggccgccgggggccgcgcgcccggcagaaagagaaggcagaacagaggaagaccagaaacccagagaccc

SEQ ID NO: 232303 - RNA, 74 nt, Homo sapiens
gcgaccaggcccggcgcgcgcccccaggggcggccgcggcgccgggcgccgaggacccacagagcacaggacac

SEQ ID NO: 232304 - RNA, 109 nt, Homo sapiens
caccggagcaaaacagacgacgcagggaaaagacagagaagaagaccccgagcggccagagcccccacaccagaacagcacccccaggaagcccaggccccgagccacc

SEQ ID NO: 232305 - RNA, 75 nt, Homo sapiens
caccgggcaacaagaaaggaacgcagaaagaagcgcagccaagaagagggaaagaagacaggaaacaagggaagg

SEQ ID NO: 232306 - RNA, 84 nt, Homo sapiens
gaaaaagaggaaagcgaacaaggagaagggaacgcgaacagagcccagaacagcaacggaacagaccagaaggagcaaggggaa

SEQ ID NO: 232307 - RNA, 78 nt, Homo sapiens
gcgccaaaacccgcccggaaaggggacaccggaacccacccaacaaaaaacacaggccccaagaccacaaaacccaaa

SEQ ID NO: 232308 - RNA, 81 nt, Homo sapiens
gaaccggccacggagagcaccaccgggaaaagcccggaaaagcagccaagcggaagacagagccgcaaagagacacgcaga

SEQ ID NO: 232309 - RNA, 76 nt, Homo sapiens
ccgcggccagggcggcgccgcgccccccacggaggagaagccagcaacagggaaacagacgcacccgaagaccgac

SEQ ID NO: 232310 - RNA, 72 nt, Homo sapiens
aagcgcgagacccgaaagacacgagaccagaagccaagaaacgaggagagccaccaccaaggagacacccgg

SEQ ID NO: 232311 - RNA, 64 nt, Homo sapiens
accaccccaagaccaaggcaggaggaggaaggaagagaaagacaacaaccccccccgcgaaacg

SEQ ID NO: 232312 - RNA, 64 nt, Homo sapiens
ccgaccccacgaaccgggggcagaacagaaagggcggaagaaacccagacaacaaggcccaccc

SEQ ID NO: 232313 - RNA, 73 nt, Homo sapiens
acacagagaggaagacagagcgaaggcaccggcacggaccaccccaacaccgggggagaaccgggcccaccag

SEQ ID NO: 232314 - RNA, 80 nt, Homo sapiens
cccagcagaagaagagaggagggagaacacagaaaccggccccagccacgaggcggccccagcgcgggcgacaggccgac

SEQ ID NO: 232315 - RNA, 95 nt, Homo sapiens
cacagacaggccgcaaaacgaggcgcaaggagggcagaccacgccgacccaggggaaacccacggagagggcagaccagccacgaacaacaaaac

SEQ ID NO: 232316 - RNA, 65 nt, Homo sapiens
agaggcggcgggcagagcaacgcaggaaaaccgccagaacagcccaagcccaagagagccccaaa

SEQ ID NO: 232317 - RNA, 89 nt, Homo sapiens
ccgaaccaggggcgaaggcccaaccagaaaacaaagacaaaaggagacgagaagaagacaagagggaaaccgagaacagaaggagacag

SEQ ID NO: 232318 - RNA, 76 nt, Homo sapiens
gcggccagcaccccaacgggccaaaggcggaccgcacaagacggcaaagccgggaggccaccaacgcgcccacacc

SEQ ID NO: 232319 - RNA, 89 nt, Homo sapiens
acccagagcaccagagacaaggagagccaggaggagcgggccccaacccaccaaaagcacaggacaggcgacacaacagggaagaccgg

SEQ ID NO: 232320 - RNA, 57 nt, Homo sapiens
cgcgggcccaagcaccgagaggcgagggagaggaaggagccagacgacaggaaaacc

SEQ ID NO: 232321 - RNA, 72 nt, Homo sapiens
gggacgggcccagaggcccagggaggcaggggcagaaacagagaaggaacaggaagaccaacacgcacgaag

SEQ ID NO: 232322 - RNA, 77 nt, Homo sapiens
cggcccgcgaaggaaacaagaggccaaaaccgaagaggaggacggacccaaagacaggaccacgcaccagcagagaa

SEQ ID NO: 232323 - RNA, 79 nt, Homo sapiens
aagagagcgggcgcgcaaggagacacacgaaggggacagcgcccaaagcgaaaggaccgggaacaggacgacaacagga

SEQ ID NO: 232324 - RNA, 67 nt, Homo sapiens
aaggcacccgggacgagcgagaaagggacggccccaagggcgcccgcgccggcagaggaggcgagca

SEQ ID NO: 232325 - RNA, 82 nt, Homo sapiens
gccaaacaaaaggcggcagagcaacagaaaagcaggaacaacagagcagacgaaaccacaaaacgcccaccagcacagcggc

SEQ ID NO: 232326 - RNA, 79 nt, Homo sapiens
cagccccccgagacagcgcccgacagcgcggaacggggcagccgcagaccccaccacgacagacccagaagaagaagag

SEQ ID NO: 232327 - RNA, 88 nt, Homo sapiens
ggagccgaccgaggcgcccgcggggcggggaccgccgcccgggacgcgaggaagagggacgagggaaaagaaacaaagccacagacgc

SEQ ID NO: 232328 - RNA, 74 nt, Homo sapiens
gaaacagagggaggaagacagccagcaaggccgaaaacagaacagacgaagagcgccgacccaaagccgccaag

SEQ ID NO: 232329 - RNA, 39 nt, Homo sapiens
gggcgggggcacacaaagggccacggcccgccggcccca

SEQ ID NO: 232330 - RNA, 48 nt, Homo sapiens
caggcagacaaaagggccaaagaagggagaaccaggcacagcaggacg

SEQ ID NO: 232331 - RNA, 80 nt, Homo sapiens
acgcccagcgccccgagaaccacccgccccacccgccaagagagccgaccaccaaaacccccaaaaggagagacgcagag

SEQ ID NO: 232332 - RNA, 56 nt, Homo sapiens
ggagcccgggagggcggccgcaggcccgagccgccaggggggagaacacccccccc

SEQ ID NO: 232333 - RNA, 78 nt, Homo sapiens
ccccaagggcgggaacaggccgggccagcgcaccaggcaggcgccacaacaaacgcagcaacagcaaccaaaagaaac

SEQ ID NO: 232334 - RNA, 50 nt, Homo sapiens
ccccgagagcggggacagagcgcgcagagcgagaacgagagggggacagc

SEQ ID NO: 232335 - RNA, 69 nt, Homo sapiens
agagccgagagaggacgccaccagcacagaggggaggccagaagcaagaagaagagaaagggccgcgcg

SEQ ID NO: 232336 - RNA, 96 nt, Homo sapiens
ccgacccggccacggaccgccccagcccacaagagaaaaccacagaccgggccacgaagaaagggcagcaagacacgaagccgagaaagagcagcg

SEQ ID NO: 232337 - RNA, 72 nt, Homo sapiens
cgaacccgaggcaaccggaggcggaggcagcacggcaggagacgaggagaggacagcaggacacccggaccc

SEQ ID NO: 232338 - RNA, 65 nt, Homo sapiens
ccccacgcccgccggaaacggggcagaaagaaacccgaaacaaacaacagcgccggcccaggcgg

SEQ ID NO: 232339 - RNA, 75 nt, Homo sapiens
caagcacacaaccaaggacccccagaaacaggccagcagaaacagccgcccagcgaacagcagcacggaccaaca

SEQ ID NO: 232340 - RNA, 79 nt, Homo sapiens
ggcgccaacaaaaggggcggaagccaagaggcccgcgggcaccaggaccaacgggaacacaacgggccaccccgaacga

SEQ ID NO: 232341 - RNA, 75 nt, Homo sapiens
gaaaccaagaagaggccagaaaccgcccggagcacgaccgaggcgggcagaggccaagaccggcccaagaaggag

SEQ ID NO: 232342 - RNA, 57 nt, Homo sapiens
gcgcgacgccggggaagaaggaagggggggccgaagaagccagggggaggaaagcag

SEQ ID NO: 232343 - RNA, 70 nt, Homo sapiens
gaacaggaaaggaccagcgcaacacaccaagaaaagaaacaagacagcaagggggagacgagcagcagga

SEQ ID NO: 232344 - RNA, 73 nt, Homo sapiens
agggcggaagcccgccccagagcagaggaagcacccgcgagaaagaagggcacagcgaaacagcccggccaaa

SEQ ID NO: 232345 - RNA, 38 nt, Homo sapiens
gcgcccggaggaccagccaacacaacaggcccaccccc

SEQ ID NO: 232346 - RNA, 79 nt, Homo sapiens
gggcggagcaggccgaggggcagccacccagacccccgaaaaaaccaccggcgcaaagacgcaagaaacaggcaccaaa

SEQ ID NO: 232347 - RNA, 79 nt, Homo sapiens
gacaccgcagcccggagccggaggagcgcgcggacgccaaccagcccgcgagcgcccgagaagcaccgagaagcaaagc

SEQ ID NO: 232348 - RNA, 63 nt, Homo sapiens
cccggggacccccgacgccaggcagcgcccccaaacgggccaaaagaacacagccgaccccga

SEQ ID NO: 232349 - RNA, 84 nt, Homo sapiens
aggagcaagaggaagagaagcagagcgaagcaaagaggaagcgaacaggagcgagaacccgagcagcgccagagcaacacaccg

SEQ ID NO: 232350 - RNA, 78 nt, Homo sapiens
gggggggacagcagacccccaccacccaaccggcggcgcagacccggggacccaagggagagagggaacggcgaaagg

SEQ ID NO: 232351 - RNA, 54 nt, Homo sapiens
aaggcggcagccacacggaagagcaccccaaggagaccgcgccaccccaaagaa

SEQ ID NO: 232352 - RNA, 64 nt, Homo sapiens
acccacgacgccgggaccggccaagggcccacacaccaagaccaagagaccacaccgcgccaga

SEQ ID NO: 232353 - RNA, 86 nt, Homo sapiens
ggacaaaggcgggacgccacgccaagcaaaccgggaaaggagaggacccggagccggaaggcacggcgcaaacggcgccgggccag

SEQ ID NO: 232354 - RNA, 82 nt, Homo sapiens
caaagcgcacgaggaggacacgcgggggcaccggccaagacacgccagcacggggcacagacccaggcgaggaagaaacaag

SEQ ID NO: 232355 - RNA, 94 nt, Homo sapiens
cgaaacgagagggcagcagacccagcccgagagagccaccagacggagcacggcgcaggggcaggaggagcgccaggaggacagcacaaaaaca

SEQ ID NO: 232356 - RNA, 94 nt, Homo sapiens
cgcagcccaggagcccaaggcggcccggcgggcgacggacggccggacaggccccccggacagaccacccagcccgacagggaccgcgaggacc

SEQ ID NO: 232357 - RNA, 77 nt, Homo sapiens
agaaaaaggagccccagaaacggaagccccaacagaagagagaggccaaagggccaagcacacggagccgcaagacc

SEQ ID NO: 232358 - RNA, 78 nt, Homo sapiens
gacgcagggcgcccccggcgagccagagaagaggccaaagaaagccacagacgcaccggaaaaccaccaggccagacc

SEQ ID NO: 232359 - RNA, 74 nt, Homo sapiens
gccgcaggagcgcggcgagagaccaacagggaacggagaacggaccacgccgccaggcgggaagcagaagacag

SEQ ID NO: 232360 - RNA, 66 nt, Homo sapiens
gaaagaagaaagcaagacggagccaagagacaaaaggggacaggagccaggccaagagaaagaaac

SEQ ID NO: 232361 - RNA, 64 nt, Homo sapiens
gcacccaaaaccagaaccgaagcacgcaaagaaacaacaggccagagcaagggcagacgggcca

SEQ ID NO: 232362 - RNA, 75 nt, Homo sapiens
gcaggcccagacagacagcacgcagggacaagaaaagacaccacaaggcaggcccgggaacaggcaacgacacca

SEQ ID NO: 232363 - RNA, 74 nt, Homo sapiens
accgaaaacagggaggacagaggaaaagccccagcgcgcgcccggacagacaagagagccaccaaagaagacca

SEQ ID NO: 232364 - RNA, 78 nt, Homo sapiens
ggaccggagaagccgcccagccccagcacacccccacacaaaagggagcaagcaaggagagagggaaaaaaggagagc

SEQ ID NO: 232365 - RNA, 52 nt, Homo sapiens
gaacccccgccaaaacagggccaccacagaagcaagaggcgaaccaaaccag

SEQ ID NO: 232366 - RNA, 54 nt, Homo sapiens
ggggacagcagcagcagacggcgcaccagggcagcagccggcgcacacaacggc

SEQ ID NO: 232367 - RNA, 73 nt, Homo sapiens
agaggcagccagcggacggagaagccagccaaaggcaggacaaaaaacgaaggccgaagaaaaaaccaaacag

SEQ ID NO: 232368 - RNA, 82 nt, Homo sapiens
gcccgcaccccgccccccgaccacccagcgaaaaacaaccaccagcgagcaaaaaggcaaagaccaagaccaccaagaagcg

SEQ ID NO: 232369 - RNA, 76 nt, Homo sapiens
cgagacagagcacgcccggagacaggacagcaacaacccagagagacacagagagaagagagggcccgcacaagga

SEQ ID NO: 232370 - RNA, 71 nt, Homo sapiens
cggcgagcccgggccgcgcccgaggcggagccgggagcggaggaggccagcagccaggcagcaggccgcac

SEQ ID NO: 232371 - RNA, 77 nt, Homo sapiens
acggacgcaagcggggaggggaaggcggacaaaaaaaaaagagaaagcgagccccaagagcaagcagacaaagcacc

SEQ ID NO: 232372 - RNA, 74 nt, Homo sapiens
gcaaggggcgacggaaagccggacagggaccgagggacacgccccaaagcaagaaccgccacagaagaacaccg

SEQ ID NO: 232373 - RNA, 73 nt, Homo sapiens
cagaccgcgaaaggccgagagaagcggccgccacgagagaaaaaggaggaaacagaaccgaagccggaccggg

SEQ ID NO: 232374 - RNA, 90 nt, Homo sapiens
gacaagcggcgccccagagcggacgagggccgacgaggaggccaagacaaccaccacaaacaccaagggaaggggagagaggccgcaccg

SEQ ID NO: 232375 - RNA, 81 nt, Homo sapiens
ccgggcagcccaacgagaaccggagggcaccggagaacaccagaggaagacaaaagaagagagccccaaagaaaaaaccgg

SEQ ID NO: 232376 - RNA, 81 nt, Homo sapiens
gaaaggaggacgagcacagagccaagaaccacgggggcaaggcacggggagcgcagagggcgaagacaggacggcccaggc

SEQ ID NO: 232377 - RNA, 76 nt, Homo sapiens
cgaccggcgcggagggggcccaagaaagaccagccagagagccaaggcacggcaaccaaacaagcaggaacagcca

SEQ ID NO: 232378 - RNA, 54 nt, Homo sapiens
gaccacaacaagcaagcagcagcacgcgaaaggcaggccccccgggcgcaaccc

SEQ ID NO: 232379 - RNA, 51 nt, Homo sapiens
gcagggcgcccccgagaggagcggaccaagcgccaacagacgggaggacgg

SEQ ID NO: 232380 - RNA, 75 nt, Homo sapiens
ggaagcgcgggaagggaaacaaaagggcagaaaagcagggcaagcagggaaaagagaaagaaaccggcagcagga

SEQ ID NO: 232381 - RNA, 79 nt, Homo sapiens
aggcgggcgggcggcgcggcggcggcgagccggccgcggcagccggaccagcaggcaggcagcccgaggcccacaagca

SEQ ID NO: 232382 - RNA, 86 nt, Homo sapiens
cggaggcgagccggcgcggaggcgaagaggggcagcgcgagcgggaccagcgccggaggcgccgcagagacacgagaccagaagcc

SEQ ID NO: 232383 - RNA, 75 nt, Homo sapiens
gacccaagcccgggcagcgcacgggagacccagcgcgggagagaaaaacgcagcaccgaacgaaccgaggcaacc

SEQ ID NO: 232384 - RNA, 73 nt, Homo sapiens
acccacggccagcgccccggcccaacagaagagaggagcaacagaggacaagagaccaacgaagaacccccca

SEQ ID NO: 232385 - RNA, 43 nt, Homo sapiens
cggcagaccacacgagcgaggcacaggaagcggagcgagaccc

SEQ ID NO: 232386 - RNA, 77 nt, Homo sapiens
ggcggccggcggccagggggagaggcggaggccaggcagcgaggaagagcaaagaaggggaagaaccaaaaagcaac

SEQ ID NO: 232387 - RNA, 74 nt, Homo sapiens
aggaacaaagcaaaaaagagcgacacgacacacggccgagagcccgagggaaaagacaggcaacaggaaagcaa

SEQ ID NO: 232388 - RNA, 76 nt, Homo sapiens
accgaccgccagcgcaccagagcagcgcagaagcggagggcagggaagacacaccgagaagacagacccagggacc

SEQ ID NO: 232389 - RNA, 79 nt, Homo sapiens
aacaggggcccgccagccccgcggcgcccgggcccgggcggcggcccaccgcccacgggagccgccaggccggccggga

SEQ ID NO: 232390 - RNA, 87 nt, Homo sapiens
ccacgagcccagccaacagcgccccggacgcaccagagccaggcggacaacgcgacagagccgaggcgccacacggggaacaagacc

SEQ ID NO: 232391 - RNA, 86 nt, Homo sapiens
cgggaggaacagacacgcggagagccggagacacaggccccacccccaaggggacaccagggagcggcccaggcccgagaaagacc

SEQ ID NO: 232392 - RNA, 88 nt, Homo sapiens
caggagaccccacggagcgggcgacgagcgacccgggagacacgacgcccagcccccgagacggggaccaggggaggcagccagcacc

SEQ ID NO: 232393 - RNA, 61 nt, Homo sapiens
gcaccggcccccacccaaggagaggccaagggaaaagaagaccccggagcaggcccgaaag

SEQ ID NO: 232394 - RNA, 83 nt, Homo sapiens
agcggggcggagaaagcgcaccggccccaaagggagcacagccagggccccaggagcacagcaacgccgcggagcccggccgg

SEQ ID NO: 232395 - RNA, 81 nt, Homo sapiens
cgggccaggcggggggaggcccgacacccggaagagcaggccgcagcggaggaacgccacagaagagacccaccaaaggac

SEQ ID NO: 232396 - RNA, 68 nt, Homo sapiens
ccacaggaggcgcggaggacgccccaccgccgacgcccccagccaccagaaagccaacaggcagacca

SEQ ID NO: 232397 - RNA, 55 nt, Homo sapiens
cacccccacccagaagaagacggcacgggacccccagcacaggcagcaggccggg

SEQ ID NO: 232398 - RNA, 72 nt, Homo sapiens
accgagcgggggagaggacgcgcgaaccagcagcaggcccaggaggaacgaagaccgaccgggcagccaacg

SEQ ID NO: 232399 - RNA, 78 nt, Homo sapiens
accagccccaccggcccccaggaacagcccgcaccagccacagcccccaacagagagagacgggacaccggagccagg

SEQ ID NO: 232400 - RNA, 61 nt, Homo sapiens
gcaggacaaccagccacacaccagccacccggcagcgagagcccagagaagggaagaaagc

SEQ ID NO: 232401 - RNA, 68 nt, Homo sapiens
gccagcgcagaagacgagaagccaggaggagaagcggcccgaaggcgaccaagccacgggacaagcaa

SEQ ID NO: 232402 - RNA, 105 nt, Homo sapiens
gccgggaccggccgacccagcccccaggccagaagaggaccaaccaagaagcgaagaaaagagaaagaaacagacaagcgagagagcagcgcaacaggaagaccc

SEQ ID NO: 232403 - RNA, 121 nt, Homo sapiens
gcggcccccggcgggggcgggacagcggcccccggagggggcagcccgggagaaccgcggcggccggagcgcgagaaaagccgacgcaagagggaaagcggagcacagccccagcgggaaa

SEQ ID NO: 232404 - RNA, 99 nt, Homo sapiens
gagagcgacgggacccccccgcagaagggacaagcaaggggccaaggagccaaggaggaaacccacaacagaggacagaaggcaaagggggcaagaccg

SEQ ID NO: 232405 - RNA, 74 nt, Homo sapiens
gccggaacaacaacccagccgagaaaaaccagaagagaaaaaacaaaggggagaggcaccccgcgggacgaccg

SEQ ID NO: 232406 - RNA, 60 nt, Homo sapiens
agcagccgccgaggccgcggcccaaaggccagacgaccgagccccagacccacaccagcc

SEQ ID NO: 232407 - RNA, 71 nt, Homo sapiens
ggaaacgccccgaggagcaggaagcgaccaacgaggacaggcgccaaaacaaaacagagagacacgaaagg

SEQ ID NO: 232408 - RNA, 58 nt, Homo sapiens
gccaacacagcgagcgcaggaccaaccaggcacaaggaagccacgaggagcaggagaa

SEQ ID NO: 232409 - RNA, 75 nt, Homo sapiens
agcagaggagagagaccgagaaaggaagaacagcagcagcgccacaggacaggcagacccgaccccagaaagcac

SEQ ID NO: 232410 - RNA, 53 nt, Homo sapiens
agaaaacaaccaaaggcacagacagcagggaaagcacgacggaggagccagga

SEQ ID NO: 232411 - RNA, 83 nt, Homo sapiens
cccccaccgcccccccggcccccccggcaggggaccgaggccaggccggaggaagagcaagcaggcccgagggacaaagaagg

SEQ ID NO: 232412 - RNA, 57 nt, Homo sapiens
caggcggggcacccaaggaggacccacggacagaagagcggggggacggcaccaagg

SEQ ID NO: 232413 - RNA, 80 nt, Homo sapiens
cccgaagaagaccccccacacggaccccaccaccacacaggcaacggagagcaaaggaggcgcggaggggacaagccccg

SEQ ID NO: 232414 - RNA, 57 nt, Homo sapiens
acaaacccgaaacacaaggcagccccagcagcacggacaggcccaagggccagcgcg

SEQ ID NO: 232415 - RNA, 48 nt, Homo sapiens
gccacgcagcaaaccacaggagaggaggacaggacaccccagggagag

SEQ ID NO: 232416 - RNA, 75 nt, Homo sapiens
gggagcagcaaccaagccaagcccacagaagaaagaacgggacagcaaagacccgagaccaggcgcgggggccac

SEQ ID NO: 232417 - RNA, 109 nt, Homo sapiens
acgagagacgaaggggcagaggccaagagcccaacaccacccgagagccccaagaacgaaaacaaacggaagagagggcagcaagaaagaacaagaaagcgaacggaaa

SEQ ID NO: 232418 - RNA, 55 nt, Homo sapiens
ccggccagaggaaagaacccgaggcgcgcgcgcccagcgccgcgaggccaaaaag

SEQ ID NO: 232419 - RNA, 80 nt, Homo sapiens
ccccgccggccgcccaacaccgaacaccgccagcacccgcccgaggacagagaggcgagcgcccggaggggagagagcgg

SEQ ID NO: 232420 - RNA, 75 nt, Homo sapiens
gccaggagggaacccgaagcgggcgcgcgcacggcaggacggagaaagccgccaggaagcacggaggaaagcggg

SEQ ID NO: 232421 - RNA, 65 nt, Homo sapiens
aaaaagaccaagaccccagagcggaccaaaccgacaaggagcgacaaacaagcgagaaaagccga

SEQ ID NO: 232422 - RNA, 79 nt, Homo sapiens
ggcagacaaagacagcgcccaaagaacaagacgccaaggagacgccgcagagacccccgggagcggagccgcagcccca

SEQ ID NO: 232423 - RNA, 70 nt, Homo sapiens
gaggcggagcgcccgggccacgaggacgcaccaggaacgcccggaagaaccacaacgccgaagaagagaa

SEQ ID NO: 232424 - RNA, 74 nt, Homo sapiens
gagcaaaggaagaaaagccaggcaggcagaaaagcaacaggacagccgcagcagcaaaccagggcagcgcagac

SEQ ID NO: 232425 - RNA, 75 nt, Homo sapiens
gacgccagagcccccgcgccagaccgccaaggacccggcacgcacgcaccacccgcacacgccaccgcgcagggg

SEQ ID NO: 232426 - RNA, 73 nt, Homo sapiens
ccagaagaagcgggaaggcgaaacaccagagcacgcaacagaaaagaagacggcccaaagaccggagggccac

SEQ ID NO: 232427 - RNA, 83 nt, Homo sapiens
ccaccagcagaacacagcagaaaaaacggcgaccaaaacgaggaggcacgcacagggaagcaaaccaaccagaccaagcgggc

SEQ ID NO: 232428 - RNA, 94 nt, Homo sapiens
gccgcaggagggcggcccggacaagccagacaacgccgacagccaagggcggaaccggccccaaggagcggaagccgccgaacgacaaccaccc

SEQ ID NO: 232429 - RNA, 72 nt, Homo sapiens
cgggaggcgagacacagagaaaagcggcagaagaaagcaaggccggggggggcacagagccccggaagacag

SEQ ID NO: 232430 - RNA, 66 nt, Homo sapiens
acagcaaaaagacccaccaaggaagcagcggccacgccaggcagaagccccagaggagcccgaaac

SEQ ID NO: 232431 - RNA, 76 nt, Homo sapiens
ccagaccgggcgacccgccgcgcgaagaggccagaaagcaccaacaaccggcaaaacaaagaacaaagacaaagcg

SEQ ID NO: 232432 - RNA, 83 nt, Homo sapiens
ggaagcgcccggggccggccgccgcgggaccgaggaaaagccgcaccagggaaagaacgccggacaacagcggcgaagaaggc

SEQ ID NO: 232433 - RNA, 88 nt, Homo sapiens
gaccagacccaccacaagagggcagacggaacgaacagaagaaacggcgaggaaagagaggagccccggaaagaaaaggacagacccg

SEQ ID NO: 232434 - RNA, 61 nt, Homo sapiens
acccaagagcagcggaaaagaccagcacagaggggagcccaaaagcacgaagcgccagagg

SEQ ID NO: 232435 - RNA, 63 nt, Homo sapiens
cccagcaccacagcccgcagccccgccagccacccccagacgaccaaggccaggaagaggcag

SEQ ID NO: 232436 - RNA, 74 nt, Homo sapiens
aaaaccaaccagaagacgaacaaacagcaagaaagaccacaagaccaaaaagcgccaggcaggcaggaaagcgc

SEQ ID NO: 232437 - RNA, 85 nt, Homo sapiens
accgcgcgcgcccgaccgcgcggagaccggaccgcgccacaaggagaggccccaccccgagagaagccagacacagaccgcaggc

SEQ ID NO: 232438 - RNA, 74 nt, Homo sapiens
ggacggaccaggcgccggccaaccgcgcggaggaggaaacaagggcagagccagcaaagcgaagaaggcgaccc

SEQ ID NO: 232439 - RNA, 84 nt, Homo sapiens
gccgcaaaggccaagagaagacgcagccacaccacaagcagcagcggagagagaccccagggggcggggaagcggaagagggaa

SEQ ID NO: 232440 - RNA, 76 nt, Homo sapiens
agacgggaggaggggagggagcaggggagaggccgacgggacagagcaacaggacgaacgggcccaaagaacggaa

SEQ ID NO: 232441 - RNA, 78 nt, Homo sapiens
gacagaggaccaggagcaccgcccaggccggagaagaaaaggccccgagcgcggagagcaagccgagagagaaggcag

SEQ ID NO: 232442 - RNA, 64 nt, Homo sapiens
gagcagcgcagcccacacgaaggcgggagccaacgggacccaggggagcgacagccaaagcaac

SEQ ID NO: 232443 - RNA, 84 nt, Homo sapiens
caacggggagaagggaagcgcagacgggacacagcggggcaggagcgcccgcaccacaccccacggggcacccgaggaggaaga

SEQ ID NO: 232444 - RNA, 82 nt, Homo sapiens
cgccggggccaggagagcgcgccggcgagaagcggccgagccagcagcagagggaaagacaacaaggagaacagaagaacga

SEQ ID NO: 232445 - RNA, 65 nt, Homo sapiens
gacacgcagcagaacaaagacggacgaaaagcgccaccagccgcagaaagcaacaaagcgagagc

SEQ ID NO: 232446 - RNA, 81 nt, Homo sapiens
ggggcccccaggaccaacccgaggcaaccagcaccagcagagagaaggcaagagaaggcagggggcaggccacagaggcaa

SEQ ID NO: 232447 - RNA, 59 nt, Homo sapiens
ccgacagccgcagaacgcacagccacagccgcaagccaagagcagcagaaaagaacaca

SEQ ID NO: 232448 - RNA, 75 nt, Homo sapiens
gggacccggacaaccagaggcagccagcagggggagagaaagacagccaagcagagagaagaaaagagggaaaca

SEQ ID NO: 232449 - RNA, 69 nt, Homo sapiens
gcccccggcgccgcacccggacccccggccagccccagcaacgaagcaacggggcggcacacaaggagc

SEQ ID NO: 232450 - RNA, 82 nt, Homo sapiens
ccccaagggacccggaggaagcagcaccagaccaagaaacagaacgacagcccgcaccgacgccggcggccagccagagagc

SEQ ID NO: 232451 - RNA, 69 nt, Homo sapiens
gacagcgcgagccaggacccggccccgggggcgccgagggcacaagggcaacgacagaagggcgaagcc

SEQ ID NO: 232452 - RNA, 54 nt, Homo sapiens
aaaaggcgacggccaaaggaagaaggaggaccacccgcacccaggggacgcacg

SEQ ID NO: 232453 - RNA, 62 nt, Homo sapiens
agcggaggaggccgagaaggcggcgagagagcgagagaggggacaaccacgaaccccacaga

SEQ ID NO: 232454 - RNA, 35 nt, Homo sapiens
ccccgagggcgggaacagaaacacgagggcaaaaa

SEQ ID NO: 232455 - RNA, 74 nt, Homo sapiens
ggagaaaccgcccgaaaacggagaagcagaccagaacacacaagaaccgggagaacgaacaaaccaagccaaca

SEQ ID NO: 232456 - RNA, 68 nt, Homo sapiens
accacaaaggcgcaaccaagaaaggacccaacaaaccacacaaggcccgacaccgaaaagggagaaga

SEQ ID NO: 232457 - RNA, 62 nt, Homo sapiens
gcggagcggaagacggcaacccagggcagcgggcccacggcggccagaagaaggggacgggg

SEQ ID NO: 232458 - RNA, 86 nt, Homo sapiens
accagggaggccaagcgaccacccaaagaagaaagagagcacaagcccaggaacggggagaaacgccagacgccccgaccaagaag

SEQ ID NO: 232459 - RNA, 79 nt, Homo sapiens
cccccaagcgaaaacaccgcaccgcgcgaccccagggaacaagacagagaccaggggccacaacggaaaccaggaaacc

SEQ ID NO: 232460 - RNA, 82 nt, Homo sapiens
gagacacgccaagcagccagcccaggagagagggcgaagacaggacggcccaggcagacacggaggaggaggaagaggagga

SEQ ID NO: 232461 - RNA, 57 nt, Homo sapiens
aggccggggccagaacgggcagcggccagcaaaccgcaaacaccaagcccagaccga

SEQ ID NO: 232462 - RNA, 79 nt, Homo sapiens
cggagcgggcccgagccaggccggagcgaggagaacgacgggcgccgcccagcaaagcgaaggggcgggaaagaaagga

SEQ ID NO: 232463 - RNA, 71 nt, Homo sapiens
gagacaagccaggcgcaccacggccaggcaaagaaagacgaaaccagggcgaaggacgaggaccgaaaaag

SEQ ID NO: 232464 - RNA, 80 nt, Homo sapiens
gacacgaagcagcagaagcccagggcggcccccacccagacgcgaccggaaaggagagagagacagaaccacagacaagg

SEQ ID NO: 232465 - RNA, 76 nt, Homo sapiens
ccagaggagaagacgagcagaagggcccacccagaaaacacgaaggagaagcggaaggaaaagccccaggaagaag

SEQ ID NO: 232466 - RNA, 76 nt, Homo sapiens
agcaggccgggcccccggcagggcgcagggcagcaggaggggagggacaaggacacggagcgggagcgacgcgcag

SEQ ID NO: 232467 - RNA, 70 nt, Homo sapiens
cccacccagccccgagagaccacccaagaagaccaaggcccaaaaggacccaagagagaagcgacaggag

SEQ ID NO: 232468 - RNA, 76 nt, Homo sapiens
gaaacagcaagcgaagccgaaaaagcgcccgagacgggcccgccgaaaggcgagcggccggaagaagaagaacaca

SEQ ID NO: 232469 - RNA, 72 nt, Homo sapiens
caagacccccagcacaacacaccggcggcccagcgaagccaggacacagcgcgggggaacagagggagagag

SEQ ID NO: 232470 - RNA, 79 nt, Homo sapiens
gaagcaagccgccgggagaaggaagaacggcgaggcacacgacgcacccagaggcgcacggccaggacagacggccccc

SEQ ID NO: 232471 - RNA, 72 nt, Homo sapiens
caaggagaaacccaagagcagcggcagagacaggagccgcacccagacggaagcagggagcagcacagccaa

SEQ ID NO: 232472 - RNA, 79 nt, Homo sapiens
gaagaagcagaagcgcgccagggcagcaggagagaggagggagccaggagcgcgggagcgaaggccagccacacgcgca

SEQ ID NO: 232473 - RNA, 73 nt, Homo sapiens
cacccggagaagaagcagcgcaaggaccaggcaacacaccgaaaaaagggaagcggagaggagcagagacgac

SEQ ID NO: 232474 - RNA, 78 nt, Homo sapiens
cccgggcccgccgggcacaagcgccagaagcgccggcggcgcggggaaacgaacggcacaggggcaggacgaaagacg

SEQ ID NO: 232475 - RNA, 75 nt, Homo sapiens
cgagggcagagccgcggggcaagacgaacgcgcagaaaacaaaggcaaggcgacaaacacaagacgggaggaaga

SEQ ID NO: 232476 - RNA, 51 nt, Homo sapiens
ccccccaccacccccgaggacaggagccagcggcccaggggcgggggagga

SEQ ID NO: 232477 - RNA, 66 nt, Homo sapiens
gcgggaagacggggacaagaggaggagacggagcacgccaaagggaagcccggggcggcgacggag

SEQ ID NO: 232478 - RNA, 67 nt, Homo sapiens
gggacaaggaacagaaccggggacaaagccaacaggggccacagccaaacagaaagcaacaaaagac

SEQ ID NO: 232479 - RNA, 56 nt, Homo sapiens
gaccacgggagaaacaaagaccacaccagggccaagccgcccgccaaccggcagcg

SEQ ID NO: 232480 - RNA, 81 nt, Homo sapiens
aggagaacacccagggggcccagccccagccaccccaagacggaaccagccaggacggagaacggaccgaagaagccagaa

SEQ ID NO: 232481 - RNA, 66 nt, Homo sapiens
gggcacggggggcgacggccaagcgggggacccgaagcccgcgagaaggaggcgcaaaaaagacca

SEQ ID NO: 232482 - RNA, 79 nt, Homo sapiens
gaggcgccccagagcccagggcaggacaccgacaggaacagggaccacggggaggagacgagaaagagcggggaaggca

SEQ ID NO: 232483 - RNA, 88 nt, Homo sapiens
gcgagggccagcccgccgggaccgcaggggagcccagcacgccccacccgggaaacccaaaagagaaaccgccaaaagcgccaaggac

SEQ ID NO: 232484 - RNA, 73 nt, Homo sapiens
aacaggccgcgagaggacaagcccagaccaaaacagcaaccaaagcggacgccggccaccacgaaggcgacac

SEQ ID NO: 232485 - RNA, 66 nt, Homo sapiens
gggggccccacgaaaaaggagaaaagaacgaccccacccaaaggccacgcggcaggcaacagacac

SEQ ID NO: 232486 - RNA, 55 nt, Homo sapiens
ggcaggccgacggaggaggagggcgcaaacaaaaagggcgaacggccgcccggac

SEQ ID NO: 232487 - RNA, 68 nt, Homo sapiens
cggacagacgggcagcggggcagaggagccggcccacagaggagaccccgcccacaaaccgggaagac

SEQ ID NO: 232488 - RNA, 80 nt, Homo sapiens
gggaccgcggagagaggcaccggccgaggcaaggagaaagaacaaaccccgaagaccccagcagaagccaccaagaggca

SEQ ID NO: 232489 - RNA, 69 nt, Homo sapiens
ccggccaagacgaagggaccacaaggccggagcccaacagaaagcccagccccccccaccgccaccacc

SEQ ID NO: 232490 - RNA, 64 nt, Homo sapiens
agaggaaacggcagcagaacgagagacagagagaggagaaagcggccaaccccagaagagagaa

SEQ ID NO: 232491 - RNA, 65 nt, Homo sapiens
aaggagaggaaggagaccacagggagccgaaaacaggcagccaacccaagggacagcaaggaggc

SEQ ID NO: 232492 - RNA, 85 nt, Homo sapiens
gcccgggaggaaggaacgaggcaaggagcaaagcagcggcgcagcccggggcccagaagaaagagaagagcgacaggcaagcgga

SEQ ID NO: 232493 - RNA, 76 nt, Homo sapiens
ggcccccaaagaggcgcccgaaagaggaaaccagcagagcagagggccccgccagacccccagggggccagcggca

SEQ ID NO: 232494 - RNA, 41 nt, Homo sapiens
accggccacaccaggcccagccacgcagccagggcagcagg

SEQ ID NO: 232495 - RNA, 73 nt, Homo sapiens
cccaagccccggggaccggggaagcgccgacagacagggcagggagccgcaaagggcggaaaaccgagggagg

SEQ ID NO: 232496 - RNA, 70 nt, Homo sapiens
gcccgaggccccaggcagagaaaacacccgagagcaccgccgagcggaccccaagcaacagagggcggga

SEQ ID NO: 232497 - RNA, 66 nt, Homo sapiens
aacgaaccaggacggcaagcaacaccgggcgcgcacagaagggacaacggaggaaaccaagcccaa

SEQ ID NO: 232498 - RNA, 59 nt, Homo sapiens
agggaggacacaaaggaggaggaaacgaagagacacccacaagagcgccgaagaggaca

SEQ ID NO: 232499 - RNA, 57 nt, Homo sapiens
aaacgaaagacaaagagaagcaaggaggcagccggcacagcccggccgcgagaggag

SEQ ID NO: 232500 - RNA, 77 nt, Homo sapiens
cacgccccgcgcaggagggccaaaacgcccggcggaccacggccgcagcacggacgccgcaggccggccaacggcca

SEQ ID NO: 232501 - RNA, 87 nt, Homo sapiens
gaaacggcaccagccccgacccccacccaaggagggccacgacaggaaagccacaccaagcgggccccagcaccggcccccccccgc

SEQ ID NO: 232502 - RNA, 79 nt, Homo sapiens
cagaaaggagggggcgagaaggcgggaagccgaaggcagccacagggacgaagaaggcgccagaccgggaaaggcagaa

SEQ ID NO: 232503 - RNA, 99 nt, Homo sapiens
gggcaacagaggggcacaaacgggaaaaaaagagaacagcgaaggccaagccgcacaaagcagagcccacagacaaggccaaaggcaaagcgcacagag

SEQ ID NO: 232504 - RNA, 79 nt, Homo sapiens
gaagaaggcggaacccaggaaagccaccaggggagcagagcccgaaagaacagcaagcacggaaggacgagcgcacagg

SEQ ID NO: 232505 - RNA, 50 nt, Homo sapiens
gcgaaagcacaccaaggacagggacaagcgcacagcggagaaagcagcgc

SEQ ID NO: 232506 - RNA, 68 nt, Homo sapiens
acagaggaggccccgcagcggaagggacgaccaggggcggccgaacccaggcgaagcagggcagaggg

SEQ ID NO: 232507 - RNA, 73 nt, Homo sapiens
gagccggggaaaagacaggcaaaaggcaacccaggcaggagggccaggccggcaggacccaggcacacggacc

SEQ ID NO: 232508 - RNA, 73 nt, Homo sapiens
aaaccgaagcgccacagagcaacaacaaacacgcaccccaacaggccaggagggacagccaacaagcgacgcg

SEQ ID NO: 232509 - RNA, 82 nt, Homo sapiens
gggggcccacggaggcagaggggaggaggaccggagcgacagcgcgcaccacccgcagggccaaaacagaagaggcaaagcc

SEQ ID NO: 232510 - RNA, 73 nt, Homo sapiens
aaagaaaaacggaaaggaaacacaacaccaagcccacaagaaggggggcagaaagaagaggaggacaacaagc

SEQ ID NO: 232511 - RNA, 75 nt, Homo sapiens
acagggccgccaacggccccagcacacagccagagagccaggaagcaaggaggaacgaagcagagcccaacaggg

SEQ ID NO: 232512 - RNA, 79 nt, Homo sapiens
gaggaccccacgcgacgggaccgagagaccgcgacacgggggccagaaggaaagcaaggcccgagagagaaagggaaag

SEQ ID NO: 232513 - RNA, 82 nt, Homo sapiens
caggacggggcccaggaagggccaaagacccacagacgagggcgaacgagcgcgaccgccgacaagaggcgggccggaagac

SEQ ID NO: 232514 - RNA, 74 nt, Homo sapiens
acagaagggccaaggaaaaacgagcagaaagaagccagaggaccagcagaaacagaaggggaacaacggacagg

SEQ ID NO: 232515 - RNA, 72 nt, Homo sapiens
ggggcggaaggggccagcggagacagcaaggagcgaggggggcccacacgagaacacgcgggcgggaaacag

SEQ ID NO: 232516 - RNA, 54 nt, Homo sapiens
aagaccacagcagcacccagggggaccagcagcgccccaccgccaccccccggg

SEQ ID NO: 232517 - RNA, 62 nt, Homo sapiens
cagaagcccaggggagagagccaagcaagccagaggagaacgccaagccaaccgaaaaagcc

SEQ ID NO: 232518 - RNA, 70 nt, Homo sapiens
gcagcgcgaccaggccaagacgggagggcccgaggcgcggggcacgccgcccggcccccacccgcccgcg

SEQ ID NO: 232519 - RNA, 78 nt, Homo sapiens
aaccaacagccccccagagcaaaccaggaaccccgggaccagaagccagaggggcccaaaaaggaacggcggagagac

SEQ ID NO: 232520 - RNA, 77 nt, Homo sapiens
cggccgccgccccacacggagaggcccggcggcgcgcccaaccggcgacggaaccaagggcgcgcgggggcacagcc

SEQ ID NO: 232521 - RNA, 81 nt, Homo sapiens
cggagggacaccgcccggcgcaacgagaacgggagccgcagaaaggcccaggaagagcaagcgccagcacaaggcgcgggc

SEQ ID NO: 232522 - RNA, 77 nt, Homo sapiens
gccgggcccaacacacgcagaggagaaggcagagcccccccaggcagaagcccgagcgggaaccagcgaagccaggg

SEQ ID NO: 232523 - RNA, 86 nt, Homo sapiens
aggcagcaaaggaaggacaaaaccgaaagagcaagggccgaaaacacagaagagccggagaaagcgggaacagcacaaggagggac

SEQ ID NO: 232524 - RNA, 77 nt, Homo sapiens
agcagccacgaggcgagccagagccgcagcccacacggacagggcccaaaaaggcaacaaacggagaaaggaggaga

SEQ ID NO: 232525 - RNA, 82 nt, Homo sapiens
gggcaggaagacaaaaacagggcgaccaagagagaaacagaacaaagaagagcagaaaacaaagacaagaaggcaagaaaag

SEQ ID NO: 232526 - RNA, 74 nt, Homo sapiens
cacacacaacgcgagcacacccccagaaggaggaagccagcccgagcaggcccaggggaggaggggcaaccaca

SEQ ID NO: 232527 - RNA, 80 nt, Homo sapiens
acgagaccgggagaccaaacagccagagaccaccccgcccggggagaagcacagccacagcaaccaccccccagcagccc

SEQ ID NO: 232528 - RNA, 79 nt, Homo sapiens
acccagcaacgggcagcgggcgcaggaccccgccccacgcccaggcgagcagacaccgcaggaaagggcaaaggacgcg

SEQ ID NO: 232529 - RNA, 85 nt, Homo sapiens
aggaggacgaggagagccggcggcgggaggccaagggcggcacccaccccccgagcccgcccgccggccccagcccccaccagca

SEQ ID NO: 232530 - RNA, 69 nt, Homo sapiens
gagccccacagccaaaggaggcaccagaaaccagagagcagaagcgggcagggacccagaagaggagcg

SEQ ID NO: 232531 - RNA, 73 nt, Homo sapiens
cgccggcgagacgcccggaccaggaagcggacgcgggacggaagcacacgcggcgagccgccgccccaggcgg

SEQ ID NO: 232532 - RNA, 78 nt, Homo sapiens
gccgcagggccgacaagcggaccaagccagacccaaggcgcccagacgagcccaccacggaccacccgcagccagcga

SEQ ID NO: 232533 - RNA, 78 nt, Homo sapiens
agccccaagaagacgccgcccccagagggcaaaggccccgagcgcagcccgaggaaggccgcccacggacagggagca

SEQ ID NO: 232534 - RNA, 83 nt, Homo sapiens
gagccaaaaggggggacacccaagccgaaaagacgaggcgaggaggcgagacacccaacccaccccaccccggagggccagac

SEQ ID NO: 232535 - RNA, 58 nt, Homo sapiens
agccgggcgacggccaccaccggcaaaacgggcgggggcaaagaaccacaagaacaaa

SEQ ID NO: 232536 - RNA, 72 nt, Homo sapiens
gagaaggaccaagaaccagcccgccccccaaagcgaagccaaagcgaaggcaaaggccaagaaggcagggaa

SEQ ID NO: 232537 - RNA, 81 nt, Homo sapiens
aacacgccccgcaaagaccggccagggggccgaacgcgcccgcccccggaggcggcgcccaggaggaaaccacggaccgcc

SEQ ID NO: 232538 - RNA, 74 nt, Homo sapiens
ggccagcgccccaggccaagagggacccacccggcggggccaaggggacccgaggccacccaggcgcgggacgc

SEQ ID NO: 232539 - RNA, 74 nt, Homo sapiens
aacaagccaccagccagcgacccccaggaaaggaaaaacccacaaacagcacaacgggcaggcagcgggagaga

SEQ ID NO: 232540 - RNA, 79 nt, Homo sapiens
cgcgggggcggggagcgcggaccccggccgggacgcgcaggaaaaaccagaagagaaaaaacaaaggggagaggcaccc

SEQ ID NO: 232541 - RNA, 67 nt, Homo sapiens
gacagggacgcaggagaacagacacacagagagaaaggcacaaaacggggaacgcaaaaacacaaca

SEQ ID NO: 232542 - RNA, 76 nt, Homo sapiens
cggaccgcgggacaagaaaacagcggcgaaccacgggaacaaaggcgaggacaaggagggcaggggacgggaccca

SEQ ID NO: 232543 - RNA, 73 nt, Homo sapiens
ccggccgcgagccggcgcagacgccggagaccgggacgagcagggccaccccagccccggagaccccacccag

SEQ ID NO: 232544 - RNA, 75 nt, Homo sapiens
gagacccagggaagagccagaagacaccagaccgcgggaggcgccagcaggaaacacagccggaaaaaaggaaga

SEQ ID NO: 232545 - RNA, 70 nt, Homo sapiens
cccccggacagacgccgacgcccagagcggagaaagagggagacgcaccccacacaccccgagaggagac

SEQ ID NO: 232546 - RNA, 57 nt, Homo sapiens
cacacccagggacaagccccgcgcccaccacggcagggacccgagaaggaggcaaac

SEQ ID NO: 232547 - RNA, 61 nt, Homo sapiens
ccagagccaaacccgacgccacgacagccaggacgcggagcgagaggccagaccacagacg

SEQ ID NO: 232548 - RNA, 66 nt, Homo sapiens
agaagcgccgcgcacggaccggcagagaagaagccacaaagcagacagaaagaacggagaagggcc

SEQ ID NO: 232549 - RNA, 71 nt, Homo sapiens
ggcggacagcggggcccgcggaaaacagaacgggcaagcaagccaaaggcacaaaagggagaggagagacc

SEQ ID NO: 232550 - RNA, 49 nt, Homo sapiens
cggaagccgacagacaaccagggcaaacagaagacgggcaaaagagcgg

SEQ ID NO: 232551 - RNA, 76 nt, Homo sapiens
gagcaagcgggggaccgaacaaggcaaaagggggcgcgagggcgagagcgcggggaggggaggccaggccccgcac

SEQ ID NO: 232552 - RNA, 79 nt, Homo sapiens
cgcggagcggagccggccgacgcgggcgcgagggcagaaccgggggcagccgaccaggcgcgggagcggggcagcggcc

SEQ ID NO: 232553 - RNA, 60 nt, Homo sapiens
gccggcaggcgggcgcgcggcagcaggcggcgggcaccccacgcgaccagcccccagaga

SEQ ID NO: 232554 - RNA, 85 nt, Homo sapiens
caagaggaggaacacgccggaaacaaggagaaggcaccggccaaagggggcgaccgggacaggacgacgacagcgcccgaagcca

SEQ ID NO: 232555 - RNA, 83 nt, Homo sapiens
gcccccaggaacagggcaaaggagagcacaaccacgcagggaagcccaggggcagggcgcgcgggggcacagcccaggcgcag

SEQ ID NO: 232556 - RNA, 78 nt, Homo sapiens
gccagacacagaaggaacaccgaaagacggaagcgacaaaagaagcgaagccaggaacaagaggcggaagacacacaa

SEQ ID NO: 232557 - RNA, 90 nt, Homo sapiens
caccgcaaggaggggacacagcgaccacgacggagaagcagggccaaggggcgacagagcgaaagaaacgagccaggccaagacgggaaa

SEQ ID NO: 232558 - RNA, 65 nt, Homo sapiens
aaggcaacaagaaccgaaggcaaagggcaaacgggcaacaggggcacacacacgagaaagagcca

SEQ ID NO: 232559 - RNA, 77 nt, Homo sapiens
gaaggcgccaacgaaggcgaccacgaagcagagggcgccgaggacgcacgagagagcagcaagcgcacaggggaagg

SEQ ID NO: 232560 - RNA, 74 nt, Homo sapiens
cagcgccacccggccgggcccgggggccggagacgcaagaacaagagccacacgaagcagcaagacagcaccac

SEQ ID NO: 232561 - RNA, 73 nt, Homo sapiens
ggagagaggggcccgggcagcagcccacccgcacggccagagagggagcagaagaacaagacgagacaaggac

SEQ ID NO: 232562 - RNA, 75 nt, Homo sapiens
agagccgcgccgccgcgccgcccgcggccacccgccccagagccagcccaggcaaagaccgcacagaaaacaccc

SEQ ID NO: 232563 - RNA, 51 nt, Homo sapiens
aggcagaagggggaagaccaaaagaccaggccgaaagacacccacagcagc

SEQ ID NO: 232564 - RNA, 68 nt, Homo sapiens
ggcgccaccgacgccgcccaccggcacagcggaccccgcccgaacgcacaaccggggggaacacacgg

SEQ ID NO: 232565 - RNA, 70 nt, Homo sapiens
cagccccccggaggacaccggagcggcaggggaggcgaagaagagcccggacagaaagacgacaaaaaaa

SEQ ID NO: 232566 - RNA, 72 nt, Homo sapiens
aagaagcagaagagcacagcacgaacagacagaaagcaccacagaaagggcggacagaaggcacgggggccc

SEQ ID NO: 232567 - RNA, 72 nt, Homo sapiens
cagcagaaagcaaaccagcaggcaccaaggaaagcagaagacaagaccagaaggcaccacaacaccgggccc

SEQ ID NO: 232568 - RNA, 74 nt, Homo sapiens
ccgcagaccgcagaaggccggagacaccagcagggcccggggacacgagcggccccagcgcccgcacaaggcac

SEQ ID NO: 232569 - RNA, 72 nt, Homo sapiens
ggaagggacacaggacacaggacagaacgggccggagcagaaaagaagccacagcaaaggcccggaagagaa

SEQ ID NO: 232570 - RNA, 72 nt, Homo sapiens
gaaacgaagggagcgacacacacccaaggacagacgggaaacgaaagaccggcgagaagcgcaaaaggcgga

SEQ ID NO: 232571 - RNA, 76 nt, Homo sapiens
gcggcgcagcgacccccgccaggcaaaaggaaggacagcccaaggcggaaaagcgaaggaagccacaagcacagcc

SEQ ID NO: 232572 - RNA, 75 nt, Homo sapiens
gcacagagacaaacgccacgggaaggcgcgcgagggagcgacacccaagagcagcggcacggccacaaccaaaaa

SEQ ID NO: 232573 - RNA, 65 nt, Homo sapiens
gggagaacacaaaaagcagagccagcagggacacgcaggcacagaacgccaacaggcgaggggac

SEQ ID NO: 232574 - RNA, 71 nt, Homo sapiens
ggccccaaggaaaaccacccgcagcgaaacacaggaacgggagcccccacccaccgaaaagaagagaggga

SEQ ID NO: 232575 - RNA, 76 nt, Homo sapiens
caagggcacgggaagaccggaggggacgaagaacggccccccgggaagacacaaacgcaccaccagaaagccaagc

SEQ ID NO: 232576 - RNA, 64 nt, Homo sapiens
gccgccgccgccaccacccacccggacacagagcggaaaacgccagcggacaaaagggacgcgc

SEQ ID NO: 232577 - RNA, 67 nt, Homo sapiens
aggggccgcccgcgaggcacagaagagcagagcaagcgacccggacaaaaggacaaacgaggaggaa

SEQ ID NO: 232578 - RNA, 73 nt, Homo sapiens
gcgggccccccggcaacgcggcaagccaaagcgccacaggggaggacgcgagcggaagagaagcaaaaagaca

SEQ ID NO: 232579 - RNA, 78 nt, Homo sapiens
gacagaacagaacccaaaagccgacaaccccagaaacaggaaccacaagcagcaaggcgccaagacgagagcccaaac

SEQ ID NO: 232580 - RNA, 37 nt, Homo sapiens
agggaaaggcaggggaaggccagcaagacacaaggca

SEQ ID NO: 232581 - RNA, 84 nt, Homo sapiens
ccaggcagggaggagaccggcacccagacaggggcgaaggcagaggaggagcaggaagaagagagccaagcgaacgccgaggaa

SEQ ID NO: 232582 - RNA, 83 nt, Homo sapiens
aacagcagggccaccaggcagagcgggacagccaggaggaagggcagcggcagagcccagagagaagggagaccgagccaggc

SEQ ID NO: 232583 - RNA, 79 nt, Homo sapiens
gcggaggaaacgggaggaacggagagcgaggaccacaggcgcaggcgccccgccaggggcaggaggccaaggggacgga

SEQ ID NO: 232584 - RNA, 78 nt, Homo sapiens
acaggcagaaaacgagaggccaccgcagcggcaggacgaaggagggagaaaaggaacgcggaccaagcaaaccaacag

SEQ ID NO: 232585 - RNA, 89 nt, Homo sapiens
gcgcggaacagcaggcccgagcccaccgcgccgggccccggacgccgcgcggaaaagaccacccaacacacaacggcccagccaaacaa

SEQ ID NO: 232586 - RNA, 75 nt, Homo sapiens
ggcaaaaggaacggggacacacaaagcgcgccaaacaggaccacgcaaggaacaacaggcggggcagggcggccg

SEQ ID NO: 232587 - RNA, 76 nt, Homo sapiens
gcggacgcccccgagccggaggacagccccaaaaaggacggacagcaacacgaaccagggagggagcagcggacaa

SEQ ID NO: 232588 - RNA, 57 nt, Homo sapiens
ccaccagcaccccgggagaccgcacacaccgaggggagagggagcccggacagggac

SEQ ID NO: 232589 - RNA, 72 nt, Homo sapiens
aagccaaaccagccaagagccaccggaacaagccaagcaggcaccaagcagccaccaagcacagcagccgcc

SEQ ID NO: 232590 - RNA, 64 nt, Homo sapiens
gggacacacccagaagccggacacaaccagagggaagcacgcccgggcacagcggaagagacga

SEQ ID NO: 232591 - RNA, 86 nt, Homo sapiens
caaaaagcccgcaggggcgagggagcccagagaccaagagggcgcagagggcgaggaggagaacccaccaagccccgcaggagcca

SEQ ID NO: 232592 - RNA, 73 nt, Homo sapiens
aggacggcggaaggcagggcagacaacgggacacaaggcgccggcgagccggggagaagcagaccgcaccagg

SEQ ID NO: 232593 - RNA, 71 nt, Homo sapiens
gggagggccaagaaggacccaagaacgcagaagaaagagagacagcaaaaggcagaccgccacccagcagc

SEQ ID NO: 232594 - RNA, 72 nt, Homo sapiens
agaaccagcccccgcaaaaggcccagccagcaccgcgcacccagcagcacccaaagggacagccggcaagga

SEQ ID NO: 232595 - RNA, 78 nt, Homo sapiens
ggacagcccacaaaggcaccgggagcaggaaaccagaagaagggaccagggccaagagaagaagagcaccccccccag

SEQ ID NO: 232596 - RNA, 51 nt, Homo sapiens
gggccaaggcaacacccgacggggaacaaaccccccacggcccgagcacac

SEQ ID NO: 232597 - RNA, 70 nt, Homo sapiens
agagcaaagcgccaggccaaccagagacaccagcaggacaggaaaaaaagagacaacggcaagcggagaa

SEQ ID NO: 232598 - RNA, 71 nt, Homo sapiens
agcaggcggagacccgaccaggaagaggaacaggaagaacgccagagaaaaagcacaaccagcccagccga

SEQ ID NO: 232599 - RNA, 61 nt, Homo sapiens
ccaaaagggacggacaaaggaacaggaccagggcgccagcccccaggaggaccgacgaacc

SEQ ID NO: 232600 - RNA, 62 nt, Homo sapiens
ggggacaacaaagcgcgggaacaaagcagcccaggcagaccccagaccgggaacaccaccag

SEQ ID NO: 232601 - RNA, 61 nt, Homo sapiens
gggagaccacagcaagacgccgggaccccggaaaccagaaaggcacggcagacacaccgac

SEQ ID NO: 232602 - RNA, 71 nt, Homo sapiens
gcaacccagaacccccaggagggcaggagaaaggagaaaaagaggcagggagaagaaacggcagagacaaa

SEQ ID NO: 232603 - RNA, 35 nt, Homo sapiens
caggcgcgccagacccccgaagcggaaggccagca

SEQ ID NO: 232604 - RNA, 80 nt, Homo sapiens
aagaaggcagcaagggccagaagaccgggaggaccagggaagcaggaaaagagagagaggcgaagcagcaaaacacacag

SEQ ID NO: 232605 - RNA, 54 nt, Homo sapiens
gccagcacacggagcaaagacccgaccacagcccacgacccccaggccaccgcc

SEQ ID NO: 232606 - RNA, 76 nt, Homo sapiens
gcaaaaaacaccacaacggagagggagaaacagaaccccggcccaggaaagcggacagacagggccagcagaccac

SEQ ID NO: 232607 - RNA, 82 nt, Homo sapiens
gacgacgcaagcagcgggaggagcaacgagaccggaaagaagggagaccgcggggaaaagagaaaggccaaccaaagaccag

SEQ ID NO: 232608 - RNA, 68 nt, Homo sapiens
gagcaggcgagcgaacgacggggcaacaggaaaacaacccagagaacccaaacccccagacaagacac

SEQ ID NO: 232609 - RNA, 68 nt, Homo sapiens
gcacccccgggaccaggggcccgacagcgcaacaggaacgaagcccgcagcgaggggggagagcgccg

SEQ ID NO: 232610 - RNA, 80 nt, Homo sapiens
acgacacgcccgcgcccagcgcaacgacaagggaggcgaggacggacaaaaggaaacggacgggaggccagccagcagaa

SEQ ID NO: 232611 - RNA, 78 nt, Homo sapiens
aagaagaagaagagaagaaagagaaaccgagccccggaaggaggggcccggggggaggaaaacagggcgaggacggga

SEQ ID NO: 232612 - RNA, 73 nt, Homo sapiens
caaaagaagagacagcccgcagagagaaccgacaggaaccagacacgcaaacaggggacaggcgggccacacg

SEQ ID NO: 232613 - RNA, 69 nt, Homo sapiens
cgacgcggaccagaagccagagcgaggacgccggcagagccggaacgggagaaaaggccacaccggggc

SEQ ID NO: 232614 - RNA, 74 nt, Homo sapiens
agccgcaggaccggaggacaggaagagaagcccagacacgaagaagagagccagagcacaagaaagacaccccg

SEQ ID NO: 232615 - RNA, 70 nt, Homo sapiens
aaggaccaagaaccaggccaggcgaaccagccgaaaaaggagaaaccaaaaggaaaagcgaaccagacag

SEQ ID NO: 232616 - RNA, 71 nt, Homo sapiens
aaaaacaaacagcgagacaaggaaagacgcagaggagcgggggcccgcgaaaaacccacccagacggaagg

SEQ ID NO: 232617 - RNA, 68 nt, Homo sapiens
acgcaggcagccgccagggcgaagacaccaaaccaccagaacagacccaggcgcgacggccggggccg

SEQ ID NO: 232618 - RNA, 76 nt, Homo sapiens
cccgccggcacgccgccagccccgggggccacgagcggggaccgcgcaagaaacgccggagggaaaaaagcgaaaa

SEQ ID NO: 232619 - RNA, 70 nt, Homo sapiens
ggaacccgcgaagcgggaaggcaaggacccacagaccggcgacacaagaaaacaacggggaggggagccc

SEQ ID NO: 232620 - RNA, 68 nt, Homo sapiens
cgggacccccaagggaaagccaacgcgcgggggcgcggagggccccccaagcccacccacacaaggag

SEQ ID NO: 232621 - RNA, 74 nt, Homo sapiens
cgccccgccgcggggcgcgcggcgccggcggcgcgcgacccccgcgcaggaaccaaccgggagccccccaagag

SEQ ID NO: 232622 - RNA, 82 nt, Homo sapiens
cagaagagggcagaagaaaccagccgaaccagggccaccgcgcaagaccgcacccaccagaaccgggcaggcaagacgcgcc

SEQ ID NO: 232623 - RNA, 71 nt, Homo sapiens
aagcagaaggaaaggcaaaccaacggcccagaagaagcaaggcccaaagaggccggccccgaaccagagac

SEQ ID NO: 232624 - RNA, 77 nt, Homo sapiens
gggaagcgggaggcaggcagccagggggggcgcggggcccacgccccaggacaaaaggcgggacaacaccccgagga

SEQ ID NO: 232625 - RNA, 81 nt, Homo sapiens
gcccagccgggaacccccacgcggccagcgaaaacgcccaggagaagcacaagaagacaagggcccagaaaccacaaaggc

SEQ ID NO: 232626 - RNA, 71 nt, Homo sapiens
gaagagccggccggacaggacaaggccgagccacgccgaccccaccgggccagggcccccgcccgggaacc

SEQ ID NO: 232627 - RNA, 73 nt, Homo sapiens
gacccagaaaaggcggcccagagaaacccagaaaaccgagaacagggggggcaaaaccaagcacggacggaag

SEQ ID NO: 232628 - RNA, 85 nt, Homo sapiens
aggacaagagacgacacgcaagcaggcaaccgaaacagccacaaacccccccacgacaccgaagcagcgacggcacagcgggaag

SEQ ID NO: 232629 - RNA, 78 nt, Homo sapiens
gaaaaagaagaagcaacgacaaaccagggcggccgccccacaccccagaaacaggcgggaaacacgggaacggaaaga

SEQ ID NO: 232630 - RNA, 71 nt, Homo sapiens
cccaccgaagagaacagggccggggcacgacgacccaacagcaagaacgagacgaaggaagggcgagacag

SEQ ID NO: 232631 - RNA, 59 nt, Homo sapiens
gaccagagacacgccaagcagccagcccaggagaggaacaacaggcagcacggcccccc

SEQ ID NO: 232632 - RNA, 40 nt, Homo sapiens
aacaggagaacaagaccacgggcgccagcagccacacacg

SEQ ID NO: 232633 - RNA, 81 nt, Homo sapiens
gcagaaggagagaagggggagcacagaacacaggggcagagagaagagcacacagaaggccaggagcgacagagcggggaa

SEQ ID NO: 232634 - RNA, 80 nt, Homo sapiens
cccaggacacacccaagaggacaaagcaaaacaggacaccagagaaaaggggacccaggaaccggaaaagacgagaagca

SEQ ID NO: 232635 - RNA, 83 nt, Homo sapiens
ggaaaagaaaagcagaaacaacgggcccggggagaaggaaaaggaagcgagcacgcccagcgcgccccggagcggaagagccg

SEQ ID NO: 232636 - RNA, 81 nt, Homo sapiens
gacaggggcccaacaaccccgggaagaaggaggacccaccgaagccaaccagagaaacaagccgaagggcagccgaagccc

SEQ ID NO: 232637 - RNA, 76 nt, Homo sapiens
gacgggcaggaaggagggggcgcacaaacgaggccgaggggaagagcggggaccccgaacccagcgaagcaccaaa

SEQ ID NO: 232638 - RNA, 75 nt, Homo sapiens
gccgagacgaggagaaaacccagaaaaaagggcagggccaggcacggagaagaggcgcgcaccgagcaggaaggg

SEQ ID NO: 232639 - RNA, 39 nt, Homo sapiens
gaaggaccaaggcacagggagaccaaaacaagaaggcag

SEQ ID NO: 232640 - RNA, 83 nt, Homo sapiens
cacgcgcacggcaccggaccaacggggcacggaacccaaccccaagcagcagaccagcaaaaacagagcggggaaagaccaac

SEQ ID NO: 232641 - RNA, 81 nt, Homo sapiens
ccaaaggccaccagcacccggggggccagcgggcacgggcacacgcggagaagagcaacggcaaaagcagaccggaaaacc

SEQ ID NO: 232642 - RNA, 81 nt, Homo sapiens
ccgcccggcagcgccccgcgagaaggaggagcccccgcccggcagccaccccacgggaaagggaggccagaaagacccaca

SEQ ID NO: 232643 - RNA, 75 nt, Homo sapiens
gaaggcgcgaaaagaaacagaaaggaaaggggcccaggaccagcccggcacagcagccggaggccaaagcaggca

SEQ ID NO: 232644 - RNA, 78 nt, Homo sapiens
caaaaccaacgccggccggagcagcagcccgaggccacaccaacaagacaagaaccaaacagaacccacgaagggaga

SEQ ID NO: 232645 - RNA, 79 nt, Homo sapiens
cgacgggacaagagaacagccgcgcggcgagcggcccgcacaaggccggcagaccgaggccaaaagaaaggaagaaaac

SEQ ID NO: 232646 - RNA, 79 nt, Homo sapiens
aaagcggagagcgcgaagcccaccgaaagcagcgccgcccaagagagagaagagaggcgcgagggcagggaagaggcgg

SEQ ID NO: 232647 - RNA, 71 nt, Homo sapiens
ccaagcacacgggaggcagaagcgaggaaggcaggcaaaccgacaccagcgacacaagcgcgagggaacca

SEQ ID NO: 232648 - RNA, 89 nt, Homo sapiens
aaaaggaacaagaaaacaacggaggaacaggagcaccacgagagcacccagagaggaggagaaaagggagccggaagcagggcagccac

SEQ ID NO: 232649 - RNA, 75 nt, Homo sapiens
gcaccgacgcaggcagaacagggccacaccaccggccaagagacagacaccaaacagacgagaaacgcagcaaaa

SEQ ID NO: 232650 - RNA, 68 nt, Homo sapiens
gaaaccggaagacagcagaggccagacggaacagccccaagccggaaacccaggaacggaaacagaac

SEQ ID NO: 232651 - RNA, 71 nt, Homo sapiens
agggcaccaaccaacccggaaccgcagacccgggcccgccacgaggcggccccagcgcgggcgacaggccg

SEQ ID NO: 232652 - RNA, 101 nt, Homo sapiens
gaagcgcggcagggagcgcgggggcccgcgcagcagcgaccacgggggcacccgaggaggaagagggcagggcccacggaaagaagggaaacccggggaga

SEQ ID NO: 232653 - RNA, 72 nt, Homo sapiens
gcgccaccccccccgccccccccgcgggagaagggcccagacggccacgaggacgggccaggagaaacaggg

SEQ ID NO: 232654 - RNA, 64 nt, Homo sapiens
aacaacccagacccagcccgggcccggagcaggacagacccccaggcgggagagacggcaggac

SEQ ID NO: 232655 - RNA, 62 nt, Homo sapiens
aagcaccggaaaacccacgaaagagagcagagcagacccaaggccacgagaggacgcgggag

SEQ ID NO: 232656 - RNA, 78 nt, Homo sapiens
ggggagggcgcgccgaaagcggaagcgagcagcgcaaagcacaaagaacgcacaccaccagaacgagggcgggaaaga

SEQ ID NO: 232657 - RNA, 74 nt, Homo sapiens
gccaagggagcgaaaagaacccccaaaaggcagcaacgccacggccagccagcaacgacagaccagaggagcgg

SEQ ID NO: 232658 - RNA, 75 nt, Homo sapiens
aggaagaaagaaccgggggacaggaaaacgacgcaaagacgaacaaaccgaagcagaacaggaacccagcacgag

SEQ ID NO: 232659 - RNA, 68 nt, Homo sapiens
aaaacaagaaggaaaaacgccacgcaccggagagagcacaggggaagaacacggaaaccggacaggga

SEQ ID NO: 232660 - RNA, 54 nt, Homo sapiens
ggacaaggggccagagccggccgaaagccaccacaagaaaaggccccaccgggg

SEQ ID NO: 232661 - RNA, 67 nt, Homo sapiens
gaaacaaggcaacagaaagagcaacagcagggcaacaggggaccaaaagaacccagccaacccgcag

SEQ ID NO: 232662 - RNA, 51 nt, Homo sapiens
ggcccggaagacggccaggccgcaaggcacaccaccaggccgcacgcccca

SEQ ID NO: 232663 - RNA, 56 nt, Homo sapiens
accgaaggccacaaaaccacgacacggcaggaagggcagaaagaaagcaggaccag

SEQ ID NO: 232664 - RNA, 72 nt, Homo sapiens
cacaagcaaggaggccgcaaagggcacgaagcaggaaagaacgacgccagggagacgcgccaggacccacaa

SEQ ID NO: 232665 - RNA, 67 nt, Homo sapiens
accgaccagaacgcagcaacaaaggacagggacaagcgcacagcggagaaagcagcgcggccaggag

SEQ ID NO: 232666 - RNA, 49 nt, Homo sapiens
aacagaacagcccggaaaaaagaggcaggagcggcaggggaggcgaaga

SEQ ID NO: 232667 - RNA, 82 nt, Homo sapiens
ggacccgccaggaaagccagccgaacacccaacaagaaggcaacgacaaacagccaagcaagccccagggccccgaaaccac

SEQ ID NO: 232668 - RNA, 84 nt, Homo sapiens
ggagcgcgaggccggcgccagggcaccgagacaaggccgaacgaggcggggggcccgagaccacaccacacccaccagggagga

SEQ ID NO: 232669 - RNA, 70 nt, Homo sapiens
agcacagcagagagaagccagaggagcaccggcccaggcggaggcaaggcggacccggcggcgcaaccca

SEQ ID NO: 232670 - RNA, 57 nt, Homo sapiens
gaacgaaaggaaaagagacgcagacagccagagcaagacccacgaagggcacacaaa

SEQ ID NO: 232671 - RNA, 80 nt, Homo sapiens
cgagaccggaccgagagcggaccgagagcgcgaaacgcacgagaaggaaggaggccagaaggagacccccacgggcaggc

SEQ ID NO: 232672 - RNA, 73 nt, Homo sapiens
ggagcccgcagcccgccggcgcgccccacgggccaggaggcccgaaggaggcgccaagggagacaccacaggg

SEQ ID NO: 232673 - RNA, 61 nt, Homo sapiens
ggaaacggcacgcaggccgggcaggcggcaaccaaacggcgccaagcgcccaccccacggg

SEQ ID NO: 232674 - RNA, 77 nt, Homo sapiens
ccgcggggggccacgcacggcacgcgcccacggcgggcccggcggggaggcgagaggcagcgagaagaaaaagaaga

SEQ ID NO: 232675 - RNA, 72 nt, Homo sapiens
gagaagcagaaaaccagaagcacaaggacagagcacccaccacaggaggaaaacaggaaccaagagagcggg

SEQ ID NO: 232676 - RNA, 70 nt, Homo sapiens
cagacgaagaccagaaacaggacaagaacagaaggcccaccacacacgcagggcgcagcaaagaagaggg

SEQ ID NO: 232677 - RNA, 75 nt, Homo sapiens
caaggagcagacggccgcagcaaagggccgagggacaaccaaggaagagccaaacagagagccaccggcacagaa

SEQ ID NO: 232678 - RNA, 81 nt, Homo sapiens
cgagcgccgcgagcggcgcgggacgcgaggccggggaggcaccgccccaacccccccccgcccggagaaccccgcggaacg

SEQ ID NO: 232679 - RNA, 71 nt, Homo sapiens
ggcccgccccccggccgggccagggccgcggcgccagccggaggaggagcagacgggaaacgaaagcgagc

SEQ ID NO: 232680 - RNA, 72 nt, Homo sapiens
cccccccacccccggcccgggagcccccgcccggagaggcagcacggcaggagacgaggagaggacagcagg

SEQ ID NO: 232681 - RNA, 79 nt, Homo sapiens
cacggggcaggcgagcccgccacagagccgaaagcgcaccccccggaggcggccgagcccacgcgacgaagaacaggag

SEQ ID NO: 232682 - RNA, 74 nt, Homo sapiens
gacgaagaaagaaccgagcacaagagcaagacacaggagcgacaaaagaagcgaagccaggaacaagaggcgga

SEQ ID NO: 232683 - RNA, 72 nt, Homo sapiens
agagagaggagaagcgacgaggaaggcccccaagggacagacgaggcgagcggcacacgggaggaccacgga

SEQ ID NO: 232684 - RNA, 80 nt, Homo sapiens
gacccggaagcaaagaaaaagaacccaaacaagacgcaagaaagcaaaccaaggcaggcacgcaacaagcggacgagaag

SEQ ID NO: 232685 - RNA, 111 nt, Homo sapiens
gcaaggcgggccagagagaggcgcagccaagacagcccgcagaagcagggcggcccgggacgggccggcgccaccgaggacacgcccagccagacgaggagcacgcccgag

SEQ ID NO: 232686 - RNA, 70 nt, Homo sapiens
gagaccgcaaaggaaacacaaacccgaaggacaggacaagcaacaaaaacccaaccaccaccagcagccc

SEQ ID NO: 232687 - RNA, 71 nt, Homo sapiens
cccccaagagcggaacaggcgggaacaagggccgaggcagcacgcaagggccaggaccggagcgagaccgg

SEQ ID NO: 232688 - RNA, 64 nt, Homo sapiens
ggcggcgcgcggaccagggggcggcgccaggacaggaaccacacgccacacaaaacaccaggcg

SEQ ID NO: 232689 - RNA, 85 nt, Homo sapiens
ggaggagaagcggcgggagcgaaggcgccgaacccgccggcagccggcgaggagggcgagccggaggagaaacccaccagcggcc

SEQ ID NO: 232690 - RNA, 79 nt, Homo sapiens
aggcgggggcgcggaaaacagaggcggagcacgcccagagcccaccgaaacccccacccagaaaaaagggccagaacca

SEQ ID NO: 232691 - RNA, 73 nt, Homo sapiens
cccgaccggaacccgagaccacaagcccaggagaaaccaggacggggcgcagaggcaacgcacagaaacagaa

SEQ ID NO: 232692 - RNA, 72 nt, Homo sapiens
aaagaacaaaccgcacgacacaggaaaggacaaaaccagaagcaggggggccggccaagggcgacggaaccc

SEQ ID NO: 232693 - RNA, 62 nt, Homo sapiens
aagcacaagccccaaggaacccacgcgagccagcaaccaggaaacggagcacccaccaacga

SEQ ID NO: 232694 - RNA, 67 nt, Homo sapiens
ccccaagggcgggaacaggagggcaaaggagaacgagaccaacgagaaagcaaggaagcaggaaaac

SEQ ID NO: 232695 - RNA, 86 nt, Homo sapiens
gcaagaacaccacaccaccgcacaggggacaaagggaggaggacgaggagaaggcagggagacgggcaacacggaagcgccacccc

SEQ ID NO: 232696 - RNA, 62 nt, Homo sapiens
cgcacacgaagagaagcaaggcccaagacccaggcgcaaaccagccggcgggcgccacaacg

SEQ ID NO: 232697 - RNA, 55 nt, Homo sapiens
gacgggcagccccggaccaacgggaagaagaagaaggcgaagaagcacaacacca

SEQ ID NO: 232698 - RNA, 75 nt, Homo sapiens
ggggagcggacgcaggagcccccccggcagcaacccccacacccagcaccagagagccaagcgaacgaaaccaga

SEQ ID NO: 232699 - RNA, 69 nt, Homo sapiens
cgcccaaaggccagagcacagcgccaaagcaggaagagagaaggccacgcccgaccccaagcaacaacg

SEQ ID NO: 232700 - RNA, 72 nt, Homo sapiens
ccagccaagaaagaagagccaggcagcgagcgggagcagacagggaaccgaaggcagcagaaaagaaggcca

SEQ ID NO: 232701 - RNA, 83 nt, Homo sapiens
ggaaccccggaagccagaaagggaggaggacaggagaacgggcggggcgaaagaggcacccgggaagagaggcaacccggcca

SEQ ID NO: 232702 - RNA, 75 nt, Homo sapiens
agaagccagagcgaggacgccggcaggagagcgcgcgccgcgcgcccgcacaaacgccggggacaacaacccgaa

SEQ ID NO: 232703 - RNA, 78 nt, Homo sapiens
cgggcggcccggcccccccacggcggaacacacacagcacaaaaggggagcggacgggcccaggagcaggagccacgc

SEQ ID NO: 232704 - RNA, 77 nt, Homo sapiens
cgaccaggcaagcaacccccaagagcggcaggggaagagggcaggcacagcggagcaaagcggcaccgaggcagcgc

SEQ ID NO: 232705 - RNA, 71 nt, Homo sapiens
caccacgacccagacccagcggaaaggagcgcgcccggcggggagcgcagcgcgggggcacccgaggagga

SEQ ID NO: 232706 - RNA, 79 nt, Homo sapiens
cggcgacggggcgcccccccacagaggaccaaagaggagcagccgacggcggccaaggggacgccacgccgacacacgc

SEQ ID NO: 232707 - RNA, 66 nt, Homo sapiens
aacaagaacaaggggacgcgcagcaggagaaaacagagcgcaaaaacagaaagaagagcaaacgcg

SEQ ID NO: 232708 - RNA, 74 nt, Homo sapiens
gccccgcgcccccggccgggccgcccggcggcaggcaggaccaaggcaaggaaacgaccaacccaggacagaaa

SEQ ID NO: 232709 - RNA, 59 nt, Homo sapiens
aggcagaccaagaggcccagggaaagggagcagcaccggccacacccacagcacgaccg

SEQ ID NO: 232710 - RNA, 76 nt, Homo sapiens
agcaacccgaaacgaaggacgcgggagaaggagaagaagaaaaagaacaccaaacacaacaagacacaaggggaaa

SEQ ID NO: 232711 - RNA, 63 nt, Homo sapiens
gaggagggggccgcaaacagagaggcagggcgaagaaaccgaaaagaagaaagggccacaagc

SEQ ID NO: 232712 - RNA, 84 nt, Homo sapiens
cgacccccccccccgggccacccagcccgcccaaccccagcggagagcaaggaagcccggggcggcgacggagcacgacccaag

SEQ ID NO: 232713 - RNA, 68 nt, Homo sapiens
gggaacaaaacgggacaaacgcagccgaagacggccagacaaaggccaaccagagcgcggacaaaggg

SEQ ID NO: 232714 - RNA, 75 nt, Homo sapiens
aagaacccaccacccagcagcagggcacaagaaggcgaagaaggccacggcaggggaggaaaccaggccacaaaa

SEQ ID NO: 232715 - RNA, 81 nt, Homo sapiens
gccgggccagcgccagcccaggagcaggagcgcccagacaggcaccaagcagccgaagagaaacaagggacagcagacaag

SEQ ID NO: 232716 - RNA, 56 nt, Homo sapiens
agggagagccacccaagagacaagcagaaggcagagggggcgagggaggaaagggg

SEQ ID NO: 232717 - RNA, 82 nt, Homo sapiens
acaacagaggagacaggaggaaagaagcgccggaccgaagaggaggagagagggccaacggaccacaccaaaagccaccaaa

SEQ ID NO: 232718 - RNA, 60 nt, Homo sapiens
gacaacgggacgggaaacagaagcagaacagacaaacagcgaccaacacacaaaacaggc

SEQ ID NO: 232719 - RNA, 69 nt, Homo sapiens
cggcgaagccagcggacgggcagggcccagggcacaagacccgagaagcaaacggccgcggcggagaac

SEQ ID NO: 232720 - RNA, 71 nt, Homo sapiens
aacacaaacaggaaggcaaaggagcacggcacccaggcggaggcagggcacgaccagccaagcaacccgcc

SEQ ID NO: 232721 - RNA, 76 nt, Homo sapiens
gccggcggggaccgcggagccgcgggcggcaggacaggagagacaacggaggcaagaaagacggagaagcgagaag

SEQ ID NO: 232722 - RNA, 74 nt, Homo sapiens
accgcgcccagaagcgaagggagagcgccagagaaggcaaggcaccagcagaacagacacccccaaagaccaga

SEQ ID NO: 232723 - RNA, 75 nt, Homo sapiens
gagagcgagcgaagacaccgcgggggaccagcgcgaaagagaaacaaagagcaagccaggcggcagacaaacgga

SEQ ID NO: 232724 - RNA, 75 nt, Homo sapiens
caagaacaaagggagccgaaaagacgccccagaaacccccgcccacgaggaagcagaaccaaccaggcggaggac

SEQ ID NO: 232725 - RNA, 52 nt, Homo sapiens
ggcaagcgacaacaagagagacagaggggcggggaggagcagaagaagacaa

SEQ ID NO: 232726 - RNA, 80 nt, Homo sapiens
gcaaggggccaccaggaggccagggggcgccaggcagagcagccgagaagaagccaaaaaacacggaggagcaggagaac

SEQ ID NO: 232727 - RNA, 66 nt, Homo sapiens
cggaggcacacacaagaccgcacgacaggcacagaaacggcaaaagccacagacccagacaagcac

SEQ ID NO: 232728 - RNA, 72 nt, Homo sapiens
cacagaagccaacacccaaccggccagggaccgagggggcaaccgggcgcccccaggccccaggccggcaag

SEQ ID NO: 232729 - RNA, 74 nt, Homo sapiens
ccaacaccgcagacgaaggagaagacacccgggcgggaaaaaggagcaaagaaaggggaaagagaagaaaaaag

SEQ ID NO: 232730 - RNA, 48 nt, Homo sapiens
gggaaaacaaaaaaaggcggcacaacacaagcccacacggaacaagca

SEQ ID NO: 232731 - RNA, 73 nt, Homo sapiens
cggcccccgcgcgccggcgcgcgggcgggccccaggcccagcaagagaaacaagagccggagagcacaagacg

SEQ ID NO: 232732 - RNA, 75 nt, Homo sapiens
cgaagcggccccagcccgaaagcaaccgggcgcaggccacagaacccaggagcccccgcagggccccggagccca

SEQ ID NO: 232733 - RNA, 76 nt, Homo sapiens
acgaaacaggagaaaaagaaggcgagaggaaccagcaaaaaagagaggcccaccagaagaaggaagcggcaagagc

SEQ ID NO: 232734 - RNA, 74 nt, Homo sapiens
ccgccaaagagccggcacgcacaacaccgagaaggggagagacgcagggccccgcaccaccccagcaaccaaac

SEQ ID NO: 232735 - RNA, 78 nt, Homo sapiens
cacagcccacgagggcaccaaaaacaaggcgagagccacagaaggaggaggggacagcagcaggagcccagcaaagcc

SEQ ID NO: 232736 - RNA, 82 nt, Homo sapiens
acagaggaccagacaaaaggaacagcagagaacaacaaggagccaggagcaggggcgcggcagaggcgcggacgagcagcgc

SEQ ID NO: 232737 - RNA, 80 nt, Homo sapiens
agcacaccagcaacagaggcaagccggcaacgcaaggagcacacaccagaaaccaggagcgaacaagcggccacgccccc

SEQ ID NO: 232738 - RNA, 73 nt, Homo sapiens
cggcgggcccagggcggcggagaggccacccaagacaagcccaccaagaaggcacggaccccggaaaagaaag

SEQ ID NO: 232739 - RNA, 77 nt, Homo sapiens
gacagcggccgcagaccgcgcggggccgcgccgcgccgccacggccagcccccgggcagagggacgcagcaagcacc

SEQ ID NO: 232740 - RNA, 73 nt, Homo sapiens
ggagaacgcccgcggacgacccgaggacgacgcagcacagagaggaaacgaggaaacgaccaccggaggggac

SEQ ID NO: 232741 - RNA, 91 nt, Homo sapiens
gcgccccgcccccccgacccaccgcggagcgggaccgccgcagaaacgaaggaggcccaaccacaaaaggagccgacggaacccagacgga

SEQ ID NO: 232742 - RNA, 72 nt, Homo sapiens
caaaagagaaaagcacaacccggacacgccagggacacccaaagcggggagccccccagacccgaaaggaga

SEQ ID NO: 232743 - RNA, 78 nt, Homo sapiens
cgagcgagacacagacagccaggaacgccaggcgagaccaccaacaacacacaggcacagggaaggacccagaacaga

SEQ ID NO: 232744 - RNA, 71 nt, Homo sapiens
cacagcaccccgaggcccgacccagggagggaagagacgaagggaaaacgagaggggaaagagaagacaac

SEQ ID NO: 232745 - RNA, 82 nt, Homo sapiens
gagagagcggaccccacaggcccacagagacagagcggagggcggagggagcaccgcaccgggcggagccgagcagcacccg

SEQ ID NO: 232746 - RNA, 85 nt, Homo sapiens
accgcccccccagccgcgcggcccccagaccccggcgcgggcacaccgcccgcagcggggaagaacgcccaaggcaaagaccaga

SEQ ID NO: 232747 - RNA, 74 nt, Homo sapiens
acccacacccacgagaggagcggcagaaaaaaacaggaggcgcagggcggggccccacaacgacaaaccagagg

SEQ ID NO: 232748 - RNA, 81 nt, Homo sapiens
ggccgcgcgggcggaggggggccagagggccccccaggccgccccgcccggaagcgacacacgagaaggggggcaacggcg

SEQ ID NO: 232749 - RNA, 54 nt, Homo sapiens
ggagggcgaggccagacgccggagggagaagaccaaagaagagagagcaggacc

SEQ ID NO: 232750 - RNA, 63 nt, Homo sapiens
gggccgggcaagacggcgaagcgcgcgccgcgcccggaccccagcaaacggggacagcgccga

SEQ ID NO: 232751 - RNA, 82 nt, Homo sapiens
gacagagccagccggccccgccgcggccccaccccagcagcccagcacgcggcgcaccagggaacaggaaacaagcgaaggg

SEQ ID NO: 232752 - RNA, 71 nt, Homo sapiens
gggagggagagaaaagaagaggaccaggccccccagagaagcccgagaccaggacaggaaaaacgggaaga

SEQ ID NO: 232753 - RNA, 85 nt, Homo sapiens
ccggccgcccggcgcgcggccgggcgcggcggcggcggggcgggccgcgcgagagcgacacgcgcgacggaggccgcagggccag

SEQ ID NO: 232754 - RNA, 84 nt, Homo sapiens
ggcgccaggcgaccggagcgaacgccacgccgggcgagagccgcggcagcccaagcgaacaccgaagggagagcaagccggccc

SEQ ID NO: 232755 - RNA, 53 nt, Homo sapiens
aaaaggagccggaaacggacaaacaggcagggaggggaaccaggggccgaagg

SEQ ID NO: 232756 - RNA, 65 nt, Homo sapiens
cgaaagaagacagagaagcaaagaagcaggccacggaggcagggaccgggagggacagagaggac

SEQ ID NO: 232757 - RNA, 81 nt, Homo sapiens
gaacagagccgaccaagagggagagcgagcggagacgaacaggaggcagaaccaacagaacgacggggcccccagagaacc

SEQ ID NO: 232758 - RNA, 77 nt, Homo sapiens
cgcagggcggaaggacaacagcccgacaaccaggcaaaagcagaccggaaaacccaccggcaagaccacacccgagg

SEQ ID NO: 232759 - RNA, 77 nt, Homo sapiens
cgaagagggggacacgacccggagcacccgaccccgaggagaagaaccaacaacggaaaaccagcgggacaaggcac

SEQ ID NO: 232760 - RNA, 79 nt, Homo sapiens
agcaacagcgcaaggcaggcaccgaaccacccaagggacacccacaggcagcaccacacaaaacccaggacagaaaaac

SEQ ID NO: 232761 - RNA, 72 nt, Homo sapiens
gaaccaagaccgaggcgaagcaagcacacaacaaacagaacgcaaagagagccaggaacaaaaggggaaagg

SEQ ID NO: 232762 - RNA, 76 nt, Homo sapiens
agcgcgggcgcccgggcgcccgaggccccgggcgcccgccagggaacgggccacaggcagcagcagcacacccccg

SEQ ID NO: 232763 - RNA, 72 nt, Homo sapiens
gccgcgccgccggccgacggccggcgggcgggggccccgcgccgcggccgagcagcggagaccagcgagcac

SEQ ID NO: 232764 - RNA, 67 nt, Homo sapiens
agaaggcagaagacagaggaaaagaggaagagggcgggaaggcaggaggccggggaaggccccgcca

SEQ ID NO: 232765 - RNA, 81 nt, Homo sapiens
cgcccagcggagaaggagaagccgcaggacacccccgaggaaggcggccccgcagcagaggcgagccgccaggggaagggg

SEQ ID NO: 232766 - RNA, 71 nt, Homo sapiens
cggccaggccacaaaggcagcacacaccagagcgaagcgagcccgagccccggcccggggaaaaacagaga

SEQ ID NO: 232767 - RNA, 75 nt, Homo sapiens
caaaagagaaagcaggccacgaaaacacaaggcaagaacaacccaagaaggacagcgcgacagaaggacagcagc

SEQ ID NO: 232768 - RNA, 71 nt, Homo sapiens
caacacgccgccgagcagccgccagccccacggacggacgccagccccacaacagagggggggcgagagaa

SEQ ID NO: 232769 - RNA, 76 nt, Homo sapiens
cagccggccacggagcgccgcaggcagccgcgaacccccagaaccgaaacgaccaccgagacgcccagcgagcgcc

SEQ ID NO: 232770 - RNA, 79 nt, Homo sapiens
gacagagcgagggagcaagagggcggaggccacgaacacgccggagccgccaggacagacacacaccccaggcaacccg

SEQ ID NO: 232771 - RNA, 81 nt, Homo sapiens
ccagagccagcgagccagcaggagcggcgcggagcggcgagggacccgcagggagccaccgagaggagacacccgcagggc

SEQ ID NO: 232772 - RNA, 71 nt, Homo sapiens
caccaacagagagacagccacggggaaaaggaaggccggaggaggcaacagcggacagcaggaagagggcc

SEQ ID NO: 232773 - RNA, 56 nt, Homo sapiens
cagcacacagaggagagcgacgagaagaagcaagcgcagcgaggggagccaacccc

SEQ ID NO: 232774 - RNA, 83 nt, Homo sapiens
ccgacgcgcgcgaaaaaccagccaggagacgccaaggaaagagggacccccggcccaggaagggaccacagaccagcacgccg

SEQ ID NO: 232775 - RNA, 66 nt, Homo sapiens
gccaaagggagagggaagccacaacaagccaaagaagaaggccaaggaggagcggcggcagaggag

SEQ ID NO: 232776 - RNA, 78 nt, Homo sapiens
ggccggaacccgcgaaacccacagggagcagggcgaagcgggccagcggccagggaggcccagggaaaccagacagag

SEQ ID NO: 232777 - RNA, 72 nt, Homo sapiens
gaagcacgcagaaacagcagacggaggccgggagcaggcaaaggagacagggaaagagaaggcacagggcag

SEQ ID NO: 232778 - RNA, 71 nt, Homo sapiens
cggagagggggaagggcccaaagccagaagaaagccacaggacagggagaaaagaagggaagggaccaccg

SEQ ID NO: 232779 - RNA, 63 nt, Homo sapiens
cccagggacaaagagacggacagaacgccggacaggggcaggcggccagcagcagcagagcag

SEQ ID NO: 232780 - RNA, 59 nt, Homo sapiens
gccgacgaccggccaggaaaagccggccacgcagggcacacaaggccaacagaacagag

SEQ ID NO: 232781 - RNA, 74 nt, Homo sapiens
ggccaacggacgacaggagcgaagcaacgggagagcaagaggaaggaagcaagaacccgaaaaaaagaagaacg

SEQ ID NO: 232782 - RNA, 78 nt, Homo sapiens
cgcagcacacacacacggagacgggccgagacccaaggccaagggaaagggggagcggagcagggggagaggaagggg

SEQ ID NO: 232783 - RNA, 76 nt, Homo sapiens
acaacccccagaaagccaagccggggcccggagcggggggaaaacccccaggggaggacggccccaccaggggaca

SEQ ID NO: 232784 - RNA, 88 nt, Homo sapiens
gacccggcggggcgcaccacagagaccggccaaaccacccagcagaaagcccggcgaagccacagaaaccgcccgcacagagcaggag

SEQ ID NO: 232785 - RNA, 71 nt, Homo sapiens
aacgaaggggggaggcccaggccaaaagagcacccggaaacaagccacgaaggagagaaaaccagcagcag

SEQ ID NO: 232786 - RNA, 82 nt, Homo sapiens
aagggaagaggcccagccggcccgcgggggagccccgggagccgcacgcaaaggaggaaacaccacacgaaacacagaaaca

SEQ ID NO: 232787 - RNA, 66 nt, Homo sapiens
aaggaacgaggcaaggagcaaagcagcggcgcagcccgggccccccgccagcccgacgccggccgc

SEQ ID NO: 232788 - RNA, 55 nt, Homo sapiens
gcacacaaggaggcaaggggacacaaaggaggacccaaagcaaacggaacgaaag

SEQ ID NO: 232789 - RNA, 77 nt, Homo sapiens
agaagcaggggggccaggaggggagaggaggcaggcccgcgggccgagaccacgagccccgcggggcacgcacagac

SEQ ID NO: 232790 - RNA, 78 nt, Homo sapiens
ccaaacccagcacggaggcgaggcgggcagacacgagacaggagcgagaccagccggcaaaagcagaccggaaaaccc

SEQ ID NO: 232791 - RNA, 37 nt, Homo sapiens
gcccggggccccacaccaacggcagaagacgagaacg

SEQ ID NO: 232792 - RNA, 84 nt, Homo sapiens
gcacacccggaggagcgcagcaacagaagagaggccagccgggaggacacacaagcggacgggggaccggaccccaccacagaa

SEQ ID NO: 232793 - RNA, 77 nt, Homo sapiens
acacggcggaggcaccgacaaaccagcgaaggagcacccacccaggaacccgccaccagaaccgaaacagaggcacc

SEQ ID NO: 232794 - RNA, 76 nt, Homo sapiens
ccggaccgacccgccgcacaccaaagggaaagacaaggagccgggccgagaaaccgaaccagagaccagagaagaa

SEQ ID NO: 232795 - RNA, 84 nt, Homo sapiens
ccgccaccgcgccggccgcccgcacgccgccggcggagcccggcacgggcaaacagagcaggcagggaaccgccaaggcagagg

SEQ ID NO: 232796 - RNA, 67 nt, Homo sapiens
ccaaacaaccagagacgcccaaggaaggagaggaagagcaggcccagccaacaaccagaaaaaccag

SEQ ID NO: 232797 - RNA, 40 nt, Homo sapiens
ggcggcggcggggggagcgggaaggcacacaacaaagaag

SEQ ID NO: 232798 - RNA, 78 nt, Homo sapiens
aacacccaaaggcaaaggaaaagaaccagcccacagggcccggacccaagaccagcaccaaggccccccaggaaccgg

SEQ ID NO: 232799 - RNA, 79 nt, Homo sapiens
gaagacaaccagcaacaaagaaccagaagcccaggcggccaagggaggccgccagccgaggcgaggagcgggggagcgg

SEQ ID NO: 232800 - RNA, 77 nt, Homo sapiens
cggcgggaggccccggcgggggcgcgggcggcgggcagcccgcgggcgcccagggcgccggccgagcccgggaaaac

SEQ ID NO: 232801 - RNA, 73 nt, Homo sapiens
ccaaggagacaggacgaagcccaaaccacaagccacaaaaggacaaaccggacccagagagcgggaacagcag

SEQ ID NO: 232802 - RNA, 56 nt, Homo sapiens
gaaggaccaagaaccaggaagggccaaagccccaagaacccagccacgcaaagcgg

SEQ ID NO: 232803 - RNA, 84 nt, Homo sapiens
caaaaggcgaggagagagcgcgacggacccagcagccagcgaagccccaaggaagccgggacgcccacagacccagcagcgcac

SEQ ID NO: 232804 - RNA, 60 nt, Homo sapiens
cccccagggcagaaggcaccaaaggcaggccgagaccgggaggaagcggagaaaagagcc

SEQ ID NO: 232805 - RNA, 74 nt, Homo sapiens
cagaaaaagccccaaaagcacccccccaccggccaggaacagacacacaccacgccaagaaccggaccccaaag

SEQ ID NO: 232806 - RNA, 82 nt, Homo sapiens
gcaaggccggccgccggaagccacgggccagggcaagcgggcgacccgccaaacaaggccggggcgcagggaacgcagcgca

SEQ ID NO: 232807 - RNA, 58 nt, Homo sapiens
acgaccccacccgcgccgcgacccgggaggcaccgccccaacccccccccgcccggag

SEQ ID NO: 232808 - RNA, 93 nt, Homo sapiens
gaaccccagaaagaaacaaaacaaaacgaccccagagaaggcaaaagcagaccggaaaacccaccggcaagaccacacccgaggggagcccag

SEQ ID NO: 232809 - RNA, 75 nt, Homo sapiens
cagaccgaacgacgacgggagagcgcccccacgagaccagagccaggacgccccaaggcccgcagggaggggagc

SEQ ID NO: 232810 - RNA, 69 nt, Homo sapiens
gcagcaccaggggaggaggagaccaccacagagccgcagccaagccggaacaggagcggcgagcccaaa

SEQ ID NO: 232811 - RNA, 72 nt, Homo sapiens
agggaagcagccgaccagccgcggagccgggggcaggccacacccagcaagggacaaggaccggagacccag

SEQ ID NO: 232812 - RNA, 71 nt, Homo sapiens
agcagaaccggcgcggacacgcaggcgccagcgacggcgaaggccacgcacccgaacagacaacccagcaa

SEQ ID NO: 232813 - RNA, 75 nt, Homo sapiens
ccaccaccaccacagagcgggaagaggggcgagggcggagaacggaaaagcaccaggaagcagagaggaccgcag

SEQ ID NO: 232814 - RNA, 67 nt, Homo sapiens
gcccccgcgcggccccagcagaaccagcgaagacacggaccagggcagagcagcagggagccccgaa

SEQ ID NO: 232815 - RNA, 71 nt, Homo sapiens
acaacgggcccggagagcccgaacggggcaaaaaggcggcaaaggccgaagaggaccaaaacaaagcaagg

SEQ ID NO: 232816 - RNA, 81 nt, Homo sapiens
ccagaggagccaccagccgccgccgcgccgccgcgccccaacgccagcgccgccccgccgccgagcccagccgaaggagaa

SEQ ID NO: 232817 - RNA, 82 nt, Homo sapiens
cgcaggcggcgcacaggaagcacgcggcggagaaaccaccacaaacacgaggccagcaacgaccaacaagacagacccgccc

SEQ ID NO: 232818 - RNA, 78 nt, Homo sapiens
aacaggacaaaaaacaaccaccaggaaaaaaccagaaacaagagggcacagccccagacagcacacagaccccacagc

SEQ ID NO: 232819 - RNA, 81 nt, Homo sapiens
gggccccgcccggcggggaagcggagaagaagcaggcgccccccaccagccacagacacagacgacacggcggacaacgac

SEQ ID NO: 232820 - RNA, 79 nt, Homo sapiens
ggaaggcagcccgcgaagaggagggggcgcggggccaccgcggcggagcccgagccccacgcgaagagaagaagcaaca

SEQ ID NO: 232821 - RNA, 59 nt, Homo sapiens
cagaaagcgggcacagccaaagggaccggcagaggagacgaccagaaaaccccaaagag

SEQ ID NO: 232822 - RNA, 59 nt, Homo sapiens
ccacgcggggcggagaaagcggacccggaaccagccacccagagaggccccagacgacc

SEQ ID NO: 232823 - RNA, 84 nt, Homo sapiens
aggcggagaggcacggaggagccgcggggcgccgccacggccgcccggagcagaacaggcgaacacgccacgaggccggccccg

SEQ ID NO: 232824 - RNA, 90 nt, Homo sapiens
aagaaacagaaagaaacacaaaagcaaaagagagccaaaaaggagggaggccgggccggcgccgcccggagccccgcgggacgccgggga

SEQ ID NO: 232825 - RNA, 86 nt, Homo sapiens
aaaagggcacgaggccggaaccgcccagccccgccaaacaggccagaacacagacacggaaaggaaacgaggacacaaggacagcc

SEQ ID NO: 232826 - RNA, 133 nt, Homo sapiens
ggccccaggaacgcggcaggcgcccccgacccccagacgccggaaagaaggcccccgcccgggaccagaagggcagcaagcccgccagggccacccgcagccaagggccagagaccaggaaaggaagaaaggc

SEQ ID NO: 232827 - RNA, 71 nt, Homo sapiens
agcagcggaagaaagccaaggagccgcaggcacggcaggagaaacgaacaagaaacagcccagaggcggaa

SEQ ID NO: 232828 - RNA, 54 nt, Homo sapiens
cgagagcggaccgagagcgcgaaacgcacgagaagagggaagaggaaagcacaa

SEQ ID NO: 232829 - RNA, 78 nt, Homo sapiens
gcccgccaccaggagaggccgccacccgccccagcccccgcccccccgcacgccacgaggaggcaggacgcagccccc

SEQ ID NO: 232830 - RNA, 76 nt, Homo sapiens
aagaaggaagaagggggaaaccaagagaagcaagggaaacacagcaccccaaaacagggcaaaaaaaagggcaaag

SEQ ID NO: 232831 - RNA, 68 nt, Homo sapiens
cggaaccaggaagaaaagagcaagcaacccaagcaccacacccagaccaccaaaacaaagggccagga

SEQ ID NO: 232832 - RNA, 68 nt, Homo sapiens
aggaaagaaagcacgagacaacgagggcacccacagaggcaacgaaagcacaaaagaaagggccaccc

SEQ ID NO: 232833 - RNA, 54 nt, Homo sapiens
caggaccgcggcggcgaacacagcgcacacaagagagggccgggcgggaagaaa

SEQ ID NO: 232834 - RNA, 72 nt, Homo sapiens
ggccccggcccacaggggggggcaaacccgagagaacgggcagggagcacagccaacaacgcgccaagaaac

SEQ ID NO: 232835 - RNA, 79 nt, Homo sapiens
acgggacaaaaaccagaccagggaccaagaaaggcccagggaccaaagcccggacaaggcccgagcaccaggaccgcag

SEQ ID NO: 232836 - RNA, 73 nt, Homo sapiens
gcgaggcgcggagcccgggacgcgcgacgcccgcgccccggcccgggcgcacgaccgcggcccggcagcaccc

SEQ ID NO: 232837 - RNA, 79 nt, Homo sapiens
gcaaaggaaaagcgaacaaagaagagcaaacgcgcgccaccgaagggcccaaaccccagccaacgacccaagcggagcc

SEQ ID NO: 232838 - RNA, 78 nt, Homo sapiens
ggaaagacagcccacagccagggaaaaagacccgagaagcgcagacccaccagggaaagcaaaggcagggccaaaaag

SEQ ID NO: 232839 - RNA, 76 nt, Homo sapiens
gccccgaggggcagcgcgcacccgcacccgcaggccgagggacggccaagaagcgcaagggcaaaagaagggagac

SEQ ID NO: 232840 - RNA, 70 nt, Homo sapiens
gcaagggcccaggcgaggagcagcagagcaagagaccagaaagcaggagcccggaaaggagaaggaaaag

SEQ ID NO: 232841 - RNA, 82 nt, Homo sapiens
ccaggggacggagacgagccaccacgcagggccggcggggagaggcgaggagcacgagcgcggaaggagaggaccaggagga

SEQ ID NO: 232842 - RNA, 64 nt, Homo sapiens
aggaccgaccgacggagcagcacagaacgaggaaccccagagaggacagaagccaaccaggcag

SEQ ID NO: 232843 - RNA, 75 nt, Homo sapiens
cccagggccggagccaggaagcgaagggcaccacacaccacaaaccgagggaagaaaggacaacagaagacgcaa

SEQ ID NO: 232844 - RNA, 75 nt, Homo sapiens
ccccccaacacaggggaagccagagacccagcagccacaacgagcgaccggaggaacagaggaaaaaagaacaaa

SEQ ID NO: 232845 - RNA, 79 nt, Homo sapiens
gcggcggcggcagcgggcgggccccgagagcagcagcggggagcccccgagcgcccgcgacgcagcacggacccacaac

SEQ ID NO: 232846 - RNA, 79 nt, Homo sapiens
caaaaagcacaaaccaacaaaaccagcaacaccccaacaggaagggaccacagaccagcacgccggcgccacgaaccga

SEQ ID NO: 232847 - RNA, 71 nt, Homo sapiens
cagcgcccaaccgcccgggcgcaaggaagaagagacgccgcgcggcagacaaggcccggcaggcaaagcgg

SEQ ID NO: 232848 - RNA, 72 nt, Homo sapiens
gcgaaggaggcgggagggaaggaggagaaacgcgaagagaagccgcggcggcgacaaggagccgcgagaagg

SEQ ID NO: 232849 - RNA, 78 nt, Homo sapiens
gcgacagcagcgccggaggcgaacgaagagcgaggacagaaggagaccggagccgccccgccagaaagccaggggcac

SEQ ID NO: 232850 - RNA, 69 nt, Homo sapiens
agcgaaaaaggagaccacacgacgaggcacgagcgcacagaccaggagaaagccacaaccacgagcagg

SEQ ID NO: 232851 - RNA, 80 nt, Homo sapiens
cagcggagcaaggcgacgaaccggagagaggagaacgaacaccggaccgccagggacaagacggacagaaacgaacagcg

SEQ ID NO: 232852 - RNA, 76 nt, Homo sapiens
ccagaggcagccagcagggggagggagcccacaagcccggagggcacgagccacacgccacgcccgcagggcccca

SEQ ID NO: 232853 - RNA, 75 nt, Homo sapiens
gcgcaccgacccgacgcgccggcccacgcgcggccaaggcgcgacacaaaaacggggacggggcaggaagaagcc

SEQ ID NO: 232854 - RNA, 67 nt, Homo sapiens
caagagacaccagaagcaggaacaggggcggaagaaaaagggcgcgcagggcgagaaagacggcaga

SEQ ID NO: 232855 - RNA, 84 nt, Homo sapiens
cagccgagcgggaggcagggggacgacaaggagggcagacaacccgcagccacgcgcgggaggcgggcggcggggcggcacggc

SEQ ID NO: 232856 - RNA, 85 nt, Homo sapiens
cgggaggcagagggaggaaccggacgccggaagccgggaaagacggaacgccgcgcccaggcggagacaggacacgaccagccag

SEQ ID NO: 232857 - RNA, 81 nt, Homo sapiens
ccccaggagggaacaggacaacagggacagacagaccccagaaacccagaggagaggcaaagagagaagaagcaaaccggg

SEQ ID NO: 232858 - RNA, 76 nt, Homo sapiens
caggaacgggaaggggcggaaaagcccacagaagaagggaaaaaagagcgcgccaagaacgcgaacccccgcgcgg

SEQ ID NO: 232859 - RNA, 62 nt, Homo sapiens
gggaggcggcggccccaaaagccacaaaagacaagacacgagaagggccaagaacaagaaga

SEQ ID NO: 232860 - RNA, 44 nt, Homo sapiens
caccaccacaaaccggccaaggcacaaaagccagggcagaccag

SEQ ID NO: 232861 - RNA, 76 nt, Homo sapiens
aggagacgcccaaggaaccccgccggccaccggcggagggcccccccccagcgcgacccgcccccacgcccccagc

SEQ ID NO: 232862 - RNA, 84 nt, Homo sapiens
cacacacgggagcccagagaggacaccgggacacccagaagccgggaaagaaggggagagagaccgaaagaaagaaggcacagc

SEQ ID NO: 232863 - RNA, 84 nt, Homo sapiens
cgacaccgcggagcaaggaaaagaaccggaaggaagagacagagaggagcgaacccccagccgcgcagagggagcgcgcgccgg

SEQ ID NO: 232864 - RNA, 65 nt, Homo sapiens
gccgcgccggggccagccagaagaagggcaggccagaaggaacgcaaggagggacaggacggaag

SEQ ID NO: 232865 - RNA, 79 nt, Homo sapiens
ccaagacaggccggaacccgaaaggggagaaagcccaggagcgcggacggaccaccagcggagcgagaagcgaccgagg

SEQ ID NO: 232866 - RNA, 54 nt, Homo sapiens
cgggcacacaccccgacccgcccccccaggggggagaaaaggccaagggcagga

SEQ ID NO: 232867 - RNA, 82 nt, Homo sapiens
acacaagagagcagggaggaggccagacaaagggaagggacaggagaaagcagaaagccgcaaggacgagaggagacccgcc

SEQ ID NO: 232868 - RNA, 101 nt, Homo sapiens
ccgacgcaggagggagagcacagcaagagccaggaccaccggaagccagaaaggaaagaccacagcaagaccacgcccccagccgggggaccaggccgaac

SEQ ID NO: 232869 - RNA, 65 nt, Homo sapiens
gccaccccgcggccgcacccccgccccaggacggcggccccggaccagggcgaaagaggccaaga

SEQ ID NO: 232870 - RNA, 67 nt, Homo sapiens
agcaagagaacgcaagagacgaagccaggaccaaagcccacgaaaccccacggacaaccgccacccg

SEQ ID NO: 232871 - RNA, 58 nt, Homo sapiens
gccggcgggcgggggccccgcgccgcggccgagcagcggaaccacacgacgcgggaac

SEQ ID NO: 232872 - RNA, 79 nt, Homo sapiens
aagaaaccagagcgaacaggggggacccgggcccacgagcccccaaaccccaggcacacccgccgcgcgccgaacccac

SEQ ID NO: 232873 - RNA, 74 nt, Homo sapiens
aggaacggcggagcagggagcccaaagaccccggagacaggcagaccagcaggacagcacggccaaacagcagc

SEQ ID NO: 232874 - RNA, 82 nt, Homo sapiens
ccaaaagaaaaaagggacccacccagcccacagagaagaagagaaaggaggagccacaaacgaccaagaaagaaacagaaga

SEQ ID NO: 232875 - RNA, 87 nt, Homo sapiens
ggccggcgggcggggcgcagagccaggcagcgcagggcagcagaagaagccgaaagacagacgagcgccccaggcacgaggggaacg

SEQ ID NO: 232876 - RNA, 79 nt, Homo sapiens
aagaaagaggaccacgagaaagggggggccccagggaaaggaccgaggcaggaaagaggccagacgcagggaccggcac

SEQ ID NO: 232877 - RNA, 78 nt, Homo sapiens
cgaaggcagcacaggaccggaaaaaacagaagacacccgaagacaagaggaccaagaagaagcaaggcgaagaaaacg

SEQ ID NO: 232878 - RNA, 59 nt, Homo sapiens
ggggccggccgcgggccccccgggagggcggagaacggaaaagcaccaggaagcagaga

SEQ ID NO: 232879 - RNA, 73 nt, Homo sapiens
gaaaaaacccacacgaagcgaagaaacgcaaaagcacccccccaccgcccccggcgcccgcaccccgggcccc

SEQ ID NO: 232880 - RNA, 62 nt, Homo sapiens
ccaggcagagccgaggaagcgaagcagaggcccagccacgagagaagaaagaaaaagaaacc

SEQ ID NO: 232881 - RNA, 73 nt, Homo sapiens
gacaggacccggaaacgggggcggagaggagcaaacagcaaacagaacgaaacagaaacaacacaacggcaag

SEQ ID NO: 232882 - RNA, 75 nt, Homo sapiens
gaggcgaaggggccaaccagggaaaggagagggagggaccagggaaacccagacgacaaggaaggccaagggacc

SEQ ID NO: 232883 - RNA, 80 nt, Homo sapiens
aagacaaagcagagggaaaggaccaccacaggaaagaagcacaaccaggccgaagaagagccaagagaaccgaacagaag

SEQ ID NO: 232884 - RNA, 82 nt, Homo sapiens
acgaacgcccaccccccgaacccagccgcaccgacgcgggagcgaaggaaaggaggcagaaaaaaggacggggcagccacaa

SEQ ID NO: 232885 - RNA, 57 nt, Homo sapiens
gccaccaggcggcaagagcgccacccggcggcccggcccccacgacacaccgaagag

SEQ ID NO: 232886 - RNA, 64 nt, Homo sapiens
gcaacagagaaagccacggcaggggccaggacgcaccccggaaggagaagagcccgcccacaca

SEQ ID NO: 232887 - RNA, 82 nt, Homo sapiens
cagaacaagcgaggccgggcagagggaccacggggagccccacgaggacaggaaaagccagagagcggcagagaagaaggga

SEQ ID NO: 232888 - RNA, 69 nt, Homo sapiens
aggggcaggagaaccgccacgaacccaccacggcaaagaaggagaaagccgagcacacgaggaagagaa

SEQ ID NO: 232889 - RNA, 73 nt, Homo sapiens
ggggacgagcaaaggaagcgcgaacagcagcgcagggagacccgaccaccggaagccacggcccggacccccg

SEQ ID NO: 232890 - RNA, 124 nt, Homo sapiens
caacaacccagcgcgccagccggcgccggcagcgaagcccaagagcggcccgccacgaagagcagcccgacggccaggaggcgaagagacgaggaagcccaggagcccgaacacaaaaagaccc

SEQ ID NO: 232891 - RNA, 80 nt, Homo sapiens
ccagaacaaccgggcgccgacgagacgggcggaggcagggcgagaccgaccacgcaggcccgacccccagcaagcgaccc

SEQ ID NO: 232892 - RNA, 83 nt, Homo sapiens
gggcggcaggagccggccggcaaccgagggacccgcgccaggcccaaaaaaacagaccaccagccgcgaggacaggaccccca

SEQ ID NO: 232893 - RNA, 82 nt, Homo sapiens
gagaagcaagaaggcccggacacagcaaaccgggccacaggggcaaaaagcagagaaaaaacaacggagaagcaaaaccaac

SEQ ID NO: 232894 - RNA, 67 nt, Homo sapiens
gaccaagaaccagcacgacagaacgccagggaagaaaaaggccgcagacggcaacggccggagaaaa

SEQ ID NO: 232895 - RNA, 84 nt, Homo sapiens
cgccgaggaggggaaaccaacagcaaggaagcccgaaggggaggagcgaccaggaagaccacgacccagaagaccccagacggg

SEQ ID NO: 232896 - RNA, 71 nt, Homo sapiens
agagagacccagaggagaaggggcaaagcaaaagaggaaagacgaccccgacgcaggccaggagccgcgga

SEQ ID NO: 232897 - RNA, 75 nt, Homo sapiens
gaggccccccagccacggaaaccggcggagaaaccaccacaaacacgaggccagcaacgaccaacaagacagacc

SEQ ID NO: 232898 - RNA, 80 nt, Homo sapiens
caccagcgcaagccaaagccacaagacgccggcccaagagccgcagggaggaggggccaaccaccagcagaaggaaagca

SEQ ID NO: 232899 - RNA, 111 nt, Homo sapiens
ccaaggaaggccaacgggaggcccacgcagcccacagacagccccagccgggcccagaaggagcgaagaagaacaccaggggagcgaaccgaaaaacacccagacagcgag

SEQ ID NO: 232900 - RNA, 61 nt, Homo sapiens
agcagcaccagcggccggggaaagggcagcgccgcccaagagagagaagagaggcgcgagg

SEQ ID NO: 232901 - RNA, 66 nt, Homo sapiens
acagagggaagaccccaaggcggcaggagggaaagcaaggaaacgcccccccagaggcccagacgg

SEQ ID NO: 232902 - RNA, 77 nt, Homo sapiens
gggggaggggaggggagggggcgcggggaacgggagcggagagacggcagccgggaccacgcggagcgcggaggccc

SEQ ID NO: 232903 - RNA, 66 nt, Homo sapiens
gcccagcaccggcgaagccgggccaaaggacgaagaacccacagagacaacaaacccaagaaaccc

SEQ ID NO: 232904 - RNA, 77 nt, Homo sapiens
caccaaggagcccaggaaccgggcagccacgcaagaggggcaccaccgcaccaccccggaaaggcagccggccggcc

SEQ ID NO: 232905 - RNA, 68 nt, Homo sapiens
gcgggagaggcaacagaaaagagcgcaaagggcaggaaacaaacagacgccagaagcagcgaaaaaga

SEQ ID NO: 232906 - RNA, 82 nt, Homo sapiens
acacacaaccgcccagccggcgagggacgccgcagagcccgcggccccaaaaagcggcgcaagacggagggcgggagaagga

SEQ ID NO: 232907 - RNA, 77 nt, Homo sapiens
agaaaacaaaggcaccggggacgccaccggagaagggaggaaaaccaacaagggagcaacccaacacacagacggaa

SEQ ID NO: 232908 - RNA, 39 nt, Homo sapiens
acagaaggagcaggaaccaaagggaccaaaaggaaagaa

SEQ ID NO: 232909 - RNA, 59 nt, Homo sapiens
ccaacacagagcagcggaaccagacaggcaggaaaagacagaccaggcaaaagaaacca

SEQ ID NO: 232910 - RNA, 62 nt, Homo sapiens
cggcgcgaagccacaagaaaggcgcaagacaaggcccgcgggccaagacaaacaccacacaa

SEQ ID NO: 232911 - RNA, 56 nt, Homo sapiens
gaaaaagacaaaggaaagcaaagaagccccaggacacagcaggggccagacaacca

SEQ ID NO: 232912 - RNA, 64 nt, Homo sapiens
ccagggcggcggaaaagaaaaaaagaccgcgggaaaccacaaaagcacaaacgacacacaagca

SEQ ID NO: 232913 - RNA, 75 nt, Homo sapiens
cgccgcagaggcgagagcacgcagagacaccagcagaggagcagagcgcccaaaggacgcggaacagcaccacgg

SEQ ID NO: 232914 - RNA, 52 nt, Homo sapiens
accacgccccagcagcaggaaggagacagacccagcacggacccccccccca

SEQ ID NO: 232915 - RNA, 74 nt, Homo sapiens
cagcgccgggcagcgagaagaagagacacgaagagcacggagcggaagaggagacgacaaagaccaagaaaagc

SEQ ID NO: 232916 - RNA, 74 nt, Homo sapiens
acagagccaaacaacgaaggaaggacccaaagaggaaccaggacagaaacccacagaaagagggggcccgggca

SEQ ID NO: 232917 - RNA, 39 nt, Homo sapiens
cagacagccaaggagacgggcccaggggccggagaccgg

SEQ ID NO: 232918 - RNA, 71 nt, Homo sapiens
gacccgcccgccagaaccgcgcgccacccacaaccagaggagcccgcagcggcccgcagagcagcgggccg

SEQ ID NO: 232919 - RNA, 66 nt, Homo sapiens
cagggccgccgacagcagagacagggcacccccacgagcaacagcagaaggccggcccggccaccc

SEQ ID NO: 232920 - RNA, 69 nt, Homo sapiens
cacccgacgcccgaccaccacggcacgcggcccaacagaaggcaccacgaaaacaggaaaagccaaccg

SEQ ID NO: 232921 - RNA, 44 nt, Homo sapiens
aggcaccagaaggagagggacaagagcagccacagcagggaccc

SEQ ID NO: 232922 - RNA, 57 nt, Homo sapiens
caccggacaccgagggcccccaaaagagaggacggggacgggccccaggacgaggaa

SEQ ID NO: 232923 - RNA, 64 nt, Homo sapiens
gacggggaggacaggccagcgcggccaagacccgccgcaaggaacaagacccgcagaggagaag

SEQ ID NO: 232924 - RNA, 82 nt, Homo sapiens
ggaaaaggggagccgcaagagaaagccaacccagcgaaggaacaagcaaaccccaagcggcaagagaccgacaaacagaggg

SEQ ID NO: 232925 - RNA, 57 nt, Homo sapiens
cagcacccaaaggggcacgcaaaagggagcacccaaaaaagagacaacggagcacag

SEQ ID NO: 232926 - RNA, 79 nt, Homo sapiens
ccacccgcccggccccagcccagcgcggccgcgaccccggcgaaacggcagacccaccgaccaacaaagaaacaaccca

SEQ ID NO: 232927 - RNA, 70 nt, Homo sapiens
ggacggccagaaaccacaagaaaacaggggaggggcagggaggggaaccaggggccgaaggcgacacacg

SEQ ID NO: 232928 - RNA, 76 nt, Homo sapiens
ggccgcgggggcaacggagaaaacccggaaccgcgacggcggcagaaacagagaggccaaaacaaccgagccccag

SEQ ID NO: 232929 - RNA, 65 nt, Homo sapiens
caaaaagcaaacggaccagaccgaccaccaaaaggacggaaaaggcgcacacgacccggagaacc

SEQ ID NO: 232930 - RNA, 64 nt, Homo sapiens
ccccaagagccacagcaggggaagacgagggaccccggccgccagaggggggcgggccgagcac

SEQ ID NO: 232931 - RNA, 83 nt, Homo sapiens
gccgaggccgcgggcggcgggcccgggccgagaggagggagacccaggaccaagaacaaggggcacccgcaagcccaccggaa

SEQ ID NO: 232932 - RNA, 71 nt, Homo sapiens
agccagacacaaacagggcaggcaagaaagagagcggaggacagagcacgcgcgacagagagaagggggcc

SEQ ID NO: 232933 - RNA, 62 nt, Homo sapiens
ccgagagaaagcaagcaaagcaccaaacagagaaagccaaggaagggaggaaggacagccac

SEQ ID NO: 232934 - RNA, 87 nt, Homo sapiens
ccgcggagggcgacagaggcgaggaggaggagccagggcgagcaccaaggagaaaagccccgcaaccgacgggaagaaccgaagaag

SEQ ID NO: 232935 - RNA, 74 nt, Homo sapiens
cgggccccggaaacagggagccaacccaggaaacgaacggcccgaccaggcgacgccggaccgcgaagagacga

SEQ ID NO: 232936 - RNA, 85 nt, Homo sapiens
gcccggggagaagagaccccaagagggagcagcccacggcaaagaagggaaaccccccaggcaagaggcgcaggaccgggaagac

SEQ ID NO: 232937 - RNA, 77 nt, Homo sapiens
acagcaacagcggccgggaacgaccgaaacaccagggcccgcaccccacagaaaacgggccaagaacaccgagagag

SEQ ID NO: 232938 - RNA, 64 nt, Homo sapiens
ggagaagaaagacccgaagggccaaaaaggggggacgcgggcgagaagccgggcagcggaagga

SEQ ID NO: 232939 - RNA, 82 nt, Homo sapiens
gggaaggagggagggagccgcaggcgcagacccacccgccagaagccccccgcaggacagcgcgaagcaccaccggaaccgg

SEQ ID NO: 232940 - RNA, 66 nt, Homo sapiens
ccaagggccccagcccgggcccccaacgagagccgaagacacaaagcgcaagaggcagcagaccgg

SEQ ID NO: 232941 - RNA, 78 nt, Homo sapiens
gggagacggcagagagccgcccagggccagcagaacggaacagcaggaacggcgcgcaagaacacaacagcgagcaac

SEQ ID NO: 232942 - RNA, 56 nt, Homo sapiens
cgcacaaacccaaccaggaaagcccggacagccgggagaaggacaagcaggcagga

SEQ ID NO: 232943 - RNA, 73 nt, Homo sapiens
cacagcaaaaggccccgcgcgggcgaacacacaaagccgcaccagagcaaggcgcggaccaggcgggcgcgac

SEQ ID NO: 232944 - RNA, 89 nt, Homo sapiens
ggccacagcagccagccggcccgaggacaccgacaccagcaggaccgaaggagaagaaggagaaggggaggagaaggcaagccggaaag

SEQ ID NO: 232945 - RNA, 75 nt, Homo sapiens
agagcaaaaccagcccagagaacaagagaccccagagccgcaaccaaaagcgggggaaaccaaagggcagaaaac

SEQ ID NO: 232946 - RNA, 66 nt, Homo sapiens
gacgcgggcgagcgcggccggacgccagcggacacgcgggcgagcaaacggggacagcgccgaccg

SEQ ID NO: 232947 - RNA, 61 nt, Homo sapiens
gccgggccaggaggacacgcgcagggcccacgacgagacaaagccgaggaaacccagaccc

SEQ ID NO: 232948 - RNA, 82 nt, Homo sapiens
gggcacacagccaagacgaaagaggagcagcacccacaaccgcacccagagagaagcacggaacagagggacggggcaccag

SEQ ID NO: 232949 - RNA, 109 nt, Homo sapiens
ccgaggaaagcgacaaagaggaccacaaacgccgcgcggaaggcagccaaaaggcacgcaaaccagcccgaaaggggaaacagaacccagaaccagacagaaagccacc

SEQ ID NO: 232950 - RNA, 80 nt, Homo sapiens
cgccgccgcgcacaaccgcacggcagagccagacacacgagcagcgcagcggagaaacagagaaagcgcacccagcccca

SEQ ID NO: 232951 - RNA, 72 nt, Homo sapiens
cacaaaaaagaaacaagcccccgagaaaagacaaccagcaacagcccaaaggaaccacaacagcacaagcca

SEQ ID NO: 232952 - RNA, 73 nt, Homo sapiens
ggcccccggagagaaacacaacaccgaagaacgcccggaaacagaaaacaggaccgaaaagacgcggccccaa

SEQ ID NO: 232953 - RNA, 61 nt, Homo sapiens
accaagcacccaacagaagaagaggagagaaaggccagcacgggggaacaaagggaccgga

SEQ ID NO: 232954 - RNA, 55 nt, Homo sapiens
cgagcaggcaacacgcacccggcaggaggacgcaacagaggaggggggacgaaga

SEQ ID NO: 232955 - RNA, 81 nt, Homo sapiens
gcaacaccggaggagggggcggccacggccaacgccgcgcccgcggagggaaaaggaccagggccgaggagggcggaacca

SEQ ID NO: 232956 - RNA, 61 nt, Homo sapiens
gacaccacagaagcccccgagcccagggggccagggacccgcagaccccccaagggaaggg

SEQ ID NO: 232957 - RNA, 62 nt, Homo sapiens
aacgacgcccacggaggaagaggggaggccgcccgagggggcgaaggagacacgggcacggc

SEQ ID NO: 232958 - RNA, 75 nt, Homo sapiens
acggcaaccaaagggcaccaacaaccgcggaagcgcaacaaggggaaaaaagcagcggaggagaaaaaaaagaag

SEQ ID NO: 232959 - RNA, 70 nt, Homo sapiens
gggaaggagacgaaacgaaaggggagaagcagaccgcaccaggcgggaccccgaaaaagcccaaacagac

SEQ ID NO: 232960 - RNA, 86 nt, Homo sapiens
cgccacccgggacacagcgccaccccgagcagcggggaagcgggagaagcccaccacgcaacgggacggcgcggcggaaggcgcgc

SEQ ID NO: 232961 - RNA, 110 nt, Homo sapiens
cggacaccaggaagaggagccgagcacgggccgagaccaccgaggagagccggacaaaagcaagccgggaggcggcgcccccccgcgccgcggggccacaggggcggggc

SEQ ID NO: 232962 - RNA, 72 nt, Homo sapiens
caagaggcaaaaaggaggaacaaaccccaaaccggacagaagggaaaaaagccggaccggcacagggacagc

SEQ ID NO: 232963 - RNA, 85 nt, Homo sapiens
cgcggggcgggcccgggcgcggcgggcgcgcccgccagcgcccggagaacggccccccaggccacccaggaccagcggcacaccc

SEQ ID NO: 232964 - RNA, 85 nt, Homo sapiens
aggcccagccggcccgcgcccacgcgccacacacagaccgcgccgggccaaggcacccgggacaacggcacaagcgccgcaaaac

SEQ ID NO: 232965 - RNA, 70 nt, Homo sapiens
agcgggaaacgggagggaaccagcaacaagccggcaccggcccggaacaggggacaaggaaacaaaaagg

SEQ ID NO: 232966 - RNA, 75 nt, Homo sapiens
cgcggcggcagcagggcgggagcacgggggggcgcaggccccggaagagggacgcagccaaaaccgaggcagcga

SEQ ID NO: 232967 - RNA, 79 nt, Homo sapiens
gacggaccgagaccggaccgagagcggaccgagagcgcgaaacgcacgagaagaaagaaggacagaaaggcaaagccag

SEQ ID NO: 232968 - RNA, 74 nt, Homo sapiens
ggcccggaaagacgccaaaaacagggaaagggccagcacaggagagggaacccaaacagcaaacccaaggaaac

SEQ ID NO: 232969 - RNA, 81 nt, Homo sapiens
cccagacaggaacaaaggcagcggaggcacggacaccacacacacacagcgaaaacaggggcacagacgacagaagccaag

SEQ ID NO: 232970 - RNA, 77 nt, Homo sapiens
agaggaaaaaaaacagaacaggaggggagagggcaggaaccaccgcccaaagccaagcggaagcagaagggacaggc

SEQ ID NO: 232971 - RNA, 68 nt, Homo sapiens
cggacagacccgaaagagggaaggccaaacggagaaaggaaagggcggcaggaagacaggaaaagaga

SEQ ID NO: 232972 - RNA, 83 nt, Homo sapiens
cccggagcccaagcagacagcagcagggccgggggaaacccgcccaaaagcccaggacagcaaaagggcgaaaagacagaagg

SEQ ID NO: 232973 - RNA, 84 nt, Homo sapiens
gggcaaccagaggggccaacggacgacagagaaaagagcagaacacaaaaaaacaaagaggcagaagcgaccagagcgaaaaac

SEQ ID NO: 232974 - RNA, 68 nt, Homo sapiens
cccagaaccgggcgaagcgcgcagagccagaaggccacgcccaaagcccaccaccacgcagccaagaa

SEQ ID NO: 232975 - RNA, 69 nt, Homo sapiens
acagcgcggcaccgcgacacggaaccccacccaacaaggacgccgccagccaccggcgcgaagccagac

SEQ ID NO: 232976 - RNA, 75 nt, Homo sapiens
acacgaaagccgggcccaaccaggacgagacaaacagggacaccaagcagagggccccacccagaagggacgccg

SEQ ID NO: 232977 - RNA, 77 nt, Homo sapiens
ggcaggcgccgcagggacccaagccgagcagagaagacccaggaagaagagagaagcgcaaggagaaagccggagcc

SEQ ID NO: 232978 - RNA, 62 nt, Homo sapiens
agcggggcaccgagccggggcaccacaggaggcagggaggacagcacgcgcaagagggacgg

SEQ ID NO: 232979 - RNA, 47 nt, Homo sapiens
gaaccaccccaaacaggaggaggggaaaggaggagagggaaagagaa

SEQ ID NO: 232980 - RNA, 104 nt, Homo sapiens
cggacaggcaccacgcaccgacagcgccgccaccgagccgggcccaccccccaccaaggaagagcgcacagcgaggaggggggcgcgcagcccggggacccccc

SEQ ID NO: 232981 - RNA, 71 nt, Homo sapiens
ccccaggaccaggcagcacccacagcaaccgagcggggaaaacgagggacaaaggacaagagaacggagac

SEQ ID NO: 232982 - RNA, 73 nt, Homo sapiens
gccgggccgggggagaccgccaccgagacaaccaagcaagggccagcagaaaccgacagaaaagcgcacaaag

SEQ ID NO: 232983 - RNA, 82 nt, Homo sapiens
caagcggccggcccacgcccgcgggccaccgcagagccccaagcgggagaacagagacccaccaagaaaccagaacccggac

SEQ ID NO: 232984 - RNA, 77 nt, Homo sapiens
gggccgagacacgcagcggcggccagggaccaggaccgggagaggggacgaaggcgaaccagcaagacaaagcaaca

SEQ ID NO: 232985 - RNA, 76 nt, Homo sapiens
ccgggaccacagagggaccagcgggaggaaaagcaagccccccaccagccccacagaacgcacagaggacacacca

SEQ ID NO: 232986 - RNA, 80 nt, Homo sapiens
ggaagccccggcccggcgaacaacggagcacggagcgcagccgggggccgggaccccggggagcccccgagcgcccgcga

SEQ ID NO: 232987 - RNA, 85 nt, Homo sapiens
cgaggggcggacgcgcggcggggcagaccgcggggacgcgggcggcgcggccgcgccagacagccaccaggagagaacgccgcgc

SEQ ID NO: 232988 - RNA, 65 nt, Homo sapiens
agccagggacaccgggccccgaaacgcgggccagagagagagacagggaacagcaaagagcagaa

SEQ ID NO: 232989 - RNA, 78 nt, Homo sapiens
ggacccgacccgagccaccaggacacgggaggggggaagacagggcccagcaccacaggacgggccgggaagccgcca

SEQ ID NO: 232990 - RNA, 58 nt, Homo sapiens
ggagcgccacgcgcggaaggcagcgcccagcagcgcaggagaaccccggccgacagga

SEQ ID NO: 232991 - RNA, 68 nt, Homo sapiens
aggggccgcggcccggagcggcgaacacacacaaaagggaccccgcaggcagacacccgaacaacaac

SEQ ID NO: 232992 - RNA, 56 nt, Homo sapiens
gcacccaggcccggaccgccaaacagccggacacaagagggcaagaaaggcgcgac

SEQ ID NO: 232993 - RNA, 76 nt, Homo sapiens
gagcccaaggcaagaagcaaggcgccagggcaccacacccgggaagcaagagagaaaggagacgagaaagagaaga

SEQ ID NO: 232994 - RNA, 58 nt, Homo sapiens
gagagccggggagcccccaaaagccgaagcacgagccgggacagaccgggaggcggcg

SEQ ID NO: 232995 - RNA, 71 nt, Homo sapiens
gaccagggagcccaaaggagccgcgcgccacgcacccagccaaacccaggcccgagaagaagaggaaaacc

SEQ ID NO: 232996 - RNA, 82 nt, Homo sapiens
gcaacggaagcgcagcaacagcaagccccgggcagagacacgagaccagaagccaagaaacgaggagagccaccaccaagga

SEQ ID NO: 232997 - RNA, 41 nt, Homo sapiens
gaacgggcggagccacgcacccggcggaggcagggcgccac

SEQ ID NO: 232998 - RNA, 73 nt, Homo sapiens
gacagagaagacaacgacgaaggaagaccaaggaagaacaggcaagcgaaaaagggaaaaggagagaaaagag

SEQ ID NO: 232999 - RNA, 54 nt, Homo sapiens
ggcaagagaggcaccccgaagaggcgaggagcaacccaaacgaggaaccccaga

SEQ ID NO: 233000 - RNA, 76 nt, Homo sapiens
caggaaggggcagacaagcacgccgcccagacaaccgaccaggccccccccaccgccagcagcagaaagcagcaga

SEQ ID NO: 233001 - RNA, 62 nt, Homo sapiens
caacacccgaagagagagaaccccccagaaacgaaggaggcccaaccacaaaaggagccgac

SEQ ID NO: 233002 - RNA, 99 nt, Homo sapiens
ccaaagaagaagagagcaagaaggagaaaaggaggaaacacagccccgagacgccagagagaaagggcaacggggagacggacaagggcagacaccggc

SEQ ID NO: 233003 - RNA, 80 nt, Homo sapiens
cgagagcggcaccgaggaagcaaaaagcagcggccagccgacagcaaagaacagcgaacgacaagaggagaggaagaaga

SEQ ID NO: 233004 - RNA, 61 nt, Homo sapiens
aggcggaacgcccgccccgcagagagcaacccagacacacggaccacaacaaaacagcacc

SEQ ID NO: 233005 - RNA, 107 nt, Homo sapiens
acggcacgaacggccacagcaccccgagaccgcagccccgccccacgccggcagccccacgaggccaggaggacggccagcccccggagcgccacacacgcccgccc

SEQ ID NO: 233006 - RNA, 69 nt, Homo sapiens
aagaggacgaaacgaacgcacccccagcacaccagggccgccaccgccgagccaaaacaaccagagaca

SEQ ID NO: 233007 - RNA, 82 nt, Homo sapiens
cccgccacaagcgggcagccccacccacagagcccaacgccaggcccgcgggccacgcccaccaggcgcagagcccccggcc

SEQ ID NO: 233008 - RNA, 67 nt, Homo sapiens
ccggcgagccaagaacacggccacccaacagaagggcgcagagggaaagcacccaggcaagccaaaa

SEQ ID NO: 233009 - RNA, 60 nt, Homo sapiens
cgacgcggagggggagaagcacaggcaacacagaagcgaaggggacagggggagaaccgc

SEQ ID NO: 233010 - RNA, 81 nt, Homo sapiens
aaacggcacaccaggcggcaggggcaaccagacgggccaaggacgagaacccccgcgaaccagaggaacccagcgagcgag

SEQ ID NO: 233011 - RNA, 43 nt, Homo sapiens
gaaaaagcggaaggccacacgccacgaaggaagacaggaggcc

SEQ ID NO: 233012 - RNA, 73 nt, Homo sapiens
ggcaacgagaccacaggcacaccaaccagcaggaccagagagggagagcacgccgaaagaaggagaacaggag

SEQ ID NO: 233013 - RNA, 74 nt, Homo sapiens
aaaagagaaaaaccacagaaaacaggaggagcccccagaaacacaaccaggcccgggagcgcagcccccgccgg

SEQ ID NO: 233014 - RNA, 127 nt, Homo sapiens
agacccaccagggacgcccccgacccggcggccaagacgggagccgccgcggggggagccgggcagcccaggggacaagaagaggcgccccaggcaagaggccccacccaggcaggggcccgccagg

SEQ ID NO: 233015 - RNA, 77 nt, Homo sapiens
ggcggacggggagcgaacgggacagcccacacccggcgcggaggagccgaagaggagcgagagaaaagcagaaagga

SEQ ID NO: 233016 - RNA, 78 nt, Homo sapiens
ccccccagcccagcccagccaggacaagcccaggagacacgacgcaccgagccggcaggcagagcagcgagcagggcc

SEQ ID NO: 233017 - RNA, 70 nt, Homo sapiens
gccggcggcccccagccgccgcccacgcagcagggacagcagcaggcgcaaggaagaagagacgccgcgc

SEQ ID NO: 233018 - RNA, 76 nt, Homo sapiens
agacaccgaaaccggcggaccagcaccagggaccaccacccaccccggccccacccacgacaaccacccccacccc

SEQ ID NO: 233019 - RNA, 70 nt, Homo sapiens
aagcgcgggcaccaccagcccagccacacagacggggacagaagcgggagacaagagaagcaagacccgg

SEQ ID NO: 233020 - RNA, 80 nt, Homo sapiens
agcgccgagaaagccccgggagaagcagcgccgcccggggcagaccaggcaggaccgaagcggcgggcgacacggaagga

SEQ ID NO: 233021 - RNA, 69 nt, Homo sapiens
gggccagcaacccagacgcccacaggacaaggggcagaaacggcggggcaagcagccagacggggaaag

SEQ ID NO: 233022 - RNA, 73 nt, Homo sapiens
gagcacagcaccgcgaagacacagcagaccgaacaggaaggccccggaaccacagagcggcagcgggaacacg

SEQ ID NO: 233023 - RNA, 67 nt, Homo sapiens
agcaacgcaaggcaggcaacaaggcgccaagcccacgggcgcaccaacggagagccagagcaagggg

SEQ ID NO: 233024 - RNA, 77 nt, Homo sapiens
caaagcccgacagccaagcagaaacggcaggaaagccagaagccaaggaggagagaagagaggaagcgagcagcacg

SEQ ID NO: 233025 - RNA, 74 nt, Homo sapiens
aggaaggcgagccgcagcgcgggccgggacccagccaggcagaccccgggcagcagggggacacgcgcccacca

SEQ ID NO: 233026 - RNA, 70 nt, Homo sapiens
ggccacagcggccaccgccggcgggcaacagagagacgagcaggagagccgacgcaacccggaggacacc

SEQ ID NO: 233027 - RNA, 35 nt, Homo sapiens
acagaaggacgaaaaaaggaagaaaccaaacgaaa

SEQ ID NO: 233028 - RNA, 55 nt, Homo sapiens
acacaggaccacacaccagggcaagaacagcaacaggcaaccagccaaggaaccc

SEQ ID NO: 233029 - RNA, 71 nt, Homo sapiens
cggcaaggagcaaggaaacgagggagcggccaagaaaccaggaggaacagaggagccagcccccacagagc

SEQ ID NO: 233030 - RNA, 89 nt, Homo sapiens
cgggggggccgcgcgcacggccaggagggcacggccgcggaacaccgggggacaccccgcgcgggaaggacgcgagggaaagccacagc

SEQ ID NO: 233031 - RNA, 68 nt, Homo sapiens
cacccacaggccgcaaaggaagaaacccgcgccgagcgccaacggggcggcaccaagaaaaacgagca

SEQ ID NO: 233032 - RNA, 71 nt, Homo sapiens
acacagaagaggcaagcggggaagcgccccagccaaagaaagggaggaagacaaggaacgcccccacgcag

SEQ ID NO: 233033 - RNA, 76 nt, Homo sapiens
cccagaagaaagagaagagcgacaggcaagcggaacagaaagcgccacagacagcgcggagcagaacagagggcca

SEQ ID NO: 233034 - RNA, 81 nt, Homo sapiens
caagcgaagacacaagaagaccgagcaaagagaccccggaacccagagaagcaaaagaaacaaggcaagacggaagcaaga

SEQ ID NO: 233035 - RNA, 75 nt, Homo sapiens
aacaagaagccgagcaacccccaggagaagagcccaagcagcgccagacaaagagcaagggcccacccggcccgc

SEQ ID NO: 233036 - RNA, 79 nt, Homo sapiens
gaggagagagacagacccagcaaacaggacgggaagaacagaagccgagacccacagcaaaacacgaaccccggaagga

SEQ ID NO: 233037 - RNA, 58 nt, Homo sapiens
aaccagagcggaagcccaaacgggaaaccccaacaagccgaagcacaaggcagccaga

SEQ ID NO: 233038 - RNA, 71 nt, Homo sapiens
cagacggcagcacgccggcccagaggccagaccaacaagcaacaaagacgaggacgcgcacaggaaaggac

SEQ ID NO: 233039 - RNA, 64 nt, Homo sapiens
ggagaaggaccaagaaccaggacacagcaggggccagacaaccagacccgggaggcaagagacg

SEQ ID NO: 233040 - RNA, 79 nt, Homo sapiens
cagacacgaaacgcgagaaggaaacaccaaacgcaggggggagaaggcagcaaaccagccagcacgggggcccagccag

SEQ ID NO: 233041 - RNA, 81 nt, Homo sapiens
cccgccccagccacccaggccccgccgcccgggggcgccgcccaccgcgcccgccgggggaacggcaggagaacagcaccc

SEQ ID NO: 233042 - RNA, 76 nt, Homo sapiens
ggcccggaaagcccgccacagcggcccggccccccggacagacgccgacgcccagaaaaagcggggaaaacaaaaa

SEQ ID NO: 233043 - RNA, 76 nt, Homo sapiens
ggagggcccaacccacagcgccccagggacgaagggacggaggaagacaacaacgggcaggaggaaagagacaggc

SEQ ID NO: 233044 - RNA, 76 nt, Homo sapiens
gagccccccgggcaggagccacgccaccgcgagaagggcgcacggcgaaagccacgggagggccaacccggaggac

SEQ ID NO: 233045 - RNA, 79 nt, Homo sapiens
ggccgagcgcgagcaagcaaagggaccccggaggaaaagcggaagcggcagcggcgaacgccggaacggaccaacagga

SEQ ID NO: 233046 - RNA, 79 nt, Homo sapiens
gggaccaggggacgaagggaacagacccgaccgagcagcgcacacgagcacgcccagcccagcccgaagccaccgaacc

SEQ ID NO: 233047 - RNA, 75 nt, Homo sapiens
gggggacacccgggcggggcagagcagcccccagccagccgcgagggcgcacccacgacgcgcacaccaccggca

SEQ ID NO: 233048 - RNA, 77 nt, Homo sapiens
agggaaaggcggccggccccgccgaagcaccggaccgagaacgaaggagcacagcaagcgggagcaggcagaccaaa

SEQ ID NO: 233049 - RNA, 84 nt, Homo sapiens
cggagaaacaagaccaggcccagaacgaaccaaggccacaagcacaagcggggaagaacaaccgaacccggggggaggcccaaa

SEQ ID NO: 233050 - RNA, 75 nt, Homo sapiens
gggacccggcgaagacgcgaccgcggcgcgagcaccagaccggagagaacagaaaaaaagcggcccgggaccagg

SEQ ID NO: 233051 - RNA, 72 nt, Homo sapiens
cgagcggcagcaacccaacccagaggacacagacggaagggagggccacccacggcaggcccagccgcaaca

SEQ ID NO: 233052 - RNA, 79 nt, Homo sapiens
caccccaccccacacaacgcagacgggcgccggcagccccccaggggagacacggcagacaaaacagaaacgccggaga

SEQ ID NO: 233053 - RNA, 74 nt, Homo sapiens
agaacaacaagcgagacccgccggccacacgaggagggagcggaacgagagcaaagaagcaccgaaaccacaga

SEQ ID NO: 233054 - RNA, 71 nt, Homo sapiens
gaagcagcaagccaaaaaaagagagcaagagaacgagagaagaacgacgcaggcggaggggcggccccgag

SEQ ID NO: 233055 - RNA, 63 nt, Homo sapiens
gggacaggaagggccgagcggcgggaaaggacccccgcagcaaacacaagaagaccacacgac

SEQ ID NO: 233056 - RNA, 65 nt, Homo sapiens
ggagggaggaaaacaaccgagggcagacaaagcaccacaggggaaaacaagcagaaccggggacc

SEQ ID NO: 233057 - RNA, 72 nt, Homo sapiens
gccacaagagagccagagcaacgcacaagaacgaaaccggaaccagacagaagaagaaagagcggcccgcgc

SEQ ID NO: 233058 - RNA, 50 nt, Homo sapiens
cacgagcccggcaaaagcgcacaaacgcccaagaggcacccggagaagag

SEQ ID NO: 233059 - RNA, 83 nt, Homo sapiens
gaagaggcggcggccccgcgggcgccagcaggcacgcgagaaggggagggggagaaagaagaggaagaagccacaggcaagga

SEQ ID NO: 233060 - RNA, 79 nt, Homo sapiens
ccaggcccagggccggcccccccaggacaacccagaggcaacaaaggcgagggggcacccgaggaggaagagggcaggg

SEQ ID NO: 233061 - RNA, 59 nt, Homo sapiens
gccgaagcaggacccgaagccaaaccaggaggggaaacccagacgacaaggaaggccaa

SEQ ID NO: 233062 - RNA, 84 nt, Homo sapiens
gacgcggcacaggccaagggcagagacgcaagagccccgaagaaagagcggcaagggaagagcgacaccccagacgacgggcag

SEQ ID NO: 233063 - RNA, 77 nt, Homo sapiens
cggaagacccgagccggacccagggagagcagggcagggaaaagcgccgggcggaccagcaggacaccccccgggcc

SEQ ID NO: 233064 - RNA, 69 nt, Homo sapiens
acggccacccaagcacagaggggcccagaagacaccgcgaggggccgccaccgagcccacgaacccgaa

SEQ ID NO: 233065 - RNA, 81 nt, Homo sapiens
gcacagagccaagaaacaccagaaaaccaagggggagagcccagcgcgggaagagcagaaagggaacacgaaagggaccag

SEQ ID NO: 233066 - RNA, 73 nt, Homo sapiens
gaaggaccaagaaccagaccagcggagaccacaagaaggcgcacagccacggaaagcgccgaccccacccacc

SEQ ID NO: 233067 - RNA, 78 nt, Homo sapiens
ccgccaccaacgacaagaagaaagggccgaccccccaccagaacgagcaaacgcacaggagcaaaaggacagacacgg

SEQ ID NO: 233068 - RNA, 100 nt, Homo sapiens
ccagccgacgagagaaaggcagcgggaaggcagcagaggacgcgaccccgcaggggccaggggagggcagcggagaggaccacgagacccaccaggccgc

SEQ ID NO: 233069 - RNA, 79 nt, Homo sapiens
ccccaacacggcgcacggagaaccacagacacacgagcgccacgcagagccccgccaggaagacacgccggggaacgaa

SEQ ID NO: 233070 - RNA, 70 nt, Homo sapiens
cggcccgcgcagaagaccaaaacagggacagggcgaagcacagaaccagcacgagagacgggggcaccag

SEQ ID NO: 233071 - RNA, 81 nt, Homo sapiens
ggcggggcgggccgcgcgaagcccgagaggagccacaaggagacgccgccgcgcccccgcggaagggacgcaaaaaggaag

SEQ ID NO: 233072 - RNA, 81 nt, Homo sapiens
agggccaaagaagggagagaggacaagcacgaccgaggggaacgggagcagcccagccacaccagagccccacgcggcgcc

SEQ ID NO: 233073 - RNA, 90 nt, Homo sapiens
ccacagacggcgaaggcagccacagcgcccagagagccccagaccagcggcgccggagcaccggagcagaagaccgagcccccgaaccgc

SEQ ID NO: 233074 - RNA, 74 nt, Homo sapiens
aagcaggggcggaagccacacaggccagaacgaggggaagaaaacgccagagaagcagagcagcccggagcgag

SEQ ID NO: 233075 - RNA, 57 nt, Homo sapiens
cgaggggagaccgcgccccggaggaaaacaaagagggaaaacggagaaaagcccccc

SEQ ID NO: 233076 - RNA, 73 nt, Homo sapiens
ggcgagaaacgggaccgcaaagaacaggagcccacagaaggcagaggcagaaccacaggcagaagaagggaga

SEQ ID NO: 233077 - RNA, 88 nt, Homo sapiens
cgcacccgagccggagcgcccagcgccgcgggaccggggccgcggggcggacgggggcgccagggggcaagccggccaccgccccggc

SEQ ID NO: 233078 - RNA, 82 nt, Homo sapiens
gccccgccgcgccccgccgcgccgcgcccaaccgcccccccccagaacgcggggagagaacagcacacagaggcgcaagggg

SEQ ID NO: 233079 - RNA, 83 nt, Homo sapiens
ggggagcaagaagcaggaaaggccggacaccaggagcgagaacccgagcagcgccagagcaacacaccgcgccccagcacgca

SEQ ID NO: 233080 - RNA, 91 nt, Homo sapiens
gacagccacaaagacccccagacacacacacccaacccaaaccaagaaaacgacagaagcacgacaacaacgggcagcaagccacaacgga

SEQ ID NO: 233081 - RNA, 75 nt, Homo sapiens
ggcccgcagaagagcggccaaggaggcgcgaagaccccggccgcccgccccaggagccgagagcagaacacagcc

SEQ ID NO: 233082 - RNA, 62 nt, Homo sapiens
ggccgaacgaggcgagaacgcgcagaccggggagggaaagaaaggcaacaagaggaaacaac

SEQ ID NO: 233083 - RNA, 77 nt, Homo sapiens
gcaggccgcagcgagggcccgggcccggggacccagaggggcgaggaggcgggccaggaaaggagggaaaaccagcc

SEQ ID NO: 233084 - RNA, 118 nt, Homo sapiens
cggccagacgcgcgggagcacgcgggcggaggagggccgagcgcgaggacggcacggagcagcggggacccaaggccagccagccccaggcaccagcggacaggacagggaggacgaa

SEQ ID NO: 233085 - RNA, 80 nt, Homo sapiens
ggagacacgacacaggggagcaggcggaggcaagggcccgcggcaggcggggccaggcccgagccagaaggaggcccaca

SEQ ID NO: 233086 - RNA, 55 nt, Homo sapiens
cccaccaggccaccacgcggcgggccggggcagcgcaagaccccgcacggaagca

SEQ ID NO: 233087 - RNA, 67 nt, Homo sapiens
acgaaaaaccgccagaagaaaacgcaaaaccagaagcgcgccgacacggcccgggcagccaggaggc

SEQ ID NO: 233088 - RNA, 62 nt, Homo sapiens
gcacgaaacgcgcgcccccgaaggcggccaacggccaggacggaagaggcaaggcaacaaac

SEQ ID NO: 233089 - RNA, 71 nt, Homo sapiens
aagaacaaacggaaaaacggagagaggccaggaccagcagcaccccccacagcacggaaagaagaaaaaag

SEQ ID NO: 233090 - RNA, 77 nt, Homo sapiens
cagcagccacggaccgagaccacgccaaccgggcggggaagagacgagacagaggcacgcagcagagacgaaagccc

SEQ ID NO: 233091 - RNA, 37 nt, Homo sapiens
cgcagccaagcgccgccgggacgaagagcccgggccc

SEQ ID NO: 233092 - RNA, 50 nt, Homo sapiens
ggcgccgcgcccacggccagacccaggagggccgggcacgcccccgaggg

SEQ ID NO: 233093 - RNA, 85 nt, Homo sapiens
cgagccgccgcccccgggaggccggcgccgcagcccgggcccaggccccggcagcgccgggacaagcacaggcaaggaaacagcc

SEQ ID NO: 233094 - RNA, 52 nt, Homo sapiens
aacagccagacgaaagcaccagagagagcacagggacaacaacgcagggcac

SEQ ID NO: 233095 - RNA, 82 nt, Homo sapiens
acgccgccaccgggaggcccagggaagagcagacagacagcgaacacggaagccacgaaaagcaaaagcacaggaagccggc

SEQ ID NO: 233096 - RNA, 66 nt, Homo sapiens
caaagccgaacgagcacggaaagaggacacaccgcccaagccacaaaacgcgacaacgcccgagag

SEQ ID NO: 233097 - RNA, 80 nt, Homo sapiens
acgcgcaggacagcaccgcaaaggggaaaggagcggaaggcgaaaagagcaggagaggagaggacccggaacagagacaa

SEQ ID NO: 233098 - RNA, 67 nt, Homo sapiens
acacaacacgccccgaagcaggaagcgagaggcgggaccgaagacaccagaaggcaggaaccagaag

SEQ ID NO: 233099 - RNA, 74 nt, Homo sapiens
ccagggacagccaccggcggccgggacccacaggcagcgacacccagcgacgccagaagcggcggaacgacaac

SEQ ID NO: 233100 - RNA, 51 nt, Homo sapiens
aaaacagaacagaaaagggcgagcccgcccggccgaagcgaggcacagccg

SEQ ID NO: 233101 - RNA, 69 nt, Homo sapiens
ggacacccccggcagacaggaccacgaagacggggcggccgcacccaggcggaggcagggcacgaaggc

SEQ ID NO: 233102 - RNA, 73 nt, Homo sapiens
gaggcgggcagaggagccagaagggggaagcccaaggcaaaagcaacaaccagcaaggagaggcaaccagacc

SEQ ID NO: 233103 - RNA, 62 nt, Homo sapiens
cggcgccgaccgggagaacgagaagacaaggccccagggaagggagccgccaccaaaagcag

SEQ ID NO: 233104 - RNA, 85 nt, Homo sapiens
cggacgaaagaggacacgggaagaacaaagacagaccgagagagcacaaggagagaacaggggggcccacacgcccccagcgcga

SEQ ID NO: 233105 - RNA, 67 nt, Homo sapiens
cgcgaaaagcggcccggaccgaaggcgcaagagggaggcgcacacacagagccgagggggccaccgc

SEQ ID NO: 233106 - RNA, 74 nt, Homo sapiens
ccagcggccaaaagagcagccacagaagaccaaacgcagaccagcccaggaaggggaaaggaaaccaaaccagg

SEQ ID NO: 233107 - RNA, 80 nt, Homo sapiens
acgccccagacccccgggccgaaggagaccaaggagcggacggcacaccgcgaagaggccagccggccgaccgcacagac

SEQ ID NO: 233108 - RNA, 75 nt, Homo sapiens
acgacgagccgaagcccgagacggacagacgcaggacaaccagacacggacagcagaggggggggcggccacagg

SEQ ID NO: 233109 - RNA, 57 nt, Homo sapiens
gcagggagcaaacgagcgccaacggagaaaaaaaggcagcagcaccaagaaaccagc

SEQ ID NO: 233110 - RNA, 75 nt, Homo sapiens
aagcgcaaaaacaagacggggcgccccacagaggggcgacgaaggggcagaccaacaccacccagcaaaaacccc

SEQ ID NO: 233111 - RNA, 86 nt, Homo sapiens
cggccgcggccgcaccagcgccacgcgcgaaagcgcaggccccgaggacccgccgcacgacagcacgagccagggagccgccggga

SEQ ID NO: 233112 - RNA, 76 nt, Homo sapiens
ccgggcccggaaagcgccgcccagcagccgcagacagaggccagccggagacccgggcacagaccagagagaaccc

SEQ ID NO: 233113 - RNA, 71 nt, Homo sapiens
gagcgggcaccccccaaacgacgcagccacggagaggagggcagaaaccagaagaccggggaccgaggagg

SEQ ID NO: 233114 - RNA, 77 nt, Homo sapiens
ccgcgcggcggcacacaacacggcgcaagcggcgcgccagagcggcacgagaagagcgcaggcaaacgacaaaaagc

SEQ ID NO: 233115 - RNA, 56 nt, Homo sapiens
ggccccaacacgcggcaggagagcccaaaaacagaacaaagcaggaccaccgcaaa

SEQ ID NO: 233116 - RNA, 65 nt, Homo sapiens
gagcaaaaggcgagaagcagaccacgcaacaagccacaaggaagaaaaaagcggccagaccacaa

SEQ ID NO: 233117 - RNA, 74 nt, Homo sapiens
gccggaggcgggagcagccaggacgcaccgccaccgcggaccgaggcaagaagcaggcggaagcccgccccagc

SEQ ID NO: 233118 - RNA, 63 nt, Homo sapiens
gacaaacgaacaggccccgacgaaaaaggcacccccagccaccccaaaggaagcgcaaacgac

SEQ ID NO: 233119 - RNA, 78 nt, Homo sapiens
aaaggacaaggcgccagccggcacgaaggccacagcaagcaacccaaggagacggcgcgggggcggagagggaaagag

SEQ ID NO: 233120 - RNA, 34 nt, Homo sapiens
agccggacagccggcgggaaaagaggagcgacaa

SEQ ID NO: 233121 - RNA, 61 nt, Homo sapiens
acggaggacggcccccagagggaagaggaagaagacggcacgggacccccagcacaggcag

SEQ ID NO: 233122 - RNA, 66 nt, Homo sapiens
cgggagagccgaaccagaagagaaagagggaacagccaaggccacagacaacgcacaaaaggcgag

SEQ ID NO: 233123 - RNA, 75 nt, Homo sapiens
ggcgagcggccggggcaggaaacgagaagaacgaaagagaaacccaaaaaaaggagcaaaagagcgaaagcaggc

SEQ ID NO: 233124 - RNA, 75 nt, Homo sapiens
cacgaggggccggcgagaggagcgggcgcacgggaggggaacgggccgaacgcagcagaaaacacagagaaaaca

SEQ ID NO: 233125 - RNA, 86 nt, Homo sapiens
gaggcaccaaagagcaggaggcggcgcagaagcgagcaggagacagcaggaccacagccaggaccggccaggcaggcagcacaggg

SEQ ID NO: 233126 - RNA, 77 nt, Homo sapiens
gaggcaccggaacagacgcaggaagcccagcgaccccggcccaaagcgcagggaagaacaaacaccaagggcagccg

SEQ ID NO: 233127 - RNA, 59 nt, Homo sapiens
cgaacaaagaaagggaagagacacaaggaaaggaacaccacagaaaaagcggaaggagg

SEQ ID NO: 233128 - RNA, 72 nt, Homo sapiens
aaaaaccccacaaaacgcggaaaccgccagaagcgcggcgagaaaacagacgcagcaaacccagacaagcaa

SEQ ID NO: 233129 - RNA, 74 nt, Homo sapiens
ggagcaggcacgagcgcggcgcggcgccaacggccgacaagcccgacgaagaccggcggccacagcagcaagca

SEQ ID NO: 233130 - RNA, 50 nt, Homo sapiens
gcggccacacgccacgccaccagcggcaaggaagaagagagggcgaagga

SEQ ID NO: 233131 - RNA, 70 nt, Homo sapiens
ccgcaagccagcaagaggcacggaacagcggaacggggacgcccgccccagggagagccggagccagaca

SEQ ID NO: 233132 - RNA, 73 nt, Homo sapiens
aaaggaacacaaaagaaaacacgagaacaccaaagagggaaggcaccaggagaaggcaccgggaaacagaaag

SEQ ID NO: 233133 - RNA, 32 nt, Homo sapiens
aaggaagaagaaacaggccccaagggaggaag

SEQ ID NO: 233134 - RNA, 75 nt, Homo sapiens
cccgcagccgccccccccccggaaaaggcccacgccgggcgagggagggcgggggcggcagagggcacgcccagg

SEQ ID NO: 233135 - RNA, 79 nt, Homo sapiens
gccacccgcaaacagggcagggagcaacagcgagcaacaggcaacgaaaacagacaaaacaacggaaaagcagggcacc

SEQ ID NO: 233136 - RNA, 80 nt, Homo sapiens
caaaaaacccagagaaaccagaaaaagacgacgcccggaagaggcgaaacgcagggcagaaaagaacagacccagaagaa

SEQ ID NO: 233137 - RNA, 77 nt, Homo sapiens
cggaccgcccccagccgacagaagagcgggacaaacgagaagacaacagaaacccccacacacccagcggaccccac

SEQ ID NO: 233138 - RNA, 75 nt, Homo sapiens
aagcaggaggcaagaaaggggaaccccggagaaaaggccaagaaggcagggcggcaaggaccgggagaccagcgg

SEQ ID NO: 233139 - RNA, 82 nt, Homo sapiens
ccaagccagaaggggaaaaggaaacagagcaaagcagcgacaacaaagacagaggaagaaaaacagacagaccaagaaagag

SEQ ID NO: 233140 - RNA, 73 nt, Homo sapiens
cgcccagccaaccaaaaggcgaccacagcagcccgcagagccgcacaccccgcaccgcagaccagcagcccag

SEQ ID NO: 233141 - RNA, 69 nt, Homo sapiens
ccgaggcgccgcacggggccgaggcgagcccccgccccgggaaagcggcgcagcccagaggagagagga

SEQ ID NO: 233142 - RNA, 67 nt, Homo sapiens
cgccagcagccgccggagccagccaacgagcgggggaaacaggaagagaacagaacggaagaaagca

SEQ ID NO: 233143 - RNA, 65 nt, Homo sapiens
gcccacagagaggaccggaggcaggaagagcggagagcagccccaaaaccagaaaacaaagggga

SEQ ID NO: 233144 - RNA, 77 nt, Homo sapiens
cggccgggaaaaaaaggcaccaagcccacacgggggacaagcgccagccgaagaaccaagagaacacaagaaggcgg

SEQ ID NO: 233145 - RNA, 55 nt, Homo sapiens
caagagagcaagaccgggcccacgaggcagaagagacaacacagaaaccagggcg

SEQ ID NO: 233146 - RNA, 75 nt, Homo sapiens
gaccccggaccagcaggaagcgcgccgaacgggagcccggcggccacagcaaggacaacacgggaggaggaaaca

SEQ ID NO: 233147 - RNA, 83 nt, Homo sapiens
cagaggaggccccccagccacggaaacgagacaagcgcaagcagccagagcccgggcgcaaagaaccaggcccggaccagagc

SEQ ID NO: 233148 - RNA, 77 nt, Homo sapiens
gccggcgagagcccccccgcgagcgccagaccagcgaagcgacaacaggccagagagccccgacgccgcaggaacag

SEQ ID NO: 233149 - RNA, 77 nt, Homo sapiens
ccagaccccagcaacaaaaacaaggaagacccgggaggggaagcaaggcagagagaggagcgagaggaagcggaaga

SEQ ID NO: 233150 - RNA, 75 nt, Homo sapiens
acccaagaccacaggaagaaaggaacaggaccagggccacagggcgccaagagcccagggcaccgcccggcccgc

SEQ ID NO: 233151 - RNA, 51 nt, Homo sapiens
cagaaggcagcagacaggcacccaacaggaaaagaaggaggccagcgggac

SEQ ID NO: 233152 - RNA, 77 nt, Homo sapiens
gggaacagcggacaagaagaagacagaacgcccccaccaccgcaaacagcaccaggagaaaaaaaaacaaagagggc

SEQ ID NO: 233153 - RNA, 56 nt, Homo sapiens
aaagcacaccggccgccgccacacccagacaaaacccggcaacggccaagcgggaa

SEQ ID NO: 233154 - RNA, 76 nt, Homo sapiens
cgccagccccgggggccacgagcggaagggagggcaagcagaaagcagaggaaaacgaacaacacccaaagccaaa

SEQ ID NO: 233155 - RNA, 52 nt, Homo sapiens
gaacgcagaaacacaggaccccccccaacgaggccgggaacaaaaccaaaac

SEQ ID NO: 233156 - RNA, 83 nt, Homo sapiens
gggaggggaccccacacccaggcaggccggagaggggagaagagcgagacgagaaagaagaggaagaagagagagaagagaag

SEQ ID NO: 233157 - RNA, 71 nt, Homo sapiens
acccagcgggcagaaagaccagcagggaaacccagcgagagaccagacaggcaacacccgacacccccaag

SEQ ID NO: 233158 - RNA, 80 nt, Homo sapiens
accccgcagcagggggagcagggcgagagggcaccgcggacggggccgcccagggggagagcacaaggcgaacaagcccc

SEQ ID NO: 233159 - RNA, 74 nt, Homo sapiens
cgaggcgagccaacagcacgcccaaaccacccagaccaggaaacaagagagcacagaagccgacaaaagcaccc

SEQ ID NO: 233160 - RNA, 90 nt, Homo sapiens
ggcgagaggggcgagaacgccacgcgggccggcgaaagcgcaacagggcaccaagaggaagcggacaagaccagccaaccgacgccccag

SEQ ID NO: 233161 - RNA, 76 nt, Homo sapiens
ggaacccggacccggcgagcggcaaagagaagaaaccaagagggaagaggaaagaagaaacccagagaaagcaaac

SEQ ID NO: 233162 - RNA, 83 nt, Homo sapiens
agagggggaggcaaagccgaaagggagaggcaacgggaagcacaagccagcagacgacaacaggcgcaggagacacagcaaag

SEQ ID NO: 233163 - RNA, 78 nt, Homo sapiens
ggcgccaagaaagccagccaggcaaaagggaagcgaaaccaaccagaagccgagaagggaagacacaggaagcgccga

SEQ ID NO: 233164 - RNA, 71 nt, Homo sapiens
gcaagccaaccagagccggcggcagagaccaggaggacccagcaagcacgagagcagcgggcaaacagacc

SEQ ID NO: 233165 - RNA, 76 nt, Homo sapiens
cagacacgcccgaagacacaaaaaccacggccagagcaagccaaacccaccgcaagacaccagagaagaacaaagg

SEQ ID NO: 233166 - RNA, 68 nt, Homo sapiens
ccccggcagggaagcacaaaacgacgggaagccaaaacaaggagcagcaccaacacacagcgagacgg

SEQ ID NO: 233167 - RNA, 76 nt, Homo sapiens
accagcaacggggggccgagaacacccaacagcgggacagaaaggcccccccacagagcgagaggcgacggagagc

SEQ ID NO: 233168 - RNA, 84 nt, Homo sapiens
ggcgagagccgcaccgccaacccccgagcaagacggggaagaaggaccggggagacaggaacacgggcaagacagcgcgggcac

SEQ ID NO: 233169 - RNA, 79 nt, Homo sapiens
ggcggcgccgcgcgcgcagggccgccggcccgcagccgccaccacccaggaccagaaggcggaggcaaggcgcgaccga

SEQ ID NO: 233170 - RNA, 58 nt, Homo sapiens
cggaacaaagaaaaccaaaacgcaacagaaacaacagacaacgaagagaggaaagaag

SEQ ID NO: 233171 - RNA, 88 nt, Homo sapiens
ccgaggcccaccgcgacacaccgccaggaagggaaaaggccgaggcacagcgggaagaccgcaaagacgacccgagacagggaacagc

SEQ ID NO: 233172 - RNA, 59 nt, Homo sapiens
accacagcagaccacagcgaaagaaggagccaaagggaagagcaagcaggcaacgcaag

SEQ ID NO: 233173 - RNA, 72 nt, Homo sapiens
gacgccaagcggggagcgcccgcgacagaggagggaggaaaacaaccgagggcagacacgggaggcccagaa

SEQ ID NO: 233174 - RNA, 76 nt, Homo sapiens
acacaacccgaccaccggagaaccggggcgcaccgccaagagcggggacccaggaagcacggaccaaccacgagga

SEQ ID NO: 233175 - RNA, 51 nt, Homo sapiens
agagacacacagggcaccagaccggacaagcccccacgaggaaaacccccc

SEQ ID NO: 233176 - RNA, 73 nt, Homo sapiens
gacccacgcagcaagaacgacccaggcaagcaccggcagaccgagcaggagaggaccgcagcagcaaggccga

SEQ ID NO: 233177 - RNA, 78 nt, Homo sapiens
gggccaagccgcgccggagcggagcgcgggcgccggggagccagcgccacccgacagagaaaaacaaaagggacagcg

SEQ ID NO: 233178 - RNA, 75 nt, Homo sapiens
cgagaaaccggacagcagaggaaacgagggacaacacagacccaccagcagagaggagcggccgcagaagggcgc

SEQ ID NO: 233179 - RNA, 74 nt, Homo sapiens
cggaacgcccgccccgcagagaggagcccagccccaagcagcacaagaccccgcaaaggcggcaccgaaaaacg

SEQ ID NO: 233180 - RNA, 73 nt, Homo sapiens
cgcgggcgcacagcgcgacgggcggacggaggagcccggcgaccacaagaacaccaacaagagaaacggagag

SEQ ID NO: 233181 - RNA, 76 nt, Homo sapiens
ccaccggcagaggggagaggaggacgagggagcggagagaccaaagcagggcagggacagagaagaacggcacaca

SEQ ID NO: 233182 - RNA, 80 nt, Homo sapiens
aacaaggagacacgccgccggccgccggcggggaccggcacgggggaacccaaaaagaaaggaaaaaagaaaaaaaacaa

SEQ ID NO: 233183 - RNA, 63 nt, Homo sapiens
acaagaagcgggccgcagccggccgcagcgagagcgaggaggagagaaggaacagaacagaca

SEQ ID NO: 233184 - RNA, 82 nt, Homo sapiens
ccacacagccggcagcccgggcgggcccgggggcgagcagcgcacccggcgcacacccagaacggagggaccaaagcagcac

SEQ ID NO: 233185 - RNA, 79 nt, Homo sapiens
cgccggagccgacgccgggaacccgccgcgcgccgcgaccccaagcagagaagacccagggcccccagccggaaaacga

SEQ ID NO: 233186 - RNA, 71 nt, Homo sapiens
aaaagcggaaagaccaaccgcgcccccaaaacacaagaggacggagaagcgacgaaagaagccgggacaag

SEQ ID NO: 233187 - RNA, 82 nt, Homo sapiens
gaacagcacccggacggacacgagaccagcacccaagagccaacagggaccccaggggaagaaaaggagggggagcgcggga

SEQ ID NO: 233188 - RNA, 74 nt, Homo sapiens
caccggcaccaccaaaacagcccaccgaggaagaccaaaggaccaaccaacaagaagcacaggccgagccagac

SEQ ID NO: 233189 - RNA, 95 nt, Homo sapiens
gccgccggaaaaggccgccgccgccgccgccgcgccgagcggaggaggaggaggaggcgaggaggagagacaaggaagcccgggccagccagccc

SEQ ID NO: 233190 - RNA, 63 nt, Homo sapiens
aggggccacaggggcacgggagaaccaacgacaaacgcagaacaaagccaaaggcccgacaag

SEQ ID NO: 233191 - RNA, 81 nt, Homo sapiens
gacaaggacaccgcgcaaggccggcagaaggccagggggcgcgggcgcgagcccccgccggcgacgccccaggccaggacg

SEQ ID NO: 233192 - RNA, 80 nt, Homo sapiens
cacaaacaagaaaggcccaaagcccacagcgcaaacgccaaggaaacacaagcgagaagaacgagcaccgaagacagggg

SEQ ID NO: 233193 - RNA, 72 nt, Homo sapiens
aagaacccagaaagaaaggagcgccccaaaaggaaacagccacgccgggccagaaaaggggaagaaagacaa

SEQ ID NO: 233194 - RNA, 78 nt, Homo sapiens
acaggcggacaccacaacacaccagcagacagagagccgagagcggcccaggaggaacaaccagcccacccggagagg

SEQ ID NO: 233195 - RNA, 69 nt, Homo sapiens
cagacaggagaaagaagacagccacagaaagagcacaaagaaccaaggaacgaaggggcaacagaacac

SEQ ID NO: 233196 - RNA, 71 nt, Homo sapiens
ggccgaggggaacaccggcgagcccgggcggggccggcagcaccgcggccgcaggacaggaaaaacacagg

SEQ ID NO: 233197 - RNA, 70 nt, Homo sapiens
cgcaaccgagaacagccaaggcggcccgacaccgccacccccagcaggaaaggagcgcccagggcggaac

SEQ ID NO: 233198 - RNA, 34 nt, Homo sapiens
gaaccccaacaaccccggcggccaccagaggacc

SEQ ID NO: 233199 - RNA, 78 nt, Homo sapiens
aagaaaccaaggccgggacagaccccgcggccccaaggcggagcaaacaggaggaagaaaaaaacagggcacggcccc

SEQ ID NO: 233200 - RNA, 61 nt, Homo sapiens
ccgggagccagaccggcaccgaagaccgccaagaagacgcggagggaggcgaggagggacc

SEQ ID NO: 233201 - RNA, 80 nt, Homo sapiens
ggaagaacgccagcaggcgaccaaagagaggcacaacacagaaaagggcccaaggaagaaagacaagaaagaccaaggaa

SEQ ID NO: 233202 - RNA, 72 nt, Homo sapiens
agccccagcaacagcacagccaagcaacgcacacaacagcagcagaagagggggggaaaggcccagaaccag

SEQ ID NO: 233203 - RNA, 79 nt, Homo sapiens
cgaaagaagccagcaaccagaagcagacaacaggagaaagacagcaaagaaaaggagaagaaaggaaaaaaacaacccc

SEQ ID NO: 233204 - RNA, 78 nt, Homo sapiens
ggacacccgcaggaaccggcagaggagaaacagacggccccgagggagcaaaaggaaccccacggagcgcagcacccc

SEQ ID NO: 233205 - RNA, 67 nt, Homo sapiens
caaggaggagaaaggaaaaagggacccaggggaacaaacaagagggcacgccggagaagaacggaaa

SEQ ID NO: 233206 - RNA, 83 nt, Homo sapiens
cggaggcgccgagcggaggagaccagcagaagggcagggcaaaaaacaggcagccagacgaaacacaggagacgagcgaacaa

SEQ ID NO: 233207 - RNA, 69 nt, Homo sapiens
gcacaaagcagacaacaaaaagcagccaccagcaagagcacgcgcccaggcggaggcaaggcgcgaccg

SEQ ID NO: 233208 - RNA, 85 nt, Homo sapiens
gccggccagggccggcgcggcgagagaacaggccgaaagggccacaaacccaagggcgccaacccccaacccacgcgggcagcca

SEQ ID NO: 233209 - RNA, 83 nt, Homo sapiens
cagaagaagcccgaggagcacggaggaagcacacccgccagggacgggcacgggaagccaaacccgcgcccgggcaaggcggc

SEQ ID NO: 233210 - RNA, 109 nt, Homo sapiens
cccgcccccgcccgggaaccgccgggaacccgccagcaccaccgcccaaccccaggggggcggccggccgcagagcaccgcgcggaggagaccggccaagccgcacggc

SEQ ID NO: 233211 - RNA, 68 nt, Homo sapiens
gcagaggagccacaggacagagggacaaggggagaaaaacaggaaaagaaagacgcacagggagaaaa

SEQ ID NO: 233212 - RNA, 40 nt, Homo sapiens
cggcggcgccaggcagggcgcaggagagagacaacaagaa

SEQ ID NO: 233213 - RNA, 75 nt, Homo sapiens
gacagccgcacccgcgccccagcagaggaacagaaacacagccagagacggaaagaacaggaacaacgacgcccc

SEQ ID NO: 233214 - RNA, 80 nt, Homo sapiens
ggaggccccccagccacgggaacaagacgaccccgacgcaggccaggagccgcggacagaagccgagcacggccgagaca

SEQ ID NO: 233215 - RNA, 67 nt, Homo sapiens
ggggccaaaaacagaggagaaaaggcggacagcagcgcaggcaaaaaacaggggcacaccaagaaaa

SEQ ID NO: 233216 - RNA, 76 nt, Homo sapiens
caccgagaaggggcgaagccacaggggcagagagaacccaacacagggagaagaaggaccagagagacccgaccaa

SEQ ID NO: 233217 - RNA, 94 nt, Homo sapiens
gcggccagacaacaccgaagaggaagacggggcggaagaccaagacacgagagggcacgaagaacacaaagcaaaaaggaaaagaagagaagaa

SEQ ID NO: 233218 - RNA, 78 nt, Homo sapiens
aaggcgaggccaggagggagagaccggccacaggcagacggcagggccggccaaggagaggcagacccagacaggagg

SEQ ID NO: 233219 - RNA, 56 nt, Homo sapiens
aacgggacccagagcgcaaagagcgggggaccgaaccgaaggaagaagagaacaga

SEQ ID NO: 233220 - RNA, 71 nt, Homo sapiens
ggaggcccgcacaggaggagggaggggagcgccacggcaggcggcagaccacggcgccgacaggagccaag

SEQ ID NO: 233221 - RNA, 57 nt, Homo sapiens
gaacagcgggaaagaaggcaaaacacggacccccggcggccaagacacagcgaaaaa

SEQ ID NO: 233222 - RNA, 67 nt, Homo sapiens
aagaccaccaaggcaaagacgaagaaacggaaaaagaaccagggggagacaaagccacaaccagccc

SEQ ID NO: 233223 - RNA, 71 nt, Homo sapiens
aaagcagaaaaagaaagggaagcaccgccgcagacgcacacaggcccgaacaagcgacaaaaacgagaaaa

SEQ ID NO: 233224 - RNA, 73 nt, Homo sapiens
agggagccggacgaagaagacggaaccggaaggggacagcgcacacggcaagaacaagcgcaggaggaaagag

SEQ ID NO: 233225 - RNA, 71 nt, Homo sapiens
ccacgcgcggaaggcagcgcccagcagcgcagagcgcccaggggcccaggggccccacccacaggcccagg

SEQ ID NO: 233226 - RNA, 61 nt, Homo sapiens
ccaagacaaaccgacgggaaaacgaagagaaaagaggggagaaaacgggccggaggaaaag

SEQ ID NO: 233227 - RNA, 62 nt, Homo sapiens
gaccggggaaccgccaaagcccgggcgcggaagaagccaagccagaggcccaggacagcgag

SEQ ID NO: 233228 - RNA, 76 nt, Homo sapiens
cccgccccgacccgggcgaagagggggccaaagggcgagggcacaaaaaaccacaccccccaccgaggaagagcgg

SEQ ID NO: 233229 - RNA, 80 nt, Homo sapiens
ccccaaagaaaggccgaggcagcgaaacgccgaagggaccaggcagacgggaagaacccagaaagaaaggagcgccccaa

SEQ ID NO: 233230 - RNA, 80 nt, Homo sapiens
agggcaagcccacgggcgggagcagaagccgcccggcccccgcagaggagaaggcagagcccccccaggcagaagcccga

SEQ ID NO: 233231 - RNA, 83 nt, Homo sapiens
caacggaacagcaagaaagcgcgagggagcccacccgggaggggggccggcaccagggagagcgcccgcacggaccccagcac

SEQ ID NO: 233232 - RNA, 77 nt, Homo sapiens
aaggaccaacaacaaccgaggcaaagccggccaaggcaaagaaggggaacacgccccggggagggccgggggaaacg

SEQ ID NO: 233233 - RNA, 64 nt, Homo sapiens
aggacgcgggccgaggagagcggaggaggggaggcagacgccagcagacacacagccgggcaca

SEQ ID NO: 233234 - RNA, 64 nt, Homo sapiens
ccgacagccgcagaaccaaaacggcaagaccgccgaaagaaaacgagcgagcccagcagcccga

SEQ ID NO: 233235 - RNA, 87 nt, Homo sapiens
gcaaggccaaggcgccgcagcaggaggaggggcccaagggccagccccgagagcgcagacaggggggccaagccagagccagaccgc

SEQ ID NO: 233236 - RNA, 80 nt, Homo sapiens
gacgacgacaaacccgagggccagaaacaaaccaaagcaaaacgccccaaggcaaggcagaaaacacaaggaagaaaacc

SEQ ID NO: 233237 - RNA, 79 nt, Homo sapiens
cacacagggccgccaccaacagagaagacagagcaccaacgaggcgagggggcacacaggcaaacaggaagagaaccac

SEQ ID NO: 233238 - RNA, 64 nt, Homo sapiens
caaaagagaaggccccaaccacacaaaggaagaagacagcgacagcgggcgcacgcaaacgcgg

SEQ ID NO: 233239 - RNA, 82 nt, Homo sapiens
cgcggcaaccgcccgaccagccgccccagccgccaggacccaacgcccgcgccgccgacgagcggagccgggggcaggaggg

SEQ ID NO: 233240 - RNA, 62 nt, Homo sapiens
ggcagcagacagcaacaagcaaacgacggaagggaaaaggccgaggcacagcgggaagaccg

SEQ ID NO: 233241 - RNA, 39 nt, Homo sapiens
aggcagcaagagagcacaggaggacaggagagacaacgg

SEQ ID NO: 233242 - RNA, 40 nt, Homo sapiens
aggagaagagggacggcccaggcggcgccgaggaagagca

SEQ ID NO: 233243 - RNA, 88 nt, Homo sapiens
gccccgaggacccggggcgcggagcgagcagaggcaaggccagcggggcgcccaggaggcaccacagagcagagcaaagcggcagccc

SEQ ID NO: 233244 - RNA, 63 nt, Homo sapiens
agagcccgcccggcccggagaagaaaaggcagaggaggggacacggggacgcccggcggcccg

SEQ ID NO: 233245 - RNA, 63 nt, Homo sapiens
aaacagccgccagcagcaaacagagcggcagaaacaccaccagcggcggcgcggcgcaggcag

SEQ ID NO: 233246 - RNA, 51 nt, Homo sapiens
aaccgcccagccccggaaacagcccaggggcccggaggggcccaggggcga

SEQ ID NO: 233247 - RNA, 85 nt, Homo sapiens
gccccaggccaagagggacccacccggcggccagcgcgggccgccagcggcggccaccacagcgccgcagcccagcgaggcccag

SEQ ID NO: 233248 - RNA, 37 nt, Homo sapiens
cgcgaaacgcacgagaaggaccgccgcgcacccggcc

SEQ ID NO: 233249 - RNA, 75 nt, Homo sapiens
gcagagaagcccacggcacgaacacacagaaagaggccgagaagacgggaagccaagcaggacaaccacaaaagc

SEQ ID NO: 233250 - RNA, 78 nt, Homo sapiens
cagccccaagagcgggaacagacacccagggggcggcaagaggcggcaggccgaccgagagacaagagcgcgggggcc

SEQ ID NO: 233251 - RNA, 37 nt, Homo sapiens
gagaggcggccgagggagacagaacagacagaaaaaa

SEQ ID NO: 233252 - RNA, 62 nt, Homo sapiens
gcaacccgggacacaagcccccgcgggggaagcccccaagagggcccaccgcaccggacgac

SEQ ID NO: 233253 - RNA, 68 nt, Homo sapiens
ggagggaggggaccagccacgcaagccgcccccgggcacgccacccgagagccaaacggggacgcaag

SEQ ID NO: 233254 - RNA, 88 nt, Homo sapiens
ccgccgccccccgaggagaccgggcccggaagggccggcccagggagaacgcaaaaccaccacccccacaaaaaacgcagggagaaaa

SEQ ID NO: 233255 - RNA, 74 nt, Homo sapiens
gcagcccgaaccggaaccaaaacagacccacggaccacaaagcaggcagaaacacaggaaagcgcaggcaggag

SEQ ID NO: 233256 - RNA, 78 nt, Homo sapiens
gagggagcaagagggcggaggccacgaacacgccggagccgccaggccaaagagaaagagaaaggagagcaagagaac

SEQ ID NO: 233257 - RNA, 58 nt, Homo sapiens
ccggagaggagcagaaggagcaaaaggcggacaggcagaagaaggagccccccgagag

SEQ ID NO: 233258 - RNA, 47 nt, Homo sapiens
gaccagagaggagacccaccagcagccgccccggggccccgacccgc

SEQ ID NO: 233259 - RNA, 113 nt, Homo sapiens
ggccaaagggcgagggcacaaaaaaccacaccccccaccgaggaagagcgggagaaaggaagcgcaaaccccccaagacgagcacggaaggcgacggcccccagggagccgac

SEQ ID NO: 233260 - RNA, 78 nt, Homo sapiens
ggaaacgccacaacggaggcagccgccgccccaggcagagcccgcccaaccacccagccggagacacgccaccaccag

SEQ ID NO: 233261 - RNA, 57 nt, Homo sapiens
gggacccggcgccggccacccagaaggagcagccaaaagaccaaaagcaaccaccgc

SEQ ID NO: 233262 - RNA, 74 nt, Homo sapiens
cgaagccccacaagccagggaagaccccgaaggaccaagggccaggcgaaccgggagaaagaacaaacgccaac

SEQ ID NO: 233263 - RNA, 81 nt, Homo sapiens
gcgaagacgacgaaggagcagccagaaagaagaggccacaagcaagaacgcaaaggaaaagccaaggagacgggccgggac

SEQ ID NO: 233264 - RNA, 79 nt, Homo sapiens
ggaacaaccccgaacccgaaggggcagaagggcaagaaggaacagacaaaaacggccggaaggaaacacaggacaccag

SEQ ID NO: 233265 - RNA, 73 nt, Homo sapiens
ggcacacacaacacagcaacagacagaaacaccagacagcgacagacccgccccgccacgagaacacaccccc

SEQ ID NO: 233266 - RNA, 72 nt, Homo sapiens
agccagaaaaccccaaagcaaacgacgacaagagaggggacaagagaagcagggaacagcaccccgggacga

SEQ ID NO: 233267 - RNA, 72 nt, Homo sapiens
gaggaggggcgcccgagaaggggacggcgggcgagggaggggaccgccgcggaggcagcacggcaggagacg

SEQ ID NO: 233268 - RNA, 55 nt, Homo sapiens
accaccaaaagcaacagaccaggggccaggcccagccgccgggccgccacaaaaa

SEQ ID NO: 233269 - RNA, 71 nt, Homo sapiens
gccccgagcagggggggggggaagccgcagcggaaagcaggagcacagggcggcggcagcacaggagcgga

SEQ ID NO: 233270 - RNA, 71 nt, Homo sapiens
gaccaagaaaaagacccaaacccgacccccgggaccacaaccccacaagaagccgggggcccgggagaccg

SEQ ID NO: 233271 - RNA, 74 nt, Homo sapiens
gggccagggcaaacagcgaaaaccgaaacaggccggagcgggagccaggggggcaggcaccgcggccacagccg

SEQ ID NO: 233272 - RNA, 60 nt, Homo sapiens
cgccgcaccccgagcgaccggggccggagacggcagggcacgggccccaggccgggggcc

SEQ ID NO: 233273 - RNA, 80 nt, Homo sapiens
aaaaccggagaggaggagagaaggaggacgagccgggacgaccaccaggaccccagcaaggaaggacaaagagaaggcaa

SEQ ID NO: 233274 - RNA, 56 nt, Homo sapiens
gaacgagcccaggccacagacccacacgccggcggccaaggccccagggcaggggc

SEQ ID NO: 233275 - RNA, 64 nt, Homo sapiens
ccaaaccagaagaggagggcccagaagaaaaagcccgagacagccccaaggcccggcaggagga

SEQ ID NO: 233276 - RNA, 75 nt, Homo sapiens
gaaagcccggccacgggccagcccgccaacggggcaccgcgggacggcacaaccgcaccgccggccacccggcca

SEQ ID NO: 233277 - RNA, 78 nt, Homo sapiens
aacgaggaaaaacagccaagacggcaaagccccccagaagaccaggccaggggacaccagcaagcgcggaagaggacc

SEQ ID NO: 233278 - RNA, 68 nt, Homo sapiens
ccgcgccgccgcgccgccccacaaacaaccggaccggaagacacagaaaagaaccccgacagcccgac

SEQ ID NO: 233279 - RNA, 62 nt, Homo sapiens
cagccaaaccagggacagggggccgacgcaggaaaggcaaacaccgagaagacaaccacggc

SEQ ID NO: 233280 - RNA, 80 nt, Homo sapiens
ccacacagcaaggaacagcccaaagaccagacacgcagaagagacgggccaacgccgcggggaggaggcgcagagagggc

SEQ ID NO: 233281 - RNA, 82 nt, Homo sapiens
cgcacgggccaggaccaagacgggcccgagggaccgccaacaagcggcccgcaccgggccagacaacaccacccacaagccc

SEQ ID NO: 233282 - RNA, 63 nt, Homo sapiens
aaacggcacagaaaggaagaaacggaagacaccgaaggagagaaccaggagaccgaagcaacc

SEQ ID NO: 233283 - RNA, 76 nt, Homo sapiens
aggccacaacaagcgaaccccaaacccaaaccgcggcggcgacccaccacgccagccaggaccggaagaagcaacc

SEQ ID NO: 233284 - RNA, 92 nt, Homo sapiens
cagacacaacccggccacgaggcccgcgcacgacccagccccagaggacaccagcgggcgggcgacgcacgaggcacacaggaaggagggga

SEQ ID NO: 233285 - RNA, 77 nt, Homo sapiens
caccaggaaccaacagccaaaagccaggcggacggagcacccggccccgcggcccgccacgacagcggggcgcaggc

SEQ ID NO: 233286 - RNA, 76 nt, Homo sapiens
gaagcaccccgaggggccgccaagcccgcagacacccgaacgcgcagaagaagacaagagagaagccagagcagag

SEQ ID NO: 233287 - RNA, 75 nt, Homo sapiens
cgggacaaaaaccagaccaggacagagcgggagccaccagcgccaaagggaagccaggagcccgggggcacgggg

SEQ ID NO: 233288 - RNA, 64 nt, Homo sapiens
ccgagcacggcagagaggagagaaagaacccacgcaggacgacagaagaggccggacaagagaa

SEQ ID NO: 233289 - RNA, 78 nt, Homo sapiens
ggagggaccggggcagccacacaagcgcgggagaaacaggcgccaaacgacagagaccccaccacgggccggcgaaca

SEQ ID NO: 233290 - RNA, 69 nt, Homo sapiens
cggagcccccacccccccgccaggccccagagacaccagggaaccgagcccgcaagagacggcagcccc

SEQ ID NO: 233291 - RNA, 72 nt, Homo sapiens
agaaaaaaaaagggagagaagaagcaagaccaacacgcgcaagggacagagagaggcagaagaaaaagcacc

SEQ ID NO: 233292 - RNA, 55 nt, Homo sapiens
agagaagagaaaccaagcccgggggagaggcaccagcaacagaccaaccgcagca

SEQ ID NO: 233293 - RNA, 78 nt, Homo sapiens
gagagcgagagaagggaccagccagaagaaacaaccgacaaccccagccaaccggaccgggaaaaaggcagcgcccac

SEQ ID NO: 233294 - RNA, 95 nt, Homo sapiens
gacccgcccccggacacaacacccacgcaggccagagaggagggacaggcaagaaggaagaaggcagaggcgcagccagggggaccgcggaggag

SEQ ID NO: 233295 - RNA, 67 nt, Homo sapiens
aaggaggggaggcaacaagaaggaggaggaggaagccaagaacgggagcgaagccacgcagcggcac

SEQ ID NO: 233296 - RNA, 72 nt, Homo sapiens
gagaccaagagaacacgagcaacgcccaccgggcgcaggcgaggacagaggcacaaaaggagaaagcagaag

SEQ ID NO: 233297 - RNA, 78 nt, Homo sapiens
aggaagccaccaacgccacaccgacccacaggagcgcccgcggaggagcgcccgggaacagagacagacccgggggcc

SEQ ID NO: 233298 - RNA, 75 nt, Homo sapiens
acaggaaaggagcggccagcaaggagggagggccacaagaacaccgagacgacacaagaacaaagacgggccaca

SEQ ID NO: 233299 - RNA, 53 nt, Homo sapiens
gcagcacgcgcacagaagaaaggacagcagaccacagcccggcaggcccaaaa

SEQ ID NO: 233300 - RNA, 79 nt, Homo sapiens
agagccgcccgagggaggcgacgggggcgaagagcgcgccgcccccgcccacccagcgccgcccaagagagagaagaga

SEQ ID NO: 233301 - RNA, 73 nt, Homo sapiens
acgccggcgaagaccccgacaggaacagacaaggcgccaagagaagagacgggaacgacaaaggaaaaagcac

SEQ ID NO: 233302 - RNA, 37 nt, Homo sapiens
aacgcacagccacaagaagcaagggaccgcaagcggg

SEQ ID NO: 233303 - RNA, 83 nt, Homo sapiens
cgggcgcaccgggacccgcaggagccagaaccaccggcgccgccgggcagggaggggagccgggccaggaccgcgcgggcgcc

SEQ ID NO: 233304 - RNA, 82 nt, Homo sapiens
accaccaaaaacaacacccagaaagaggaggggcagcagcaggacagggaacccgggagacagcaacagacggaggaacggg

SEQ ID NO: 233305 - RNA, 82 nt, Homo sapiens
cgcgcgggggcggggggccgagcaaccagaaccggagcaggaggcgcacaacacccagacaagcagaccggaagaccgacgg

SEQ ID NO: 233306 - RNA, 75 nt, Homo sapiens
cgcgagccggcggcccggagggggcggcggaggcccacgcggaccggcagcgccaccggaccaccagacaaggac

SEQ ID NO: 233307 - RNA, 78 nt, Homo sapiens
cacagcacccgagaagagaagaaagcagcacagggaaagaccccgacaaaagacaacaccgggacagacgacggaacc

SEQ ID NO: 233308 - RNA, 83 nt, Homo sapiens
cccaaccgcgccgggcaaacgaaggaagagcagcaaaggaagagaggaggccgggaagaaggagggacacagcagcgcggaga

SEQ ID NO: 233309 - RNA, 62 nt, Homo sapiens
aaaaaaagcagagaggagcggggagcaagcagaaaacaccgggaaaggcccaaaccggcgaa

SEQ ID NO: 233310 - RNA, 88 nt, Homo sapiens
aggacagaacaccagcacggcgaaggaccaggccaaccggagcgcacccacgccacaagccggacggcggcagcgcggccgggggcga

SEQ ID NO: 233311 - RNA, 74 nt, Homo sapiens
gcaagagacacaaaggaagcaggagcgccgcaaagcaagagacgaagaggagcagaaccagaagggacacacag

SEQ ID NO: 233312 - RNA, 74 nt, Homo sapiens
caacaagaaggccaaaaaaacccagcggaaagcaacaaaaggaagaaggggaaaagaaacgggagaagaacgca

SEQ ID NO: 233313 - RNA, 58 nt, Homo sapiens
ggacacccagcacaggcggacaggccccggaagccagcaagagcaggaacccagacag

SEQ ID NO: 233314 - RNA, 71 nt, Homo sapiens
aaggagagggggagcgaagagccgaaaacggaaacaccagcgaagagaggcaaccagcccacaagaaacaa

SEQ ID NO: 233315 - RNA, 72 nt, Homo sapiens
gaaggccacagcaggaaaaaagcgcgcaggaccggaaggaacaacaccaaacccaagagggcagcggcagca

SEQ ID NO: 233316 - RNA, 65 nt, Homo sapiens
aaaggaaacgcagcaagcaaggcagcgagccacccgccaagaagaagggaccacgaggaagcaaa

SEQ ID NO: 233317 - RNA, 73 nt, Homo sapiens
cgcaggaccgaggcccaaaccccacgaagacaagaagcagcccagccaaccaggccaaccccccaggagcaac

SEQ ID NO: 233318 - RNA, 76 nt, Homo sapiens
gccaaaggccaggacaccaacgggaccagaagaagccccgacacagaagaagccgaaaagccagcagccgcaccca

SEQ ID NO: 233319 - RNA, 58 nt, Homo sapiens
acacgcgccgcgccaacaaggagagaagagacgaggaggaggggagaccgcggcagga

SEQ ID NO: 233320 - RNA, 67 nt, Homo sapiens
ccggaggaaaccgaacaaacccgagaaagagaggaggagggagccagccagagcccccccaagggaa

SEQ ID NO: 233321 - RNA, 83 nt, Homo sapiens
ggagagcacaaccacgcagggaagcccaggggcaggaagaaggagaaagacaaagccccgagaaagaccagcaccgccgaaaa

SEQ ID NO: 233322 - RNA, 93 nt, Homo sapiens
cgcggcgcgccgaggcgcccaccaggaacagcagaaaacagacggaggacacccagggaagaaggagcagcccagcccgaaggaaagagaaac

SEQ ID NO: 233323 - RNA, 75 nt, Homo sapiens
gcaccgagaccagcgaggagggacagaggaaaaccagcaggaaaaagacacaccagagccagacaagcagccaag

SEQ ID NO: 233324 - RNA, 73 nt, Homo sapiens
agggcaagacacccaagggcagaaaggacacgagcgagggcgaccagggaacgggaagcacgaagcagcagga

SEQ ID NO: 233325 - RNA, 72 nt, Homo sapiens
gagaccagcccgccaacagggcggggacagagagcaccagcacccacggcaccgcccccccacgcagccacg

SEQ ID NO: 233326 - RNA, 74 nt, Homo sapiens
aaacgacagcaaccacagggcaggccagggcaagaaccaggcccgcccaaggcaggaccgacagcccccaggaa

SEQ ID NO: 233327 - RNA, 77 nt, Homo sapiens
cagaggagagcgccagcgacccgcagaacacaaggccgggaaagggagcagcaccggccacacccacagcacgaccg

SEQ ID NO: 233328 - RNA, 78 nt, Homo sapiens
gaaagaaaagaccaagaagggaagaagaccaagacccacagccccaggcgcgggaccacggcgcccccaaaagagcaa

SEQ ID NO: 233329 - RNA, 78 nt, Homo sapiens
cgccgcgggacccgcacgacagcgggaggcagagggaggaaccggacgccggaagccgggaaaggcagcgcaccgcaa

SEQ ID NO: 233330 - RNA, 67 nt, Homo sapiens
ggcagggaccgccccaggcaggccaggacacacaagcaacacggaaaccgaccacacgaacgaaaaa

SEQ ID NO: 233331 - RNA, 64 nt, Homo sapiens
acccacccgacccggaagccacaggcaccaccacccacgcggcccggaacaccgcagccaaggc

SEQ ID NO: 233332 - RNA, 69 nt, Homo sapiens
ggagagaacagacagcggaccgcaaacaagcaagagaaaaaaacaagaagagaggacaccccggaaagg

SEQ ID NO: 233333 - RNA, 70 nt, Homo sapiens
ccgcggaaaggagggcggcccggaccgggagacacggccagacgcccccaaacaaagggcaaaggacaca

SEQ ID NO: 233334 - RNA, 73 nt, Homo sapiens
gaagcgccggagccgcggccggcgggccagcccgggcccccagcggcaaaggaacacgaggacccaaagaaca

SEQ ID NO: 233335 - RNA, 57 nt, Homo sapiens
gcacagagcgagaccaggaaagaagggggcagaagagggacaagggaggcgaggacg

SEQ ID NO: 233336 - RNA, 74 nt, Homo sapiens
gaacagacacggggaagcgcaaaaacaagacggggcgccccacagaggggcgacgaccaaaacagaaagcagca

SEQ ID NO: 233337 - RNA, 70 nt, Homo sapiens
cgccaacgcccggaagaaaggcccagaggaggaagccgcagccaagaaacccaccgaacacaagacccac

SEQ ID NO: 233338 - RNA, 88 nt, Homo sapiens
  misc_feature (45)..(88): n is a, c, g, or u
ccccgacagccgggcgcgcacaccggcccacacgggcagcgacgnnnnnnnnnnnnnnnnnnnnnnnnnnnnnnnnnnnnnnnnnnnn

SEQ ID NO: 233339 - RNA, 80 nt, Homo sapiens
ccccacccggacggccaacaccaccggcacaggacggccagaggagcaccacaggagaaaccgaacaagaagaggaaagc

SEQ ID NO: 233340 - RNA, 76 nt, Homo sapiens
ggaaagacaggagaccaaaaagaacccagacccaagaaccagaaccagccaagcggcaagaaggagaaggaacgac

SEQ ID NO: 233341 - RNA, 75 nt, Homo sapiens
cgggcgggccggcgccggagacgagccggaaaggaagccagaaccgaaaacccaccgacaccagccacgccacca

SEQ ID NO: 233342 - RNA, 82 nt, Homo sapiens
caaacgaccccccgaacggaccccgcgagcaccagagcggcgaacacgccgacaggaggcagaaacggggacacaagcgaaa

SEQ ID NO: 233343 - RNA, 63 nt, Homo sapiens
gcaaacgagcagggcaaggccagcgcgcaggcccggaggagcgggaggccagaaacaaagagc

SEQ ID NO: 233344 - RNA, 106 nt, Homo sapiens
aggacaacccacaagcaaaagcagacggaagaagaagcaaccggacagccagaaccggaccgggggaacagaaagcaacgaggccgcaaagcaacgggacggccga

SEQ ID NO: 233345 - RNA, 79 nt, Homo sapiens
agacggccacagacaacggagggaaagggagcagcaccggccacacccacagcacgaccggaacccagcgaccgacgcc

SEQ ID NO: 233346 - RNA, 54 nt, Homo sapiens
gggcgccccacagaggggcgacgggaacaacagcccggcaccgagcgcagcgac

SEQ ID NO: 233347 - RNA, 81 nt, Homo sapiens
cacccagagcgcacggcgacgccccaggggaaaacccccgggaccaggccgaggcacggaaggccaggacagaggcccggc

SEQ ID NO: 233348 - RNA, 72 nt, Homo sapiens
cgggcgaggccgcggcagggcccgcaggcggcgcacaggaagcacggggagagcggaagagacagcccaaag

SEQ ID NO: 233349 - RNA, 63 nt, Homo sapiens
aaaccgggccaggagcgcagaggacacccgccccgcgcagcagcacacagaagaaacaggaca

SEQ ID NO: 233350 - RNA, 58 nt, Homo sapiens
gaacacagacgggggcgagcggacccgcagccccaaaacccaacagaggaagccgcaa

SEQ ID NO: 233351 - RNA, 78 nt, Homo sapiens
ccgaggcaggaccccgggacacccggaagccaggaaagaccacaggaagaggaggcccgaggaccaaggaaccggaaa

SEQ ID NO: 233352 - RNA, 77 nt, Homo sapiens
cgaagaagggcgagggagcaagcgcacacgaagagaagcaaggcccaagacccaggcgcacaggccccagacacgag

SEQ ID NO: 233353 - RNA, 92 nt, Homo sapiens
ccgaccgaccggggccagcggggaggcgaagacgagacagagaaacgaaagagcccagacacccaagagggccaagccagaaaacagaaacg

SEQ ID NO: 233354 - RNA, 64 nt, Homo sapiens
acaaaagggccaaagaagggagagagccagggacaacacacgggagagcacaaaccgaacacac

SEQ ID NO: 233355 - RNA, 69 nt, Homo sapiens
aaaggagccagggagagaacagaacggagcggaccagacgaggcacgcggacgccccccaaggcacaac

SEQ ID NO: 233356 - RNA, 74 nt, Homo sapiens
cagcggaagacaaaccacaacaacacagcagagacacgggcgcagccccgagcccacagccccagccgacagaa

SEQ ID NO: 233357 - RNA, 81 nt, Homo sapiens
ggacacggcacaccgaccgacggcacaaagcgggaagaacaccggcccacgaggcccgcgagcgccccacggcgcaccaca

SEQ ID NO: 233358 - RNA, 80 nt, Homo sapiens
cgcgcggccccgcccccgccggcgcgcccgcgcggcgcggggaccgcggcccggggggcggcacgcagccaccgaggcca

SEQ ID NO: 233359 - RNA, 75 nt, Homo sapiens
aaggggcgcagagcccggggacgcaccaaagaagacagacacgcagaaaaggagccggaccccagggcccagagc

SEQ ID NO: 233360 - RNA, 77 nt, Homo sapiens
ggacagcgacgcaggcaccgcacgcacagaaacgggagggaaggaagagacccgggcagacggaccacaccgcgcgc

SEQ ID NO: 233361 - RNA, 83 nt, Homo sapiens
ggagacagagcaagaaaagcccgggagcagaagggaggcccaagacccacaacaaaaggaaacacccgagcccgacccaagag

SEQ ID NO: 233362 - RNA, 67 nt, Homo sapiens
cacagacaggaagaagaaaagagaagcaccggggaaaggagaaagaggacacggccgacagacagcg

SEQ ID NO: 233363 - RNA, 80 nt, Homo sapiens
cggcccaccacggccccagcccgacaaagccggcccagcccgacccggcacgcccgagccggcccgccaacacaggaagc

SEQ ID NO: 233364 - RNA, 77 nt, Homo sapiens
gacggaaagaaacacgagcacgccggacaggaggaacccgcccggccaacgcaacagggagcccacgcaagaggggc

SEQ ID NO: 233365 - RNA, 76 nt, Homo sapiens
gggagacgccgaagcgggggcgcaaaccaagaaggggcgcccgccccagcgacggaagagccagagcacagagcac

SEQ ID NO: 233366 - RNA, 76 nt, Homo sapiens
gagaacagacacaccagcacccagcccacgggcagacaccgcacagagcgaaccagaaaaggaaaacgggaccaac

SEQ ID NO: 233367 - RNA, 57 nt, Homo sapiens
agggcgccggcggagggaaggcgcgggaggacccaaagacaggaccacgcaccagca

SEQ ID NO: 233368 - RNA, 73 nt, Homo sapiens
aggcgccggagggggagccccgggggggcggggccacaaggaccccgagagccccccccaaccggcgaaaccc

SEQ ID NO: 233369 - RNA, 37 nt, Homo sapiens
gccgaaagggcagaacagggggagagcgcaaccaacc

SEQ ID NO: 233370 - RNA, 51 nt, Homo sapiens
cacgccgcgaaaacaagacagccagaggacgggggggacgaggccacacgc

SEQ ID NO: 233371 - RNA, 76 nt, Homo sapiens
ggaccaggaggcgagcaacaggccccccaggccacccaggaccagcggcacacccccccgcggcccaaaaagcccg

SEQ ID NO: 233372 - RNA, 70 nt, Homo sapiens
gcccgccaaggggccgggagcgaccaacacaagggggccgcaaggagaaagacgcagaaagaggggcaaa

SEQ ID NO: 233373 - RNA, 71 nt, Homo sapiens
cggacacgaggagaaacagcagaaacgcaccaggccaaagaaagagaagaccagaacagagaagaaagcag

SEQ ID NO: 233374 - RNA, 64 nt, Homo sapiens
ggcccggagcaacgagcgcagcgccggcagaaaccacaaacagcccgcagggcaacggaagcag

SEQ ID NO: 233375 - RNA, 56 nt, Homo sapiens
cagaaggggggaggaagcaccaagcggagcagaccaccgcccagcaaaaagcggcg

SEQ ID NO: 233376 - RNA, 84 nt, Homo sapiens
cgaaaccaggggagagcgcgaaacgcaggcggacgaaagaaagaaggagcaccaacgcaaagaaaaagaccaagaagaccaggg

SEQ ID NO: 233377 - RNA, 52 nt, Homo sapiens
gggcgcaacaagagcgacaaacgcagcccggaggaacaaccggaccaacaga

SEQ ID NO: 233378 - RNA, 103 nt, Homo sapiens
ccgggacggaccgagaccggaccgagagcggaccgagagcgcgaaacgcacgagaaggagcggggggcggccgagccccgggagggaagggaacgccagcgag

SEQ ID NO: 233379 - RNA, 79 nt, Homo sapiens
cggccgccgcgggaccgaggaaaagccgcaccagggccacgccgcaggacacagccgacagggccagcaacaccgggca

SEQ ID NO: 233380 - RNA, 55 nt, Homo sapiens
ggaccgccccgccggccccgcacgagccagggagccgccgggaccggcccgggag

SEQ ID NO: 233381 - RNA, 54 nt, Homo sapiens
caccacagaaacaaaagcaacaaagagggccgcacccagaggaagagggcccgg

SEQ ID NO: 233382 - RNA, 63 nt, Homo sapiens
aaacggcgcggcagaaaaaccagcccggcgcaggcacgaccagggagacaggcaggaaaagcg

SEQ ID NO: 233383 - RNA, 75 nt, Homo sapiens
gggccagcgcagcagacgggaaccgggaggcaggcgccaggccgagcagaggaacagaaaagcagccagcaacag

SEQ ID NO: 233384 - RNA, 67 nt, Homo sapiens
ggacaacagcagagccacccccagacgaggaacgagcagacgacaacggaacaaagaagcggaccac

SEQ ID NO: 233385 - RNA, 70 nt, Homo sapiens
cgaaggcaaagaccccagcaccacagaaaaaagcccagaaccgggacaacccagcaaacaggccagaccc

SEQ ID NO: 233386 - RNA, 77 nt, Homo sapiens
gacagccgcgccgggcggcggggcagccccaggagagaaagcccggaggagcggaaaggaagccaagaggggcaaca

SEQ ID NO: 233387 - RNA, 81 nt, Homo sapiens
cggcgggaccgggcggcacgcacgcgggcagggaacaggcggagcggaaggaaccgaacaagacagaaagcgggacgcgca

SEQ ID NO: 233388 - RNA, 94 nt, Homo sapiens
agggacgaaggggaacgggaaaggaacaacgggcaagaaagagggggacaggggagcacgacagccacggaaggaaaaacacgacgcagcaccg

SEQ ID NO: 233389 - RNA, 74 nt, Homo sapiens
gcggcccagggggccacgcgagcaccagaaggcggacaaaccccaaaacgccgagcgaccagcaggagcaaggc

SEQ ID NO: 233390 - RNA, 76 nt, Homo sapiens
cagaggagcaaaagaagaggggccagacgcaaagcccaagcgaaaggcggcagaggcaccgcagccagacacccag

SEQ ID NO: 233391 - RNA, 96 nt, Homo sapiens
ggaacacaaaccgagaaaaccaaacaccgaccgggaccaaccaacagacgagacgcccacccgcaacgcgagcggccccgccgagaacgcacagcg

SEQ ID NO: 233392 - RNA, 78 nt, Homo sapiens
agcgaacgccgcagcagaaagccaagaaccagcggaccagcccaaaaaaaggggagacagccaaggcaacggggacgg

SEQ ID NO: 233393 - RNA, 75 nt, Homo sapiens
agcccccgagagcggaaccacagcgccaacccaaacgagcgagacacacagaaaggaaaagggaacagcggcaag

SEQ ID NO: 233394 - RNA, 74 nt, Homo sapiens
caaaaaccaaaggcagcacccagcagaagcaggggaaaacaccaggggggaaaggagcggaggcagcagaggcc

SEQ ID NO: 233395 - RNA, 59 nt, Homo sapiens
ggcagcgcgcaaggggcaacacaggacagccccgggggaggccggccggacaggcccgg

SEQ ID NO: 233396 - RNA, 74 nt, Homo sapiens
gagaagaggcggcccacaggcagagacagaggaagaggcagagccggggaaggcgcaaccccgacagcagagca

SEQ ID NO: 233397 - RNA, 81 nt, Homo sapiens
ggcgccgggagggcagacgcggccgcggcaccccgaacggggccccccgcgcgagagaaggagggggcagagcacggcagg

SEQ ID NO: 233398 - RNA, 48 nt, Homo sapiens
cggcaacgaaaagcgacagccaacgaacaaaagaagagggacgcaaac

SEQ ID NO: 233399 - RNA, 48 nt, Homo sapiens
ggggaagaaaccggaggccagaggaggacagaaagaccaccgaagagc

SEQ ID NO: 233400 - RNA, 81 nt, Homo sapiens
gagccccagcgccgcgccgggccagccacccaaggaccacggacgcgccacacggagagcaaggaggcgccgccgcaccca

SEQ ID NO: 233401 - RNA, 84 nt, Homo sapiens
ggcggcaaaaggcggcgccgaggagcgggacaacccaggagcagacagagaagcgcgcagcaggccgagacgcaccagagccgg

SEQ ID NO: 233402 - RNA, 49 nt, Homo sapiens
cagaacaccggccagcgagggggacaaccaagacgggaaggcacagaca

SEQ ID NO: 233403 - RNA, 90 nt, Homo sapiens
ccgaggggccaaccagcgaagagcgacaagccgcggcagccgcggaccaccgccgccagggccaagacaaggggcgcagagcggggggac

SEQ ID NO: 233404 - RNA, 51 nt, Homo sapiens
ggcccccacaccaagcagagaccccggacaccgaaaaaaaaccggagccgc

SEQ ID NO: 233405 - RNA, 98 nt, Homo sapiens
cccacgccagaggcagagaggaacaagcgcgcaagagagggaacggggacagacccaagacaccaccccacaacaccgagcaaagaaaagaagagaag

SEQ ID NO: 233406 - RNA, 78 nt, Homo sapiens
aaccgggagaagcagaaaacccggccagggacaggaaagaaggagccagagaaggacaagaagccaagccgaaaggac

SEQ ID NO: 233407 - RNA, 121 nt, Homo sapiens
cgggacgcgagcggcgagccggagcgcggagcccggccccgcaccaggaggaggacgacagcacggagcaagagcagccaccgaggcaggggggcccgccacccgagcagccgagcgccag

SEQ ID NO: 233408 - RNA, 53 nt, Homo sapiens
cggcaacaccagacaccaaggacagcccgcaagggcagaaaggcgcgagcacc

SEQ ID NO: 233409 - RNA, 61 nt, Homo sapiens
ccaaagagagagagcaacgggaccaaaagaagaggaagcacccgcgagaaagaagggcaca

SEQ ID NO: 233410 - RNA, 32 nt, Homo sapiens
agaccaccaaggcaaagaaaaccgggacgggc

SEQ ID NO: 233411 - RNA, 63 nt, Homo sapiens
aacacaggcaggccggaacacaggacggagccgcacgcacccgaggagcacaagccgcagccg

SEQ ID NO: 233412 - RNA, 76 nt, Homo sapiens
cagcgggcgacagccacgaggccagggcggggagcccggaccgcagcgccggcgaggacaggaacggccgaacaca

SEQ ID NO: 233413 - RNA, 83 nt, Homo sapiens
gccgacgcgcagaagcagagccaccgggggagaccaccgggcccacaggagcgaccagggaagcccacgccacgcccggcgcg

SEQ ID NO: 233414 - RNA, 76 nt, Homo sapiens
ggggaggacgcagcaaaccaccagaagcggagcggaggcagacacacacggggggagagggagggggggacacggc

SEQ ID NO: 233415 - RNA, 58 nt, Homo sapiens
gcagcaggaccagcgagagccccgcccccgcccgcagggaaagggagcagcaccggcc

SEQ ID NO: 233416 - RNA, 79 nt, Homo sapiens
ccagaccccgccccaccggagcacggacaccagaagaccagcagggaggagaggagaacaaccccgagacagaaaggcc

SEQ ID NO: 233417 - RNA, 72 nt, Homo sapiens
cggaccaaggacccgcccggccccccaagaccgggagcagcacacgccggaacggggccaagggcgcaggcg

SEQ ID NO: 233418 - RNA, 81 nt, Homo sapiens
ggcccacaggagcaaaacagacgaccgaaaacccagccagacaaaagagaagcagaggagcgaagaaagagagaggaacag

SEQ ID NO: 233419 - RNA, 79 nt, Homo sapiens
gaaaaaagcggaaaaccagagcaggcccggaaggagccgcggcacccaggcggaggcagggggacggcacgcaacccgc

SEQ ID NO: 233420 - RNA, 80 nt, Homo sapiens
ccagcgccccgccccccccgccgcccccggcgggcccggcggcccacaccagaccggaacaggggcgggcggaagcaccc

SEQ ID NO: 233421 - RNA, 78 nt, Homo sapiens
acaaagaacgagaggagagagggaccacacgcgccaacacagaaaagggccccagacacgacgcccccggccggcccg

SEQ ID NO: 233422 - RNA, 98 nt, Homo sapiens
agaaacaggggcaggagaccagacagacgcccaagacggcagcaggaaggaagggaacacggacgacgagacacgaccaacacaggcgaccaaacgag

SEQ ID NO: 233423 - RNA, 82 nt, Homo sapiens
agcgaccaggagccggggcggcgcaggaggagccgaggcgagccaacagcacgggaggggcgaccccggggcccggccagca

SEQ ID NO: 233424 - RNA, 77 nt, Homo sapiens
gggaggacagcccaagaacaccgaaagggagcggcccaacggcacccagaaaacgcagaagcccagaggccgcaggg

SEQ ID NO: 233425 - RNA, 74 nt, Homo sapiens
acagagcgaccaggggcgagagcgggcaccccccaaacgacgcagccacggagagccacccaggcacgggaaag

SEQ ID NO: 233426 - RNA, 83 nt, Homo sapiens
gaaagacccaggagaagccgcccaaagaacgagaaggagggggcagagcacggcaggcagaaggggccaacccgggggaacgc

SEQ ID NO: 233427 - RNA, 76 nt, Homo sapiens
accggaaccacacacaccacaggaagccaccaaaccagggcagagaaggggccccagaacgccgagggccagcgac

SEQ ID NO: 233428 - RNA, 80 nt, Homo sapiens
ggggccccccccagcagaccgcacgggagaaaacaagccaaggagaacccagcccgacgggacaagccgccgcaagaaaa

SEQ ID NO: 233429 - RNA, 80 nt, Homo sapiens
ggacccccgggcggccgggacaacagaggcagaaaaggggacacggcgggcaggcagaacagaccaagagaggaaagaga

SEQ ID NO: 233430 - RNA, 91 nt, Homo sapiens
ggcggaggcgacggcagcggcccagcggcagcagcagcggcgggaggagccccgggcgagagaggaacgaggggcacagaaaccagaaaaa

SEQ ID NO: 233431 - RNA, 78 nt, Homo sapiens
gggcccgaggcggcgagagaggcaggcggagccgaccgggccaggcccaaaaaccaaaaggggcgcagacagcccacg

SEQ ID NO: 233432 - RNA, 83 nt, Homo sapiens
cccagcggaccgaacagagagacaagagagacaccccaaccgacaaagagcaccagacagccgggaacgacccccacgaaaac

SEQ ID NO: 233433 - RNA, 50 nt, Homo sapiens
gccacgagcgcgagccggcaggcacgagacggggccggcacagagggcca

SEQ ID NO: 233434 - RNA, 86 nt, Homo sapiens
cgccggggccgcccccccgcacggacccagaaccagccgggcggcgcggcggcccgcagaccaaaccgcacaaacaaagccaagga

SEQ ID NO: 233435 - RNA, 75 nt, Homo sapiens
gacaagacggaggagcggccagcgaagacggaggaccacaccggaagccagcaaagaaaacgccagcggagacaa

SEQ ID NO: 233436 - RNA, 74 nt, Homo sapiens
aagagcagccccgcgaccgcaacccggacagccacagcggagcagacgccggagcggaggcagacacacacggg

SEQ ID NO: 233437 - RNA, 76 nt, Homo sapiens
acgcacagacaacgggagcaggcacaccgcccgcagcggggaagaacgcccaaggcaaagaccagagggagaggag

SEQ ID NO: 233438 - RNA, 78 nt, Homo sapiens
ccgggccccgagggcggaccgagaaggacacgagaccacaaaccccacccaagagccccccgcgacacaacggagggg

SEQ ID NO: 233439 - RNA, 54 nt, Homo sapiens
ccgaccagggcggccaccgagagggaggaacgacggaacaagggagaagcggag

SEQ ID NO: 233440 - RNA, 75 nt, Homo sapiens
acccggccgggaagacgacgccaaagagacccccaggaaaacagggcggagaacggaaaagcaccaggaagcaga

SEQ ID NO: 233441 - RNA, 56 nt, Homo sapiens
acagccggaagcaaggcagaagaggccgggaaaggaaggaaaaacgggaaaagaac

SEQ ID NO: 233442 - RNA, 77 nt, Homo sapiens
aacgcgacccccgccacgcacaggacagaagacggaccacggccaagccacaaacgggaaggaaaagcgagcgagcc

SEQ ID NO: 233443 - RNA, 112 nt, Homo sapiens
ccgaaccaggacacgcccgcagccaggcaaaaagcaccaccgccagcgaagcaccgagagggggacacgcaagagacgcaccgagagaagcgcagcaccagaaaaaggaaag

SEQ ID NO: 233444 - RNA, 34 nt, Homo sapiens
agagcgaggacgccggcagaggagaacagaagcg

SEQ ID NO: 233445 - RNA, 61 nt, Homo sapiens
gcaagagcgcgacacccaaggccgggcgcacaaaagagcacaaaagcaccaaggcgcacaa

SEQ ID NO: 233446 - RNA, 63 nt, Homo sapiens
ggagaaggaccaagaaccagaagccgggcaaggagaacaacacaaaccgaggggaagagagga

SEQ ID NO: 233447 - RNA, 74 nt, Homo sapiens
ccggcggccccgggacaggcgacgagcaaagggcccacaagcggccaggcgacgagagaggcgggagggaagcg

SEQ ID NO: 233448 - RNA, 75 nt, Homo sapiens
aaccagagcggagacacccaggaggcagaagccagcacgaaggcagccccggggaacccacgcgaccggaggggg

SEQ ID NO: 233449 - RNA, 78 nt, Homo sapiens
cgcaaaggccccggcaagaaggaagaaaacaccggagcccaagacaccaaaacagacgcaggcaagaggcagaaggac

SEQ ID NO: 233450 - RNA, 83 nt, Homo sapiens
acagaacggggcagcgggaaaaggcaaggcacaacgccacgaggcacaccccagcaaggggcccccggccaaggagcgcaggg

SEQ ID NO: 233451 - RNA, 80 nt, Homo sapiens
ggcgcgaggacccggacagccgccagagaggggacgcaggcccacgcccacggaggcccagcacgcagggggcaccaaaa

SEQ ID NO: 233452 - RNA, 53 nt, Homo sapiens
ccgacgccaggcagcgcccccaaacgccgcaaccagggcgccacacagaaaga

SEQ ID NO: 233453 - RNA, 60 nt, Homo sapiens
aaaaggaaacagacacccacggacacaccggaacaaagaaaaccaaaacgcaacagaaac

SEQ ID NO: 233454 - RNA, 57 nt, Homo sapiens
cgaagagggacaggaagggaccccaggaaacaggggcaagacgccaagagaaaaggc

SEQ ID NO: 233455 - RNA, 103 nt, Homo sapiens
caaaacagccaacgagaggaaaagagaaaaccacagacagccaaggggggcaccaaaacagccagaagaaaaaggaagacggagaacgcaaaaccagaaggaa

SEQ ID NO: 233456 - RNA, 79 nt, Homo sapiens
ggagggcggaaggacccccagcgggcacgcgcggcagccagccgcccgcaggggagcagcggaggaagccacaggacgc

SEQ ID NO: 233457 - RNA, 79 nt, Homo sapiens
aacggccaagaaagcccgaaaaccaagccaggggcggacccaggcaacgggccgggacgaaggcacggacaaccccacg

SEQ ID NO: 233458 - RNA, 75 nt, Homo sapiens
gaaccagagagggacgaggcgaggaacggaaaaagaagaaagagaaagacaaggaggcccgggccaaaacacggc

SEQ ID NO: 233459 - RNA, 77 nt, Homo sapiens
ccgggggcaggccccgagcgccgaacagagcaggaacccggaagagagcgaagaggaaagccgaaggaaagaccaca

SEQ ID NO: 233460 - RNA, 72 nt, Homo sapiens
gcaggagaagaccagagcaaaccagagcacacagcaacaagggaagaagaagcaagaaacgacagagaccag

SEQ ID NO: 233461 - RNA, 71 nt, Homo sapiens
ccggcgcggacgaccggagacccgccacaccagaaggaagaaaccaaacgaaacacaacgaccaacgggaa

SEQ ID NO: 233462 - RNA, 35 nt, Homo sapiens
agccaagcacgccccgaggacccagccaaacaggg

SEQ ID NO: 233463 - RNA, 72 nt, Homo sapiens
ggacccggaaggccggggggccgaggagcggcagcccacaagcaggaagaccagccccaggagggaaacaga

SEQ ID NO: 233464 - RNA, 64 nt, Homo sapiens
agacagaaccagggccgggggccaggagaagggccgggagacgaccacccccagcagaacaaga

SEQ ID NO: 233465 - RNA, 77 nt, Homo sapiens
gggacaagagacaccggggcgaacccccaccaaggagacgcacagcgaaccaggcgaccacgagccgacggaccggg

SEQ ID NO: 233466 - RNA, 73 nt, Homo sapiens
ccgccacacaaaagcggacaagcgaaggagggaggaagaggcgcggcaagggcgcggcaagaaaaccggggcc

SEQ ID NO: 233467 - RNA, 67 nt, Homo sapiens
ggagcgaagagagaaaagagaagagaacgagcggaagaggcagaagccgaaggagaggaagagaaca

SEQ ID NO: 233468 - RNA, 75 nt, Homo sapiens
agggacgaaggagaccgcgcagagcccccgcccacagcagggcaagcgggcgaagacagggcgcggcgagccgga

SEQ ID NO: 233469 - RNA, 73 nt, Homo sapiens
gaccaaccacaccacacggccacaccccagccgccaggagcaaggcagcgacccagggcacagcggggcacag

SEQ ID NO: 233470 - RNA, 78 nt, Homo sapiens
gggagaagcggagcggggcagggaaagacaaggagccgggccgagaaaccgaaccagagaccagagaagaaacgcaaa

SEQ ID NO: 233471 - RNA, 80 nt, Homo sapiens
gcgcaaaaacaagacggggcgccccacagaggggcgacgcagcagccagaaagacccagagaagcgagaagcagagacaa

SEQ ID NO: 233472 - RNA, 81 nt, Homo sapiens
ccacccaggccccgcaagaagggccgggggcgagccggagcgaccccggcagggagcgcggaggccggcgagacaccacac

SEQ ID NO: 233473 - RNA, 73 nt, Homo sapiens
ccggaagagaaagcaaagccaccaacagcagagggggacgaccaccagccaggccggggacaaacaggcaacc

SEQ ID NO: 233474 - RNA, 74 nt, Homo sapiens
aagccgggcggccgccccgccggagcagcacacaagggcagcggaggaccgaagagacgccgaagaccaggacg

SEQ ID NO: 233475 - RNA, 73 nt, Homo sapiens
cgaagaaggaaagaaaaggccccgaggagcagagagccaaaaagaaccccgaagccaccgaaggaagaagaca

SEQ ID NO: 233476 - RNA, 80 nt, Homo sapiens
gagcgaagcgaggacacacccaggaaaagaccaggacggacaagcacagccggaaggaaaagcagacaagagaacagggg

SEQ ID NO: 233477 - RNA, 67 nt, Homo sapiens
ggggaccacagcgcggccgccagggaaaagagcaaacgaggacgaccgagacagagaagaagaaaga

SEQ ID NO: 233478 - RNA, 76 nt, Homo sapiens
ccggacgagcccggcgagggcgccgggccagccagggccccaggccccggggcaaccagccaccggccagcccagg

SEQ ID NO: 233479 - RNA, 55 nt, Homo sapiens
gcgaggccccagcgggaagcgagaaaggacgcagggcagcgcggaccaccgcccc

SEQ ID NO: 233480 - RNA, 78 nt, Homo sapiens
gggcagaacgagcccaggccacagacccacacgccggcggccaagaagaagagccgccccacacgcagaaaagggaga

SEQ ID NO: 233481 - RNA, 73 nt, Homo sapiens
gaaaaggggggaaggcacacaacgacccggacagcgaccgcaagagcaaggcaaggaggaccaagcgaaaaac

SEQ ID NO: 233482 - RNA, 66 nt, Homo sapiens
ccaaagaagggagagagggaagaaggagaaagggccaaccccgaagaagcaaacagaaacgaagga

SEQ ID NO: 233483 - RNA, 59 nt, Homo sapiens
aggaagcacacccgccagggacgggcacgggaagcccgcgcgaggccgcgcccccccgc

SEQ ID NO: 233484 - RNA, 74 nt, Homo sapiens
agaaaaaggccaaaaggggagaaagcaaggaaggaccccccaaggaagagagaaggccacgcccgaccccaagc

SEQ ID NO: 233485 - RNA, 53 nt, Homo sapiens
aggggaagaaagagaaagcaggaagccagccagagcaggagagagagagagag

SEQ ID NO: 233486 - RNA, 74 nt, Homo sapiens
ccaaccgcggggaacaggaaagccgagccaggcgggcagacggcagaaaacagacgaagcaacagcgaacaaaa

SEQ ID NO: 233487 - RNA, 83 nt, Homo sapiens
acggggaggggcccacaagagcccaagagaggcaggaccgacgcccaaccagagcaaacccagaaggacaaccccaagcccaa

SEQ ID NO: 233488 - RNA, 65 nt, Homo sapiens
acgcagggcgcccccgggaaaaagaccgcaccaggcggcagaagaagagaaagagaaggacgagc

SEQ ID NO: 233489 - RNA, 81 nt, Homo sapiens
ggacaacaaaagccccacaagagccaccaaaaggcagaccgaaggagcgggaacagagaggaagcagagggggggggccag

SEQ ID NO: 233490 - RNA, 73 nt, Homo sapiens
ggcaagagcgccacccggcggccgggagacaaggaaaacacacagaaaacaacaggggagcggaccaccaggc

SEQ ID NO: 233491 - RNA, 80 nt, Homo sapiens
cgagaaagggaggcggaacagaccacacaaagaggggagcgaccaaacagaacaacaccagcgacaaaaaggagaacaag

SEQ ID NO: 233492 - RNA, 75 nt, Homo sapiens
aagcaggcccaggagaaagcacaggacagaagcgaaggacggaaaagagaaaagcgaaaaaccacacagagagag

SEQ ID NO: 233493 - RNA, 78 nt, Homo sapiens
acaccgccagggcccacacccccccccccgacaggcaagaagcagagcgcagaggagcaagggccagagaaggaggag

SEQ ID NO: 233494 - RNA, 68 nt, Homo sapiens
agagaccgggcagccacagaccgcggaggcaggagaggaagaccaggcaggaaacagaggcagcgaca

SEQ ID NO: 233495 - RNA, 76 nt, Homo sapiens
cacgagggcagggcggaagccaggcccacccacagccaaaacacccacccagggaccccagggcgcaaccaagcca

SEQ ID NO: 233496 - RNA, 126 nt, Homo sapiens
ggcagacaagaagcggaggcaacgaggccgagcgcgcggcgccgcaacaaagcagacaccagcaggaggcccaaggaacagcacagcagcgacacacggaccggagcagcccacagccacaggaca

SEQ ID NO: 233497 - RNA, 75 nt, Homo sapiens
aaggcagaagaacaggcagaacagcagcaggagacgagaggaaaaagaggaaagcaggaaaacggcgcaaacgga

SEQ ID NO: 233498 - RNA, 79 nt, Homo sapiens
gaacagcggaagggagagagagcgcagaaacaaggcggccgcagacacgcgcgggagaagaagggcgagccggagaccg

SEQ ID NO: 233499 - RNA, 77 nt, Homo sapiens
cacgcgcggaaggcagcgcccagcagcgcaggcacaagagagagggcacaggacagagagcccagaggggaccgagc

SEQ ID NO: 233500 - RNA, 69 nt, Homo sapiens
gggaggcgcagcccgaaggccccgggcaaagcggacaccgggggggcagcggcaagcaggggagccagc

SEQ ID NO: 233501 - RNA, 74 nt, Homo sapiens
gccaaagcaggggcaacccagaacccccagaacagacacaagggcagaaggaaggcagcgcagagaaagcggac

SEQ ID NO: 233502 - RNA, 81 nt, Homo sapiens
aaggacggaacggagaaaccggcagggaagggcagaaggagggccacaaagggcaaagaggcgacggggacgaccagcggg

SEQ ID NO: 233503 - RNA, 77 nt, Homo sapiens
cgacggccacggagggggcacaggaccgcaccaaggcggcaagcgcagaaacagccaggccgcagacagcacccacc

SEQ ID NO: 233504 - RNA, 72 nt, Homo sapiens
cggaggcggcgagggcgagccgacacaagacacccaagaagcccagcagacccaacgcccagcaccaaaagg

SEQ ID NO: 233505 - RNA, 57 nt, Homo sapiens
gggggccacccccgggcgccaggggggacacaaccggcccggccaacgcaacaggga

SEQ ID NO: 233506 - RNA, 72 nt, Homo sapiens
gaaggaccaagaaccagacggagaaaagaaacgggagacccacaagagcggccaaaagaaaaccacgaggag

SEQ ID NO: 233507 - RNA, 78 nt, Homo sapiens
aaagacaacaagcaaggagaaacgcagcgagcgcaagcccagaaaaaggcaggaaaacagggcgacaccccaacgcgg

SEQ ID NO: 233508 - RNA, 50 nt, Homo sapiens
gaaggcagggaagaccgaaccaggcgcacagggccaaacagaagaggaga

SEQ ID NO: 233509 - RNA, 75 nt, Homo sapiens
ggaccggacaaagacgcaacggcgaggaagagacgacagcaaggcgggcagcggcaccaagggcaccgggcaggc

SEQ ID NO: 233510 - RNA, 69 nt, Homo sapiens
aaagagcggaagcaggccaaggagaaaaccggaagagaaaggccgggaagcaggaaagaaaaaaacaac

SEQ ID NO: 233511 - RNA, 83 nt, Homo sapiens
acagagagacagccagcccagaccaggacaagaacccaagaaacaggaaaaaacccaaaacaccaaaaggaccagcgagaaga

SEQ ID NO: 233512 - RNA, 74 nt, Homo sapiens
cgccgcccgcacgccgccggcacaggcacaggaaagggcggagaagcagacaacaccaagggccggagacaccg

SEQ ID NO: 233513 - RNA, 83 nt, Homo sapiens
gaagaagcgcgccagacacagcggaagacgcagagggagacaggccggggaggaggagggcgggaccgcccaacgagaagacg

SEQ ID NO: 233514 - RNA, 69 nt, Homo sapiens
gccaggcgaccaaaccccacggcaagcgacgcggcccggccccaagcaacggggcggcacacaaggagc

SEQ ID NO: 233515 - RNA, 52 nt, Homo sapiens
gcgcggggcgggccgccagcggggacaggcagcgaaaagccaggacgagcga

SEQ ID NO: 233516 - RNA, 88 nt, Homo sapiens
ggaagaagagaccacagaacggaagagccacccacacagaaagccagggccggagggagaacagagcggccccccccaccccacgccc

SEQ ID NO: 233517 - RNA, 85 nt, Homo sapiens
cggaaccacaagcaccagcacgccggcaagggagagaagaagagaagagagccacccaaagagagaccgaagaaaagaagaagag

SEQ ID NO: 233518 - RNA, 65 nt, Homo sapiens
ggaccgagcgccggcggcgggagcgcgcggacacaaggaagaggaacaaaaaaagacaaacggac

SEQ ID NO: 233519 - RNA, 54 nt, Homo sapiens
ggaagcgcggaaaaagggacaaagagagagcagaaggaggccagggagaacagc

SEQ ID NO: 233520 - RNA, 54 nt, Homo sapiens
gcccgagggcgagaagaagggggaagggaacgcccgagggcccgaggcacggac

SEQ ID NO: 233521 - RNA, 71 nt, Homo sapiens
agccacgcggcgcccaggcgccgagaggcccggcgagcgaccgccgggggaacgcccgagcggagcagcag

SEQ ID NO: 233522 - RNA, 70 nt, Homo sapiens
ggccgaaggcacaagacggaagaagagggcggacgcacgagcgcaacccggcccagagaacaccaggcca

SEQ ID NO: 233523 - RNA, 78 nt, Homo sapiens
cggcgggcgcgcccgccagcgcccggagaacgccaaaccagaaaggggacagcggcgggcagggagcacggaaggaac

SEQ ID NO: 233524 - RNA, 74 nt, Homo sapiens
gagaggagggagaacacagaaacccgccccggggaggcaggggcagaacccgggccagaaagcgagaacacacg

SEQ ID NO: 233525 - RNA, 88 nt, Homo sapiens
agaaagagcagaaaggagggggcgagaaggcgggaagccgaaggcagccacaggaaaaaccagaagagaaaaaacaaaggggagaggc

SEQ ID NO: 233526 - RNA, 116 nt, Homo sapiens
cccccagccggagcagccggaccagcccagaaggcagcggcggcccaggccagcacccgcaggagcaccgcggacgccccagggcacaccgcgcaccagcgagaggaggagaaccg

SEQ ID NO: 233527 - RNA, 82 nt, Homo sapiens
aggcccgaaggagcccagcaagcccagacaaccagaccagaacgacacaaaccagcccagccggaaacgaggaaagcaaaac

SEQ ID NO: 233528 - RNA, 76 nt, Homo sapiens
aaacaccaaaaggagagacgaaggagacgcaggagggagagcagccagaggaagaagaggaccaccgcacaaaaag

SEQ ID NO: 233529 - RNA, 73 nt, Homo sapiens
ggcaaagcggacccaacacaaaggcccagcacgcacgccaagacgaggggacgggacacagggacgggccaag

SEQ ID NO: 233530 - RNA, 72 nt, Homo sapiens
gccaagagccccaaaggcggccccacaggccccggaagccccacaggggggccagcccacaaaacacagcca

SEQ ID NO: 233531 - RNA, 80 nt, Homo sapiens
gagcacggggcacgcacaccaaacgaaggaggcccaaccacaaaaggagccgacggaacccagacggagaacaaaaggaa

SEQ ID NO: 233532 - RNA, 60 nt, Homo sapiens
aagggcgcaggccacgggaaggggcgaaaagcacccaccaccagcgaccaagcagacaaa

SEQ ID NO: 233533 - RNA, 79 nt, Homo sapiens
ggagaaccgggcagaggcggagcgcccgggccacgaggacgcaccaggggacccaaagaaacggacagaaaaacagaac

SEQ ID NO: 233534 - RNA, 73 nt, Homo sapiens
gcggcgcggcagcggagggacggcagccgcgcgacgaaaaagagccacgcccccacgagcgccccccggacca

SEQ ID NO: 233535 - RNA, 79 nt, Homo sapiens
gcgcgcgcgcggcacgcgccgcgggacccgaggcgagccaagcagaacaagagcaaacggcgaaaccggcacagaagca

SEQ ID NO: 233536 - RNA, 82 nt, Homo sapiens
acggaggcaaaagcagacagaacaagggagaaagacaacaccacgaagccgcaaacccaggccaaaacagaagaggcaaagc

SEQ ID NO: 233537 - RNA, 76 nt, Homo sapiens
ccgagacgcccagaagggagaccagcagaacccaccaggcagcacgcggcccccgaaccccgccgccggccagccg

SEQ ID NO: 233538 - RNA, 81 nt, Homo sapiens
gcaaaaaaagagcccgcaagaagaacagagacagcagccaaacccccagcaccagaagaaaggagagagccgaaagagaaa

SEQ ID NO: 233539 - RNA, 64 nt, Homo sapiens
gggccgaaaaccgcgccgaccgcgaagcgaacacgagacagaaaaccacggccaaaaccacacc

SEQ ID NO: 233540 - RNA, 79 nt, Homo sapiens
ggcgcacccagacaggcgggcagaaccgaccggagaacacaggaccggaggaacaaaacgaagaggacccgcaagaaga

SEQ ID NO: 233541 - RNA, 44 nt, Homo sapiens
aggagggggcgcacaaacgaggaccgaaggagaagaaggagaag

SEQ ID NO: 233542 - RNA, 86 nt, Homo sapiens
cagccaaagaaacaagccgggaaagggacaagaagggcaaagccgaagggaggcaagcaggggggcaaaggaaagaaggcagaaag

SEQ ID NO: 233543 - RNA, 73 nt, Homo sapiens
cgggcgccaccccgcgagcggcgccaccggcgacccccccccagcaccgggaccgacccaaacggaccgaaac

SEQ ID NO: 233544 - RNA, 74 nt, Homo sapiens
cggccgggcccggcaccgccgcggacggccggccagccaggaaagcgggagcgcgggagcaaaggaaagaagag

SEQ ID NO: 233545 - RNA, 65 nt, Homo sapiens
gacagcgagaacaaaggagagaggaccacccagaggagcaacgaagagagccaagagggggaaaa

SEQ ID NO: 233546 - RNA, 36 nt, Homo sapiens
acaagggcgacccccgaaggcaagaggagccggaag

SEQ ID NO: 233547 - RNA, 39 nt, Homo sapiens
aggggacggacacagaacagacggagcaaagacgcacag

SEQ ID NO: 233548 - RNA, 86 nt, Homo sapiens
gcccggccgagaccccgcgggagacgcagccagcggagcccgcagccggcccgagccaggaacccaggccggagcccaaccaggag

SEQ ID NO: 233549 - RNA, 76 nt, Homo sapiens
ggcggggcggcccaccaacaggaacagggcagacgagcggaggacacccaacccgggaaacagaacgacagcccgc

SEQ ID NO: 233550 - RNA, 77 nt, Homo sapiens
ggaggggagaggaggcaggcccgcggagcaaccagccacccaaagcggcccaaagaccagcaggacagccccccccc

SEQ ID NO: 233551 - RNA, 75 nt, Homo sapiens
ccggcaggccgcccccggcaagcgggacaaagcacaaggcacggacaggagcaaaagaagagggcccggagaaca

SEQ ID NO: 233552 - RNA, 67 nt, Homo sapiens
acagaaccgaaaaagagcgggcgcgcaagacggaacaaagggcaaagcgcaaggcaaaagagacgag

SEQ ID NO: 233553 - RNA, 67 nt, Homo sapiens
acaggaccacggcagggcagccaagcagcagggcacccgccgagccagccggacacaagagggcaag

SEQ ID NO: 233554 - RNA, 66 nt, Homo sapiens
gcagggcaaccgaaaggcaagcagacccgcgaaaggagagacaaagcgaaagaaacccgcacagag

SEQ ID NO: 233555 - RNA, 75 nt, Homo sapiens
gagacccacaaggaaaagaagaacaaaagagagaacacgaaaaaggggcagacacgagaggcccacgcaagggac

SEQ ID NO: 233556 - RNA, 81 nt, Homo sapiens
agaaaccagaccgcgccgagacaaccgacagggcgggccgcgcccaccgccagggcgcggaggagcgaccacgaggagaca

SEQ ID NO: 233557 - RNA, 73 nt, Homo sapiens
aaagagcggcaggagcaccccacaacagacaggcccaccagccacaggaaagccaaaaggaggggaaagccag

SEQ ID NO: 233558 - RNA, 74 nt, Homo sapiens
cgcaccacaccaggagccaaaaaccgaacacccggaaggggacaagggacggcgaacagaccccgcgcgggggg

SEQ ID NO: 233559 - RNA, 76 nt, Homo sapiens
agcgggggggcgcgcgacggcggcccgaagccagcgccccaccggggcaagcaggaaagaagcgaagccaggaggg

SEQ ID NO: 233560 - RNA, 79 nt, Homo sapiens
gaccgaacagaaggaacgacgcggaccagaagccagagcgaggacgccggcagcacacagagccgcgaaaacgacgaag

SEQ ID NO: 233561 - RNA, 69 nt, Homo sapiens
gcggcacgagggacccccacaagcaagcacaaggcgacccgaacacggaagaaagacacgcaggaggcc

SEQ ID NO: 233562 - RNA, 69 nt, Homo sapiens
gggagagcggggaagggggaaaggcaccaggacaagcaaagcgacgcacaaggaaaaacagagagaaag

SEQ ID NO: 233563 - RNA, 81 nt, Homo sapiens
ccggacaggaggagccagggcccggcccgaaaggagagccgccgaagggcaagagggcacagaagacggcgccccacacac

SEQ ID NO: 233564 - RNA, 79 nt, Homo sapiens
aaggaggcagaggcacaccgaaagcgcaagcccgcccccgagcaaccacgcacagcaagaaaaaaagagacacaggcga

SEQ ID NO: 233565 - RNA, 70 nt, Homo sapiens
ggagagcagaagaggagccaggaaggaagaccgcaggaaagcaggaaggcaagaaagccaaggacgaaac

SEQ ID NO: 233566 - RNA, 80 nt, Homo sapiens
ccagacagagagcagagcaggaggagaaaccgcgggccaagacacagagaccggcggcaacgagcagcgcacgccacaag

SEQ ID NO: 233567 - RNA, 99 nt, Homo sapiens
cgggggacggccagccaaccgccggcaaccccgggcggccgcaccgccaggaacaagggacaaaccaaagaccaaccaagaggccagagagcaacaccc

SEQ ID NO: 233568 - RNA, 69 nt, Homo sapiens
gagccccccccaccagaggacgggaggagcagcaacaggccgaggaaaggagacaccaaggaaaaagcc

SEQ ID NO: 233569 - RNA, 72 nt, Homo sapiens
accacgagcccaaggcccaagagcccagcagcaggaaggagggccccggagcagccacaccaccgaggcccc

SEQ ID NO: 233570 - RNA, 65 nt, Homo sapiens
cccaaacccgcacgcccaggaggagcaagccgaggagaggcaagcaccagccgacagcgaccaag

SEQ ID NO: 233571 - RNA, 80 nt, Homo sapiens
cacggaggacggcgggggagaacccacaagccagggagcggagagcagagaggcagagcaagacgccggacacccacaag

SEQ ID NO: 233572 - RNA, 80 nt, Homo sapiens
gacgagcgcagaggcgaccaagaccaggagagaacgcaccaccaggcccagcccggagagagcggccgccaccccagccg

SEQ ID NO: 233573 - RNA, 75 nt, Homo sapiens
cggccaccgcgacccggccgcgccggcgccgaccccgcgcgccagggagaccccaacaggcccgaccaacaaaga

SEQ ID NO: 233574 - RNA, 105 nt, Homo sapiens
gcccggaggcgccaacccaagcagcgggaagacgaggcaagaccgaggaggaaccagaagggggcacaaacagacccaaaagaaaaaagcccaccaaaagaagag

SEQ ID NO: 233575 - RNA, 65 nt, Homo sapiens
aacacaagagaccagagggagcaagggacgcaagacagagagaagaaagacaagggacacaaggg

SEQ ID NO: 233576 - RNA, 64 nt, Homo sapiens
ccaggacaaggacaagcaggagcgggagccccaggagaagcaggaaggaaaaaaaccagaagag

SEQ ID NO: 233577 - RNA, 83 nt, Homo sapiens
accaggaaggcggcggggagccccgccgagggcccaaacacacagaccggcgcggggaggcccagcccgccgcagggccaccc

SEQ ID NO: 233578 - RNA, 74 nt, Homo sapiens
acacaccaacagggaagaaaacccagaaagcaacacagagaccggagagcacacggaggggccgagaccccgcc

SEQ ID NO: 233579 - RNA, 34 nt, Homo sapiens
ggaagagacaggaaccagagagacggggcgccag

SEQ ID NO: 233580 - RNA, 71 nt, Homo sapiens
cccccgaccgcccagagagcaggcggcagagcaaagcgagcaaggggaaaaacgaacccgccacaacaaaa

SEQ ID NO: 233581 - RNA, 53 nt, Homo sapiens
gcaaagacgcaagggccacgaccaggcagcgagacccggcagggggccggggg

SEQ ID NO: 233582 - RNA, 54 nt, Homo sapiens
agggccaaagaagggagagaggagcgaaaacgccacaacagagggggccagggc

SEQ ID NO: 233583 - RNA, 61 nt, Homo sapiens
cgcggagcgacccgccacgcgggaggccccgggggccgcggcccggccccaccaggagcca

SEQ ID NO: 233584 - RNA, 77 nt, Homo sapiens
cgcgcacagcaaggagcgaacaaggggagacgccaggacgaacgaagacccggccacccccagggcaaaacgaaagg

SEQ ID NO: 233585 - RNA, 84 nt, Homo sapiens
cagccccgagagcgggacacaggacaagacgacagaaaccgccgaaagagagaaggaaagacgcaaccaggaagcccaccaaga

SEQ ID NO: 233586 - RNA, 74 nt, Homo sapiens
aagaaccggcagcgaacaaggagaaagccacaacagggcggcaacaggggcgagaaaggacagacaaccggaga

SEQ ID NO: 233587 - RNA, 61 nt, Homo sapiens
ccgccgggcccaggcccgcgaccgccgccagcgcccgagggcggaaaacaccccaaaagcc

SEQ ID NO: 233588 - RNA, 63 nt, Homo sapiens
cacaaccaccgcgaacgccgcacaagcagcgggcacaccagagcagaagaagaacgcgaacag

SEQ ID NO: 233589 - RNA, 74 nt, Homo sapiens
cccgagacggacgagaacaagggaggcgaggacggacaaaaggaaacggacgggaggccagccagcagaaggag

SEQ ID NO: 233590 - RNA, 72 nt, Homo sapiens
ccgaaacggaaagaagcaccggagagacagcacagcacccacaaagcaacgaaaacacgagccacgaagacc

SEQ ID NO: 233591 - RNA, 86 nt, Homo sapiens
gagagaagggcaagggccaaaagaggacaggcagccagggacgccaccaggcagccgcagaggagagcaggcggaccgccacagcg

SEQ ID NO: 233592 - RNA, 75 nt, Homo sapiens
gcaaggggaacgaaggaacaaagccccaacaaagcacagcacgccgaacagagcgcaggacacacccgccccacc

SEQ ID NO: 233593 - RNA, 30 nt, Homo sapiens
aggccaaccgggaccaggaaagagcagaac

SEQ ID NO: 233594 - RNA, 80 nt, Homo sapiens
ggagacgagaccagaggccgaaccgggcgacaagaggccgggcgccccgcaggacacaagacaagcagaccggaagaccg

SEQ ID NO: 233595 - RNA, 88 nt, Homo sapiens
aaggaagaccaaacaacaggcacagccagcaccagcccccaccccaggccccccagccccagcacaaacagcagcagcaacaacagca

SEQ ID NO: 233596 - RNA, 64 nt, Homo sapiens
acccacgcgcgggaaccaggggcagagggaccaccgacagaacaacagcgaccccaaggaagac

SEQ ID NO: 233597 - RNA, 66 nt, Homo sapiens
aggagagcgccccagggcaagccccgcccggccaacaagcaaaagcagaccggaaaacccaccggc

SEQ ID NO: 233598 - RNA, 76 nt, Homo sapiens
ggagaccgggcggccgcagagacgcgcaacccaggcgcagacaggcccaaaccgccaggaacacacagcgggaaac

SEQ ID NO: 233599 - RNA, 83 nt, Homo sapiens
cgcgagaggcgcagcaaggcgacgggagcggacacgcccgggcagggcccaccccgcgcccgacaggcgaagccgacgagccc

SEQ ID NO: 233600 - RNA, 71 nt, Homo sapiens
aacacccaaacggaaggacacagagccaacccagaagagccaagggcggagcccacgccccaggacacgca

SEQ ID NO: 233601 - RNA, 88 nt, Homo sapiens
ggcccaggcccggacccgcggccggcccggcgcggcccagcgccccaggccgcaggacaagcgaacaagagggacaaagagggacagc

SEQ ID NO: 233602 - RNA, 70 nt, Homo sapiens
ccaaaccccggcccgacaggagcacagcacacaaaagagggacaacacaagccacagcgcccaggcccag

SEQ ID NO: 233603 - RNA, 82 nt, Homo sapiens
agcagaccggcccgaccgcccacagacccaaacaaaggcccaacggaggagcaacccccgggagggggaaccaccagacgaa

SEQ ID NO: 233604 - RNA, 76 nt, Homo sapiens
cccgcagcagccgacccggcacaacaaaaaaacaaggcagaccaaccaccccaccgggccacgacagccaccaaac

SEQ ID NO: 233605 - RNA, 52 nt, Homo sapiens
gggcagggccccgagaggcaggcaggggacccggacgagagagagagagaga

SEQ ID NO: 233606 - RNA, 56 nt, Homo sapiens
aggcggcgcggacggggcgggcacccacgaggcggcgacggaaagccccccacggg

SEQ ID NO: 233607 - RNA, 77 nt, Homo sapiens
gcacgccaacaagggccgccgcgggagaagaaaggggaccggggacacacccacgaacacaaagggcccggacggag

SEQ ID NO: 233608 - RNA, 52 nt, Homo sapiens
ggcccgccggcggggggaggccacaggcgcaagcagagaaggaggggccaag

SEQ ID NO: 233609 - RNA, 68 nt, Homo sapiens
cccagaccagccggcaccggacgaggaagggcaggcggcgggaaggggaagcaggccaacccagaaca

SEQ ID NO: 233610 - RNA, 81 nt, Homo sapiens
cgacccaggagaaacacaacacggccagaaaccgcagggagaggcccaccagaagaagccaaaaagaagcgagaaaaaaag

SEQ ID NO: 233611 - RNA, 66 nt, Homo sapiens
gaggccgccacacacccaacggcaaacagcaacacaaagcaagacgaggacgcgcacaggaaagga

SEQ ID NO: 233612 - RNA, 75 nt, Homo sapiens
aaccggcagaaacgccacagcccaaaaggaaagccaaccacgccaagcaagaccccagccagggaacaaagaaac

SEQ ID NO: 233613 - RNA, 72 nt, Homo sapiens
aaaggcacaagcaggggcggaagccacacaggccagaacgaggcagaaaggccccgggacagaggaggaaga

SEQ ID NO: 233614 - RNA, 70 nt, Homo sapiens
aaagggccaaagaagggagagagggccaagccgcccgccaaccggcagcgccgacgacaaaccaggggcc

SEQ ID NO: 233615 - RNA, 70 nt, Homo sapiens
gaaaacggcaaaccaggaaaacagaagaacaggaacaagccgaggccacagacccaaacccggcggcaga

SEQ ID NO: 233616 - RNA, 67 nt, Homo sapiens
gaaggaccaagaaccagaaaggagcaagaaagcaaaccggcacaaagggccaccacaaacaagccgg

SEQ ID NO: 233617 - RNA, 70 nt, Homo sapiens
agccgcagaaagcagcaaaagcaaggcaaaccagggggccacacagagcgcagagggaaagacggcagaa

SEQ ID NO: 233618 - RNA, 83 nt, Homo sapiens
aaaaccacgggagaagaacaacagcacaaagagacagaaggaggaagcggaaggcgccggaggggagcagaggaagaggagga

SEQ ID NO: 233619 - RNA, 77 nt, Homo sapiens
cgaccaggaggaagaaggacacacaaccagccccagcgacaaaacgcaaaaccagcagcacaacaagacgagagagg

SEQ ID NO: 233620 - RNA, 77 nt, Homo sapiens
ggaagaaacgcacacgaagaacaagaaaaagcacaagagcaccaacgaggaaggacaggagaaacaggggccaaaaa

SEQ ID NO: 233621 - RNA, 52 nt, Homo sapiens
gccacggcagacacacaacccgacccgacgagagaaaaccaccaaaaaaaga

SEQ ID NO: 233622 - RNA, 55 nt, Homo sapiens
ccgggcgagcgacccaggaaggagagaggaaggagggccccggagcagccacacc

SEQ ID NO: 233623 - RNA, 70 nt, Homo sapiens
gagacacacgagaccggacaccccagaggacacggccacagggaccaagcgccagaacgaccaacgacca

SEQ ID NO: 233624 - RNA, 76 nt, Homo sapiens
cagcagaagcgaccagcggggaccaccgaagaagggggccgaaaaaacaccagcagcccagcaaccaaaaagaaga

SEQ ID NO: 233625 - RNA, 58 nt, Homo sapiens
ccaaaccggagggggaaaaaacccaaggcgcaaaggagccggaaaacaaaccgaaaac

SEQ ID NO: 233626 - RNA, 74 nt, Homo sapiens
acgaggggagaccacccagagggccacggagcaccagccgccccaggaacagagacagacccgggggcccccaa

SEQ ID NO: 233627 - RNA, 57 nt, Homo sapiens
gaaaagaaagcgacgggagaaggaaacgaaagagcccagacacccaagagggccaag

SEQ ID NO: 233628 - RNA, 74 nt, Homo sapiens
accgccgccccagcgggaggccaaggaaaaggaacagagagagcagaaccgaaacggggaaagaccgaagaaag

SEQ ID NO: 233629 - RNA, 85 nt, Homo sapiens
gaaaggaaacgcagagaagaaacacggcaaaaagaaaaaccagcgaagcacagggaaagaagaaagcaccccgcaaaagaaggga

SEQ ID NO: 233630 - RNA, 73 nt, Homo sapiens
acaaagaagcaaggaccgggaaacaaagccagaacacccagcgaaccaacagaccacgcagaccgaacagcgc

SEQ ID NO: 233631 - RNA, 96 nt, Homo sapiens
gaccacgaaaggagcaagagcaagacaccggacaccgagggcccccaaaagaaaaccagaaggcaccgacaggaaaggaaaaggagaaccaggcac

SEQ ID NO: 233632 - RNA, 84 nt, Homo sapiens
ggggcacagacaaccaaaaaggcacacaacggacggacgggccaaaggagccgaggagagaacgcgagcccgagggagaggagc

SEQ ID NO: 233633 - RNA, 69 nt, Homo sapiens
agccaggccgcccggaaagggcgcggaggggcaccccccaccccgggacaccccagggcaccacagagc

SEQ ID NO: 233634 - RNA, 81 nt, Homo sapiens
gacaccgcgggccgccagacgggaaggccacccgcgagcggcccgcacgccacgcccggccggcgggcccgccgcacccgc

SEQ ID NO: 233635 - RNA, 71 nt, Homo sapiens
acaccacaacacagaacgaagagaagaagcgaggcagacgagaccggagaaggaaagacaagccgagagag

SEQ ID NO: 233636 - RNA, 74 nt, Homo sapiens
ggccgggcggccccgccacccacagagcagaagggaagaaaaaaggcagcccaaaaccgcgaagggagggccaa

SEQ ID NO: 233637 - RNA, 68 nt, Homo sapiens
gcacccccgcccgcacgcgagaggagcagcaaggcagacaaaaaaagacggacggaacgccaagaagc

SEQ ID NO: 233638 - RNA, 66 nt, Homo sapiens
cggaccgaggaagccccgcagcagcagcccaaaggaagagaagaacggcacacaccccccagaacc

SEQ ID NO: 233639 - RNA, 64 nt, Homo sapiens
cgccccccagcaaggaccgcaaacaagcaagagaaaaaaacaagaagagaggacaccccggaaa

SEQ ID NO: 233640 - RNA, 92 nt, Homo sapiens
caaaaggcgcccaaccgagaagccgcaggcaccaagacaaaggggaccaacgccgcacggaccaaggaggaaagcagaaaggagacgagaca

SEQ ID NO: 233641 - RNA, 52 nt, Homo sapiens
ggagcgcagaccgaggaaaaggagagagagccgcccgacacacaaacaaaaa

SEQ ID NO: 233642 - RNA, 64 nt, Homo sapiens
gacaggaaaacgagaagagagcaaagaccagccacagaccagccggggggcagcagccgccacc

SEQ ID NO: 233643 - RNA, 83 nt, Homo sapiens
aagggagggggacagaccaaagagggcagagaccaacagaccagcaacaggccggcagggcacagcagccgcaggcccaccca

SEQ ID NO: 233644 - RNA, 68 nt, Homo sapiens
ggcgaagaagggaaacgaggaagcgagaaccagaagccacaggccaaccaagcaaagcaaacaaagcc

SEQ ID NO: 233645 - RNA, 66 nt, Homo sapiens
acccacagaagccaagacacgagcggagaaaccaaaacgcaaagaaccgccgcgcccgggaaagga

SEQ ID NO: 233646 - RNA, 73 nt, Homo sapiens
agccaacaaacaaggaaggaacagcagcaaaaagaacacaaaggacagacagagagaggcacaacaacaacca

SEQ ID NO: 233647 - RNA, 69 nt, Homo sapiens
accaaaagccgcacaggggcagggaaccgaaagacaaggagccgggggggcgagcccgccgagagcgcc

SEQ ID NO: 233648 - RNA, 83 nt, Homo sapiens
acggcacgacggcgacgccggagccgccgccaccgccagcagggggaggaccacgacggacagaagacgaccccgacgcaggc

SEQ ID NO: 233649 - RNA, 111 nt, Homo sapiens
aaaagaggaaacccaaggccggcaagaacacagaagcaagggaagcagaaacaggcagggccagggcggaagaggagagcagaagacggaccccgggccccccggaagcac

SEQ ID NO: 233650 - RNA, 94 nt, Homo sapiens
cgaccccagcagcagcgacagaccgagaaagccagagaaccagacagccacccgcgggcggcagggagcgcacaccgcaccaggagaacaacac

SEQ ID NO: 233651 - RNA, 76 nt, Homo sapiens
ccaaggcacaacaccgaaggggagcgccgggccagaaggcaccaaggagagggacacgcgggcgcaagaagaacgg

SEQ ID NO: 233652 - RNA, 79 nt, Homo sapiens
gcggacggacggcccccaggaccccgggcgcggccccgggccaccgggcgcggacccggcgcaaggaagccggagaaag

SEQ ID NO: 233653 - RNA, 81 nt, Homo sapiens
acaccccagcccaggggccagggagcccccgagcgcccgcgacgcagcacggacccacaacgaggccagcagccagcgccc

SEQ ID NO: 233654 - RNA, 86 nt, Homo sapiens
agaacgaccgagggcacggccgaggaccgccgaccagacacgcagaccccaccaagaggcggagcgacccggcccaaggacccaac

SEQ ID NO: 233655 - RNA, 71 nt, Homo sapiens
ccggaggacaagccaggccacaaggaaccaagacagcgccacagacagaaaagacggaacagccccaagcc

SEQ ID NO: 233656 - RNA, 78 nt, Homo sapiens
gcccaaccgcgggaccaaccacccgagcggcgcggacgaagcaaagcgggccagacacgaagaggccggcgaaggaag

SEQ ID NO: 233657 - RNA, 72 nt, Homo sapiens
gggcgaagagaaacaaagaagagaccagccagaggagggccggaccagagcaccaggcggaggcagggggac

SEQ ID NO: 233658 - RNA, 71 nt, Homo sapiens
ggaaaaaaacccagcaggaggacacgaaaaggagagaagcaggacagcgaccagcaagaacgcagaggaga

SEQ ID NO: 233659 - RNA, 63 nt, Homo sapiens
gggaagagccggggccgggcgacaggagcagaagacgaccccgacgcaggccaggagccgcgg

SEQ ID NO: 233660 - RNA, 78 nt, Homo sapiens
gaagaaaaggcaggagaaagaagaacacaacacaccaaaagagaagacggaggagacaggggcagaagaggaagaaag

SEQ ID NO: 233661 - RNA, 79 nt, Homo sapiens
gcccacggacccggagcgccaagaacaaggaggaggcagaacagaaaaacaagaaagaagaaacaagaagaagagcagc

SEQ ID NO: 233662 - RNA, 73 nt, Homo sapiens
cggagagcaggggcccggagaagccaagcacaaaggcacgaaccagccagcaacccccgaagaaaggaaacag

SEQ ID NO: 233663 - RNA, 83 nt, Homo sapiens
gccccagcgcccacgcaccccaccggcgcgcgcggcggcccgcgcacagccacaagggcgcagaagccggcagagcccaagag

SEQ ID NO: 233664 - RNA, 73 nt, Homo sapiens
gccgaaaccccaagcaccaccaccaccccggaaaccaggagcccgccggaggggaccacccaacacacagcgc

SEQ ID NO: 233665 - RNA, 68 nt, Homo sapiens
aaacagagcaaagagggcacaaaccagcaccgggagagaacggagacacagcgggcccccaccacgag

SEQ ID NO: 233666 - RNA, 64 nt, Homo sapiens
ggagacgagagcacgaggagccaaaaggcgggcgggcgcggacggcaggggcgccggggaaccc

SEQ ID NO: 233667 - RNA, 104 nt, Homo sapiens
ccagccgcaccagccgcccaagccgcacagccgcggcggcagcagcaggagaggagaacaccgaaggagaagccaagccaggcccaggaaggagccgacgcgac

SEQ ID NO: 233668 - RNA, 94 nt, Homo sapiens
gggaggcaggcggcgcaccaagaagcgggagaggaacacgaaagggcagaccaaaagaaggggagcccagaagcgagaggaaaaggcaaacgac

SEQ ID NO: 233669 - RNA, 81 nt, Homo sapiens
ccgcccggcgcagcggggaccggcggcggcgcccaggcacccggcccgggaacccaaccgaagaagaacagacccagacaa

SEQ ID NO: 233670 - RNA, 75 nt, Homo sapiens
gcacccccgcgggcgcggcaacagaggccgacccaggcaggagagagacagcgcagcggcggccaaagaagcccg

SEQ ID NO: 233671 - RNA, 67 nt, Homo sapiens
cagccggcggccggccgcgagaaagcggaagagacacccaccaaggcggaggacgagggcgagcccc

SEQ ID NO: 233672 - RNA, 72 nt, Homo sapiens
ccaagaggaaagggggccagcaacccagacgcccacaggacaaaggagcggaggagccccaggaaggcgcca

SEQ ID NO: 233673 - RNA, 87 nt, Homo sapiens
ccgcccccggcccgaccgccgcccgacgccacgcccggcccggccgcgcccgcggaaccagaccagggcggagaacggaaaagcacc

SEQ ID NO: 233674 - RNA, 77 nt, Homo sapiens
ccggagggcagcggaacagaacagggaccccacggccgaaggacccggggaggaagaaagacaccacgccacccaag

SEQ ID NO: 233675 - RNA, 74 nt, Homo sapiens
gggacagacgagaggaggggagcgcccggcgacccccgcgcagggggccccccagcggggccagccccacaacc

SEQ ID NO: 233676 - RNA, 76 nt, Homo sapiens
gcagggccagcaccaacaaaacccccaacacaggaacagggaagcaggcgaacaagaaaaccaagaacacagagaa

SEQ ID NO: 233677 - RNA, 67 nt, Homo sapiens
cgggcgccggccccgggcacgcaacccccccccgaacaggcaccaacggacaaccaggcacgggaca

SEQ ID NO: 233678 - RNA, 78 nt, Homo sapiens
caaagaaaaggagaaaagaagccaaagggacacgccacagcacacaggaacagacaaagaagaagacaccaccgaaga

SEQ ID NO: 233679 - RNA, 59 nt, Homo sapiens
ccaaaagccgacaaccccagaaacagcaccaggaccgagagaaggagccagcacgcaaa

SEQ ID NO: 233680 - RNA, 53 nt, Homo sapiens
accagggccacagcacgcagccccaggcaggacggacccgcgaggacggccac

SEQ ID NO: 233681 - RNA, 72 nt, Homo sapiens
acgcagggcgcccccggggaccccacaccacaaaccgaggaaagaagggacagcagaaaacgcagagggagc

SEQ ID NO: 233682 - RNA, 85 nt, Homo sapiens
ccgggacggaggacgcgcagacgggccaggccacgcgcgcagccggacgcaggaagagaagaaccaggccgggccagacacgaca

SEQ ID NO: 233683 - RNA, 65 nt, Homo sapiens
ggaaaagacgacgaagaggcaagcacccgaaaaaggagaggagggggcgcagcaaaggggggagc

SEQ ID NO: 233684 - RNA, 81 nt, Homo sapiens
cggacaggaagggcaggcccgaagcaccccgcagggaccagagcggaagcccacgaggacccgggagccagcagacgaacg

SEQ ID NO: 233685 - RNA, 83 nt, Homo sapiens
agggggaaaacaacgagcacggcaagccggggaaccaggaggagaggggaggaggggcccagcgaggcagaacggacaccgga

SEQ ID NO: 233686 - RNA, 84 nt, Homo sapiens
ccggggcccggcgcgaggaggaggaggagggcgcgcggaggggaaaggcgccgaaaacaagccggaagaaccaaagagcacaac

SEQ ID NO: 233687 - RNA, 77 nt, Homo sapiens
gacagcaacggcgcaaagggggagggaagcagccaagcgggcagaagaggaagccccagacacgagggcggcgaagg

SEQ ID NO: 233688 - RNA, 74 nt, Homo sapiens
gccagaccgcgggcccacggccgccccagggcaagacgggacacgaagccagcaagcaacgaggaacacacccg

SEQ ID NO: 233689 - RNA, 78 nt, Homo sapiens
cggagcgagcaagccggaccgagacggcagcagagcagcagagcaaagaaccccacaggaggcgaacacgaggagccc

SEQ ID NO: 233690 - RNA, 54 nt, Homo sapiens
gcagcgcccacggccgcgaccggccgggaagccacagccgcgcggaagcggccg

SEQ ID NO: 233691 - RNA, 75 nt, Homo sapiens
ccaggagacaaaaaccaaagcccgcgggaaacccagacagacgcagacgggggagcggcggccaggaacggagag

SEQ ID NO: 233692 - RNA, 45 nt, Homo sapiens
cgacaacgggacgggaaacgaccaagaaaacggggaaaaacacag

SEQ ID NO: 233693 - RNA, 76 nt, Homo sapiens
caccgccagcacgcgccgccccgcgcgcgagccacgcagcccccagggcaggcgccgggaggggccgggggccagc

SEQ ID NO: 233694 - RNA, 77 nt, Homo sapiens
cccaggaagggccgccgagcgccaggccacccccgggcagcgggccgcccggcagcagggacaggcggggaagaaag

SEQ ID NO: 233695 - RNA, 84 nt, Homo sapiens
gcgggggggcaggcgacgaagggcagcaaacaagccagcagcaaaccaggaccacaccccgaccccacagccaaaagggcccca

SEQ ID NO: 233696 - RNA, 70 nt, Homo sapiens
cggaccagccggcgggccggaccccccgcagccggggacgcagacgaaggaagaaaaacgcccaaagaca

SEQ ID NO: 233697 - RNA, 80 nt, Homo sapiens
aggccggggaagccgcaacccagccggcccggcaccagcagagcacgacaagaggagcagagcgagacaggagaccgggc

SEQ ID NO: 233698 - RNA, 52 nt, Homo sapiens
aaagcccaagaggcaaggcaaggcaaggaggaccaagcgaaaaacccagaag

SEQ ID NO: 233699 - RNA, 52 nt, Homo sapiens
ggaccccggagcccagaagacagagggcgagcaccgccccggagccacagca

SEQ ID NO: 233700 - RNA, 77 nt, Homo sapiens
aaaccgaagggaaggccagcagcgcgcggagaagaacggggagccaggaggacgacaaaggagggcgaaaccgcagc

SEQ ID NO: 233701 - RNA, 72 nt, Homo sapiens
gggaaacagccaggagagaaagaaacgcccagcccaacccagcccgcaggaagcacacccaggcggcagaca

SEQ ID NO: 233702 - RNA, 90 nt, Homo sapiens
gaaagaaggcgcacagaggccccccgaggggggcggacccgccacagcgggaagaggcgaggaggaacagagacaagccaggcaaggaaa

SEQ ID NO: 233703 - RNA, 87 nt, Homo sapiens
cgaaggaccacaggcgggacccagaggaccacaggaccaacacaagggaccaacacacgccgccgccgggcggcggaaacacaggga

SEQ ID NO: 233704 - RNA, 84 nt, Homo sapiens
ccggcccagacaacccaacccgccaaggagccaccggccacaaggcccgagggggaggaagaggcagagaggacggaccagcac

SEQ ID NO: 233705 - RNA, 79 nt, Homo sapiens
cgggggcgggaccccgccgcggcgggaggagcccaaaaggcagagcgaggagagaagaaggagggaaagccaaacaacg

SEQ ID NO: 233706 - RNA, 74 nt, Homo sapiens
ccgccggccgccgcgccgcccggcagcccggcaggaaagacgaggccggaagccacaggagaaaggaggagcaa

SEQ ID NO: 233707 - RNA, 55 nt, Homo sapiens
gagagggaaacagacaacacaccaaaggagaagagaaaagcccggaaacgcaaac

SEQ ID NO: 233708 - RNA, 65 nt, Homo sapiens
gcgacgggccgccggggggccacagcgccgcacccgaaaccgcccccaaagccagagcccaagcc

SEQ ID NO: 233709 - RNA, 71 nt, Homo sapiens
ccagagcgccacccaggaggcggagcggcaaaaaccgacagcccaaggcggaaaagcgaaggaagccacaa

SEQ ID NO: 233710 - RNA, 72 nt, Homo sapiens
gaacaaccggagacggggcacagggagcagaccgcacaacgcggaaaagagcccagaggagaggcccaccgc

SEQ ID NO: 233711 - RNA, 74 nt, Homo sapiens
gggaccgggcaagggaagaaaaggacacccaaggcagagaaagacaaaagcggagaaggggaacacacgaggga

SEQ ID NO: 233712 - RNA, 70 nt, Homo sapiens
aaagacaaggccaaaagccagaaacgcaaggaaaaggcgaaagaaggaaccaaacggcggagaccagaag

SEQ ID NO: 233713 - RNA, 87 nt, Homo sapiens
gcagagggcagggggcaaacaagccgaccggaaaaaggaaaccgaagaaccagccccggggacgaaagagacggcagcgccggccag

SEQ ID NO: 233714 - RNA, 57 nt, Homo sapiens
acgaagggaggggaagaaccgagggcaccggagggaagcgggccaccgcccggcccc

SEQ ID NO: 233715 - RNA, 66 nt, Homo sapiens
ggcgcgccaacacaagagaaacaccaaacaagagcagacaaccgaacagaagggggcccaaaggcg

SEQ ID NO: 233716 - RNA, 74 nt, Homo sapiens
cgaggcgagacggaaaggaaagaccacagcaagaccacgcccccagccgggggaccaggccgaacgacccggac

SEQ ID NO: 233717 - RNA, 87 nt, Homo sapiens
gggaccgagcgagcgaccgacgcgccacccgccgacgcccagccgcggggcccgcacggaccccaccacccccagacaggccaacaa

SEQ ID NO: 233718 - RNA, 107 nt, Homo sapiens
gcccgaccgcacgaaacgcccgaaaacagggccggccgcagagcccaccggaaggagaaggaagaggagcgcccccaaaacacaagaggacggagaagcgacgaaag

SEQ ID NO: 233719 - RNA, 76 nt, Homo sapiens
gcagccaacccacaccaaagggcacacagaggcacgaagccagggcgaacagcagacaaagagacgggagcggagg

SEQ ID NO: 233720 - RNA, 55 nt, Homo sapiens
ggagcccagaagaagagagacccagacggggcgaagaggacgggggcaaccggac

SEQ ID NO: 233721 - RNA, 76 nt, Homo sapiens
gggaaccggccccacccgggaggggggagcggcgggaggccaccgccaggccagcaagagaacgaccaagaagggc

SEQ ID NO: 233722 - RNA, 69 nt, Homo sapiens
aaaccccacgggagggacagggggagaaacacccgaacgaaggagcaaagcagcccgaggaggcacgca

SEQ ID NO: 233723 - RNA, 59 nt, Homo sapiens
agggacaagacccacagcaaagccagcgacagaagccagcgcaccagggaacaaagccg

SEQ ID NO: 233724 - RNA, 57 nt, Homo sapiens
gccgacaccccagccggcgacacaggagcaagacagaaaagagacaacgcccagcgg

SEQ ID NO: 233725 - RNA, 72 nt, Homo sapiens
cgcccccgggggccgcgaacccgaggcaaccggaggcggaaaaaagcagagagaacacaagccaagccgaga

SEQ ID NO: 233726 - RNA, 73 nt, Homo sapiens
gccgacagcagacacccaacggggaaccccagcggcggcaggaggggaagcagaaagcaaacggccccgaagg

SEQ ID NO: 233727 - RNA, 82 nt, Homo sapiens
ggcgcaccgagaccacacgccgacagcgggccaagcgccggagcacaaagacgaagccgaagggcgaaacgccaggaaaaag

SEQ ID NO: 233728 - RNA, 77 nt, Homo sapiens
aaggcagcgagaccgaaaaggagaaagagaaccaacaccgccacaggaagagaagccccgaaccagaagcggcaaac

SEQ ID NO: 233729 - RNA, 79 nt, Homo sapiens
cacagccacaggggggagacgggaccagcaagccgagaaagggaggcggaacaggccaagagaacagccgcgaggcgca

SEQ ID NO: 233730 - RNA, 73 nt, Homo sapiens
agcgccaaggaaaaggggagcggaagggagagcccgcccggcccggagaagaaagccgaggaaggcgggggag

SEQ ID NO: 233731 - RNA, 57 nt, Homo sapiens
acccaagcaggacacggccggaccagggccgcaaaagaaagaccggaaggcgggaag

SEQ ID NO: 233732 - RNA, 80 nt, Homo sapiens
cgccccaggaagccagccgaggggacgaggaggcaccaacgcggacaaacgccgacaaagcgaacaaggacgaaggagaa

SEQ ID NO: 233733 - RNA, 100 nt, Homo sapiens
gcacgccgacagcggccaacccccacccagcccagcaacgaccggaccgcacaagcagcagcagcggcaccaagcgcggggacagagacagggggcacgg

SEQ ID NO: 233734 - RNA, 72 nt, Homo sapiens
caaggcaaaccgcaccccacccaggaggaaaaacaggggccgaaagaagagccagagggacgagaaacaaag

SEQ ID NO: 233735 - RNA, 78 nt, Homo sapiens
aaaaagacaggacgacaaaacaccagagagacccgagcaaggaaaacgaggacccggcgcgagagaggaccagagaag

SEQ ID NO: 233736 - RNA, 80 nt, Homo sapiens
cgaccgacaggcagacggaccggaggagcgaaggcggcggcagagaacgccgggccagcgagggggggaccgaaccaacg

SEQ ID NO: 233737 - RNA, 71 nt, Homo sapiens
aagggcagacagacggcagaccccagaacggaccaacaccccaggccaggaaaagaaaaagagaacgcaag

SEQ ID NO: 233738 - RNA, 81 nt, Homo sapiens
caaacaccgcccagacacaaccaggccccagcaccggcggagaaaccaccacaaacacgaggccagcaacgaccaacaaga

SEQ ID NO: 233739 - RNA, 79 nt, Homo sapiens
gccagggacccgcggaaccaccggcgcagcacagcgacgagccaacacacagcacaacagagaggccgagggcacagcg

SEQ ID NO: 233740 - RNA, 72 nt, Homo sapiens
agcggaccggggcagaccaaacggcaagcagacggccgggggccccagagccccacgcggcccgggcaggcc

SEQ ID NO: 233741 - RNA, 71 nt, Homo sapiens
ggacggagcacgccaaaccggaaacacagaagcaccccagaccggacaagggggacccaaccgacgaacgc

SEQ ID NO: 233742 - RNA, 52 nt, Homo sapiens
ggcgcccaggagacgagcagggccagacaacgcccccggagaggagagaccg

SEQ ID NO: 233743 - RNA, 77 nt, Homo sapiens
ggaggcgaggcaaacggggggcgcggagggaccagcgagcgggccacaaagaaggaccaaaggcaaaacacaccgag

SEQ ID NO: 233744 - RNA, 70 nt, Homo sapiens
gaccccggaagccagaaaggcggacaaacccgaaagggggcaaccagaaagccaggagccacgcaggagg

SEQ ID NO: 233745 - RNA, 84 nt, Homo sapiens
acggaccacacagcgcgggagccacgcagaggacgccggaacacccggaagccgagaaagccacaggccggcacccgggaagag

SEQ ID NO: 233746 - RNA, 66 nt, Homo sapiens
ggaagaggaaagcaaaggagcagggaggcccccaggcagccagaacggggcaacaggacacgccgg

SEQ ID NO: 233747 - RNA, 72 nt, Homo sapiens
acacagagccaagcgccaagagaagacagcaaacagaaaaaaagaaggcacggagccgaaccaaaccacgag

SEQ ID NO: 233748 - RNA, 56 nt, Homo sapiens
cggacacggagaccgggcggagccggacgagcgcggggacacgaaaaaagaaacac

SEQ ID NO: 233749 - RNA, 84 nt, Homo sapiens
gcggcagcagagcgagaacaccagaggcccagcagcagggaacaggaagcaaggagcaagaacagggggaagccagccggcggc

SEQ ID NO: 233750 - RNA, 41 nt, Homo sapiens
gacagcgcacacagcaagcacgaggagaaagacagcaaaga

SEQ ID NO: 233751 - RNA, 68 nt, Homo sapiens
cccccccaccaaagagaacgggaagaccacaaccaggaagacaacgaggggcacgcgcccacccaggc

SEQ ID NO: 233752 - RNA, 78 nt, Homo sapiens
ccggaagacgaggcggcgggggacaagcggcgccccagagcggacgagggaaaacccaaccaaagcccaaacagcgaa

SEQ ID NO: 233753 - RNA, 78 nt, Homo sapiens
ggaccccacggcggaggcgaggcccggggggcgccccagccccaggccagcagggagcgcggagagaaagggccgaag

SEQ ID NO: 233754 - RNA, 77 nt, Homo sapiens
gcgccccacagaggggcgacgggcaccacaagccgaacagccagccagcaaaagaacagcagcaccagaagcagcca

SEQ ID NO: 233755 - RNA, 75 nt, Homo sapiens
gaacgaaaaccccagaagcccaggggaggaggagcagccagggacaacacacgggagagcacaaaccgaacacac

SEQ ID NO: 233756 - RNA, 72 nt, Homo sapiens
acaggaggggaggaggccaggagccgaggggggcaccagagccaggcgggcgaacccggccccaacgaccac

SEQ ID NO: 233757 - RNA, 59 nt, Homo sapiens
gacggcgcggacggccccccaggggccccagagcccgcgcggagcgaagaggaaagaaa

SEQ ID NO: 233758 - RNA, 58 nt, Homo sapiens
gcaacccagcacgaacaagaccaccgcgaaaccaccacacagaggcccccagaaaccc

SEQ ID NO: 233759 - RNA, 69 nt, Homo sapiens
ggggaaggaaacccgcggagcgaagaagaagcgcaaacgccggcgggggaacgggagcggcgcgaggca

SEQ ID NO: 233760 - RNA, 81 nt, Homo sapiens
ggaagggagcccaagaggaccagagaccgcggccaggagccaagaagaccagaccgcgggaggagccgacagcggaggggg

SEQ ID NO: 233761 - RNA, 78 nt, Homo sapiens
gggcgcccacgaccagccacaagggcgcagaagccggcagagcccaagagacaacaagccgaaaagagaggcaaacgc

SEQ ID NO: 233762 - RNA, 71 nt, Homo sapiens
ccgaacgggcagagagagccggagcacccccaggccgccgcgaagggaccaaaccacagcaaaaacaccag

SEQ ID NO: 233763 - RNA, 71 nt, Homo sapiens
caaaaccacacccacccagaccgccagagggaacaggggaaagcagccagaaggcagaagagaccaaggga

SEQ ID NO: 233764 - RNA, 35 nt, Homo sapiens
gacggggagaggcaggaaaagcccagggcaggcac

SEQ ID NO: 233765 - RNA, 77 nt, Homo sapiens
accgccccgccagcagaaggagcaaaagagcaacgccacaagagccacagagccaagcgcagcccagaaagcggagg

SEQ ID NO: 233766 - RNA, 85 nt, Homo sapiens
gagacgccgccgcccaggagacacacggaggccagaaacccagcaacgcagagagacagaacaagcgagggaggcggcgggcgca

SEQ ID NO: 233767 - RNA, 81 nt, Homo sapiens
agacccacgaggcacacagccggaagaaagcagagaacgggaagggccacaccaccgccagcacaggaagacagaaccccg

SEQ ID NO: 233768 - RNA, 76 nt, Homo sapiens
cgccagcggccgagcgggcggcccggccgggcgcccggggcggcggagcaaaagcggaaggagagacaggaagggc

SEQ ID NO: 233769 - RNA, 73 nt, Homo sapiens
ggcggcacgaaacggagcccggagcagcggcggcgaaagacaagcagccacccacgcacccgcggccaaaaca

SEQ ID NO: 233770 - RNA, 67 nt, Homo sapiens
cccgccaagcgcggccgccgcccccgcccagagaaggcaccggccaaagggggcgaccgggacagga

SEQ ID NO: 233771 - RNA, 77 nt, Homo sapiens
ggaggagacgacaagaccgggacacccgaagcgggaaaggccagaagcggacccagaagaggggagcagcaaggagg

SEQ ID NO: 233772 - RNA, 72 nt, Homo sapiens
cgccccgcgcgggcccggagcgggagaggcccaaggaccccacagggaagccgggggaggccacggacaaca

SEQ ID NO: 233773 - RNA, 68 nt, Homo sapiens
cggcgcgcccccgccgcccgccgcgccccggggccggcccgcagaagacgaccccgacgcaggccagg

SEQ ID NO: 233774 - RNA, 70 nt, Homo sapiens
gcggcgcgccgggcccacgcgcggcgcgcgagcggcagcccacaagcaggaagaccagccccaggaggga

SEQ ID NO: 233775 - RNA, 80 nt, Homo sapiens
gagcagcccgacccccaacggaccccgccccggaggagcgcgcaccacggcgcccaccccagagacccggagacccggaa

SEQ ID NO: 233776 - RNA, 73 nt, Homo sapiens
ccaagacgcccgagccaccagcaagaccggaaacagagaaaaggggggccccagcccggccgaacgggcgcac

SEQ ID NO: 233777 - RNA, 68 nt, Homo sapiens
ccgcccgggccagcggccgcgcacccccggccggaggcaccagcgaacagagacgaaacagccgaaac

SEQ ID NO: 233778 - RNA, 76 nt, Homo sapiens
ccccgcgagcaccggaaacagggcccacacaggaacaggcaagggcgggacaagggcgcaccggggcgcagcgagg

SEQ ID NO: 233779 - RNA, 73 nt, Homo sapiens
gccaggacagagacaccacgggcagaccacggagggggagagagacgcgggaaccgccagcaaaccacacagg

SEQ ID NO: 233780 - RNA, 74 nt, Homo sapiens
caggccagcccgagacgcgccagcacaccccgaccgcgccagaccgcacagggacacgagacgagaacagaccc

SEQ ID NO: 233781 - RNA, 53 nt, Homo sapiens
cccaccccccgaacccagccgcaccggagacagccagaagagaacaaaagccc

SEQ ID NO: 233782 - RNA, 74 nt, Homo sapiens
cagagcaaggggcacgcagaaggaccggccacgcaccagaagaaaggagagagccgaaagagaaaagcgcgcgc

SEQ ID NO: 233783 - RNA, 74 nt, Homo sapiens
gagcgggcaaaaccaaaggaagccgaaggagaagcacacaggggcagacggcagaaaacagacgaagcaacagc

SEQ ID NO: 233784 - RNA, 59 nt, Homo sapiens
caaagagcgaccgagaaaaaccgaaagagccagcgaagaggagaggaaggcaccaaaga

SEQ ID NO: 233785 - RNA, 74 nt, Homo sapiens
agacaaccaaccccaccgaggaggacagagacgcaacagagagcgcagaagacaggacaaaaagcccacacaac

SEQ ID NO: 233786 - RNA, 99 nt, Homo sapiens
aggggcgcccacgaggggaagcccagcaccacggacgcaagcgaggcacgcaaccggggcacagcagccgcgaagcagccagagaacccggccggaccc

SEQ ID NO: 233787 - RNA, 74 nt, Homo sapiens
ccgggagaaaggcggagaagagaccgacacacaagggagaacaggggaagcagccaaggagaaacacccgggac

SEQ ID NO: 233788 - RNA, 82 nt, Homo sapiens
gaagaagaagcaggagaacgaaacggagccagagaaggcagaaggcaccgcacgggaggcacacggggacgcacggagggaa

SEQ ID NO: 233789 - RNA, 82 nt, Homo sapiens
ggggcacagcccaagcagagagaggccaaggacaagaagagaagcaggagccgcccaccagaagaaggggagggcacaggca

SEQ ID NO: 233790 - RNA, 76 nt, Homo sapiens
gaaccaagcggagagagcagcccggcagacgcagaaccagggcaccccagaggagcccccaccgacaacaggaggc

SEQ ID NO: 233791 - RNA, 66 nt, Homo sapiens
ggcgggccagccgggaggggagagccccgcaccccccccagaaacagggacacacaggaagacgaa

SEQ ID NO: 233792 - RNA, 47 nt, Homo sapiens
cggcgccgcccccgacgcgccaggggcaggggccgcacacagggcag

SEQ ID NO: 233793 - RNA, 77 nt, Homo sapiens
cgagcgacggcaagaccaaggaggcgggggagacaccgagaccgagccggcggggaacgcaacgcacgcccgagcaa

SEQ ID NO: 233794 - RNA, 71 nt, Homo sapiens
aaggaccaagaaccagaccaagcaaggaaccagcgagcaaacgcaaacacaacagaaaaaagaaaacacga

SEQ ID NO: 233795 - RNA, 64 nt, Homo sapiens
gcggcggcgcgcggacccaggcgcggaggcgaggccagcagggagacccgaccaccggaagcca

SEQ ID NO: 233796 - RNA, 75 nt, Homo sapiens
gcgaagagggacccgggagaaaaaaaacccacgcaacgcaaccacgggaaggagaaaaccggaagagaaaggccg

SEQ ID NO: 233797 - RNA, 77 nt, Homo sapiens
aaagggacaagaagggcaaagccgaaggccggcccagggagaacgcaaaaccaccacccccacaaaaaacgcaggga

SEQ ID NO: 233798 - RNA, 79 nt, Homo sapiens
ccacccagccagcccaagaggaccaacgaggcaggggaacgaaaggggaacagagaagcccagcaacacgggaaacgca

SEQ ID NO: 233799 - RNA, 65 nt, Homo sapiens
agacaaaacaagcccccaggaaccacaaaaccgagaaaacgggacaaagagccagcccgagcagc

SEQ ID NO: 233800 - RNA, 44 nt, Homo sapiens
gaaaaagaaggaagggccagaaaaagagcgagccacccccggcg

SEQ ID NO: 233801 - RNA, 70 nt, Homo sapiens
ggagaggggaaccagcagaaggccggaaaaacagggagagccacagagggggaaagccaaggaaaaacgg

SEQ ID NO: 233802 - RNA, 73 nt, Homo sapiens
cgccccaggacgccaccacccaagcccccccgccagcccagacacaccagccagagagcacggaagaagcggg

SEQ ID NO: 233803 - RNA, 78 nt, Homo sapiens
ccaagaagggccaccccacagacggaggggcagcagcaggacagggaacccgggagacagcaacagacggaggaacgg

SEQ ID NO: 233804 - RNA, 74 nt, Homo sapiens
cccccaaggaagacaacgggaaggggaccaggaggggacacagaccagcaaggaaagagggcagaagaggaaga

SEQ ID NO: 233805 - RNA, 79 nt, Homo sapiens
gcggcggcagcggagacgcgagcgcccagcacggagcggaggaagcgagaggaagagagcgaaacaccagaggcgggac

SEQ ID NO: 233806 - RNA, 38 nt, Homo sapiens
caaaaacaggacgccccagagaggcgacaaagacgcgg

SEQ ID NO: 233807 - RNA, 61 nt, Homo sapiens
ccaagaagaccgagagcaccacaaggccaagggcaaggagacagaacaggcgggacgagag

SEQ ID NO: 233808 - RNA, 61 nt, Homo sapiens
agacggacagcccagccacggaggggacagcagggcaaggagccccagaggaaccagagaa

SEQ ID NO: 233809 - RNA, 73 nt, Homo sapiens
aagaaccagggagaccacaaaagagcagaggaggaacaccaggcacaagccacagaaaagacgacagcaacca

SEQ ID NO: 233810 - RNA, 69 nt, Homo sapiens
gccgagggggccggcacagggcacccaagcgacggccgaaagagcgaacagcgaaaaagccccaagcag

SEQ ID NO: 233811 - RNA, 62 nt, Homo sapiens
cggaaggaagaaagcaggagggagacacaacacggggagaagaaaagcaacacagcgaccag

SEQ ID NO: 233812 - RNA, 51 nt, Homo sapiens
agcagaagcccggaccaggagggaaggccccggggggggaccaggcccggc

SEQ ID NO: 233813 - RNA, 85 nt, Homo sapiens
caagcgggcggcaagacacggggcgacgccacagagaaaggccagcggaagccgccaccccaggcggaccaccacaacaagaagc

SEQ ID NO: 233814 - RNA, 78 nt, Homo sapiens
ccaaggaaacaggagcgaagcccagcgggccggacggggcggggggaacgccgcggagaaccgaaccaacagccagcc

SEQ ID NO: 233815 - RNA, 74 nt, Homo sapiens
cagccagaggagagagagagacaacaggggaagaggaccaaccacaaaagccagcaccagaacagagaaaaagg

SEQ ID NO: 233816 - RNA, 80 nt, Homo sapiens
cgcgcccgccaccggccgccgcccggagcgggacggagcgggccaccggggccacgacagcgagcgaccccggccgagac

SEQ ID NO: 233817 - RNA, 76 nt, Homo sapiens
cggacaaaaaacaagaaccagacaagcggaaaaacagaaccacaggaaggcgggaggcggcagaagcagccagagg

SEQ ID NO: 233818 - RNA, 83 nt, Homo sapiens
gacaacccggcgggggcgcggcgcggccccggcccggcccccgcaggagcaggccaccaggcaacgcaccaacaacaccacac

SEQ ID NO: 233819 - RNA, 71 nt, Homo sapiens
cacgcaaccaagagggaaggagacagggaagcaaagcgcaacagaaacagagagaagccgccggcccaggc

SEQ ID NO: 233820 - RNA, 76 nt, Homo sapiens
cagaacaccaggccagcaccaccggcagacggcccgccacgggccccgcagccgcgcccgagcgcccgagcaggga

SEQ ID NO: 233821 - RNA, 56 nt, Homo sapiens
aacggcgaggacgagaaaggaagagaccccaagcccgaggagaagaccagcgaccg

SEQ ID NO: 233822 - RNA, 52 nt, Homo sapiens
acgcagggcgcccccgagggcgaagacaggacggcccaggcagacacggagg

SEQ ID NO: 233823 - RNA, 85 nt, Homo sapiens
gggagagacgcgaagaagaagagggaaggacggagcaggaccaggaagaaacaggcccgccagcaccgacagcaacgaaaagccc

SEQ ID NO: 233824 - RNA, 66 nt, Homo sapiens
acggcggcagacaacacccaggaagaccagcaaggaaaagcgaaacggccagagaaagacaagcac

SEQ ID NO: 233825 - RNA, 124 nt, Homo sapiens
agcacggacaccccgccagcaagcccacggccgagcacagaagccgcacccagcaggagaaggagcgcccggcaccagcaggagcggcaaaggccggagagcagaaagggaaaaaaggagcgga

SEQ ID NO: 233826 - RNA, 76 nt, Homo sapiens
gcaacgggaagagaaagcgaagccagaccagcgcaccacccccgccaacggcaggagggaagaccccagaaacccg

SEQ ID NO: 233827 - RNA, 58 nt, Homo sapiens
ccacaacaccggcaggaaccaccaggacagagaaccgaaggaaaagcacagaaaagag

SEQ ID NO: 233828 - RNA, 79 nt, Homo sapiens
ggggcccgcggggcgagcccggaaaaccagaccagaaacggaggagcccgccgaagcagcgcccaggagacaaaagcac

SEQ ID NO: 233829 - RNA, 83 nt, Homo sapiens
gacggggaaaaagcggccaaagaaggaagcgcgcaccgaaaggacgagaccgaagagaaggaaggacagcgagagagaagaga

SEQ ID NO: 233830 - RNA, 72 nt, Homo sapiens
cagcaccggacggacgagaacgccacggaccaaagcggagagagaggagaaaagggggccgagacaacaaga

SEQ ID NO: 233831 - RNA, 51 nt, Homo sapiens
agaagccagaaggggagccggaaacaaaagagcagacagcagaacaccgaa

SEQ ID NO: 233832 - RNA, 75 nt, Homo sapiens
cagcaccgcagcagagcgaaagcacacgcggaggagaaaaccggaagagaaaggccgggaagcaggaaagaaaaa

SEQ ID NO: 233833 - RNA, 73 nt, Homo sapiens
cacaaacaaaaccggaagaggccgaagaacgcccgaaaccgaagaaccagccccggggacgaaagagacggca

SEQ ID NO: 233834 - RNA, 75 nt, Homo sapiens
agaaaggaggcaccaaagagcagagacaagcgcggagccagcgcccggcaaggagcgagcgggagacaccggccg

SEQ ID NO: 233835 - RNA, 81 nt, Homo sapiens
gccagcgggccagcgagcccggaccgagacacggagaaggggcagaccaacaccacccagcaaaaaccccgacgaacgcgc

SEQ ID NO: 233836 - RNA, 67 nt, Homo sapiens
caccacagccccggaggacaggacagcagaccacagcccggcaggcccaaaaacccaaagggacaga

SEQ ID NO: 233837 - RNA, 59 nt, Homo sapiens
caggccaggcagcgcggaggggcgagccagcggccaggcaggggaaaggaagggagcag

SEQ ID NO: 233838 - RNA, 69 nt, Homo sapiens
ccgcccaacagaaaaagagaggagggagaacacagaaacccgccccgggagaaaacgggaaacggaaaa

SEQ ID NO: 233839 - RNA, 76 nt, Homo sapiens
acccacaagaggaccagcacccaagccggcaaagggcggaagcagcagagggaggggcaaacacgcagcgaggccc

SEQ ID NO: 233840 - RNA, 56 nt, Homo sapiens
cggcgggaaaagaggaaggggagcagaggaagaagacagccaggcagcggaccagc

SEQ ID NO: 233841 - RNA, 82 nt, Homo sapiens
cccggggaggcagagaggaggcagagagccccgcgacgagagagacagagagaccacgccgagcgagaggaacggaagaaga

SEQ ID NO: 233842 - RNA, 70 nt, Homo sapiens
agagcggaagccaaaggcaacgaccgcccgggacaccccagagggacgagcagccgcacgcccccagggc

SEQ ID NO: 233843 - RNA, 85 nt, Homo sapiens
agagggaagagacagccagcacaccccgcgagcaagacccccccaacccgggccggacaccagccggaccacccggcaccagggc

SEQ ID NO: 233844 - RNA, 60 nt, Homo sapiens
acagaacggagcacgaaaacaagccgacaggagaagaacacacaggaacaaaagaaaaag

SEQ ID NO: 233845 - RNA, 78 nt, Homo sapiens
aggaacacgaacaggaacccgcaggcccagcacccaaaaagaacaagagcagccgaggaaaaaggagccagggccgca

SEQ ID NO: 233846 - RNA, 84 nt, Homo sapiens
agcaacgcagaagcccggcgccgggaagcccagccgccgaagcaccagcacggagggcccagcacccccccgaccacgacaggc

SEQ ID NO: 233847 - RNA, 83 nt, Homo sapiens
acaaacacacgcaaaggagaaaggaaccgacaggggacacggaaaacgacagaacgaagcagaagaacgcccaggcaggcagg

SEQ ID NO: 233848 - RNA, 69 nt, Homo sapiens
cgcggcgacccagcgaggaaaagagaagcgggcggaggcgcaaaggcagcggggaaccggagccgcaag

SEQ ID NO: 233849 - RNA, 74 nt, Homo sapiens
ccgaaaggaacggcagacaaaaagcagagaaaacgagagcccaagagaacgaaagcacagaaaacaacgcccca

SEQ ID NO: 233850 - RNA, 82 nt, Homo sapiens
cgaggaagacccggaaacaggggccacggagccacggccacggccgcaagacccgcgaccaaccccacacgcgacaagaaaa

SEQ ID NO: 233851 - RNA, 74 nt, Homo sapiens
ggcccgggaagagagcgaggagacaaggcaccggcccggaacaggggacaaggaaacaaaaaggacaaaacgga

SEQ ID NO: 233852 - RNA, 77 nt, Homo sapiens
gcgaccgagaggcgcggagccggggacgcggagggaggaagagggaagagggaaagcccagagagggagaggagaga

SEQ ID NO: 233853 - RNA, 60 nt, Homo sapiens
agcaggagaagcgagcccggacagaccaaccgcaggcgcaagcggaggcaaggcggacca

SEQ ID NO: 233854 - RNA, 79 nt, Homo sapiens
cggcagccgcgaggaggcgcgggagggcgagaacgaccccgagacgggcgcgcagaggaggcggggacggcgcagcccc

SEQ ID NO: 233855 - RNA, 73 nt, Homo sapiens
agaccacaccaacggaaagccaggccaggggggagacagagggaggccagagcacagaaggaaacacggacca

SEQ ID NO: 233856 - RNA, 68 nt, Homo sapiens
caacacaccgccaccgaagacgggccccaacacccagagacgaaaggggaaaccgcacgcaacagcca

SEQ ID NO: 233857 - RNA, 82 nt, Homo sapiens
gcagcgaacagccacggccgcccgcgacaccccagcagaaggcccagcgcgagaagcggaggccaaggccgggccgggccca

SEQ ID NO: 233858 - RNA, 52 nt, Homo sapiens
gcgcgaggcaagcgcgcgccgacggggacggcaaaaaggggcccacaacaac

SEQ ID NO: 233859 - RNA, 76 nt, Homo sapiens
caccgggacggaccgagaccggaccgagagcggaccgagagcgcgaaacgcacgagaaggcgggcaggggcacggc

SEQ ID NO: 233860 - RNA, 73 nt, Homo sapiens
ccggcaggcgcacaggcccggccaggcacaagggcaccacaaaggggcagggacaaggaaacagaaagccggg

SEQ ID NO: 233861 - RNA, 65 nt, Homo sapiens
cgccacgcagccggccaccgccgagacccagcacacgccgaccaggaaaaccccgccacgcggag

SEQ ID NO: 233862 - RNA, 75 nt, Homo sapiens
cacagcggcagcggaggaacaaacccccagggcgaagacccccccccagggcaaaccaccaggcaagaagacccc

SEQ ID NO: 233863 - RNA, 64 nt, Homo sapiens
cagagccaccagcgcagcgcgccaggagcccagcagcaaggaaacaccagacacacccccagac

SEQ ID NO: 233864 - RNA, 76 nt, Homo sapiens
cacgaacgcccaccccccgaacccagccgcaccggcccggggcgaaaggagcaaaaggaagagcaggccccgggcc

SEQ ID NO: 233865 - RNA, 81 nt, Homo sapiens
ccgggcccgcgcgcccggccaagaggcaaaggggaggacgcagcaaaccaccagaaggacccgagcggggaccgagaaaga

SEQ ID NO: 233866 - RNA, 79 nt, Homo sapiens
agggacaggccccggaaggaacagaagcgggccaggggccaagcaagaggagccaaccgcccacgccaacgggacccca

SEQ ID NO: 233867 - RNA, 53 nt, Homo sapiens
cagccggcgaacaaaacgacgcagaacagaaggaagggaacacggacgacgag

SEQ ID NO: 233868 - RNA, 61 nt, Homo sapiens
ccagagagcagcagccagccaagcgagcaaagcgagcgaacccgggaccaaagcgagaccc

SEQ ID NO: 233869 - RNA, 78 nt, Homo sapiens
ggcgggcagccgaggccgggaaccagcgagggaaagggagagaggagaaccaggcagcccgggccagccgcggagcca

SEQ ID NO: 233870 - RNA, 86 nt, Homo sapiens
gcgcgccaaggagaccaggaagcgagcaccagcagcccgcacaggcagacaaccccggggacaggaaacaaagcaggaggaggagg

SEQ ID NO: 233871 - RNA, 62 nt, Homo sapiens
ggaagaggagggcaagaagggcaagaaggaaggagggccccggagcagccacaccaccgagg

SEQ ID NO: 233872 - RNA, 94 nt, Homo sapiens
agaccgaggcagaaccccccagcagcagcagaccaagcgcccacacccggagaccaaacccgacagcaagagcccaggccggcaggccccagaa

SEQ ID NO: 233873 - RNA, 76 nt, Homo sapiens
aaagacagaggacgcccgcagggaacaacacaacgacaccgaggcgaggaagaagcagcaccagcaaccgcagcca

SEQ ID NO: 233874 - RNA, 75 nt, Homo sapiens
acgaccccggacacgggcaggcaggcacccccagcaggacagcacacccaaccagacacaccaccccacaacagg

SEQ ID NO: 233875 - RNA, 75 nt, Homo sapiens
gggaccggcgggggcagaacgagcccaggccacagacccacacgccggcggccaagagcgcagcaaaagcaacag

SEQ ID NO: 233876 - RNA, 53 nt, Homo sapiens
aaagaggccaaagcaagagcggagacggagcggcggcaagcagcgagagacaa

SEQ ID NO: 233877 - RNA, 80 nt, Homo sapiens
aaaccgaagaagaggggggaggacacccaaagagggagagccagggccaacagcaaccaaagagagcacaaggagagaac

SEQ ID NO: 233878 - RNA, 69 nt, Homo sapiens
caccccggagcaggggaaaaaggaccaaccggcaagggacaacggccaaggacgagagacaaagaggca

SEQ ID NO: 233879 - RNA, 54 nt, Homo sapiens
accagaccgaccaccaaaaagaccaccagacaaagaaggaccaacacacacgac

SEQ ID NO: 233880 - RNA, 77 nt, Homo sapiens
accgggaaaaagcgcggagggggacggccgggccgcgccggcaccccgagcaccggcggaggcgccaccgcccggga

SEQ ID NO: 233881 - RNA, 77 nt, Homo sapiens
ggcaggcggagaaggagacaccggaggacgaagagggggagaggagcccaagggggcacaagaccacaagggacgcc

SEQ ID NO: 233882 - RNA, 84 nt, Homo sapiens
gaagggagacacaaggacagcagcgacggggcccgcaccccaggcggcgaggacagcccacaagaaaaaggagagcgagcgccc

SEQ ID NO: 233883 - RNA, 58 nt, Homo sapiens
cagcgcgaccgggaggcccagggcggagaacggaaaagcaccaggaagcagagaggac

SEQ ID NO: 233884 - RNA, 78 nt, Homo sapiens
ggcgaagaccggaccgggggcaccggaccgagcacacagccaaaccacaaggagggagcagggccgggggggaccgcg

SEQ ID NO: 233885 - RNA, 63 nt, Homo sapiens
cggggccaaaaaggcacgagggaacgggaaagaacagagaagagccgggcagacccgaaaagc

SEQ ID NO: 233886 - RNA, 56 nt, Homo sapiens
cagaagccaacagaagaaaccacagcaacaacaccccgcgccgcgcagcagcagca

SEQ ID NO: 233887 - RNA, 57 nt, Homo sapiens
ccaaaccagaagaggagggcccagaagaaaaaggacagcagaccacagcccggcagg

SEQ ID NO: 233888 - RNA, 79 nt, Homo sapiens
gcaaaggccccggcaagaagaccggaaggccaaaacaagggaagcaaaggaaacggagagacagaagaaggagaagcga

SEQ ID NO: 233889 - RNA, 58 nt, Homo sapiens
gcagagcaaggagaagcggaaaaccagaaggcaccgacaggaaaggaaaaggagaacc

SEQ ID NO: 233890 - RNA, 74 nt, Homo sapiens
agaaacgagcagaagaggaacaagggggggaaacccaccgggaaaaggcacgaaggggcgaagcagcaaaacac

SEQ ID NO: 233891 - RNA, 79 nt, Homo sapiens
gcaagagagacgagaaagaacacgcggccaaacccggaggaggaggcagaaagggcacaggcccaggcccagcgggccc

SEQ ID NO: 233892 - RNA, 72 nt, Homo sapiens
acaaaagggccaaagaagggagagagggaagcagcacggcaagcggaaacacagggggggcagacgcggaag

SEQ ID NO: 233893 - RNA, 75 nt, Homo sapiens
ccgaaccagcccaaagccaggcagaccagcaacccccacgggacaggagcgaaggaaaaaacagaagacgcagcc

SEQ ID NO: 233894 - RNA, 74 nt, Homo sapiens
cggagggaccagcgagcggacagaaggagaccggagccgccccgccagaaagccaggggcaccaccacagaagg

SEQ ID NO: 233895 - RNA, 80 nt, Homo sapiens
aagcccaggccccccagaacgacaagaagagcagcgaaaaggggccacagaggcgggccagcccaggcagagccgcgaca

SEQ ID NO: 233896 - RNA, 79 nt, Homo sapiens
gccacccggcgacgcaaccggccaaagacacaagacaggggggagacacgccacgcggccaaaggaacacggaggaaaa

SEQ ID NO: 233897 - RNA, 76 nt, Homo sapiens
ggagccgacgacccggaccaagaaggggaggcccgcggcaggcaagcggacccaggaaaaaaaagccagaagcaac

SEQ ID NO: 233898 - RNA, 64 nt, Homo sapiens
cagcgcggacccggagcgacaagcgccccgacggagcgccaggacgccagcaacacccaacaca

SEQ ID NO: 233899 - RNA, 86 nt, Homo sapiens
cgacgccgggaccggccaagggcccacacaccaagaccaagaaaacgcacacacacaccggcaccacagggcgcccaaggccgcca

SEQ ID NO: 233900 - RNA, 68 nt, Homo sapiens
agaggaacgaggaaacagaaagaaaagccccagcgacgcagaggacccagccaaggcccccaccgcag

SEQ ID NO: 233901 - RNA, 87 nt, Homo sapiens
gaccaaacggccacccacacaaaaaacgcgcgaaaagcaggagaagagaaacaggacgcgaggaggagagaggagagggaacgggag

SEQ ID NO: 233902 - RNA, 81 nt, Homo sapiens
gccagaccgcgacaggcccgaaaaaaacccaggcggcccagggacagaagagcagaagacagagaaggaaaagaaaggaac

SEQ ID NO: 233903 - RNA, 75 nt, Homo sapiens
cccagcggaccgaacaggagcacagcaagcgggagcaggcagaccaaaggaacagaagccagggccggaaaacca

SEQ ID NO: 233904 - RNA, 69 nt, Homo sapiens
aaacgcagcacagagcgcagcaacagcggccagccccgcaccgccacaaccacaaggcccaacccagca

SEQ ID NO: 233905 - RNA, 79 nt, Homo sapiens
gcgggagaagaaccccccgaaaggaccccccagcaccagccggagagccaaagcgaagcgcgaacgcagacacggaaaa

SEQ ID NO: 233906 - RNA, 84 nt, Homo sapiens
ggacgcccagcccggcgcacggcccagggaaagggagcagcaccggccacacccacagcacgaccggaacccagcgaccgacgc

SEQ ID NO: 233907 - RNA, 73 nt, Homo sapiens
aagccacgcaacaggggcaaacgcccagggaaacaaaggacccacgcaaagccagcgacccaaaggggagagg

SEQ ID NO: 233908 - RNA, 60 nt, Homo sapiens
aaggaacagaccccggaggaggagaaacagaaacggaaaccacgcccaaccagagcaaga

SEQ ID NO: 233909 - RNA, 78 nt, Homo sapiens
cgcaacgccacgacagaaggcgccaggcgggaaaccggcccagcggcgacgcacaaaaccgaggacagaggcaaggca

SEQ ID NO: 233910 - RNA, 66 nt, Homo sapiens
aagcccacagaccagagaaaggccaggaagcggagcaggagacaaggcacgaggcgcggcgaccac

SEQ ID NO: 233911 - RNA, 65 nt, Homo sapiens
gcgggcgggcgcgggggagcgggcgccaggcgggaaaacggcacaaggcgacgagggagggcaga

SEQ ID NO: 233912 - RNA, 73 nt, Homo sapiens
cagcagaagagaccacaggcccagggaacgcgaaagcacagagcgacccaaacaagggacgaacaaaacaccg

SEQ ID NO: 233913 - RNA, 79 nt, Homo sapiens
cacagaagcacggcacccgaccacgccccggaggaccagaccgcaagccgccacccgagaccgcgcgccccaccggccg

SEQ ID NO: 233914 - RNA, 69 nt, Homo sapiens
gaaaaccacaggaagcccagaggcagaacaaggaggaagcacagcggagaggaggaaacaaaggacagc

SEQ ID NO: 233915 - RNA, 74 nt, Homo sapiens
gcgccaggaccagaacgccggaccgggaaaaaggcagcgcccaccaccaccagacagaccaccgaccccccaac

SEQ ID NO: 233916 - RNA, 66 nt, Homo sapiens
gagcacccggaaggccgggagaagccaaacaggagggcgaaaggaaccagagcagacaagacgcac

SEQ ID NO: 233917 - RNA, 75 nt, Homo sapiens
cagcggacaaccccagcggcccaagaaacaaaaaaaggaaacacacaaacgcaggaccagccgcagaagccagga

SEQ ID NO: 233918 - RNA, 83 nt, Homo sapiens
ccgagcagcccccaggaacagggcaaaggagagcacaaccacgcagggaagcccaggggcaggcagaacaagaagggcaacca

SEQ ID NO: 233919 - RNA, 71 nt, Homo sapiens
gaccggcacgcgagggagcacggacagggcagggggggaggagggacaacacacaacgcaggcgcacagcc

SEQ ID NO: 233920 - RNA, 73 nt, Homo sapiens
acaagagacgacagggcagcgccgcagcaacgagagcgccgaccgaggcaggacaaagagcaccaccccggga

SEQ ID NO: 233921 - RNA, 77 nt, Homo sapiens
cacacagacaacagccggggcagcggggccacagggggggaaggagacgcgcccccggcagcccggaagcgaccacc

SEQ ID NO: 233922 - RNA, 78 nt, Homo sapiens
aaacggagagacaccaacccaggccagaagcggacccagaagaggggagcagcaaggaggaagacagccggggccgga

SEQ ID NO: 233923 - RNA, 69 nt, Homo sapiens
gaaacccagggcaaccagcaggacgaggggcagacaccagggaacaagccagaaggaaaggcaacaaaa

SEQ ID NO: 233924 - RNA, 65 nt, Homo sapiens
cgggagaagaggaaaaaggacagaaaaacggggccaaaagcaaggcagcggcggccgcgcccacc

SEQ ID NO: 233925 - RNA, 67 nt, Homo sapiens
ccaaaagaaggggaaagaacaaggagcgagaacccgagcagcgccagagcaacacaccgcgccccag

SEQ ID NO: 233926 - RNA, 77 nt, Homo sapiens
gaaggccgaccggcccaccggcgggagaggcggagcacacaggacagcaacgccagcgcacgagcacaccacagacc

SEQ ID NO: 233927 - RNA, 38 nt, Homo sapiens
agagaagggagcgaacacagcggaagacggaagacgag

SEQ ID NO: 233928 - RNA, 56 nt, Homo sapiens
agagggcggggggacagaagagagggggaagaaggcaaaagcagaccggaaaaccc

SEQ ID NO: 233929 - RNA, 78 nt, Homo sapiens
gggggggccgcgcccggccccgcgcgggcggacggcggaggcgcccccaggacagaaagcgggacacaagcaggagca

SEQ ID NO: 233930 - RNA, 71 nt, Homo sapiens
aaaaacccagaaacgcagaagcggaacacccgcgggaccacagccgagaccgcaaaagagaggaagacacg

SEQ ID NO: 233931 - RNA, 72 nt, Homo sapiens
ggcgaacagccaacagagggggggcggacgggcaaaggccaacaccgggaggacccacgaggaagcggccgc

SEQ ID NO: 233932 - RNA, 81 nt, Homo sapiens
ggaagcaaagccccaagcacccgcccacaaaagccaagcgacaggcaaagaaaggaaaagaagacaggcaagagaagggga

SEQ ID NO: 233933 - RNA, 67 nt, Homo sapiens
gacaagagcaccacgggcaggaaggcagcgcacgacagcaaaagcacaaccccaagagggaaaacac

SEQ ID NO: 233934 - RNA, 82 nt, Homo sapiens
ccccagaggcccaacgggacgaaccacagggcggccagagcacacaccaggcacgagacagaagaagcacaagcgcaacgga

SEQ ID NO: 233935 - RNA, 81 nt, Homo sapiens
cacaggagggaaaccacgcaggcaaacgagaaaaagccgagaaggccagacggagcaccaggccaagaaccccaaaaacag

SEQ ID NO: 233936 - RNA, 113 nt, Homo sapiens
aagaccaaccgagcagaccgcacaagcccagaccggaagcaaggcgggcagaccaagcgagggacccgcagccgcccaccgcgcaagagggagcacaggaaccgcaagaacgg

SEQ ID NO: 233937 - RNA, 69 nt, Homo sapiens
ccagccggagccccagacaacccggacggccggccaaaggcgcaagagcagagaagaccaagcacgggc

SEQ ID NO: 233938 - RNA, 57 nt, Homo sapiens
ccacgggcagcaacagagcacaagacccacggccagacaaaaagaggggaaggggcc

SEQ ID NO: 233939 - RNA, 98 nt, Homo sapiens
aacacgagaagacacaagggaaaagggggaggaagagaagacaacgcacaacagggaaagggagcagcaccggccacacccacagcacgaccggaacc

SEQ ID NO: 233940 - RNA, 87 nt, Homo sapiens
caccggcacggggcgggcagcggcgccgggcacaggagggaagagcaaggagccaaccaaccccagggaggcaaacagaaaagcggc

SEQ ID NO: 233941 - RNA, 61 nt, Homo sapiens
agacccaggacgccgcacccggccgaccacaagcgggccggagagagcacggggaggagag

SEQ ID NO: 233942 - RNA, 81 nt, Homo sapiens
cggccccggcgcagcccggaaagccggcaagacgagaaagcagacgcacccgaagaaaaggcagcccgaggcaagaggacg

SEQ ID NO: 233943 - RNA, 70 nt, Homo sapiens
gcccaggagcgccacgcgcggaaggcagcgcccagcagcgcaggcacaagcagaggaaccagggaaccgc

SEQ ID NO: 233944 - RNA, 75 nt, Homo sapiens
agcgccgggcaccgggcacagcgccagccgggcacaacgcacggaaggccgccaagcagcaggaacaggcaagaa

SEQ ID NO: 233945 - RNA, 85 nt, Homo sapiens
gggcacggagcaaccccaagcaccacaaaaaccacgagagcccgcccaacaaacagaggacaggccaacaagcccaaaggaaaag

SEQ ID NO: 233946 - RNA, 90 nt, Homo sapiens
gcgggcgagcggggggacgccggcggagacgcgggcgaggccgggaacccaacaagggagcaaacagagaaagaacccaaacacacagaa

SEQ ID NO: 233947 - RNA, 71 nt, Homo sapiens
gcgagaaggcggcgcacaagagcacgaggaagaaccaccagcagaaaacgcaggcgggcgggagcacgagc

SEQ ID NO: 233948 - RNA, 75 nt, Homo sapiens
cgcagggcgcccccggcagagggcccaccccggagagaccccagggcccccaaggggaccccccggaagagggac

SEQ ID NO: 233949 - RNA, 79 nt, Homo sapiens
ggagcagggccagcggcaaagagcaagggacacggcgggacgaggaaacaccaacaccaaaccagcccacacaggaaaa

SEQ ID NO: 233950 - RNA, 74 nt, Homo sapiens
gaacagagaagcaacccaacagacaggcaaaagaaacagggaagacaaaggcacaggaagacaaaaggcacacc

SEQ ID NO: 233951 - RNA, 81 nt, Homo sapiens
gcccagcaccccgagaaccgcaggagccagagcgcgccccagaccaccggcagggaacagccgagcagaccgaggaggccc

SEQ ID NO: 233952 - RNA, 72 nt, Homo sapiens
gaaaagaggcggaagaaagggacagaagcaacgaaacccaccagagaaggcgcggccacccaggacccgggg

SEQ ID NO: 233953 - RNA, 69 nt, Homo sapiens
gacggcacggcgaaagccgcccccaagagaacacaacagacgccaggcccccaaacaaccgagacacgc

SEQ ID NO: 233954 - RNA, 77 nt, Homo sapiens
gggggcccggaggaccggcagccggggggaagacaaggagggacccagcccacaagaacccgacagccccggcagcc

SEQ ID NO: 233955 - RNA, 55 nt, Homo sapiens
gcccccgccgcacggaaaaccgagagcggcccaggaggaacaaccagcccacccg

SEQ ID NO: 233956 - RNA, 42 nt, Homo sapiens
cccaggccgccggccccacaggaacgacaaaccccaccccgg

SEQ ID NO: 233957 - RNA, 81 nt, Homo sapiens
aggcgccccaggcaccacaggacgcccagagaggagccacaaaaccgacaggagggccgccgaaggcagacgcgaccccca

SEQ ID NO: 233958 - RNA, 39 nt, Homo sapiens
cggaagagcgccccaggagaaacaaaccccgagagaaac

SEQ ID NO: 233959 - RNA, 75 nt, Homo sapiens
cgccgaggccacggaggccagcgcacgaaaaggcaaaacgacaagggccacacccccggagaccaagagaagaaa

SEQ ID NO: 233960 - RNA, 78 nt, Homo sapiens
cccggcccgccccgagcccggaaacggcaaaaggcgccccacaaagaggaaaaccaaaggaccaggagaaaaggggag

SEQ ID NO: 233961 - RNA, 85 nt, Homo sapiens
gggcggccccggaagcccccacgggccaccgacccgcaggggcagcaacggcccccgggggaagcagaccacggaaggagggaga

SEQ ID NO: 233962 - RNA, 82 nt, Homo sapiens
agagaagaacagcacaggacagacaagcagaccggaagaccgacggaagaccacaccccgagggagcccaggacaccacgag

SEQ ID NO: 233963 - RNA, 81 nt, Homo sapiens
acagccacagacggaacaagcagcaggagagccgagagccaaggcggacaaagcaccacccagcacaacagcaacagaggg

SEQ ID NO: 233964 - RNA, 102 nt, Homo sapiens
aagcagcacgggacccagcccaggccgcacggacggggggggggggagagccacccagcagggaggggaaggggagccagggaacaagggaaccggcagagc

SEQ ID NO: 233965 - RNA, 50 nt, Homo sapiens
cgacaccgacagaaccaaaccaccaaaggaggaagaagacagaagagccc

SEQ ID NO: 233966 - RNA, 38 nt, Homo sapiens
aggaagaaggaaggaggcgaaccacccgagggaccagc

SEQ ID NO: 233967 - RNA, 77 nt, Homo sapiens
ggagaaccggcacagcccccgggcgcagaagagcaagaccgaagacaacaaaagaaaacaaagcacggaaacaagag

SEQ ID NO: 233968 - RNA, 83 nt, Homo sapiens
gagagaggaacccaagacaccaccagcacagaagcaagaccaaaaccaagaggcagacccaaaaggaaaacagcccgcccaga

SEQ ID NO: 233969 - RNA, 74 nt, Homo sapiens
agggacggcgacggccacgggcaggccggaaggggggcgacgcggaaggcacaacacggcaacacagaaacaag

SEQ ID NO: 233970 - RNA, 60 nt, Homo sapiens
ggcaggcgaagggaagaagaaacagaggaaggcacagaagaagaaaaagcggggaagggg

SEQ ID NO: 233971 - RNA, 56 nt, Homo sapiens
gaaagggacccgacacgagaagaccagacagaaagccagcggaggagccgagacgg

SEQ ID NO: 233972 - RNA, 79 nt, Homo sapiens
agagacggcggcggaaaaccccaaaaggacaaagaaggccaagagaggccaacagaggaacaaggcccgcagaacccaa

SEQ ID NO: 233973 - RNA, 86 nt, Homo sapiens
agagcggcccccagcaccacagcccgcagccccgccagccacccccaggcgcagggggcccccgcccgaccgacaggccagagcgg

SEQ ID NO: 233974 - RNA, 79 nt, Homo sapiens
agaagagaggagggagcacagcggaacaaccacagccacccaggacccaggaaaggagaagcagggcccaacaagagag

SEQ ID NO: 233975 - RNA, 83 nt, Homo sapiens
ggagaggacagcagggaggcgggacgcggacccgggccagccgccggaacccgaacgggcgggcggccgcggccgggccaggg

SEQ ID NO: 233976 - RNA, 65 nt, Homo sapiens
ccaaggccaggaacccaggccagcaggcgcagcacagaaaccacccggcagaaaagcaaccaccg

SEQ ID NO: 233977 - RNA, 56 nt, Homo sapiens
ccacacagggagcccccaagacaggcagccagcgaccccagaccgaaggcaggcac

SEQ ID NO: 233978 - RNA, 78 nt, Homo sapiens
acagagaagagccaaacaaccaaggccaaggacagcgagagagagagcgcgcaccgggaccgagaccgccaggagagc

SEQ ID NO: 233979 - RNA, 71 nt, Homo sapiens
caccgacaggaacacaaaacgcggcccgcgcaaacagggacgacacaaagcgcgcgaccggccccaacgca

SEQ ID NO: 233980 - RNA, 78 nt, Homo sapiens
gaacgcgcgcacccaccgggcccgcgggccgccccaccccacagaggcagaaacggggacacaagcgaaaggcaacgg

SEQ ID NO: 233981 - RNA, 91 nt, Homo sapiens
gggagcgcggaacagcaggcccgagcccaccgcgccgggccccggacgccgcgcggaaaagacgggaacaaaggagaaagggcacgaagag

SEQ ID NO: 233982 - RNA, 75 nt, Homo sapiens
agggggaaaaaggaaggccgccggacagcgcagagccaagacggagaaacaaggggaaaagggaaaccgacccac

SEQ ID NO: 233983 - RNA, 52 nt, Homo sapiens
ccgggaacccccacgcggccagcgaaaacgcccaggagaagcagagaacccc

SEQ ID NO: 233984 - RNA, 40 nt, Homo sapiens
cccgacagccgcagaacacgccccagagcacacagcaggc

SEQ ID NO: 233985 - RNA, 45 nt, Homo sapiens
cccgagcagccgccgccaggcaagacagggccaaagcggcaggag

SEQ ID NO: 233986 - RNA, 75 nt, Homo sapiens
gggccagcaaaggaacacagacacaagcagaaagcgccagcaggaagggaccaaagcacagaaggccccgccaca

SEQ ID NO: 233987 - RNA, 95 nt, Homo sapiens
ccagacgagcggagaaggcgcgcgcaggcaggcggaggaggcccccacagggcaggaagccgccgcccagccaggacggggaggagcagcagcca

SEQ ID NO: 233988 - RNA, 39 nt, Homo sapiens
ggaaaacccgacacccgggcggcgccagcgcgcgccccc

SEQ ID NO: 233989 - RNA, 70 nt, Homo sapiens
cggcggaccgggagacaccccgcacacacacccaaggaccaggaccccagcccacacgaagggacaccaa

SEQ ID NO: 233990 - RNA, 52 nt, Homo sapiens
ccaaagcagcacgcgaggaggaaaggcaccccaccagagcgcgggcccaggc

SEQ ID NO: 233991 - RNA, 66 nt, Homo sapiens
ggaaccgaagagcaaggaaaagaaaagggggaaggaaacccgcgaccgccagagcggaacgacccc

SEQ ID NO: 233992 - RNA, 40 nt, Homo sapiens
gggaggaggggcaggcccggcggaaacccaccagagaagg

SEQ ID NO: 233993 - RNA, 73 nt, Homo sapiens
agcgaacgcaccaaccaaaccaggaaagaaggaaaagggcagcccaaggaccaagggagaagagacccaggag

SEQ ID NO: 233994 - RNA, 85 nt, Homo sapiens
aaaacgccaggcggaccagaaggccagcaaagggaagacagaggaagaggaagacaaaccggcacgaaagaccagagaaacaaaa

SEQ ID NO: 233995 - RNA, 73 nt, Homo sapiens
gccagccacccacgccagcagagaggagcgcagcgcccaagcggagaggggccgaccagccgcaacccgcccc

SEQ ID NO: 233996 - RNA, 84 nt, Homo sapiens
gaggggccaaccagcgaagagcgacaagccgcggcagccgcggaccaccgccgccaggcggagcgacaaaagagaagaccagaa

SEQ ID NO: 233997 - RNA, 74 nt, Homo sapiens
agcacacaggaaaggaaccggaaaacaccacccaaaaacaacccacaggagggccagaggacaaagcacggcgg

SEQ ID NO: 233998 - RNA, 75 nt, Homo sapiens
gacgacaagcagacagagagcgaaggaacgaaccaacagaaaaccccaaaccgaggggaggaggagccgacaccg

SEQ ID NO: 233999 - RNA, 75 nt, Homo sapiens
ccacgacaagcacagggaaggccccaagccagcggaccgcgagaagacgacgccagggggcaggcccccgaacag

SEQ ID NO: 234000 - RNA, 59 nt, Homo sapiens
gacgaacccagcgcagagaggaagaagcaggaaccaggcccggggcgcaaacgcacgcc

SEQ ID NO: 234001 - RNA, 53 nt, Homo sapiens
cccgagagcgggaacagaagcgcgcaagacgcaacacaaacgagaaagacagc

SEQ ID NO: 234002 - RNA, 75 nt, Homo sapiens
gaacaccaggcgggggagcaagagacgaggaagaaccaaacaagaagacccagagagagacccgcaggaccccac

SEQ ID NO: 234003 - RNA, 67 nt, Homo sapiens
gacagcaaagggacaaacaccgagaaagggccacaccaggagggaaaaagcacaagaaggaaaaaag

SEQ ID NO: 234004 - RNA, 79 nt, Homo sapiens
ccagaaggaacgacaaacaggaccgccaaacccaaaccggggcgacggagcggccaagagcgggacagcagaggacaag

SEQ ID NO: 234005 - RNA, 79 nt, Homo sapiens
ggacggcggggcggcgggcgacggcaccgcgaacacaaaggagaagacagcgcgcagaagaaggacaggagggggggcg

SEQ ID NO: 234006 - RNA, 105 nt, Homo sapiens
cccggcacgccggcgcgagcacagaggcgaacgggagccaaagggccccggggcccccacagagagcacacaaacaaagcgaaaccacggaagaaaagggcaaag

SEQ ID NO: 234007 - RNA, 58 nt, Homo sapiens
aggcaaggagaaggaacaaaccaccaggagacaaaaccgcagaacaagaagggcaacc

SEQ ID NO: 234008 - RNA, 80 nt, Homo sapiens
cagccggggaggacacgcaccaagccgagagagagcgagagccgccagacccacggacgcgcacgacacgaccccaggcc

SEQ ID NO: 234009 - RNA, 79 nt, Homo sapiens
gaaggccagcgcacgggggggcgaccagggacagagcgcagcaaaaaagcaaacaaaggcacaccaacggcaacggaga

SEQ ID NO: 234010 - RNA, 91 nt, Homo sapiens
agaagcgggcggcgcgggggagagccggaagcccgaccccaggagccagcccacaaccgaaccaacgccaccaagaagagcgggcggagag

SEQ ID NO: 234011 - RNA, 96 nt, Homo sapiens
cggccaaaaaccaaaccgcagccagccagggaagaaggcagcccaccaggcaaaggaagaccgcaggaaagcaggaaggcaagaaagccaaggacg

SEQ ID NO: 234012 - RNA, 79 nt, Homo sapiens
ggagcgccggaggcggccgcaccgggagaagacagaggagccagaccaagagacagcacaggcgagcgagcagagacac

SEQ ID NO: 234013 - RNA, 76 nt, Homo sapiens
aaagcgaacaaaagaggaaaaccaaccgcacccgcgaacgaggaagcccacccaggcaaccagacagcacacagca

SEQ ID NO: 234014 - RNA, 73 nt, Homo sapiens
ccgccgggccccacgaccaaacagccaggccccaggccagcagagaggccagagccccaagcccccgcacacc

SEQ ID NO: 234015 - RNA, 62 nt, Homo sapiens
agcggaacagccacagcagcccccaaggagcgcaagggccaaaaagagagaaaaaccagaaa

SEQ ID NO: 234016 - RNA, 72 nt, Homo sapiens
gagagccaacgggcgagaacaagcaaaaccagcaacaagaaccacaagcagcaaggcgccaagacgagagcc

SEQ ID NO: 234017 - RNA, 77 nt, Homo sapiens
aacaggagcgaagcccagcgggccggacggggcggggggaacggccggcgcggaagaggccggcggcgggacggccc

SEQ ID NO: 234018 - RNA, 69 nt, Homo sapiens
aaggagagaggaccacccagaggagcaacgaaaggcaggagagcgaaagagagcggaaaaacgaccaaa

SEQ ID NO: 234019 - RNA, 81 nt, Homo sapiens
cccgcccccgccgcccggagaggccgcagccagaagccaaccgcccgagagcgagccggagcgcacccacgaccgcgggga

SEQ ID NO: 234020 - RNA, 76 nt, Homo sapiens
aggccaggcgaggagagcgaacaaccccagaagagggacgaacaagagagacgaagacagacaacaacacacccag

SEQ ID NO: 234021 - RNA, 79 nt, Homo sapiens
ccacacaacgggcacccccgacgccccacccgcccaagacccagcagaagacagcagcccagagaggcagcacagcagg

SEQ ID NO: 234022 - RNA, 56 nt, Homo sapiens
cggccgcgcacccccggccggaggcaccagcaccagaggacaagacaaagggagca

SEQ ID NO: 234023 - RNA, 73 nt, Homo sapiens
caaggaaaaagcacagggaaccaaacacccccagaaagggacagggccacgggggcaaagagaacacccaggc

SEQ ID NO: 234024 - RNA, 75 nt, Homo sapiens
ggagccccaagccggcggccaagacggagccgacgccagaccaaaacgaagaagacgagccaaacccaaaaagga

SEQ ID NO: 234025 - RNA, 71 nt, Homo sapiens
cgggggcagccgcagaggcgcgcggagaagcggaggagaccaaggaggccaccaccacagaaggagcggca

SEQ ID NO: 234026 - RNA, 83 nt, Homo sapiens
cgcgggcgcgcgcgggggccgccgccgcggccgcgcgggcgccggcgcggcggccggccgggagggggcccgaaggcaccgca

SEQ ID NO: 234027 - RNA, 76 nt, Homo sapiens
agagaacaaaaacaccaaggcacgcaagagccgagcgaaaaggcgaagggagcaagaggcagacagaccgagacgg

SEQ ID NO: 234028 - RNA, 75 nt, Homo sapiens
cgcaacccgcgcccgccggagagagaaagcgggaccgaggaagccgacaggaccgggggcacggaggggaagcac

SEQ ID NO: 234029 - RNA, 102 nt, Homo sapiens
gcgccgccaccagccagccccaccaaggcggccaggagcccacccgccgagcagcaggcgcaggaggacgcggcacaccaagagacacccacgccacccggg

SEQ ID NO: 234030 - RNA, 67 nt, Homo sapiens
gaacagaaggagcggcggacacacagacccccaccaagcaggggaccgcccaccccaccagggacag

SEQ ID NO: 234031 - RNA, 79 nt, Homo sapiens
gcagacggacaaaaaagaacaggagaagcgaacacgcacagaagaagcaacaagaagaagaaacggcacacgcaaccaa

SEQ ID NO: 234032 - RNA, 59 nt, Homo sapiens
gagcagcaggcacagcacgggcagagccaggacagaggccaagcaagaaaaaaccaccc

SEQ ID NO: 234033 - RNA, 49 nt, Homo sapiens
cgaggacacccgcgcacaggacagagaagaggacggagcgaggagggga

SEQ ID NO: 234034 - RNA, 107 nt, Homo sapiens
ccagacacacggaaccgagaggagaaccacacaccagaagacaacaccaagccaccgaggaaggggaggagcacagaacgccaggaccaaaacagggagaaacacag

SEQ ID NO: 234035 - RNA, 70 nt, Homo sapiens
gaaggaccaagaaccagggagggaacaagcgaagagagccggagagcccacaacaacagaagaggcagca

SEQ ID NO: 234036 - RNA, 79 nt, Homo sapiens
cacagggacagccgcaaccggaccggcgaaaccaccaagaaagaaaaaggagaagaagaaagccccgccccaacaaacc

SEQ ID NO: 234037 - RNA, 80 nt, Homo sapiens
ccggggcaaccacccgggagaacagccccgggagagcgagacagaaccagaaagaggcgcacgccccagaaaccaaacac

SEQ ID NO: 234038 - RNA, 78 nt, Homo sapiens
gcgggcgcgcccgccagcgcccggagaacgcaaacccgaacaaacagaacacaaggacccccacggagagaagagacc

SEQ ID NO: 234039 - RNA, 75 nt, Homo sapiens
gcagagccaagagaacaggcaacacagggacgcccagaaggaacgcagagccgaaaaccaaccccggaccacacg

SEQ ID NO: 234040 - RNA, 68 nt, Homo sapiens
aggaagccgaaggcagaagagaggacggggacgggccccaggacgaggaagacaaggccagccacgga

SEQ ID NO: 234041 - RNA, 78 nt, Homo sapiens
ggcacggacggggaaggggcccacccccgccaggcgccggaacagagcagcgcagacccaagacccggaagcggccag

SEQ ID NO: 234042 - RNA, 82 nt, Homo sapiens
caggcgaacccgcggcgcaaaacggacaacacaccgcccaaccgggacaaagaaaggaaaagagaagaaccggagccggaga

SEQ ID NO: 234043 - RNA, 84 nt, Homo sapiens
gccgagccgccaccgcaggcgaggacggcggaccccgcggcgggaggagccgccccgagcaaaagggcagaaaagcagggcaag

SEQ ID NO: 234044 - RNA, 78 nt, Homo sapiens
ccgcgcgcgccgcgccgcgcccgaggcccagcggccaccagaggggaggccccacccgcacagaggcagggccacagg

SEQ ID NO: 234045 - RNA, 76 nt, Homo sapiens
ccaccagccaggcccgagcgccaggaggaggaagaccgaccgccgccgcgcaccgcccaccaaagccggcacgcaa

SEQ ID NO: 234046 - RNA, 70 nt, Homo sapiens
gagcaccccccaggaaagccaccacgccacacaccaaacggcaccaggcgaggccccgcgccccagcgcc

SEQ ID NO: 234047 - RNA, 53 nt, Homo sapiens
acaccgaagccagaagacggaaaaaacagcccgggaggaccaaaagacacagc

SEQ ID NO: 234048 - RNA, 74 nt, Homo sapiens
cacggaacacccgcgcccggcccccacacgccgcgggagggcccaaaggggcaccggcccggagagggccacca

SEQ ID NO: 234049 - RNA, 55 nt, Homo sapiens
cgccgcgagcacaccgcagaaccagggcgggaaaaagccaaagcaggccgccaca

SEQ ID NO: 234050 - RNA, 68 nt, Homo sapiens
cacagaacgccaggaccaaaacagggagaaacacagccagaagggagaaaagaagcagcccacgaacc

SEQ ID NO: 234051 - RNA, 73 nt, Homo sapiens
cacaagcaaggcaggaaaacaaaagaggaaggaacggaaaaggcgaggcgaagagggagagaacaaggaagac

SEQ ID NO: 234052 - RNA, 80 nt, Homo sapiens
cgagacgggcggagaggagaagagggcaaaacggcaaaggcagagaccaaaccaacccaaaccggggggcggcgggagcg

SEQ ID NO: 234053 - RNA, 53 nt, Homo sapiens
aggaccaagaaccaggccggacacacagcagcggacgacgggagcagacggac

SEQ ID NO: 234054 - RNA, 69 nt, Homo sapiens
aaaaagcacaacccaaccgggagaggagcagagacagcacggaccgccggcaccggggagacaacgggc

SEQ ID NO: 234055 - RNA, 81 nt, Homo sapiens
cggcccaccccccaaggggccaggagaggaaacgagaacagcagcaaaaaccagaagaagaaagaaaaagacgccaggaag

SEQ ID NO: 234056 - RNA, 62 nt, Homo sapiens
gccaagggccaaggcaagagcgagagaggaacgaggggcacagaaaccagaaaaacggagcg

SEQ ID NO: 234057 - RNA, 40 nt, Homo sapiens
ccacaaggcaggcagaggggcagaaacgccaccccggaaa

SEQ ID NO: 234058 - RNA, 76 nt, Homo sapiens
gcgcgccgcgcccggaccccagagcccggaggcagaggcgccacaccacgcaaagaggaacccgccgccggcgccc

SEQ ID NO: 234059 - RNA, 60 nt, Homo sapiens
gacccggaaggacggcgaggaccagcaggcagacggagagggaagcccaagggcagaagg

SEQ ID NO: 234060 - RNA, 74 nt, Homo sapiens
agggccaccccacagacggcccggcacgcgcggcgcacagccgcaggccacgggggcagcgccgggccccgccc

SEQ ID NO: 234061 - RNA, 76 nt, Homo sapiens
gcgaaggccaagccgcagggcggagaaggaacagggagagaaacaacgggaacagaaaggagcgggcaagggaagg

SEQ ID NO: 234062 - RNA, 79 nt, Homo sapiens
ggaagaggccggccaacacaaagccccagcccaacaggaccgccgggggaccggaacggggaagccagcccgagggccg

SEQ ID NO: 234063 - RNA, 88 nt, Homo sapiens
gaggcggaggcgacgaggaggcggacccccggcgcaggacagcccagagcaagcacacggaggcccgggagccagaccgggagcccgc

SEQ ID NO: 234064 - RNA, 74 nt, Homo sapiens
cagccggacccggaaaggacggagcaggacacaaggaaacagacacgcagcggccgaggcaggggaagagagcg

SEQ ID NO: 234065 - RNA, 75 nt, Homo sapiens
aggagggccgcaaggacaagagaccagggaacacagaggaacccgggcgcggaggcagcagggcggagaaggcac

SEQ ID NO: 234066 - RNA, 63 nt, Homo sapiens
caacaccgaagaacgcccggaaacagaaaacaggggaagaggaaacaagcccaggcgacggag

SEQ ID NO: 234067 - RNA, 80 nt, Homo sapiens
gcgacggaagcggcaaagccacgggcggcccgaggccccaccccacaccagaccagaaagaggggacgaagccccaaggc

SEQ ID NO: 234068 - RNA, 76 nt, Homo sapiens
aggggagagccacacaccccgaccacgcggccgagagggggggccccagcccggccgaacgggcgcacgacacaaa

SEQ ID NO: 234069 - RNA, 74 nt, Homo sapiens
gcagggggcaggggcacggggggccgccgcaggaacagaggccgggggccagccagccgagcgccacccaaagc

SEQ ID NO: 234070 - RNA, 63 nt, Homo sapiens
aacccgcaggggcccacccgcacgacccagcaaggcaacaaaaggaccacagagacgaagcag

SEQ ID NO: 234071 - RNA, 59 nt, Homo sapiens
ccggaccacaaggcaagagcagccgcggagaaccgaaccaacagccagccaaagccagg

SEQ ID NO: 234072 - RNA, 79 nt, Homo sapiens
gaaaggagggcggcgcgccgagcgccgggccgcccgcggcagagcagcagagcgccgcccacaagagacaaagaaaagg

SEQ ID NO: 234073 - RNA, 81 nt, Homo sapiens
cgggcagaggccccggagagggcacaggaggaggacaagcagacggcccaggcgcgcaaaaagagaaccgccagcagagag

SEQ ID NO: 234074 - RNA, 69 nt, Homo sapiens
aaagggccaaagaagggagaggccacacaccacagcaaccaaggccacgacggcaagcaacgagcgaag

SEQ ID NO: 234075 - RNA, 56 nt, Homo sapiens
gacaaggccccacacacggaaacgggagccaaggaaacaggaacacgaaagaggaa

SEQ ID NO: 234076 - RNA, 73 nt, Homo sapiens
agaacgggacaacaaaagagccacccaagcggagcagccagcagaggcgcgccggagggaggaacacccagga

SEQ ID NO: 234077 - RNA, 74 nt, Homo sapiens
aacagaaccgccaggagcggcagacggcaggccagcgccacaccgacagagaacccaggccaacacacagacag

SEQ ID NO: 234078 - RNA, 74 nt, Homo sapiens
gaaaggcagcagaagccgcagccgcgggcaccaggacacagaccacgccaccgggcaagagaaggagagaccgc

SEQ ID NO: 234079 - RNA, 55 nt, Homo sapiens
ccccaacccgggcgaagcgaaaggccgcgggagagcgggggcgggaggcgggccc

SEQ ID NO: 234080 - RNA, 81 nt, Homo sapiens
gacccgcggagacagacaagacaagaccggcggggaagcggagcccagaaacaagagcaccacagcacaggaaacagacaa

SEQ ID NO: 234081 - RNA, 70 nt, Homo sapiens
acagcaacaccgcaagcggagcagccccaccagacacccagcgcaccgggccccaagagagggacccggg

SEQ ID NO: 234082 - RNA, 93 nt, Homo sapiens
ccggcgaaaaacacagccgggagacagaggaacagagggggagcagccgggaacccaggaaacaaagcagaaggcagcggggcaaccaacacg

SEQ ID NO: 234083 - RNA, 79 nt, Homo sapiens
ccggaaccgagccccgacaggcagacgacccaggagaaagcacggaaaaaaaacccaaagagaagccccaacgggaagc

SEQ ID NO: 234084 - RNA, 70 nt, Homo sapiens
cacaccggggaccgcggaagggaaggaaaaaccgagggaaccaccaggcagagcaacagggacacaagca

SEQ ID NO: 234085 - RNA, 80 nt, Homo sapiens
ccccagcacaccgaggaggcaggaccgcacgagacagacgcgaagcaaagcgccacccagaagacgacagcccagcaacc

SEQ ID NO: 234086 - RNA, 60 nt, Homo sapiens
ggcgcggagcgccgccagaggagaagcgaacggcacggaccccgaggaggacgcaacgcc

SEQ ID NO: 234087 - RNA, 69 nt, Homo sapiens
aacgcgacgcgagagaaggacccacggcgcgcgaagacaccggagacaggcgcgagaagacacccgcaa

SEQ ID NO: 234088 - RNA, 79 nt, Homo sapiens
ggaggaaacagcaagggaacaacaacaggacgccacaggggcgccccggggagaggcgggaacgacgccaggcccaccg

SEQ ID NO: 234089 - RNA, 88 nt, Homo sapiens
cagcggcaagacaagcacggaaccgcccgagacgacaccagcagccgcaacggcacacacgcccgccaccaccccagccgggccccgg

SEQ ID NO: 234090 - RNA, 74 nt, Homo sapiens
aagagagcagccgagcaagaaaggagagccgacccacggaagaaaacaggagccgcaccgcaagccgacgcgcg

SEQ ID NO: 234091 - RNA, 80 nt, Homo sapiens
acccacccccgggggaaaagaacgagagaaagccaacccagcgaaggaacaagcaaaccccaagcggcaagagaccgaca

SEQ ID NO: 234092 - RNA, 68 nt, Homo sapiens
ccagaaaaagaaggggagaagacaacgcgccaaccaagacagccacccgggaaaggacaccgagagaa

SEQ ID NO: 234093 - RNA, 63 nt, Homo sapiens
acagaagcaggagcgggcgcaggaggagcaacaaggggacaacgaaggaacaccccgcagggc

SEQ ID NO: 234094 - RNA, 78 nt, Homo sapiens
ccgccccacagccacacagccggcgccccaaccggccagcaggcgccgggaaaaccagaacaacccccccagagaagc

SEQ ID NO: 234095 - RNA, 71 nt, Homo sapiens
gccaccaaccccagcggggaaaacaaagggaagccggagcgagaacaagagacacccgacggcagaagaag

SEQ ID NO: 234096 - RNA, 86 nt, Homo sapiens
ccgacaagcggaccaagccagacccaaggccggggcgcagcccaggcaggccgcccggcagcaggaagaacggacaggaaagcgcc

SEQ ID NO: 234097 - RNA, 50 nt, Homo sapiens
gaacgcggccccagccacaccaagcagagagcgcgcacaccgaaccagag

SEQ ID NO: 234098 - RNA, 67 nt, Homo sapiens
gccgcggcgcgcgccagcgcgcccacagaaacagagggaggaccaagccacagggggcccaagccca

SEQ ID NO: 234099 - RNA, 79 nt, Homo sapiens
agcaccagaacggagcagggaacacgaccccaaggggccccacgaaggacggccagcgcggcagggaggagagacagaa

SEQ ID NO: 234100 - RNA, 80 nt, Homo sapiens
agaagaagagccacaaacaaagaagaaacaccaaagcggccaagaaaaccgaacacaggcaggccaaagcagcgcgggag

SEQ ID NO: 234101 - RNA, 60 nt, Homo sapiens
aggcccgagccacaccgagcaacggccacgcccagaggaagccgaaaacacccgcaacca

SEQ ID NO: 234102 - RNA, 78 nt, Homo sapiens
cagccacgcagaagagacaaggaccacagccgagcgagagcaggaagacgggcagccgccgcaaagggacgacgaagg

SEQ ID NO: 234103 - RNA, 78 nt, Homo sapiens
ccaggcgccgcggggagggcgggcccgggcagccgcgggcgcaaagacgcaggaaggcccacgaagaggacgccaggg

SEQ ID NO: 234104 - RNA, 76 nt, Homo sapiens
cggaccgcaggacgacagaccgagggaggacaccggaccccggacgcgggaaagacagcgaacccacccaacacgg

SEQ ID NO: 234105 - RNA, 72 nt, Homo sapiens
ccgaagcaccacacaagaggagagagaaaaggcgagaaagaaaaagggagcggcaaagaggcagacccagag

SEQ ID NO: 234106 - RNA, 73 nt, Homo sapiens
gagcagaagggacgagcgcggaaagccagcccgacaccggacaacaacgccagcacgcagaaggcaagcaagc

SEQ ID NO: 234107 - RNA, 38 nt, Homo sapiens
aaaacccccgggaccaggcacagcgccgaggcccagag

SEQ ID NO: 234108 - RNA, 77 nt, Homo sapiens
cacggggaccgcgcccgcaggaccccggaggaaaagcggaagcggcagcggcgaacgccggaacggaccaacaggag

SEQ ID NO: 234109 - RNA, 79 nt, Homo sapiens
cggacccaccccgcgccggggccacggacacaacgaggccacgggagacgcgaagggacccaggaggaaaccagcagcc

SEQ ID NO: 234110 - RNA, 71 nt, Homo sapiens
acaaaggcgccgcagcaccccccggacccagccccggggaaaagagcccagagcacaagcagaaaaaggaa

SEQ ID NO: 234111 - RNA, 60 nt, Homo sapiens
gaaaaagaacccggagaaacgaagcgggacggagccagaaaaaggcacagcccagggccc

SEQ ID NO: 234112 - RNA, 73 nt, Homo sapiens
gggcgggcgacccaccgccggccacagcgcagaaggagaaaagcccaggaccacaagccagaaaacacgcgga

SEQ ID NO: 234113 - RNA, 75 nt, Homo sapiens
cggccggcgggagacgcccccgccgggaccggcacccgaaccggccgccgggggagaagcagaccgcaccaggcg

SEQ ID NO: 234114 - RNA, 76 nt, Homo sapiens
cgcaaggaagaacaggaaccagcagcaaagaaggcacggaaagagaggcaagagggcagaagaaagaaaggaaaga

SEQ ID NO: 234115 - RNA, 87 nt, Homo sapiens
cagagcgacagcggcgagcagaacacggcgagcgggaccagccaccagccgaagcaaagaccccagaagccgccagaaacgcaagga

SEQ ID NO: 234116 - RNA, 75 nt, Homo sapiens
gaccgagacgggcggagaggagaagggggagaggcaccagcaacagaccaaccgcagcaagcacagagacaggaa

SEQ ID NO: 234117 - RNA, 77 nt, Homo sapiens
aacagaaaacacgggaaacagccaggagagccagagagccaacagaaggacagaaaacgggccccagacacaagccc

SEQ ID NO: 234118 - RNA, 86 nt, Homo sapiens
cgcccagccgggccccaagcccagcgggaccgagccagggaggcgaggcccgcaccggaaggaaccccaggagcaaaaagaaaggg

SEQ ID NO: 234119 - RNA, 56 nt, Homo sapiens
agagcaaggaggccccagcggaccgaacaggagacacgaacggagagcagccaacg

SEQ ID NO: 234120 - RNA, 76 nt, Homo sapiens
gacacacacccgacaagagacagaaggacagagaagaacccagaaaaaagcaaggccgaaaaacgagagaggagga

SEQ ID NO: 234121 - RNA, 65 nt, Homo sapiens
aggagcagaggcagggaaagaaaggggaaaccacgggaagacaacaaggaacgagggaaagcacg

SEQ ID NO: 234122 - RNA, 49 nt, Homo sapiens
aagccgacaaccccagaaacaggaacaggagggaagagcacaacgacgg

SEQ ID NO: 234123 - RNA, 55 nt, Homo sapiens
acggaggcgccggcccaggaaggacagagcgggagccaccagcgccaaagggaag

SEQ ID NO: 234124 - RNA, 72 nt, Homo sapiens
gcgggagaaccacgaggagaggggaccgacagcaggccaaagacaagccccaagcagcccgccagcccagga

SEQ ID NO: 234125 - RNA, 74 nt, Homo sapiens
gggggaaaaccggagaagccccacccaaaggcgccaggcgcaacaccagcaaaacaaggaaaaaagaagaaggg

SEQ ID NO: 234126 - RNA, 71 nt, Homo sapiens
cagcccaaccagagacccacagcagacccccaagggcgaaacagaagggagggcaagcagaaagcagagga

SEQ ID NO: 234127 - RNA, 79 nt, Homo sapiens
ggccgcggcgcccggggaaagccgggccccgagggcggaccgaggggaggagacaacaggagccaccggacagggacga

SEQ ID NO: 234128 - RNA, 89 nt, Homo sapiens
gccagagacagccacaaagggaagcaagagaaaaagaacaacgcgggcccagccccggaaggcaggaaggggacggagacacgacgagg

SEQ ID NO: 234129 - RNA, 76 nt, Homo sapiens
ccgaggagccagagcaaggggaacgccacggacgggccggagcgggcagggcacacaaccgggcagcggacacgga

SEQ ID NO: 234130 - RNA, 80 nt, Homo sapiens
cacaccgcgagcggcgcagcgagccgcggcccgggcgggcgccggcgcgggagaaggaagccaacaccggagccagaaag

SEQ ID NO: 234131 - RNA, 70 nt, Homo sapiens
cccccccagcggccccggggcgcgggcagccacgcccggaaagggacacaagagccgccgaaaaaagccg

SEQ ID NO: 234132 - RNA, 66 nt, Homo sapiens
cggaaagggcagcgacggaaggacgcgggcagaaaaccaggaccgcccccaaaccccccgaaccga

SEQ ID NO: 234133 - RNA, 71 nt, Homo sapiens
accgaggacacaggggaagaaggaggacaacagaaggagcgacgaaaggaagaagccaggggcgcggggcg

SEQ ID NO: 234134 - RNA, 83 nt, Homo sapiens
ggagagacagggccagacaaacccccaccccaggacccgggcagcagaagccaacggcacgacgggcccccgagagaaccgag

SEQ ID NO: 234135 - RNA, 92 nt, Homo sapiens
cggcgaacgcggagagcacgccagaaggcccgggcacggagggcccccggacccgggagcggacccggggcgggaagcccgaggcggcaacg

SEQ ID NO: 234136 - RNA, 46 nt, Homo sapiens
gacaggacccacggggcagagggggaccaaagagacacgggggagg

SEQ ID NO: 234137 - RNA, 52 nt, Homo sapiens
aaggagggaaagccaaacaacggacaaagaccagggaagaccgggaacgggc

SEQ ID NO: 234138 - RNA, 96 nt, Homo sapiens
ggacggaccgagaccggaccgagagcggaccgagagcgcgaaacgcacgagaagggccagcgagacagaccgaaacccaaagaaaaggagcgcgcc

SEQ ID NO: 234139 - RNA, 70 nt, Homo sapiens
ggaaagcccaagaggagacgacgaccaaaagaccagagcaaacgaaggaagaacccaaaccacaacaagc

SEQ ID NO: 234140 - RNA, 77 nt, Homo sapiens
cccaccgccggcgcgggaaacgggcgaagcgacgagccgcgaggagagaaagccaacccagcgaaggaacaagcaaa

SEQ ID NO: 234141 - RNA, 102 nt, Homo sapiens
ggaccagaggaacaagaaacagcggaccaaacaagagccagaaacgcaaagaaaccagcaggaaaacgcgacgagagaggccccaagccacagaccccggca

SEQ ID NO: 234142 - RNA, 56 nt, Homo sapiens
gggcagcgagaggagccaggagccgccagagagagacaacgggggaccagaaccgg

SEQ ID NO: 234143 - RNA, 65 nt, Homo sapiens
aggggagagaaacagaacccaagccgagcccagagcacccgcaaggcgacggcgccgaggcgcgg

SEQ ID NO: 234144 - RNA, 74 nt, Homo sapiens
gaggcggcccaggagcggcggcgaagaaggaggcaggcacggccgaggagcgccaggccacccaaccagggagg

SEQ ID NO: 234145 - RNA, 80 nt, Homo sapiens
aacacaaagcgcagacgaaaccgccaggcgccgccagaaggaaaaggggcagcgaaagaagggaaggggcagagaagcgc

SEQ ID NO: 234146 - RNA, 84 nt, Homo sapiens
agaagggaaggcgcgaggaggaaaggaggacgagaaacccgaggccgaagggccacggaccccagaagcacaggaggcaggcca

SEQ ID NO: 234147 - RNA, 70 nt, Homo sapiens
ggaggacggccaaaacccacgcgcaccggaaccgaggcccagaaagcgggcaccagcgcaaggaacccag

SEQ ID NO: 234148 - RNA, 75 nt, Homo sapiens
gcaggggcagaagacaaaaagaagacggacagggcacacagaaccgaaaaagagcgggcggcgggaaaccagacc

SEQ ID NO: 234149 - RNA, 60 nt, Homo sapiens
ggagccggacacgaaacgaaaaagagaagcgcagcgaaaagaagagcaccgaggaacggc

SEQ ID NO: 234150 - RNA, 81 nt, Homo sapiens
aggacggccgcggcaccgaaccacaaggaggacgaggccaagacaaggggcgcagagcggggggacaggcgcaagaccgga

SEQ ID NO: 234151 - RNA, 88 nt, Homo sapiens
cgcgccaccggagcggagggcgcacccacgacgcgcacaccaccggcagaccggcgccacagcaccacccgacggcagcgcggccacc

SEQ ID NO: 234152 - RNA, 57 nt, Homo sapiens
ccaaaaccgcccaaacaggaaagcccaggaccaaccagcccacgcagagcggagaag

SEQ ID NO: 234153 - RNA, 69 nt, Homo sapiens
gagccggccgccaacccagaaggagcaacaaggcacggcaacaagcagggagcccgggcgggcccacgg

SEQ ID NO: 234154 - RNA, 80 nt, Homo sapiens
cagcgccggcccccaggcgaagaagcgcagccgcaccggccaaggacggcacagccccaggggcgggccacgcgcggggc

SEQ ID NO: 234155 - RNA, 71 nt, Homo sapiens
ccggccccaagccggaagaaccgcagccgagcggggccggccacaggggacaccagccaggagagaaccag

SEQ ID NO: 234156 - RNA, 64 nt, Homo sapiens
agagagccggaggagcaaaccgagggcgcacggaggggaaaagccagcaaaaagacaaggccac

SEQ ID NO: 234157 - RNA, 75 nt, Homo sapiens
cagagcgacacaacacaggaaggaaccaaacagccccaccaaggcaacagggcacaggggaagaagaaaggaagg

SEQ ID NO: 234158 - RNA, 63 nt, Homo sapiens
ccacccaaggacagggggacagggccgccgcaccccaggaagaagacggcacgggacccccag

SEQ ID NO: 234159 - RNA, 82 nt, Homo sapiens
gggcgaggagaggccggagcggcggcaggaccgcccgcgccacgcgccaagccgcgagccgcaggaggagaagaaggaaacg

SEQ ID NO: 234160 - RNA, 74 nt, Homo sapiens
cccacggagcgcgcggagcgaacccaccccagggcgcaaggcgaccggcccgaggaccgccgcacgaccaaacg

SEQ ID NO: 234161 - RNA, 80 nt, Homo sapiens
aagaagggaaaaagaaggacagaggaaaagggacccagggagcaacgcaggagccacgaacagcgacccccaaggaaaac

SEQ ID NO: 234162 - RNA, 54 nt, Homo sapiens
aacaaaaggagcagcagaagccgaccaggaaagagaagccaccgcgaagcgggg

SEQ ID NO: 234163 - RNA, 65 nt, Homo sapiens
ccagaacggcggaaaagaaggacggggggaagagcaagagggaccagaacagagaagaaagcagg

SEQ ID NO: 234164 - RNA, 43 nt, Homo sapiens
gccgaacccaccgagccagggagccagagacgcgcacgaaacg

SEQ ID NO: 234165 - RNA, 75 nt, Homo sapiens
gccacccagggggacacagcggaaaacacggaggagaaggggcaggcagggcccagcaggacgcggaaacacccc

SEQ ID NO: 234166 - RNA, 60 nt, Homo sapiens
aggacacaagcccagcgggaccagacaccgcggaagcgaagccgaaaaccagacaagcca

SEQ ID NO: 234167 - RNA, 85 nt, Homo sapiens
gcagagacaccaggacagaaaagacaggcgccaggagcacagaagagcgaggaggagcccaggcgaggaagagacaagcaagaga

SEQ ID NO: 234168 - RNA, 76 nt, Homo sapiens
gaggccccagcgcagcagagcgccaagacggaaggcgccgaaaaccgaccgacccgggaggccaccacgccgggac

SEQ ID NO: 234169 - RNA, 46 nt, Homo sapiens
aggcccgcggggccaggagcgagacgacgggaccgaaggaccccgc

SEQ ID NO: 234170 - RNA, 77 nt, Homo sapiens
cgaaccggagagagccaaagaccaaggaaagaaagaagaggccgaaagcagcgaaacaacgaaggccgagaaaggcc

SEQ ID NO: 234171 - RNA, 67 nt, Homo sapiens
gcacggaccgggaagagaaaagaggccaaagagcacagggacagaaaaacagcgcagacgagccgca

SEQ ID NO: 234172 - RNA, 75 nt, Homo sapiens
aaaccaaacacagaacgcaggacagaagaggcggaacaacaccaacaccacacaccaggaccaagaggcacggca

SEQ ID NO: 234173 - RNA, 83 nt, Homo sapiens
gcggggggcagcaggaggagggcggccggcgcagcccgaccagccaagagccggcggcagacgaggcccggccacaggagggg

SEQ ID NO: 234174 - RNA, 72 nt, Homo sapiens
ccgagagccgcccgggccagcggccgcgcacccccggccggaggcaccagcagcccggagagggaaagaagc

SEQ ID NO: 234175 - RNA, 78 nt, Homo sapiens
cgggagggcccgggggacgacggagagaccaggagcaagaaaaggccaggaaagagaagagcccaaggcccagacggc

SEQ ID NO: 234176 - RNA, 78 nt, Homo sapiens
caaaggaagcgcgaacagcagcgcaggacagcccagagcaagcacacggaggcccgggagccagaccgggagcccgcc

SEQ ID NO: 234177 - RNA, 76 nt, Homo sapiens
cagaaaaccagaagcacaaggacagagcacccaccacaggagaaaagagaggccgccagcgaaaacacaagagaac

SEQ ID NO: 234178 - RNA, 90 nt, Homo sapiens
aggaaacccccggagaaaggaccagggagcaacaagagcaagcccaaggagccagccagcggcgccgcagccggagcccgccgagaacgg

SEQ ID NO: 234179 - RNA, 81 nt, Homo sapiens
gcagcgagacggccggccgaagcaaaacggaccaaggggccaggcgaagagaaccgcacgcaccaaccccgcaggaggaag

SEQ ID NO: 234180 - RNA, 57 nt, Homo sapiens
caaggcacaacgagccaggaaagaccacagcaagaccacgcccccagccgggggacc

SEQ ID NO: 234181 - RNA, 75 nt, Homo sapiens
cggagagccccggaagacccagggaagagaaggggggccgcccgcccaaggcaggaagaggggccgcaaagaaga

SEQ ID NO: 234182 - RNA, 78 nt, Homo sapiens
agagcgcgcgagcggaccaggagggcacccccgggacgagcaaaccaagcagcgcaagacccaaacgagcggcaccga

SEQ ID NO: 234183 - RNA, 70 nt, Homo sapiens
gacaagaccagccccgacaccccccaagaggaaagggcgaacggagaggccagcgcggaacgagaagccc

SEQ ID NO: 234184 - RNA, 68 nt, Homo sapiens
aaccgacaaaaaacaagagaaccaagcgcaaggggcgacagcaagaaggagccagcacagaggcaaaa

SEQ ID NO: 234185 - RNA, 76 nt, Homo sapiens
cagcccggcccccgggggacaacaaccgaaacgacccaaagagagccggaccgagcacaaggagcgggggacaacg

SEQ ID NO: 234186 - RNA, 80 nt, Homo sapiens
cggcgcggcagcgagcggcggaaccccgcggcgggagcgcggcggggccgcagagaagacaaggagagcgggaaacgaga

SEQ ID NO: 234187 - RNA, 75 nt, Homo sapiens
gggaccgccccagggacccagggaacgggaccggagccagccgcaaagagcgggggggccccacaacaaaagacc

SEQ ID NO: 234188 - RNA, 69 nt, Homo sapiens
aagaaacaaaagacgagccccagaaaagggcgcgggaagcagaccaacgccacgggagccgaagcggga

SEQ ID NO: 234189 - RNA, 69 nt, Homo sapiens
aacggacgaaggcaccggcagaaagggagcagggaggcagacacgcggacgccaagccagcacaaaggg

SEQ ID NO: 234190 - RNA, 63 nt, Homo sapiens
aagcagaccgggaggccgcaggagggacccacagaacacgcagcccccccgcccgagccagag

SEQ ID NO: 234191 - RNA, 66 nt, Homo sapiens
cgaaaggaaaacgacgccaggcaaaaaagaaggaaaaacaccggaagagagaagaagcaaaccggg

SEQ ID NO: 234192 - RNA, 80 nt, Homo sapiens
gccgggcccagcacccgccgccaggcgccgggggccgaacggcccggacacccgcaggacacaaccagagggaagcacgc

SEQ ID NO: 234193 - RNA, 67 nt, Homo sapiens
gaaaaccagaagcacaaggacagagcacccaccacaggagcaccggaaggaggagaagaaccgaacg

SEQ ID NO: 234194 - RNA, 76 nt, Homo sapiens
cgcgccaccaccgggcgccgaggggcgacgaaacaacagccccaacggggcggcagaaggaggcacaaaggaagac

SEQ ID NO: 234195 - RNA, 77 nt, Homo sapiens
cacaagcaacaaaaagaaacagaacacggcacgagcaagggaccgcgagaaaagggacaaaacgggaaaaaccgccc

SEQ ID NO: 234196 - RNA, 72 nt, Homo sapiens
aacgccacggaccaaagcggagagagaggagaaaagggagagaacagcacacagaggcgcaaggggaagaga

SEQ ID NO: 234197 - RNA, 76 nt, Homo sapiens
cccagaccgggcgacccgccgacgccgcgagcgggccgcacgacacaggccgcaacggcgcaaggaggcccgcagc

SEQ ID NO: 234198 - RNA, 80 nt, Homo sapiens
ggagccccgcgccagcgacagcaagggggcccacgagaagagcaggcgacgggggagagggagacagcggcgcaaagaag

SEQ ID NO: 234199 - RNA, 80 nt, Homo sapiens
cggcccagcccgccagcaggggggaccgccgggcaaggggggcacagggagggaggcccgcccccccccacccccggagc

SEQ ID NO: 234200 - RNA, 68 nt, Homo sapiens
agcagccaaacgacgccacgaacaaaagagaggccacaagcccgaagccagggacggcggaaaacaac

SEQ ID NO: 234201 - RNA, 76 nt, Homo sapiens
accagggaggacccccccacacggcccaaagcagagaggagggggcggcggaacagagagaggccgaagcacccga

SEQ ID NO: 234202 - RNA, 46 nt, Homo sapiens
acagggggacaacagcaggagcaaggacagaacccagcgggacgac

SEQ ID NO: 234203 - RNA, 71 nt, Homo sapiens
aaacagacaacagcaagaaaaaggaccagcaaaaagagaaagagacgaagaaaaccacacgagccgcagaa

SEQ ID NO: 234204 - RNA, 46 nt, Homo sapiens
gcagggaaacaaagggccacagagaagaggcgagaacagagcgaga

SEQ ID NO: 234205 - RNA, 74 nt, Homo sapiens
gcccaggaaggagccaaagcacaagaagaagacgaggccccaccgaggcaccaccaaccaaagcggcaacccga

SEQ ID NO: 234206 - RNA, 72 nt, Homo sapiens
gggagcaaccacagaaggaaaagcacgacccgaaggaggcaacgcacgggccacaggcagccgcagaacagg

SEQ ID NO: 234207 - RNA, 77 nt, Homo sapiens
aaaacccagacaacagccaaacgaagcagaaaagccaaagacaaaacaggggacaccaagaacgaagcacccagacc

SEQ ID NO: 234208 - RNA, 71 nt, Homo sapiens
cggcggagcggaggcgaacagggggacgggggcagggccgcaggagggaagcgcacggaaaccgccccggg

SEQ ID NO: 234209 - RNA, 53 nt, Homo sapiens
cagccaaaccaaacagaagccaaagagaccgagagagacagaagccaagagac

SEQ ID NO: 234210 - RNA, 81 nt, Homo sapiens
gcaccggcccaggggccgcacaggaaagagaaaagcaaagaggggacagcagagagaagaggaggggaagccagaacagca

SEQ ID NO: 234211 - RNA, 66 nt, Homo sapiens
aagacacgcggagcaaagacgcaaagcgcccaggcggcagagccaggacagagggcagcggcacaa

SEQ ID NO: 234212 - RNA, 69 nt, Homo sapiens
aacagccacggaagaaagcagggggcagcacgccgaaggagagaccagacaacaggccagggaagggaa

SEQ ID NO: 234213 - RNA, 86 nt, Homo sapiens
gagccccggggcggcggacggccgcgggcaggggcagaggaaacccagcaacagacccaggcacccgaccaacaccaggccagcag

SEQ ID NO: 234214 - RNA, 63 nt, Homo sapiens
gcggcggcccggccgcagcggcaacagaacgaaaaacagggcgggaagggccgaacgcccccg

SEQ ID NO: 234215 - RNA, 81 nt, Homo sapiens
gccgccgccgccgccgcgggcgccagaaggaagaggcggacggaggagcaggcgagaagagaagcggggccaaggaagggc

SEQ ID NO: 234216 - RNA, 65 nt, Homo sapiens
gaaggacaaagaccaccaggcaaaagggggaagcgacaaagccggggggcacccagccccgagcc

SEQ ID NO: 234217 - RNA, 77 nt, Homo sapiens
ggaacgaaccagagagagcccaaaagcaggcaacggccagacacagggaaagcggaggggcgcgccagaggacacca

SEQ ID NO: 234218 - RNA, 77 nt, Homo sapiens
gaagaaaagaaacagccagcacgccaagacacgcccgggcaaagagcaaagagacccaccaaaaagacgcgccagac

SEQ ID NO: 234219 - RNA, 76 nt, Homo sapiens
ccaaggggacaaaccaacagaagggcaaccagggcggagaacggaaaagcaccaggaagcagagaggaccgcagaa

SEQ ID NO: 234220 - RNA, 68 nt, Homo sapiens
cccggaggggcccgcagccagcagagggagacaccccacccgcggaaaaacgacacgagcgaagacag

SEQ ID NO: 234221 - RNA, 78 nt, Homo sapiens
ggcgcggacccgccaccggaggagcacggggaggagagcgaggacgccgcccgcagcagcacaggaacacccccgcgg

SEQ ID NO: 234222 - RNA, 39 nt, Homo sapiens
gcaggccggcaacgagacaaccacggagcggccgcaccc

SEQ ID NO: 234223 - RNA, 87 nt, Homo sapiens
gaacccaccagaaggaaccaaccggacacaaacaagcagcaggaggacaccaaagaccccaagggggaggaagacgcacagagcagc

SEQ ID NO: 234224 - RNA, 72 nt, Homo sapiens
caccgaaccagcggaagcacagagagccaacggaccacaacagagaaccaaggacgggaagcagaaaaaaga

SEQ ID NO: 234225 - RNA, 80 nt, Homo sapiens
gccggaggaccccagagaaggacccggggaccgggggcaccacaggaggcagggaggacagcacgcgcaagagggacggg

SEQ ID NO: 234226 - RNA, 59 nt, Homo sapiens
gggggcgcacccccgggaaccacagaccagcgcggaagaccaaggagcggggagccacc

SEQ ID NO: 234227 - RNA, 75 nt, Homo sapiens
cagcgggggaaccggcgcgccggcgcgcggcgcggacaggcccaaacggacccggcaccccgacccgggcaaggc

SEQ ID NO: 234228 - RNA, 74 nt, Homo sapiens
gagaccaggggcaccgcagcgaccacccacacaaacccgggacgggccgagagcgaagaaaagccggaggcacg

SEQ ID NO: 234229 - RNA, 69 nt, Homo sapiens
gaagacaccaaaaagcaaacggaccagaccgaccaccaaaagaagaaccaaagcccgcaagcaaagcga

SEQ ID NO: 234230 - RNA, 74 nt, Homo sapiens
cacccagaagccccacccagccacacgccacacccggaccaggccgcaaccagcgaccaacgaaacggcgaaac

SEQ ID NO: 234231 - RNA, 81 nt, Homo sapiens
gcacagcccgcagcccacgcggagacaaccccagccccaggcagcagccagcagaaacagagcccaccccccccggggcca

SEQ ID NO: 234232 - RNA, 68 nt, Homo sapiens
aggacagaaggaagcaccagcaacacaaacagcccgccacgacagaagaacaacaaaaggaaaccgcc

SEQ ID NO: 234233 - RNA, 79 nt, Homo sapiens
cggggcggcccggcgcggcacagcgccgccagcagggccgaccaggacagggggggccaagggggaagagccgaacgca

SEQ ID NO: 234234 - RNA, 74 nt, Homo sapiens
ccaggcgcaggagacacaggcaggcagacccgcgcgcagggggcgcccccgggccacgcccgcgcggggcgcag

SEQ ID NO: 234235 - RNA, 52 nt, Homo sapiens
aaaggacgaagaacccacagagggaaggaaagaaggagcccaacgaggcaca

SEQ ID NO: 234236 - RNA, 76 nt, Homo sapiens
ccgacagccgcagaacagacagacgcagccgaggaaggggcacccacagccaacccaacaagaggggcacaaaaac

SEQ ID NO: 234237 - RNA, 67 nt, Homo sapiens
cggacagacccacaacaccaggcgccaggggggagaaaaggccaagggcaggagacacgagacgcag

SEQ ID NO: 234238 - RNA, 74 nt, Homo sapiens
cagcccccggaagacaccacaaagaaaacaacagcaccggaagggaaacacgggccaggacagccacaacggac

SEQ ID NO: 234239 - RNA, 77 nt, Homo sapiens
cgcgagcgcccggggcacgcccgcggccgccggacggccgggcgcggagcacagaccggacacggaagcagaacgcc

SEQ ID NO: 234240 - RNA, 57 nt, Homo sapiens
gacggagcccgaggaaagcagaaagacgcggggaggaggaggaggaagggagcggca

SEQ ID NO: 234241 - RNA, 77 nt, Homo sapiens
cggcgccggggcccgccgcagcccccagacaggccaacaagggccccaggcagagccgcgaaggcagccaaaacgag

SEQ ID NO: 234242 - RNA, 76 nt, Homo sapiens
ccaggaacccacaaacccaagacacagccccagcagcccccagacccacagacacacccagggaaaacaaaaagcc

SEQ ID NO: 234243 - RNA, 58 nt, Homo sapiens
gaaaccccagaggaggcgggcccggagcaggcaaggagaaaggcagacacgacgcggc

SEQ ID NO: 234244 - RNA, 75 nt, Homo sapiens
acacccaagagaagagaaaaccagcgcaggacaaagggggggcgaccgaggaaaaaaagaaccaagagaaaagac

SEQ ID NO: 234245 - RNA, 86 nt, Homo sapiens
aacgaccacgcccaaaagagcgcaccaacccccacgcgacaaagaacgagaaggaaacccagccaagggaaccacacccagaagac

SEQ ID NO: 234246 - RNA, 70 nt, Homo sapiens
ggacacagggagccccagacccacagcaggaccaaggccgagcccagccacggggcccgcccgccgccgg

SEQ ID NO: 234247 - RNA, 84 nt, Homo sapiens
ccgcacccacgcggcccgcgaaagggcgcaaagaacacgagcggggagcgggcgcgacggccccgcgggagacaacaccaaagc

SEQ ID NO: 234248 - RNA, 70 nt, Homo sapiens
gacagcggagaaggagcaggggaaagggaaaggacgggagaggagcacagcagaggggggcgaaacaaga

SEQ ID NO: 234249 - RNA, 73 nt, Homo sapiens
gacggggggggccgcacagggagcaggaagaagagagccaagcgaacgccgaggaacagggacaacggacccg

SEQ ID NO: 234250 - RNA, 70 nt, Homo sapiens
gcgcggcagccacccgcccacaacacaagaagagagaagcacgggaccaagagcgccgggaaaacgagcg

SEQ ID NO: 234251 - RNA, 78 nt, Homo sapiens
agacgacgaggacgccagacccacggaaagcagccagcagcacccagaaagaagagaaagcaaccacaaacacagaaa

SEQ ID NO: 234252 - RNA, 45 nt, Homo sapiens
gcaaaccgggccacagggaaccgagaccagagcacaacgaagcca

SEQ ID NO: 234253 - RNA, 87 nt, Homo sapiens
agacgacgcaccgcaggcagacaaaagggccaaagaagggagagaggcgcaaaaaaggagcagcaacaagagcaaccgaagaaggaa

SEQ ID NO: 234254 - RNA, 81 nt, Homo sapiens
gcaccccccaaacgacgcagccacggagaggcccggaggccggggacgcccagaagggagacaagccaagggagcagagga

SEQ ID NO: 234255 - RNA, 78 nt, Homo sapiens
gcagaggcaacagaggagcaacaaggagaacagagccaaggggaagagaaagcgaagcgggaacccaggagagagagc

SEQ ID NO: 234256 - RNA, 73 nt, Homo sapiens
aaccagagaggaagacaacgaggcggcgcgagaaaggaaaaggcagagaaagaaacccggaacaacggcaaag

SEQ ID NO: 234257 - RNA, 53 nt, Homo sapiens
caacagacgaaaacaggcccagaacagaaagaggacgcaagcgcaaacacacc

SEQ ID NO: 234258 - RNA, 71 nt, Homo sapiens
caggaggaagcgaggccagacagcaagagcacccgacccacaggccagagagaagggcacggcagaacgac

SEQ ID NO: 234259 - RNA, 105 nt, Homo sapiens
cccgacccccgaacccccagcccaaacccggaaacccagcggcccagccgggaacaagcagaaagcacgaacaacgagaacaagacacgagcaaaccccaccgag

SEQ ID NO: 234260 - RNA, 85 nt, Homo sapiens
acgggacgaggccaacgcacggggagaggccggggcgcagcccaggcaggccgcccggcagcaggaagaacggacaggaaagcgc

SEQ ID NO: 234261 - RNA, 64 nt, Homo sapiens
gcaggggcaacagagagccacagaaagcagaaaggccgaccgggacaagcaggaggaggggcac

SEQ ID NO: 234262 - RNA, 67 nt, Homo sapiens
gggcacgcggaaacggccggacacaagagggcaagaaaggcgcgacgggccgaaaagggacgaaggg

SEQ ID NO: 234263 - RNA, 85 nt, Homo sapiens
gccgcccccgccgccgggccggggccccgcagcgacaacaggaggccggaagacccaaagcgagcggggggacgggagggggcgc

SEQ ID NO: 234264 - RNA, 77 nt, Homo sapiens
caggaaaagcccacgagcacagagggccccagagggcagcccggaccaaaaaacaggccaccgaggaaagaggggcc

SEQ ID NO: 234265 - RNA, 75 nt, Homo sapiens
cgcgcccccagcccccgcgcccgggcccggggccccagccggcccgggcacccggcagaggagagggccggcccg

SEQ ID NO: 234266 - RNA, 67 nt, Homo sapiens
gggaccaagcaggcacagaaacagggacaagaggcaggaagaacccccccaggaaagaagggaagga

SEQ ID NO: 234267 - RNA, 43 nt, Homo sapiens
ccgcgcaaggcaccaccacagggccagcccaaggcaagaaaaa

SEQ ID NO: 234268 - RNA, 61 nt, Homo sapiens
cgccccagcggccacggagggcaggagcgagaacccgagcagcgccagagcaacacaccgc

SEQ ID NO: 234269 - RNA, 73 nt, Homo sapiens
ccacacccgggagagaggggggccaccaggcacccgggggagcgcccaggacacacccccagcgaagaagaag

SEQ ID NO: 234270 - RNA, 70 nt, Homo sapiens
ggcggccgggacggaggacgcgcagggcgcccgagaggaggcgcccggccgccgggcacccgaccggggc

SEQ ID NO: 234271 - RNA, 79 nt, Homo sapiens
gagagggccggcaggcccgggaaggacagccgccaggaagcaacgcagcgcggaaaggcacaaccaaggacacgcagca

SEQ ID NO: 234272 - RNA, 81 nt, Homo sapiens
aacggagcgggcgggaggaggccggggaccacacagacacgcacgagaacccccagcaacccaaccgaccggagaacgagg

SEQ ID NO: 234273 - RNA, 80 nt, Homo sapiens
caccaagcggagcaggagcacagaggcccagggccaccccccccagccccccgcagcgccgcccggacccgccccccgcc

SEQ ID NO: 234274 - RNA, 74 nt, Homo sapiens
aaggccagagcacgagcacgggaaggacaacaggggagaagaaaaaggccaaggacccaagaagagccggggga

SEQ ID NO: 234275 - RNA, 74 nt, Homo sapiens
ggccccggaagcccccacgggccaccgacccgcagaacagggagcaacgacacaagcggcccaggaggacagcc

SEQ ID NO: 234276 - RNA, 80 nt, Homo sapiens
cagagcgcgaggggagggggaacgcgggcgccgaaggagggccggcagcgcccgcggagacggaagagagaggaagaaga

SEQ ID NO: 234277 - RNA, 62 nt, Homo sapiens
ccaggagaccggcagcggccagccccccccacgaccgggccagcgcagcgcacggcggcaag

SEQ ID NO: 234278 - RNA, 56 nt, Homo sapiens
ccagccggccgggaggcaccacggccgagcccgagaggcgagcccacacaagggga

SEQ ID NO: 234279 - RNA, 66 nt, Homo sapiens
ggggaggacccgaccaggaaaaccggcggcccggaaacaacggcagcaagcggggaacgccgcacc

SEQ ID NO: 234280 - RNA, 95 nt, Homo sapiens
acgcaccgcacaacgccacccccagagcaggagaagcgagcccggacagaccaaccgcaggcgcaaacagcaaggccggaggaaaaacagcgggg

SEQ ID NO: 234281 - RNA, 59 nt, Homo sapiens
aagcacggacgggaccaagacaccggccaacgaagggagcaccaggccaagaaccccaa

SEQ ID NO: 234282 - RNA, 71 nt, Homo sapiens
accagaaggaggagcccgacacggccaaaggcccaaacaaaaagcagccaaaaccagagacaagcaacaca

SEQ ID NO: 234283 - RNA, 83 nt, Homo sapiens
cgggacaggaagaagcgacgaacacccaagcgccacgcagagccccgccaggaagacacgccggggaacgaagcagaagacgg

SEQ ID NO: 234284 - RNA, 75 nt, Homo sapiens
ggggcaagaccgccccacagcacaccaccaacgcccccggagagacaccccaccgaaaaaggaggaaccgccccc

SEQ ID NO: 234285 - RNA, 74 nt, Homo sapiens
caccccgccgagccaaacgccggggaccccggcagccacccaccgccgccgcccccaggggaccccagcccaac

SEQ ID NO: 234286 - RNA, 102 nt, Homo sapiens
ggccgagaggaagacgagccgggaggaacggcccggaaacaggaggacgcggcggccggggcagcgccgcgagccagcaacgggggaaggccacaacaccac

SEQ ID NO: 234287 - RNA, 56 nt, Homo sapiens
aggaccaagaaccagggccaagccgcccgccaaccggcagcgccgacgacaaacca

SEQ ID NO: 234288 - RNA, 57 nt, Homo sapiens
gagcggcggagacggcgagcacaaggaaacgggaagaaggaagccccgcgccccgca

SEQ ID NO: 234289 - RNA, 81 nt, Homo sapiens
accggaggacaagccaggccacaaggaaccaagacagcgccacagacagaaaaggcaaagagagggaagcagagagcccga

SEQ ID NO: 234290 - RNA, 70 nt, Homo sapiens
aaggagcgcaaagaaggagacggcaaacagaagggcgcaggaaaaggcgcacagagaacgacaacccgcg

SEQ ID NO: 234291 - RNA, 78 nt, Homo sapiens
agcccgcgaacaagacaaggagacagaacagacagaaaaaacaacaagaaacccacaaccaagagaaccaccagaagg

SEQ ID NO: 234292 - RNA, 61 nt, Homo sapiens
gagccacacgcccagcagccaccaacacccaaagggaccccaccacgccgggacaccaccc

SEQ ID NO: 234293 - RNA, 80 nt, Homo sapiens
agagagagaaacaaaagcgccagagccaagaacgcaaaccaggcgagacagcaggagcaccaaaccccaccaaaacggcc

SEQ ID NO: 234294 - RNA, 76 nt, Homo sapiens
aaagaagagaacgacccaaggaagggagagcgaaaaggccaagaggcggaccagggacgagcgcccccggagaggg

SEQ ID NO: 234295 - RNA, 43 nt, Homo sapiens
cgacagcaacagccgccggcggaagagccaggacgccccaagg

SEQ ID NO: 234296 - RNA, 69 nt, Homo sapiens
gacaagaggcgccagagacaaggccacaagcccggagcgcaagagcgcccagaagaaaagaaaacaaga

SEQ ID NO: 234297 - RNA, 59 nt, Homo sapiens
gggcgcagcagaaggggcaaaggggggaacaccagccccaaaacagcgacagagcagac

SEQ ID NO: 234298 - RNA, 72 nt, Homo sapiens
gcgggcggccggagcccggggaaagaggcgggagagggaggagcccagaccgaaccaagaaggagcgaggga

SEQ ID NO: 234299 - RNA, 65 nt, Homo sapiens
aacgacgaagagcagagcaggggccaggggagcagccgccacacgaggggcccgccgaacaaagc

SEQ ID NO: 234300 - RNA, 67 nt, Homo sapiens
gcccccagcagacgagaaaccaaggcgccccgcaaaggaggccacccccaccgccgccgggcccggc

SEQ ID NO: 234301 - RNA, 72 nt, Homo sapiens
gaccaaggggacgaggcaaaaagcacagaagagaggagaagacagaggagccagaccaagagacagcacagg

SEQ ID NO: 234302 - RNA, 85 nt, Homo sapiens
gagggggccggccgggacgcggcccggagccgggaccggggcccaggcgccccaggagggccagagcgggagacacagaaggacc

SEQ ID NO: 234303 - RNA, 81 nt, Homo sapiens
gagaggggaggccgcggacagggccaagccgaaccgagccggggcgccgggagcagggaccgcgggcgggagacccccaga

SEQ ID NO: 234304 - RNA, 71 nt, Homo sapiens
cccccagccgcaccaccaagaaaccacggaagccaacacacccaaggccaacaaccgggaaacaaagagga

SEQ ID NO: 234305 - RNA, 58 nt, Homo sapiens
gggcgggccccgagagcagcagcggagaccaggcccaggaaggaacgaggaagggcca

SEQ ID NO: 234306 - RNA, 80 nt, Homo sapiens
acgggacagcacggccaagcagagcaagcccagggagcaaaagagagcgcaggagccgggcccagcccccagccgccgac

SEQ ID NO: 234307 - RNA, 81 nt, Homo sapiens
agcaggaggggcagcaacaaggagggaaaaaagagcaggggaaaaggaaagcaaacacagagaaggccaacaagcagaggg

SEQ ID NO: 234308 - RNA, 79 nt, Homo sapiens
aacccgggagacggaccggcgggaacaacacccggagacgcccagagccgggagcgcggacagggaaaggaggagcacg

SEQ ID NO: 234309 - RNA, 80 nt, Homo sapiens
acagaagcgggcggcggcgcgccgccccgggcggccgcgggcggagcaagaacgaggccaaggaggagggacacagagac

SEQ ID NO: 234310 - RNA, 60 nt, Homo sapiens
gaccacagcaacacaccggacgaaccgaccaggcaacagaaagcaaaaaaaggaaaggcg

SEQ ID NO: 234311 - RNA, 56 nt, Homo sapiens
agagcccggacggggcggccgccgagggaagggcccaaccaagaccgaacccaagc

SEQ ID NO: 234312 - RNA, 69 nt, Homo sapiens
ccgggagacaccgccaccgccagaggacggggagccgaggaggagcaggagccgggacaccggggagga

SEQ ID NO: 234313 - RNA, 79 nt, Homo sapiens
caagagaggcagcaagcaacgggagaaaaggaagaccaggccagccgaagccggaagggaccagggagaaaccaaacca

SEQ ID NO: 234314 - RNA, 75 nt, Homo sapiens
agacacggagcaaggaggaaaacacacgagagcccggggccaccccagaggaagggggaagcgcggaaagaaggg

SEQ ID NO: 234315 - RNA, 83 nt, Homo sapiens
cgaagcacagcaaacaaggcaaggcagagccaccagaaaggccaccaggaagagagagagacgaaaaccgaaggacacacaga

SEQ ID NO: 234316 - RNA, 70 nt, Homo sapiens
ggaagcaaaggaaagcggggcaccggggacgacagcagggaacaacgagagcgccccaagggagccagcg

SEQ ID NO: 234317 - RNA, 61 nt, Homo sapiens
ggagcagcggcgggcgcggcggccgcgagccgaaacacacaagaggagggaagcaccaaac

SEQ ID NO: 234318 - RNA, 80 nt, Homo sapiens
gggcccgcgcgagccccgggaaagagcagcgacgggagacagccgggcgcgcaagagggaaaggaggcccagaaagagaa

SEQ ID NO: 234319 - RNA, 57 nt, Homo sapiens
agcccaagaggccgaccgagacgggcggagaggagaaggcagccgccgcaaagggac

SEQ ID NO: 234320 - RNA, 78 nt, Homo sapiens
aggaaggggaccgggcggcggagcggcggaagaagaacgaaaacaaacggaagagagggcagcaagaaagaacaagaa

SEQ ID NO: 234321 - RNA, 72 nt, Homo sapiens
aagccggggggggagaggccgccaggaggaaggcgaacaaggaccgcgacaccaacagcgaccagaaggggc

SEQ ID NO: 234322 - RNA, 64 nt, Homo sapiens
ccaaaagaaaacgcaccgaaagggagaaaggaagggacagaggagcagcgagaagagccagaga

SEQ ID NO: 234323 - RNA, 81 nt, Homo sapiens
cccacggcccggcaggggaggcgcccaaaccggagggaggcaagggagggaagccgggcgccaagagccagcccagccagg

SEQ ID NO: 234324 - RNA, 76 nt, Homo sapiens
gggggaggcgaacagccggcgcccggacgcgaggggggagagccaggacaaaaccaggcagaaccaacacgaaccc

SEQ ID NO: 234325 - RNA, 72 nt, Homo sapiens
cggaaaggacccagaaggggcgagccacagcaaggcaggggagagccgacacggggcccgagagggacgcaa

SEQ ID NO: 234326 - RNA, 79 nt, Homo sapiens
ccgcgcgccggaccgcaggacgacagaccgagggaggacaccggaccccggacgcgggaaagcagcgcgacggcagacc

SEQ ID NO: 234327 - RNA, 49 nt, Homo sapiens
cggaacacccggcgaaccagaggcagaacaagcagaacagacgacaaac

SEQ ID NO: 234328 - RNA, 44 nt, Homo sapiens
agccgaaggacccgagaaaggcagggccagacagcaggcgaaaa

SEQ ID NO: 234329 - RNA, 67 nt, Homo sapiens
caaaaacggccagaaaggaaagaacgggagggaaaccagaggagaggacagaggcacggcccgggcc

SEQ ID NO: 234330 - RNA, 60 nt, Homo sapiens
aaagaaccgagagaacgagcacccccgaagcacccaggggaaaagccacggcaggacaag

SEQ ID NO: 234331 - RNA, 42 nt, Homo sapiens
gacggggccacgggagcgcggagggacaccagcagccgcaac

SEQ ID NO: 234332 - RNA, 82 nt, Homo sapiens
acaggaggcagagccaaacacccaggcgcacggggaaggagccagggaacacacaagaagacaaccccgacccagcggcgcg

SEQ ID NO: 234333 - RNA, 98 nt, Homo sapiens
cgaaaggaagcaagcagcagaagagccaaggaaaaacagcaagaacccaaaaggcaccgggcggagccggaggcgagaagaggaagcggggcagggcg

SEQ ID NO: 234334 - RNA, 81 nt, Homo sapiens
ccgcagccggaggagcgcgccgacgccaaccagcgcgcgagcgcccaaggagaccaggccaagggaagaaagagggagaga

SEQ ID NO: 234335 - RNA, 65 nt, Homo sapiens
gcaaccgagggacccgcgccagaaaacccggacaaccagcggggcacaacaagggcacaacagag

SEQ ID NO: 234336 - RNA, 73 nt, Homo sapiens
cgcacccaccgagaaccagccaccgaccccgaggggcacagaggcaggcacaaaaccacaagcgacaacagaa

SEQ ID NO: 234337 - RNA, 79 nt, Homo sapiens
gagccacgggacacaaagcggcgcggcacagggcagggacgggacgaaggccagacggggacagggagcccgagagaac

SEQ ID NO: 234338 - RNA, 90 nt, Homo sapiens
ccgccaccacacggcaccggccagcaagggcaaacccggaagaagaaaaaaaaacagaaaaacaagaaaagcagcacgggagaagcacgg

SEQ ID NO: 234339 - RNA, 80 nt, Homo sapiens
gaagaagcccgaggcacaggcggccaggacccgagcggcaggcaagcaggacaaagaggcaagagacccccaagccaaag

SEQ ID NO: 234340 - RNA, 84 nt, Homo sapiens
ccccggccacccggcgcgagaccagaagcggaaacaccgcgacggcggaaaaaaacacccggaagaaagccgcccgcccaggga

SEQ ID NO: 234341 - RNA, 87 nt, Homo sapiens
gcagagacgcagccccaccacccgcagcacaaaaccaggaagggaaaaggccgaggcacagcgggaagaccgcaaagacgacccgag

SEQ ID NO: 234342 - RNA, 70 nt, Homo sapiens
cgaggaggagaaacgcggccgggccggagaaccagccaaaaaagggcagaaccgacaacggggacccgcg

SEQ ID NO: 234343 - RNA, 73 nt, Homo sapiens
acccaccagagacagggccaaggaaaaggaacagagagagcagaaccgaaacggggaaagaccgaagaaagaa

SEQ ID NO: 234344 - RNA, 74 nt, Homo sapiens
gaagaaacgcgacaggggggcaagagacaaggagagacccggcagcaggcacccaaacagggcaaacgaggacc

SEQ ID NO: 234345 - RNA, 68 nt, Homo sapiens
gagcccgaagaggcccacacccggaagcgggcacggaagaggaccaccacgcccgggcaacaacggag

SEQ ID NO: 234346 - RNA, 76 nt, Homo sapiens
cagaaaaaacggaaaagaaggcagcggaaacgcagacacgaacgggccgaagacgaagggaacgcacgggaaagcg

SEQ ID NO: 234347 - RNA, 81 nt, Homo sapiens
cgggcggcggcggagggcccgggcgcggcggcgggacaccgagcccggggaggggccccgcgaggagcgggcagagcaaaa

SEQ ID NO: 234348 - RNA, 92 nt, Homo sapiens
cgggcaccccggacgacggcgagcgcggcgggacggcgcggggccgcgcccggagcgccccgccgcgcacagccggcaagaagccaacggag

SEQ ID NO: 234349 - RNA, 82 nt, Homo sapiens
aacacacacaagaaaccaggccgccggaggcagccggccaacgcagggaagcaaagagcacccgagcccagcaggcaagcag

SEQ ID NO: 234350 - RNA, 51 nt, Homo sapiens
agccgggggggggaccgagacgcagccaagacgggaacgggccacaggcag

SEQ ID NO: 234351 - RNA, 61 nt, Homo sapiens
gcggcgccccggccgaggggcggcggccccaggacccaaagacaggaccacgcaccagcag

SEQ ID NO: 234352 - RNA, 60 nt, Homo sapiens
caagcaaccaccagcagcccccagagcggaacacaggcagaggccgggagcgcaagagga

SEQ ID NO: 234353 - RNA, 82 nt, Homo sapiens
gagcggcgcagagagagagagaagagaggagagcagcagcgaaccaacccaaggccgcacacccaggccaaacgcacggaag

SEQ ID NO: 234354 - RNA, 62 nt, Homo sapiens
gagccggcacgcagacggaagaaagcgggaaacaaaacacgcgaaggaagagcaagaaaaca

SEQ ID NO: 234355 - RNA, 72 nt, Homo sapiens
gcacaaaggacaccaccggaagacaaggagccggagcccgcccgcgccgaccgaggacgaccaccgaccagg

SEQ ID NO: 234356 - RNA, 86 nt, Homo sapiens
cgaggaaacagaaagaaggcggcaaggagaccgagcgggcccaccggccgccaggggaggccgaagacaaggagggcaagcccccg

SEQ ID NO: 234357 - RNA, 83 nt, Homo sapiens
ccccagccagaagggcacgccagcggcgcgagaggaccaccggggcggcccggcggagagccaggaccccaggagcgggccag

SEQ ID NO: 234358 - RNA, 87 nt, Homo sapiens
gaagccgggaagcacacagccagggccggggaggcgcagcaccccaacagcccccaggaggcagggcagcaccagagcaaaccaaga

SEQ ID NO: 234359 - RNA, 68 nt, Homo sapiens
aacgccggcaaagggagaagaagaacaacacccacaccaaagggggagagaacgagaaggaaaagcag

SEQ ID NO: 234360 - RNA, 75 nt, Homo sapiens
cgccgcgccgccacaggacaccagccgggcagccacaagcggccagggcaccccggcgacggcgcggccaggagg

SEQ ID NO: 234361 - RNA, 75 nt, Homo sapiens
aggcgcgagaaggacgcgcagccaccccagcgaaaccaggcccaaaagaccaccagggagaccccggaagaagac

SEQ ID NO: 234362 - RNA, 78 nt, Homo sapiens
cgcgcggcgcggcggccgggccccgagacggggacggaacagaccgcccgggagccccaaaagacagaaccaagaaac

SEQ ID NO: 234363 - RNA, 77 nt, Homo sapiens
gagcgaaggccagcggcaccgacagggacaccaccgaaccccagcccaagccgcgcccggacccaaagacaggacca

SEQ ID NO: 234364 - RNA, 59 nt, Homo sapiens
cacagccggccacagcacgagacgaggagcgccaggaaagaggcagagacgaagcagaa

SEQ ID NO: 234365 - RNA, 84 nt, Homo sapiens
caggggcgggggcccacacgccaggagcccgacccccggaccaagacgacccacggcaagagaagcacgacccagacccccagc

SEQ ID NO: 234366 - RNA, 75 nt, Homo sapiens
agcggcgccacgagggagaaaggcggcaaccacgaggcaaacggaacaacaggagacaaagaaaccagccaacag

SEQ ID NO: 234367 - RNA, 57 nt, Homo sapiens
ggagaaaaaaggggccgaaggggaaaccacgggcaaggaaaagaaagagcgagggaa

SEQ ID NO: 234368 - RNA, 79 nt, Homo sapiens
cagagccacaccgagaaccgccgcggagccccacccaacgggaaaggcaaggcaaggaggaccaagcgaaaaacccaga

SEQ ID NO: 234369 - RNA, 61 nt, Homo sapiens
ccgcaccgaccaggaccacagcggcaaggcccaagcccagccaagcaccgagacaaccaag

SEQ ID NO: 234370 - RNA, 64 nt, Homo sapiens
aaggaacgagccaggggaacacaccagaaggagagcccgagagggcggccgcgcggagccggcc

SEQ ID NO: 234371 - RNA, 79 nt, Homo sapiens
ggccgcagcgggccgcggccgaggaggcagcgcgaccccgcacggacagcccaaggcggaaaagcgaaggaagccacaa

SEQ ID NO: 234372 - RNA, 71 nt, Homo sapiens
ggcgacccggccacgagccgagagggccacgcccccggcagcaccccaggaacaagcgagaaccgccggcg

SEQ ID NO: 234373 - RNA, 70 nt, Homo sapiens
ccgacccacaggccagagagcagaagggaacacccgcacagaaagaccagggaaccacagggaacccaag

SEQ ID NO: 234374 - RNA, 68 nt, Homo sapiens
acaggccaggcggggaagcaagcggggccacgacgcccgcgggaacccagaaccgcgggcagcaagaa

SEQ ID NO: 234375 - RNA, 91 nt, Homo sapiens
ggcggagcgacgagcaggcggcgcagacaccaacgcgggcgcgaccgggagcggaccccggggacgagcacggaaggcacaccgggcagcg

SEQ ID NO: 234376 - RNA, 104 nt, Homo sapiens
gcgggcggggcgcgggccgaagcgcccggagcgggagcgagcggcgcggcccggccggacagcccgggagacgagccccggagccccaacgaaaggcagacgaa

SEQ ID NO: 234377 - RNA, 74 nt, Homo sapiens
agaacaaaacacaaagcaagagaaaaaccagaagaaaaggcggacggagcggaggagcccacaggcgcaaagag

SEQ ID NO: 234378 - RNA, 74 nt, Homo sapiens
ggccaggcaggacccaacgacaggcgccccggcccaacgagcgcggagaccggaccgaagagggcgggccgccc

SEQ ID NO: 234379 - RNA, 84 nt, Homo sapiens
aagagcgagccgccgccccgggcgcagacagagcaccagcaccagcagagcccgcagcgggacaagcagcagccgcacaacacg

SEQ ID NO: 234380 - RNA, 76 nt, Homo sapiens
gagcgagggagccagccgggcccaggcccccagagacaagacaacaggcacaaagagagaaggaacacccacaggg

SEQ ID NO: 234381 - RNA, 56 nt, Homo sapiens
cgaacgggcagcaggaggagcagcccggaaggaggagccaagcgggaaaaggggca

SEQ ID NO: 234382 - RNA, 66 nt, Homo sapiens
gagaagcgcccgcaccaggacacaggaaacagagcggaaacagacacccaccacaagaaggacccg

SEQ ID NO: 234383 - RNA, 39 nt, Homo sapiens
aggcgacacaccggaagcagggcaagagacgcagacgac

SEQ ID NO: 234384 - RNA, 80 nt, Homo sapiens
gaaccccgagcggcagggggcagaaagagcggcagagccaaccccccggccaccaggcggagcgcaggagggcagacaca

SEQ ID NO: 234385 - RNA, 74 nt, Homo sapiens
ccaacaagaggaggagagggggaaaacgccggccgaacagcccacgccaagaaaacacgaaccccggaaggaag

SEQ ID NO: 234386 - RNA, 102 nt, Homo sapiens
gagcgccggccaaccagcagggcacacagcgcccggcccagcaacaacaaaccagaagccaaacccggcaccgaggcacgaggacagggccacaggcccaac

SEQ ID NO: 234387 - RNA, 84 nt, Homo sapiens
agaaaaaggacaaaagccaagaggaggacagcgcacacagcaagcacgagcgggacgacccgggacagcccacggggcagacca

SEQ ID NO: 234388 - RNA, 78 nt, Homo sapiens
gggagcgcgccggaccaagcgggcccagaagcggaggagcaagaggggggggcccccccgaagaaaggaaccggggag

SEQ ID NO: 234389 - RNA, 72 nt, Homo sapiens
ccccgagaaaggagaccacaagagcgcacccggccggcaggcccgagcacgggagagccccaagggcaaccg

SEQ ID NO: 234390 - RNA, 79 nt, Homo sapiens
accgcccagagcaggcaccgagccccaggcccgacaacccggaagaggagaagaggacagagaacaggggcagcgccca

SEQ ID NO: 234391 - RNA, 78 nt, Homo sapiens
cacgccgacagcggccaacccccacccagcccagcaacgacccgacacgaccgaaaacggagggcccaaggcccacgc

SEQ ID NO: 234392 - RNA, 60 nt, Homo sapiens
cggcgagaagcggccgagccagcagcagggacccccgaacccggaacaggcacccaccgg

SEQ ID NO: 234393 - RNA, 50 nt, Homo sapiens
cgcgaaacgcacgagaagccccaagaaagacaccaaagaagaccgcaaga

SEQ ID NO: 234394 - RNA, 78 nt, Homo sapiens
aaaagagcccgcaagaagaacagagacagcagccaaacccccaggggcccgccagcggacagccgccgccaacgacag

SEQ ID NO: 234395 - RNA, 84 nt, Homo sapiens
aaacgaccgcaaaggcacccggggcagaccggaccaagaaaagcgcccaggaagcggaaaaacaaaagagccgcccaacgacgc

SEQ ID NO: 234396 - RNA, 50 nt, Homo sapiens
cgacggggagggcagaccaggcgaacccagcgggcagccccagcacacag

SEQ ID NO: 234397 - RNA, 70 nt, Homo sapiens
aagaaaggggcccccgcaccaccaggaagcacacaccaacgacccgaaagccgagaaagcgacaggcagg

SEQ ID NO: 234398 - RNA, 72 nt, Homo sapiens
ccgcggggggccagcggaagaaccccccgggagccagaccggcaccgaagaccgggccggccgccaagacac

SEQ ID NO: 234399 - RNA, 92 nt, Homo sapiens
agaccacgcagccacgcgggcgagcggcggggagcggcgaagccgcgggcgagggaaaaagacccgagaagcgcagacccaccagggaaagc

SEQ ID NO: 234400 - RNA, 83 nt, Homo sapiens
cagccccggcgccggcggcgggaccgcggaccgaacacagacagcaggcaaagcccccgacaggggacaggccgcgcaagccg

SEQ ID NO: 234401 - RNA, 83 nt, Homo sapiens
accggacacgaggacgcacagaaggccacaggccccgggaggaccagagacagcggggcaacagggagccacggccggagcgc

SEQ ID NO: 234402 - RNA, 66 nt, Homo sapiens
ccggaaaggcgaaaaggggaaggagacccaaggaaaggaagacaacgaggggcacgcgcccaccca

SEQ ID NO: 234403 - RNA, 68 nt, Homo sapiens
ggaggcgggccaaccaccccgccgagcccgagcagacgggccagcacgggcccagacgcagacaaacg

SEQ ID NO: 234404 - RNA, 55 nt, Homo sapiens
agggccaaagaagggagagagcccccaaagacgacgagcggcaaacgaagccgcg

SEQ ID NO: 234405 - RNA, 60 nt, Homo sapiens
ggccggggagggccacagcaggaaagagaagggagggcgacgagagccgaagcagaggcc

SEQ ID NO: 234406 - RNA, 76 nt, Homo sapiens
gcggacacagccacaggggggagacgggaccagcaagccgagaaagggaggcggaacagacacagaggaaaaagac

SEQ ID NO: 234407 - RNA, 85 nt, Homo sapiens
agcccaccacgggagacccggagaaggaaaaccccggcgccagcagaaccggcggggagccgcagaacccagcggcagcaaggcc

SEQ ID NO: 234408 - RNA, 62 nt, Homo sapiens
caccacgcaccgcagccgcgagagaggcaagccgggggggcaaagaaaaaggagagaaaaag

SEQ ID NO: 234409 - RNA, 33 nt, Homo sapiens
gagaggcacagaacagcagggggagagagggag

SEQ ID NO: 234410 - RNA, 74 nt, Homo sapiens
agaacaggcgaagagcacacaagagaggggacggcggacaggacaacagcagcacggcagacaccgaccgggac

SEQ ID NO: 234411 - RNA, 78 nt, Homo sapiens
cggaaaggacaggggaaggccaaggcaaggcagaccgccacagagagcgggcacaggggaagggggccagacaaccag

SEQ ID NO: 234412 - RNA, 73 nt, Homo sapiens
gggagcagaagggaggcccaagacccacaacaaaaggaacaccgccagaaagggagaggaccgacaaaagaga

SEQ ID NO: 234413 - RNA, 41 nt, Homo sapiens
aaagccccaccaaaacaaggccccgggaccaaggacacgca

SEQ ID NO: 234414 - RNA, 68 nt, Homo sapiens
cggcgcgcgggaaaacccgggccaacagccggagccaggacaaaaccaggcagaaccaacacgaaccc

SEQ ID NO: 234415 - RNA, 81 nt, Homo sapiens
cgaaccgagcgggcggcgggcgcgcgcaccagggggagaaacccgggaccaggcgaacagaggaggaaagagaaagccccc

SEQ ID NO: 234416 - RNA, 65 nt, Homo sapiens
ggagcccgagagagaaggggaagcagagccccgggccgggaaggggaaacggccacgcaggaacc

SEQ ID NO: 234417 - RNA, 65 nt, Homo sapiens
aagagcacccgacccacaggccagagagaaaagagcgagaagaagagaggcggccgcccaggaag

SEQ ID NO: 234418 - RNA, 72 nt, Homo sapiens
ccgggggaacgggaccaaaccgcaaagccaccaccacagaaggccggcccacagcccaaaaagaaacaggac

SEQ ID NO: 234419 - RNA, 80 nt, Homo sapiens
ccagccgcgcagacagcagacacgaccgcaggaacagacaagcggaaccagaaccaaaacaaagacaagagaaccacacc

SEQ ID NO: 234420 - RNA, 66 nt, Homo sapiens
aaacacccacggaaccagagacgaaacccacccaccacccgagaggaaacgcaaccaagacaagaa

SEQ ID NO: 234421 - RNA, 67 nt, Homo sapiens
ggaaaccacccagagacagaagagcaaaaggaaccgaggaaaaagccaaggaacgaacagggcgggc

SEQ ID NO: 234422 - RNA, 79 nt, Homo sapiens
ccgccggcacaccgaggacaggaccgacagcacaacaccgcacggggagccaagccgggagacccgaccaccggaagcc

SEQ ID NO: 234423 - RNA, 66 nt, Homo sapiens
cacaccaaaagagggggaacaagacgccagacgacaaaaggggcgcgcccacgaggacgagagcca

SEQ ID NO: 234424 - RNA, 78 nt, Homo sapiens
ccgggcagcaaacaagacacacgaaagaggcaagccaaggagacaccaggaaacgagaaggagccgaggcccccgcaa

SEQ ID NO: 234425 - RNA, 87 nt, Homo sapiens
cgcagcagcagccgccaagacgggcgcacccacgacgcgcacaccaccggcagaccggcgccacagcaccacccgacggcagcgcgg

SEQ ID NO: 234426 - RNA, 80 nt, Homo sapiens
gcagagggcaccgagcggcggagagccgggagaaacacaaagaggaacccagaaccgcgggcagcaagaaccaccaaaca

SEQ ID NO: 234427 - RNA, 78 nt, Homo sapiens
gaacgagcgacggcggaacccggggccgggacgcagcccggcggcagcaggaaccagaaagagacaagaagggaccgg

SEQ ID NO: 234428 - RNA, 77 nt, Homo sapiens
gcgcgccggcgcgggaagcccgcggcgcgcgccccccggacccgcaggggggaagaggagccggagggcaaagcaag

SEQ ID NO: 234429 - RNA, 81 nt, Homo sapiens
caaccagaccgggagggggcgccaagcagagagaagaagaaggaggccgcggccagaaacccaagaaaaagcgaaggaacg

SEQ ID NO: 234430 - RNA, 74 nt, Homo sapiens
cggccaccgcgcacccacgaacgcccaccccccgaacccagccgcaccgacagaaaggccagccacggaacagg

SEQ ID NO: 234431 - RNA, 65 nt, Homo sapiens
gacagcggccaacccccacccagcccagcaacgcaccagagagcgaccgcagccgaagcacccga

SEQ ID NO: 234432 - RNA, 67 nt, Homo sapiens
cgggccgcacaaggaggaaagggaagaaagcaccgccgaagaccaaagaaacgaaagggagccagcc

SEQ ID NO: 234433 - RNA, 79 nt, Homo sapiens
cgggaggaggcgcccggcgccggaggggccagacccccaagaagaacaaggccacacagccgcacgagaggaacgcgac

SEQ ID NO: 234434 - RNA, 34 nt, Homo sapiens
gggggacgggcacggggacaggaacaggcaaaaa

SEQ ID NO: 234435 - RNA, 72 nt, Homo sapiens
accgcaacacccacagcaggaggccgggcagaacggccacacagagccagaaccagcagcacagagccccca

SEQ ID NO: 234436 - RNA, 52 nt, Homo sapiens
cgaccagcaggaacggccgcggaggaggagaacaccgacaacagcggaacag

SEQ ID NO: 234437 - RNA, 73 nt, Homo sapiens
ggccacgaccagaggccggggacaaggaacaagcagaaaaaggaaaaaaggcaggagacaagaggagcaaaca

SEQ ID NO: 234438 - RNA, 61 nt, Homo sapiens
cccaggcggcgcggacggggcggaccacgagaagcaacaggcacaaggccggcggaaaaaa

SEQ ID NO: 234439 - RNA, 75 nt, Homo sapiens
gccgcgggcgagggacaaaaggcgaagacgccaagaccacgaaggagcaggaaaacagacgaaacaccccccacc

SEQ ID NO: 234440 - RNA, 68 nt, Homo sapiens
cgcccggcggccggggagccggcccaagcgggacaaagccaccaggaggccagccagcagcaaaagaa

SEQ ID NO: 234441 - RNA, 109 nt, Homo sapiens
cccccccaggaagccagaagcaaagaaaccacgggaagacagcgccagcaaaaggagacccaaaggagaaaggagcaagaggacacggaacggcgacaagcagcacacc

SEQ ID NO: 234442 - RNA, 60 nt, Homo sapiens
ccgcacaacaagaggccggcggggcgacaggaggagacgggcaggggaagcagagcggag

SEQ ID NO: 234443 - RNA, 67 nt, Homo sapiens
cgcgccggcccacgcgcggccaagagagcaccacgaggaccgccccgagcgcaagacagagaaagga

SEQ ID NO: 234444 - RNA, 77 nt, Homo sapiens
agaggcggacggaggagcaggcgagaagagaaggcggccggcgggggcacgagacgcacaccccccaccgagacgga

SEQ ID NO: 234445 - RNA, 44 nt, Homo sapiens
ggagaaaagacagcaaggaccgaggcacaagcagaggaaccagg

SEQ ID NO: 234446 - RNA, 40 nt, Homo sapiens
gggggccggaccgggagggcagcaagaagaacgcgaaaga

SEQ ID NO: 234447 - RNA, 57 nt, Homo sapiens
agcaccggaaacagggcccacacaggaacaggcaaggcgaggcaggcacgaccggga

SEQ ID NO: 234448 - RNA, 68 nt, Homo sapiens
cagccagcgcagccccacagccagccccgcccaggagccagcggagagaacaaggagcaggccaacgg

SEQ ID NO: 234449 - RNA, 81 nt, Homo sapiens
acaggacaagggaacacacggaacacaccgcagccagaggaagacggaccaggagcgaccccaccaacaacgaacgcggca

SEQ ID NO: 234450 - RNA, 44 nt, Homo sapiens
caggcccgaacccccaggccacagagaccagagaggacaaccaa

SEQ ID NO: 234451 - RNA, 77 nt, Homo sapiens
ccagagaagcagagaaagacgggagcggggcgcgcagacccaagaccaagagaacaaacccagagaagcaaagaggg

SEQ ID NO: 234452 - RNA, 74 nt, Homo sapiens
ggaaacccgcgccgagcccagcgagcgacaacccccaggaaaagcagacaagagaacagggggacgccaggagc

SEQ ID NO: 234453 - RNA, 70 nt, Homo sapiens
ccggcgcgccccgcccggaccgcgcagaaccagggcggcggccagcgccacgcaaccaacgacaaacgca

SEQ ID NO: 234454 - RNA, 64 nt, Homo sapiens
aacaagggaaccagccaaaagccagcggcggggcagccgagggcaggagcaagaaggcgccccc

SEQ ID NO: 234455 - RNA, 85 nt, Homo sapiens
aggcggggcagccgacacgccggccgcgaacaacccggccagagcaggcgggggcacgaacagcacaccggaggaagccacacac

SEQ ID NO: 234456 - RNA, 77 nt, Homo sapiens
gaacagaacagggaccccacggccgaaggacccggggaggaagaaagccggccaggggcaaaggagaggaagaggaa

SEQ ID NO: 234457 - RNA, 37 nt, Homo sapiens
ccccagcgggcacggccaggggcgcccccgcgcccca

SEQ ID NO: 234458 - RNA, 63 nt, Homo sapiens
ccaagcagaggaaggaggaaacggagaagaaagaggggccggaaacaaagaaacgagcaaacc

SEQ ID NO: 234459 - RNA, 89 nt, Homo sapiens
cgagaaggcgcaaaagggacagacaccagacgaaaaaacggggaagggaaacagagaaaaagaacagcacagagggagggggcaagaag

SEQ ID NO: 234460 - RNA, 77 nt, Homo sapiens
ccggcccccaaagagcgggaacaggggagcacagggagacaccagagagaaccaagcgaagcacaggcaggggggca

SEQ ID NO: 234461 - RNA, 71 nt, Homo sapiens
gaacacagaagcaaaagccgaagcaggacggagccacgaaagagaaaggagaccacaagaccccgcgccac

SEQ ID NO: 234462 - RNA, 81 nt, Homo sapiens
gcagaagaaggagccagcagagcgccaggcgaacgcacgacccccgaccggaacgggacgccgcgcgccagagcacccgga

SEQ ID NO: 234463 - RNA, 73 nt, Homo sapiens
acggggccagggaacccggcaccgccccagggcacacaaagcgggaaagggaaagccccaaagcagccgcacg

SEQ ID NO: 234464 - RNA, 60 nt, Homo sapiens
gcccaccgcgccgcaccagcgagagagagagagagagaggaagcgaagaaaaagcgccag

SEQ ID NO: 234465 - RNA, 99 nt, Homo sapiens
ggagaaggacacgcgaagaagaagagacaggccacgggaggaaaggaggaagcccggccaggcagagccaccagaagcacgcgcacacaaaaacgccag

SEQ ID NO: 234466 - RNA, 56 nt, Homo sapiens
cccggagggaaaggccgcaaggagaacgcaggaaaagggggccaggaagcaaaaag

SEQ ID NO: 234467 - RNA, 58 nt, Homo sapiens
gcgcgcgggcacccacggagccccggggcggccggggcagcagaagaggacaagcaga

SEQ ID NO: 234468 - RNA, 42 nt, Homo sapiens
ggcaaacccgagagaacggaaagccaacaggcagaccagaga

SEQ ID NO: 234469 - RNA, 75 nt, Homo sapiens
ggaaagaagcccagagacgaacgaggaagaaaaacagcagaaaagcaggagccgggcgggaacacgcagggcccc

SEQ ID NO: 234470 - RNA, 76 nt, Homo sapiens
ccagaagacagagggcgaggaagcgaagaaagcacacaaagcaacagaaaagaacaaccggcaagaagaagaagag

SEQ ID NO: 234471 - RNA, 80 nt, Homo sapiens
gcgcacacaggccccggaagaacccagacaccaggcaagaccgcgcgggaacccgcagacggagaaacgaggcaggggga

SEQ ID NO: 234472 - RNA, 87 nt, Homo sapiens
cgcccacagcgcggcgcggccgagagccgcggcccggcggaaaggacagcaggagaaagaaggggcaagaggaagaagcagaagcag

SEQ ID NO: 234473 - RNA, 79 nt, Homo sapiens
cgacacgcacgacccccccgcggcaacgcacagccacggggaaaaagcgggaccgcagccagcacaacaaacagcgcga

SEQ ID NO: 234474 - RNA, 76 nt, Homo sapiens
gcgagggcgcgaaagaaggagaacccaggagcccccgcagggccccggagcccacacggagcagcccgagagccgg

SEQ ID NO: 234475 - RNA, 75 nt, Homo sapiens
acaccaggaagcaaggcaaagggaccccagcaacaaccggaagaggggaccacacgaccgcgagcccaacaccgg

SEQ ID NO: 234476 - RNA, 88 nt, Homo sapiens
cgggcaagaggcgcaaacaagccaacccaggaggaaaaacgggaaagggagcagcaccggccacacccacagcacgaccggaacccag

SEQ ID NO: 234477 - RNA, 75 nt, Homo sapiens
gagcgaaccagccagaaaaaaaaggaaccgggagaagggaaaaggagacgcgcggcgccggaccgcgcccgggac

SEQ ID NO: 234478 - RNA, 71 nt, Homo sapiens
ccccggcccgggagccaggcgccacaacggagggacagacgcaggacagaggaaggcagcaagaaaacacg

SEQ ID NO: 234479 - RNA, 68 nt, Homo sapiens
gagcaaaaacgccaggccgccagcaagagagcacgcaaagcaaacgccagaaggacaaggccgccaga

SEQ ID NO: 234480 - RNA, 73 nt, Homo sapiens
cccgagagcgggacgcaggcagagaccgggcacaaccagccagcaacccgcccgggccaagcaccgcccaccc

SEQ ID NO: 234481 - RNA, 78 nt, Homo sapiens
acaaaacccagacaccgacgggccgcgaggggaagaggaagcaaagccaagagcccgaaacggagagggcagcgaaca

SEQ ID NO: 234482 - RNA, 105 nt, Homo sapiens
ccgggcgcggagagcagggcggcggcgcggcagcaagggcggcggggcggcggcggcagcgcaggacagccagcagaacccgaaagaaggccccaagggaggcca

SEQ ID NO: 234483 - RNA, 78 nt, Homo sapiens
ccgagccagaggcgccggcccagccaaccgccgggcgcccccggacagaccaacgcccggaagaggccgcccagggag

SEQ ID NO: 234484 - RNA, 75 nt, Homo sapiens
aggaccggcgaggccccccccccagcagcaaagggacagaaggacaggagaaacaggggccaaaaaaccaaagga

SEQ ID NO: 234485 - RNA, 75 nt, Homo sapiens
aggcggccaggccaaccgaaggaacccggggggccagcggacagcgacggaccgcgcccaccaggccgggcaacc

SEQ ID NO: 234486 - RNA, 72 nt, Homo sapiens
agggaacacaaacaggggcaaaggcgccccacgaaacaccagggaccacggcagcacccgggacaggagaga

SEQ ID NO: 234487 - RNA, 71 nt, Homo sapiens
ggcagaacccaccgcgccggggccaggagagaacccacaacaacagccacggcagcgcgccacggaaacac

SEQ ID NO: 234488 - RNA, 37 nt, Homo sapiens
gcacgacgagagggacagcacgaggcaccagaaaaaa

SEQ ID NO: 234489 - RNA, 92 nt, Homo sapiens
gcggagccgcagccgcccagaccgcgcagcgcgggaggcaggccgcacgcccaaaggggcacaaaacgccccgggagagaagaggaggagca

SEQ ID NO: 234490 - RNA, 77 nt, Homo sapiens
gcgagcaccacggggccggaggcgggaccaccgcaggagccggcaggcgaagcaacaaaccaccacccagagacgga

SEQ ID NO: 234491 - RNA, 87 nt, Homo sapiens
cacagcccagccacagaacccagacagacgcagcaccacaagccccggggacacgcacaggcaagagcgaaggagaaaggcaacaag

SEQ ID NO: 234492 - RNA, 58 nt, Homo sapiens
acaagaaggccaaaaaaacccagcggaaagcaacaaaagccacaggggaaaagaaacg

SEQ ID NO: 234493 - RNA, 78 nt, Homo sapiens
gcgaaacggggcaagggccaaggccgggggaacccccaaaaaacggccccccgccaccagagcgagcagacggcaaaa

SEQ ID NO: 234494 - RNA, 76 nt, Homo sapiens
cccccagccagggcccgggaccccgggagcgccccggcacggcgcgccaccgggagagagccaccagagggggcgg

SEQ ID NO: 234495 - RNA, 72 nt, Homo sapiens
gcgcaggaaaggacccccagcaagaaccagaaaccaggacagaaacggaggcgggggcagcccgcccgcagg

SEQ ID NO: 234496 - RNA, 78 nt, Homo sapiens
ccggggccaacgagccaacgccaggcgccgcccacaggaccaaaggcgaccaggagagaaaaccaaacacacaggggg

SEQ ID NO: 234497 - RNA, 77 nt, Homo sapiens
acaacagccaagagggcgcccagagacaacgagagaacccacagcacacaggaacagacaaagaagaagacaccacc

SEQ ID NO: 234498 - RNA, 75 nt, Homo sapiens
ggcgcgcgcccgaggggagcaaggacagccacagcagaaaagacaggcggggccgacgccggcagacgagaccac

SEQ ID NO: 234499 - RNA, 35 nt, Homo sapiens
ccaacccagaagagccaagaaccgaagaacacaag

SEQ ID NO: 234500 - RNA, 71 nt, Homo sapiens
gcccggcgccccccccggcggagagaagccaaagaaacgccaaccgcccaaaaacccagagcagcagcaag

SEQ ID NO: 234501 - RNA, 81 nt, Homo sapiens
caccaacaggcaggccccggcgccacagccagcgcaacagaccgaagccaccaagaagaacagcagcagaagagaacaaaa

SEQ ID NO: 234502 - RNA, 80 nt, Homo sapiens
gcaggcagcaccagagccagggacaacaggacgagaaggagcgagcgccaaccagggcggaggccgagaagcagcagcga

SEQ ID NO: 234503 - RNA, 78 nt, Homo sapiens
ccaaagcaggaaccaggacacagaaagcaaaccagggggaccacagagacacgcaacaacagccgccaaaaggagcgc

SEQ ID NO: 234504 - RNA, 73 nt, Homo sapiens
cgcaaaagagaacaccaagggaaagcaaggaaccccgacagcagagacgacgcggcaagcagcggaagaggac

SEQ ID NO: 234505 - RNA, 53 nt, Homo sapiens
aggaaggccccagaagaccaccaagaggacggccccaacggcaccagcaacaa

SEQ ID NO: 234506 - RNA, 74 nt, Homo sapiens
gaagaagggcccggcccaagcccgggcggaggacacaggaaagggaagcgcccaacaccacaaaacacgacaaa

SEQ ID NO: 234507 - RNA, 89 nt, Homo sapiens
cacaagcaccccaaaacccaaggcagaaggagagcaggggccaggagggccgaagcccacagcgaggcagagaagcgaccccgagaacc

SEQ ID NO: 234508 - RNA, 92 nt, Homo sapiens
ggacgagacgccgggaccgagggccggggacaaggccgccgaggaacaggccagcgacagcccaccacaggaggagcagggccagcgcagaa

SEQ ID NO: 234509 - RNA, 67 nt, Homo sapiens
ccgcaggagggagaacgggacaaacccgaggcgagaaccaagacaacaggcgaagaagggaaacgag

SEQ ID NO: 234510 - RNA, 83 nt, Homo sapiens
gccgcgcagagcgggaccacccgggcacagcaggcacggagggcggagaacggaaaagcaccaggaagcagagaggaccgcag

SEQ ID NO: 234511 - RNA, 76 nt, Homo sapiens
cacgaggccagcacgggaacgcgaagcgccaaagccagacaaaaaaccgagaacagggggggcaaaaccaagcacg

SEQ ID NO: 234512 - RNA, 60 nt, Homo sapiens
cccgagagcgggacgcagacagaagacaggagccagagggacgggcagcaaaaagaccag

SEQ ID NO: 234513 - RNA, 63 nt, Homo sapiens
agagaaaccgggaaaaacacaacggaaccacaagaagaggaggagagaaagaacccacgcagg

SEQ ID NO: 234514 - RNA, 67 nt, Homo sapiens
gccgccgcgcaccgcagcgccggggcacgacacaaaaacaggcacaagaaagccgcccaggacgcca

SEQ ID NO: 234515 - RNA, 80 nt, Homo sapiens
ggaaaaccagagaaacaagaggaggagggcaggagaagaaaggaagagacgacagccagcaggcaggagcccgcccagaa

SEQ ID NO: 234516 - RNA, 79 nt, Homo sapiens
acaaagaacgagaggagagagggaccacacgcgccaacacagaaaagaaaccacacaacaagaacgcgccagaagaccc

SEQ ID NO: 234517 - RNA, 59 nt, Homo sapiens
cagacaaaggcaggccgaacagagagaccaaaacacggaggacaaggcaaaagcccgaa

SEQ ID NO: 234518 - RNA, 90 nt, Homo sapiens
gcggccgaggcggccaggggaccgggaggggcgaaggcgggcggcagaggcgacaggggggcgcacacgcagaaagaacagcgaaaaagg

SEQ ID NO: 234519 - RNA, 80 nt, Homo sapiens
gaagagagcaaggcaaaggagaacccgcaagccagaaagaaacagaaagaagggagaagggacaggccgcgcggccggcg

SEQ ID NO: 234520 - RNA, 67 nt, Homo sapiens
aggcggcgcacaggaagcacgacaacggcaagcggagaagagcaaggccgaaccgagaggaagggca

SEQ ID NO: 234521 - RNA, 77 nt, Homo sapiens
gggagccggggccggcggggggcgcgcccggcagcccgccacagccacgagagagcacaaggagagaacaggggggc

SEQ ID NO: 234522 - RNA, 85 nt, Homo sapiens
aaaagagcgaaaaagacacgccgggcaagacacaagggcgacaccagaaagcgcgcgaccggggggagagacgaagcccgacacg

SEQ ID NO: 234523 - RNA, 67 nt, Homo sapiens
ggacccggccagcgacgcaccgagaaaggaaggaaaaccgacgaggccagacagccaccgaaggggc

SEQ ID NO: 234524 - RNA, 82 nt, Homo sapiens
caccaacaacaccacaaaaccacagccaagaccaggcccgcaagccaaggaacaagaacggaaaacgccggccgccaccaga

SEQ ID NO: 234525 - RNA, 89 nt, Homo sapiens
cccgaagcccccgcaggaaccacaacccaaccagaaaaacaaccaccagcgagcaaaaaggcaaagaccaagaccaccaagaagcgccc

SEQ ID NO: 234526 - RNA, 76 nt, Homo sapiens
agcagagaaagggaagcggcacacgagaagggcgagcagacaaaggcacgcagaaagaagcgggaggaaaaagaag

SEQ ID NO: 234527 - RNA, 84 nt, Homo sapiens
cccacggagcaggagaagcccaaggcccaggcacaagggagcgccggaaacccgggccccggccccaagggcaccgggacagaa

SEQ ID NO: 234528 - RNA, 72 nt, Homo sapiens
gcgccgccgcccccggagcgcggcacgaggcgggccggagaagacagaggagccagaccaagagacagcaca

SEQ ID NO: 234529 - RNA, 81 nt, Homo sapiens
cggagaccccaccgccggcgcgggaaacgggcgaagcgacgagccgcgaggagagccaggacaaaaccaggcagaaccaac

SEQ ID NO: 234530 - RNA, 75 nt, Homo sapiens
ccgcacacggcagaccggagcgccacgccaccacagagaccaacacggaacagaaagaaggagcccccaaccacg

SEQ ID NO: 234531 - RNA, 71 nt, Homo sapiens
gggggaccggcgggcgggcacgcagcacgggggcaggggccgacccagaacgccagcgccgcaaggaaaaa

SEQ ID NO: 234532 - RNA, 81 nt, Homo sapiens
cgagaggacaggcggaggccccagggaagcgcagaaagcaggcgaacccgcggcgcaaaacgggagcgaggcggccagggc

SEQ ID NO: 234533 - RNA, 79 nt, Homo sapiens
caagacgggcagcgcaggggcgggaaagacccaggagaagccgcccaaagaacgacagcaaagcaagccaagagggccc

SEQ ID NO: 234534 - RNA, 83 nt, Homo sapiens
agggagcggacgcggggcacaccacagcgcagcccgaggcgccaggaagcagaagcgcagcacacgcggaagccacaaccaga

SEQ ID NO: 234535 - RNA, 78 nt, Homo sapiens
cacgcgcaagccacagagaagcagcggaagcagcgaacaggaccagcgaagcgcggcaaacagggaaaaaaagggcga

SEQ ID NO: 234536 - RNA, 42 nt, Homo sapiens
gcccccacgcacgcgcacacggggggagccaaaagggcacac

SEQ ID NO: 234537 - RNA, 82 nt, Homo sapiens
agcccgcagaccgcagaaggccggagacaccagcagaaacgccgaagggaccaggcagacgggaagaacccagaaagaaagg

SEQ ID NO: 234538 - RNA, 76 nt, Homo sapiens
gggcgcgcggcggcccccaggccccgccagaggcaaacaacagcgaaaaagagagcagcgaggaaggagccagacg

SEQ ID NO: 234539 - RNA, 73 nt, Homo sapiens
accccgaaaccaagcgccgacagaaaagaaaaccccggcgagcaagagaccccaagacagcgggcgcgaccaa

SEQ ID NO: 234540 - RNA, 87 nt, Homo sapiens
cggagcgccggccggcggggagcgccaaggccgcagcaggagcgagaacccgagcagcgccagagcaacacaccgcgccccagcacg

SEQ ID NO: 234541 - RNA, 66 nt, Homo sapiens
aggcgacacaaggaaacaaaaaccgaggccagaaagcggaagccgcagaaggaccggccagaagca

SEQ ID NO: 234542 - RNA, 79 nt, Homo sapiens
aacgccacggggcagccgcaacaggggagaagacgcgcgccgaccgaggaggaagaaaagagcggaagcaaacaggaag

SEQ ID NO: 234543 - RNA, 85 nt, Homo sapiens
ccggaagcccgggagcggagcaaccggggagaagccggcccgacgccagaacccacgagaagcgacccagacaaaggcaggccga

SEQ ID NO: 234544 - RNA, 72 nt, Homo sapiens
agagcgcggccagcaccccaacgggccaaagcaaaccagaagagacgggcaaaacgccgaaacacggaagaa

SEQ ID NO: 234545 - RNA, 83 nt, Homo sapiens
cgcccgaggacccgcaggacccgcaacagcgcagagggccggaccagaaaggccaagggagaacccaagccgccggcgcaaac

SEQ ID NO: 234546 - RNA, 39 nt, Homo sapiens
ccggagagcgggaacaggaaggacccacaagaccaagca

SEQ ID NO: 234547 - RNA, 84 nt, Homo sapiens
cagagggcaagaagaagaaaaagcagaagaggccgagcagacccagaagaaacagcagcggcccggggaacaaaacagagaaca

SEQ ID NO: 234548 - RNA, 65 nt, Homo sapiens
gggacggggaaggccggggcgcccggcgccggccgagaaggcagaggcgccaacccgccgaaaaa

SEQ ID NO: 234549 - RNA, 66 nt, Homo sapiens
cgacaagaacacccagcagccaacaaggagaagacgcacaccacagaccaaagccgaacaccacaa

SEQ ID NO: 234550 - RNA, 76 nt, Homo sapiens
ggaacaaacgagggcccgggaggaccgacgcagccaggcacaaggcacaaagcaggaggcaggaggccaggaagag

SEQ ID NO: 234551 - RNA, 77 nt, Homo sapiens
aaagaagagaagggaaggagaacaccacccggagggccaaaacaaacaaggggggaagagaagagccaagaaaccgg

SEQ ID NO: 234552 - RNA, 55 nt, Homo sapiens
aagaaaccaagaaaaagacgcgaaaaagcaaggcgccaccggaagaaacgggagg

SEQ ID NO: 234553 - RNA, 41 nt, Homo sapiens
gccacagaaccgccaccaggaccagacagaagggccccgag

SEQ ID NO: 234554 - RNA, 60 nt, Homo sapiens
caccgagcccagaagacaagacagggagcaacaaagaaagccgcagcggggagaagccca

SEQ ID NO: 234555 - RNA, 78 nt, Homo sapiens
cccgccagcaccagaggagacaagccagcaccagcggccaagccagacgaaaagccggacccaggagaagaggggaga

SEQ ID NO: 234556 - RNA, 76 nt, Homo sapiens
gcagagcccggggaaccgccaccagcacaccacccgggccggggcagcagcccagccaaagccggaaaaggaccca

SEQ ID NO: 234557 - RNA, 66 nt, Homo sapiens
caccacaggcagaccacacccacagaaggagagcaaaggagacaggagcgaggagcaagagaaccc

SEQ ID NO: 234558 - RNA, 79 nt, Homo sapiens
cgccgcgccgcgcgggggggaggggacaggcgagagacgagaagaggccacaagcagcgccagagagcgagcagagaac

SEQ ID NO: 234559 - RNA, 68 nt, Homo sapiens
acccacagacgcccagaggacaaaaggggccgggcaccacaaggaaagcaaaaccagaggcccagaag

SEQ ID NO: 234560 - RNA, 73 nt, Homo sapiens
gggaacgaccgaaacaccaggaggccgggcaggcggccgaccaggaccaccagccccggggccaaaaaacagc

SEQ ID NO: 234561 - RNA, 60 nt, Homo sapiens
gggcaaacccgagagaacggaaggggccgcccgaaagaagcccggaggggacggagcagg

SEQ ID NO: 234562 - RNA, 80 nt, Homo sapiens
ccgggggacaagcggacgcggggagcgcaggccaggcacggagcgcgccccaccgcggccgccggggacacagagccccc

SEQ ID NO: 234563 - RNA, 69 nt, Homo sapiens
ggccggaggaaggaaagcccccaggcacagagagcaaccaggcaggagccaacccagcaacacgacacc

SEQ ID NO: 234564 - RNA, 60 nt, Homo sapiens
ggagaacacaggaacaggcgcgggcccgacaacaagccaaaacgcaccaaaggcagagga

SEQ ID NO: 234565 - RNA, 36 nt, Homo sapiens
aacacaaagaggcagcaaaggcccagcgggagaagc

SEQ ID NO: 234566 - RNA, 74 nt, Homo sapiens
cccgccaacacaccacgggaccgggcaagggaagaaaaggcgccaccaggggccagaaccgcccacggccccca

SEQ ID NO: 234567 - RNA, 70 nt, Homo sapiens
gaagcaaaacccagagaagagagaagaacaccgaaaccagaagggcgcccgagaccaaggcgcacaggaa

SEQ ID NO: 234568 - RNA, 75 nt, Homo sapiens
agcaacagaaaccccccacaggaaaggagggaagccagaggccaaaggcaggagacaggacgacacaaacacagc

SEQ ID NO: 234569 - RNA, 73 nt, Homo sapiens
cgacacacgggagcagcagcgccccgccaaggccgagacacgaaagaaggcagaacgaacgacagaggcgaac

SEQ ID NO: 234570 - RNA, 74 nt, Homo sapiens
gcccgccgcgggcaggagagcagccagcggcgcgagggcggcccgcagaagagcacagaaggagaaggccagca

SEQ ID NO: 234571 - RNA, 60 nt, Homo sapiens
ggcgaagaccgcggcgcgcaaagcggccaaggccacggggaagcacaaaggggcaccaag

SEQ ID NO: 234572 - RNA, 62 nt, Homo sapiens
gcgcaagaaaaggagccggaaacggacaaacagagcccagaggcccggaaggcgcaaaaggg

SEQ ID NO: 234573 - RNA, 70 nt, Homo sapiens
cgcgcggggaagaaggggccgacccacacccggagcaggcccagccaccgcgcgaaccccgcgagggacc

SEQ ID NO: 234574 - RNA, 71 nt, Homo sapiens
gaaccgaaaggagagcacacagcgggcagcgagcaggagcacgaaggggagaaaagggaaggccccaagcc

SEQ ID NO: 234575 - RNA, 76 nt, Homo sapiens
cgggcggggccggcgccgaggcagcccgaggagcgagggaccccggaggcacagccacagccgcaagccaagagca

SEQ ID NO: 234576 - RNA, 84 nt, Homo sapiens
gcccggccccaccaaaccgggaccaggggcgcaagggacccacgaaggagaagcgggggccaggccgaaaggcccggaagcaga

SEQ ID NO: 234577 - RNA, 84 nt, Homo sapiens
cacaggcgcagaagaaaccaccaggaacgcggcacgcagaaggggaaaggagccccaagcagccccggaaagccagcgccacag

SEQ ID NO: 234578 - RNA, 77 nt, Homo sapiens
caaccacaagacgaccaaaggaggaaggcgaccggcccgaggaccgccgcacgaccaaacgcagaacccacacccca

SEQ ID NO: 234579 - RNA, 75 nt, Homo sapiens
gaacccgcccagaagccagaccccagacaccaaccacaacaaccgcaaacgaagaacccccagagcagcaccggc

SEQ ID NO: 234580 - RNA, 72 nt, Homo sapiens
aggcaaccaccccggagccaaaggaaaccaacacagagcggaagcgagagaaaagaagaaggcacaaaggaa

SEQ ID NO: 234581 - RNA, 87 nt, Homo sapiens
cgggaagacggaagaaacaggggaccaaaagaacccagccaacccgcagagggaggggaggggcgagcggaggagagcggggcccaa

SEQ ID NO: 234582 - RNA, 58 nt, Homo sapiens
gccccccggagacgcaaccaagcaaaccagccggcgggcgccacaacggacgacgaaa

SEQ ID NO: 234583 - RNA, 84 nt, Homo sapiens
ggggaacgggcaccccccagcagccagcaacaccccggggaaagcagaaggcagccggcacccgcacaacccagggggccgaac

SEQ ID NO: 234584 - RNA, 68 nt, Homo sapiens
cgaaaacgaagacaccaagcgggacccaaagcgggaaccaaaggcacggagacaggggagagccaccg

SEQ ID NO: 234585 - RNA, 60 nt, Homo sapiens
aggaaaaggccacagggcccgagagccaaaaaagagccgggacaccacagcaagaggaac

SEQ ID NO: 234586 - RNA, 72 nt, Homo sapiens
ccacaaagagggaccgcaggagagcccccccagcaggaaaagacgggcagaaagaaaacccgcggaaggaca

SEQ ID NO: 234587 - RNA, 71 nt, Homo sapiens
cgggcagaacagaggagcccgccaaagggagaagacaagcgaaaacggccgcaaccagggaccaggaggaa

SEQ ID NO: 234588 - RNA, 72 nt, Homo sapiens
gccaaaggaaaacaccacaagaggacaaccggaaaggagcgccgcaggcccaggcaccagcaccagcgcgca

SEQ ID NO: 234589 - RNA, 83 nt, Homo sapiens
aaaagacagaggcccagagaagcgcggagcagagaggagagagaaagagggggcgagagaagaaggagaaaagaaagccagaa

SEQ ID NO: 234590 - RNA, 50 nt, Homo sapiens
gggccacaaaccggcccaacaaccacaaggacccccaggcaaaccgcccc

SEQ ID NO: 234591 - RNA, 64 nt, Homo sapiens
gaggcgggcgggccggcgagcgcagcgcgaccgggaggcccaggacccccgcacaacccgcccg

SEQ ID NO: 234592 - RNA, 115 nt, Homo sapiens
ccccccgcccgccggagcagcgagggcccccagccagcccgacagccgcaaaacacagcagggaaaacccggaaccagaaggcagcgaaaagccaagaaccgcgcagacgccgga

SEQ ID NO: 234593 - RNA, 74 nt, Homo sapiens
gacacagcccagccgacaacagcagcgagagagaaaagaaggaaggcaggacgggcaagggcaccacccaacaa

SEQ ID NO: 234594 - RNA, 78 nt, Homo sapiens
cggaggagacacgaacagcaagagccaacacagcacaagggcagcaccagaaaggccgcgaagaggaaacaaaagcgc

SEQ ID NO: 234595 - RNA, 101 nt, Homo sapiens
aagcaagcacaagacaccccagacaagggaagaaaaaagagacaccaagaacaaaccgaaggccggaggaacccacgcgggcaaaggacacagcaaacaag

SEQ ID NO: 234596 - RNA, 56 nt, Homo sapiens
cggagcgacccgccacgcggggcagagcaggcgagacagggggaggcgacggcccc

SEQ ID NO: 234597 - RNA, 58 nt, Homo sapiens
gccaggaccgcggggagaccgggcacacggacggccggcccggccacccccgggcccg

SEQ ID NO: 234598 - RNA, 70 nt, Homo sapiens
ggaaagggaacgaacaagagaggaccaaacagacacagaacaagcacaaagggagaagcagaccgcacca

SEQ ID NO: 234599 - RNA, 73 nt, Homo sapiens
gcgaacacgaaaacgaagagacccgcaccggagagcccgccggcgccgagggggcgggggacacagccacgcc

SEQ ID NO: 234600 - RNA, 71 nt, Homo sapiens
ccccaggcgacaacagaagaagacaccccgcacagcggaagagcaacaaggaccagaagaaccagcagcag

SEQ ID NO: 234601 - RNA, 59 nt, Homo sapiens
cgcgggcccgagcagccagaccgacccacccgcgcgggccgacgcccgccgcggccggg

SEQ ID NO: 234602 - RNA, 77 nt, Homo sapiens
agaaggaccaagaaccaggccaagacaaggccgagaccgcgggaagaagaaggaggagcgcgaaacagcggacgacc

SEQ ID NO: 234603 - RNA, 59 nt, Homo sapiens
ccgagggccgcgccagcgccgccggggcgcgcagaaccaaggagacagggaaaaccgac

SEQ ID NO: 234604 - RNA, 75 nt, Homo sapiens
ggcggaagacaggccacccagcggggagcacggcgagcagccaggccaggagagaaccaggacgcgagaaaggcg

SEQ ID NO: 234605 - RNA, 77 nt, Homo sapiens
gcaacgggacagcacgagcccggcgaaaaacagccaagagaaaggagggcaaacagcaacgaagccccgaaaccaag

SEQ ID NO: 234606 - RNA, 78 nt, Homo sapiens
aaagaaaaaagggacccacccaggacgaaccacaagacaccgaaaccacagagcgaagcgaggaagagaccgggagga

SEQ ID NO: 234607 - RNA, 57 nt, Homo sapiens
ggggaggccagccagcggcaagaaaggaaaaggaagaaccggccaaccgagccggag

SEQ ID NO: 234608 - RNA, 78 nt, Homo sapiens
cggaaacaccggaaacaggccaccgaccacagccacccgcacggcaaacagaagggcgcaggaaaaggcgcacagaga

SEQ ID NO: 234609 - RNA, 72 nt, Homo sapiens
ccagaacaagcgcaggaagacgggaagccaagcaggacaaccacaaaagcagcaaacagaagccagcccacc

SEQ ID NO: 234610 - RNA, 40 nt, Homo sapiens
cgcccaagcagaaaagaagggacacgcccaaccacaggag

SEQ ID NO: 234611 - RNA, 78 nt, Homo sapiens
agcgcccgccccgccgccccacgggaggaggaggcccgcccggccgagaccccgcgggagcaggggaaagcgcgagcg

SEQ ID NO: 234612 - RNA, 86 nt, Homo sapiens
agcccggccagcggccgagagcgagggaggagccccccgacccagcgaccaccgcagaggccccagcagcgaggaccccgaggagc

SEQ ID NO: 234613 - RNA, 79 nt, Homo sapiens
gaagccaacaaaagaggaaaagcggagccacaggcagcccagcagacggggcccagggagacaagggaaggggacaaag

SEQ ID NO: 234614 - RNA, 74 nt, Homo sapiens
agagcacagccgacacagccccgggacccccaagagcacaggcagaaggcacaagggaagaagagagggcgaag

SEQ ID NO: 234615 - RNA, 67 nt, Homo sapiens
aggggggagacgggccggaacacccggcgaaccagagggggacccagaccccaccaccgacccgggg

SEQ ID NO: 234616 - RNA, 35 nt, Homo sapiens
cacgagaaccaccacaacgcccaagccgaacgagg

SEQ ID NO: 234617 - RNA, 79 nt, Homo sapiens
cggggcggagcccggagcagggggaaagacaaggagccgggccgagaaaccgaaccagagaccagagaagaaacgcaaa

SEQ ID NO: 234618 - RNA, 55 nt, Homo sapiens
agaggaaaccgcaccgcccggagagcaacgcacacggagcggccccgagcaaaga

SEQ ID NO: 234619 - RNA, 68 nt, Homo sapiens
cgacaggaggagacaggcgagagaggaggacacgaccgggcaacgagcaaccaaaaccacggaagaaa

SEQ ID NO: 234620 - RNA, 65 nt, Homo sapiens
agaccacacacgggaaacacaaaaccgcgaagccaggggcaaaacggggaaccgggaggacccac

SEQ ID NO: 234621 - RNA, 87 nt, Homo sapiens
caacaaccggagcccaccaccaccaggcagcggggccagcaggccaccgcacaaaggaagagcgacagcagagaccccaacacccag

SEQ ID NO: 234622 - RNA, 78 nt, Homo sapiens
gcagcggcacgcacgcgaagacagcggcagggggagccccccagacccgaaaggagacaagaggacagccgcacggaa

SEQ ID NO: 234623 - RNA, 73 nt, Homo sapiens
acagaaggcgaaacagaaggcggaggcagaacgaaagagggccagccaccaggcccagccggagcgcaccacc

SEQ ID NO: 234624 - RNA, 68 nt, Homo sapiens
caaagaagccagccccgagccaggaggcgagggagcagccggagccacacccccgccggagacaaagg

SEQ ID NO: 234625 - RNA, 81 nt, Homo sapiens
cggacagcgcgggagaggaggggccgagccgaggggccgcgcccgccggcggggccccacccagcagaaaccaccaagaaa

SEQ ID NO: 234626 - RNA, 69 nt, Homo sapiens
gcgggagagcggggaagggggaaaggcaccaggacaagcaaaggaggaaaaggcccacacgaccaggaa

SEQ ID NO: 234627 - RNA, 55 nt, Homo sapiens
gggaagggcgacagcgcaaggagacgaagccaccaacaacaccagggacacaaca

SEQ ID NO: 234628 - RNA, 84 nt, Homo sapiens
ccgggccgggcggggccccagcgcccgggcgcggggcggaaaaggccggcagaagggaggcacgaggaaagagcccagaccccc

SEQ ID NO: 234629 - RNA, 48 nt, Homo sapiens
cagcacccgcccagaggcgagagggagggaggcaaaggcaggaaaagc

SEQ ID NO: 234630 - RNA, 69 nt, Homo sapiens
acaacagccccagggaccaggcacaacaggcccaacacgcagacggcaggccagggcaggacagcagcc

SEQ ID NO: 234631 - RNA, 77 nt, Homo sapiens
agcaaccaacgggccggcgcaggcccgcggggagcgcagcccggcggaggcggacaacggggaccgcagcggaacac

SEQ ID NO: 234632 - RNA, 81 nt, Homo sapiens
aaagacgaggagaacgaaaaagaagccgcagagacagaaagagagaggaaggagaaaagaggaagacgcagcagagaaacg

SEQ ID NO: 234633 - RNA, 78 nt, Homo sapiens
ggcgcccggacgggggggggcaaacaccagcaacacccgggacaaaaacgggggccaccacccccaccgaaccagcac

SEQ ID NO: 234634 - RNA, 71 nt, Homo sapiens
aaacgggaagagagggaacacgcaggaggggggaagccagaacaagcccaaccaaaccaacaagaacagag

SEQ ID NO: 234635 - RNA, 75 nt, Homo sapiens
cacgacagcaaccaacggcgcggaaggccccagggcaggggcccggagagcgcgccccccaggacccagaccgag

SEQ ID NO: 234636 - RNA, 60 nt, Homo sapiens
acaggaagggagaagcaagaggacacgaagacacagacgaccagaggacgcaccagaaga

SEQ ID NO: 234637 - RNA, 76 nt, Homo sapiens
gaggcagagccaagagaacaggcaacacagggacgcccagaaggaacgcaggcaaaccgacaccagcgacacaagc

SEQ ID NO: 234638 - RNA, 40 nt, Homo sapiens
cccaggccgccggccccacagggcacaaagggacccaagc

SEQ ID NO: 234639 - RNA, 73 nt, Homo sapiens
agaaggccgagaagccacccacgccccggcccgcgcccgggcaagagcaaagagaggcaccgggaagcccaac

SEQ ID NO: 234640 - RNA, 75 nt, Homo sapiens
gccaccaccgaaacgccaaaaagcccggacgccacaagagaaaggacgccccggggagaggacaagagcgcaagg

SEQ ID NO: 234641 - RNA, 74 nt, Homo sapiens
cacacccagcagcggccgaagaaaccaaaagcgcacgggaagcaggaaaacgaggccgcgggccggggcggggc

SEQ ID NO: 234642 - RNA, 82 nt, Homo sapiens
gggacccagacgacgcacagggcaaagaaaaagaagaagcacacacacagaaaaacaaccaccagcgagcaaaaaggcaaag

SEQ ID NO: 234643 - RNA, 81 nt, Homo sapiens
aagccacggagcgcgcggaggaggagcaggaggaaagagggaggaggccacaccaagccagcccacgccaaaaagggaaaa

SEQ ID NO: 234644 - RNA, 71 nt, Homo sapiens
agggcaacaccaaaaacaaaacgaaccaggacggcaaaaaaagaggaggagccaacggccaaggaaagcag

SEQ ID NO: 234645 - RNA, 77 nt, Homo sapiens
ccacgcaacggcggcaaccggcgggggcaccggcccgagacgaggcgacggcaaaacaaagcaggaaggggccgaga

SEQ ID NO: 234646 - RNA, 72 nt, Homo sapiens
cgaccggagaggggaacagacgcagggcagggccccgcccggcggggaagggacacaggacaaggagccacc

SEQ ID NO: 234647 - RNA, 75 nt, Homo sapiens
ccgaagacacaccccacaggaccccagagcgacagcccgggacaccaagaaagaacgaagaagaagcggccgcga

SEQ ID NO: 234648 - RNA, 80 nt, Homo sapiens
caggaccgcaagcccgcagggacgaggccccaagggaagaaaacgccagagaagcagagcagcccggagcgaggggagac

SEQ ID NO: 234649 - RNA, 96 nt, Homo sapiens
ccacgcggagaggggggcagaagaaggacagaaaacgggccccagacacaagccccaccaagaggacaccccaggaacgcggaggcgaggagcacg

SEQ ID NO: 234650 - RNA, 79 nt, Homo sapiens
agagagacgcaacagaaagaggggggccgcagccaaccaggaccagaacaagggaagaaggagaaagggccaaccccga

SEQ ID NO: 234651 - RNA, 65 nt, Homo sapiens
aaaagacacggcaagaggaagggaagaggagaaccaaagcggggcacgcaaaggagaggaaaggg

SEQ ID NO: 234652 - RNA, 73 nt, Homo sapiens
aacgccccggggcggacagaggggaagcaagagagaggacagagacgaggcgggcccaagggcaccaccggca

SEQ ID NO: 234653 - RNA, 74 nt, Homo sapiens
gcagcaccgaacaaccggcggaaggccaaagacagacgggcccagcacacagggacaacgccaggggcacacgg

SEQ ID NO: 234654 - RNA, 70 nt, Homo sapiens
cggaaggcgcaccaccacccacagcagaccaagggaaaaccaaaagaggccgaacaacgggcaaccgaag

SEQ ID NO: 234655 - RNA, 74 nt, Homo sapiens
cgagcaacaccgagagaggaggagccagacgacaagcacacacaggcgcgaaacggaaaaagaccgggagaaga

SEQ ID NO: 234656 - RNA, 77 nt, Homo sapiens
cagacaagaggaacaacaagcaggcaggcgacggacaggcggacagacccaccacgccacccaggccccaggcccac

SEQ ID NO: 234657 - RNA, 86 nt, Homo sapiens
cggaagcgccccaccgcgggcgccaaggggagcagaaggaccggacacagacaaaaggacagcgacagacagcaaacacagccaga

SEQ ID NO: 234658 - RNA, 82 nt, Homo sapiens
cacccagaagaaaagaaaccaacaccgccgaaaaaagggaagcaccaccacccaaagacacccagaccaggccgaagaaggg

SEQ ID NO: 234659 - RNA, 72 nt, Homo sapiens
gaaggcaagaaaccagaaagagaacgggacaacaaaagagccacccaagaagaagcaacagcagcaagaaac

SEQ ID NO: 234660 - RNA, 63 nt, Homo sapiens
gcgagcggacagaggaaagccgaaaaccagggaaagagaagaaggaggagcgaagcccccaga

SEQ ID NO: 234661 - RNA, 70 nt, Homo sapiens
aagaggccacgcagagccacgccgggacgcacaaagcccagggacccccagaccaccgggcgcaccaagg

SEQ ID NO: 234662 - RNA, 75 nt, Homo sapiens
gcaggagcgcagcacgaaaacggaaagggaaggggaagggaaccggcagcgaacgaggaaggggaaggaaaagcg

SEQ ID NO: 234663 - RNA, 77 nt, Homo sapiens
gaacaaaagcggcagcccaacccagaggaacgacccagagacgagccagcgcagagaggcccgaaccacacaaagca

SEQ ID NO: 234664 - RNA, 71 nt, Homo sapiens
gggccagaaggcgcgaggcgggaacacgaagacagcaacggcaggagcccaaagggcacgcaaaaagaaca

SEQ ID NO: 234665 - RNA, 73 nt, Homo sapiens
ggccagacgaccaaaggagaaggcaccagccagcaaaggaaagaagagggagcgcccacccacaaggagacag

SEQ ID NO: 234666 - RNA, 69 nt, Homo sapiens
acagcgacaggaggagggagaaaagcggacgccggggaggccaaaaaggagaacaccggacagacccag

SEQ ID NO: 234667 - RNA, 71 nt, Homo sapiens
gacacgggggccacaaagccccccggagacgcaaccaaggggcgaggggccgaaaaccaccccaaaacacg

SEQ ID NO: 234668 - RNA, 79 nt, Homo sapiens
ccgcaggacaacgagcccaccgagccaaaaacagcaggaagacacaaggaggggcaccgaggaagaggacggaagaccg

SEQ ID NO: 234669 - RNA, 40 nt, Homo sapiens
aagagagaagcaagcccggcacagcccagagccccgcagg

SEQ ID NO: 234670 - RNA, 88 nt, Homo sapiens
caagggggaccgcgcggcggccgcgagccgcggagcgacagaaaccacacagaaacagagagaaacaaacagagagccgcaccacacc

SEQ ID NO: 234671 - RNA, 66 nt, Homo sapiens
ggccgaggacacaccgcggacaggaagcgcgcaacaccagaaaggaaggggcagcgacaccaagac

SEQ ID NO: 234672 - RNA, 72 nt, Homo sapiens
gcccgggagcccgaggagaggaagaccgaccacaggaccacccgaggcccccggcaaaggcaaaaaagagag

SEQ ID NO: 234673 - RNA, 86 nt, Homo sapiens
cccacggggagcccccccccccggaggccccccaggaggcccacgcggggagacacccgagacggccacaggacaaggagccaagg

SEQ ID NO: 234674 - RNA, 74 nt, Homo sapiens
gcaagggaccgaagaagccaaaggggacggaaagagagccgcagcgcagaacaagggaaaaaagggcaaaaagg

SEQ ID NO: 234675 - RNA, 73 nt, Homo sapiens
aggagccggggaaaagaaccaaaccaacaaaaggaggccacaagcagggacaaaggccacacaaaacaccaaa

SEQ ID NO: 234676 - RNA, 79 nt, Homo sapiens
cggacgcgcaacgcgcgccgggcgacaggacggccagcagaagcaggcgagccccccgagaaaaagaagaaacgcggga

SEQ ID NO: 234677 - RNA, 67 nt, Homo sapiens
accgcgccggcccagcaccccgagaaccgcaggagccagagccaacccaacagcccaccaaaaaaca

SEQ ID NO: 234678 - RNA, 31 nt, Homo sapiens
acaaccacaggcagagagacaccgaaaacga

SEQ ID NO: 234679 - RNA, 74 nt, Homo sapiens
gcgcccggggagacagaaacgaggcgcccccagcagcaggaggacgacgacaaggcacaccaggaagaagaggc

SEQ ID NO: 234680 - RNA, 72 nt, Homo sapiens
caaggaccccgcccagcccccgagaccgagaagcccagaaaaccagaaggcaccgacaggaaaggaaaagga

SEQ ID NO: 234681 - RNA, 73 nt, Homo sapiens
ggcccggcggaaaggacagcaggacccaaagacaggaccacgcaccagcagagaaggaaagcaaaccgaagca

SEQ ID NO: 234682 - RNA, 51 nt, Homo sapiens
ccaagagaccaaaccccgcagaagaaagaacagagaacgaggaagaaaagg

SEQ ID NO: 234683 - RNA, 72 nt, Homo sapiens
cgaccagaaggagcgcaacgaacaaaacgaccgggagagaggacaaacggacaccaggccggcgaggagggg

SEQ ID NO: 234684 - RNA, 75 nt, Homo sapiens
caggcgcgccagacccccgaaagcgaacgcgaaaagaaaagccgagagcagccagaccggcgaagaaagaacgaa

SEQ ID NO: 234685 - RNA, 84 nt, Homo sapiens
agagcgacaccgaacgaggcaccagaaagaccacaggggacagagaaagaagaagaacaagcgccaagacgggacacgagcccc

SEQ ID NO: 234686 - RNA, 53 nt, Homo sapiens
aacaacacaaaaaaagcagcaagggagggaagggcaacaacccaccgggggaa

SEQ ID NO: 234687 - RNA, 69 nt, Homo sapiens
ccaaacccaggccagagcacagagaccacacacaaaaccacccgggaaccacacgggaaccccccacga

SEQ ID NO: 234688 - RNA, 76 nt, Homo sapiens
gaaaacggaaacagagcccagcccagaaaaggaccgacagcacgaggaggagagaagaaaagcggcccgagacaac

SEQ ID NO: 234689 - RNA, 69 nt, Homo sapiens
cgcgcagcgccccaccccacaggccgccgccggcgcccgcgagcagaggggcaagcgaacaaaccccga

SEQ ID NO: 234690 - RNA, 96 nt, Homo sapiens
aaccagacgccagcgggacgaggaccgagaccgcggccgggaccgaggaccggagagaacagaaaaaaagcggcccgggaccaggaaagacaggac

SEQ ID NO: 234691 - RNA, 67 nt, Homo sapiens
gcgcgggcggcggcggcgggcgggagccccagagcaggcaggagaagggcaccggggaggaccgcgc

SEQ ID NO: 234692 - RNA, 69 nt, Homo sapiens
gaagcacagagggacacggcggccaggagcggcgggcaccgaaggaggacaaaggacagacccacgcac

SEQ ID NO: 234693 - RNA, 63 nt, Homo sapiens
gcgcgcccgggccacccccggaccccggagaagcagaggaaaagaaggcagcgggggcacagc

SEQ ID NO: 234694 - RNA, 89 nt, Homo sapiens
ggacgagacccaagcagggaccaacgacacaaaacaaacggagagaggagggagaaacaaaggccaaagacgcaggagggacagacgac

SEQ ID NO: 234695 - RNA, 65 nt, Homo sapiens
gagggacaagaagaccagccccaccccccgagagaaggaaaagaacagcccagagaagaagaaaa

SEQ ID NO: 234696 - RNA, 102 nt, Homo sapiens
gcaacgcgcacgccccccaccggacggccacagacgggacgggccgagagcgaggagcccaggggagaccggggaccggcgcagccgccaacccacggacaa

SEQ ID NO: 234697 - RNA, 53 nt, Homo sapiens
gcgacggcgcagacaccaggcaagaacaaggaagcccccccaaaaagcggcgg

SEQ ID NO: 234698 - RNA, 53 nt, Homo sapiens
aaccagcaggcaccaaggaaagcagaagacaacaacgcaaccagaggacacag

SEQ ID NO: 234699 - RNA, 84 nt, Homo sapiens
ccggaggaggcggcagaggacgccccagagcagcgcggccagggaaccaagaccaggacaaagaagacccggagagacaagccg

SEQ ID NO: 234700 - RNA, 75 nt, Homo sapiens
caacgggccgacgaagcgcggcagaccgaaacggaaacggccagaagcaggacaaagcagagaacaacccgggga

SEQ ID NO: 234701 - RNA, 72 nt, Homo sapiens
cgccgccgcccgcggggccggccgggagggcccgggggacgacgagaagggagcccggacaggaccaacgga

SEQ ID NO: 234702 - RNA, 60 nt, Homo sapiens
aagcgcagaaaggaaaacaaaggagcacaggagcccgcaacacagcagcaaggcaaggcg

SEQ ID NO: 234703 - RNA, 74 nt, Homo sapiens
gcgacccgggcccggggaccgagcgagcccgcgaccccgcaggagcaccgcggacgccccagggcacaccgcgc

SEQ ID NO: 234704 - RNA, 76 nt, Homo sapiens
gccccgccaaaacccagggcggaagagggcagccggccacggagcgccgcagggagccaacccagccccagagagc

SEQ ID NO: 234705 - RNA, 57 nt, Homo sapiens
gcgaaggcagaggaacaaagacagaacccagagagcaaaagaaggcagcggcagcag

SEQ ID NO: 234706 - RNA, 70 nt, Homo sapiens
gaggccccccagccagcagaacgcgggcccgccgagacacccaccaggagacccaccacccaagaccagc

SEQ ID NO: 234707 - RNA, 75 nt, Homo sapiens
gccgcgaagaggcgggccgggaaccacaagcagcaaggcgccaagacgagagcccaaacacagggccccagccgg

SEQ ID NO: 234708 - RNA, 72 nt, Homo sapiens
agaagcgaccggcccaaggacggccccaggaaaccacgggaggaccgggccagggggcagaagaaaaacaga

SEQ ID NO: 234709 - RNA, 34 nt, Homo sapiens
ggccccccccaccgcggaccggaacagccacgga

SEQ ID NO: 234710 - RNA, 53 nt, Homo sapiens
accagggcggaggaaagcccccgacgaaagccacccaagcgaccaggaaagaa

SEQ ID NO: 234711 - RNA, 76 nt, Homo sapiens
cgaccgaaacaccagaaaagacagaggcgagaccggacaggaaagcccccagagaccaaccgagcaccagcacggg

SEQ ID NO: 234712 - RNA, 77 nt, Homo sapiens
cgggggggccgaccgcagcgcgaggccgcagggagaaggcgccgggaacacggcccaggaacaccaggacacgggca

SEQ ID NO: 234713 - RNA, 68 nt, Homo sapiens
gacggcagaggaccccggagagcaaggaagaaagcagcccaggccggccaggaacacacccaaaggaa

SEQ ID NO: 234714 - RNA, 108 nt, Homo sapiens
agggagcgagccagcaagcggaagcgccccaccgcgggcgccaaggggagcagaaggaccggacacaggcccagcagcccgggagcgagcccacagcgcagcgcagcc

SEQ ID NO: 234715 - RNA, 67 nt, Homo sapiens
gacaaaaccaaccccccccaaaagcaaaggacccgaagacacccaggggaagagggaacaccccaaa

SEQ ID NO: 234716 - RNA, 54 nt, Homo sapiens
gcgacggcgagcccgggccgcgcccgagcgagaagaacaacagagaacgccagg

SEQ ID NO: 234717 - RNA, 55 nt, Homo sapiens
caaaaaacagcacgaaggggaccccacaccacaaaccgaggaaagaagggacagc

SEQ ID NO: 234718 - RNA, 77 nt, Homo sapiens
agaccgccagagaacgaccgaagggccagagcccaggcaaagaagagaacagcgaagacaggcgggggccagcaaca

SEQ ID NO: 234719 - RNA, 80 nt, Homo sapiens
gaaaggacggagagcccaagaaaggaaaaagcagacggacacaaagacagagacagaaagagaaaagggacagagcgagg

SEQ ID NO: 234720 - RNA, 90 nt, Homo sapiens
gcaagcccggccaaacggcccagcaggccgggaggcagccccacgcaaggcaggggagacacggaggccgggagagcaggccccaccccg

SEQ ID NO: 234721 - RNA, 71 nt, Homo sapiens
cacagaaaacacaagaagggccagggaaaggaggggaaggagggacggaaaaggcgcacacgacccggaga

SEQ ID NO: 234722 - RNA, 76 nt, Homo sapiens
gccggaacacgggcggccacgaggaggagaaaccagaggcaagcgacgggaaggaccaccaaacccagccagcgca

SEQ ID NO: 234723 - RNA, 71 nt, Homo sapiens
cagcaaagggacaaacaccgagaaagccaccagccggaagaggacacaagaaggaaacgaaccccgccgga

SEQ ID NO: 234724 - RNA, 78 nt, Homo sapiens
cagcagcagccacaacagcaaccagcgcgccccggccaggccgcgcgggaacacagcgcggcggacacgcaacccggc

SEQ ID NO: 234725 - RNA, 76 nt, Homo sapiens
caccgccgcccccgcgcgcgacaccacccccagaggggagaggaaaaaccaggggcagaacaaggagagggcggcc

SEQ ID NO: 234726 - RNA, 79 nt, Homo sapiens
agagcagcagaaacgcagaacgcacagagaaacagacacacgaaggaggaaccaaagaaaccagaggagaaaccagaaa

SEQ ID NO: 234727 - RNA, 84 nt, Homo sapiens
ccgcaagacacgggccccggaaacagggagccaacccaggaaacgaacggcccgaccagcccgggcgcgccaggcacagccaag

SEQ ID NO: 234728 - RNA, 65 nt, Homo sapiens
agacccgcagcgggacaagcgggcaagacaaagaaggggaccaacagggcggaacagccacagcg

SEQ ID NO: 234729 - RNA, 37 nt, Homo sapiens
gcagggggcagggggggaggcggaggcaaggcgcgac

SEQ ID NO: 234730 - RNA, 79 nt, Homo sapiens
cccaacgcgggacaggaagggccgagcggcgggaaaggagcgagaaggaaaggaaacgaaaagaaaacaggagcccaac

SEQ ID NO: 234731 - RNA, 39 nt, Homo sapiens
acagcgcggcccggaagccaagaagacccagagagaaga

SEQ ID NO: 234732 - RNA, 71 nt, Homo sapiens
aacacaggcacgaaaaagccaggagggcccagaggcagagcaacagggacacaagcaagaagaaagggacc

SEQ ID NO: 234733 - RNA, 67 nt, Homo sapiens
gacaaaagggccaaagaagggagagagacaagaggaaaagggagaaccaacaaagagggcaccacga

SEQ ID NO: 234734 - RNA, 75 nt, Homo sapiens
aaggagggaggggcagaggagaaccgacgaaccggacagaacaaaaccgaaaagccagcaccaacagacaaagaa

SEQ ID NO: 234735 - RNA, 72 nt, Homo sapiens
agaagcgggcggcgcgggggagaggccccccgggccgggcacgggcgccagcggcacggcagccccgaacga

SEQ ID NO: 234736 - RNA, 70 nt, Homo sapiens
gccgccgcgcccgcccgacccgccaccgccaggccaggcgagggaaaaaggacagaccgcgagagaacga

SEQ ID NO: 234737 - RNA, 70 nt, Homo sapiens
cgaccccacgcgggccaagacgaacccgcaagaggacgcagagggagagaaaaaacaggaacacaaagca

SEQ ID NO: 234738 - RNA, 50 nt, Homo sapiens
gcagagggcgacgccaacaaggcaacaagcagaaagcacagcccgaggac

SEQ ID NO: 234739 - RNA, 77 nt, Homo sapiens
gaccagaggcaccgacgggagaggccaccaggcaccggacagggaggaaccggccagcgggaggacaggcgaccccc

SEQ ID NO: 234740 - RNA, 65 nt, Homo sapiens
cccagagcgggggaagagggaggacggggagaagcggccaaggccagagagcacaagaagaagga

SEQ ID NO: 234741 - RNA, 69 nt, Homo sapiens
acagaacaggaaaaaggcaggcccaggggaagaaaaggccaccagcgaggagaagaaggaagagaaacg

SEQ ID NO: 234742 - RNA, 56 nt, Homo sapiens
cccggcccggcggaaaaggagaggcagacccaaggcaaggcaaggaggaccaagcg

SEQ ID NO: 234743 - RNA, 77 nt, Homo sapiens
acacagcgggcaggagaagcaaggcacgcacgccacaccgggggcccaggccgcccggggagaggaaccaaccacca

SEQ ID NO: 234744 - RNA, 89 nt, Homo sapiens
gaaccaaggccaagaccagaaccagcccgggaaaggagaaggagaggaacgcgcggaggaagaagaagaaagcgccggcggcggccagc

SEQ ID NO: 234745 - RNA, 69 nt, Homo sapiens
gcccggacaggccgccaacagacagggcggaggaggaaaccgcacggcaagaggacgggacagagaaga

SEQ ID NO: 234746 - RNA, 72 nt, Homo sapiens
ggagcgcggaagcacgccaagaaacggccgagccccccccaaacacgaggccccgagggccagaaaggaaga

SEQ ID NO: 234747 - RNA, 77 nt, Homo sapiens
gaaccagagcaaaaggacccaagaacacgggagacacacacaaacggacgagccgggaggggagacaccgaccccaa

SEQ ID NO: 234748 - RNA, 88 nt, Homo sapiens
gccgcagggaaccaccgcgccgaccggaggagaagagaccggcacagccgaggcaccaggccaacagaccccaggaagcagcgaccgg

SEQ ID NO: 234749 - RNA, 76 nt, Homo sapiens
gcgaggagcagcagcagcccagcaggcgcggcccgccagacaaggccgacgcgcacgaacacgggggcaaagacag

SEQ ID NO: 234750 - RNA, 63 nt, Homo sapiens
agagagccggaagcgacgcacgggggaagaacgaaagaacagagagcgaaccacaccggacgg

SEQ ID NO: 234751 - RNA, 39 nt, Homo sapiens
gcccgcgccggcgccccggcccagcaaaccgcgggcgac

SEQ ID NO: 234752 - RNA, 73 nt, Homo sapiens
gagcaaaaggcagcgaaacaggaaaggaggacaaaaggaaaaaaaaaaagggaagacagagaggcggggaaag

SEQ ID NO: 234753 - RNA, 77 nt, Homo sapiens
aagaacagccgagagagcaacaagccagcccgggaccgaggagacggcgcaggaccggggaaccgccaaagcccggg

SEQ ID NO: 234754 - RNA, 67 nt, Homo sapiens
aaaccaccaaaaaagcggaggcgcgcaggagccaaggaaagagaaccaacgaaacaccgcaggaaaa

SEQ ID NO: 234755 - RNA, 67 nt, Homo sapiens
acaacgcccccgggacgcacaggggcggcagcgagaaggccgaaagaaacaaaacaaaaggggacac

SEQ ID NO: 234756 - RNA, 78 nt, Homo sapiens
aaggcccgggaaagcacaaagcaagagacagcgaggacagaaggaagacagaagcgaaggggacagggggagaaccgc

SEQ ID NO: 234757 - RNA, 76 nt, Homo sapiens
aaggacaagcgccagcccgccggagcgacgggacgcggcggcgggggaggcaagcaggggggcaaaggaaagaagg

SEQ ID NO: 234758 - RNA, 65 nt, Homo sapiens
agcgggcccggggaggcaccgacgaggagggcccaggcgcacccaggcagaaggaggagggcaga

SEQ ID NO: 234759 - RNA, 82 nt, Homo sapiens
aagggaaagagcagcacacaaaaggaagaagagccgggcaagggcacccaaaaaccgaagacggggacgggagggaggacga

SEQ ID NO: 234760 - RNA, 66 nt, Homo sapiens
aaaggggaggaggaggcggccaaaggggccggacgcgagagaaaagagcagccaagacgcagaacc

SEQ ID NO: 234761 - RNA, 78 nt, Homo sapiens
cgggacccgggcgcccgcgcccgccccaacccagccacagccgaccgcccaacacaaggagcgagcgcccagggcagc

SEQ ID NO: 234762 - RNA, 72 nt, Homo sapiens
ccaaggagccccggcccccgaacacccagggagccaacgggggaggacagagccaccaaagcagacagcacg

SEQ ID NO: 234763 - RNA, 71 nt, Homo sapiens
aacgaggccaggcgaggagagcgaacaaccccagaagaggaggcccacaagcggcacccaccaagacaaac

SEQ ID NO: 234764 - RNA, 63 nt, Homo sapiens
cacacacccgccccggcccacacccgccagagcaaacaggaccagaagccaaagaggcgaggg

SEQ ID NO: 234765 - RNA, 75 nt, Homo sapiens
ccaccgccgggggcggaacccagccccgcagaagaaaagcagcaaaacaccgaagcacaaaaaagccagacgggc

SEQ ID NO: 234766 - RNA, 55 nt, Homo sapiens
ggaagaacagaacaaaagcgcaacaggaaggcccagcagaggggagaggacgggg

SEQ ID NO: 234767 - RNA, 49 nt, Homo sapiens
ccgcgcggccccgggggccagccccgagccgagagcgagacagagccgc

SEQ ID NO: 234768 - RNA, 68 nt, Homo sapiens
cagggggaggaaacagcaaagacgcacacagcggcccacagggaaaaggcaagacaacgcagaaacca

SEQ ID NO: 234769 - RNA, 60 nt, Homo sapiens
agagcccaagccggaacagccaacaaagagagggggaaggaacgagcaagaaaagcagcg

SEQ ID NO: 234770 - RNA, 90 nt, Homo sapiens
ccagacaacaggacgccgccaagaccccaagcggaccaaggaaaaaagaggaccaaccaccccaagccaagaaggcaaaaggaagaccag

SEQ ID NO: 234771 - RNA, 98 nt, Homo sapiens
agacccaccaagaacgaggccaggcgaggagagcgaacaaccccagaagagcgaagagagagaaacgaaaaagaggaaggagcgagggagcacaagca

SEQ ID NO: 234772 - RNA, 74 nt, Homo sapiens
ggaagggcacgcagacaggaagaagaaagagggcgccaggacacacgcgggggggcccggacgaacaaaccgga

SEQ ID NO: 234773 - RNA, 55 nt, Homo sapiens
ccggaagccgaaccaacggaggggcggcagggggaccagccagcaacccgccccc

SEQ ID NO: 234774 - RNA, 77 nt, Homo sapiens
acggcggccggccccggcggcggcggcggccgggccggggacgacccagcgccggacccaggcccacccaagggccc

SEQ ID NO: 234775 - RNA, 52 nt, Homo sapiens
cacccccccgcgccgccggcacgcgaagaggccccaggaccggcgaggcccc

SEQ ID NO: 234776 - RNA, 68 nt, Homo sapiens
cgagaagagcaagacagggggccgggaaacacgcaaaacccaaaaagacccccaagaagcaaacaaca

SEQ ID NO: 234777 - RNA, 67 nt, Homo sapiens
ccgggcgcgggcgaggccgggcggcgccgccccaccggacccgcaggcccgagagaagaaaagccca

SEQ ID NO: 234778 - RNA, 70 nt, Homo sapiens
ccccaccaccgggcaacgggggggaaacgcaggagaagccagaacccccacagaacaggacaagacaagg

SEQ ID NO: 234779 - RNA, 85 nt, Homo sapiens
caagcaggccgacaacccaaacaggagccgcccggcaaagcgaaagcgcaggaccgaggagaaggagccgccggagcagccgcag

SEQ ID NO: 234780 - RNA, 82 nt, Homo sapiens
cgccgccccagcccgccccccgggccggggcgacagcaagaaggagccagcacagaggcaaaagaaccaacaaaggccaaaa

SEQ ID NO: 234781 - RNA, 84 nt, Homo sapiens
aaagacgaagaacaaagagaagaggacaagaagaagagagggaacgaggaaggagagaacaaggagcaggccaacggccagaag

SEQ ID NO: 234782 - RNA, 75 nt, Homo sapiens
cgcaggcaagggacgaccaggaggagggcccagggagcggaagcgccacaggagcgaaagcaggccaaacggggc

SEQ ID NO: 234783 - RNA, 54 nt, Homo sapiens
aaacaccaagacacgagggaacaccccaaaagaaacccagccgaaccagagaaa

SEQ ID NO: 234784 - RNA, 77 nt, Homo sapiens
aaggagcggaagcagccagggagccggaggagccaccaacagaagcaggagccaggaaaccaaaacccacagagagg

SEQ ID NO: 234785 - RNA, 60 nt, Homo sapiens
gcgggaccggccgaaaccggagaagcgaacccagcggggccgccccacccgaggcccacc

SEQ ID NO: 234786 - RNA, 102 nt, Homo sapiens
ggaagacgcaagcccaccgcgaggaacaccggggcagaagggagaggcgcaacagaaagcacaggcacacaacccggcccccccagaaaacagacaaaacca

SEQ ID NO: 234787 - RNA, 76 nt, Homo sapiens
cagcgggcgaggagccccgggagggccgcggcgacggagccacgcaggagggcaagcaggcggaccgcccccggcg

SEQ ID NO: 234788 - RNA, 58 nt, Homo sapiens
agccacgaggccaccacaaccccgcaaacaccaccacgacagccagcaaagggggaga

SEQ ID NO: 234789 - RNA, 79 nt, Homo sapiens
ggcgccccccaccgcacggcacgaagcggagaagccgagagaaggagcgaagaaggaagccaagcggaagacccagccg

SEQ ID NO: 234790 - RNA, 84 nt, Homo sapiens
gcgcgcaggggacaggggcggcgaccggcggcgccgaggaggaagccaaagcagaaccaagacaaacgaccccggaacacggag

SEQ ID NO: 234791 - RNA, 72 nt, Homo sapiens
cgccgcgaggcacaccgggccaccaaccacaaggagcgaaaaacgacccaagcagcagaggaacaacgcaaa

SEQ ID NO: 234792 - RNA, 79 nt, Homo sapiens
aaagagcgaaaaagacacgccgggagcccagaccccacagccagccgagggcgagaagcacagaaacccgcagacaccc

SEQ ID NO: 234793 - RNA, 131 nt, Homo sapiens
aaaaaagcaggaacaaaaacaccaaaagacacagcagcgggggaacaaaagacaaagagcccaccaggcacaacgagacccggaggagacagaccccaggcccggacgagccccggggggcgaagggaggc

SEQ ID NO: 234794 - RNA, 41 nt, Homo sapiens
cagaggaaccacacgcgacaggagccggaccagaccgccgg

SEQ ID NO: 234795 - RNA, 86 nt, Homo sapiens
cgaaaagaaggacaaagcagcagacacggggcaccgcccggggacgaaagcagcggaggagcaccggaacacagaagcagagaagc

SEQ ID NO: 234796 - RNA, 76 nt, Homo sapiens
gccagcaagcaaggcgacggccacaaggcaggcccccgaccaagggacggaaaaggcgcacacgacccggagaacc

SEQ ID NO: 234797 - RNA, 82 nt, Homo sapiens
gagacagaggaggcaacaaccacggcccaggaaccgaaaaggcgaggagaagacggcaaaaaacgcgaaagcaaggcaaacc

SEQ ID NO: 234798 - RNA, 41 nt, Homo sapiens
gaagggacccgagcacggaccagagacaaggccccgaggga

SEQ ID NO: 234799 - RNA, 77 nt, Homo sapiens
gacccaggcacccacccgccccaccgcagcccaccccagagaaagaccagccgagaaaaagcgaacaaggggccgaa

SEQ ID NO: 234800 - RNA, 77 nt, Homo sapiens
agaacgcagaaaagccaaggaaggcaggagaagggcggagggaggagaagacgggacaacacccagaggaagagaac

SEQ ID NO: 234801 - RNA, 58 nt, Homo sapiens
cgccagcgacggcgcccgggagcggccggagagaggacaccgagaaaaagggccggcc

SEQ ID NO: 234802 - RNA, 88 nt, Homo sapiens
acagaggaggccacaggagaccgacgcggccacacagaaacaggaggagacgacggggaccgaggagcggaagggcaccccaaccgcg

SEQ ID NO: 234803 - RNA, 38 nt, Homo sapiens
caaacaaaccaccgcgaaaggacggaaggcgaccacac

SEQ ID NO: 234804 - RNA, 75 nt, Homo sapiens
cagcggggaccaggcgcaacgcgaggcccgcccggggccgggggaaaggcaaaaggcgaaaccagacggcaggcg

SEQ ID NO: 234805 - RNA, 72 nt, Homo sapiens
gcacaccacaccacggggagggacacccacgaaaaacagacaaggacaacacaccgcccaaccgggacaaag

SEQ ID NO: 234806 - RNA, 74 nt, Homo sapiens
cgggcggggcagagcagcccccagccagccgcgagaccccaaccccaggaaaaaagcaccagaaaaacaggagg

SEQ ID NO: 234807 - RNA, 94 nt, Homo sapiens
aagcgaaagggaggacagaagcgcgcccaacaccccaacggggcagagagagggccaggaccgcggaagaaccagccagagccgaacagcagcg

SEQ ID NO: 234808 - RNA, 61 nt, Homo sapiens
aaggaccaagaaccaggaccgggcgagaccagacaggccccagaacgaagacgagcggagc

SEQ ID NO: 234809 - RNA, 79 nt, Homo sapiens
ccaaagagaacagggcagaggaaaagcaagaagacgaggagcaggcgcaaaaaagagcacagaccaggaggaaaaagca

SEQ ID NO: 234810 - RNA, 81 nt, Homo sapiens
aagcccacgggcaccgagcccgcccacgacggagaggaggagccgggaaaccgaagaaggcagagaaggcaaacaggaggc

SEQ ID NO: 234811 - RNA, 40 nt, Homo sapiens
ccagaggagaaacgcagagcagagcaggccagggaacaag

SEQ ID NO: 234812 - RNA, 70 nt, Homo sapiens
acggcgaccacaggaaggacacaggcagacgaaagaaagcagggaacggggaaaagcaccgcacaacccc

SEQ ID NO: 234813 - RNA, 69 nt, Homo sapiens
agcacaaaacagcagacccaagagcagcggaaaagaccagcacagaaagacaccagaagacaccaagga

SEQ ID NO: 234814 - RNA, 84 nt, Homo sapiens
ggggagaacaagccagccccagcccaagaacacacaagcccgggggaaaggcagcgcgcagcagcggcacacaagccaaacaga

SEQ ID NO: 234815 - RNA, 72 nt, Homo sapiens
cagcaacgccacagcaaggcgcaaaggaagaagaaggcaagaaggaagaaaacaggaaaagagaacagcgaa

SEQ ID NO: 234816 - RNA, 76 nt, Homo sapiens
ccagcccccgagggcgggacacagcgaaaacgcgagcggccaacggagaaggacgaaagaggaggcccaggagcgg

SEQ ID NO: 234817 - RNA, 79 nt, Homo sapiens
ccggacgccggagaggcaccggaccgaggagacgggacagcagaggccgggcgaaaacgaaaagggaaaagagaccagc

SEQ ID NO: 234818 - RNA, 73 nt, Homo sapiens
ggcaaaggggaaaaaaaagggagaaacagaccaaggggggaacagcgcaccaggaacccggcaccggcgccgc

SEQ ID NO: 234819 - RNA, 72 nt, Homo sapiens
gcccaccaggagggacacagagaagagacggcggcgcagcacggagagaaagacgccagggagggaagagac

SEQ ID NO: 234820 - RNA, 67 nt, Homo sapiens
gcgccgcacaccacacccaaccgccacggaaggacagcgaacccacccaacacggcaaaacaaagac

SEQ ID NO: 234821 - RNA, 67 nt, Homo sapiens
ggaaggcggggaggaggccccaaagggcgagcgcgagaagaagcacccaaggagcagcagaagggcc

SEQ ID NO: 234822 - RNA, 67 nt, Homo sapiens
cggagcggccccgccgcgggggcagcacgccgaaggagagaccagacaacaggccagggaagggaag

SEQ ID NO: 234823 - RNA, 64 nt, Homo sapiens
gagcagaggcggcggcggaggagcaggccgaaaagaggaagaccaggcgggaggagggaaagag

SEQ ID NO: 234824 - RNA, 54 nt, Homo sapiens
ccgaggagcgggggcgcaccagcagggacagagagggaaagccggcccacgaga

SEQ ID NO: 234825 - RNA, 78 nt, Homo sapiens
caccgacggaggagagaccacaagagcccaccaggagcaccacacgcaagaaaggaagagccagaggacaaaacccag

SEQ ID NO: 234826 - RNA, 76 nt, Homo sapiens
aacgaagagcgcgggggaccaccgggaggcaacacggccaagaagaggaaagggaccccgacggagagacaaagaa

SEQ ID NO: 234827 - RNA, 76 nt, Homo sapiens
aaagaaccacaccaccagaccggggaaccagcaccccagaaggaggagagccagagcccacaaccagaaagccgag

SEQ ID NO: 234828 - RNA, 76 nt, Homo sapiens
cccagggaagccagaaagccccgcagcaccaggcccacaaaaggacacggcgggggccagcggccggacaccccaa

SEQ ID NO: 234829 - RNA, 73 nt, Homo sapiens
agaccacaaaaaagagacgacgacaacaggaaaagaaacacacgagcaaagacacaagaacccgaagagcggg

SEQ ID NO: 234830 - RNA, 63 nt, Homo sapiens
ccggaacaaaaggagcaagcccgccgacccaaaaggaaacaaacgccagaacaaacagcgaga

SEQ ID NO: 234831 - RNA, 70 nt, Homo sapiens
gccgaggcgccgcacggggccgagacaagcaggggaccaaaacaaccccggaagagaggacaaacaacaa

SEQ ID NO: 234832 - RNA, 73 nt, Homo sapiens
gcaagacgccggggacccgaccacagaaagggacccagccgggaaaccgagagccacaccccaggcacggcca

SEQ ID NO: 234833 - RNA, 74 nt, Homo sapiens
accagagagagcccaaaagcaggcaacggccagacacagggaaagcggaggcccgaagggcacggaagagaaag

SEQ ID NO: 234834 - RNA, 81 nt, Homo sapiens
cgacagcgggcacgaacggaaacccagaccacacggagcgacaaaagagaagaccagaaagaaaagaccgaagagagagga

SEQ ID NO: 234835 - RNA, 70 nt, Homo sapiens
accagaaagcagcagcagaaaacgaaggaagaggagacaacaggcacaaagagagaaggaacacccacag

SEQ ID NO: 234836 - RNA, 77 nt, Homo sapiens
ccgcacaacgccacccccagagcaggagaagcgagcccggacagaccaaccgcaggcgcaaggccgacgacagaagc

SEQ ID NO: 234837 - RNA, 54 nt, Homo sapiens
gacacgaagaaagcacgccaggaaggaccccaagacaggccggggggggcacag

SEQ ID NO: 234838 - RNA, 82 nt, Homo sapiens
ccggggaccgcaggggcgcgcgaaggagcggaagaaggcaggccaaaccaccgaccagagagaacccagccaaccgggacaa

SEQ ID NO: 234839 - RNA, 53 nt, Homo sapiens
cgcaaggagcaacacccccgcccccacaaggcacgaaggcgggaacaccgagc

SEQ ID NO: 234840 - RNA, 71 nt, Homo sapiens
gccccgaaaagggcccgagggggcaacacacccaccagagacggaaggaaaaccaaggagaggacacgcca

SEQ ID NO: 234841 - RNA, 81 nt, Homo sapiens
gggcgacgaggcgggacgcaggaaggacacagacgggcccagcgacagcggcgggcccgcccgccacagcaacaggacaaa

SEQ ID NO: 234842 - RNA, 70 nt, Homo sapiens
acacaggacacaggccacgggagccggcgacaaccaccagaagcggagaccggggaggcagaacggaccc

SEQ ID NO: 234843 - RNA, 76 nt, Homo sapiens
cacccacggaagagaacgcccgagccccaacccacgcgccccaagggacccaaccagagccggccgggagccagga

SEQ ID NO: 234844 - RNA, 80 nt, Homo sapiens
ccgcacacagcgcgcaacgcgggagagcccgggccacccccccaggcaaggaaccagcacacgcccgccccacgacggag

SEQ ID NO: 234845 - RNA, 51 nt, Homo sapiens
cggaaccgccggagcagaccagagaggacaaccaaaagcaccgaaccggaa

SEQ ID NO: 234846 - RNA, 69 nt, Homo sapiens
ccccgcgggcccggcaggggaccgccacccacagacaaaacaccggggcccacaggacagccgggcgca

SEQ ID NO: 234847 - RNA, 72 nt, Homo sapiens
cggcgcgccaagacacagcccgaggacccaagcgagaagccagacgcacagagagaaaccacgcaacaggcc

SEQ ID NO: 234848 - RNA, 77 nt, Homo sapiens
cacacaagggacgcgaccaccaagggcacacagggaccaagaagccccggggacacgcgagaaaagacgccgaaggg

SEQ ID NO: 234849 - RNA, 55 nt, Homo sapiens
gaacgggcccaaggccggggcccagggaagaaaacgccagagaagcagagcagcc

SEQ ID NO: 234850 - RNA, 67 nt, Homo sapiens
acaaaggaacagaagagccagaacacaaggacagaaaagaggaaaaaacggaccgcaaacacagacg

SEQ ID NO: 234851 - RNA, 73 nt, Homo sapiens
gaggaaagcgagacagcggcgcggaggagggggcccagaagagaggggcaggaaacggcgcccacagaggaaa

SEQ ID NO: 234852 - RNA, 51 nt, Homo sapiens
gcaggaccggagaaacaaaaacacccaccccaagggaaacgagcacggagc

SEQ ID NO: 234853 - RNA, 81 nt, Homo sapiens
acagaccaccgaagagaagccaaggccgaagccgagcagaggacaaaacaagagggccaggcccaaccaggaaggagacgc

SEQ ID NO: 234854 - RNA, 83 nt, Homo sapiens
caaagaacagagaaacaagaaggacaccagaaccagggagggagcagcggacaagcagccggcgaccacgagcagccgagccg

SEQ ID NO: 234855 - RNA, 76 nt, Homo sapiens
cagccgcagagaccgaagaccaaaaagcgccccggcgagaacaagagagggaaggagaaaacggaccacggccagg

SEQ ID NO: 234856 - RNA, 74 nt, Homo sapiens
cacacaggaggcgccacgggagcagcggaaggggcccagcagacgcaaagacgcaagaacagcagagaacaaag

SEQ ID NO: 234857 - RNA, 67 nt, Homo sapiens
aaggccagaagccaggacggggaagggggggcaggaggggaccgagagccaccgaaagcggagaagc

SEQ ID NO: 234858 - RNA, 56 nt, Homo sapiens
acgggcccaggaagcaggggccacccagaggagagaaaccaagcagccaggagccg

SEQ ID NO: 234859 - RNA, 73 nt, Homo sapiens
cacggaggggcagccacccccggaacaaaacaaaccccagacgccccccacacgaggccccggccaaagaaga

SEQ ID NO: 234860 - RNA, 78 nt, Homo sapiens
gaggcaggcaacaaaaaaacggaaaggacgcacccgaacacaagaaaaccgaccaaagaacaggcggcccagagggaa

SEQ ID NO: 234861 - RNA, 78 nt, Homo sapiens
gggggcggccgggccggcggcacagccaagagccgaggaaggcaccaggagaggaggaggggagacgcccaggcagaa

SEQ ID NO: 234862 - RNA, 73 nt, Homo sapiens
acaaaggaggcaccagacgccggcaacaaagaacacacggaaggacaggacacagaaggaagaacagacgaaa

SEQ ID NO: 234863 - RNA, 71 nt, Homo sapiens
agccaaggagccaaaaaacccggggagccagagacagaagaagcaacccccccgaacaagacaggagccaa

SEQ ID NO: 234864 - RNA, 67 nt, Homo sapiens
caccccacaagccgacccagcagccgacgaagagaggccagcaggaaccagcagaggaccggcccca

SEQ ID NO: 234865 - RNA, 83 nt, Homo sapiens
cgcaccgaggcgccgcgcacagcaagaagagccagaaggccgggggaaagcaacacgagaccccggagaagaaccgcgccaga

SEQ ID NO: 234866 - RNA, 66 nt, Homo sapiens
caagggcgggagaaccaggaagccggacgaagcaaaggagagaacccaagggacacccaagagcga

SEQ ID NO: 234867 - RNA, 59 nt, Homo sapiens
gacagcacagcacccacaaagcaacgcacggcccaaagaagagcaggccaaggaacaag

SEQ ID NO: 234868 - RNA, 34 nt, Homo sapiens
ggaagcggagcaggagccggaaaccccccggaag

SEQ ID NO: 234869 - RNA, 83 nt, Homo sapiens
cacaaaaaaggaagcgaaaagagggagccggcacagaaaacaacacgggagcggggacgacagacaggagaccagaggggagc

SEQ ID NO: 234870 - RNA, 77 nt, Homo sapiens
agacgcaagacgccaggcgacagaagacgcggaaggagcacgaggaagcaggccaaagagcgcaggcgagaaaggag

SEQ ID NO: 234871 - RNA, 78 nt, Homo sapiens
agccgacgaggcagggaacccaccacacagaaaccaggaacgcacaccagcaccagcccaccaaaccagcacgacccc

SEQ ID NO: 234872 - RNA, 59 nt, Homo sapiens
cgcgccaaggacacggcacaccgaccgacggaaggaaagaagcaaaaaaaacgggaacg

SEQ ID NO: 234873 - RNA, 68 nt, Homo sapiens
gggccggcggggcacggggggcgacggccaagcgcgagcaggaaccgcggagcagggaaaaacccaca

SEQ ID NO: 234874 - RNA, 76 nt, Homo sapiens
ccgccaccggccaggagcccaggaagaaacccggagacaaagccccacgaccccacggcagaagacgacagcgaac

SEQ ID NO: 234875 - RNA, 85 nt, Homo sapiens
cagacgaccggagacgaggggggagaaccagccgacggagcaggcagcagcccaggggcagggaccccacacaaacaaagaaagg

SEQ ID NO: 234876 - RNA, 77 nt, Homo sapiens
gcgccccaggccagaaggagcgcccccaggaaaaagccaggaccacgggccggcacacgaagagcgccccggaagcc

SEQ ID NO: 234877 - RNA, 79 nt, Homo sapiens
aaccgagcaacagggaagcagaggagaaccgggagccacagaaaagcccagcaaggagggacggaggccccagcgcgga

SEQ ID NO: 234878 - RNA, 114 nt, Homo sapiens
ccaaaggggacaaacccgggagaacacccccccaggaggcgaggagagggggcgcaggcaggaagaggagaggcggacgcagggccgaacggagaccagagggaaaacaaaaag

SEQ ID NO: 234879 - RNA, 75 nt, Homo sapiens
aggcaggcgggaagaacagggccaggccaagaaacgggaaacaaaagcggggaccgaaggagaagaaggagaagg

SEQ ID NO: 234880 - RNA, 75 nt, Homo sapiens
ccccgcaggaagcagcacagccagggcacccccgagaggacaacaggcacggaaggccccgccaccggggcacgc

SEQ ID NO: 234881 - RNA, 73 nt, Homo sapiens
cccagggaccggcaccgcagcaccagaggggagccgccaccaaaagcagacggaaaacccacggggaagacca

SEQ ID NO: 234882 - RNA, 74 nt, Homo sapiens
gcaagaagccacccaccgacgccgacaggcagagccgcaacccgcggagcccaaacacgcgccgcaccagagcg

SEQ ID NO: 234883 - RNA, 79 nt, Homo sapiens
cgcccggcggccccggcgccggcaaggggacccaggcgcccgcacgcgaggcacacagagaaaaaaagggaacaaaaca

SEQ ID NO: 234884 - RNA, 74 nt, Homo sapiens
aggaggaggaaaaaaggagcaaaaggaacacagagcgagacccgggcgcccgagaaagagagcaaaaaaaagga

SEQ ID NO: 234885 - RNA, 36 nt, Homo sapiens
gccccaaaaggcgggaacaggaacccccgaccgaaa

SEQ ID NO: 234886 - RNA, 84 nt, Homo sapiens
gagcgcagcagagggagcgccgaaggacaagaacagcgccgcaccagcaggcaccggaaaagaaccaccaccgcagccaccagg

SEQ ID NO: 234887 - RNA, 55 nt, Homo sapiens
caagagcgcacgggggaaacaagcgaaaaacaggcaaggaggcgcgaacagggcc

SEQ ID NO: 234888 - RNA, 85 nt, Homo sapiens
cccacccccgcccccgacgcggccggagcgcagcccgaggcccaggagcgagggggaaaagcaaaagcagaggggcccaaaacgc

SEQ ID NO: 234889 - RNA, 51 nt, Homo sapiens
gccaacagacccagccggcgaccaggggcaaagaaaaaggagagaaaaaga

SEQ ID NO: 234890 - RNA, 80 nt, Homo sapiens
agccgcgcggcgagcggcccgcacaaggccggcagggccggcaccaagggcagaagcgccaaacggccaccgaggacgcc

SEQ ID NO: 234891 - RNA, 88 nt, Homo sapiens
ccgacccaagggccgacccccgcaaggagccgaaggcggcgggagccagagcgccgccggcgcggcgccggcgggaaaaccgccacaa

SEQ ID NO: 234892 - RNA, 74 nt, Homo sapiens
agggcagaaaaccagccccaggaggggacaaaaccccgaaaaaggcgcggggccccgggagacgggcgggagag

SEQ ID NO: 234893 - RNA, 76 nt, Homo sapiens
cggccgcgggcgcgaccggaggcagcggcaagccacgcggacacaaaccccggggccaccgagaaccccacagcga

SEQ ID NO: 234894 - RNA, 58 nt, Homo sapiens
cagaagcacggggaacgggcggaggacacacagcaacgaagcaggggaggagggaaga

SEQ ID NO: 234895 - RNA, 78 nt, Homo sapiens
agagcgaccagacacggcccacggccagacagacaccccaaacaaagcaggcccagcggggcgagggagaacagggga

SEQ ID NO: 234896 - RNA, 58 nt, Homo sapiens
ggaaaccggaccacacgcgccgaagcggagacacccgggggccaccgaacggcaaacc

SEQ ID NO: 234897 - RNA, 80 nt, Homo sapiens
gaagaggcggacggcgggaccacaagacaacgcggagcggcgaagagcaaccaggaacacaagccagaaaaagggggaag

SEQ ID NO: 234898 - RNA, 81 nt, Homo sapiens
gccccgcagacggcgggggcacgacagcgcaaggaggccgcacccaaggccgcagacaagggcaccgccgaccgaaaccgc

SEQ ID NO: 234899 - RNA, 71 nt, Homo sapiens
gcggcgccaccgaacagacccggaaggacggcgagggaggcaggggaagcacaaaagcgcacccgcgccag

SEQ ID NO: 234900 - RNA, 76 nt, Homo sapiens
acaagaagaacgaagaagcggaggccagacaggccacccaaaaaacgccgggggcgccaggcgagacaagagggcg

SEQ ID NO: 234901 - RNA, 78 nt, Homo sapiens
caaggcggaggaacgagacgcgaaccaggggaaaacacaaagcaaagaggaagaccaggaacgggacaggcgcacgag

SEQ ID NO: 234902 - RNA, 60 nt, Homo sapiens
gggagggacagacaacggcaggagagggcccgacaacgaagagaaacaggaacacgaaag

SEQ ID NO: 234903 - RNA, 86 nt, Homo sapiens
cgccaggcccgggcgcagccgcgcgacgccgagcgcgccgcgagaccccgccccccagaacagcaacccgccaggaccacgcagac

SEQ ID NO: 234904 - RNA, 56 nt, Homo sapiens
ccacccagggcaacccaccccaggagggaccacccgagacaggaaagagagacaaa

SEQ ID NO: 234905 - RNA, 68 nt, Homo sapiens
cggccgaaacagaaaacaagagaccacagaagaccaagacacccaggagaaagacagcggggaaaaga

SEQ ID NO: 234906 - RNA, 80 nt, Homo sapiens
cggagagagcaacgaaagcaaggagacgccagccacacccacagaggcagaccgaaaacacccagcaagaagggcgacca

SEQ ID NO: 234907 - RNA, 65 nt, Homo sapiens
ggccggggaccgccaaccccccaagaagcagaggacccccgcagcaaacacaagaagaccacacg

SEQ ID NO: 234908 - RNA, 54 nt, Homo sapiens
ggagcgggcccaggaaggcgcgccgcaggacaagaaaacagacgacgaggagac

SEQ ID NO: 234909 - RNA, 87 nt, Homo sapiens
gcccagcggaccccagacgggaccggggaagccgcacaccagaggccagcaagcggagcccgccagggccaccagggaccggccaac

SEQ ID NO: 234910 - RNA, 38 nt, Homo sapiens
gacacccccagagaaggagccagcaggagacccggcac

SEQ ID NO: 234911 - RNA, 59 nt, Homo sapiens
cgcgccacacgcgagggcagcaccgcagaggacccaaagcaggcccgcaagaagcccag

SEQ ID NO: 234912 - RNA, 74 nt, Homo sapiens
gccaagcagggaacggcaccagaaccgaaaggaccgcaaaaaggccaagcaaagcagcccgaggaggcacgcaa

SEQ ID NO: 234913 - RNA, 41 nt, Homo sapiens
ggcgcaagagggaggcgcacacacagggcagagaacacacc

SEQ ID NO: 234914 - RNA, 74 nt, Homo sapiens
agagcaagaaaagcccgggagcagaagggaggcccaagacccacaacaaaaggacccacgcaggcccaggcagc

SEQ ID NO: 234915 - RNA, 57 nt, Homo sapiens
gaaggcgaacaggaacaaagagagagaagacggaaaacgagacagagagaaaaccag

SEQ ID NO: 234916 - RNA, 63 nt, Homo sapiens
aacacagacaaagggcagagagggggagcgggccggagagaagagaggggcgcgaggagaagg

SEQ ID NO: 234917 - RNA, 92 nt, Homo sapiens
gggggggggggaagccgcagcggaaagcaggagcacagcgccacgcagagccccgccaggaagacacgccggggaacgaagcagaagacgga

SEQ ID NO: 234918 - RNA, 57 nt, Homo sapiens
gaaggcacaccacagcgcacggagccaagaccgaagaaaacacggaaaaacgacggg

SEQ ID NO: 234919 - RNA, 77 nt, Homo sapiens
ccagcagggacccaccccagaaacccagcccggcccagaggacaggcagcccagagggacaaggcccaggaggccac

SEQ ID NO: 234920 - RNA, 56 nt, Homo sapiens
acccccgagaaccgcgccaccagagacggggcagagagcaggcgagcgagagcaac

SEQ ID NO: 234921 - RNA, 77 nt, Homo sapiens
agaagcaccgagcccacccacacccaagaacgccaagcgccaaaggcaaaaaggggacccccaagcccagggcgaac

SEQ ID NO: 234922 - RNA, 76 nt, Homo sapiens
cgaacgagggcaaaaaaaggggaaagacagagaaagcaaaggagaaggggagaacgaaaacaaacggaagagaggg

SEQ ID NO: 234923 - RNA, 74 nt, Homo sapiens
cacaagaccagccccacaggaggggaggcgaccaggccgacgcagcaggcgcaaaaacgaacccacaaccgaac

SEQ ID NO: 234924 - RNA, 41 nt, Homo sapiens
ccaaccgggacagaaaaaggccaagagaggccaacagagga

SEQ ID NO: 234925 - RNA, 56 nt, Homo sapiens
ccaaacaccacaggccagaaggggagcgaacggaagagggcgagcaaagaagaaga

SEQ ID NO: 234926 - RNA, 74 nt, Homo sapiens
accagacacacgagcaggccgggagcaggagggccaggaaccgggcgagaagccgcacagccggaacggacgaa

SEQ ID NO: 234927 - RNA, 72 nt, Homo sapiens
gccccagggcgagcacagcacacaaggaccaccaagcaggaggacaagaggcacagacccaaggagacgagg

SEQ ID NO: 234928 - RNA, 73 nt, Homo sapiens
aaagaaccagcacaggacaaaaggaggagggaaagcaaaccaccagagacccacagcaccccgcggaagaccc

SEQ ID NO: 234929 - RNA, 53 nt, Homo sapiens
gcacccacaagcagagcggcgaagacggggcccgagcaggaaagagaaggcgg

SEQ ID NO: 234930 - RNA, 70 nt, Homo sapiens
cgggccgcagccaggacgagccacaggagcccagcaaccggcaacagaaacacaccaaccccaaccgcca

SEQ ID NO: 234931 - RNA, 77 nt, Homo sapiens
cgcggccggcccggcgcggcccagcgccccagagaccggcccggggaacaaacgcccggggccgaagacaaagaacc

SEQ ID NO: 234932 - RNA, 71 nt, Homo sapiens
cgaccgcggcgcgccacccggccgcagcaaaacagaccaaacagcggcgcacgaaaacagagcgaagacga

SEQ ID NO: 234933 - RNA, 39 nt, Homo sapiens
accccgcgcgcggaggcaaggacccccgccagcagggaa

SEQ ID NO: 234934 - RNA, 77 nt, Homo sapiens
cgagccagccaacagcagaagagaaagccagaccacggacggaagacaaaagagggggaaaaccagaaccgaaaacc

SEQ ID NO: 234935 - RNA, 76 nt, Homo sapiens
aggagccacagccacgccgccgcgccgcggagcggcgccgacaagcaaaccagaagagaagaaaacaacaaaaaag

SEQ ID NO: 234936 - RNA, 50 nt, Homo sapiens
ccaaaacaacccgcagccagacaacacacacgcacaagcgaaaccaagag

SEQ ID NO: 234937 - RNA, 51 nt, Homo sapiens
cgccgaggcaccgaggcaccagaggagggcggagaacggaaaagcaccagg

SEQ ID NO: 234938 - RNA, 81 nt, Homo sapiens
gcgccgccgccgccgccgcgggcgccagaaggaagaggcggacggaggagcaggcgagaagagaagccgagagggagacgg

SEQ ID NO: 234939 - RNA, 83 nt, Homo sapiens
ggaccacaggcccagacgagcggaggaggcacagggcgcggaccgcacgagcgcgccccgaggcgcgccagacacgagccaga

SEQ ID NO: 234940 - RNA, 83 nt, Homo sapiens
aggagccgggggagggaaggaccggaccggagaacaccgcgcgggaagaaggagcccacccccccccgccggagggaggacgg

SEQ ID NO: 234941 - RNA, 77 nt, Homo sapiens
caaagagcgccggcgcggcgcggccgggccgcgccccccggcgggccggacggcaaacaacaggccgacacccacac

SEQ ID NO: 234942 - RNA, 82 nt, Homo sapiens
ccagccaagccacggggggggcaggagccgcaaacagcgcacgccaagacgagcggcgaagaggagaagacgacaggaggga

SEQ ID NO: 234943 - RNA, 74 nt, Homo sapiens
cgaagacaggaacaagaaaacaaaggcaaacaagaaaccaagagggcggagaaggaacagggagagaaacaacg

SEQ ID NO: 234944 - RNA, 65 nt, Homo sapiens
ggcggcggcagcgggcgggccccgagagcagcagcggacccaacagccaagaaaaagaaagaaag

SEQ ID NO: 234945 - RNA, 55 nt, Homo sapiens
ccaaaagaaacaacagaaacggcacccaaagcacggcagaagaagaaggcccaac

SEQ ID NO: 234946 - RNA, 83 nt, Homo sapiens
agcgcccacgccggcaaaccggaaacagcaacaggccggccgagcagcaacaggcccaggggaagcgcggaaagggagagggg

SEQ ID NO: 234947 - RNA, 86 nt, Homo sapiens
cgcgccccgcgccgcgccccccgcccgcccgggccgccagaaggacagaaaacgggccccagacacaagccccaccaagaggacac

SEQ ID NO: 234948 - RNA, 78 nt, Homo sapiens
ccgaccggagccgcccaggacggcaggggaccgcacagagggggccacggagcgaaagccgcagccagagaagaccgc

SEQ ID NO: 234949 - RNA, 70 nt, Homo sapiens
gaggagagcgacggccagcccaccggaaccccaagaggaacgccaggcaacgagaagcgggggacagagg

SEQ ID NO: 234950 - RNA, 97 nt, Homo sapiens
gcgagcacccgggaggggcccggaagccccaccaccgcccggcgcagagaaccgacgagcgggaaccggaccggaccgcagggggaagacggaccac

SEQ ID NO: 234951 - RNA, 80 nt, Homo sapiens
gcccccccagcagagcaccacaggagaaaacacaagggccaagacccgcgcacaggcgaggagacacagggacggccgcc

SEQ ID NO: 234952 - RNA, 66 nt, Homo sapiens
cggggagggcagcgaacgcagcaccggaccgagagccagagcagccagaccaaggcacgaaaagaa

SEQ ID NO: 234953 - RNA, 68 nt, Homo sapiens
ggcccgcggcccccccccgcccggcccgggaaacgaacaaacgcacggagcaaaagcagaccggaaaa

SEQ ID NO: 234954 - RNA, 28 nt, Homo sapiens
cccccaggccacagagaaacccgcggac

SEQ ID NO: 234955 - RNA, 29 nt, Homo sapiens
gccaggggaccgggacaacccaaagacgg

SEQ ID NO: 234956 - RNA, 59 nt, Homo sapiens
aaccagaccaaccacagcaccccgaagccgaccagccggaaccgcgcacacagaagcgg

SEQ ID NO: 234957 - RNA, 94 nt, Homo sapiens
ccacagacgaaaagagaggacgaaaccaaccacggagaaacgaacccaggacgagaaaaaacagagcggaacaagcggcccaagagaaagcagc

SEQ ID NO: 234958 - RNA, 76 nt, Homo sapiens
aagcagaccacccggacaccacggaccaaaaagacccgaccagccccaggacacaagcaaggccccggaaccaagg

SEQ ID NO: 234959 - RNA, 75 nt, Homo sapiens
cacagcccaccgaggcaccacagggccgcgggccaagagcaaaagccgaccgcagagaccaagagagcagacaag

SEQ ID NO: 234960 - RNA, 77 nt, Homo sapiens
gacgccaccgccgcagcggcgcagcccacgccagacgaccccacccgcgccgcgacccggagggcaagcaggcggac

SEQ ID NO: 234961 - RNA, 67 nt, Homo sapiens
aggcggggcgcaggcagcaaagggccgcgacagaaaggagagccagcaaagaggcacccggagaaga

SEQ ID NO: 234962 - RNA, 81 nt, Homo sapiens
ggagaaaaagcagagcagcaaaacggggaccaaagaacccgcgaagcagccaggcccagacagccgccgaagaaaagccca

SEQ ID NO: 234963 - RNA, 57 nt, Homo sapiens
gcccgggcaccacagaaaagaccccagggaaggacaagacaacaagcagggaccagc

SEQ ID NO: 234964 - RNA, 69 nt, Homo sapiens
caaaaaccgaggccagaaagggcccgggacgagcggcccagcgacgagcgaagaggcacaaaaccgcca

SEQ ID NO: 234965 - RNA, 78 nt, Homo sapiens
caggaagaaagaacaggagaagagcagaaaaccagagcgccaagagccacccaggaaggccgcaggagaaaggcaagg

SEQ ID NO: 234966 - RNA, 61 nt, Homo sapiens
gcggagccagacaaaggcaagaaggcggagaggagaaaacggagcggagaagaaaaaccga

SEQ ID NO: 234967 - RNA, 67 nt, Homo sapiens
gaagaaggaaggaaaaaacacacaggaagaaaaaccggagaccagcgccaggaaacagagaccccaa

SEQ ID NO: 234968 - RNA, 78 nt, Homo sapiens
aggcggagcccgcagaccgcagaaggccggagacaccagcaggagagcggagggcagaaagaggggaacgaaaaacag

SEQ ID NO: 234969 - RNA, 79 nt, Homo sapiens
ggcccggacggcccaccgacacgcaaagggcaagaagggcggggagacaggaagcagcacagagaagaacaggaagaca

SEQ ID NO: 234970 - RNA, 58 nt, Homo sapiens
ggggcgcagcagcccagagcaccagagaaaaccagacgagagacagaagacgaaaggg

SEQ ID NO: 234971 - RNA, 41 nt, Homo sapiens
caaaagagcccccagagagaaagaggagccgccggcccagg

SEQ ID NO: 234972 - RNA, 75 nt, Homo sapiens
aaaaccagcacggcgcaacaggaccacagcaagacgacaagcacggcgcagggagcaggagaagcggagcgaagg

SEQ ID NO: 234973 - RNA, 65 nt, Homo sapiens
caggacgaccagcgggaggccagaggaaggagcaccgaacagcagaaagaacaagcacgccgaaa

SEQ ID NO: 234974 - RNA, 45 nt, Homo sapiens
aagggcaagcaacggggcaacaaggaaaccagggcaagaccaaaa

SEQ ID NO: 234975 - RNA, 69 nt, Homo sapiens
agaaggaccaagaaccagggcaccgggaaaccaccaagcaggggcgcggagccccagccaggacccaag

SEQ ID NO: 234976 - RNA, 103 nt, Homo sapiens
agaaaccaaagccgaggaggagcggagccgaagccggagggccacccgacgcagagggcaggccccagccagaaaggggagcaagaagaaagagcagggagga

SEQ ID NO: 234977 - RNA, 78 nt, Homo sapiens
gagagacggcccggccagccagggaacagcccacccaacaagacaccggacaagccaagggccgggccacgcgcccag

SEQ ID NO: 234978 - RNA, 82 nt, Homo sapiens
ggccaaccaggagagcggacccagacgggcgcagccagggcccggaaagaaaacaaacggacccaggacaaaacgacaccag

SEQ ID NO: 234979 - RNA, 74 nt, Homo sapiens
ggacaaggcaagggaacgaaaagagcaccggccagcagaaccagccggggccggcaagccccgcccaagaagag

SEQ ID NO: 234980 - RNA, 76 nt, Homo sapiens
aggagaagaagggaaaaacggagcaacgcaaggcaggcaacaaggggccggcagcagacacggaaggaaggagaag

SEQ ID NO: 234981 - RNA, 60 nt, Homo sapiens
agagcgccaaaaaacccgacggaaagcgaaggccccgaaaagagcacgcgcccaggcgga

SEQ ID NO: 234982 - RNA, 79 nt, Homo sapiens
ccgcaccccgagcgaccgccagggccccccacgcgagaacccgggccggggcccgggggcccgagcccccacccacccc

SEQ ID NO: 234983 - RNA, 59 nt, Homo sapiens
gcaagaagcgacacaaggagaaaaggacacaggaacgccacaagaaacaacagcaaggc

SEQ ID NO: 234984 - RNA, 79 nt, Homo sapiens
gcgcggggcgcccgggggagcaacccggcgagacggcggacaaggcccagaacaagcacaacaagacccaaagcccgca

SEQ ID NO: 234985 - RNA, 85 nt, Homo sapiens
cagccgggggcccccaagggagccggaggaagcacggggccacgccgggaccagagcagcccgacggccaggaggcgaagagacg

SEQ ID NO: 234986 - RNA, 71 nt, Homo sapiens
aagaaacgcaacacaagacaggaccaccaaggccaggaggaagcaagaccaagagggcgggaaagcccaag

SEQ ID NO: 234987 - RNA, 70 nt, Homo sapiens
agagaacccagacaacaggacgccgccaaggccgaggcgcccaggacccacgaaaaggagccacagaaag

SEQ ID NO: 234988 - RNA, 83 nt, Homo sapiens
ggagcagaagccccgccaaaacagcgcacggggcggacgcagagacgagaaaaccaagcagcggggagcaagacacagggaga

SEQ ID NO: 234989 - RNA, 48 nt, Homo sapiens
cgccccaggagaaggaccgaagcacgccgcaagcccagaccgggaaca

SEQ ID NO: 234990 - RNA, 57 nt, Homo sapiens
ggcgagcagccaggccaggagagcggaagccgcagaaggaccggccagaagcaagcc

SEQ ID NO: 234991 - RNA, 76 nt, Homo sapiens
ggcccggaacagacaaaagcagggaccagcagaacagacagaggagcgggcggaggacgacgcaagaagaccggca

SEQ ID NO: 234992 - RNA, 73 nt, Homo sapiens
ggccaacaaaaagcacccccaaaggccgacaaagacacacggagaagcagacagggacggggacaccagacgg

SEQ ID NO: 234993 - RNA, 71 nt, Homo sapiens
caggccagaaaacagaccaagacagcccccccaggcgcgacccgccaaagcggcaggggccgagggcgcgg

SEQ ID NO: 234994 - RNA, 57 nt, Homo sapiens
cacaacccgacccgacgaggaaagggagcagcaccggccacacccacagcacgaccg

SEQ ID NO: 234995 - RNA, 71 nt, Homo sapiens
ggaccaagaaccagaggagccccgccacaccagcaggcgccaaacaccgggccagggcaacaagacaccac

SEQ ID NO: 234996 - RNA, 69 nt, Homo sapiens
ccagaagagaccaacgccaccaaccaaccggacacagccagggaagcccagagcgaacccaacggagaa

SEQ ID NO: 234997 - RNA, 62 nt, Homo sapiens
cagggaagcgcagaaagcaggcgaacccgcggcgcaaaacggccccccaccagaaagagcag

SEQ ID NO: 234998 - RNA, 73 nt, Homo sapiens
agaaggcggggggcgggggaggcgagcgcgccgcccggagccgcgcacacgcgacacggaacaggagcggcaa

SEQ ID NO: 234999 - RNA, 79 nt, Homo sapiens
cccagcccggggggggcgccggcacccacccccgcgcgcggcgcgacagccccgacaagggaccgggcgggccccgcag

SEQ ID NO: 235000 - RNA, 69 nt, Homo sapiens
aagaggcgcgcggcgagcaaaacaaacggagagaggagggagaaacaaaggccaaagacgcaggaggga

SEQ ID NO: 235001 - RNA, 58 nt, Homo sapiens
ccccggagcccgcagagcacagagaaccacacagcacgcccgggaagaacaggagagg

SEQ ID NO: 235002 - RNA, 77 nt, Homo sapiens
agagcggcagagagacaaaagccgaccagccgcagaaaaagcacccggggcagccgcagaggaaggaagggagaagg

SEQ ID NO: 235003 - RNA, 70 nt, Homo sapiens
aacggaccgaaaaacacagaaggacggccggagcagcagaacaagagcggagaccaagggagccccgcag

SEQ ID NO: 235004 - RNA, 83 nt, Homo sapiens
ccgagcgcgcggaggcggaggcggggagaacggaagccagagaaaaggaagagagagcaagagaggccacgcccacgaggcga

SEQ ID NO: 235005 - RNA, 68 nt, Homo sapiens
cacaggaggcgcggaggacgccccaccgccgacgcccccagccaccaggaaacacacgccgagaagac

SEQ ID NO: 235006 - RNA, 57 nt, Homo sapiens
ggaccgccagcagcaggagaagcgccccccccggacagaaggccggccgggacccga

SEQ ID NO: 235007 - RNA, 89 nt, Homo sapiens
gccggccggcccagcgcccccacggagcagcacccacccgcacagccgagggagaagcacgggaggacccacggagggcggaaccaacg

SEQ ID NO: 235008 - RNA, 86 nt, Homo sapiens
ccagccggagcccccccgggagcccccacggagaggagcaccaccagaggcacacccagaagccacaggagaagcaagaggcggcc

SEQ ID NO: 235009 - RNA, 62 nt, Homo sapiens
gccgcgcgcccgcgcccccgcgcgacgccagggagaacgcacaggcgcgagccacaacgcca

SEQ ID NO: 235010 - RNA, 95 nt, Homo sapiens
aggagacagcaggcgcgcgaaccgagcgcaagggaagaaaagaagacagccaggaaaccagacgccgccacagagaaggaagacaagagaacaag

SEQ ID NO: 235011 - RNA, 50 nt, Homo sapiens
ccccagagggggaacagacaccacgccacccaagagagagcaaaaaccga

SEQ ID NO: 235012 - RNA, 37 nt, Homo sapiens
cagccaaaggaagcacagagaacgaaaacaaacggaa

SEQ ID NO: 235013 - RNA, 74 nt, Homo sapiens
caccgcggaggagccacacgaagaaaggagcaccgccccaggcggagacaaggcagaccagcacgcaaccccgc

SEQ ID NO: 235014 - RNA, 50 nt, Homo sapiens
cgggacacacaaagacagacgcgcaaggcagaccaaaccgaggcgcggag

SEQ ID NO: 235015 - RNA, 71 nt, Homo sapiens
ggaacccagccagccacggagaagaagaacacaaggccccacacccggggagaaaagaaagggcgcccaac

SEQ ID NO: 235016 - RNA, 67 nt, Homo sapiens
gcagggagcagccgaccgagccaggacaaacaggaagaagccaagaaggaagggcagcacgagagga

SEQ ID NO: 235017 - RNA, 69 nt, Homo sapiens
aaagacaaagaggcccccagaccagaaaagcggccgcacaaggccgagcaggcacgggcagcaggagag

SEQ ID NO: 235018 - RNA, 81 nt, Homo sapiens
gcggcgggcgggcgggagcgcccaagggggcggagagcgggggggggggacaaggggaaacaaggccaagggaaccgggcc

SEQ ID NO: 235019 - RNA, 64 nt, Homo sapiens
gcaaagcacagaaaaggaagaggaagagggccaaagcacaaacccggccacgcaaggaacacac

SEQ ID NO: 235020 - RNA, 77 nt, Homo sapiens
gagccgccaagaggcggcgcagccaccccgcgggaacgcccagcgcggagaagacagaggagccagaccaagagaca

SEQ ID NO: 235021 - RNA, 78 nt, Homo sapiens
gccacaccaaagccggacccccccagccggaccggaccaacccaccacgcagcagacaaggggccccagggaacccga

SEQ ID NO: 235022 - RNA, 62 nt, Homo sapiens
aaacggcccggagaggagggcggaagcccaggaagcacacacaaggccccgccagcaggggc

SEQ ID NO: 235023 - RNA, 71 nt, Homo sapiens
ggcagacaaaagggccaaagaagggagagaggagaaaccagccaacggacaaagccggaccagaacccaac

SEQ ID NO: 235024 - RNA, 83 nt, Homo sapiens
cccagccaagcagagcagcccaggacaaaaggcgcagccccaagcaccggggcggggaccccgaagacgagacccggggaaga

SEQ ID NO: 235025 - RNA, 78 nt, Homo sapiens
gaaggcaaaaccaaacaccccagcccacagagagcaaaacacaagagagcagggaggaggagcgcgggggaggaaaag

SEQ ID NO: 235026 - RNA, 70 nt, Homo sapiens
caaacggcaccaagagggagccggacggcccccgacccagacggccacaggaaccagcgggaaaggaaca

SEQ ID NO: 235027 - RNA, 53 nt, Homo sapiens
cacaaaccggcccaacaaccacaagggccgcacgcccaaagcggaaacgcgga

SEQ ID NO: 235028 - RNA, 77 nt, Homo sapiens
ggcgcccgaccgggacggccggcaggccgccgccgagcgaggccgcgaaccagggcgcgggagcagcaacccaagag

SEQ ID NO: 235029 - RNA, 71 nt, Homo sapiens
ggcggaggcaccgacaaaccagcgaaggagcacccacccaggaacccgccaccagaaaaccccaaagcaga

SEQ ID NO: 235030 - RNA, 83 nt, Homo sapiens
ccgccaccaaaagcagacggaaaacccacggggaagaccacaccccgagcaggagaaggaccaaaaggaacgagacggaagag

SEQ ID NO: 235031 - RNA, 82 nt, Homo sapiens
ggacagcagaaaccaagcagacaacgcagagggcgacgccaacaagggcaggaggacgcggcggcggcgaggagaccccggc

SEQ ID NO: 235032 - RNA, 63 nt, Homo sapiens
ggcgcgagcccaggccgcgccgccacgagaacccaggagaaacgagagggacagcaaggaaga

SEQ ID NO: 235033 - RNA, 58 nt, Homo sapiens
ccggaagaaggaagggaaacaccgaccgggaaaacaggcagaacaaccggacggcacc

SEQ ID NO: 235034 - RNA, 81 nt, Homo sapiens
ccggacaccgagggcccccaaaagaaggcgcagacccgggccagggaaccccccggaagcggccacccagcccacccgccc

SEQ ID NO: 235035 - RNA, 72 nt, Homo sapiens
aagaagagaagacaggaagaacagaggcgaacacaacacaaagggaagaaccaagcgaaggacagaaaacac

SEQ ID NO: 235036 - RNA, 81 nt, Homo sapiens
cggcagaacacagcagggcggaggaaaggcagacgacgcagccagagcagcaagaggccaaggggacgacggccacgggcc

SEQ ID NO: 235037 - RNA, 84 nt, Homo sapiens
cccggacccgaaggacggacaccgcgaggacgggggcacacaacaacccccaggagacccaggaaggcccagcagccgaccaaa

SEQ ID NO: 235038 - RNA, 78 nt, Homo sapiens
cagcagacccaagagcagcggaaaagaccagcacaggacccgacaaacggacagcaggaccagaacaaggagaagcac

SEQ ID NO: 235039 - RNA, 78 nt, Homo sapiens
aaggagccagcccggcaggaagaccacgacgagggcagacgccccggcaaaacgcagaaaggccagacagggaccgaa

SEQ ID NO: 235040 - RNA, 112 nt, Homo sapiens
aagacaccgcacagggcagaggccggcgaccagaagcggaaacgaacaaagaggggggaggcaaagaaagaagcccggaaacgggcggaagccagccaaaagacgaaagcaa

SEQ ID NO: 235041 - RNA, 69 nt, Homo sapiens
cggggggagcaccagcggaaagacagaaccagcacagcaaaaaaggcagcgcaccgaccccaacgaaca

SEQ ID NO: 235042 - RNA, 73 nt, Homo sapiens
cgcccaggacaagccgcgcggggacccgacgcccgcacggacgaaggacagagagggacgggcagacgccccg

SEQ ID NO: 235043 - RNA, 83 nt, Homo sapiens
ccacccgagagagaccgacccgagaggcggccggggccgggccggggcacggcagaggcgccaagaagagccgcgcccgagga

SEQ ID NO: 235044 - RNA, 69 nt, Homo sapiens
ccaggaacggagccagagcggccggcccccagacagggcagcgcaagaccccgcacggaagcagcaagc

SEQ ID NO: 235045 - RNA, 65 nt, Homo sapiens
gaagacgggccccaacacccagagacgaaagaaaaaggagggagcgacgaagagggagagcacag

SEQ ID NO: 235046 - RNA, 67 nt, Homo sapiens
acgcaagaacaaaaacggggaaagaaccaggaagcacaaaggagaagggacagacaaagagaccgca

SEQ ID NO: 235047 - RNA, 78 nt, Homo sapiens
ggcgcgcccgaacggagagcgccacccgggacacagcgccaccccgagcagcggggaagcgcgccgggaggaaccgag

SEQ ID NO: 235048 - RNA, 57 nt, Homo sapiens
gcgcccgagccacacaacacggaaggaggcggcaccaggacgccgaaaagcgaccgg

SEQ ID NO: 235049 - RNA, 64 nt, Homo sapiens
agcgaagccagcaaaacgcaaccccaggcgccccccggggccaagcaacagaccccacaagaca

SEQ ID NO: 235050 - RNA, 70 nt, Homo sapiens
ggaaacgagggacaacacagacccaccagcagaggcgccaacccccaacccacgcgggcagccagaaccc

SEQ ID NO: 235051 - RNA, 57 nt, Homo sapiens
ggcagcccaagccgggcccgcacgaaagcaaggcaaaccagggggccacacagagcg

SEQ ID NO: 235052 - RNA, 68 nt, Homo sapiens
acccgcagacaccggccacccagagagcaaaaggcagcgaaacaccgggggagacggagaacaaaaac

SEQ ID NO: 235053 - RNA, 82 nt, Homo sapiens
gccacagcagcagagcgagaaggcacgacccccagcagaaccgaacgaccgagcgccaggcggaaaggaacaaacagggcaa

SEQ ID NO: 235054 - RNA, 60 nt, Homo sapiens
cagggaaaggagcggggagccccgcgccacaggccgaaacacaagcaaggaacacaaaga

SEQ ID NO: 235055 - RNA, 60 nt, Homo sapiens
accagaccgcaaaagcgcgccagcaggcagagcccaggaccagccgccaagagaggcgac

SEQ ID NO: 235056 - RNA, 80 nt, Homo sapiens
ggcggaggcccccgggcaagaggcgcaaacaagccaacccaggaggaaaaacggagcccgagagaagagaaccaagcaag

SEQ ID NO: 235057 - RNA, 77 nt, Homo sapiens
ccggcagacaagacccacaccacccaagaccacgcccgcaaggccaaacagaaagaaggcgacgcacaacacaaggc

SEQ ID NO: 235058 - RNA, 35 nt, Homo sapiens
gcgcgggcaccacacaagagcagccaggcccgggg

SEQ ID NO: 235059 - RNA, 67 nt, Homo sapiens
gcacgcaacccccaggcagggcagcccaggcccggccccagcaggagaggccacgcccgggggccgg

SEQ ID NO: 235060 - RNA, 67 nt, Homo sapiens
agcgagggcgccgagcaaccggaacaagagagagaaccaaaaaccgccccgaggcagaggccaaggc

SEQ ID NO: 235061 - RNA, 78 nt, Homo sapiens
ggagcccgcagaccgcagaaggccggagacaccagcaggaccacagcacggcccacgacaccagaccagcaagcgccg

SEQ ID NO: 235062 - RNA, 77 nt, Homo sapiens
cagaggagcagccagcaggcaaggagaaaaaaggagcccgaaagccccaaggaaaaaaagaaagcgaaagaagacca

SEQ ID NO: 235063 - RNA, 83 nt, Homo sapiens
caacaaaaagcagccaccagcacaaaagacgagaggaccgacaccagagcagaaggcagagcggagaaggagcggaggaggcc

SEQ ID NO: 235064 - RNA, 70 nt, Homo sapiens
aggaccaaggaggcaaaagcagggcacaaccaggggcgccagggcggcaaagccccaaccaagcccgcgc

SEQ ID NO: 235065 - RNA, 85 nt, Homo sapiens
aagaggcggcggcggcggcagcgacagcagcagcagcagccagacgggaaaggcagacaggaaacagcaccccacagcgcgacag

SEQ ID NO: 235066 - RNA, 64 nt, Homo sapiens
acgcaggcagaagcgagacggcaaggagccaccaacagagccaggagccaggaagcagcagcca

SEQ ID NO: 235067 - RNA, 75 nt, Homo sapiens
aggaccccacaacaccagaacaaaaggcaggaaaaccaaggagaggacacgccagcagggggaaggaaacgaccc

SEQ ID NO: 235068 - RNA, 43 nt, Homo sapiens
gccgcggggggagccgggcaggagaccggaaagaagggagacc

SEQ ID NO: 235069 - RNA, 61 nt, Homo sapiens
cccacgagcccgcaagggcgcccgcgccggcagaggaggcgagcacccgccagggagagga

SEQ ID NO: 235070 - RNA, 57 nt, Homo sapiens
aaggaccaagaaccaggaagaagccaagaggagaaagaagcgacacccacacgaagg

SEQ ID NO: 235071 - RNA, 87 nt, Homo sapiens
gcagcagcgcgggccagagcgcagcgccgagcgcggcccgggcgccacgagccggcggcggacggcaggcgacagggggaccgcggc

SEQ ID NO: 235072 - RNA, 56 nt, Homo sapiens
aggggacgccacgcaacgccgggccgacccgggacggaggggaaaaggggcccggg

SEQ ID NO: 235073 - RNA, 88 nt, Homo sapiens
ggccagcagacccgaggaagcgcgacccaggaccacaccagacaacaggcacaaagagagaaggaacacccacagggcagacagagaa

SEQ ID NO: 235074 - RNA, 50 nt, Homo sapiens
gggccgaagcaaccaggagaagggggcccagcaagcagaaaccagggcag

SEQ ID NO: 235075 - RNA, 72 nt, Homo sapiens
ggaccaggggaggacaaaacccaccaagaccagagaagcaccggccacaagccaagcaaagaaggcccgcca

SEQ ID NO: 235076 - RNA, 77 nt, Homo sapiens
gaacagcacgccccgcgagggggcccgggaaacagagaaacaccgaaaacagaggcgaaaacaggccgggaccaacc

SEQ ID NO: 235077 - RNA, 81 nt, Homo sapiens
ggacggaagcacaggggccaccagagcgcccgagaaggaaagacaaggagccgggccgagaaaccgaaccagagaccagag

SEQ ID NO: 235078 - RNA, 80 nt, Homo sapiens
ggcccaagacccacaacaaaaggacaagaaaggaccggcccaaggaggagaaacccagcaggcacgaaagggggaccgaa

SEQ ID NO: 235079 - RNA, 86 nt, Homo sapiens
gagcccgacccgggcgccccgccggcaccccgcgcggacaccaggagcaggccgggcccgccagggcacgcgcccgccacgggaag

SEQ ID NO: 235080 - RNA, 61 nt, Homo sapiens
gagcgaacgaccaagaggggcgacgcagagccgagcgaagcacgaagccacaaaagagcaa

SEQ ID NO: 235081 - RNA, 119 nt, Homo sapiens
ggcagcgcccggaccggccgagaggaagacgagccgggaggaacggcccggaaacaggaggacggcagacgccgagaaggccgcgcggacccaccaccccacacgccagcccggagccg

SEQ ID NO: 235082 - RNA, 56 nt, Homo sapiens
caacgggaaaagagaaaggcaaagaagacagggaccaggaccaggaacgcccacgc

SEQ ID NO: 235083 - RNA, 70 nt, Homo sapiens
aagaaggacggagaggaggcgagcgagacgacacaagcccacacaaggaccggacccaagcagaaagaag

SEQ ID NO: 235084 - RNA, 76 nt, Homo sapiens
gcagcaccgaccccgggccgggcgcgccgagaggagccacgggacgaagacggaaacaggggacggcacaagggaa

SEQ ID NO: 235085 - RNA, 59 nt, Homo sapiens
caccgggcaaggagggggggggccacgacccggcaggaacagaccaaacgcgaagaacc

SEQ ID NO: 235086 - RNA, 39 nt, Homo sapiens
gccagcgggacggagcaggggggcagccgaccgaagaag

SEQ ID NO: 235087 - RNA, 79 nt, Homo sapiens
cgcgccacgccgccagaccgcgcgccaagccgcacgcaaccaccgcccggccacaccaggggggaggaacacgaccgga

SEQ ID NO: 235088 - RNA, 81 nt, Homo sapiens
gccgcgccccgcgcgcgggaagcagcaccaagcacggccaacgccggcacaggccaccaaagccggcacgcaaaggcaacg

SEQ ID NO: 235089 - RNA, 57 nt, Homo sapiens
caaggaaaggggacagcaacagccggcgggcggaagacccagagaaaggccacgcga

SEQ ID NO: 235090 - RNA, 66 nt, Homo sapiens
gcagagcagagggccccgccagcccgcgcgagaagcggagaagcagccaggcaagccagaccgagg

SEQ ID NO: 235091 - RNA, 70 nt, Homo sapiens
gacaaagacaacgaaagagacagcacaaaaaggagcgaaggggggacacgcggaaaggcgggggccccgc

SEQ ID NO: 235092 - RNA, 96 nt, Homo sapiens
gagagaagggacgaggagccacgaagaaaggaggcagggcccgagcagaaacaaggccaaaagagaaacaggcacgacaaccaaagcggacccagg

SEQ ID NO: 235093 - RNA, 74 nt, Homo sapiens
cggggaccccccagaaccccaaagagccggccgcgcacaagccggagaaaacgaagccacggggagcagcaaga

SEQ ID NO: 235094 - RNA, 73 nt, Homo sapiens
ccaagcagacgaagagccccccacagagcagaagcccccggggagagacagacagagggacacagagaggaag

SEQ ID NO: 235095 - RNA, 79 nt, Homo sapiens
ggacacaggaacccgccaccgcggggcgccgcagccagcaacacaggggcaggaaacacagggagagccgcagaggccg

SEQ ID NO: 235096 - RNA, 73 nt, Homo sapiens
aagacaagacaacaggaccaggaaccagggaagaggaggaaaaagcagcgaaacagacaaccccccacacaac

SEQ ID NO: 235097 - RNA, 84 nt, Homo sapiens
gcccggggcagccaggaccgcaggaagaaggggaccaaaagaacccagccaacccgcagagggaggggaggggcgagcggagga

SEQ ID NO: 235098 - RNA, 102 nt, Homo sapiens
aagccgggaaagggacaagaagggcaaagccgaaacgagcgggcccggacgggcggcagagcccaagcacgagcggcagcgccgagcccagaacgcaagaac

SEQ ID NO: 235099 - RNA, 76 nt, Homo sapiens
gaaggaaacagcaagcgaagccgaaaaagcgcccgagacgggcccgccgaaagaagcacaaggaccgaggaaccac

SEQ ID NO: 235100 - RNA, 68 nt, Homo sapiens
gcaccgcaggcagacaaaagggccaaagaagggagagaggggaccagcggggacaaggggacggcgaa

SEQ ID NO: 235101 - RNA, 60 nt, Homo sapiens
cagggcgaggcaggaccggcgcccaaggagaggccaaagcggacgaggaaggcagccagg

SEQ ID NO: 235102 - RNA, 61 nt, Homo sapiens
ggggcgagcaaaagacgggggacgcagccacgaaccagcggagccagaaggccagcaggga

SEQ ID NO: 235103 - RNA, 76 nt, Homo sapiens
cagagaccaagagaggcagcgggcacgcggacgcagagaacggaccccaccgacgaggcacccgagaagcccgcag

SEQ ID NO: 235104 - RNA, 77 nt, Homo sapiens
aggccccagcggaccgaacaggacggacagcgcaggagaagagggccacaagcgaaggcaaaaccaaacaccccagc

SEQ ID NO: 235105 - RNA, 34 nt, Homo sapiens
gagaaaaggcccaggcaaaaacagcagaccccgc

SEQ ID NO: 235106 - RNA, 81 nt, Homo sapiens
ccacacccccccgggggggcccgagcgggaagaagccgcagcaagccgcagcggcgcgcaccgggcggcccaggaccgagc

SEQ ID NO: 235107 - RNA, 84 nt, Homo sapiens
gcccgggaccgaaaaaacgcccgcgcgaggccgcgcccccccgcccgagggggggcccaccaggagagcaagcgcccagggagc

SEQ ID NO: 235108 - RNA, 57 nt, Homo sapiens
acacagccagccccccgagggagggacaaggaacggacagagagggccaacggaaca

SEQ ID NO: 235109 - RNA, 71 nt, Homo sapiens
accagacggagcgaaccaccgaagggggccaaaccgaaaggacggaccagaccccccaggagacggggcac

SEQ ID NO: 235110 - RNA, 59 nt, Homo sapiens
cgaaacaaagagccaacgacccgggaaggcgcgcccaaaaaacacaggagcaacagaac

SEQ ID NO: 235111 - RNA, 33 nt, Homo sapiens
ccacagccagcggcagggagcacgcgggcaggc

SEQ ID NO: 235112 - RNA, 66 nt, Homo sapiens
aagccaggccacaaggaaccaagacagcgccacagacagaaaagggaaagccagaggcagaggccc

SEQ ID NO: 235113 - RNA, 78 nt, Homo sapiens
acagcagccacaggaaccgagcggggccggggagcccgggccagaccccccagacccagcccaccccggagcagccgc

SEQ ID NO: 235114 - RNA, 82 nt, Homo sapiens
gaccccgagaaaagcacgaaaagggaaaggaccggacaggaaaagcagagcagcggggaaacaggaagagaacagaacggaa

SEQ ID NO: 235115 - RNA, 78 nt, Homo sapiens
gagaaggaacaggagcgagaccaaaacacaaggggacggcgaagagagcggagaggaaccagaggaccagagcaggcc

SEQ ID NO: 235116 - RNA, 93 nt, Homo sapiens
gagcgggaccacccgggcacagcaggcacggagccggaaccaaaaagaagccccagagccggggccaggagccccaagcgccccagcagcaaa

SEQ ID NO: 235117 - RNA, 81 nt, Homo sapiens
ggccccgacgcccacgaggcagccagggaagaagggagaagccccaagccaaggcagccaaagcccccaagaaggccaaga

SEQ ID NO: 235118 - RNA, 76 nt, Homo sapiens
ccggaccggcgcccggacaacccgaggagaaggcagagcccccccaggcagaagcccgagcgggaaccagcgaagc

SEQ ID NO: 235119 - RNA, 68 nt, Homo sapiens
ccggcaagaacggacgggcgccacaagccacacggagcgcggggagacagccagagaagagacgaagc

SEQ ID NO: 235120 - RNA, 76 nt, Homo sapiens
caccgaccggggaacggagagaagggagggcccaaccccagccggaagccagacaagagcccggaggaagcaaacc

SEQ ID NO: 235121 - RNA, 83 nt, Homo sapiens
cgacgcggggacagcaacggagcgggagagcggacgggacagagcgagagagaccacgagaggccccgcgggggcgacccccc

SEQ ID NO: 235122 - RNA, 56 nt, Homo sapiens
cacagaaaagaaagaacccgaacaccacaaagggaagagccacaaagggaaccagg

SEQ ID NO: 235123 - RNA, 70 nt, Homo sapiens
ccaagaaaaagcaccggaccgaaccagaaaaggaaaacgggaccaacggggaaagggaaacgccaagaca

SEQ ID NO: 235124 - RNA, 84 nt, Homo sapiens
gaaccgccaaagcgcggaaagccaggccagaagaaggaaggccggggaggggacaggaaagacacaccaccccaccgaacaagg

SEQ ID NO: 235125 - RNA, 78 nt, Homo sapiens
ccggccacggcgccagagccggggacgaaagggaaggacaggcagagcaaacaaggacaacgaggaaaaccaaaaacg

SEQ ID NO: 235126 - RNA, 82 nt, Homo sapiens
gcgaggcccgggggacaacggaaacagcaggaacagaaccggagcaggccgagagcggaaaagaccaaagcagaaaagaaag

SEQ ID NO: 235127 - RNA, 49 nt, Homo sapiens
agaaggaccaagaaccagggacaggcgcaggggcaggcaaaccgagcaa

SEQ ID NO: 235128 - RNA, 76 nt, Homo sapiens
gccacaagcgaacgcacccgcgggggaccgcgccaggcaccacaaccagacaaagggagcaccagccagaccggga

SEQ ID NO: 235129 - RNA, 65 nt, Homo sapiens
ggaagagagccaagccaggcccagcagccgccaccgaacaagagcgcaaaccaaaacagaaaaca

SEQ ID NO: 235130 - RNA, 76 nt, Homo sapiens
gcgggcccagagaccaagacacgaaagaaagccgacagcaagggacaagacagacaacaggacaaagaggaaacca

SEQ ID NO: 235131 - RNA, 63 nt, Homo sapiens
cgcagggccacacacacaccgcaagaaaacccgcagcccaaagggcagaagaagaagaagacg

SEQ ID NO: 235132 - RNA, 88 nt, Homo sapiens
gcagccacgcgggcgagcggcggggagcggcgaagccgcgggcgaggaaggaagcagccaccccgccaggccccccgcccgccgcccc

SEQ ID NO: 235133 - RNA, 102 nt, Homo sapiens
ccaaagacgcacagacccaccagcaagaagagcgccagccccgcaaccccccacgccagccaggagccccccacgccggcacgggcccggggaaaaggagga

SEQ ID NO: 235134 - RNA, 78 nt, Homo sapiens
ggccgccgccgcgccgcccaccacagacaggcaaagacaaaaaggagaagacacaaaacgggcccggcgaggcagcac

SEQ ID NO: 235135 - RNA, 66 nt, Homo sapiens
ccgcggccacggccccccgccagaagccagaggcgccgcgggccccgcccaccccccagcagccag

SEQ ID NO: 235136 - RNA, 61 nt, Homo sapiens
agacacacggcgagaagccaacaagggcggagaaggaacagggagagaaacaacgggaaca

SEQ ID NO: 235137 - RNA, 48 nt, Homo sapiens
ggaaggcaaagacgagagcggaaaaaggcacaacaacaaccaaaaaac

SEQ ID NO: 235138 - RNA, 77 nt, Homo sapiens
cggaccacacgggcacggcgaggggccggccgacaacacagggcgggggaaagaggccagaagacaggagcagagca

SEQ ID NO: 235139 - RNA, 73 nt, Homo sapiens
agacccggcggccccccagcgcccaaacacgcccaagccgacggccgaccgagcagcggcccagggggcccac

SEQ ID NO: 235140 - RNA, 72 nt, Homo sapiens
gaaggaagcagaaagcccaagcggaaaaaagcaccaaaaagcccgggcaccgcccagcgcccagaccaccaa

SEQ ID NO: 235141 - RNA, 55 nt, Homo sapiens
acacggacaaaacgacgacgaggaggagacggcaccgccacaccaaagaagagga

SEQ ID NO: 235142 - RNA, 72 nt, Homo sapiens
gaccacgaggcaacgccccaggacacacagcaacgaagcaggggaggagggaagaccggacagcgagccaag

SEQ ID NO: 235143 - RNA, 84 nt, Homo sapiens
  misc_feature (41)..(84): n is a, c, g, or u
gccacacagaacaaggaaggcaagccccccgcccaagaagnnnnnnnnnnnnnnnnnnnnnnnnnnnnnnnnnnnnnnnnnnnn

SEQ ID NO: 235144 - RNA, 70 nt, Homo sapiens
cgaccaaggagaaacagaggacaacagacagagcagcgaagcaccgagaggcaggcagagacaccaagcg

SEQ ID NO: 235145 - RNA, 81 nt, Homo sapiens
agcccaggagcagagaaaccaagggacgcggagccccggaggccgcggcggacggacaccggaggccaccacagaaggacg

SEQ ID NO: 235146 - RNA, 80 nt, Homo sapiens
agaaagcagaggcaggcccaggaacaacaacggccgagcgaccaggagaggagcccccgcccgaagaccggggagggccc

SEQ ID NO: 235147 - RNA, 79 nt, Homo sapiens
cgcacggagcgggcccgggccagaggcagaaaacggacggaagaaaaggcggccggaagacagaccgcgaggccacacc

SEQ ID NO: 235148 - RNA, 69 nt, Homo sapiens
cagacagcaccgaccagccacggccaaacagagcagggacggaaaaggcgcacacgacccggagaaccc

SEQ ID NO: 235149 - RNA, 73 nt, Homo sapiens
gcggcgcggggggcggaggcgccaggggcgaggcagcggcacccgagcgcccagaacagggccggacccacac

SEQ ID NO: 235150 - RNA, 63 nt, Homo sapiens
cgccgcgcgccgacgcgggaaaccccccccaccccaccaggggcacccgcacagcaccaagca

SEQ ID NO: 235151 - RNA, 74 nt, Homo sapiens
cgggaacgaccgaaacaccaggccaggagcagccaagaaccgaccaccccaccgacccccgcccagcgcaccac

SEQ ID NO: 235152 - RNA, 76 nt, Homo sapiens
gaagacaaaagacgcagcaaacaaaaagaacggccagcagcgccaagggagcagacgaaagcggccaagagaagca

SEQ ID NO: 235153 - RNA, 65 nt, Homo sapiens
ggccccaaagcagaccccagaggcagagcaacagggacacaagcaagaagaaagggaccgacagc

SEQ ID NO: 235154 - RNA, 71 nt, Homo sapiens
caagaccgaaacaacccaacgggaacgagaagggaaaagccaaggcagaggaagaagagacacgaagagca

SEQ ID NO: 235155 - RNA, 75 nt, Homo sapiens
cggaagacgcgccaccggagcggagaagcgggaccgaggacgggcggaccacccaggcggaagggaggccgcccc

SEQ ID NO: 235156 - RNA, 69 nt, Homo sapiens
gacgggcagggcccagggcggagaacggaaaagcaccaggaagcagagaggaccgcagaagggaaggag

SEQ ID NO: 235157 - RNA, 61 nt, Homo sapiens
aaacgcgagggcaccaggggaaaacacaaagcaaagaggaagaccaggaacgggacaggcg

SEQ ID NO: 235158 - RNA, 86 nt, Homo sapiens
gccgcgccaccccaccagccaaggcagagcagagcgggcggaggaccccgggcgcgggcgcggacggcacgcggggcagaaccgga

SEQ ID NO: 235159 - RNA, 76 nt, Homo sapiens
cggcggaccggccgcccggcccagccaacaccgacggcggccacacggaccacccggacacgggaacccggccggc

SEQ ID NO: 235160 - RNA, 77 nt, Homo sapiens
accgcccagaggggcccaccgcgcccgggaacgcccgcggacggcagggcgcgacaagaagcgcccgcccgacgagc

SEQ ID NO: 235161 - RNA, 71 nt, Homo sapiens
aacaacagcaacggaggcgggaccggaacaggcacaccccacacaagcacgccaagaaggagaccgcagga

SEQ ID NO: 235162 - RNA, 94 nt, Homo sapiens
gaaacaagacaaaggaaaagcggagcggagaccagagacaagcggaagcgagggcggcccccgggacccaacagaagaccgggacgagcgccac

SEQ ID NO: 235163 - RNA, 78 nt, Homo sapiens
gaagagaccaacacagagcagcggaaccagacaggcaggaaaagacaggacgcaaagccgaccacagaaagaccgggc

SEQ ID NO: 235164 - RNA, 64 nt, Homo sapiens
agagggcaaaccggcaggcgcccggacacagaagaggacagggcaggccggagagcgacccgac

SEQ ID NO: 235165 - RNA, 89 nt, Homo sapiens
gccggaccgcaggacgacagaccgagggaggacaccggaccccggacgcgggaaaggaagagacaccggcgggcagaggggacgaaaga

SEQ ID NO: 235166 - RNA, 72 nt, Homo sapiens
gaacaggaccgagcgaaggcaccacggcgagacacagggaccaagaaaaaaacccgaccaggagcgcacccc

SEQ ID NO: 235167 - RNA, 74 nt, Homo sapiens
gacgcagggcgcccccggaggcgcaaacgggcgcaaggcgccaaaacaagagaccgcagagcggggcgcagaca

SEQ ID NO: 235168 - RNA, 56 nt, Homo sapiens
cgagaaggcgggaagccgaaggcagccacaggagcggcagcccacaagcaggaaga

SEQ ID NO: 235169 - RNA, 68 nt, Homo sapiens
acgagggaggagggagaacggccaaggaagcagaggcagggcccgaaccgcccgcccgcgagaggcca

SEQ ID NO: 235170 - RNA, 82 nt, Homo sapiens
ggaggagcgcgggacaggcggacaagagcagggcgaccacagccggccgcacccgcccgcccgggggccacggagccacgcg

SEQ ID NO: 235171 - RNA, 79 nt, Homo sapiens
gccaagcagccaaaccagaagaaaagcacaggaaagaagcaaggaagacggcggggaaaaacgcaggaccaaaagaagg

SEQ ID NO: 235172 - RNA, 80 nt, Homo sapiens
gggcaacacccgccgcagagggaagacccgaaacaagaagaagagaacagaaaaacaagcagacgaggcagaaagaagag

SEQ ID NO: 235173 - RNA, 98 nt, Homo sapiens
ccccacaacccccacagccagaaggagagagccagagccagaccaccggacggggcggcaggagcgcggcaggggcgcgggggcagcaggaggagccc

SEQ ID NO: 235174 - RNA, 81 nt, Homo sapiens
cacaccaggaaaaacgggaccacaccccggaagcacacaggcgcggggagcgccacaggaggccggaagaaaacggggagc

SEQ ID NO: 235175 - RNA, 68 nt, Homo sapiens
ggagaaacaaccaacaaaacacaacggagccaagagggggacgcccgccacggcccgccagaacgggc

SEQ ID NO: 235176 - RNA, 69 nt, Homo sapiens
agagggcgcccagagacaacgagagaacagggggccaggaaccagaagacgaggaagagaaggagcccc

SEQ ID NO: 235177 - RNA, 59 nt, Homo sapiens
cggcggggaggaaagagagacgacgaagaacggaagcgccccagaggagagggcggaga

SEQ ID NO: 235178 - RNA, 90 nt, Homo sapiens
cccggccaagaggcaaaggggaggacgcagcaaaccaccagaagaagacagggccagaaacggcgagccacgagggacaggaggacggca

SEQ ID NO: 235179 - RNA, 57 nt, Homo sapiens
ccagggaacggagcagcaagaagcagaagaggcggccacccacgagccgacggcaaa

SEQ ID NO: 235180 - RNA, 69 nt, Homo sapiens
gaacggaaaaaacaggggaacaagcaagaaaagccccagaagggccgaaccgaaacccaagccccccca

SEQ ID NO: 235181 - RNA, 69 nt, Homo sapiens
cagggccaggaaccaggacgcaggaaagcagcacaaagcacacgcaaaagggcggaagacggcagcaac

SEQ ID NO: 235182 - RNA, 48 nt, Homo sapiens
ggcacggagccagacacaaaacggaacacgccgccccacccgcaggag

SEQ ID NO: 235183 - RNA, 75 nt, Homo sapiens
gcacacagcagagagcaagacagaaaggagaacccgggagcgagacagggaagaaccggcaaggaacagaagacc

SEQ ID NO: 235184 - RNA, 75 nt, Homo sapiens
ccaagaccaccaaggcaaaggacaccagaggaccagaacccacgagaaacagacgagccaaccagaccccaggag

SEQ ID NO: 235185 - RNA, 78 nt, Homo sapiens
agcccgcgacgcgaggccaaggaaagaagggaaacaccccaacccccaggaagaccaaccgaagaagacgcgagggga

SEQ ID NO: 235186 - RNA, 73 nt, Homo sapiens
acccagcgcagaggcccacaacaccgcagcgggccacacaaggcggcaaggccacagcaggaggcaaagaacg

SEQ ID NO: 235187 - RNA, 74 nt, Homo sapiens
ccgagagagaagggaaccggagaggacacagcagaagagaacacgcccgaaggagcccagagagcggcgggaac

SEQ ID NO: 235188 - RNA, 77 nt, Homo sapiens
gacgccgcgcagggacacggcaccgcgccggcccgccagaacgggcagcaagggacccccaccaaccaggaaaagga

SEQ ID NO: 235189 - RNA, 78 nt, Homo sapiens
aagccgacacagcgagaacccaacagaaacccccgggcacaaaaggacccaaagaaaaaggccacagggaggagaaga

SEQ ID NO: 235190 - RNA, 76 nt, Homo sapiens
cagacccgccaggaccaacagaggagcaaaagaagaggggccagacgcaaagcccgcgaccggaacgcacaccacc

SEQ ID NO: 235191 - RNA, 108 nt, Homo sapiens
gcacaggccgcggaggaggaggaggggaggcgcccccggagccgccccggaggagaaggacagggcagaccgccagcagcacagcaagccacagagagggccggcagg

SEQ ID NO: 235192 - RNA, 73 nt, Homo sapiens
agaacagaaacaaacaggaagagaacacagggaagcagcagccacgcaaggaaacagggagccaggccccaca

SEQ ID NO: 235193 - RNA, 77 nt, Homo sapiens
ccagaccacaccggacaaccagcgggccgagaccaccaggaacaagggacaaaccaaagaccaaccaagaggccaga

SEQ ID NO: 235194 - RNA, 54 nt, Homo sapiens
ggaagaaggaaccccgaagagggaaagcaacggcgcaagcggcggcggcgggca

SEQ ID NO: 235195 - RNA, 89 nt, Homo sapiens
cggagaccccgaaaacggaagcgcagggagaaggaagaggggaaaagggcggcgacggcggcgcgaggaccgaccgggcccgcggacga

SEQ ID NO: 235196 - RNA, 71 nt, Homo sapiens
cgacggcgcgaggaggacgagcggcgagggacggaaaaagccaagaagagcagaagaaaaaagccaacccc

SEQ ID NO: 235197 - RNA, 59 nt, Homo sapiens
cgcgcgcgcgcccggaaaccgcggagggcagaaggcgcaaaggcaaagaccagcagggc

SEQ ID NO: 235198 - RNA, 75 nt, Homo sapiens
gaggcaagggcagcccgccggaagcagaggaacgccgggacccgggcacgccgcagaccaccccgcacacagagg

SEQ ID NO: 235199 - RNA, 62 nt, Homo sapiens
gaacagccacagcagcccccaaggagcgcaaggagacgaggacgcgcacaggaaaggacgcg

SEQ ID NO: 235200 - RNA, 72 nt, Homo sapiens
gcacggccgagcgccccggagggcaggaggccaccagcgcgcgagaggggggcccgccaaacacggccggac

SEQ ID NO: 235201 - RNA, 91 nt, Homo sapiens
ggaagaggggccccggagcgcggcgcccgcggccgggcggcgcggccgcccgggccgggccccaccggacggcagaagcaggcaacaggaa

SEQ ID NO: 235202 - RNA, 56 nt, Homo sapiens
agggcagccgggggacagcgaggaagggggaagcagaccaagaagacagaaggggc

SEQ ID NO: 235203 - RNA, 63 nt, Homo sapiens
gcacgcgcgcgccccacccggccaagcacacacaccaccggcggggcaggcgccgggaggggc

SEQ ID NO: 235204 - RNA, 71 nt, Homo sapiens
ggggacgaccccgaaagaaagcaggaacacgaacaccaagccccgaagcacacagaaaggaaccagggcac

SEQ ID NO: 235205 - RNA, 77 nt, Homo sapiens
agccgcggccaggaccggcggaccggccgcccggcccagccaacaccgacgaaaaacacaccgacagcagaacacac

SEQ ID NO: 235206 - RNA, 74 nt, Homo sapiens
gcacgcagaagggaggagcagcccaacagaaggccaagaagcgaaccaccggaacagaaagagaagggagcaac

SEQ ID NO: 235207 - RNA, 90 nt, Homo sapiens
agacgcaaacggcccaccgccccgggggagagaccccaagaagaagcggaagaggagccgcggaaccaagacacaaggaacagaagacag

SEQ ID NO: 235208 - RNA, 63 nt, Homo sapiens
acaggcccacgccagacacgacgcggcaggaacccggcccagaggagcaggcccagaaagaac

SEQ ID NO: 235209 - RNA, 73 nt, Homo sapiens
agaccggcgccggcgacgcccgcgaggagcaaccggacgaccaaggaagaaaaacgcccaaagacaggacacg

SEQ ID NO: 235210 - RNA, 61 nt, Homo sapiens
cggaggaaacccgacagcaaaggaaggaggagcagggcccagcagcgaagggcaagggaga

SEQ ID NO: 235211 - RNA, 80 nt, Homo sapiens
caggcaaaagggaagcgaaaccaaccagaagccgagaagagcccccgaggaaagcacgcacaacgaggaaaagagaaaaa

SEQ ID NO: 235212 - RNA, 71 nt, Homo sapiens
ggaccaagaaccaggccggcacggaaaagaagacagcgagggcggccacaccgggcaggcggagaagacag

SEQ ID NO: 235213 - RNA, 87 nt, Homo sapiens
cagagagcgacccggggggagcgcggggcgacgcggcgcagggacccgggacagcggagagcgaccgggcagccagaacagcacaca

SEQ ID NO: 235214 - RNA, 83 nt, Homo sapiens
acccagccagcgggagaggggacggcacccgccgccccacacccccgccaggggacacaggggagacaagcagaagccggagc

SEQ ID NO: 235215 - RNA, 76 nt, Homo sapiens
cgaggaagccccaaagaggaacgcaagcacaggaccagaaacgaaaggcagcagaagaggaaagccagaaagacga

SEQ ID NO: 235216 - RNA, 99 nt, Homo sapiens
gcccaggcaagaagcagacggagaagagcggcaaagggaccaccacagaaaacaacaagaaggagaaagacacaacgacagaagaaaaaacacaagaaa

SEQ ID NO: 235217 - RNA, 42 nt, Homo sapiens
ccgggccccgagggcggaccgagagccagagcacagagcacc

SEQ ID NO: 235218 - RNA, 58 nt, Homo sapiens
gagagggccggcaggcccgggaagggggcagagaagaaagagggcagcaaaacagcac

SEQ ID NO: 235219 - RNA, 75 nt, Homo sapiens
gaaggggcgggggaagggcaggccgggggcggccagaggcaggcggaaaacggaacgaagcagaaggacgccaac

SEQ ID NO: 235220 - RNA, 52 nt, Homo sapiens
gacgggcaacagacaggcaagaaggaaggaccaacacaccacaccgaaagca

SEQ ID NO: 235221 - RNA, 59 nt, Homo sapiens
aaacacaaggcaaagcagcaaccagggaaaagccgggccacagaagcaccaccacaagc

SEQ ID NO: 235222 - RNA, 82 nt, Homo sapiens
gggcgcggggggggagcccacacacgccccgcgcacaacaggcggagacagaggagcggaggaggagaagcaggccgcagaa

SEQ ID NO: 235223 - RNA, 74 nt, Homo sapiens
ccgagacccggacagggcaggaaacaggagacgcaaccaacgccggaagcggggccccagccgcgcgccaacgc

SEQ ID NO: 235224 - RNA, 60 nt, Homo sapiens
aaaaacaacaaccggacacagagggacaagagaaaaaaagggcgggcgaacaaaaagagc

SEQ ID NO: 235225 - RNA, 89 nt, Homo sapiens
aggccccagcccggaaaaggagggcaagaggagcagcagcggcggggccaagcgggagagcgagaaggcggaacaggagaggcggcgcg

SEQ ID NO: 235226 - RNA, 73 nt, Homo sapiens
cgccgcgccgccgccaccagcccaagagaaaggggcccgcgaccggaccacacccacaaaaagagagagaccg

SEQ ID NO: 235227 - RNA, 79 nt, Homo sapiens
agccacaggacgcgccgcgccgacaagcacaggaccccccagggggcccgagcccaccccagggaaggagaccgccagg

SEQ ID NO: 235228 - RNA, 85 nt, Homo sapiens
ccgggagaagcagcgccgcccggggcagaccaggcaggcacgcacgggaccgaccccgggcggcgacaaagaggaagcagcagca

SEQ ID NO: 235229 - RNA, 58 nt, Homo sapiens
cgacgggggggacgagcggagcccgggacaggagacggcgaagacaaacacccacaga

SEQ ID NO: 235230 - RNA, 76 nt, Homo sapiens
cgccagacgaccccacccgcgccgcgacccgggcagacgccgagaaggccgcgcggacccaccaccccacacgcca

SEQ ID NO: 235231 - RNA, 83 nt, Homo sapiens
gggcggcccaccaacaggaacagggcagacgagcggaggacacccaacccgggggacccagaaagaagcacaaaacaaacgac

SEQ ID NO: 235232 - RNA, 68 nt, Homo sapiens
ggacgcaggcgcaggccagcaccccaaaaagaagagacagccaaaaggggcgaagaacaaggaaccga

SEQ ID NO: 235233 - RNA, 92 nt, Homo sapiens
accggcgcggcgagggagcagcaccagggaggacgccccggggccagagggggcgaccgggacaaacggcggaggcagaagaggcaaaccag

SEQ ID NO: 235234 - RNA, 72 nt, Homo sapiens
caaagcagaccggagggggaacacccacacaaagaaaagccacgaccaagggcgcagcaccagaccgagcac

SEQ ID NO: 235235 - RNA, 80 nt, Homo sapiens
cggcggcggcgggaggccccggcgggggcgcgggcggcgggcagcccgcgggcgcccaggaaggcgacagccaacagaac

SEQ ID NO: 235236 - RNA, 90 nt, Homo sapiens
gagcccccagcgcagggggaaccagagaagagacaacagcccaagacacagcgacgcggggccacccacagcaagagacaagggagcgag

SEQ ID NO: 235237 - RNA, 83 nt, Homo sapiens
agaaagagcagaaaggagggggcgagaaggcgggaagccgaaggcagccacaggcaggaggaagagcgcaggcgccggaagaa

SEQ ID NO: 235238 - RNA, 82 nt, Homo sapiens
cggaaggggaagaggaaagcaaaggcgcaggaaggccccagggacagaccagccaccacgcccgcccacacagcgccccaga

SEQ ID NO: 235239 - RNA, 69 nt, Homo sapiens
agaaaagaaagaagacaaggggaaaaggcaggaagaggaggacccaacaagccaaaggaagagccacgg

SEQ ID NO: 235240 - RNA, 68 nt, Homo sapiens
caaccagacgcaccgaacgaggcgaaggggaaacacccgacgacaaacaaggcccgccaagagaaaga

SEQ ID NO: 235241 - RNA, 73 nt, Homo sapiens
cacgggggcaagccaccagccgacacaaacccacgaccccgggcaacccccaagagggagagacaccaggcgg

SEQ ID NO: 235242 - RNA, 55 nt, Homo sapiens
aaggaccaagaaccaggaggaaagacaagccccaaaagcagccgggaaaggagcc

SEQ ID NO: 235243 - RNA, 40 nt, Homo sapiens
ggcgggcacggcccgcgaggacacacgcggaaagagggaa

SEQ ID NO: 235244 - RNA, 72 nt, Homo sapiens
ggaggagacaaccgacccggcgaccggcagacccaggggcaagacagaccggggaggagacaccagacagca

SEQ ID NO: 235245 - RNA, 78 nt, Homo sapiens
gcaagcgcggaagaggaccggaggccggaggaagccaggaggccgggaacccccaggacggacacagcggggaaggag

SEQ ID NO: 235246 - RNA, 84 nt, Homo sapiens
gagccgacccccgggaggaggcacccaagggagcgccccacaaaaccaagcgaggccaggccgccggaccgccaaggggacggc

SEQ ID NO: 235247 - RNA, 82 nt, Homo sapiens
aggaccagccccggggggaacgggcacagggcaggggggaaggcggcgcagaagaaggcacagggaagagggaagcgagcga

SEQ ID NO: 235248 - RNA, 76 nt, Homo sapiens
agaaagaaagaaccgagagaacgagcacccccgaagcacccaggaaacccccaaagagaaagaagaagaaaacgag

SEQ ID NO: 235249 - RNA, 65 nt, Homo sapiens
ccaccaggccccggaaaacgagagcagcgggaccccacgggcagagaggcggagcggagaggacg

SEQ ID NO: 235250 - RNA, 58 nt, Homo sapiens
agacagagaggagccaaacccccagggccggagcgagggagagcaggaacacagagag

SEQ ID NO: 235251 - RNA, 81 nt, Homo sapiens
ccagggagagcgggcagccccaggggacaggcagaccaagaagcaagagagaccacgacggaagaaaggaggacaaaaaag

SEQ ID NO: 235252 - RNA, 81 nt, Homo sapiens
ggcggagcaggaccgcacgcggaggcggcgcccgcagaggaagacacaggcagaaaacacggaaggagccaaagaaagaca

SEQ ID NO: 235253 - RNA, 43 nt, Homo sapiens
cccacaggagagggcgcaggcaagccggcggagcgcagcgcag

SEQ ID NO: 235254 - RNA, 98 nt, Homo sapiens
cgccggacccgggaagaacgggagccaagggacagccgcgagcaaagccggaaaagagcaagaccaccagccgacagaccggcgcgcacaccgacccc

SEQ ID NO: 235255 - RNA, 78 nt, Homo sapiens
cggcaccagaagcaggagaaccggagaagccccaagacgggaaaaagggaagacccgaaggaagacaacacaaaaacc

SEQ ID NO: 235256 - RNA, 50 nt, Homo sapiens
caagcacccgaaaaaccaagaacgccaggacaccccccaggcacagccac

SEQ ID NO: 235257 - RNA, 82 nt, Homo sapiens
gagcgcagcccccaaagccgcgcgagaggagccgggacacgccagcgcgggcccagagaaggcacgaaaacgcggagagaag

SEQ ID NO: 235258 - RNA, 75 nt, Homo sapiens
caagaagccgcggaaccaaaccccaccgagacagaggaaaaacaccgccggccccaaaagcgggaaacaggcaga

SEQ ID NO: 235259 - RNA, 77 nt, Homo sapiens
ccagcagaagccaggacggaggacgagaacccccgcgaaccagaggaacccagcgagcgagagcggaccagaggacg

SEQ ID NO: 235260 - RNA, 86 nt, Homo sapiens
aggccaaggcaccggcccccacgggcggcgcagggggagagccagaggccaagaagagaagacggccgcaaagaaaaagacaaaga

SEQ ID NO: 235261 - RNA, 56 nt, Homo sapiens
ccgacgacacacacagaggagcggagggagcacacgggcgaagaacccccaaacca

SEQ ID NO: 235262 - RNA, 84 nt, Homo sapiens
accagaagcgagagaaaagcccccaaaagcagcacagaggcgacaagcgccacccaggggcgaaccagccgaccgccaaggggc

SEQ ID NO: 235263 - RNA, 78 nt, Homo sapiens
cggaacccggcagcagccaagggccaggaagcagagagaacaggcacaagagagagggcacaggacagagagcccaga

SEQ ID NO: 235264 - RNA, 61 nt, Homo sapiens
ggagagcagaaggggcgagcacagaagcacagccacagagcagacacacggcagggaaccc

SEQ ID NO: 235265 - RNA, 68 nt, Homo sapiens
ggccccgcgcggaggccaagcaaaggcccggagcggggggaaaacccccaggggaggacggccccacc

SEQ ID NO: 235266 - RNA, 76 nt, Homo sapiens
gggcgaccgcgcacgcgacgccaccaggagcaggcccggggcggcggcaccggagacagagacagcccccggaggc

SEQ ID NO: 235267 - RNA, 77 nt, Homo sapiens
aaacacacacacacaagacagagcgggagccaccagcgccaaagggaagccaggagcccgggggcacggggagaaga

SEQ ID NO: 235268 - RNA, 102 nt, Homo sapiens
acaggaaaaaaaggaacagcacacggaacgcacaaacggccacgacaaaaagacccccaccggacccggagaccacccagagaggaaggaagcacaagaaga

SEQ ID NO: 235269 - RNA, 35 nt, Homo sapiens
ccagggggaaccaaacccggcagcagggagcgaac

SEQ ID NO: 235270 - RNA, 92 nt, Homo sapiens
aggcgagcagccgggagacaccgccaccgccaggaaagcaagcaagggagaccaagacagagccaagaaggagaggaaaggggcagagagcc

SEQ ID NO: 235271 - RNA, 65 nt, Homo sapiens
caagacccaggccacgccgagccgccaggcagcaggacggacagcccgcccgacgagagagaagc

SEQ ID NO: 235272 - RNA, 70 nt, Homo sapiens
cagcccaaggacacaaggaaagacacagaccccgcgagcaagaaggggagaccgcccgcggcacgaggaa

SEQ ID NO: 235273 - RNA, 69 nt, Homo sapiens
gaggaaacccgacagcaaagccgcgaaaagggggccgacggcacagaagagacgcgccccccaccaagc

SEQ ID NO: 235274 - RNA, 69 nt, Homo sapiens
gcaggcgcagaacgagggacaaggaaaagcaggacaggagaaaagggaacagccaggccccggagccca

SEQ ID NO: 235275 - RNA, 79 nt, Homo sapiens
gcccaggaggccgagcgcgggaaagcagcgaagacgaccccgacgcaggccaggagccgcggacagaagccgagcacgg

SEQ ID NO: 235276 - RNA, 125 nt, Homo sapiens
ccgggaaggggaacgcggggcggccgcgcccccccgcagcgccggcagccgccgccaccgcaagaagcccggacccaagaacaccacacgcacagcggagacgcacagacgcacgcggccgggga

SEQ ID NO: 235277 - RNA, 62 nt, Homo sapiens
ggcacagcgaacgggcagcaggaggagcagcccggaaggacacagcaggggccagacaacca

SEQ ID NO: 235278 - RNA, 66 nt, Homo sapiens
agccagcccaggacccagcccaccggacccccacccccagaagcgacccagcaggacgaccagcca

SEQ ID NO: 235279 - RNA, 81 nt, Homo sapiens
gaggcggaccggaccacggcgcggagcgccgccagaggagaagaggccggacggagacagagacagagaggcaaacggaaa

SEQ ID NO: 235280 - RNA, 69 nt, Homo sapiens
ccaaagaagggagagagggaggacgcccgaccccacccagcccgcaccgggcagccaggccccgcagaa

SEQ ID NO: 235281 - RNA, 76 nt, Homo sapiens
ccccggggcgggcaggaggccgcgcgccggccagcccagcggcgacagcagaagcacccgagcagggaaccccggc

SEQ ID NO: 235282 - RNA, 77 nt, Homo sapiens
caagaaaaagaccgggcaaagaagcaaaggagagccagagcgaacccaagacggggcacgccgggagaaacaagcac

SEQ ID NO: 235283 - RNA, 72 nt, Homo sapiens
gaagaacaaagacgagccagacccccaggacagagaggcgcaggcaagacccggaaggcccagaagaaaccg

SEQ ID NO: 235284 - RNA, 83 nt, Homo sapiens
acaagccccaaagccacccaggcaaagcaggcacggcaaagaaggaggggagccgccaccaaaagcagacggaaaacccacgg

SEQ ID NO: 235285 - RNA, 84 nt, Homo sapiens
gggagggcgccgagggggggcgacgacgaagacagcggagaggagagcgggcggaggacgaggcagagccagagcccaagcccc

SEQ ID NO: 235286 - RNA, 36 nt, Homo sapiens
gcgcggcgccccagccggaaacacgaagccacacac

SEQ ID NO: 235287 - RNA, 71 nt, Homo sapiens
gacagaaagcgcaaagggagaacacggggacaaagaaagcccgcgccgggagaagagacaacggcacgggg

SEQ ID NO: 235288 - RNA, 73 nt, Homo sapiens
ggggcaccaggggacgggacccccaagcccagggcgaacagggaccggaagagacggaaagagaggaggcaag

SEQ ID NO: 235289 - RNA, 70 nt, Homo sapiens
ccgcggacacggagaggaaggcaagcccaagccacagaccaaaaagagaaagggaggcaaaaacaggaaa

SEQ ID NO: 235290 - RNA, 78 nt, Homo sapiens
gaaccgagacaaaagaagaccaaaacgaggcacaaaaagcagagcacgccagcagcgcaaaaagaaaaacaccggagg

SEQ ID NO: 235291 - RNA, 51 nt, Homo sapiens
gcccccgagggcgggaacagggggggaaccgccaaacccccccgaccaccc

SEQ ID NO: 235292 - RNA, 70 nt, Homo sapiens
aggagaaggacccacccacaggagagaggcagaacagaacaaacggagaaacaccggagagcccaaaaca

SEQ ID NO: 235293 - RNA, 82 nt, Homo sapiens
gagaagggaggaaaaccaacaagggcacacacgaaacgggcaaccggggccagggccagcaccagagagcagcaagaagcgg

SEQ ID NO: 235294 - RNA, 75 nt, Homo sapiens
gaggaccaggagcaaacagaaagcccgaacccaaacgagcacacgaggcccccgcccaaggaggaaaagcgaaaa

SEQ ID NO: 235295 - RNA, 37 nt, Homo sapiens
gccccaagaccgccgagggcaacaccgaggaccacac

SEQ ID NO: 235296 - RNA, 70 nt, Homo sapiens
caccaaccccaacccggagagcggcgagacaccgcacccgaagagccggcacggagaaacaccccggcgg

SEQ ID NO: 235297 - RNA, 60 nt, Homo sapiens
gagagggccgggagcgcgcagccagacccaacagaggaagccgcaagaaacgggacgaca

SEQ ID NO: 235298 - RNA, 81 nt, Homo sapiens
gccggagagggcgggccgcaccagacgaccgcgaacacaccaagccccgaagggaaaacgagcacagaaccaagcacagcc

SEQ ID NO: 235299 - RNA, 77 nt, Homo sapiens
agacaggaggccgcggggagacgcgggggacggggcaggaccacagaggacaaaagcagccccccggggcaggggag

SEQ ID NO: 235300 - RNA, 41 nt, Homo sapiens
gacaccccggaagcgggaaagccagccagcaggcaacaggc

SEQ ID NO: 235301 - RNA, 74 nt, Homo sapiens
gggggcgccgcccaccgcgcccgccggagcggcagcccacaagcaggaagaccagccccaggagggaaacagag

SEQ ID NO: 235302 - RNA, 59 nt, Homo sapiens
cggacaaccagaggcagccagcagggggagcggagaagcgacggaggagggggggagga

SEQ ID NO: 235303 - RNA, 62 nt, Homo sapiens
gcccgcgaacaccgcggagcccacaccacgcaagccacgcccccgagagccgccaacacccg

SEQ ID NO: 235304 - RNA, 38 nt, Homo sapiens
agaagaaccaggagcggcacgggcgggaggcaggaaca

SEQ ID NO: 235305 - RNA, 76 nt, Homo sapiens
cagcaacagcggccgggaacgaccgaaacaccagaaaaggcaacagaggccccgcaaaggaggaggacggaaagga

SEQ ID NO: 235306 - RNA, 76 nt, Homo sapiens
cgacccaccacgccagccaggcaagaaaccccggacagaaggcacggcgaacaaagggcaacaacacaagaacgca

SEQ ID NO: 235307 - RNA, 82 nt, Homo sapiens
ccaggaagggaccaggccaggaacgggggcaagggcgccaaaggggagaaggcagaaagaaggccaaaacgggagaagagca

SEQ ID NO: 235308 - RNA, 65 nt, Homo sapiens
ccggagaccacagccgcccgaaacccgggaggagggagcaagagcaaagaaagccacgacacccc

SEQ ID NO: 235309 - RNA, 78 nt, Homo sapiens
ggggcccagcgcgccgcgcacgcgcgccagaaggccgagagccgccccagcacagacgaacagacggaaggaacagac

SEQ ID NO: 235310 - RNA, 72 nt, Homo sapiens
accaggacagacggggaacgacagcagcagccagcacggcggccaggggagcggaaagcagcaagaagacaa

SEQ ID NO: 235311 - RNA, 75 nt, Homo sapiens
acggaccgccacccaccaggcaggggccagagcccccaaagaaccggccgcacggccccgggcccggcaagcagc

SEQ ID NO: 235312 - RNA, 83 nt, Homo sapiens
cgcggcgcaggaggcggggagcgcagagcgggcgagcgcgaaacgcagcagcccaccagcagcgggaagcgaacgaggcagga

SEQ ID NO: 235313 - RNA, 57 nt, Homo sapiens
gcgggcaggcagagcaccagggggggcgcaggccccggaagagggacgcagccaaaa

SEQ ID NO: 235314 - RNA, 74 nt, Homo sapiens
aacaccacgggagaacagaggacgggaggcacaagaccgcaccagcacaaagagcccaacccggcagcggccca

SEQ ID NO: 235315 - RNA, 78 nt, Homo sapiens
accgcacgagccgccgagacacggggcgacagcaagaaggagccagcacagaggcaaaagaaccaacaaaggccaaaa

SEQ ID NO: 235316 - RNA, 85 nt, Homo sapiens
gcggcacccgcccagcgggggggcagcagaagcccagagcccagacgcaggcccccaaaaaggccacaaagacagccccaccgcc

SEQ ID NO: 235317 - RNA, 76 nt, Homo sapiens
agaggagggaccgcacgaggccccgaaaccggggccgagcacccagcggccccggggccggcaccggcagccaccg

SEQ ID NO: 235318 - RNA, 71 nt, Homo sapiens
gaagaaagaagacgagaaggagaaagaccccagcaaggaccgacaaagggacgcgagagcgaaaaagccaa

SEQ ID NO: 235319 - RNA, 73 nt, Homo sapiens
ccgcccccagggcccggcgccaccagccaggccacaagacaagaacgagccagcaaacccgaggagccagaga

SEQ ID NO: 235320 - RNA, 79 nt, Homo sapiens
caggaccaaaagggaaaagcaccgggccggaggccacgacacacccaagcggagagcagaccacccaagcacacaccga

SEQ ID NO: 235321 - RNA, 69 nt, Homo sapiens
cgcagggcgcccccgcgcgcccacccgggcagaaaacgcagaagcccacaggccacagagacaaggagg

SEQ ID NO: 235322 - RNA, 79 nt, Homo sapiens
gacggcgggccccgggaccgggcgggaacccgcggggagcgggacacgaacggggaccgagcagagaaccaacggagaa

SEQ ID NO: 235323 - RNA, 83 nt, Homo sapiens
gcgaacgagcgacggcggaacccggggccgggacgcagcccggcggcagcaggggaggcaggaaaaagacacaagacagcagg

SEQ ID NO: 235324 - RNA, 52 nt, Homo sapiens
aaaagaaacacacagggacaagcagagcgccaccagaggacccaagaagacc

SEQ ID NO: 235325 - RNA, 76 nt, Homo sapiens
cggcccaaccacagagcaccgagggaccccagcagcaagacgggccgcccccagcccggaggggaagcaacgcgcg

SEQ ID NO: 235326 - RNA, 81 nt, Homo sapiens
ccccccacagccgcaggacccacggagccgccccccagcagggccaggccgggaacccaacaagggagcaaacagagaaag

SEQ ID NO: 235327 - RNA, 83 nt, Homo sapiens
acggcaaagggagagcaggcggggcaagcagagcaagggccagagaaggaggagaaggagacaggcggcaagcagggcgaagg

SEQ ID NO: 235328 - RNA, 57 nt, Homo sapiens
ggaagagaagccagcaaaaaggacacagacagacgcaaaagaacagaagggagaagc

SEQ ID NO: 235329 - RNA, 72 nt, Homo sapiens
aaaaagaccagaaaagggaccaaccggccacccaggaaagccaaacagaggcagaagcaaccaggaacggcc

SEQ ID NO: 235330 - RNA, 64 nt, Homo sapiens
cagcacggggaaacgaccgccccaaaacgggaacagggcaaccggagaaacgcgaagaagaaga

SEQ ID NO: 235331 - RNA, 72 nt, Homo sapiens
agccaaccagcggaaaaggacaacggaggcagagaccaagcaggggcgaaggggagcgggccggagagaaga

SEQ ID NO: 235332 - RNA, 80 nt, Homo sapiens
cacggggcagacagcaagggagagagcccgcagagcgcgcacccagcagcaacaggcgggcgcaaagacaccgccagaag

SEQ ID NO: 235333 - RNA, 83 nt, Homo sapiens
agagaggcaccgggacggaccgagaccggaccgagagcggaccgagagcgcgaaacgcacgagaaggaccagaacagagaaga

SEQ ID NO: 235334 - RNA, 58 nt, Homo sapiens
ggaagagaaagcgacggaagagccacagggagaggaaggaggaaccggcaacgcaagc

SEQ ID NO: 235335 - RNA, 78 nt, Homo sapiens
ggcgcccaccgcagcaaggacgccgcagcagggcggagaacggaaaagcaccaggaagcagagaggaccgcagaaggg

SEQ ID NO: 235336 - RNA, 70 nt, Homo sapiens
acaagcgaaggagaagagaagaggcaaaaaccaacacgcagcggccgaggcaggggaagagagcggcccc

SEQ ID NO: 235337 - RNA, 80 nt, Homo sapiens
accggagcggccaacggcaggaggagcgaagaagaagcgcaaacgccggcgggggaacgggagcggcgcgaggcaccggg

SEQ ID NO: 235338 - RNA, 71 nt, Homo sapiens
ccggcacaaagaccaaggagaaacgacaacagacaaacccagaaaggaggaacccaagagggacagaaaaa

SEQ ID NO: 235339 - RNA, 51 nt, Homo sapiens
gaacgccggaagcaaccaccacaggaaaccccaggaaggaccacagccaaa

SEQ ID NO: 235340 - RNA, 58 nt, Homo sapiens
ggagcacccaccacggagggaaagaccaggcaggcaaacagagcacgggaccgggaaa

SEQ ID NO: 235341 - RNA, 82 nt, Homo sapiens
gcggacccacggaggccgaacaaaggcgagggcagggccagcgcaacaccccacccaggaccagcggcggcgccagccaagg

SEQ ID NO: 235342 - RNA, 74 nt, Homo sapiens
gacccggggaaagacagcccacagccagaagcccaccgccaagcaagaaagaggcgaagagacaaagaaacaac

SEQ ID NO: 235343 - RNA, 78 nt, Homo sapiens
gggaggaggcgcggggcggcggcgcggggcggcgggagagcccggcggcggagcgaaacggagccccaaggagaccgc

SEQ ID NO: 235344 - RNA, 69 nt, Homo sapiens
acgccaacccgccgcgcaccgacccgacgcgccggcccacgcgcggccaaggaagcccggggcggcgac

SEQ ID NO: 235345 - RNA, 61 nt, Homo sapiens
agacccaggagaagccgcccaaagaacgcacccagagggccacacgggcaggacacccccc

SEQ ID NO: 235346 - RNA, 73 nt, Homo sapiens
ggacaaaagagacacaaccaaaggacaccagagcccaaaagcaaagcagggcagcaaagaacacaaaggcacg

SEQ ID NO: 235347 - RNA, 76 nt, Homo sapiens
ggacgagggggcgggcaggcgagcggacgcgaagggagaccccacgaggccacacacgcaacaagggccagcgcag

SEQ ID NO: 235348 - RNA, 83 nt, Homo sapiens
cgcgcgcccgcgcgcgcggcgacaccgaaaacgagaaacgaaagagacacgggggcacaaccgagcccggggaaacgggaaca

SEQ ID NO: 235349 - RNA, 75 nt, Homo sapiens
ccaaccggcaggaccgggcagaacaacgaacagaagcacaaccagagccggccccgggaggaaaaagcggccaac

SEQ ID NO: 235350 - RNA, 76 nt, Homo sapiens
acgacgacccgccagacgaggcgacgccgcaaggacggccacggcagaaggaagaaaccaaacgaaacacaacgac

SEQ ID NO: 235351 - RNA, 74 nt, Homo sapiens
cggaccgcggcgcgcgcgaccccaggccaaaggcacagcagccaagcaccagacgcggccgacgcgcccaccgc

SEQ ID NO: 235352 - RNA, 78 nt, Homo sapiens
ggagccacggccacggccgcaagccaccacaaggacccaacaccgcacccccacggagcgcccccggcgccggccaga

SEQ ID NO: 235353 - RNA, 73 nt, Homo sapiens
gcccccgcccccggccgcccacccccagccggacacggccacacagaccgaacacaaacagccaacaggacaa

SEQ ID NO: 235354 - RNA, 76 nt, Homo sapiens
gcgaaacgaggccaaggacaggacccagccacaagcgaacaggacggaaaccgaaaacgaaagccgaggacgggag

SEQ ID NO: 235355 - RNA, 73 nt, Homo sapiens
aaacaaaaaggagccaacagagcacaccccggagaaaccagaggccaagacaagagcgcccaagcggacagcc

SEQ ID NO: 235356 - RNA, 89 nt, Homo sapiens
gggccccggacccgaggggcgacagcgcgcggcaggcggcgagccgggggccgcaggaggagcgacaagcacaaggggaacacacagca

SEQ ID NO: 235357 - RNA, 74 nt, Homo sapiens
aagaagaaaagcaccaaaaacgaagaggacaccccgggaggacaagaagggcagagaagccagaacggagaaac

SEQ ID NO: 235358 - RNA, 75 nt, Homo sapiens
cggcaaaggaacccaccgacaagccacccaccacgggcggaagaaacaagcccaggacgaagaaaacaagacccc

SEQ ID NO: 235359 - RNA, 79 nt, Homo sapiens
gagcgggaggccacagcagccagccggcccgaggacaccgacaccagcagaggagggggagccacggaccccagcagcg

SEQ ID NO: 235360 - RNA, 76 nt, Homo sapiens
ggaaacgccaaaacaccagaaccaaccgcaccgggccgaaccagaggggcagagaaaacgccagaaggacagagca

SEQ ID NO: 235361 - RNA, 75 nt, Homo sapiens
cagccgcaccaaggagacaggacgaagcccaaaccacaagccacaaaagacccaacagaggaagccgcaagaaac

SEQ ID NO: 235362 - RNA, 84 nt, Homo sapiens
cagaaagaaagagggacggaaggcccagacccgacacagagcgggggaggaaaagccagaggaggaacacaagagagcccgagc

SEQ ID NO: 235363 - RNA, 82 nt, Homo sapiens
gggccacgaacacggaaggaaaagcagcccgccacaacgccgccggggcccaggacccaaggccagccagccccaggcacca

SEQ ID NO: 235364 - RNA, 75 nt, Homo sapiens
ccggcccacagcccggccaccccccggcccgaagccccacgccaggcagagagggcagcgcccgagggcggagcg

SEQ ID NO: 235365 - RNA, 109 nt, Homo sapiens
ggacagaccccaaacgcaagaaacccggcaaaccgacgcgaagacccgagagaagaggacagaccccaggaccaagacccgcaaccaggacacagcagaagcagaagag

SEQ ID NO: 235366 - RNA, 78 nt, Homo sapiens
ccacacagccccgcgggggcgggccgagcgccgagacagagaaacacaccaggcagagacacgggacacacgaaacga

SEQ ID NO: 235367 - RNA, 89 nt, Homo sapiens
gcaggaagccgcgacacccaggccaaggacccccacccagcccgaagcacagggccccccaacgggcgaccagggcccgacccgcgacg

SEQ ID NO: 235368 - RNA, 74 nt, Homo sapiens
gaagccgggaccgaaggcgaagcaacgcacacggcgccacacgaggccacgaggcggcgcggggggagaacgca

SEQ ID NO: 235369 - RNA, 64 nt, Homo sapiens
cgcgggccgcccgacggcggccaccgggggagagagggagcaggccaccggaagagggcacaac

SEQ ID NO: 235370 - RNA, 76 nt, Homo sapiens
cgcaaggagcggaaggcgcgaggcaacaaccgccgcgccaggcggagccaagcgcgacggacacgcaacccgccgc

SEQ ID NO: 235371 - RNA, 93 nt, Homo sapiens
gacaaggaaggaagaaggcgcacaccccagcgcgcaaagcgcgaggggcgagagagaagaagaaggaggccgcggccagaaacccaagaaaaa

SEQ ID NO: 235372 - RNA, 87 nt, Homo sapiens
cagcagcacaagcccgcccccacaaaccgagcaagagagagcaagaggaagcagggggaaagaggagcacagaggggaagcaacgcg

SEQ ID NO: 235373 - RNA, 74 nt, Homo sapiens
gggacccggccagaggaaagaacccgagcccagaggcaggcgaaccgcagaagcgcccagagaaggacgcccaa

SEQ ID NO: 235374 - RNA, 71 nt, Homo sapiens
gcgaccagcaccggacccgaacgcggacgccggcgcgcagggagaacacccagcagaggcgcaggaaaagc

SEQ ID NO: 235375 - RNA, 96 nt, Homo sapiens
caacgaaaacaggggccaaagggagagggaagccacaacaagccaaagaagaaggcgcggcaaaggggacgcccaacgaagagaccaccgcccgag

SEQ ID NO: 235376 - RNA, 66 nt, Homo sapiens
cacagagacaagcaagaaagaaaacccccgaccagcagcagacagaaccaagacgaccacgcaaaa

SEQ ID NO: 235377 - RNA, 66 nt, Homo sapiens
ggccaacaacggccccaaaagaacgacagaacacggcaaaaccacgacccggcgcaagccacagcg

SEQ ID NO: 235378 - RNA, 80 nt, Homo sapiens
cccccggccggaggcaccagcgcccagcgagagccagccggaggacccagcagcaggccacccaggccgaaggccagcac

SEQ ID NO: 235379 - RNA, 53 nt, Homo sapiens
ggaggggaaacgaagcgcacgaaacaccaaggacacaccaaagaaacgaagac

SEQ ID NO: 235380 - RNA, 78 nt, Homo sapiens
gcgggcaggacaaccaggggaccagagaggacggcaccagccaggaggaaccaacagaggcaaaacccgacgcaaacg

SEQ ID NO: 235381 - RNA, 63 nt, Homo sapiens
gcgcgggccggccccgcggggagcgcccccggcgcgagccccaggaaagggaaaaggaaacca

SEQ ID NO: 235382 - RNA, 40 nt, Homo sapiens
cccaggcccggaggcagcgcaggcacacgcagccagaagc

SEQ ID NO: 235383 - RNA, 67 nt, Homo sapiens
acgaggcagggggccacacgcaaggggaacagaacgaagggcacacgaacgaaaggaaacacaggcc

SEQ ID NO: 235384 - RNA, 83 nt, Homo sapiens
gacagaaacgcagagcgggaaagggcagcacaagaggaacagccaggaccaagcgaaaaacaggcggaggcggggggaccggc

SEQ ID NO: 235385 - RNA, 86 nt, Homo sapiens
cgcagacggcgcgccaggggccggaagcaccgcacaccacacccgcgccgacaggcgggacgaggccaacgagggcgcaagagggc

SEQ ID NO: 235386 - RNA, 62 nt, Homo sapiens
cgaggaaaagcccagcggcccgccaggcccggaggagaacagccgcacgggcggcgcccggc

SEQ ID NO: 235387 - RNA, 60 nt, Homo sapiens
agagcggaccggggcagaccaaacggcaagacggcccacacgcgaagggacagggccgag

SEQ ID NO: 235388 - RNA, 79 nt, Homo sapiens
aggaccgcccagcgccaccacgccgcaccggacccgcgcggcgggacggccggccgggcccagccagcagagccacgcc

SEQ ID NO: 235389 - RNA, 79 nt, Homo sapiens
cggaaacgacagccagacaacgagacacccgcacggacccgggcgcaggggcgggggagccaagggagagggaagaaaa

SEQ ID NO: 235390 - RNA, 73 nt, Homo sapiens
ccgaggcacagagaaccgaccagaacgcagcaacaaagccgcagaaagcaacaaagcgagagcacaagaaaac

SEQ ID NO: 235391 - RNA, 79 nt, Homo sapiens
gcagagggcaggaccggcacccggcgccggaccccgagaaacaggaacacagcacccacccacacccacacccgcgacg

SEQ ID NO: 235392 - RNA, 64 nt, Homo sapiens
ggacaccaggcaggaaaagaagaaggcagccagggcagcagagcgccaccagggcgcacagcgc

SEQ ID NO: 235393 - RNA, 88 nt, Homo sapiens
aaccccgcacggacaccggcggccccaccagcagacgcagccgagacaccagcccgaaacaccaccaaggcgaaggggagcaagggag

SEQ ID NO: 235394 - RNA, 70 nt, Homo sapiens
ggggcagagcaggggccggaagcaccaggacagagaaggagacgccgagagcagaaacccggacgacgga

SEQ ID NO: 235395 - RNA, 84 nt, Homo sapiens
accgaagcccggacgacgaggaaccgcccaacaggcccggaggacaggaaacggagagagaaaaggagaaggagggagagcgac

SEQ ID NO: 235396 - RNA, 38 nt, Homo sapiens
gaccgcccccaacaaccaaccgaagaggccaacgaaac

SEQ ID NO: 235397 - RNA, 80 nt, Homo sapiens
aaagaagaacacgcccaaaacgaaacccgaagagcccaagcagccaagaaaaaggcaaaaaaaaagcaggaaaaagaaca

SEQ ID NO: 235398 - RNA, 69 nt, Homo sapiens
aaagaacgcaggaaggagaaacacaggaaagcgcaaagccgacgaggagagaccccgcagcggacaaga

SEQ ID NO: 235399 - RNA, 77 nt, Homo sapiens
cccagcaccaggagccacgcccagacgcgggcgcggaaaccgccgcggagaaaaagcggggaaaacaaaaaaaagaa

SEQ ID NO: 235400 - RNA, 70 nt, Homo sapiens
gggcaccaggagcacgcgacagcgaggaagcgcaccacagcacaaaaggcaaaaggagaggagaaccaga

SEQ ID NO: 235401 - RNA, 76 nt, Homo sapiens
ggagagaagggagggcgacaaggaccagaaaagagaccgggcagagccccacagcgaggcccagagcaggaaagag

SEQ ID NO: 235402 - RNA, 109 nt, Homo sapiens
ccgcgggaccggcccggcgcccggcgagggcgcgcggcgggccgccccgcccgaaagggaggagggacacacgacaggcccgagagggaacccacaccaaaacacccac

SEQ ID NO: 235403 - RNA, 78 nt, Homo sapiens
agccaaacaaaaaggaaaggagacaagcagagacgaaccaggcaaagcaccggccacgcaggaacccaccaaaccacg

SEQ ID NO: 235404 - RNA, 81 nt, Homo sapiens
ccaccccaccagacggcgccccaagaccagaaaacaggaaaagccaaccgggagaggacacagagcgaaacaggggcacaa

SEQ ID NO: 235405 - RNA, 56 nt, Homo sapiens
cagcacacccaagacgcggcaacaggacagcagaccacagcccggcaggcccaaaa

SEQ ID NO: 235406 - RNA, 57 nt, Homo sapiens
cgccaggaagagccagaccgcacaggagcagggaacgagaagacccgagaaaaaacg

SEQ ID NO: 235407 - RNA, 84 nt, Homo sapiens
gcgccgcccggggcgaggcagggccagcagcaggcgggaggcagagccagagcccaagcccccgcagggagcccaccgcgacca

SEQ ID NO: 235408 - RNA, 63 nt, Homo sapiens
cggaacaccccccaggcccacagccgggagaccgagagcccagggccagaaggacgccaccgg

SEQ ID NO: 235409 - RNA, 93 nt, Homo sapiens
agccaccaacgccacaccgacccacaggagcgcccgcggaggagcgccggaaaacaaccgcaacgcccgacaccggcgggccggggcacagag

SEQ ID NO: 235410 - RNA, 78 nt, Homo sapiens
aaggagacgacgagggcaggaaagggcagcaggccaggccacaacggccagccgccgaggaggagacaaggcagagca

SEQ ID NO: 235411 - RNA, 69 nt, Homo sapiens
acaaacacaaggggaagaaaagcaagagccaagggagaaaacgaaaaccgcaagcgcagagacaaggaa

SEQ ID NO: 235412 - RNA, 78 nt, Homo sapiens
gccgcgccagcgcccgccgcgcgaggcccggaccccgccgcgaagcaagaagagcaacacagcaaagggcagacgaac

SEQ ID NO: 235413 - RNA, 38 nt, Homo sapiens
ccagaagagcggggcacagcagcagagagacgcaggaa

SEQ ID NO: 235414 - RNA, 85 nt, Homo sapiens
agacaggcgaaaagagagacagcagaccggaacccagggcagcccgaaagaggagaagacagcacggggagcccacaggccacca

SEQ ID NO: 235415 - RNA, 84 nt, Homo sapiens
gcgcgaagcggcgcggggaggcagcggaaggcggcagggccagaagcccccaggaggagaacgagcaacggaagccagaagaag

SEQ ID NO: 235416 - RNA, 83 nt, Homo sapiens
gcagagccgccaggcagaaggccccccgaacagcaggcgccaccagcccggagagaggcgaggcggcccagcacacgacgccg

SEQ ID NO: 235417 - RNA, 38 nt, Homo sapiens
cacaaaaaccggccggggcggagaacggaaaagcacca

SEQ ID NO: 235418 - RNA, 54 nt, Homo sapiens
cccccggccggccggccgcagaagcgagagggcagcacacccaacgaggaacga

SEQ ID NO: 235419 - RNA, 81 nt, Homo sapiens
ggggaggggagggaaaggcccaggaaaaaggacacgcccaagcaagggagccaccaccagaagaggaagcggggggacggg

SEQ ID NO: 235420 - RNA, 77 nt, Homo sapiens
acagacgagaacagggggcagaaacacgagcacagcaagggcgcacgcacggaccgccggcaccggggagacaacgg

SEQ ID NO: 235421 - RNA, 79 nt, Homo sapiens
ccgcgcccaggaggagcaccggaaggggacccgaaagaaacgaggcacaccccaacacccgccaccccgaggcaggaac

SEQ ID NO: 235422 - RNA, 78 nt, Homo sapiens
aaagccccagagaagagaacgagaccccacacgccaccgaaaaggaaggaaaaccagagacccagacacgcgaaggaa

SEQ ID NO: 235423 - RNA, 80 nt, Homo sapiens
aaacagagagagccagaaacggaacaggagacgaacacacagaggacagagcgggccggcaggaagcgccagaagcagaa

SEQ ID NO: 235424 - RNA, 76 nt, Homo sapiens
acaccgggaaggggccagacgaacacaagccacacaacgccgagaaccccaaaagcagagaagaagaacaaaagga

SEQ ID NO: 235425 - RNA, 79 nt, Homo sapiens
cgcacgaccagcccgaacaagacaggaaggaaagagggcaaccgaagaccaacaagaaccgcaaggcgcccagaccgac

SEQ ID NO: 235426 - RNA, 73 nt, Homo sapiens
aggcggaaggcccacaccccacccaggggccaaggagacgaaggaagagcagccagagaggaggaccagaacc

SEQ ID NO: 235427 - RNA, 86 nt, Homo sapiens
gccaagccaaccgaaaaagccgacaaaaaaaagcaaaagcgcccaggagcaaagcagcccgaggaggcacgcaaaacaacaggggg

SEQ ID NO: 235428 - RNA, 68 nt, Homo sapiens
ccagcggccgcgcacccccggccggaggcaccagcacaggcggaaccacacgcacgagaacccacccc

SEQ ID NO: 235429 - RNA, 84 nt, Homo sapiens
ccgcccggccccccgccggccccgccagcagcacgggaggccgcccggacccaaggccagccagccccaggcaccagcggacag

SEQ ID NO: 235430 - RNA, 86 nt, Homo sapiens
cagcccagcagaagccaggacggagcccaggaccgacagcagaggagcgcaagaacggagaacaccgacggagaaaacaggagcgc

SEQ ID NO: 235431 - RNA, 59 nt, Homo sapiens
gaaaacgaagccgcacccccccccagcagggaacagccccggccgacaggaccggaaaa

SEQ ID NO: 235432 - RNA, 79 nt, Homo sapiens
accaaagaaaaaggagcaggcgccagcaaagagaagggaaccgaaccaagagagaccaggagcacacagagaaccagag

SEQ ID NO: 235433 - RNA, 77 nt, Homo sapiens
ccggaagcacgagggcggagagagacgcgccagaagacaaggagcagacggaacgagcaacgcaaccgaagcaaacc

SEQ ID NO: 235434 - RNA, 41 nt, Homo sapiens
ccaaaaaccccccccaaaaagacgcaagagccccgaagaaa

SEQ ID NO: 235435 - RNA, 70 nt, Homo sapiens
aacgaaaagcgccagaaagggaggcaggggcagaacccgggccagaaagcgagaacacacggcgcgaagc

SEQ ID NO: 235436 - RNA, 83 nt, Homo sapiens
ggccaggcgccagcagaaaccgaacgggaaggagacccgcccgcaaggggacgaaccgggagaggagccccaccggccaccag

SEQ ID NO: 235437 - RNA, 36 nt, Homo sapiens
ggaacgccggcaccccaagagggagccacaccaaag

SEQ ID NO: 235438 - RNA, 77 nt, Homo sapiens
gggcgccaaaacgcccccaacccagcgcaaaggaagaggaaggagacgggcccgcgcgcacggcgcgggacacaggg

SEQ ID NO: 235439 - RNA, 77 nt, Homo sapiens
ccccccaccccgcggagagcggcaacagcaacaaacggaaaccacgggcagggccggggaagcaaagaaacccacgg

SEQ ID NO: 235440 - RNA, 72 nt, Homo sapiens
gccgccggccgacggccggcgggcgggggccccgcgccgcggccgagcagcgggaaccagcacacgcccgcc

SEQ ID NO: 235441 - RNA, 75 nt, Homo sapiens
accacgaggggccgcaaagacgccgcacccaaggccaaacagcagggcagaaagaaagcaggaccagggggaggg

SEQ ID NO: 235442 - RNA, 38 nt, Homo sapiens
agcgccgacacgagaggagccccgcggggcagccagcc

SEQ ID NO: 235443 - RNA, 73 nt, Homo sapiens
agccagccagcccacacgcacacgagccagagaagaggaggaagaagaggggaaagagaggaacagaagagaa

SEQ ID NO: 235444 - RNA, 77 nt, Homo sapiens
aggcgaaacacggggggcagcagaagccaagaagagaagaaccagggaggccagcgacagagacccgcacgggaagg

SEQ ID NO: 235445 - RNA, 41 nt, Homo sapiens
gaggggagcagcgcgcaaggacggaccaggcaagccaccag

SEQ ID NO: 235446 - RNA, 72 nt, Homo sapiens
cagcaccaagaaagaccgggaacagcgacaaaggaaaacaagggcacagcgcagagagacgacggggggacc

SEQ ID NO: 235447 - RNA, 76 nt, Homo sapiens
ggacaagccccagccaagcaagcaggaaaacgcagagaaaaaacagaccaggggaacccagacgagacacagagca

SEQ ID NO: 235448 - RNA, 58 nt, Homo sapiens
cgaagagaccggaacaaaaaggcccaaagaggaaaaggccggacacaagagggcaaga

SEQ ID NO: 235449 - RNA, 53 nt, Homo sapiens
cgcaacaacccacaagcgacggaaaaccggcagcaggagaggccacgccaggg

SEQ ID NO: 235450 - RNA, 65 nt, Homo sapiens
cggccggagcagcagcccgagagagaagaagaaggaggccgcggccagaaacccaagaaaaagcg

SEQ ID NO: 235451 - RNA, 88 nt, Homo sapiens
cccaagccgaggaacagcgcgccaagaagcacaacaaaaagggccaaagaagagcagggcagggaagccccaacgggaaaggaaacgc

SEQ ID NO: 235452 - RNA, 58 nt, Homo sapiens
caaaagcaacaaagaggacgccagaagcagcgaaaaagaacacaaaacggcagaacca

SEQ ID NO: 235453 - RNA, 80 nt, Homo sapiens
gaacaggaagccgcgcaggagaccgggagcggcagaagacggcgacagccccgcgcagcaggaaagccagcccgacaccg

SEQ ID NO: 235454 - RNA, 68 nt, Homo sapiens
cagcagagaggaaaaacacaacccaagaaacgggaacgcgaagagacccccaggccaaagcacccaaa

SEQ ID NO: 235455 - RNA, 82 nt, Homo sapiens
gcacgcgggagaaggccaaggcccgggccagcggcgcccagaggccacgccaagcacaacaggacaggagcgcgggcaagca

SEQ ID NO: 235456 - RNA, 78 nt, Homo sapiens
gacaccccaacaaacaccagcgcggacgcccaagcagcccagaaccgcaccgcccaaaagcagcggaaagccgcaagc

SEQ ID NO: 235457 - RNA, 88 nt, Homo sapiens
gccagagcaggagaggagagagggcgccagcgaagaccaccggaaaaccaagcagaaggggggcagaaagaagaggaggacaacaagc

SEQ ID NO: 235458 - RNA, 79 nt, Homo sapiens
ccagcggccgggaccgaacaggcgacaagcagaccggaagaccgacggaagaccacaccccgagggagcccaggacacc

SEQ ID NO: 235459 - RNA, 122 nt, Homo sapiens
ggcaggcaggcagcagccccagacggaggggccagccagccagcagcgcaaggaaccaccagcacgcaggggcgcgagagaaaacggcgccccagcgcggccaaggagacagaggagccaag

SEQ ID NO: 235460 - RNA, 66 nt, Homo sapiens
caagcgacgccaggaccggcggccagaaaacaagaagcagggaagacagaaggaagcaaagacaga

SEQ ID NO: 235461 - RNA, 80 nt, Homo sapiens
gggcaccagggcgcgcccacccgcgcgaggagggcgggagccgagggcaagaccggcggcggaacagaacgacaggagaa

SEQ ID NO: 235462 - RNA, 66 nt, Homo sapiens
aaagcgccaaaggaggcaacaagggagaagcagcaacgggcaacaaggacccagacaaggcggggc

SEQ ID NO: 235463 - RNA, 77 nt, Homo sapiens
agcggcgcagccggagggggccggagagaggaagaagacacggaccgacggacgggaaacccagcgaaacgggaaga

SEQ ID NO: 235464 - RNA, 78 nt, Homo sapiens
caggacgacagggaggcgaagaccagaggacaagacaaagggagcaagacaagccaaagaggaaaagcaaagcccagg

SEQ ID NO: 235465 - RNA, 62 nt, Homo sapiens
cacggagaaacacaccgacagagaaagcaagaggagccaggagcacggggggaacaagaccg

SEQ ID NO: 235466 - RNA, 58 nt, Homo sapiens
aaaccgggacacgagggcggaagaggcaggagagcggaagccggcagaagaagaccca

SEQ ID NO: 235467 - RNA, 75 nt, Homo sapiens
ggcggggcaccggacaccggcggcagagcacaggaaggagagcccggacccacccaccggccaacaaacccaaag

SEQ ID NO: 235468 - RNA, 86 nt, Homo sapiens
ccacccccgcgcaccgcgccgccaggagcaccggacaggcaccggggggagaagcagaagcccgcacagagcagggaccccaaccg

SEQ ID NO: 235469 - RNA, 73 nt, Homo sapiens
aaacacggcggacccacaagccaccaaagccgcagacagacaaacggaagaggagaacggaagaggacaagag

SEQ ID NO: 235470 - RNA, 63 nt, Homo sapiens
caggaacagagggagaaagcggaaaggaccagaagaggggcagccaggccggcccaacagacc

SEQ ID NO: 235471 - RNA, 60 nt, Homo sapiens
caacaccagaacaccacgccggggaacgcccgcgccgccaggggaccccgggcccgggcg

SEQ ID NO: 235472 - RNA, 77 nt, Homo sapiens
ggacccaaaaaagcagaaggaagggccagcaggcagcaaagaaggacaggagaaacaggggccaaaaaaccaaagga

SEQ ID NO: 235473 - RNA, 77 nt, Homo sapiens
gcccgcgccccgccgcggggcgcgcggcgccggcggcgcgcgacccccgcgcaggcgggcaggaagaccagccaggg

SEQ ID NO: 235474 - RNA, 79 nt, Homo sapiens
cggccggccaagggggacgggagcggggccggcggccaccggaaccgcaaccgcggcagaggacggccaggagcgagag

SEQ ID NO: 235475 - RNA, 83 nt, Homo sapiens
cgaggcgccccagagcccagggcaggacaccgacaggaacagggaccacgggggcagaagccccagaggagcccgaaaccccc

SEQ ID NO: 235476 - RNA, 58 nt, Homo sapiens
ccggcccggacgcagccaggccacaggcagcgaacgggaaaggaggccacaaaccccc

SEQ ID NO: 235477 - RNA, 60 nt, Homo sapiens
cccaaacagccaggaggaagaagaagcagcacagaggggcggagaacggaaaagcaccag

SEQ ID NO: 235478 - RNA, 97 nt, Homo sapiens
cagcagccagcaacaaaaagcaaggccaccagccaaaagaagaaaacccgaaggccagaaaggggagcaagaagaaagagcagggaggagggagcga

SEQ ID NO: 235479 - RNA, 68 nt, Homo sapiens
acgccccccggcccagggaccccgcgcagaggacaaggcacgaggcgcggcgaccaccacagcagagc

SEQ ID NO: 235480 - RNA, 59 nt, Homo sapiens
gaggcaccacaacacgaacaagacaacacacacgcaccagggcagaaaaagggagaaag

SEQ ID NO: 235481 - RNA, 66 nt, Homo sapiens
gggcagggagagaagggacagacaacgaagagaagagccgcacgggaaacacagcaaagccacccc

SEQ ID NO: 235482 - RNA, 82 nt, Homo sapiens
gcacagggcgcagcccaggagcccaaggcggcccggcgggcgacggacggccggacaggaacaagcagaaagcacgaacaac

SEQ ID NO: 235483 - RNA, 78 nt, Homo sapiens
cggaaggagcagaacaaacggccaagaagggccaccccacagacgaaccccgccagcagggaaccacgaacaacagag

SEQ ID NO: 235484 - RNA, 69 nt, Homo sapiens
cagccaacgcccgcgcggggccgcgcagggcggccccggcgggggcgcgggcgccacaggagccgcaga

SEQ ID NO: 235485 - RNA, 86 nt, Homo sapiens
cggcgcggggccgggccgggagccccagggcagccgccccgccgagcgcaggagcagggccgccccgaggagagcgacgcccgggc

SEQ ID NO: 235486 - RNA, 81 nt, Homo sapiens
acgggccgacaggggacagaccccaaccgaccgccacaccccagccacagcaggcagaggccggcggcccgcagaccccag

SEQ ID NO: 235487 - RNA, 70 nt, Homo sapiens
aaaacggaaaaacagaagaagaagagagggccgaaagaaaaaagagggaaaaaggccaagagcaaaagcc

SEQ ID NO: 235488 - RNA, 79 nt, Homo sapiens
agaaggcacagaaaagccaccgagggcacagcccgggaaaaggaaaaggcccaggcagggcgggcaccaggagcgaagc

SEQ ID NO: 235489 - RNA, 73 nt, Homo sapiens
aaccgaaaggaaagagaggcacgaaaaaacaagacacggaagagaacacgaggaaaagaacaagccaaaagaa

SEQ ID NO: 235490 - RNA, 53 nt, Homo sapiens
gccagggcagcaccgggcagcgagacgaaaaacccccaaaaggaggaaacaca

SEQ ID NO: 235491 - RNA, 78 nt, Homo sapiens
gggaaacagggccagagaggcccagggcgaaggaccccaacagcggaaaccacagagagccaccggcccaggcggaag

SEQ ID NO: 235492 - RNA, 57 nt, Homo sapiens
gacgggcaaccaacaagaaacagacacaccgcacagcagaagcaacccggaccgacg

SEQ ID NO: 235493 - RNA, 68 nt, Homo sapiens
ggcggcggcggagacgcgggcccgagcgggccgcgagagcagagccgggcaggccacgcagaacaaga

SEQ ID NO: 235494 - RNA, 60 nt, Homo sapiens
caacgcgcagggcagcggcccccgcccgcagcacccagaaaaccccacaccagcgcacgc

SEQ ID NO: 235495 - RNA, 64 nt, Homo sapiens
gcgaaaaggccgcaagccaagaaaaggaacaccagggagcacccaaccgagaacaccaaccaca

SEQ ID NO: 235496 - RNA, 72 nt, Homo sapiens
aaaccacgcgccacacaaagagccgcgggggcgggacacaaggacaccagacacagcaggagccaagccccc

SEQ ID NO: 235497 - RNA, 80 nt, Homo sapiens
aaccaacaaaaccagcaacgcggggcgaagcacacccccaggcacggaaagggcaagaagaggcagagcggaggagccgg

SEQ ID NO: 235498 - RNA, 64 nt, Homo sapiens
ggagggcggggcggcgggcccgcgagaagcaagcggaacccgagcaagaggagccaggagcacg

SEQ ID NO: 235499 - RNA, 53 nt, Homo sapiens
ggccggggccaacgagccaacgccaggcgccgcccacaggcgggggcgaaaaa

SEQ ID NO: 235500 - RNA, 69 nt, Homo sapiens
gcaggcggcgcggggaggcgcccagaggcaaaaggccaaaacggaagaacccccgcaacagccggaaga

SEQ ID NO: 235501 - RNA, 73 nt, Homo sapiens
gaaaagaaaaaagaagaaaaacgaaggaaaacggccaagccagcagacggggccagcaagcacaccaagagca

SEQ ID NO: 235502 - RNA, 54 nt, Homo sapiens
acaagacacgggacagagcgacagaggcacacgagggagagaccaccgaaaacc

SEQ ID NO: 235503 - RNA, 69 nt, Homo sapiens
cggacggggaacaagagacccggcaacccgccgcacaacaagcgcggaccgcggaccagcagacaacag

SEQ ID NO: 235504 - RNA, 83 nt, Homo sapiens
ccacccccgaggaaggacagcaaagacagcaccccaagccggaccagacccgaagcgaagcacgccaccgcgaagggcgcccc

SEQ ID NO: 235505 - RNA, 37 nt, Homo sapiens
cagaaccaggacccaaaaagcaccgggaggaaagaga

SEQ ID NO: 235506 - RNA, 89 nt, Homo sapiens
agaggagaggaggcgcgggcggagcggaaagaggaggagaggggaggaggcgaagaaggaaggcccgaagccacagagcggaaggagaa

SEQ ID NO: 235507 - RNA, 83 nt, Homo sapiens
ccgaggccggggaccaggacagcgcgaggcgagggcagagccgcggggcaagacaccggaaacaggcacagaacagaaggaaa

SEQ ID NO: 235508 - RNA, 83 nt, Homo sapiens
ccgaacggcgcaggggccgcgcggcaagacggcgaagacaaacacccacagagggccacacaggaccaggcggacaagacggg

SEQ ID NO: 235509 - RNA, 72 nt, Homo sapiens
agcgccgcccggagcaagaaaaccaaccagcaaaagggaaaaccgaaaagaccaaaaaagcgcagaaggaaa

SEQ ID NO: 235510 - RNA, 101 nt, Homo sapiens
cgaacccagggggaggggagaggccaccaggaagcccggaagacggggggccaggccagcacccgacagacgggacacagggcaggccacccaccgagcac

SEQ ID NO: 235511 - RNA, 72 nt, Homo sapiens
cgaagaagcacgaaagccccacccgccgcagcaagcagagagccacaagcccgcaccaagcccagaccagga

SEQ ID NO: 235512 - RNA, 78 nt, Homo sapiens
acagcgcgcggacccaaagacagcagagggagaccgaaggaccaccggcagcgggaaaaaacgaccaagacaaacaaa

SEQ ID NO: 235513 - RNA, 66 nt, Homo sapiens
caccaccaacaaaccggccagagggagccgggaaaacgggccaagggccacacacagagggagccg

SEQ ID NO: 235514 - RNA, 45 nt, Homo sapiens
cccgccccgccgggaggaccgcgagggaggcccagcccggggcgc

SEQ ID NO: 235515 - RNA, 61 nt, Homo sapiens
ccccgcacagcagcccccccgagcacgcacacacaggcacaaaagaagccaacaccaggga

SEQ ID NO: 235516 - RNA, 70 nt, Homo sapiens
agaaacaacgaaaagaacagggggaaaccacaccacccgccacagacagggaggaggacagccgaaaaca

SEQ ID NO: 235517 - RNA, 72 nt, Homo sapiens
cgcaagaacgcagcagcaggcagcaaccggcccaagacacggaaccagaggcagcagcccaaccccgaggac

SEQ ID NO: 235518 - RNA, 53 nt, Homo sapiens
cagcccgcagcacgaccagcaggaacgggcggagaacggaaaagcaccaggaa

SEQ ID NO: 235519 - RNA, 75 nt, Homo sapiens
ggaagcgaagaaacagaaaaagacgcaagaaggacaggggacaaacggagccggagagcgcgcaagcaagaggag

SEQ ID NO: 235520 - RNA, 57 nt, Homo sapiens
gacaaacaggaccgccaaacccaaaccgggagcgaagaacagagccgcccaaagaga

SEQ ID NO: 235521 - RNA, 65 nt, Homo sapiens
cacacgacacccccgggaccgcggagagaagcagcggacagcagaggcaagaagcaagcaaccag

SEQ ID NO: 235522 - RNA, 81 nt, Homo sapiens
ggaccacgcaggcaacccccagcaggccagaggcacagcccccagccggcgcgaccggagagagcgaccaagccgggaacc

SEQ ID NO: 235523 - RNA, 75 nt, Homo sapiens
ccaaaagaacccaaagacggcagccggcaggagagcgacaaaccaaggagggagccacggaaagacaaaagaaga

SEQ ID NO: 235524 - RNA, 55 nt, Homo sapiens
caacaaaagagccacccaagcagcaggcgcaaaaacgaacccacaaccgaacgac

SEQ ID NO: 235525 - RNA, 81 nt, Homo sapiens
gccccagcgcccacgcaccccaccggcgcgcgcggcggcccgcgcacagcgccagaccaaaacgaagaagacgagccaaac

SEQ ID NO: 235526 - RNA, 81 nt, Homo sapiens
caccagagccggaccaggagaacggcggcgggcccagcacaaaacacagacaaagaacgcacgcagaaccagccgagccgc

SEQ ID NO: 235527 - RNA, 84 nt, Homo sapiens
ccgcggagcaaaaaaagagcccgcaagaagaacagagacagcagccaaacccccagaagagcaagaccaggccaggacaaacgc

SEQ ID NO: 235528 - RNA, 77 nt, Homo sapiens
aaccgggaaagccaccgaaaaggggccaccacagagcccgcagggacacagcagaacaagcaacccccggcacgaaa

SEQ ID NO: 235529 - RNA, 75 nt, Homo sapiens
cggggaggccggccacgccccgcacgaacaccagaagcagccgaaacgaaccaagaaccgaaggaaccaagagga

SEQ ID NO: 235530 - RNA, 66 nt, Homo sapiens
acccgagccagacacagagcaggaacgcagccggggacaccaaacaggcgcgacaccagaggcacc

SEQ ID NO: 235531 - RNA, 70 nt, Homo sapiens
gccccccagaccgggacagaaggcaaggaacagagacagacccgggggcccccaaggagagggaagaagc

SEQ ID NO: 235532 - RNA, 83 nt, Homo sapiens
cgcgccgggcaccgaggaccagccaagacagggaccaaaagagcgcccgacacagcagggcgaggaccaccagacgcgccggg

SEQ ID NO: 235533 - RNA, 68 nt, Homo sapiens
gacaagaccgcagcagccacaggaacgcaagagccccaacggaaccaccaggccacggagggagcagg

SEQ ID NO: 235534 - RNA, 69 nt, Homo sapiens
aacgggaaacgcacagcccccggacagcacgagacaaggcacacaaagggaccccagagcaggccccga

SEQ ID NO: 235535 - RNA, 73 nt, Homo sapiens
cggcccgaggagcgggccgccgcaggccgggcaccccagcagccccagcagccacggacggcacagcccgacc

SEQ ID NO: 235536 - RNA, 72 nt, Homo sapiens
aggaacggggggagagaacccaaccagggggaaacacagaacgcagggacagggacaagcgcacagcggaga

SEQ ID NO: 235537 - RNA, 51 nt, Homo sapiens
ccaggcgccaagcccgcccccgcggcgggccacaccaggcccccacagacc

SEQ ID NO: 235538 - RNA, 77 nt, Homo sapiens
cgcaggcccacgacaccagccgcccggcagcagagaaccccccgcaggccggaccgcaccagcaggggcccgaccag

SEQ ID NO: 235539 - RNA, 64 nt, Homo sapiens
ggaccgcagcgccccgccccaggaaagccaggccagaagaaggaaggccggggaggggacagga

SEQ ID NO: 235540 - RNA, 79 nt, Homo sapiens
caccaaaaacaaaacgaaccaggacggcaaaagagacggaggagcaaagaagaagccccagagggaccgccccacacga

SEQ ID NO: 235541 - RNA, 82 nt, Homo sapiens
gcccccgacggccgcagaacgggaccagccgcggaggagccaggagggggaagcacgaagagcccacggaagcaagagcacg

SEQ ID NO: 235542 - RNA, 65 nt, Homo sapiens
aaacgacaacaaggacggagcgcagaggagagcgagccgagaacgaggcgagaaagcggagaccg

SEQ ID NO: 235543 - RNA, 66 nt, Homo sapiens
accagcaccaacgggacccccccggggcgagaagggccccgcagaggcggaaaggacaaagagaaa

SEQ ID NO: 235544 - RNA, 54 nt, Homo sapiens
cgaaaccgacacggccagccccccgccggcggggggccggcggcacccacgcgg

SEQ ID NO: 235545 - RNA, 83 nt, Homo sapiens
ccgggaccgagggggcggcggcggggggacgcggaagagacagcagaacaagagccaggaccggacaggaagggagcccgggc

SEQ ID NO: 235546 - RNA, 72 nt, Homo sapiens
gagaacagaaacggcaaagggccggggacaccaggcaaccagagaagccgaacgccagcaagaagccgaaac

SEQ ID NO: 235547 - RNA, 83 nt, Homo sapiens
ggccggggaggaggaggaagaggaagaggaggagacccacggccggacagcccgggagacgagccccggagccccaacgaaag

SEQ ID NO: 235548 - RNA, 75 nt, Homo sapiens
ccggacaccgagggcccccaaaagagaacacaaggaacgaaaggaagggaagaagcagaaccaagacaaaagaag

SEQ ID NO: 235549 - RNA, 73 nt, Homo sapiens
ggcgccaggccgcgccgacgcacccagcacgggccagaacccaaggagaaaggcggcgggaagcaggggcgaa

SEQ ID NO: 235550 - RNA, 75 nt, Homo sapiens
aacacgccagaggaaaggccagaccaagagaacagagaagagccaaacaaccaagccacgggccccgccagcaga

SEQ ID NO: 235551 - RNA, 75 nt, Homo sapiens
cagaagggcccaaagccagggaccagaagcgagccccaagccacgacaagacagccggcggagcccccccccccc

SEQ ID NO: 235552 - RNA, 74 nt, Homo sapiens
cagcaggaggcggaaaaggagagagagccacacaaagaacccccacaaaacagaggcccacgcggaccggcagc

SEQ ID NO: 235553 - RNA, 55 nt, Homo sapiens
cagcgcgagccaggacccgacaccaagggaacccaaggggaagcgagcgggccca

SEQ ID NO: 235554 - RNA, 68 nt, Homo sapiens
caacaacgccagccagcagcaaggaaggcaggggagaagcagaccgcaccaggcgggaccccgaaaaa

SEQ ID NO: 235555 - RNA, 83 nt, Homo sapiens
gagccgggagccgccgaagcggcgacagcggccggggcgcaggcgcccggcggaaggcaggagcaaaggagcagcaaaagggg

SEQ ID NO: 235556 - RNA, 58 nt, Homo sapiens
accgcggaagcgaacaagaggaggccagcgaagacggaggaccacaccggaagccagc

SEQ ID NO: 235557 - RNA, 77 nt, Homo sapiens
aaacagaaacacaagaagcagccagaaccacaccgcaggccaccgacgacacagaaaaagccgccacgacgacgcgg

SEQ ID NO: 235558 - RNA, 82 nt, Homo sapiens
cacggaccccgggccacgccccagcccgacaaaaggagacccaacaccccggccagacgggccaccaggccggcgccccacg

SEQ ID NO: 235559 - RNA, 49 nt, Homo sapiens
gcgagagaacgaacagggagaaaccagaggcaagcgacgggaaggacca

SEQ ID NO: 235560 - RNA, 55 nt, Homo sapiens
gacaaaagggccaaagaagggagagaggagccagagaccaagagcccagagaaca

SEQ ID NO: 235561 - RNA, 67 nt, Homo sapiens
agaggacacgaggcggcgggcggagacaggaccgcggcgagcaaggggagccgccaccaaaagcaga

SEQ ID NO: 235562 - RNA, 51 nt, Homo sapiens
accaaccccagcggggaaaacaaaggaggaagacgaacaggacgcgacccc

SEQ ID NO: 235563 - RNA, 80 nt, Homo sapiens
agggaagcgcagaaagcaggcgaacccgcggcgcaaaacggaccaagaacgcccagcccgcgggcaccggcagaaaggag

SEQ ID NO: 235564 - RNA, 62 nt, Homo sapiens
ggaggcagcacgcaaaccaccaacgggcgccacgcaaggaagcacaagccagcagacgacaa

SEQ ID NO: 235565 - RNA, 76 nt, Homo sapiens
ggagaggagggccaggagaaaggggaacagagagacgggaaagaagcgaaaaacagaaagaaccagaaacgggaag

SEQ ID NO: 235566 - RNA, 80 nt, Homo sapiens
cacccgaggccggggcaccggcccaccacggccacccacagaaagaagcagagggccagacaggccgcaccaacaagaag

SEQ ID NO: 235567 - RNA, 67 nt, Homo sapiens
agccagacaacagaggaggcacccgggaagcggaaaagcagccagaggaaggaaaacgcgaagaaca

SEQ ID NO: 235568 - RNA, 63 nt, Homo sapiens
gggaagcgcaacccgacccggaggcgcgaggggcccgggggcaggcaagaagcaagcaaccag

SEQ ID NO: 235569 - RNA, 73 nt, Homo sapiens
aggagccccgccaggaggcaagagccccggaccgacccacggcggagcacgccccggcccagcaggacggcag

SEQ ID NO: 235570 - RNA, 89 nt, Homo sapiens
agccgccgagccggacggccgcgaagaggcgggccgggccagggagcggagagcagagaggcagagcaagacgccggacacccacaagg

SEQ ID NO: 235571 - RNA, 81 nt, Homo sapiens
cgcgccgggggccggccgcgccggccggccgggaccagcccccaggcccaggaagcccacccagccccgccacgcagagcc

SEQ ID NO: 235572 - RNA, 89 nt, Homo sapiens
aggcccgggacccaggaaccagcccaggacacgcgcgccccgagccgggaggcagcgaagccaggcggccggcaggagagggaaagagg

SEQ ID NO: 235573 - RNA, 78 nt, Homo sapiens
gacaaccaggggaccagagaggacggcaccagccaggagccgggggccagagacgccaggaagacgaaaggcacgagc

SEQ ID NO: 235574 - RNA, 83 nt, Homo sapiens
gacgagaagggaaggaaacagcaagcgaagccgaaaaagcgcccgagacgggcccgccgaaagggccccgcccaacacccccc

SEQ ID NO: 235575 - RNA, 70 nt, Homo sapiens
aaaaggccaccccggacagaccgggcaccccgcgacgaaaggaaaccgacgaaaagaagaaaaggaacag

SEQ ID NO: 235576 - RNA, 74 nt, Homo sapiens
gcgcccaggccagcgccccaggccaagagggacccacccggcggaaacccaccagagaaggcgcggccacccag

SEQ ID NO: 235577 - RNA, 82 nt, Homo sapiens
gggcaggaccagggagagagacgaccacaaaaagccggacgaaggaagagacccgaagcgaaaccccgaccgacacccaagg

SEQ ID NO: 235578 - RNA, 74 nt, Homo sapiens
gcccccaggagaaacgaggagcgcggccaccccccggaagcacacagagggagaaccaccaaacgagaaagaaa

SEQ ID NO: 235579 - RNA, 80 nt, Homo sapiens
cagccgcgacacacaggaccagcaagcagacagggcccagccagacagagccagcaaagaaccagggaagaaagagaacc

SEQ ID NO: 235580 - RNA, 63 nt, Homo sapiens
gccagaccagaaaggccagacaagaggaagaccagccgcaaaccaagccacgcgcgcccccgg

SEQ ID NO: 235581 - RNA, 71 nt, Homo sapiens
ggggaccccggagcccagaagacagagggcgagagaaggacggagaagcgaaagccagaccggcaagagcg

SEQ ID NO: 235582 - RNA, 84 nt, Homo sapiens
ccgaaacacaggcacgaggccccagaacggccacgggaggaccccaagcccccagagccaggcaccagcagcgccggcagcaag

SEQ ID NO: 235583 - RNA, 74 nt, Homo sapiens
cccgggcggcgcacgccgcggacagccagccaacccaaccaaaaacaaacacccaacaagcgaagcagccaccc

SEQ ID NO: 235584 - RNA, 84 nt, Homo sapiens
accacgggcagcggaaaaaagccaccgaagaaggccggggcagaaagaaaaaagagggcccggggccgaggcaggaggacacag

SEQ ID NO: 235585 - RNA, 81 nt, Homo sapiens
agcccggcggccacgcccgccggaccgcgcccaggccccccagggcggagaacggaaaagcaccaggaagcagagaggacc

SEQ ID NO: 235586 - RNA, 43 nt, Homo sapiens
acaggcagaacacagggcaggagccgaggccagagcagaaacc

SEQ ID NO: 235587 - RNA, 80 nt, Homo sapiens
gccccgcggcgcaggaggcggggagcgcagagcgggcgagcgcgacagaaaaagcacagaaacgcggaacagagaggaag

SEQ ID NO: 235588 - RNA, 71 nt, Homo sapiens
gcacagcggcgggcgggcaaggcgaggaaaggcaagggcagaaaagaggggaaaaggccagccgcacgcag

SEQ ID NO: 235589 - RNA, 75 nt, Homo sapiens
gggcacacggcacagaccaggcggagcgccagcagcgggacccacgggagcgggacgggaggcgccgcgcagagc

SEQ ID NO: 235590 - RNA, 80 nt, Homo sapiens
cagcggagacggaacgggagaagaggcaaagaaacaccaaaagccccagggccacaaaagaagacagggaagccgaagaa

SEQ ID NO: 235591 - RNA, 52 nt, Homo sapiens
aaaccagaagcggagcgggggcccgagaagccgacggggaagagccgcagga

SEQ ID NO: 235592 - RNA, 107 nt, Homo sapiens
ggcgcagccgcgggcagaggcgggccgccgagcggacccggaccgggggggcgggcacaagggaagacagcgcccgggacccaacggaagaggcccaagaagccccg

SEQ ID NO: 235593 - RNA, 77 nt, Homo sapiens
aagaccaagagaggcccaacgaagacgaggaaccaggaaggaccaacagcggcaaaagagcagcacgggccaccgag

SEQ ID NO: 235594 - RNA, 73 nt, Homo sapiens
gaagcagggaaaacaggaaggaaccagccaaaaagcaaggggaggcaggaaaaagacacaagacagcaggacc

SEQ ID NO: 235595 - RNA, 79 nt, Homo sapiens
caagaaccacacccaggcacaggcaaaggaaaccagcgagcacacaagaaaagaacagaacagccaggccccaagaaag

SEQ ID NO: 235596 - RNA, 69 nt, Homo sapiens
gccgccgcgcccgcccgacccgccaccgccaggccaggaggcccacaagcggcacccaccaagacaaac

SEQ ID NO: 235597 - RNA, 71 nt, Homo sapiens
aacgggcgcgccggcgccggaccccagcaaaggggcggcaccggcccacagccaccggcccaaaccagcac

SEQ ID NO: 235598 - RNA, 57 nt, Homo sapiens
acccaacagggccaccacggaacaagcacaaggaacgggcgcaccacgccaccccgc

SEQ ID NO: 235599 - RNA, 62 nt, Homo sapiens
caggcccaccacaaagagacagagaccagggcccgggcccgcggcacgggaggccgaggggg

SEQ ID NO: 235600 - RNA, 87 nt, Homo sapiens
gcaggaagagaagaaccaggccgggccagacacgacaccaccaccccaccccgggaccgaaggagaagaaggagaaggggaggagaa

SEQ ID NO: 235601 - RNA, 74 nt, Homo sapiens
aacacgccagaaaggcggggcaccgcgcagaagagacaacacccgcagggggcgaggaagagacaggcggggga

SEQ ID NO: 235602 - RNA, 74 nt, Homo sapiens
cccacagacacagcaacgggccagaaaccagggaaaagcacagggccaggaagcagagggacagccaggccaga

SEQ ID NO: 235603 - RNA, 74 nt, Homo sapiens
aaaaagccgaaagggcggagaaaagaaagaagcagcgacacaggagagaacgagcgggagagcacgacaacacg

SEQ ID NO: 235604 - RNA, 91 nt, Homo sapiens
ccgccggcgcggaaggacgaggcgaggcgagaaacgagcgccgcgggcaaccagaaagcacagacccagccgcccgccgcccagaccccag

SEQ ID NO: 235605 - RNA, 74 nt, Homo sapiens
acgccaaaaaagacacacgcccaagagcgggcaacagagagcaggaaagaagaacagcgggagaggcaggccaa

SEQ ID NO: 235606 - RNA, 66 nt, Homo sapiens
cgcagaaaccaaaaaagcaggaccgcagcaaccgacaggagcgaaacgcagggaagccaagacaaa

SEQ ID NO: 235607 - RNA, 79 nt, Homo sapiens
cagcagagaaacaaggggggggagcgacagaaaagcagcacaacccccggagaaccgaagggacacagcagcggccccc

SEQ ID NO: 235608 - RNA, 75 nt, Homo sapiens
aagccgacccaacccaagggccaaaggcagagacccgcaccgccagaacacaaagcaggcaggaccaaccgcaaa

SEQ ID NO: 235609 - RNA, 71 nt, Homo sapiens
ccagaagagacccgccccccagaacaacacacaccagaaacagcgcaccacccgcagaggcgcggccagcg

SEQ ID NO: 235610 - RNA, 80 nt, Homo sapiens
accccccacgccccaccacaacaaacgaggaaccagcacaagacaacacccggaacccgccaaagggcggaaggcgcagc

SEQ ID NO: 235611 - RNA, 77 nt, Homo sapiens
ggggacgcccaacgaagagaccaccgcccgagcagacggagccgagccacgcggagcgccgggggcccagggacggc

SEQ ID NO: 235612 - RNA, 73 nt, Homo sapiens
gacccaaggacggagagaagggcacaagaaccaagcaacagaagccacaaagcgcaaccaacgaagcaaccag

SEQ ID NO: 235613 - RNA, 54 nt, Homo sapiens
gacagagcaacgcaccccacagcaaggccccgagccccggccccaaagacccaa

SEQ ID NO: 235614 - RNA, 69 nt, Homo sapiens
aaaggaaacaacaggcccggagagagagaagagagaacaaaccggggcgccaacccgaaagcagcgaga

SEQ ID NO: 235615 - RNA, 64 nt, Homo sapiens
aaaaaggacaccagcaagcgcaagaggaggcaacccccacccggacacgcgcaagccgagcaca

SEQ ID NO: 235616 - RNA, 80 nt, Homo sapiens
caaagaagaaagcccacagagacacaaccggagcccagagccacgcaaagcagcggacaaaagcaagagcgcaacagaaa

SEQ ID NO: 235617 - RNA, 72 nt, Homo sapiens
ccccccacggccgccccagagggacagccaacggagcgaagcagagccaggagcccccaggacaggcacacc

SEQ ID NO: 235618 - RNA, 64 nt, Homo sapiens
ggggcccacacccccggcacccccacagggaacagagcgcggccgcaccaagcgaaacggaacc

SEQ ID NO: 235619 - RNA, 80 nt, Homo sapiens
ccggacggccgggcgcggagaccccgcagggacagcggggaaagaacaggggggaaaagaaagagcagacacagaacagg

SEQ ID NO: 235620 - RNA, 69 nt, Homo sapiens
ggggcggaaacgcggggacgccacaaggaagcaggagacaccaaaggaaaagacaacacaccaagaaac

SEQ ID NO: 235621 - RNA, 83 nt, Homo sapiens
accgacgccggcagaacacgcgcgggaccccgggcacggcgcgcgggaggccagggcaggacagcagcccgcaacaggccggc

SEQ ID NO: 235622 - RNA, 83 nt, Homo sapiens
ggcagcgccggcggcgcggcgagagagcggcgacagaggggagcgagcggaagccgcgcacaaaagaggagaaaccccaaaac

SEQ ID NO: 235623 - RNA, 59 nt, Homo sapiens
aacccaaaagccgacaaccccagaaacagaaagaaggcggaagcaaaaggcccaagggg

SEQ ID NO: 235624 - RNA, 69 nt, Homo sapiens
agcacccggccgacacacggacagagacaaagcaggaggacacaagaagggaggaaaggcggacccagg

SEQ ID NO: 235625 - RNA, 84 nt, Homo sapiens
cgaacaggaaaaaaaagaaaacaagcgcacgaaacacgaaaggcaggcaaaagaaggaccccagcaggaaaagcaaagcaagag

SEQ ID NO: 235626 - RNA, 58 nt, Homo sapiens
ggacaaaggagaagaaggaaggggaagaggcaggccagcccgcgggggacaccgagca

SEQ ID NO: 235627 - RNA, 77 nt, Homo sapiens
caacacgcgggggacgcacaaccagaccgggagcacagcgaaggaacaagaaaaaaagcagagcaggggggcaaaca

SEQ ID NO: 235628 - RNA, 79 nt, Homo sapiens
ccgccggagcagcggggacaggaaggggcagacaagcacgccgcccagacaaccaaacggcgaggaaagagaggagccc

SEQ ID NO: 235629 - RNA, 83 nt, Homo sapiens
aaggcgggaagccgaaggcagccacagcaaaggcagaggaggaagaaagccgggagacggggcgcaccgagcggcgagcgcgg

SEQ ID NO: 235630 - RNA, 78 nt, Homo sapiens
ccaaccgcaccgggacgcgccggcaaccccaggaaccacagagggaccggagcggggccccgaggcgacggaaggccg

SEQ ID NO: 235631 - RNA, 61 nt, Homo sapiens
agagacgaaaaacccgaaagcgagaggcggggacagcggcgaaacccaagccaaacgaagg

SEQ ID NO: 235632 - RNA, 83 nt, Homo sapiens
aggggggcgccggacgcggccgccaccagggcccgcccccgcgaggccggccaggagcagggcacacagggaccaagaagccc

SEQ ID NO: 235633 - RNA, 76 nt, Homo sapiens
gaagagaagagcagcagcgggaaagggagcagcaccggccacacccacagcacgaccggaacccagcgaccgacgc

SEQ ID NO: 235634 - RNA, 72 nt, Homo sapiens
gaaccagcaggccgggcaggaccccgacgacacgaagcaagcaggcagcgacgcggcagggggcccagaagc

SEQ ID NO: 235635 - RNA, 72 nt, Homo sapiens
aggggggaaaaggcgggcacaggccgaccgcgcggccaggcgaaccagccgaaaaaggagaaaccaaaagga

SEQ ID NO: 235636 - RNA, 72 nt, Homo sapiens
ggccaggaagcggagcaggaaggacaaacaaagggaaaaagagccgaggacagaagccgacgaaacacagga

SEQ ID NO: 235637 - RNA, 62 nt, Homo sapiens
aagagcaaagaagaaccagggcacaccagccacagagaacccagggcaaccggagacgccgg

SEQ ID NO: 235638 - RNA, 70 nt, Homo sapiens
gggggacagggggacggacacgcccagccccgggcacggaaagaacaaagaaccacggacagggcaggac

SEQ ID NO: 235639 - RNA, 97 nt, Homo sapiens
cgggcgcgcccaggggccagccaccagcgccaggcacaagcacgggcacggaaggaggagggacaagcggcgcgacggcccacgagcgcggcgccag

SEQ ID NO: 235640 - RNA, 77 nt, Homo sapiens
gaggaaagcgaaagggaggacagaagcgcgcccaacaccccaacggggcagagagaggccggcagagaacagagggg

SEQ ID NO: 235641 - RNA, 82 nt, Homo sapiens
gccacgacagaaaagcaggaaacgcaaggagggaaggagaacgaccgccagaagagaagaggaaggagaaaaacaaaaaaga

SEQ ID NO: 235642 - RNA, 77 nt, Homo sapiens
ccacggcccacaggacagcaagccacagaaggaaaagaggagaggcaggaccggaaaacagcaaggagccaaaaaaa

SEQ ID NO: 235643 - RNA, 75 nt, Homo sapiens
acgaaggcaggaccacacggacgcgccagcaagccggccaaacaacaagcaggcagggccccagcaagaaggcag

SEQ ID NO: 235644 - RNA, 52 nt, Homo sapiens
cgcaccgcacaacaagaggccggcggggcgacagaacaagagaagcagggag

SEQ ID NO: 235645 - RNA, 75 nt, Homo sapiens
agcaggaaacacccaccccgcgaggcccccgggcccgggaaaacacacggccagaaagccacacacgaggagggg

SEQ ID NO: 235646 - RNA, 92 nt, Homo sapiens
ccgcccggccaaggcccgcggaacagcggaggacgaagagcgggacccgagcccgaaaaacaaccaccagcgagcaaaaaggcaaagaccaa

SEQ ID NO: 235647 - RNA, 58 nt, Homo sapiens
gcaaaccgcccgccaccgaggaaggccccagaagaccgccggacccaagccagaagcc

SEQ ID NO: 235648 - RNA, 74 nt, Homo sapiens
gcccaagaaaacaacagaaaggggcaccagggggaaaaacacaaaggcaccaagcaaagcgccaaggagccagg

SEQ ID NO: 235649 - RNA, 82 nt, Homo sapiens
cgcccggggggcgagcccgccgcacccgggccgcgccggcacagggagacgcgcacggaccggaaccagaacaagacgaaag

SEQ ID NO: 235650 - RNA, 68 nt, Homo sapiens
aaaacgggcccccacacaagaagaaacaccgaaaaagaggacacaggaaacgcacagaagaaacaaca

SEQ ID NO: 235651 - RNA, 39 nt, Homo sapiens
ccccacagaaagggcggaaacaggacacaaggagggcca

SEQ ID NO: 235652 - RNA, 65 nt, Homo sapiens
gacgcgacccggggcccaggagcccccgccacgcccggggaagggccgcccccggaggagcagcc

SEQ ID NO: 235653 - RNA, 79 nt, Homo sapiens
gcagaggaaggggaggcacgcagagccgacgaaaccccaggaggagacaaggagacaagggcccggccaggccccaccg

SEQ ID NO: 235654 - RNA, 90 nt, Homo sapiens
gggagaggcccaggcgagggaaggagcacccaggagcgaaggagacgcacaggacacaagcagaagcggaggagcggcgcgcgcagacgc

SEQ ID NO: 235655 - RNA, 69 nt, Homo sapiens
gggaccgcggaaccccggccggcacaaggaaccagcccaagaagcaggccgaggacgaagacgacgggg

SEQ ID NO: 235656 - RNA, 72 nt, Homo sapiens
ccggaccagcaaaacaggagaccacaaccagagagaagaggaaagacccaaaaaagcgaggaagagcgacag

SEQ ID NO: 235657 - RNA, 44 nt, Homo sapiens
gaacgcccacggccggcagcgcccaggaggccaggggggggcgc

SEQ ID NO: 235658 - RNA, 84 nt, Homo sapiens
agacccagcaacgggcagcgggcgcaggaccccgccccacgcccagggagcacgagacagcgccggccccaacgagggagacac

SEQ ID NO: 235659 - RNA, 63 nt, Homo sapiens
accccgcccggggagaagcacagccacaggaagaagacggcacgggacccccagcacaggcag

SEQ ID NO: 235660 - RNA, 49 nt, Homo sapiens
ccgaagaaacgacgcgcacgagcaacccaccgagacaaccaagcaaggg

SEQ ID NO: 235661 - RNA, 76 nt, Homo sapiens
ccagaacgagaaggaaaggaaagacaggcacgccggacaaaacaagaggaacagagaaaggagaggagccaacgaa

SEQ ID NO: 235662 - RNA, 65 nt, Homo sapiens
cggcggcacccgcacccggggacaagcgcgggaacggcgcggaaggaaaaacggcgcagaacaac

SEQ ID NO: 235663 - RNA, 73 nt, Homo sapiens
ccagaccacggacggaagacaaaagaggcggaaccaaaaagcgcacacggaggggaccagagaaacgcaccag

SEQ ID NO: 235664 - RNA, 104 nt, Homo sapiens
aggaaggacccgacggaccagacagaaacgccccgacggagagcggccccccaggccgggccaaacggcagcggcaaaacaaccccagccccccaaagccggaa

SEQ ID NO: 235665 - RNA, 78 nt, Homo sapiens
aggaacccgaagaagaaaggacgacagccagagagacagggggggacagcccggcagacgggccgcccccaggcacca

SEQ ID NO: 235666 - RNA, 82 nt, Homo sapiens
cacagaaggacggcccgacggaagcccgagcgggaagaagccgcagcaagccgcagcggcgcgcaccgggcggcccaggacc

SEQ ID NO: 235667 - RNA, 77 nt, Homo sapiens
aaagccaagccaccgagacccggaggaggcgaagcgagaggacaggaggaagaagccagagccacgaggagggagcc

SEQ ID NO: 235668 - RNA, 81 nt, Homo sapiens
gggcccaggcaccacaccaccccacaccgccaccggcgggccacagagccagaccagaccaggagggaaccaaccagacca

SEQ ID NO: 235669 - RNA, 80 nt, Homo sapiens
gccaaggagagaaggaaagcaacgaggaagaacacagacagacaggcccagaacaggacagagcaggacacaaaaaggaa

SEQ ID NO: 235670 - RNA, 66 nt, Homo sapiens
gggcgcgcccccccgcgggcgccgcccaggccagaacggaagaccaaccagaagacacacaaagca

SEQ ID NO: 235671 - RNA, 52 nt, Homo sapiens
gggggggggacaaaggcaacgaaagcaaaccgagagcaggcgaaggccggga

SEQ ID NO: 235672 - RNA, 38 nt, Homo sapiens
gacacaacagagcagaaaaacccgcgccagagagccaa

SEQ ID NO: 235673 - RNA, 60 nt, Homo sapiens
cgggcccggagcgggagccagaggccagggaggacaccgggaaagcaacggcgcaagcgg

SEQ ID NO: 235674 - RNA, 53 nt, Homo sapiens
accaagagaagcaagggaaacacagcaccccaaaacagaagcgagcgcccgcg

SEQ ID NO: 235675 - RNA, 72 nt, Homo sapiens
gcagcacaaccaacagggagaagacaccgaaacagcagacaaaggagcggaggaagccgccgcgcccaggcg

SEQ ID NO: 235676 - RNA, 90 nt, Homo sapiens
aaaaaagacgaggaggacaggggcggggggcgggaggcgccacccagcccccccgcgaacgcccaagcccgccgcccgcagccaaccgcc

SEQ ID NO: 235677 - RNA, 38 nt, Homo sapiens
gcgcgaaagccagggaagcaccgggcagagaacaccag

SEQ ID NO: 235678 - RNA, 83 nt, Homo sapiens
cagaagaagggagcacggaacagacaagccagcagagcgaagggagaccagcgaaaagggcggcggccacgaccaccggcagg

SEQ ID NO: 235679 - RNA, 75 nt, Homo sapiens
cccacgggcggcgcagggggagggcggaaacaggaggaaaaccccgaacacgaaagagcagcccgaaacggacca

SEQ ID NO: 235680 - RNA, 68 nt, Homo sapiens
gaagaccgccggggcggaaagggacccgacacgaggggccgaaaccacccaaggccaaagagagaggc

SEQ ID NO: 235681 - RNA, 86 nt, Homo sapiens
cgccgggagaacagcaggagacagaggccccaagagcccagaccaggccccagggaaaggaccgaggcaggaaagaggccagacgc

SEQ ID NO: 235682 - RNA, 57 nt, Homo sapiens
caccggacggcaagcacaacggggagaagcagacggcgggaaagggcaacagcccag

SEQ ID NO: 235683 - RNA, 74 nt, Homo sapiens
agacgccagcgggacgaggaccgagaccgcggccgggaccgaggggaaacacaaagaagacaccagaagggcca

SEQ ID NO: 235684 - RNA, 76 nt, Homo sapiens
caaagacagccagaggggacaaaaggagacgaaaacaccggaacaaaaggacggcaacaaggggaagagcgcaggg

SEQ ID NO: 235685 - RNA, 72 nt, Homo sapiens
acagcgcaaagggcaccgggaggaagccacacaaagaacaaagcagggagaccccaaaggaaacgagagaga

SEQ ID NO: 235686 - RNA, 79 nt, Homo sapiens
cagccaggaggcgcccacagaagcccgagggagcacccaggccacagaggaggaaagagaggggaaagaagcagccaag

SEQ ID NO: 235687 - RNA, 58 nt, Homo sapiens
agcaaggcagaccagcaagaacagagaaggagcgggggggcacgagcagggaaaacgg

SEQ ID NO: 235688 - RNA, 81 nt, Homo sapiens
accacgccggcccaccaaacagaaacgagggacccacaaagcggccgggggagccccccccagccccggccacaaccggcc

SEQ ID NO: 235689 - RNA, 50 nt, Homo sapiens
cgaagccaagggcaacagcaaaaccagaaaaaacgaggggaggagccccc

SEQ ID NO: 235690 - RNA, 83 nt, Homo sapiens
ccgagaggccggcgggacgcgggcgccaggaccggccgaacgcagagaccacacgaaggggcagaagagcacaagacggaaga

SEQ ID NO: 235691 - RNA, 83 nt, Homo sapiens
cccagagcgagggcacagcaacggggcccagagcaggcacccccagaccggagcccaagccgcagcggcaaaccagccagcaa

SEQ ID NO: 235692 - RNA, 68 nt, Homo sapiens
cgaggagcgaagaacaaacacccgagcgcgagggagaacaacaagaagaaacccaccaagagaaaacg

SEQ ID NO: 235693 - RNA, 80 nt, Homo sapiens
cggaccaggaggcgagcaacaggccccagccccagccaaaccccccacacgaaccagcaagggaggggcgagggcagcgc

SEQ ID NO: 235694 - RNA, 76 nt, Homo sapiens
cggacacaccaggacacaaggagcccaagaggacagagaacgaagcacagaaaagcagccgcacagaacccgaaca

SEQ ID NO: 235695 - RNA, 103 nt, Homo sapiens
cgcaccgcaggcagacaaaagggccaaagaagggagagagcacccacagcaggacccaggagggacccaggacccaagaaaacccgcgagagaccaagagagg

SEQ ID NO: 235696 - RNA, 76 nt, Homo sapiens
caagagggccaagccagaaaacagaaacgaaacagaacagagagaagcccacgcccgaagagcggaaagagagaag

SEQ ID NO: 235697 - RNA, 75 nt, Homo sapiens
accgccccggccgccccccagaccgggacagaaggcaagcagagacgggggccagcggccaggcggccgaacgcg

SEQ ID NO: 235698 - RNA, 77 nt, Homo sapiens
agcaagacaccggacaccgagggcccccaaaagacacgcagcggccgaggcaggggaagagagcggccccggacacg

SEQ ID NO: 235699 - RNA, 85 nt, Homo sapiens
ccaggcgagacccgagcagaggccgagaggcgggcaaagggagaaaaccacgagaccagaaggaacagaagggagacccagagga

SEQ ID NO: 235700 - RNA, 62 nt, Homo sapiens
cacaagagagcagggaggaggggccgcgcacccaggcggagggcagggcaccacacagcccc

SEQ ID NO: 235701 - RNA, 69 nt, Homo sapiens
ccgaccaccaagaaggggggacaaacagagagacggcgaagagcagacggaaacgagggaaagagcacg

SEQ ID NO: 235702 - RNA, 46 nt, Homo sapiens
ggggccagggcaaaggcggacagcccaggaccaagcccaaagggca

SEQ ID NO: 235703 - RNA, 73 nt, Homo sapiens
caccagccaaaggaaaaaagaacgcggaaaacaagaagaagacacccggagccacggcacgaacccggagcca

SEQ ID NO: 235704 - RNA, 116 nt, Homo sapiens
gagagaggcaccgggacggaccgagaccggaccgagagcggaccgagagcgcgaaacgcacgagaaggcagaggcagcgacagagaaaaccccggagcagggagaggacgacccca

SEQ ID NO: 235705 - RNA, 79 nt, Homo sapiens
ggaggaaccaggggaccccccacggggaggacacagggaccaccagagagcgcggacgccaaaacacagcccgagagcc

SEQ ID NO: 235706 - RNA, 79 nt, Homo sapiens
gccaggcagccggaaggaaaagcacgcgagcagcacgagagaaacagaggacgaccgggaggacaagaagaggaagagg

SEQ ID NO: 235707 - RNA, 89 nt, Homo sapiens
cgagggaggacacgcccagaacagaacagaacacgaaaagaccacggcagaagccccacagagaggcagagggcaggcacgagcaagga

SEQ ID NO: 235708 - RNA, 83 nt, Homo sapiens
ccggaccgcccccgagcccggaggggggagaaaaggccgaaaaacgcgggaacgaagcacaaaagcgcgaaggaagcagcacg

SEQ ID NO: 235709 - RNA, 43 nt, Homo sapiens
gccccaaagagcgagacacaggcagacaagaaacagggccggc

SEQ ID NO: 235710 - RNA, 74 nt, Homo sapiens
aaagggaccaccccaaacacacagaaaagaccgaaggaccaggacgggagaacagaagagcagacagagccgag

SEQ ID NO: 235711 - RNA, 72 nt, Homo sapiens
cccacgggaacaagaggggacagaaagcacacaggccgaagacaagcaaccaacccgaacggacacagaaga

SEQ ID NO: 235712 - RNA, 79 nt, Homo sapiens
ggagcgggagcccacacacaggaccgccccggacaggaggagaaggccgccaagaaaaggagcgaacaggggccacagc

SEQ ID NO: 235713 - RNA, 89 nt, Homo sapiens
aagcccaggaacggcacgcagcgagaacgcgcacgaagaggacaaccaaaggcaacgaaaagagacagcaaaaagcaaaacgcaagaaa

SEQ ID NO: 235714 - RNA, 78 nt, Homo sapiens
gacaaggaggcaaagaaaccccgcaccccaaaaggagacccaacaccccggccagacgggccaccaggccggcgcccc

SEQ ID NO: 235715 - RNA, 111 nt, Homo sapiens
gggaccgggccaagacgagcgacaggagcacacccggagaagcaggagcccaccggcaggagggcccccggacccgggagcggacccggggcgggaagcccgaggcggcaa

SEQ ID NO: 235716 - RNA, 78 nt, Homo sapiens
aaacaggaaccaaagaaccaaaaccaagacccagccaagcagaggccacacgaacggcggcggccggggcagcgccgc

SEQ ID NO: 235717 - RNA, 83 nt, Homo sapiens
gccggggccggggcgccgccgggcggccgggcgcggcgagcccaggaagaacgaagcgcgcagaaaacacagaaggcaaaagc

SEQ ID NO: 235718 - RNA, 81 nt, Homo sapiens
cggggggagacggcgcggccgccagccggcccggccggacgaaagaagcaccaggggccggcagggggccagaaggaagac

SEQ ID NO: 235719 - RNA, 73 nt, Homo sapiens
cgcccgggccagcggccgcgcacccccggccggaggcaccagcagccccagcccagcccgggggcgcaaggcg

SEQ ID NO: 235720 - RNA, 77 nt, Homo sapiens
cgggagcgccgcgggaagggcggggagcggagccaggccccggagaaaagcagaagcccaggacgcccggcaccgga

SEQ ID NO: 235721 - RNA, 81 nt, Homo sapiens
ggcggcggaggagcggcggcggcgacgcgccgggccgaaaacaccagcacggaaaaaggggaaaccgaaccggaccagaga

SEQ ID NO: 235722 - RNA, 84 nt, Homo sapiens
gaaaaggcggacgggaaggcgggagacgagaagccgaaaagcgcagcgagcggagccgccggagaagaccagaagagcagccag

SEQ ID NO: 235723 - RNA, 85 nt, Homo sapiens
acgccaagcaaaccgggaaaggagaggacccggagccgggaaccagggccaccagagaagcgacagaccaggaaccagggggaag

SEQ ID NO: 235724 - RNA, 69 nt, Homo sapiens
gagcggggcggccacaagcaaagcccaagacaagaaccaagggacagaagaacggcccaaacaaaggaa

SEQ ID NO: 235725 - RNA, 62 nt, Homo sapiens
aaagaagcgcagcggaggaaggcgagccaagcgaaagacagaggcccagccgaaagagggga

SEQ ID NO: 235726 - RNA, 70 nt, Homo sapiens
ccgagacgccaaaaggaagagagcagagggagggaagccggaagcggcaacagcaaagggaaaagaggag

SEQ ID NO: 235727 - RNA, 84 nt, Homo sapiens
gccagggccagggccaggccagcgcccggcggcccagacgccgcccacaccgcgagcgccaacacaccacagagcaccagaagg

SEQ ID NO: 235728 - RNA, 72 nt, Homo sapiens
gcaccaaccggagacgccagggcagccgccaagaccgcgagggaggacagggccaccagaagaccaggagcc

SEQ ID NO: 235729 - RNA, 83 nt, Homo sapiens
cccaggccgcaacccggagaagcaagggagacaaggaaaaaggaaggaaagcgaggccggaaaaaggccagacagccccagga

SEQ ID NO: 235730 - RNA, 75 nt, Homo sapiens
aggcaggcgaacgcacggcagcaacccagaggaccccagagcaccaagaggccaggaagaaagccaggcccaagg

SEQ ID NO: 235731 - RNA, 38 nt, Homo sapiens
ggcccgagacaaaaagggaaaagaagaccccggagcag

SEQ ID NO: 235732 - RNA, 54 nt, Homo sapiens
gcaccccccagcgcgcccccgagacagagccaccccacgcccagacgaggagga

SEQ ID NO: 235733 - RNA, 83 nt, Homo sapiens
ccacccgaaaccgaggcgcgggagccgcaccaccaacgcggccgacaacagccggcgccgccacggaggcagcacggcaggag

SEQ ID NO: 235734 - RNA, 68 nt, Homo sapiens
agggggaggacggccaaagggacagggagaagggaacaaggcaacaccaagacacggccacggcaaga

SEQ ID NO: 235735 - RNA, 57 nt, Homo sapiens
aaaggaagcccaacagaggcaccaaaagacccaacagggcgaccagaaacgagacgc

SEQ ID NO: 235736 - RNA, 55 nt, Homo sapiens
aggcgcaagagggaggcgcacacacagagaaacacagcccaaagaaacacacccc

SEQ ID NO: 235737 - RNA, 90 nt, Homo sapiens
ccgggagcggccggaggcgcggaggcgacgccggagagaacgaagcccggcgggagcgcgaaggaagaggacaccccaagacaaaacagc

SEQ ID NO: 235738 - RNA, 74 nt, Homo sapiens
gagcggagacgggagaagaaaagacgaggaaacccggccggcgggcagacccggacaccaccaacaaggcacca

SEQ ID NO: 235739 - RNA, 98 nt, Homo sapiens
gcaaagggaaaagcaagaagggaaagaaaccgaagccccacaagccagggaagaccccgaaggaccaagcacaagagggccagggaccaggggacgcc

SEQ ID NO: 235740 - RNA, 77 nt, Homo sapiens
cagggggccacacgcaaggggaacaggccccgccaagacagccacacgaacacggacccccccaggcagagcagaca

SEQ ID NO: 235741 - RNA, 89 nt, Homo sapiens
cgaagaagaccaagaaacacagcagcgaaaaccacaggccagcaaccaagaacccacaagggacgcggaccccaagcggcaccccaccg

SEQ ID NO: 235742 - RNA, 73 nt, Homo sapiens
ccgcaagagcgggaacagcggccgcgcggggcgcaggcgccccgcggagcgccccaggacggcagccccagca

SEQ ID NO: 235743 - RNA, 77 nt, Homo sapiens
ccagaagaacccagggagagggaagaaaagcggagaaggagccaaacccaaagaggccggcccacacgcccgcacca

SEQ ID NO: 235744 - RNA, 75 nt, Homo sapiens
caagcagcagacagagaggacacgaaacggacaaccgagaccgaacgcccgcgaacaaacggaaagccccccagc

SEQ ID NO: 235745 - RNA, 76 nt, Homo sapiens
gcccacagcggcaagacccccccaaccaacgcggacaaggccacaagagggcagggaaaaaagggagcagacagaa

SEQ ID NO: 235746 - RNA, 76 nt, Homo sapiens
agaaggcggcaccacccagccacacgcacagacgccgggaccggaaagcagcaagcccgagaaaccaccagcaggg

SEQ ID NO: 235747 - RNA, 77 nt, Homo sapiens
ggcagaagagaccaacacagagcagcggaaccagacaggcaggaaaagacagaggaacagaaaaacgaaacgccaca

SEQ ID NO: 235748 - RNA, 72 nt, Homo sapiens
gccccccgaaggcgcgccccaaacagccacaccagcggacagccaccaagaggccagaaggcagaacagcga

SEQ ID NO: 235749 - RNA, 79 nt, Homo sapiens
cgccgggggacgcgcgcggacgacagcggccacggcacgagggcggagcggccggaggagaaagccggacagacacaca

SEQ ID NO: 235750 - RNA, 85 nt, Homo sapiens
ccagaacgaccgagggcacggccgaggaccgccgaccagaccagggaaccgggcagcagccgcagccgcccccgggacggccggc

SEQ ID NO: 235751 - RNA, 120 nt, Homo sapiens
gggccaccggagggggaaagaggacccaggccccagagggcagcaggcgagggaagcaggagaggaggcccaaggggccaacagccagggccggaagcccggggggaggccaggcacaac

SEQ ID NO: 235752 - RNA, 81 nt, Homo sapiens
cacaagcaagcgaaggaggccagaagaccagaagcgacaaaagggcaaccccaacaacaaagaggacaagccaggacgaca

SEQ ID NO: 235753 - RNA, 54 nt, Homo sapiens
cgcagggcgcccccggccagggcccagcagcagcccacggggccagcggaggaa

SEQ ID NO: 235754 - RNA, 75 nt, Homo sapiens
aggaccacagccgagcgagagcaggaagacggccgcggagcgcgccgccagagaacgggaggcccaagcgcccga

SEQ ID NO: 235755 - RNA, 72 nt, Homo sapiens
ggcaccacccccggccgcccccagggaggcaaggagcacagaggggcgcaacaggaaggagaacaccagaag

SEQ ID NO: 235756 - RNA, 86 nt, Homo sapiens
gagaagaagcaagccccgcagaagagaaaccgaagcccaccaccaacagcaaaggaagcagcgaagaaacaggggagaaaccccgc

SEQ ID NO: 235757 - RNA, 73 nt, Homo sapiens
cccgagggcgggacacagcgccggcagggaacgcgaggacagagcaaggcgggccacaccagccacacgcagc

SEQ ID NO: 235758 - RNA, 65 nt, Homo sapiens
caggagggcacggaaagggaagaggcccagccagagagggggggaccaagcagggacgggggaga

SEQ ID NO: 235759 - RNA, 78 nt, Homo sapiens
aaggagagccccagcgaggaagcacaccaccaaggaacgggcgcagcgagagaccagacaaagggagcaccagccaga

SEQ ID NO: 235760 - RNA, 73 nt, Homo sapiens
ccaaggggcaggaaagcaccggaacacgagggacgaggagggcaacacagagaagccacagaaacaccgaccg

SEQ ID NO: 235761 - RNA, 74 nt, Homo sapiens
gcaacggcacagaaccgcagcagggacgcgggcacgggaccggcgaggacgggaaacacaaagaagacaccaga

SEQ ID NO: 235762 - RNA, 78 nt, Homo sapiens
ggacccagccccagaacgaccaggacggagacccgaggaaagccgggaccaaaagcaagacaaagaccacagagaaaa

SEQ ID NO: 235763 - RNA, 83 nt, Homo sapiens
cggccagaagaacgcgccacacagccgcaagaggaggcaagacaggaacacgcccggggaagggccaccgccacccaggcgga

SEQ ID NO: 235764 - RNA, 38 nt, Homo sapiens
ccccaaaggcggaacagcgacgccgcaccacgggcgcg

SEQ ID NO: 235765 - RNA, 79 nt, Homo sapiens
gagagacggaccagaccagggccgagcacagggcggagaacggaaaagcaccaggaagcagagaggaccgcagaaggga

SEQ ID NO: 235766 - RNA, 76 nt, Homo sapiens
caacaagaggaagcaggaaaaacaaagaagacccaggaacaagcacacagagacggggacggcaacaacaacaaga

SEQ ID NO: 235767 - RNA, 72 nt, Homo sapiens
acgagaaccaccccgacacaacaccaccaaaagcgggaacccacaacgaaggaaggaacagaggcacagcga

SEQ ID NO: 235768 - RNA, 74 nt, Homo sapiens
cagagcagaagcaccaaagcagcggcgccggccgccccaccggcggaacccagcaagagagaaggcagaaacaa

SEQ ID NO: 235769 - RNA, 73 nt, Homo sapiens
cgggcagcgccagaccgcgacaggcccgaaaaaaacccaggcggcccagggggcggcagggggaccagccagc

SEQ ID NO: 235770 - RNA, 78 nt, Homo sapiens
gccagcaccacgcccgcgccgcgccgccgccaccagcccaagagaaagagagacggggcaccagagccaggaggccaa

SEQ ID NO: 235771 - RNA, 83 nt, Homo sapiens
caagcggacaaaagggcagcaacgcccacggaccgagaaaagccagggccgcgcgcgagccggaacgcccaggacagagaacg

SEQ ID NO: 235772 - RNA, 77 nt, Homo sapiens
cggcgggcacacagacacgcacggagggcccaacccacagcgccccagggcccaacgaaccgaagagaaaaggccac

SEQ ID NO: 235773 - RNA, 79 nt, Homo sapiens
ggcgaccggggcggaacccggcgaccacgccccggggcagcaggcgaccagcgccacggacccacgcagccacccagcc

SEQ ID NO: 235774 - RNA, 50 nt, Homo sapiens
aaccacgacgaagcggaaggcagaagaccacgcggcggaccaagccagcg

SEQ ID NO: 235775 - RNA, 83 nt, Homo sapiens
ggaggagccgcgccggccggcgacccggggaccggcccgcggcggcgcgccacccgccccgcaggaaacccagcggcggcaga

SEQ ID NO: 235776 - RNA, 83 nt, Homo sapiens
caacggaaccggcaacgggcgccaagccgcggagccccagacgggggagaagccccccgcggggaagaaccgggacggcgcgc

SEQ ID NO: 235777 - RNA, 97 nt, Homo sapiens
cacccagagcgcggggcggcgcgccccccccaggcccgccgcccccgccaaggagaagacagaggagccagaccaagagacagcacaggcgagcgag

SEQ ID NO: 235778 - RNA, 86 nt, Homo sapiens
gcgggcacaccaccccaccccgcccacaaggccccccccaaccaagcggcagcggcggagcggggccggcccaggggggccagacg

SEQ ID NO: 235779 - RNA, 79 nt, Homo sapiens
ggaaacgccgaggaacccggcgaggcggcagggaaccaagaccaggacaaagaagacccggagagacaagccggaggac

SEQ ID NO: 235780 - RNA, 40 nt, Homo sapiens
cagcccagagcgcaaagaggagcagagggaaggcccgcag

SEQ ID NO: 235781 - RNA, 82 nt, Homo sapiens
aaaaagagcgggcggggaaagaagaaggagaaacacagaagaggaagaaaaagcaaacggagcacaaaacaaagcaccccac

SEQ ID NO: 235782 - RNA, 97 nt, Homo sapiens
agaagaagaggcagaacgcaggacacgcaagagcgcacccgaaacgacagaaacaagcaaccgaccagaaaacggaggcaaaggaggcgccgggccc

SEQ ID NO: 235783 - RNA, 31 nt, Homo sapiens
aacgcaccaccaagaaagcccaggagcccaa

SEQ ID NO: 235784 - RNA, 74 nt, Homo sapiens
gaggcgacacccagagagcccagaacggagaaaagaaacgggagacccacaagagcggccaaaagaaaaccacg

SEQ ID NO: 235785 - RNA, 74 nt, Homo sapiens
acgagcagcgcccgaggggcggaagccagagaccaacgagaccgcacagcgaaagcagacgaaggacaagccga

SEQ ID NO: 235786 - RNA, 74 nt, Homo sapiens
acccccacccccggcaggagacaaggcaagaaaaagcggggaaaacaaaaaaaagaaggagggaagagggggcc

SEQ ID NO: 235787 - RNA, 85 nt, Homo sapiens
ggcggccgacggcgacgaccgcgaccccacgcgggccaagacgaacccgcaagaggacgcagggacacgacacagggacgggcca

SEQ ID NO: 235788 - RNA, 66 nt, Homo sapiens
ccggcccaaggccacaccggacacgaggacgcacagaagggccgcgcgcaccaaaaccggaagaag

SEQ ID NO: 235789 - RNA, 84 nt, Homo sapiens
ggcgcgcccccggcccagccgcgcccggccccgcggggccgcccggcccgcccgaggcgggaggaaccaggaaccaggggggag

SEQ ID NO: 235790 - RNA, 71 nt, Homo sapiens
acggaacaacagagccccagccggaggagcagacccaggcccacccaagggcccgcgcccaccacaaagga

SEQ ID NO: 235791 - RNA, 71 nt, Homo sapiens
gaggcagccggcccccgggccgagaggacgaaaaaagggccggcccgaaaggggaccagaccgaggcagcg

SEQ ID NO: 235792 - RNA, 51 nt, Homo sapiens
ggggcgacaagaccagggccgacaaaccaagcaaccgagcaagggagaaac

SEQ ID NO: 235793 - RNA, 59 nt, Homo sapiens
aaggaaagcgaaggggaaggcgccgaagaggacgaagcgccggccacaggcacacggcg

SEQ ID NO: 235794 - RNA, 77 nt, Homo sapiens
cccccaaagcagcacagcagaccagcccccccaccccacgccccccgcagagcggaggcagcccgacggccacgcaa

SEQ ID NO: 235795 - RNA, 57 nt, Homo sapiens
cggaccaccacgcccgaaaccacaagcgaaaagcagaaaagacacaagagggccaca

SEQ ID NO: 235796 - RNA, 74 nt, Homo sapiens
cgagggaagcggaaccaaccgggaaagcccggggcagggggagacaacaggaggacacggaagagggaagaaag

SEQ ID NO: 235797 - RNA, 80 nt, Homo sapiens
gcgaggacaaccaccgagcaaacgagcacagcaagcgggagcaggcagaccaaaggaacagaagccagggccggaaaacc

SEQ ID NO: 235798 - RNA, 78 nt, Homo sapiens
caccacgagaacacagccgggcccggaaggggaaggaacgggagcaggggaaagacacggccccgggaaggggacggc

SEQ ID NO: 235799 - RNA, 79 nt, Homo sapiens
caaaaccagagcggagacacccaggaggcagaagccagaaaccagagaaacccaggccagcaaagacacacccacaagc

SEQ ID NO: 235800 - RNA, 72 nt, Homo sapiens
gaacagacaccgagccagcaagcccccaacgacacccccggaccagaaaccggggcgcagcgaggccggggg

SEQ ID NO: 235801 - RNA, 94 nt, Homo sapiens
cagggacaagggcgcgcagccaaccaagggcgcggggaccgaggcaagacgacaccgccagaggcggcggggcacccaacaccaaccaggaaaa

SEQ ID NO: 235802 - RNA, 47 nt, Homo sapiens
aggcccggcagaagagaacagcagggagaccagaggccagaccgccg

SEQ ID NO: 235803 - RNA, 77 nt, Homo sapiens
gaagagggaaacagccacaagaaggcgccagccagcgcagaaggcgcccaggacccacagccagggccggccacagc

SEQ ID NO: 235804 - RNA, 71 nt, Homo sapiens
caccaacaccacaccggagaggaacaggaccccaaaaagaagaacgcccagagcacccggcaccacagccg

SEQ ID NO: 235805 - RNA, 85 nt, Homo sapiens
cggcgccggccggccgggcggcgagccgagcgaggcagccgagccgcgcgggaggaccacaggccacccagaagggccccacccc

SEQ ID NO: 235806 - RNA, 80 nt, Homo sapiens
accccccggcgcagcagcacacaaggccaaaacagaagaggcaaagcccagccacagcagcagcccagcagcaaacaacc

SEQ ID NO: 235807 - RNA, 76 nt, Homo sapiens
acagagggccccagagggcagcccggagaagcaaggcccacgcggacgaagcccagccccccccgcccaaaccgac

SEQ ID NO: 235808 - RNA, 83 nt, Homo sapiens
gggaggccgaggcgggcagacacgagcaccgaccaggccgagagcaacggcaagaagagcagccagggcggaggagcaacaac

SEQ ID NO: 235809 - RNA, 74 nt, Homo sapiens
caccaggagacgggacaaccaaaccaccaagaggggcaccccccaccccgggacaccccagggcaccacagagc

SEQ ID NO: 235810 - RNA, 58 nt, Homo sapiens
aagcagacgccaggcggccaacaggcaaaaacccagcccacagagacgagcgggcacg

SEQ ID NO: 235811 - RNA, 91 nt, Homo sapiens
cggagccacagacagagccgggccagcccagagacaggagaggcacaacccaccccaggcagccaccaacaccacaacgggcacacaggcc

SEQ ID NO: 235812 - RNA, 72 nt, Homo sapiens
aggagagggggcgcaccgggcaagggggagcgagaggaaaagaagcggcagaagaaaagcgcccaggaagcg

SEQ ID NO: 235813 - RNA, 78 nt, Homo sapiens
gccggagcagcggggacaggaaggggcagacaagcacgccgcccagacaaccgccccccaggccacccaggaccagcg

SEQ ID NO: 235814 - RNA, 81 nt, Homo sapiens
caaaaccaggccccaaggccggaagaagggagagcagaagccgcgaaaaaggggggccgaggcacggccggaaggacaggc

SEQ ID NO: 235815 - RNA, 79 nt, Homo sapiens
cagagcaaggaggccccagcggaccgaacagaaaaccagaaggcaccgacaggaaaggaaaaggagaaccaggcacccg

SEQ ID NO: 235816 - RNA, 105 nt, Homo sapiens
ggcacggacgagggccgaccggagcccaggcggccccagacgggggaaccccaagcgaggaaaccacaggcaagcagcccagaggaaccccgggcacaccaaccg

SEQ ID NO: 235817 - RNA, 69 nt, Homo sapiens
gaaggagagaccgccaagcccaagagaaggaagcagccagccaccaagggaggagagaaggaccaacca

SEQ ID NO: 235818 - RNA, 49 nt, Homo sapiens
ggaaacaagagcaaagaagggaaggggaagcaggccaacccagaacaca

SEQ ID NO: 235819 - RNA, 38 nt, Homo sapiens
cacccgagggcgacagcacgagaggagccaagcccaac

SEQ ID NO: 235820 - RNA, 73 nt, Homo sapiens
cgccaacaggacaccgaagccaaccgggcgaccaaggaaagagccaaaagagccaggaagggccgcccaaaaa

SEQ ID NO: 235821 - RNA, 76 nt, Homo sapiens
acaggaaaaggaagcaaaggaccaaagagcgggacaggacggacgcgcagaccaccccacgaagaccaagcccaga

SEQ ID NO: 235822 - RNA, 74 nt, Homo sapiens
gcccaccaccaccaagcaagcaggcacaacaaaagcaaaaagaccaagggagggcaacacggacaccccagcag

SEQ ID NO: 235823 - RNA, 79 nt, Homo sapiens
agcccagcccgaggcaaccggcgaccaagcaaaaggggggcgcggcccagccgcgcgcacacagcaagaagcaaggcaa

SEQ ID NO: 235824 - RNA, 80 nt, Homo sapiens
acacaccaacagggaagaaaacccagaaagcaacacagagaccggagagcacacggccaaacacacaggaacgccagacc

SEQ ID NO: 235825 - RNA, 75 nt, Homo sapiens
ccgacccacccaggacaggggaagagggcggaggaacagcgggggccaaggggaagaacagcaaggacgggggac

SEQ ID NO: 235826 - RNA, 60 nt, Homo sapiens
cacgagcgaggaagaagaggaagcggcgcgaggcagccgaggagcacaccgcaggacacg

SEQ ID NO: 235827 - RNA, 136 nt, Homo sapiens
cccgggggccagggggccggggacacgagaaggaggcccccacagcggcccccgcggcaaggccccggccggaaccaaaaagaagccccagagccggggccaggagccccaagcgccccagcagcaaacacagaag

SEQ ID NO: 235828 - RNA, 59 nt, Homo sapiens
ccagcggaaacacagggaagaaaacgcaagagagcgcccgggccccggcaaaaaagaga

SEQ ID NO: 235829 - RNA, 75 nt, Homo sapiens
cacgccaaaggaaaaccggcagaggacaaaaagccaaggacacgcaggacgaagaaggaggagagcccagaagaa

SEQ ID NO: 235830 - RNA, 70 nt, Homo sapiens
cgcgccccgcccggaccgcgcagaaccagggcggcggccagcgccacgcggagcaggcgaagcgagccag

SEQ ID NO: 235831 - RNA, 74 nt, Homo sapiens
gcaagaagaaacccagcaacgcgggcgaaaagccaggagcaaaagacgagcgcgacgccaccagcaacgaaccc

SEQ ID NO: 235832 - RNA, 73 nt, Homo sapiens
gggcacggagccagacacacgcaaacaaggacggagaccacacagaacagaccggccccccaaacacccgagc

SEQ ID NO: 235833 - RNA, 78 nt, Homo sapiens
acacacccgacgagaggccgggacaccagaggaagaaagcaggcgggaggacaggacggcccaccggcggaaagagcg

SEQ ID NO: 235834 - RNA, 85 nt, Homo sapiens
cacaagggaacgggcggccccggagagagagccgcgcacgcacagacaagacaagccagggaagcacagacggaccacagccagg

SEQ ID NO: 235835 - RNA, 48 nt, Homo sapiens
gagaacaaaaccagcgaggcaagcgcgccggacagcgacaaaagcgaa

SEQ ID NO: 235836 - RNA, 86 nt, Homo sapiens
caggccccgagaggaacccagccgacacgacgccgccggcaggcccgcgcaccaggaaaccccccaggcaagaggcgcaggaccgg

SEQ ID NO: 235837 - RNA, 48 nt, Homo sapiens
accgcgcccccagaacagggaccaggacacacgaaccacgcgaacccc

SEQ ID NO: 235838 - RNA, 141 nt, Homo sapiens
ccgcagcggagagaaaagaggagcgcgcccgagggcaaaacccagagcagacaccgcagccaccgcggagcaaagcacagagaacaccccagcagaacagggaggaccaccagccaccagaaggagacagaccgggaggcc

SEQ ID NO: 235839 - RNA, 80 nt, Homo sapiens
gagagccagcacaagacgaagagggcccagaggaagaagccccccagagggcggccgaaacagaagagaaaagcaaaaga

SEQ ID NO: 235840 - RNA, 74 nt, Homo sapiens
gaaaaaccgcaagaaaccacagggcgacacccagggcaaagggcaaacagcgcacagcaagggcagaggaaaag

SEQ ID NO: 235841 - RNA, 71 nt, Homo sapiens
ggcaccccgggcggggccgcgcccccccagggaccagcaccggcaggcggaaaacggccaccaaaggggaa

SEQ ID NO: 235842 - RNA, 75 nt, Homo sapiens
cgggccggccccgccgcggcccgcgcccggccccgcgcgccggcgcaccagggaagaagacgccgaacaacagcc

SEQ ID NO: 235843 - RNA, 104 nt, Homo sapiens
ccgggaccaaggcggagcaaagcgccgggggggggggccacgcaggggaggcgccgagcgggccgacaagaaagccgaggcggggcgggcagcaaccgaaccag

SEQ ID NO: 235844 - RNA, 78 nt, Homo sapiens
gaaacgaagcgcacgaaacaccaagccgaacacccaacaagaaggcaacgacaaacagccaagcaagccccagggccc

SEQ ID NO: 235845 - RNA, 85 nt, Homo sapiens
gagagcagcggcagccggcgggcagcagccggccgacccagagggcggagaacggaaaagcaccaggaagcagagaggaccgcag

SEQ ID NO: 235846 - RNA, 102 nt, Homo sapiens
cagcgccggaccccccacccacgcgaacgagagggacacggagcaggcaagagcgaaggagaaaggcaacaaggcccgagcggggaacacgagagccacagg

SEQ ID NO: 235847 - RNA, 74 nt, Homo sapiens
acgaaagaaaaaaaaaaccggagaggaagagaagaggagacggggccgaggagggaggacccaccagaggaggg

SEQ ID NO: 235848 - RNA, 69 nt, Homo sapiens
gcaccaggaaaggcaaaagcagcacggccagagggcaggaacagagcaacagggacagcagaccacagc

SEQ ID NO: 235849 - RNA, 74 nt, Homo sapiens
gacggggacagccagaaaccggggaccaacaaccaccaagaaacagagggcggagaacggaaaagcaccaggaa

SEQ ID NO: 235850 - RNA, 73 nt, Homo sapiens
aggcagagaccccccagcaaggcagccagacgggaggaagagagaagggcacagaccaagacaacgaaccccg

SEQ ID NO: 235851 - RNA, 90 nt, Homo sapiens
gccggagcgcggagcccggccccgcaccaggaggaggacgacagcacgccagagacccagagcagcagcgaagagaaggcccagcccccc

SEQ ID NO: 235852 - RNA, 73 nt, Homo sapiens
acggaaccgggacccgggcgcccgcgcccgccccaacccagccacaggcgacaaacgggccacaaagcacgga

SEQ ID NO: 235853 - RNA, 62 nt, Homo sapiens
accagccaagacaacaagaacgccgccgccgcacaaggaaaaccagcgccccacaggaaagc

SEQ ID NO: 235854 - RNA, 54 nt, Homo sapiens
ccggaggaccaccgcccgcagggaaaaagacggaggacggccggcacacagaga

SEQ ID NO: 235855 - RNA, 85 nt, Homo sapiens
aaacccgagagggcgaggaggcgggccgcggaggagcgcagagggaccgagggacaccggagggacaaggaagaggggagccaaa

SEQ ID NO: 235856 - RNA, 55 nt, Homo sapiens
accaaccaagagcgaaggccgagagcccagacaaaccggcgaccacacacgggga

SEQ ID NO: 235857 - RNA, 71 nt, Homo sapiens
ccgacgaagaagaaacgaagaggacgacagccggaggcgaagagcaaaggcaagcagaaccagcaaacggc

SEQ ID NO: 235858 - RNA, 74 nt, Homo sapiens
gcacggcccgcaggcggccagggcacgccccgcgcccgacgagcgcaaggccggccacagcgggcccccaggcc

SEQ ID NO: 235859 - RNA, 71 nt, Homo sapiens
aaagacagagggagggaaaaaaaaaaccaaggaagcacaaaagagccaggaagaaggaaggacaaggggcg

SEQ ID NO: 235860 - RNA, 68 nt, Homo sapiens
ggacacaggagcagcggaaggagcaagaggagagagggacaagggaccacggcacgaagccccaaaca

SEQ ID NO: 235861 - RNA, 80 nt, Homo sapiens
ccgacacacccagcagaagaaagggaaggaacacgcgcaacgcggggaggagcgcacagcacagccaaaaacagaaacca

SEQ ID NO: 235862 - RNA, 72 nt, Homo sapiens
ggagcgagccagggcccgacaggcacagaacacaccaggcacggaccacaaaaagggaagaacagcccacgg

SEQ ID NO: 235863 - RNA, 96 nt, Homo sapiens
aggacaagggaacgacagacacagcgcgggaggcgaaggcggcacgggagaggaggagcaagacaacaaaagggaaaaacggaacagagagaaaca

SEQ ID NO: 235864 - RNA, 79 nt, Homo sapiens
acaggcagagaaagggaacaccagcggggggggagacaagagccaacagacaaacggcaacaaaaggaaggaaaaagcc

SEQ ID NO: 235865 - RNA, 105 nt, Homo sapiens
gccggaccgcaccccacgggggcgagcggagcggcagaggcgcagaggcagaccagcagcggagagccggcagcgcccgagggagcaaggagaagagcggaaccc

SEQ ID NO: 235866 - RNA, 73 nt, Homo sapiens
accacgaagcaaacgagggaaaaaaacaaaagcagcccaagcaccaggagaccaaaccggaccacccaaaaag

SEQ ID NO: 235867 - RNA, 69 nt, Homo sapiens
gacccgaacgccacaaggaaaagggcgcaaaaaccagacaccccacaccaccacccagacgaccaaaag

SEQ ID NO: 235868 - RNA, 50 nt, Homo sapiens
gaaggaacggcaaaggcaagaaaaggagaagaaagaagaaaaaaaagagc

SEQ ID NO: 235869 - RNA, 67 nt, Homo sapiens
cgcgccgagccgcgggcccgcaggaggggcgacaccagaggaaaccggggacagccaccgacacaga

SEQ ID NO: 235870 - RNA, 77 nt, Homo sapiens
agccggacccgcccagcagaagaagagaggagggagaacacagaaaccggccccagaccccaaggaagccgggcaca

SEQ ID NO: 235871 - RNA, 56 nt, Homo sapiens
cagcaagacgccaggacccacggaagccagaaaggacaacaacaagcaccgacggc

SEQ ID NO: 235872 - RNA, 68 nt, Homo sapiens
aaaacgggcagggcagccacaaagaggagcacgaggaccagagggaaaaggcacccagcggacggggc

SEQ ID NO: 235873 - RNA, 86 nt, Homo sapiens
cgcggcaccccacgcggaccccgaagccgcaacccggggagggcccgcggcgcgaggagccggagaaacggcccccaccgcagcag

SEQ ID NO: 235874 - RNA, 76 nt, Homo sapiens
aacaaacacaaggagccacaaggacgggaagcaccaaagcgcgccaagaaaccaacgacaaacgcagaacaaagcc

SEQ ID NO: 235875 - RNA, 78 nt, Homo sapiens
gagaaaggaggggacagagaggggacgccaggcgggcgggccaagggccagcagcgaggaggaaagcggagggggcag

SEQ ID NO: 235876 - RNA, 67 nt, Homo sapiens
caacgggagaagccagcagagaggagcaagcaaccacccaagcaggaccacaaggcacaggcgaaac

SEQ ID NO: 235877 - RNA, 55 nt, Homo sapiens
accgggaaacaaacacgggaagacacacaggacacagagaagggacgaggacggc

SEQ ID NO: 235878 - RNA, 82 nt, Homo sapiens
cgcgacgcaggcgcacggagacccgccggcacccacagaagaagggaaaaaagagcgcgccaagaacgcgaacccccgcgcg

SEQ ID NO: 235879 - RNA, 77 nt, Homo sapiens
caaagaagacccagaggacacaaccaaggcagagcacggggcagcagagagggacacccgggccgaaggaccaggcc

SEQ ID NO: 235880 - RNA, 73 nt, Homo sapiens
aagacgaaacccagaggaaggacagcagaggcacacaaacggaaccgcacaaagcagacaacaaaaagcagcc

SEQ ID NO: 235881 - RNA, 64 nt, Homo sapiens
gaggcaccgcacccaaggacccggagaacccggagagagcgccgcaaggcacagccagcccgcc

SEQ ID NO: 235882 - RNA, 84 nt, Homo sapiens
gacagacccccgccaccggaggcccaccggcagcaagaccagacacagcgggcgacgcacgaggcacacaggaaggaggggagc

SEQ ID NO: 235883 - RNA, 74 nt, Homo sapiens
accagaccgcccaggaaacggcgcaaaaaccagacaccccacaccaccacccagacgaccaaaagggcacccca

SEQ ID NO: 235884 - RNA, 83 nt, Homo sapiens
accggagcgaacgccacgccggggcgccagcagaaccggcggggagccgcagaacccagcggcagcaaggccgccgccgcccc

SEQ ID NO: 235885 - RNA, 59 nt, Homo sapiens
ggcaccaggagagcgagaggcccgcaggagaaggaagaagaccaagccagacaacaagc

SEQ ID NO: 235886 - RNA, 79 nt, Homo sapiens
cggccgagcaggaggcgccacaggggaacggcacagggaggggacagaccaaccggcagccaaccgcacaaaagccaga

SEQ ID NO: 235887 - RNA, 105 nt, Homo sapiens
cggaacagacgggccccaagaggccagccccccgagggcaacgagaaagagacgcaccaggaagaagaggcggaagaaacaacaagcgcaaggagcgcccaaacc

SEQ ID NO: 235888 - RNA, 100 nt, Homo sapiens
gggcagcacggaaccacacagggccgccaccaacagagaagacagagcaccaacgagaccaaaagaaggggagcccagaagcgagaggaaaaggcaaacg

SEQ ID NO: 235889 - RNA, 76 nt, Homo sapiens
aagcgcccgaggcccgggcccgcgggggcaaccgggcgcagacgagaagccgaaaaccagacaagccaacgggagc

SEQ ID NO: 235890 - RNA, 73 nt, Homo sapiens
ggccggaccccagcacacagaagccgagacgcgagacgacgggaccgaaggaccccgccagagacaaccgagc

SEQ ID NO: 235891 - RNA, 81 nt, Homo sapiens
agaagacccgggaagcgcccccggcccaagaaggaccccagccaacagagcggggcagaagaaccaggacaagaacgcgcc

SEQ ID NO: 235892 - RNA, 77 nt, Homo sapiens
gaccggaggaggcgggggcgccggcagaggaccaggcaccaccggccccggaaggagccaaaacacaccggaagacc

SEQ ID NO: 235893 - RNA, 71 nt, Homo sapiens
agaggacgccacaaacacccaccacagcagaggagggaagacaagagcaccaacggacaagcacaagcaag

SEQ ID NO: 235894 - RNA, 68 nt, Homo sapiens
gccagcacaccgaagaaacgaaaaaccaaagcaaagcacaggccacgaccaggagcgacaagcaccac

SEQ ID NO: 235895 - RNA, 71 nt, Homo sapiens
cgcggaccagggacccgcgaaagcggggcacaggcgggcacgcgcccagcggcggagaaaccaccacaaac

SEQ ID NO: 235896 - RNA, 78 nt, Homo sapiens
ggacacaaaagaacagcgcagaaggaaaaggccagaggaaccaagaaccaacacagacagagaccaggaacacacaaa

SEQ ID NO: 235897 - RNA, 77 nt, Homo sapiens
gcgcaaagccaaaagagcagggaagaccaagccacccggagaacaagaaaaagagaaaagaaagaagcagaaaggac

SEQ ID NO: 235898 - RNA, 73 nt, Homo sapiens
gagggcaccaggagggaagcaggacccgaacacggaagaaagacacgcaggaggccgcggccgagcagcgcca

SEQ ID NO: 235899 - RNA, 73 nt, Homo sapiens
acaccaaaagcgggggaagaagagaggacgacggacccgcgaaacccccggggaggaacaagccaagcagaag

SEQ ID NO: 235900 - RNA, 73 nt, Homo sapiens
gaccagggaaaacccaaaccaaccccagaccggagccagacagcagccaagacccaacagaggaagccgcaag

SEQ ID NO: 235901 - RNA, 71 nt, Homo sapiens
gaacaaacaaacacccagaaacaagagaaccagggggaaggccccgggcagccgagcgccagggaaacaac

SEQ ID NO: 235902 - RNA, 65 nt, Homo sapiens
gcaggagcgcccgcccgagccagcccgccagcagccccagccaaagaccgccagagcggaacgac

SEQ ID NO: 235903 - RNA, 74 nt, Homo sapiens
caaagggcagcaaccaaaagccagggcaggaggaggaagcccccccacacacaaaagggcaaggacagaacagg

SEQ ID NO: 235904 - RNA, 73 nt, Homo sapiens
gccggaccggagacggggccaacagaggggaaagaaaaagagcccaccaaaaggaacagacggccccaggcgg

SEQ ID NO: 235905 - RNA, 87 nt, Homo sapiens
ggaccgcccaaacgcgaccaacacaaccagcagggggcagacccaaaggaaacgcacgaaagaaacaggagagcgcagcgaagcccg

SEQ ID NO: 235906 - RNA, 91 nt, Homo sapiens
gcggccggagacaacgaggcaacgcacccggaccgggccagccggaaccaaaaagaagccccagagccggggccaggagccccaagcgccc

SEQ ID NO: 235907 - RNA, 62 nt, Homo sapiens
aggcaagaggaaggagaggggccaaagggacaacccgagaaaagagcaaaccgccgcagcag

SEQ ID NO: 235908 - RNA, 58 nt, Homo sapiens
gggccaagaggaggggccgaagaaagcgcgaggggcgcgagaccagccccgaacaacc

SEQ ID NO: 235909 - RNA, 79 nt, Homo sapiens
cagcaacagccgccggcggaagcgcagaaggccagacacagaaccaggaaagcaccaccacaaagaggagaagccccag

SEQ ID NO: 235910 - RNA, 75 nt, Homo sapiens
caacgagaccagccaggcccagccccgaagggcacaccggaggcgcccgcagaggcgcacgcccggcccggcgcc

SEQ ID NO: 235911 - RNA, 77 nt, Homo sapiens
ccgcccaagccgcacagccgcggcggcagcagcaggagagacggcccgccacgggccccgcagccgcgcccgagcgc

SEQ ID NO: 235912 - RNA, 81 nt, Homo sapiens
gacccagccaggcccccccgcggagaccagaaagcgggagcccgcgggagaacagagccaaggggaagagaaagcgaagcg

SEQ ID NO: 235913 - RNA, 66 nt, Homo sapiens
gcagccacgggggcaggcgcacacagcggcaaacgaacaaccagaaacgccaagcaggaaaaccgg

SEQ ID NO: 235914 - RNA, 82 nt, Homo sapiens
cggccgcagacggaggaagcacccaagacaaggacgaggcccaaggaaacggcggcgccagcaggacgcgcaacacgcggca

SEQ ID NO: 235915 - RNA, 83 nt, Homo sapiens
gacgacgacaaacacgcagaggaaggagcagcgcaagggggagcgaaaaaggggagacgacaaggacaccgggagcgcgacaa

SEQ ID NO: 235916 - RNA, 74 nt, Homo sapiens
aggagggcacagaggcagcaccgagcgggacgggggagcaggggaaagcgcgagcgagcacccggagcagcaga

SEQ ID NO: 235917 - RNA, 86 nt, Homo sapiens
gcgcacccaaagcccggccaaagcgccgcccgggaggggagggaggcgcgccggagcggggacagggcacagagagcggagcgcca

SEQ ID NO: 235918 - RNA, 73 nt, Homo sapiens
gaggcggaagaggaagagccagcacagacccgaggacggcaccaggacaagcgagggagacacgggcggaagc

SEQ ID NO: 235919 - RNA, 74 nt, Homo sapiens
caagccagaggacaagaaagggacacagaacggacacagaagagaagcgaaggacgacagccaggggaggacac

SEQ ID NO: 235920 - RNA, 76 nt, Homo sapiens
ccgggcccgcgccggcaggccggcccggggcgagccccaggccgccaggcacagagaaggcaaacgggagggcgag

SEQ ID NO: 235921 - RNA, 79 nt, Homo sapiens
aaccaacacacaaagccgcagaaagcagcaggaggaagaggcagagaggacggaccagcaccacccgccaccgcccagg

SEQ ID NO: 235922 - RNA, 84 nt, Homo sapiens
gaccaacacagagcagcggaaccagacaggcaggaaaagacaggccaggagggggccacaccgaacccagccgggaggccaagg

SEQ ID NO: 235923 - RNA, 73 nt, Homo sapiens
ccagcacggcgcaggcggaagcgcacaggaagaagagggggacacccaaagagcaaaggggaccggacaacac

SEQ ID NO: 235924 - RNA, 116 nt, Homo sapiens
caaggaaaccagccagaacaacggccccagccccaacccccagcaccgagaaagagccacgagcaccggccgcagccaagacgggcggcgccccgccggagcccaggacgccggag

SEQ ID NO: 235925 - RNA, 84 nt, Homo sapiens
gaagcccacgaggcaacacgcaaggccgccaccagggaaccacggagaccagaccgcgccacaggacaagaaggccaacaccgc

SEQ ID NO: 235926 - RNA, 61 nt, Homo sapiens
cagcgacccgcgccagcgcccagggggggaaaccaccgaagggaaaagggacccaaagccc

SEQ ID NO: 235927 - RNA, 47 nt, Homo sapiens
caggagcccgagagagaaggagcgccgcaaggcacagccagcccgcc

SEQ ID NO: 235928 - RNA, 86 nt, Homo sapiens
gcccggccggggccgcgggcgcccagagccgcgccgccgcgccgcccgcgccaggcccacccacagccaaaacacccacccaggga

SEQ ID NO: 235929 - RNA, 72 nt, Homo sapiens
gcggaaccagagggaagcgcggacggaggcagcggggcagcacaggaaaccaccgcggggcaagaagaggga

SEQ ID NO: 235930 - RNA, 70 nt, Homo sapiens
aaaggggaacggaaaaccacagccggggaaagcaagcagaagcggagaaaagagcaaccaccgaaacggg

SEQ ID NO: 235931 - RNA, 62 nt, Homo sapiens
cccacagggacccagccagagacaggggccaggccaggggcaggggaagcacccaaccaacg

SEQ ID NO: 235932 - RNA, 39 nt, Homo sapiens
gcccaaaccacaagccacaaaagaaccgaacaaagggag

SEQ ID NO: 235933 - RNA, 74 nt, Homo sapiens
gccaagacaagaccggcacaccaggccagccaagccgggagggaacgacgcagcaacgacacaagcagaacccc

SEQ ID NO: 235934 - RNA, 77 nt, Homo sapiens
aggggaagacccaaaggcagcaaaaacaagagccccaaagcagccaaaagggcagcgaacacggcacgggcaccaaa

SEQ ID NO: 235935 - RNA, 78 nt, Homo sapiens
gcgagccccagcgccgcccacccgccgaacccgcgacccgagcgcaaggaaaggaacaccacggggaacagcggggac

SEQ ID NO: 235936 - RNA, 37 nt, Homo sapiens
agaagcaccgagacccaagaaagcccggaccacagag

SEQ ID NO: 235937 - RNA, 84 nt, Homo sapiens
ggagcggccagccgacaggcggggagacacagagcaccagccagaggagagggcccagccgccccgcccccccgcccccgggca

SEQ ID NO: 235938 - RNA, 83 nt, Homo sapiens
cgggagcgcaccggaggcagccggacgcagacaagacagagccgcagccaagccccaggagccccggccaaccaacgagcccc

SEQ ID NO: 235939 - RNA, 85 nt, Homo sapiens
ccaccaccagaaccacacccggagacccagacaacacaggggagccgccaccaaaagcagacggaaaacccacggggaagaccac

SEQ ID NO: 235940 - RNA, 74 nt, Homo sapiens
cgggacacgagaaccagcaacccagaggaccgcaacaccaggacagaacaagacaacccgaaccaccaccagca

SEQ ID NO: 235941 - RNA, 54 nt, Homo sapiens
gcaccgaccaaacaagccagcagcaacagaaccccagggacaggcacccaccgc

SEQ ID NO: 235942 - RNA, 70 nt, Homo sapiens
cggaggacagagaagccccggccgggccggccagcgccggaaaccaacaaggcagcagggcagaccaacg

SEQ ID NO: 235943 - RNA, 72 nt, Homo sapiens
agaacagccggcaagagcacaggaagcaagaaccagaacccggcgaaagcaaaagcagagcggacggcacca

SEQ ID NO: 235944 - RNA, 78 nt, Homo sapiens
ccgcggccacccaaccggagccagacaccacgagcccggaagacggaggcacgagggcaccaggaccccggagcggcc

SEQ ID NO: 235945 - RNA, 74 nt, Homo sapiens
cacaccgccggggaccgaaaaaaggaccgcccaaccgcggcgccaagacgggaccacggaaggagccggaaaaa

SEQ ID NO: 235946 - RNA, 75 nt, Homo sapiens
aaccccggggcacgcgcccacaggcgcgggacagggagcaacaccggagcgggcacgcggggggcagagcacgcc

SEQ ID NO: 235947 - RNA, 59 nt, Homo sapiens
caaaccacagcaagaccgcggaacacaggggcagcaaggggaacacccaggccaggagg

SEQ ID NO: 235948 - RNA, 88 nt, Homo sapiens
gacccccgaacccccagcccaaacccggaaacccagcggcccagccgggcaccgaggaggagcccagcccaaccacacggcagaccag

SEQ ID NO: 235949 - RNA, 79 nt, Homo sapiens
agcgcgacgcacaggagcacagaaacaagagcagaagccagcccaacaagacggagcaacgagagcaaaacaacaagag

SEQ ID NO: 235950 - RNA, 89 nt, Homo sapiens
gcgcgcgggaggcggcggcggaggaagccggagacagcaggggacaggggaggacccgcagaccgagacacgccagcagcacccggggg

SEQ ID NO: 235951 - RNA, 80 nt, Homo sapiens
cccagcaggcccccaacgggcccgcccaaccaccacagccccgacaccaaggccgcgcagccaaaccgacgccgggaggg

SEQ ID NO: 235952 - RNA, 54 nt, Homo sapiens
ccgaaggaccaccccgagagcaaaccaggcgagacagcaggagcaccaaacccc

SEQ ID NO: 235953 - RNA, 75 nt, Homo sapiens
gcaggacccgcaggccagaccccgggagcccagccaccacagacagggcccgacccaggcaagcgagcaggcgag

SEQ ID NO: 235954 - RNA, 59 nt, Homo sapiens
gccccaaccagcgcacgcaggagcgcagaccacagggggcaagaccagagaccacagac

SEQ ID NO: 235955 - RNA, 85 nt, Homo sapiens
gacaggacccggcgccgggcacgagcaccgccaccaggggaagggggggcaaaaagaggaaagagagaagaccgaaagaggaacg

SEQ ID NO: 235956 - RNA, 73 nt, Homo sapiens
caccacaggccagaaggggagcgaacggccccagaggaggagaaaacaccgcggcagggccacaccaaccaag

SEQ ID NO: 235957 - RNA, 65 nt, Homo sapiens
cccggcgcgccagcgcagcccgacgccgcgcgggagagcagcaccagcagaagagggcccgacca

SEQ ID NO: 235958 - RNA, 83 nt, Homo sapiens
ccccgccccgcccccggcggcggcggaggcgcgccgagaaccgacgagggggccgacgacgagccccgcgaggagcgcagcgg

SEQ ID NO: 235959 - RNA, 84 nt, Homo sapiens
ccggccagaagcgggcggcgcgggggagaggccgcaggagggaagcgcacggaaaccgccccgggaggcacagagcaggagacg

SEQ ID NO: 235960 - RNA, 77 nt, Homo sapiens
agggccgagcaccggagaaaacacaaacccaggagcaccacgcaacaagacgaaaaacgcgaagaaaaaaccaaaca

SEQ ID NO: 235961 - RNA, 75 nt, Homo sapiens
gggggaagcggcagcgaggggccggagagggccggaccgagcggccggggcaggaacggagccgaagagagagga

SEQ ID NO: 235962 - RNA, 79 nt, Homo sapiens
caagccgcggcagccgcggaccaccgccgccaggagcacgcgccaagggcacacgcagagggaggaaccggagaggccg

SEQ ID NO: 235963 - RNA, 75 nt, Homo sapiens
gcgaaaaccaacgcccccccagcacacagaggagagcgacgagaagacaaagacaggggccaggacaacgacaag

SEQ ID NO: 235964 - RNA, 62 nt, Homo sapiens
ccgacaacgggggccaaggcggccacgggcggacgaaagaaagaaggagcaccaacgcaaag

SEQ ID NO: 235965 - RNA, 85 nt, Homo sapiens
ggagaacccaggggaaaacaggaaagaggcggagagcgacagagaagcacaggaaagagaccacccaacggcaaaacaagccaca

SEQ ID NO: 235966 - RNA, 74 nt, Homo sapiens
gaacacaagagggcgccaccaacagaaaaaaaaaagaccaaaaggagcagaaaacacagaaacagcgaggccgc

SEQ ID NO: 235967 - RNA, 78 nt, Homo sapiens
ggaccccgaagccgcaacccggggagggcccgcggcgcgagaggaccccccccagagggggacaccaggccagaccca

SEQ ID NO: 235968 - RNA, 66 nt, Homo sapiens
gcagaccgcacaagcagccccggaacacacagacaaagggcggaagaaacgggcagaacaccacgg

SEQ ID NO: 235969 - RNA, 73 nt, Homo sapiens
aacagacccaagcagggcccaaccgggcaacagcaccgggccacacagcgaaggccaaaacccgggccagccg

SEQ ID NO: 235970 - RNA, 49 nt, Homo sapiens
gagggcaaggccgcgcccggcagggcagcggccggaaacgaaacagcgc

SEQ ID NO: 235971 - RNA, 85 nt, Homo sapiens
cggcaggaagccaaggcaccgggacgcgcacccccgcgccgcacggggacgagcccacagcccccacccgagcccccggacggag

SEQ ID NO: 235972 - RNA, 83 nt, Homo sapiens
gacaaacacgcaaggacccccccggccaagggcaagcaaggaccagcaacggagcgaggagcggccgaacagggggaggagac

SEQ ID NO: 235973 - RNA, 75 nt, Homo sapiens
ggagggaccagcgagcggaaagcaaaccccacgagaacaaagcacggcagaaacggaaaaaaaccaagaaagccg

SEQ ID NO: 235974 - RNA, 48 nt, Homo sapiens
gagagggagagccaaagaagcgagaacaagccaaagacagaccgccag

SEQ ID NO: 235975 - RNA, 37 nt, Homo sapiens
cgagcgcaacgggaagagaggcgacccgcggcgagag

SEQ ID NO: 235976 - RNA, 65 nt, Homo sapiens
gacgccacaccagacgagcaagcacaccgaccacaacgccggcacgagggcgcgccagaggacac

SEQ ID NO: 235977 - RNA, 74 nt, Homo sapiens
accacaaacaagccaggaaaagaaggggaagcacaaaggagcccaagaggacagagaacgaagcacagaaaagc

SEQ ID NO: 235978 - RNA, 76 nt, Homo sapiens
gaaccagccacagcggggcggagagaccagaggacaagacaaagggagcaagacaagccaaagaggaaaagcaaag

SEQ ID NO: 235979 - RNA, 96 nt, Homo sapiens
ggccaggaagcccccccgcccgaggagaaggagaagccacacaagaaggacagaaaacgggccccagacacaagccccaccaagaggacaccccag

SEQ ID NO: 235980 - RNA, 73 nt, Homo sapiens
ggacccccgagacaaccacaaaacccaagaaacagagacagggaaaggaaaggggagaaggcacaaccgaggg

SEQ ID NO: 235981 - RNA, 75 nt, Homo sapiens
aaccacggcaaaccaacaagccaggacccgaaaagccagcaagcgagaccaacaccaacacgagggcggcggaaa

SEQ ID NO: 235982 - RNA, 79 nt, Homo sapiens
gccgccgccccggagcgccggggcgaaaccaggcccaaaagaccaccagggagaccccggaagaagacgaccagaaaga

SEQ ID NO: 235983 - RNA, 81 nt, Homo sapiens
cccgcaccaagccgcccacacgccaaccggccagaggacgagggacgagcgccgagggcagggcgggcccaccgccccagc

SEQ ID NO: 235984 - RNA, 79 nt, Homo sapiens
gcagcaggccagcggccggcgggagacgcagcgcgacccagcagcccgagaacacgaaacaaggaagaaagaagcaaga

SEQ ID NO: 235985 - RNA, 54 nt, Homo sapiens
gaggaaacacagcagaaacaaagaagcagcgcgaaagcgaaggagccaagagac

SEQ ID NO: 235986 - RNA, 77 nt, Homo sapiens
caagggaccacaaaacggaggagagagggccgagaggacgaaaaaagggccggcccgaaaggggaccagaccgaggc

SEQ ID NO: 235987 - RNA, 71 nt, Homo sapiens
caagaaaaggagccggaaacggacaaacagaaaagaaagccgagggaaaaaccggagaagagaaacaaaag

SEQ ID NO: 235988 - RNA, 68 nt, Homo sapiens
ccgcagacgcgaaggaacggcaaaggaagcaaagacccacagaagcccagcacaggaaagagcgaaga

SEQ ID NO: 235989 - RNA, 81 nt, Homo sapiens
gcagccagagcgcagaggcggcggggcgagagggcggcgaaggaggcagaggcacagcgcagggggagacgccgcaacaaa

SEQ ID NO: 235990 - RNA, 53 nt, Homo sapiens
gcacagcacgggcagagccagaacacgggcagaaggagaccacacgagaaaca

SEQ ID NO: 235991 - RNA, 73 nt, Homo sapiens
ccaacccacgccaaaacgaccagcagcgaaaccaaggccggggcccaagggaggaggaccagagggcagggaa

SEQ ID NO: 235992 - RNA, 82 nt, Homo sapiens
cgggaacggcgcggaagccacaagggcgcagaagccggcagagcccaagagacaacaagccgaaaagagaggcaaacgccag

SEQ ID NO: 235993 - RNA, 71 nt, Homo sapiens
cgccggaccgagaaagggaaaaagaaaagggcagacaggcccgggagccagaagcacgcaaggacaaagcg

SEQ ID NO: 235994 - RNA, 57 nt, Homo sapiens
aggaagaagaaaacccgcaacccccacagccagggcacaccgacagagaacccaggc

SEQ ID NO: 235995 - RNA, 66 nt, Homo sapiens
gcggaccccccgccaccgcccgagcccaggaaaaagcaaaagggcccaaggcccgaccaggaacaa

SEQ ID NO: 235996 - RNA, 82 nt, Homo sapiens
aggcgccgggaccccaggccagacagggccgaggccccagagaaaccaacaggcaccccggggggggcggccccccgaagag

SEQ ID NO: 235997 - RNA, 107 nt, Homo sapiens
gggaacggccgcggagcgcccggggcggcccggcgcggcacagcgccgccagcagggccgaccaggaacaggaggcccggacccccagcacaagcgcaggccagggg

SEQ ID NO: 235998 - RNA, 58 nt, Homo sapiens
acaagcagagccggcaccacaggaagccgagcaggagggagccaggagcgcgggagcg

SEQ ID NO: 235999 - RNA, 50 nt, Homo sapiens
ccccaaaagcggaacaggcccccaacgaccggcagacaggccagaggaac

SEQ ID NO: 236000 - RNA, 49 nt, Homo sapiens
gagcaggaaccccaggaaacggccaggaacagagccgacaggcacgaag

SEQ ID NO: 236001 - RNA, 70 nt, Homo sapiens
ggaaaacaggcaaaaggcagagaccaaagaggaaggagggaaacaccacaccagagaccccggagaaaag

SEQ ID NO: 236002 - RNA, 74 nt, Homo sapiens
ggcgacgccccaggggaaaacccccgggaccagggaaccgacgcaaccgaggccgagggcaggaccgaacacga

SEQ ID NO: 236003 - RNA, 79 nt, Homo sapiens
gaggagcgacgaagagacacgccaaggaggacaaaaagacagccgccccccccccgaaagggggagacacagccagagc

SEQ ID NO: 236004 - RNA, 55 nt, Homo sapiens
cagcaagggaacaacaacaggacgccacaggcggcaggagaaccaccagagccgg

SEQ ID NO: 236005 - RNA, 80 nt, Homo sapiens
agaggacgaacacaaggaaaaggagaagggagcaccagcgcccaggcggagccccccaacagagcgagagaggcacggag

SEQ ID NO: 236006 - RNA, 74 nt, Homo sapiens
cagaagcgggcggcgcgggggagaggcgagaacgcggacaagcaaacaaagaggaaaaagagggcaacagcgaa

SEQ ID NO: 236007 - RNA, 78 nt, Homo sapiens
caccccgaagcacccaggacgggcgcccacagagaggcgcccgagaacacgaaacaaggaagaaagaagcaagaaaaa

SEQ ID NO: 236008 - RNA, 73 nt, Homo sapiens
gggcggccccgaggaagcaaggccgcggggggagaccccaccaccggagcaggacacgagacacaggccgcac

SEQ ID NO: 236009 - RNA, 78 nt, Homo sapiens
cgaccccccgccggagagaggaccgggaccggcgggccgggggcgaaggagaagccccggggacgaagacgccccccc

SEQ ID NO: 236010 - RNA, 71 nt, Homo sapiens
ccaggcgccaagcaaaggacagcaacggacacagaagagggcgggagcgaccccggcaggaaggcgaccca

SEQ ID NO: 236011 - RNA, 81 nt, Homo sapiens
gaggcgaggcgcccggcccccgcccgccgcgcccagagaagggagcacgcacgcgcaagaggaagacggcaccggagcacc

SEQ ID NO: 236012 - RNA, 76 nt, Homo sapiens
ggcaagcgggccacgcacccgcaccaaggccaagacagaagaaacgggaggcacgacgagagcgaagacacagaaa

SEQ ID NO: 236013 - RNA, 75 nt, Homo sapiens
cccgacgacacgaagcaagcagagccggaggagccaccaacagaagcaggagccaggaaaccaaaacccacagag

SEQ ID NO: 236014 - RNA, 59 nt, Homo sapiens
agaacgaacaccggaccgccaggccgagaaacagacaacccacagaacaaagcggacca

SEQ ID NO: 236015 - RNA, 61 nt, Homo sapiens
caaaagccaagggccccacagccaaacaagacacggccggccgcaagacgccacggaaggc

SEQ ID NO: 236016 - RNA, 74 nt, Homo sapiens
ccgaggcggacagccaagacaagggccgcacggcgcaggggacccaccgggcagggaggcgccacaccaccacc

SEQ ID NO: 236017 - RNA, 68 nt, Homo sapiens
gaaccgcacggggcacggagggcccacgaggccgagaacaccaggcgggggagcaagagacgaggaag

SEQ ID NO: 236018 - RNA, 78 nt, Homo sapiens
ccaagcacaggagaaggcgacaggaaccagccgggggccaaccgaggagccacgcagcagcggccaagaagaaaaagc

SEQ ID NO: 236019 - RNA, 76 nt, Homo sapiens
gaccaggcccgggggcggcggccacgccaaggacggggaacggagggaaagcgacaaacaaccaacccacagagac

SEQ ID NO: 236020 - RNA, 83 nt, Homo sapiens
gccccaagccggaagaaccgcagccgagcggggccggccacaggggaacaaccaaagaacaaagaaggggacaggcgcacaaa

SEQ ID NO: 236021 - RNA, 74 nt, Homo sapiens
cggaggggcaagaacaccgaggggccgggaacggcgccggaggaccagacccaggaggggcgccagggaaggac

SEQ ID NO: 236022 - RNA, 73 nt, Homo sapiens
acaaaagcgaaagggcacaccacagcggaagcgaagaacggggacggaaacgggacccacaggcacagggacc

SEQ ID NO: 236023 - RNA, 75 nt, Homo sapiens
agcccgacagccaagcagaaacggcaggaaagccagaagccaaggagcaaaaacaccacggcagccagcacaaac

SEQ ID NO: 236024 - RNA, 66 nt, Homo sapiens
agcccagagaggcccacaaccaagccacaaaagacacgccacaaccgggaagaaccgaagacccag

SEQ ID NO: 236025 - RNA, 72 nt, Homo sapiens
ggggagcacagagcgagaccaggaaagaagggggcagaagagggggacaacccgccacaacgacaaaggacc

SEQ ID NO: 236026 - RNA, 63 nt, Homo sapiens
gcaggggcccccacacggccgcccccaacaagcagaaacagcgagcccacccaccgaagagca

SEQ ID NO: 236027 - RNA, 70 nt, Homo sapiens
gcacacgcaggggacacgggcacaggcccaggaccccccagcacgacaagaacgccccgagaaaaggagc

SEQ ID NO: 236028 - RNA, 55 nt, Homo sapiens
cggcacagccaagcaggcacggaagacggggcgggagcaggagcccagaccgaga

SEQ ID NO: 236029 - RNA, 101 nt, Homo sapiens
gacggagaaagagggaccaaagcacagaggcgggccaaaggggaggcaccacaaggagaagccaacgcacacgaggcaacgcggcgcaaccaggaacgcgg

SEQ ID NO: 236030 - RNA, 70 nt, Homo sapiens
ccccgggggaaaagaacgagaaaacggggacggacccaggccaggaaagaaagaaccgccacgggcgcgc

SEQ ID NO: 236031 - RNA, 91 nt, Homo sapiens
ggagcaagagaaagacccggggaaaaaggagggagaacagaggccggcccagacgggagacagaccgaaagaaagagggaccaaagaagac

SEQ ID NO: 236032 - RNA, 74 nt, Homo sapiens
ggacaaaccgccacgggcaccaggaggaacaaaacagccgggacagggccagaagcgagcaccaaagcaaagac

SEQ ID NO: 236033 - RNA, 72 nt, Homo sapiens
aacccaagcagacagaaggaccaaaagaccaacaggaggcaaacagaagcccacccccaacggggcaaccag

SEQ ID NO: 236034 - RNA, 77 nt, Homo sapiens
cgcgccggaaaccggagcgcgcagcaggcccacgaagaggacgccagggccggggcagaccaccaggacggcccgac

SEQ ID NO: 236035 - RNA, 74 nt, Homo sapiens
gcacaggcacaagaaggggcgagaccccacacccagccgacgaaggggacccgagggagaaacccaaccgaggc

SEQ ID NO: 236036 - RNA, 77 nt, Homo sapiens
ccaccaaggacagcccagccacaccccaaaagggaaaggcgccacaggagccgcagaagcaaaggcaccgccaaacc

SEQ ID NO: 236037 - RNA, 58 nt, Homo sapiens
ggacaagcagcagaaaacagcaacagggacggccaagaaggccaaccagccagagggg

SEQ ID NO: 236038 - RNA, 80 nt, Homo sapiens
ccccagcgccgacggcgacgcggggccgagcaacccggcccggacaagagggaaagacgaagggcgggaccgcaaaaaag

SEQ ID NO: 236039 - RNA, 71 nt, Homo sapiens
acaagagccaaggaaagaagccgcaggagcaaacgaaaaacggaaaagaaggaaggcaagccccacaggag

SEQ ID NO: 236040 - RNA, 38 nt, Homo sapiens
ggcagaccgaccaaacagaccaaaacacgcgacgagag

SEQ ID NO: 236041 - RNA, 81 nt, Homo sapiens
gcacaggcacacaaggccggcccccagcagccgaagaaagcgggcaaagcggaagcaaagaaacagccccgcaacaccaaa

SEQ ID NO: 236042 - RNA, 61 nt, Homo sapiens
gccaacgagggcgggaaagcaggggcaaagaaaaagggaccgcaccaaacccaaagaaagg

SEQ ID NO: 236043 - RNA, 66 nt, Homo sapiens
gcacccggcacgccacggcgccccgcaaggaagaccgcaggaaagcaggaaggcaagaaagccaag

SEQ ID NO: 236044 - RNA, 62 nt, Homo sapiens
cgcggcccggcagggggaacgggagggggacaacggcaagcggagaagagcaaggccgaacc

SEQ ID NO: 236045 - RNA, 72 nt, Homo sapiens
accaaacagcaagggaagcccgcgcagaacccagaaaacagaacaccacgggacaaagccagaaaacacgcc

SEQ ID NO: 236046 - RNA, 58 nt, Homo sapiens
gagaaagcccggagggcgagggaaaaaccgccaaacgaagcccgagaagagagaacaa

SEQ ID NO: 236047 - RNA, 73 nt, Homo sapiens
gcgagaaggaggagcccccgcccggcagccaccccacgggaaccaaccgccagccgcgcccccagcagaaggc

SEQ ID NO: 236048 - RNA, 77 nt, Homo sapiens
cacccaaaggagaaacaccaaaaggaaccgcagcaccagcccgaagaagccgggcagaccaggcagcagcggaaagg

SEQ ID NO: 236049 - RNA, 87 nt, Homo sapiens
agcagaggcgggggggggaaagacgaggaaagaggaggaaaacaaaagcgcacaggaagaacaaagggagaccaccgagaagcacag

SEQ ID NO: 236050 - RNA, 39 nt, Homo sapiens
agaaaacggcaaggaagcgagaaaacgaccgcaaaaaga

SEQ ID NO: 236051 - RNA, 78 nt, Homo sapiens
ggaagagcgagagaagcggcggaggacgagcccgggagcgacccgcgcaaacaaacaggaaggaagacccacaagaga

SEQ ID NO: 236052 - RNA, 75 nt, Homo sapiens
ggccaaagaagggagagagcaggccagccacgaaaagacaccagagcgaagaacacccagcccccagaaaccaaa

SEQ ID NO: 236053 - RNA, 77 nt, Homo sapiens
cggacgccagcgccggccccccggcggagaagaagcgcggccgcaccggccaagacagacagaaagcgcccaggaca

SEQ ID NO: 236054 - RNA, 62 nt, Homo sapiens
gggacaccccagccccccagacggacacggaggaccgaggaagaaggcacgaccgacacaag

SEQ ID NO: 236055 - RNA, 80 nt, Homo sapiens
ccgcgaggacaaggcaagcaggaacaccagggagcacccaaccgagaacaccaaccacaacgaagacaacaccggaagac

SEQ ID NO: 236056 - RNA, 68 nt, Homo sapiens
agaggcccccgccgagcacggaacggcaacgaaaagagacacgacgcaaacccccaagagaaacagca

SEQ ID NO: 236057 - RNA, 79 nt, Homo sapiens
caagaaaaaaaccgaggaagggagaaagagcaaaaaccgacccgccgcaaaccagaagacgaggagccgccgcacccag

SEQ ID NO: 236058 - RNA, 70 nt, Homo sapiens
ggggcccaggaagggacacaccccgcaggaaccggaaacgcacaagggagagcgaggaaaacgccacgac

SEQ ID NO: 236059 - RNA, 83 nt, Homo sapiens
gaaaggcgccaggcagccgagcggagcggaagcggacgaggagcgcggcaagggcggaccgcgggccacagccgagaagagga

SEQ ID NO: 236060 - RNA, 68 nt, Homo sapiens
cggcgcaaaccagcaacccagccagcaggcaacaggcccagaccaggcccaaagagcccaccaacagg

SEQ ID NO: 236061 - RNA, 71 nt, Homo sapiens
gcaaaccgcccgacacggagaagagccgcacaagaacggagacgagcagggggaggaacaaagcgaggaag

SEQ ID NO: 236062 - RNA, 77 nt, Homo sapiens
cacaggccccggaagaacccagacaccaggcaagaccgaaggcaccagacccccgaagacagaggcagaaaaagaaa

SEQ ID NO: 236063 - RNA, 82 nt, Homo sapiens
gccacgaccaagaagaagccgcggacccgcgagggacaccggcccaggcggaggcaggggcgaccggcccgcaaccccgccc

SEQ ID NO: 236064 - RNA, 86 nt, Homo sapiens
cgcgcacgacacggagaaagcagaaaacagccacaagcaggacaagggacacgggacaggaagcgaaaagagacacacaacaaaca

SEQ ID NO: 236065 - RNA, 71 nt, Homo sapiens
ccgggcggggccgcgccacagccaagcagagggcacccaccggaccgagccaggcgggaggggcgaacggg

SEQ ID NO: 236066 - RNA, 59 nt, Homo sapiens
ccgaccccgaggcgagacggaaaggaaaccccccaggcaagaggcgcaggaccgggaag

SEQ ID NO: 236067 - RNA, 67 nt, Homo sapiens
acccccacgcggccagcgaaaacgcccaggacaaggcacgaggcgcggcgaccaccacagcagagcc

SEQ ID NO: 236068 - RNA, 78 nt, Homo sapiens
acgagcgccacgcccccgggcgggagagacccacggccacggccagaggaccccaacacaacaacagcaacggaggcg

SEQ ID NO: 236069 - RNA, 76 nt, Homo sapiens
cgcacaagccggcagaagagcccacagcacaaaaacacaccgaaccccagacggcaaaagcaggagagagcacgaa

SEQ ID NO: 236070 - RNA, 70 nt, Homo sapiens
caaaagaaaaaagggacccacccagaaaggaaggcagaggaagccacggccacggacccggcgagggcca

SEQ ID NO: 236071 - RNA, 83 nt, Homo sapiens
cgccgcacaccccaccagcccggggcccccaaggcaagccccgaggggaggccacgcacgggcggagacgagacccgaggcgg

SEQ ID NO: 236072 - RNA, 80 nt, Homo sapiens
ccgccccacgaagccagaaagaagccacccagagagaaccagcgggcgacgcacgaggcacacaggaaggaggggagcag

SEQ ID NO: 236073 - RNA, 64 nt, Homo sapiens
caaaaaaaaccaacagccccccaggggagaagcagaccgcaccaggcgggaccccgaaaaagcc

SEQ ID NO: 236074 - RNA, 78 nt, Homo sapiens
aggaaacgggggcaaagcaaaaaggacaaagcggccagaagaaaagagaggggcccccgggaacaaaggaagaaacga

SEQ ID NO: 236075 - RNA, 77 nt, Homo sapiens
acaaaaccccgaaaaaggcaaaggccaaagaagagacgaagcaaaggcgcccggagccccagaaccgaagaagagcc

SEQ ID NO: 236076 - RNA, 85 nt, Homo sapiens
acccgcacggccagcggcacggcaggagaagacggaggcccaaccgagcagggacagcggcgcaaacaccccgccaaaagcaggc

SEQ ID NO: 236077 - RNA, 92 nt, Homo sapiens
cgagcggaccacggagcccgggagggggcagcgggggcagagacggggaacagggccacccacacggacgccaacgcgggggcagaaccgga

SEQ ID NO: 236078 - RNA, 58 nt, Homo sapiens
aggaagaagacaccggggacagacagggggagcacgcacccgcaggcagcggggcggc

SEQ ID NO: 236079 - RNA, 61 nt, Homo sapiens
aacagggaagacaaaggcacaggaaacagaaacggccaggaaaggaagaaccagaacacaa

SEQ ID NO: 236080 - RNA, 83 nt, Homo sapiens
ccggagaacggccaggcggccccgagcggaacggagaaagcgaggaaggcgcaagagggaaacccaaaagaagcaaaacagag

SEQ ID NO: 236081 - RNA, 78 nt, Homo sapiens
agaaagggcgccccccacacaaggacaggaccgcaagcccgcagggacgaggccccaagaaaaagcggggaagggggg

SEQ ID NO: 236082 - RNA, 55 nt, Homo sapiens
gcaaagaggggccggaccacaaggcaagagcaggaggaacgaagaccgaccgggc

SEQ ID NO: 236083 - RNA, 54 nt, Homo sapiens
gagcagggcagggaaaagcgccgggcggaccagcagaaaaccagagaaggagag

SEQ ID NO: 236084 - RNA, 80 nt, Homo sapiens
cggacaggagcgacggagggaggggagacaccggagagggaagccacacacggagaaccacggggaccaagaagcgagca

SEQ ID NO: 236085 - RNA, 58 nt, Homo sapiens
gaacaccaaggaagcaaaagccccagaacgaacacagcacccacccacacccacaccc

SEQ ID NO: 236086 - RNA, 69 nt, Homo sapiens
ggacaaacagagaacagcaggcccccacagagagcacacaaacaaagcgaaaccacggaagaaaagggc

SEQ ID NO: 236087 - RNA, 70 nt, Homo sapiens
gcggagggagcgagccgccccgagaaaacccgcagcccaaagggcagaagaagaagaagacgcaagacgg

SEQ ID NO: 236088 - RNA, 72 nt, Homo sapiens
aacaaagaaccaaagcagcgaccccagcagcagcgacagaccggccccaggggagagaggccaggagaggaa

SEQ ID NO: 236089 - RNA, 75 nt, Homo sapiens
gcacgcaacccgaggcgcggaccccggcccacaacgccacgcaacaagccagggaagcacagacggaccacagcc

SEQ ID NO: 236090 - RNA, 78 nt, Homo sapiens
cccccaagggacccggaggaagcagcaccagaccaaggccgagcgaggaagacaaaccggccgccgcccaccccccgg

SEQ ID NO: 236091 - RNA, 74 nt, Homo sapiens
cagagcccagcagccaaaccacagaacaggcgaaagaaaccagaggagaaggagagaaaagaggaaggcaggag

SEQ ID NO: 236092 - RNA, 76 nt, Homo sapiens
accccgccagcacccggcgagacgacaggcccagggacggacgggaaacgaaagaggaaaaccaaccccaaagaag

SEQ ID NO: 236093 - RNA, 109 nt, Homo sapiens
gaggacaggcaggagggacaagaccggaccagccagaggacgcgggccgaggagagcggaggagggggccaagaaaggagcgagggacggcggcgaggaccagcagccc

SEQ ID NO: 236094 - RNA, 74 nt, Homo sapiens
gggacacaccagaaaacggacccaaaccaaaaagggggaagaaagaaaaccggccagcagcagccacggaaaag

SEQ ID NO: 236095 - RNA, 79 nt, Homo sapiens
cccccgccgcgcagcccccgcgcgggcagccaccccgcccccgccccccccgccgcaccaggaacgggaagggcacagg

SEQ ID NO: 236096 - RNA, 74 nt, Homo sapiens
ccgggccgagccaacaggaccagcagggcgggcaggcccacacagccccacgccggcgcccaccagcggcgcca

SEQ ID NO: 236097 - RNA, 74 nt, Homo sapiens
gaacgacggggagacaaccccagcaccggcgaccggcccgaggaccgccgcacgaccaaacgcagaacccacac

SEQ ID NO: 236098 - RNA, 53 nt, Homo sapiens
ggaaccacgccgaagcccccagacaagacagcagaggcacacaaacggaaccg

SEQ ID NO: 236099 - RNA, 77 nt, Homo sapiens
gaggacacaaaagaccggaaaccaagcaagaagggacgaagagccagcgaggcgcacaacggggaagcagccaagaa

SEQ ID NO: 236100 - RNA, 81 nt, Homo sapiens
ggcgccccgcgggcggcgcgcgcgggccaggccacaaagccagggcccaacagcaggaaagacggaaggaaacgaagggca

SEQ ID NO: 236101 - RNA, 36 nt, Homo sapiens
cgagcccaggcaagaaggacagcagagacagacgaa

SEQ ID NO: 236102 - RNA, 39 nt, Homo sapiens
cggcgacagaagaagcaaagcaagaacggaagcacgggc

SEQ ID NO: 236103 - RNA, 76 nt, Homo sapiens
accaagaccgaggcgaagcaagcacacaacaaacagaacgcaaagaacagacaacccagcaacagacggaacagcg

SEQ ID NO: 236104 - RNA, 53 nt, Homo sapiens
cagcagaagacaggaagcaagcgagggccccaggagcccaaggccaacaccaa

SEQ ID NO: 236105 - RNA, 70 nt, Homo sapiens
gggacacgcggaaggcagccgagagagcgggccccgggcgcgggagccagccgaagaaaggaaaagagag

SEQ ID NO: 236106 - RNA, 74 nt, Homo sapiens
cgagcaaaggaagcgcgaacagcagcgcaggcaaggacggggacacaagaccagccagcccagccacagagaca

SEQ ID NO: 236107 - RNA, 56 nt, Homo sapiens
ccgggagcggcgaagaggcaccggaggagggggaagcgagagcaacgagagagaca

SEQ ID NO: 236108 - RNA, 72 nt, Homo sapiens
gaagaaccagcagcggaccggcaaaaaagcaaagaaagaagcaccgaagggcccaaggaccagagcagggca

SEQ ID NO: 236109 - RNA, 84 nt, Homo sapiens
cggaccccagcgccgggcagcgaggcgcgggagagcagccggacccagaccagggagcccaggaggaggaaggaacccgaggag

SEQ ID NO: 236110 - RNA, 75 nt, Homo sapiens
gccccgcccggcggggaagcgggaggcgggcggcggggcggcacggcggccgccacacaggggagccgccacgcg

SEQ ID NO: 236111 - RNA, 76 nt, Homo sapiens
cccaccaaagccgccgcgcaagccgcaaacagaccaaaccacgaggaggagaccggaaaagggcccggcaggaacc

SEQ ID NO: 236112 - RNA, 47 nt, Homo sapiens
ccacaagggaaaggaaaggacccccccaggagagagagagaggccag

SEQ ID NO: 236113 - RNA, 70 nt, Homo sapiens
cgcagccgccaaacaggagcaaagaaccgggcccagcgaaacaccggggaaaccggaaaccagcccagcc

SEQ ID NO: 236114 - RNA, 72 nt, Homo sapiens
gaaaaacccgccccccaacaccggacaccgagaggaaccacaagcagcagaagaaccaggacaagaacgcgc

SEQ ID NO: 236115 - RNA, 71 nt, Homo sapiens
ggggccaagaccaaggcccccaggcagcaccaagcgaaagcaagcagccgagccgaagagaacgacacaaa

SEQ ID NO: 236116 - RNA, 79 nt, Homo sapiens
gaagcaaagggacaggagaccggagaaagcaaacaagagggaagcggacacacaggacgagaaacccgaccacacccag

SEQ ID NO: 236117 - RNA, 77 nt, Homo sapiens
gccggacagcggcgagagagccagagccgaggggagcccgccccccggggaagcggggagcagacaacagggagacc

SEQ ID NO: 236118 - RNA, 90 nt, Homo sapiens
ccgcggcccgggccgcaccagagcgcccggcccacgacacaggaagaagacaggacaagcccaaccagggaccaggccaaaaccagacgc

SEQ ID NO: 236119 - RNA, 81 nt, Homo sapiens
caggacacacgagccagccaagaaaaggccagacggccagcagccacgccaggcaccgcccaggccaggaacagggacgcc

SEQ ID NO: 236120 - RNA, 82 nt, Homo sapiens
aaacgaaccagacggagcccgggcaggaaacacaccagcaacacccggaacacacggagaagaaaaggcagacaaaccagac

SEQ ID NO: 236121 - RNA, 77 nt, Homo sapiens
agaaaagggaagcacaaaaacaaaaaggaaaaccccgaaccacgcgaacaggccaaaagaagcaaagacccaccagg

SEQ ID NO: 236122 - RNA, 74 nt, Homo sapiens
aagaaacagacagaagggaggcaaagaaaaggagaaaagaagccaaagggacacgcggagcagggagagcagga

SEQ ID NO: 236123 - RNA, 73 nt, Homo sapiens
ccacacgacacgcgagagccagggacaagaacaggaagaagcgaagagcaggccacccagagacagaacgcca

SEQ ID NO: 236124 - RNA, 83 nt, Homo sapiens
agcgcagaaagcaggcgaacccgcggcgcaaaacggcgggcaacacaacaaggcgcggacacccagacaagcgcgccaccggc

SEQ ID NO: 236125 - RNA, 65 nt, Homo sapiens
agcaacgaagcagccgagacgaggagaaaacccagaaaaaagggcagcacccgaaagagcgaaag

SEQ ID NO: 236126 - RNA, 81 nt, Homo sapiens
agaggggggacggagggacccccccgagaacaagaaccccgaccagacccaccagcaaaacaaggcagacacccaccaccg

SEQ ID NO: 236127 - RNA, 85 nt, Homo sapiens
gggacccaaaaagacggacagcccacgggaacaagaggggacagaaagacaacaggcacaaagagagaaggaacacccacagggc

SEQ ID NO: 236128 - RNA, 84 nt, Homo sapiens
gcacaaaagaaaggcgagcgacccaggaggagaaggagcacggaagcacgggaaagggcggcacccaccccccgagcccgcccg

SEQ ID NO: 236129 - RNA, 77 nt, Homo sapiens
gcgggcagcggagggcaggaaccagaaagagacaagaagggaccggcgcgggggacccaccacccccgaccacagcc

SEQ ID NO: 236130 - RNA, 82 nt, Homo sapiens
aaaccacagcaaccagcaacgagcaacaagcagacacaaagggagagagcacgcacacggcgcgcagcccaaacccgaccca

SEQ ID NO: 236131 - RNA, 53 nt, Homo sapiens
gaaacaagaggaggaggggacacaaacggcaaagcacagagccaagaaacacc

SEQ ID NO: 236132 - RNA, 113 nt, Homo sapiens
cgcccccagcccacccccacccacgcggaggggggcccacgccaggccggagcggacgccagaccaggccaggaaaacccgaagaagccaccaaaaaccccagagaaaaaacc

SEQ ID NO: 236133 - RNA, 80 nt, Homo sapiens
gcgagacagcgcaccggcggcgcggacgacagcgagacaccgcaccaccaggaggcaaggaggccacggggccgaagaca

SEQ ID NO: 236134 - RNA, 75 nt, Homo sapiens
ccaagacaggaagacggcacaaagagaacaaaaggccagacaccggcaaagaagacacaaagcaacgaggaaaga

SEQ ID NO: 236135 - RNA, 63 nt, Homo sapiens
ccagagacgaagaccacgccggccgcgaccaaggaagcaaaagggacgaaacaacaacaggcc

SEQ ID NO: 236136 - RNA, 124 nt, Homo sapiens
cgggaggacagaggaacgcaggcccgcacccaacgcaagccggcaccggacacccccaaaaggcaccacagagggagaccgcccccggggcgagagaccccaaccccccaagcgaagcgcaggg

SEQ ID NO: 236137 - RNA, 67 nt, Homo sapiens
ccaccagaagaacgacagagaggagggagaacaagcaacggcgggacacaggaacgccacaagaaac

SEQ ID NO: 236138 - RNA, 73 nt, Homo sapiens
cgagggacagcgcagccgagccaccgagcgcgagccacgcggcaacaagagcgaccagaacaacggccaagcc

SEQ ID NO: 236139 - RNA, 69 nt, Homo sapiens
gaacagagagaacaaaagagcaggaccaaaggaagaagcgaagacggaaacgaggaaaccgggaaagcc

SEQ ID NO: 236140 - RNA, 87 nt, Homo sapiens
cgggccggagcccgcacggagcggccgggcgggacaggaggccccgggggccgcggcccggccccaccaggagccagcgaggacgac

SEQ ID NO: 236141 - RNA, 37 nt, Homo sapiens
ccgaacagcccacagaacgaagacacccgaagacaag

SEQ ID NO: 236142 - RNA, 37 nt, Homo sapiens
ccaaaaaccccccccaaaaagaacacagaaacgcccc

SEQ ID NO: 236143 - RNA, 80 nt, Homo sapiens
aaagcgcacaaccgggaaggaacaggcggaaacaaagggaagagccacaaagggaaccaggcgaagaggaaaaaaggaag

SEQ ID NO: 236144 - RNA, 82 nt, Homo sapiens
cccggagcggggaccacggagacagaccccggcccggcgaccgagcgggcccggagccaccggcccagaaaaacgccacaac

SEQ ID NO: 236145 - RNA, 84 nt, Homo sapiens
gccccccccccgcagacggggggcgggacaggccagggacagcccaacccagcgcgaagccagaggccacgaaggacgggcccc

SEQ ID NO: 236146 - RNA, 81 nt, Homo sapiens
cccagagagacgcccccccaccaggcccaaccaaggccgggcaggagaaacccagcgggcccagagacgcagcgggaaaac

SEQ ID NO: 236147 - RNA, 51 nt, Homo sapiens
gggaggacgacgagagaggcggcagaagcaaagagacagcgggagaaacaa

SEQ ID NO: 236148 - RNA, 78 nt, Homo sapiens
aagcaccaagcccaacccccaggccaaaagaccccacccagccaagagcgggagacagcgcagaagaacagcaaaagc

SEQ ID NO: 236149 - RNA, 79 nt, Homo sapiens
gccggggcaggagggccggcggagcgccaggccgcaccgaaggcaagaacggaagcacgggcggaggaaagcacaagca

SEQ ID NO: 236150 - RNA, 55 nt, Homo sapiens
ggcccacccaagacaaccgaagaccagaagcaaggccaggcagagggcaccacag

SEQ ID NO: 236151 - RNA, 74 nt, Homo sapiens
agagggaacaggcagcaggaagcacggcgggcgaaacaggaagccagcagaccgcagaacggccccgggaccca

SEQ ID NO: 236152 - RNA, 80 nt, Homo sapiens
gcggagacggagaagagcacgcggccaagagccgggggggcgagcccgccgagagcgccaaggaggagacaacgggggaa

SEQ ID NO: 236153 - RNA, 64 nt, Homo sapiens
gagagagagagcagaagacaagcaaggacaaacgaaagcgcaggaagccggaaaaggggcgcaa

SEQ ID NO: 236154 - RNA, 80 nt, Homo sapiens
agggccgagacgcacggagagcgcgcagcacagacaaaaagaagccaccggaggcaaccccacccacgacaagccaccag

SEQ ID NO: 236155 - RNA, 76 nt, Homo sapiens
caaagcacgccggccacggagagaagcaggcaccaaccagcggacacacggaaaagggacgggaaaagccgagaaa

SEQ ID NO: 236156 - RNA, 75 nt, Homo sapiens
ggcggacagagggaggaggcagggaccagcggaacgaggccgcgaaagggacagggccaaagcggcaggagaagg

SEQ ID NO: 236157 - RNA, 80 nt, Homo sapiens
caaggagccacgacagaggacacgccagcggggagaacaggggcaaaaaggccccgagcaccaggggggcagagccccag

SEQ ID NO: 236158 - RNA, 72 nt, Homo sapiens
gccacgccccagccagcgccaaaggagcacaaagccagcggaaccggacaagacacacgcgcgaaggagaag

SEQ ID NO: 236159 - RNA, 64 nt, Homo sapiens
cagccccgcgccgccgaccccccggcgccgcgccggcggcgagggaacaggcacgccccacccg

SEQ ID NO: 236160 - RNA, 79 nt, Homo sapiens
cagagggccaggccagaagagccgaccacaaggggaggacaaccgcccgggaccaggccaagggggaacaagcgcggaa

SEQ ID NO: 236161 - RNA, 79 nt, Homo sapiens
gcggaacaccaaacggaggagccagacccggggaggcgcacacacaccaaagaagggccccgcccagagcaccacccga

SEQ ID NO: 236162 - RNA, 84 nt, Homo sapiens
aaagagggacacaacagcagccacaggaaccgaaaacaccacgacagacacaagaagaagaaaaagaaaaaagaagaggaccga

SEQ ID NO: 236163 - RNA, 77 nt, Homo sapiens
gcgagaacgaccccgagacggcaaggaaccggagcaaacgacccgaccagcgcgcggcggccccggggagagcagca

SEQ ID NO: 236164 - RNA, 74 nt, Homo sapiens
gagcaccgggagcggcgaagaggcaccggaggaggaacgcccaaaacccgccggaccgaagaaggggcaagcac

SEQ ID NO: 236165 - RNA, 85 nt, Homo sapiens
gcgaggaggaaaggaggacgagggcccgcacaagagccaacgaaacccgcgaggacaaccgagccgccgaaaggagggaggaacg

SEQ ID NO: 236166 - RNA, 66 nt, Homo sapiens
gaaaagaaggagccccaaagacagaccaaaaagggcggacccagacagggcagcagggcggccagg

SEQ ID NO: 236167 - RNA, 100 nt, Homo sapiens
ggaagaaacaaaagagaagccagaaacggaaacagaacaacgcaaagaagaaacaggacgagaagaggccccccaaaggacacaggacagaccgagaacg

SEQ ID NO: 236168 - RNA, 92 nt, Homo sapiens
cgggcccaccccccaccaaggaagggaggcggaaccaacccccggccagggaggggccgggggacgagggccccacaggcgcaaggccccga

SEQ ID NO: 236169 - RNA, 82 nt, Homo sapiens
ccaccagagcggcccccagcaccacagcccgcagccccgccagccacccccaggcaagcgcgcggcaggacccagaccggaa

SEQ ID NO: 236170 - RNA, 79 nt, Homo sapiens
accgcaccgaaggccggccagcaagccagaaccacacccacaagcggccgaggggaagaagggagccggcggggaaaac

SEQ ID NO: 236171 - RNA, 67 nt, Homo sapiens
aacccgggaagggacaggcccgagccgacacaaaaagacacgacaacggcaagcggagaagagcaag

SEQ ID NO: 236172 - RNA, 87 nt, Homo sapiens
cgacccgccggggccgcaggggcgagcaaagccgaggcgcaccaggacgaggcaggagcggacacacagggaaggcgggcagcggcg

SEQ ID NO: 236173 - RNA, 79 nt, Homo sapiens
aggagagccaaccagcaggcccggacaggaagcgggcaccaacagacaaccagggcaagcagaggcaaaggcaagggcg

SEQ ID NO: 236174 - RNA, 77 nt, Homo sapiens
agagaaaaaggacaaaagccaagaggaggacagcgcacacagcaagcacgagacagacgaagacgagaaagcaaggc

SEQ ID NO: 236175 - RNA, 69 nt, Homo sapiens
ggcaagaggacgccacaaacacccaccacagcagagagcagcgcccccaggcggcgccgacacccccca

SEQ ID NO: 236176 - RNA, 75 nt, Homo sapiens
aagcgcccgccacccagcccagcggacgggcgcggagacgccggaaggggacaagaagggccacgccacacgaca

SEQ ID NO: 236177 - RNA, 84 nt, Homo sapiens
acagcaggcgaggagagacgaagagagacgcagacaggcaaaaagggaggggcagagcagaaaagaagcagaaggagcgcaaaa

SEQ ID NO: 236178 - RNA, 81 nt, Homo sapiens
gccaaccccacacacaggagcaagcagggggcacccaagcaggaggaccccagccaccagccccggcagggcggcagcaaa

SEQ ID NO: 236179 - RNA, 86 nt, Homo sapiens
gagggggaaaggaagccaagaacaagcacaaagccacagcgaccaagccccagcgagaacagaaagcagcaggagcggcggcagga

SEQ ID NO: 236180 - RNA, 77 nt, Homo sapiens
agggaggacagcaaaaaccagggcccacagaggaggaaaaaagggggcggaaacacccggaacagaaaccaacaaga

SEQ ID NO: 236181 - RNA, 73 nt, Homo sapiens
gagggggaagggaacagggaccaaaccgccaaaaagaagaggcacaaagagagacggaacgcagaaagaccac

SEQ ID NO: 236182 - RNA, 84 nt, Homo sapiens
cgaggagacggcgaccgacaacgagcgaagccgacgagcccgaacagacgcaccagcgggaggaagagggacggcccaggagcg

SEQ ID NO: 236183 - RNA, 68 nt, Homo sapiens
agcgaaaacggaaacacaagagaccagaggacgaaaaggggacagaagaggaagaagggaaaaaccaa

SEQ ID NO: 236184 - RNA, 56 nt, Homo sapiens
aagaaaagaagagagagagaagcaacggaccccaagcagagaacagggcgccggcc

SEQ ID NO: 236185 - RNA, 66 nt, Homo sapiens
gccccgaccggaaagaccgcgagaaaaggccagggcccacgcaaggacacagcaggggccagacaa

SEQ ID NO: 236186 - RNA, 82 nt, Homo sapiens
cacaccacggccacaccaccacccaggccacacaggaggcagcacggcaggagacgaggagaggacagcaggacacccggac

SEQ ID NO: 236187 - RNA, 83 nt, Homo sapiens
cgacggaggcggcggacaggcgacagcgaccgcggcagcgcccacagcagggcagcacaaggagaagggcgcagacgagccac

SEQ ID NO: 236188 - RNA, 75 nt, Homo sapiens
aaagcagaggaacagcaaccagcagacggccccgaccaggcagaaccccagagagggaggagaaggaccgagagg

SEQ ID NO: 236189 - RNA, 69 nt, Homo sapiens
cagaacgacgccggggcgcaaacaggagacagaggagacagaaagagaaaaggccaaccgcgaccccgc

SEQ ID NO: 236190 - RNA, 72 nt, Homo sapiens
gaagagggcggggacccggccaaaagccaagacaaggaacgcggagaagcggagaaccagacccggagcaga

SEQ ID NO: 236191 - RNA, 74 nt, Homo sapiens
ggagaagcagcggcagaagcagacggaagcaaacagacggcaaaaggggagaccggaaaccgagagaaacgaag

SEQ ID NO: 236192 - RNA, 73 nt, Homo sapiens
acgccgcggggaaagggggacccgagcccgacagcccagccaggaaggagggccccggagcagccacaccacc

SEQ ID NO: 236193 - RNA, 57 nt, Homo sapiens
cgagacagccgaggagcggaaagccaggcgaaccagccgaaaaaggagaaaccaaaa

SEQ ID NO: 236194 - RNA, 55 nt, Homo sapiens
aaaggccagcccacaaccgccaccacccaccgcagcccaccaagccacgccacca

SEQ ID NO: 236195 - RNA, 68 nt, Homo sapiens
ccccgccgagggacaagccccgagccgcgccgaccagcggagcgacgcagaccaccacaacccgcaac

SEQ ID NO: 236196 - RNA, 35 nt, Homo sapiens
ccccgagagcgggacgcagaccagaggacaacaca

SEQ ID NO: 236197 - RNA, 67 nt, Homo sapiens
gcaagaagggccggagagcgcaggaccacggaaggaaaacacaaacacgcaagaaacgacccgggcc

SEQ ID NO: 236198 - RNA, 77 nt, Homo sapiens
ccccggggacggcgggggccgagcccagagagggaggagaaacagaagcggggcgcagcaacggcacacagagggga

SEQ ID NO: 236199 - RNA, 73 nt, Homo sapiens
aagccacagcaggacgcggccgaaccaaagagcccaaaagccagccccaggacccgcgggccgcagcccgaag

SEQ ID NO: 236200 - RNA, 76 nt, Homo sapiens
cagagaccaggccgggggacgccggagaacggcccaaccgccggacgcagcgaaggccaagcagaccgaaaagggc

SEQ ID NO: 236201 - RNA, 56 nt, Homo sapiens
gcgcggcgagggagcagcaccagggaggacgccccggaggagccacggcccaggcg

SEQ ID NO: 236202 - RNA, 83 nt, Homo sapiens
cagcgagcgcggcagaagggcacgaagaaggccagcgggccaggaagcgcaccaggagaggcgcagcagccccagccaggcag

SEQ ID NO: 236203 - RNA, 70 nt, Homo sapiens
gagccggggacgacacacacacggaggagccgcggcacccaggcggaggcagggggacggcacgcaaccc

SEQ ID NO: 236204 - RNA, 74 nt, Homo sapiens
ccccacgcggccggccaacccgacagaggccaaaggagcgaagcgacagggaaaccaggagccgaaaggcgagg

SEQ ID NO: 236205 - RNA, 82 nt, Homo sapiens
cgccagaccgcgggccggagccccacacgccaccacgaggacccaaccgcggcacacagaaaacccggacccaccccgccca

SEQ ID NO: 236206 - RNA, 84 nt, Homo sapiens
caggagccaaagccgcaggcccccccccacacgacaggaaaacaggaggcagaggaacaaaaaaagacaccacgagaaacagac

SEQ ID NO: 236207 - RNA, 54 nt, Homo sapiens
cccccgcgcgacggcgacgcgggaggccagacgggcacgaaagccccgcccggc

SEQ ID NO: 236208 - RNA, 78 nt, Homo sapiens
agaccagggcaagggacgagccacacaccaaggccagcacaaggacgccggacagcgaagggaggcacaaaaagaaca

SEQ ID NO: 236209 - RNA, 59 nt, Homo sapiens
gcaaggcacaacgccacgaggcacaccccagcaaggaacaaccgagaaccagacaaaaa

SEQ ID NO: 236210 - RNA, 77 nt, Homo sapiens
gaccgcgcagaaccagggcggcggccagcgccacgcacacgagaggcgagggacgacagagcaagcggcagagggca

SEQ ID NO: 236211 - RNA, 38 nt, Homo sapiens
cccccgagagcggaaacaggccggcagaaaccaccacc

SEQ ID NO: 236212 - RNA, 70 nt, Homo sapiens
aagaaccagccgagagagaggccaaggaaaaggaacagagagagcagaaccgaaacggggaaagaccgaa

SEQ ID NO: 236213 - RNA, 70 nt, Homo sapiens
cccggccaacgacacagacagaccgaggggacgcgacacccccaggcccacacgccggcaccccaaggga

SEQ ID NO: 236214 - RNA, 80 nt, Homo sapiens
ggggggcccggcggcgggcggcgacaggaggacggcggccaaggagggcccggcaagagggcgagaaccgaggggcacag

SEQ ID NO: 236215 - RNA, 85 nt, Homo sapiens
ggcccgggacgccgagcccgacccgggcgccccgccggcaccccgcgcggacaccagagccaggacaaaaccaggcagaaccaac

SEQ ID NO: 236216 - RNA, 72 nt, Homo sapiens
cgcaggcagacaaaagggccaaagaagggagagaggacgagacaagggcaacgagacacccagcggcccggc

SEQ ID NO: 236217 - RNA, 75 nt, Homo sapiens
gcggcgaggccaagcgaggaccggcagcagcaaggagaggccaggccgagacccagcaggagccaggcacagcag

SEQ ID NO: 236218 - RNA, 79 nt, Homo sapiens
cggaagcacacaacaggaaaacaaaagaggagaaagagaggaaaacccaagacaaggaagggcaaagcccacagcacaa

SEQ ID NO: 236219 - RNA, 68 nt, Homo sapiens
gacaaaacgaacaagcaacgaaggacagggcagacagagcgaccgcccaacaccggaacgacacccaa

SEQ ID NO: 236220 - RNA, 35 nt, Homo sapiens
gacaacacacccagaaggggaggagaagaggggag

SEQ ID NO: 236221 - RNA, 58 nt, Homo sapiens
ccgacggcgcgcgcccgcgcgcgcggcgagcggacgagaaccaccaccgaccaggcac

SEQ ID NO: 236222 - RNA, 43 nt, Homo sapiens
cgcaccccgcggacgccacagcgcccggaaccaaaaagaagcc

SEQ ID NO: 236223 - RNA, 69 nt, Homo sapiens
aacaaaagaaaagcggcagaaaggaacaaaagaaaagaagcaggaggagagagcgaaagcacacgaaga

SEQ ID NO: 236224 - RNA, 79 nt, Homo sapiens
cgcggacggggcaaccggacaaggacacgagacagaaagccaaacgcagaccgagacagggcacacgacgcgggaccga

SEQ ID NO: 236225 - RNA, 78 nt, Homo sapiens
cgggacggaccgagaccggaccgagagcggaccgagagcgcgaaacgcacgagaagaggacaccacgggaaaaagaac

SEQ ID NO: 236226 - RNA, 66 nt, Homo sapiens
agaaccagggcggcggccagcgccacgcgcgggcccagaccgacgcaagcaagaaagaagcagacg

SEQ ID NO: 236227 - RNA, 73 nt, Homo sapiens
aaaccacggacaagaaagcgccaaaaacaacaccaaaaagccgcagggggggaagaacacgagggaagaaggc

SEQ ID NO: 236228 - RNA, 101 nt, Homo sapiens
agaaccagcaccgggacgcacagagaccggaagaccaagcaggagaaccgaccgacaagcggagaaaggcacagcagaagaagaaacagaagaagaagagc

SEQ ID NO: 236229 - RNA, 75 nt, Homo sapiens
cccgggcgccgcaaaaggagggggagcgagaccgaccaaccaaagccggcgcacaccagacccggacagcaggag

SEQ ID NO: 236230 - RNA, 41 nt, Homo sapiens
gagaaaggcgggcccgggaacagagcaccacacaccccagc

SEQ ID NO: 236231 - RNA, 82 nt, Homo sapiens
gccaccccccagggagccgaagccaagggacggccaccccagggagacaacggggacccagacacggagcaagacaggaaac

SEQ ID NO: 236232 - RNA, 59 nt, Homo sapiens
gcagagagaacaccagacaaaacccagcccgcgaagaggaggcggaggcagggcggacc

SEQ ID NO: 236233 - RNA, 83 nt, Homo sapiens
gggacacgggcccaggcccgagggggccggaccgggagggcagcccgagcgggaagaagccgcagcaagccgcagcggcgcgc

SEQ ID NO: 236234 - RNA, 73 nt, Homo sapiens
ggcagcgagaagaaaaagaagagagagacacggacaagcgcagaaccggccgaaaagcacaaacagcaagaaa

SEQ ID NO: 236235 - RNA, 67 nt, Homo sapiens
acaccggagcccagccgcgcagacagcagacacgaccgcaggaacagaaggaccacgggaggcagac

SEQ ID NO: 236236 - RNA, 73 nt, Homo sapiens
ggaggcagccaggcaagaggcgcgcagccccgagacacaccgggaaaagccgggccacagaagcaccaccaca

SEQ ID NO: 236237 - RNA, 88 nt, Homo sapiens
gaaaacaagcagccgcacgacgcacggcccaggaccgcacaagagccagagcccagaggggagcagagggaggggggaacggacagga

SEQ ID NO: 236238 - RNA, 82 nt, Homo sapiens
agaaggacggacacccgggacgcagcaccagggggcacgcccccggcgccaccagccaaggacagagggcaagagagaccca

SEQ ID NO: 236239 - RNA, 42 nt, Homo sapiens
cccaaagggagccccggggagccggagcgggcagggcacaca

SEQ ID NO: 236240 - RNA, 63 nt, Homo sapiens
gaggggggacagcagcagcagacgcgagccaaagccgcaaagccgccggaagccaaagagaaa

SEQ ID NO: 236241 - RNA, 73 nt, Homo sapiens
agggaagagcccccaccccaaggaaaaagggggcaccgcaccaggggccagacccacaggacccccccacgcg

SEQ ID NO: 236242 - RNA, 82 nt, Homo sapiens
ggagggaagaggagaagaggagcgaggaccagcaccaccgcgcggaggagaagagaggacagaaacagaggcgcaggccaaa

SEQ ID NO: 236243 - RNA, 82 nt, Homo sapiens
gaaaaccgcggaagcgaacaagaggagccaccagaacaacagcaccaagaaagggaagccggggaaacccagcggcaaaaca

SEQ ID NO: 236244 - RNA, 73 nt, Homo sapiens
acacggaacaggaggaaaaaaccagggcgcaaaaagaaggaaggacccgcgcgaaggaagaccgaagcaaaca

SEQ ID NO: 236245 - RNA, 82 nt, Homo sapiens
gaaaacaaaacgcgaaaaagaagcacggacgagagggccacaaggaagggacagaacaagacaccaagcaaaacagaaaaaa

SEQ ID NO: 236246 - RNA, 55 nt, Homo sapiens
agcccccgagagcggggacagaggcagagcaacagggacacaagcaagaagaaag

SEQ ID NO: 236247 - RNA, 78 nt, Homo sapiens
caaaagggccaaagaagggagagagagccccccaccaggaaccacgccccgagcgcccggagacccaggagaccccag

SEQ ID NO: 236248 - RNA, 77 nt, Homo sapiens
ggccgcgcgggcggaggggggccagagggccccccaggccgccccgcccggaagggggaaccgggcaaccaagcacc

SEQ ID NO: 236249 - RNA, 70 nt, Homo sapiens
ccaggcccagggccggcccccccaggacaacccagaggcaacaaaggcgagggccggcacgggccggacc

SEQ ID NO: 236250 - RNA, 76 nt, Homo sapiens
gcaccgccaaccacgggcgaggaggcgccgcgcaggccaggaggacggccagcccccggagcgccacacacgcccg

SEQ ID NO: 236251 - RNA, 77 nt, Homo sapiens
ccaaagaagaaccaaaggcagaaaagaaagagaaaaggacccaagggggcaaaggcggaaacagcagaggacaccag

SEQ ID NO: 236252 - RNA, 73 nt, Homo sapiens
cagacaccaccccccccccacaggaccccaagcaaaccgggcggccacgaaccaagcaccgcgggggaaagcc

SEQ ID NO: 236253 - RNA, 50 nt, Homo sapiens
cagggcgcccccgggagacgcagccccgcgaaacgaagcccccacaccaa

SEQ ID NO: 236254 - RNA, 78 nt, Homo sapiens
gagggcgaggcggacgcgcggcgcgcagagcgaggccgaagacccagaggaccccagcaccacagaaaccccacaccc

SEQ ID NO: 236255 - RNA, 71 nt, Homo sapiens
gccgagccagccgcggccggaggagcccccaggcccagagccccgagaggggcgcgcagaaacgggaagaa

SEQ ID NO: 236256 - RNA, 75 nt, Homo sapiens
accggacgaacaaaggccacgggaacaacgccagaaacgcgaaaacaaaaaggggcgcgagagggaaagagaaaa

SEQ ID NO: 236257 - RNA, 65 nt, Homo sapiens
cccggggaagccaccccaccccccagacacgcgggcacgggcccggaccagccaggcccggcggc

SEQ ID NO: 236258 - RNA, 57 nt, Homo sapiens
caacccacacccaccaagccaccaggagagaacgccgcgccgcgcgacaacggcccg

SEQ ID NO: 236259 - RNA, 68 nt, Homo sapiens
ggagagcggagaaaaggaggacacaaggaacagagacagacccgggggcccccaaggagagggaagaa

SEQ ID NO: 236260 - RNA, 82 nt, Homo sapiens
ccgggaggaggacgaaccaacggaacgcggaccaggaggaaaaccgcccagccggggcaccgggaaagggcagcgcaaccgg

SEQ ID NO: 236261 - RNA, 79 nt, Homo sapiens
gagaaggggacccaaacacaagggagacccagggagaaacaccaggaagacaggaagaaaccccagccacaaaagacgg

SEQ ID NO: 236262 - RNA, 79 nt, Homo sapiens
cacagcggggaccacccacgacccgagcgagggacaagcaaggggccaaggagccaaggaggaaacccacaacagagga

SEQ ID NO: 236263 - RNA, 75 nt, Homo sapiens
ggagaagaaacagaacgccccacgaggcggcgcccgcgaaagacggcaaacagaagggcgcaggaaaaggcgcac

SEQ ID NO: 236264 - RNA, 59 nt, Homo sapiens
gccgacaaccccagaaacagggccacggggggaccgaggaggaccccgcaccagggccg

SEQ ID NO: 236265 - RNA, 73 nt, Homo sapiens
agggcacccacccacgaagggaggaaaagggcagggacagcgcaggcagcagccaggacacggccaaggccgg

SEQ ID NO: 236266 - RNA, 115 nt, Homo sapiens
caccgggcagcgggggagcggcgcagcggcggcagcggagagcgagagaggggagcagcaacaaaggccaggggcagcaccccaccagccaccccccacgcccacacgacagcaa

SEQ ID NO: 236267 - RNA, 82 nt, Homo sapiens
gcaagcgaagccgaaaaagcgcccgagacgggcccgccgaaaggcaccagagaagacaaagaaagcaagcaaccaggcacaa

SEQ ID NO: 236268 - RNA, 76 nt, Homo sapiens
caagaagaggcacaaaggagacacaacacaggaaaaggacaaccggggaagcagaacacgacgaggaaggccccaa

SEQ ID NO: 236269 - RNA, 58 nt, Homo sapiens
agcagggcagaggaccaggacgcgcacaagcccgggggaaaggcagcgcgcagcagcg

SEQ ID NO: 236270 - RNA, 60 nt, Homo sapiens
gcggcgccgcgaccccggagacccgggccggcccccaccagagaccgcaccaacaagacg

SEQ ID NO: 236271 - RNA, 65 nt, Homo sapiens
aaacgcagcaaacaccaggagaaagggcacggcccggagcgaccccccccggacgaccacagcac

SEQ ID NO: 236272 - RNA, 70 nt, Homo sapiens
gaaacaggcaaaacaaccagaaggggagaaggcaggcaccacaaaaaggacaggaaagggccgagaaaga

SEQ ID NO: 236273 - RNA, 52 nt, Homo sapiens
ccgcagacgcgaaggaacggcaaagcgccacaggggaagcagcaccaacccg

SEQ ID NO: 236274 - RNA, 71 nt, Homo sapiens
gcgcacggacgcaccccacgggaacccacgaccaaagcggaaggccggccgacacaagggaagggcaccca

SEQ ID NO: 236275 - RNA, 71 nt, Homo sapiens
gcagcagcagcccgccacccaacagaccggagcgaaccaccccaaacaggacagaagcgcggaagaagaac

SEQ ID NO: 236276 - RNA, 40 nt, Homo sapiens
caaaagacggcggcaaccgcccgacacacggccaaaacgg

SEQ ID NO: 236277 - RNA, 81 nt, Homo sapiens
cccgggcgccccacccacaccgggcaggaagagcgcgaagacagccaagccgcgcccaggagcccccgcgcccaggcggag

SEQ ID NO: 236278 - RNA, 63 nt, Homo sapiens
gccaagacagagcaggggggccgcacacagcaggaaagagggagggaagccgggcgccaagag

SEQ ID NO: 236279 - RNA, 70 nt, Homo sapiens
cacacgaagccagaaaaacggcgaaggaagaccgcaggaaagcaggaaggcaagaaagccaaggacgaaa

SEQ ID NO: 236280 - RNA, 74 nt, Homo sapiens
cagcccggccgccggcccccaacagcgccgaggaaccagagaaggagaaacagcagggccaaaggcaagaaccc

SEQ ID NO: 236281 - RNA, 63 nt, Homo sapiens
gagagccaagccaggcccagcagccgccaccggggaaaacgacccccaggaaaaagaaaagga

SEQ ID NO: 236282 - RNA, 52 nt, Homo sapiens
accaagaaccagaacaggagaaggcaccagaaggaacgcaaaaggcaagagc

SEQ ID NO: 236283 - RNA, 77 nt, Homo sapiens
ggcggggccccagcgaggagggccaacccagcggcaagcaagcaggcaggcgagaggccagacgaaggcgcggacgg

SEQ ID NO: 236284 - RNA, 70 nt, Homo sapiens
cagacaagagcggcacaacccccaaagacaggaggagaaagccggaaacaagccaccgcgggagaggacg

SEQ ID NO: 236285 - RNA, 52 nt, Homo sapiens
gccccacgagagaacggcacacgcgagcgagcgagaccgggaacccgggcac

SEQ ID NO: 236286 - RNA, 52 nt, Homo sapiens
cggaagagaaggggaaaagacgcacgcaagagacaacggcaagcggagaaga

SEQ ID NO: 236287 - RNA, 73 nt, Homo sapiens
ccccgcgcgccggcgcgggaagcccgcggcgcgcgccccccggacccgcaggaaccagggggaaggccccggg

SEQ ID NO: 236288 - RNA, 58 nt, Homo sapiens
agaaaccaacaccgcaggaaagggagcagcaccggccacacccacagcacgaccggaa

SEQ ID NO: 236289 - RNA, 77 nt, Homo sapiens
gcacacagcaccgggcgaaaaggaggaaaagaagccagaccgaggcacgagggcaggacacgaaaacaacaccaaac

SEQ ID NO: 236290 - RNA, 87 nt, Homo sapiens
cgcaaggacagcgcgaggccgcgcagcccagcgcagccaccaccaggagagaacgccgcgccgcgcgacaacggcccggcaggcaag

SEQ ID NO: 236291 - RNA, 74 nt, Homo sapiens
acagcccgcccagcacgcccggaagccggaagaagaaccgcagagaggaaaggcgccacacacccccagcgggg

SEQ ID NO: 236292 - RNA, 85 nt, Homo sapiens
gagccgcacaacaaccgccgaaagcccacacgcaagaggggaaacaacagaagaagcaaggaaaacagagaggcacaacgcccga

SEQ ID NO: 236293 - RNA, 82 nt, Homo sapiens
ggacacaagccggaaaggccccgagagcaaccggcgggagcagcggaagacaccaaggccagggagggccaccgcacggaag

SEQ ID NO: 236294 - RNA, 76 nt, Homo sapiens
cacaagaggggacaagaccagaaccaggacccaagacggaacagagcgagcggacccacagccgccccagagaaca

SEQ ID NO: 236295 - RNA, 82 nt, Homo sapiens
ccgcgcggcgcggacggagcagaaccccaggacgcgcccccgggagcgggcgcccagagggcgcagagggaaagcacccagg

SEQ ID NO: 236296 - RNA, 79 nt, Homo sapiens
ccggggggggagggaagaagccggagccgccgcaagccacacgggcggagaacggaaaagcaccaggaagcagagagga

SEQ ID NO: 236297 - RNA, 47 nt, Homo sapiens
gcagcaggcagacaacacaaggcaagcagcgccaaggaaaaagcagg

SEQ ID NO: 236298 - RNA, 75 nt, Homo sapiens
cggaccaaaaacccgcaacagcccccgcccaagaaacgaaggacaccgaaggccacgggagagaagcaacaggaa

SEQ ID NO: 236299 - RNA, 70 nt, Homo sapiens
ggcaccgacagcaacccccccacgccacacagggaaggcacacagcagagcgaagacacacaccagcgga

SEQ ID NO: 236300 - RNA, 84 nt, Homo sapiens
gaacagcgggaaagaaggcaaaacacgggaggaaccacgaaagacggagagagaaaacagagaagaagcagaggggccaacaga

SEQ ID NO: 236301 - RNA, 58 nt, Homo sapiens
gaaaaccacaggagaacagccaggcccgaaagcagcagcaaggcagcggaagggagag

SEQ ID NO: 236302 - RNA, 77 nt, Homo sapiens
cgggccccgagacggggacgacagcgcgggagccaggaaacgcagaccccccacgagaagcaggcagagcaggcacc

SEQ ID NO: 236303 - RNA, 68 nt, Homo sapiens
aagacagcgaaacaaaggcagggcgaaagcaaagggaaacggagggccaaaaacagacgcgaaacgaa

SEQ ID NO: 236304 - RNA, 86 nt, Homo sapiens
ggggcccgcaagagaaagcagaggggcgagcaccaaagccaaggaagcccagaagaaagagcaccccccggaagcagcagggaaac

SEQ ID NO: 236305 - RNA, 81 nt, Homo sapiens
cccacacaaggcagccgccgggagccagaagcacaggcccgggcgaaggggccacgcgagccaagcacaaggcagggacag

SEQ ID NO: 236306 - RNA, 69 nt, Homo sapiens
aagaacgccacccaaaagaaaacccaaaaaggagcagccggccgaagagagaagaagcaaaccgggacc

SEQ ID NO: 236307 - RNA, 51 nt, Homo sapiens
gcgccgggagaaggaccacgcaggaacaagcgggaaacggagccaccaaca

SEQ ID NO: 236308 - RNA, 81 nt, Homo sapiens
gccgcacccgccccccgcgcccgccaccggccgccgcccgagccaaaccccagccaccggaagaagaagagaacaccgaga

SEQ ID NO: 236309 - RNA, 72 nt, Homo sapiens
gcgcgagccggcaggccaccgcggccaccgcgcgaaccgccgcaggagcccaggccacgcccagaccaccgc

SEQ ID NO: 236310 - RNA, 79 nt, Homo sapiens
acacacacacaaagaccggaaaaaaaggggggaacccagaacccgagaaaagcacagcacccgcaggccaacacaggac

SEQ ID NO: 236311 - RNA, 76 nt, Homo sapiens
gaccaggacagagaggcagggagcccgagaacacgaaacaaggaagaaagaagcaagaaaaacagaccgggggaaa

SEQ ID NO: 236312 - RNA, 42 nt, Homo sapiens
ggcggagacaggaccgcggcgagcaagcaacaggggaagaac

SEQ ID NO: 236313 - RNA, 56 nt, Homo sapiens
agaaaagaaccgggaaagcccaacgcgacaggaagaagacggccaccagaaaaaag

SEQ ID NO: 236314 - RNA, 86 nt, Homo sapiens
cggagagggcaaaagagccggggggcccacgcgcagagagaagaagaaggaggccgcggccagaaacccaagaaaaagcgaaggaa

SEQ ID NO: 236315 - RNA, 36 nt, Homo sapiens
gcaagacgcccaagagaagagaggagaacaagcgga

SEQ ID NO: 236316 - RNA, 68 nt, Homo sapiens
gaagagaaggggaaaagacgcacgcaagaggcaagagggagaagacagcgaccagggaggcaacaaca

SEQ ID NO: 236317 - RNA, 74 nt, Homo sapiens
cgaggcgcgggcgcgcacccgagccgcaaggcagaaggcggcagggagcacgcaccaggagcccacggcccacc

SEQ ID NO: 236318 - RNA, 87 nt, Homo sapiens
gcccgaggcgaggaggagcgcggcggcaccaagaggggcgacggccgaccgaagcagaaaagacagcaccggagaaaagcccagcgg

SEQ ID NO: 236319 - RNA, 66 nt, Homo sapiens
aggaccgaaacagaaacggaacaccaagggacagagagccgaaagccgggcaaggggaaagaaggc

SEQ ID NO: 236320 - RNA, 71 nt, Homo sapiens
gggaggaacgcggggaggaggaggacaggcacacgacaagaaacagacagggggcaggcaccaaagggcaa

SEQ ID NO: 236321 - RNA, 78 nt, Homo sapiens
aacaggggagccagacggaaggagcggcaggccaccacgagaagcagggacgccgcccgacgagccccggaagcccag

SEQ ID NO: 236322 - RNA, 77 nt, Homo sapiens
gcggcgcagcgcccgccgcggcccgggcccccccgccggaaacagcagaaaaaaggccaggagacaaccagaccccg

SEQ ID NO: 236323 - RNA, 73 nt, Homo sapiens
accgagacaaaagaagaccaaaacgaggcacaaaaagcagagcacgaccgaagacaacgaccggaagaaggaa

SEQ ID NO: 236324 - RNA, 60 nt, Homo sapiens
caggacagcaccagcgggccggaggagccagagcgcagaaagcaaaccagccagggacca

SEQ ID NO: 236325 - RNA, 70 nt, Homo sapiens
cagcaaaggggcccagcaacaggagagaggcgaggggaaccaacagaacgaggagggagaaaacacagca

SEQ ID NO: 236326 - RNA, 80 nt, Homo sapiens
caagaaaggcccgaggccagcgggcccgcggaggcccgcgaggaacgacgccgaggaagagccaagaagagagccaggcg

SEQ ID NO: 236327 - RNA, 54 nt, Homo sapiens
ggacagcgcacacagcaagcacgaggcaagcgaagccggaccccaaggagagac

SEQ ID NO: 236328 - RNA, 60 nt, Homo sapiens
ccagggcaaagaaggccccaggcccacggccaacgggagcaccgacggagaaaagaagac

SEQ ID NO: 236329 - RNA, 77 nt, Homo sapiens
aaagcaggcaggacccgcggcggagaaccggagccggcggggcaccaggagaacaagagaccccccggaggaggggc

SEQ ID NO: 236330 - RNA, 34 nt, Homo sapiens
cccaggaccgcgcaccgagagacgaggcgccagg

SEQ ID NO: 236331 - RNA, 84 nt, Homo sapiens
ggcggcggcggagcgcaggcccggccgacggccacacggcggccgcagggcgccggagccccccagacagaccaaacagcggcg

SEQ ID NO: 236332 - RNA, 65 nt, Homo sapiens
gaacagcagccagacccccaaagcgaacagcgcaaaagagaacggcgagagagaaagagcaacac

SEQ ID NO: 236333 - RNA, 75 nt, Homo sapiens
gggaaggccgaccaccggaccgcacgccccgcgcaaggagggagagccaaggaagggagagcacccaaaggaaag

SEQ ID NO: 236334 - RNA, 53 nt, Homo sapiens
ggggcgccgcggcggcgggcgcccccagacgagaaagacagaccagaacagag

SEQ ID NO: 236335 - RNA, 77 nt, Homo sapiens
aacccaccaaaccaacacccagccaaggggcaggagagaagggagcgaacacagagaggaggagccaaggcggcaac

SEQ ID NO: 236336 - RNA, 73 nt, Homo sapiens
cgaaccaaaggggaaagcaaggccaaagacagggagaagggacacacaggaagacgaacacggaacgggcgag

SEQ ID NO: 236337 - RNA, 54 nt, Homo sapiens
gcgaagcccagcgggccggacggggcggggggaacgccacaccagcggacagcc

SEQ ID NO: 236338 - RNA, 56 nt, Homo sapiens
ggcccgagggggccccagcagaaagccaccggggccggggcccggacgacacacgc

SEQ ID NO: 236339 - RNA, 105 nt, Homo sapiens
ggcaacgacaagagaaagaaaaacaagaacgaggaacacgaacaggaacccgcaggcccagacccagagagggaccagggccaaagaagagccggggggcaggcg

SEQ ID NO: 236340 - RNA, 77 nt, Homo sapiens
aaggaccaagaaccagggcccgacccaggcaagcgagcaggcgagcaggagcccacagccgagcagcggcccagagc

SEQ ID NO: 236341 - RNA, 70 nt, Homo sapiens
gagcccagagaaagcagaaccgaacaacccgggacagaccagaacaaacggaacaagcaagaagggcgga

SEQ ID NO: 236342 - RNA, 49 nt, Homo sapiens
aaagaacgaggccggaagacgccgaaggcgccagaagccgggaacagag

SEQ ID NO: 236343 - RNA, 75 nt, Homo sapiens
agggcgaagacgagaccagccgcgaacggggaggcgaagaaacccgaaacgccaccaaagggagaagaacgcccg

SEQ ID NO: 236344 - RNA, 54 nt, Homo sapiens
agacgcagggcgcccccgcaaggggcgaacgccacggggggcccgccgcgcaaa

SEQ ID NO: 236345 - RNA, 71 nt, Homo sapiens
gcagcaccccagccagcgaacacagacagacaacaggagaacacccacgaagcaccgccccacgccgagcc

SEQ ID NO: 236346 - RNA, 68 nt, Homo sapiens
agggaccaggagccccaacgaaccacaacaaacggacagcagaagcagaggccggggaaggccccgcc

SEQ ID NO: 236347 - RNA, 69 nt, Homo sapiens
gggaagagcgccgcaaagaagaccgcaggaaagcaggaaggcaagaaagccaaggacgaaacccacacg

SEQ ID NO: 236348 - RNA, 74 nt, Homo sapiens
cgaaaggggggacaggcggcgagagaggaacgcaagaccgccacacgacccacacggagagaaaccacaccgcc

SEQ ID NO: 236349 - RNA, 61 nt, Homo sapiens
gaaaaccccgagggaaacaagaaaacacaaagaggcagcaaaggccccgggaaaggcccac

SEQ ID NO: 236350 - RNA, 76 nt, Homo sapiens
agcacaacacaacacgccccgaagcgaccaccgagacaagccggccaccggaaccagacaccgcgagcgcaggccg

SEQ ID NO: 236351 - RNA, 70 nt, Homo sapiens
aggcaaccccaggcaagaccccaggcgaccggcccgaggaccgccgcacgaccaaacgcagaacccacac

SEQ ID NO: 236352 - RNA, 71 nt, Homo sapiens
acaaaagaacaggacaagaaaaacaggaggacccaacagcacaacggaaaggcgacgagcagcccggagac

SEQ ID NO: 236353 - RNA, 60 nt, Homo sapiens
ccacggaccagagacacgccaagcagccagcccaggagagaaagggagcgccaaaaagaa

SEQ ID NO: 236354 - RNA, 37 nt, Homo sapiens
ccgaaccagcacgggaggccccacacacccaacaccc

SEQ ID NO: 236355 - RNA, 74 nt, Homo sapiens
cccggacaaccggaccaggccggggaaaggaaaccaaaccaggaaagaaggacaaggagcgaggagaaagaggg

SEQ ID NO: 236356 - RNA, 76 nt, Homo sapiens
ccaaaaaccggaccagaccagcccaggaggaaggggagaagaaaaagcagcaaaagagaagcaggaggggaacaca

SEQ ID NO: 236357 - RNA, 73 nt, Homo sapiens
ccgagcagacgcccccgggacccacgaggaagcggccgcggcgaaccccagagccagcgggcagacgaacagc

SEQ ID NO: 236358 - RNA, 77 nt, Homo sapiens
gggggccggggagggacagagcagcggcgcgagcgccaacacacaggccgcaggaaccaggaccgggcccccgaagg

SEQ ID NO: 236359 - RNA, 78 nt, Homo sapiens
ggagggcacgcaacacagcaagaccaaagcaaccccgcgacggacagcaaaaacgggacagcaagggaggcagcagac

SEQ ID NO: 236360 - RNA, 62 nt, Homo sapiens
ggaaggcgccgcgccaggccgggcgggcggcggggagccaggaacgggggacaaggagaggc

SEQ ID NO: 236361 - RNA, 78 nt, Homo sapiens
aagaaaaccaaagagccggggacaaggcaggggaaagcgcgagcgagcacccggagcagcagagcacccaacagggga

SEQ ID NO: 236362 - RNA, 76 nt, Homo sapiens
ggcgccacgcgacccagaccgagcaggagacggcaaaccaagaaccgcacgaggcaaaaaagccccacaagccaaa

SEQ ID NO: 236363 - RNA, 72 nt, Homo sapiens
ggaggaggcagccagcagccggccaccaggggcgccgccagcaggagaaggaaaaggacgacagaagaaaaa

SEQ ID NO: 236364 - RNA, 77 nt, Homo sapiens
gcagaaaaaaccagcaggccaggaacacaacccaccgacagcagaacaccaccccaccgccaccgggaagaaccagc

SEQ ID NO: 236365 - RNA, 58 nt, Homo sapiens
ggccagcggcgcccggccaagggccacagcagcaggggaggcaagcaggggggcaaag

SEQ ID NO: 236366 - RNA, 56 nt, Homo sapiens
aaagaaaacaagaaagacacaaccacgaagaggcaaccagaggccaggccagagac

SEQ ID NO: 236367 - RNA, 78 nt, Homo sapiens
ccgcaaaacgcaggacagccgacgaagcggagcaggggggggggagacgagacggaggaaggagcacacgacccacag

SEQ ID NO: 236368 - RNA, 75 nt, Homo sapiens
accccaacgggccaaagcagaaagaggaagaagcaagccggacccacgacggcaggaaaggaggccaggacggag

SEQ ID NO: 236369 - RNA, 62 nt, Homo sapiens
caggaaagcaagaagaacacacccagcaggcccgggagaacgcaccagcaaaagggaacggg

SEQ ID NO: 236370 - RNA, 83 nt, Homo sapiens
gccaccaggaaagccgcagccccgggaggacagcaagacccaccgacaccccacgagcgcgccaaaggaggcaccaaaggagc

SEQ ID NO: 236371 - RNA, 74 nt, Homo sapiens
ggccgcgacggaacccaaagccccgagcacaaccggccgcgccaaccacggaccgggaagaccacacagagagc

SEQ ID NO: 236372 - RNA, 87 nt, Homo sapiens
acgccgccacagaggcggacaggaccccccgaggagcggacgagagaaaaaggccaggagaagagggcgaaacaacaagagccaaac

SEQ ID NO: 236373 - RNA, 84 nt, Homo sapiens
gaagcgggagagccgacgagcgcgcacaacgcaggaccggcgccgaaggcccgccaggaaagcagaggggagcgaaagccacac

SEQ ID NO: 236374 - RNA, 69 nt, Homo sapiens
ggcccccccacacccgcaaagaagcgaacgaaaaggacagacggccagcccgggcaccgagaccgggcc

SEQ ID NO: 236375 - RNA, 67 nt, Homo sapiens
ggaccaagaaccagaccagagaggccgcacgcaccagagagagccccgcagccccggccccgggaca

SEQ ID NO: 236376 - RNA, 57 nt, Homo sapiens
ggaggaaaccgggagccggcccccaaccaagccccacaggcagacaaaaagaagcgg

SEQ ID NO: 236377 - RNA, 40 nt, Homo sapiens
gcccaaagggaccaaaagaagggcaaacgccagcgggggc

SEQ ID NO: 236378 - RNA, 76 nt, Homo sapiens
gggacaacaccgggcccgcgggagagcaagggaaaggcaaggcaacgagggcagcgcacggaaggagggaaaagaa

SEQ ID NO: 236379 - RNA, 78 nt, Homo sapiens
aaagaaaccgaagccccacaagccagggaagaccccgaaggaccaaggagaagggaagaggccgagcaagacacaacg

SEQ ID NO: 236380 - RNA, 77 nt, Homo sapiens
ccccagagcgccagcaggcagccaaggggggagagcacgaaggaagcagggaggagcgcacagcacagccaaaaaca

SEQ ID NO: 236381 - RNA, 73 nt, Homo sapiens
gaacacccgaaccaaggaagcaggccagaggacacaaaaggagcgggaccgcaaaccgcccgcagaccagcac

SEQ ID NO: 236382 - RNA, 75 nt, Homo sapiens
gagaaaacccgacccacgaggccaacaccccgcaggaagcccacggaacacagagaccgaaggagcagacgaggc

SEQ ID NO: 236383 - RNA, 75 nt, Homo sapiens
aggcggaggcagaggggaggcgcgaaagccgccgccagcgcgcacgcaaggaggcggcggaacgcccagccgaca

SEQ ID NO: 236384 - RNA, 77 nt, Homo sapiens
agcccacacacgccccgcgcacaacaggcgcgcaccagggaacaaagccgccaggaacaaaaacgagcagcaaccgg

SEQ ID NO: 236385 - RNA, 62 nt, Homo sapiens
gaaccacacacaaaagcacacaaagaccccccccacaggggagacagaggcgggcaaggaac

SEQ ID NO: 236386 - RNA, 80 nt, Homo sapiens
cgagcggcgggcacccgcgagcggacggcggccgcgaggaggagagggcggggacacagcgggcaggaagaagacgccga

SEQ ID NO: 236387 - RNA, 71 nt, Homo sapiens
ccacgggaacgacgccaagagacccaggaaccgaggaccggcccccagaagggagcaggagaaagggccgg

SEQ ID NO: 236388 - RNA, 69 nt, Homo sapiens
aaaccaccgaggacgagaaaacccaccggacgaacaaaacgaaggaaccgaaggaaaagcacagaaaag

SEQ ID NO: 236389 - RNA, 74 nt, Homo sapiens
agagggagaagggcgccgcgcccacggccagacccaggaaggagggaagacggccggagacaaggcgcacagcg

SEQ ID NO: 236390 - RNA, 67 nt, Homo sapiens
gaacgcgcaggacgaaagagcaccaacagccaaggggggagaggcaccagcaacagaccaaccgcag

SEQ ID NO: 236391 - RNA, 68 nt, Homo sapiens
agaggggacagaaagacccaacagaggaagccgcaagaaacgggacgacaggaaggccagagaaggcg

SEQ ID NO: 236392 - RNA, 73 nt, Homo sapiens
gccgcgccgccacggccagcccccgggcggggcggcaccaccgagcccacgggcacggcacccggcacccccg

SEQ ID NO: 236393 - RNA, 66 nt, Homo sapiens
agcaggaaggacgggggaggagcagcaagccgccacgccgccgcccccgcaagagagacacccggg

SEQ ID NO: 236394 - RNA, 70 nt, Homo sapiens
aaaagcagagcccaggagaaaccggacgcgacgggagcaaaaggagaagccaaaccaagaggagagcgcg

SEQ ID NO: 236395 - RNA, 80 nt, Homo sapiens
ccggcaaaagccggggacgccgccggaggagacgggagcccgccgcgagagcgcagggaaacggcagcggcagagaccac

SEQ ID NO: 236396 - RNA, 55 nt, Homo sapiens
aagaggccaagggaccagcgaacaggggagagaagccggcggagggcgaacgaac

SEQ ID NO: 236397 - RNA, 77 nt, Homo sapiens
cggaagacgggacagcacccgagggagagcgcaccaccccacgcgccaggcgagaccccagggcacgagagcagcgc

SEQ ID NO: 236398 - RNA, 82 nt, Homo sapiens
aacaaagccccccagcccccacgagaaaaccacccaaagccaaaggacacccgcaaaccacaggacgccaggaacaaggaaa

SEQ ID NO: 236399 - RNA, 69 nt, Homo sapiens
gaaggaccaagaaccagaacaagagcaaacggcgaaaccggcacagaagcacgggacggagaaggaaag

SEQ ID NO: 236400 - RNA, 81 nt, Homo sapiens
aagaaggaacacgaggcagggggccacacgcaaggggaacaggcaccaccccaggcaaaagaacaacgccagcagcagagc

SEQ ID NO: 236401 - RNA, 83 nt, Homo sapiens
ggaaaaggggcaaaggacaaccaaaaggggagccacgaagcccccacccacaggcgacagaggcaccgcaccagagggccaac

SEQ ID NO: 236402 - RNA, 74 nt, Homo sapiens
cgaaggcgcgagggacaagagcagacgcggcacgaagacccgaagaaacacacgggcaggcggaaaggaaagaa

SEQ ID NO: 236403 - RNA, 66 nt, Homo sapiens
gaccaagaaccagagcccagaggcccggaaggcgcaaaagggggagaacaacaccaccaaaccaga

SEQ ID NO: 236404 - RNA, 71 nt, Homo sapiens
aagcaacggacagacaagggacaggcccagaggcacaccacaggagcacaaagagagagagagaggcgcca

SEQ ID NO: 236405 - RNA, 82 nt, Homo sapiens
aaggaggacccaggagacgagagagcgaacgccagggacccggcaggccgcccccggcaagcggaaggagagacaggaaggg

SEQ ID NO: 236406 - RNA, 71 nt, Homo sapiens
ccaaagccccaccccacaaaaacgccggaaaaaagaggaacaggcaggaggaggccaaagaagaaagagcg

SEQ ID NO: 236407 - RNA, 74 nt, Homo sapiens
gcccaccaggcaccgggggcccgagggcaggacagcaggcaccggcgaagcacagagaggcgcgaggcaaaaca

SEQ ID NO: 236408 - RNA, 69 nt, Homo sapiens
gaagacacaaaaagcacaggcgaacgcaagcagacggaagaagacgaagaaaacccgaagcgcaaaaca

SEQ ID NO: 236409 - RNA, 78 nt, Homo sapiens
cggcgccaggcagggcgcagggaaagggagcagcaccggccacacccacagcacgaccggaacccagcgaccgacgcc

SEQ ID NO: 236410 - RNA, 79 nt, Homo sapiens
gaggcccaccagccagggaacgcaggcaaaccaggggccgccaggacacagagcgcacccaccggccaacccccccagc

SEQ ID NO: 236411 - RNA, 71 nt, Homo sapiens
gccaccggggccacagcacccacagccaaacacaccgacaaggacgaaagacaaggagcaacaaggagcac

SEQ ID NO: 236412 - RNA, 81 nt, Homo sapiens
cgggacgcgcgacgcccgcgccccgacaacaggagacacggaagccccggaccaagaaggacagaacgagacccaaggaga

SEQ ID NO: 236413 - RNA, 61 nt, Homo sapiens
cgagcccccgggccgacggaacaagaagggacagagcgaagaaccccccaagaagacgaaa

SEQ ID NO: 236414 - RNA, 43 nt, Homo sapiens
gggcgggacccggcccgcgacgggacgccccgggccgccagga

SEQ ID NO: 236415 - RNA, 74 nt, Homo sapiens
acgagcgagcaaagcccacacacgaaaaccaggaaaaagaccaaagacaggaagccaaagaccgggaaccccag

SEQ ID NO: 236416 - RNA, 73 nt, Homo sapiens
cgcaccaaaaacaaaagagagcgcacgaccgaccggggcgacaggcacggcaagagaacagcccgaacaccac

SEQ ID NO: 236417 - RNA, 57 nt, Homo sapiens
ggaagcaccagcgaggaagaggaagcgggcccacaacaaaacaagaagagacgggcc

SEQ ID NO: 236418 - RNA, 88 nt, Homo sapiens
cggcacaggaccgggaagcagcggagagaaaggcggagaacccccgccgagcgccccgggaaaaagaagaaccagggcgagagacagg

SEQ ID NO: 236419 - RNA, 78 nt, Homo sapiens
cacagcacagccgggaaggggagccaccagccccccgcagcagaaagcagagagcccagaagaaaccaaagccacacc

SEQ ID NO: 236420 - RNA, 75 nt, Homo sapiens
cacaagaccaaaggaacgggcacaaccacggggcaggggggccgaggccaggcagcagacgacggagaccggaag

SEQ ID NO: 236421 - RNA, 73 nt, Homo sapiens
aaaagaaaacagcaagagaacaagaagacccagccgaaaaggacaaaccggcgaccacacacggggacgacgg

SEQ ID NO: 236422 - RNA, 73 nt, Homo sapiens
acacaccaggacgcccgccacaggccaggagggggaaggaaggaccagagaaaaccgcggaccccgagacggc

SEQ ID NO: 236423 - RNA, 76 nt, Homo sapiens
cacccaccggaccccacgggccccagacaggagagaggccaaaacagaagaggcaaagcccagccacagcagcagc

SEQ ID NO: 236424 - RNA, 80 nt, Homo sapiens
agcacccaacaggacggagagaaggcacggaagcaaacagaaaaggagcccgcagggccgccaccagcacagggagggag

SEQ ID NO: 236425 - RNA, 74 nt, Homo sapiens
ggaggcagcgcgaccccgcacggagaaaccagaggcaagcgacgggaaggaccaccaaacccagccagcgcaac

SEQ ID NO: 236426 - RNA, 77 nt, Homo sapiens
ccggccgaggcgggcgcaagagaaggcaccaagaggcagcgcacccagacaccggggcccaaggaggggacacgcca

SEQ ID NO: 236427 - RNA, 90 nt, Homo sapiens
ccgggcagaggaccggaggccgggaagccaacgaccacacgcaccggaaccaaaaagaagccccagagccggggccaggagccccaagcg

SEQ ID NO: 236428 - RNA, 76 nt, Homo sapiens
ccaagggcagcaagaaagggaagggggcaaaggagcagagaacgacaagccacacgaggacagcccgcaacaccac

SEQ ID NO: 236429 - RNA, 75 nt, Homo sapiens
aacggaacccccaaagagccgaggccgaaacaccaaggcagacacaaagcggacacgacaaggccgacgcgcacg

SEQ ID NO: 236430 - RNA, 71 nt, Homo sapiens
accagcacaaaggcaaaggcaacagcggcagcccggaagaagaaggaagccccgggaacggggcaaggcgg

SEQ ID NO: 236431 - RNA, 83 nt, Homo sapiens
gcaagggaccagcaaggcggcagagcaaggggcacgcagaaggaccggccacgcgcgccgggggcccggaaagggacgcgcgc

SEQ ID NO: 236432 - RNA, 80 nt, Homo sapiens
ggcgcggcggccccgggaccaaggaggacccaaagacaggaccacgcaccagcagagaaggaaagcaaaccgaagcaggc

SEQ ID NO: 236433 - RNA, 69 nt, Homo sapiens
acagaagcaccggccagggcaccggggcccggcgcccgggcccgccccggaggacacaagcgggacgga

SEQ ID NO: 236434 - RNA, 47 nt, Homo sapiens
acgaaaagagagcaaaacagaaggagagcgaagaccagagaggaaac

SEQ ID NO: 236435 - RNA, 75 nt, Homo sapiens
cagagacagcgccgcgggcaaggaaacggcaaaacaggggagcagaccccgcccagggaacgccacaccgcccac

SEQ ID NO: 236436 - RNA, 77 nt, Homo sapiens
gcagcgaccggacgggcgaggccgcccacacaggcaaggagaccgacccagacccgcccacggaagggaagcagaaa

SEQ ID NO: 236437 - RNA, 79 nt, Homo sapiens
gcgggcggcaagacacggggcgacgccacagagaaagaacacagaagagaacccgaacacagcaggagcaagcgggggc

SEQ ID NO: 236438 - RNA, 75 nt, Homo sapiens
cgccgccgggcgggcggggggcacccgaggaggaagagggcagggcccacggaaagaagggaaacccggggagaa

SEQ ID NO: 236439 - RNA, 80 nt, Homo sapiens
aaaagggacagcggaaccgcacgggcaccaccaaaggcccagaaaaagagaccaggagcgcgcaaaaggagacacaaacg

SEQ ID NO: 236440 - RNA, 80 nt, Homo sapiens
gccgcgaagaggcgggccggaacacacgcagacaccccgccaaagaccgcagacgggagggcagcccgcgaccgcacgac

SEQ ID NO: 236441 - RNA, 61 nt, Homo sapiens
acagcacaaagacaggacccacgggacaacgaagaaaggagcacaaaagaacaaacacacg

SEQ ID NO: 236442 - RNA, 79 nt, Homo sapiens
gaggcacagagaaccgaccagaacgcagcaacaaaggggaaaggaaaccaaaccaggaaagaaggacaaggagcgagga

SEQ ID NO: 236443 - RNA, 76 nt, Homo sapiens
gcggcgggcggagacggggcgcccccccgccaaggcccggcgaggaggagggccccgagggcagaagcaggcggga

SEQ ID NO: 236444 - RNA, 77 nt, Homo sapiens
cagggggcggcgccaggacagacgccgcggcccgacaggagccagacggagaaaagaaaggaaagaaaggaagaagg

SEQ ID NO: 236445 - RNA, 79 nt, Homo sapiens
gagaaaggaggaaaaagaacaggagaaaacggaaaaaagggaagacaggcaacagaaggaaaacggagagggagcagag

SEQ ID NO: 236446 - RNA, 82 nt, Homo sapiens
gccccgggaaggcccccaaggaccacgagcaaccacacagcagagaggcagaaaagagaacggagcagcgcaagagacagaa

SEQ ID NO: 236447 - RNA, 66 nt, Homo sapiens
cccagaaaccgcaccgaccagaagaccccgcaggaaacggacagcccaggccaagacagcagccac

SEQ ID NO: 236448 - RNA, 89 nt, Homo sapiens
cagcagggagggacccggcgcagccgcgggaggccggacacggcggccaggaaccaccgaaacgaaggaggcccaaccacaaaaggagc

SEQ ID NO: 236449 - RNA, 72 nt, Homo sapiens
aaaagcaagaaggggagaggaacgacagacaacagcgaaacgggcgccccggcaaaacaaaaaaagaacccc

SEQ ID NO: 236450 - RNA, 56 nt, Homo sapiens
gaaagcagcccgaaaaagacgcgagaagccacacggaagcagcaaaagaccaaacc

SEQ ID NO: 236451 - RNA, 80 nt, Homo sapiens
gacccgagcgaagccaagccgggcggcaggacgccccaggcagggaaccggcgcccgggagacacgcgggccacccagcc

SEQ ID NO: 236452 - RNA, 81 nt, Homo sapiens
ggggaagcggaggcacgggcggcccgcaggaccggaccgggggaggccacaccaacaagacaagaaccaaacagaacccac

SEQ ID NO: 236453 - RNA, 73 nt, Homo sapiens
gccccccaccccgacacggccccaaagaccaacccagaaacaacgaacgagcaaggaagggccaaggcagacc

SEQ ID NO: 236454 - RNA, 43 nt, Homo sapiens
cccaagccagcagcgcgacaggaaagaaggcgaaggcagaagg

SEQ ID NO: 236455 - RNA, 67 nt, Homo sapiens
acgcccagcagcagcagcaacagaaacccagcgccgcaggggaagcgaaggcggcaacccgcagaag

SEQ ID NO: 236456 - RNA, 66 nt, Homo sapiens
gcagacgaacagccaaagcaccaaagacgccaagagcccagagaccgagacgcggcgccgagcacg

SEQ ID NO: 236457 - RNA, 76 nt, Homo sapiens
gggaacgagggaagccaccaacaggaggaaacaaccaggacacgcaggggccaagggcaacaggggagccgggaga

SEQ ID NO: 236458 - RNA, 77 nt, Homo sapiens
agccaagaccgccgccgccggcccggagaacacacaccgccgcaggcgcccccgggccacccggagaaaggccacgg

SEQ ID NO: 236459 - RNA, 73 nt, Homo sapiens
caaaccaacacagaaaagggcggagaacggaaaagcaccaggaagcagagaggaccgcagaagggaaggagag

SEQ ID NO: 236460 - RNA, 69 nt, Homo sapiens
agccagacgcaccgacaccgagaccgaagcaggaaaacaggaacagagcgagggaggagagagggagag

SEQ ID NO: 236461 - RNA, 80 nt, Homo sapiens
ccaaaccgcaccccggccggggggggcgcaaccgggagcccaggaagcgcagacacaagccccccccagcgccgaaggcc

SEQ ID NO: 236462 - RNA, 67 nt, Homo sapiens
cgcagagccgcgcgccaagccgcacagcgcgagaaggggggaggcaaagaaagaagcccggaaacgg

SEQ ID NO: 236463 - RNA, 68 nt, Homo sapiens
cggaggaaaacaggcgaaggagcggggccgcgccaaggggcgaagaccaagacacacagccagcgacc

SEQ ID NO: 236464 - RNA, 75 nt, Homo sapiens
ggaagagcgggagccgggccgagccggggcgaagcggaccccagcgacaagcccacgagacgaacccccagccag

SEQ ID NO: 236465 - RNA, 82 nt, Homo sapiens
gagccgcgccgcaccagcccgccgggacaagcccgcagaggaggcggcaggacagcccccaggcaacagacaacaagaagca

SEQ ID NO: 236466 - RNA, 75 nt, Homo sapiens
gaaggccaccggcaggcgcacaggcccggccaggcacaagggcaccacaaaggagacagacccagcacggacccc

SEQ ID NO: 236467 - RNA, 81 nt, Homo sapiens
caaccaacaaagagaagcaacaccagaaaagaccaacacaggggaaaagcgcagcaacaggaaaaaagcagaagacaaaaa

SEQ ID NO: 236468 - RNA, 79 nt, Homo sapiens
cgccagggggagcaccgagcaccacgggcggcgccgaggcgcggcggggaagaaggcgggcgaaagagaggggaaagga

SEQ ID NO: 236469 - RNA, 87 nt, Homo sapiens
gaacagacaaagacaaacggaacaagcccaaaagaacgaggccggaagacgccgaagagaagcagggcccgagcggaagaggaaaga

SEQ ID NO: 236470 - RNA, 83 nt, Homo sapiens
aaggagcaaagcagcggcgcagcccggggaggaaggcgaaacccgcagcaccacagaaaacgcagccccgcaggacggagagc

SEQ ID NO: 236471 - RNA, 39 nt, Homo sapiens
acaaagagggaaggagagaacacaggcagaaacaaggag

SEQ ID NO: 236472 - RNA, 62 nt, Homo sapiens
acggcaggcggaagccgaccaggaaagagggcgagccggggcgaaggaaggagaagggaagg

SEQ ID NO: 236473 - RNA, 53 nt, Homo sapiens
acacagcaaaccgggccacaggccaggaggaccagaaaacagcagaaagacca

SEQ ID NO: 236474 - RNA, 70 nt, Homo sapiens
cagaaacaacaggggagaagcgcagcgagaaccagaagccacaggccaaccaagcaaagcaaacaaagcc

SEQ ID NO: 236475 - RNA, 78 nt, Homo sapiens
cgcaccccagcagcagcagagcccgccagacccccgaaggcaaaggaccggggacacagagccacaaaagaggaaaca

SEQ ID NO: 236476 - RNA, 99 nt, Homo sapiens
gcggagggacacgggcagcacgccaggggagcagccggcagcgagggaaagagagggacgaaaccccagacacaagaaaaccagcaaacaggggaaggc

SEQ ID NO: 236477 - RNA, 80 nt, Homo sapiens
caccgcccgccacgcacgccagaaccgaggagagaaggcagccaggccagagcacggccggccccacacaccgacaccgg

SEQ ID NO: 236478 - RNA, 51 nt, Homo sapiens
caccccaagccacagggccgccgacagcagagacaggccacacggcgaccg

SEQ ID NO: 236479 - RNA, 99 nt, Homo sapiens
acgcgacaaggggacgggaggaaagccgcgccaaagccgaagccccaagggccgcagaagcggaaaacccccaggaagaccaggcagacagaagcggcc

SEQ ID NO: 236480 - RNA, 78 nt, Homo sapiens
cacaacgcccgggaaggagggggcgaaaaagcaaacaccagcaacacccgggacaaaaacgggggccaccacccccac

SEQ ID NO: 236481 - RNA, 68 nt, Homo sapiens
aggaccaaaacagggagaaacacagccagaagagaaagcggagcggagccaagcagcgccccgcgggg

SEQ ID NO: 236482 - RNA, 80 nt, Homo sapiens
gggccgcgcgggccacccaagaggagccccggggaacccgcagcacaccagggggcaggcccgagcccagaaaccaggcg

SEQ ID NO: 236483 - RNA, 82 nt, Homo sapiens
ccgggccccaaggacaacccgacacaccgacggcaccgggccaccgccgccaggcggacaaaagcccaaagaaacggggccg

SEQ ID NO: 236484 - RNA, 81 nt, Homo sapiens
ggaaggacagcacagaagaggccagagaacagccccggaggagacccacacgaccagcgccggaggaaccccaaagcagag

SEQ ID NO: 236485 - RNA, 63 nt, Homo sapiens
ggcggagccgaccgggccagaacccaagaagaacagcgcaaggccagaaccgaggaaaaaacg

SEQ ID NO: 236486 - RNA, 75 nt, Homo sapiens
gcaagacaccggacaccgagggcccccaaaaggcgccacaggagccgcagaagcaaaggcaccgccaaaccgaaa

SEQ ID NO: 236487 - RNA, 75 nt, Homo sapiens
aggagggaggcacaaaaagagagggccacgagagagaaagacacaggcagaagcccacaggacaaaaacacaaaa

SEQ ID NO: 236488 - RNA, 57 nt, Homo sapiens
gcgggcgcccacgaccaggacccaaagacaggaccacgcaccagcagagaaggaaag

SEQ ID NO: 236489 - RNA, 65 nt, Homo sapiens
acgcgcgcgcggcgcccaccgcgcgcccaggcaccgcagacacaagaagcgagagcgcaaacagg

SEQ ID NO: 236490 - RNA, 41 nt, Homo sapiens
cccccgggagcgggacacagaccgagaccaagcggaaagag

SEQ ID NO: 236491 - RNA, 85 nt, Homo sapiens
gggcggggaggggcgcccgcccaagcagagaccgggaaaaccggaggccagcccacccagagaggccgaaaaccggcgacgaggc

SEQ ID NO: 236492 - RNA, 83 nt, Homo sapiens
gcggcgagggaaaagcgaggcaaggcaggcggcacagaaggcccaggagggcgacggaagagcagcccagcaaccagacgaag

SEQ ID NO: 236493 - RNA, 77 nt, Homo sapiens
cagaaggcgagaccagagacgagaagcagacaggcagcaaagaaaggaggagaagcccagccgcgcgagggcgggag

SEQ ID NO: 236494 - RNA, 57 nt, Homo sapiens
aggacaggacggacccccgaaagagacgagacacggggcagcgggccggggcagcca

SEQ ID NO: 236495 - RNA, 55 nt, Homo sapiens
gccgcgacgcggggcagccgagcacagcacggaaggaggcaggcccgagccaagc

SEQ ID NO: 236496 - RNA, 69 nt, Homo sapiens
caagaagcaccgaacccgcgaagggaaagagggaaagaggcaaaaccgagaaaaggaccaaagagagcg

SEQ ID NO: 236497 - RNA, 36 nt, Homo sapiens
cccgcggaggcagcggcccacccgggcaggagaggc

SEQ ID NO: 236498 - RNA, 83 nt, Homo sapiens
agcgggaagaggggcgagaacaagcaaggaaacggggcacggcaccagagcgaagacaaagccacaggggaaaaggcaaaacc

SEQ ID NO: 236499 - RNA, 74 nt, Homo sapiens
cacaagagggagagaggagccaaaacggcgagcaagagaggaagagagaaggccacgcccgaccccaagcaaca

SEQ ID NO: 236500 - RNA, 32 nt, Homo sapiens
ggaagcaccagcgaggaagggcccgccgagag

SEQ ID NO: 236501 - RNA, 103 nt, Homo sapiens
gccagcagaggcggagcccgcagaccgcagaaggccggagacaccagcaggacacgaggaggggacggcccgccacaggcacagacgaggagggaagcgaagc

SEQ ID NO: 236502 - RNA, 82 nt, Homo sapiens
gcccagccggcccgcgggggagccccgggagccgcacgagagaaccccagagggcgcggaagccccagcaaacaagaccacc

SEQ ID NO: 236503 - RNA, 75 nt, Homo sapiens
acgaaagccccacccgccgcagcaagcagaggcccacggcacagcagcagcggcgaaccgacaaagacacccgaa

SEQ ID NO: 236504 - RNA, 57 nt, Homo sapiens
gcaggacgaaccacggggacaagagaacggcccggccaaagaaccgacaaccaaggg

SEQ ID NO: 236505 - RNA, 84 nt, Homo sapiens
gccagggccggacgggggggacccagcccggggcgggcccgaggacgaccggcggcagccccagacagagcaccagccccagga

SEQ ID NO: 236506 - RNA, 73 nt, Homo sapiens
cacaaaccagcggaagcccggcggggccccacacggccacagggcacgcacaccacaggagcacgggaccgcg

SEQ ID NO: 236507 - RNA, 72 nt, Homo sapiens
gaccagccccccacacgccaggaagccagacagacaagagaagcgcccggagacgacaaacaaccagacgca

SEQ ID NO: 236508 - RNA, 85 nt, Homo sapiens
aggcaagaccgaacagaaggaacgacgcggaccagaagccagagcgaggacgccggcaggaagggaaaaggccgaggcacagcgg

SEQ ID NO: 236509 - RNA, 91 nt, Homo sapiens
ggacaccgggaaagcaaaaggaacaaaaaaagcacggacacagcaagaacacagcacggaaggccaagcggaaaagacgagaagcacgacg

SEQ ID NO: 236510 - RNA, 79 nt, Homo sapiens
ccccaagagcacagccggaagagcagcagaaagcagagagcccagaagaaaccaaagccacaccacccaaccagcaagg

SEQ ID NO: 236511 - RNA, 65 nt, Homo sapiens
gacgcggaaggcgggcgacagcggcaggggccccgaaccagaagccaccgaggccaaaagaaagg

SEQ ID NO: 236512 - RNA, 76 nt, Homo sapiens
ggcagaaccaggccggcaggcgcgcggggacacgaaaaccagaagcagcaggcgacgaacgagcagccaggaagac

SEQ ID NO: 236513 - RNA, 65 nt, Homo sapiens
gacaagggaaccaccggcggaaagaaggagggaccagcacgccgggccgaaggaagggaacacgg

SEQ ID NO: 236514 - RNA, 68 nt, Homo sapiens
caccacagccagagaagcaacaacagaaccggacagaagcgcaaaaaacgcgcgaaggcagggcggac

SEQ ID NO: 236515 - RNA, 77 nt, Homo sapiens
aaagcacaaaggaagacgaaccggagaagaggagaagagcgaaggcagaaggaagggcagagagcgaagggcagaac

SEQ ID NO: 236516 - RNA, 83 nt, Homo sapiens
gcgcggcggccccagacccgcccgggcgcgccggcaggacagcggccgaagccagagccggggcggcgccaggccccacacgg

SEQ ID NO: 236517 - RNA, 60 nt, Homo sapiens
ggccggccacgagcaaaaggcgacaggagcgcgcagcgaggcagcaccgaaccaagaaaa

SEQ ID NO: 236518 - RNA, 78 nt, Homo sapiens
ccaaaaaccaggccaggcaagagaaacgaggagacaccagaggaaaaccaccaaggagaaagacagcaaagaaaagga

SEQ ID NO: 236519 - RNA, 52 nt, Homo sapiens
agaaaaaccgaacaccaaaagccccaacagcggcaagaccagcacacagagg

SEQ ID NO: 236520 - RNA, 68 nt, Homo sapiens
agcaccagaagcccaggcaggaaccaccaccacagacccagacaggaggcagaagccacaggaagagc

SEQ ID NO: 236521 - RNA, 80 nt, Homo sapiens
acgccggaccccgccacggcccaggccccggacacgagagaaacgccgagcaaggggcaacacgcccgcacgccaaggcg

SEQ ID NO: 236522 - RNA, 66 nt, Homo sapiens
agaaaaaaaccacaaagcggccgaaacagaaaacaagagaccacagaagagaaccacaggcaccca

SEQ ID NO: 236523 - RNA, 82 nt, Homo sapiens
accagacaacaaagcgccccggccggagagggccaccaagccgagggccagcgcaggccacgcacaggccagcaccagcccg

SEQ ID NO: 236524 - RNA, 80 nt, Homo sapiens
gaccaccggcagagaagccggcagaaggccccaccacgaggccggacgacggcggagccaggccgcgaaaaccacaacgc

SEQ ID NO: 236525 - RNA, 74 nt, Homo sapiens
ggcaaccaggcagacccgaccccagcgggacaagacggacagaaacgaacagcgggcgagccaggggagccaga

SEQ ID NO: 236526 - RNA, 74 nt, Homo sapiens
ccccaaaaacccccccccccgagcccgagggcgacgcgcaaaaaaaggaagcgccaaacaagggaaccgaccca

SEQ ID NO: 236527 - RNA, 95 nt, Homo sapiens
cgcggagggagaacccaagaagcgccgcacggaggggaaccgaaaagagaggaaccaggacagaaacccacagaaagagggggcccgggcagggc

SEQ ID NO: 236528 - RNA, 86 nt, Homo sapiens
cacgaaaggaggaggaaccggagaccccgaaaacggaagcgcagggagaaggaagaggggaaaaggccaaagaggggccagagcaa

SEQ ID NO: 236529 - RNA, 82 nt, Homo sapiens
cagacccaggagagccagaaggaaagaccacagcaagaccacgcccccagccgggggaccaggccgaacgacccggacacaa

SEQ ID NO: 236530 - RNA, 83 nt, Homo sapiens
cgagccggaggggagggggcgagccccgcgcagccgccggcgcgccgccaggaccaggagggagcaacaacaaggagcaagca

SEQ ID NO: 236531 - RNA, 59 nt, Homo sapiens
gcgcgacgcggcagcgccccgaggaaccccggccggagggacggagcaaaacccggcca

SEQ ID NO: 236532 - RNA, 79 nt, Homo sapiens
ccagcacggagagaggaggccgcgagaccaggggaccaggaccccaggaccaagaacggaggaccggggaagcgaggag

SEQ ID NO: 236533 - RNA, 73 nt, Homo sapiens
agcaccaaagcgaaggagggccgcaaggaaaccgagaggaagaaaggccagaacgaacggaagggccacacca

SEQ ID NO: 236534 - RNA, 84 nt, Homo sapiens
ccgcccacgagaaccgcggcggcgacgggagaaccacacgacaccaccgcaagcgcaggagaaagaccgcggagcgcagacacc

SEQ ID NO: 236535 - RNA, 95 nt, Homo sapiens
agggagaacacaggaaccgccccgagaggaaacacccccagaagaggagaacccggaagaagaggaagaggaaggcaaaggagcagggaggcccc

SEQ ID NO: 236536 - RNA, 101 nt, Homo sapiens
gagcaggcgcgccaacacaagagaaacaccaaacaaggcaaaaagggcgagacgaaaaacaagcaccaggaaggagcaagaccggcacaccacgccggcaa

SEQ ID NO: 236537 - RNA, 77 nt, Homo sapiens
agggggaaaaaacccaaggcgcaaagacaccgagaaacacaggcggaagcgcgccggagaaacgaacagagaccaca

SEQ ID NO: 236538 - RNA, 53 nt, Homo sapiens
agagagcgccaaggaccggcaaggggccgcaggggcgcggcacaggagagggg

SEQ ID NO: 236539 - RNA, 80 nt, Homo sapiens
ccacagcaggacggaagcgagggcacgggcggcagcccgagaccgcagcagcgggagaacagagacccaccaagaaacca

SEQ ID NO: 236540 - RNA, 70 nt, Homo sapiens
gaccaacacagagcagcggaaccagacaggcaggaaaagacaggaggacagagaggggcacggcggaagg

SEQ ID NO: 236541 - RNA, 68 nt, Homo sapiens
ccaagggaaccgggcccaggaggacgacacaggaagcccagcgccacagagacggagcaaagaacggg

SEQ ID NO: 236542 - RNA, 75 nt, Homo sapiens
ccgagcacaacaggaaagagcaagaaccaggcgagcacaaacagagaaacacaaggggacaaacaaacgggaaac

SEQ ID NO: 236543 - RNA, 78 nt, Homo sapiens
gcgcggaggccgcgacggacgcaagaggcgacggcgaccaagcccaaaagcaggagagaagccggcaggagcacagaa

SEQ ID NO: 236544 - RNA, 84 nt, Homo sapiens
ccaacacgccaccgggggaaccgacagggcgggcggacgaccccacagacggcggcacaagacacgaagagcaccccagagcgg

SEQ ID NO: 236545 - RNA, 62 nt, Homo sapiens
gcgacgaccgcacaacagaaagaagacggcccagcagagcacccaaccagcgggaacacagc

SEQ ID NO: 236546 - RNA, 73 nt, Homo sapiens
cgcagaacacgaccccgggacagagcgggagccaccagcgccaaagggaagccaggagcccgggggcacgggg

SEQ ID NO: 236547 - RNA, 76 nt, Homo sapiens
cagaccacagcagcacaggaaaagagggcggagaagagaaacgagggcacacgcacagggggcaacaccagcggaa

SEQ ID NO: 236548 - RNA, 71 nt, Homo sapiens
cgccggagcgcgacccggccggcgccggacagggggcgaaacacccggcgccagaaagggcaggaaccggg

SEQ ID NO: 236549 - RNA, 65 nt, Homo sapiens
ccggggcggaacagggcgcacacccgcacgcaaaacgggggggagcagcagcaacgagaaggaaa

SEQ ID NO: 236550 - RNA, 71 nt, Homo sapiens
agagagacaagagacacgacggaacagcacaacgagaaagagcagggccgaaacaaaagagaaagaaaccc

SEQ ID NO: 236551 - RNA, 80 nt, Homo sapiens
aagagcccggacggaagaggaggagaccaagcgcacagccagggaggccccgaaggagcaaggaaacgcgaaccaagggc

SEQ ID NO: 236552 - RNA, 74 nt, Homo sapiens
agagagcaagagaggaagaagaacgacccgcccggggcagcaggaaaccacgagcggggagaaacagcaaggag

SEQ ID NO: 236553 - RNA, 70 nt, Homo sapiens
ccaacagccgcgccgagccgggaaggacccaagacggccacaggcccagccaacgccaagggccacccgc

SEQ ID NO: 236554 - RNA, 46 nt, Homo sapiens
acaacaaacacgcaccccaacagacggcaccgaaagcgaaggaagc

SEQ ID NO: 236555 - RNA, 86 nt, Homo sapiens
ggaccaaggcccagcaccaagagacacccgaccgggagccacggcaggcagcgggccaggcaggaggaagagcgcaggcgccggaa

SEQ ID NO: 236556 - RNA, 58 nt, Homo sapiens
cagcagcccccgaaggcccacaggacaggagagaaagacggacagagggcaggaaccc

SEQ ID NO: 236557 - RNA, 72 nt, Homo sapiens
cagcaccaacacaagggcaagaacggcgacaacaaggacaccggcaaggagaccaccacaaacgaaacggcg

SEQ ID NO: 236558 - RNA, 85 nt, Homo sapiens
cacagagcaggagcagacgcgcagggagcaacagccaagccaaacaaacggggacagcgccgaccggaacagggaccacggaagc

SEQ ID NO: 236559 - RNA, 74 nt, Homo sapiens
gcgaaaaagccaaaagaggaaacgagccgccaaacagagcacgagcggcccgcaaaaccacgaagaggacacac

SEQ ID NO: 236560 - RNA, 74 nt, Homo sapiens
aacgaccaaccagcccccccgaagacgccgcgagcacaccgcagaaccaggggagcagggacggggggaaaagc

SEQ ID NO: 236561 - RNA, 55 nt, Homo sapiens
gccggaaaccggagcgcgcagcaggacggcccaagcccaaccggcggcagaaaag

SEQ ID NO: 236562 - RNA, 59 nt, Homo sapiens
gccagggagacgaggcccggacaggacagcaggaagaccggggagaaggaaggaagagg

SEQ ID NO: 236563 - RNA, 52 nt, Homo sapiens
acaggagaaacaaagaagaaagaccagcagcacaccaggaacccaagccaac

SEQ ID NO: 236564 - RNA, 76 nt, Homo sapiens
aagcccgcaggaaccccggacccaagggccggaaaggaaaaacaccagaacggaaacagaaggacacaccagaggg

SEQ ID NO: 236565 - RNA, 116 nt, Homo sapiens
ccagggggacacaccagcacagaccgcggcgcggccgagagccggggacgcggacccacggcagggcaaccccaccgcggaaggcaggcacacagacgagaacagagaggacccga

SEQ ID NO: 236566 - RNA, 66 nt, Homo sapiens
ggcggacccccacagaggcgcgcacagggcaaagcggaacggaagaaaaagaacggcggccggaag

SEQ ID NO: 236567 - RNA, 79 nt, Homo sapiens
cccagagaggaacggaacggacccaccagcacacaccacgggacacaggggaaaggcgcgcaagccgcggacaagcgcg

SEQ ID NO: 236568 - RNA, 78 nt, Homo sapiens
acacacaaccgcccagccggcgagggacgccgcaggagacagaggagcggaggaggagaagcaggccgcagaaggaga

SEQ ID NO: 236569 - RNA, 53 nt, Homo sapiens
gccacccgaccacgacaaggagacgagagagaaggaagcgggggggcagagcc

SEQ ID NO: 236570 - RNA, 68 nt, Homo sapiens
ggggaagccgcagcggaaagcaggagcacagggggcccagagagagggagcccacacgggggccggga

SEQ ID NO: 236571 - RNA, 86 nt, Homo sapiens
cggaccgagcgcggcccaggagccagaggaaggcaacagcgcccaccgggacaccagacaaggacgaggggaccaccccaacaaca

SEQ ID NO: 236572 - RNA, 58 nt, Homo sapiens
cagaaagagaccgcagagacagccaacacggcacccacaggacaccagagcgaaacga

SEQ ID NO: 236573 - RNA, 88 nt, Homo sapiens
aagaagaggagagaaggagagaggaggaggcacgaccgggcccggacccacccccacccccgcacagacagcaggggcgggcagaggg

SEQ ID NO: 236574 - RNA, 81 nt, Homo sapiens
aagcagaagccgacaagcccgggagacacaggcagaaacaaggcccggcagccaggcggggaaggaggaagaaagggaagc

SEQ ID NO: 236575 - RNA, 116 nt, Homo sapiens
ggaacggggcgccgccccgggccccccagcagaagaccccggcggacacagcccaccgggggacggcacggcaggcggacgcccggggccccccggaccacgaggagcaccgagca

SEQ ID NO: 236576 - RNA, 76 nt, Homo sapiens
cgggagcggcggcgaacagcgcgacacaggagagcaaccaaaacaggacaagaaacaccaaacaagcaacagccaa

SEQ ID NO: 236577 - RNA, 51 nt, Homo sapiens
ccagcccaggaaaggcgccgaagaggaagaccgacaagcaggcagcgggac

SEQ ID NO: 236578 - RNA, 71 nt, Homo sapiens
ggccgaccgagacgggcggagaggagaaggaggagaaggggcccgacgccggagggcaaggcaaagaaaag

SEQ ID NO: 236579 - RNA, 88 nt, Homo sapiens
cacacaaaggaaaacccgagacaagggggaccacacaacgagggaagagcgcaccacgcgaaccgcccccccaccgggaacacgaggc

SEQ ID NO: 236580 - RNA, 86 nt, Homo sapiens
ccgcggcagccgcggaccaccgccgccaggaacaccagcaggaaaaaagagcggcagaaggccaaacggccgagcaggcgagcgaa

SEQ ID NO: 236581 - RNA, 50 nt, Homo sapiens
agagcaccgccgagcggaccccaaggagcacaggaaaaagaaccgacaga

SEQ ID NO: 236582 - RNA, 91 nt, Homo sapiens
cagcgaggcggcggagcaggcgcgggcgagccggcgacggacgcggcgcgcgaccgacacgaaggcaaaagcagaccggaaaacccaccgg

SEQ ID NO: 236583 - RNA, 73 nt, Homo sapiens
ccagggcggagggggaggaagcaggggaaagcccgggccaagcgggaggcgccgcgaggaccggcccagccag

SEQ ID NO: 236584 - RNA, 102 nt, Homo sapiens
gaggacaggaagggaacgggaaagcgcaacaggacccaaacagggacagccaaagaccggagcggagagagaagaaacaggccacagagaacaggccggagc

SEQ ID NO: 236585 - RNA, 86 nt, Homo sapiens
gggcacgcacagcccaagcaaaggggacaccaggagaagacggcagcggcagccaccgccccccccagggcccggcgcccaccccc

SEQ ID NO: 236586 - RNA, 84 nt, Homo sapiens
aacgaaagaaacgcggcaggaacgccgacgagagaccagcgaaggagggggcagaagccagagacccccggcacccgcacgccg

SEQ ID NO: 236587 - RNA, 83 nt, Homo sapiens
aagaaggcaccgcaagccgccccggccacgcgggacggaagcccaccagaggcgaggggaggaggaagcgagcgaaaagaggc

SEQ ID NO: 236588 - RNA, 74 nt, Homo sapiens
gagccccaaggcaggaaccagaggaagagaggacaccgacagagcaccagcccgccgcagcaagagagagcaag

SEQ ID NO: 236589 - RNA, 77 nt, Homo sapiens
acagggcccaaggcacacccagacgcaaaacaaaaggggccaaggacgcacacaccagagaaggcagaccaagggcg

SEQ ID NO: 236590 - RNA, 73 nt, Homo sapiens
caggcgcacggaaacggagcagcaaggaaaaggaaaccgcccgcccccaggaccccacgagagccaaagggag

SEQ ID NO: 236591 - RNA, 74 nt, Homo sapiens
aggaccacccaccagccaccagggcgagcaacggcccaaccaacccccggaccgcaagaaaaagaaaccacgga

SEQ ID NO: 236592 - RNA, 77 nt, Homo sapiens
agccgcgacggcccagaccaggcgaggcgcagaaggggacagaacagacaccaacgagcagcaccacggccggagaa

SEQ ID NO: 236593 - RNA, 64 nt, Homo sapiens
cacccaggaggcagaaacacgccgcgcgccacaccaggcccgccggagagggcacaaggggccg

SEQ ID NO: 236594 - RNA, 80 nt, Homo sapiens
aggcccgcccccaagcccggagcccggcgcccccgcaagaggacggcgccggcagccggaggaagcccgacagaaaaggg

SEQ ID NO: 236595 - RNA, 70 nt, Homo sapiens
gaggagaaggcaccaccacaaagaaaggcaccaccgaggaggaaagcacaagcagggcaaacagaagacg

SEQ ID NO: 236596 - RNA, 82 nt, Homo sapiens
gggcagcagcgcgcccaggaggagcaggacgaggagccggaccgggcagcggccccaaggcaaaaggacacccacaccggcc

SEQ ID NO: 236597 - RNA, 76 nt, Homo sapiens
gaaaacaacgacaacgagcacaggacaaccccccaagcggaagaacaacaaagagggaagaaagaggagaagcaag

SEQ ID NO: 236598 - RNA, 56 nt, Homo sapiens
ggccggagcccccgcccaaggagaagcgcccaagcggacgagccgagagcgccgga

SEQ ID NO: 236599 - RNA, 46 nt, Homo sapiens
cgacacaaccagacaggccagaaggcacagacaggggaaagaccac

SEQ ID NO: 236600 - RNA, 76 nt, Homo sapiens
gcggaaccacgccgccacgacccccaggaggcagcacggcaggagacgaggagaggacagcaggacacccggaccc

SEQ ID NO: 236601 - RNA, 74 nt, Homo sapiens
cagagcagacccggacggaacaggcaaaagaggggcgggggcaggacggaagcccggacacccccgacacccgg

SEQ ID NO: 236602 - RNA, 56 nt, Homo sapiens
gaagaagaggaaaaaacgaaggacggagcggaaccgccagaccacaagaaaagcag

SEQ ID NO: 236603 - RNA, 63 nt, Homo sapiens
gcgaggaagcccacaaaagcaggcaacacaagggggcaagggggggcagcaacaccccacaag

SEQ ID NO: 236604 - RNA, 81 nt, Homo sapiens
cgccggcgggagcggggcgcgcggcccccgcgcgccggcgcgcgggcgggccccagggaacagaaagaacagccaaaagag

SEQ ID NO: 236605 - RNA, 82 nt, Homo sapiens
ccgcccgggcccgaggaggcagccaagccgggccgcccgcggcgcggggaggcccaaggggcggacagcggggcggagggga

SEQ ID NO: 236606 - RNA, 76 nt, Homo sapiens
acgaggcgcgaggccgcagagcaaagggggcccccagggaggccgcacggcccacgcgaagccccggagaggcagc

SEQ ID NO: 236607 - RNA, 81 nt, Homo sapiens
cgaaagagagagagaggacccggacccgacagcagaacccaggcagcaagagagggaaaggaaaggcaaaccgacagaagc

SEQ ID NO: 236608 - RNA, 42 nt, Homo sapiens
ccccggccagcccccagagcagccaggcaggagaagggcacc

SEQ ID NO: 236609 - RNA, 52 nt, Homo sapiens
ggagacggccgggagggcccgccagccgcgcccggcaagccaggcgagcgcg

SEQ ID NO: 236610 - RNA, 84 nt, Homo sapiens
gacgagagcccaagcgggaaaccacgggccacaggaaaggcaggaaaaaggagcagacaccagggcgggcgcacagccagccag

SEQ ID NO: 236611 - RNA, 73 nt, Homo sapiens
cgggagcacccaaagaaaccccggacgcaagggcaagacgccaagagaaaaggcgagagcacaaagcaccaag

SEQ ID NO: 236612 - RNA, 85 nt, Homo sapiens
cagagaacagaaggcaaaagagggaggagagcgaccgaagcagaaagggcgggaagaaacggggagccgccacccaccggaagac

SEQ ID NO: 236613 - RNA, 76 nt, Homo sapiens
ggaaaaggaaaccacagaaggaaaggagcaagcgaagagccgaggaccccagaaccgccacccggaaacacccccg

SEQ ID NO: 236614 - RNA, 76 nt, Homo sapiens
gcaaggagcacccggcggagcagagccaggaaccccgacagcagagacgacgcggcaagcagcggaagaggacgac

SEQ ID NO: 236615 - RNA, 78 nt, Homo sapiens
cggagacagacacagaccaggccagaaagccaaacggcccgcggcaacaaagcacagccccgaagacaggaaacaacc

SEQ ID NO: 236616 - RNA, 69 nt, Homo sapiens
gaggaaaacagagagacggagcggaaacagaaaaggagcgcccgaaggggacggaagcggcagcgggca

SEQ ID NO: 236617 - RNA, 79 nt, Homo sapiens
cggacagggagagggaggaggggaggaaagaccaacagagagaccagagaggaaagagcgagagacacaagcaggagga

SEQ ID NO: 236618 - RNA, 74 nt, Homo sapiens
gacggaccaggagccggaccaacgagcggccgaacagcagcaggagggagaggcaacagacgaaaccagagagc

SEQ ID NO: 236619 - RNA, 69 nt, Homo sapiens
accaagaccggcgggagcaaggagaggagaccgagaggcccaccagaccaggggaggaggagaaaggga

SEQ ID NO: 236620 - RNA, 76 nt, Homo sapiens
gaggaaaaaccacaggaggagacacgagagcaccgcaggccgaagcagacacagaagcaggaaggacgcacagaag

SEQ ID NO: 236621 - RNA, 56 nt, Homo sapiens
aagcgcgcggccgagccggagaccacaacgaagcgaaaacgaacaggcccccgcaa

SEQ ID NO: 236622 - RNA, 71 nt, Homo sapiens
cagcgcagggaagaggaagcgagacgaggagcacaggaaccgaaggaggagagccgagaagaaaccgcaag

SEQ ID NO: 236623 - RNA, 85 nt, Homo sapiens
gaacacccagccgcagcagcgaggaaaagaagaaaaacaaccaccagcgagcaaaaaggcaaagaccaagaccaccaagaagcgc

SEQ ID NO: 236624 - RNA, 48 nt, Homo sapiens
ggccccccgccagaacgcagaaaacagacacacagcggagacaagcag

SEQ ID NO: 236625 - RNA, 76 nt, Homo sapiens
gaagcagccgggacagaacgaacaggcaaagcccaaaaggcaaggcacaagccaagagccgcggaaaaaggcccca

SEQ ID NO: 236626 - RNA, 39 nt, Homo sapiens
accaggcccacccagggcagggccacaaagcccagacaa

SEQ ID NO: 236627 - RNA, 82 nt, Homo sapiens
gccagcgaagaaggcgacaccgccgccaccagggcagcggaacgcgccgacgccgcaaccagcaccccgaggagcggaacca

SEQ ID NO: 236628 - RNA, 55 nt, Homo sapiens
gcaggagcgagacgggaacagaccccgcaaaggaaggaggccaaggaccgagccg

SEQ ID NO: 236629 - RNA, 81 nt, Homo sapiens
cggagaaaaacaacaaaaggaagaaaaccgcaggacagggaggcaccgcacccacaaagccaagagacaagcgacccgcag

SEQ ID NO: 236630 - RNA, 72 nt, Homo sapiens
ccaccacccagcaaacagaccacggaggaaggggagaagaaaaagcagcaaaagagaagcaggaggggaaca

SEQ ID NO: 236631 - RNA, 75 nt, Homo sapiens
gacccgggaagcgcggaaaaagggacaaagaaccacaccggacggaggaagacaggaagaagacggcaggggcag

SEQ ID NO: 236632 - RNA, 73 nt, Homo sapiens
gaaggacacaaagaaccaaccagccacagaacaaggagggaaagcgaacgcgaaaagaaaagccgagagcagc

SEQ ID NO: 236633 - RNA, 81 nt, Homo sapiens
cgcacacagcaagcacgaggcggccacacacccggagcaccgcacacagcggcaagccaccggaccagccccacccagacc

SEQ ID NO: 236634 - RNA, 79 nt, Homo sapiens
aaagaaaggggaagaacaggcaaggaagggaacccgagcgcagaggggaagcagaggacccaggcgaacagcaaggagg

SEQ ID NO: 236635 - RNA, 68 nt, Homo sapiens
aaccggggccgcagcgcgcaaagggcacagcccagcgacaacgcacgaccaagaggaggacaaagcac

SEQ ID NO: 236636 - RNA, 85 nt, Homo sapiens
aacaccagcggcgcgacggcaaccccgagccggacacgcgccagggagaagcagacacggccaacacgcgccagcagggggcccc

SEQ ID NO: 236637 - RNA, 66 nt, Homo sapiens
gccagcaaccacgagcaagaccacacaccggccgaaggaccccgcccagaggcgggcgcggacggc

SEQ ID NO: 236638 - RNA, 66 nt, Homo sapiens
aagagccccaaaaacccacacggcggagagcaaagcaaggaagcccgcggcgggaagccccgggga

SEQ ID NO: 236639 - RNA, 55 nt, Homo sapiens
agcaaggcgacgccagaggaggaaaggaagacaagcggagcggcggacaccagaa

SEQ ID NO: 236640 - RNA, 80 nt, Homo sapiens
gcggacgggaaggcgggagacgagaagccgaaaagcgcagcgagcggagccgccggagagcaccagacaggaggagacgc

SEQ ID NO: 236641 - RNA, 74 nt, Homo sapiens
gaaccgcgcgcaaaccaccccaaaccaccagcgaagaagggaaagaagacacaggggcccaagcccaccgacgc

SEQ ID NO: 236642 - RNA, 71 nt, Homo sapiens
gacacccggacaaaaggccaggcaaaaaaggcagggaaggcgccagacacagaaaagaaagagagcaacca

SEQ ID NO: 236643 - RNA, 86 nt, Homo sapiens
ccaggcggcgccacagcccaggagccgagaacacgagcgaacacgggcaccaaggcccgggaaggacaccagcggcccggggcgag

SEQ ID NO: 236644 - RNA, 73 nt, Homo sapiens
gaccgagggacgggagcgaggaggacaggcaaaaaccggaaggggcggggagaaaaacaaccagcaaacgcca

SEQ ID NO: 236645 - RNA, 74 nt, Homo sapiens
ccgccgccgagcgagggcaaccccgggaacgaaacaaaagccgccgcgcagaaacccgggcccgaaaaagagcc

SEQ ID NO: 236646 - RNA, 83 nt, Homo sapiens
cacgcccagaaaaagccaagccaccgagacccggaggaggcgaagcgagaggacaggaagaccccacaccccaaccccccaag

SEQ ID NO: 236647 - RNA, 37 nt, Homo sapiens
gccagcacaggccacaccggaacaacacaagccgaca

SEQ ID NO: 236648 - RNA, 76 nt, Homo sapiens
gaggggagcacggcgggggggaccaagccaggacagccccccccaagacagcgccaaagacacccaaggcggcccc

SEQ ID NO: 236649 - RNA, 80 nt, Homo sapiens
cggcgcgaccgcccggcaccgggagaaccaccgccaccgccaccagacagccccagcgccccaggagaccaacaccccac

SEQ ID NO: 236650 - RNA, 56 nt, Homo sapiens
aagcgcaaagaagccggcagcacagccagaaggaggagagaaagaacccacgcagg

SEQ ID NO: 236651 - RNA, 72 nt, Homo sapiens
ccagccaggaagagaggagccagcggcgaccccagaaagaagccggaaggcgggccaaggccagcggcaaag

SEQ ID NO: 236652 - RNA, 75 nt, Homo sapiens
agccagaaaaaacacagccgacagacgccaccaaaagcaccagagaagaaaaacccaagccggaacacagcgagg

SEQ ID NO: 236653 - RNA, 55 nt, Homo sapiens
gacaaagcggcaaaggagaagaacgacaacaggcacaaagagagaaggaacaccc

SEQ ID NO: 236654 - RNA, 71 nt, Homo sapiens
agagagggcgaaacgcccaagagccaacaagcagaaaacgaaggaaggaggacccgaggagagagaagacg

SEQ ID NO: 236655 - RNA, 79 nt, Homo sapiens
gggagcccgggagggcggccgcaggaacaaacgacgaggagccaagaaagcccggaaaaacggcccaaggacacagccc

SEQ ID NO: 236656 - RNA, 79 nt, Homo sapiens
ggcaacgagacagcgacgcaaagaggccgacgagccagggggagaggcaccagcaacagaccaaccgcagcaagcacag

SEQ ID NO: 236657 - RNA, 40 nt, Homo sapiens
cgcagccccgacaaggcgccacgggcccaagagaggggcc

SEQ ID NO: 236658 - RNA, 79 nt, Homo sapiens
ggggaccccgcgcgggcggcgggagagcgaggcacggcaaggggccggagggccggcccagaacgcaggcagacgaccc

SEQ ID NO: 236659 - RNA, 111 nt, Homo sapiens
ggagggcacgaggaacaggacacagcggaacgcggcacagacaggcgggcagcaccaaagggccaaaaagcagaaaaacaaaccagcccaagaagcgacaaagcccgcgac

SEQ ID NO: 236660 - RNA, 56 nt, Homo sapiens
aaaagccgagagcccgcccacagagcaagacacaagggcgacaccagaaagcgcgc

SEQ ID NO: 236661 - RNA, 76 nt, Homo sapiens
aacgccgcgacagaaaggcgcaaggaagcaaaaaaggcaagcaagcacaaaaagacgcaaggcgcgcaaggaaagg

SEQ ID NO: 236662 - RNA, 71 nt, Homo sapiens
gccacacaagggagacacgagcaaaaacagccacccaagcccagcaaggacaaagcacccagccaaaccca

SEQ ID NO: 236663 - RNA, 71 nt, Homo sapiens
caacacacagaaaaggcaccaacccaaacggagacgcaaaaggaaccagcaaagagccaaggaacgaacag

SEQ ID NO: 236664 - RNA, 59 nt, Homo sapiens
agcccacacacgccacaaaccgcaaggcccggcccccacgacacaccgaagaggcccac

SEQ ID NO: 236665 - RNA, 41 nt, Homo sapiens
cgaccgaccaggcaaccacgggaggaggaggggaacggacc

SEQ ID NO: 236666 - RNA, 68 nt, Homo sapiens
cccaaacaagaacacagaacaggaacaacccagacacccgggccagcacaaacccagaaaccagacgg

SEQ ID NO: 236667 - RNA, 78 nt, Homo sapiens
acacgcaaggggcgacagaagacgccagcgccgagccgcccaggagcacgaggaggcagagaagagcgccaggcgaaa

SEQ ID NO: 236668 - RNA, 85 nt, Homo sapiens
ggagccgggcgcagaaccagaccgggagcacgcacgccacgaaggggaggcccacggggcaaccggggcgggcggggaggaaaaa

SEQ ID NO: 236669 - RNA, 80 nt, Homo sapiens
ggggaacagcgagcggagccggcaggaaggggaccgggcggcggagcggcggaagaagagagacggggcgccggagccag

SEQ ID NO: 236670 - RNA, 85 nt, Homo sapiens
cggcggggcagcggagagcgcggaggggaaccccgagccgcaggaccggaggacaggggggaagaaaacagacagaaacagagcc

SEQ ID NO: 236671 - RNA, 66 nt, Homo sapiens
ccgacagccgcagaacaccggagagaacagaaaaaaagcggcccgggaccaggaaagacaggacac

SEQ ID NO: 236672 - RNA, 55 nt, Homo sapiens
accagaagccgcacgcacgcaacccccagagccgaggaaacccagacccaagacc

SEQ ID NO: 236673 - RNA, 71 nt, Homo sapiens
cgccacgccgcccagcccggccccgcccgcgccggaagagccacgccgacaccaagggaacccaaggggaa

SEQ ID NO: 236674 - RNA, 74 nt, Homo sapiens
gcagcaacacacgagcgcagcacgaccacccccaacgccaggaggaaacgcaggagggccggagggcacacaac

SEQ ID NO: 236675 - RNA, 45 nt, Homo sapiens
caacggggcagggacaggcgcgaccaggcgcgcagagacgaaccg

SEQ ID NO: 236676 - RNA, 77 nt, Homo sapiens
caccccaagaagggccaaacggggggcacacacagcagcgcccaagccgccagaagcccgggagccagcggaccaga

SEQ ID NO: 236677 - RNA, 82 nt, Homo sapiens
gccagcaccgcacgcccgcaagggaggacccagagcccgccaaacaggggacaaggggaaagcagggcacccagacgagaac

SEQ ID NO: 236678 - RNA, 38 nt, Homo sapiens
caccgcgacgaaacggaaagaaagcccaacagcacagc

SEQ ID NO: 236679 - RNA, 122 nt, Homo sapiens
cgggagcgcgaacgagcgacggcggaacccggggccgggacgcagcccggcggcagcaggacggagacgagcagagggggcacggaggcgcaggagcgggggaggcgggaagcggagcgaag

SEQ ID NO: 236680 - RNA, 88 nt, Homo sapiens
accagacaacgccccgggaccggagcagaacccccgcagagaaagaaacagaccccgacagaagaaggaaggcaccagaccagaaacc

SEQ ID NO: 236681 - RNA, 64 nt, Homo sapiens
caccccggcccggccgcagcagccgccgccgccgcgcagcacccgcgggcgaggcccccgcaca

SEQ ID NO: 236682 - RNA, 98 nt, Homo sapiens
gccgccgccagcccgcaccgcgccccccaacacgccgcgcaggaacgggccgacgacaccagaaaggccaaagaagagacgaagcaaaggcgcccgga

SEQ ID NO: 236683 - RNA, 63 nt, Homo sapiens
cgggcggacacaccacggaggaccgacaggagagaacacaacaggcaaaagggaaagcaaggg

SEQ ID NO: 236684 - RNA, 70 nt, Homo sapiens
gcgaagaaaaaacaaagaaggaacacggaacccaggagggcgaagcagcaaaacacacagccccccggag

SEQ ID NO: 236685 - RNA, 88 nt, Homo sapiens
cgcaggcccacggccggcgagacggcgacgcgcgcggggccggcgcggccggccggagggcagcgcccagcagagaccagagccggcc

SEQ ID NO: 236686 - RNA, 87 nt, Homo sapiens
ggacggccacagacccacagaggcaccccagacacagcgccgaccccgacagaacgggccccgcacccgcggccccggggcagcgga

SEQ ID NO: 236687 - RNA, 92 nt, Homo sapiens
ggaccccgcggcgcccccggcccggagcaacgagcgcagcgccgagagcagcaccagcagaagagggcccgaccacggcaacccagaggcga

SEQ ID NO: 236688 - RNA, 74 nt, Homo sapiens
aggagaaaacacccaaacggaaggacacagagccaacccagaagagccaagaaaagcaccacggaaacccgaga

SEQ ID NO: 236689 - RNA, 81 nt, Homo sapiens
gaagcgaaaccgagcaggcagagagcagaagaacacagacagcggaagagggccaggcgaacccgaagcgcgggaaggggc

SEQ ID NO: 236690 - RNA, 59 nt, Homo sapiens
cggaaggcagcgcccagcagcgcaggcccagagaggcggacccacggggagacaccggg

SEQ ID NO: 236691 - RNA, 84 nt, Homo sapiens
caagaccagccgggcaacacaggccagccaggacccaggaggaagccggcccagaagccggggcacccgcaggccccaccggcg

SEQ ID NO: 236692 - RNA, 78 nt, Homo sapiens
acaacgacaccaaggaaaggcgcaccaaggaacacgacagcgccgagaacggacagacacgcgggagacgcgcggagg

SEQ ID NO: 236693 - RNA, 77 nt, Homo sapiens
gagacacaaaacccagacaccgacgggccgcgaggggaagaggaagcaaagccaagaggcagcagcaaggggggagc

SEQ ID NO: 236694 - RNA, 72 nt, Homo sapiens
accagcggacgcggaggcccaaccgaagaaaacaaggcacagaagaaaggcagaaagaaaaaggacacagca

SEQ ID NO: 236695 - RNA, 50 nt, Homo sapiens
acaagagcgcaaggagaacaaaacaggagaaggcagaggccccacaggac

SEQ ID NO: 236696 - RNA, 79 nt, Homo sapiens
agcaaaccgggccacagagaccaagaggcacaccgaaacggaaaggacagggagcaaccagcaccccggggcaggagca

SEQ ID NO: 236697 - RNA, 67 nt, Homo sapiens
caacacagagcagcggaaccagacaggcaggaaaagacagaacaaagggcaaaggacacaccgcaca

SEQ ID NO: 236698 - RNA, 68 nt, Homo sapiens
aagcaagagacagcgaggacagaaggaaggaccgccgcgccgaccggagacaacagacgcaccagccg

SEQ ID NO: 236699 - RNA, 51 nt, Homo sapiens
cgccccagcggccacggagggaaacacaccagcggagagaccggacgacac

SEQ ID NO: 236700 - RNA, 37 nt, Homo sapiens
gaggcccccagccagggaacacagaggcgccacgaga

SEQ ID NO: 236701 - RNA, 72 nt, Homo sapiens
ggagcacacgccccaaggagggaccaagaggagggaggaagaggcgcggcaagggcgcggcaagaaaaccgg

SEQ ID NO: 236702 - RNA, 70 nt, Homo sapiens
gaggccccccagccagggaacagcggccaccaaggcccaggcggcgaacccgggcaaggacccgcggccc

SEQ ID NO: 236703 - RNA, 77 nt, Homo sapiens
gggccggccccagagcccaccgggaggagaaggaggaggaacgagcccaaaaggcagagcgaggagagaagaaggag

SEQ ID NO: 236704 - RNA, 69 nt, Homo sapiens
gccacgaagagcacagcggaggcacccaccacgggccaggcgggccagaggcaagccgcgggagccacg

SEQ ID NO: 236705 - RNA, 64 nt, Homo sapiens
cacacccacagcgcggcaccgcgacacggaaccccacccaacaagcggaacaggaaccaggagc

SEQ ID NO: 236706 - RNA, 56 nt, Homo sapiens
agacccagcacagagggggacgccccaggaagcacagggaagaagaccgcaacaca

SEQ ID NO: 236707 - RNA, 80 nt, Homo sapiens
cgaaacggaaagaagcaccggagagacagcacagcacccacaaagcaacggaagcagaacccaaagaagcgaagcagaaa

SEQ ID NO: 236708 - RNA, 79 nt, Homo sapiens
gcccagcgggcaaggcagaccggaccacaaaaaggacaccagcaagcgcaagaggaggagcccccaacaagcccaagag

SEQ ID NO: 236709 - RNA, 59 nt, Homo sapiens
aaaccggcggagccacagagaacacaaggaacgaaaggaagggaagaagcagaaccaag

SEQ ID NO: 236710 - RNA, 41 nt, Homo sapiens
cccaggaccaccagaacgagaacgagcgccaaggacaaaca

SEQ ID NO: 236711 - RNA, 66 nt, Homo sapiens
ggagaaggaccaagaaccaggaaccaacgcagagccccagaacaaaagaacacagaggaaccagaa

SEQ ID NO: 236712 - RNA, 79 nt, Homo sapiens
gaggcaagcagacaagacggaggagcgggaacacaacagagagagaagagagaccaggcgcaaggagaccacagcccaa

SEQ ID NO: 236713 - RNA, 85 nt, Homo sapiens
gagaggacaggcggaggccccagggaagcgcagaaagcaggcgaacccgcggcgcaaaacggcaagagaagccgagccaggccgc

SEQ ID NO: 236714 - RNA, 76 nt, Homo sapiens
ggcccacgacccaaggacacaacccggccgcagagcccaggacgggagagagggccaagagccagagagcccggga

SEQ ID NO: 236715 - RNA, 101 nt, Homo sapiens
gaggacaggcggaggccccagggaagcgcagaaagcaggcgaacccgcggcgcaaaacgacaagcagaccggaagaccgacggaagaccacaccccgaggg

SEQ ID NO: 236716 - RNA, 67 nt, Homo sapiens
cccacagaggggcgacgacacagaggaaaaagacaaaccagccccgccgaagaagcagcagagaaga

SEQ ID NO: 236717 - RNA, 75 nt, Homo sapiens
aacaccgcacggggagccaagccggaagccaaggcagccgagagaacccccccaccgagacccaagaaggccgga

SEQ ID NO: 236718 - RNA, 82 nt, Homo sapiens
aaacgaggcgcgaggccgcagagcaaagggggcccccagggaggccgcacggcccacgcgaagggagaaccgaagaacagga

SEQ ID NO: 236719 - RNA, 52 nt, Homo sapiens
cgagggggggaccaccgccggccaggggcggaaaccagaccccacagagaca

SEQ ID NO: 236720 - RNA, 73 nt, Homo sapiens
ccgcgccccgcaccgcggcaaagagaggacgcagcgagaaaggagaggggcgggagccgagagaagccaaccc

SEQ ID NO: 236721 - RNA, 73 nt, Homo sapiens
agcccggccgccggcccccaacagcgccggagcagaacagaaggcgcacaaaggaaagagaagcaaaaccacc

SEQ ID NO: 236722 - RNA, 79 nt, Homo sapiens
gccccacgccgcccgacccaggggagccgggcccccccgcccagcgcgagggcgcgcgggggcacagcccaggcgcagc

SEQ ID NO: 236723 - RNA, 62 nt, Homo sapiens
gagcaacacaaggaagcaagggccaccgcccagccaaccacaggacgcaaggaccaaaaaac

SEQ ID NO: 236724 - RNA, 75 nt, Homo sapiens
cgggaaggccggaaaggaccagaccgcccaggaaacgacgcaaaacaaaaggggccaaggacgcacacaccagag

SEQ ID NO: 236725 - RNA, 75 nt, Homo sapiens
gagcccggcccgccagcggagggcaacacaccgaaaaaagggaagcggagaggagcagagacgacaccagaccgg

SEQ ID NO: 236726 - RNA, 82 nt, Homo sapiens
gagagagcggaggacagccgagaggagccagggggcgcagaggggccgcaggggcgacgcagaccacaacaccaggagcaca

SEQ ID NO: 236727 - RNA, 78 nt, Homo sapiens
ggaaggagaacaaagggagaagaggaagcccgacaacgaagccaccaaaggacaggagaaaagaaagcaaccagccga

SEQ ID NO: 236728 - RNA, 68 nt, Homo sapiens
caagaacagaggcagacgacaccaggaacagcagggcggcgacggcggcgcgaggaccgaccgggccc

SEQ ID NO: 236729 - RNA, 74 nt, Homo sapiens
ccgggccgggaaagacaccgcgaagcaggggagggaagaggagcggaaaaacaagcaaaagaaaaacagggaaa

SEQ ID NO: 236730 - RNA, 74 nt, Homo sapiens
gcagcgaccacccacacaaacccgggacgggccgagaggggccgcaaggccaggcgcgcagaggcacccaacgg

SEQ ID NO: 236731 - RNA, 76 nt, Homo sapiens
acgcacggaccaaaaacccgcaacagcccccgcccaacacgacgcagggaccagggggagacaccagggccacagc

SEQ ID NO: 236732 - RNA, 72 nt, Homo sapiens
cgggcaacccggccccaagccggaagaaccgcagccgagcggggccggccacagaggagaaagccggacaga

SEQ ID NO: 236733 - RNA, 78 nt, Homo sapiens
gcagacgcagccgagacaccagcccgaaacaccaccaagaaagccggacccacagccgccagagagaccgggccaggg

SEQ ID NO: 236734 - RNA, 77 nt, Homo sapiens
aacagaaggcaaaagagggaggagagcgaccgaagcagaaaggacagacccgagaaaccggacagcagaggaaacga

SEQ ID NO: 236735 - RNA, 121 nt, Homo sapiens
ccacgggaggagggccacgcaccgacagagcccagaagaggggggccgcagcgagccccggcagcccagccccaaaaggcaaaaaggaccacggaccccgcccacgacaccagccacagga

SEQ ID NO: 236736 - RNA, 83 nt, Homo sapiens
gcgccgccaccacgcgcgggcgggcagccccgggccaggccgcggccggggcaggagcgcagggggggagccagaacgagaaa

SEQ ID NO: 236737 - RNA, 84 nt, Homo sapiens
accagcccacccgggcgggccaacggggaagcgacaccaaggagggccagcgagcacagaagcgagagcacccccacgcccaga

SEQ ID NO: 236738 - RNA, 71 nt, Homo sapiens
gaaaaggcacacagacaaagaagcaacacaggaaagaagacgaaagaagccaaggaagcggaggcacgggc

SEQ ID NO: 236739 - RNA, 79 nt, Homo sapiens
ggacgacaaagaggcggcagggaccagcagacgggaaggacacgcccaccaagaaagaaccggaaaggggaccgggcca

SEQ ID NO: 236740 - RNA, 48 nt, Homo sapiens
ggagcaaaaggaaccccacaaaacagaaaagcaaggcagaggaagagc

SEQ ID NO: 236741 - RNA, 76 nt, Homo sapiens
agaggacgcgggccgaggagagcggaggaggggcccggacgggcacgacagagagacccgaccacccgcaagacca

SEQ ID NO: 236742 - RNA, 83 nt, Homo sapiens
aggcggcgggacagagcgccgcgaccccagcgggcccggggaggcaccgacgaggagaggaccacccgcacccaggggacgca

SEQ ID NO: 236743 - RNA, 75 nt, Homo sapiens
acagcacgaggggcaggcccaccagccccgccaaacaggcaaaacggaggaggcagggagagagcaccggacaca

SEQ ID NO: 236744 - RNA, 76 nt, Homo sapiens
acccaggcgcccaacagagcccccgggcccccgcaggccacgcccagaccaccgcgccccgagggcagcccacgac

SEQ ID NO: 236745 - RNA, 48 nt, Homo sapiens
cgccaacgaaccacaggcgagaccgagacaaggggcccggcagcggcc

SEQ ID NO: 236746 - RNA, 68 nt, Homo sapiens
gcccaagcacacgcccaccacaaagcagaaagaaaacgcaagggggacacacgaagcagagaagagcc

SEQ ID NO: 236747 - RNA, 69 nt, Homo sapiens
gccccaccgccgacgcccccagccaccagagaaccgggagacgacgcgcacgcgggggcggggagaaga

SEQ ID NO: 236748 - RNA, 78 nt, Homo sapiens
cggcaggagccggccggcaaccgagggacccgcgccaggcgccggcgaaagcaacgaagggacgccagaacaagagaa

SEQ ID NO: 236749 - RNA, 84 nt, Homo sapiens
aaaccaaaaccagacacagcacaagcagcggccacaggacgaaagaggagagaacgaccccagggcaggaacaagagagcccca

SEQ ID NO: 236750 - RNA, 85 nt, Homo sapiens
ccgagcgcgccgcccggcgccggcccgcccccgcagcagcgccaggccccaaagcccaagaggaaggggaggcgggagcagagcg

SEQ ID NO: 236751 - RNA, 83 nt, Homo sapiens
ggaccccccggcaggagaggaagccaacgacccagccgaggagcgaacaagaagggccaacaagaaccccggagaaggagagg

SEQ ID NO: 236752 - RNA, 68 nt, Homo sapiens
ggcaccccaccacccaccagggccccgggacaagagaaaaaaagggcgggcgaacaaaaagagcagag

SEQ ID NO: 236753 - RNA, 47 nt, Homo sapiens
ggacgccccgacaacaaccaagccagcagacggggccagcaagcaca

SEQ ID NO: 236754 - RNA, 67 nt, Homo sapiens
agggaagccgaagagccagaacagcgcgagccacaaggcaaggaagcaggcggcaccacccaagaga

SEQ ID NO: 236755 - RNA, 63 nt, Homo sapiens
ccggaacccacgcacagaacccccacgaaggacacgcacgacagcagagacagacgaagagcg

SEQ ID NO: 236756 - RNA, 74 nt, Homo sapiens
aaagcagcacgcgaggaggaaaggcaccccaccaggaggcacggacaaaacgcagggccagcaaacccgggccc

SEQ ID NO: 236757 - RNA, 76 nt, Homo sapiens
ggcagaccgggcggcggacacaagcaggacgccccacacacggcgcgagccgcaagggagcggccccccgacagcc

SEQ ID NO: 236758 - RNA, 78 nt, Homo sapiens
accaagcgagcgagcgggagaaccagccaaggggcaccgggagcccacccaaggcacggcaagaccacgagcagaccc

SEQ ID NO: 236759 - RNA, 77 nt, Homo sapiens
cacgaccccgacgcgagaagcgagccaggagcaggggcgcggcagaggcgcggacgagcagcgcagggcggggcgcg

SEQ ID NO: 236760 - RNA, 81 nt, Homo sapiens
ccgaaacagaaccgggcagacccacacagaccccacgccccagcaggggccagggaagccgagagcacggcgggcccaaag

SEQ ID NO: 236761 - RNA, 77 nt, Homo sapiens
agagagacagaccaagagcccgaggcaccacccaagcgggccagccgggcagcgccagcgggaggacagccaggccc

SEQ ID NO: 236762 - RNA, 78 nt, Homo sapiens
cccaacaggggagaccacgcggaaagcggggagacggacaagggagggccaagaacccggaggaggggaagccgaacc

SEQ ID NO: 236763 - RNA, 75 nt, Homo sapiens
cgcggcagggagcgcgggggcccgcgcagcagcgaccacggaacacgaggacccaaagaacaaacccggagagaa

SEQ ID NO: 236764 - RNA, 84 nt, Homo sapiens
gggcccgagaggaggaggccggggccccgggcccccgccgcagccgagcggaaggacgaaggcgaccaggccgcgggaagcgcg

SEQ ID NO: 236765 - RNA, 37 nt, Homo sapiens
acccaagacagcacgaagggcccgagggcaggacagc

SEQ ID NO: 236766 - RNA, 54 nt, Homo sapiens
aaagggccaaagaagggagagagcaaccacaaagccccggaaggaaacaaacag

SEQ ID NO: 236767 - RNA, 78 nt, Homo sapiens
ggcgggccggcgagcgcagcgcgaccgggaggcccaggaagggaccacagaccagcacgccggcgccacgaaccgagc

SEQ ID NO: 236768 - RNA, 69 nt, Homo sapiens
ccagaaccccagcaccgaaagggaccgaaaggagagcaaagacaagacaggaccggacagggaccaccc

SEQ ID NO: 236769 - RNA, 73 nt, Homo sapiens
cgcggaggacgccccaccgccgacgcccccagccaccaggcagcggaggaggagaaagagaggacccccggac

SEQ ID NO: 236770 - RNA, 57 nt, Homo sapiens
agcaggcgacgacccgccaaaaccgacccagcaacaggggggaaccgcgagcagaac

SEQ ID NO: 236771 - RNA, 91 nt, Homo sapiens
aaagggggaagaaaggaaacaaaccgaaaaggaaagacggggccccaaaggcagaggaaccagacacagcccccggggcgcaggacccgca

SEQ ID NO: 236772 - RNA, 59 nt, Homo sapiens
ggagcgacgaaagcaacccaaaaaaccaccacagggcgggcccaagaccccaaagaacc

SEQ ID NO: 236773 - RNA, 53 nt, Homo sapiens
gaccaaacacggcagcggagaagcaggcaagagcgcaggcgacgcggccggag

SEQ ID NO: 236774 - RNA, 87 nt, Homo sapiens
gcggcgcgcggacccaggcgcggaggcgaggccagcagcgaccgggcagccagaacagcacacagcaccggacggcacacgccggcg

SEQ ID NO: 236775 - RNA, 79 nt, Homo sapiens
gacagcaacagcgacgacagacccgagcgacaggggaaggccaccgagaacaggagacagggagcccagcaggaaggcc

SEQ ID NO: 236776 - RNA, 64 nt, Homo sapiens
ccccccccggccagccccgggcgcgggcgacaggaagggaggagcccacgcagaccagagaccg

SEQ ID NO: 236777 - RNA, 73 nt, Homo sapiens
accgaagcccccacaagggaagaaccacagaccgccagaagcagcgcgacggagagccaagcccggggaagaa

SEQ ID NO: 236778 - RNA, 83 nt, Homo sapiens
gacccaccaaagacaagggggcagaagaaaaagcaggacaacagggcaaggagcgggaggacagaaagccaagggaccaacgg

SEQ ID NO: 236779 - RNA, 80 nt, Homo sapiens
cccggcgccccaccccaggcggcccgcgagccccagcccgggagaccgccgaaggcgggaagggaagcggccaaggcacg

SEQ ID NO: 236780 - RNA, 72 nt, Homo sapiens
aaggcgacaaagggaccggacaagcaggcccaggcccggccaaagggagagaagcaggaaagccaggggggc

SEQ ID NO: 236781 - RNA, 82 nt, Homo sapiens
cgcgcccaaccgcccccccccagaacgcggggcggaaaacaccccaaaagccaaaagggaaaggaaaagaccaacaacagcg

SEQ ID NO: 236782 - RNA, 76 nt, Homo sapiens
ccaagagaaaggagccccccaaggcacaggcgaccgaagccaccgacaaggaaaggaacaagaaaaaagaccagaa

SEQ ID NO: 236783 - RNA, 58 nt, Homo sapiens
caaggaaagcagcaagagaagagaagccgccgagaaacggggacgagagccccggcac

SEQ ID NO: 236784 - RNA, 52 nt, Homo sapiens
ccgaacacgacagaaagaaaggccaaagcagcaggagaaggaccaagaacca

SEQ ID NO: 236785 - RNA, 79 nt, Homo sapiens
gaaagcaggaacacgaacaccaagccccgaagcacacagaaagagcaaccgcaagcaacaaggccagcacccgcagccc

SEQ ID NO: 236786 - RNA, 77 nt, Homo sapiens
acagacaaggagaaacccgagaagcggagaagagcaaccggacacagaaggggaaggaaaccccaagcagcagaggg

SEQ ID NO: 236787 - RNA, 75 nt, Homo sapiens
ccaggcacagaaagcagcacaagaggaacagaggggacgagaagggccgcccagcggcacccacgacgcagcgcc

SEQ ID NO: 236788 - RNA, 79 nt, Homo sapiens
cccgaccagccccagcgaccgcccgaggggggaccagaccggaaagccagaggaaaacaggagcagcggcggaaagaac

SEQ ID NO: 236789 - RNA, 56 nt, Homo sapiens
caccccacaaaaaaaggccacgagcagggaggcaagaaccacaacaaccagccaaa

SEQ ID NO: 236790 - RNA, 83 nt, Homo sapiens
ccggaggaggagcccgcccccagagaggggagccggcgaggacaaaaccgaaggaggcaccacacacggaagcagacgcgcag

SEQ ID NO: 236791 - RNA, 54 nt, Homo sapiens
caacgagggagaagcacaagacagcacagagccccaaaagcacgcacgaaaccg

SEQ ID NO: 236792 - RNA, 83 nt, Homo sapiens
gacacggccagacgcccccaggaaggggccaccagaaggaggacgcagaagaccacaacagggacaccggccagcgcagcacg

SEQ ID NO: 236793 - RNA, 78 nt, Homo sapiens
aagaaacaaccgcccgacagccaccggggacaggacagggagagcggaaaagcagccacaagcaaacccgacggaggc

SEQ ID NO: 236794 - RNA, 90 nt, Homo sapiens
acccagcgggccgacagagaaggccaccaaggacagggcagcaaggagccaagaggccacgacagaagaacagcaacagaacacaccaag

SEQ ID NO: 236795 - RNA, 76 nt, Homo sapiens
gcccacggacacacaggaacgggggccacgcacggagaagcacacagagaaaaaaagggaacaaaacacagcaagc

SEQ ID NO: 236796 - RNA, 83 nt, Homo sapiens
agacccccaccacgcccgcaacagggcaccaagagaggcgagagaccagggcgaagcaaaagccaggacgaaaaagacaaaga

SEQ ID NO: 236797 - RNA, 61 nt, Homo sapiens
cgccaggagaaaaaaggaggaccgcgccaacaggacgaggagaccgaccaggagaccccag

SEQ ID NO: 236798 - RNA, 55 nt, Homo sapiens
acaagcacgccgcccagacaaccgaaccgagaaagccggcaacaggaggagcaga

SEQ ID NO: 236799 - RNA, 63 nt, Homo sapiens
gcaacagacccccaacaggggccaagaagcgaccccagaccccgcacaagagagaaaagcccg

SEQ ID NO: 236800 - RNA, 114 nt, Homo sapiens
cccagcccgggagaccgccgaaggcgggaagggaagcggccaaggcacggaggccgcgagagccccgcagggccgccccgcgcgagagcccagccccgccgcgcccgcccgcca

SEQ ID NO: 236801 - RNA, 73 nt, Homo sapiens
agagagaacagcgcagggcacggaaggggcccagcacagacaccaaggccgcacggcgcccgacgccggccaa

SEQ ID NO: 236802 - RNA, 42 nt, Homo sapiens
gcacaacacagggaagcggggagaagacaaggggacggcagc

SEQ ID NO: 236803 - RNA, 78 nt, Homo sapiens
ccgggaagccagggacacacggagaagaccgcaggaaagcaggaaggcaagaaagccaaggacgaaacccacacggag

SEQ ID NO: 236804 - RNA, 70 nt, Homo sapiens
cccagccaccccagccagggaaccaaggaaaggcccgagccaaaagacccagagaaaggagcacgaagga

SEQ ID NO: 236805 - RNA, 81 nt, Homo sapiens
gacaccgggccaaaggcaggcgagcccccaagccacgcacgaaaaacccagacagagagaacggccggaggggacccacgc

SEQ ID NO: 236806 - RNA, 77 nt, Homo sapiens
gccaggccaaggagggacagggcgccggggaagcggagagggacaccagggggaaaacaggaaacgaagcccgagcg

SEQ ID NO: 236807 - RNA, 71 nt, Homo sapiens
ccgggccgggcgcgggcgagaaagccccaacaacgaccggggacgcccaagccagaacagaccgccacacc

SEQ ID NO: 236808 - RNA, 80 nt, Homo sapiens
caacacgcggaccgacccgcggaccggaggcaagaacagcggggcagaagcgcgggcaagcgccagcaaagcacggacag

SEQ ID NO: 236809 - RNA, 48 nt, Homo sapiens
cgcagaagagagcgagccacaggaaggaagggaacacggacgacgaga

SEQ ID NO: 236810 - RNA, 53 nt, Homo sapiens
aaaggaacgaacgggaccagagggggacagcgaaagcgccaccaggggccaga

SEQ ID NO: 236811 - RNA, 65 nt, Homo sapiens
aaaaagaaaacacccaggagagggaccaacaccacgcaaaggggagaagggccacaccgcacaga

SEQ ID NO: 236812 - RNA, 84 nt, Homo sapiens
gaaaggcgcagagaagcacagccaccgccccaccaacggggccaaccaaaaggagcaggccagcaagacgaaagaaccccccca

SEQ ID NO: 236813 - RNA, 71 nt, Homo sapiens
acagaacaccaggccacccccacaggacgcagcccaccagaggagccaagaagaaccggagccaagaaccc

SEQ ID NO: 236814 - RNA, 65 nt, Homo sapiens
acgaaggaggcagaaggacagcccccaagcccagagaggaccaggaaaaaccccagaccaccaac

SEQ ID NO: 236815 - RNA, 75 nt, Homo sapiens
acacgacaccaccacgagccagagaacaccaagccgaaaggacacacagggaaggcagaaaaagaagaggaggga

SEQ ID NO: 236816 - RNA, 91 nt, Homo sapiens
gcgcccgcccgagccagcccgccagcagccccagccaaaggcacacaggaccccgcgagccagcggcgacgggaacaagccccaaagagcg

SEQ ID NO: 236817 - RNA, 101 nt, Homo sapiens
gagggcgggccccccggggacccgggaggccgggcggcacacgaggccgccacgcagcaggacccaggcccaaaaggaaaagccagacacaccccagagac

SEQ ID NO: 236818 - RNA, 76 nt, Homo sapiens
gaagcgcagggagaaggaagaggggaaaaggcccgagccgccaggggggagaacaccccccccccagcagccgaag

SEQ ID NO: 236819 - RNA, 70 nt, Homo sapiens
gcgggccaaaacgaaacccagcaagacacgggcaccaggacaaggacaaaaccagggaagacaaagaccc

SEQ ID NO: 236820 - RNA, 78 nt, Homo sapiens
ccaggccagaagaacagcaagcgcacaggccgggcacagggagccccaaaaacagccaagggagacgagagagaaagg

SEQ ID NO: 236821 - RNA, 85 nt, Homo sapiens
gccgccgccgccgccgcgggcgccagaaggaagaggcggacggaggagcaggcgagaagagaagggcagagcggcgggaaaccac

SEQ ID NO: 236822 - RNA, 79 nt, Homo sapiens
agaagccaggggacaccgccagcccaaacaacggcccagagggcggcgaaggcgcgccacggagccacccaagcggccg

SEQ ID NO: 236823 - RNA, 43 nt, Homo sapiens
ggagccggggcgaaacgggaggaccaggaagcgcgagaacaac

SEQ ID NO: 236824 - RNA, 76 nt, Homo sapiens
cacccggccaccccccagggagccgaagccaagggacggccaccccaggaggcgcacaggggcaacccgaaggcac

SEQ ID NO: 236825 - RNA, 73 nt, Homo sapiens
ggaggggagagccccacagagcaccagcagcacgggcggccggagcacagcagggacagcagcagggacgcac

SEQ ID NO: 236826 - RNA, 86 nt, Homo sapiens
ccccagggagccggaggcgggcgcgccccaccaccgccccaccagaggggcagagacaagaagcacaacaaccaaacaacccggag

SEQ ID NO: 236827 - RNA, 115 nt, Homo sapiens
caccgggacggaccgagaccggaccgagagcggaccgagagcgcgaaacgcacgagaagaaacccgagaggagcaggagcaaccgacaggcgggccggacagcgcgcccagcaca

SEQ ID NO: 236828 - RNA, 88 nt, Homo sapiens
cgccaggagggcgacaaggcaaagaaccgaagacgacccaaaagggaccagagaaccagagagcacagagaaagcgggaaacggccaa

SEQ ID NO: 236829 - RNA, 71 nt, Homo sapiens
cgaaggccaggcaccccaagagagaggcaagaaggcgcgagacagagagaagccggcgaaagagacggaga

SEQ ID NO: 236830 - RNA, 80 nt, Homo sapiens
caaaacaggaaacaaggaaagaagacaagcacagaagacacagcggaaaagagacaggaggcacaggaaaaaaagacaag

SEQ ID NO: 236831 - RNA, 86 nt, Homo sapiens
ggcgccgccgagggaggcgccgcccccgcgcgccggagaaccaagaaggagcgagggaggagcagcgagacagcaagagacgacca

SEQ ID NO: 236832 - RNA, 75 nt, Homo sapiens
gccagaaggaagaggaggacacgacccagggcgcggggaagagacgggaaagcgcggcgaggcccccggagcagg

SEQ ID NO: 236833 - RNA, 76 nt, Homo sapiens
caggaccccccaggagagcgccccagggcaagccccgcccggccaacaaaggaaccagagaaggagaaacagcagg

SEQ ID NO: 236834 - RNA, 87 nt, Homo sapiens
ggcaggcagcccaggaccaggggacgggggacccagacggacgggggacccagacggacagggcccgacaccaagggaacccaaggg

SEQ ID NO: 236835 - RNA, 77 nt, Homo sapiens
ggaccgagcaggaaccgacgggaacaggccacccaggccgggagggacaccaaaaggaagcgggcgagccagaagag

SEQ ID NO: 236836 - RNA, 63 nt, Homo sapiens
gcggccacgagagagcgggagcccgcggccccacaggccagcgcgggccgccagcggcggcca

SEQ ID NO: 236837 - RNA, 81 nt, Homo sapiens
cgaaaggcagcccagcaaggagaagaagcagaagaagacaaagcagcaaaaacaaagaagcgggaagaaaggggagagagc

SEQ ID NO: 236838 - RNA, 91 nt, Homo sapiens
gacagcggcggcgggagcggcgccgagaggccggcgggacgcgggcgccaggaccggccgaacgcagaggaacggaaaacagccccaaagc

SEQ ID NO: 236839 - RNA, 48 nt, Homo sapiens
ggaacaggcagcaggaagcacggcgggcgaaacagaggagcgcccgcc

SEQ ID NO: 236840 - RNA, 59 nt, Homo sapiens
ggcgggcccccgcggcccgggcgagcccggagaagaggaagggaacgcccagcgacccc

SEQ ID NO: 236841 - RNA, 75 nt, Homo sapiens
aagcagcgaagaagaggcccaacccccaccccgcccaaggaggcccagcggaagcgcgccgaacgggagcccggc

SEQ ID NO: 236842 - RNA, 71 nt, Homo sapiens
cccagagggacagaaccaaagaggacgcgcagaagaagcccacccagaacgccccccagggaacccagcac

SEQ ID NO: 236843 - RNA, 80 nt, Homo sapiens
ggagcgaggcagcgacaggacgggaacgggggaaaaagaaaagggcgaagacccgaagcagcgcaggaacagaagagaag

SEQ ID NO: 236844 - RNA, 80 nt, Homo sapiens
caccggcggggaacgaccccaacgcacaaaaggccaccaggaaacccccccgaagaagggagaacaacacgcgggcccag

SEQ ID NO: 236845 - RNA, 69 nt, Homo sapiens
aacaggccggagagagagaaacaggagacaggagagagagaagaagagacagcaggccaggcagcgagg

SEQ ID NO: 236846 - RNA, 89 nt, Homo sapiens
cgaggaggacgagcggcgagggacggaaaaagagcaggaacgagagggggagcaggggaccaacccaaaacagaacacgcgcaaggagc

SEQ ID NO: 236847 - RNA, 81 nt, Homo sapiens
ccgcgagcacagagcccgccgccgaccgccgcccgccacacccgccgccaggaacacgaggacccaaagaacaaacccgga

SEQ ID NO: 236848 - RNA, 75 nt, Homo sapiens
agacccagaagcaccagaaacgagccaaaaagacaagcgaaaaagggcagaccaaggacgcccaaacggaacagc

SEQ ID NO: 236849 - RNA, 53 nt, Homo sapiens
aaggccggagcgcccaacccaggggacaccgaaaacaaggaagcaggaagaca

SEQ ID NO: 236850 - RNA, 62 nt, Homo sapiens
gaaggaccaagaaccagccaaggacgacagagggggcagagacaagaagcaacgaagagaca

SEQ ID NO: 236851 - RNA, 57 nt, Homo sapiens
acacggaacagaacaacccagaacggaagccccccggaaaagcgacgaaaggccagg

SEQ ID NO: 236852 - RNA, 68 nt, Homo sapiens
cccgcagggggacccccagcgggcacggccagcacgagacagacagcccgccacccaaaccgaaaagg

SEQ ID NO: 236853 - RNA, 87 nt, Homo sapiens
gaagaagaccaagacccacagccccaggccagcagcacacaccacggaccgcacgggagccaccgaaggcagcaggccacacacccc

SEQ ID NO: 236854 - RNA, 78 nt, Homo sapiens
ccgcggcgccaggcgcacagccagcggcgccccgaacggaaaaacggggcacacagcaaaaaagcggacacagcccag

SEQ ID NO: 236855 - RNA, 74 nt, Homo sapiens
gggaaggggacaagaggacaccgaacgcccagaaccgggacaacccagcaaacaggccagacccgacaggagcg

SEQ ID NO: 236856 - RNA, 78 nt, Homo sapiens
cgagacaggccgaccgggaaagcccagcagcggaggggggaacacaacgccacaccagacaggacgagcccgcaaaca

SEQ ID NO: 236857 - RNA, 72 nt, Homo sapiens
accacgagggggcagcgggaccgacaccaagcgagacaggagcccagcccggcaaaggaccgaagcagaagc

SEQ ID NO: 236858 - RNA, 80 nt, Homo sapiens
gcccacagaggcaccaaaccagcccagcaagcaaccacgagagcacaaggacaaccaacaacccccagaacccgaaaccg

SEQ ID NO: 236859 - RNA, 70 nt, Homo sapiens
cgggagccgcaccaacgagcagaggagggacaaccacgggggagagaaccagaggagccggaaggcagac

SEQ ID NO: 236860 - RNA, 78 nt, Homo sapiens
ggaaaaaaagaccgaacagaaaccccccccccagccaccaagagaaggcgcagccggaacaccaaaccaggagccaag

SEQ ID NO: 236861 - RNA, 67 nt, Homo sapiens
cgacgggagacgcgcccacagaaacccggacgagaggcagcgagaggaaaaccagacgagagacaga

SEQ ID NO: 236862 - RNA, 64 nt, Homo sapiens
caacgggcgagagagcacagcagggagacaaaaacaggaagagaaggagggagccccaaggcag

SEQ ID NO: 236863 - RNA, 80 nt, Homo sapiens
cggaaaaaaccaaaacagccacgagaacaccccagagccccagacgcgaggccgagccaggagcacgacagcccacgcag

SEQ ID NO: 236864 - RNA, 74 nt, Homo sapiens
aaaaggcgaagggcgggaccccacgagagcaccaccagaaggcccgaggaaggacacacagcaacgaagcaggg

SEQ ID NO: 236865 - RNA, 91 nt, Homo sapiens
gccgacccgccggaagcgccaggacaaggggacccgggacgacgagacgacaccacaaaggggaccaaaagaacccagccaacccgcagag

SEQ ID NO: 236866 - RNA, 61 nt, Homo sapiens
ggccacggcagcgggcgcggaacaagagagagaaccaaaaaccgccccgaggcagaggcca

SEQ ID NO: 236867 - RNA, 79 nt, Homo sapiens
cagcaccgggacgcacagagaccggaagaccaagcaggagaaccgaccgccacaaaagaagacccaaagcaccaacaaa

SEQ ID NO: 236868 - RNA, 73 nt, Homo sapiens
agccagacacaagcacagcgagaccgcggcgcaggaggaggaggagagccccccacacgcgcgcgggaacccg

SEQ ID NO: 236869 - RNA, 82 nt, Homo sapiens
cagccaggagcagagcgacagcggcgagcagaacacggcgagcggggacacaagacgaacggcggagccggagcaacagcac

SEQ ID NO: 236870 - RNA, 67 nt, Homo sapiens
gagcggggccccacacccccccggggggggccagccaaccccagcaccccagggcagcagagacccc

SEQ ID NO: 236871 - RNA, 56 nt, Homo sapiens
aaaaaagaggagaagcacgcggagacaaaccggcgaccacacacggggacgacggg

SEQ ID NO: 236872 - RNA, 73 nt, Homo sapiens
gaaggaaccgaagaagacaggaaaacgcagaggccgaaaggcgccagccaagaacacaccaagccagcaagaa

SEQ ID NO: 236873 - RNA, 80 nt, Homo sapiens
gaggaggccgccagcagaggcggagcccgcagaccgcagaaggccggagacaccagcagggaaggggcccggccaggacc

SEQ ID NO: 236874 - RNA, 77 nt, Homo sapiens
gcacgccacccgcccagccccgagagcgggaacaggcacccgccaccacgcccaggaccaggaccgccccccggccc

SEQ ID NO: 236875 - RNA, 79 nt, Homo sapiens
ggcgaaacacccaaaaggcagaggaccagagaccagcagaggaagccaccgccggaacggccagggggccgaaggccgg

SEQ ID NO: 236876 - RNA, 74 nt, Homo sapiens
ccgcgggccgggccggaaaggaagggccaggacaccaggaaacggggacagaagaacgaagaacaaggacaagg

SEQ ID NO: 236877 - RNA, 87 nt, Homo sapiens
aacacagagagccgacggcagccagcggcggggcagccgagggcaggagcaagaaggcgccccccggccgggccccgcccaggcccg

SEQ ID NO: 236878 - RNA, 71 nt, Homo sapiens
aaagacaagggagaagcggcggacaagcacagggaccgccccagggggggggggacccaggcggccccagc

SEQ ID NO: 236879 - RNA, 82 nt, Homo sapiens
caccgcaagggccacgcgggcagaccgacagaaggccaacaagccgaggagaggcccacccgccaagcgcacaacccccagg

SEQ ID NO: 236880 - RNA, 85 nt, Homo sapiens
agagacaaaaccagcgaaaagcagcgccaagcgcagcagagcaaagccgaaaggcggcgacggcggcgcgaggaccgaccgggcc

SEQ ID NO: 236881 - RNA, 39 nt, Homo sapiens
agaaacgaccgccgccagccaccaaaaccggcaaaggcc

SEQ ID NO: 236882 - RNA, 83 nt, Homo sapiens
ggccgcccgcaagaaaacaagcagccgcacgacgcacggcccaggaccgcacaaggccagcacccgcccgaggacagagaggc

SEQ ID NO: 236883 - RNA, 81 nt, Homo sapiens
gaagcggggacacgcggccccagcgcccggccccccaccggacacccgcggcccgggcgcgccaggcacagccaagagcgg

SEQ ID NO: 236884 - RNA, 77 nt, Homo sapiens
gaccggaaggacgcagagaagccgggacgacccccaaagaaggaaaaggaggcagcaagagcagggacaacccagga

SEQ ID NO: 236885 - RNA, 76 nt, Homo sapiens
cagacacggagcccgcccgagcccgcccaggaaggaaaggaggagcagaacggaaagagacggggaccagggccag

SEQ ID NO: 236886 - RNA, 88 nt, Homo sapiens
gaccacacgggggagcgggggagcgaaacaacccgaagagaacagccaggccgagccggaagaagaggaaagcaaagaagccaagaag

SEQ ID NO: 236887 - RNA, 80 nt, Homo sapiens
aagaacgcgcccccgccgcgcccgggcggacagccgccaggaagcaacgcagcgcggaaaggcacaaccaaggacacgca

SEQ ID NO: 236888 - RNA, 62 nt, Homo sapiens
ggcggccaaaggccaggacaccaacgggaccagaagaaaccgcagcaccagaacgagaaagc

SEQ ID NO: 236889 - RNA, 73 nt, Homo sapiens
agcacgaggggaaagggaacacaacaccacaagagaaggagaccagaccacagaagagccgcagggaggaggg

SEQ ID NO: 236890 - RNA, 63 nt, Homo sapiens
gcggcccaaggcacaagcacccagccaaacccaggcccgagaagaagaggaaaacccaccacc

SEQ ID NO: 236891 - RNA, 56 nt, Homo sapiens
acaacagaagaagaacaggcgccaccaggggccagaaccgcccacggcccccacag

SEQ ID NO: 236892 - RNA, 79 nt, Homo sapiens
ccaggaaggcagggccgccccgcgcgggccaggagggaagggccagaacgagaaaggacagaacacaccggaccaacac

SEQ ID NO: 236893 - RNA, 81 nt, Homo sapiens
gaggcgcccggagcggccgccccagcaaaaggacagagaagcgcccagaagcgagagcaacggacagcaacagggacaacg

SEQ ID NO: 236894 - RNA, 76 nt, Homo sapiens
gaggccgcgagcccccgccgcgccccacgccggcacacacacagaggagcaggaggagaagaaaccccaagaccag

SEQ ID NO: 236895 - RNA, 80 nt, Homo sapiens
aaaacaaccagggcacaaccagggcagcaggggagcaagaaccaccgagaaaaggaccaaacaagaagagccagaacggg

SEQ ID NO: 236896 - RNA, 67 nt, Homo sapiens
caaaggaagaaaagaaagaaaagaagggcccaacacccacagggaaggagaacagagggaaaaagac

SEQ ID NO: 236897 - RNA, 59 nt, Homo sapiens
agcgcagccggcccagagccgggcccggggaccgagacaagcagaccggaagaccgacg

SEQ ID NO: 236898 - RNA, 64 nt, Homo sapiens
cacagcccagggaaggcaccaaaagggggggcaggaaagagacccaagggccggaccacggagc

SEQ ID NO: 236899 - RNA, 83 nt, Homo sapiens
agcgcccacgaaaaaacccccagcaggagaggccccccgccggcagccccgagcggccagcagggcaccaggcaagacccccc

SEQ ID NO: 236900 - RNA, 74 nt, Homo sapiens
gaccgcggcgggccgaagggcaggaccagagggcccgagacaggcccgcccgcgggcacccaggagggccgggc

SEQ ID NO: 236901 - RNA, 66 nt, Homo sapiens
ccgcggcgcgccacagggcgggcccggcacccggagagacaagggaaccaacgaacaacgggaggc

SEQ ID NO: 236902 - RNA, 73 nt, Homo sapiens
gaaaagggcagggacagcgcaggcagcagggagaagaaaaagcagaaaggaacagaaaacaaaagaacaaggc

SEQ ID NO: 236903 - RNA, 85 nt, Homo sapiens
agacccagcaggagcgaggaacgaggaagcagcggcagcgggccacaggcccacgcgcagcagcgccccgccagcccggaccagc

SEQ ID NO: 236904 - RNA, 43 nt, Homo sapiens
agcccccgagcggcgggaacagacccgaccgagcagcgcacac

SEQ ID NO: 236905 - RNA, 113 nt, Homo sapiens
gccgccgccccgaggaggaggccgccccaacagcaccggggcgcgcagacaggacccaaagcggcgccccgacgagagacaagaggggggcacaccggaggagaaccccccac

SEQ ID NO: 236906 - RNA, 92 nt, Homo sapiens
gccgaggagcgggcacagggcaaggcggcggacggcgcgcgcccgaggcgaggaggagcgcggcgggaaggaagagaaccgaagaagaaaac

SEQ ID NO: 236907 - RNA, 84 nt, Homo sapiens
caggcagcaacccaaacagggaccaaccaaagacgccaaggagaaggcagaccgggagcaggaggagaagaaaccccaagacca

SEQ ID NO: 236908 - RNA, 75 nt, Homo sapiens
cgcgggcggaagacaggccacccagcggggagcacggcgagcagccaggccaggagagacagaggcacaaaagga

SEQ ID NO: 236909 - RNA, 96 nt, Homo sapiens
gccgcgcggcacacggggcagccaggccgagccaacaaaagacgggcgcccgcacacacccgccacccgggcgagaaccccagccacccccggacc

SEQ ID NO: 236910 - RNA, 81 nt, Homo sapiens
ggcaccgcgcgaagcggccaaagccgcccagacggccaccggcgggaggaacaaaagaacaccagcaggaaaaaagagcgg

SEQ ID NO: 236911 - RNA, 118 nt, Homo sapiens
gacaggaggagaccaaacccccgacagcgccaggcccagacgccaacgcaggagcacccaggcgccccggcaaggccaccgcagaagccacaggagaccggaggccaacggcagaagc

SEQ ID NO: 236912 - RNA, 71 nt, Homo sapiens
gaaaacaccaggaaagacaggagaccaaaaagcgcggcagaagcgaaccggacacgcggagagcgggagac

SEQ ID NO: 236913 - RNA, 40 nt, Homo sapiens
aaaagcgaggcagcacaaagcaaaacaagccagcgccagg

SEQ ID NO: 236914 - RNA, 92 nt, Homo sapiens
gaccggagcagaacccccgcagagaaaggcagcaaagggaacgcgagaagaaccaggagcgcggcagggcgcgagcagagcagcaaagaccg

SEQ ID NO: 236915 - RNA, 85 nt, Homo sapiens
gcggccgggccgggaccgcgccaagcggccaacaacacgcaccagggcgaaaagccaggagcaaaagacgagcgcgacgccacca

SEQ ID NO: 236916 - RNA, 38 nt, Homo sapiens
cgaggaagagcggaaacagccgcacccgaaggaccacc

SEQ ID NO: 236917 - RNA, 85 nt, Homo sapiens
gaccccgagccacccgaaaacccagacagacaaccccaaggaggccagagcccaggccgaggcgaaaggagaaaacgagaagaaa

SEQ ID NO: 236918 - RNA, 67 nt, Homo sapiens
aagaggcgaggagcaacccaacgaaagagcaaccgggaacagaaacaggcaccagaagcagaggggg

SEQ ID NO: 236919 - RNA, 69 nt, Homo sapiens
ggaaccccggagaaaaggccaagaaggcagggaaacccagacgacaaggaaggccaagggacccacgac

SEQ ID NO: 236920 - RNA, 58 nt, Homo sapiens
caacccgacccgacgagcagcgaaaaacaaggccagcagggaggccccaagaacccca

SEQ ID NO: 236921 - RNA, 70 nt, Homo sapiens
acacgggaccaacgcaccagagccgagaaacgcgaaaaggaagcggaaggagccgggggcccggaagcag

SEQ ID NO: 236922 - RNA, 64 nt, Homo sapiens
caagcacaaccccaaaaaacaccaccaaccaaggcagaagccccagaggagcccgaaaccccca

SEQ ID NO: 236923 - RNA, 70 nt, Homo sapiens
gacagagaagacgcagggaccgacagcaagaaaaggagaaaacaaggccgcgggcacacagcaaccaggc

SEQ ID NO: 236924 - RNA, 79 nt, Homo sapiens
cgaacagcaggcgccaccagcccggagccccaggaggggagcaacgagaagaagacaacagggcaccggcccaagaccg

SEQ ID NO: 236925 - RNA, 71 nt, Homo sapiens
gggcgagccaggggaagagacccagaggaggcgagaggacagggacaagcgcacagcggagaaagcagcgc

SEQ ID NO: 236926 - RNA, 50 nt, Homo sapiens
gacccccgggaagaagacacagaaaacagccaccgccccaccaacggggc

SEQ ID NO: 236927 - RNA, 74 nt, Homo sapiens
cgccgggccaaaacaaaagaaagaccagagacacgaagaagaggaggaacgaaccaaagaaaagcaaacgaaaa

SEQ ID NO: 236928 - RNA, 77 nt, Homo sapiens
aggaggacgccagacgcacggaaagcagcgcaggagccaagaccacagcagcacccagacacacaccacgccaagaa

SEQ ID NO: 236929 - RNA, 69 nt, Homo sapiens
agaaagcagacggggcggcagaccgagagggggccagcccagacgggccagcaacacccaacacaaagc

SEQ ID NO: 236930 - RNA, 79 nt, Homo sapiens
aaagaaacccgcccccggaaaccaccccaagcacggcaaagcaggggccgaccagagaggagacgagccaaggcacacc

SEQ ID NO: 236931 - RNA, 52 nt, Homo sapiens
agaccccggcgcgggaacgggaaaaaaacccggagccagagcagaccaagag

SEQ ID NO: 236932 - RNA, 81 nt, Homo sapiens
aggacaagaaaggaagaacagaaaccaagccaacaaaagaagcgccgcagggcaaggccagagaaggcgggagaaagacac

SEQ ID NO: 236933 - RNA, 74 nt, Homo sapiens
gagcgcgaaggagcgcggggggcacccgaggaggaagagggcagggcccacggaaagaagggaaacccggggag

SEQ ID NO: 236934 - RNA, 79 nt, Homo sapiens
gagagaaggacaacaccacaggaagagggaagcccccgaaggagaccagcgacgcggacccagcggcccacggccaacc

SEQ ID NO: 236935 - RNA, 78 nt, Homo sapiens
ggaacagcagaacaagcgaggccgggcagagggaccacggggagccccacgagaaccaaggagacagggaaaaccgac

SEQ ID NO: 236936 - RNA, 80 nt, Homo sapiens
cgaaccaggcgaacaagacgacaccgccagcaccgaccaccgaggcggagggggagaacacccagagggccacgaccggc

SEQ ID NO: 236937 - RNA, 81 nt, Homo sapiens
gcgcggagggccgagggagggccgagccagccgcggccggaggagcccccaggccggagaaaaccagcccaaaacaaaaaa

SEQ ID NO: 236938 - RNA, 81 nt, Homo sapiens
cgcaaaggcaggggaagaacagccaccaggcagaagaaaaaccagcacgcaggaacaacagacaagcggaacaccgaagag

SEQ ID NO: 236939 - RNA, 83 nt, Homo sapiens
caggcaagcaggacccgggaggaccaggagcgccccaaggacaaccagggaagcagaaggcaaggaccccggcaaggagaaac

SEQ ID NO: 236940 - RNA, 76 nt, Homo sapiens
gacggcgacgcgggaggccagggacacaaaagcaaccgagagggaaacaaccacgcgaaaaggagacacagcacaa

SEQ ID NO: 236941 - RNA, 64 nt, Homo sapiens
aaaggacagaccaggaagagcagaagggacgagcgcggcaccacaacaacccggggcacgaagg

SEQ ID NO: 236942 - RNA, 54 nt, Homo sapiens
acgcggcgcgcgaccgacacgaaggagagacaaagcgaaagaaacccgcacaga

SEQ ID NO: 236943 - RNA, 75 nt, Homo sapiens
caaaggagcgccaagccaaaacggaccacgaggagggagaaggccacagaccccggaagaaaaacggccgggaga

SEQ ID NO: 236944 - RNA, 71 nt, Homo sapiens
gcgcgccccgcccggaccgcgcagaaccagggcggcggccagcgccacgcgcagccaagagggaagcgccc

SEQ ID NO: 236945 - RNA, 69 nt, Homo sapiens
gcaaagagagaaaagaacgagagcccggcgaaaaaggaggaagagggggagagaaggaggcaaggaaac

SEQ ID NO: 236946 - RNA, 79 nt, Homo sapiens
cccggaggccggcacgcacggccccgaagggcaccaacaaggccagccagcagggcagacggccaggcacccggcgcca

SEQ ID NO: 236947 - RNA, 73 nt, Homo sapiens
gccaccgcaaggcacagcgccagggagggagagcggcagaggacagaagaggagggaaggaggcgagcaagcc

SEQ ID NO: 236948 - RNA, 80 nt, Homo sapiens
cccaagaagacccagcggacggggaggggcgcccccaggcgcacgagagaagagacgaggaggaggggagaccgcggcag

SEQ ID NO: 236949 - RNA, 77 nt, Homo sapiens
gccccccaggacccgccggcgcgagaaaagcacccaagccagggagcggcaaaagcaaaagggccagaaaacgacac

SEQ ID NO: 236950 - RNA, 70 nt, Homo sapiens
cgccggcaggccccgggccgaaacagcaacgcggagagagcgccaagcgcgcagggcaaaccccacccca

SEQ ID NO: 236951 - RNA, 84 nt, Homo sapiens
ccaagaggcggggcacgcgggagccaaggagacgcccccagcggcagcagcacgaggccgcggcccgaacgccggcagaggagg

SEQ ID NO: 236952 - RNA, 68 nt, Homo sapiens
cgggcccacagaaaagcagcccaacgaaaaccgcggaacgggcgacgaagcggcgaagcaggagaagc

SEQ ID NO: 236953 - RNA, 72 nt, Homo sapiens
agcacaaaacagcgaagaagagagccaaaccagaccgccagagcggaacgaccccagagcgagcccgcagca

SEQ ID NO: 236954 - RNA, 75 nt, Homo sapiens
gagaaaggacgggcaaaacaggaacgaagccagccgcagagagcagcgagagcccaaaggaacacaaaaaggaag

SEQ ID NO: 236955 - RNA, 77 nt, Homo sapiens
gccgaccgagcaccaggcgccgagaaacgcggaaaagaagaggcagagggaaggcagccaacagcgagaaggaagga

SEQ ID NO: 236956 - RNA, 63 nt, Homo sapiens
cacagagagagaagccaggagccaccaacaccaaaaagaaacagccacccagcgacgggccac

SEQ ID NO: 236957 - RNA, 58 nt, Homo sapiens
aaaagggcagaacgaaaaagaagaaccgcaaaagccagagggaacaaacaaagccagg

SEQ ID NO: 236958 - RNA, 70 nt, Homo sapiens
cgggggacggagaggaaccaggaagaccgcaggaaagcaggaaggcaagaaagccaaggacgaaacccac

SEQ ID NO: 236959 - RNA, 79 nt, Homo sapiens
caaacagcagagagaacggaggcgagacgacagcccaaacaggagcggagcagccaaagagggaagcccagaggcacgg

SEQ ID NO: 236960 - RNA, 78 nt, Homo sapiens
gcggcagcagcaccagcccaagagaagagaggagcaaaaaaggaacaagacagaaaaacaacgaccaaaaacacacgg

SEQ ID NO: 236961 - RNA, 74 nt, Homo sapiens
cccaaaggcgggaacagacggcacacaaccaaccggcgagccaaggggccaaagaggccagaaagacaggcggg

SEQ ID NO: 236962 - RNA, 34 nt, Homo sapiens
aaggaccaagaaccaggagacgagcgccaaagac

SEQ ID NO: 236963 - RNA, 93 nt, Homo sapiens
cccacgccggcacgggcccggggaaaaggaggagaggcggcggccgacacccaaaccaccacagagaagcaggcgaccaggcgcgcgggcaag

SEQ ID NO: 236964 - RNA, 76 nt, Homo sapiens
gaagaaacgaaggggggaggcccaggccaaaagaagcaccacaagcaaggaacaaaagaaagcaaggaaccaaaaa

SEQ ID NO: 236965 - RNA, 75 nt, Homo sapiens
cgaggaggacgccggaccagcaccccaacgagcgccccacacaaggaaaagacggagcagggccggggagcaagc

SEQ ID NO: 236966 - RNA, 80 nt, Homo sapiens
agaccaggaggcagaaagacggggaaagaccacgaccgcagggagagaaggacccaaagggaaaaagggaaaagcgagcg

SEQ ID NO: 236967 - RNA, 75 nt, Homo sapiens
agagagccaggagcgcacacacgacaggagaaaggaggaagaagccccacggcagcagcaaccacacgccgaaac

SEQ ID NO: 236968 - RNA, 79 nt, Homo sapiens
accgcgaaagcggaccaaggaaccagaaacaacgaacgagcaaggaagggccaaggcagaccccacaccggagaacgca

SEQ ID NO: 236969 - RNA, 72 nt, Homo sapiens
caacacacgaagggccagggggagaagagggagacccgaacgaagacgcagcccagacaggaaaagggagag

SEQ ID NO: 236970 - RNA, 74 nt, Homo sapiens
caacacggcggaccacacaagcaaaagaggagggaccaaaggacaaccggaccaagggaccccgggcgccagga

SEQ ID NO: 236971 - RNA, 114 nt, Homo sapiens
gccaaagagaaacggaggcagaaaggaagcagcaggcagaacaccaaaagcaagaggcaagacgccagaagcagcgaaaaagaacacaaaacggcagaaccagcaaaagacaga

SEQ ID NO: 236972 - RNA, 71 nt, Homo sapiens
caagaggcggcgggagaccccaaccgcagagcgcccggacggagaaagagagcgaaaagcagaagcagaaa

SEQ ID NO: 236973 - RNA, 77 nt, Homo sapiens
aaaacggaaacccaaagcccgaaggcgccaccagaaacgaaagacaagggccgacgccaccgccgagcccagaccgg

SEQ ID NO: 236974 - RNA, 85 nt, Homo sapiens
acaccccaacgggagacaagaagacgccaacgagcggcgcggacggcgcgcggacaccagggacccaggaggaaaccagcagccg

SEQ ID NO: 236975 - RNA, 83 nt, Homo sapiens
ggcccccgagagccgccgacagaagaaagacggcggaccgcgggggagaacggagacccgaccaccggaagccacggcccgga

SEQ ID NO: 236976 - RNA, 65 nt, Homo sapiens
gagaaaggagccagaaacagcgagccgacagaacccaagaaggcagaagccagccccgcaggccg

SEQ ID NO: 236977 - RNA, 71 nt, Homo sapiens
gaagaaaaagaagacgccagcaccaaccccaaaggaaacgagagagagaccacgggggcccgacgagccgc

SEQ ID NO: 236978 - RNA, 76 nt, Homo sapiens
cgcgagccgagcgacggcgcggcggagacgccggcgcccccccccccgccgacacacgcgcgaaggagaaggacgg

SEQ ID NO: 236979 - RNA, 81 nt, Homo sapiens
cgggcgccagaaacggggcgcgggggccgcgcgaagacaggaccagggcacggagaccggaacaggggcgggcggaagcac

SEQ ID NO: 236980 - RNA, 74 nt, Homo sapiens
gccaccaccgggagcagcagcgacaaccagaagacgacagcacagccgccaaagcgacgaaaacacaagcgaac

SEQ ID NO: 236981 - RNA, 74 nt, Homo sapiens
gcggccgggcgcaagacagaaggggagaacgcacggcgaccccaggcaggcagaagaaaacagagagcccgcca

SEQ ID NO: 236982 - RNA, 86 nt, Homo sapiens
ccgcccgccgaccgcggcagacggaaaaggagcgccccacagcaaggcgggcaggagggcgcacgcccacagacggggggcagacg

SEQ ID NO: 236983 - RNA, 43 nt, Homo sapiens
aggacagaggcaggaaagccagcgagcgggcggacaccagaac

SEQ ID NO: 236984 - RNA, 59 nt, Homo sapiens
caaccccacagggccagcaaggggacgaacggagaccgaaacacagaaaagcggaaaca

SEQ ID NO: 236985 - RNA, 76 nt, Homo sapiens
cgcaggacccagagaagcccgacggccaggaggcgaagagacgaggaagcccaggagcccgaacacaaaaagaccc

SEQ ID NO: 236986 - RNA, 77 nt, Homo sapiens
gagcgagcggcgcaccagcacgaccccaccggcggcgggccggaagcagagcgcagcccagccacaggcaacgaaaa

SEQ ID NO: 236987 - RNA, 79 nt, Homo sapiens
cccccaagcagcgagacacagcaccaggaagaagaggcggaagaaacaacaagcgcaaggagcgcccaaaccaccgaca

SEQ ID NO: 236988 - RNA, 78 nt, Homo sapiens
aaccaaaccaagccgaaggaaaggcagaacgccgaacaggagcaacagaggaaggaacagagccacagagaaaaagac

SEQ ID NO: 236989 - RNA, 71 nt, Homo sapiens
agcggcaaccagaccgcagaacccaaaggcggcacagaacagaggacaaggccgacgcgcacgaacacggg

SEQ ID NO: 236990 - RNA, 66 nt, Homo sapiens
cgaccagcgggaggccagaggaagggccagaggagagagagaagacgaggaagaaacaaaagcaga

SEQ ID NO: 236991 - RNA, 82 nt, Homo sapiens
gcgcagccggagccgggccgcagcgcgaggccgggccgggggagaccgcgaggcgacgagacggagacagcaaacagaaagc

SEQ ID NO: 236992 - RNA, 66 nt, Homo sapiens
gcggagcacaaaagagcccgcggggaggcgcggccgccccgcgggggacggaacagcacaccgagc

SEQ ID NO: 236993 - RNA, 81 nt, Homo sapiens
cagacaagcgggggaggcaggccgccccccagcgggcgcgccacgaggacaagcagaaaccaagcggaccgagacacagcc

SEQ ID NO: 236994 - RNA, 45 nt, Homo sapiens
ccagaccggccgcaagaggccgaccaagcagaacccgagaagagc

SEQ ID NO: 236995 - RNA, 71 nt, Homo sapiens
cacccagggaaaggagacaaggaccgaaacagaaacggaacaccaagcccccgcccgagcagaagagcggg

SEQ ID NO: 236996 - RNA, 76 nt, Homo sapiens
gccggggcagccacgagacgacagagggccaggccgcagcggcccaagaccacccccagagcgccaccaggggaag

SEQ ID NO: 236997 - RNA, 75 nt, Homo sapiens
ggaaggaaggaccacacagagcgcaccaaaacaagcccacaaaccggaggacacccccagacgcagaagggcagg

SEQ ID NO: 236998 - RNA, 77 nt, Homo sapiens
gcccccgaggccccagaacaccgggcgcgcgggggcacagcccaggcgcagcagcggacccccccggccccggaggc

SEQ ID NO: 236999 - RNA, 76 nt, Homo sapiens
ccaaccaacaggcaagcaggaaaaaaagaaaaagcggggaaaacaaaaaaaagaaggagggaagagggggccagga

SEQ ID NO: 237000 - RNA, 71 nt, Homo sapiens
gggacccagggacgcggagggggaccgccgccaccggcgggaagagcaccacccagcgacccaacagagac

SEQ ID NO: 237001 - RNA, 59 nt, Homo sapiens
ccccccagaggccgcgacgacccccaggaccacgagaggagaagagcagaggagggaga

SEQ ID NO: 237002 - RNA, 79 nt, Homo sapiens
caaacacacgggaccgaaacaggccggggcacagcacagcgccggcgcaaggaagaggagcaggacggagggagaaggg

SEQ ID NO: 237003 - RNA, 87 nt, Homo sapiens
cgccggaggagacgacaagaccgggacacccgaagcgggaaaggagaagacagaggagccagaccaagagacagcacaggcgagcga

SEQ ID NO: 237004 - RNA, 72 nt, Homo sapiens
ccgaaagccaccacaccagacccaaggaacacagcaagccggcccccgacggaaagacggcggggaggagag

SEQ ID NO: 237005 - RNA, 76 nt, Homo sapiens
acccggccccgagacagaagccggccacaaagccgggaacggaggacccagaaccaagggcgcggaacgagaccca

SEQ ID NO: 237006 - RNA, 70 nt, Homo sapiens
caaaaggagccccacacagcgaaaaaaaggaaagggccagggaaaacacaccaaacaggccaccaagcac

SEQ ID NO: 237007 - RNA, 66 nt, Homo sapiens
gggggagcgggcccggggggacggggggaggcaggaccggaccgcaacagacacgggaagcaggac

SEQ ID NO: 237008 - RNA, 94 nt, Homo sapiens
ggcagagggcgagggcgagggcagagggcgcggcggcagcggccgcggaagggacccagacaggagcgcgggaagaagccggcccggggccgcg

SEQ ID NO: 237009 - RNA, 74 nt, Homo sapiens
ggaccagaagaagcacaagggccgagaagaagcggggacggcaaaacagccaacggaacaccaaggaaaaagaa

SEQ ID NO: 237010 - RNA, 75 nt, Homo sapiens
gcgaacgggggcgaacggggcgagccggaggagcacccaaccccgcgcaaaacaaacggagagaggagggagaaa

SEQ ID NO: 237011 - RNA, 69 nt, Homo sapiens
aggaccgaaaagcaggaagggaccagccagacacacaacaccccagggccacacaccacagcaaccaag

SEQ ID NO: 237012 - RNA, 39 nt, Homo sapiens
aaagcaaaacggcacgggagagagcgcacaaggcacgga

SEQ ID NO: 237013 - RNA, 36 nt, Homo sapiens
gaaggcgcgaggcaacaaccacccagccccagcccc

SEQ ID NO: 237014 - RNA, 57 nt, Homo sapiens
cagcccgaggaggaaaaggaagagaaaagcagagagcagagagcccacgaacggcgg

SEQ ID NO: 237015 - RNA, 58 nt, Homo sapiens
cacccgccaccagacaagagccacaacccacgcaaagaccaacccggaaggccccagc

SEQ ID NO: 237016 - RNA, 77 nt, Homo sapiens
ccccgaggaggaagacgaacgaaacacgaaagggcaggaccagcccggcacagcagccggaggccaaagcaggcaag

SEQ ID NO: 237017 - RNA, 72 nt, Homo sapiens
ggccccccgcaccccaggagacacccagacccaccacaccagcccgccagaagccagacgccgggaaggcca

SEQ ID NO: 237018 - RNA, 68 nt, Homo sapiens
gaaggaaaagaacccaacaccagagggcagccaggagagaaaccagggaccaccgaagcagaaaacca

SEQ ID NO: 237019 - RNA, 58 nt, Homo sapiens
gcgcggcgacgcgggccgagccccccaggagacgaagaccaagaagggagagagcaaa

SEQ ID NO: 237020 - RNA, 63 nt, Homo sapiens
ccaaaaagccgcaggggacgacaagggagcgaagaaaagaaacggcaagacacgaaagaacga

SEQ ID NO: 237021 - RNA, 76 nt, Homo sapiens
ggacgacgcggccgggcccggcaccgccgcggacggccgaagcggagcaaaccccgaccaccaagggcaagcacaa

SEQ ID NO: 237022 - RNA, 77 nt, Homo sapiens
cccgagccagccccgacagcgggaaccgcgcggccgaacccagcgagaaaccaggaaccaccccgggagccgagccc

SEQ ID NO: 237023 - RNA, 74 nt, Homo sapiens
agggcgacagcaacagccgccggcggaagggggagagcacaaggcgaacaagcccccaggcgagagcaaagcgg

SEQ ID NO: 237024 - RNA, 82 nt, Homo sapiens
gcgaagagcgaagagagagaaagcccagcacccgagggagagcgcaccaccccacgcgccaggcgagaccccagggcacgag

SEQ ID NO: 237025 - RNA, 75 nt, Homo sapiens
acaaaggagacacaacacagacggcaggggggggcggaaacacacccagcccagggccagccccaagcaagcccc

SEQ ID NO: 237026 - RNA, 82 nt, Homo sapiens
cacagccgcggcggcagcagcaggagaggcgaagggagggccgccccaaccgacgcaccagccggaggaggagggacagggc

SEQ ID NO: 237027 - RNA, 82 nt, Homo sapiens
ggggcaccgccaagaccagcacggccacccaccccaccagagccggacaccagagccggacaccagggaggagcgagcgacg

SEQ ID NO: 237028 - RNA, 66 nt, Homo sapiens
agagcgcggaacaggacgccccgaggacaagagaaaaaaagggcgggcgaacaaaaagagcagagg

SEQ ID NO: 237029 - RNA, 77 nt, Homo sapiens
cccagccaaagaccacagcacccagacaacaagaggagggcggggagccgggcccccggcccagccggacccagcca

SEQ ID NO: 237030 - RNA, 85 nt, Homo sapiens
aagagccaaggaaaaacagcaagaacccaaaagggcccacacaccagccagaggaaaaacagaacccaacaaaccaaaaacaaca

SEQ ID NO: 237031 - RNA, 76 nt, Homo sapiens
acgggccaagagagcccgggcccggaaaggacccgcaccagaacacacgcaacacaacagcagggagcacgcggac

SEQ ID NO: 237032 - RNA, 56 nt, Homo sapiens
ccagccgagcccccgggccgacggaacaagaagggaacgaaacgagccccgggaag

SEQ ID NO: 237033 - RNA, 77 nt, Homo sapiens
caagaacaagggccgcgagggaaaccgacccgcgagacacgcggacggacggagggcaccacgaccagagcagaaga

SEQ ID NO: 237034 - RNA, 77 nt, Homo sapiens
ccaaagaggacgggacacgggccaagggagcgaaaagaacccccaaaagggcccggagcacacaaggcgaaagaaaa

SEQ ID NO: 237035 - RNA, 42 nt, Homo sapiens
ggccgggagaagcagcagcgcaaggaaaagaaaagccaacca

SEQ ID NO: 237036 - RNA, 68 nt, Homo sapiens
aggaccaagaaccagagccaacacccgaagcgaagggcggacagacccagagcagccgcaaaccccga

SEQ ID NO: 237037 - RNA, 63 nt, Homo sapiens
accgagacaagcaccccgaagcgccggaacaggacaagcgaaccggagcccaaaacagcaagc

SEQ ID NO: 237038 - RNA, 81 nt, Homo sapiens
aagggacgcagggcaaaaaggggaaaagcaaaccggagagaacccaccaaccggaagcgcaacagcgaacagaaaacaaag

SEQ ID NO: 237039 - RNA, 78 nt, Homo sapiens
aaagaaccgagagaacgagcacccccgaagcacccaggacccagagagggaccagggccaaagaagagccggggggca

SEQ ID NO: 237040 - RNA, 76 nt, Homo sapiens
accccaggcaccagcgccagccacacagacagcaggagccacgcagaaaccgggagaagccggccaggcaggcaca

SEQ ID NO: 237041 - RNA, 44 nt, Homo sapiens
acagcacagcccaccgaccaaagaaacgaaggaggcccaaccac

SEQ ID NO: 237042 - RNA, 72 nt, Homo sapiens
cagccgccgccccgcagccccccgcagcacccagccggccacgggggagcgggaagacccggacaacggacc

SEQ ID NO: 237043 - RNA, 57 nt, Homo sapiens
ggacagcgcaggcagcaggggaccaagaaacaaccagaaacaggcagaacacagaga

SEQ ID NO: 237044 - RNA, 78 nt, Homo sapiens
aaagggagggcggccaaccgcacagacgaccagaagcgcgggggccggaggccggcacaaccccacagaccaccacac

SEQ ID NO: 237045 - RNA, 74 nt, Homo sapiens
acccacggaggaaggagcacgggaagggcaagccagcgacgagacaccagaggaacacacagcgagaggaagga

SEQ ID NO: 237046 - RNA, 82 nt, Homo sapiens
caccgaaggaagggcccagaaaagaaagaccgggccccgccaaaaagccagaagcccaccccaaagaagcacaaggaccgag

SEQ ID NO: 237047 - RNA, 46 nt, Homo sapiens
aaaaaagcggaagagcgccagcacggaccgacccaaccgaagaaag

SEQ ID NO: 237048 - RNA, 69 nt, Homo sapiens
ccacccaccaacaaagagggcgaagcgggagcggaaaccccagaagcgcaaaggaggaggacaccacgg

SEQ ID NO: 237049 - RNA, 69 nt, Homo sapiens
cagcaccaaagaaggcggccaaggcccaaagcgaaacaaacgcaaccgaccagcccccccggaaaggag

SEQ ID NO: 237050 - RNA, 61 nt, Homo sapiens
cccaggccaagagggacccacccggcgggggcagaaccgaggggccggagcagccgcaccc

SEQ ID NO: 237051 - RNA, 74 nt, Homo sapiens
aggagccgagacggccaggggaacaacagccgacaaaggcaaccccaacggccagaagaacgaccaagcgccca

SEQ ID NO: 237052 - RNA, 69 nt, Homo sapiens
ggagacaaggaccgaaacagaaacggaacaccaagaaccaggaccgaggggaacgccccaaaagaaaaa

SEQ ID NO: 237053 - RNA, 67 nt, Homo sapiens
cgcaccgcaggcagacaaaagggccaaagaagggagagagcccagcaaagaagcccagaggaacaaa

SEQ ID NO: 237054 - RNA, 75 nt, Homo sapiens
agccgaaaaaaaagcaaaggccagacggagccaaacagccacagaaggcaaagaacggccaaggaaggagcgagg

SEQ ID NO: 237055 - RNA, 75 nt, Homo sapiens
ggaaaaacgggagggaggaccggccagcccccccaaaaaggaaagacaccggcgggccagaaaccgcagggagag

SEQ ID NO: 237056 - RNA, 79 nt, Homo sapiens
gggccaggccacggacgaagcccagagagcccaaacgagaaggaagccgcggaggaccgagcgcacagacaaccaggcg

SEQ ID NO: 237057 - RNA, 76 nt, Homo sapiens
caggccgggcgaggcgaggccacccgggccgccggcggccacgggcaaacaggaccgaagcggcgggcgacacgga

SEQ ID NO: 237058 - RNA, 93 nt, Homo sapiens
cgcaccccgacgccgaggaacgagagcgcgaagcaaggaaagaaccggaggcgaagcaggccaaagaagaagccaggcgaaagaacagaccgc

SEQ ID NO: 237059 - RNA, 75 nt, Homo sapiens
caaggcgccccccgaggcgggcagccgccgcggcacacagccccaccccaagcacagaggaccaggaggcaacaa

SEQ ID NO: 237060 - RNA, 55 nt, Homo sapiens
aaaagcaacaaagagggacagcaaaggcggggagacacccaagaaaacaaagaag

SEQ ID NO: 237061 - RNA, 74 nt, Homo sapiens
gccccccggagacgcaaccaagaaagcgaccagagaccgaggaccgcggacgagcacaacagcagagaaagagg

SEQ ID NO: 237062 - RNA, 118 nt, Homo sapiens
gcggcagggaggagcgcagggcgagccggagagccggccgagcgaggcggcgcggccagaagcgccgggaggacaagcgaccagcggaaagagccgcacagcggcacaccaagggaag

SEQ ID NO: 237063 - RNA, 79 nt, Homo sapiens
cgccgccgacggccggcagggggcagaagaaaaagcaggacaacagggcaaggagcgggaggacagaaagccaagggac

SEQ ID NO: 237064 - RNA, 42 nt, Homo sapiens
acaggagaagagcaagcaggggacccggggcccacgaacgcc

SEQ ID NO: 237065 - RNA, 66 nt, Homo sapiens
ccgagaagcccacaaacaaggacaggagggagccaccggggggaagcgcaggggacaaaggagaca

SEQ ID NO: 237066 - RNA, 87 nt, Homo sapiens
agcgcgccaagcgcagacgagcgggcaaggcaaggcggaacacgaccagcgccccaacccccgggcgcgccggacaggccgccgcgg

SEQ ID NO: 237067 - RNA, 58 nt, Homo sapiens
ccccgaggagcgggaacagaccaagccagggcagcggcggacaaagggcacaaccgcc

SEQ ID NO: 237068 - RNA, 76 nt, Homo sapiens
ggccccggagcggcgcggcgggccggcggcgcgggcggagaacggaaaagcaccaggaagcagagaggaccgcaga

SEQ ID NO: 237069 - RNA, 69 nt, Homo sapiens
acgagccaaaaggacaaaccagacgaagaaagccaacgaaccacaacagcacgcaccccgcgccgccgc

SEQ ID NO: 237070 - RNA, 73 nt, Homo sapiens
caaggaaggcaagccgccgccgcacgacagaagccgccagcgagccccacacagaagcagaagaaggacaccc

SEQ ID NO: 237071 - RNA, 78 nt, Homo sapiens
aaggccccacccccacaccgcacccacccccgagcacgccgcaacacccgcggaacccagcccagaggcgaagccgga

SEQ ID NO: 237072 - RNA, 55 nt, Homo sapiens
agcggcacagccagaagaccgaagcgcgacggaaggaaggagggccccggagcag

SEQ ID NO: 237073 - RNA, 57 nt, Homo sapiens
caggagccgccccgcccggggacgaagagcgcagcccccggcggaaagaggcagcag

SEQ ID NO: 237074 - RNA, 79 nt, Homo sapiens
agagcggaccgagagcgcgaaacgcacgagaagagaaagaagcgagaggaacaaccggagcccgcaagaagccaaggca

SEQ ID NO: 237075 - RNA, 80 nt, Homo sapiens
ggacccccccggggcgagaaggagagccaaaggaggcacgacagcagaggaagagaagcagcgaagccgaggcacagacc

SEQ ID NO: 237076 - RNA, 79 nt, Homo sapiens
gccccagagaaagaacaggagaagggaaagcaacaggccaacgcccggccagcgccacgcgagcgcgcaagggcggcgc

SEQ ID NO: 237077 - RNA, 50 nt, Homo sapiens
ggccacgcaagagccacacggggagagccaggccaagcaccagaaggcca

SEQ ID NO: 237078 - RNA, 73 nt, Homo sapiens
gcagggacagccaagaaccaaaaaggaccacgaaggcaggaaaaggcggagaggcgcggggcccagccccacc

SEQ ID NO: 237079 - RNA, 77 nt, Homo sapiens
cggggggcaggggcgggcggcagaacagccaagagcgcggaacgcgacagacaacaagagggcagaacaccaacacg

SEQ ID NO: 237080 - RNA, 72 nt, Homo sapiens
gcacgagaccccccgcgagagcgcaaacacccccagacaaagggcacacccggagcgcccgccagccgggac

SEQ ID NO: 237081 - RNA, 79 nt, Homo sapiens
aaggaccaagaaccagaaagggcagcaagacacgaagccgagaaagagcagcgacaacaaggaggccccggcaagagcc

SEQ ID NO: 237082 - RNA, 69 nt, Homo sapiens
agacagaagacgccgagggaagaaagaagacagacaggcagggccaaaacggaaccaaggaaaaacaag

SEQ ID NO: 237083 - RNA, 86 nt, Homo sapiens
aagccggagcaagagcgcaggccaccccgcgcgagcaggcgcgcccagggagcccgccccaggggaggaagcccgcaggccaagcc

SEQ ID NO: 237084 - RNA, 78 nt, Homo sapiens
gggagaaggagcagaacaggagaggaagagccgaagaagagggagagacaggggcgcaggaagcagcagccagaaaag

SEQ ID NO: 237085 - RNA, 85 nt, Homo sapiens
gcggcagcggggaggccgcccggcgcagcggggaccggcggcggcgcccaggcacccggcccgggcacaggagggcagaccaaaa

SEQ ID NO: 237086 - RNA, 77 nt, Homo sapiens
aggcggacaggcggaacaaaggggcaacgaggaacaggccaagaaacaacacagccaaggccagcgccacggcggga

SEQ ID NO: 237087 - RNA, 77 nt, Homo sapiens
aggccagcgcggcacggcgcaggaggagaccggcggcagggcaagcggcgacggaccccaagacggaagagccaaca

SEQ ID NO: 237088 - RNA, 79 nt, Homo sapiens
cccagaaagccaagccggaccgaggccaaaagaaaggaagaaaacccccaaaaagccaaaaggccaagacaagaagaag

SEQ ID NO: 237089 - RNA, 54 nt, Homo sapiens
cgcacggggcacaacagccggaagccaggaaaggccccacgccgggccacgaga

SEQ ID NO: 237090 - RNA, 79 nt, Homo sapiens
aagcgaaggggaaggcgccgaagaggacgaaggacagggcagaccgccagcagcacagcaagccacagagagggccggc

SEQ ID NO: 237091 - RNA, 105 nt, Homo sapiens
cgggccgccaccacggcacacccagaccgaacaacaccggcagcgcgcacaaccccccgaccaggggggcagccccggagaaaacagggccacaagcgcccacaa

SEQ ID NO: 237092 - RNA, 74 nt, Homo sapiens
accccaagacaagaaaaccaagcacagcgagaagggaacagaccgacgagggaaggcgaaaggcgaaacaacaa

SEQ ID NO: 237093 - RNA, 74 nt, Homo sapiens
gccgcgggccgcaggccgcgagcagcggacgccggccgccgcaggagagagacagcaccacagaggccccggga

SEQ ID NO: 237094 - RNA, 80 nt, Homo sapiens
acccacgccaaaccagggccggaaagcgcaagggcgggcagggagaaacgcccgcagaagaaggaagaggaacaagcaaa

SEQ ID NO: 237095 - RNA, 56 nt, Homo sapiens
cccagcgcaggaaagcagcaacccacagagagagaggaaacgaagggagcgacaca

SEQ ID NO: 237096 - RNA, 74 nt, Homo sapiens
caacccccagaccagcaccccgcccagccacccaagaagcgggaccacaggcacccggaaacaagccacgaagg

SEQ ID NO: 237097 - RNA, 70 nt, Homo sapiens
gcgcaaggcacaagcaccagagaacaagcaccaaagcgaaggagggccgcaagaacccaccagacaacaa

SEQ ID NO: 237098 - RNA, 65 nt, Homo sapiens
gcagagaaagaagagagagcaggccgaggcacagaagaaaggacaagcccccacgaggaaaaccc

SEQ ID NO: 237099 - RNA, 50 nt, Homo sapiens
ccccaaacagagcccaggacaaaaacaccacgcgcgccgggagacgcggg

SEQ ID NO: 237100 - RNA, 78 nt, Homo sapiens
aaggcaaagcgcagaaaccacagggagagacagagcgcggcacgagcaccagagaggggcccaggcaaggcgccgcaa

SEQ ID NO: 237101 - RNA, 80 nt, Homo sapiens
cagaaagaacagaccacccgaaaaggaaacggggacagccagacagaagagaagcaaggaggggcagaaaaacaggagga

SEQ ID NO: 237102 - RNA, 83 nt, Homo sapiens
ccccggcgagcagggagcggagaccagcaccaccagcaggcacaggcgccacggccggaacgcacagcggaaggccgccaccc

SEQ ID NO: 237103 - RNA, 76 nt, Homo sapiens
gaggccacgcagcaaaccacaggagaggagagagcgaccaaacccccacaacaaggacaaagggacccaaggacca

SEQ ID NO: 237104 - RNA, 59 nt, Homo sapiens
ccacaaaaaaccagagaaagagcaagacagagaaaaggcccagagcgacgggcggaaac

SEQ ID NO: 237105 - RNA, 76 nt, Homo sapiens
caagaggcagagaaaggcccgccccccaaagcgaagccaaagcgaaggcaaaggccaagaaggcagggaaagggcc

SEQ ID NO: 237106 - RNA, 75 nt, Homo sapiens
aagaaggggggacaaacagagagacggcgaagagcagacggacagagcgggagccaccagcgccaaagggaagcc

SEQ ID NO: 237107 - RNA, 79 nt, Homo sapiens
gacccccaaagcgcgggaacagagcgcgcaaaaaccagcgggcacccggaaaagcaagggaccaggcccagagccgacg

SEQ ID NO: 237108 - RNA, 81 nt, Homo sapiens
agagcgccgcccgcacgaagagagcgcgaccaaagacgacaagacccagagcccaaacgagaaggaagccgcggaggaccg

SEQ ID NO: 237109 - RNA, 77 nt, Homo sapiens
aaaacacagagggcacacggcacagaccaggaccagcaacggagcgaggagcggccgaacagggggaggagacacgg

SEQ ID NO: 237110 - RNA, 78 nt, Homo sapiens
acgggcgcggagccggccccaggcagcgggcggcgccagcggagaacagcccgaccacggcaccaaccagcggacaca

SEQ ID NO: 237111 - RNA, 49 nt, Homo sapiens
ccaaaaggaaccgagacagaaagaggaccagcgaaaagggcgacagcaa

SEQ ID NO: 237112 - RNA, 75 nt, Homo sapiens
gcagacaaaagggccaaagaagggagagagcagcacgggcaaagagacccccaggacgccgcgggaagccaagcg

SEQ ID NO: 237113 - RNA, 38 nt, Homo sapiens
ggggagaggaggcaggcccgcgaagccaaacccggcac

SEQ ID NO: 237114 - RNA, 113 nt, Homo sapiens
gaaaacaggaacagagcgagggaggagagagggagagccaaagaagggaccaagaaaggcccagggaccaaagcccggacaaggcccgagcaccaggaccgcagaaggcccca

SEQ ID NO: 237115 - RNA, 74 nt, Homo sapiens
cgcccaaagcagacacaaagagaggagcagagacccagagacccgaaaaaaaccacaagcaaaacaggcagacc

SEQ ID NO: 237116 - RNA, 66 nt, Homo sapiens
caaacagcgcaggcccgaaggcagacgggacgacacaaccccgaaagccaacaggcagaccagaga

SEQ ID NO: 237117 - RNA, 73 nt, Homo sapiens
ccaaccgccacgacagcccaccaggccaccacgcggcgggccgggcacaggaagagggcggcacgcggccaga

SEQ ID NO: 237118 - RNA, 57 nt, Homo sapiens
cagagcggagcgcagaccgaggaaaaggagagaggagaaaaccggaagagaaaggcc

SEQ ID NO: 237119 - RNA, 70 nt, Homo sapiens
cgggacaacaagccggaggggcgcgggggacagagagagccacgggggcgaacaagggacacgagcacgc

SEQ ID NO: 237120 - RNA, 74 nt, Homo sapiens
aacaaaacagccagaccaaccggccaagaaacgcaagaagggagaaagcacaacgaagcagacaggggcagagg

SEQ ID NO: 237121 - RNA, 83 nt, Homo sapiens
gagagcaggagaaaaacggcagcaggcagcaaaacggaagaaggagagaacccaacgcaaaccaagagaaaagcacaaaacac

SEQ ID NO: 237122 - RNA, 81 nt, Homo sapiens
aacgagggcgcgcagacgacaaagagccgaacaagaaaggggcacaagaaaccacaagaaaaagaaagaggaacaaaagaa

SEQ ID NO: 237123 - RNA, 58 nt, Homo sapiens
caagccagagaacagcccccacgcagcccagaagggggaaagcccaccgacacccaga

SEQ ID NO: 237124 - RNA, 75 nt, Homo sapiens
gagcgaccacccggaaaggaggcagcgggaacgcagccaccggaaaggaaggcgcaacggcgagcgccccggaac

SEQ ID NO: 237125 - RNA, 82 nt, Homo sapiens
accgccagcgaccgagaagggaaccccaacacggcagccccgagaaccacagggacacccgcccccacccgggagagcgacc

SEQ ID NO: 237126 - RNA, 53 nt, Homo sapiens
ccacccagaggagcaaccggccggaggcagcaggccacccagacccaggcacc

SEQ ID NO: 237127 - RNA, 102 nt, Homo sapiens
cccaacaaaagcccaagcaccggggaccgcaggggggagagagccagacaaagacgaacagcaacgaagggggaacagaaaaggcaagaaggaacggaaggc

SEQ ID NO: 237128 - RNA, 75 nt, Homo sapiens
aggaggcaaccccgcccggaccaagcacccgaaagagcgaaagcccagacaggaagcaacgagggagaaggggca

SEQ ID NO: 237129 - RNA, 69 nt, Homo sapiens
ggaacgcaaggcccccgaccacacgcccgcgcgagaggcacagagccaagagcaccgcagaagaccagg

SEQ ID NO: 237130 - RNA, 78 nt, Homo sapiens
accgagagcgcgaaacgcacgagaaggaggccccaacgaaaggcaagaacaagaacggcaacgaaccccacagacgaa

SEQ ID NO: 237131 - RNA, 58 nt, Homo sapiens
gaagcgagccacgaaacacaaggaaagcgacgacgacccgggaaaaggagaagagaag

SEQ ID NO: 237132 - RNA, 91 nt, Homo sapiens
gcgcacacagcaagcacgaggagaaacaaaggcgcgggggcaagagaccaagaccccccagaggagcagagcaaggacggcagaacgaaga

SEQ ID NO: 237133 - RNA, 83 nt, Homo sapiens
gccccagcgcgcgcccggacagacaagcaagccccgcagggagccggagcaggggccggaagcacagagagacggaccgaaga

SEQ ID NO: 237134 - RNA, 94 nt, Homo sapiens
aggggggccggccagccacccaaggccccggacgccggagaggcaccggaccgacaacggcaagcggagaagagcaaggccgaaccgagaggaa

SEQ ID NO: 237135 - RNA, 78 nt, Homo sapiens
cagcaagcccaaagacagccccccgggcagaagaaacaccaccagcgagcaccccagagagagccaacacacagagaa
